United States Patent Application Publication US 2007/0111227 A1 - sequence listing, part 2

SEQ ID NO: 38551 - DNA, 17 bp, Arabidopsis thaliana
aggagattcagcccttt

SEQ ID NO: 38552 - DNA, 17 bp, Arabidopsis thaliana
aggagattctagtccga

SEQ ID NO: 38553 - DNA, 17 bp, Arabidopsis thaliana
aggagattctccacatg

SEQ ID NO: 38554 - DNA, 17 bp, Arabidopsis thaliana
aggagattctccagact

SEQ ID NO: 38555 - DNA, 17 bp, Arabidopsis thaliana
aggagattctcgagact

SEQ ID NO: 38556 - DNA, 17 bp, Arabidopsis thaliana
aggagattctctctagg

SEQ ID NO: 38557 - DNA, 17 bp, Arabidopsis thaliana
aggagattctgggtcga

SEQ ID NO: 38558 - DNA, 17 bp, Arabidopsis thaliana
aggagattctgtatcta

SEQ ID NO: 38559 - DNA, 17 bp, Arabidopsis thaliana
aggagattgagaatgtg

SEQ ID NO: 38560 - DNA, 17 bp, Arabidopsis thaliana
aggagattggacacgca

SEQ ID NO: 38561 - DNA, 17 bp, Arabidopsis thaliana
aggagattggtgatgat

SEQ ID NO: 38562 - DNA, 17 bp, Arabidopsis thaliana
aggagattgtggagtgt

SEQ ID NO: 38563 - DNA, 17 bp, Arabidopsis thaliana
aggagatttcaccgtta

SEQ ID NO: 38564 - DNA, 17 bp, Arabidopsis thaliana
aggagatttctgcaggt

SEQ ID NO: 38565 - DNA, 17 bp, Arabidopsis thaliana
aggagatttgtcacgtt

SEQ ID NO: 38566 - DNA, 17 bp, Arabidopsis thaliana
aggagattttgccattt

SEQ ID NO: 38567 - DNA, 17 bp, Arabidopsis thaliana
aggagatttttcggcgt

SEQ ID NO: 38568 - DNA, 17 bp, Arabidopsis thaliana
aggagcaccgttcaccg

SEQ ID NO: 38569 - DNA, 17 bp, Arabidopsis thaliana
aggagcactatgcgtgg

SEQ ID NO: 38570 - DNA, 17 bp, Arabidopsis thaliana
aggagcactcgtcattc

SEQ ID NO: 38571 - DNA, 17 bp, Arabidopsis thaliana
aggagcagcaggacctt

SEQ ID NO: 38572 - DNA, 17 bp, Arabidopsis thaliana
aggagcagcctagagct

SEQ ID NO: 38573 - DNA, 17 bp, Arabidopsis thaliana
aggagcaggcgctttag

SEQ ID NO: 38574 - DNA, 17 bp, Arabidopsis thaliana
aggagcagtctgcgtga

SEQ ID NO: 38575 - DNA, 17 bp, Arabidopsis thaliana
aggagccagatccatcg

SEQ ID NO: 38576 - DNA, 17 bp, Arabidopsis thaliana
aggagccatcatcgacg

SEQ ID NO: 38577 - DNA, 17 bp, Arabidopsis thaliana
aggagcccataccacca

SEQ ID NO: 38578 - DNA, 17 bp, Arabidopsis thaliana
aggagccctccccgttc

SEQ ID NO: 38579 - DNA, 17 bp, Arabidopsis thaliana
aggagccctgggctctg

SEQ ID NO: 38580 - DNA, 17 bp, Arabidopsis thaliana
aggagcccttttcattt

SEQ ID NO: 38581 - DNA, 17 bp, Arabidopsis thaliana
aggagccgccgaagcaa

SEQ ID NO: 38582 - DNA, 17 bp, Arabidopsis thaliana
aggagccgcgatgatcg

SEQ ID NO: 38583 - DNA, 17 bp, Arabidopsis thaliana
aggagcctgtgacggag

SEQ ID NO: 38584 - DNA, 17 bp, Arabidopsis thaliana
aggagcctgttcccgag

SEQ ID NO: 38585 - DNA, 17 bp, Arabidopsis thaliana
aggagcgacgggcggtg

SEQ ID NO: 38586 - DNA, 17 bp, Arabidopsis thaliana
aggagcgatttgtctgg

SEQ ID NO: 38587 - DNA, 17 bp, Arabidopsis thaliana
aggagcgccagagaggg

SEQ ID NO: 38588 - DNA, 17 bp, Arabidopsis thaliana
aggagcggaacctctat

SEQ ID NO: 38589 - DNA, 17 bp, Arabidopsis thaliana
aggagcggacgacttct

SEQ ID NO: 38590 - DNA, 17 bp, Arabidopsis thaliana
aggagcggcaacagcgg

SEQ ID NO: 38591 - DNA, 17 bp, Arabidopsis thaliana
aggagcggtgtccgtat

SEQ ID NO: 38592 - DNA, 17 bp, Arabidopsis thaliana
aggagcggttcacatta

SEQ ID NO: 38593 - DNA, 17 bp, Arabidopsis thaliana
aggagcgtgggagacac

SEQ ID NO: 38594 - DNA, 17 bp, Arabidopsis thaliana
aggagctgcgacaggag

SEQ ID NO: 38595 - DNA, 17 bp, Arabidopsis thaliana
aggagctgcttccactt

SEQ ID NO: 38596 - DNA, 17 bp, Arabidopsis thaliana
aggaggaaacgatcgag

SEQ ID NO: 38597 - DNA, 17 bp, Arabidopsis thaliana
aggaggaaaggctccgg

SEQ ID NO: 38598 - DNA, 17 bp, Arabidopsis thaliana
aggaggaagtgtgttat

SEQ ID NO: 38599 - DNA, 17 bp, Arabidopsis thaliana
aggaggaccaaatttca

SEQ ID NO: 38600 - DNA, 17 bp, Arabidopsis thaliana
aggaggaccttcagagg

SEQ ID NO: 38601 - DNA, 17 bp, Arabidopsis thaliana
aggaggacgaggctcca

SEQ ID NO: 38602 - DNA, 17 bp, Arabidopsis thaliana
aggaggactatatggcg

SEQ ID NO: 38603 - DNA, 17 bp, Arabidopsis thaliana
aggaggacttcctcaaa

SEQ ID NO: 38604 - DNA, 17 bp, Arabidopsis thaliana
aggaggacttcctcgaa

SEQ ID NO: 38605 - DNA, 17 bp, Arabidopsis thaliana
aggaggagaggaacggg

SEQ ID NO: 38606 - DNA, 17 bp, Arabidopsis thaliana
aggaggagctgacatca

SEQ ID NO: 38607 - DNA, 17 bp, Arabidopsis thaliana
aggaggagctgacgctg

SEQ ID NO: 38608 - DNA, 17 bp, Arabidopsis thaliana
aggaggagctgacgctt

SEQ ID NO: 38609 - DNA, 17 bp, Arabidopsis thaliana
aggaggaggtagttgca

SEQ ID NO: 38610 - DNA, 17 bp, Arabidopsis thaliana
aggaggaggtgacgctg

SEQ ID NO: 38611 - DNA, 17 bp, Arabidopsis thaliana
aggaggagtgtagacag

SEQ ID NO: 38612 - DNA, 17 bp, Arabidopsis thaliana
aggaggagtttgctgag

SEQ ID NO: 38613 - DNA, 17 bp, Arabidopsis thaliana
aggaggatactcttagg

SEQ ID NO: 38614 - DNA, 17 bp, Arabidopsis thaliana
aggaggataggagttct

SEQ ID NO: 38615 - DNA, 17 bp, Arabidopsis thaliana
aggaggatccgaagacg

SEQ ID NO: 38616 - DNA, 17 bp, Arabidopsis thaliana
aggaggatccgaagtcg

SEQ ID NO: 38617 - DNA, 17 bp, Arabidopsis thaliana
aggaggatctggcttgt

SEQ ID NO: 38618 - DNA, 17 bp, Arabidopsis thaliana
aggaggattacgggctt

SEQ ID NO: 38619 - DNA, 17 bp, Arabidopsis thaliana
aggaggattacgggttt

SEQ ID NO: 38620 - DNA, 17 bp, Arabidopsis thaliana
aggaggattatgtttcg

SEQ ID NO: 38621 - DNA, 17 bp, Arabidopsis thaliana
aggaggattgtgttttg

SEQ ID NO: 38622 - DNA, 17 bp, Arabidopsis thaliana
aggaggatttgtcttgg

SEQ ID NO: 38623 - DNA, 17 bp, Arabidopsis thaliana
aggaggcaggcggatat

SEQ ID NO: 38624 - DNA, 17 bp, Arabidopsis thaliana
aggaggccattgtagaa

SEQ ID NO: 38625 - DNA, 17 bp, Arabidopsis thaliana
aggaggccgacagttgg

SEQ ID NO: 38626 - DNA, 17 bp, Arabidopsis thaliana
aggaggccgccagtcat

SEQ ID NO: 38627 - DNA, 17 bp, Arabidopsis thaliana
aggaggcgatttttgaa

SEQ ID NO: 38628 - DNA, 17 bp, Arabidopsis thaliana
aggaggcgcagcgggca

SEQ ID NO: 38629 - DNA, 17 bp, Arabidopsis thaliana
aggaggcggtggtgtta

SEQ ID NO: 38630 - DNA, 17 bp, Arabidopsis thaliana
aggaggctacacgccag

SEQ ID NO: 38631 - DNA, 17 bp, Arabidopsis thaliana
aggaggctacacgccgg

SEQ ID NO: 38632 - DNA, 17 bp, Arabidopsis thaliana
aggaggctctgggccga

SEQ ID NO: 38633 - DNA, 17 bp, Arabidopsis thaliana
aggagggaaaactgtga

SEQ ID NO: 38634 - DNA, 17 bp, Arabidopsis thaliana
aggagggaacctgcgga

SEQ ID NO: 38635 - DNA, 17 bp, Arabidopsis thaliana
aggagggagacgacgag

SEQ ID NO: 38636 - DNA, 17 bp, Arabidopsis thaliana
aggagggagcgaagaag

SEQ ID NO: 38637 - DNA, 17 bp, Arabidopsis thaliana
aggagggcacgtctgcc

SEQ ID NO: 38638 - DNA, 17 bp, Arabidopsis thaliana
aggagggctctcgatca

SEQ ID NO: 38639 - DNA, 17 bp, Arabidopsis thaliana
aggagggctgtctttgg

SEQ ID NO: 38640 - DNA, 17 bp, Arabidopsis thaliana
aggaggggattccacca

SEQ ID NO: 38641 - DNA, 17 bp, Arabidopsis thaliana
aggaggtagttacggaa

SEQ ID NO: 38642 - DNA, 17 bp, Arabidopsis thaliana
aggaggtcactcgaccg

SEQ ID NO: 38643 - DNA, 17 bp, Arabidopsis thaliana
aggaggtccaagttcgt

SEQ ID NO: 38644 - DNA, 17 bp, Arabidopsis thaliana
aggaggtcctctgcgta

SEQ ID NO: 38645 - DNA, 17 bp, Arabidopsis thaliana
aggaggtctatgggatt

SEQ ID NO: 38646 - DNA, 17 bp, Arabidopsis thaliana
aggaggtctcagacccg

SEQ ID NO: 38647 - DNA, 17 bp, Arabidopsis thaliana
aggaggtgccagtccct

SEQ ID NO: 38648 - DNA, 17 bp, Arabidopsis thaliana
aggaggtgcgatcttta

SEQ ID NO: 38649 - DNA, 17 bp, Arabidopsis thaliana
aggaggtgctcttggcc

SEQ ID NO: 38650 - DNA, 17 bp, Arabidopsis thaliana
aggaggtggtggcgact

SEQ ID NO: 38651 - DNA, 17 bp, Arabidopsis thaliana
aggaggtgtcatttgtc

SEQ ID NO: 38652 - DNA, 17 bp, Arabidopsis thaliana
aggaggtgtcgctctag

SEQ ID NO: 38653 - DNA, 17 bp, Arabidopsis thaliana
aggaggtgtcgtctgtc

SEQ ID NO: 38654 - DNA, 17 bp, Arabidopsis thaliana
aggaggtgttgcgttta

SEQ ID NO: 38655 - DNA, 17 bp, Arabidopsis thaliana
aggaggttccatcttat

SEQ ID NO: 38656 - DNA, 17 bp, Arabidopsis thaliana
aggaggttcgtcaaggg

SEQ ID NO: 38657 - DNA, 17 bp, Arabidopsis thaliana
aggaggttctgaaccga

SEQ ID NO: 38658 - DNA, 17 bp, Arabidopsis thaliana
aggaggttctgaccgaa

SEQ ID NO: 38659 - DNA, 17 bp, Arabidopsis thaliana
aggaggttctgacggac

SEQ ID NO: 38660 - DNA, 17 bp, Arabidopsis thaliana
aggaggttctgagccga

SEQ ID NO: 38661 - DNA, 17 bp, Arabidopsis thaliana
aggaggttctgagccgg

SEQ ID NO: 38662 - DNA, 17 bp, Arabidopsis thaliana
aggaggttctgaggcga

SEQ ID NO: 38663 - DNA, 17 bp, Arabidopsis thaliana
aggaggttctgagggag

SEQ ID NO: 38664 - DNA, 17 bp, Arabidopsis thaliana
aggaggttctggaccga

SEQ ID NO: 38665 - DNA, 17 bp, Arabidopsis thaliana
aggaggttctggccgaa

SEQ ID NO: 38666 - DNA, 17 bp, Arabidopsis thaliana
aggaggttctggccgga

SEQ ID NO: 38667 - DNA, 17 bp, Arabidopsis thaliana
aggaggttctgggctga

SEQ ID NO: 38668 - DNA, 17 bp, Arabidopsis thaliana
aggaggttctggggaaa

SEQ ID NO: 38669 - DNA, 17 bp, Arabidopsis thaliana
aggaggttctgggtcga

SEQ ID NO: 38670 - DNA, 17 bp, Arabidopsis thaliana
aggaggttctggttcga

SEQ ID NO: 38671 - DNA, 17 bp, Arabidopsis thaliana
aggaggttgagaaccac

SEQ ID NO: 38672 - DNA, 17 bp, Arabidopsis thaliana
aggaggttgagaaccat

SEQ ID NO: 38673 - DNA, 17 bp, Arabidopsis thaliana
aggaggttgggccgaag

SEQ ID NO: 38674 - DNA, 17 bp, Arabidopsis thaliana
aggaggtttcagaatcc

SEQ ID NO: 38675 - DNA, 17 bp, Arabidopsis thaliana
aggaggtttccagagac

SEQ ID NO: 38676 - DNA, 17 bp, Arabidopsis thaliana
aggaggtttggccgaag

SEQ ID NO: 38677 - DNA, 17 bp, Arabidopsis thaliana
aggaggtttgttagtca

SEQ ID NO: 38678 - DNA, 17 bp, Arabidopsis thaliana
aggaggttttgagtcga

SEQ ID NO: 38679 - DNA, 17 bp, Arabidopsis thaliana
aggaggttttgcgccga

SEQ ID NO: 38680 - DNA, 17 bp, Arabidopsis thaliana
aggaggttttggaccgg

SEQ ID NO: 38681 - DNA, 17 bp, Arabidopsis thaliana
aggaggttttggactga

SEQ ID NO: 38682 - DNA, 17 bp, Arabidopsis thaliana
aggaggttttggccgaa

SEQ ID NO: 38683 - DNA, 17 bp, Arabidopsis thaliana
aggaggttttggggcga

SEQ ID NO: 38684 - DNA, 17 bp, Arabidopsis thaliana
aggaggttttgggttga

SEQ ID NO: 38685 - DNA, 17 bp, Arabidopsis thaliana
aggagtaaggccctgtt

SEQ ID NO: 38686 - DNA, 17 bp, Arabidopsis thaliana
aggagtacaaggctagg

SEQ ID NO: 38687 - DNA, 17 bp, Arabidopsis thaliana
aggagtacaaggttaag

SEQ ID NO: 38688 - DNA, 17 bp, Arabidopsis thaliana
aggagtacaaggttagg

SEQ ID NO: 38689 - DNA, 17 bp, Arabidopsis thaliana
aggagtacaaggttggg

SEQ ID NO: 38690 - DNA, 17 bp, Arabidopsis thaliana
aggagtaccaacgatat

SEQ ID NO: 38691 - DNA, 17 bp, Arabidopsis thaliana
aggagtactcagcacca

SEQ ID NO: 38692 - DNA, 17 bp, Arabidopsis thaliana
aggagtactccgcaccg

SEQ ID NO: 38693 - DNA, 17 bp, Arabidopsis thaliana
aggagtagtcagaccgc

SEQ ID NO: 38694 - DNA, 17 bp, Arabidopsis thaliana
aggagtagttagaccgc

SEQ ID NO: 38695 - DNA, 17 bp, Arabidopsis thaliana
aggagtatctgagagag

SEQ ID NO: 38696 - DNA, 17 bp, Arabidopsis thaliana
aggagtatcttgtttcg

SEQ ID NO: 38697 - DNA, 17 bp, Arabidopsis thaliana
aggagtatgtccacgtg

SEQ ID NO: 38698 - DNA, 17 bp, Arabidopsis thaliana
aggagtcaaggtcaatt

SEQ ID NO: 38699 - DNA, 17 bp, Arabidopsis thaliana
aggagtccaggttccag

SEQ ID NO: 38700 - DNA, 17 bp, Arabidopsis thaliana
aggagtccgacaggcaa

SEQ ID NO: 38701 - DNA, 17 bp, Arabidopsis thaliana
aggagtcggaggatttg

SEQ ID NO: 38702 - DNA, 17 bp, Arabidopsis thaliana
aggagtctgacatgtgt

SEQ ID NO: 38703 - DNA, 17 bp, Arabidopsis thaliana
aggagtgaaccatccgc

SEQ ID NO: 38704 - DNA, 17 bp, Arabidopsis thaliana
aggagtgagatcgtcga

SEQ ID NO: 38705 - DNA, 17 bp, Arabidopsis thaliana
aggagtgcgacaactgt

SEQ ID NO: 38706 - DNA, 17 bp, Arabidopsis thaliana
aggagtgcgggacaagt

SEQ ID NO: 38707 - DNA, 17 bp, Arabidopsis thaliana
aggagtgcggtgcggtt

SEQ ID NO: 38708 - DNA, 17 bp, Arabidopsis thaliana
aggagtggagcctgcgg

SEQ ID NO: 38709 - DNA, 17 bp, Arabidopsis thaliana
aggagtggagcctgggg

SEQ ID NO: 38710 - DNA, 17 bp, Arabidopsis thaliana
aggagtggcaccgtggg

SEQ ID NO: 38711 - DNA, 17 bp, Arabidopsis thaliana
aggagtggcgacgccgg

SEQ ID NO: 38712 - DNA, 17 bp, Arabidopsis thaliana
aggagtggctagtgatt

SEQ ID NO: 38713 - DNA, 17 bp, Arabidopsis thaliana
aggagtggtcagacacg

SEQ ID NO: 38714 - DNA, 17 bp, Arabidopsis thaliana
aggagtgtccaaaagct

SEQ ID NO: 38715 - DNA, 17 bp, Arabidopsis thaliana
aggagtgtccaaaagtt

SEQ ID NO: 38716 - DNA, 17 bp, Arabidopsis thaliana
aggagtgtccaacagcc

SEQ ID NO: 38717 - DNA, 17 bp, Arabidopsis thaliana
aggagtgtctgcagttc

SEQ ID NO: 38718 - DNA, 17 bp, Arabidopsis thaliana
aggagtgtgtgagtggg

SEQ ID NO: 38719 - DNA, 17 bp, Arabidopsis thaliana
aggagtgttgattgctg

SEQ ID NO: 38720 - DNA, 17 bp, Arabidopsis thaliana
aggagtgttgattggtg

SEQ ID NO: 38721 - DNA, 17 bp, Arabidopsis thaliana
aggagttagtgatcgaa

SEQ ID NO: 38722 - DNA, 17 bp, Arabidopsis thaliana
aggagttcaggtggtga

SEQ ID NO: 38723 - DNA, 17 bp, Arabidopsis thaliana
aggagttctttcgtact

SEQ ID NO: 38724 - DNA, 17 bp, Arabidopsis thaliana
aggagttgaaccttggg

SEQ ID NO: 38725 - DNA, 17 bp, Arabidopsis thaliana
aggagttgacacgggga

SEQ ID NO: 38726 - DNA, 17 bp, Arabidopsis thaliana
aggagttgaccttggct

SEQ ID NO: 38727 - DNA, 17 bp, Arabidopsis thaliana
aggagttgacgcagctt

SEQ ID NO: 38728 - DNA, 17 bp, Arabidopsis thaliana
aggagttgactcagctt

SEQ ID NO: 38729 - DNA, 17 bp, Arabidopsis thaliana
aggagttgcagagtctg

SEQ ID NO: 38730 - DNA, 17 bp, Arabidopsis thaliana
aggagttgctgcttagg

SEQ ID NO: 38731 - DNA, 17 bp, Arabidopsis thaliana
aggagttgtgaaacgtc

SEQ ID NO: 38732 - DNA, 17 bp, Arabidopsis thaliana
aggagttgttttacccg

SEQ ID NO: 38733 - DNA, 17 bp, Arabidopsis thaliana
aggagtttcctttggac

SEQ ID NO: 38734 - DNA, 17 bp, Arabidopsis thaliana
aggagtttcgatcgctt

SEQ ID NO: 38735 - DNA, 17 bp, Arabidopsis thaliana
aggagtttctggccgaa

SEQ ID NO: 38736 - DNA, 17 bp, Arabidopsis thaliana
aggagtttgtggacatt

SEQ ID NO: 38737 - DNA, 17 bp, Arabidopsis thaliana
aggagttttgatagtac

SEQ ID NO: 38738 - DNA, 17 bp, Arabidopsis thaliana
aggagttttggatgtta

SEQ ID NO: 38739 - DNA, 17 bp, Arabidopsis thaliana
aggataaaagtgcattc

SEQ ID NO: 38740 - DNA, 17 bp, Arabidopsis thaliana
aggataaacattcgttg

SEQ ID NO: 38741 - DNA, 17 bp, Arabidopsis thaliana
aggataaactcgtctat

SEQ ID NO: 38742 - DNA, 17 bp, Arabidopsis thaliana
aggataaccgaatcagc

SEQ ID NO: 38743 - DNA, 17 bp, Arabidopsis thaliana
aggataagcttgcgggc

SEQ ID NO: 38744 - DNA, 17 bp, Arabidopsis thaliana
aggataaggttgcggtt

SEQ ID NO: 38745 - DNA, 17 bp, Arabidopsis thaliana
aggataaggttgtggtt

SEQ ID NO: 38746 - DNA, 17 bp, Arabidopsis thaliana
aggataatccggtctgt

SEQ ID NO: 38747 - DNA, 17 bp, Arabidopsis thaliana
aggataatgaggcactt

SEQ ID NO: 38748 - DNA, 17 bp, Arabidopsis thaliana
aggataatggcacggaa

SEQ ID NO: 38749 - DNA, 17 bp, Arabidopsis thaliana
aggataattgccttcca

SEQ ID NO: 38750 - DNA, 17 bp, Arabidopsis thaliana
aggatacaaacgggatg

SEQ ID NO: 38751 - DNA, 17 bp, Arabidopsis thaliana
aggatacacaggttgaa

SEQ ID NO: 38752 - DNA, 17 bp, Arabidopsis thaliana
aggatacacctgatcct

SEQ ID NO: 38753 - DNA, 17 bp, Arabidopsis thaliana
aggatactaggcgctgt

SEQ ID NO: 38754 - DNA, 17 bp, Arabidopsis thaliana
aggatactcggctctca

SEQ ID NO: 38755 - DNA, 17 bp, Arabidopsis thaliana
aggatagaggcctacca

SEQ ID NO: 38756 - DNA, 17 bp, Arabidopsis thaliana
aggatagatggctagtg

SEQ ID NO: 38757 - DNA, 17 bp, Arabidopsis thaliana
aggatagccttttcaac

SEQ ID NO: 38758 - DNA, 17 bp, Arabidopsis thaliana
aggataggagttctggc

SEQ ID NO: 38759 - DNA, 17 bp, Arabidopsis thaliana
aggataggcagtgttcg

SEQ ID NO: 38760 - DNA, 17 bp, Arabidopsis thaliana
aggataggtccgtcagc

SEQ ID NO: 38761 - DNA, 17 bp, Arabidopsis thaliana
aggataggtgaccttcc

SEQ ID NO: 38762 - DNA, 17 bp, Arabidopsis thaliana
aggatagtggcctacca

SEQ ID NO: 38763 - DNA, 17 bp, Arabidopsis thaliana
aggatagtggcctaccg

SEQ ID NO: 38764 - DNA, 17 bp, Arabidopsis thaliana
aggatagttttgcatgc

SEQ ID NO: 38765 - DNA, 17 bp, Arabidopsis thaliana
aggatatccacggaaaa

SEQ ID NO: 38766 - DNA, 17 bp, Arabidopsis thaliana
aggatcaaaagctcgag

SEQ ID NO: 38767 - DNA, 17 bp, Arabidopsis thaliana
aggatcaaacataggcc

SEQ ID NO: 38768 - DNA, 17 bp, Arabidopsis thaliana
aggatcaacatgatttt

SEQ ID NO: 38769 - DNA, 17 bp, Arabidopsis thaliana
aggatcaacgaccacaa

SEQ ID NO: 38770 - DNA, 17 bp, Arabidopsis thaliana
aggatcaacggcccata

SEQ ID NO: 38771 - DNA, 17 bp, Arabidopsis thaliana
aggatcaacggccgtgt

SEQ ID NO: 38772 - DNA, 17 bp, Arabidopsis thaliana
aggatcaacggtctacc

SEQ ID NO: 38773 - DNA, 17 bp, Arabidopsis thaliana
aggatcaactctttggt

SEQ ID NO: 38774 - DNA, 17 bp, Arabidopsis thaliana
aggatcaagaggttggg

SEQ ID NO: 38775 - DNA, 17 bp, Arabidopsis thaliana
aggatcaagagtctggg

SEQ ID NO: 38776 - DNA, 17 bp, Arabidopsis thaliana
aggatcaagcacccgtc

SEQ ID NO: 38777 - DNA, 17 bp, Arabidopsis thaliana
aggatcaatccaccgcg

SEQ ID NO: 38778 - DNA, 17 bp, Arabidopsis thaliana
aggatcaattatgggat

SEQ ID NO: 38779 - DNA, 17 bp, Arabidopsis thaliana
aggatcaatttcccgct

SEQ ID NO: 38780 - DNA, 17 bp, Arabidopsis thaliana
aggatcacactgatgct

SEQ ID NO: 38781 - DNA, 17 bp, Arabidopsis thaliana
aggatcacccaccgcct

SEQ ID NO: 38782 - DNA, 17 bp, Arabidopsis thaliana
aggatcagcctgcgaat

SEQ ID NO: 38783 - DNA, 17 bp, Arabidopsis thaliana
aggatcagcgaggagtg

SEQ ID NO: 38784 - DNA, 17 bp, Arabidopsis thaliana
aggatcagctcttttca

SEQ ID NO: 38785 - DNA, 17 bp, Arabidopsis thaliana
aggatcaggtgtatcct

SEQ ID NO: 38786 - DNA, 17 bp, Arabidopsis thaliana
aggatcaggttaaagtt

SEQ ID NO: 38787 - DNA, 17 bp, Arabidopsis thaliana
aggatcatacggatgaa

SEQ ID NO: 38788 - DNA, 17 bp, Arabidopsis thaliana
aggatcatggtcgtgca

SEQ ID NO: 38789 - DNA, 17 bp, Arabidopsis thaliana
aggatcatgttttgccc

SEQ ID NO: 38790 - DNA, 17 bp, Arabidopsis thaliana
aggatcatttggagcgt

SEQ ID NO: 38791 - DNA, 17 bp, Arabidopsis thaliana
aggatcatttgtcaggc

SEQ ID NO: 38792 - DNA, 17 bp, Arabidopsis thaliana
aggatcattttcttctc

SEQ ID NO: 38793 - DNA, 17 bp, Arabidopsis thaliana
aggatccacctgtctga

SEQ ID NO: 38794 - DNA, 17 bp, Arabidopsis thaliana
aggatccagagttcgct

SEQ ID NO: 38795 - DNA, 17 bp, Arabidopsis thaliana
aggatccagcgaccagc

SEQ ID NO: 38796 - DNA, 17 bp, Arabidopsis thaliana
aggatccagttgggttt

SEQ ID NO: 38797 - DNA, 17 bp, Arabidopsis thaliana
aggatccatttgccctg

SEQ ID NO: 38798 - DNA, 17 bp, Arabidopsis thaliana
aggatcccatcagaact

SEQ ID NO: 38799 - DNA, 17 bp, Arabidopsis thaliana
aggatccccgcagatcc

SEQ ID NO: 38800 - DNA, 17 bp, Arabidopsis thaliana
aggatccctcgcgccga

SEQ ID NO: 38801 - DNA, 17 bp, Arabidopsis thaliana
aggatccgaacagagaa

SEQ ID NO: 38802 - DNA, 17 bp, Arabidopsis thaliana
aggatccgactattttc

SEQ ID NO: 38803 - DNA, 17 bp, Arabidopsis thaliana
aggatccggttgcgggt

SEQ ID NO: 38804 - DNA, 17 bp, Arabidopsis thaliana
aggatccggttgtgggt

SEQ ID NO: 38805 - DNA, 17 bp, Arabidopsis thaliana
aggatcctcttcttgac

SEQ ID NO: 38806 - DNA, 17 bp, Arabidopsis thaliana
aggatcctgttcatttg

SEQ ID NO: 38807 - DNA, 17 bp, Arabidopsis thaliana
aggatcgaaacctgctc

SEQ ID NO: 38808 - DNA, 17 bp, Arabidopsis thaliana
aggatcgaaacctggct

SEQ ID NO: 38809 - DNA, 17 bp, Arabidopsis thaliana
aggatcgacaacgagac

SEQ ID NO: 38810 - DNA, 17 bp, Arabidopsis thaliana
aggatcgagcatcttct

SEQ ID NO: 38811 - DNA, 17 bp, Arabidopsis thaliana
aggatcgaggctttact

SEQ ID NO: 38812 - DNA, 17 bp, Arabidopsis thaliana
aggatcgatcagtctat

SEQ ID NO: 38813 - DNA, 17 bp, Arabidopsis thaliana
aggatcgatgttacatg

SEQ ID NO: 38814 - DNA, 17 bp, Arabidopsis thaliana
aggatcgcaacctggct

SEQ ID NO: 38815 - DNA, 17 bp, Arabidopsis thaliana
aggatcgctcgatttcg

SEQ ID NO: 38816 - DNA, 17 bp, Arabidopsis thaliana
aggatcgctggggttgc

SEQ ID NO: 38817 - DNA, 17 bp, Arabidopsis thaliana
aggatcggaacctggct

SEQ ID NO: 38818 - DNA, 17 bp, Arabidopsis thaliana
aggatcggagacaatca

SEQ ID NO: 38819 - DNA, 17 bp, Arabidopsis thaliana
aggatcggataaaatgc

SEQ ID NO: 38820 - DNA, 17 bp, Arabidopsis thaliana
aggatcggattcaccgt

SEQ ID NO: 38821 - DNA, 17 bp, Arabidopsis thaliana
aggatcggccggggaga

SEQ ID NO: 38822 - DNA, 17 bp, Arabidopsis thaliana
aggatcggtcaacgccg

SEQ ID NO: 38823 - DNA, 17 bp, Arabidopsis thaliana
aggatcggtcggggaga

SEQ ID NO: 38824 - DNA, 17 bp, Arabidopsis thaliana
aggatcggtgaagtgtg

SEQ ID NO: 38825 - DNA, 17 bp, Arabidopsis thaliana
aggatcgtaaccgaacc

SEQ ID NO: 38826 - DNA, 17 bp, Arabidopsis thaliana
aggatcgtaacctggct

SEQ ID NO: 38827 - DNA, 17 bp, Arabidopsis thaliana
aggatcgtatggatttt

SEQ ID NO: 38828 - DNA, 17 bp, Arabidopsis thaliana
aggatcgtcgttcgggt

SEQ ID NO: 38829 - DNA, 17 bp, Arabidopsis thaliana
aggatcgtctgtttgtg

SEQ ID NO: 38830 - DNA, 17 bp, Arabidopsis thaliana
aggatcgtgccacatgt

SEQ ID NO: 38831 - DNA, 17 bp, Arabidopsis thaliana
aggatcgtgccaggtgt

SEQ ID NO: 38832 - DNA, 17 bp, Arabidopsis thaliana
aggatcgtgccatgtgt

SEQ ID NO: 38833 - DNA, 17 bp, Arabidopsis thaliana
aggatcgttggctggga

SEQ ID NO: 38834 - DNA, 17 bp, Arabidopsis thaliana
aggatctaaccacagtt

SEQ ID NO: 38835 - DNA, 17 bp, Arabidopsis thaliana
aggatctaagcaccaac

SEQ ID NO: 38836 - DNA, 17 bp, Arabidopsis thaliana
aggatctaatggaactt

SEQ ID NO: 38837 - DNA, 17 bp, Arabidopsis thaliana
aggatctaccgaaacgc

SEQ ID NO: 38838 - DNA, 17 bp, Arabidopsis thaliana
aggatctacggtgctgc

SEQ ID NO: 38839 - DNA, 17 bp, Arabidopsis thaliana
aggatctactgccaacg

SEQ ID NO: 38840 - DNA, 17 bp, Arabidopsis thaliana
aggatctaggagacctt

SEQ ID NO: 38841 - DNA, 17 bp, Arabidopsis thaliana
aggatctagggatttag

SEQ ID NO: 38842 - DNA, 17 bp, Arabidopsis thaliana
aggatctatccactgct

SEQ ID NO: 38843 - DNA, 17 bp, Arabidopsis thaliana
aggatctcaaacttctg

SEQ ID NO: 38844 - DNA, 17 bp, Arabidopsis thaliana
aggatctcacccgtgct

SEQ ID NO: 38845 - DNA, 17 bp, Arabidopsis thaliana
aggatctcacccgtggt

SEQ ID NO: 38846 - DNA, 17 bp, Arabidopsis thaliana
aggatctcagagatagg

SEQ ID NO: 38847 - DNA, 17 bp, Arabidopsis thaliana
aggatctcagatgagcc

SEQ ID NO: 38848 - DNA, 17 bp, Arabidopsis thaliana
aggatctcaggttcgag

SEQ ID NO: 38849 - DNA, 17 bp, Arabidopsis thaliana
aggatctctataagtcg

SEQ ID NO: 38850 - DNA, 17 bp, Arabidopsis thaliana
aggatctctgttttgct

SEQ ID NO: 38851 - DNA, 17 bp, Arabidopsis thaliana
aggatctgacacccgtc

SEQ ID NO: 38852 - DNA, 17 bp, Arabidopsis thaliana
aggatctgagaccgact

SEQ ID NO: 38853 - DNA, 17 bp, Arabidopsis thaliana
aggatctgagcctgccg

SEQ ID NO: 38854 - DNA, 17 bp, Arabidopsis thaliana
aggatctgagcctgtcg

SEQ ID NO: 38855 - DNA, 17 bp, Arabidopsis thaliana
aggatctgaggtgttgc

SEQ ID NO: 38856 - DNA, 17 bp, Arabidopsis thaliana
aggatctgcacctgttg

SEQ ID NO: 38857 - DNA, 17 bp, Arabidopsis thaliana
aggatctgccgtaactt

SEQ ID NO: 38858 - DNA, 17 bp, Arabidopsis thaliana
aggatctgcggattcaa

SEQ ID NO: 38859 - DNA, 17 bp, Arabidopsis thaliana
aggatctgcttcttgtg

SEQ ID NO: 38860 - DNA, 17 bp, Arabidopsis thaliana
aggatctggttcctggt

SEQ ID NO: 38861 - DNA, 17 bp, Arabidopsis thaliana
aggatcttaacctggct

SEQ ID NO: 38862 - DNA, 17 bp, Arabidopsis thaliana
aggatcttacgggtcgg

SEQ ID NO: 38863 - DNA, 17 bp, Arabidopsis thaliana
aggatcttgagcttttt

SEQ ID NO: 38864 - DNA, 17 bp, Arabidopsis thaliana
aggatcttgattgtgtt

SEQ ID NO: 38865 - DNA, 17 bp, Arabidopsis thaliana
aggatcttggtcttggc

SEQ ID NO: 38866 - DNA, 17 bp, Arabidopsis thaliana
aggatgaacgctggcgg

SEQ ID NO: 38867 - DNA, 17 bp, Arabidopsis thaliana
aggatgacctgttatct

SEQ ID NO: 38868 - DNA, 17 bp, Arabidopsis thaliana
aggatgacggaatgccg

SEQ ID NO: 38869 - DNA, 17 bp, Arabidopsis thaliana
aggatgagtgacctccc

SEQ ID NO: 38870 - DNA, 17 bp, Arabidopsis thaliana
aggatgagtgaccttcc

SEQ ID NO: 38871 - DNA, 17 bp, Arabidopsis thaliana
aggatgagtgactttcc

SEQ ID NO: 38872 - DNA, 17 bp, Arabidopsis thaliana
aggatgatccatctgaa

SEQ ID NO: 38873 - DNA, 17 bp, Arabidopsis thaliana
aggatgatcgccatatt

SEQ ID NO: 38874 - DNA, 17 bp, Arabidopsis thaliana
aggatgatctaggaact

SEQ ID NO: 38875 - DNA, 17 bp, Arabidopsis thaliana
aggatgatgtcgtcggc

SEQ ID NO: 38876 - DNA, 17 bp, Arabidopsis thaliana
aggatgatttaggaact

SEQ ID NO: 38877 - DNA, 17 bp, Arabidopsis thaliana
aggatgatttgattaat

SEQ ID NO: 38878 - DNA, 17 bp, Arabidopsis thaliana
aggatgccttactgata

SEQ ID NO: 38879 - DNA, 17 bp, Arabidopsis thaliana
aggatgcgactaagacc

SEQ ID NO: 38880 - DNA, 17 bp, Arabidopsis thaliana
aggatgcggatccatcg

SEQ ID NO: 38881 - DNA, 17 bp, Arabidopsis thaliana
aggatggaccgggacga

SEQ ID NO: 38882 - DNA, 17 bp, Arabidopsis thaliana
aggatggatgacttccc

SEQ ID NO: 38883 - DNA, 17 bp, Arabidopsis thaliana
aggatggatgtcactgg

SEQ ID NO: 38884 - DNA, 17 bp, Arabidopsis thaliana
aggatggcagactcaag

SEQ ID NO: 38885 - DNA, 17 bp, Arabidopsis thaliana
aggatggccgagtggcc

SEQ ID NO: 38886 - DNA, 17 bp, Arabidopsis thaliana
aggatggctccagcaaa

SEQ ID NO: 38887 - DNA, 17 bp, Arabidopsis thaliana
aggatggctccagcaga

SEQ ID NO: 38888 - DNA, 17 bp, Arabidopsis thaliana
aggatgggactccagct

SEQ ID NO: 38889 - DNA, 17 bp, Arabidopsis thaliana
aggatgggagacctccc

SEQ ID NO: 38890 - DNA, 17 bp, Arabidopsis thaliana
aggatgggctgaccacg

SEQ ID NO: 38891 - DNA, 17 bp, Arabidopsis thaliana
aggatgggtgacctccc

SEQ ID NO: 38892 - DNA, 17 bp, Arabidopsis thaliana
aggatgggtgacctcgc

SEQ ID NO: 38893 - DNA, 17 bp, Arabidopsis thaliana
aggatgggtgacctctc

SEQ ID NO: 38894 - DNA, 17 bp, Arabidopsis thaliana
aggatgggtgacctgcc

SEQ ID NO: 38895 - DNA, 17 bp, Arabidopsis thaliana
aggatgggtgatattct

SEQ ID NO: 38896 - DNA, 17 bp, Arabidopsis thaliana
aggatgggtggcctccc

SEQ ID NO: 38897 - DNA, 17 bp, Arabidopsis thaliana
aggatgggtgggtgacc

SEQ ID NO: 38898 - DNA, 17 bp, Arabidopsis thaliana
aggatgggttttgcggg

SEQ ID NO: 38899 - DNA, 17 bp, Arabidopsis thaliana
aggatggtcaggagggg

SEQ ID NO: 38900 - DNA, 17 bp, Arabidopsis thaliana
aggatggtcttagagga

SEQ ID NO: 38901 - DNA, 17 bp, Arabidopsis thaliana
aggatggtgcgactcgg

SEQ ID NO: 38902 - DNA, 17 bp, Arabidopsis thaliana
aggatgtagacctgatt

SEQ ID NO: 38903 - DNA, 17 bp, Arabidopsis thaliana
aggatgtagcgcacctt

SEQ ID NO: 38904 - DNA, 17 bp, Arabidopsis thaliana
aggatgtcgatctactt

SEQ ID NO: 38905 - DNA, 17 bp, Arabidopsis thaliana
aggatgtcgtccagcgg

SEQ ID NO: 38906 - DNA, 17 bp, Arabidopsis thaliana
aggatgtgctttgttct

SEQ ID NO: 38907 - DNA, 17 bp, Arabidopsis thaliana
aggatgtggataagtta

SEQ ID NO: 38908 - DNA, 17 bp, Arabidopsis thaliana
aggatgtggtcgagtaa

SEQ ID NO: 38909 - DNA, 17 bp, Arabidopsis thaliana
aggatgtggtttgatgg

SEQ ID NO: 38910 - DNA, 17 bp, Arabidopsis thaliana
aggatgtgtcagatgtg

SEQ ID NO: 38911 - DNA, 17 bp, Arabidopsis thaliana
aggatgtgtgaccttcc

SEQ ID NO: 38912 - DNA, 17 bp, Arabidopsis thaliana
aggatgtgtggttccct

SEQ ID NO: 38913 - DNA, 17 bp, Arabidopsis thaliana
aggatgtgtttgagacc

SEQ ID NO: 38914 - DNA, 17 bp, Arabidopsis thaliana
aggatgttcttttacca

SEQ ID NO: 38915 - DNA, 17 bp, Arabidopsis thaliana
aggatgtttgcgttgca

SEQ ID NO: 38916 - DNA, 17 bp, Arabidopsis thaliana
aggattaaacccgatcc

SEQ ID NO: 38917 - DNA, 17 bp, Arabidopsis thaliana
aggattaaccagttgga

SEQ ID NO: 38918 - DNA, 17 bp, Arabidopsis thaliana
aggattaaccttctcgc

SEQ ID NO: 38919 - DNA, 17 bp, Arabidopsis thaliana
aggattaacttgacctc

SEQ ID NO: 38920 - DNA, 17 bp, Arabidopsis thaliana
aggattaagagcttcgg

SEQ ID NO: 38921 - DNA, 17 bp, Arabidopsis thaliana
aggattaagagtttcgg

SEQ ID NO: 38922 - DNA, 17 bp, Arabidopsis thaliana
aggattaatgtactgga

SEQ ID NO: 38923 - DNA, 17 bp, Arabidopsis thaliana
aggattacaggcttcgg

SEQ ID NO: 38924 - DNA, 17 bp, Arabidopsis thaliana
aggattaccgacattgg

SEQ ID NO: 38925 - DNA, 17 bp, Arabidopsis thaliana
aggattacggactttga

SEQ ID NO: 38926 - DNA, 17 bp, Arabidopsis thaliana
aggattacgggcttcag

SEQ ID NO: 38927 - DNA, 17 bp, Arabidopsis thaliana
aggattagaccgctatg

SEQ ID NO: 38928 - DNA, 17 bp, Arabidopsis thaliana
aggattagatggtatga

SEQ ID NO: 38929 - DNA, 17 bp, Arabidopsis thaliana
aggattagcaatgctgc

SEQ ID NO: 38930 - DNA, 17 bp, Arabidopsis thaliana
aggattagcgagccacg

SEQ ID NO: 38931 - DNA, 17 bp, Arabidopsis thaliana
aggattagctcatttga

SEQ ID NO: 38932 - DNA, 17 bp, Arabidopsis thaliana
aggattagctcgtttga

SEQ ID NO: 38933 - DNA, 17 bp, Arabidopsis thaliana
aggattaggatggtgtt

SEQ ID NO: 38934 - DNA, 17 bp, Arabidopsis thaliana
aggattagggagagccc

SEQ ID NO: 38935 - DNA, 17 bp, Arabidopsis thaliana
aggattatccaagaatg

SEQ ID NO: 38936 - DNA, 17 bp, Arabidopsis thaliana
aggattatccagactgt

SEQ ID NO: 38937 - DNA, 17 bp, Arabidopsis thaliana
aggattatctggcgacg

SEQ ID NO: 38938 - DNA, 17 bp, Arabidopsis thaliana
aggattatgccacgtgt

SEQ ID NO: 38939 - DNA, 17 bp, Arabidopsis thaliana
aggattatgccatgggt

SEQ ID NO: 38940 - DNA, 17 bp, Arabidopsis thaliana
aggattatgccatgtat

SEQ ID NO: 38941 - DNA, 17 bp, Arabidopsis thaliana
aggattatgccatgtgt

SEQ ID NO: 38942 - DNA, 17 bp, Arabidopsis thaliana
aggattatgggcctccc

SEQ ID NO: 38943 - DNA, 17 bp, Arabidopsis thaliana
aggattatgtcaaagtt

SEQ ID NO: 38944 - DNA, 17 bp, Arabidopsis thaliana
aggattcaacccgtggt

SEQ ID NO: 38945 - DNA, 17 bp, Arabidopsis thaliana
aggattcaaggaaaaat

SEQ ID NO: 38946 - DNA, 17 bp, Arabidopsis thaliana
aggattcaaggcttcag

SEQ ID NO: 38947 - DNA, 17 bp, Arabidopsis thaliana
aggattcacactcttgt

SEQ ID NO: 38948 - DNA, 17 bp, Arabidopsis thaliana
aggattcacactctttt

SEQ ID NO: 38949 - DNA, 17 bp, Arabidopsis thaliana
aggattcacgcttgtga

SEQ ID NO: 38950 - DNA, 17 bp, Arabidopsis thaliana
aggattcagatcatttc

SEQ ID NO: 38951 - DNA, 17 bp, Arabidopsis thaliana
aggattcagattagttc

SEQ ID NO: 38952 - DNA, 17 bp, Arabidopsis thaliana
aggattcagcccaaaac

SEQ ID NO: 38953 - DNA, 17 bp, Arabidopsis thaliana
aggattcagcgaaagac

SEQ ID NO: 38954 - DNA, 17 bp, Arabidopsis thaliana
aggattcatcaggccga

SEQ ID NO: 38955 - DNA, 17 bp, Arabidopsis thaliana
aggattcatgggttgag

SEQ ID NO: 38956 - DNA, 17 bp, Arabidopsis thaliana
aggattcccaaaacgcg

SEQ ID NO: 38957 - DNA, 17 bp, Arabidopsis thaliana
aggattcccgaccgcgt

SEQ ID NO: 38958 - DNA, 17 bp, Arabidopsis thaliana
aggattcgaactttcga

SEQ ID NO: 38959 - DNA, 17 bp, Arabidopsis thaliana
aggattcgctttgatcg

SEQ ID NO: 38960 - DNA, 17 bp, Arabidopsis thaliana
aggattcggcccaaaac

SEQ ID NO: 38961 - DNA, 17 bp, Arabidopsis thaliana
aggattcgtcgaccagg

SEQ ID NO: 38962 - DNA, 17 bp, Arabidopsis thaliana
aggattctacgcagaga

SEQ ID NO: 38963 - DNA, 17 bp, Arabidopsis thaliana
aggattctccagaagct

SEQ ID NO: 38964 - DNA, 17 bp, Arabidopsis thaliana
aggattctgcctctaga

SEQ ID NO: 38965 - DNA, 17 bp, Arabidopsis thaliana
aggattctgctgctttg

SEQ ID NO: 38966 - DNA, 17 bp, Arabidopsis thaliana
aggattctggactgctt

SEQ ID NO: 38967 - DNA, 17 bp, Arabidopsis thaliana
aggattctgtcgaatta

SEQ ID NO: 38968 - DNA, 17 bp, Arabidopsis thaliana
aggattcttggagacat

SEQ ID NO: 38969 - DNA, 17 bp, Arabidopsis thaliana
aggattcttggagacgt

SEQ ID NO: 38970 - DNA, 17 bp, Arabidopsis thaliana
aggattgaacccgcagt

SEQ ID NO: 38971 - DNA, 17 bp, Arabidopsis thaliana
aggattgacagactgag

SEQ ID NO: 38972 - DNA, 17 bp, Arabidopsis thaliana
aggattgacatgtctcg

SEQ ID NO: 38973 - DNA, 17 bp, Arabidopsis thaliana
aggattgaccgggtcca

SEQ ID NO: 38974 - DNA, 17 bp, Arabidopsis thaliana
aggattgacctagtgaa

SEQ ID NO: 38975 - DNA, 17 bp, Arabidopsis thaliana
aggattgacttcgatcg

SEQ ID NO: 38976 - DNA, 17 bp, Arabidopsis thaliana
aggattgagacggcgga

SEQ ID NO: 38977 - DNA, 17 bp, Arabidopsis thaliana
aggattgagagcctctg

SEQ ID NO: 38978 - DNA, 17 bp, Arabidopsis thaliana
aggattgagataaatcg

SEQ ID NO: 38979 - DNA, 17 bp, Arabidopsis thaliana
aggattgagtcggtaat

SEQ ID NO: 38980 - DNA, 17 bp, Arabidopsis thaliana
aggattgagtttggtag

SEQ ID NO: 38981 - DNA, 17 bp, Arabidopsis thaliana
aggattgatggtctgta

SEQ ID NO: 38982 - DNA, 17 bp, Arabidopsis thaliana
aggattggagccgaagt

SEQ ID NO: 38983 - DNA, 17 bp, Arabidopsis thaliana
aggattggatcgctgtg

SEQ ID NO: 38984 - DNA, 17 bp, Arabidopsis thaliana
aggattggccgaaatca

SEQ ID NO: 38985 - DNA, 17 bp, Arabidopsis thaliana
aggattggccgaagtca

SEQ ID NO: 38986 - DNA, 17 bp, Arabidopsis thaliana
aggattggcgttgaggc

SEQ ID NO: 38987 - DNA, 17 bp, Arabidopsis thaliana
aggattggctcgtttga

SEQ ID NO: 38988 - DNA, 17 bp, Arabidopsis thaliana
aggattggctctgagga

SEQ ID NO: 38989 - DNA, 17 bp, Arabidopsis thaliana
aggattggctctgaggg

SEQ ID NO: 38990 - DNA, 17 bp, Arabidopsis thaliana
aggattggctctggtgg

SEQ ID NO: 38991 - DNA, 17 bp, Arabidopsis thaliana
aggattgggatcggtta

SEQ ID NO: 38992 - DNA, 17 bp, Arabidopsis thaliana
aggattgggctctaatg

SEQ ID NO: 38993 - DNA, 17 bp, Arabidopsis thaliana
aggattgggctctaatt

SEQ ID NO: 38994 - DNA, 17 bp, Arabidopsis thaliana
aggattggtggaatgag

SEQ ID NO: 38995 - DNA, 17 bp, Arabidopsis thaliana
aggattggtggggcggt

SEQ ID NO: 38996 - DNA, 17 bp, Arabidopsis thaliana
aggattggttcgtttga

SEQ ID NO: 38997 - DNA, 17 bp, Arabidopsis thaliana
aggattggttcttggac

SEQ ID NO: 38998 - DNA, 17 bp, Arabidopsis thaliana
aggattgtcgcttaaaa

SEQ ID NO: 38999 - DNA, 17 bp, Arabidopsis thaliana
aggattgtcgcttcaca

SEQ ID NO: 39000 - DNA, 17 bp, Arabidopsis thaliana
aggattgtctgccggag

SEQ ID NO: 39001 - DNA, 17 bp, Arabidopsis thaliana
aggattgtgccacgtat

SEQ ID NO: 39002 - DNA, 17 bp, Arabidopsis thaliana
aggattgtgccacgtgt

SEQ ID NO: 39003 - DNA, 17 bp, Arabidopsis thaliana
aggattgtgccatgtgt

SEQ ID NO: 39004 - DNA, 17 bp, Arabidopsis thaliana
aggattgtgctacatgt

SEQ ID NO: 39005 - DNA, 17 bp, Arabidopsis thaliana
aggattgtgctacgtgt

SEQ ID NO: 39006 - DNA, 17 bp, Arabidopsis thaliana
aggattgtgttttggac

SEQ ID NO: 39007 - DNA, 17 bp, Arabidopsis thaliana
aggattgttagaccatc

SEQ ID NO: 39008 - DNA, 17 bp, Arabidopsis thaliana
aggattgttagtcgttc

SEQ ID NO: 39009 - DNA, 17 bp, Arabidopsis thaliana
aggattgttctactgcg

SEQ ID NO: 39010 - DNA, 17 bp, Arabidopsis thaliana
aggatttaacccacggt

SEQ ID NO: 39011 - DNA, 17 bp, Arabidopsis thaliana
aggatttaacccgcgat

SEQ ID NO: 39012 - DNA, 17 bp, Arabidopsis thaliana
aggatttaacccgcggt

SEQ ID NO: 39013 - DNA, 17 bp, Arabidopsis thaliana
aggatttaacccgtggt

SEQ ID NO: 39014 - DNA, 17 bp, Arabidopsis thaliana
aggatttaactcgaggt

SEQ ID NO: 39015 - DNA, 17 bp, Arabidopsis thaliana
aggatttaactggactc

SEQ ID NO: 39016 - DNA, 17 bp, Arabidopsis thaliana
aggatttagaaatggat

SEQ ID NO: 39017 - DNA, 17 bp, Arabidopsis thaliana
aggatttagttgaattt

SEQ ID NO: 39018 - DNA, 17 bp, Arabidopsis thaliana
aggatttatcggttgag

SEQ ID NO: 39019 - DNA, 17 bp, Arabidopsis thaliana
aggatttatgggccact

SEQ ID NO: 39020 - DNA, 17 bp, Arabidopsis thaliana
aggatttatttacagtg

SEQ ID NO: 39021 - DNA, 17 bp, Arabidopsis thaliana
aggatttcaccaatgga

SEQ ID NO: 39022 - DNA, 17 bp, Arabidopsis thaliana
aggatttcacccgtggt

SEQ ID NO: 39023 - DNA, 17 bp, Arabidopsis thaliana
aggatttcacccgttgt

SEQ ID NO: 39024 - DNA, 17 bp, Arabidopsis thaliana
aggatttcacctgtggt

SEQ ID NO: 39025 - DNA, 17 bp, Arabidopsis thaliana
aggatttcactcattgt

SEQ ID NO: 39026 - DNA, 17 bp, Arabidopsis thaliana
aggatttcatatttgct

SEQ ID NO: 39027 - DNA, 17 bp, Arabidopsis thaliana
aggatttcattgagccg

SEQ ID NO: 39028 - DNA, 17 bp, Arabidopsis thaliana
aggatttcattttgctc

SEQ ID NO: 39029 - DNA, 17 bp, Arabidopsis thaliana
aggatttcctccaatgc

SEQ ID NO: 39030 - DNA, 17 bp, Arabidopsis thaliana
aggatttcgatcctatt

SEQ ID NO: 39031 - DNA, 17 bp, Arabidopsis thaliana
aggatttcgccagtagt

SEQ ID NO: 39032 - DNA, 17 bp, Arabidopsis thaliana
aggatttcgctcgtggt

SEQ ID NO: 39033 - DNA, 17 bp, Arabidopsis thaliana
aggatttcgtgatttta

SEQ ID NO: 39034 - DNA, 17 bp, Arabidopsis thaliana
aggatttctcatgaggg

SEQ ID NO: 39035 - DNA, 17 bp, Arabidopsis thaliana
aggatttcttggttgtt

SEQ ID NO: 39036 - DNA, 17 bp, Arabidopsis thaliana
aggatttgaatggttac

SEQ ID NO: 39037 - DNA, 17 bp, Arabidopsis thaliana
aggatttgagatcgtgg

SEQ ID NO: 39038 - DNA, 17 bp, Arabidopsis thaliana
aggatttgagtccaaga

SEQ ID NO: 39039 - DNA, 17 bp, Arabidopsis thaliana
aggatttgattggtggg

SEQ ID NO: 39040 - DNA, 17 bp, Arabidopsis thaliana
aggatttgatttgtgtg

SEQ ID NO: 39041 - DNA, 17 bp, Arabidopsis thaliana
aggatttgcaaaactgc

SEQ ID NO: 39042 - DNA, 17 bp, Arabidopsis thaliana
aggatttgccaaggatg

SEQ ID NO: 39043 - DNA, 17 bp, Arabidopsis thaliana
aggatttgcgactttgc

SEQ ID NO: 39044 - DNA, 17 bp, Arabidopsis thaliana
aggatttgcgtccggag

SEQ ID NO: 39045 - DNA, 17 bp, Arabidopsis thaliana
aggatttgcgttcggag

SEQ ID NO: 39046 - DNA, 17 bp, Arabidopsis thaliana
aggatttggcaggacgt

SEQ ID NO: 39047 - DNA, 17 bp, Arabidopsis thaliana
aggatttgtcgaccagg

SEQ ID NO: 39048 - DNA, 17 bp, Arabidopsis thaliana
aggatttgtgctgataa

SEQ ID NO: 39049 - DNA, 17 bp, Arabidopsis thaliana
aggatttgttattggga

SEQ ID NO: 39050 - DNA, 17 bp, Arabidopsis thaliana
aggatttgttattgggt

SEQ ID NO: 39051 - DNA, 17 bp, Arabidopsis thaliana
aggattttaatctgttt

SEQ ID NO: 39052 - DNA, 17 bp, Arabidopsis thaliana
aggattttaccagactc

SEQ ID NO: 39053 - DNA, 17 bp, Arabidopsis thaliana
aggattttcccggcaca

SEQ ID NO: 39054 - DNA, 17 bp, Arabidopsis thaliana
aggattttctttctccc

SEQ ID NO: 39055 - DNA, 17 bp, Arabidopsis thaliana
aggattttctttctctc

SEQ ID NO: 39056 - DNA, 17 bp, Arabidopsis thaliana
aggattttggatttggg

SEQ ID NO: 39057 - DNA, 17 bp, Arabidopsis thaliana
aggattttggccaacaa

SEQ ID NO: 39058 - DNA, 17 bp, Arabidopsis thaliana
aggatttttagtcattc

SEQ ID NO: 39059 - DNA, 17 bp, Arabidopsis thaliana
aggatttttccaagttg

SEQ ID NO: 39060 - DNA, 17 bp, Arabidopsis thaliana
aggatttttgaccctgt

SEQ ID NO: 39061 - DNA, 17 bp, Arabidopsis thaliana
aggatttttggcctggt

SEQ ID NO: 39062 - DNA, 17 bp, Arabidopsis thaliana
aggattttttcaaatga

SEQ ID NO: 39063 - DNA, 17 bp, Arabidopsis thaliana
aggcaaaaaccgtcggt

SEQ ID NO: 39064 - DNA, 17 bp, Arabidopsis thaliana
aggcaaaaccgcggtgg

SEQ ID NO: 39065 - DNA, 17 bp, Arabidopsis thaliana
aggcaaaagcccgtaat

SEQ ID NO: 39066 - DNA, 17 bp, Arabidopsis thaliana
aggcaaaagtgttgtgg

SEQ ID NO: 39067 - DNA, 17 bp, Arabidopsis thaliana
aggcaaaatgtcccagt

SEQ ID NO: 39068 - DNA, 17 bp, Arabidopsis thaliana
aggcaaacgaacaactt

SEQ ID NO: 39069 - DNA, 17 bp, Arabidopsis thaliana
aggcaaacgaacaggac

SEQ ID NO: 39070 - DNA, 17 bp, Arabidopsis thaliana
aggcaaacgaacagggc

SEQ ID NO: 39071 - DNA, 17 bp, Arabidopsis thaliana
aggcaaagctatttact

SEQ ID NO: 39072 - DNA, 17 bp, Arabidopsis thaliana
aggcaaagcttagagat

SEQ ID NO: 39073 - DNA, 17 bp, Arabidopsis thaliana
aggcaaagtgggctggg

SEQ ID NO: 39074 - DNA, 17 bp, Arabidopsis thaliana
aggcaaagtttgggctc

SEQ ID NO: 39075 - DNA, 17 bp, Arabidopsis thaliana
aggcaaatcagattcgg

SEQ ID NO: 39076 - DNA, 17 bp, Arabidopsis thaliana
aggcaaatcccgttctt

SEQ ID NO: 39077 - DNA, 17 bp, Arabidopsis thaliana
aggcaaatctcattcgg

SEQ ID NO: 39078 - DNA, 17 bp, Arabidopsis thaliana
aggcaaatgtctcccgg

SEQ ID NO: 39079 - DNA, 17 bp, Arabidopsis thaliana
aggcaaattttagttcc

SEQ ID NO: 39080 - DNA, 17 bp, Arabidopsis thaliana
aggcaacccactggtaa

SEQ ID NO: 39081 - DNA, 17 bp, Arabidopsis thaliana
aggcaaccgtctactaa

SEQ ID NO: 39082 - DNA, 17 bp, Arabidopsis thaliana
aggcaacgcaaactgag

SEQ ID NO: 39083 - DNA, 17 bp, Arabidopsis thaliana
aggcaacgcagcagcta

SEQ ID NO: 39084 - DNA, 17 bp, Arabidopsis thaliana
aggcaacgctggagtta

SEQ ID NO: 39085 - DNA, 17 bp, Arabidopsis thaliana
aggcaacgggttttggt

SEQ ID NO: 39086 - DNA, 17 bp, Arabidopsis thaliana
aggcaacggtatggctg

SEQ ID NO: 39087 - DNA, 17 bp, Arabidopsis thaliana
aggcaactgacaaacaa

SEQ ID NO: 39088 - DNA, 17 bp, Arabidopsis thaliana
aggcaactgacaaccaa

SEQ ID NO: 39089 - DNA, 17 bp, Arabidopsis thaliana
aggcaactgacaaccag

SEQ ID NO: 39090 - DNA, 17 bp, Arabidopsis thaliana
aggcaagaaaacgaccc

SEQ ID NO: 39091 - DNA, 17 bp, Arabidopsis thaliana
aggcaagaaagagcacg

SEQ ID NO: 39092 - DNA, 17 bp, Arabidopsis thaliana
aggcaagaacgagcagt

SEQ ID NO: 39093 - DNA, 17 bp, Arabidopsis thaliana
aggcaagaagatcggct

SEQ ID NO: 39094 - DNA, 17 bp, Arabidopsis thaliana
aggcaagaattgtttaa

SEQ ID NO: 39095 - DNA, 17 bp, Arabidopsis thaliana
aggcaagacatttccgt

SEQ ID NO: 39096 - DNA, 17 bp, Arabidopsis thaliana
aggcaagaccagtgagg

SEQ ID NO: 39097 - DNA, 17 bp, Arabidopsis thaliana
aggcaagacgcctctgt

SEQ ID NO: 39098 - DNA, 17 bp, Arabidopsis thaliana
aggcaagactctggtcg

SEQ ID NO: 39099 - DNA, 17 bp, Arabidopsis thaliana
aggcaagacttgtagct

SEQ ID NO: 39100 - DNA, 17 bp, Arabidopsis thaliana
aggcaagagagagtcga

SEQ ID NO: 39101 - DNA, 17 bp, Arabidopsis thaliana
aggcaagagatgatgag

SEQ ID NO: 39102 - DNA, 17 bp, Arabidopsis thaliana
aggcaagagggtctggg

SEQ ID NO: 39103 - DNA, 17 bp, Arabidopsis thaliana
aggcaagagtgcaggag

SEQ ID NO: 39104 - DNA, 17 bp, Arabidopsis thaliana
aggcaagcaaaagactt

SEQ ID NO: 39105 - DNA, 17 bp, Arabidopsis thaliana
aggcaagccattatgca

SEQ ID NO: 39106 - DNA, 17 bp, Arabidopsis thaliana
aggcaagcgtttgcggt

SEQ ID NO: 39107 - DNA, 17 bp, Arabidopsis thaliana
aggcaaggagctgatct

SEQ ID NO: 39108 - DNA, 17 bp, Arabidopsis thaliana
aggcaaggatgacttgc

SEQ ID NO: 39109 - DNA, 17 bp, Arabidopsis thaliana
aggcaagggaatggcga

SEQ ID NO: 39110 - DNA, 17 bp, Arabidopsis thaliana
aggcaagggtgagatgg

SEQ ID NO: 39111 - DNA, 17 bp, Arabidopsis thaliana
aggcaaggttcacgggg

SEQ ID NO: 39112 - DNA, 17 bp, Arabidopsis thaliana
aggcaagtaacgtgtag

SEQ ID NO: 39113 - DNA, 17 bp, Arabidopsis thaliana
aggcaagtcatccttca

SEQ ID NO: 39114 - DNA, 17 bp, Arabidopsis thaliana
aggcaagtgtgcacaat

SEQ ID NO: 39115 - DNA, 17 bp, Arabidopsis thaliana
aggcaagtgtgcaggaa

SEQ ID NO: 39116 - DNA, 17 bp, Arabidopsis thaliana
aggcaagtgtgcaggac

SEQ ID NO: 39117 - DNA, 17 bp, Arabidopsis thaliana
aggcaagtgtgcaggag

SEQ ID NO: 39118 - DNA, 17 bp, Arabidopsis thaliana
aggcaagtgtgtaggag

SEQ ID NO: 39119 - DNA, 17 bp, Arabidopsis thaliana
aggcaataggcgatgga

SEQ ID NO: 39120 - DNA, 17 bp, Arabidopsis thaliana
aggcaatatggccagcg

SEQ ID NO: 39121 - DNA, 17 bp, Arabidopsis thaliana
aggcaatccaaccgcga

SEQ ID NO: 39122 - DNA, 17 bp, Arabidopsis thaliana
aggcaatccataaccga

SEQ ID NO: 39123 - DNA, 17 bp, Arabidopsis thaliana
aggcaatcggcccgcac

SEQ ID NO: 39124 - DNA, 17 bp, Arabidopsis thaliana
aggcaatctccatcagc

SEQ ID NO: 39125 - DNA, 17 bp, Arabidopsis thaliana
aggcaatgccgacgatt

SEQ ID NO: 39126 - DNA, 17 bp, Arabidopsis thaliana
aggcaattcacagtctg

SEQ ID NO: 39127 - DNA, 17 bp, Arabidopsis thaliana
aggcaattgccacccct

SEQ ID NO: 39128 - DNA, 17 bp, Arabidopsis thaliana
aggcaattgcctcaagg

SEQ ID NO: 39129 - DNA, 17 bp, Arabidopsis thaliana
aggcaatttttggatgt

SEQ ID NO: 39130 - DNA, 17 bp, Arabidopsis thaliana
aggcaatttttgggtga

SEQ ID NO: 39131 - DNA, 17 bp, Arabidopsis thaliana
aggcacaaagcccctcg

SEQ ID NO: 39132 - DNA, 17 bp, Arabidopsis thaliana
aggcacaaaggccttac

SEQ ID NO: 39133 - DNA, 17 bp, Arabidopsis thaliana
aggcacaaatagattta

SEQ ID NO: 39134 - DNA, 17 bp, Arabidopsis thaliana
aggcacaagagtcattt

SEQ ID NO: 39135 - DNA, 17 bp, Arabidopsis thaliana
aggcacaagcagcatat

SEQ ID NO: 39136 - DNA, 17 bp, Arabidopsis thaliana
aggcacaagggccagta

SEQ ID NO: 39137 - DNA, 17 bp, Arabidopsis thaliana
aggcacaatgaccaacg

SEQ ID NO: 39138 - DNA, 17 bp, Arabidopsis thaliana
aggcacacgagttcaat

SEQ ID NO: 39139 - DNA, 17 bp, Arabidopsis thaliana
aggcacactatagggtt

SEQ ID NO: 39140 - DNA, 17 bp, Arabidopsis thaliana
aggcacactctcaccgg

SEQ ID NO: 39141 - DNA, 17 bp, Arabidopsis thaliana
aggcacagcagccttgg

SEQ ID NO: 39142 - DNA, 17 bp, Arabidopsis thaliana
aggcacagctgtgatca

SEQ ID NO: 39143 - DNA, 17 bp, Arabidopsis thaliana
aggcacaggagacattt

SEQ ID NO: 39144 - DNA, 17 bp, Arabidopsis thaliana
aggcacaggagtcacca

SEQ ID NO: 39145 - DNA, 17 bp, Arabidopsis thaliana
aggcacatgagtcattt

SEQ ID NO: 39146 - DNA, 17 bp, Arabidopsis thaliana
aggcacatggtgtccta

SEQ ID NO: 39147 - DNA, 17 bp, Arabidopsis thaliana
aggcacattcccgattg

SEQ ID NO: 39148 - DNA, 17 bp, Arabidopsis thaliana
aggcacattggagggag

SEQ ID NO: 39149 - DNA, 17 bp, Arabidopsis thaliana
aggcacatttctgttat

SEQ ID NO: 39150 - DNA, 17 bp, Arabidopsis thaliana
aggcaccgcctgcttga

SEQ ID NO: 39151 - DNA, 17 bp, Arabidopsis thaliana
aggcaccgctttgattg

SEQ ID NO: 39152 - DNA, 17 bp, Arabidopsis thaliana
aggcaccgtgacaacag

SEQ ID NO: 39153 - DNA, 17 bp, Arabidopsis thaliana
aggcacctacgaacgct

SEQ ID NO: 39154 - DNA, 17 bp, Arabidopsis thaliana
aggcacctgctgcgagt

SEQ ID NO: 39155 - DNA, 17 bp, Arabidopsis thaliana
aggcacgagttccgaag

SEQ ID NO: 39156 - DNA, 17 bp, Arabidopsis thaliana
aggcacgccatctttga

SEQ ID NO: 39157 - DNA, 17 bp, Arabidopsis thaliana
aggcacgccatggatcc

SEQ ID NO: 39158 - DNA, 17 bp, Arabidopsis thaliana
aggcacgcgtatctcag

SEQ ID NO: 39159 - DNA, 17 bp, Arabidopsis thaliana
aggcacgctttgtttag

SEQ ID NO: 39160 - DNA, 17 bp, Arabidopsis thaliana
aggcacggccttattgg

SEQ ID NO: 39161 - DNA, 17 bp, Arabidopsis thaliana
aggcacggctctgcgca

SEQ ID NO: 39162 - DNA, 17 bp, Arabidopsis thaliana
aggcacggctctgctag

SEQ ID NO: 39163 - DNA, 17 bp, Arabidopsis thaliana
aggcacggctctgtgac

SEQ ID NO: 39164 - DNA, 17 bp, Arabidopsis thaliana
aggcacggttttgattc

SEQ ID NO: 39165 - DNA, 17 bp, Arabidopsis thaliana
aggcacgtccatgatcg

SEQ ID NO: 39166 - DNA, 17 bp, Arabidopsis thaliana
aggcacgtcggttcccg

SEQ ID NO: 39167 - DNA, 17 bp, Arabidopsis thaliana
aggcacgtctgcctggg

SEQ ID NO: 39168 - DNA, 17 bp, Arabidopsis thaliana
aggcacgtctgcctggt

SEQ ID NO: 39169 - DNA, 17 bp, Arabidopsis thaliana
aggcacgtctgctgggt

SEQ ID NO: 39170 - DNA, 17 bp, Arabidopsis thaliana
aggcacgtgcccgacat

SEQ ID NO: 39171 - DNA, 17 bp, Arabidopsis thaliana
aggcacgtgtcgttggc

SEQ ID NO: 39172 - DNA, 17 bp, Arabidopsis thaliana
aggcacgttgcgagata

SEQ ID NO: 39173 - DNA, 17 bp, Arabidopsis thaliana
aggcacgtttactttga

SEQ ID NO: 39174 - DNA, 17 bp, Arabidopsis thaliana
aggcacgttttcctcaa

SEQ ID NO: 39175 - DNA, 17 bp, Arabidopsis thaliana
aggcactaagcttccta

SEQ ID NO: 39176 - DNA, 17 bp, Arabidopsis thaliana
aggcactatttcaaaac

SEQ ID NO: 39177 - DNA, 17 bp, Arabidopsis thaliana
aggcactattttgaaac

SEQ ID NO: 39178 - DNA, 17 bp, Arabidopsis thaliana
aggcactcatactcgac

SEQ ID NO: 39179 - DNA, 17 bp, Arabidopsis thaliana
aggcactcccttattgc

SEQ ID NO: 39180 - DNA, 17 bp, Arabidopsis thaliana
aggcactcgaccacaac

SEQ ID NO: 39181 - DNA, 17 bp, Arabidopsis thaliana
aggcactcggcggggaa

SEQ ID NO: 39182 - DNA, 17 bp, Arabidopsis thaliana
aggcactcgttgtgatg

SEQ ID NO: 39183 - DNA, 17 bp, Arabidopsis thaliana
aggcactctgtcaccac

SEQ ID NO: 39184 - DNA, 17 bp, Arabidopsis thaliana
aggcactgcgagtgagg

SEQ ID NO: 39185 - DNA, 17 bp, Arabidopsis thaliana
aggcactgctctatctg

SEQ ID NO: 39186 - DNA, 17 bp, Arabidopsis thaliana
aggcactgctctttctg

SEQ ID NO: 39187 - DNA, 17 bp, Arabidopsis thaliana
aggcacttatgagagaa

SEQ ID NO: 39188 - DNA, 17 bp, Arabidopsis thaliana
aggcacttctaagattc

SEQ ID NO: 39189 - DNA, 17 bp, Arabidopsis thaliana
aggcacttctgagggat

SEQ ID NO: 39190 - DNA, 17 bp, Arabidopsis thaliana
aggcacttgtcacggat

SEQ ID NO: 39191 - DNA, 17 bp, Arabidopsis thaliana
aggcacttgtcagggat

SEQ ID NO: 39192 - DNA, 17 bp, Arabidopsis thaliana
aggcactttcaaaagat

SEQ ID NO: 39193 - DNA, 17 bp, Arabidopsis thaliana
aggcactttccaaggtt

SEQ ID NO: 39194 - DNA, 17 bp, Arabidopsis thaliana
aggcactttctaagatt

SEQ ID NO: 39195 - DNA, 17 bp, Arabidopsis thaliana
aggcactttctaaggcc

SEQ ID NO: 39196 - DNA, 17 bp, Arabidopsis thaliana
aggcactttctaaggct

SEQ ID NO: 39197 - DNA, 17 bp, Arabidopsis thaliana
aggcactttctaaggtt

SEQ ID NO: 39198 - DNA, 17 bp, Arabidopsis thaliana
aggcactttctaatgtt

SEQ ID NO: 39199 - DNA, 17 bp, Arabidopsis thaliana
aggcactttctagggaa

SEQ ID NO: 39200 - DNA, 17 bp, Arabidopsis thaliana
aggcactttggcttgtt

SEQ ID NO: 39201 - DNA, 17 bp, Arabidopsis thaliana
aggcacttttcagggat

SEQ ID NO: 39202 - DNA, 17 bp, Arabidopsis thaliana
aggcacttttccaactt

SEQ ID NO: 39203 - DNA, 17 bp, Arabidopsis thaliana
aggcagaaatacaggcg

SEQ ID NO: 39204 - DNA, 17 bp, Arabidopsis thaliana
aggcagaatcagaggaa

SEQ ID NO: 39205 - DNA, 17 bp, Arabidopsis thaliana
aggcagacatatcctcc

SEQ ID NO: 39206 - DNA, 17 bp, Arabidopsis thaliana
aggcagaccattcttag

SEQ ID NO: 39207 - DNA, 17 bp, Arabidopsis thaliana
aggcagacccgggttcg

SEQ ID NO: 39208 - DNA, 17 bp, Arabidopsis thaliana
aggcagacctctttttc

SEQ ID NO: 39209 - DNA, 17 bp, Arabidopsis thaliana
aggcagacgtccaactt

SEQ ID NO: 39210 - DNA, 17 bp, Arabidopsis thaliana
aggcagactcctcccta

SEQ ID NO: 39211 - DNA, 17 bp, Arabidopsis thaliana
aggcagacttgatgttc

SEQ ID NO: 39212 - DNA, 17 bp, Arabidopsis thaliana
aggcagagagctctgtt

SEQ ID NO: 39213 - DNA, 17 bp, Arabidopsis thaliana
aggcagagatcattatt

SEQ ID NO: 39214 - DNA, 17 bp, Arabidopsis thaliana
aggcagagatgggcact

SEQ ID NO: 39215 - DNA, 17 bp, Arabidopsis thaliana
aggcagagcaactccag

SEQ ID NO: 39216 - DNA, 17 bp, Arabidopsis thaliana
aggcagaggcgtttcta

SEQ ID NO: 39217 - DNA, 17 bp, Arabidopsis thaliana
aggcagaggtcgaagga

SEQ ID NO: 39218 - DNA, 17 bp, Arabidopsis thaliana
aggcagagtcggctgat

SEQ ID NO: 39219 - DNA, 17 bp, Arabidopsis thaliana
aggcagagtgcacttac

SEQ ID NO: 39220 - DNA, 17 bp, Arabidopsis thaliana
aggcagatcgcatggcc

SEQ ID NO: 39221 - DNA, 17 bp, Arabidopsis thaliana
aggcagcagcggcatag

SEQ ID NO: 39222 - DNA, 17 bp, Arabidopsis thaliana
aggcagcaggcgagcaa

SEQ ID NO: 39223 - DNA, 17 bp, Arabidopsis thaliana
aggcagccaaggcttca

SEQ ID NO: 39224 - DNA, 17 bp, Arabidopsis thaliana
aggcagccacagaggag

SEQ ID NO: 39225 - DNA, 17 bp, Arabidopsis thaliana
aggcagccactgaagcg

SEQ ID NO: 39226 - DNA, 17 bp, Arabidopsis thaliana
aggcagccattgacgag

SEQ ID NO: 39227 - DNA, 17 bp, Arabidopsis thaliana
aggcagcccgactcagc

SEQ ID NO: 39228 - DNA, 17 bp, Arabidopsis thaliana
aggcagcccgcactccg

SEQ ID NO: 39229 - DNA, 17 bp, Arabidopsis thaliana
aggcagccctttgtcgc

SEQ ID NO: 39230 - DNA, 17 bp, Arabidopsis thaliana
aggcagcctgactattc

SEQ ID NO: 39231 - DNA, 17 bp, Arabidopsis thaliana
aggcagcctttacccag

SEQ ID NO: 39232 - DNA, 17 bp, Arabidopsis thaliana
aggcagcggacaaagca

SEQ ID NO: 39233 - DNA, 17 bp, Arabidopsis thaliana
aggcagcggacaaagcg

SEQ ID NO: 39234 - DNA, 17 bp, Arabidopsis thaliana
aggcagcggcggcatac

SEQ ID NO: 39235 - DNA, 17 bp, Arabidopsis thaliana
aggcagcggggattcga

SEQ ID NO: 39236 - DNA, 17 bp, Arabidopsis thaliana
aggcagcggtgtggaaa

SEQ ID NO: 39237 - DNA, 17 bp, Arabidopsis thaliana
aggcagcggttcatcca

SEQ ID NO: 39238 - DNA, 17 bp, Arabidopsis thaliana
aggcagcggttcatcga

SEQ ID NO: 39239 - DNA, 17 bp, Arabidopsis thaliana
aggcagcgtgctccggg

SEQ ID NO: 39240 - DNA, 17 bp, Arabidopsis thaliana
aggcagctaagttggtt

SEQ ID NO: 39241 - DNA, 17 bp, Arabidopsis thaliana
aggcagctaatgaggga

SEQ ID NO: 39242 - DNA, 17 bp, Arabidopsis thaliana
aggcagctacagaggaa

SEQ ID NO: 39243 - DNA, 17 bp, Arabidopsis thaliana
aggcagctgagtgacga

SEQ ID NO: 39244 - DNA, 17 bp, Arabidopsis thaliana
aggcaggaaaggcttac

SEQ ID NO: 39245 - DNA, 17 bp, Arabidopsis thaliana
aggcaggaaatctttga

SEQ ID NO: 39246 - DNA, 17 bp, Arabidopsis thaliana
aggcaggaacctgcgga

SEQ ID NO: 39247 - DNA, 17 bp, Arabidopsis thaliana
aggcaggaatatccact

SEQ ID NO: 39248 - DNA, 17 bp, Arabidopsis thaliana
aggcaggacaaacagac

SEQ ID NO: 39249 - DNA, 17 bp, Arabidopsis thaliana
aggcaggacagaccgtc

SEQ ID NO: 39250 - DNA, 17 bp, Arabidopsis thaliana
aggcaggacaggcctcg

SEQ ID NO: 39251 - DNA, 17 bp, Arabidopsis thaliana
aggcaggaccaacacac

SEQ ID NO: 39252 - DNA, 17 bp, Arabidopsis thaliana
aggcaggaccgagtgcc

SEQ ID NO: 39253 - DNA, 17 bp, Arabidopsis thaliana
aggcaggaccgcgaaat

SEQ ID NO: 39254 - DNA, 17 bp, Arabidopsis thaliana
aggcaggacgagctctt

SEQ ID NO: 39255 - DNA, 17 bp, Arabidopsis thaliana
aggcaggacgagttggc

SEQ ID NO: 39256 - DNA, 17 bp, Arabidopsis thaliana
aggcaggacgcctctgt

SEQ ID NO: 39257 - DNA, 17 bp, Arabidopsis thaliana
aggcaggacgggtttgg

SEQ ID NO: 39258 - DNA, 17 bp, Arabidopsis thaliana
aggcaggacgggttttg

SEQ ID NO: 39259 - DNA, 17 bp, Arabidopsis thaliana
aggcaggactcaaacga

SEQ ID NO: 39260 - DNA, 17 bp, Arabidopsis thaliana
aggcaggactgctccgg

SEQ ID NO: 39261 - DNA, 17 bp, Arabidopsis thaliana
aggcaggacttcccagg

SEQ ID NO: 39262 - DNA, 17 bp, Arabidopsis thaliana
aggcaggacttcccggg

SEQ ID NO: 39263 - DNA, 17 bp, Arabidopsis thaliana
aggcaggacttcttctc

SEQ ID NO: 39264 - DNA, 17 bp, Arabidopsis thaliana
aggcaggactttcctgg

SEQ ID NO: 39265 - DNA, 17 bp, Arabidopsis thaliana
aggcaggagcaggaggc

SEQ ID NO: 39266 - DNA, 17 bp, Arabidopsis thaliana
aggcaggaggttctggc

SEQ ID NO: 39267 - DNA, 17 bp, Arabidopsis thaliana
aggcaggaggttttggg

SEQ ID NO: 39268 - DNA, 17 bp, Arabidopsis thaliana
aggcaggagttgaatct

SEQ ID NO: 39269 - DNA, 17 bp, Arabidopsis thaliana
aggcaggatcaacggtc

SEQ ID NO: 39270 - DNA, 17 bp, Arabidopsis thaliana
aggcaggatcaactctt

SEQ ID NO: 39271 - DNA, 17 bp, Arabidopsis thaliana
aggcaggatgggtgacc

SEQ ID NO: 39272 - DNA, 17 bp, Arabidopsis thaliana
aggcaggattaaacccg

SEQ ID NO: 39273 - DNA, 17 bp, Arabidopsis thaliana
aggcaggattacaggct

SEQ ID NO: 39274 - DNA, 17 bp, Arabidopsis thaliana
aggcaggattggctctg

SEQ ID NO: 39275 - DNA, 17 bp, Arabidopsis thaliana
aggcaggatttgggctt

SEQ ID NO: 39276 - DNA, 17 bp, Arabidopsis thaliana
aggcaggatttgggttc

SEQ ID NO: 39277 - DNA, 17 bp, Arabidopsis thaliana
aggcaggatttgttatt

SEQ ID NO: 39278 - DNA, 17 bp, Arabidopsis thaliana
aggcaggattttctttc

SEQ ID NO: 39279 - DNA, 17 bp, Arabidopsis thaliana
aggcaggattttggatt

SEQ ID NO: 39280 - DNA, 17 bp, Arabidopsis thaliana
aggcaggatttttccaa

SEQ ID NO: 39281 - DNA, 17 bp, Arabidopsis thaliana
aggcaggcaaggagctg

SEQ ID NO: 39282 - DNA, 17 bp, Arabidopsis thaliana
aggcaggcaagggaatg

SEQ ID NO: 39283 - DNA, 17 bp, Arabidopsis thaliana
aggcaggcacaagcagc

SEQ ID NO: 39284 - DNA, 17 bp, Arabidopsis thaliana
aggcaggcacaggagtc

SEQ ID NO: 39285 - DNA, 17 bp, Arabidopsis thaliana
aggcaggcacggctctg

SEQ ID NO: 39286 - DNA, 17 bp, Arabidopsis thaliana
aggcaggcacgtgtcgt

SEQ ID NO: 39287 - DNA, 17 bp, Arabidopsis thaliana
aggcaggcactaatgca

SEQ ID NO: 39288 - DNA, 17 bp, Arabidopsis thaliana
aggcaggcactttggct

SEQ ID NO: 39289 - DNA, 17 bp, Arabidopsis thaliana
aggcaggcagaccattc

SEQ ID NO: 39290 - DNA, 17 bp, Arabidopsis thaliana
aggcaggcagacgtcca

SEQ ID NO: 39291 - DNA, 17 bp, Arabidopsis thaliana
aggcaggcaggcttaca

SEQ ID NO: 39292 - DNA, 17 bp, Arabidopsis thaliana
aggcaggcagtctcttt

SEQ ID NO: 39293 - DNA, 17 bp, Arabidopsis thaliana
aggcaggcagtctggat

SEQ ID NO: 39294 - DNA, 17 bp, Arabidopsis thaliana
aggcaggccaactccag

SEQ ID NO: 39295 - DNA, 17 bp, Arabidopsis thaliana
aggcaggccacaaggaa

SEQ ID NO: 39296 - DNA, 17 bp, Arabidopsis thaliana
aggcaggccacaccctt

SEQ ID NO: 39297 - DNA, 17 bp, Arabidopsis thaliana
aggcaggccatttgttt

SEQ ID NO: 39298 - DNA, 17 bp, Arabidopsis thaliana
aggcaggcccaaatcca

SEQ ID NO: 39299 - DNA, 17 bp, Arabidopsis thaliana
aggcaggcccatcatct

SEQ ID NO: 39300 - DNA, 17 bp, Arabidopsis thaliana
aggcaggccccggaact

SEQ ID NO: 39301 - DNA, 17 bp, Arabidopsis thaliana
aggcaggcccgaaacca

SEQ ID NO: 39302 - DNA, 17 bp, Arabidopsis thaliana
aggcaggccttgacatg

SEQ ID NO: 39303 - DNA, 17 bp, Arabidopsis thaliana
aggcaggcgaagtccgt

SEQ ID NO: 39304 - DNA, 17 bp, Arabidopsis thaliana
aggcaggcgaccaggca

SEQ ID NO: 39305 - DNA, 17 bp, Arabidopsis thaliana
aggcaggcgagaccagt

SEQ ID NO: 39306 - DNA, 17 bp, Arabidopsis thaliana
aggcaggcgcagcagtt

SEQ ID NO: 39307 - DNA, 17 bp, Arabidopsis thaliana
aggcaggcgcccaggcc

SEQ ID NO: 39308 - DNA, 17 bp, Arabidopsis thaliana
aggcaggcgctgtctac

SEQ ID NO: 39309 - DNA, 17 bp, Arabidopsis thaliana
aggcaggcggccaggcg

SEQ ID NO: 39310 - DNA, 17 bp, Arabidopsis thaliana
aggcaggcgtcgtctgt

SEQ ID NO: 39311 - DNA, 17 bp, Arabidopsis thaliana
aggcaggctaagaattg

SEQ ID NO: 39312 - DNA, 17 bp, Arabidopsis thaliana
aggcaggctactgttgc

SEQ ID NO: 39313 - DNA, 17 bp, Arabidopsis thaliana
aggcaggctataaatac

SEQ ID NO: 39314 - DNA, 17 bp, Arabidopsis thaliana
aggcaggctatcaaaaa

SEQ ID NO: 39315 - DNA, 17 bp, Arabidopsis thaliana
aggcaggctcaaaggcc

SEQ ID NO: 39316 - DNA, 17 bp, Arabidopsis thaliana
aggcaggctcacggcag

SEQ ID NO: 39317 - DNA, 17 bp, Arabidopsis thaliana
aggcaggctcagtccac

SEQ ID NO: 39318 - DNA, 17 bp, Arabidopsis thaliana
aggcaggctctaaaggc

SEQ ID NO: 39319 - DNA, 17 bp, Arabidopsis thaliana
aggcaggctctcgtcac

SEQ ID NO: 39320 - DNA, 17 bp, Arabidopsis thaliana
aggcaggctctgtgcga

SEQ ID NO: 39321 - DNA, 17 bp, Arabidopsis thaliana
aggcaggctcttccatg

SEQ ID NO: 39322 - DNA, 17 bp, Arabidopsis thaliana
aggcaggctgcaggaac

SEQ ID NO: 39323 - DNA, 17 bp, Arabidopsis thaliana
aggcaggctgcagttcg

SEQ ID NO: 39324 - DNA, 17 bp, Arabidopsis thaliana
aggcaggctggtgccga

SEQ ID NO: 39325 - DNA, 17 bp, Arabidopsis thaliana
aggcaggcttaagagat

SEQ ID NO: 39326 - DNA, 17 bp, Arabidopsis thaliana
aggcaggcttaaggtat

SEQ ID NO: 39327 - DNA, 17 bp, Arabidopsis thaliana
aggcaggcttacaagat

SEQ ID NO: 39328 - DNA, 17 bp, Arabidopsis thaliana
aggcaggcttataagct

SEQ ID NO: 39329 - DNA, 17 bp, Arabidopsis thaliana
aggcaggcttcaccagt

SEQ ID NO: 39330 - DNA, 17 bp, Arabidopsis thaliana
aggcaggcttgatcgcc

SEQ ID NO: 39331 - DNA, 17 bp, Arabidopsis thaliana
aggcaggctttaaagat

SEQ ID NO: 39332 - DNA, 17 bp, Arabidopsis thaliana
aggcaggctttaagatc

SEQ ID NO: 39333 - DNA, 17 bp, Arabidopsis thaliana
aggcaggctttaagcaa

SEQ ID NO: 39334 - DNA, 17 bp, Arabidopsis thaliana
aggcaggctttagtaac

SEQ ID NO: 39335 - DNA, 17 bp, Arabidopsis thaliana
aggcaggctttgaatgg

SEQ ID NO: 39336 - DNA, 17 bp, Arabidopsis thaliana
aggcaggcttttacgat

SEQ ID NO: 39337 - DNA, 17 bp, Arabidopsis thaliana
aggcagggaagcggatg

SEQ ID NO: 39338 - DNA, 17 bp, Arabidopsis thaliana
aggcagggaattacagg

SEQ ID NO: 39339 - DNA, 17 bp, Arabidopsis thaliana
aggcagggaattgtcca

SEQ ID NO: 39340 - DNA, 17 bp, Arabidopsis thaliana
aggcagggacagaggag

SEQ ID NO: 39341 - DNA, 17 bp, Arabidopsis thaliana
aggcagggacgtagtca

SEQ ID NO: 39342 - DNA, 17 bp, Arabidopsis thaliana
aggcagggagacaagcg

SEQ ID NO: 39343 - DNA, 17 bp, Arabidopsis thaliana
aggcagggataactggc

SEQ ID NO: 39344 - DNA, 17 bp, Arabidopsis thaliana
aggcagggattaagggt

SEQ ID NO: 39345 - DNA, 17 bp, Arabidopsis thaliana
aggcagggattaccggt

SEQ ID NO: 39346 - DNA, 17 bp, Arabidopsis thaliana
aggcagggattacgagt

SEQ ID NO: 39347 - DNA, 17 bp, Arabidopsis thaliana
aggcagggattacgggc

SEQ ID NO: 39348 - DNA, 17 bp, Arabidopsis thaliana
aggcagggatttggtta

SEQ ID NO: 39349 - DNA, 17 bp, Arabidopsis thaliana
aggcagggcacgtctgc

SEQ ID NO: 39350 - DNA, 17 bp, Arabidopsis thaliana
aggcagggcatttctgc

SEQ ID NO: 39351 - DNA, 17 bp, Arabidopsis thaliana
aggcagggcccgctgtg

SEQ ID NO: 39352 - DNA, 17 bp, Arabidopsis thaliana
aggcagggccgacatgt

SEQ ID NO: 39353 - DNA, 17 bp, Arabidopsis thaliana
aggcagggccggccctg

SEQ ID NO: 39354 - DNA, 17 bp, Arabidopsis thaliana
aggcagggcctgtgttt

SEQ ID NO: 39355 - DNA, 17 bp, Arabidopsis thaliana
aggcagggcgatctctg

SEQ ID NO: 39356 - DNA, 17 bp, Arabidopsis thaliana
aggcagggcgattcacc

SEQ ID NO: 39357 - DNA, 17 bp, Arabidopsis thaliana
aggcagggcgtgggttc

SEQ ID NO: 39358 - DNA, 17 bp, Arabidopsis thaliana
aggcagggctagtgact

SEQ ID NO: 39359 - DNA, 17 bp, Arabidopsis thaliana
aggcagggctgcggttg

SEQ ID NO: 39360 - DNA, 17 bp, Arabidopsis thaliana
aggcagggctggagtga

SEQ ID NO: 39361 - DNA, 17 bp, Arabidopsis thaliana
aggcagggctgggctcg

SEQ ID NO: 39362 - DNA, 17 bp, Arabidopsis thaliana
aggcagggctggtgact

SEQ ID NO: 39363 - DNA, 17 bp, Arabidopsis thaliana
aggcagggctgtctttg

SEQ ID NO: 39364 - DNA, 17 bp, Arabidopsis thaliana
aggcaggggaatgtacc

SEQ ID NO: 39365 - DNA, 17 bp, Arabidopsis thaliana
aggcaggggctcagctg

SEQ ID NO: 39366 - DNA, 17 bp, Arabidopsis thaliana
aggcaggggctccgtct

SEQ ID NO: 39367 - DNA, 17 bp, Arabidopsis thaliana
aggcagggggtagtcgg

SEQ ID NO: 39368 - DNA, 17 bp, Arabidopsis thaliana
aggcagggtcagcagag

SEQ ID NO: 39369 - DNA, 17 bp, Arabidopsis thaliana
aggcagggtccagcggc

SEQ ID NO: 39370 - DNA, 17 bp, Arabidopsis thaliana
aggcagggtgaagcatg

SEQ ID NO: 39371 - DNA, 17 bp, Arabidopsis thaliana
aggcagggttaccattc

SEQ ID NO: 39372 - DNA, 17 bp, Arabidopsis thaliana
aggcagggttcaagtcc

SEQ ID NO: 39373 - DNA, 17 bp, Arabidopsis thaliana
aggcagggttcagggct

SEQ ID NO: 39374 - DNA, 17 bp, Arabidopsis thaliana
aggcagggttcgaatcc

SEQ ID NO: 39375 - DNA, 17 bp, Arabidopsis thaliana
aggcagggttgtccgac

SEQ ID NO: 39376 - DNA, 17 bp, Arabidopsis thaliana
aggcaggtcaaatttgg

SEQ ID NO: 39377 - DNA, 17 bp, Arabidopsis thaliana
aggcaggtcaacgtgag

SEQ ID NO: 39378 - DNA, 17 bp, Arabidopsis thaliana
aggcaggtcaagtagga

SEQ ID NO: 39379 - DNA, 17 bp, Arabidopsis thaliana
aggcaggtcatatggca

SEQ ID NO: 39380 - DNA, 17 bp, Arabidopsis thaliana
aggcaggtcatcctgca

SEQ ID NO: 39381 - DNA, 17 bp, Arabidopsis thaliana
aggcaggtccaacattt

SEQ ID NO: 39382 - DNA, 17 bp, Arabidopsis thaliana
aggcaggtccaagtccc

SEQ ID NO: 39383 - DNA, 17 bp, Arabidopsis thaliana
aggcaggtccttcagcg

SEQ ID NO: 39384 - DNA, 17 bp, Arabidopsis thaliana
aggcaggtcgccgtccc

SEQ ID NO: 39385 - DNA, 17 bp, Arabidopsis thaliana
aggcaggtcgcctgcat

SEQ ID NO: 39386 - DNA, 17 bp, Arabidopsis thaliana
aggcaggtctaattgca

SEQ ID NO: 39387 - DNA, 17 bp, Arabidopsis thaliana
aggcaggtctccaaggt

SEQ ID NO: 39388 - DNA, 17 bp, Arabidopsis thaliana
aggcaggtctcttgctc

SEQ ID NO: 39389 - DNA, 17 bp, Arabidopsis thaliana
aggcaggtcttgaccgt

SEQ ID NO: 39390 - DNA, 17 bp, Arabidopsis thaliana
aggcaggtgaaaagtat

SEQ ID NO: 39391 - DNA, 17 bp, Arabidopsis thaliana
aggcaggtgaacctgcg

SEQ ID NO: 39392 - DNA, 17 bp, Arabidopsis thaliana
aggcaggtgagctaaga

SEQ ID NO: 39393 - DNA, 17 bp, Arabidopsis thaliana
aggcaggtgatcacccg

SEQ ID NO: 39394 - DNA, 17 bp, Arabidopsis thaliana
aggcaggtgatcatccc

SEQ ID NO: 39395 - DNA, 17 bp, Arabidopsis thaliana
aggcaggtgatcatccg

SEQ ID NO: 39396 - DNA, 17 bp, Arabidopsis thaliana
aggcaggtgatcgacca

SEQ ID NO: 39397 - DNA, 17 bp, Arabidopsis thaliana
aggcaggtggacaagaa

SEQ ID NO: 39398 - DNA, 17 bp, Arabidopsis thaliana
aggcaggtggacctatg

SEQ ID NO: 39399 - DNA, 17 bp, Arabidopsis thaliana
aggcaggtggtgggcca

SEQ ID NO: 39400 - DNA, 17 bp, Arabidopsis thaliana
aggcaggtgtaagatgt

SEQ ID NO: 39401 - DNA, 17 bp, Arabidopsis thaliana
aggcaggttatgtcgca

SEQ ID NO: 39402 - DNA, 17 bp, Arabidopsis thaliana
aggcaggttcaatgtct

SEQ ID NO: 39403 - DNA, 17 bp, Arabidopsis thaliana
aggcaggttcgaaacct

SEQ ID NO: 39404 - DNA, 17 bp, Arabidopsis thaliana
aggcaggttcgattcca

SEQ ID NO: 39405 - DNA, 17 bp, Arabidopsis thaliana
aggcaggttcggtccct

SEQ ID NO: 39406 - DNA, 17 bp, Arabidopsis thaliana
aggcaggttcggttcgg

SEQ ID NO: 39407 - DNA, 17 bp, Arabidopsis thaliana
aggcaggttctcggccg

SEQ ID NO: 39408 - DNA, 17 bp, Arabidopsis thaliana
aggcaggttctggaatg

SEQ ID NO: 39409 - DNA, 17 bp, Arabidopsis thaliana
aggcaggttctgggccg

SEQ ID NO: 39410 - DNA, 17 bp, Arabidopsis thaliana
aggcaggttggttagtg

SEQ ID NO: 39411 - DNA, 17 bp, Arabidopsis thaliana
aggcaggttgttaggtt

SEQ ID NO: 39412 - DNA, 17 bp, Arabidopsis thaliana
aggcaggttgttcgggg

SEQ ID NO: 39413 - DNA, 17 bp, Arabidopsis thaliana
aggcaggttgttctggg

SEQ ID NO: 39414 - DNA, 17 bp, Arabidopsis thaliana
aggcaggtttctgtgaa

SEQ ID NO: 39415 - DNA, 17 bp, Arabidopsis thaliana
aggcaggttttgaatga

SEQ ID NO: 39416 - DNA, 17 bp, Arabidopsis thaliana
aggcagtagagtgtaac

SEQ ID NO: 39417 - DNA, 17 bp, Arabidopsis thaliana
aggcagtagcacactgt

SEQ ID NO: 39418 - DNA, 17 bp, Arabidopsis thaliana
aggcagtcactgaagcg

SEQ ID NO: 39419 - DNA, 17 bp, Arabidopsis thaliana
aggcagtcagaggagca

SEQ ID NO: 39420 - DNA, 17 bp, Arabidopsis thaliana
aggcagtccgaatcggg

SEQ ID NO: 39421 - DNA, 17 bp, Arabidopsis thaliana
aggcagtccgtgggaac

SEQ ID NO: 39422 - DNA, 17 bp, Arabidopsis thaliana
aggcagtcgctgcaatg

SEQ ID NO: 39423 - DNA, 17 bp, Arabidopsis thaliana
aggcagtctccttggct

SEQ ID NO: 39424 - DNA, 17 bp, Arabidopsis thaliana
aggcagtctctttggct

SEQ ID NO: 39425 - DNA, 17 bp, Arabidopsis thaliana
aggcagtctctttgtta

SEQ ID NO: 39426 - DNA, 17 bp, Arabidopsis thaliana
aggcagtctggatcggg

SEQ ID NO: 39427 - DNA, 17 bp, Arabidopsis thaliana
aggcagtctttttggct

SEQ ID NO: 39428 - DNA, 17 bp, Arabidopsis thaliana
aggcagtgatgaacgag

SEQ ID NO: 39429 - DNA, 17 bp, Arabidopsis thaliana
aggcagtggcgagtcgg

SEQ ID NO: 39430 - DNA, 17 bp, Arabidopsis thaliana
aggcagtgtccggactt

SEQ ID NO: 39431 - DNA, 17 bp, Arabidopsis thaliana
aggcagttccaaatgaa

SEQ ID NO: 39432 - DNA, 17 bp, Arabidopsis thaliana
aggcagttccaatccga

SEQ ID NO: 39433 - DNA, 17 bp, Arabidopsis thaliana
aggcagtttgtctacgt

SEQ ID NO: 39434 - DNA, 17 bp, Arabidopsis thaliana
aggcataagctttgtac

SEQ ID NO: 39435 - DNA, 17 bp, Arabidopsis thaliana
aggcatacaagatcggg

SEQ ID NO: 39436 - DNA, 17 bp, Arabidopsis thaliana
aggcatacctattggca

SEQ ID NO: 39437 - DNA, 17 bp, Arabidopsis thaliana
aggcatagactaacggt

SEQ ID NO: 39438 - DNA, 17 bp, Arabidopsis thaliana
aggcatagaggacatca

SEQ ID NO: 39439 - DNA, 17 bp, Arabidopsis thaliana
aggcatagctccggcgc

SEQ ID NO: 39440 - DNA, 17 bp, Arabidopsis thaliana
aggcataggaccctctt

SEQ ID NO: 39441 - DNA, 17 bp, Arabidopsis thaliana
aggcatagtgcgactgt

SEQ ID NO: 39442 - DNA, 17 bp, Arabidopsis thaliana
aggcatcctgtccttaa

SEQ ID NO: 39443 - DNA, 17 bp, Arabidopsis thaliana
aggcatgacagagttgt

SEQ ID NO: 39444 - DNA, 17 bp, Arabidopsis thaliana
aggcatgaccggttctt

SEQ ID NO: 39445 - DNA, 17 bp, Arabidopsis thaliana
aggcatgacgaggacag

SEQ ID NO: 39446 - DNA, 17 bp, Arabidopsis thaliana
aggcatgattttgtggg

SEQ ID NO: 39447 - DNA, 17 bp, Arabidopsis thaliana
aggcatgtcatgttgta

SEQ ID NO: 39448 - DNA, 17 bp, Arabidopsis thaliana
aggcatgtgccaggaaa

SEQ ID NO: 39449 - DNA, 17 bp, Arabidopsis thaliana
aggcatgttcggcatga

SEQ ID NO: 39450 - DNA, 17 bp, Arabidopsis thaliana
aggcattaaagcgtctt

SEQ ID NO: 39451 - DNA, 17 bp, Arabidopsis thaliana
aggcattaagggtaatt

SEQ ID NO: 39452 - DNA, 17 bp, Arabidopsis thaliana
aggcattactggtggtg

SEQ ID NO: 39453 - DNA, 17 bp, Arabidopsis thaliana
aggcattagcgataact

SEQ ID NO: 39454 - DNA, 17 bp, Arabidopsis thaliana
aggcattcatagcgatt

SEQ ID NO: 39455 - DNA, 17 bp, Arabidopsis thaliana
aggcattccaaactcgg

SEQ ID NO: 39456 - DNA, 17 bp, Arabidopsis thaliana
aggcattcttcaggaga

SEQ ID NO: 39457 - DNA, 17 bp, Arabidopsis thaliana
aggcattgacatcagac

SEQ ID NO: 39458 - DNA, 17 bp, Arabidopsis thaliana
aggcattgccggagact

SEQ ID NO: 39459 - DNA, 17 bp, Arabidopsis thaliana
aggcattgccggggact

SEQ ID NO: 39460 - DNA, 17 bp, Arabidopsis thaliana
aggcattgctctgtgac

SEQ ID NO: 39461 - DNA, 17 bp, Arabidopsis thaliana
aggcattggcgtttctt

SEQ ID NO: 39462 - DNA, 17 bp, Arabidopsis thaliana
aggcattggcgtttttt

SEQ ID NO: 39463 - DNA, 17 bp, Arabidopsis thaliana
aggcattgggggaggaa

SEQ ID NO: 39464 - DNA, 17 bp, Arabidopsis thaliana
aggcattgggggcgcaa

SEQ ID NO: 39465 - DNA, 17 bp, Arabidopsis thaliana
aggcattgtcattgcac

SEQ ID NO: 39466 - DNA, 17 bp, Arabidopsis thaliana
aggcattgtgttctaat

SEQ ID NO: 39467 - DNA, 17 bp, Arabidopsis thaliana
aggcattgttgttgatc

SEQ ID NO: 39468 - DNA, 17 bp, Arabidopsis thaliana
aggcatttattcttcac

SEQ ID NO: 39469 - DNA, 17 bp, Arabidopsis thaliana
aggcatttgggcttgaa

SEQ ID NO: 39470 - DNA, 17 bp, Arabidopsis thaliana
aggcatttgtcgcagcg

SEQ ID NO: 39471 - DNA, 17 bp, Arabidopsis thaliana
aggcattttcgtgatct

SEQ ID NO: 39472 - DNA, 17 bp, Arabidopsis thaliana
aggcattttcgtgatta

SEQ ID NO: 39473 - DNA, 17 bp, Arabidopsis thaliana
aggcattttcgtgattt

SEQ ID NO: 39474 - DNA, 17 bp, Arabidopsis thaliana
aggcatttttaagttat

SEQ ID NO: 39475 - DNA, 17 bp, Arabidopsis thaliana
aggcatttttcagggat

SEQ ID NO: 39476 - DNA, 17 bp, Arabidopsis thaliana
aggcatttttccaactt

SEQ ID NO: 39477 - DNA, 17 bp, Arabidopsis thaliana
aggccaaaaaaactaac

SEQ ID NO: 39478 - DNA, 17 bp, Arabidopsis thaliana
aggccaaaaagacatac

SEQ ID NO: 39479 - DNA, 17 bp, Arabidopsis thaliana
aggccaaaaagtactca

SEQ ID NO: 39480 - DNA, 17 bp, Arabidopsis thaliana
aggccaaaaatgcctag

SEQ ID NO: 39481 - DNA, 17 bp, Arabidopsis thaliana
aggccaaaactcataat

SEQ ID NO: 39482 - DNA, 17 bp, Arabidopsis thaliana
aggccaaaagtattcat

SEQ ID NO: 39483 - DNA, 17 bp, Arabidopsis thaliana
aggccaaaatagacatg

SEQ ID NO: 39484 - DNA, 17 bp, Arabidopsis thaliana
aggccaaaatagatcag

SEQ ID NO: 39485 - DNA, 17 bp, Arabidopsis thaliana
aggccaaaatccatacg

SEQ ID NO: 39486 - DNA, 17 bp, Arabidopsis thaliana
aggccaaaattcccgaa

SEQ ID NO: 39487 - DNA, 17 bp, Arabidopsis thaliana
aggccaaacttggcatg

SEQ ID NO: 39488 - DNA, 17 bp, Arabidopsis thaliana
aggccaaagatagtgtt

SEQ ID NO: 39489 - DNA, 17 bp, Arabidopsis thaliana
aggccaaagcagacatg

SEQ ID NO: 39490 - DNA, 17 bp, Arabidopsis thaliana
aggccaaagcccgtaat

SEQ ID NO: 39491 - DNA, 17 bp, Arabidopsis thaliana
aggccaaatctgcagag

SEQ ID NO: 39492 - DNA, 17 bp, Arabidopsis thaliana
aggccaaattagacaaa

SEQ ID NO: 39493 - DNA, 17 bp, Arabidopsis thaliana
aggccaacaatcacaac

SEQ ID NO: 39494 - DNA, 17 bp, Arabidopsis thaliana
aggccaacaccggattg

SEQ ID NO: 39495 - DNA, 17 bp, Arabidopsis thaliana
aggccaaccgcgtgcgg

SEQ ID NO: 39496 - DNA, 17 bp, Arabidopsis thaliana
aggccaactccagtggg

SEQ ID NO: 39497 - DNA, 17 bp, Arabidopsis thaliana
aggccaagaagcagcca

SEQ ID NO: 39498 - DNA, 17 bp, Arabidopsis thaliana
aggccaagaagcagccc

SEQ ID NO: 39499 - DNA, 17 bp, Arabidopsis thaliana
aggccaaggaagtttga

SEQ ID NO: 39500 - DNA, 17 bp, Arabidopsis thaliana
aggccaaggatgacttg

SEQ ID NO: 39501 - DNA, 17 bp, Arabidopsis thaliana
aggccaaggtttggcgt

SEQ ID NO: 39502 - DNA, 17 bp, Arabidopsis thaliana
aggccaagtgacttgtg

SEQ ID NO: 39503 - DNA, 17 bp, Arabidopsis thaliana
aggccaagtgtagttgt

SEQ ID NO: 39504 - DNA, 17 bp, Arabidopsis thaliana
aggccaagttggtattg

SEQ ID NO: 39505 - DNA, 17 bp, Arabidopsis thaliana
aggccaagtttgggccc

SEQ ID NO: 39506 - DNA, 17 bp, Arabidopsis thaliana
aggccaagtttgggctc

SEQ ID NO: 39507 - DNA, 17 bp, Arabidopsis thaliana
aggccaataagttctct

SEQ ID NO: 39508 - DNA, 17 bp, Arabidopsis thaliana
aggccaatacccgcacg

SEQ ID NO: 39509 - DNA, 17 bp, Arabidopsis thaliana
aggccaatcaggagcgg

SEQ ID NO: 39510 - DNA, 17 bp, Arabidopsis thaliana
aggccaatctaacgacc

SEQ ID NO: 39511 - DNA, 17 bp, Arabidopsis thaliana
aggccaatctctactag

SEQ ID NO: 39512 - DNA, 17 bp, Arabidopsis thaliana
aggccaatgctcttaga

SEQ ID NO: 39513 - DNA, 17 bp, Arabidopsis thaliana
aggccaatgtcagtttg

SEQ ID NO: 39514 - DNA, 17 bp, Arabidopsis thaliana
aggccacaaggaagttt

SEQ ID NO: 39515 - DNA, 17 bp, Arabidopsis thaliana
aggccacacagcccaac

SEQ ID NO: 39516 - DNA, 17 bp, Arabidopsis thaliana
aggccacacccgttgac

SEQ ID NO: 39517 - DNA, 17 bp, Arabidopsis thaliana
aggccacaccctttgac

SEQ ID NO: 39518 - DNA, 17 bp, Arabidopsis thaliana
aggccacactcgaccgt

SEQ ID NO: 39519 - DNA, 17 bp, Arabidopsis thaliana
aggccacacttgttgac

SEQ ID NO: 39520 - DNA, 17 bp, Arabidopsis thaliana
aggccacagtgtctgtc

SEQ ID NO: 39521 - DNA, 17 bp, Arabidopsis thaliana
aggccacagtgtttcac

SEQ ID NO: 39522 - DNA, 17 bp, Arabidopsis thaliana
aggccacatccgttgac

SEQ ID NO: 39523 - DNA, 17 bp, Arabidopsis thaliana
aggccacatccgttgat

SEQ ID NO: 39524 - DNA, 17 bp, Arabidopsis thaliana
aggccaccaatgttagc

SEQ ID NO: 39525 - DNA, 17 bp, Arabidopsis thaliana
aggccacctctatccgt

SEQ ID NO: 39526 - DNA, 17 bp, Arabidopsis thaliana
aggccacctgcatttct

SEQ ID NO: 39527 - DNA, 17 bp, Arabidopsis thaliana
aggccacctgtatttct

SEQ ID NO: 39528 - DNA, 17 bp, Arabidopsis thaliana
aggccacctgtatttgt

SEQ ID NO: 39529 - DNA, 17 bp, Arabidopsis thaliana
aggccacgaatctgagc

SEQ ID NO: 39530 - DNA, 17 bp, Arabidopsis thaliana
aggccacgcttgtttct

SEQ ID NO: 39531 - DNA, 17 bp, Arabidopsis thaliana
aggccacgctttcacgg

SEQ ID NO: 39532 - DNA, 17 bp, Arabidopsis thaliana
aggccacggctgactgg

SEQ ID NO: 39533 - DNA, 17 bp, Arabidopsis thaliana
aggccacgtctgcctgg

SEQ ID NO: 39534 - DNA, 17 bp, Arabidopsis thaliana
aggccactatggtcgct

SEQ ID NO: 39535 - DNA, 17 bp, Arabidopsis thaliana
aggccactgcgagtttg

SEQ ID NO: 39536 - DNA, 17 bp, Arabidopsis thaliana
aggccagaaaaaataca

SEQ ID NO: 39537 - DNA, 17 bp, Arabidopsis thaliana
aggccagaactccctgc

SEQ ID NO: 39538 - DNA, 17 bp, Arabidopsis thaliana
aggccagacaggttgat

SEQ ID NO: 39539 - DNA, 17 bp, Arabidopsis thaliana
aggccagaccggtgtcc

SEQ ID NO: 39540 - DNA, 17 bp, Arabidopsis thaliana
aggccagactcataggt

SEQ ID NO: 39541 - DNA, 17 bp, Arabidopsis thaliana
aggccagccctgatatt

SEQ ID NO: 39542 - DNA, 17 bp, Arabidopsis thaliana
aggccaggatagcatta

SEQ ID NO: 39543 - DNA, 17 bp, Arabidopsis thaliana
aggccagggagtctaca

SEQ ID NO: 39544 - DNA, 17 bp, Arabidopsis thaliana
aggccagggtgttgctc

SEQ ID NO: 39545 - DNA, 17 bp, Arabidopsis thaliana
aggccatacatgtcgtt

SEQ ID NO: 39546 - DNA, 17 bp, Arabidopsis thaliana
aggccatagcggtcggt

SEQ ID NO: 39547 - DNA, 17 bp, Arabidopsis thaliana
aggccataggacttagt

SEQ ID NO: 39548 - DNA, 17 bp, Arabidopsis thaliana
aggccatcagtgagtac

SEQ ID NO: 39549 - DNA, 17 bp, Arabidopsis thaliana
aggccatccccgtgatt

SEQ ID NO: 39550 - DNA, 17 bp, Arabidopsis thaliana
aggccatctacatcgtt

SEQ ID NO: 39551 - DNA, 17 bp, Arabidopsis thaliana
aggccatctccattggg

SEQ ID NO: 39552 - DNA, 17 bp, Arabidopsis thaliana
aggccatctccgacgta

SEQ ID NO: 39553 - DNA, 17 bp, Arabidopsis thaliana
aggccatgaatgcagcg

SEQ ID NO: 39554 - DNA, 17 bp, Arabidopsis thaliana
aggccatgactctttca

SEQ ID NO: 39555 - DNA, 17 bp, Arabidopsis thaliana
aggccatgcttgccggc

SEQ ID NO: 39556 - DNA, 17 bp, Arabidopsis thaliana
aggccatggagaacata

SEQ ID NO: 39557 - DNA, 17 bp, Arabidopsis thaliana
aggccatggagaacatg

SEQ ID NO: 39558 - DNA, 17 bp, Arabidopsis thaliana
aggccatggtgactgag

SEQ ID NO: 39559 - DNA, 17 bp, Arabidopsis thaliana
aggccatggtgatttag

SEQ ID NO: 39560 - DNA, 17 bp, Arabidopsis thaliana
aggccattacatcgtct

SEQ ID NO: 39561 - DNA, 17 bp, Arabidopsis thaliana
aggccattgacgagtcg

SEQ ID NO: 39562 - DNA, 17 bp, Arabidopsis thaliana
aggccattgagccagaa

SEQ ID NO: 39563 - DNA, 17 bp, Arabidopsis thaliana
aggccattgattgatac

SEQ ID NO: 39564 - DNA, 17 bp, Arabidopsis thaliana
aggccatttccattggt

SEQ ID NO: 39565 - DNA, 17 bp, Arabidopsis thaliana
aggccatttcgggcatg

SEQ ID NO: 39566 - DNA, 17 bp, Arabidopsis thaliana
aggccatttgtgtttat

SEQ ID NO: 39567 - DNA, 17 bp, Arabidopsis thaliana
aggccatttgttttttg

SEQ ID NO: 39568 - DNA, 17 bp, Arabidopsis thaliana
aggccatttttaaaact

SEQ ID NO: 39569 - DNA, 17 bp, Arabidopsis thaliana
aggcccaaaaggtgtca

SEQ ID NO: 39570 - DNA, 17 bp, Arabidopsis thaliana
aggcccaaagaccctac

SEQ ID NO: 39571 - DNA, 17 bp, Arabidopsis thaliana
aggcccaaagggatttc

SEQ ID NO: 39572 - DNA, 17 bp, Arabidopsis thaliana
aggcccaaagggtgtca

SEQ ID NO: 39573 - DNA, 17 bp, Arabidopsis thaliana
aggcccaaatcagttgt

SEQ ID NO: 39574 - DNA, 17 bp, Arabidopsis thaliana
aggcccaaatccaaacc

SEQ ID NO: 39575 - DNA, 17 bp, Arabidopsis thaliana
aggcccaactaaagccc

SEQ ID NO: 39576 - DNA, 17 bp, Arabidopsis thaliana
aggcccaagattaaacc

SEQ ID NO: 39577 - DNA, 17 bp, Arabidopsis thaliana
aggcccaatggactagt

SEQ ID NO: 39578 - DNA, 17 bp, Arabidopsis thaliana
aggcccaatggttgacc

SEQ ID NO: 39579 - DNA, 17 bp, Arabidopsis thaliana
aggcccaattgatttac

SEQ ID NO: 39580 - DNA, 17 bp, Arabidopsis thaliana
aggcccacaagctaagg

SEQ ID NO: 39581 - DNA, 17 bp, Arabidopsis thaliana
aggcccacagatccaca

SEQ ID NO: 39582 - DNA, 17 bp, Arabidopsis thaliana
aggcccacgaggcccga

SEQ ID NO: 39583 - DNA, 17 bp, Arabidopsis thaliana
aggcccagacacttttc

SEQ ID NO: 39584 - DNA, 17 bp, Arabidopsis thaliana
aggcccagcagattact

SEQ ID NO: 39585 - DNA, 17 bp, Arabidopsis thaliana
aggcccagcccacagtg

SEQ ID NO: 39586 - DNA, 17 bp, Arabidopsis thaliana
aggcccaggatagttga

SEQ ID NO: 39587 - DNA, 17 bp, Arabidopsis thaliana
aggcccaggttcacagt

SEQ ID NO: 39588 - DNA, 17 bp, Arabidopsis thaliana
aggcccatattgtccgt

SEQ ID NO: 39589 - DNA, 17 bp, Arabidopsis thaliana
aggcccatcaacaggct

SEQ ID NO: 39590 - DNA, 17 bp, Arabidopsis thaliana
aggcccatcatcaaacc

SEQ ID NO: 39591 - DNA, 17 bp, Arabidopsis thaliana
aggcccatcatcaagcc

SEQ ID NO: 39592 - DNA, 17 bp, Arabidopsis thaliana
aggcccatcatccaacc

SEQ ID NO: 39593 - DNA, 17 bp, Arabidopsis thaliana
aggcccatcatctaacc

SEQ ID NO: 39594 - DNA, 17 bp, Arabidopsis thaliana
aggcccatcatctaagc

SEQ ID NO: 39595 - DNA, 17 bp, Arabidopsis thaliana
aggcccatcatctaagt

SEQ ID NO: 39596 - DNA, 17 bp, Arabidopsis thaliana
aggcccatcatctaatc

SEQ ID NO: 39597 - DNA, 17 bp, Arabidopsis thaliana
aggcccatctccaaaag

SEQ ID NO: 39598 - DNA, 17 bp, Arabidopsis thaliana
aggcccatctcctggtc

SEQ ID NO: 39599 - DNA, 17 bp, Arabidopsis thaliana
aggcccatctgtctttg

SEQ ID NO: 39600 - DNA, 17 bp, Arabidopsis thaliana
aggcccatcttgacaat

SEQ ID NO: 39601 - DNA, 17 bp, Arabidopsis thaliana
aggcccatggtgcagaa

SEQ ID NO: 39602 - DNA, 17 bp, Arabidopsis thaliana
aggcccatgtccattaa

SEQ ID NO: 39603 - DNA, 17 bp, Arabidopsis thaliana
aggcccattacggactg

SEQ ID NO: 39604 - DNA, 17 bp, Arabidopsis thaliana
aggcccattatctaagc

SEQ ID NO: 39605 - DNA, 17 bp, Arabidopsis thaliana
aggcccattgtggactg

SEQ ID NO: 39606 - DNA, 17 bp, Arabidopsis thaliana
aggccccaaatcacact

SEQ ID NO: 39607 - DNA, 17 bp, Arabidopsis thaliana
aggccccaccgagatca

SEQ ID NO: 39608 - DNA, 17 bp, Arabidopsis thaliana
aggccccaggccccgac

SEQ ID NO: 39609 - DNA, 17 bp, Arabidopsis thaliana
aggcccccagggatacg

SEQ ID NO: 39610 - DNA, 17 bp, Arabidopsis thaliana
aggccccctacctgacg

SEQ ID NO: 39611 - DNA, 17 bp, Arabidopsis thaliana
aggcccccttccggggg

SEQ ID NO: 39612 - DNA, 17 bp, Arabidopsis thaliana
aggccccgaacctcctg

SEQ ID NO: 39613 - DNA, 17 bp, Arabidopsis thaliana
aggccccgaatggtgac

SEQ ID NO: 39614 - DNA, 17 bp, Arabidopsis thaliana
aggccccgactaagcat

SEQ ID NO: 39615 - DNA, 17 bp, Arabidopsis thaliana
aggccccgactaagcgt

SEQ ID NO: 39616 - DNA, 17 bp, Arabidopsis thaliana
aggccccgactaggcgc

SEQ ID NO: 39617 - DNA, 17 bp, Arabidopsis thaliana
aggccccgattaagcgt

SEQ ID NO: 39618 - DNA, 17 bp, Arabidopsis thaliana
aggccccgattaggcgt

SEQ ID NO: 39619 - DNA, 17 bp, Arabidopsis thaliana
aggccccgcacagagtt

SEQ ID NO: 39620 - DNA, 17 bp, Arabidopsis thaliana
aggccccggaactcatc

SEQ ID NO: 39621 - DNA, 17 bp, Arabidopsis thaliana
aggccccgtcgactcct

SEQ ID NO: 39622 - DNA, 17 bp, Arabidopsis thaliana
aggcccctaaatgaccg

SEQ ID NO: 39623 - DNA, 17 bp, Arabidopsis thaliana
aggcccctaagtgaccg

SEQ ID NO: 39624 - DNA, 17 bp, Arabidopsis thaliana
aggcccgaaaccacagc

SEQ ID NO: 39625 - DNA, 17 bp, Arabidopsis thaliana
aggcccgaaaccacatc

SEQ ID NO: 39626 - DNA, 17 bp, Arabidopsis thaliana
aggcccgaaaccataac

SEQ ID NO: 39627 - DNA, 17 bp, Arabidopsis thaliana
aggcccgaaatcacatc

SEQ ID NO: 39628 - DNA, 17 bp, Arabidopsis thaliana
aggcccgacccgaagca

SEQ ID NO: 39629 - DNA, 17 bp, Arabidopsis thaliana
aggcccgaccgcagaag

SEQ ID NO: 39630 - DNA, 17 bp, Arabidopsis thaliana
aggcccgactcttggaa

SEQ ID NO: 39631 - DNA, 17 bp, Arabidopsis thaliana
aggcccgatgtcgttac

SEQ ID NO: 39632 - DNA, 17 bp, Arabidopsis thaliana
aggcccgcctaaacaga

SEQ ID NO: 39633 - DNA, 17 bp, Arabidopsis thaliana
aggcccgcctaaataag

SEQ ID NO: 39634 - DNA, 17 bp, Arabidopsis thaliana
aggcccggaaatgtaga

SEQ ID NO: 39635 - DNA, 17 bp, Arabidopsis thaliana
aggcccggaattacaat

SEQ ID NO: 39636 - DNA, 17 bp, Arabidopsis thaliana
aggcccggaattccaat

SEQ ID NO: 39637 - DNA, 17 bp, Arabidopsis thaliana
aggcccggtccgtcgct

SEQ ID NO: 39638 - DNA, 17 bp, Arabidopsis thaliana
aggcccggtctacatgt

SEQ ID NO: 39639 - DNA, 17 bp, Arabidopsis thaliana
aggcccgtatggttttc

SEQ ID NO: 39640 - DNA, 17 bp, Arabidopsis thaliana
aggcccgtctcaatatt

SEQ ID NO: 39641 - DNA, 17 bp, Arabidopsis thaliana
aggccctaaacgtgcgc

SEQ ID NO: 39642 - DNA, 17 bp, Arabidopsis thaliana
aggccctaaccaaaaac

SEQ ID NO: 39643 - DNA, 17 bp, Arabidopsis thaliana
aggccctacatctccca

SEQ ID NO: 39644 - DNA, 17 bp, Arabidopsis thaliana
aggccctacatctctca

SEQ ID NO: 39645 - DNA, 17 bp, Arabidopsis thaliana
aggccctacatcttcca

SEQ ID NO: 39646 - DNA, 17 bp, Arabidopsis thaliana
aggccctatcgactgat

SEQ ID NO: 39647 - DNA, 17 bp, Arabidopsis thaliana
aggccctatgtaacgcc

SEQ ID NO: 39648 - DNA, 17 bp, Arabidopsis thaliana
aggccctctgcgtgaag

SEQ ID NO: 39649 - DNA, 17 bp, Arabidopsis thaliana
aggccctctggcctttt

SEQ ID NO: 39650 - DNA, 17 bp, Arabidopsis thaliana
aggccctcttgttctag

SEQ ID NO: 39651 - DNA, 17 bp, Arabidopsis thaliana
aggccctgaatggatac

SEQ ID NO: 39652 - DNA, 17 bp, Arabidopsis thaliana
aggccctgaatggatgc

SEQ ID NO: 39653 - DNA, 17 bp, Arabidopsis thaliana
aggccctggatagacag

SEQ ID NO: 39654 - DNA, 17 bp, Arabidopsis thaliana
aggccctgttcgtttca

SEQ ID NO: 39655 - DNA, 17 bp, Arabidopsis thaliana
aggccctgttcgtttcc

SEQ ID NO: 39656 - DNA, 17 bp, Arabidopsis thaliana
aggccctgttcgtttct

SEQ ID NO: 39657 - DNA, 17 bp, Arabidopsis thaliana
aggccctgttcgtttga

SEQ ID NO: 39658 - DNA, 17 bp, Arabidopsis thaliana
aggccctgttctttttc

SEQ ID NO: 39659 - DNA, 17 bp, Arabidopsis thaliana
aggccctgtttgtttct

SEQ ID NO: 39660 - DNA, 17 bp, Arabidopsis thaliana
aggccctttgtcgctaa

SEQ ID NO: 39661 - DNA, 17 bp, Arabidopsis thaliana
aggcccttttggaactg

SEQ ID NO: 39662 - DNA, 17 bp, Arabidopsis thaliana
aggccctttttggaact

SEQ ID NO: 39663 - DNA, 17 bp, Arabidopsis thaliana
aggccctttttggatct

SEQ ID NO: 39664 - DNA, 17 bp, Arabidopsis thaliana
aggccgaaacccgtaat

SEQ ID NO: 39665 - DNA, 17 bp, Arabidopsis thaliana
aggccgaaaccgtaatc

SEQ ID NO: 39666 - DNA, 17 bp, Arabidopsis thaliana
aggccgaaacgatggtc

SEQ ID NO: 39667 - DNA, 17 bp, Arabidopsis thaliana
aggccgaaagctgttca

SEQ ID NO: 39668 - DNA, 17 bp, Arabidopsis thaliana
aggccgaaatccgtaat

SEQ ID NO: 39669 - DNA, 17 bp, Arabidopsis thaliana
aggccgaaatgcatcac

SEQ ID NO: 39670 - DNA, 17 bp, Arabidopsis thaliana
aggccgaaatgcatgac

SEQ ID NO: 39671 - DNA, 17 bp, Arabidopsis thaliana
aggccgaacatggatgg

SEQ ID NO: 39672 - DNA, 17 bp, Arabidopsis thaliana
aggccgaagaggggaaa

SEQ ID NO: 39673 - DNA, 17 bp, Arabidopsis thaliana
aggccgaatcccgtaat

SEQ ID NO: 39674 - DNA, 17 bp, Arabidopsis thaliana
aggccgaatcttggtct

SEQ ID NO: 39675 - DNA, 17 bp, Arabidopsis thaliana
aggccgaattgtcctaa

SEQ ID NO: 39676 - DNA, 17 bp, Arabidopsis thaliana
aggccgacacgacggct

SEQ ID NO: 39677 - DNA, 17 bp, Arabidopsis thaliana
aggccgacagttgagcg

SEQ ID NO: 39678 - DNA, 17 bp, Arabidopsis thaliana
aggccgacagttggagg

SEQ ID NO: 39679 - DNA, 17 bp, Arabidopsis thaliana
aggccgagaacactgag

SEQ ID NO: 39680 - DNA, 17 bp, Arabidopsis thaliana
aggccgagacttggggt

SEQ ID NO: 39681 - DNA, 17 bp, Arabidopsis thaliana
aggccgagactttctgc

SEQ ID NO: 39682 - DNA, 17 bp, Arabidopsis thaliana
aggccgagcagagcaat

SEQ ID NO: 39683 - DNA, 17 bp, Arabidopsis thaliana
aggccgagctcactgtg

SEQ ID NO: 39684 - DNA, 17 bp, Arabidopsis thaliana
aggccgagtatgaccaa

SEQ ID NO: 39685 - DNA, 17 bp, Arabidopsis thaliana
aggccgagtcaacgcaa

SEQ ID NO: 39686 - DNA, 17 bp, Arabidopsis thaliana
aggccgagtgactttgg

SEQ ID NO: 39687 - DNA, 17 bp, Arabidopsis thaliana
aggccgagttcgaagac

SEQ ID NO: 39688 - DNA, 17 bp, Arabidopsis thaliana
aggccgataccatgagt

SEQ ID NO: 39689 - DNA, 17 bp, Arabidopsis thaliana
aggccgatattttgaac

SEQ ID NO: 39690 - DNA, 17 bp, Arabidopsis thaliana
aggccgattgcatttct

SEQ ID NO: 39691 - DNA, 17 bp, Arabidopsis thaliana
aggccgattttttgaac

SEQ ID NO: 39692 - DNA, 17 bp, Arabidopsis thaliana
aggccgattttttgaat

SEQ ID NO: 39693 - DNA, 17 bp, Arabidopsis thaliana
aggccgcaaggtggggc

SEQ ID NO: 39694 - DNA, 17 bp, Arabidopsis thaliana
aggccgcataggggcca

SEQ ID NO: 39695 - DNA, 17 bp, Arabidopsis thaliana
aggccgccagcatttct

SEQ ID NO: 39696 - DNA, 17 bp, Arabidopsis thaliana
aggccgcccatatgcat

SEQ ID NO: 39697 - DNA, 17 bp, Arabidopsis thaliana
aggccgcccatggactt

SEQ ID NO: 39698 - DNA, 17 bp, Arabidopsis thaliana
aggccgcccatgggctt

SEQ ID NO: 39699 - DNA, 17 bp, Arabidopsis thaliana
aggccgcccattggctt

SEQ ID NO: 39700 - DNA, 17 bp, Arabidopsis thaliana
aggccgccgccggaact

SEQ ID NO: 39701 - DNA, 17 bp, Arabidopsis thaliana
aggccgcctgcattaac

SEQ ID NO: 39702 - DNA, 17 bp, Arabidopsis thaliana
aggccgcctgcattgac

SEQ ID NO: 39703 - DNA, 17 bp, Arabidopsis thaliana
aggccgcctgcatttct

SEQ ID NO: 39704 - DNA, 17 bp, Arabidopsis thaliana
aggccgcctgcattttt

SEQ ID NO: 39705 - DNA, 17 bp, Arabidopsis thaliana
aggccgcctgtatttct

SEQ ID NO: 39706 - DNA, 17 bp, Arabidopsis thaliana
aggccgccttcctttct

SEQ ID NO: 39707 - DNA, 17 bp, Arabidopsis thaliana
aggccggaccgatgtgg

SEQ ID NO: 39708 - DNA, 17 bp, Arabidopsis thaliana
aggccggtcagtgctct

SEQ ID NO: 39709 - DNA, 17 bp, Arabidopsis thaliana
aggccgtacctctgcac

SEQ ID NO: 39710 - DNA, 17 bp, Arabidopsis thaliana
aggccgtagtgtgggta

SEQ ID NO: 39711 - DNA, 17 bp, Arabidopsis thaliana
aggccgtcaggcttgac

SEQ ID NO: 39712 - DNA, 17 bp, Arabidopsis thaliana
aggccgtcattggaggt

SEQ ID NO: 39713 - DNA, 17 bp, Arabidopsis thaliana
aggccgtcgatgggaag

SEQ ID NO: 39714 - DNA, 17 bp, Arabidopsis thaliana
aggccgtgacacgtcaa

SEQ ID NO: 39715 - DNA, 17 bp, Arabidopsis thaliana
aggccgtgatagagacg

SEQ ID NO: 39716 - DNA, 17 bp, Arabidopsis thaliana
aggccgtggctctccgt

SEQ ID NO: 39717 - DNA, 17 bp, Arabidopsis thaliana
aggccgtggcttccgta

SEQ ID NO: 39718 - DNA, 17 bp, Arabidopsis thaliana
aggccgtgttcaaacat

SEQ ID NO: 39719 - DNA, 17 bp, Arabidopsis thaliana
aggccgtgttcaaactt

SEQ ID NO: 39720 - DNA, 17 bp, Arabidopsis thaliana
aggccgttgagttttta

SEQ ID NO: 39721 - DNA, 17 bp, Arabidopsis thaliana
aggccgtttctaaggaa

SEQ ID NO: 39722 - DNA, 17 bp, Arabidopsis thaliana
aggcctaaaggttgtca

SEQ ID NO: 39723 - DNA, 17 bp, Arabidopsis thaliana
aggcctaactgacagac

SEQ ID NO: 39724 - DNA, 17 bp, Arabidopsis thaliana
aggcctaagaattgtat

SEQ ID NO: 39725 - DNA, 17 bp, Arabidopsis thaliana
aggcctaagtagtgttt

SEQ ID NO: 39726 - DNA, 17 bp, Arabidopsis thaliana
aggcctacgggtcctga

SEQ ID NO: 39727 - DNA, 17 bp, Arabidopsis thaliana
aggcctagagaaatgct

SEQ ID NO: 39728 - DNA, 17 bp, Arabidopsis thaliana
aggcctaggcacgaaac

SEQ ID NO: 39729 - DNA, 17 bp, Arabidopsis thaliana
aggcctagggttaatta

SEQ ID NO: 39730 - DNA, 17 bp, Arabidopsis thaliana
aggcctaggtcctcttc

SEQ ID NO: 39731 - DNA, 17 bp, Arabidopsis thaliana
aggcctatacccgtccg

SEQ ID NO: 39732 - DNA, 17 bp, Arabidopsis thaliana
aggcctatagctcagtg

SEQ ID NO: 39733 - DNA, 17 bp, Arabidopsis thaliana
aggcctataggtgtgaa

SEQ ID NO: 39734 - DNA, 17 bp, Arabidopsis thaliana
aggcctatcatctaagc

SEQ ID NO: 39735 - DNA, 17 bp, Arabidopsis thaliana
aggcctatgtccaattg

SEQ ID NO: 39736 - DNA, 17 bp, Arabidopsis thaliana
aggcctcaacttgacag

SEQ ID NO: 39737 - DNA, 17 bp, Arabidopsis thaliana
aggcctcaggccctttt

SEQ ID NO: 39738 - DNA, 17 bp, Arabidopsis thaliana
aggcctccaggcaagcc

SEQ ID NO: 39739 - DNA, 17 bp, Arabidopsis thaliana
aggcctccagtgatcgc

SEQ ID NO: 39740 - DNA, 17 bp, Arabidopsis thaliana
aggcctccggaatccgg

SEQ ID NO: 39741 - DNA, 17 bp, Arabidopsis thaliana
aggcctccgtctgcctc

SEQ ID NO: 39742 - DNA, 17 bp, Arabidopsis thaliana
aggcctccgttatgacc

SEQ ID NO: 39743 - DNA, 17 bp, Arabidopsis thaliana
aggcctcgatgagtagg

SEQ ID NO: 39744 - DNA, 17 bp, Arabidopsis thaliana
aggcctcgattagtagg

SEQ ID NO: 39745 - DNA, 17 bp, Arabidopsis thaliana
aggcctcgcctcagaac

SEQ ID NO: 39746 - DNA, 17 bp, Arabidopsis thaliana
aggcctcggtatccacc

SEQ ID NO: 39747 - DNA, 17 bp, Arabidopsis thaliana
aggcctctccacctatt

SEQ ID NO: 39748 - DNA, 17 bp, Arabidopsis thaliana
aggcctctgtacatcct

SEQ ID NO: 39749 - DNA, 17 bp, Arabidopsis thaliana
aggcctctgttcttaaa

SEQ ID NO: 39750 - DNA, 17 bp, Arabidopsis thaliana
aggcctgaaaccatagc

SEQ ID NO: 39751 - DNA, 17 bp, Arabidopsis thaliana
aggcctgaacctgcccc

SEQ ID NO: 39752 - DNA, 17 bp, Arabidopsis thaliana
aggcctgaagggattaa

SEQ ID NO: 39753 - DNA, 17 bp, Arabidopsis thaliana
aggcctgaagggattac

SEQ ID NO: 39754 - DNA, 17 bp, Arabidopsis thaliana
aggcctgacctgttcta

SEQ ID NO: 39755 - DNA, 17 bp, Arabidopsis thaliana
aggcctgactggtttaa

SEQ ID NO: 39756 - DNA, 17 bp, Arabidopsis thaliana
aggcctgagccaagtca

SEQ ID NO: 39757 - DNA, 17 bp, Arabidopsis thaliana
aggcctgattccgtatc

SEQ ID NO: 39758 - DNA, 17 bp, Arabidopsis thaliana
aggcctgattttgctac

SEQ ID NO: 39759 - DNA, 17 bp, Arabidopsis thaliana
aggcctgcagtagagta

SEQ ID NO: 39760 - DNA, 17 bp, Arabidopsis thaliana
aggcctgcccacgaacc

SEQ ID NO: 39761 - DNA, 17 bp, Arabidopsis thaliana
aggcctgcgagattagt

SEQ ID NO: 39762 - DNA, 17 bp, Arabidopsis thaliana
aggcctgcgccgacttg

SEQ ID NO: 39763 - DNA, 17 bp, Arabidopsis thaliana
aggcctgggcacgaagc

SEQ ID NO: 39764 - DNA, 17 bp, Arabidopsis thaliana
aggcctggtgggattac

SEQ ID NO: 39765 - DNA, 17 bp, Arabidopsis thaliana
aggcctgtcgactatct

SEQ ID NO: 39766 - DNA, 17 bp, Arabidopsis thaliana
aggcctgtgatacctcg

SEQ ID NO: 39767 - DNA, 17 bp, Arabidopsis thaliana
aggcctgttacggatcc

SEQ ID NO: 39768 - DNA, 17 bp, Arabidopsis thaliana
aggccttaccaaatcat

SEQ ID NO: 39769 - DNA, 17 bp, Arabidopsis thaliana
aggccttagatgttctg

SEQ ID NO: 39770 - DNA, 17 bp, Arabidopsis thaliana
aggccttatgacgtgtg

SEQ ID NO: 39771 - DNA, 17 bp, Arabidopsis thaliana
aggccttctcttctctg

SEQ ID NO: 39772 - DNA, 17 bp, Arabidopsis thaliana
aggccttgaagatgacg

SEQ ID NO: 39773 - DNA, 17 bp, Arabidopsis thaliana
aggccttggcttatgct

SEQ ID NO: 39774 - DNA, 17 bp, Arabidopsis thaliana
aggccttgggatgggtc

SEQ ID NO: 39775 - DNA, 17 bp, Arabidopsis thaliana
aggccttgggccaattg

SEQ ID NO: 39776 - DNA, 17 bp, Arabidopsis thaliana
aggccttgggtcaatcg

SEQ ID NO: 39777 - DNA, 17 bp, Arabidopsis thaliana
aggccttgggtcaattg

SEQ ID NO: 39778 - DNA, 17 bp, Arabidopsis thaliana
aggccttgtcatttaga

SEQ ID NO: 39779 - DNA, 17 bp, Arabidopsis thaliana
aggccttgtttgtttct

SEQ ID NO: 39780 - DNA, 17 bp, Arabidopsis thaliana
aggcctttaagatctgg

SEQ ID NO: 39781 - DNA, 17 bp, Arabidopsis thaliana
aggcctttaagattcgg

SEQ ID NO: 39782 - DNA, 17 bp, Arabidopsis thaliana
aggcctttacgataaga

SEQ ID NO: 39783 - DNA, 17 bp, Arabidopsis thaliana
aggcctttaggataagg

SEQ ID NO: 39784 - DNA, 17 bp, Arabidopsis thaliana
aggcctttgaatggtaa

SEQ ID NO: 39785 - DNA, 17 bp, Arabidopsis thaliana
aggcctttgacagatcc

SEQ ID NO: 39786 - DNA, 17 bp, Arabidopsis thaliana
aggcctttgattgatac

SEQ ID NO: 39787 - DNA, 17 bp, Arabidopsis thaliana
aggcctttggtgtccac

SEQ ID NO: 39788 - DNA, 17 bp, Arabidopsis thaliana
aggccttttgggaagga

SEQ ID NO: 39789 - DNA, 17 bp, Arabidopsis thaliana
aggcctttttttgctgg

SEQ ID NO: 39790 - DNA, 17 bp, Arabidopsis thaliana
aggcgaaacccgtaatc

SEQ ID NO: 39791 - DNA, 17 bp, Arabidopsis thaliana
aggcgaaacttagaagt

SEQ ID NO: 39792 - DNA, 17 bp, Arabidopsis thaliana
aggcgaaacttagaggt

SEQ ID NO: 39793 - DNA, 17 bp, Arabidopsis thaliana
aggcgaaagagcgctag

SEQ ID NO: 39794 - DNA, 17 bp, Arabidopsis thaliana
aggcgaaataccgaggc

SEQ ID NO: 39795 - DNA, 17 bp, Arabidopsis thaliana
aggcgaaatcgtcattt

SEQ ID NO: 39796 - DNA, 17 bp, Arabidopsis thaliana
aggcgaaccacatttga

SEQ ID NO: 39797 - DNA, 17 bp, Arabidopsis thaliana
aggcgaacccatctgga

SEQ ID NO: 39798 - DNA, 17 bp, Arabidopsis thaliana
aggcgaaccggagtgtc

SEQ ID NO: 39799 - DNA, 17 bp, Arabidopsis thaliana
aggcgaacgcgggcgca

SEQ ID NO: 39800 - DNA, 17 bp, Arabidopsis thaliana
aggcgaactttagactt

SEQ ID NO: 39801 - DNA, 17 bp, Arabidopsis thaliana
aggcgaagaaggccccc

SEQ ID NO: 39802 - DNA, 17 bp, Arabidopsis thaliana
aggcgaagcagatccgg

SEQ ID NO: 39803 - DNA, 17 bp, Arabidopsis thaliana
aggcgaagcccgtaatt

SEQ ID NO: 39804 - DNA, 17 bp, Arabidopsis thaliana
aggcgaagcggtggagt

SEQ ID NO: 39805 - DNA, 17 bp, Arabidopsis thaliana
aggcgaagcgtgaagtg

SEQ ID NO: 39806 - DNA, 17 bp, Arabidopsis thaliana
aggcgaagcttagagat

SEQ ID NO: 39807 - DNA, 17 bp, Arabidopsis thaliana
aggcgaagcttagaggt

SEQ ID NO: 39808 - DNA, 17 bp, Arabidopsis thaliana
aggcgaaggcgcgtaca

SEQ ID NO: 39809 - DNA, 17 bp, Arabidopsis thaliana
aggcgaaggtgttgacg

SEQ ID NO: 39810 - DNA, 17 bp, Arabidopsis thaliana
aggcgaagtatacgggc

SEQ ID NO: 39811 - DNA, 17 bp, Arabidopsis thaliana
aggcgaagtccgtaatc

SEQ ID NO: 39812 - DNA, 17 bp, Arabidopsis thaliana
aggcgaatagggtcttt

SEQ ID NO: 39813 - DNA, 17 bp, Arabidopsis thaliana
aggcgaatcatctcggc

SEQ ID NO: 39814 - DNA, 17 bp, Arabidopsis thaliana
aggcgaatgaccggcat

SEQ ID NO: 39815 - DNA, 17 bp, Arabidopsis thaliana
aggcgaatgataactcc

SEQ ID NO: 39816 - DNA, 17 bp, Arabidopsis thaliana
aggcgaatgatcagaga

SEQ ID NO: 39817 - DNA, 17 bp, Arabidopsis thaliana
aggcgaattctgagatc

SEQ ID NO: 39818 - DNA, 17 bp, Arabidopsis thaliana
aggcgaattctgagatt

SEQ ID NO: 39819 - DNA, 17 bp, Arabidopsis thaliana
aggcgaattgtggttgt

SEQ ID NO: 39820 - DNA, 17 bp, Arabidopsis thaliana
aggcgacacagaaacaa

SEQ ID NO: 39821 - DNA, 17 bp, Arabidopsis thaliana
aggcgacacagaaacga

SEQ ID NO: 39822 - DNA, 17 bp, Arabidopsis thaliana
aggcgacacccggccgt

SEQ ID NO: 39823 - DNA, 17 bp, Arabidopsis thaliana
aggcgacagacagactg

SEQ ID NO: 39824 - DNA, 17 bp, Arabidopsis thaliana
aggcgacagtggttacg

SEQ ID NO: 39825 - DNA, 17 bp, Arabidopsis thaliana
aggcgaccaagtcttcg

SEQ ID NO: 39826 - DNA, 17 bp, Arabidopsis thaliana
aggcgaccaggcagtcc

SEQ ID NO: 39827 - DNA, 17 bp, Arabidopsis thaliana
aggcgaccccaaggagt

SEQ ID NO: 39828 - DNA, 17 bp, Arabidopsis thaliana
aggcgaccggattacct

SEQ ID NO: 39829 - DNA, 17 bp, Arabidopsis thaliana
aggcgaccgtttaattt

SEQ ID NO: 39830 - DNA, 17 bp, Arabidopsis thaliana
aggcgacctacacgtga

SEQ ID NO: 39831 - DNA, 17 bp, Arabidopsis thaliana
aggcgacctgactacct

SEQ ID NO: 39832 - DNA, 17 bp, Arabidopsis thaliana
aggcgacctgattacct

SEQ ID NO: 39833 - DNA, 17 bp, Arabidopsis thaliana
aggcgaccttactacct

SEQ ID NO: 39834 - DNA, 17 bp, Arabidopsis thaliana
aggcgaccttattacct

SEQ ID NO: 39835 - DNA, 17 bp, Arabidopsis thaliana
aggcgacgaacaggtgg

SEQ ID NO: 39836 - DNA, 17 bp, Arabidopsis thaliana
aggcgacgacctcgtgg

SEQ ID NO: 39837 - DNA, 17 bp, Arabidopsis thaliana
aggcgacgatctatcct

SEQ ID NO: 39838 - DNA, 17 bp, Arabidopsis thaliana
aggcgacgcggattacg

SEQ ID NO: 39839 - DNA, 17 bp, Arabidopsis thaliana
aggcgacgctgcctggg

SEQ ID NO: 39840 - DNA, 17 bp, Arabidopsis thaliana
aggcgacggatcgcatg

SEQ ID NO: 39841 - DNA, 17 bp, Arabidopsis thaliana
aggcgacggatctgagg

SEQ ID NO: 39842 - DNA, 17 bp, Arabidopsis thaliana
aggcgacggcacgtctg

SEQ ID NO: 39843 - DNA, 17 bp, Arabidopsis thaliana
aggcgacggctagggtt

SEQ ID NO: 39844 - DNA, 17 bp, Arabidopsis thaliana
aggcgacggtgatggcg

SEQ ID NO: 39845 - DNA, 17 bp, Arabidopsis thaliana
aggcgacggtggtgaca

SEQ ID NO: 39846 - DNA, 17 bp, Arabidopsis thaliana
aggcgacggttctttcg

SEQ ID NO: 39847 - DNA, 17 bp, Arabidopsis thaliana
aggcgacgttgcgactg

SEQ ID NO: 39848 - DNA, 17 bp, Arabidopsis thaliana
aggcgactatgactcga

SEQ ID NO: 39849 - DNA, 17 bp, Arabidopsis thaliana
aggcgacttcgagaacg

SEQ ID NO: 39850 - DNA, 17 bp, Arabidopsis thaliana
aggcgacttcgagagcg

SEQ ID NO: 39851 - DNA, 17 bp, Arabidopsis thaliana
aggcgacttggctctgg

SEQ ID NO: 39852 - DNA, 17 bp, Arabidopsis thaliana
aggcgactttctgggct

SEQ ID NO: 39853 - DNA, 17 bp, Arabidopsis thaliana
aggcgagaccagtgagg

SEQ ID NO: 39854 - DNA, 17 bp, Arabidopsis thaliana
aggcgagaccgacacca

SEQ ID NO: 39855 - DNA, 17 bp, Arabidopsis thaliana
aggcgagaccgacagca

SEQ ID NO: 39856 - DNA, 17 bp, Arabidopsis thaliana
aggcgagacgccttatt

SEQ ID NO: 39857 - DNA, 17 bp, Arabidopsis thaliana
aggcgagacgccttggt

SEQ ID NO: 39858 - DNA, 17 bp, Arabidopsis thaliana
aggcgagagaaccagtt

SEQ ID NO: 39859 - DNA, 17 bp, Arabidopsis thaliana
aggcgagagatcagacg

SEQ ID NO: 39860 - DNA, 17 bp, Arabidopsis thaliana
aggcgagatccgcggcg

SEQ ID NO: 39861 - DNA, 17 bp, Arabidopsis thaliana
aggcgagatccgcgggg

SEQ ID NO: 39862 - DNA, 17 bp, Arabidopsis thaliana
aggcgagatcgatgtga

SEQ ID NO: 39863 - DNA, 17 bp, Arabidopsis thaliana
aggcgagatctgcggcg

SEQ ID NO: 39864 - DNA, 17 bp, Arabidopsis thaliana
aggcgagatctgggaat

SEQ ID NO: 39865 - DNA, 17 bp, Arabidopsis thaliana
aggcgagattctgtttg

SEQ ID NO: 39866 - DNA, 17 bp, Arabidopsis thaliana
aggcgagcaaatgggaa

SEQ ID NO: 39867 - DNA, 17 bp, Arabidopsis thaliana
aggcgagcacgtgtcat

SEQ ID NO: 39868 - DNA, 17 bp, Arabidopsis thaliana
aggcgagggcacgtctg

SEQ ID NO: 39869 - DNA, 17 bp, Arabidopsis thaliana
aggcgagggtcgcgggt

SEQ ID NO: 39870 - DNA, 17 bp, Arabidopsis thaliana
aggcgaggttggcgaat

SEQ ID NO: 39871 - DNA, 17 bp, Arabidopsis thaliana
aggcgagtagaccttgt

SEQ ID NO: 39872 - DNA, 17 bp, Arabidopsis thaliana
aggcgagtcgtaaatcc

SEQ ID NO: 39873 - DNA, 17 bp, Arabidopsis thaliana
aggcgagtttgcaaaac

SEQ ID NO: 39874 - DNA, 17 bp, Arabidopsis thaliana
aggcgataacgtggcgc

SEQ ID NO: 39875 - DNA, 17 bp, Arabidopsis thaliana
aggcgataacgtggtgc

SEQ ID NO: 39876 - DNA, 17 bp, Arabidopsis thaliana
aggcgatagaacaaagc

SEQ ID NO: 39877 - DNA, 17 bp, Arabidopsis thaliana
aggcgatcactgactac

SEQ ID NO: 39878 - DNA, 17 bp, Arabidopsis thaliana
aggcgatccaggagtct

SEQ ID NO: 39879 - DNA, 17 bp, Arabidopsis thaliana
aggcgatcctcccatct

SEQ ID NO: 39880 - DNA, 17 bp, Arabidopsis thaliana
aggcgatgaagtgtatg

SEQ ID NO: 39881 - DNA, 17 bp, Arabidopsis thaliana
aggcgatgaagtgtggt

SEQ ID NO: 39882 - DNA, 17 bp, Arabidopsis thaliana
aggcgatgacgtggcgc

SEQ ID NO: 39883 - DNA, 17 bp, Arabidopsis thaliana
aggcgatgattcgatat

SEQ ID NO: 39884 - DNA, 17 bp, Arabidopsis thaliana
aggcgatggatcaccgt

SEQ ID NO: 39885 - DNA, 17 bp, Arabidopsis thaliana
aggcgatgggttgttgt

SEQ ID NO: 39886 - DNA, 17 bp, Arabidopsis thaliana
aggcgatgtcgttttgt

SEQ ID NO: 39887 - DNA, 17 bp, Arabidopsis thaliana
aggcgatgtgttgttgt

SEQ ID NO: 39888 - DNA, 17 bp, Arabidopsis thaliana
aggcgattacaaaccgt

SEQ ID NO: 39889 - DNA, 17 bp, Arabidopsis thaliana
aggcgattacataccct

SEQ ID NO: 39890 - DNA, 17 bp, Arabidopsis thaliana
aggcgattacataccgt

SEQ ID NO: 39891 - DNA, 17 bp, Arabidopsis thaliana
aggcgattaccctcata

SEQ ID NO: 39892 - DNA, 17 bp, Arabidopsis thaliana
aggcgattatctcaatt

SEQ ID NO: 39893 - DNA, 17 bp, Arabidopsis thaliana
aggcgattatcttcagc

SEQ ID NO: 39894 - DNA, 17 bp, Arabidopsis thaliana
aggcgattatgactcga

SEQ ID NO: 39895 - DNA, 17 bp, Arabidopsis thaliana
aggcgattatttcagtt

SEQ ID NO: 39896 - DNA, 17 bp, Arabidopsis thaliana
aggcgattcatgaagac

SEQ ID NO: 39897 - DNA, 17 bp, Arabidopsis thaliana
aggcgattcgcgttttt

SEQ ID NO: 39898 - DNA, 17 bp, Arabidopsis thaliana
aggcgattctaccacgg

SEQ ID NO: 39899 - DNA, 17 bp, Arabidopsis thaliana
aggcgattggaccatca

SEQ ID NO: 39900 - DNA, 17 bp, Arabidopsis thaliana
aggcgatttcaagtctt

SEQ ID NO: 39901 - DNA, 17 bp, Arabidopsis thaliana
aggcgatttcgctacgg

SEQ ID NO: 39902 - DNA, 17 bp, Arabidopsis thaliana
aggcgatttctggtttt

SEQ ID NO: 39903 - DNA, 17 bp, Arabidopsis thaliana
aggcgattttcacccag

SEQ ID NO: 39904 - DNA, 17 bp, Arabidopsis thaliana
aggcgcaacttacggtc

SEQ ID NO: 39905 - DNA, 17 bp, Arabidopsis thaliana
aggcgcaatttgtagat

SEQ ID NO: 39906 - DNA, 17 bp, Arabidopsis thaliana
aggcgcacatccagggg

SEQ ID NO: 39907 - DNA, 17 bp, Arabidopsis thaliana
aggcgcactgtagatgg

SEQ ID NO: 39908 - DNA, 17 bp, Arabidopsis thaliana
aggcgcagactttgcag

SEQ ID NO: 39909 - DNA, 17 bp, Arabidopsis thaliana
aggcgcagcagttgact

SEQ ID NO: 39910 - DNA, 17 bp, Arabidopsis thaliana
aggcgcagcgggcatta

SEQ ID NO: 39911 - DNA, 17 bp, Arabidopsis thaliana
aggcgcattttctcgat

SEQ ID NO: 39912 - DNA, 17 bp, Arabidopsis thaliana
aggcgccaaagaggaaa

SEQ ID NO: 39913 - DNA, 17 bp, Arabidopsis thaliana
aggcgccagagcaagtc

SEQ ID NO: 39914 - DNA, 17 bp, Arabidopsis thaliana
aggcgccagtttctgat

SEQ ID NO: 39915 - DNA, 17 bp, Arabidopsis thaliana
aggcgcccaatgggaag

SEQ ID NO: 39916 - DNA, 17 bp, Arabidopsis thaliana
aggcgcccactgggaag

SEQ ID NO: 39917 - DNA, 17 bp, Arabidopsis thaliana
aggcgcccaggcccgtt

SEQ ID NO: 39918 - DNA, 17 bp, Arabidopsis thaliana
aggcgcccagtcccgtt

SEQ ID NO: 39919 - DNA, 17 bp, Arabidopsis thaliana
aggcgcccgacacccgg

SEQ ID NO: 39920 - DNA, 17 bp, Arabidopsis thaliana
aggcgcccgccacccgg

SEQ ID NO: 39921 - DNA, 17 bp, Arabidopsis thaliana
aggcgcccgggcccgtt

SEQ ID NO: 39922 - DNA, 17 bp, Arabidopsis thaliana
aggcgcccgtgacttgt

SEQ ID NO: 39923 - DNA, 17 bp, Arabidopsis thaliana
aggcgccctgtagatgg

SEQ ID NO: 39924 - DNA, 17 bp, Arabidopsis thaliana
aggcgccgacacccgga

SEQ ID NO: 39925 - DNA, 17 bp, Arabidopsis thaliana
aggcgccgacgaccacg

SEQ ID NO: 39926 - DNA, 17 bp, Arabidopsis thaliana
aggcgccgagcgagaaa

SEQ ID NO: 39927 - DNA, 17 bp, Arabidopsis thaliana
aggcgccggcgaagacg

SEQ ID NO: 39928 - DNA, 17 bp, Arabidopsis thaliana
aggcgcctcagcccgct

SEQ ID NO: 39929 - DNA, 17 bp, Arabidopsis thaliana
aggcgcctgagcaagtc

SEQ ID NO: 39930 - DNA, 17 bp, Arabidopsis thaliana
aggcgcctgttgcatcg

SEQ ID NO: 39931 - DNA, 17 bp, Arabidopsis thaliana
aggcgcctttgtaccgt

SEQ ID NO: 39932 - DNA, 17 bp, Arabidopsis thaliana
aggcgctaaaaaccctt

SEQ ID NO: 39933 - DNA, 17 bp, Arabidopsis thaliana
aggcgctaaacccttat

SEQ ID NO: 39934 - DNA, 17 bp, Arabidopsis thaliana
aggcgctaagcggacag

SEQ ID NO: 39935 - DNA, 17 bp, Arabidopsis thaliana
aggcgctaatcagacgg

SEQ ID NO: 39936 - DNA, 17 bp, Arabidopsis thaliana
aggcgctaatcggacgg

SEQ ID NO: 39937 - DNA, 17 bp, Arabidopsis thaliana
aggcgctaatgatagat

SEQ ID NO: 39938 - DNA, 17 bp, Arabidopsis thaliana
aggcgctacctactgct

SEQ ID NO: 39939 - DNA, 17 bp, Arabidopsis thaliana
aggcgctacggcgctga

SEQ ID NO: 39940 - DNA, 17 bp, Arabidopsis thaliana
aggcgctacttaggcgg

SEQ ID NO: 39941 - DNA, 17 bp, Arabidopsis thaliana
aggcgctagagcaagtc

SEQ ID NO: 39942 - DNA, 17 bp, Arabidopsis thaliana
aggcgctaggcattggg

SEQ ID NO: 39943 - DNA, 17 bp, Arabidopsis thaliana
aggcgctaggcattggt

SEQ ID NO: 39944 - DNA, 17 bp, Arabidopsis thaliana
aggcgctaggcccacca

SEQ ID NO: 39945 - DNA, 17 bp, Arabidopsis thaliana
aggcgctagtcagacgg

SEQ ID NO: 39946 - DNA, 17 bp, Arabidopsis thaliana
aggcgctagtcggacgg

SEQ ID NO: 39947 - DNA, 17 bp, Arabidopsis thaliana
aggcgctccaaactcgg

SEQ ID NO: 39948 - DNA, 17 bp, Arabidopsis thaliana
aggcgctccgactattt

SEQ ID NO: 39949 - DNA, 17 bp, Arabidopsis thaliana
aggcgctcgaccgtatg

SEQ ID NO: 39950 - DNA, 17 bp, Arabidopsis thaliana
aggcgctcgcctccgaa

SEQ ID NO: 39951 - DNA, 17 bp, Arabidopsis thaliana
aggcgctctcgcagttc

SEQ ID NO: 39952 - DNA, 17 bp, Arabidopsis thaliana
aggcgctctcgcagttg

SEQ ID NO: 39953 - DNA, 17 bp, Arabidopsis thaliana
aggcgctgacatcgtag

SEQ ID NO: 39954 - DNA, 17 bp, Arabidopsis thaliana
aggcgctgacatcgtat

SEQ ID NO: 39955 - DNA, 17 bp, Arabidopsis thaliana
aggcgctgacatcgtgg

SEQ ID NO: 39956 - DNA, 17 bp, Arabidopsis thaliana
aggcgctgtctacgagt

SEQ ID NO: 39957 - DNA, 17 bp, Arabidopsis thaliana
aggcgctgtgcgtatcg

SEQ ID NO: 39958 - DNA, 17 bp, Arabidopsis thaliana
aggcgctgtgctatcga

SEQ ID NO: 39959 - DNA, 17 bp, Arabidopsis thaliana
aggcgcttaagtgattt

SEQ ID NO: 39960 - DNA, 17 bp, Arabidopsis thaliana
aggcgcttagctggcgg

SEQ ID NO: 39961 - DNA, 17 bp, Arabidopsis thaliana
aggcgcttcaccaaaat

SEQ ID NO: 39962 - DNA, 17 bp, Arabidopsis thaliana
aggcgcttcagacggat

SEQ ID NO: 39963 - DNA, 17 bp, Arabidopsis thaliana
aggcgcttcagacgggt

SEQ ID NO: 39964 - DNA, 17 bp, Arabidopsis thaliana
aggcgcttcagtttctt

SEQ ID NO: 39965 - DNA, 17 bp, Arabidopsis thaliana
aggcgcttgacttctaa

SEQ ID NO: 39966 - DNA, 17 bp, Arabidopsis thaliana
aggcgctttatcgagag

SEQ ID NO: 39967 - DNA, 17 bp, Arabidopsis thaliana
aggcgctttggccattt

SEQ ID NO: 39968 - DNA, 17 bp, Arabidopsis thaliana
aggcgctttggccgtta

SEQ ID NO: 39969 - DNA, 17 bp, Arabidopsis thaliana
aggcgctttggccgttt

SEQ ID NO: 39970 - DNA, 17 bp, Arabidopsis thaliana
aggcgctttgtgcatag

SEQ ID NO: 39971 - DNA, 17 bp, Arabidopsis thaliana
aggcgcttttcgtcggg

SEQ ID NO: 39972 - DNA, 17 bp, Arabidopsis thaliana
aggcgcttttgccctct

SEQ ID NO: 39973 - DNA, 17 bp, Arabidopsis thaliana
aggcgcttttggcaaag

SEQ ID NO: 39974 - DNA, 17 bp, Arabidopsis thaliana
aggcggaaacaatggct

SEQ ID NO: 39975 - DNA, 17 bp, Arabidopsis thaliana
aggcggaaacattctgt

SEQ ID NO: 39976 - DNA, 17 bp, Arabidopsis thaliana
aggcggaacggagccaa

SEQ ID NO: 39977 - DNA, 17 bp, Arabidopsis thaliana
aggcggaagaactttgc

SEQ ID NO: 39978 - DNA, 17 bp, Arabidopsis thaliana
aggcggaagcaggcgaa

SEQ ID NO: 39979 - DNA, 17 bp, Arabidopsis thaliana
aggcggaagtgtcgttc

SEQ ID NO: 39980 - DNA, 17 bp, Arabidopsis thaliana
aggcggaattagatggt

SEQ ID NO: 39981 - DNA, 17 bp, Arabidopsis thaliana
aggcggaattggacatg

SEQ ID NO: 39982 - DNA, 17 bp, Arabidopsis thaliana
aggcggacaaatgaatt

SEQ ID NO: 39983 - DNA, 17 bp, Arabidopsis thaliana
aggcggacaacaaactg

SEQ ID NO: 39984 - DNA, 17 bp, Arabidopsis thaliana
aggcggacaagatgggt

SEQ ID NO: 39985 - DNA, 17 bp, Arabidopsis thaliana
aggcggacctctttttt

SEQ ID NO: 39986 - DNA, 17 bp, Arabidopsis thaliana
aggcggaccttatctag

SEQ ID NO: 39987 - DNA, 17 bp, Arabidopsis thaliana
aggcggacgtgtgctcg

SEQ ID NO: 39988 - DNA, 17 bp, Arabidopsis thaliana
aggcggagaagggagag

SEQ ID NO: 39989 - DNA, 17 bp, Arabidopsis thaliana
aggcggagacaaggctc

SEQ ID NO: 39990 - DNA, 17 bp, Arabidopsis thaliana
aggcggagcttccaacg

SEQ ID NO: 39991 - DNA, 17 bp, Arabidopsis thaliana
aggcggaggaccgagtg

SEQ ID NO: 39992 - DNA, 17 bp, Arabidopsis thaliana
aggcggaggagacagat

SEQ ID NO: 39993 - DNA, 17 bp, Arabidopsis thaliana
aggcggaggggttcttg

SEQ ID NO: 39994 - DNA, 17 bp, Arabidopsis thaliana
aggcggaggtcatggcc

SEQ ID NO: 39995 - DNA, 17 bp, Arabidopsis thaliana
aggcggatcaagcagct

SEQ ID NO: 39996 - DNA, 17 bp, Arabidopsis thaliana
aggcggatccttttgac

SEQ ID NO: 39997 - DNA, 17 bp, Arabidopsis thaliana
aggcggatgagatgtgg

SEQ ID NO: 39998 - DNA, 17 bp, Arabidopsis thaliana
aggcggatgtaagatgt

SEQ ID NO: 39999 - DNA, 17 bp, Arabidopsis thaliana
aggcggcaactgcgcag

SEQ ID NO: 40000 - DNA, 17 bp, Arabidopsis thaliana
aggcggcactagtggag

SEQ ID NO: 40001 - DNA, 17 bp, Arabidopsis thaliana
aggcggcactgatggag

SEQ ID NO: 40002 - DNA, 17 bp, Arabidopsis thaliana
aggcggcactggtggag

SEQ ID NO: 40003 - DNA, 17 bp, Arabidopsis thaliana
aggcggcagagcaaatc

SEQ ID NO: 40004 - DNA, 17 bp, Arabidopsis thaliana
aggcggcagtccgtttc

SEQ ID NO: 40005 - DNA, 17 bp, Arabidopsis thaliana
aggcggcattgcgaagt

SEQ ID NO: 40006 - DNA, 17 bp, Arabidopsis thaliana
aggcggcattgttttcg

SEQ ID NO: 40007 - DNA, 17 bp, Arabidopsis thaliana
aggcggccaacatttcc

SEQ ID NO: 40008 - DNA, 17 bp, Arabidopsis thaliana
aggcggccaggcgggcc

SEQ ID NO: 40009 - DNA, 17 bp, Arabidopsis thaliana
aggcggccaggcgggcg

SEQ ID NO: 40010 - DNA, 17 bp, Arabidopsis thaliana
aggcggccaggcgggtt

SEQ ID NO: 40011 - DNA, 17 bp, Arabidopsis thaliana
aggcggcccctcaagtt

SEQ ID NO: 40012 - DNA, 17 bp, Arabidopsis thaliana
aggcggccgatttggat

SEQ ID NO: 40013 - DNA, 17 bp, Arabidopsis thaliana
aggcggccggtccgcct

SEQ ID NO: 40014 - DNA, 17 bp, Arabidopsis thaliana
aggcggcctgactaccc

SEQ ID NO: 40015 - DNA, 17 bp, Arabidopsis thaliana
aggcggcctgactacct

SEQ ID NO: 40016 - DNA, 17 bp, Arabidopsis thaliana
aggcggcctgagtactt

SEQ ID NO: 40017 - DNA, 17 bp, Arabidopsis thaliana
aggcggcctgattaccc

SEQ ID NO: 40018 - DNA, 17 bp, Arabidopsis thaliana
aggcggcctgattatcc

SEQ ID NO: 40019 - DNA, 17 bp, Arabidopsis thaliana
aggcggcctgattatct

SEQ ID NO: 40020 - DNA, 17 bp, Arabidopsis thaliana
aggcggcctgattattg

SEQ ID NO: 40021 - DNA, 17 bp, Arabidopsis thaliana
aggcggcctggctaccc

SEQ ID NO: 40022 - DNA, 17 bp, Arabidopsis thaliana
aggcggcgaagagactc

SEQ ID NO: 40023 - DNA, 17 bp, Arabidopsis thaliana
aggcggcgaatggagag

SEQ ID NO: 40024 - DNA, 17 bp, Arabidopsis thaliana
aggcggcggagaggcgg

SEQ ID NO: 40025 - DNA, 17 bp, Arabidopsis thaliana
aggcggcggctatggtg

SEQ ID NO: 40026 - DNA, 17 bp, Arabidopsis thaliana
aggcggctagggtttac

SEQ ID NO: 40027 - DNA, 17 bp, Arabidopsis thaliana
aggcggctatgggcggg

SEQ ID NO: 40028 - DNA, 17 bp, Arabidopsis thaliana
aggcggctcaatgccta

SEQ ID NO: 40029 - DNA, 17 bp, Arabidopsis thaliana
aggcggctcaggacatt

SEQ ID NO: 40030 - DNA, 17 bp, Arabidopsis thaliana
aggcggctcatgaacta

SEQ ID NO: 40031 - DNA, 17 bp, Arabidopsis thaliana
aggcggctcatgaactt

SEQ ID NO: 40032 - DNA, 17 bp, Arabidopsis thaliana
aggcggctcattaacta

SEQ ID NO: 40033 - DNA, 17 bp, Arabidopsis thaliana
aggcggctcttcctatc

SEQ ID NO: 40034 - DNA, 17 bp, Arabidopsis thaliana
aggcggcttaccgatag

SEQ ID NO: 40035 - DNA, 17 bp, Arabidopsis thaliana
aggcggcttgtcccttc

SEQ ID NO: 40036 - DNA, 17 bp, Arabidopsis thaliana
aggcggctttcagttgg

SEQ ID NO: 40037 - DNA, 17 bp, Arabidopsis thaliana
aggcggctttgtaagtt

SEQ ID NO: 40038 - DNA, 17 bp, Arabidopsis thaliana
aggcggcttttctggtt

SEQ ID NO: 40039 - DNA, 17 bp, Arabidopsis thaliana
aggcgggaactcgtgag

SEQ ID NO: 40040 - DNA, 17 bp, Arabidopsis thaliana
aggcgggacactgcgag

SEQ ID NO: 40041 - DNA, 17 bp, Arabidopsis thaliana
aggcgggacccacatca

SEQ ID NO: 40042 - DNA, 17 bp, Arabidopsis thaliana
aggcgggagattcatct

SEQ ID NO: 40043 - DNA, 17 bp, Arabidopsis thaliana
aggcgggagtacctgaa

SEQ ID NO: 40044 - DNA, 17 bp, Arabidopsis thaliana
aggcgggatccacacca

SEQ ID NO: 40045 - DNA, 17 bp, Arabidopsis thaliana
aggcgggatccacccca

SEQ ID NO: 40046 - DNA, 17 bp, Arabidopsis thaliana
aggcgggattgtgaagt

SEQ ID NO: 40047 - DNA, 17 bp, Arabidopsis thaliana
aggcgggcctaacctag

SEQ ID NO: 40048 - DNA, 17 bp, Arabidopsis thaliana
aggcgggccttatctac

SEQ ID NO: 40049 - DNA, 17 bp, Arabidopsis thaliana
aggcgggccttatctag

SEQ ID NO: 40050 - DNA, 17 bp, Arabidopsis thaliana
aggcgggccttatgtgg

SEQ ID NO: 40051 - DNA, 17 bp, Arabidopsis thaliana
aggcgggcgatatccat

SEQ ID NO: 40052 - DNA, 17 bp, Arabidopsis thaliana
aggcgggcgtaagatat

SEQ ID NO: 40053 - DNA, 17 bp, Arabidopsis thaliana
aggcgggctgactggct

SEQ ID NO: 40054 - DNA, 17 bp, Arabidopsis thaliana
aggcgggctttagtagt

SEQ ID NO: 40055 - DNA, 17 bp, Arabidopsis thaliana
aggcggggacgcggctc

SEQ ID NO: 40056 - DNA, 17 bp, Arabidopsis thaliana
aggcgggtcttatcatt

SEQ ID NO: 40057 - DNA, 17 bp, Arabidopsis thaliana
aggcgggtgagcctcgg

SEQ ID NO: 40058 - DNA, 17 bp, Arabidopsis thaliana
aggcgggtgtacccgaa

SEQ ID NO: 40059 - DNA, 17 bp, Arabidopsis thaliana
aggcgggtgtaccgaaa

SEQ ID NO: 40060 - DNA, 17 bp, Arabidopsis thaliana
aggcggtaccagcaaca

SEQ ID NO: 40061 - DNA, 17 bp, Arabidopsis thaliana
aggcggtccctgagagc

SEQ ID NO: 40062 - DNA, 17 bp, Arabidopsis thaliana
aggcggtccgcctttgg

SEQ ID NO: 40063 - DNA, 17 bp, Arabidopsis thaliana
aggcggtcgacagaaca

SEQ ID NO: 40064 - DNA, 17 bp, Arabidopsis thaliana
aggcggtcgactaggcg

SEQ ID NO: 40065 - DNA, 17 bp, Arabidopsis thaliana
aggcggtcgcctgacta

SEQ ID NO: 40066 - DNA, 17 bp, Arabidopsis thaliana
aggcggtctcagtccat

SEQ ID NO: 40067 - DNA, 17 bp, Arabidopsis thaliana
aggcggtctgactactc

SEQ ID NO: 40068 - DNA, 17 bp, Arabidopsis thaliana
aggcggtctgattatcc

SEQ ID NO: 40069 - DNA, 17 bp, Arabidopsis thaliana
aggcggtcttgtgtgta

SEQ ID NO: 40070 - DNA, 17 bp, Arabidopsis thaliana
aggcggtgactcatagg

SEQ ID NO: 40071 - DNA, 17 bp, Arabidopsis thaliana
aggcggtgagaagcggc

SEQ ID NO: 40072 - DNA, 17 bp, Arabidopsis thaliana
aggcggtggcacgaaga

SEQ ID NO: 40073 - DNA, 17 bp, Arabidopsis thaliana
aggcggtggtggtctga

SEQ ID NO: 40074 - DNA, 17 bp, Arabidopsis thaliana
aggcggtggtgttacgg

SEQ ID NO: 40075 - DNA, 17 bp, Arabidopsis thaliana
aggcggtggttgttgtc

SEQ ID NO: 40076 - DNA, 17 bp, Arabidopsis thaliana
aggcggttaagccgttt

SEQ ID NO: 40077 - DNA, 17 bp, Arabidopsis thaliana
aggcggttaccgggcca

SEQ ID NO: 40078 - DNA, 17 bp, Arabidopsis thaliana
aggcggttacgtgtgct

SEQ ID NO: 40079 - DNA, 17 bp, Arabidopsis thaliana
aggcggttactcggacg

SEQ ID NO: 40080 - DNA, 17 bp, Arabidopsis thaliana
aggcggttagtgcgttt

SEQ ID NO: 40081 - DNA, 17 bp, Arabidopsis thaliana
aggcggttcagttcgct

SEQ ID NO: 40082 - DNA, 17 bp, Arabidopsis thaliana
aggcggttctgaccgaa

SEQ ID NO: 40083 - DNA, 17 bp, Arabidopsis thaliana
aggcggttgactcggta

SEQ ID NO: 40084 - DNA, 17 bp, Arabidopsis thaliana
aggcggttgagagagca

SEQ ID NO: 40085 - DNA, 17 bp, Arabidopsis thaliana
aggcggttgcggtttca

SEQ ID NO: 40086 - DNA, 17 bp, Arabidopsis thaliana
aggcggttgtgagatat

SEQ ID NO: 40087 - DNA, 17 bp, Arabidopsis thaliana
aggcggtttggacgatt

SEQ ID NO: 40088 - DNA, 17 bp, Arabidopsis thaliana
aggcggtttgggcgagt

SEQ ID NO: 40089 - DNA, 17 bp, Arabidopsis thaliana
aggcggtttggtcagga

SEQ ID NO: 40090 - DNA, 17 bp, Arabidopsis thaliana
aggcggtttggttcaag

SEQ ID NO: 40091 - DNA, 17 bp, Arabidopsis thaliana
aggcgtaacgatccggg

SEQ ID NO: 40092 - DNA, 17 bp, Arabidopsis thaliana
aggcgtaacgatctggg

SEQ ID NO: 40093 - DNA, 17 bp, Arabidopsis thaliana
aggcgtaactgagcttt

SEQ ID NO: 40094 - DNA, 17 bp, Arabidopsis thaliana
aggcgtaagaactgtat

SEQ ID NO: 40095 - DNA, 17 bp, Arabidopsis thaliana
aggcgtaagaattggat

SEQ ID NO: 40096 - DNA, 17 bp, Arabidopsis thaliana
aggcgtaagaattgtat

SEQ ID NO: 40097 - DNA, 17 bp, Arabidopsis thaliana
aggcgtaagaattgttt

SEQ ID NO: 40098 - DNA, 17 bp, Arabidopsis thaliana
aggcgtacaagacccac

SEQ ID NO: 40099 - DNA, 17 bp, Arabidopsis thaliana
aggcgtacgtgaggctc

SEQ ID NO: 40100 - DNA, 17 bp, Arabidopsis thaliana
aggcgtagcgtggatac

SEQ ID NO: 40101 - DNA, 17 bp, Arabidopsis thaliana
aggcgtagtaagacggc

SEQ ID NO: 40102 - DNA, 17 bp, Arabidopsis thaliana
aggcgtagtaagacggg

SEQ ID NO: 40103 - DNA, 17 bp, Arabidopsis thaliana
aggcgtagtcgatggac

SEQ ID NO: 40104 - DNA, 17 bp, Arabidopsis thaliana
aggcgtataatggattg

SEQ ID NO: 40105 - DNA, 17 bp, Arabidopsis thaliana
aggcgtatccctggggg

SEQ ID NO: 40106 - DNA, 17 bp, Arabidopsis thaliana
aggcgtatccctgggtg

SEQ ID NO: 40107 - DNA, 17 bp, Arabidopsis thaliana
aggcgtatgtaagacga

SEQ ID NO: 40108 - DNA, 17 bp, Arabidopsis thaliana
aggcgtcactaatgttt

SEQ ID NO: 40109 - DNA, 17 bp, Arabidopsis thaliana
aggcgtcaggtgattaa

SEQ ID NO: 40110 - DNA, 17 bp, Arabidopsis thaliana
aggcgtcagttgtatgt

SEQ ID NO: 40111 - DNA, 17 bp, Arabidopsis thaliana
aggcgtcatggccacct

SEQ ID NO: 40112 - DNA, 17 bp, Arabidopsis thaliana
aggcgtccagctgacca

SEQ ID NO: 40113 - DNA, 17 bp, Arabidopsis thaliana
aggcgtccattttgcaa

SEQ ID NO: 40114 - DNA, 17 bp, Arabidopsis thaliana
aggcgtcctgaatttca

SEQ ID NO: 40115 - DNA, 17 bp, Arabidopsis thaliana
aggcgtcgcagtcggtt

SEQ ID NO: 40116 - DNA, 17 bp, Arabidopsis thaliana
aggcgtcggaccgttgg

SEQ ID NO: 40117 - DNA, 17 bp, Arabidopsis thaliana
aggcgtcgggagcttgc

SEQ ID NO: 40118 - DNA, 17 bp, Arabidopsis thaliana
aggcgtcgtctgtcgtg

SEQ ID NO: 40119 - DNA, 17 bp, Arabidopsis thaliana
aggcgtcgtttaggacg

SEQ ID NO: 40120 - DNA, 17 bp, Arabidopsis thaliana
aggcgtctcaaactcgg

SEQ ID NO: 40121 - DNA, 17 bp, Arabidopsis thaliana
aggcgtctgaggtctgg

SEQ ID NO: 40122 - DNA, 17 bp, Arabidopsis thaliana
aggcgtctgcctgggtg

SEQ ID NO: 40123 - DNA, 17 bp, Arabidopsis thaliana
aggcgtctggatttcca

SEQ ID NO: 40124 - DNA, 17 bp, Arabidopsis thaliana
aggcgtctgtagctgag

SEQ ID NO: 40125 - DNA, 17 bp, Arabidopsis thaliana
aggcgtcttcatctcca

SEQ ID NO: 40126 - DNA, 17 bp, Arabidopsis thaliana
aggcgtgagcggtgaga

SEQ ID NO: 40127 - DNA, 17 bp, Arabidopsis thaliana
aggcgtgatcagcttcc

SEQ ID NO: 40128 - DNA, 17 bp, Arabidopsis thaliana
aggcgtgcaaaggtttc

SEQ ID NO: 40129 - DNA, 17 bp, Arabidopsis thaliana
aggcgtgccctaatcag

SEQ ID NO: 40130 - DNA, 17 bp, Arabidopsis thaliana
aggcgtgcttgggcgag

SEQ ID NO: 40131 - DNA, 17 bp, Arabidopsis thaliana
aggcgtggattatgatg

SEQ ID NO: 40132 - DNA, 17 bp, Arabidopsis thaliana
aggcgtggccgctaccg

SEQ ID NO: 40133 - DNA, 17 bp, Arabidopsis thaliana
aggcgtggccgctatcg

SEQ ID NO: 40134 - DNA, 17 bp, Arabidopsis thaliana
aggcgtgggtattcggg

SEQ ID NO: 40135 - DNA, 17 bp, Arabidopsis thaliana
aggcgtgtctttctgtt

SEQ ID NO: 40136 - DNA, 17 bp, Arabidopsis thaliana
aggcgttcaagactaag

SEQ ID NO: 40137 - DNA, 17 bp, Arabidopsis thaliana
aggcgttcatctatcca

SEQ ID NO: 40138 - DNA, 17 bp, Arabidopsis thaliana
aggcgttcccagcgttg

SEQ ID NO: 40139 - DNA, 17 bp, Arabidopsis thaliana
aggcgttccgtctctcg

SEQ ID NO: 40140 - DNA, 17 bp, Arabidopsis thaliana
aggcgttcctgcgtgtg

SEQ ID NO: 40141 - DNA, 17 bp, Arabidopsis thaliana
aggcgttcgaaaccgat

SEQ ID NO: 40142 - DNA, 17 bp, Arabidopsis thaliana
aggcgttcggttatcca

SEQ ID NO: 40143 - DNA, 17 bp, Arabidopsis thaliana
aggcgttctggaatgtc

SEQ ID NO: 40144 - DNA, 17 bp, Arabidopsis thaliana
aggcgttgactagtgtt

SEQ ID NO: 40145 - DNA, 17 bp, Arabidopsis thaliana
aggcgttgacttgttga

SEQ ID NO: 40146 - DNA, 17 bp, Arabidopsis thaliana
aggcgttgaggcttagt

SEQ ID NO: 40147 - DNA, 17 bp, Arabidopsis thaliana
aggcgttgagtttggaa

SEQ ID NO: 40148 - DNA, 17 bp, Arabidopsis thaliana
aggcgttgatggccgta

SEQ ID NO: 40149 - DNA, 17 bp, Arabidopsis thaliana
aggcgttgcatgaatct

SEQ ID NO: 40150 - DNA, 17 bp, Arabidopsis thaliana
aggcgttgcgtctatcg

SEQ ID NO: 40151 - DNA, 17 bp, Arabidopsis thaliana
aggcgtttaggataaga

SEQ ID NO: 40152 - DNA, 17 bp, Arabidopsis thaliana
aggcgtttaggataagg

SEQ ID NO: 40153 - DNA, 17 bp, Arabidopsis thaliana
aggcgtttaggataata

SEQ ID NO: 40154 - DNA, 17 bp, Arabidopsis thaliana
aggcgtttatgaccctt

SEQ ID NO: 40155 - DNA, 17 bp, Arabidopsis thaliana
aggcgtttcatgggcgt

SEQ ID NO: 40156 - DNA, 17 bp, Arabidopsis thaliana
aggcgtttgaaaagccg

SEQ ID NO: 40157 - DNA, 17 bp, Arabidopsis thaliana
aggcgtttgcctgtcgc

SEQ ID NO: 40158 - DNA, 17 bp, Arabidopsis thaliana
aggcgtttgctcattcg

SEQ ID NO: 40159 - DNA, 17 bp, Arabidopsis thaliana
aggctaaaaccaacaaa

SEQ ID NO: 40160 - DNA, 17 bp, Arabidopsis thaliana
aggctaaaatcgtcaaa

SEQ ID NO: 40161 - DNA, 17 bp, Arabidopsis thaliana
aggctaaaccgggatac

SEQ ID NO: 40162 - DNA, 17 bp, Arabidopsis thaliana
aggctaaacttggcatg

SEQ ID NO: 40163 - DNA, 17 bp, Arabidopsis thaliana
aggctaaagaagggtga

SEQ ID NO: 40164 - DNA, 17 bp, Arabidopsis thaliana
aggctaaagcccgtaat

SEQ ID NO: 40165 - DNA, 17 bp, Arabidopsis thaliana
aggctaaaggccctaca

SEQ ID NO: 40166 - DNA, 17 bp, Arabidopsis thaliana
aggctaaagttgcttgg

SEQ ID NO: 40167 - DNA, 17 bp, Arabidopsis thaliana
aggctaaatacgggcaa

SEQ ID NO: 40168 - DNA, 17 bp, Arabidopsis thaliana
aggctaaatacgggcga

SEQ ID NO: 40169 - DNA, 17 bp, Arabidopsis thaliana
aggctaaatactcctgg

SEQ ID NO: 40170 - DNA, 17 bp, Arabidopsis thaliana
aggctaaattttgaaac

SEQ ID NO: 40171 - DNA, 17 bp, Arabidopsis thaliana
aggctaaccatgggctt

SEQ ID NO: 40172 - DNA, 17 bp, Arabidopsis thaliana
aggctaaccgccttgcg

SEQ ID NO: 40173 - DNA, 17 bp, Arabidopsis thaliana
aggctaacctggtaact

SEQ ID NO: 40174 - DNA, 17 bp, Arabidopsis thaliana
aggctaacgataacggt

SEQ ID NO: 40175 - DNA, 17 bp, Arabidopsis thaliana
aggctaactttggtgct

SEQ ID NO: 40176 - DNA, 17 bp, Arabidopsis thaliana
aggctaacttttgttcc

SEQ ID NO: 40177 - DNA, 17 bp, Arabidopsis thaliana
aggctaagaattgaaag

SEQ ID NO: 40178 - DNA, 17 bp, Arabidopsis thaliana
aggctaagaggtgcttc

SEQ ID NO: 40179 - DNA, 17 bp, Arabidopsis thaliana
aggctaagagtttggat

SEQ ID NO: 40180 - DNA, 17 bp, Arabidopsis thaliana
aggctaagagtttgggt

SEQ ID NO: 40181 - DNA, 17 bp, Arabidopsis thaliana
aggctaagatataccgc

SEQ ID NO: 40182 - DNA, 17 bp, Arabidopsis thaliana
aggctaagatcgggttg

SEQ ID NO: 40183 - DNA, 17 bp, Arabidopsis thaliana
aggctaagcccattaac

SEQ ID NO: 40184 - DNA, 17 bp, Arabidopsis thaliana
aggctaagcctaggggt

SEQ ID NO: 40185 - DNA, 17 bp, Arabidopsis thaliana
aggctaagctactggcg

SEQ ID NO: 40186 - DNA, 17 bp, Arabidopsis thaliana
aggctaagcttagaggt

SEQ ID NO: 40187 - DNA, 17 bp, Arabidopsis thaliana
aggctaagtctgcagcc

SEQ ID NO: 40188 - DNA, 17 bp, Arabidopsis thaliana
aggctaagtttgcagcg

SEQ ID NO: 40189 - DNA, 17 bp, Arabidopsis thaliana
aggctaagtttgggctc

SEQ ID NO: 40190 - DNA, 17 bp, Arabidopsis thaliana
aggctaatactgcgtgg

SEQ ID NO: 40191 - DNA, 17 bp, Arabidopsis thaliana
aggctaatatctccagg

SEQ ID NO: 40192 - DNA, 17 bp, Arabidopsis thaliana
aggctaatcaccattct

SEQ ID NO: 40193 - DNA, 17 bp, Arabidopsis thaliana
aggctaatcggcttttg

SEQ ID NO: 40194 - DNA, 17 bp, Arabidopsis thaliana
aggctaatcgtcttgcg

SEQ ID NO: 40195 - DNA, 17 bp, Arabidopsis thaliana
aggctaatcgtgatttt

SEQ ID NO: 40196 - DNA, 17 bp, Arabidopsis thaliana
aggctaatcttttgacc

SEQ ID NO: 40197 - DNA, 17 bp, Arabidopsis thaliana
aggctaatgcgcagtat

SEQ ID NO: 40198 - DNA, 17 bp, Arabidopsis thaliana
aggctaatggattaccc

SEQ ID NO: 40199 - DNA, 17 bp, Arabidopsis thaliana
aggctaatgtggttgca

SEQ ID NO: 40200 - DNA, 17 bp, Arabidopsis thaliana
aggctaatttggtcatt

SEQ ID NO: 40201 - DNA, 17 bp, Arabidopsis thaliana
aggctaattttgctgcg

SEQ ID NO: 40202 - DNA, 17 bp, Arabidopsis thaliana
aggctacaaacgatcca

SEQ ID NO: 40203 - DNA, 17 bp, Arabidopsis thaliana
aggctacatcttggttg

SEQ ID NO: 40204 - DNA, 17 bp, Arabidopsis thaliana
aggctacatgtgtctga

SEQ ID NO: 40205 - DNA, 17 bp, Arabidopsis thaliana
aggctaccaaaaacgct

SEQ ID NO: 40206 - DNA, 17 bp, Arabidopsis thaliana
aggctaccctggtcctc

SEQ ID NO: 40207 - DNA, 17 bp, Arabidopsis thaliana
aggctaccggatttgtt

SEQ ID NO: 40208 - DNA, 17 bp, Arabidopsis thaliana
aggctaccgtgcgctgg

SEQ ID NO: 40209 - DNA, 17 bp, Arabidopsis thaliana
aggctacctttggtgtc

SEQ ID NO: 40210 - DNA, 17 bp, Arabidopsis thaliana
aggctacgaaatacact

SEQ ID NO: 40211 - DNA, 17 bp, Arabidopsis thaliana
aggctacgaaattcact

SEQ ID NO: 40212 - DNA, 17 bp, Arabidopsis thaliana
aggctacgtctgggccg

SEQ ID NO: 40213 - DNA, 17 bp, Arabidopsis thaliana
aggctactcgcgcactt

SEQ ID NO: 40214 - DNA, 17 bp, Arabidopsis thaliana
aggctactgtgattttt

SEQ ID NO: 40215 - DNA, 17 bp, Arabidopsis thaliana
aggctactgtggtgacg

SEQ ID NO: 40216 - DNA, 17 bp, Arabidopsis thaliana
aggctactgttgcagct

SEQ ID NO: 40217 - DNA, 17 bp, Arabidopsis thaliana
aggctagattggttgct

SEQ ID NO: 40218 - DNA, 17 bp, Arabidopsis thaliana
aggctaggaccggccct

SEQ ID NO: 40219 - DNA, 17 bp, Arabidopsis thaliana
aggctagtagctcagtg

SEQ ID NO: 40220 - DNA, 17 bp, Arabidopsis thaliana
aggctataaataccccc

SEQ ID NO: 40221 - DNA, 17 bp, Arabidopsis thaliana
aggctataaatacctcc

SEQ ID NO: 40222 - DNA, 17 bp, Arabidopsis thaliana
aggctataaatggtgac

SEQ ID NO: 40223 - DNA, 17 bp, Arabidopsis thaliana
aggctataagcgctcat

SEQ ID NO: 40224 - DNA, 17 bp, Arabidopsis thaliana
aggctatataggggggt

SEQ ID NO: 40225 - DNA, 17 bp, Arabidopsis thaliana
aggctatatcagttttg

SEQ ID NO: 40226 - DNA, 17 bp, Arabidopsis thaliana
aggctatattccggttt

SEQ ID NO: 40227 - DNA, 17 bp, Arabidopsis thaliana
aggctatcaaaaacgct

SEQ ID NO: 40228 - DNA, 17 bp, Arabidopsis thaliana
aggctatcaaaaccgct

SEQ ID NO: 40229 - DNA, 17 bp, Arabidopsis thaliana
aggctatcaacaatggt

SEQ ID NO: 40230 - DNA, 17 bp, Arabidopsis thaliana
aggctatccataccatt

SEQ ID NO: 40231 - DNA, 17 bp, Arabidopsis thaliana
aggctatctccatcaga

SEQ ID NO: 40232 - DNA, 17 bp, Arabidopsis thaliana
aggctatctcgccacct

SEQ ID NO: 40233 - DNA, 17 bp, Arabidopsis thaliana
aggctatctgcattagt

SEQ ID NO: 40234 - DNA, 17 bp, Arabidopsis thaliana
aggctatcttatttggc

SEQ ID NO: 40235 - DNA, 17 bp, Arabidopsis thaliana
aggctatgaatataggc

SEQ ID NO: 40236 - DNA, 17 bp, Arabidopsis thaliana
aggctatgaatggtgac

SEQ ID NO: 40237 - DNA, 17 bp, Arabidopsis thaliana
aggctatgagccaagtg

SEQ ID NO: 40238 - DNA, 17 bp, Arabidopsis thaliana
aggctatgattggttgg

SEQ ID NO: 40239 - DNA, 17 bp, Arabidopsis thaliana
aggctatgccgcgatgg

SEQ ID NO: 40240 - DNA, 17 bp, Arabidopsis thaliana
aggctatgccgctatgg

SEQ ID NO: 40241 - DNA, 17 bp, Arabidopsis thaliana
aggctatgcctcttcga

SEQ ID NO: 40242 - DNA, 17 bp, Arabidopsis thaliana
aggctatgtggttcgaa

SEQ ID NO: 40243 - DNA, 17 bp, Arabidopsis thaliana
aggctatgtggttcggc

SEQ ID NO: 40244 - DNA, 17 bp, Arabidopsis thaliana
aggctatgttagtgatc

SEQ ID NO: 40245 - DNA, 17 bp, Arabidopsis thaliana
aggctattaccgtaagt

SEQ ID NO: 40246 - DNA, 17 bp, Arabidopsis thaliana
aggctattagccacgac

SEQ ID NO: 40247 - DNA, 17 bp, Arabidopsis thaliana
aggctattagctcagtg

SEQ ID NO: 40248 - DNA, 17 bp, Arabidopsis thaliana
aggctattatctcagtg

SEQ ID NO: 40249 - DNA, 17 bp, Arabidopsis thaliana
aggctattcctccttct

SEQ ID NO: 40250 - DNA, 17 bp, Arabidopsis thaliana
aggctatttcggtgggc

SEQ ID NO: 40251 - DNA, 17 bp, Arabidopsis thaliana
aggctcaaacttaagtg

SEQ ID NO: 40252 - DNA, 17 bp, Arabidopsis thaliana
aggctcaaaggccctac

SEQ ID NO: 40253 - DNA, 17 bp, Arabidopsis thaliana
aggctcaaaggccctcc

SEQ ID NO: 40254 - DNA, 17 bp, Arabidopsis thaliana
aggctcaacagctgctt

SEQ ID NO: 40255 - DNA, 17 bp, Arabidopsis thaliana
aggctcaacgactgaag

SEQ ID NO: 40256 - DNA, 17 bp, Arabidopsis thaliana
aggctcaaggcttctat

SEQ ID NO: 40257 - DNA, 17 bp, Arabidopsis thaliana
aggctcaataccgcaat

SEQ ID NO: 40258 - DNA, 17 bp, Arabidopsis thaliana
aggctcaatcgtggcag

SEQ ID NO: 40259 - DNA, 17 bp, Arabidopsis thaliana
aggctcaatgtccacat

SEQ ID NO: 40260 - DNA, 17 bp, Arabidopsis thaliana
aggctcaattcacactt

SEQ ID NO: 40261 - DNA, 17 bp, Arabidopsis thaliana
aggctcacaagatccag

SEQ ID NO: 40262 - DNA, 17 bp, Arabidopsis thaliana
aggctcaccggaggttt

SEQ ID NO: 40263 - DNA, 17 bp, Arabidopsis thaliana
aggctcacggcagcagc

SEQ ID NO: 40264 - DNA, 17 bp, Arabidopsis thaliana
aggctcactcggaggcg

SEQ ID NO: 40265 - DNA, 17 bp, Arabidopsis thaliana
aggctcactgctctatc

SEQ ID NO: 40266 - DNA, 17 bp, Arabidopsis thaliana
aggctcagaattggtat

SEQ ID NO: 40267 - DNA, 17 bp, Arabidopsis thaliana
aggctcagactacttgg

SEQ ID NO: 40268 - DNA, 17 bp, Arabidopsis thaliana
aggctcagcagccttac

SEQ ID NO: 40269 - DNA, 17 bp, Arabidopsis thaliana
aggctcagcccacagtg

SEQ ID NO: 40270 - DNA, 17 bp, Arabidopsis thaliana
aggctcagcccgacctg

SEQ ID NO: 40271 - DNA, 17 bp, Arabidopsis thaliana
aggctcaggaagtgtgt

SEQ ID NO: 40272 - DNA, 17 bp, Arabidopsis thaliana
aggctcaggagggatag

SEQ ID NO: 40273 - DNA, 17 bp, Arabidopsis thaliana
aggctcaggcctgtgtt

SEQ ID NO: 40274 - DNA, 17 bp, Arabidopsis thaliana
aggctcaggttggaagg

SEQ ID NO: 40275 - DNA, 17 bp, Arabidopsis thaliana
aggctcagtccacagtg

SEQ ID NO: 40276 - DNA, 17 bp, Arabidopsis thaliana
aggctcagtttgtgttc

SEQ ID NO: 40277 - DNA, 17 bp, Arabidopsis thaliana
aggctcatactcgacgt

SEQ ID NO: 40278 - DNA, 17 bp, Arabidopsis thaliana
aggctcatcatctaagc

SEQ ID NO: 40279 - DNA, 17 bp, Arabidopsis thaliana
aggctcatccaagtagt

SEQ ID NO: 40280 - DNA, 17 bp, Arabidopsis thaliana
aggctcatcgcttgcta

SEQ ID NO: 40281 - DNA, 17 bp, Arabidopsis thaliana
aggctcatcgtgtgaac

SEQ ID NO: 40282 - DNA, 17 bp, Arabidopsis thaliana
aggctcatcgtttactg

SEQ ID NO: 40283 - DNA, 17 bp, Arabidopsis thaliana
aggctcatgggcttttt

SEQ ID NO: 40284 - DNA, 17 bp, Arabidopsis thaliana
aggctcattgacccttc

SEQ ID NO: 40285 - DNA, 17 bp, Arabidopsis thaliana
aggctcatttggcgtga

SEQ ID NO: 40286 - DNA, 17 bp, Arabidopsis thaliana
aggctccaaggtgaaca

SEQ ID NO: 40287 - DNA, 17 bp, Arabidopsis thaliana
aggctccaatgagatgg

SEQ ID NO: 40288 - DNA, 17 bp, Arabidopsis thaliana
aggctccaccaccgact

SEQ ID NO: 40289 - DNA, 17 bp, Arabidopsis thaliana
aggctccagttgcgcca

SEQ ID NO: 40290 - DNA, 17 bp, Arabidopsis thaliana
aggctccatctacaaat

SEQ ID NO: 40291 - DNA, 17 bp, Arabidopsis thaliana
aggctccatcttcaaat

SEQ ID NO: 40292 - DNA, 17 bp, Arabidopsis thaliana
aggctcccaaaggcacg

SEQ ID NO: 40293 - DNA, 17 bp, Arabidopsis thaliana
aggctcccacttctgta

SEQ ID NO: 40294 - DNA, 17 bp, Arabidopsis thaliana
aggctcccaggagatcc

SEQ ID NO: 40295 - DNA, 17 bp, Arabidopsis thaliana
aggctccccaaggcacg

SEQ ID NO: 40296 - DNA, 17 bp, Arabidopsis thaliana
aggctccctagcctcgg

SEQ ID NO: 40297 - DNA, 17 bp, Arabidopsis thaliana
aggctccctggaaaggt

SEQ ID NO: 40298 - DNA, 17 bp, Arabidopsis thaliana
aggctccgaatgaagaa

SEQ ID NO: 40299 - DNA, 17 bp, Arabidopsis thaliana
aggctccgaatgaagac

SEQ ID NO: 40300 - DNA, 17 bp, Arabidopsis thaliana
aggctccgaatgataac

SEQ ID NO: 40301 - DNA, 17 bp, Arabidopsis thaliana
aggctccgaatgatgac

SEQ ID NO: 40302 - DNA, 17 bp, Arabidopsis thaliana
aggctccgaatggtgac

SEQ ID NO: 40303 - DNA, 17 bp, Arabidopsis thaliana
aggctccgaatggtggc

SEQ ID NO: 40304 - DNA, 17 bp, Arabidopsis thaliana
aggctccgacgggtgct

SEQ ID NO: 40305 - DNA, 17 bp, Arabidopsis thaliana
aggctccgagtggtgac

SEQ ID NO: 40306 - DNA, 17 bp, Arabidopsis thaliana
aggctccgcggcccgat

SEQ ID NO: 40307 - DNA, 17 bp, Arabidopsis thaliana
aggctccggctcagaac

SEQ ID NO: 40308 - DNA, 17 bp, Arabidopsis thaliana
aggctccgtaatgaatg

SEQ ID NO: 40309 - DNA, 17 bp, Arabidopsis thaliana
aggctcctcgtgtccgt

SEQ ID NO: 40310 - DNA, 17 bp, Arabidopsis thaliana
aggctccttctaaaggg

SEQ ID NO: 40311 - DNA, 17 bp, Arabidopsis thaliana
aggctcgaaccagccat

SEQ ID NO: 40312 - DNA, 17 bp, Arabidopsis thaliana
aggctcgacctcgatcc

SEQ ID NO: 40313 - DNA, 17 bp, Arabidopsis thaliana
aggctcgatctccaggt

SEQ ID NO: 40314 - DNA, 17 bp, Arabidopsis thaliana
aggctcgatgttgacgt

SEQ ID NO: 40315 - DNA, 17 bp, Arabidopsis thaliana
aggctcgcttcggcggg

SEQ ID NO: 40316 - DNA, 17 bp, Arabidopsis thaliana
aggctcgcttcggcggt

SEQ ID NO: 40317 - DNA, 17 bp, Arabidopsis thaliana
aggctcggactacttgg

SEQ ID NO: 40318 - DNA, 17 bp, Arabidopsis thaliana
aggctcggactcgggct

SEQ ID NO: 40319 - DNA, 17 bp, Arabidopsis thaliana
aggctcggagtggactc

SEQ ID NO: 40320 - DNA, 17 bp, Arabidopsis thaliana
aggctcggcgttttaca

SEQ ID NO: 40321 - DNA, 17 bp, Arabidopsis thaliana
aggctcgggaacaggct

SEQ ID NO: 40322 - DNA, 17 bp, Arabidopsis thaliana
aggctcgggaccattgc

SEQ ID NO: 40323 - DNA, 17 bp, Arabidopsis thaliana
aggctcgggtcagatgt

SEQ ID NO: 40324 - DNA, 17 bp, Arabidopsis thaliana
aggctcgggtcggatgt

SEQ ID NO: 40325 - DNA, 17 bp, Arabidopsis thaliana
aggctcgggtctcatgt

SEQ ID NO: 40326 - DNA, 17 bp, Arabidopsis thaliana
aggctcggtactatcat

SEQ ID NO: 40327 - DNA, 17 bp, Arabidopsis thaliana
aggctcgtcgagatctg

SEQ ID NO: 40328 - DNA, 17 bp, Arabidopsis thaliana
aggctcgtgattaccac

SEQ ID NO: 40329 - DNA, 17 bp, Arabidopsis thaliana
aggctcgtggtgactgc

SEQ ID NO: 40330 - DNA, 17 bp, Arabidopsis thaliana
aggctcgttgattgttg

SEQ ID NO: 40331 - DNA, 17 bp, Arabidopsis thaliana
aggctcgtttccctcaa

SEQ ID NO: 40332 - DNA, 17 bp, Arabidopsis thaliana
aggctctaaaggctcca

SEQ ID NO: 40333 - DNA, 17 bp, Arabidopsis thaliana
aggctctaagtatccca

SEQ ID NO: 40334 - DNA, 17 bp, Arabidopsis thaliana
aggctctaagtcagaat

SEQ ID NO: 40335 - DNA, 17 bp, Arabidopsis thaliana
aggctctaatccaaccc

SEQ ID NO: 40336 - DNA, 17 bp, Arabidopsis thaliana
aggctctacgagggacc

SEQ ID NO: 40337 - DNA, 17 bp, Arabidopsis thaliana
aggctctagccttctgt

SEQ ID NO: 40338 - DNA, 17 bp, Arabidopsis thaliana
aggctctatgacggcgg

SEQ ID NO: 40339 - DNA, 17 bp, Arabidopsis thaliana
aggctctatgatgatgt

SEQ ID NO: 40340 - DNA, 17 bp, Arabidopsis thaliana
aggctctatgcaccaag

SEQ ID NO: 40341 - DNA, 17 bp, Arabidopsis thaliana
aggctctatttagttca

SEQ ID NO: 40342 - DNA, 17 bp, Arabidopsis thaliana
aggctctatttcgtacc

SEQ ID NO: 40343 - DNA, 17 bp, Arabidopsis thaliana
aggctctcaccgtccca

SEQ ID NO: 40344 - DNA, 17 bp, Arabidopsis thaliana
aggctctccatgctctg

SEQ ID NO: 40345 - DNA, 17 bp, Arabidopsis thaliana
aggctctcgcctccgta

SEQ ID NO: 40346 - DNA, 17 bp, Arabidopsis thaliana
aggctctcgtcactaga

SEQ ID NO: 40347 - DNA, 17 bp, Arabidopsis thaliana
aggctctgaatggagac

SEQ ID NO: 40348 - DNA, 17 bp, Arabidopsis thaliana
aggctctgcccgttgct

SEQ ID NO: 40349 - DNA, 17 bp, Arabidopsis thaliana
aggctctgggccgaaac

SEQ ID NO: 40350 - DNA, 17 bp, Arabidopsis thaliana
aggctctggtcactttt

SEQ ID NO: 40351 - DNA, 17 bp, Arabidopsis thaliana
aggctctgtctggtgcg

SEQ ID NO: 40352 - DNA, 17 bp, Arabidopsis thaliana
aggctctgtgcgagtta

SEQ ID NO: 40353 - DNA, 17 bp, Arabidopsis thaliana
aggctctgtgcgagttc

SEQ ID NO: 40354 - DNA, 17 bp, Arabidopsis thaliana
aggctctgttcgtttca

SEQ ID NO: 40355 - DNA, 17 bp, Arabidopsis thaliana
aggctctgtttggtgcg

SEQ ID NO: 40356 - DNA, 17 bp, Arabidopsis thaliana
aggctctgtttgtttct

SEQ ID NO: 40357 - DNA, 17 bp, Arabidopsis thaliana
aggctcttaggataaga

SEQ ID NO: 40358 - DNA, 17 bp, Arabidopsis thaliana
aggctcttaggataagg

SEQ ID NO: 40359 - DNA, 17 bp, Arabidopsis thaliana
aggctcttccatcgttc

SEQ ID NO: 40360 - DNA, 17 bp, Arabidopsis thaliana
aggctcttccatgtgat

SEQ ID NO: 40361 - DNA, 17 bp, Arabidopsis thaliana
aggctcttcgtgattat

SEQ ID NO: 40362 - DNA, 17 bp, Arabidopsis thaliana
aggctcttgctgaagaa

SEQ ID NO: 40363 - DNA, 17 bp, Arabidopsis thaliana
aggctcttggcgaattg

SEQ ID NO: 40364 - DNA, 17 bp, Arabidopsis thaliana
aggctcttggcgaggtg

SEQ ID NO: 40365 - DNA, 17 bp, Arabidopsis thaliana
aggctcttggctcagcg

SEQ ID NO: 40366 - DNA, 17 bp, Arabidopsis thaliana
aggctcttgggaggtgc

SEQ ID NO: 40367 - DNA, 17 bp, Arabidopsis thaliana
aggctcttgtatcaaac

SEQ ID NO: 40368 - DNA, 17 bp, Arabidopsis thaliana
aggctctttggatttgt

SEQ ID NO: 40369 - DNA, 17 bp, Arabidopsis thaliana
aggctcttttgctctcc

SEQ ID NO: 40370 - DNA, 17 bp, Arabidopsis thaliana
aggctgaacaggtttgt

SEQ ID NO: 40371 - DNA, 17 bp, Arabidopsis thaliana
aggctgaagactgaaat

SEQ ID NO: 40372 - DNA, 17 bp, Arabidopsis thaliana
aggctgaatttcagcgg

SEQ ID NO: 40373 - DNA, 17 bp, Arabidopsis thaliana
aggctgaatttctccgg

SEQ ID NO: 40374 - DNA, 17 bp, Arabidopsis thaliana
aggctgacaagatcggg

SEQ ID NO: 40375 - DNA, 17 bp, Arabidopsis thaliana
aggctgaccgcccttgc

SEQ ID NO: 40376 - DNA, 17 bp, Arabidopsis thaliana
aggctgacctattgaca

SEQ ID NO: 40377 - DNA, 17 bp, Arabidopsis thaliana
aggctgagaatgttggc

SEQ ID NO: 40378 - DNA, 17 bp, Arabidopsis thaliana
aggctgagaatgttggt

SEQ ID NO: 40379 - DNA, 17 bp, Arabidopsis thaliana
aggctgagatttgtcgt

SEQ ID NO: 40380 - DNA, 17 bp, Arabidopsis thaliana
aggctgagcctttcatt

SEQ ID NO: 40381 - DNA, 17 bp, Arabidopsis thaliana
aggctgaggcaaatgcg

SEQ ID NO: 40382 - DNA, 17 bp, Arabidopsis thaliana
aggctgagttatcgacc

SEQ ID NO: 40383 - DNA, 17 bp, Arabidopsis thaliana
aggctgagtttcgctgg

SEQ ID NO: 40384 - DNA, 17 bp, Arabidopsis thaliana
aggctgatagggtagtt

SEQ ID NO: 40385 - DNA, 17 bp, Arabidopsis thaliana
aggctgattggatatgt

SEQ ID NO: 40386 - DNA, 17 bp, Arabidopsis thaliana
aggctgattggcgggat

SEQ ID NO: 40387 - DNA, 17 bp, Arabidopsis thaliana
aggctgattttggatcg

SEQ ID NO: 40388 - DNA, 17 bp, Arabidopsis thaliana
aggctgcaggaacccca

SEQ ID NO: 40389 - DNA, 17 bp, Arabidopsis thaliana
aggctgcaggaacgcaa

SEQ ID NO: 40390 - DNA, 17 bp, Arabidopsis thaliana
aggctgcagttcttcag

SEQ ID NO: 40391 - DNA, 17 bp, Arabidopsis thaliana
aggctgcattggattga

SEQ ID NO: 40392 - DNA, 17 bp, Arabidopsis thaliana
aggctgcctgggtgtca

SEQ ID NO: 40393 - DNA, 17 bp, Arabidopsis thaliana
aggctgcctttatcccg

SEQ ID NO: 40394 - DNA, 17 bp, Arabidopsis thaliana
aggctgcgggggctttt

SEQ ID NO: 40395 - DNA, 17 bp, Arabidopsis thaliana
aggctgcgtttgtgttc

SEQ ID NO: 40396 - DNA, 17 bp, Arabidopsis thaliana
aggctgctgatgggcta

SEQ ID NO: 40397 - DNA, 17 bp, Arabidopsis thaliana
aggctgctggtgcgttg

SEQ ID NO: 40398 - DNA, 17 bp, Arabidopsis thaliana
aggctggagccatcttt

SEQ ID NO: 40399 - DNA, 17 bp, Arabidopsis thaliana
aggctggatacacattt

SEQ ID NO: 40400 - DNA, 17 bp, Arabidopsis thaliana
aggctggatcagattgc

SEQ ID NO: 40401 - DNA, 17 bp, Arabidopsis thaliana
aggctggattcgagttt

SEQ ID NO: 40402 - DNA, 17 bp, Arabidopsis thaliana
aggctggcagcttcaga

SEQ ID NO: 40403 - DNA, 17 bp, Arabidopsis thaliana
aggctggccaatgtgtt

SEQ ID NO: 40404 - DNA, 17 bp, Arabidopsis thaliana
aggctggccactttgtc

SEQ ID NO: 40405 - DNA, 17 bp, Arabidopsis thaliana
aggctggctccctgtat

SEQ ID NO: 40406 - DNA, 17 bp, Arabidopsis thaliana
aggctgggcacgaagcg

SEQ ID NO: 40407 - DNA, 17 bp, Arabidopsis thaliana
aggctgggctcgggggt

SEQ ID NO: 40408 - DNA, 17 bp, Arabidopsis thaliana
aggctggtgccgattta

SEQ ID NO: 40409 - DNA, 17 bp, Arabidopsis thaliana
aggctggtgccgatttg

SEQ ID NO: 40410 - DNA, 17 bp, Arabidopsis thaliana
aggctgtacctgtggaa

SEQ ID NO: 40411 - DNA, 17 bp, Arabidopsis thaliana
aggctgtagtagagtaa

SEQ ID NO: 40412 - DNA, 17 bp, Arabidopsis thaliana
aggctgtagtagagtga

SEQ ID NO: 40413 - DNA, 17 bp, Arabidopsis thaliana
aggctgtattgcggatg

SEQ ID NO: 40414 - DNA, 17 bp, Arabidopsis thaliana
aggctgtcaaccagatc

SEQ ID NO: 40415 - DNA, 17 bp, Arabidopsis thaliana
aggctgtccatgtcttg

SEQ ID NO: 40416 - DNA, 17 bp, Arabidopsis thaliana
aggctgtcccgagtgtg

SEQ ID NO: 40417 - DNA, 17 bp, Arabidopsis thaliana
aggctgtctcccttttc

SEQ ID NO: 40418 - DNA, 17 bp, Arabidopsis thaliana
aggctgtgaacggtaac

SEQ ID NO: 40419 - DNA, 17 bp, Arabidopsis thaliana
aggctgtgaatgctaac

SEQ ID NO: 40420 - DNA, 17 bp, Arabidopsis thaliana
aggctgtgaatggtaac

SEQ ID NO: 40421 - DNA, 17 bp, Arabidopsis thaliana
aggctgtgaatggtgac

SEQ ID NO: 40422 - DNA, 17 bp, Arabidopsis thaliana
aggctgtgagaaaatca

SEQ ID NO: 40423 - DNA, 17 bp, Arabidopsis thaliana
aggctgtgagaccaagt

SEQ ID NO: 40424 - DNA, 17 bp, Arabidopsis thaliana
aggctgtgatgaaattg

SEQ ID NO: 40425 - DNA, 17 bp, Arabidopsis thaliana
aggctgtgcgtactgtt

SEQ ID NO: 40426 - DNA, 17 bp, Arabidopsis thaliana
aggctgttacctgtcgc

SEQ ID NO: 40427 - DNA, 17 bp, Arabidopsis thaliana
aggctgttaggataagg

SEQ ID NO: 40428 - DNA, 17 bp, Arabidopsis thaliana
aggctgttcaccttgga

SEQ ID NO: 40429 - DNA, 17 bp, Arabidopsis thaliana
aggctgttgcgtttcag

SEQ ID NO: 40430 - DNA, 17 bp, Arabidopsis thaliana
aggctgtttggttcaag

SEQ ID NO: 40431 - DNA, 17 bp, Arabidopsis thaliana
aggcttaaaaatccctg

SEQ ID NO: 40432 - DNA, 17 bp, Arabidopsis thaliana
aggcttaaaatgggctg

SEQ ID NO: 40433 - DNA, 17 bp, Arabidopsis thaliana
aggcttaaactgatttc

SEQ ID NO: 40434 - DNA, 17 bp, Arabidopsis thaliana
aggcttaaagcccaact

SEQ ID NO: 40435 - DNA, 17 bp, Arabidopsis thaliana
aggcttaagagatcggg

SEQ ID NO: 40436 - DNA, 17 bp, Arabidopsis thaliana
aggcttaagatcgggtt

SEQ ID NO: 40437 - DNA, 17 bp, Arabidopsis thaliana
aggcttaagatctggtt

SEQ ID NO: 40438 - DNA, 17 bp, Arabidopsis thaliana
aggcttaagcccacttg

SEQ ID NO: 40439 - DNA, 17 bp, Arabidopsis thaliana
aggcttaaggtattctc

SEQ ID NO: 40440 - DNA, 17 bp, Arabidopsis thaliana
aggcttaaggttgcgtt

SEQ ID NO: 40441 - DNA, 17 bp, Arabidopsis thaliana
aggcttaatcccctaac

SEQ ID NO: 40442 - DNA, 17 bp, Arabidopsis thaliana
aggcttacaaaatcgat

SEQ ID NO: 40443 - DNA, 17 bp, Arabidopsis thaliana
aggcttacaaaatcggg

SEQ ID NO: 40444 - DNA, 17 bp, Arabidopsis thaliana
aggcttacaagaccggg

SEQ ID NO: 40445 - DNA, 17 bp, Arabidopsis thaliana
aggcttacaagagcggg

SEQ ID NO: 40446 - DNA, 17 bp, Arabidopsis thaliana
aggcttacaagatatgg

SEQ ID NO: 40447 - DNA, 17 bp, Arabidopsis thaliana
aggcttacaagatcagg

SEQ ID NO: 40448 - DNA, 17 bp, Arabidopsis thaliana
aggcttacaagatccgg

SEQ ID NO: 40449 - DNA, 17 bp, Arabidopsis thaliana
aggcttacaagatcgag

SEQ ID NO: 40450 - DNA, 17 bp, Arabidopsis thaliana
aggcttacaagatcgcg

SEQ ID NO: 40451 - DNA, 17 bp, Arabidopsis thaliana
aggcttacaagatcgga

SEQ ID NO: 40452 - DNA, 17 bp, Arabidopsis thaliana
aggcttacaagatcggg

SEQ ID NO: 40453 - DNA, 17 bp, Arabidopsis thaliana
aggcttacaagatcggt

SEQ ID NO: 40454 - DNA, 17 bp, Arabidopsis thaliana
aggcttacaagatctgg

SEQ ID NO: 40455 - DNA, 17 bp, Arabidopsis thaliana
aggcttacaagattagg

SEQ ID NO: 40456 - DNA, 17 bp, Arabidopsis thaliana
aggcttacaagattggg

SEQ ID NO: 40457 - DNA, 17 bp, Arabidopsis thaliana
aggcttacaagctcccc

SEQ ID NO: 40458 - DNA, 17 bp, Arabidopsis thaliana
aggcttacacgataact

SEQ ID NO: 40459 - DNA, 17 bp, Arabidopsis thaliana
aggcttacatgcctccc

SEQ ID NO: 40460 - DNA, 17 bp, Arabidopsis thaliana
aggcttacccgctaatt

SEQ ID NO: 40461 - DNA, 17 bp, Arabidopsis thaliana
aggcttacggaatccgg

SEQ ID NO: 40462 - DNA, 17 bp, Arabidopsis thaliana
aggcttactttgaggaa

SEQ ID NO: 40463 - DNA, 17 bp, Arabidopsis thaliana
aggcttagaagatacgg

SEQ ID NO: 40464 - DNA, 17 bp, Arabidopsis thaliana
aggcttagaagatcggc

SEQ ID NO: 40465 - DNA, 17 bp, Arabidopsis thaliana
aggcttagaagatcggg

SEQ ID NO: 40466 - DNA, 17 bp, Arabidopsis thaliana
aggcttagaagatctgc

SEQ ID NO: 40467 - DNA, 17 bp, Arabidopsis thaliana
aggcttagagtcggcta

SEQ ID NO: 40468 - DNA, 17 bp, Arabidopsis thaliana
aggcttagatattctta

SEQ ID NO: 40469 - DNA, 17 bp, Arabidopsis thaliana
aggcttagatcctttgg

SEQ ID NO: 40470 - DNA, 17 bp, Arabidopsis thaliana
aggcttagcggttttag

SEQ ID NO: 40471 - DNA, 17 bp, Arabidopsis thaliana
aggcttagcgtaatctc

SEQ ID NO: 40472 - DNA, 17 bp, Arabidopsis thaliana
aggcttagctaaatagt

SEQ ID NO: 40473 - DNA, 17 bp, Arabidopsis thaliana
aggcttagctaggggtg

SEQ ID NO: 40474 - DNA, 17 bp, Arabidopsis thaliana
aggcttagcttagaggt

SEQ ID NO: 40475 - DNA, 17 bp, Arabidopsis thaliana
aggcttaggataaggtt

SEQ ID NO: 40476 - DNA, 17 bp, Arabidopsis thaliana
aggcttaggatatggtt

SEQ ID NO: 40477 - DNA, 17 bp, Arabidopsis thaliana
aggcttaggctgtgaat

SEQ ID NO: 40478 - DNA, 17 bp, Arabidopsis thaliana
aggcttaggcttacaag

SEQ ID NO: 40479 - DNA, 17 bp, Arabidopsis thaliana
aggcttagggtattgtc

SEQ ID NO: 40480 - DNA, 17 bp, Arabidopsis thaliana
aggcttaggtcatatct

SEQ ID NO: 40481 - DNA, 17 bp, Arabidopsis thaliana
aggcttagtcacatcct

SEQ ID NO: 40482 - DNA, 17 bp, Arabidopsis thaliana
aggcttataaaatccgt

SEQ ID NO: 40483 - DNA, 17 bp, Arabidopsis thaliana
aggcttataaaatcggg

SEQ ID NO: 40484 - DNA, 17 bp, Arabidopsis thaliana
aggcttataaaatgcgg

SEQ ID NO: 40485 - DNA, 17 bp, Arabidopsis thaliana
aggcttataaatcgggt

SEQ ID NO: 40486 - DNA, 17 bp, Arabidopsis thaliana
aggcttataaattgcag

SEQ ID NO: 40487 - DNA, 17 bp, Arabidopsis thaliana
aggcttataaattgcgg

SEQ ID NO: 40488 - DNA, 17 bp, Arabidopsis thaliana
aggcttataacatcggg

SEQ ID NO: 40489 - DNA, 17 bp, Arabidopsis thaliana
aggcttataagaacgag

SEQ ID NO: 40490 - DNA, 17 bp, Arabidopsis thaliana
aggcttataagaacgat

SEQ ID NO: 40491 - DNA, 17 bp, Arabidopsis thaliana
aggcttataagaacgga

SEQ ID NO: 40492 - DNA, 17 bp, Arabidopsis thaliana
aggcttataagaacggg

SEQ ID NO: 40493 - DNA, 17 bp, Arabidopsis thaliana
aggcttataagacccgg

SEQ ID NO: 40494 - DNA, 17 bp, Arabidopsis thaliana
aggcttataagaccggg

SEQ ID NO: 40495 - DNA, 17 bp, Arabidopsis thaliana
aggcttataagatacag

SEQ ID NO: 40496 - DNA, 17 bp, Arabidopsis thaliana
aggcttataagatacgg

SEQ ID NO: 40497 - DNA, 17 bp, Arabidopsis thaliana
aggcttataagatagga

SEQ ID NO: 40498 - DNA, 17 bp, Arabidopsis thaliana
aggcttataagataggg

SEQ ID NO: 40499 - DNA, 17 bp, Arabidopsis thaliana
aggcttataagatcacg

SEQ ID NO: 40500 - DNA, 17 bp, Arabidopsis thaliana
aggcttataagatcgga

SEQ ID NO: 40501 - DNA, 17 bp, Arabidopsis thaliana
aggcttataagatgcgg

SEQ ID NO: 40502 - DNA, 17 bp, Arabidopsis thaliana
aggcttataagattcgg

SEQ ID NO: 40503 - DNA, 17 bp, Arabidopsis thaliana
aggcttataagattgag

SEQ ID NO: 40504 - DNA, 17 bp, Arabidopsis thaliana
aggcttataagattggg

SEQ ID NO: 40505 - DNA, 17 bp, Arabidopsis thaliana
aggcttataagctcggg

SEQ ID NO: 40506 - DNA, 17 bp, Arabidopsis thaliana
aggcttataagctgcgg

SEQ ID NO: 40507 - DNA, 17 bp, Arabidopsis thaliana
aggcttataatatccgg

SEQ ID NO: 40508 - DNA, 17 bp, Arabidopsis thaliana
aggcttataatatcgga

SEQ ID NO: 40509 - DNA, 17 bp, Arabidopsis thaliana
aggcttataatatcggg

SEQ ID NO: 40510 - DNA, 17 bp, Arabidopsis thaliana
aggcttataatatcggt

SEQ ID NO: 40511 - DNA, 17 bp, Arabidopsis thaliana
aggcttatacgatcggg

SEQ ID NO: 40512 - DNA, 17 bp, Arabidopsis thaliana
aggcttataggatcgtg

SEQ ID NO: 40513 - DNA, 17 bp, Arabidopsis thaliana
aggcttatagtacttcg

SEQ ID NO: 40514 - DNA, 17 bp, Arabidopsis thaliana
aggcttatcagatcggg

SEQ ID NO: 40515 - DNA, 17 bp, Arabidopsis thaliana
aggcttatcagatcgtg

SEQ ID NO: 40516 - DNA, 17 bp, Arabidopsis thaliana
aggcttatccggacata

SEQ ID NO: 40517 - DNA, 17 bp, Arabidopsis thaliana
aggcttatgagatccgg

SEQ ID NO: 40518 - DNA, 17 bp, Arabidopsis thaliana
aggcttatgaggttagg

SEQ ID NO: 40519 - DNA, 17 bp, Arabidopsis thaliana
aggcttatggctatttt

SEQ ID NO: 40520 - DNA, 17 bp, Arabidopsis thaliana
aggcttatgttcctctt

SEQ ID NO: 40521 - DNA, 17 bp, Arabidopsis thaliana
aggcttattagatcgtt

SEQ ID NO: 40522 - DNA, 17 bp, Arabidopsis thaliana
aggcttcaaagatcggg

SEQ ID NO: 40523 - DNA, 17 bp, Arabidopsis thaliana
aggcttcaaatggtgac

SEQ ID NO: 40524 - DNA, 17 bp, Arabidopsis thaliana
aggcttcaacagggaga

SEQ ID NO: 40525 - DNA, 17 bp, Arabidopsis thaliana
aggcttcaactggagat

SEQ ID NO: 40526 - DNA, 17 bp, Arabidopsis thaliana
aggcttcaaggggtgtg

SEQ ID NO: 40527 - DNA, 17 bp, Arabidopsis thaliana
aggcttcaagttggatc

SEQ ID NO: 40528 - DNA, 17 bp, Arabidopsis thaliana
aggcttcaccagtttta

SEQ ID NO: 40529 - DNA, 17 bp, Arabidopsis thaliana
aggcttcactgttccct

SEQ ID NO: 40530 - DNA, 17 bp, Arabidopsis thaliana
aggcttcagattggacc

SEQ ID NO: 40531 - DNA, 17 bp, Arabidopsis thaliana
aggcttcagcttatctg

SEQ ID NO: 40532 - DNA, 17 bp, Arabidopsis thaliana
aggcttccaaaacacgt

SEQ ID NO: 40533 - DNA, 17 bp, Arabidopsis thaliana
aggcttccaagatcggg

SEQ ID NO: 40534 - DNA, 17 bp, Arabidopsis thaliana
aggcttccagaacccga

SEQ ID NO: 40535 - DNA, 17 bp, Arabidopsis thaliana
aggcttccagaacccgg

SEQ ID NO: 40536 - DNA, 17 bp, Arabidopsis thaliana
aggcttccagaatccgg

SEQ ID NO: 40537 - DNA, 17 bp, Arabidopsis thaliana
aggcttccatctttgcg

SEQ ID NO: 40538 - DNA, 17 bp, Arabidopsis thaliana
aggcttccatctttgtg

SEQ ID NO: 40539 - DNA, 17 bp, Arabidopsis thaliana
aggcttccgcaacacca

SEQ ID NO: 40540 - DNA, 17 bp, Arabidopsis thaliana
aggcttccggaatccgg

SEQ ID NO: 40541 - DNA, 17 bp, Arabidopsis thaliana
aggcttccggaatgcgg

SEQ ID NO: 40542 - DNA, 17 bp, Arabidopsis thaliana
aggcttccgtctaatta

SEQ ID NO: 40543 - DNA, 17 bp, Arabidopsis thaliana
aggcttcctcgagatgt

SEQ ID NO: 40544 - DNA, 17 bp, Arabidopsis thaliana
aggcttcgaacctgaaa

SEQ ID NO: 40545 - DNA, 17 bp, Arabidopsis thaliana
aggcttcgaatggagac

SEQ ID NO: 40546 - DNA, 17 bp, Arabidopsis thaliana
aggcttcgaatggagat

SEQ ID NO: 40547 - DNA, 17 bp, Arabidopsis thaliana
aggcttcgaatggtaac

SEQ ID NO: 40548 - DNA, 17 bp, Arabidopsis thaliana
aggcttcgaatggtgac

SEQ ID NO: 40549 - DNA, 17 bp, Arabidopsis thaliana
aggcttcgactcagaac

SEQ ID NO: 40550 - DNA, 17 bp, Arabidopsis thaliana
aggcttcgccggtggct

SEQ ID NO: 40551 - DNA, 17 bp, Arabidopsis thaliana
aggcttcggcccagaac

SEQ ID NO: 40552 - DNA, 17 bp, Arabidopsis thaliana
aggcttcggcccagagc

SEQ ID NO: 40553 - DNA, 17 bp, Arabidopsis thaliana
aggcttcggctcagaac

SEQ ID NO: 40554 - DNA, 17 bp, Arabidopsis thaliana
aggcttcgggtttttcg

SEQ ID NO: 40555 - DNA, 17 bp, Arabidopsis thaliana
aggcttcggtccagaac

SEQ ID NO: 40556 - DNA, 17 bp, Arabidopsis thaliana
aggcttcgttgaaccaa

SEQ ID NO: 40557 - DNA, 17 bp, Arabidopsis thaliana
aggcttctaacatcggg

SEQ ID NO: 40558 - DNA, 17 bp, Arabidopsis thaliana
aggcttctaagatcttg

SEQ ID NO: 40559 - DNA, 17 bp, Arabidopsis thaliana
aggcttctaagatgcgg

SEQ ID NO: 40560 - DNA, 17 bp, Arabidopsis thaliana
aggcttctacaagttgc

SEQ ID NO: 40561 - DNA, 17 bp, Arabidopsis thaliana
aggcttctacaagttgt

SEQ ID NO: 40562 - DNA, 17 bp, Arabidopsis thaliana
aggcttctacaagtttt

SEQ ID NO: 40563 - DNA, 17 bp, Arabidopsis thaliana
aggcttctacgaacgtt

SEQ ID NO: 40564 - DNA, 17 bp, Arabidopsis thaliana
aggcttctagcgctctt

SEQ ID NO: 40565 - DNA, 17 bp, Arabidopsis thaliana
aggcttctagcttcgtc

SEQ ID NO: 40566 - DNA, 17 bp, Arabidopsis thaliana
aggcttctctattgccg

SEQ ID NO: 40567 - DNA, 17 bp, Arabidopsis thaliana
aggcttctggaaaccgg

SEQ ID NO: 40568 - DNA, 17 bp, Arabidopsis thaliana
aggcttctggaatcagg

SEQ ID NO: 40569 - DNA, 17 bp, Arabidopsis thaliana
aggcttctggaatccgc

SEQ ID NO: 40570 - DNA, 17 bp, Arabidopsis thaliana
aggcttctggaatccgg

SEQ ID NO: 40571 - DNA, 17 bp, Arabidopsis thaliana
aggcttctggagatatt

SEQ ID NO: 40572 - DNA, 17 bp, Arabidopsis thaliana
aggcttctggataccgt

SEQ ID NO: 40573 - DNA, 17 bp, Arabidopsis thaliana
aggcttcttcatcgcgt

SEQ ID NO: 40574 - DNA, 17 bp, Arabidopsis thaliana
aggcttcttcgagaagt

SEQ ID NO: 40575 - DNA, 17 bp, Arabidopsis thaliana
aggcttcttcgggtcaa

SEQ ID NO: 40576 - DNA, 17 bp, Arabidopsis thaliana
aggcttcttcgggttaa

SEQ ID NO: 40577 - DNA, 17 bp, Arabidopsis thaliana
aggcttcttgacgttct

SEQ ID NO: 40578 - DNA, 17 bp, Arabidopsis thaliana
aggcttcttgatggacg

SEQ ID NO: 40579 - DNA, 17 bp, Arabidopsis thaliana
aggcttctttgacctag

SEQ ID NO: 40580 - DNA, 17 bp, Arabidopsis thaliana
aggcttctttggacctt

SEQ ID NO: 40581 - DNA, 17 bp, Arabidopsis thaliana
aggcttgaagtcgatgt

SEQ ID NO: 40582 - DNA, 17 bp, Arabidopsis thaliana
aggcttgacaaggctag

SEQ ID NO: 40583 - DNA, 17 bp, Arabidopsis thaliana
aggcttgacatctacga

SEQ ID NO: 40584 - DNA, 17 bp, Arabidopsis thaliana
aggcttgaccatatgga

SEQ ID NO: 40585 - DNA, 17 bp, Arabidopsis thaliana
aggcttgactcaggccg

SEQ ID NO: 40586 - DNA, 17 bp, Arabidopsis thaliana
aggcttgactctagtcc

SEQ ID NO: 40587 - DNA, 17 bp, Arabidopsis thaliana
aggcttgatcccttggc

SEQ ID NO: 40588 - DNA, 17 bp, Arabidopsis thaliana
aggcttgcaaatgattc

SEQ ID NO: 40589 - DNA, 17 bp, Arabidopsis thaliana
aggcttgcagtgctgtc

SEQ ID NO: 40590 - DNA, 17 bp, Arabidopsis thaliana
aggcttgcccatcatgc

SEQ ID NO: 40591 - DNA, 17 bp, Arabidopsis thaliana
aggcttgcccatcctca

SEQ ID NO: 40592 - DNA, 17 bp, Arabidopsis thaliana
aggcttgccgcccttgc

SEQ ID NO: 40593 - DNA, 17 bp, Arabidopsis thaliana
aggcttgctgccacgat

SEQ ID NO: 40594 - DNA, 17 bp, Arabidopsis thaliana
aggcttgctgcccttgc

SEQ ID NO: 40595 - DNA, 17 bp, Arabidopsis thaliana
aggcttgcttcaggagc

SEQ ID NO: 40596 - DNA, 17 bp, Arabidopsis thaliana
aggcttgcttccaagtt

SEQ ID NO: 40597 - DNA, 17 bp, Arabidopsis thaliana
aggcttgctttgagcac

SEQ ID NO: 40598 - DNA, 17 bp, Arabidopsis thaliana
aggcttggaatcacacg

SEQ ID NO: 40599 - DNA, 17 bp, Arabidopsis thaliana
aggcttggcccaaacgt

SEQ ID NO: 40600 - DNA, 17 bp, Arabidopsis thaliana
aggcttggctcaggcgg

SEQ ID NO: 40601 - DNA, 17 bp, Arabidopsis thaliana
aggcttggctcaggtgg

SEQ ID NO: 40602 - DNA, 17 bp, Arabidopsis thaliana
aggcttggctcatgcag

SEQ ID NO: 40603 - DNA, 17 bp, Arabidopsis thaliana
aggcttggctgacgctg

SEQ ID NO: 40604 - DNA, 17 bp, Arabidopsis thaliana
aggcttgggagtccggt

SEQ ID NO: 40605 - DNA, 17 bp, Arabidopsis thaliana
aggcttggtgcaggtcg

SEQ ID NO: 40606 - DNA, 17 bp, Arabidopsis thaliana
aggcttgtaacgatctt

SEQ ID NO: 40607 - DNA, 17 bp, Arabidopsis thaliana
aggcttgtaacgctctt

SEQ ID NO: 40608 - DNA, 17 bp, Arabidopsis thaliana
aggcttgtaatatcggg

SEQ ID NO: 40609 - DNA, 17 bp, Arabidopsis thaliana
aggcttgtaatggactg

SEQ ID NO: 40610 - DNA, 17 bp, Arabidopsis thaliana
aggcttgtaggataaga

SEQ ID NO: 40611 - DNA, 17 bp, Arabidopsis thaliana
aggcttgtcaacagttt

SEQ ID NO: 40612 - DNA, 17 bp, Arabidopsis thaliana
aggcttgtccaaatctg

SEQ ID NO: 40613 - DNA, 17 bp, Arabidopsis thaliana
aggcttgtctatgacca

SEQ ID NO: 40614 - DNA, 17 bp, Arabidopsis thaliana
aggcttgtgagtttgac

SEQ ID NO: 40615 - DNA, 17 bp, Arabidopsis thaliana
aggcttgttgtttggaa

SEQ ID NO: 40616 - DNA, 17 bp, Arabidopsis thaliana
aggcttgttttctacgg

SEQ ID NO: 40617 - DNA, 17 bp, Arabidopsis thaliana
aggctttaaagacttgt

SEQ ID NO: 40618 - DNA, 17 bp, Arabidopsis thaliana
aggctttaaagatcggg

SEQ ID NO: 40619 - DNA, 17 bp, Arabidopsis thaliana
aggctttaaagatttgt

SEQ ID NO: 40620 - DNA, 17 bp, Arabidopsis thaliana
aggctttaaatatcggg

SEQ ID NO: 40621 - DNA, 17 bp, Arabidopsis thaliana
aggctttaacctcgtgc

SEQ ID NO: 40622 - DNA, 17 bp, Arabidopsis thaliana
aggctttaagaccgggt

SEQ ID NO: 40623 - DNA, 17 bp, Arabidopsis thaliana
aggctttaagatcaggt

SEQ ID NO: 40624 - DNA, 17 bp, Arabidopsis thaliana
aggctttaagatccggt

SEQ ID NO: 40625 - DNA, 17 bp, Arabidopsis thaliana
aggctttaagatcgggt

SEQ ID NO: 40626 - DNA, 17 bp, Arabidopsis thaliana
aggctttaagatctggt

SEQ ID NO: 40627 - DNA, 17 bp, Arabidopsis thaliana
aggctttaataataggg

SEQ ID NO: 40628 - DNA, 17 bp, Arabidopsis thaliana
aggctttacaaaatctg

SEQ ID NO: 40629 - DNA, 17 bp, Arabidopsis thaliana
aggctttactgaggaaa

SEQ ID NO: 40630 - DNA, 17 bp, Arabidopsis thaliana
aggctttaggttgacgt

SEQ ID NO: 40631 - DNA, 17 bp, Arabidopsis thaliana
aggctttagtaacacgg

SEQ ID NO: 40632 - DNA, 17 bp, Arabidopsis thaliana
aggctttagtaacaggg

SEQ ID NO: 40633 - DNA, 17 bp, Arabidopsis thaliana
aggctttagtcacaagg

SEQ ID NO: 40634 - DNA, 17 bp, Arabidopsis thaliana
aggctttcaaacttttt

SEQ ID NO: 40635 - DNA, 17 bp, Arabidopsis thaliana
aggctttcaagatccgg

SEQ ID NO: 40636 - DNA, 17 bp, Arabidopsis thaliana
aggctttcaagatcgag

SEQ ID NO: 40637 - DNA, 17 bp, Arabidopsis thaliana
aggctttcaagatcgga

SEQ ID NO: 40638 - DNA, 17 bp, Arabidopsis thaliana
aggctttcaagatcggg

SEQ ID NO: 40639 - DNA, 17 bp, Arabidopsis thaliana
aggctttcaagatctgg

SEQ ID NO: 40640 - DNA, 17 bp, Arabidopsis thaliana
aggctttcacccgtcct

SEQ ID NO: 40641 - DNA, 17 bp, Arabidopsis thaliana
aggctttcatcgttggg

SEQ ID NO: 40642 - DNA, 17 bp, Arabidopsis thaliana
aggctttcatcgtttca

SEQ ID NO: 40643 - DNA, 17 bp, Arabidopsis thaliana
aggctttcctcttgggt

SEQ ID NO: 40644 - DNA, 17 bp, Arabidopsis thaliana
aggctttcgactgtcaa

SEQ ID NO: 40645 - DNA, 17 bp, Arabidopsis thaliana
aggctttctccattcgg

SEQ ID NO: 40646 - DNA, 17 bp, Arabidopsis thaliana
aggctttctgggtcgtt

SEQ ID NO: 40647 - DNA, 17 bp, Arabidopsis thaliana
aggctttgaagatcggg

SEQ ID NO: 40648 - DNA, 17 bp, Arabidopsis thaliana
aggctttgaagatgtct

SEQ ID NO: 40649 - DNA, 17 bp, Arabidopsis thaliana
aggctttgaatggatgt

SEQ ID NO: 40650 - DNA, 17 bp, Arabidopsis thaliana
aggctttgaatggttac

SEQ ID NO: 40651 - DNA, 17 bp, Arabidopsis thaliana
aggctttgaatgttgcg

SEQ ID NO: 40652 - DNA, 17 bp, Arabidopsis thaliana
aggctttgaatgttgga

SEQ ID NO: 40653 - DNA, 17 bp, Arabidopsis thaliana
aggctttgaattttgcg

SEQ ID NO: 40654 - DNA, 17 bp, Arabidopsis thaliana
aggctttgacaaagtta

SEQ ID NO: 40655 - DNA, 17 bp, Arabidopsis thaliana
aggctttgaccggctct

SEQ ID NO: 40656 - DNA, 17 bp, Arabidopsis thaliana
aggctttgactcaggcc

SEQ ID NO: 40657 - DNA, 17 bp, Arabidopsis thaliana
aggctttgagccctcca

SEQ ID NO: 40658 - DNA, 17 bp, Arabidopsis thaliana
aggctttgagccctcga

SEQ ID NO: 40659 - DNA, 17 bp, Arabidopsis thaliana
aggctttgagccctcta

SEQ ID NO: 40660 - DNA, 17 bp, Arabidopsis thaliana
aggctttgccgcggttc

SEQ ID NO: 40661 - DNA, 17 bp, Arabidopsis thaliana
aggctttgctcgatgac

SEQ ID NO: 40662 - DNA, 17 bp, Arabidopsis thaliana
aggctttgctgtggttt

SEQ ID NO: 40663 - DNA, 17 bp, Arabidopsis thaliana
aggctttggagtgtagt

SEQ ID NO: 40664 - DNA, 17 bp, Arabidopsis thaliana
aggctttggcccagaac

SEQ ID NO: 40665 - DNA, 17 bp, Arabidopsis thaliana
aggctttggctttgatt

SEQ ID NO: 40666 - DNA, 17 bp, Arabidopsis thaliana
aggctttgggttgaagt

SEQ ID NO: 40667 - DNA, 17 bp, Arabidopsis thaliana
aggctttggtggttttt

SEQ ID NO: 40668 - DNA, 17 bp, Arabidopsis thaliana
aggctttggttggaagt

SEQ ID NO: 40669 - DNA, 17 bp, Arabidopsis thaliana
aggctttgtgaattatt

SEQ ID NO: 40670 - DNA, 17 bp, Arabidopsis thaliana
aggctttgtttccgaga

SEQ ID NO: 40671 - DNA, 17 bp, Arabidopsis thaliana
aggcttttaagacgcgg

SEQ ID NO: 40672 - DNA, 17 bp, Arabidopsis thaliana
aggcttttaagatccgg

SEQ ID NO: 40673 - DNA, 17 bp, Arabidopsis thaliana
aggcttttaagatcctg

SEQ ID NO: 40674 - DNA, 17 bp, Arabidopsis thaliana
aggcttttaagatcgcg

SEQ ID NO: 40675 - DNA, 17 bp, Arabidopsis thaliana
aggcttttaagatcggg

SEQ ID NO: 40676 - DNA, 17 bp, Arabidopsis thaliana
aggcttttaagatctcg

SEQ ID NO: 40677 - DNA, 17 bp, Arabidopsis thaliana
aggcttttaagatctgc

SEQ ID NO: 40678 - DNA, 17 bp, Arabidopsis thaliana
aggcttttaagatctgg

SEQ ID NO: 40679 - DNA, 17 bp, Arabidopsis thaliana
aggcttttaagatcttg

SEQ ID NO: 40680 - DNA, 17 bp, Arabidopsis thaliana
aggcttttaagatcttt

SEQ ID NO: 40681 - DNA, 17 bp, Arabidopsis thaliana
aggcttttaagattggg

SEQ ID NO: 40682 - DNA, 17 bp, Arabidopsis thaliana
aggcttttaagatttgg

SEQ ID NO: 40683 - DNA, 17 bp, Arabidopsis thaliana
aggcttttaagctccag

SEQ ID NO: 40684 - DNA, 17 bp, Arabidopsis thaliana
aggcttttaagctcgag

SEQ ID NO: 40685 - DNA, 17 bp, Arabidopsis thaliana
aggcttttaagttccgg

SEQ ID NO: 40686 - DNA, 17 bp, Arabidopsis thaliana
aggcttttaagttctgg

SEQ ID NO: 40687 - DNA, 17 bp, Arabidopsis thaliana
aggcttttaagttgcgg

SEQ ID NO: 40688 - DNA, 17 bp, Arabidopsis thaliana
aggcttttaccggaaag

SEQ ID NO: 40689 - DNA, 17 bp, Arabidopsis thaliana
aggcttttacgataaga

SEQ ID NO: 40690 - DNA, 17 bp, Arabidopsis thaliana
aggcttttacgataagg

SEQ ID NO: 40691 - DNA, 17 bp, Arabidopsis thaliana
aggcttttacgatcgga

SEQ ID NO: 40692 - DNA, 17 bp, Arabidopsis thaliana
aggcttttacgatcggg

SEQ ID NO: 40693 - DNA, 17 bp, Arabidopsis thaliana
aggcttttaggataaaa

SEQ ID NO: 40694 - DNA, 17 bp, Arabidopsis thaliana
aggcttttaggataaat

SEQ ID NO: 40695 - DNA, 17 bp, Arabidopsis thaliana
aggcttttaggataaga

SEQ ID NO: 40696 - DNA, 17 bp, Arabidopsis thaliana
aggcttttaggataagc

SEQ ID NO: 40697 - DNA, 17 bp, Arabidopsis thaliana
aggcttttaggataagg

SEQ ID NO: 40698 - DNA, 17 bp, Arabidopsis thaliana
aggcttttaggatatgg

SEQ ID NO: 40699 - DNA, 17 bp, Arabidopsis thaliana
aggcttttaggatcggg

SEQ ID NO: 40700 - DNA, 17 bp, Arabidopsis thaliana
aggcttttaggatgagg

SEQ ID NO: 40701 - DNA, 17 bp, Arabidopsis thaliana
aggcttttaggctatgg

SEQ ID NO: 40702 - DNA, 17 bp, Arabidopsis thaliana
aggcttttaggctctat

SEQ ID NO: 40703 - DNA, 17 bp, Arabidopsis thaliana
aggcttttatgatcgaa

SEQ ID NO: 40704 - DNA, 17 bp, Arabidopsis thaliana
aggcttttatgatcggg

SEQ ID NO: 40705 - DNA, 17 bp, Arabidopsis thaliana
aggcttttatgattggg

SEQ ID NO: 40706 - DNA, 17 bp, Arabidopsis thaliana
aggcttttcagatcgac

SEQ ID NO: 40707 - DNA, 17 bp, Arabidopsis thaliana
aggcttttcagatcgag

SEQ ID NO: 40708 - DNA, 17 bp, Arabidopsis thaliana
aggcttttcagatcggg

SEQ ID NO: 40709 - DNA, 17 bp, Arabidopsis thaliana
aggcttttccagttttt

SEQ ID NO: 40710 - DNA, 17 bp, Arabidopsis thaliana
aggcttttccctggatg

SEQ ID NO: 40711 - DNA, 17 bp, Arabidopsis thaliana
aggcttttcctgtagat

SEQ ID NO: 40712 - DNA, 17 bp, Arabidopsis thaliana
aggcttttcggataagg

SEQ ID NO: 40713 - DNA, 17 bp, Arabidopsis thaliana
aggcttttcgtgattat

SEQ ID NO: 40714 - DNA, 17 bp, Arabidopsis thaliana
aggcttttctactggaa

SEQ ID NO: 40715 - DNA, 17 bp, Arabidopsis thaliana
aggcttttctgatcggg

SEQ ID NO: 40716 - DNA, 17 bp, Arabidopsis thaliana
aggcttttcttgttttt

SEQ ID NO: 40717 - DNA, 17 bp, Arabidopsis thaliana
aggcttttgactctgtc

SEQ ID NO: 40718 - DNA, 17 bp, Arabidopsis thaliana
aggcttttgacttctaa

SEQ ID NO: 40719 - DNA, 17 bp, Arabidopsis thaliana
aggcttttgagatcaag

SEQ ID NO: 40720 - DNA, 17 bp, Arabidopsis thaliana
aggcttttgagatcggg

SEQ ID NO: 40721 - DNA, 17 bp, Arabidopsis thaliana
aggcttttgagttgttc

SEQ ID NO: 40722 - DNA, 17 bp, Arabidopsis thaliana
aggcttttgggccatgt

SEQ ID NO: 40723 - DNA, 17 bp, Arabidopsis thaliana
aggctttttacagtctc

SEQ ID NO: 40724 - DNA, 17 bp, Arabidopsis thaliana
aggctttttacattctc

SEQ ID NO: 40725 - DNA, 17 bp, Arabidopsis thaliana
aggctttttctctggag

SEQ ID NO: 40726 - DNA, 17 bp, Arabidopsis thaliana
aggctttttggccatgt

SEQ ID NO: 40727 - DNA, 17 bp, Arabidopsis thaliana
aggcttttttcaatggt

SEQ ID NO: 40728 - DNA, 17 bp, Arabidopsis thaliana
agggaaaaccaactgaa

SEQ ID NO: 40729 - DNA, 17 bp, Arabidopsis thaliana
agggaaaagggctatta

SEQ ID NO: 40730 - DNA, 17 bp, Arabidopsis thaliana
agggaaaaggttgactg

SEQ ID NO: 40731 - DNA, 17 bp, Arabidopsis thaliana
agggaaaatagaggctg

SEQ ID NO: 40732 - DNA, 17 bp, Arabidopsis thaliana
agggaaaatcagcggag

SEQ ID NO: 40733 - DNA, 17 bp, Arabidopsis thaliana
agggaaaatcggcggag

SEQ ID NO: 40734 - DNA, 17 bp, Arabidopsis thaliana
agggaaacacttactgg

SEQ ID NO: 40735 - DNA, 17 bp, Arabidopsis thaliana
agggaaaccagtcgtca

SEQ ID NO: 40736 - DNA, 17 bp, Arabidopsis thaliana
agggaaacgaacagggc

SEQ ID NO: 40737 - DNA, 17 bp, Arabidopsis thaliana
agggaaacgcttactgg

SEQ ID NO: 40738 - DNA, 17 bp, Arabidopsis thaliana
agggaaactaatcgtct

SEQ ID NO: 40739 - DNA, 17 bp, Arabidopsis thaliana
agggaaactcgcatact

SEQ ID NO: 40740 - DNA, 17 bp, Arabidopsis thaliana
agggaaagaaaccgacg

SEQ ID NO: 40741 - DNA, 17 bp, Arabidopsis thaliana
agggaaagcatgaggtg

SEQ ID NO: 40742 - DNA, 17 bp, Arabidopsis thaliana
agggaaagcggcaagtt

SEQ ID NO: 40743 - DNA, 17 bp, Arabidopsis thaliana
agggaaagtgcctctag

SEQ ID NO: 40744 - DNA, 17 bp, Arabidopsis thaliana
agggaaataaccgggtc

SEQ ID NO: 40745 - DNA, 17 bp, Arabidopsis thaliana
agggaaatcagggtcaa

SEQ ID NO: 40746 - DNA, 17 bp, Arabidopsis thaliana
agggaaatcagggtgaa

SEQ ID NO: 40747 - DNA, 17 bp, Arabidopsis thaliana
agggaaatctcaggtga

SEQ ID NO: 40748 - DNA, 17 bp, Arabidopsis thaliana
agggaaatcttctgggg

SEQ ID NO: 40749 - DNA, 17 bp, Arabidopsis thaliana
agggaaattacggattt

SEQ ID NO: 40750 - DNA, 17 bp, Arabidopsis thaliana
agggaaattgcactagg

SEQ ID NO: 40751 - DNA, 17 bp, Arabidopsis thaliana
agggaaattggttggat

SEQ ID NO: 40752 - DNA, 17 bp, Arabidopsis thaliana
agggaacaaagtccaaa

SEQ ID NO: 40753 - DNA, 17 bp, Arabidopsis thaliana
agggaacagttagatta

SEQ ID NO: 40754 - DNA, 17 bp, Arabidopsis thaliana
agggaaccgcacggtgc

SEQ ID NO: 40755 - DNA, 17 bp, Arabidopsis thaliana
agggaaccgtgaaaaga

SEQ ID NO: 40756 - DNA, 17 bp, Arabidopsis thaliana
agggaacgaaccaatca

SEQ ID NO: 40757 - DNA, 17 bp, Arabidopsis thaliana
agggaacgtgagctggg

SEQ ID NO: 40758 - DNA, 17 bp, Arabidopsis thaliana
agggaacgtgggaaggt

SEQ ID NO: 40759 - DNA, 17 bp, Arabidopsis thaliana
agggaagacatctggcc

SEQ ID NO: 40760 - DNA, 17 bp, Arabidopsis thaliana
agggaagaccgaggaga

SEQ ID NO: 40761 - DNA, 17 bp, Arabidopsis thaliana
agggaagaccgatctcc

SEQ ID NO: 40762 - DNA, 17 bp, Arabidopsis thaliana
agggaagactaaaacga

SEQ ID NO: 40763 - DNA, 17 bp, Arabidopsis thaliana
agggaagagcgtgtaac

SEQ ID NO: 40764 - DNA, 17 bp, Arabidopsis thaliana
agggaagaggcgagagg

SEQ ID NO: 40765 - DNA, 17 bp, Arabidopsis thaliana
agggaagaggctcggaa

SEQ ID NO: 40766 - DNA, 17 bp, Arabidopsis thaliana
agggaagcagcagcggt

SEQ ID NO: 40767 - DNA, 17 bp, Arabidopsis thaliana
agggaagcggatggggg

SEQ ID NO: 40768 - DNA, 17 bp, Arabidopsis thaliana
agggaagcgggtggggg

SEQ ID NO: 40769 - DNA, 17 bp, Arabidopsis thaliana
agggaagctgcgatgtt

SEQ ID NO: 40770 - DNA, 17 bp, Arabidopsis thaliana
agggaaggattatccgg

SEQ ID NO: 40771 - DNA, 17 bp, Arabidopsis thaliana
agggaaggccttgtgat

SEQ ID NO: 40772 - DNA, 17 bp, Arabidopsis thaliana
agggaaggggctcagga

SEQ ID NO: 40773 - DNA, 17 bp, Arabidopsis thaliana
agggaaggggtgagttt

SEQ ID NO: 40774 - DNA, 17 bp, Arabidopsis thaliana
agggaaggggtggcatt

SEQ ID NO: 40775 - DNA, 17 bp, Arabidopsis thaliana
agggaaggtaatcgtct

SEQ ID NO: 40776 - DNA, 17 bp, Arabidopsis thaliana
agggaaggtgctatgct

SEQ ID NO: 40777 - DNA, 17 bp, Arabidopsis thaliana
agggaagtggatcccga

SEQ ID NO: 40778 - DNA, 17 bp, Arabidopsis thaliana
agggaataccaatctga

SEQ ID NO: 40779 - DNA, 17 bp, Arabidopsis thaliana
agggaatcaaatccaag

SEQ ID NO: 40780 - DNA, 17 bp, Arabidopsis thaliana
agggaatcccgatttac

SEQ ID NO: 40781 - DNA, 17 bp, Arabidopsis thaliana
agggaatcctcgactcc

SEQ ID NO: 40782 - DNA, 17 bp, Arabidopsis thaliana
agggaatcttgcaaaat

SEQ ID NO: 40783 - DNA, 17 bp, Arabidopsis thaliana
agggaatgccactgcca

SEQ ID NO: 40784 - DNA, 17 bp, Arabidopsis thaliana
agggaatggtgctttac

SEQ ID NO: 40785 - DNA, 17 bp, Arabidopsis thaliana
agggaatgtgacacgtt

SEQ ID NO: 40786 - DNA, 17 bp, Arabidopsis thaliana
agggaatgtgctatgct

SEQ ID NO: 40787 - DNA, 17 bp, Arabidopsis thaliana
agggaatgttagacttt

SEQ ID NO: 40788 - DNA, 17 bp, Arabidopsis thaliana
agggaatgttctactat

SEQ ID NO: 40789 - DNA, 17 bp, Arabidopsis thaliana
agggaatgttctactgt

SEQ ID NO: 40790 - DNA, 17 bp, Arabidopsis thaliana
agggaattaacgacttt

SEQ ID NO: 40791 - DNA, 17 bp, Arabidopsis thaliana
agggaattacaggcttc

SEQ ID NO: 40792 - DNA, 17 bp, Arabidopsis thaliana
agggaattacgggcttc

SEQ ID NO: 40793 - DNA, 17 bp, Arabidopsis thaliana
agggaattcatttctac

SEQ ID NO: 40794 - DNA, 17 bp, Arabidopsis thaliana
agggaattgatatgtga

SEQ ID NO: 40795 - DNA, 17 bp, Arabidopsis thaliana
agggaattgattgtcgg

SEQ ID NO: 40796 - DNA, 17 bp, Arabidopsis thaliana
agggaattggacatgta

SEQ ID NO: 40797 - DNA, 17 bp, Arabidopsis thaliana
agggaattgtccaagca

SEQ ID NO: 40798 - DNA, 17 bp, Arabidopsis thaliana
agggaatttctaacgat

SEQ ID NO: 40799 - DNA, 17 bp, Arabidopsis thaliana
agggacaaactggttga

SEQ ID NO: 40800 - DNA, 17 bp, Arabidopsis thaliana
agggacaagtctgtggg

SEQ ID NO: 40801 - DNA, 17 bp, Arabidopsis thaliana
agggacaataaggaatc

SEQ ID NO: 40802 - DNA, 17 bp, Arabidopsis thaliana
agggacaatgccattac

SEQ ID NO: 40803 - DNA, 17 bp, Arabidopsis thaliana
agggacacacaggtcgt

SEQ ID NO: 40804 - DNA, 17 bp, Arabidopsis thaliana
agggacacagtggggaa

SEQ ID NO: 40805 - DNA, 17 bp, Arabidopsis thaliana
agggacagaggacagac

SEQ ID NO: 40806 - DNA, 17 bp, Arabidopsis thaliana
agggacagaggagagaa

SEQ ID NO: 40807 - DNA, 17 bp, Arabidopsis thaliana
agggacagaggagagag

SEQ ID NO: 40808 - DNA, 17 bp, Arabidopsis thaliana
agggacagcctcctcag

SEQ ID NO: 40809 - DNA, 17 bp, Arabidopsis thaliana
agggacagcgactgggc

SEQ ID NO: 40810 - DNA, 17 bp, Arabidopsis thaliana
agggacaggaactcagg

SEQ ID NO: 40811 - DNA, 17 bp, Arabidopsis thaliana
agggacaggtcgagttg

SEQ ID NO: 40812 - DNA, 17 bp, Arabidopsis thaliana
agggacaggtttttgaa

SEQ ID NO: 40813 - DNA, 17 bp, Arabidopsis thaliana
agggacagtcgggggca

SEQ ID NO: 40814 - DNA, 17 bp, Arabidopsis thaliana
agggacagtctcaggta

SEQ ID NO: 40815 - DNA, 17 bp, Arabidopsis thaliana
agggacagtgacgttta

SEQ ID NO: 40816 - DNA, 17 bp, Arabidopsis thaliana
agggacatctcctttta

SEQ ID NO: 40817 - DNA, 17 bp, Arabidopsis thaliana
agggacattcactttga

SEQ ID NO: 40818 - DNA, 17 bp, Arabidopsis thaliana
agggacattgcggtcca

SEQ ID NO: 40819 - DNA, 17 bp, Arabidopsis thaliana
agggaccaagtgaaata

SEQ ID NO: 40820 - DNA, 17 bp, Arabidopsis thaliana
agggaccaggtgttacg

SEQ ID NO: 40821 - DNA, 17 bp, Arabidopsis thaliana
agggaccaggtgtttca

SEQ ID NO: 40822 - DNA, 17 bp, Arabidopsis thaliana
agggaccaggtgtttcg

SEQ ID NO: 40823 - DNA, 17 bp, Arabidopsis thaliana
agggaccattgggcgtg

SEQ ID NO: 40824 - DNA, 17 bp, Arabidopsis thaliana
agggaccgcctgaggac

SEQ ID NO: 40825 - DNA, 17 bp, Arabidopsis thaliana
agggaccgctctgaatc

SEQ ID NO: 40826 - DNA, 17 bp, Arabidopsis thaliana
agggaccgtaattttta

SEQ ID NO: 40827 - DNA, 17 bp, Arabidopsis thaliana
agggaccgtctgccggg

SEQ ID NO: 40828 - DNA, 17 bp, Arabidopsis thaliana
agggacctcccgctgac

SEQ ID NO: 40829 - DNA, 17 bp, Arabidopsis thaliana
agggacctcccgggaag

SEQ ID NO: 40830 - DNA, 17 bp, Arabidopsis thaliana
agggacctctctcgttt

SEQ ID NO: 40831 - DNA, 17 bp, Arabidopsis thaliana
agggacctgatactacc

SEQ ID NO: 40832 - DNA, 17 bp, Arabidopsis thaliana
agggacctgatttgccg

SEQ ID NO: 40833 - DNA, 17 bp, Arabidopsis thaliana
agggacctgcgacgctg

SEQ ID NO: 40834 - DNA, 17 bp, Arabidopsis thaliana
agggaccttgcaagttt

SEQ ID NO: 40835 - DNA, 17 bp, Arabidopsis thaliana
agggaccttggaagaat

SEQ ID NO: 40836 - DNA, 17 bp, Arabidopsis thaliana
agggacgaaagcacaag

SEQ ID NO: 40837 - DNA, 17 bp, Arabidopsis thaliana
agggacgaaagtcggcc

SEQ ID NO: 40838 - DNA, 17 bp, Arabidopsis thaliana
agggacgaagatggtct

SEQ ID NO: 40839 - DNA, 17 bp, Arabidopsis thaliana
agggacgaagctgattt

SEQ ID NO: 40840 - DNA, 17 bp, Arabidopsis thaliana
agggacgagctgacgag

SEQ ID NO: 40841 - DNA, 17 bp, Arabidopsis thaliana
agggacgagtttttgag

SEQ ID NO: 40842 - DNA, 17 bp, Arabidopsis thaliana
agggacgatgtgttggc

SEQ ID NO: 40843 - DNA, 17 bp, Arabidopsis thaliana
agggacgccaacgatca

SEQ ID NO: 40844 - DNA, 17 bp, Arabidopsis thaliana
agggacgcgtgatgacc

SEQ ID NO: 40845 - DNA, 17 bp, Arabidopsis thaliana
agggacggatttttgat

SEQ ID NO: 40846 - DNA, 17 bp, Arabidopsis thaliana
agggacggctcgtttga

SEQ ID NO: 40847 - DNA, 17 bp, Arabidopsis thaliana
agggacgggttggcggg

SEQ ID NO: 40848 - DNA, 17 bp, Arabidopsis thaliana
agggacgggtttggcgg

SEQ ID NO: 40849 - DNA, 17 bp, Arabidopsis thaliana
agggacggtctcacttc

SEQ ID NO: 40850 - DNA, 17 bp, Arabidopsis thaliana
agggacgtctgcctgga

SEQ ID NO: 40851 - DNA, 17 bp, Arabidopsis thaliana
agggacgtctgcctggc

SEQ ID NO: 40852 - DNA, 17 bp, Arabidopsis thaliana
agggacgtctgcctggg

SEQ ID NO: 40853 - DNA, 17 bp, Arabidopsis thaliana
agggacgtgatggtggc

SEQ ID NO: 40854 - DNA, 17 bp, Arabidopsis thaliana
agggacgtgccggagtg

SEQ ID NO: 40855 - DNA, 17 bp, Arabidopsis thaliana
agggacgttcccaagct

SEQ ID NO: 40856 - DNA, 17 bp, Arabidopsis thaliana
agggacgtttttccttg

SEQ ID NO: 40857 - DNA, 17 bp, Arabidopsis thaliana
agggactaaggacttga

SEQ ID NO: 40858 - DNA, 17 bp, Arabidopsis thaliana
agggactatcttggtga

SEQ ID NO: 40859 - DNA, 17 bp, Arabidopsis thaliana
agggactatggccgggc

SEQ ID NO: 40860 - DNA, 17 bp, Arabidopsis thaliana
agggactcacggcccgg

SEQ ID NO: 40861 - DNA, 17 bp, Arabidopsis thaliana
agggactcacttgatga

SEQ ID NO: 40862 - DNA, 17 bp, Arabidopsis thaliana
agggactcattaaagcc

SEQ ID NO: 40863 - DNA, 17 bp, Arabidopsis thaliana
agggactcatttctctt

SEQ ID NO: 40864 - DNA, 17 bp, Arabidopsis thaliana
agggactcgtcaatgcc

SEQ ID NO: 40865 - DNA, 17 bp, Arabidopsis thaliana
agggactctcagaccat

SEQ ID NO: 40866 - DNA, 17 bp, Arabidopsis thaliana
agggactctcatggtct

SEQ ID NO: 40867 - DNA, 17 bp, Arabidopsis thaliana
agggactctcggcaacg

SEQ ID NO: 40868 - DNA, 17 bp, Arabidopsis thaliana
agggactctctacattg

SEQ ID NO: 40869 - DNA, 17 bp, Arabidopsis thaliana
agggactctgacttaga

SEQ ID NO: 40870 - DNA, 17 bp, Arabidopsis thaliana
agggactctttcattgg

SEQ ID NO: 40871 - DNA, 17 bp, Arabidopsis thaliana
agggactgacgaccttc

SEQ ID NO: 40872 - DNA, 17 bp, Arabidopsis thaliana
agggactggatagtgca

SEQ ID NO: 40873 - DNA, 17 bp, Arabidopsis thaliana
agggactgtcaccaact

SEQ ID NO: 40874 - DNA, 17 bp, Arabidopsis thaliana
agggactgtcactaact

SEQ ID NO: 40875 - DNA, 17 bp, Arabidopsis thaliana
agggacttactgcagat

SEQ ID NO: 40876 - DNA, 17 bp, Arabidopsis thaliana
agggacttcccgagagg

SEQ ID NO: 40877 - DNA, 17 bp, Arabidopsis thaliana
agggacttcgcggtgga

SEQ ID NO: 40878 - DNA, 17 bp, Arabidopsis thaliana
agggacttgcgagggat

SEQ ID NO: 40879 - DNA, 17 bp, Arabidopsis thaliana
agggacttgctcggaag

SEQ ID NO: 40880 - DNA, 17 bp, Arabidopsis thaliana
agggacttggtggtctt

SEQ ID NO: 40881 - DNA, 17 bp, Arabidopsis thaliana
agggactttattttctg

SEQ ID NO: 40882 - DNA, 17 bp, Arabidopsis thaliana
agggactttgacggtcc

SEQ ID NO: 40883 - DNA, 17 bp, Arabidopsis thaliana
agggactttggctaaac

SEQ ID NO: 40884 - DNA, 17 bp, Arabidopsis thaliana
agggagaactcatacat

SEQ ID NO: 40885 - DNA, 17 bp, Arabidopsis thaliana
agggagaatcttctggt

SEQ ID NO: 40886 - DNA, 17 bp, Arabidopsis thaliana
agggagacaaagacgga

SEQ ID NO: 40887 - DNA, 17 bp, Arabidopsis thaliana
agggagacaagcggaga

SEQ ID NO: 40888 - DNA, 17 bp, Arabidopsis thaliana
agggagacaatctgtta

SEQ ID NO: 40889 - DNA, 17 bp, Arabidopsis thaliana
agggagacacaggtcgt

SEQ ID NO: 40890 - DNA, 17 bp, Arabidopsis thaliana
agggagacaggcggaga

SEQ ID NO: 40891 - DNA, 17 bp, Arabidopsis thaliana
agggagacccattgtcg

SEQ ID NO: 40892 - DNA, 17 bp, Arabidopsis thaliana
agggagaccgtctagcc

SEQ ID NO: 40893 - DNA, 17 bp, Arabidopsis thaliana
agggagaccgtgccggc

SEQ ID NO: 40894 - DNA, 17 bp, Arabidopsis thaliana
agggagacctaagtatt

SEQ ID NO: 40895 - DNA, 17 bp, Arabidopsis thaliana
agggagacggcgccttt

SEQ ID NO: 40896 - DNA, 17 bp, Arabidopsis thaliana
agggagactatgttgtt

SEQ ID NO: 40897 - DNA, 17 bp, Arabidopsis thaliana
agggagacttttccgta

SEQ ID NO: 40898 - DNA, 17 bp, Arabidopsis thaliana
agggagagaactgatcg

SEQ ID NO: 40899 - DNA, 17 bp, Arabidopsis thaliana
agggagagaatccagca

SEQ ID NO: 40900 - DNA, 17 bp, Arabidopsis thaliana
agggagagaggaggcgg

SEQ ID NO: 40901 - DNA, 17 bp, Arabidopsis thaliana
agggagagccattcagg

SEQ ID NO: 40902 - DNA, 17 bp, Arabidopsis thaliana
agggagagccccctcag

SEQ ID NO: 40903 - DNA, 17 bp, Arabidopsis thaliana
agggagagcgtcctcag

SEQ ID NO: 40904 - DNA, 17 bp, Arabidopsis thaliana
agggagatccgttggga

SEQ ID NO: 40905 - DNA, 17 bp, Arabidopsis thaliana
agggagatctattcttg

SEQ ID NO: 40906 - DNA, 17 bp, Arabidopsis thaliana
agggagatctgcaaaac

SEQ ID NO: 40907 - DNA, 17 bp, Arabidopsis thaliana
agggagatggccgagtg

SEQ ID NO: 40908 - DNA, 17 bp, Arabidopsis thaliana
agggagatgtccactct

SEQ ID NO: 40909 - DNA, 17 bp, Arabidopsis thaliana
agggagattacggattt

SEQ ID NO: 40910 - DNA, 17 bp, Arabidopsis thaliana
agggagccaggtctcga

SEQ ID NO: 40911 - DNA, 17 bp, Arabidopsis thaliana
agggagccccgagtcca

SEQ ID NO: 40912 - DNA, 17 bp, Arabidopsis thaliana
agggagcctgagaaacg

SEQ ID NO: 40913 - DNA, 17 bp, Arabidopsis thaliana
agggagcgatatttcat

SEQ ID NO: 40914 - DNA, 17 bp, Arabidopsis thaliana
agggagcgattctgaag

SEQ ID NO: 40915 - DNA, 17 bp, Arabidopsis thaliana
agggagcttgactgcaa

SEQ ID NO: 40916 - DNA, 17 bp, Arabidopsis thaliana
agggaggaggttctggc

SEQ ID NO: 40917 - DNA, 17 bp, Arabidopsis thaliana
agggaggccaaccgtct

SEQ ID NO: 40918 - DNA, 17 bp, Arabidopsis thaliana
agggaggctaacagcct

SEQ ID NO: 40919 - DNA, 17 bp, Arabidopsis thaliana
agggaggctaaccgcct

SEQ ID NO: 40920 - DNA, 17 bp, Arabidopsis thaliana
agggaggctaatcgtct

SEQ ID NO: 40921 - DNA, 17 bp, Arabidopsis thaliana
agggagggaaactgtat

SEQ ID NO: 40922 - DNA, 17 bp, Arabidopsis thaliana
agggagggttttctgtt

SEQ ID NO: 40923 - DNA, 17 bp, Arabidopsis thaliana
agggaggtcgtcttgga

SEQ ID NO: 40924 - DNA, 17 bp, Arabidopsis thaliana
agggagtagcagcagct

SEQ ID NO: 40925 - DNA, 17 bp, Arabidopsis thaliana
agggagtaggcactttt

SEQ ID NO: 40926 - DNA, 17 bp, Arabidopsis thaliana
agggagtatcaccacat

SEQ ID NO: 40927 - DNA, 17 bp, Arabidopsis thaliana
agggagtatgcagccgg

SEQ ID NO: 40928 - DNA, 17 bp, Arabidopsis thaliana
agggagtccatcccact

SEQ ID NO: 40929 - DNA, 17 bp, Arabidopsis thaliana
agggagtctacaggtac

SEQ ID NO: 40930 - DNA, 17 bp, Arabidopsis thaliana
agggagtctacatgcac

SEQ ID NO: 40931 - DNA, 17 bp, Arabidopsis thaliana
agggagtctgggcagtc

SEQ ID NO: 40932 - DNA, 17 bp, Arabidopsis thaliana
agggagtgaagaatcaa

SEQ ID NO: 40933 - DNA, 17 bp, Arabidopsis thaliana
agggagtgaatgtgcag

SEQ ID NO: 40934 - DNA, 17 bp, Arabidopsis thaliana
agggagtgagcacttat

SEQ ID NO: 40935 - DNA, 17 bp, Arabidopsis thaliana
agggagtgagcactttt

SEQ ID NO: 40936 - DNA, 17 bp, Arabidopsis thaliana
agggagtgccggcggtg

SEQ ID NO: 40937 - DNA, 17 bp, Arabidopsis thaliana
agggagtggtcactttg

SEQ ID NO: 40938 - DNA, 17 bp, Arabidopsis thaliana
agggagtggtggtggtt

SEQ ID NO: 40939 - DNA, 17 bp, Arabidopsis thaliana
agggagtggtttttaga

SEQ ID NO: 40940 - DNA, 17 bp, Arabidopsis thaliana
agggagttccagcggtg

SEQ ID NO: 40941 - DNA, 17 bp, Arabidopsis thaliana
agggagttccggcgaag

SEQ ID NO: 40942 - DNA, 17 bp, Arabidopsis thaliana
agggagtttagcttaga

SEQ ID NO: 40943 - DNA, 17 bp, Arabidopsis thaliana
agggagtttcacggcac

SEQ ID NO: 40944 - DNA, 17 bp, Arabidopsis thaliana
agggagtttcgcgaaac

SEQ ID NO: 40945 - DNA, 17 bp, Arabidopsis thaliana
agggagtttcgcggcac

SEQ ID NO: 40946 - DNA, 17 bp, Arabidopsis thaliana
agggataaaatggcatg

SEQ ID NO: 40947 - DNA, 17 bp, Arabidopsis thaliana
agggataacaggctgat

SEQ ID NO: 40948 - DNA, 17 bp, Arabidopsis thaliana
agggataacagttctca

SEQ ID NO: 40949 - DNA, 17 bp, Arabidopsis thaliana
agggataacgggcttcg

SEQ ID NO: 40950 - DNA, 17 bp, Arabidopsis thaliana
agggataactcgacgga

SEQ ID NO: 40951 - DNA, 17 bp, Arabidopsis thaliana
agggataactggcttgt

SEQ ID NO: 40952 - DNA, 17 bp, Arabidopsis thaliana
agggataaggcactttt

SEQ ID NO: 40953 - DNA, 17 bp, Arabidopsis thaliana
agggataaggcatttat

SEQ ID NO: 40954 - DNA, 17 bp, Arabidopsis thaliana
agggataaggcattttt

SEQ ID NO: 40955 - DNA, 17 bp, Arabidopsis thaliana
agggataatcagaccgc

SEQ ID NO: 40956 - DNA, 17 bp, Arabidopsis thaliana
agggatacaccgtttga

SEQ ID NO: 40957 - DNA, 17 bp, Arabidopsis thaliana
agggatactcgactaca

SEQ ID NO: 40958 - DNA, 17 bp, Arabidopsis thaliana
agggatactgggacttg

SEQ ID NO: 40959 - DNA, 17 bp, Arabidopsis thaliana
agggatacttgttactc

SEQ ID NO: 40960 - DNA, 17 bp, Arabidopsis thaliana
agggatagcggccatgt

SEQ ID NO: 40961 - DNA, 17 bp, Arabidopsis thaliana
agggatagtcaggcgac

SEQ ID NO: 40962 - DNA, 17 bp, Arabidopsis thaliana
agggatatggcctaact

SEQ ID NO: 40963 - DNA, 17 bp, Arabidopsis thaliana
agggatcaccccatgac

SEQ ID NO: 40964 - DNA, 17 bp, Arabidopsis thaliana
agggatcagcggatgta

SEQ ID NO: 40965 - DNA, 17 bp, Arabidopsis thaliana
agggatcccttggttga

SEQ ID NO: 40966 - DNA, 17 bp, Arabidopsis thaliana
agggatcgccctgaagt

SEQ ID NO: 40967 - DNA, 17 bp, Arabidopsis thaliana
agggatcggaggatttg

SEQ ID NO: 40968 - DNA, 17 bp, Arabidopsis thaliana
agggatgaacgcctgtc

SEQ ID NO: 40969 - DNA, 17 bp, Arabidopsis thaliana
agggatgacacattttc

SEQ ID NO: 40970 - DNA, 17 bp, Arabidopsis thaliana
agggatgacgtgtggaa

SEQ ID NO: 40971 - DNA, 17 bp, Arabidopsis thaliana
agggatgacgtgtggag

SEQ ID NO: 40972 - DNA, 17 bp, Arabidopsis thaliana
agggatgagacattttc

SEQ ID NO: 40973 - DNA, 17 bp, Arabidopsis thaliana
agggatgaggcactttt

SEQ ID NO: 40974 - DNA, 17 bp, Arabidopsis thaliana
agggatgaggcgctttt

SEQ ID NO: 40975 - DNA, 17 bp, Arabidopsis thaliana
agggatgagttggagat

SEQ ID NO: 40976 - DNA, 17 bp, Arabidopsis thaliana
agggatgattggaagca

SEQ ID NO: 40977 - DNA, 17 bp, Arabidopsis thaliana
agggatgcagcgcagct

SEQ ID NO: 40978 - DNA, 17 bp, Arabidopsis thaliana
agggatgccctcgtttt

SEQ ID NO: 40979 - DNA, 17 bp, Arabidopsis thaliana
agggatgcgtttcccgg

SEQ ID NO: 40980 - DNA, 17 bp, Arabidopsis thaliana
agggatgcttctttttg

SEQ ID NO: 40981 - DNA, 17 bp, Arabidopsis thaliana
agggatggaagacatac

SEQ ID NO: 40982 - DNA, 17 bp, Arabidopsis thaliana
agggatggagcgcagct

SEQ ID NO: 40983 - DNA, 17 bp, Arabidopsis thaliana
agggatgggtcggccgg

SEQ ID NO: 40984 - DNA, 17 bp, Arabidopsis thaliana
agggatggtattctcat

SEQ ID NO: 40985 - DNA, 17 bp, Arabidopsis thaliana
agggatggtggccccta

SEQ ID NO: 40986 - DNA, 17 bp, Arabidopsis thaliana
agggatggttgtagctg

SEQ ID NO: 40987 - DNA, 17 bp, Arabidopsis thaliana
agggatgtagcgaagct

SEQ ID NO: 40988 - DNA, 17 bp, Arabidopsis thaliana
agggatgtagcgcagca

SEQ ID NO: 40989 - DNA, 17 bp, Arabidopsis thaliana
agggatgtagcgcagcg

SEQ ID NO: 40990 - DNA, 17 bp, Arabidopsis thaliana
agggatgtagcgcagct

SEQ ID NO: 40991 - DNA, 17 bp, Arabidopsis thaliana
agggatgtagcgcaggg

SEQ ID NO: 40992 - DNA, 17 bp, Arabidopsis thaliana
agggatgtagctcaatt

SEQ ID NO: 40993 - DNA, 17 bp, Arabidopsis thaliana
agggatgtagctcagat

SEQ ID NO: 40994 - DNA, 17 bp, Arabidopsis thaliana
agggatgtagtgcagct

SEQ ID NO: 40995 - DNA, 17 bp, Arabidopsis thaliana
agggatgtatgtgttgg

SEQ ID NO: 40996 - DNA, 17 bp, Arabidopsis thaliana
agggatgtcattgcttc

SEQ ID NO: 40997 - DNA, 17 bp, Arabidopsis thaliana
agggatgtcggatctca

SEQ ID NO: 40998 - DNA, 17 bp, Arabidopsis thaliana
agggatgtgcgaggaac

SEQ ID NO: 40999 - DNA, 17 bp, Arabidopsis thaliana
agggatgtgtttccttg

SEQ ID NO: 41000 - DNA, 17 bp, Arabidopsis thaliana
agggattaaatgctcga

SEQ ID NO: 41001 - DNA, 17 bp, Arabidopsis thaliana
agggattaagggtctcg

SEQ ID NO: 41002 - DNA, 17 bp, Arabidopsis thaliana
agggattaatctagaac

SEQ ID NO: 41003 - DNA, 17 bp, Arabidopsis thaliana
agggattacaagattcg

SEQ ID NO: 41004 - DNA, 17 bp, Arabidopsis thaliana
agggattaccggttttg

SEQ ID NO: 41005 - DNA, 17 bp, Arabidopsis thaliana
agggattacgagtttcg

SEQ ID NO: 41006 - DNA, 17 bp, Arabidopsis thaliana
agggattacgggattcg

SEQ ID NO: 41007 - DNA, 17 bp, Arabidopsis thaliana
agggattacgggctgct

SEQ ID NO: 41008 - DNA, 17 bp, Arabidopsis thaliana
agggattacgggcttca

SEQ ID NO: 41009 - DNA, 17 bp, Arabidopsis thaliana
agggattacgggcttcg

SEQ ID NO: 41010 - DNA, 17 bp, Arabidopsis thaliana
agggattacgggcttga

SEQ ID NO: 41011 - DNA, 17 bp, Arabidopsis thaliana
agggattacgggctttt

SEQ ID NO: 41012 - DNA, 17 bp, Arabidopsis thaliana
agggattacggggttcg

SEQ ID NO: 41013 - DNA, 17 bp, Arabidopsis thaliana
agggattacgggtttca

SEQ ID NO: 41014 - DNA, 17 bp, Arabidopsis thaliana
agggattacgggtttcg

SEQ ID NO: 41015 - DNA, 17 bp, Arabidopsis thaliana
agggattaggcactttg

SEQ ID NO: 41016 - DNA, 17 bp, Arabidopsis thaliana
agggattagtcattagt

SEQ ID NO: 41017 - DNA, 17 bp, Arabidopsis thaliana
agggattatcatctggc

SEQ ID NO: 41018 - DNA, 17 bp, Arabidopsis thaliana
agggattcattaaagcc

SEQ ID NO: 41019 - DNA, 17 bp, Arabidopsis thaliana
agggattccacttctcc

SEQ ID NO: 41020 - DNA, 17 bp, Arabidopsis thaliana
agggattcgaaatagtt

SEQ ID NO: 41021 - DNA, 17 bp, Arabidopsis thaliana
agggattcgagttcaat

SEQ ID NO: 41022 - DNA, 17 bp, Arabidopsis thaliana
agggattcgctctgaag

SEQ ID NO: 41023 - DNA, 17 bp, Arabidopsis thaliana
agggattcgtccagtat

SEQ ID NO: 41024 - DNA, 17 bp, Arabidopsis thaliana
agggattctcacacgca

SEQ ID NO: 41025 - DNA, 17 bp, Arabidopsis thaliana
agggattctcatcgtct

SEQ ID NO: 41026 - DNA, 17 bp, Arabidopsis thaliana
agggattctgtcttgcg

SEQ ID NO: 41027 - DNA, 17 bp, Arabidopsis thaliana
agggattcttttgacaa

SEQ ID NO: 41028 - DNA, 17 bp, Arabidopsis thaliana
agggattcttttgacga

SEQ ID NO: 41029 - DNA, 17 bp, Arabidopsis thaliana
agggattgacgattcac

SEQ ID NO: 41030 - DNA, 17 bp, Arabidopsis thaliana
agggattgatccacggt

SEQ ID NO: 41031 - DNA, 17 bp, Arabidopsis thaliana
agggattgatgattcgc

SEQ ID NO: 41032 - DNA, 17 bp, Arabidopsis thaliana
agggattgatgtgaagt

SEQ ID NO: 41033 - DNA, 17 bp, Arabidopsis thaliana
agggattgcaagattcg

SEQ ID NO: 41034 - DNA, 17 bp, Arabidopsis thaliana
agggattgcaattgtat

SEQ ID NO: 41035 - DNA, 17 bp, Arabidopsis thaliana
agggattgcggcagggt

SEQ ID NO: 41036 - DNA, 17 bp, Arabidopsis thaliana
agggattggcaaagtca

SEQ ID NO: 41037 - DNA, 17 bp, Arabidopsis thaliana
agggattggctaagtca

SEQ ID NO: 41038 - DNA, 17 bp, Arabidopsis thaliana
agggattggctatagat

SEQ ID NO: 41039 - DNA, 17 bp, Arabidopsis thaliana
agggattggctgctgac

SEQ ID NO: 41040 - DNA, 17 bp, Arabidopsis thaliana
agggattgtccggctat

SEQ ID NO: 41041 - DNA, 17 bp, Arabidopsis thaliana
agggattgtccggctga

SEQ ID NO: 41042 - DNA, 17 bp, Arabidopsis thaliana
agggattgtgttgtaac

SEQ ID NO: 41043 - DNA, 17 bp, Arabidopsis thaliana
agggatttagcgcagct

SEQ ID NO: 41044 - DNA, 17 bp, Arabidopsis thaliana
agggatttagggatgga

SEQ ID NO: 41045 - DNA, 17 bp, Arabidopsis thaliana
agggatttagggattag

SEQ ID NO: 41046 - DNA, 17 bp, Arabidopsis thaliana
agggatttagggattta

SEQ ID NO: 41047 - DNA, 17 bp, Arabidopsis thaliana
agggatttcggtgtgct

SEQ ID NO: 41048 - DNA, 17 bp, Arabidopsis thaliana
agggatttgaagagtct

SEQ ID NO: 41049 - DNA, 17 bp, Arabidopsis thaliana
agggatttgaccagttt

SEQ ID NO: 41050 - DNA, 17 bp, Arabidopsis thaliana
agggatttgcgaggaac

SEQ ID NO: 41051 - DNA, 17 bp, Arabidopsis thaliana
agggatttggttagcca

SEQ ID NO: 41052 - DNA, 17 bp, Arabidopsis thaliana
agggattttcttcctcc

SEQ ID NO: 41053 - DNA, 17 bp, Arabidopsis thaliana
agggattttggccaggt

SEQ ID NO: 41054 - DNA, 17 bp, Arabidopsis thaliana
agggcaaaacccgtatc

SEQ ID NO: 41055 - DNA, 17 bp, Arabidopsis thaliana
agggcaaaagcgcctac

SEQ ID NO: 41056 - DNA, 17 bp, Arabidopsis thaliana
agggcaaaccaaataaa

SEQ ID NO: 41057 - DNA, 17 bp, Arabidopsis thaliana
agggcaaagcccgtatc

SEQ ID NO: 41058 - DNA, 17 bp, Arabidopsis thaliana
agggcaaatcactctat

SEQ ID NO: 41059 - DNA, 17 bp, Arabidopsis thaliana
agggcaaatgcttggag

SEQ ID NO: 41060 - DNA, 17 bp, Arabidopsis thaliana
agggcaaattcgtccat

SEQ ID NO: 41061 - DNA, 17 bp, Arabidopsis thaliana
agggcaaattggacaat

SEQ ID NO: 41062 - DNA, 17 bp, Arabidopsis thaliana
agggcaacagctggtcc

SEQ ID NO: 41063 - DNA, 17 bp, Arabidopsis thaliana
agggcaacttttcttct

SEQ ID NO: 41064 - DNA, 17 bp, Arabidopsis thaliana
agggcaagtctggtgca

SEQ ID NO: 41065 - DNA, 17 bp, Arabidopsis thaliana
agggcaagtctggtgcc

SEQ ID NO: 41066 - DNA, 17 bp, Arabidopsis thaliana
agggcaatgcgtgaggc

SEQ ID NO: 41067 - DNA, 17 bp, Arabidopsis thaliana
agggcaattcggccgga

SEQ ID NO: 41068 - DNA, 17 bp, Arabidopsis thaliana
agggcaatttaggaatt

SEQ ID NO: 41069 - DNA, 17 bp, Arabidopsis thaliana
agggcacacaggtcttt

SEQ ID NO: 41070 - DNA, 17 bp, Arabidopsis thaliana
agggcacactgcctggc

SEQ ID NO: 41071 - DNA, 17 bp, Arabidopsis thaliana
agggcacactgcctggg

SEQ ID NO: 41072 - DNA, 17 bp, Arabidopsis thaliana
agggcacatctacctac

SEQ ID NO: 41073 - DNA, 17 bp, Arabidopsis thaliana
agggcacatctgcctgg

SEQ ID NO: 41074 - DNA, 17 bp, Arabidopsis thaliana
agggcacatctgcttgg

SEQ ID NO: 41075 - DNA, 17 bp, Arabidopsis thaliana
agggcacatctgtctcg

SEQ ID NO: 41076 - DNA, 17 bp, Arabidopsis thaliana
agggcacatgtgcctgg

SEQ ID NO: 41077 - DNA, 17 bp, Arabidopsis thaliana
agggcaccaccaggagt

SEQ ID NO: 41078 - DNA, 17 bp, Arabidopsis thaliana
agggcacccctccctgg

SEQ ID NO: 41079 - DNA, 17 bp, Arabidopsis thaliana
agggcacctctgcctgg

SEQ ID NO: 41080 - DNA, 17 bp, Arabidopsis thaliana
agggcacgcctgcctgc

SEQ ID NO: 41081 - DNA, 17 bp, Arabidopsis thaliana
agggcacgcctgcctgg

SEQ ID NO: 41082 - DNA, 17 bp, Arabidopsis thaliana
agggcacgcctgggtgt

SEQ ID NO: 41083 - DNA, 17 bp, Arabidopsis thaliana
agggcacgtcagcctgg

SEQ ID NO: 41084 - DNA, 17 bp, Arabidopsis thaliana
agggcacgtccccatgg

SEQ ID NO: 41085 - DNA, 17 bp, Arabidopsis thaliana
agggcacgtccctgggt

SEQ ID NO: 41086 - DNA, 17 bp, Arabidopsis thaliana
agggcacgtccgcctgg

SEQ ID NO: 41087 - DNA, 17 bp, Arabidopsis thaliana
agggcacgtcgtcctgg

SEQ ID NO: 41088 - DNA, 17 bp, Arabidopsis thaliana
agggcacgtcgtctgtc

SEQ ID NO: 41089 - DNA, 17 bp, Arabidopsis thaliana
agggcacgtctacctgg

SEQ ID NO: 41090 - DNA, 17 bp, Arabidopsis thaliana
agggcacgtctagtccg

SEQ ID NO: 41091 - DNA, 17 bp, Arabidopsis thaliana
agggcacgtctccctgg

SEQ ID NO: 41092 - DNA, 17 bp, Arabidopsis thaliana
agggcacgtctcctggg

SEQ ID NO: 41093 - DNA, 17 bp, Arabidopsis thaliana
agggcacgtctctgggt

SEQ ID NO: 41094 - DNA, 17 bp, Arabidopsis thaliana
agggcacgtctcttggg

SEQ ID NO: 41095 - DNA, 17 bp, Arabidopsis thaliana
agggcacgtctcttggt

SEQ ID NO: 41096 - DNA, 17 bp, Arabidopsis thaliana
agggcacgtctgactgg

SEQ ID NO: 41097 - DNA, 17 bp, Arabidopsis thaliana
agggcacgtctgcccgg

SEQ ID NO: 41098 - DNA, 17 bp, Arabidopsis thaliana
agggcacgtctgccggg

SEQ ID NO: 41099 - DNA, 17 bp, Arabidopsis thaliana
agggcacgtctgcctag

SEQ ID NO: 41100 - DNA, 17 bp, Arabidopsis thaliana
agggcacgtctgcctcg

SEQ ID NO: 41101 - DNA, 17 bp, Arabidopsis thaliana
agggcacgtctgcctga

SEQ ID NO: 41102 - DNA, 17 bp, Arabidopsis thaliana
agggcacgtctgcctgc

SEQ ID NO: 41103 - DNA, 17 bp, Arabidopsis thaliana
agggcacgtctgcctgg

SEQ ID NO: 41104 - DNA, 17 bp, Arabidopsis thaliana
agggcacgtctgcctgt

SEQ ID NO: 41105 - DNA, 17 bp, Arabidopsis thaliana
agggcacgtctgccttg

SEQ ID NO: 41106 - DNA, 17 bp, Arabidopsis thaliana
agggcacgtctgcgggt

SEQ ID NO: 41107 - DNA, 17 bp, Arabidopsis thaliana
agggcacgtctgctcgg

SEQ ID NO: 41108 - DNA, 17 bp, Arabidopsis thaliana
agggcacgtctgctggg

SEQ ID NO: 41109 - DNA, 17 bp, Arabidopsis thaliana
agggcacgtctgcttgg

SEQ ID NO: 41110 - DNA, 17 bp, Arabidopsis thaliana
agggcacgtctgggtgt

SEQ ID NO: 41111 - DNA, 17 bp, Arabidopsis thaliana
agggcacgtctgtctgg

SEQ ID NO: 41112 - DNA, 17 bp, Arabidopsis thaliana
agggcacgtctgtgggt

SEQ ID NO: 41113 - DNA, 17 bp, Arabidopsis thaliana
agggcacgtctgttggg

SEQ ID NO: 41114 - DNA, 17 bp, Arabidopsis thaliana
agggcacgtctgtttgg

SEQ ID NO: 41115 - DNA, 17 bp, Arabidopsis thaliana
agggcacgtcttcctgg

SEQ ID NO: 41116 - DNA, 17 bp, Arabidopsis thaliana
agggcacgtcttgggtg

SEQ ID NO: 41117 - DNA, 17 bp, Arabidopsis thaliana
agggcacgtgtcccacc

SEQ ID NO: 41118 - DNA, 17 bp, Arabidopsis thaliana
agggcacgtgtgcctgg

SEQ ID NO: 41119 - DNA, 17 bp, Arabidopsis thaliana
agggcacgttcgcctgg

SEQ ID NO: 41120 - DNA, 17 bp, Arabidopsis thaliana
agggcacgttgcctggg

SEQ ID NO: 41121 - DNA, 17 bp, Arabidopsis thaliana
agggcacgtttgcctgg

SEQ ID NO: 41122 - DNA, 17 bp, Arabidopsis thaliana
agggcactctcgcttta

SEQ ID NO: 41123 - DNA, 17 bp, Arabidopsis thaliana
agggcactgcggaccat

SEQ ID NO: 41124 - DNA, 17 bp, Arabidopsis thaliana
agggcacttctgcctgc

SEQ ID NO: 41125 - DNA, 17 bp, Arabidopsis thaliana
agggcacttctgcctgg

SEQ ID NO: 41126 - DNA, 17 bp, Arabidopsis thaliana
agggcacttcttccaaa

SEQ ID NO: 41127 - DNA, 17 bp, Arabidopsis thaliana
agggcagagacgcggcg

SEQ ID NO: 41128 - DNA, 17 bp, Arabidopsis thaliana
agggcagcagcaatagt

SEQ ID NO: 41129 - DNA, 17 bp, Arabidopsis thaliana
agggcagcagtcagttc

SEQ ID NO: 41130 - DNA, 17 bp, Arabidopsis thaliana
agggcagcccaagttgc

SEQ ID NO: 41131 - DNA, 17 bp, Arabidopsis thaliana
agggcagcggacaaagc

SEQ ID NO: 41132 - DNA, 17 bp, Arabidopsis thaliana
agggcagcgggtagact

SEQ ID NO: 41133 - DNA, 17 bp, Arabidopsis thaliana
agggcagggacgtagtc

SEQ ID NO: 41134 - DNA, 17 bp, Arabidopsis thaliana
agggcagttcgccaacc

SEQ ID NO: 41135 - DNA, 17 bp, Arabidopsis thaliana
agggcagttcgtctatg

SEQ ID NO: 41136 - DNA, 17 bp, Arabidopsis thaliana
agggcagttgtgttgct

SEQ ID NO: 41137 - DNA, 17 bp, Arabidopsis thaliana
agggcagttttgcaaat

SEQ ID NO: 41138 - DNA, 17 bp, Arabidopsis thaliana
agggcataccgctttga

SEQ ID NO: 41139 - DNA, 17 bp, Arabidopsis thaliana
agggcatgaccgagttt

SEQ ID NO: 41140 - DNA, 17 bp, Arabidopsis thaliana
agggcatggggatggca

SEQ ID NO: 41141 - DNA, 17 bp, Arabidopsis thaliana
agggcatgtaagtctaa

SEQ ID NO: 41142 - DNA, 17 bp, Arabidopsis thaliana
agggcatgtcctgaggg

SEQ ID NO: 41143 - DNA, 17 bp, Arabidopsis thaliana
agggcatgtctgcctgg

SEQ ID NO: 41144 - DNA, 17 bp, Arabidopsis thaliana
agggcatgtttccactc

SEQ ID NO: 41145 - DNA, 17 bp, Arabidopsis thaliana
agggcattcatcgaggg

SEQ ID NO: 41146 - DNA, 17 bp, Arabidopsis thaliana
agggcattctatagcca

SEQ ID NO: 41147 - DNA, 17 bp, Arabidopsis thaliana
agggcatttccatctac

SEQ ID NO: 41148 - DNA, 17 bp, Arabidopsis thaliana
agggcatttctgcctgg

SEQ ID NO: 41149 - DNA, 17 bp, Arabidopsis thaliana
agggcatttggccttga

SEQ ID NO: 41150 - DNA, 17 bp, Arabidopsis thaliana
agggccaaaaagtccgg

SEQ ID NO: 41151 - DNA, 17 bp, Arabidopsis thaliana
agggccaaagaagcggc

SEQ ID NO: 41152 - DNA, 17 bp, Arabidopsis thaliana
agggccaaccaagcaca

SEQ ID NO: 41153 - DNA, 17 bp, Arabidopsis thaliana
agggccaagagggaaaa

SEQ ID NO: 41154 - DNA, 17 bp, Arabidopsis thaliana
agggccaaggcccaaag

SEQ ID NO: 41155 - DNA, 17 bp, Arabidopsis thaliana
agggccaaggtctccat

SEQ ID NO: 41156 - DNA, 17 bp, Arabidopsis thaliana
agggccacaacttgtag

SEQ ID NO: 41157 - DNA, 17 bp, Arabidopsis thaliana
agggccacagattccta

SEQ ID NO: 41158 - DNA, 17 bp, Arabidopsis thaliana
agggccaccgtgggaaa

SEQ ID NO: 41159 - DNA, 17 bp, Arabidopsis thaliana
agggccacctttaccgt

SEQ ID NO: 41160 - DNA, 17 bp, Arabidopsis thaliana
agggccacgggttcccg

SEQ ID NO: 41161 - DNA, 17 bp, Arabidopsis thaliana
agggccagaaagccaga

SEQ ID NO: 41162 - DNA, 17 bp, Arabidopsis thaliana
agggccagagctcttac

SEQ ID NO: 41163 - DNA, 17 bp, Arabidopsis thaliana
agggccagatggtatga

SEQ ID NO: 41164 - DNA, 17 bp, Arabidopsis thaliana
agggccagcagaatctg

SEQ ID NO: 41165 - DNA, 17 bp, Arabidopsis thaliana
agggccagccctgagtc

SEQ ID NO: 41166 - DNA, 17 bp, Arabidopsis thaliana
agggccagccctgagtg

SEQ ID NO: 41167 - DNA, 17 bp, Arabidopsis thaliana
agggccagccctgctca

SEQ ID NO: 41168 - DNA, 17 bp, Arabidopsis thaliana
agggccagccctggctg

SEQ ID NO: 41169 - DNA, 17 bp, Arabidopsis thaliana
agggccagcttctgctc

SEQ ID NO: 41170 - DNA, 17 bp, Arabidopsis thaliana
agggccagtccaaagat

SEQ ID NO: 41171 - DNA, 17 bp, Arabidopsis thaliana
agggccataacggatta

SEQ ID NO: 41172 - DNA, 17 bp, Arabidopsis thaliana
agggccatatggtatga

SEQ ID NO: 41173 - DNA, 17 bp, Arabidopsis thaliana
agggccatctacgccgg

SEQ ID NO: 41174 - DNA, 17 bp, Arabidopsis thaliana
agggccatcttgtatct

SEQ ID NO: 41175 - DNA, 17 bp, Arabidopsis thaliana
agggccattttgttgat

SEQ ID NO: 41176 - DNA, 17 bp, Arabidopsis thaliana
agggcccaaaagtccgg

SEQ ID NO: 41177 - DNA, 17 bp, Arabidopsis thaliana
agggcccaaaagttcgg

SEQ ID NO: 41178 - DNA, 17 bp, Arabidopsis thaliana
agggcccagcggctgga

SEQ ID NO: 41179 - DNA, 17 bp, Arabidopsis thaliana
agggccccctggaactg

SEQ ID NO: 41180 - DNA, 17 bp, Arabidopsis thaliana
agggcccgaatggtgac

SEQ ID NO: 41181 - DNA, 17 bp, Arabidopsis thaliana
agggcccgctgcgtacc

SEQ ID NO: 41182 - DNA, 17 bp, Arabidopsis thaliana
agggcccgctgtgtacc

SEQ ID NO: 41183 - DNA, 17 bp, Arabidopsis thaliana
agggcccgtccgatgtg

SEQ ID NO: 41184 - DNA, 17 bp, Arabidopsis thaliana
agggccctgttcgtttg

SEQ ID NO: 41185 - DNA, 17 bp, Arabidopsis thaliana
agggccgaaacccgtaa

SEQ ID NO: 41186 - DNA, 17 bp, Arabidopsis thaliana
agggccgaaagcagcga

SEQ ID NO: 41187 - DNA, 17 bp, Arabidopsis thaliana
agggccgacatctgatg

SEQ ID NO: 41188 - DNA, 17 bp, Arabidopsis thaliana
agggccgacatgtgatg

SEQ ID NO: 41189 - DNA, 17 bp, Arabidopsis thaliana
agggccgaccctgctca

SEQ ID NO: 41190 - DNA, 17 bp, Arabidopsis thaliana
agggccgactctttcca

SEQ ID NO: 41191 - DNA, 17 bp, Arabidopsis thaliana
agggccgagaatttctt

SEQ ID NO: 41192 - DNA, 17 bp, Arabidopsis thaliana
agggccgagcgctcctg

SEQ ID NO: 41193 - DNA, 17 bp, Arabidopsis thaliana
agggccgatgtcgttac

SEQ ID NO: 41194 - DNA, 17 bp, Arabidopsis thaliana
agggccgattggtaacg

SEQ ID NO: 41195 - DNA, 17 bp, Arabidopsis thaliana
agggccgcctgtgccag

SEQ ID NO: 41196 - DNA, 17 bp, Arabidopsis thaliana
agggccgcctgtgtcag

SEQ ID NO: 41197 - DNA, 17 bp, Arabidopsis thaliana
agggccgctcacgcccg

SEQ ID NO: 41198 - DNA, 17 bp, Arabidopsis thaliana
agggccggaatctaagg

SEQ ID NO: 41199 - DNA, 17 bp, Arabidopsis thaliana
agggccggaatctacgg

SEQ ID NO: 41200 - DNA, 17 bp, Arabidopsis thaliana
agggccggacacggagc

SEQ ID NO: 41201 - DNA, 17 bp, Arabidopsis thaliana
agggccggcactgggca

SEQ ID NO: 41202 - DNA, 17 bp, Arabidopsis thaliana
agggccggcccaagtgt

SEQ ID NO: 41203 - DNA, 17 bp, Arabidopsis thaliana
agggccggccctgctca

SEQ ID NO: 41204 - DNA, 17 bp, Arabidopsis thaliana
agggccggccctggaca

SEQ ID NO: 41205 - DNA, 17 bp, Arabidopsis thaliana
agggccggccctgggcc

SEQ ID NO: 41206 - DNA, 17 bp, Arabidopsis thaliana
agggccggccctgggct

SEQ ID NO: 41207 - DNA, 17 bp, Arabidopsis thaliana
agggccggccttgggct

SEQ ID NO: 41208 - DNA, 17 bp, Arabidopsis thaliana
agggccggctcaaaata

SEQ ID NO: 41209 - DNA, 17 bp, Arabidopsis thaliana
agggccggctcaacagt

SEQ ID NO: 41210 - DNA, 17 bp, Arabidopsis thaliana
agggccggctcaacatt

SEQ ID NO: 41211 - DNA, 17 bp, Arabidopsis thaliana
agggccggcttgctcag

SEQ ID NO: 41212 - DNA, 17 bp, Arabidopsis thaliana
agggccggtcctagcct

SEQ ID NO: 41213 - DNA, 17 bp, Arabidopsis thaliana
agggccggtcctgggct

SEQ ID NO: 41214 - DNA, 17 bp, Arabidopsis thaliana
agggccgtcgctcaacg

SEQ ID NO: 41215 - DNA, 17 bp, Arabidopsis thaliana
agggccgtctgcctggg

SEQ ID NO: 41216 - DNA, 17 bp, Arabidopsis thaliana
agggccgtgcgggtgag

SEQ ID NO: 41217 - DNA, 17 bp, Arabidopsis thaliana
agggcctaaatcttttg

SEQ ID NO: 41218 - DNA, 17 bp, Arabidopsis thaliana
agggcctcacttctccg

SEQ ID NO: 41219 - DNA, 17 bp, Arabidopsis thaliana
agggcctcattggtaag

SEQ ID NO: 41220 - DNA, 17 bp, Arabidopsis thaliana
agggcctcccatcatct

SEQ ID NO: 41221 - DNA, 17 bp, Arabidopsis thaliana
agggcctctctctcttc

SEQ ID NO: 41222 - DNA, 17 bp, Arabidopsis thaliana
agggcctgaaactttta

SEQ ID NO: 41223 - DNA, 17 bp, Arabidopsis thaliana
agggcctgaaacttttt

SEQ ID NO: 41224 - DNA, 17 bp, Arabidopsis thaliana
agggcctgccatgtacg

SEQ ID NO: 41225 - DNA, 17 bp, Arabidopsis thaliana
agggcctggatgtcagt

SEQ ID NO: 41226 - DNA, 17 bp, Arabidopsis thaliana
agggcctggatttagtc

SEQ ID NO: 41227 - DNA, 17 bp, Arabidopsis thaliana
agggcctgtgttttttt

SEQ ID NO: 41228 - DNA, 17 bp, Arabidopsis thaliana
agggcctgttcgtttat

SEQ ID NO: 41229 - DNA, 17 bp, Arabidopsis thaliana
agggcctgttcgtttct

SEQ ID NO: 41230 - DNA, 17 bp, Arabidopsis thaliana
agggcctgttcttttcc

SEQ ID NO: 41231 - DNA, 17 bp, Arabidopsis thaliana
agggcctgtttgtttct

SEQ ID NO: 41232 - DNA, 17 bp, Arabidopsis thaliana
agggccttaaccgttgg

SEQ ID NO: 41233 - DNA, 17 bp, Arabidopsis thaliana
agggccttactctattc

SEQ ID NO: 41234 - DNA, 17 bp, Arabidopsis thaliana
agggccttcatcgctac

SEQ ID NO: 41235 - DNA, 17 bp, Arabidopsis thaliana
agggccttgactggtac

SEQ ID NO: 41236 - DNA, 17 bp, Arabidopsis thaliana
agggccttgaggcaatt

SEQ ID NO: 41237 - DNA, 17 bp, Arabidopsis thaliana
agggccttggtcaagaa

SEQ ID NO: 41238 - DNA, 17 bp, Arabidopsis thaliana
agggcctttatttctgc

SEQ ID NO: 41239 - DNA, 17 bp, Arabidopsis thaliana
agggcctttgaacctga

SEQ ID NO: 41240 - DNA, 17 bp, Arabidopsis thaliana
agggcctttgggcttga

SEQ ID NO: 41241 - DNA, 17 bp, Arabidopsis thaliana
agggcctttgtataatt

SEQ ID NO: 41242 - DNA, 17 bp, Arabidopsis thaliana
agggcgaaaccggcgcc

SEQ ID NO: 41243 - DNA, 17 bp, Arabidopsis thaliana
agggcgaacgaccatgc

SEQ ID NO: 41244 - DNA, 17 bp, Arabidopsis thaliana
agggcgaacgacctgtc

SEQ ID NO: 41245 - DNA, 17 bp, Arabidopsis thaliana
agggcgaacgacctgtg

SEQ ID NO: 41246 - DNA, 17 bp, Arabidopsis thaliana
agggcgaacgacttgtg

SEQ ID NO: 41247 - DNA, 17 bp, Arabidopsis thaliana
agggcgaacgcaacttg

SEQ ID NO: 41248 - DNA, 17 bp, Arabidopsis thaliana
agggcgaacggttcatc

SEQ ID NO: 41249 - DNA, 17 bp, Arabidopsis thaliana
agggcgaagtccgtaat

SEQ ID NO: 41250 - DNA, 17 bp, Arabidopsis thaliana
agggcgacctatacccg

SEQ ID NO: 41251 - DNA, 17 bp, Arabidopsis thaliana
agggcgacgagcttcca

SEQ ID NO: 41252 - DNA, 17 bp, Arabidopsis thaliana
agggcgagacgttcggg

SEQ ID NO: 41253 - DNA, 17 bp, Arabidopsis thaliana
agggcgatgataatggc

SEQ ID NO: 41254 - DNA, 17 bp, Arabidopsis thaliana
agggcgattacttgcta

SEQ ID NO: 41255 - DNA, 17 bp, Arabidopsis thaliana
agggcgattctgtgggt

SEQ ID NO: 41256 - DNA, 17 bp, Arabidopsis thaliana
agggcggacaacaaacc

SEQ ID NO: 41257 - DNA, 17 bp, Arabidopsis thaliana
agggcggatagaccttg

SEQ ID NO: 41258 - DNA, 17 bp, Arabidopsis thaliana
agggcggcgatacgacc

SEQ ID NO: 41259 - DNA, 17 bp, Arabidopsis thaliana
agggcgggattaactat

SEQ ID NO: 41260 - DNA, 17 bp, Arabidopsis thaliana
agggcggggttcaaatc

SEQ ID NO: 41261 - DNA, 17 bp, Arabidopsis thaliana
agggcggggttcagatc

SEQ ID NO: 41262 - DNA, 17 bp, Arabidopsis thaliana
agggcggtgaaggtatc

SEQ ID NO: 41263 - DNA, 17 bp, Arabidopsis thaliana
agggcgtaagatccgtc

SEQ ID NO: 41264 - DNA, 17 bp, Arabidopsis thaliana
agggcgtaccacgaggg

SEQ ID NO: 41265 - DNA, 17 bp, Arabidopsis thaliana
agggcgtacgacgaggg

SEQ ID NO: 41266 - DNA, 17 bp, Arabidopsis thaliana
agggcgtcacaggagaa

SEQ ID NO: 41267 - DNA, 17 bp, Arabidopsis thaliana
agggcgtcattgggcat

SEQ ID NO: 41268 - DNA, 17 bp, Arabidopsis thaliana
agggcgtcggcgacttg

SEQ ID NO: 41269 - DNA, 17 bp, Arabidopsis thaliana
agggcgtcgggaatgga

SEQ ID NO: 41270 - DNA, 17 bp, Arabidopsis thaliana
agggcgtctgcctgggt

SEQ ID NO: 41271 - DNA, 17 bp, Arabidopsis thaliana
agggcgtgaaagcattc

SEQ ID NO: 41272 - DNA, 17 bp, Arabidopsis thaliana
agggcgtgggttcaaac

SEQ ID NO: 41273 - DNA, 17 bp, Arabidopsis thaliana
agggcgtgggttcaaat

SEQ ID NO: 41274 - DNA, 17 bp, Arabidopsis thaliana
agggcgtgggttcatac

SEQ ID NO: 41275 - DNA, 17 bp, Arabidopsis thaliana
agggcgtgggttcatcc

SEQ ID NO: 41276 - DNA, 17 bp, Arabidopsis thaliana
agggcgttgaaggtatc

SEQ ID NO: 41277 - DNA, 17 bp, Arabidopsis thaliana
agggcgtttctaaggaa

SEQ ID NO: 41278 - DNA, 17 bp, Arabidopsis thaliana
agggcgtttgttcatga

SEQ ID NO: 41279 - DNA, 17 bp, Arabidopsis thaliana
agggctaaaaaccgcgg

SEQ ID NO: 41280 - DNA, 17 bp, Arabidopsis thaliana
agggctaaaaccacaac

SEQ ID NO: 41281 - DNA, 17 bp, Arabidopsis thaliana
agggctaaccggatcac

SEQ ID NO: 41282 - DNA, 17 bp, Arabidopsis thaliana
agggctaagatatgagt

SEQ ID NO: 41283 - DNA, 17 bp, Arabidopsis thaliana
agggctaatcgacaaag

SEQ ID NO: 41284 - DNA, 17 bp, Arabidopsis thaliana
agggctaattattggtg

SEQ ID NO: 41285 - DNA, 17 bp, Arabidopsis thaliana
agggctacaggaagttt

SEQ ID NO: 41286 - DNA, 17 bp, Arabidopsis thaliana
agggctacctattggag

SEQ ID NO: 41287 - DNA, 17 bp, Arabidopsis thaliana
agggctacctttgatgg

SEQ ID NO: 41288 - DNA, 17 bp, Arabidopsis thaliana
agggctagcctcggatt

SEQ ID NO: 41289 - DNA, 17 bp, Arabidopsis thaliana
agggctagcctcggtgt

SEQ ID NO: 41290 - DNA, 17 bp, Arabidopsis thaliana
agggctaggaggtcctc

SEQ ID NO: 41291 - DNA, 17 bp, Arabidopsis thaliana
agggctaggctcggggg

SEQ ID NO: 41292 - DNA, 17 bp, Arabidopsis thaliana
agggctagtgactggac

SEQ ID NO: 41293 - DNA, 17 bp, Arabidopsis thaliana
agggctagtgactggag

SEQ ID NO: 41294 - DNA, 17 bp, Arabidopsis thaliana
agggctagtgcttgtgt

SEQ ID NO: 41295 - DNA, 17 bp, Arabidopsis thaliana
agggctagtgtttgtgt

SEQ ID NO: 41296 - DNA, 17 bp, Arabidopsis thaliana
agggctagttcgactcg

SEQ ID NO: 41297 - DNA, 17 bp, Arabidopsis thaliana
agggctatactcagtta

SEQ ID NO: 41298 - DNA, 17 bp, Arabidopsis thaliana
agggctatagctcagaa

SEQ ID NO: 41299 - DNA, 17 bp, Arabidopsis thaliana
agggctatagctcagga

SEQ ID NO: 41300 - DNA, 17 bp, Arabidopsis thaliana
agggctatagctcagta

SEQ ID NO: 41301 - DNA, 17 bp, Arabidopsis thaliana
agggctatagctcagtt

SEQ ID NO: 41302 - DNA, 17 bp, Arabidopsis thaliana
agggctatagggtggcg

SEQ ID NO: 41303 - DNA, 17 bp, Arabidopsis thaliana
agggctatccgttgact

SEQ ID NO: 41304 - DNA, 17 bp, Arabidopsis thaliana
agggctatctcactgga

SEQ ID NO: 41305 - DNA, 17 bp, Arabidopsis thaliana
agggctatctttgggct

SEQ ID NO: 41306 - DNA, 17 bp, Arabidopsis thaliana
agggctatgttgcagga

SEQ ID NO: 41307 - DNA, 17 bp, Arabidopsis thaliana
agggctcaagtgattca

SEQ ID NO: 41308 - DNA, 17 bp, Arabidopsis thaliana
agggctcacttagggct

SEQ ID NO: 41309 - DNA, 17 bp, Arabidopsis thaliana
agggctcagcgaaatgt

SEQ ID NO: 41310 - DNA, 17 bp, Arabidopsis thaliana
agggctcagctgaatct

SEQ ID NO: 41311 - DNA, 17 bp, Arabidopsis thaliana
agggctcaggaagtgtg

SEQ ID NO: 41312 - DNA, 17 bp, Arabidopsis thaliana
agggctcagttgaatct

SEQ ID NO: 41313 - DNA, 17 bp, Arabidopsis thaliana
agggctcccataacttg

SEQ ID NO: 41314 - DNA, 17 bp, Arabidopsis thaliana
agggctccgaatggtga

SEQ ID NO: 41315 - DNA, 17 bp, Arabidopsis thaliana
agggctccgtttgtttc

SEQ ID NO: 41316 - DNA, 17 bp, Arabidopsis thaliana
agggctcctcaggtgtt

SEQ ID NO: 41317 - DNA, 17 bp, Arabidopsis thaliana
agggctcgcgttgacta

SEQ ID NO: 41318 - DNA, 17 bp, Arabidopsis thaliana
agggctcgggcagcggc

SEQ ID NO: 41319 - DNA, 17 bp, Arabidopsis thaliana
agggctcgtctgcctgg

SEQ ID NO: 41320 - DNA, 17 bp, Arabidopsis thaliana
agggctctatctggcat

SEQ ID NO: 41321 - DNA, 17 bp, Arabidopsis thaliana
agggctctgataccatg

SEQ ID NO: 41322 - DNA, 17 bp, Arabidopsis thaliana
agggctctgtgacggag

SEQ ID NO: 41323 - DNA, 17 bp, Arabidopsis thaliana
agggctctgttcgtttc

SEQ ID NO: 41324 - DNA, 17 bp, Arabidopsis thaliana
agggctctttctccgaa

SEQ ID NO: 41325 - DNA, 17 bp, Arabidopsis thaliana
agggctgaaaccaacca

SEQ ID NO: 41326 - DNA, 17 bp, Arabidopsis thaliana
agggctgaaagtttctt

SEQ ID NO: 41327 - DNA, 17 bp, Arabidopsis thaliana
agggctgaactcttgta

SEQ ID NO: 41328 - DNA, 17 bp, Arabidopsis thaliana
agggctgacgaaaaaac

SEQ ID NO: 41329 - DNA, 17 bp, Arabidopsis thaliana
agggctgacgaaaaacg

SEQ ID NO: 41330 - DNA, 17 bp, Arabidopsis thaliana
agggctgagaagggtaa

SEQ ID NO: 41331 - DNA, 17 bp, Arabidopsis thaliana
agggctgagcagagagc

SEQ ID NO: 41332 - DNA, 17 bp, Arabidopsis thaliana
agggctgatacatccct

SEQ ID NO: 41333 - DNA, 17 bp, Arabidopsis thaliana
agggctgccttcagaga

SEQ ID NO: 41334 - DNA, 17 bp, Arabidopsis thaliana
agggctgcgaagcttac

SEQ ID NO: 41335 - DNA, 17 bp, Arabidopsis thaliana
agggctgcgaggcttac

SEQ ID NO: 41336 - DNA, 17 bp, Arabidopsis thaliana
agggctgcggttgctga

SEQ ID NO: 41337 - DNA, 17 bp, Arabidopsis thaliana
agggctgcgtatctgat

SEQ ID NO: 41338 - DNA, 17 bp, Arabidopsis thaliana
agggctgctctcggggg

SEQ ID NO: 41339 - DNA, 17 bp, Arabidopsis thaliana
agggctggagtgattac

SEQ ID NO: 41340 - DNA, 17 bp, Arabidopsis thaliana
agggctggcaacagact

SEQ ID NO: 41341 - DNA, 17 bp, Arabidopsis thaliana
agggctggcaacgacgg

SEQ ID NO: 41342 - DNA, 17 bp, Arabidopsis thaliana
agggctggctcgggggt

SEQ ID NO: 41343 - DNA, 17 bp, Arabidopsis thaliana
agggctgggcaaaaaac

SEQ ID NO: 41344 - DNA, 17 bp, Arabidopsis thaliana
agggctgggcgttcggt

SEQ ID NO: 41345 - DNA, 17 bp, Arabidopsis thaliana
agggctgggctcgggag

SEQ ID NO: 41346 - DNA, 17 bp, Arabidopsis thaliana
agggctgggctcggggc

SEQ ID NO: 41347 - DNA, 17 bp, Arabidopsis thaliana
agggctgggctcggggg

SEQ ID NO: 41348 - DNA, 17 bp, Arabidopsis thaliana
agggctgggctcggggt

SEQ ID NO: 41349 - DNA, 17 bp, Arabidopsis thaliana
agggctgggctcgtggg

SEQ ID NO: 41350 - DNA, 17 bp, Arabidopsis thaliana
agggctgggcttggggg

SEQ ID NO: 41351 - DNA, 17 bp, Arabidopsis thaliana
agggctgggttgggctg

SEQ ID NO: 41352 - DNA, 17 bp, Arabidopsis thaliana
agggctggttcaacgac

SEQ ID NO: 41353 - DNA, 17 bp, Arabidopsis thaliana
agggctgtaggtttgta

SEQ ID NO: 41354 - DNA, 17 bp, Arabidopsis thaliana
agggctgtccttgggct

SEQ ID NO: 41355 - DNA, 17 bp, Arabidopsis thaliana
agggctgtctttgggct

SEQ ID NO: 41356 - DNA, 17 bp, Arabidopsis thaliana
agggctgtgttttcagg

SEQ ID NO: 41357 - DNA, 17 bp, Arabidopsis thaliana
agggcttaaagcaacac

SEQ ID NO: 41358 - DNA, 17 bp, Arabidopsis thaliana
agggcttaactggtttt

SEQ ID NO: 41359 - DNA, 17 bp, Arabidopsis thaliana
agggcttagattctgac

SEQ ID NO: 41360 - DNA, 17 bp, Arabidopsis thaliana
agggcttagttaggccc

SEQ ID NO: 41361 - DNA, 17 bp, Arabidopsis thaliana
agggcttatagcgatca

SEQ ID NO: 41362 - DNA, 17 bp, Arabidopsis thaliana
agggcttattggatgta

SEQ ID NO: 41363 - DNA, 17 bp, Arabidopsis thaliana
agggcttcagcagcagc

SEQ ID NO: 41364 - DNA, 17 bp, Arabidopsis thaliana
agggcttccacctcggc

SEQ ID NO: 41365 - DNA, 17 bp, Arabidopsis thaliana
agggcttccaggatttg

SEQ ID NO: 41366 - DNA, 17 bp, Arabidopsis thaliana
agggcttccttgagtcc

SEQ ID NO: 41367 - DNA, 17 bp, Arabidopsis thaliana
agggcttcgaatctggt

SEQ ID NO: 41368 - DNA, 17 bp, Arabidopsis thaliana
agggcttcgacatcgca

SEQ ID NO: 41369 - DNA, 17 bp, Arabidopsis thaliana
agggcttcgccactttt

SEQ ID NO: 41370 - DNA, 17 bp, Arabidopsis thaliana
agggcttctgtataatt

SEQ ID NO: 41371 - DNA, 17 bp, Arabidopsis thaliana
agggcttcttgagagta

SEQ ID NO: 41372 - DNA, 17 bp, Arabidopsis thaliana
agggcttcttggactga

SEQ ID NO: 41373 - DNA, 17 bp, Arabidopsis thaliana
agggcttgatgtgcttg

SEQ ID NO: 41374 - DNA, 17 bp, Arabidopsis thaliana
agggcttgattggttct

SEQ ID NO: 41375 - DNA, 17 bp, Arabidopsis thaliana
agggcttgattggttga

SEQ ID NO: 41376 - DNA, 17 bp, Arabidopsis thaliana
agggcttgcagagagaa

SEQ ID NO: 41377 - DNA, 17 bp, Arabidopsis thaliana
agggcttgctctaatcg

SEQ ID NO: 41378 - DNA, 17 bp, Arabidopsis thaliana
agggcttggatcttctt

SEQ ID NO: 41379 - DNA, 17 bp, Arabidopsis thaliana
agggcttggatcttttt

SEQ ID NO: 41380 - DNA, 17 bp, Arabidopsis thaliana
agggcttgggttgattc

SEQ ID NO: 41381 - DNA, 17 bp, Arabidopsis thaliana
agggcttggtggtcgcc

SEQ ID NO: 41382 - DNA, 17 bp, Arabidopsis thaliana
agggcttgtgatttctt

SEQ ID NO: 41383 - DNA, 17 bp, Arabidopsis thaliana
agggcttgtgtgctatg

SEQ ID NO: 41384 - DNA, 17 bp, Arabidopsis thaliana
agggctttatttgaacc

SEQ ID NO: 41385 - DNA, 17 bp, Arabidopsis thaliana
agggctttccgaaaagg

SEQ ID NO: 41386 - DNA, 17 bp, Arabidopsis thaliana
agggctttgaacccgat

SEQ ID NO: 41387 - DNA, 17 bp, Arabidopsis thaliana
agggctttgagaaatta

SEQ ID NO: 41388 - DNA, 17 bp, Arabidopsis thaliana
agggctttggcagatcg

SEQ ID NO: 41389 - DNA, 17 bp, Arabidopsis thaliana
agggctttggccgagtg

SEQ ID NO: 41390 - DNA, 17 bp, Arabidopsis thaliana
agggctttggcctggcc

SEQ ID NO: 41391 - DNA, 17 bp, Arabidopsis thaliana
agggctttggtcaagaa

SEQ ID NO: 41392 - DNA, 17 bp, Arabidopsis thaliana
agggctttggtgattgg

SEQ ID NO: 41393 - DNA, 17 bp, Arabidopsis thaliana
agggctttggttgaggg

SEQ ID NO: 41394 - DNA, 17 bp, Arabidopsis thaliana
agggctttgtgaaatgg

SEQ ID NO: 41395 - DNA, 17 bp, Arabidopsis thaliana
agggctttgtttcttcg

SEQ ID NO: 41396 - DNA, 17 bp, Arabidopsis thaliana
agggcttttacgtattt

SEQ ID NO: 41397 - DNA, 17 bp, Arabidopsis thaliana
agggcttttagattcaa

SEQ ID NO: 41398 - DNA, 17 bp, Arabidopsis thaliana
agggcttttgcagtaat

SEQ ID NO: 41399 - DNA, 17 bp, Arabidopsis thaliana
agggcttttgggcttga

SEQ ID NO: 41400 - DNA, 17 bp, Arabidopsis thaliana
agggcttttggtttgaa

SEQ ID NO: 41401 - DNA, 17 bp, Arabidopsis thaliana
aggggaaaaagtccgaa

SEQ ID NO: 41402 - DNA, 17 bp, Arabidopsis thaliana
aggggaaactcatcggg

SEQ ID NO: 41403 - DNA, 17 bp, Arabidopsis thaliana
aggggaaagagacgcga

SEQ ID NO: 41404 - DNA, 17 bp, Arabidopsis thaliana
aggggaaatggactgct

SEQ ID NO: 41405 - DNA, 17 bp, Arabidopsis thaliana
aggggaacctgcggaag

SEQ ID NO: 41406 - DNA, 17 bp, Arabidopsis thaliana
aggggaacctgtggctg

SEQ ID NO: 41407 - DNA, 17 bp, Arabidopsis thaliana
aggggaacgcagctgag

SEQ ID NO: 41408 - DNA, 17 bp, Arabidopsis thaliana
aggggaactcgcatact

SEQ ID NO: 41409 - DNA, 17 bp, Arabidopsis thaliana
aggggaactgttccact

SEQ ID NO: 41410 - DNA, 17 bp, Arabidopsis thaliana
aggggaacttttccggg

SEQ ID NO: 41411 - DNA, 17 bp, Arabidopsis thaliana
aggggaacttttttgta

SEQ ID NO: 41412 - DNA, 17 bp, Arabidopsis thaliana
aggggaagaggctgtgg

SEQ ID NO: 41413 - DNA, 17 bp, Arabidopsis thaliana
aggggaagcagcaatct

SEQ ID NO: 41414 - DNA, 17 bp, Arabidopsis thaliana
aggggaagggacgaaac

SEQ ID NO: 41415 - DNA, 17 bp, Arabidopsis thaliana
aggggaagtctgcctgg

SEQ ID NO: 41416 - DNA, 17 bp, Arabidopsis thaliana
aggggaagtgaaagcag

SEQ ID NO: 41417 - DNA, 17 bp, Arabidopsis thaliana
aggggaatatgccatat

SEQ ID NO: 41418 - DNA, 17 bp, Arabidopsis thaliana
aggggaatcaactctgc

SEQ ID NO: 41419 - DNA, 17 bp, Arabidopsis thaliana
aggggaatcaactgtgc

SEQ ID NO: 41420 - DNA, 17 bp, Arabidopsis thaliana
aggggaatcaactttgc

SEQ ID NO: 41421 - DNA, 17 bp, Arabidopsis thaliana
aggggaatccacattgg

SEQ ID NO: 41422 - DNA, 17 bp, Arabidopsis thaliana
aggggaatgtaccatac

SEQ ID NO: 41423 - DNA, 17 bp, Arabidopsis thaliana
aggggaatgtaccatat

SEQ ID NO: 41424 - DNA, 17 bp, Arabidopsis thaliana
aggggaatgtaccttat

SEQ ID NO: 41425 - DNA, 17 bp, Arabidopsis thaliana
aggggaatgtagcatat

SEQ ID NO: 41426 - DNA, 17 bp, Arabidopsis thaliana
aggggaatgtgaatgca

SEQ ID NO: 41427 - DNA, 17 bp, Arabidopsis thaliana
aggggaattacgggttt

SEQ ID NO: 41428 - DNA, 17 bp, Arabidopsis thaliana
aggggaattagggtttt

SEQ ID NO: 41429 - DNA, 17 bp, Arabidopsis thaliana
aggggaattgtcgctaa

SEQ ID NO: 41430 - DNA, 17 bp, Arabidopsis thaliana
aggggaatttctcgcac

SEQ ID NO: 41431 - DNA, 17 bp, Arabidopsis thaliana
aggggaatttgcaaaag

SEQ ID NO: 41432 - DNA, 17 bp, Arabidopsis thaliana
aggggacaatgctacat

SEQ ID NO: 41433 - DNA, 17 bp, Arabidopsis thaliana
aggggacatctcaggca

SEQ ID NO: 41434 - DNA, 17 bp, Arabidopsis thaliana
aggggacatctcaggcc

SEQ ID NO: 41435 - DNA, 17 bp, Arabidopsis thaliana
aggggacatgtagaccg

SEQ ID NO: 41436 - DNA, 17 bp, Arabidopsis thaliana
aggggaccagaccagaa

SEQ ID NO: 41437 - DNA, 17 bp, Arabidopsis thaliana
aggggaccgatcgatcc

SEQ ID NO: 41438 - DNA, 17 bp, Arabidopsis thaliana
aggggacgaatttgggt

SEQ ID NO: 41439 - DNA, 17 bp, Arabidopsis thaliana
aggggacgatgaatcaa

SEQ ID NO: 41440 - DNA, 17 bp, Arabidopsis thaliana
aggggacgtctgcctgg

SEQ ID NO: 41441 - DNA, 17 bp, Arabidopsis thaliana
aggggacgtgtcggctg

SEQ ID NO: 41442 - DNA, 17 bp, Arabidopsis thaliana
aggggacgtttttcggg

SEQ ID NO: 41443 - DNA, 17 bp, Arabidopsis thaliana
aggggactgtaccatca

SEQ ID NO: 41444 - DNA, 17 bp, Arabidopsis thaliana
aggggactgttgtctgg

SEQ ID NO: 41445 - DNA, 17 bp, Arabidopsis thaliana
aggggacttcgtgacag

SEQ ID NO: 41446 - DNA, 17 bp, Arabidopsis thaliana
aggggacttggctatcg

SEQ ID NO: 41447 - DNA, 17 bp, Arabidopsis thaliana
aggggagacaggtcgtt

SEQ ID NO: 41448 - DNA, 17 bp, Arabidopsis thaliana
aggggagaccctaggtc

SEQ ID NO: 41449 - DNA, 17 bp, Arabidopsis thaliana
aggggagagtaggacgt

SEQ ID NO: 41450 - DNA, 17 bp, Arabidopsis thaliana
aggggagatcacgggag

SEQ ID NO: 41451 - DNA, 17 bp, Arabidopsis thaliana
aggggagatcagtctgt

SEQ ID NO: 41452 - DNA, 17 bp, Arabidopsis thaliana
aggggagattacgggct

SEQ ID NO: 41453 - DNA, 17 bp, Arabidopsis thaliana
aggggagcattgaacat

SEQ ID NO: 41454 - DNA, 17 bp, Arabidopsis thaliana
aggggagcttctcttat

SEQ ID NO: 41455 - DNA, 17 bp, Arabidopsis thaliana
aggggaggatgagagcc

SEQ ID NO: 41456 - DNA, 17 bp, Arabidopsis thaliana
aggggaggcttcgccgg

SEQ ID NO: 41457 - DNA, 17 bp, Arabidopsis thaliana
aggggagggattacggg

SEQ ID NO: 41458 - DNA, 17 bp, Arabidopsis thaliana
aggggagggcttcgccg

SEQ ID NO: 41459 - DNA, 17 bp, Arabidopsis thaliana
aggggaggtagggtcca

SEQ ID NO: 41460 - DNA, 17 bp, Arabidopsis thaliana
aggggagtatctcagtt

SEQ ID NO: 41461 - DNA, 17 bp, Arabidopsis thaliana
aggggagtctacaggca

SEQ ID NO: 41462 - DNA, 17 bp, Arabidopsis thaliana
aggggagtggaccggcg

SEQ ID NO: 41463 - DNA, 17 bp, Arabidopsis thaliana
aggggagttggtctgcc

SEQ ID NO: 41464 - DNA, 17 bp, Arabidopsis thaliana
aggggagtttgttgcgt

SEQ ID NO: 41465 - DNA, 17 bp, Arabidopsis thaliana
aggggataatcaggccg

SEQ ID NO: 41466 - DNA, 17 bp, Arabidopsis thaliana
aggggatccaagaggga

SEQ ID NO: 41467 - DNA, 17 bp, Arabidopsis thaliana
aggggatccctacatag

SEQ ID NO: 41468 - DNA, 17 bp, Arabidopsis thaliana
aggggatccgtcttgcg

SEQ ID NO: 41469 - DNA, 17 bp, Arabidopsis thaliana
aggggatcctgggcagg

SEQ ID NO: 41470 - DNA, 17 bp, Arabidopsis thaliana
aggggatccttggttct

SEQ ID NO: 41471 - DNA, 17 bp, Arabidopsis thaliana
aggggatcgtgccacgt

SEQ ID NO: 41472 - DNA, 17 bp, Arabidopsis thaliana
aggggatctccgagtac

SEQ ID NO: 41473 - DNA, 17 bp, Arabidopsis thaliana
aggggatgactcttctg

SEQ ID NO: 41474 - DNA, 17 bp, Arabidopsis thaliana
aggggatgatgggaaag

SEQ ID NO: 41475 - DNA, 17 bp, Arabidopsis thaliana
aggggatgatggtggtg

SEQ ID NO: 41476 - DNA, 17 bp, Arabidopsis thaliana
aggggatgccgccagtc

SEQ ID NO: 41477 - DNA, 17 bp, Arabidopsis thaliana
aggggatggaaatgttg

SEQ ID NO: 41478 - DNA, 17 bp, Arabidopsis thaliana
aggggatggtgccaggg

SEQ ID NO: 41479 - DNA, 17 bp, Arabidopsis thaliana
aggggatgtagccaagt

SEQ ID NO: 41480 - DNA, 17 bp, Arabidopsis thaliana
aggggatgtgcgaccga

SEQ ID NO: 41481 - DNA, 17 bp, Arabidopsis thaliana
aggggatgtgtccggat

SEQ ID NO: 41482 - DNA, 17 bp, Arabidopsis thaliana
aggggatgttagacttt

SEQ ID NO: 41483 - DNA, 17 bp, Arabidopsis thaliana
aggggattacaggcttc

SEQ ID NO: 41484 - DNA, 17 bp, Arabidopsis thaliana
aggggattacgagtttc

SEQ ID NO: 41485 - DNA, 17 bp, Arabidopsis thaliana
aggggattacgggctgc

SEQ ID NO: 41486 - DNA, 17 bp, Arabidopsis thaliana
aggggattacgggcttc

SEQ ID NO: 41487 - DNA, 17 bp, Arabidopsis thaliana
aggggattacgggtttc

SEQ ID NO: 41488 - DNA, 17 bp, Arabidopsis thaliana
aggggattccaactctg

SEQ ID NO: 41489 - DNA, 17 bp, Arabidopsis thaliana
aggggattccagctaag

SEQ ID NO: 41490 - DNA, 17 bp, Arabidopsis thaliana
aggggattccccacgta

SEQ ID NO: 41491 - DNA, 17 bp, Arabidopsis thaliana
aggggattgtgacacat

SEQ ID NO: 41492 - DNA, 17 bp, Arabidopsis thaliana
aggggatttctgctatc

SEQ ID NO: 41493 - DNA, 17 bp, Arabidopsis thaliana
aggggcaaaccgagcgg

SEQ ID NO: 41494 - DNA, 17 bp, Arabidopsis thaliana
aggggcaagccggagga

SEQ ID NO: 41495 - DNA, 17 bp, Arabidopsis thaliana
aggggcaaggttcgcga

SEQ ID NO: 41496 - DNA, 17 bp, Arabidopsis thaliana
aggggcacctccatcaa

SEQ ID NO: 41497 - DNA, 17 bp, Arabidopsis thaliana
aggggcactttccaagg

SEQ ID NO: 41498 - DNA, 17 bp, Arabidopsis thaliana
aggggcagaagacgaag

SEQ ID NO: 41499 - DNA, 17 bp, Arabidopsis thaliana
aggggcattctcagcaa

SEQ ID NO: 41500 - DNA, 17 bp, Arabidopsis thaliana
aggggcgaaagactaat

SEQ ID NO: 41501 - DNA, 17 bp, Arabidopsis thaliana
aggggcgccagagaggg

SEQ ID NO: 41502 - DNA, 17 bp, Arabidopsis thaliana
aggggcggacctactta

SEQ ID NO: 41503 - DNA, 17 bp, Arabidopsis thaliana
aggggcggtcggggcgt

SEQ ID NO: 41504 - DNA, 17 bp, Arabidopsis thaliana
aggggctacctagcaac

SEQ ID NO: 41505 - DNA, 17 bp, Arabidopsis thaliana
aggggctagatctgctg

SEQ ID NO: 41506 - DNA, 17 bp, Arabidopsis thaliana
aggggctcactggtatt

SEQ ID NO: 41507 - DNA, 17 bp, Arabidopsis thaliana
aggggctcagctgaatc

SEQ ID NO: 41508 - DNA, 17 bp, Arabidopsis thaliana
aggggctccgccttgcg

SEQ ID NO: 41509 - DNA, 17 bp, Arabidopsis thaliana
aggggctccgtcttgcg

SEQ ID NO: 41510 - DNA, 17 bp, Arabidopsis thaliana
aggggctcctcttggct

SEQ ID NO: 41511 - DNA, 17 bp, Arabidopsis thaliana
aggggctctgagggctg

SEQ ID NO: 41512 - DNA, 17 bp, Arabidopsis thaliana
aggggctctgggccgaa

SEQ ID NO: 41513 - DNA, 17 bp, Arabidopsis thaliana
aggggctgaccctgagc

SEQ ID NO: 41514 - DNA, 17 bp, Arabidopsis thaliana
aggggctgattggtagc

SEQ ID NO: 41515 - DNA, 17 bp, Arabidopsis thaliana
aggggctgggctcgggg

SEQ ID NO: 41516 - DNA, 17 bp, Arabidopsis thaliana
aggggcttgattgattc

SEQ ID NO: 41517 - DNA, 17 bp, Arabidopsis thaliana
aggggcttggatcttct

SEQ ID NO: 41518 - DNA, 17 bp, Arabidopsis thaliana
agggggaacgacccaag

SEQ ID NO: 41519 - DNA, 17 bp, Arabidopsis thaliana
agggggaagcatttgca

SEQ ID NO: 41520 - DNA, 17 bp, Arabidopsis thaliana
agggggaatgtaccata

SEQ ID NO: 41521 - DNA, 17 bp, Arabidopsis thaliana
agggggacacaggtcgt

SEQ ID NO: 41522 - DNA, 17 bp, Arabidopsis thaliana
agggggacatagttaca

SEQ ID NO: 41523 - DNA, 17 bp, Arabidopsis thaliana
agggggactgtaccatc

SEQ ID NO: 41524 - DNA, 17 bp, Arabidopsis thaliana
agggggagaatgaccag

SEQ ID NO: 41525 - DNA, 17 bp, Arabidopsis thaliana
agggggagattacgggc

SEQ ID NO: 41526 - DNA, 17 bp, Arabidopsis thaliana
agggggagggaagagac

SEQ ID NO: 41527 - DNA, 17 bp, Arabidopsis thaliana
agggggatcttggtctt

SEQ ID NO: 41528 - DNA, 17 bp, Arabidopsis thaliana
agggggatgggctacca

SEQ ID NO: 41529 - DNA, 17 bp, Arabidopsis thaliana
agggggatgtaccatat

SEQ ID NO: 41530 - DNA, 17 bp, Arabidopsis thaliana
agggggattggtacagc

SEQ ID NO: 41531 - DNA, 17 bp, Arabidopsis thaliana
agggggcagatgccggt

SEQ ID NO: 41532 - DNA, 17 bp, Arabidopsis thaliana
agggggccagatccgct

SEQ ID NO: 41533 - DNA, 17 bp, Arabidopsis thaliana
agggggcccgctgtgta

SEQ ID NO: 41534 - DNA, 17 bp, Arabidopsis thaliana
agggggcgtattaggga

SEQ ID NO: 41535 - DNA, 17 bp, Arabidopsis thaliana
aggggggactataacga

SEQ ID NO: 41536 - DNA, 17 bp, Arabidopsis thaliana
aggggggcctaaaccat

SEQ ID NO: 41537 - DNA, 17 bp, Arabidopsis thaliana
aggggggctggtcttca

SEQ ID NO: 41538 - DNA, 17 bp, Arabidopsis thaliana
agggggggccaccaacc

SEQ ID NO: 41539 - DNA, 17 bp, Arabidopsis thaliana
agggggtaatcaggccg

SEQ ID NO: 41540 - DNA, 17 bp, Arabidopsis thaliana
agggggtagtcaggccg

SEQ ID NO: 41541 - DNA, 17 bp, Arabidopsis thaliana
agggggtagttaggcca

SEQ ID NO: 41542 - DNA, 17 bp, Arabidopsis thaliana
agggggtcaggtggttc

SEQ ID NO: 41543 - DNA, 17 bp, Arabidopsis thaliana
agggggtcgaatcccag

SEQ ID NO: 41544 - DNA, 17 bp, Arabidopsis thaliana
agggggtcgagtggtgt

SEQ ID NO: 41545 - DNA, 17 bp, Arabidopsis thaliana
agggggtcgatccattc

SEQ ID NO: 41546 - DNA, 17 bp, Arabidopsis thaliana
agggggtgagccgctat

SEQ ID NO: 41547 - DNA, 17 bp, Arabidopsis thaliana
agggggtgtccggggac

SEQ ID NO: 41548 - DNA, 17 bp, Arabidopsis thaliana
agggggtgttattggtt

SEQ ID NO: 41549 - DNA, 17 bp, Arabidopsis thaliana
agggggttccccacgga

SEQ ID NO: 41550 - DNA, 17 bp, Arabidopsis thaliana
agggggttcccggctgg

SEQ ID NO: 41551 - DNA, 17 bp, Arabidopsis thaliana
agggggttgcgggtaat

SEQ ID NO: 41552 - DNA, 17 bp, Arabidopsis thaliana
agggggttggatagtcg

SEQ ID NO: 41553 - DNA, 17 bp, Arabidopsis thaliana
aggggtaaccgcgattt

SEQ ID NO: 41554 - DNA, 17 bp, Arabidopsis thaliana
aggggtaactggatgac

SEQ ID NO: 41555 - DNA, 17 bp, Arabidopsis thaliana
aggggtaatcaaaccgc

SEQ ID NO: 41556 - DNA, 17 bp, Arabidopsis thaliana
aggggtatcgtctgtcg

SEQ ID NO: 41557 - DNA, 17 bp, Arabidopsis thaliana
aggggtatctttatgga

SEQ ID NO: 41558 - DNA, 17 bp, Arabidopsis thaliana
aggggtcaataaggttc

SEQ ID NO: 41559 - DNA, 17 bp, Arabidopsis thaliana
aggggtcaggatactcg

SEQ ID NO: 41560 - DNA, 17 bp, Arabidopsis thaliana
aggggtccacctttgtt

SEQ ID NO: 41561 - DNA, 17 bp, Arabidopsis thaliana
aggggtcgacatcgttc

SEQ ID NO: 41562 - DNA, 17 bp, Arabidopsis thaliana
aggggtcgcagtgacca

SEQ ID NO: 41563 - DNA, 17 bp, Arabidopsis thaliana
aggggtctcgtcacata

SEQ ID NO: 41564 - DNA, 17 bp, Arabidopsis thaliana
aggggtgaacccaagta

SEQ ID NO: 41565 - DNA, 17 bp, Arabidopsis thaliana
aggggtgaacgacctgt

SEQ ID NO: 41566 - DNA, 17 bp, Arabidopsis thaliana
aggggtgagtcgatttg

SEQ ID NO: 41567 - DNA, 17 bp, Arabidopsis thaliana
aggggtgagtttctccg

SEQ ID NO: 41568 - DNA, 17 bp, Arabidopsis thaliana
aggggtgagtttcttcg

SEQ ID NO: 41569 - DNA, 17 bp, Arabidopsis thaliana
aggggtgagtttgtgcg

SEQ ID NO: 41570 - DNA, 17 bp, Arabidopsis thaliana
aggggtgattgcacaag

SEQ ID NO: 41571 - DNA, 17 bp, Arabidopsis thaliana
aggggtgcagagacagc

SEQ ID NO: 41572 - DNA, 17 bp, Arabidopsis thaliana
aggggtgccgtagccaa

SEQ ID NO: 41573 - DNA, 17 bp, Arabidopsis thaliana
aggggtgctacttgttt

SEQ ID NO: 41574 - DNA, 17 bp, Arabidopsis thaliana
aggggtgggtgtgtgga

SEQ ID NO: 41575 - DNA, 17 bp, Arabidopsis thaliana
aggggtgtcaaaatggg

SEQ ID NO: 41576 - DNA, 17 bp, Arabidopsis thaliana
aggggtgtcagaatgga

SEQ ID NO: 41577 - DNA, 17 bp, Arabidopsis thaliana
aggggtgtctgcagttc

SEQ ID NO: 41578 - DNA, 17 bp, Arabidopsis thaliana
aggggtgtgctcatggg

SEQ ID NO: 41579 - DNA, 17 bp, Arabidopsis thaliana
aggggttaccactgcag

SEQ ID NO: 41580 - DNA, 17 bp, Arabidopsis thaliana
aggggttcgagtcccct

SEQ ID NO: 41581 - DNA, 17 bp, Arabidopsis thaliana
aggggttctggagaaag

SEQ ID NO: 41582 - DNA, 17 bp, Arabidopsis thaliana
aggggttgcagtgattc

SEQ ID NO: 41583 - DNA, 17 bp, Arabidopsis thaliana
aggggttgccttgtgtt

SEQ ID NO: 41584 - DNA, 17 bp, Arabidopsis thaliana
aggggttgtcagctgct

SEQ ID NO: 41585 - DNA, 17 bp, Arabidopsis thaliana
aggggtttacccacaga

SEQ ID NO: 41586 - DNA, 17 bp, Arabidopsis thaliana
aggggtttctatgattg

SEQ ID NO: 41587 - DNA, 17 bp, Arabidopsis thaliana
aggggtttgcgagggac

SEQ ID NO: 41588 - DNA, 17 bp, Arabidopsis thaliana
aggggtttgcgagggag

SEQ ID NO: 41589 - DNA, 17 bp, Arabidopsis thaliana
aggggtttggatgttgt

SEQ ID NO: 41590 - DNA, 17 bp, Arabidopsis thaliana
aggggtttggcaggacg

SEQ ID NO: 41591 - DNA, 17 bp, Arabidopsis thaliana
aggggttttagacttgt

SEQ ID NO: 41592 - DNA, 17 bp, Arabidopsis thaliana
agggtaaaaacgacttt

SEQ ID NO: 41593 - DNA, 17 bp, Arabidopsis thaliana
agggtaaacatagattg

SEQ ID NO: 41594 - DNA, 17 bp, Arabidopsis thaliana
agggtaaacgacctgtg

SEQ ID NO: 41595 - DNA, 17 bp, Arabidopsis thaliana
agggtaaatctccgaat

SEQ ID NO: 41596 - DNA, 17 bp, Arabidopsis thaliana
agggtaaattacaggcc

SEQ ID NO: 41597 - DNA, 17 bp, Arabidopsis thaliana
agggtaagacagtcatt

SEQ ID NO: 41598 - DNA, 17 bp, Arabidopsis thaliana
agggtaagacatggttt

SEQ ID NO: 41599 - DNA, 17 bp, Arabidopsis thaliana
agggtaagccgatcacc

SEQ ID NO: 41600 - DNA, 17 bp, Arabidopsis thaliana
agggtaatcgccttcac

SEQ ID NO: 41601 - DNA, 17 bp, Arabidopsis thaliana
agggtaattgcaggtca

SEQ ID NO: 41602 - DNA, 17 bp, Arabidopsis thaliana
agggtaattggtgcggt

SEQ ID NO: 41603 - DNA, 17 bp, Arabidopsis thaliana
agggtaatttggtcatt

SEQ ID NO: 41604 - DNA, 17 bp, Arabidopsis thaliana
agggtacggtgcgcccc

SEQ ID NO: 41605 - DNA, 17 bp, Arabidopsis thaliana
agggtacgtccgtcggc

SEQ ID NO: 41606 - DNA, 17 bp, Arabidopsis thaliana
agggtagaccggatgtg

SEQ ID NO: 41607 - DNA, 17 bp, Arabidopsis thaliana
agggtagacttggtcct

SEQ ID NO: 41608 - DNA, 17 bp, Arabidopsis thaliana
agggtagagattctcct

SEQ ID NO: 41609 - DNA, 17 bp, Arabidopsis thaliana
agggtagcttcggttcg

SEQ ID NO: 41610 - DNA, 17 bp, Arabidopsis thaliana
agggtagtccgccaact

SEQ ID NO: 41611 - DNA, 17 bp, Arabidopsis thaliana
agggtagtcgtgcagga

SEQ ID NO: 41612 - DNA, 17 bp, Arabidopsis thaliana
agggtagtgttcgattc

SEQ ID NO: 41613 - DNA, 17 bp, Arabidopsis thaliana
agggtatccctacatgg

SEQ ID NO: 41614 - DNA, 17 bp, Arabidopsis thaliana
agggtatcgccgaggaa

SEQ ID NO: 41615 - DNA, 17 bp, Arabidopsis thaliana
agggtatctaatgccaa

SEQ ID NO: 41616 - DNA, 17 bp, Arabidopsis thaliana
agggtatctcaccacgt

SEQ ID NO: 41617 - DNA, 17 bp, Arabidopsis thaliana
agggtatctgggctgtt

SEQ ID NO: 41618 - DNA, 17 bp, Arabidopsis thaliana
agggtatgccgctatgg

SEQ ID NO: 41619 - DNA, 17 bp, Arabidopsis thaliana
agggtatgcttaccggt

SEQ ID NO: 41620 - DNA, 17 bp, Arabidopsis thaliana
agggtatggattgtcac

SEQ ID NO: 41621 - DNA, 17 bp, Arabidopsis thaliana
agggtatggtgattgcc

SEQ ID NO: 41622 - DNA, 17 bp, Arabidopsis thaliana
agggtattatcgtcatt

SEQ ID NO: 41623 - DNA, 17 bp, Arabidopsis thaliana
agggtattttttattgg

SEQ ID NO: 41624 - DNA, 17 bp, Arabidopsis thaliana
agggtcaaaatttggag

SEQ ID NO: 41625 - DNA, 17 bp, Arabidopsis thaliana
agggtcaaccacgtcca

SEQ ID NO: 41626 - DNA, 17 bp, Arabidopsis thaliana
agggtcaacggaacgac

SEQ ID NO: 41627 - DNA, 17 bp, Arabidopsis thaliana
agggtcaataggtggct

SEQ ID NO: 41628 - DNA, 17 bp, Arabidopsis thaliana
agggtcacactcaggga

SEQ ID NO: 41629 - DNA, 17 bp, Arabidopsis thaliana
agggtcacatcctgtag

SEQ ID NO: 41630 - DNA, 17 bp, Arabidopsis thaliana
agggtcactccacctat

SEQ ID NO: 41631 - DNA, 17 bp, Arabidopsis thaliana
agggtcacttcggagct

SEQ ID NO: 41632 - DNA, 17 bp, Arabidopsis thaliana
agggtcagcagagacgc

SEQ ID NO: 41633 - DNA, 17 bp, Arabidopsis thaliana
agggtcaggacgcatag

SEQ ID NO: 41634 - DNA, 17 bp, Arabidopsis thaliana
agggtcagtcgtaggtt

SEQ ID NO: 41635 - DNA, 17 bp, Arabidopsis thaliana
agggtcagttccaggtt

SEQ ID NO: 41636 - DNA, 17 bp, Arabidopsis thaliana
agggtcagtttctttgg

SEQ ID NO: 41637 - DNA, 17 bp, Arabidopsis thaliana
agggtcatactcatcag

SEQ ID NO: 41638 - DNA, 17 bp, Arabidopsis thaliana
agggtcattgggttgcg

SEQ ID NO: 41639 - DNA, 17 bp, Arabidopsis thaliana
agggtccaagtgtgtca

SEQ ID NO: 41640 - DNA, 17 bp, Arabidopsis thaliana
agggtccagcggctcga

SEQ ID NO: 41641 - DNA, 17 bp, Arabidopsis thaliana
agggtccagcggctgga

SEQ ID NO: 41642 - DNA, 17 bp, Arabidopsis thaliana
agggtcccctggaactg

SEQ ID NO: 41643 - DNA, 17 bp, Arabidopsis thaliana
agggtcccgctggacct

SEQ ID NO: 41644 - DNA, 17 bp, Arabidopsis thaliana
agggtccgaatggtaac

SEQ ID NO: 41645 - DNA, 17 bp, Arabidopsis thaliana
agggtccgaatggttgc

SEQ ID NO: 41646 - DNA, 17 bp, Arabidopsis thaliana
agggtccgactttgtga

SEQ ID NO: 41647 - DNA, 17 bp, Arabidopsis thaliana
agggtccgattggtgac

SEQ ID NO: 41648 - DNA, 17 bp, Arabidopsis thaliana
agggtccgggcacgacg

SEQ ID NO: 41649 - DNA, 17 bp, Arabidopsis thaliana
agggtcctcgcagttct

SEQ ID NO: 41650 - DNA, 17 bp, Arabidopsis thaliana
agggtcctgtgctgtgc

SEQ ID NO: 41651 - DNA, 17 bp, Arabidopsis thaliana
agggtcctgttcgtttg

SEQ ID NO: 41652 - DNA, 17 bp, Arabidopsis thaliana
agggtcgaaaggaattg

SEQ ID NO: 41653 - DNA, 17 bp, Arabidopsis thaliana
agggtcgaaatttggga

SEQ ID NO: 41654 - DNA, 17 bp, Arabidopsis thaliana
agggtcgaacttatgcg

SEQ ID NO: 41655 - DNA, 17 bp, Arabidopsis thaliana
agggtcgaatacgaagg

SEQ ID NO: 41656 - DNA, 17 bp, Arabidopsis thaliana
agggtcgaatcttagcg

SEQ ID NO: 41657 - DNA, 17 bp, Arabidopsis thaliana
agggtcgattctagatg

SEQ ID NO: 41658 - DNA, 17 bp, Arabidopsis thaliana
agggtcgcatcctgtag

SEQ ID NO: 41659 - DNA, 17 bp, Arabidopsis thaliana
agggtcgcgatcccgcg

SEQ ID NO: 41660 - DNA, 17 bp, Arabidopsis thaliana
agggtcggagctattgc

SEQ ID NO: 41661 - DNA, 17 bp, Arabidopsis thaliana
agggtcgtactagttgt

SEQ ID NO: 41662 - DNA, 17 bp, Arabidopsis thaliana
agggtcgtattcgtagc

SEQ ID NO: 41663 - DNA, 17 bp, Arabidopsis thaliana
agggtcgtcggcctgca

SEQ ID NO: 41664 - DNA, 17 bp, Arabidopsis thaliana
agggtcgttcatgggtc

SEQ ID NO: 41665 - DNA, 17 bp, Arabidopsis thaliana
agggtctaagccgtttt

SEQ ID NO: 41666 - DNA, 17 bp, Arabidopsis thaliana
agggtctacatgttcaa

SEQ ID NO: 41667 - DNA, 17 bp, Arabidopsis thaliana
agggtctactgccaacg

SEQ ID NO: 41668 - DNA, 17 bp, Arabidopsis thaliana
agggtctaggaactaaa

SEQ ID NO: 41669 - DNA, 17 bp, Arabidopsis thaliana
agggtctatcgttgtgt

SEQ ID NO: 41670 - DNA, 17 bp, Arabidopsis thaliana
agggtctcaagtctcaa

SEQ ID NO: 41671 - DNA, 17 bp, Arabidopsis thaliana
agggtctcacgagcgct

SEQ ID NO: 41672 - DNA, 17 bp, Arabidopsis thaliana
agggtctcactctcatg

SEQ ID NO: 41673 - DNA, 17 bp, Arabidopsis thaliana
agggtctcagtggtggt

SEQ ID NO: 41674 - DNA, 17 bp, Arabidopsis thaliana
agggtctccctacttcg

SEQ ID NO: 41675 - DNA, 17 bp, Arabidopsis thaliana
agggtctctcaagccac

SEQ ID NO: 41676 - DNA, 17 bp, Arabidopsis thaliana
agggtctctggtttgct

SEQ ID NO: 41677 - DNA, 17 bp, Arabidopsis thaliana
agggtctctgttttgct

SEQ ID NO: 41678 - DNA, 17 bp, Arabidopsis thaliana
agggtctgaatggtgac

SEQ ID NO: 41679 - DNA, 17 bp, Arabidopsis thaliana
agggtctgaggttctgt

SEQ ID NO: 41680 - DNA, 17 bp, Arabidopsis thaliana
agggtctgcctgggtgt

SEQ ID NO: 41681 - DNA, 17 bp, Arabidopsis thaliana
agggtctgcggcagttg

SEQ ID NO: 41682 - DNA, 17 bp, Arabidopsis thaliana
agggtctgggagtccga

SEQ ID NO: 41683 - DNA, 17 bp, Arabidopsis thaliana
agggtcttaggctatct

SEQ ID NO: 41684 - DNA, 17 bp, Arabidopsis thaliana
agggtcttcggaggtat

SEQ ID NO: 41685 - DNA, 17 bp, Arabidopsis thaliana
agggtcttcggaggtct

SEQ ID NO: 41686 - DNA, 17 bp, Arabidopsis thaliana
agggtcttcgggggtct

SEQ ID NO: 41687 - DNA, 17 bp, Arabidopsis thaliana
agggtcttgaaccagat

SEQ ID NO: 41688 - DNA, 17 bp, Arabidopsis thaliana
agggtcttgttcttgtc

SEQ ID NO: 41689 - DNA, 17 bp, Arabidopsis thaliana
agggtctttcggttcct

SEQ ID NO: 41690 - DNA, 17 bp, Arabidopsis thaliana
agggtctttgggcttga

SEQ ID NO: 41691 - DNA, 17 bp, Arabidopsis thaliana
agggtcttttgaatgat

SEQ ID NO: 41692 - DNA, 17 bp, Arabidopsis thaliana
agggtgaacgacctgtc

SEQ ID NO: 41693 - DNA, 17 bp, Arabidopsis thaliana
agggtgaacgacctgtg

SEQ ID NO: 41694 - DNA, 17 bp, Arabidopsis thaliana
agggtgaagcatgaaac

SEQ ID NO: 41695 - DNA, 17 bp, Arabidopsis thaliana
agggtgaagtccaggag

SEQ ID NO: 41696 - DNA, 17 bp, Arabidopsis thaliana
agggtgaattgcaaaac

SEQ ID NO: 41697 - DNA, 17 bp, Arabidopsis thaliana
agggtgacagaggcaga

SEQ ID NO: 41698 - DNA, 17 bp, Arabidopsis thaliana
agggtgacagaggcagg

SEQ ID NO: 41699 - DNA, 17 bp, Arabidopsis thaliana
agggtgacccgggttcg

SEQ ID NO: 41700 - DNA, 17 bp, Arabidopsis thaliana
agggtgacctggctctg

SEQ ID NO: 41701 - DNA, 17 bp, Arabidopsis thaliana
agggtgacctttcttag

SEQ ID NO: 41702 - DNA, 17 bp, Arabidopsis thaliana
agggtgactaatttgtg

SEQ ID NO: 41703 - DNA, 17 bp, Arabidopsis thaliana
agggtgagagccccgtc

SEQ ID NO: 41704 - DNA, 17 bp, Arabidopsis thaliana
agggtgagagccccgtt

SEQ ID NO: 41705 - DNA, 17 bp, Arabidopsis thaliana
agggtgagtcagggcct

SEQ ID NO: 41706 - DNA, 17 bp, Arabidopsis thaliana
agggtgatagccccgtc

SEQ ID NO: 41707 - DNA, 17 bp, Arabidopsis thaliana
agggtgatgaacgaaat

SEQ ID NO: 41708 - DNA, 17 bp, Arabidopsis thaliana
agggtgattacgggttt

SEQ ID NO: 41709 - DNA, 17 bp, Arabidopsis thaliana
agggtgcaacagtgggt

SEQ ID NO: 41710 - DNA, 17 bp, Arabidopsis thaliana
agggtgcagtccggatc

SEQ ID NO: 41711 - DNA, 17 bp, Arabidopsis thaliana
agggtgcattggtcggc

SEQ ID NO: 41712 - DNA, 17 bp, Arabidopsis thaliana
agggtgcctcttcatgg

SEQ ID NO: 41713 - DNA, 17 bp, Arabidopsis thaliana
agggtgctatgcttaag

SEQ ID NO: 41714 - DNA, 17 bp, Arabidopsis thaliana
agggtgcttggccgaga

SEQ ID NO: 41715 - DNA, 17 bp, Arabidopsis thaliana
agggtggaaaactggct

SEQ ID NO: 41716 - DNA, 17 bp, Arabidopsis thaliana
agggtggagcgaaagtg

SEQ ID NO: 41717 - DNA, 17 bp, Arabidopsis thaliana
agggtggctgacctttc

SEQ ID NO: 41718 - DNA, 17 bp, Arabidopsis thaliana
agggtggtccaacaaat

SEQ ID NO: 41719 - DNA, 17 bp, Arabidopsis thaliana
agggtggtggtgacgtt

SEQ ID NO: 41720 - DNA, 17 bp, Arabidopsis thaliana
agggtggtggtgcatgg

SEQ ID NO: 41721 - DNA, 17 bp, Arabidopsis thaliana
agggtgtagattccgtt

SEQ ID NO: 41722 - DNA, 17 bp, Arabidopsis thaliana
agggtgtcaaatgtcgc

SEQ ID NO: 41723 - DNA, 17 bp, Arabidopsis thaliana
agggtgtcgatccagta

SEQ ID NO: 41724 - DNA, 17 bp, Arabidopsis thaliana
agggtgtcgatcgacag

SEQ ID NO: 41725 - DNA, 17 bp, Arabidopsis thaliana
agggtgtgaagatagcg

SEQ ID NO: 41726 - DNA, 17 bp, Arabidopsis thaliana
agggtgtgactggttac

SEQ ID NO: 41727 - DNA, 17 bp, Arabidopsis thaliana
agggtgtggttcgtatg

SEQ ID NO: 41728 - DNA, 17 bp, Arabidopsis thaliana
agggtgtgtcactttga

SEQ ID NO: 41729 - DNA, 17 bp, Arabidopsis thaliana
agggtgtgttgtgtctc

SEQ ID NO: 41730 - DNA, 17 bp, Arabidopsis thaliana
agggtgttaaatttgtg

SEQ ID NO: 41731 - DNA, 17 bp, Arabidopsis thaliana
agggtgttccaaggatg

SEQ ID NO: 41732 - DNA, 17 bp, Arabidopsis thaliana
agggtgttggtcgatta

SEQ ID NO: 41733 - DNA, 17 bp, Arabidopsis thaliana
agggtgttgttcgtttg

SEQ ID NO: 41734 - DNA, 17 bp, Arabidopsis thaliana
agggtgtttgattgcag

SEQ ID NO: 41735 - DNA, 17 bp, Arabidopsis thaliana
agggttaaaaatggatc

SEQ ID NO: 41736 - DNA, 17 bp, Arabidopsis thaliana
agggttaaatgagttgt

SEQ ID NO: 41737 - DNA, 17 bp, Arabidopsis thaliana
agggttaaccgatttaa

SEQ ID NO: 41738 - DNA, 17 bp, Arabidopsis thaliana
agggttaactcgtgtca

SEQ ID NO: 41739 - DNA, 17 bp, Arabidopsis thaliana
agggttaagcggatagt

SEQ ID NO: 41740 - DNA, 17 bp, Arabidopsis thaliana
agggttaagttgcaaac

SEQ ID NO: 41741 - DNA, 17 bp, Arabidopsis thaliana
agggttaagttttgtga

SEQ ID NO: 41742 - DNA, 17 bp, Arabidopsis thaliana
agggttaatacatctac

SEQ ID NO: 41743 - DNA, 17 bp, Arabidopsis thaliana
agggttaatttactgaa

SEQ ID NO: 41744 - DNA, 17 bp, Arabidopsis thaliana
agggttaatttgcaaac

SEQ ID NO: 41745 - DNA, 17 bp, Arabidopsis thaliana
agggttacaaaggttga

SEQ ID NO: 41746 - DNA, 17 bp, Arabidopsis thaliana
agggttacagcactgtt

SEQ ID NO: 41747 - DNA, 17 bp, Arabidopsis thaliana
agggttacagtgggtct

SEQ ID NO: 41748 - DNA, 17 bp, Arabidopsis thaliana
agggttaccattctgct

SEQ ID NO: 41749 - DNA, 17 bp, Arabidopsis thaliana
agggttaccgtatagtc

SEQ ID NO: 41750 - DNA, 17 bp, Arabidopsis thaliana
agggttactggttccgt

SEQ ID NO: 41751 - DNA, 17 bp, Arabidopsis thaliana
agggttagaatagacat

SEQ ID NO: 41752 - DNA, 17 bp, Arabidopsis thaliana
agggttagaccattttc

SEQ ID NO: 41753 - DNA, 17 bp, Arabidopsis thaliana
agggttagatggtagga

SEQ ID NO: 41754 - DNA, 17 bp, Arabidopsis thaliana
agggttatatccaacaa

SEQ ID NO: 41755 - DNA, 17 bp, Arabidopsis thaliana
agggttatcccttgatg

SEQ ID NO: 41756 - DNA, 17 bp, Arabidopsis thaliana
agggttatggtttacgc

SEQ ID NO: 41757 - DNA, 17 bp, Arabidopsis thaliana
agggttcaaatccctcc

SEQ ID NO: 41758 - DNA, 17 bp, Arabidopsis thaliana
agggttcaacagacctg

SEQ ID NO: 41759 - DNA, 17 bp, Arabidopsis thaliana
agggttcaactccctct

SEQ ID NO: 41760 - DNA, 17 bp, Arabidopsis thaliana
agggttcaagattttgc

SEQ ID NO: 41761 - DNA, 17 bp, Arabidopsis thaliana
agggttcaagtccctcc

SEQ ID NO: 41762 - DNA, 17 bp, Arabidopsis thaliana
agggttcaagtccctct

SEQ ID NO: 41763 - DNA, 17 bp, Arabidopsis thaliana
agggttcaagtttttca

SEQ ID NO: 41764 - DNA, 17 bp, Arabidopsis thaliana
agggttcaatgcccagg

SEQ ID NO: 41765 - DNA, 17 bp, Arabidopsis thaliana
agggttcactttaccat

SEQ ID NO: 41766 - DNA, 17 bp, Arabidopsis thaliana
agggttcagatcgccga

SEQ ID NO: 41767 - DNA, 17 bp, Arabidopsis thaliana
agggttcagatcgccgg

SEQ ID NO: 41768 - DNA, 17 bp, Arabidopsis thaliana
agggttcatctctgcgt

SEQ ID NO: 41769 - DNA, 17 bp, Arabidopsis thaliana
agggttcatgagttgcg

SEQ ID NO: 41770 - DNA, 17 bp, Arabidopsis thaliana
agggttcatgggttgag

SEQ ID NO: 41771 - DNA, 17 bp, Arabidopsis thaliana
agggttcatgggttgat

SEQ ID NO: 41772 - DNA, 17 bp, Arabidopsis thaliana
agggttccggtatcttt

SEQ ID NO: 41773 - DNA, 17 bp, Arabidopsis thaliana
agggttccgtcgactga

SEQ ID NO: 41774 - DNA, 17 bp, Arabidopsis thaliana
agggttcctccgcaagg

SEQ ID NO: 41775 - DNA, 17 bp, Arabidopsis thaliana
agggttcctggttcttt

SEQ ID NO: 41776 - DNA, 17 bp, Arabidopsis thaliana
agggttccttcaaagaa

SEQ ID NO: 41777 - DNA, 17 bp, Arabidopsis thaliana
agggttcgaatccctcc

SEQ ID NO: 41778 - DNA, 17 bp, Arabidopsis thaliana
agggttcgaatccctct

SEQ ID NO: 41779 - DNA, 17 bp, Arabidopsis thaliana
agggttcgaatctctct

SEQ ID NO: 41780 - DNA, 17 bp, Arabidopsis thaliana
agggttcgagccccaca

SEQ ID NO: 41781 - DNA, 17 bp, Arabidopsis thaliana
agggttcgagtgtgacc

SEQ ID NO: 41782 - DNA, 17 bp, Arabidopsis thaliana
agggttcgagtgtgagc

SEQ ID NO: 41783 - DNA, 17 bp, Arabidopsis thaliana
agggttcgattccctgg

SEQ ID NO: 41784 - DNA, 17 bp, Arabidopsis thaliana
agggttcgattccggag

SEQ ID NO: 41785 - DNA, 17 bp, Arabidopsis thaliana
agggttcgattccggat

SEQ ID NO: 41786 - DNA, 17 bp, Arabidopsis thaliana
agggttcgattccgggg

SEQ ID NO: 41787 - DNA, 17 bp, Arabidopsis thaliana
agggttcgattgaatga

SEQ ID NO: 41788 - DNA, 17 bp, Arabidopsis thaliana
agggttcgattgagttt

SEQ ID NO: 41789 - DNA, 17 bp, Arabidopsis thaliana
agggttcgggccactcc

SEQ ID NO: 41790 - DNA, 17 bp, Arabidopsis thaliana
agggttcgggccatgcc

SEQ ID NO: 41791 - DNA, 17 bp, Arabidopsis thaliana
agggttcgggccattcc

SEQ ID NO: 41792 - DNA, 17 bp, Arabidopsis thaliana
agggttcgggtattatg

SEQ ID NO: 41793 - DNA, 17 bp, Arabidopsis thaliana
agggttcggttggctca

SEQ ID NO: 41794 - DNA, 17 bp, Arabidopsis thaliana
agggttcgtcgggagag

SEQ ID NO: 41795 - DNA, 17 bp, Arabidopsis thaliana
agggttcgtttccctgg

SEQ ID NO: 41796 - DNA, 17 bp, Arabidopsis thaliana
agggttctcatgtcatg

SEQ ID NO: 41797 - DNA, 17 bp, Arabidopsis thaliana
agggttctgattggtcg

SEQ ID NO: 41798 - DNA, 17 bp, Arabidopsis thaliana
agggttctgggatgtat

SEQ ID NO: 41799 - DNA, 17 bp, Arabidopsis thaliana
agggttctgggatgtct

SEQ ID NO: 41800 - DNA, 17 bp, Arabidopsis thaliana
agggttcttgccattct

SEQ ID NO: 41801 - DNA, 17 bp, Arabidopsis thaliana
agggttctttcttggat

SEQ ID NO: 41802 - DNA, 17 bp, Arabidopsis thaliana
agggttgaagtggtagt

SEQ ID NO: 41803 - DNA, 17 bp, Arabidopsis thaliana
agggttgaccgaagtca

SEQ ID NO: 41804 - DNA, 17 bp, Arabidopsis thaliana
agggttgaccggcgttg

SEQ ID NO: 41805 - DNA, 17 bp, Arabidopsis thaliana
agggttgacgctgaaat

SEQ ID NO: 41806 - DNA, 17 bp, Arabidopsis thaliana
agggttgagcccttttc

SEQ ID NO: 41807 - DNA, 17 bp, Arabidopsis thaliana
agggttgagcctttttc

SEQ ID NO: 41808 - DNA, 17 bp, Arabidopsis thaliana
agggttgcaggatgtcc

SEQ ID NO: 41809 - DNA, 17 bp, Arabidopsis thaliana
agggttgccgcccttgc

SEQ ID NO: 41810 - DNA, 17 bp, Arabidopsis thaliana
agggttgcggtgtaaat

SEQ ID NO: 41811 - DNA, 17 bp, Arabidopsis thaliana
agggttggaataaacat

SEQ ID NO: 41812 - DNA, 17 bp, Arabidopsis thaliana
agggttggaatagacat

SEQ ID NO: 41813 - DNA, 17 bp, Arabidopsis thaliana
agggttggaatagagat

SEQ ID NO: 41814 - DNA, 17 bp, Arabidopsis thaliana
agggttggaattgacag

SEQ ID NO: 41815 - DNA, 17 bp, Arabidopsis thaliana
agggttggacacgtata

SEQ ID NO: 41816 - DNA, 17 bp, Arabidopsis thaliana
agggttggcaagcctac

SEQ ID NO: 41817 - DNA, 17 bp, Arabidopsis thaliana
agggttggccggatcga

SEQ ID NO: 41818 - DNA, 17 bp, Arabidopsis thaliana
agggttggcctaaggcg

SEQ ID NO: 41819 - DNA, 17 bp, Arabidopsis thaliana
agggttggctcgggtct

SEQ ID NO: 41820 - DNA, 17 bp, Arabidopsis thaliana
agggttgggctcggggg

SEQ ID NO: 41821 - DNA, 17 bp, Arabidopsis thaliana
agggttgggttcagatc

SEQ ID NO: 41822 - DNA, 17 bp, Arabidopsis thaliana
agggttggtctagcggt

SEQ ID NO: 41823 - DNA, 17 bp, Arabidopsis thaliana
agggttggttggctaag

SEQ ID NO: 41824 - DNA, 17 bp, Arabidopsis thaliana
agggttgtccgactgct

SEQ ID NO: 41825 - DNA, 17 bp, Arabidopsis thaliana
agggttgtcttcagtat

SEQ ID NO: 41826 - DNA, 17 bp, Arabidopsis thaliana
agggttgtgctgccgtg

SEQ ID NO: 41827 - DNA, 17 bp, Arabidopsis thaliana
agggttgtgtgattggt

SEQ ID NO: 41828 - DNA, 17 bp, Arabidopsis thaliana
agggttgttttctcaat

SEQ ID NO: 41829 - DNA, 17 bp, Arabidopsis thaliana
agggttgttttctcgat

SEQ ID NO: 41830 - DNA, 17 bp, Arabidopsis thaliana
agggtttaaaaatggat

SEQ ID NO: 41831 - DNA, 17 bp, Arabidopsis thaliana
agggtttaaaatggatc

SEQ ID NO: 41832 - DNA, 17 bp, Arabidopsis thaliana
agggtttaaaccggtca

SEQ ID NO: 41833 - DNA, 17 bp, Arabidopsis thaliana
agggtttaaagatcggg

SEQ ID NO: 41834 - DNA, 17 bp, Arabidopsis thaliana
agggtttacaaagttgc

SEQ ID NO: 41835 - DNA, 17 bp, Arabidopsis thaliana
agggtttacagggattt

SEQ ID NO: 41836 - DNA, 17 bp, Arabidopsis thaliana
agggtttacggtttcgg

SEQ ID NO: 41837 - DNA, 17 bp, Arabidopsis thaliana
agggtttactgaagggt

SEQ ID NO: 41838 - DNA, 17 bp, Arabidopsis thaliana
agggtttagcagggtga

SEQ ID NO: 41839 - DNA, 17 bp, Arabidopsis thaliana
agggtttagggtttggt

SEQ ID NO: 41840 - DNA, 17 bp, Arabidopsis thaliana
agggtttagtatccgtc

SEQ ID NO: 41841 - DNA, 17 bp, Arabidopsis thaliana
agggtttatcaatggat

SEQ ID NO: 41842 - DNA, 17 bp, Arabidopsis thaliana
agggtttcaaggaaagg

SEQ ID NO: 41843 - DNA, 17 bp, Arabidopsis thaliana
agggtttcaccaacttt

SEQ ID NO: 41844 - DNA, 17 bp, Arabidopsis thaliana
agggtttcagattttgg

SEQ ID NO: 41845 - DNA, 17 bp, Arabidopsis thaliana
agggtttcagctctgtc

SEQ ID NO: 41846 - DNA, 17 bp, Arabidopsis thaliana
agggtttcagtcaaact

SEQ ID NO: 41847 - DNA, 17 bp, Arabidopsis thaliana
agggtttcattgattag

SEQ ID NO: 41848 - DNA, 17 bp, Arabidopsis thaliana
agggtttccattaatcc

SEQ ID NO: 41849 - DNA, 17 bp, Arabidopsis thaliana
agggtttccctgcatct

SEQ ID NO: 41850 - DNA, 17 bp, Arabidopsis thaliana
agggtttcgtctttgag

SEQ ID NO: 41851 - DNA, 17 bp, Arabidopsis thaliana
agggtttctaaggtcgc

SEQ ID NO: 41852 - DNA, 17 bp, Arabidopsis thaliana
agggtttctaatactgc

SEQ ID NO: 41853 - DNA, 17 bp, Arabidopsis thaliana
agggtttctatggttca

SEQ ID NO: 41854 - DNA, 17 bp, Arabidopsis thaliana
agggtttctcaagccac

SEQ ID NO: 41855 - DNA, 17 bp, Arabidopsis thaliana
agggtttctgcctttag

SEQ ID NO: 41856 - DNA, 17 bp, Arabidopsis thaliana
agggtttcttgacaggt

SEQ ID NO: 41857 - DNA, 17 bp, Arabidopsis thaliana
agggtttcttgtttccg

SEQ ID NO: 41858 - DNA, 17 bp, Arabidopsis thaliana
agggtttgaaatagatt

SEQ ID NO: 41859 - DNA, 17 bp, Arabidopsis thaliana
agggtttgaatggttac

SEQ ID NO: 41860 - DNA, 17 bp, Arabidopsis thaliana
agggtttgacctcccat

SEQ ID NO: 41861 - DNA, 17 bp, Arabidopsis thaliana
agggtttgattccctgg

SEQ ID NO: 41862 - DNA, 17 bp, Arabidopsis thaliana
agggtttgattggttct

SEQ ID NO: 41863 - DNA, 17 bp, Arabidopsis thaliana
agggtttggcaattgta

SEQ ID NO: 41864 - DNA, 17 bp, Arabidopsis thaliana
agggtttgggttttgat

SEQ ID NO: 41865 - DNA, 17 bp, Arabidopsis thaliana
agggtttggtagtgtct

SEQ ID NO: 41866 - DNA, 17 bp, Arabidopsis thaliana
agggtttgtagatggtt

SEQ ID NO: 41867 - DNA, 17 bp, Arabidopsis thaliana
agggtttgttccgacac

SEQ ID NO: 41868 - DNA, 17 bp, Arabidopsis thaliana
agggttttaccctttcc

SEQ ID NO: 41869 - DNA, 17 bp, Arabidopsis thaliana
agggttttagacttgag

SEQ ID NO: 41870 - DNA, 17 bp, Arabidopsis thaliana
agggttttagggcctga

SEQ ID NO: 41871 - DNA, 17 bp, Arabidopsis thaliana
agggttttagtcgacgt

SEQ ID NO: 41872 - DNA, 17 bp, Arabidopsis thaliana
agggttttcggttttgg

SEQ ID NO: 41873 - DNA, 17 bp, Arabidopsis thaliana
agggttttctactttca

SEQ ID NO: 41874 - DNA, 17 bp, Arabidopsis thaliana
agggttttctgttgggc

SEQ ID NO: 41875 - DNA, 17 bp, Arabidopsis thaliana
agggttttcttacggca

SEQ ID NO: 41876 - DNA, 17 bp, Arabidopsis thaliana
agggttttgaagagtct

SEQ ID NO: 41877 - DNA, 17 bp, Arabidopsis thaliana
agggttttgacctctga

SEQ ID NO: 41878 - DNA, 17 bp, Arabidopsis thaliana
agggttttgactacaaa

SEQ ID NO: 41879 - DNA, 17 bp, Arabidopsis thaliana
agggttttgctcaagaa

SEQ ID NO: 41880 - DNA, 17 bp, Arabidopsis thaliana
agggttttggaccgaat

SEQ ID NO: 41881 - DNA, 17 bp, Arabidopsis thaliana
agggttttggcgacatt

SEQ ID NO: 41882 - DNA, 17 bp, Arabidopsis thaliana
agggttttggttgaggg

SEQ ID NO: 41883 - DNA, 17 bp, Arabidopsis thaliana
agggttttgtgtgttac

SEQ ID NO: 41884 - DNA, 17 bp, Arabidopsis thaliana
agggtttttcccagtgg

SEQ ID NO: 41885 - DNA, 17 bp, Arabidopsis thaliana
agggtttttgaccctgt

SEQ ID NO: 41886 - DNA, 17 bp, Arabidopsis thaliana
agggtttttgctgggct

SEQ ID NO: 41887 - DNA, 17 bp, Arabidopsis thaliana
agggtttttggccggat

SEQ ID NO: 41888 - DNA, 17 bp, Arabidopsis thaliana
agggtttttggcttggt

SEQ ID NO: 41889 - DNA, 17 bp, Arabidopsis thaliana
agggtttttgggcggat

SEQ ID NO: 41890 - DNA, 17 bp, Arabidopsis thaliana
aggtaaaccaattggcc

SEQ ID NO: 41891 - DNA, 17 bp, Arabidopsis thaliana
aggtaaaccaattgggc

SEQ ID NO: 41892 - DNA, 17 bp, Arabidopsis thaliana
aggtaaaccaattgggt

SEQ ID NO: 41893 - DNA, 17 bp, Arabidopsis thaliana
aggtaaatcttcgggtt

SEQ ID NO: 41894 - DNA, 17 bp, Arabidopsis thaliana
aggtaacaagtttggtt

SEQ ID NO: 41895 - DNA, 17 bp, Arabidopsis thaliana
aggtaacgacgcttggt

SEQ ID NO: 41896 - DNA, 17 bp, Arabidopsis thaliana
aggtaacgtttgtcgtg

SEQ ID NO: 41897 - DNA, 17 bp, Arabidopsis thaliana
aggtaactaggttttaa

SEQ ID NO: 41898 - DNA, 17 bp, Arabidopsis thaliana
aggtaactgctggacgt

SEQ ID NO: 41899 - DNA, 17 bp, Arabidopsis thaliana
aggtaacttggagattc

SEQ ID NO: 41900 - DNA, 17 bp, Arabidopsis thaliana
aggtaagaaagacacac

SEQ ID NO: 41901 - DNA, 17 bp, Arabidopsis thaliana
aggtaagaatgacaccc

SEQ ID NO: 41902 - DNA, 17 bp, Arabidopsis thaliana
aggtaagaatgacagaa

SEQ ID NO: 41903 - DNA, 17 bp, Arabidopsis thaliana
aggtaagcgatctcttt

SEQ ID NO: 41904 - DNA, 17 bp, Arabidopsis thaliana
aggtaagggatggagta

SEQ ID NO: 41905 - DNA, 17 bp, Arabidopsis thaliana
aggtaagtcccaagtta

SEQ ID NO: 41906 - DNA, 17 bp, Arabidopsis thaliana
aggtaagttcatctcca

SEQ ID NO: 41907 - DNA, 17 bp, Arabidopsis thaliana
aggtaatcaggtcgcca

SEQ ID NO: 41908 - DNA, 17 bp, Arabidopsis thaliana
aggtaatcaggtcgcct

SEQ ID NO: 41909 - DNA, 17 bp, Arabidopsis thaliana
aggtaatccggtgatga

SEQ ID NO: 41910 - DNA, 17 bp, Arabidopsis thaliana
aggtaatcctggtacac

SEQ ID NO: 41911 - DNA, 17 bp, Arabidopsis thaliana
aggtaatcgcctgaggc

SEQ ID NO: 41912 - DNA, 17 bp, Arabidopsis thaliana
aggtaatctttgaatct

SEQ ID NO: 41913 - DNA, 17 bp, Arabidopsis thaliana
aggtaatgatatggatg

SEQ ID NO: 41914 - DNA, 17 bp, Arabidopsis thaliana
aggtaattgctggacgt

SEQ ID NO: 41915 - DNA, 17 bp, Arabidopsis thaliana
aggtaatttcctgacag

SEQ ID NO: 41916 - DNA, 17 bp, Arabidopsis thaliana
aggtaatttctcgttca

SEQ ID NO: 41917 - DNA, 17 bp, Arabidopsis thaliana
aggtacaacctgttaac

SEQ ID NO: 41918 - DNA, 17 bp, Arabidopsis thaliana
aggtacacccccctaaa

SEQ ID NO: 41919 - DNA, 17 bp, Arabidopsis thaliana
aggtacacccgggttcg

SEQ ID NO: 41920 - DNA, 17 bp, Arabidopsis thaliana
aggtacagacccgggtt

SEQ ID NO: 41921 - DNA, 17 bp, Arabidopsis thaliana
aggtacataactgattt

SEQ ID NO: 41922 - DNA, 17 bp, Arabidopsis thaliana
aggtacatccaagttgg

SEQ ID NO: 41923 - DNA, 17 bp, Arabidopsis thaliana
aggtacatccgaagcat

SEQ ID NO: 41924 - DNA, 17 bp, Arabidopsis thaliana
aggtacatcttccatgc

SEQ ID NO: 41925 - DNA, 17 bp, Arabidopsis thaliana
aggtacatgctgaccat

SEQ ID NO: 41926 - DNA, 17 bp, Arabidopsis thaliana
aggtaccacaagctaat

SEQ ID NO: 41927 - DNA, 17 bp, Arabidopsis thaliana
aggtacccattgccgcg

SEQ ID NO: 41928 - DNA, 17 bp, Arabidopsis thaliana
aggtaccgtagaaatct

SEQ ID NO: 41929 - DNA, 17 bp, Arabidopsis thaliana
aggtaccgtctccccga

SEQ ID NO: 41930 - DNA, 17 bp, Arabidopsis thaliana
aggtaccgtgcgctgga

SEQ ID NO: 41931 - DNA, 17 bp, Arabidopsis thaliana
aggtaccgtttccagag

SEQ ID NO: 41932 - DNA, 17 bp, Arabidopsis thaliana
aggtacctggcctccat

SEQ ID NO: 41933 - DNA, 17 bp, Arabidopsis thaliana
aggtacgaaacacaggc

SEQ ID NO: 41934 - DNA, 17 bp, Arabidopsis thaliana
aggtacgatggctttgt

SEQ ID NO: 41935 - DNA, 17 bp, Arabidopsis thaliana
aggtacgcttatgacca

SEQ ID NO: 41936 - DNA, 17 bp, Arabidopsis thaliana
aggtacggtctgtaacg

SEQ ID NO: 41937 - DNA, 17 bp, Arabidopsis thaliana
aggtacgtgcgggtgag

SEQ ID NO: 41938 - DNA, 17 bp, Arabidopsis thaliana
aggtactaggctttttt

SEQ ID NO: 41939 - DNA, 17 bp, Arabidopsis thaliana
aggtactccaccattga

SEQ ID NO: 41940 - DNA, 17 bp, Arabidopsis thaliana
aggtactcgatcggtgg

SEQ ID NO: 41941 - DNA, 17 bp, Arabidopsis thaliana
aggtactcgtagacaag

SEQ ID NO: 41942 - DNA, 17 bp, Arabidopsis thaliana
aggtactgagccgggtt

SEQ ID NO: 41943 - DNA, 17 bp, Arabidopsis thaliana
aggtactgcttctatgt

SEQ ID NO: 41944 - DNA, 17 bp, Arabidopsis thaliana
aggtactggaccgaagt

SEQ ID NO: 41945 - DNA, 17 bp, Arabidopsis thaliana
aggtactgtgtctcaga

SEQ ID NO: 41946 - DNA, 17 bp, Arabidopsis thaliana
aggtacttccagcgttc

SEQ ID NO: 41947 - DNA, 17 bp, Arabidopsis thaliana
aggtacttgattacttg

SEQ ID NO: 41948 - DNA, 17 bp, Arabidopsis thaliana
aggtacttgtgacccga

SEQ ID NO: 41949 - DNA, 17 bp, Arabidopsis thaliana
aggtactttgtgaattc

SEQ ID NO: 41950 - DNA, 17 bp, Arabidopsis thaliana
aggtacttttgcaaatt

SEQ ID NO: 41951 - DNA, 17 bp, Arabidopsis thaliana
aggtacttttggactca

SEQ ID NO: 41952 - DNA, 17 bp, Arabidopsis thaliana
aggtactttttcggcct

SEQ ID NO: 41953 - DNA, 17 bp, Arabidopsis thaliana
aggtagaactcctttct

SEQ ID NO: 41954 - DNA, 17 bp, Arabidopsis thaliana
aggtagaactgtcctgg

SEQ ID NO: 41955 - DNA, 17 bp, Arabidopsis thaliana
aggtagaagttgctcaa

SEQ ID NO: 41956 - DNA, 17 bp, Arabidopsis thaliana
aggtagaagttgcttaa

SEQ ID NO: 41957 - DNA, 17 bp, Arabidopsis thaliana
aggtagactacaaatct

SEQ ID NO: 41958 - DNA, 17 bp, Arabidopsis thaliana
aggtagactattgtcca

SEQ ID NO: 41959 - DNA, 17 bp, Arabidopsis thaliana
aggtagactgccttgac

SEQ ID NO: 41960 - DNA, 17 bp, Arabidopsis thaliana
aggtagagcaactccag

SEQ ID NO: 41961 - DNA, 17 bp, Arabidopsis thaliana
aggtagattttcgctgg

SEQ ID NO: 41962 - DNA, 17 bp, Arabidopsis thaliana
aggtagcagcgacttgc

SEQ ID NO: 41963 - DNA, 17 bp, Arabidopsis thaliana
aggtagccaaatgcctc

SEQ ID NO: 41964 - DNA, 17 bp, Arabidopsis thaliana
aggtagccgttgtgtga

SEQ ID NO: 41965 - DNA, 17 bp, Arabidopsis thaliana
aggtagcgaaattcctt

SEQ ID NO: 41966 - DNA, 17 bp, Arabidopsis thaliana
aggtagcgccttggtga

SEQ ID NO: 41967 - DNA, 17 bp, Arabidopsis thaliana
aggtagctggatgagtg

SEQ ID NO: 41968 - DNA, 17 bp, Arabidopsis thaliana
aggtaggacgtatcggc

SEQ ID NO: 41969 - DNA, 17 bp, Arabidopsis thaliana
aggtaggacgtgtcggc

SEQ ID NO: 41970 - DNA, 17 bp, Arabidopsis thaliana
aggtaggactcatgctg

SEQ ID NO: 41971 - DNA, 17 bp, Arabidopsis thaliana
aggtaggactcgtgctg

SEQ ID NO: 41972 - DNA, 17 bp, Arabidopsis thaliana
aggtaggacttgtgctg

SEQ ID NO: 41973 - DNA, 17 bp, Arabidopsis thaliana
aggtaggatttgtgctg

SEQ ID NO: 41974 - DNA, 17 bp, Arabidopsis thaliana
aggtaggcattggggtc

SEQ ID NO: 41975 - DNA, 17 bp, Arabidopsis thaliana
aggtagggtccagcggc

SEQ ID NO: 41976 - DNA, 17 bp, Arabidopsis thaliana
aggtaggtccctcgcgg

SEQ ID NO: 41977 - DNA, 17 bp, Arabidopsis thaliana
aggtaggttgctttggt

SEQ ID NO: 41978 - DNA, 17 bp, Arabidopsis thaliana
aggtagtccgatggaag

SEQ ID NO: 41979 - DNA, 17 bp, Arabidopsis thaliana
aggtagtgattggcgac

SEQ ID NO: 41980 - DNA, 17 bp, Arabidopsis thaliana
aggtagtgcccggcggt

SEQ ID NO: 41981 - DNA, 17 bp, Arabidopsis thaliana
aggtagttcttcacaag

SEQ ID NO: 41982 - DNA, 17 bp, Arabidopsis thaliana
aggtagtttttgtctct

SEQ ID NO: 41983 - DNA, 17 bp, Arabidopsis thaliana
aggtataggtacggttc

SEQ ID NO: 41984 - DNA, 17 bp, Arabidopsis thaliana
aggtatatccggatggc

SEQ ID NO: 41985 - DNA, 17 bp, Arabidopsis thaliana
aggtatatgggcgtgag

SEQ ID NO: 41986 - DNA, 17 bp, Arabidopsis thaliana
aggtatcaactccaaaa

SEQ ID NO: 41987 - DNA, 17 bp, Arabidopsis thaliana
aggtatcacatgccaag

SEQ ID NO: 41988 - DNA, 17 bp, Arabidopsis thaliana
aggtatcacatgccagg

SEQ ID NO: 41989 - DNA, 17 bp, Arabidopsis thaliana
aggtatccaacttcagt

SEQ ID NO: 41990 - DNA, 17 bp, Arabidopsis thaliana
aggtatccacaggtagt

SEQ ID NO: 41991 - DNA, 17 bp, Arabidopsis thaliana
aggtatccttttttgca

SEQ ID NO: 41992 - DNA, 17 bp, Arabidopsis thaliana
aggtatcgacaatgatc

SEQ ID NO: 41993 - DNA, 17 bp, Arabidopsis thaliana
aggtatcgaggccatac

SEQ ID NO: 41994 - DNA, 17 bp, Arabidopsis thaliana
aggtatcgtctgttgtg

SEQ ID NO: 41995 - DNA, 17 bp, Arabidopsis thaliana
aggtatcgtctgttgtt

SEQ ID NO: 41996 - DNA, 17 bp, Arabidopsis thaliana
aggtatcttgccgtttt

SEQ ID NO: 41997 - DNA, 17 bp, Arabidopsis thaliana
aggtatgacctctgatg

SEQ ID NO: 41998 - DNA, 17 bp, Arabidopsis thaliana
aggtatgcgtttctggc

SEQ ID NO: 41999 - DNA, 17 bp, Arabidopsis thaliana
aggtatggcggttagat

SEQ ID NO: 42000 - DNA, 17 bp, Arabidopsis thaliana
aggtatggtgaatgtgt

SEQ ID NO: 42001 - DNA, 17 bp, Arabidopsis thaliana
aggtatggttgggactc

SEQ ID NO: 42002 - DNA, 17 bp, Arabidopsis thaliana
aggtatgtctaatgtct

SEQ ID NO: 42003 - DNA, 17 bp, Arabidopsis thaliana
aggtatgtggaccatct

SEQ ID NO: 42004 - DNA, 17 bp, Arabidopsis thaliana
aggtattagtatcgctc

SEQ ID NO: 42005 - DNA, 17 bp, Arabidopsis thaliana
aggtattccatagcccc

SEQ ID NO: 42006 - DNA, 17 bp, Arabidopsis thaliana
aggtattcgtgcttgga

SEQ ID NO: 42007 - DNA, 17 bp, Arabidopsis thaliana
aggtattctatgcaatg

SEQ ID NO: 42008 - DNA, 17 bp, Arabidopsis thaliana
aggtattcttagaacgc

SEQ ID NO: 42009 - DNA, 17 bp, Arabidopsis thaliana
aggtattgacacgtgaa

SEQ ID NO: 42010 - DNA, 17 bp, Arabidopsis thaliana
aggtatttgagtctgaa

SEQ ID NO: 42011 - DNA, 17 bp, Arabidopsis thaliana
aggtattttcggtttgg

SEQ ID NO: 42012 - DNA, 17 bp, Arabidopsis thaliana
aggtattttgccgtgca

SEQ ID NO: 42013 - DNA, 17 bp, Arabidopsis thaliana
aggtattttgcgcattt

SEQ ID NO: 42014 - DNA, 17 bp, Arabidopsis thaliana
aggtcaaaagatctgaa

SEQ ID NO: 42015 - DNA, 17 bp, Arabidopsis thaliana
aggtcaaaattcatgga

SEQ ID NO: 42016 - DNA, 17 bp, Arabidopsis thaliana
aggtcaaaatttggagt

SEQ ID NO: 42017 - DNA, 17 bp, Arabidopsis thaliana
aggtcaaaatttgggtt

SEQ ID NO: 42018 - DNA, 17 bp, Arabidopsis thaliana
aggtcaaacgaagatgt

SEQ ID NO: 42019 - DNA, 17 bp, Arabidopsis thaliana
aggtcaaatcaaatgcg

SEQ ID NO: 42020 - DNA, 17 bp, Arabidopsis thaliana
aggtcaaatttccttaa

SEQ ID NO: 42021 - DNA, 17 bp, Arabidopsis thaliana
aggtcaaatttggggtc

SEQ ID NO: 42022 - DNA, 17 bp, Arabidopsis thaliana
aggtcaacgattcgatt

SEQ ID NO: 42023 - DNA, 17 bp, Arabidopsis thaliana
aggtcaactatgtttgt

SEQ ID NO: 42024 - DNA, 17 bp, Arabidopsis thaliana
aggtcaactgggttaaa

SEQ ID NO: 42025 - DNA, 17 bp, Arabidopsis thaliana
aggtcaaggtgggtctg

SEQ ID NO: 42026 - DNA, 17 bp, Arabidopsis thaliana
aggtcaagtaacattga

SEQ ID NO: 42027 - DNA, 17 bp, Arabidopsis thaliana
aggtcaagtaggagttt

SEQ ID NO: 42028 - DNA, 17 bp, Arabidopsis thaliana
aggtcaatccattcttg

SEQ ID NO: 42029 - DNA, 17 bp, Arabidopsis thaliana
aggtcaatcgtcttgcg

SEQ ID NO: 42030 - DNA, 17 bp, Arabidopsis thaliana
aggtcaattaagacccg

SEQ ID NO: 42031 - DNA, 17 bp, Arabidopsis thaliana
aggtcaattccgaaata

SEQ ID NO: 42032 - DNA, 17 bp, Arabidopsis thaliana
aggtcaattggtggaca

SEQ ID NO: 42033 - DNA, 17 bp, Arabidopsis thaliana
aggtcaatttcgatgta

SEQ ID NO: 42034 - DNA, 17 bp, Arabidopsis thaliana
aggtcaatttgggatag

SEQ ID NO: 42035 - DNA, 17 bp, Arabidopsis thaliana
aggtcaccaatcttgag

SEQ ID NO: 42036 - DNA, 17 bp, Arabidopsis thaliana
aggtcaccgaagctatc

SEQ ID NO: 42037 - DNA, 17 bp, Arabidopsis thaliana
aggtcacgacacgagcc

SEQ ID NO: 42038 - DNA, 17 bp, Arabidopsis thaliana
aggtcacgtctgcctgg

SEQ ID NO: 42039 - DNA, 17 bp, Arabidopsis thaliana
aggtcacgtctgcttgg

SEQ ID NO: 42040 - DNA, 17 bp, Arabidopsis thaliana
aggtcactgatgtttaa

SEQ ID NO: 42041 - DNA, 17 bp, Arabidopsis thaliana
aggtcagaatcgtgaca

SEQ ID NO: 42042 - DNA, 17 bp, Arabidopsis thaliana
aggtcagacatccattc

SEQ ID NO: 42043 - DNA, 17 bp, Arabidopsis thaliana
aggtcagacctatcacg

SEQ ID NO: 42044 - DNA, 17 bp, Arabidopsis thaliana
aggtcagacctgggctt

SEQ ID NO: 42045 - DNA, 17 bp, Arabidopsis thaliana
aggtcagaggacttggg

SEQ ID NO: 42046 - DNA, 17 bp, Arabidopsis thaliana
aggtcagaggttccccc

SEQ ID NO: 42047 - DNA, 17 bp, Arabidopsis thaliana
aggtcagatcgacgctg

SEQ ID NO: 42048 - DNA, 17 bp, Arabidopsis thaliana
aggtcagatggagcggg

SEQ ID NO: 42049 - DNA, 17 bp, Arabidopsis thaliana
aggtcagcagagacgcg

SEQ ID NO: 42050 - DNA, 17 bp, Arabidopsis thaliana
aggtcagccctttgtcg

SEQ ID NO: 42051 - DNA, 17 bp, Arabidopsis thaliana
aggtcaggattcgtgtt

SEQ ID NO: 42052 - DNA, 17 bp, Arabidopsis thaliana
aggtcaggccgatgtgg

SEQ ID NO: 42053 - DNA, 17 bp, Arabidopsis thaliana
aggtcagggttatcgat

SEQ ID NO: 42054 - DNA, 17 bp, Arabidopsis thaliana
aggtcagggttcttgct

SEQ ID NO: 42055 - DNA, 17 bp, Arabidopsis thaliana
aggtcaggtagctcagt

SEQ ID NO: 42056 - DNA, 17 bp, Arabidopsis thaliana
aggtcaggtatttcggg

SEQ ID NO: 42057 - DNA, 17 bp, Arabidopsis thaliana
aggtcaggtggtgtggc

SEQ ID NO: 42058 - DNA, 17 bp, Arabidopsis thaliana
aggtcagtacccctgct

SEQ ID NO: 42059 - DNA, 17 bp, Arabidopsis thaliana
aggtcagtacccgtgct

SEQ ID NO: 42060 - DNA, 17 bp, Arabidopsis thaliana
aggtcagtacctgtgct

SEQ ID NO: 42061 - DNA, 17 bp, Arabidopsis thaliana
aggtcagtcaaggtcgt

SEQ ID NO: 42062 - DNA, 17 bp, Arabidopsis thaliana
aggtcagtcccatcttt

SEQ ID NO: 42063 - DNA, 17 bp, Arabidopsis thaliana
aggtcagtgaaatctac

SEQ ID NO: 42064 - DNA, 17 bp, Arabidopsis thaliana
aggtcagtgacaagctc

SEQ ID NO: 42065 - DNA, 17 bp, Arabidopsis thaliana
aggtcagtgtcactaga

SEQ ID NO: 42066 - DNA, 17 bp, Arabidopsis thaliana
aggtcagttccaagata

SEQ ID NO: 42067 - DNA, 17 bp, Arabidopsis thaliana
aggtcagttccgaaata

SEQ ID NO: 42068 - DNA, 17 bp, Arabidopsis thaliana
aggtcagttccgagata

SEQ ID NO: 42069 - DNA, 17 bp, Arabidopsis thaliana
aggtcagttcgagatat

SEQ ID NO: 42070 - DNA, 17 bp, Arabidopsis thaliana
aggtcagttcggattgc

SEQ ID NO: 42071 - DNA, 17 bp, Arabidopsis thaliana
aggtcagttgttagatt

SEQ ID NO: 42072 - DNA, 17 bp, Arabidopsis thaliana
aggtcagtttcgagata

SEQ ID NO: 42073 - DNA, 17 bp, Arabidopsis thaliana
aggtcatattcaggacc

SEQ ID NO: 42074 - DNA, 17 bp, Arabidopsis thaliana
aggtcatcatggttgct

SEQ ID NO: 42075 - DNA, 17 bp, Arabidopsis thaliana
aggtcatccgccatacc

SEQ ID NO: 42076 - DNA, 17 bp, Arabidopsis thaliana
aggtcatccgtggctat

SEQ ID NO: 42077 - DNA, 17 bp, Arabidopsis thaliana
aggtcatcctgcagctt

SEQ ID NO: 42078 - DNA, 17 bp, Arabidopsis thaliana
aggtcatcgaaccagaa

SEQ ID NO: 42079 - DNA, 17 bp, Arabidopsis thaliana
aggtcatcgacaagcat

SEQ ID NO: 42080 - DNA, 17 bp, Arabidopsis thaliana
aggtcatcgcaggacgg

SEQ ID NO: 42081 - DNA, 17 bp, Arabidopsis thaliana
aggtcatcgcaggtcga

SEQ ID NO: 42082 - DNA, 17 bp, Arabidopsis thaliana
aggtcatctccaaccgg

SEQ ID NO: 42083 - DNA, 17 bp, Arabidopsis thaliana
aggtcatctccaacggg

SEQ ID NO: 42084 - DNA, 17 bp, Arabidopsis thaliana
aggtcatctccattggt

SEQ ID NO: 42085 - DNA, 17 bp, Arabidopsis thaliana
aggtcatctcttgtatg

SEQ ID NO: 42086 - DNA, 17 bp, Arabidopsis thaliana
aggtcatgcagacgact

SEQ ID NO: 42087 - DNA, 17 bp, Arabidopsis thaliana
aggtcatggcccatgga

SEQ ID NO: 42088 - DNA, 17 bp, Arabidopsis thaliana
aggtcatgttcgtttgc

SEQ ID NO: 42089 - DNA, 17 bp, Arabidopsis thaliana
aggtcatgttgttcttt

SEQ ID NO: 42090 - DNA, 17 bp, Arabidopsis thaliana
aggtcattaatggattg

SEQ ID NO: 42091 - DNA, 17 bp, Arabidopsis thaliana
aggtcattacgcctcta

SEQ ID NO: 42092 - DNA, 17 bp, Arabidopsis thaliana
aggtcattagcgattcc

SEQ ID NO: 42093 - DNA, 17 bp, Arabidopsis thaliana
aggtcattgaagtttgc

SEQ ID NO: 42094 - DNA, 17 bp, Arabidopsis thaliana
aggtcattgttttcgta

SEQ ID NO: 42095 - DNA, 17 bp, Arabidopsis thaliana
aggtcatttgccgaccc

SEQ ID NO: 42096 - DNA, 17 bp, Arabidopsis thaliana
aggtcatttgccgactt

SEQ ID NO: 42097 - DNA, 17 bp, Arabidopsis thaliana
aggtcatttttcaggtc

SEQ ID NO: 42098 - DNA, 17 bp, Arabidopsis thaliana
aggtccaaacaaccgac

SEQ ID NO: 42099 - DNA, 17 bp, Arabidopsis thaliana
aggtccaaaggctttac

SEQ ID NO: 42100 - DNA, 17 bp, Arabidopsis thaliana
aggtccaaaggttctac

SEQ ID NO: 42101 - DNA, 17 bp, Arabidopsis thaliana
aggtccaacatttgccc

SEQ ID NO: 42102 - DNA, 17 bp, Arabidopsis thaliana
aggtccaatgcatagtc

SEQ ID NO: 42103 - DNA, 17 bp, Arabidopsis thaliana
aggtccaatgggctatt

SEQ ID NO: 42104 - DNA, 17 bp, Arabidopsis thaliana
aggtccactgaatcttc

SEQ ID NO: 42105 - DNA, 17 bp, Arabidopsis thaliana
aggtccactgagattca

SEQ ID NO: 42106 - DNA, 17 bp, Arabidopsis thaliana
aggtccagcctgttgaa

SEQ ID NO: 42107 - DNA, 17 bp, Arabidopsis thaliana
aggtccagcgacagcga

SEQ ID NO: 42108 - DNA, 17 bp, Arabidopsis thaliana
aggtccaggagaggctg

SEQ ID NO: 42109 - DNA, 17 bp, Arabidopsis thaliana
aggtccaggatggggag

SEQ ID NO: 42110 - DNA, 17 bp, Arabidopsis thaliana
aggtccaggccgcttcc

SEQ ID NO: 42111 - DNA, 17 bp, Arabidopsis thaliana
aggtccattccacgcca

SEQ ID NO: 42112 - DNA, 17 bp, Arabidopsis thaliana
aggtcccacggttaatt

SEQ ID NO: 42113 - DNA, 17 bp, Arabidopsis thaliana
aggtcccagaagaggtg

SEQ ID NO: 42114 - DNA, 17 bp, Arabidopsis thaliana
aggtcccagtaatcgct

SEQ ID NO: 42115 - DNA, 17 bp, Arabidopsis thaliana
aggtcccatcgatggtc

SEQ ID NO: 42116 - DNA, 17 bp, Arabidopsis thaliana
aggtcccccacttttcc

SEQ ID NO: 42117 - DNA, 17 bp, Arabidopsis thaliana
aggtcccccgaacttga

SEQ ID NO: 42118 - DNA, 17 bp, Arabidopsis thaliana
aggtcccgtgggtttac

SEQ ID NO: 42119 - DNA, 17 bp, Arabidopsis thaliana
aggtccctactgaattg

SEQ ID NO: 42120 - DNA, 17 bp, Arabidopsis thaliana
aggtccctccgggtaag

SEQ ID NO: 42121 - DNA, 17 bp, Arabidopsis thaliana
aggtccctcttggcacc

SEQ ID NO: 42122 - DNA, 17 bp, Arabidopsis thaliana
aggtccgaaaccacagc

SEQ ID NO: 42123 - DNA, 17 bp, Arabidopsis thaliana
aggtccgacccgtgcag

SEQ ID NO: 42124 - DNA, 17 bp, Arabidopsis thaliana
aggtccgacttgttgca

SEQ ID NO: 42125 - DNA, 17 bp, Arabidopsis thaliana
aggtccgcgctcgcacc

SEQ ID NO: 42126 - DNA, 17 bp, Arabidopsis thaliana
aggtccgcttcttccag

SEQ ID NO: 42127 - DNA, 17 bp, Arabidopsis thaliana
aggtccggccgagtctg

SEQ ID NO: 42128 - DNA, 17 bp, Arabidopsis thaliana
aggtccggcctactagt

SEQ ID NO: 42129 - DNA, 17 bp, Arabidopsis thaliana
aggtccggcctagtagt

SEQ ID NO: 42130 - DNA, 17 bp, Arabidopsis thaliana
aggtccggcttgttgca

SEQ ID NO: 42131 - DNA, 17 bp, Arabidopsis thaliana
aggtccggtgtttgtat

SEQ ID NO: 42132 - DNA, 17 bp, Arabidopsis thaliana
aggtccgttggtgtgat

SEQ ID NO: 42133 - DNA, 17 bp, Arabidopsis thaliana
aggtcctaattcattat

SEQ ID NO: 42134 - DNA, 17 bp, Arabidopsis thaliana
aggtcctacatctctct

SEQ ID NO: 42135 - DNA, 17 bp, Arabidopsis thaliana
aggtcctacgaaaacaa

SEQ ID NO: 42136 - DNA, 17 bp, Arabidopsis thaliana
aggtcctagccgacttt

SEQ ID NO: 42137 - DNA, 17 bp, Arabidopsis thaliana
aggtcctagccgctttt

SEQ ID NO: 42138 - DNA, 17 bp, Arabidopsis thaliana
aggtcctcacccgcacg

SEQ ID NO: 42139 - DNA, 17 bp, Arabidopsis thaliana
aggtcctcagctctgat

SEQ ID NO: 42140 - DNA, 17 bp, Arabidopsis thaliana
aggtcctccttccaagg

SEQ ID NO: 42141 - DNA, 17 bp, Arabidopsis thaliana
aggtcctcgagctgcta

SEQ ID NO: 42142 - DNA, 17 bp, Arabidopsis thaliana
aggtcctgagagaattc

SEQ ID NO: 42143 - DNA, 17 bp, Arabidopsis thaliana
aggtcctgagagcaact

SEQ ID NO: 42144 - DNA, 17 bp, Arabidopsis thaliana
aggtcctgcagtatctg

SEQ ID NO: 42145 - DNA, 17 bp, Arabidopsis thaliana
aggtcctgcggaaggat

SEQ ID NO: 42146 - DNA, 17 bp, Arabidopsis thaliana
aggtcctggatccgccc

SEQ ID NO: 42147 - DNA, 17 bp, Arabidopsis thaliana
aggtcctgggaactcag

SEQ ID NO: 42148 - DNA, 17 bp, Arabidopsis thaliana
aggtcctgtcgttctct

SEQ ID NO: 42149 - DNA, 17 bp, Arabidopsis thaliana
aggtcctgtttgtttgt

SEQ ID NO: 42150 - DNA, 17 bp, Arabidopsis thaliana
aggtccttaagcaggtt

SEQ ID NO: 42151 - DNA, 17 bp, Arabidopsis thaliana
aggtccttaagcgggtt

SEQ ID NO: 42152 - DNA, 17 bp, Arabidopsis thaliana
aggtccttaatcgggtt

SEQ ID NO: 42153 - DNA, 17 bp, Arabidopsis thaliana
aggtccttcagcggtgt

SEQ ID NO: 42154 - DNA, 17 bp, Arabidopsis thaliana
aggtccttcctgaatag

SEQ ID NO: 42155 - DNA, 17 bp, Arabidopsis thaliana
aggtccttcttgatgtg

SEQ ID NO: 42156 - DNA, 17 bp, Arabidopsis thaliana
aggtccttcttgccatt

SEQ ID NO: 42157 - DNA, 17 bp, Arabidopsis thaliana
aggtccttgttccaaat

SEQ ID NO: 42158 - DNA, 17 bp, Arabidopsis thaliana
aggtcctttcggttcat

SEQ ID NO: 42159 - DNA, 17 bp, Arabidopsis thaliana
aggtcctttgattatta

SEQ ID NO: 42160 - DNA, 17 bp, Arabidopsis thaliana
aggtcgacgcagggatc

SEQ ID NO: 42161 - DNA, 17 bp, Arabidopsis thaliana
aggtcgacgcgggctct

SEQ ID NO: 42162 - DNA, 17 bp, Arabidopsis thaliana
aggtcgacggaatgtac

SEQ ID NO: 42163 - DNA, 17 bp, Arabidopsis thaliana
aggtcgagtgactttgg

SEQ ID NO: 42164 - DNA, 17 bp, Arabidopsis thaliana
aggtcgagtgtcctcat

SEQ ID NO: 42165 - DNA, 17 bp, Arabidopsis thaliana
aggtcgcaagcatggga

SEQ ID NO: 42166 - DNA, 17 bp, Arabidopsis thaliana
aggtcgcatggcttata

SEQ ID NO: 42167 - DNA, 17 bp, Arabidopsis thaliana
aggtcgccgattcgagt

SEQ ID NO: 42168 - DNA, 17 bp, Arabidopsis thaliana
aggtcgccgtcgctaat

SEQ ID NO: 42169 - DNA, 17 bp, Arabidopsis thaliana
aggtcgcctgcatttct

SEQ ID NO: 42170 - DNA, 17 bp, Arabidopsis thaliana
aggtcgcctggagtttg

SEQ ID NO: 42171 - DNA, 17 bp, Arabidopsis thaliana
aggtcgcgattcttccc

SEQ ID NO: 42172 - DNA, 17 bp, Arabidopsis thaliana
aggtcgcggtgtttttg

SEQ ID NO: 42173 - DNA, 17 bp, Arabidopsis thaliana
aggtcgcgtgtttgatc

SEQ ID NO: 42174 - DNA, 17 bp, Arabidopsis thaliana
aggtcgctggttcgttt

SEQ ID NO: 42175 - DNA, 17 bp, Arabidopsis thaliana
aggtcggaggttccccc

SEQ ID NO: 42176 - DNA, 17 bp, Arabidopsis thaliana
aggtcggaggttcggcc

SEQ ID NO: 42177 - DNA, 17 bp, Arabidopsis thaliana
aggtcggatggagcggg

SEQ ID NO: 42178 - DNA, 17 bp, Arabidopsis thaliana
aggtcggccccatttca

SEQ ID NO: 42179 - DNA, 17 bp, Arabidopsis thaliana
aggtcggcttgtcccgt

SEQ ID NO: 42180 - DNA, 17 bp, Arabidopsis thaliana
aggtcggcttgtccctt

SEQ ID NO: 42181 - DNA, 17 bp, Arabidopsis thaliana
aggtcggcttttgagtt

SEQ ID NO: 42182 - DNA, 17 bp, Arabidopsis thaliana
aggtcgggctgggcttt

SEQ ID NO: 42183 - DNA, 17 bp, Arabidopsis thaliana
aggtcgggttcggttta

SEQ ID NO: 42184 - DNA, 17 bp, Arabidopsis thaliana
aggtcggtctttgcttt

SEQ ID NO: 42185 - DNA, 17 bp, Arabidopsis thaliana
aggtcggttacggtcgc

SEQ ID NO: 42186 - DNA, 17 bp, Arabidopsis thaliana
aggtcggttacggtggc

SEQ ID NO: 42187 - DNA, 17 bp, Arabidopsis thaliana
aggtcggttgatccgct

SEQ ID NO: 42188 - DNA, 17 bp, Arabidopsis thaliana
aggtcgtattcgtagct

SEQ ID NO: 42189 - DNA, 17 bp, Arabidopsis thaliana
aggtcgtcaagtggaac

SEQ ID NO: 42190 - DNA, 17 bp, Arabidopsis thaliana
aggtcgtcagcatttct

SEQ ID NO: 42191 - DNA, 17 bp, Arabidopsis thaliana
aggtcgtccgcatttct

SEQ ID NO: 42192 - DNA, 17 bp, Arabidopsis thaliana
aggtcgtcctggctctg

SEQ ID NO: 42193 - DNA, 17 bp, Arabidopsis thaliana
aggtcgtcgttttgtcg

SEQ ID NO: 42194 - DNA, 17 bp, Arabidopsis thaliana
aggtcgtctgagggttc

SEQ ID NO: 42195 - DNA, 17 bp, Arabidopsis thaliana
aggtcgtctgcatgtct

SEQ ID NO: 42196 - DNA, 17 bp, Arabidopsis thaliana
aggtcgtctgcatttct

SEQ ID NO: 42197 - DNA, 17 bp, Arabidopsis thaliana
aggtcgtgggggctccc

SEQ ID NO: 42198 - DNA, 17 bp, Arabidopsis thaliana
aggtcgttgaagcgaag

SEQ ID NO: 42199 - DNA, 17 bp, Arabidopsis thaliana
aggtcgttgtattttgc

SEQ ID NO: 42200 - DNA, 17 bp, Arabidopsis thaliana
aggtcgttgtcgctaat

SEQ ID NO: 42201 - DNA, 17 bp, Arabidopsis thaliana
aggtcgtttcccggctg

SEQ ID NO: 42202 - DNA, 17 bp, Arabidopsis thaliana
aggtctaaaatgtgtga

SEQ ID NO: 42203 - DNA, 17 bp, Arabidopsis thaliana
aggtctaaaatgtgtgt

SEQ ID NO: 42204 - DNA, 17 bp, Arabidopsis thaliana
aggtctaaagattccat

SEQ ID NO: 42205 - DNA, 17 bp, Arabidopsis thaliana
aggtctaaaggatcgat

SEQ ID NO: 42206 - DNA, 17 bp, Arabidopsis thaliana
aggtctaacgacctcgt

SEQ ID NO: 42207 - DNA, 17 bp, Arabidopsis thaliana
aggtctaagattccggc

SEQ ID NO: 42208 - DNA, 17 bp, Arabidopsis thaliana
aggtctaaggtaggcgt

SEQ ID NO: 42209 - DNA, 17 bp, Arabidopsis thaliana
aggtctaatactgaaaa

SEQ ID NO: 42210 - DNA, 17 bp, Arabidopsis thaliana
aggtctaatcgggttcg

SEQ ID NO: 42211 - DNA, 17 bp, Arabidopsis thaliana
aggtctaatgagatttt

SEQ ID NO: 42212 - DNA, 17 bp, Arabidopsis thaliana
aggtctaatggattgag

SEQ ID NO: 42213 - DNA, 17 bp, Arabidopsis thaliana
aggtctaatgtcccagt

SEQ ID NO: 42214 - DNA, 17 bp, Arabidopsis thaliana
aggtctaatgttccagt

SEQ ID NO: 42215 - DNA, 17 bp, Arabidopsis thaliana
aggtctaattgcaaaaa

SEQ ID NO: 42216 - DNA, 17 bp, Arabidopsis thaliana
aggtctaccggcgatct

SEQ ID NO: 42217 - DNA, 17 bp, Arabidopsis thaliana
aggtctactgaaccatt

SEQ ID NO: 42218 - DNA, 17 bp, Arabidopsis thaliana
aggtctagaacgattaa

SEQ ID NO: 42219 - DNA, 17 bp, Arabidopsis thaliana
aggtctagaacgattat

SEQ ID NO: 42220 - DNA, 17 bp, Arabidopsis thaliana
aggtctagacgtccatt

SEQ ID NO: 42221 - DNA, 17 bp, Arabidopsis thaliana
aggtctagcccaatcac

SEQ ID NO: 42222 - DNA, 17 bp, Arabidopsis thaliana
aggtctaggggattcac

SEQ ID NO: 42223 - DNA, 17 bp, Arabidopsis thaliana
aggtctagggtggtttt

SEQ ID NO: 42224 - DNA, 17 bp, Arabidopsis thaliana
aggtctataccgtcacc

SEQ ID NO: 42225 - DNA, 17 bp, Arabidopsis thaliana
aggtctataccgtcagc

SEQ ID NO: 42226 - DNA, 17 bp, Arabidopsis thaliana
aggtctatgcgctcttt

SEQ ID NO: 42227 - DNA, 17 bp, Arabidopsis thaliana
aggtctatgtaactcag

SEQ ID NO: 42228 - DNA, 17 bp, Arabidopsis thaliana
aggtctatgtctttcgg

SEQ ID NO: 42229 - DNA, 17 bp, Arabidopsis thaliana
aggtctatgtctttctg

SEQ ID NO: 42230 - DNA, 17 bp, Arabidopsis thaliana
aggtctattagggttgc

SEQ ID NO: 42231 - DNA, 17 bp, Arabidopsis thaliana
aggtctccaagaggtga

SEQ ID NO: 42232 - DNA, 17 bp, Arabidopsis thaliana
aggtctccaaggtgaac

SEQ ID NO: 42233 - DNA, 17 bp, Arabidopsis thaliana
aggtctccagcttggcc

SEQ ID NO: 42234 - DNA, 17 bp, Arabidopsis thaliana
aggtctccatctgactc

SEQ ID NO: 42235 - DNA, 17 bp, Arabidopsis thaliana
aggtctcgaaagcgtag

SEQ ID NO: 42236 - DNA, 17 bp, Arabidopsis thaliana
aggtctcgaggttagtc

SEQ ID NO: 42237 - DNA, 17 bp, Arabidopsis thaliana
aggtctcggtggaacct

SEQ ID NO: 42238 - DNA, 17 bp, Arabidopsis thaliana
aggtctcggtggaagct

SEQ ID NO: 42239 - DNA, 17 bp, Arabidopsis thaliana
aggtctcggtgggacct

SEQ ID NO: 42240 - DNA, 17 bp, Arabidopsis thaliana
aggtctcggtttgtaag

SEQ ID NO: 42241 - DNA, 17 bp, Arabidopsis thaliana
aggtctcgtaatcttta

SEQ ID NO: 42242 - DNA, 17 bp, Arabidopsis thaliana
aggtctcgtcgggaaag

SEQ ID NO: 42243 - DNA, 17 bp, Arabidopsis thaliana
aggtctctcaccattgt

SEQ ID NO: 42244 - DNA, 17 bp, Arabidopsis thaliana
aggtctctcatgcctgc

SEQ ID NO: 42245 - DNA, 17 bp, Arabidopsis thaliana
aggtctctgctgttggt

SEQ ID NO: 42246 - DNA, 17 bp, Arabidopsis thaliana
aggtctcttctactctt

SEQ ID NO: 42247 - DNA, 17 bp, Arabidopsis thaliana
aggtctcttggtctgct

SEQ ID NO: 42248 - DNA, 17 bp, Arabidopsis thaliana
aggtctcttgtcgccga

SEQ ID NO: 42249 - DNA, 17 bp, Arabidopsis thaliana
aggtctgaaccagtctc

SEQ ID NO: 42250 - DNA, 17 bp, Arabidopsis thaliana
aggtctgaatggtgact

SEQ ID NO: 42251 - DNA, 17 bp, Arabidopsis thaliana
aggtctgacagttctgt

SEQ ID NO: 42252 - DNA, 17 bp, Arabidopsis thaliana
aggtctgagacagggca

SEQ ID NO: 42253 - DNA, 17 bp, Arabidopsis thaliana
aggtctgagggaggcgc

SEQ ID NO: 42254 - DNA, 17 bp, Arabidopsis thaliana
aggtctgaggttctgta

SEQ ID NO: 42255 - DNA, 17 bp, Arabidopsis thaliana
aggtctgagtctgattt

SEQ ID NO: 42256 - DNA, 17 bp, Arabidopsis thaliana
aggtctgagttagcagg

SEQ ID NO: 42257 - DNA, 17 bp, Arabidopsis thaliana
aggtctgcaaattttgg

SEQ ID NO: 42258 - DNA, 17 bp, Arabidopsis thaliana
aggtctgcaatcgtgat

SEQ ID NO: 42259 - DNA, 17 bp, Arabidopsis thaliana
aggtctgcctgggtgtc

SEQ ID NO: 42260 - DNA, 17 bp, Arabidopsis thaliana
aggtctgctgcttcttg

SEQ ID NO: 42261 - DNA, 17 bp, Arabidopsis thaliana
aggtctggcctgaacgg

SEQ ID NO: 42262 - DNA, 17 bp, Arabidopsis thaliana
aggtctgggcacgaagc

SEQ ID NO: 42263 - DNA, 17 bp, Arabidopsis thaliana
aggtctgggcgtaatat

SEQ ID NO: 42264 - DNA, 17 bp, Arabidopsis thaliana
aggtctgggcgttcgga

SEQ ID NO: 42265 - DNA, 17 bp, Arabidopsis thaliana
aggtctgggcgttcggt

SEQ ID NO: 42266 - DNA, 17 bp, Arabidopsis thaliana
aggtctggggttcgagt

SEQ ID NO: 42267 - DNA, 17 bp, Arabidopsis thaliana
aggtctggtaggattac

SEQ ID NO: 42268 - DNA, 17 bp, Arabidopsis thaliana
aggtctgtacccaagat

SEQ ID NO: 42269 - DNA, 17 bp, Arabidopsis thaliana
aggtctgtcagttgggc

SEQ ID NO: 42270 - DNA, 17 bp, Arabidopsis thaliana
aggtctgtcagttggtc

SEQ ID NO: 42271 - DNA, 17 bp, Arabidopsis thaliana
aggtctgtccttctatt

SEQ ID NO: 42272 - DNA, 17 bp, Arabidopsis thaliana
aggtctgtgatgccctt

SEQ ID NO: 42273 - DNA, 17 bp, Arabidopsis thaliana
aggtctgtggatagctc

SEQ ID NO: 42274 - DNA, 17 bp, Arabidopsis thaliana
aggtctgtgggtagctc

SEQ ID NO: 42275 - DNA, 17 bp, Arabidopsis thaliana
aggtctgttatacgctc

SEQ ID NO: 42276 - DNA, 17 bp, Arabidopsis thaliana
aggtcttaagcttctca

SEQ ID NO: 42277 - DNA, 17 bp, Arabidopsis thaliana
aggtcttacaaaccgag

SEQ ID NO: 42278 - DNA, 17 bp, Arabidopsis thaliana
aggtcttagacgaatca

SEQ ID NO: 42279 - DNA, 17 bp, Arabidopsis thaliana
aggtcttaggcggagct

SEQ ID NO: 42280 - DNA, 17 bp, Arabidopsis thaliana
aggtcttaggcgtagct

SEQ ID NO: 42281 - DNA, 17 bp, Arabidopsis thaliana
aggtcttagtcgcatcc

SEQ ID NO: 42282 - DNA, 17 bp, Arabidopsis thaliana
aggtcttcaacacttct

SEQ ID NO: 42283 - DNA, 17 bp, Arabidopsis thaliana
aggtcttcagatctagg

SEQ ID NO: 42284 - DNA, 17 bp, Arabidopsis thaliana
aggtcttcaggcttgaa

SEQ ID NO: 42285 - DNA, 17 bp, Arabidopsis thaliana
aggtcttccaagctaaa

SEQ ID NO: 42286 - DNA, 17 bp, Arabidopsis thaliana
aggtcttccatggcttc

SEQ ID NO: 42287 - DNA, 17 bp, Arabidopsis thaliana
aggtcttctacacgcag

SEQ ID NO: 42288 - DNA, 17 bp, Arabidopsis thaliana
aggtcttctcagaagca

SEQ ID NO: 42289 - DNA, 17 bp, Arabidopsis thaliana
aggtcttctgcaattgg

SEQ ID NO: 42290 - DNA, 17 bp, Arabidopsis thaliana
aggtcttctgcattgcg

SEQ ID NO: 42291 - DNA, 17 bp, Arabidopsis thaliana
aggtcttctgcttcttg

SEQ ID NO: 42292 - DNA, 17 bp, Arabidopsis thaliana
aggtcttctggcgatct

SEQ ID NO: 42293 - DNA, 17 bp, Arabidopsis thaliana
aggtcttgaccgtcatc

SEQ ID NO: 42294 - DNA, 17 bp, Arabidopsis thaliana
aggtcttgacctatccc

SEQ ID NO: 42295 - DNA, 17 bp, Arabidopsis thaliana
aggtcttgatgaaccgt

SEQ ID NO: 42296 - DNA, 17 bp, Arabidopsis thaliana
aggtcttgcggctttcc

SEQ ID NO: 42297 - DNA, 17 bp, Arabidopsis thaliana
aggtcttggaagtggag

SEQ ID NO: 42298 - DNA, 17 bp, Arabidopsis thaliana
aggtcttggcgctctat

SEQ ID NO: 42299 - DNA, 17 bp, Arabidopsis thaliana
aggtcttggttttgctt

SEQ ID NO: 42300 - DNA, 17 bp, Arabidopsis thaliana
aggtcttgttccagacg

SEQ ID NO: 42301 - DNA, 17 bp, Arabidopsis thaliana
aggtcttgttctcctaa

SEQ ID NO: 42302 - DNA, 17 bp, Arabidopsis thaliana
aggtcttgttttcctaa

SEQ ID NO: 42303 - DNA, 17 bp, Arabidopsis thaliana
aggtctttaagcgggtt

SEQ ID NO: 42304 - DNA, 17 bp, Arabidopsis thaliana
aggtctttaccagttga

SEQ ID NO: 42305 - DNA, 17 bp, Arabidopsis thaliana
aggtctttcagcatgcc

SEQ ID NO: 42306 - DNA, 17 bp, Arabidopsis thaliana
aggtctttgatctgcag

SEQ ID NO: 42307 - DNA, 17 bp, Arabidopsis thaliana
aggtctttgatttggga

SEQ ID NO: 42308 - DNA, 17 bp, Arabidopsis thaliana
aggtctttgcccgttca

SEQ ID NO: 42309 - DNA, 17 bp, Arabidopsis thaliana
aggtctttgcggattca

SEQ ID NO: 42310 - DNA, 17 bp, Arabidopsis thaliana
aggtctttggccagtgc

SEQ ID NO: 42311 - DNA, 17 bp, Arabidopsis thaliana
aggtctttggccagttc

SEQ ID NO: 42312 - DNA, 17 bp, Arabidopsis thaliana
aggtctttttcgattga

SEQ ID NO: 42313 - DNA, 17 bp, Arabidopsis thaliana
aggtctttttgggatgt

SEQ ID NO: 42314 - DNA, 17 bp, Arabidopsis thaliana
aggtgaaaagtggtttc

SEQ ID NO: 42315 - DNA, 17 bp, Arabidopsis thaliana
aggtgaaacaccgattc

SEQ ID NO: 42316 - DNA, 17 bp, Arabidopsis thaliana
aggtgaaacttagaggt

SEQ ID NO: 42317 - DNA, 17 bp, Arabidopsis thaliana
aggtgaaagtactggat

SEQ ID NO: 42318 - DNA, 17 bp, Arabidopsis thaliana
aggtgaaatttagaggt

SEQ ID NO: 42319 - DNA, 17 bp, Arabidopsis thaliana
aggtgaacaaggctgat

SEQ ID NO: 42320 - DNA, 17 bp, Arabidopsis thaliana
aggtgaacagacccatt

SEQ ID NO: 42321 - DNA, 17 bp, Arabidopsis thaliana
aggtgaacagacccgtt

SEQ ID NO: 42322 - DNA, 17 bp, Arabidopsis thaliana
aggtgaacagcctctgg

SEQ ID NO: 42323 - DNA, 17 bp, Arabidopsis thaliana
aggtgaacctgaggaag

SEQ ID NO: 42324 - DNA, 17 bp, Arabidopsis thaliana
aggtgaacctgcggaac

SEQ ID NO: 42325 - DNA, 17 bp, Arabidopsis thaliana
aggtgaacctgcggaag

SEQ ID NO: 42326 - DNA, 17 bp, Arabidopsis thaliana
aggtgaacctgcggaat

SEQ ID NO: 42327 - DNA, 17 bp, Arabidopsis thaliana
aggtgaacctgcggacg

SEQ ID NO: 42328 - DNA, 17 bp, Arabidopsis thaliana
aggtgaacctgcgggag

SEQ ID NO: 42329 - DNA, 17 bp, Arabidopsis thaliana
aggtgaacctgcgggcg

SEQ ID NO: 42330 - DNA, 17 bp, Arabidopsis thaliana
aggtgaaccttgggatg

SEQ ID NO: 42331 - DNA, 17 bp, Arabidopsis thaliana
aggtgaacgacctgtgt

SEQ ID NO: 42332 - DNA, 17 bp, Arabidopsis thaliana
aggtgaactctttgggg

SEQ ID NO: 42333 - DNA, 17 bp, Arabidopsis thaliana
aggtgaacttgcggaag

SEQ ID NO: 42334 - DNA, 17 bp, Arabidopsis thaliana
aggtgaagacactcgac

SEQ ID NO: 42335 - DNA, 17 bp, Arabidopsis thaliana
aggtgaagctctatctg

SEQ ID NO: 42336 - DNA, 17 bp, Arabidopsis thaliana
aggtgaagcttagaggt

SEQ ID NO: 42337 - DNA, 17 bp, Arabidopsis thaliana
aggtgaatccgatggag

SEQ ID NO: 42338 - DNA, 17 bp, Arabidopsis thaliana
aggtgaatcgagttctt

SEQ ID NO: 42339 - DNA, 17 bp, Arabidopsis thaliana
aggtgaatgtaccatat

SEQ ID NO: 42340 - DNA, 17 bp, Arabidopsis thaliana
aggtgaattgtcttacc

SEQ ID NO: 42341 - DNA, 17 bp, Arabidopsis thaliana
aggtgacaagctctcat

SEQ ID NO: 42342 - DNA, 17 bp, Arabidopsis thaliana
aggtgacatgaagcgtt

SEQ ID NO: 42343 - DNA, 17 bp, Arabidopsis thaliana
aggtgacatttcactct

SEQ ID NO: 42344 - DNA, 17 bp, Arabidopsis thaliana
aggtgaccacctttctc

SEQ ID NO: 42345 - DNA, 17 bp, Arabidopsis thaliana
aggtgaccattggagca

SEQ ID NO: 42346 - DNA, 17 bp, Arabidopsis thaliana
aggtgaccggccgccat

SEQ ID NO: 42347 - DNA, 17 bp, Arabidopsis thaliana
aggtgaccgtccgtcgt

SEQ ID NO: 42348 - DNA, 17 bp, Arabidopsis thaliana
aggtgacctcccgagaa

SEQ ID NO: 42349 - DNA, 17 bp, Arabidopsis thaliana
aggtgacctgaaagatt

SEQ ID NO: 42350 - DNA, 17 bp, Arabidopsis thaliana
aggtgacctgcggaagg

SEQ ID NO: 42351 - DNA, 17 bp, Arabidopsis thaliana
aggtgaccttcctgaat

SEQ ID NO: 42352 - DNA, 17 bp, Arabidopsis thaliana
aggtgaccttcctgact

SEQ ID NO: 42353 - DNA, 17 bp, Arabidopsis thaliana
aggtgacgaatactgcg

SEQ ID NO: 42354 - DNA, 17 bp, Arabidopsis thaliana
aggtgacggaattgtta

SEQ ID NO: 42355 - DNA, 17 bp, Arabidopsis thaliana
aggtgacgtgacaacat

SEQ ID NO: 42356 - DNA, 17 bp, Arabidopsis thaliana
aggtgactacctgcgct

SEQ ID NO: 42357 - DNA, 17 bp, Arabidopsis thaliana
aggtgactagtttgcca

SEQ ID NO: 42358 - DNA, 17 bp, Arabidopsis thaliana
aggtgactctattggcc

SEQ ID NO: 42359 - DNA, 17 bp, Arabidopsis thaliana
aggtgactgagaatgac

SEQ ID NO: 42360 - DNA, 17 bp, Arabidopsis thaliana
aggtgactgatatgctt

SEQ ID NO: 42361 - DNA, 17 bp, Arabidopsis thaliana
aggtgactgatatgttt

SEQ ID NO: 42362 - DNA, 17 bp, Arabidopsis thaliana
aggtgactttcacatca

SEQ ID NO: 42363 - DNA, 17 bp, Arabidopsis thaliana
aggtgactttgcgatag

SEQ ID NO: 42364 - DNA, 17 bp, Arabidopsis thaliana
aggtgagacatggcaaa

SEQ ID NO: 42365 - DNA, 17 bp, Arabidopsis thaliana
aggtgagcactcttgtc

SEQ ID NO: 42366 - DNA, 17 bp, Arabidopsis thaliana
aggtgagctaagaccga

SEQ ID NO: 42367 - DNA, 17 bp, Arabidopsis thaliana
aggtgagctctctggtg

SEQ ID NO: 42368 - DNA, 17 bp, Arabidopsis thaliana
aggtgagctgagctgag

SEQ ID NO: 42369 - DNA, 17 bp, Arabidopsis thaliana
aggtgagcttctaggtg

SEQ ID NO: 42370 - DNA, 17 bp, Arabidopsis thaliana
aggtgaggatgacgtca

SEQ ID NO: 42371 - DNA, 17 bp, Arabidopsis thaliana
aggtgaggctgaagttc

SEQ ID NO: 42372 - DNA, 17 bp, Arabidopsis thaliana
aggtgaggtttgaaagc

SEQ ID NO: 42373 - DNA, 17 bp, Arabidopsis thaliana
aggtgagtccagtttct

SEQ ID NO: 42374 - DNA, 17 bp, Arabidopsis thaliana
aggtgagttatcgtacc

SEQ ID NO: 42375 - DNA, 17 bp, Arabidopsis thaliana
aggtgagttcccgcgtg

SEQ ID NO: 42376 - DNA, 17 bp, Arabidopsis thaliana
aggtgatacgacgacgt

SEQ ID NO: 42377 - DNA, 17 bp, Arabidopsis thaliana
aggtgatagcgcgtgga

SEQ ID NO: 42378 - DNA, 17 bp, Arabidopsis thaliana
aggtgatcaactgcgct

SEQ ID NO: 42379 - DNA, 17 bp, Arabidopsis thaliana
aggtgatcacccgtgct

SEQ ID NO: 42380 - DNA, 17 bp, Arabidopsis thaliana
aggtgatcactcgtgct

SEQ ID NO: 42381 - DNA, 17 bp, Arabidopsis thaliana
aggtgatcatcccatca

SEQ ID NO: 42382 - DNA, 17 bp, Arabidopsis thaliana
aggtgatcatcccatct

SEQ ID NO: 42383 - DNA, 17 bp, Arabidopsis thaliana
aggtgatcatccgcact

SEQ ID NO: 42384 - DNA, 17 bp, Arabidopsis thaliana
aggtgatcatccgcgct

SEQ ID NO: 42385 - DNA, 17 bp, Arabidopsis thaliana
aggtgatcattcgccta

SEQ ID NO: 42386 - DNA, 17 bp, Arabidopsis thaliana
aggtgatcccgggcgaa

SEQ ID NO: 42387 - DNA, 17 bp, Arabidopsis thaliana
aggtgatccctgtatag

SEQ ID NO: 42388 - DNA, 17 bp, Arabidopsis thaliana
aggtgatcggtctcggc

SEQ ID NO: 42389 - DNA, 17 bp, Arabidopsis thaliana
aggtgatcggtgctgct

SEQ ID NO: 42390 - DNA, 17 bp, Arabidopsis thaliana
aggtgatctcgaatctc

SEQ ID NO: 42391 - DNA, 17 bp, Arabidopsis thaliana
aggtgatctcgattgtg

SEQ ID NO: 42392 - DNA, 17 bp, Arabidopsis thaliana
aggtgatctctgtcaac

SEQ ID NO: 42393 - DNA, 17 bp, Arabidopsis thaliana
aggtgatgattcttcgt

SEQ ID NO: 42394 - DNA, 17 bp, Arabidopsis thaliana
aggtgatggattcattg

SEQ ID NO: 42395 - DNA, 17 bp, Arabidopsis thaliana
aggtgatgggattgcct

SEQ ID NO: 42396 - DNA, 17 bp, Arabidopsis thaliana
aggtgatgtcggtgaga

SEQ ID NO: 42397 - DNA, 17 bp, Arabidopsis thaliana
aggtgatgttgaatggc

SEQ ID NO: 42398 - DNA, 17 bp, Arabidopsis thaliana
aggtgatgttgctgggg

SEQ ID NO: 42399 - DNA, 17 bp, Arabidopsis thaliana
aggtgatgttggatggc

SEQ ID NO: 42400 - DNA, 17 bp, Arabidopsis thaliana
aggtgattaatcgggta

SEQ ID NO: 42401 - DNA, 17 bp, Arabidopsis thaliana
aggtgattaccccggga

SEQ ID NO: 42402 - DNA, 17 bp, Arabidopsis thaliana
aggtgattatcccaatc

SEQ ID NO: 42403 - DNA, 17 bp, Arabidopsis thaliana
aggtgattctaatggag

SEQ ID NO: 42404 - DNA, 17 bp, Arabidopsis thaliana
aggtgattcttcactgg

SEQ ID NO: 42405 - DNA, 17 bp, Arabidopsis thaliana
aggtgattcttcattgg

SEQ ID NO: 42406 - DNA, 17 bp, Arabidopsis thaliana
aggtgattggttcgtct

SEQ ID NO: 42407 - DNA, 17 bp, Arabidopsis thaliana
aggtgattgtccgtttt

SEQ ID NO: 42408 - DNA, 17 bp, Arabidopsis thaliana
aggtgatttccaagtgt

SEQ ID NO: 42409 - DNA, 17 bp, Arabidopsis thaliana
aggtgatttccacgtgg

SEQ ID NO: 42410 - DNA, 17 bp, Arabidopsis thaliana
aggtgatttccacgtgt

SEQ ID NO: 42411 - DNA, 17 bp, Arabidopsis thaliana
aggtgatttggggctgt

SEQ ID NO: 42412 - DNA, 17 bp, Arabidopsis thaliana
aggtgattttcgacaag

SEQ ID NO: 42413 - DNA, 17 bp, Arabidopsis thaliana
aggtgcaacgttttttc

SEQ ID NO: 42414 - DNA, 17 bp, Arabidopsis thaliana
aggtgcacctgctgctg

SEQ ID NO: 42415 - DNA, 17 bp, Arabidopsis thaliana
aggtgcagcagggagtg

SEQ ID NO: 42416 - DNA, 17 bp, Arabidopsis thaliana
aggtgcagcctatttga

SEQ ID NO: 42417 - DNA, 17 bp, Arabidopsis thaliana
aggtgcatgggattgtg

SEQ ID NO: 42418 - DNA, 17 bp, Arabidopsis thaliana
aggtgcattggattgtg

SEQ ID NO: 42419 - DNA, 17 bp, Arabidopsis thaliana
aggtgccacctgctgct

SEQ ID NO: 42420 - DNA, 17 bp, Arabidopsis thaliana
aggtgccagaggttcca

SEQ ID NO: 42421 - DNA, 17 bp, Arabidopsis thaliana
aggtgccatctggagac

SEQ ID NO: 42422 - DNA, 17 bp, Arabidopsis thaliana
aggtgcccaaaatgacc

SEQ ID NO: 42423 - DNA, 17 bp, Arabidopsis thaliana
aggtgcccaaatcaatt

SEQ ID NO: 42424 - DNA, 17 bp, Arabidopsis thaliana
aggtgcccaactgcgcg

SEQ ID NO: 42425 - DNA, 17 bp, Arabidopsis thaliana
aggtgccgctggatcac

SEQ ID NO: 42426 - DNA, 17 bp, Arabidopsis thaliana
aggtgccgtctgtcgtg

SEQ ID NO: 42427 - DNA, 17 bp, Arabidopsis thaliana
aggtgcctgcggaagga

SEQ ID NO: 42428 - DNA, 17 bp, Arabidopsis thaliana
aggtgcgacgctggtgt

SEQ ID NO: 42429 - DNA, 17 bp, Arabidopsis thaliana
aggtgcgatttctactt

SEQ ID NO: 42430 - DNA, 17 bp, Arabidopsis thaliana
aggtgcgattttggtta

SEQ ID NO: 42431 - DNA, 17 bp, Arabidopsis thaliana
aggtgcgctgacgtggc

SEQ ID NO: 42432 - DNA, 17 bp, Arabidopsis thaliana
aggtgcggcaggttatc

SEQ ID NO: 42433 - DNA, 17 bp, Arabidopsis thaliana
aggtgcggctggatcac

SEQ ID NO: 42434 - DNA, 17 bp, Arabidopsis thaliana
aggtgcggctggatcgc

SEQ ID NO: 42435 - DNA, 17 bp, Arabidopsis thaliana
aggtgcggctgtatcac

SEQ ID NO: 42436 - DNA, 17 bp, Arabidopsis thaliana
aggtgcgggtggatgat

SEQ ID NO: 42437 - DNA, 17 bp, Arabidopsis thaliana
aggtgcggtgcggtgag

SEQ ID NO: 42438 - DNA, 17 bp, Arabidopsis thaliana
aggtgcgtgcggcttat

SEQ ID NO: 42439 - DNA, 17 bp, Arabidopsis thaliana
aggtgcgtgggagacat

SEQ ID NO: 42440 - DNA, 17 bp, Arabidopsis thaliana
aggtgcgtgtttaccgg

SEQ ID NO: 42441 - DNA, 17 bp, Arabidopsis thaliana
aggtgctacgcgttcat

SEQ ID NO: 42442 - DNA, 17 bp, Arabidopsis thaliana
aggtgctagtcgatttg

SEQ ID NO: 42443 - DNA, 17 bp, Arabidopsis thaliana
aggtgctatagagttga

SEQ ID NO: 42444 - DNA, 17 bp, Arabidopsis thaliana
aggtgctattggaaact

SEQ ID NO: 42445 - DNA, 17 bp, Arabidopsis thaliana
aggtgctcggttgcgct

SEQ ID NO: 42446 - DNA, 17 bp, Arabidopsis thaliana
aggtgctctcagaattg

SEQ ID NO: 42447 - DNA, 17 bp, Arabidopsis thaliana
aggtgctgagtgtgcta

SEQ ID NO: 42448 - DNA, 17 bp, Arabidopsis thaliana
aggtgctgagttttgat

SEQ ID NO: 42449 - DNA, 17 bp, Arabidopsis thaliana
aggtgctgcatggctgt

SEQ ID NO: 42450 - DNA, 17 bp, Arabidopsis thaliana
aggtgctgccaaacccg

SEQ ID NO: 42451 - DNA, 17 bp, Arabidopsis thaliana
aggtgctgccgctgcag

SEQ ID NO: 42452 - DNA, 17 bp, Arabidopsis thaliana
aggtgctgtggtttcga

SEQ ID NO: 42453 - DNA, 17 bp, Arabidopsis thaliana
aggtgcttcggtctcaa

SEQ ID NO: 42454 - DNA, 17 bp, Arabidopsis thaliana
aggtgcttcgtagccag

SEQ ID NO: 42455 - DNA, 17 bp, Arabidopsis thaliana
aggtgcttcttgtgttg

SEQ ID NO: 42456 - DNA, 17 bp, Arabidopsis thaliana
aggtgcttgaactttga

SEQ ID NO: 42457 - DNA, 17 bp, Arabidopsis thaliana
aggtgcttggaagatat

SEQ ID NO: 42458 - DNA, 17 bp, Arabidopsis thaliana
aggtgctttggccattg

SEQ ID NO: 42459 - DNA, 17 bp, Arabidopsis thaliana
aggtgctttggccattt

SEQ ID NO: 42460 - DNA, 17 bp, Arabidopsis thaliana
aggtggaatgactcata

SEQ ID NO: 42461 - DNA, 17 bp, Arabidopsis thaliana
aggtggacaagaactcc

SEQ ID NO: 42462 - DNA, 17 bp, Arabidopsis thaliana
aggtggaccgcagtaac

SEQ ID NO: 42463 - DNA, 17 bp, Arabidopsis thaliana
aggtggacctatgttat

SEQ ID NO: 42464 - DNA, 17 bp, Arabidopsis thaliana
aggtggacgatcttcag

SEQ ID NO: 42465 - DNA, 17 bp, Arabidopsis thaliana
aggtggactatgcagtc

SEQ ID NO: 42466 - DNA, 17 bp, Arabidopsis thaliana
aggtggacttccattga

SEQ ID NO: 42467 - DNA, 17 bp, Arabidopsis thaliana
aggtggagatacctaag

SEQ ID NO: 42468 - DNA, 17 bp, Arabidopsis thaliana
aggtggagatactgggt

SEQ ID NO: 42469 - DNA, 17 bp, Arabidopsis thaliana
aggtggagatcttggga

SEQ ID NO: 42470 - DNA, 17 bp, Arabidopsis thaliana
aggtggagattatcaga

SEQ ID NO: 42471 - DNA, 17 bp, Arabidopsis thaliana
aggtggagcgatttgtc

SEQ ID NO: 42472 - DNA, 17 bp, Arabidopsis thaliana
aggtggaggtgctgggt

SEQ ID NO: 42473 - DNA, 17 bp, Arabidopsis thaliana
aggtggagtgactcata

SEQ ID NO: 42474 - DNA, 17 bp, Arabidopsis thaliana
aggtggatcctacattt

SEQ ID NO: 42475 - DNA, 17 bp, Arabidopsis thaliana
aggtggatgggccacta

SEQ ID NO: 42476 - DNA, 17 bp, Arabidopsis thaliana
aggtggcaagctctcat

SEQ ID NO: 42477 - DNA, 17 bp, Arabidopsis thaliana
aggtggcaggccgtgat

SEQ ID NO: 42478 - DNA, 17 bp, Arabidopsis thaliana
aggtggccgtagtgaag

SEQ ID NO: 42479 - DNA, 17 bp, Arabidopsis thaliana
aggtggcgagatagcct

SEQ ID NO: 42480 - DNA, 17 bp, Arabidopsis thaliana
aggtggcgatgagaaaa

SEQ ID NO: 42481 - DNA, 17 bp, Arabidopsis thaliana
aggtggcgggacaggaa

SEQ ID NO: 42482 - DNA, 17 bp, Arabidopsis thaliana
aggtggcggttggattt

SEQ ID NO: 42483 - DNA, 17 bp, Arabidopsis thaliana
aggtggcttttgttcca

SEQ ID NO: 42484 - DNA, 17 bp, Arabidopsis thaliana
aggtgggacccacggcg

SEQ ID NO: 42485 - DNA, 17 bp, Arabidopsis thaliana
aggtgggagcggtagcc

SEQ ID NO: 42486 - DNA, 17 bp, Arabidopsis thaliana
aggtgggaggacccgag

SEQ ID NO: 42487 - DNA, 17 bp, Arabidopsis thaliana
aggtgggagtgaggcca

SEQ ID NO: 42488 - DNA, 17 bp, Arabidopsis thaliana
aggtgggccagtggtag

SEQ ID NO: 42489 - DNA, 17 bp, Arabidopsis thaliana
aggtggggagtttggct

SEQ ID NO: 42490 - DNA, 17 bp, Arabidopsis thaliana
aggtggggccaaacctg

SEQ ID NO: 42491 - DNA, 17 bp, Arabidopsis thaliana
aggtgggtactcgacct

SEQ ID NO: 42492 - DNA, 17 bp, Arabidopsis thaliana
aggtgggtcagtgctct

SEQ ID NO: 42493 - DNA, 17 bp, Arabidopsis thaliana
aggtgggttagtctgca

SEQ ID NO: 42494 - DNA, 17 bp, Arabidopsis thaliana
aggtgggttatggatat

SEQ ID NO: 42495 - DNA, 17 bp, Arabidopsis thaliana
aggtggtcaaagggtgt

SEQ ID NO: 42496 - DNA, 17 bp, Arabidopsis thaliana
aggtggtccagaataga

SEQ ID NO: 42497 - DNA, 17 bp, Arabidopsis thaliana
aggtggtccatggagat

SEQ ID NO: 42498 - DNA, 17 bp, Arabidopsis thaliana
aggtggtcccatccgat

SEQ ID NO: 42499 - DNA, 17 bp, Arabidopsis thaliana
aggtggtcggcttttgt

SEQ ID NO: 42500 - DNA, 17 bp, Arabidopsis thaliana
aggtggtcttggcggtc

SEQ ID NO: 42501 - DNA, 17 bp, Arabidopsis thaliana
aggtggtgactgatgat

SEQ ID NO: 42502 - DNA, 17 bp, Arabidopsis thaliana
aggtggtgcatggctgc

SEQ ID NO: 42503 - DNA, 17 bp, Arabidopsis thaliana
aggtggtgcatggctgt

SEQ ID NO: 42504 - DNA, 17 bp, Arabidopsis thaliana
aggtggtgcggaacaag

SEQ ID NO: 42505 - DNA, 17 bp, Arabidopsis thaliana
aggtggtgctgctggta

SEQ ID NO: 42506 - DNA, 17 bp, Arabidopsis thaliana
aggtggtggcggctgtc

SEQ ID NO: 42507 - DNA, 17 bp, Arabidopsis thaliana
aggtggtgggccacgct

SEQ ID NO: 42508 - DNA, 17 bp, Arabidopsis thaliana
aggtggtgggggaacgg

SEQ ID NO: 42509 - DNA, 17 bp, Arabidopsis thaliana
aggtggtggtggtggcg

SEQ ID NO: 42510 - DNA, 17 bp, Arabidopsis thaliana
aggtggtgtgccagaca

SEQ ID NO: 42511 - DNA, 17 bp, Arabidopsis thaliana
aggtggttaccgatact

SEQ ID NO: 42512 - DNA, 17 bp, Arabidopsis thaliana
aggtggttcagtttcgt

SEQ ID NO: 42513 - DNA, 17 bp, Arabidopsis thaliana
aggtggtttcgaaccga

SEQ ID NO: 42514 - DNA, 17 bp, Arabidopsis thaliana
aggtggttttcgaagtt

SEQ ID NO: 42515 - DNA, 17 bp, Arabidopsis thaliana
aggtggtttttattggg

SEQ ID NO: 42516 - DNA, 17 bp, Arabidopsis thaliana
aggtgtaactcagtttg

SEQ ID NO: 42517 - DNA, 17 bp, Arabidopsis thaliana
aggtgtaccgtctgagg

SEQ ID NO: 42518 - DNA, 17 bp, Arabidopsis thaliana
aggtgtacctgcggaag

SEQ ID NO: 42519 - DNA, 17 bp, Arabidopsis thaliana
aggtgtacgttttttcg

SEQ ID NO: 42520 - DNA, 17 bp, Arabidopsis thaliana
aggtgtactatgcatgc

SEQ ID NO: 42521 - DNA, 17 bp, Arabidopsis thaliana
aggtgtagacatccggg

SEQ ID NO: 42522 - DNA, 17 bp, Arabidopsis thaliana
aggtgtaggataagtgg

SEQ ID NO: 42523 - DNA, 17 bp, Arabidopsis thaliana
aggtgtatcatctgaat

SEQ ID NO: 42524 - DNA, 17 bp, Arabidopsis thaliana
aggtgtcaagctgtgat

SEQ ID NO: 42525 - DNA, 17 bp, Arabidopsis thaliana
aggtgtcaagttgttaa

SEQ ID NO: 42526 - DNA, 17 bp, Arabidopsis thaliana
aggtgtcatctctcgtg

SEQ ID NO: 42527 - DNA, 17 bp, Arabidopsis thaliana
aggtgtccatcaagcgc

SEQ ID NO: 42528 - DNA, 17 bp, Arabidopsis thaliana
aggtgtcctaagatgag

SEQ ID NO: 42529 - DNA, 17 bp, Arabidopsis thaliana
aggtgtccttttctggc

SEQ ID NO: 42530 - DNA, 17 bp, Arabidopsis thaliana
aggtgtcgcatgagccc

SEQ ID NO: 42531 - DNA, 17 bp, Arabidopsis thaliana
aggtgtcgctctagtct

SEQ ID NO: 42532 - DNA, 17 bp, Arabidopsis thaliana
aggtgtcggaactgtgc

SEQ ID NO: 42533 - DNA, 17 bp, Arabidopsis thaliana
aggtgtcgtatatcgtg

SEQ ID NO: 42534 - DNA, 17 bp, Arabidopsis thaliana
aggtgtcgtctatcgtg

SEQ ID NO: 42535 - DNA, 17 bp, Arabidopsis thaliana
aggtgtcgtctgtcgtg

SEQ ID NO: 42536 - DNA, 17 bp, Arabidopsis thaliana
aggtgtcgtgtatcgtg

SEQ ID NO: 42537 - DNA, 17 bp, Arabidopsis thaliana
aggtgtgaaggcagcca

SEQ ID NO: 42538 - DNA, 17 bp, Arabidopsis thaliana
aggtgtgaagggtgaaa

SEQ ID NO: 42539 - DNA, 17 bp, Arabidopsis thaliana
aggtgtgacaatcttaa

SEQ ID NO: 42540 - DNA, 17 bp, Arabidopsis thaliana
aggtgtgaccgcgagtt

SEQ ID NO: 42541 - DNA, 17 bp, Arabidopsis thaliana
aggtgtgatggctgtag

SEQ ID NO: 42542 - DNA, 17 bp, Arabidopsis thaliana
aggtgtgcaggacttgt

SEQ ID NO: 42543 - DNA, 17 bp, Arabidopsis thaliana
aggtgtgcattggtcca

SEQ ID NO: 42544 - DNA, 17 bp, Arabidopsis thaliana
aggtgtgcattggtcga

SEQ ID NO: 42545 - DNA, 17 bp, Arabidopsis thaliana
aggtgtgcattggtcgg

SEQ ID NO: 42546 - DNA, 17 bp, Arabidopsis thaliana
aggtgtgcctgcggaag

SEQ ID NO: 42547 - DNA, 17 bp, Arabidopsis thaliana
aggtgtgcctgggtgtc

SEQ ID NO: 42548 - DNA, 17 bp, Arabidopsis thaliana
aggtgtgcgtgtggata

SEQ ID NO: 42549 - DNA, 17 bp, Arabidopsis thaliana
aggtgtgcttaggcgtt

SEQ ID NO: 42550 - DNA, 17 bp, Arabidopsis thaliana
aggtgtggaccattagg

SEQ ID NO: 42551 - DNA, 17 bp, Arabidopsis thaliana
aggtgtggcctgcaatt

SEQ ID NO: 42552 - DNA, 17 bp, Arabidopsis thaliana
aggtgtgggctgggata

SEQ ID NO: 42553 - DNA, 17 bp, Arabidopsis thaliana
aggtgtgtattggtcgg

SEQ ID NO: 42554 - DNA, 17 bp, Arabidopsis thaliana
aggtgtgtcatctatgg

SEQ ID NO: 42555 - DNA, 17 bp, Arabidopsis thaliana
aggtgtgtctgcggatc

SEQ ID NO: 42556 - DNA, 17 bp, Arabidopsis thaliana
aggtgtgtgattttttc

SEQ ID NO: 42557 - DNA, 17 bp, Arabidopsis thaliana
aggtgtgtgggtcaggt

SEQ ID NO: 42558 - DNA, 17 bp, Arabidopsis thaliana
aggtgtgttcgatgact

SEQ ID NO: 42559 - DNA, 17 bp, Arabidopsis thaliana
aggtgtgttgactctgt

SEQ ID NO: 42560 - DNA, 17 bp, Arabidopsis thaliana
aggtgttaactaagact

SEQ ID NO: 42561 - DNA, 17 bp, Arabidopsis thaliana
aggtgttacagatttaa

SEQ ID NO: 42562 - DNA, 17 bp, Arabidopsis thaliana
aggtgttccatcgccag

SEQ ID NO: 42563 - DNA, 17 bp, Arabidopsis thaliana
aggtgttcggtcttggg

SEQ ID NO: 42564 - DNA, 17 bp, Arabidopsis thaliana
aggtgttctccgggtca

SEQ ID NO: 42565 - DNA, 17 bp, Arabidopsis thaliana
aggtgttctgacgtggg

SEQ ID NO: 42566 - DNA, 17 bp, Arabidopsis thaliana
aggtgttgagactcatt

SEQ ID NO: 42567 - DNA, 17 bp, Arabidopsis thaliana
aggtgttgcgctcatat

SEQ ID NO: 42568 - DNA, 17 bp, Arabidopsis thaliana
aggtgttggatgatggg

SEQ ID NO: 42569 - DNA, 17 bp, Arabidopsis thaliana
aggtgttgtcttcgtgg

SEQ ID NO: 42570 - DNA, 17 bp, Arabidopsis thaliana
aggtgttgtggtctccc

SEQ ID NO: 42571 - DNA, 17 bp, Arabidopsis thaliana
aggtgtttatggttcct

SEQ ID NO: 42572 - DNA, 17 bp, Arabidopsis thaliana
aggtgtttcagcacttc

SEQ ID NO: 42573 - DNA, 17 bp, Arabidopsis thaliana
aggtgtttcatcggttg

SEQ ID NO: 42574 - DNA, 17 bp, Arabidopsis thaliana
aggtgtttccacagccg

SEQ ID NO: 42575 - DNA, 17 bp, Arabidopsis thaliana
aggtgtttggctgagca

SEQ ID NO: 42576 - DNA, 17 bp, Arabidopsis thaliana
aggtgtttgtcgcattt

SEQ ID NO: 42577 - DNA, 17 bp, Arabidopsis thaliana
aggtgtttgtgattccg

SEQ ID NO: 42578 - DNA, 17 bp, Arabidopsis thaliana
aggttaaagatggatcc

SEQ ID NO: 42579 - DNA, 17 bp, Arabidopsis thaliana
aggttaaatcttctttc

SEQ ID NO: 42580 - DNA, 17 bp, Arabidopsis thaliana
aggttaaccccgttaac

SEQ ID NO: 42581 - DNA, 17 bp, Arabidopsis thaliana
aggttaacccgcctgtc

SEQ ID NO: 42582 - DNA, 17 bp, Arabidopsis thaliana
aggttaaccggtccatt

SEQ ID NO: 42583 - DNA, 17 bp, Arabidopsis thaliana
aggttaactacacggct

SEQ ID NO: 42584 - DNA, 17 bp, Arabidopsis thaliana
aggttaaggaagttggt

SEQ ID NO: 42585 - DNA, 17 bp, Arabidopsis thaliana
aggttaaggcgggtctg

SEQ ID NO: 42586 - DNA, 17 bp, Arabidopsis thaliana
aggttaaggtttagcca

SEQ ID NO: 42587 - DNA, 17 bp, Arabidopsis thaliana
aggttaaggtttagcgt

SEQ ID NO: 42588 - DNA, 17 bp, Arabidopsis thaliana
aggttaagtccacattc

SEQ ID NO: 42589 - DNA, 17 bp, Arabidopsis thaliana
aggttaatctgcatatg

SEQ ID NO: 42590 - DNA, 17 bp, Arabidopsis thaliana
aggttacactcagtggc

SEQ ID NO: 42591 - DNA, 17 bp, Arabidopsis thaliana
aggttacaggtgctgcc

SEQ ID NO: 42592 - DNA, 17 bp, Arabidopsis thaliana
aggttacagtctctagg

SEQ ID NO: 42593 - DNA, 17 bp, Arabidopsis thaliana
aggttaccagaagttat

SEQ ID NO: 42594 - DNA, 17 bp, Arabidopsis thaliana
aggttaccatcacggtt

SEQ ID NO: 42595 - DNA, 17 bp, Arabidopsis thaliana
aggttaccggcccgtct

SEQ ID NO: 42596 - DNA, 17 bp, Arabidopsis thaliana
aggttacgaaaggataa

SEQ ID NO: 42597 - DNA, 17 bp, Arabidopsis thaliana
aggttacggcgaatttt

SEQ ID NO: 42598 - DNA, 17 bp, Arabidopsis thaliana
aggttacttttgctctt

SEQ ID NO: 42599 - DNA, 17 bp, Arabidopsis thaliana
aggttagccattggatg

SEQ ID NO: 42600 - DNA, 17 bp, Arabidopsis thaliana
aggttagccgaaagatg

SEQ ID NO: 42601 - DNA, 17 bp, Arabidopsis thaliana
aggttagcgattggcac

SEQ ID NO: 42602 - DNA, 17 bp, Arabidopsis thaliana
aggttagctcgacaagt

SEQ ID NO: 42603 - DNA, 17 bp, Arabidopsis thaliana
aggttaggagatgacct

SEQ ID NO: 42604 - DNA, 17 bp, Arabidopsis thaliana
aggttaggttctgagcc

SEQ ID NO: 42605 - DNA, 17 bp, Arabidopsis thaliana
aggttagtactttgctg

SEQ ID NO: 42606 - DNA, 17 bp, Arabidopsis thaliana
aggttataccgtcacat

SEQ ID NO: 42607 - DNA, 17 bp, Arabidopsis thaliana
aggttataccttcacat

SEQ ID NO: 42608 - DNA, 17 bp, Arabidopsis thaliana
aggttatcaaatgaggc

SEQ ID NO: 42609 - DNA, 17 bp, Arabidopsis thaliana
aggttatcagacgcaat

SEQ ID NO: 42610 - DNA, 17 bp, Arabidopsis thaliana
aggttatcagatttctt

SEQ ID NO: 42611 - DNA, 17 bp, Arabidopsis thaliana
aggttatcagtaagagc

SEQ ID NO: 42612 - DNA, 17 bp, Arabidopsis thaliana
aggttatctgtaggatt

SEQ ID NO: 42613 - DNA, 17 bp, Arabidopsis thaliana
aggttatctgtttggtt

SEQ ID NO: 42614 - DNA, 17 bp, Arabidopsis thaliana
aggttatgaatccacgc

SEQ ID NO: 42615 - DNA, 17 bp, Arabidopsis thaliana
aggttatgtcgcaggag

SEQ ID NO: 42616 - DNA, 17 bp, Arabidopsis thaliana
aggttatgttctccggt

SEQ ID NO: 42617 - DNA, 17 bp, Arabidopsis thaliana
aggttattccgaattat

SEQ ID NO: 42618 - DNA, 17 bp, Arabidopsis thaliana
aggttattggtcgatct

SEQ ID NO: 42619 - DNA, 17 bp, Arabidopsis thaliana
aggttattggtgcgatt

SEQ ID NO: 42620 - DNA, 17 bp, Arabidopsis thaliana
aggttattgttggcttg

SEQ ID NO: 42621 - DNA, 17 bp, Arabidopsis thaliana
aggttcaaacactaggt

SEQ ID NO: 42622 - DNA, 17 bp, Arabidopsis thaliana
aggttcaaaggccctac

SEQ ID NO: 42623 - DNA, 17 bp, Arabidopsis thaliana
aggttcaaaggttctac

SEQ ID NO: 42624 - DNA, 17 bp, Arabidopsis thaliana
aggttcaaatcctacag

SEQ ID NO: 42625 - DNA, 17 bp, Arabidopsis thaliana
aggttcaaatcctactt

SEQ ID NO: 42626 - DNA, 17 bp, Arabidopsis thaliana
aggttcaacaacagatc

SEQ ID NO: 42627 - DNA, 17 bp, Arabidopsis thaliana
aggttcaagaacggatc

SEQ ID NO: 42628 - DNA, 17 bp, Arabidopsis thaliana
aggttcaagaagtcggc

SEQ ID NO: 42629 - DNA, 17 bp, Arabidopsis thaliana
aggttcaatcgcggtgc

SEQ ID NO: 42630 - DNA, 17 bp, Arabidopsis thaliana
aggttcaatgtcccggt

SEQ ID NO: 42631 - DNA, 17 bp, Arabidopsis thaliana
aggttcaatgtcgtctt

SEQ ID NO: 42632 - DNA, 17 bp, Arabidopsis thaliana
aggttcaatgtctggga

SEQ ID NO: 42633 - DNA, 17 bp, Arabidopsis thaliana
aggttcacataacgcaa

SEQ ID NO: 42634 - DNA, 17 bp, Arabidopsis thaliana
aggttcacattgtctag

SEQ ID NO: 42635 - DNA, 17 bp, Arabidopsis thaliana
aggttcaccggattacg

SEQ ID NO: 42636 - DNA, 17 bp, Arabidopsis thaliana
aggttcactcgagttcc

SEQ ID NO: 42637 - DNA, 17 bp, Arabidopsis thaliana
aggttcactcttctcgg

SEQ ID NO: 42638 - DNA, 17 bp, Arabidopsis thaliana
aggttcagacgatctct

SEQ ID NO: 42639 - DNA, 17 bp, Arabidopsis thaliana
aggttcagatccgtcta

SEQ ID NO: 42640 - DNA, 17 bp, Arabidopsis thaliana
aggttcagattctcaga

SEQ ID NO: 42641 - DNA, 17 bp, Arabidopsis thaliana
aggttcagcccgaggtc

SEQ ID NO: 42642 - DNA, 17 bp, Arabidopsis thaliana
aggttcagctgcgagtc

SEQ ID NO: 42643 - DNA, 17 bp, Arabidopsis thaliana
aggttcagggccgaaac

SEQ ID NO: 42644 - DNA, 17 bp, Arabidopsis thaliana
aggttcagtcactttct

SEQ ID NO: 42645 - DNA, 17 bp, Arabidopsis thaliana
aggttcagttgtagcat

SEQ ID NO: 42646 - DNA, 17 bp, Arabidopsis thaliana
aggttcatatctaggtc

SEQ ID NO: 42647 - DNA, 17 bp, Arabidopsis thaliana
aggttcatccaattgtc

SEQ ID NO: 42648 - DNA, 17 bp, Arabidopsis thaliana
aggttcatcctgccgtt

SEQ ID NO: 42649 - DNA, 17 bp, Arabidopsis thaliana
aggttccatgtgaacgg

SEQ ID NO: 42650 - DNA, 17 bp, Arabidopsis thaliana
aggttccattaggttca

SEQ ID NO: 42651 - DNA, 17 bp, Arabidopsis thaliana
aggttcccaccactctt

SEQ ID NO: 42652 - DNA, 17 bp, Arabidopsis thaliana
aggttccccaatagacc

SEQ ID NO: 42653 - DNA, 17 bp, Arabidopsis thaliana
aggttccccccctcctt

SEQ ID NO: 42654 - DNA, 17 bp, Arabidopsis thaliana
aggttccccccctctct

SEQ ID NO: 42655 - DNA, 17 bp, Arabidopsis thaliana
aggttcccccctctctc

SEQ ID NO: 42656 - DNA, 17 bp, Arabidopsis thaliana
aggttccccctacctga

SEQ ID NO: 42657 - DNA, 17 bp, Arabidopsis thaliana
aggttccccctacctgg

SEQ ID NO: 42658 - DNA, 17 bp, Arabidopsis thaliana
aggttccccctccttcc

SEQ ID NO: 42659 - DNA, 17 bp, Arabidopsis thaliana
aggttccccctccttct

SEQ ID NO: 42660 - DNA, 17 bp, Arabidopsis thaliana
aggttccccctctctct

SEQ ID NO: 42661 - DNA, 17 bp, Arabidopsis thaliana
aggttcccctccctctc

SEQ ID NO: 42662 - DNA, 17 bp, Arabidopsis thaliana
aggttcccgaagtgcga

SEQ ID NO: 42663 - DNA, 17 bp, Arabidopsis thaliana
aggttcccggcccatca

SEQ ID NO: 42664 - DNA, 17 bp, Arabidopsis thaliana
aggttccgactaagcgt

SEQ ID NO: 42665 - DNA, 17 bp, Arabidopsis thaliana
aggttccgactaatccg

SEQ ID NO: 42666 - DNA, 17 bp, Arabidopsis thaliana
aggttccgattgataac

SEQ ID NO: 42667 - DNA, 17 bp, Arabidopsis thaliana
aggttccgctggattcc

SEQ ID NO: 42668 - DNA, 17 bp, Arabidopsis thaliana
aggttccggagtggttg

SEQ ID NO: 42669 - DNA, 17 bp, Arabidopsis thaliana
aggttcctgaaggtgga

SEQ ID NO: 42670 - DNA, 17 bp, Arabidopsis thaliana
aggttcctgctcattcg

SEQ ID NO: 42671 - DNA, 17 bp, Arabidopsis thaliana
aggttcctgtccagttt

SEQ ID NO: 42672 - DNA, 17 bp, Arabidopsis thaliana
aggttccttcaatatgg

SEQ ID NO: 42673 - DNA, 17 bp, Arabidopsis thaliana
aggttccttcattcatt

SEQ ID NO: 42674 - DNA, 17 bp, Arabidopsis thaliana
aggttcctttgaccaat

SEQ ID NO: 42675 - DNA, 17 bp, Arabidopsis thaliana
aggttcgaaaaggtagg

SEQ ID NO: 42676 - DNA, 17 bp, Arabidopsis thaliana
aggttcgaaacctgcat

SEQ ID NO: 42677 - DNA, 17 bp, Arabidopsis thaliana
aggttcgaaatcgggat

SEQ ID NO: 42678 - DNA, 17 bp, Arabidopsis thaliana
aggttcgaaatctgcat

SEQ ID NO: 42679 - DNA, 17 bp, Arabidopsis thaliana
aggttcgaaccctgctg

SEQ ID NO: 42680 - DNA, 17 bp, Arabidopsis thaliana
aggttcgaaccctggtg

SEQ ID NO: 42681 - DNA, 17 bp, Arabidopsis thaliana
aggttcgaaccctgtcc

SEQ ID NO: 42682 - DNA, 17 bp, Arabidopsis thaliana
aggttcgaacggccaga

SEQ ID NO: 42683 - DNA, 17 bp, Arabidopsis thaliana
aggttcgaatcctactt

SEQ ID NO: 42684 - DNA, 17 bp, Arabidopsis thaliana
aggttcgaatcctgccg

SEQ ID NO: 42685 - DNA, 17 bp, Arabidopsis thaliana
aggttcgaatcctgctg

SEQ ID NO: 42686 - DNA, 17 bp, Arabidopsis thaliana
aggttcgaatcctgtca

SEQ ID NO: 42687 - DNA, 17 bp, Arabidopsis thaliana
aggttcgaatccttccg

SEQ ID NO: 42688 - DNA, 17 bp, Arabidopsis thaliana
aggttcgaatccttcgg

SEQ ID NO: 42689 - DNA, 17 bp, Arabidopsis thaliana
aggttcgaatctttggt

SEQ ID NO: 42690 - DNA, 17 bp, Arabidopsis thaliana
aggttcgacattctaca

SEQ ID NO: 42691 - DNA, 17 bp, Arabidopsis thaliana
aggttcgaccccccctc

SEQ ID NO: 42692 - DNA, 17 bp, Arabidopsis thaliana
aggttcgacccctaccg

SEQ ID NO: 42693 - DNA, 17 bp, Arabidopsis thaliana
aggttcgacccctacct

SEQ ID NO: 42694 - DNA, 17 bp, Arabidopsis thaliana
aggttcgacccctccct

SEQ ID NO: 42695 - DNA, 17 bp, Arabidopsis thaliana
aggttcgacccctcctt

SEQ ID NO: 42696 - DNA, 17 bp, Arabidopsis thaliana
aggttcgaccctacctg

SEQ ID NO: 42697 - DNA, 17 bp, Arabidopsis thaliana
aggttcgacgccaactg

SEQ ID NO: 42698 - DNA, 17 bp, Arabidopsis thaliana
aggttcgactaagcgtt

SEQ ID NO: 42699 - DNA, 17 bp, Arabidopsis thaliana
aggttcgactctctctc

SEQ ID NO: 42700 - DNA, 17 bp, Arabidopsis thaliana
aggttcgagagtcgggt

SEQ ID NO: 42701 - DNA, 17 bp, Arabidopsis thaliana
aggttcgagccctcttc

SEQ ID NO: 42702 - DNA, 17 bp, Arabidopsis thaliana
aggttcgagtaccaggc

SEQ ID NO: 42703 - DNA, 17 bp, Arabidopsis thaliana
aggttcgagtcccaact

SEQ ID NO: 42704 - DNA, 17 bp, Arabidopsis thaliana
aggttcgagtcccagct

SEQ ID NO: 42705 - DNA, 17 bp, Arabidopsis thaliana
aggttcgagtcccctac

SEQ ID NO: 42706 - DNA, 17 bp, Arabidopsis thaliana
aggttcgagtcctcttc

SEQ ID NO: 42707 - DNA, 17 bp, Arabidopsis thaliana
aggttcgagtcctgttc

SEQ ID NO: 42708 - DNA, 17 bp, Arabidopsis thaliana
aggttcgagtccttcaa

SEQ ID NO: 42709 - DNA, 17 bp, Arabidopsis thaliana
aggttcgagttccagct

SEQ ID NO: 42710 - DNA, 17 bp, Arabidopsis thaliana
aggttcgatcataggcc

SEQ ID NO: 42711 - DNA, 17 bp, Arabidopsis thaliana
aggttcgatccccacag

SEQ ID NO: 42712 - DNA, 17 bp, Arabidopsis thaliana
aggttcgatccctgtat

SEQ ID NO: 42713 - DNA, 17 bp, Arabidopsis thaliana
aggttcgattccactag

SEQ ID NO: 42714 - DNA, 17 bp, Arabidopsis thaliana
aggttcgattctcagta

SEQ ID NO: 42715 - DNA, 17 bp, Arabidopsis thaliana
aggttcgcaatggccac

SEQ ID NO: 42716 - DNA, 17 bp, Arabidopsis thaliana
aggttcgccacggaggg

SEQ ID NO: 42717 - DNA, 17 bp, Arabidopsis thaliana
aggttcgcccaaataga

SEQ ID NO: 42718 - DNA, 17 bp, Arabidopsis thaliana
aggttcgccccctacct

SEQ ID NO: 42719 - DNA, 17 bp, Arabidopsis thaliana
aggttcgccccctctct

SEQ ID NO: 42720 - DNA, 17 bp, Arabidopsis thaliana
aggttcgccgcgatctc

SEQ ID NO: 42721 - DNA, 17 bp, Arabidopsis thaliana
aggttcgcgattttgga

SEQ ID NO: 42722 - DNA, 17 bp, Arabidopsis thaliana
aggttcgcgattttggt

SEQ ID NO: 42723 - DNA, 17 bp, Arabidopsis thaliana
aggttcgcgattttgtt

SEQ ID NO: 42724 - DNA, 17 bp, Arabidopsis thaliana
aggttcgctcgagttcc

SEQ ID NO: 42725 - DNA, 17 bp, Arabidopsis thaliana
aggttcgctgacgtggc

SEQ ID NO: 42726 - DNA, 17 bp, Arabidopsis thaliana
aggttcggaacctgcat

SEQ ID NO: 42727 - DNA, 17 bp, Arabidopsis thaliana
aggttcggagcttttcc

SEQ ID NO: 42728 - DNA, 17 bp, Arabidopsis thaliana
aggttcggatcctgctg

SEQ ID NO: 42729 - DNA, 17 bp, Arabidopsis thaliana
aggttcggatcggaccc

SEQ ID NO: 42730 - DNA, 17 bp, Arabidopsis thaliana
aggttcggatcggattt

SEQ ID NO: 42731 - DNA, 17 bp, Arabidopsis thaliana
aggttcggattctgcga

SEQ ID NO: 42732 - DNA, 17 bp, Arabidopsis thaliana
aggttcggattgggttc

SEQ ID NO: 42733 - DNA, 17 bp, Arabidopsis thaliana
aggttcggcccctacct

SEQ ID NO: 42734 - DNA, 17 bp, Arabidopsis thaliana
aggttcggcccctcctt

SEQ ID NO: 42735 - DNA, 17 bp, Arabidopsis thaliana
aggttcggctcctacct

SEQ ID NO: 42736 - DNA, 17 bp, Arabidopsis thaliana
aggttcggctctgatac

SEQ ID NO: 42737 - DNA, 17 bp, Arabidopsis thaliana
aggttcgggtagaaccc

SEQ ID NO: 42738 - DNA, 17 bp, Arabidopsis thaliana
aggttcggtccctgtat

SEQ ID NO: 42739 - DNA, 17 bp, Arabidopsis thaliana
aggttcggttcggattt

SEQ ID NO: 42740 - DNA, 17 bp, Arabidopsis thaliana
aggttcggttgggggcg

SEQ ID NO: 42741 - DNA, 17 bp, Arabidopsis thaliana
aggttcgtaacgtattt

SEQ ID NO: 42742 - DNA, 17 bp, Arabidopsis thaliana
aggttcgtaccctgctg

SEQ ID NO: 42743 - DNA, 17 bp, Arabidopsis thaliana
aggttcgtacgtacact

SEQ ID NO: 42744 - DNA, 17 bp, Arabidopsis thaliana
aggttcgtatcctgccg

SEQ ID NO: 42745 - DNA, 17 bp, Arabidopsis thaliana
aggttcgtccacggagg

SEQ ID NO: 42746 - DNA, 17 bp, Arabidopsis thaliana
aggttcgtccgctcagg

SEQ ID NO: 42747 - DNA, 17 bp, Arabidopsis thaliana
aggttcgtctatggcct

SEQ ID NO: 42748 - DNA, 17 bp, Arabidopsis thaliana
aggttcgtgatcgacgt

SEQ ID NO: 42749 - DNA, 17 bp, Arabidopsis thaliana
aggttcgtgtcccactg

SEQ ID NO: 42750 - DNA, 17 bp, Arabidopsis thaliana
aggttcgtgtcccggca

SEQ ID NO: 42751 - DNA, 17 bp, Arabidopsis thaliana
aggttcgttccccacag

SEQ ID NO: 42752 - DNA, 17 bp, Arabidopsis thaliana
aggttcgttccctgtat

SEQ ID NO: 42753 - DNA, 17 bp, Arabidopsis thaliana
aggttcgttccctgttt

SEQ ID NO: 42754 - DNA, 17 bp, Arabidopsis thaliana
aggttcgttgattgttg

SEQ ID NO: 42755 - DNA, 17 bp, Arabidopsis thaliana
aggttcgtttcgcttct

SEQ ID NO: 42756 - DNA, 17 bp, Arabidopsis thaliana
aggttctaagccgaaac

SEQ ID NO: 42757 - DNA, 17 bp, Arabidopsis thaliana
aggttctaaggcgaagt

SEQ ID NO: 42758 - DNA, 17 bp, Arabidopsis thaliana
aggttctaatccttccg

SEQ ID NO: 42759 - DNA, 17 bp, Arabidopsis thaliana
aggttctacaacatgtt

SEQ ID NO: 42760 - DNA, 17 bp, Arabidopsis thaliana
aggttctacatctccga

SEQ ID NO: 42761 - DNA, 17 bp, Arabidopsis thaliana
aggttctactaagttgt

SEQ ID NO: 42762 - DNA, 17 bp, Arabidopsis thaliana
aggttctacttgtgtct

SEQ ID NO: 42763 - DNA, 17 bp, Arabidopsis thaliana
aggttctaggccgaaac

SEQ ID NO: 42764 - DNA, 17 bp, Arabidopsis thaliana
aggttctaggccgaaat

SEQ ID NO: 42765 - DNA, 17 bp, Arabidopsis thaliana
aggttctaggccgaatc

SEQ ID NO: 42766 - DNA, 17 bp, Arabidopsis thaliana
aggttctatctggcgtg

SEQ ID NO: 42767 - DNA, 17 bp, Arabidopsis thaliana
aggttctcacaagtggt

SEQ ID NO: 42768 - DNA, 17 bp, Arabidopsis thaliana
aggttctccaggggtcg

SEQ ID NO: 42769 - DNA, 17 bp, Arabidopsis thaliana
aggttctccctcgtggc

SEQ ID NO: 42770 - DNA, 17 bp, Arabidopsis thaliana
aggttctccgacaaaat

SEQ ID NO: 42771 - DNA, 17 bp, Arabidopsis thaliana
aggttctccttgtcttc

SEQ ID NO: 42772 - DNA, 17 bp, Arabidopsis thaliana
aggttctcctttattgc

SEQ ID NO: 42773 - DNA, 17 bp, Arabidopsis thaliana
aggttctcggccgaatc

SEQ ID NO: 42774 - DNA, 17 bp, Arabidopsis thaliana
aggttctgaaagctcaa

SEQ ID NO: 42775 - DNA, 17 bp, Arabidopsis thaliana
aggttctgaaccgaagt

SEQ ID NO: 42776 - DNA, 17 bp, Arabidopsis thaliana
aggttctgaatggtgac

SEQ ID NO: 42777 - DNA, 17 bp, Arabidopsis thaliana
aggttctgaccacagac

SEQ ID NO: 42778 - DNA, 17 bp, Arabidopsis thaliana
aggttctgagccgaaag

SEQ ID NO: 42779 - DNA, 17 bp, Arabidopsis thaliana
aggttctgagccgaagc

SEQ ID NO: 42780 - DNA, 17 bp, Arabidopsis thaliana
aggttctgagccgaagg

SEQ ID NO: 42781 - DNA, 17 bp, Arabidopsis thaliana
aggttctgaggcgaaac

SEQ ID NO: 42782 - DNA, 17 bp, Arabidopsis thaliana
aggttctgcgctgaagc

SEQ ID NO: 42783 - DNA, 17 bp, Arabidopsis thaliana
aggttctgcgctgaggc

SEQ ID NO: 42784 - DNA, 17 bp, Arabidopsis thaliana
aggttctgctcgtgatg

SEQ ID NO: 42785 - DNA, 17 bp, Arabidopsis thaliana
aggttctgcttccatct

SEQ ID NO: 42786 - DNA, 17 bp, Arabidopsis thaliana
aggttctggaatgctga

SEQ ID NO: 42787 - DNA, 17 bp, Arabidopsis thaliana
aggttctggacccctct

SEQ ID NO: 42788 - DNA, 17 bp, Arabidopsis thaliana
aggttctggaccgaaac

SEQ ID NO: 42789 - DNA, 17 bp, Arabidopsis thaliana
aggttctggaccgaagc

SEQ ID NO: 42790 - DNA, 17 bp, Arabidopsis thaliana
aggttctggatcccctt

SEQ ID NO: 42791 - DNA, 17 bp, Arabidopsis thaliana
aggttctggatccctct

SEQ ID NO: 42792 - DNA, 17 bp, Arabidopsis thaliana
aggttctggatctctct

SEQ ID NO: 42793 - DNA, 17 bp, Arabidopsis thaliana
aggttctggccgaagcc

SEQ ID NO: 42794 - DNA, 17 bp, Arabidopsis thaliana
aggttctgggacaaagc

SEQ ID NO: 42795 - DNA, 17 bp, Arabidopsis thaliana
aggttctgggccaaagc

SEQ ID NO: 42796 - DNA, 17 bp, Arabidopsis thaliana
aggttctgggccgaaac

SEQ ID NO: 42797 - DNA, 17 bp, Arabidopsis thaliana
aggttctgggccgaaat

SEQ ID NO: 42798 - DNA, 17 bp, Arabidopsis thaliana
aggttctgggccgaagc

SEQ ID NO: 42799 - DNA, 17 bp, Arabidopsis thaliana
aggttctgggccgaatc

SEQ ID NO: 42800 - DNA, 17 bp, Arabidopsis thaliana
aggttctgggccgaatt

SEQ ID NO: 42801 - DNA, 17 bp, Arabidopsis thaliana
aggttctgggccgataa

SEQ ID NO: 42802 - DNA, 17 bp, Arabidopsis thaliana
aggttctgggctgaaac

SEQ ID NO: 42803 - DNA, 17 bp, Arabidopsis thaliana
aggttctgggctgaatc

SEQ ID NO: 42804 - DNA, 17 bp, Arabidopsis thaliana
aggttctggtgcttgat

SEQ ID NO: 42805 - DNA, 17 bp, Arabidopsis thaliana
aggttctggttcgaagc

SEQ ID NO: 42806 - DNA, 17 bp, Arabidopsis thaliana
aggttctgtctaagatt

SEQ ID NO: 42807 - DNA, 17 bp, Arabidopsis thaliana
aggttctgttccggcga

SEQ ID NO: 42808 - DNA, 17 bp, Arabidopsis thaliana
aggttcttagtgtgttt

SEQ ID NO: 42809 - DNA, 17 bp, Arabidopsis thaliana
aggttcttccatctcct

SEQ ID NO: 42810 - DNA, 17 bp, Arabidopsis thaliana
aggttcttcgtcatctc

SEQ ID NO: 42811 - DNA, 17 bp, Arabidopsis thaliana
aggttcttgatccaagc

SEQ ID NO: 42812 - DNA, 17 bp, Arabidopsis thaliana
aggttcttttgacctat

SEQ ID NO: 42813 - DNA, 17 bp, Arabidopsis thaliana
aggttgaccacttgatc

SEQ ID NO: 42814 - DNA, 17 bp, Arabidopsis thaliana
aggttgacccaactcat

SEQ ID NO: 42815 - DNA, 17 bp, Arabidopsis thaliana
aggttgaccgttaccac

SEQ ID NO: 42816 - DNA, 17 bp, Arabidopsis thaliana
aggttgactatctgtag

SEQ ID NO: 42817 - DNA, 17 bp, Arabidopsis thaliana
aggttgactctagtctg

SEQ ID NO: 42818 - DNA, 17 bp, Arabidopsis thaliana
aggttgactggcctgca

SEQ ID NO: 42819 - DNA, 17 bp, Arabidopsis thaliana
aggttgactggttttgc

SEQ ID NO: 42820 - DNA, 17 bp, Arabidopsis thaliana
aggttgagatactgttc

SEQ ID NO: 42821 - DNA, 17 bp, Arabidopsis thaliana
aggttgagattgatgga

SEQ ID NO: 42822 - DNA, 17 bp, Arabidopsis thaliana
aggttgagattggtggt

SEQ ID NO: 42823 - DNA, 17 bp, Arabidopsis thaliana
aggttgagggcaaatta

SEQ ID NO: 42824 - DNA, 17 bp, Arabidopsis thaliana
aggttgagggcaaattg

SEQ ID NO: 42825 - DNA, 17 bp, Arabidopsis thaliana
aggttgagtatgtgcgg

SEQ ID NO: 42826 - DNA, 17 bp, Arabidopsis thaliana
aggttgatccctgtata

SEQ ID NO: 42827 - DNA, 17 bp, Arabidopsis thaliana
aggttgatcgccaagtt

SEQ ID NO: 42828 - DNA, 17 bp, Arabidopsis thaliana
aggttgatcggtcgtcg

SEQ ID NO: 42829 - DNA, 17 bp, Arabidopsis thaliana
aggttgatgatctggct

SEQ ID NO: 42830 - DNA, 17 bp, Arabidopsis thaliana
aggttgattatcgctgc

SEQ ID NO: 42831 - DNA, 17 bp, Arabidopsis thaliana
aggttgattttggccgt

SEQ ID NO: 42832 - DNA, 17 bp, Arabidopsis thaliana
aggttgcagaagcaaaa

SEQ ID NO: 42833 - DNA, 17 bp, Arabidopsis thaliana
aggttgcagacccaaaa

SEQ ID NO: 42834 - DNA, 17 bp, Arabidopsis thaliana
aggttgcagagtgtgat

SEQ ID NO: 42835 - DNA, 17 bp, Arabidopsis thaliana
aggttgcagctgaatga

SEQ ID NO: 42836 - DNA, 17 bp, Arabidopsis thaliana
aggttgcaggctgttat

SEQ ID NO: 42837 - DNA, 17 bp, Arabidopsis thaliana
aggttgcaggttttgat

SEQ ID NO: 42838 - DNA, 17 bp, Arabidopsis thaliana
aggttgcaggttttgtt

SEQ ID NO: 42839 - DNA, 17 bp, Arabidopsis thaliana
aggttgccatttttggg

SEQ ID NO: 42840 - DNA, 17 bp, Arabidopsis thaliana
aggttgctcttggttgt

SEQ ID NO: 42841 - DNA, 17 bp, Arabidopsis thaliana
aggttgcttttggttgt

SEQ ID NO: 42842 - DNA, 17 bp, Arabidopsis thaliana
aggttgctttttgttgt

SEQ ID NO: 42843 - DNA, 17 bp, Arabidopsis thaliana
aggttggaagcccatgt

SEQ ID NO: 42844 - DNA, 17 bp, Arabidopsis thaliana
aggttggaaggccacac

SEQ ID NO: 42845 - DNA, 17 bp, Arabidopsis thaliana
aggttggaaggccaccc

SEQ ID NO: 42846 - DNA, 17 bp, Arabidopsis thaliana
aggttggaatgtcatgt

SEQ ID NO: 42847 - DNA, 17 bp, Arabidopsis thaliana
aggttggactacacatg

SEQ ID NO: 42848 - DNA, 17 bp, Arabidopsis thaliana
aggttggagaccattag

SEQ ID NO: 42849 - DNA, 17 bp, Arabidopsis thaliana
aggttggccaagtctaa

SEQ ID NO: 42850 - DNA, 17 bp, Arabidopsis thaliana
aggttggccaagtctga

SEQ ID NO: 42851 - DNA, 17 bp, Arabidopsis thaliana
aggttggcccatcacgg

SEQ ID NO: 42852 - DNA, 17 bp, Arabidopsis thaliana
aggttggcctggtattt

SEQ ID NO: 42853 - DNA, 17 bp, Arabidopsis thaliana
aggttggcgggacgggt

SEQ ID NO: 42854 - DNA, 17 bp, Arabidopsis thaliana
aggttggctcaacaagc

SEQ ID NO: 42855 - DNA, 17 bp, Arabidopsis thaliana
aggttggctggggcggc

SEQ ID NO: 42856 - DNA, 17 bp, Arabidopsis thaliana
aggttggcttatgagtg

SEQ ID NO: 42857 - DNA, 17 bp, Arabidopsis thaliana
aggttgggtgacctccc

SEQ ID NO: 42858 - DNA, 17 bp, Arabidopsis thaliana
aggttgggttgaggaga

SEQ ID NO: 42859 - DNA, 17 bp, Arabidopsis thaliana
aggttggtcaatcggat

SEQ ID NO: 42860 - DNA, 17 bp, Arabidopsis thaliana
aggttggtgggcgggtt

SEQ ID NO: 42861 - DNA, 17 bp, Arabidopsis thaliana
aggttggttagtgtttt

SEQ ID NO: 42862 - DNA, 17 bp, Arabidopsis thaliana
aggttggttgcttgtat

SEQ ID NO: 42863 - DNA, 17 bp, Arabidopsis thaliana
aggttgtagaagcaaaa

SEQ ID NO: 42864 - DNA, 17 bp, Arabidopsis thaliana
aggttgtataagactag

SEQ ID NO: 42865 - DNA, 17 bp, Arabidopsis thaliana
aggttgtcaaccagatc

SEQ ID NO: 42866 - DNA, 17 bp, Arabidopsis thaliana
aggttgtcaatccaaat

SEQ ID NO: 42867 - DNA, 17 bp, Arabidopsis thaliana
aggttgtccagtctctg

SEQ ID NO: 42868 - DNA, 17 bp, Arabidopsis thaliana
aggttgtccatgttgcg

SEQ ID NO: 42869 - DNA, 17 bp, Arabidopsis thaliana
aggttgtccattgacga

SEQ ID NO: 42870 - DNA, 17 bp, Arabidopsis thaliana
aggttgtcggagtaagc

SEQ ID NO: 42871 - DNA, 17 bp, Arabidopsis thaliana
aggttgtctggctgagt

SEQ ID NO: 42872 - DNA, 17 bp, Arabidopsis thaliana
aggttgtgaattcgcaa

SEQ ID NO: 42873 - DNA, 17 bp, Arabidopsis thaliana
aggttgtggccgctcgc

SEQ ID NO: 42874 - DNA, 17 bp, Arabidopsis thaliana
aggttgtggccgctctc

SEQ ID NO: 42875 - DNA, 17 bp, Arabidopsis thaliana
aggttgtgtgttatgat

SEQ ID NO: 42876 - DNA, 17 bp, Arabidopsis thaliana
aggttgttaatccaaat

SEQ ID NO: 42877 - DNA, 17 bp, Arabidopsis thaliana
aggttgttagtgcttca

SEQ ID NO: 42878 - DNA, 17 bp, Arabidopsis thaliana
aggttgttccatttctt

SEQ ID NO: 42879 - DNA, 17 bp, Arabidopsis thaliana
aggttgttgaccaaatg

SEQ ID NO: 42880 - DNA, 17 bp, Arabidopsis thaliana
aggttgttgatgttgcg

SEQ ID NO: 42881 - DNA, 17 bp, Arabidopsis thaliana
aggttgttggaccccat

SEQ ID NO: 42882 - DNA, 17 bp, Arabidopsis thaliana
aggttgttggagaccat

SEQ ID NO: 42883 - DNA, 17 bp, Arabidopsis thaliana
aggttgtttcggagatg

SEQ ID NO: 42884 - DNA, 17 bp, Arabidopsis thaliana
aggttgtttttggttgt

SEQ ID NO: 42885 - DNA, 17 bp, Arabidopsis thaliana
aggtttaaaaatggatc

SEQ ID NO: 42886 - DNA, 17 bp, Arabidopsis thaliana
aggtttaaaatgggctg

SEQ ID NO: 42887 - DNA, 17 bp, Arabidopsis thaliana
aggtttaaattgggcac

SEQ ID NO: 42888 - DNA, 17 bp, Arabidopsis thaliana
aggtttaaattgggctg

SEQ ID NO: 42889 - DNA, 17 bp, Arabidopsis thaliana
aggtttaaccgcaattt

SEQ ID NO: 42890 - DNA, 17 bp, Arabidopsis thaliana
aggtttaacgaagactc

SEQ ID NO: 42891 - DNA, 17 bp, Arabidopsis thaliana
aggtttaaggcaggggg

SEQ ID NO: 42892 - DNA, 17 bp, Arabidopsis thaliana
aggtttacactgtgggt

SEQ ID NO: 42893 - DNA, 17 bp, Arabidopsis thaliana
aggtttacagcttctcc

SEQ ID NO: 42894 - DNA, 17 bp, Arabidopsis thaliana
aggtttaccgctggact

SEQ ID NO: 42895 - DNA, 17 bp, Arabidopsis thaliana
aggtttactacgaggtt

SEQ ID NO: 42896 - DNA, 17 bp, Arabidopsis thaliana
aggtttactactcgctt

SEQ ID NO: 42897 - DNA, 17 bp, Arabidopsis thaliana
aggtttactcggttgtg

SEQ ID NO: 42898 - DNA, 17 bp, Arabidopsis thaliana
aggtttactcggttgtt

SEQ ID NO: 42899 - DNA, 17 bp, Arabidopsis thaliana
aggtttagaatccgcga

SEQ ID NO: 42900 - DNA, 17 bp, Arabidopsis thaliana
aggtttagagaaaaatt

SEQ ID NO: 42901 - DNA, 17 bp, Arabidopsis thaliana
aggtttagagcaactag

SEQ ID NO: 42902 - DNA, 17 bp, Arabidopsis thaliana
aggtttagatcgatctt

SEQ ID NO: 42903 - DNA, 17 bp, Arabidopsis thaliana
aggtttagccatccaac

SEQ ID NO: 42904 - DNA, 17 bp, Arabidopsis thaliana
aggtttagggtcggggt

SEQ ID NO: 42905 - DNA, 17 bp, Arabidopsis thaliana
aggtttagggtttgagg

SEQ ID NO: 42906 - DNA, 17 bp, Arabidopsis thaliana
aggtttataaccttctg

SEQ ID NO: 42907 - DNA, 17 bp, Arabidopsis thaliana
aggtttataatgcggtt

SEQ ID NO: 42908 - DNA, 17 bp, Arabidopsis thaliana
aggtttataatggggtt

SEQ ID NO: 42909 - DNA, 17 bp, Arabidopsis thaliana
aggtttatcatcatctt

SEQ ID NO: 42910 - DNA, 17 bp, Arabidopsis thaliana
aggtttatcggcactgt

SEQ ID NO: 42911 - DNA, 17 bp, Arabidopsis thaliana
aggtttatgacctccgg

SEQ ID NO: 42912 - DNA, 17 bp, Arabidopsis thaliana
aggtttatgtttttgtc

SEQ ID NO: 42913 - DNA, 17 bp, Arabidopsis thaliana
aggtttattggattggt

SEQ ID NO: 42914 - DNA, 17 bp, Arabidopsis thaliana
aggtttatttacagtgg

SEQ ID NO: 42915 - DNA, 17 bp, Arabidopsis thaliana
aggtttattttgggttt

SEQ ID NO: 42916 - DNA, 17 bp, Arabidopsis thaliana
aggtttcaaatcaactt

SEQ ID NO: 42917 - DNA, 17 bp, Arabidopsis thaliana
aggtttcaaatgtgact

SEQ ID NO: 42918 - DNA, 17 bp, Arabidopsis thaliana
aggtttcaatatgagcg

SEQ ID NO: 42919 - DNA, 17 bp, Arabidopsis thaliana
aggtttcagactcgttt

SEQ ID NO: 42920 - DNA, 17 bp, Arabidopsis thaliana
aggtttcatcgaatctt

SEQ ID NO: 42921 - DNA, 17 bp, Arabidopsis thaliana
aggtttcatcgaatttt

SEQ ID NO: 42922 - DNA, 17 bp, Arabidopsis thaliana
aggtttcatcgggttga

SEQ ID NO: 42923 - DNA, 17 bp, Arabidopsis thaliana
aggtttccatatggatg

SEQ ID NO: 42924 - DNA, 17 bp, Arabidopsis thaliana
aggtttccatttgtatg

SEQ ID NO: 42925 - DNA, 17 bp, Arabidopsis thaliana
aggtttcccgaactcga

SEQ ID NO: 42926 - DNA, 17 bp, Arabidopsis thaliana
aggtttccgacactgat

SEQ ID NO: 42927 - DNA, 17 bp, Arabidopsis thaliana
aggtttccgacagcaga

SEQ ID NO: 42928 - DNA, 17 bp, Arabidopsis thaliana
aggtttccgatggagat

SEQ ID NO: 42929 - DNA, 17 bp, Arabidopsis thaliana
aggtttccgcaacaatc

SEQ ID NO: 42930 - DNA, 17 bp, Arabidopsis thaliana
aggtttcctcaaagtca

SEQ ID NO: 42931 - DNA, 17 bp, Arabidopsis thaliana
aggtttcctgaacagag

SEQ ID NO: 42932 - DNA, 17 bp, Arabidopsis thaliana
aggtttcctgaggaagg

SEQ ID NO: 42933 - DNA, 17 bp, Arabidopsis thaliana
aggtttcgaagatttgg

SEQ ID NO: 42934 - DNA, 17 bp, Arabidopsis thaliana
aggtttcgaatctagct

SEQ ID NO: 42935 - DNA, 17 bp, Arabidopsis thaliana
aggtttcgaatggagaa

SEQ ID NO: 42936 - DNA, 17 bp, Arabidopsis thaliana
aggtttcgaatggtgac

SEQ ID NO: 42937 - DNA, 17 bp, Arabidopsis thaliana
aggtttcgcctcagaac

SEQ ID NO: 42938 - DNA, 17 bp, Arabidopsis thaliana
aggtttcgttccaggta

SEQ ID NO: 42939 - DNA, 17 bp, Arabidopsis thaliana
aggtttctatgtaccca

SEQ ID NO: 42940 - DNA, 17 bp, Arabidopsis thaliana
aggtttctatgtacccg

SEQ ID NO: 42941 - DNA, 17 bp, Arabidopsis thaliana
aggtttctcaggatggg

SEQ ID NO: 42942 - DNA, 17 bp, Arabidopsis thaliana
aggtttctcatggatgg

SEQ ID NO: 42943 - DNA, 17 bp, Arabidopsis thaliana
aggtttctgattctgtt

SEQ ID NO: 42944 - DNA, 17 bp, Arabidopsis thaliana
aggtttctgcaacttga

SEQ ID NO: 42945 - DNA, 17 bp, Arabidopsis thaliana
aggtttctgcaacttgt

SEQ ID NO: 42946 - DNA, 17 bp, Arabidopsis thaliana
aggtttctgcaatggtt

SEQ ID NO: 42947 - DNA, 17 bp, Arabidopsis thaliana
aggtttctggagatgtc

SEQ ID NO: 42948 - DNA, 17 bp, Arabidopsis thaliana
aggtttctgtgaagatg

SEQ ID NO: 42949 - DNA, 17 bp, Arabidopsis thaliana
aggtttctgtgaagtct

SEQ ID NO: 42950 - DNA, 17 bp, Arabidopsis thaliana
aggtttcttatcttgtg

SEQ ID NO: 42951 - DNA, 17 bp, Arabidopsis thaliana
aggtttcttcctgaaca

SEQ ID NO: 42952 - DNA, 17 bp, Arabidopsis thaliana
aggtttcttctcgatgt

SEQ ID NO: 42953 - DNA, 17 bp, Arabidopsis thaliana
aggtttcttttggttgt

SEQ ID NO: 42954 - DNA, 17 bp, Arabidopsis thaliana
aggtttcttttttgtgg

SEQ ID NO: 42955 - DNA, 17 bp, Arabidopsis thaliana
aggtttctttttttgtg

SEQ ID NO: 42956 - DNA, 17 bp, Arabidopsis thaliana
aggtttctttttttgtt

SEQ ID NO: 42957 - DNA, 17 bp, Arabidopsis thaliana
aggtttgaacccattga

SEQ ID NO: 42958 - DNA, 17 bp, Arabidopsis thaliana
aggtttgacaacaattc

SEQ ID NO: 42959 - DNA, 17 bp, Arabidopsis thaliana
aggtttgacccctacct

SEQ ID NO: 42960 - DNA, 17 bp, Arabidopsis thaliana
aggtttgacccgatatt

SEQ ID NO: 42961 - DNA, 17 bp, Arabidopsis thaliana
aggtttgagaactctac

SEQ ID NO: 42962 - DNA, 17 bp, Arabidopsis thaliana
aggtttgagatctgtgg

SEQ ID NO: 42963 - DNA, 17 bp, Arabidopsis thaliana
aggtttgagttgaatca

SEQ ID NO: 42964 - DNA, 17 bp, Arabidopsis thaliana
aggtttgatgatgagga

SEQ ID NO: 42965 - DNA, 17 bp, Arabidopsis thaliana
aggtttgattagggttg

SEQ ID NO: 42966 - DNA, 17 bp, Arabidopsis thaliana
aggtttgcagatggaca

SEQ ID NO: 42967 - DNA, 17 bp, Arabidopsis thaliana
aggtttgcaggtttacg

SEQ ID NO: 42968 - DNA, 17 bp, Arabidopsis thaliana
aggtttgccaacgaaat

SEQ ID NO: 42969 - DNA, 17 bp, Arabidopsis thaliana
aggtttgccaaggatgt

SEQ ID NO: 42970 - DNA, 17 bp, Arabidopsis thaliana
aggtttgccaaggtaca

SEQ ID NO: 42971 - DNA, 17 bp, Arabidopsis thaliana
aggtttgccaaggttca

SEQ ID NO: 42972 - DNA, 17 bp, Arabidopsis thaliana
aggtttgccagcgtagg

SEQ ID NO: 42973 - DNA, 17 bp, Arabidopsis thaliana
aggtttgctctacacga

SEQ ID NO: 42974 - DNA, 17 bp, Arabidopsis thaliana
aggtttggacaatacgc

SEQ ID NO: 42975 - DNA, 17 bp, Arabidopsis thaliana
aggtttggcacctcgat

SEQ ID NO: 42976 - DNA, 17 bp, Arabidopsis thaliana
aggtttggcaggacggg

SEQ ID NO: 42977 - DNA, 17 bp, Arabidopsis thaliana
aggtttggcaggacgtt

SEQ ID NO: 42978 - DNA, 17 bp, Arabidopsis thaliana
aggtttggccaatacgg

SEQ ID NO: 42979 - DNA, 17 bp, Arabidopsis thaliana
aggtttggccccacctt

SEQ ID NO: 42980 - DNA, 17 bp, Arabidopsis thaliana
aggtttggccttggtgt

SEQ ID NO: 42981 - DNA, 17 bp, Arabidopsis thaliana
aggtttggcggaaaaat

SEQ ID NO: 42982 - DNA, 17 bp, Arabidopsis thaliana
aggtttggctacttatg

SEQ ID NO: 42983 - DNA, 17 bp, Arabidopsis thaliana
aggtttggctagcagat

SEQ ID NO: 42984 - DNA, 17 bp, Arabidopsis thaliana
aggtttggctcttggtg

SEQ ID NO: 42985 - DNA, 17 bp, Arabidopsis thaliana
aggtttgggtatgggtt

SEQ ID NO: 42986 - DNA, 17 bp, Arabidopsis thaliana
aggtttgtcagaactaa

SEQ ID NO: 42987 - DNA, 17 bp, Arabidopsis thaliana
aggtttgtctaagtgtc

SEQ ID NO: 42988 - DNA, 17 bp, Arabidopsis thaliana
aggtttgtctaatagtt

SEQ ID NO: 42989 - DNA, 17 bp, Arabidopsis thaliana
aggtttgtctcataaat

SEQ ID NO: 42990 - DNA, 17 bp, Arabidopsis thaliana
aggtttgtgtgattggt

SEQ ID NO: 42991 - DNA, 17 bp, Arabidopsis thaliana
aggtttgtgttgggatt

SEQ ID NO: 42992 - DNA, 17 bp, Arabidopsis thaliana
aggtttgttagtgtttt

SEQ ID NO: 42993 - DNA, 17 bp, Arabidopsis thaliana
aggtttgttctgacctt

SEQ ID NO: 42994 - DNA, 17 bp, Arabidopsis thaliana
aggtttgttgcaggtcc

SEQ ID NO: 42995 - DNA, 17 bp, Arabidopsis thaliana
aggtttgttgcatttga

SEQ ID NO: 42996 - DNA, 17 bp, Arabidopsis thaliana
aggttttaagtttttga

SEQ ID NO: 42997 - DNA, 17 bp, Arabidopsis thaliana
aggttttaggatcgtat

SEQ ID NO: 42998 - DNA, 17 bp, Arabidopsis thaliana
aggttttaggtgcctca

SEQ ID NO: 42999 - DNA, 17 bp, Arabidopsis thaliana
aggttttagttcagggt

SEQ ID NO: 43000 - DNA, 17 bp, Arabidopsis thaliana
aggttttagtttcggac

SEQ ID NO: 43001 - DNA, 17 bp, Arabidopsis thaliana
aggttttagtttgggcc

SEQ ID NO: 43002 - DNA, 17 bp, Arabidopsis thaliana
aggttttcaagtttaga

SEQ ID NO: 43003 - DNA, 17 bp, Arabidopsis thaliana
aggttttcagattctga

SEQ ID NO: 43004 - DNA, 17 bp, Arabidopsis thaliana
aggttttccattcctac

SEQ ID NO: 43005 - DNA, 17 bp, Arabidopsis thaliana
aggttttcggccaccgt

SEQ ID NO: 43006 - DNA, 17 bp, Arabidopsis thaliana
aggttttcgtcttcaac

SEQ ID NO: 43007 - DNA, 17 bp, Arabidopsis thaliana
aggttttcgtgatttgg

SEQ ID NO: 43008 - DNA, 17 bp, Arabidopsis thaliana
aggttttcgtggcagat

SEQ ID NO: 43009 - DNA, 17 bp, Arabidopsis thaliana
aggttttctatcaagtc

SEQ ID NO: 43010 - DNA, 17 bp, Arabidopsis thaliana
aggttttctcaggagag

SEQ ID NO: 43011 - DNA, 17 bp, Arabidopsis thaliana
aggttttctcgggagag

SEQ ID NO: 43012 - DNA, 17 bp, Arabidopsis thaliana
aggttttctgcttcttg

SEQ ID NO: 43013 - DNA, 17 bp, Arabidopsis thaliana
aggttttctgggctaaa

SEQ ID NO: 43014 - DNA, 17 bp, Arabidopsis thaliana
aggttttgaagtttaga

SEQ ID NO: 43015 - DNA, 17 bp, Arabidopsis thaliana
aggttttgaatgaattt

SEQ ID NO: 43016 - DNA, 17 bp, Arabidopsis thaliana
aggttttgacaaagtgg

SEQ ID NO: 43017 - DNA, 17 bp, Arabidopsis thaliana
aggttttgaccctgaat

SEQ ID NO: 43018 - DNA, 17 bp, Arabidopsis thaliana
aggttttgagtaagttt

SEQ ID NO: 43019 - DNA, 17 bp, Arabidopsis thaliana
aggttttgatcttcact

SEQ ID NO: 43020 - DNA, 17 bp, Arabidopsis thaliana
aggttttgattttgtgg

SEQ ID NO: 43021 - DNA, 17 bp, Arabidopsis thaliana
aggttttgcactcgttt

SEQ ID NO: 43022 - DNA, 17 bp, Arabidopsis thaliana
aggttttgccttcggta

SEQ ID NO: 43023 - DNA, 17 bp, Arabidopsis thaliana
aggttttgcgttatttt

SEQ ID NO: 43024 - DNA, 17 bp, Arabidopsis thaliana
aggttttgctgagaaga

SEQ ID NO: 43025 - DNA, 17 bp, Arabidopsis thaliana
aggttttgggagttacg

SEQ ID NO: 43026 - DNA, 17 bp, Arabidopsis thaliana
aggttttgggccgaatc

SEQ ID NO: 43027 - DNA, 17 bp, Arabidopsis thaliana
aggttttggtgcgttct

SEQ ID NO: 43028 - DNA, 17 bp, Arabidopsis thaliana
aggttttggttaccaat

SEQ ID NO: 43029 - DNA, 17 bp, Arabidopsis thaliana
aggttttggttatgacg

SEQ ID NO: 43030 - DNA, 17 bp, Arabidopsis thaliana
aggttttggttcaagga

SEQ ID NO: 43031 - DNA, 17 bp, Arabidopsis thaliana
aggttttggttgtgact

SEQ ID NO: 43032 - DNA, 17 bp, Arabidopsis thaliana
aggttttgtccatttct

SEQ ID NO: 43033 - DNA, 17 bp, Arabidopsis thaliana
aggttttgtgatgtaac

SEQ ID NO: 43034 - DNA, 17 bp, Arabidopsis thaliana
aggttttgtgtacgggc

SEQ ID NO: 43035 - DNA, 17 bp, Arabidopsis thaliana
aggtttttacacgtttg

SEQ ID NO: 43036 - DNA, 17 bp, Arabidopsis thaliana
aggtttttacgtttttg

SEQ ID NO: 43037 - DNA, 17 bp, Arabidopsis thaliana
aggtttttatgagacga

SEQ ID NO: 43038 - DNA, 17 bp, Arabidopsis thaliana
aggtttttcaagacagt

SEQ ID NO: 43039 - DNA, 17 bp, Arabidopsis thaliana
aggtttttcacagactg

SEQ ID NO: 43040 - DNA, 17 bp, Arabidopsis thaliana
aggtttttccgtgactg

SEQ ID NO: 43041 - DNA, 17 bp, Arabidopsis thaliana
aggtttttgccttgttg

SEQ ID NO: 43042 - DNA, 17 bp, Arabidopsis thaliana
aggtttttgctgcttgt

SEQ ID NO: 43043 - DNA, 17 bp, Arabidopsis thaliana
aggtttttggacttgaa

SEQ ID NO: 43044 - DNA, 17 bp, Arabidopsis thaliana
aggttttttcgggcttt

SEQ ID NO: 43045 - DNA, 17 bp, Arabidopsis thaliana
aggtttttttccgtggt

SEQ ID NO: 43046 - DNA, 17 bp, Arabidopsis thaliana
aggtttttttgggtttt

SEQ ID NO: 43047 - DNA, 17 bp, Arabidopsis thaliana
aggttttttttccaact

SEQ ID NO: 43048 - DNA, 17 bp, Arabidopsis thaliana
agtaaaacagtgcaacg

SEQ ID NO: 43049 - DNA, 17 bp, Arabidopsis thaliana
agtaaaaccgcaccgca

SEQ ID NO: 43050 - DNA, 17 bp, Arabidopsis thaliana
agtaaaacggtgcaacg

SEQ ID NO: 43051 - DNA, 17 bp, Arabidopsis thaliana
agtaaaagcgttgaccg

SEQ ID NO: 43052 - DNA, 17 bp, Arabidopsis thaliana
agtaaaatctgtgttgt

SEQ ID NO: 43053 - DNA, 17 bp, Arabidopsis thaliana
agtaaaatgttggatca

SEQ ID NO: 43054 - DNA, 17 bp, Arabidopsis thaliana
agtaaaccgtgggcggt

SEQ ID NO: 43055 - DNA, 17 bp, Arabidopsis thaliana
agtaaacgcggatttgt

SEQ ID NO: 43056 - DNA, 17 bp, Arabidopsis thaliana
agtaaacggcgaatgga

SEQ ID NO: 43057 - DNA, 17 bp, Arabidopsis thaliana
agtaaacttttctcgac

SEQ ID NO: 43058 - DNA, 17 bp, Arabidopsis thaliana
agtaaagatctcggtcg

SEQ ID NO: 43059 - DNA, 17 bp, Arabidopsis thaliana
agtaaagcacaaggtcg

SEQ ID NO: 43060 - DNA, 17 bp, Arabidopsis thaliana
agtaaagcttcgacttc

SEQ ID NO: 43061 - DNA, 17 bp, Arabidopsis thaliana
agtaaagtctccagatt

SEQ ID NO: 43062 - DNA, 17 bp, Arabidopsis thaliana
agtaaatctacgcccaa

SEQ ID NO: 43063 - DNA, 17 bp, Arabidopsis thaliana
agtaaatctccctcccg

SEQ ID NO: 43064 - DNA, 17 bp, Arabidopsis thaliana
agtaaattacgggcttc

SEQ ID NO: 43065 - DNA, 17 bp, Arabidopsis thaliana
agtaaattcaaccagaa

SEQ ID NO: 43066 - DNA, 17 bp, Arabidopsis thaliana
agtaaattctcaaagcc

SEQ ID NO: 43067 - DNA, 17 bp, Arabidopsis thaliana
agtaaattctcgcgatc

SEQ ID NO: 43068 - DNA, 17 bp, Arabidopsis thaliana
agtaaattgtttccgcg

SEQ ID NO: 43069 - DNA, 17 bp, Arabidopsis thaliana
agtaacatcctgccaaa

SEQ ID NO: 43070 - DNA, 17 bp, Arabidopsis thaliana
agtaacccacaaatcct

SEQ ID NO: 43071 - DNA, 17 bp, Arabidopsis thaliana
agtaaccctaaacggcg

SEQ ID NO: 43072 - DNA, 17 bp, Arabidopsis thaliana
agtaaccgtcactcctt

SEQ ID NO: 43073 - DNA, 17 bp, Arabidopsis thaliana
agtaaccgtggctatct

SEQ ID NO: 43074 - DNA, 17 bp, Arabidopsis thaliana
agtaacgacagtcgcca

SEQ ID NO: 43075 - DNA, 17 bp, Arabidopsis thaliana
agtaacgacttgaccag

SEQ ID NO: 43076 - DNA, 17 bp, Arabidopsis thaliana
agtaacgatagggattg

SEQ ID NO: 43077 - DNA, 17 bp, Arabidopsis thaliana
agtaacgcgtaagaacc

SEQ ID NO: 43078 - DNA, 17 bp, Arabidopsis thaliana
agtaacgctgagataac

SEQ ID NO: 43079 - DNA, 17 bp, Arabidopsis thaliana
agtaacggaaagtgagc

SEQ ID NO: 43080 - DNA, 17 bp, Arabidopsis thaliana
agtaacggctgtctatg

SEQ ID NO: 43081 - DNA, 17 bp, Arabidopsis thaliana
agtaacgtcccgccata

SEQ ID NO: 43082 - DNA, 17 bp, Arabidopsis thaliana
agtaacgtcctctcaaa

SEQ ID NO: 43083 - DNA, 17 bp, Arabidopsis thaliana
agtaacgtcctgccaaa

SEQ ID NO: 43084 - DNA, 17 bp, Arabidopsis thaliana
agtaacgtcctgctaaa

SEQ ID NO: 43085 - DNA, 17 bp, Arabidopsis thaliana
agtaacgtcttgccaaa

SEQ ID NO: 43086 - DNA, 17 bp, Arabidopsis thaliana
agtaacgttctgccaaa

SEQ ID NO: 43087 - DNA, 17 bp, Arabidopsis thaliana
agtaactaggatatgac

SEQ ID NO: 43088 - DNA, 17 bp, Arabidopsis thaliana
agtaactatctcgtaca

SEQ ID NO: 43089 - DNA, 17 bp, Arabidopsis thaliana
agtaactatgactctct

SEQ ID NO: 43090 - DNA, 17 bp, Arabidopsis thaliana
agtaactcacctttgca

SEQ ID NO: 43091 - DNA, 17 bp, Arabidopsis thaliana
agtaactcataagatcg

SEQ ID NO: 43092 - DNA, 17 bp, Arabidopsis thaliana
agtaactcatagggttg

SEQ ID NO: 43093 - DNA, 17 bp, Arabidopsis thaliana
agtaactcggagcatat

SEQ ID NO: 43094 - DNA, 17 bp, Arabidopsis thaliana
agtaactgcagatttcg

SEQ ID NO: 43095 - DNA, 17 bp, Arabidopsis thaliana
agtaactgcgttttgcg

SEQ ID NO: 43096 - DNA, 17 bp, Arabidopsis thaliana
agtaactgtggtgtcta

SEQ ID NO: 43097 - DNA, 17 bp, Arabidopsis thaliana
agtaacttctactcggt

SEQ ID NO: 43098 - DNA, 17 bp, Arabidopsis thaliana
agtaacttctgcttgac

SEQ ID NO: 43099 - DNA, 17 bp, Arabidopsis thaliana
agtaactttagttgcgt

SEQ ID NO: 43100 - DNA, 17 bp, Arabidopsis thaliana
agtaactttcagcaggc

SEQ ID NO: 43101 - DNA, 17 bp, Arabidopsis thaliana
agtaactttgcctccac

SEQ ID NO: 43102 - DNA, 17 bp, Arabidopsis thaliana
agtaagaccaagtccaa

SEQ ID NO: 43103 - DNA, 17 bp, Arabidopsis thaliana
agtaagaccatctccat

SEQ ID NO: 43104 - DNA, 17 bp, Arabidopsis thaliana
agtaagaccgtggggtg

SEQ ID NO: 43105 - DNA, 17 bp, Arabidopsis thaliana
agtaagaccttggtcca

SEQ ID NO: 43106 - DNA, 17 bp, Arabidopsis thaliana
agtaagacgtggtgttt

SEQ ID NO: 43107 - DNA, 17 bp, Arabidopsis thaliana
agtaagactacaagcgt

SEQ ID NO: 43108 - DNA, 17 bp, Arabidopsis thaliana
agtaagagattctggac

SEQ ID NO: 43109 - DNA, 17 bp, Arabidopsis thaliana
agtaagagcagcaatca

SEQ ID NO: 43110 - DNA, 17 bp, Arabidopsis thaliana
agtaagatcctgcgagt

SEQ ID NO: 43111 - DNA, 17 bp, Arabidopsis thaliana
agtaagatctctttcgc

SEQ ID NO: 43112 - DNA, 17 bp, Arabidopsis thaliana
agtaagattcgtgatgg

SEQ ID NO: 43113 - DNA, 17 bp, Arabidopsis thaliana
agtaagcctctttctca

SEQ ID NO: 43114 - DNA, 17 bp, Arabidopsis thaliana
agtaagcgcgagtcatc

SEQ ID NO: 43115 - DNA, 17 bp, Arabidopsis thaliana
agtaagcggctgtagca

SEQ ID NO: 43116 - DNA, 17 bp, Arabidopsis thaliana
agtaagcgtttacagag

SEQ ID NO: 43117 - DNA, 17 bp, Arabidopsis thaliana
agtaaggacctccccca

SEQ ID NO: 43118 - DNA, 17 bp, Arabidopsis thaliana
agtaaggagaacgagag

SEQ ID NO: 43119 - DNA, 17 bp, Arabidopsis thaliana
agtaaggagtggcgggc

SEQ ID NO: 43120 - DNA, 17 bp, Arabidopsis thaliana
agtaaggattgacagac

SEQ ID NO: 43121 - DNA, 17 bp, Arabidopsis thaliana
agtaaggccctgttcgt

SEQ ID NO: 43122 - DNA, 17 bp, Arabidopsis thaliana
agtaaggctaagggagt

SEQ ID NO: 43123 - DNA, 17 bp, Arabidopsis thaliana
agtaagggtgtcgttgc

SEQ ID NO: 43124 - DNA, 17 bp, Arabidopsis thaliana
agtaagggttgaccgaa

SEQ ID NO: 43125 - DNA, 17 bp, Arabidopsis thaliana
agtaaggtccagtttgt

SEQ ID NO: 43126 - DNA, 17 bp, Arabidopsis thaliana
agtaagtctgtcagttg

SEQ ID NO: 43127 - DNA, 17 bp, Arabidopsis thaliana
agtaagtcttctcactt

SEQ ID NO: 43128 - DNA, 17 bp, Arabidopsis thaliana
agtaagtgactacatcg

SEQ ID NO: 43129 - DNA, 17 bp, Arabidopsis thaliana
agtaagtgatgtgtggg

SEQ ID NO: 43130 - DNA, 17 bp, Arabidopsis thaliana
agtaagtgtttctaccg

SEQ ID NO: 43131 - DNA, 17 bp, Arabidopsis thaliana
agtaagttcaacacatg

SEQ ID NO: 43132 - DNA, 17 bp, Arabidopsis thaliana
agtaagttcaatgccca

SEQ ID NO: 43133 - DNA, 17 bp, Arabidopsis thaliana
agtaatacgagacggta

SEQ ID NO: 43134 - DNA, 17 bp, Arabidopsis thaliana
agtaatatctacgccgc

SEQ ID NO: 43135 - DNA, 17 bp, Arabidopsis thaliana
agtaatcattaggaccc

SEQ ID NO: 43136 - DNA, 17 bp, Arabidopsis thaliana
agtaatcgctctgttgc

SEQ ID NO: 43137 - DNA, 17 bp, Arabidopsis thaliana
agtaatcgtacttgttg

SEQ ID NO: 43138 - DNA, 17 bp, Arabidopsis thaliana
agtaatctatcttcgct

SEQ ID NO: 43139 - DNA, 17 bp, Arabidopsis thaliana
agtaatctctgtggttt

SEQ ID NO: 43140 - DNA, 17 bp, Arabidopsis thaliana
agtaatgacttgtggtc

SEQ ID NO: 43141 - DNA, 17 bp, Arabidopsis thaliana
agtaatgagatccgcta

SEQ ID NO: 43142 - DNA, 17 bp, Arabidopsis thaliana
agtaatgagcagatttg

SEQ ID NO: 43143 - DNA, 17 bp, Arabidopsis thaliana
agtaatgattaaatcgg

SEQ ID NO: 43144 - DNA, 17 bp, Arabidopsis thaliana
agtaatgcccgctgcgc

SEQ ID NO: 43145 - DNA, 17 bp, Arabidopsis thaliana
agtaatggagaaagcgg

SEQ ID NO: 43146 - DNA, 17 bp, Arabidopsis thaliana
agtaatgggtctgattg

SEQ ID NO: 43147 - DNA, 17 bp, Arabidopsis thaliana
agtaatgtcctgccaaa

SEQ ID NO: 43148 - DNA, 17 bp, Arabidopsis thaliana
agtaatgtcctgctaaa

SEQ ID NO: 43149 - DNA, 17 bp, Arabidopsis thaliana
agtaatgtctgtgatct

SEQ ID NO: 43150 - DNA, 17 bp, Arabidopsis thaliana
agtaatgtctgtgattt

SEQ ID NO: 43151 - DNA, 17 bp, Arabidopsis thaliana
agtaattgtattctgcg

SEQ ID NO: 43152 - DNA, 17 bp, Arabidopsis thaliana
agtacaaaacgacgccg

SEQ ID NO: 43153 - DNA, 17 bp, Arabidopsis thaliana
agtacaaagagatactg

SEQ ID NO: 43154 - DNA, 17 bp, Arabidopsis thaliana
agtacaaagcccgtgca

SEQ ID NO: 43155 - DNA, 17 bp, Arabidopsis thaliana
agtacaaatccttggct

SEQ ID NO: 43156 - DNA, 17 bp, Arabidopsis thaliana
agtacaacaggttcagc

SEQ ID NO: 43157 - DNA, 17 bp, Arabidopsis thaliana
agtacaacccctgtttt

SEQ ID NO: 43158 - DNA, 17 bp, Arabidopsis thaliana
agtacaagaatggtggt

SEQ ID NO: 43159 - DNA, 17 bp, Arabidopsis thaliana
agtacaatcgggaatgt

SEQ ID NO: 43160 - DNA, 17 bp, Arabidopsis thaliana
agtacaatgtcattggc

SEQ ID NO: 43161 - DNA, 17 bp, Arabidopsis thaliana
agtacacactttgcttt

SEQ ID NO: 43162 - DNA, 17 bp, Arabidopsis thaliana
agtacacgggacgagac

SEQ ID NO: 43163 - DNA, 17 bp, Arabidopsis thaliana
agtacactgttccggtt

SEQ ID NO: 43164 - DNA, 17 bp, Arabidopsis thaliana
agtacagaaccgactgg

SEQ ID NO: 43165 - DNA, 17 bp, Arabidopsis thaliana
agtacagaacgctaccg

SEQ ID NO: 43166 - DNA, 17 bp, Arabidopsis thaliana
agtacagacccgggttc

SEQ ID NO: 43167 - DNA, 17 bp, Arabidopsis thaliana
agtacaggtggagtatc

SEQ ID NO: 43168 - DNA, 17 bp, Arabidopsis thaliana
agtacagtctcctctca

SEQ ID NO: 43169 - DNA, 17 bp, Arabidopsis thaliana
agtacagtggccgagtg

SEQ ID NO: 43170 - DNA, 17 bp, Arabidopsis thaliana
agtacagtggctgcgcc

SEQ ID NO: 43171 - DNA, 17 bp, Arabidopsis thaliana
agtacagtttgtacagc

SEQ ID NO: 43172 - DNA, 17 bp, Arabidopsis thaliana
agtacatgccaaatggt

SEQ ID NO: 43173 - DNA, 17 bp, Arabidopsis thaliana
agtacatgctatggttt

SEQ ID NO: 43174 - DNA, 17 bp, Arabidopsis thaliana
agtacatgctgtggttt

SEQ ID NO: 43175 - DNA, 17 bp, Arabidopsis thaliana
agtacatggtcgagtat

SEQ ID NO: 43176 - DNA, 17 bp, Arabidopsis thaliana
agtaccaaaatctcttg

SEQ ID NO: 43177 - DNA, 17 bp, Arabidopsis thaliana
agtaccaaaatcttctg

SEQ ID NO: 43178 - DNA, 17 bp, Arabidopsis thaliana
agtaccaacggctagac

SEQ ID NO: 43179 - DNA, 17 bp, Arabidopsis thaliana
agtaccaagtgtctgtc

SEQ ID NO: 43180 - DNA, 17 bp, Arabidopsis thaliana
agtaccagactagtagg

SEQ ID NO: 43181 - DNA, 17 bp, Arabidopsis thaliana
agtaccaggagtggagc

SEQ ID NO: 43182 - DNA, 17 bp, Arabidopsis thaliana
agtaccaggcgctacgg

SEQ ID NO: 43183 - DNA, 17 bp, Arabidopsis thaliana
agtacccacagggcgga

SEQ ID NO: 43184 - DNA, 17 bp, Arabidopsis thaliana
agtacccatgtccgtcg

SEQ ID NO: 43185 - DNA, 17 bp, Arabidopsis thaliana
agtaccgaagctttggc

SEQ ID NO: 43186 - DNA, 17 bp, Arabidopsis thaliana
agtaccgcgaatccgcg

SEQ ID NO: 43187 - DNA, 17 bp, Arabidopsis thaliana
agtaccgctcaagatcc

SEQ ID NO: 43188 - DNA, 17 bp, Arabidopsis thaliana
agtaccgctcaaggaac

SEQ ID NO: 43189 - DNA, 17 bp, Arabidopsis thaliana
agtaccggacaactgaa

SEQ ID NO: 43190 - DNA, 17 bp, Arabidopsis thaliana
agtaccggtctcccgct

SEQ ID NO: 43191 - DNA, 17 bp, Arabidopsis thaliana
agtaccggtgctaccgg

SEQ ID NO: 43192 - DNA, 17 bp, Arabidopsis thaliana
agtaccggttctgtggc

SEQ ID NO: 43193 - DNA, 17 bp, Arabidopsis thaliana
agtaccgtattcatttc

SEQ ID NO: 43194 - DNA, 17 bp, Arabidopsis thaliana
agtaccgtgactgattt

SEQ ID NO: 43195 - DNA, 17 bp, Arabidopsis thaliana
agtaccgttgcaaagac

SEQ ID NO: 43196 - DNA, 17 bp, Arabidopsis thaliana
agtaccgtttcacagtt

SEQ ID NO: 43197 - DNA, 17 bp, Arabidopsis thaliana
agtacctaccgactttg

SEQ ID NO: 43198 - DNA, 17 bp, Arabidopsis thaliana
agtacctattagcttag

SEQ ID NO: 43199 - DNA, 17 bp, Arabidopsis thaliana
agtacctgaatgcccat

SEQ ID NO: 43200 - DNA, 17 bp, Arabidopsis thaliana
agtacctgcagattact

SEQ ID NO: 43201 - DNA, 17 bp, Arabidopsis thaliana
agtacctgggccaaagc

SEQ ID NO: 43202 - DNA, 17 bp, Arabidopsis thaliana
agtaccttagcaccggg

SEQ ID NO: 43203 - DNA, 17 bp, Arabidopsis thaliana
agtaccttagccgttta

SEQ ID NO: 43204 - DNA, 17 bp, Arabidopsis thaliana
agtaccttgtggaccca

SEQ ID NO: 43205 - DNA, 17 bp, Arabidopsis thaliana
agtacgacatgtgcgcc

SEQ ID NO: 43206 - DNA, 17 bp, Arabidopsis thaliana
agtacgacatgtgcggc

SEQ ID NO: 43207 - DNA, 17 bp, Arabidopsis thaliana
agtacgacccatagaag

SEQ ID NO: 43208 - DNA, 17 bp, Arabidopsis thaliana
agtacgacgtcagaaag

SEQ ID NO: 43209 - DNA, 17 bp, Arabidopsis thaliana
agtacgacttcacgccg

SEQ ID NO: 43210 - DNA, 17 bp, Arabidopsis thaliana
agtacgagcaacagagc

SEQ ID NO: 43211 - DNA, 17 bp, Arabidopsis thaliana
agtacgagttttttgcc

SEQ ID NO: 43212 - DNA, 17 bp, Arabidopsis thaliana
agtacgatctgtatcct

SEQ ID NO: 43213 - DNA, 17 bp, Arabidopsis thaliana
agtacgattcagacttt

SEQ ID NO: 43214 - DNA, 17 bp, Arabidopsis thaliana
agtacgcagtttcgaca

SEQ ID NO: 43215 - DNA, 17 bp, Arabidopsis thaliana
agtacgcctcaatgttc

SEQ ID NO: 43216 - DNA, 17 bp, Arabidopsis thaliana
agtacgcctttaagatc

SEQ ID NO: 43217 - DNA, 17 bp, Arabidopsis thaliana
agtacgcggattacggt

SEQ ID NO: 43218 - DNA, 17 bp, Arabidopsis thaliana
agtacgcgtcttggaac

SEQ ID NO: 43219 - DNA, 17 bp, Arabidopsis thaliana
agtacggagaccatgaa

SEQ ID NO: 43220 - DNA, 17 bp, Arabidopsis thaliana
agtacggctcagccgga

SEQ ID NO: 43221 - DNA, 17 bp, Arabidopsis thaliana
agtacgggtttgcacat

SEQ ID NO: 43222 - DNA, 17 bp, Arabidopsis thaliana
agtacggtgaccgagct

SEQ ID NO: 43223 - DNA, 17 bp, Arabidopsis thaliana
agtacggtgcggttcaa

SEQ ID NO: 43224 - DNA, 17 bp, Arabidopsis thaliana
agtacggttcaactgca

SEQ ID NO: 43225 - DNA, 17 bp, Arabidopsis thaliana
agtacggttcaactgcg

SEQ ID NO: 43226 - DNA, 17 bp, Arabidopsis thaliana
agtacggttgtgctatg

SEQ ID NO: 43227 - DNA, 17 bp, Arabidopsis thaliana
agtacggttgtgctttg

SEQ ID NO: 43228 - DNA, 17 bp, Arabidopsis thaliana
agtacgtttgtgctttg

SEQ ID NO: 43229 - DNA, 17 bp, Arabidopsis thaliana
agtacgtttgtgttatg

SEQ ID NO: 43230 - DNA, 17 bp, Arabidopsis thaliana
agtactaaactcattgg

SEQ ID NO: 43231 - DNA, 17 bp, Arabidopsis thaliana
agtactaaccatcgcac

SEQ ID NO: 43232 - DNA, 17 bp, Arabidopsis thaliana
agtactaaccatcgcag

SEQ ID NO: 43233 - DNA, 17 bp, Arabidopsis thaliana
agtactaaccatcgcgg

SEQ ID NO: 43234 - DNA, 17 bp, Arabidopsis thaliana
agtactaaccctcgcgg

SEQ ID NO: 43235 - DNA, 17 bp, Arabidopsis thaliana
agtactaatcggtcgag

SEQ ID NO: 43236 - DNA, 17 bp, Arabidopsis thaliana
agtactacacgcgcaca

SEQ ID NO: 43237 - DNA, 17 bp, Arabidopsis thaliana
agtactacatcttggtt

SEQ ID NO: 43238 - DNA, 17 bp, Arabidopsis thaliana
agtactaccttactctt

SEQ ID NO: 43239 - DNA, 17 bp, Arabidopsis thaliana
agtactacgggttggtt

SEQ ID NO: 43240 - DNA, 17 bp, Arabidopsis thaliana
agtactacgtggtggtc

SEQ ID NO: 43241 - DNA, 17 bp, Arabidopsis thaliana
agtactactctcgccca

SEQ ID NO: 43242 - DNA, 17 bp, Arabidopsis thaliana
agtactagaatgggtga

SEQ ID NO: 43243 - DNA, 17 bp, Arabidopsis thaliana
agtactaggagtactct

SEQ ID NO: 43244 - DNA, 17 bp, Arabidopsis thaliana
agtactaggataggtga

SEQ ID NO: 43245 - DNA, 17 bp, Arabidopsis thaliana
agtactaggatgggaga

SEQ ID NO: 43246 - DNA, 17 bp, Arabidopsis thaliana
agtactaggatgggcgc

SEQ ID NO: 43247 - DNA, 17 bp, Arabidopsis thaliana
agtactaggatgggtga

SEQ ID NO: 43248 - DNA, 17 bp, Arabidopsis thaliana
agtactaggatggttga

SEQ ID NO: 43249 - DNA, 17 bp, Arabidopsis thaliana
agtactaggattggtga

SEQ ID NO: 43250 - DNA, 17 bp, Arabidopsis thaliana
agtactagggtgggtga

SEQ ID NO: 43251 - DNA, 17 bp, Arabidopsis thaliana
agtactatgatgggtga

SEQ ID NO: 43252 - DNA, 17 bp, Arabidopsis thaliana
agtactcaggccgcctg

SEQ ID NO: 43253 - DNA, 17 bp, Arabidopsis thaliana
agtactcaggccgtctg

SEQ ID NO: 43254 - DNA, 17 bp, Arabidopsis thaliana
agtactccagggccaga

SEQ ID NO: 43255 - DNA, 17 bp, Arabidopsis thaliana
agtactcgaccaattca

SEQ ID NO: 43256 - DNA, 17 bp, Arabidopsis thaliana
agtactctctcaacggt

SEQ ID NO: 43257 - DNA, 17 bp, Arabidopsis thaliana
agtactctgttcgtttc

SEQ ID NO: 43258 - DNA, 17 bp, Arabidopsis thaliana
agtactgatgatcctga

SEQ ID NO: 43259 - DNA, 17 bp, Arabidopsis thaliana
agtactgatgatgctga

SEQ ID NO: 43260 - DNA, 17 bp, Arabidopsis thaliana
agtactggataatccaa

SEQ ID NO: 43261 - DNA, 17 bp, Arabidopsis thaliana
agtactggtgcggatgc

SEQ ID NO: 43262 - DNA, 17 bp, Arabidopsis thaliana
agtactgtcttcgctac

SEQ ID NO: 43263 - DNA, 17 bp, Arabidopsis thaliana
agtactgtcttcgttac

SEQ ID NO: 43264 - DNA, 17 bp, Arabidopsis thaliana
agtactgttgcggtgcg

SEQ ID NO: 43265 - DNA, 17 bp, Arabidopsis thaliana
agtactgttggacggtc

SEQ ID NO: 43266 - DNA, 17 bp, Arabidopsis thaliana
agtacttaccgcgtttt

SEQ ID NO: 43267 - DNA, 17 bp, Arabidopsis thaliana
agtacttagccaacaat

SEQ ID NO: 43268 - DNA, 17 bp, Arabidopsis thaliana
agtacttagccaacagt

SEQ ID NO: 43269 - DNA, 17 bp, Arabidopsis thaliana
agtacttatttacaatg

SEQ ID NO: 43270 - DNA, 17 bp, Arabidopsis thaliana
agtacttcagagtagac

SEQ ID NO: 43271 - DNA, 17 bp, Arabidopsis thaliana
agtacttcagagtggac

SEQ ID NO: 43272 - DNA, 17 bp, Arabidopsis thaliana
agtacttcaggatctac

SEQ ID NO: 43273 - DNA, 17 bp, Arabidopsis thaliana
agtacttcaggatctgc

SEQ ID NO: 43274 - DNA, 17 bp, Arabidopsis thaliana
agtacttcagtgcgttt

SEQ ID NO: 43275 - DNA, 17 bp, Arabidopsis thaliana
agtacttccgatgtggg

SEQ ID NO: 43276 - DNA, 17 bp, Arabidopsis thaliana
agtacttcgccctgctc

SEQ ID NO: 43277 - DNA, 17 bp, Arabidopsis thaliana
agtacttcggtgcgttc

SEQ ID NO: 43278 - DNA, 17 bp, Arabidopsis thaliana
agtacttcggtgcgttt

SEQ ID NO: 43279 - DNA, 17 bp, Arabidopsis thaliana
agtacttctctcaacgg

SEQ ID NO: 43280 - DNA, 17 bp, Arabidopsis thaliana
agtacttctctcgacgg

SEQ ID NO: 43281 - DNA, 17 bp, Arabidopsis thaliana
agtacttctgagagcca

SEQ ID NO: 43282 - DNA, 17 bp, Arabidopsis thaliana
agtacttgcagtgatgt

SEQ ID NO: 43283 - DNA, 17 bp, Arabidopsis thaliana
agtacttgccttgtgct

SEQ ID NO: 43284 - DNA, 17 bp, Arabidopsis thaliana
agtacttgttcgcgaag

SEQ ID NO: 43285 - DNA, 17 bp, Arabidopsis thaliana
agtactttacgattgcg

SEQ ID NO: 43286 - DNA, 17 bp, Arabidopsis thaliana
agtactttcgggcattt

SEQ ID NO: 43287 - DNA, 17 bp, Arabidopsis thaliana
agtactttgccgctgct

SEQ ID NO: 43288 - DNA, 17 bp, Arabidopsis thaliana
agtacttttcgggcatt

SEQ ID NO: 43289 - DNA, 17 bp, Arabidopsis thaliana
agtactttttcgccatt

SEQ ID NO: 43290 - DNA, 17 bp, Arabidopsis thaliana
agtactttttcgggcat

SEQ ID NO: 43291 - DNA, 17 bp, Arabidopsis thaliana
agtactttttcgggcct

SEQ ID NO: 43292 - DNA, 17 bp, Arabidopsis thaliana
agtactttttcgtgcat

SEQ ID NO: 43293 - DNA, 17 bp, Arabidopsis thaliana
agtacttttttgggcaa

SEQ ID NO: 43294 - DNA, 17 bp, Arabidopsis thaliana
agtacttttttgggcat

SEQ ID NO: 43295 - DNA, 17 bp, Arabidopsis thaliana
agtacttttttttgggc

SEQ ID NO: 43296 - DNA, 17 bp, Arabidopsis thaliana
agtagaaatgcaccgaa

SEQ ID NO: 43297 - DNA, 17 bp, Arabidopsis thaliana
agtagaaattgtgatca

SEQ ID NO: 43298 - DNA, 17 bp, Arabidopsis thaliana
agtagaagccagctgtt

SEQ ID NO: 43299 - DNA, 17 bp, Arabidopsis thaliana
agtagaagccagttgtt

SEQ ID NO: 43300 - DNA, 17 bp, Arabidopsis thaliana
agtagaagggatcatgc

SEQ ID NO: 43301 - DNA, 17 bp, Arabidopsis thaliana
agtagaatttttcgccg

SEQ ID NO: 43302 - DNA, 17 bp, Arabidopsis thaliana
agtagacaatggctgat

SEQ ID NO: 43303 - DNA, 17 bp, Arabidopsis thaliana
agtagacatttcaggtt

SEQ ID NO: 43304 - DNA, 17 bp, Arabidopsis thaliana
agtagacgtggggtttt

SEQ ID NO: 43305 - DNA, 17 bp, Arabidopsis thaliana
agtagaggttcgccact

SEQ ID NO: 43306 - DNA, 17 bp, Arabidopsis thaliana
agtagaggttgactatt

SEQ ID NO: 43307 - DNA, 17 bp, Arabidopsis thaliana
agtagataatgctttct

SEQ ID NO: 43308 - DNA, 17 bp, Arabidopsis thaliana
agtagatagccccttgc

SEQ ID NO: 43309 - DNA, 17 bp, Arabidopsis thaliana
agtagatatgcacaccg

SEQ ID NO: 43310 - DNA, 17 bp, Arabidopsis thaliana
agtagatcacgaccact

SEQ ID NO: 43311 - DNA, 17 bp, Arabidopsis thaliana
agtagatcatactttgg

SEQ ID NO: 43312 - DNA, 17 bp, Arabidopsis thaliana
agtagatcgactatcga

SEQ ID NO: 43313 - DNA, 17 bp, Arabidopsis thaliana
agtagatcgagccccgt

SEQ ID NO: 43314 - DNA, 17 bp, Arabidopsis thaliana
agtagatcgcccctttc

SEQ ID NO: 43315 - DNA, 17 bp, Arabidopsis thaliana
agtagatcgcccctttg

SEQ ID NO: 43316 - DNA, 17 bp, Arabidopsis thaliana
agtagatctttggaggg

SEQ ID NO: 43317 - DNA, 17 bp, Arabidopsis thaliana
agtagatcttttggccc

SEQ ID NO: 43318 - DNA, 17 bp, Arabidopsis thaliana
agtagatgaggcccagc

SEQ ID NO: 43319 - DNA, 17 bp, Arabidopsis thaliana
agtagatgtcacagata

SEQ ID NO: 43320 - DNA, 17 bp, Arabidopsis thaliana
agtagatgtggtttttg

SEQ ID NO: 43321 - DNA, 17 bp, Arabidopsis thaliana
agtagattgcccccttg

SEQ ID NO: 43322 - DNA, 17 bp, Arabidopsis thaliana
agtagattgccccttgc

SEQ ID NO: 43323 - DNA, 17 bp, Arabidopsis thaliana
agtagattggagattgg

SEQ ID NO: 43324 - DNA, 17 bp, Arabidopsis thaliana
agtagatttccgacagg

SEQ ID NO: 43325 - DNA, 17 bp, Arabidopsis thaliana
agtagattttgagtgtg

SEQ ID NO: 43326 - DNA, 17 bp, Arabidopsis thaliana
agtagattttttgagtt

SEQ ID NO: 43327 - DNA, 17 bp, Arabidopsis thaliana
agtagcacactgccgca

SEQ ID NO: 43328 - DNA, 17 bp, Arabidopsis thaliana
agtagcacactgtcgcg

SEQ ID NO: 43329 - DNA, 17 bp, Arabidopsis thaliana
agtagcagtaggtagcg

SEQ ID NO: 43330 - DNA, 17 bp, Arabidopsis thaliana
agtagcatgctgtagat

SEQ ID NO: 43331 - DNA, 17 bp, Arabidopsis thaliana
agtagccacttcttgag

SEQ ID NO: 43332 - DNA, 17 bp, Arabidopsis thaliana
agtagcccacaaatcct

SEQ ID NO: 43333 - DNA, 17 bp, Arabidopsis thaliana
agtagcccatggttcca

SEQ ID NO: 43334 - DNA, 17 bp, Arabidopsis thaliana
agtagcccgaggtcact

SEQ ID NO: 43335 - DNA, 17 bp, Arabidopsis thaliana
agtagccgattttttta

SEQ ID NO: 43336 - DNA, 17 bp, Arabidopsis thaliana
agtagccgcatgacaca

SEQ ID NO: 43337 - DNA, 17 bp, Arabidopsis thaliana
agtagccgttgacccac

SEQ ID NO: 43338 - DNA, 17 bp, Arabidopsis thaliana
agtagccgtttgcaaat

SEQ ID NO: 43339 - DNA, 17 bp, Arabidopsis thaliana
agtagcgacagtcgcca

SEQ ID NO: 43340 - DNA, 17 bp, Arabidopsis thaliana
agtagcgacagttgcca

SEQ ID NO: 43341 - DNA, 17 bp, Arabidopsis thaliana
agtagcgacctgcacga

SEQ ID NO: 43342 - DNA, 17 bp, Arabidopsis thaliana
agtagcgcagttgggca

SEQ ID NO: 43343 - DNA, 17 bp, Arabidopsis thaliana
agtagcggcactgggtg

SEQ ID NO: 43344 - DNA, 17 bp, Arabidopsis thaliana
agtagcggcttgattat

SEQ ID NO: 43345 - DNA, 17 bp, Arabidopsis thaliana
agtagcggtcttgacga

SEQ ID NO: 43346 - DNA, 17 bp, Arabidopsis thaliana
agtagctggttccctcc

SEQ ID NO: 43347 - DNA, 17 bp, Arabidopsis thaliana
agtaggaagttctgggc

SEQ ID NO: 43348 - DNA, 17 bp, Arabidopsis thaliana
agtaggaatctgtggcc

SEQ ID NO: 43349 - DNA, 17 bp, Arabidopsis thaliana
agtaggacctacgggcc

SEQ ID NO: 43350 - DNA, 17 bp, Arabidopsis thaliana
agtaggacgtgtcggct

SEQ ID NO: 43351 - DNA, 17 bp, Arabidopsis thaliana
agtaggagcttaggctc

SEQ ID NO: 43352 - DNA, 17 bp, Arabidopsis thaliana
agtaggaggcacttttc

SEQ ID NO: 43353 - DNA, 17 bp, Arabidopsis thaliana
agtaggagggcgcggcg

SEQ ID NO: 43354 - DNA, 17 bp, Arabidopsis thaliana
agtaggatccggctggc

SEQ ID NO: 43355 - DNA, 17 bp, Arabidopsis thaliana
agtaggatgagattcca

SEQ ID NO: 43356 - DNA, 17 bp, Arabidopsis thaliana
agtaggatggccgagtg

SEQ ID NO: 43357 - DNA, 17 bp, Arabidopsis thaliana
agtaggatggttatggt

SEQ ID NO: 43358 - DNA, 17 bp, Arabidopsis thaliana
agtaggattgcccttcc

SEQ ID NO: 43359 - DNA, 17 bp, Arabidopsis thaliana
agtaggatttcgcagtc

SEQ ID NO: 43360 - DNA, 17 bp, Arabidopsis thaliana
agtaggatttcttggtt

SEQ ID NO: 43361 - DNA, 17 bp, Arabidopsis thaliana
agtaggcacgtgggcgg

SEQ ID NO: 43362 - DNA, 17 bp, Arabidopsis thaliana
agtaggcagaaactctc

SEQ ID NO: 43363 - DNA, 17 bp, Arabidopsis thaliana
agtaggcccaggatagt

SEQ ID NO: 43364 - DNA, 17 bp, Arabidopsis thaliana
agtaggcctgggcacga

SEQ ID NO: 43365 - DNA, 17 bp, Arabidopsis thaliana
agtaggcttctacaagt

SEQ ID NO: 43366 - DNA, 17 bp, Arabidopsis thaliana
agtagggcaaatgccat

SEQ ID NO: 43367 - DNA, 17 bp, Arabidopsis thaliana
agtagggcacgtctgcc

SEQ ID NO: 43368 - DNA, 17 bp, Arabidopsis thaliana
agtagggcctttttttc

SEQ ID NO: 43369 - DNA, 17 bp, Arabidopsis thaliana
agtaggggatagggttg

SEQ ID NO: 43370 - DNA, 17 bp, Arabidopsis thaliana
agtaggtagcgccttgg

SEQ ID NO: 43371 - DNA, 17 bp, Arabidopsis thaliana
agtaggtccgacttggt

SEQ ID NO: 43372 - DNA, 17 bp, Arabidopsis thaliana
agtaggtgaacagaccc

SEQ ID NO: 43373 - DNA, 17 bp, Arabidopsis thaliana
agtaggtgagggtgtcc

SEQ ID NO: 43374 - DNA, 17 bp, Arabidopsis thaliana
agtaggtgagggtgtcg

SEQ ID NO: 43375 - DNA, 17 bp, Arabidopsis thaliana
agtaggtgggtactcga

SEQ ID NO: 43376 - DNA, 17 bp, Arabidopsis thaliana
agtagtactcctctcgg

SEQ ID NO: 43377 - DNA, 17 bp, Arabidopsis thaliana
agtagtagatattgcgg

SEQ ID NO: 43378 - DNA, 17 bp, Arabidopsis thaliana
agtagtagctagttcat

SEQ ID NO: 43379 - DNA, 17 bp, Arabidopsis thaliana
agtagtccgaccgccag

SEQ ID NO: 43380 - DNA, 17 bp, Arabidopsis thaliana
agtagtccgaccgcgaa

SEQ ID NO: 43381 - DNA, 17 bp, Arabidopsis thaliana
agtagtccggaggagat

SEQ ID NO: 43382 - DNA, 17 bp, Arabidopsis thaliana
agtagtcctcgtgttgc

SEQ ID NO: 43383 - DNA, 17 bp, Arabidopsis thaliana
agtagtcctgggcgttt

SEQ ID NO: 43384 - DNA, 17 bp, Arabidopsis thaliana
agtagtccttgcaaccg

SEQ ID NO: 43385 - DNA, 17 bp, Arabidopsis thaliana
agtagtcgctaaacttg

SEQ ID NO: 43386 - DNA, 17 bp, Arabidopsis thaliana
agtagtcggaacgagac

SEQ ID NO: 43387 - DNA, 17 bp, Arabidopsis thaliana
agtagtcgtgtgtcggc

SEQ ID NO: 43388 - DNA, 17 bp, Arabidopsis thaliana
agtagtgactgaccttc

SEQ ID NO: 43389 - DNA, 17 bp, Arabidopsis thaliana
agtagtgaggccgattc

SEQ ID NO: 43390 - DNA, 17 bp, Arabidopsis thaliana
agtagtgattagggttc

SEQ ID NO: 43391 - DNA, 17 bp, Arabidopsis thaliana
agtagtgcaacgcatgg

SEQ ID NO: 43392 - DNA, 17 bp, Arabidopsis thaliana
agtagtgccagaccagc

SEQ ID NO: 43393 - DNA, 17 bp, Arabidopsis thaliana
agtagtggtagaagttg

SEQ ID NO: 43394 - DNA, 17 bp, Arabidopsis thaliana
agtagttagaccgctag

SEQ ID NO: 43395 - DNA, 17 bp, Arabidopsis thaliana
agtagttatcgctaatg

SEQ ID NO: 43396 - DNA, 17 bp, Arabidopsis thaliana
agtagttcagtttgcgt

SEQ ID NO: 43397 - DNA, 17 bp, Arabidopsis thaliana
agtagttccgacccgca

SEQ ID NO: 43398 - DNA, 17 bp, Arabidopsis thaliana
agtagttcgatctctcc

SEQ ID NO: 43399 - DNA, 17 bp, Arabidopsis thaliana
agtagttcgtgaggtca

SEQ ID NO: 43400 - DNA, 17 bp, Arabidopsis thaliana
agtagttgaccttggct

SEQ ID NO: 43401 - DNA, 17 bp, Arabidopsis thaliana
agtagttgcgtctctct

SEQ ID NO: 43402 - DNA, 17 bp, Arabidopsis thaliana
agtagttgtctacgcga

SEQ ID NO: 43403 - DNA, 17 bp, Arabidopsis thaliana
agtagttgtctcgggtg

SEQ ID NO: 43404 - DNA, 17 bp, Arabidopsis thaliana
agtagttgttctcgtgt

SEQ ID NO: 43405 - DNA, 17 bp, Arabidopsis thaliana
agtagtttccgtgatat

SEQ ID NO: 43406 - DNA, 17 bp, Arabidopsis thaliana
agtagtttcctaagtgt

SEQ ID NO: 43407 - DNA, 17 bp, Arabidopsis thaliana
agtagtttttcgacgct

SEQ ID NO: 43408 - DNA, 17 bp, Arabidopsis thaliana
agtataaactaggtttt

SEQ ID NO: 43409 - DNA, 17 bp, Arabidopsis thaliana
agtataccgcaggtagg

SEQ ID NO: 43410 - DNA, 17 bp, Arabidopsis thaliana
agtatagacgagatttc

SEQ ID NO: 43411 - DNA, 17 bp, Arabidopsis thaliana
agtatagaggccggctg

SEQ ID NO: 43412 - DNA, 17 bp, Arabidopsis thaliana
agtatagattggaccgt

SEQ ID NO: 43413 - DNA, 17 bp, Arabidopsis thaliana
agtatagctacaagtag

SEQ ID NO: 43414 - DNA, 17 bp, Arabidopsis thaliana
agtataggatttctcgg

SEQ ID NO: 43415 - DNA, 17 bp, Arabidopsis thaliana
agtataggcggctcctt

SEQ ID NO: 43416 - DNA, 17 bp, Arabidopsis thaliana
agtataggggtgtcaaa

SEQ ID NO: 43417 - DNA, 17 bp, Arabidopsis thaliana
agtatagggtggaaaat

SEQ ID NO: 43418 - DNA, 17 bp, Arabidopsis thaliana
agtatagtgtgtgattg

SEQ ID NO: 43419 - DNA, 17 bp, Arabidopsis thaliana
agtatagttaccgacaa

SEQ ID NO: 43420 - DNA, 17 bp, Arabidopsis thaliana
agtatcaccatcacacc

SEQ ID NO: 43421 - DNA, 17 bp, Arabidopsis thaliana
agtatcagggagggctg

SEQ ID NO: 43422 - DNA, 17 bp, Arabidopsis thaliana
agtatcaggtgacgtga

SEQ ID NO: 43423 - DNA, 17 bp, Arabidopsis thaliana
agtatcaggtgacgtgg

SEQ ID NO: 43424 - DNA, 17 bp, Arabidopsis thaliana
agtatcatcattcgctt

SEQ ID NO: 43425 - DNA, 17 bp, Arabidopsis thaliana
agtatcatctacgtggc

SEQ ID NO: 43426 - DNA, 17 bp, Arabidopsis thaliana
agtatcatctcgatgtt

SEQ ID NO: 43427 - DNA, 17 bp, Arabidopsis thaliana
agtatcatctgacatgg

SEQ ID NO: 43428 - DNA, 17 bp, Arabidopsis thaliana
agtatcatctgacgtgg

SEQ ID NO: 43429 - DNA, 17 bp, Arabidopsis thaliana
agtatcattcttcgttt

SEQ ID NO: 43430 - DNA, 17 bp, Arabidopsis thaliana
agtatcccgccagccgg

SEQ ID NO: 43431 - DNA, 17 bp, Arabidopsis thaliana
agtatccgactaggatc

SEQ ID NO: 43432 - DNA, 17 bp, Arabidopsis thaliana
agtatccgctgctgcat

SEQ ID NO: 43433 - DNA, 17 bp, Arabidopsis thaliana
agtatcctactcaactt

SEQ ID NO: 43434 - DNA, 17 bp, Arabidopsis thaliana
agtatcctcagagcggt

SEQ ID NO: 43435 - DNA, 17 bp, Arabidopsis thaliana
agtatcctcggagcagt

SEQ ID NO: 43436 - DNA, 17 bp, Arabidopsis thaliana
agtatcctcggagcggt

SEQ ID NO: 43437 - DNA, 17 bp, Arabidopsis thaliana
agtatcgaccgatgttg

SEQ ID NO: 43438 - DNA, 17 bp, Arabidopsis thaliana
agtatcgactcaaacac

SEQ ID NO: 43439 - DNA, 17 bp, Arabidopsis thaliana
agtatcgactcaaactc

SEQ ID NO: 43440 - DNA, 17 bp, Arabidopsis thaliana
agtatcgattagaccgc

SEQ ID NO: 43441 - DNA, 17 bp, Arabidopsis thaliana
agtatcgattatcccgt

SEQ ID NO: 43442 - DNA, 17 bp, Arabidopsis thaliana
agtatcgattctacttg

SEQ ID NO: 43443 - DNA, 17 bp, Arabidopsis thaliana
agtatcgcaagctgttc

SEQ ID NO: 43444 - DNA, 17 bp, Arabidopsis thaliana
agtatcgcctctgttcg

SEQ ID NO: 43445 - DNA, 17 bp, Arabidopsis thaliana
agtatcgctgcgactct

SEQ ID NO: 43446 - DNA, 17 bp, Arabidopsis thaliana
agtatcgctgcgggctt

SEQ ID NO: 43447 - DNA, 17 bp, Arabidopsis thaliana
agtatcgctttattgtc

SEQ ID NO: 43448 - DNA, 17 bp, Arabidopsis thaliana
agtatcgggaatgtgcc

SEQ ID NO: 43449 - DNA, 17 bp, Arabidopsis thaliana
agtatcgggtgatgtgg

SEQ ID NO: 43450 - DNA, 17 bp, Arabidopsis thaliana
agtatcggttgaccagt

SEQ ID NO: 43451 - DNA, 17 bp, Arabidopsis thaliana
agtatcgtcatgccaaa

SEQ ID NO: 43452 - DNA, 17 bp, Arabidopsis thaliana
agtatcgtcttcagagt

SEQ ID NO: 43453 - DNA, 17 bp, Arabidopsis thaliana
agtatcgtttcaggttg

SEQ ID NO: 43454 - DNA, 17 bp, Arabidopsis thaliana
agtatctcaacggtggc

SEQ ID NO: 43455 - DNA, 17 bp, Arabidopsis thaliana
agtatctcaccaatgga

SEQ ID NO: 43456 - DNA, 17 bp, Arabidopsis thaliana
agtatctccaagcattt

SEQ ID NO: 43457 - DNA, 17 bp, Arabidopsis thaliana
agtatctcgatgtgaat

SEQ ID NO: 43458 - DNA, 17 bp, Arabidopsis thaliana
agtatctctggtggact

SEQ ID NO: 43459 - DNA, 17 bp, Arabidopsis thaliana
agtatctgaccaatgga

SEQ ID NO: 43460 - DNA, 17 bp, Arabidopsis thaliana
agtatctgccatctttg

SEQ ID NO: 43461 - DNA, 17 bp, Arabidopsis thaliana
agtatctggatccgtat

SEQ ID NO: 43462 - DNA, 17 bp, Arabidopsis thaliana
agtatcttcaccgagac

SEQ ID NO: 43463 - DNA, 17 bp, Arabidopsis thaliana
agtatcttgatgatgct

SEQ ID NO: 43464 - DNA, 17 bp, Arabidopsis thaliana
agtatgaaacgacgccg

SEQ ID NO: 43465 - DNA, 17 bp, Arabidopsis thaliana
agtatgaacgaattcag

SEQ ID NO: 43466 - DNA, 17 bp, Arabidopsis thaliana
agtatgaaggggttctc

SEQ ID NO: 43467 - DNA, 17 bp, Arabidopsis thaliana
agtatgaccacaatcca

SEQ ID NO: 43468 - DNA, 17 bp, Arabidopsis thaliana
agtatgaccagtctgaa

SEQ ID NO: 43469 - DNA, 17 bp, Arabidopsis thaliana
agtatgactctgaaaca

SEQ ID NO: 43470 - DNA, 17 bp, Arabidopsis thaliana
agtatgactttgaacca

SEQ ID NO: 43471 - DNA, 17 bp, Arabidopsis thaliana
agtatgagctggtattc

SEQ ID NO: 43472 - DNA, 17 bp, Arabidopsis thaliana
agtatgaggccttttgg

SEQ ID NO: 43473 - DNA, 17 bp, Arabidopsis thaliana
agtatgagtaggaatca

SEQ ID NO: 43474 - DNA, 17 bp, Arabidopsis thaliana
agtatgatggcggttga

SEQ ID NO: 43475 - DNA, 17 bp, Arabidopsis thaliana
agtatgatttttagcgg

SEQ ID NO: 43476 - DNA, 17 bp, Arabidopsis thaliana
agtatgcagccggaatc

SEQ ID NO: 43477 - DNA, 17 bp, Arabidopsis thaliana
agtatgcaggctattcc

SEQ ID NO: 43478 - DNA, 17 bp, Arabidopsis thaliana
agtatgccataccagtc

SEQ ID NO: 43479 - DNA, 17 bp, Arabidopsis thaliana
agtatgccgcaatggag

SEQ ID NO: 43480 - DNA, 17 bp, Arabidopsis thaliana
agtatggaacagatgat

SEQ ID NO: 43481 - DNA, 17 bp, Arabidopsis thaliana
agtatggactgaaccac

SEQ ID NO: 43482 - DNA, 17 bp, Arabidopsis thaliana
agtatggactgaaccgc

SEQ ID NO: 43483 - DNA, 17 bp, Arabidopsis thaliana
agtatggacttgactgc

SEQ ID NO: 43484 - DNA, 17 bp, Arabidopsis thaliana
agtatggagcacagcaa

SEQ ID NO: 43485 - DNA, 17 bp, Arabidopsis thaliana
agtatggagcagttgtt

SEQ ID NO: 43486 - DNA, 17 bp, Arabidopsis thaliana
agtatggagcgcttgtt

SEQ ID NO: 43487 - DNA, 17 bp, Arabidopsis thaliana
agtatggccccagagtc

SEQ ID NO: 43488 - DNA, 17 bp, Arabidopsis thaliana
agtatggccccggagtc

SEQ ID NO: 43489 - DNA, 17 bp, Arabidopsis thaliana
agtatggctctgaacca

SEQ ID NO: 43490 - DNA, 17 bp, Arabidopsis thaliana
agtatggctcttgacca

SEQ ID NO: 43491 - DNA, 17 bp, Arabidopsis thaliana
agtatgggcctaactca

SEQ ID NO: 43492 - DNA, 17 bp, Arabidopsis thaliana
agtatggggcgcttgtt

SEQ ID NO: 43493 - DNA, 17 bp, Arabidopsis thaliana
agtatgggtcggccggt

SEQ ID NO: 43494 - DNA, 17 bp, Arabidopsis thaliana
agtatggtcgcaaggct

SEQ ID NO: 43495 - DNA, 17 bp, Arabidopsis thaliana
agtatggttccccgccg

SEQ ID NO: 43496 - DNA, 17 bp, Arabidopsis thaliana
agtatggttcgcgcagt

SEQ ID NO: 43497 - DNA, 17 bp, Arabidopsis thaliana
agtatgtacggatcgga

SEQ ID NO: 43498 - DNA, 17 bp, Arabidopsis thaliana
agtatgtacggatcggg

SEQ ID NO: 43499 - DNA, 17 bp, Arabidopsis thaliana
agtatgtcggcttctat

SEQ ID NO: 43500 - DNA, 17 bp, Arabidopsis thaliana
agtatgtcgtccagcgg

SEQ ID NO: 43501 - DNA, 17 bp, Arabidopsis thaliana
agtatgtgagatctgct

SEQ ID NO: 43502 - DNA, 17 bp, Arabidopsis thaliana
agtatgtgcggatcggg

SEQ ID NO: 43503 - DNA, 17 bp, Arabidopsis thaliana
agtatgtggagagtcga

SEQ ID NO: 43504 - DNA, 17 bp, Arabidopsis thaliana
agtatgtgttttgctgt

SEQ ID NO: 43505 - DNA, 17 bp, Arabidopsis thaliana
agtatgtgttttgttgt

SEQ ID NO: 43506 - DNA, 17 bp, Arabidopsis thaliana
agtatgttacgtaatac

SEQ ID NO: 43507 - DNA, 17 bp, Arabidopsis thaliana
agtattaccaccgagcg

SEQ ID NO: 43508 - DNA, 17 bp, Arabidopsis thaliana
agtattacccggttctt

SEQ ID NO: 43509 - DNA, 17 bp, Arabidopsis thaliana
agtattatgacagacta

SEQ ID NO: 43510 - DNA, 17 bp, Arabidopsis thaliana
agtattcagtccgattt

SEQ ID NO: 43511 - DNA, 17 bp, Arabidopsis thaliana
agtattcatcgcggaca

SEQ ID NO: 43512 - DNA, 17 bp, Arabidopsis thaliana
agtattcccgcctgtca

SEQ ID NO: 43513 - DNA, 17 bp, Arabidopsis thaliana
agtattcgattgcggcg

SEQ ID NO: 43514 - DNA, 17 bp, Arabidopsis thaliana
agtattgattgacactg

SEQ ID NO: 43515 - DNA, 17 bp, Arabidopsis thaliana
agtattggactcgacct

SEQ ID NO: 43516 - DNA, 17 bp, Arabidopsis thaliana
agtattggccgtttttg

SEQ ID NO: 43517 - DNA, 17 bp, Arabidopsis thaliana
agtatttcaaaggtccg

SEQ ID NO: 43518 - DNA, 17 bp, Arabidopsis thaliana
agtatttcagagtggac

SEQ ID NO: 43519 - DNA, 17 bp, Arabidopsis thaliana
agtatttcctaaggttt

SEQ ID NO: 43520 - DNA, 17 bp, Arabidopsis thaliana
agtatttcggtgcgatt

SEQ ID NO: 43521 - DNA, 17 bp, Arabidopsis thaliana
agtatttcggtgcgttt

SEQ ID NO: 43522 - DNA, 17 bp, Arabidopsis thaliana
agtatttctgtgtgtat

SEQ ID NO: 43523 - DNA, 17 bp, Arabidopsis thaliana
agtatttcttgagcctt

SEQ ID NO: 43524 - DNA, 17 bp, Arabidopsis thaliana
agtatttgcggttgcgg

SEQ ID NO: 43525 - DNA, 17 bp, Arabidopsis thaliana
agtatttgcggttgttt

SEQ ID NO: 43526 - DNA, 17 bp, Arabidopsis thaliana
agtatttggcgatttgg

SEQ ID NO: 43527 - DNA, 17 bp, Arabidopsis thaliana
agtatttggggacgagg

SEQ ID NO: 43528 - DNA, 17 bp, Arabidopsis thaliana
agtattttgaatgaggc

SEQ ID NO: 43529 - DNA, 17 bp, Arabidopsis thaliana
agtattttggggaacgg

SEQ ID NO: 43530 - DNA, 17 bp, Arabidopsis thaliana
agtattttgtgttcccg

SEQ ID NO: 43531 - DNA, 17 bp, Arabidopsis thaliana
agtatttttgacttgcg

SEQ ID NO: 43532 - DNA, 17 bp, Arabidopsis thaliana
agtcaaaacctggattt

SEQ ID NO: 43533 - DNA, 17 bp, Arabidopsis thaliana
agtcaaaatccggcgaa

SEQ ID NO: 43534 - DNA, 17 bp, Arabidopsis thaliana
agtcaaaattctacagc

SEQ ID NO: 43535 - DNA, 17 bp, Arabidopsis thaliana
agtcaaaccctgagttg

SEQ ID NO: 43536 - DNA, 17 bp, Arabidopsis thaliana
agtcaaacgatcagatg

SEQ ID NO: 43537 - DNA, 17 bp, Arabidopsis thaliana
agtcaaactgtcgtgat

SEQ ID NO: 43538 - DNA, 17 bp, Arabidopsis thaliana
agtcaaagacttgggtg

SEQ ID NO: 43539 - DNA, 17 bp, Arabidopsis thaliana
agtcaaagctgtgttgt

SEQ ID NO: 43540 - DNA, 17 bp, Arabidopsis thaliana
agtcaaaggctttggat

SEQ ID NO: 43541 - DNA, 17 bp, Arabidopsis thaliana
agtcaaagtgccttctc

SEQ ID NO: 43542 - DNA, 17 bp, Arabidopsis thaliana
agtcaaatccggttact

SEQ ID NO: 43543 - DNA, 17 bp, Arabidopsis thaliana
agtcaaatgcgttggat

SEQ ID NO: 43544 - DNA, 17 bp, Arabidopsis thaliana
agtcaaatgctttggat

SEQ ID NO: 43545 - DNA, 17 bp, Arabidopsis thaliana
agtcaaatggaaatggc

SEQ ID NO: 43546 - DNA, 17 bp, Arabidopsis thaliana
agtcaaatttgacagac

SEQ ID NO: 43547 - DNA, 17 bp, Arabidopsis thaliana
agtcaaattttgttgac

SEQ ID NO: 43548 - DNA, 17 bp, Arabidopsis thaliana
agtcaacaccacttatg

SEQ ID NO: 43549 - DNA, 17 bp, Arabidopsis thaliana
agtcaacactacgggat

SEQ ID NO: 43550 - DNA, 17 bp, Arabidopsis thaliana
agtcaacagagtgtgga

SEQ ID NO: 43551 - DNA, 17 bp, Arabidopsis thaliana
agtcaacatggcctcta

SEQ ID NO: 43552 - DNA, 17 bp, Arabidopsis thaliana
agtcaaccaacggtgta

SEQ ID NO: 43553 - DNA, 17 bp, Arabidopsis thaliana
agtcaaccgatggtatt

SEQ ID NO: 43554 - DNA, 17 bp, Arabidopsis thaliana
agtcaacgcgagctgat

SEQ ID NO: 43555 - DNA, 17 bp, Arabidopsis thaliana
agtcaacgcggagttag

SEQ ID NO: 43556 - DNA, 17 bp, Arabidopsis thaliana
agtcaacggcaatttaa

SEQ ID NO: 43557 - DNA, 17 bp, Arabidopsis thaliana
agtcaacggcacacagc

SEQ ID NO: 43558 - DNA, 17 bp, Arabidopsis thaliana
agtcaactctgccattg

SEQ ID NO: 43559 - DNA, 17 bp, Arabidopsis thaliana
agtcaactgacggacca

SEQ ID NO: 43560 - DNA, 17 bp, Arabidopsis thaliana
agtcaactgatcggttt

SEQ ID NO: 43561 - DNA, 17 bp, Arabidopsis thaliana
agtcaactggtccacta

SEQ ID NO: 43562 - DNA, 17 bp, Arabidopsis thaliana
agtcaactgtggatcaa

SEQ ID NO: 43563 - DNA, 17 bp, Arabidopsis thaliana
agtcaacttggtcatgg

SEQ ID NO: 43564 - DNA, 17 bp, Arabidopsis thaliana
agtcaactttcaaattg

SEQ ID NO: 43565 - DNA, 17 bp, Arabidopsis thaliana
agtcaactttgggcttt

SEQ ID NO: 43566 - DNA, 17 bp, Arabidopsis thaliana
agtcaagatgactggcg

SEQ ID NO: 43567 - DNA, 17 bp, Arabidopsis thaliana
agtcaagatgatgaatt

SEQ ID NO: 43568 - DNA, 17 bp, Arabidopsis thaliana
agtcaagcaacacgagt

SEQ ID NO: 43569 - DNA, 17 bp, Arabidopsis thaliana
agtcaagccaagcaata

SEQ ID NO: 43570 - DNA, 17 bp, Arabidopsis thaliana
agtcaaggctttagtga

SEQ ID NO: 43571 - DNA, 17 bp, Arabidopsis thaliana
agtcaagggcagacact

SEQ ID NO: 43572 - DNA, 17 bp, Arabidopsis thaliana
agtcaagggcgttgtgt

SEQ ID NO: 43573 - DNA, 17 bp, Arabidopsis thaliana
agtcaaggtccctccca

SEQ ID NO: 43574 - DNA, 17 bp, Arabidopsis thaliana
agtcaaggtcgtattcg

SEQ ID NO: 43575 - DNA, 17 bp, Arabidopsis thaliana
agtcaagtcagtccatc

SEQ ID NO: 43576 - DNA, 17 bp, Arabidopsis thaliana
agtcaatcccggtagaa

SEQ ID NO: 43577 - DNA, 17 bp, Arabidopsis thaliana
agtcaatctaagtgatc

SEQ ID NO: 43578 - DNA, 17 bp, Arabidopsis thaliana
agtcaatctctagtcgt

SEQ ID NO: 43579 - DNA, 17 bp, Arabidopsis thaliana
agtcaatctgcagaaat

SEQ ID NO: 43580 - DNA, 17 bp, Arabidopsis thaliana
agtcaatggaagaccca

SEQ ID NO: 43581 - DNA, 17 bp, Arabidopsis thaliana
agtcaatggaaggacca

SEQ ID NO: 43582 - DNA, 17 bp, Arabidopsis thaliana
agtcaatggcaggacca

SEQ ID NO: 43583 - DNA, 17 bp, Arabidopsis thaliana
agtcaattagggccatt

SEQ ID NO: 43584 - DNA, 17 bp, Arabidopsis thaliana
agtcaattctaaaattt

SEQ ID NO: 43585 - DNA, 17 bp, Arabidopsis thaliana
agtcaattgcattggat

SEQ ID NO: 43586 - DNA, 17 bp, Arabidopsis thaliana
agtcaattgtgtgttgt

SEQ ID NO: 43587 - DNA, 17 bp, Arabidopsis thaliana
agtcaattgttgagagc

SEQ ID NO: 43588 - DNA, 17 bp, Arabidopsis thaliana
agtcaatttacatgtca

SEQ ID NO: 43589 - DNA, 17 bp, Arabidopsis thaliana
agtcacaagatccatca

SEQ ID NO: 43590 - DNA, 17 bp, Arabidopsis thaliana
agtcacaatttacgagg

SEQ ID NO: 43591 - DNA, 17 bp, Arabidopsis thaliana
agtcacacgatgatgga

SEQ ID NO: 43592 - DNA, 17 bp, Arabidopsis thaliana
agtcacacttgttggcc

SEQ ID NO: 43593 - DNA, 17 bp, Arabidopsis thaliana
agtcacagaatctaacg

SEQ ID NO: 43594 - DNA, 17 bp, Arabidopsis thaliana
agtcacagagttgatgg

SEQ ID NO: 43595 - DNA, 17 bp, Arabidopsis thaliana
agtcacagctgatgtac

SEQ ID NO: 43596 - DNA, 17 bp, Arabidopsis thaliana
agtcacagctggtgtac

SEQ ID NO: 43597 - DNA, 17 bp, Arabidopsis thaliana
agtcacaggatttccag

SEQ ID NO: 43598 - DNA, 17 bp, Arabidopsis thaliana
agtcacagttttcagag

SEQ ID NO: 43599 - DNA, 17 bp, Arabidopsis thaliana
agtcacatcctgtagat

SEQ ID NO: 43600 - DNA, 17 bp, Arabidopsis thaliana
agtcacatcggtgatgt

SEQ ID NO: 43601 - DNA, 17 bp, Arabidopsis thaliana
agtcacatgattgagct

SEQ ID NO: 43602 - DNA, 17 bp, Arabidopsis thaliana
agtcacatttgatcaaa

SEQ ID NO: 43603 - DNA, 17 bp, Arabidopsis thaliana
agtcacatttggattgc

SEQ ID NO: 43604 - DNA, 17 bp, Arabidopsis thaliana
agtcaccactttgcgac

SEQ ID NO: 43605 - DNA, 17 bp, Arabidopsis thaliana
agtcaccagcgacaggc

SEQ ID NO: 43606 - DNA, 17 bp, Arabidopsis thaliana
agtcaccattcagaccc

SEQ ID NO: 43607 - DNA, 17 bp, Arabidopsis thaliana
agtcaccattcggagcc

SEQ ID NO: 43608 - DNA, 17 bp, Arabidopsis thaliana
agtcaccattctgagcc

SEQ ID NO: 43609 - DNA, 17 bp, Arabidopsis thaliana
agtcaccgccgtcttca

SEQ ID NO: 43610 - DNA, 17 bp, Arabidopsis thaliana
agtcaccgcttggcggt

SEQ ID NO: 43611 - DNA, 17 bp, Arabidopsis thaliana
agtcaccggcggtttcg

SEQ ID NO: 43612 - DNA, 17 bp, Arabidopsis thaliana
agtcaccggggcgtctc

SEQ ID NO: 43613 - DNA, 17 bp, Arabidopsis thaliana
agtcacctcccacaaat

SEQ ID NO: 43614 - DNA, 17 bp, Arabidopsis thaliana
agtcaccttttactgtt

SEQ ID NO: 43615 - DNA, 17 bp, Arabidopsis thaliana
agtcacgatcaaccagt

SEQ ID NO: 43616 - DNA, 17 bp, Arabidopsis thaliana
agtcacgctaacattaa

SEQ ID NO: 43617 - DNA, 17 bp, Arabidopsis thaliana
agtcacggacttggcca

SEQ ID NO: 43618 - DNA, 17 bp, Arabidopsis thaliana
agtcacggctctgggtg

SEQ ID NO: 43619 - DNA, 17 bp, Arabidopsis thaliana
agtcacgggcggcggag

SEQ ID NO: 43620 - DNA, 17 bp, Arabidopsis thaliana
agtcacggtgattggga

SEQ ID NO: 43621 - DNA, 17 bp, Arabidopsis thaliana
agtcacgtctaaacttt

SEQ ID NO: 43622 - DNA, 17 bp, Arabidopsis thaliana
agtcacgtctgcctggg

SEQ ID NO: 43623 - DNA, 17 bp, Arabidopsis thaliana
agtcactaacacctcca

SEQ ID NO: 43624 - DNA, 17 bp, Arabidopsis thaliana
agtcactaagtccagct

SEQ ID NO: 43625 - DNA, 17 bp, Arabidopsis thaliana
agtcactaggtattaga

SEQ ID NO: 43626 - DNA, 17 bp, Arabidopsis thaliana
agtcactattcggaccc

SEQ ID NO: 43627 - DNA, 17 bp, Arabidopsis thaliana
agtcactcagaagacga

SEQ ID NO: 43628 - DNA, 17 bp, Arabidopsis thaliana
agtcactcgattcagcc

SEQ ID NO: 43629 - DNA, 17 bp, Arabidopsis thaliana
agtcactcggcagagat

SEQ ID NO: 43630 - DNA, 17 bp, Arabidopsis thaliana
agtcactgctctatctg

SEQ ID NO: 43631 - DNA, 17 bp, Arabidopsis thaliana
agtcactggtgcgctta

SEQ ID NO: 43632 - DNA, 17 bp, Arabidopsis thaliana
agtcacttctgtgttca

SEQ ID NO: 43633 - DNA, 17 bp, Arabidopsis thaliana
agtcacttgtgtctttt

SEQ ID NO: 43634 - DNA, 17 bp, Arabidopsis thaliana
agtcactttcggcgatg

SEQ ID NO: 43635 - DNA, 17 bp, Arabidopsis thaliana
agtcactttgcaatcca

SEQ ID NO: 43636 - DNA, 17 bp, Arabidopsis thaliana
agtcacttttcactgct

SEQ ID NO: 43637 - DNA, 17 bp, Arabidopsis thaliana
agtcacttttcactgtt

SEQ ID NO: 43638 - DNA, 17 bp, Arabidopsis thaliana
agtcagaaatgcaagta

SEQ ID NO: 43639 - DNA, 17 bp, Arabidopsis thaliana
agtcagaaatgcaagtt

SEQ ID NO: 43640 - DNA, 17 bp, Arabidopsis thaliana
agtcagaaatgcagacg

SEQ ID NO: 43641 - DNA, 17 bp, Arabidopsis thaliana
agtcagaaatgcaggca

SEQ ID NO: 43642 - DNA, 17 bp, Arabidopsis thaliana
agtcagaaatgcaggcg

SEQ ID NO: 43643 - DNA, 17 bp, Arabidopsis thaliana
agtcagaagatacggcg

SEQ ID NO: 43644 - DNA, 17 bp, Arabidopsis thaliana
agtcagacagcctcagt

SEQ ID NO: 43645 - DNA, 17 bp, Arabidopsis thaliana
agtcagaccgcatgcat

SEQ ID NO: 43646 - DNA, 17 bp, Arabidopsis thaliana
agtcagaccgcctatat

SEQ ID NO: 43647 - DNA, 17 bp, Arabidopsis thaliana
agtcagaccgcctgcat

SEQ ID NO: 43648 - DNA, 17 bp, Arabidopsis thaliana
agtcagacgaggccaag

SEQ ID NO: 43649 - DNA, 17 bp, Arabidopsis thaliana
agtcagacgtttcacaa

SEQ ID NO: 43650 - DNA, 17 bp, Arabidopsis thaliana
agtcagacttacagcct

SEQ ID NO: 43651 - DNA, 17 bp, Arabidopsis thaliana
agtcagacttcatgggt

SEQ ID NO: 43652 - DNA, 17 bp, Arabidopsis thaliana
agtcagagatgtgaatc

SEQ ID NO: 43653 - DNA, 17 bp, Arabidopsis thaliana
agtcagagtatggatcg

SEQ ID NO: 43654 - DNA, 17 bp, Arabidopsis thaliana
agtcagagttgaaatag

SEQ ID NO: 43655 - DNA, 17 bp, Arabidopsis thaliana
agtcagatcactgtgtg

SEQ ID NO: 43656 - DNA, 17 bp, Arabidopsis thaliana
agtcagatctgcgcttc

SEQ ID NO: 43657 - DNA, 17 bp, Arabidopsis thaliana
agtcagatctggtgaaa

SEQ ID NO: 43658 - DNA, 17 bp, Arabidopsis thaliana
agtcagattttggatac

SEQ ID NO: 43659 - DNA, 17 bp, Arabidopsis thaliana
agtcagattttgttccg

SEQ ID NO: 43660 - DNA, 17 bp, Arabidopsis thaliana
agtcagcaatcgtagaa

SEQ ID NO: 43661 - DNA, 17 bp, Arabidopsis thaliana
agtcagccaagcgttca

SEQ ID NO: 43662 - DNA, 17 bp, Arabidopsis thaliana
agtcagccagtacacat

SEQ ID NO: 43663 - DNA, 17 bp, Arabidopsis thaliana
agtcagccctttgtcgc

SEQ ID NO: 43664 - DNA, 17 bp, Arabidopsis thaliana
agtcagccgttgattcc

SEQ ID NO: 43665 - DNA, 17 bp, Arabidopsis thaliana
agtcagccttaggagac

SEQ ID NO: 43666 - DNA, 17 bp, Arabidopsis thaliana
agtcagcgaccagcgac

SEQ ID NO: 43667 - DNA, 17 bp, Arabidopsis thaliana
agtcagcgtgctccggg

SEQ ID NO: 43668 - DNA, 17 bp, Arabidopsis thaliana
agtcagcgtttgtaaag

SEQ ID NO: 43669 - DNA, 17 bp, Arabidopsis thaliana
agtcagctcagaactgg

SEQ ID NO: 43670 - DNA, 17 bp, Arabidopsis thaliana
agtcagctgctatcttg

SEQ ID NO: 43671 - DNA, 17 bp, Arabidopsis thaliana
agtcagctgtgcctctg

SEQ ID NO: 43672 - DNA, 17 bp, Arabidopsis thaliana
agtcagctgtgcttctg

SEQ ID NO: 43673 - DNA, 17 bp, Arabidopsis thaliana
agtcagctgtgtgagaa

SEQ ID NO: 43674 - DNA, 17 bp, Arabidopsis thaliana
agtcagctgttcctctg

SEQ ID NO: 43675 - DNA, 17 bp, Arabidopsis thaliana
agtcagcttttgggatg

SEQ ID NO: 43676 - DNA, 17 bp, Arabidopsis thaliana
agtcaggagtggagcct

SEQ ID NO: 43677 - DNA, 17 bp, Arabidopsis thaliana
agtcaggcacgcgtatc

SEQ ID NO: 43678 - DNA, 17 bp, Arabidopsis thaliana
agtcaggccgattgcat

SEQ ID NO: 43679 - DNA, 17 bp, Arabidopsis thaliana
agtcaggccgccttcct

SEQ ID NO: 43680 - DNA, 17 bp, Arabidopsis thaliana
agtcaggctgctacttg

SEQ ID NO: 43681 - DNA, 17 bp, Arabidopsis thaliana
agtcagggcctaagatc

SEQ ID NO: 43682 - DNA, 17 bp, Arabidopsis thaliana
agtcaggtccggttaaa

SEQ ID NO: 43683 - DNA, 17 bp, Arabidopsis thaliana
agtcaggtcgccttcct

SEQ ID NO: 43684 - DNA, 17 bp, Arabidopsis thaliana
agtcaggtggtgcatgg

SEQ ID NO: 43685 - DNA, 17 bp, Arabidopsis thaliana
agtcaggttgttagttc

SEQ ID NO: 43686 - DNA, 17 bp, Arabidopsis thaliana
agtcaggtttcaatgtg

SEQ ID NO: 43687 - DNA, 17 bp, Arabidopsis thaliana
agtcaggttttttcgtg

SEQ ID NO: 43688 - DNA, 17 bp, Arabidopsis thaliana
agtcagtacggttgtgc

SEQ ID NO: 43689 - DNA, 17 bp, Arabidopsis thaliana
agtcagtactaggatgg

SEQ ID NO: 43690 - DNA, 17 bp, Arabidopsis thaliana
agtcagtactttttcgg

SEQ ID NO: 43691 - DNA, 17 bp, Arabidopsis thaliana
agtcagtaggaatctgt

SEQ ID NO: 43692 - DNA, 17 bp, Arabidopsis thaliana
agtcagtaggagggcgc

SEQ ID NO: 43693 - DNA, 17 bp, Arabidopsis thaliana
agtcagtaggatttcgc

SEQ ID NO: 43694 - DNA, 17 bp, Arabidopsis thaliana
agtcagtatggactgaa

SEQ ID NO: 43695 - DNA, 17 bp, Arabidopsis thaliana
agtcagtatggccccgg

SEQ ID NO: 43696 - DNA, 17 bp, Arabidopsis thaliana
agtcagtatgtgcggat

SEQ ID NO: 43697 - DNA, 17 bp, Arabidopsis thaliana
agtcagtatttcggtgc

SEQ ID NO: 43698 - DNA, 17 bp, Arabidopsis thaliana
agtcagtcagacttaca

SEQ ID NO: 43699 - DNA, 17 bp, Arabidopsis thaliana
agtcagtcagctgttcc

SEQ ID NO: 43700 - DNA, 17 bp, Arabidopsis thaliana
agtcagtcagtgttcga

SEQ ID NO: 43701 - DNA, 17 bp, Arabidopsis thaliana
agtcagtccaatgacca

SEQ ID NO: 43702 - DNA, 17 bp, Arabidopsis thaliana
agtcagtccatccgtcc

SEQ ID NO: 43703 - DNA, 17 bp, Arabidopsis thaliana
agtcagtccatcctgta

SEQ ID NO: 43704 - DNA, 17 bp, Arabidopsis thaliana
agtcagtccatggctaa

SEQ ID NO: 43705 - DNA, 17 bp, Arabidopsis thaliana
agtcagtcccgactaag

SEQ ID NO: 43706 - DNA, 17 bp, Arabidopsis thaliana
agtcagtccgtcaaggt

SEQ ID NO: 43707 - DNA, 17 bp, Arabidopsis thaliana
agtcagtcctcccgtgt

SEQ ID NO: 43708 - DNA, 17 bp, Arabidopsis thaliana
agtcagtcgaaacaccg

SEQ ID NO: 43709 - DNA, 17 bp, Arabidopsis thaliana
agtcagtcgacggatcg

SEQ ID NO: 43710 - DNA, 17 bp, Arabidopsis thaliana
agtcagtcgcaccctga

SEQ ID NO: 43711 - DNA, 17 bp, Arabidopsis thaliana
agtcagtcgcaccctgt

SEQ ID NO: 43712 - DNA, 17 bp, Arabidopsis thaliana
agtcagtcgcacctgta

SEQ ID NO: 43713 - DNA, 17 bp, Arabidopsis thaliana
agtcagtcgcactgtag

SEQ ID NO: 43714 - DNA, 17 bp, Arabidopsis thaliana
agtcagtcgcatcctgt

SEQ ID NO: 43715 - DNA, 17 bp, Arabidopsis thaliana
agtcagtcgcattcctg

SEQ ID NO: 43716 - DNA, 17 bp, Arabidopsis thaliana
agtcagtcgccctgtag

SEQ ID NO: 43717 - DNA, 17 bp, Arabidopsis thaliana
agtcagtcgctactttt

SEQ ID NO: 43718 - DNA, 17 bp, Arabidopsis thaliana
agtcagtcgctcctgta

SEQ ID NO: 43719 - DNA, 17 bp, Arabidopsis thaliana
agtcagtcgttgcggcg

SEQ ID NO: 43720 - DNA, 17 bp, Arabidopsis thaliana
agtcagtcgttggacct

SEQ ID NO: 43721 - DNA, 17 bp, Arabidopsis thaliana
agtcagtctactatgca

SEQ ID NO: 43722 - DNA, 17 bp, Arabidopsis thaliana
agtcagtctcgctcctg

SEQ ID NO: 43723 - DNA, 17 bp, Arabidopsis thaliana
agtcagtctcggacctg

SEQ ID NO: 43724 - DNA, 17 bp, Arabidopsis thaliana
agtcagtctctcttgcg

SEQ ID NO: 43725 - DNA, 17 bp, Arabidopsis thaliana
agtcagtctggtgccag

SEQ ID NO: 43726 - DNA, 17 bp, Arabidopsis thaliana
agtcagtctgtcagttg

SEQ ID NO: 43727 - DNA, 17 bp, Arabidopsis thaliana
agtcagtcttctacggc

SEQ ID NO: 43728 - DNA, 17 bp, Arabidopsis thaliana
agtcagtcttgtgaatt

SEQ ID NO: 43729 - DNA, 17 bp, Arabidopsis thaliana
agtcagtctttcctgtg

SEQ ID NO: 43730 - DNA, 17 bp, Arabidopsis thaliana
agtcagtctttttctgg

SEQ ID NO: 43731 - DNA, 17 bp, Arabidopsis thaliana
agtcagtgaacgacctg

SEQ ID NO: 43732 - DNA, 17 bp, Arabidopsis thaliana
agtcagtgacgcttgga

SEQ ID NO: 43733 - DNA, 17 bp, Arabidopsis thaliana
agtcagtgactcaaact

SEQ ID NO: 43734 - DNA, 17 bp, Arabidopsis thaliana
agtcagtgactgtagcc

SEQ ID NO: 43735 - DNA, 17 bp, Arabidopsis thaliana
agtcagtgattcaccga

SEQ ID NO: 43736 - DNA, 17 bp, Arabidopsis thaliana
agtcagtgattttcgct

SEQ ID NO: 43737 - DNA, 17 bp, Arabidopsis thaliana
agtcagtgcacgtctgc

SEQ ID NO: 43738 - DNA, 17 bp, Arabidopsis thaliana
agtcagtgccgctcacg

SEQ ID NO: 43739 - DNA, 17 bp, Arabidopsis thaliana
agtcagtgcggactaat

SEQ ID NO: 43740 - DNA, 17 bp, Arabidopsis thaliana
agtcagtgcggttttgg

SEQ ID NO: 43741 - DNA, 17 bp, Arabidopsis thaliana
agtcagtgcgtttctac

SEQ ID NO: 43742 - DNA, 17 bp, Arabidopsis thaliana
agtcagtgctacctgga

SEQ ID NO: 43743 - DNA, 17 bp, Arabidopsis thaliana
agtcagtgcttcatccg

SEQ ID NO: 43744 - DNA, 17 bp, Arabidopsis thaliana
agtcagtggaatagacc

SEQ ID NO: 43745 - DNA, 17 bp, Arabidopsis thaliana
agtcagtggagcctgcg

SEQ ID NO: 43746 - DNA, 17 bp, Arabidopsis thaliana
agtcagtgtctcatctc

SEQ ID NO: 43747 - DNA, 17 bp, Arabidopsis thaliana
agtcagtgttgattcaa

SEQ ID NO: 43748 - DNA, 17 bp, Arabidopsis thaliana
agtcagtgtttgacccg

SEQ ID NO: 43749 - DNA, 17 bp, Arabidopsis thaliana
agtcagtgtttgatgat

SEQ ID NO: 43750 - DNA, 17 bp, Arabidopsis thaliana
agtcagtgtttgtggcg

SEQ ID NO: 43751 - DNA, 17 bp, Arabidopsis thaliana
agtcagttaagccctgt

SEQ ID NO: 43752 - DNA, 17 bp, Arabidopsis thaliana
agtcagttacggtatgt

SEQ ID NO: 43753 - DNA, 17 bp, Arabidopsis thaliana
agtcagttactaattca

SEQ ID NO: 43754 - DNA, 17 bp, Arabidopsis thaliana
agtcagttactagattt

SEQ ID NO: 43755 - DNA, 17 bp, Arabidopsis thaliana
agtcagttactatcgca

SEQ ID NO: 43756 - DNA, 17 bp, Arabidopsis thaliana
agtcagttactattggt

SEQ ID NO: 43757 - DNA, 17 bp, Arabidopsis thaliana
agtcagttagcgatttc

SEQ ID NO: 43758 - DNA, 17 bp, Arabidopsis thaliana
agtcagttcaaatccgg

SEQ ID NO: 43759 - DNA, 17 bp, Arabidopsis thaliana
agtcagttcaacacatg

SEQ ID NO: 43760 - DNA, 17 bp, Arabidopsis thaliana
agtcagttcacaggtga

SEQ ID NO: 43761 - DNA, 17 bp, Arabidopsis thaliana
agtcagttcaggtctcg

SEQ ID NO: 43762 - DNA, 17 bp, Arabidopsis thaliana
agtcagttcatttctcg

SEQ ID NO: 43763 - DNA, 17 bp, Arabidopsis thaliana
agtcagttccagatttt

SEQ ID NO: 43764 - DNA, 17 bp, Arabidopsis thaliana
agtcagttccaggagtt

SEQ ID NO: 43765 - DNA, 17 bp, Arabidopsis thaliana
agtcagttcctcatcga

SEQ ID NO: 43766 - DNA, 17 bp, Arabidopsis thaliana
agtcagttcggtcctgg

SEQ ID NO: 43767 - DNA, 17 bp, Arabidopsis thaliana
agtcagttcgtagatgg

SEQ ID NO: 43768 - DNA, 17 bp, Arabidopsis thaliana
agtcagttcgtattgac

SEQ ID NO: 43769 - DNA, 17 bp, Arabidopsis thaliana
agtcagttcgttcctgg

SEQ ID NO: 43770 - DNA, 17 bp, Arabidopsis thaliana
agtcagttctcactttg

SEQ ID NO: 43771 - DNA, 17 bp, Arabidopsis thaliana
agtcagttctcctctca

SEQ ID NO: 43772 - DNA, 17 bp, Arabidopsis thaliana
agtcagttctcctgggc

SEQ ID NO: 43773 - DNA, 17 bp, Arabidopsis thaliana
agtcagttcttctctct

SEQ ID NO: 43774 - DNA, 17 bp, Arabidopsis thaliana
agtcagttgaaccttgg

SEQ ID NO: 43775 - DNA, 17 bp, Arabidopsis thaliana
agtcagttgattgcgct

SEQ ID NO: 43776 - DNA, 17 bp, Arabidopsis thaliana
agtcagttgctaaagca

SEQ ID NO: 43777 - DNA, 17 bp, Arabidopsis thaliana
agtcagttgtagaccgt

SEQ ID NO: 43778 - DNA, 17 bp, Arabidopsis thaliana
agtcagttgtgagacga

SEQ ID NO: 43779 - DNA, 17 bp, Arabidopsis thaliana
agtcagttgtgcttctg

SEQ ID NO: 43780 - DNA, 17 bp, Arabidopsis thaliana
agtcagttgttcctctg

SEQ ID NO: 43781 - DNA, 17 bp, Arabidopsis thaliana
agtcagtttcaccagac

SEQ ID NO: 43782 - DNA, 17 bp, Arabidopsis thaliana
agtcagtttcgttgacc

SEQ ID NO: 43783 - DNA, 17 bp, Arabidopsis thaliana
agtcagtttcgtttgcc

SEQ ID NO: 43784 - DNA, 17 bp, Arabidopsis thaliana
agtcagtttcttcaccg

SEQ ID NO: 43785 - DNA, 17 bp, Arabidopsis thaliana
agtcagtttgctcaccg

SEQ ID NO: 43786 - DNA, 17 bp, Arabidopsis thaliana
agtcagtttggcccaac

SEQ ID NO: 43787 - DNA, 17 bp, Arabidopsis thaliana
agtcagtttgtgacccg

SEQ ID NO: 43788 - DNA, 17 bp, Arabidopsis thaliana
agtcagttttactctac

SEQ ID NO: 43789 - DNA, 17 bp, Arabidopsis thaliana
agtcagttttatcctga

SEQ ID NO: 43790 - DNA, 17 bp, Arabidopsis thaliana
agtcagttttcatttgg

SEQ ID NO: 43791 - DNA, 17 bp, Arabidopsis thaliana
agtcagttttgagtgcg

SEQ ID NO: 43792 - DNA, 17 bp, Arabidopsis thaliana
agtcagttttgcactat

SEQ ID NO: 43793 - DNA, 17 bp, Arabidopsis thaliana
agtcagttttgggtgcg

SEQ ID NO: 43794 - DNA, 17 bp, Arabidopsis thaliana
agtcatactttgggctc

SEQ ID NO: 43795 - DNA, 17 bp, Arabidopsis thaliana
agtcatagttacaaacg

SEQ ID NO: 43796 - DNA, 17 bp, Arabidopsis thaliana
agtcatatagtgcgacg

SEQ ID NO: 43797 - DNA, 17 bp, Arabidopsis thaliana
agtcatatgaccagtta

SEQ ID NO: 43798 - DNA, 17 bp, Arabidopsis thaliana
agtcatatggcttgatt

SEQ ID NO: 43799 - DNA, 17 bp, Arabidopsis thaliana
agtcatattaccgtcgg

SEQ ID NO: 43800 - DNA, 17 bp, Arabidopsis thaliana
agtcatcacaggcctga

SEQ ID NO: 43801 - DNA, 17 bp, Arabidopsis thaliana
agtcatcagctcgcgtt

SEQ ID NO: 43802 - DNA, 17 bp, Arabidopsis thaliana
agtcatcagtagttagc

SEQ ID NO: 43803 - DNA, 17 bp, Arabidopsis thaliana
agtcatcatgcccctta

SEQ ID NO: 43804 - DNA, 17 bp, Arabidopsis thaliana
agtcatcattcggaccc

SEQ ID NO: 43805 - DNA, 17 bp, Arabidopsis thaliana
agtcatcatttacagct

SEQ ID NO: 43806 - DNA, 17 bp, Arabidopsis thaliana
agtcatcccaggtcgtg

SEQ ID NO: 43807 - DNA, 17 bp, Arabidopsis thaliana
agtcatccctcgttgca

SEQ ID NO: 43808 - DNA, 17 bp, Arabidopsis thaliana
agtcatcctgtagatgg

SEQ ID NO: 43809 - DNA, 17 bp, Arabidopsis thaliana
agtcatcgattatcact

SEQ ID NO: 43810 - DNA, 17 bp, Arabidopsis thaliana
agtcatcgcaccaggca

SEQ ID NO: 43811 - DNA, 17 bp, Arabidopsis thaliana
agtcatcgcgttaagtc

SEQ ID NO: 43812 - DNA, 17 bp, Arabidopsis thaliana
agtcatcggctgacgga

SEQ ID NO: 43813 - DNA, 17 bp, Arabidopsis thaliana
agtcatcggctggcgaa

SEQ ID NO: 43814 - DNA, 17 bp, Arabidopsis thaliana
agtcatcggctggcgga

SEQ ID NO: 43815 - DNA, 17 bp, Arabidopsis thaliana
agtcatcgggtgcgtga

SEQ ID NO: 43816 - DNA, 17 bp, Arabidopsis thaliana
agtcatcggttaggaat

SEQ ID NO: 43817 - DNA, 17 bp, Arabidopsis thaliana
agtcatcgtccctcgag

SEQ ID NO: 43818 - DNA, 17 bp, Arabidopsis thaliana
agtcatcgttgaccacc

SEQ ID NO: 43819 - DNA, 17 bp, Arabidopsis thaliana
agtcatcgttttcgcta

SEQ ID NO: 43820 - DNA, 17 bp, Arabidopsis thaliana
agtcatctaggctgtat

SEQ ID NO: 43821 - DNA, 17 bp, Arabidopsis thaliana
agtcatctagttattaa

SEQ ID NO: 43822 - DNA, 17 bp, Arabidopsis thaliana
agtcatctatctacgat

SEQ ID NO: 43823 - DNA, 17 bp, Arabidopsis thaliana
agtcatctgaccgtttg

SEQ ID NO: 43824 - DNA, 17 bp, Arabidopsis thaliana
agtcatcttcaacctgt

SEQ ID NO: 43825 - DNA, 17 bp, Arabidopsis thaliana
agtcatggttacaaaag

SEQ ID NO: 43826 - DNA, 17 bp, Arabidopsis thaliana
agtcatggttacaaacg

SEQ ID NO: 43827 - DNA, 17 bp, Arabidopsis thaliana
agtcatgtcatctgcat

SEQ ID NO: 43828 - DNA, 17 bp, Arabidopsis thaliana
agtcattaacggaactt

SEQ ID NO: 43829 - DNA, 17 bp, Arabidopsis thaliana
agtcattcaggaaccga

SEQ ID NO: 43830 - DNA, 17 bp, Arabidopsis thaliana
agtcattccatccatcc

SEQ ID NO: 43831 - DNA, 17 bp, Arabidopsis thaliana
agtcattcgcttgggaa

SEQ ID NO: 43832 - DNA, 17 bp, Arabidopsis thaliana
agtcattcggattgttg

SEQ ID NO: 43833 - DNA, 17 bp, Arabidopsis thaliana
agtcattcttcaggaga

SEQ ID NO: 43834 - DNA, 17 bp, Arabidopsis thaliana
agtcattcttcagggga

SEQ ID NO: 43835 - DNA, 17 bp, Arabidopsis thaliana
agtcattgaggcctttg

SEQ ID NO: 43836 - DNA, 17 bp, Arabidopsis thaliana
agtcattggaaagcagg

SEQ ID NO: 43837 - DNA, 17 bp, Arabidopsis thaliana
agtcattggaggacacg

SEQ ID NO: 43838 - DNA, 17 bp, Arabidopsis thaliana
agtcattggcgccccgg

SEQ ID NO: 43839 - DNA, 17 bp, Arabidopsis thaliana
agtcatttatcgcctgt

SEQ ID NO: 43840 - DNA, 17 bp, Arabidopsis thaliana
agtcatttatggcccaa

SEQ ID NO: 43841 - DNA, 17 bp, Arabidopsis thaliana
agtcatttccatttgac

SEQ ID NO: 43842 - DNA, 17 bp, Arabidopsis thaliana
agtcatttcgtttgtgc

SEQ ID NO: 43843 - DNA, 17 bp, Arabidopsis thaliana
agtcattttagaaagcg

SEQ ID NO: 43844 - DNA, 17 bp, Arabidopsis thaliana
agtcattttcgtgattt

SEQ ID NO: 43845 - DNA, 17 bp, Arabidopsis thaliana
agtcattttttgctgtt

SEQ ID NO: 43846 - DNA, 17 bp, Arabidopsis thaliana
agtccaaaatcaagata

SEQ ID NO: 43847 - DNA, 17 bp, Arabidopsis thaliana
agtccaaagaactcgaa

SEQ ID NO: 43848 - DNA, 17 bp, Arabidopsis thaliana
agtccaaagataccgga

SEQ ID NO: 43849 - DNA, 17 bp, Arabidopsis thaliana
agtccaaattatgagag

SEQ ID NO: 43850 - DNA, 17 bp, Arabidopsis thaliana
agtccaaattgtaatct

SEQ ID NO: 43851 - DNA, 17 bp, Arabidopsis thaliana
agtccaacaacaagtcc

SEQ ID NO: 43852 - DNA, 17 bp, Arabidopsis thaliana
agtccaacaataggcta

SEQ ID NO: 43853 - DNA, 17 bp, Arabidopsis thaliana
agtccaacatttgagtc

SEQ ID NO: 43854 - DNA, 17 bp, Arabidopsis thaliana
agtccaacctggttgac

SEQ ID NO: 43855 - DNA, 17 bp, Arabidopsis thaliana
agtccaacggaatcctg

SEQ ID NO: 43856 - DNA, 17 bp, Arabidopsis thaliana
agtccaacggttaggat

SEQ ID NO: 43857 - DNA, 17 bp, Arabidopsis thaliana
agtccaactttccagag

SEQ ID NO: 43858 - DNA, 17 bp, Arabidopsis thaliana
agtccaagcccaacatc

SEQ ID NO: 43859 - DNA, 17 bp, Arabidopsis thaliana
agtccaagcccaaggtc

SEQ ID NO: 43860 - DNA, 17 bp, Arabidopsis thaliana
agtccaaggatgacttg

SEQ ID NO: 43861 - DNA, 17 bp, Arabidopsis thaliana
agtccaagtgattacag

SEQ ID NO: 43862 - DNA, 17 bp, Arabidopsis thaliana
agtccaatctgtcggag

SEQ ID NO: 43863 - DNA, 17 bp, Arabidopsis thaliana
agtccaatgaccatctt

SEQ ID NO: 43864 - DNA, 17 bp, Arabidopsis thaliana
agtccaattagttgcgt

SEQ ID NO: 43865 - DNA, 17 bp, Arabidopsis thaliana
agtccaattgggcatat

SEQ ID NO: 43866 - DNA, 17 bp, Arabidopsis thaliana
agtccacaactaacttg

SEQ ID NO: 43867 - DNA, 17 bp, Arabidopsis thaliana
agtccacagtggtctgg

SEQ ID NO: 43868 - DNA, 17 bp, Arabidopsis thaliana
agtccacatttggctaa

SEQ ID NO: 43869 - DNA, 17 bp, Arabidopsis thaliana
agtccaccctgacagat

SEQ ID NO: 43870 - DNA, 17 bp, Arabidopsis thaliana
agtccaccgatcactgt

SEQ ID NO: 43871 - DNA, 17 bp, Arabidopsis thaliana
agtccacgactgagaca

SEQ ID NO: 43872 - DNA, 17 bp, Arabidopsis thaliana
agtccacggataaatcg

SEQ ID NO: 43873 - DNA, 17 bp, Arabidopsis thaliana
agtccactccgagcctt

SEQ ID NO: 43874 - DNA, 17 bp, Arabidopsis thaliana
agtccactctgcagtac

SEQ ID NO: 43875 - DNA, 17 bp, Arabidopsis thaliana
agtccactgtacagacc

SEQ ID NO: 43876 - DNA, 17 bp, Arabidopsis thaliana
agtccactgtgtgacca

SEQ ID NO: 43877 - DNA, 17 bp, Arabidopsis thaliana
agtccactgtgttgtaa

SEQ ID NO: 43878 - DNA, 17 bp, Arabidopsis thaliana
agtccagaaagtgtcta

SEQ ID NO: 43879 - DNA, 17 bp, Arabidopsis thaliana
agtccagaagacctgaa

SEQ ID NO: 43880 - DNA, 17 bp, Arabidopsis thaliana
agtccagaattggttga

SEQ ID NO: 43881 - DNA, 17 bp, Arabidopsis thaliana
agtccagacagcacttc

SEQ ID NO: 43882 - DNA, 17 bp, Arabidopsis thaliana
agtccagaccactgcgg

SEQ ID NO: 43883 - DNA, 17 bp, Arabidopsis thaliana
agtccagaccggtgtcc

SEQ ID NO: 43884 - DNA, 17 bp, Arabidopsis thaliana
agtccagaccgtcaact

SEQ ID NO: 43885 - DNA, 17 bp, Arabidopsis thaliana
agtccagagatcgatgg

SEQ ID NO: 43886 - DNA, 17 bp, Arabidopsis thaliana
agtccagatcgacgatt

SEQ ID NO: 43887 - DNA, 17 bp, Arabidopsis thaliana
agtccagccgttccccc

SEQ ID NO: 43888 - DNA, 17 bp, Arabidopsis thaliana
agtccagcgttgggggt

SEQ ID NO: 43889 - DNA, 17 bp, Arabidopsis thaliana
agtccaggatggcccac

SEQ ID NO: 43890 - DNA, 17 bp, Arabidopsis thaliana
agtccaggatttgaagg

SEQ ID NO: 43891 - DNA, 17 bp, Arabidopsis thaliana
agtccaggcgacgatct

SEQ ID NO: 43892 - DNA, 17 bp, Arabidopsis thaliana
agtccagtgccgcatag

SEQ ID NO: 43893 - DNA, 17 bp, Arabidopsis thaliana
agtccagttctttgcta

SEQ ID NO: 43894 - DNA, 17 bp, Arabidopsis thaliana
agtccatatcagccgat

SEQ ID NO: 43895 - DNA, 17 bp, Arabidopsis thaliana
agtccatatgagtcttt

SEQ ID NO: 43896 - DNA, 17 bp, Arabidopsis thaliana
agtccatcccatttttg

SEQ ID NO: 43897 - DNA, 17 bp, Arabidopsis thaliana
agtccatcctgtagatg

SEQ ID NO: 43898 - DNA, 17 bp, Arabidopsis thaliana
agtccatctccaaggga

SEQ ID NO: 43899 - DNA, 17 bp, Arabidopsis thaliana
agtccatgacggtttag

SEQ ID NO: 43900 - DNA, 17 bp, Arabidopsis thaliana
agtccatggctaaagtc

SEQ ID NO: 43901 - DNA, 17 bp, Arabidopsis thaliana
agtccatgttgattcgg

SEQ ID NO: 43902 - DNA, 17 bp, Arabidopsis thaliana
agtccattgggccgaaa

SEQ ID NO: 43903 - DNA, 17 bp, Arabidopsis thaliana
agtccatttgagtattg

SEQ ID NO: 43904 - DNA, 17 bp, Arabidopsis thaliana
agtccatttgattccgc

SEQ ID NO: 43905 - DNA, 17 bp, Arabidopsis thaliana
agtccatttttgctctt

SEQ ID NO: 43906 - DNA, 17 bp, Arabidopsis thaliana
agtcccaactactgcga

SEQ ID NO: 43907 - DNA, 17 bp, Arabidopsis thaliana
agtcccaactctaggat

SEQ ID NO: 43908 - DNA, 17 bp, Arabidopsis thaliana
agtcccaagcgtcactc

SEQ ID NO: 43909 - DNA, 17 bp, Arabidopsis thaliana
agtcccacaggactttg

SEQ ID NO: 43910 - DNA, 17 bp, Arabidopsis thaliana
agtcccacggggcgggt

SEQ ID NO: 43911 - DNA, 17 bp, Arabidopsis thaliana
agtcccactgggtgtgc

SEQ ID NO: 43912 - DNA, 17 bp, Arabidopsis thaliana
agtcccaggtggctaca

SEQ ID NO: 43913 - DNA, 17 bp, Arabidopsis thaliana
agtcccatcctagttgc

SEQ ID NO: 43914 - DNA, 17 bp, Arabidopsis thaliana
agtcccatcctagttgt

SEQ ID NO: 43915 - DNA, 17 bp, Arabidopsis thaliana
agtcccatcctgtagat

SEQ ID NO: 43916 - DNA, 17 bp, Arabidopsis thaliana
agtcccattagcttctt

SEQ ID NO: 43917 - DNA, 17 bp, Arabidopsis thaliana
agtcccccagacctgaa

SEQ ID NO: 43918 - DNA, 17 bp, Arabidopsis thaliana
agtcccccccagttcgg

SEQ ID NO: 43919 - DNA, 17 bp, Arabidopsis thaliana
agtccccctgtggtttc

SEQ ID NO: 43920 - DNA, 17 bp, Arabidopsis thaliana
agtccccgtcgtgcccg

SEQ ID NO: 43921 - DNA, 17 bp, Arabidopsis thaliana
agtcccctattccggtg

SEQ ID NO: 43922 - DNA, 17 bp, Arabidopsis thaliana
agtcccgactaagtgtt

SEQ ID NO: 43923 - DNA, 17 bp, Arabidopsis thaliana
agtcccgagttatagac

SEQ ID NO: 43924 - DNA, 17 bp, Arabidopsis thaliana
agtcccgatcttgatgt

SEQ ID NO: 43925 - DNA, 17 bp, Arabidopsis thaliana
agtcccgatgtcgagct

SEQ ID NO: 43926 - DNA, 17 bp, Arabidopsis thaliana
agtcccgcaacgagcgc

SEQ ID NO: 43927 - DNA, 17 bp, Arabidopsis thaliana
agtcccgctcgatgtgc

SEQ ID NO: 43928 - DNA, 17 bp, Arabidopsis thaliana
agtcccggcttttgaca

SEQ ID NO: 43929 - DNA, 17 bp, Arabidopsis thaliana
agtcccggtatcaggca

SEQ ID NO: 43930 - DNA, 17 bp, Arabidopsis thaliana
agtcccggtcatttact

SEQ ID NO: 43931 - DNA, 17 bp, Arabidopsis thaliana
agtcccggtgtaccagg

SEQ ID NO: 43932 - DNA, 17 bp, Arabidopsis thaliana
agtcccggttactatga

SEQ ID NO: 43933 - DNA, 17 bp, Arabidopsis thaliana
agtcccgtagctcagtt

SEQ ID NO: 43934 - DNA, 17 bp, Arabidopsis thaliana
agtcccgtatggtgtcg

SEQ ID NO: 43935 - DNA, 17 bp, Arabidopsis thaliana
agtcccgttctcgtgag

SEQ ID NO: 43936 - DNA, 17 bp, Arabidopsis thaliana
agtcccgttgggtcgac

SEQ ID NO: 43937 - DNA, 17 bp, Arabidopsis thaliana
agtccctaccggttcac

SEQ ID NO: 43938 - DNA, 17 bp, Arabidopsis thaliana
agtccctattgctgtca

SEQ ID NO: 43939 - DNA, 17 bp, Arabidopsis thaliana
agtccctcatgagaaat

SEQ ID NO: 43940 - DNA, 17 bp, Arabidopsis thaliana
agtccctccaggcccga

SEQ ID NO: 43941 - DNA, 17 bp, Arabidopsis thaliana
agtccctctgcttctcc

SEQ ID NO: 43942 - DNA, 17 bp, Arabidopsis thaliana
agtccctgaagatctga

SEQ ID NO: 43943 - DNA, 17 bp, Arabidopsis thaliana
agtccctggttgtgtgc

SEQ ID NO: 43944 - DNA, 17 bp, Arabidopsis thaliana
agtccctggtttcagcg

SEQ ID NO: 43945 - DNA, 17 bp, Arabidopsis thaliana
agtccctgttcatttgc

SEQ ID NO: 43946 - DNA, 17 bp, Arabidopsis thaliana
agtcccttcctcctcat

SEQ ID NO: 43947 - DNA, 17 bp, Arabidopsis thaliana
agtcccttgacgagaat

SEQ ID NO: 43948 - DNA, 17 bp, Arabidopsis thaliana
agtccctttgtcgctaa

SEQ ID NO: 43949 - DNA, 17 bp, Arabidopsis thaliana
agtccgaaacttgtaat

SEQ ID NO: 43950 - DNA, 17 bp, Arabidopsis thaliana
agtccgaaagccataca

SEQ ID NO: 43951 - DNA, 17 bp, Arabidopsis thaliana
agtccgaagcccgtgat

SEQ ID NO: 43952 - DNA, 17 bp, Arabidopsis thaliana
agtccgacacggcccag

SEQ ID NO: 43953 - DNA, 17 bp, Arabidopsis thaliana
agtccgacatgtgtgcg

SEQ ID NO: 43954 - DNA, 17 bp, Arabidopsis thaliana
agtccgacattagctag

SEQ ID NO: 43955 - DNA, 17 bp, Arabidopsis thaliana
agtccgacccatttgta

SEQ ID NO: 43956 - DNA, 17 bp, Arabidopsis thaliana
agtccgactttgtgaaa

SEQ ID NO: 43957 - DNA, 17 bp, Arabidopsis thaliana
agtccgagaagacgttc

SEQ ID NO: 43958 - DNA, 17 bp, Arabidopsis thaliana
agtccgaggtgtttcta

SEQ ID NO: 43959 - DNA, 17 bp, Arabidopsis thaliana
agtccgataataggcgc

SEQ ID NO: 43960 - DNA, 17 bp, Arabidopsis thaliana
agtccgatcaaccagtt

SEQ ID NO: 43961 - DNA, 17 bp, Arabidopsis thaliana
agtccgatcctttgcag

SEQ ID NO: 43962 - DNA, 17 bp, Arabidopsis thaliana
agtccgattaatttcca

SEQ ID NO: 43963 - DNA, 17 bp, Arabidopsis thaliana
agtccgattaatttccg

SEQ ID NO: 43964 - DNA, 17 bp, Arabidopsis thaliana
agtccgattgaagagaa

SEQ ID NO: 43965 - DNA, 17 bp, Arabidopsis thaliana
agtccgattgctagtca

SEQ ID NO: 43966 - DNA, 17 bp, Arabidopsis thaliana
agtccgatttgcggttc

SEQ ID NO: 43967 - DNA, 17 bp, Arabidopsis thaliana
agtccgattttgtgccc

SEQ ID NO: 43968 - DNA, 17 bp, Arabidopsis thaliana
agtccgcagtggtctgg

SEQ ID NO: 43969 - DNA, 17 bp, Arabidopsis thaliana
agtccgccagccgatga

SEQ ID NO: 43970 - DNA, 17 bp, Arabidopsis thaliana
agtccgccagccgatgg

SEQ ID NO: 43971 - DNA, 17 bp, Arabidopsis thaliana
agtccgcccatatgcat

SEQ ID NO: 43972 - DNA, 17 bp, Arabidopsis thaliana
agtccgcggacaaaact

SEQ ID NO: 43973 - DNA, 17 bp, Arabidopsis thaliana
agtccgctccgtgtccg

SEQ ID NO: 43974 - DNA, 17 bp, Arabidopsis thaliana
agtccgctgacagccga

SEQ ID NO: 43975 - DNA, 17 bp, Arabidopsis thaliana
agtccgcttctgagcaa

SEQ ID NO: 43976 - DNA, 17 bp, Arabidopsis thaliana
agtccgcttggcccaat

SEQ ID NO: 43977 - DNA, 17 bp, Arabidopsis thaliana
agtccggaccactgcaa

SEQ ID NO: 43978 - DNA, 17 bp, Arabidopsis thaliana
agtccggaccactgcag

SEQ ID NO: 43979 - DNA, 17 bp, Arabidopsis thaliana
agtccggagacgtcggc

SEQ ID NO: 43980 - DNA, 17 bp, Arabidopsis thaliana
agtccggattgaagggt

SEQ ID NO: 43981 - DNA, 17 bp, Arabidopsis thaliana
agtccggcccgcccccc

SEQ ID NO: 43982 - DNA, 17 bp, Arabidopsis thaliana
agtccgggtggtcacag

SEQ ID NO: 43983 - DNA, 17 bp, Arabidopsis thaliana
agtccgggtgtgaatgc

SEQ ID NO: 43984 - DNA, 17 bp, Arabidopsis thaliana
agtccggtcgccgcatc

SEQ ID NO: 43985 - DNA, 17 bp, Arabidopsis thaliana
agtccggtgcgctctga

SEQ ID NO: 43986 - DNA, 17 bp, Arabidopsis thaliana
agtccggtgcggtgaac

SEQ ID NO: 43987 - DNA, 17 bp, Arabidopsis thaliana
agtccggttagttttcc

SEQ ID NO: 43988 - DNA, 17 bp, Arabidopsis thaliana
agtccgtaatcccagac

SEQ ID NO: 43989 - DNA, 17 bp, Arabidopsis thaliana
agtccgtaatcccagcc

SEQ ID NO: 43990 - DNA, 17 bp, Arabidopsis thaliana
agtccgtaggttgcagg

SEQ ID NO: 43991 - DNA, 17 bp, Arabidopsis thaliana
agtccgtatgagtcttt

SEQ ID NO: 43992 - DNA, 17 bp, Arabidopsis thaliana
agtccgtatgtgtcttt

SEQ ID NO: 43993 - DNA, 17 bp, Arabidopsis thaliana
agtccgtcaaggtcgaa

SEQ ID NO: 43994 - DNA, 17 bp, Arabidopsis thaliana
agtccgtcccccggccg

SEQ ID NO: 43995 - DNA, 17 bp, Arabidopsis thaliana
agtccgtccctcgcccg

SEQ ID NO: 43996 - DNA, 17 bp, Arabidopsis thaliana
agtccgtgaggccaaac

SEQ ID NO: 43997 - DNA, 17 bp, Arabidopsis thaliana
agtccgtgctaggcttg

SEQ ID NO: 43998 - DNA, 17 bp, Arabidopsis thaliana
agtccgtgcttaggctt

SEQ ID NO: 43999 - DNA, 17 bp, Arabidopsis thaliana
agtccgtggggaacccc

SEQ ID NO: 44000 - DNA, 17 bp, Arabidopsis thaliana
agtccgtgggtaacccc

SEQ ID NO: 44001 - DNA, 17 bp, Arabidopsis thaliana
agtccgttcggcggaag

SEQ ID NO: 44002 - DNA, 17 bp, Arabidopsis thaliana
agtcctaagaattgtat

SEQ ID NO: 44003 - DNA, 17 bp, Arabidopsis thaliana
agtcctaagcacggcac

SEQ ID NO: 44004 - DNA, 17 bp, Arabidopsis thaliana
agtcctaattagggtcg

SEQ ID NO: 44005 - DNA, 17 bp, Arabidopsis thaliana
agtcctacagtataccg

SEQ ID NO: 44006 - DNA, 17 bp, Arabidopsis thaliana
agtcctacctagctgag

SEQ ID NO: 44007 - DNA, 17 bp, Arabidopsis thaliana
agtcctacgcgttaaga

SEQ ID NO: 44008 - DNA, 17 bp, Arabidopsis thaliana
agtcctacgcttggctg

SEQ ID NO: 44009 - DNA, 17 bp, Arabidopsis thaliana
agtcctagacgctttcg

SEQ ID NO: 44010 - DNA, 17 bp, Arabidopsis thaliana
agtcctaggtccacttt

SEQ ID NO: 44011 - DNA, 17 bp, Arabidopsis thaliana
agtcctaggtccagaat

SEQ ID NO: 44012 - DNA, 17 bp, Arabidopsis thaliana
agtcctatgatccgatt

SEQ ID NO: 44013 - DNA, 17 bp, Arabidopsis thaliana
agtcctatgggactgcg

SEQ ID NO: 44014 - DNA, 17 bp, Arabidopsis thaliana
agtcctatttggtgaac

SEQ ID NO: 44015 - DNA, 17 bp, Arabidopsis thaliana
agtcctcaatgattatt

SEQ ID NO: 44016 - DNA, 17 bp, Arabidopsis thaliana
agtcctcagatgtcgag

SEQ ID NO: 44017 - DNA, 17 bp, Arabidopsis thaliana
agtcctcccgtatagcg

SEQ ID NO: 44018 - DNA, 17 bp, Arabidopsis thaliana
agtcctcccgtctagta

SEQ ID NO: 44019 - DNA, 17 bp, Arabidopsis thaliana
agtcctcccgtgtagta

SEQ ID NO: 44020 - DNA, 17 bp, Arabidopsis thaliana
agtcctccgttatgacc

SEQ ID NO: 44021 - DNA, 17 bp, Arabidopsis thaliana
agtcctcctacgaagcc

SEQ ID NO: 44022 - DNA, 17 bp, Arabidopsis thaliana
agtcctcgaatttagac

SEQ ID NO: 44023 - DNA, 17 bp, Arabidopsis thaliana
agtcctcggccaacttg

SEQ ID NO: 44024 - DNA, 17 bp, Arabidopsis thaliana
agtcctcgtgttacatc

SEQ ID NO: 44025 - DNA, 17 bp, Arabidopsis thaliana
agtcctcgtgttgcatc

SEQ ID NO: 44026 - DNA, 17 bp, Arabidopsis thaliana
agtcctcgtgttgcttc

SEQ ID NO: 44027 - DNA, 17 bp, Arabidopsis thaliana
agtcctcgttgcatccc

SEQ ID NO: 44028 - DNA, 17 bp, Arabidopsis thaliana
agtcctctaggttgtcc

SEQ ID NO: 44029 - DNA, 17 bp, Arabidopsis thaliana
agtcctctgttgtcttt

SEQ ID NO: 44030 - DNA, 17 bp, Arabidopsis thaliana
agtcctcttcattcttg

SEQ ID NO: 44031 - DNA, 17 bp, Arabidopsis thaliana
agtcctcttctccaaga

SEQ ID NO: 44032 - DNA, 17 bp, Arabidopsis thaliana
agtcctcttcttttgac

SEQ ID NO: 44033 - DNA, 17 bp, Arabidopsis thaliana
agtcctgaccaaaccgc

SEQ ID NO: 44034 - DNA, 17 bp, Arabidopsis thaliana
agtcctgaccacgctct

SEQ ID NO: 44035 - DNA, 17 bp, Arabidopsis thaliana
agtcctgagactacatt

SEQ ID NO: 44036 - DNA, 17 bp, Arabidopsis thaliana
agtcctggatgttcggt

SEQ ID NO: 44037 - DNA, 17 bp, Arabidopsis thaliana
agtcctgggtttcttcg

SEQ ID NO: 44038 - DNA, 17 bp, Arabidopsis thaliana
agtcctggtatcgggca

SEQ ID NO: 44039 - DNA, 17 bp, Arabidopsis thaliana
agtcctggtccgctaga

SEQ ID NO: 44040 - DNA, 17 bp, Arabidopsis thaliana
agtcctggtcctgacat

SEQ ID NO: 44041 - DNA, 17 bp, Arabidopsis thaliana
agtcctgtaattgctag

SEQ ID NO: 44042 - DNA, 17 bp, Arabidopsis thaliana
agtcctgtcgccgacta

SEQ ID NO: 44043 - DNA, 17 bp, Arabidopsis thaliana
agtcctgtgggactgcg

SEQ ID NO: 44044 - DNA, 17 bp, Arabidopsis thaliana
agtcctgtgggctgttg

SEQ ID NO: 44045 - DNA, 17 bp, Arabidopsis thaliana
agtcctgtggggttgcg

SEQ ID NO: 44046 - DNA, 17 bp, Arabidopsis thaliana
agtccttcagacctgaa

SEQ ID NO: 44047 - DNA, 17 bp, Arabidopsis thaliana
agtccttcgataaaaag

SEQ ID NO: 44048 - DNA, 17 bp, Arabidopsis thaliana
agtccttcggggacaag

SEQ ID NO: 44049 - DNA, 17 bp, Arabidopsis thaliana
agtccttcggtgagaag

SEQ ID NO: 44050 - DNA, 17 bp, Arabidopsis thaliana
agtccttctgctttggg

SEQ ID NO: 44051 - DNA, 17 bp, Arabidopsis thaliana
agtccttcttgtatggc

SEQ ID NO: 44052 - DNA, 17 bp, Arabidopsis thaliana
agtccttgaagcccagt

SEQ ID NO: 44053 - DNA, 17 bp, Arabidopsis thaliana
agtccttggaagcggcc

SEQ ID NO: 44054 - DNA, 17 bp, Arabidopsis thaliana
agtccttggcaggttag

SEQ ID NO: 44055 - DNA, 17 bp, Arabidopsis thaliana
agtccttgtccggggta

SEQ ID NO: 44056 - DNA, 17 bp, Arabidopsis thaliana
agtcctttcgggttgtc

SEQ ID NO: 44057 - DNA, 17 bp, Arabidopsis thaliana
agtcctttggatgtgcg

SEQ ID NO: 44058 - DNA, 17 bp, Arabidopsis thaliana
agtcctttgtcgctaag

SEQ ID NO: 44059 - DNA, 17 bp, Arabidopsis thaliana
agtcctttgtgctttcc

SEQ ID NO: 44060 - DNA, 17 bp, Arabidopsis thaliana
agtccttttcatcttta

SEQ ID NO: 44061 - DNA, 17 bp, Arabidopsis thaliana
agtccttttcctcgttt

SEQ ID NO: 44062 - DNA, 17 bp, Arabidopsis thaliana
agtccttttgatccacg

SEQ ID NO: 44063 - DNA, 17 bp, Arabidopsis thaliana
agtcgaaacaccgattt

SEQ ID NO: 44064 - DNA, 17 bp, Arabidopsis thaliana
agtcgaaaccgatagag

SEQ ID NO: 44065 - DNA, 17 bp, Arabidopsis thaliana
agtcgaaacttgctgtg

SEQ ID NO: 44066 - DNA, 17 bp, Arabidopsis thaliana
agtcgaaatccgctaag

SEQ ID NO: 44067 - DNA, 17 bp, Arabidopsis thaliana
agtcgaaatgatggtca

SEQ ID NO: 44068 - DNA, 17 bp, Arabidopsis thaliana
agtcgaaggttccccct

SEQ ID NO: 44069 - DNA, 17 bp, Arabidopsis thaliana
agtcgaataggctattg

SEQ ID NO: 44070 - DNA, 17 bp, Arabidopsis thaliana
agtcgaatgctacatgg

SEQ ID NO: 44071 - DNA, 17 bp, Arabidopsis thaliana
agtcgacaagcaacttc

SEQ ID NO: 44072 - DNA, 17 bp, Arabidopsis thaliana
agtcgacaatacgattg

SEQ ID NO: 44073 - DNA, 17 bp, Arabidopsis thaliana
agtcgacaatggctgat

SEQ ID NO: 44074 - DNA, 17 bp, Arabidopsis thaliana
agtcgacattgagtttt

SEQ ID NO: 44075 - DNA, 17 bp, Arabidopsis thaliana
agtcgacattgcgtttt

SEQ ID NO: 44076 - DNA, 17 bp, Arabidopsis thaliana
agtcgaccgtggtttgc

SEQ ID NO: 44077 - DNA, 17 bp, Arabidopsis thaliana
agtcgacgaccatgagt

SEQ ID NO: 44078 - DNA, 17 bp, Arabidopsis thaliana
agtcgacgcggattacg

SEQ ID NO: 44079 - DNA, 17 bp, Arabidopsis thaliana
agtcgacgctttattct

SEQ ID NO: 44080 - DNA, 17 bp, Arabidopsis thaliana
agtcgacggatatcatg

SEQ ID NO: 44081 - DNA, 17 bp, Arabidopsis thaliana
agtcgacggatcgcatg

SEQ ID NO: 44082 - DNA, 17 bp, Arabidopsis thaliana
agtcgacgtcgattgat

SEQ ID NO: 44083 - DNA, 17 bp, Arabidopsis thaliana
agtcgactctaaaatac

SEQ ID NO: 44084 - DNA, 17 bp, Arabidopsis thaliana
agtcgaggacgcagtta

SEQ ID NO: 44085 - DNA, 17 bp, Arabidopsis thaliana
agtcgagggcacgtctg

SEQ ID NO: 44086 - DNA, 17 bp, Arabidopsis thaliana
agtcgagtggtgctgcg

SEQ ID NO: 44087 - DNA, 17 bp, Arabidopsis thaliana
agtcgagttggcgacgc

SEQ ID NO: 44088 - DNA, 17 bp, Arabidopsis thaliana
agtcgataacaggcgtt

SEQ ID NO: 44089 - DNA, 17 bp, Arabidopsis thaliana
agtcgataacaggtgtt

SEQ ID NO: 44090 - DNA, 17 bp, Arabidopsis thaliana
agtcgataatgcatcat

SEQ ID NO: 44091 - DNA, 17 bp, Arabidopsis thaliana
agtcgatatgaggcttg

SEQ ID NO: 44092 - DNA, 17 bp, Arabidopsis thaliana
agtcgatccctaggtgg

SEQ ID NO: 44093 - DNA, 17 bp, Arabidopsis thaliana
agtcgatcctaagagtc

SEQ ID NO: 44094 - DNA, 17 bp, Arabidopsis thaliana
agtcgatcctggtagat

SEQ ID NO: 44095 - DNA, 17 bp, Arabidopsis thaliana
agtcgatcctgtagatg

SEQ ID NO: 44096 - DNA, 17 bp, Arabidopsis thaliana
agtcgatccttatagat

SEQ ID NO: 44097 - DNA, 17 bp, Arabidopsis thaliana
agtcgatctcgttgcaa

SEQ ID NO: 44098 - DNA, 17 bp, Arabidopsis thaliana
agtcgatgaaattgctc

SEQ ID NO: 44099 - DNA, 17 bp, Arabidopsis thaliana
agtcgatgactattcat

SEQ ID NO: 44100 - DNA, 17 bp, Arabidopsis thaliana
agtcgatgtcgctggtt

SEQ ID NO: 44101 - DNA, 17 bp, Arabidopsis thaliana
agtcgattcaatcttga

SEQ ID NO: 44102 - DNA, 17 bp, Arabidopsis thaliana
agtcgattgacacggtt

SEQ ID NO: 44103 - DNA, 17 bp, Arabidopsis thaliana
agtcgattggaccatca

SEQ ID NO: 44104 - DNA, 17 bp, Arabidopsis thaliana
agtcgatttagcctggt

SEQ ID NO: 44105 - DNA, 17 bp, Arabidopsis thaliana
agtcgatttggccgagt

SEQ ID NO: 44106 - DNA, 17 bp, Arabidopsis thaliana
agtcgatttggccgtgt

SEQ ID NO: 44107 - DNA, 17 bp, Arabidopsis thaliana
agtcgatttggcctggt

SEQ ID NO: 44108 - DNA, 17 bp, Arabidopsis thaliana
agtcgattttcacccag

SEQ ID NO: 44109 - DNA, 17 bp, Arabidopsis thaliana
agtcgattttcgataca

SEQ ID NO: 44110 - DNA, 17 bp, Arabidopsis thaliana
agtcgattttctctctt

SEQ ID NO: 44111 - DNA, 17 bp, Arabidopsis thaliana
agtcgcaacatggacaa

SEQ ID NO: 44112 - DNA, 17 bp, Arabidopsis thaliana
agtcgcaacctgtagag

SEQ ID NO: 44113 - DNA, 17 bp, Arabidopsis thaliana
agtcgcaacctgtagat

SEQ ID NO: 44114 - DNA, 17 bp, Arabidopsis thaliana
agtcgcaaggctgaaac

SEQ ID NO: 44115 - DNA, 17 bp, Arabidopsis thaliana
agtcgcaatcctgtaga

SEQ ID NO: 44116 - DNA, 17 bp, Arabidopsis thaliana
agtcgcaatgtcgtcgc

SEQ ID NO: 44117 - DNA, 17 bp, Arabidopsis thaliana
agtcgcaccctgagatg

SEQ ID NO: 44118 - DNA, 17 bp, Arabidopsis thaliana
agtcgcaccctgcagac

SEQ ID NO: 44119 - DNA, 17 bp, Arabidopsis thaliana
agtcgcaccctgtagat

SEQ ID NO: 44120 - DNA, 17 bp, Arabidopsis thaliana
agtcgcaccctgtaggg

SEQ ID NO: 44121 - DNA, 17 bp, Arabidopsis thaliana
agtcgcaccctgttgga

SEQ ID NO: 44122 - DNA, 17 bp, Arabidopsis thaliana
agtcgcacctgagatgg

SEQ ID NO: 44123 - DNA, 17 bp, Arabidopsis thaliana
agtcgcacctgcagatg

SEQ ID NO: 44124 - DNA, 17 bp, Arabidopsis thaliana
agtcgcacctgtagacg

SEQ ID NO: 44125 - DNA, 17 bp, Arabidopsis thaliana
agtcgcacctgtagatg

SEQ ID NO: 44126 - DNA, 17 bp, Arabidopsis thaliana
agtcgcacctgtagatt

SEQ ID NO: 44127 - DNA, 17 bp, Arabidopsis thaliana
agtcgcacgcatcctgt

SEQ ID NO: 44128 - DNA, 17 bp, Arabidopsis thaliana
agtcgcactcgtagata

SEQ ID NO: 44129 - DNA, 17 bp, Arabidopsis thaliana
agtcgcactgtagatcg

SEQ ID NO: 44130 - DNA, 17 bp, Arabidopsis thaliana
agtcgcactgtagatgg

SEQ ID NO: 44131 - DNA, 17 bp, Arabidopsis thaliana
agtcgcactgtagattg

SEQ ID NO: 44132 - DNA, 17 bp, Arabidopsis thaliana
agtcgcactgtaggatg

SEQ ID NO: 44133 - DNA, 17 bp, Arabidopsis thaliana
agtcgcactttagatgg

SEQ ID NO: 44134 - DNA, 17 bp, Arabidopsis thaliana
agtcgcactttgcaacc

SEQ ID NO: 44135 - DNA, 17 bp, Arabidopsis thaliana
agtcgcagagactgctg

SEQ ID NO: 44136 - DNA, 17 bp, Arabidopsis thaliana
agtcgcagagactgctt

SEQ ID NO: 44137 - DNA, 17 bp, Arabidopsis thaliana
agtcgcagatctacaaa

SEQ ID NO: 44138 - DNA, 17 bp, Arabidopsis thaliana
agtcgcagcctgtagat

SEQ ID NO: 44139 - DNA, 17 bp, Arabidopsis thaliana
agtcgcagcctgtagga

SEQ ID NO: 44140 - DNA, 17 bp, Arabidopsis thaliana
agtcgcagcgacaagat

SEQ ID NO: 44141 - DNA, 17 bp, Arabidopsis thaliana
agtcgcagctgtagatg

SEQ ID NO: 44142 - DNA, 17 bp, Arabidopsis thaliana
agtcgcaggcatgagag

SEQ ID NO: 44143 - DNA, 17 bp, Arabidopsis thaliana
agtcgcaggctcgtcgt

SEQ ID NO: 44144 - DNA, 17 bp, Arabidopsis thaliana
agtcgcatccagtagat

SEQ ID NO: 44145 - DNA, 17 bp, Arabidopsis thaliana
agtcgcatccgtagatg

SEQ ID NO: 44146 - DNA, 17 bp, Arabidopsis thaliana
agtcgcatcctggatgg

SEQ ID NO: 44147 - DNA, 17 bp, Arabidopsis thaliana
agtcgcatcctgtagag

SEQ ID NO: 44148 - DNA, 17 bp, Arabidopsis thaliana
agtcgcatcctgtagat

SEQ ID NO: 44149 - DNA, 17 bp, Arabidopsis thaliana
agtcgcatcctgtagga

SEQ ID NO: 44150 - DNA, 17 bp, Arabidopsis thaliana
agtcgcatcctgtaggt

SEQ ID NO: 44151 - DNA, 17 bp, Arabidopsis thaliana
agtcgcatcctgtagta

SEQ ID NO: 44152 - DNA, 17 bp, Arabidopsis thaliana
agtcgcatcctgtcgat

SEQ ID NO: 44153 - DNA, 17 bp, Arabidopsis thaliana
agtcgcatcctgtgatg

SEQ ID NO: 44154 - DNA, 17 bp, Arabidopsis thaliana
agtcgcatccttagatg

SEQ ID NO: 44155 - DNA, 17 bp, Arabidopsis thaliana
agtcgcatctgtagatg

SEQ ID NO: 44156 - DNA, 17 bp, Arabidopsis thaliana
agtcgcatctgtaggat

SEQ ID NO: 44157 - DNA, 17 bp, Arabidopsis thaliana
agtcgcatcttgtagga

SEQ ID NO: 44158 - DNA, 17 bp, Arabidopsis thaliana
agtcgcatgctgtagat

SEQ ID NO: 44159 - DNA, 17 bp, Arabidopsis thaliana
agtcgcattcctgtaga

SEQ ID NO: 44160 - DNA, 17 bp, Arabidopsis thaliana
agtcgcattctacagat

SEQ ID NO: 44161 - DNA, 17 bp, Arabidopsis thaliana
agtcgcattctgcagat

SEQ ID NO: 44162 - DNA, 17 bp, Arabidopsis thaliana
agtcgcattctggatgg

SEQ ID NO: 44163 - DNA, 17 bp, Arabidopsis thaliana
agtcgcattctgtaaga

SEQ ID NO: 44164 - DNA, 17 bp, Arabidopsis thaliana
agtcgcattctgtagat

SEQ ID NO: 44165 - DNA, 17 bp, Arabidopsis thaliana
agtcgcattctgtagga

SEQ ID NO: 44166 - DNA, 17 bp, Arabidopsis thaliana
agtcgcattgaccagta

SEQ ID NO: 44167 - DNA, 17 bp, Arabidopsis thaliana
agtcgcattgtagatgg

SEQ ID NO: 44168 - DNA, 17 bp, Arabidopsis thaliana
agtcgcatttgtagatg

SEQ ID NO: 44169 - DNA, 17 bp, Arabidopsis thaliana
agtcgcatttgtaggta

SEQ ID NO: 44170 - DNA, 17 bp, Arabidopsis thaliana
agtcgccaaattgccag

SEQ ID NO: 44171 - DNA, 17 bp, Arabidopsis thaliana
agtcgccagcgatcagc

SEQ ID NO: 44172 - DNA, 17 bp, Arabidopsis thaliana
agtcgccatcctgtaga

SEQ ID NO: 44173 - DNA, 17 bp, Arabidopsis thaliana
agtcgccatcttgtaga

SEQ ID NO: 44174 - DNA, 17 bp, Arabidopsis thaliana
agtcgccatcttgttga

SEQ ID NO: 44175 - DNA, 17 bp, Arabidopsis thaliana
agtcgccctgtagatgg

SEQ ID NO: 44176 - DNA, 17 bp, Arabidopsis thaliana
agtcgccctgtaggatg

SEQ ID NO: 44177 - DNA, 17 bp, Arabidopsis thaliana
agtcgccctgtagtagg

SEQ ID NO: 44178 - DNA, 17 bp, Arabidopsis thaliana
agtcgccgcgttttcgt

SEQ ID NO: 44179 - DNA, 17 bp, Arabidopsis thaliana
agtcgccgcgtttttca

SEQ ID NO: 44180 - DNA, 17 bp, Arabidopsis thaliana
agtcgcctgtagatgga

SEQ ID NO: 44181 - DNA, 17 bp, Arabidopsis thaliana
agtcgcctgtggatgga

SEQ ID NO: 44182 - DNA, 17 bp, Arabidopsis thaliana
agtcgccttcttccgtt

SEQ ID NO: 44183 - DNA, 17 bp, Arabidopsis thaliana
agtcgcgatttacaatt

SEQ ID NO: 44184 - DNA, 17 bp, Arabidopsis thaliana
agtcgcgcctgtagatg

SEQ ID NO: 44185 - DNA, 17 bp, Arabidopsis thaliana
agtcgcggtaccttgaa

SEQ ID NO: 44186 - DNA, 17 bp, Arabidopsis thaliana
agtcgcggtcagatttt

SEQ ID NO: 44187 - DNA, 17 bp, Arabidopsis thaliana
agtcgcggtcgtcgatg

SEQ ID NO: 44188 - DNA, 17 bp, Arabidopsis thaliana
agtcgcgtcctgtagat

SEQ ID NO: 44189 - DNA, 17 bp, Arabidopsis thaliana
agtcgcgtctacatgct

SEQ ID NO: 44190 - DNA, 17 bp, Arabidopsis thaliana
agtcgctaaaagctggt

SEQ ID NO: 44191 - DNA, 17 bp, Arabidopsis thaliana
agtcgctaagattggtc

SEQ ID NO: 44192 - DNA, 17 bp, Arabidopsis thaliana
agtcgctactaatcggc

SEQ ID NO: 44193 - DNA, 17 bp, Arabidopsis thaliana
agtcgctacttttgagc

SEQ ID NO: 44194 - DNA, 17 bp, Arabidopsis thaliana
agtcgctacttttgatc

SEQ ID NO: 44195 - DNA, 17 bp, Arabidopsis thaliana
agtcgctacttttgttc

SEQ ID NO: 44196 - DNA, 17 bp, Arabidopsis thaliana
agtcgctagaaagtgtc

SEQ ID NO: 44197 - DNA, 17 bp, Arabidopsis thaliana
agtcgctagattgacct

SEQ ID NO: 44198 - DNA, 17 bp, Arabidopsis thaliana
agtcgctaggtgcaacg

SEQ ID NO: 44199 - DNA, 17 bp, Arabidopsis thaliana
agtcgctatgttggact

SEQ ID NO: 44200 - DNA, 17 bp, Arabidopsis thaliana
agtcgctcaagtccgtc

SEQ ID NO: 44201 - DNA, 17 bp, Arabidopsis thaliana
agtcgctcctggtagat

SEQ ID NO: 44202 - DNA, 17 bp, Arabidopsis thaliana
agtcgctcctgtagatg

SEQ ID NO: 44203 - DNA, 17 bp, Arabidopsis thaliana
agtcgctgcagtccacg

SEQ ID NO: 44204 - DNA, 17 bp, Arabidopsis thaliana
agtcgctgcttttggtc

SEQ ID NO: 44205 - DNA, 17 bp, Arabidopsis thaliana
agtcgctggatatagcg

SEQ ID NO: 44206 - DNA, 17 bp, Arabidopsis thaliana
agtcgctggcgactgtc

SEQ ID NO: 44207 - DNA, 17 bp, Arabidopsis thaliana
agtcgctggttgctgtc

SEQ ID NO: 44208 - DNA, 17 bp, Arabidopsis thaliana
agtcgctggtttcggcc

SEQ ID NO: 44209 - DNA, 17 bp, Arabidopsis thaliana
agtcgctggttttagtc

SEQ ID NO: 44210 - DNA, 17 bp, Arabidopsis thaliana
agtcgctgtagatggat

SEQ ID NO: 44211 - DNA, 17 bp, Arabidopsis thaliana
agtcgctgtcgctgtcg

SEQ ID NO: 44212 - DNA, 17 bp, Arabidopsis thaliana
agtcgctgtgtactggg

SEQ ID NO: 44213 - DNA, 17 bp, Arabidopsis thaliana
agtcgcttagtcgcatc

SEQ ID NO: 44214 - DNA, 17 bp, Arabidopsis thaliana
agtcgcttccggtagat

SEQ ID NO: 44215 - DNA, 17 bp, Arabidopsis thaliana
agtcgcttcctgtagat

SEQ ID NO: 44216 - DNA, 17 bp, Arabidopsis thaliana
agtcgcttgccaggatt

SEQ ID NO: 44217 - DNA, 17 bp, Arabidopsis thaliana
agtcgcttgttgatttt

SEQ ID NO: 44218 - DNA, 17 bp, Arabidopsis thaliana
agtcgcttgtttctaaa

SEQ ID NO: 44219 - DNA, 17 bp, Arabidopsis thaliana
agtcggaacaaggtagc

SEQ ID NO: 44220 - DNA, 17 bp, Arabidopsis thaliana
agtcggaactgaacgcc

SEQ ID NO: 44221 - DNA, 17 bp, Arabidopsis thaliana
agtcggaagaccggctg

SEQ ID NO: 44222 - DNA, 17 bp, Arabidopsis thaliana
agtcggacacgaatctt

SEQ ID NO: 44223 - DNA, 17 bp, Arabidopsis thaliana
agtcggaccaggcttca

SEQ ID NO: 44224 - DNA, 17 bp, Arabidopsis thaliana
agtcggaccttacaaag

SEQ ID NO: 44225 - DNA, 17 bp, Arabidopsis thaliana
agtcggacgggaagtgg

SEQ ID NO: 44226 - DNA, 17 bp, Arabidopsis thaliana
agtcggactgtgaccgg

SEQ ID NO: 44227 - DNA, 17 bp, Arabidopsis thaliana
agtcggagaattagggt

SEQ ID NO: 44228 - DNA, 17 bp, Arabidopsis thaliana
agtcggagcctagacga

SEQ ID NO: 44229 - DNA, 17 bp, Arabidopsis thaliana
agtcggaggagacagat

SEQ ID NO: 44230 - DNA, 17 bp, Arabidopsis thaliana
agtcggagggtaatgcg

SEQ ID NO: 44231 - DNA, 17 bp, Arabidopsis thaliana
agtcggagtagagtttg

SEQ ID NO: 44232 - DNA, 17 bp, Arabidopsis thaliana
agtcggatacttgtgtc

SEQ ID NO: 44233 - DNA, 17 bp, Arabidopsis thaliana
agtcggatcatctctgt

SEQ ID NO: 44234 - DNA, 17 bp, Arabidopsis thaliana
agtcggatcctatttgc

SEQ ID NO: 44235 - DNA, 17 bp, Arabidopsis thaliana
agtcggatcctgtagat

SEQ ID NO: 44236 - DNA, 17 bp, Arabidopsis thaliana
agtcggatctttcttcc

SEQ ID NO: 44237 - DNA, 17 bp, Arabidopsis thaliana
agtcggatctttcttct

SEQ ID NO: 44238 - DNA, 17 bp, Arabidopsis thaliana
agtcggatgaccgagtg

SEQ ID NO: 44239 - DNA, 17 bp, Arabidopsis thaliana
agtcggatgtcgattct

SEQ ID NO: 44240 - DNA, 17 bp, Arabidopsis thaliana
agtcggatgttgcttga

SEQ ID NO: 44241 - DNA, 17 bp, Arabidopsis thaliana
agtcggattcatcatgt

SEQ ID NO: 44242 - DNA, 17 bp, Arabidopsis thaliana
agtcggatttcttcttt

SEQ ID NO: 44243 - DNA, 17 bp, Arabidopsis thaliana
agtcggatttgtgtgct

SEQ ID NO: 44244 - DNA, 17 bp, Arabidopsis thaliana
agtcggattttcttctt

SEQ ID NO: 44245 - DNA, 17 bp, Arabidopsis thaliana
agtcggattttgaatac

SEQ ID NO: 44246 - DNA, 17 bp, Arabidopsis thaliana
agtcggattttggatac

SEQ ID NO: 44247 - DNA, 17 bp, Arabidopsis thaliana
agtcggcaaaatggatc

SEQ ID NO: 44248 - DNA, 17 bp, Arabidopsis thaliana
agtcggcaatggatatc

SEQ ID NO: 44249 - DNA, 17 bp, Arabidopsis thaliana
agtcggcaggatttcct

SEQ ID NO: 44250 - DNA, 17 bp, Arabidopsis thaliana
agtcggccagtcgtctt

SEQ ID NO: 44251 - DNA, 17 bp, Arabidopsis thaliana
agtcggccatagtgatc

SEQ ID NO: 44252 - DNA, 17 bp, Arabidopsis thaliana
agtcggcgatttccatc

SEQ ID NO: 44253 - DNA, 17 bp, Arabidopsis thaliana
agtcggcggagatggag

SEQ ID NO: 44254 - DNA, 17 bp, Arabidopsis thaliana
agtcggcgttctcgggc

SEQ ID NO: 44255 - DNA, 17 bp, Arabidopsis thaliana
agtcggcgttttcagca

SEQ ID NO: 44256 - DNA, 17 bp, Arabidopsis thaliana
agtcggctaggcttcta

SEQ ID NO: 44257 - DNA, 17 bp, Arabidopsis thaliana
agtcggctgcatgtgtc

SEQ ID NO: 44258 - DNA, 17 bp, Arabidopsis thaliana
agtcggcttgtcccttc

SEQ ID NO: 44259 - DNA, 17 bp, Arabidopsis thaliana
agtcggcttgttgtttc

SEQ ID NO: 44260 - DNA, 17 bp, Arabidopsis thaliana
agtcgggactgacaagg

SEQ ID NO: 44261 - DNA, 17 bp, Arabidopsis thaliana
agtcgggcgaaagtttg

SEQ ID NO: 44262 - DNA, 17 bp, Arabidopsis thaliana
agtcgggggcattcgta

SEQ ID NO: 44263 - DNA, 17 bp, Arabidopsis thaliana
agtcgggtatgctcaga

SEQ ID NO: 44264 - DNA, 17 bp, Arabidopsis thaliana
agtcgggtcatgggtga

SEQ ID NO: 44265 - DNA, 17 bp, Arabidopsis thaliana
agtcgggttcgagtgac

SEQ ID NO: 44266 - DNA, 17 bp, Arabidopsis thaliana
agtcgggtttgatcttt

SEQ ID NO: 44267 - DNA, 17 bp, Arabidopsis thaliana
agtcggtccgcctttgg

SEQ ID NO: 44268 - DNA, 17 bp, Arabidopsis thaliana
agtcggtcggatccgcg

SEQ ID NO: 44269 - DNA, 17 bp, Arabidopsis thaliana
agtcggtctgtagatgg

SEQ ID NO: 44270 - DNA, 17 bp, Arabidopsis thaliana
agtcggtgaagtgttcg

SEQ ID NO: 44271 - DNA, 17 bp, Arabidopsis thaliana
agtcggtgcttctactt

SEQ ID NO: 44272 - DNA, 17 bp, Arabidopsis thaliana
agtcggtgtgtacaagg

SEQ ID NO: 44273 - DNA, 17 bp, Arabidopsis thaliana
agtcggttcatttgact

SEQ ID NO: 44274 - DNA, 17 bp, Arabidopsis thaliana
agtcggttccagagtat

SEQ ID NO: 44275 - DNA, 17 bp, Arabidopsis thaliana
agtcggttcctgaatgg

SEQ ID NO: 44276 - DNA, 17 bp, Arabidopsis thaliana
agtcggttgggcgacct

SEQ ID NO: 44277 - DNA, 17 bp, Arabidopsis thaliana
agtcggttgtgattgtt

SEQ ID NO: 44278 - DNA, 17 bp, Arabidopsis thaliana
agtcggttgtgcttgtt

SEQ ID NO: 44279 - DNA, 17 bp, Arabidopsis thaliana
agtcgtaaaaccgccgc

SEQ ID NO: 44280 - DNA, 17 bp, Arabidopsis thaliana
agtcgtaacaaggtatc

SEQ ID NO: 44281 - DNA, 17 bp, Arabidopsis thaliana
agtcgtaacaaggtttc

SEQ ID NO: 44282 - DNA, 17 bp, Arabidopsis thaliana
agtcgtaacatagcggt

SEQ ID NO: 44283 - DNA, 17 bp, Arabidopsis thaliana
agtcgtaactttgtcgc

SEQ ID NO: 44284 - DNA, 17 bp, Arabidopsis thaliana
agtcgtaagaaacggca

SEQ ID NO: 44285 - DNA, 17 bp, Arabidopsis thaliana
agtcgtacgagccctat

SEQ ID NO: 44286 - DNA, 17 bp, Arabidopsis thaliana
agtcgtacgagcgctat

SEQ ID NO: 44287 - DNA, 17 bp, Arabidopsis thaliana
agtcgtatcagtttcac

SEQ ID NO: 44288 - DNA, 17 bp, Arabidopsis thaliana
agtcgtatcccgtagat

SEQ ID NO: 44289 - DNA, 17 bp, Arabidopsis thaliana
agtcgtatcctgtagat

SEQ ID NO: 44290 - DNA, 17 bp, Arabidopsis thaliana
agtcgtatgggcttcca

SEQ ID NO: 44291 - DNA, 17 bp, Arabidopsis thaliana
agtcgtcaagggtaatt

SEQ ID NO: 44292 - DNA, 17 bp, Arabidopsis thaliana
agtcgtcacaactgatt

SEQ ID NO: 44293 - DNA, 17 bp, Arabidopsis thaliana
agtcgtcaccacagtag

SEQ ID NO: 44294 - DNA, 17 bp, Arabidopsis thaliana
agtcgtcacctgttgcg

SEQ ID NO: 44295 - DNA, 17 bp, Arabidopsis thaliana
agtcgtcagaacagctt

SEQ ID NO: 44296 - DNA, 17 bp, Arabidopsis thaliana
agtcgtcagccgaagag

SEQ ID NO: 44297 - DNA, 17 bp, Arabidopsis thaliana
agtcgtcaggttccgat

SEQ ID NO: 44298 - DNA, 17 bp, Arabidopsis thaliana
agtcgtccatttcgcag

SEQ ID NO: 44299 - DNA, 17 bp, Arabidopsis thaliana
agtcgtccgacccggag

SEQ ID NO: 44300 - DNA, 17 bp, Arabidopsis thaliana
agtcgtcctggagatgg

SEQ ID NO: 44301 - DNA, 17 bp, Arabidopsis thaliana
agtcgtcctgtagatgg

SEQ ID NO: 44302 - DNA, 17 bp, Arabidopsis thaliana
agtcgtcctgtaggatg

SEQ ID NO: 44303 - DNA, 17 bp, Arabidopsis thaliana
agtcgtcgagtgagata

SEQ ID NO: 44304 - DNA, 17 bp, Arabidopsis thaliana
agtcgtcgtcagtcgtc

SEQ ID NO: 44305 - DNA, 17 bp, Arabidopsis thaliana
agtcgtcgttgaatttg

SEQ ID NO: 44306 - DNA, 17 bp, Arabidopsis thaliana
agtcgtctaaagaacag

SEQ ID NO: 44307 - DNA, 17 bp, Arabidopsis thaliana
agtcgtctactcgacca

SEQ ID NO: 44308 - DNA, 17 bp, Arabidopsis thaliana
agtcgtctagctcagtt

SEQ ID NO: 44309 - DNA, 17 bp, Arabidopsis thaliana
agtcgtctagtggttgt

SEQ ID NO: 44310 - DNA, 17 bp, Arabidopsis thaliana
agtcgtctattggcaga

SEQ ID NO: 44311 - DNA, 17 bp, Arabidopsis thaliana
agtcgtctcgcgttgac

SEQ ID NO: 44312 - DNA, 17 bp, Arabidopsis thaliana
agtcgtctgcaaaggat

SEQ ID NO: 44313 - DNA, 17 bp, Arabidopsis thaliana
agtcgtctgcctgggtg

SEQ ID NO: 44314 - DNA, 17 bp, Arabidopsis thaliana
agtcgtctgctcctgct

SEQ ID NO: 44315 - DNA, 17 bp, Arabidopsis thaliana
agtcgtctgtttcgcga

SEQ ID NO: 44316 - DNA, 17 bp, Arabidopsis thaliana
agtcgtcttcgtactct

SEQ ID NO: 44317 - DNA, 17 bp, Arabidopsis thaliana
agtcgtcttgcgcacga

SEQ ID NO: 44318 - DNA, 17 bp, Arabidopsis thaliana
agtcgtcttgtgaaggc

SEQ ID NO: 44319 - DNA, 17 bp, Arabidopsis thaliana
agtcgtctttgtacttt

SEQ ID NO: 44320 - DNA, 17 bp, Arabidopsis thaliana
agtcgtgaactttgctc

SEQ ID NO: 44321 - DNA, 17 bp, Arabidopsis thaliana
agtcgtgagttgactaa

SEQ ID NO: 44322 - DNA, 17 bp, Arabidopsis thaliana
agtcgtgatctgttcgt

SEQ ID NO: 44323 - DNA, 17 bp, Arabidopsis thaliana
agtcgtgatttagacca

SEQ ID NO: 44324 - DNA, 17 bp, Arabidopsis thaliana
agtcgtgcagcttctga

SEQ ID NO: 44325 - DNA, 17 bp, Arabidopsis thaliana
agtcgtggacgactgcg

SEQ ID NO: 44326 - DNA, 17 bp, Arabidopsis thaliana
agtcgtggatgactgcg

SEQ ID NO: 44327 - DNA, 17 bp, Arabidopsis thaliana
agtcgtgtgtcggccag

SEQ ID NO: 44328 - DNA, 17 bp, Arabidopsis thaliana
agtcgttaactgattat

SEQ ID NO: 44329 - DNA, 17 bp, Arabidopsis thaliana
agtcgttcagcagtcgc

SEQ ID NO: 44330 - DNA, 17 bp, Arabidopsis thaliana
agtcgttcaggagagag

SEQ ID NO: 44331 - DNA, 17 bp, Arabidopsis thaliana
agtcgttcatatgtgac

SEQ ID NO: 44332 - DNA, 17 bp, Arabidopsis thaliana
agtcgttcgccaggatt

SEQ ID NO: 44333 - DNA, 17 bp, Arabidopsis thaliana
agtcgttctcgaagcgg

SEQ ID NO: 44334 - DNA, 17 bp, Arabidopsis thaliana
agtcgttgaaagcccaa

SEQ ID NO: 44335 - DNA, 17 bp, Arabidopsis thaliana
agtcgttgacgggtatg

SEQ ID NO: 44336 - DNA, 17 bp, Arabidopsis thaliana
agtcgttgcactgccaa

SEQ ID NO: 44337 - DNA, 17 bp, Arabidopsis thaliana
agtcgttgccgaatgta

SEQ ID NO: 44338 - DNA, 17 bp, Arabidopsis thaliana
agtcgttgcggcgatgg

SEQ ID NO: 44339 - DNA, 17 bp, Arabidopsis thaliana
agtcgttgcgggacgtt

SEQ ID NO: 44340 - DNA, 17 bp, Arabidopsis thaliana
agtcgttgtccacatag

SEQ ID NO: 44341 - DNA, 17 bp, Arabidopsis thaliana
agtcgttgttcggggac

SEQ ID NO: 44342 - DNA, 17 bp, Arabidopsis thaliana
agtcgttgttgtagacg

SEQ ID NO: 44343 - DNA, 17 bp, Arabidopsis thaliana
agtcgtttacagaccaa

SEQ ID NO: 44344 - DNA, 17 bp, Arabidopsis thaliana
agtcgtttgcggttgcg

SEQ ID NO: 44345 - DNA, 17 bp, Arabidopsis thaliana
agtcgtttgttcagagc

SEQ ID NO: 44346 - DNA, 17 bp, Arabidopsis thaliana
agtcgttttagacttca

SEQ ID NO: 44347 - DNA, 17 bp, Arabidopsis thaliana
agtcgttttctcctggt

SEQ ID NO: 44348 - DNA, 17 bp, Arabidopsis thaliana
agtcgtttttgatgttg

SEQ ID NO: 44349 - DNA, 17 bp, Arabidopsis thaliana
agtctaaaagcccagtt

SEQ ID NO: 44350 - DNA, 17 bp, Arabidopsis thaliana
agtctaaaagtgcctaa

SEQ ID NO: 44351 - DNA, 17 bp, Arabidopsis thaliana
agtctaaacaaagacga

SEQ ID NO: 44352 - DNA, 17 bp, Arabidopsis thaliana
agtctaaaccgcagatc

SEQ ID NO: 44353 - DNA, 17 bp, Arabidopsis thaliana
agtctaaatgactgtgt

SEQ ID NO: 44354 - DNA, 17 bp, Arabidopsis thaliana
agtctaacgagatccat

SEQ ID NO: 44355 - DNA, 17 bp, Arabidopsis thaliana
agtctaagagtaacaat

SEQ ID NO: 44356 - DNA, 17 bp, Arabidopsis thaliana
agtctaagcggatcaag

SEQ ID NO: 44357 - DNA, 17 bp, Arabidopsis thaliana
agtctaagcggatcatg

SEQ ID NO: 44358 - DNA, 17 bp, Arabidopsis thaliana
agtctaagcggcaaact

SEQ ID NO: 44359 - DNA, 17 bp, Arabidopsis thaliana
agtctaagctactctac

SEQ ID NO: 44360 - DNA, 17 bp, Arabidopsis thaliana
agtctaagctgcactag

SEQ ID NO: 44361 - DNA, 17 bp, Arabidopsis thaliana
agtctaaggttttggtt

SEQ ID NO: 44362 - DNA, 17 bp, Arabidopsis thaliana
agtctaatagtgcggtg

SEQ ID NO: 44363 - DNA, 17 bp, Arabidopsis thaliana
agtctaattcgtaattc

SEQ ID NO: 44364 - DNA, 17 bp, Arabidopsis thaliana
agtctaattcgtagttc

SEQ ID NO: 44365 - DNA, 17 bp, Arabidopsis thaliana
agtctaattcttttggg

SEQ ID NO: 44366 - DNA, 17 bp, Arabidopsis thaliana
agtctaattttcctcct

SEQ ID NO: 44367 - DNA, 17 bp, Arabidopsis thaliana
agtctacaaggtgtcaa

SEQ ID NO: 44368 - DNA, 17 bp, Arabidopsis thaliana
agtctacaagttgtcaa

SEQ ID NO: 44369 - DNA, 17 bp, Arabidopsis thaliana
agtctacactgatcatg

SEQ ID NO: 44370 - DNA, 17 bp, Arabidopsis thaliana
agtctacagcttcttcg

SEQ ID NO: 44371 - DNA, 17 bp, Arabidopsis thaliana
agtctacatcgagagca

SEQ ID NO: 44372 - DNA, 17 bp, Arabidopsis thaliana
agtctacatggaccact

SEQ ID NO: 44373 - DNA, 17 bp, Arabidopsis thaliana
agtctacatgtgtggca

SEQ ID NO: 44374 - DNA, 17 bp, Arabidopsis thaliana
agtctacatgtgtggcg

SEQ ID NO: 44375 - DNA, 17 bp, Arabidopsis thaliana
agtctaccttcgacccg

SEQ ID NO: 44376 - DNA, 17 bp, Arabidopsis thaliana
agtctaccttcgacctg

SEQ ID NO: 44377 - DNA, 17 bp, Arabidopsis thaliana
agtctacgtcagcttct

SEQ ID NO: 44378 - DNA, 17 bp, Arabidopsis thaliana
agtctactatgcagaca

SEQ ID NO: 44379 - DNA, 17 bp, Arabidopsis thaliana
agtctactcgcagaatc

SEQ ID NO: 44380 - DNA, 17 bp, Arabidopsis thaliana
agtctactctcagaatc

SEQ ID NO: 44381 - DNA, 17 bp, Arabidopsis thaliana
agtctactctgaaagac

SEQ ID NO: 44382 - DNA, 17 bp, Arabidopsis thaliana
agtctactgtgtgatcc

SEQ ID NO: 44383 - DNA, 17 bp, Arabidopsis thaliana
agtctacttgcaatcgt

SEQ ID NO: 44384 - DNA, 17 bp, Arabidopsis thaliana
agtctactttgtctggt

SEQ ID NO: 44385 - DNA, 17 bp, Arabidopsis thaliana
agtctagctttcctcgt

SEQ ID NO: 44386 - DNA, 17 bp, Arabidopsis thaliana
agtctaggtagcaagct

SEQ ID NO: 44387 - DNA, 17 bp, Arabidopsis thaliana
agtctaggtgtcaagct

SEQ ID NO: 44388 - DNA, 17 bp, Arabidopsis thaliana
agtctagtaaaaggctg

SEQ ID NO: 44389 - DNA, 17 bp, Arabidopsis thaliana
agtctagtccgatttcg

SEQ ID NO: 44390 - DNA, 17 bp, Arabidopsis thaliana
agtctagtttggcggtt

SEQ ID NO: 44391 - DNA, 17 bp, Arabidopsis thaliana
agtctatagtgtctgtc

SEQ ID NO: 44392 - DNA, 17 bp, Arabidopsis thaliana
agtctatatcagttgcg

SEQ ID NO: 44393 - DNA, 17 bp, Arabidopsis thaliana
agtctatcaccaaccaa

SEQ ID NO: 44394 - DNA, 17 bp, Arabidopsis thaliana
agtctatcagttgtgct

SEQ ID NO: 44395 - DNA, 17 bp, Arabidopsis thaliana
agtctatccagtttcgc

SEQ ID NO: 44396 - DNA, 17 bp, Arabidopsis thaliana
agtctatccatcattcc

SEQ ID NO: 44397 - DNA, 17 bp, Arabidopsis thaliana
agtctatcgatcagatg

SEQ ID NO: 44398 - DNA, 17 bp, Arabidopsis thaliana
agtctatcgccgcttct

SEQ ID NO: 44399 - DNA, 17 bp, Arabidopsis thaliana
agtctatcgtatcggat

SEQ ID NO: 44400 - DNA, 17 bp, Arabidopsis thaliana
agtctatctgctgatga

SEQ ID NO: 44401 - DNA, 17 bp, Arabidopsis thaliana
agtctatctgtgagcaa

SEQ ID NO: 44402 - DNA, 17 bp, Arabidopsis thaliana
agtctatgccgagttct

SEQ ID NO: 44403 - DNA, 17 bp, Arabidopsis thaliana
agtctatggacggacca

SEQ ID NO: 44404 - DNA, 17 bp, Arabidopsis thaliana
agtctatgttaacaatg

SEQ ID NO: 44405 - DNA, 17 bp, Arabidopsis thaliana
agtctattagattgtgc

SEQ ID NO: 44406 - DNA, 17 bp, Arabidopsis thaliana
agtctattagctcagtg

SEQ ID NO: 44407 - DNA, 17 bp, Arabidopsis thaliana
agtctattcgggtaaga

SEQ ID NO: 44408 - DNA, 17 bp, Arabidopsis thaliana
agtctattctagcggtt

SEQ ID NO: 44409 - DNA, 17 bp, Arabidopsis thaliana
agtctattgccaaacaa

SEQ ID NO: 44410 - DNA, 17 bp, Arabidopsis thaliana
agtctattgcgtgttcc

SEQ ID NO: 44411 - DNA, 17 bp, Arabidopsis thaliana
agtctattggccgatta

SEQ ID NO: 44412 - DNA, 17 bp, Arabidopsis thaliana
agtctattgtgtgatct

SEQ ID NO: 44413 - DNA, 17 bp, Arabidopsis thaliana
agtctatttggtggtgg

SEQ ID NO: 44414 - DNA, 17 bp, Arabidopsis thaliana
agtctatttggttcttt

SEQ ID NO: 44415 - DNA, 17 bp, Arabidopsis thaliana
agtctatttgttggttg

SEQ ID NO: 44416 - DNA, 17 bp, Arabidopsis thaliana
agtctattttcttaggg

SEQ ID NO: 44417 - DNA, 17 bp, Arabidopsis thaliana
agtctcaaaacgtatca

SEQ ID NO: 44418 - DNA, 17 bp, Arabidopsis thaliana
agtctcaaagatagcaa

SEQ ID NO: 44419 - DNA, 17 bp, Arabidopsis thaliana
agtctcaaagcgacgac

SEQ ID NO: 44420 - DNA, 17 bp, Arabidopsis thaliana
agtctcaactctaagct

SEQ ID NO: 44421 - DNA, 17 bp, Arabidopsis thaliana
agtctcaactgcctccc

SEQ ID NO: 44422 - DNA, 17 bp, Arabidopsis thaliana
agtctcaactttaccct

SEQ ID NO: 44423 - DNA, 17 bp, Arabidopsis thaliana
agtctcaagaggatgga

SEQ ID NO: 44424 - DNA, 17 bp, Arabidopsis thaliana
agtctcaagtactctat

SEQ ID NO: 44425 - DNA, 17 bp, Arabidopsis thaliana
agtctcaatagactgat

SEQ ID NO: 44426 - DNA, 17 bp, Arabidopsis thaliana
agtctcacctagggtcg

SEQ ID NO: 44427 - DNA, 17 bp, Arabidopsis thaliana
agtctcacgatgtaccg

SEQ ID NO: 44428 - DNA, 17 bp, Arabidopsis thaliana
agtctcactcttctttc

SEQ ID NO: 44429 - DNA, 17 bp, Arabidopsis thaliana
agtctcactgggcgatt

SEQ ID NO: 44430 - DNA, 17 bp, Arabidopsis thaliana
agtctcagaacaatcag

SEQ ID NO: 44431 - DNA, 17 bp, Arabidopsis thaliana
agtctcagactgagagt

SEQ ID NO: 44432 - DNA, 17 bp, Arabidopsis thaliana
agtctcagagcgttttg

SEQ ID NO: 44433 - DNA, 17 bp, Arabidopsis thaliana
agtctcagctattgcga

SEQ ID NO: 44434 - DNA, 17 bp, Arabidopsis thaliana
agtctcagcttctatct

SEQ ID NO: 44435 - DNA, 17 bp, Arabidopsis thaliana
agtctcaggagggatag

SEQ ID NO: 44436 - DNA, 17 bp, Arabidopsis thaliana
agtctcaggagtcctaa

SEQ ID NO: 44437 - DNA, 17 bp, Arabidopsis thaliana
agtctcaggcgttgctc

SEQ ID NO: 44438 - DNA, 17 bp, Arabidopsis thaliana
agtctcaggtagacatt

SEQ ID NO: 44439 - DNA, 17 bp, Arabidopsis thaliana
agtctcagtctagattc

SEQ ID NO: 44440 - DNA, 17 bp, Arabidopsis thaliana
agtctcagttcggattg

SEQ ID NO: 44441 - DNA, 17 bp, Arabidopsis thaliana
agtctcagttgggtctt

SEQ ID NO: 44442 - DNA, 17 bp, Arabidopsis thaliana
agtctcagtttcagcga

SEQ ID NO: 44443 - DNA, 17 bp, Arabidopsis thaliana
agtctcatcaagtttag

SEQ ID NO: 44444 - DNA, 17 bp, Arabidopsis thaliana
agtctcatcctatttgc

SEQ ID NO: 44445 - DNA, 17 bp, Arabidopsis thaliana
agtctcatcctctagat

SEQ ID NO: 44446 - DNA, 17 bp, Arabidopsis thaliana
agtctcatcctggagat

SEQ ID NO: 44447 - DNA, 17 bp, Arabidopsis thaliana
agtctcatcctgtagat

SEQ ID NO: 44448 - DNA, 17 bp, Arabidopsis thaliana
agtctcatcttagttga

SEQ ID NO: 44449 - DNA, 17 bp, Arabidopsis thaliana
agtctcatgccgctctc

SEQ ID NO: 44450 - DNA, 17 bp, Arabidopsis thaliana
agtctcattttggctat

SEQ ID NO: 44451 - DNA, 17 bp, Arabidopsis thaliana
agtctccagagcttgtg

SEQ ID NO: 44452 - DNA, 17 bp, Arabidopsis thaliana
agtctccagattcgtac

SEQ ID NO: 44453 - DNA, 17 bp, Arabidopsis thaliana
agtctccagtcgggtgc

SEQ ID NO: 44454 - DNA, 17 bp, Arabidopsis thaliana
agtctccctgtctttga

SEQ ID NO: 44455 - DNA, 17 bp, Arabidopsis thaliana
agtctccgattggtttg

SEQ ID NO: 44456 - DNA, 17 bp, Arabidopsis thaliana
agtctccggcaatgcct

SEQ ID NO: 44457 - DNA, 17 bp, Arabidopsis thaliana
agtctccgttggaagtg

SEQ ID NO: 44458 - DNA, 17 bp, Arabidopsis thaliana
agtctcctagccgcact

SEQ ID NO: 44459 - DNA, 17 bp, Arabidopsis thaliana
agtctcctcttgcgtca

SEQ ID NO: 44460 - DNA, 17 bp, Arabidopsis thaliana
agtctcctgaccaggca

SEQ ID NO: 44461 - DNA, 17 bp, Arabidopsis thaliana
agtctcctgcaatatag

SEQ ID NO: 44462 - DNA, 17 bp, Arabidopsis thaliana
agtctccttcgttgccg

SEQ ID NO: 44463 - DNA, 17 bp, Arabidopsis thaliana
agtctcctttggagaaa

SEQ ID NO: 44464 - DNA, 17 bp, Arabidopsis thaliana
agtctcgaagcgtgtga

SEQ ID NO: 44465 - DNA, 17 bp, Arabidopsis thaliana
agtctcgacaagccgtc

SEQ ID NO: 44466 - DNA, 17 bp, Arabidopsis thaliana
agtctcgaccgatctgt

SEQ ID NO: 44467 - DNA, 17 bp, Arabidopsis thaliana
agtctcgagccttaatc

SEQ ID NO: 44468 - DNA, 17 bp, Arabidopsis thaliana
agtctcgatgaccggtg

SEQ ID NO: 44469 - DNA, 17 bp, Arabidopsis thaliana
agtctcgatggtgcagt

SEQ ID NO: 44470 - DNA, 17 bp, Arabidopsis thaliana
agtctcgccgttactag

SEQ ID NO: 44471 - DNA, 17 bp, Arabidopsis thaliana
agtctcgcgacaagatt

SEQ ID NO: 44472 - DNA, 17 bp, Arabidopsis thaliana
agtctcgctacgtcgtc

SEQ ID NO: 44473 - DNA, 17 bp, Arabidopsis thaliana
agtctcgctctcagaca

SEQ ID NO: 44474 - DNA, 17 bp, Arabidopsis thaliana
agtctcggacccggtcg

SEQ ID NO: 44475 - DNA, 17 bp, Arabidopsis thaliana
agtctcggacctggtcg

SEQ ID NO: 44476 - DNA, 17 bp, Arabidopsis thaliana
agtctcggattcaggct

SEQ ID NO: 44477 - DNA, 17 bp, Arabidopsis thaliana
agtctcggatttagtgt

SEQ ID NO: 44478 - DNA, 17 bp, Arabidopsis thaliana
agtctcggcaatggacg

SEQ ID NO: 44479 - DNA, 17 bp, Arabidopsis thaliana
agtctcggctcatggat

SEQ ID NO: 44480 - DNA, 17 bp, Arabidopsis thaliana
agtctcggctggacaat

SEQ ID NO: 44481 - DNA, 17 bp, Arabidopsis thaliana
agtctcggttcacatgg

SEQ ID NO: 44482 - DNA, 17 bp, Arabidopsis thaliana
agtctcgtattttgaca

SEQ ID NO: 44483 - DNA, 17 bp, Arabidopsis thaliana
agtctcgtcgacggcct

SEQ ID NO: 44484 - DNA, 17 bp, Arabidopsis thaliana
agtctcgtcgtagtttg

SEQ ID NO: 44485 - DNA, 17 bp, Arabidopsis thaliana
agtctcgtcgttgtaca

SEQ ID NO: 44486 - DNA, 17 bp, Arabidopsis thaliana
agtctcgtgcctatttg

SEQ ID NO: 44487 - DNA, 17 bp, Arabidopsis thaliana
agtctcgtgttttttgt

SEQ ID NO: 44488 - DNA, 17 bp, Arabidopsis thaliana
agtctcgttccgactac

SEQ ID NO: 44489 - DNA, 17 bp, Arabidopsis thaliana
agtctcgttgaccggtg

SEQ ID NO: 44490 - DNA, 17 bp, Arabidopsis thaliana
agtctcgttggattgag

SEQ ID NO: 44491 - DNA, 17 bp, Arabidopsis thaliana
agtctctagatgatgtg

SEQ ID NO: 44492 - DNA, 17 bp, Arabidopsis thaliana
agtctctaggtcgaaat

SEQ ID NO: 44493 - DNA, 17 bp, Arabidopsis thaliana
agtctctatacttctgt

SEQ ID NO: 44494 - DNA, 17 bp, Arabidopsis thaliana
agtctctatctgtttac

SEQ ID NO: 44495 - DNA, 17 bp, Arabidopsis thaliana
agtctctatgttcgttc

SEQ ID NO: 44496 - DNA, 17 bp, Arabidopsis thaliana
agtctctatgttcgttt

SEQ ID NO: 44497 - DNA, 17 bp, Arabidopsis thaliana
agtctctcaagatagtt

SEQ ID NO: 44498 - DNA, 17 bp, Arabidopsis thaliana
agtctctcacatggttt

SEQ ID NO: 44499 - DNA, 17 bp, Arabidopsis thaliana
agtctctcagatccact

SEQ ID NO: 44500 - DNA, 17 bp, Arabidopsis thaliana
agtctctcagatctgtt

SEQ ID NO: 44501 - DNA, 17 bp, Arabidopsis thaliana
agtctctcagttaggcc

SEQ ID NO: 44502 - DNA, 17 bp, Arabidopsis thaliana
agtctctcatgtgatga

SEQ ID NO: 44503 - DNA, 17 bp, Arabidopsis thaliana
agtctctccatcgtctc

SEQ ID NO: 44504 - DNA, 17 bp, Arabidopsis thaliana
agtctctcccttgcgag

SEQ ID NO: 44505 - DNA, 17 bp, Arabidopsis thaliana
agtctctcctgtgctga

SEQ ID NO: 44506 - DNA, 17 bp, Arabidopsis thaliana
agtctctcggacgtagc

SEQ ID NO: 44507 - DNA, 17 bp, Arabidopsis thaliana
agtctctcggcaacgga

SEQ ID NO: 44508 - DNA, 17 bp, Arabidopsis thaliana
agtctctcggtgacggc

SEQ ID NO: 44509 - DNA, 17 bp, Arabidopsis thaliana
agtctctctgttgccta

SEQ ID NO: 44510 - DNA, 17 bp, Arabidopsis thaliana
agtctctcttgcgatat

SEQ ID NO: 44511 - DNA, 17 bp, Arabidopsis thaliana
agtctctcttgcgattt

SEQ ID NO: 44512 - DNA, 17 bp, Arabidopsis thaliana
agtctctcttggaacgc

SEQ ID NO: 44513 - DNA, 17 bp, Arabidopsis thaliana
agtctctgaattggaat

SEQ ID NO: 44514 - DNA, 17 bp, Arabidopsis thaliana
agtctctgacaatggtt

SEQ ID NO: 44515 - DNA, 17 bp, Arabidopsis thaliana
agtctctgatcaacact

SEQ ID NO: 44516 - DNA, 17 bp, Arabidopsis thaliana
agtctctgatgacatgg

SEQ ID NO: 44517 - DNA, 17 bp, Arabidopsis thaliana
agtctctgccttgggtt

SEQ ID NO: 44518 - DNA, 17 bp, Arabidopsis thaliana
agtctctgctagccggt

SEQ ID NO: 44519 - DNA, 17 bp, Arabidopsis thaliana
agtctctgcttctgcct

SEQ ID NO: 44520 - DNA, 17 bp, Arabidopsis thaliana
agtctctggaggtttct

SEQ ID NO: 44521 - DNA, 17 bp, Arabidopsis thaliana
agtctctggaggttttt

SEQ ID NO: 44522 - DNA, 17 bp, Arabidopsis thaliana
agtctctggatttcttt

SEQ ID NO: 44523 - DNA, 17 bp, Arabidopsis thaliana
agtctctggccagacgt

SEQ ID NO: 44524 - DNA, 17 bp, Arabidopsis thaliana
agtctctggcttattcg

SEQ ID NO: 44525 - DNA, 17 bp, Arabidopsis thaliana
agtctctgtaaaccgtt

SEQ ID NO: 44526 - DNA, 17 bp, Arabidopsis thaliana
agtctctgtagcttctg

SEQ ID NO: 44527 - DNA, 17 bp, Arabidopsis thaliana
agtctctgttcatagac

SEQ ID NO: 44528 - DNA, 17 bp, Arabidopsis thaliana
agtctctgttcttcgcg

SEQ ID NO: 44529 - DNA, 17 bp, Arabidopsis thaliana
agtctctgttgcggtgg

SEQ ID NO: 44530 - DNA, 17 bp, Arabidopsis thaliana
agtctctgtttttcgcg

SEQ ID NO: 44531 - DNA, 17 bp, Arabidopsis thaliana
agtctcttagaccaact

SEQ ID NO: 44532 - DNA, 17 bp, Arabidopsis thaliana
agtctcttccacaactt

SEQ ID NO: 44533 - DNA, 17 bp, Arabidopsis thaliana
agtctcttctgcttctt

SEQ ID NO: 44534 - DNA, 17 bp, Arabidopsis thaliana
agtctcttgttgcctag

SEQ ID NO: 44535 - DNA, 17 bp, Arabidopsis thaliana
agtctctttcatctcta

SEQ ID NO: 44536 - DNA, 17 bp, Arabidopsis thaliana
agtctctttgcggatgt

SEQ ID NO: 44537 - DNA, 17 bp, Arabidopsis thaliana
agtctctttggctattg

SEQ ID NO: 44538 - DNA, 17 bp, Arabidopsis thaliana
agtctcttttggagaaa

SEQ ID NO: 44539 - DNA, 17 bp, Arabidopsis thaliana
agtctgaactccaggat

SEQ ID NO: 44540 - DNA, 17 bp, Arabidopsis thaliana
agtctgaatgaatgtgg

SEQ ID NO: 44541 - DNA, 17 bp, Arabidopsis thaliana
agtctgaattcgttcat

SEQ ID NO: 44542 - DNA, 17 bp, Arabidopsis thaliana
agtctgacaacgaccct

SEQ ID NO: 44543 - DNA, 17 bp, Arabidopsis thaliana
agtctgacagttctgtg

SEQ ID NO: 44544 - DNA, 17 bp, Arabidopsis thaliana
agtctgacatgtgtgca

SEQ ID NO: 44545 - DNA, 17 bp, Arabidopsis thaliana
agtctgacatgtgtgcg

SEQ ID NO: 44546 - DNA, 17 bp, Arabidopsis thaliana
agtctgaccacatcttt

SEQ ID NO: 44547 - DNA, 17 bp, Arabidopsis thaliana
agtctgaccatcactct

SEQ ID NO: 44548 - DNA, 17 bp, Arabidopsis thaliana
agtctgacctgttccct

SEQ ID NO: 44549 - DNA, 17 bp, Arabidopsis thaliana
agtctgaccttagatca

SEQ ID NO: 44550 - DNA, 17 bp, Arabidopsis thaliana
agtctgactaagtctct

SEQ ID NO: 44551 - DNA, 17 bp, Arabidopsis thaliana
agtctgacttacagcct

SEQ ID NO: 44552 - DNA, 17 bp, Arabidopsis thaliana
agtctgagataagagtc

SEQ ID NO: 44553 - DNA, 17 bp, Arabidopsis thaliana
agtctgagcaaaaggac

SEQ ID NO: 44554 - DNA, 17 bp, Arabidopsis thaliana
agtctgagtgatttaca

SEQ ID NO: 44555 - DNA, 17 bp, Arabidopsis thaliana
agtctgatcggagcagt

SEQ ID NO: 44556 - DNA, 17 bp, Arabidopsis thaliana
agtctgattctggaccg

SEQ ID NO: 44557 - DNA, 17 bp, Arabidopsis thaliana
agtctgattgtcgtaca

SEQ ID NO: 44558 - DNA, 17 bp, Arabidopsis thaliana
agtctgatttggcaaat

SEQ ID NO: 44559 - DNA, 17 bp, Arabidopsis thaliana
agtctgatttggcaatt

SEQ ID NO: 44560 - DNA, 17 bp, Arabidopsis thaliana
agtctgatttggtgccg

SEQ ID NO: 44561 - DNA, 17 bp, Arabidopsis thaliana
agtctgcaacgcaacaa

SEQ ID NO: 44562 - DNA, 17 bp, Arabidopsis thaliana
agtctgcagatggactt

SEQ ID NO: 44563 - DNA, 17 bp, Arabidopsis thaliana
agtctgcagccgtttgt

SEQ ID NO: 44564 - DNA, 17 bp, Arabidopsis thaliana
agtctgcagctgtttat

SEQ ID NO: 44565 - DNA, 17 bp, Arabidopsis thaliana
agtctgcatgtgtgacg

SEQ ID NO: 44566 - DNA, 17 bp, Arabidopsis thaliana
agtctgcatgtgtggcg

SEQ ID NO: 44567 - DNA, 17 bp, Arabidopsis thaliana
agtctgcatgtgtggct

SEQ ID NO: 44568 - DNA, 17 bp, Arabidopsis thaliana
agtctgccgcttctctg

SEQ ID NO: 44569 - DNA, 17 bp, Arabidopsis thaliana
agtctgcgattagtctc

SEQ ID NO: 44570 - DNA, 17 bp, Arabidopsis thaliana
agtctgcggatcgatct

SEQ ID NO: 44571 - DNA, 17 bp, Arabidopsis thaliana
agtctgcgtttactgta

SEQ ID NO: 44572 - DNA, 17 bp, Arabidopsis thaliana
agtctgctgggtaaaga

SEQ ID NO: 44573 - DNA, 17 bp, Arabidopsis thaliana
agtctgcttttgagaac

SEQ ID NO: 44574 - DNA, 17 bp, Arabidopsis thaliana
agtctggagaagattcc

SEQ ID NO: 44575 - DNA, 17 bp, Arabidopsis thaliana
agtctggagaagcatcc

SEQ ID NO: 44576 - DNA, 17 bp, Arabidopsis thaliana
agtctggagaagcgtcc

SEQ ID NO: 44577 - DNA, 17 bp, Arabidopsis thaliana
agtctggaggttgcagg

SEQ ID NO: 44578 - DNA, 17 bp, Arabidopsis thaliana
agtctggatcctagctt

SEQ ID NO: 44579 - DNA, 17 bp, Arabidopsis thaliana
agtctggatctctggcg

SEQ ID NO: 44580 - DNA, 17 bp, Arabidopsis thaliana
agtctggcatggattcc

SEQ ID NO: 44581 - DNA, 17 bp, Arabidopsis thaliana
agtctggcctcggctaa

SEQ ID NO: 44582 - DNA, 17 bp, Arabidopsis thaliana
agtctggcgaagttaga

SEQ ID NO: 44583 - DNA, 17 bp, Arabidopsis thaliana
agtctgggaactggtgg

SEQ ID NO: 44584 - DNA, 17 bp, Arabidopsis thaliana
agtctgggactaggtta

SEQ ID NO: 44585 - DNA, 17 bp, Arabidopsis thaliana
agtctgggcagtccgtg

SEQ ID NO: 44586 - DNA, 17 bp, Arabidopsis thaliana
agtctgggggacgttca

SEQ ID NO: 44587 - DNA, 17 bp, Arabidopsis thaliana
agtctggtaaattgcgt

SEQ ID NO: 44588 - DNA, 17 bp, Arabidopsis thaliana
agtctggtaaattgctt

SEQ ID NO: 44589 - DNA, 17 bp, Arabidopsis thaliana
agtctggtgaaactgat

SEQ ID NO: 44590 - DNA, 17 bp, Arabidopsis thaliana
agtctggtgccagcaac

SEQ ID NO: 44591 - DNA, 17 bp, Arabidopsis thaliana
agtctggtgccagcacc

SEQ ID NO: 44592 - DNA, 17 bp, Arabidopsis thaliana
agtctggtgccagcagc

SEQ ID NO: 44593 - DNA, 17 bp, Arabidopsis thaliana
agtctggttcaacccag

SEQ ID NO: 44594 - DNA, 17 bp, Arabidopsis thaliana
agtctggttctcttctg

SEQ ID NO: 44595 - DNA, 17 bp, Arabidopsis thaliana
agtctggttgactcatg

SEQ ID NO: 44596 - DNA, 17 bp, Arabidopsis thaliana
agtctgtaagttgggct

SEQ ID NO: 44597 - DNA, 17 bp, Arabidopsis thaliana
agtctgtacgaccgttg

SEQ ID NO: 44598 - DNA, 17 bp, Arabidopsis thaliana
agtctgtagccagacac

SEQ ID NO: 44599 - DNA, 17 bp, Arabidopsis thaliana
agtctgtaggccctaaa

SEQ ID NO: 44600 - DNA, 17 bp, Arabidopsis thaliana
agtctgtaggtccagtg

SEQ ID NO: 44601 - DNA, 17 bp, Arabidopsis thaliana
agtctgtaggtgacttt

SEQ ID NO: 44602 - DNA, 17 bp, Arabidopsis thaliana
agtctgtaggttgcagg

SEQ ID NO: 44603 - DNA, 17 bp, Arabidopsis thaliana
agtctgtaggttgtgat

SEQ ID NO: 44604 - DNA, 17 bp, Arabidopsis thaliana
agtctgtcaccatctag

SEQ ID NO: 44605 - DNA, 17 bp, Arabidopsis thaliana
agtctgtcacttgggtc

SEQ ID NO: 44606 - DNA, 17 bp, Arabidopsis thaliana
agtctgtcagctacgtc

SEQ ID NO: 44607 - DNA, 17 bp, Arabidopsis thaliana
agtctgtcagtagggtt

SEQ ID NO: 44608 - DNA, 17 bp, Arabidopsis thaliana
agtctgtcagtcggcct

SEQ ID NO: 44609 - DNA, 17 bp, Arabidopsis thaliana
agtctgtcagttgagcc

SEQ ID NO: 44610 - DNA, 17 bp, Arabidopsis thaliana
agtctgtcagttgagct

SEQ ID NO: 44611 - DNA, 17 bp, Arabidopsis thaliana
agtctgtcagttggacc

SEQ ID NO: 44612 - DNA, 17 bp, Arabidopsis thaliana
agtctgtcagttggatc

SEQ ID NO: 44613 - DNA, 17 bp, Arabidopsis thaliana
agtctgtcagttgggct

SEQ ID NO: 44614 - DNA, 17 bp, Arabidopsis thaliana
agtctgtcagttgggtc

SEQ ID NO: 44615 - DNA, 17 bp, Arabidopsis thaliana
agtctgtcagttgggtt

SEQ ID NO: 44616 - DNA, 17 bp, Arabidopsis thaliana
agtctgtcagttggtcc

SEQ ID NO: 44617 - DNA, 17 bp, Arabidopsis thaliana
agtctgtcagttggtct

SEQ ID NO: 44618 - DNA, 17 bp, Arabidopsis thaliana
agtctgtcagttggttt

SEQ ID NO: 44619 - DNA, 17 bp, Arabidopsis thaliana
agtctgtcagttgtgat

SEQ ID NO: 44620 - DNA, 17 bp, Arabidopsis thaliana
agtctgtcagtttggtt

SEQ ID NO: 44621 - DNA, 17 bp, Arabidopsis thaliana
agtctgtcgaagggttc

SEQ ID NO: 44622 - DNA, 17 bp, Arabidopsis thaliana
agtctgtcgctgaaact

SEQ ID NO: 44623 - DNA, 17 bp, Arabidopsis thaliana
agtctgtctgttgggtc

SEQ ID NO: 44624 - DNA, 17 bp, Arabidopsis thaliana
agtctgtgagctctgca

SEQ ID NO: 44625 - DNA, 17 bp, Arabidopsis thaliana
agtctgtgatgttggcg

SEQ ID NO: 44626 - DNA, 17 bp, Arabidopsis thaliana
agtctgtgattgctgag

SEQ ID NO: 44627 - DNA, 17 bp, Arabidopsis thaliana
agtctgtgcagaggaga

SEQ ID NO: 44628 - DNA, 17 bp, Arabidopsis thaliana
agtctgtgcctcatttg

SEQ ID NO: 44629 - DNA, 17 bp, Arabidopsis thaliana
agtctgtgtaggttctg

SEQ ID NO: 44630 - DNA, 17 bp, Arabidopsis thaliana
agtctgtgtggtctcga

SEQ ID NO: 44631 - DNA, 17 bp, Arabidopsis thaliana
agtctgttagtggtatt

SEQ ID NO: 44632 - DNA, 17 bp, Arabidopsis thaliana
agtctgttagttgggct

SEQ ID NO: 44633 - DNA, 17 bp, Arabidopsis thaliana
agtctgttagttggggt

SEQ ID NO: 44634 - DNA, 17 bp, Arabidopsis thaliana
agtctgttccgaaaagc

SEQ ID NO: 44635 - DNA, 17 bp, Arabidopsis thaliana
agtctgttcgtattgcc

SEQ ID NO: 44636 - DNA, 17 bp, Arabidopsis thaliana
agtctgttgagacccgg

SEQ ID NO: 44637 - DNA, 17 bp, Arabidopsis thaliana
agtctgttgagtgagac

SEQ ID NO: 44638 - DNA, 17 bp, Arabidopsis thaliana
agtctgttgccaaacac

SEQ ID NO: 44639 - DNA, 17 bp, Arabidopsis thaliana
agtctgttgccagacaa

SEQ ID NO: 44640 - DNA, 17 bp, Arabidopsis thaliana
agtctgttgccagacac

SEQ ID NO: 44641 - DNA, 17 bp, Arabidopsis thaliana
agtctgttgggagagat

SEQ ID NO: 44642 - DNA, 17 bp, Arabidopsis thaliana
agtctgttgtttgatgg

SEQ ID NO: 44643 - DNA, 17 bp, Arabidopsis thaliana
agtcttaaatgcaggtg

SEQ ID NO: 44644 - DNA, 17 bp, Arabidopsis thaliana
agtcttaacgagctttg

SEQ ID NO: 44645 - DNA, 17 bp, Arabidopsis thaliana
agtcttaactaggtgat

SEQ ID NO: 44646 - DNA, 17 bp, Arabidopsis thaliana
agtcttaagatcctcga

SEQ ID NO: 44647 - DNA, 17 bp, Arabidopsis thaliana
agtcttaagcgctttat

SEQ ID NO: 44648 - DNA, 17 bp, Arabidopsis thaliana
agtcttaagttcctcaa

SEQ ID NO: 44649 - DNA, 17 bp, Arabidopsis thaliana
agtcttaatatcttgca

SEQ ID NO: 44650 - DNA, 17 bp, Arabidopsis thaliana
agtcttacaagatcggg

SEQ ID NO: 44651 - DNA, 17 bp, Arabidopsis thaliana
agtcttacacggatttt

SEQ ID NO: 44652 - DNA, 17 bp, Arabidopsis thaliana
agtcttaccatcaggat

SEQ ID NO: 44653 - DNA, 17 bp, Arabidopsis thaliana
agtcttagaattgacgg

SEQ ID NO: 44654 - DNA, 17 bp, Arabidopsis thaliana
agtcttagcctatctac

SEQ ID NO: 44655 - DNA, 17 bp, Arabidopsis thaliana
agtcttaggattcggta

SEQ ID NO: 44656 - DNA, 17 bp, Arabidopsis thaliana
agtcttaggcgccaaat

SEQ ID NO: 44657 - DNA, 17 bp, Arabidopsis thaliana
agtcttaggctcccaaa

SEQ ID NO: 44658 - DNA, 17 bp, Arabidopsis thaliana
agtcttaggctgtgaat

SEQ ID NO: 44659 - DNA, 17 bp, Arabidopsis thaliana
agtcttaggtgttaaga

SEQ ID NO: 44660 - DNA, 17 bp, Arabidopsis thaliana
agtcttatatgatcaac

SEQ ID NO: 44661 - DNA, 17 bp, Arabidopsis thaliana
agtcttatcgtacgcct

SEQ ID NO: 44662 - DNA, 17 bp, Arabidopsis thaliana
agtcttcaaacctgagt

SEQ ID NO: 44663 - DNA, 17 bp, Arabidopsis thaliana
agtcttcaacctctgta

SEQ ID NO: 44664 - DNA, 17 bp, Arabidopsis thaliana
agtcttcaactgtttga

SEQ ID NO: 44665 - DNA, 17 bp, Arabidopsis thaliana
agtcttcaactgtttgg

SEQ ID NO: 44666 - DNA, 17 bp, Arabidopsis thaliana
agtcttcaagactgagt

SEQ ID NO: 44667 - DNA, 17 bp, Arabidopsis thaliana
agtcttcaagcagagtt

SEQ ID NO: 44668 - DNA, 17 bp, Arabidopsis thaliana
agtcttcaatgtgggtt

SEQ ID NO: 44669 - DNA, 17 bp, Arabidopsis thaliana
agtcttcaccgagatag

SEQ ID NO: 44670 - DNA, 17 bp, Arabidopsis thaliana
agtcttcagaacagctt

SEQ ID NO: 44671 - DNA, 17 bp, Arabidopsis thaliana
agtcttcagagcagttc

SEQ ID NO: 44672 - DNA, 17 bp, Arabidopsis thaliana
agtcttcagcatgcttt

SEQ ID NO: 44673 - DNA, 17 bp, Arabidopsis thaliana
agtcttcagtggatgtt

SEQ ID NO: 44674 - DNA, 17 bp, Arabidopsis thaliana
agtcttcatcagcttgc

SEQ ID NO: 44675 - DNA, 17 bp, Arabidopsis thaliana
agtcttcccaccggcgc

SEQ ID NO: 44676 - DNA, 17 bp, Arabidopsis thaliana
agtcttccctattccgg

SEQ ID NO: 44677 - DNA, 17 bp, Arabidopsis thaliana
agtcttccgggtcaaca

SEQ ID NO: 44678 - DNA, 17 bp, Arabidopsis thaliana
agtcttcgatggtgcag

SEQ ID NO: 44679 - DNA, 17 bp, Arabidopsis thaliana
agtcttcgccggttaag

SEQ ID NO: 44680 - DNA, 17 bp, Arabidopsis thaliana
agtcttcggatgttgta

SEQ ID NO: 44681 - DNA, 17 bp, Arabidopsis thaliana
agtcttcgggtctaagt

SEQ ID NO: 44682 - DNA, 17 bp, Arabidopsis thaliana
agtcttcgttgctatcc

SEQ ID NO: 44683 - DNA, 17 bp, Arabidopsis thaliana
agtcttctacggcaaac

SEQ ID NO: 44684 - DNA, 17 bp, Arabidopsis thaliana
agtcttctagtttggca

SEQ ID NO: 44685 - DNA, 17 bp, Arabidopsis thaliana
agtcttctccgagatgt

SEQ ID NO: 44686 - DNA, 17 bp, Arabidopsis thaliana
agtcttctcgaacaagg

SEQ ID NO: 44687 - DNA, 17 bp, Arabidopsis thaliana
agtcttctctctttcgc

SEQ ID NO: 44688 - DNA, 17 bp, Arabidopsis thaliana
agtcttctcttttgtgc

SEQ ID NO: 44689 - DNA, 17 bp, Arabidopsis thaliana
agtcttctgaaacagct

SEQ ID NO: 44690 - DNA, 17 bp, Arabidopsis thaliana
agtcttctgaaacatct

SEQ ID NO: 44691 - DNA, 17 bp, Arabidopsis thaliana
agtcttcttcggttgta

SEQ ID NO: 44692 - DNA, 17 bp, Arabidopsis thaliana
agtcttcttctcttgag

SEQ ID NO: 44693 - DNA, 17 bp, Arabidopsis thaliana
agtcttcttgttcgacg

SEQ ID NO: 44694 - DNA, 17 bp, Arabidopsis thaliana
agtcttctttgaacagc

SEQ ID NO: 44695 - DNA, 17 bp, Arabidopsis thaliana
agtcttctttgacggat

SEQ ID NO: 44696 - DNA, 17 bp, Arabidopsis thaliana
agtcttctttgagcagc

SEQ ID NO: 44697 - DNA, 17 bp, Arabidopsis thaliana
agtcttgaaaatcgggg

SEQ ID NO: 44698 - DNA, 17 bp, Arabidopsis thaliana
agtcttgactcaggccg

SEQ ID NO: 44699 - DNA, 17 bp, Arabidopsis thaliana
agtcttgacttgagatc

SEQ ID NO: 44700 - DNA, 17 bp, Arabidopsis thaliana
agtcttgagcgtctggc

SEQ ID NO: 44701 - DNA, 17 bp, Arabidopsis thaliana
agtcttgatgaaccgtt

SEQ ID NO: 44702 - DNA, 17 bp, Arabidopsis thaliana
agtcttgccgcccttgc

SEQ ID NO: 44703 - DNA, 17 bp, Arabidopsis thaliana
agtcttgccgttatctg

SEQ ID NO: 44704 - DNA, 17 bp, Arabidopsis thaliana
agtcttgcgtttattct

SEQ ID NO: 44705 - DNA, 17 bp, Arabidopsis thaliana
agtcttgctcattgcag

SEQ ID NO: 44706 - DNA, 17 bp, Arabidopsis thaliana
agtcttgctgccacgat

SEQ ID NO: 44707 - DNA, 17 bp, Arabidopsis thaliana
agtcttggactttctgg

SEQ ID NO: 44708 - DNA, 17 bp, Arabidopsis thaliana
agtcttggaggtggagg

SEQ ID NO: 44709 - DNA, 17 bp, Arabidopsis thaliana
agtcttggagtatgtga

SEQ ID NO: 44710 - DNA, 17 bp, Arabidopsis thaliana
agtcttggccactcaat

SEQ ID NO: 44711 - DNA, 17 bp, Arabidopsis thaliana
agtcttggcggataact

SEQ ID NO: 44712 - DNA, 17 bp, Arabidopsis thaliana
agtcttgggatgggtcg

SEQ ID NO: 44713 - DNA, 17 bp, Arabidopsis thaliana
agtcttgggttcgtcgt

SEQ ID NO: 44714 - DNA, 17 bp, Arabidopsis thaliana
agtcttggtgcaggtcg

SEQ ID NO: 44715 - DNA, 17 bp, Arabidopsis thaliana
agtcttgtgaagagcga

SEQ ID NO: 44716 - DNA, 17 bp, Arabidopsis thaliana
agtcttgtgaagcgcga

SEQ ID NO: 44717 - DNA, 17 bp, Arabidopsis thaliana
agtcttgtgaattgcga

SEQ ID NO: 44718 - DNA, 17 bp, Arabidopsis thaliana
agtcttgtgtccgacaa

SEQ ID NO: 44719 - DNA, 17 bp, Arabidopsis thaliana
agtcttgttgcaacgct

SEQ ID NO: 44720 - DNA, 17 bp, Arabidopsis thaliana
agtctttcactgtgacg

SEQ ID NO: 44721 - DNA, 17 bp, Arabidopsis thaliana
agtctttcactgtgagg

SEQ ID NO: 44722 - DNA, 17 bp, Arabidopsis thaliana
agtctttcactgtgtcg

SEQ ID NO: 44723 - DNA, 17 bp, Arabidopsis thaliana
agtctttcctgtgctga

SEQ ID NO: 44724 - DNA, 17 bp, Arabidopsis thaliana
agtctttcgaatcgctt

SEQ ID NO: 44725 - DNA, 17 bp, Arabidopsis thaliana
agtctttcgagtatctc

SEQ ID NO: 44726 - DNA, 17 bp, Arabidopsis thaliana
agtctttctcggttaga

SEQ ID NO: 44727 - DNA, 17 bp, Arabidopsis thaliana
agtctttctcgttgtcg

SEQ ID NO: 44728 - DNA, 17 bp, Arabidopsis thaliana
agtctttctcttctgac

SEQ ID NO: 44729 - DNA, 17 bp, Arabidopsis thaliana
agtctttcttggaacgc

SEQ ID NO: 44730 - DNA, 17 bp, Arabidopsis thaliana
agtctttgaaccgcagt

SEQ ID NO: 44731 - DNA, 17 bp, Arabidopsis thaliana
agtctttgaacgcaagt

SEQ ID NO: 44732 - DNA, 17 bp, Arabidopsis thaliana
agtctttgatcattgtc

SEQ ID NO: 44733 - DNA, 17 bp, Arabidopsis thaliana
agtctttgattttgaat

SEQ ID NO: 44734 - DNA, 17 bp, Arabidopsis thaliana
agtctttgattttgtag

SEQ ID NO: 44735 - DNA, 17 bp, Arabidopsis thaliana
agtctttgcctctagtg

SEQ ID NO: 44736 - DNA, 17 bp, Arabidopsis thaliana
agtctttgccttccgga

SEQ ID NO: 44737 - DNA, 17 bp, Arabidopsis thaliana
agtctttgctgatcaca

SEQ ID NO: 44738 - DNA, 17 bp, Arabidopsis thaliana
agtctttggatcgcttt

SEQ ID NO: 44739 - DNA, 17 bp, Arabidopsis thaliana
agtctttggcttggtgt

SEQ ID NO: 44740 - DNA, 17 bp, Arabidopsis thaliana
agtctttggctttgtat

SEQ ID NO: 44741 - DNA, 17 bp, Arabidopsis thaliana
agtctttggctttgtga

SEQ ID NO: 44742 - DNA, 17 bp, Arabidopsis thaliana
agtctttggctttgtgt

SEQ ID NO: 44743 - DNA, 17 bp, Arabidopsis thaliana
agtctttgggccggtcc

SEQ ID NO: 44744 - DNA, 17 bp, Arabidopsis thaliana
agtctttgtctaagcga

SEQ ID NO: 44745 - DNA, 17 bp, Arabidopsis thaliana
agtctttgtgaattatt

SEQ ID NO: 44746 - DNA, 17 bp, Arabidopsis thaliana
agtctttgttcgtcgac

SEQ ID NO: 44747 - DNA, 17 bp, Arabidopsis thaliana
agtctttgtttgtgtcg

SEQ ID NO: 44748 - DNA, 17 bp, Arabidopsis thaliana
agtcttttcccagtggt

SEQ ID NO: 44749 - DNA, 17 bp, Arabidopsis thaliana
agtcttttcgtgatctt

SEQ ID NO: 44750 - DNA, 17 bp, Arabidopsis thaliana
agtcttttctgccaggc

SEQ ID NO: 44751 - DNA, 17 bp, Arabidopsis thaliana
agtcttttgaaagtgcc

SEQ ID NO: 44752 - DNA, 17 bp, Arabidopsis thaliana
agtcttttgcttgcctt

SEQ ID NO: 44753 - DNA, 17 bp, Arabidopsis thaliana
agtcttttggacctgaa

SEQ ID NO: 44754 - DNA, 17 bp, Arabidopsis thaliana
agtcttttgggcaaaac

SEQ ID NO: 44755 - DNA, 17 bp, Arabidopsis thaliana
agtcttttggttggacc

SEQ ID NO: 44756 - DNA, 17 bp, Arabidopsis thaliana
agtcttttgtctgtatc

SEQ ID NO: 44757 - DNA, 17 bp, Arabidopsis thaliana
agtcttttgtctgtttc

SEQ ID NO: 44758 - DNA, 17 bp, Arabidopsis thaliana
agtctttttcgggcatt

SEQ ID NO: 44759 - DNA, 17 bp, Arabidopsis thaliana
agtctttttctggatcc

SEQ ID NO: 44760 - DNA, 17 bp, Arabidopsis thaliana
agtctttttgaggagaa

SEQ ID NO: 44761 - DNA, 17 bp, Arabidopsis thaliana
agtcttttttcgtcttt

SEQ ID NO: 44762 - DNA, 17 bp, Arabidopsis thaliana
agtcttttttggtgtgt

SEQ ID NO: 44763 - DNA, 17 bp, Arabidopsis thaliana
agtgaaaatactgacca

SEQ ID NO: 44764 - DNA, 17 bp, Arabidopsis thaliana
agtgaaaatgggctgcc

SEQ ID NO: 44765 - DNA, 17 bp, Arabidopsis thaliana
agtgaaacaagagcagc

SEQ ID NO: 44766 - DNA, 17 bp, Arabidopsis thaliana
agtgaaacatttgctga

SEQ ID NO: 44767 - DNA, 17 bp, Arabidopsis thaliana
agtgaaacatttgctgt

SEQ ID NO: 44768 - DNA, 17 bp, Arabidopsis thaliana
agtgaaacgagagacgg

SEQ ID NO: 44769 - DNA, 17 bp, Arabidopsis thaliana
agtgaaagggcctgacc

SEQ ID NO: 44770 - DNA, 17 bp, Arabidopsis thaliana
agtgaaatcctagaatg

SEQ ID NO: 44771 - DNA, 17 bp, Arabidopsis thaliana
agtgaaatgaacagttt

SEQ ID NO: 44772 - DNA, 17 bp, Arabidopsis thaliana
agtgaaatggccggtca

SEQ ID NO: 44773 - DNA, 17 bp, Arabidopsis thaliana
agtgaacaaaatagcac

SEQ ID NO: 44774 - DNA, 17 bp, Arabidopsis thaliana
agtgaaccacgctacga

SEQ ID NO: 44775 - DNA, 17 bp, Arabidopsis thaliana
agtgaacccgttgctca

SEQ ID NO: 44776 - DNA, 17 bp, Arabidopsis thaliana
agtgaaccgccaacgat

SEQ ID NO: 44777 - DNA, 17 bp, Arabidopsis thaliana
agtgaaccggactacct

SEQ ID NO: 44778 - DNA, 17 bp, Arabidopsis thaliana
agtgaacctgatgttgt

SEQ ID NO: 44779 - DNA, 17 bp, Arabidopsis thaliana
agtgaacgacctgtgtc

SEQ ID NO: 44780 - DNA, 17 bp, Arabidopsis thaliana
agtgaacgacgaagtgg

SEQ ID NO: 44781 - DNA, 17 bp, Arabidopsis thaliana
agtgaactatgcctgag

SEQ ID NO: 44782 - DNA, 17 bp, Arabidopsis thaliana
agtgaagaaatgaatta

SEQ ID NO: 44783 - DNA, 17 bp, Arabidopsis thaliana
agtgaagacggattcaa

SEQ ID NO: 44784 - DNA, 17 bp, Arabidopsis thaliana
agtgaagacggattcat

SEQ ID NO: 44785 - DNA, 17 bp, Arabidopsis thaliana
agtgaagccgcatgcat

SEQ ID NO: 44786 - DNA, 17 bp, Arabidopsis thaliana
agtgaagctgccagcat

SEQ ID NO: 44787 - DNA, 17 bp, Arabidopsis thaliana
agtgaagctggcccatg

SEQ ID NO: 44788 - DNA, 17 bp, Arabidopsis thaliana
agtgaagcttcataggg

SEQ ID NO: 44789 - DNA, 17 bp, Arabidopsis thaliana
agtgaagggtttggtct

SEQ ID NO: 44790 - DNA, 17 bp, Arabidopsis thaliana
agtgaagttaactccca

SEQ ID NO: 44791 - DNA, 17 bp, Arabidopsis thaliana
agtgaagttccaatgcg

SEQ ID NO: 44792 - DNA, 17 bp, Arabidopsis thaliana
agtgaagttcccagatg

SEQ ID NO: 44793 - DNA, 17 bp, Arabidopsis thaliana
agtgaatcagagtttgg

SEQ ID NO: 44794 - DNA, 17 bp, Arabidopsis thaliana
agtgaatcagctccagg

SEQ ID NO: 44795 - DNA, 17 bp, Arabidopsis thaliana
agtgaatccgtcgtgac

SEQ ID NO: 44796 - DNA, 17 bp, Arabidopsis thaliana
agtgaatgacctttata

SEQ ID NO: 44797 - DNA, 17 bp, Arabidopsis thaliana
agtgaatgacggcgagg

SEQ ID NO: 44798 - DNA, 17 bp, Arabidopsis thaliana
agtgaatgactttcgct

SEQ ID NO: 44799 - DNA, 17 bp, Arabidopsis thaliana
agtgaatgcttgacaag

SEQ ID NO: 44800 - DNA, 17 bp, Arabidopsis thaliana
agtgaatggcgagtggg

SEQ ID NO: 44801 - DNA, 17 bp, Arabidopsis thaliana
agtgaattcgggtcata

SEQ ID NO: 44802 - DNA, 17 bp, Arabidopsis thaliana
agtgaattgctagtctc

SEQ ID NO: 44803 - DNA, 17 bp, Arabidopsis thaliana
agtgaatttgtctaacc

SEQ ID NO: 44804 - DNA, 17 bp, Arabidopsis thaliana
agtgaattttgcacatt

SEQ ID NO: 44805 - DNA, 17 bp, Arabidopsis thaliana
agtgaattttgtggcag

SEQ ID NO: 44806 - DNA, 17 bp, Arabidopsis thaliana
agtgaatttttcctctg

SEQ ID NO: 44807 - DNA, 17 bp, Arabidopsis thaliana
agtgaatttttgggctt

SEQ ID NO: 44808 - DNA, 17 bp, Arabidopsis thaliana
agtgaatttttgggttt

SEQ ID NO: 44809 - DNA, 17 bp, Arabidopsis thaliana
agtgacaaaagcgcttc

SEQ ID NO: 44810 - DNA, 17 bp, Arabidopsis thaliana
agtgacaaccattgtaa

SEQ ID NO: 44811 - DNA, 17 bp, Arabidopsis thaliana
agtgacaagaaaccaca

SEQ ID NO: 44812 - DNA, 17 bp, Arabidopsis thaliana
agtgacaaggtcctaac

SEQ ID NO: 44813 - DNA, 17 bp, Arabidopsis thaliana
agtgacacattcggtcg

SEQ ID NO: 44814 - DNA, 17 bp, Arabidopsis thaliana
agtgacacccggccgtg

SEQ ID NO: 44815 - DNA, 17 bp, Arabidopsis thaliana
agtgacacccgtcgcca

SEQ ID NO: 44816 - DNA, 17 bp, Arabidopsis thaliana
agtgacactagggttta

SEQ ID NO: 44817 - DNA, 17 bp, Arabidopsis thaliana
agtgacactcgcttggc

SEQ ID NO: 44818 - DNA, 17 bp, Arabidopsis thaliana
agtgacactctcaaaat

SEQ ID NO: 44819 - DNA, 17 bp, Arabidopsis thaliana
agtgacacttggactaa

SEQ ID NO: 44820 - DNA, 17 bp, Arabidopsis thaliana
agtgacagagtttcttc

SEQ ID NO: 44821 - DNA, 17 bp, Arabidopsis thaliana
agtgacagatgtttgac

SEQ ID NO: 44822 - DNA, 17 bp, Arabidopsis thaliana
agtgacagatttggttt

SEQ ID NO: 44823 - DNA, 17 bp, Arabidopsis thaliana
agtgacagccactgtaa

SEQ ID NO: 44824 - DNA, 17 bp, Arabidopsis thaliana
agtgacagcgactgggc

SEQ ID NO: 44825 - DNA, 17 bp, Arabidopsis thaliana
agtgacagcttttccct

SEQ ID NO: 44826 - DNA, 17 bp, Arabidopsis thaliana
agtgacaggcgaatcag

SEQ ID NO: 44827 - DNA, 17 bp, Arabidopsis thaliana
agtgacagtccctgtaa

SEQ ID NO: 44828 - DNA, 17 bp, Arabidopsis thaliana
agtgacagtcgccagcg

SEQ ID NO: 44829 - DNA, 17 bp, Arabidopsis thaliana
agtgacatgatgtggtt

SEQ ID NO: 44830 - DNA, 17 bp, Arabidopsis thaliana
agtgacatgtagagctt

SEQ ID NO: 44831 - DNA, 17 bp, Arabidopsis thaliana
agtgacatgtgcacagt

SEQ ID NO: 44832 - DNA, 17 bp, Arabidopsis thaliana
agtgacatttccggagt

SEQ ID NO: 44833 - DNA, 17 bp, Arabidopsis thaliana
agtgaccaaaatcgcac

SEQ ID NO: 44834 - DNA, 17 bp, Arabidopsis thaliana
agtgaccaagaatttta

SEQ ID NO: 44835 - DNA, 17 bp, Arabidopsis thaliana
agtgaccagatcccatc

SEQ ID NO: 44836 - DNA, 17 bp, Arabidopsis thaliana
agtgaccaggcccgggc

SEQ ID NO: 44837 - DNA, 17 bp, Arabidopsis thaliana
agtgaccaggcttcatt

SEQ ID NO: 44838 - DNA, 17 bp, Arabidopsis thaliana
agtgaccattggagcat

SEQ ID NO: 44839 - DNA, 17 bp, Arabidopsis thaliana
agtgacccacggcaaat

SEQ ID NO: 44840 - DNA, 17 bp, Arabidopsis thaliana
agtgacccagaaggtag

SEQ ID NO: 44841 - DNA, 17 bp, Arabidopsis thaliana
agtgacccagatgatct

SEQ ID NO: 44842 - DNA, 17 bp, Arabidopsis thaliana
agtgacccgctttttct

SEQ ID NO: 44843 - DNA, 17 bp, Arabidopsis thaliana
agtgacccgggttcggt

SEQ ID NO: 44844 - DNA, 17 bp, Arabidopsis thaliana
agtgaccgccggttttg

SEQ ID NO: 44845 - DNA, 17 bp, Arabidopsis thaliana
agtgaccggaagtgtaa

SEQ ID NO: 44846 - DNA, 17 bp, Arabidopsis thaliana
agtgaccgggcggcaaa

SEQ ID NO: 44847 - DNA, 17 bp, Arabidopsis thaliana
agtgaccgggtccagga

SEQ ID NO: 44848 - DNA, 17 bp, Arabidopsis thaliana
agtgacctggtctacgg

SEQ ID NO: 44849 - DNA, 17 bp, Arabidopsis thaliana
agtgacctggtgaagat

SEQ ID NO: 44850 - DNA, 17 bp, Arabidopsis thaliana
agtgacgaagttgcttt

SEQ ID NO: 44851 - DNA, 17 bp, Arabidopsis thaliana
agtgacgacaacaacca

SEQ ID NO: 44852 - DNA, 17 bp, Arabidopsis thaliana
agtgacgactgagatat

SEQ ID NO: 44853 - DNA, 17 bp, Arabidopsis thaliana
agtgacgacttgtgcgg

SEQ ID NO: 44854 - DNA, 17 bp, Arabidopsis thaliana
agtgacgagtgatggag

SEQ ID NO: 44855 - DNA, 17 bp, Arabidopsis thaliana
agtgacgcctttgaaaa

SEQ ID NO: 44856 - DNA, 17 bp, Arabidopsis thaliana
agtgacgcgcatgaata

SEQ ID NO: 44857 - DNA, 17 bp, Arabidopsis thaliana
agtgacgcgcatgaatg

SEQ ID NO: 44858 - DNA, 17 bp, Arabidopsis thaliana
agtgacgcttaggacga

SEQ ID NO: 44859 - DNA, 17 bp, Arabidopsis thaliana
agtgacgcttggaacga

SEQ ID NO: 44860 - DNA, 17 bp, Arabidopsis thaliana
agtgacgcttgggacga

SEQ ID NO: 44861 - DNA, 17 bp, Arabidopsis thaliana
agtgacggacgaactga

SEQ ID NO: 44862 - DNA, 17 bp, Arabidopsis thaliana
agtgacggacgaactgg

SEQ ID NO: 44863 - DNA, 17 bp, Arabidopsis thaliana
agtgacggcaatacgat

SEQ ID NO: 44864 - DNA, 17 bp, Arabidopsis thaliana
agtgacggctgtggtgt

SEQ ID NO: 44865 - DNA, 17 bp, Arabidopsis thaliana
agtgacggcttgtgcgg

SEQ ID NO: 44866 - DNA, 17 bp, Arabidopsis thaliana
agtgacgggaatcactt

SEQ ID NO: 44867 - DNA, 17 bp, Arabidopsis thaliana
agtgacggttattgttg

SEQ ID NO: 44868 - DNA, 17 bp, Arabidopsis thaliana
agtgacgtcctgccaaa

SEQ ID NO: 44869 - DNA, 17 bp, Arabidopsis thaliana
agtgacgtgccggagtg

SEQ ID NO: 44870 - DNA, 17 bp, Arabidopsis thaliana
agtgacgtgtcggagtg

SEQ ID NO: 44871 - DNA, 17 bp, Arabidopsis thaliana
agtgactacgcggttgg

SEQ ID NO: 44872 - DNA, 17 bp, Arabidopsis thaliana
agtgactactgcaaact

SEQ ID NO: 44873 - DNA, 17 bp, Arabidopsis thaliana
agtgactagaggtggtt

SEQ ID NO: 44874 - DNA, 17 bp, Arabidopsis thaliana
agtgactaggtgagtgc

SEQ ID NO: 44875 - DNA, 17 bp, Arabidopsis thaliana
agtgactagttactaaa

SEQ ID NO: 44876 - DNA, 17 bp, Arabidopsis thaliana
agtgactagttgccaac

SEQ ID NO: 44877 - DNA, 17 bp, Arabidopsis thaliana
agtgactattttgcaaa

SEQ ID NO: 44878 - DNA, 17 bp, Arabidopsis thaliana
agtgactattttgccga

SEQ ID NO: 44879 - DNA, 17 bp, Arabidopsis thaliana
agtgactcaaactctgt

SEQ ID NO: 44880 - DNA, 17 bp, Arabidopsis thaliana
agtgactcagaaggtag

SEQ ID NO: 44881 - DNA, 17 bp, Arabidopsis thaliana
agtgactcagaggttgc

SEQ ID NO: 44882 - DNA, 17 bp, Arabidopsis thaliana
agtgactccacagtttt

SEQ ID NO: 44883 - DNA, 17 bp, Arabidopsis thaliana
agtgactctagtccgac

SEQ ID NO: 44884 - DNA, 17 bp, Arabidopsis thaliana
agtgactctcgccaacg

SEQ ID NO: 44885 - DNA, 17 bp, Arabidopsis thaliana
agtgactctcggcaacg

SEQ ID NO: 44886 - DNA, 17 bp, Arabidopsis thaliana
agtgactcttctctctt

SEQ ID NO: 44887 - DNA, 17 bp, Arabidopsis thaliana
agtgactcttggcaaga

SEQ ID NO: 44888 - DNA, 17 bp, Arabidopsis thaliana
agtgactctttccgctg

SEQ ID NO: 44889 - DNA, 17 bp, Arabidopsis thaliana
agtgactctttcgtgga

SEQ ID NO: 44890 - DNA, 17 bp, Arabidopsis thaliana
agtgactgactctaatt

SEQ ID NO: 44891 - DNA, 17 bp, Arabidopsis thaliana
agtgactgccttggttg

SEQ ID NO: 44892 - DNA, 17 bp, Arabidopsis thaliana
agtgactgcgttttgcg

SEQ ID NO: 44893 - DNA, 17 bp, Arabidopsis thaliana
agtgactgctggaaagc

SEQ ID NO: 44894 - DNA, 17 bp, Arabidopsis thaliana
agtgactggtaaaccag

SEQ ID NO: 44895 - DNA, 17 bp, Arabidopsis thaliana
agtgactggtcgagtgg

SEQ ID NO: 44896 - DNA, 17 bp, Arabidopsis thaliana
agtgactggtttgaaat

SEQ ID NO: 44897 - DNA, 17 bp, Arabidopsis thaliana
agtgactgtaattcggc

SEQ ID NO: 44898 - DNA, 17 bp, Arabidopsis thaliana
agtgactgtagccgtga

SEQ ID NO: 44899 - DNA, 17 bp, Arabidopsis thaliana
agtgactgtatcgccaa

SEQ ID NO: 44900 - DNA, 17 bp, Arabidopsis thaliana
agtgactgtcggaacca

SEQ ID NO: 44901 - DNA, 17 bp, Arabidopsis thaliana
agtgactgtctatgaat

SEQ ID NO: 44902 - DNA, 17 bp, Arabidopsis thaliana
agtgactgtgtgtgtga

SEQ ID NO: 44903 - DNA, 17 bp, Arabidopsis thaliana
agtgactgtgttgccaa

SEQ ID NO: 44904 - DNA, 17 bp, Arabidopsis thaliana
agtgactgtgttgctaa

SEQ ID NO: 44905 - DNA, 17 bp, Arabidopsis thaliana
agtgactgttggcgggt

SEQ ID NO: 44906 - DNA, 17 bp, Arabidopsis thaliana
agtgacttagggtcggt

SEQ ID NO: 44907 - DNA, 17 bp, Arabidopsis thaliana
agtgacttagtgtcctt

SEQ ID NO: 44908 - DNA, 17 bp, Arabidopsis thaliana
agtgacttcaaccagcg

SEQ ID NO: 44909 - DNA, 17 bp, Arabidopsis thaliana
agtgacttcatcccatt

SEQ ID NO: 44910 - DNA, 17 bp, Arabidopsis thaliana
agtgacttctgatcaca

SEQ ID NO: 44911 - DNA, 17 bp, Arabidopsis thaliana
agtgactttcacctgga

SEQ ID NO: 44912 - DNA, 17 bp, Arabidopsis thaliana
agtgactttgtcatccg

SEQ ID NO: 44913 - DNA, 17 bp, Arabidopsis thaliana
agtgactttttccctgg

SEQ ID NO: 44914 - DNA, 17 bp, Arabidopsis thaliana
agtgagaacaccagagc

SEQ ID NO: 44915 - DNA, 17 bp, Arabidopsis thaliana
agtgagaacttgacctt

SEQ ID NO: 44916 - DNA, 17 bp, Arabidopsis thaliana
agtgagacagagttttc

SEQ ID NO: 44917 - DNA, 17 bp, Arabidopsis thaliana
agtgagacatatggacc

SEQ ID NO: 44918 - DNA, 17 bp, Arabidopsis thaliana
agtgagaccatcaggga

SEQ ID NO: 44919 - DNA, 17 bp, Arabidopsis thaliana
agtgagaccctatccat

SEQ ID NO: 44920 - DNA, 17 bp, Arabidopsis thaliana
agtgagacctacctcaa

SEQ ID NO: 44921 - DNA, 17 bp, Arabidopsis thaliana
agtgagacgcttcggta

SEQ ID NO: 44922 - DNA, 17 bp, Arabidopsis thaliana
agtgagactccaaacag

SEQ ID NO: 44923 - DNA, 17 bp, Arabidopsis thaliana
agtgagactcgggctca

SEQ ID NO: 44924 - DNA, 17 bp, Arabidopsis thaliana
agtgagactttgattct

SEQ ID NO: 44925 - DNA, 17 bp, Arabidopsis thaliana
agtgagagctcagattg

SEQ ID NO: 44926 - DNA, 17 bp, Arabidopsis thaliana
agtgagagctgcgagtc

SEQ ID NO: 44927 - DNA, 17 bp, Arabidopsis thaliana
agtgagagcttccgcat

SEQ ID NO: 44928 - DNA, 17 bp, Arabidopsis thaliana
agtgagaggatcctttc

SEQ ID NO: 44929 - DNA, 17 bp, Arabidopsis thaliana
agtgagatgaactaaac

SEQ ID NO: 44930 - DNA, 17 bp, Arabidopsis thaliana
agtgagatgtggttttc

SEQ ID NO: 44931 - DNA, 17 bp, Arabidopsis thaliana
agtgagattagctccag

SEQ ID NO: 44932 - DNA, 17 bp, Arabidopsis thaliana
agtgagatttgggatgt

SEQ ID NO: 44933 - DNA, 17 bp, Arabidopsis thaliana
agtgagcaggactcagg

SEQ ID NO: 44934 - DNA, 17 bp, Arabidopsis thaliana
agtgagccgactgtccg

SEQ ID NO: 44935 - DNA, 17 bp, Arabidopsis thaliana
agtgagccttggcgact

SEQ ID NO: 44936 - DNA, 17 bp, Arabidopsis thaliana
agtgagcggtgaggtcg

SEQ ID NO: 44937 - DNA, 17 bp, Arabidopsis thaliana
agtgagctttgcacact

SEQ ID NO: 44938 - DNA, 17 bp, Arabidopsis thaliana
agtgagctttggctagc

SEQ ID NO: 44939 - DNA, 17 bp, Arabidopsis thaliana
agtgaggagatcaactc

SEQ ID NO: 44940 - DNA, 17 bp, Arabidopsis thaliana
agtgaggatcaagcggt

SEQ ID NO: 44941 - DNA, 17 bp, Arabidopsis thaliana
agtgaggattcttgttc

SEQ ID NO: 44942 - DNA, 17 bp, Arabidopsis thaliana
agtgaggccgattcttc

SEQ ID NO: 44943 - DNA, 17 bp, Arabidopsis thaliana
agtgaggccgattcttt

SEQ ID NO: 44944 - DNA, 17 bp, Arabidopsis thaliana
agtgaggcgggctcagc

SEQ ID NO: 44945 - DNA, 17 bp, Arabidopsis thaliana
agtgaggctcatgcgag

SEQ ID NO: 44946 - DNA, 17 bp, Arabidopsis thaliana
agtgagtcatcacagcc

SEQ ID NO: 44947 - DNA, 17 bp, Arabidopsis thaliana
agtgagtgactacaaaa

SEQ ID NO: 44948 - DNA, 17 bp, Arabidopsis thaliana
agtgagtgattggttcg

SEQ ID NO: 44949 - DNA, 17 bp, Arabidopsis thaliana
agtgagtgccggtttaa

SEQ ID NO: 44950 - DNA, 17 bp, Arabidopsis thaliana
agtgagttgatgagtca

SEQ ID NO: 44951 - DNA, 17 bp, Arabidopsis thaliana
agtgagtttcgtcttcg

SEQ ID NO: 44952 - DNA, 17 bp, Arabidopsis thaliana
agtgagtttgagctctc

SEQ ID NO: 44953 - DNA, 17 bp, Arabidopsis thaliana
agtgagttttggaaaac

SEQ ID NO: 44954 - DNA, 17 bp, Arabidopsis thaliana
agtgataaagtgccgtt

SEQ ID NO: 44955 - DNA, 17 bp, Arabidopsis thaliana
agtgataagactaatac

SEQ ID NO: 44956 - DNA, 17 bp, Arabidopsis thaliana
agtgataagactgatac

SEQ ID NO: 44957 - DNA, 17 bp, Arabidopsis thaliana
agtgataagttgccgca

SEQ ID NO: 44958 - DNA, 17 bp, Arabidopsis thaliana
agtgatactcgaccagg

SEQ ID NO: 44959 - DNA, 17 bp, Arabidopsis thaliana
agtgatagaaccggaca

SEQ ID NO: 44960 - DNA, 17 bp, Arabidopsis thaliana
agtgatagacccgctgt

SEQ ID NO: 44961 - DNA, 17 bp, Arabidopsis thaliana
agtgatagtgtcaggga

SEQ ID NO: 44962 - DNA, 17 bp, Arabidopsis thaliana
agtgatagttcaccgcc

SEQ ID NO: 44963 - DNA, 17 bp, Arabidopsis thaliana
agtgatatccagcttcc

SEQ ID NO: 44964 - DNA, 17 bp, Arabidopsis thaliana
agtgatatctcggctct

SEQ ID NO: 44965 - DNA, 17 bp, Arabidopsis thaliana
agtgatatgtccgagtg

SEQ ID NO: 44966 - DNA, 17 bp, Arabidopsis thaliana
agtgatcaagccatgcg

SEQ ID NO: 44967 - DNA, 17 bp, Arabidopsis thaliana
agtgatcaccggttttc

SEQ ID NO: 44968 - DNA, 17 bp, Arabidopsis thaliana
agtgatccagatctcga

SEQ ID NO: 44969 - DNA, 17 bp, Arabidopsis thaliana
agtgatccgacggtgcc

SEQ ID NO: 44970 - DNA, 17 bp, Arabidopsis thaliana
agtgatccgatctgtaa

SEQ ID NO: 44971 - DNA, 17 bp, Arabidopsis thaliana
agtgatcgccctgaagt

SEQ ID NO: 44972 - DNA, 17 bp, Arabidopsis thaliana
agtgatcgctctgttgc

SEQ ID NO: 44973 - DNA, 17 bp, Arabidopsis thaliana
agtgatcgctgtggaac

SEQ ID NO: 44974 - DNA, 17 bp, Arabidopsis thaliana
agtgatcgtaaaatctg

SEQ ID NO: 44975 - DNA, 17 bp, Arabidopsis thaliana
agtgatctcgccgctta

SEQ ID NO: 44976 - DNA, 17 bp, Arabidopsis thaliana
agtgatctgactagtta

SEQ ID NO: 44977 - DNA, 17 bp, Arabidopsis thaliana
agtgatctgttcaggga

SEQ ID NO: 44978 - DNA, 17 bp, Arabidopsis thaliana
agtgatcttcattgttg

SEQ ID NO: 44979 - DNA, 17 bp, Arabidopsis thaliana
agtgatctttcgctcca

SEQ ID NO: 44980 - DNA, 17 bp, Arabidopsis thaliana
agtgatcttttggagca

SEQ ID NO: 44981 - DNA, 17 bp, Arabidopsis thaliana
agtgatcttttggagga

SEQ ID NO: 44982 - DNA, 17 bp, Arabidopsis thaliana
agtgatgaaatcaggga

SEQ ID NO: 44983 - DNA, 17 bp, Arabidopsis thaliana
agtgatgaagtgtatgg

SEQ ID NO: 44984 - DNA, 17 bp, Arabidopsis thaliana
agtgatgaatgcagact

SEQ ID NO: 44985 - DNA, 17 bp, Arabidopsis thaliana
agtgatgaattgtgtaa

SEQ ID NO: 44986 - DNA, 17 bp, Arabidopsis thaliana
agtgatgacatcttcct

SEQ ID NO: 44987 - DNA, 17 bp, Arabidopsis thaliana
agtgatgacttgtggaa

SEQ ID NO: 44988 - DNA, 17 bp, Arabidopsis thaliana
agtgatgagcgaagatg

SEQ ID NO: 44989 - DNA, 17 bp, Arabidopsis thaliana
agtgatgatgaccgcaa

SEQ ID NO: 44990 - DNA, 17 bp, Arabidopsis thaliana
agtgatgctgcaagggt

SEQ ID NO: 44991 - DNA, 17 bp, Arabidopsis thaliana
agtgatggagtagcggt

SEQ ID NO: 44992 - DNA, 17 bp, Arabidopsis thaliana
agtgatggccgtagatt

SEQ ID NO: 44993 - DNA, 17 bp, Arabidopsis thaliana
agtgatgggtgccgcag

SEQ ID NO: 44994 - DNA, 17 bp, Arabidopsis thaliana
agtgatgtatgcagcta

SEQ ID NO: 44995 - DNA, 17 bp, Arabidopsis thaliana
agtgatgtatgcagctg

SEQ ID NO: 44996 - DNA, 17 bp, Arabidopsis thaliana
agtgatgttactgtttt

SEQ ID NO: 44997 - DNA, 17 bp, Arabidopsis thaliana
agtgatgttccggttgc

SEQ ID NO: 44998 - DNA, 17 bp, Arabidopsis thaliana
agtgatgtttgagacga

SEQ ID NO: 44999 - DNA, 17 bp, Arabidopsis thaliana
agtgattaccggttttg

SEQ ID NO: 45000 - DNA, 17 bp, Arabidopsis thaliana
agtgattaggtaaggac

SEQ ID NO: 45001 - DNA, 17 bp, Arabidopsis thaliana
agtgattatggatcggg

SEQ ID NO: 45002 - DNA, 17 bp, Arabidopsis thaliana
agtgattcaaatccgac

SEQ ID NO: 45003 - DNA, 17 bp, Arabidopsis thaliana
agtgattcaccgaagcg

SEQ ID NO: 45004 - DNA, 17 bp, Arabidopsis thaliana
agtgattcagactttcg

SEQ ID NO: 45005 - DNA, 17 bp, Arabidopsis thaliana
agtgattcagtcccgcc

SEQ ID NO: 45006 - DNA, 17 bp, Arabidopsis thaliana
agtgattcagttgccgt

SEQ ID NO: 45007 - DNA, 17 bp, Arabidopsis thaliana
agtgattccaaacattc

SEQ ID NO: 45008 - DNA, 17 bp, Arabidopsis thaliana
agtgattctcggagatc

SEQ ID NO: 45009 - DNA, 17 bp, Arabidopsis thaliana
agtgattctgagtttcc

SEQ ID NO: 45010 - DNA, 17 bp, Arabidopsis thaliana
agtgattctgttgaaaa

SEQ ID NO: 45011 - DNA, 17 bp, Arabidopsis thaliana
agtgattgggttgtgtg

SEQ ID NO: 45012 - DNA, 17 bp, Arabidopsis thaliana
agtgattggttcgatcc

SEQ ID NO: 45013 - DNA, 17 bp, Arabidopsis thaliana
agtgattggttgggctg

SEQ ID NO: 45014 - DNA, 17 bp, Arabidopsis thaliana
agtgattgtcgaaaccg

SEQ ID NO: 45015 - DNA, 17 bp, Arabidopsis thaliana
agtgattgtcggaacag

SEQ ID NO: 45016 - DNA, 17 bp, Arabidopsis thaliana
agtgattgtgagaggac

SEQ ID NO: 45017 - DNA, 17 bp, Arabidopsis thaliana
agtgatttctgcagttt

SEQ ID NO: 45018 - DNA, 17 bp, Arabidopsis thaliana
agtgatttgcgcgagtt

SEQ ID NO: 45019 - DNA, 17 bp, Arabidopsis thaliana
agtgatttgctggctga

SEQ ID NO: 45020 - DNA, 17 bp, Arabidopsis thaliana
agtgattttagcttccc

SEQ ID NO: 45021 - DNA, 17 bp, Arabidopsis thaliana
agtgattttattaattc

SEQ ID NO: 45022 - DNA, 17 bp, Arabidopsis thaliana
agtgattttattagtta

SEQ ID NO: 45023 - DNA, 17 bp, Arabidopsis thaliana
agtgattttcgctttcc

SEQ ID NO: 45024 - DNA, 17 bp, Arabidopsis thaliana
agtgcaaaactgttaga

SEQ ID NO: 45025 - DNA, 17 bp, Arabidopsis thaliana
agtgcaaatgaaccact

SEQ ID NO: 45026 - DNA, 17 bp, Arabidopsis thaliana
agtgcaacaagggcaag

SEQ ID NO: 45027 - DNA, 17 bp, Arabidopsis thaliana
agtgcaacggttagatc

SEQ ID NO: 45028 - DNA, 17 bp, Arabidopsis thaliana
agtgcaactgagattcc

SEQ ID NO: 45029 - DNA, 17 bp, Arabidopsis thaliana
agtgcaacttgatgtgc

SEQ ID NO: 45030 - DNA, 17 bp, Arabidopsis thaliana
agtgcaagcggatcaat

SEQ ID NO: 45031 - DNA, 17 bp, Arabidopsis thaliana
agtgcaagtccgaaggc

SEQ ID NO: 45032 - DNA, 17 bp, Arabidopsis thaliana
agtgcaatgccattttt

SEQ ID NO: 45033 - DNA, 17 bp, Arabidopsis thaliana
agtgcaccgggtcccac

SEQ ID NO: 45034 - DNA, 17 bp, Arabidopsis thaliana
agtgcacgtctgcctgg

SEQ ID NO: 45035 - DNA, 17 bp, Arabidopsis thaliana
agtgcagaatgagcaga

SEQ ID NO: 45036 - DNA, 17 bp, Arabidopsis thaliana
agtgcagacctccgacc

SEQ ID NO: 45037 - DNA, 17 bp, Arabidopsis thaliana
agtgcagatctgctagc

SEQ ID NO: 45038 - DNA, 17 bp, Arabidopsis thaliana
agtgcagatggtcttat

SEQ ID NO: 45039 - DNA, 17 bp, Arabidopsis thaliana
agtgcagccccaatcgg

SEQ ID NO: 45040 - DNA, 17 bp, Arabidopsis thaliana
agtgcagcctgccccac

SEQ ID NO: 45041 - DNA, 17 bp, Arabidopsis thaliana
agtgcagcgggtgcggt

SEQ ID NO: 45042 - DNA, 17 bp, Arabidopsis thaliana
agtgcagcgtgcttcta

SEQ ID NO: 45043 - DNA, 17 bp, Arabidopsis thaliana
agtgcaggaaaaatgcg

SEQ ID NO: 45044 - DNA, 17 bp, Arabidopsis thaliana
agtgcaggcagagaaaa

SEQ ID NO: 45045 - DNA, 17 bp, Arabidopsis thaliana
agtgcaggcagaggaga

SEQ ID NO: 45046 - DNA, 17 bp, Arabidopsis thaliana
agtgcaggtgggttttt

SEQ ID NO: 45047 - DNA, 17 bp, Arabidopsis thaliana
agtgcagtatgcatagt

SEQ ID NO: 45048 - DNA, 17 bp, Arabidopsis thaliana
agtgcagtgatcgttga

SEQ ID NO: 45049 - DNA, 17 bp, Arabidopsis thaliana
agtgcagtgatgtatgc

SEQ ID NO: 45050 - DNA, 17 bp, Arabidopsis thaliana
agtgcagtgcggttcaa

SEQ ID NO: 45051 - DNA, 17 bp, Arabidopsis thaliana
agtgcagttccgaaaca

SEQ ID NO: 45052 - DNA, 17 bp, Arabidopsis thaliana
agtgcagttctgcggcc

SEQ ID NO: 45053 - DNA, 17 bp, Arabidopsis thaliana
agtgcagttgtagttgg

SEQ ID NO: 45054 - DNA, 17 bp, Arabidopsis thaliana
agtgcagttttgcggcc

SEQ ID NO: 45055 - DNA, 17 bp, Arabidopsis thaliana
agtgcagttttgcgggc

SEQ ID NO: 45056 - DNA, 17 bp, Arabidopsis thaliana
agtgcataaactggttt

SEQ ID NO: 45057 - DNA, 17 bp, Arabidopsis thaliana
agtgcatactgcttgga

SEQ ID NO: 45058 - DNA, 17 bp, Arabidopsis thaliana
agtgcatagttcgctaa

SEQ ID NO: 45059 - DNA, 17 bp, Arabidopsis thaliana
agtgcatcctgtagatg

SEQ ID NO: 45060 - DNA, 17 bp, Arabidopsis thaliana
agtgcatgattgacgtc

SEQ ID NO: 45061 - DNA, 17 bp, Arabidopsis thaliana
agtgcatgattttctct

SEQ ID NO: 45062 - DNA, 17 bp, Arabidopsis thaliana
agtgcattacacttggg

SEQ ID NO: 45063 - DNA, 17 bp, Arabidopsis thaliana
agtgcattcggatcata

SEQ ID NO: 45064 - DNA, 17 bp, Arabidopsis thaliana
agtgcattcgggtcata

SEQ ID NO: 45065 - DNA, 17 bp, Arabidopsis thaliana
agtgcattcggttcata

SEQ ID NO: 45066 - DNA, 17 bp, Arabidopsis thaliana
agtgcatttctaccggg

SEQ ID NO: 45067 - DNA, 17 bp, Arabidopsis thaliana
agtgcattttcgtgatt

SEQ ID NO: 45068 - DNA, 17 bp, Arabidopsis thaliana
agtgccacatctgacac

SEQ ID NO: 45069 - DNA, 17 bp, Arabidopsis thaliana
agtgccacgtcagcgaa

SEQ ID NO: 45070 - DNA, 17 bp, Arabidopsis thaliana
agtgccacgtgtcagct

SEQ ID NO: 45071 - DNA, 17 bp, Arabidopsis thaliana
agtgccacttagtcgac

SEQ ID NO: 45072 - DNA, 17 bp, Arabidopsis thaliana
agtgccactttgtgaaa

SEQ ID NO: 45073 - DNA, 17 bp, Arabidopsis thaliana
agtgccagcagttgcgg

SEQ ID NO: 45074 - DNA, 17 bp, Arabidopsis thaliana
agtgccagcgacaagca

SEQ ID NO: 45075 - DNA, 17 bp, Arabidopsis thaliana
agtgccattcaactaca

SEQ ID NO: 45076 - DNA, 17 bp, Arabidopsis thaliana
agtgccatttccatttg

SEQ ID NO: 45077 - DNA, 17 bp, Arabidopsis thaliana
agtgcccacagtagccg

SEQ ID NO: 45078 - DNA, 17 bp, Arabidopsis thaliana
agtgcccatggagagtt

SEQ ID NO: 45079 - DNA, 17 bp, Arabidopsis thaliana
agtgccccttttcaact

SEQ ID NO: 45080 - DNA, 17 bp, Arabidopsis thaliana
agtgcccgatattctgc

SEQ ID NO: 45081 - DNA, 17 bp, Arabidopsis thaliana
agtgcccggtagatggt

SEQ ID NO: 45082 - DNA, 17 bp, Arabidopsis thaliana
agtgccctctctctcac

SEQ ID NO: 45083 - DNA, 17 bp, Arabidopsis thaliana
agtgcccttagcaccgt

SEQ ID NO: 45084 - DNA, 17 bp, Arabidopsis thaliana
agtgccctttgtcgcta

SEQ ID NO: 45085 - DNA, 17 bp, Arabidopsis thaliana
agtgccgaaggggctag

SEQ ID NO: 45086 - DNA, 17 bp, Arabidopsis thaliana
agtgccgattttgtacc

SEQ ID NO: 45087 - DNA, 17 bp, Arabidopsis thaliana
agtgccgctactggttt

SEQ ID NO: 45088 - DNA, 17 bp, Arabidopsis thaliana
agtgccgctattcagga

SEQ ID NO: 45089 - DNA, 17 bp, Arabidopsis thaliana
agtgccgctcacacccg

SEQ ID NO: 45090 - DNA, 17 bp, Arabidopsis thaliana
agtgccgctcacgcacg

SEQ ID NO: 45091 - DNA, 17 bp, Arabidopsis thaliana
agtgccgctcacgcccg

SEQ ID NO: 45092 - DNA, 17 bp, Arabidopsis thaliana
agtgccgctcacgtccg

SEQ ID NO: 45093 - DNA, 17 bp, Arabidopsis thaliana
agtgccgctcactcccg

SEQ ID NO: 45094 - DNA, 17 bp, Arabidopsis thaliana
agtgccgctggagttcc

SEQ ID NO: 45095 - DNA, 17 bp, Arabidopsis thaliana
agtgccggaatctacgg

SEQ ID NO: 45096 - DNA, 17 bp, Arabidopsis thaliana
agtgccggccttgggct

SEQ ID NO: 45097 - DNA, 17 bp, Arabidopsis thaliana
agtgccggttgggtcta

SEQ ID NO: 45098 - DNA, 17 bp, Arabidopsis thaliana
agtgccggttttcgtaa

SEQ ID NO: 45099 - DNA, 17 bp, Arabidopsis thaliana
agtgccgtcggggcaag

SEQ ID NO: 45100 - DNA, 17 bp, Arabidopsis thaliana
agtgccgtgatcgtggt

SEQ ID NO: 45101 - DNA, 17 bp, Arabidopsis thaliana
agtgccgtgcttaggac

SEQ ID NO: 45102 - DNA, 17 bp, Arabidopsis thaliana
agtgcctaaacatgtga

SEQ ID NO: 45103 - DNA, 17 bp, Arabidopsis thaliana
agtgcctaaacgtatca

SEQ ID NO: 45104 - DNA, 17 bp, Arabidopsis thaliana
agtgcctaaacgtgtca

SEQ ID NO: 45105 - DNA, 17 bp, Arabidopsis thaliana
agtgcctactctccaac

SEQ ID NO: 45106 - DNA, 17 bp, Arabidopsis thaliana
agtgcctagaaatgctt

SEQ ID NO: 45107 - DNA, 17 bp, Arabidopsis thaliana
agtgcctcaaacggaag

SEQ ID NO: 45108 - DNA, 17 bp, Arabidopsis thaliana
agtgcctcaaacggaat

SEQ ID NO: 45109 - DNA, 17 bp, Arabidopsis thaliana
agtgcctcatccctgac

SEQ ID NO: 45110 - DNA, 17 bp, Arabidopsis thaliana
agtgcctcatctctgac

SEQ ID NO: 45111 - DNA, 17 bp, Arabidopsis thaliana
agtgcctccgcgtgtat

SEQ ID NO: 45112 - DNA, 17 bp, Arabidopsis thaliana
agtgcctctacttgtaa

SEQ ID NO: 45113 - DNA, 17 bp, Arabidopsis thaliana
agtgcctgaaccttgga

SEQ ID NO: 45114 - DNA, 17 bp, Arabidopsis thaliana
agtgcctgttttccaac

SEQ ID NO: 45115 - DNA, 17 bp, Arabidopsis thaliana
agtgccttctctttgga

SEQ ID NO: 45116 - DNA, 17 bp, Arabidopsis thaliana
agtgccttgttctcgta

SEQ ID NO: 45117 - DNA, 17 bp, Arabidopsis thaliana
agtgcctttctgactcg

SEQ ID NO: 45118 - DNA, 17 bp, Arabidopsis thaliana
agtgcgaaaaatgacta

SEQ ID NO: 45119 - DNA, 17 bp, Arabidopsis thaliana
agtgcgaactaatccgt

SEQ ID NO: 45120 - DNA, 17 bp, Arabidopsis thaliana
agtgcgacctatacccg

SEQ ID NO: 45121 - DNA, 17 bp, Arabidopsis thaliana
agtgcgagcttctgtta

SEQ ID NO: 45122 - DNA, 17 bp, Arabidopsis thaliana
agtgcgaggagggtttc

SEQ ID NO: 45123 - DNA, 17 bp, Arabidopsis thaliana
agtgcgatatctagcgg

SEQ ID NO: 45124 - DNA, 17 bp, Arabidopsis thaliana
agtgcgatatggtccaa

SEQ ID NO: 45125 - DNA, 17 bp, Arabidopsis thaliana
agtgcgatcatagtcct

SEQ ID NO: 45126 - DNA, 17 bp, Arabidopsis thaliana
agtgcgatgcggtttaa

SEQ ID NO: 45127 - DNA, 17 bp, Arabidopsis thaliana
agtgcgattcggttact

SEQ ID NO: 45128 - DNA, 17 bp, Arabidopsis thaliana
agtgcgattgcggattt

SEQ ID NO: 45129 - DNA, 17 bp, Arabidopsis thaliana
agtgcgcgttaacggat

SEQ ID NO: 45130 - DNA, 17 bp, Arabidopsis thaliana
agtgcgctttggtgaca

SEQ ID NO: 45131 - DNA, 17 bp, Arabidopsis thaliana
agtgcggaaaatgacaa

SEQ ID NO: 45132 - DNA, 17 bp, Arabidopsis thaliana
agtgcggaacagacagt

SEQ ID NO: 45133 - DNA, 17 bp, Arabidopsis thaliana
agtgcggaccggctatg

SEQ ID NO: 45134 - DNA, 17 bp, Arabidopsis thaliana
agtgcggactaatccgt

SEQ ID NO: 45135 - DNA, 17 bp, Arabidopsis thaliana
agtgcggactaatctgt

SEQ ID NO: 45136 - DNA, 17 bp, Arabidopsis thaliana
agtgcggactaattccc

SEQ ID NO: 45137 - DNA, 17 bp, Arabidopsis thaliana
agtgcggactaattctg

SEQ ID NO: 45138 - DNA, 17 bp, Arabidopsis thaliana
agtgcggactgatcgat

SEQ ID NO: 45139 - DNA, 17 bp, Arabidopsis thaliana
agtgcggagcggataac

SEQ ID NO: 45140 - DNA, 17 bp, Arabidopsis thaliana
agtgcggatcaagtggt

SEQ ID NO: 45141 - DNA, 17 bp, Arabidopsis thaliana
agtgcggatcacgctgg

SEQ ID NO: 45142 - DNA, 17 bp, Arabidopsis thaliana
agtgcggatctacctgt

SEQ ID NO: 45143 - DNA, 17 bp, Arabidopsis thaliana
agtgcggatgatcacct

SEQ ID NO: 45144 - DNA, 17 bp, Arabidopsis thaliana
agtgcgggctttggtta

SEQ ID NO: 45145 - DNA, 17 bp, Arabidopsis thaliana
agtgcggtacagttcaa

SEQ ID NO: 45146 - DNA, 17 bp, Arabidopsis thaliana
agtgcggtacggttcaa

SEQ ID NO: 45147 - DNA, 17 bp, Arabidopsis thaliana
agtgcggtacggtttaa

SEQ ID NO: 45148 - DNA, 17 bp, Arabidopsis thaliana
agtgcggtcacttagta

SEQ ID NO: 45149 - DNA, 17 bp, Arabidopsis thaliana
agtgcggtgcgatttaa

SEQ ID NO: 45150 - DNA, 17 bp, Arabidopsis thaliana
agtgcggtgcggttcaa

SEQ ID NO: 45151 - DNA, 17 bp, Arabidopsis thaliana
agtgcggtgcggttccg

SEQ ID NO: 45152 - DNA, 17 bp, Arabidopsis thaliana
agtgcggtgcggtttaa

SEQ ID NO: 45153 - DNA, 17 bp, Arabidopsis thaliana
agtgcggtgcggtttta

SEQ ID NO: 45154 - DNA, 17 bp, Arabidopsis thaliana
agtgcggtgcgtttcaa

SEQ ID NO: 45155 - DNA, 17 bp, Arabidopsis thaliana
agtgcggtgtggttcaa

SEQ ID NO: 45156 - DNA, 17 bp, Arabidopsis thaliana
agtgcggttgcaaggac

SEQ ID NO: 45157 - DNA, 17 bp, Arabidopsis thaliana
agtgcggttgcgactgc

SEQ ID NO: 45158 - DNA, 17 bp, Arabidopsis thaliana
agtgcggtttatgagat

SEQ ID NO: 45159 - DNA, 17 bp, Arabidopsis thaliana
agtgcggtttatgtcac

SEQ ID NO: 45160 - DNA, 17 bp, Arabidopsis thaliana
agtgcggtttgtctacg

SEQ ID NO: 45161 - DNA, 17 bp, Arabidopsis thaliana
agtgcggtttgtgtacg

SEQ ID NO: 45162 - DNA, 17 bp, Arabidopsis thaliana
agtgcggttttaggtgc

SEQ ID NO: 45163 - DNA, 17 bp, Arabidopsis thaliana
agtgcggttttgattac

SEQ ID NO: 45164 - DNA, 17 bp, Arabidopsis thaliana
agtgcggttttgggtgc

SEQ ID NO: 45165 - DNA, 17 bp, Arabidopsis thaliana
agtgcggttttgggtgt

SEQ ID NO: 45166 - DNA, 17 bp, Arabidopsis thaliana
agtgcggttttggttac

SEQ ID NO: 45167 - DNA, 17 bp, Arabidopsis thaliana
agtgcggttttgtgtac

SEQ ID NO: 45168 - DNA, 17 bp, Arabidopsis thaliana
agtgcggttttgtttac

SEQ ID NO: 45169 - DNA, 17 bp, Arabidopsis thaliana
agtgcgtaaactttttc

SEQ ID NO: 45170 - DNA, 17 bp, Arabidopsis thaliana
agtgcgtaacaactatc

SEQ ID NO: 45171 - DNA, 17 bp, Arabidopsis thaliana
agtgcgtcctgtactcc

SEQ ID NO: 45172 - DNA, 17 bp, Arabidopsis thaliana
agtgcgtcgtgagtttg

SEQ ID NO: 45173 - DNA, 17 bp, Arabidopsis thaliana
agtgcgtgctgataacg

SEQ ID NO: 45174 - DNA, 17 bp, Arabidopsis thaliana
agtgcgtgtactactaa

SEQ ID NO: 45175 - DNA, 17 bp, Arabidopsis thaliana
agtgcgtgtttaccggg

SEQ ID NO: 45176 - DNA, 17 bp, Arabidopsis thaliana
agtgcgttcatctcctg

SEQ ID NO: 45177 - DNA, 17 bp, Arabidopsis thaliana
agtgcgttcggctcata

SEQ ID NO: 45178 - DNA, 17 bp, Arabidopsis thaliana
agtgcgttctaataact

SEQ ID NO: 45179 - DNA, 17 bp, Arabidopsis thaliana
agtgcgtttctaccggg

SEQ ID NO: 45180 - DNA, 17 bp, Arabidopsis thaliana
agtgcgtttctactgag

SEQ ID NO: 45181 - DNA, 17 bp, Arabidopsis thaliana
agtgcgtttgcgggagt

SEQ ID NO: 45182 - DNA, 17 bp, Arabidopsis thaliana
agtgcgttttttggttg

SEQ ID NO: 45183 - DNA, 17 bp, Arabidopsis thaliana
agtgctaaaacccgaca

SEQ ID NO: 45184 - DNA, 17 bp, Arabidopsis thaliana
agtgctacctggatagg

SEQ ID NO: 45185 - DNA, 17 bp, Arabidopsis thaliana
agtgctactctctcttg

SEQ ID NO: 45186 - DNA, 17 bp, Arabidopsis thaliana
agtgctactgtggagca

SEQ ID NO: 45187 - DNA, 17 bp, Arabidopsis thaliana
agtgctacttcttggtt

SEQ ID NO: 45188 - DNA, 17 bp, Arabidopsis thaliana
agtgctacttggatagg

SEQ ID NO: 45189 - DNA, 17 bp, Arabidopsis thaliana
agtgctagcctagagag

SEQ ID NO: 45190 - DNA, 17 bp, Arabidopsis thaliana
agtgctagtatgatcgc

SEQ ID NO: 45191 - DNA, 17 bp, Arabidopsis thaliana
agtgctatagccgactt

SEQ ID NO: 45192 - DNA, 17 bp, Arabidopsis thaliana
agtgctatcgccgattt

SEQ ID NO: 45193 - DNA, 17 bp, Arabidopsis thaliana
agtgctatgcatggttc

SEQ ID NO: 45194 - DNA, 17 bp, Arabidopsis thaliana
agtgctatttgtggcaa

SEQ ID NO: 45195 - DNA, 17 bp, Arabidopsis thaliana
agtgctatttgtgtcaa

SEQ ID NO: 45196 - DNA, 17 bp, Arabidopsis thaliana
agtgctcaaagcaagcc

SEQ ID NO: 45197 - DNA, 17 bp, Arabidopsis thaliana
agtgctcaaagcggctc

SEQ ID NO: 45198 - DNA, 17 bp, Arabidopsis thaliana
agtgctcaacttgtgcc

SEQ ID NO: 45199 - DNA, 17 bp, Arabidopsis thaliana
agtgctcacatctgcgc

SEQ ID NO: 45200 - DNA, 17 bp, Arabidopsis thaliana
agtgctcacgctgtcga

SEQ ID NO: 45201 - DNA, 17 bp, Arabidopsis thaliana
agtgctcaggtggtttg

SEQ ID NO: 45202 - DNA, 17 bp, Arabidopsis thaliana
agtgctcctccaattgt

SEQ ID NO: 45203 - DNA, 17 bp, Arabidopsis thaliana
agtgctccttcggtatg

SEQ ID NO: 45204 - DNA, 17 bp, Arabidopsis thaliana
agtgctcgacgaacaga

SEQ ID NO: 45205 - DNA, 17 bp, Arabidopsis thaliana
agtgctcgtcccagatc

SEQ ID NO: 45206 - DNA, 17 bp, Arabidopsis thaliana
agtgctctcgcaggagc

SEQ ID NO: 45207 - DNA, 17 bp, Arabidopsis thaliana
agtgctctgcacttggg

SEQ ID NO: 45208 - DNA, 17 bp, Arabidopsis thaliana
agtgctctgtagtttgg

SEQ ID NO: 45209 - DNA, 17 bp, Arabidopsis thaliana
agtgctcttgcgaatga

SEQ ID NO: 45210 - DNA, 17 bp, Arabidopsis thaliana
agtgctgacatcaaccc

SEQ ID NO: 45211 - DNA, 17 bp, Arabidopsis thaliana
agtgctgactacttagc

SEQ ID NO: 45212 - DNA, 17 bp, Arabidopsis thaliana
agtgctgactcttgtcc

SEQ ID NO: 45213 - DNA, 17 bp, Arabidopsis thaliana
agtgctgagcagagagc

SEQ ID NO: 45214 - DNA, 17 bp, Arabidopsis thaliana
agtgctgcagaatgggt

SEQ ID NO: 45215 - DNA, 17 bp, Arabidopsis thaliana
agtgctgctactgctca

SEQ ID NO: 45216 - DNA, 17 bp, Arabidopsis thaliana
agtgctgctatttcatg

SEQ ID NO: 45217 - DNA, 17 bp, Arabidopsis thaliana
agtgctgcttcgtattc

SEQ ID NO: 45218 - DNA, 17 bp, Arabidopsis thaliana
agtgctggccgccagag

SEQ ID NO: 45219 - DNA, 17 bp, Arabidopsis thaliana
agtgctggtatgatcgc

SEQ ID NO: 45220 - DNA, 17 bp, Arabidopsis thaliana
agtgctgtgtggtttgg

SEQ ID NO: 45221 - DNA, 17 bp, Arabidopsis thaliana
agtgcttacataatttt

SEQ ID NO: 45222 - DNA, 17 bp, Arabidopsis thaliana
agtgcttaggattccat

SEQ ID NO: 45223 - DNA, 17 bp, Arabidopsis thaliana
agtgcttaggtactgtg

SEQ ID NO: 45224 - DNA, 17 bp, Arabidopsis thaliana
agtgcttaggttaggat

SEQ ID NO: 45225 - DNA, 17 bp, Arabidopsis thaliana
agtgcttcaaatatgga

SEQ ID NO: 45226 - DNA, 17 bp, Arabidopsis thaliana
agtgcttcagaagatga

SEQ ID NO: 45227 - DNA, 17 bp, Arabidopsis thaliana
agtgcttcagatgatgg

SEQ ID NO: 45228 - DNA, 17 bp, Arabidopsis thaliana
agtgcttcatccctgac

SEQ ID NO: 45229 - DNA, 17 bp, Arabidopsis thaliana
agtgcttcatccgtccc

SEQ ID NO: 45230 - DNA, 17 bp, Arabidopsis thaliana
agtgcttcatccgtgac

SEQ ID NO: 45231 - DNA, 17 bp, Arabidopsis thaliana
agtgcttccagctctgg

SEQ ID NO: 45232 - DNA, 17 bp, Arabidopsis thaliana
agtgcttccttgagtcc

SEQ ID NO: 45233 - DNA, 17 bp, Arabidopsis thaliana
agtgcttcgatgacgta

SEQ ID NO: 45234 - DNA, 17 bp, Arabidopsis thaliana
agtgcttctaagcaatt

SEQ ID NO: 45235 - DNA, 17 bp, Arabidopsis thaliana
agtgcttctactattac

SEQ ID NO: 45236 - DNA, 17 bp, Arabidopsis thaliana
agtgcttctggctttca

SEQ ID NO: 45237 - DNA, 17 bp, Arabidopsis thaliana
agtgcttcttggactga

SEQ ID NO: 45238 - DNA, 17 bp, Arabidopsis thaliana
agtgcttgagagactcg

SEQ ID NO: 45239 - DNA, 17 bp, Arabidopsis thaliana
agtgcttgatccgtgtt

SEQ ID NO: 45240 - DNA, 17 bp, Arabidopsis thaliana
agtgcttgcagagagaa

SEQ ID NO: 45241 - DNA, 17 bp, Arabidopsis thaliana
agtgcttggaccgggtg

SEQ ID NO: 45242 - DNA, 17 bp, Arabidopsis thaliana
agtgcttgtatgatcgc

SEQ ID NO: 45243 - DNA, 17 bp, Arabidopsis thaliana
agtgctttggacggaag

SEQ ID NO: 45244 - DNA, 17 bp, Arabidopsis thaliana
agtgctttggccgagtg

SEQ ID NO: 45245 - DNA, 17 bp, Arabidopsis thaliana
agtgctttggtccaact

SEQ ID NO: 45246 - DNA, 17 bp, Arabidopsis thaliana
agtgcttttctttcgat

SEQ ID NO: 45247 - DNA, 17 bp, Arabidopsis thaliana
agtggaaaagttccatt

SEQ ID NO: 45248 - DNA, 17 bp, Arabidopsis thaliana
agtggaaacatcctcac

SEQ ID NO: 45249 - DNA, 17 bp, Arabidopsis thaliana
agtggaacccggttagg

SEQ ID NO: 45250 - DNA, 17 bp, Arabidopsis thaliana
agtggaacctaatttcg

SEQ ID NO: 45251 - DNA, 17 bp, Arabidopsis thaliana
agtggaacctctttgct

SEQ ID NO: 45252 - DNA, 17 bp, Arabidopsis thaliana
agtggaacgagtttgga

SEQ ID NO: 45253 - DNA, 17 bp, Arabidopsis thaliana
agtggaactgttccact

SEQ ID NO: 45254 - DNA, 17 bp, Arabidopsis thaliana
agtggaagctcttctct

SEQ ID NO: 45255 - DNA, 17 bp, Arabidopsis thaliana
agtggaagtcttttgct

SEQ ID NO: 45256 - DNA, 17 bp, Arabidopsis thaliana
agtggaagtgcagtgat

SEQ ID NO: 45257 - DNA, 17 bp, Arabidopsis thaliana
agtggaatagaccgttc

SEQ ID NO: 45258 - DNA, 17 bp, Arabidopsis thaliana
agtggaatcaaactcaa

SEQ ID NO: 45259 - DNA, 17 bp, Arabidopsis thaliana
agtggaatggtcctggg

SEQ ID NO: 45260 - DNA, 17 bp, Arabidopsis thaliana
agtggacaaaagatgga

SEQ ID NO: 45261 - DNA, 17 bp, Arabidopsis thaliana
agtggacacggatttaa

SEQ ID NO: 45262 - DNA, 17 bp, Arabidopsis thaliana
agtggacagagttgatc

SEQ ID NO: 45263 - DNA, 17 bp, Arabidopsis thaliana
agtggaccattgcaagt

SEQ ID NO: 45264 - DNA, 17 bp, Arabidopsis thaliana
agtggaccgaccatagg

SEQ ID NO: 45265 - DNA, 17 bp, Arabidopsis thaliana
agtggaccgaccattgg

SEQ ID NO: 45266 - DNA, 17 bp, Arabidopsis thaliana
agtggaccggcgattgt

SEQ ID NO: 45267 - DNA, 17 bp, Arabidopsis thaliana
agtggacctggatatga

SEQ ID NO: 45268 - DNA, 17 bp, Arabidopsis thaliana
agtggacggacctgacc

SEQ ID NO: 45269 - DNA, 17 bp, Arabidopsis thaliana
agtggacggatcacagc

SEQ ID NO: 45270 - DNA, 17 bp, Arabidopsis thaliana
agtggacggatcacggt

SEQ ID NO: 45271 - DNA, 17 bp, Arabidopsis thaliana
agtggacggattggcgg

SEQ ID NO: 45272 - DNA, 17 bp, Arabidopsis thaliana
agtggactagtcagatc

SEQ ID NO: 45273 - DNA, 17 bp, Arabidopsis thaliana
agtggactgcctggttg

SEQ ID NO: 45274 - DNA, 17 bp, Arabidopsis thaliana
agtggacttcacgtagc

SEQ ID NO: 45275 - DNA, 17 bp, Arabidopsis thaliana
agtggacttctccccga

SEQ ID NO: 45276 - DNA, 17 bp, Arabidopsis thaliana
agtggacttctcctcga

SEQ ID NO: 45277 - DNA, 17 bp, Arabidopsis thaliana
agtggacttctctccga

SEQ ID NO: 45278 - DNA, 17 bp, Arabidopsis thaliana
agtggacttgcagcttc

SEQ ID NO: 45279 - DNA, 17 bp, Arabidopsis thaliana
agtggagaagatgacgc

SEQ ID NO: 45280 - DNA, 17 bp, Arabidopsis thaliana
agtggagaccctatgca

SEQ ID NO: 45281 - DNA, 17 bp, Arabidopsis thaliana
agtggagcctgcggctt

SEQ ID NO: 45282 - DNA, 17 bp, Arabidopsis thaliana
agtggagcttgctattc

SEQ ID NO: 45283 - DNA, 17 bp, Arabidopsis thaliana
agtggaggctggccctc

SEQ ID NO: 45284 - DNA, 17 bp, Arabidopsis thaliana
agtggaggtagtatgcg

SEQ ID NO: 45285 - DNA, 17 bp, Arabidopsis thaliana
agtggaggtgttgtgtt

SEQ ID NO: 45286 - DNA, 17 bp, Arabidopsis thaliana
agtggagtggctcatat

SEQ ID NO: 45287 - DNA, 17 bp, Arabidopsis thaliana
agtggagtggtgaggcg

SEQ ID NO: 45288 - DNA, 17 bp, Arabidopsis thaliana
agtggataatgcgtacg

SEQ ID NO: 45289 - DNA, 17 bp, Arabidopsis thaliana
agtggataatttggcac

SEQ ID NO: 45290 - DNA, 17 bp, Arabidopsis thaliana
agtggatcaagcattca

SEQ ID NO: 45291 - DNA, 17 bp, Arabidopsis thaliana
agtggatcaagcattcc

SEQ ID NO: 45292 - DNA, 17 bp, Arabidopsis thaliana
agtggatcaagcattta

SEQ ID NO: 45293 - DNA, 17 bp, Arabidopsis thaliana
agtggatcagtcctcgt

SEQ ID NO: 45294 - DNA, 17 bp, Arabidopsis thaliana
agtggatccagagaagt

SEQ ID NO: 45295 - DNA, 17 bp, Arabidopsis thaliana
agtggatcccatcttct

SEQ ID NO: 45296 - DNA, 17 bp, Arabidopsis thaliana
agtggatccttacgtct

SEQ ID NO: 45297 - DNA, 17 bp, Arabidopsis thaliana
agtggatcgcaatgtct

SEQ ID NO: 45298 - DNA, 17 bp, Arabidopsis thaliana
agtggatcgcatcctgt

SEQ ID NO: 45299 - DNA, 17 bp, Arabidopsis thaliana
agtggatcgtggcagca

SEQ ID NO: 45300 - DNA, 17 bp, Arabidopsis thaliana
agtggatctgcctggct

SEQ ID NO: 45301 - DNA, 17 bp, Arabidopsis thaliana
agtggatgaatggaact

SEQ ID NO: 45302 - DNA, 17 bp, Arabidopsis thaliana
agtggatgattggttgg

SEQ ID NO: 45303 - DNA, 17 bp, Arabidopsis thaliana
agtggatggacttgccc

SEQ ID NO: 45304 - DNA, 17 bp, Arabidopsis thaliana
agtggatggtggctgcc

SEQ ID NO: 45305 - DNA, 17 bp, Arabidopsis thaliana
agtggatgttgaattgt

SEQ ID NO: 45306 - DNA, 17 bp, Arabidopsis thaliana
agtggatgtttattttt

SEQ ID NO: 45307 - DNA, 17 bp, Arabidopsis thaliana
agtggattacgagtttc

SEQ ID NO: 45308 - DNA, 17 bp, Arabidopsis thaliana
agtggattagcgctttg

SEQ ID NO: 45309 - DNA, 17 bp, Arabidopsis thaliana
agtggattagcgctttt

SEQ ID NO: 45310 - DNA, 17 bp, Arabidopsis thaliana
agtggattcgttggagc

SEQ ID NO: 45311 - DNA, 17 bp, Arabidopsis thaliana
agtggattgacccgatt

SEQ ID NO: 45312 - DNA, 17 bp, Arabidopsis thaliana
agtggattgatcacctc

SEQ ID NO: 45313 - DNA, 17 bp, Arabidopsis thaliana
agtggattggcaaaccc

SEQ ID NO: 45314 - DNA, 17 bp, Arabidopsis thaliana
agtggattgtgatacat

SEQ ID NO: 45315 - DNA, 17 bp, Arabidopsis thaliana
agtggatttagcagtct

SEQ ID NO: 45316 - DNA, 17 bp, Arabidopsis thaliana
agtggatttccggagag

SEQ ID NO: 45317 - DNA, 17 bp, Arabidopsis thaliana
agtggatttgcggttcg

SEQ ID NO: 45318 - DNA, 17 bp, Arabidopsis thaliana
agtggcaaagcctccag

SEQ ID NO: 45319 - DNA, 17 bp, Arabidopsis thaliana
agtggcaaattcgccta

SEQ ID NO: 45320 - DNA, 17 bp, Arabidopsis thaliana
agtggcaaccattgtaa

SEQ ID NO: 45321 - DNA, 17 bp, Arabidopsis thaliana
agtggcacattcccttt

SEQ ID NO: 45322 - DNA, 17 bp, Arabidopsis thaliana
agtggcacgccttttca

SEQ ID NO: 45323 - DNA, 17 bp, Arabidopsis thaliana
agtggcagactctctct

SEQ ID NO: 45324 - DNA, 17 bp, Arabidopsis thaliana
agtggcagagtggccgg

SEQ ID NO: 45325 - DNA, 17 bp, Arabidopsis thaliana
agtggcagagtggcctt

SEQ ID NO: 45326 - DNA, 17 bp, Arabidopsis thaliana
agtggcagagtgggtgt

SEQ ID NO: 45327 - DNA, 17 bp, Arabidopsis thaliana
agtggcagccactgtaa

SEQ ID NO: 45328 - DNA, 17 bp, Arabidopsis thaliana
agtggcagccatcgtaa

SEQ ID NO: 45329 - DNA, 17 bp, Arabidopsis thaliana
agtggcagccattgtaa

SEQ ID NO: 45330 - DNA, 17 bp, Arabidopsis thaliana
agtggcagccgctgtaa

SEQ ID NO: 45331 - DNA, 17 bp, Arabidopsis thaliana
agtggcagtccagtgat

SEQ ID NO: 45332 - DNA, 17 bp, Arabidopsis thaliana
agtggcatgaccacggt

SEQ ID NO: 45333 - DNA, 17 bp, Arabidopsis thaliana
agtggcattcgtcggtc

SEQ ID NO: 45334 - DNA, 17 bp, Arabidopsis thaliana
agtggcattgttgatca

SEQ ID NO: 45335 - DNA, 17 bp, Arabidopsis thaliana
agtggccagggaaggtg

SEQ ID NO: 45336 - DNA, 17 bp, Arabidopsis thaliana
agtggccattgcgaacc

SEQ ID NO: 45337 - DNA, 17 bp, Arabidopsis thaliana
agtggccgcctttctcc

SEQ ID NO: 45338 - DNA, 17 bp, Arabidopsis thaliana
agtggccgcctttttcc

SEQ ID NO: 45339 - DNA, 17 bp, Arabidopsis thaliana
agtggcgactgcctctt

SEQ ID NO: 45340 - DNA, 17 bp, Arabidopsis thaliana
agtggcgagatcgattt

SEQ ID NO: 45341 - DNA, 17 bp, Arabidopsis thaliana
agtggcgatacccctgg

SEQ ID NO: 45342 - DNA, 17 bp, Arabidopsis thaliana
agtggcgatgacaggtt

SEQ ID NO: 45343 - DNA, 17 bp, Arabidopsis thaliana
agtggcgcagcggaagc

SEQ ID NO: 45344 - DNA, 17 bp, Arabidopsis thaliana
agtggcgccaatttcat

SEQ ID NO: 45345 - DNA, 17 bp, Arabidopsis thaliana
agtggcgcgaagctacc

SEQ ID NO: 45346 - DNA, 17 bp, Arabidopsis thaliana
agtggcgctctattcat

SEQ ID NO: 45347 - DNA, 17 bp, Arabidopsis thaliana
agtggcgctctattctt

SEQ ID NO: 45348 - DNA, 17 bp, Arabidopsis thaliana
agtggcgctctatttat

SEQ ID NO: 45349 - DNA, 17 bp, Arabidopsis thaliana
agtggcggagccagaac

SEQ ID NO: 45350 - DNA, 17 bp, Arabidopsis thaliana
agtggcgggcctttgga

SEQ ID NO: 45351 - DNA, 17 bp, Arabidopsis thaliana
agtggctaaattgggtt

SEQ ID NO: 45352 - DNA, 17 bp, Arabidopsis thaliana
agtggctaggaattggc

SEQ ID NO: 45353 - DNA, 17 bp, Arabidopsis thaliana
agtggctcactgctata

SEQ ID NO: 45354 - DNA, 17 bp, Arabidopsis thaliana
agtggctccatcgtcca

SEQ ID NO: 45355 - DNA, 17 bp, Arabidopsis thaliana
agtggctccattaccgc

SEQ ID NO: 45356 - DNA, 17 bp, Arabidopsis thaliana
agtggctcccattgttg

SEQ ID NO: 45357 - DNA, 17 bp, Arabidopsis thaliana
agtggctcgaagctacc

SEQ ID NO: 45358 - DNA, 17 bp, Arabidopsis thaliana
agtggctgccactgaca

SEQ ID NO: 45359 - DNA, 17 bp, Arabidopsis thaliana
agtggctgccactggca

SEQ ID NO: 45360 - DNA, 17 bp, Arabidopsis thaliana
agtggctgctcaagtta

SEQ ID NO: 45361 - DNA, 17 bp, Arabidopsis thaliana
agtggctgctcgagtga

SEQ ID NO: 45362 - DNA, 17 bp, Arabidopsis thaliana
agtggctgggaattggc

SEQ ID NO: 45363 - DNA, 17 bp, Arabidopsis thaliana
agtggctgtcactgaca

SEQ ID NO: 45364 - DNA, 17 bp, Arabidopsis thaliana
agtggctgttgagagga

SEQ ID NO: 45365 - DNA, 17 bp, Arabidopsis thaliana
agtggcttgagtccggg

SEQ ID NO: 45366 - DNA, 17 bp, Arabidopsis thaliana
agtggcttgcggctcct

SEQ ID NO: 45367 - DNA, 17 bp, Arabidopsis thaliana
agtggcttgtaacgctc

SEQ ID NO: 45368 - DNA, 17 bp, Arabidopsis thaliana
agtgggaatgagctcat

SEQ ID NO: 45369 - DNA, 17 bp, Arabidopsis thaliana
agtgggacccacggcga

SEQ ID NO: 45370 - DNA, 17 bp, Arabidopsis thaliana
agtgggacccggtgcac

SEQ ID NO: 45371 - DNA, 17 bp, Arabidopsis thaliana
agtgggacggcgagatc

SEQ ID NO: 45372 - DNA, 17 bp, Arabidopsis thaliana
agtgggacgtgtttgac

SEQ ID NO: 45373 - DNA, 17 bp, Arabidopsis thaliana
agtgggagacaccgcgc

SEQ ID NO: 45374 - DNA, 17 bp, Arabidopsis thaliana
agtgggagagatgtcgt

SEQ ID NO: 45375 - DNA, 17 bp, Arabidopsis thaliana
agtgggagctacgaaca

SEQ ID NO: 45376 - DNA, 17 bp, Arabidopsis thaliana
agtgggagctacgaacc

SEQ ID NO: 45377 - DNA, 17 bp, Arabidopsis thaliana
agtgggagctacggaca

SEQ ID NO: 45378 - DNA, 17 bp, Arabidopsis thaliana
agtgggagcttcggcgc

SEQ ID NO: 45379 - DNA, 17 bp, Arabidopsis thaliana
agtgggataagcgtcgt

SEQ ID NO: 45380 - DNA, 17 bp, Arabidopsis thaliana
agtgggatgtatctgac

SEQ ID NO: 45381 - DNA, 17 bp, Arabidopsis thaliana
agtgggattctctccaa

SEQ ID NO: 45382 - DNA, 17 bp, Arabidopsis thaliana
agtgggcactttgccat

SEQ ID NO: 45383 - DNA, 17 bp, Arabidopsis thaliana
agtgggccatttttggt

SEQ ID NO: 45384 - DNA, 17 bp, Arabidopsis thaliana
agtgggcggaaaggatc

SEQ ID NO: 45385 - DNA, 17 bp, Arabidopsis thaliana
agtgggcgtagtccggt

SEQ ID NO: 45386 - DNA, 17 bp, Arabidopsis thaliana
agtgggctgatactgat

SEQ ID NO: 45387 - DNA, 17 bp, Arabidopsis thaliana
agtgggctgcgccactc

SEQ ID NO: 45388 - DNA, 17 bp, Arabidopsis thaliana
agtgggctgggcctttc

SEQ ID NO: 45389 - DNA, 17 bp, Arabidopsis thaliana
agtggggtggctgagtg

SEQ ID NO: 45390 - DNA, 17 bp, Arabidopsis thaliana
agtggggttctccccca

SEQ ID NO: 45391 - DNA, 17 bp, Arabidopsis thaliana
agtgggtagggaagccg

SEQ ID NO: 45392 - DNA, 17 bp, Arabidopsis thaliana
agtgggtgaaacttgtt

SEQ ID NO: 45393 - DNA, 17 bp, Arabidopsis thaliana
agtgggtgaaatcccct

SEQ ID NO: 45394 - DNA, 17 bp, Arabidopsis thaliana
agtgggtgacgcctcag

SEQ ID NO: 45395 - DNA, 17 bp, Arabidopsis thaliana
agtgggtgatgatggaa

SEQ ID NO: 45396 - DNA, 17 bp, Arabidopsis thaliana
agtgggtgattggttag

SEQ ID NO: 45397 - DNA, 17 bp, Arabidopsis thaliana
agtgggtgattggttgg

SEQ ID NO: 45398 - DNA, 17 bp, Arabidopsis thaliana
agtgggtgcggttgcgg

SEQ ID NO: 45399 - DNA, 17 bp, Arabidopsis thaliana
agtgggttcggctccca

SEQ ID NO: 45400 - DNA, 17 bp, Arabidopsis thaliana
agtgggttttctgtctc

SEQ ID NO: 45401 - DNA, 17 bp, Arabidopsis thaliana
agtggtaaacgacatgg

SEQ ID NO: 45402 - DNA, 17 bp, Arabidopsis thaliana
agtggtaaggcggggga

SEQ ID NO: 45403 - DNA, 17 bp, Arabidopsis thaliana
agtggtacaggcggcgg

SEQ ID NO: 45404 - DNA, 17 bp, Arabidopsis thaliana
agtggtacccgccttcc

SEQ ID NO: 45405 - DNA, 17 bp, Arabidopsis thaliana
agtggtagacgctcatg

SEQ ID NO: 45406 - DNA, 17 bp, Arabidopsis thaliana
agtggtaggacgggttt

SEQ ID NO: 45407 - DNA, 17 bp, Arabidopsis thaliana
agtggtataccgtttct

SEQ ID NO: 45408 - DNA, 17 bp, Arabidopsis thaliana
agtggtatccggtgcac

SEQ ID NO: 45409 - DNA, 17 bp, Arabidopsis thaliana
agtggtatttgcggcac

SEQ ID NO: 45410 - DNA, 17 bp, Arabidopsis thaliana
agtggtcaagtcctggt

SEQ ID NO: 45411 - DNA, 17 bp, Arabidopsis thaliana
agtggtcacatgcgcct

SEQ ID NO: 45412 - DNA, 17 bp, Arabidopsis thaliana
agtggtccatcccaccc

SEQ ID NO: 45413 - DNA, 17 bp, Arabidopsis thaliana
agtggtccatttttggt

SEQ ID NO: 45414 - DNA, 17 bp, Arabidopsis thaliana
agtggtccctctgtgtt

SEQ ID NO: 45415 - DNA, 17 bp, Arabidopsis thaliana
agtggtcctgacactag

SEQ ID NO: 45416 - DNA, 17 bp, Arabidopsis thaliana
agtggtcctgtcactag

SEQ ID NO: 45417 - DNA, 17 bp, Arabidopsis thaliana
agtggtccttgtgacac

SEQ ID NO: 45418 - DNA, 17 bp, Arabidopsis thaliana
agtggtctactccctct

SEQ ID NO: 45419 - DNA, 17 bp, Arabidopsis thaliana
agtggtctttttttgcg

SEQ ID NO: 45420 - DNA, 17 bp, Arabidopsis thaliana
agtggtgacttaggtgg

SEQ ID NO: 45421 - DNA, 17 bp, Arabidopsis thaliana
agtggtgacttaggttc

SEQ ID NO: 45422 - DNA, 17 bp, Arabidopsis thaliana
agtggtgataggttctg

SEQ ID NO: 45423 - DNA, 17 bp, Arabidopsis thaliana
agtggtgatgtgctcaa

SEQ ID NO: 45424 - DNA, 17 bp, Arabidopsis thaliana
agtggtgatgtgctcta

SEQ ID NO: 45425 - DNA, 17 bp, Arabidopsis thaliana
agtggtgatgtgcttta

SEQ ID NO: 45426 - DNA, 17 bp, Arabidopsis thaliana
agtggtggaggacgagc

SEQ ID NO: 45427 - DNA, 17 bp, Arabidopsis thaliana
agtggtgggacgggttt

SEQ ID NO: 45428 - DNA, 17 bp, Arabidopsis thaliana
agtggtggtgcatggct

SEQ ID NO: 45429 - DNA, 17 bp, Arabidopsis thaliana
agtggtggtgtcttcta

SEQ ID NO: 45430 - DNA, 17 bp, Arabidopsis thaliana
agtggtgtcaaaatggg

SEQ ID NO: 45431 - DNA, 17 bp, Arabidopsis thaliana
agtggtgtggccgtcaa

SEQ ID NO: 45432 - DNA, 17 bp, Arabidopsis thaliana
agtggtgtggccgtcag

SEQ ID NO: 45433 - DNA, 17 bp, Arabidopsis thaliana
agtggtgtttccagtgg

SEQ ID NO: 45434 - DNA, 17 bp, Arabidopsis thaliana
agtggtgtttccagtgt

SEQ ID NO: 45435 - DNA, 17 bp, Arabidopsis thaliana
agtggttaaacgtggct

SEQ ID NO: 45436 - DNA, 17 bp, Arabidopsis thaliana
agtggttaagtccattt

SEQ ID NO: 45437 - DNA, 17 bp, Arabidopsis thaliana
agtggttagccgcaagg

SEQ ID NO: 45438 - DNA, 17 bp, Arabidopsis thaliana
agtggttaggacggctg

SEQ ID NO: 45439 - DNA, 17 bp, Arabidopsis thaliana
agtggttagtcaagccg

SEQ ID NO: 45440 - DNA, 17 bp, Arabidopsis thaliana
agtggttatcggccatg

SEQ ID NO: 45441 - DNA, 17 bp, Arabidopsis thaliana
agtggttcattcagaag

SEQ ID NO: 45442 - DNA, 17 bp, Arabidopsis thaliana
agtggttccggctctgg

SEQ ID NO: 45443 - DNA, 17 bp, Arabidopsis thaliana
agtggttctcttcggtg

SEQ ID NO: 45444 - DNA, 17 bp, Arabidopsis thaliana
agtggttgaaggcctgt

SEQ ID NO: 45445 - DNA, 17 bp, Arabidopsis thaliana
agtggttgctcgagtgg

SEQ ID NO: 45446 - DNA, 17 bp, Arabidopsis thaliana
agtggttgtcactggca

SEQ ID NO: 45447 - DNA, 17 bp, Arabidopsis thaliana
agtggttgtgcagatta

SEQ ID NO: 45448 - DNA, 17 bp, Arabidopsis thaliana
agtggtttccgccaaaa

SEQ ID NO: 45449 - DNA, 17 bp, Arabidopsis thaliana
agtggttttgcagatta

SEQ ID NO: 45450 - DNA, 17 bp, Arabidopsis thaliana
agtgtaaattcacatgg

SEQ ID NO: 45451 - DNA, 17 bp, Arabidopsis thaliana
agtgtaacagccaagca

SEQ ID NO: 45452 - DNA, 17 bp, Arabidopsis thaliana
agtgtaaccctgcggtg

SEQ ID NO: 45453 - DNA, 17 bp, Arabidopsis thaliana
agtgtaatcagctgcgt

SEQ ID NO: 45454 - DNA, 17 bp, Arabidopsis thaliana
agtgtaattcaattcga

SEQ ID NO: 45455 - DNA, 17 bp, Arabidopsis thaliana
agtgtaattgtgacacc

SEQ ID NO: 45456 - DNA, 17 bp, Arabidopsis thaliana
agtgtacagagcgaact

SEQ ID NO: 45457 - DNA, 17 bp, Arabidopsis thaliana
agtgtacccatctcgtt

SEQ ID NO: 45458 - DNA, 17 bp, Arabidopsis thaliana
agtgtagactggctcag

SEQ ID NO: 45459 - DNA, 17 bp, Arabidopsis thaliana
agtgtagcagacgagag

SEQ ID NO: 45460 - DNA, 17 bp, Arabidopsis thaliana
agtgtagctcgttggac

SEQ ID NO: 45461 - DNA, 17 bp, Arabidopsis thaliana
agtgtaggccttcattt

SEQ ID NO: 45462 - DNA, 17 bp, Arabidopsis thaliana
agtgtagggcacgtgtc

SEQ ID NO: 45463 - DNA, 17 bp, Arabidopsis thaliana
agtgtaggttccgtgtt

SEQ ID NO: 45464 - DNA, 17 bp, Arabidopsis thaliana
agtgtataggctatggt

SEQ ID NO: 45465 - DNA, 17 bp, Arabidopsis thaliana
agtgtatcagttgtgct

SEQ ID NO: 45466 - DNA, 17 bp, Arabidopsis thaliana
agtgtatccatctcgtt

SEQ ID NO: 45467 - DNA, 17 bp, Arabidopsis thaliana
agtgtatctgcttctgc

SEQ ID NO: 45468 - DNA, 17 bp, Arabidopsis thaliana
agtgtatctgcttctgt

SEQ ID NO: 45469 - DNA, 17 bp, Arabidopsis thaliana
agtgtatgattggtgcc

SEQ ID NO: 45470 - DNA, 17 bp, Arabidopsis thaliana
agtgtatgcctgatacg

SEQ ID NO: 45471 - DNA, 17 bp, Arabidopsis thaliana
agtgtattcccaggact

SEQ ID NO: 45472 - DNA, 17 bp, Arabidopsis thaliana
agtgtcaaatgtgactt

SEQ ID NO: 45473 - DNA, 17 bp, Arabidopsis thaliana
agtgtcaaattcgccga

SEQ ID NO: 45474 - DNA, 17 bp, Arabidopsis thaliana
agtgtcaagaagacgga

SEQ ID NO: 45475 - DNA, 17 bp, Arabidopsis thaliana
agtgtcaattccctaga

SEQ ID NO: 45476 - DNA, 17 bp, Arabidopsis thaliana
agtgtcacacgtgcgag

SEQ ID NO: 45477 - DNA, 17 bp, Arabidopsis thaliana
agtgtcacagagtgagg

SEQ ID NO: 45478 - DNA, 17 bp, Arabidopsis thaliana
agtgtcacggtgattgg

SEQ ID NO: 45479 - DNA, 17 bp, Arabidopsis thaliana
agtgtcacggttcccta

SEQ ID NO: 45480 - DNA, 17 bp, Arabidopsis thaliana
agtgtcagaacgagggc

SEQ ID NO: 45481 - DNA, 17 bp, Arabidopsis thaliana
agtgtcagcgaatgtaa

SEQ ID NO: 45482 - DNA, 17 bp, Arabidopsis thaliana
agtgtcagctaggtttt

SEQ ID NO: 45483 - DNA, 17 bp, Arabidopsis thaliana
agtgtcagtgtggaagc

SEQ ID NO: 45484 - DNA, 17 bp, Arabidopsis thaliana
agtgtcatcatgctgtt

SEQ ID NO: 45485 - DNA, 17 bp, Arabidopsis thaliana
agtgtcatctggacagt

SEQ ID NO: 45486 - DNA, 17 bp, Arabidopsis thaliana
agtgtcatgctcttttt

SEQ ID NO: 45487 - DNA, 17 bp, Arabidopsis thaliana
agtgtccaaagttagga

SEQ ID NO: 45488 - DNA, 17 bp, Arabidopsis thaliana
agtgtccaagacaagtt

SEQ ID NO: 45489 - DNA, 17 bp, Arabidopsis thaliana
agtgtccagaccacaca

SEQ ID NO: 45490 - DNA, 17 bp, Arabidopsis thaliana
agtgtccagtcaacgtt

SEQ ID NO: 45491 - DNA, 17 bp, Arabidopsis thaliana
agtgtcccatccctgac

SEQ ID NO: 45492 - DNA, 17 bp, Arabidopsis thaliana
agtgtccgacctgccaa

SEQ ID NO: 45493 - DNA, 17 bp, Arabidopsis thaliana
agtgtccggcgctgcga

SEQ ID NO: 45494 - DNA, 17 bp, Arabidopsis thaliana
agtgtcctcagcgacgg

SEQ ID NO: 45495 - DNA, 17 bp, Arabidopsis thaliana
agtgtcctcgaccattt

SEQ ID NO: 45496 - DNA, 17 bp, Arabidopsis thaliana
agtgtcctcttgctcgt

SEQ ID NO: 45497 - DNA, 17 bp, Arabidopsis thaliana
agtgtcgacaagcggcg

SEQ ID NO: 45498 - DNA, 17 bp, Arabidopsis thaliana
agtgtcgacgcgggctc

SEQ ID NO: 45499 - DNA, 17 bp, Arabidopsis thaliana
agtgtcgacggcggaga

SEQ ID NO: 45500 - DNA, 17 bp, Arabidopsis thaliana
agtgtcgatctaacgtt

SEQ ID NO: 45501 - DNA, 17 bp, Arabidopsis thaliana
agtgtcgatgcaagaac

SEQ ID NO: 45502 - DNA, 17 bp, Arabidopsis thaliana
agtgtcgatgttcggcc

SEQ ID NO: 45503 - DNA, 17 bp, Arabidopsis thaliana
agtgtcgcagaggacga

SEQ ID NO: 45504 - DNA, 17 bp, Arabidopsis thaliana
agtgtcgcatctctgca

SEQ ID NO: 45505 - DNA, 17 bp, Arabidopsis thaliana
agtgtcgctatgttgtt

SEQ ID NO: 45506 - DNA, 17 bp, Arabidopsis thaliana
agtgtcgggtcaaggtg

SEQ ID NO: 45507 - DNA, 17 bp, Arabidopsis thaliana
agtgtcggtctaacgtt

SEQ ID NO: 45508 - DNA, 17 bp, Arabidopsis thaliana
agtgtcggtctaacttt

SEQ ID NO: 45509 - DNA, 17 bp, Arabidopsis thaliana
agtgtcggtgacaatga

SEQ ID NO: 45510 - DNA, 17 bp, Arabidopsis thaliana
agtgtcgtcagccatga

SEQ ID NO: 45511 - DNA, 17 bp, Arabidopsis thaliana
agtgtcgtccaaggtcc

SEQ ID NO: 45512 - DNA, 17 bp, Arabidopsis thaliana
agtgtcgtcccacgggt

SEQ ID NO: 45513 - DNA, 17 bp, Arabidopsis thaliana
agtgtcgtctgtcgtgg

SEQ ID NO: 45514 - DNA, 17 bp, Arabidopsis thaliana
agtgtcgtctttccact

SEQ ID NO: 45515 - DNA, 17 bp, Arabidopsis thaliana
agtgtcgtgagtcgtga

SEQ ID NO: 45516 - DNA, 17 bp, Arabidopsis thaliana
agtgtctaaaccggcta

SEQ ID NO: 45517 - DNA, 17 bp, Arabidopsis thaliana
agtgtctaagtctgtgc

SEQ ID NO: 45518 - DNA, 17 bp, Arabidopsis thaliana
agtgtctaatgattgtg

SEQ ID NO: 45519 - DNA, 17 bp, Arabidopsis thaliana
agtgtctacagcttctt

SEQ ID NO: 45520 - DNA, 17 bp, Arabidopsis thaliana
agtgtctaccgctgttg

SEQ ID NO: 45521 - DNA, 17 bp, Arabidopsis thaliana
agtgtctactcttttgg

SEQ ID NO: 45522 - DNA, 17 bp, Arabidopsis thaliana
agtgtctacttctttgg

SEQ ID NO: 45523 - DNA, 17 bp, Arabidopsis thaliana
agtgtctactttgccaa

SEQ ID NO: 45524 - DNA, 17 bp, Arabidopsis thaliana
agtgtctaggaattggc

SEQ ID NO: 45525 - DNA, 17 bp, Arabidopsis thaliana
agtgtctatactttgct

SEQ ID NO: 45526 - DNA, 17 bp, Arabidopsis thaliana
agtgtctatgagacttg

SEQ ID NO: 45527 - DNA, 17 bp, Arabidopsis thaliana
agtgtctcatccctgac

SEQ ID NO: 45528 - DNA, 17 bp, Arabidopsis thaliana
agtgtctcatctctgca

SEQ ID NO: 45529 - DNA, 17 bp, Arabidopsis thaliana
agtgtctccgcccctgt

SEQ ID NO: 45530 - DNA, 17 bp, Arabidopsis thaliana
agtgtctctcctgttca

SEQ ID NO: 45531 - DNA, 17 bp, Arabidopsis thaliana
agtgtctgaatggtaac

SEQ ID NO: 45532 - DNA, 17 bp, Arabidopsis thaliana
agtgtctgagctacgag

SEQ ID NO: 45533 - DNA, 17 bp, Arabidopsis thaliana
agtgtctgctggattca

SEQ ID NO: 45534 - DNA, 17 bp, Arabidopsis thaliana
agtgtctggaatcaatt

SEQ ID NO: 45535 - DNA, 17 bp, Arabidopsis thaliana
agtgtctgggccttaga

SEQ ID NO: 45536 - DNA, 17 bp, Arabidopsis thaliana
agtgtctgggcctttga

SEQ ID NO: 45537 - DNA, 17 bp, Arabidopsis thaliana
agtgtctgttggtgcca

SEQ ID NO: 45538 - DNA, 17 bp, Arabidopsis thaliana
agtgtcttcggacgatg

SEQ ID NO: 45539 - DNA, 17 bp, Arabidopsis thaliana
agtgtcttcggaggtgt

SEQ ID NO: 45540 - DNA, 17 bp, Arabidopsis thaliana
agtgtcttcggctgtag

SEQ ID NO: 45541 - DNA, 17 bp, Arabidopsis thaliana
agtgtcttctccctcat

SEQ ID NO: 45542 - DNA, 17 bp, Arabidopsis thaliana
agtgtcttctccgacaa

SEQ ID NO: 45543 - DNA, 17 bp, Arabidopsis thaliana
agtgtcttgagcgtctg

SEQ ID NO: 45544 - DNA, 17 bp, Arabidopsis thaliana
agtgtctttggctggga

SEQ ID NO: 45545 - DNA, 17 bp, Arabidopsis thaliana
agtgtgaatctagtgag

SEQ ID NO: 45546 - DNA, 17 bp, Arabidopsis thaliana
agtgtgaatttcagaac

SEQ ID NO: 45547 - DNA, 17 bp, Arabidopsis thaliana
agtgtgacagaggtgcc

SEQ ID NO: 45548 - DNA, 17 bp, Arabidopsis thaliana
agtgtgacgacaacctg

SEQ ID NO: 45549 - DNA, 17 bp, Arabidopsis thaliana
agtgtgacggatttgga

SEQ ID NO: 45550 - DNA, 17 bp, Arabidopsis thaliana
agtgtgacggtttctgt

SEQ ID NO: 45551 - DNA, 17 bp, Arabidopsis thaliana
agtgtgactgacatgcc

SEQ ID NO: 45552 - DNA, 17 bp, Arabidopsis thaliana
agtgtgactttgctgcc

SEQ ID NO: 45553 - DNA, 17 bp, Arabidopsis thaliana
agtgtgactttgtccac

SEQ ID NO: 45554 - DNA, 17 bp, Arabidopsis thaliana
agtgtgacttttggtgt

SEQ ID NO: 45555 - DNA, 17 bp, Arabidopsis thaliana
agtgtgagcatgcctgt

SEQ ID NO: 45556 - DNA, 17 bp, Arabidopsis thaliana
agtgtgagtgcttggac

SEQ ID NO: 45557 - DNA, 17 bp, Arabidopsis thaliana
agtgtgatctgacacca

SEQ ID NO: 45558 - DNA, 17 bp, Arabidopsis thaliana
agtgtgcaggacatcta

SEQ ID NO: 45559 - DNA, 17 bp, Arabidopsis thaliana
agtgtgcatcaggcaag

SEQ ID NO: 45560 - DNA, 17 bp, Arabidopsis thaliana
agtgtgcatcaggcaat

SEQ ID NO: 45561 - DNA, 17 bp, Arabidopsis thaliana
agtgtgcattggtcggc

SEQ ID NO: 45562 - DNA, 17 bp, Arabidopsis thaliana
agtgtgcattggtcggt

SEQ ID NO: 45563 - DNA, 17 bp, Arabidopsis thaliana
agtgtgcgaatccgaca

SEQ ID NO: 45564 - DNA, 17 bp, Arabidopsis thaliana
agtgtgcgtagtccggt

SEQ ID NO: 45565 - DNA, 17 bp, Arabidopsis thaliana
agtgtgctactgtctgg

SEQ ID NO: 45566 - DNA, 17 bp, Arabidopsis thaliana
agtgtgctagtgcaccg

SEQ ID NO: 45567 - DNA, 17 bp, Arabidopsis thaliana
agtgtggaccaagcgtt

SEQ ID NO: 45568 - DNA, 17 bp, Arabidopsis thaliana
agtgtggaccacgcgct

SEQ ID NO: 45569 - DNA, 17 bp, Arabidopsis thaliana
agtgtggacgacgtgga

SEQ ID NO: 45570 - DNA, 17 bp, Arabidopsis thaliana
agtgtggactaatctgt

SEQ ID NO: 45571 - DNA, 17 bp, Arabidopsis thaliana
agtgtggatttcagaac

SEQ ID NO: 45572 - DNA, 17 bp, Arabidopsis thaliana
agtgtggatttcagagc

SEQ ID NO: 45573 - DNA, 17 bp, Arabidopsis thaliana
agtgtgggatacgagct

SEQ ID NO: 45574 - DNA, 17 bp, Arabidopsis thaliana
agtgtgggctttcttaa

SEQ ID NO: 45575 - DNA, 17 bp, Arabidopsis thaliana
agtgtgggctttcttcc

SEQ ID NO: 45576 - DNA, 17 bp, Arabidopsis thaliana
agtgtggtacggttcaa

SEQ ID NO: 45577 - DNA, 17 bp, Arabidopsis thaliana
agtgtggtgatccttct

SEQ ID NO: 45578 - DNA, 17 bp, Arabidopsis thaliana
agtgtggtggtccattt

SEQ ID NO: 45579 - DNA, 17 bp, Arabidopsis thaliana
agtgtggttgaccatat

SEQ ID NO: 45580 - DNA, 17 bp, Arabidopsis thaliana
agtgtggttgactatat

SEQ ID NO: 45581 - DNA, 17 bp, Arabidopsis thaliana
agtgtggttgcgattcc

SEQ ID NO: 45582 - DNA, 17 bp, Arabidopsis thaliana
agtgtgtaacaactcac

SEQ ID NO: 45583 - DNA, 17 bp, Arabidopsis thaliana
agtgtgtatggttcatc

SEQ ID NO: 45584 - DNA, 17 bp, Arabidopsis thaliana
agtgtgtcgatggtttt

SEQ ID NO: 45585 - DNA, 17 bp, Arabidopsis thaliana
agtgtgtcggactctct

SEQ ID NO: 45586 - DNA, 17 bp, Arabidopsis thaliana
agtgtgtgaatccgaca

SEQ ID NO: 45587 - DNA, 17 bp, Arabidopsis thaliana
agtgtgtgactggttac

SEQ ID NO: 45588 - DNA, 17 bp, Arabidopsis thaliana
agtgtgtgattggttcg

SEQ ID NO: 45589 - DNA, 17 bp, Arabidopsis thaliana
agtgtgtggaccacgcg

SEQ ID NO: 45590 - DNA, 17 bp, Arabidopsis thaliana
agtgtgtgttaagcatt

SEQ ID NO: 45591 - DNA, 17 bp, Arabidopsis thaliana
agtgtgtttacgactga

SEQ ID NO: 45592 - DNA, 17 bp, Arabidopsis thaliana
agtgtgtttatgactga

SEQ ID NO: 45593 - DNA, 17 bp, Arabidopsis thaliana
agtgtgtttcgactttt

SEQ ID NO: 45594 - DNA, 17 bp, Arabidopsis thaliana
agtgtgtttttttggct

SEQ ID NO: 45595 - DNA, 17 bp, Arabidopsis thaliana
agtgttaaaatccgata

SEQ ID NO: 45596 - DNA, 17 bp, Arabidopsis thaliana
agtgttaaggcctgtta

SEQ ID NO: 45597 - DNA, 17 bp, Arabidopsis thaliana
agtgttaatgttccttg

SEQ ID NO: 45598 - DNA, 17 bp, Arabidopsis thaliana
agtgttacagcactgtt

SEQ ID NO: 45599 - DNA, 17 bp, Arabidopsis thaliana
agtgttacagttttgtg

SEQ ID NO: 45600 - DNA, 17 bp, Arabidopsis thaliana
agtgttaccggatttcc

SEQ ID NO: 45601 - DNA, 17 bp, Arabidopsis thaliana
agtgttactaaatcatc

SEQ ID NO: 45602 - DNA, 17 bp, Arabidopsis thaliana
agtgttactctatctgt

SEQ ID NO: 45603 - DNA, 17 bp, Arabidopsis thaliana
agtgttagcactgtttc

SEQ ID NO: 45604 - DNA, 17 bp, Arabidopsis thaliana
agtgttagcagtggtga

SEQ ID NO: 45605 - DNA, 17 bp, Arabidopsis thaliana
agtgttatactttgggc

SEQ ID NO: 45606 - DNA, 17 bp, Arabidopsis thaliana
agtgttatccaggatca

SEQ ID NO: 45607 - DNA, 17 bp, Arabidopsis thaliana
agtgttatcggacagta

SEQ ID NO: 45608 - DNA, 17 bp, Arabidopsis thaliana
agtgttatctcgtttac

SEQ ID NO: 45609 - DNA, 17 bp, Arabidopsis thaliana
agtgttatctgcaggtg

SEQ ID NO: 45610 - DNA, 17 bp, Arabidopsis thaliana
agtgttattcattgcag

SEQ ID NO: 45611 - DNA, 17 bp, Arabidopsis thaliana
agtgttcaagccggatt

SEQ ID NO: 45612 - DNA, 17 bp, Arabidopsis thaliana
agtgttcattaacaggg

SEQ ID NO: 45613 - DNA, 17 bp, Arabidopsis thaliana
agtgttccgcgctgcac

SEQ ID NO: 45614 - DNA, 17 bp, Arabidopsis thaliana
agtgttccgtctctctg

SEQ ID NO: 45615 - DNA, 17 bp, Arabidopsis thaliana
agtgttcgacctattat

SEQ ID NO: 45616 - DNA, 17 bp, Arabidopsis thaliana
agtgttcgacctattgt

SEQ ID NO: 45617 - DNA, 17 bp, Arabidopsis thaliana
agtgttcgataactagg

SEQ ID NO: 45618 - DNA, 17 bp, Arabidopsis thaliana
agtgttcgatagaatgc

SEQ ID NO: 45619 - DNA, 17 bp, Arabidopsis thaliana
agtgttcgatagattga

SEQ ID NO: 45620 - DNA, 17 bp, Arabidopsis thaliana
agtgttcgattctagaa

SEQ ID NO: 45621 - DNA, 17 bp, Arabidopsis thaliana
agtgttcgattctagca

SEQ ID NO: 45622 - DNA, 17 bp, Arabidopsis thaliana
agtgttcggatcccggc

SEQ ID NO: 45623 - DNA, 17 bp, Arabidopsis thaliana
agtgttcggatcgcggc

SEQ ID NO: 45624 - DNA, 17 bp, Arabidopsis thaliana
agtgttcggatcgtggc

SEQ ID NO: 45625 - DNA, 17 bp, Arabidopsis thaliana
agtgttcggctcccggt

SEQ ID NO: 45626 - DNA, 17 bp, Arabidopsis thaliana
agtgttcgggtattcat

SEQ ID NO: 45627 - DNA, 17 bp, Arabidopsis thaliana
agtgttctcgcggtcgg

SEQ ID NO: 45628 - DNA, 17 bp, Arabidopsis thaliana
agtgttctctagtctgg

SEQ ID NO: 45629 - DNA, 17 bp, Arabidopsis thaliana
agtgttctgcctctacc

SEQ ID NO: 45630 - DNA, 17 bp, Arabidopsis thaliana
agtgttctgcgctgcac

SEQ ID NO: 45631 - DNA, 17 bp, Arabidopsis thaliana
agtgttcttacagccgc

SEQ ID NO: 45632 - DNA, 17 bp, Arabidopsis thaliana
agtgttgaactagaagt

SEQ ID NO: 45633 - DNA, 17 bp, Arabidopsis thaliana
agtgttgaacttaaccg

SEQ ID NO: 45634 - DNA, 17 bp, Arabidopsis thaliana
agtgttgacagagtctg

SEQ ID NO: 45635 - DNA, 17 bp, Arabidopsis thaliana
agtgttgaccggcgtcg

SEQ ID NO: 45636 - DNA, 17 bp, Arabidopsis thaliana
agtgttgaccggcgttg

SEQ ID NO: 45637 - DNA, 17 bp, Arabidopsis thaliana
agtgttgaccgtcgttg

SEQ ID NO: 45638 - DNA, 17 bp, Arabidopsis thaliana
agtgttgacctgcgttg

SEQ ID NO: 45639 - DNA, 17 bp, Arabidopsis thaliana
agtgttgacgctaccgg

SEQ ID NO: 45640 - DNA, 17 bp, Arabidopsis thaliana
agtgttgactggcgggt

SEQ ID NO: 45641 - DNA, 17 bp, Arabidopsis thaliana
agtgttgagcgacccgg

SEQ ID NO: 45642 - DNA, 17 bp, Arabidopsis thaliana
agtgttgatcggaattg

SEQ ID NO: 45643 - DNA, 17 bp, Arabidopsis thaliana
agtgttgatggtcttca

SEQ ID NO: 45644 - DNA, 17 bp, Arabidopsis thaliana
agtgttgattcaaaaac

SEQ ID NO: 45645 - DNA, 17 bp, Arabidopsis thaliana
agtgttgattgatccag

SEQ ID NO: 45646 - DNA, 17 bp, Arabidopsis thaliana
agtgttgattgctggaa

SEQ ID NO: 45647 - DNA, 17 bp, Arabidopsis thaliana
agtgttgcaactgacct

SEQ ID NO: 45648 - DNA, 17 bp, Arabidopsis thaliana
agtgttgcagtcgtggt

SEQ ID NO: 45649 - DNA, 17 bp, Arabidopsis thaliana
agtgttgcgacggattt

SEQ ID NO: 45650 - DNA, 17 bp, Arabidopsis thaliana
agtgttgctgtggacga

SEQ ID NO: 45651 - DNA, 17 bp, Arabidopsis thaliana
agtgttgctttcggact

SEQ ID NO: 45652 - DNA, 17 bp, Arabidopsis thaliana
agtgttggacttggaca

SEQ ID NO: 45653 - DNA, 17 bp, Arabidopsis thaliana
agtgttggattgttcac

SEQ ID NO: 45654 - DNA, 17 bp, Arabidopsis thaliana
agtgttggcggacaaga

SEQ ID NO: 45655 - DNA, 17 bp, Arabidopsis thaliana
agtgttggcggacagga

SEQ ID NO: 45656 - DNA, 17 bp, Arabidopsis thaliana
agtgttggtccaccttt

SEQ ID NO: 45657 - DNA, 17 bp, Arabidopsis thaliana
agtgttggttaaagctt

SEQ ID NO: 45658 - DNA, 17 bp, Arabidopsis thaliana
agtgttgtcatcgtgaa

SEQ ID NO: 45659 - DNA, 17 bp, Arabidopsis thaliana
agtgttgtctaaagact

SEQ ID NO: 45660 - DNA, 17 bp, Arabidopsis thaliana
agtgttgtggaagcact

SEQ ID NO: 45661 - DNA, 17 bp, Arabidopsis thaliana
agtgttgtggcacttac

SEQ ID NO: 45662 - DNA, 17 bp, Arabidopsis thaliana
agtgttgtggcatttac

SEQ ID NO: 45663 - DNA, 17 bp, Arabidopsis thaliana
agtgttgttcgtttgac

SEQ ID NO: 45664 - DNA, 17 bp, Arabidopsis thaliana
agtgttgttctctcgga

SEQ ID NO: 45665 - DNA, 17 bp, Arabidopsis thaliana
agtgttgttgtcttcac

SEQ ID NO: 45666 - DNA, 17 bp, Arabidopsis thaliana
agtgtttaaaccagtca

SEQ ID NO: 45667 - DNA, 17 bp, Arabidopsis thaliana
agtgtttaaccgactgc

SEQ ID NO: 45668 - DNA, 17 bp, Arabidopsis thaliana
agtgtttaccggcgaat

SEQ ID NO: 45669 - DNA, 17 bp, Arabidopsis thaliana
agtgtttacctatggaa

SEQ ID NO: 45670 - DNA, 17 bp, Arabidopsis thaliana
agtgtttagaaactcag

SEQ ID NO: 45671 - DNA, 17 bp, Arabidopsis thaliana
agtgtttaggttgttgg

SEQ ID NO: 45672 - DNA, 17 bp, Arabidopsis thaliana
agtgtttatacgggcaa

SEQ ID NO: 45673 - DNA, 17 bp, Arabidopsis thaliana
agtgtttcaggtgtatg

SEQ ID NO: 45674 - DNA, 17 bp, Arabidopsis thaliana
agtgtttcatcacttag

SEQ ID NO: 45675 - DNA, 17 bp, Arabidopsis thaliana
agtgtttccattcacag

SEQ ID NO: 45676 - DNA, 17 bp, Arabidopsis thaliana
agtgtttccttggaata

SEQ ID NO: 45677 - DNA, 17 bp, Arabidopsis thaliana
agtgtttcgacagtttt

SEQ ID NO: 45678 - DNA, 17 bp, Arabidopsis thaliana
agtgtttcgacggtttt

SEQ ID NO: 45679 - DNA, 17 bp, Arabidopsis thaliana
agtgtttctatggtcaa

SEQ ID NO: 45680 - DNA, 17 bp, Arabidopsis thaliana
agtgtttcttatcgcaa

SEQ ID NO: 45681 - DNA, 17 bp, Arabidopsis thaliana
agtgtttcttccgttct

SEQ ID NO: 45682 - DNA, 17 bp, Arabidopsis thaliana
agtgtttcttgcgttcg

SEQ ID NO: 45683 - DNA, 17 bp, Arabidopsis thaliana
agtgtttgacccgcttg

SEQ ID NO: 45684 - DNA, 17 bp, Arabidopsis thaliana
agtgtttgagaccagtg

SEQ ID NO: 45685 - DNA, 17 bp, Arabidopsis thaliana
agtgtttgatgaaatgt

SEQ ID NO: 45686 - DNA, 17 bp, Arabidopsis thaliana
agtgtttgatgatggag

SEQ ID NO: 45687 - DNA, 17 bp, Arabidopsis thaliana
agtgtttgatgatgtag

SEQ ID NO: 45688 - DNA, 17 bp, Arabidopsis thaliana
agtgtttgattggttgg

SEQ ID NO: 45689 - DNA, 17 bp, Arabidopsis thaliana
agtgtttgattggttgt

SEQ ID NO: 45690 - DNA, 17 bp, Arabidopsis thaliana
agtgtttgcaggctgtt

SEQ ID NO: 45691 - DNA, 17 bp, Arabidopsis thaliana
agtgtttgggatacatt

SEQ ID NO: 45692 - DNA, 17 bp, Arabidopsis thaliana
agtgtttgtggcgattt

SEQ ID NO: 45693 - DNA, 17 bp, Arabidopsis thaliana
agtgtttgtgttcggat

SEQ ID NO: 45694 - DNA, 17 bp, Arabidopsis thaliana
agtgtttgttccattcc

SEQ ID NO: 45695 - DNA, 17 bp, Arabidopsis thaliana
agtgtttgttgacttgc

SEQ ID NO: 45696 - DNA, 17 bp, Arabidopsis thaliana
agtgtttgttgattcat

SEQ ID NO: 45697 - DNA, 17 bp, Arabidopsis thaliana
agtgttttctggactga

SEQ ID NO: 45698 - DNA, 17 bp, Arabidopsis thaliana
agtgttttgaacgactg

SEQ ID NO: 45699 - DNA, 17 bp, Arabidopsis thaliana
agtgttttgctcagaat

SEQ ID NO: 45700 - DNA, 17 bp, Arabidopsis thaliana
agtgttttttgatcaaa

SEQ ID NO: 45701 - DNA, 17 bp, Arabidopsis thaliana
agttaaacttcaccaac

SEQ ID NO: 45702 - DNA, 17 bp, Arabidopsis thaliana
agttaacaaaacttgac

SEQ ID NO: 45703 - DNA, 17 bp, Arabidopsis thaliana
agttaacaagatgtact

SEQ ID NO: 45704 - DNA, 17 bp, Arabidopsis thaliana
agttaacacatccgtta

SEQ ID NO: 45705 - DNA, 17 bp, Arabidopsis thaliana
agttaaccacagcttga

SEQ ID NO: 45706 - DNA, 17 bp, Arabidopsis thaliana
agttaaccgacattgac

SEQ ID NO: 45707 - DNA, 17 bp, Arabidopsis thaliana
agttaaccgcacgatta

SEQ ID NO: 45708 - DNA, 17 bp, Arabidopsis thaliana
agttaaccttcacggca

SEQ ID NO: 45709 - DNA, 17 bp, Arabidopsis thaliana
agttaacgactgttagt

SEQ ID NO: 45710 - DNA, 17 bp, Arabidopsis thaliana
agttaacggtcgttatc

SEQ ID NO: 45711 - DNA, 17 bp, Arabidopsis thaliana
agttaacgtctcgggat

SEQ ID NO: 45712 - DNA, 17 bp, Arabidopsis thaliana
agttaacgtctcgggga

SEQ ID NO: 45713 - DNA, 17 bp, Arabidopsis thaliana
agttaacgtttcgggat

SEQ ID NO: 45714 - DNA, 17 bp, Arabidopsis thaliana
agttaacgtttcgtgat

SEQ ID NO: 45715 - DNA, 17 bp, Arabidopsis thaliana
agttaacttgcttgatt

SEQ ID NO: 45716 - DNA, 17 bp, Arabidopsis thaliana
agttaagaaatgtgagt

SEQ ID NO: 45717 - DNA, 17 bp, Arabidopsis thaliana
agttaagacttatttac

SEQ ID NO: 45718 - DNA, 17 bp, Arabidopsis thaliana
agttaagccctgttcgt

SEQ ID NO: 45719 - DNA, 17 bp, Arabidopsis thaliana
agttaagcgactaccgt

SEQ ID NO: 45720 - DNA, 17 bp, Arabidopsis thaliana
agttaagcgctgccaaa

SEQ ID NO: 45721 - DNA, 17 bp, Arabidopsis thaliana
agttaagcgtgactaag

SEQ ID NO: 45722 - DNA, 17 bp, Arabidopsis thaliana
agttaagcgtgcttcgg

SEQ ID NO: 45723 - DNA, 17 bp, Arabidopsis thaliana
agttaagcgtgcttggg

SEQ ID NO: 45724 - DNA, 17 bp, Arabidopsis thaliana
agttaagcgtgctttgg

SEQ ID NO: 45725 - DNA, 17 bp, Arabidopsis thaliana
agttaaggttttggtta

SEQ ID NO: 45726 - DNA, 17 bp, Arabidopsis thaliana
agttaagtcagccgtgt

SEQ ID NO: 45727 - DNA, 17 bp, Arabidopsis thaliana
agttaagtcggcaggag

SEQ ID NO: 45728 - DNA, 17 bp, Arabidopsis thaliana
agttaagtctgcagatg

SEQ ID NO: 45729 - DNA, 17 bp, Arabidopsis thaliana
agttaagtgtccaccat

SEQ ID NO: 45730 - DNA, 17 bp, Arabidopsis thaliana
agttaatataactttgc

SEQ ID NO: 45731 - DNA, 17 bp, Arabidopsis thaliana
agttaatcaacagtgtc

SEQ ID NO: 45732 - DNA, 17 bp, Arabidopsis thaliana
agttaatcacagcttga

SEQ ID NO: 45733 - DNA, 17 bp, Arabidopsis thaliana
agttaatcatagcttga

SEQ ID NO: 45734 - DNA, 17 bp, Arabidopsis thaliana
agttaatctcggtttaa

SEQ ID NO: 45735 - DNA, 17 bp, Arabidopsis thaliana
agttaatgcaatcaccg

SEQ ID NO: 45736 - DNA, 17 bp, Arabidopsis thaliana
agttaattaggtttttg

SEQ ID NO: 45737 - DNA, 17 bp, Arabidopsis thaliana
agttaattcacgggcga

SEQ ID NO: 45738 - DNA, 17 bp, Arabidopsis thaliana
agttaatttagttgact

SEQ ID NO: 45739 - DNA, 17 bp, Arabidopsis thaliana
agttacaactaattaaa

SEQ ID NO: 45740 - DNA, 17 bp, Arabidopsis thaliana
agttacaacttttttta

SEQ ID NO: 45741 - DNA, 17 bp, Arabidopsis thaliana
agttacaattcccgcta

SEQ ID NO: 45742 - DNA, 17 bp, Arabidopsis thaliana
agttacacaaacgctgc

SEQ ID NO: 45743 - DNA, 17 bp, Arabidopsis thaliana
agttacacgacgacatt

SEQ ID NO: 45744 - DNA, 17 bp, Arabidopsis thaliana
agttacagataccacct

SEQ ID NO: 45745 - DNA, 17 bp, Arabidopsis thaliana
agttacagcccaaccaa

SEQ ID NO: 45746 - DNA, 17 bp, Arabidopsis thaliana
agttacagctgcttgct

SEQ ID NO: 45747 - DNA, 17 bp, Arabidopsis thaliana
agttacaggctcaccac

SEQ ID NO: 45748 - DNA, 17 bp, Arabidopsis thaliana
agttacaggtttttggc

SEQ ID NO: 45749 - DNA, 17 bp, Arabidopsis thaliana
agttacagtctaaccaa

SEQ ID NO: 45750 - DNA, 17 bp, Arabidopsis thaliana
agttacagtctccatag

SEQ ID NO: 45751 - DNA, 17 bp, Arabidopsis thaliana
agttacagtgcaaggcg

SEQ ID NO: 45752 - DNA, 17 bp, Arabidopsis thaliana
agttacatgggattccg

SEQ ID NO: 45753 - DNA, 17 bp, Arabidopsis thaliana
agttacattgttacaga

SEQ ID NO: 45754 - DNA, 17 bp, Arabidopsis thaliana
agttaccacagagttct

SEQ ID NO: 45755 - DNA, 17 bp, Arabidopsis thaliana
agttaccacagggataa

SEQ ID NO: 45756 - DNA, 17 bp, Arabidopsis thaliana
agttaccacataaacaa

SEQ ID NO: 45757 - DNA, 17 bp, Arabidopsis thaliana
agttaccaccgagcggc

SEQ ID NO: 45758 - DNA, 17 bp, Arabidopsis thaliana
agttaccacgcaattcc

SEQ ID NO: 45759 - DNA, 17 bp, Arabidopsis thaliana
agttaccacgcagttgc

SEQ ID NO: 45760 - DNA, 17 bp, Arabidopsis thaliana
agttaccatcggaccct

SEQ ID NO: 45761 - DNA, 17 bp, Arabidopsis thaliana
agttaccatcttttctg

SEQ ID NO: 45762 - DNA, 17 bp, Arabidopsis thaliana
agttacccgcacccttg

SEQ ID NO: 45763 - DNA, 17 bp, Arabidopsis thaliana
agttaccgtgcgctgga

SEQ ID NO: 45764 - DNA, 17 bp, Arabidopsis thaliana
agttaccgttgtttcag

SEQ ID NO: 45765 - DNA, 17 bp, Arabidopsis thaliana
agttacctcttcacctc

SEQ ID NO: 45766 - DNA, 17 bp, Arabidopsis thaliana
agttacgacaagaacag

SEQ ID NO: 45767 - DNA, 17 bp, Arabidopsis thaliana
agttacgacatacaacg

SEQ ID NO: 45768 - DNA, 17 bp, Arabidopsis thaliana
agttacgaggaccgaat

SEQ ID NO: 45769 - DNA, 17 bp, Arabidopsis thaliana
agttacgaggtgtggga

SEQ ID NO: 45770 - DNA, 17 bp, Arabidopsis thaliana
agttacgatcagacgga

SEQ ID NO: 45771 - DNA, 17 bp, Arabidopsis thaliana
agttacgattgcgggag

SEQ ID NO: 45772 - DNA, 17 bp, Arabidopsis thaliana
agttacgcgcatgaatg

SEQ ID NO: 45773 - DNA, 17 bp, Arabidopsis thaliana
agttacggaaaatgagc

SEQ ID NO: 45774 - DNA, 17 bp, Arabidopsis thaliana
agttacggctgacttac

SEQ ID NO: 45775 - DNA, 17 bp, Arabidopsis thaliana
agttacggctgagttac

SEQ ID NO: 45776 - DNA, 17 bp, Arabidopsis thaliana
agttacggtataccatg

SEQ ID NO: 45777 - DNA, 17 bp, Arabidopsis thaliana
agttacggtatgttgcg

SEQ ID NO: 45778 - DNA, 17 bp, Arabidopsis thaliana
agttacggtggcgagaa

SEQ ID NO: 45779 - DNA, 17 bp, Arabidopsis thaliana
agttacggttcaccatg

SEQ ID NO: 45780 - DNA, 17 bp, Arabidopsis thaliana
agttacgtccgaagatt

SEQ ID NO: 45781 - DNA, 17 bp, Arabidopsis thaliana
agttactaacagtcggc

SEQ ID NO: 45782 - DNA, 17 bp, Arabidopsis thaliana
agttactaactcatagg

SEQ ID NO: 45783 - DNA, 17 bp, Arabidopsis thaliana
agttactaactcttaag

SEQ ID NO: 45784 - DNA, 17 bp, Arabidopsis thaliana
agttactaatcatgatc

SEQ ID NO: 45785 - DNA, 17 bp, Arabidopsis thaliana
agttactaattaatgat

SEQ ID NO: 45786 - DNA, 17 bp, Arabidopsis thaliana
agttactaattaattaa

SEQ ID NO: 45787 - DNA, 17 bp, Arabidopsis thaliana
agttactaattcataaa

SEQ ID NO: 45788 - DNA, 17 bp, Arabidopsis thaliana
agttactaattcatgac

SEQ ID NO: 45789 - DNA, 17 bp, Arabidopsis thaliana
agttactaattcatgat

SEQ ID NO: 45790 - DNA, 17 bp, Arabidopsis thaliana
agttactaattcatgtt

SEQ ID NO: 45791 - DNA, 17 bp, Arabidopsis thaliana
agttactaattcattaa

SEQ ID NO: 45792 - DNA, 17 bp, Arabidopsis thaliana
agttactaattcattag

SEQ ID NO: 45793 - DNA, 17 bp, Arabidopsis thaliana
agttactaattcattat

SEQ ID NO: 45794 - DNA, 17 bp, Arabidopsis thaliana
agttactaattcatttc

SEQ ID NO: 45795 - DNA, 17 bp, Arabidopsis thaliana
agttactactacattac

SEQ ID NO: 45796 - DNA, 17 bp, Arabidopsis thaliana
agttactagataaggct

SEQ ID NO: 45797 - DNA, 17 bp, Arabidopsis thaliana
agttactagatattgac

SEQ ID NO: 45798 - DNA, 17 bp, Arabidopsis thaliana
agttactagatctgacc

SEQ ID NO: 45799 - DNA, 17 bp, Arabidopsis thaliana
agttactagattttgac

SEQ ID NO: 45800 - DNA, 17 bp, Arabidopsis thaliana
agttactaggtgaccat

SEQ ID NO: 45801 - DNA, 17 bp, Arabidopsis thaliana
agttactatcgcacccg

SEQ ID NO: 45802 - DNA, 17 bp, Arabidopsis thaliana
agttactatcgcaccgg

SEQ ID NO: 45803 - DNA, 17 bp, Arabidopsis thaliana
agttactcacgacgaat

SEQ ID NO: 45804 - DNA, 17 bp, Arabidopsis thaliana
agttactccgaattaca

SEQ ID NO: 45805 - DNA, 17 bp, Arabidopsis thaliana
agttactcgaacgggtc

SEQ ID NO: 45806 - DNA, 17 bp, Arabidopsis thaliana
agttactcgacctctag

SEQ ID NO: 45807 - DNA, 17 bp, Arabidopsis thaliana
agttactctatcggttc

SEQ ID NO: 45808 - DNA, 17 bp, Arabidopsis thaliana
agttactctgtcgttag

SEQ ID NO: 45809 - DNA, 17 bp, Arabidopsis thaliana
agttactcttactctct

SEQ ID NO: 45810 - DNA, 17 bp, Arabidopsis thaliana
agttactgcgatggatt

SEQ ID NO: 45811 - DNA, 17 bp, Arabidopsis thaliana
agttactggtttcagcg

SEQ ID NO: 45812 - DNA, 17 bp, Arabidopsis thaliana
agttactgtttgtttgc

SEQ ID NO: 45813 - DNA, 17 bp, Arabidopsis thaliana
agttacttcaactagtt

SEQ ID NO: 45814 - DNA, 17 bp, Arabidopsis thaliana
agttacttgacggaaat

SEQ ID NO: 45815 - DNA, 17 bp, Arabidopsis thaliana
agttacttggatacagt

SEQ ID NO: 45816 - DNA, 17 bp, Arabidopsis thaliana
agttagaaatgcagacg

SEQ ID NO: 45817 - DNA, 17 bp, Arabidopsis thaliana
agttagaaatgcaggcg

SEQ ID NO: 45818 - DNA, 17 bp, Arabidopsis thaliana
agttagaattctggcca

SEQ ID NO: 45819 - DNA, 17 bp, Arabidopsis thaliana
agttagacaacctctac

SEQ ID NO: 45820 - DNA, 17 bp, Arabidopsis thaliana
agttagaccgccagcat

SEQ ID NO: 45821 - DNA, 17 bp, Arabidopsis thaliana
agttagaccgcctgcat

SEQ ID NO: 45822 - DNA, 17 bp, Arabidopsis thaliana
agttagaccgcttatat

SEQ ID NO: 45823 - DNA, 17 bp, Arabidopsis thaliana
agttagaccgctttgtc

SEQ ID NO: 45824 - DNA, 17 bp, Arabidopsis thaliana
agttagcaggctgaggt

SEQ ID NO: 45825 - DNA, 17 bp, Arabidopsis thaliana
agttagcgatttcgtta

SEQ ID NO: 45826 - DNA, 17 bp, Arabidopsis thaliana
agttagctacgcatacg

SEQ ID NO: 45827 - DNA, 17 bp, Arabidopsis thaliana
agttagctagaccgtcg

SEQ ID NO: 45828 - DNA, 17 bp, Arabidopsis thaliana
agttagcttccgagatc

SEQ ID NO: 45829 - DNA, 17 bp, Arabidopsis thaliana
agttagcttgtgtgacc

SEQ ID NO: 45830 - DNA, 17 bp, Arabidopsis thaliana
agttagcttgttgagcc

SEQ ID NO: 45831 - DNA, 17 bp, Arabidopsis thaliana
agttaggacatctccaa

SEQ ID NO: 45832 - DNA, 17 bp, Arabidopsis thaliana
agttaggaccttgtctc

SEQ ID NO: 45833 - DNA, 17 bp, Arabidopsis thaliana
agttaggattgcgccat

SEQ ID NO: 45834 - DNA, 17 bp, Arabidopsis thaliana
agttaggatttaacctc

SEQ ID NO: 45835 - DNA, 17 bp, Arabidopsis thaliana
agttaggccacctgtat

SEQ ID NO: 45836 - DNA, 17 bp, Arabidopsis thaliana
agttaggccttggctgt

SEQ ID NO: 45837 - DNA, 17 bp, Arabidopsis thaliana
agttaggccttgggcca

SEQ ID NO: 45838 - DNA, 17 bp, Arabidopsis thaliana
agttaggtctggacatt

SEQ ID NO: 45839 - DNA, 17 bp, Arabidopsis thaliana
agttaggtcttgaccca

SEQ ID NO: 45840 - DNA, 17 bp, Arabidopsis thaliana
agttaggtggcaagctc

SEQ ID NO: 45841 - DNA, 17 bp, Arabidopsis thaliana
agttaggttgggttcga

SEQ ID NO: 45842 - DNA, 17 bp, Arabidopsis thaliana
agttaggtttaacgggt

SEQ ID NO: 45843 - DNA, 17 bp, Arabidopsis thaliana
agttagtaactcgcgag

SEQ ID NO: 45844 - DNA, 17 bp, Arabidopsis thaliana
agttagtacacagcgat

SEQ ID NO: 45845 - DNA, 17 bp, Arabidopsis thaliana
agttagtccctgttcat

SEQ ID NO: 45846 - DNA, 17 bp, Arabidopsis thaliana
agttagtccgtggcggt

SEQ ID NO: 45847 - DNA, 17 bp, Arabidopsis thaliana
agttagtccgtgggggt

SEQ ID NO: 45848 - DNA, 17 bp, Arabidopsis thaliana
agttagtcgccctgtag

SEQ ID NO: 45849 - DNA, 17 bp, Arabidopsis thaliana
agttagtctcagtgaca

SEQ ID NO: 45850 - DNA, 17 bp, Arabidopsis thaliana
agttagtctgcagcggt

SEQ ID NO: 45851 - DNA, 17 bp, Arabidopsis thaliana
agttagtcttcgatgga

SEQ ID NO: 45852 - DNA, 17 bp, Arabidopsis thaliana
agttagtcttcgatggt

SEQ ID NO: 45853 - DNA, 17 bp, Arabidopsis thaliana
agttagtgaggccagcc

SEQ ID NO: 45854 - DNA, 17 bp, Arabidopsis thaliana
agttagtgataagtcca

SEQ ID NO: 45855 - DNA, 17 bp, Arabidopsis thaliana
agttagtgcgattgcgg

SEQ ID NO: 45856 - DNA, 17 bp, Arabidopsis thaliana
agttagtgcttcatccc

SEQ ID NO: 45857 - DNA, 17 bp, Arabidopsis thaliana
agttagtggtaggacgg

SEQ ID NO: 45858 - DNA, 17 bp, Arabidopsis thaliana
agttagtgtcatctctt

SEQ ID NO: 45859 - DNA, 17 bp, Arabidopsis thaliana
agttagtgttgctaatg

SEQ ID NO: 45860 - DNA, 17 bp, Arabidopsis thaliana
agttagttacaaaaaaa

SEQ ID NO: 45861 - DNA, 17 bp, Arabidopsis thaliana
agttagttgtgcctctg

SEQ ID NO: 45862 - DNA, 17 bp, Arabidopsis thaliana
agttagttgttggatca

SEQ ID NO: 45863 - DNA, 17 bp, Arabidopsis thaliana
agttagtttcaggtggt

SEQ ID NO: 45864 - DNA, 17 bp, Arabidopsis thaliana
agttagtttcgtgggcc

SEQ ID NO: 45865 - DNA, 17 bp, Arabidopsis thaliana
agttagtttctcggaat

SEQ ID NO: 45866 - DNA, 17 bp, Arabidopsis thaliana
agttagtttctcggagt

SEQ ID NO: 45867 - DNA, 17 bp, Arabidopsis thaliana
agttatcaactatcagc

SEQ ID NO: 45868 - DNA, 17 bp, Arabidopsis thaliana
agttatcaatgatcttc

SEQ ID NO: 45869 - DNA, 17 bp, Arabidopsis thaliana
agttatcacgggacgga

SEQ ID NO: 45870 - DNA, 17 bp, Arabidopsis thaliana
agttatcaggaaaagac

SEQ ID NO: 45871 - DNA, 17 bp, Arabidopsis thaliana
agttatcagtaagagcg

SEQ ID NO: 45872 - DNA, 17 bp, Arabidopsis thaliana
agttatcattcggagcc

SEQ ID NO: 45873 - DNA, 17 bp, Arabidopsis thaliana
agttatcattgcctctc

SEQ ID NO: 45874 - DNA, 17 bp, Arabidopsis thaliana
agttatcctcctctgtt

SEQ ID NO: 45875 - DNA, 17 bp, Arabidopsis thaliana
agttatcgaatgtcacg

SEQ ID NO: 45876 - DNA, 17 bp, Arabidopsis thaliana
agttatcgaattcacgt

SEQ ID NO: 45877 - DNA, 17 bp, Arabidopsis thaliana
agttatcgactgccacg

SEQ ID NO: 45878 - DNA, 17 bp, Arabidopsis thaliana
agttatcgactgtcacg

SEQ ID NO: 45879 - DNA, 17 bp, Arabidopsis thaliana
agttatcgagacagctg

SEQ ID NO: 45880 - DNA, 17 bp, Arabidopsis thaliana
agttatcgagtgccaca

SEQ ID NO: 45881 - DNA, 17 bp, Arabidopsis thaliana
agttatcgcatacatga

SEQ ID NO: 45882 - DNA, 17 bp, Arabidopsis thaliana
agttatcggaaatagac

SEQ ID NO: 45883 - DNA, 17 bp, Arabidopsis thaliana
agttatcgtccatattg

SEQ ID NO: 45884 - DNA, 17 bp, Arabidopsis thaliana
agttatctcggagactg

SEQ ID NO: 45885 - DNA, 17 bp, Arabidopsis thaliana
agttatcttaatgatcc

SEQ ID NO: 45886 - DNA, 17 bp, Arabidopsis thaliana
agttatcttagtgatcc

SEQ ID NO: 45887 - DNA, 17 bp, Arabidopsis thaliana
agttatgccaatggatt

SEQ ID NO: 45888 - DNA, 17 bp, Arabidopsis thaliana
agttatgcggtcgatgt

SEQ ID NO: 45889 - DNA, 17 bp, Arabidopsis thaliana
agttatgcttgtctacg

SEQ ID NO: 45890 - DNA, 17 bp, Arabidopsis thaliana
agttatggagatcgcag

SEQ ID NO: 45891 - DNA, 17 bp, Arabidopsis thaliana
agttatggccgagttgt

SEQ ID NO: 45892 - DNA, 17 bp, Arabidopsis thaliana
agttatgggtaccaaca

SEQ ID NO: 45893 - DNA, 17 bp, Arabidopsis thaliana
agttatgtacctgggaa

SEQ ID NO: 45894 - DNA, 17 bp, Arabidopsis thaliana
agttatgtgatagttcc

SEQ ID NO: 45895 - DNA, 17 bp, Arabidopsis thaliana
agttattaagtaacgtc

SEQ ID NO: 45896 - DNA, 17 bp, Arabidopsis thaliana
agttattacgccatcat

SEQ ID NO: 45897 - DNA, 17 bp, Arabidopsis thaliana
agttattatggcacctg

SEQ ID NO: 45898 - DNA, 17 bp, Arabidopsis thaliana
agttattatgtctctgg

SEQ ID NO: 45899 - DNA, 17 bp, Arabidopsis thaliana
agttattcgcagtttcg

SEQ ID NO: 45900 - DNA, 17 bp, Arabidopsis thaliana
agttattcgccaagatc

SEQ ID NO: 45901 - DNA, 17 bp, Arabidopsis thaliana
agttattgaccgttgat

SEQ ID NO: 45902 - DNA, 17 bp, Arabidopsis thaliana
agttattgagactcgtc

SEQ ID NO: 45903 - DNA, 17 bp, Arabidopsis thaliana
agttattgagattccgc

SEQ ID NO: 45904 - DNA, 17 bp, Arabidopsis thaliana
agttattgcactgagaa

SEQ ID NO: 45905 - DNA, 17 bp, Arabidopsis thaliana
agttattggaaaagtga

SEQ ID NO: 45906 - DNA, 17 bp, Arabidopsis thaliana
agttattgtagcccatc

SEQ ID NO: 45907 - DNA, 17 bp, Arabidopsis thaliana
agttattgttgtgcctg

SEQ ID NO: 45908 - DNA, 17 bp, Arabidopsis thaliana
agttatttcccagtgtg

SEQ ID NO: 45909 - DNA, 17 bp, Arabidopsis thaliana
agttattttttcggttg

SEQ ID NO: 45910 - DNA, 17 bp, Arabidopsis thaliana
agttcaaaattggatcg

SEQ ID NO: 45911 - DNA, 17 bp, Arabidopsis thaliana
agttcaaactactgcga

SEQ ID NO: 45912 - DNA, 17 bp, Arabidopsis thaliana
agttcaaactccaggat

SEQ ID NO: 45913 - DNA, 17 bp, Arabidopsis thaliana
agttcaaatccgggtgc

SEQ ID NO: 45914 - DNA, 17 bp, Arabidopsis thaliana
agttcaaatccggtgcc

SEQ ID NO: 45915 - DNA, 17 bp, Arabidopsis thaliana
agttcaaatctcggtag

SEQ ID NO: 45916 - DNA, 17 bp, Arabidopsis thaliana
agttcaacacatgctcg

SEQ ID NO: 45917 - DNA, 17 bp, Arabidopsis thaliana
agttcaacaggttcaac

SEQ ID NO: 45918 - DNA, 17 bp, Arabidopsis thaliana
agttcaaccaatctttg

SEQ ID NO: 45919 - DNA, 17 bp, Arabidopsis thaliana
agttcaaccacgggccg

SEQ ID NO: 45920 - DNA, 17 bp, Arabidopsis thaliana
agttcaaccggttagca

SEQ ID NO: 45921 - DNA, 17 bp, Arabidopsis thaliana
agttcaaccgtgtcaat

SEQ ID NO: 45922 - DNA, 17 bp, Arabidopsis thaliana
agttcaacggttctcga

SEQ ID NO: 45923 - DNA, 17 bp, Arabidopsis thaliana
agttcaactgtttgtga

SEQ ID NO: 45924 - DNA, 17 bp, Arabidopsis thaliana
agttcaacttgtcacct

SEQ ID NO: 45925 - DNA, 17 bp, Arabidopsis thaliana
agttcaactttacatgc

SEQ ID NO: 45926 - DNA, 17 bp, Arabidopsis thaliana
agttcaagattttttgg

SEQ ID NO: 45927 - DNA, 17 bp, Arabidopsis thaliana
agttcaagccttttctc

SEQ ID NO: 45928 - DNA, 17 bp, Arabidopsis thaliana
agttcaagccttttctg

SEQ ID NO: 45929 - DNA, 17 bp, Arabidopsis thaliana
agttcaagttctctgac

SEQ ID NO: 45930 - DNA, 17 bp, Arabidopsis thaliana
agttcaagttgccttcc

SEQ ID NO: 45931 - DNA, 17 bp, Arabidopsis thaliana
agttcaagtttgatgaa

SEQ ID NO: 45932 - DNA, 17 bp, Arabidopsis thaliana
agttcaatatccgcttt

SEQ ID NO: 45933 - DNA, 17 bp, Arabidopsis thaliana
agttcaatccattcttg

SEQ ID NO: 45934 - DNA, 17 bp, Arabidopsis thaliana
agttcaatgcccaggtt

SEQ ID NO: 45935 - DNA, 17 bp, Arabidopsis thaliana
agttcaatgttttcgcc

SEQ ID NO: 45936 - DNA, 17 bp, Arabidopsis thaliana
agttcaattcgatttac

SEQ ID NO: 45937 - DNA, 17 bp, Arabidopsis thaliana
agttcaattctcggaat

SEQ ID NO: 45938 - DNA, 17 bp, Arabidopsis thaliana
agttcacaagaggcaag

SEQ ID NO: 45939 - DNA, 17 bp, Arabidopsis thaliana
agttcacaggtgattga

SEQ ID NO: 45940 - DNA, 17 bp, Arabidopsis thaliana
agttcaccgcttgctgt

SEQ ID NO: 45941 - DNA, 17 bp, Arabidopsis thaliana
agttcacgaggatggta

SEQ ID NO: 45942 - DNA, 17 bp, Arabidopsis thaliana
agttcacgattgggcga

SEQ ID NO: 45943 - DNA, 17 bp, Arabidopsis thaliana
agttcacggttaatttg

SEQ ID NO: 45944 - DNA, 17 bp, Arabidopsis thaliana
agttcacggttactttg

SEQ ID NO: 45945 - DNA, 17 bp, Arabidopsis thaliana
agttcactcatctgcta

SEQ ID NO: 45946 - DNA, 17 bp, Arabidopsis thaliana
agttcactttccgttaa

SEQ ID NO: 45947 - DNA, 17 bp, Arabidopsis thaliana
agttcactttgccaatt

SEQ ID NO: 45948 - DNA, 17 bp, Arabidopsis thaliana
agttcagacctgatttc

SEQ ID NO: 45949 - DNA, 17 bp, Arabidopsis thaliana
agttcagacttacatgc

SEQ ID NO: 45950 - DNA, 17 bp, Arabidopsis thaliana
agttcagacttatcgac

SEQ ID NO: 45951 - DNA, 17 bp, Arabidopsis thaliana
agttcagatccaaaggt

SEQ ID NO: 45952 - DNA, 17 bp, Arabidopsis thaliana
agttcaggaatattgtt

SEQ ID NO: 45953 - DNA, 17 bp, Arabidopsis thaliana
agttcaggacctgcgtc

SEQ ID NO: 45954 - DNA, 17 bp, Arabidopsis thaliana
agttcaggcaccccacg

SEQ ID NO: 45955 - DNA, 17 bp, Arabidopsis thaliana
agttcaggctcaaaggc

SEQ ID NO: 45956 - DNA, 17 bp, Arabidopsis thaliana
agttcaggtctcggtgg

SEQ ID NO: 45957 - DNA, 17 bp, Arabidopsis thaliana
agttcaggtgtttgcga

SEQ ID NO: 45958 - DNA, 17 bp, Arabidopsis thaliana
agttcaggttggacagt

SEQ ID NO: 45959 - DNA, 17 bp, Arabidopsis thaliana
agttcagtaatgtgcct

SEQ ID NO: 45960 - DNA, 17 bp, Arabidopsis thaliana
agttcagtcctgggcag

SEQ ID NO: 45961 - DNA, 17 bp, Arabidopsis thaliana
agttcagtcggtagacg

SEQ ID NO: 45962 - DNA, 17 bp, Arabidopsis thaliana
agttcagtctcgtggtt

SEQ ID NO: 45963 - DNA, 17 bp, Arabidopsis thaliana
agttcagtctgtgatgt

SEQ ID NO: 45964 - DNA, 17 bp, Arabidopsis thaliana
agttcagtggtttgtcg

SEQ ID NO: 45965 - DNA, 17 bp, Arabidopsis thaliana
agttcagtttcaacgac

SEQ ID NO: 45966 - DNA, 17 bp, Arabidopsis thaliana
agttcagtttttcatgg

SEQ ID NO: 45967 - DNA, 17 bp, Arabidopsis thaliana
agttcataccgctctat

SEQ ID NO: 45968 - DNA, 17 bp, Arabidopsis thaliana
agttcataggtgcactt

SEQ ID NO: 45969 - DNA, 17 bp, Arabidopsis thaliana
agttcatagtagcgttg

SEQ ID NO: 45970 - DNA, 17 bp, Arabidopsis thaliana
agttcatcaaaaatttg

SEQ ID NO: 45971 - DNA, 17 bp, Arabidopsis thaliana
agttcatcaagccacga

SEQ ID NO: 45972 - DNA, 17 bp, Arabidopsis thaliana
agttcatctccattttt

SEQ ID NO: 45973 - DNA, 17 bp, Arabidopsis thaliana
agttcatctgcagtaag

SEQ ID NO: 45974 - DNA, 17 bp, Arabidopsis thaliana
agttcatcttatttttg

SEQ ID NO: 45975 - DNA, 17 bp, Arabidopsis thaliana
agttcatgaccgtatgc

SEQ ID NO: 45976 - DNA, 17 bp, Arabidopsis thaliana
agttcatgatggaatag

SEQ ID NO: 45977 - DNA, 17 bp, Arabidopsis thaliana
agttcatgatggaatat

SEQ ID NO: 45978 - DNA, 17 bp, Arabidopsis thaliana
agttcatgcccaaaaac

SEQ ID NO: 45979 - DNA, 17 bp, Arabidopsis thaliana
agttcatgctttttttt

SEQ ID NO: 45980 - DNA, 17 bp, Arabidopsis thaliana
agttcatggctcggcag

SEQ ID NO: 45981 - DNA, 17 bp, Arabidopsis thaliana
agttcatgttttaaacg

SEQ ID NO: 45982 - DNA, 17 bp, Arabidopsis thaliana
agttcattcgggatgtc

SEQ ID NO: 45983 - DNA, 17 bp, Arabidopsis thaliana
agttcattgtcatcacc

SEQ ID NO: 45984 - DNA, 17 bp, Arabidopsis thaliana
agttcatttcgaagtgc

SEQ ID NO: 45985 - DNA, 17 bp, Arabidopsis thaliana
agttcatttctcggaac

SEQ ID NO: 45986 - DNA, 17 bp, Arabidopsis thaliana
agttcatttctcggaat

SEQ ID NO: 45987 - DNA, 17 bp, Arabidopsis thaliana
agttccaaacctcagtt

SEQ ID NO: 45988 - DNA, 17 bp, Arabidopsis thaliana
agttccaaccgcagctc

SEQ ID NO: 45989 - DNA, 17 bp, Arabidopsis thaliana
agttccaactgcaggat

SEQ ID NO: 45990 - DNA, 17 bp, Arabidopsis thaliana
agttccaagatcattgt

SEQ ID NO: 45991 - DNA, 17 bp, Arabidopsis thaliana
agttccaagattgacca

SEQ ID NO: 45992 - DNA, 17 bp, Arabidopsis thaliana
agttccaagcatgagca

SEQ ID NO: 45993 - DNA, 17 bp, Arabidopsis thaliana
agttccaaggaacctaa

SEQ ID NO: 45994 - DNA, 17 bp, Arabidopsis thaliana
agttccaaggtaaccct

SEQ ID NO: 45995 - DNA, 17 bp, Arabidopsis thaliana
agttccaatccgcgttt

SEQ ID NO: 45996 - DNA, 17 bp, Arabidopsis thaliana
agttccaatcgattttt

SEQ ID NO: 45997 - DNA, 17 bp, Arabidopsis thaliana
agttccagagatgttga

SEQ ID NO: 45998 - DNA, 17 bp, Arabidopsis thaliana
agttccagatgtgttag

SEQ ID NO: 45999 - DNA, 17 bp, Arabidopsis thaliana
agttccagattcagtga

SEQ ID NO: 46000 - DNA, 17 bp, Arabidopsis thaliana
agttccagatttttgac

SEQ ID NO: 46001 - DNA, 17 bp, Arabidopsis thaliana
agttccagcgtctacgg

SEQ ID NO: 46002 - DNA, 17 bp, Arabidopsis thaliana
agttccagctactacga

SEQ ID NO: 46003 - DNA, 17 bp, Arabidopsis thaliana
agttccagctactgcga

SEQ ID NO: 46004 - DNA, 17 bp, Arabidopsis thaliana
agttccaggagttttga

SEQ ID NO: 46005 - DNA, 17 bp, Arabidopsis thaliana
agttccaggatcttcca

SEQ ID NO: 46006 - DNA, 17 bp, Arabidopsis thaliana
agttccaggtgcgtggt

SEQ ID NO: 46007 - DNA, 17 bp, Arabidopsis thaliana
agttccatacggcagcg

SEQ ID NO: 46008 - DNA, 17 bp, Arabidopsis thaliana
agttccatagctcagtg

SEQ ID NO: 46009 - DNA, 17 bp, Arabidopsis thaliana
agttccatccaccttct

SEQ ID NO: 46010 - DNA, 17 bp, Arabidopsis thaliana
agttccatgagtggttt

SEQ ID NO: 46011 - DNA, 17 bp, Arabidopsis thaliana
agttccatgtcaaagcg

SEQ ID NO: 46012 - DNA, 17 bp, Arabidopsis thaliana
agttccattgtccagct

SEQ ID NO: 46013 - DNA, 17 bp, Arabidopsis thaliana
agttccattgtcctgct

SEQ ID NO: 46014 - DNA, 17 bp, Arabidopsis thaliana
agttcccactggctatt

SEQ ID NO: 46015 - DNA, 17 bp, Arabidopsis thaliana
agttcccagactcttga

SEQ ID NO: 46016 - DNA, 17 bp, Arabidopsis thaliana
agttcccatggggaaat

SEQ ID NO: 46017 - DNA, 17 bp, Arabidopsis thaliana
agttccccctacctgcc

SEQ ID NO: 46018 - DNA, 17 bp, Arabidopsis thaliana
agttccccctacctggc

SEQ ID NO: 46019 - DNA, 17 bp, Arabidopsis thaliana
agttcccctcaggatag

SEQ ID NO: 46020 - DNA, 17 bp, Arabidopsis thaliana
agttccccttggcccaa

SEQ ID NO: 46021 - DNA, 17 bp, Arabidopsis thaliana
agttcccggaaggtgac

SEQ ID NO: 46022 - DNA, 17 bp, Arabidopsis thaliana
agttccgaacccgtcgg

SEQ ID NO: 46023 - DNA, 17 bp, Arabidopsis thaliana
agttccgacttcagact

SEQ ID NO: 46024 - DNA, 17 bp, Arabidopsis thaliana
agttccgagatatcagg

SEQ ID NO: 46025 - DNA, 17 bp, Arabidopsis thaliana
agttccgattggaccat

SEQ ID NO: 46026 - DNA, 17 bp, Arabidopsis thaliana
agttccgctcaacccgc

SEQ ID NO: 46027 - DNA, 17 bp, Arabidopsis thaliana
agttccgctgaacccgc

SEQ ID NO: 46028 - DNA, 17 bp, Arabidopsis thaliana
agttccgctgcgaatgt

SEQ ID NO: 46029 - DNA, 17 bp, Arabidopsis thaliana
agttccgctgtctatat

SEQ ID NO: 46030 - DNA, 17 bp, Arabidopsis thaliana
agttccgcttgcgttac

SEQ ID NO: 46031 - DNA, 17 bp, Arabidopsis thaliana
agttccggagagcgaag

SEQ ID NO: 46032 - DNA, 17 bp, Arabidopsis thaliana
agttccggtgccggtca

SEQ ID NO: 46033 - DNA, 17 bp, Arabidopsis thaliana
agttccggttcggatta

SEQ ID NO: 46034 - DNA, 17 bp, Arabidopsis thaliana
agttccgtcctgggcag

SEQ ID NO: 46035 - DNA, 17 bp, Arabidopsis thaliana
agttccgtcctttctta

SEQ ID NO: 46036 - DNA, 17 bp, Arabidopsis thaliana
agttcctaaaaccgtgc

SEQ ID NO: 46037 - DNA, 17 bp, Arabidopsis thaliana
agttcctagatcatcct

SEQ ID NO: 46038 - DNA, 17 bp, Arabidopsis thaliana
agttcctagatcatctt

SEQ ID NO: 46039 - DNA, 17 bp, Arabidopsis thaliana
agttcctagccgcaagg

SEQ ID NO: 46040 - DNA, 17 bp, Arabidopsis thaliana
agttcctatgagttagc

SEQ ID NO: 46041 - DNA, 17 bp, Arabidopsis thaliana
agttcctccgtccgccc

SEQ ID NO: 46042 - DNA, 17 bp, Arabidopsis thaliana
agttcctcctgatgaat

SEQ ID NO: 46043 - DNA, 17 bp, Arabidopsis thaliana
agttcctcggacatcct

SEQ ID NO: 46044 - DNA, 17 bp, Arabidopsis thaliana
agttcctctactgaaag

SEQ ID NO: 46045 - DNA, 17 bp, Arabidopsis thaliana
agttcctctgagcactt

SEQ ID NO: 46046 - DNA, 17 bp, Arabidopsis thaliana
agttcctgaatagtttt

SEQ ID NO: 46047 - DNA, 17 bp, Arabidopsis thaliana
agttcctgcaaaggatc

SEQ ID NO: 46048 - DNA, 17 bp, Arabidopsis thaliana
agttcctgcattccaag

SEQ ID NO: 46049 - DNA, 17 bp, Arabidopsis thaliana
agttcctgccatgtgag

SEQ ID NO: 46050 - DNA, 17 bp, Arabidopsis thaliana
agttcctgcgtgtgggc

SEQ ID NO: 46051 - DNA, 17 bp, Arabidopsis thaliana
agttcctgctgcaggtt

SEQ ID NO: 46052 - DNA, 17 bp, Arabidopsis thaliana
agttcctgggcagcacc

SEQ ID NO: 46053 - DNA, 17 bp, Arabidopsis thaliana
agttccttcctgtatgg

SEQ ID NO: 46054 - DNA, 17 bp, Arabidopsis thaliana
agttccttctaacagct

SEQ ID NO: 46055 - DNA, 17 bp, Arabidopsis thaliana
agttccttgatcatttg

SEQ ID NO: 46056 - DNA, 17 bp, Arabidopsis thaliana
agttccttgcgcagtaa

SEQ ID NO: 46057 - DNA, 17 bp, Arabidopsis thaliana
agttccttgtgttcttc

SEQ ID NO: 46058 - DNA, 17 bp, Arabidopsis thaliana
agttccttttgacccgg

SEQ ID NO: 46059 - DNA, 17 bp, Arabidopsis thaliana
agttcgaaagatttgga

SEQ ID NO: 46060 - DNA, 17 bp, Arabidopsis thaliana
agttcgaaccggcgact

SEQ ID NO: 46061 - DNA, 17 bp, Arabidopsis thaliana
agttcgaatccttccgt

SEQ ID NO: 46062 - DNA, 17 bp, Arabidopsis thaliana
agttcgaatccttcctt

SEQ ID NO: 46063 - DNA, 17 bp, Arabidopsis thaliana
agttcgaatctctcagg

SEQ ID NO: 46064 - DNA, 17 bp, Arabidopsis thaliana
agttcgaccaattccag

SEQ ID NO: 46065 - DNA, 17 bp, Arabidopsis thaliana
agttcgacccagtggct

SEQ ID NO: 46066 - DNA, 17 bp, Arabidopsis thaliana
agttcgaccgagaggac

SEQ ID NO: 46067 - DNA, 17 bp, Arabidopsis thaliana
agttcgactcgtattta

SEQ ID NO: 46068 - DNA, 17 bp, Arabidopsis thaliana
agttcgagcgttcagtt

SEQ ID NO: 46069 - DNA, 17 bp, Arabidopsis thaliana
agttcgagttcaggttc

SEQ ID NO: 46070 - DNA, 17 bp, Arabidopsis thaliana
agttcgatactccatcc

SEQ ID NO: 46071 - DNA, 17 bp, Arabidopsis thaliana
agttcgatcctcgccgg

SEQ ID NO: 46072 - DNA, 17 bp, Arabidopsis thaliana
agttcgatcctctctgg

SEQ ID NO: 46073 - DNA, 17 bp, Arabidopsis thaliana
agttcgatcctgcgtgt

SEQ ID NO: 46074 - DNA, 17 bp, Arabidopsis thaliana
agttcgatcctgggcac

SEQ ID NO: 46075 - DNA, 17 bp, Arabidopsis thaliana
agttcgatcctgggcag

SEQ ID NO: 46076 - DNA, 17 bp, Arabidopsis thaliana
agttcgatgtttgcctg

SEQ ID NO: 46077 - DNA, 17 bp, Arabidopsis thaliana
agttcgattctcggaat

SEQ ID NO: 46078 - DNA, 17 bp, Arabidopsis thaliana
agttcgattgtttttaa

SEQ ID NO: 46079 - DNA, 17 bp, Arabidopsis thaliana
agttcgcactgaaccgt

SEQ ID NO: 46080 - DNA, 17 bp, Arabidopsis thaliana
agttcgccaatccgtcc

SEQ ID NO: 46081 - DNA, 17 bp, Arabidopsis thaliana
agttcgcccatatgcat

SEQ ID NO: 46082 - DNA, 17 bp, Arabidopsis thaliana
agttcgccggtgataag

SEQ ID NO: 46083 - DNA, 17 bp, Arabidopsis thaliana
agttcgcctcgtaacta

SEQ ID NO: 46084 - DNA, 17 bp, Arabidopsis thaliana
agttcgcctgctagtta

SEQ ID NO: 46085 - DNA, 17 bp, Arabidopsis thaliana
agttcgcgaagctaacc

SEQ ID NO: 46086 - DNA, 17 bp, Arabidopsis thaliana
agttcgcgattttttcg

SEQ ID NO: 46087 - DNA, 17 bp, Arabidopsis thaliana
agttcgctaacccatct

SEQ ID NO: 46088 - DNA, 17 bp, Arabidopsis thaliana
agttcgctaacccgtcc

SEQ ID NO: 46089 - DNA, 17 bp, Arabidopsis thaliana
agttcgctaatccattt

SEQ ID NO: 46090 - DNA, 17 bp, Arabidopsis thaliana
agttcgctctgctagtt

SEQ ID NO: 46091 - DNA, 17 bp, Arabidopsis thaliana
agttcgctgtggctgct

SEQ ID NO: 46092 - DNA, 17 bp, Arabidopsis thaliana
agttcggacgtgtgacc

SEQ ID NO: 46093 - DNA, 17 bp, Arabidopsis thaliana
agttcggactcgactgc

SEQ ID NO: 46094 - DNA, 17 bp, Arabidopsis thaliana
agttcggattgcaggct

SEQ ID NO: 46095 - DNA, 17 bp, Arabidopsis thaliana
agttcggccaaactgcc

SEQ ID NO: 46096 - DNA, 17 bp, Arabidopsis thaliana
agttcggccaactcaat

SEQ ID NO: 46097 - DNA, 17 bp, Arabidopsis thaliana
agttcggccctgggcag

SEQ ID NO: 46098 - DNA, 17 bp, Arabidopsis thaliana
agttcggcgatttgatg

SEQ ID NO: 46099 - DNA, 17 bp, Arabidopsis thaliana
agttcggctattcaact

SEQ ID NO: 46100 - DNA, 17 bp, Arabidopsis thaliana
agttcgggctctatctg

SEQ ID NO: 46101 - DNA, 17 bp, Arabidopsis thaliana
agttcggtccctatctg

SEQ ID NO: 46102 - DNA, 17 bp, Arabidopsis thaliana
agttcggtcctcgccgg

SEQ ID NO: 46103 - DNA, 17 bp, Arabidopsis thaliana
agttcggtcctgcgtgt

SEQ ID NO: 46104 - DNA, 17 bp, Arabidopsis thaliana
agttcggtcctgggcag

SEQ ID NO: 46105 - DNA, 17 bp, Arabidopsis thaliana
agttcggtcctgggtag

SEQ ID NO: 46106 - DNA, 17 bp, Arabidopsis thaliana
agttcggtcctgggtcg

SEQ ID NO: 46107 - DNA, 17 bp, Arabidopsis thaliana
agttcggtcctgggtgg

SEQ ID NO: 46108 - DNA, 17 bp, Arabidopsis thaliana
agttcggtgccgtctta

SEQ ID NO: 46109 - DNA, 17 bp, Arabidopsis thaliana
agttcggtgcggttcaa

SEQ ID NO: 46110 - DNA, 17 bp, Arabidopsis thaliana
agttcggttcgagtcgg

SEQ ID NO: 46111 - DNA, 17 bp, Arabidopsis thaliana
agttcggttctgttcgg

SEQ ID NO: 46112 - DNA, 17 bp, Arabidopsis thaliana
agttcggtttcggttcg

SEQ ID NO: 46113 - DNA, 17 bp, Arabidopsis thaliana
agttcggtttgtttgcc

SEQ ID NO: 46114 - DNA, 17 bp, Arabidopsis thaliana
agttcgtacacagacat

SEQ ID NO: 46115 - DNA, 17 bp, Arabidopsis thaliana
agttcgtacccaaccgc

SEQ ID NO: 46116 - DNA, 17 bp, Arabidopsis thaliana
agttcgtactgaaccgc

SEQ ID NO: 46117 - DNA, 17 bp, Arabidopsis thaliana
agttcgtacttgcaggt

SEQ ID NO: 46118 - DNA, 17 bp, Arabidopsis thaliana
agttcgtagatgggagt

SEQ ID NO: 46119 - DNA, 17 bp, Arabidopsis thaliana
agttcgtatctctcagg

SEQ ID NO: 46120 - DNA, 17 bp, Arabidopsis thaliana
agttcgtattgacccgc

SEQ ID NO: 46121 - DNA, 17 bp, Arabidopsis thaliana
agttcgtcagggttaag

SEQ ID NO: 46122 - DNA, 17 bp, Arabidopsis thaliana
agttcgtcagtcaatgt

SEQ ID NO: 46123 - DNA, 17 bp, Arabidopsis thaliana
agttcgtcctgggcagc

SEQ ID NO: 46124 - DNA, 17 bp, Arabidopsis thaliana
agttcgtcggactaact

SEQ ID NO: 46125 - DNA, 17 bp, Arabidopsis thaliana
agttcgtcttttgcgtc

SEQ ID NO: 46126 - DNA, 17 bp, Arabidopsis thaliana
agttcgtgaaccggttt

SEQ ID NO: 46127 - DNA, 17 bp, Arabidopsis thaliana
agttcgtgataagtcca

SEQ ID NO: 46128 - DNA, 17 bp, Arabidopsis thaliana
agttcgtgtccaaccgc

SEQ ID NO: 46129 - DNA, 17 bp, Arabidopsis thaliana
agttcgtgtcccactgg

SEQ ID NO: 46130 - DNA, 17 bp, Arabidopsis thaliana
agttcgttaatccatcg

SEQ ID NO: 46131 - DNA, 17 bp, Arabidopsis thaliana
agttcgttcccgtgact

SEQ ID NO: 46132 - DNA, 17 bp, Arabidopsis thaliana
agttcgttcctcgacgg

SEQ ID NO: 46133 - DNA, 17 bp, Arabidopsis thaliana
agttcgttcctcgccgg

SEQ ID NO: 46134 - DNA, 17 bp, Arabidopsis thaliana
agttcgttcctgcgtgt

SEQ ID NO: 46135 - DNA, 17 bp, Arabidopsis thaliana
agttcgttcctgggcac

SEQ ID NO: 46136 - DNA, 17 bp, Arabidopsis thaliana
agttcgttcctgggcag

SEQ ID NO: 46137 - DNA, 17 bp, Arabidopsis thaliana
agttcgttcctgggtgg

SEQ ID NO: 46138 - DNA, 17 bp, Arabidopsis thaliana
agttcgttcctggtcag

SEQ ID NO: 46139 - DNA, 17 bp, Arabidopsis thaliana
agttcgttgataaggag

SEQ ID NO: 46140 - DNA, 17 bp, Arabidopsis thaliana
agttcgtttctcagaat

SEQ ID NO: 46141 - DNA, 17 bp, Arabidopsis thaliana
agttcgtttctcggaat

SEQ ID NO: 46142 - DNA, 17 bp, Arabidopsis thaliana
agttcgtttctcggtat

SEQ ID NO: 46143 - DNA, 17 bp, Arabidopsis thaliana
agttcgttttccgttaa

SEQ ID NO: 46144 - DNA, 17 bp, Arabidopsis thaliana
agttctaagtccgttct

SEQ ID NO: 46145 - DNA, 17 bp, Arabidopsis thaliana
agttctaagtgatgtga

SEQ ID NO: 46146 - DNA, 17 bp, Arabidopsis thaliana
agttctaatgctcgact

SEQ ID NO: 46147 - DNA, 17 bp, Arabidopsis thaliana
agttctaatgtcgcttc

SEQ ID NO: 46148 - DNA, 17 bp, Arabidopsis thaliana
agttctacaagcgtgtc

SEQ ID NO: 46149 - DNA, 17 bp, Arabidopsis thaliana
agttctacaggcgtgtc

SEQ ID NO: 46150 - DNA, 17 bp, Arabidopsis thaliana
agttctaccgatcagat

SEQ ID NO: 46151 - DNA, 17 bp, Arabidopsis thaliana
agttctacctgatcttg

SEQ ID NO: 46152 - DNA, 17 bp, Arabidopsis thaliana
agttctacgcaaggggg

SEQ ID NO: 46153 - DNA, 17 bp, Arabidopsis thaliana
agttctactcgactcag

SEQ ID NO: 46154 - DNA, 17 bp, Arabidopsis thaliana
agttctacttgaaatgc

SEQ ID NO: 46155 - DNA, 17 bp, Arabidopsis thaliana
agttctagaagtgaaag

SEQ ID NO: 46156 - DNA, 17 bp, Arabidopsis thaliana
agttctagacttctggt

SEQ ID NO: 46157 - DNA, 17 bp, Arabidopsis thaliana
agttctagcagaagacg

SEQ ID NO: 46158 - DNA, 17 bp, Arabidopsis thaliana
agttctagcccagtatg

SEQ ID NO: 46159 - DNA, 17 bp, Arabidopsis thaliana
agttctagctaattatt

SEQ ID NO: 46160 - DNA, 17 bp, Arabidopsis thaliana
agttctaggtttcggga

SEQ ID NO: 46161 - DNA, 17 bp, Arabidopsis thaliana
agttctaggttttctca

SEQ ID NO: 46162 - DNA, 17 bp, Arabidopsis thaliana
agttctaggttttctcg

SEQ ID NO: 46163 - DNA, 17 bp, Arabidopsis thaliana
agttctagtaggaatga

SEQ ID NO: 46164 - DNA, 17 bp, Arabidopsis thaliana
agttctagtattaacga

SEQ ID NO: 46165 - DNA, 17 bp, Arabidopsis thaliana
agttctatacaccgccc

SEQ ID NO: 46166 - DNA, 17 bp, Arabidopsis thaliana
agttctataccggtcct

SEQ ID NO: 46167 - DNA, 17 bp, Arabidopsis thaliana
agttctatcctgcgtgt

SEQ ID NO: 46168 - DNA, 17 bp, Arabidopsis thaliana
agttctatcgggcaaac

SEQ ID NO: 46169 - DNA, 17 bp, Arabidopsis thaliana
agttctatcgggtaaag

SEQ ID NO: 46170 - DNA, 17 bp, Arabidopsis thaliana
agttctatgggtccgat

SEQ ID NO: 46171 - DNA, 17 bp, Arabidopsis thaliana
agttctattgctgaatg

SEQ ID NO: 46172 - DNA, 17 bp, Arabidopsis thaliana
agttctcaagctaagaa

SEQ ID NO: 46173 - DNA, 17 bp, Arabidopsis thaliana
agttctcactttgacaa

SEQ ID NO: 46174 - DNA, 17 bp, Arabidopsis thaliana
agttctcaggaacagga

SEQ ID NO: 46175 - DNA, 17 bp, Arabidopsis thaliana
agttctcatatgctgat

SEQ ID NO: 46176 - DNA, 17 bp, Arabidopsis thaliana
agttctcatcgatggtc

SEQ ID NO: 46177 - DNA, 17 bp, Arabidopsis thaliana
agttctccaactggact

SEQ ID NO: 46178 - DNA, 17 bp, Arabidopsis thaliana
agttctccgacacacca

SEQ ID NO: 46179 - DNA, 17 bp, Arabidopsis thaliana
agttctccgagaggcgg

SEQ ID NO: 46180 - DNA, 17 bp, Arabidopsis thaliana
agttctccgtacttcat

SEQ ID NO: 46181 - DNA, 17 bp, Arabidopsis thaliana
agttctcctaaccgcca

SEQ ID NO: 46182 - DNA, 17 bp, Arabidopsis thaliana
agttctcctctcagggc

SEQ ID NO: 46183 - DNA, 17 bp, Arabidopsis thaliana
agttctcctgggcagaa

SEQ ID NO: 46184 - DNA, 17 bp, Arabidopsis thaliana
agttctcctgggcagca

SEQ ID NO: 46185 - DNA, 17 bp, Arabidopsis thaliana
agttctcgctaagaaga

SEQ ID NO: 46186 - DNA, 17 bp, Arabidopsis thaliana
agttctcggaatgcccc

SEQ ID NO: 46187 - DNA, 17 bp, Arabidopsis thaliana
agttctcggttgagatc

SEQ ID NO: 46188 - DNA, 17 bp, Arabidopsis thaliana
agttctcggttgccagg

SEQ ID NO: 46189 - DNA, 17 bp, Arabidopsis thaliana
agttctcggttgctatg

SEQ ID NO: 46190 - DNA, 17 bp, Arabidopsis thaliana
agttctcgtaggaaaat

SEQ ID NO: 46191 - DNA, 17 bp, Arabidopsis thaliana
agttctcgtcgtcgcag

SEQ ID NO: 46192 - DNA, 17 bp, Arabidopsis thaliana
agttctcgtgctttcaa

SEQ ID NO: 46193 - DNA, 17 bp, Arabidopsis thaliana
agttctcgtgggaaaat

SEQ ID NO: 46194 - DNA, 17 bp, Arabidopsis thaliana
agttctcgtggggaaat

SEQ ID NO: 46195 - DNA, 17 bp, Arabidopsis thaliana
agttctcgtgtggaaat

SEQ ID NO: 46196 - DNA, 17 bp, Arabidopsis thaliana
agttctctcaggacgtt

SEQ ID NO: 46197 - DNA, 17 bp, Arabidopsis thaliana
agttctctcggaacgtt

SEQ ID NO: 46198 - DNA, 17 bp, Arabidopsis thaliana
agttctctcgtcaatgg

SEQ ID NO: 46199 - DNA, 17 bp, Arabidopsis thaliana
agttctctcttgcagcc

SEQ ID NO: 46200 - DNA, 17 bp, Arabidopsis thaliana
agttctctgttgatcga

SEQ ID NO: 46201 - DNA, 17 bp, Arabidopsis thaliana
agttctcttcgtcttca

SEQ ID NO: 46202 - DNA, 17 bp, Arabidopsis thaliana
agttctcttgtgggtct

SEQ ID NO: 46203 - DNA, 17 bp, Arabidopsis thaliana
agttctgaaagttgggt

SEQ ID NO: 46204 - DNA, 17 bp, Arabidopsis thaliana
agttctgaaatttgggt

SEQ ID NO: 46205 - DNA, 17 bp, Arabidopsis thaliana
agttctgaagcggttgc

SEQ ID NO: 46206 - DNA, 17 bp, Arabidopsis thaliana
agttctgacgtggccga

SEQ ID NO: 46207 - DNA, 17 bp, Arabidopsis thaliana
agttctgacttaggatc

SEQ ID NO: 46208 - DNA, 17 bp, Arabidopsis thaliana
agttctgagctgactgt

SEQ ID NO: 46209 - DNA, 17 bp, Arabidopsis thaliana
agttctgagctgacttt

SEQ ID NO: 46210 - DNA, 17 bp, Arabidopsis thaliana
agttctgagtggatttc

SEQ ID NO: 46211 - DNA, 17 bp, Arabidopsis thaliana
agttctgatgggatccg

SEQ ID NO: 46212 - DNA, 17 bp, Arabidopsis thaliana
agttctgatgggatctg

SEQ ID NO: 46213 - DNA, 17 bp, Arabidopsis thaliana
agttctgcaactacaag

SEQ ID NO: 46214 - DNA, 17 bp, Arabidopsis thaliana
agttctgcatgaagcgg

SEQ ID NO: 46215 - DNA, 17 bp, Arabidopsis thaliana
agttctgcccgggttgt

SEQ ID NO: 46216 - DNA, 17 bp, Arabidopsis thaliana
agttctgcggatgggcc

SEQ ID NO: 46217 - DNA, 17 bp, Arabidopsis thaliana
agttctgctgtggatca

SEQ ID NO: 46218 - DNA, 17 bp, Arabidopsis thaliana
agttctgcttcgttgtg

SEQ ID NO: 46219 - DNA, 17 bp, Arabidopsis thaliana
agttctggactgaagcc

SEQ ID NO: 46220 - DNA, 17 bp, Arabidopsis thaliana
agttctggatcgaaact

SEQ ID NO: 46221 - DNA, 17 bp, Arabidopsis thaliana
agttctgggataactaa

SEQ ID NO: 46222 - DNA, 17 bp, Arabidopsis thaliana
agttctgggataactga

SEQ ID NO: 46223 - DNA, 17 bp, Arabidopsis thaliana
agttctgggccgaaact

SEQ ID NO: 46224 - DNA, 17 bp, Arabidopsis thaliana
agttctggtggtggctc

SEQ ID NO: 46225 - DNA, 17 bp, Arabidopsis thaliana
agttctggtgtcctagg

SEQ ID NO: 46226 - DNA, 17 bp, Arabidopsis thaliana
agttctggttgcggttt

SEQ ID NO: 46227 - DNA, 17 bp, Arabidopsis thaliana
agttctggtttgtgcgt

SEQ ID NO: 46228 - DNA, 17 bp, Arabidopsis thaliana
agttctgtacaactttg

SEQ ID NO: 46229 - DNA, 17 bp, Arabidopsis thaliana
agttctgtagcaggcat

SEQ ID NO: 46230 - DNA, 17 bp, Arabidopsis thaliana
agttctgtcgaggcggg

SEQ ID NO: 46231 - DNA, 17 bp, Arabidopsis thaliana
agttctgtggtcagata

SEQ ID NO: 46232 - DNA, 17 bp, Arabidopsis thaliana
agttcttaaacagttgt

SEQ ID NO: 46233 - DNA, 17 bp, Arabidopsis thaliana
agttcttaccgattgtg

SEQ ID NO: 46234 - DNA, 17 bp, Arabidopsis thaliana
agttcttacgcatttaa

SEQ ID NO: 46235 - DNA, 17 bp, Arabidopsis thaliana
agttcttacgcatttac

SEQ ID NO: 46236 - DNA, 17 bp, Arabidopsis thaliana
agttcttcacttgctag

SEQ ID NO: 46237 - DNA, 17 bp, Arabidopsis thaliana
agttcttcagattgttg

SEQ ID NO: 46238 - DNA, 17 bp, Arabidopsis thaliana
agttcttccaagcggcg

SEQ ID NO: 46239 - DNA, 17 bp, Arabidopsis thaliana
agttcttccttagggct

SEQ ID NO: 46240 - DNA, 17 bp, Arabidopsis thaliana
agttcttctctctgtgc

SEQ ID NO: 46241 - DNA, 17 bp, Arabidopsis thaliana
agttcttctgttgatcc

SEQ ID NO: 46242 - DNA, 17 bp, Arabidopsis thaliana
agttcttctgttgattc

SEQ ID NO: 46243 - DNA, 17 bp, Arabidopsis thaliana
agttcttctttgtcgct

SEQ ID NO: 46244 - DNA, 17 bp, Arabidopsis thaliana
agttcttgaacggacta

SEQ ID NO: 46245 - DNA, 17 bp, Arabidopsis thaliana
agttcttgaggtttcga

SEQ ID NO: 46246 - DNA, 17 bp, Arabidopsis thaliana
agttcttgcagcgttgt

SEQ ID NO: 46247 - DNA, 17 bp, Arabidopsis thaliana
agttcttgcctggatgg

SEQ ID NO: 46248 - DNA, 17 bp, Arabidopsis thaliana
agttcttgcggtgctaa

SEQ ID NO: 46249 - DNA, 17 bp, Arabidopsis thaliana
agttcttggctgaggtt

SEQ ID NO: 46250 - DNA, 17 bp, Arabidopsis thaliana
agttcttggttcagtga

SEQ ID NO: 46251 - DNA, 17 bp, Arabidopsis thaliana
agttcttgtccagtgcg

SEQ ID NO: 46252 - DNA, 17 bp, Arabidopsis thaliana
agttcttgtgaccatag

SEQ ID NO: 46253 - DNA, 17 bp, Arabidopsis thaliana
agttcttgttgcgacgg

SEQ ID NO: 46254 - DNA, 17 bp, Arabidopsis thaliana
agttcttgttgttgatg

SEQ ID NO: 46255 - DNA, 17 bp, Arabidopsis thaliana
agttcttgtttcgggtg

SEQ ID NO: 46256 - DNA, 17 bp, Arabidopsis thaliana
agttctttagcgggcaa

SEQ ID NO: 46257 - DNA, 17 bp, Arabidopsis thaliana
agttctttcaaggttgc

SEQ ID NO: 46258 - DNA, 17 bp, Arabidopsis thaliana
agttctttcaccaaaat

SEQ ID NO: 46259 - DNA, 17 bp, Arabidopsis thaliana
agttctttccactccac

SEQ ID NO: 46260 - DNA, 17 bp, Arabidopsis thaliana
agttctttgacgttcac

SEQ ID NO: 46261 - DNA, 17 bp, Arabidopsis thaliana
agttctttgtgaggcag

SEQ ID NO: 46262 - DNA, 17 bp, Arabidopsis thaliana
agttcttttctctatcg

SEQ ID NO: 46263 - DNA, 17 bp, Arabidopsis thaliana
agttcttttgttgatcc

SEQ ID NO: 46264 - DNA, 17 bp, Arabidopsis thaliana
agttcttttgttgttga

SEQ ID NO: 46265 - DNA, 17 bp, Arabidopsis thaliana
agttctttttgtcttca

SEQ ID NO: 46266 - DNA, 17 bp, Arabidopsis thaliana
agttcttttttgggtgt

SEQ ID NO: 46267 - DNA, 17 bp, Arabidopsis thaliana
agttgaaaacgctggcc

SEQ ID NO: 46268 - DNA, 17 bp, Arabidopsis thaliana
agttgaaactctcccag

SEQ ID NO: 46269 - DNA, 17 bp, Arabidopsis thaliana
agttgaaagcgttttct

SEQ ID NO: 46270 - DNA, 17 bp, Arabidopsis thaliana
agttgaacatctggcta

SEQ ID NO: 46271 - DNA, 17 bp, Arabidopsis thaliana
agttgaaccacttggct

SEQ ID NO: 46272 - DNA, 17 bp, Arabidopsis thaliana
agttgaaccgctgacgg

SEQ ID NO: 46273 - DNA, 17 bp, Arabidopsis thaliana
agttgaaccgtactgca

SEQ ID NO: 46274 - DNA, 17 bp, Arabidopsis thaliana
agttgaaccgtactgcg

SEQ ID NO: 46275 - DNA, 17 bp, Arabidopsis thaliana
agttgaaccttgggacg

SEQ ID NO: 46276 - DNA, 17 bp, Arabidopsis thaliana
agttgaaccttgggatg

SEQ ID NO: 46277 - DNA, 17 bp, Arabidopsis thaliana
agttgaacctttggatg

SEQ ID NO: 46278 - DNA, 17 bp, Arabidopsis thaliana
agttgaacgattacatg

SEQ ID NO: 46279 - DNA, 17 bp, Arabidopsis thaliana
agttgaagaatatgcct

SEQ ID NO: 46280 - DNA, 17 bp, Arabidopsis thaliana
agttgaagatttttgtg

SEQ ID NO: 46281 - DNA, 17 bp, Arabidopsis thaliana
agttgaagttccaagtc

SEQ ID NO: 46282 - DNA, 17 bp, Arabidopsis thaliana
agttgaatatccgcttt

SEQ ID NO: 46283 - DNA, 17 bp, Arabidopsis thaliana
agttgaatcacttggct

SEQ ID NO: 46284 - DNA, 17 bp, Arabidopsis thaliana
agttgacacagctccgc

SEQ ID NO: 46285 - DNA, 17 bp, Arabidopsis thaliana
agttgacatgaaagctg

SEQ ID NO: 46286 - DNA, 17 bp, Arabidopsis thaliana
agttgacatgtgtgcga

SEQ ID NO: 46287 - DNA, 17 bp, Arabidopsis thaliana
agttgaccaactctctt

SEQ ID NO: 46288 - DNA, 17 bp, Arabidopsis thaliana
agttgaccaagaacatg

SEQ ID NO: 46289 - DNA, 17 bp, Arabidopsis thaliana
agttgaccagtccgcca

SEQ ID NO: 46290 - DNA, 17 bp, Arabidopsis thaliana
agttgaccatgaatttt

SEQ ID NO: 46291 - DNA, 17 bp, Arabidopsis thaliana
agttgacccaactcatt

SEQ ID NO: 46292 - DNA, 17 bp, Arabidopsis thaliana
agttgacccatgaattt

SEQ ID NO: 46293 - DNA, 17 bp, Arabidopsis thaliana
agttgacgaatctcatc

SEQ ID NO: 46294 - DNA, 17 bp, Arabidopsis thaliana
agttgacgatgaagggt

SEQ ID NO: 46295 - DNA, 17 bp, Arabidopsis thaliana
agttgacgcacccaagt

SEQ ID NO: 46296 - DNA, 17 bp, Arabidopsis thaliana
agttgacgctttatttt

SEQ ID NO: 46297 - DNA, 17 bp, Arabidopsis thaliana
agttgacggaattgtgg

SEQ ID NO: 46298 - DNA, 17 bp, Arabidopsis thaliana
agttgacgggacgggtt

SEQ ID NO: 46299 - DNA, 17 bp, Arabidopsis thaliana
agttgacggttatgaca

SEQ ID NO: 46300 - DNA, 17 bp, Arabidopsis thaliana
agttgacgttgtgacta

SEQ ID NO: 46301 - DNA, 17 bp, Arabidopsis thaliana
agttgactccggcgttg

SEQ ID NO: 46302 - DNA, 17 bp, Arabidopsis thaliana
agttgactggagttcaa

SEQ ID NO: 46303 - DNA, 17 bp, Arabidopsis thaliana
agttgactgtcgctact

SEQ ID NO: 46304 - DNA, 17 bp, Arabidopsis thaliana
agttgactgtggattcg

SEQ ID NO: 46305 - DNA, 17 bp, Arabidopsis thaliana
agttgacttaacgacgt

SEQ ID NO: 46306 - DNA, 17 bp, Arabidopsis thaliana
agttgacttacaggcac

SEQ ID NO: 46307 - DNA, 17 bp, Arabidopsis thaliana
agttgacttgacgatgt

SEQ ID NO: 46308 - DNA, 17 bp, Arabidopsis thaliana
agttgacttgcgactga

SEQ ID NO: 46309 - DNA, 17 bp, Arabidopsis thaliana
agttgacttttcgttaa

SEQ ID NO: 46310 - DNA, 17 bp, Arabidopsis thaliana
agttgagaactaggcag

SEQ ID NO: 46311 - DNA, 17 bp, Arabidopsis thaliana
agttgagaatctcattt

SEQ ID NO: 46312 - DNA, 17 bp, Arabidopsis thaliana
agttgagacttatttac

SEQ ID NO: 46313 - DNA, 17 bp, Arabidopsis thaliana
agttgagcaggtttttc

SEQ ID NO: 46314 - DNA, 17 bp, Arabidopsis thaliana
agttgagccttggtcca

SEQ ID NO: 46315 - DNA, 17 bp, Arabidopsis thaliana
agttgagcggacttcca

SEQ ID NO: 46316 - DNA, 17 bp, Arabidopsis thaliana
agttgagcggagctgtt

SEQ ID NO: 46317 - DNA, 17 bp, Arabidopsis thaliana
agttgagctaacgacac

SEQ ID NO: 46318 - DNA, 17 bp, Arabidopsis thaliana
agttgagctcctgtcat

SEQ ID NO: 46319 - DNA, 17 bp, Arabidopsis thaliana
agttgagctttcaggac

SEQ ID NO: 46320 - DNA, 17 bp, Arabidopsis thaliana
agttgaggcctgaaacg

SEQ ID NO: 46321 - DNA, 17 bp, Arabidopsis thaliana
agttgaggctggtgccg

SEQ ID NO: 46322 - DNA, 17 bp, Arabidopsis thaliana
agttgaggtgtcatcac

SEQ ID NO: 46323 - DNA, 17 bp, Arabidopsis thaliana
agttgagtactgagaat

SEQ ID NO: 46324 - DNA, 17 bp, Arabidopsis thaliana
agttgagtaggatctta

SEQ ID NO: 46325 - DNA, 17 bp, Arabidopsis thaliana
agttgagtgtcttccta

SEQ ID NO: 46326 - DNA, 17 bp, Arabidopsis thaliana
agttgagtgtgtttcat

SEQ ID NO: 46327 - DNA, 17 bp, Arabidopsis thaliana
agttgagttaccgcagc

SEQ ID NO: 46328 - DNA, 17 bp, Arabidopsis thaliana
agttgagttgacccatt

SEQ ID NO: 46329 - DNA, 17 bp, Arabidopsis thaliana
agttgagttgagtttga

SEQ ID NO: 46330 - DNA, 17 bp, Arabidopsis thaliana
agttgagttggcccatg

SEQ ID NO: 46331 - DNA, 17 bp, Arabidopsis thaliana
agttgataaccttgtcg

SEQ ID NO: 46332 - DNA, 17 bp, Arabidopsis thaliana
agttgatatgatcctgc

SEQ ID NO: 46333 - DNA, 17 bp, Arabidopsis thaliana
agttgatatggccgagt

SEQ ID NO: 46334 - DNA, 17 bp, Arabidopsis thaliana
agttgatccatgaattt

SEQ ID NO: 46335 - DNA, 17 bp, Arabidopsis thaliana
agttgatccccatcggc

SEQ ID NO: 46336 - DNA, 17 bp, Arabidopsis thaliana
agttgatcctgggcagc

SEQ ID NO: 46337 - DNA, 17 bp, Arabidopsis thaliana
agttgatcgctaagtca

SEQ ID NO: 46338 - DNA, 17 bp, Arabidopsis thaliana
agttgatcggagttgac

SEQ ID NO: 46339 - DNA, 17 bp, Arabidopsis thaliana
agttgatctgtagacag

SEQ ID NO: 46340 - DNA, 17 bp, Arabidopsis thaliana
agttgatgacacgtgtt

SEQ ID NO: 46341 - DNA, 17 bp, Arabidopsis thaliana
agttgatgacgtgtcac

SEQ ID NO: 46342 - DNA, 17 bp, Arabidopsis thaliana
agttgatgagaaggtac

SEQ ID NO: 46343 - DNA, 17 bp, Arabidopsis thaliana
agttgatgatgtacaac

SEQ ID NO: 46344 - DNA, 17 bp, Arabidopsis thaliana
agttgatgctgtccata

SEQ ID NO: 46345 - DNA, 17 bp, Arabidopsis thaliana
agttgatggagcgattt

SEQ ID NO: 46346 - DNA, 17 bp, Arabidopsis thaliana
agttgatggcggtctta

SEQ ID NO: 46347 - DNA, 17 bp, Arabidopsis thaliana
agttgatgggctattgg

SEQ ID NO: 46348 - DNA, 17 bp, Arabidopsis thaliana
agttgatgttgtgatct

SEQ ID NO: 46349 - DNA, 17 bp, Arabidopsis thaliana
agttgatgtttaaaatg

SEQ ID NO: 46350 - DNA, 17 bp, Arabidopsis thaliana
agttgattatgaaactg

SEQ ID NO: 46351 - DNA, 17 bp, Arabidopsis thaliana
agttgattcaggctatc

SEQ ID NO: 46352 - DNA, 17 bp, Arabidopsis thaliana
agttgattctcaaccta

SEQ ID NO: 46353 - DNA, 17 bp, Arabidopsis thaliana
agttgattgcgctgtac

SEQ ID NO: 46354 - DNA, 17 bp, Arabidopsis thaliana
agttgatttggtcgggt

SEQ ID NO: 46355 - DNA, 17 bp, Arabidopsis thaliana
agttgcagaatcaactg

SEQ ID NO: 46356 - DNA, 17 bp, Arabidopsis thaliana
agttgcagagactccta

SEQ ID NO: 46357 - DNA, 17 bp, Arabidopsis thaliana
agttgcagagatgttgt

SEQ ID NO: 46358 - DNA, 17 bp, Arabidopsis thaliana
agttgcagattgagcct

SEQ ID NO: 46359 - DNA, 17 bp, Arabidopsis thaliana
agttgccagaccactca

SEQ ID NO: 46360 - DNA, 17 bp, Arabidopsis thaliana
agttgccagacgctcaa

SEQ ID NO: 46361 - DNA, 17 bp, Arabidopsis thaliana
agttgccagcgatcagc

SEQ ID NO: 46362 - DNA, 17 bp, Arabidopsis thaliana
agttgccaggttgtgtg

SEQ ID NO: 46363 - DNA, 17 bp, Arabidopsis thaliana
agttgcccggaccctgt

SEQ ID NO: 46364 - DNA, 17 bp, Arabidopsis thaliana
agttgccgaatcgccat

SEQ ID NO: 46365 - DNA, 17 bp, Arabidopsis thaliana
agttgccgcagctgtcg

SEQ ID NO: 46366 - DNA, 17 bp, Arabidopsis thaliana
agttgccgtagaccaag

SEQ ID NO: 46367 - DNA, 17 bp, Arabidopsis thaliana
agttgccgtagaccagg

SEQ ID NO: 46368 - DNA, 17 bp, Arabidopsis thaliana
agttgcgaaattgaatt

SEQ ID NO: 46369 - DNA, 17 bp, Arabidopsis thaliana
agttgcgaatcaactaa

SEQ ID NO: 46370 - DNA, 17 bp, Arabidopsis thaliana
agttgcgaatcaactga

SEQ ID NO: 46371 - DNA, 17 bp, Arabidopsis thaliana
agttgcgagggacttgc

SEQ ID NO: 46372 - DNA, 17 bp, Arabidopsis thaliana
agttgcgatctgtaagc

SEQ ID NO: 46373 - DNA, 17 bp, Arabidopsis thaliana
agttgcgccaagttgtt

SEQ ID NO: 46374 - DNA, 17 bp, Arabidopsis thaliana
agttgcgccccaagcct

SEQ ID NO: 46375 - DNA, 17 bp, Arabidopsis thaliana
agttgcgcctcgttcgg

SEQ ID NO: 46376 - DNA, 17 bp, Arabidopsis thaliana
agttgcgcggacttcca

SEQ ID NO: 46377 - DNA, 17 bp, Arabidopsis thaliana
agttgcggaagcattac

SEQ ID NO: 46378 - DNA, 17 bp, Arabidopsis thaliana
agttgcggcgaccttca

SEQ ID NO: 46379 - DNA, 17 bp, Arabidopsis thaliana
agttgcggcttcgctat

SEQ ID NO: 46380 - DNA, 17 bp, Arabidopsis thaliana
agttgcggcttgatcac

SEQ ID NO: 46381 - DNA, 17 bp, Arabidopsis thaliana
agttgcgggctgaccac

SEQ ID NO: 46382 - DNA, 17 bp, Arabidopsis thaliana
agttgcggtatcactcc

SEQ ID NO: 46383 - DNA, 17 bp, Arabidopsis thaliana
agttgcggtgacgatac

SEQ ID NO: 46384 - DNA, 17 bp, Arabidopsis thaliana
agttgcggttgctgatt

SEQ ID NO: 46385 - DNA, 17 bp, Arabidopsis thaliana
agttgcggtttaagttc

SEQ ID NO: 46386 - DNA, 17 bp, Arabidopsis thaliana
agttgcgtctaccgcag

SEQ ID NO: 46387 - DNA, 17 bp, Arabidopsis thaliana
agttgcgtctttgaatt

SEQ ID NO: 46388 - DNA, 17 bp, Arabidopsis thaliana
agttgctaaagcacctt

SEQ ID NO: 46389 - DNA, 17 bp, Arabidopsis thaliana
agttgctaactcaaagg

SEQ ID NO: 46390 - DNA, 17 bp, Arabidopsis thaliana
agttgctaactcaggtg

SEQ ID NO: 46391 - DNA, 17 bp, Arabidopsis thaliana
agttgctaactcataag

SEQ ID NO: 46392 - DNA, 17 bp, Arabidopsis thaliana
agttgctaactcatagg

SEQ ID NO: 46393 - DNA, 17 bp, Arabidopsis thaliana
agttgctaccacaagtt

SEQ ID NO: 46394 - DNA, 17 bp, Arabidopsis thaliana
agttgctagacgataat

SEQ ID NO: 46395 - DNA, 17 bp, Arabidopsis thaliana
agttgctagctaactaa

SEQ ID NO: 46396 - DNA, 17 bp, Arabidopsis thaliana
agttgctagggacttgc

SEQ ID NO: 46397 - DNA, 17 bp, Arabidopsis thaliana
agttgctattctaggag

SEQ ID NO: 46398 - DNA, 17 bp, Arabidopsis thaliana
agttgctcaagctgtta

SEQ ID NO: 46399 - DNA, 17 bp, Arabidopsis thaliana
agttgctccgccattag

SEQ ID NO: 46400 - DNA, 17 bp, Arabidopsis thaliana
agttgctcgatcaggac

SEQ ID NO: 46401 - DNA, 17 bp, Arabidopsis thaliana
agttgctcgtcaatggc

SEQ ID NO: 46402 - DNA, 17 bp, Arabidopsis thaliana
agttgctctccgttgtg

SEQ ID NO: 46403 - DNA, 17 bp, Arabidopsis thaliana
agttgctcttttgcttt

SEQ ID NO: 46404 - DNA, 17 bp, Arabidopsis thaliana
agttgctgaatccatgg

SEQ ID NO: 46405 - DNA, 17 bp, Arabidopsis thaliana
agttgctgaggcctatt

SEQ ID NO: 46406 - DNA, 17 bp, Arabidopsis thaliana
agttgctgattacatgg

SEQ ID NO: 46407 - DNA, 17 bp, Arabidopsis thaliana
agttgctgccagttctg

SEQ ID NO: 46408 - DNA, 17 bp, Arabidopsis thaliana
agttgctgcggatagtt

SEQ ID NO: 46409 - DNA, 17 bp, Arabidopsis thaliana
agttgctgctggtgctg

SEQ ID NO: 46410 - DNA, 17 bp, Arabidopsis thaliana
agttgctgtatgtaccg

SEQ ID NO: 46411 - DNA, 17 bp, Arabidopsis thaliana
agttgctgtcgccggtt

SEQ ID NO: 46412 - DNA, 17 bp, Arabidopsis thaliana
agttgctgttatttttt

SEQ ID NO: 46413 - DNA, 17 bp, Arabidopsis thaliana
agttgctgtttgtaccg

SEQ ID NO: 46414 - DNA, 17 bp, Arabidopsis thaliana
agttgcttatgacttgt

SEQ ID NO: 46415 - DNA, 17 bp, Arabidopsis thaliana
agttgcttcacagacaa

SEQ ID NO: 46416 - DNA, 17 bp, Arabidopsis thaliana
agttgcttcgtcgtctg

SEQ ID NO: 46417 - DNA, 17 bp, Arabidopsis thaliana
agttgcttgctacaaga

SEQ ID NO: 46418 - DNA, 17 bp, Arabidopsis thaliana
agttgcttttgtactgg

SEQ ID NO: 46419 - DNA, 17 bp, Arabidopsis thaliana
agttggaaccagggaca

SEQ ID NO: 46420 - DNA, 17 bp, Arabidopsis thaliana
agttggaacttatttac

SEQ ID NO: 46421 - DNA, 17 bp, Arabidopsis thaliana
agttggaacttgctaga

SEQ ID NO: 46422 - DNA, 17 bp, Arabidopsis thaliana
agttggaactttaatct

SEQ ID NO: 46423 - DNA, 17 bp, Arabidopsis thaliana
agttggaagaagtcagc

SEQ ID NO: 46424 - DNA, 17 bp, Arabidopsis thaliana
agttggaagatggaagc

SEQ ID NO: 46425 - DNA, 17 bp, Arabidopsis thaliana
agttggaatcatcgtta

SEQ ID NO: 46426 - DNA, 17 bp, Arabidopsis thaliana
agttggaatctcaactt

SEQ ID NO: 46427 - DNA, 17 bp, Arabidopsis thaliana
agttggacctaagttta

SEQ ID NO: 46428 - DNA, 17 bp, Arabidopsis thaliana
agttggacctaagtttc

SEQ ID NO: 46429 - DNA, 17 bp, Arabidopsis thaliana
agttggaggtcgcgggt

SEQ ID NO: 46430 - DNA, 17 bp, Arabidopsis thaliana
agttggatacctcagct

SEQ ID NO: 46431 - DNA, 17 bp, Arabidopsis thaliana
agttggatcacagattc

SEQ ID NO: 46432 - DNA, 17 bp, Arabidopsis thaliana
agttggatcgttctttt

SEQ ID NO: 46433 - DNA, 17 bp, Arabidopsis thaliana
agttggccaactctctc

SEQ ID NO: 46434 - DNA, 17 bp, Arabidopsis thaliana
agttggccaattctttc

SEQ ID NO: 46435 - DNA, 17 bp, Arabidopsis thaliana
agttggccacctcatat

SEQ ID NO: 46436 - DNA, 17 bp, Arabidopsis thaliana
agttggccgaactcttt

SEQ ID NO: 46437 - DNA, 17 bp, Arabidopsis thaliana
agttggccgactctctc

SEQ ID NO: 46438 - DNA, 17 bp, Arabidopsis thaliana
agttggccggaatcaca

SEQ ID NO: 46439 - DNA, 17 bp, Arabidopsis thaliana
agttggcgggacgagtt

SEQ ID NO: 46440 - DNA, 17 bp, Arabidopsis thaliana
agttggctatgcagaga

SEQ ID NO: 46441 - DNA, 17 bp, Arabidopsis thaliana
agttggctattggccga

SEQ ID NO: 46442 - DNA, 17 bp, Arabidopsis thaliana
agttggctgattcgttg

SEQ ID NO: 46443 - DNA, 17 bp, Arabidopsis thaliana
agttggcttcaaaaaca

SEQ ID NO: 46444 - DNA, 17 bp, Arabidopsis thaliana
agttggcttgggatgtg

SEQ ID NO: 46445 - DNA, 17 bp, Arabidopsis thaliana
agttgggactcgaatct

SEQ ID NO: 46446 - DNA, 17 bp, Arabidopsis thaliana
agttgggacttagttac

SEQ ID NO: 46447 - DNA, 17 bp, Arabidopsis thaliana
agttgggacttattcac

SEQ ID NO: 46448 - DNA, 17 bp, Arabidopsis thaliana
agttgggacttatttac

SEQ ID NO: 46449 - DNA, 17 bp, Arabidopsis thaliana
agttgggacttatttcc

SEQ ID NO: 46450 - DNA, 17 bp, Arabidopsis thaliana
agttgggattcatttac

SEQ ID NO: 46451 - DNA, 17 bp, Arabidopsis thaliana
agttgggatttactctt

SEQ ID NO: 46452 - DNA, 17 bp, Arabidopsis thaliana
agttgggatttacttac

SEQ ID NO: 46453 - DNA, 17 bp, Arabidopsis thaliana
agttgggatttatttac

SEQ ID NO: 46454 - DNA, 17 bp, Arabidopsis thaliana
agttgggatttggaaac

SEQ ID NO: 46455 - DNA, 17 bp, Arabidopsis thaliana
agttgggcattgaccta

SEQ ID NO: 46456 - DNA, 17 bp, Arabidopsis thaliana
agttgggccaatctttg

SEQ ID NO: 46457 - DNA, 17 bp, Arabidopsis thaliana
agttgggcggtaagcga

SEQ ID NO: 46458 - DNA, 17 bp, Arabidopsis thaliana
agttgggctttggatac

SEQ ID NO: 46459 - DNA, 17 bp, Arabidopsis thaliana
agttgggctttggcccc

SEQ ID NO: 46460 - DNA, 17 bp, Arabidopsis thaliana
agttgggcttttggtag

SEQ ID NO: 46461 - DNA, 17 bp, Arabidopsis thaliana
agttgggggctcgaaga

SEQ ID NO: 46462 - DNA, 17 bp, Arabidopsis thaliana
agttgggtacccattta

SEQ ID NO: 46463 - DNA, 17 bp, Arabidopsis thaliana
agttgggtgctcgaaga

SEQ ID NO: 46464 - DNA, 17 bp, Arabidopsis thaliana
agttgggtggagtaatg

SEQ ID NO: 46465 - DNA, 17 bp, Arabidopsis thaliana
agttgggtgtcggacgc

SEQ ID NO: 46466 - DNA, 17 bp, Arabidopsis thaliana
agttgggtgtcggacgg

SEQ ID NO: 46467 - DNA, 17 bp, Arabidopsis thaliana
agttgggttacccattt

SEQ ID NO: 46468 - DNA, 17 bp, Arabidopsis thaliana
agttgggttagtctgca

SEQ ID NO: 46469 - DNA, 17 bp, Arabidopsis thaliana
agttgggtttgttcgtg

SEQ ID NO: 46470 - DNA, 17 bp, Arabidopsis thaliana
agttgggtttttggtgg

SEQ ID NO: 46471 - DNA, 17 bp, Arabidopsis thaliana
agttggtagaccgacct

SEQ ID NO: 46472 - DNA, 17 bp, Arabidopsis thaliana
agttggtagagctgaag

SEQ ID NO: 46473 - DNA, 17 bp, Arabidopsis thaliana
agttggtatcagagctg

SEQ ID NO: 46474 - DNA, 17 bp, Arabidopsis thaliana
agttggtcgtcaatggc

SEQ ID NO: 46475 - DNA, 17 bp, Arabidopsis thaliana
agttggtctgtaagctg

SEQ ID NO: 46476 - DNA, 17 bp, Arabidopsis thaliana
agttggtcttacaagtt

SEQ ID NO: 46477 - DNA, 17 bp, Arabidopsis thaliana
agttggtgaagctgagt

SEQ ID NO: 46478 - DNA, 17 bp, Arabidopsis thaliana
agttggtgacttaggtt

SEQ ID NO: 46479 - DNA, 17 bp, Arabidopsis thaliana
agttggtgatataccct

SEQ ID NO: 46480 - DNA, 17 bp, Arabidopsis thaliana
agttggtgatgttgcta

SEQ ID NO: 46481 - DNA, 17 bp, Arabidopsis thaliana
agttggtgcttccatat

SEQ ID NO: 46482 - DNA, 17 bp, Arabidopsis thaliana
agttggtggaacactgg

SEQ ID NO: 46483 - DNA, 17 bp, Arabidopsis thaliana
agttggtggactgaatc

SEQ ID NO: 46484 - DNA, 17 bp, Arabidopsis thaliana
agttggtggagcgattc

SEQ ID NO: 46485 - DNA, 17 bp, Arabidopsis thaliana
agttggtggagcgattg

SEQ ID NO: 46486 - DNA, 17 bp, Arabidopsis thaliana
agttggtggagcgattt

SEQ ID NO: 46487 - DNA, 17 bp, Arabidopsis thaliana
agttggtggagggattt

SEQ ID NO: 46488 - DNA, 17 bp, Arabidopsis thaliana
agttggtggggcgattt

SEQ ID NO: 46489 - DNA, 17 bp, Arabidopsis thaliana
agttggttcagacattt

SEQ ID NO: 46490 - DNA, 17 bp, Arabidopsis thaliana
agttggttctatttgtg

SEQ ID NO: 46491 - DNA, 17 bp, Arabidopsis thaliana
agttggttctccatctg

SEQ ID NO: 46492 - DNA, 17 bp, Arabidopsis thaliana
agttggttctgaacgct

SEQ ID NO: 46493 - DNA, 17 bp, Arabidopsis thaliana
agttggttcttttgtgc

SEQ ID NO: 46494 - DNA, 17 bp, Arabidopsis thaliana
agttggttgagcttcac

SEQ ID NO: 46495 - DNA, 17 bp, Arabidopsis thaliana
agttggttgcgacggtt

SEQ ID NO: 46496 - DNA, 17 bp, Arabidopsis thaliana
agttggtttcattgtgc

SEQ ID NO: 46497 - DNA, 17 bp, Arabidopsis thaliana
agttggtttcggtttag

SEQ ID NO: 46498 - DNA, 17 bp, Arabidopsis thaliana
agttggtttgatggtcg

SEQ ID NO: 46499 - DNA, 17 bp, Arabidopsis thaliana
agttggtttgtcttata

SEQ ID NO: 46500 - DNA, 17 bp, Arabidopsis thaliana
agttgtaaaatgttgcc

SEQ ID NO: 46501 - DNA, 17 bp, Arabidopsis thaliana
agttgtaaaattcatcc

SEQ ID NO: 46502 - DNA, 17 bp, Arabidopsis thaliana
agttgtaacggcaagtc

SEQ ID NO: 46503 - DNA, 17 bp, Arabidopsis thaliana
agttgtaacttctgctg

SEQ ID NO: 46504 - DNA, 17 bp, Arabidopsis thaliana
agttgtaacttgtgctg

SEQ ID NO: 46505 - DNA, 17 bp, Arabidopsis thaliana
agttgtaagattcatcc

SEQ ID NO: 46506 - DNA, 17 bp, Arabidopsis thaliana
agttgtaagtccgacat

SEQ ID NO: 46507 - DNA, 17 bp, Arabidopsis thaliana
agttgtacattccaccg

SEQ ID NO: 46508 - DNA, 17 bp, Arabidopsis thaliana
agttgtactgcacattt

SEQ ID NO: 46509 - DNA, 17 bp, Arabidopsis thaliana
agttgtagaagacaagg

SEQ ID NO: 46510 - DNA, 17 bp, Arabidopsis thaliana
agttgtagaagctgtga

SEQ ID NO: 46511 - DNA, 17 bp, Arabidopsis thaliana
agttgtagaccgttcat

SEQ ID NO: 46512 - DNA, 17 bp, Arabidopsis thaliana
agttgtagttctaacca

SEQ ID NO: 46513 - DNA, 17 bp, Arabidopsis thaliana
agttgtatcttcaggcg

SEQ ID NO: 46514 - DNA, 17 bp, Arabidopsis thaliana
agttgtattgcgggtga

SEQ ID NO: 46515 - DNA, 17 bp, Arabidopsis thaliana
agttgtcaaaatggtcc

SEQ ID NO: 46516 - DNA, 17 bp, Arabidopsis thaliana
agttgtcagcaaaggtc

SEQ ID NO: 46517 - DNA, 17 bp, Arabidopsis thaliana
agttgtccgctgactta

SEQ ID NO: 46518 - DNA, 17 bp, Arabidopsis thaliana
agttgtccgtttgcatt

SEQ ID NO: 46519 - DNA, 17 bp, Arabidopsis thaliana
agttgtccttgcggtgc

SEQ ID NO: 46520 - DNA, 17 bp, Arabidopsis thaliana
agttgtcgaatgatgtt

SEQ ID NO: 46521 - DNA, 17 bp, Arabidopsis thaliana
agttgtcgagtaacggg

SEQ ID NO: 46522 - DNA, 17 bp, Arabidopsis thaliana
agttgtcgagtaaggat

SEQ ID NO: 46523 - DNA, 17 bp, Arabidopsis thaliana
agttgtcggaactatgc

SEQ ID NO: 46524 - DNA, 17 bp, Arabidopsis thaliana
agttgtcggcggtgacg

SEQ ID NO: 46525 - DNA, 17 bp, Arabidopsis thaliana
agttgtcgtcacgtcac

SEQ ID NO: 46526 - DNA, 17 bp, Arabidopsis thaliana
agttgtcgttcgaagaa

SEQ ID NO: 46527 - DNA, 17 bp, Arabidopsis thaliana
agttgtctaatttgatt

SEQ ID NO: 46528 - DNA, 17 bp, Arabidopsis thaliana
agttgtctacgcgatgt

SEQ ID NO: 46529 - DNA, 17 bp, Arabidopsis thaliana
agttgtctcatcgcagc

SEQ ID NO: 46530 - DNA, 17 bp, Arabidopsis thaliana
agttgtctcgggtgatg

SEQ ID NO: 46531 - DNA, 17 bp, Arabidopsis thaliana
agttgtcttaggctatc

SEQ ID NO: 46532 - DNA, 17 bp, Arabidopsis thaliana
agttgtgaaacgtctga

SEQ ID NO: 46533 - DNA, 17 bp, Arabidopsis thaliana
agttgtgaatccagggt

SEQ ID NO: 46534 - DNA, 17 bp, Arabidopsis thaliana
agttgtgaattcgtgtc

SEQ ID NO: 46535 - DNA, 17 bp, Arabidopsis thaliana
agttgtgacatgaccga

SEQ ID NO: 46536 - DNA, 17 bp, Arabidopsis thaliana
agttgtgacttatttac

SEQ ID NO: 46537 - DNA, 17 bp, Arabidopsis thaliana
agttgtgactttgtgag

SEQ ID NO: 46538 - DNA, 17 bp, Arabidopsis thaliana
agttgtgattcttgttg

SEQ ID NO: 46539 - DNA, 17 bp, Arabidopsis thaliana
agttgtgcattggtcgg

SEQ ID NO: 46540 - DNA, 17 bp, Arabidopsis thaliana
agttgtgccataagtta

SEQ ID NO: 46541 - DNA, 17 bp, Arabidopsis thaliana
agttgtgcgaatttcag

SEQ ID NO: 46542 - DNA, 17 bp, Arabidopsis thaliana
agttgtggagacgtcgc

SEQ ID NO: 46543 - DNA, 17 bp, Arabidopsis thaliana
agttgtggagcgattta

SEQ ID NO: 46544 - DNA, 17 bp, Arabidopsis thaliana
agttgtggctttactcg

SEQ ID NO: 46545 - DNA, 17 bp, Arabidopsis thaliana
agttgtgggagagagtt

SEQ ID NO: 46546 - DNA, 17 bp, Arabidopsis thaliana
agttgtgggtttagtta

SEQ ID NO: 46547 - DNA, 17 bp, Arabidopsis thaliana
agttgtggttaggggtg

SEQ ID NO: 46548 - DNA, 17 bp, Arabidopsis thaliana
agttgtggttgtggtaa

SEQ ID NO: 46549 - DNA, 17 bp, Arabidopsis thaliana
agttgttaaagggtgag

SEQ ID NO: 46550 - DNA, 17 bp, Arabidopsis thaliana
agttgttaccgacttga

SEQ ID NO: 46551 - DNA, 17 bp, Arabidopsis thaliana
agttgttatcgcttgag

SEQ ID NO: 46552 - DNA, 17 bp, Arabidopsis thaliana
agttgttatgtcaccat

SEQ ID NO: 46553 - DNA, 17 bp, Arabidopsis thaliana
agttgttcgccaagatt

SEQ ID NO: 46554 - DNA, 17 bp, Arabidopsis thaliana
agttgttcgcggtggtc

SEQ ID NO: 46555 - DNA, 17 bp, Arabidopsis thaliana
agttgttcggagccgct

SEQ ID NO: 46556 - DNA, 17 bp, Arabidopsis thaliana
agttgttcgtttacttg

SEQ ID NO: 46557 - DNA, 17 bp, Arabidopsis thaliana
agttgttcgtttgcatg

SEQ ID NO: 46558 - DNA, 17 bp, Arabidopsis thaliana
agttgttcgtttgcctg

SEQ ID NO: 46559 - DNA, 17 bp, Arabidopsis thaliana
agttgttcgtttgctcg

SEQ ID NO: 46560 - DNA, 17 bp, Arabidopsis thaliana
agttgttcgtttgcttg

SEQ ID NO: 46561 - DNA, 17 bp, Arabidopsis thaliana
agttgttcgtttgtttg

SEQ ID NO: 46562 - DNA, 17 bp, Arabidopsis thaliana
agttgttctgggccgca

SEQ ID NO: 46563 - DNA, 17 bp, Arabidopsis thaliana
agttgttgaccaagatc

SEQ ID NO: 46564 - DNA, 17 bp, Arabidopsis thaliana
agttgttgaccgttgat

SEQ ID NO: 46565 - DNA, 17 bp, Arabidopsis thaliana
agttgttgactacacgg

SEQ ID NO: 46566 - DNA, 17 bp, Arabidopsis thaliana
agttgttgatgagcagg

SEQ ID NO: 46567 - DNA, 17 bp, Arabidopsis thaliana
agttgttgatgcagtct

SEQ ID NO: 46568 - DNA, 17 bp, Arabidopsis thaliana
agttgttgcaattgcta

SEQ ID NO: 46569 - DNA, 17 bp, Arabidopsis thaliana
agttgttgcgacgtatt

SEQ ID NO: 46570 - DNA, 17 bp, Arabidopsis thaliana
agttgttgctggaaaac

SEQ ID NO: 46571 - DNA, 17 bp, Arabidopsis thaliana
agttgttggaatgtgga

SEQ ID NO: 46572 - DNA, 17 bp, Arabidopsis thaliana
agttgttggagcgattt

SEQ ID NO: 46573 - DNA, 17 bp, Arabidopsis thaliana
agttgttgggcttggac

SEQ ID NO: 46574 - DNA, 17 bp, Arabidopsis thaliana
agttgttgggttggact

SEQ ID NO: 46575 - DNA, 17 bp, Arabidopsis thaliana
agttgttgtcgacaagc

SEQ ID NO: 46576 - DNA, 17 bp, Arabidopsis thaliana
agttgttgttgatgtcg

SEQ ID NO: 46577 - DNA, 17 bp, Arabidopsis thaliana
agttgttgttgttgcga

SEQ ID NO: 46578 - DNA, 17 bp, Arabidopsis thaliana
agttgttgtttgagacc

SEQ ID NO: 46579 - DNA, 17 bp, Arabidopsis thaliana
agttgtttcaaaagatt

SEQ ID NO: 46580 - DNA, 17 bp, Arabidopsis thaliana
agttgtttcacggatca

SEQ ID NO: 46581 - DNA, 17 bp, Arabidopsis thaliana
agttgtttccaggatgg

SEQ ID NO: 46582 - DNA, 17 bp, Arabidopsis thaliana
agttgtttgtcagcttg

SEQ ID NO: 46583 - DNA, 17 bp, Arabidopsis thaliana
agttgttttcgttagtg

SEQ ID NO: 46584 - DNA, 17 bp, Arabidopsis thaliana
agttgttttgagtttgc

SEQ ID NO: 46585 - DNA, 17 bp, Arabidopsis thaliana
agttgttttgggctgtg

SEQ ID NO: 46586 - DNA, 17 bp, Arabidopsis thaliana
agtttacagaagattgc

SEQ ID NO: 46587 - DNA, 17 bp, Arabidopsis thaliana
agtttacagaagtggaa

SEQ ID NO: 46588 - DNA, 17 bp, Arabidopsis thaliana
agtttacaggtgattga

SEQ ID NO: 46589 - DNA, 17 bp, Arabidopsis thaliana
agtttacatggtagtta

SEQ ID NO: 46590 - DNA, 17 bp, Arabidopsis thaliana
agtttacatttttggct

SEQ ID NO: 46591 - DNA, 17 bp, Arabidopsis thaliana
agtttacccgcgcttgg

SEQ ID NO: 46592 - DNA, 17 bp, Arabidopsis thaliana
agtttaccgaactaaaa

SEQ ID NO: 46593 - DNA, 17 bp, Arabidopsis thaliana
agtttaccgcagtttgc

SEQ ID NO: 46594 - DNA, 17 bp, Arabidopsis thaliana
agtttaccgccaaaaaa

SEQ ID NO: 46595 - DNA, 17 bp, Arabidopsis thaliana
agtttacgcgaccgcgg

SEQ ID NO: 46596 - DNA, 17 bp, Arabidopsis thaliana
agtttacttgtcctttg

SEQ ID NO: 46597 - DNA, 17 bp, Arabidopsis thaliana
agtttacttgttcttga

SEQ ID NO: 46598 - DNA, 17 bp, Arabidopsis thaliana
agtttagactcagaaaa

SEQ ID NO: 46599 - DNA, 17 bp, Arabidopsis thaliana
agtttagagatcgcctg

SEQ ID NO: 46600 - DNA, 17 bp, Arabidopsis thaliana
agtttagattccagatt

SEQ ID NO: 46601 - DNA, 17 bp, Arabidopsis thaliana
agtttagcagttgaaaa

SEQ ID NO: 46602 - DNA, 17 bp, Arabidopsis thaliana
agtttagcggtctcatc

SEQ ID NO: 46603 - DNA, 17 bp, Arabidopsis thaliana
agtttagctcagggtta

SEQ ID NO: 46604 - DNA, 17 bp, Arabidopsis thaliana
agtttagctgggttgac

SEQ ID NO: 46605 - DNA, 17 bp, Arabidopsis thaliana
agtttagcttctcggaa

SEQ ID NO: 46606 - DNA, 17 bp, Arabidopsis thaliana
agtttaggttctgagcc

SEQ ID NO: 46607 - DNA, 17 bp, Arabidopsis thaliana
agtttagtcgcctgtag

SEQ ID NO: 46608 - DNA, 17 bp, Arabidopsis thaliana
agtttagtttttcggaa

SEQ ID NO: 46609 - DNA, 17 bp, Arabidopsis thaliana
agtttatcagcttggcc

SEQ ID NO: 46610 - DNA, 17 bp, Arabidopsis thaliana
agtttatccctaggtgg

SEQ ID NO: 46611 - DNA, 17 bp, Arabidopsis thaliana
agtttatccttgttaga

SEQ ID NO: 46612 - DNA, 17 bp, Arabidopsis thaliana
agtttatctgggacgga

SEQ ID NO: 46613 - DNA, 17 bp, Arabidopsis thaliana
agtttatctgtgacgcg

SEQ ID NO: 46614 - DNA, 17 bp, Arabidopsis thaliana
agtttatcttcaaggcc

SEQ ID NO: 46615 - DNA, 17 bp, Arabidopsis thaliana
agtttatctttcatgca

SEQ ID NO: 46616 - DNA, 17 bp, Arabidopsis thaliana
agtttatgaatgtctaa

SEQ ID NO: 46617 - DNA, 17 bp, Arabidopsis thaliana
agtttatgatcctgttc

SEQ ID NO: 46618 - DNA, 17 bp, Arabidopsis thaliana
agtttatggatgatttg

SEQ ID NO: 46619 - DNA, 17 bp, Arabidopsis thaliana
agtttatggtttcggct

SEQ ID NO: 46620 - DNA, 17 bp, Arabidopsis thaliana
agtttattcttgatttg

SEQ ID NO: 46621 - DNA, 17 bp, Arabidopsis thaliana
agtttattgcttgtgtt

SEQ ID NO: 46622 - DNA, 17 bp, Arabidopsis thaliana
agtttatttggccacgt

SEQ ID NO: 46623 - DNA, 17 bp, Arabidopsis thaliana
agtttatttggcgtgtg

SEQ ID NO: 46624 - DNA, 17 bp, Arabidopsis thaliana
agtttatttttgaaggc

SEQ ID NO: 46625 - DNA, 17 bp, Arabidopsis thaliana
agtttcaaaatagtgcc

SEQ ID NO: 46626 - DNA, 17 bp, Arabidopsis thaliana
agtttcaaacttgtagt

SEQ ID NO: 46627 - DNA, 17 bp, Arabidopsis thaliana
agtttcaaattgtggcc

SEQ ID NO: 46628 - DNA, 17 bp, Arabidopsis thaliana
agtttcaacgccaaagt

SEQ ID NO: 46629 - DNA, 17 bp, Arabidopsis thaliana
agtttcaatgcaatgtg

SEQ ID NO: 46630 - DNA, 17 bp, Arabidopsis thaliana
agtttcaattcgttcat

SEQ ID NO: 46631 - DNA, 17 bp, Arabidopsis thaliana
agtttcacacatatctc

SEQ ID NO: 46632 - DNA, 17 bp, Arabidopsis thaliana
agtttcaccagacctgt

SEQ ID NO: 46633 - DNA, 17 bp, Arabidopsis thaliana
agtttcaccagacttgc

SEQ ID NO: 46634 - DNA, 17 bp, Arabidopsis thaliana
agtttcaccagacttgt

SEQ ID NO: 46635 - DNA, 17 bp, Arabidopsis thaliana
agtttcacctctccacg

SEQ ID NO: 46636 - DNA, 17 bp, Arabidopsis thaliana
agtttcaccttccacat

SEQ ID NO: 46637 - DNA, 17 bp, Arabidopsis thaliana
agtttcactcgacctgc

SEQ ID NO: 46638 - DNA, 17 bp, Arabidopsis thaliana
agtttcagaaaaggtga

SEQ ID NO: 46639 - DNA, 17 bp, Arabidopsis thaliana
agtttcagatttgacca

SEQ ID NO: 46640 - DNA, 17 bp, Arabidopsis thaliana
agtttcagccttgcgac

SEQ ID NO: 46641 - DNA, 17 bp, Arabidopsis thaliana
agtttcagcttctgcag

SEQ ID NO: 46642 - DNA, 17 bp, Arabidopsis thaliana
agtttcaggatgggtgg

SEQ ID NO: 46643 - DNA, 17 bp, Arabidopsis thaliana
agtttcaggatgggtgt

SEQ ID NO: 46644 - DNA, 17 bp, Arabidopsis thaliana
agtttcaggatgtgtga

SEQ ID NO: 46645 - DNA, 17 bp, Arabidopsis thaliana
agtttcaggtgggtgac

SEQ ID NO: 46646 - DNA, 17 bp, Arabidopsis thaliana
agtttcagtatgtgttg

SEQ ID NO: 46647 - DNA, 17 bp, Arabidopsis thaliana
agtttcagtggtttgcc

SEQ ID NO: 46648 - DNA, 17 bp, Arabidopsis thaliana
agtttcagtgtcagcga

SEQ ID NO: 46649 - DNA, 17 bp, Arabidopsis thaliana
agtttcagttatctcaa

SEQ ID NO: 46650 - DNA, 17 bp, Arabidopsis thaliana
agtttcagttctggccg

SEQ ID NO: 46651 - DNA, 17 bp, Arabidopsis thaliana
agtttcagttcttgtac

SEQ ID NO: 46652 - DNA, 17 bp, Arabidopsis thaliana
agtttcagtttggtccg

SEQ ID NO: 46653 - DNA, 17 bp, Arabidopsis thaliana
agtttcatcacaaattt

SEQ ID NO: 46654 - DNA, 17 bp, Arabidopsis thaliana
agtttcatctcaagcgt

SEQ ID NO: 46655 - DNA, 17 bp, Arabidopsis thaliana
agtttcatctttccacg

SEQ ID NO: 46656 - DNA, 17 bp, Arabidopsis thaliana
agtttcattaccgggat

SEQ ID NO: 46657 - DNA, 17 bp, Arabidopsis thaliana
agtttccaaaaagtgcc

SEQ ID NO: 46658 - DNA, 17 bp, Arabidopsis thaliana
agtttccaactactaga

SEQ ID NO: 46659 - DNA, 17 bp, Arabidopsis thaliana
agtttccactggattgg

SEQ ID NO: 46660 - DNA, 17 bp, Arabidopsis thaliana
agtttccagaattacag

SEQ ID NO: 46661 - DNA, 17 bp, Arabidopsis thaliana
agtttccagaccacaca

SEQ ID NO: 46662 - DNA, 17 bp, Arabidopsis thaliana
agtttccagagtacgag

SEQ ID NO: 46663 - DNA, 17 bp, Arabidopsis thaliana
agtttccagggtgggca

SEQ ID NO: 46664 - DNA, 17 bp, Arabidopsis thaliana
agtttccatatgtgatg

SEQ ID NO: 46665 - DNA, 17 bp, Arabidopsis thaliana
agtttcccattaggtgg

SEQ ID NO: 46666 - DNA, 17 bp, Arabidopsis thaliana
agtttcccggctggtgc

SEQ ID NO: 46667 - DNA, 17 bp, Arabidopsis thaliana
agtttccctcaggatag

SEQ ID NO: 46668 - DNA, 17 bp, Arabidopsis thaliana
agtttccctggaattgc

SEQ ID NO: 46669 - DNA, 17 bp, Arabidopsis thaliana
agtttccgaagacttta

SEQ ID NO: 46670 - DNA, 17 bp, Arabidopsis thaliana
agtttccgaagactttc

SEQ ID NO: 46671 - DNA, 17 bp, Arabidopsis thaliana
agtttccgacaaattgc

SEQ ID NO: 46672 - DNA, 17 bp, Arabidopsis thaliana
agtttccgaggcattag

SEQ ID NO: 46673 - DNA, 17 bp, Arabidopsis thaliana
agtttccgatttgggcg

SEQ ID NO: 46674 - DNA, 17 bp, Arabidopsis thaliana
agtttccggatctgctt

SEQ ID NO: 46675 - DNA, 17 bp, Arabidopsis thaliana
agtttccgtctgggtat

SEQ ID NO: 46676 - DNA, 17 bp, Arabidopsis thaliana
agtttccgttaacgggg

SEQ ID NO: 46677 - DNA, 17 bp, Arabidopsis thaliana
agtttccgttacgcatc

SEQ ID NO: 46678 - DNA, 17 bp, Arabidopsis thaliana
agtttccgttgttggtc

SEQ ID NO: 46679 - DNA, 17 bp, Arabidopsis thaliana
agtttcctactccgccc

SEQ ID NO: 46680 - DNA, 17 bp, Arabidopsis thaliana
agtttcctctccaaatt

SEQ ID NO: 46681 - DNA, 17 bp, Arabidopsis thaliana
agtttcctcttgtaagc

SEQ ID NO: 46682 - DNA, 17 bp, Arabidopsis thaliana
agtttcctgagaatact

SEQ ID NO: 46683 - DNA, 17 bp, Arabidopsis thaliana
agtttcctgccagcatt

SEQ ID NO: 46684 - DNA, 17 bp, Arabidopsis thaliana
agtttccttctgggtat

SEQ ID NO: 46685 - DNA, 17 bp, Arabidopsis thaliana
agtttcgaagagcagac

SEQ ID NO: 46686 - DNA, 17 bp, Arabidopsis thaliana
agtttcgacaattttac

SEQ ID NO: 46687 - DNA, 17 bp, Arabidopsis thaliana
agtttcgacacttctct

SEQ ID NO: 46688 - DNA, 17 bp, Arabidopsis thaliana
agtttcgagaatgctga

SEQ ID NO: 46689 - DNA, 17 bp, Arabidopsis thaliana
agtttcgatccagaact

SEQ ID NO: 46690 - DNA, 17 bp, Arabidopsis thaliana
agtttcgatgtcctcat

SEQ ID NO: 46691 - DNA, 17 bp, Arabidopsis thaliana
agtttcgatgtgggatt

SEQ ID NO: 46692 - DNA, 17 bp, Arabidopsis thaliana
agtttcgattctctgct

SEQ ID NO: 46693 - DNA, 17 bp, Arabidopsis thaliana
agtttcgcaatttgcta

SEQ ID NO: 46694 - DNA, 17 bp, Arabidopsis thaliana
agtttcgccactttttt

SEQ ID NO: 46695 - DNA, 17 bp, Arabidopsis thaliana
agtttcgcccagtgact

SEQ ID NO: 46696 - DNA, 17 bp, Arabidopsis thaliana
agtttcgcctaaggtct

SEQ ID NO: 46697 - DNA, 17 bp, Arabidopsis thaliana
agtttcgcctaaggttt

SEQ ID NO: 46698 - DNA, 17 bp, Arabidopsis thaliana
agtttcgcctaccgtct

SEQ ID NO: 46699 - DNA, 17 bp, Arabidopsis thaliana
agtttcgcctagggctg

SEQ ID NO: 46700 - DNA, 17 bp, Arabidopsis thaliana
agtttcgcctagggtct

SEQ ID NO: 46701 - DNA, 17 bp, Arabidopsis thaliana
agtttcgcctagggttt

SEQ ID NO: 46702 - DNA, 17 bp, Arabidopsis thaliana
agtttcgcgaattaccg

SEQ ID NO: 46703 - DNA, 17 bp, Arabidopsis thaliana
agtttcgcggaacgcca

SEQ ID NO: 46704 - DNA, 17 bp, Arabidopsis thaliana
agtttcgcggttcggaa

SEQ ID NO: 46705 - DNA, 17 bp, Arabidopsis thaliana
agtttcgcttaacttac

SEQ ID NO: 46706 - DNA, 17 bp, Arabidopsis thaliana
agtttcggagcaacgtc

SEQ ID NO: 46707 - DNA, 17 bp, Arabidopsis thaliana
agtttcggatatgggac

SEQ ID NO: 46708 - DNA, 17 bp, Arabidopsis thaliana
agtttcggatcacggcc

SEQ ID NO: 46709 - DNA, 17 bp, Arabidopsis thaliana
agtttcgggcctgaggg

SEQ ID NO: 46710 - DNA, 17 bp, Arabidopsis thaliana
agtttcgggtggaatgt

SEQ ID NO: 46711 - DNA, 17 bp, Arabidopsis thaliana
agtttcgggtgtagttc

SEQ ID NO: 46712 - DNA, 17 bp, Arabidopsis thaliana
agtttcggttatgggtg

SEQ ID NO: 46713 - DNA, 17 bp, Arabidopsis thaliana
agtttcggttcggttgc

SEQ ID NO: 46714 - DNA, 17 bp, Arabidopsis thaliana
agtttcggttgaccagt

SEQ ID NO: 46715 - DNA, 17 bp, Arabidopsis thaliana
agtttcgtaaggcattt

SEQ ID NO: 46716 - DNA, 17 bp, Arabidopsis thaliana
agtttcgtaatttctgc

SEQ ID NO: 46717 - DNA, 17 bp, Arabidopsis thaliana
agtttcgtcaggggcat

SEQ ID NO: 46718 - DNA, 17 bp, Arabidopsis thaliana
agtttcgtcaggtcgcc

SEQ ID NO: 46719 - DNA, 17 bp, Arabidopsis thaliana
agtttcgtcccaagaat

SEQ ID NO: 46720 - DNA, 17 bp, Arabidopsis thaliana
agtttcgtcccaagcgt

SEQ ID NO: 46721 - DNA, 17 bp, Arabidopsis thaliana
agtttcgtcctaagcgt

SEQ ID NO: 46722 - DNA, 17 bp, Arabidopsis thaliana
agtttcgtcgtgacttt

SEQ ID NO: 46723 - DNA, 17 bp, Arabidopsis thaliana
agtttcgtctagggttt

SEQ ID NO: 46724 - DNA, 17 bp, Arabidopsis thaliana
agtttcgtctcaagcgt

SEQ ID NO: 46725 - DNA, 17 bp, Arabidopsis thaliana
agtttcgtcttcgatgt

SEQ ID NO: 46726 - DNA, 17 bp, Arabidopsis thaliana
agtttcgtgtcccaccg

SEQ ID NO: 46727 - DNA, 17 bp, Arabidopsis thaliana
agtttcgtgttgcatcc

SEQ ID NO: 46728 - DNA, 17 bp, Arabidopsis thaliana
agtttcgttgaccgagc

SEQ ID NO: 46729 - DNA, 17 bp, Arabidopsis thaliana
agtttcgttgactgagc

SEQ ID NO: 46730 - DNA, 17 bp, Arabidopsis thaliana
agtttcgttgactggcc

SEQ ID NO: 46731 - DNA, 17 bp, Arabidopsis thaliana
agtttcgttgactgggc

SEQ ID NO: 46732 - DNA, 17 bp, Arabidopsis thaliana
agtttcgttgactgggt

SEQ ID NO: 46733 - DNA, 17 bp, Arabidopsis thaliana
agtttcgttgactttgc

SEQ ID NO: 46734 - DNA, 17 bp, Arabidopsis thaliana
agtttcgttggaaatga

SEQ ID NO: 46735 - DNA, 17 bp, Arabidopsis thaliana
agtttcgttggctcgtg

SEQ ID NO: 46736 - DNA, 17 bp, Arabidopsis thaliana
agtttcgtttgcctgtc

SEQ ID NO: 46737 - DNA, 17 bp, Arabidopsis thaliana
agtttctaacaagaaag

SEQ ID NO: 46738 - DNA, 17 bp, Arabidopsis thaliana
agtttctaactcatagg

SEQ ID NO: 46739 - DNA, 17 bp, Arabidopsis thaliana
agtttctaaggtttgcc

SEQ ID NO: 46740 - DNA, 17 bp, Arabidopsis thaliana
agtttctaatcaggagt

SEQ ID NO: 46741 - DNA, 17 bp, Arabidopsis thaliana
agtttctaattacatcc

SEQ ID NO: 46742 - DNA, 17 bp, Arabidopsis thaliana
agtttctaccggagtgt

SEQ ID NO: 46743 - DNA, 17 bp, Arabidopsis thaliana
agtttctaccgtttagc

SEQ ID NO: 46744 - DNA, 17 bp, Arabidopsis thaliana
agtttctagtgattgcc

SEQ ID NO: 46745 - DNA, 17 bp, Arabidopsis thaliana
agtttctatgagcatat

SEQ ID NO: 46746 - DNA, 17 bp, Arabidopsis thaliana
agtttctatggggcgta

SEQ ID NO: 46747 - DNA, 17 bp, Arabidopsis thaliana
agtttctatgtcgtagg

SEQ ID NO: 46748 - DNA, 17 bp, Arabidopsis thaliana
agtttctattatatgat

SEQ ID NO: 46749 - DNA, 17 bp, Arabidopsis thaliana
agtttctcaaagagtct

SEQ ID NO: 46750 - DNA, 17 bp, Arabidopsis thaliana
agtttctcagctgtagc

SEQ ID NO: 46751 - DNA, 17 bp, Arabidopsis thaliana
agtttctccgaatcggt

SEQ ID NO: 46752 - DNA, 17 bp, Arabidopsis thaliana
agtttctcggaatcggt

SEQ ID NO: 46753 - DNA, 17 bp, Arabidopsis thaliana
agtttctcggccgaatc

SEQ ID NO: 46754 - DNA, 17 bp, Arabidopsis thaliana
agtttctcgttgactgc

SEQ ID NO: 46755 - DNA, 17 bp, Arabidopsis thaliana
agtttctctctcctgag

SEQ ID NO: 46756 - DNA, 17 bp, Arabidopsis thaliana
agtttctctgaattggt

SEQ ID NO: 46757 - DNA, 17 bp, Arabidopsis thaliana
agtttctcttttggggg

SEQ ID NO: 46758 - DNA, 17 bp, Arabidopsis thaliana
agtttctgaagacattt

SEQ ID NO: 46759 - DNA, 17 bp, Arabidopsis thaliana
agtttctgcatactgac

SEQ ID NO: 46760 - DNA, 17 bp, Arabidopsis thaliana
agtttctgcatgcaatt

SEQ ID NO: 46761 - DNA, 17 bp, Arabidopsis thaliana
agtttctgctgctggag

SEQ ID NO: 46762 - DNA, 17 bp, Arabidopsis thaliana
agtttctgcttctttgc

SEQ ID NO: 46763 - DNA, 17 bp, Arabidopsis thaliana
agtttctgcttttttgg

SEQ ID NO: 46764 - DNA, 17 bp, Arabidopsis thaliana
agtttctggagacattt

SEQ ID NO: 46765 - DNA, 17 bp, Arabidopsis thaliana
agtttctgggctttggt

SEQ ID NO: 46766 - DNA, 17 bp, Arabidopsis thaliana
agtttctggttcttttg

SEQ ID NO: 46767 - DNA, 17 bp, Arabidopsis thaliana
agtttctgtacacatct

SEQ ID NO: 46768 - DNA, 17 bp, Arabidopsis thaliana
agtttctgtcaaaatgg

SEQ ID NO: 46769 - DNA, 17 bp, Arabidopsis thaliana
agtttctgtcgtcaaga

SEQ ID NO: 46770 - DNA, 17 bp, Arabidopsis thaliana
agtttctgttatatgac

SEQ ID NO: 46771 - DNA, 17 bp, Arabidopsis thaliana
agtttcttaagcgagag

SEQ ID NO: 46772 - DNA, 17 bp, Arabidopsis thaliana
agtttcttcacagcgat

SEQ ID NO: 46773 - DNA, 17 bp, Arabidopsis thaliana
agtttcttcaccggatc

SEQ ID NO: 46774 - DNA, 17 bp, Arabidopsis thaliana
agtttcttcagtggagt

SEQ ID NO: 46775 - DNA, 17 bp, Arabidopsis thaliana
agtttcttcgggagacg

SEQ ID NO: 46776 - DNA, 17 bp, Arabidopsis thaliana
agtttcttcgtcgcagg

SEQ ID NO: 46777 - DNA, 17 bp, Arabidopsis thaliana
agtttcttctcgaactg

SEQ ID NO: 46778 - DNA, 17 bp, Arabidopsis thaliana
agtttcttctggagcag

SEQ ID NO: 46779 - DNA, 17 bp, Arabidopsis thaliana
agtttcttctgggatct

SEQ ID NO: 46780 - DNA, 17 bp, Arabidopsis thaliana
agtttcttctgtcctct

SEQ ID NO: 46781 - DNA, 17 bp, Arabidopsis thaliana
agtttcttcttgagcag

SEQ ID NO: 46782 - DNA, 17 bp, Arabidopsis thaliana
agtttcttctttctgcg

SEQ ID NO: 46783 - DNA, 17 bp, Arabidopsis thaliana
agtttcttggtgctatc

SEQ ID NO: 46784 - DNA, 17 bp, Arabidopsis thaliana
agtttctttcgtgttgc

SEQ ID NO: 46785 - DNA, 17 bp, Arabidopsis thaliana
agtttcttttgcccgat

SEQ ID NO: 46786 - DNA, 17 bp, Arabidopsis thaliana
agtttgaactccacgat

SEQ ID NO: 46787 - DNA, 17 bp, Arabidopsis thaliana
agtttgaatctgctttg

SEQ ID NO: 46788 - DNA, 17 bp, Arabidopsis thaliana
agtttgaccagaatttt

SEQ ID NO: 46789 - DNA, 17 bp, Arabidopsis thaliana
agtttgacctcggttcc

SEQ ID NO: 46790 - DNA, 17 bp, Arabidopsis thaliana
agtttgactccggtgta

SEQ ID NO: 46791 - DNA, 17 bp, Arabidopsis thaliana
agtttgactcggaagct

SEQ ID NO: 46792 - DNA, 17 bp, Arabidopsis thaliana
agtttgactctagtccg

SEQ ID NO: 46793 - DNA, 17 bp, Arabidopsis thaliana
agtttgactggggcggt

SEQ ID NO: 46794 - DNA, 17 bp, Arabidopsis thaliana
agtttgactttgaactg

SEQ ID NO: 46795 - DNA, 17 bp, Arabidopsis thaliana
agtttgacttttggggg

SEQ ID NO: 46796 - DNA, 17 bp, Arabidopsis thaliana
agtttgatcaggttgtt

SEQ ID NO: 46797 - DNA, 17 bp, Arabidopsis thaliana
agtttgatcatgtgtgg

SEQ ID NO: 46798 - DNA, 17 bp, Arabidopsis thaliana
agtttgatctcggttcg

SEQ ID NO: 46799 - DNA, 17 bp, Arabidopsis thaliana
agtttgatctgttcatt

SEQ ID NO: 46800 - DNA, 17 bp, Arabidopsis thaliana
agtttgatgaagtggcg

SEQ ID NO: 46801 - DNA, 17 bp, Arabidopsis thaliana
agtttgatgagcaagaa

SEQ ID NO: 46802 - DNA, 17 bp, Arabidopsis thaliana
agtttgatttccagttg

SEQ ID NO: 46803 - DNA, 17 bp, Arabidopsis thaliana
agtttgcaaacttgacc

SEQ ID NO: 46804 - DNA, 17 bp, Arabidopsis thaliana
agtttgcaagtagatcg

SEQ ID NO: 46805 - DNA, 17 bp, Arabidopsis thaliana
agtttgcaatccgtgat

SEQ ID NO: 46806 - DNA, 17 bp, Arabidopsis thaliana
agtttgcaatggttgac

SEQ ID NO: 46807 - DNA, 17 bp, Arabidopsis thaliana
agtttgcactgaaccgc

SEQ ID NO: 46808 - DNA, 17 bp, Arabidopsis thaliana
agtttgcagacttcatc

SEQ ID NO: 46809 - DNA, 17 bp, Arabidopsis thaliana
agtttgcagagaagttg

SEQ ID NO: 46810 - DNA, 17 bp, Arabidopsis thaliana
agtttgcagagacctcc

SEQ ID NO: 46811 - DNA, 17 bp, Arabidopsis thaliana
agtttgcagatacctac

SEQ ID NO: 46812 - DNA, 17 bp, Arabidopsis thaliana
agtttgcaggctgttat

SEQ ID NO: 46813 - DNA, 17 bp, Arabidopsis thaliana
agtttgcaggttgatct

SEQ ID NO: 46814 - DNA, 17 bp, Arabidopsis thaliana
agtttgcaggtttgatc

SEQ ID NO: 46815 - DNA, 17 bp, Arabidopsis thaliana
agtttgcaggttttgat

SEQ ID NO: 46816 - DNA, 17 bp, Arabidopsis thaliana
agtttgcagtatggcga

SEQ ID NO: 46817 - DNA, 17 bp, Arabidopsis thaliana
agtttgcagtctgttat

SEQ ID NO: 46818 - DNA, 17 bp, Arabidopsis thaliana
agtttgccaaggtgagt

SEQ ID NO: 46819 - DNA, 17 bp, Arabidopsis thaliana
agtttgccaggcagcct

SEQ ID NO: 46820 - DNA, 17 bp, Arabidopsis thaliana
agtttgccgcagacttg

SEQ ID NO: 46821 - DNA, 17 bp, Arabidopsis thaliana
agtttgcctaagacttg

SEQ ID NO: 46822 - DNA, 17 bp, Arabidopsis thaliana
agtttgcgaaggagctg

SEQ ID NO: 46823 - DNA, 17 bp, Arabidopsis thaliana
agtttgcgcttcacaag

SEQ ID NO: 46824 - DNA, 17 bp, Arabidopsis thaliana
agtttgcggaaacggac

SEQ ID NO: 46825 - DNA, 17 bp, Arabidopsis thaliana
agtttgcggagaagcaa

SEQ ID NO: 46826 - DNA, 17 bp, Arabidopsis thaliana
agtttgcggagaagcta

SEQ ID NO: 46827 - DNA, 17 bp, Arabidopsis thaliana
agtttgcggagaagctg

SEQ ID NO: 46828 - DNA, 17 bp, Arabidopsis thaliana
agtttgcgggaccattc

SEQ ID NO: 46829 - DNA, 17 bp, Arabidopsis thaliana
agtttgcgttgactcgg

SEQ ID NO: 46830 - DNA, 17 bp, Arabidopsis thaliana
agtttgcgttgcctggc

SEQ ID NO: 46831 - DNA, 17 bp, Arabidopsis thaliana
agtttgctaactcatct

SEQ ID NO: 46832 - DNA, 17 bp, Arabidopsis thaliana
agtttgctaatccgtct

SEQ ID NO: 46833 - DNA, 17 bp, Arabidopsis thaliana
agtttgctatcattgca

SEQ ID NO: 46834 - DNA, 17 bp, Arabidopsis thaliana
agtttgctatgtgtctc

SEQ ID NO: 46835 - DNA, 17 bp, Arabidopsis thaliana
agtttgctcaccggata

SEQ ID NO: 46836 - DNA, 17 bp, Arabidopsis thaliana
agtttgctcgcggtagt

SEQ ID NO: 46837 - DNA, 17 bp, Arabidopsis thaliana
agtttgctcgcggtggt

SEQ ID NO: 46838 - DNA, 17 bp, Arabidopsis thaliana
agtttgctgagaataca

SEQ ID NO: 46839 - DNA, 17 bp, Arabidopsis thaliana
agtttgcttacaatgtt

SEQ ID NO: 46840 - DNA, 17 bp, Arabidopsis thaliana
agtttgcttaggtgtgt

SEQ ID NO: 46841 - DNA, 17 bp, Arabidopsis thaliana
agtttgcttccagacag

SEQ ID NO: 46842 - DNA, 17 bp, Arabidopsis thaliana
agtttgcttctactaaa

SEQ ID NO: 46843 - DNA, 17 bp, Arabidopsis thaliana
agtttgctttgacattt

SEQ ID NO: 46844 - DNA, 17 bp, Arabidopsis thaliana
agtttgctttttgtacc

SEQ ID NO: 46845 - DNA, 17 bp, Arabidopsis thaliana
agtttggaagaccttgt

SEQ ID NO: 46846 - DNA, 17 bp, Arabidopsis thaliana
agtttggaatcactatg

SEQ ID NO: 46847 - DNA, 17 bp, Arabidopsis thaliana
agtttggattgggtagg

SEQ ID NO: 46848 - DNA, 17 bp, Arabidopsis thaliana
agtttggcattctcacg

SEQ ID NO: 46849 - DNA, 17 bp, Arabidopsis thaliana
agtttggcccaaccaga

SEQ ID NO: 46850 - DNA, 17 bp, Arabidopsis thaliana
agtttggcccaacctga

SEQ ID NO: 46851 - DNA, 17 bp, Arabidopsis thaliana
agtttggcctaaactga

SEQ ID NO: 46852 - DNA, 17 bp, Arabidopsis thaliana
agtttggcgctattttg

SEQ ID NO: 46853 - DNA, 17 bp, Arabidopsis thaliana
agtttggcggagagttc

SEQ ID NO: 46854 - DNA, 17 bp, Arabidopsis thaliana
agtttggcgggaaaatt

SEQ ID NO: 46855 - DNA, 17 bp, Arabidopsis thaliana
agtttggctgcagagac

SEQ ID NO: 46856 - DNA, 17 bp, Arabidopsis thaliana
agtttggctggggcggc

SEQ ID NO: 46857 - DNA, 17 bp, Arabidopsis thaliana
agtttggcttggctttt

SEQ ID NO: 46858 - DNA, 17 bp, Arabidopsis thaliana
agtttgggatctatggt

SEQ ID NO: 46859 - DNA, 17 bp, Arabidopsis thaliana
agtttgggattaatggg

SEQ ID NO: 46860 - DNA, 17 bp, Arabidopsis thaliana
agtttgggcagccacaa

SEQ ID NO: 46861 - DNA, 17 bp, Arabidopsis thaliana
agtttgggctataactg

SEQ ID NO: 46862 - DNA, 17 bp, Arabidopsis thaliana
agtttgggctcacggta

SEQ ID NO: 46863 - DNA, 17 bp, Arabidopsis thaliana
agtttgggctctatctg

SEQ ID NO: 46864 - DNA, 17 bp, Arabidopsis thaliana
agtttgggctctattta

SEQ ID NO: 46865 - DNA, 17 bp, Arabidopsis thaliana
agtttgggctctatttg

SEQ ID NO: 46866 - DNA, 17 bp, Arabidopsis thaliana
agtttgggctttatctg

SEQ ID NO: 46867 - DNA, 17 bp, Arabidopsis thaliana
agtttggggactatggt

SEQ ID NO: 46868 - DNA, 17 bp, Arabidopsis thaliana
agtttgggtcctatctg

SEQ ID NO: 46869 - DNA, 17 bp, Arabidopsis thaliana
agtttggtctacgtgga

SEQ ID NO: 46870 - DNA, 17 bp, Arabidopsis thaliana
agtttggtgtagaattt

SEQ ID NO: 46871 - DNA, 17 bp, Arabidopsis thaliana
agtttggttcacttgat

SEQ ID NO: 46872 - DNA, 17 bp, Arabidopsis thaliana
agtttgtaagtgccaat

SEQ ID NO: 46873 - DNA, 17 bp, Arabidopsis thaliana
agtttgtacaactttga

SEQ ID NO: 46874 - DNA, 17 bp, Arabidopsis thaliana
agtttgtacagctttga

SEQ ID NO: 46875 - DNA, 17 bp, Arabidopsis thaliana
agtttgtaccgaaccac

SEQ ID NO: 46876 - DNA, 17 bp, Arabidopsis thaliana
agtttgtaccgaaccgt

SEQ ID NO: 46877 - DNA, 17 bp, Arabidopsis thaliana
agtttgtagagacctcc

SEQ ID NO: 46878 - DNA, 17 bp, Arabidopsis thaliana
agtttgtagattttgcc

SEQ ID NO: 46879 - DNA, 17 bp, Arabidopsis thaliana
agtttgtaggcctgttc

SEQ ID NO: 46880 - DNA, 17 bp, Arabidopsis thaliana
agtttgtcaagatcgtg

SEQ ID NO: 46881 - DNA, 17 bp, Arabidopsis thaliana
agtttgtcactaaccta

SEQ ID NO: 46882 - DNA, 17 bp, Arabidopsis thaliana
agtttgtccaaccgtta

SEQ ID NO: 46883 - DNA, 17 bp, Arabidopsis thaliana
agtttgtccgcttgggc

SEQ ID NO: 46884 - DNA, 17 bp, Arabidopsis thaliana
agtttgtcggtttggcg

SEQ ID NO: 46885 - DNA, 17 bp, Arabidopsis thaliana
agtttgtctcgttgttt

SEQ ID NO: 46886 - DNA, 17 bp, Arabidopsis thaliana
agtttgtctgcggttta

SEQ ID NO: 46887 - DNA, 17 bp, Arabidopsis thaliana
agtttgtcttgtaacct

SEQ ID NO: 46888 - DNA, 17 bp, Arabidopsis thaliana
agtttgtcttgtgacct

SEQ ID NO: 46889 - DNA, 17 bp, Arabidopsis thaliana
agtttgtcttttccctg

SEQ ID NO: 46890 - DNA, 17 bp, Arabidopsis thaliana
agtttgtgaaagatcag

SEQ ID NO: 46891 - DNA, 17 bp, Arabidopsis thaliana
agtttgtgaactcatcc

SEQ ID NO: 46892 - DNA, 17 bp, Arabidopsis thaliana
agtttgtgacgcactgt

SEQ ID NO: 46893 - DNA, 17 bp, Arabidopsis thaliana
agtttgtgatcattcga

SEQ ID NO: 46894 - DNA, 17 bp, Arabidopsis thaliana
agtttgtgatgttgctg

SEQ ID NO: 46895 - DNA, 17 bp, Arabidopsis thaliana
agtttgtgctctgcttc

SEQ ID NO: 46896 - DNA, 17 bp, Arabidopsis thaliana
agtttgtgctgcttttc

SEQ ID NO: 46897 - DNA, 17 bp, Arabidopsis thaliana
agtttgtgtgaaatgac

SEQ ID NO: 46898 - DNA, 17 bp, Arabidopsis thaliana
agtttgtgtgaaatggc

SEQ ID NO: 46899 - DNA, 17 bp, Arabidopsis thaliana
agtttgtgttatgctat

SEQ ID NO: 46900 - DNA, 17 bp, Arabidopsis thaliana
agtttgtgttgactcgg

SEQ ID NO: 46901 - DNA, 17 bp, Arabidopsis thaliana
agtttgttccggtgtgc

SEQ ID NO: 46902 - DNA, 17 bp, Arabidopsis thaliana
agtttgttctacggaag

SEQ ID NO: 46903 - DNA, 17 bp, Arabidopsis thaliana
agtttgttctcagccac

SEQ ID NO: 46904 - DNA, 17 bp, Arabidopsis thaliana
agtttgttgacggtcct

SEQ ID NO: 46905 - DNA, 17 bp, Arabidopsis thaliana
agtttgttgatggattg

SEQ ID NO: 46906 - DNA, 17 bp, Arabidopsis thaliana
agtttgttgtgacatag

SEQ ID NO: 46907 - DNA, 17 bp, Arabidopsis thaliana
agtttgtttttcgtttt

SEQ ID NO: 46908 - DNA, 17 bp, Arabidopsis thaliana
agtttgttttttgttcc

SEQ ID NO: 46909 - DNA, 17 bp, Arabidopsis thaliana
agttttaagatccgcat

SEQ ID NO: 46910 - DNA, 17 bp, Arabidopsis thaliana
agttttaagttggaaat

SEQ ID NO: 46911 - DNA, 17 bp, Arabidopsis thaliana
agttttacctatgatcg

SEQ ID NO: 46912 - DNA, 17 bp, Arabidopsis thaliana
agttttactctactacg

SEQ ID NO: 46913 - DNA, 17 bp, Arabidopsis thaliana
agttttagtacccgtgg

SEQ ID NO: 46914 - DNA, 17 bp, Arabidopsis thaliana
agttttatagagattca

SEQ ID NO: 46915 - DNA, 17 bp, Arabidopsis thaliana
agttttatcattgacga

SEQ ID NO: 46916 - DNA, 17 bp, Arabidopsis thaliana
agttttatccccaaact

SEQ ID NO: 46917 - DNA, 17 bp, Arabidopsis thaliana
agttttatctcaggagt

SEQ ID NO: 46918 - DNA, 17 bp, Arabidopsis thaliana
agttttatgtacttgca

SEQ ID NO: 46919 - DNA, 17 bp, Arabidopsis thaliana
agttttatgtctcagac

SEQ ID NO: 46920 - DNA, 17 bp, Arabidopsis thaliana
agttttattgtaccgtt

SEQ ID NO: 46921 - DNA, 17 bp, Arabidopsis thaliana
agttttatttccgcaga

SEQ ID NO: 46922 - DNA, 17 bp, Arabidopsis thaliana
agttttcaacaccacca

SEQ ID NO: 46923 - DNA, 17 bp, Arabidopsis thaliana
agttttcaacacctcca

SEQ ID NO: 46924 - DNA, 17 bp, Arabidopsis thaliana
agttttcaactacaatt

SEQ ID NO: 46925 - DNA, 17 bp, Arabidopsis thaliana
agttttcaactaggtca

SEQ ID NO: 46926 - DNA, 17 bp, Arabidopsis thaliana
agttttcaaggaataca

SEQ ID NO: 46927 - DNA, 17 bp, Arabidopsis thaliana
agttttcaccagcgcac

SEQ ID NO: 46928 - DNA, 17 bp, Arabidopsis thaliana
agttttcaggtggaggt

SEQ ID NO: 46929 - DNA, 17 bp, Arabidopsis thaliana
agttttcatttggaacc

SEQ ID NO: 46930 - DNA, 17 bp, Arabidopsis thaliana
agttttcatttggagcg

SEQ ID NO: 46931 - DNA, 17 bp, Arabidopsis thaliana
agttttccagaagatca

SEQ ID NO: 46932 - DNA, 17 bp, Arabidopsis thaliana
agttttcctactcgtac

SEQ ID NO: 46933 - DNA, 17 bp, Arabidopsis thaliana
agttttccttcttcggc

SEQ ID NO: 46934 - DNA, 17 bp, Arabidopsis thaliana
agttttcgcaatcaagg

SEQ ID NO: 46935 - DNA, 17 bp, Arabidopsis thaliana
agttttcgccgtgtgtt

SEQ ID NO: 46936 - DNA, 17 bp, Arabidopsis thaliana
agttttcgccgtttttg

SEQ ID NO: 46937 - DNA, 17 bp, Arabidopsis thaliana
agttttcggcgtaagac

SEQ ID NO: 46938 - DNA, 17 bp, Arabidopsis thaliana
agttttcgggtctaaat

SEQ ID NO: 46939 - DNA, 17 bp, Arabidopsis thaliana
agttttcggtgaagttt

SEQ ID NO: 46940 - DNA, 17 bp, Arabidopsis thaliana
agttttcggttggaccg

SEQ ID NO: 46941 - DNA, 17 bp, Arabidopsis thaliana
agttttcgtaagttggc

SEQ ID NO: 46942 - DNA, 17 bp, Arabidopsis thaliana
agttttcgtgacgtttt

SEQ ID NO: 46943 - DNA, 17 bp, Arabidopsis thaliana
agttttcgttgaaggaa

SEQ ID NO: 46944 - DNA, 17 bp, Arabidopsis thaliana
agttttctcaacacagg

SEQ ID NO: 46945 - DNA, 17 bp, Arabidopsis thaliana
agttttctcagcagttc

SEQ ID NO: 46946 - DNA, 17 bp, Arabidopsis thaliana
agttttctcagtttggt

SEQ ID NO: 46947 - DNA, 17 bp, Arabidopsis thaliana
agttttctcatcatttg

SEQ ID NO: 46948 - DNA, 17 bp, Arabidopsis thaliana
agttttctcatggcaca

SEQ ID NO: 46949 - DNA, 17 bp, Arabidopsis thaliana
agttttctccaggtgct

SEQ ID NO: 46950 - DNA, 17 bp, Arabidopsis thaliana
agttttctcgacctgtc

SEQ ID NO: 46951 - DNA, 17 bp, Arabidopsis thaliana
agttttctctagtggcg

SEQ ID NO: 46952 - DNA, 17 bp, Arabidopsis thaliana
agttttctgacggaccg

SEQ ID NO: 46953 - DNA, 17 bp, Arabidopsis thaliana
agttttctgcaaagcaa

SEQ ID NO: 46954 - DNA, 17 bp, Arabidopsis thaliana
agttttctggattgggc

SEQ ID NO: 46955 - DNA, 17 bp, Arabidopsis thaliana
agttttctgttggccct

SEQ ID NO: 46956 - DNA, 17 bp, Arabidopsis thaliana
agttttcttcggttgta

SEQ ID NO: 46957 - DNA, 17 bp, Arabidopsis thaliana
agttttcttgcaagacc

SEQ ID NO: 46958 - DNA, 17 bp, Arabidopsis thaliana
agttttgaagtgcggtc

SEQ ID NO: 46959 - DNA, 17 bp, Arabidopsis thaliana
agttttgaagttattac

SEQ ID NO: 46960 - DNA, 17 bp, Arabidopsis thaliana
agttttgaataagtctc

SEQ ID NO: 46961 - DNA, 17 bp, Arabidopsis thaliana
agttttgactgcagaga

SEQ ID NO: 46962 - DNA, 17 bp, Arabidopsis thaliana
agttttgacttgagcgc

SEQ ID NO: 46963 - DNA, 17 bp, Arabidopsis thaliana
agttttgaggtcgacgg

SEQ ID NO: 46964 - DNA, 17 bp, Arabidopsis thaliana
agttttgagtgcggtct

SEQ ID NO: 46965 - DNA, 17 bp, Arabidopsis thaliana
agttttgagtgcggttt

SEQ ID NO: 46966 - DNA, 17 bp, Arabidopsis thaliana
agttttgagtgcttttg

SEQ ID NO: 46967 - DNA, 17 bp, Arabidopsis thaliana
agttttgatggtacagt

SEQ ID NO: 46968 - DNA, 17 bp, Arabidopsis thaliana
agttttgatgtcggtct

SEQ ID NO: 46969 - DNA, 17 bp, Arabidopsis thaliana
agttttgatgtgtctgt

SEQ ID NO: 46970 - DNA, 17 bp, Arabidopsis thaliana
agttttgatgttcgttt

SEQ ID NO: 46971 - DNA, 17 bp, Arabidopsis thaliana
agttttgatttagggta

SEQ ID NO: 46972 - DNA, 17 bp, Arabidopsis thaliana
agttttgatttcgggta

SEQ ID NO: 46973 - DNA, 17 bp, Arabidopsis thaliana
agttttgcaaatctcca

SEQ ID NO: 46974 - DNA, 17 bp, Arabidopsis thaliana
agttttgcaaatctccc

SEQ ID NO: 46975 - DNA, 17 bp, Arabidopsis thaliana
agttttgcaattgctag

SEQ ID NO: 46976 - DNA, 17 bp, Arabidopsis thaliana
agttttgcactattcca

SEQ ID NO: 46977 - DNA, 17 bp, Arabidopsis thaliana
agttttgcactattccg

SEQ ID NO: 46978 - DNA, 17 bp, Arabidopsis thaliana
agttttgcaggagttag

SEQ ID NO: 46979 - DNA, 17 bp, Arabidopsis thaliana
agttttgcaggctcaga

SEQ ID NO: 46980 - DNA, 17 bp, Arabidopsis thaliana
agttttgcagtccgaca

SEQ ID NO: 46981 - DNA, 17 bp, Arabidopsis thaliana
agttttgccaaggatgt

SEQ ID NO: 46982 - DNA, 17 bp, Arabidopsis thaliana
agttttgccttccgaca

SEQ ID NO: 46983 - DNA, 17 bp, Arabidopsis thaliana
agttttgcgacgaatta

SEQ ID NO: 46984 - DNA, 17 bp, Arabidopsis thaliana
agttttgcgagctcgga

SEQ ID NO: 46985 - DNA, 17 bp, Arabidopsis thaliana
agttttgcggccacatg

SEQ ID NO: 46986 - DNA, 17 bp, Arabidopsis thaliana
agttttgctaagcactt

SEQ ID NO: 46987 - DNA, 17 bp, Arabidopsis thaliana
agttttgctacaagatg

SEQ ID NO: 46988 - DNA, 17 bp, Arabidopsis thaliana
agttttgctcaaatgtt

SEQ ID NO: 46989 - DNA, 17 bp, Arabidopsis thaliana
agttttgctcgttcatg

SEQ ID NO: 46990 - DNA, 17 bp, Arabidopsis thaliana
agttttggaaagtgact

SEQ ID NO: 46991 - DNA, 17 bp, Arabidopsis thaliana
agttttggaaagtgcct

SEQ ID NO: 46992 - DNA, 17 bp, Arabidopsis thaliana
agttttggaaccgatcg

SEQ ID NO: 46993 - DNA, 17 bp, Arabidopsis thaliana
agttttggagcgaagcc

SEQ ID NO: 46994 - DNA, 17 bp, Arabidopsis thaliana
agttttggcaccgtcta

SEQ ID NO: 46995 - DNA, 17 bp, Arabidopsis thaliana
agttttggccgttgcta

SEQ ID NO: 46996 - DNA, 17 bp, Arabidopsis thaliana
agttttggcggaaaaat

SEQ ID NO: 46997 - DNA, 17 bp, Arabidopsis thaliana
agttttggcggatgagg

SEQ ID NO: 46998 - DNA, 17 bp, Arabidopsis thaliana
agttttggcttccatct

SEQ ID NO: 46999 - DNA, 17 bp, Arabidopsis thaliana
agttttgggaattgtga

SEQ ID NO: 47000 - DNA, 17 bp, Arabidopsis thaliana
agttttgggccgaaacc

SEQ ID NO: 47001 - DNA, 17 bp, Arabidopsis thaliana
agttttgggccgaatcc

SEQ ID NO: 47002 - DNA, 17 bp, Arabidopsis thaliana
agttttgggtgcagtta

SEQ ID NO: 47003 - DNA, 17 bp, Arabidopsis thaliana
agttttgggtgcagttt

SEQ ID NO: 47004 - DNA, 17 bp, Arabidopsis thaliana
agttttgggtgcgatgt

SEQ ID NO: 47005 - DNA, 17 bp, Arabidopsis thaliana
agttttgggtgcggtgt

SEQ ID NO: 47006 - DNA, 17 bp, Arabidopsis thaliana
agttttgggtgcggttt

SEQ ID NO: 47007 - DNA, 17 bp, Arabidopsis thaliana
agttttgggtgcgtttt

SEQ ID NO: 47008 - DNA, 17 bp, Arabidopsis thaliana
agttttggtaacaatca

SEQ ID NO: 47009 - DNA, 17 bp, Arabidopsis thaliana
agttttggtagtgctgg

SEQ ID NO: 47010 - DNA, 17 bp, Arabidopsis thaliana
agttttggtcggttttc

SEQ ID NO: 47011 - DNA, 17 bp, Arabidopsis thaliana
agttttggtgccaatga

SEQ ID NO: 47012 - DNA, 17 bp, Arabidopsis thaliana
agttttggtgtgtgcgt

SEQ ID NO: 47013 - DNA, 17 bp, Arabidopsis thaliana
agttttggtttagaggc

SEQ ID NO: 47014 - DNA, 17 bp, Arabidopsis thaliana
agttttgtatattctcg

SEQ ID NO: 47015 - DNA, 17 bp, Arabidopsis thaliana
agttttgtctgcttgga

SEQ ID NO: 47016 - DNA, 17 bp, Arabidopsis thaliana
agttttgtgggttctag

SEQ ID NO: 47017 - DNA, 17 bp, Arabidopsis thaliana
agttttgtggtacagag

SEQ ID NO: 47018 - DNA, 17 bp, Arabidopsis thaliana
agttttgtgttaccaat

SEQ ID NO: 47019 - DNA, 17 bp, Arabidopsis thaliana
agttttgtgtttgcttt

SEQ ID NO: 47020 - DNA, 17 bp, Arabidopsis thaliana
agttttgttctaagcgt

SEQ ID NO: 47021 - DNA, 17 bp, Arabidopsis thaliana
agttttgttgactgtgc

SEQ ID NO: 47022 - DNA, 17 bp, Arabidopsis thaliana
agttttgttgcgtccac

SEQ ID NO: 47023 - DNA, 17 bp, Arabidopsis thaliana
agttttgttgcgtttgt

SEQ ID NO: 47024 - DNA, 17 bp, Arabidopsis thaliana
agtttttacatgatccg

SEQ ID NO: 47025 - DNA, 17 bp, Arabidopsis thaliana
agtttttagaccgtgag

SEQ ID NO: 47026 - DNA, 17 bp, Arabidopsis thaliana
agtttttaggcttagga

SEQ ID NO: 47027 - DNA, 17 bp, Arabidopsis thaliana
agtttttcacgacagat

SEQ ID NO: 47028 - DNA, 17 bp, Arabidopsis thaliana
agtttttcatacagggg

SEQ ID NO: 47029 - DNA, 17 bp, Arabidopsis thaliana
agtttttcctggtgact

SEQ ID NO: 47030 - DNA, 17 bp, Arabidopsis thaliana
agtttttcggaagcaac

SEQ ID NO: 47031 - DNA, 17 bp, Arabidopsis thaliana
agtttttcgtttgcctg

SEQ ID NO: 47032 - DNA, 17 bp, Arabidopsis thaliana
agtttttctatgggctc

SEQ ID NO: 47033 - DNA, 17 bp, Arabidopsis thaliana
agtttttctcaaatagt

SEQ ID NO: 47034 - DNA, 17 bp, Arabidopsis thaliana
agtttttctgatggtat

SEQ ID NO: 47035 - DNA, 17 bp, Arabidopsis thaliana
agtttttctgtttgcga

SEQ ID NO: 47036 - DNA, 17 bp, Arabidopsis thaliana
agtttttcttcacatgc

SEQ ID NO: 47037 - DNA, 17 bp, Arabidopsis thaliana
agtttttcttctagtgt

SEQ ID NO: 47038 - DNA, 17 bp, Arabidopsis thaliana
agtttttcttcttcggc

SEQ ID NO: 47039 - DNA, 17 bp, Arabidopsis thaliana
agtttttcttggaacgc

SEQ ID NO: 47040 - DNA, 17 bp, Arabidopsis thaliana
agtttttgaggaccaaa

SEQ ID NO: 47041 - DNA, 17 bp, Arabidopsis thaliana
agtttttgccagacact

SEQ ID NO: 47042 - DNA, 17 bp, Arabidopsis thaliana
agtttttgcgactcggc

SEQ ID NO: 47043 - DNA, 17 bp, Arabidopsis thaliana
agtttttgcgagggtat

SEQ ID NO: 47044 - DNA, 17 bp, Arabidopsis thaliana
agtttttggagagagac

SEQ ID NO: 47045 - DNA, 17 bp, Arabidopsis thaliana
agtttttgggttccggg

SEQ ID NO: 47046 - DNA, 17 bp, Arabidopsis thaliana
agtttttggtcctagga

SEQ ID NO: 47047 - DNA, 17 bp, Arabidopsis thaliana
agtttttggttaccaat

SEQ ID NO: 47048 - DNA, 17 bp, Arabidopsis thaliana
agtttttgtacttgttg

SEQ ID NO: 47049 - DNA, 17 bp, Arabidopsis thaliana
agtttttgtctctcgac

SEQ ID NO: 47050 - DNA, 17 bp, Arabidopsis thaliana
agtttttgtgacttgcg

SEQ ID NO: 47051 - DNA, 17 bp, Arabidopsis thaliana
agtttttgtgattggta

SEQ ID NO: 47052 - DNA, 17 bp, Arabidopsis thaliana
agtttttgttcggcagt

SEQ ID NO: 47053 - DNA, 17 bp, Arabidopsis thaliana
agttttttcatttttac

SEQ ID NO: 47054 - DNA, 17 bp, Arabidopsis thaliana
agttttttctatgggcc

SEQ ID NO: 47055 - DNA, 17 bp, Arabidopsis thaliana
agttttttgatccttcg

SEQ ID NO: 47056 - DNA, 17 bp, Arabidopsis thaliana
agttttttgggctgaag

SEQ ID NO: 47057 - DNA, 17 bp, Arabidopsis thaliana
agtttttttggcctggt

SEQ ID NO: 47058 - DNA, 17 bp, Arabidopsis thaliana
agtttttttggcctgtt

SEQ ID NO: 47059 - DNA, 17 bp, Arabidopsis thaliana
agtttttttggctttct

SEQ ID NO: 47060 - DNA, 17 bp, Arabidopsis thaliana
agtttttttgttggact

SEQ ID NO: 47061 - DNA, 17 bp, Arabidopsis thaliana
agttttttttgtggacg

SEQ ID NO: 47062 - DNA, 17 bp, Arabidopsis thaliana
agttttttttgtttgga

SEQ ID NO: 47063 - DNA, 17 bp, Arabidopsis thaliana
ataaaaaccaagttggg

SEQ ID NO: 47064 - DNA, 17 bp, Arabidopsis thaliana
ataaaaacctacgcttg

SEQ ID NO: 47065 - DNA, 17 bp, Arabidopsis thaliana
ataaaaacggctcaccc

SEQ ID NO: 47066 - DNA, 17 bp, Arabidopsis thaliana
ataaaaatgctcgttag

SEQ ID NO: 47067 - DNA, 17 bp, Arabidopsis thaliana
ataaaaatgttgaccgg

SEQ ID NO: 47068 - DNA, 17 bp, Arabidopsis thaliana
ataaaacaacccacggt

SEQ ID NO: 47069 - DNA, 17 bp, Arabidopsis thaliana
ataaaacacctgacctc

SEQ ID NO: 47070 - DNA, 17 bp, Arabidopsis thaliana
ataaaacccggagttga

SEQ ID NO: 47071 - DNA, 17 bp, Arabidopsis thaliana
ataaaacgatatgtggt

SEQ ID NO: 47072 - DNA, 17 bp, Arabidopsis thaliana
ataaaacgattgcgtcc

SEQ ID NO: 47073 - DNA, 17 bp, Arabidopsis thaliana
ataaaacgcatgtgagc

SEQ ID NO: 47074 - DNA, 17 bp, Arabidopsis thaliana
ataaaacttaagaattc

SEQ ID NO: 47075 - DNA, 17 bp, Arabidopsis thaliana
ataaaagaccttggttc

SEQ ID NO: 47076 - DNA, 17 bp, Arabidopsis thaliana
ataaaagatcagcttct

SEQ ID NO: 47077 - DNA, 17 bp, Arabidopsis thaliana
ataaaagccttcgcccg

SEQ ID NO: 47078 - DNA, 17 bp, Arabidopsis thaliana
ataaaaggcctaggccc

SEQ ID NO: 47079 - DNA, 17 bp, Arabidopsis thaliana
ataaaaggcttacggtg

SEQ ID NO: 47080 - DNA, 17 bp, Arabidopsis thaliana
ataaaaggtcgaccggg

SEQ ID NO: 47081 - DNA, 17 bp, Arabidopsis thaliana
ataaaaggtcgacgcag

SEQ ID NO: 47082 - DNA, 17 bp, Arabidopsis thaliana
ataaaaggtcgacgcgg

SEQ ID NO: 47083 - DNA, 17 bp, Arabidopsis thaliana
ataaaaggtcgactcgg

SEQ ID NO: 47084 - DNA, 17 bp, Arabidopsis thaliana
ataaaaggtcgccgcgg

SEQ ID NO: 47085 - DNA, 17 bp, Arabidopsis thaliana
ataaaaggttcctagct

SEQ ID NO: 47086 - DNA, 17 bp, Arabidopsis thaliana
ataaaagtaacaccgaa

SEQ ID NO: 47087 - DNA, 17 bp, Arabidopsis thaliana
ataaaagttcgcgattg

SEQ ID NO: 47088 - DNA, 17 bp, Arabidopsis thaliana
ataaaagttggccaaca

SEQ ID NO: 47089 - DNA, 17 bp, Arabidopsis thaliana
ataaaagtttagatcgc

SEQ ID NO: 47090 - DNA, 17 bp, Arabidopsis thaliana
ataaaagtttgcaaatt

SEQ ID NO: 47091 - DNA, 17 bp, Arabidopsis thaliana
ataaaataactgctgat

SEQ ID NO: 47092 - DNA, 17 bp, Arabidopsis thaliana
ataaaatcaccaaattg

SEQ ID NO: 47093 - DNA, 17 bp, Arabidopsis thaliana
ataaaatcgtcaatcgg

SEQ ID NO: 47094 - DNA, 17 bp, Arabidopsis thaliana
ataaaatctaagggttg

SEQ ID NO: 47095 - DNA, 17 bp, Arabidopsis thaliana
ataaaatgaactaaacc

SEQ ID NO: 47096 - DNA, 17 bp, Arabidopsis thaliana
ataaaatgaccggtcaa

SEQ ID NO: 47097 - DNA, 17 bp, Arabidopsis thaliana
ataaaatggccggtcaa

SEQ ID NO: 47098 - DNA, 17 bp, Arabidopsis thaliana
ataaaatggctgcacag

SEQ ID NO: 47099 - DNA, 17 bp, Arabidopsis thaliana
ataaaatgggctgacca

SEQ ID NO: 47100 - DNA, 17 bp, Arabidopsis thaliana
ataaaatgtcgacgcgg

SEQ ID NO: 47101 - DNA, 17 bp, Arabidopsis thaliana
ataaaatgtcgtctcgc

SEQ ID NO: 47102 - DNA, 17 bp, Arabidopsis thaliana
ataaaattcccgcaaac

SEQ ID NO: 47103 - DNA, 17 bp, Arabidopsis thaliana
ataaaatttcgtctcgc

SEQ ID NO: 47104 - DNA, 17 bp, Arabidopsis thaliana
ataaacaaccaatgtgg

SEQ ID NO: 47105 - DNA, 17 bp, Arabidopsis thaliana
ataaacaaccgagagcg

SEQ ID NO: 47106 - DNA, 17 bp, Arabidopsis thaliana
ataaacaacgacgtgaa

SEQ ID NO: 47107 - DNA, 17 bp, Arabidopsis thaliana
ataaacaatctcggctg

SEQ ID NO: 47108 - DNA, 17 bp, Arabidopsis thaliana
ataaacatgggaagatt

SEQ ID NO: 47109 - DNA, 17 bp, Arabidopsis thaliana
ataaacattcgttgacc

SEQ ID NO: 47110 - DNA, 17 bp, Arabidopsis thaliana
ataaaccaaggtgtgat

SEQ ID NO: 47111 - DNA, 17 bp, Arabidopsis thaliana
ataaaccccctcggctg

SEQ ID NO: 47112 - DNA, 17 bp, Arabidopsis thaliana
ataaacccgtgattttc

SEQ ID NO: 47113 - DNA, 17 bp, Arabidopsis thaliana
ataaacccgtgattttt

SEQ ID NO: 47114 - DNA, 17 bp, Arabidopsis thaliana
ataaaccctaccggctg

SEQ ID NO: 47115 - DNA, 17 bp, Arabidopsis thaliana
ataaaccctatcgactg

SEQ ID NO: 47116 - DNA, 17 bp, Arabidopsis thaliana
ataaaccctatcggctg

SEQ ID NO: 47117 - DNA, 17 bp, Arabidopsis thaliana
ataaaccgcggttttta

SEQ ID NO: 47118 - DNA, 17 bp, Arabidopsis thaliana
ataaaccgctgcagacc

SEQ ID NO: 47119 - DNA, 17 bp, Arabidopsis thaliana
ataaaccgctgcggact

SEQ ID NO: 47120 - DNA, 17 bp, Arabidopsis thaliana
ataaaccggactaagca

SEQ ID NO: 47121 - DNA, 17 bp, Arabidopsis thaliana
ataaaccgtcagctgca

SEQ ID NO: 47122 - DNA, 17 bp, Arabidopsis thaliana
ataaaccgtggaagttc

SEQ ID NO: 47123 - DNA, 17 bp, Arabidopsis thaliana
ataaaccgttgcggagc

SEQ ID NO: 47124 - DNA, 17 bp, Arabidopsis thaliana
ataaaccgttgtggacc

SEQ ID NO: 47125 - DNA, 17 bp, Arabidopsis thaliana
ataaacctacctgcggt

SEQ ID NO: 47126 - DNA, 17 bp, Arabidopsis thaliana
ataaacctgtgattttc

SEQ ID NO: 47127 - DNA, 17 bp, Arabidopsis thaliana
ataaaccttaacggctg

SEQ ID NO: 47128 - DNA, 17 bp, Arabidopsis thaliana
ataaacgctaagcacgg

SEQ ID NO: 47129 - DNA, 17 bp, Arabidopsis thaliana
ataaacgctgtcttatg

SEQ ID NO: 47130 - DNA, 17 bp, Arabidopsis thaliana
ataaacgcttcggttac

SEQ ID NO: 47131 - DNA, 17 bp, Arabidopsis thaliana
ataaacgggatgtcgtt

SEQ ID NO: 47132 - DNA, 17 bp, Arabidopsis thaliana
ataaacggtccgattac

SEQ ID NO: 47133 - DNA, 17 bp, Arabidopsis thaliana
ataaacggtccggttat

SEQ ID NO: 47134 - DNA, 17 bp, Arabidopsis thaliana
ataaacggttgaacaaa

SEQ ID NO: 47135 - DNA, 17 bp, Arabidopsis thaliana
ataaacggttttgtgcg

SEQ ID NO: 47136 - DNA, 17 bp, Arabidopsis thaliana
ataaacgtgtggccacc

SEQ ID NO: 47137 - DNA, 17 bp, Arabidopsis thaliana
ataaactacctttcggg

SEQ ID NO: 47138 - DNA, 17 bp, Arabidopsis thaliana
ataaactaggttttgac

SEQ ID NO: 47139 - DNA, 17 bp, Arabidopsis thaliana
ataaactattgtccgta

SEQ ID NO: 47140 - DNA, 17 bp, Arabidopsis thaliana
ataaactcaaattggaa

SEQ ID NO: 47141 - DNA, 17 bp, Arabidopsis thaliana
ataaactcgtgattttc

SEQ ID NO: 47142 - DNA, 17 bp, Arabidopsis thaliana
ataaactctatcggctg

SEQ ID NO: 47143 - DNA, 17 bp, Arabidopsis thaliana
ataaactctggacttgg

SEQ ID NO: 47144 - DNA, 17 bp, Arabidopsis thaliana
ataaactgccacagata

SEQ ID NO: 47145 - DNA, 17 bp, Arabidopsis thaliana
ataaactgggtgaaaat

SEQ ID NO: 47146 - DNA, 17 bp, Arabidopsis thaliana
ataaactgtcgcgtcgc

SEQ ID NO: 47147 - DNA, 17 bp, Arabidopsis thaliana
ataaactgttagggtct

SEQ ID NO: 47148 - DNA, 17 bp, Arabidopsis thaliana
ataaacttaatcgttga

SEQ ID NO: 47149 - DNA, 17 bp, Arabidopsis thaliana
ataaacttgagaggtgt

SEQ ID NO: 47150 - DNA, 17 bp, Arabidopsis thaliana
ataaacttgatgtggaa

SEQ ID NO: 47151 - DNA, 17 bp, Arabidopsis thaliana
ataaacttgctccgcaa

SEQ ID NO: 47152 - DNA, 17 bp, Arabidopsis thaliana
ataaacttggtccgcag

SEQ ID NO: 47153 - DNA, 17 bp, Arabidopsis thaliana
ataaacttggtctgcag

SEQ ID NO: 47154 - DNA, 17 bp, Arabidopsis thaliana
ataaacttgttgggttt

SEQ ID NO: 47155 - DNA, 17 bp, Arabidopsis thaliana
ataaactttgccggttc

SEQ ID NO: 47156 - DNA, 17 bp, Arabidopsis thaliana
ataaagaaaccgttttt

SEQ ID NO: 47157 - DNA, 17 bp, Arabidopsis thaliana
ataaagaagctactccg

SEQ ID NO: 47158 - DNA, 17 bp, Arabidopsis thaliana
ataaagaattcggatcg

SEQ ID NO: 47159 - DNA, 17 bp, Arabidopsis thaliana
ataaagacggttgatat

SEQ ID NO: 47160 - DNA, 17 bp, Arabidopsis thaliana
ataaagagttatggcca

SEQ ID NO: 47161 - DNA, 17 bp, Arabidopsis thaliana
ataaagatcgcacctcc

SEQ ID NO: 47162 - DNA, 17 bp, Arabidopsis thaliana
ataaagatcttcaagtg

SEQ ID NO: 47163 - DNA, 17 bp, Arabidopsis thaliana
ataaagattgttccagt

SEQ ID NO: 47164 - DNA, 17 bp, Arabidopsis thaliana
ataaagccatgtcacaa

SEQ ID NO: 47165 - DNA, 17 bp, Arabidopsis thaliana
ataaagccgttggagtc

SEQ ID NO: 47166 - DNA, 17 bp, Arabidopsis thaliana
ataaagcggatttcgac

SEQ ID NO: 47167 - DNA, 17 bp, Arabidopsis thaliana
ataaagcggttcaatac

SEQ ID NO: 47168 - DNA, 17 bp, Arabidopsis thaliana
ataaagcgtttgaacag

SEQ ID NO: 47169 - DNA, 17 bp, Arabidopsis thaliana
ataaagctccaactcta

SEQ ID NO: 47170 - DNA, 17 bp, Arabidopsis thaliana
ataaagcttcaccatcc

SEQ ID NO: 47171 - DNA, 17 bp, Arabidopsis thaliana
ataaaggacatggaccg

SEQ ID NO: 47172 - DNA, 17 bp, Arabidopsis thaliana
ataaaggctgccactgg

SEQ ID NO: 47173 - DNA, 17 bp, Arabidopsis thaliana
ataaaggggtcggctac

SEQ ID NO: 47174 - DNA, 17 bp, Arabidopsis thaliana
ataaagggttagggtca

SEQ ID NO: 47175 - DNA, 17 bp, Arabidopsis thaliana
ataaagggttaggtcca

SEQ ID NO: 47176 - DNA, 17 bp, Arabidopsis thaliana
ataaagggttaggttca

SEQ ID NO: 47177 - DNA, 17 bp, Arabidopsis thaliana
ataaagtcatgcatttc

SEQ ID NO: 47178 - DNA, 17 bp, Arabidopsis thaliana
ataaagtctgctaggac

SEQ ID NO: 47179 - DNA, 17 bp, Arabidopsis thaliana
ataaagtgactacatcg

SEQ ID NO: 47180 - DNA, 17 bp, Arabidopsis thaliana
ataaagtgcagtgcggt

SEQ ID NO: 47181 - DNA, 17 bp, Arabidopsis thaliana
ataaagtgtctacagct

SEQ ID NO: 47182 - DNA, 17 bp, Arabidopsis thaliana
ataaagtgttcgaaccg

SEQ ID NO: 47183 - DNA, 17 bp, Arabidopsis thaliana
ataaagttcatccggat

SEQ ID NO: 47184 - DNA, 17 bp, Arabidopsis thaliana
ataaagttcgtgtccaa

SEQ ID NO: 47185 - DNA, 17 bp, Arabidopsis thaliana
ataaagttctaaggcga

SEQ ID NO: 47186 - DNA, 17 bp, Arabidopsis thaliana
ataaagttggtctgcgg

SEQ ID NO: 47187 - DNA, 17 bp, Arabidopsis thaliana
ataaagtttcttcgtta

SEQ ID NO: 47188 - DNA, 17 bp, Arabidopsis thaliana
ataaatacttagtgagg

SEQ ID NO: 47189 - DNA, 17 bp, Arabidopsis thaliana
ataaatcacaagtcact

SEQ ID NO: 47190 - DNA, 17 bp, Arabidopsis thaliana
ataaatcactggctaaa

SEQ ID NO: 47191 - DNA, 17 bp, Arabidopsis thaliana
ataaatcaggcagtcca

SEQ ID NO: 47192 - DNA, 17 bp, Arabidopsis thaliana
ataaatccgtcagcggt

SEQ ID NO: 47193 - DNA, 17 bp, Arabidopsis thaliana
ataaatccgtgattttc

SEQ ID NO: 47194 - DNA, 17 bp, Arabidopsis thaliana
ataaatcctcaagttgg

SEQ ID NO: 47195 - DNA, 17 bp, Arabidopsis thaliana
ataaatcctcaagttta

SEQ ID NO: 47196 - DNA, 17 bp, Arabidopsis thaliana
ataaatcctggagttgg

SEQ ID NO: 47197 - DNA, 17 bp, Arabidopsis thaliana
ataaatcgcgggatact

SEQ ID NO: 47198 - DNA, 17 bp, Arabidopsis thaliana
ataaatcgctgcagacc

SEQ ID NO: 47199 - DNA, 17 bp, Arabidopsis thaliana
ataaatcggccgtacgt

SEQ ID NO: 47200 - DNA, 17 bp, Arabidopsis thaliana
ataaatcgtcccgcggt

SEQ ID NO: 47201 - DNA, 17 bp, Arabidopsis thaliana
ataaatcgtcccgtggt

SEQ ID NO: 47202 - DNA, 17 bp, Arabidopsis thaliana
ataaatcgttcggtgta

SEQ ID NO: 47203 - DNA, 17 bp, Arabidopsis thaliana
ataaatcttggagttgg

SEQ ID NO: 47204 - DNA, 17 bp, Arabidopsis thaliana
ataaatgcaggcggcct

SEQ ID NO: 47205 - DNA, 17 bp, Arabidopsis thaliana
ataaatgcaggtggcct

SEQ ID NO: 47206 - DNA, 17 bp, Arabidopsis thaliana
ataaatgctaagcaaac

SEQ ID NO: 47207 - DNA, 17 bp, Arabidopsis thaliana
ataaatgctaagcgaac

SEQ ID NO: 47208 - DNA, 17 bp, Arabidopsis thaliana
ataaatgctagtgacag

SEQ ID NO: 47209 - DNA, 17 bp, Arabidopsis thaliana
ataaatgctgagaaccc

SEQ ID NO: 47210 - DNA, 17 bp, Arabidopsis thaliana
ataaatgctgagaatcg

SEQ ID NO: 47211 - DNA, 17 bp, Arabidopsis thaliana
ataaatggagcggttat

SEQ ID NO: 47212 - DNA, 17 bp, Arabidopsis thaliana
ataaatggatgttgcgg

SEQ ID NO: 47213 - DNA, 17 bp, Arabidopsis thaliana
ataaatggatttggaca

SEQ ID NO: 47214 - DNA, 17 bp, Arabidopsis thaliana
ataaatggtatgcagat

SEQ ID NO: 47215 - DNA, 17 bp, Arabidopsis thaliana
ataaatggtctccgcgg

SEQ ID NO: 47216 - DNA, 17 bp, Arabidopsis thaliana
ataaatgtcattttcca

SEQ ID NO: 47217 - DNA, 17 bp, Arabidopsis thaliana
ataaattagaccgcctt

SEQ ID NO: 47218 - DNA, 17 bp, Arabidopsis thaliana
ataaattagaccgcttt

SEQ ID NO: 47219 - DNA, 17 bp, Arabidopsis thaliana
ataaattattctcgcgg

SEQ ID NO: 47220 - DNA, 17 bp, Arabidopsis thaliana
ataaattctggagttgg

SEQ ID NO: 47221 - DNA, 17 bp, Arabidopsis thaliana
ataaattgcggttgcgg

SEQ ID NO: 47222 - DNA, 17 bp, Arabidopsis thaliana
ataaattgctgtcgcct

SEQ ID NO: 47223 - DNA, 17 bp, Arabidopsis thaliana
ataaattggtccacgac

SEQ ID NO: 47224 - DNA, 17 bp, Arabidopsis thaliana
ataaattgtctccacgg

SEQ ID NO: 47225 - DNA, 17 bp, Arabidopsis thaliana
ataaattgtctccgcgg

SEQ ID NO: 47226 - DNA, 17 bp, Arabidopsis thaliana
ataaattgttcccgcgg

SEQ ID NO: 47227 - DNA, 17 bp, Arabidopsis thaliana
ataaattgttgaatgtg

SEQ ID NO: 47228 - DNA, 17 bp, Arabidopsis thaliana
ataaattgtttccgcgg

SEQ ID NO: 47229 - DNA, 17 bp, Arabidopsis thaliana
ataaatttggccatacc

SEQ ID NO: 47230 - DNA, 17 bp, Arabidopsis thaliana
ataaatttggtctgtgg

SEQ ID NO: 47231 - DNA, 17 bp, Arabidopsis thaliana
ataaattttggtccgca

SEQ ID NO: 47232 - DNA, 17 bp, Arabidopsis thaliana
ataacaaatcaccgagg

SEQ ID NO: 47233 - DNA, 17 bp, Arabidopsis thaliana
ataacaaatcgccgtga

SEQ ID NO: 47234 - DNA, 17 bp, Arabidopsis thaliana
ataacaaatgatgtggc

SEQ ID NO: 47235 - DNA, 17 bp, Arabidopsis thaliana
ataacaacataatcaag

SEQ ID NO: 47236 - DNA, 17 bp, Arabidopsis thaliana
ataacaactaggtgatc

SEQ ID NO: 47237 - DNA, 17 bp, Arabidopsis thaliana
ataacaagctggactgt

SEQ ID NO: 47238 - DNA, 17 bp, Arabidopsis thaliana
ataacaagtttcgtcaa

SEQ ID NO: 47239 - DNA, 17 bp, Arabidopsis thaliana
ataacaatggcagcaac

SEQ ID NO: 47240 - DNA, 17 bp, Arabidopsis thaliana
ataacaatggccctttg

SEQ ID NO: 47241 - DNA, 17 bp, Arabidopsis thaliana
ataacaatttgctgcag

SEQ ID NO: 47242 - DNA, 17 bp, Arabidopsis thaliana
ataacaatttgctgcat

SEQ ID NO: 47243 - DNA, 17 bp, Arabidopsis thaliana
ataacacccgagcatgt

SEQ ID NO: 47244 - DNA, 17 bp, Arabidopsis thaliana
ataacaccgccggtttg

SEQ ID NO: 47245 - DNA, 17 bp, Arabidopsis thaliana
ataacactccccctgat

SEQ ID NO: 47246 - DNA, 17 bp, Arabidopsis thaliana
ataacactcccccttga

SEQ ID NO: 47247 - DNA, 17 bp, Arabidopsis thaliana
ataacactctccctgat

SEQ ID NO: 47248 - DNA, 17 bp, Arabidopsis thaliana
ataacactgttgcgctg

SEQ ID NO: 47249 - DNA, 17 bp, Arabidopsis thaliana
ataacactgttgcggtg

SEQ ID NO: 47250 - DNA, 17 bp, Arabidopsis thaliana
ataacagagcccacttg

SEQ ID NO: 47251 - DNA, 17 bp, Arabidopsis thaliana
ataacagattgaggtcc

SEQ ID NO: 47252 - DNA, 17 bp, Arabidopsis thaliana
ataacagatttaggcca

SEQ ID NO: 47253 - DNA, 17 bp, Arabidopsis thaliana
ataacagcctgcaaact

SEQ ID NO: 47254 - DNA, 17 bp, Arabidopsis thaliana
ataacaggcctaggccc

SEQ ID NO: 47255 - DNA, 17 bp, Arabidopsis thaliana
ataacaggcgttagcag

SEQ ID NO: 47256 - DNA, 17 bp, Arabidopsis thaliana
ataacaggggtacctcg

SEQ ID NO: 47257 - DNA, 17 bp, Arabidopsis thaliana
ataacaggtctgtgacg

SEQ ID NO: 47258 - DNA, 17 bp, Arabidopsis thaliana
ataacaggtctgtgatg

SEQ ID NO: 47259 - DNA, 17 bp, Arabidopsis thaliana
ataacaggtctgtggtg

SEQ ID NO: 47260 - DNA, 17 bp, Arabidopsis thaliana
ataacaggtgggcgagc

SEQ ID NO: 47261 - DNA, 17 bp, Arabidopsis thaliana
ataacaggtgttagcag

SEQ ID NO: 47262 - DNA, 17 bp, Arabidopsis thaliana
ataacagtgaatttcgt

SEQ ID NO: 47263 - DNA, 17 bp, Arabidopsis thaliana
ataacagtttaccgcgt

SEQ ID NO: 47264 - DNA, 17 bp, Arabidopsis thaliana
ataacagtttgccatga

SEQ ID NO: 47265 - DNA, 17 bp, Arabidopsis thaliana
ataacataatcaagccc

SEQ ID NO: 47266 - DNA, 17 bp, Arabidopsis thaliana
ataacatcgaccacata

SEQ ID NO: 47267 - DNA, 17 bp, Arabidopsis thaliana
ataacatcgatcgtgtt

SEQ ID NO: 47268 - DNA, 17 bp, Arabidopsis thaliana
ataacatgctatggttt

SEQ ID NO: 47269 - DNA, 17 bp, Arabidopsis thaliana
ataacatgctgtggttt

SEQ ID NO: 47270 - DNA, 17 bp, Arabidopsis thaliana
ataacattgattttcgg

SEQ ID NO: 47271 - DNA, 17 bp, Arabidopsis thaliana
ataacattgtcgacgtg

SEQ ID NO: 47272 - DNA, 17 bp, Arabidopsis thaliana
ataacatttgtgtgaaa

SEQ ID NO: 47273 - DNA, 17 bp, Arabidopsis thaliana
ataacatttttgacttg

SEQ ID NO: 47274 - DNA, 17 bp, Arabidopsis thaliana
ataaccaaactcccccg

SEQ ID NO: 47275 - DNA, 17 bp, Arabidopsis thaliana
ataaccaaagttgcgct

SEQ ID NO: 47276 - DNA, 17 bp, Arabidopsis thaliana
ataaccaaccagctttt

SEQ ID NO: 47277 - DNA, 17 bp, Arabidopsis thaliana
ataaccaacgtgttctt

SEQ ID NO: 47278 - DNA, 17 bp, Arabidopsis thaliana
ataaccaactatttcgt

SEQ ID NO: 47279 - DNA, 17 bp, Arabidopsis thaliana
ataaccacttacagagt

SEQ ID NO: 47280 - DNA, 17 bp, Arabidopsis thaliana
ataaccaggaggttcgg

SEQ ID NO: 47281 - DNA, 17 bp, Arabidopsis thaliana
ataaccagtcttctccg

SEQ ID NO: 47282 - DNA, 17 bp, Arabidopsis thaliana
ataaccatcgggaaccg

SEQ ID NO: 47283 - DNA, 17 bp, Arabidopsis thaliana
ataaccatcgtactgtt

SEQ ID NO: 47284 - DNA, 17 bp, Arabidopsis thaliana
ataaccatctctgaaat

SEQ ID NO: 47285 - DNA, 17 bp, Arabidopsis thaliana
ataaccatggacccacg

SEQ ID NO: 47286 - DNA, 17 bp, Arabidopsis thaliana
ataacccacgcgtcgtt

SEQ ID NO: 47287 - DNA, 17 bp, Arabidopsis thaliana
ataacccaggtatccca

SEQ ID NO: 47288 - DNA, 17 bp, Arabidopsis thaliana
ataacccgcagaatgta

SEQ ID NO: 47289 - DNA, 17 bp, Arabidopsis thaliana
ataacccgtgcctcgcc

SEQ ID NO: 47290 - DNA, 17 bp, Arabidopsis thaliana
ataacccttccacttct

SEQ ID NO: 47291 - DNA, 17 bp, Arabidopsis thaliana
ataaccgaacccgattg

SEQ ID NO: 47292 - DNA, 17 bp, Arabidopsis thaliana
ataaccgagccggatct

SEQ ID NO: 47293 - DNA, 17 bp, Arabidopsis thaliana
ataaccgccgaaagcag

SEQ ID NO: 47294 - DNA, 17 bp, Arabidopsis thaliana
ataaccgccgtaagcag

SEQ ID NO: 47295 - DNA, 17 bp, Arabidopsis thaliana
ataaccgcttgtttcgc

SEQ ID NO: 47296 - DNA, 17 bp, Arabidopsis thaliana
ataaccggaagcctcag

SEQ ID NO: 47297 - DNA, 17 bp, Arabidopsis thaliana
ataaccgggaaactatg

SEQ ID NO: 47298 - DNA, 17 bp, Arabidopsis thaliana
ataaccggtgtacgcag

SEQ ID NO: 47299 - DNA, 17 bp, Arabidopsis thaliana
ataaccgtagcttcgag

SEQ ID NO: 47300 - DNA, 17 bp, Arabidopsis thaliana
ataaccgttcagaagtg

SEQ ID NO: 47301 - DNA, 17 bp, Arabidopsis thaliana
ataaccgttcgccagga

SEQ ID NO: 47302 - DNA, 17 bp, Arabidopsis thaliana
ataaccgttttggatca

SEQ ID NO: 47303 - DNA, 17 bp, Arabidopsis thaliana
ataacctaactgctacc

SEQ ID NO: 47304 - DNA, 17 bp, Arabidopsis thaliana
ataacctaagttgagtt

SEQ ID NO: 47305 - DNA, 17 bp, Arabidopsis thaliana
ataacctgtagatggat

SEQ ID NO: 47306 - DNA, 17 bp, Arabidopsis thaliana
ataacctgtgacacttt

SEQ ID NO: 47307 - DNA, 17 bp, Arabidopsis thaliana
ataacctgtgccgtgat

SEQ ID NO: 47308 - DNA, 17 bp, Arabidopsis thaliana
ataaccttgactggctt

SEQ ID NO: 47309 - DNA, 17 bp, Arabidopsis thaliana
ataacctttcgttcagc

SEQ ID NO: 47310 - DNA, 17 bp, Arabidopsis thaliana
ataacgactgtcaaccg

SEQ ID NO: 47311 - DNA, 17 bp, Arabidopsis thaliana
ataacgagaccgagtat

SEQ ID NO: 47312 - DNA, 17 bp, Arabidopsis thaliana
ataacgagatccaaagt

SEQ ID NO: 47313 - DNA, 17 bp, Arabidopsis thaliana
ataacgaggttacgctt

SEQ ID NO: 47314 - DNA, 17 bp, Arabidopsis thaliana
ataacgatctggtggct

SEQ ID NO: 47315 - DNA, 17 bp, Arabidopsis thaliana
ataacgattatttgctt

SEQ ID NO: 47316 - DNA, 17 bp, Arabidopsis thaliana
ataacgccaagttcaga

SEQ ID NO: 47317 - DNA, 17 bp, Arabidopsis thaliana
ataacgcggattacggt

SEQ ID NO: 47318 - DNA, 17 bp, Arabidopsis thaliana
ataacgcggattacgtt

SEQ ID NO: 47319 - DNA, 17 bp, Arabidopsis thaliana
ataacgcttaaaaccgc

SEQ ID NO: 47320 - DNA, 17 bp, Arabidopsis thaliana
ataacggacaaacaatt

SEQ ID NO: 47321 - DNA, 17 bp, Arabidopsis thaliana
ataacggacaattcctt

SEQ ID NO: 47322 - DNA, 17 bp, Arabidopsis thaliana
ataacggacgatttctt

SEQ ID NO: 47323 - DNA, 17 bp, Arabidopsis thaliana
ataacggaggcctagac

SEQ ID NO: 47324 - DNA, 17 bp, Arabidopsis thaliana
ataacggatttgaaggg

SEQ ID NO: 47325 - DNA, 17 bp, Arabidopsis thaliana
ataacggcaagactaaa

SEQ ID NO: 47326 - DNA, 17 bp, Arabidopsis thaliana
ataacggcatgtctatt

SEQ ID NO: 47327 - DNA, 17 bp, Arabidopsis thaliana
ataacgggactggtttg

SEQ ID NO: 47328 - DNA, 17 bp, Arabidopsis thaliana
ataacgggcttcggccc

SEQ ID NO: 47329 - DNA, 17 bp, Arabidopsis thaliana
ataacggggtctgcgac

SEQ ID NO: 47330 - DNA, 17 bp, Arabidopsis thaliana
ataacgggtctgttggt

SEQ ID NO: 47331 - DNA, 17 bp, Arabidopsis thaliana
ataacgggttaagactt

SEQ ID NO: 47332 - DNA, 17 bp, Arabidopsis thaliana
ataacgggtttcggcgt

SEQ ID NO: 47333 - DNA, 17 bp, Arabidopsis thaliana
ataacgggtttggcagg

SEQ ID NO: 47334 - DNA, 17 bp, Arabidopsis thaliana
ataacggtaatgctatc

SEQ ID NO: 47335 - DNA, 17 bp, Arabidopsis thaliana
ataacggtgatggtcgg

SEQ ID NO: 47336 - DNA, 17 bp, Arabidopsis thaliana
ataacggttttgccctc

SEQ ID NO: 47337 - DNA, 17 bp, Arabidopsis thaliana
ataacgtccatggtgtc

SEQ ID NO: 47338 - DNA, 17 bp, Arabidopsis thaliana
ataacgtcctgccaaac

SEQ ID NO: 47339 - DNA, 17 bp, Arabidopsis thaliana
ataacgtcgcgtggatt

SEQ ID NO: 47340 - DNA, 17 bp, Arabidopsis thaliana
ataacgtcgtgtagatt

SEQ ID NO: 47341 - DNA, 17 bp, Arabidopsis thaliana
ataacgtcgtgtggagc

SEQ ID NO: 47342 - DNA, 17 bp, Arabidopsis thaliana
ataacgtcgtgtggatt

SEQ ID NO: 47343 - DNA, 17 bp, Arabidopsis thaliana
ataacgtgggttcgctt

SEQ ID NO: 47344 - DNA, 17 bp, Arabidopsis thaliana
ataacgttgtggtgttt

SEQ ID NO: 47345 - DNA, 17 bp, Arabidopsis thaliana
ataacgtttgcagtcat

SEQ ID NO: 47346 - DNA, 17 bp, Arabidopsis thaliana
ataactaaaatttggtt

SEQ ID NO: 47347 - DNA, 17 bp, Arabidopsis thaliana
ataactaagatgtagcg

SEQ ID NO: 47348 - DNA, 17 bp, Arabidopsis thaliana
ataactaaggcccgttt

SEQ ID NO: 47349 - DNA, 17 bp, Arabidopsis thaliana
ataactacaagcagtgg

SEQ ID NO: 47350 - DNA, 17 bp, Arabidopsis thaliana
ataactaccaacgtctt

SEQ ID NO: 47351 - DNA, 17 bp, Arabidopsis thaliana
ataactagagagagtcc

SEQ ID NO: 47352 - DNA, 17 bp, Arabidopsis thaliana
ataactaggtaaggccc

SEQ ID NO: 47353 - DNA, 17 bp, Arabidopsis thaliana
ataactaggtgagtgcc

SEQ ID NO: 47354 - DNA, 17 bp, Arabidopsis thaliana
ataactagtggcacgct

SEQ ID NO: 47355 - DNA, 17 bp, Arabidopsis thaliana
ataactatggaccacgt

SEQ ID NO: 47356 - DNA, 17 bp, Arabidopsis thaliana
ataactattagaccgtg

SEQ ID NO: 47357 - DNA, 17 bp, Arabidopsis thaliana
ataactcaaacttagag

SEQ ID NO: 47358 - DNA, 17 bp, Arabidopsis thaliana
ataactcagccatcaag

SEQ ID NO: 47359 - DNA, 17 bp, Arabidopsis thaliana
ataactcagccgtgacg

SEQ ID NO: 47360 - DNA, 17 bp, Arabidopsis thaliana
ataactcaggcaacggt

SEQ ID NO: 47361 - DNA, 17 bp, Arabidopsis thaliana
ataactcagtgtccaga

SEQ ID NO: 47362 - DNA, 17 bp, Arabidopsis thaliana
ataactcataggatcgt

SEQ ID NO: 47363 - DNA, 17 bp, Arabidopsis thaliana
ataactccacggatctc

SEQ ID NO: 47364 - DNA, 17 bp, Arabidopsis thaliana
ataactccactttggca

SEQ ID NO: 47365 - DNA, 17 bp, Arabidopsis thaliana
ataactccctctgttcc

SEQ ID NO: 47366 - DNA, 17 bp, Arabidopsis thaliana
ataactccgtctcggaa

SEQ ID NO: 47367 - DNA, 17 bp, Arabidopsis thaliana
ataactcctcgaccgga

SEQ ID NO: 47368 - DNA, 17 bp, Arabidopsis thaliana
ataactcctttcgtgtt

SEQ ID NO: 47369 - DNA, 17 bp, Arabidopsis thaliana
ataactcgacgaatcgc

SEQ ID NO: 47370 - DNA, 17 bp, Arabidopsis thaliana
ataactcgacggaccgc

SEQ ID NO: 47371 - DNA, 17 bp, Arabidopsis thaliana
ataactcgacggatcgc

SEQ ID NO: 47372 - DNA, 17 bp, Arabidopsis thaliana
ataactcgacggatctc

SEQ ID NO: 47373 - DNA, 17 bp, Arabidopsis thaliana
ataactcgactgatccc

SEQ ID NO: 47374 - DNA, 17 bp, Arabidopsis thaliana
ataactcgactgatcgc

SEQ ID NO: 47375 - DNA, 17 bp, Arabidopsis thaliana
ataactcgctgacacag

SEQ ID NO: 47376 - DNA, 17 bp, Arabidopsis thaliana
ataactcggttccagtt

SEQ ID NO: 47377 - DNA, 17 bp, Arabidopsis thaliana
ataactctaaactaggg

SEQ ID NO: 47378 - DNA, 17 bp, Arabidopsis thaliana
ataactctacaacttca

SEQ ID NO: 47379 - DNA, 17 bp, Arabidopsis thaliana
ataactctacggatcgc

SEQ ID NO: 47380 - DNA, 17 bp, Arabidopsis thaliana
ataactctctctgaggt

SEQ ID NO: 47381 - DNA, 17 bp, Arabidopsis thaliana
ataactctgccgtaacg

SEQ ID NO: 47382 - DNA, 17 bp, Arabidopsis thaliana
ataactctgctgccagt

SEQ ID NO: 47383 - DNA, 17 bp, Arabidopsis thaliana
ataactcttcccgaggc

SEQ ID NO: 47384 - DNA, 17 bp, Arabidopsis thaliana
ataactcttggtctgga

SEQ ID NO: 47385 - DNA, 17 bp, Arabidopsis thaliana
ataactctttgcgtatt

SEQ ID NO: 47386 - DNA, 17 bp, Arabidopsis thaliana
ataactgaagagaaacc

SEQ ID NO: 47387 - DNA, 17 bp, Arabidopsis thaliana
ataactgaatgccaggg

SEQ ID NO: 47388 - DNA, 17 bp, Arabidopsis thaliana
ataactgacaatcctaa

SEQ ID NO: 47389 - DNA, 17 bp, Arabidopsis thaliana
ataactgaccctaagat

SEQ ID NO: 47390 - DNA, 17 bp, Arabidopsis thaliana
ataactgaccgaggcac

SEQ ID NO: 47391 - DNA, 17 bp, Arabidopsis thaliana
ataactgacctcttctg

SEQ ID NO: 47392 - DNA, 17 bp, Arabidopsis thaliana
ataactgagaaacgtgg

SEQ ID NO: 47393 - DNA, 17 bp, Arabidopsis thaliana
ataactgatgtcacaga

SEQ ID NO: 47394 - DNA, 17 bp, Arabidopsis thaliana
ataactgatttcggcca

SEQ ID NO: 47395 - DNA, 17 bp, Arabidopsis thaliana
ataactgcagttcgctc

SEQ ID NO: 47396 - DNA, 17 bp, Arabidopsis thaliana
ataactgcggaagggtg

SEQ ID NO: 47397 - DNA, 17 bp, Arabidopsis thaliana
ataactgctgcggtctt

SEQ ID NO: 47398 - DNA, 17 bp, Arabidopsis thaliana
ataactggaaccgattt

SEQ ID NO: 47399 - DNA, 17 bp, Arabidopsis thaliana
ataactggcaggaactc

SEQ ID NO: 47400 - DNA, 17 bp, Arabidopsis thaliana
ataactggcttgtggca

SEQ ID NO: 47401 - DNA, 17 bp, Arabidopsis thaliana
ataactggtcgagtagc

SEQ ID NO: 47402 - DNA, 17 bp, Arabidopsis thaliana
ataactggtgtgcgaaa

SEQ ID NO: 47403 - DNA, 17 bp, Arabidopsis thaliana
ataactgtcgctgtgtt

SEQ ID NO: 47404 - DNA, 17 bp, Arabidopsis thaliana
ataactgttcccgaggc

SEQ ID NO: 47405 - DNA, 17 bp, Arabidopsis thaliana
ataacttaaaccgcaac

SEQ ID NO: 47406 - DNA, 17 bp, Arabidopsis thaliana
ataacttatgaacctag

SEQ ID NO: 47407 - DNA, 17 bp, Arabidopsis thaliana
ataacttcgaccgtttc

SEQ ID NO: 47408 - DNA, 17 bp, Arabidopsis thaliana
ataacttcgggagaagg

SEQ ID NO: 47409 - DNA, 17 bp, Arabidopsis thaliana
ataacttcgtctcggac

SEQ ID NO: 47410 - DNA, 17 bp, Arabidopsis thaliana
ataacttctataccgtg

SEQ ID NO: 47411 - DNA, 17 bp, Arabidopsis thaliana
ataacttctataccgtt

SEQ ID NO: 47412 - DNA, 17 bp, Arabidopsis thaliana
ataacttctgagcccgt

SEQ ID NO: 47413 - DNA, 17 bp, Arabidopsis thaliana
ataacttgggacttacc

SEQ ID NO: 47414 - DNA, 17 bp, Arabidopsis thaliana
ataacttgtctcggagc

SEQ ID NO: 47415 - DNA, 17 bp, Arabidopsis thaliana
ataactttagaccgtga

SEQ ID NO: 47416 - DNA, 17 bp, Arabidopsis thaliana
ataactttgatctctgg

SEQ ID NO: 47417 - DNA, 17 bp, Arabidopsis thaliana
ataacttttccgccaga

SEQ ID NO: 47418 - DNA, 17 bp, Arabidopsis thaliana
ataagaaccaaataaac

SEQ ID NO: 47419 - DNA, 17 bp, Arabidopsis thaliana
ataagaacttaaaccac

SEQ ID NO: 47420 - DNA, 17 bp, Arabidopsis thaliana
ataagaacttaaaccgc

SEQ ID NO: 47421 - DNA, 17 bp, Arabidopsis thaliana
ataagaacttggcccat

SEQ ID NO: 47422 - DNA, 17 bp, Arabidopsis thaliana
ataagaagcggtgtgac

SEQ ID NO: 47423 - DNA, 17 bp, Arabidopsis thaliana
ataagaagtctagcgca

SEQ ID NO: 47424 - DNA, 17 bp, Arabidopsis thaliana
ataagaatcctttgcag

SEQ ID NO: 47425 - DNA, 17 bp, Arabidopsis thaliana
ataagaatttcggcttc

SEQ ID NO: 47426 - DNA, 17 bp, Arabidopsis thaliana
ataagacacgtgtaaac

SEQ ID NO: 47427 - DNA, 17 bp, Arabidopsis thaliana
ataagacatcccaaaac

SEQ ID NO: 47428 - DNA, 17 bp, Arabidopsis thaliana
ataagaccatctccatt

SEQ ID NO: 47429 - DNA, 17 bp, Arabidopsis thaliana
ataagacccggttgcgt

SEQ ID NO: 47430 - DNA, 17 bp, Arabidopsis thaliana
ataagaccgatcggtca

SEQ ID NO: 47431 - DNA, 17 bp, Arabidopsis thaliana
ataagaccgcataacgc

SEQ ID NO: 47432 - DNA, 17 bp, Arabidopsis thaliana
ataagaccgcatagcgc

SEQ ID NO: 47433 - DNA, 17 bp, Arabidopsis thaliana
ataagaccgccatcaac

SEQ ID NO: 47434 - DNA, 17 bp, Arabidopsis thaliana
ataagaccggagcagcg

SEQ ID NO: 47435 - DNA, 17 bp, Arabidopsis thaliana
ataagacctagtccggg

SEQ ID NO: 47436 - DNA, 17 bp, Arabidopsis thaliana
ataagacctcttggttg

SEQ ID NO: 47437 - DNA, 17 bp, Arabidopsis thaliana
ataagacgatggtatcc

SEQ ID NO: 47438 - DNA, 17 bp, Arabidopsis thaliana
ataagacgtgacgcttg

SEQ ID NO: 47439 - DNA, 17 bp, Arabidopsis thaliana
ataagactaaactcgca

SEQ ID NO: 47440 - DNA, 17 bp, Arabidopsis thaliana
ataagactattgggccg

SEQ ID NO: 47441 - DNA, 17 bp, Arabidopsis thaliana
ataagactcgtccatag

SEQ ID NO: 47442 - DNA, 17 bp, Arabidopsis thaliana
ataagagttcaccccta

SEQ ID NO: 47443 - DNA, 17 bp, Arabidopsis thaliana
ataagatatgggcctct

SEQ ID NO: 47444 - DNA, 17 bp, Arabidopsis thaliana
ataagatatgtgccttt

SEQ ID NO: 47445 - DNA, 17 bp, Arabidopsis thaliana
ataagatcaggttgcgg

SEQ ID NO: 47446 - DNA, 17 bp, Arabidopsis thaliana
ataagatccagctgcgg

SEQ ID NO: 47447 - DNA, 17 bp, Arabidopsis thaliana
ataagatccgattgcgg

SEQ ID NO: 47448 - DNA, 17 bp, Arabidopsis thaliana
ataagatccggctgcgg

SEQ ID NO: 47449 - DNA, 17 bp, Arabidopsis thaliana
ataagatccggttgcgg

SEQ ID NO: 47450 - DNA, 17 bp, Arabidopsis thaliana
ataagatccggttgcgt

SEQ ID NO: 47451 - DNA, 17 bp, Arabidopsis thaliana
ataagatcgagttgcgg

SEQ ID NO: 47452 - DNA, 17 bp, Arabidopsis thaliana
ataagatcgcgttgcgg

SEQ ID NO: 47453 - DNA, 17 bp, Arabidopsis thaliana
ataagatcgcgttgctg

SEQ ID NO: 47454 - DNA, 17 bp, Arabidopsis thaliana
ataagatcgctgtcatc

SEQ ID NO: 47455 - DNA, 17 bp, Arabidopsis thaliana
ataagatcggattgcgg

SEQ ID NO: 47456 - DNA, 17 bp, Arabidopsis thaliana
ataagatcggcttgcgg

SEQ ID NO: 47457 - DNA, 17 bp, Arabidopsis thaliana
ataagatcgggttacgg

SEQ ID NO: 47458 - DNA, 17 bp, Arabidopsis thaliana
ataagatcgggttgcag

SEQ ID NO: 47459 - DNA, 17 bp, Arabidopsis thaliana
ataagatcgggttgcgg

SEQ ID NO: 47460 - DNA, 17 bp, Arabidopsis thaliana
ataagatcgggttgtgg

SEQ ID NO: 47461 - DNA, 17 bp, Arabidopsis thaliana
ataagatcgtgttgcgg

SEQ ID NO: 47462 - DNA, 17 bp, Arabidopsis thaliana
ataagatctggttgcgg

SEQ ID NO: 47463 - DNA, 17 bp, Arabidopsis thaliana
ataagatcttaaaccgc

SEQ ID NO: 47464 - DNA, 17 bp, Arabidopsis thaliana
ataagatctttaggtcg

SEQ ID NO: 47465 - DNA, 17 bp, Arabidopsis thaliana
ataagatgaggttgcgg

SEQ ID NO: 47466 - DNA, 17 bp, Arabidopsis thaliana
ataagatgcggttgcag

SEQ ID NO: 47467 - DNA, 17 bp, Arabidopsis thaliana
ataagatgcggttgcgg

SEQ ID NO: 47468 - DNA, 17 bp, Arabidopsis thaliana
ataagatgttcaatggc

SEQ ID NO: 47469 - DNA, 17 bp, Arabidopsis thaliana
ataagattatgccacgt

SEQ ID NO: 47470 - DNA, 17 bp, Arabidopsis thaliana
ataagattcaactcagc

SEQ ID NO: 47471 - DNA, 17 bp, Arabidopsis thaliana
ataagattccgtcggtg

SEQ ID NO: 47472 - DNA, 17 bp, Arabidopsis thaliana
ataagattcgtcctaca

SEQ ID NO: 47473 - DNA, 17 bp, Arabidopsis thaliana
ataagattgggttgcgg

SEQ ID NO: 47474 - DNA, 17 bp, Arabidopsis thaliana
ataagattgtgccacgt

SEQ ID NO: 47475 - DNA, 17 bp, Arabidopsis thaliana
ataagattgtgtcacga

SEQ ID NO: 47476 - DNA, 17 bp, Arabidopsis thaliana
ataagattgtgtcacgt

SEQ ID NO: 47477 - DNA, 17 bp, Arabidopsis thaliana
ataagatttggacccat

SEQ ID NO: 47478 - DNA, 17 bp, Arabidopsis thaliana
ataagatttggcaggac

SEQ ID NO: 47479 - DNA, 17 bp, Arabidopsis thaliana
ataagatttggttgcgg

SEQ ID NO: 47480 - DNA, 17 bp, Arabidopsis thaliana
ataagcaacctaggtca

SEQ ID NO: 47481 - DNA, 17 bp, Arabidopsis thaliana
ataagcacacgccgtga

SEQ ID NO: 47482 - DNA, 17 bp, Arabidopsis thaliana
ataagcacactggtggc

SEQ ID NO: 47483 - DNA, 17 bp, Arabidopsis thaliana
ataagcagattagcagg

SEQ ID NO: 47484 - DNA, 17 bp, Arabidopsis thaliana
ataagcagccagtgtgt

SEQ ID NO: 47485 - DNA, 17 bp, Arabidopsis thaliana
ataagcagcgaccaact

SEQ ID NO: 47486 - DNA, 17 bp, Arabidopsis thaliana
ataagcagtaggtgcca

SEQ ID NO: 47487 - DNA, 17 bp, Arabidopsis thaliana
ataagccaaagttgcaa

SEQ ID NO: 47488 - DNA, 17 bp, Arabidopsis thaliana
ataagccagtggcagcc

SEQ ID NO: 47489 - DNA, 17 bp, Arabidopsis thaliana
ataagccatctgcaagc

SEQ ID NO: 47490 - DNA, 17 bp, Arabidopsis thaliana
ataagccattggtcaat

SEQ ID NO: 47491 - DNA, 17 bp, Arabidopsis thaliana
ataagcccaagcatttg

SEQ ID NO: 47492 - DNA, 17 bp, Arabidopsis thaliana
ataagcccatttggatt

SEQ ID NO: 47493 - DNA, 17 bp, Arabidopsis thaliana
ataagcctacatgcggt

SEQ ID NO: 47494 - DNA, 17 bp, Arabidopsis thaliana
ataagcctacctacggt

SEQ ID NO: 47495 - DNA, 17 bp, Arabidopsis thaliana
ataagcctacctgcggt

SEQ ID NO: 47496 - DNA, 17 bp, Arabidopsis thaliana
ataagcctattggtgac

SEQ ID NO: 47497 - DNA, 17 bp, Arabidopsis thaliana
ataagcgatcgttttga

SEQ ID NO: 47498 - DNA, 17 bp, Arabidopsis thaliana
ataagcgatgggaaatc

SEQ ID NO: 47499 - DNA, 17 bp, Arabidopsis thaliana
ataagcgccactgcagc

SEQ ID NO: 47500 - DNA, 17 bp, Arabidopsis thaliana
ataagcggactctgcaa

SEQ ID NO: 47501 - DNA, 17 bp, Arabidopsis thaliana
ataagcggaggaggaga

SEQ ID NO: 47502 - DNA, 17 bp, Arabidopsis thaliana
ataagcggcttctgagg

SEQ ID NO: 47503 - DNA, 17 bp, Arabidopsis thaliana
ataagcggtctaactac

SEQ ID NO: 47504 - DNA, 17 bp, Arabidopsis thaliana
ataagcgtcggtgaggt

SEQ ID NO: 47505 - DNA, 17 bp, Arabidopsis thaliana
ataagctgcggttgcgg

SEQ ID NO: 47506 - DNA, 17 bp, Arabidopsis thaliana
ataagctttgtaccgtc

SEQ ID NO: 47507 - DNA, 17 bp, Arabidopsis thaliana
ataaggaagctcagcaa

SEQ ID NO: 47508 - DNA, 17 bp, Arabidopsis thaliana
ataaggaccaggcttca

SEQ ID NO: 47509 - DNA, 17 bp, Arabidopsis thaliana
ataaggcagaatttcgt

SEQ ID NO: 47510 - DNA, 17 bp, Arabidopsis thaliana
ataaggccaacgaagga

SEQ ID NO: 47511 - DNA, 17 bp, Arabidopsis thaliana
ataaggcccatcatcaa

SEQ ID NO: 47512 - DNA, 17 bp, Arabidopsis thaliana
ataaggcccatcatcca

SEQ ID NO: 47513 - DNA, 17 bp, Arabidopsis thaliana
ataaggcccatcatcta

SEQ ID NO: 47514 - DNA, 17 bp, Arabidopsis thaliana
ataaggcccatcattaa

SEQ ID NO: 47515 - DNA, 17 bp, Arabidopsis thaliana
ataaggccctgtcgatt

SEQ ID NO: 47516 - DNA, 17 bp, Arabidopsis thaliana
ataaggcgagatctgcg

SEQ ID NO: 47517 - DNA, 17 bp, Arabidopsis thaliana
ataaggcgcagggagcc

SEQ ID NO: 47518 - DNA, 17 bp, Arabidopsis thaliana
ataaggcgctaaaaacc

SEQ ID NO: 47519 - DNA, 17 bp, Arabidopsis thaliana
ataaggctcatcatcta

SEQ ID NO: 47520 - DNA, 17 bp, Arabidopsis thaliana
ataaggctccgaatggt

SEQ ID NO: 47521 - DNA, 17 bp, Arabidopsis thaliana
ataagggcgccgataaa

SEQ ID NO: 47522 - DNA, 17 bp, Arabidopsis thaliana
ataaggtcagagtcttg

SEQ ID NO: 47523 - DNA, 17 bp, Arabidopsis thaliana
ataaggtcccagtaatc

SEQ ID NO: 47524 - DNA, 17 bp, Arabidopsis thaliana
ataaggtctcgtatgtc

SEQ ID NO: 47525 - DNA, 17 bp, Arabidopsis thaliana
ataaggtcttgaaggtg

SEQ ID NO: 47526 - DNA, 17 bp, Arabidopsis thaliana
ataaggtcttggaggcg

SEQ ID NO: 47527 - DNA, 17 bp, Arabidopsis thaliana
ataaggtgcggttgcgg

SEQ ID NO: 47528 - DNA, 17 bp, Arabidopsis thaliana
ataaggtgctgttcgtt

SEQ ID NO: 47529 - DNA, 17 bp, Arabidopsis thaliana
ataaggttccagattgt

SEQ ID NO: 47530 - DNA, 17 bp, Arabidopsis thaliana
ataagtaatgtgtagcg

SEQ ID NO: 47531 - DNA, 17 bp, Arabidopsis thaliana
ataagtacgggggcatg

SEQ ID NO: 47532 - DNA, 17 bp, Arabidopsis thaliana
ataagtcaactctcggt

SEQ ID NO: 47533 - DNA, 17 bp, Arabidopsis thaliana
ataagtcagaatccggg

SEQ ID NO: 47534 - DNA, 17 bp, Arabidopsis thaliana
ataagtctacctgcggt

SEQ ID NO: 47535 - DNA, 17 bp, Arabidopsis thaliana
ataagtctccgaggaat

SEQ ID NO: 47536 - DNA, 17 bp, Arabidopsis thaliana
ataagtgacatgatgtg

SEQ ID NO: 47537 - DNA, 17 bp, Arabidopsis thaliana
ataagtgagctaggccg

SEQ ID NO: 47538 - DNA, 17 bp, Arabidopsis thaliana
ataagtgatgtgatacg

SEQ ID NO: 47539 - DNA, 17 bp, Arabidopsis thaliana
ataagtgatgtgattcg

SEQ ID NO: 47540 - DNA, 17 bp, Arabidopsis thaliana
ataagtgccacgtgtca

SEQ ID NO: 47541 - DNA, 17 bp, Arabidopsis thaliana
ataagtgccggagaggt

SEQ ID NO: 47542 - DNA, 17 bp, Arabidopsis thaliana
ataagtgcgacgtgtca

SEQ ID NO: 47543 - DNA, 17 bp, Arabidopsis thaliana
ataagtgctacgtgtca

SEQ ID NO: 47544 - DNA, 17 bp, Arabidopsis thaliana
ataagtggaattgacca

SEQ ID NO: 47545 - DNA, 17 bp, Arabidopsis thaliana
ataagtggccaggtgga

SEQ ID NO: 47546 - DNA, 17 bp, Arabidopsis thaliana
ataagtggctagtgtgc

SEQ ID NO: 47547 - DNA, 17 bp, Arabidopsis thaliana
ataagtgggatccatga

SEQ ID NO: 47548 - DNA, 17 bp, Arabidopsis thaliana
ataagtgtgtcactacg

SEQ ID NO: 47549 - DNA, 17 bp, Arabidopsis thaliana
ataagtgttaccttccc

SEQ ID NO: 47550 - DNA, 17 bp, Arabidopsis thaliana
ataagttatcgttgacc

SEQ ID NO: 47551 - DNA, 17 bp, Arabidopsis thaliana
ataagttccaactccag

SEQ ID NO: 47552 - DNA, 17 bp, Arabidopsis thaliana
ataagttccaactcgag

SEQ ID NO: 47553 - DNA, 17 bp, Arabidopsis thaliana
ataagttccaacttgag

SEQ ID NO: 47554 - DNA, 17 bp, Arabidopsis thaliana
ataagttccatcaagtg

SEQ ID NO: 47555 - DNA, 17 bp, Arabidopsis thaliana
ataagttcgaactccag

SEQ ID NO: 47556 - DNA, 17 bp, Arabidopsis thaliana
ataagttggagagtagg

SEQ ID NO: 47557 - DNA, 17 bp, Arabidopsis thaliana
ataagttgtccagtcgg

SEQ ID NO: 47558 - DNA, 17 bp, Arabidopsis thaliana
ataagttgtgatcatct

SEQ ID NO: 47559 - DNA, 17 bp, Arabidopsis thaliana
ataagttgttaactgac

SEQ ID NO: 47560 - DNA, 17 bp, Arabidopsis thaliana
ataagtttcaactccag

SEQ ID NO: 47561 - DNA, 17 bp, Arabidopsis thaliana
ataagtttgaactccac

SEQ ID NO: 47562 - DNA, 17 bp, Arabidopsis thaliana
ataagtttgccttgaga

SEQ ID NO: 47563 - DNA, 17 bp, Arabidopsis thaliana
ataagtttgtgccttca

SEQ ID NO: 47564 - DNA, 17 bp, Arabidopsis thaliana
ataagttttgctcacca

SEQ ID NO: 47565 - DNA, 17 bp, Arabidopsis thaliana
ataagtttttacgtttt

SEQ ID NO: 47566 - DNA, 17 bp, Arabidopsis thaliana
ataataaaaatgttgac

SEQ ID NO: 47567 - DNA, 17 bp, Arabidopsis thaliana
ataataaagcggtgcgg

SEQ ID NO: 47568 - DNA, 17 bp, Arabidopsis thaliana
ataataaccgctactgc

SEQ ID NO: 47569 - DNA, 17 bp, Arabidopsis thaliana
ataataacctggcaccg

SEQ ID NO: 47570 - DNA, 17 bp, Arabidopsis thaliana
ataataacgggcctggg

SEQ ID NO: 47571 - DNA, 17 bp, Arabidopsis thaliana
ataataccagctgtcga

SEQ ID NO: 47572 - DNA, 17 bp, Arabidopsis thaliana
ataataccagctgtcgg

SEQ ID NO: 47573 - DNA, 17 bp, Arabidopsis thaliana
ataatacccaggattgt

SEQ ID NO: 47574 - DNA, 17 bp, Arabidopsis thaliana
ataatacggatcaaagc

SEQ ID NO: 47575 - DNA, 17 bp, Arabidopsis thaliana
ataatagattcagtggc

SEQ ID NO: 47576 - DNA, 17 bp, Arabidopsis thaliana
ataatagattcggctta

SEQ ID NO: 47577 - DNA, 17 bp, Arabidopsis thaliana
ataataggaccggatca

SEQ ID NO: 47578 - DNA, 17 bp, Arabidopsis thaliana
ataatatctcgctgtgg

SEQ ID NO: 47579 - DNA, 17 bp, Arabidopsis thaliana
ataatcaactccttggc

SEQ ID NO: 47580 - DNA, 17 bp, Arabidopsis thaliana
ataatcaagcccgttca

SEQ ID NO: 47581 - DNA, 17 bp, Arabidopsis thaliana
ataatcactaatcgctg

SEQ ID NO: 47582 - DNA, 17 bp, Arabidopsis thaliana
ataatcagaccgcctgc

SEQ ID NO: 47583 - DNA, 17 bp, Arabidopsis thaliana
ataatcagactttttca

SEQ ID NO: 47584 - DNA, 17 bp, Arabidopsis thaliana
ataatcagctacgtgaa

SEQ ID NO: 47585 - DNA, 17 bp, Arabidopsis thaliana
ataatcatgctcgtggc

SEQ ID NO: 47586 - DNA, 17 bp, Arabidopsis thaliana
ataatccacagtggtct

SEQ ID NO: 47587 - DNA, 17 bp, Arabidopsis thaliana
ataatccagcgcacggt

SEQ ID NO: 47588 - DNA, 17 bp, Arabidopsis thaliana
ataatccatcgcagtaa

SEQ ID NO: 47589 - DNA, 17 bp, Arabidopsis thaliana
ataatccgagaggacgg

SEQ ID NO: 47590 - DNA, 17 bp, Arabidopsis thaliana
ataatccgcagtccgta

SEQ ID NO: 47591 - DNA, 17 bp, Arabidopsis thaliana
ataatccgcagtggtcc

SEQ ID NO: 47592 - DNA, 17 bp, Arabidopsis thaliana
ataatccggatcgttca

SEQ ID NO: 47593 - DNA, 17 bp, Arabidopsis thaliana
ataatccgtagcggttc

SEQ ID NO: 47594 - DNA, 17 bp, Arabidopsis thaliana
ataatccgtcagcagta

SEQ ID NO: 47595 - DNA, 17 bp, Arabidopsis thaliana
ataatcctggcgaacgg

SEQ ID NO: 47596 - DNA, 17 bp, Arabidopsis thaliana
ataatccttgcgaaccc

SEQ ID NO: 47597 - DNA, 17 bp, Arabidopsis thaliana
ataatcgcacaattcgc

SEQ ID NO: 47598 - DNA, 17 bp, Arabidopsis thaliana
ataatcgcaggtcgcta

SEQ ID NO: 47599 - DNA, 17 bp, Arabidopsis thaliana
ataatcgcatattgcta

SEQ ID NO: 47600 - DNA, 17 bp, Arabidopsis thaliana
ataatcgcctgcaaaat

SEQ ID NO: 47601 - DNA, 17 bp, Arabidopsis thaliana
ataatcgcgccgtgtac

SEQ ID NO: 47602 - DNA, 17 bp, Arabidopsis thaliana
ataatcgcgccgtgtat

SEQ ID NO: 47603 - DNA, 17 bp, Arabidopsis thaliana
ataatcgctcacttttt

SEQ ID NO: 47604 - DNA, 17 bp, Arabidopsis thaliana
ataatcgctgtcactgg

SEQ ID NO: 47605 - DNA, 17 bp, Arabidopsis thaliana
ataatcggattaaactg

SEQ ID NO: 47606 - DNA, 17 bp, Arabidopsis thaliana
ataatcggcgattccat

SEQ ID NO: 47607 - DNA, 17 bp, Arabidopsis thaliana
ataatcggcgatttcca

SEQ ID NO: 47608 - DNA, 17 bp, Arabidopsis thaliana
ataatcgggacccacat

SEQ ID NO: 47609 - DNA, 17 bp, Arabidopsis thaliana
ataatcggtccacgtga

SEQ ID NO: 47610 - DNA, 17 bp, Arabidopsis thaliana
ataatcggtgatgtgtc

SEQ ID NO: 47611 - DNA, 17 bp, Arabidopsis thaliana
ataatctaacggcagtg

SEQ ID NO: 47612 - DNA, 17 bp, Arabidopsis thaliana
ataatctagcgtggtcc

SEQ ID NO: 47613 - DNA, 17 bp, Arabidopsis thaliana
ataatctcaagcagctc

SEQ ID NO: 47614 - DNA, 17 bp, Arabidopsis thaliana
ataatctcaagtagttc

SEQ ID NO: 47615 - DNA, 17 bp, Arabidopsis thaliana
ataatctcagaaccggt

SEQ ID NO: 47616 - DNA, 17 bp, Arabidopsis thaliana
ataatctccaaatgcat

SEQ ID NO: 47617 - DNA, 17 bp, Arabidopsis thaliana
ataatctcctttaggcg

SEQ ID NO: 47618 - DNA, 17 bp, Arabidopsis thaliana
ataatctcgggttaaat

SEQ ID NO: 47619 - DNA, 17 bp, Arabidopsis thaliana
ataatctgattggagca

SEQ ID NO: 47620 - DNA, 17 bp, Arabidopsis thaliana
ataatctgcaagttctg

SEQ ID NO: 47621 - DNA, 17 bp, Arabidopsis thaliana
ataatctgcaccgcaaa

SEQ ID NO: 47622 - DNA, 17 bp, Arabidopsis thaliana
ataatctgcagcattgc

SEQ ID NO: 47623 - DNA, 17 bp, Arabidopsis thaliana
ataatctgccgttgagc

SEQ ID NO: 47624 - DNA, 17 bp, Arabidopsis thaliana
ataatctgctccgaccg

SEQ ID NO: 47625 - DNA, 17 bp, Arabidopsis thaliana
ataatctgctgacacaa

SEQ ID NO: 47626 - DNA, 17 bp, Arabidopsis thaliana
ataatcttgcttggttt

SEQ ID NO: 47627 - DNA, 17 bp, Arabidopsis thaliana
ataatcttggccagtcg

SEQ ID NO: 47628 - DNA, 17 bp, Arabidopsis thaliana
ataatcttgtgtccgac

SEQ ID NO: 47629 - DNA, 17 bp, Arabidopsis thaliana
ataatctttgcaggtcc

SEQ ID NO: 47630 - DNA, 17 bp, Arabidopsis thaliana
ataatgacctttgtgcc

SEQ ID NO: 47631 - DNA, 17 bp, Arabidopsis thaliana
ataatgactgagatcaa

SEQ ID NO: 47632 - DNA, 17 bp, Arabidopsis thaliana
ataatgagctcgtcgtc

SEQ ID NO: 47633 - DNA, 17 bp, Arabidopsis thaliana
ataatgatcacagttgt

SEQ ID NO: 47634 - DNA, 17 bp, Arabidopsis thaliana
ataatgccccttttcaa

SEQ ID NO: 47635 - DNA, 17 bp, Arabidopsis thaliana
ataatgcctcctcaacc

SEQ ID NO: 47636 - DNA, 17 bp, Arabidopsis thaliana
ataatgctgcattggat

SEQ ID NO: 47637 - DNA, 17 bp, Arabidopsis thaliana
ataatggaacggatgag

SEQ ID NO: 47638 - DNA, 17 bp, Arabidopsis thaliana
ataatggaagtgtatcg

SEQ ID NO: 47639 - DNA, 17 bp, Arabidopsis thaliana
ataatggcgtctctggc

SEQ ID NO: 47640 - DNA, 17 bp, Arabidopsis thaliana
ataatggctgccactcg

SEQ ID NO: 47641 - DNA, 17 bp, Arabidopsis thaliana
ataatggctgccactgg

SEQ ID NO: 47642 - DNA, 17 bp, Arabidopsis thaliana
ataatggctgtcactcg

SEQ ID NO: 47643 - DNA, 17 bp, Arabidopsis thaliana
ataatgggtgctcaagc

SEQ ID NO: 47644 - DNA, 17 bp, Arabidopsis thaliana
ataatggtgcatgcgga

SEQ ID NO: 47645 - DNA, 17 bp, Arabidopsis thaliana
ataatgtcaccgtccaa

SEQ ID NO: 47646 - DNA, 17 bp, Arabidopsis thaliana
ataatgtcctaagccgt

SEQ ID NO: 47647 - DNA, 17 bp, Arabidopsis thaliana
ataatgtctccatctgg

SEQ ID NO: 47648 - DNA, 17 bp, Arabidopsis thaliana
ataatgtgaaccgctcc

SEQ ID NO: 47649 - DNA, 17 bp, Arabidopsis thaliana
ataatgtgcgacgaaat

SEQ ID NO: 47650 - DNA, 17 bp, Arabidopsis thaliana
ataatgtggtttcgggt

SEQ ID NO: 47651 - DNA, 17 bp, Arabidopsis thaliana
ataatgttcctgatgtc

SEQ ID NO: 47652 - DNA, 17 bp, Arabidopsis thaliana
ataatgttgccgaagaa

SEQ ID NO: 47653 - DNA, 17 bp, Arabidopsis thaliana
ataattaactgaatcgg

SEQ ID NO: 47654 - DNA, 17 bp, Arabidopsis thaliana
ataattaccacagaaac

SEQ ID NO: 47655 - DNA, 17 bp, Arabidopsis thaliana
ataattaccaccgagcg

SEQ ID NO: 47656 - DNA, 17 bp, Arabidopsis thaliana
ataattatagccgttcg

SEQ ID NO: 47657 - DNA, 17 bp, Arabidopsis thaliana
ataattcatgcgagtgt

SEQ ID NO: 47658 - DNA, 17 bp, Arabidopsis thaliana
ataattccgcaattttc

SEQ ID NO: 47659 - DNA, 17 bp, Arabidopsis thaliana
ataattcctccaacttc

SEQ ID NO: 47660 - DNA, 17 bp, Arabidopsis thaliana
ataattcgcaccgcatg

SEQ ID NO: 47661 - DNA, 17 bp, Arabidopsis thaliana
ataattcggcgccttct

SEQ ID NO: 47662 - DNA, 17 bp, Arabidopsis thaliana
ataattcgtgattcgcc

SEQ ID NO: 47663 - DNA, 17 bp, Arabidopsis thaliana
ataattgacgggcttga

SEQ ID NO: 47664 - DNA, 17 bp, Arabidopsis thaliana
ataattgactcagagat

SEQ ID NO: 47665 - DNA, 17 bp, Arabidopsis thaliana
ataattgcggtgactgc

SEQ ID NO: 47666 - DNA, 17 bp, Arabidopsis thaliana
ataattgcgtggccgag

SEQ ID NO: 47667 - DNA, 17 bp, Arabidopsis thaliana
ataattgcgttggcgcc

SEQ ID NO: 47668 - DNA, 17 bp, Arabidopsis thaliana
ataattgctgagaatgc

SEQ ID NO: 47669 - DNA, 17 bp, Arabidopsis thaliana
ataattgcttactggcg

SEQ ID NO: 47670 - DNA, 17 bp, Arabidopsis thaliana
ataattggctcaggtta

SEQ ID NO: 47671 - DNA, 17 bp, Arabidopsis thaliana
ataattgggctgccttg

SEQ ID NO: 47672 - DNA, 17 bp, Arabidopsis thaliana
ataattgttctgtagag

SEQ ID NO: 47673 - DNA, 17 bp, Arabidopsis thaliana
ataatttagtgtaggtc

SEQ ID NO: 47674 - DNA, 17 bp, Arabidopsis thaliana
ataatttatcgttgact

SEQ ID NO: 47675 - DNA, 17 bp, Arabidopsis thaliana
ataatttgcagtagtct

SEQ ID NO: 47676 - DNA, 17 bp, Arabidopsis thaliana
ataattttccaggcgca

SEQ ID NO: 47677 - DNA, 17 bp, Arabidopsis thaliana
ataattttctaagatcc

SEQ ID NO: 47678 - DNA, 17 bp, Arabidopsis thaliana
ataattttctctgagac

SEQ ID NO: 47679 - DNA, 17 bp, Arabidopsis thaliana
ataattttgccaaaacc

SEQ ID NO: 47680 - DNA, 17 bp, Arabidopsis thaliana
ataattttgccccattc

SEQ ID NO: 47681 - DNA, 17 bp, Arabidopsis thaliana
ataattttgtgttgtgc

SEQ ID NO: 47682 - DNA, 17 bp, Arabidopsis thaliana
ataatttttgcttttcg

SEQ ID NO: 47683 - DNA, 17 bp, Arabidopsis thaliana
atacaaaagccgaatcc

SEQ ID NO: 47684 - DNA, 17 bp, Arabidopsis thaliana
atacaaacaaacttgct

SEQ ID NO: 47685 - DNA, 17 bp, Arabidopsis thaliana
atacaaacgggatgtcg

SEQ ID NO: 47686 - DNA, 17 bp, Arabidopsis thaliana
atacaaactggtggaaa

SEQ ID NO: 47687 - DNA, 17 bp, Arabidopsis thaliana
atacaaagccacgtctg

SEQ ID NO: 47688 - DNA, 17 bp, Arabidopsis thaliana
atacaaaggctccagac

SEQ ID NO: 47689 - DNA, 17 bp, Arabidopsis thaliana
atacaaataaacttggt

SEQ ID NO: 47690 - DNA, 17 bp, Arabidopsis thaliana
atacaaataatggattg

SEQ ID NO: 47691 - DNA, 17 bp, Arabidopsis thaliana
atacaaattgtggtgcg

SEQ ID NO: 47692 - DNA, 17 bp, Arabidopsis thaliana
atacaacaggtgggcga

SEQ ID NO: 47693 - DNA, 17 bp, Arabidopsis thaliana
atacaaccacgagatcc

SEQ ID NO: 47694 - DNA, 17 bp, Arabidopsis thaliana
atacaaccacgagatct

SEQ ID NO: 47695 - DNA, 17 bp, Arabidopsis thaliana
atacaacccacgttcat

SEQ ID NO: 47696 - DNA, 17 bp, Arabidopsis thaliana
atacaaccgttcagagc

SEQ ID NO: 47697 - DNA, 17 bp, Arabidopsis thaliana
atacaacctatactctc

SEQ ID NO: 47698 - DNA, 17 bp, Arabidopsis thaliana
atacaacggccgttaca

SEQ ID NO: 47699 - DNA, 17 bp, Arabidopsis thaliana
atacaacggctacctgc

SEQ ID NO: 47700 - DNA, 17 bp, Arabidopsis thaliana
atacaacttcttcagct

SEQ ID NO: 47701 - DNA, 17 bp, Arabidopsis thaliana
atacaagaatagcaccc

SEQ ID NO: 47702 - DNA, 17 bp, Arabidopsis thaliana
atacaagatcgggttgc

SEQ ID NO: 47703 - DNA, 17 bp, Arabidopsis thaliana
atacaagccctgcggta

SEQ ID NO: 47704 - DNA, 17 bp, Arabidopsis thaliana
atacaaggcccaatcaa

SEQ ID NO: 47705 - DNA, 17 bp, Arabidopsis thaliana
atacaagggttttggcc

SEQ ID NO: 47706 - DNA, 17 bp, Arabidopsis thaliana
atacaataggcgaaagg

SEQ ID NO: 47707 - DNA, 17 bp, Arabidopsis thaliana
atacaatagttcacccc

SEQ ID NO: 47708 - DNA, 17 bp, Arabidopsis thaliana
atacaatcctcagatgt

SEQ ID NO: 47709 - DNA, 17 bp, Arabidopsis thaliana
atacaattcaaggttct

SEQ ID NO: 47710 - DNA, 17 bp, Arabidopsis thaliana
atacaattccggatata

SEQ ID NO: 47711 - DNA, 17 bp, Arabidopsis thaliana
atacacactgatgctaa

SEQ ID NO: 47712 - DNA, 17 bp, Arabidopsis thaliana
atacacactgatgctga

SEQ ID NO: 47713 - DNA, 17 bp, Arabidopsis thaliana
atacacactgttccgac

SEQ ID NO: 47714 - DNA, 17 bp, Arabidopsis thaliana
atacacagcgaactgag

SEQ ID NO: 47715 - DNA, 17 bp, Arabidopsis thaliana
atacacaggtcatccgt

SEQ ID NO: 47716 - DNA, 17 bp, Arabidopsis thaliana
atacacagtttgacttt

SEQ ID NO: 47717 - DNA, 17 bp, Arabidopsis thaliana
atacacatgagtgattc

SEQ ID NO: 47718 - DNA, 17 bp, Arabidopsis thaliana
atacacatgtgtgattc

SEQ ID NO: 47719 - DNA, 17 bp, Arabidopsis thaliana
atacaccaccatggatg

SEQ ID NO: 47720 - DNA, 17 bp, Arabidopsis thaliana
atacaccaccggttatg

SEQ ID NO: 47721 - DNA, 17 bp, Arabidopsis thaliana
atacaccagaagatgat

SEQ ID NO: 47722 - DNA, 17 bp, Arabidopsis thaliana
atacaccatagctgagg

SEQ ID NO: 47723 - DNA, 17 bp, Arabidopsis thaliana
atacaccatcttcacca

SEQ ID NO: 47724 - DNA, 17 bp, Arabidopsis thaliana
atacaccgcgggactat

SEQ ID NO: 47725 - DNA, 17 bp, Arabidopsis thaliana
atacaccttgccacggg

SEQ ID NO: 47726 - DNA, 17 bp, Arabidopsis thaliana
atacacctttgggatga

SEQ ID NO: 47727 - DNA, 17 bp, Arabidopsis thaliana
atacacgacatcctact

SEQ ID NO: 47728 - DNA, 17 bp, Arabidopsis thaliana
atacacgacgctgttga

SEQ ID NO: 47729 - DNA, 17 bp, Arabidopsis thaliana
atacacgcggtataact

SEQ ID NO: 47730 - DNA, 17 bp, Arabidopsis thaliana
atacacgggatacactt

SEQ ID NO: 47731 - DNA, 17 bp, Arabidopsis thaliana
atacacgtctgcctggg

SEQ ID NO: 47732 - DNA, 17 bp, Arabidopsis thaliana
atacacgtgaacaattc

SEQ ID NO: 47733 - DNA, 17 bp, Arabidopsis thaliana
atacacgttcatcggaa

SEQ ID NO: 47734 - DNA, 17 bp, Arabidopsis thaliana
atacactagagattgtc

SEQ ID NO: 47735 - DNA, 17 bp, Arabidopsis thaliana
atacactatcgttcgat

SEQ ID NO: 47736 - DNA, 17 bp, Arabidopsis thaliana
atacactcctcggtgac

SEQ ID NO: 47737 - DNA, 17 bp, Arabidopsis thaliana
atacactgagaaggtcg

SEQ ID NO: 47738 - DNA, 17 bp, Arabidopsis thaliana
atacactgagagggtcg

SEQ ID NO: 47739 - DNA, 17 bp, Arabidopsis thaliana
atacactgatgctgaca

SEQ ID NO: 47740 - DNA, 17 bp, Arabidopsis thaliana
atacactgcgggactat

SEQ ID NO: 47741 - DNA, 17 bp, Arabidopsis thaliana
atacactgctctatctg

SEQ ID NO: 47742 - DNA, 17 bp, Arabidopsis thaliana
atacactgtggaagccc

SEQ ID NO: 47743 - DNA, 17 bp, Arabidopsis thaliana
atacacttaacacctgg

SEQ ID NO: 47744 - DNA, 17 bp, Arabidopsis thaliana
atacactttcggactag

SEQ ID NO: 47745 - DNA, 17 bp, Arabidopsis thaliana
atacagaaacctggaac

SEQ ID NO: 47746 - DNA, 17 bp, Arabidopsis thaliana
atacagactgctctgat

SEQ ID NO: 47747 - DNA, 17 bp, Arabidopsis thaliana
atacagagctatggcac

SEQ ID NO: 47748 - DNA, 17 bp, Arabidopsis thaliana
atacagaggagttctac

SEQ ID NO: 47749 - DNA, 17 bp, Arabidopsis thaliana
atacagaggttaatcgt

SEQ ID NO: 47750 - DNA, 17 bp, Arabidopsis thaliana
atacagatgtggtgtac

SEQ ID NO: 47751 - DNA, 17 bp, Arabidopsis thaliana
atacagcaagttaggcc

SEQ ID NO: 47752 - DNA, 17 bp, Arabidopsis thaliana
atacagcacgggttatg

SEQ ID NO: 47753 - DNA, 17 bp, Arabidopsis thaliana
atacagccacgtcagcg

SEQ ID NO: 47754 - DNA, 17 bp, Arabidopsis thaliana
atacagccggccagtcg

SEQ ID NO: 47755 - DNA, 17 bp, Arabidopsis thaliana
atacagcggcagttacg

SEQ ID NO: 47756 - DNA, 17 bp, Arabidopsis thaliana
atacagcttcgccagtc

SEQ ID NO: 47757 - DNA, 17 bp, Arabidopsis thaliana
atacagctttaagccca

SEQ ID NO: 47758 - DNA, 17 bp, Arabidopsis thaliana
atacaggagcagccttg

SEQ ID NO: 47759 - DNA, 17 bp, Arabidopsis thaliana
atacaggatgtgtcaga

SEQ ID NO: 47760 - DNA, 17 bp, Arabidopsis thaliana
atacaggcccggctctt

SEQ ID NO: 47761 - DNA, 17 bp, Arabidopsis thaliana
atacaggccgttctcgt

SEQ ID NO: 47762 - DNA, 17 bp, Arabidopsis thaliana
atacaggctcgactcta

SEQ ID NO: 47763 - DNA, 17 bp, Arabidopsis thaliana
atacagggccagcaata

SEQ ID NO: 47764 - DNA, 17 bp, Arabidopsis thaliana
atacagggccggtccta

SEQ ID NO: 47765 - DNA, 17 bp, Arabidopsis thaliana
atacaggggacctatgc

SEQ ID NO: 47766 - DNA, 17 bp, Arabidopsis thaliana
atacagggtcaatccgt

SEQ ID NO: 47767 - DNA, 17 bp, Arabidopsis thaliana
atacaggtctgattttg

SEQ ID NO: 47768 - DNA, 17 bp, Arabidopsis thaliana
atacaggtgctgcatgg

SEQ ID NO: 47769 - DNA, 17 bp, Arabidopsis thaliana
atacaggttttggttca

SEQ ID NO: 47770 - DNA, 17 bp, Arabidopsis thaliana
atacagtccaatgagaa

SEQ ID NO: 47771 - DNA, 17 bp, Arabidopsis thaliana
atacagtcggtatgaca

SEQ ID NO: 47772 - DNA, 17 bp, Arabidopsis thaliana
atacagtgcgttgccat

SEQ ID NO: 47773 - DNA, 17 bp, Arabidopsis thaliana
atacagtgctgaaacaa

SEQ ID NO: 47774 - DNA, 17 bp, Arabidopsis thaliana
atacagtgtgacgaaaa

SEQ ID NO: 47775 - DNA, 17 bp, Arabidopsis thaliana
atacagttacggccgag

SEQ ID NO: 47776 - DNA, 17 bp, Arabidopsis thaliana
atacagttctacgcagg

SEQ ID NO: 47777 - DNA, 17 bp, Arabidopsis thaliana
atacagtttacagtttt

SEQ ID NO: 47778 - DNA, 17 bp, Arabidopsis thaliana
atacagtttcagtttgg

SEQ ID NO: 47779 - DNA, 17 bp, Arabidopsis thaliana
atacagtttcagttttg

SEQ ID NO: 47780 - DNA, 17 bp, Arabidopsis thaliana
atacagttttggaatgc

SEQ ID NO: 47781 - DNA, 17 bp, Arabidopsis thaliana
atacataaaaggtcgac

SEQ ID NO: 47782 - DNA, 17 bp, Arabidopsis thaliana
atacataaacccgtgat

SEQ ID NO: 47783 - DNA, 17 bp, Arabidopsis thaliana
atacataaacttggtcc

SEQ ID NO: 47784 - DNA, 17 bp, Arabidopsis thaliana
atacataaacttggtct

SEQ ID NO: 47785 - DNA, 17 bp, Arabidopsis thaliana
atacataacatcgatcg

SEQ ID NO: 47786 - DNA, 17 bp, Arabidopsis thaliana
atacataactcaggcaa

SEQ ID NO: 47787 - DNA, 17 bp, Arabidopsis thaliana
atacataactcggttcc

SEQ ID NO: 47788 - DNA, 17 bp, Arabidopsis thaliana
atacataacttcgggag

SEQ ID NO: 47789 - DNA, 17 bp, Arabidopsis thaliana
atacataagatcgggtt

SEQ ID NO: 47790 - DNA, 17 bp, Arabidopsis thaliana
atacataatccgtagcg

SEQ ID NO: 47791 - DNA, 17 bp, Arabidopsis thaliana
atacataattaccaccg

SEQ ID NO: 47792 - DNA, 17 bp, Arabidopsis thaliana
atacataattgcgtggc

SEQ ID NO: 47793 - DNA, 17 bp, Arabidopsis thaliana
atacatacacatgtgtg

SEQ ID NO: 47794 - DNA, 17 bp, Arabidopsis thaliana
atacatacagaggagtt

SEQ ID NO: 47795 - DNA, 17 bp, Arabidopsis thaliana
atacatacaggcccggc

SEQ ID NO: 47796 - DNA, 17 bp, Arabidopsis thaliana
atacatacatcgctaat

SEQ ID NO: 47797 - DNA, 17 bp, Arabidopsis thaliana
atacataccatgtggct

SEQ ID NO: 47798 - DNA, 17 bp, Arabidopsis thaliana
atacatacccagcgtgc

SEQ ID NO: 47799 - DNA, 17 bp, Arabidopsis thaliana
atacataccgaccgtcg

SEQ ID NO: 47800 - DNA, 17 bp, Arabidopsis thaliana
atacatacctcctctgg

SEQ ID NO: 47801 - DNA, 17 bp, Arabidopsis thaliana
atacatacgaaagttga

SEQ ID NO: 47802 - DNA, 17 bp, Arabidopsis thaliana
atacatacgaaccgtga

SEQ ID NO: 47803 - DNA, 17 bp, Arabidopsis thaliana
atacatacgattgtgcc

SEQ ID NO: 47804 - DNA, 17 bp, Arabidopsis thaliana
atacatacgctcctggt

SEQ ID NO: 47805 - DNA, 17 bp, Arabidopsis thaliana
atacatacggactttgg

SEQ ID NO: 47806 - DNA, 17 bp, Arabidopsis thaliana
atacatacggagtttgc

SEQ ID NO: 47807 - DNA, 17 bp, Arabidopsis thaliana
atacatactccgagccg

SEQ ID NO: 47808 - DNA, 17 bp, Arabidopsis thaliana
atacatactgcagagat

SEQ ID NO: 47809 - DNA, 17 bp, Arabidopsis thaliana
atacatactgccagatc

SEQ ID NO: 47810 - DNA, 17 bp, Arabidopsis thaliana
atacatactggatcaga

SEQ ID NO: 47811 - DNA, 17 bp, Arabidopsis thaliana
atacatacttttctcag

SEQ ID NO: 47812 - DNA, 17 bp, Arabidopsis thaliana
atacatacttttgactg

SEQ ID NO: 47813 - DNA, 17 bp, Arabidopsis thaliana
atacatagagaccgctg

SEQ ID NO: 47814 - DNA, 17 bp, Arabidopsis thaliana
atacatagatgaagcag

SEQ ID NO: 47815 - DNA, 17 bp, Arabidopsis thaliana
atacatagattgacctg

SEQ ID NO: 47816 - DNA, 17 bp, Arabidopsis thaliana
atacatagcccttttcc

SEQ ID NO: 47817 - DNA, 17 bp, Arabidopsis thaliana
atacatagcgagttggt

SEQ ID NO: 47818 - DNA, 17 bp, Arabidopsis thaliana
atacatagcggcatagc

SEQ ID NO: 47819 - DNA, 17 bp, Arabidopsis thaliana
atacatagcgggtggga

SEQ ID NO: 47820 - DNA, 17 bp, Arabidopsis thaliana
atacatagcggttgtta

SEQ ID NO: 47821 - DNA, 17 bp, Arabidopsis thaliana
atacatagctcgacgcc

SEQ ID NO: 47822 - DNA, 17 bp, Arabidopsis thaliana
atacataggattgtgcc

SEQ ID NO: 47823 - DNA, 17 bp, Arabidopsis thaliana
atacataggcgcccata

SEQ ID NO: 47824 - DNA, 17 bp, Arabidopsis thaliana
atacatagtaggctgct

SEQ ID NO: 47825 - DNA, 17 bp, Arabidopsis thaliana
atacatagtcgcatcct

SEQ ID NO: 47826 - DNA, 17 bp, Arabidopsis thaliana
atacatagtcgttcgcc

SEQ ID NO: 47827 - DNA, 17 bp, Arabidopsis thaliana
atacatagttagctaac

SEQ ID NO: 47828 - DNA, 17 bp, Arabidopsis thaliana
atacatagttctacgca

SEQ ID NO: 47829 - DNA, 17 bp, Arabidopsis thaliana
atacatatactagattt

SEQ ID NO: 47830 - DNA, 17 bp, Arabidopsis thaliana
atacatatcaatccaaa

SEQ ID NO: 47831 - DNA, 17 bp, Arabidopsis thaliana
atacatatccgcttcgt

SEQ ID NO: 47832 - DNA, 17 bp, Arabidopsis thaliana
atacatatctagaatgg

SEQ ID NO: 47833 - DNA, 17 bp, Arabidopsis thaliana
atacatatctattgccg

SEQ ID NO: 47834 - DNA, 17 bp, Arabidopsis thaliana
atacatatctcgcaacg

SEQ ID NO: 47835 - DNA, 17 bp, Arabidopsis thaliana
atacatatggaccgagg

SEQ ID NO: 47836 - DNA, 17 bp, Arabidopsis thaliana
atacatatggactaatc

SEQ ID NO: 47837 - DNA, 17 bp, Arabidopsis thaliana
atacatatggagagagt

SEQ ID NO: 47838 - DNA, 17 bp, Arabidopsis thaliana
atacatattagactgtg

SEQ ID NO: 47839 - DNA, 17 bp, Arabidopsis thaliana
atacatattcgcttcgt

SEQ ID NO: 47840 - DNA, 17 bp, Arabidopsis thaliana
atacatattctggtgtc

SEQ ID NO: 47841 - DNA, 17 bp, Arabidopsis thaliana
atacatatttccatctt

SEQ ID NO: 47842 - DNA, 17 bp, Arabidopsis thaliana
atacatcaacttcgtat

SEQ ID NO: 47843 - DNA, 17 bp, Arabidopsis thaliana
atacatcaactttgtat

SEQ ID NO: 47844 - DNA, 17 bp, Arabidopsis thaliana
atacatcaactttgtgt

SEQ ID NO: 47845 - DNA, 17 bp, Arabidopsis thaliana
atacatcacaatgtcta

SEQ ID NO: 47846 - DNA, 17 bp, Arabidopsis thaliana
atacatcacccagtgga

SEQ ID NO: 47847 - DNA, 17 bp, Arabidopsis thaliana
atacatcacggtcgtcg

SEQ ID NO: 47848 - DNA, 17 bp, Arabidopsis thaliana
atacatcacggtcgttg

SEQ ID NO: 47849 - DNA, 17 bp, Arabidopsis thaliana
atacatccgctttgact

SEQ ID NO: 47850 - DNA, 17 bp, Arabidopsis thaliana
atacatccgcttttttt

SEQ ID NO: 47851 - DNA, 17 bp, Arabidopsis thaliana
atacatccggttcaccg

SEQ ID NO: 47852 - DNA, 17 bp, Arabidopsis thaliana
atacatcgactagcgac

SEQ ID NO: 47853 - DNA, 17 bp, Arabidopsis thaliana
atacatcgctaatttcc

SEQ ID NO: 47854 - DNA, 17 bp, Arabidopsis thaliana
atacatcgctaatttcg

SEQ ID NO: 47855 - DNA, 17 bp, Arabidopsis thaliana
atacatcgtcgtcgtca

SEQ ID NO: 47856 - DNA, 17 bp, Arabidopsis thaliana
atacatctacttccgga

SEQ ID NO: 47857 - DNA, 17 bp, Arabidopsis thaliana
atacatctcttcgcgtt

SEQ ID NO: 47858 - DNA, 17 bp, Arabidopsis thaliana
atacatctgcctttttt

SEQ ID NO: 47859 - DNA, 17 bp, Arabidopsis thaliana
atacatctggcttgact

SEQ ID NO: 47860 - DNA, 17 bp, Arabidopsis thaliana
atacatcttcaccgttc

SEQ ID NO: 47861 - DNA, 17 bp, Arabidopsis thaliana
atacatcttggttgtcg

SEQ ID NO: 47862 - DNA, 17 bp, Arabidopsis thaliana
atacatgacgaagcgtc

SEQ ID NO: 47863 - DNA, 17 bp, Arabidopsis thaliana
atacatgctcctgggcc

SEQ ID NO: 47864 - DNA, 17 bp, Arabidopsis thaliana
atacatggacaaaatcg

SEQ ID NO: 47865 - DNA, 17 bp, Arabidopsis thaliana
atacatggaggtcgggg

SEQ ID NO: 47866 - DNA, 17 bp, Arabidopsis thaliana
atacatggtgtgtcggg

SEQ ID NO: 47867 - DNA, 17 bp, Arabidopsis thaliana
atacatgtggccgcaaa

SEQ ID NO: 47868 - DNA, 17 bp, Arabidopsis thaliana
atacatgtggttctgcc

SEQ ID NO: 47869 - DNA, 17 bp, Arabidopsis thaliana
atacatgttgcggggat

SEQ ID NO: 47870 - DNA, 17 bp, Arabidopsis thaliana
atacattgacagtcaga

SEQ ID NO: 47871 - DNA, 17 bp, Arabidopsis thaliana
atacattgcacggtacg

SEQ ID NO: 47872 - DNA, 17 bp, Arabidopsis thaliana
atacatttcattgccca

SEQ ID NO: 47873 - DNA, 17 bp, Arabidopsis thaliana
atacatttcggaggctg

SEQ ID NO: 47874 - DNA, 17 bp, Arabidopsis thaliana
atacatttttgcagcca

SEQ ID NO: 47875 - DNA, 17 bp, Arabidopsis thaliana
ataccaaaacgccgcct

SEQ ID NO: 47876 - DNA, 17 bp, Arabidopsis thaliana
ataccaaaccttcttga

SEQ ID NO: 47877 - DNA, 17 bp, Arabidopsis thaliana
ataccaaactttggttg

SEQ ID NO: 47878 - DNA, 17 bp, Arabidopsis thaliana
ataccaaagtttggtta

SEQ ID NO: 47879 - DNA, 17 bp, Arabidopsis thaliana
ataccaagaatcggttg

SEQ ID NO: 47880 - DNA, 17 bp, Arabidopsis thaliana
ataccaaggatgacttg

SEQ ID NO: 47881 - DNA, 17 bp, Arabidopsis thaliana
ataccaaggttggagtt

SEQ ID NO: 47882 - DNA, 17 bp, Arabidopsis thaliana
ataccaatactacaagt

SEQ ID NO: 47883 - DNA, 17 bp, Arabidopsis thaliana
ataccaatctatttagg

SEQ ID NO: 47884 - DNA, 17 bp, Arabidopsis thaliana
ataccaattgtcgaaat

SEQ ID NO: 47885 - DNA, 17 bp, Arabidopsis thaliana
ataccacatttcactca

SEQ ID NO: 47886 - DNA, 17 bp, Arabidopsis thaliana
ataccaccgacttattc

SEQ ID NO: 47887 - DNA, 17 bp, Arabidopsis thaliana
ataccacgattttggcc

SEQ ID NO: 47888 - DNA, 17 bp, Arabidopsis thaliana
ataccacgctacttttt

SEQ ID NO: 47889 - DNA, 17 bp, Arabidopsis thaliana
ataccacgggttaaatc

SEQ ID NO: 47890 - DNA, 17 bp, Arabidopsis thaliana
ataccacttaagatcct

SEQ ID NO: 47891 - DNA, 17 bp, Arabidopsis thaliana
ataccagaacctgtcgg

SEQ ID NO: 47892 - DNA, 17 bp, Arabidopsis thaliana
ataccagacagtggcgg

SEQ ID NO: 47893 - DNA, 17 bp, Arabidopsis thaliana
ataccagcaagtgtggc

SEQ ID NO: 47894 - DNA, 17 bp, Arabidopsis thaliana
ataccagcactaatgca

SEQ ID NO: 47895 - DNA, 17 bp, Arabidopsis thaliana
ataccagcactaatgcc

SEQ ID NO: 47896 - DNA, 17 bp, Arabidopsis thaliana
ataccagcttgaggagg

SEQ ID NO: 47897 - DNA, 17 bp, Arabidopsis thaliana
ataccaggaggttctgg

SEQ ID NO: 47898 - DNA, 17 bp, Arabidopsis thaliana
ataccaggaggtttttg

SEQ ID NO: 47899 - DNA, 17 bp, Arabidopsis thaliana
ataccagggatggtgtc

SEQ ID NO: 47900 - DNA, 17 bp, Arabidopsis thaliana
ataccagtaatcgcttt

SEQ ID NO: 47901 - DNA, 17 bp, Arabidopsis thaliana
ataccagtaggttctga

SEQ ID NO: 47902 - DNA, 17 bp, Arabidopsis thaliana
ataccagtaggttctgg

SEQ ID NO: 47903 - DNA, 17 bp, Arabidopsis thaliana
ataccagtgaatgccac

SEQ ID NO: 47904 - DNA, 17 bp, Arabidopsis thaliana
ataccagttaccacgca

SEQ ID NO: 47905 - DNA, 17 bp, Arabidopsis thaliana
ataccagttatccgtgc

SEQ ID NO: 47906 - DNA, 17 bp, Arabidopsis thaliana
ataccataatggtgtcg

SEQ ID NO: 47907 - DNA, 17 bp, Arabidopsis thaliana
ataccatagaccgtgtg

SEQ ID NO: 47908 - DNA, 17 bp, Arabidopsis thaliana
ataccatattagactgt

SEQ ID NO: 47909 - DNA, 17 bp, Arabidopsis thaliana
ataccatattagagtgt

SEQ ID NO: 47910 - DNA, 17 bp, Arabidopsis thaliana
ataccatcactaatgca

SEQ ID NO: 47911 - DNA, 17 bp, Arabidopsis thaliana
ataccatctaatcccgt

SEQ ID NO: 47912 - DNA, 17 bp, Arabidopsis thaliana
ataccatcttcctttgc

SEQ ID NO: 47913 - DNA, 17 bp, Arabidopsis thaliana
ataccatgctgacgtgt

SEQ ID NO: 47914 - DNA, 17 bp, Arabidopsis thaliana
ataccatggcggtgaga

SEQ ID NO: 47915 - DNA, 17 bp, Arabidopsis thaliana
ataccatgtggcttgga

SEQ ID NO: 47916 - DNA, 17 bp, Arabidopsis thaliana
ataccatgttgcttgga

SEQ ID NO: 47917 - DNA, 17 bp, Arabidopsis thaliana
ataccattgtttcttga

SEQ ID NO: 47918 - DNA, 17 bp, Arabidopsis thaliana
ataccattttcaaagtt

SEQ ID NO: 47919 - DNA, 17 bp, Arabidopsis thaliana
ataccattttcgagttt

SEQ ID NO: 47920 - DNA, 17 bp, Arabidopsis thaliana
atacccaaacacaattt

SEQ ID NO: 47921 - DNA, 17 bp, Arabidopsis thaliana
atacccacccacccacc

SEQ ID NO: 47922 - DNA, 17 bp, Arabidopsis thaliana
atacccacggccgaaga

SEQ ID NO: 47923 - DNA, 17 bp, Arabidopsis thaliana
atacccacgggtacgac

SEQ ID NO: 47924 - DNA, 17 bp, Arabidopsis thaliana
atacccagcgtgcttct

SEQ ID NO: 47925 - DNA, 17 bp, Arabidopsis thaliana
atacccagctgagagtc

SEQ ID NO: 47926 - DNA, 17 bp, Arabidopsis thaliana
ataccccacttgccgcg

SEQ ID NO: 47927 - DNA, 17 bp, Arabidopsis thaliana
ataccccgcccccaaaa

SEQ ID NO: 47928 - DNA, 17 bp, Arabidopsis thaliana
atacccctgcggtttta

SEQ ID NO: 47929 - DNA, 17 bp, Arabidopsis thaliana
ataccccttgttgtagc

SEQ ID NO: 47930 - DNA, 17 bp, Arabidopsis thaliana
atacccgaagtaagccg

SEQ ID NO: 47931 - DNA, 17 bp, Arabidopsis thaliana
atacccgcgggccggtc

SEQ ID NO: 47932 - DNA, 17 bp, Arabidopsis thaliana
atacccggccgtcgggg

SEQ ID NO: 47933 - DNA, 17 bp, Arabidopsis thaliana
atacccgggaagtacgc

SEQ ID NO: 47934 - DNA, 17 bp, Arabidopsis thaliana
atacccgggcggttcaa

SEQ ID NO: 47935 - DNA, 17 bp, Arabidopsis thaliana
atacccggttgaacctg

SEQ ID NO: 47936 - DNA, 17 bp, Arabidopsis thaliana
ataccctatcggctgat

SEQ ID NO: 47937 - DNA, 17 bp, Arabidopsis thaliana
ataccctttttgcgtaa

SEQ ID NO: 47938 - DNA, 17 bp, Arabidopsis thaliana
ataccgaccgtcggaca

SEQ ID NO: 47939 - DNA, 17 bp, Arabidopsis thaliana
ataccgaggagctgttg

SEQ ID NO: 47940 - DNA, 17 bp, Arabidopsis thaliana
ataccgaggcctgttcc

SEQ ID NO: 47941 - DNA, 17 bp, Arabidopsis thaliana
ataccgatgaatttggc

SEQ ID NO: 47942 - DNA, 17 bp, Arabidopsis thaliana
ataccgattgatccgac

SEQ ID NO: 47943 - DNA, 17 bp, Arabidopsis thaliana
ataccgcaggacgattt

SEQ ID NO: 47944 - DNA, 17 bp, Arabidopsis thaliana
ataccgcaggtaggctt

SEQ ID NO: 47945 - DNA, 17 bp, Arabidopsis thaliana
ataccgcagttagatcg

SEQ ID NO: 47946 - DNA, 17 bp, Arabidopsis thaliana
ataccgccgccacccta

SEQ ID NO: 47947 - DNA, 17 bp, Arabidopsis thaliana
ataccgccggtgcttgt

SEQ ID NO: 47948 - DNA, 17 bp, Arabidopsis thaliana
ataccgcgagccaagta

SEQ ID NO: 47949 - DNA, 17 bp, Arabidopsis thaliana
ataccgcggatcgatat

SEQ ID NO: 47950 - DNA, 17 bp, Arabidopsis thaliana
ataccgcggattaatat

SEQ ID NO: 47951 - DNA, 17 bp, Arabidopsis thaliana
ataccgcgggacgattt

SEQ ID NO: 47952 - DNA, 17 bp, Arabidopsis thaliana
ataccgcggggctaggt

SEQ ID NO: 47953 - DNA, 17 bp, Arabidopsis thaliana
ataccgcggggctatat

SEQ ID NO: 47954 - DNA, 17 bp, Arabidopsis thaliana
ataccgcgggtcaaaat

SEQ ID NO: 47955 - DNA, 17 bp, Arabidopsis thaliana
ataccgcgggtcaattt

SEQ ID NO: 47956 - DNA, 17 bp, Arabidopsis thaliana
ataccgcgggtgaaaat

SEQ ID NO: 47957 - DNA, 17 bp, Arabidopsis thaliana
ataccgcgggtgaagat

SEQ ID NO: 47958 - DNA, 17 bp, Arabidopsis thaliana
ataccgcgggttaagtc

SEQ ID NO: 47959 - DNA, 17 bp, Arabidopsis thaliana
ataccgcgggttagtat

SEQ ID NO: 47960 - DNA, 17 bp, Arabidopsis thaliana
ataccgcggtgacaatt

SEQ ID NO: 47961 - DNA, 17 bp, Arabidopsis thaliana
ataccgctattcaacaa

SEQ ID NO: 47962 - DNA, 17 bp, Arabidopsis thaliana
ataccgctttgtccgct

SEQ ID NO: 47963 - DNA, 17 bp, Arabidopsis thaliana
ataccggaactcttgcc

SEQ ID NO: 47964 - DNA, 17 bp, Arabidopsis thaliana
ataccggccgtcggaca

SEQ ID NO: 47965 - DNA, 17 bp, Arabidopsis thaliana
ataccgggagggtgcta

SEQ ID NO: 47966 - DNA, 17 bp, Arabidopsis thaliana
ataccgtcacattatcc

SEQ ID NO: 47967 - DNA, 17 bp, Arabidopsis thaliana
ataccgtcagtgttgac

SEQ ID NO: 47968 - DNA, 17 bp, Arabidopsis thaliana
ataccgtgagcccaaac

SEQ ID NO: 47969 - DNA, 17 bp, Arabidopsis thaliana
ataccgtgagcccaacc

SEQ ID NO: 47970 - DNA, 17 bp, Arabidopsis thaliana
ataccgtgaggccaaac

SEQ ID NO: 47971 - DNA, 17 bp, Arabidopsis thaliana
ataccgtggagcttgat

SEQ ID NO: 47972 - DNA, 17 bp, Arabidopsis thaliana
ataccgttatcttttat

SEQ ID NO: 47973 - DNA, 17 bp, Arabidopsis thaliana
atacctaacggcaattc

SEQ ID NO: 47974 - DNA, 17 bp, Arabidopsis thaliana
atacctaagcaccaggc

SEQ ID NO: 47975 - DNA, 17 bp, Arabidopsis thaliana
atacctatcaaaaccga

SEQ ID NO: 47976 - DNA, 17 bp, Arabidopsis thaliana
atacctcagctttggca

SEQ ID NO: 47977 - DNA, 17 bp, Arabidopsis thaliana
atacctcagctttgtga

SEQ ID NO: 47978 - DNA, 17 bp, Arabidopsis thaliana
atacctcctctggcatt

SEQ ID NO: 47979 - DNA, 17 bp, Arabidopsis thaliana
atacctcgaacccagca

SEQ ID NO: 47980 - DNA, 17 bp, Arabidopsis thaliana
atacctcgtttctcact

SEQ ID NO: 47981 - DNA, 17 bp, Arabidopsis thaliana
atacctcttcgggttcg

SEQ ID NO: 47982 - DNA, 17 bp, Arabidopsis thaliana
atacctctttgaccgtc

SEQ ID NO: 47983 - DNA, 17 bp, Arabidopsis thaliana
atacctgacgtggtgcc

SEQ ID NO: 47984 - DNA, 17 bp, Arabidopsis thaliana
atacctgatatgatcgc

SEQ ID NO: 47985 - DNA, 17 bp, Arabidopsis thaliana
atacctgcaagaggtga

SEQ ID NO: 47986 - DNA, 17 bp, Arabidopsis thaliana
atacctgctatctcctc

SEQ ID NO: 47987 - DNA, 17 bp, Arabidopsis thaliana
atacctgcttggtgtct

SEQ ID NO: 47988 - DNA, 17 bp, Arabidopsis thaliana
atacctggttgatcctg

SEQ ID NO: 47989 - DNA, 17 bp, Arabidopsis thaliana
atacctgttaccggcgc

SEQ ID NO: 47990 - DNA, 17 bp, Arabidopsis thaliana
ataccttacagggccgc

SEQ ID NO: 47991 - DNA, 17 bp, Arabidopsis thaliana
ataccttcactcaaggt

SEQ ID NO: 47992 - DNA, 17 bp, Arabidopsis thaliana
ataccttcgtctttgtt

SEQ ID NO: 47993 - DNA, 17 bp, Arabidopsis thaliana
ataccttgaattttggc

SEQ ID NO: 47994 - DNA, 17 bp, Arabidopsis thaliana
ataccttgaccggcgcc

SEQ ID NO: 47995 - DNA, 17 bp, Arabidopsis thaliana
ataccttgaccggcgtc

SEQ ID NO: 47996 - DNA, 17 bp, Arabidopsis thaliana
ataccttgcaccatcag

SEQ ID NO: 47997 - DNA, 17 bp, Arabidopsis thaliana
ataccttgggatgggtc

SEQ ID NO: 47998 - DNA, 17 bp, Arabidopsis thaliana
ataccttggttgcgtca

SEQ ID NO: 47999 - DNA, 17 bp, Arabidopsis thaliana
ataccttgtgcctgtgc

SEQ ID NO: 48000 - DNA, 17 bp, Arabidopsis thaliana
ataccttttggtctgcc

SEQ ID NO: 48001 - DNA, 17 bp, Arabidopsis thaliana
ataccttttgtaatccg

SEQ ID NO: 48002 - DNA, 17 bp, Arabidopsis thaliana
atacgaaactcagagat

SEQ ID NO: 48003 - DNA, 17 bp, Arabidopsis thaliana
atacgaaagatggtgaa

SEQ ID NO: 48004 - DNA, 17 bp, Arabidopsis thaliana
atacgaaagttgaccaa

SEQ ID NO: 48005 - DNA, 17 bp, Arabidopsis thaliana
atacgaacaacatttgg

SEQ ID NO: 48006 - DNA, 17 bp, Arabidopsis thaliana
atacgaaccgtgaaagc

SEQ ID NO: 48007 - DNA, 17 bp, Arabidopsis thaliana
atacgaactgttaaatc

SEQ ID NO: 48008 - DNA, 17 bp, Arabidopsis thaliana
atacgaagctgaattgg

SEQ ID NO: 48009 - DNA, 17 bp, Arabidopsis thaliana
atacgaatgaccggcat

SEQ ID NO: 48010 - DNA, 17 bp, Arabidopsis thaliana
atacgacattgctgcca

SEQ ID NO: 48011 - DNA, 17 bp, Arabidopsis thaliana
atacgacgccttgtcca

SEQ ID NO: 48012 - DNA, 17 bp, Arabidopsis thaliana
atacgacgcggattacg

SEQ ID NO: 48013 - DNA, 17 bp, Arabidopsis thaliana
atacgacggagatccgg

SEQ ID NO: 48014 - DNA, 17 bp, Arabidopsis thaliana
atacgactacggtgcaa

SEQ ID NO: 48015 - DNA, 17 bp, Arabidopsis thaliana
atacgagacggtatacc

SEQ ID NO: 48016 - DNA, 17 bp, Arabidopsis thaliana
atacgagacggtatact

SEQ ID NO: 48017 - DNA, 17 bp, Arabidopsis thaliana
atacgagctgagactga

SEQ ID NO: 48018 - DNA, 17 bp, Arabidopsis thaliana
atacgagggcacgtctg

SEQ ID NO: 48019 - DNA, 17 bp, Arabidopsis thaliana
atacgagtcgtgcagct

SEQ ID NO: 48020 - DNA, 17 bp, Arabidopsis thaliana
atacgatatttgatttt

SEQ ID NO: 48021 - DNA, 17 bp, Arabidopsis thaliana
atacgatcacgcgtctt

SEQ ID NO: 48022 - DNA, 17 bp, Arabidopsis thaliana
atacgatcgcctgttgg

SEQ ID NO: 48023 - DNA, 17 bp, Arabidopsis thaliana
atacgatcgtgccacat

SEQ ID NO: 48024 - DNA, 17 bp, Arabidopsis thaliana
atacgatcgtgccacgt

SEQ ID NO: 48025 - DNA, 17 bp, Arabidopsis thaliana
atacgatctccaagttg

SEQ ID NO: 48026 - DNA, 17 bp, Arabidopsis thaliana
atacgatgaagatggtc

SEQ ID NO: 48027 - DNA, 17 bp, Arabidopsis thaliana
atacgatgtggtttcgg

SEQ ID NO: 48028 - DNA, 17 bp, Arabidopsis thaliana
atacgattcttggttca

SEQ ID NO: 48029 - DNA, 17 bp, Arabidopsis thaliana
atacgattgctcaagag

SEQ ID NO: 48030 - DNA, 17 bp, Arabidopsis thaliana
atacgattggcggcgat

SEQ ID NO: 48031 - DNA, 17 bp, Arabidopsis thaliana
atacgattgtacggttt

SEQ ID NO: 48032 - DNA, 17 bp, Arabidopsis thaliana
atacgattgtgacacgt

SEQ ID NO: 48033 - DNA, 17 bp, Arabidopsis thaliana
atacgattgtgccacgt

SEQ ID NO: 48034 - DNA, 17 bp, Arabidopsis thaliana
atacgattgtggcctta

SEQ ID NO: 48035 - DNA, 17 bp, Arabidopsis thaliana
atacgattttgggtgcg

SEQ ID NO: 48036 - DNA, 17 bp, Arabidopsis thaliana
atacgattttgggtgtg

SEQ ID NO: 48037 - DNA, 17 bp, Arabidopsis thaliana
atacgcaaaggatcttg

SEQ ID NO: 48038 - DNA, 17 bp, Arabidopsis thaliana
atacgcaatgtgatttc

SEQ ID NO: 48039 - DNA, 17 bp, Arabidopsis thaliana
atacgcagccttgtcat

SEQ ID NO: 48040 - DNA, 17 bp, Arabidopsis thaliana
atacgcaggagatgatt

SEQ ID NO: 48041 - DNA, 17 bp, Arabidopsis thaliana
atacgcatttcccgact

SEQ ID NO: 48042 - DNA, 17 bp, Arabidopsis thaliana
atacgcatttggatctc

SEQ ID NO: 48043 - DNA, 17 bp, Arabidopsis thaliana
atacgccacatcatctt

SEQ ID NO: 48044 - DNA, 17 bp, Arabidopsis thaliana
atacgcccaacagagaa

SEQ ID NO: 48045 - DNA, 17 bp, Arabidopsis thaliana
atacgccctgaatggat

SEQ ID NO: 48046 - DNA, 17 bp, Arabidopsis thaliana
atacgccggcaagagcg

SEQ ID NO: 48047 - DNA, 17 bp, Arabidopsis thaliana
atacgccgggcatcgct

SEQ ID NO: 48048 - DNA, 17 bp, Arabidopsis thaliana
atacgcgaaaccacgga

SEQ ID NO: 48049 - DNA, 17 bp, Arabidopsis thaliana
atacgcgacggggtatt

SEQ ID NO: 48050 - DNA, 17 bp, Arabidopsis thaliana
atacgcgaggacagctc

SEQ ID NO: 48051 - DNA, 17 bp, Arabidopsis thaliana
atacgcgagtcagcatt

SEQ ID NO: 48052 - DNA, 17 bp, Arabidopsis thaliana
atacgcgggtacacagc

SEQ ID NO: 48053 - DNA, 17 bp, Arabidopsis thaliana
atacgcgtgcctgacta

SEQ ID NO: 48054 - DNA, 17 bp, Arabidopsis thaliana
atacgcgtgcctgactt

SEQ ID NO: 48055 - DNA, 17 bp, Arabidopsis thaliana
atacgctaagttcaact

SEQ ID NO: 48056 - DNA, 17 bp, Arabidopsis thaliana
atacgctattggagctg

SEQ ID NO: 48057 - DNA, 17 bp, Arabidopsis thaliana
atacgctcaagaacctc

SEQ ID NO: 48058 - DNA, 17 bp, Arabidopsis thaliana
atacgctcctggtctta

SEQ ID NO: 48059 - DNA, 17 bp, Arabidopsis thaliana
atacgctgaaccggttg

SEQ ID NO: 48060 - DNA, 17 bp, Arabidopsis thaliana
atacgctgtcactaagt

SEQ ID NO: 48061 - DNA, 17 bp, Arabidopsis thaliana
atacgcttgatggacac

SEQ ID NO: 48062 - DNA, 17 bp, Arabidopsis thaliana
atacgcttgtggagacg

SEQ ID NO: 48063 - DNA, 17 bp, Arabidopsis thaliana
atacgctttctccattc

SEQ ID NO: 48064 - DNA, 17 bp, Arabidopsis thaliana
atacgctttctctattc

SEQ ID NO: 48065 - DNA, 17 bp, Arabidopsis thaliana
atacggaaacctcttta

SEQ ID NO: 48066 - DNA, 17 bp, Arabidopsis thaliana
atacggaagcagtggcg

SEQ ID NO: 48067 - DNA, 17 bp, Arabidopsis thaliana
atacggaatgctatcag

SEQ ID NO: 48068 - DNA, 17 bp, Arabidopsis thaliana
atacggacacgcccaat

SEQ ID NO: 48069 - DNA, 17 bp, Arabidopsis thaliana
atacggacttcagtttc

SEQ ID NO: 48070 - DNA, 17 bp, Arabidopsis thaliana
atacggactttggctac

SEQ ID NO: 48071 - DNA, 17 bp, Arabidopsis thaliana
atacggactttgggttc

SEQ ID NO: 48072 - DNA, 17 bp, Arabidopsis thaliana
atacggagcgtgtatac

SEQ ID NO: 48073 - DNA, 17 bp, Arabidopsis thaliana
atacggagggaggtttc

SEQ ID NO: 48074 - DNA, 17 bp, Arabidopsis thaliana
atacggagtttgcttta

SEQ ID NO: 48075 - DNA, 17 bp, Arabidopsis thaliana
atacggataagccatca

SEQ ID NO: 48076 - DNA, 17 bp, Arabidopsis thaliana
atacggatcgggttttt

SEQ ID NO: 48077 - DNA, 17 bp, Arabidopsis thaliana
atacggatcttggtcca

SEQ ID NO: 48078 - DNA, 17 bp, Arabidopsis thaliana
atacggatggggcttcc

SEQ ID NO: 48079 - DNA, 17 bp, Arabidopsis thaliana
atacggatgttcggtgt

SEQ ID NO: 48080 - DNA, 17 bp, Arabidopsis thaliana
atacggattgctctgct

SEQ ID NO: 48081 - DNA, 17 bp, Arabidopsis thaliana
atacggatttcggctac

SEQ ID NO: 48082 - DNA, 17 bp, Arabidopsis thaliana
atacggcagcggactct

SEQ ID NO: 48083 - DNA, 17 bp, Arabidopsis thaliana
atacggccggacttgca

SEQ ID NO: 48084 - DNA, 17 bp, Arabidopsis thaliana
atacggctgtagattct

SEQ ID NO: 48085 - DNA, 17 bp, Arabidopsis thaliana
atacggcttgtcccttc

SEQ ID NO: 48086 - DNA, 17 bp, Arabidopsis thaliana
atacgggacaggaggag

SEQ ID NO: 48087 - DNA, 17 bp, Arabidopsis thaliana
atacgggactaaccgaa

SEQ ID NO: 48088 - DNA, 17 bp, Arabidopsis thaliana
atacgggaggactatat

SEQ ID NO: 48089 - DNA, 17 bp, Arabidopsis thaliana
atacgggcaagtggctt

SEQ ID NO: 48090 - DNA, 17 bp, Arabidopsis thaliana
atacggtatcccgtggc

SEQ ID NO: 48091 - DNA, 17 bp, Arabidopsis thaliana
atacggtcaagcccata

SEQ ID NO: 48092 - DNA, 17 bp, Arabidopsis thaliana
atacggtcataattgcg

SEQ ID NO: 48093 - DNA, 17 bp, Arabidopsis thaliana
atacggtccccacagac

SEQ ID NO: 48094 - DNA, 17 bp, Arabidopsis thaliana
atacggtcgagcgcccg

SEQ ID NO: 48095 - DNA, 17 bp, Arabidopsis thaliana
atacggtcgagcgcctc

SEQ ID NO: 48096 - DNA, 17 bp, Arabidopsis thaliana
atacggtggattgcgca

SEQ ID NO: 48097 - DNA, 17 bp, Arabidopsis thaliana
atacggtggttgcttcg

SEQ ID NO: 48098 - DNA, 17 bp, Arabidopsis thaliana
atacggttacggttggg

SEQ ID NO: 48099 - DNA, 17 bp, Arabidopsis thaliana
atacggttgcgcaatgt

SEQ ID NO: 48100 - DNA, 17 bp, Arabidopsis thaliana
atacggttggtcagtat

SEQ ID NO: 48101 - DNA, 17 bp, Arabidopsis thaliana
atacgtacctggagctg

SEQ ID NO: 48102 - DNA, 17 bp, Arabidopsis thaliana
atacgtcaacttcgtat

SEQ ID NO: 48103 - DNA, 17 bp, Arabidopsis thaliana
atacgtcagcgatttag

SEQ ID NO: 48104 - DNA, 17 bp, Arabidopsis thaliana
atacgtccttagctgcc

SEQ ID NO: 48105 - DNA, 17 bp, Arabidopsis thaliana
atacgtcggacggtcgc

SEQ ID NO: 48106 - DNA, 17 bp, Arabidopsis thaliana
atacgtcttcggagatc

SEQ ID NO: 48107 - DNA, 17 bp, Arabidopsis thaliana
atacgtgaactctgacg

SEQ ID NO: 48108 - DNA, 17 bp, Arabidopsis thaliana
atacgtgaacttcttag

SEQ ID NO: 48109 - DNA, 17 bp, Arabidopsis thaliana
atacgtgaactttgcgg

SEQ ID NO: 48110 - DNA, 17 bp, Arabidopsis thaliana
atacgtgagtatgaccg

SEQ ID NO: 48111 - DNA, 17 bp, Arabidopsis thaliana
atacgtgagttgaccgg

SEQ ID NO: 48112 - DNA, 17 bp, Arabidopsis thaliana
atacgtgcctccattaa

SEQ ID NO: 48113 - DNA, 17 bp, Arabidopsis thaliana
atacgtgcctccggcgc

SEQ ID NO: 48114 - DNA, 17 bp, Arabidopsis thaliana
atacgttgagccaccgt

SEQ ID NO: 48115 - DNA, 17 bp, Arabidopsis thaliana
atacgttgcaacgtgcg

SEQ ID NO: 48116 - DNA, 17 bp, Arabidopsis thaliana
atacgttggcaaccgag

SEQ ID NO: 48117 - DNA, 17 bp, Arabidopsis thaliana
atacgtttaagtcgccg

SEQ ID NO: 48118 - DNA, 17 bp, Arabidopsis thaliana
atactaaaccgcttcat

SEQ ID NO: 48119 - DNA, 17 bp, Arabidopsis thaliana
atactaaatacggagga

SEQ ID NO: 48120 - DNA, 17 bp, Arabidopsis thaliana
atactaacacttctggc

SEQ ID NO: 48121 - DNA, 17 bp, Arabidopsis thaliana
atactaaccaaccgtat

SEQ ID NO: 48122 - DNA, 17 bp, Arabidopsis thaliana
atactaaccgactaaca

SEQ ID NO: 48123 - DNA, 17 bp, Arabidopsis thaliana
atactaaccgctaccgc

SEQ ID NO: 48124 - DNA, 17 bp, Arabidopsis thaliana
atactaactactgctaa

SEQ ID NO: 48125 - DNA, 17 bp, Arabidopsis thaliana
atactaagattttgggt

SEQ ID NO: 48126 - DNA, 17 bp, Arabidopsis thaliana
atactaaggatctcgtt

SEQ ID NO: 48127 - DNA, 17 bp, Arabidopsis thaliana
atactaaggttagtcaa

SEQ ID NO: 48128 - DNA, 17 bp, Arabidopsis thaliana
atactaatcggtcgagg

SEQ ID NO: 48129 - DNA, 17 bp, Arabidopsis thaliana
atactaatgcgtcacgg

SEQ ID NO: 48130 - DNA, 17 bp, Arabidopsis thaliana
atactacctcccggtcc

SEQ ID NO: 48131 - DNA, 17 bp, Arabidopsis thaliana
atactacgagccgtcgt

SEQ ID NO: 48132 - DNA, 17 bp, Arabidopsis thaliana
atactacgcaggataac

SEQ ID NO: 48133 - DNA, 17 bp, Arabidopsis thaliana
atactactcaccttccc

SEQ ID NO: 48134 - DNA, 17 bp, Arabidopsis thaliana
atactagataaggtccg

SEQ ID NO: 48135 - DNA, 17 bp, Arabidopsis thaliana
atactagattctaaccc

SEQ ID NO: 48136 - DNA, 17 bp, Arabidopsis thaliana
atactagattctgatcc

SEQ ID NO: 48137 - DNA, 17 bp, Arabidopsis thaliana
atactagattttatccc

SEQ ID NO: 48138 - DNA, 17 bp, Arabidopsis thaliana
atactagattttatctc

SEQ ID NO: 48139 - DNA, 17 bp, Arabidopsis thaliana
atactagattttcaccc

SEQ ID NO: 48140 - DNA, 17 bp, Arabidopsis thaliana
atactagattttgaccc

SEQ ID NO: 48141 - DNA, 17 bp, Arabidopsis thaliana
atactagattttgactc

SEQ ID NO: 48142 - DNA, 17 bp, Arabidopsis thaliana
atactagccctgggatt

SEQ ID NO: 48143 - DNA, 17 bp, Arabidopsis thaliana
atactaggatatgaccc

SEQ ID NO: 48144 - DNA, 17 bp, Arabidopsis thaliana
atactaggattagaccc

SEQ ID NO: 48145 - DNA, 17 bp, Arabidopsis thaliana
atactaggatttcaccc

SEQ ID NO: 48146 - DNA, 17 bp, Arabidopsis thaliana
atactaggatttcattt

SEQ ID NO: 48147 - DNA, 17 bp, Arabidopsis thaliana
atactaggcgctgtgcg

SEQ ID NO: 48148 - DNA, 17 bp, Arabidopsis thaliana
atactaggtgatcaccc

SEQ ID NO: 48149 - DNA, 17 bp, Arabidopsis thaliana
atactaggtgatcatcc

SEQ ID NO: 48150 - DNA, 17 bp, Arabidopsis thaliana
atactaggtgattatcc

SEQ ID NO: 48151 - DNA, 17 bp, Arabidopsis thaliana
atactaggttttaaccc

SEQ ID NO: 48152 - DNA, 17 bp, Arabidopsis thaliana
atactagttggaatctc

SEQ ID NO: 48153 - DNA, 17 bp, Arabidopsis thaliana
atactagttggagttgg

SEQ ID NO: 48154 - DNA, 17 bp, Arabidopsis thaliana
atactatccagcgcctg

SEQ ID NO: 48155 - DNA, 17 bp, Arabidopsis thaliana
atactatcgaccaaacc

SEQ ID NO: 48156 - DNA, 17 bp, Arabidopsis thaliana
atactatcgcattgtca

SEQ ID NO: 48157 - DNA, 17 bp, Arabidopsis thaliana
atactatcggagtatct

SEQ ID NO: 48158 - DNA, 17 bp, Arabidopsis thaliana
atactatctgaaccgca

SEQ ID NO: 48159 - DNA, 17 bp, Arabidopsis thaliana
atactatctgcggcgga

SEQ ID NO: 48160 - DNA, 17 bp, Arabidopsis thaliana
atactatggacgggatg

SEQ ID NO: 48161 - DNA, 17 bp, Arabidopsis thaliana
atactatggattcgggt

SEQ ID NO: 48162 - DNA, 17 bp, Arabidopsis thaliana
atactattgagtttcca

SEQ ID NO: 48163 - DNA, 17 bp, Arabidopsis thaliana
atactcaaagcgggatg

SEQ ID NO: 48164 - DNA, 17 bp, Arabidopsis thaliana
atactcaagcccgcaag

SEQ ID NO: 48165 - DNA, 17 bp, Arabidopsis thaliana
atactcaccagcctcgc

SEQ ID NO: 48166 - DNA, 17 bp, Arabidopsis thaliana
atactcacgaacggtcc

SEQ ID NO: 48167 - DNA, 17 bp, Arabidopsis thaliana
atactcacggatgagtt

SEQ ID NO: 48168 - DNA, 17 bp, Arabidopsis thaliana
atactcacggccgggtg

SEQ ID NO: 48169 - DNA, 17 bp, Arabidopsis thaliana
atactcagaatgttcac

SEQ ID NO: 48170 - DNA, 17 bp, Arabidopsis thaliana
atactcagcggtggtat

SEQ ID NO: 48171 - DNA, 17 bp, Arabidopsis thaliana
atactcagtacagcagt

SEQ ID NO: 48172 - DNA, 17 bp, Arabidopsis thaliana
atactcatacttcgccg

SEQ ID NO: 48173 - DNA, 17 bp, Arabidopsis thaliana
atactcatcgtctcagc

SEQ ID NO: 48174 - DNA, 17 bp, Arabidopsis thaliana
atactcatctgctgtca

SEQ ID NO: 48175 - DNA, 17 bp, Arabidopsis thaliana
atactcatggtagtgct

SEQ ID NO: 48176 - DNA, 17 bp, Arabidopsis thaliana
atactcattatgctcag

SEQ ID NO: 48177 - DNA, 17 bp, Arabidopsis thaliana
atactccatcgtgactt

SEQ ID NO: 48178 - DNA, 17 bp, Arabidopsis thaliana
atactcccgaacggtcc

SEQ ID NO: 48179 - DNA, 17 bp, Arabidopsis thaliana
atactccgaaagtgcgt

SEQ ID NO: 48180 - DNA, 17 bp, Arabidopsis thaliana
atactccgagccgtcgc

SEQ ID NO: 48181 - DNA, 17 bp, Arabidopsis thaliana
atactcctccaatgtaa

SEQ ID NO: 48182 - DNA, 17 bp, Arabidopsis thaliana
atactcctgggtgaccg

SEQ ID NO: 48183 - DNA, 17 bp, Arabidopsis thaliana
atactcgaccacccagt

SEQ ID NO: 48184 - DNA, 17 bp, Arabidopsis thaliana
atactcgaccacctagt

SEQ ID NO: 48185 - DNA, 17 bp, Arabidopsis thaliana
atactcgaccactcagt

SEQ ID NO: 48186 - DNA, 17 bp, Arabidopsis thaliana
atactcgacctgtcact

SEQ ID NO: 48187 - DNA, 17 bp, Arabidopsis thaliana
atactcgaccttctctc

SEQ ID NO: 48188 - DNA, 17 bp, Arabidopsis thaliana
atactcgacgaacttgg

SEQ ID NO: 48189 - DNA, 17 bp, Arabidopsis thaliana
atactcgactcagagac

SEQ ID NO: 48190 - DNA, 17 bp, Arabidopsis thaliana
atactcgactcgtttga

SEQ ID NO: 48191 - DNA, 17 bp, Arabidopsis thaliana
atactcgactgagtacc

SEQ ID NO: 48192 - DNA, 17 bp, Arabidopsis thaliana
atactcgactgcacagt

SEQ ID NO: 48193 - DNA, 17 bp, Arabidopsis thaliana
atactcgactgcactgt

SEQ ID NO: 48194 - DNA, 17 bp, Arabidopsis thaliana
atactcgactgccagct

SEQ ID NO: 48195 - DNA, 17 bp, Arabidopsis thaliana
atactcgactggcagct

SEQ ID NO: 48196 - DNA, 17 bp, Arabidopsis thaliana
atactcgatagagattc

SEQ ID NO: 48197 - DNA, 17 bp, Arabidopsis thaliana
atactcgatcacccagt

SEQ ID NO: 48198 - DNA, 17 bp, Arabidopsis thaliana
atactcgatcagattgc

SEQ ID NO: 48199 - DNA, 17 bp, Arabidopsis thaliana
atactcgatctccaggt

SEQ ID NO: 48200 - DNA, 17 bp, Arabidopsis thaliana
atactcgatctcctgtt

SEQ ID NO: 48201 - DNA, 17 bp, Arabidopsis thaliana
atactcgattagggttt

SEQ ID NO: 48202 - DNA, 17 bp, Arabidopsis thaliana
atactcgattgcacagt

SEQ ID NO: 48203 - DNA, 17 bp, Arabidopsis thaliana
atactcgccgagccgca

SEQ ID NO: 48204 - DNA, 17 bp, Arabidopsis thaliana
atactcgctggtttacc

SEQ ID NO: 48205 - DNA, 17 bp, Arabidopsis thaliana
atactcggacacaggta

SEQ ID NO: 48206 - DNA, 17 bp, Arabidopsis thaliana
atactcggcccaggcca

SEQ ID NO: 48207 - DNA, 17 bp, Arabidopsis thaliana
atactcggcccgggcac

SEQ ID NO: 48208 - DNA, 17 bp, Arabidopsis thaliana
atactcggcctgctgaa

SEQ ID NO: 48209 - DNA, 17 bp, Arabidopsis thaliana
atactcggtgtagctga

SEQ ID NO: 48210 - DNA, 17 bp, Arabidopsis thaliana
atactcggttcccaccc

SEQ ID NO: 48211 - DNA, 17 bp, Arabidopsis thaliana
atactcgtccataggtt

SEQ ID NO: 48212 - DNA, 17 bp, Arabidopsis thaliana
atactctatcggctaat

SEQ ID NO: 48213 - DNA, 17 bp, Arabidopsis thaliana
atactctatcggctgat

SEQ ID NO: 48214 - DNA, 17 bp, Arabidopsis thaliana
atactctcactcgccgc

SEQ ID NO: 48215 - DNA, 17 bp, Arabidopsis thaliana
atactctcagtggaaat

SEQ ID NO: 48216 - DNA, 17 bp, Arabidopsis thaliana
atactctcgaacgtttg

SEQ ID NO: 48217 - DNA, 17 bp, Arabidopsis thaliana
atactctcgagatcttg

SEQ ID NO: 48218 - DNA, 17 bp, Arabidopsis thaliana
atactctcgaggatttc

SEQ ID NO: 48219 - DNA, 17 bp, Arabidopsis thaliana
atactctcggcaacgga

SEQ ID NO: 48220 - DNA, 17 bp, Arabidopsis thaliana
atactctgggcggaaca

SEQ ID NO: 48221 - DNA, 17 bp, Arabidopsis thaliana
atactctgtgacgattt

SEQ ID NO: 48222 - DNA, 17 bp, Arabidopsis thaliana
atactcttcagacattt

SEQ ID NO: 48223 - DNA, 17 bp, Arabidopsis thaliana
atactcttcgactggaa

SEQ ID NO: 48224 - DNA, 17 bp, Arabidopsis thaliana
atactcttctcaggttt

SEQ ID NO: 48225 - DNA, 17 bp, Arabidopsis thaliana
atactcttctcgtgcgt

SEQ ID NO: 48226 - DNA, 17 bp, Arabidopsis thaliana
atactgaaacttgccaa

SEQ ID NO: 48227 - DNA, 17 bp, Arabidopsis thaliana
atactgaccaaccgtat

SEQ ID NO: 48228 - DNA, 17 bp, Arabidopsis thaliana
atactgaccgaggctcc

SEQ ID NO: 48229 - DNA, 17 bp, Arabidopsis thaliana
atactgacggatgagtt

SEQ ID NO: 48230 - DNA, 17 bp, Arabidopsis thaliana
atactgaggtgccttgc

SEQ ID NO: 48231 - DNA, 17 bp, Arabidopsis thaliana
atactgatactctcagt

SEQ ID NO: 48232 - DNA, 17 bp, Arabidopsis thaliana
atactgatggtgatctc

SEQ ID NO: 48233 - DNA, 17 bp, Arabidopsis thaliana
atactgatgtacgactt

SEQ ID NO: 48234 - DNA, 17 bp, Arabidopsis thaliana
atactgatttcctttcc

SEQ ID NO: 48235 - DNA, 17 bp, Arabidopsis thaliana
atactgcaaaacgccgt

SEQ ID NO: 48236 - DNA, 17 bp, Arabidopsis thaliana
atactgcaatgccattc

SEQ ID NO: 48237 - DNA, 17 bp, Arabidopsis thaliana
atactgcagacgaatgg

SEQ ID NO: 48238 - DNA, 17 bp, Arabidopsis thaliana
atactgcagagatttga

SEQ ID NO: 48239 - DNA, 17 bp, Arabidopsis thaliana
atactgccagatctgct

SEQ ID NO: 48240 - DNA, 17 bp, Arabidopsis thaliana
atactgcgcattagcca

SEQ ID NO: 48241 - DNA, 17 bp, Arabidopsis thaliana
atactgcggggcggagt

SEQ ID NO: 48242 - DNA, 17 bp, Arabidopsis thaliana
atactgcgttttaatca

SEQ ID NO: 48243 - DNA, 17 bp, Arabidopsis thaliana
atactgctgttcatcca

SEQ ID NO: 48244 - DNA, 17 bp, Arabidopsis thaliana
atactgcttggaaagtg

SEQ ID NO: 48245 - DNA, 17 bp, Arabidopsis thaliana
atactggaatttgccaa

SEQ ID NO: 48246 - DNA, 17 bp, Arabidopsis thaliana
atactggatattgaccc

SEQ ID NO: 48247 - DNA, 17 bp, Arabidopsis thaliana
atactggatattgacct

SEQ ID NO: 48248 - DNA, 17 bp, Arabidopsis thaliana
atactggatcagactgc

SEQ ID NO: 48249 - DNA, 17 bp, Arabidopsis thaliana
atactggatcagattgc

SEQ ID NO: 48250 - DNA, 17 bp, Arabidopsis thaliana
atactggccggcaactg

SEQ ID NO: 48251 - DNA, 17 bp, Arabidopsis thaliana
atactggcctgcctgcc

SEQ ID NO: 48252 - DNA, 17 bp, Arabidopsis thaliana
atactggcgtcggaatc

SEQ ID NO: 48253 - DNA, 17 bp, Arabidopsis thaliana
atactggctaagttgtc

SEQ ID NO: 48254 - DNA, 17 bp, Arabidopsis thaliana
atactggctgggaactg

SEQ ID NO: 48255 - DNA, 17 bp, Arabidopsis thaliana
atactggctgggaagac

SEQ ID NO: 48256 - DNA, 17 bp, Arabidopsis thaliana
atactgggacttgctgg

SEQ ID NO: 48257 - DNA, 17 bp, Arabidopsis thaliana
atactgggctggaactc

SEQ ID NO: 48258 - DNA, 17 bp, Arabidopsis thaliana
atactgggtgcttcacg

SEQ ID NO: 48259 - DNA, 17 bp, Arabidopsis thaliana
atactgggtgttcattc

SEQ ID NO: 48260 - DNA, 17 bp, Arabidopsis thaliana
atactggtagccaaagc

SEQ ID NO: 48261 - DNA, 17 bp, Arabidopsis thaliana
atactggtccagccttc

SEQ ID NO: 48262 - DNA, 17 bp, Arabidopsis thaliana
atactggtccagccttg

SEQ ID NO: 48263 - DNA, 17 bp, Arabidopsis thaliana
atactggtcgccgtaga

SEQ ID NO: 48264 - DNA, 17 bp, Arabidopsis thaliana
atactgtaactaaccgt

SEQ ID NO: 48265 - DNA, 17 bp, Arabidopsis thaliana
atactgtagtccggtcg

SEQ ID NO: 48266 - DNA, 17 bp, Arabidopsis thaliana
atactgtctagaaatca

SEQ ID NO: 48267 - DNA, 17 bp, Arabidopsis thaliana
atactgtgactcaaggt

SEQ ID NO: 48268 - DNA, 17 bp, Arabidopsis thaliana
atactgtgttttttggg

SEQ ID NO: 48269 - DNA, 17 bp, Arabidopsis thaliana
atactgttacagcactg

SEQ ID NO: 48270 - DNA, 17 bp, Arabidopsis thaliana
atactgttcagacctgg

SEQ ID NO: 48271 - DNA, 17 bp, Arabidopsis thaliana
atactgttcctagccgt

SEQ ID NO: 48272 - DNA, 17 bp, Arabidopsis thaliana
atactgttgtctggctc

SEQ ID NO: 48273 - DNA, 17 bp, Arabidopsis thaliana
atactgttgtgaccgtg

SEQ ID NO: 48274 - DNA, 17 bp, Arabidopsis thaliana
atactgtttcaaatggg

SEQ ID NO: 48275 - DNA, 17 bp, Arabidopsis thaliana
atacttaacgaggctct

SEQ ID NO: 48276 - DNA, 17 bp, Arabidopsis thaliana
atacttaccgttgacca

SEQ ID NO: 48277 - DNA, 17 bp, Arabidopsis thaliana
atacttaccttggagat

SEQ ID NO: 48278 - DNA, 17 bp, Arabidopsis thaliana
atacttagcgtaatcac

SEQ ID NO: 48279 - DNA, 17 bp, Arabidopsis thaliana
atacttagcgtaatctc

SEQ ID NO: 48280 - DNA, 17 bp, Arabidopsis thaliana
atacttaggacgatttt

SEQ ID NO: 48281 - DNA, 17 bp, Arabidopsis thaliana
atacttaggaggcctgt

SEQ ID NO: 48282 - DNA, 17 bp, Arabidopsis thaliana
atacttagggcctgttt

SEQ ID NO: 48283 - DNA, 17 bp, Arabidopsis thaliana
atacttaggtcctggga

SEQ ID NO: 48284 - DNA, 17 bp, Arabidopsis thaliana
atacttaggttcacccc

SEQ ID NO: 48285 - DNA, 17 bp, Arabidopsis thaliana
atacttccgagacagta

SEQ ID NO: 48286 - DNA, 17 bp, Arabidopsis thaliana
atacttcctgagccccc

SEQ ID NO: 48287 - DNA, 17 bp, Arabidopsis thaliana
atacttcgccgttttgt

SEQ ID NO: 48288 - DNA, 17 bp, Arabidopsis thaliana
atacttctagcgggttt

SEQ ID NO: 48289 - DNA, 17 bp, Arabidopsis thaliana
atacttctcgtggagaa

SEQ ID NO: 48290 - DNA, 17 bp, Arabidopsis thaliana
atacttctggtttttgc

SEQ ID NO: 48291 - DNA, 17 bp, Arabidopsis thaliana
atacttcttcgggtttg

SEQ ID NO: 48292 - DNA, 17 bp, Arabidopsis thaliana
atacttctttcctacgg

SEQ ID NO: 48293 - DNA, 17 bp, Arabidopsis thaliana
atacttgacttcacgga

SEQ ID NO: 48294 - DNA, 17 bp, Arabidopsis thaliana
atacttgcgtagttgtg

SEQ ID NO: 48295 - DNA, 17 bp, Arabidopsis thaliana
atacttgctgtggtgat

SEQ ID NO: 48296 - DNA, 17 bp, Arabidopsis thaliana
atacttgcttcgacatc

SEQ ID NO: 48297 - DNA, 17 bp, Arabidopsis thaliana
atacttggatcttttga

SEQ ID NO: 48298 - DNA, 17 bp, Arabidopsis thaliana
atacttggcgtgaattg

SEQ ID NO: 48299 - DNA, 17 bp, Arabidopsis thaliana
atacttggctcgccgat

SEQ ID NO: 48300 - DNA, 17 bp, Arabidopsis thaliana
atacttgggtcggatct

SEQ ID NO: 48301 - DNA, 17 bp, Arabidopsis thaliana
atacttgggtgaacgac

SEQ ID NO: 48302 - DNA, 17 bp, Arabidopsis thaliana
atacttggtccgcagcg

SEQ ID NO: 48303 - DNA, 17 bp, Arabidopsis thaliana
atacttggtgcaggtcg

SEQ ID NO: 48304 - DNA, 17 bp, Arabidopsis thaliana
atacttggtgtgaattg

SEQ ID NO: 48305 - DNA, 17 bp, Arabidopsis thaliana
atacttggtgtgaattt

SEQ ID NO: 48306 - DNA, 17 bp, Arabidopsis thaliana
atacttgtgtccatggg

SEQ ID NO: 48307 - DNA, 17 bp, Arabidopsis thaliana
atacttgttggtggctt

SEQ ID NO: 48308 - DNA, 17 bp, Arabidopsis thaliana
atactttaagatcctgt

SEQ ID NO: 48309 - DNA, 17 bp, Arabidopsis thaliana
atactttctcagaagct

SEQ ID NO: 48310 - DNA, 17 bp, Arabidopsis thaliana
atactttcttaacgaga

SEQ ID NO: 48311 - DNA, 17 bp, Arabidopsis thaliana
atactttgaccgtatct

SEQ ID NO: 48312 - DNA, 17 bp, Arabidopsis thaliana
atactttgccgcggttc

SEQ ID NO: 48313 - DNA, 17 bp, Arabidopsis thaliana
atactttgccgttttgt

SEQ ID NO: 48314 - DNA, 17 bp, Arabidopsis thaliana
atactttgggttcactc

SEQ ID NO: 48315 - DNA, 17 bp, Arabidopsis thaliana
atactttgttactggag

SEQ ID NO: 48316 - DNA, 17 bp, Arabidopsis thaliana
atacttttcatctcggt

SEQ ID NO: 48317 - DNA, 17 bp, Arabidopsis thaliana
atacttttcatgacttt

SEQ ID NO: 48318 - DNA, 17 bp, Arabidopsis thaliana
atacttttctcaggatt

SEQ ID NO: 48319 - DNA, 17 bp, Arabidopsis thaliana
atacttttctcgctgtc

SEQ ID NO: 48320 - DNA, 17 bp, Arabidopsis thaliana
atacttttgactgttgt

SEQ ID NO: 48321 - DNA, 17 bp, Arabidopsis thaliana
atacttttgactgtttt

SEQ ID NO: 48322 - DNA, 17 bp, Arabidopsis thaliana
atacttttgccgagatt

SEQ ID NO: 48323 - DNA, 17 bp, Arabidopsis thaliana
atacttttggaggaact

SEQ ID NO: 48324 - DNA, 17 bp, Arabidopsis thaliana
atacttttggcctgcac

SEQ ID NO: 48325 - DNA, 17 bp, Arabidopsis thaliana
atagaaaatttgtggct

SEQ ID NO: 48326 - DNA, 17 bp, Arabidopsis thaliana
atagaaacgcctctgcc

SEQ ID NO: 48327 - DNA, 17 bp, Arabidopsis thaliana
atagaaacgtgatggtg

SEQ ID NO: 48328 - DNA, 17 bp, Arabidopsis thaliana
atagaaagtgctggttt

SEQ ID NO: 48329 - DNA, 17 bp, Arabidopsis thaliana
atagaaatgtgatggtg

SEQ ID NO: 48330 - DNA, 17 bp, Arabidopsis thaliana
atagaacaagtctgcat

SEQ ID NO: 48331 - DNA, 17 bp, Arabidopsis thaliana
atagaacagtctctggt

SEQ ID NO: 48332 - DNA, 17 bp, Arabidopsis thaliana
atagaacctagaatttc

SEQ ID NO: 48333 - DNA, 17 bp, Arabidopsis thaliana
atagaacctcgcgctct

SEQ ID NO: 48334 - DNA, 17 bp, Arabidopsis thaliana
atagaacctcgtgctct

SEQ ID NO: 48335 - DNA, 17 bp, Arabidopsis thaliana
atagaactcgaagatgt

SEQ ID NO: 48336 - DNA, 17 bp, Arabidopsis thaliana
atagaacttgatcggag

SEQ ID NO: 48337 - DNA, 17 bp, Arabidopsis thaliana
atagaagacacgtggct

SEQ ID NO: 48338 - DNA, 17 bp, Arabidopsis thaliana
atagaagactttcattt

SEQ ID NO: 48339 - DNA, 17 bp, Arabidopsis thaliana
atagaagatcccaactt

SEQ ID NO: 48340 - DNA, 17 bp, Arabidopsis thaliana
atagaagcctagccgac

SEQ ID NO: 48341 - DNA, 17 bp, Arabidopsis thaliana
atagaagctccaactca

SEQ ID NO: 48342 - DNA, 17 bp, Arabidopsis thaliana
atagaagctccgcttat

SEQ ID NO: 48343 - DNA, 17 bp, Arabidopsis thaliana
atagaaggccaaactgg

SEQ ID NO: 48344 - DNA, 17 bp, Arabidopsis thaliana
atagaagtgcggtccgg

SEQ ID NO: 48345 - DNA, 17 bp, Arabidopsis thaliana
atagaagtgcggtgcgg

SEQ ID NO: 48346 - DNA, 17 bp, Arabidopsis thaliana
atagaagtttgccatgt

SEQ ID NO: 48347 - DNA, 17 bp, Arabidopsis thaliana
atagaagtttgccattt

SEQ ID NO: 48348 - DNA, 17 bp, Arabidopsis thaliana
atagaatcctggcgatc

SEQ ID NO: 48349 - DNA, 17 bp, Arabidopsis thaliana
atagaatctaacctggt

SEQ ID NO: 48350 - DNA, 17 bp, Arabidopsis thaliana
atagaatgctcggaggt

SEQ ID NO: 48351 - DNA, 17 bp, Arabidopsis thaliana
atagaatggacttctca

SEQ ID NO: 48352 - DNA, 17 bp, Arabidopsis thaliana
atagaatggatcgaact

SEQ ID NO: 48353 - DNA, 17 bp, Arabidopsis thaliana
atagaattgagtatcgg

SEQ ID NO: 48354 - DNA, 17 bp, Arabidopsis thaliana
atagaattgggccacca

SEQ ID NO: 48355 - DNA, 17 bp, Arabidopsis thaliana
atagaatttgggtctag

SEQ ID NO: 48356 - DNA, 17 bp, Arabidopsis thaliana
atagacaaagtgggctg

SEQ ID NO: 48357 - DNA, 17 bp, Arabidopsis thaliana
atagacaatgtggtgac

SEQ ID NO: 48358 - DNA, 17 bp, Arabidopsis thaliana
atagacacgtgtcttga

SEQ ID NO: 48359 - DNA, 17 bp, Arabidopsis thaliana
atagacactttctggcc

SEQ ID NO: 48360 - DNA, 17 bp, Arabidopsis thaliana
atagacacttttctctt

SEQ ID NO: 48361 - DNA, 17 bp, Arabidopsis thaliana
atagacatcagcttttg

SEQ ID NO: 48362 - DNA, 17 bp, Arabidopsis thaliana
atagacatgccacttct

SEQ ID NO: 48363 - DNA, 17 bp, Arabidopsis thaliana
atagacatgggcagact

SEQ ID NO: 48364 - DNA, 17 bp, Arabidopsis thaliana
atagaccaaacggttgc

SEQ ID NO: 48365 - DNA, 17 bp, Arabidopsis thaliana
atagaccaacgtgtagc

SEQ ID NO: 48366 - DNA, 17 bp, Arabidopsis thaliana
atagaccaactttgctc

SEQ ID NO: 48367 - DNA, 17 bp, Arabidopsis thaliana
atagaccagaccgcttt

SEQ ID NO: 48368 - DNA, 17 bp, Arabidopsis thaliana
atagacccaaccggcac

SEQ ID NO: 48369 - DNA, 17 bp, Arabidopsis thaliana
atagaccccatgacttg

SEQ ID NO: 48370 - DNA, 17 bp, Arabidopsis thaliana
atagacccgcagtatac

SEQ ID NO: 48371 - DNA, 17 bp, Arabidopsis thaliana
atagacccgcccatcta

SEQ ID NO: 48372 - DNA, 17 bp, Arabidopsis thaliana
atagacccgcccatctt

SEQ ID NO: 48373 - DNA, 17 bp, Arabidopsis thaliana
atagacccgggttcggc

SEQ ID NO: 48374 - DNA, 17 bp, Arabidopsis thaliana
atagaccctatcggctg

SEQ ID NO: 48375 - DNA, 17 bp, Arabidopsis thaliana
atagaccctgttcgttt

SEQ ID NO: 48376 - DNA, 17 bp, Arabidopsis thaliana
atagaccgacaacggat

SEQ ID NO: 48377 - DNA, 17 bp, Arabidopsis thaliana
atagaccgagattgtga

SEQ ID NO: 48378 - DNA, 17 bp, Arabidopsis thaliana
atagaccggagttgaag

SEQ ID NO: 48379 - DNA, 17 bp, Arabidopsis thaliana
atagaccggatgtggtc

SEQ ID NO: 48380 - DNA, 17 bp, Arabidopsis thaliana
atagaccggttctcgtc

SEQ ID NO: 48381 - DNA, 17 bp, Arabidopsis thaliana
atagaccgttcaggttt

SEQ ID NO: 48382 - DNA, 17 bp, Arabidopsis thaliana
atagaccgtttttccgt

SEQ ID NO: 48383 - DNA, 17 bp, Arabidopsis thaliana
atagacctggtgcagac

SEQ ID NO: 48384 - DNA, 17 bp, Arabidopsis thaliana
atagacctttcccctcg

SEQ ID NO: 48385 - DNA, 17 bp, Arabidopsis thaliana
atagacgaattccttga

SEQ ID NO: 48386 - DNA, 17 bp, Arabidopsis thaliana
atagacgacggacaatt

SEQ ID NO: 48387 - DNA, 17 bp, Arabidopsis thaliana
atagacgagatcgtgcg

SEQ ID NO: 48388 - DNA, 17 bp, Arabidopsis thaliana
atagacgatcggtcggt

SEQ ID NO: 48389 - DNA, 17 bp, Arabidopsis thaliana
atagacgattctacaac

SEQ ID NO: 48390 - DNA, 17 bp, Arabidopsis thaliana
atagacgcattcgcctc

SEQ ID NO: 48391 - DNA, 17 bp, Arabidopsis thaliana
atagacgcttttgtccg

SEQ ID NO: 48392 - DNA, 17 bp, Arabidopsis thaliana
atagacggacgatttga

SEQ ID NO: 48393 - DNA, 17 bp, Arabidopsis thaliana
atagacggactgggaac

SEQ ID NO: 48394 - DNA, 17 bp, Arabidopsis thaliana
atagacggcttgactcg

SEQ ID NO: 48395 - DNA, 17 bp, Arabidopsis thaliana
atagacggttggactga

SEQ ID NO: 48396 - DNA, 17 bp, Arabidopsis thaliana
atagactagaccgctga

SEQ ID NO: 48397 - DNA, 17 bp, Arabidopsis thaliana
atagactattgggcgtg

SEQ ID NO: 48398 - DNA, 17 bp, Arabidopsis thaliana
atagactctgaggtcgt

SEQ ID NO: 48399 - DNA, 17 bp, Arabidopsis thaliana
atagactgaggtcaaag

SEQ ID NO: 48400 - DNA, 17 bp, Arabidopsis thaliana
atagactgattgggttt

SEQ ID NO: 48401 - DNA, 17 bp, Arabidopsis thaliana
atagactgcgtttttgt

SEQ ID NO: 48402 - DNA, 17 bp, Arabidopsis thaliana
atagactgggatctgag

SEQ ID NO: 48403 - DNA, 17 bp, Arabidopsis thaliana
atagactgtgaattatt

SEQ ID NO: 48404 - DNA, 17 bp, Arabidopsis thaliana
atagactgttcagacct

SEQ ID NO: 48405 - DNA, 17 bp, Arabidopsis thaliana
atagacttaattgtgcc

SEQ ID NO: 48406 - DNA, 17 bp, Arabidopsis thaliana
atagactttccgtgatg

SEQ ID NO: 48407 - DNA, 17 bp, Arabidopsis thaliana
atagagaccatcgttgc

SEQ ID NO: 48408 - DNA, 17 bp, Arabidopsis thaliana
atagagaccgctgtcgt

SEQ ID NO: 48409 - DNA, 17 bp, Arabidopsis thaliana
atagagactgagtcctc

SEQ ID NO: 48410 - DNA, 17 bp, Arabidopsis thaliana
atagagacttgaagcct

SEQ ID NO: 48411 - DNA, 17 bp, Arabidopsis thaliana
atagagacttgatcctc

SEQ ID NO: 48412 - DNA, 17 bp, Arabidopsis thaliana
atagagagtctaaccgt

SEQ ID NO: 48413 - DNA, 17 bp, Arabidopsis thaliana
atagagagtgttggcaa

SEQ ID NO: 48414 - DNA, 17 bp, Arabidopsis thaliana
atagagagtgttggcca

SEQ ID NO: 48415 - DNA, 17 bp, Arabidopsis thaliana
atagagatccgtcgacc

SEQ ID NO: 48416 - DNA, 17 bp, Arabidopsis thaliana
atagagatggtctaaaa

SEQ ID NO: 48417 - DNA, 17 bp, Arabidopsis thaliana
atagagcacaaacaacc

SEQ ID NO: 48418 - DNA, 17 bp, Arabidopsis thaliana
atagagcccaggcttta

SEQ ID NO: 48419 - DNA, 17 bp, Arabidopsis thaliana
atagagcctggtgttgt

SEQ ID NO: 48420 - DNA, 17 bp, Arabidopsis thaliana
atagagcgatggaagct

SEQ ID NO: 48421 - DNA, 17 bp, Arabidopsis thaliana
atagagcgccacttgtc

SEQ ID NO: 48422 - DNA, 17 bp, Arabidopsis thaliana
atagagcgtctggtccc

SEQ ID NO: 48423 - DNA, 17 bp, Arabidopsis thaliana
atagagctatcaagcga

SEQ ID NO: 48424 - DNA, 17 bp, Arabidopsis thaliana
atagagcttctcatcca

SEQ ID NO: 48425 - DNA, 17 bp, Arabidopsis thaliana
atagagcttctcatccg

SEQ ID NO: 48426 - DNA, 17 bp, Arabidopsis thaliana
atagagcttgtgagttc

SEQ ID NO: 48427 - DNA, 17 bp, Arabidopsis thaliana
atagagctttgcactat

SEQ ID NO: 48428 - DNA, 17 bp, Arabidopsis thaliana
atagaggactccggggc

SEQ ID NO: 48429 - DNA, 17 bp, Arabidopsis thaliana
atagaggagcggtcgag

SEQ ID NO: 48430 - DNA, 17 bp, Arabidopsis thaliana
atagaggattctccgct

SEQ ID NO: 48431 - DNA, 17 bp, Arabidopsis thaliana
atagaggatttttggct

SEQ ID NO: 48432 - DNA, 17 bp, Arabidopsis thaliana
atagagggttcgggcca

SEQ ID NO: 48433 - DNA, 17 bp, Arabidopsis thaliana
atagaggtccaaatttt

SEQ ID NO: 48434 - DNA, 17 bp, Arabidopsis thaliana
atagaggtggtcagaat

SEQ ID NO: 48435 - DNA, 17 bp, Arabidopsis thaliana
atagaggttgccgagat

SEQ ID NO: 48436 - DNA, 17 bp, Arabidopsis thaliana
atagaggttgtatcatg

SEQ ID NO: 48437 - DNA, 17 bp, Arabidopsis thaliana
atagaggttgtatcctg

SEQ ID NO: 48438 - DNA, 17 bp, Arabidopsis thaliana
atagagtacatcttgac

SEQ ID NO: 48439 - DNA, 17 bp, Arabidopsis thaliana
atagagtactccgccgc

SEQ ID NO: 48440 - DNA, 17 bp, Arabidopsis thaliana
atagagtcaatgtgtaa

SEQ ID NO: 48441 - DNA, 17 bp, Arabidopsis thaliana
atagagtcagatctggc

SEQ ID NO: 48442 - DNA, 17 bp, Arabidopsis thaliana
atagagtccgtgtggtt

SEQ ID NO: 48443 - DNA, 17 bp, Arabidopsis thaliana
atagagtcttgagcgtg

SEQ ID NO: 48444 - DNA, 17 bp, Arabidopsis thaliana
atagagtgctttcatgg

SEQ ID NO: 48445 - DNA, 17 bp, Arabidopsis thaliana
atagagtggatttctct

SEQ ID NO: 48446 - DNA, 17 bp, Arabidopsis thaliana
atagagttacatactaa

SEQ ID NO: 48447 - DNA, 17 bp, Arabidopsis thaliana
atagagttacgtgccaa

SEQ ID NO: 48448 - DNA, 17 bp, Arabidopsis thaliana
atagagttcttaccgat

SEQ ID NO: 48449 - DNA, 17 bp, Arabidopsis thaliana
atagagttggttgcgac

SEQ ID NO: 48450 - DNA, 17 bp, Arabidopsis thaliana
atagataactgggaaaa

SEQ ID NO: 48451 - DNA, 17 bp, Arabidopsis thaliana
atagataactgggacaa

SEQ ID NO: 48452 - DNA, 17 bp, Arabidopsis thaliana
atagataagtactttgc

SEQ ID NO: 48453 - DNA, 17 bp, Arabidopsis thaliana
atagatagcgggtggga

SEQ ID NO: 48454 - DNA, 17 bp, Arabidopsis thaliana
atagatcaagcgctgcg

SEQ ID NO: 48455 - DNA, 17 bp, Arabidopsis thaliana
atagatcacatgtaact

SEQ ID NO: 48456 - DNA, 17 bp, Arabidopsis thaliana
atagatcaccaatcgga

SEQ ID NO: 48457 - DNA, 17 bp, Arabidopsis thaliana
atagatcacccgttgta

SEQ ID NO: 48458 - DNA, 17 bp, Arabidopsis thaliana
atagatcacccgttgtt

SEQ ID NO: 48459 - DNA, 17 bp, Arabidopsis thaliana
atagatcacttccggag

SEQ ID NO: 48460 - DNA, 17 bp, Arabidopsis thaliana
atagatcaggctcatgg

SEQ ID NO: 48461 - DNA, 17 bp, Arabidopsis thaliana
atagatcataggtggct

SEQ ID NO: 48462 - DNA, 17 bp, Arabidopsis thaliana
atagatcattgcagctc

SEQ ID NO: 48463 - DNA, 17 bp, Arabidopsis thaliana
atagatccagcggatat

SEQ ID NO: 48464 - DNA, 17 bp, Arabidopsis thaliana
atagatccgctgaatta

SEQ ID NO: 48465 - DNA, 17 bp, Arabidopsis thaliana
atagatccgctgaattg

SEQ ID NO: 48466 - DNA, 17 bp, Arabidopsis thaliana
atagatccgctgaattt

SEQ ID NO: 48467 - DNA, 17 bp, Arabidopsis thaliana
atagatccttaaggccc

SEQ ID NO: 48468 - DNA, 17 bp, Arabidopsis thaliana
atagatcgagatcataa

SEQ ID NO: 48469 - DNA, 17 bp, Arabidopsis thaliana
atagatcgagatcatac

SEQ ID NO: 48470 - DNA, 17 bp, Arabidopsis thaliana
atagatcgaggttatac

SEQ ID NO: 48471 - DNA, 17 bp, Arabidopsis thaliana
atagatcgcattcaaaa

SEQ ID NO: 48472 - DNA, 17 bp, Arabidopsis thaliana
atagatctcccacgagc

SEQ ID NO: 48473 - DNA, 17 bp, Arabidopsis thaliana
atagatctcccctgcgg

SEQ ID NO: 48474 - DNA, 17 bp, Arabidopsis thaliana
atagatctcgaagtatt

SEQ ID NO: 48475 - DNA, 17 bp, Arabidopsis thaliana
atagatctttgccttgc

SEQ ID NO: 48476 - DNA, 17 bp, Arabidopsis thaliana
atagatgaagcaggcac

SEQ ID NO: 48477 - DNA, 17 bp, Arabidopsis thaliana
atagatgacaagccttt

SEQ ID NO: 48478 - DNA, 17 bp, Arabidopsis thaliana
atagatgaccacgtcta

SEQ ID NO: 48479 - DNA, 17 bp, Arabidopsis thaliana
atagatgacgttctgca

SEQ ID NO: 48480 - DNA, 17 bp, Arabidopsis thaliana
atagatgactcattccc

SEQ ID NO: 48481 - DNA, 17 bp, Arabidopsis thaliana
atagatgatcataggcc

SEQ ID NO: 48482 - DNA, 17 bp, Arabidopsis thaliana
atagatggcggtttttt

SEQ ID NO: 48483 - DNA, 17 bp, Arabidopsis thaliana
atagatgtagcggacaa

SEQ ID NO: 48484 - DNA, 17 bp, Arabidopsis thaliana
atagatgtctctctcga

SEQ ID NO: 48485 - DNA, 17 bp, Arabidopsis thaliana
atagatgtgtggttggc

SEQ ID NO: 48486 - DNA, 17 bp, Arabidopsis thaliana
atagattatctacgggt

SEQ ID NO: 48487 - DNA, 17 bp, Arabidopsis thaliana
atagattcaactctgga

SEQ ID NO: 48488 - DNA, 17 bp, Arabidopsis thaliana
atagattccctgtcgtg

SEQ ID NO: 48489 - DNA, 17 bp, Arabidopsis thaliana
atagattccgcgcttac

SEQ ID NO: 48490 - DNA, 17 bp, Arabidopsis thaliana
atagattcgtggcatag

SEQ ID NO: 48491 - DNA, 17 bp, Arabidopsis thaliana
atagattctggacctag

SEQ ID NO: 48492 - DNA, 17 bp, Arabidopsis thaliana
atagattgacctgcggt

SEQ ID NO: 48493 - DNA, 17 bp, Arabidopsis thaliana
atagattgagttgggta

SEQ ID NO: 48494 - DNA, 17 bp, Arabidopsis thaliana
atagattggaccgttga

SEQ ID NO: 48495 - DNA, 17 bp, Arabidopsis thaliana
atagattggcacttacg

SEQ ID NO: 48496 - DNA, 17 bp, Arabidopsis thaliana
atagattggcatgtgtc

SEQ ID NO: 48497 - DNA, 17 bp, Arabidopsis thaliana
atagatttgcccgttct

SEQ ID NO: 48498 - DNA, 17 bp, Arabidopsis thaliana
atagatttgcttcggat

SEQ ID NO: 48499 - DNA, 17 bp, Arabidopsis thaliana
atagatttttaactgct

SEQ ID NO: 48500 - DNA, 17 bp, Arabidopsis thaliana
atagatttttcgtgcca

SEQ ID NO: 48501 - DNA, 17 bp, Arabidopsis thaliana
atagatttttctcgacg

SEQ ID NO: 48502 - DNA, 17 bp, Arabidopsis thaliana
atagcaaaacgatgacg

SEQ ID NO: 48503 - DNA, 17 bp, Arabidopsis thaliana
atagcaaagatcacgga

SEQ ID NO: 48504 - DNA, 17 bp, Arabidopsis thaliana
atagcaacagttgcttc

SEQ ID NO: 48505 - DNA, 17 bp, Arabidopsis thaliana
atagcaactgtgcgatt

SEQ ID NO: 48506 - DNA, 17 bp, Arabidopsis thaliana
atagcaagattccgcgc

SEQ ID NO: 48507 - DNA, 17 bp, Arabidopsis thaliana
atagcaaggagctcttt

SEQ ID NO: 48508 - DNA, 17 bp, Arabidopsis thaliana
atagcaatttcatcgac

SEQ ID NO: 48509 - DNA, 17 bp, Arabidopsis thaliana
atagcaccctctggttt

SEQ ID NO: 48510 - DNA, 17 bp, Arabidopsis thaliana
atagcacctcggtgcat

SEQ ID NO: 48511 - DNA, 17 bp, Arabidopsis thaliana
atagcacgggttatgat

SEQ ID NO: 48512 - DNA, 17 bp, Arabidopsis thaliana
atagcacgtctgcctgg

SEQ ID NO: 48513 - DNA, 17 bp, Arabidopsis thaliana
atagcactgttgcggta

SEQ ID NO: 48514 - DNA, 17 bp, Arabidopsis thaliana
atagcacttcgaaattg

SEQ ID NO: 48515 - DNA, 17 bp, Arabidopsis thaliana
atagcacttcgggatca

SEQ ID NO: 48516 - DNA, 17 bp, Arabidopsis thaliana
atagcactttccggatt

SEQ ID NO: 48517 - DNA, 17 bp, Arabidopsis thaliana
atagcagaccagccgtt

SEQ ID NO: 48518 - DNA, 17 bp, Arabidopsis thaliana
atagcagatgtgggacg

SEQ ID NO: 48519 - DNA, 17 bp, Arabidopsis thaliana
atagcagcactaatgca

SEQ ID NO: 48520 - DNA, 17 bp, Arabidopsis thaliana
atagcagcggccggcct

SEQ ID NO: 48521 - DNA, 17 bp, Arabidopsis thaliana
atagcaggacgggttgg

SEQ ID NO: 48522 - DNA, 17 bp, Arabidopsis thaliana
atagcaggacgggtttg

SEQ ID NO: 48523 - DNA, 17 bp, Arabidopsis thaliana
atagcaggtgacgagat

SEQ ID NO: 48524 - DNA, 17 bp, Arabidopsis thaliana
atagcaggtggcgagat

SEQ ID NO: 48525 - DNA, 17 bp, Arabidopsis thaliana
atagcagtgcatttcta

SEQ ID NO: 48526 - DNA, 17 bp, Arabidopsis thaliana
atagcagtttgaaatta

SEQ ID NO: 48527 - DNA, 17 bp, Arabidopsis thaliana
atagcagtttgaaattg

SEQ ID NO: 48528 - DNA, 17 bp, Arabidopsis thaliana
atagcatatgaccagtt

SEQ ID NO: 48529 - DNA, 17 bp, Arabidopsis thaliana
atagcatgcctgttagg

SEQ ID NO: 48530 - DNA, 17 bp, Arabidopsis thaliana
atagcatgtctgaatcc

SEQ ID NO: 48531 - DNA, 17 bp, Arabidopsis thaliana
atagcattcttctacaa

SEQ ID NO: 48532 - DNA, 17 bp, Arabidopsis thaliana
atagcatttgactaaca

SEQ ID NO: 48533 - DNA, 17 bp, Arabidopsis thaliana
atagccaactggtgtaa

SEQ ID NO: 48534 - DNA, 17 bp, Arabidopsis thaliana
atagccaccatcactgg

SEQ ID NO: 48535 - DNA, 17 bp, Arabidopsis thaliana
atagccaccttgattct

SEQ ID NO: 48536 - DNA, 17 bp, Arabidopsis thaliana
atagccagaatcaacga

SEQ ID NO: 48537 - DNA, 17 bp, Arabidopsis thaliana
atagccagctacacagc

SEQ ID NO: 48538 - DNA, 17 bp, Arabidopsis thaliana
atagccagtgacggatc

SEQ ID NO: 48539 - DNA, 17 bp, Arabidopsis thaliana
atagccataagccttgt

SEQ ID NO: 48540 - DNA, 17 bp, Arabidopsis thaliana
atagccatggtgtcaga

SEQ ID NO: 48541 - DNA, 17 bp, Arabidopsis thaliana
atagccattatctattg

SEQ ID NO: 48542 - DNA, 17 bp, Arabidopsis thaliana
atagccattgcgatgaa

SEQ ID NO: 48543 - DNA, 17 bp, Arabidopsis thaliana
atagcccaaatcacgaa

SEQ ID NO: 48544 - DNA, 17 bp, Arabidopsis thaliana
atagcccaaggcgatgg

SEQ ID NO: 48545 - DNA, 17 bp, Arabidopsis thaliana
atagcccaagtcccagg

SEQ ID NO: 48546 - DNA, 17 bp, Arabidopsis thaliana
atagccccgcagtgtac

SEQ ID NO: 48547 - DNA, 17 bp, Arabidopsis thaliana
atagcccgacgccagga

SEQ ID NO: 48548 - DNA, 17 bp, Arabidopsis thaliana
atagcccttccgtgtat

SEQ ID NO: 48549 - DNA, 17 bp, Arabidopsis thaliana
atagccctttccctctt

SEQ ID NO: 48550 - DNA, 17 bp, Arabidopsis thaliana
atagccctttcgtgtat

SEQ ID NO: 48551 - DNA, 17 bp, Arabidopsis thaliana
atagccctttgtcgcta

SEQ ID NO: 48552 - DNA, 17 bp, Arabidopsis thaliana
atagcccttttcccctt

SEQ ID NO: 48553 - DNA, 17 bp, Arabidopsis thaliana
atagcccttttccctct

SEQ ID NO: 48554 - DNA, 17 bp, Arabidopsis thaliana
atagccgaactagatcc

SEQ ID NO: 48555 - DNA, 17 bp, Arabidopsis thaliana
atagccgagacaagttt

SEQ ID NO: 48556 - DNA, 17 bp, Arabidopsis thaliana
atagccgctggagttcc

SEQ ID NO: 48557 - DNA, 17 bp, Arabidopsis thaliana
atagccgcttgccagga

SEQ ID NO: 48558 - DNA, 17 bp, Arabidopsis thaliana
atagccggattggtgga

SEQ ID NO: 48559 - DNA, 17 bp, Arabidopsis thaliana
atagccgtccggaccag

SEQ ID NO: 48560 - DNA, 17 bp, Arabidopsis thaliana
atagccgttcaattcac

SEQ ID NO: 48561 - DNA, 17 bp, Arabidopsis thaliana
atagccgttcaccagga

SEQ ID NO: 48562 - DNA, 17 bp, Arabidopsis thaliana
atagccgttcacctagg

SEQ ID NO: 48563 - DNA, 17 bp, Arabidopsis thaliana
atagccgttcctcagga

SEQ ID NO: 48564 - DNA, 17 bp, Arabidopsis thaliana
atagccgttcgccaaga

SEQ ID NO: 48565 - DNA, 17 bp, Arabidopsis thaliana
atagccgttcgccagga

SEQ ID NO: 48566 - DNA, 17 bp, Arabidopsis thaliana
atagccgtttgcaacga

SEQ ID NO: 48567 - DNA, 17 bp, Arabidopsis thaliana
atagccgtttgttagga

SEQ ID NO: 48568 - DNA, 17 bp, Arabidopsis thaliana
atagcctcatcccacca

SEQ ID NO: 48569 - DNA, 17 bp, Arabidopsis thaliana
atagcctctcacgcttt

SEQ ID NO: 48570 - DNA, 17 bp, Arabidopsis thaliana
atagcctgtcgggaccc

SEQ ID NO: 48571 - DNA, 17 bp, Arabidopsis thaliana
atagccttatcttagcc

SEQ ID NO: 48572 - DNA, 17 bp, Arabidopsis thaliana
atagccttcaacacttg

SEQ ID NO: 48573 - DNA, 17 bp, Arabidopsis thaliana
atagccttgaaacactt

SEQ ID NO: 48574 - DNA, 17 bp, Arabidopsis thaliana
atagccttgaacgccgt

SEQ ID NO: 48575 - DNA, 17 bp, Arabidopsis thaliana
atagcgaacaaagtctt

SEQ ID NO: 48576 - DNA, 17 bp, Arabidopsis thaliana
atagcgaaggctggcta

SEQ ID NO: 48577 - DNA, 17 bp, Arabidopsis thaliana
atagcgacaaccacagt

SEQ ID NO: 48578 - DNA, 17 bp, Arabidopsis thaliana
atagcgacaacttcgtc

SEQ ID NO: 48579 - DNA, 17 bp, Arabidopsis thaliana
atagcgacacatgtgcc

SEQ ID NO: 48580 - DNA, 17 bp, Arabidopsis thaliana
atagcgacaggctcaat

SEQ ID NO: 48581 - DNA, 17 bp, Arabidopsis thaliana
atagcgacgtggctttt

SEQ ID NO: 48582 - DNA, 17 bp, Arabidopsis thaliana
atagcgacgttgctttt

SEQ ID NO: 48583 - DNA, 17 bp, Arabidopsis thaliana
atagcgactgttatgcg

SEQ ID NO: 48584 - DNA, 17 bp, Arabidopsis thaliana
atagcgagcagtggcgg

SEQ ID NO: 48585 - DNA, 17 bp, Arabidopsis thaliana
atagcgaggctggtgag

SEQ ID NO: 48586 - DNA, 17 bp, Arabidopsis thaliana
atagcgagttggtcctg

SEQ ID NO: 48587 - DNA, 17 bp, Arabidopsis thaliana
atagcgatagtcgccag

SEQ ID NO: 48588 - DNA, 17 bp, Arabidopsis thaliana
atagcgatgatgtccgc

SEQ ID NO: 48589 - DNA, 17 bp, Arabidopsis thaliana
atagcgatgttcctcgc

SEQ ID NO: 48590 - DNA, 17 bp, Arabidopsis thaliana
atagcgcgctgtagccg

SEQ ID NO: 48591 - DNA, 17 bp, Arabidopsis thaliana
atagcgcgctgtagcgt

SEQ ID NO: 48592 - DNA, 17 bp, Arabidopsis thaliana
atagcgcgggtgatcgc

SEQ ID NO: 48593 - DNA, 17 bp, Arabidopsis thaliana
atagcggactgaaacga

SEQ ID NO: 48594 - DNA, 17 bp, Arabidopsis thaliana
atagcggagtggtttgc

SEQ ID NO: 48595 - DNA, 17 bp, Arabidopsis thaliana
atagcggcagttacggc

SEQ ID NO: 48596 - DNA, 17 bp, Arabidopsis thaliana
atagcggcatagcctaa

SEQ ID NO: 48597 - DNA, 17 bp, Arabidopsis thaliana
atagcggctccgtgcga

SEQ ID NO: 48598 - DNA, 17 bp, Arabidopsis thaliana
atagcggctggacatgg

SEQ ID NO: 48599 - DNA, 17 bp, Arabidopsis thaliana
atagcggctttggacgt

SEQ ID NO: 48600 - DNA, 17 bp, Arabidopsis thaliana
atagcgggacggattta

SEQ ID NO: 48601 - DNA, 17 bp, Arabidopsis thaliana
atagcgggcctagcagg

SEQ ID NO: 48602 - DNA, 17 bp, Arabidopsis thaliana
atagcgggtgggaccca

SEQ ID NO: 48603 - DNA, 17 bp, Arabidopsis thaliana
atagcgggtgggacgca

SEQ ID NO: 48604 - DNA, 17 bp, Arabidopsis thaliana
atagcgggtgggacgga

SEQ ID NO: 48605 - DNA, 17 bp, Arabidopsis thaliana
atagcggtctaatttgt

SEQ ID NO: 48606 - DNA, 17 bp, Arabidopsis thaliana
atagcggtgtacagata

SEQ ID NO: 48607 - DNA, 17 bp, Arabidopsis thaliana
atagcggtgtacagtta

SEQ ID NO: 48608 - DNA, 17 bp, Arabidopsis thaliana
atagcggtgtatagata

SEQ ID NO: 48609 - DNA, 17 bp, Arabidopsis thaliana
atagcggttgttagcga

SEQ ID NO: 48610 - DNA, 17 bp, Arabidopsis thaliana
atagcgtagaccaactc

SEQ ID NO: 48611 - DNA, 17 bp, Arabidopsis thaliana
atagcgtccattttgca

SEQ ID NO: 48612 - DNA, 17 bp, Arabidopsis thaliana
atagcgtctcttgtcca

SEQ ID NO: 48613 - DNA, 17 bp, Arabidopsis thaliana
atagcgtctgggagagt

SEQ ID NO: 48614 - DNA, 17 bp, Arabidopsis thaliana
atagcgttattcaggtg

SEQ ID NO: 48615 - DNA, 17 bp, Arabidopsis thaliana
atagcgttcaacgattt

SEQ ID NO: 48616 - DNA, 17 bp, Arabidopsis thaliana
atagcgttgattttggc

SEQ ID NO: 48617 - DNA, 17 bp, Arabidopsis thaliana
atagcgttttgaccgat

SEQ ID NO: 48618 - DNA, 17 bp, Arabidopsis thaliana
atagctaactgtacacc

SEQ ID NO: 48619 - DNA, 17 bp, Arabidopsis thaliana
atagctaactttcgttg

SEQ ID NO: 48620 - DNA, 17 bp, Arabidopsis thaliana
atagctaagtttcgttg

SEQ ID NO: 48621 - DNA, 17 bp, Arabidopsis thaliana
atagctaatacttcggc

SEQ ID NO: 48622 - DNA, 17 bp, Arabidopsis thaliana
atagctaatgcgcagta

SEQ ID NO: 48623 - DNA, 17 bp, Arabidopsis thaliana
atagctacaagcggcaa

SEQ ID NO: 48624 - DNA, 17 bp, Arabidopsis thaliana
atagctacttgtcggca

SEQ ID NO: 48625 - DNA, 17 bp, Arabidopsis thaliana
atagctagtcctgggtt

SEQ ID NO: 48626 - DNA, 17 bp, Arabidopsis thaliana
atagctattcggctaag

SEQ ID NO: 48627 - DNA, 17 bp, Arabidopsis thaliana
atagctcaaattacaga

SEQ ID NO: 48628 - DNA, 17 bp, Arabidopsis thaliana
atagctcactgatcgag

SEQ ID NO: 48629 - DNA, 17 bp, Arabidopsis thaliana
atagctcatgggctttt

SEQ ID NO: 48630 - DNA, 17 bp, Arabidopsis thaliana
atagctcattcggtact

SEQ ID NO: 48631 - DNA, 17 bp, Arabidopsis thaliana
atagctccctttttctc

SEQ ID NO: 48632 - DNA, 17 bp, Arabidopsis thaliana
atagctccgtgccgcaa

SEQ ID NO: 48633 - DNA, 17 bp, Arabidopsis thaliana
atagctccgtgggttgg

SEQ ID NO: 48634 - DNA, 17 bp, Arabidopsis thaliana
atagctcgacgccagga

SEQ ID NO: 48635 - DNA, 17 bp, Arabidopsis thaliana
atagctcgctttgtctt

SEQ ID NO: 48636 - DNA, 17 bp, Arabidopsis thaliana
atagctcgtagatggga

SEQ ID NO: 48637 - DNA, 17 bp, Arabidopsis thaliana
atagctcgtcgctgccg

SEQ ID NO: 48638 - DNA, 17 bp, Arabidopsis thaliana
atagctctttcttcact

SEQ ID NO: 48639 - DNA, 17 bp, Arabidopsis thaliana
atagctgaagtggttct

SEQ ID NO: 48640 - DNA, 17 bp, Arabidopsis thaliana
atagctgaccttgggtg

SEQ ID NO: 48641 - DNA, 17 bp, Arabidopsis thaliana
atagctgagtacatccg

SEQ ID NO: 48642 - DNA, 17 bp, Arabidopsis thaliana
atagctgccactggatc

SEQ ID NO: 48643 - DNA, 17 bp, Arabidopsis thaliana
atagctgccactggatt

SEQ ID NO: 48644 - DNA, 17 bp, Arabidopsis thaliana
atagctgctgaagtccc

SEQ ID NO: 48645 - DNA, 17 bp, Arabidopsis thaliana
atagctggacttcgtag

SEQ ID NO: 48646 - DNA, 17 bp, Arabidopsis thaliana
atagctggagctcggac

SEQ ID NO: 48647 - DNA, 17 bp, Arabidopsis thaliana
atagctggctgagtttc

SEQ ID NO: 48648 - DNA, 17 bp, Arabidopsis thaliana
atagctggtgggactca

SEQ ID NO: 48649 - DNA, 17 bp, Arabidopsis thaliana
atagctgtgttagtgga

SEQ ID NO: 48650 - DNA, 17 bp, Arabidopsis thaliana
atagcttaatagccctt

SEQ ID NO: 48651 - DNA, 17 bp, Arabidopsis thaliana
atagcttaccaaggcga

SEQ ID NO: 48652 - DNA, 17 bp, Arabidopsis thaliana
atagcttcggggttttg

SEQ ID NO: 48653 - DNA, 17 bp, Arabidopsis thaliana
atagcttcgtaacacat

SEQ ID NO: 48654 - DNA, 17 bp, Arabidopsis thaliana
atagcttctaatatcca

SEQ ID NO: 48655 - DNA, 17 bp, Arabidopsis thaliana
atagcttgacacctcat

SEQ ID NO: 48656 - DNA, 17 bp, Arabidopsis thaliana
atagcttgactttgctg

SEQ ID NO: 48657 - DNA, 17 bp, Arabidopsis thaliana
atagcttgcagagagaa

SEQ ID NO: 48658 - DNA, 17 bp, Arabidopsis thaliana
atagcttggatggtacc

SEQ ID NO: 48659 - DNA, 17 bp, Arabidopsis thaliana
atagcttgtggatgtat

SEQ ID NO: 48660 - DNA, 17 bp, Arabidopsis thaliana
atagctttcatttccct

SEQ ID NO: 48661 - DNA, 17 bp, Arabidopsis thaliana
atagctttgtacaactt

SEQ ID NO: 48662 - DNA, 17 bp, Arabidopsis thaliana
atagctttgtagtcgca

SEQ ID NO: 48663 - DNA, 17 bp, Arabidopsis thaliana
atagcttttttatagac

SEQ ID NO: 48664 - DNA, 17 bp, Arabidopsis thaliana
ataggaaatgtgtagcg

SEQ ID NO: 48665 - DNA, 17 bp, Arabidopsis thaliana
ataggaactgctgagtg

SEQ ID NO: 48666 - DNA, 17 bp, Arabidopsis thaliana
ataggaacttaaaccgc

SEQ ID NO: 48667 - DNA, 17 bp, Arabidopsis thaliana
ataggaaggctaaccgt

SEQ ID NO: 48668 - DNA, 17 bp, Arabidopsis thaliana
ataggaccatggttttg

SEQ ID NO: 48669 - DNA, 17 bp, Arabidopsis thaliana
ataggaccgtgccacct

SEQ ID NO: 48670 - DNA, 17 bp, Arabidopsis thaliana
ataggaccgtgccacgt

SEQ ID NO: 48671 - DNA, 17 bp, Arabidopsis thaliana
ataggacgggtttggca

SEQ ID NO: 48672 - DNA, 17 bp, Arabidopsis thaliana
ataggactccgctggca

SEQ ID NO: 48673 - DNA, 17 bp, Arabidopsis thaliana
ataggagaagtgcggtg

SEQ ID NO: 48674 - DNA, 17 bp, Arabidopsis thaliana
ataggagaattggtgtg

SEQ ID NO: 48675 - DNA, 17 bp, Arabidopsis thaliana
ataggagacgcgtaggt

SEQ ID NO: 48676 - DNA, 17 bp, Arabidopsis thaliana
ataggaggtcagctggt

SEQ ID NO: 48677 - DNA, 17 bp, Arabidopsis thaliana
ataggagtacaaggtta

SEQ ID NO: 48678 - DNA, 17 bp, Arabidopsis thaliana
ataggagtggcaccgtg

SEQ ID NO: 48679 - DNA, 17 bp, Arabidopsis thaliana
ataggatacggccagtc

SEQ ID NO: 48680 - DNA, 17 bp, Arabidopsis thaliana
ataggatatctcctctg

SEQ ID NO: 48681 - DNA, 17 bp, Arabidopsis thaliana
ataggatcatgcaacgt

SEQ ID NO: 48682 - DNA, 17 bp, Arabidopsis thaliana
ataggatcatgccacgt

SEQ ID NO: 48683 - DNA, 17 bp, Arabidopsis thaliana
ataggatccgactattt

SEQ ID NO: 48684 - DNA, 17 bp, Arabidopsis thaliana
ataggatccgggaccgg

SEQ ID NO: 48685 - DNA, 17 bp, Arabidopsis thaliana
ataggatcgatccatga

SEQ ID NO: 48686 - DNA, 17 bp, Arabidopsis thaliana
ataggatcgtaccacgt

SEQ ID NO: 48687 - DNA, 17 bp, Arabidopsis thaliana
ataggatcgtgcaacgt

SEQ ID NO: 48688 - DNA, 17 bp, Arabidopsis thaliana
ataggatcgtgccacat

SEQ ID NO: 48689 - DNA, 17 bp, Arabidopsis thaliana
ataggatcgtgccacgt

SEQ ID NO: 48690 - DNA, 17 bp, Arabidopsis thaliana
ataggatcgtgccactt

SEQ ID NO: 48691 - DNA, 17 bp, Arabidopsis thaliana
ataggatcgtgccaggt

SEQ ID NO: 48692 - DNA, 17 bp, Arabidopsis thaliana
ataggatcgtgccatgt

SEQ ID NO: 48693 - DNA, 17 bp, Arabidopsis thaliana
ataggatcgtgtcacgt

SEQ ID NO: 48694 - DNA, 17 bp, Arabidopsis thaliana
ataggattaggtccgga

SEQ ID NO: 48695 - DNA, 17 bp, Arabidopsis thaliana
ataggattatgccacgt

SEQ ID NO: 48696 - DNA, 17 bp, Arabidopsis thaliana
ataggattcattgctgg

SEQ ID NO: 48697 - DNA, 17 bp, Arabidopsis thaliana
ataggattcttaaaccg

SEQ ID NO: 48698 - DNA, 17 bp, Arabidopsis thaliana
ataggattgtgcacgtg

SEQ ID NO: 48699 - DNA, 17 bp, Arabidopsis thaliana
ataggattgtgccacgc

SEQ ID NO: 48700 - DNA, 17 bp, Arabidopsis thaliana
ataggattgtgccacgt

SEQ ID NO: 48701 - DNA, 17 bp, Arabidopsis thaliana
ataggattgtgccatgt

SEQ ID NO: 48702 - DNA, 17 bp, Arabidopsis thaliana
ataggattgtgctacgt

SEQ ID NO: 48703 - DNA, 17 bp, Arabidopsis thaliana
ataggatttcgatccta

SEQ ID NO: 48704 - DNA, 17 bp, Arabidopsis thaliana
ataggatttttgcatgg

SEQ ID NO: 48705 - DNA, 17 bp, Arabidopsis thaliana
ataggcaaggagctgat

SEQ ID NO: 48706 - DNA, 17 bp, Arabidopsis thaliana
ataggcacaaacgttgc

SEQ ID NO: 48707 - DNA, 17 bp, Arabidopsis thaliana
ataggcacactataggg

SEQ ID NO: 48708 - DNA, 17 bp, Arabidopsis thaliana
ataggcatacgactggt

SEQ ID NO: 48709 - DNA, 17 bp, Arabidopsis thaliana
ataggcatatcgataaa

SEQ ID NO: 48710 - DNA, 17 bp, Arabidopsis thaliana
ataggcattcggctctc

SEQ ID NO: 48711 - DNA, 17 bp, Arabidopsis thaliana
ataggcattcggttatc

SEQ ID NO: 48712 - DNA, 17 bp, Arabidopsis thaliana
ataggcatttgctccgc

SEQ ID NO: 48713 - DNA, 17 bp, Arabidopsis thaliana
ataggccctgttcgttt

SEQ ID NO: 48714 - DNA, 17 bp, Arabidopsis thaliana
ataggccggtgcaacta

SEQ ID NO: 48715 - DNA, 17 bp, Arabidopsis thaliana
ataggcgacccttctca

SEQ ID NO: 48716 - DNA, 17 bp, Arabidopsis thaliana
ataggcgagatccacac

SEQ ID NO: 48717 - DNA, 17 bp, Arabidopsis thaliana
ataggcgatctgcgtac

SEQ ID NO: 48718 - DNA, 17 bp, Arabidopsis thaliana
ataggcgctccgactat

SEQ ID NO: 48719 - DNA, 17 bp, Arabidopsis thaliana
ataggcgcttcaccaaa

SEQ ID NO: 48720 - DNA, 17 bp, Arabidopsis thaliana
ataggcggtttaagcag

SEQ ID NO: 48721 - DNA, 17 bp, Arabidopsis thaliana
ataggctaacttttgtt

SEQ ID NO: 48722 - DNA, 17 bp, Arabidopsis thaliana
ataggctactagattct

SEQ ID NO: 48723 - DNA, 17 bp, Arabidopsis thaliana
ataggctcatccacatg

SEQ ID NO: 48724 - DNA, 17 bp, Arabidopsis thaliana
ataggctccgtaaccca

SEQ ID NO: 48725 - DNA, 17 bp, Arabidopsis thaliana
ataggctctcaagggtt

SEQ ID NO: 48726 - DNA, 17 bp, Arabidopsis thaliana
ataggctgatagctagg

SEQ ID NO: 48727 - DNA, 17 bp, Arabidopsis thaliana
ataggctgcagatggat

SEQ ID NO: 48728 - DNA, 17 bp, Arabidopsis thaliana
ataggcttcaggcttcc

SEQ ID NO: 48729 - DNA, 17 bp, Arabidopsis thaliana
atagggaacccaagcaa

SEQ ID NO: 48730 - DNA, 17 bp, Arabidopsis thaliana
atagggaacggcccaga

SEQ ID NO: 48731 - DNA, 17 bp, Arabidopsis thaliana
atagggatgtccataat

SEQ ID NO: 48732 - DNA, 17 bp, Arabidopsis thaliana
atagggcaaggtgcttc

SEQ ID NO: 48733 - DNA, 17 bp, Arabidopsis thaliana
atagggcccggcgttga

SEQ ID NO: 48734 - DNA, 17 bp, Arabidopsis thaliana
atagggcccttacgttt

SEQ ID NO: 48735 - DNA, 17 bp, Arabidopsis thaliana
atagggcctgttcgttt

SEQ ID NO: 48736 - DNA, 17 bp, Arabidopsis thaliana
atagggcctgttctttt

SEQ ID NO: 48737 - DNA, 17 bp, Arabidopsis thaliana
ataggggcatagcctaa

SEQ ID NO: 48738 - DNA, 17 bp, Arabidopsis thaliana
ataggggcggacccacg

SEQ ID NO: 48739 - DNA, 17 bp, Arabidopsis thaliana
atagggggattcaaaat

SEQ ID NO: 48740 - DNA, 17 bp, Arabidopsis thaliana
atagggtaaatcttcgg

SEQ ID NO: 48741 - DNA, 17 bp, Arabidopsis thaliana
atagggtaatggcacgg

SEQ ID NO: 48742 - DNA, 17 bp, Arabidopsis thaliana
atagggtcgttaaaccg

SEQ ID NO: 48743 - DNA, 17 bp, Arabidopsis thaliana
atagggtgcagcagtgg

SEQ ID NO: 48744 - DNA, 17 bp, Arabidopsis thaliana
atagggtgtggttcgta

SEQ ID NO: 48745 - DNA, 17 bp, Arabidopsis thaliana
atagggttctcaccgtc

SEQ ID NO: 48746 - DNA, 17 bp, Arabidopsis thaliana
atagggttctcaccgtt

SEQ ID NO: 48747 - DNA, 17 bp, Arabidopsis thaliana
ataggtaggacgtgacg

SEQ ID NO: 48748 - DNA, 17 bp, Arabidopsis thaliana
ataggtaggacgtgtcg

SEQ ID NO: 48749 - DNA, 17 bp, Arabidopsis thaliana
ataggtaggacgtgtgg

SEQ ID NO: 48750 - DNA, 17 bp, Arabidopsis thaliana
ataggtaggacgtttgg

SEQ ID NO: 48751 - DNA, 17 bp, Arabidopsis thaliana
ataggtaggacttcatt

SEQ ID NO: 48752 - DNA, 17 bp, Arabidopsis thaliana
ataggtccaaccaagtt

SEQ ID NO: 48753 - DNA, 17 bp, Arabidopsis thaliana
ataggtcccctgtatga

SEQ ID NO: 48754 - DNA, 17 bp, Arabidopsis thaliana
ataggtccgtcagccca

SEQ ID NO: 48755 - DNA, 17 bp, Arabidopsis thaliana
ataggtcgccggttcga

SEQ ID NO: 48756 - DNA, 17 bp, Arabidopsis thaliana
ataggtcgctgttttag

SEQ ID NO: 48757 - DNA, 17 bp, Arabidopsis thaliana
ataggtcttttcgagat

SEQ ID NO: 48758 - DNA, 17 bp, Arabidopsis thaliana
ataggtgaaggatcgag

SEQ ID NO: 48759 - DNA, 17 bp, Arabidopsis thaliana
ataggtgacctaaaatt

SEQ ID NO: 48760 - DNA, 17 bp, Arabidopsis thaliana
ataggtgacctcccgag

SEQ ID NO: 48761 - DNA, 17 bp, Arabidopsis thaliana
ataggtgcacttaccgc

SEQ ID NO: 48762 - DNA, 17 bp, Arabidopsis thaliana
ataggtgcagtgaccct

SEQ ID NO: 48763 - DNA, 17 bp, Arabidopsis thaliana
ataggtgccatcatcga

SEQ ID NO: 48764 - DNA, 17 bp, Arabidopsis thaliana
ataggtggagtgaccct

SEQ ID NO: 48765 - DNA, 17 bp, Arabidopsis thaliana
ataggtggagtgaccgt

SEQ ID NO: 48766 - DNA, 17 bp, Arabidopsis thaliana
ataggtggccaaatcaa

SEQ ID NO: 48767 - DNA, 17 bp, Arabidopsis thaliana
ataggtggtggtgcgtg

SEQ ID NO: 48768 - DNA, 17 bp, Arabidopsis thaliana
ataggtgttgcgtttaa

SEQ ID NO: 48769 - DNA, 17 bp, Arabidopsis thaliana
ataggttaaccttttga

SEQ ID NO: 48770 - DNA, 17 bp, Arabidopsis thaliana
ataggttcaaatcctat

SEQ ID NO: 48771 - DNA, 17 bp, Arabidopsis thaliana
ataggttcgtgacgagt

SEQ ID NO: 48772 - DNA, 17 bp, Arabidopsis thaliana
ataggttctggaatgct

SEQ ID NO: 48773 - DNA, 17 bp, Arabidopsis thaliana
ataggttctttggggtt

SEQ ID NO: 48774 - DNA, 17 bp, Arabidopsis thaliana
ataggttgaggccgcag

SEQ ID NO: 48775 - DNA, 17 bp, Arabidopsis thaliana
ataggttgccggttcga

SEQ ID NO: 48776 - DNA, 17 bp, Arabidopsis thaliana
ataggttgcggatggcg

SEQ ID NO: 48777 - DNA, 17 bp, Arabidopsis thaliana
ataggtttccaagggtc

SEQ ID NO: 48778 - DNA, 17 bp, Arabidopsis thaliana
ataggttttgggtgcgg

SEQ ID NO: 48779 - DNA, 17 bp, Arabidopsis thaliana
atagtaaccatctgttg

SEQ ID NO: 48780 - DNA, 17 bp, Arabidopsis thaliana
atagtaatggccggctc

SEQ ID NO: 48781 - DNA, 17 bp, Arabidopsis thaliana
atagtactaaccatcgc

SEQ ID NO: 48782 - DNA, 17 bp, Arabidopsis thaliana
atagtagatctgacgct

SEQ ID NO: 48783 - DNA, 17 bp, Arabidopsis thaliana
atagtaggctgctttct

SEQ ID NO: 48784 - DNA, 17 bp, Arabidopsis thaliana
atagtagggattgacta

SEQ ID NO: 48785 - DNA, 17 bp, Arabidopsis thaliana
atagtatgatggcggtt

SEQ ID NO: 48786 - DNA, 17 bp, Arabidopsis thaliana
atagtatgatgtctcga

SEQ ID NO: 48787 - DNA, 17 bp, Arabidopsis thaliana
atagtatttttgacttg

SEQ ID NO: 48788 - DNA, 17 bp, Arabidopsis thaliana
atagtcacaccatcgac

SEQ ID NO: 48789 - DNA, 17 bp, Arabidopsis thaliana
atagtcacagttttcag

SEQ ID NO: 48790 - DNA, 17 bp, Arabidopsis thaliana
atagtcacggctctggg

SEQ ID NO: 48791 - DNA, 17 bp, Arabidopsis thaliana
atagtcagaccggctgc

SEQ ID NO: 48792 - DNA, 17 bp, Arabidopsis thaliana
atagtcaggaaggttaa

SEQ ID NO: 48793 - DNA, 17 bp, Arabidopsis thaliana
atagtcatccatcccgt

SEQ ID NO: 48794 - DNA, 17 bp, Arabidopsis thaliana
atagtcatggccaggtg

SEQ ID NO: 48795 - DNA, 17 bp, Arabidopsis thaliana
atagtcattcgtcggga

SEQ ID NO: 48796 - DNA, 17 bp, Arabidopsis thaliana
atagtccaaacggttgc

SEQ ID NO: 48797 - DNA, 17 bp, Arabidopsis thaliana
atagtccaattgggcat

SEQ ID NO: 48798 - DNA, 17 bp, Arabidopsis thaliana
atagtccacagtggtct

SEQ ID NO: 48799 - DNA, 17 bp, Arabidopsis thaliana
atagtcccaaatcaaag

SEQ ID NO: 48800 - DNA, 17 bp, Arabidopsis thaliana
atagtcccgcgttgtac

SEQ ID NO: 48801 - DNA, 17 bp, Arabidopsis thaliana
atagtccgcagtggtcc

SEQ ID NO: 48802 - DNA, 17 bp, Arabidopsis thaliana
atagtccgcagtggtcg

SEQ ID NO: 48803 - DNA, 17 bp, Arabidopsis thaliana
atagtccgcctctgaga

SEQ ID NO: 48804 - DNA, 17 bp, Arabidopsis thaliana
atagtccgtagtggtct

SEQ ID NO: 48805 - DNA, 17 bp, Arabidopsis thaliana
atagtcgatcctgtagg

SEQ ID NO: 48806 - DNA, 17 bp, Arabidopsis thaliana
atagtcgcacgttgcaa

SEQ ID NO: 48807 - DNA, 17 bp, Arabidopsis thaliana
atagtcgcatcctgtag

SEQ ID NO: 48808 - DNA, 17 bp, Arabidopsis thaliana
atagtcgcatcctgtcg

SEQ ID NO: 48809 - DNA, 17 bp, Arabidopsis thaliana
atagtcgctgcgactct

SEQ ID NO: 48810 - DNA, 17 bp, Arabidopsis thaliana
atagtcgctgcgatcgg

SEQ ID NO: 48811 - DNA, 17 bp, Arabidopsis thaliana
atagtcgcttgccagga

SEQ ID NO: 48812 - DNA, 17 bp, Arabidopsis thaliana
atagtcggagcgcctat

SEQ ID NO: 48813 - DNA, 17 bp, Arabidopsis thaliana
atagtcggatacttgtg

SEQ ID NO: 48814 - DNA, 17 bp, Arabidopsis thaliana
atagtcggcttgtttga

SEQ ID NO: 48815 - DNA, 17 bp, Arabidopsis thaliana
atagtcggtgtgcctct

SEQ ID NO: 48816 - DNA, 17 bp, Arabidopsis thaliana
atagtcgtcatatctac

SEQ ID NO: 48817 - DNA, 17 bp, Arabidopsis thaliana
atagtcgtctgccagga

SEQ ID NO: 48818 - DNA, 17 bp, Arabidopsis thaliana
atagtcgttcgccaaga

SEQ ID NO: 48819 - DNA, 17 bp, Arabidopsis thaliana
atagtcgttcgccagga

SEQ ID NO: 48820 - DNA, 17 bp, Arabidopsis thaliana
atagtcgttcggaccgc

SEQ ID NO: 48821 - DNA, 17 bp, Arabidopsis thaliana
atagtcgtttgccagga

SEQ ID NO: 48822 - DNA, 17 bp, Arabidopsis thaliana
atagtctaaagttcttg

SEQ ID NO: 48823 - DNA, 17 bp, Arabidopsis thaliana
atagtctagtccgattt

SEQ ID NO: 48824 - DNA, 17 bp, Arabidopsis thaliana
atagtctagtgcgatat

SEQ ID NO: 48825 - DNA, 17 bp, Arabidopsis thaliana
atagtctcacgatgtac

SEQ ID NO: 48826 - DNA, 17 bp, Arabidopsis thaliana
atagtctccaagttgca

SEQ ID NO: 48827 - DNA, 17 bp, Arabidopsis thaliana
atagtctccatgggccg

SEQ ID NO: 48828 - DNA, 17 bp, Arabidopsis thaliana
atagtctcgcggtggat

SEQ ID NO: 48829 - DNA, 17 bp, Arabidopsis thaliana
atagtctcgcttgttta

SEQ ID NO: 48830 - DNA, 17 bp, Arabidopsis thaliana
atagtctctcggacgta

SEQ ID NO: 48831 - DNA, 17 bp, Arabidopsis thaliana
atagtctgacaacgacc

SEQ ID NO: 48832 - DNA, 17 bp, Arabidopsis thaliana
atagtctgcagtggtcc

SEQ ID NO: 48833 - DNA, 17 bp, Arabidopsis thaliana
atagtctgcggatcgat

SEQ ID NO: 48834 - DNA, 17 bp, Arabidopsis thaliana
atagtctgtccgtcgat

SEQ ID NO: 48835 - DNA, 17 bp, Arabidopsis thaliana
atagtcttaggcgccaa

SEQ ID NO: 48836 - DNA, 17 bp, Arabidopsis thaliana
atagtcttcagatcttt

SEQ ID NO: 48837 - DNA, 17 bp, Arabidopsis thaliana
atagtctttcttggaac

SEQ ID NO: 48838 - DNA, 17 bp, Arabidopsis thaliana
atagtgaaagacgtcat

SEQ ID NO: 48839 - DNA, 17 bp, Arabidopsis thaliana
atagtgaaccgacagtt

SEQ ID NO: 48840 - DNA, 17 bp, Arabidopsis thaliana
atagtgaagacccttgc

SEQ ID NO: 48841 - DNA, 17 bp, Arabidopsis thaliana
atagtgacaagaaacca

SEQ ID NO: 48842 - DNA, 17 bp, Arabidopsis thaliana
atagtgaccttgcccag

SEQ ID NO: 48843 - DNA, 17 bp, Arabidopsis thaliana
atagtgacgtagcaact

SEQ ID NO: 48844 - DNA, 17 bp, Arabidopsis thaliana
atagtgagacatgtccc

SEQ ID NO: 48845 - DNA, 17 bp, Arabidopsis thaliana
atagtgagagctacgaa

SEQ ID NO: 48846 - DNA, 17 bp, Arabidopsis thaliana
atagtgatcacggctca

SEQ ID NO: 48847 - DNA, 17 bp, Arabidopsis thaliana
atagtgatcgtcgtcaa

SEQ ID NO: 48848 - DNA, 17 bp, Arabidopsis thaliana
atagtgattgcgttttg

SEQ ID NO: 48849 - DNA, 17 bp, Arabidopsis thaliana
atagtgcattggtcggc

SEQ ID NO: 48850 - DNA, 17 bp, Arabidopsis thaliana
atagtgcgattttgccg

SEQ ID NO: 48851 - DNA, 17 bp, Arabidopsis thaliana
atagtgcggtacggttc

SEQ ID NO: 48852 - DNA, 17 bp, Arabidopsis thaliana
atagtgcggtgagcgtg

SEQ ID NO: 48853 - DNA, 17 bp, Arabidopsis thaliana
atagtggaacgagtttg

SEQ ID NO: 48854 - DNA, 17 bp, Arabidopsis thaliana
atagtggactcctctca

SEQ ID NO: 48855 - DNA, 17 bp, Arabidopsis thaliana
atagtggcctaccatgg

SEQ ID NO: 48856 - DNA, 17 bp, Arabidopsis thaliana
atagtggcctaccatgt

SEQ ID NO: 48857 - DNA, 17 bp, Arabidopsis thaliana
atagtggctgccactga

SEQ ID NO: 48858 - DNA, 17 bp, Arabidopsis thaliana
atagtgggagctacgaa

SEQ ID NO: 48859 - DNA, 17 bp, Arabidopsis thaliana
atagtggggtttccacg

SEQ ID NO: 48860 - DNA, 17 bp, Arabidopsis thaliana
atagtgggtgattggtt

SEQ ID NO: 48861 - DNA, 17 bp, Arabidopsis thaliana
atagtgggtgctacgaa

SEQ ID NO: 48862 - DNA, 17 bp, Arabidopsis thaliana
atagtggttctctgatt

SEQ ID NO: 48863 - DNA, 17 bp, Arabidopsis thaliana
atagtgtccacttctgc

SEQ ID NO: 48864 - DNA, 17 bp, Arabidopsis thaliana
atagtgtcctaagatga

SEQ ID NO: 48865 - DNA, 17 bp, Arabidopsis thaliana
atagtgtctacgcggtg

SEQ ID NO: 48866 - DNA, 17 bp, Arabidopsis thaliana
atagtgtcttcaggcag

SEQ ID NO: 48867 - DNA, 17 bp, Arabidopsis thaliana
atagtgtgaacgcatag

SEQ ID NO: 48868 - DNA, 17 bp, Arabidopsis thaliana
atagtgtgacgggcggg

SEQ ID NO: 48869 - DNA, 17 bp, Arabidopsis thaliana
atagtgtgtgattggtt

SEQ ID NO: 48870 - DNA, 17 bp, Arabidopsis thaliana
atagtgttgatgtagct

SEQ ID NO: 48871 - DNA, 17 bp, Arabidopsis thaliana
atagtgttgtggaagca

SEQ ID NO: 48872 - DNA, 17 bp, Arabidopsis thaliana
atagttaaaccgggtaa

SEQ ID NO: 48873 - DNA, 17 bp, Arabidopsis thaliana
atagttaactgaatcag

SEQ ID NO: 48874 - DNA, 17 bp, Arabidopsis thaliana
atagttaagcgtgcttg

SEQ ID NO: 48875 - DNA, 17 bp, Arabidopsis thaliana
atagttacaggctcacc

SEQ ID NO: 48876 - DNA, 17 bp, Arabidopsis thaliana
atagttacagtgcaagg

SEQ ID NO: 48877 - DNA, 17 bp, Arabidopsis thaliana
atagttagcggagcagc

SEQ ID NO: 48878 - DNA, 17 bp, Arabidopsis thaliana
atagttagctaacccgt

SEQ ID NO: 48879 - DNA, 17 bp, Arabidopsis thaliana
atagttagctagaccgt

SEQ ID NO: 48880 - DNA, 17 bp, Arabidopsis thaliana
atagttaggtccttgtt

SEQ ID NO: 48881 - DNA, 17 bp, Arabidopsis thaliana
atagttagtccacactt

SEQ ID NO: 48882 - DNA, 17 bp, Arabidopsis thaliana
atagttagtccggtgca

SEQ ID NO: 48883 - DNA, 17 bp, Arabidopsis thaliana
atagttagttaatccgc

SEQ ID NO: 48884 - DNA, 17 bp, Arabidopsis thaliana
atagttagtttgccgca

SEQ ID NO: 48885 - DNA, 17 bp, Arabidopsis thaliana
atagttagtttgccgct

SEQ ID NO: 48886 - DNA, 17 bp, Arabidopsis thaliana
atagttagtttggattg

SEQ ID NO: 48887 - DNA, 17 bp, Arabidopsis thaliana
atagttatcttacgagc

SEQ ID NO: 48888 - DNA, 17 bp, Arabidopsis thaliana
atagttcacctacgcag

SEQ ID NO: 48889 - DNA, 17 bp, Arabidopsis thaliana
atagttcacggttaatt

SEQ ID NO: 48890 - DNA, 17 bp, Arabidopsis thaliana
atagttcagctacgcag

SEQ ID NO: 48891 - DNA, 17 bp, Arabidopsis thaliana
atagttcataggtgcac

SEQ ID NO: 48892 - DNA, 17 bp, Arabidopsis thaliana
atagttcgtcctctcct

SEQ ID NO: 48893 - DNA, 17 bp, Arabidopsis thaliana
atagttctacgcaagga

SEQ ID NO: 48894 - DNA, 17 bp, Arabidopsis thaliana
atagttctacgcaaggg

SEQ ID NO: 48895 - DNA, 17 bp, Arabidopsis thaliana
atagttctcgtggggaa

SEQ ID NO: 48896 - DNA, 17 bp, Arabidopsis thaliana
atagttctgtggtgtat

SEQ ID NO: 48897 - DNA, 17 bp, Arabidopsis thaliana
atagttcttgccggctt

SEQ ID NO: 48898 - DNA, 17 bp, Arabidopsis thaliana
atagttgaacgcgttaa

SEQ ID NO: 48899 - DNA, 17 bp, Arabidopsis thaliana
atagttgacccaaactg

SEQ ID NO: 48900 - DNA, 17 bp, Arabidopsis thaliana
atagttgacccgactca

SEQ ID NO: 48901 - DNA, 17 bp, Arabidopsis thaliana
atagttgacgacccttc

SEQ ID NO: 48902 - DNA, 17 bp, Arabidopsis thaliana
atagttgaggctcacaa

SEQ ID NO: 48903 - DNA, 17 bp, Arabidopsis thaliana
atagttgatcctgccat

SEQ ID NO: 48904 - DNA, 17 bp, Arabidopsis thaliana
atagttgatcggggtga

SEQ ID NO: 48905 - DNA, 17 bp, Arabidopsis thaliana
atagttgatttagggtt

SEQ ID NO: 48906 - DNA, 17 bp, Arabidopsis thaliana
atagttgccagcgatca

SEQ ID NO: 48907 - DNA, 17 bp, Arabidopsis thaliana
atagttgccatcgatca

SEQ ID NO: 48908 - DNA, 17 bp, Arabidopsis thaliana
atagttgccctcatgct

SEQ ID NO: 48909 - DNA, 17 bp, Arabidopsis thaliana
atagttgctgatgtaat

SEQ ID NO: 48910 - DNA, 17 bp, Arabidopsis thaliana
atagttgctgcggcggc

SEQ ID NO: 48911 - DNA, 17 bp, Arabidopsis thaliana
atagttggcatgtgtga

SEQ ID NO: 48912 - DNA, 17 bp, Arabidopsis thaliana
atagttggcccatgtag

SEQ ID NO: 48913 - DNA, 17 bp, Arabidopsis thaliana
atagttggtgctaggca

SEQ ID NO: 48914 - DNA, 17 bp, Arabidopsis thaliana
atagttgtccattgatg

SEQ ID NO: 48915 - DNA, 17 bp, Arabidopsis thaliana
atagttgtccattgttt

SEQ ID NO: 48916 - DNA, 17 bp, Arabidopsis thaliana
atagttgtgtccaaggc

SEQ ID NO: 48917 - DNA, 17 bp, Arabidopsis thaliana
atagttgttactttgca

SEQ ID NO: 48918 - DNA, 17 bp, Arabidopsis thaliana
atagttgttcactaaga

SEQ ID NO: 48919 - DNA, 17 bp, Arabidopsis thaliana
atagttgttcgccaaga

SEQ ID NO: 48920 - DNA, 17 bp, Arabidopsis thaliana
atagttgttcgccagga

SEQ ID NO: 48921 - DNA, 17 bp, Arabidopsis thaliana
atagtttagcggcttat

SEQ ID NO: 48922 - DNA, 17 bp, Arabidopsis thaliana
atagtttagggttgcga

SEQ ID NO: 48923 - DNA, 17 bp, Arabidopsis thaliana
atagtttagtggccctg

SEQ ID NO: 48924 - DNA, 17 bp, Arabidopsis thaliana
atagtttatcgataact

SEQ ID NO: 48925 - DNA, 17 bp, Arabidopsis thaliana
atagtttctctccgagg

SEQ ID NO: 48926 - DNA, 17 bp, Arabidopsis thaliana
atagtttgctaactcat

SEQ ID NO: 48927 - DNA, 17 bp, Arabidopsis thaliana
atagtttgctaatccat

SEQ ID NO: 48928 - DNA, 17 bp, Arabidopsis thaliana
atagtttgctaatccgt

SEQ ID NO: 48929 - DNA, 17 bp, Arabidopsis thaliana
atagtttgcttccagac

SEQ ID NO: 48930 - DNA, 17 bp, Arabidopsis thaliana
atagtttgtccaaggca

SEQ ID NO: 48931 - DNA, 17 bp, Arabidopsis thaliana
atagtttgttcttcggg

SEQ ID NO: 48932 - DNA, 17 bp, Arabidopsis thaliana
atagttttacatgagcg

SEQ ID NO: 48933 - DNA, 17 bp, Arabidopsis thaliana
atagttttgaatccgga

SEQ ID NO: 48934 - DNA, 17 bp, Arabidopsis thaliana
atagttttgtcgaccgg

SEQ ID NO: 48935 - DNA, 17 bp, Arabidopsis thaliana
atagtttttgacggcta

SEQ ID NO: 48936 - DNA, 17 bp, Arabidopsis thaliana
atataaaaccaaggccc

SEQ ID NO: 48937 - DNA, 17 bp, Arabidopsis thaliana
atataaaaccgaggccc

SEQ ID NO: 48938 - DNA, 17 bp, Arabidopsis thaliana
atataaattatctccgc

SEQ ID NO: 48939 - DNA, 17 bp, Arabidopsis thaliana
atataaattgtccccgc

SEQ ID NO: 48940 - DNA, 17 bp, Arabidopsis thaliana
atataacaggtctgtaa

SEQ ID NO: 48941 - DNA, 17 bp, Arabidopsis thaliana
atataacccttgagaag

SEQ ID NO: 48942 - DNA, 17 bp, Arabidopsis thaliana
atataaccggattttgg

SEQ ID NO: 48943 - DNA, 17 bp, Arabidopsis thaliana
atataacgggatccgtg

SEQ ID NO: 48944 - DNA, 17 bp, Arabidopsis thaliana
atataactcagtgagga

SEQ ID NO: 48945 - DNA, 17 bp, Arabidopsis thaliana
atataactcagtgtcca

SEQ ID NO: 48946 - DNA, 17 bp, Arabidopsis thaliana
atataagatatgggcct

SEQ ID NO: 48947 - DNA, 17 bp, Arabidopsis thaliana
atataagcctacctgcg

SEQ ID NO: 48948 - DNA, 17 bp, Arabidopsis thaliana
atataagtcttggccgt

SEQ ID NO: 48949 - DNA, 17 bp, Arabidopsis thaliana
atataagtgtatccgca

SEQ ID NO: 48950 - DNA, 17 bp, Arabidopsis thaliana
atataatcatcgatcaa

SEQ ID NO: 48951 - DNA, 17 bp, Arabidopsis thaliana
atataatcatcgatcgg

SEQ ID NO: 48952 - DNA, 17 bp, Arabidopsis thaliana
atataatccagaactac

SEQ ID NO: 48953 - DNA, 17 bp, Arabidopsis thaliana
atataatcgcaggtcgc

SEQ ID NO: 48954 - DNA, 17 bp, Arabidopsis thaliana
atataattattctgcga

SEQ ID NO: 48955 - DNA, 17 bp, Arabidopsis thaliana
atatacacggtgtttgt

SEQ ID NO: 48956 - DNA, 17 bp, Arabidopsis thaliana
atatacaggctgtatgg

SEQ ID NO: 48957 - DNA, 17 bp, Arabidopsis thaliana
atatacagtatcgtgtg

SEQ ID NO: 48958 - DNA, 17 bp, Arabidopsis thaliana
atatacatactcaccag

SEQ ID NO: 48959 - DNA, 17 bp, Arabidopsis thaliana
atatacatattcaccag

SEQ ID NO: 48960 - DNA, 17 bp, Arabidopsis thaliana
atatacatcaacttcgt

SEQ ID NO: 48961 - DNA, 17 bp, Arabidopsis thaliana
atatacatccgcttttt

SEQ ID NO: 48962 - DNA, 17 bp, Arabidopsis thaliana
atataccagacagtggc

SEQ ID NO: 48963 - DNA, 17 bp, Arabidopsis thaliana
atataccctatcggcca

SEQ ID NO: 48964 - DNA, 17 bp, Arabidopsis thaliana
atataccgcaggtaggc

SEQ ID NO: 48965 - DNA, 17 bp, Arabidopsis thaliana
atataccgctttggacc

SEQ ID NO: 48966 - DNA, 17 bp, Arabidopsis thaliana
atatacgatctccaagt

SEQ ID NO: 48967 - DNA, 17 bp, Arabidopsis thaliana
atatacggtggttgctt

SEQ ID NO: 48968 - DNA, 17 bp, Arabidopsis thaliana
atatacgtgaactctga

SEQ ID NO: 48969 - DNA, 17 bp, Arabidopsis thaliana
atatacgtgagtatgac

SEQ ID NO: 48970 - DNA, 17 bp, Arabidopsis thaliana
atatactagataagttc

SEQ ID NO: 48971 - DNA, 17 bp, Arabidopsis thaliana
atatactagattttgac

SEQ ID NO: 48972 - DNA, 17 bp, Arabidopsis thaliana
atatactagttgagtgc

SEQ ID NO: 48973 - DNA, 17 bp, Arabidopsis thaliana
atatactatccagcgcc

SEQ ID NO: 48974 - DNA, 17 bp, Arabidopsis thaliana
atatactatctgaaccg

SEQ ID NO: 48975 - DNA, 17 bp, Arabidopsis thaliana
atatactatctgcggcg

SEQ ID NO: 48976 - DNA, 17 bp, Arabidopsis thaliana
atatactcagtacagca

SEQ ID NO: 48977 - DNA, 17 bp, Arabidopsis thaliana
atatactcggttcaggt

SEQ ID NO: 48978 - DNA, 17 bp, Arabidopsis thaliana
atatactctatcggctg

SEQ ID NO: 48979 - DNA, 17 bp, Arabidopsis thaliana
atatactgttgtgaccg

SEQ ID NO: 48980 - DNA, 17 bp, Arabidopsis thaliana
atatacttaggccatct

SEQ ID NO: 48981 - DNA, 17 bp, Arabidopsis thaliana
atatacttggacccagt

SEQ ID NO: 48982 - DNA, 17 bp, Arabidopsis thaliana
atatagatctgcgcacg

SEQ ID NO: 48983 - DNA, 17 bp, Arabidopsis thaliana
atatagattccttcgtc

SEQ ID NO: 48984 - DNA, 17 bp, Arabidopsis thaliana
atatagcaaaacgatga

SEQ ID NO: 48985 - DNA, 17 bp, Arabidopsis thaliana
atatagcccaaactttg

SEQ ID NO: 48986 - DNA, 17 bp, Arabidopsis thaliana
atatagcccacttgttc

SEQ ID NO: 48987 - DNA, 17 bp, Arabidopsis thaliana
atatagccgttcctcag

SEQ ID NO: 48988 - DNA, 17 bp, Arabidopsis thaliana
atatagcctccaattaa

SEQ ID NO: 48989 - DNA, 17 bp, Arabidopsis thaliana
atatagcgaccccaggt

SEQ ID NO: 48990 - DNA, 17 bp, Arabidopsis thaliana
atatagcgctttctact

SEQ ID NO: 48991 - DNA, 17 bp, Arabidopsis thaliana
atatagcgggacaggtt

SEQ ID NO: 48992 - DNA, 17 bp, Arabidopsis thaliana
atatagcgggtgggacc

SEQ ID NO: 48993 - DNA, 17 bp, Arabidopsis thaliana
atatagcggtacaaatg

SEQ ID NO: 48994 - DNA, 17 bp, Arabidopsis thaliana
atatagcgttctgctga

SEQ ID NO: 48995 - DNA, 17 bp, Arabidopsis thaliana
atatagctcttggaccc

SEQ ID NO: 48996 - DNA, 17 bp, Arabidopsis thaliana
atatagcttaatagccc

SEQ ID NO: 48997 - DNA, 17 bp, Arabidopsis thaliana
atataggaacttgtcgt

SEQ ID NO: 48998 - DNA, 17 bp, Arabidopsis thaliana
atataggccgttctcgt

SEQ ID NO: 48999 - DNA, 17 bp, Arabidopsis thaliana
atataggctccgaatgg

SEQ ID NO: 49000 - DNA, 17 bp, Arabidopsis thaliana
atatagtcactgaaatc

SEQ ID NO: 49001 - DNA, 17 bp, Arabidopsis thaliana
atatagtccctccgttt

SEQ ID NO: 49002 - DNA, 17 bp, Arabidopsis thaliana
atatagtcgcttgccag

SEQ ID NO: 49003 - DNA, 17 bp, Arabidopsis thaliana
atatagtcggggtgttg

SEQ ID NO: 49004 - DNA, 17 bp, Arabidopsis thaliana
atatagtcgttcgccag

SEQ ID NO: 49005 - DNA, 17 bp, Arabidopsis thaliana
atatagtctgcggatcg

SEQ ID NO: 49006 - DNA, 17 bp, Arabidopsis thaliana
atatagttacagtgcaa

SEQ ID NO: 49007 - DNA, 17 bp, Arabidopsis thaliana
atatagttgaaggttcc

SEQ ID NO: 49008 - DNA, 17 bp, Arabidopsis thaliana
atatagtttcagccatt

SEQ ID NO: 49009 - DNA, 17 bp, Arabidopsis thaliana
atatagttttctcgcaa

SEQ ID NO: 49010 - DNA, 17 bp, Arabidopsis thaliana
atatatcctatcggctg

SEQ ID NO: 49011 - DNA, 17 bp, Arabidopsis thaliana
atatatctgctctgttc

SEQ ID NO: 49012 - DNA, 17 bp, Arabidopsis thaliana
atatatgactaggtgag

SEQ ID NO: 49013 - DNA, 17 bp, Arabidopsis thaliana
atatatgatttggctta

SEQ ID NO: 49014 - DNA, 17 bp, Arabidopsis thaliana
atatatgcggccaaata

SEQ ID NO: 49015 - DNA, 17 bp, Arabidopsis thaliana
atatatgggattcagtc

SEQ ID NO: 49016 - DNA, 17 bp, Arabidopsis thaliana
atatatggtctgctaga

SEQ ID NO: 49017 - DNA, 17 bp, Arabidopsis thaliana
atatattcgtcagggtc

SEQ ID NO: 49018 - DNA, 17 bp, Arabidopsis thaliana
atatattctgaacccga

SEQ ID NO: 49019 - DNA, 17 bp, Arabidopsis thaliana
atatattgaacctggca

SEQ ID NO: 49020 - DNA, 17 bp, Arabidopsis thaliana
atatattggtgcggttc

SEQ ID NO: 49021 - DNA, 17 bp, Arabidopsis thaliana
atatatttgcgggttca

SEQ ID NO: 49022 - DNA, 17 bp, Arabidopsis thaliana
atatcaaagttctgttg

SEQ ID NO: 49023 - DNA, 17 bp, Arabidopsis thaliana
atatcaacgggatcgat

SEQ ID NO: 49024 - DNA, 17 bp, Arabidopsis thaliana
atatcaactactgctac

SEQ ID NO: 49025 - DNA, 17 bp, Arabidopsis thaliana
atatcaacttcacatgt

SEQ ID NO: 49026 - DNA, 17 bp, Arabidopsis thaliana
atatcaacttcacattt

SEQ ID NO: 49027 - DNA, 17 bp, Arabidopsis thaliana
atatcaacttcgtatgc

SEQ ID NO: 49028 - DNA, 17 bp, Arabidopsis thaliana
atatcaacttcgtatgt

SEQ ID NO: 49029 - DNA, 17 bp, Arabidopsis thaliana
atatcaacttgggcttc

SEQ ID NO: 49030 - DNA, 17 bp, Arabidopsis thaliana
atatcaacttttggggc

SEQ ID NO: 49031 - DNA, 17 bp, Arabidopsis thaliana
atatcaatccaaactcg

SEQ ID NO: 49032 - DNA, 17 bp, Arabidopsis thaliana
atatcaatccaaatcta

SEQ ID NO: 49033 - DNA, 17 bp, Arabidopsis thaliana
atatcaatccaaatctg

SEQ ID NO: 49034 - DNA, 17 bp, Arabidopsis thaliana
atatcaatccgcagtct

SEQ ID NO: 49035 - DNA, 17 bp, Arabidopsis thaliana
atatcaatccgcagtgt

SEQ ID NO: 49036 - DNA, 17 bp, Arabidopsis thaliana
atatcaatctaaacccg

SEQ ID NO: 49037 - DNA, 17 bp, Arabidopsis thaliana
atatcaatctaaatccg

SEQ ID NO: 49038 - DNA, 17 bp, Arabidopsis thaliana
atatcaatctggctctg

SEQ ID NO: 49039 - DNA, 17 bp, Arabidopsis thaliana
atatcaattagggcgtt

SEQ ID NO: 49040 - DNA, 17 bp, Arabidopsis thaliana
atatcacaaagtcggct

SEQ ID NO: 49041 - DNA, 17 bp, Arabidopsis thaliana
atatcacaagacgcgtc

SEQ ID NO: 49042 - DNA, 17 bp, Arabidopsis thaliana
atatcaccacccatatt

SEQ ID NO: 49043 - DNA, 17 bp, Arabidopsis thaliana
atatcaccgacaacttc

SEQ ID NO: 49044 - DNA, 17 bp, Arabidopsis thaliana
atatcaccgctgggcat

SEQ ID NO: 49045 - DNA, 17 bp, Arabidopsis thaliana
atatcacctactttact

SEQ ID NO: 49046 - DNA, 17 bp, Arabidopsis thaliana
atatcacgtacactgtc

SEQ ID NO: 49047 - DNA, 17 bp, Arabidopsis thaliana
atatcactgggctgata

SEQ ID NO: 49048 - DNA, 17 bp, Arabidopsis thaliana
atatcactgttgcggtg

SEQ ID NO: 49049 - DNA, 17 bp, Arabidopsis thaliana
atatcacttgccataag

SEQ ID NO: 49050 - DNA, 17 bp, Arabidopsis thaliana
atatcagcactaatgca

SEQ ID NO: 49051 - DNA, 17 bp, Arabidopsis thaliana
atatcagctcaagatca

SEQ ID NO: 49052 - DNA, 17 bp, Arabidopsis thaliana
atatcagctgttggatt

SEQ ID NO: 49053 - DNA, 17 bp, Arabidopsis thaliana
atatcaggaggttctgg

SEQ ID NO: 49054 - DNA, 17 bp, Arabidopsis thaliana
atatcaggaggttttga

SEQ ID NO: 49055 - DNA, 17 bp, Arabidopsis thaliana
atatcaggaggttttgg

SEQ ID NO: 49056 - DNA, 17 bp, Arabidopsis thaliana
atatcaggatgtgattg

SEQ ID NO: 49057 - DNA, 17 bp, Arabidopsis thaliana
atatcaggatgtggttg

SEQ ID NO: 49058 - DNA, 17 bp, Arabidopsis thaliana
atatcaggcatccaaaa

SEQ ID NO: 49059 - DNA, 17 bp, Arabidopsis thaliana
atatcagggatgaggca

SEQ ID NO: 49060 - DNA, 17 bp, Arabidopsis thaliana
atatcagggccttgagg

SEQ ID NO: 49061 - DNA, 17 bp, Arabidopsis thaliana
atatcaggtaatccagg

SEQ ID NO: 49062 - DNA, 17 bp, Arabidopsis thaliana
atatcaggtccgctccg

SEQ ID NO: 49063 - DNA, 17 bp, Arabidopsis thaliana
atatcagtaggtgaggg

SEQ ID NO: 49064 - DNA, 17 bp, Arabidopsis thaliana
atatcagtgatcgctct

SEQ ID NO: 49065 - DNA, 17 bp, Arabidopsis thaliana
atatcagtggcaggcat

SEQ ID NO: 49066 - DNA, 17 bp, Arabidopsis thaliana
atatcagtgtaggcgct

SEQ ID NO: 49067 - DNA, 17 bp, Arabidopsis thaliana
atatcagttccatgcgt

SEQ ID NO: 49068 - DNA, 17 bp, Arabidopsis thaliana
atatcagttcggcccaa

SEQ ID NO: 49069 - DNA, 17 bp, Arabidopsis thaliana
atatcagttcgtagtgc

SEQ ID NO: 49070 - DNA, 17 bp, Arabidopsis thaliana
atatcagttcgtagttc

SEQ ID NO: 49071 - DNA, 17 bp, Arabidopsis thaliana
atatcatctacgaggtc

SEQ ID NO: 49072 - DNA, 17 bp, Arabidopsis thaliana
atatcatctgacgtggc

SEQ ID NO: 49073 - DNA, 17 bp, Arabidopsis thaliana
atatcatctggacggca

SEQ ID NO: 49074 - DNA, 17 bp, Arabidopsis thaliana
atatcatgagacgggac

SEQ ID NO: 49075 - DNA, 17 bp, Arabidopsis thaliana
atatcatgatgtggttg

SEQ ID NO: 49076 - DNA, 17 bp, Arabidopsis thaliana
atatcatggaaacgcgc

SEQ ID NO: 49077 - DNA, 17 bp, Arabidopsis thaliana
atatcatggcagagcag

SEQ ID NO: 49078 - DNA, 17 bp, Arabidopsis thaliana
atatcatgggatccttg

SEQ ID NO: 49079 - DNA, 17 bp, Arabidopsis thaliana
atatcattcaatgtgcc

SEQ ID NO: 49080 - DNA, 17 bp, Arabidopsis thaliana
atatcattccggacatc

SEQ ID NO: 49081 - DNA, 17 bp, Arabidopsis thaliana
atatcattggtcgacca

SEQ ID NO: 49082 - DNA, 17 bp, Arabidopsis thaliana
atatcattggtggtgct

SEQ ID NO: 49083 - DNA, 17 bp, Arabidopsis thaliana
atatccaagtcttgtga

SEQ ID NO: 49084 - DNA, 17 bp, Arabidopsis thaliana
atatccaccaggctttc

SEQ ID NO: 49085 - DNA, 17 bp, Arabidopsis thaliana
atatccaccgatacccg

SEQ ID NO: 49086 - DNA, 17 bp, Arabidopsis thaliana
atatccacgacagacga

SEQ ID NO: 49087 - DNA, 17 bp, Arabidopsis thaliana
atatccacggatttgtt

SEQ ID NO: 49088 - DNA, 17 bp, Arabidopsis thaliana
atatccatatggattcg

SEQ ID NO: 49089 - DNA, 17 bp, Arabidopsis thaliana
atatccatcagcatcac

SEQ ID NO: 49090 - DNA, 17 bp, Arabidopsis thaliana
atatccatctatccgga

SEQ ID NO: 49091 - DNA, 17 bp, Arabidopsis thaliana
atatcccggtgaccaga

SEQ ID NO: 49092 - DNA, 17 bp, Arabidopsis thaliana
atatccgacttcgtcgc

SEQ ID NO: 49093 - DNA, 17 bp, Arabidopsis thaliana
atatccgacttgacccc

SEQ ID NO: 49094 - DNA, 17 bp, Arabidopsis thaliana
atatccgatcgtagggt

SEQ ID NO: 49095 - DNA, 17 bp, Arabidopsis thaliana
atatccgcttcattttc

SEQ ID NO: 49096 - DNA, 17 bp, Arabidopsis thaliana
atatccgcttcgtgccc

SEQ ID NO: 49097 - DNA, 17 bp, Arabidopsis thaliana
atatccgcttcgtgccg

SEQ ID NO: 49098 - DNA, 17 bp, Arabidopsis thaliana
atatccgcttcttgctc

SEQ ID NO: 49099 - DNA, 17 bp, Arabidopsis thaliana
atatccgcttgatctgc

SEQ ID NO: 49100 - DNA, 17 bp, Arabidopsis thaliana
atatccgctttgaatgg

SEQ ID NO: 49101 - DNA, 17 bp, Arabidopsis thaliana
atatccggatggcagat

SEQ ID NO: 49102 - DNA, 17 bp, Arabidopsis thaliana
atatccggctctggtcc

SEQ ID NO: 49103 - DNA, 17 bp, Arabidopsis thaliana
atatccggctttggtcc

SEQ ID NO: 49104 - DNA, 17 bp, Arabidopsis thaliana
atatccgggatcatttc

SEQ ID NO: 49105 - DNA, 17 bp, Arabidopsis thaliana
atatccggttcctgaat

SEQ ID NO: 49106 - DNA, 17 bp, Arabidopsis thaliana
atatccggttcctgact

SEQ ID NO: 49107 - DNA, 17 bp, Arabidopsis thaliana
atatccgtaagattttg

SEQ ID NO: 49108 - DNA, 17 bp, Arabidopsis thaliana
atatccgtcgtgaagcc

SEQ ID NO: 49109 - DNA, 17 bp, Arabidopsis thaliana
atatccgtctcactcca

SEQ ID NO: 49110 - DNA, 17 bp, Arabidopsis thaliana
atatccgtcttgacgca

SEQ ID NO: 49111 - DNA, 17 bp, Arabidopsis thaliana
atatccgttcctgaatt

SEQ ID NO: 49112 - DNA, 17 bp, Arabidopsis thaliana
atatccgttcgccagga

SEQ ID NO: 49113 - DNA, 17 bp, Arabidopsis thaliana
atatcctaacctttgca

SEQ ID NO: 49114 - DNA, 17 bp, Arabidopsis thaliana
atatcctaatagatggg

SEQ ID NO: 49115 - DNA, 17 bp, Arabidopsis thaliana
atatcctactcaacttt

SEQ ID NO: 49116 - DNA, 17 bp, Arabidopsis thaliana
atatcctagagatcggt

SEQ ID NO: 49117 - DNA, 17 bp, Arabidopsis thaliana
atatcctagagtgctca

SEQ ID NO: 49118 - DNA, 17 bp, Arabidopsis thaliana
atatcctatcgactgat

SEQ ID NO: 49119 - DNA, 17 bp, Arabidopsis thaliana
atatcctatcggctaat

SEQ ID NO: 49120 - DNA, 17 bp, Arabidopsis thaliana
atatcctatcggctgat

SEQ ID NO: 49121 - DNA, 17 bp, Arabidopsis thaliana
atatcctattagttgat

SEQ ID NO: 49122 - DNA, 17 bp, Arabidopsis thaliana
atatcctcggcgggtac

SEQ ID NO: 49123 - DNA, 17 bp, Arabidopsis thaliana
atatcctctcagccgtg

SEQ ID NO: 49124 - DNA, 17 bp, Arabidopsis thaliana
atatcctctgacaatgt

SEQ ID NO: 49125 - DNA, 17 bp, Arabidopsis thaliana
atatcctctggtgctac

SEQ ID NO: 49126 - DNA, 17 bp, Arabidopsis thaliana
atatcctggtgtcctag

SEQ ID NO: 49127 - DNA, 17 bp, Arabidopsis thaliana
atatcctgttagcgagg

SEQ ID NO: 49128 - DNA, 17 bp, Arabidopsis thaliana
atatcctgttgaaccgg

SEQ ID NO: 49129 - DNA, 17 bp, Arabidopsis thaliana
atatccttatgaccaac

SEQ ID NO: 49130 - DNA, 17 bp, Arabidopsis thaliana
atatccttcgccgtcag

SEQ ID NO: 49131 - DNA, 17 bp, Arabidopsis thaliana
atatccttctaggctga

SEQ ID NO: 49132 - DNA, 17 bp, Arabidopsis thaliana
atatccttgatgaggtg

SEQ ID NO: 49133 - DNA, 17 bp, Arabidopsis thaliana
atatcgaatggagtttg

SEQ ID NO: 49134 - DNA, 17 bp, Arabidopsis thaliana
atatcgacgcctcggac

SEQ ID NO: 49135 - DNA, 17 bp, Arabidopsis thaliana
atatcgagcaacctttg

SEQ ID NO: 49136 - DNA, 17 bp, Arabidopsis thaliana
atatcgaggatccgaac

SEQ ID NO: 49137 - DNA, 17 bp, Arabidopsis thaliana
atatcgatctctctcgg

SEQ ID NO: 49138 - DNA, 17 bp, Arabidopsis thaliana
atatcgatgacgtgccc

SEQ ID NO: 49139 - DNA, 17 bp, Arabidopsis thaliana
atatcgatgacgtggca

SEQ ID NO: 49140 - DNA, 17 bp, Arabidopsis thaliana
atatcgatgatgtgaca

SEQ ID NO: 49141 - DNA, 17 bp, Arabidopsis thaliana
atatcgatgtgcggcca

SEQ ID NO: 49142 - DNA, 17 bp, Arabidopsis thaliana
atatcgcaagctgttct

SEQ ID NO: 49143 - DNA, 17 bp, Arabidopsis thaliana
atatcgcaagcttttct

SEQ ID NO: 49144 - DNA, 17 bp, Arabidopsis thaliana
atatcgcaaggctgaaa

SEQ ID NO: 49145 - DNA, 17 bp, Arabidopsis thaliana
atatcgcaagggaggcg

SEQ ID NO: 49146 - DNA, 17 bp, Arabidopsis thaliana
atatcgcagcttagaac

SEQ ID NO: 49147 - DNA, 17 bp, Arabidopsis thaliana
atatcgcaggggtaatt

SEQ ID NO: 49148 - DNA, 17 bp, Arabidopsis thaliana
atatcgcagttctatgg

SEQ ID NO: 49149 - DNA, 17 bp, Arabidopsis thaliana
atatcgcctactggaca

SEQ ID NO: 49150 - DNA, 17 bp, Arabidopsis thaliana
atatcgcgggtgacttt

SEQ ID NO: 49151 - DNA, 17 bp, Arabidopsis thaliana
atatcgcggtatgtgag

SEQ ID NO: 49152 - DNA, 17 bp, Arabidopsis thaliana
atatcgcgttacggctg

SEQ ID NO: 49153 - DNA, 17 bp, Arabidopsis thaliana
atatcgctagcacgact

SEQ ID NO: 49154 - DNA, 17 bp, Arabidopsis thaliana
atatcgctgacggagtc

SEQ ID NO: 49155 - DNA, 17 bp, Arabidopsis thaliana
atatcgctggtggtcaa

SEQ ID NO: 49156 - DNA, 17 bp, Arabidopsis thaliana
atatcgctttagaccgc

SEQ ID NO: 49157 - DNA, 17 bp, Arabidopsis thaliana
atatcgctttggaccgc

SEQ ID NO: 49158 - DNA, 17 bp, Arabidopsis thaliana
atatcggaagctaactc

SEQ ID NO: 49159 - DNA, 17 bp, Arabidopsis thaliana
atatcggacaagggctt

SEQ ID NO: 49160 - DNA, 17 bp, Arabidopsis thaliana
atatcggccagctggac

SEQ ID NO: 49161 - DNA, 17 bp, Arabidopsis thaliana
atatcggctaatccggt

SEQ ID NO: 49162 - DNA, 17 bp, Arabidopsis thaliana
atatcggcttcatacct

SEQ ID NO: 49163 - DNA, 17 bp, Arabidopsis thaliana
atatcggcttgtccctt

SEQ ID NO: 49164 - DNA, 17 bp, Arabidopsis thaliana
atatcgggtgcctcaga

SEQ ID NO: 49165 - DNA, 17 bp, Arabidopsis thaliana
atatcggtgacaaaacc

SEQ ID NO: 49166 - DNA, 17 bp, Arabidopsis thaliana
atatcggttaatccgac

SEQ ID NO: 49167 - DNA, 17 bp, Arabidopsis thaliana
atatcggttcctgaatg

SEQ ID NO: 49168 - DNA, 17 bp, Arabidopsis thaliana
atatcggttctaagtcg

SEQ ID NO: 49169 - DNA, 17 bp, Arabidopsis thaliana
atatcggttggtgacgg

SEQ ID NO: 49170 - DNA, 17 bp, Arabidopsis thaliana
atatcggttggttttcc

SEQ ID NO: 49171 - DNA, 17 bp, Arabidopsis thaliana
atatcggtttgcccgtt

SEQ ID NO: 49172 - DNA, 17 bp, Arabidopsis thaliana
atatcggtttgctcgtt

SEQ ID NO: 49173 - DNA, 17 bp, Arabidopsis thaliana
atatcgtaagtgttggc

SEQ ID NO: 49174 - DNA, 17 bp, Arabidopsis thaliana
atatcgtagattaagtt

SEQ ID NO: 49175 - DNA, 17 bp, Arabidopsis thaliana
atatcgtccaattcctc

SEQ ID NO: 49176 - DNA, 17 bp, Arabidopsis thaliana
atatcgtcgacgcgtgc

SEQ ID NO: 49177 - DNA, 17 bp, Arabidopsis thaliana
atatcgtctcgcggtgt

SEQ ID NO: 49178 - DNA, 17 bp, Arabidopsis thaliana
atatcgtcttcagaagc

SEQ ID NO: 49179 - DNA, 17 bp, Arabidopsis thaliana
atatcgtgacggctgag

SEQ ID NO: 49180 - DNA, 17 bp, Arabidopsis thaliana
atatcgtgggtcgatat

SEQ ID NO: 49181 - DNA, 17 bp, Arabidopsis thaliana
atatcgtgtgaactaag

SEQ ID NO: 49182 - DNA, 17 bp, Arabidopsis thaliana
atatcgttatgatcggc

SEQ ID NO: 49183 - DNA, 17 bp, Arabidopsis thaliana
atatcgttatgatcggg

SEQ ID NO: 49184 - DNA, 17 bp, Arabidopsis thaliana
atatcgttcctcggatg

SEQ ID NO: 49185 - DNA, 17 bp, Arabidopsis thaliana
atatcgttcgattcatc

SEQ ID NO: 49186 - DNA, 17 bp, Arabidopsis thaliana
atatcgttcggaccgca

SEQ ID NO: 49187 - DNA, 17 bp, Arabidopsis thaliana
atatctaacttgggtgt

SEQ ID NO: 49188 - DNA, 17 bp, Arabidopsis thaliana
atatctaagatttctct

SEQ ID NO: 49189 - DNA, 17 bp, Arabidopsis thaliana
atatctaagtttcggct

SEQ ID NO: 49190 - DNA, 17 bp, Arabidopsis thaliana
atatctacacagatttc

SEQ ID NO: 49191 - DNA, 17 bp, Arabidopsis thaliana
atatctacacgatttcc

SEQ ID NO: 49192 - DNA, 17 bp, Arabidopsis thaliana
atatctaccgatcagat

SEQ ID NO: 49193 - DNA, 17 bp, Arabidopsis thaliana
atatctagaatggagca

SEQ ID NO: 49194 - DNA, 17 bp, Arabidopsis thaliana
atatctagattataggg

SEQ ID NO: 49195 - DNA, 17 bp, Arabidopsis thaliana
atatctagattcgattc

SEQ ID NO: 49196 - DNA, 17 bp, Arabidopsis thaliana
atatctagattttgtcc

SEQ ID NO: 49197 - DNA, 17 bp, Arabidopsis thaliana
atatctaggatttcacc

SEQ ID NO: 49198 - DNA, 17 bp, Arabidopsis thaliana
atatctatccgagactt

SEQ ID NO: 49199 - DNA, 17 bp, Arabidopsis thaliana
atatctatgcgcgaacc

SEQ ID NO: 49200 - DNA, 17 bp, Arabidopsis thaliana
atatctatgttgccagt

SEQ ID NO: 49201 - DNA, 17 bp, Arabidopsis thaliana
atatctattcgggttcg

SEQ ID NO: 49202 - DNA, 17 bp, Arabidopsis thaliana
atatctattgccggcgt

SEQ ID NO: 49203 - DNA, 17 bp, Arabidopsis thaliana
atatctcaactttacat

SEQ ID NO: 49204 - DNA, 17 bp, Arabidopsis thaliana
atatctcaagctcgcag

SEQ ID NO: 49205 - DNA, 17 bp, Arabidopsis thaliana
atatctcaccaggacag

SEQ ID NO: 49206 - DNA, 17 bp, Arabidopsis thaliana
atatctcacgttgacct

SEQ ID NO: 49207 - DNA, 17 bp, Arabidopsis thaliana
atatctcactgatggaa

SEQ ID NO: 49208 - DNA, 17 bp, Arabidopsis thaliana
atatctcagtgccatag

SEQ ID NO: 49209 - DNA, 17 bp, Arabidopsis thaliana
atatctcatcttcgacc

SEQ ID NO: 49210 - DNA, 17 bp, Arabidopsis thaliana
atatctccacagcttgt

SEQ ID NO: 49211 - DNA, 17 bp, Arabidopsis thaliana
atatctcctagaggcgg

SEQ ID NO: 49212 - DNA, 17 bp, Arabidopsis thaliana
atatctcctttgctaat

SEQ ID NO: 49213 - DNA, 17 bp, Arabidopsis thaliana
atatctcgagatcttgc

SEQ ID NO: 49214 - DNA, 17 bp, Arabidopsis thaliana
atatctcgcaacgtgcc

SEQ ID NO: 49215 - DNA, 17 bp, Arabidopsis thaliana
atatctcgctaaggttt

SEQ ID NO: 49216 - DNA, 17 bp, Arabidopsis thaliana
atatctcggaacaaggc

SEQ ID NO: 49217 - DNA, 17 bp, Arabidopsis thaliana
atatctcggcgagacgt

SEQ ID NO: 49218 - DNA, 17 bp, Arabidopsis thaliana
atatctcggctctcgca

SEQ ID NO: 49219 - DNA, 17 bp, Arabidopsis thaliana
atatctcgtagatggga

SEQ ID NO: 49220 - DNA, 17 bp, Arabidopsis thaliana
atatctcgtttgagctt

SEQ ID NO: 49221 - DNA, 17 bp, Arabidopsis thaliana
atatctctaccaggtaa

SEQ ID NO: 49222 - DNA, 17 bp, Arabidopsis thaliana
atatctctacgctatgt

SEQ ID NO: 49223 - DNA, 17 bp, Arabidopsis thaliana
atatctctatccgggct

SEQ ID NO: 49224 - DNA, 17 bp, Arabidopsis thaliana
atatctctcacgacttc

SEQ ID NO: 49225 - DNA, 17 bp, Arabidopsis thaliana
atatctctgagaggcga

SEQ ID NO: 49226 - DNA, 17 bp, Arabidopsis thaliana
atatctctgcgctttga

SEQ ID NO: 49227 - DNA, 17 bp, Arabidopsis thaliana
atatctctgcggtttga

SEQ ID NO: 49228 - DNA, 17 bp, Arabidopsis thaliana
atatctctgcttgtacc

SEQ ID NO: 49229 - DNA, 17 bp, Arabidopsis thaliana
atatctctggggattga

SEQ ID NO: 49230 - DNA, 17 bp, Arabidopsis thaliana
atatctctggggattgt

SEQ ID NO: 49231 - DNA, 17 bp, Arabidopsis thaliana
atatctctgtgagtgac

SEQ ID NO: 49232 - DNA, 17 bp, Arabidopsis thaliana
atatctcttgcgaaccc

SEQ ID NO: 49233 - DNA, 17 bp, Arabidopsis thaliana
atatctcttgcgaatcc

SEQ ID NO: 49234 - DNA, 17 bp, Arabidopsis thaliana
atatctctttattcaac

SEQ ID NO: 49235 - DNA, 17 bp, Arabidopsis thaliana
atatctgaaagttcaag

SEQ ID NO: 49236 - DNA, 17 bp, Arabidopsis thaliana
atatctgacacttgggt

SEQ ID NO: 49237 - DNA, 17 bp, Arabidopsis thaliana
atatctgacgcaacatt

SEQ ID NO: 49238 - DNA, 17 bp, Arabidopsis thaliana
atatctgatctaactcg

SEQ ID NO: 49239 - DNA, 17 bp, Arabidopsis thaliana
atatctgattcgaaccc

SEQ ID NO: 49240 - DNA, 17 bp, Arabidopsis thaliana
atatctgcactgtgcca

SEQ ID NO: 49241 - DNA, 17 bp, Arabidopsis thaliana
atatctgcaggaccgat

SEQ ID NO: 49242 - DNA, 17 bp, Arabidopsis thaliana
atatctgcaggaccggt

SEQ ID NO: 49243 - DNA, 17 bp, Arabidopsis thaliana
atatctgccatctttgt

SEQ ID NO: 49244 - DNA, 17 bp, Arabidopsis thaliana
atatctgccgactcatc

SEQ ID NO: 49245 - DNA, 17 bp, Arabidopsis thaliana
atatctgctctgtgccc

SEQ ID NO: 49246 - DNA, 17 bp, Arabidopsis thaliana
atatctgctgcgaaagg

SEQ ID NO: 49247 - DNA, 17 bp, Arabidopsis thaliana
atatctgcttctgccca

SEQ ID NO: 49248 - DNA, 17 bp, Arabidopsis thaliana
atatctggaccgagaga

SEQ ID NO: 49249 - DNA, 17 bp, Arabidopsis thaliana
atatctggacgagtctt

SEQ ID NO: 49250 - DNA, 17 bp, Arabidopsis thaliana
atatctggatattctgc

SEQ ID NO: 49251 - DNA, 17 bp, Arabidopsis thaliana
atatctggatggctcct

SEQ ID NO: 49252 - DNA, 17 bp, Arabidopsis thaliana
atatctggccggctatc

SEQ ID NO: 49253 - DNA, 17 bp, Arabidopsis thaliana
atatctggctatcaccc

SEQ ID NO: 49254 - DNA, 17 bp, Arabidopsis thaliana
atatctggttcacaatt

SEQ ID NO: 49255 - DNA, 17 bp, Arabidopsis thaliana
atatctgtcaatttagg

SEQ ID NO: 49256 - DNA, 17 bp, Arabidopsis thaliana
atatctgtgagagcggt

SEQ ID NO: 49257 - DNA, 17 bp, Arabidopsis thaliana
atatctgtggaaacgtt

SEQ ID NO: 49258 - DNA, 17 bp, Arabidopsis thaliana
atatctgtttcgtaccc

SEQ ID NO: 49259 - DNA, 17 bp, Arabidopsis thaliana
atatctgtttgggttcg

SEQ ID NO: 49260 - DNA, 17 bp, Arabidopsis thaliana
atatcttcagttcagcg

SEQ ID NO: 49261 - DNA, 17 bp, Arabidopsis thaliana
atatcttcctgacgaga

SEQ ID NO: 49262 - DNA, 17 bp, Arabidopsis thaliana
atatcttctcagcgctt

SEQ ID NO: 49263 - DNA, 17 bp, Arabidopsis thaliana
atatcttctcgcctgca

SEQ ID NO: 49264 - DNA, 17 bp, Arabidopsis thaliana
atatcttgcctccgtga

SEQ ID NO: 49265 - DNA, 17 bp, Arabidopsis thaliana
atatcttggatccacca

SEQ ID NO: 49266 - DNA, 17 bp, Arabidopsis thaliana
atatcttggatggtacc

SEQ ID NO: 49267 - DNA, 17 bp, Arabidopsis thaliana
atatcttggttgtcgac

SEQ ID NO: 49268 - DNA, 17 bp, Arabidopsis thaliana
atatcttgtccccgatt

SEQ ID NO: 49269 - DNA, 17 bp, Arabidopsis thaliana
atatcttgtggctgctt

SEQ ID NO: 49270 - DNA, 17 bp, Arabidopsis thaliana
atatcttgttgcgtctg

SEQ ID NO: 49271 - DNA, 17 bp, Arabidopsis thaliana
atatctttcattctcga

SEQ ID NO: 49272 - DNA, 17 bp, Arabidopsis thaliana
atatctttcggttcggt

SEQ ID NO: 49273 - DNA, 17 bp, Arabidopsis thaliana
atatctttgagcttcag

SEQ ID NO: 49274 - DNA, 17 bp, Arabidopsis thaliana
atatctttgcaaatctg

SEQ ID NO: 49275 - DNA, 17 bp, Arabidopsis thaliana
atatctttgccggcttg

SEQ ID NO: 49276 - DNA, 17 bp, Arabidopsis thaliana
atatcttttgcaggtca

SEQ ID NO: 49277 - DNA, 17 bp, Arabidopsis thaliana
atatcttttttggcggg

SEQ ID NO: 49278 - DNA, 17 bp, Arabidopsis thaliana
atatgaaaactaaccgg

SEQ ID NO: 49279 - DNA, 17 bp, Arabidopsis thaliana
atatgaaactaaccaga

SEQ ID NO: 49280 - DNA, 17 bp, Arabidopsis thaliana
atatgaaactaaccgga

SEQ ID NO: 49281 - DNA, 17 bp, Arabidopsis thaliana
atatgaaacttccgagg

SEQ ID NO: 49282 - DNA, 17 bp, Arabidopsis thaliana
atatgaaacttctatgg

SEQ ID NO: 49283 - DNA, 17 bp, Arabidopsis thaliana
atatgaaactttctacg

SEQ ID NO: 49284 - DNA, 17 bp, Arabidopsis thaliana
atatgaaagttggctaa

SEQ ID NO: 49285 - DNA, 17 bp, Arabidopsis thaliana
atatgaaccatggaaca

SEQ ID NO: 49286 - DNA, 17 bp, Arabidopsis thaliana
atatgaacccgcccatt

SEQ ID NO: 49287 - DNA, 17 bp, Arabidopsis thaliana
atatgaacgttaatcgg

SEQ ID NO: 49288 - DNA, 17 bp, Arabidopsis thaliana
atatgaactcagtggcc

SEQ ID NO: 49289 - DNA, 17 bp, Arabidopsis thaliana
atatgaatctgatgccc

SEQ ID NO: 49290 - DNA, 17 bp, Arabidopsis thaliana
atatgaatctgatggcg

SEQ ID NO: 49291 - DNA, 17 bp, Arabidopsis thaliana
atatgacaaatgccgag

SEQ ID NO: 49292 - DNA, 17 bp, Arabidopsis thaliana
atatgacagatttgggt

SEQ ID NO: 49293 - DNA, 17 bp, Arabidopsis thaliana
atatgacattctcgtgc

SEQ ID NO: 49294 - DNA, 17 bp, Arabidopsis thaliana
atatgaccaagtgtcga

SEQ ID NO: 49295 - DNA, 17 bp, Arabidopsis thaliana
atatgaccagttttgtc

SEQ ID NO: 49296 - DNA, 17 bp, Arabidopsis thaliana
atatgaccagtttttta

SEQ ID NO: 49297 - DNA, 17 bp, Arabidopsis thaliana
atatgacccgaatgcac

SEQ ID NO: 49298 - DNA, 17 bp, Arabidopsis thaliana
atatgacgacatgtggc

SEQ ID NO: 49299 - DNA, 17 bp, Arabidopsis thaliana
atatgacggatctgatc

SEQ ID NO: 49300 - DNA, 17 bp, Arabidopsis thaliana
atatgacggttaccagg

SEQ ID NO: 49301 - DNA, 17 bp, Arabidopsis thaliana
atatgactcgaatgcac

SEQ ID NO: 49302 - DNA, 17 bp, Arabidopsis thaliana
atatgactgagttttgc

SEQ ID NO: 49303 - DNA, 17 bp, Arabidopsis thaliana
atatgactggtcactgg

SEQ ID NO: 49304 - DNA, 17 bp, Arabidopsis thaliana
atatgagaatgcgttga

SEQ ID NO: 49305 - DNA, 17 bp, Arabidopsis thaliana
atatgagactcttgacg

SEQ ID NO: 49306 - DNA, 17 bp, Arabidopsis thaliana
atatgagcaggttcaca

SEQ ID NO: 49307 - DNA, 17 bp, Arabidopsis thaliana
atatgagccgagggaac

SEQ ID NO: 49308 - DNA, 17 bp, Arabidopsis thaliana
atatgagtccaaatgtc

SEQ ID NO: 49309 - DNA, 17 bp, Arabidopsis thaliana
atatgagtccgagtccc

SEQ ID NO: 49310 - DNA, 17 bp, Arabidopsis thaliana
atatgagtccgagtctc

SEQ ID NO: 49311 - DNA, 17 bp, Arabidopsis thaliana
atatgagtccgcattta

SEQ ID NO: 49312 - DNA, 17 bp, Arabidopsis thaliana
atatgataagacgagtt

SEQ ID NO: 49313 - DNA, 17 bp, Arabidopsis thaliana
atatgataatcaaatct

SEQ ID NO: 49314 - DNA, 17 bp, Arabidopsis thaliana
atatgatcaacatccat

SEQ ID NO: 49315 - DNA, 17 bp, Arabidopsis thaliana
atatgatcaacggccaa

SEQ ID NO: 49316 - DNA, 17 bp, Arabidopsis thaliana
atatgatcctttgtggc

SEQ ID NO: 49317 - DNA, 17 bp, Arabidopsis thaliana
atatgatgacatgtggc

SEQ ID NO: 49318 - DNA, 17 bp, Arabidopsis thaliana
atatgatggacttagcg

SEQ ID NO: 49319 - DNA, 17 bp, Arabidopsis thaliana
atatgatggtttggacg

SEQ ID NO: 49320 - DNA, 17 bp, Arabidopsis thaliana
atatgatgtatgcggtg

SEQ ID NO: 49321 - DNA, 17 bp, Arabidopsis thaliana
atatgattggttaacca

SEQ ID NO: 49322 - DNA, 17 bp, Arabidopsis thaliana
atatgattgtggcctta

SEQ ID NO: 49323 - DNA, 17 bp, Arabidopsis thaliana
atatgatttcacggttt

SEQ ID NO: 49324 - DNA, 17 bp, Arabidopsis thaliana
atatgatttgttgaatg

SEQ ID NO: 49325 - DNA, 17 bp, Arabidopsis thaliana
atatgattttaagtcgt

SEQ ID NO: 49326 - DNA, 17 bp, Arabidopsis thaliana
atatgattttgccaaac

SEQ ID NO: 49327 - DNA, 17 bp, Arabidopsis thaliana
atatgattttgggtgcg

SEQ ID NO: 49328 - DNA, 17 bp, Arabidopsis thaliana
atatgcaaatttctcgt

SEQ ID NO: 49329 - DNA, 17 bp, Arabidopsis thaliana
atatgcaaatttctctt

SEQ ID NO: 49330 - DNA, 17 bp, Arabidopsis thaliana
atatgcccagccctatt

SEQ ID NO: 49331 - DNA, 17 bp, Arabidopsis thaliana
atatgccggccggtccg

SEQ ID NO: 49332 - DNA, 17 bp, Arabidopsis thaliana
atatgccgttaaatttc

SEQ ID NO: 49333 - DNA, 17 bp, Arabidopsis thaliana
atatgcgaccgagatta

SEQ ID NO: 49334 - DNA, 17 bp, Arabidopsis thaliana
atatgcgaggtcgatcc

SEQ ID NO: 49335 - DNA, 17 bp, Arabidopsis thaliana
atatgcgaggtgagttc

SEQ ID NO: 49336 - DNA, 17 bp, Arabidopsis thaliana
atatgcgatcttttcgt

SEQ ID NO: 49337 - DNA, 17 bp, Arabidopsis thaliana
atatgcgcgatctggaa

SEQ ID NO: 49338 - DNA, 17 bp, Arabidopsis thaliana
atatgcggaaacgggcg

SEQ ID NO: 49339 - DNA, 17 bp, Arabidopsis thaliana
atatgcggatttacgaa

SEQ ID NO: 49340 - DNA, 17 bp, Arabidopsis thaliana
atatgcggatttacgat

SEQ ID NO: 49341 - DNA, 17 bp, Arabidopsis thaliana
atatgcggcacaacgtc

SEQ ID NO: 49342 - DNA, 17 bp, Arabidopsis thaliana
atatgcgggctaagctg

SEQ ID NO: 49343 - DNA, 17 bp, Arabidopsis thaliana
atatgcggtacaagtgc

SEQ ID NO: 49344 - DNA, 17 bp, Arabidopsis thaliana
atatgcggtggttttgg

SEQ ID NO: 49345 - DNA, 17 bp, Arabidopsis thaliana
atatgcggttgattacg

SEQ ID NO: 49346 - DNA, 17 bp, Arabidopsis thaliana
atatgcgtctgtttgcg

SEQ ID NO: 49347 - DNA, 17 bp, Arabidopsis thaliana
atatgctatgccacacc

SEQ ID NO: 49348 - DNA, 17 bp, Arabidopsis thaliana
atatgctatgccacatc

SEQ ID NO: 49349 - DNA, 17 bp, Arabidopsis thaliana
atatgctcaagcccgta

SEQ ID NO: 49350 - DNA, 17 bp, Arabidopsis thaliana
atatgctcatcttcatt

SEQ ID NO: 49351 - DNA, 17 bp, Arabidopsis thaliana
atatgctcgctagtcag

SEQ ID NO: 49352 - DNA, 17 bp, Arabidopsis thaliana
atatgctgaaaacactg

SEQ ID NO: 49353 - DNA, 17 bp, Arabidopsis thaliana
atatgctgagattgttt

SEQ ID NO: 49354 - DNA, 17 bp, Arabidopsis thaliana
atatgcttacgagttgc

SEQ ID NO: 49355 - DNA, 17 bp, Arabidopsis thaliana
atatgctttcgggatga

SEQ ID NO: 49356 - DNA, 17 bp, Arabidopsis thaliana
atatgctttcggggtga

SEQ ID NO: 49357 - DNA, 17 bp, Arabidopsis thaliana
atatgctttggttctga

SEQ ID NO: 49358 - DNA, 17 bp, Arabidopsis thaliana
atatggaaagtgttggc

SEQ ID NO: 49359 - DNA, 17 bp, Arabidopsis thaliana
atatggacaacgggctg

SEQ ID NO: 49360 - DNA, 17 bp, Arabidopsis thaliana
atatggacaatgggcta

SEQ ID NO: 49361 - DNA, 17 bp, Arabidopsis thaliana
atatggacaatgggctg

SEQ ID NO: 49362 - DNA, 17 bp, Arabidopsis thaliana
atatggacagtgggcat

SEQ ID NO: 49363 - DNA, 17 bp, Arabidopsis thaliana
atatggacatatccaat

SEQ ID NO: 49364 - DNA, 17 bp, Arabidopsis thaliana
atatggaccgaggtaaa

SEQ ID NO: 49365 - DNA, 17 bp, Arabidopsis thaliana
atatggaccgaggttaa

SEQ ID NO: 49366 - DNA, 17 bp, Arabidopsis thaliana
atatggaccgtggtata

SEQ ID NO: 49367 - DNA, 17 bp, Arabidopsis thaliana
atatggacctctccacc

SEQ ID NO: 49368 - DNA, 17 bp, Arabidopsis thaliana
atatggactaatcggcc

SEQ ID NO: 49369 - DNA, 17 bp, Arabidopsis thaliana
atatggacttcggctaa

SEQ ID NO: 49370 - DNA, 17 bp, Arabidopsis thaliana
atatggacttcggctac

SEQ ID NO: 49371 - DNA, 17 bp, Arabidopsis thaliana
atatggactttggctac

SEQ ID NO: 49372 - DNA, 17 bp, Arabidopsis thaliana
atatggactttggttac

SEQ ID NO: 49373 - DNA, 17 bp, Arabidopsis thaliana
atatggagagagttgac

SEQ ID NO: 49374 - DNA, 17 bp, Arabidopsis thaliana
atatggagagagttggc

SEQ ID NO: 49375 - DNA, 17 bp, Arabidopsis thaliana
atatggagagtgttggc

SEQ ID NO: 49376 - DNA, 17 bp, Arabidopsis thaliana
atatggattgcaccgct

SEQ ID NO: 49377 - DNA, 17 bp, Arabidopsis thaliana
atatggcaggttttgca

SEQ ID NO: 49378 - DNA, 17 bp, Arabidopsis thaliana
atatggccacgtgtttt

SEQ ID NO: 49379 - DNA, 17 bp, Arabidopsis thaliana
atatggcccatctgcat

SEQ ID NO: 49380 - DNA, 17 bp, Arabidopsis thaliana
atatggcccatctggca

SEQ ID NO: 49381 - DNA, 17 bp, Arabidopsis thaliana
atatggccgaggttttg

SEQ ID NO: 49382 - DNA, 17 bp, Arabidopsis thaliana
atatggcggcttgtaat

SEQ ID NO: 49383 - DNA, 17 bp, Arabidopsis thaliana
atatggctaatccggtt

SEQ ID NO: 49384 - DNA, 17 bp, Arabidopsis thaliana
atatggctctgaaccaa

SEQ ID NO: 49385 - DNA, 17 bp, Arabidopsis thaliana
atatggctgatattccc

SEQ ID NO: 49386 - DNA, 17 bp, Arabidopsis thaliana
atatggctgtgattgct

SEQ ID NO: 49387 - DNA, 17 bp, Arabidopsis thaliana
atatgggaaagctccac

SEQ ID NO: 49388 - DNA, 17 bp, Arabidopsis thaliana
atatgggactcagatca

SEQ ID NO: 49389 - DNA, 17 bp, Arabidopsis thaliana
atatgggattcagtcca

SEQ ID NO: 49390 - DNA, 17 bp, Arabidopsis thaliana
atatgggcaagtccatg

SEQ ID NO: 49391 - DNA, 17 bp, Arabidopsis thaliana
atatgggcctcgtgact

SEQ ID NO: 49392 - DNA, 17 bp, Arabidopsis thaliana
atatgggcctctccacc

SEQ ID NO: 49393 - DNA, 17 bp, Arabidopsis thaliana
atatgggccttgtgact

SEQ ID NO: 49394 - DNA, 17 bp, Arabidopsis thaliana
atatgggctccaacgtt

SEQ ID NO: 49395 - DNA, 17 bp, Arabidopsis thaliana
atatgggctgtaagtta

SEQ ID NO: 49396 - DNA, 17 bp, Arabidopsis thaliana
atatgggcttgaccata

SEQ ID NO: 49397 - DNA, 17 bp, Arabidopsis thaliana
atatgggcttgaccgta

SEQ ID NO: 49398 - DNA, 17 bp, Arabidopsis thaliana
atatgggctttgtccac

SEQ ID NO: 49399 - DNA, 17 bp, Arabidopsis thaliana
atatgggtgtcgaatga

SEQ ID NO: 49400 - DNA, 17 bp, Arabidopsis thaliana
atatgggttgcgtaacc

SEQ ID NO: 49401 - DNA, 17 bp, Arabidopsis thaliana
atatggtatcaaagcaa

SEQ ID NO: 49402 - DNA, 17 bp, Arabidopsis thaliana
atatggtatcagagccc

SEQ ID NO: 49403 - DNA, 17 bp, Arabidopsis thaliana
atatggtatcagagtcc

SEQ ID NO: 49404 - DNA, 17 bp, Arabidopsis thaliana
atatggtatgacgggtt

SEQ ID NO: 49405 - DNA, 17 bp, Arabidopsis thaliana
atatggtatggcgtcag

SEQ ID NO: 49406 - DNA, 17 bp, Arabidopsis thaliana
atatggtcatctcactg

SEQ ID NO: 49407 - DNA, 17 bp, Arabidopsis thaliana
atatggtccaactgcgg

SEQ ID NO: 49408 - DNA, 17 bp, Arabidopsis thaliana
atatggtgagacgggtt

SEQ ID NO: 49409 - DNA, 17 bp, Arabidopsis thaliana
atatggtgcactccgat

SEQ ID NO: 49410 - DNA, 17 bp, Arabidopsis thaliana
atatggtgcagtccgga

SEQ ID NO: 49411 - DNA, 17 bp, Arabidopsis thaliana
atatggtgggacaggtt

SEQ ID NO: 49412 - DNA, 17 bp, Arabidopsis thaliana
atatggtggttgcttcg

SEQ ID NO: 49413 - DNA, 17 bp, Arabidopsis thaliana
atatggtgtgacggctt

SEQ ID NO: 49414 - DNA, 17 bp, Arabidopsis thaliana
atatggttcttccagag

SEQ ID NO: 49415 - DNA, 17 bp, Arabidopsis thaliana
atatggttgagctcaga

SEQ ID NO: 49416 - DNA, 17 bp, Arabidopsis thaliana
atatggtttagtagatc

SEQ ID NO: 49417 - DNA, 17 bp, Arabidopsis thaliana
atatggttttcgcagtg

SEQ ID NO: 49418 - DNA, 17 bp, Arabidopsis thaliana
atatggttttgcggttt

SEQ ID NO: 49419 - DNA, 17 bp, Arabidopsis thaliana
atatgtaatctcctggg

SEQ ID NO: 49420 - DNA, 17 bp, Arabidopsis thaliana
atatgtacagttgaccg

SEQ ID NO: 49421 - DNA, 17 bp, Arabidopsis thaliana
atatgtacagttggccg

SEQ ID NO: 49422 - DNA, 17 bp, Arabidopsis thaliana
atatgtcacgaccgttt

SEQ ID NO: 49423 - DNA, 17 bp, Arabidopsis thaliana
atatgtcaggaccagga

SEQ ID NO: 49424 - DNA, 17 bp, Arabidopsis thaliana
atatgtcaggagcagga

SEQ ID NO: 49425 - DNA, 17 bp, Arabidopsis thaliana
atatgtcaggtgatgag

SEQ ID NO: 49426 - DNA, 17 bp, Arabidopsis thaliana
atatgtccaattagacc

SEQ ID NO: 49427 - DNA, 17 bp, Arabidopsis thaliana
atatgtcccaaccgact

SEQ ID NO: 49428 - DNA, 17 bp, Arabidopsis thaliana
atatgtcccatattctc

SEQ ID NO: 49429 - DNA, 17 bp, Arabidopsis thaliana
atatgtcctccttagta

SEQ ID NO: 49430 - DNA, 17 bp, Arabidopsis thaliana
atatgtcgcaattccct

SEQ ID NO: 49431 - DNA, 17 bp, Arabidopsis thaliana
atatgtcgctacgtcca

SEQ ID NO: 49432 - DNA, 17 bp, Arabidopsis thaliana
atatgtcgtcgcatgtg

SEQ ID NO: 49433 - DNA, 17 bp, Arabidopsis thaliana
atatgtcgtggctagtg

SEQ ID NO: 49434 - DNA, 17 bp, Arabidopsis thaliana
atatgtctgcataggtt

SEQ ID NO: 49435 - DNA, 17 bp, Arabidopsis thaliana
atatgtctggctcatga

SEQ ID NO: 49436 - DNA, 17 bp, Arabidopsis thaliana
atatgtctgtggatgtc

SEQ ID NO: 49437 - DNA, 17 bp, Arabidopsis thaliana
atatgtgccacgtaggc

SEQ ID NO: 49438 - DNA, 17 bp, Arabidopsis thaliana
atatgtgccgaggatag

SEQ ID NO: 49439 - DNA, 17 bp, Arabidopsis thaliana
atatgtgctatatgacg

SEQ ID NO: 49440 - DNA, 17 bp, Arabidopsis thaliana
atatgtgctcaacttta

SEQ ID NO: 49441 - DNA, 17 bp, Arabidopsis thaliana
atatgtgggccctgttc

SEQ ID NO: 49442 - DNA, 17 bp, Arabidopsis thaliana
atatgtggtgagcctgt

SEQ ID NO: 49443 - DNA, 17 bp, Arabidopsis thaliana
atatgtgtagaacgaag

SEQ ID NO: 49444 - DNA, 17 bp, Arabidopsis thaliana
atatgtgttctggaacc

SEQ ID NO: 49445 - DNA, 17 bp, Arabidopsis thaliana
atatgtgtttgtgcgcg

SEQ ID NO: 49446 - DNA, 17 bp, Arabidopsis thaliana
atatgttaagtccatgg

SEQ ID NO: 49447 - DNA, 17 bp, Arabidopsis thaliana
atatgttaccgcgatgg

SEQ ID NO: 49448 - DNA, 17 bp, Arabidopsis thaliana
atatgttacggctgagt

SEQ ID NO: 49449 - DNA, 17 bp, Arabidopsis thaliana
atatgttatggtgccac

SEQ ID NO: 49450 - DNA, 17 bp, Arabidopsis thaliana
atatgttcaagcccgca

SEQ ID NO: 49451 - DNA, 17 bp, Arabidopsis thaliana
atatgttcatgtacaac

SEQ ID NO: 49452 - DNA, 17 bp, Arabidopsis thaliana
atatgttcgggtacttg

SEQ ID NO: 49453 - DNA, 17 bp, Arabidopsis thaliana
atatgttctgagactac

SEQ ID NO: 49454 - DNA, 17 bp, Arabidopsis thaliana
atatgttctgttgctca

SEQ ID NO: 49455 - DNA, 17 bp, Arabidopsis thaliana
atatgttcttacctgac

SEQ ID NO: 49456 - DNA, 17 bp, Arabidopsis thaliana
atatgttgactgggctt

SEQ ID NO: 49457 - DNA, 17 bp, Arabidopsis thaliana
atatgttgtcgctggtt

SEQ ID NO: 49458 - DNA, 17 bp, Arabidopsis thaliana
atatgttgtggtttcgg

SEQ ID NO: 49459 - DNA, 17 bp, Arabidopsis thaliana
atatgttgttgtgatga

SEQ ID NO: 49460 - DNA, 17 bp, Arabidopsis thaliana
atatgtttgtgattccg

SEQ ID NO: 49461 - DNA, 17 bp, Arabidopsis thaliana
atatgttttttcaggaa

SEQ ID NO: 49462 - DNA, 17 bp, Arabidopsis thaliana
atattaaaatgcgggct

SEQ ID NO: 49463 - DNA, 17 bp, Arabidopsis thaliana
atattaagaggctctgg

SEQ ID NO: 49464 - DNA, 17 bp, Arabidopsis thaliana
atattaagcgggtctag

SEQ ID NO: 49465 - DNA, 17 bp, Arabidopsis thaliana
atattacaatgcgggct

SEQ ID NO: 49466 - DNA, 17 bp, Arabidopsis thaliana
atattacacatcaaact

SEQ ID NO: 49467 - DNA, 17 bp, Arabidopsis thaliana
atattacatgatgtggt

SEQ ID NO: 49468 - DNA, 17 bp, Arabidopsis thaliana
atattacatgcggatcc

SEQ ID NO: 49469 - DNA, 17 bp, Arabidopsis thaliana
atattacatgctgtggt

SEQ ID NO: 49470 - DNA, 17 bp, Arabidopsis thaliana
atattacatgttgtggt

SEQ ID NO: 49471 - DNA, 17 bp, Arabidopsis thaliana
atattacccggggtcca

SEQ ID NO: 49472 - DNA, 17 bp, Arabidopsis thaliana
atattacgaatgaattt

SEQ ID NO: 49473 - DNA, 17 bp, Arabidopsis thaliana
atattacgactgagttt

SEQ ID NO: 49474 - DNA, 17 bp, Arabidopsis thaliana
atattacggacccaaaa

SEQ ID NO: 49475 - DNA, 17 bp, Arabidopsis thaliana
atattagaccgctttgt

SEQ ID NO: 49476 - DNA, 17 bp, Arabidopsis thaliana
atattagactgtggctt

SEQ ID NO: 49477 - DNA, 17 bp, Arabidopsis thaliana
atattagactgtgggct

SEQ ID NO: 49478 - DNA, 17 bp, Arabidopsis thaliana
atattagagtgtgggct

SEQ ID NO: 49479 - DNA, 17 bp, Arabidopsis thaliana
atattaggattcatccc

SEQ ID NO: 49480 - DNA, 17 bp, Arabidopsis thaliana
atattaggttcgatgtc

SEQ ID NO: 49481 - DNA, 17 bp, Arabidopsis thaliana
atattagttgtcttagg

SEQ ID NO: 49482 - DNA, 17 bp, Arabidopsis thaliana
atattagtttcgtccca

SEQ ID NO: 49483 - DNA, 17 bp, Arabidopsis thaliana
atattagtttcgtctca

SEQ ID NO: 49484 - DNA, 17 bp, Arabidopsis thaliana
atattatccaaccgttt

SEQ ID NO: 49485 - DNA, 17 bp, Arabidopsis thaliana
atattatctgcggacaa

SEQ ID NO: 49486 - DNA, 17 bp, Arabidopsis thaliana
atattatttgtggggcg

SEQ ID NO: 49487 - DNA, 17 bp, Arabidopsis thaliana
atattcaaggttcgcaa

SEQ ID NO: 49488 - DNA, 17 bp, Arabidopsis thaliana
atattcaatcatgttgc

SEQ ID NO: 49489 - DNA, 17 bp, Arabidopsis thaliana
atattcaccagcctcgc

SEQ ID NO: 49490 - DNA, 17 bp, Arabidopsis thaliana
atattcactccaaattg

SEQ ID NO: 49491 - DNA, 17 bp, Arabidopsis thaliana
atattcactctaaattg

SEQ ID NO: 49492 - DNA, 17 bp, Arabidopsis thaliana
atattcagaattaggcc

SEQ ID NO: 49493 - DNA, 17 bp, Arabidopsis thaliana
atattcagagatcgctg

SEQ ID NO: 49494 - DNA, 17 bp, Arabidopsis thaliana
atattcagatcaggcat

SEQ ID NO: 49495 - DNA, 17 bp, Arabidopsis thaliana
atattcagatcaggtga

SEQ ID NO: 49496 - DNA, 17 bp, Arabidopsis thaliana
atattcagatttgcctc

SEQ ID NO: 49497 - DNA, 17 bp, Arabidopsis thaliana
atattcagccaattttt

SEQ ID NO: 49498 - DNA, 17 bp, Arabidopsis thaliana
atattcaggtttttccg

SEQ ID NO: 49499 - DNA, 17 bp, Arabidopsis thaliana
atattcagtattttccg

SEQ ID NO: 49500 - DNA, 17 bp, Arabidopsis thaliana
atattcagtctctcccc

SEQ ID NO: 49501 - DNA, 17 bp, Arabidopsis thaliana
atattcatcagcatgac

SEQ ID NO: 49502 - DNA, 17 bp, Arabidopsis thaliana
atattcatctcaaagta

SEQ ID NO: 49503 - DNA, 17 bp, Arabidopsis thaliana
atattcatctttcgcgt

SEQ ID NO: 49504 - DNA, 17 bp, Arabidopsis thaliana
atattcatgtaccgtgc

SEQ ID NO: 49505 - DNA, 17 bp, Arabidopsis thaliana
atattccaaattttgtg

SEQ ID NO: 49506 - DNA, 17 bp, Arabidopsis thaliana
atattccaaggctcgct

SEQ ID NO: 49507 - DNA, 17 bp, Arabidopsis thaliana
atattccattgggccaa

SEQ ID NO: 49508 - DNA, 17 bp, Arabidopsis thaliana
atattcccggctggtgc

SEQ ID NO: 49509 - DNA, 17 bp, Arabidopsis thaliana
atattccgagcggttta

SEQ ID NO: 49510 - DNA, 17 bp, Arabidopsis thaliana
atattccgggtgtgcca

SEQ ID NO: 49511 - DNA, 17 bp, Arabidopsis thaliana
atattccgtgctacggc

SEQ ID NO: 49512 - DNA, 17 bp, Arabidopsis thaliana
atattcctcagcaggca

SEQ ID NO: 49513 - DNA, 17 bp, Arabidopsis thaliana
atattcctgaacttggg

SEQ ID NO: 49514 - DNA, 17 bp, Arabidopsis thaliana
atattcctgagttcaga

SEQ ID NO: 49515 - DNA, 17 bp, Arabidopsis thaliana
atattcgaacccgattg

SEQ ID NO: 49516 - DNA, 17 bp, Arabidopsis thaliana
atattcgaagtcgatct

SEQ ID NO: 49517 - DNA, 17 bp, Arabidopsis thaliana
atattcgacgcttttag

SEQ ID NO: 49518 - DNA, 17 bp, Arabidopsis thaliana
atattcgactccaaaac

SEQ ID NO: 49519 - DNA, 17 bp, Arabidopsis thaliana
atattcgagtgagtgtt

SEQ ID NO: 49520 - DNA, 17 bp, Arabidopsis thaliana
atattcgcttcgtgccc

SEQ ID NO: 49521 - DNA, 17 bp, Arabidopsis thaliana
atattcgcttgagacgt

SEQ ID NO: 49522 - DNA, 17 bp, Arabidopsis thaliana
atattcggactaaaacg

SEQ ID NO: 49523 - DNA, 17 bp, Arabidopsis thaliana
atattcggactaaaact

SEQ ID NO: 49524 - DNA, 17 bp, Arabidopsis thaliana
atattcggattcggatc

SEQ ID NO: 49525 - DNA, 17 bp, Arabidopsis thaliana
atattcggtgtgattgg

SEQ ID NO: 49526 - DNA, 17 bp, Arabidopsis thaliana
atattcgtcagggtcca

SEQ ID NO: 49527 - DNA, 17 bp, Arabidopsis thaliana
atattcgtcattgcgtg

SEQ ID NO: 49528 - DNA, 17 bp, Arabidopsis thaliana
atattcgtgccccacgg

SEQ ID NO: 49529 - DNA, 17 bp, Arabidopsis thaliana
atattcgtgcctagatc

SEQ ID NO: 49530 - DNA, 17 bp, Arabidopsis thaliana
atattctaagtacgcag

SEQ ID NO: 49531 - DNA, 17 bp, Arabidopsis thaliana
atattctattcttccgg

SEQ ID NO: 49532 - DNA, 17 bp, Arabidopsis thaliana
atattctcacgttcagc

SEQ ID NO: 49533 - DNA, 17 bp, Arabidopsis thaliana
atattctccagcaggta

SEQ ID NO: 49534 - DNA, 17 bp, Arabidopsis thaliana
atattctcgtaacgcgt

SEQ ID NO: 49535 - DNA, 17 bp, Arabidopsis thaliana
atattctctgatgtttg

SEQ ID NO: 49536 - DNA, 17 bp, Arabidopsis thaliana
atattctgagtatcgac

SEQ ID NO: 49537 - DNA, 17 bp, Arabidopsis thaliana
atattctgcccatgtcg

SEQ ID NO: 49538 - DNA, 17 bp, Arabidopsis thaliana
atattctgcggcaggtt

SEQ ID NO: 49539 - DNA, 17 bp, Arabidopsis thaliana
atattctggtatacggc

SEQ ID NO: 49540 - DNA, 17 bp, Arabidopsis thaliana
atattctggtcgcgaag

SEQ ID NO: 49541 - DNA, 17 bp, Arabidopsis thaliana
atattctggtcgggttc

SEQ ID NO: 49542 - DNA, 17 bp, Arabidopsis thaliana
atattctggtgtcctag

SEQ ID NO: 49543 - DNA, 17 bp, Arabidopsis thaliana
atattctggtgtcctgg

SEQ ID NO: 49544 - DNA, 17 bp, Arabidopsis thaliana
atattctggtgtcttag

SEQ ID NO: 49545 - DNA, 17 bp, Arabidopsis thaliana
atattctgtagcgtccg

SEQ ID NO: 49546 - DNA, 17 bp, Arabidopsis thaliana
atattctgtagtccggt

SEQ ID NO: 49547 - DNA, 17 bp, Arabidopsis thaliana
atattcttctgacgatt

SEQ ID NO: 49548 - DNA, 17 bp, Arabidopsis thaliana
atattgaaccgatgacg

SEQ ID NO: 49549 - DNA, 17 bp, Arabidopsis thaliana
atattgaacctggcaca

SEQ ID NO: 49550 - DNA, 17 bp, Arabidopsis thaliana
atattgacaaacacccg

SEQ ID NO: 49551 - DNA, 17 bp, Arabidopsis thaliana
atattgacactgcgggt

SEQ ID NO: 49552 - DNA, 17 bp, Arabidopsis thaliana
atattgaccaacacccg

SEQ ID NO: 49553 - DNA, 17 bp, Arabidopsis thaliana
atattgaccaacaccgg

SEQ ID NO: 49554 - DNA, 17 bp, Arabidopsis thaliana
atattgaccaacgttga

SEQ ID NO: 49555 - DNA, 17 bp, Arabidopsis thaliana
atattgacccgcggtta

SEQ ID NO: 49556 - DNA, 17 bp, Arabidopsis thaliana
atattgaccgccggtac

SEQ ID NO: 49557 - DNA, 17 bp, Arabidopsis thaliana
atattgacggatcatct

SEQ ID NO: 49558 - DNA, 17 bp, Arabidopsis thaliana
atattgactagggaaat

SEQ ID NO: 49559 - DNA, 17 bp, Arabidopsis thaliana
atattgatctggttcct

SEQ ID NO: 49560 - DNA, 17 bp, Arabidopsis thaliana
atattgattaacgcctt

SEQ ID NO: 49561 - DNA, 17 bp, Arabidopsis thaliana
atattgattatctgcgc

SEQ ID NO: 49562 - DNA, 17 bp, Arabidopsis thaliana
atattgcaaaggattga

SEQ ID NO: 49563 - DNA, 17 bp, Arabidopsis thaliana
atattgcacccgctggt

SEQ ID NO: 49564 - DNA, 17 bp, Arabidopsis thaliana
atattgcagaatacatg

SEQ ID NO: 49565 - DNA, 17 bp, Arabidopsis thaliana
atattgcagcctttgca

SEQ ID NO: 49566 - DNA, 17 bp, Arabidopsis thaliana
atattgcagcggcaccg

SEQ ID NO: 49567 - DNA, 17 bp, Arabidopsis thaliana
atattgcccacttgttg

SEQ ID NO: 49568 - DNA, 17 bp, Arabidopsis thaliana
atattgcccgcgcaggt

SEQ ID NO: 49569 - DNA, 17 bp, Arabidopsis thaliana
atattgccgtctcaagt

SEQ ID NO: 49570 - DNA, 17 bp, Arabidopsis thaliana
atattgccgtgcaattt

SEQ ID NO: 49571 - DNA, 17 bp, Arabidopsis thaliana
atattgcgacttgttca

SEQ ID NO: 49572 - DNA, 17 bp, Arabidopsis thaliana
atattgctctgcggcca

SEQ ID NO: 49573 - DNA, 17 bp, Arabidopsis thaliana
atattgctgttgcggcc

SEQ ID NO: 49574 - DNA, 17 bp, Arabidopsis thaliana
atattggaagaaaacgc

SEQ ID NO: 49575 - DNA, 17 bp, Arabidopsis thaliana
atattggacctgttcgt

SEQ ID NO: 49576 - DNA, 17 bp, Arabidopsis thaliana
atattggattcactcct

SEQ ID NO: 49577 - DNA, 17 bp, Arabidopsis thaliana
atattggattttgaagt

SEQ ID NO: 49578 - DNA, 17 bp, Arabidopsis thaliana
atattggcaagacccgg

SEQ ID NO: 49579 - DNA, 17 bp, Arabidopsis thaliana
atattggcggatctaga

SEQ ID NO: 49580 - DNA, 17 bp, Arabidopsis thaliana
atattggcttatctctg

SEQ ID NO: 49581 - DNA, 17 bp, Arabidopsis thaliana
atattggcttctaccgc

SEQ ID NO: 49582 - DNA, 17 bp, Arabidopsis thaliana
atattggcttgcgatgt

SEQ ID NO: 49583 - DNA, 17 bp, Arabidopsis thaliana
atattggctttgaatgg

SEQ ID NO: 49584 - DNA, 17 bp, Arabidopsis thaliana
atattgggaactgacaa

SEQ ID NO: 49585 - DNA, 17 bp, Arabidopsis thaliana
atattgggactcaggtt

SEQ ID NO: 49586 - DNA, 17 bp, Arabidopsis thaliana
atattggtcataagacc

SEQ ID NO: 49587 - DNA, 17 bp, Arabidopsis thaliana
atattggtctcacattt

SEQ ID NO: 49588 - DNA, 17 bp, Arabidopsis thaliana
atattggtgcggttcaa

SEQ ID NO: 49589 - DNA, 17 bp, Arabidopsis thaliana
atattggtgcttttcca

SEQ ID NO: 49590 - DNA, 17 bp, Arabidopsis thaliana
atattggtttgtgagac

SEQ ID NO: 49591 - DNA, 17 bp, Arabidopsis thaliana
atattgtcacccgattt

SEQ ID NO: 49592 - DNA, 17 bp, Arabidopsis thaliana
atattgtccccgcggta

SEQ ID NO: 49593 - DNA, 17 bp, Arabidopsis thaliana
atattgtccgtggacaa

SEQ ID NO: 49594 - DNA, 17 bp, Arabidopsis thaliana
atattgtcgttggttgc

SEQ ID NO: 49595 - DNA, 17 bp, Arabidopsis thaliana
atattgtctctggttac

SEQ ID NO: 49596 - DNA, 17 bp, Arabidopsis thaliana
atattgtgcgaccgaat

SEQ ID NO: 49597 - DNA, 17 bp, Arabidopsis thaliana
atattgtggtttcgggc

SEQ ID NO: 49598 - DNA, 17 bp, Arabidopsis thaliana
atattgtgtttgggccg

SEQ ID NO: 49599 - DNA, 17 bp, Arabidopsis thaliana
atattgttactcagggc

SEQ ID NO: 49600 - DNA, 17 bp, Arabidopsis thaliana
atattgttcactgttgc

SEQ ID NO: 49601 - DNA, 17 bp, Arabidopsis thaliana
atattgttgtgagcaag

SEQ ID NO: 49602 - DNA, 17 bp, Arabidopsis thaliana
atattgttgtgagcatt

SEQ ID NO: 49603 - DNA, 17 bp, Arabidopsis thaliana
atattgtttcaactggg

SEQ ID NO: 49604 - DNA, 17 bp, Arabidopsis thaliana
atatttaagactttggg

SEQ ID NO: 49605 - DNA, 17 bp, Arabidopsis thaliana
atatttagattcaacac

SEQ ID NO: 49606 - DNA, 17 bp, Arabidopsis thaliana
atatttagggatgtcaa

SEQ ID NO: 49607 - DNA, 17 bp, Arabidopsis thaliana
atatttcactgtccatc

SEQ ID NO: 49608 - DNA, 17 bp, Arabidopsis thaliana
atatttccatccattgc

SEQ ID NO: 49609 - DNA, 17 bp, Arabidopsis thaliana
atatttccatctttcgc

SEQ ID NO: 49610 - DNA, 17 bp, Arabidopsis thaliana
atatttccccccatcga

SEQ ID NO: 49611 - DNA, 17 bp, Arabidopsis thaliana
atatttccgagttgttg

SEQ ID NO: 49612 - DNA, 17 bp, Arabidopsis thaliana
atatttcctgagaatac

SEQ ID NO: 49613 - DNA, 17 bp, Arabidopsis thaliana
atatttcgaaccgcaga

SEQ ID NO: 49614 - DNA, 17 bp, Arabidopsis thaliana
atatttcgcaagatagt

SEQ ID NO: 49615 - DNA, 17 bp, Arabidopsis thaliana
atatttcgctcaagctg

SEQ ID NO: 49616 - DNA, 17 bp, Arabidopsis thaliana
atatttcgctcaaggtg

SEQ ID NO: 49617 - DNA, 17 bp, Arabidopsis thaliana
atatttcggtgcgtttc

SEQ ID NO: 49618 - DNA, 17 bp, Arabidopsis thaliana
atatttcgttgagttat

SEQ ID NO: 49619 - DNA, 17 bp, Arabidopsis thaliana
atatttctccagatttg

SEQ ID NO: 49620 - DNA, 17 bp, Arabidopsis thaliana
atatttgaacaattttt

SEQ ID NO: 49621 - DNA, 17 bp, Arabidopsis thaliana
atatttgcaactcacac

SEQ ID NO: 49622 - DNA, 17 bp, Arabidopsis thaliana
atatttgcaggttgaag

SEQ ID NO: 49623 - DNA, 17 bp, Arabidopsis thaliana
atatttgccagatgtcg

SEQ ID NO: 49624 - DNA, 17 bp, Arabidopsis thaliana
atatttgcccactggtg

SEQ ID NO: 49625 - DNA, 17 bp, Arabidopsis thaliana
atatttgccctacttgt

SEQ ID NO: 49626 - DNA, 17 bp, Arabidopsis thaliana
atatttgccgccgatga

SEQ ID NO: 49627 - DNA, 17 bp, Arabidopsis thaliana
atatttgccgcctaagt

SEQ ID NO: 49628 - DNA, 17 bp, Arabidopsis thaliana
atatttgccggaaatcc

SEQ ID NO: 49629 - DNA, 17 bp, Arabidopsis thaliana
atatttgcggtacaagt

SEQ ID NO: 49630 - DNA, 17 bp, Arabidopsis thaliana
atatttggcccctcgac

SEQ ID NO: 49631 - DNA, 17 bp, Arabidopsis thaliana
atatttggcgtgctact

SEQ ID NO: 49632 - DNA, 17 bp, Arabidopsis thaliana
atatttggcttaaccgg

SEQ ID NO: 49633 - DNA, 17 bp, Arabidopsis thaliana
atatttgggtaaaagtt

SEQ ID NO: 49634 - DNA, 17 bp, Arabidopsis thaliana
atatttgtcactcgagg

SEQ ID NO: 49635 - DNA, 17 bp, Arabidopsis thaliana
atatttgtccgattttt

SEQ ID NO: 49636 - DNA, 17 bp, Arabidopsis thaliana
atatttgtgaacctaat

SEQ ID NO: 49637 - DNA, 17 bp, Arabidopsis thaliana
atatttgtggatctaat

SEQ ID NO: 49638 - DNA, 17 bp, Arabidopsis thaliana
atatttgttaattgaga

SEQ ID NO: 49639 - DNA, 17 bp, Arabidopsis thaliana
atatttgttcaactaca

SEQ ID NO: 49640 - DNA, 17 bp, Arabidopsis thaliana
atatttgttccgctaga

SEQ ID NO: 49641 - DNA, 17 bp, Arabidopsis thaliana
atatttgttccgctata

SEQ ID NO: 49642 - DNA, 17 bp, Arabidopsis thaliana
atattttactttggcct

SEQ ID NO: 49643 - DNA, 17 bp, Arabidopsis thaliana
atattttagtcgttgcg

SEQ ID NO: 49644 - DNA, 17 bp, Arabidopsis thaliana
atattttcagcaaattc

SEQ ID NO: 49645 - DNA, 17 bp, Arabidopsis thaliana
atattttcatgtgtgtg

SEQ ID NO: 49646 - DNA, 17 bp, Arabidopsis thaliana
atattttccaaatttgc

SEQ ID NO: 49647 - DNA, 17 bp, Arabidopsis thaliana
atattttcgttaggaca

SEQ ID NO: 49648 - DNA, 17 bp, Arabidopsis thaliana
atattttgtgccgccgg

SEQ ID NO: 49649 - DNA, 17 bp, Arabidopsis thaliana
atattttgttcgtcctc

SEQ ID NO: 49650 - DNA, 17 bp, Arabidopsis thaliana
atatttttcctcggatg

SEQ ID NO: 49651 - DNA, 17 bp, Arabidopsis thaliana
atatttttggcaaccga

SEQ ID NO: 49652 - DNA, 17 bp, Arabidopsis thaliana
atatttttgggtctgag

SEQ ID NO: 49653 - DNA, 17 bp, Arabidopsis thaliana
atatttttgggtcttag

SEQ ID NO: 49654 - DNA, 17 bp, Arabidopsis thaliana
atattttttgacatctt

SEQ ID NO: 49655 - DNA, 17 bp, Arabidopsis thaliana
atcaaaaaccgactgct

SEQ ID NO: 49656 - DNA, 17 bp, Arabidopsis thaliana
atcaaaaagttctgggc

SEQ ID NO: 49657 - DNA, 17 bp, Arabidopsis thaliana
atcaaaaccgactatcg

SEQ ID NO: 49658 - DNA, 17 bp, Arabidopsis thaliana
atcaaaaccggtctatg

SEQ ID NO: 49659 - DNA, 17 bp, Arabidopsis thaliana
atcaaaaccgtccatct

SEQ ID NO: 49660 - DNA, 17 bp, Arabidopsis thaliana
atcaaaaccgtcggtta

SEQ ID NO: 49661 - DNA, 17 bp, Arabidopsis thaliana
atcaaaacgggctaaga

SEQ ID NO: 49662 - DNA, 17 bp, Arabidopsis thaliana
atcaaaacgtttatggc

SEQ ID NO: 49663 - DNA, 17 bp, Arabidopsis thaliana
atcaaaacgtttgaccc

SEQ ID NO: 49664 - DNA, 17 bp, Arabidopsis thaliana
atcaaaactaagggtcc

SEQ ID NO: 49665 - DNA, 17 bp, Arabidopsis thaliana
atcaaaactcagattaa

SEQ ID NO: 49666 - DNA, 17 bp, Arabidopsis thaliana
atcaaaactcctggtgt

SEQ ID NO: 49667 - DNA, 17 bp, Arabidopsis thaliana
atcaaaagtccggacac

SEQ ID NO: 49668 - DNA, 17 bp, Arabidopsis thaliana
atcaaaagtgttaattt

SEQ ID NO: 49669 - DNA, 17 bp, Arabidopsis thaliana
atcaaaagtgttgcttt

SEQ ID NO: 49670 - DNA, 17 bp, Arabidopsis thaliana
atcaaaagttcaaaacc

SEQ ID NO: 49671 - DNA, 17 bp, Arabidopsis thaliana
atcaaaagtttcctcgt

SEQ ID NO: 49672 - DNA, 17 bp, Arabidopsis thaliana
atcaaaatttgactaaa

SEQ ID NO: 49673 - DNA, 17 bp, Arabidopsis thaliana
atcaaacagctcgtgct

SEQ ID NO: 49674 - DNA, 17 bp, Arabidopsis thaliana
atcaaacattacgaccg

SEQ ID NO: 49675 - DNA, 17 bp, Arabidopsis thaliana
atcaaacattattccgt

SEQ ID NO: 49676 - DNA, 17 bp, Arabidopsis thaliana
atcaaaccaattgactc

SEQ ID NO: 49677 - DNA, 17 bp, Arabidopsis thaliana
atcaaacccgtcccgcc

SEQ ID NO: 49678 - DNA, 17 bp, Arabidopsis thaliana
atcaaacgattgtgggt

SEQ ID NO: 49679 - DNA, 17 bp, Arabidopsis thaliana
atcaaacgctcaaccag

SEQ ID NO: 49680 - DNA, 17 bp, Arabidopsis thaliana
atcaaacgctcgaccag

SEQ ID NO: 49681 - DNA, 17 bp, Arabidopsis thaliana
atcaaactcacgaccaa

SEQ ID NO: 49682 - DNA, 17 bp, Arabidopsis thaliana
atcaaactctgcgattc

SEQ ID NO: 49683 - DNA, 17 bp, Arabidopsis thaliana
atcaaacttatccgatg

SEQ ID NO: 49684 - DNA, 17 bp, Arabidopsis thaliana
atcaaagaccaatggcc

SEQ ID NO: 49685 - DNA, 17 bp, Arabidopsis thaliana
atcaaagcgaagaacct

SEQ ID NO: 49686 - DNA, 17 bp, Arabidopsis thaliana
atcaaagcgcagagaca

SEQ ID NO: 49687 - DNA, 17 bp, Arabidopsis thaliana
atcaaagcgtcttcaga

SEQ ID NO: 49688 - DNA, 17 bp, Arabidopsis thaliana
atcaaagcgtctttgga

SEQ ID NO: 49689 - DNA, 17 bp, Arabidopsis thaliana
atcaaagcttccgtgtc

SEQ ID NO: 49690 - DNA, 17 bp, Arabidopsis thaliana
atcaaaggcggaccggc

SEQ ID NO: 49691 - DNA, 17 bp, Arabidopsis thaliana
atcaaaggttattcggc

SEQ ID NO: 49692 - DNA, 17 bp, Arabidopsis thaliana
atcaaagtcccagcctc

SEQ ID NO: 49693 - DNA, 17 bp, Arabidopsis thaliana
atcaaagtcctacgctt

SEQ ID NO: 49694 - DNA, 17 bp, Arabidopsis thaliana
atcaaagtctgggtggt

SEQ ID NO: 49695 - DNA, 17 bp, Arabidopsis thaliana
atcaaagtgctaacgac

SEQ ID NO: 49696 - DNA, 17 bp, Arabidopsis thaliana
atcaaagttctgttgaa

SEQ ID NO: 49697 - DNA, 17 bp, Arabidopsis thaliana
atcaaagttctgttgac

SEQ ID NO: 49698 - DNA, 17 bp, Arabidopsis thaliana
atcaaagtttgtcgatg

SEQ ID NO: 49699 - DNA, 17 bp, Arabidopsis thaliana
atcaaagtttttgggtt

SEQ ID NO: 49700 - DNA, 17 bp, Arabidopsis thaliana
atcaaatacttggaccc

SEQ ID NO: 49701 - DNA, 17 bp, Arabidopsis thaliana
atcaaatagcaggttgg

SEQ ID NO: 49702 - DNA, 17 bp, Arabidopsis thaliana
atcaaatatcgaacttc

SEQ ID NO: 49703 - DNA, 17 bp, Arabidopsis thaliana
atcaaatatctctgcgc

SEQ ID NO: 49704 - DNA, 17 bp, Arabidopsis thaliana
atcaaatatgcccacgg

SEQ ID NO: 49705 - DNA, 17 bp, Arabidopsis thaliana
atcaaatcaagccgcca

SEQ ID NO: 49706 - DNA, 17 bp, Arabidopsis thaliana
atcaaatcaagccgctg

SEQ ID NO: 49707 - DNA, 17 bp, Arabidopsis thaliana
atcaaatcttcacagtg

SEQ ID NO: 49708 - DNA, 17 bp, Arabidopsis thaliana
atcaaatcttggaccag

SEQ ID NO: 49709 - DNA, 17 bp, Arabidopsis thaliana
atcaaatgaggccactg

SEQ ID NO: 49710 - DNA, 17 bp, Arabidopsis thaliana
atcaaatgagttatggg

SEQ ID NO: 49711 - DNA, 17 bp, Arabidopsis thaliana
atcaaatgcaaatcgac

SEQ ID NO: 49712 - DNA, 17 bp, Arabidopsis thaliana
atcaaatgcaacttgtg

SEQ ID NO: 49713 - DNA, 17 bp, Arabidopsis thaliana
atcaaatgcaccacgat

SEQ ID NO: 49714 - DNA, 17 bp, Arabidopsis thaliana
atcaaatgcttcaagcc

SEQ ID NO: 49715 - DNA, 17 bp, Arabidopsis thaliana
atcaaatggtccgaagt

SEQ ID NO: 49716 - DNA, 17 bp, Arabidopsis thaliana
atcaaatggtccgcagt

SEQ ID NO: 49717 - DNA, 17 bp, Arabidopsis thaliana
atcaaatgtgagtggcc

SEQ ID NO: 49718 - DNA, 17 bp, Arabidopsis thaliana
atcaaattcgcgggtaa

SEQ ID NO: 49719 - DNA, 17 bp, Arabidopsis thaliana
atcaaattctaggttct

SEQ ID NO: 49720 - DNA, 17 bp, Arabidopsis thaliana
atcaaattgatcaaccg

SEQ ID NO: 49721 - DNA, 17 bp, Arabidopsis thaliana
atcaaatttctgttgac

SEQ ID NO: 49722 - DNA, 17 bp, Arabidopsis thaliana
atcaaatttgctggcat

SEQ ID NO: 49723 - DNA, 17 bp, Arabidopsis thaliana
atcaacaacaaccaggg

SEQ ID NO: 49724 - DNA, 17 bp, Arabidopsis thaliana
atcaacaacagccaggg

SEQ ID NO: 49725 - DNA, 17 bp, Arabidopsis thaliana
atcaacaaggaagtgca

SEQ ID NO: 49726 - DNA, 17 bp, Arabidopsis thaliana
atcaacaatcttatcag

SEQ ID NO: 49727 - DNA, 17 bp, Arabidopsis thaliana
atcaacactcttcgtcc

SEQ ID NO: 49728 - DNA, 17 bp, Arabidopsis thaliana
atcaacagaatctctgc

SEQ ID NO: 49729 - DNA, 17 bp, Arabidopsis thaliana
atcaacagagagaacgc

SEQ ID NO: 49730 - DNA, 17 bp, Arabidopsis thaliana
atcaacagatccgcggg

SEQ ID NO: 49731 - DNA, 17 bp, Arabidopsis thaliana
atcaacagcgtgaaacc

SEQ ID NO: 49732 - DNA, 17 bp, Arabidopsis thaliana
atcaacaggagtctctt

SEQ ID NO: 49733 - DNA, 17 bp, Arabidopsis thaliana
atcaacaggtttccgat

SEQ ID NO: 49734 - DNA, 17 bp, Arabidopsis thaliana
atcaacagtgtgtggac

SEQ ID NO: 49735 - DNA, 17 bp, Arabidopsis thaliana
atcaacatgcaaacgaa

SEQ ID NO: 49736 - DNA, 17 bp, Arabidopsis thaliana
atcaaccaagcctttcc

SEQ ID NO: 49737 - DNA, 17 bp, Arabidopsis thaliana
atcaaccaccgatttgg

SEQ ID NO: 49738 - DNA, 17 bp, Arabidopsis thaliana
atcaaccaggttcgatc

SEQ ID NO: 49739 - DNA, 17 bp, Arabidopsis thaliana
atcaaccattggaccaa

SEQ ID NO: 49740 - DNA, 17 bp, Arabidopsis thaliana
atcaaccgaccttcgat

SEQ ID NO: 49741 - DNA, 17 bp, Arabidopsis thaliana
atcaaccgactttttta

SEQ ID NO: 49742 - DNA, 17 bp, Arabidopsis thaliana
atcaaccgatgtagatg

SEQ ID NO: 49743 - DNA, 17 bp, Arabidopsis thaliana
atcaaccgctaatgtga

SEQ ID NO: 49744 - DNA, 17 bp, Arabidopsis thaliana
atcaaccggcaggtcgc

SEQ ID NO: 49745 - DNA, 17 bp, Arabidopsis thaliana
atcaaccttctgcgttt

SEQ ID NO: 49746 - DNA, 17 bp, Arabidopsis thaliana
atcaacgaactgcagac

SEQ ID NO: 49747 - DNA, 17 bp, Arabidopsis thaliana
atcaacgaagatcagct

SEQ ID NO: 49748 - DNA, 17 bp, Arabidopsis thaliana
atcaacgacagggagac

SEQ ID NO: 49749 - DNA, 17 bp, Arabidopsis thaliana
atcaacgacgatctttg

SEQ ID NO: 49750 - DNA, 17 bp, Arabidopsis thaliana
atcaacgatttaggccc

SEQ ID NO: 49751 - DNA, 17 bp, Arabidopsis thaliana
atcaacgccatagcgat

SEQ ID NO: 49752 - DNA, 17 bp, Arabidopsis thaliana
atcaacgctctgatcct

SEQ ID NO: 49753 - DNA, 17 bp, Arabidopsis thaliana
atcaacggagacaagtg

SEQ ID NO: 49754 - DNA, 17 bp, Arabidopsis thaliana
atcaacggatcagactg

SEQ ID NO: 49755 - DNA, 17 bp, Arabidopsis thaliana
atcaacggccgtgtgat

SEQ ID NO: 49756 - DNA, 17 bp, Arabidopsis thaliana
atcaacggctactgtgc

SEQ ID NO: 49757 - DNA, 17 bp, Arabidopsis thaliana
atcaacggttctgtctt

SEQ ID NO: 49758 - DNA, 17 bp, Arabidopsis thaliana
atcaactacaacctcgc

SEQ ID NO: 49759 - DNA, 17 bp, Arabidopsis thaliana
atcaactagccccgaaa

SEQ ID NO: 49760 - DNA, 17 bp, Arabidopsis thaliana
atcaactcgatgattta

SEQ ID NO: 49761 - DNA, 17 bp, Arabidopsis thaliana
atcaactcgtcgataaa

SEQ ID NO: 49762 - DNA, 17 bp, Arabidopsis thaliana
atcaactcttcaggttt

SEQ ID NO: 49763 - DNA, 17 bp, Arabidopsis thaliana
atcaactctttggtgcg

SEQ ID NO: 49764 - DNA, 17 bp, Arabidopsis thaliana
atcaactctttggttgg

SEQ ID NO: 49765 - DNA, 17 bp, Arabidopsis thaliana
atcaactgacgaggagc

SEQ ID NO: 49766 - DNA, 17 bp, Arabidopsis thaliana
atcaactgcaaaagtga

SEQ ID NO: 49767 - DNA, 17 bp, Arabidopsis thaliana
atcaactgcgcatatag

SEQ ID NO: 49768 - DNA, 17 bp, Arabidopsis thaliana
atcaactgctctgattg

SEQ ID NO: 49769 - DNA, 17 bp, Arabidopsis thaliana
atcaactgctggagtgc

SEQ ID NO: 49770 - DNA, 17 bp, Arabidopsis thaliana
atcaactgtatgtggcc

SEQ ID NO: 49771 - DNA, 17 bp, Arabidopsis thaliana
atcaacttcgtatgccg

SEQ ID NO: 49772 - DNA, 17 bp, Arabidopsis thaliana
atcaacttcgtatgcgc

SEQ ID NO: 49773 - DNA, 17 bp, Arabidopsis thaliana
atcaacttcgtatgcgg

SEQ ID NO: 49774 - DNA, 17 bp, Arabidopsis thaliana
atcaacttcgtatgtgc

SEQ ID NO: 49775 - DNA, 17 bp, Arabidopsis thaliana
atcaacttcgtatgtgg

SEQ ID NO: 49776 - DNA, 17 bp, Arabidopsis thaliana
atcaacttcttatgtgg

SEQ ID NO: 49777 - DNA, 17 bp, Arabidopsis thaliana
atcaacttgagtcatgc

SEQ ID NO: 49778 - DNA, 17 bp, Arabidopsis thaliana
atcaactttcgatggta

SEQ ID NO: 49779 - DNA, 17 bp, Arabidopsis thaliana
atcaagaaacttctgca

SEQ ID NO: 49780 - DNA, 17 bp, Arabidopsis thaliana
atcaagaagctatgact

SEQ ID NO: 49781 - DNA, 17 bp, Arabidopsis thaliana
atcaagaagttatgact

SEQ ID NO: 49782 - DNA, 17 bp, Arabidopsis thaliana
atcaagaataatgtgaa

SEQ ID NO: 49783 - DNA, 17 bp, Arabidopsis thaliana
atcaagaatgactaggc

SEQ ID NO: 49784 - DNA, 17 bp, Arabidopsis thaliana
atcaagacacctttgtt

SEQ ID NO: 49785 - DNA, 17 bp, Arabidopsis thaliana
atcaagaccagcggaga

SEQ ID NO: 49786 - DNA, 17 bp, Arabidopsis thaliana
atcaagacgccacataa

SEQ ID NO: 49787 - DNA, 17 bp, Arabidopsis thaliana
atcaagactacctcgag

SEQ ID NO: 49788 - DNA, 17 bp, Arabidopsis thaliana
atcaagacttgttgcag

SEQ ID NO: 49789 - DNA, 17 bp, Arabidopsis thaliana
atcaagagactggttag

SEQ ID NO: 49790 - DNA, 17 bp, Arabidopsis thaliana
atcaagagagtcggttt

SEQ ID NO: 49791 - DNA, 17 bp, Arabidopsis thaliana
atcaagagcaatttcgt

SEQ ID NO: 49792 - DNA, 17 bp, Arabidopsis thaliana
atcaagagcaccgtcca

SEQ ID NO: 49793 - DNA, 17 bp, Arabidopsis thaliana
atcaagagcgctttcga

SEQ ID NO: 49794 - DNA, 17 bp, Arabidopsis thaliana
atcaagaggtgtaggcc

SEQ ID NO: 49795 - DNA, 17 bp, Arabidopsis thaliana
atcaagatctgtgtcgc

SEQ ID NO: 49796 - DNA, 17 bp, Arabidopsis thaliana
atcaagatggtcaggcc

SEQ ID NO: 49797 - DNA, 17 bp, Arabidopsis thaliana
atcaagattcctgctca

SEQ ID NO: 49798 - DNA, 17 bp, Arabidopsis thaliana
atcaagattgcgttcca

SEQ ID NO: 49799 - DNA, 17 bp, Arabidopsis thaliana
atcaagcaatagtttgc

SEQ ID NO: 49800 - DNA, 17 bp, Arabidopsis thaliana
atcaagcacgtcaattc

SEQ ID NO: 49801 - DNA, 17 bp, Arabidopsis thaliana
atcaagccactccgtag

SEQ ID NO: 49802 - DNA, 17 bp, Arabidopsis thaliana
atcaagcccgtcaattc

SEQ ID NO: 49803 - DNA, 17 bp, Arabidopsis thaliana
atcaagccgccgttgtt

SEQ ID NO: 49804 - DNA, 17 bp, Arabidopsis thaliana
atcaagccgctactcat

SEQ ID NO: 49805 - DNA, 17 bp, Arabidopsis thaliana
atcaagccttgcgattg

SEQ ID NO: 49806 - DNA, 17 bp, Arabidopsis thaliana
atcaagcgattgtgggt

SEQ ID NO: 49807 - DNA, 17 bp, Arabidopsis thaliana
atcaagcgcatggagaa

SEQ ID NO: 49808 - DNA, 17 bp, Arabidopsis thaliana
atcaagcggaacaagaa

SEQ ID NO: 49809 - DNA, 17 bp, Arabidopsis thaliana
atcaagcggaacaagag

SEQ ID NO: 49810 - DNA, 17 bp, Arabidopsis thaliana
atcaagcggattaagcg

SEQ ID NO: 49811 - DNA, 17 bp, Arabidopsis thaliana
atcaagcggttaaagcg

SEQ ID NO: 49812 - DNA, 17 bp, Arabidopsis thaliana
atcaagcgttaatgcaa

SEQ ID NO: 49813 - DNA, 17 bp, Arabidopsis thaliana
atcaagctcgccaaatc

SEQ ID NO: 49814 - DNA, 17 bp, Arabidopsis thaliana
atcaagctgagttcccg

SEQ ID NO: 49815 - DNA, 17 bp, Arabidopsis thaliana
atcaagctgatgggttg

SEQ ID NO: 49816 - DNA, 17 bp, Arabidopsis thaliana
atcaagcttcctgctca

SEQ ID NO: 49817 - DNA, 17 bp, Arabidopsis thaliana
atcaagctttgctagtt

SEQ ID NO: 49818 - DNA, 17 bp, Arabidopsis thaliana
atcaaggaaatcctgcc

SEQ ID NO: 49819 - DNA, 17 bp, Arabidopsis thaliana
atcaaggaactggttag

SEQ ID NO: 49820 - DNA, 17 bp, Arabidopsis thaliana
atcaaggaagtggttaa

SEQ ID NO: 49821 - DNA, 17 bp, Arabidopsis thaliana
atcaaggaagtggttca

SEQ ID NO: 49822 - DNA, 17 bp, Arabidopsis thaliana
atcaaggaatcctgcca

SEQ ID NO: 49823 - DNA, 17 bp, Arabidopsis thaliana
atcaaggatttggtggc

SEQ ID NO: 49824 - DNA, 17 bp, Arabidopsis thaliana
atcaaggccggctctag

SEQ ID NO: 49825 - DNA, 17 bp, Arabidopsis thaliana
atcaaggctcttgctgt

SEQ ID NO: 49826 - DNA, 17 bp, Arabidopsis thaliana
atcaaggctgaggcgta

SEQ ID NO: 49827 - DNA, 17 bp, Arabidopsis thaliana
atcaaggctgaggcgtg

SEQ ID NO: 49828 - DNA, 17 bp, Arabidopsis thaliana
atcaagggactcgccaa

SEQ ID NO: 49829 - DNA, 17 bp, Arabidopsis thaliana
atcaagggactcgccag

SEQ ID NO: 49830 - DNA, 17 bp, Arabidopsis thaliana
atcaagggactcgtcaa

SEQ ID NO: 49831 - DNA, 17 bp, Arabidopsis thaliana
atcaagggactgtcaat

SEQ ID NO: 49832 - DNA, 17 bp, Arabidopsis thaliana
atcaagggctgccagat

SEQ ID NO: 49833 - DNA, 17 bp, Arabidopsis thaliana
atcaaggttgcaaattt

SEQ ID NO: 49834 - DNA, 17 bp, Arabidopsis thaliana
atcaagtacgcattaac

SEQ ID NO: 49835 - DNA, 17 bp, Arabidopsis thaliana
atcaagtacggtgcggt

SEQ ID NO: 49836 - DNA, 17 bp, Arabidopsis thaliana
atcaagtccagaaacaa

SEQ ID NO: 49837 - DNA, 17 bp, Arabidopsis thaliana
atcaagtccagaatcca

SEQ ID NO: 49838 - DNA, 17 bp, Arabidopsis thaliana
atcaagtccaggaacaa

SEQ ID NO: 49839 - DNA, 17 bp, Arabidopsis thaliana
atcaagtccgtcaattc

SEQ ID NO: 49840 - DNA, 17 bp, Arabidopsis thaliana
atcaagtctctaggcgg

SEQ ID NO: 49841 - DNA, 17 bp, Arabidopsis thaliana
atcaagtcttcaaaaaa

SEQ ID NO: 49842 - DNA, 17 bp, Arabidopsis thaliana
atcaagtgactacatcg

SEQ ID NO: 49843 - DNA, 17 bp, Arabidopsis thaliana
atcaagtgcggcttgtg

SEQ ID NO: 49844 - DNA, 17 bp, Arabidopsis thaliana
atcaagtggtttgaacg

SEQ ID NO: 49845 - DNA, 17 bp, Arabidopsis thaliana
atcaagtgttgctgata

SEQ ID NO: 49846 - DNA, 17 bp, Arabidopsis thaliana
atcaagttcgtcttccg

SEQ ID NO: 49847 - DNA, 17 bp, Arabidopsis thaliana
atcaagttgcgttcgcc

SEQ ID NO: 49848 - DNA, 17 bp, Arabidopsis thaliana
atcaagttgtcaaggcg

SEQ ID NO: 49849 - DNA, 17 bp, Arabidopsis thaliana
atcaagtttagctgacc

SEQ ID NO: 49850 - DNA, 17 bp, Arabidopsis thaliana
atcaagtttccggttaa

SEQ ID NO: 49851 - DNA, 17 bp, Arabidopsis thaliana
atcaagtttcctgctaa

SEQ ID NO: 49852 - DNA, 17 bp, Arabidopsis thaliana
atcaagtttcgttgact

SEQ ID NO: 49853 - DNA, 17 bp, Arabidopsis thaliana
atcaagttttgttgact

SEQ ID NO: 49854 - DNA, 17 bp, Arabidopsis thaliana
atcaagtttttgacttt

SEQ ID NO: 49855 - DNA, 17 bp, Arabidopsis thaliana
atcaataatgtgggcac

SEQ ID NO: 49856 - DNA, 17 bp, Arabidopsis thaliana
atcaatattctccgcat

SEQ ID NO: 49857 - DNA, 17 bp, Arabidopsis thaliana
atcaatcacatctccgt

SEQ ID NO: 49858 - DNA, 17 bp, Arabidopsis thaliana
atcaatcctacagttcc

SEQ ID NO: 49859 - DNA, 17 bp, Arabidopsis thaliana
atcaatcgccgaccatg

SEQ ID NO: 49860 - DNA, 17 bp, Arabidopsis thaliana
atcaatcttttctggcc

SEQ ID NO: 49861 - DNA, 17 bp, Arabidopsis thaliana
atcaatgacctcccatt

SEQ ID NO: 49862 - DNA, 17 bp, Arabidopsis thaliana
atcaatgactttcgagg

SEQ ID NO: 49863 - DNA, 17 bp, Arabidopsis thaliana
atcaatgatgattcatc

SEQ ID NO: 49864 - DNA, 17 bp, Arabidopsis thaliana
atcaatgatggtcaaca

SEQ ID NO: 49865 - DNA, 17 bp, Arabidopsis thaliana
atcaatgcgctgaaagt

SEQ ID NO: 49866 - DNA, 17 bp, Arabidopsis thaliana
atcaatggaacctaatt

SEQ ID NO: 49867 - DNA, 17 bp, Arabidopsis thaliana
atcaatggaccgattgt

SEQ ID NO: 49868 - DNA, 17 bp, Arabidopsis thaliana
atcaatggccatggatt

SEQ ID NO: 49869 - DNA, 17 bp, Arabidopsis thaliana
atcaatggcctaacatg

SEQ ID NO: 49870 - DNA, 17 bp, Arabidopsis thaliana
atcaatggctaagcagt

SEQ ID NO: 49871 - DNA, 17 bp, Arabidopsis thaliana
atcaatgtctgttggcc

SEQ ID NO: 49872 - DNA, 17 bp, Arabidopsis thaliana
atcaattacgagatcgg

SEQ ID NO: 49873 - DNA, 17 bp, Arabidopsis thaliana
atcaattgagctaacga

SEQ ID NO: 49874 - DNA, 17 bp, Arabidopsis thaliana
atcaatttcgtatgcgg

SEQ ID NO: 49875 - DNA, 17 bp, Arabidopsis thaliana
atcaatttctggaaggt

SEQ ID NO: 49876 - DNA, 17 bp, Arabidopsis thaliana
atcaattttgttgcctc

SEQ ID NO: 49877 - DNA, 17 bp, Arabidopsis thaliana
atcacaaactcgcagtg

SEQ ID NO: 49878 - DNA, 17 bp, Arabidopsis thaliana
atcacaaatgcaaatgc

SEQ ID NO: 49879 - DNA, 17 bp, Arabidopsis thaliana
atcacaaattccgcagt

SEQ ID NO: 49880 - DNA, 17 bp, Arabidopsis thaliana
atcacaacaggatgaat

SEQ ID NO: 49881 - DNA, 17 bp, Arabidopsis thaliana
atcacaactttaccctc

SEQ ID NO: 49882 - DNA, 17 bp, Arabidopsis thaliana
atcacaagacacgtcag

SEQ ID NO: 49883 - DNA, 17 bp, Arabidopsis thaliana
atcacaagacgcatcag

SEQ ID NO: 49884 - DNA, 17 bp, Arabidopsis thaliana
atcacaagacgcgtcag

SEQ ID NO: 49885 - DNA, 17 bp, Arabidopsis thaliana
atcacaagacttaggct

SEQ ID NO: 49886 - DNA, 17 bp, Arabidopsis thaliana
atcacaagccgccatgc

SEQ ID NO: 49887 - DNA, 17 bp, Arabidopsis thaliana
atcacaagccgccatgt

SEQ ID NO: 49888 - DNA, 17 bp, Arabidopsis thaliana
atcacaagctgacggtc

SEQ ID NO: 49889 - DNA, 17 bp, Arabidopsis thaliana
atcacaagctgctgcat

SEQ ID NO: 49890 - DNA, 17 bp, Arabidopsis thaliana
atcacaagctttgatct

SEQ ID NO: 49891 - DNA, 17 bp, Arabidopsis thaliana
atcacaaggagcacctg

SEQ ID NO: 49892 - DNA, 17 bp, Arabidopsis thaliana
atcacaatccaatgcat

SEQ ID NO: 49893 - DNA, 17 bp, Arabidopsis thaliana
atcacaatgacagtgcc

SEQ ID NO: 49894 - DNA, 17 bp, Arabidopsis thaliana
atcacaattggaggagc

SEQ ID NO: 49895 - DNA, 17 bp, Arabidopsis thaliana
atcacaattgggatgtt

SEQ ID NO: 49896 - DNA, 17 bp, Arabidopsis thaliana
atcacaattgtggcctc

SEQ ID NO: 49897 - DNA, 17 bp, Arabidopsis thaliana
atcacaatttttccgga

SEQ ID NO: 49898 - DNA, 17 bp, Arabidopsis thaliana
atcacacaaaaaggctg

SEQ ID NO: 49899 - DNA, 17 bp, Arabidopsis thaliana
atcacacaatctgagag

SEQ ID NO: 49900 - DNA, 17 bp, Arabidopsis thaliana
atcacacagcggtgtcg

SEQ ID NO: 49901 - DNA, 17 bp, Arabidopsis thaliana
atcacaccacttccatg

SEQ ID NO: 49902 - DNA, 17 bp, Arabidopsis thaliana
atcacaccatatctgcc

SEQ ID NO: 49903 - DNA, 17 bp, Arabidopsis thaliana
atcacaccatatctgct

SEQ ID NO: 49904 - DNA, 17 bp, Arabidopsis thaliana
atcacacctatttggat

SEQ ID NO: 49905 - DNA, 17 bp, Arabidopsis thaliana
atcacaccttggtttat

SEQ ID NO: 49906 - DNA, 17 bp, Arabidopsis thaliana
atcacacgacttctcgc

SEQ ID NO: 49907 - DNA, 17 bp, Arabidopsis thaliana
atcacacgatgattgcg

SEQ ID NO: 49908 - DNA, 17 bp, Arabidopsis thaliana
atcacacgcaggctgca

SEQ ID NO: 49909 - DNA, 17 bp, Arabidopsis thaliana
atcacactatgcggttt

SEQ ID NO: 49910 - DNA, 17 bp, Arabidopsis thaliana
atcacactcttgatcgt

SEQ ID NO: 49911 - DNA, 17 bp, Arabidopsis thaliana
atcacactgatgctgac

SEQ ID NO: 49912 - DNA, 17 bp, Arabidopsis thaliana
atcacactttgcggttt

SEQ ID NO: 49913 - DNA, 17 bp, Arabidopsis thaliana
atcacactttgtggatt

SEQ ID NO: 49914 - DNA, 17 bp, Arabidopsis thaliana
atcacagaatgcggtgt

SEQ ID NO: 49915 - DNA, 17 bp, Arabidopsis thaliana
atcacagacaaaagcca

SEQ ID NO: 49916 - DNA, 17 bp, Arabidopsis thaliana
atcacagacagactcag

SEQ ID NO: 49917 - DNA, 17 bp, Arabidopsis thaliana
atcacagacccgatgga

SEQ ID NO: 49918 - DNA, 17 bp, Arabidopsis thaliana
atcacagactatgtgac

SEQ ID NO: 49919 - DNA, 17 bp, Arabidopsis thaliana
atcacagagaacatcac

SEQ ID NO: 49920 - DNA, 17 bp, Arabidopsis thaliana
atcacagatacccacgg

SEQ ID NO: 49921 - DNA, 17 bp, Arabidopsis thaliana
atcacagatctgtctat

SEQ ID NO: 49922 - DNA, 17 bp, Arabidopsis thaliana
atcacagattgagtatg

SEQ ID NO: 49923 - DNA, 17 bp, Arabidopsis thaliana
atcacagcagtgactgc

SEQ ID NO: 49924 - DNA, 17 bp, Arabidopsis thaliana
atcacagcgatcagcga

SEQ ID NO: 49925 - DNA, 17 bp, Arabidopsis thaliana
atcacagctcatgtgca

SEQ ID NO: 49926 - DNA, 17 bp, Arabidopsis thaliana
atcacagctgcggtctt

SEQ ID NO: 49927 - DNA, 17 bp, Arabidopsis thaliana
atcacaggaacggtacc

SEQ ID NO: 49928 - DNA, 17 bp, Arabidopsis thaliana
atcacaggatcttcccc

SEQ ID NO: 49929 - DNA, 17 bp, Arabidopsis thaliana
atcacaggatggttggg

SEQ ID NO: 49930 - DNA, 17 bp, Arabidopsis thaliana
atcacaggcagatgaca

SEQ ID NO: 49931 - DNA, 17 bp, Arabidopsis thaliana
atcacagggtatgatcc

SEQ ID NO: 49932 - DNA, 17 bp, Arabidopsis thaliana
atcacagggtcccttct

SEQ ID NO: 49933 - DNA, 17 bp, Arabidopsis thaliana
atcacaggtttacaggt

SEQ ID NO: 49934 - DNA, 17 bp, Arabidopsis thaliana
atcacaggtttacgttt

SEQ ID NO: 49935 - DNA, 17 bp, Arabidopsis thaliana
atcacaggttttggttt

SEQ ID NO: 49936 - DNA, 17 bp, Arabidopsis thaliana
atcacagtatctgggac

SEQ ID NO: 49937 - DNA, 17 bp, Arabidopsis thaliana
atcacagtggttgctcg

SEQ ID NO: 49938 - DNA, 17 bp, Arabidopsis thaliana
atcacagtgtggtctgg

SEQ ID NO: 49939 - DNA, 17 bp, Arabidopsis thaliana
atcacagttcaagaggt

SEQ ID NO: 49940 - DNA, 17 bp, Arabidopsis thaliana
atcacagttcagtgatt

SEQ ID NO: 49941 - DNA, 17 bp, Arabidopsis thaliana
atcacagttgtgtgatg

SEQ ID NO: 49942 - DNA, 17 bp, Arabidopsis thaliana
atcacagtttggcgtcg

SEQ ID NO: 49943 - DNA, 17 bp, Arabidopsis thaliana
atcacagtttgtggaag

SEQ ID NO: 49944 - DNA, 17 bp, Arabidopsis thaliana
atcacataaaccgattg

SEQ ID NO: 49945 - DNA, 17 bp, Arabidopsis thaliana
atcacataccaagtttg

SEQ ID NO: 49946 - DNA, 17 bp, Arabidopsis thaliana
atcacatagacaattgt

SEQ ID NO: 49947 - DNA, 17 bp, Arabidopsis thaliana
atcacataggtcctcaa

SEQ ID NO: 49948 - DNA, 17 bp, Arabidopsis thaliana
atcacatcacgccaaat

SEQ ID NO: 49949 - DNA, 17 bp, Arabidopsis thaliana
atcacatcagccaaaag

SEQ ID NO: 49950 - DNA, 17 bp, Arabidopsis thaliana
atcacatcataccagat

SEQ ID NO: 49951 - DNA, 17 bp, Arabidopsis thaliana
atcacatccatctcgcg

SEQ ID NO: 49952 - DNA, 17 bp, Arabidopsis thaliana
atcacatccgtctcatc

SEQ ID NO: 49953 - DNA, 17 bp, Arabidopsis thaliana
atcacatccgttccatc

SEQ ID NO: 49954 - DNA, 17 bp, Arabidopsis thaliana
atcacatcctacagttg

SEQ ID NO: 49955 - DNA, 17 bp, Arabidopsis thaliana
atcacatctaccctcta

SEQ ID NO: 49956 - DNA, 17 bp, Arabidopsis thaliana
atcacatctcatctgtt

SEQ ID NO: 49957 - DNA, 17 bp, Arabidopsis thaliana
atcacatctccgttgag

SEQ ID NO: 49958 - DNA, 17 bp, Arabidopsis thaliana
atcacatgacaagtttg

SEQ ID NO: 49959 - DNA, 17 bp, Arabidopsis thaliana
atcacatgacctgaaaa

SEQ ID NO: 49960 - DNA, 17 bp, Arabidopsis thaliana
atcacatgccaagtttg

SEQ ID NO: 49961 - DNA, 17 bp, Arabidopsis thaliana
atcacatgccaagtttt

SEQ ID NO: 49962 - DNA, 17 bp, Arabidopsis thaliana
atcacatgctaagtttg

SEQ ID NO: 49963 - DNA, 17 bp, Arabidopsis thaliana
atcacatgctactttgc

SEQ ID NO: 49964 - DNA, 17 bp, Arabidopsis thaliana
atcacatgctatggttt

SEQ ID NO: 49965 - DNA, 17 bp, Arabidopsis thaliana
atcacatgtcaagtttg

SEQ ID NO: 49966 - DNA, 17 bp, Arabidopsis thaliana
atcacatgttgcaattc

SEQ ID NO: 49967 - DNA, 17 bp, Arabidopsis thaliana
atcacattcatctgcag

SEQ ID NO: 49968 - DNA, 17 bp, Arabidopsis thaliana
atcaccaaaacttcttc

SEQ ID NO: 49969 - DNA, 17 bp, Arabidopsis thaliana
atcaccaaatctctacg

SEQ ID NO: 49970 - DNA, 17 bp, Arabidopsis thaliana
atcaccaaatctgactt

SEQ ID NO: 49971 - DNA, 17 bp, Arabidopsis thaliana
atcaccaactttcggct

SEQ ID NO: 49972 - DNA, 17 bp, Arabidopsis thaliana
atcaccaagcgtggctg

SEQ ID NO: 49973 - DNA, 17 bp, Arabidopsis thaliana
atcaccaagtgcgttga

SEQ ID NO: 49974 - DNA, 17 bp, Arabidopsis thaliana
atcaccaatcagagcca

SEQ ID NO: 49975 - DNA, 17 bp, Arabidopsis thaliana
atcaccaatggattatt

SEQ ID NO: 49976 - DNA, 17 bp, Arabidopsis thaliana
atcaccaattgtgtact

SEQ ID NO: 49977 - DNA, 17 bp, Arabidopsis thaliana
atcaccacactgtctgt

SEQ ID NO: 49978 - DNA, 17 bp, Arabidopsis thaliana
atcaccacagtgagtac

SEQ ID NO: 49979 - DNA, 17 bp, Arabidopsis thaliana
atcaccaccactgggtc

SEQ ID NO: 49980 - DNA, 17 bp, Arabidopsis thaliana
atcaccaccatgattct

SEQ ID NO: 49981 - DNA, 17 bp, Arabidopsis thaliana
atcaccaccccagccca

SEQ ID NO: 49982 - DNA, 17 bp, Arabidopsis thaliana
atcaccacctgggtttg

SEQ ID NO: 49983 - DNA, 17 bp, Arabidopsis thaliana
atcaccagaaattgcgt

SEQ ID NO: 49984 - DNA, 17 bp, Arabidopsis thaliana
atcaccagacggtcact

SEQ ID NO: 49985 - DNA, 17 bp, Arabidopsis thaliana
atcaccagatactctcc

SEQ ID NO: 49986 - DNA, 17 bp, Arabidopsis thaliana
atcaccagggaccaacg

SEQ ID NO: 49987 - DNA, 17 bp, Arabidopsis thaliana
atcaccagggaccagcg

SEQ ID NO: 49988 - DNA, 17 bp, Arabidopsis thaliana
atcaccagggaccatcg

SEQ ID NO: 49989 - DNA, 17 bp, Arabidopsis thaliana
atcaccagtcgcgtatt

SEQ ID NO: 49990 - DNA, 17 bp, Arabidopsis thaliana
atcaccagtgattttat

SEQ ID NO: 49991 - DNA, 17 bp, Arabidopsis thaliana
atcaccagtgttccaaa

SEQ ID NO: 49992 - DNA, 17 bp, Arabidopsis thaliana
atcaccatcattgccaa

SEQ ID NO: 49993 - DNA, 17 bp, Arabidopsis thaliana
atcaccatcgcaggtat

SEQ ID NO: 49994 - DNA, 17 bp, Arabidopsis thaliana
atcaccatggcctgttc

SEQ ID NO: 49995 - DNA, 17 bp, Arabidopsis thaliana
atcaccattatatcttt

SEQ ID NO: 49996 - DNA, 17 bp, Arabidopsis thaliana
atcaccattcaaatcct

SEQ ID NO: 49997 - DNA, 17 bp, Arabidopsis thaliana
atcaccattgacgagag

SEQ ID NO: 49998 - DNA, 17 bp, Arabidopsis thaliana
atcaccattggagatat

SEQ ID NO: 49999 - DNA, 17 bp, Arabidopsis thaliana
atcaccattggagatgt

SEQ ID NO: 50000 - DNA, 17 bp, Arabidopsis thaliana
atcaccattgttgagcc

SEQ ID NO: 50001 - DNA, 17 bp, Arabidopsis thaliana
atcacccactgtaacct

SEQ ID NO: 50002 - DNA, 17 bp, Arabidopsis thaliana
atcaccccaactttaca

SEQ ID NO: 50003 - DNA, 17 bp, Arabidopsis thaliana
atcacccgtagtgtgac

SEQ ID NO: 50004 - DNA, 17 bp, Arabidopsis thaliana
atcaccctctgggagag

SEQ ID NO: 50005 - DNA, 17 bp, Arabidopsis thaliana
atcaccgaacgattgcg

SEQ ID NO: 50006 - DNA, 17 bp, Arabidopsis thaliana
atcaccgaagacccaaa

SEQ ID NO: 50007 - DNA, 17 bp, Arabidopsis thaliana
atcaccgacaggaagta

SEQ ID NO: 50008 - DNA, 17 bp, Arabidopsis thaliana
atcaccgactactaaaa

SEQ ID NO: 50009 - DNA, 17 bp, Arabidopsis thaliana
atcaccgagttgtatgt

SEQ ID NO: 50010 - DNA, 17 bp, Arabidopsis thaliana
atcaccgataacttctg

SEQ ID NO: 50011 - DNA, 17 bp, Arabidopsis thaliana
atcaccgcacgcgtgag

SEQ ID NO: 50012 - DNA, 17 bp, Arabidopsis thaliana
atcaccgccggcactcc

SEQ ID NO: 50013 - DNA, 17 bp, Arabidopsis thaliana
atcaccgcctcatagct

SEQ ID NO: 50014 - DNA, 17 bp, Arabidopsis thaliana
atcaccgctacggttta

SEQ ID NO: 50015 - DNA, 17 bp, Arabidopsis thaliana
atcaccgctcttttgta

SEQ ID NO: 50016 - DNA, 17 bp, Arabidopsis thaliana
atcaccggatgtatgca

SEQ ID NO: 50017 - DNA, 17 bp, Arabidopsis thaliana
atcaccggccggttcat

SEQ ID NO: 50018 - DNA, 17 bp, Arabidopsis thaliana
atcaccggggactgcgg

SEQ ID NO: 50019 - DNA, 17 bp, Arabidopsis thaliana
atcaccggtcggctcat

SEQ ID NO: 50020 - DNA, 17 bp, Arabidopsis thaliana
atcaccggtcggttcat

SEQ ID NO: 50021 - DNA, 17 bp, Arabidopsis thaliana
atcaccggtggattaag

SEQ ID NO: 50022 - DNA, 17 bp, Arabidopsis thaliana
atcaccgtagtgttctc

SEQ ID NO: 50023 - DNA, 17 bp, Arabidopsis thaliana
atcaccgtcgttttgca

SEQ ID NO: 50024 - DNA, 17 bp, Arabidopsis thaliana
atcaccgtcgttttgcg

SEQ ID NO: 50025 - DNA, 17 bp, Arabidopsis thaliana
atcaccgtctgggtttc

SEQ ID NO: 50026 - DNA, 17 bp, Arabidopsis thaliana
atcaccgttcgcttagc

SEQ ID NO: 50027 - DNA, 17 bp, Arabidopsis thaliana
atcaccgttttgcagtt

SEQ ID NO: 50028 - DNA, 17 bp, Arabidopsis thaliana
atcacctacttcgggat

SEQ ID NO: 50029 - DNA, 17 bp, Arabidopsis thaliana
atcacctactttacttt

SEQ ID NO: 50030 - DNA, 17 bp, Arabidopsis thaliana
atcacctccatctaacc

SEQ ID NO: 50031 - DNA, 17 bp, Arabidopsis thaliana
atcacctcgctgtgact

SEQ ID NO: 50032 - DNA, 17 bp, Arabidopsis thaliana
atcacctgaccatcact

SEQ ID NO: 50033 - DNA, 17 bp, Arabidopsis thaliana
atcacctggagagacgc

SEQ ID NO: 50034 - DNA, 17 bp, Arabidopsis thaliana
atcacctgtgacactta

SEQ ID NO: 50035 - DNA, 17 bp, Arabidopsis thaliana
atcacctgtgacacttt

SEQ ID NO: 50036 - DNA, 17 bp, Arabidopsis thaliana
atcacctgttaagcggc

SEQ ID NO: 50037 - DNA, 17 bp, Arabidopsis thaliana
atcacctgttggttcta

SEQ ID NO: 50038 - DNA, 17 bp, Arabidopsis thaliana
atcaccttcagcttgga

SEQ ID NO: 50039 - DNA, 17 bp, Arabidopsis thaliana
atcaccttccgaatagc

SEQ ID NO: 50040 - DNA, 17 bp, Arabidopsis thaliana
atcaccttggctacacc

SEQ ID NO: 50041 - DNA, 17 bp, Arabidopsis thaliana
atcaccttggctacatc

SEQ ID NO: 50042 - DNA, 17 bp, Arabidopsis thaliana
atcaccttgtacgggcc

SEQ ID NO: 50043 - DNA, 17 bp, Arabidopsis thaliana
atcaccttgtcgcaaga

SEQ ID NO: 50044 - DNA, 17 bp, Arabidopsis thaliana
atcaccttttgcaacat

SEQ ID NO: 50045 - DNA, 17 bp, Arabidopsis thaliana
atcacgaaaatgcccga

SEQ ID NO: 50046 - DNA, 17 bp, Arabidopsis thaliana
atcacgacggagaggat

SEQ ID NO: 50047 - DNA, 17 bp, Arabidopsis thaliana
atcacgacttaaactgc

SEQ ID NO: 50048 - DNA, 17 bp, Arabidopsis thaliana
atcacgagagtggatcg

SEQ ID NO: 50049 - DNA, 17 bp, Arabidopsis thaliana
atcacgagagtggattg

SEQ ID NO: 50050 - DNA, 17 bp, Arabidopsis thaliana
atcacgagctaggacct

SEQ ID NO: 50051 - DNA, 17 bp, Arabidopsis thaliana
atcacgagctaggactt

SEQ ID NO: 50052 - DNA, 17 bp, Arabidopsis thaliana
atcacgagctaggatct

SEQ ID NO: 50053 - DNA, 17 bp, Arabidopsis thaliana
atcacgataactcacaa

SEQ ID NO: 50054 - DNA, 17 bp, Arabidopsis thaliana
atcacgatggatgtacc

SEQ ID NO: 50055 - DNA, 17 bp, Arabidopsis thaliana
atcacgatgtatgtacc

SEQ ID NO: 50056 - DNA, 17 bp, Arabidopsis thaliana
atcacgatgtccgtacc

SEQ ID NO: 50057 - DNA, 17 bp, Arabidopsis thaliana
atcacgatgtctgtacc

SEQ ID NO: 50058 - DNA, 17 bp, Arabidopsis thaliana
atcacgatgtttgtacc

SEQ ID NO: 50059 - DNA, 17 bp, Arabidopsis thaliana
atcacgcaaatttctcc

SEQ ID NO: 50060 - DNA, 17 bp, Arabidopsis thaliana
atcacgcagctgctgct

SEQ ID NO: 50061 - DNA, 17 bp, Arabidopsis thaliana
atcacgcaggtgacgaa

SEQ ID NO: 50062 - DNA, 17 bp, Arabidopsis thaliana
atcacgcccatcctaat

SEQ ID NO: 50063 - DNA, 17 bp, Arabidopsis thaliana
atcacgcgatctctacc

SEQ ID NO: 50064 - DNA, 17 bp, Arabidopsis thaliana
atcacgcgatggagaat

SEQ ID NO: 50065 - DNA, 17 bp, Arabidopsis thaliana
atcacgcggactacggt

SEQ ID NO: 50066 - DNA, 17 bp, Arabidopsis thaliana
atcacgcggattacggt

SEQ ID NO: 50067 - DNA, 17 bp, Arabidopsis thaliana
atcacgcgtgtgccact

SEQ ID NO: 50068 - DNA, 17 bp, Arabidopsis thaliana
atcacgctgaaacacta

SEQ ID NO: 50069 - DNA, 17 bp, Arabidopsis thaliana
atcacggacaattcctt

SEQ ID NO: 50070 - DNA, 17 bp, Arabidopsis thaliana
atcacggaccacccttt

SEQ ID NO: 50071 - DNA, 17 bp, Arabidopsis thaliana
atcacggataccgtctc

SEQ ID NO: 50072 - DNA, 17 bp, Arabidopsis thaliana
atcacggatttacgttt

SEQ ID NO: 50073 - DNA, 17 bp, Arabidopsis thaliana
atcacggcaaatgacaa

SEQ ID NO: 50074 - DNA, 17 bp, Arabidopsis thaliana
atcacggccatgcggat

SEQ ID NO: 50075 - DNA, 17 bp, Arabidopsis thaliana
atcacggcgttaacttt

SEQ ID NO: 50076 - DNA, 17 bp, Arabidopsis thaliana
atcacggctactgtctt

SEQ ID NO: 50077 - DNA, 17 bp, Arabidopsis thaliana
atcacgggacggattat

SEQ ID NO: 50078 - DNA, 17 bp, Arabidopsis thaliana
atcacgggagtgaatta

SEQ ID NO: 50079 - DNA, 17 bp, Arabidopsis thaliana
atcacgggagtgaattg

SEQ ID NO: 50080 - DNA, 17 bp, Arabidopsis thaliana
atcacgggttaaccgat

SEQ ID NO: 50081 - DNA, 17 bp, Arabidopsis thaliana
atcacgggttaaccggt

SEQ ID NO: 50082 - DNA, 17 bp, Arabidopsis thaliana
atcacgggtttaagttt

SEQ ID NO: 50083 - DNA, 17 bp, Arabidopsis thaliana
atcacgggtttacgttt

SEQ ID NO: 50084 - DNA, 17 bp, Arabidopsis thaliana
atcacgggtttatgttt

SEQ ID NO: 50085 - DNA, 17 bp, Arabidopsis thaliana
atcacgggtttgacagg

SEQ ID NO: 50086 - DNA, 17 bp, Arabidopsis thaliana
atcacgggttttcgttt

SEQ ID NO: 50087 - DNA, 17 bp, Arabidopsis thaliana
atcacggtatccatggg

SEQ ID NO: 50088 - DNA, 17 bp, Arabidopsis thaliana
atcacggtgaaacacta

SEQ ID NO: 50089 - DNA, 17 bp, Arabidopsis thaliana
atcacggttacggttat

SEQ ID NO: 50090 - DNA, 17 bp, Arabidopsis thaliana
atcacggttcacggggg

SEQ ID NO: 50091 - DNA, 17 bp, Arabidopsis thaliana
atcacggtttggcgctc

SEQ ID NO: 50092 - DNA, 17 bp, Arabidopsis thaliana
atcacggtttggcgtcg

SEQ ID NO: 50093 - DNA, 17 bp, Arabidopsis thaliana
atcacggttttacgggt

SEQ ID NO: 50094 - DNA, 17 bp, Arabidopsis thaliana
atcacgtacaccgtcgg

SEQ ID NO: 50095 - DNA, 17 bp, Arabidopsis thaliana
atcacgtacactgtcgg

SEQ ID NO: 50096 - DNA, 17 bp, Arabidopsis thaliana
atcacgtcacagacctt

SEQ ID NO: 50097 - DNA, 17 bp, Arabidopsis thaliana
atcacgtcctctttacc

SEQ ID NO: 50098 - DNA, 17 bp, Arabidopsis thaliana
atcacgtcctctttagc

SEQ ID NO: 50099 - DNA, 17 bp, Arabidopsis thaliana
atcacgtcgctgttgca

SEQ ID NO: 50100 - DNA, 17 bp, Arabidopsis thaliana
atcacgtcgttgtcaaa

SEQ ID NO: 50101 - DNA, 17 bp, Arabidopsis thaliana
atcacgtctgcctgggt

SEQ ID NO: 50102 - DNA, 17 bp, Arabidopsis thaliana
atcacgttgcggtttaa

SEQ ID NO: 50103 - DNA, 17 bp, Arabidopsis thaliana
atcacgtttacgttgct

SEQ ID NO: 50104 - DNA, 17 bp, Arabidopsis thaliana
atcacgtttttgggtgg

SEQ ID NO: 50105 - DNA, 17 bp, Arabidopsis thaliana
atcactaaactgggtgc

SEQ ID NO: 50106 - DNA, 17 bp, Arabidopsis thaliana
atcactaaagtgggtgc

SEQ ID NO: 50107 - DNA, 17 bp, Arabidopsis thaliana
atcactaacccgtgaag

SEQ ID NO: 50108 - DNA, 17 bp, Arabidopsis thaliana
atcactaacgaccaaaa

SEQ ID NO: 50109 - DNA, 17 bp, Arabidopsis thaliana
atcactaacgaccaaag

SEQ ID NO: 50110 - DNA, 17 bp, Arabidopsis thaliana
atcactaacgaccgaaa

SEQ ID NO: 50111 - DNA, 17 bp, Arabidopsis thaliana
atcactaagcagtctcc

SEQ ID NO: 50112 - DNA, 17 bp, Arabidopsis thaliana
atcactaatcgctgcgt

SEQ ID NO: 50113 - DNA, 17 bp, Arabidopsis thaliana
atcactaatcgctgctt

SEQ ID NO: 50114 - DNA, 17 bp, Arabidopsis thaliana
atcactaccatcactat

SEQ ID NO: 50115 - DNA, 17 bp, Arabidopsis thaliana
atcactactattgggat

SEQ ID NO: 50116 - DNA, 17 bp, Arabidopsis thaliana
atcactagaccacaaat

SEQ ID NO: 50117 - DNA, 17 bp, Arabidopsis thaliana
atcactagagaatccca

SEQ ID NO: 50118 - DNA, 17 bp, Arabidopsis thaliana
atcactagagattggcc

SEQ ID NO: 50119 - DNA, 17 bp, Arabidopsis thaliana
atcactagagatttgcc

SEQ ID NO: 50120 - DNA, 17 bp, Arabidopsis thaliana
atcactagaggttggcc

SEQ ID NO: 50121 - DNA, 17 bp, Arabidopsis thaliana
atcactagattttcacc

SEQ ID NO: 50122 - DNA, 17 bp, Arabidopsis thaliana
atcactagattttgacc

SEQ ID NO: 50123 - DNA, 17 bp, Arabidopsis thaliana
atcactagcttatgcac

SEQ ID NO: 50124 - DNA, 17 bp, Arabidopsis thaliana
atcactagcttatgcat

SEQ ID NO: 50125 - DNA, 17 bp, Arabidopsis thaliana
atcactagcttatgctc

SEQ ID NO: 50126 - DNA, 17 bp, Arabidopsis thaliana
atcactaggttcaaggc

SEQ ID NO: 50127 - DNA, 17 bp, Arabidopsis thaliana
atcactagtccgatcga

SEQ ID NO: 50128 - DNA, 17 bp, Arabidopsis thaliana
atcactagttgcaggga

SEQ ID NO: 50129 - DNA, 17 bp, Arabidopsis thaliana
atcactatcaccacctg

SEQ ID NO: 50130 - DNA, 17 bp, Arabidopsis thaliana
atcactatgccgtccgg

SEQ ID NO: 50131 - DNA, 17 bp, Arabidopsis thaliana
atcactcagccggtggt

SEQ ID NO: 50132 - DNA, 17 bp, Arabidopsis thaliana
atcactcatctcttcgc

SEQ ID NO: 50133 - DNA, 17 bp, Arabidopsis thaliana
atcactccctattggac

SEQ ID NO: 50134 - DNA, 17 bp, Arabidopsis thaliana
atcactccctgcgagtc

SEQ ID NO: 50135 - DNA, 17 bp, Arabidopsis thaliana
atcactcgaaccgacga

SEQ ID NO: 50136 - DNA, 17 bp, Arabidopsis thaliana
atcactcgaaccggcaa

SEQ ID NO: 50137 - DNA, 17 bp, Arabidopsis thaliana
atcactcgaaccggcga

SEQ ID NO: 50138 - DNA, 17 bp, Arabidopsis thaliana
atcactcgaatgatacg

SEQ ID NO: 50139 - DNA, 17 bp, Arabidopsis thaliana
atcactcgacattcggg

SEQ ID NO: 50140 - DNA, 17 bp, Arabidopsis thaliana
atcactcgaccaaggtg

SEQ ID NO: 50141 - DNA, 17 bp, Arabidopsis thaliana
atcactcgaccacaaca

SEQ ID NO: 50142 - DNA, 17 bp, Arabidopsis thaliana
atcactcgaccacatcc

SEQ ID NO: 50143 - DNA, 17 bp, Arabidopsis thaliana
atcactcgaccggacac

SEQ ID NO: 50144 - DNA, 17 bp, Arabidopsis thaliana
atcactcgaccggtcca

SEQ ID NO: 50145 - DNA, 17 bp, Arabidopsis thaliana
atcactcgaccgtggtg

SEQ ID NO: 50146 - DNA, 17 bp, Arabidopsis thaliana
atcactcgactgcggtg

SEQ ID NO: 50147 - DNA, 17 bp, Arabidopsis thaliana
atcactcgatctctcca

SEQ ID NO: 50148 - DNA, 17 bp, Arabidopsis thaliana
atcactcgtgcagattg

SEQ ID NO: 50149 - DNA, 17 bp, Arabidopsis thaliana
atcactctacgattgat

SEQ ID NO: 50150 - DNA, 17 bp, Arabidopsis thaliana
atcactctatgggccga

SEQ ID NO: 50151 - DNA, 17 bp, Arabidopsis thaliana
atcactctatgggccgg

SEQ ID NO: 50152 - DNA, 17 bp, Arabidopsis thaliana
atcactctcctcagatg

SEQ ID NO: 50153 - DNA, 17 bp, Arabidopsis thaliana
atcactctcggagatga

SEQ ID NO: 50154 - DNA, 17 bp, Arabidopsis thaliana
atcactctctactagga

SEQ ID NO: 50155 - DNA, 17 bp, Arabidopsis thaliana
atcactctctttccaag

SEQ ID NO: 50156 - DNA, 17 bp, Arabidopsis thaliana
atcactctgctgggccg

SEQ ID NO: 50157 - DNA, 17 bp, Arabidopsis thaliana
atcactctgctggtccg

SEQ ID NO: 50158 - DNA, 17 bp, Arabidopsis thaliana
atcactctttaagaatc

SEQ ID NO: 50159 - DNA, 17 bp, Arabidopsis thaliana
atcactctttaagactc

SEQ ID NO: 50160 - DNA, 17 bp, Arabidopsis thaliana
atcactgagaaccaagc

SEQ ID NO: 50161 - DNA, 17 bp, Arabidopsis thaliana
atcactgaggtccgtcc

SEQ ID NO: 50162 - DNA, 17 bp, Arabidopsis thaliana
atcactgatctaactaa

SEQ ID NO: 50163 - DNA, 17 bp, Arabidopsis thaliana
atcactgatggtcaaca

SEQ ID NO: 50164 - DNA, 17 bp, Arabidopsis thaliana
atcactgcaaccgtcga

SEQ ID NO: 50165 - DNA, 17 bp, Arabidopsis thaliana
atcactgcaagtactga

SEQ ID NO: 50166 - DNA, 17 bp, Arabidopsis thaliana
atcactgcaagtctgca

SEQ ID NO: 50167 - DNA, 17 bp, Arabidopsis thaliana
atcactgcaggttcgag

SEQ ID NO: 50168 - DNA, 17 bp, Arabidopsis thaliana
atcactgcagttacgga

SEQ ID NO: 50169 - DNA, 17 bp, Arabidopsis thaliana
atcactgccgccgtcac

SEQ ID NO: 50170 - DNA, 17 bp, Arabidopsis thaliana
atcactgcgacagttta

SEQ ID NO: 50171 - DNA, 17 bp, Arabidopsis thaliana
atcactgcgtattcaga

SEQ ID NO: 50172 - DNA, 17 bp, Arabidopsis thaliana
atcactggaccaacaac

SEQ ID NO: 50173 - DNA, 17 bp, Arabidopsis thaliana
atcactggaccacaaat

SEQ ID NO: 50174 - DNA, 17 bp, Arabidopsis thaliana
atcactggccgctctgt

SEQ ID NO: 50175 - DNA, 17 bp, Arabidopsis thaliana
atcactggctaaatgac

SEQ ID NO: 50176 - DNA, 17 bp, Arabidopsis thaliana
atcactgggatggagat

SEQ ID NO: 50177 - DNA, 17 bp, Arabidopsis thaliana
atcactgggccaacccc

SEQ ID NO: 50178 - DNA, 17 bp, Arabidopsis thaliana
atcactgggctgatact

SEQ ID NO: 50179 - DNA, 17 bp, Arabidopsis thaliana
atcactggggtgctatg

SEQ ID NO: 50180 - DNA, 17 bp, Arabidopsis thaliana
atcactgggttaggagg

SEQ ID NO: 50181 - DNA, 17 bp, Arabidopsis thaliana
atcactggtctggtgtt

SEQ ID NO: 50182 - DNA, 17 bp, Arabidopsis thaliana
atcactgtggttgctct

SEQ ID NO: 50183 - DNA, 17 bp, Arabidopsis thaliana
atcactgtgtggtctgg

SEQ ID NO: 50184 - DNA, 17 bp, Arabidopsis thaliana
atcactgttgcggtgcg

SEQ ID NO: 50185 - DNA, 17 bp, Arabidopsis thaliana
atcactgtttacggccg

SEQ ID NO: 50186 - DNA, 17 bp, Arabidopsis thaliana
atcactgtttcattggc

SEQ ID NO: 50187 - DNA, 17 bp, Arabidopsis thaliana
atcactgtttgtggaag

SEQ ID NO: 50188 - DNA, 17 bp, Arabidopsis thaliana
atcacttactggaaaag

SEQ ID NO: 50189 - DNA, 17 bp, Arabidopsis thaliana
atcacttagatcctact

SEQ ID NO: 50190 - DNA, 17 bp, Arabidopsis thaliana
atcacttagtcgcatcc

SEQ ID NO: 50191 - DNA, 17 bp, Arabidopsis thaliana
atcacttatctttgcaa

SEQ ID NO: 50192 - DNA, 17 bp, Arabidopsis thaliana
atcacttatgcggttca

SEQ ID NO: 50193 - DNA, 17 bp, Arabidopsis thaliana
atcacttcaggggcaaa

SEQ ID NO: 50194 - DNA, 17 bp, Arabidopsis thaliana
atcacttcatctccgta

SEQ ID NO: 50195 - DNA, 17 bp, Arabidopsis thaliana
atcacttcccaaaggtt

SEQ ID NO: 50196 - DNA, 17 bp, Arabidopsis thaliana
atcacttccgcaaacaa

SEQ ID NO: 50197 - DNA, 17 bp, Arabidopsis thaliana
atcacttcctgcagtgt

SEQ ID NO: 50198 - DNA, 17 bp, Arabidopsis thaliana
atcacttctaccggtgt

SEQ ID NO: 50199 - DNA, 17 bp, Arabidopsis thaliana
atcacttctcggtgatc

SEQ ID NO: 50200 - DNA, 17 bp, Arabidopsis thaliana
atcacttgacgcgacag

SEQ ID NO: 50201 - DNA, 17 bp, Arabidopsis thaliana
atcacttgcgagaagac

SEQ ID NO: 50202 - DNA, 17 bp, Arabidopsis thaliana
atcacttgcggatgatt

SEQ ID NO: 50203 - DNA, 17 bp, Arabidopsis thaliana
atcacttgctgcagtgt

SEQ ID NO: 50204 - DNA, 17 bp, Arabidopsis thaliana
atcacttggaagatcgg

SEQ ID NO: 50205 - DNA, 17 bp, Arabidopsis thaliana
atcacttgtcgatggac

SEQ ID NO: 50206 - DNA, 17 bp, Arabidopsis thaliana
atcacttgtgctgatga

SEQ ID NO: 50207 - DNA, 17 bp, Arabidopsis thaliana
atcacttgttgttgcgt

SEQ ID NO: 50208 - DNA, 17 bp, Arabidopsis thaliana
atcactttatcacgcga

SEQ ID NO: 50209 - DNA, 17 bp, Arabidopsis thaliana
atcactttccttgtttg

SEQ ID NO: 50210 - DNA, 17 bp, Arabidopsis thaliana
atcactttctggaaggt

SEQ ID NO: 50211 - DNA, 17 bp, Arabidopsis thaliana
atcactttgcggatggt

SEQ ID NO: 50212 - DNA, 17 bp, Arabidopsis thaliana
atcactttgttcgcaag

SEQ ID NO: 50213 - DNA, 17 bp, Arabidopsis thaliana
atcacttttctgcggat

SEQ ID NO: 50214 - DNA, 17 bp, Arabidopsis thaliana
atcagaaagctgcgagt

SEQ ID NO: 50215 - DNA, 17 bp, Arabidopsis thaliana
atcagaaatcctcatag

SEQ ID NO: 50216 - DNA, 17 bp, Arabidopsis thaliana
atcagaaccatctctga

SEQ ID NO: 50217 - DNA, 17 bp, Arabidopsis thaliana
atcagaaccgccgtgat

SEQ ID NO: 50218 - DNA, 17 bp, Arabidopsis thaliana
atcagaaccgtctctaa

SEQ ID NO: 50219 - DNA, 17 bp, Arabidopsis thaliana
atcagaacctccttttc

SEQ ID NO: 50220 - DNA, 17 bp, Arabidopsis thaliana
atcagaacgactcgagt

SEQ ID NO: 50221 - DNA, 17 bp, Arabidopsis thaliana
atcagaactccgcagct

SEQ ID NO: 50222 - DNA, 17 bp, Arabidopsis thaliana
atcagaactccgcagtt

SEQ ID NO: 50223 - DNA, 17 bp, Arabidopsis thaliana
atcagaagattgcaatc

SEQ ID NO: 50224 - DNA, 17 bp, Arabidopsis thaliana
atcagaagcagggcacg

SEQ ID NO: 50225 - DNA, 17 bp, Arabidopsis thaliana
atcagaagcaggggacg

SEQ ID NO: 50226 - DNA, 17 bp, Arabidopsis thaliana
atcagaagccatcttct

SEQ ID NO: 50227 - DNA, 17 bp, Arabidopsis thaliana
atcagaagcccaaaaag

SEQ ID NO: 50228 - DNA, 17 bp, Arabidopsis thaliana
atcagaagctgcacgac

SEQ ID NO: 50229 - DNA, 17 bp, Arabidopsis thaliana
atcagaaggagtgctga

SEQ ID NO: 50230 - DNA, 17 bp, Arabidopsis thaliana
atcagaaggctctattt

SEQ ID NO: 50231 - DNA, 17 bp, Arabidopsis thaliana
atcagaaggttctgggc

SEQ ID NO: 50232 - DNA, 17 bp, Arabidopsis thaliana
atcagaaggttgcgtgt

SEQ ID NO: 50233 - DNA, 17 bp, Arabidopsis thaliana
atcagaatccttctctt

SEQ ID NO: 50234 - DNA, 17 bp, Arabidopsis thaliana
atcagaatgaatgtgcc

SEQ ID NO: 50235 - DNA, 17 bp, Arabidopsis thaliana
atcagaatgactactcg

SEQ ID NO: 50236 - DNA, 17 bp, Arabidopsis thaliana
atcagaatgactctcgg

SEQ ID NO: 50237 - DNA, 17 bp, Arabidopsis thaliana
atcagaatgactgctcg

SEQ ID NO: 50238 - DNA, 17 bp, Arabidopsis thaliana
atcagacaaagcactaa

SEQ ID NO: 50239 - DNA, 17 bp, Arabidopsis thaliana
atcagacaagccccttc

SEQ ID NO: 50240 - DNA, 17 bp, Arabidopsis thaliana
atcagacagcgtgtgtg

SEQ ID NO: 50241 - DNA, 17 bp, Arabidopsis thaliana
atcagacagtgtaatag

SEQ ID NO: 50242 - DNA, 17 bp, Arabidopsis thaliana
atcagaccatggagaat

SEQ ID NO: 50243 - DNA, 17 bp, Arabidopsis thaliana
atcagaccgatggagat

SEQ ID NO: 50244 - DNA, 17 bp, Arabidopsis thaliana
atcagaccttcaagtgc

SEQ ID NO: 50245 - DNA, 17 bp, Arabidopsis thaliana
atcagaccttgttgcta

SEQ ID NO: 50246 - DNA, 17 bp, Arabidopsis thaliana
atcagacggatcaaacg

SEQ ID NO: 50247 - DNA, 17 bp, Arabidopsis thaliana
atcagacggttgagttg

SEQ ID NO: 50248 - DNA, 17 bp, Arabidopsis thaliana
atcagactcagccggat

SEQ ID NO: 50249 - DNA, 17 bp, Arabidopsis thaliana
atcagactcaggcagta

SEQ ID NO: 50250 - DNA, 17 bp, Arabidopsis thaliana
atcagactcatcgctgc

SEQ ID NO: 50251 - DNA, 17 bp, Arabidopsis thaliana
atcagactcatcgttgg

SEQ ID NO: 50252 - DNA, 17 bp, Arabidopsis thaliana
atcagactcttgatcgt

SEQ ID NO: 50253 - DNA, 17 bp, Arabidopsis thaliana
atcagactgcaggatct

SEQ ID NO: 50254 - DNA, 17 bp, Arabidopsis thaliana
atcagacttcgccaccc

SEQ ID NO: 50255 - DNA, 17 bp, Arabidopsis thaliana
atcagactttgccaatc

SEQ ID NO: 50256 - DNA, 17 bp, Arabidopsis thaliana
atcagagaaccattgat

SEQ ID NO: 50257 - DNA, 17 bp, Arabidopsis thaliana
atcagagacacgtggag

SEQ ID NO: 50258 - DNA, 17 bp, Arabidopsis thaliana
atcagagacacgtggat

SEQ ID NO: 50259 - DNA, 17 bp, Arabidopsis thaliana
atcagagaccaacgcct

SEQ ID NO: 50260 - DNA, 17 bp, Arabidopsis thaliana
atcagagacctctcatc

SEQ ID NO: 50261 - DNA, 17 bp, Arabidopsis thaliana
atcagagactgctctca

SEQ ID NO: 50262 - DNA, 17 bp, Arabidopsis thaliana
atcagagacttcgtggc

SEQ ID NO: 50263 - DNA, 17 bp, Arabidopsis thaliana
atcagagagctggtatt

SEQ ID NO: 50264 - DNA, 17 bp, Arabidopsis thaliana
atcagagagtcaggttg

SEQ ID NO: 50265 - DNA, 17 bp, Arabidopsis thaliana
atcagagagtttcaaca

SEQ ID NO: 50266 - DNA, 17 bp, Arabidopsis thaliana
atcagagatagggtaga

SEQ ID NO: 50267 - DNA, 17 bp, Arabidopsis thaliana
atcagagatgttgctcg

SEQ ID NO: 50268 - DNA, 17 bp, Arabidopsis thaliana
atcagagcaaagacgta

SEQ ID NO: 50269 - DNA, 17 bp, Arabidopsis thaliana
atcagagcaaagacgtt

SEQ ID NO: 50270 - DNA, 17 bp, Arabidopsis thaliana
atcagagcaccgcacgt

SEQ ID NO: 50271 - DNA, 17 bp, Arabidopsis thaliana
atcagagcaccgcccgt

SEQ ID NO: 50272 - DNA, 17 bp, Arabidopsis thaliana
atcagagcacgggtctc

SEQ ID NO: 50273 - DNA, 17 bp, Arabidopsis thaliana
atcagagccatccgatc

SEQ ID NO: 50274 - DNA, 17 bp, Arabidopsis thaliana
atcagagcccaaggttt

SEQ ID NO: 50275 - DNA, 17 bp, Arabidopsis thaliana
atcagagcccatggttg

SEQ ID NO: 50276 - DNA, 17 bp, Arabidopsis thaliana
atcagagcccgatcccc

SEQ ID NO: 50277 - DNA, 17 bp, Arabidopsis thaliana
atcagagctcatggttg

SEQ ID NO: 50278 - DNA, 17 bp, Arabidopsis thaliana
atcagagcttatggttg

SEQ ID NO: 50279 - DNA, 17 bp, Arabidopsis thaliana
atcagaggacgtggcaa

SEQ ID NO: 50280 - DNA, 17 bp, Arabidopsis thaliana
atcagaggagggtgggc

SEQ ID NO: 50281 - DNA, 17 bp, Arabidopsis thaliana
atcagaggatctgactg

SEQ ID NO: 50282 - DNA, 17 bp, Arabidopsis thaliana
atcagagtattggacct

SEQ ID NO: 50283 - DNA, 17 bp, Arabidopsis thaliana
atcagagtccgctgccg

SEQ ID NO: 50284 - DNA, 17 bp, Arabidopsis thaliana
atcagagtcggctttca

SEQ ID NO: 50285 - DNA, 17 bp, Arabidopsis thaliana
atcagagtggccttgct

SEQ ID NO: 50286 - DNA, 17 bp, Arabidopsis thaliana
atcagagtggcgcagcg

SEQ ID NO: 50287 - DNA, 17 bp, Arabidopsis thaliana
atcagagttagtgacag

SEQ ID NO: 50288 - DNA, 17 bp, Arabidopsis thaliana
atcagagttctccagtg

SEQ ID NO: 50289 - DNA, 17 bp, Arabidopsis thaliana
atcagagttgcgcagcg

SEQ ID NO: 50290 - DNA, 17 bp, Arabidopsis thaliana
atcagatatctctgcgg

SEQ ID NO: 50291 - DNA, 17 bp, Arabidopsis thaliana
atcagatatttcacgaa

SEQ ID NO: 50292 - DNA, 17 bp, Arabidopsis thaliana
atcagatattttgggtt

SEQ ID NO: 50293 - DNA, 17 bp, Arabidopsis thaliana
atcagatcaaccaggtt

SEQ ID NO: 50294 - DNA, 17 bp, Arabidopsis thaliana
atcagatcacgctagat

SEQ ID NO: 50295 - DNA, 17 bp, Arabidopsis thaliana
atcagatcatccaggtt

SEQ ID NO: 50296 - DNA, 17 bp, Arabidopsis thaliana
atcagatcatgacagtg

SEQ ID NO: 50297 - DNA, 17 bp, Arabidopsis thaliana
atcagatccgtcatatt

SEQ ID NO: 50298 - DNA, 17 bp, Arabidopsis thaliana
atcagatcgcggttcac

SEQ ID NO: 50299 - DNA, 17 bp, Arabidopsis thaliana
atcagatctatcttggc

SEQ ID NO: 50300 - DNA, 17 bp, Arabidopsis thaliana
atcagatctcgtcgtct

SEQ ID NO: 50301 - DNA, 17 bp, Arabidopsis thaliana
atcagatctgaacagtc

SEQ ID NO: 50302 - DNA, 17 bp, Arabidopsis thaliana
atcagatgaccgagcct

SEQ ID NO: 50303 - DNA, 17 bp, Arabidopsis thaliana
atcagatgagggtaatt

SEQ ID NO: 50304 - DNA, 17 bp, Arabidopsis thaliana
atcagatgatgggtgat

SEQ ID NO: 50305 - DNA, 17 bp, Arabidopsis thaliana
atcagatgtcggctcgg

SEQ ID NO: 50306 - DNA, 17 bp, Arabidopsis thaliana
atcagatgttcatttgg

SEQ ID NO: 50307 - DNA, 17 bp, Arabidopsis thaliana
atcagatgttgacaccc

SEQ ID NO: 50308 - DNA, 17 bp, Arabidopsis thaliana
atcagatgttgacatga

SEQ ID NO: 50309 - DNA, 17 bp, Arabidopsis thaliana
atcagattacgccgtct

SEQ ID NO: 50310 - DNA, 17 bp, Arabidopsis thaliana
atcagattatgtctcta

SEQ ID NO: 50311 - DNA, 17 bp, Arabidopsis thaliana
atcagattatgtctctg

SEQ ID NO: 50312 - DNA, 17 bp, Arabidopsis thaliana
atcagattccaacatga

SEQ ID NO: 50313 - DNA, 17 bp, Arabidopsis thaliana
atcagattcgccgaatt

SEQ ID NO: 50314 - DNA, 17 bp, Arabidopsis thaliana
atcagattgcacctaga

SEQ ID NO: 50315 - DNA, 17 bp, Arabidopsis thaliana
atcagattgtgacacat

SEQ ID NO: 50316 - DNA, 17 bp, Arabidopsis thaliana
atcagcaaccatgaccg

SEQ ID NO: 50317 - DNA, 17 bp, Arabidopsis thaliana
atcagcaaggatcaaac

SEQ ID NO: 50318 - DNA, 17 bp, Arabidopsis thaliana
atcagcaaggattgaac

SEQ ID NO: 50319 - DNA, 17 bp, Arabidopsis thaliana
atcagcaaggcttaaac

SEQ ID NO: 50320 - DNA, 17 bp, Arabidopsis thaliana
atcagcaaggcttgaac

SEQ ID NO: 50321 - DNA, 17 bp, Arabidopsis thaliana
atcagcaatctgcaact

SEQ ID NO: 50322 - DNA, 17 bp, Arabidopsis thaliana
atcagcaatgcttgaac

SEQ ID NO: 50323 - DNA, 17 bp, Arabidopsis thaliana
atcagcaattgagccgc

SEQ ID NO: 50324 - DNA, 17 bp, Arabidopsis thaliana
atcagcacacacatgag

SEQ ID NO: 50325 - DNA, 17 bp, Arabidopsis thaliana
atcagcacatgagagct

SEQ ID NO: 50326 - DNA, 17 bp, Arabidopsis thaliana
atcagcacgaacgactc

SEQ ID NO: 50327 - DNA, 17 bp, Arabidopsis thaliana
atcagcacgaactgcct

SEQ ID NO: 50328 - DNA, 17 bp, Arabidopsis thaliana
atcagcacgagctgcct

SEQ ID NO: 50329 - DNA, 17 bp, Arabidopsis thaliana
atcagcacgatcgtttc

SEQ ID NO: 50330 - DNA, 17 bp, Arabidopsis thaliana
atcagcactaatgcacc

SEQ ID NO: 50331 - DNA, 17 bp, Arabidopsis thaliana
atcagcactgtgatatt

SEQ ID NO: 50332 - DNA, 17 bp, Arabidopsis thaliana
atcagcagaacaagcgt

SEQ ID NO: 50333 - DNA, 17 bp, Arabidopsis thaliana
atcagcagcgacttatc

SEQ ID NO: 50334 - DNA, 17 bp, Arabidopsis thaliana
atcagcagcgtcagagg

SEQ ID NO: 50335 - DNA, 17 bp, Arabidopsis thaliana
atcagcaggcagcttct

SEQ ID NO: 50336 - DNA, 17 bp, Arabidopsis thaliana
atcagcagtattgtggc

SEQ ID NO: 50337 - DNA, 17 bp, Arabidopsis thaliana
atcagcagtgttgtggc

SEQ ID NO: 50338 - DNA, 17 bp, Arabidopsis thaliana
atcagcagtgtttggtc

SEQ ID NO: 50339 - DNA, 17 bp, Arabidopsis thaliana
atcagccaactcagggt

SEQ ID NO: 50340 - DNA, 17 bp, Arabidopsis thaliana
atcagccacactgggac

SEQ ID NO: 50341 - DNA, 17 bp, Arabidopsis thaliana
atcagccagacccttaa

SEQ ID NO: 50342 - DNA, 17 bp, Arabidopsis thaliana
atcagccctttgtcgct

SEQ ID NO: 50343 - DNA, 17 bp, Arabidopsis thaliana
atcagccgattgattga

SEQ ID NO: 50344 - DNA, 17 bp, Arabidopsis thaliana
atcagccgctgccaacc

SEQ ID NO: 50345 - DNA, 17 bp, Arabidopsis thaliana
atcagcctaatccaatg

SEQ ID NO: 50346 - DNA, 17 bp, Arabidopsis thaliana
atcagcctatcacccac

SEQ ID NO: 50347 - DNA, 17 bp, Arabidopsis thaliana
atcagcctttgacttga

SEQ ID NO: 50348 - DNA, 17 bp, Arabidopsis thaliana
atcagcctttgtggcgg

SEQ ID NO: 50349 - DNA, 17 bp, Arabidopsis thaliana
atcagcctttttgtgtg

SEQ ID NO: 50350 - DNA, 17 bp, Arabidopsis thaliana
atcagcgaccgttaagt

SEQ ID NO: 50351 - DNA, 17 bp, Arabidopsis thaliana
atcagcgatggtcgcac

SEQ ID NO: 50352 - DNA, 17 bp, Arabidopsis thaliana
atcagcgccacatcaga

SEQ ID NO: 50353 - DNA, 17 bp, Arabidopsis thaliana
atcagcgccttgagccg

SEQ ID NO: 50354 - DNA, 17 bp, Arabidopsis thaliana
atcagcgcgatcgtctc

SEQ ID NO: 50355 - DNA, 17 bp, Arabidopsis thaliana
atcagcgctaacacgaa

SEQ ID NO: 50356 - DNA, 17 bp, Arabidopsis thaliana
atcagcgctaatacgga

SEQ ID NO: 50357 - DNA, 17 bp, Arabidopsis thaliana
atcagcgctctgatacc

SEQ ID NO: 50358 - DNA, 17 bp, Arabidopsis thaliana
atcagcggatgagttgt

SEQ ID NO: 50359 - DNA, 17 bp, Arabidopsis thaliana
atcagcggatgttgcaa

SEQ ID NO: 50360 - DNA, 17 bp, Arabidopsis thaliana
atcagcggatgttgcag

SEQ ID NO: 50361 - DNA, 17 bp, Arabidopsis thaliana
atcagcggatgttgcgt

SEQ ID NO: 50362 - DNA, 17 bp, Arabidopsis thaliana
atcagcggatgttgcta

SEQ ID NO: 50363 - DNA, 17 bp, Arabidopsis thaliana
atcagcggatgttgctt

SEQ ID NO: 50364 - DNA, 17 bp, Arabidopsis thaliana
atcagcggcttaggtca

SEQ ID NO: 50365 - DNA, 17 bp, Arabidopsis thaliana
atcagcggcttaggtta

SEQ ID NO: 50366 - DNA, 17 bp, Arabidopsis thaliana
atcagcggctttcctgc

SEQ ID NO: 50367 - DNA, 17 bp, Arabidopsis thaliana
atcagcgggcttcacat

SEQ ID NO: 50368 - DNA, 17 bp, Arabidopsis thaliana
atcagcggggaaagaag

SEQ ID NO: 50369 - DNA, 17 bp, Arabidopsis thaliana
atcagcgggtacgatag

SEQ ID NO: 50370 - DNA, 17 bp, Arabidopsis thaliana
atcagcgtcttgcgcgt

SEQ ID NO: 50371 - DNA, 17 bp, Arabidopsis thaliana
atcagcgtgattgcgag

SEQ ID NO: 50372 - DNA, 17 bp, Arabidopsis thaliana
atcagcgtgctccgggc

SEQ ID NO: 50373 - DNA, 17 bp, Arabidopsis thaliana
atcagcgtgctccgggt

SEQ ID NO: 50374 - DNA, 17 bp, Arabidopsis thaliana
atcagcgttcaccggcg

SEQ ID NO: 50375 - DNA, 17 bp, Arabidopsis thaliana
atcagcgttcattcgcg

SEQ ID NO: 50376 - DNA, 17 bp, Arabidopsis thaliana
atcagcgttgttttcac

SEQ ID NO: 50377 - DNA, 17 bp, Arabidopsis thaliana
atcagctagcaggctag

SEQ ID NO: 50378 - DNA, 17 bp, Arabidopsis thaliana
atcagctccagcaggtg

SEQ ID NO: 50379 - DNA, 17 bp, Arabidopsis thaliana
atcagctccggtgccgg

SEQ ID NO: 50380 - DNA, 17 bp, Arabidopsis thaliana
atcagctcgcgttaact

SEQ ID NO: 50381 - DNA, 17 bp, Arabidopsis thaliana
atcagctcgcgttgact

SEQ ID NO: 50382 - DNA, 17 bp, Arabidopsis thaliana
atcagctcgtctctcag

SEQ ID NO: 50383 - DNA, 17 bp, Arabidopsis thaliana
atcagctctgctaattt

SEQ ID NO: 50384 - DNA, 17 bp, Arabidopsis thaliana
atcagctctggccactt

SEQ ID NO: 50385 - DNA, 17 bp, Arabidopsis thaliana
atcagctctttctgcgg

SEQ ID NO: 50386 - DNA, 17 bp, Arabidopsis thaliana
atcagctgatggtgatc

SEQ ID NO: 50387 - DNA, 17 bp, Arabidopsis thaliana
atcagctgcggaattgc

SEQ ID NO: 50388 - DNA, 17 bp, Arabidopsis thaliana
atcagctgggacttggt

SEQ ID NO: 50389 - DNA, 17 bp, Arabidopsis thaliana
atcagctgtgatttgcg

SEQ ID NO: 50390 - DNA, 17 bp, Arabidopsis thaliana
atcagctgtgatttgtg

SEQ ID NO: 50391 - DNA, 17 bp, Arabidopsis thaliana
atcagctgttggattaa

SEQ ID NO: 50392 - DNA, 17 bp, Arabidopsis thaliana
atcagctgttggattag

SEQ ID NO: 50393 - DNA, 17 bp, Arabidopsis thaliana
atcagctgttggattga

SEQ ID NO: 50394 - DNA, 17 bp, Arabidopsis thaliana
atcagcttcagttgacc

SEQ ID NO: 50395 - DNA, 17 bp, Arabidopsis thaliana
atcagcttcgccattgt

SEQ ID NO: 50396 - DNA, 17 bp, Arabidopsis thaliana
atcagcttcgcgattgt

SEQ ID NO: 50397 - DNA, 17 bp, Arabidopsis thaliana
atcagcttggcccaatt

SEQ ID NO: 50398 - DNA, 17 bp, Arabidopsis thaliana
atcagcttttgcaagga

SEQ ID NO: 50399 - DNA, 17 bp, Arabidopsis thaliana
atcaggaaaagactctc

SEQ ID NO: 50400 - DNA, 17 bp, Arabidopsis thaliana
atcaggaagttctgcgc

SEQ ID NO: 50401 - DNA, 17 bp, Arabidopsis thaliana
atcaggaatgaccaccc

SEQ ID NO: 50402 - DNA, 17 bp, Arabidopsis thaliana
atcaggaatgaccattg

SEQ ID NO: 50403 - DNA, 17 bp, Arabidopsis thaliana
atcaggaatttgcaaac

SEQ ID NO: 50404 - DNA, 17 bp, Arabidopsis thaliana
atcaggacccggtgctt

SEQ ID NO: 50405 - DNA, 17 bp, Arabidopsis thaliana
atcaggacctgacgcac

SEQ ID NO: 50406 - DNA, 17 bp, Arabidopsis thaliana
atcaggacctggtgaac

SEQ ID NO: 50407 - DNA, 17 bp, Arabidopsis thaliana
atcaggacctggtgcac

SEQ ID NO: 50408 - DNA, 17 bp, Arabidopsis thaliana
atcaggacgcaggaaat

SEQ ID NO: 50409 - DNA, 17 bp, Arabidopsis thaliana
atcaggacggatttggc

SEQ ID NO: 50410 - DNA, 17 bp, Arabidopsis thaliana
atcaggagattctggga

SEQ ID NO: 50411 - DNA, 17 bp, Arabidopsis thaliana
atcaggagattctgggt

SEQ ID NO: 50412 - DNA, 17 bp, Arabidopsis thaliana
atcaggagcagcaagac

SEQ ID NO: 50413 - DNA, 17 bp, Arabidopsis thaliana
atcaggagccgagcaca

SEQ ID NO: 50414 - DNA, 17 bp, Arabidopsis thaliana
atcaggagcctacacgc

SEQ ID NO: 50415 - DNA, 17 bp, Arabidopsis thaliana
atcaggagcctgtgccg

SEQ ID NO: 50416 - DNA, 17 bp, Arabidopsis thaliana
atcaggagctgcacgac

SEQ ID NO: 50417 - DNA, 17 bp, Arabidopsis thaliana
atcaggaggcgtgtaaa

SEQ ID NO: 50418 - DNA, 17 bp, Arabidopsis thaliana
atcaggaggctacacac

SEQ ID NO: 50419 - DNA, 17 bp, Arabidopsis thaliana
atcaggaggctacacgc

SEQ ID NO: 50420 - DNA, 17 bp, Arabidopsis thaliana
atcaggaggctacatgc

SEQ ID NO: 50421 - DNA, 17 bp, Arabidopsis thaliana
atcaggaggtgcctaag

SEQ ID NO: 50422 - DNA, 17 bp, Arabidopsis thaliana
atcaggaggttacacgc

SEQ ID NO: 50423 - DNA, 17 bp, Arabidopsis thaliana
atcaggaggttataaac

SEQ ID NO: 50424 - DNA, 17 bp, Arabidopsis thaliana
atcaggaggttctgagg

SEQ ID NO: 50425 - DNA, 17 bp, Arabidopsis thaliana
atcaggaggttctggac

SEQ ID NO: 50426 - DNA, 17 bp, Arabidopsis thaliana
atcaggaggttctgggc

SEQ ID NO: 50427 - DNA, 17 bp, Arabidopsis thaliana
atcaggaggttttggac

SEQ ID NO: 50428 - DNA, 17 bp, Arabidopsis thaliana
atcaggaggttttggat

SEQ ID NO: 50429 - DNA, 17 bp, Arabidopsis thaliana
atcaggaggttttgggc

SEQ ID NO: 50430 - DNA, 17 bp, Arabidopsis thaliana
atcaggaggtttttgga

SEQ ID NO: 50431 - DNA, 17 bp, Arabidopsis thaliana
atcaggagtatctgaga

SEQ ID NO: 50432 - DNA, 17 bp, Arabidopsis thaliana
atcaggagtcgttgacg

SEQ ID NO: 50433 - DNA, 17 bp, Arabidopsis thaliana
atcaggagtgtccaaaa

SEQ ID NO: 50434 - DNA, 17 bp, Arabidopsis thaliana
atcaggagttttcttgg

SEQ ID NO: 50435 - DNA, 17 bp, Arabidopsis thaliana
atcaggatggactactc

SEQ ID NO: 50436 - DNA, 17 bp, Arabidopsis thaliana
atcaggcagtccatggg

SEQ ID NO: 50437 - DNA, 17 bp, Arabidopsis thaliana
atcaggcagtgtggtgg

SEQ ID NO: 50438 - DNA, 17 bp, Arabidopsis thaliana
atcaggccatctacatt

SEQ ID NO: 50439 - DNA, 17 bp, Arabidopsis thaliana
atcaggcccaacaaagt

SEQ ID NO: 50440 - DNA, 17 bp, Arabidopsis thaliana
atcaggccgaaagtcgt

SEQ ID NO: 50441 - DNA, 17 bp, Arabidopsis thaliana
atcaggccgccaacatt

SEQ ID NO: 50442 - DNA, 17 bp, Arabidopsis thaliana
atcaggccgcctgtatt

SEQ ID NO: 50443 - DNA, 17 bp, Arabidopsis thaliana
atcaggcctctgcaccg

SEQ ID NO: 50444 - DNA, 17 bp, Arabidopsis thaliana
atcaggcgcttgaagac

SEQ ID NO: 50445 - DNA, 17 bp, Arabidopsis thaliana
atcaggcggatcaacca

SEQ ID NO: 50446 - DNA, 17 bp, Arabidopsis thaliana
atcaggcggatcaagca

SEQ ID NO: 50447 - DNA, 17 bp, Arabidopsis thaliana
atcaggcggatcaagcg

SEQ ID NO: 50448 - DNA, 17 bp, Arabidopsis thaliana
atcaggcggatcaagta

SEQ ID NO: 50449 - DNA, 17 bp, Arabidopsis thaliana
atcaggctaccacgtcg

SEQ ID NO: 50450 - DNA, 17 bp, Arabidopsis thaliana
atcaggctgtgccactg

SEQ ID NO: 50451 - DNA, 17 bp, Arabidopsis thaliana
atcagggatgtccggat

SEQ ID NO: 50452 - DNA, 17 bp, Arabidopsis thaliana
atcagggattgcaagcg

SEQ ID NO: 50453 - DNA, 17 bp, Arabidopsis thaliana
atcagggcacgtctgcc

SEQ ID NO: 50454 - DNA, 17 bp, Arabidopsis thaliana
atcagggcccatgatcc

SEQ ID NO: 50455 - DNA, 17 bp, Arabidopsis thaliana
atcagggcccggggcct

SEQ ID NO: 50456 - DNA, 17 bp, Arabidopsis thaliana
atcagggcttgtccggt

SEQ ID NO: 50457 - DNA, 17 bp, Arabidopsis thaliana
atcaggggcagcaggac

SEQ ID NO: 50458 - DNA, 17 bp, Arabidopsis thaliana
atcaggggtagccagat

SEQ ID NO: 50459 - DNA, 17 bp, Arabidopsis thaliana
atcaggggtttacacga

SEQ ID NO: 50460 - DNA, 17 bp, Arabidopsis thaliana
atcagggtcttgaactg

SEQ ID NO: 50461 - DNA, 17 bp, Arabidopsis thaliana
atcagggtgtattactg

SEQ ID NO: 50462 - DNA, 17 bp, Arabidopsis thaliana
atcaggtcaaccaggtt

SEQ ID NO: 50463 - DNA, 17 bp, Arabidopsis thaliana
atcaggtcataccacgg

SEQ ID NO: 50464 - DNA, 17 bp, Arabidopsis thaliana
atcaggtccgctccgcg

SEQ ID NO: 50465 - DNA, 17 bp, Arabidopsis thaliana
atcaggtccgctccgtg

SEQ ID NO: 50466 - DNA, 17 bp, Arabidopsis thaliana
atcaggtccgcttcttc

SEQ ID NO: 50467 - DNA, 17 bp, Arabidopsis thaliana
atcaggtccgttttgtc

SEQ ID NO: 50468 - DNA, 17 bp, Arabidopsis thaliana
atcaggtcctggtgcac

SEQ ID NO: 50469 - DNA, 17 bp, Arabidopsis thaliana
atcaggtccttcccacg

SEQ ID NO: 50470 - DNA, 17 bp, Arabidopsis thaliana
atcaggtcgcttcgggt

SEQ ID NO: 50471 - DNA, 17 bp, Arabidopsis thaliana
atcaggtcgtctgcatt

SEQ ID NO: 50472 - DNA, 17 bp, Arabidopsis thaliana
atcaggtctccaaggta

SEQ ID NO: 50473 - DNA, 17 bp, Arabidopsis thaliana
atcaggtctccaaggtg

SEQ ID NO: 50474 - DNA, 17 bp, Arabidopsis thaliana
atcaggtgaaccaattg

SEQ ID NO: 50475 - DNA, 17 bp, Arabidopsis thaliana
atcaggtgaacgacctg

SEQ ID NO: 50476 - DNA, 17 bp, Arabidopsis thaliana
atcaggtgacgtgacat

SEQ ID NO: 50477 - DNA, 17 bp, Arabidopsis thaliana
atcaggtgacgtggcag

SEQ ID NO: 50478 - DNA, 17 bp, Arabidopsis thaliana
atcaggtgactgggctt

SEQ ID NO: 50479 - DNA, 17 bp, Arabidopsis thaliana
atcaggtgtgataagat

SEQ ID NO: 50480 - DNA, 17 bp, Arabidopsis thaliana
atcaggtgtgatgagat

SEQ ID NO: 50481 - DNA, 17 bp, Arabidopsis thaliana
atcaggttcggtttgag

SEQ ID NO: 50482 - DNA, 17 bp, Arabidopsis thaliana
atcaggttctttgaggc

SEQ ID NO: 50483 - DNA, 17 bp, Arabidopsis thaliana
atcaggttgagtatgtg

SEQ ID NO: 50484 - DNA, 17 bp, Arabidopsis thaliana
atcaggttgtggtttaa

SEQ ID NO: 50485 - DNA, 17 bp, Arabidopsis thaliana
atcaggtttggattttc

SEQ ID NO: 50486 - DNA, 17 bp, Arabidopsis thaliana
atcaggttttttcgggc

SEQ ID NO: 50487 - DNA, 17 bp, Arabidopsis thaliana
atcaggttttttcgtgc

SEQ ID NO: 50488 - DNA, 17 bp, Arabidopsis thaliana
atcaggttttttggagc

SEQ ID NO: 50489 - DNA, 17 bp, Arabidopsis thaliana
atcaggtttttttcggg

SEQ ID NO: 50490 - DNA, 17 bp, Arabidopsis thaliana
atcagtaaccgtagcgc

SEQ ID NO: 50491 - DNA, 17 bp, Arabidopsis thaliana
atcagtaagagagtcac

SEQ ID NO: 50492 - DNA, 17 bp, Arabidopsis thaliana
atcagtaagagcgtctc

SEQ ID NO: 50493 - DNA, 17 bp, Arabidopsis thaliana
atcagtacttggcgcac

SEQ ID NO: 50494 - DNA, 17 bp, Arabidopsis thaliana
atcagtagaaacacctc

SEQ ID NO: 50495 - DNA, 17 bp, Arabidopsis thaliana
atcagtagacctttcac

SEQ ID NO: 50496 - DNA, 17 bp, Arabidopsis thaliana
atcagtagctggtccga

SEQ ID NO: 50497 - DNA, 17 bp, Arabidopsis thaliana
atcagtaggtgagggtg

SEQ ID NO: 50498 - DNA, 17 bp, Arabidopsis thaliana
atcagtataccgcaggt

SEQ ID NO: 50499 - DNA, 17 bp, Arabidopsis thaliana
atcagtatccccttttg

SEQ ID NO: 50500 - DNA, 17 bp, Arabidopsis thaliana
atcagtatcgctgttgg

SEQ ID NO: 50501 - DNA, 17 bp, Arabidopsis thaliana
atcagtatgggcctaac

SEQ ID NO: 50502 - DNA, 17 bp, Arabidopsis thaliana
atcagtcaactgccgga

SEQ ID NO: 50503 - DNA, 17 bp, Arabidopsis thaliana
atcagtcagtttctgcc

SEQ ID NO: 50504 - DNA, 17 bp, Arabidopsis thaliana
atcagtccactgataca

SEQ ID NO: 50505 - DNA, 17 bp, Arabidopsis thaliana
atcagtccactgatacg

SEQ ID NO: 50506 - DNA, 17 bp, Arabidopsis thaliana
atcagtccataatggag

SEQ ID NO: 50507 - DNA, 17 bp, Arabidopsis thaliana
atcagtccataccattt

SEQ ID NO: 50508 - DNA, 17 bp, Arabidopsis thaliana
atcagtcccgatcttga

SEQ ID NO: 50509 - DNA, 17 bp, Arabidopsis thaliana
atcagtccctggtttca

SEQ ID NO: 50510 - DNA, 17 bp, Arabidopsis thaliana
atcagtcgaagagaccg

SEQ ID NO: 50511 - DNA, 17 bp, Arabidopsis thaliana
atcagtcgattagccag

SEQ ID NO: 50512 - DNA, 17 bp, Arabidopsis thaliana
atcagtcgctgctttcg

SEQ ID NO: 50513 - DNA, 17 bp, Arabidopsis thaliana
atcagtcggttctgcaa

SEQ ID NO: 50514 - DNA, 17 bp, Arabidopsis thaliana
atcagtcgtctttgtac

SEQ ID NO: 50515 - DNA, 17 bp, Arabidopsis thaliana
atcagtctcaaaaagac

SEQ ID NO: 50516 - DNA, 17 bp, Arabidopsis thaliana
atcagtctcactcttct

SEQ ID NO: 50517 - DNA, 17 bp, Arabidopsis thaliana
atcagtctcagaatttg

SEQ ID NO: 50518 - DNA, 17 bp, Arabidopsis thaliana
atcagtgagaacttgac

SEQ ID NO: 50519 - DNA, 17 bp, Arabidopsis thaliana
atcagtgagtcccataa

SEQ ID NO: 50520 - DNA, 17 bp, Arabidopsis thaliana
atcagtgatcgctctgt

SEQ ID NO: 50521 - DNA, 17 bp, Arabidopsis thaliana
atcagtgattaatcgtc

SEQ ID NO: 50522 - DNA, 17 bp, Arabidopsis thaliana
atcagtgattatgcgct

SEQ ID NO: 50523 - DNA, 17 bp, Arabidopsis thaliana
atcagtgcagtgatcta

SEQ ID NO: 50524 - DNA, 17 bp, Arabidopsis thaliana
atcagtggaacctaatt

SEQ ID NO: 50525 - DNA, 17 bp, Arabidopsis thaliana
atcagtggacggatcac

SEQ ID NO: 50526 - DNA, 17 bp, Arabidopsis thaliana
atcagtggcagccgatg

SEQ ID NO: 50527 - DNA, 17 bp, Arabidopsis thaliana
atcagtggcgcagcgga

SEQ ID NO: 50528 - DNA, 17 bp, Arabidopsis thaliana
atcagtggctcactgct

SEQ ID NO: 50529 - DNA, 17 bp, Arabidopsis thaliana
atcagtggctctatctg

SEQ ID NO: 50530 - DNA, 17 bp, Arabidopsis thaliana
atcagtgggctgatact

SEQ ID NO: 50531 - DNA, 17 bp, Arabidopsis thaliana
atcagtggtggctgctt

SEQ ID NO: 50532 - DNA, 17 bp, Arabidopsis thaliana
atcagtgtaggcgctga

SEQ ID NO: 50533 - DNA, 17 bp, Arabidopsis thaliana
atcagtgtcctggtgtt

SEQ ID NO: 50534 - DNA, 17 bp, Arabidopsis thaliana
atcagtgtcgtctaaac

SEQ ID NO: 50535 - DNA, 17 bp, Arabidopsis thaliana
atcagtgtgactatgct

SEQ ID NO: 50536 - DNA, 17 bp, Arabidopsis thaliana
atcagtgtgactttgct

SEQ ID NO: 50537 - DNA, 17 bp, Arabidopsis thaliana
atcagttaagacgggtg

SEQ ID NO: 50538 - DNA, 17 bp, Arabidopsis thaliana
atcagttacggctgagt

SEQ ID NO: 50539 - DNA, 17 bp, Arabidopsis thaliana
atcagttactggtttca

SEQ ID NO: 50540 - DNA, 17 bp, Arabidopsis thaliana
atcagttaggtagtgca

SEQ ID NO: 50541 - DNA, 17 bp, Arabidopsis thaliana
atcagttatggagatcg

SEQ ID NO: 50542 - DNA, 17 bp, Arabidopsis thaliana
atcagttcaaactcctt

SEQ ID NO: 50543 - DNA, 17 bp, Arabidopsis thaliana
atcagttccgagatatc

SEQ ID NO: 50544 - DNA, 17 bp, Arabidopsis thaliana
atcagttcctgaatggc

SEQ ID NO: 50545 - DNA, 17 bp, Arabidopsis thaliana
atcagttccttcagggt

SEQ ID NO: 50546 - DNA, 17 bp, Arabidopsis thaliana
atcagttcgcgttgact

SEQ ID NO: 50547 - DNA, 17 bp, Arabidopsis thaliana
atcagttcggcagatcg

SEQ ID NO: 50548 - DNA, 17 bp, Arabidopsis thaliana
atcagttctagacttct

SEQ ID NO: 50549 - DNA, 17 bp, Arabidopsis thaliana
atcagttctcggttgcc

SEQ ID NO: 50550 - DNA, 17 bp, Arabidopsis thaliana
atcagttgaaccgggca

SEQ ID NO: 50551 - DNA, 17 bp, Arabidopsis thaliana
atcagttggggcggctc

SEQ ID NO: 50552 - DNA, 17 bp, Arabidopsis thaliana
atcagttgtgctttgac

SEQ ID NO: 50553 - DNA, 17 bp, Arabidopsis thaliana
atcagtttagccaggtt

SEQ ID NO: 50554 - DNA, 17 bp, Arabidopsis thaliana
atcagtttaggttcggt

SEQ ID NO: 50555 - DNA, 17 bp, Arabidopsis thaliana
atcagtttatggtttcg

SEQ ID NO: 50556 - DNA, 17 bp, Arabidopsis thaliana
atcagtttcgtatgcag

SEQ ID NO: 50557 - DNA, 17 bp, Arabidopsis thaliana
atcagtttcgtctcaaa

SEQ ID NO: 50558 - DNA, 17 bp, Arabidopsis thaliana
atcagtttctgctgctg

SEQ ID NO: 50559 - DNA, 17 bp, Arabidopsis thaliana
atcagtttctgctgctt

SEQ ID NO: 50560 - DNA, 17 bp, Arabidopsis thaliana
atcataaaaaccgctag

SEQ ID NO: 50561 - DNA, 17 bp, Arabidopsis thaliana
atcataaacggcaagtc

SEQ ID NO: 50562 - DNA, 17 bp, Arabidopsis thaliana
atcataacaccgccggt

SEQ ID NO: 50563 - DNA, 17 bp, Arabidopsis thaliana
atcataaccatcaggaa

SEQ ID NO: 50564 - DNA, 17 bp, Arabidopsis thaliana
atcataaccatcgggaa

SEQ ID NO: 50565 - DNA, 17 bp, Arabidopsis thaliana
atcataaccatttcaat

SEQ ID NO: 50566 - DNA, 17 bp, Arabidopsis thaliana
atcataactcgaccgat

SEQ ID NO: 50567 - DNA, 17 bp, Arabidopsis thaliana
atcataagagcaacctc

SEQ ID NO: 50568 - DNA, 17 bp, Arabidopsis thaliana
atcataagagcagcctc

SEQ ID NO: 50569 - DNA, 17 bp, Arabidopsis thaliana
atcataagtagtcaggg

SEQ ID NO: 50570 - DNA, 17 bp, Arabidopsis thaliana
atcataattccggatta

SEQ ID NO: 50571 - DNA, 17 bp, Arabidopsis thaliana
atcataattccggattc

SEQ ID NO: 50572 - DNA, 17 bp, Arabidopsis thaliana
atcataattgacacggt

SEQ ID NO: 50573 - DNA, 17 bp, Arabidopsis thaliana
atcatacactcatcagc

SEQ ID NO: 50574 - DNA, 17 bp, Arabidopsis thaliana
atcatacagcagtgagc

SEQ ID NO: 50575 - DNA, 17 bp, Arabidopsis thaliana
atcataccagcactaat

SEQ ID NO: 50576 - DNA, 17 bp, Arabidopsis thaliana
atcataccagtgatcgc

SEQ ID NO: 50577 - DNA, 17 bp, Arabidopsis thaliana
atcataccgcgagatca

SEQ ID NO: 50578 - DNA, 17 bp, Arabidopsis thaliana
atcatacgatggagcgt

SEQ ID NO: 50579 - DNA, 17 bp, Arabidopsis thaliana
atcatactcgctggttt

SEQ ID NO: 50580 - DNA, 17 bp, Arabidopsis thaliana
atcatactgaccagcaa

SEQ ID NO: 50581 - DNA, 17 bp, Arabidopsis thaliana
atcatagacatattttc

SEQ ID NO: 50582 - DNA, 17 bp, Arabidopsis thaliana
atcatagaccggttctt

SEQ ID NO: 50583 - DNA, 17 bp, Arabidopsis thaliana
atcatagaggccggaca

SEQ ID NO: 50584 - DNA, 17 bp, Arabidopsis thaliana
atcatagaggctcgtca

SEQ ID NO: 50585 - DNA, 17 bp, Arabidopsis thaliana
atcatagcctgtccgcc

SEQ ID NO: 50586 - DNA, 17 bp, Arabidopsis thaliana
atcatagcggttggcgt

SEQ ID NO: 50587 - DNA, 17 bp, Arabidopsis thaliana
atcatagctccgtgccg

SEQ ID NO: 50588 - DNA, 17 bp, Arabidopsis thaliana
atcatagtccgcctctg

SEQ ID NO: 50589 - DNA, 17 bp, Arabidopsis thaliana
atcatagtcctggacct

SEQ ID NO: 50590 - DNA, 17 bp, Arabidopsis thaliana
atcatagtcctggacgt

SEQ ID NO: 50591 - DNA, 17 bp, Arabidopsis thaliana
atcatatcagactgtgg

SEQ ID NO: 50592 - DNA, 17 bp, Arabidopsis thaliana
atcatatccgccacagg

SEQ ID NO: 50593 - DNA, 17 bp, Arabidopsis thaliana
atcatatcggctaatcc

SEQ ID NO: 50594 - DNA, 17 bp, Arabidopsis thaliana
atcatatctcaccagga

SEQ ID NO: 50595 - DNA, 17 bp, Arabidopsis thaliana
atcatatgatcacgcga

SEQ ID NO: 50596 - DNA, 17 bp, Arabidopsis thaliana
atcatatgccgacacgg

SEQ ID NO: 50597 - DNA, 17 bp, Arabidopsis thaliana
atcatatgctactcctt

SEQ ID NO: 50598 - DNA, 17 bp, Arabidopsis thaliana
atcatatgctttggttc

SEQ ID NO: 50599 - DNA, 17 bp, Arabidopsis thaliana
atcatatggacagagtt

SEQ ID NO: 50600 - DNA, 17 bp, Arabidopsis thaliana
atcatatggagaaagtt

SEQ ID NO: 50601 - DNA, 17 bp, Arabidopsis thaliana
atcatatggagagagtt

SEQ ID NO: 50602 - DNA, 17 bp, Arabidopsis thaliana
atcatatggtgagagtt

SEQ ID NO: 50603 - DNA, 17 bp, Arabidopsis thaliana
atcatattcatggactc

SEQ ID NO: 50604 - DNA, 17 bp, Arabidopsis thaliana
atcatattctttgattc

SEQ ID NO: 50605 - DNA, 17 bp, Arabidopsis thaliana
atcatattgacgacgag

SEQ ID NO: 50606 - DNA, 17 bp, Arabidopsis thaliana
atcatatttccgtcact

SEQ ID NO: 50607 - DNA, 17 bp, Arabidopsis thaliana
atcatattttcccgcta

SEQ ID NO: 50608 - DNA, 17 bp, Arabidopsis thaliana
atcatcaaagccagttg

SEQ ID NO: 50609 - DNA, 17 bp, Arabidopsis thaliana
atcatcaaccgatttag

SEQ ID NO: 50610 - DNA, 17 bp, Arabidopsis thaliana
atcatcaaccggtttag

SEQ ID NO: 50611 - DNA, 17 bp, Arabidopsis thaliana
atcatcaactgctctga

SEQ ID NO: 50612 - DNA, 17 bp, Arabidopsis thaliana
atcatcaactggagaga

SEQ ID NO: 50613 - DNA, 17 bp, Arabidopsis thaliana
atcatcaacttcacatg

SEQ ID NO: 50614 - DNA, 17 bp, Arabidopsis thaliana
atcatcaacttccaata

SEQ ID NO: 50615 - DNA, 17 bp, Arabidopsis thaliana
atcatcaacttcgccgc

SEQ ID NO: 50616 - DNA, 17 bp, Arabidopsis thaliana
atcatcaagggctgcca

SEQ ID NO: 50617 - DNA, 17 bp, Arabidopsis thaliana
atcatcaaggtttcacc

SEQ ID NO: 50618 - DNA, 17 bp, Arabidopsis thaliana
atcatcaagtgcggctt

SEQ ID NO: 50619 - DNA, 17 bp, Arabidopsis thaliana
atcatcaagttagaccc

SEQ ID NO: 50620 - DNA, 17 bp, Arabidopsis thaliana
atcatcaatagcataga

SEQ ID NO: 50621 - DNA, 17 bp, Arabidopsis thaliana
atcatcaatcagtgggc

SEQ ID NO: 50622 - DNA, 17 bp, Arabidopsis thaliana
atcatcaatgaacacat

SEQ ID NO: 50623 - DNA, 17 bp, Arabidopsis thaliana
atcatcaatggacacat

SEQ ID NO: 50624 - DNA, 17 bp, Arabidopsis thaliana
atcatcacacaagtgag

SEQ ID NO: 50625 - DNA, 17 bp, Arabidopsis thaliana
atcatcacaccagtaag

SEQ ID NO: 50626 - DNA, 17 bp, Arabidopsis thaliana
atcatcacaccggagag

SEQ ID NO: 50627 - DNA, 17 bp, Arabidopsis thaliana
atcatcacactggagag

SEQ ID NO: 50628 - DNA, 17 bp, Arabidopsis thaliana
atcatcacaggttttcc

SEQ ID NO: 50629 - DNA, 17 bp, Arabidopsis thaliana
atcatcaccgcttccgc

SEQ ID NO: 50630 - DNA, 17 bp, Arabidopsis thaliana
atcatcaccggcaatgt

SEQ ID NO: 50631 - DNA, 17 bp, Arabidopsis thaliana
atcatcacctaaaacat

SEQ ID NO: 50632 - DNA, 17 bp, Arabidopsis thaliana
atcatcacgatcacaat

SEQ ID NO: 50633 - DNA, 17 bp, Arabidopsis thaliana
atcatcacgatcactat

SEQ ID NO: 50634 - DNA, 17 bp, Arabidopsis thaliana
atcatcacgatggatgt

SEQ ID NO: 50635 - DNA, 17 bp, Arabidopsis thaliana
atcatcacgtccatcaa

SEQ ID NO: 50636 - DNA, 17 bp, Arabidopsis thaliana
atcatcactgcttggca

SEQ ID NO: 50637 - DNA, 17 bp, Arabidopsis thaliana
atcatcactgttatgca

SEQ ID NO: 50638 - DNA, 17 bp, Arabidopsis thaliana
atcatcactttagcatt

SEQ ID NO: 50639 - DNA, 17 bp, Arabidopsis thaliana
atcatcagaactgctgc

SEQ ID NO: 50640 - DNA, 17 bp, Arabidopsis thaliana
atcatcagactcaggaa

SEQ ID NO: 50641 - DNA, 17 bp, Arabidopsis thaliana
atcatcagagcaacggg

SEQ ID NO: 50642 - DNA, 17 bp, Arabidopsis thaliana
atcatcagagtccgctg

SEQ ID NO: 50643 - DNA, 17 bp, Arabidopsis thaliana
atcatcagcccactcaa

SEQ ID NO: 50644 - DNA, 17 bp, Arabidopsis thaliana
atcatcagccgagattt

SEQ ID NO: 50645 - DNA, 17 bp, Arabidopsis thaliana
atcatcagctaagcgtt

SEQ ID NO: 50646 - DNA, 17 bp, Arabidopsis thaliana
atcatcagctcgcgttg

SEQ ID NO: 50647 - DNA, 17 bp, Arabidopsis thaliana
atcatcagctcggatga

SEQ ID NO: 50648 - DNA, 17 bp, Arabidopsis thaliana
atcatcaggtcgtagat

SEQ ID NO: 50649 - DNA, 17 bp, Arabidopsis thaliana
atcatcaggttaaccgg

SEQ ID NO: 50650 - DNA, 17 bp, Arabidopsis thaliana
atcatcaggttgctcgt

SEQ ID NO: 50651 - DNA, 17 bp, Arabidopsis thaliana
atcatcagtcaacttat

SEQ ID NO: 50652 - DNA, 17 bp, Arabidopsis thaliana
atcatcagtcggttcgg

SEQ ID NO: 50653 - DNA, 17 bp, Arabidopsis thaliana
atcatcagtggtttttg

SEQ ID NO: 50654 - DNA, 17 bp, Arabidopsis thaliana
atcatcataccagtgag

SEQ ID NO: 50655 - DNA, 17 bp, Arabidopsis thaliana
atcatcatcaggagagt

SEQ ID NO: 50656 - DNA, 17 bp, Arabidopsis thaliana
atcatcatccgtcataa

SEQ ID NO: 50657 - DNA, 17 bp, Arabidopsis thaliana
atcatcatcgcctcctt

SEQ ID NO: 50658 - DNA, 17 bp, Arabidopsis thaliana
atcatcatcggtgtcgg

SEQ ID NO: 50659 - DNA, 17 bp, Arabidopsis thaliana
atcatcatctcaaacta

SEQ ID NO: 50660 - DNA, 17 bp, Arabidopsis thaliana
atcatcatctcgttcaa

SEQ ID NO: 50661 - DNA, 17 bp, Arabidopsis thaliana
atcatcatctggatttt

SEQ ID NO: 50662 - DNA, 17 bp, Arabidopsis thaliana
atcatcatcttaattac

SEQ ID NO: 50663 - DNA, 17 bp, Arabidopsis thaliana
atcatcatcttaattgc

SEQ ID NO: 50664 - DNA, 17 bp, Arabidopsis thaliana
atcatcatctttgcctg

SEQ ID NO: 50665 - DNA, 17 bp, Arabidopsis thaliana
atcatcatgaagtttgc

SEQ ID NO: 50666 - DNA, 17 bp, Arabidopsis thaliana
atcatcatgaccaactt

SEQ ID NO: 50667 - DNA, 17 bp, Arabidopsis thaliana
atcatcatgatttcacc

SEQ ID NO: 50668 - DNA, 17 bp, Arabidopsis thaliana
atcatcatgccgagcta

SEQ ID NO: 50669 - DNA, 17 bp, Arabidopsis thaliana
atcatcattcagcaccc

SEQ ID NO: 50670 - DNA, 17 bp, Arabidopsis thaliana
atcatcattcgccggag

SEQ ID NO: 50671 - DNA, 17 bp, Arabidopsis thaliana
atcatcattcggctgct

SEQ ID NO: 50672 - DNA, 17 bp, Arabidopsis thaliana
atcatcatttaagccgt

SEQ ID NO: 50673 - DNA, 17 bp, Arabidopsis thaliana
atcatcattttggccac

SEQ ID NO: 50674 - DNA, 17 bp, Arabidopsis thaliana
atcatccaagatcttct

SEQ ID NO: 50675 - DNA, 17 bp, Arabidopsis thaliana
atcatccacaagatctg

SEQ ID NO: 50676 - DNA, 17 bp, Arabidopsis thaliana
atcatccattcaaagtg

SEQ ID NO: 50677 - DNA, 17 bp, Arabidopsis thaliana
atcatccattggattcc

SEQ ID NO: 50678 - DNA, 17 bp, Arabidopsis thaliana
atcatcccaagtctcca

SEQ ID NO: 50679 - DNA, 17 bp, Arabidopsis thaliana
atcatcccagatggtga

SEQ ID NO: 50680 - DNA, 17 bp, Arabidopsis thaliana
atcatcccattcggtca

SEQ ID NO: 50681 - DNA, 17 bp, Arabidopsis thaliana
atcatccgaagcgtcgt

SEQ ID NO: 50682 - DNA, 17 bp, Arabidopsis thaliana
atcatccgacgtggctt

SEQ ID NO: 50683 - DNA, 17 bp, Arabidopsis thaliana
atcatccgagaaactta

SEQ ID NO: 50684 - DNA, 17 bp, Arabidopsis thaliana
atcatccgcactgcgct

SEQ ID NO: 50685 - DNA, 17 bp, Arabidopsis thaliana
atcatccgctagacgtt

SEQ ID NO: 50686 - DNA, 17 bp, Arabidopsis thaliana
atcatccgctccatctt

SEQ ID NO: 50687 - DNA, 17 bp, Arabidopsis thaliana
atcatccgctgaaacgc

SEQ ID NO: 50688 - DNA, 17 bp, Arabidopsis thaliana
atcatccgctgagacgc

SEQ ID NO: 50689 - DNA, 17 bp, Arabidopsis thaliana
atcatccgggtggaata

SEQ ID NO: 50690 - DNA, 17 bp, Arabidopsis thaliana
atcatccggtggatgtt

SEQ ID NO: 50691 - DNA, 17 bp, Arabidopsis thaliana
atcatccgtagtgtgac

SEQ ID NO: 50692 - DNA, 17 bp, Arabidopsis thaliana
atcatccgtgtcggtcg

SEQ ID NO: 50693 - DNA, 17 bp, Arabidopsis thaliana
atcatccgtttgactct

SEQ ID NO: 50694 - DNA, 17 bp, Arabidopsis thaliana
atcatcctatcttggct

SEQ ID NO: 50695 - DNA, 17 bp, Arabidopsis thaliana
atcatcctctcttcctt

SEQ ID NO: 50696 - DNA, 17 bp, Arabidopsis thaliana
atcatcctgctgttaca

SEQ ID NO: 50697 - DNA, 17 bp, Arabidopsis thaliana
atcatccttccagagct

SEQ ID NO: 50698 - DNA, 17 bp, Arabidopsis thaliana
atcatccttccaggttg

SEQ ID NO: 50699 - DNA, 17 bp, Arabidopsis thaliana
atcatccttctattcca

SEQ ID NO: 50700 - DNA, 17 bp, Arabidopsis thaliana
atcatcgaaaacaattc

SEQ ID NO: 50701 - DNA, 17 bp, Arabidopsis thaliana
atcatcgaccgtatcag

SEQ ID NO: 50702 - DNA, 17 bp, Arabidopsis thaliana
atcatcgagtctttgaa

SEQ ID NO: 50703 - DNA, 17 bp, Arabidopsis thaliana
atcatcgagttgatacc

SEQ ID NO: 50704 - DNA, 17 bp, Arabidopsis thaliana
atcatcgatctggttcg

SEQ ID NO: 50705 - DNA, 17 bp, Arabidopsis thaliana
atcatcgatgaacgtct

SEQ ID NO: 50706 - DNA, 17 bp, Arabidopsis thaliana
atcatcgatgtccatgt

SEQ ID NO: 50707 - DNA, 17 bp, Arabidopsis thaliana
atcatcgattggggctc

SEQ ID NO: 50708 - DNA, 17 bp, Arabidopsis thaliana
atcatcgccgtaactgt

SEQ ID NO: 50709 - DNA, 17 bp, Arabidopsis thaliana
atcatcgccttgcgtct

SEQ ID NO: 50710 - DNA, 17 bp, Arabidopsis thaliana
atcatcgcctttatccg

SEQ ID NO: 50711 - DNA, 17 bp, Arabidopsis thaliana
atcatcgcctttattta

SEQ ID NO: 50712 - DNA, 17 bp, Arabidopsis thaliana
atcatcgctcgattcgt

SEQ ID NO: 50713 - DNA, 17 bp, Arabidopsis thaliana
atcatcgctgggcatgg

SEQ ID NO: 50714 - DNA, 17 bp, Arabidopsis thaliana
atcatcggaccggtatc

SEQ ID NO: 50715 - DNA, 17 bp, Arabidopsis thaliana
atcatcggatgttgctt

SEQ ID NO: 50716 - DNA, 17 bp, Arabidopsis thaliana
atcatcggcaaaacaca

SEQ ID NO: 50717 - DNA, 17 bp, Arabidopsis thaliana
atcatcggcacctccag

SEQ ID NO: 50718 - DNA, 17 bp, Arabidopsis thaliana
atcatcggccgcaggtt

SEQ ID NO: 50719 - DNA, 17 bp, Arabidopsis thaliana
atcatcggctggcggac

SEQ ID NO: 50720 - DNA, 17 bp, Arabidopsis thaliana
atcatcggctttccaat

SEQ ID NO: 50721 - DNA, 17 bp, Arabidopsis thaliana
atcatcgggctcttgtc

SEQ ID NO: 50722 - DNA, 17 bp, Arabidopsis thaliana
atcatcgggtcgagcat

SEQ ID NO: 50723 - DNA, 17 bp, Arabidopsis thaliana
atcatcggtcctttctt

SEQ ID NO: 50724 - DNA, 17 bp, Arabidopsis thaliana
atcatcggtcgattaag

SEQ ID NO: 50725 - DNA, 17 bp, Arabidopsis thaliana
atcatcggtttgtcaaa

SEQ ID NO: 50726 - DNA, 17 bp, Arabidopsis thaliana
atcatcgtagatgtcaa

SEQ ID NO: 50727 - DNA, 17 bp, Arabidopsis thaliana
atcatcgtcgttatgtt

SEQ ID NO: 50728 - DNA, 17 bp, Arabidopsis thaliana
atcatcgtctcttctgc

SEQ ID NO: 50729 - DNA, 17 bp, Arabidopsis thaliana
atcatcgtctgctgttt

SEQ ID NO: 50730 - DNA, 17 bp, Arabidopsis thaliana
atcatcgtgaatgcgtt

SEQ ID NO: 50731 - DNA, 17 bp, Arabidopsis thaliana
atcatcgtggtgcctgg

SEQ ID NO: 50732 - DNA, 17 bp, Arabidopsis thaliana
atcatcgtgtgatattt

SEQ ID NO: 50733 - DNA, 17 bp, Arabidopsis thaliana
atcatcgttatacggga

SEQ ID NO: 50734 - DNA, 17 bp, Arabidopsis thaliana
atcatcgttgcattcga

SEQ ID NO: 50735 - DNA, 17 bp, Arabidopsis thaliana
atcatcgttgggcatgg

SEQ ID NO: 50736 - DNA, 17 bp, Arabidopsis thaliana
atcatctaagcccatca

SEQ ID NO: 50737 - DNA, 17 bp, Arabidopsis thaliana
atcatctacaccgaaag

SEQ ID NO: 50738 - DNA, 17 bp, Arabidopsis thaliana
atcatctacaccgacgg

SEQ ID NO: 50739 - DNA, 17 bp, Arabidopsis thaliana
atcatctacgaggtcag

SEQ ID NO: 50740 - DNA, 17 bp, Arabidopsis thaliana
atcatctagatctgggt

SEQ ID NO: 50741 - DNA, 17 bp, Arabidopsis thaliana
atcatctagatgatggg

SEQ ID NO: 50742 - DNA, 17 bp, Arabidopsis thaliana
atcatctagatgtcgat

SEQ ID NO: 50743 - DNA, 17 bp, Arabidopsis thaliana
atcatctagttttgcag

SEQ ID NO: 50744 - DNA, 17 bp, Arabidopsis thaliana
atcatctatcgcctgcc

SEQ ID NO: 50745 - DNA, 17 bp, Arabidopsis thaliana
atcatctatgcatacat

SEQ ID NO: 50746 - DNA, 17 bp, Arabidopsis thaliana
atcatctatgggtttgg

SEQ ID NO: 50747 - DNA, 17 bp, Arabidopsis thaliana
atcatctatggtctctg

SEQ ID NO: 50748 - DNA, 17 bp, Arabidopsis thaliana
atcatctcaaactttac

SEQ ID NO: 50749 - DNA, 17 bp, Arabidopsis thaliana
atcatctcaatctcgct

SEQ ID NO: 50750 - DNA, 17 bp, Arabidopsis thaliana
atcatctcacagactac

SEQ ID NO: 50751 - DNA, 17 bp, Arabidopsis thaliana
atcatctccaaattgct

SEQ ID NO: 50752 - DNA, 17 bp, Arabidopsis thaliana
atcatctccaccctctt

SEQ ID NO: 50753 - DNA, 17 bp, Arabidopsis thaliana
atcatctccatctccgt

SEQ ID NO: 50754 - DNA, 17 bp, Arabidopsis thaliana
atcatctccatgtccgt

SEQ ID NO: 50755 - DNA, 17 bp, Arabidopsis thaliana
atcatctccgtctaaat

SEQ ID NO: 50756 - DNA, 17 bp, Arabidopsis thaliana
atcatctcgactccgcc

SEQ ID NO: 50757 - DNA, 17 bp, Arabidopsis thaliana
atcatctcgactccggc

SEQ ID NO: 50758 - DNA, 17 bp, Arabidopsis thaliana
atcatctcgttttcgca

SEQ ID NO: 50759 - DNA, 17 bp, Arabidopsis thaliana
atcatctctatcaacga

SEQ ID NO: 50760 - DNA, 17 bp, Arabidopsis thaliana
atcatctctcatcaact

SEQ ID NO: 50761 - DNA, 17 bp, Arabidopsis thaliana
atcatctctgagacgag

SEQ ID NO: 50762 - DNA, 17 bp, Arabidopsis thaliana
atcatctctgcatacat

SEQ ID NO: 50763 - DNA, 17 bp, Arabidopsis thaliana
atcatctctgccgcagt

SEQ ID NO: 50764 - DNA, 17 bp, Arabidopsis thaliana
atcatctgacatggctt

SEQ ID NO: 50765 - DNA, 17 bp, Arabidopsis thaliana
atcatctgacgcggctt

SEQ ID NO: 50766 - DNA, 17 bp, Arabidopsis thaliana
atcatctgacgtggcct

SEQ ID NO: 50767 - DNA, 17 bp, Arabidopsis thaliana
atcatctgacgtggctt

SEQ ID NO: 50768 - DNA, 17 bp, Arabidopsis thaliana
atcatctgacttggctt

SEQ ID NO: 50769 - DNA, 17 bp, Arabidopsis thaliana
atcatctgagtccgctg

SEQ ID NO: 50770 - DNA, 17 bp, Arabidopsis thaliana
atcatctgcactacgct

SEQ ID NO: 50771 - DNA, 17 bp, Arabidopsis thaliana
atcatctgcagggggtg

SEQ ID NO: 50772 - DNA, 17 bp, Arabidopsis thaliana
atcatctgccgggggta

SEQ ID NO: 50773 - DNA, 17 bp, Arabidopsis thaliana
atcatctgcctcactgt

SEQ ID NO: 50774 - DNA, 17 bp, Arabidopsis thaliana
atcatctgcgtcgttgt

SEQ ID NO: 50775 - DNA, 17 bp, Arabidopsis thaliana
atcatctgctccctgtg

SEQ ID NO: 50776 - DNA, 17 bp, Arabidopsis thaliana
atcatctggaaccgtgc

SEQ ID NO: 50777 - DNA, 17 bp, Arabidopsis thaliana
atcatctggtcacgggt

SEQ ID NO: 50778 - DNA, 17 bp, Arabidopsis thaliana
atcatctgtcttgatgg

SEQ ID NO: 50779 - DNA, 17 bp, Arabidopsis thaliana
atcatcttacaatgtcg

SEQ ID NO: 50780 - DNA, 17 bp, Arabidopsis thaliana
atcatcttagctttcgg

SEQ ID NO: 50781 - DNA, 17 bp, Arabidopsis thaliana
atcatcttcattgacga

SEQ ID NO: 50782 - DNA, 17 bp, Arabidopsis thaliana
atcatcttccgctggat

SEQ ID NO: 50783 - DNA, 17 bp, Arabidopsis thaliana
atcatcttcctggttcg

SEQ ID NO: 50784 - DNA, 17 bp, Arabidopsis thaliana
atcatcttgaagcaccc

SEQ ID NO: 50785 - DNA, 17 bp, Arabidopsis thaliana
atcatcttgctgatggg

SEQ ID NO: 50786 - DNA, 17 bp, Arabidopsis thaliana
atcatcttgtgtgccac

SEQ ID NO: 50787 - DNA, 17 bp, Arabidopsis thaliana
atcatctttgggtgctt

SEQ ID NO: 50788 - DNA, 17 bp, Arabidopsis thaliana
atcatgaatggcaaact

SEQ ID NO: 50789 - DNA, 17 bp, Arabidopsis thaliana
atcatgaccatgaaaat

SEQ ID NO: 50790 - DNA, 17 bp, Arabidopsis thaliana
atcatgagggtgcctgc

SEQ ID NO: 50791 - DNA, 17 bp, Arabidopsis thaliana
atcatgaggtttatcaa

SEQ ID NO: 50792 - DNA, 17 bp, Arabidopsis thaliana
atcatgagtctacggga

SEQ ID NO: 50793 - DNA, 17 bp, Arabidopsis thaliana
atcatgatctgcgccaa

SEQ ID NO: 50794 - DNA, 17 bp, Arabidopsis thaliana
atcatgatgtggttggt

SEQ ID NO: 50795 - DNA, 17 bp, Arabidopsis thaliana
atcatgatgttgtggcg

SEQ ID NO: 50796 - DNA, 17 bp, Arabidopsis thaliana
atcatgattccaaggat

SEQ ID NO: 50797 - DNA, 17 bp, Arabidopsis thaliana
atcatgcagatgtctca

SEQ ID NO: 50798 - DNA, 17 bp, Arabidopsis thaliana
atcatgcccaaaagtaa

SEQ ID NO: 50799 - DNA, 17 bp, Arabidopsis thaliana
atcatgccccttatgcc

SEQ ID NO: 50800 - DNA, 17 bp, Arabidopsis thaliana
atcatggctaagatgtt

SEQ ID NO: 50801 - DNA, 17 bp, Arabidopsis thaliana
atcatgggctcctccac

SEQ ID NO: 50802 - DNA, 17 bp, Arabidopsis thaliana
atcatggggatctattt

SEQ ID NO: 50803 - DNA, 17 bp, Arabidopsis thaliana
atcatgggttccaagct

SEQ ID NO: 50804 - DNA, 17 bp, Arabidopsis thaliana
atcatggtacttggacc

SEQ ID NO: 50805 - DNA, 17 bp, Arabidopsis thaliana
atcatgtcgtcagtcca

SEQ ID NO: 50806 - DNA, 17 bp, Arabidopsis thaliana
atcatgtgactgcgttt

SEQ ID NO: 50807 - DNA, 17 bp, Arabidopsis thaliana
atcatgtgcatgcgagt

SEQ ID NO: 50808 - DNA, 17 bp, Arabidopsis thaliana
atcatgtgggctttgcc

SEQ ID NO: 50809 - DNA, 17 bp, Arabidopsis thaliana
atcatgtggtgatttgt

SEQ ID NO: 50810 - DNA, 17 bp, Arabidopsis thaliana
atcatgtggtttttgcg

SEQ ID NO: 50811 - DNA, 17 bp, Arabidopsis thaliana
atcatgtgtggccatct

SEQ ID NO: 50812 - DNA, 17 bp, Arabidopsis thaliana
atcatgttacggctgag

SEQ ID NO: 50813 - DNA, 17 bp, Arabidopsis thaliana
atcatgttatgcttctc

SEQ ID NO: 50814 - DNA, 17 bp, Arabidopsis thaliana
atcatgttcgcagtttc

SEQ ID NO: 50815 - DNA, 17 bp, Arabidopsis thaliana
atcatgttggaccatct

SEQ ID NO: 50816 - DNA, 17 bp, Arabidopsis thaliana
atcattaattcgctgct

SEQ ID NO: 50817 - DNA, 17 bp, Arabidopsis thaliana
atcattactccgatccc

SEQ ID NO: 50818 - DNA, 17 bp, Arabidopsis thaliana
atcattagacttgccac

SEQ ID NO: 50819 - DNA, 17 bp, Arabidopsis thaliana
atcattatactcgacca

SEQ ID NO: 50820 - DNA, 17 bp, Arabidopsis thaliana
atcattatctgactcaa

SEQ ID NO: 50821 - DNA, 17 bp, Arabidopsis thaliana
atcattatgattatgtt

SEQ ID NO: 50822 - DNA, 17 bp, Arabidopsis thaliana
atcattatgcgggcctg

SEQ ID NO: 50823 - DNA, 17 bp, Arabidopsis thaliana
atcattcaaaccaacaa

SEQ ID NO: 50824 - DNA, 17 bp, Arabidopsis thaliana
atcattcaagggctact

SEQ ID NO: 50825 - DNA, 17 bp, Arabidopsis thaliana
atcattcaatgtgcctg

SEQ ID NO: 50826 - DNA, 17 bp, Arabidopsis thaliana
atcattcactttcttca

SEQ ID NO: 50827 - DNA, 17 bp, Arabidopsis thaliana
atcattcactttcttct

SEQ ID NO: 50828 - DNA, 17 bp, Arabidopsis thaliana
atcattcagatggacca

SEQ ID NO: 50829 - DNA, 17 bp, Arabidopsis thaliana
atcattcattggccatg

SEQ ID NO: 50830 - DNA, 17 bp, Arabidopsis thaliana
atcattcctcagagcta

SEQ ID NO: 50831 - DNA, 17 bp, Arabidopsis thaliana
atcattcgaacggatct

SEQ ID NO: 50832 - DNA, 17 bp, Arabidopsis thaliana
atcattcggagccttag

SEQ ID NO: 50833 - DNA, 17 bp, Arabidopsis thaliana
atcattctcatgatcga

SEQ ID NO: 50834 - DNA, 17 bp, Arabidopsis thaliana
atcattctcgggtacta

SEQ ID NO: 50835 - DNA, 17 bp, Arabidopsis thaliana
atcattctcggtttgac

SEQ ID NO: 50836 - DNA, 17 bp, Arabidopsis thaliana
atcattctctgcgagag

SEQ ID NO: 50837 - DNA, 17 bp, Arabidopsis thaliana
atcattctctgcgggag

SEQ ID NO: 50838 - DNA, 17 bp, Arabidopsis thaliana
atcattcttagccttct

SEQ ID NO: 50839 - DNA, 17 bp, Arabidopsis thaliana
atcattcttcgtttgcc

SEQ ID NO: 50840 - DNA, 17 bp, Arabidopsis thaliana
atcattctttgtggcct

SEQ ID NO: 50841 - DNA, 17 bp, Arabidopsis thaliana
atcattgacccatccaa

SEQ ID NO: 50842 - DNA, 17 bp, Arabidopsis thaliana
atcattgacccggccaa

SEQ ID NO: 50843 - DNA, 17 bp, Arabidopsis thaliana
atcattgacccgtccaa

SEQ ID NO: 50844 - DNA, 17 bp, Arabidopsis thaliana
atcattgagaatttcgt

SEQ ID NO: 50845 - DNA, 17 bp, Arabidopsis thaliana
atcattgagcgtgcgaa

SEQ ID NO: 50846 - DNA, 17 bp, Arabidopsis thaliana
atcattgaggacctctg

SEQ ID NO: 50847 - DNA, 17 bp, Arabidopsis thaliana
atcattgattactacct

SEQ ID NO: 50848 - DNA, 17 bp, Arabidopsis thaliana
atcattgcaaccgtcga

SEQ ID NO: 50849 - DNA, 17 bp, Arabidopsis thaliana
atcattgcagccaaaac

SEQ ID NO: 50850 - DNA, 17 bp, Arabidopsis thaliana
atcattgccatcattct

SEQ ID NO: 50851 - DNA, 17 bp, Arabidopsis thaliana
atcattgccgctaacac

SEQ ID NO: 50852 - DNA, 17 bp, Arabidopsis thaliana
atcattgcgacttcttc

SEQ ID NO: 50853 - DNA, 17 bp, Arabidopsis thaliana
atcattggaccttgtgc

SEQ ID NO: 50854 - DNA, 17 bp, Arabidopsis thaliana
atcattggagcaattgg

SEQ ID NO: 50855 - DNA, 17 bp, Arabidopsis thaliana
atcattggattgaatca

SEQ ID NO: 50856 - DNA, 17 bp, Arabidopsis thaliana
atcattggcagaagatc

SEQ ID NO: 50857 - DNA, 17 bp, Arabidopsis thaliana
atcattggccaactaca

SEQ ID NO: 50858 - DNA, 17 bp, Arabidopsis thaliana
atcattggcgagtagca

SEQ ID NO: 50859 - DNA, 17 bp, Arabidopsis thaliana
atcattggctgattctc

SEQ ID NO: 50860 - DNA, 17 bp, Arabidopsis thaliana
atcattggctgctcgat

SEQ ID NO: 50861 - DNA, 17 bp, Arabidopsis thaliana
atcattgggtcaaggag

SEQ ID NO: 50862 - DNA, 17 bp, Arabidopsis thaliana
atcattggtgaccgatc

SEQ ID NO: 50863 - DNA, 17 bp, Arabidopsis thaliana
atcattggtgcggtgaa

SEQ ID NO: 50864 - DNA, 17 bp, Arabidopsis thaliana
atcattggtgctatgag

SEQ ID NO: 50865 - DNA, 17 bp, Arabidopsis thaliana
atcattggttacccaat

SEQ ID NO: 50866 - DNA, 17 bp, Arabidopsis thaliana
atcattggttgggatgt

SEQ ID NO: 50867 - DNA, 17 bp, Arabidopsis thaliana
atcattgtagccaagcg

SEQ ID NO: 50868 - DNA, 17 bp, Arabidopsis thaliana
atcattgtccgtgaatg

SEQ ID NO: 50869 - DNA, 17 bp, Arabidopsis thaliana
atcattgtccgtgaatt

SEQ ID NO: 50870 - DNA, 17 bp, Arabidopsis thaliana
atcattgtcgatacctg

SEQ ID NO: 50871 - DNA, 17 bp, Arabidopsis thaliana
atcattgtcgtaatctt

SEQ ID NO: 50872 - DNA, 17 bp, Arabidopsis thaliana
atcattgtcttaggcgc

SEQ ID NO: 50873 - DNA, 17 bp, Arabidopsis thaliana
atcattgttcaaaccca

SEQ ID NO: 50874 - DNA, 17 bp, Arabidopsis thaliana
atcatttaagcgtggtt

SEQ ID NO: 50875 - DNA, 17 bp, Arabidopsis thaliana
atcatttagagagagtt

SEQ ID NO: 50876 - DNA, 17 bp, Arabidopsis thaliana
atcatttagcagacaag

SEQ ID NO: 50877 - DNA, 17 bp, Arabidopsis thaliana
atcatttattttggcgc

SEQ ID NO: 50878 - DNA, 17 bp, Arabidopsis thaliana
atcatttcccaattcgg

SEQ ID NO: 50879 - DNA, 17 bp, Arabidopsis thaliana
atcatttctagccacgt

SEQ ID NO: 50880 - DNA, 17 bp, Arabidopsis thaliana
atcatttctttgggtgg

SEQ ID NO: 50881 - DNA, 17 bp, Arabidopsis thaliana
atcatttgactgaataa

SEQ ID NO: 50882 - DNA, 17 bp, Arabidopsis thaliana
atcatttgactgaatag

SEQ ID NO: 50883 - DNA, 17 bp, Arabidopsis thaliana
atcatttgactgaatgg

SEQ ID NO: 50884 - DNA, 17 bp, Arabidopsis thaliana
atcatttgcagcgaagt

SEQ ID NO: 50885 - DNA, 17 bp, Arabidopsis thaliana
atcatttgccaaggatg

SEQ ID NO: 50886 - DNA, 17 bp, Arabidopsis thaliana
atcatttgcggaccgtt

SEQ ID NO: 50887 - DNA, 17 bp, Arabidopsis thaliana
atcatttgcggtctttg

SEQ ID NO: 50888 - DNA, 17 bp, Arabidopsis thaliana
atcatttgctgagacgc

SEQ ID NO: 50889 - DNA, 17 bp, Arabidopsis thaliana
atcatttgctgtctttg

SEQ ID NO: 50890 - DNA, 17 bp, Arabidopsis thaliana
atcatttggagagagtt

SEQ ID NO: 50891 - DNA, 17 bp, Arabidopsis thaliana
atcatttggatgaacca

SEQ ID NO: 50892 - DNA, 17 bp, Arabidopsis thaliana
atcatttggatgattca

SEQ ID NO: 50893 - DNA, 17 bp, Arabidopsis thaliana
atcatttggatgttcca

SEQ ID NO: 50894 - DNA, 17 bp, Arabidopsis thaliana
atcatttgggagtgcct

SEQ ID NO: 50895 - DNA, 17 bp, Arabidopsis thaliana
atcatttggtgtgtggc

SEQ ID NO: 50896 - DNA, 17 bp, Arabidopsis thaliana
atcatttgtctccgcgg

SEQ ID NO: 50897 - DNA, 17 bp, Arabidopsis thaliana
atcatttgtgcgcttgg

SEQ ID NO: 50898 - DNA, 17 bp, Arabidopsis thaliana
atcatttgttgattcag

SEQ ID NO: 50899 - DNA, 17 bp, Arabidopsis thaliana
atcatttgttggggctg

SEQ ID NO: 50900 - DNA, 17 bp, Arabidopsis thaliana
atcatttgtttgcggga

SEQ ID NO: 50901 - DNA, 17 bp, Arabidopsis thaliana
atcattttgattatgtt

SEQ ID NO: 50902 - DNA, 17 bp, Arabidopsis thaliana
atcattttgcccttgct

SEQ ID NO: 50903 - DNA, 17 bp, Arabidopsis thaliana
atcattttggccactgg

SEQ ID NO: 50904 - DNA, 17 bp, Arabidopsis thaliana
atcatttttgcaagtct

SEQ ID NO: 50905 - DNA, 17 bp, Arabidopsis thaliana
atcattttttgccaccg

SEQ ID NO: 50906 - DNA, 17 bp, Arabidopsis thaliana
atccaaaaagtgatgat

SEQ ID NO: 50907 - DNA, 17 bp, Arabidopsis thaliana
atccaaaaccattcctt

SEQ ID NO: 50908 - DNA, 17 bp, Arabidopsis thaliana
atccaaaataaacccgc

SEQ ID NO: 50909 - DNA, 17 bp, Arabidopsis thaliana
atccaaaccatcggctg

SEQ ID NO: 50910 - DNA, 17 bp, Arabidopsis thaliana
atccaaaccatcttcct

SEQ ID NO: 50911 - DNA, 17 bp, Arabidopsis thaliana
atccaaacccgtccggc

SEQ ID NO: 50912 - DNA, 17 bp, Arabidopsis thaliana
atccaaaccgacaggta

SEQ ID NO: 50913 - DNA, 17 bp, Arabidopsis thaliana
atccaaaccgatatccg

SEQ ID NO: 50914 - DNA, 17 bp, Arabidopsis thaliana
atccaaaccgattgggc

SEQ ID NO: 50915 - DNA, 17 bp, Arabidopsis thaliana
atccaaacgactatcgg

SEQ ID NO: 50916 - DNA, 17 bp, Arabidopsis thaliana
atccaaacgaggtgtta

SEQ ID NO: 50917 - DNA, 17 bp, Arabidopsis thaliana
atccaaacgcttccctg

SEQ ID NO: 50918 - DNA, 17 bp, Arabidopsis thaliana
atccaaactcgggacag

SEQ ID NO: 50919 - DNA, 17 bp, Arabidopsis thaliana
atccaaactgtgcgtta

SEQ ID NO: 50920 - DNA, 17 bp, Arabidopsis thaliana
atccaaagctgccaaag

SEQ ID NO: 50921 - DNA, 17 bp, Arabidopsis thaliana
atccaaagctgctctct

SEQ ID NO: 50922 - DNA, 17 bp, Arabidopsis thaliana
atccaaaggaggtttca

SEQ ID NO: 50923 - DNA, 17 bp, Arabidopsis thaliana
atccaaaggatgggggg

SEQ ID NO: 50924 - DNA, 17 bp, Arabidopsis thaliana
atccaaagggagcagtt

SEQ ID NO: 50925 - DNA, 17 bp, Arabidopsis thaliana
atccaaagtctactttg

SEQ ID NO: 50926 - DNA, 17 bp, Arabidopsis thaliana
atccaaagtttctagcc

SEQ ID NO: 50927 - DNA, 17 bp, Arabidopsis thaliana
atccaaataacttctga

SEQ ID NO: 50928 - DNA, 17 bp, Arabidopsis thaliana
atccaaatacccgaagt

SEQ ID NO: 50929 - DNA, 17 bp, Arabidopsis thaliana
atccaaatcatgtactg

SEQ ID NO: 50930 - DNA, 17 bp, Arabidopsis thaliana
atccaaatccgtcccgc

SEQ ID NO: 50931 - DNA, 17 bp, Arabidopsis thaliana
atccaaatgatccattt

SEQ ID NO: 50932 - DNA, 17 bp, Arabidopsis thaliana
atccaaatgggtgtgtt

SEQ ID NO: 50933 - DNA, 17 bp, Arabidopsis thaliana
atccaaatggtagacca

SEQ ID NO: 50934 - DNA, 17 bp, Arabidopsis thaliana
atccaaattttgattaa

SEQ ID NO: 50935 - DNA, 17 bp, Arabidopsis thaliana
atccaaccatgggctaa

SEQ ID NO: 50936 - DNA, 17 bp, Arabidopsis thaliana
atccaaccgtttttttc

SEQ ID NO: 50937 - DNA, 17 bp, Arabidopsis thaliana
atccaacctcttgggct

SEQ ID NO: 50938 - DNA, 17 bp, Arabidopsis thaliana
atccaacgaattggcca

SEQ ID NO: 50939 - DNA, 17 bp, Arabidopsis thaliana
atccaacgcaacttcca

SEQ ID NO: 50940 - DNA, 17 bp, Arabidopsis thaliana
atccaacgcacactagg

SEQ ID NO: 50941 - DNA, 17 bp, Arabidopsis thaliana
atccaacgggtatgagt

SEQ ID NO: 50942 - DNA, 17 bp, Arabidopsis thaliana
atccaacgggtcctaaa

SEQ ID NO: 50943 - DNA, 17 bp, Arabidopsis thaliana
atccaacgtttactatg

SEQ ID NO: 50944 - DNA, 17 bp, Arabidopsis thaliana
atccaacgtttggtggt

SEQ ID NO: 50945 - DNA, 17 bp, Arabidopsis thaliana
atccaactgaagatcgt

SEQ ID NO: 50946 - DNA, 17 bp, Arabidopsis thaliana
atccaactgatccattc

SEQ ID NO: 50947 - DNA, 17 bp, Arabidopsis thaliana
atccaactgcctaatgg

SEQ ID NO: 50948 - DNA, 17 bp, Arabidopsis thaliana
atccaactgctgtgtgg

SEQ ID NO: 50949 - DNA, 17 bp, Arabidopsis thaliana
atccaacttcgagaaca

SEQ ID NO: 50950 - DNA, 17 bp, Arabidopsis thaliana
atccaactttaacaggg

SEQ ID NO: 50951 - DNA, 17 bp, Arabidopsis thaliana
atccaagacttgtcttt

SEQ ID NO: 50952 - DNA, 17 bp, Arabidopsis thaliana
atccaagaggcgttctt

SEQ ID NO: 50953 - DNA, 17 bp, Arabidopsis thaliana
atccaagatatcggtgt

SEQ ID NO: 50954 - DNA, 17 bp, Arabidopsis thaliana
atccaagatcggtcatt

SEQ ID NO: 50955 - DNA, 17 bp, Arabidopsis thaliana
atccaagcccgtcccct

SEQ ID NO: 50956 - DNA, 17 bp, Arabidopsis thaliana
atccaagcgcagaccca

SEQ ID NO: 50957 - DNA, 17 bp, Arabidopsis thaliana
atccaagcggtttagtc

SEQ ID NO: 50958 - DNA, 17 bp, Arabidopsis thaliana
atccaagctaaacagcg

SEQ ID NO: 50959 - DNA, 17 bp, Arabidopsis thaliana
atccaagctaggattaa

SEQ ID NO: 50960 - DNA, 17 bp, Arabidopsis thaliana
atccaagctgccgtaga

SEQ ID NO: 50961 - DNA, 17 bp, Arabidopsis thaliana
atccaagcttgcttgcc

SEQ ID NO: 50962 - DNA, 17 bp, Arabidopsis thaliana
atccaaggaaggcagca

SEQ ID NO: 50963 - DNA, 17 bp, Arabidopsis thaliana
atccaaggcaaacaatc

SEQ ID NO: 50964 - DNA, 17 bp, Arabidopsis thaliana
atccaaggcctaggtct

SEQ ID NO: 50965 - DNA, 17 bp, Arabidopsis thaliana
atccaaggcggtgaggc

SEQ ID NO: 50966 - DNA, 17 bp, Arabidopsis thaliana
atccaaggtgcttctcg

SEQ ID NO: 50967 - DNA, 17 bp, Arabidopsis thaliana
atccaagtcagtcactg

SEQ ID NO: 50968 - DNA, 17 bp, Arabidopsis thaliana
atccaagtccatcatcc

SEQ ID NO: 50969 - DNA, 17 bp, Arabidopsis thaliana
atccaagtcgatccata

SEQ ID NO: 50970 - DNA, 17 bp, Arabidopsis thaliana
atccaagtgattcatcc

SEQ ID NO: 50971 - DNA, 17 bp, Arabidopsis thaliana
atccaagtgtacgaatc

SEQ ID NO: 50972 - DNA, 17 bp, Arabidopsis thaliana
atccaagttggagacca

SEQ ID NO: 50973 - DNA, 17 bp, Arabidopsis thaliana
atccaagttgtttctat

SEQ ID NO: 50974 - DNA, 17 bp, Arabidopsis thaliana
atccaagtttcaagcac

SEQ ID NO: 50975 - DNA, 17 bp, Arabidopsis thaliana
atccaataatttttgta

SEQ ID NO: 50976 - DNA, 17 bp, Arabidopsis thaliana
atccaatccaaaccgag

SEQ ID NO: 50977 - DNA, 17 bp, Arabidopsis thaliana
atccaatcgaccaagct

SEQ ID NO: 50978 - DNA, 17 bp, Arabidopsis thaliana
atccaatcgctcagata

SEQ ID NO: 50979 - DNA, 17 bp, Arabidopsis thaliana
atccaatcgggttcgca

SEQ ID NO: 50980 - DNA, 17 bp, Arabidopsis thaliana
atccaatctctcgagat

SEQ ID NO: 50981 - DNA, 17 bp, Arabidopsis thaliana
atccaatgcctagcgcc

SEQ ID NO: 50982 - DNA, 17 bp, Arabidopsis thaliana
atccaatgctttttcta

SEQ ID NO: 50983 - DNA, 17 bp, Arabidopsis thaliana
atccaatggggttcggg

SEQ ID NO: 50984 - DNA, 17 bp, Arabidopsis thaliana
atccaatgtggtctagg

SEQ ID NO: 50985 - DNA, 17 bp, Arabidopsis thaliana
atccaatgttcgagtac

SEQ ID NO: 50986 - DNA, 17 bp, Arabidopsis thaliana
atccaattctcggccat

SEQ ID NO: 50987 - DNA, 17 bp, Arabidopsis thaliana
atccaattgcggaggtg

SEQ ID NO: 50988 - DNA, 17 bp, Arabidopsis thaliana
atccaattggacaaggg

SEQ ID NO: 50989 - DNA, 17 bp, Arabidopsis thaliana
atccaatttggacagct

SEQ ID NO: 50990 - DNA, 17 bp, Arabidopsis thaliana
atccaatttggacaggt

SEQ ID NO: 50991 - DNA, 17 bp, Arabidopsis thaliana
atccaatttgtacaggg

SEQ ID NO: 50992 - DNA, 17 bp, Arabidopsis thaliana
atccaatttgtagaggg

SEQ ID NO: 50993 - DNA, 17 bp, Arabidopsis thaliana
atccaatttttgtccgt

SEQ ID NO: 50994 - DNA, 17 bp, Arabidopsis thaliana
atccacaaacgctgtgt

SEQ ID NO: 50995 - DNA, 17 bp, Arabidopsis thaliana
atccacaacgagcttct

SEQ ID NO: 50996 - DNA, 17 bp, Arabidopsis thaliana
atccacaagactcgatg

SEQ ID NO: 50997 - DNA, 17 bp, Arabidopsis thaliana
atccacaatgtccagtc

SEQ ID NO: 50998 - DNA, 17 bp, Arabidopsis thaliana
atccacaccaagttgaa

SEQ ID NO: 50999 - DNA, 17 bp, Arabidopsis thaliana
atccacacccatgccgc

SEQ ID NO: 51000 - DNA, 17 bp, Arabidopsis thaliana
atccacacccttcgctt

SEQ ID NO: 51001 - DNA, 17 bp, Arabidopsis thaliana
atccacagagatctgtt

SEQ ID NO: 51002 - DNA, 17 bp, Arabidopsis thaliana
atccacagctttcttga

SEQ ID NO: 51003 - DNA, 17 bp, Arabidopsis thaliana
atccacagtatgagagt

SEQ ID NO: 51004 - DNA, 17 bp, Arabidopsis thaliana
atccacagtcaaaccac

SEQ ID NO: 51005 - DNA, 17 bp, Arabidopsis thaliana
atccacagtcaaaccga

SEQ ID NO: 51006 - DNA, 17 bp, Arabidopsis thaliana
atccacagtcaaaccgc

SEQ ID NO: 51007 - DNA, 17 bp, Arabidopsis thaliana
atccacagttaaaccgc

SEQ ID NO: 51008 - DNA, 17 bp, Arabidopsis thaliana
atccacatacggttacg

SEQ ID NO: 51009 - DNA, 17 bp, Arabidopsis thaliana
atccacatcctgtgata

SEQ ID NO: 51010 - DNA, 17 bp, Arabidopsis thaliana
atccacatcttggggag

SEQ ID NO: 51011 - DNA, 17 bp, Arabidopsis thaliana
atccacatggcgagact

SEQ ID NO: 51012 - DNA, 17 bp, Arabidopsis thaliana
atccacatgtggaaagc

SEQ ID NO: 51013 - DNA, 17 bp, Arabidopsis thaliana
atccacattgatagcat

SEQ ID NO: 51014 - DNA, 17 bp, Arabidopsis thaliana
atccaccaactctgacc

SEQ ID NO: 51015 - DNA, 17 bp, Arabidopsis thaliana
atccaccaccgccggcc

SEQ ID NO: 51016 - DNA, 17 bp, Arabidopsis thaliana
atccaccagttgaccta

SEQ ID NO: 51017 - DNA, 17 bp, Arabidopsis thaliana
atccaccatcttgattt

SEQ ID NO: 51018 - DNA, 17 bp, Arabidopsis thaliana
atccacccaccgattca

SEQ ID NO: 51019 - DNA, 17 bp, Arabidopsis thaliana
atccacccgaccggagc

SEQ ID NO: 51020 - DNA, 17 bp, Arabidopsis thaliana
atccaccgctatatgta

SEQ ID NO: 51021 - DNA, 17 bp, Arabidopsis thaliana
atccaccgggtcggtca

SEQ ID NO: 51022 - DNA, 17 bp, Arabidopsis thaliana
atccaccgtggtccccc

SEQ ID NO: 51023 - DNA, 17 bp, Arabidopsis thaliana
atccacctctgtctgtg

SEQ ID NO: 51024 - DNA, 17 bp, Arabidopsis thaliana
atccacctgttttgttg

SEQ ID NO: 51025 - DNA, 17 bp, Arabidopsis thaliana
atccacgaagccaattg

SEQ ID NO: 51026 - DNA, 17 bp, Arabidopsis thaliana
atccacgacagacgata

SEQ ID NO: 51027 - DNA, 17 bp, Arabidopsis thaliana
atccacgacggacgaca

SEQ ID NO: 51028 - DNA, 17 bp, Arabidopsis thaliana
atccacgactgtggcgg

SEQ ID NO: 51029 - DNA, 17 bp, Arabidopsis thaliana
atccacgagatccactt

SEQ ID NO: 51030 - DNA, 17 bp, Arabidopsis thaliana
atccacgggtattagat

SEQ ID NO: 51031 - DNA, 17 bp, Arabidopsis thaliana
atccacggtatattgcg

SEQ ID NO: 51032 - DNA, 17 bp, Arabidopsis thaliana
atccacggtgagattgg

SEQ ID NO: 51033 - DNA, 17 bp, Arabidopsis thaliana
atccacgtctgcctggg

SEQ ID NO: 51034 - DNA, 17 bp, Arabidopsis thaliana
atccacgtgtcatctac

SEQ ID NO: 51035 - DNA, 17 bp, Arabidopsis thaliana
atccacgttcactgaac

SEQ ID NO: 51036 - DNA, 17 bp, Arabidopsis thaliana
atccacgttgccctaga

SEQ ID NO: 51037 - DNA, 17 bp, Arabidopsis thaliana
atccactaaggaccaac

SEQ ID NO: 51038 - DNA, 17 bp, Arabidopsis thaliana
atccactatcaggtgat

SEQ ID NO: 51039 - DNA, 17 bp, Arabidopsis thaliana
atccactctacgcgatg

SEQ ID NO: 51040 - DNA, 17 bp, Arabidopsis thaliana
atccactgagattcagc

SEQ ID NO: 51041 - DNA, 17 bp, Arabidopsis thaliana
atccactgagtgtgact

SEQ ID NO: 51042 - DNA, 17 bp, Arabidopsis thaliana
atccactgctctatctg

SEQ ID NO: 51043 - DNA, 17 bp, Arabidopsis thaliana
atccactggatcaatga

SEQ ID NO: 51044 - DNA, 17 bp, Arabidopsis thaliana
atccactgggtgatgtg

SEQ ID NO: 51045 - DNA, 17 bp, Arabidopsis thaliana
atccacttccagctaca

SEQ ID NO: 51046 - DNA, 17 bp, Arabidopsis thaliana
atccacttcgtgcccag

SEQ ID NO: 51047 - DNA, 17 bp, Arabidopsis thaliana
atccacttcttcggatc

SEQ ID NO: 51048 - DNA, 17 bp, Arabidopsis thaliana
atccacttgtggccatg

SEQ ID NO: 51049 - DNA, 17 bp, Arabidopsis thaliana
atccactttttgtccgt

SEQ ID NO: 51050 - DNA, 17 bp, Arabidopsis thaliana
atccagaacatcccaat

SEQ ID NO: 51051 - DNA, 17 bp, Arabidopsis thaliana
atccagaaccgtgccta

SEQ ID NO: 51052 - DNA, 17 bp, Arabidopsis thaliana
atccagaagtctaatgt

SEQ ID NO: 51053 - DNA, 17 bp, Arabidopsis thaliana
atccagaagttagcgtg

SEQ ID NO: 51054 - DNA, 17 bp, Arabidopsis thaliana
atccagacagacgttcc

SEQ ID NO: 51055 - DNA, 17 bp, Arabidopsis thaliana
atccagacccggacaga

SEQ ID NO: 51056 - DNA, 17 bp, Arabidopsis thaliana
atccagactgagagatc

SEQ ID NO: 51057 - DNA, 17 bp, Arabidopsis thaliana
atccagactgttggctc

SEQ ID NO: 51058 - DNA, 17 bp, Arabidopsis thaliana
atccagacttctcatca

SEQ ID NO: 51059 - DNA, 17 bp, Arabidopsis thaliana
atccagacttgtgatct

SEQ ID NO: 51060 - DNA, 17 bp, Arabidopsis thaliana
atccagagaacctagat

SEQ ID NO: 51061 - DNA, 17 bp, Arabidopsis thaliana
atccagaggcaacgtct

SEQ ID NO: 51062 - DNA, 17 bp, Arabidopsis thaliana
atccagaggtctaatgt

SEQ ID NO: 51063 - DNA, 17 bp, Arabidopsis thaliana
atccagagtcgtgggtt

SEQ ID NO: 51064 - DNA, 17 bp, Arabidopsis thaliana
atccagataggtggttt

SEQ ID NO: 51065 - DNA, 17 bp, Arabidopsis thaliana
atccagatctcgacgag

SEQ ID NO: 51066 - DNA, 17 bp, Arabidopsis thaliana
atccagatgactgggtg

SEQ ID NO: 51067 - DNA, 17 bp, Arabidopsis thaliana
atccagatgggtttttg

SEQ ID NO: 51068 - DNA, 17 bp, Arabidopsis thaliana
atccagatgttgctctt

SEQ ID NO: 51069 - DNA, 17 bp, Arabidopsis thaliana
atccagattcaaactcg

SEQ ID NO: 51070 - DNA, 17 bp, Arabidopsis thaliana
atccagattcttccgca

SEQ ID NO: 51071 - DNA, 17 bp, Arabidopsis thaliana
atccagattgctacact

SEQ ID NO: 51072 - DNA, 17 bp, Arabidopsis thaliana
atccagattgttcggtc

SEQ ID NO: 51073 - DNA, 17 bp, Arabidopsis thaliana
atccagatttcgcagtc

SEQ ID NO: 51074 - DNA, 17 bp, Arabidopsis thaliana
atccagcaacatacctc

SEQ ID NO: 51075 - DNA, 17 bp, Arabidopsis thaliana
atccagcaacgtgctgt

SEQ ID NO: 51076 - DNA, 17 bp, Arabidopsis thaliana
atccagcacaatactcg

SEQ ID NO: 51077 - DNA, 17 bp, Arabidopsis thaliana
atccagcagccacacca

SEQ ID NO: 51078 - DNA, 17 bp, Arabidopsis thaliana
atccagcagtataccgc

SEQ ID NO: 51079 - DNA, 17 bp, Arabidopsis thaliana
atccagcagtgacgtgc

SEQ ID NO: 51080 - DNA, 17 bp, Arabidopsis thaliana
atccagcattggccagt

SEQ ID NO: 51081 - DNA, 17 bp, Arabidopsis thaliana
atccagccaaggatgac

SEQ ID NO: 51082 - DNA, 17 bp, Arabidopsis thaliana
atccagccacccctccc

SEQ ID NO: 51083 - DNA, 17 bp, Arabidopsis thaliana
atccagccctttgtcgc

SEQ ID NO: 51084 - DNA, 17 bp, Arabidopsis thaliana
atccagcgacagcgaca

SEQ ID NO: 51085 - DNA, 17 bp, Arabidopsis thaliana
atccagcgacagcgacc

SEQ ID NO: 51086 - DNA, 17 bp, Arabidopsis thaliana
atccagcgacctgggtt

SEQ ID NO: 51087 - DNA, 17 bp, Arabidopsis thaliana
atccagcggaatgacgc

SEQ ID NO: 51088 - DNA, 17 bp, Arabidopsis thaliana
atccagcggaatgacgt

SEQ ID NO: 51089 - DNA, 17 bp, Arabidopsis thaliana
atccagcggacaaagct

SEQ ID NO: 51090 - DNA, 17 bp, Arabidopsis thaliana
atccagcgtgcttctac

SEQ ID NO: 51091 - DNA, 17 bp, Arabidopsis thaliana
atccagctaatcagatc

SEQ ID NO: 51092 - DNA, 17 bp, Arabidopsis thaliana
atccagctccaacattt

SEQ ID NO: 51093 - DNA, 17 bp, Arabidopsis thaliana
atccagctcggcccacc

SEQ ID NO: 51094 - DNA, 17 bp, Arabidopsis thaliana
atccagctcggtgatga

SEQ ID NO: 51095 - DNA, 17 bp, Arabidopsis thaliana
atccagctctggggtgt

SEQ ID NO: 51096 - DNA, 17 bp, Arabidopsis thaliana
atccagctctttcctca

SEQ ID NO: 51097 - DNA, 17 bp, Arabidopsis thaliana
atccagctgattgagta

SEQ ID NO: 51098 - DNA, 17 bp, Arabidopsis thaliana
atccagctgccgttaac

SEQ ID NO: 51099 - DNA, 17 bp, Arabidopsis thaliana
atccaggaagttttgcg

SEQ ID NO: 51100 - DNA, 17 bp, Arabidopsis thaliana
atccaggaagttttgtg

SEQ ID NO: 51101 - DNA, 17 bp, Arabidopsis thaliana
atccaggaatgggacgc

SEQ ID NO: 51102 - DNA, 17 bp, Arabidopsis thaliana
atccaggacatattgca

SEQ ID NO: 51103 - DNA, 17 bp, Arabidopsis thaliana
atccaggacctttatca

SEQ ID NO: 51104 - DNA, 17 bp, Arabidopsis thaliana
atccaggacgtctgaca

SEQ ID NO: 51105 - DNA, 17 bp, Arabidopsis thaliana
atccaggaggatcgccg

SEQ ID NO: 51106 - DNA, 17 bp, Arabidopsis thaliana
atccaggaggttcaggg

SEQ ID NO: 51107 - DNA, 17 bp, Arabidopsis thaliana
atccaggagtcataaat

SEQ ID NO: 51108 - DNA, 17 bp, Arabidopsis thaliana
atccaggagttgagact

SEQ ID NO: 51109 - DNA, 17 bp, Arabidopsis thaliana
atccaggagttgtgaat

SEQ ID NO: 51110 - DNA, 17 bp, Arabidopsis thaliana
atccaggatcttccagc

SEQ ID NO: 51111 - DNA, 17 bp, Arabidopsis thaliana
atccaggccctaaagca

SEQ ID NO: 51112 - DNA, 17 bp, Arabidopsis thaliana
atccaggccttacaaca

SEQ ID NO: 51113 - DNA, 17 bp, Arabidopsis thaliana
atccaggggaattcagt

SEQ ID NO: 51114 - DNA, 17 bp, Arabidopsis thaliana
atccaggggcgcgatcg

SEQ ID NO: 51115 - DNA, 17 bp, Arabidopsis thaliana
atccaggtaatctcgct

SEQ ID NO: 51116 - DNA, 17 bp, Arabidopsis thaliana
atccaggtaatctcggt

SEQ ID NO: 51117 - DNA, 17 bp, Arabidopsis thaliana
atccaggtaatctcgtt

SEQ ID NO: 51118 - DNA, 17 bp, Arabidopsis thaliana
atccaggtacgataact

SEQ ID NO: 51119 - DNA, 17 bp, Arabidopsis thaliana
atccagtacaatggcca

SEQ ID NO: 51120 - DNA, 17 bp, Arabidopsis thaliana
atccagtacgagaagat

SEQ ID NO: 51121 - DNA, 17 bp, Arabidopsis thaliana
atccagtattccgtctc

SEQ ID NO: 51122 - DNA, 17 bp, Arabidopsis thaliana
atccagtcaagccaagt

SEQ ID NO: 51123 - DNA, 17 bp, Arabidopsis thaliana
atccagtccatcgataa

SEQ ID NO: 51124 - DNA, 17 bp, Arabidopsis thaliana
atccagtcgaagtcccc

SEQ ID NO: 51125 - DNA, 17 bp, Arabidopsis thaliana
atccagtcgttgaaagc

SEQ ID NO: 51126 - DNA, 17 bp, Arabidopsis thaliana
atccagtgaaccggttg

SEQ ID NO: 51127 - DNA, 17 bp, Arabidopsis thaliana
atccagtgagggtgtca

SEQ ID NO: 51128 - DNA, 17 bp, Arabidopsis thaliana
atccagtgatgttgggc

SEQ ID NO: 51129 - DNA, 17 bp, Arabidopsis thaliana
atccagtggagacgggg

SEQ ID NO: 51130 - DNA, 17 bp, Arabidopsis thaliana
atccagtggatatccga

SEQ ID NO: 51131 - DNA, 17 bp, Arabidopsis thaliana
atccagtggatatccta

SEQ ID NO: 51132 - DNA, 17 bp, Arabidopsis thaliana
atccagtggattgggtt

SEQ ID NO: 51133 - DNA, 17 bp, Arabidopsis thaliana
atccagtggcagctatt

SEQ ID NO: 51134 - DNA, 17 bp, Arabidopsis thaliana
atccagtgggatggact

SEQ ID NO: 51135 - DNA, 17 bp, Arabidopsis thaliana
atccagtgggatggatt

SEQ ID NO: 51136 - DNA, 17 bp, Arabidopsis thaliana
atccagtggtgtggccg

SEQ ID NO: 51137 - DNA, 17 bp, Arabidopsis thaliana
atccagtggtgtggtcg

SEQ ID NO: 51138 - DNA, 17 bp, Arabidopsis thaliana
atccagtgtctggcaat

SEQ ID NO: 51139 - DNA, 17 bp, Arabidopsis thaliana
atccagtgtctttcatg

SEQ ID NO: 51140 - DNA, 17 bp, Arabidopsis thaliana
atccagtgtgggtcgac

SEQ ID NO: 51141 - DNA, 17 bp, Arabidopsis thaliana
atccagtgttccgtctc

SEQ ID NO: 51142 - DNA, 17 bp, Arabidopsis thaliana
atccagtgttccgtgtt

SEQ ID NO: 51143 - DNA, 17 bp, Arabidopsis thaliana
atccagtgttgtttgcc

SEQ ID NO: 51144 - DNA, 17 bp, Arabidopsis thaliana
atccagttcaacttagc

SEQ ID NO: 51145 - DNA, 17 bp, Arabidopsis thaliana
atccagttccaccatcg

SEQ ID NO: 51146 - DNA, 17 bp, Arabidopsis thaliana
atccagttgcggttcta

SEQ ID NO: 51147 - DNA, 17 bp, Arabidopsis thaliana
atccagttgcggtttaa

SEQ ID NO: 51148 - DNA, 17 bp, Arabidopsis thaliana
atccagtttccgctgaa

SEQ ID NO: 51149 - DNA, 17 bp, Arabidopsis thaliana
atccagtttgcttaggt

SEQ ID NO: 51150 - DNA, 17 bp, Arabidopsis thaliana
atccataaagatctcca

SEQ ID NO: 51151 - DNA, 17 bp, Arabidopsis thaliana
atccataactttagacc

SEQ ID NO: 51152 - DNA, 17 bp, Arabidopsis thaliana
atccatacgatccgaac

SEQ ID NO: 51153 - DNA, 17 bp, Arabidopsis thaliana
atccatagagacttgaa

SEQ ID NO: 51154 - DNA, 17 bp, Arabidopsis thaliana
atccatagagatgagtt

SEQ ID NO: 51155 - DNA, 17 bp, Arabidopsis thaliana
atccatagagcgatgtg

SEQ ID NO: 51156 - DNA, 17 bp, Arabidopsis thaliana
atccatagatacgccaa

SEQ ID NO: 51157 - DNA, 17 bp, Arabidopsis thaliana
atccatatggattcgcc

SEQ ID NO: 51158 - DNA, 17 bp, Arabidopsis thaliana
atccatcaaagttctgt

SEQ ID NO: 51159 - DNA, 17 bp, Arabidopsis thaliana
atccatcaaatggtccg

SEQ ID NO: 51160 - DNA, 17 bp, Arabidopsis thaliana
atccatcaaattcgcgg

SEQ ID NO: 51161 - DNA, 17 bp, Arabidopsis thaliana
atccatcaacaacatca

SEQ ID NO: 51162 - DNA, 17 bp, Arabidopsis thaliana
atccatcaacggaccta

SEQ ID NO: 51163 - DNA, 17 bp, Arabidopsis thaliana
atccatcaacggacctt

SEQ ID NO: 51164 - DNA, 17 bp, Arabidopsis thaliana
atccatcaacggatttt

SEQ ID NO: 51165 - DNA, 17 bp, Arabidopsis thaliana
atccatcaagagcaatt

SEQ ID NO: 51166 - DNA, 17 bp, Arabidopsis thaliana
atccatcaagtcttcaa

SEQ ID NO: 51167 - DNA, 17 bp, Arabidopsis thaliana
atccatcactgggttag

SEQ ID NO: 51168 - DNA, 17 bp, Arabidopsis thaliana
atccatcacttagacca

SEQ ID NO: 51169 - DNA, 17 bp, Arabidopsis thaliana
atccatcacttccgcaa

SEQ ID NO: 51170 - DNA, 17 bp, Arabidopsis thaliana
atccatcagaaggctct

SEQ ID NO: 51171 - DNA, 17 bp, Arabidopsis thaliana
atccatcagagcacctt

SEQ ID NO: 51172 - DNA, 17 bp, Arabidopsis thaliana
atccatcaggtctccaa

SEQ ID NO: 51173 - DNA, 17 bp, Arabidopsis thaliana
atccatcatcacgatca

SEQ ID NO: 51174 - DNA, 17 bp, Arabidopsis thaliana
atccatcatgagggtgc

SEQ ID NO: 51175 - DNA, 17 bp, Arabidopsis thaliana
atccatcattggcgagt

SEQ ID NO: 51176 - DNA, 17 bp, Arabidopsis thaliana
atccatccaacgaattg

SEQ ID NO: 51177 - DNA, 17 bp, Arabidopsis thaliana
atccatccacaaacgct

SEQ ID NO: 51178 - DNA, 17 bp, Arabidopsis thaliana
atccatccacaacgagc

SEQ ID NO: 51179 - DNA, 17 bp, Arabidopsis thaliana
atccatccacagagatc

SEQ ID NO: 51180 - DNA, 17 bp, Arabidopsis thaliana
atccatccactgagatt

SEQ ID NO: 51181 - DNA, 17 bp, Arabidopsis thaliana
atccatccaggaggttc

SEQ ID NO: 51182 - DNA, 17 bp, Arabidopsis thaliana
atccatccagtggcagc

SEQ ID NO: 51183 - DNA, 17 bp, Arabidopsis thaliana
atccatccattacatgg

SEQ ID NO: 51184 - DNA, 17 bp, Arabidopsis thaliana
atccatcccgaaactgc

SEQ ID NO: 51185 - DNA, 17 bp, Arabidopsis thaliana
atccatcccgaacttgg

SEQ ID NO: 51186 - DNA, 17 bp, Arabidopsis thaliana
atccatcccgaccgccg

SEQ ID NO: 51187 - DNA, 17 bp, Arabidopsis thaliana
atccatcccgcgagggt

SEQ ID NO: 51188 - DNA, 17 bp, Arabidopsis thaliana
atccatcccgtgtgaat

SEQ ID NO: 51189 - DNA, 17 bp, Arabidopsis thaliana
atccatccgacggacca

SEQ ID NO: 51190 - DNA, 17 bp, Arabidopsis thaliana
atccatccgagttaacg

SEQ ID NO: 51191 - DNA, 17 bp, Arabidopsis thaliana
atccatccgatccgaat

SEQ ID NO: 51192 - DNA, 17 bp, Arabidopsis thaliana
atccatccgcagagatt

SEQ ID NO: 51193 - DNA, 17 bp, Arabidopsis thaliana
atccatccgcagttgaa

SEQ ID NO: 51194 - DNA, 17 bp, Arabidopsis thaliana
atccatccgcattctgt

SEQ ID NO: 51195 - DNA, 17 bp, Arabidopsis thaliana
atccatccgctctgtcc

SEQ ID NO: 51196 - DNA, 17 bp, Arabidopsis thaliana
atccatccgctgagatt

SEQ ID NO: 51197 - DNA, 17 bp, Arabidopsis thaliana
atccatccgcttcgtgc

SEQ ID NO: 51198 - DNA, 17 bp, Arabidopsis thaliana
atccatccgctttacca

SEQ ID NO: 51199 - DNA, 17 bp, Arabidopsis thaliana
atccatccggaggaccg

SEQ ID NO: 51200 - DNA, 17 bp, Arabidopsis thaliana
atccatccggcaagaca

SEQ ID NO: 51201 - DNA, 17 bp, Arabidopsis thaliana
atccatccgggaagtcc

SEQ ID NO: 51202 - DNA, 17 bp, Arabidopsis thaliana
atccatccggggatgag

SEQ ID NO: 51203 - DNA, 17 bp, Arabidopsis thaliana
atccatccggtgaagtg

SEQ ID NO: 51204 - DNA, 17 bp, Arabidopsis thaliana
atccatccggtgtgggc

SEQ ID NO: 51205 - DNA, 17 bp, Arabidopsis thaliana
atccatccggttctgag

SEQ ID NO: 51206 - DNA, 17 bp, Arabidopsis thaliana
atccatccgtcactggc

SEQ ID NO: 51207 - DNA, 17 bp, Arabidopsis thaliana
atccatcctatcggctg

SEQ ID NO: 51208 - DNA, 17 bp, Arabidopsis thaliana
atccatcctattgtgtt

SEQ ID NO: 51209 - DNA, 17 bp, Arabidopsis thaliana
atccatcctatttctca

SEQ ID NO: 51210 - DNA, 17 bp, Arabidopsis thaliana
atccatcctctgagact

SEQ ID NO: 51211 - DNA, 17 bp, Arabidopsis thaliana
atccatcctctttcagg

SEQ ID NO: 51212 - DNA, 17 bp, Arabidopsis thaliana
atccatcctggagttga

SEQ ID NO: 51213 - DNA, 17 bp, Arabidopsis thaliana
atccatcctggcgaacg

SEQ ID NO: 51214 - DNA, 17 bp, Arabidopsis thaliana
atccatcctgtcacctg

SEQ ID NO: 51215 - DNA, 17 bp, Arabidopsis thaliana
atccatccttagtcgct

SEQ ID NO: 51216 - DNA, 17 bp, Arabidopsis thaliana
atccatccttcgatgtc

SEQ ID NO: 51217 - DNA, 17 bp, Arabidopsis thaliana
atccatccttgcgatag

SEQ ID NO: 51218 - DNA, 17 bp, Arabidopsis thaliana
atccatccttgctctct

SEQ ID NO: 51219 - DNA, 17 bp, Arabidopsis thaliana
atccatcgaaacctggc

SEQ ID NO: 51220 - DNA, 17 bp, Arabidopsis thaliana
atccatcgaccagaggg

SEQ ID NO: 51221 - DNA, 17 bp, Arabidopsis thaliana
atccatcgaccgggtcc

SEQ ID NO: 51222 - DNA, 17 bp, Arabidopsis thaliana
atccatcgaggcctggc

SEQ ID NO: 51223 - DNA, 17 bp, Arabidopsis thaliana
atccatcgcaactggat

SEQ ID NO: 51224 - DNA, 17 bp, Arabidopsis thaliana
atccatcgcaagttttt

SEQ ID NO: 51225 - DNA, 17 bp, Arabidopsis thaliana
atccatcgcacccgctg

SEQ ID NO: 51226 - DNA, 17 bp, Arabidopsis thaliana
atccatcgcaggggtaa

SEQ ID NO: 51227 - DNA, 17 bp, Arabidopsis thaliana
atccatcgcgggttaaa

SEQ ID NO: 51228 - DNA, 17 bp, Arabidopsis thaliana
atccatcgcgtgactct

SEQ ID NO: 51229 - DNA, 17 bp, Arabidopsis thaliana
atccatcgctgcgacaa

SEQ ID NO: 51230 - DNA, 17 bp, Arabidopsis thaliana
atccatcggaacctggc

SEQ ID NO: 51231 - DNA, 17 bp, Arabidopsis thaliana
atccatcggcgacctct

SEQ ID NO: 51232 - DNA, 17 bp, Arabidopsis thaliana
atccatcggcggaccgg

SEQ ID NO: 51233 - DNA, 17 bp, Arabidopsis thaliana
atccatcgggaagagat

SEQ ID NO: 51234 - DNA, 17 bp, Arabidopsis thaliana
atccatcgggtccgttt

SEQ ID NO: 51235 - DNA, 17 bp, Arabidopsis thaliana
atccatcggttcaaccg

SEQ ID NO: 51236 - DNA, 17 bp, Arabidopsis thaliana
atccatcgtaacctggc

SEQ ID NO: 51237 - DNA, 17 bp, Arabidopsis thaliana
atccatctaatcgcagc

SEQ ID NO: 51238 - DNA, 17 bp, Arabidopsis thaliana
atccatctacggaccgt

SEQ ID NO: 51239 - DNA, 17 bp, Arabidopsis thaliana
atccatctactgttctt

SEQ ID NO: 51240 - DNA, 17 bp, Arabidopsis thaliana
atccatctcaactttcc

SEQ ID NO: 51241 - DNA, 17 bp, Arabidopsis thaliana
atccatctcatcgtcag

SEQ ID NO: 51242 - DNA, 17 bp, Arabidopsis thaliana
atccatctccagttcac

SEQ ID NO: 51243 - DNA, 17 bp, Arabidopsis thaliana
atccatctccatctgcc

SEQ ID NO: 51244 - DNA, 17 bp, Arabidopsis thaliana
atccatctccattgttg

SEQ ID NO: 51245 - DNA, 17 bp, Arabidopsis thaliana
atccatctcctctgctc

SEQ ID NO: 51246 - DNA, 17 bp, Arabidopsis thaliana
atccatctcctggtgct

SEQ ID NO: 51247 - DNA, 17 bp, Arabidopsis thaliana
atccatctcggttcgag

SEQ ID NO: 51248 - DNA, 17 bp, Arabidopsis thaliana
atccatctcgttattcg

SEQ ID NO: 51249 - DNA, 17 bp, Arabidopsis thaliana
atccatctctgcggttt

SEQ ID NO: 51250 - DNA, 17 bp, Arabidopsis thaliana
atccatctctggaccga

SEQ ID NO: 51251 - DNA, 17 bp, Arabidopsis thaliana
atccatctcttcttttc

SEQ ID NO: 51252 - DNA, 17 bp, Arabidopsis thaliana
atccatctcttttggga

SEQ ID NO: 51253 - DNA, 17 bp, Arabidopsis thaliana
atccatctgatccatct

SEQ ID NO: 51254 - DNA, 17 bp, Arabidopsis thaliana
atccatctgatgactcg

SEQ ID NO: 51255 - DNA, 17 bp, Arabidopsis thaliana
atccatctgccgaagct

SEQ ID NO: 51256 - DNA, 17 bp, Arabidopsis thaliana
atccatctgctagccaa

SEQ ID NO: 51257 - DNA, 17 bp, Arabidopsis thaliana
atccatctggtccgggg

SEQ ID NO: 51258 - DNA, 17 bp, Arabidopsis thaliana
atccatcttatttgctg

SEQ ID NO: 51259 - DNA, 17 bp, Arabidopsis thaliana
atccatcttcgttgcca

SEQ ID NO: 51260 - DNA, 17 bp, Arabidopsis thaliana
atccatcttgaccctag

SEQ ID NO: 51261 - DNA, 17 bp, Arabidopsis thaliana
atccatctttggattac

SEQ ID NO: 51262 - DNA, 17 bp, Arabidopsis thaliana
atccatcttttgactag

SEQ ID NO: 51263 - DNA, 17 bp, Arabidopsis thaliana
atccatctttttctgcc

SEQ ID NO: 51264 - DNA, 17 bp, Arabidopsis thaliana
atccatgactccagcag

SEQ ID NO: 51265 - DNA, 17 bp, Arabidopsis thaliana
atccatgaggttctggg

SEQ ID NO: 51266 - DNA, 17 bp, Arabidopsis thaliana
atccatgcagctgacgg

SEQ ID NO: 51267 - DNA, 17 bp, Arabidopsis thaliana
atccatgcggtccgaac

SEQ ID NO: 51268 - DNA, 17 bp, Arabidopsis thaliana
atccatgcggtccgacc

SEQ ID NO: 51269 - DNA, 17 bp, Arabidopsis thaliana
atccatgctgacaaagc

SEQ ID NO: 51270 - DNA, 17 bp, Arabidopsis thaliana
atccatgtcttgaggat

SEQ ID NO: 51271 - DNA, 17 bp, Arabidopsis thaliana
atccatgtggcgtggaa

SEQ ID NO: 51272 - DNA, 17 bp, Arabidopsis thaliana
atccatgtggttgcctt

SEQ ID NO: 51273 - DNA, 17 bp, Arabidopsis thaliana
atccattactcgggaag

SEQ ID NO: 51274 - DNA, 17 bp, Arabidopsis thaliana
atccattagttagcacc

SEQ ID NO: 51275 - DNA, 17 bp, Arabidopsis thaliana
atccattcaaatctcac

SEQ ID NO: 51276 - DNA, 17 bp, Arabidopsis thaliana
atccattcaggacctta

SEQ ID NO: 51277 - DNA, 17 bp, Arabidopsis thaliana
atccattcattgtcaat

SEQ ID NO: 51278 - DNA, 17 bp, Arabidopsis thaliana
atccattcggttatcca

SEQ ID NO: 51279 - DNA, 17 bp, Arabidopsis thaliana
atccattggactcggct

SEQ ID NO: 51280 - DNA, 17 bp, Arabidopsis thaliana
atccattggactcggtt

SEQ ID NO: 51281 - DNA, 17 bp, Arabidopsis thaliana
atccattggagggcaag

SEQ ID NO: 51282 - DNA, 17 bp, Arabidopsis thaliana
atccattggctgctcat

SEQ ID NO: 51283 - DNA, 17 bp, Arabidopsis thaliana
atccattgtcaggtggg

SEQ ID NO: 51284 - DNA, 17 bp, Arabidopsis thaliana
atccattgtgacaccaa

SEQ ID NO: 51285 - DNA, 17 bp, Arabidopsis thaliana
atccattgttcctgctg

SEQ ID NO: 51286 - DNA, 17 bp, Arabidopsis thaliana
atccatttagaccttgt

SEQ ID NO: 51287 - DNA, 17 bp, Arabidopsis thaliana
atccatttaggccttgt

SEQ ID NO: 51288 - DNA, 17 bp, Arabidopsis thaliana
atccatttcttctgccg

SEQ ID NO: 51289 - DNA, 17 bp, Arabidopsis thaliana
atccatttgagttcacc

SEQ ID NO: 51290 - DNA, 17 bp, Arabidopsis thaliana
atccatttgatcgcctt

SEQ ID NO: 51291 - DNA, 17 bp, Arabidopsis thaliana
atccatttggaacagtc

SEQ ID NO: 51292 - DNA, 17 bp, Arabidopsis thaliana
atccattttcgtgattt

SEQ ID NO: 51293 - DNA, 17 bp, Arabidopsis thaliana
atccattttttcaacct

SEQ ID NO: 51294 - DNA, 17 bp, Arabidopsis thaliana
atcccaaaagactgtac

SEQ ID NO: 51295 - DNA, 17 bp, Arabidopsis thaliana
atcccaaaagactgtgc

SEQ ID NO: 51296 - DNA, 17 bp, Arabidopsis thaliana
atcccaaaccctaacga

SEQ ID NO: 51297 - DNA, 17 bp, Arabidopsis thaliana
atcccaaacttagccac

SEQ ID NO: 51298 - DNA, 17 bp, Arabidopsis thaliana
atcccaaactttcgccc

SEQ ID NO: 51299 - DNA, 17 bp, Arabidopsis thaliana
atcccaaagctgaggta

SEQ ID NO: 51300 - DNA, 17 bp, Arabidopsis thaliana
atcccaaatgggtttgg

SEQ ID NO: 51301 - DNA, 17 bp, Arabidopsis thaliana
atcccaaattaaccgtg

SEQ ID NO: 51302 - DNA, 17 bp, Arabidopsis thaliana
atcccaaatttgaaagt

SEQ ID NO: 51303 - DNA, 17 bp, Arabidopsis thaliana
atcccaacctggcgggt

SEQ ID NO: 51304 - DNA, 17 bp, Arabidopsis thaliana
atcccaactatgtgaga

SEQ ID NO: 51305 - DNA, 17 bp, Arabidopsis thaliana
atcccaactattggcca

SEQ ID NO: 51306 - DNA, 17 bp, Arabidopsis thaliana
atcccaactcgggactg

SEQ ID NO: 51307 - DNA, 17 bp, Arabidopsis thaliana
atcccaactttgattgt

SEQ ID NO: 51308 - DNA, 17 bp, Arabidopsis thaliana
atcccaagaagcagcag

SEQ ID NO: 51309 - DNA, 17 bp, Arabidopsis thaliana
atcccaaggatgacttg

SEQ ID NO: 51310 - DNA, 17 bp, Arabidopsis thaliana
atcccaagggattggcc

SEQ ID NO: 51311 - DNA, 17 bp, Arabidopsis thaliana
atcccaatggctctcgt

SEQ ID NO: 51312 - DNA, 17 bp, Arabidopsis thaliana
atcccaattaggtgctt

SEQ ID NO: 51313 - DNA, 17 bp, Arabidopsis thaliana
atcccacaggtgaccaa

SEQ ID NO: 51314 - DNA, 17 bp, Arabidopsis thaliana
atcccacatcggatctt

SEQ ID NO: 51315 - DNA, 17 bp, Arabidopsis thaliana
atcccacctctacttct

SEQ ID NO: 51316 - DNA, 17 bp, Arabidopsis thaliana
atcccacgatgtgataa

SEQ ID NO: 51317 - DNA, 17 bp, Arabidopsis thaliana
atcccactcgagacggt

SEQ ID NO: 51318 - DNA, 17 bp, Arabidopsis thaliana
atcccacttcacacccc

SEQ ID NO: 51319 - DNA, 17 bp, Arabidopsis thaliana
atcccagaaccgccgtg

SEQ ID NO: 51320 - DNA, 17 bp, Arabidopsis thaliana
atcccagaatgctgcaa

SEQ ID NO: 51321 - DNA, 17 bp, Arabidopsis thaliana
atcccagagtgctcaaa

SEQ ID NO: 51322 - DNA, 17 bp, Arabidopsis thaliana
atcccagatggttcgtt

SEQ ID NO: 51323 - DNA, 17 bp, Arabidopsis thaliana
atcccagccgacagtgt

SEQ ID NO: 51324 - DNA, 17 bp, Arabidopsis thaliana
atcccagccgacggtgt

SEQ ID NO: 51325 - DNA, 17 bp, Arabidopsis thaliana
atcccagcgactcaacg

SEQ ID NO: 51326 - DNA, 17 bp, Arabidopsis thaliana
atcccaggagtggagcc

SEQ ID NO: 51327 - DNA, 17 bp, Arabidopsis thaliana
atcccaggcccgaaacc

SEQ ID NO: 51328 - DNA, 17 bp, Arabidopsis thaliana
atcccagtcttcaggtg

SEQ ID NO: 51329 - DNA, 17 bp, Arabidopsis thaliana
atcccagtgatccattt

SEQ ID NO: 51330 - DNA, 17 bp, Arabidopsis thaliana
atcccagtggaggaaca

SEQ ID NO: 51331 - DNA, 17 bp, Arabidopsis thaliana
atcccatatgcgtgcca

SEQ ID NO: 51332 - DNA, 17 bp, Arabidopsis thaliana
atcccatccgatgatcg

SEQ ID NO: 51333 - DNA, 17 bp, Arabidopsis thaliana
atcccatctatcccgcc

SEQ ID NO: 51334 - DNA, 17 bp, Arabidopsis thaliana
atcccatctgagtagtc

SEQ ID NO: 51335 - DNA, 17 bp, Arabidopsis thaliana
atcccatctgagtggtc

SEQ ID NO: 51336 - DNA, 17 bp, Arabidopsis thaliana
atcccatctgcctaagc

SEQ ID NO: 51337 - DNA, 17 bp, Arabidopsis thaliana
atcccatctggtcccgg

SEQ ID NO: 51338 - DNA, 17 bp, Arabidopsis thaliana
atcccatctgtgtaatt

SEQ ID NO: 51339 - DNA, 17 bp, Arabidopsis thaliana
atcccatggttgggtcg

SEQ ID NO: 51340 - DNA, 17 bp, Arabidopsis thaliana
atcccatggtttcaatg

SEQ ID NO: 51341 - DNA, 17 bp, Arabidopsis thaliana
atcccattccttgtgcg

SEQ ID NO: 51342 - DNA, 17 bp, Arabidopsis thaliana
atcccattctgtgaacc

SEQ ID NO: 51343 - DNA, 17 bp, Arabidopsis thaliana
atcccattgtgtatctc

SEQ ID NO: 51344 - DNA, 17 bp, Arabidopsis thaliana
atcccatttctacgtat

SEQ ID NO: 51345 - DNA, 17 bp, Arabidopsis thaliana
atccccaatactccccc

SEQ ID NO: 51346 - DNA, 17 bp, Arabidopsis thaliana
atccccagagatatcga

SEQ ID NO: 51347 - DNA, 17 bp, Arabidopsis thaliana
atccccagcggtatatc

SEQ ID NO: 51348 - DNA, 17 bp, Arabidopsis thaliana
atccccatcatctacta

SEQ ID NO: 51349 - DNA, 17 bp, Arabidopsis thaliana
atccccatcatctgcta

SEQ ID NO: 51350 - DNA, 17 bp, Arabidopsis thaliana
atccccatgatcaagac

SEQ ID NO: 51351 - DNA, 17 bp, Arabidopsis thaliana
atcccccgaacaatttc

SEQ ID NO: 51352 - DNA, 17 bp, Arabidopsis thaliana
atcccccgaactataca

SEQ ID NO: 51353 - DNA, 17 bp, Arabidopsis thaliana
atccccctgtgctttct

SEQ ID NO: 51354 - DNA, 17 bp, Arabidopsis thaliana
atccccctgtggtttct

SEQ ID NO: 51355 - DNA, 17 bp, Arabidopsis thaliana
atccccgacatcgtaat

SEQ ID NO: 51356 - DNA, 17 bp, Arabidopsis thaliana
atccccgcgatggacaa

SEQ ID NO: 51357 - DNA, 17 bp, Arabidopsis thaliana
atccccgcgatggacat

SEQ ID NO: 51358 - DNA, 17 bp, Arabidopsis thaliana
atccccggcgcgtaaca

SEQ ID NO: 51359 - DNA, 17 bp, Arabidopsis thaliana
atccccggctcaggcca

SEQ ID NO: 51360 - DNA, 17 bp, Arabidopsis thaliana
atccccggtgctgatag

SEQ ID NO: 51361 - DNA, 17 bp, Arabidopsis thaliana
atccccgtgtgctatca

SEQ ID NO: 51362 - DNA, 17 bp, Arabidopsis thaliana
atcccctaagactgcat

SEQ ID NO: 51363 - DNA, 17 bp, Arabidopsis thaliana
atcccctacgcgcactc

SEQ ID NO: 51364 - DNA, 17 bp, Arabidopsis thaliana
atcccctccattgcgta

SEQ ID NO: 51365 - DNA, 17 bp, Arabidopsis thaliana
atcccctgagactacat

SEQ ID NO: 51366 - DNA, 17 bp, Arabidopsis thaliana
atcccctgagactgcat

SEQ ID NO: 51367 - DNA, 17 bp, Arabidopsis thaliana
atcccctgatctcgaga

SEQ ID NO: 51368 - DNA, 17 bp, Arabidopsis thaliana
atcccctggatagaggt

SEQ ID NO: 51369 - DNA, 17 bp, Arabidopsis thaliana
atccccttagggtttag

SEQ ID NO: 51370 - DNA, 17 bp, Arabidopsis thaliana
atcccctttgtcgctaa

SEQ ID NO: 51371 - DNA, 17 bp, Arabidopsis thaliana
atccccttttccctctt

SEQ ID NO: 51372 - DNA, 17 bp, Arabidopsis thaliana
atcccgaaactgctaca

SEQ ID NO: 51373 - DNA, 17 bp, Arabidopsis thaliana
atcccgaaactgctaga

SEQ ID NO: 51374 - DNA, 17 bp, Arabidopsis thaliana
atcccgaacttggtgct

SEQ ID NO: 51375 - DNA, 17 bp, Arabidopsis thaliana
atcccgaacttggtggt

SEQ ID NO: 51376 - DNA, 17 bp, Arabidopsis thaliana
atcccgaatggcattgc

SEQ ID NO: 51377 - DNA, 17 bp, Arabidopsis thaliana
atcccgaccgccgtcac

SEQ ID NO: 51378 - DNA, 17 bp, Arabidopsis thaliana
atcccgacttctcatca

SEQ ID NO: 51379 - DNA, 17 bp, Arabidopsis thaliana
atcccgagatatcctga

SEQ ID NO: 51380 - DNA, 17 bp, Arabidopsis thaliana
atcccgagctaggacct

SEQ ID NO: 51381 - DNA, 17 bp, Arabidopsis thaliana
atcccgaggatgaagac

SEQ ID NO: 51382 - DNA, 17 bp, Arabidopsis thaliana
atcccgaggatttccag

SEQ ID NO: 51383 - DNA, 17 bp, Arabidopsis thaliana
atcccgagggagagagg

SEQ ID NO: 51384 - DNA, 17 bp, Arabidopsis thaliana
atcccgattagaagaag

SEQ ID NO: 51385 - DNA, 17 bp, Arabidopsis thaliana
atcccgattccagcgtg

SEQ ID NO: 51386 - DNA, 17 bp, Arabidopsis thaliana
atcccgcaaccgccagg

SEQ ID NO: 51387 - DNA, 17 bp, Arabidopsis thaliana
atcccgccagccggtcc

SEQ ID NO: 51388 - DNA, 17 bp, Arabidopsis thaliana
atcccgccatttaaccg

SEQ ID NO: 51389 - DNA, 17 bp, Arabidopsis thaliana
atcccgcctgacctggg

SEQ ID NO: 51390 - DNA, 17 bp, Arabidopsis thaliana
atcccgccttgcatcaa

SEQ ID NO: 51391 - DNA, 17 bp, Arabidopsis thaliana
atcccgcgagggtgagc

SEQ ID NO: 51392 - DNA, 17 bp, Arabidopsis thaliana
atcccgcggatcaggaa

SEQ ID NO: 51393 - DNA, 17 bp, Arabidopsis thaliana
atcccgcggtacacggc

SEQ ID NO: 51394 - DNA, 17 bp, Arabidopsis thaliana
atcccgctgtgatccta

SEQ ID NO: 51395 - DNA, 17 bp, Arabidopsis thaliana
atcccgctttctctgga

SEQ ID NO: 51396 - DNA, 17 bp, Arabidopsis thaliana
atcccggaatacccacc

SEQ ID NO: 51397 - DNA, 17 bp, Arabidopsis thaliana
atcccggaatatccatc

SEQ ID NO: 51398 - DNA, 17 bp, Arabidopsis thaliana
atcccggacgaagctac

SEQ ID NO: 51399 - DNA, 17 bp, Arabidopsis thaliana
atcccggagttgagaat

SEQ ID NO: 51400 - DNA, 17 bp, Arabidopsis thaliana
atcccggagttgagact

SEQ ID NO: 51401 - DNA, 17 bp, Arabidopsis thaliana
atcccggattgactctt

SEQ ID NO: 51402 - DNA, 17 bp, Arabidopsis thaliana
atcccggctaactagca

SEQ ID NO: 51403 - DNA, 17 bp, Arabidopsis thaliana
atcccgggaagtcctcg

SEQ ID NO: 51404 - DNA, 17 bp, Arabidopsis thaliana
atcccgggttcgatccc

SEQ ID NO: 51405 - DNA, 17 bp, Arabidopsis thaliana
atcccgtaatccctcca

SEQ ID NO: 51406 - DNA, 17 bp, Arabidopsis thaliana
atcccgtaattcctcca

SEQ ID NO: 51407 - DNA, 17 bp, Arabidopsis thaliana
atcccgtaattctctaa

SEQ ID NO: 51408 - DNA, 17 bp, Arabidopsis thaliana
atcccgtactaagttgg

SEQ ID NO: 51409 - DNA, 17 bp, Arabidopsis thaliana
atcccgtagtgttgact

SEQ ID NO: 51410 - DNA, 17 bp, Arabidopsis thaliana
atcccgtccttagttgg

SEQ ID NO: 51411 - DNA, 17 bp, Arabidopsis thaliana
atcccgtcgccggagcc

SEQ ID NO: 51412 - DNA, 17 bp, Arabidopsis thaliana
atcccgtcgccggagtc

SEQ ID NO: 51413 - DNA, 17 bp, Arabidopsis thaliana
atcccgtctctaggaga

SEQ ID NO: 51414 - DNA, 17 bp, Arabidopsis thaliana
atcccgtgaaccatcca

SEQ ID NO: 51415 - DNA, 17 bp, Arabidopsis thaliana
atcccgtgaaccatcga

SEQ ID NO: 51416 - DNA, 17 bp, Arabidopsis thaliana
atcccgtgtgaatcagc

SEQ ID NO: 51417 - DNA, 17 bp, Arabidopsis thaliana
atcccgtttgatgaaga

SEQ ID NO: 51418 - DNA, 17 bp, Arabidopsis thaliana
atcccgtttgcggttta

SEQ ID NO: 51419 - DNA, 17 bp, Arabidopsis thaliana
atccctaaaactcagac

SEQ ID NO: 51420 - DNA, 17 bp, Arabidopsis thaliana
atccctaaatctctgga

SEQ ID NO: 51421 - DNA, 17 bp, Arabidopsis thaliana
atccctaagcggcgtca

SEQ ID NO: 51422 - DNA, 17 bp, Arabidopsis thaliana
atccctaaggatttggg

SEQ ID NO: 51423 - DNA, 17 bp, Arabidopsis thaliana
atccctacagcggtgtg

SEQ ID NO: 51424 - DNA, 17 bp, Arabidopsis thaliana
atccctacataacgggt

SEQ ID NO: 51425 - DNA, 17 bp, Arabidopsis thaliana
atccctacatagcggct

SEQ ID NO: 51426 - DNA, 17 bp, Arabidopsis thaliana
atccctacatagcgggt

SEQ ID NO: 51427 - DNA, 17 bp, Arabidopsis thaliana
atccctacatagggggt

SEQ ID NO: 51428 - DNA, 17 bp, Arabidopsis thaliana
atccctacatagtgggt

SEQ ID NO: 51429 - DNA, 17 bp, Arabidopsis thaliana
atccctacatggcgggt

SEQ ID NO: 51430 - DNA, 17 bp, Arabidopsis thaliana
atccctacgatggctgc

SEQ ID NO: 51431 - DNA, 17 bp, Arabidopsis thaliana
atccctactcggtggtg

SEQ ID NO: 51432 - DNA, 17 bp, Arabidopsis thaliana
atccctagacctgacgc

SEQ ID NO: 51433 - DNA, 17 bp, Arabidopsis thaliana
atccctaggggtgaacc

SEQ ID NO: 51434 - DNA, 17 bp, Arabidopsis thaliana
atccctaggtggcgtga

SEQ ID NO: 51435 - DNA, 17 bp, Arabidopsis thaliana
atccctattcggtcgca

SEQ ID NO: 51436 - DNA, 17 bp, Arabidopsis thaliana
atccctatttggcgtct

SEQ ID NO: 51437 - DNA, 17 bp, Arabidopsis thaliana
atccctcacccgagatc

SEQ ID NO: 51438 - DNA, 17 bp, Arabidopsis thaliana
atccctcagatgttggg

SEQ ID NO: 51439 - DNA, 17 bp, Arabidopsis thaliana
atccctccagacccgaa

SEQ ID NO: 51440 - DNA, 17 bp, Arabidopsis thaliana
atccctcccacctcgaa

SEQ ID NO: 51441 - DNA, 17 bp, Arabidopsis thaliana
atccctccctacgtgcc

SEQ ID NO: 51442 - DNA, 17 bp, Arabidopsis thaliana
atccctcgagattggct

SEQ ID NO: 51443 - DNA, 17 bp, Arabidopsis thaliana
atccctcgcaaattgct

SEQ ID NO: 51444 - DNA, 17 bp, Arabidopsis thaliana
atccctcgcgggtgcac

SEQ ID NO: 51445 - DNA, 17 bp, Arabidopsis thaliana
atccctcgggattagct

SEQ ID NO: 51446 - DNA, 17 bp, Arabidopsis thaliana
atccctcgggggtagtc

SEQ ID NO: 51447 - DNA, 17 bp, Arabidopsis thaliana
atccctcggtccatatg

SEQ ID NO: 51448 - DNA, 17 bp, Arabidopsis thaliana
atccctctcaacgtgct

SEQ ID NO: 51449 - DNA, 17 bp, Arabidopsis thaliana
atccctctgatcccata

SEQ ID NO: 51450 - DNA, 17 bp, Arabidopsis thaliana
atccctcttgatttacc

SEQ ID NO: 51451 - DNA, 17 bp, Arabidopsis thaliana
atccctcttgcttgaag

SEQ ID NO: 51452 - DNA, 17 bp, Arabidopsis thaliana
atccctgaaaagtgcct

SEQ ID NO: 51453 - DNA, 17 bp, Arabidopsis thaliana
atccctgacatcactct

SEQ ID NO: 51454 - DNA, 17 bp, Arabidopsis thaliana
atccctgacccccacac

SEQ ID NO: 51455 - DNA, 17 bp, Arabidopsis thaliana
atccctgatcgcgggtt

SEQ ID NO: 51456 - DNA, 17 bp, Arabidopsis thaliana
atccctgcgattgtttt

SEQ ID NO: 51457 - DNA, 17 bp, Arabidopsis thaliana
atccctgggtggtcggc

SEQ ID NO: 51458 - DNA, 17 bp, Arabidopsis thaliana
atccctggtcgcgggct

SEQ ID NO: 51459 - DNA, 17 bp, Arabidopsis thaliana
atccctggtcggcatcg

SEQ ID NO: 51460 - DNA, 17 bp, Arabidopsis thaliana
atccctgtggtgccgct

SEQ ID NO: 51461 - DNA, 17 bp, Arabidopsis thaliana
atccctgtttgaaatgc

SEQ ID NO: 51462 - DNA, 17 bp, Arabidopsis thaliana
atcccttaacgaggatc

SEQ ID NO: 51463 - DNA, 17 bp, Arabidopsis thaliana
atcccttaacgaggttc

SEQ ID NO: 51464 - DNA, 17 bp, Arabidopsis thaliana
atcccttaatcctggga

SEQ ID NO: 51465 - DNA, 17 bp, Arabidopsis thaliana
atcccttaccttccttc

SEQ ID NO: 51466 - DNA, 17 bp, Arabidopsis thaliana
atcccttaccttggact

SEQ ID NO: 51467 - DNA, 17 bp, Arabidopsis thaliana
atcccttagccggtgcg

SEQ ID NO: 51468 - DNA, 17 bp, Arabidopsis thaliana
atcccttcacggccggc

SEQ ID NO: 51469 - DNA, 17 bp, Arabidopsis thaliana
atcccttcaggatccgg

SEQ ID NO: 51470 - DNA, 17 bp, Arabidopsis thaliana
atcccttctaactttgc

SEQ ID NO: 51471 - DNA, 17 bp, Arabidopsis thaliana
atcccttctacaggtat

SEQ ID NO: 51472 - DNA, 17 bp, Arabidopsis thaliana
atcccttctcaccgatc

SEQ ID NO: 51473 - DNA, 17 bp, Arabidopsis thaliana
atcccttctctgcgtag

SEQ ID NO: 51474 - DNA, 17 bp, Arabidopsis thaliana
atcccttctggattcat

SEQ ID NO: 51475 - DNA, 17 bp, Arabidopsis thaliana
atcccttgaggttggcg

SEQ ID NO: 51476 - DNA, 17 bp, Arabidopsis thaliana
atcccttggatcggaga

SEQ ID NO: 51477 - DNA, 17 bp, Arabidopsis thaliana
atcccttggttgtgctt

SEQ ID NO: 51478 - DNA, 17 bp, Arabidopsis thaliana
atccctttcggtggtgt

SEQ ID NO: 51479 - DNA, 17 bp, Arabidopsis thaliana
atccctttcttgactta

SEQ ID NO: 51480 - DNA, 17 bp, Arabidopsis thaliana
atccctttcttgacttc

SEQ ID NO: 51481 - DNA, 17 bp, Arabidopsis thaliana
atccctttcttgatcgg

SEQ ID NO: 51482 - DNA, 17 bp, Arabidopsis thaliana
atccctttcttgatcgt

SEQ ID NO: 51483 - DNA, 17 bp, Arabidopsis thaliana
atccgaaaagatatcac

SEQ ID NO: 51484 - DNA, 17 bp, Arabidopsis thaliana
atccgaacagagttaaa

SEQ ID NO: 51485 - DNA, 17 bp, Arabidopsis thaliana
atccgaaccgaaaacca

SEQ ID NO: 51486 - DNA, 17 bp, Arabidopsis thaliana
atccgaaccgaaaaccg

SEQ ID NO: 51487 - DNA, 17 bp, Arabidopsis thaliana
atccgaacgggtcctaa

SEQ ID NO: 51488 - DNA, 17 bp, Arabidopsis thaliana
atccgaacggtgactgc

SEQ ID NO: 51489 - DNA, 17 bp, Arabidopsis thaliana
atccgaacgtaaccgct

SEQ ID NO: 51490 - DNA, 17 bp, Arabidopsis thaliana
atccgaagaaaccgaat

SEQ ID NO: 51491 - DNA, 17 bp, Arabidopsis thaliana
atccgaagcagcttatg

SEQ ID NO: 51492 - DNA, 17 bp, Arabidopsis thaliana
atccgaagcggattacg

SEQ ID NO: 51493 - DNA, 17 bp, Arabidopsis thaliana
atccgaaggaccgagtg

SEQ ID NO: 51494 - DNA, 17 bp, Arabidopsis thaliana
atccgaatctacgtttt

SEQ ID NO: 51495 - DNA, 17 bp, Arabidopsis thaliana
atccgaatgggaacaag

SEQ ID NO: 51496 - DNA, 17 bp, Arabidopsis thaliana
atccgaatgggtcctaa

SEQ ID NO: 51497 - DNA, 17 bp, Arabidopsis thaliana
atccgaatggtgactgt

SEQ ID NO: 51498 - DNA, 17 bp, Arabidopsis thaliana
atccgaattcgatactt

SEQ ID NO: 51499 - DNA, 17 bp, Arabidopsis thaliana
atccgaatttggtgtaa

SEQ ID NO: 51500 - DNA, 17 bp, Arabidopsis thaliana
atccgacaaaagatctg

SEQ ID NO: 51501 - DNA, 17 bp, Arabidopsis thaliana
atccgacaaaggccggg

SEQ ID NO: 51502 - DNA, 17 bp, Arabidopsis thaliana
atccgacagagaaatcg

SEQ ID NO: 51503 - DNA, 17 bp, Arabidopsis thaliana
atccgacagctggtccg

SEQ ID NO: 51504 - DNA, 17 bp, Arabidopsis thaliana
atccgacagctggttcg

SEQ ID NO: 51505 - DNA, 17 bp, Arabidopsis thaliana
atccgacatcgacattg

SEQ ID NO: 51506 - DNA, 17 bp, Arabidopsis thaliana
atccgaccaggacgcat

SEQ ID NO: 51507 - DNA, 17 bp, Arabidopsis thaliana
atccgaccatcgtttcg

SEQ ID NO: 51508 - DNA, 17 bp, Arabidopsis thaliana
atccgacccagagtata

SEQ ID NO: 51509 - DNA, 17 bp, Arabidopsis thaliana
atccgaccggacttgtt

SEQ ID NO: 51510 - DNA, 17 bp, Arabidopsis thaliana
atccgacctcgacgagt

SEQ ID NO: 51511 - DNA, 17 bp, Arabidopsis thaliana
atccgacgatcggtctg

SEQ ID NO: 51512 - DNA, 17 bp, Arabidopsis thaliana
atccgacgattggtctg

SEQ ID NO: 51513 - DNA, 17 bp, Arabidopsis thaliana
atccgacgcggattacg

SEQ ID NO: 51514 - DNA, 17 bp, Arabidopsis thaliana
atccgacggaccagatc

SEQ ID NO: 51515 - DNA, 17 bp, Arabidopsis thaliana
atccgacggtgccgagt

SEQ ID NO: 51516 - DNA, 17 bp, Arabidopsis thaliana
atccgacgtacctgctc

SEQ ID NO: 51517 - DNA, 17 bp, Arabidopsis thaliana
atccgactaggatcgtg

SEQ ID NO: 51518 - DNA, 17 bp, Arabidopsis thaliana
atccgactattttcatg

SEQ ID NO: 51519 - DNA, 17 bp, Arabidopsis thaliana
atccgactcatatgctc

SEQ ID NO: 51520 - DNA, 17 bp, Arabidopsis thaliana
atccgacttcccctggg

SEQ ID NO: 51521 - DNA, 17 bp, Arabidopsis thaliana
atccgacttttgctatt

SEQ ID NO: 51522 - DNA, 17 bp, Arabidopsis thaliana
atccgagaattcgtcga

SEQ ID NO: 51523 - DNA, 17 bp, Arabidopsis thaliana
atccgagacaaggtcgg

SEQ ID NO: 51524 - DNA, 17 bp, Arabidopsis thaliana
atccgagacacaatccg

SEQ ID NO: 51525 - DNA, 17 bp, Arabidopsis thaliana
atccgagacaccgggcg

SEQ ID NO: 51526 - DNA, 17 bp, Arabidopsis thaliana
atccgagacattagaca

SEQ ID NO: 51527 - DNA, 17 bp, Arabidopsis thaliana
atccgagacgcaatctg

SEQ ID NO: 51528 - DNA, 17 bp, Arabidopsis thaliana
atccgagatcgccatga

SEQ ID NO: 51529 - DNA, 17 bp, Arabidopsis thaliana
atccgagattttggtgt

SEQ ID NO: 51530 - DNA, 17 bp, Arabidopsis thaliana
atccgagccaaggacgc

SEQ ID NO: 51531 - DNA, 17 bp, Arabidopsis thaliana
atccgagcgaatcaacc

SEQ ID NO: 51532 - DNA, 17 bp, Arabidopsis thaliana
atccgagcggatcaacc

SEQ ID NO: 51533 - DNA, 17 bp, Arabidopsis thaliana
atccgaggcggagactg

SEQ ID NO: 51534 - DNA, 17 bp, Arabidopsis thaliana
atccgagggcacgtctg

SEQ ID NO: 51535 - DNA, 17 bp, Arabidopsis thaliana
atccgagtaagagtgcg

SEQ ID NO: 51536 - DNA, 17 bp, Arabidopsis thaliana
atccgagtcttggaagg

SEQ ID NO: 51537 - DNA, 17 bp, Arabidopsis thaliana
atccgagtgacccatgt

SEQ ID NO: 51538 - DNA, 17 bp, Arabidopsis thaliana
atccgagtgtcgatcga

SEQ ID NO: 51539 - DNA, 17 bp, Arabidopsis thaliana
atccgagttccctgcgt

SEQ ID NO: 51540 - DNA, 17 bp, Arabidopsis thaliana
atccgatacttggtgtg

SEQ ID NO: 51541 - DNA, 17 bp, Arabidopsis thaliana
atccgatcatcccggtg

SEQ ID NO: 51542 - DNA, 17 bp, Arabidopsis thaliana
atccgatccacatcggt

SEQ ID NO: 51543 - DNA, 17 bp, Arabidopsis thaliana
atccgatccgaatgcac

SEQ ID NO: 51544 - DNA, 17 bp, Arabidopsis thaliana
atccgatccgcaataca

SEQ ID NO: 51545 - DNA, 17 bp, Arabidopsis thaliana
atccgatccgtccgacg

SEQ ID NO: 51546 - DNA, 17 bp, Arabidopsis thaliana
atccgatccgtctggcc

SEQ ID NO: 51547 - DNA, 17 bp, Arabidopsis thaliana
atccgatcctcaccggc

SEQ ID NO: 51548 - DNA, 17 bp, Arabidopsis thaliana
atccgatcctgtagatg

SEQ ID NO: 51549 - DNA, 17 bp, Arabidopsis thaliana
atccgatcgttgggtca

SEQ ID NO: 51550 - DNA, 17 bp, Arabidopsis thaliana
atccgatctcccgtagt

SEQ ID NO: 51551 - DNA, 17 bp, Arabidopsis thaliana
atccgatcttattggtg

SEQ ID NO: 51552 - DNA, 17 bp, Arabidopsis thaliana
atccgatctttaccggt

SEQ ID NO: 51553 - DNA, 17 bp, Arabidopsis thaliana
atccgatgactggtctg

SEQ ID NO: 51554 - DNA, 17 bp, Arabidopsis thaliana
atccgatgatcggtcta

SEQ ID NO: 51555 - DNA, 17 bp, Arabidopsis thaliana
atccgatgatcggtctg

SEQ ID NO: 51556 - DNA, 17 bp, Arabidopsis thaliana
atccgatggaggtccag

SEQ ID NO: 51557 - DNA, 17 bp, Arabidopsis thaliana
atccgatggcacctgaa

SEQ ID NO: 51558 - DNA, 17 bp, Arabidopsis thaliana
atccgatgtctctgcgc

SEQ ID NO: 51559 - DNA, 17 bp, Arabidopsis thaliana
atccgatgtgggataaa

SEQ ID NO: 51560 - DNA, 17 bp, Arabidopsis thaliana
atccgatgttgtatcag

SEQ ID NO: 51561 - DNA, 17 bp, Arabidopsis thaliana
atccgattacggtttaa

SEQ ID NO: 51562 - DNA, 17 bp, Arabidopsis thaliana
atccgattaggtacttg

SEQ ID NO: 51563 - DNA, 17 bp, Arabidopsis thaliana
atccgattcccgctatc

SEQ ID NO: 51564 - DNA, 17 bp, Arabidopsis thaliana
atccgattgaccatcca

SEQ ID NO: 51565 - DNA, 17 bp, Arabidopsis thaliana
atccgattgatgtgcca

SEQ ID NO: 51566 - DNA, 17 bp, Arabidopsis thaliana
atccgattggtccaaaa

SEQ ID NO: 51567 - DNA, 17 bp, Arabidopsis thaliana
atccgattggtccagaa

SEQ ID NO: 51568 - DNA, 17 bp, Arabidopsis thaliana
atccgattggtccggaa

SEQ ID NO: 51569 - DNA, 17 bp, Arabidopsis thaliana
atccgattggtccgtaa

SEQ ID NO: 51570 - DNA, 17 bp, Arabidopsis thaliana
atccgattgtgctgatc

SEQ ID NO: 51571 - DNA, 17 bp, Arabidopsis thaliana
atccgatttcctccttc

SEQ ID NO: 51572 - DNA, 17 bp, Arabidopsis thaliana
atccgatttcctccttt

SEQ ID NO: 51573 - DNA, 17 bp, Arabidopsis thaliana
atccgatttgtgaccca

SEQ ID NO: 51574 - DNA, 17 bp, Arabidopsis thaliana
atccgattttgacatgt

SEQ ID NO: 51575 - DNA, 17 bp, Arabidopsis thaliana
atccgcaaaggaccgga

SEQ ID NO: 51576 - DNA, 17 bp, Arabidopsis thaliana
atccgcaacccgatctt

SEQ ID NO: 51577 - DNA, 17 bp, Arabidopsis thaliana
atccgcaacttccagcg

SEQ ID NO: 51578 - DNA, 17 bp, Arabidopsis thaliana
atccgcaaggcggttag

SEQ ID NO: 51579 - DNA, 17 bp, Arabidopsis thaliana
atccgcaaggcggttcg

SEQ ID NO: 51580 - DNA, 17 bp, Arabidopsis thaliana
atccgcaatccattcag

SEQ ID NO: 51581 - DNA, 17 bp, Arabidopsis thaliana
atccgcaatccttttgg

SEQ ID NO: 51582 - DNA, 17 bp, Arabidopsis thaliana
atccgcacatactcaac

SEQ ID NO: 51583 - DNA, 17 bp, Arabidopsis thaliana
atccgcaccgcaactag

SEQ ID NO: 51584 - DNA, 17 bp, Arabidopsis thaliana
atccgcactatatgatc

SEQ ID NO: 51585 - DNA, 17 bp, Arabidopsis thaliana
atccgcactattgcagg

SEQ ID NO: 51586 - DNA, 17 bp, Arabidopsis thaliana
atccgcacttgtacagt

SEQ ID NO: 51587 - DNA, 17 bp, Arabidopsis thaliana
atccgcagagattctct

SEQ ID NO: 51588 - DNA, 17 bp, Arabidopsis thaliana
atccgcagatcctcagt

SEQ ID NO: 51589 - DNA, 17 bp, Arabidopsis thaliana
atccgcagggaccatcg

SEQ ID NO: 51590 - DNA, 17 bp, Arabidopsis thaliana
atccgcagtggtccgga

SEQ ID NO: 51591 - DNA, 17 bp, Arabidopsis thaliana
atccgcagttaaaccgc

SEQ ID NO: 51592 - DNA, 17 bp, Arabidopsis thaliana
atccgcagttaagcgtg

SEQ ID NO: 51593 - DNA, 17 bp, Arabidopsis thaliana
atccgcagttgaacagt

SEQ ID NO: 51594 - DNA, 17 bp, Arabidopsis thaliana
atccgcagttgaaccgc

SEQ ID NO: 51595 - DNA, 17 bp, Arabidopsis thaliana
atccgcagttgaactgc

SEQ ID NO: 51596 - DNA, 17 bp, Arabidopsis thaliana
atccgcagttgaatcgc

SEQ ID NO: 51597 - DNA, 17 bp, Arabidopsis thaliana
atccgcagttgaatcgt

SEQ ID NO: 51598 - DNA, 17 bp, Arabidopsis thaliana
atccgcatcctgtagat

SEQ ID NO: 51599 - DNA, 17 bp, Arabidopsis thaliana
atccgcatgctactccc

SEQ ID NO: 51600 - DNA, 17 bp, Arabidopsis thaliana
atccgcatggccgtgat

SEQ ID NO: 51601 - DNA, 17 bp, Arabidopsis thaliana
atccgcatgttaatcct

SEQ ID NO: 51602 - DNA, 17 bp, Arabidopsis thaliana
atccgcatgttaattcc

SEQ ID NO: 51603 - DNA, 17 bp, Arabidopsis thaliana
atccgcattccgccaaa

SEQ ID NO: 51604 - DNA, 17 bp, Arabidopsis thaliana
atccgcattctgtagat

SEQ ID NO: 51605 - DNA, 17 bp, Arabidopsis thaliana
atccgcattgatagcac

SEQ ID NO: 51606 - DNA, 17 bp, Arabidopsis thaliana
atccgccaaggcctcaa

SEQ ID NO: 51607 - DNA, 17 bp, Arabidopsis thaliana
atccgccaccttgtggt

SEQ ID NO: 51608 - DNA, 17 bp, Arabidopsis thaliana
atccgccactatgcact

SEQ ID NO: 51609 - DNA, 17 bp, Arabidopsis thaliana
atccgccactgagttgt

SEQ ID NO: 51610 - DNA, 17 bp, Arabidopsis thaliana
atccgccactgtatcta

SEQ ID NO: 51611 - DNA, 17 bp, Arabidopsis thaliana
atccgccatcatagccg

SEQ ID NO: 51612 - DNA, 17 bp, Arabidopsis thaliana
atccgccattatgccaa

SEQ ID NO: 51613 - DNA, 17 bp, Arabidopsis thaliana
atccgcccaggtccatc

SEQ ID NO: 51614 - DNA, 17 bp, Arabidopsis thaliana
atccgcccctggatgtg

SEQ ID NO: 51615 - DNA, 17 bp, Arabidopsis thaliana
atccgccgacttagatt

SEQ ID NO: 51616 - DNA, 17 bp, Arabidopsis thaliana
atccgccgctttctcga

SEQ ID NO: 51617 - DNA, 17 bp, Arabidopsis thaliana
atccgccggatacggat

SEQ ID NO: 51618 - DNA, 17 bp, Arabidopsis thaliana
atccgccggctctggaa

SEQ ID NO: 51619 - DNA, 17 bp, Arabidopsis thaliana
atccgccggctctggca

SEQ ID NO: 51620 - DNA, 17 bp, Arabidopsis thaliana
atccgccgggtacttca

SEQ ID NO: 51621 - DNA, 17 bp, Arabidopsis thaliana
atccgccgtcaaccaga

SEQ ID NO: 51622 - DNA, 17 bp, Arabidopsis thaliana
atccgccgtgatcatca

SEQ ID NO: 51623 - DNA, 17 bp, Arabidopsis thaliana
atccgcctaacccgcac

SEQ ID NO: 51624 - DNA, 17 bp, Arabidopsis thaliana
atccgcctaggctgtca

SEQ ID NO: 51625 - DNA, 17 bp, Arabidopsis thaliana
atccgcctaggctgtcc

SEQ ID NO: 51626 - DNA, 17 bp, Arabidopsis thaliana
atccgcctgatacgttt

SEQ ID NO: 51627 - DNA, 17 bp, Arabidopsis thaliana
atccgccttgaattagc

SEQ ID NO: 51628 - DNA, 17 bp, Arabidopsis thaliana
atccgcgaattcttgca

SEQ ID NO: 51629 - DNA, 17 bp, Arabidopsis thaliana
atccgcgacggacctgc

SEQ ID NO: 51630 - DNA, 17 bp, Arabidopsis thaliana
atccgcgactaaagtgt

SEQ ID NO: 51631 - DNA, 17 bp, Arabidopsis thaliana
atccgcgagaggacttc

SEQ ID NO: 51632 - DNA, 17 bp, Arabidopsis thaliana
atccgcgaggtgtgcat

SEQ ID NO: 51633 - DNA, 17 bp, Arabidopsis thaliana
atccgcgccggcttcca

SEQ ID NO: 51634 - DNA, 17 bp, Arabidopsis thaliana
atccgcggacaaaactg

SEQ ID NO: 51635 - DNA, 17 bp, Arabidopsis thaliana
atccgcggctattttct

SEQ ID NO: 51636 - DNA, 17 bp, Arabidopsis thaliana
atccgcggtacactgcg

SEQ ID NO: 51637 - DNA, 17 bp, Arabidopsis thaliana
atccgcggtgacagatt

SEQ ID NO: 51638 - DNA, 17 bp, Arabidopsis thaliana
atccgcggttcaggttc

SEQ ID NO: 51639 - DNA, 17 bp, Arabidopsis thaliana
atccgcgtaggtgtcga

SEQ ID NO: 51640 - DNA, 17 bp, Arabidopsis thaliana
atccgcgtatctttccg

SEQ ID NO: 51641 - DNA, 17 bp, Arabidopsis thaliana
atccgcgtcccagtttg

SEQ ID NO: 51642 - DNA, 17 bp, Arabidopsis thaliana
atccgcgtggtctccgg

SEQ ID NO: 51643 - DNA, 17 bp, Arabidopsis thaliana
atccgctaacatcagta

SEQ ID NO: 51644 - DNA, 17 bp, Arabidopsis thaliana
atccgctaaggagtgtg

SEQ ID NO: 51645 - DNA, 17 bp, Arabidopsis thaliana
atccgctacttaatgac

SEQ ID NO: 51646 - DNA, 17 bp, Arabidopsis thaliana
atccgctacttccagcg

SEQ ID NO: 51647 - DNA, 17 bp, Arabidopsis thaliana
atccgctagacggttag

SEQ ID NO: 51648 - DNA, 17 bp, Arabidopsis thaliana
atccgctaggttgtcag

SEQ ID NO: 51649 - DNA, 17 bp, Arabidopsis thaliana
atccgctattcttgtta

SEQ ID NO: 51650 - DNA, 17 bp, Arabidopsis thaliana
atccgctcgctaacaag

SEQ ID NO: 51651 - DNA, 17 bp, Arabidopsis thaliana
atccgctctgtccgctc

SEQ ID NO: 51652 - DNA, 17 bp, Arabidopsis thaliana
atccgctcttaagatcg

SEQ ID NO: 51653 - DNA, 17 bp, Arabidopsis thaliana
atccgctcttgttccac

SEQ ID NO: 51654 - DNA, 17 bp, Arabidopsis thaliana
atccgctgagacgctct

SEQ ID NO: 51655 - DNA, 17 bp, Arabidopsis thaliana
atccgctgagattccct

SEQ ID NO: 51656 - DNA, 17 bp, Arabidopsis thaliana
atccgctgagatttcct

SEQ ID NO: 51657 - DNA, 17 bp, Arabidopsis thaliana
atccgctgatccagtca

SEQ ID NO: 51658 - DNA, 17 bp, Arabidopsis thaliana
atccgctgcgacaagca

SEQ ID NO: 51659 - DNA, 17 bp, Arabidopsis thaliana
atccgctgggcattctt

SEQ ID NO: 51660 - DNA, 17 bp, Arabidopsis thaliana
atccgctgtcattcctg

SEQ ID NO: 51661 - DNA, 17 bp, Arabidopsis thaliana
atccgctgtccgtctga

SEQ ID NO: 51662 - DNA, 17 bp, Arabidopsis thaliana
atccgctgtccttcctg

SEQ ID NO: 51663 - DNA, 17 bp, Arabidopsis thaliana
atccgctgtctactttc

SEQ ID NO: 51664 - DNA, 17 bp, Arabidopsis thaliana
atccgcttcatcagatg

SEQ ID NO: 51665 - DNA, 17 bp, Arabidopsis thaliana
atccgcttcgtgcccag

SEQ ID NO: 51666 - DNA, 17 bp, Arabidopsis thaliana
atccgcttcgtgcctaa

SEQ ID NO: 51667 - DNA, 17 bp, Arabidopsis thaliana
atccgcttgatctgcat

SEQ ID NO: 51668 - DNA, 17 bp, Arabidopsis thaliana
atccgcttggcccctat

SEQ ID NO: 51669 - DNA, 17 bp, Arabidopsis thaliana
atccgcttggttttaga

SEQ ID NO: 51670 - DNA, 17 bp, Arabidopsis thaliana
atccgctttaccacgag

SEQ ID NO: 51671 - DNA, 17 bp, Arabidopsis thaliana
atccgctttccttctac

SEQ ID NO: 51672 - DNA, 17 bp, Arabidopsis thaliana
atccgctttgacattcg

SEQ ID NO: 51673 - DNA, 17 bp, Arabidopsis thaliana
atccgctttgacatttg

SEQ ID NO: 51674 - DNA, 17 bp, Arabidopsis thaliana
atccgctttgatccgct

SEQ ID NO: 51675 - DNA, 17 bp, Arabidopsis thaliana
atccgcttttacattag

SEQ ID NO: 51676 - DNA, 17 bp, Arabidopsis thaliana
atccgcttttacatttg

SEQ ID NO: 51677 - DNA, 17 bp, Arabidopsis thaliana
atccgcttttgtccagc

SEQ ID NO: 51678 - DNA, 17 bp, Arabidopsis thaliana
atccgctttttttgtga

SEQ ID NO: 51679 - DNA, 17 bp, Arabidopsis thaliana
atccggaaggcaaagac

SEQ ID NO: 51680 - DNA, 17 bp, Arabidopsis thaliana
atccggaattcactaag

SEQ ID NO: 51681 - DNA, 17 bp, Arabidopsis thaliana
atccggaccctcgaaat

SEQ ID NO: 51682 - DNA, 17 bp, Arabidopsis thaliana
atccggacgccggcaaa

SEQ ID NO: 51683 - DNA, 17 bp, Arabidopsis thaliana
atccggactaattctgc

SEQ ID NO: 51684 - DNA, 17 bp, Arabidopsis thaliana
atccggactgcaccttg

SEQ ID NO: 51685 - DNA, 17 bp, Arabidopsis thaliana
atccggagaaacccccg

SEQ ID NO: 51686 - DNA, 17 bp, Arabidopsis thaliana
atccggaggaagcatgt

SEQ ID NO: 51687 - DNA, 17 bp, Arabidopsis thaliana
atccggaggacccagtg

SEQ ID NO: 51688 - DNA, 17 bp, Arabidopsis thaliana
atccggaggaccgagcg

SEQ ID NO: 51689 - DNA, 17 bp, Arabidopsis thaliana
atccggaggaccgagtg

SEQ ID NO: 51690 - DNA, 17 bp, Arabidopsis thaliana
atccggaggaccgattg

SEQ ID NO: 51691 - DNA, 17 bp, Arabidopsis thaliana
atccggagtcctgtgat

SEQ ID NO: 51692 - DNA, 17 bp, Arabidopsis thaliana
atccggagttggtgttt

SEQ ID NO: 51693 - DNA, 17 bp, Arabidopsis thaliana
atccggatgaccgagtg

SEQ ID NO: 51694 - DNA, 17 bp, Arabidopsis thaliana
atccggcaagacaaata

SEQ ID NO: 51695 - DNA, 17 bp, Arabidopsis thaliana
atccggcattgaccagt

SEQ ID NO: 51696 - DNA, 17 bp, Arabidopsis thaliana
atccggcccagtcgctg

SEQ ID NO: 51697 - DNA, 17 bp, Arabidopsis thaliana
atccggccgtcggggca

SEQ ID NO: 51698 - DNA, 17 bp, Arabidopsis thaliana
atccggccgtctggatc

SEQ ID NO: 51699 - DNA, 17 bp, Arabidopsis thaliana
atccggcgacggcgacg

SEQ ID NO: 51700 - DNA, 17 bp, Arabidopsis thaliana
atccggcgagggagaga

SEQ ID NO: 51701 - DNA, 17 bp, Arabidopsis thaliana
atccggcggatctcctg

SEQ ID NO: 51702 - DNA, 17 bp, Arabidopsis thaliana
atccggcgggcaaggaa

SEQ ID NO: 51703 - DNA, 17 bp, Arabidopsis thaliana
atccggcgtgccatctt

SEQ ID NO: 51704 - DNA, 17 bp, Arabidopsis thaliana
atccggctcctagggga

SEQ ID NO: 51705 - DNA, 17 bp, Arabidopsis thaliana
atccggctctggtccaa

SEQ ID NO: 51706 - DNA, 17 bp, Arabidopsis thaliana
atccgggaagtcctcgt

SEQ ID NO: 51707 - DNA, 17 bp, Arabidopsis thaliana
atccgggagtgtgagag

SEQ ID NO: 51708 - DNA, 17 bp, Arabidopsis thaliana
atccgggcggaggacat

SEQ ID NO: 51709 - DNA, 17 bp, Arabidopsis thaliana
atccgggggaccgagtg

SEQ ID NO: 51710 - DNA, 17 bp, Arabidopsis thaliana
atccgggtcatatggta

SEQ ID NO: 51711 - DNA, 17 bp, Arabidopsis thaliana
atccgggtggaataatc

SEQ ID NO: 51712 - DNA, 17 bp, Arabidopsis thaliana
atccgggtgtacctaat

SEQ ID NO: 51713 - DNA, 17 bp, Arabidopsis thaliana
atccgggtgtcgggcgc

SEQ ID NO: 51714 - DNA, 17 bp, Arabidopsis thaliana
atccgggttttggctca

SEQ ID NO: 51715 - DNA, 17 bp, Arabidopsis thaliana
atccggtaagcgactga

SEQ ID NO: 51716 - DNA, 17 bp, Arabidopsis thaliana
atccggtagttccagat

SEQ ID NO: 51717 - DNA, 17 bp, Arabidopsis thaliana
atccggtatcttgggct

SEQ ID NO: 51718 - DNA, 17 bp, Arabidopsis thaliana
atccggtcagtctcgat

SEQ ID NO: 51719 - DNA, 17 bp, Arabidopsis thaliana
atccggtcatctcaatt

SEQ ID NO: 51720 - DNA, 17 bp, Arabidopsis thaliana
atccggtccattagtgc

SEQ ID NO: 51721 - DNA, 17 bp, Arabidopsis thaliana
atccggtccgccgatcg

SEQ ID NO: 51722 - DNA, 17 bp, Arabidopsis thaliana
atccggtccgcctttgg

SEQ ID NO: 51723 - DNA, 17 bp, Arabidopsis thaliana
atccggtgaaccggtcg

SEQ ID NO: 51724 - DNA, 17 bp, Arabidopsis thaliana
atccggtgaagagaatc

SEQ ID NO: 51725 - DNA, 17 bp, Arabidopsis thaliana
atccggtgaagtgttcg

SEQ ID NO: 51726 - DNA, 17 bp, Arabidopsis thaliana
atccggtgaatcgacaa

SEQ ID NO: 51727 - DNA, 17 bp, Arabidopsis thaliana
atccggtgacttttgct

SEQ ID NO: 51728 - DNA, 17 bp, Arabidopsis thaliana
atccggtgaggctcgag

SEQ ID NO: 51729 - DNA, 17 bp, Arabidopsis thaliana
atccggtgcactagcac

SEQ ID NO: 51730 - DNA, 17 bp, Arabidopsis thaliana
atccggtgcgatttttc

SEQ ID NO: 51731 - DNA, 17 bp, Arabidopsis thaliana
atccggtggcggtttat

SEQ ID NO: 51732 - DNA, 17 bp, Arabidopsis thaliana
atccggtggtatgcgca

SEQ ID NO: 51733 - DNA, 17 bp, Arabidopsis thaliana
atccggtgtgggcgtta

SEQ ID NO: 51734 - DNA, 17 bp, Arabidopsis thaliana
atccggtgttgctctag

SEQ ID NO: 51735 - DNA, 17 bp, Arabidopsis thaliana
atccggttaaaattccg

SEQ ID NO: 51736 - DNA, 17 bp, Arabidopsis thaliana
atccggttcaaaaatgc

SEQ ID NO: 51737 - DNA, 17 bp, Arabidopsis thaliana
atccggttctgagagcg

SEQ ID NO: 51738 - DNA, 17 bp, Arabidopsis thaliana
atccggttgacccgatg

SEQ ID NO: 51739 - DNA, 17 bp, Arabidopsis thaliana
atccggttgcggttcta

SEQ ID NO: 51740 - DNA, 17 bp, Arabidopsis thaliana
atccggttgcggtttaa

SEQ ID NO: 51741 - DNA, 17 bp, Arabidopsis thaliana
atccggttgcggtttat

SEQ ID NO: 51742 - DNA, 17 bp, Arabidopsis thaliana
atccggttgcggtttta

SEQ ID NO: 51743 - DNA, 17 bp, Arabidopsis thaliana
atccggttgctgtttaa

SEQ ID NO: 51744 - DNA, 17 bp, Arabidopsis thaliana
atccggttgcttgctac

SEQ ID NO: 51745 - DNA, 17 bp, Arabidopsis thaliana
atccggttgggctctcc

SEQ ID NO: 51746 - DNA, 17 bp, Arabidopsis thaliana
atccggttgttgacaga

SEQ ID NO: 51747 - DNA, 17 bp, Arabidopsis thaliana
atccggtttcactcacg

SEQ ID NO: 51748 - DNA, 17 bp, Arabidopsis thaliana
atccgtaaaccacctat

SEQ ID NO: 51749 - DNA, 17 bp, Arabidopsis thaliana
atccgtaacaccaccgc

SEQ ID NO: 51750 - DNA, 17 bp, Arabidopsis thaliana
atccgtaacatttggtc

SEQ ID NO: 51751 - DNA, 17 bp, Arabidopsis thaliana
atccgtaattagtgaga

SEQ ID NO: 51752 - DNA, 17 bp, Arabidopsis thaliana
atccgtatatccgcagg

SEQ ID NO: 51753 - DNA, 17 bp, Arabidopsis thaliana
atccgtatccggatccg

SEQ ID NO: 51754 - DNA, 17 bp, Arabidopsis thaliana
atccgtatctggatccg

SEQ ID NO: 51755 - DNA, 17 bp, Arabidopsis thaliana
atccgtatgctcagatg

SEQ ID NO: 51756 - DNA, 17 bp, Arabidopsis thaliana
atccgtcaacaaaacaa

SEQ ID NO: 51757 - DNA, 17 bp, Arabidopsis thaliana
atccgtcaacggtccaa

SEQ ID NO: 51758 - DNA, 17 bp, Arabidopsis thaliana
atccgtcactggctatg

SEQ ID NO: 51759 - DNA, 17 bp, Arabidopsis thaliana
atccgtcagcggtctaa

SEQ ID NO: 51760 - DNA, 17 bp, Arabidopsis thaliana
atccgtcagcggtgcag

SEQ ID NO: 51761 - DNA, 17 bp, Arabidopsis thaliana
atccgtcagcggtgtaa

SEQ ID NO: 51762 - DNA, 17 bp, Arabidopsis thaliana
atccgtcagcggtttag

SEQ ID NO: 51763 - DNA, 17 bp, Arabidopsis thaliana
atccgtcagtctgttat

SEQ ID NO: 51764 - DNA, 17 bp, Arabidopsis thaliana
atccgtcccgtaaaaaa

SEQ ID NO: 51765 - DNA, 17 bp, Arabidopsis thaliana
atccgtcccgtcaaccc

SEQ ID NO: 51766 - DNA, 17 bp, Arabidopsis thaliana
atccgtcccgtcaactc

SEQ ID NO: 51767 - DNA, 17 bp, Arabidopsis thaliana
atccgtcgacttggctg

SEQ ID NO: 51768 - DNA, 17 bp, Arabidopsis thaliana
atccgtcgatgtagcca

SEQ ID NO: 51769 - DNA, 17 bp, Arabidopsis thaliana
atccgtcgcaacaagag

SEQ ID NO: 51770 - DNA, 17 bp, Arabidopsis thaliana
atccgtcggctcagttt

SEQ ID NO: 51771 - DNA, 17 bp, Arabidopsis thaliana
atccgtcggcttagttt

SEQ ID NO: 51772 - DNA, 17 bp, Arabidopsis thaliana
atccgtcggcttggttc

SEQ ID NO: 51773 - DNA, 17 bp, Arabidopsis thaliana
atccgtctagtggatcc

SEQ ID NO: 51774 - DNA, 17 bp, Arabidopsis thaliana
atccgtctctgaatctg

SEQ ID NO: 51775 - DNA, 17 bp, Arabidopsis thaliana
atccgtctgatatgctt

SEQ ID NO: 51776 - DNA, 17 bp, Arabidopsis thaliana
atccgtctgttagacga

SEQ ID NO: 51777 - DNA, 17 bp, Arabidopsis thaliana
atccgtcttgacgcagt

SEQ ID NO: 51778 - DNA, 17 bp, Arabidopsis thaliana
atccgtgaggtcgaagc

SEQ ID NO: 51779 - DNA, 17 bp, Arabidopsis thaliana
atccgtgatccaactga

SEQ ID NO: 51780 - DNA, 17 bp, Arabidopsis thaliana
atccgtgatccatttat

SEQ ID NO: 51781 - DNA, 17 bp, Arabidopsis thaliana
atccgtgatggatattc

SEQ ID NO: 51782 - DNA, 17 bp, Arabidopsis thaliana
atccgtgcattttgacc

SEQ ID NO: 51783 - DNA, 17 bp, Arabidopsis thaliana
atccgtgctaacccttc

SEQ ID NO: 51784 - DNA, 17 bp, Arabidopsis thaliana
atccgtggactgatccg

SEQ ID NO: 51785 - DNA, 17 bp, Arabidopsis thaliana
atccgtggatatccgat

SEQ ID NO: 51786 - DNA, 17 bp, Arabidopsis thaliana
atccgtggtgcgggcac

SEQ ID NO: 51787 - DNA, 17 bp, Arabidopsis thaliana
atccgtggttaacttca

SEQ ID NO: 51788 - DNA, 17 bp, Arabidopsis thaliana
atccgtggttaagttca

SEQ ID NO: 51789 - DNA, 17 bp, Arabidopsis thaliana
atccgtgtaaccgatga

SEQ ID NO: 51790 - DNA, 17 bp, Arabidopsis thaliana
atccgtgtctgagtttg

SEQ ID NO: 51791 - DNA, 17 bp, Arabidopsis thaliana
atccgtgtgtacccgaa

SEQ ID NO: 51792 - DNA, 17 bp, Arabidopsis thaliana
atccgtgtgttgatgtc

SEQ ID NO: 51793 - DNA, 17 bp, Arabidopsis thaliana
atccgtgtgtttgatgt

SEQ ID NO: 51794 - DNA, 17 bp, Arabidopsis thaliana
atccgtgtttaggcact

SEQ ID NO: 51795 - DNA, 17 bp, Arabidopsis thaliana
atccgttaagaaaaggg

SEQ ID NO: 51796 - DNA, 17 bp, Arabidopsis thaliana
atccgttaattctaaga

SEQ ID NO: 51797 - DNA, 17 bp, Arabidopsis thaliana
atccgttactacatgca

SEQ ID NO: 51798 - DNA, 17 bp, Arabidopsis thaliana
atccgttagcggttcag

SEQ ID NO: 51799 - DNA, 17 bp, Arabidopsis thaliana
atccgttatctaaatgc

SEQ ID NO: 51800 - DNA, 17 bp, Arabidopsis thaliana
atccgttatgcgagatg

SEQ ID NO: 51801 - DNA, 17 bp, Arabidopsis thaliana
atccgttccatatgatt

SEQ ID NO: 51802 - DNA, 17 bp, Arabidopsis thaliana
atccgttcctagggcct

SEQ ID NO: 51803 - DNA, 17 bp, Arabidopsis thaliana
atccgttcgatttcgcg

SEQ ID NO: 51804 - DNA, 17 bp, Arabidopsis thaliana
atccgttgacggttttg

SEQ ID NO: 51805 - DNA, 17 bp, Arabidopsis thaliana
atccgttgacgttttgt

SEQ ID NO: 51806 - DNA, 17 bp, Arabidopsis thaliana
atccgttgactgccaac

SEQ ID NO: 51807 - DNA, 17 bp, Arabidopsis thaliana
atccgttgccgagagtc

SEQ ID NO: 51808 - DNA, 17 bp, Arabidopsis thaliana
atccgttggtccttggc

SEQ ID NO: 51809 - DNA, 17 bp, Arabidopsis thaliana
atccgttgtaagattga

SEQ ID NO: 51810 - DNA, 17 bp, Arabidopsis thaliana
atccgttgtacgcttac

SEQ ID NO: 51811 - DNA, 17 bp, Arabidopsis thaliana
atccgtttgactcttgg

SEQ ID NO: 51812 - DNA, 17 bp, Arabidopsis thaliana
atccgtttgcggtttaa

SEQ ID NO: 51813 - DNA, 17 bp, Arabidopsis thaliana
atcctaaacttagtccc

SEQ ID NO: 51814 - DNA, 17 bp, Arabidopsis thaliana
atcctaaacttagttaa

SEQ ID NO: 51815 - DNA, 17 bp, Arabidopsis thaliana
atcctaaacttagttcg

SEQ ID NO: 51816 - DNA, 17 bp, Arabidopsis thaliana
atcctaaactttagcca

SEQ ID NO: 51817 - DNA, 17 bp, Arabidopsis thaliana
atcctaaatccctaaat

SEQ ID NO: 51818 - DNA, 17 bp, Arabidopsis thaliana
atcctaacacaacccta

SEQ ID NO: 51819 - DNA, 17 bp, Arabidopsis thaliana
atcctaacactcctcga

SEQ ID NO: 51820 - DNA, 17 bp, Arabidopsis thaliana
atcctaacagacccgta

SEQ ID NO: 51821 - DNA, 17 bp, Arabidopsis thaliana
atcctaacagaccggta

SEQ ID NO: 51822 - DNA, 17 bp, Arabidopsis thaliana
atcctaacaggattttc

SEQ ID NO: 51823 - DNA, 17 bp, Arabidopsis thaliana
atcctaacagggttatc

SEQ ID NO: 51824 - DNA, 17 bp, Arabidopsis thaliana
atcctaaccgggttcca

SEQ ID NO: 51825 - DNA, 17 bp, Arabidopsis thaliana
atcctaaccgtgttcca

SEQ ID NO: 51826 - DNA, 17 bp, Arabidopsis thaliana
atcctaacttggtgctt

SEQ ID NO: 51827 - DNA, 17 bp, Arabidopsis thaliana
atcctaagatcagttgc

SEQ ID NO: 51828 - DNA, 17 bp, Arabidopsis thaliana
atcctaagcaactgtgg

SEQ ID NO: 51829 - DNA, 17 bp, Arabidopsis thaliana
atcctaagcgttggagt

SEQ ID NO: 51830 - DNA, 17 bp, Arabidopsis thaliana
atcctaagtctagagag

SEQ ID NO: 51831 - DNA, 17 bp, Arabidopsis thaliana
atcctaatacaacccaa

SEQ ID NO: 51832 - DNA, 17 bp, Arabidopsis thaliana
atcctaatcatgtgttg

SEQ ID NO: 51833 - DNA, 17 bp, Arabidopsis thaliana
atcctaatccccacgca

SEQ ID NO: 51834 - DNA, 17 bp, Arabidopsis thaliana
atcctaatgatccgacg

SEQ ID NO: 51835 - DNA, 17 bp, Arabidopsis thaliana
atcctaatgatccgccc

SEQ ID NO: 51836 - DNA, 17 bp, Arabidopsis thaliana
atcctaatttatccttg

SEQ ID NO: 51837 - DNA, 17 bp, Arabidopsis thaliana
atcctacaatctgtgtg

SEQ ID NO: 51838 - DNA, 17 bp, Arabidopsis thaliana
atcctacacgaccaccc

SEQ ID NO: 51839 - DNA, 17 bp, Arabidopsis thaliana
atcctacacttagagtg

SEQ ID NO: 51840 - DNA, 17 bp, Arabidopsis thaliana
atcctacagttcctgct

SEQ ID NO: 51841 - DNA, 17 bp, Arabidopsis thaliana
atcctaccaatggatga

SEQ ID NO: 51842 - DNA, 17 bp, Arabidopsis thaliana
atcctaccacctgatta

SEQ ID NO: 51843 - DNA, 17 bp, Arabidopsis thaliana
atcctaccacctgattt

SEQ ID NO: 51844 - DNA, 17 bp, Arabidopsis thaliana
atcctacctagctgagt

SEQ ID NO: 51845 - DNA, 17 bp, Arabidopsis thaliana
atcctacgatggaaggt

SEQ ID NO: 51846 - DNA, 17 bp, Arabidopsis thaliana
atcctacgggtccgtaa

SEQ ID NO: 51847 - DNA, 17 bp, Arabidopsis thaliana
atcctacgggttcgtaa

SEQ ID NO: 51848 - DNA, 17 bp, Arabidopsis thaliana
atcctactatcagtttg

SEQ ID NO: 51849 - DNA, 17 bp, Arabidopsis thaliana
atcctactcaacttccc

SEQ ID NO: 51850 - DNA, 17 bp, Arabidopsis thaliana
atcctactcaacttccg

SEQ ID NO: 51851 - DNA, 17 bp, Arabidopsis thaliana
atcctactcgtcagatt

SEQ ID NO: 51852 - DNA, 17 bp, Arabidopsis thaliana
atcctactgcattgcca

SEQ ID NO: 51853 - DNA, 17 bp, Arabidopsis thaliana
atcctactgtgatctat

SEQ ID NO: 51854 - DNA, 17 bp, Arabidopsis thaliana
atcctactgtttcaccg

SEQ ID NO: 51855 - DNA, 17 bp, Arabidopsis thaliana
atcctacttctactgat

SEQ ID NO: 51856 - DNA, 17 bp, Arabidopsis thaliana
atcctacttctgacatc

SEQ ID NO: 51857 - DNA, 17 bp, Arabidopsis thaliana
atcctactttgaccaga

SEQ ID NO: 51858 - DNA, 17 bp, Arabidopsis thaliana
atcctactttgaccagg

SEQ ID NO: 51859 - DNA, 17 bp, Arabidopsis thaliana
atcctacttttgagaga

SEQ ID NO: 51860 - DNA, 17 bp, Arabidopsis thaliana
atcctacttttgccgaa

SEQ ID NO: 51861 - DNA, 17 bp, Arabidopsis thaliana
atcctagactacatcaa

SEQ ID NO: 51862 - DNA, 17 bp, Arabidopsis thaliana
atcctagagatcggtgc

SEQ ID NO: 51863 - DNA, 17 bp, Arabidopsis thaliana
atcctagagcttcctct

SEQ ID NO: 51864 - DNA, 17 bp, Arabidopsis thaliana
atcctaggagcactcgt

SEQ ID NO: 51865 - DNA, 17 bp, Arabidopsis thaliana
atcctagtctgttgacc

SEQ ID NO: 51866 - DNA, 17 bp, Arabidopsis thaliana
atcctagtctgttggcc

SEQ ID NO: 51867 - DNA, 17 bp, Arabidopsis thaliana
atcctatcatacgcttt

SEQ ID NO: 51868 - DNA, 17 bp, Arabidopsis thaliana
atcctatcctgttgaac

SEQ ID NO: 51869 - DNA, 17 bp, Arabidopsis thaliana
atcctatcgactgatct

SEQ ID NO: 51870 - DNA, 17 bp, Arabidopsis thaliana
atcctatcgctccttag

SEQ ID NO: 51871 - DNA, 17 bp, Arabidopsis thaliana
atcctatcggctaatct

SEQ ID NO: 51872 - DNA, 17 bp, Arabidopsis thaliana
atcctatcggctgatcc

SEQ ID NO: 51873 - DNA, 17 bp, Arabidopsis thaliana
atcctatcggctgattc

SEQ ID NO: 51874 - DNA, 17 bp, Arabidopsis thaliana
atcctatcggctgattt

SEQ ID NO: 51875 - DNA, 17 bp, Arabidopsis thaliana
atcctatcttttgccga

SEQ ID NO: 51876 - DNA, 17 bp, Arabidopsis thaliana
atcctattagctcagtg

SEQ ID NO: 51877 - DNA, 17 bp, Arabidopsis thaliana
atcctattcaacttccg

SEQ ID NO: 51878 - DNA, 17 bp, Arabidopsis thaliana
atcctattcaacttctg

SEQ ID NO: 51879 - DNA, 17 bp, Arabidopsis thaliana
atcctattggctgattc

SEQ ID NO: 51880 - DNA, 17 bp, Arabidopsis thaliana
atcctattgtgttgccc

SEQ ID NO: 51881 - DNA, 17 bp, Arabidopsis thaliana
atcctattgtgttggcc

SEQ ID NO: 51882 - DNA, 17 bp, Arabidopsis thaliana
atcctatttccggcatc

SEQ ID NO: 51883 - DNA, 17 bp, Arabidopsis thaliana
atcctatttctcagctg

SEQ ID NO: 51884 - DNA, 17 bp, Arabidopsis thaliana
atcctatttctcagttg

SEQ ID NO: 51885 - DNA, 17 bp, Arabidopsis thaliana
atcctcaactatgccgg

SEQ ID NO: 51886 - DNA, 17 bp, Arabidopsis thaliana
atcctcaactattcgct

SEQ ID NO: 51887 - DNA, 17 bp, Arabidopsis thaliana
atcctcaactttggcca

SEQ ID NO: 51888 - DNA, 17 bp, Arabidopsis thaliana
atcctcaagactctggt

SEQ ID NO: 51889 - DNA, 17 bp, Arabidopsis thaliana
atcctcaagcattccat

SEQ ID NO: 51890 - DNA, 17 bp, Arabidopsis thaliana
atcctcaagcccgcaag

SEQ ID NO: 51891 - DNA, 17 bp, Arabidopsis thaliana
atcctcaagtctatcgg

SEQ ID NO: 51892 - DNA, 17 bp, Arabidopsis thaliana
atcctcaagttgggact

SEQ ID NO: 51893 - DNA, 17 bp, Arabidopsis thaliana
atcctcaatggaggttt

SEQ ID NO: 51894 - DNA, 17 bp, Arabidopsis thaliana
atcctcacagctcctag

SEQ ID NO: 51895 - DNA, 17 bp, Arabidopsis thaliana
atcctcactatttgtgc

SEQ ID NO: 51896 - DNA, 17 bp, Arabidopsis thaliana
atcctcactgtctgact

SEQ ID NO: 51897 - DNA, 17 bp, Arabidopsis thaliana
atcctcagacccgtctc

SEQ ID NO: 51898 - DNA, 17 bp, Arabidopsis thaliana
atcctcagactcacaaa

SEQ ID NO: 51899 - DNA, 17 bp, Arabidopsis thaliana
atcctcagactcacaag

SEQ ID NO: 51900 - DNA, 17 bp, Arabidopsis thaliana
atcctcagagcagtgtt

SEQ ID NO: 51901 - DNA, 17 bp, Arabidopsis thaliana
atcctcagagcggtgct

SEQ ID NO: 51902 - DNA, 17 bp, Arabidopsis thaliana
atcctcagcagggataa

SEQ ID NO: 51903 - DNA, 17 bp, Arabidopsis thaliana
atcctcagctttggcca

SEQ ID NO: 51904 - DNA, 17 bp, Arabidopsis thaliana
atcctcaggagggatag

SEQ ID NO: 51905 - DNA, 17 bp, Arabidopsis thaliana
atcctcaggcgactctt

SEQ ID NO: 51906 - DNA, 17 bp, Arabidopsis thaliana
atcctcagggcagtgct

SEQ ID NO: 51907 - DNA, 17 bp, Arabidopsis thaliana
atcctcagtatgctagg

SEQ ID NO: 51908 - DNA, 17 bp, Arabidopsis thaliana
atcctcagtgtccccgg

SEQ ID NO: 51909 - DNA, 17 bp, Arabidopsis thaliana
atcctcatacctggatt

SEQ ID NO: 51910 - DNA, 17 bp, Arabidopsis thaliana
atcctcatcttagttgc

SEQ ID NO: 51911 - DNA, 17 bp, Arabidopsis thaliana
atcctcatgcaaaatca

SEQ ID NO: 51912 - DNA, 17 bp, Arabidopsis thaliana
atcctcatggcccatat

SEQ ID NO: 51913 - DNA, 17 bp, Arabidopsis thaliana
atcctccaaatacttgg

SEQ ID NO: 51914 - DNA, 17 bp, Arabidopsis thaliana
atcctccacataagcag

SEQ ID NO: 51915 - DNA, 17 bp, Arabidopsis thaliana
atcctccaccatgttat

SEQ ID NO: 51916 - DNA, 17 bp, Arabidopsis thaliana
atcctccacggagtgct

SEQ ID NO: 51917 - DNA, 17 bp, Arabidopsis thaliana
atcctccaggttgtctt

SEQ ID NO: 51918 - DNA, 17 bp, Arabidopsis thaliana
atcctccagtgttgccg

SEQ ID NO: 51919 - DNA, 17 bp, Arabidopsis thaliana
atcctcccaacgtgcct

SEQ ID NO: 51920 - DNA, 17 bp, Arabidopsis thaliana
atcctccgatgtcggct

SEQ ID NO: 51921 - DNA, 17 bp, Arabidopsis thaliana
atcctccgcagatggtc

SEQ ID NO: 51922 - DNA, 17 bp, Arabidopsis thaliana
atcctccggagcagcaa

SEQ ID NO: 51923 - DNA, 17 bp, Arabidopsis thaliana
atcctccggtgtgtctc

SEQ ID NO: 51924 - DNA, 17 bp, Arabidopsis thaliana
atcctcctaggcccgaa

SEQ ID NO: 51925 - DNA, 17 bp, Arabidopsis thaliana
atcctcctatgactctg

SEQ ID NO: 51926 - DNA, 17 bp, Arabidopsis thaliana
atcctcctcccggtgcc

SEQ ID NO: 51927 - DNA, 17 bp, Arabidopsis thaliana
atcctcctcttgatcct

SEQ ID NO: 51928 - DNA, 17 bp, Arabidopsis thaliana
atcctcctgataagact

SEQ ID NO: 51929 - DNA, 17 bp, Arabidopsis thaliana
atcctcctgccactggt

SEQ ID NO: 51930 - DNA, 17 bp, Arabidopsis thaliana
atcctcctggatattcg

SEQ ID NO: 51931 - DNA, 17 bp, Arabidopsis thaliana
atcctcctggatatttg

SEQ ID NO: 51932 - DNA, 17 bp, Arabidopsis thaliana
atcctcctttgagggtt

SEQ ID NO: 51933 - DNA, 17 bp, Arabidopsis thaliana
atcctcgattgtgaaaa

SEQ ID NO: 51934 - DNA, 17 bp, Arabidopsis thaliana
atcctcgcctctggctg

SEQ ID NO: 51935 - DNA, 17 bp, Arabidopsis thaliana
atcctcgctagtcacag

SEQ ID NO: 51936 - DNA, 17 bp, Arabidopsis thaliana
atcctcggaagcatacg

SEQ ID NO: 51937 - DNA, 17 bp, Arabidopsis thaliana
atcctcggaccaggctt

SEQ ID NO: 51938 - DNA, 17 bp, Arabidopsis thaliana
atcctcggacccggtcg

SEQ ID NO: 51939 - DNA, 17 bp, Arabidopsis thaliana
atcctcggaccctgtcg

SEQ ID NO: 51940 - DNA, 17 bp, Arabidopsis thaliana
atcctcggcaaatttcg

SEQ ID NO: 51941 - DNA, 17 bp, Arabidopsis thaliana
atcctcggcacatatgg

SEQ ID NO: 51942 - DNA, 17 bp, Arabidopsis thaliana
atcctcggcacctccga

SEQ ID NO: 51943 - DNA, 17 bp, Arabidopsis thaliana
atcctcgggatacagtt

SEQ ID NO: 51944 - DNA, 17 bp, Arabidopsis thaliana
atcctcgggatcactgc

SEQ ID NO: 51945 - DNA, 17 bp, Arabidopsis thaliana
atcctcggtatgacgat

SEQ ID NO: 51946 - DNA, 17 bp, Arabidopsis thaliana
atcctcggtttgcaaca

SEQ ID NO: 51947 - DNA, 17 bp, Arabidopsis thaliana
atcctcgtcggtcgcgg

SEQ ID NO: 51948 - DNA, 17 bp, Arabidopsis thaliana
atcctcgtgatgactag

SEQ ID NO: 51949 - DNA, 17 bp, Arabidopsis thaliana
atcctcgtggagcgaat

SEQ ID NO: 51950 - DNA, 17 bp, Arabidopsis thaliana
atcctcgtggatgtcgt

SEQ ID NO: 51951 - DNA, 17 bp, Arabidopsis thaliana
atcctcgttaccaccat

SEQ ID NO: 51952 - DNA, 17 bp, Arabidopsis thaliana
atcctcgttggggtgtg

SEQ ID NO: 51953 - DNA, 17 bp, Arabidopsis thaliana
atcctctaaacacgctc

SEQ ID NO: 51954 - DNA, 17 bp, Arabidopsis thaliana
atcctctaacaacgtca

SEQ ID NO: 51955 - DNA, 17 bp, Arabidopsis thaliana
atcctctaacaatgtcg

SEQ ID NO: 51956 - DNA, 17 bp, Arabidopsis thaliana
atcctctaacaatgtga

SEQ ID NO: 51957 - DNA, 17 bp, Arabidopsis thaliana
atcctctaaggcccagg

SEQ ID NO: 51958 - DNA, 17 bp, Arabidopsis thaliana
atcctctaaggtatcgt

SEQ ID NO: 51959 - DNA, 17 bp, Arabidopsis thaliana
atcctctagcatatcca

SEQ ID NO: 51960 - DNA, 17 bp, Arabidopsis thaliana
atcctctaggaggtgcc

SEQ ID NO: 51961 - DNA, 17 bp, Arabidopsis thaliana
atcctctaggtgcaatc

SEQ ID NO: 51962 - DNA, 17 bp, Arabidopsis thaliana
atcctctatacttcttt

SEQ ID NO: 51963 - DNA, 17 bp, Arabidopsis thaliana
atcctctatagcttccg

SEQ ID NO: 51964 - DNA, 17 bp, Arabidopsis thaliana
atcctctcctttggcgg

SEQ ID NO: 51965 - DNA, 17 bp, Arabidopsis thaliana
atcctctcgcaatgtac

SEQ ID NO: 51966 - DNA, 17 bp, Arabidopsis thaliana
atcctctctgtccgcgt

SEQ ID NO: 51967 - DNA, 17 bp, Arabidopsis thaliana
atcctctcttccttgcc

SEQ ID NO: 51968 - DNA, 17 bp, Arabidopsis thaliana
atcctctgacccttctc

SEQ ID NO: 51969 - DNA, 17 bp, Arabidopsis thaliana
atcctctgacgccgcat

SEQ ID NO: 51970 - DNA, 17 bp, Arabidopsis thaliana
atcctctgagactgcat

SEQ ID NO: 51971 - DNA, 17 bp, Arabidopsis thaliana
atcctctgagtcgtatt

SEQ ID NO: 51972 - DNA, 17 bp, Arabidopsis thaliana
atcctctgagtggtgac

SEQ ID NO: 51973 - DNA, 17 bp, Arabidopsis thaliana
atcctctgatccttctc

SEQ ID NO: 51974 - DNA, 17 bp, Arabidopsis thaliana
atcctctgattggtcgc

SEQ ID NO: 51975 - DNA, 17 bp, Arabidopsis thaliana
atcctctgcagcaaccg

SEQ ID NO: 51976 - DNA, 17 bp, Arabidopsis thaliana
atcctctgctctaatac

SEQ ID NO: 51977 - DNA, 17 bp, Arabidopsis thaliana
atcctctggagattttc

SEQ ID NO: 51978 - DNA, 17 bp, Arabidopsis thaliana
atcctctgggacgtagt

SEQ ID NO: 51979 - DNA, 17 bp, Arabidopsis thaliana
atcctctggtgcgggat

SEQ ID NO: 51980 - DNA, 17 bp, Arabidopsis thaliana
atcctctgtcgcgagta

SEQ ID NO: 51981 - DNA, 17 bp, Arabidopsis thaliana
atcctctgtgcgggtcg

SEQ ID NO: 51982 - DNA, 17 bp, Arabidopsis thaliana
atcctctgtggggcgtt

SEQ ID NO: 51983 - DNA, 17 bp, Arabidopsis thaliana
atcctctgtgggtcgtt

SEQ ID NO: 51984 - DNA, 17 bp, Arabidopsis thaliana
atcctctgttccttgcc

SEQ ID NO: 51985 - DNA, 17 bp, Arabidopsis thaliana
atcctctgttgaccctt

SEQ ID NO: 51986 - DNA, 17 bp, Arabidopsis thaliana
atcctctgttgctgctc

SEQ ID NO: 51987 - DNA, 17 bp, Arabidopsis thaliana
atcctcttaagcgaaag

SEQ ID NO: 51988 - DNA, 17 bp, Arabidopsis thaliana
atcctcttacaactcct

SEQ ID NO: 51989 - DNA, 17 bp, Arabidopsis thaliana
atcctcttactccggcc

SEQ ID NO: 51990 - DNA, 17 bp, Arabidopsis thaliana
atcctcttatgattttg

SEQ ID NO: 51991 - DNA, 17 bp, Arabidopsis thaliana
atcctcttcagtttttc

SEQ ID NO: 51992 - DNA, 17 bp, Arabidopsis thaliana
atcctcttcgctggatt

SEQ ID NO: 51993 - DNA, 17 bp, Arabidopsis thaliana
atcctctttcaccattc

SEQ ID NO: 51994 - DNA, 17 bp, Arabidopsis thaliana
atcctctttcgggccca

SEQ ID NO: 51995 - DNA, 17 bp, Arabidopsis thaliana
atcctcttttccttgcc

SEQ ID NO: 51996 - DNA, 17 bp, Arabidopsis thaliana
atcctgaacttggaacg

SEQ ID NO: 51997 - DNA, 17 bp, Arabidopsis thaliana
atcctgaacttggaatt

SEQ ID NO: 51998 - DNA, 17 bp, Arabidopsis thaliana
atcctgacaaactgcct

SEQ ID NO: 51999 - DNA, 17 bp, Arabidopsis thaliana
atcctgacaaagtggta

SEQ ID NO: 52000 - DNA, 17 bp, Arabidopsis thaliana
atcctgacaagatcatg

SEQ ID NO: 52001 - DNA, 17 bp, Arabidopsis thaliana
atcctgacacggggagg

SEQ ID NO: 52002 - DNA, 17 bp, Arabidopsis thaliana
atcctgacccgcagctt

SEQ ID NO: 52003 - DNA, 17 bp, Arabidopsis thaliana
atcctgacccggagctt

SEQ ID NO: 52004 - DNA, 17 bp, Arabidopsis thaliana
atcctgacctaggattg

SEQ ID NO: 52005 - DNA, 17 bp, Arabidopsis thaliana
atcctgacttcccttcc

SEQ ID NO: 52006 - DNA, 17 bp, Arabidopsis thaliana
atcctgagacttgaacc

SEQ ID NO: 52007 - DNA, 17 bp, Arabidopsis thaliana
atcctgagatatcccga

SEQ ID NO: 52008 - DNA, 17 bp, Arabidopsis thaliana
atcctgagatctcgttc

SEQ ID NO: 52009 - DNA, 17 bp, Arabidopsis thaliana
atcctgagatggatcga

SEQ ID NO: 52010 - DNA, 17 bp, Arabidopsis thaliana
atcctgagcaaaaggac

SEQ ID NO: 52011 - DNA, 17 bp, Arabidopsis thaliana
atcctgaggtcgagagt

SEQ ID NO: 52012 - DNA, 17 bp, Arabidopsis thaliana
atcctgagtcagtttga

SEQ ID NO: 52013 - DNA, 17 bp, Arabidopsis thaliana
atcctgatactgatgtt

SEQ ID NO: 52014 - DNA, 17 bp, Arabidopsis thaliana
atcctgatctacgactc

SEQ ID NO: 52015 - DNA, 17 bp, Arabidopsis thaliana
atcctgatcttaggaag

SEQ ID NO: 52016 - DNA, 17 bp, Arabidopsis thaliana
atcctgattcatccaga

SEQ ID NO: 52017 - DNA, 17 bp, Arabidopsis thaliana
atcctgcaattagaact

SEQ ID NO: 52018 - DNA, 17 bp, Arabidopsis thaliana
atcctgcacgaccaccc

SEQ ID NO: 52019 - DNA, 17 bp, Arabidopsis thaliana
atcctgcagatttaaaa

SEQ ID NO: 52020 - DNA, 17 bp, Arabidopsis thaliana
atcctgcatagggttct

SEQ ID NO: 52021 - DNA, 17 bp, Arabidopsis thaliana
atcctgccaaacccgtc

SEQ ID NO: 52022 - DNA, 17 bp, Arabidopsis thaliana
atcctgccaaactcgtc

SEQ ID NO: 52023 - DNA, 17 bp, Arabidopsis thaliana
atcctgccagtagtcat

SEQ ID NO: 52024 - DNA, 17 bp, Arabidopsis thaliana
atcctgcgacctgggtt

SEQ ID NO: 52025 - DNA, 17 bp, Arabidopsis thaliana
atcctgcggaaggatca

SEQ ID NO: 52026 - DNA, 17 bp, Arabidopsis thaliana
atcctgcgggtttgcaa

SEQ ID NO: 52027 - DNA, 17 bp, Arabidopsis thaliana
atcctgctgtcgacgcc

SEQ ID NO: 52028 - DNA, 17 bp, Arabidopsis thaliana
atcctgctgtgtccaga

SEQ ID NO: 52029 - DNA, 17 bp, Arabidopsis thaliana
atcctgctttggctgca

SEQ ID NO: 52030 - DNA, 17 bp, Arabidopsis thaliana
atcctggaatatggtcg

SEQ ID NO: 52031 - DNA, 17 bp, Arabidopsis thaliana
atcctggacccggtcac

SEQ ID NO: 52032 - DNA, 17 bp, Arabidopsis thaliana
atcctggacttggaacg

SEQ ID NO: 52033 - DNA, 17 bp, Arabidopsis thaliana
atcctggagttcgactt

SEQ ID NO: 52034 - DNA, 17 bp, Arabidopsis thaliana
atcctggagttgagact

SEQ ID NO: 52035 - DNA, 17 bp, Arabidopsis thaliana
atcctggagttgagatt

SEQ ID NO: 52036 - DNA, 17 bp, Arabidopsis thaliana
atcctggagttgggact

SEQ ID NO: 52037 - DNA, 17 bp, Arabidopsis thaliana
atcctggattctccttt

SEQ ID NO: 52038 - DNA, 17 bp, Arabidopsis thaliana
atcctggcaagcgacta

SEQ ID NO: 52039 - DNA, 17 bp, Arabidopsis thaliana
atcctggcaagcggcta

SEQ ID NO: 52040 - DNA, 17 bp, Arabidopsis thaliana
atcctggcgaacggcca

SEQ ID NO: 52041 - DNA, 17 bp, Arabidopsis thaliana
atcctggcgaacggcta

SEQ ID NO: 52042 - DNA, 17 bp, Arabidopsis thaliana
atcctggctaggaagag

SEQ ID NO: 52043 - DNA, 17 bp, Arabidopsis thaliana
atcctggctcaggatga

SEQ ID NO: 52044 - DNA, 17 bp, Arabidopsis thaliana
atcctggctttcttcac

SEQ ID NO: 52045 - DNA, 17 bp, Arabidopsis thaliana
atcctgggcctactaat

SEQ ID NO: 52046 - DNA, 17 bp, Arabidopsis thaliana
atcctggtgactatgag

SEQ ID NO: 52047 - DNA, 17 bp, Arabidopsis thaliana
atcctggtgagcagctt

SEQ ID NO: 52048 - DNA, 17 bp, Arabidopsis thaliana
atcctggttggcgattg

SEQ ID NO: 52049 - DNA, 17 bp, Arabidopsis thaliana
atcctggttggtttgta

SEQ ID NO: 52050 - DNA, 17 bp, Arabidopsis thaliana
atcctgtagatggatat

SEQ ID NO: 52051 - DNA, 17 bp, Arabidopsis thaliana
atcctgtagatggatca

SEQ ID NO: 52052 - DNA, 17 bp, Arabidopsis thaliana
atcctgtagatggatcc

SEQ ID NO: 52053 - DNA, 17 bp, Arabidopsis thaliana
atcctgtagatggatcg

SEQ ID NO: 52054 - DNA, 17 bp, Arabidopsis thaliana
atcctgtagatggatct

SEQ ID NO: 52055 - DNA, 17 bp, Arabidopsis thaliana
atcctgtagtccaacgg

SEQ ID NO: 52056 - DNA, 17 bp, Arabidopsis thaliana
atcctgtagtcccccag

SEQ ID NO: 52057 - DNA, 17 bp, Arabidopsis thaliana
atcctgtcacctgttgc

SEQ ID NO: 52058 - DNA, 17 bp, Arabidopsis thaliana
atcctgtccgacggtcg

SEQ ID NO: 52059 - DNA, 17 bp, Arabidopsis thaliana
atcctgtcgatgtcgtc

SEQ ID NO: 52060 - DNA, 17 bp, Arabidopsis thaliana
atcctgtcggcttaact

SEQ ID NO: 52061 - DNA, 17 bp, Arabidopsis thaliana
atcctgtctagcttgtg

SEQ ID NO: 52062 - DNA, 17 bp, Arabidopsis thaliana
atcctgtgatacgctga

SEQ ID NO: 52063 - DNA, 17 bp, Arabidopsis thaliana
atcctgtggatggcttt

SEQ ID NO: 52064 - DNA, 17 bp, Arabidopsis thaliana
atcctgtgtttgcttca

SEQ ID NO: 52065 - DNA, 17 bp, Arabidopsis thaliana
atcctgttagcgaggca

SEQ ID NO: 52066 - DNA, 17 bp, Arabidopsis thaliana
atcctgttcgctaagtt

SEQ ID NO: 52067 - DNA, 17 bp, Arabidopsis thaliana
atcctgttggaggactt

SEQ ID NO: 52068 - DNA, 17 bp, Arabidopsis thaliana
atcctgttgtactcgat

SEQ ID NO: 52069 - DNA, 17 bp, Arabidopsis thaliana
atcctgtttcttgttcg

SEQ ID NO: 52070 - DNA, 17 bp, Arabidopsis thaliana
atcctgtttcttgttct

SEQ ID NO: 52071 - DNA, 17 bp, Arabidopsis thaliana
atcctgtttctttttcg

SEQ ID NO: 52072 - DNA, 17 bp, Arabidopsis thaliana
atcctgtttgacgcgtg

SEQ ID NO: 52073 - DNA, 17 bp, Arabidopsis thaliana
atcctgttttggcacgc

SEQ ID NO: 52074 - DNA, 17 bp, Arabidopsis thaliana
atccttaaggtgggtca

SEQ ID NO: 52075 - DNA, 17 bp, Arabidopsis thaliana
atccttaagtcgcctgt

SEQ ID NO: 52076 - DNA, 17 bp, Arabidopsis thaliana
atccttaatccctcgta

SEQ ID NO: 52077 - DNA, 17 bp, Arabidopsis thaliana
atccttaatgggagcaa

SEQ ID NO: 52078 - DNA, 17 bp, Arabidopsis thaliana
atccttacagctaagct

SEQ ID NO: 52079 - DNA, 17 bp, Arabidopsis thaliana
atccttacatagcgggt

SEQ ID NO: 52080 - DNA, 17 bp, Arabidopsis thaliana
atccttaccaggtccag

SEQ ID NO: 52081 - DNA, 17 bp, Arabidopsis thaliana
atccttacccaggttcg

SEQ ID NO: 52082 - DNA, 17 bp, Arabidopsis thaliana
atccttactagtgggcc

SEQ ID NO: 52083 - DNA, 17 bp, Arabidopsis thaliana
atccttactatgtctgg

SEQ ID NO: 52084 - DNA, 17 bp, Arabidopsis thaliana
atccttactcgaatgga

SEQ ID NO: 52085 - DNA, 17 bp, Arabidopsis thaliana
atccttactcgacagct

SEQ ID NO: 52086 - DNA, 17 bp, Arabidopsis thaliana
atccttagcctacgccc

SEQ ID NO: 52087 - DNA, 17 bp, Arabidopsis thaliana
atccttaggctatgccg

SEQ ID NO: 52088 - DNA, 17 bp, Arabidopsis thaliana
atccttaggtcactggt

SEQ ID NO: 52089 - DNA, 17 bp, Arabidopsis thaliana
atccttagtcatcctgt

SEQ ID NO: 52090 - DNA, 17 bp, Arabidopsis thaliana
atccttagtcgcttcct

SEQ ID NO: 52091 - DNA, 17 bp, Arabidopsis thaliana
atccttagtgccatccc

SEQ ID NO: 52092 - DNA, 17 bp, Arabidopsis thaliana
atccttagtgccattca

SEQ ID NO: 52093 - DNA, 17 bp, Arabidopsis thaliana
atccttagttggtggag

SEQ ID NO: 52094 - DNA, 17 bp, Arabidopsis thaliana
atccttatcgctctgta

SEQ ID NO: 52095 - DNA, 17 bp, Arabidopsis thaliana
atccttatctccggcga

SEQ ID NO: 52096 - DNA, 17 bp, Arabidopsis thaliana
atccttatctgtttggc

SEQ ID NO: 52097 - DNA, 17 bp, Arabidopsis thaliana
atccttatcttcggcga

SEQ ID NO: 52098 - DNA, 17 bp, Arabidopsis thaliana
atccttatcttgggagg

SEQ ID NO: 52099 - DNA, 17 bp, Arabidopsis thaliana
atccttatgtggacgag

SEQ ID NO: 52100 - DNA, 17 bp, Arabidopsis thaliana
atccttcagagctatcg

SEQ ID NO: 52101 - DNA, 17 bp, Arabidopsis thaliana
atccttcatcgggatgg

SEQ ID NO: 52102 - DNA, 17 bp, Arabidopsis thaliana
atccttcattcccagga

SEQ ID NO: 52103 - DNA, 17 bp, Arabidopsis thaliana
atccttcccagctacac

SEQ ID NO: 52104 - DNA, 17 bp, Arabidopsis thaliana
atccttccgcaggttca

SEQ ID NO: 52105 - DNA, 17 bp, Arabidopsis thaliana
atccttcctttctttcg

SEQ ID NO: 52106 - DNA, 17 bp, Arabidopsis thaliana
atccttcgatgcccccc

SEQ ID NO: 52107 - DNA, 17 bp, Arabidopsis thaliana
atccttcgatgtcggat

SEQ ID NO: 52108 - DNA, 17 bp, Arabidopsis thaliana
atccttcgatgtcggct

SEQ ID NO: 52109 - DNA, 17 bp, Arabidopsis thaliana
atccttcgctgcggaga

SEQ ID NO: 52110 - DNA, 17 bp, Arabidopsis thaliana
atccttcggaccaggct

SEQ ID NO: 52111 - DNA, 17 bp, Arabidopsis thaliana
atccttcggagcttaag

SEQ ID NO: 52112 - DNA, 17 bp, Arabidopsis thaliana
atccttcgggtctaagt

SEQ ID NO: 52113 - DNA, 17 bp, Arabidopsis thaliana
atccttctaatcgtcca

SEQ ID NO: 52114 - DNA, 17 bp, Arabidopsis thaliana
atccttctccgcttgtc

SEQ ID NO: 52115 - DNA, 17 bp, Arabidopsis thaliana
atccttctggataccgt

SEQ ID NO: 52116 - DNA, 17 bp, Arabidopsis thaliana
atccttctggtaatctg

SEQ ID NO: 52117 - DNA, 17 bp, Arabidopsis thaliana
atccttctggttttggc

SEQ ID NO: 52118 - DNA, 17 bp, Arabidopsis thaliana
atccttctggtttttgc

SEQ ID NO: 52119 - DNA, 17 bp, Arabidopsis thaliana
atccttcttctgagatc

SEQ ID NO: 52120 - DNA, 17 bp, Arabidopsis thaliana
atccttcttgatggatt

SEQ ID NO: 52121 - DNA, 17 bp, Arabidopsis thaliana
atccttcttgtcgatga

SEQ ID NO: 52122 - DNA, 17 bp, Arabidopsis thaliana
atccttgaagttcggct

SEQ ID NO: 52123 - DNA, 17 bp, Arabidopsis thaliana
atccttgacaaaagctg

SEQ ID NO: 52124 - DNA, 17 bp, Arabidopsis thaliana
atccttgacaaagacca

SEQ ID NO: 52125 - DNA, 17 bp, Arabidopsis thaliana
atccttgagcatgtttg

SEQ ID NO: 52126 - DNA, 17 bp, Arabidopsis thaliana
atccttgagggatgaaa

SEQ ID NO: 52127 - DNA, 17 bp, Arabidopsis thaliana
atccttgatgaggacga

SEQ ID NO: 52128 - DNA, 17 bp, Arabidopsis thaliana
atccttgcaggtttgag

SEQ ID NO: 52129 - DNA, 17 bp, Arabidopsis thaliana
atccttgcgataggcga

SEQ ID NO: 52130 - DNA, 17 bp, Arabidopsis thaliana
atccttgcgggcttgaa

SEQ ID NO: 52131 - DNA, 17 bp, Arabidopsis thaliana
atccttgcgggcttgag

SEQ ID NO: 52132 - DNA, 17 bp, Arabidopsis thaliana
atccttgcggtgtttac

SEQ ID NO: 52133 - DNA, 17 bp, Arabidopsis thaliana
atccttgctctctggga

SEQ ID NO: 52134 - DNA, 17 bp, Arabidopsis thaliana
atccttgcttttgccac

SEQ ID NO: 52135 - DNA, 17 bp, Arabidopsis thaliana
atccttggacaaccggc

SEQ ID NO: 52136 - DNA, 17 bp, Arabidopsis thaliana
atccttggactggtggt

SEQ ID NO: 52137 - DNA, 17 bp, Arabidopsis thaliana
atccttggactggtgtt

SEQ ID NO: 52138 - DNA, 17 bp, Arabidopsis thaliana
atccttggggccgtagg

SEQ ID NO: 52139 - DNA, 17 bp, Arabidopsis thaliana
atccttggtgcaggtcg

SEQ ID NO: 52140 - DNA, 17 bp, Arabidopsis thaliana
atccttggtttccagtt

SEQ ID NO: 52141 - DNA, 17 bp, Arabidopsis thaliana
atccttgtagcagtgga

SEQ ID NO: 52142 - DNA, 17 bp, Arabidopsis thaliana
atccttgtcgctcagaa

SEQ ID NO: 52143 - DNA, 17 bp, Arabidopsis thaliana
atccttgtcgctctgta

SEQ ID NO: 52144 - DNA, 17 bp, Arabidopsis thaliana
atccttgtggctttgga

SEQ ID NO: 52145 - DNA, 17 bp, Arabidopsis thaliana
atccttgtggtttttgc

SEQ ID NO: 52146 - DNA, 17 bp, Arabidopsis thaliana
atccttgttagaagaca

SEQ ID NO: 52147 - DNA, 17 bp, Arabidopsis thaliana
atccttgttgatcactc

SEQ ID NO: 52148 - DNA, 17 bp, Arabidopsis thaliana
atcctttaactccctca

SEQ ID NO: 52149 - DNA, 17 bp, Arabidopsis thaliana
atcctttagaccttcgg

SEQ ID NO: 52150 - DNA, 17 bp, Arabidopsis thaliana
atcctttagggtttgac

SEQ ID NO: 52151 - DNA, 17 bp, Arabidopsis thaliana
atcctttcacggaccca

SEQ ID NO: 52152 - DNA, 17 bp, Arabidopsis thaliana
atcctttccagaattga

SEQ ID NO: 52153 - DNA, 17 bp, Arabidopsis thaliana
atcctttccccaaggcg

SEQ ID NO: 52154 - DNA, 17 bp, Arabidopsis thaliana
atcctttccctttctac

SEQ ID NO: 52155 - DNA, 17 bp, Arabidopsis thaliana
atcctttctacaggtat

SEQ ID NO: 52156 - DNA, 17 bp, Arabidopsis thaliana
atcctttcttaaacctg

SEQ ID NO: 52157 - DNA, 17 bp, Arabidopsis thaliana
atcctttgaacctaggg

SEQ ID NO: 52158 - DNA, 17 bp, Arabidopsis thaliana
atcctttgaccatctaa

SEQ ID NO: 52159 - DNA, 17 bp, Arabidopsis thaliana
atcctttgacttccaac

SEQ ID NO: 52160 - DNA, 17 bp, Arabidopsis thaliana
atcctttgatcacaggg

SEQ ID NO: 52161 - DNA, 17 bp, Arabidopsis thaliana
atcctttgcagacgact

SEQ ID NO: 52162 - DNA, 17 bp, Arabidopsis thaliana
atcctttgcagacggct

SEQ ID NO: 52163 - DNA, 17 bp, Arabidopsis thaliana
atcctttgcataagggg

SEQ ID NO: 52164 - DNA, 17 bp, Arabidopsis thaliana
atccttttcagacccga

SEQ ID NO: 52165 - DNA, 17 bp, Arabidopsis thaliana
atccttttcagactttg

SEQ ID NO: 52166 - DNA, 17 bp, Arabidopsis thaliana
atccttttctgccaaaa

SEQ ID NO: 52167 - DNA, 17 bp, Arabidopsis thaliana
atccttttgaacatcca

SEQ ID NO: 52168 - DNA, 17 bp, Arabidopsis thaliana
atccttttgaggcactt

SEQ ID NO: 52169 - DNA, 17 bp, Arabidopsis thaliana
atccttttggttcgagt

SEQ ID NO: 52170 - DNA, 17 bp, Arabidopsis thaliana
atccttttgtcgaggga

SEQ ID NO: 52171 - DNA, 17 bp, Arabidopsis thaliana
atcctttttctgtcaac

SEQ ID NO: 52172 - DNA, 17 bp, Arabidopsis thaliana
atcctttttggttaggt

SEQ ID NO: 52173 - DNA, 17 bp, Arabidopsis thaliana
atccttttttgcaagtg

SEQ ID NO: 52174 - DNA, 17 bp, Arabidopsis thaliana
atccttttttgccatgg

SEQ ID NO: 52175 - DNA, 17 bp, Arabidopsis thaliana
atcgaaaaaccagaaaa

SEQ ID NO: 52176 - DNA, 17 bp, Arabidopsis thaliana
atcgaaaaaccagaaac

SEQ ID NO: 52177 - DNA, 17 bp, Arabidopsis thaliana
atcgaaacaaattcctt

SEQ ID NO: 52178 - DNA, 17 bp, Arabidopsis thaliana
atcgaaacagacagtgt

SEQ ID NO: 52179 - DNA, 17 bp, Arabidopsis thaliana
atcgaaacctcatacgc

SEQ ID NO: 52180 - DNA, 17 bp, Arabidopsis thaliana
atcgaaacctgctctga

SEQ ID NO: 52181 - DNA, 17 bp, Arabidopsis thaliana
atcgaaacctggctctg

SEQ ID NO: 52182 - DNA, 17 bp, Arabidopsis thaliana
atcgaaacgacttggtt

SEQ ID NO: 52183 - DNA, 17 bp, Arabidopsis thaliana
atcgaaactgtgataca

SEQ ID NO: 52184 - DNA, 17 bp, Arabidopsis thaliana
atcgaaagactggatag

SEQ ID NO: 52185 - DNA, 17 bp, Arabidopsis thaliana
atcgaaaggaattgtcc

SEQ ID NO: 52186 - DNA, 17 bp, Arabidopsis thaliana
atcgaaagttcgaatcc

SEQ ID NO: 52187 - DNA, 17 bp, Arabidopsis thaliana
atcgaaagttgagtagg

SEQ ID NO: 52188 - DNA, 17 bp, Arabidopsis thaliana
atcgaaatcagatacga

SEQ ID NO: 52189 - DNA, 17 bp, Arabidopsis thaliana
atcgaaatccatgacat

SEQ ID NO: 52190 - DNA, 17 bp, Arabidopsis thaliana
atcgaaatctcttcggc

SEQ ID NO: 52191 - DNA, 17 bp, Arabidopsis thaliana
atcgaaatctgttcagc

SEQ ID NO: 52192 - DNA, 17 bp, Arabidopsis thaliana
atcgaaatgatgatttt

SEQ ID NO: 52193 - DNA, 17 bp, Arabidopsis thaliana
atcgaaatgttctgatt

SEQ ID NO: 52194 - DNA, 17 bp, Arabidopsis thaliana
atcgaaattcaattgcg

SEQ ID NO: 52195 - DNA, 17 bp, Arabidopsis thaliana
atcgaaattcatcttct

SEQ ID NO: 52196 - DNA, 17 bp, Arabidopsis thaliana
atcgaaattttgcaggc

SEQ ID NO: 52197 - DNA, 17 bp, Arabidopsis thaliana
atcgaacaaaaggcaag

SEQ ID NO: 52198 - DNA, 17 bp, Arabidopsis thaliana
atcgaacacaccttctg

SEQ ID NO: 52199 - DNA, 17 bp, Arabidopsis thaliana
atcgaacaccttttgag

SEQ ID NO: 52200 - DNA, 17 bp, Arabidopsis thaliana
atcgaacagtcgtcttt

SEQ ID NO: 52201 - DNA, 17 bp, Arabidopsis thaliana
atcgaacataccttctg

SEQ ID NO: 52202 - DNA, 17 bp, Arabidopsis thaliana
atcgaacccagaagcca

SEQ ID NO: 52203 - DNA, 17 bp, Arabidopsis thaliana
atcgaacctatgctagc

SEQ ID NO: 52204 - DNA, 17 bp, Arabidopsis thaliana
atcgaacctccgatcgg

SEQ ID NO: 52205 - DNA, 17 bp, Arabidopsis thaliana
atcgaacgagcttccgt

SEQ ID NO: 52206 - DNA, 17 bp, Arabidopsis thaliana
atcgaacgctatgttga

SEQ ID NO: 52207 - DNA, 17 bp, Arabidopsis thaliana
atcgaacgctatgttgg

SEQ ID NO: 52208 - DNA, 17 bp, Arabidopsis thaliana
atcgaacggaacaagga

SEQ ID NO: 52209 - DNA, 17 bp, Arabidopsis thaliana
atcgaactacggattgc

SEQ ID NO: 52210 - DNA, 17 bp, Arabidopsis thaliana
atcgaactgacttgctt

SEQ ID NO: 52211 - DNA, 17 bp, Arabidopsis thaliana
atcgaacttaggatctg

SEQ ID NO: 52212 - DNA, 17 bp, Arabidopsis thaliana
atcgaacttcttggatt

SEQ ID NO: 52213 - DNA, 17 bp, Arabidopsis thaliana
atcgaacttgggtctga

SEQ ID NO: 52214 - DNA, 17 bp, Arabidopsis thaliana
atcgaacttgtcatctg

SEQ ID NO: 52215 - DNA, 17 bp, Arabidopsis thaliana
atcgaactttgggagac

SEQ ID NO: 52216 - DNA, 17 bp, Arabidopsis thaliana
atcgaagaatccttttt

SEQ ID NO: 52217 - DNA, 17 bp, Arabidopsis thaliana
atcgaagcaagctatcc

SEQ ID NO: 52218 - DNA, 17 bp, Arabidopsis thaliana
atcgaagcaccagtggt

SEQ ID NO: 52219 - DNA, 17 bp, Arabidopsis thaliana
atcgaagcaggagttaa

SEQ ID NO: 52220 - DNA, 17 bp, Arabidopsis thaliana
atcgaagcatttctcta

SEQ ID NO: 52221 - DNA, 17 bp, Arabidopsis thaliana
atcgaagcttagaaatc

SEQ ID NO: 52222 - DNA, 17 bp, Arabidopsis thaliana
atcgaaggacggttttc

SEQ ID NO: 52223 - DNA, 17 bp, Arabidopsis thaliana
atcgaaggctggcagga

SEQ ID NO: 52224 - DNA, 17 bp, Arabidopsis thaliana
atcgaagggggtgttat

SEQ ID NO: 52225 - DNA, 17 bp, Arabidopsis thaliana
atcgaagtcgctgtcgc

SEQ ID NO: 52226 - DNA, 17 bp, Arabidopsis thaliana
atcgaagtgcagttggg

SEQ ID NO: 52227 - DNA, 17 bp, Arabidopsis thaliana
atcgaagttttgatctc

SEQ ID NO: 52228 - DNA, 17 bp, Arabidopsis thaliana
atcgaatatccgcttcg

SEQ ID NO: 52229 - DNA, 17 bp, Arabidopsis thaliana
atcgaatatgactttca

SEQ ID NO: 52230 - DNA, 17 bp, Arabidopsis thaliana
atcgaatatgactttct

SEQ ID NO: 52231 - DNA, 17 bp, Arabidopsis thaliana
atcgaatcaacgagctt

SEQ ID NO: 52232 - DNA, 17 bp, Arabidopsis thaliana
atcgaatccaaagttgc

SEQ ID NO: 52233 - DNA, 17 bp, Arabidopsis thaliana
atcgaatccgggtgtcg

SEQ ID NO: 52234 - DNA, 17 bp, Arabidopsis thaliana
atcgaatcgttgacctg

SEQ ID NO: 52235 - DNA, 17 bp, Arabidopsis thaliana
atcgaatcgttttcgtc

SEQ ID NO: 52236 - DNA, 17 bp, Arabidopsis thaliana
atcgaatctgattctga

SEQ ID NO: 52237 - DNA, 17 bp, Arabidopsis thaliana
atcgaatctgattctgg

SEQ ID NO: 52238 - DNA, 17 bp, Arabidopsis thaliana
atcgaatctttaggtct

SEQ ID NO: 52239 - DNA, 17 bp, Arabidopsis thaliana
atcgaatctttgggtct

SEQ ID NO: 52240 - DNA, 17 bp, Arabidopsis thaliana
atcgaatgacgcttggg

SEQ ID NO: 52241 - DNA, 17 bp, Arabidopsis thaliana
atcgaatgatttgttgc

SEQ ID NO: 52242 - DNA, 17 bp, Arabidopsis thaliana
atcgaatgcgcagatgt

SEQ ID NO: 52243 - DNA, 17 bp, Arabidopsis thaliana
atcgaatggagacatgc

SEQ ID NO: 52244 - DNA, 17 bp, Arabidopsis thaliana
atcgaatggagtttgca

SEQ ID NO: 52245 - DNA, 17 bp, Arabidopsis thaliana
atcgaatggtgactgcg

SEQ ID NO: 52246 - DNA, 17 bp, Arabidopsis thaliana
atcgaattacaggcttc

SEQ ID NO: 52247 - DNA, 17 bp, Arabidopsis thaliana
atcgaattcgaagacga

SEQ ID NO: 52248 - DNA, 17 bp, Arabidopsis thaliana
atcgaattcgcagatgt

SEQ ID NO: 52249 - DNA, 17 bp, Arabidopsis thaliana
atcgaattctacgatca

SEQ ID NO: 52250 - DNA, 17 bp, Arabidopsis thaliana
atcgaattgtcttcagg

SEQ ID NO: 52251 - DNA, 17 bp, Arabidopsis thaliana
atcgaatttactgattc

SEQ ID NO: 52252 - DNA, 17 bp, Arabidopsis thaliana
atcgaatttccaagagt

SEQ ID NO: 52253 - DNA, 17 bp, Arabidopsis thaliana
atcgacaaaggctttgt

SEQ ID NO: 52254 - DNA, 17 bp, Arabidopsis thaliana
atcgacaaagtccgatc

SEQ ID NO: 52255 - DNA, 17 bp, Arabidopsis thaliana
atcgacaaagtgattct

SEQ ID NO: 52256 - DNA, 17 bp, Arabidopsis thaliana
atcgacaacaatggaat

SEQ ID NO: 52257 - DNA, 17 bp, Arabidopsis thaliana
atcgacaacatcccgct

SEQ ID NO: 52258 - DNA, 17 bp, Arabidopsis thaliana
atcgacaagtgtccacg

SEQ ID NO: 52259 - DNA, 17 bp, Arabidopsis thaliana
atcgacaagtgtttccg

SEQ ID NO: 52260 - DNA, 17 bp, Arabidopsis thaliana
atcgacaatgatccttc

SEQ ID NO: 52261 - DNA, 17 bp, Arabidopsis thaliana
atcgacacatgtgccct

SEQ ID NO: 52262 - DNA, 17 bp, Arabidopsis thaliana
atcgacacattgtcgaa

SEQ ID NO: 52263 - DNA, 17 bp, Arabidopsis thaliana
atcgacaccaagccctg

SEQ ID NO: 52264 - DNA, 17 bp, Arabidopsis thaliana
atcgacaccagttttgg

SEQ ID NO: 52265 - DNA, 17 bp, Arabidopsis thaliana
atcgacaccctttgcag

SEQ ID NO: 52266 - DNA, 17 bp, Arabidopsis thaliana
atcgacaccgacagctc

SEQ ID NO: 52267 - DNA, 17 bp, Arabidopsis thaliana
atcgacaccggcagctc

SEQ ID NO: 52268 - DNA, 17 bp, Arabidopsis thaliana
atcgacaccggttcaaa

SEQ ID NO: 52269 - DNA, 17 bp, Arabidopsis thaliana
atcgacaccttgcggct

SEQ ID NO: 52270 - DNA, 17 bp, Arabidopsis thaliana
atcgacactcatctcat

SEQ ID NO: 52271 - DNA, 17 bp, Arabidopsis thaliana
atcgacactcgtgctac

SEQ ID NO: 52272 - DNA, 17 bp, Arabidopsis thaliana
atcgacactcttgaggt

SEQ ID NO: 52273 - DNA, 17 bp, Arabidopsis thaliana
atcgacagactgagagc

SEQ ID NO: 52274 - DNA, 17 bp, Arabidopsis thaliana
atcgacagagctccgtg

SEQ ID NO: 52275 - DNA, 17 bp, Arabidopsis thaliana
atcgacagaggagagag

SEQ ID NO: 52276 - DNA, 17 bp, Arabidopsis thaliana
atcgacatcaggagggt

SEQ ID NO: 52277 - DNA, 17 bp, Arabidopsis thaliana
atcgacatcgactgcga

SEQ ID NO: 52278 - DNA, 17 bp, Arabidopsis thaliana
atcgacattttgaccgc

SEQ ID NO: 52279 - DNA, 17 bp, Arabidopsis thaliana
atcgaccaaacccgtcc

SEQ ID NO: 52280 - DNA, 17 bp, Arabidopsis thaliana
atcgaccaacccgtgct

SEQ ID NO: 52281 - DNA, 17 bp, Arabidopsis thaliana
atcgaccagaggctggg

SEQ ID NO: 52282 - DNA, 17 bp, Arabidopsis thaliana
atcgaccagaggctggt

SEQ ID NO: 52283 - DNA, 17 bp, Arabidopsis thaliana
atcgaccagaggctgtt

SEQ ID NO: 52284 - DNA, 17 bp, Arabidopsis thaliana
atcgaccatctatgcac

SEQ ID NO: 52285 - DNA, 17 bp, Arabidopsis thaliana
atcgaccatggcggtgc

SEQ ID NO: 52286 - DNA, 17 bp, Arabidopsis thaliana
atcgacccaaaccccta

SEQ ID NO: 52287 - DNA, 17 bp, Arabidopsis thaliana
atcgacccaaacccgtc

SEQ ID NO: 52288 - DNA, 17 bp, Arabidopsis thaliana
atcgacccaaatcattc

SEQ ID NO: 52289 - DNA, 17 bp, Arabidopsis thaliana
atcgacccggtccgagg

SEQ ID NO: 52290 - DNA, 17 bp, Arabidopsis thaliana
atcgacccgtgcagtgc

SEQ ID NO: 52291 - DNA, 17 bp, Arabidopsis thaliana
atcgaccgaagtggtcg

SEQ ID NO: 52292 - DNA, 17 bp, Arabidopsis thaliana
atcgaccgagatgacag

SEQ ID NO: 52293 - DNA, 17 bp, Arabidopsis thaliana
atcgaccgatgttgacc

SEQ ID NO: 52294 - DNA, 17 bp, Arabidopsis thaliana
atcgaccgcttatcact

SEQ ID NO: 52295 - DNA, 17 bp, Arabidopsis thaliana
atcgaccggcagaccgg

SEQ ID NO: 52296 - DNA, 17 bp, Arabidopsis thaliana
atcgaccgggtccaagt

SEQ ID NO: 52297 - DNA, 17 bp, Arabidopsis thaliana
atcgaccgggtccgaga

SEQ ID NO: 52298 - DNA, 17 bp, Arabidopsis thaliana
atcgaccgggtccgagg

SEQ ID NO: 52299 - DNA, 17 bp, Arabidopsis thaliana
atcgaccgtaactgctt

SEQ ID NO: 52300 - DNA, 17 bp, Arabidopsis thaliana
atcgaccgtaatgtgaa

SEQ ID NO: 52301 - DNA, 17 bp, Arabidopsis thaliana
atcgaccgtattgctcg

SEQ ID NO: 52302 - DNA, 17 bp, Arabidopsis thaliana
atcgaccgtcatgttat

SEQ ID NO: 52303 - DNA, 17 bp, Arabidopsis thaliana
atcgaccgtccacacac

SEQ ID NO: 52304 - DNA, 17 bp, Arabidopsis thaliana
atcgaccgtcggacaag

SEQ ID NO: 52305 - DNA, 17 bp, Arabidopsis thaliana
atcgaccgtgtccgagg

SEQ ID NO: 52306 - DNA, 17 bp, Arabidopsis thaliana
atcgaccgttttctcct

SEQ ID NO: 52307 - DNA, 17 bp, Arabidopsis thaliana
atcgacctacggtatac

SEQ ID NO: 52308 - DNA, 17 bp, Arabidopsis thaliana
atcgacctaggcaccga

SEQ ID NO: 52309 - DNA, 17 bp, Arabidopsis thaliana
atcgacctgctgcttcc

SEQ ID NO: 52310 - DNA, 17 bp, Arabidopsis thaliana
atcgacgaacacggatg

SEQ ID NO: 52311 - DNA, 17 bp, Arabidopsis thaliana
atcgacgaaccgatcgg

SEQ ID NO: 52312 - DNA, 17 bp, Arabidopsis thaliana
atcgacgacacacgacg

SEQ ID NO: 52313 - DNA, 17 bp, Arabidopsis thaliana
atcgacgaccggtttgt

SEQ ID NO: 52314 - DNA, 17 bp, Arabidopsis thaliana
atcgacgattcctcgga

SEQ ID NO: 52315 - DNA, 17 bp, Arabidopsis thaliana
atcgacgcacatctctc

SEQ ID NO: 52316 - DNA, 17 bp, Arabidopsis thaliana
atcgacgcctcgtgacc

SEQ ID NO: 52317 - DNA, 17 bp, Arabidopsis thaliana
atcgacgcggattacgg

SEQ ID NO: 52318 - DNA, 17 bp, Arabidopsis thaliana
atcgacgcgggttacgg

SEQ ID NO: 52319 - DNA, 17 bp, Arabidopsis thaliana
atcgacgcttgcagtga

SEQ ID NO: 52320 - DNA, 17 bp, Arabidopsis thaliana
atcgacgcttgcttgaa

SEQ ID NO: 52321 - DNA, 17 bp, Arabidopsis thaliana
atcgacggaggatgacg

SEQ ID NO: 52322 - DNA, 17 bp, Arabidopsis thaliana
atcgacggatctactcc

SEQ ID NO: 52323 - DNA, 17 bp, Arabidopsis thaliana
atcgacggctttctcaa

SEQ ID NO: 52324 - DNA, 17 bp, Arabidopsis thaliana
atcgacggctttcttaa

SEQ ID NO: 52325 - DNA, 17 bp, Arabidopsis thaliana
atcgacgggaaggtttg

SEQ ID NO: 52326 - DNA, 17 bp, Arabidopsis thaliana
atcgacgggccgttcac

SEQ ID NO: 52327 - DNA, 17 bp, Arabidopsis thaliana
atcgacggtgataggcc

SEQ ID NO: 52328 - DNA, 17 bp, Arabidopsis thaliana
atcgacggttgcaatga

SEQ ID NO: 52329 - DNA, 17 bp, Arabidopsis thaliana
atcgacggttgcagtga

SEQ ID NO: 52330 - DNA, 17 bp, Arabidopsis thaliana
atcgacgtaggaagagg

SEQ ID NO: 52331 - DNA, 17 bp, Arabidopsis thaliana
atcgacgtcctggcccg

SEQ ID NO: 52332 - DNA, 17 bp, Arabidopsis thaliana
atcgacgtgccggagtg

SEQ ID NO: 52333 - DNA, 17 bp, Arabidopsis thaliana
atcgactaatcgctgaa

SEQ ID NO: 52334 - DNA, 17 bp, Arabidopsis thaliana
atcgactacaacttggt

SEQ ID NO: 52335 - DNA, 17 bp, Arabidopsis thaliana
atcgactagattataac

SEQ ID NO: 52336 - DNA, 17 bp, Arabidopsis thaliana
atcgactagggcacgct

SEQ ID NO: 52337 - DNA, 17 bp, Arabidopsis thaliana
atcgactccagaagaca

SEQ ID NO: 52338 - DNA, 17 bp, Arabidopsis thaliana
atcgactcgtgtgatcg

SEQ ID NO: 52339 - DNA, 17 bp, Arabidopsis thaliana
atcgactctccagcgaa

SEQ ID NO: 52340 - DNA, 17 bp, Arabidopsis thaliana
atcgactctccagtgaa

SEQ ID NO: 52341 - DNA, 17 bp, Arabidopsis thaliana
atcgactgatctggtga

SEQ ID NO: 52342 - DNA, 17 bp, Arabidopsis thaliana
atcgactgccacgtcat

SEQ ID NO: 52343 - DNA, 17 bp, Arabidopsis thaliana
atcgactgcgacggttt

SEQ ID NO: 52344 - DNA, 17 bp, Arabidopsis thaliana
atcgactgcgtcaaagc

SEQ ID NO: 52345 - DNA, 17 bp, Arabidopsis thaliana
atcgactgggtggtccg

SEQ ID NO: 52346 - DNA, 17 bp, Arabidopsis thaliana
atcgactgtaattcggt

SEQ ID NO: 52347 - DNA, 17 bp, Arabidopsis thaliana
atcgactgtcgatctgg

SEQ ID NO: 52348 - DNA, 17 bp, Arabidopsis thaliana
atcgacttcccctgggg

SEQ ID NO: 52349 - DNA, 17 bp, Arabidopsis thaliana
atcgacttggcctcagg

SEQ ID NO: 52350 - DNA, 17 bp, Arabidopsis thaliana
atcgacttgtcgggcca

SEQ ID NO: 52351 - DNA, 17 bp, Arabidopsis thaliana
atcgactttcgttgttg

SEQ ID NO: 52352 - DNA, 17 bp, Arabidopsis thaliana
atcgactttgtcactga

SEQ ID NO: 52353 - DNA, 17 bp, Arabidopsis thaliana
atcgagaactttgtccc

SEQ ID NO: 52354 - DNA, 17 bp, Arabidopsis thaliana
atcgagacccggggtcc

SEQ ID NO: 52355 - DNA, 17 bp, Arabidopsis thaliana
atcgagacctggctctt

SEQ ID NO: 52356 - DNA, 17 bp, Arabidopsis thaliana
atcgagactgagtatga

SEQ ID NO: 52357 - DNA, 17 bp, Arabidopsis thaliana
atcgagacttgacgatt

SEQ ID NO: 52358 - DNA, 17 bp, Arabidopsis thaliana
atcgagacttgacggat

SEQ ID NO: 52359 - DNA, 17 bp, Arabidopsis thaliana
atcgagagctccaagtg

SEQ ID NO: 52360 - DNA, 17 bp, Arabidopsis thaliana
atcgagaggtgtaaggc

SEQ ID NO: 52361 - DNA, 17 bp, Arabidopsis thaliana
atcgagagttggtacga

SEQ ID NO: 52362 - DNA, 17 bp, Arabidopsis thaliana
atcgagatcatactttg

SEQ ID NO: 52363 - DNA, 17 bp, Arabidopsis thaliana
atcgagatcttgtccgt

SEQ ID NO: 52364 - DNA, 17 bp, Arabidopsis thaliana
atcgagatgagctctgc

SEQ ID NO: 52365 - DNA, 17 bp, Arabidopsis thaliana
atcgagcaggcttgcat

SEQ ID NO: 52366 - DNA, 17 bp, Arabidopsis thaliana
atcgagcagtacacgtg

SEQ ID NO: 52367 - DNA, 17 bp, Arabidopsis thaliana
atcgagcggtttatgaa

SEQ ID NO: 52368 - DNA, 17 bp, Arabidopsis thaliana
atcgagctatgggccgt

SEQ ID NO: 52369 - DNA, 17 bp, Arabidopsis thaliana
atcgagcttagctagat

SEQ ID NO: 52370 - DNA, 17 bp, Arabidopsis thaliana
atcgagctttgcagacc

SEQ ID NO: 52371 - DNA, 17 bp, Arabidopsis thaliana
atcgaggacacgaggca

SEQ ID NO: 52372 - DNA, 17 bp, Arabidopsis thaliana
atcgaggacagtttcaa

SEQ ID NO: 52373 - DNA, 17 bp, Arabidopsis thaliana
atcgaggagtcttctga

SEQ ID NO: 52374 - DNA, 17 bp, Arabidopsis thaliana
atcgaggataaccgaat

SEQ ID NO: 52375 - DNA, 17 bp, Arabidopsis thaliana
atcgaggataggtgcac

SEQ ID NO: 52376 - DNA, 17 bp, Arabidopsis thaliana
atcgaggcctggctctt

SEQ ID NO: 52377 - DNA, 17 bp, Arabidopsis thaliana
atcgagggattacgggg

SEQ ID NO: 52378 - DNA, 17 bp, Arabidopsis thaliana
atcgagggcacgtctac

SEQ ID NO: 52379 - DNA, 17 bp, Arabidopsis thaliana
atcgagggcacgtctgc

SEQ ID NO: 52380 - DNA, 17 bp, Arabidopsis thaliana
atcgaggtgccccattt

SEQ ID NO: 52381 - DNA, 17 bp, Arabidopsis thaliana
atcgaggttatactttg

SEQ ID NO: 52382 - DNA, 17 bp, Arabidopsis thaliana
atcgaggttcgattcca

SEQ ID NO: 52383 - DNA, 17 bp, Arabidopsis thaliana
atcgaggtttttgctct

SEQ ID NO: 52384 - DNA, 17 bp, Arabidopsis thaliana
atcgagtactttcgggc

SEQ ID NO: 52385 - DNA, 17 bp, Arabidopsis thaliana
atcgagtactttggctg

SEQ ID NO: 52386 - DNA, 17 bp, Arabidopsis thaliana
atcgagtatgctaccaa

SEQ ID NO: 52387 - DNA, 17 bp, Arabidopsis thaliana
atcgagtattgcgatac

SEQ ID NO: 52388 - DNA, 17 bp, Arabidopsis thaliana
atcgagtcgtatcagtt

SEQ ID NO: 52389 - DNA, 17 bp, Arabidopsis thaliana
atcgagtcttagattga

SEQ ID NO: 52390 - DNA, 17 bp, Arabidopsis thaliana
atcgagtctttgaacgc

SEQ ID NO: 52391 - DNA, 17 bp, Arabidopsis thaliana
atcgagtggatgtcatg

SEQ ID NO: 52392 - DNA, 17 bp, Arabidopsis thaliana
atcgagtgtcatgtcat

SEQ ID NO: 52393 - DNA, 17 bp, Arabidopsis thaliana
atcgagtgtccggtcga

SEQ ID NO: 52394 - DNA, 17 bp, Arabidopsis thaliana
atcgagttacggaccgt

SEQ ID NO: 52395 - DNA, 17 bp, Arabidopsis thaliana
atcgagttcttggatct

SEQ ID NO: 52396 - DNA, 17 bp, Arabidopsis thaliana
atcgagttgcagtttaa

SEQ ID NO: 52397 - DNA, 17 bp, Arabidopsis thaliana
atcgagttgcggttaaa

SEQ ID NO: 52398 - DNA, 17 bp, Arabidopsis thaliana
atcgagttgcggtttaa

SEQ ID NO: 52399 - DNA, 17 bp, Arabidopsis thaliana
atcgagtttcgcgaaac

SEQ ID NO: 52400 - DNA, 17 bp, Arabidopsis thaliana
atcgagtttgcaaacaa

SEQ ID NO: 52401 - DNA, 17 bp, Arabidopsis thaliana
atcgagtttgcaaacag

SEQ ID NO: 52402 - DNA, 17 bp, Arabidopsis thaliana
atcgagttttccatctc

SEQ ID NO: 52403 - DNA, 17 bp, Arabidopsis thaliana
atcgataaacggtctat

SEQ ID NO: 52404 - DNA, 17 bp, Arabidopsis thaliana
atcgataaatctttggc

SEQ ID NO: 52405 - DNA, 17 bp, Arabidopsis thaliana
atcgataacaaatccgt

SEQ ID NO: 52406 - DNA, 17 bp, Arabidopsis thaliana
atcgataacatcatctc

SEQ ID NO: 52407 - DNA, 17 bp, Arabidopsis thaliana
atcgataacgaccgaag

SEQ ID NO: 52408 - DNA, 17 bp, Arabidopsis thaliana
atcgatacaggaaactc

SEQ ID NO: 52409 - DNA, 17 bp, Arabidopsis thaliana
atcgatacaggaagctc

SEQ ID NO: 52410 - DNA, 17 bp, Arabidopsis thaliana
atcgataccccgcatct

SEQ ID NO: 52411 - DNA, 17 bp, Arabidopsis thaliana
atcgatactcttctcgt

SEQ ID NO: 52412 - DNA, 17 bp, Arabidopsis thaliana
atcgatagactgcgttt

SEQ ID NO: 52413 - DNA, 17 bp, Arabidopsis thaliana
atcgatagacttgaccc

SEQ ID NO: 52414 - DNA, 17 bp, Arabidopsis thaliana
atcgatagatccgacgg

SEQ ID NO: 52415 - DNA, 17 bp, Arabidopsis thaliana
atcgataggccacgctt

SEQ ID NO: 52416 - DNA, 17 bp, Arabidopsis thaliana
atcgatatgaatgacct

SEQ ID NO: 52417 - DNA, 17 bp, Arabidopsis thaliana
atcgatattagactgtg

SEQ ID NO: 52418 - DNA, 17 bp, Arabidopsis thaliana
atcgatcaaaacccgtt

SEQ ID NO: 52419 - DNA, 17 bp, Arabidopsis thaliana
atcgatcaagactctcc

SEQ ID NO: 52420 - DNA, 17 bp, Arabidopsis thaliana
atcgatcaagattcgtc

SEQ ID NO: 52421 - DNA, 17 bp, Arabidopsis thaliana
atcgatcaaggtaacct

SEQ ID NO: 52422 - DNA, 17 bp, Arabidopsis thaliana
atcgatcaaggtattgc

SEQ ID NO: 52423 - DNA, 17 bp, Arabidopsis thaliana
atcgatcacagatttgt

SEQ ID NO: 52424 - DNA, 17 bp, Arabidopsis thaliana
atcgatcaccatggacc

SEQ ID NO: 52425 - DNA, 17 bp, Arabidopsis thaliana
atcgatcaccggaagcc

SEQ ID NO: 52426 - DNA, 17 bp, Arabidopsis thaliana
atcgatcacttttggct

SEQ ID NO: 52427 - DNA, 17 bp, Arabidopsis thaliana
atcgatcagatgttgac

SEQ ID NO: 52428 - DNA, 17 bp, Arabidopsis thaliana
atcgatcagatgttggc

SEQ ID NO: 52429 - DNA, 17 bp, Arabidopsis thaliana
atcgatcagatgtttac

SEQ ID NO: 52430 - DNA, 17 bp, Arabidopsis thaliana
atcgatcaggacaaagt

SEQ ID NO: 52431 - DNA, 17 bp, Arabidopsis thaliana
atcgatcagtcgctgct

SEQ ID NO: 52432 - DNA, 17 bp, Arabidopsis thaliana
atcgatcagtcgctggt

SEQ ID NO: 52433 - DNA, 17 bp, Arabidopsis thaliana
atcgatcagtctatcca

SEQ ID NO: 52434 - DNA, 17 bp, Arabidopsis thaliana
atcgatccaaagccgtc

SEQ ID NO: 52435 - DNA, 17 bp, Arabidopsis thaliana
atcgatccaaatccgtc

SEQ ID NO: 52436 - DNA, 17 bp, Arabidopsis thaliana
atcgatccacgactctg

SEQ ID NO: 52437 - DNA, 17 bp, Arabidopsis thaliana
atcgatccatagttgag

SEQ ID NO: 52438 - DNA, 17 bp, Arabidopsis thaliana
atcgatcccaggttttt

SEQ ID NO: 52439 - DNA, 17 bp, Arabidopsis thaliana
atcgatccgcggtgtag

SEQ ID NO: 52440 - DNA, 17 bp, Arabidopsis thaliana
atcgatcctccacacct

SEQ ID NO: 52441 - DNA, 17 bp, Arabidopsis thaliana
atcgatcctccatttgg

SEQ ID NO: 52442 - DNA, 17 bp, Arabidopsis thaliana
atcgatccttcatacct

SEQ ID NO: 52443 - DNA, 17 bp, Arabidopsis thaliana
atcgatccttggcaaag

SEQ ID NO: 52444 - DNA, 17 bp, Arabidopsis thaliana
atcgatcctttagacct

SEQ ID NO: 52445 - DNA, 17 bp, Arabidopsis thaliana
atcgatcgaaaccgccg

SEQ ID NO: 52446 - DNA, 17 bp, Arabidopsis thaliana
atcgatcgattgtagcc

SEQ ID NO: 52447 - DNA, 17 bp, Arabidopsis thaliana
atcgatcggatgttgac

SEQ ID NO: 52448 - DNA, 17 bp, Arabidopsis thaliana
atcgatcggcaacgtaa

SEQ ID NO: 52449 - DNA, 17 bp, Arabidopsis thaliana
atcgatcggctcatatt

SEQ ID NO: 52450 - DNA, 17 bp, Arabidopsis thaliana
atcgatctaccaatcta

SEQ ID NO: 52451 - DNA, 17 bp, Arabidopsis thaliana
atcgatctaccaatctg

SEQ ID NO: 52452 - DNA, 17 bp, Arabidopsis thaliana
atcgatcttagattttg

SEQ ID NO: 52453 - DNA, 17 bp, Arabidopsis thaliana
atcgatctttagtttgt

SEQ ID NO: 52454 - DNA, 17 bp, Arabidopsis thaliana
atcgatgacgtgacact

SEQ ID NO: 52455 - DNA, 17 bp, Arabidopsis thaliana
atcgatgaggtggtccc

SEQ ID NO: 52456 - DNA, 17 bp, Arabidopsis thaliana
atcgatgcgaaccacac

SEQ ID NO: 52457 - DNA, 17 bp, Arabidopsis thaliana
atcgatggagttcgatt

SEQ ID NO: 52458 - DNA, 17 bp, Arabidopsis thaliana
atcgatggcgacgatag

SEQ ID NO: 52459 - DNA, 17 bp, Arabidopsis thaliana
atcgatggtaccgattc

SEQ ID NO: 52460 - DNA, 17 bp, Arabidopsis thaliana
atcgatggtgtctgagc

SEQ ID NO: 52461 - DNA, 17 bp, Arabidopsis thaliana
atcgatgtaggttgctg

SEQ ID NO: 52462 - DNA, 17 bp, Arabidopsis thaliana
atcgatgtcagattaga

SEQ ID NO: 52463 - DNA, 17 bp, Arabidopsis thaliana
atcgatgtccatgtttt

SEQ ID NO: 52464 - DNA, 17 bp, Arabidopsis thaliana
atcgatgtcccagggat

SEQ ID NO: 52465 - DNA, 17 bp, Arabidopsis thaliana
atcgatgtgtggtaatg

SEQ ID NO: 52466 - DNA, 17 bp, Arabidopsis thaliana
atcgatgttacatcgct

SEQ ID NO: 52467 - DNA, 17 bp, Arabidopsis thaliana
atcgattaaaattcgct

SEQ ID NO: 52468 - DNA, 17 bp, Arabidopsis thaliana
atcgattaaactcaaac

SEQ ID NO: 52469 - DNA, 17 bp, Arabidopsis thaliana
atcgattaagcacgcta

SEQ ID NO: 52470 - DNA, 17 bp, Arabidopsis thaliana
atcgattactggatttg

SEQ ID NO: 52471 - DNA, 17 bp, Arabidopsis thaliana
atcgattagaccgctga

SEQ ID NO: 52472 - DNA, 17 bp, Arabidopsis thaliana
atcgattagtcggttca

SEQ ID NO: 52473 - DNA, 17 bp, Arabidopsis thaliana
atcgattagtgtggggc

SEQ ID NO: 52474 - DNA, 17 bp, Arabidopsis thaliana
atcgattatggcagcgg

SEQ ID NO: 52475 - DNA, 17 bp, Arabidopsis thaliana
atcgattatggcgacgg

SEQ ID NO: 52476 - DNA, 17 bp, Arabidopsis thaliana
atcgattatggcggcgg

SEQ ID NO: 52477 - DNA, 17 bp, Arabidopsis thaliana
atcgattattgcggcgg

SEQ ID NO: 52478 - DNA, 17 bp, Arabidopsis thaliana
atcgattcaacattgtc

SEQ ID NO: 52479 - DNA, 17 bp, Arabidopsis thaliana
atcgattccattcttgt

SEQ ID NO: 52480 - DNA, 17 bp, Arabidopsis thaliana
atcgattccctatggaa

SEQ ID NO: 52481 - DNA, 17 bp, Arabidopsis thaliana
atcgattcgccggtaaa

SEQ ID NO: 52482 - DNA, 17 bp, Arabidopsis thaliana
atcgattcggggcgtgg

SEQ ID NO: 52483 - DNA, 17 bp, Arabidopsis thaliana
atcgattcgggtcgtgg

SEQ ID NO: 52484 - DNA, 17 bp, Arabidopsis thaliana
atcgattcgtgcctatc

SEQ ID NO: 52485 - DNA, 17 bp, Arabidopsis thaliana
atcgattctctctcgcc

SEQ ID NO: 52486 - DNA, 17 bp, Arabidopsis thaliana
atcgattgaatcagatc

SEQ ID NO: 52487 - DNA, 17 bp, Arabidopsis thaliana
atcgattgatagatccc

SEQ ID NO: 52488 - DNA, 17 bp, Arabidopsis thaliana
atcgattgcaagggtgt

SEQ ID NO: 52489 - DNA, 17 bp, Arabidopsis thaliana
atcgattgggagataag

SEQ ID NO: 52490 - DNA, 17 bp, Arabidopsis thaliana
atcgattggggctgctt

SEQ ID NO: 52491 - DNA, 17 bp, Arabidopsis thaliana
atcgattggttaacgca

SEQ ID NO: 52492 - DNA, 17 bp, Arabidopsis thaliana
atcgattgtaccaggct

SEQ ID NO: 52493 - DNA, 17 bp, Arabidopsis thaliana
atcgattgtcacacggt

SEQ ID NO: 52494 - DNA, 17 bp, Arabidopsis thaliana
atcgattgtcacagttt

SEQ ID NO: 52495 - DNA, 17 bp, Arabidopsis thaliana
atcgattgtcatgtcat

SEQ ID NO: 52496 - DNA, 17 bp, Arabidopsis thaliana
atcgattgtgtgagagt

SEQ ID NO: 52497 - DNA, 17 bp, Arabidopsis thaliana
atcgatttaatcccgtc

SEQ ID NO: 52498 - DNA, 17 bp, Arabidopsis thaliana
atcgatttatctctctc

SEQ ID NO: 52499 - DNA, 17 bp, Arabidopsis thaliana
atcgatttatctgacta

SEQ ID NO: 52500 - DNA, 17 bp, Arabidopsis thaliana
atcgatttgacgtcgag

SEQ ID NO: 52501 - DNA, 17 bp, Arabidopsis thaliana
atcgatttgaggtttag

SEQ ID NO: 52502 - DNA, 17 bp, Arabidopsis thaliana
atcgatttggccgcgtc

SEQ ID NO: 52503 - DNA, 17 bp, Arabidopsis thaliana
atcgatttggccgtgtc

SEQ ID NO: 52504 - DNA, 17 bp, Arabidopsis thaliana
atcgatttggcctggtc

SEQ ID NO: 52505 - DNA, 17 bp, Arabidopsis thaliana
atcgatttggttggtag

SEQ ID NO: 52506 - DNA, 17 bp, Arabidopsis thaliana
atcgattttctgatggg

SEQ ID NO: 52507 - DNA, 17 bp, Arabidopsis thaliana
atcgattttgatcgctt

SEQ ID NO: 52508 - DNA, 17 bp, Arabidopsis thaliana
atcgattttgttgcctt

SEQ ID NO: 52509 - DNA, 17 bp, Arabidopsis thaliana
atcgatttttaaccggt

SEQ ID NO: 52510 - DNA, 17 bp, Arabidopsis thaliana
atcgatttttctttcag

SEQ ID NO: 52511 - DNA, 17 bp, Arabidopsis thaliana
atcgatttttgagtcat

SEQ ID NO: 52512 - DNA, 17 bp, Arabidopsis thaliana
atcgatttttgccttgt

SEQ ID NO: 52513 - DNA, 17 bp, Arabidopsis thaliana
atcgattttttctgtgg

SEQ ID NO: 52514 - DNA, 17 bp, Arabidopsis thaliana
atcgcaaaatcatgttt

SEQ ID NO: 52515 - DNA, 17 bp, Arabidopsis thaliana
atcgcaaagtttcggtt

SEQ ID NO: 52516 - DNA, 17 bp, Arabidopsis thaliana
atcgcaaattttgtcgt

SEQ ID NO: 52517 - DNA, 17 bp, Arabidopsis thaliana
atcgcaacagtgctgta

SEQ ID NO: 52518 - DNA, 17 bp, Arabidopsis thaliana
atcgcaaccgctggttt

SEQ ID NO: 52519 - DNA, 17 bp, Arabidopsis thaliana
atcgcaacctggctctg

SEQ ID NO: 52520 - DNA, 17 bp, Arabidopsis thaliana
atcgcaacttagccata

SEQ ID NO: 52521 - DNA, 17 bp, Arabidopsis thaliana
atcgcaagctgttctga

SEQ ID NO: 52522 - DNA, 17 bp, Arabidopsis thaliana
atcgcaagtagttcctg

SEQ ID NO: 52523 - DNA, 17 bp, Arabidopsis thaliana
atcgcaagtccaactcc

SEQ ID NO: 52524 - DNA, 17 bp, Arabidopsis thaliana
atcgcaagttggttgga

SEQ ID NO: 52525 - DNA, 17 bp, Arabidopsis thaliana
atcgcaagtttttgcaa

SEQ ID NO: 52526 - DNA, 17 bp, Arabidopsis thaliana
atcgcaagtttttgcca

SEQ ID NO: 52527 - DNA, 17 bp, Arabidopsis thaliana
atcgcaatagttgcttc

SEQ ID NO: 52528 - DNA, 17 bp, Arabidopsis thaliana
atcgcaatggctatgga

SEQ ID NO: 52529 - DNA, 17 bp, Arabidopsis thaliana
atcgcacaccgggaggc

SEQ ID NO: 52530 - DNA, 17 bp, Arabidopsis thaliana
atcgcacaccgggagtc

SEQ ID NO: 52531 - DNA, 17 bp, Arabidopsis thaliana
atcgcacacgcgggagt

SEQ ID NO: 52532 - DNA, 17 bp, Arabidopsis thaliana
atcgcacccgatagttt

SEQ ID NO: 52533 - DNA, 17 bp, Arabidopsis thaliana
atcgcacccgccggccc

SEQ ID NO: 52534 - DNA, 17 bp, Arabidopsis thaliana
atcgcacccgccggtct

SEQ ID NO: 52535 - DNA, 17 bp, Arabidopsis thaliana
atcgcacccgctggccc

SEQ ID NO: 52536 - DNA, 17 bp, Arabidopsis thaliana
atcgcacccgctggtct

SEQ ID NO: 52537 - DNA, 17 bp, Arabidopsis thaliana
atcgcacccgctggtgt

SEQ ID NO: 52538 - DNA, 17 bp, Arabidopsis thaliana
atcgcacccgctggtta

SEQ ID NO: 52539 - DNA, 17 bp, Arabidopsis thaliana
atcgcacccgctggttc

SEQ ID NO: 52540 - DNA, 17 bp, Arabidopsis thaliana
atcgcacccgctggttt

SEQ ID NO: 52541 - DNA, 17 bp, Arabidopsis thaliana
atcgcacccgttggttt

SEQ ID NO: 52542 - DNA, 17 bp, Arabidopsis thaliana
atcgcaccgcacttctc

SEQ ID NO: 52543 - DNA, 17 bp, Arabidopsis thaliana
atcgcaccggctggttt

SEQ ID NO: 52544 - DNA, 17 bp, Arabidopsis thaliana
atcgcacctcctgagca

SEQ ID NO: 52545 - DNA, 17 bp, Arabidopsis thaliana
atcgcacctgctggttt

SEQ ID NO: 52546 - DNA, 17 bp, Arabidopsis thaliana
atcgcacgatgtcaaca

SEQ ID NO: 52547 - DNA, 17 bp, Arabidopsis thaliana
atcgcacggaccttgca

SEQ ID NO: 52548 - DNA, 17 bp, Arabidopsis thaliana
atcgcacgtcatcattc

SEQ ID NO: 52549 - DNA, 17 bp, Arabidopsis thaliana
atcgcacgtctgcctgg

SEQ ID NO: 52550 - DNA, 17 bp, Arabidopsis thaliana
atcgcacgtttccattc

SEQ ID NO: 52551 - DNA, 17 bp, Arabidopsis thaliana
atcgcacgtttggcgtt

SEQ ID NO: 52552 - DNA, 17 bp, Arabidopsis thaliana
atcgcactactcaatcc

SEQ ID NO: 52553 - DNA, 17 bp, Arabidopsis thaliana
atcgcactgaaccgctt

SEQ ID NO: 52554 - DNA, 17 bp, Arabidopsis thaliana
atcgcactgtagatgga

SEQ ID NO: 52555 - DNA, 17 bp, Arabidopsis thaliana
atcgcacttgagtgaat

SEQ ID NO: 52556 - DNA, 17 bp, Arabidopsis thaliana
atcgcagaaacccgatt

SEQ ID NO: 52557 - DNA, 17 bp, Arabidopsis thaliana
atcgcagaagcaggact

SEQ ID NO: 52558 - DNA, 17 bp, Arabidopsis thaliana
atcgcagacatggattc

SEQ ID NO: 52559 - DNA, 17 bp, Arabidopsis thaliana
atcgcagagatatttga

SEQ ID NO: 52560 - DNA, 17 bp, Arabidopsis thaliana
atcgcagagctcatctc

SEQ ID NO: 52561 - DNA, 17 bp, Arabidopsis thaliana
atcgcagatctcaagct

SEQ ID NO: 52562 - DNA, 17 bp, Arabidopsis thaliana
atcgcagatggcatgcc

SEQ ID NO: 52563 - DNA, 17 bp, Arabidopsis thaliana
atcgcagattttgtgag

SEQ ID NO: 52564 - DNA, 17 bp, Arabidopsis thaliana
atcgcagcctgtagatg

SEQ ID NO: 52565 - DNA, 17 bp, Arabidopsis thaliana
atcgcagcgactatcac

SEQ ID NO: 52566 - DNA, 17 bp, Arabidopsis thaliana
atcgcagcgactcaacc

SEQ ID NO: 52567 - DNA, 17 bp, Arabidopsis thaliana
atcgcagcgactcaacg

SEQ ID NO: 52568 - DNA, 17 bp, Arabidopsis thaliana
atcgcagcgactcaccc

SEQ ID NO: 52569 - DNA, 17 bp, Arabidopsis thaliana
atcgcagcgactgtcgc

SEQ ID NO: 52570 - DNA, 17 bp, Arabidopsis thaliana
atcgcagctcgctatct

SEQ ID NO: 52571 - DNA, 17 bp, Arabidopsis thaliana
atcgcagcttagacaga

SEQ ID NO: 52572 - DNA, 17 bp, Arabidopsis thaliana
atcgcaggggtaatttt

SEQ ID NO: 52573 - DNA, 17 bp, Arabidopsis thaliana
atcgcaggtagctgacg

SEQ ID NO: 52574 - DNA, 17 bp, Arabidopsis thaliana
atcgcaggtaggctcat

SEQ ID NO: 52575 - DNA, 17 bp, Arabidopsis thaliana
atcgcaggtcgctatat

SEQ ID NO: 52576 - DNA, 17 bp, Arabidopsis thaliana
atcgcagtaacttcgag

SEQ ID NO: 52577 - DNA, 17 bp, Arabidopsis thaliana
atcgcagtagctgggat

SEQ ID NO: 52578 - DNA, 17 bp, Arabidopsis thaliana
atcgcagtcaaggcagc

SEQ ID NO: 52579 - DNA, 17 bp, Arabidopsis thaliana
atcgcagtcgctatgtc

SEQ ID NO: 52580 - DNA, 17 bp, Arabidopsis thaliana
atcgcagtgatgtatgc

SEQ ID NO: 52581 - DNA, 17 bp, Arabidopsis thaliana
atcgcatcctgtagagg

SEQ ID NO: 52582 - DNA, 17 bp, Arabidopsis thaliana
atcgcatgattcaatga

SEQ ID NO: 52583 - DNA, 17 bp, Arabidopsis thaliana
atcgcatggcctctgtg

SEQ ID NO: 52584 - DNA, 17 bp, Arabidopsis thaliana
atcgcatgtgtcgggac

SEQ ID NO: 52585 - DNA, 17 bp, Arabidopsis thaliana
atcgcattccgctatga

SEQ ID NO: 52586 - DNA, 17 bp, Arabidopsis thaliana
atcgcattcctgtagat

SEQ ID NO: 52587 - DNA, 17 bp, Arabidopsis thaliana
atcgcattgttccttct

SEQ ID NO: 52588 - DNA, 17 bp, Arabidopsis thaliana
atcgcatttcatccgca

SEQ ID NO: 52589 - DNA, 17 bp, Arabidopsis thaliana
atcgcatttcgctacgt

SEQ ID NO: 52590 - DNA, 17 bp, Arabidopsis thaliana
atcgcatttcgctatga

SEQ ID NO: 52591 - DNA, 17 bp, Arabidopsis thaliana
atcgccaaagtaatcgc

SEQ ID NO: 52592 - DNA, 17 bp, Arabidopsis thaliana
atcgccaaatattccgg

SEQ ID NO: 52593 - DNA, 17 bp, Arabidopsis thaliana
atcgccaaatccgacaa

SEQ ID NO: 52594 - DNA, 17 bp, Arabidopsis thaliana
atcgccaaatccgacga

SEQ ID NO: 52595 - DNA, 17 bp, Arabidopsis thaliana
atcgccaacagagatca

SEQ ID NO: 52596 - DNA, 17 bp, Arabidopsis thaliana
atcgccaacgaatttcc

SEQ ID NO: 52597 - DNA, 17 bp, Arabidopsis thaliana
atcgccaagatcagagt

SEQ ID NO: 52598 - DNA, 17 bp, Arabidopsis thaliana
atcgccaattactgtcg

SEQ ID NO: 52599 - DNA, 17 bp, Arabidopsis thaliana
atcgccactaagcttga

SEQ ID NO: 52600 - DNA, 17 bp, Arabidopsis thaliana
atcgccacttagtgcga

SEQ ID NO: 52601 - DNA, 17 bp, Arabidopsis thaliana
atcgccagatccgatga

SEQ ID NO: 52602 - DNA, 17 bp, Arabidopsis thaliana
atcgccagttccgacgt

SEQ ID NO: 52603 - DNA, 17 bp, Arabidopsis thaliana
atcgccagttttcaaaa

SEQ ID NO: 52604 - DNA, 17 bp, Arabidopsis thaliana
atcgccatccacaagct

SEQ ID NO: 52605 - DNA, 17 bp, Arabidopsis thaliana
atcgccatcgcagtcgt

SEQ ID NO: 52606 - DNA, 17 bp, Arabidopsis thaliana
atcgccatcgcctgttg

SEQ ID NO: 52607 - DNA, 17 bp, Arabidopsis thaliana
atcgccatctttgtgat

SEQ ID NO: 52608 - DNA, 17 bp, Arabidopsis thaliana
atcgccattttcacgac

SEQ ID NO: 52609 - DNA, 17 bp, Arabidopsis thaliana
atcgcccacaagcaagg

SEQ ID NO: 52610 - DNA, 17 bp, Arabidopsis thaliana
atcgcccagacactttt

SEQ ID NO: 52611 - DNA, 17 bp, Arabidopsis thaliana
atcgcccagaggagagc

SEQ ID NO: 52612 - DNA, 17 bp, Arabidopsis thaliana
atcgcccagccgacttc

SEQ ID NO: 52613 - DNA, 17 bp, Arabidopsis thaliana
atcgcccatatcttcct

SEQ ID NO: 52614 - DNA, 17 bp, Arabidopsis thaliana
atcgcccatctcaagct

SEQ ID NO: 52615 - DNA, 17 bp, Arabidopsis thaliana
atcgcccattcatcgtc

SEQ ID NO: 52616 - DNA, 17 bp, Arabidopsis thaliana
atcgcccgagacacctg

SEQ ID NO: 52617 - DNA, 17 bp, Arabidopsis thaliana
atcgcccgtggtcgagg

SEQ ID NO: 52618 - DNA, 17 bp, Arabidopsis thaliana
atcgcccgttgctctga

SEQ ID NO: 52619 - DNA, 17 bp, Arabidopsis thaliana
atcgccgacgaatttcc

SEQ ID NO: 52620 - DNA, 17 bp, Arabidopsis thaliana
atcgccgacgacatcag

SEQ ID NO: 52621 - DNA, 17 bp, Arabidopsis thaliana
atcgccgacgggagcag

SEQ ID NO: 52622 - DNA, 17 bp, Arabidopsis thaliana
atcgccgagggcacgtc

SEQ ID NO: 52623 - DNA, 17 bp, Arabidopsis thaliana
atcgccgccgatgactc

SEQ ID NO: 52624 - DNA, 17 bp, Arabidopsis thaliana
atcgccgcggccgtaaa

SEQ ID NO: 52625 - DNA, 17 bp, Arabidopsis thaliana
atcgccgctcttttgta

SEQ ID NO: 52626 - DNA, 17 bp, Arabidopsis thaliana
atcgccgcttaggccat

SEQ ID NO: 52627 - DNA, 17 bp, Arabidopsis thaliana
atcgccgcttttactct

SEQ ID NO: 52628 - DNA, 17 bp, Arabidopsis thaliana
atcgccggacaaccacc

SEQ ID NO: 52629 - DNA, 17 bp, Arabidopsis thaliana
atcgccggagatcgact

SEQ ID NO: 52630 - DNA, 17 bp, Arabidopsis thaliana
atcgccggagtctgatc

SEQ ID NO: 52631 - DNA, 17 bp, Arabidopsis thaliana
atcgccggagtgtaaca

SEQ ID NO: 52632 - DNA, 17 bp, Arabidopsis thaliana
atcgccggatccatcaa

SEQ ID NO: 52633 - DNA, 17 bp, Arabidopsis thaliana
atcgccggatccatcat

SEQ ID NO: 52634 - DNA, 17 bp, Arabidopsis thaliana
atcgccggatctctctc

SEQ ID NO: 52635 - DNA, 17 bp, Arabidopsis thaliana
atcgccggatttatgtc

SEQ ID NO: 52636 - DNA, 17 bp, Arabidopsis thaliana
atcgccggctttgtaat

SEQ ID NO: 52637 - DNA, 17 bp, Arabidopsis thaliana
atcgccggtcagccata

SEQ ID NO: 52638 - DNA, 17 bp, Arabidopsis thaliana
atcgccggtgaaatcac

SEQ ID NO: 52639 - DNA, 17 bp, Arabidopsis thaliana
atcgccggttcgagtga

SEQ ID NO: 52640 - DNA, 17 bp, Arabidopsis thaliana
atcgccggttcggggtt

SEQ ID NO: 52641 - DNA, 17 bp, Arabidopsis thaliana
atcgccgtatcgtcgca

SEQ ID NO: 52642 - DNA, 17 bp, Arabidopsis thaliana
atcgccgtccaaagagc

SEQ ID NO: 52643 - DNA, 17 bp, Arabidopsis thaliana
atcgccgtctgcgttta

SEQ ID NO: 52644 - DNA, 17 bp, Arabidopsis thaliana
atcgccgtgatcgatga

SEQ ID NO: 52645 - DNA, 17 bp, Arabidopsis thaliana
atcgccgttcgcttagc

SEQ ID NO: 52646 - DNA, 17 bp, Arabidopsis thaliana
atcgccgtttgttcgcc

SEQ ID NO: 52647 - DNA, 17 bp, Arabidopsis thaliana
atcgcctaacgcttcct

SEQ ID NO: 52648 - DNA, 17 bp, Arabidopsis thaliana
atcgcctaagatttttc

SEQ ID NO: 52649 - DNA, 17 bp, Arabidopsis thaliana
atcgcctaagatttttg

SEQ ID NO: 52650 - DNA, 17 bp, Arabidopsis thaliana
atcgcctacaatgggtg

SEQ ID NO: 52651 - DNA, 17 bp, Arabidopsis thaliana
atcgcctacagttttta

SEQ ID NO: 52652 - DNA, 17 bp, Arabidopsis thaliana
atcgcctagagaagagc

SEQ ID NO: 52653 - DNA, 17 bp, Arabidopsis thaliana
atcgcctatgtggatag

SEQ ID NO: 52654 - DNA, 17 bp, Arabidopsis thaliana
atcgcctattgcccaaa

SEQ ID NO: 52655 - DNA, 17 bp, Arabidopsis thaliana
atcgcctattgcccaca

SEQ ID NO: 52656 - DNA, 17 bp, Arabidopsis thaliana
atcgcctattgcctaaa

SEQ ID NO: 52657 - DNA, 17 bp, Arabidopsis thaliana
atcgcctcattcttctt

SEQ ID NO: 52658 - DNA, 17 bp, Arabidopsis thaliana
atcgcctcattcttgtt

SEQ ID NO: 52659 - DNA, 17 bp, Arabidopsis thaliana
atcgcctcgggagacag

SEQ ID NO: 52660 - DNA, 17 bp, Arabidopsis thaliana
atcgcctcggtatggat

SEQ ID NO: 52661 - DNA, 17 bp, Arabidopsis thaliana
atcgcctcggtgtggat

SEQ ID NO: 52662 - DNA, 17 bp, Arabidopsis thaliana
atcgcctctcctcaact

SEQ ID NO: 52663 - DNA, 17 bp, Arabidopsis thaliana
atcgcctgaaacattat

SEQ ID NO: 52664 - DNA, 17 bp, Arabidopsis thaliana
atcgcctggttcaagct

SEQ ID NO: 52665 - DNA, 17 bp, Arabidopsis thaliana
atcgcctgttcgagtga

SEQ ID NO: 52666 - DNA, 17 bp, Arabidopsis thaliana
atcgccttcttcaatat

SEQ ID NO: 52667 - DNA, 17 bp, Arabidopsis thaliana
atcgccttggccgagtg

SEQ ID NO: 52668 - DNA, 17 bp, Arabidopsis thaliana
atcgcctttgatgtatc

SEQ ID NO: 52669 - DNA, 17 bp, Arabidopsis thaliana
atcgcgaaaagactctg

SEQ ID NO: 52670 - DNA, 17 bp, Arabidopsis thaliana
atcgcgacagaagccgg

SEQ ID NO: 52671 - DNA, 17 bp, Arabidopsis thaliana
atcgcgaccttcaatcc

SEQ ID NO: 52672 - DNA, 17 bp, Arabidopsis thaliana
atcgcgagagatcccgg

SEQ ID NO: 52673 - DNA, 17 bp, Arabidopsis thaliana
atcgcgagagttttatg

SEQ ID NO: 52674 - DNA, 17 bp, Arabidopsis thaliana
atcgcgatacgggttgt

SEQ ID NO: 52675 - DNA, 17 bp, Arabidopsis thaliana
atcgcggcgacgtgggt

SEQ ID NO: 52676 - DNA, 17 bp, Arabidopsis thaliana
atcgcggctgaaacact

SEQ ID NO: 52677 - DNA, 17 bp, Arabidopsis thaliana
atcgcggcttcatccat

SEQ ID NO: 52678 - DNA, 17 bp, Arabidopsis thaliana
atcgcggctttggacgt

SEQ ID NO: 52679 - DNA, 17 bp, Arabidopsis thaliana
atcgcgggtgcaccgcc

SEQ ID NO: 52680 - DNA, 17 bp, Arabidopsis thaliana
atcgcgggttaaaatat

SEQ ID NO: 52681 - DNA, 17 bp, Arabidopsis thaliana
atcgcgggttaaccggt

SEQ ID NO: 52682 - DNA, 17 bp, Arabidopsis thaliana
atcgcgggttgagtatt

SEQ ID NO: 52683 - DNA, 17 bp, Arabidopsis thaliana
atcgcgggttgcttgct

SEQ ID NO: 52684 - DNA, 17 bp, Arabidopsis thaliana
atcgcgggttggttgct

SEQ ID NO: 52685 - DNA, 17 bp, Arabidopsis thaliana
atcgcggtctgcagcac

SEQ ID NO: 52686 - DNA, 17 bp, Arabidopsis thaliana
atcgcgtaacggctgaa

SEQ ID NO: 52687 - DNA, 17 bp, Arabidopsis thaliana
atcgcgtccatttgggt

SEQ ID NO: 52688 - DNA, 17 bp, Arabidopsis thaliana
atcgcgtcttgcatcct

SEQ ID NO: 52689 - DNA, 17 bp, Arabidopsis thaliana
atcgcgtctttatgcca

SEQ ID NO: 52690 - DNA, 17 bp, Arabidopsis thaliana
atcgcgtctttgacatc

SEQ ID NO: 52691 - DNA, 17 bp, Arabidopsis thaliana
atcgcgtgctaaagacg

SEQ ID NO: 52692 - DNA, 17 bp, Arabidopsis thaliana
atcgcgtggacaacttc

SEQ ID NO: 52693 - DNA, 17 bp, Arabidopsis thaliana
atcgcgttacggctgag

SEQ ID NO: 52694 - DNA, 17 bp, Arabidopsis thaliana
atcgcgtttagcagata

SEQ ID NO: 52695 - DNA, 17 bp, Arabidopsis thaliana
atcgctaacaaccgcta

SEQ ID NO: 52696 - DNA, 17 bp, Arabidopsis thaliana
atcgctaacaaccgtta

SEQ ID NO: 52697 - DNA, 17 bp, Arabidopsis thaliana
atcgctaacagatccga

SEQ ID NO: 52698 - DNA, 17 bp, Arabidopsis thaliana
atcgctaacgaccgtaa

SEQ ID NO: 52699 - DNA, 17 bp, Arabidopsis thaliana
atcgctaacgaccgtac

SEQ ID NO: 52700 - DNA, 17 bp, Arabidopsis thaliana
atcgctaacgaccgtag

SEQ ID NO: 52701 - DNA, 17 bp, Arabidopsis thaliana
atcgctaacgactaatg

SEQ ID NO: 52702 - DNA, 17 bp, Arabidopsis thaliana
atcgctaacgactattg

SEQ ID NO: 52703 - DNA, 17 bp, Arabidopsis thaliana
atcgctaagcgcttgtt

SEQ ID NO: 52704 - DNA, 17 bp, Arabidopsis thaliana
atcgctaaggtcaactc

SEQ ID NO: 52705 - DNA, 17 bp, Arabidopsis thaliana
atcgctaagtcagctac

SEQ ID NO: 52706 - DNA, 17 bp, Arabidopsis thaliana
atcgctaagtccatcat

SEQ ID NO: 52707 - DNA, 17 bp, Arabidopsis thaliana
atcgctaagttgttcgt

SEQ ID NO: 52708 - DNA, 17 bp, Arabidopsis thaliana
atcgctaataattgtcg

SEQ ID NO: 52709 - DNA, 17 bp, Arabidopsis thaliana
atcgctaattactgtcg

SEQ ID NO: 52710 - DNA, 17 bp, Arabidopsis thaliana
atcgctacaaagatcaa

SEQ ID NO: 52711 - DNA, 17 bp, Arabidopsis thaliana
atcgctacaaagatcag

SEQ ID NO: 52712 - DNA, 17 bp, Arabidopsis thaliana
atcgctacacgggaaag

SEQ ID NO: 52713 - DNA, 17 bp, Arabidopsis thaliana
atcgctacacgggaggg

SEQ ID NO: 52714 - DNA, 17 bp, Arabidopsis thaliana
atcgctacagagatcag

SEQ ID NO: 52715 - DNA, 17 bp, Arabidopsis thaliana
atcgctacatagcgggt

SEQ ID NO: 52716 - DNA, 17 bp, Arabidopsis thaliana
atcgctacatcgatgtt

SEQ ID NO: 52717 - DNA, 17 bp, Arabidopsis thaliana
atcgctacgcagatttt

SEQ ID NO: 52718 - DNA, 17 bp, Arabidopsis thaliana
atcgctacgtaatgtct

SEQ ID NO: 52719 - DNA, 17 bp, Arabidopsis thaliana
atcgctacgtctcgccg

SEQ ID NO: 52720 - DNA, 17 bp, Arabidopsis thaliana
atcgctactaagtgagg

SEQ ID NO: 52721 - DNA, 17 bp, Arabidopsis thaliana
atcgctagcacgactta

SEQ ID NO: 52722 - DNA, 17 bp, Arabidopsis thaliana
atcgctaggcgctatct

SEQ ID NO: 52723 - DNA, 17 bp, Arabidopsis thaliana
atcgctagtaatcgccc

SEQ ID NO: 52724 - DNA, 17 bp, Arabidopsis thaliana
atcgctagtaatcgccg

SEQ ID NO: 52725 - DNA, 17 bp, Arabidopsis thaliana
atcgctatagctgccag

SEQ ID NO: 52726 - DNA, 17 bp, Arabidopsis thaliana
atcgctatagtatccgc

SEQ ID NO: 52727 - DNA, 17 bp, Arabidopsis thaliana
atcgctatctgcatccc

SEQ ID NO: 52728 - DNA, 17 bp, Arabidopsis thaliana
atcgctatctgtacacc

SEQ ID NO: 52729 - DNA, 17 bp, Arabidopsis thaliana
atcgctatctgtatatc

SEQ ID NO: 52730 - DNA, 17 bp, Arabidopsis thaliana
atcgctatgcctggtgt

SEQ ID NO: 52731 - DNA, 17 bp, Arabidopsis thaliana
atcgctatgtggtgctt

SEQ ID NO: 52732 - DNA, 17 bp, Arabidopsis thaliana
atcgctattaccgaggg

SEQ ID NO: 52733 - DNA, 17 bp, Arabidopsis thaliana
atcgctattcctattga

SEQ ID NO: 52734 - DNA, 17 bp, Arabidopsis thaliana
atcgctatttgcccgct

SEQ ID NO: 52735 - DNA, 17 bp, Arabidopsis thaliana
atcgctatttttggtcg

SEQ ID NO: 52736 - DNA, 17 bp, Arabidopsis thaliana
atcgctcaaacccgtcc

SEQ ID NO: 52737 - DNA, 17 bp, Arabidopsis thaliana
atcgctcaaggcttttg

SEQ ID NO: 52738 - DNA, 17 bp, Arabidopsis thaliana
atcgctcagataagctc

SEQ ID NO: 52739 - DNA, 17 bp, Arabidopsis thaliana
atcgctcaggctttacg

SEQ ID NO: 52740 - DNA, 17 bp, Arabidopsis thaliana
atcgctcagtcaagatc

SEQ ID NO: 52741 - DNA, 17 bp, Arabidopsis thaliana
atcgctcccatccgctc

SEQ ID NO: 52742 - DNA, 17 bp, Arabidopsis thaliana
atcgctcgactctttcg

SEQ ID NO: 52743 - DNA, 17 bp, Arabidopsis thaliana
atcgctcgataatccat

SEQ ID NO: 52744 - DNA, 17 bp, Arabidopsis thaliana
atcgctcgattggtttt

SEQ ID NO: 52745 - DNA, 17 bp, Arabidopsis thaliana
atcgctcgggaattcgt

SEQ ID NO: 52746 - DNA, 17 bp, Arabidopsis thaliana
atcgctcgggaatttgc

SEQ ID NO: 52747 - DNA, 17 bp, Arabidopsis thaliana
atcgctcgggctttgcg

SEQ ID NO: 52748 - DNA, 17 bp, Arabidopsis thaliana
atcgctctatcaccggt

SEQ ID NO: 52749 - DNA, 17 bp, Arabidopsis thaliana
atcgctctgaggcacta

SEQ ID NO: 52750 - DNA, 17 bp, Arabidopsis thaliana
atcgctctgtaactcct

SEQ ID NO: 52751 - DNA, 17 bp, Arabidopsis thaliana
atcgctctgtcaccaat

SEQ ID NO: 52752 - DNA, 17 bp, Arabidopsis thaliana
atcgctctgttgctgat

SEQ ID NO: 52753 - DNA, 17 bp, Arabidopsis thaliana
atcgctctgttgctggt

SEQ ID NO: 52754 - DNA, 17 bp, Arabidopsis thaliana
atcgctctttttctcac

SEQ ID NO: 52755 - DNA, 17 bp, Arabidopsis thaliana
atcgctgaaaccagcga

SEQ ID NO: 52756 - DNA, 17 bp, Arabidopsis thaliana
atcgctgaaaccaggga

SEQ ID NO: 52757 - DNA, 17 bp, Arabidopsis thaliana
atcgctgagctgtcgac

SEQ ID NO: 52758 - DNA, 17 bp, Arabidopsis thaliana
atcgctgatacgtctcg

SEQ ID NO: 52759 - DNA, 17 bp, Arabidopsis thaliana
atcgctgatcttgcgat

SEQ ID NO: 52760 - DNA, 17 bp, Arabidopsis thaliana
atcgctgatttgtggcc

SEQ ID NO: 52761 - DNA, 17 bp, Arabidopsis thaliana
atcgctgcgacaaacac

SEQ ID NO: 52762 - DNA, 17 bp, Arabidopsis thaliana
atcgctgcgacaagcaa

SEQ ID NO: 52763 - DNA, 17 bp, Arabidopsis thaliana
atcgctgcgacaagcac

SEQ ID NO: 52764 - DNA, 17 bp, Arabidopsis thaliana
atcgctgcgacaagcag

SEQ ID NO: 52765 - DNA, 17 bp, Arabidopsis thaliana
atcgctgcgacaagccc

SEQ ID NO: 52766 - DNA, 17 bp, Arabidopsis thaliana
atcgctgcgacaagtac

SEQ ID NO: 52767 - DNA, 17 bp, Arabidopsis thaliana
atcgctgcgactctttc

SEQ ID NO: 52768 - DNA, 17 bp, Arabidopsis thaliana
atcgctgcggactaact

SEQ ID NO: 52769 - DNA, 17 bp, Arabidopsis thaliana
atcgctgctgtccgtga

SEQ ID NO: 52770 - DNA, 17 bp, Arabidopsis thaliana
atcgctggaccctggtg

SEQ ID NO: 52771 - DNA, 17 bp, Arabidopsis thaliana
atcgctggagtgtaaca

SEQ ID NO: 52772 - DNA, 17 bp, Arabidopsis thaliana
atcgctggattacagag

SEQ ID NO: 52773 - DNA, 17 bp, Arabidopsis thaliana
atcgctggcgactgtcg

SEQ ID NO: 52774 - DNA, 17 bp, Arabidopsis thaliana
atcgctggtgactatcg

SEQ ID NO: 52775 - DNA, 17 bp, Arabidopsis thaliana
atcgctggtggtcaaga

SEQ ID NO: 52776 - DNA, 17 bp, Arabidopsis thaliana
atcgctggttcaaatcc

SEQ ID NO: 52777 - DNA, 17 bp, Arabidopsis thaliana
atcgctggttcaacgac

SEQ ID NO: 52778 - DNA, 17 bp, Arabidopsis thaliana
atcgctggtttacggtt

SEQ ID NO: 52779 - DNA, 17 bp, Arabidopsis thaliana
atcgctgtccacagaga

SEQ ID NO: 52780 - DNA, 17 bp, Arabidopsis thaliana
atcgctgtcgccgatta

SEQ ID NO: 52781 - DNA, 17 bp, Arabidopsis thaliana
atcgctgtgcgccgtcg

SEQ ID NO: 52782 - DNA, 17 bp, Arabidopsis thaliana
atcgctgtgcgccgttg

SEQ ID NO: 52783 - DNA, 17 bp, Arabidopsis thaliana
atcgctgttgccgatta

SEQ ID NO: 52784 - DNA, 17 bp, Arabidopsis thaliana
atcgctgtttatgcggc

SEQ ID NO: 52785 - DNA, 17 bp, Arabidopsis thaliana
atcgcttaaaccgcttt

SEQ ID NO: 52786 - DNA, 17 bp, Arabidopsis thaliana
atcgcttaagaggatga

SEQ ID NO: 52787 - DNA, 17 bp, Arabidopsis thaliana
atcgcttaatctgtctt

SEQ ID NO: 52788 - DNA, 17 bp, Arabidopsis thaliana
atcgcttcactaagcca

SEQ ID NO: 52789 - DNA, 17 bp, Arabidopsis thaliana
atcgcttccttttcaag

SEQ ID NO: 52790 - DNA, 17 bp, Arabidopsis thaliana
atcgcttcctttttaag

SEQ ID NO: 52791 - DNA, 17 bp, Arabidopsis thaliana
atcgcttctagcccgga

SEQ ID NO: 52792 - DNA, 17 bp, Arabidopsis thaliana
atcgcttctttatgcca

SEQ ID NO: 52793 - DNA, 17 bp, Arabidopsis thaliana
atcgcttcttttccaag

SEQ ID NO: 52794 - DNA, 17 bp, Arabidopsis thaliana
atcgcttgactctagtc

SEQ ID NO: 52795 - DNA, 17 bp, Arabidopsis thaliana
atcgcttgaggctgcat

SEQ ID NO: 52796 - DNA, 17 bp, Arabidopsis thaliana
atcgcttgcagagagaa

SEQ ID NO: 52797 - DNA, 17 bp, Arabidopsis thaliana
atcgcttgctacttggt

SEQ ID NO: 52798 - DNA, 17 bp, Arabidopsis thaliana
atcgcttggacttgtca

SEQ ID NO: 52799 - DNA, 17 bp, Arabidopsis thaliana
atcgcttgggagctcgg

SEQ ID NO: 52800 - DNA, 17 bp, Arabidopsis thaliana
atcgcttgtcgacacgt

SEQ ID NO: 52801 - DNA, 17 bp, Arabidopsis thaliana
atcgcttgttggcgtca

SEQ ID NO: 52802 - DNA, 17 bp, Arabidopsis thaliana
atcgctttagtttccgg

SEQ ID NO: 52803 - DNA, 17 bp, Arabidopsis thaliana
atcgctttagtttctgg

SEQ ID NO: 52804 - DNA, 17 bp, Arabidopsis thaliana
atcgctttcgctggtct

SEQ ID NO: 52805 - DNA, 17 bp, Arabidopsis thaliana
atcgctttcgctggttt

SEQ ID NO: 52806 - DNA, 17 bp, Arabidopsis thaliana
atcgctttggaccgctc

SEQ ID NO: 52807 - DNA, 17 bp, Arabidopsis thaliana
atcgctttggaccgctt

SEQ ID NO: 52808 - DNA, 17 bp, Arabidopsis thaliana
atcgctttggccgagtg

SEQ ID NO: 52809 - DNA, 17 bp, Arabidopsis thaliana
atcggaaaagaatccat

SEQ ID NO: 52810 - DNA, 17 bp, Arabidopsis thaliana
atcggaaatgcttctca

SEQ ID NO: 52811 - DNA, 17 bp, Arabidopsis thaliana
atcggaacctggctccg

SEQ ID NO: 52812 - DNA, 17 bp, Arabidopsis thaliana
atcggaacctggctctg

SEQ ID NO: 52813 - DNA, 17 bp, Arabidopsis thaliana
atcggaagaatcgtcgt

SEQ ID NO: 52814 - DNA, 17 bp, Arabidopsis thaliana
atcggaagtggattcag

SEQ ID NO: 52815 - DNA, 17 bp, Arabidopsis thaliana
atcggaagttgagtagg

SEQ ID NO: 52816 - DNA, 17 bp, Arabidopsis thaliana
atcggaatccggctgag

SEQ ID NO: 52817 - DNA, 17 bp, Arabidopsis thaliana
atcggaatcctcaggtg

SEQ ID NO: 52818 - DNA, 17 bp, Arabidopsis thaliana
atcggaatcctctagga

SEQ ID NO: 52819 - DNA, 17 bp, Arabidopsis thaliana
atcggaatgttgctgaa

SEQ ID NO: 52820 - DNA, 17 bp, Arabidopsis thaliana
atcggacaacacagact

SEQ ID NO: 52821 - DNA, 17 bp, Arabidopsis thaliana
atcggacaacacagatt

SEQ ID NO: 52822 - DNA, 17 bp, Arabidopsis thaliana
atcggacagtacaactc

SEQ ID NO: 52823 - DNA, 17 bp, Arabidopsis thaliana
atcggaccaggcttcat

SEQ ID NO: 52824 - DNA, 17 bp, Arabidopsis thaliana
atcggaccatctgcgga

SEQ ID NO: 52825 - DNA, 17 bp, Arabidopsis thaliana
atcggaccgctttttat

SEQ ID NO: 52826 - DNA, 17 bp, Arabidopsis thaliana
atcggacctctatcgct

SEQ ID NO: 52827 - DNA, 17 bp, Arabidopsis thaliana
atcggacctgatgtcac

SEQ ID NO: 52828 - DNA, 17 bp, Arabidopsis thaliana
atcggacggagcagatc

SEQ ID NO: 52829 - DNA, 17 bp, Arabidopsis thaliana
atcggacgggtggtgca

SEQ ID NO: 52830 - DNA, 17 bp, Arabidopsis thaliana
atcggacggtgacccaa

SEQ ID NO: 52831 - DNA, 17 bp, Arabidopsis thaliana
atcggacgtcttcggcg

SEQ ID NO: 52832 - DNA, 17 bp, Arabidopsis thaliana
atcggactaactgcgga

SEQ ID NO: 52833 - DNA, 17 bp, Arabidopsis thaliana
atcggactcttgccttt

SEQ ID NO: 52834 - DNA, 17 bp, Arabidopsis thaliana
atcggactgagtagccc

SEQ ID NO: 52835 - DNA, 17 bp, Arabidopsis thaliana
atcggactgctcaaaag

SEQ ID NO: 52836 - DNA, 17 bp, Arabidopsis thaliana
atcggactggctaaagt

SEQ ID NO: 52837 - DNA, 17 bp, Arabidopsis thaliana
atcggactgtctgggta

SEQ ID NO: 52838 - DNA, 17 bp, Arabidopsis thaliana
atcggactgtctgggtt

SEQ ID NO: 52839 - DNA, 17 bp, Arabidopsis thaliana
atcggacttgcaaccat

SEQ ID NO: 52840 - DNA, 17 bp, Arabidopsis thaliana
atcggactttatgaagt

SEQ ID NO: 52841 - DNA, 17 bp, Arabidopsis thaliana
atcggagaagtgaccag

SEQ ID NO: 52842 - DNA, 17 bp, Arabidopsis thaliana
atcggagacctctcttt

SEQ ID NO: 52843 - DNA, 17 bp, Arabidopsis thaliana
atcggagacttgcctta

SEQ ID NO: 52844 - DNA, 17 bp, Arabidopsis thaliana
atcggagaggaaattcg

SEQ ID NO: 52845 - DNA, 17 bp, Arabidopsis thaliana
atcggagatattggcag

SEQ ID NO: 52846 - DNA, 17 bp, Arabidopsis thaliana
atcggagatgtcactga

SEQ ID NO: 52847 - DNA, 17 bp, Arabidopsis thaliana
atcggagattgattgcg

SEQ ID NO: 52848 - DNA, 17 bp, Arabidopsis thaliana
atcggaggcggggtaca

SEQ ID NO: 52849 - DNA, 17 bp, Arabidopsis thaliana
atcggagtaatgattca

SEQ ID NO: 52850 - DNA, 17 bp, Arabidopsis thaliana
atcggagtcgctgtcgc

SEQ ID NO: 52851 - DNA, 17 bp, Arabidopsis thaliana
atcggagtctacttgcg

SEQ ID NO: 52852 - DNA, 17 bp, Arabidopsis thaliana
atcggatactaagttgg

SEQ ID NO: 52853 - DNA, 17 bp, Arabidopsis thaliana
atcggatagtctcgggt

SEQ ID NO: 52854 - DNA, 17 bp, Arabidopsis thaliana
atcggatatccacaggt

SEQ ID NO: 52855 - DNA, 17 bp, Arabidopsis thaliana
atcggatatccacgggt

SEQ ID NO: 52856 - DNA, 17 bp, Arabidopsis thaliana
atcggatatgtgattga

SEQ ID NO: 52857 - DNA, 17 bp, Arabidopsis thaliana
atcggatccaatcttgg

SEQ ID NO: 52858 - DNA, 17 bp, Arabidopsis thaliana
atcggatcctggctccg

SEQ ID NO: 52859 - DNA, 17 bp, Arabidopsis thaliana
atcggatcgattaacaa

SEQ ID NO: 52860 - DNA, 17 bp, Arabidopsis thaliana
atcggatcggaggtgtc

SEQ ID NO: 52861 - DNA, 17 bp, Arabidopsis thaliana
atcggatctgtgcctac

SEQ ID NO: 52862 - DNA, 17 bp, Arabidopsis thaliana
atcggatctgtgcctat

SEQ ID NO: 52863 - DNA, 17 bp, Arabidopsis thaliana
atcggatggtgcatgcg

SEQ ID NO: 52864 - DNA, 17 bp, Arabidopsis thaliana
atcggatgttgcttata

SEQ ID NO: 52865 - DNA, 17 bp, Arabidopsis thaliana
atcggattaaccaggta

SEQ ID NO: 52866 - DNA, 17 bp, Arabidopsis thaliana
atcggattcaatcgggt

SEQ ID NO: 52867 - DNA, 17 bp, Arabidopsis thaliana
atcggattcaccttttt

SEQ ID NO: 52868 - DNA, 17 bp, Arabidopsis thaliana
atcggattcacggtaca

SEQ ID NO: 52869 - DNA, 17 bp, Arabidopsis thaliana
atcggattcagacatcc

SEQ ID NO: 52870 - DNA, 17 bp, Arabidopsis thaliana
atcggattcagacatgc

SEQ ID NO: 52871 - DNA, 17 bp, Arabidopsis thaliana
atcggattctctgtttg

SEQ ID NO: 52872 - DNA, 17 bp, Arabidopsis thaliana
atcggattgtgacacat

SEQ ID NO: 52873 - DNA, 17 bp, Arabidopsis thaliana
atcggatttgaaatgcg

SEQ ID NO: 52874 - DNA, 17 bp, Arabidopsis thaliana
atcggcaagacccggtg

SEQ ID NO: 52875 - DNA, 17 bp, Arabidopsis thaliana
atcggcaagacggttaa

SEQ ID NO: 52876 - DNA, 17 bp, Arabidopsis thaliana
atcggcaagacggttag

SEQ ID NO: 52877 - DNA, 17 bp, Arabidopsis thaliana
atcggcaaggccgtgaa

SEQ ID NO: 52878 - DNA, 17 bp, Arabidopsis thaliana
atcggcaagttgtcctt

SEQ ID NO: 52879 - DNA, 17 bp, Arabidopsis thaliana
atcggcacaggcatttt

SEQ ID NO: 52880 - DNA, 17 bp, Arabidopsis thaliana
atcggcaccaatcatac

SEQ ID NO: 52881 - DNA, 17 bp, Arabidopsis thaliana
atcggcactgttattcg

SEQ ID NO: 52882 - DNA, 17 bp, Arabidopsis thaliana
atcggcagtctccttgg

SEQ ID NO: 52883 - DNA, 17 bp, Arabidopsis thaliana
atcggcattcgcctctc

SEQ ID NO: 52884 - DNA, 17 bp, Arabidopsis thaliana
atcggccaaaagttgtt

SEQ ID NO: 52885 - DNA, 17 bp, Arabidopsis thaliana
atcggccagacggatgg

SEQ ID NO: 52886 - DNA, 17 bp, Arabidopsis thaliana
atcggccagatctgact

SEQ ID NO: 52887 - DNA, 17 bp, Arabidopsis thaliana
atcggcccgtcggtctg

SEQ ID NO: 52888 - DNA, 17 bp, Arabidopsis thaliana
atcggccctgttcgttt

SEQ ID NO: 52889 - DNA, 17 bp, Arabidopsis thaliana
atcggccgggggacgga

SEQ ID NO: 52890 - DNA, 17 bp, Arabidopsis thaliana
atcggccgtcgattcag

SEQ ID NO: 52891 - DNA, 17 bp, Arabidopsis thaliana
atcggccgttgtgaatg

SEQ ID NO: 52892 - DNA, 17 bp, Arabidopsis thaliana
atcggcctttctatcgg

SEQ ID NO: 52893 - DNA, 17 bp, Arabidopsis thaliana
atcggcgacctctaaat

SEQ ID NO: 52894 - DNA, 17 bp, Arabidopsis thaliana
atcggcgacctctaagc

SEQ ID NO: 52895 - DNA, 17 bp, Arabidopsis thaliana
atcggcgagagtgatgg

SEQ ID NO: 52896 - DNA, 17 bp, Arabidopsis thaliana
atcggcgataatcgacc

SEQ ID NO: 52897 - DNA, 17 bp, Arabidopsis thaliana
atcggcgattttcgaca

SEQ ID NO: 52898 - DNA, 17 bp, Arabidopsis thaliana
atcggcgcccatggttg

SEQ ID NO: 52899 - DNA, 17 bp, Arabidopsis thaliana
atcggcgccgacgcttc

SEQ ID NO: 52900 - DNA, 17 bp, Arabidopsis thaliana
atcggcggaccggattg

SEQ ID NO: 52901 - DNA, 17 bp, Arabidopsis thaliana
atcggcggaggacaggg

SEQ ID NO: 52902 - DNA, 17 bp, Arabidopsis thaliana
atcggcggaggagaggt

SEQ ID NO: 52903 - DNA, 17 bp, Arabidopsis thaliana
atcggcgggtagaatcc

SEQ ID NO: 52904 - DNA, 17 bp, Arabidopsis thaliana
atcggcggttcagtggg

SEQ ID NO: 52905 - DNA, 17 bp, Arabidopsis thaliana
atcggcgtccaaaaatg

SEQ ID NO: 52906 - DNA, 17 bp, Arabidopsis thaliana
atcggcgtccagaaatg

SEQ ID NO: 52907 - DNA, 17 bp, Arabidopsis thaliana
atcggcgttctctaagc

SEQ ID NO: 52908 - DNA, 17 bp, Arabidopsis thaliana
atcggctaactctgtgc

SEQ ID NO: 52909 - DNA, 17 bp, Arabidopsis thaliana
atcggctaactctgtgt

SEQ ID NO: 52910 - DNA, 17 bp, Arabidopsis thaliana
atcggctaagtccgttc

SEQ ID NO: 52911 - DNA, 17 bp, Arabidopsis thaliana
atcggctaatccggtta

SEQ ID NO: 52912 - DNA, 17 bp, Arabidopsis thaliana
atcggctactggagcga

SEQ ID NO: 52913 - DNA, 17 bp, Arabidopsis thaliana
atcggctaggaagtgtg

SEQ ID NO: 52914 - DNA, 17 bp, Arabidopsis thaliana
atcggctagtggaacca

SEQ ID NO: 52915 - DNA, 17 bp, Arabidopsis thaliana
atcggctagttgatgaa

SEQ ID NO: 52916 - DNA, 17 bp, Arabidopsis thaliana
atcggctagttgattaa

SEQ ID NO: 52917 - DNA, 17 bp, Arabidopsis thaliana
atcggctatcatcggcg

SEQ ID NO: 52918 - DNA, 17 bp, Arabidopsis thaliana
atcggctatttgagatt

SEQ ID NO: 52919 - DNA, 17 bp, Arabidopsis thaliana
atcggctcaggaccatt

SEQ ID NO: 52920 - DNA, 17 bp, Arabidopsis thaliana
atcggctcctgccggtg

SEQ ID NO: 52921 - DNA, 17 bp, Arabidopsis thaliana
atcggctcggaagtgcg

SEQ ID NO: 52922 - DNA, 17 bp, Arabidopsis thaliana
atcggctctattcaccc

SEQ ID NO: 52923 - DNA, 17 bp, Arabidopsis thaliana
atcggctctattcaggt

SEQ ID NO: 52924 - DNA, 17 bp, Arabidopsis thaliana
atcggctctccgattcg

SEQ ID NO: 52925 - DNA, 17 bp, Arabidopsis thaliana
atcggctgatctggtca

SEQ ID NO: 52926 - DNA, 17 bp, Arabidopsis thaliana
atcggctgatctggtga

SEQ ID NO: 52927 - DNA, 17 bp, Arabidopsis thaliana
atcggctgatctggtta

SEQ ID NO: 52928 - DNA, 17 bp, Arabidopsis thaliana
atcggctgattcagtta

SEQ ID NO: 52929 - DNA, 17 bp, Arabidopsis thaliana
atcggctgattcggccg

SEQ ID NO: 52930 - DNA, 17 bp, Arabidopsis thaliana
atcggctgattcggtta

SEQ ID NO: 52931 - DNA, 17 bp, Arabidopsis thaliana
atcggctgattgggtta

SEQ ID NO: 52932 - DNA, 17 bp, Arabidopsis thaliana
atcggctgcattgcgat

SEQ ID NO: 52933 - DNA, 17 bp, Arabidopsis thaliana
atcggctgccggcgggg

SEQ ID NO: 52934 - DNA, 17 bp, Arabidopsis thaliana
atcggctgccggtggcg

SEQ ID NO: 52935 - DNA, 17 bp, Arabidopsis thaliana
atcggctggaaatcacg

SEQ ID NO: 52936 - DNA, 17 bp, Arabidopsis thaliana
atcggctggcggactgc

SEQ ID NO: 52937 - DNA, 17 bp, Arabidopsis thaliana
atcggctggcggactgg

SEQ ID NO: 52938 - DNA, 17 bp, Arabidopsis thaliana
atcggctggcggattgg

SEQ ID NO: 52939 - DNA, 17 bp, Arabidopsis thaliana
atcggctggctgacggg

SEQ ID NO: 52940 - DNA, 17 bp, Arabidopsis thaliana
atcggctgtgccatact

SEQ ID NO: 52941 - DNA, 17 bp, Arabidopsis thaliana
atcggcttattgaacca

SEQ ID NO: 52942 - DNA, 17 bp, Arabidopsis thaliana
atcggcttgaactttat

SEQ ID NO: 52943 - DNA, 17 bp, Arabidopsis thaliana
atcggcttggtcttgtt

SEQ ID NO: 52944 - DNA, 17 bp, Arabidopsis thaliana
atcggctttgcaaccaa

SEQ ID NO: 52945 - DNA, 17 bp, Arabidopsis thaliana
atcgggaaaagactctg

SEQ ID NO: 52946 - DNA, 17 bp, Arabidopsis thaliana
atcgggaaatcgtgatc

SEQ ID NO: 52947 - DNA, 17 bp, Arabidopsis thaliana
atcgggaagagactctc

SEQ ID NO: 52948 - DNA, 17 bp, Arabidopsis thaliana
atcgggaagagattctc

SEQ ID NO: 52949 - DNA, 17 bp, Arabidopsis thaliana
atcgggacctcttcatc

SEQ ID NO: 52950 - DNA, 17 bp, Arabidopsis thaliana
atcgggacggcgggccg

SEQ ID NO: 52951 - DNA, 17 bp, Arabidopsis thaliana
atcgggacgtctgcgac

SEQ ID NO: 52952 - DNA, 17 bp, Arabidopsis thaliana
atcgggacttcactcgg

SEQ ID NO: 52953 - DNA, 17 bp, Arabidopsis thaliana
atcgggagtgtccaaga

SEQ ID NO: 52954 - DNA, 17 bp, Arabidopsis thaliana
atcgggatcaattgcta

SEQ ID NO: 52955 - DNA, 17 bp, Arabidopsis thaliana
atcgggatcctcaggtg

SEQ ID NO: 52956 - DNA, 17 bp, Arabidopsis thaliana
atcgggatcgtcgcaca

SEQ ID NO: 52957 - DNA, 17 bp, Arabidopsis thaliana
atcgggatctcttgcaa

SEQ ID NO: 52958 - DNA, 17 bp, Arabidopsis thaliana
atcgggatctggggttg

SEQ ID NO: 52959 - DNA, 17 bp, Arabidopsis thaliana
atcgggattgacttgct

SEQ ID NO: 52960 - DNA, 17 bp, Arabidopsis thaliana
atcgggcaacgaggcag

SEQ ID NO: 52961 - DNA, 17 bp, Arabidopsis thaliana
atcgggcaacgaggcgg

SEQ ID NO: 52962 - DNA, 17 bp, Arabidopsis thaliana
atcgggcatccaggagt

SEQ ID NO: 52963 - DNA, 17 bp, Arabidopsis thaliana
atcgggcattttcgtga

SEQ ID NO: 52964 - DNA, 17 bp, Arabidopsis thaliana
atcgggcctctggtccg

SEQ ID NO: 52965 - DNA, 17 bp, Arabidopsis thaliana
atcgggcctggaaatct

SEQ ID NO: 52966 - DNA, 17 bp, Arabidopsis thaliana
atcgggcctttccgtga

SEQ ID NO: 52967 - DNA, 17 bp, Arabidopsis thaliana
atcgggcggagcggatc

SEQ ID NO: 52968 - DNA, 17 bp, Arabidopsis thaliana
atcgggcggcgggcgca

SEQ ID NO: 52969 - DNA, 17 bp, Arabidopsis thaliana
atcgggcggcgggcgga

SEQ ID NO: 52970 - DNA, 17 bp, Arabidopsis thaliana
atcgggctctatctggc

SEQ ID NO: 52971 - DNA, 17 bp, Arabidopsis thaliana
atcgggctctgatacca

SEQ ID NO: 52972 - DNA, 17 bp, Arabidopsis thaliana
atcgggctctggtgtac

SEQ ID NO: 52973 - DNA, 17 bp, Arabidopsis thaliana
atcgggctgggccaaac

SEQ ID NO: 52974 - DNA, 17 bp, Arabidopsis thaliana
atcggggaggattagag

SEQ ID NO: 52975 - DNA, 17 bp, Arabidopsis thaliana
atcggggcaagaccgcc

SEQ ID NO: 52976 - DNA, 17 bp, Arabidopsis thaliana
atcggggcaagaccgct

SEQ ID NO: 52977 - DNA, 17 bp, Arabidopsis thaliana
atcggggcaagccggag

SEQ ID NO: 52978 - DNA, 17 bp, Arabidopsis thaliana
atcggggcattcttccg

SEQ ID NO: 52979 - DNA, 17 bp, Arabidopsis thaliana
atcggggcctttcacat

SEQ ID NO: 52980 - DNA, 17 bp, Arabidopsis thaliana
atcggggcgtggaccga

SEQ ID NO: 52981 - DNA, 17 bp, Arabidopsis thaliana
atcgggggtcccagttc

SEQ ID NO: 52982 - DNA, 17 bp, Arabidopsis thaliana
atcggggtggtggcgca

SEQ ID NO: 52983 - DNA, 17 bp, Arabidopsis thaliana
atcgggtaaagccaatg

SEQ ID NO: 52984 - DNA, 17 bp, Arabidopsis thaliana
atcgggtacccaatgat

SEQ ID NO: 52985 - DNA, 17 bp, Arabidopsis thaliana
atcgggtatccttcggg

SEQ ID NO: 52986 - DNA, 17 bp, Arabidopsis thaliana
atcgggtatttcgggtt

SEQ ID NO: 52987 - DNA, 17 bp, Arabidopsis thaliana
atcgggtattttgggtt

SEQ ID NO: 52988 - DNA, 17 bp, Arabidopsis thaliana
atcgggtcaaccagact

SEQ ID NO: 52989 - DNA, 17 bp, Arabidopsis thaliana
atcgggtcaaccagatt

SEQ ID NO: 52990 - DNA, 17 bp, Arabidopsis thaliana
atcgggtcaaccaggtt

SEQ ID NO: 52991 - DNA, 17 bp, Arabidopsis thaliana
atcgggtccatttttgc

SEQ ID NO: 52992 - DNA, 17 bp, Arabidopsis thaliana
atcgggtccattttttc

SEQ ID NO: 52993 - DNA, 17 bp, Arabidopsis thaliana
atcgggtccgaggaatc

SEQ ID NO: 52994 - DNA, 17 bp, Arabidopsis thaliana
atcgggtccgttctttc

SEQ ID NO: 52995 - DNA, 17 bp, Arabidopsis thaliana
atcgggtccgttttttc

SEQ ID NO: 52996 - DNA, 17 bp, Arabidopsis thaliana
atcgggtcgctagagtc

SEQ ID NO: 52997 - DNA, 17 bp, Arabidopsis thaliana
atcgggtctattcgggt

SEQ ID NO: 52998 - DNA, 17 bp, Arabidopsis thaliana
atcgggtcttccaccgg

SEQ ID NO: 52999 - DNA, 17 bp, Arabidopsis thaliana
atcgggtgcaccgccga

SEQ ID NO: 53000 - DNA, 17 bp, Arabidopsis thaliana
atcgggtgggacccacg

SEQ ID NO: 53001 - DNA, 17 bp, Arabidopsis thaliana
atcgggtgtaacccgga

SEQ ID NO: 53002 - DNA, 17 bp, Arabidopsis thaliana
atcgggttcgacgacag

SEQ ID NO: 53003 - DNA, 17 bp, Arabidopsis thaliana
atcgggttcggattggt

SEQ ID NO: 53004 - DNA, 17 bp, Arabidopsis thaliana
atcgggttcgggtcaaa

SEQ ID NO: 53005 - DNA, 17 bp, Arabidopsis thaliana
atcgggttcggttcgga

SEQ ID NO: 53006 - DNA, 17 bp, Arabidopsis thaliana
atcgggttcgtgacggc

SEQ ID NO: 53007 - DNA, 17 bp, Arabidopsis thaliana
atcgggttgagtatgta

SEQ ID NO: 53008 - DNA, 17 bp, Arabidopsis thaliana
atcgggttgagtatgtg

SEQ ID NO: 53009 - DNA, 17 bp, Arabidopsis thaliana
atcgggttgcagtttaa

SEQ ID NO: 53010 - DNA, 17 bp, Arabidopsis thaliana
atcgggttgcccaagcc

SEQ ID NO: 53011 - DNA, 17 bp, Arabidopsis thaliana
atcgggttgcgatttaa

SEQ ID NO: 53012 - DNA, 17 bp, Arabidopsis thaliana
atcgggttgcgggttaa

SEQ ID NO: 53013 - DNA, 17 bp, Arabidopsis thaliana
atcgggttgcggtttaa

SEQ ID NO: 53014 - DNA, 17 bp, Arabidopsis thaliana
atcgggttgcggtttag

SEQ ID NO: 53015 - DNA, 17 bp, Arabidopsis thaliana
atcgggttgctactccc

SEQ ID NO: 53016 - DNA, 17 bp, Arabidopsis thaliana
atcgggttgctgtttaa

SEQ ID NO: 53017 - DNA, 17 bp, Arabidopsis thaliana
atcgggtttctcatgtc

SEQ ID NO: 53018 - DNA, 17 bp, Arabidopsis thaliana
atcgggtttgagatcgc

SEQ ID NO: 53019 - DNA, 17 bp, Arabidopsis thaliana
atcgggttttttgggtt

SEQ ID NO: 53020 - DNA, 17 bp, Arabidopsis thaliana
atcggtaagaactctgt

SEQ ID NO: 53021 - DNA, 17 bp, Arabidopsis thaliana
atcggtaagaccaaagg

SEQ ID NO: 53022 - DNA, 17 bp, Arabidopsis thaliana
atcggtaagccgcctgt

SEQ ID NO: 53023 - DNA, 17 bp, Arabidopsis thaliana
atcggtacaagacttgc

SEQ ID NO: 53024 - DNA, 17 bp, Arabidopsis thaliana
atcggtaccccgcatct

SEQ ID NO: 53025 - DNA, 17 bp, Arabidopsis thaliana
atcggtagaggagtgcc

SEQ ID NO: 53026 - DNA, 17 bp, Arabidopsis thaliana
atcggtagctgctgcgt

SEQ ID NO: 53027 - DNA, 17 bp, Arabidopsis thaliana
atcggtaggaacaacgg

SEQ ID NO: 53028 - DNA, 17 bp, Arabidopsis thaliana
atcggtaggaaccctaa

SEQ ID NO: 53029 - DNA, 17 bp, Arabidopsis thaliana
atcggtaggaaccctat

SEQ ID NO: 53030 - DNA, 17 bp, Arabidopsis thaliana
atcggtaggagcaacgg

SEQ ID NO: 53031 - DNA, 17 bp, Arabidopsis thaliana
atcggtaggagcgacgg

SEQ ID NO: 53032 - DNA, 17 bp, Arabidopsis thaliana
atcggtattgtggtcta

SEQ ID NO: 53033 - DNA, 17 bp, Arabidopsis thaliana
atcggtcaagcacccaa

SEQ ID NO: 53034 - DNA, 17 bp, Arabidopsis thaliana
atcggtccgacccaata

SEQ ID NO: 53035 - DNA, 17 bp, Arabidopsis thaliana
atcggtcctgaggttga

SEQ ID NO: 53036 - DNA, 17 bp, Arabidopsis thaliana
atcggtcgagggcttat

SEQ ID NO: 53037 - DNA, 17 bp, Arabidopsis thaliana
atcggtcgatttcttac

SEQ ID NO: 53038 - DNA, 17 bp, Arabidopsis thaliana
atcggtcgctcttgtcc

SEQ ID NO: 53039 - DNA, 17 bp, Arabidopsis thaliana
atcggtcggtgatttca

SEQ ID NO: 53040 - DNA, 17 bp, Arabidopsis thaliana
atcggtctaaggatgat

SEQ ID NO: 53041 - DNA, 17 bp, Arabidopsis thaliana
atcggtctcctgcacgc

SEQ ID NO: 53042 - DNA, 17 bp, Arabidopsis thaliana
atcggtcttcgtggttc

SEQ ID NO: 53043 - DNA, 17 bp, Arabidopsis thaliana
atcggtgaactcgtgga

SEQ ID NO: 53044 - DNA, 17 bp, Arabidopsis thaliana
atcggtgatgtgccggt

SEQ ID NO: 53045 - DNA, 17 bp, Arabidopsis thaliana
atcggtgctcctcacag

SEQ ID NO: 53046 - DNA, 17 bp, Arabidopsis thaliana
atcggtggatgtgtttg

SEQ ID NO: 53047 - DNA, 17 bp, Arabidopsis thaliana
atcggtggctatcaagg

SEQ ID NO: 53048 - DNA, 17 bp, Arabidopsis thaliana
atcggtggcttggaatc

SEQ ID NO: 53049 - DNA, 17 bp, Arabidopsis thaliana
atcggtgtgatacaaca

SEQ ID NO: 53050 - DNA, 17 bp, Arabidopsis thaliana
atcggttaaagcgattc

SEQ ID NO: 53051 - DNA, 17 bp, Arabidopsis thaliana
atcggttaactggtcgg

SEQ ID NO: 53052 - DNA, 17 bp, Arabidopsis thaliana
atcggttaactggtctg

SEQ ID NO: 53053 - DNA, 17 bp, Arabidopsis thaliana
atcggttaatccgacag

SEQ ID NO: 53054 - DNA, 17 bp, Arabidopsis thaliana
atcggttaattggtcgg

SEQ ID NO: 53055 - DNA, 17 bp, Arabidopsis thaliana
atcggttagcggttctt

SEQ ID NO: 53056 - DNA, 17 bp, Arabidopsis thaliana
atcggttaggaatctct

SEQ ID NO: 53057 - DNA, 17 bp, Arabidopsis thaliana
atcggttcaaccggtca

SEQ ID NO: 53058 - DNA, 17 bp, Arabidopsis thaliana
atcggttcaaggacgca

SEQ ID NO: 53059 - DNA, 17 bp, Arabidopsis thaliana
atcggttcaatcagatc

SEQ ID NO: 53060 - DNA, 17 bp, Arabidopsis thaliana
atcggttcaccggatca

SEQ ID NO: 53061 - DNA, 17 bp, Arabidopsis thaliana
atcggttcagattcgga

SEQ ID NO: 53062 - DNA, 17 bp, Arabidopsis thaliana
atcggttcatctccagg

SEQ ID NO: 53063 - DNA, 17 bp, Arabidopsis thaliana
atcggttcctcaaggtt

SEQ ID NO: 53064 - DNA, 17 bp, Arabidopsis thaliana
atcggttcctgaatggc

SEQ ID NO: 53065 - DNA, 17 bp, Arabidopsis thaliana
atcggttcctgaatggg

SEQ ID NO: 53066 - DNA, 17 bp, Arabidopsis thaliana
atcggttcggctcccgg

SEQ ID NO: 53067 - DNA, 17 bp, Arabidopsis thaliana
atcggttcggtttcagt

SEQ ID NO: 53068 - DNA, 17 bp, Arabidopsis thaliana
atcggttcgtcgtaacc

SEQ ID NO: 53069 - DNA, 17 bp, Arabidopsis thaliana
atcggttctcgcgatga

SEQ ID NO: 53070 - DNA, 17 bp, Arabidopsis thaliana
atcggttcttcgggttc

SEQ ID NO: 53071 - DNA, 17 bp, Arabidopsis thaliana
atcggttcttgaatggc

SEQ ID NO: 53072 - DNA, 17 bp, Arabidopsis thaliana
atcggttgaaaaccgga

SEQ ID NO: 53073 - DNA, 17 bp, Arabidopsis thaliana
atcggttgacgccctag

SEQ ID NO: 53074 - DNA, 17 bp, Arabidopsis thaliana
atcggttgattcggtta

SEQ ID NO: 53075 - DNA, 17 bp, Arabidopsis thaliana
atcggttgccggtggcg

SEQ ID NO: 53076 - DNA, 17 bp, Arabidopsis thaliana
atcggttgcggcggaag

SEQ ID NO: 53077 - DNA, 17 bp, Arabidopsis thaliana
atcggttgcggttaaag

SEQ ID NO: 53078 - DNA, 17 bp, Arabidopsis thaliana
atcggttgcggttcggt

SEQ ID NO: 53079 - DNA, 17 bp, Arabidopsis thaliana
atcggttgggaccgtac

SEQ ID NO: 53080 - DNA, 17 bp, Arabidopsis thaliana
atcggtttacaaattgt

SEQ ID NO: 53081 - DNA, 17 bp, Arabidopsis thaliana
atcggtttccttggaag

SEQ ID NO: 53082 - DNA, 17 bp, Arabidopsis thaliana
atcggtttcgactcggt

SEQ ID NO: 53083 - DNA, 17 bp, Arabidopsis thaliana
atcggtttcgattcgga

SEQ ID NO: 53084 - DNA, 17 bp, Arabidopsis thaliana
atcggtttctgaatggc

SEQ ID NO: 53085 - DNA, 17 bp, Arabidopsis thaliana
atcggtttgcgctggtg

SEQ ID NO: 53086 - DNA, 17 bp, Arabidopsis thaliana
atcggtttggacaatga

SEQ ID NO: 53087 - DNA, 17 bp, Arabidopsis thaliana
atcggtttggacaatgt

SEQ ID NO: 53088 - DNA, 17 bp, Arabidopsis thaliana
atcggtttggtttcgat

SEQ ID NO: 53089 - DNA, 17 bp, Arabidopsis thaliana
atcggtttggtttcggt

SEQ ID NO: 53090 - DNA, 17 bp, Arabidopsis thaliana
atcggtttgttgtccat

SEQ ID NO: 53091 - DNA, 17 bp, Arabidopsis thaliana
atcggtttgttgtccga

SEQ ID NO: 53092 - DNA, 17 bp, Arabidopsis thaliana
atcggttttaacatttg

SEQ ID NO: 53093 - DNA, 17 bp, Arabidopsis thaliana
atcgtaaaacacgatct

SEQ ID NO: 53094 - DNA, 17 bp, Arabidopsis thaliana
atcgtaaacccgtaatt

SEQ ID NO: 53095 - DNA, 17 bp, Arabidopsis thaliana
atcgtaaattgcgaggg

SEQ ID NO: 53096 - DNA, 17 bp, Arabidopsis thaliana
atcgtaacctggccctg

SEQ ID NO: 53097 - DNA, 17 bp, Arabidopsis thaliana
atcgtaacctggctccg

SEQ ID NO: 53098 - DNA, 17 bp, Arabidopsis thaliana
atcgtaacctggctctg

SEQ ID NO: 53099 - DNA, 17 bp, Arabidopsis thaliana
atcgtaacggagatcgg

SEQ ID NO: 53100 - DNA, 17 bp, Arabidopsis thaliana
atcgtaacggctgatgc

SEQ ID NO: 53101 - DNA, 17 bp, Arabidopsis thaliana
atcgtaacggctgattc

SEQ ID NO: 53102 - DNA, 17 bp, Arabidopsis thaliana
atcgtaaggaaagagga

SEQ ID NO: 53103 - DNA, 17 bp, Arabidopsis thaliana
atcgtaatccagctatt

SEQ ID NO: 53104 - DNA, 17 bp, Arabidopsis thaliana
atcgtaatccagctccc

SEQ ID NO: 53105 - DNA, 17 bp, Arabidopsis thaliana
atcgtaatcgcatatgc

SEQ ID NO: 53106 - DNA, 17 bp, Arabidopsis thaliana
atcgtacatctcttgcg

SEQ ID NO: 53107 - DNA, 17 bp, Arabidopsis thaliana
atcgtaccgcatttttt

SEQ ID NO: 53108 - DNA, 17 bp, Arabidopsis thaliana
atcgtacggtggaagat

SEQ ID NO: 53109 - DNA, 17 bp, Arabidopsis thaliana
atcgtacttccgaccgc

SEQ ID NO: 53110 - DNA, 17 bp, Arabidopsis thaliana
atcgtagatcgggtttg

SEQ ID NO: 53111 - DNA, 17 bp, Arabidopsis thaliana
atcgtagcatgtagatc

SEQ ID NO: 53112 - DNA, 17 bp, Arabidopsis thaliana
atcgtagcctgagtgag

SEQ ID NO: 53113 - DNA, 17 bp, Arabidopsis thaliana
atcgtagcgtgtgaaag

SEQ ID NO: 53114 - DNA, 17 bp, Arabidopsis thaliana
atcgtaggctgctttct

SEQ ID NO: 53115 - DNA, 17 bp, Arabidopsis thaliana
atcgtaggtcggataat

SEQ ID NO: 53116 - DNA, 17 bp, Arabidopsis thaliana
atcgtaggtggcgatca

SEQ ID NO: 53117 - DNA, 17 bp, Arabidopsis thaliana
atcgtagtaagcggtgt

SEQ ID NO: 53118 - DNA, 17 bp, Arabidopsis thaliana
atcgtagtcgccaattc

SEQ ID NO: 53119 - DNA, 17 bp, Arabidopsis thaliana
atcgtagtctgcagcac

SEQ ID NO: 53120 - DNA, 17 bp, Arabidopsis thaliana
atcgtagtgtgaacgcg

SEQ ID NO: 53121 - DNA, 17 bp, Arabidopsis thaliana
atcgtagtgttgcggat

SEQ ID NO: 53122 - DNA, 17 bp, Arabidopsis thaliana
atcgtagttttacgttg

SEQ ID NO: 53123 - DNA, 17 bp, Arabidopsis thaliana
atcgtatcacgcgatag

SEQ ID NO: 53124 - DNA, 17 bp, Arabidopsis thaliana
atcgtatcacgctagat

SEQ ID NO: 53125 - DNA, 17 bp, Arabidopsis thaliana
atcgtatcaggcgcaga

SEQ ID NO: 53126 - DNA, 17 bp, Arabidopsis thaliana
atcgtatcaggtgcaga

SEQ ID NO: 53127 - DNA, 17 bp, Arabidopsis thaliana
atcgtatcctggctctg

SEQ ID NO: 53128 - DNA, 17 bp, Arabidopsis thaliana
atcgtatcgccgaccga

SEQ ID NO: 53129 - DNA, 17 bp, Arabidopsis thaliana
atcgtatcggattacgc

SEQ ID NO: 53130 - DNA, 17 bp, Arabidopsis thaliana
atcgtatcgtctgtcgt

SEQ ID NO: 53131 - DNA, 17 bp, Arabidopsis thaliana
atcgtatcttgattttg

SEQ ID NO: 53132 - DNA, 17 bp, Arabidopsis thaliana
atcgtatcttgtgcttt

SEQ ID NO: 53133 - DNA, 17 bp, Arabidopsis thaliana
atcgtatgatggagcgt

SEQ ID NO: 53134 - DNA, 17 bp, Arabidopsis thaliana
atcgtatggattttggc

SEQ ID NO: 53135 - DNA, 17 bp, Arabidopsis thaliana
atcgtattagcagggcc

SEQ ID NO: 53136 - DNA, 17 bp, Arabidopsis thaliana
atcgtattgccgtcact

SEQ ID NO: 53137 - DNA, 17 bp, Arabidopsis thaliana
atcgtatttccgcaaaa

SEQ ID NO: 53138 - DNA, 17 bp, Arabidopsis thaliana
atcgtcaaatattatgt

SEQ ID NO: 53139 - DNA, 17 bp, Arabidopsis thaliana
atcgtcaacgactatta

SEQ ID NO: 53140 - DNA, 17 bp, Arabidopsis thaliana
atcgtcaagggtggagg

SEQ ID NO: 53141 - DNA, 17 bp, Arabidopsis thaliana
atcgtcaatcggctgga

SEQ ID NO: 53142 - DNA, 17 bp, Arabidopsis thaliana
atcgtcacacatgcaga

SEQ ID NO: 53143 - DNA, 17 bp, Arabidopsis thaliana
atcgtcacagattgtgt

SEQ ID NO: 53144 - DNA, 17 bp, Arabidopsis thaliana
atcgtcaccaggtaagc

SEQ ID NO: 53145 - DNA, 17 bp, Arabidopsis thaliana
atcgtcaccctaaagcg

SEQ ID NO: 53146 - DNA, 17 bp, Arabidopsis thaliana
atcgtcacgaatcgtgt

SEQ ID NO: 53147 - DNA, 17 bp, Arabidopsis thaliana
atcgtcacgggaacgcg

SEQ ID NO: 53148 - DNA, 17 bp, Arabidopsis thaliana
atcgtcactacctttgg

SEQ ID NO: 53149 - DNA, 17 bp, Arabidopsis thaliana
atcgtcagaaaagcgta

SEQ ID NO: 53150 - DNA, 17 bp, Arabidopsis thaliana
atcgtcagacactcttg

SEQ ID NO: 53151 - DNA, 17 bp, Arabidopsis thaliana
atcgtcagacggatcgg

SEQ ID NO: 53152 - DNA, 17 bp, Arabidopsis thaliana
atcgtcagaggcttttt

SEQ ID NO: 53153 - DNA, 17 bp, Arabidopsis thaliana
atcgtcagcgaagcttg

SEQ ID NO: 53154 - DNA, 17 bp, Arabidopsis thaliana
atcgtcagggatgtcag

SEQ ID NO: 53155 - DNA, 17 bp, Arabidopsis thaliana
atcgtcatacggtgtat

SEQ ID NO: 53156 - DNA, 17 bp, Arabidopsis thaliana
atcgtcatctgtacacc

SEQ ID NO: 53157 - DNA, 17 bp, Arabidopsis thaliana
atcgtcatcttcgcgca

SEQ ID NO: 53158 - DNA, 17 bp, Arabidopsis thaliana
atcgtcatgccaaacct

SEQ ID NO: 53159 - DNA, 17 bp, Arabidopsis thaliana
atcgtcattgcgtaagg

SEQ ID NO: 53160 - DNA, 17 bp, Arabidopsis thaliana
atcgtcatttccggccc

SEQ ID NO: 53161 - DNA, 17 bp, Arabidopsis thaliana
atcgtccaacctctcca

SEQ ID NO: 53162 - DNA, 17 bp, Arabidopsis thaliana
atcgtccagagtagagt

SEQ ID NO: 53163 - DNA, 17 bp, Arabidopsis thaliana
atcgtccatttacccag

SEQ ID NO: 53164 - DNA, 17 bp, Arabidopsis thaliana
atcgtccctcgatttcc

SEQ ID NO: 53165 - DNA, 17 bp, Arabidopsis thaliana
atcgtccgacgcaaacc

SEQ ID NO: 53166 - DNA, 17 bp, Arabidopsis thaliana
atcgtccgagaacccga

SEQ ID NO: 53167 - DNA, 17 bp, Arabidopsis thaliana
atcgtccgtccgagtgc

SEQ ID NO: 53168 - DNA, 17 bp, Arabidopsis thaliana
atcgtcctattggtgtt

SEQ ID NO: 53169 - DNA, 17 bp, Arabidopsis thaliana
atcgtcctgaagatcag

SEQ ID NO: 53170 - DNA, 17 bp, Arabidopsis thaliana
atcgtcctgttaccgtc

SEQ ID NO: 53171 - DNA, 17 bp, Arabidopsis thaliana
atcgtcgaacctctcca

SEQ ID NO: 53172 - DNA, 17 bp, Arabidopsis thaliana
atcgtcgaagatttctc

SEQ ID NO: 53173 - DNA, 17 bp, Arabidopsis thaliana
atcgtcgaccacctgca

SEQ ID NO: 53174 - DNA, 17 bp, Arabidopsis thaliana
atcgtcgaccaggacga

SEQ ID NO: 53175 - DNA, 17 bp, Arabidopsis thaliana
atcgtcgaccaggtccg

SEQ ID NO: 53176 - DNA, 17 bp, Arabidopsis thaliana
atcgtcgaccgggtccg

SEQ ID NO: 53177 - DNA, 17 bp, Arabidopsis thaliana
atcgtcgaccgtgattg

SEQ ID NO: 53178 - DNA, 17 bp, Arabidopsis thaliana
atcgtcgactcaagggc

SEQ ID NO: 53179 - DNA, 17 bp, Arabidopsis thaliana
atcgtcgagagggaaac

SEQ ID NO: 53180 - DNA, 17 bp, Arabidopsis thaliana
atcgtcgagggaaaaaa

SEQ ID NO: 53181 - DNA, 17 bp, Arabidopsis thaliana
atcgtcgattcgagtgt

SEQ ID NO: 53182 - DNA, 17 bp, Arabidopsis thaliana
atcgtcgcagttacggt

SEQ ID NO: 53183 - DNA, 17 bp, Arabidopsis thaliana
atcgtcgccggttagtg

SEQ ID NO: 53184 - DNA, 17 bp, Arabidopsis thaliana
atcgtcgctggaaccac

SEQ ID NO: 53185 - DNA, 17 bp, Arabidopsis thaliana
atcgtcgcttccatctt

SEQ ID NO: 53186 - DNA, 17 bp, Arabidopsis thaliana
atcgtcggatcagatca

SEQ ID NO: 53187 - DNA, 17 bp, Arabidopsis thaliana
atcgtcggatcggatcg

SEQ ID NO: 53188 - DNA, 17 bp, Arabidopsis thaliana
atcgtcggatgtgttta

SEQ ID NO: 53189 - DNA, 17 bp, Arabidopsis thaliana
atcgtcggctatgagtt

SEQ ID NO: 53190 - DNA, 17 bp, Arabidopsis thaliana
atcgtcggctattagtt

SEQ ID NO: 53191 - DNA, 17 bp, Arabidopsis thaliana
atcgtcggcttagtttt

SEQ ID NO: 53192 - DNA, 17 bp, Arabidopsis thaliana
atcgtcggttcgagtgt

SEQ ID NO: 53193 - DNA, 17 bp, Arabidopsis thaliana
atcgtcggtttacagtt

SEQ ID NO: 53194 - DNA, 17 bp, Arabidopsis thaliana
atcgtcgtaaggtccag

SEQ ID NO: 53195 - DNA, 17 bp, Arabidopsis thaliana
atcgtcgtgcgtatagg

SEQ ID NO: 53196 - DNA, 17 bp, Arabidopsis thaliana
atcgtcgttcggaccgc

SEQ ID NO: 53197 - DNA, 17 bp, Arabidopsis thaliana
atcgtctaatcccagca

SEQ ID NO: 53198 - DNA, 17 bp, Arabidopsis thaliana
atcgtctacatgattca

SEQ ID NO: 53199 - DNA, 17 bp, Arabidopsis thaliana
atcgtctagatgaggcc

SEQ ID NO: 53200 - DNA, 17 bp, Arabidopsis thaliana
atcgtctagcggatgag

SEQ ID NO: 53201 - DNA, 17 bp, Arabidopsis thaliana
atcgtctcagtcgtgga

SEQ ID NO: 53202 - DNA, 17 bp, Arabidopsis thaliana
atcgtctccgagactgt

SEQ ID NO: 53203 - DNA, 17 bp, Arabidopsis thaliana
atcgtctcgagacattc

SEQ ID NO: 53204 - DNA, 17 bp, Arabidopsis thaliana
atcgtctcgcggatggg

SEQ ID NO: 53205 - DNA, 17 bp, Arabidopsis thaliana
atcgtctcgggatgacg

SEQ ID NO: 53206 - DNA, 17 bp, Arabidopsis thaliana
atcgtctcggtatggat

SEQ ID NO: 53207 - DNA, 17 bp, Arabidopsis thaliana
atcgtctctaaatcgac

SEQ ID NO: 53208 - DNA, 17 bp, Arabidopsis thaliana
atcgtctctaaatcgat

SEQ ID NO: 53209 - DNA, 17 bp, Arabidopsis thaliana
atcgtctctccaggtga

SEQ ID NO: 53210 - DNA, 17 bp, Arabidopsis thaliana
atcgtctcttgtgtgtg

SEQ ID NO: 53211 - DNA, 17 bp, Arabidopsis thaliana
atcgtctcttttgccag

SEQ ID NO: 53212 - DNA, 17 bp, Arabidopsis thaliana
atcgtctgagtcggatt

SEQ ID NO: 53213 - DNA, 17 bp, Arabidopsis thaliana
atcgtctgcaagactat

SEQ ID NO: 53214 - DNA, 17 bp, Arabidopsis thaliana
atcgtctgcatgtatgg

SEQ ID NO: 53215 - DNA, 17 bp, Arabidopsis thaliana
atcgtctgcctgggtgt

SEQ ID NO: 53216 - DNA, 17 bp, Arabidopsis thaliana
atcgtctggcgatcttc

SEQ ID NO: 53217 - DNA, 17 bp, Arabidopsis thaliana
atcgtctgtcgtggatc

SEQ ID NO: 53218 - DNA, 17 bp, Arabidopsis thaliana
atcgtctgtggtgtacg

SEQ ID NO: 53219 - DNA, 17 bp, Arabidopsis thaliana
atcgtctgtggttgggg

SEQ ID NO: 53220 - DNA, 17 bp, Arabidopsis thaliana
atcgtctgttggtgcca

SEQ ID NO: 53221 - DNA, 17 bp, Arabidopsis thaliana
atcgtcttatctgagta

SEQ ID NO: 53222 - DNA, 17 bp, Arabidopsis thaliana
atcgtcttgcagatgag

SEQ ID NO: 53223 - DNA, 17 bp, Arabidopsis thaliana
atcgtcttgccgatgga

SEQ ID NO: 53224 - DNA, 17 bp, Arabidopsis thaliana
atcgtcttgcggtgtac

SEQ ID NO: 53225 - DNA, 17 bp, Arabidopsis thaliana
atcgtcttttccgattg

SEQ ID NO: 53226 - DNA, 17 bp, Arabidopsis thaliana
atcgtcttttgccatgt

SEQ ID NO: 53227 - DNA, 17 bp, Arabidopsis thaliana
atcgtgaactatctcgt

SEQ ID NO: 53228 - DNA, 17 bp, Arabidopsis thaliana
atcgtgaactatctctt

SEQ ID NO: 53229 - DNA, 17 bp, Arabidopsis thaliana
atcgtgaacttgcaaat

SEQ ID NO: 53230 - DNA, 17 bp, Arabidopsis thaliana
atcgtgaactttcgttg

SEQ ID NO: 53231 - DNA, 17 bp, Arabidopsis thaliana
atcgtgaagcaattacc

SEQ ID NO: 53232 - DNA, 17 bp, Arabidopsis thaliana
atcgtgaagcatgaaac

SEQ ID NO: 53233 - DNA, 17 bp, Arabidopsis thaliana
atcgtgacacacttttc

SEQ ID NO: 53234 - DNA, 17 bp, Arabidopsis thaliana
atcgtgactttgtctct

SEQ ID NO: 53235 - DNA, 17 bp, Arabidopsis thaliana
atcgtgaggtgcgacgc

SEQ ID NO: 53236 - DNA, 17 bp, Arabidopsis thaliana
atcgtgagtagtcgcgc

SEQ ID NO: 53237 - DNA, 17 bp, Arabidopsis thaliana
atcgtgagtttgtctct

SEQ ID NO: 53238 - DNA, 17 bp, Arabidopsis thaliana
atcgtgatcgttctttt

SEQ ID NO: 53239 - DNA, 17 bp, Arabidopsis thaliana
atcgtgatggggataga

SEQ ID NO: 53240 - DNA, 17 bp, Arabidopsis thaliana
atcgtgcaccgctggag

SEQ ID NO: 53241 - DNA, 17 bp, Arabidopsis thaliana
atcgtgcattggtcggc

SEQ ID NO: 53242 - DNA, 17 bp, Arabidopsis thaliana
atcgtgccaaaactttg

SEQ ID NO: 53243 - DNA, 17 bp, Arabidopsis thaliana
atcgtgccagctcaaga

SEQ ID NO: 53244 - DNA, 17 bp, Arabidopsis thaliana
atcgtgcccggaccctg

SEQ ID NO: 53245 - DNA, 17 bp, Arabidopsis thaliana
atcgtgccgacttttga

SEQ ID NO: 53246 - DNA, 17 bp, Arabidopsis thaliana
atcgtgcgacgtcccgc

SEQ ID NO: 53247 - DNA, 17 bp, Arabidopsis thaliana
atcgtgcgccttatttc

SEQ ID NO: 53248 - DNA, 17 bp, Arabidopsis thaliana
atcgtgcggtccgatcg

SEQ ID NO: 53249 - DNA, 17 bp, Arabidopsis thaliana
atcgtgcttcacagaca

SEQ ID NO: 53250 - DNA, 17 bp, Arabidopsis thaliana
atcgtggaccaaattag

SEQ ID NO: 53251 - DNA, 17 bp, Arabidopsis thaliana
atcgtggatgtgcttgc

SEQ ID NO: 53252 - DNA, 17 bp, Arabidopsis thaliana
atcgtggattgtgcaga

SEQ ID NO: 53253 - DNA, 17 bp, Arabidopsis thaliana
atcgtgggaccaatgcc

SEQ ID NO: 53254 - DNA, 17 bp, Arabidopsis thaliana
atcgtgggatagtcaca

SEQ ID NO: 53255 - DNA, 17 bp, Arabidopsis thaliana
atcgtggggaaatagac

SEQ ID NO: 53256 - DNA, 17 bp, Arabidopsis thaliana
atcgtgggtcccaccag

SEQ ID NO: 53257 - DNA, 17 bp, Arabidopsis thaliana
atcgtggtctacagcac

SEQ ID NO: 53258 - DNA, 17 bp, Arabidopsis thaliana
atcgtggtctacagccc

SEQ ID NO: 53259 - DNA, 17 bp, Arabidopsis thaliana
atcgtggtctgcagcac

SEQ ID NO: 53260 - DNA, 17 bp, Arabidopsis thaliana
atcgtggtctgcagccc

SEQ ID NO: 53261 - DNA, 17 bp, Arabidopsis thaliana
atcgtgtaagcctaaat

SEQ ID NO: 53262 - DNA, 17 bp, Arabidopsis thaliana
atcgtgtatcccggttt

SEQ ID NO: 53263 - DNA, 17 bp, Arabidopsis thaliana
atcgtgtcacattcaag

SEQ ID NO: 53264 - DNA, 17 bp, Arabidopsis thaliana
atcgtgtcactactgga

SEQ ID NO: 53265 - DNA, 17 bp, Arabidopsis thaliana
atcgtgtcatctgttgc

SEQ ID NO: 53266 - DNA, 17 bp, Arabidopsis thaliana
atcgtgtccgttttttg

SEQ ID NO: 53267 - DNA, 17 bp, Arabidopsis thaliana
atcgtgtcgtcggtagc

SEQ ID NO: 53268 - DNA, 17 bp, Arabidopsis thaliana
atcgtgtcgttctgtct

SEQ ID NO: 53269 - DNA, 17 bp, Arabidopsis thaliana
atcgtgtcgttggctaa

SEQ ID NO: 53270 - DNA, 17 bp, Arabidopsis thaliana
atcgtgtctaagaagtg

SEQ ID NO: 53271 - DNA, 17 bp, Arabidopsis thaliana
atcgtgttaatccgaaa

SEQ ID NO: 53272 - DNA, 17 bp, Arabidopsis thaliana
atcgtgttacgcaagtc

SEQ ID NO: 53273 - DNA, 17 bp, Arabidopsis thaliana
atcgtgttgcggtttaa

SEQ ID NO: 53274 - DNA, 17 bp, Arabidopsis thaliana
atcgttaagaatttcgt

SEQ ID NO: 53275 - DNA, 17 bp, Arabidopsis thaliana
atcgttaagtccagtca

SEQ ID NO: 53276 - DNA, 17 bp, Arabidopsis thaliana
atcgttaccccgcatct

SEQ ID NO: 53277 - DNA, 17 bp, Arabidopsis thaliana
atcgttacgaatgtgag

SEQ ID NO: 53278 - DNA, 17 bp, Arabidopsis thaliana
atcgttacgtctcgccg

SEQ ID NO: 53279 - DNA, 17 bp, Arabidopsis thaliana
atcgttagacttggcac

SEQ ID NO: 53280 - DNA, 17 bp, Arabidopsis thaliana
atcgttagatgataaaa

SEQ ID NO: 53281 - DNA, 17 bp, Arabidopsis thaliana
atcgttaggggcgtcct

SEQ ID NO: 53282 - DNA, 17 bp, Arabidopsis thaliana
atcgttaggtccagtca

SEQ ID NO: 53283 - DNA, 17 bp, Arabidopsis thaliana
atcgttagttgttggct

SEQ ID NO: 53284 - DNA, 17 bp, Arabidopsis thaliana
atcgttatcgcttaatc

SEQ ID NO: 53285 - DNA, 17 bp, Arabidopsis thaliana
atcgttcaaagctgaca

SEQ ID NO: 53286 - DNA, 17 bp, Arabidopsis thaliana
atcgttcacaccctttg

SEQ ID NO: 53287 - DNA, 17 bp, Arabidopsis thaliana
atcgttcagatgttgac

SEQ ID NO: 53288 - DNA, 17 bp, Arabidopsis thaliana
atcgttcagatgttgat

SEQ ID NO: 53289 - DNA, 17 bp, Arabidopsis thaliana
atcgttcaggaattcgg

SEQ ID NO: 53290 - DNA, 17 bp, Arabidopsis thaliana
atcgttcaggtgagaac

SEQ ID NO: 53291 - DNA, 17 bp, Arabidopsis thaliana
atcgttcaggttcgttg

SEQ ID NO: 53292 - DNA, 17 bp, Arabidopsis thaliana
atcgttcagtcgacgga

SEQ ID NO: 53293 - DNA, 17 bp, Arabidopsis thaliana
atcgttcatcacggatt

SEQ ID NO: 53294 - DNA, 17 bp, Arabidopsis thaliana
atcgttcatctcttcgg

SEQ ID NO: 53295 - DNA, 17 bp, Arabidopsis thaliana
atcgttccaagtcgctt

SEQ ID NO: 53296 - DNA, 17 bp, Arabidopsis thaliana
atcgttccagtcagtga

SEQ ID NO: 53297 - DNA, 17 bp, Arabidopsis thaliana
atcgttccataacttga

SEQ ID NO: 53298 - DNA, 17 bp, Arabidopsis thaliana
atcgttccgacaatcat

SEQ ID NO: 53299 - DNA, 17 bp, Arabidopsis thaliana
atcgttccgattgttac

SEQ ID NO: 53300 - DNA, 17 bp, Arabidopsis thaliana
atcgttcctagctacag

SEQ ID NO: 53301 - DNA, 17 bp, Arabidopsis thaliana
atcgttcgacacagata

SEQ ID NO: 53302 - DNA, 17 bp, Arabidopsis thaliana
atcgttcggaccgcatg

SEQ ID NO: 53303 - DNA, 17 bp, Arabidopsis thaliana
atcgttcgggatgttga

SEQ ID NO: 53304 - DNA, 17 bp, Arabidopsis thaliana
atcgttcgtctgacttg

SEQ ID NO: 53305 - DNA, 17 bp, Arabidopsis thaliana
atcgttcgtctgacttt

SEQ ID NO: 53306 - DNA, 17 bp, Arabidopsis thaliana
atcgttctctttcctcg

SEQ ID NO: 53307 - DNA, 17 bp, Arabidopsis thaliana
atcgttgaacgtctcgg

SEQ ID NO: 53308 - DNA, 17 bp, Arabidopsis thaliana
atcgttgacaatcgccg

SEQ ID NO: 53309 - DNA, 17 bp, Arabidopsis thaliana
atcgttgacaccgccaa

SEQ ID NO: 53310 - DNA, 17 bp, Arabidopsis thaliana
atcgttgaccaaccgtt

SEQ ID NO: 53311 - DNA, 17 bp, Arabidopsis thaliana
atcgttgacccgaccaa

SEQ ID NO: 53312 - DNA, 17 bp, Arabidopsis thaliana
atcgttgacccgatcaa

SEQ ID NO: 53313 - DNA, 17 bp, Arabidopsis thaliana
atcgttgacccgcccaa

SEQ ID NO: 53314 - DNA, 17 bp, Arabidopsis thaliana
atcgttgacccggccaa

SEQ ID NO: 53315 - DNA, 17 bp, Arabidopsis thaliana
atcgttgacccggtcaa

SEQ ID NO: 53316 - DNA, 17 bp, Arabidopsis thaliana
atcgttgaccggtcatt

SEQ ID NO: 53317 - DNA, 17 bp, Arabidopsis thaliana
atcgttgacttggccat

SEQ ID NO: 53318 - DNA, 17 bp, Arabidopsis thaliana
atcgttgactttgctat

SEQ ID NO: 53319 - DNA, 17 bp, Arabidopsis thaliana
atcgttgagccacaaga

SEQ ID NO: 53320 - DNA, 17 bp, Arabidopsis thaliana
atcgttgattattcggt

SEQ ID NO: 53321 - DNA, 17 bp, Arabidopsis thaliana
atcgttgattcagccaa

SEQ ID NO: 53322 - DNA, 17 bp, Arabidopsis thaliana
atcgttgattcggccaa

SEQ ID NO: 53323 - DNA, 17 bp, Arabidopsis thaliana
atcgttgcaaacggcta

SEQ ID NO: 53324 - DNA, 17 bp, Arabidopsis thaliana
atcgttgcaacaagccc

SEQ ID NO: 53325 - DNA, 17 bp, Arabidopsis thaliana
atcgttgcaaggctctg

SEQ ID NO: 53326 - DNA, 17 bp, Arabidopsis thaliana
atcgttgcaatctcaac

SEQ ID NO: 53327 - DNA, 17 bp, Arabidopsis thaliana
atcgttgcagatcttaa

SEQ ID NO: 53328 - DNA, 17 bp, Arabidopsis thaliana
atcgttgcagggattac

SEQ ID NO: 53329 - DNA, 17 bp, Arabidopsis thaliana
atcgttgcagggattgc

SEQ ID NO: 53330 - DNA, 17 bp, Arabidopsis thaliana
atcgttgcaggtgctct

SEQ ID NO: 53331 - DNA, 17 bp, Arabidopsis thaliana
atcgttgcattcgactc

SEQ ID NO: 53332 - DNA, 17 bp, Arabidopsis thaliana
atcgttgcgacagcgac

SEQ ID NO: 53333 - DNA, 17 bp, Arabidopsis thaliana
atcgttgcttgcattgg

SEQ ID NO: 53334 - DNA, 17 bp, Arabidopsis thaliana
atcgttgctttggccga

SEQ ID NO: 53335 - DNA, 17 bp, Arabidopsis thaliana
atcgttggaacgctgct

SEQ ID NO: 53336 - DNA, 17 bp, Arabidopsis thaliana
atcgttggaccatcatg

SEQ ID NO: 53337 - DNA, 17 bp, Arabidopsis thaliana
atcgttggagatctcct

SEQ ID NO: 53338 - DNA, 17 bp, Arabidopsis thaliana
atcgttggagatctttt

SEQ ID NO: 53339 - DNA, 17 bp, Arabidopsis thaliana
atcgttggcggttcact

SEQ ID NO: 53340 - DNA, 17 bp, Arabidopsis thaliana
atcgttggctacgactt

SEQ ID NO: 53341 - DNA, 17 bp, Arabidopsis thaliana
atcgttggcttcttcgt

SEQ ID NO: 53342 - DNA, 17 bp, Arabidopsis thaliana
atcgttgggcatggtct

SEQ ID NO: 53343 - DNA, 17 bp, Arabidopsis thaliana
atcgttgggcatggttt

SEQ ID NO: 53344 - DNA, 17 bp, Arabidopsis thaliana
atcgttggtcgagtctc

SEQ ID NO: 53345 - DNA, 17 bp, Arabidopsis thaliana
atcgttggttgcattgg

SEQ ID NO: 53346 - DNA, 17 bp, Arabidopsis thaliana
atcgttggttggtgctg

SEQ ID NO: 53347 - DNA, 17 bp, Arabidopsis thaliana
atcgttgtagatctcat

SEQ ID NO: 53348 - DNA, 17 bp, Arabidopsis thaliana
atcgttgtagatctcct

SEQ ID NO: 53349 - DNA, 17 bp, Arabidopsis thaliana
atcgttgtagatctctt

SEQ ID NO: 53350 - DNA, 17 bp, Arabidopsis thaliana
atcgttgtccagaaatt

SEQ ID NO: 53351 - DNA, 17 bp, Arabidopsis thaliana
atcgttgtgactcttgt

SEQ ID NO: 53352 - DNA, 17 bp, Arabidopsis thaliana
atcgttgtggatatggg

SEQ ID NO: 53353 - DNA, 17 bp, Arabidopsis thaliana
atcgttgtgtatcgagt

SEQ ID NO: 53354 - DNA, 17 bp, Arabidopsis thaliana
atcgtttacagctcaca

SEQ ID NO: 53355 - DNA, 17 bp, Arabidopsis thaliana
atcgtttacattgcgga

SEQ ID NO: 53356 - DNA, 17 bp, Arabidopsis thaliana
atcgtttacctgcgttt

SEQ ID NO: 53357 - DNA, 17 bp, Arabidopsis thaliana
atcgtttaggcttgcca

SEQ ID NO: 53358 - DNA, 17 bp, Arabidopsis thaliana
atcgtttagtcgccgcg

SEQ ID NO: 53359 - DNA, 17 bp, Arabidopsis thaliana
atcgtttcggcctgtcg

SEQ ID NO: 53360 - DNA, 17 bp, Arabidopsis thaliana
atcgtttcttagccaat

SEQ ID NO: 53361 - DNA, 17 bp, Arabidopsis thaliana
atcgtttgacctgacac

SEQ ID NO: 53362 - DNA, 17 bp, Arabidopsis thaliana
atcgtttgacttgacaa

SEQ ID NO: 53363 - DNA, 17 bp, Arabidopsis thaliana
atcgtttgacttgacac

SEQ ID NO: 53364 - DNA, 17 bp, Arabidopsis thaliana
atcgtttgatttgacac

SEQ ID NO: 53365 - DNA, 17 bp, Arabidopsis thaliana
atcgtttgcagtgaggt

SEQ ID NO: 53366 - DNA, 17 bp, Arabidopsis thaliana
atcgtttgccgctaaac

SEQ ID NO: 53367 - DNA, 17 bp, Arabidopsis thaliana
atcgtttgcggcggctt

SEQ ID NO: 53368 - DNA, 17 bp, Arabidopsis thaliana
atcgtttgcgtccacat

SEQ ID NO: 53369 - DNA, 17 bp, Arabidopsis thaliana
atcgtttgcttgttgct

SEQ ID NO: 53370 - DNA, 17 bp, Arabidopsis thaliana
atcgtttggaccatcgt

SEQ ID NO: 53371 - DNA, 17 bp, Arabidopsis thaliana
atcgtttgtagtagtgt

SEQ ID NO: 53372 - DNA, 17 bp, Arabidopsis thaliana
atcgttttcaattcaca

SEQ ID NO: 53373 - DNA, 17 bp, Arabidopsis thaliana
atcgttttctctatgtg

SEQ ID NO: 53374 - DNA, 17 bp, Arabidopsis thaliana
atcgttttctctgtgtg

SEQ ID NO: 53375 - DNA, 17 bp, Arabidopsis thaliana
atcgttttgcctctgct

SEQ ID NO: 53376 - DNA, 17 bp, Arabidopsis thaliana
atcgttttgcggatgaa

SEQ ID NO: 53377 - DNA, 17 bp, Arabidopsis thaliana
atcgttttttcagttag

SEQ ID NO: 53378 - DNA, 17 bp, Arabidopsis thaliana
atcgttttttctgtgtg

SEQ ID NO: 53379 - DNA, 17 bp, Arabidopsis thaliana
atcgtttttttacggga

SEQ ID NO: 53380 - DNA, 17 bp, Arabidopsis thaliana
atctaaaaccatggttc

SEQ ID NO: 53381 - DNA, 17 bp, Arabidopsis thaliana
atctaaaactgctccga

SEQ ID NO: 53382 - DNA, 17 bp, Arabidopsis thaliana
atctaaaagtgcctaaa

SEQ ID NO: 53383 - DNA, 17 bp, Arabidopsis thaliana
atctaaacaggggcgga

SEQ ID NO: 53384 - DNA, 17 bp, Arabidopsis thaliana
atctaaacccatcgaaa

SEQ ID NO: 53385 - DNA, 17 bp, Arabidopsis thaliana
atctaaacccgtcaatt

SEQ ID NO: 53386 - DNA, 17 bp, Arabidopsis thaliana
atctaaaccgcgaatga

SEQ ID NO: 53387 - DNA, 17 bp, Arabidopsis thaliana
atctaaacgatggtaag

SEQ ID NO: 53388 - DNA, 17 bp, Arabidopsis thaliana
atctaaacgcgagacag

SEQ ID NO: 53389 - DNA, 17 bp, Arabidopsis thaliana
atctaaactacattcca

SEQ ID NO: 53390 - DNA, 17 bp, Arabidopsis thaliana
atctaaacttaacgttc

SEQ ID NO: 53391 - DNA, 17 bp, Arabidopsis thaliana
atctaaagatgattcgc

SEQ ID NO: 53392 - DNA, 17 bp, Arabidopsis thaliana
atctaaaggattcctct

SEQ ID NO: 53393 - DNA, 17 bp, Arabidopsis thaliana
atctaaaggcgggtcat

SEQ ID NO: 53394 - DNA, 17 bp, Arabidopsis thaliana
atctaaagtgccttctc

SEQ ID NO: 53395 - DNA, 17 bp, Arabidopsis thaliana
atctaaatgacgttgac

SEQ ID NO: 53396 - DNA, 17 bp, Arabidopsis thaliana
atctaaatgcggaagtg

SEQ ID NO: 53397 - DNA, 17 bp, Arabidopsis thaliana
atctaaatgttgagttc

SEQ ID NO: 53398 - DNA, 17 bp, Arabidopsis thaliana
atctaacacggtgaagc

SEQ ID NO: 53399 - DNA, 17 bp, Arabidopsis thaliana
atctaaccaccggactc

SEQ ID NO: 53400 - DNA, 17 bp, Arabidopsis thaliana
atctaaccacttgctcg

SEQ ID NO: 53401 - DNA, 17 bp, Arabidopsis thaliana
atctaaccatgtgtgct

SEQ ID NO: 53402 - DNA, 17 bp, Arabidopsis thaliana
atctaaccgaattttga

SEQ ID NO: 53403 - DNA, 17 bp, Arabidopsis thaliana
atctaaccgcttcatca

SEQ ID NO: 53404 - DNA, 17 bp, Arabidopsis thaliana
atctaaccggattttgg

SEQ ID NO: 53405 - DNA, 17 bp, Arabidopsis thaliana
atctaacctcgactttt

SEQ ID NO: 53406 - DNA, 17 bp, Arabidopsis thaliana
atctaacctggtgtcgg

SEQ ID NO: 53407 - DNA, 17 bp, Arabidopsis thaliana
atctaacgatccgtcct

SEQ ID NO: 53408 - DNA, 17 bp, Arabidopsis thaliana
atctaacgggtttcggg

SEQ ID NO: 53409 - DNA, 17 bp, Arabidopsis thaliana
atctaactcgcggtccg

SEQ ID NO: 53410 - DNA, 17 bp, Arabidopsis thaliana
atctaactcgtcgatta

SEQ ID NO: 53411 - DNA, 17 bp, Arabidopsis thaliana
atctaactgcggtatac

SEQ ID NO: 53412 - DNA, 17 bp, Arabidopsis thaliana
atctaactggattttgg

SEQ ID NO: 53413 - DNA, 17 bp, Arabidopsis thaliana
atctaacttttgtttgt

SEQ ID NO: 53414 - DNA, 17 bp, Arabidopsis thaliana
atctaagactactggag

SEQ ID NO: 53415 - DNA, 17 bp, Arabidopsis thaliana
atctaagagattacggg

SEQ ID NO: 53416 - DNA, 17 bp, Arabidopsis thaliana
atctaagatggcaggaa

SEQ ID NO: 53417 - DNA, 17 bp, Arabidopsis thaliana
atctaagattctcgcag

SEQ ID NO: 53418 - DNA, 17 bp, Arabidopsis thaliana
atctaagatttctctcg

SEQ ID NO: 53419 - DNA, 17 bp, Arabidopsis thaliana
atctaagcaaatcggtt

SEQ ID NO: 53420 - DNA, 17 bp, Arabidopsis thaliana
atctaagcagtcggcta

SEQ ID NO: 53421 - DNA, 17 bp, Arabidopsis thaliana
atctaagcagtctgagg

SEQ ID NO: 53422 - DNA, 17 bp, Arabidopsis thaliana
atctaagcccatcatcc

SEQ ID NO: 53423 - DNA, 17 bp, Arabidopsis thaliana
atctaagcccatcatct

SEQ ID NO: 53424 - DNA, 17 bp, Arabidopsis thaliana
atctaagcgtggttcag

SEQ ID NO: 53425 - DNA, 17 bp, Arabidopsis thaliana
atctaagctgaacagct

SEQ ID NO: 53426 - DNA, 17 bp, Arabidopsis thaliana
atctaagctgcagagat

SEQ ID NO: 53427 - DNA, 17 bp, Arabidopsis thaliana
atctaagcttgatcttt

SEQ ID NO: 53428 - DNA, 17 bp, Arabidopsis thaliana
atctaagcttgatttgt

SEQ ID NO: 53429 - DNA, 17 bp, Arabidopsis thaliana
atctaagcttttcgaga

SEQ ID NO: 53430 - DNA, 17 bp, Arabidopsis thaliana
atctaaggctctggtca

SEQ ID NO: 53431 - DNA, 17 bp, Arabidopsis thaliana
atctaagggattcaagt

SEQ ID NO: 53432 - DNA, 17 bp, Arabidopsis thaliana
atctaaggtcatctcca

SEQ ID NO: 53433 - DNA, 17 bp, Arabidopsis thaliana
atctaaggtttgctgct

SEQ ID NO: 53434 - DNA, 17 bp, Arabidopsis thaliana
atctaagtccatctaga

SEQ ID NO: 53435 - DNA, 17 bp, Arabidopsis thaliana
atctaagtctgctccgg

SEQ ID NO: 53436 - DNA, 17 bp, Arabidopsis thaliana
atctaagtctgggggag

SEQ ID NO: 53437 - DNA, 17 bp, Arabidopsis thaliana
atctaagtgccaccgca

SEQ ID NO: 53438 - DNA, 17 bp, Arabidopsis thaliana
atctaagtgctgagttc

SEQ ID NO: 53439 - DNA, 17 bp, Arabidopsis thaliana
atctaagtgttgagcta

SEQ ID NO: 53440 - DNA, 17 bp, Arabidopsis thaliana
atctaagtgttgagctc

SEQ ID NO: 53441 - DNA, 17 bp, Arabidopsis thaliana
atctaagtgttgagtcc

SEQ ID NO: 53442 - DNA, 17 bp, Arabidopsis thaliana
atctaagttcaccgtgg

SEQ ID NO: 53443 - DNA, 17 bp, Arabidopsis thaliana
atctaagttccccgtgg

SEQ ID NO: 53444 - DNA, 17 bp, Arabidopsis thaliana
atctaagttccggtgag

SEQ ID NO: 53445 - DNA, 17 bp, Arabidopsis thaliana
atctaagttcgaccatc

SEQ ID NO: 53446 - DNA, 17 bp, Arabidopsis thaliana
atctaagttcgaccctc

SEQ ID NO: 53447 - DNA, 17 bp, Arabidopsis thaliana
atctaatacccgtggat

SEQ ID NO: 53448 - DNA, 17 bp, Arabidopsis thaliana
atctaataccgggttga

SEQ ID NO: 53449 - DNA, 17 bp, Arabidopsis thaliana
atctaatatccatggat

SEQ ID NO: 53450 - DNA, 17 bp, Arabidopsis thaliana
atctaatatccgtgggt

SEQ ID NO: 53451 - DNA, 17 bp, Arabidopsis thaliana
atctaatcccgttcagt

SEQ ID NO: 53452 - DNA, 17 bp, Arabidopsis thaliana
atctaatcgcagcagat

SEQ ID NO: 53453 - DNA, 17 bp, Arabidopsis thaliana
atctaatcgcagtatag

SEQ ID NO: 53454 - DNA, 17 bp, Arabidopsis thaliana
atctaatcggattcgag

SEQ ID NO: 53455 - DNA, 17 bp, Arabidopsis thaliana
atctaatcgggttcgga

SEQ ID NO: 53456 - DNA, 17 bp, Arabidopsis thaliana
atctaatctccatcacc

SEQ ID NO: 53457 - DNA, 17 bp, Arabidopsis thaliana
atctaatgactcacgga

SEQ ID NO: 53458 - DNA, 17 bp, Arabidopsis thaliana
atctaatgactcacggg

SEQ ID NO: 53459 - DNA, 17 bp, Arabidopsis thaliana
atctaatgactggtcga

SEQ ID NO: 53460 - DNA, 17 bp, Arabidopsis thaliana
atctaatggactctaag

SEQ ID NO: 53461 - DNA, 17 bp, Arabidopsis thaliana
atctaattagtgacgcg

SEQ ID NO: 53462 - DNA, 17 bp, Arabidopsis thaliana
atctaattagtgtcgct

SEQ ID NO: 53463 - DNA, 17 bp, Arabidopsis thaliana
atctaattcgttaacac

SEQ ID NO: 53464 - DNA, 17 bp, Arabidopsis thaliana
atctaatttcaaaagaa

SEQ ID NO: 53465 - DNA, 17 bp, Arabidopsis thaliana
atctaatttgtctgcgg

SEQ ID NO: 53466 - DNA, 17 bp, Arabidopsis thaliana
atctaatttttggccta

SEQ ID NO: 53467 - DNA, 17 bp, Arabidopsis thaliana
atctacaacctggtggt

SEQ ID NO: 53468 - DNA, 17 bp, Arabidopsis thaliana
atctacaatggtgggct

SEQ ID NO: 53469 - DNA, 17 bp, Arabidopsis thaliana
atctacaattgttagcc

SEQ ID NO: 53470 - DNA, 17 bp, Arabidopsis thaliana
atctacacagatttcag

SEQ ID NO: 53471 - DNA, 17 bp, Arabidopsis thaliana
atctacaccgaaagtga

SEQ ID NO: 53472 - DNA, 17 bp, Arabidopsis thaliana
atctacaccgaaagtgc

SEQ ID NO: 53473 - DNA, 17 bp, Arabidopsis thaliana
atctacaccgaaagtgg

SEQ ID NO: 53474 - DNA, 17 bp, Arabidopsis thaliana
atctacaccgacggtgc

SEQ ID NO: 53475 - DNA, 17 bp, Arabidopsis thaliana
atctacacctttgttcc

SEQ ID NO: 53476 - DNA, 17 bp, Arabidopsis thaliana
atctacacgtatttgcg

SEQ ID NO: 53477 - DNA, 17 bp, Arabidopsis thaliana
atctacacgtgcatatt

SEQ ID NO: 53478 - DNA, 17 bp, Arabidopsis thaliana
atctacactggcactgg

SEQ ID NO: 53479 - DNA, 17 bp, Arabidopsis thaliana
atctacactttgcgtgg

SEQ ID NO: 53480 - DNA, 17 bp, Arabidopsis thaliana
atctacactttgtgtga

SEQ ID NO: 53481 - DNA, 17 bp, Arabidopsis thaliana
atctacagagcgtgctc

SEQ ID NO: 53482 - DNA, 17 bp, Arabidopsis thaliana
atctacagcacaatcat

SEQ ID NO: 53483 - DNA, 17 bp, Arabidopsis thaliana
atctacagcagagggca

SEQ ID NO: 53484 - DNA, 17 bp, Arabidopsis thaliana
atctacagctataaccg

SEQ ID NO: 53485 - DNA, 17 bp, Arabidopsis thaliana
atctacagcttgtgccg

SEQ ID NO: 53486 - DNA, 17 bp, Arabidopsis thaliana
atctacagctttagttc

SEQ ID NO: 53487 - DNA, 17 bp, Arabidopsis thaliana
atctacagctttcggac

SEQ ID NO: 53488 - DNA, 17 bp, Arabidopsis thaliana
atctacaggatgcgact

SEQ ID NO: 53489 - DNA, 17 bp, Arabidopsis thaliana
atctacagtgttagttg

SEQ ID NO: 53490 - DNA, 17 bp, Arabidopsis thaliana
atctacagttaagcatg

SEQ ID NO: 53491 - DNA, 17 bp, Arabidopsis thaliana
atctacagttcagatag

SEQ ID NO: 53492 - DNA, 17 bp, Arabidopsis thaliana
atctacagttccaaggt

SEQ ID NO: 53493 - DNA, 17 bp, Arabidopsis thaliana
atctacatacactgcac

SEQ ID NO: 53494 - DNA, 17 bp, Arabidopsis thaliana
atctacatacttgcgtg

SEQ ID NO: 53495 - DNA, 17 bp, Arabidopsis thaliana
atctacatcttaggtgg

SEQ ID NO: 53496 - DNA, 17 bp, Arabidopsis thaliana
atctacatcttggttgt

SEQ ID NO: 53497 - DNA, 17 bp, Arabidopsis thaliana
atctacatgaaccgctt

SEQ ID NO: 53498 - DNA, 17 bp, Arabidopsis thaliana
atctaccagagatttgg

SEQ ID NO: 53499 - DNA, 17 bp, Arabidopsis thaliana
atctaccatgacgccaa

SEQ ID NO: 53500 - DNA, 17 bp, Arabidopsis thaliana
atctacccatgtgtcac

SEQ ID NO: 53501 - DNA, 17 bp, Arabidopsis thaliana
atctaccgacgccggag

SEQ ID NO: 53502 - DNA, 17 bp, Arabidopsis thaliana
atctaccgagagcatag

SEQ ID NO: 53503 - DNA, 17 bp, Arabidopsis thaliana
atctaccgctacagcta

SEQ ID NO: 53504 - DNA, 17 bp, Arabidopsis thaliana
atctaccgctgcaacct

SEQ ID NO: 53505 - DNA, 17 bp, Arabidopsis thaliana
atctacctcgcggttgc

SEQ ID NO: 53506 - DNA, 17 bp, Arabidopsis thaliana
atctacctctttggagc

SEQ ID NO: 53507 - DNA, 17 bp, Arabidopsis thaliana
atctaccttgataactt

SEQ ID NO: 53508 - DNA, 17 bp, Arabidopsis thaliana
atctaccttttcctgaa

SEQ ID NO: 53509 - DNA, 17 bp, Arabidopsis thaliana
atctaccttttggttgt

SEQ ID NO: 53510 - DNA, 17 bp, Arabidopsis thaliana
atctacgaaagcgggct

SEQ ID NO: 53511 - DNA, 17 bp, Arabidopsis thaliana
atctacgaataacggat

SEQ ID NO: 53512 - DNA, 17 bp, Arabidopsis thaliana
atctacgacagttacct

SEQ ID NO: 53513 - DNA, 17 bp, Arabidopsis thaliana
atctacgagatcagtca

SEQ ID NO: 53514 - DNA, 17 bp, Arabidopsis thaliana
atctacgaggtcagtca

SEQ ID NO: 53515 - DNA, 17 bp, Arabidopsis thaliana
atctacgagtaacagat

SEQ ID NO: 53516 - DNA, 17 bp, Arabidopsis thaliana
atctacgataccaactc

SEQ ID NO: 53517 - DNA, 17 bp, Arabidopsis thaliana
atctacgatgtcagcgc

SEQ ID NO: 53518 - DNA, 17 bp, Arabidopsis thaliana
atctacgattggatcag

SEQ ID NO: 53519 - DNA, 17 bp, Arabidopsis thaliana
atctacgattgtgctcc

SEQ ID NO: 53520 - DNA, 17 bp, Arabidopsis thaliana
atctacgcaagcactct

SEQ ID NO: 53521 - DNA, 17 bp, Arabidopsis thaliana
atctacgcataatggga

SEQ ID NO: 53522 - DNA, 17 bp, Arabidopsis thaliana
atctacgcggatatcaa

SEQ ID NO: 53523 - DNA, 17 bp, Arabidopsis thaliana
atctacgctgctcgccg

SEQ ID NO: 53524 - DNA, 17 bp, Arabidopsis thaliana
atctacggaatagggaa

SEQ ID NO: 53525 - DNA, 17 bp, Arabidopsis thaliana
atctacggaccgtgtac

SEQ ID NO: 53526 - DNA, 17 bp, Arabidopsis thaliana
atctacggaccgttttt

SEQ ID NO: 53527 - DNA, 17 bp, Arabidopsis thaliana
atctacggactagggaa

SEQ ID NO: 53528 - DNA, 17 bp, Arabidopsis thaliana
atctacggagtcgtagt

SEQ ID NO: 53529 - DNA, 17 bp, Arabidopsis thaliana
atctacggatcgcccag

SEQ ID NO: 53530 - DNA, 17 bp, Arabidopsis thaliana
atctacggcagctggat

SEQ ID NO: 53531 - DNA, 17 bp, Arabidopsis thaliana
atctacggctacagtca

SEQ ID NO: 53532 - DNA, 17 bp, Arabidopsis thaliana
atctacggggttgacaa

SEQ ID NO: 53533 - DNA, 17 bp, Arabidopsis thaliana
atctacggtgcccgcct

SEQ ID NO: 53534 - DNA, 17 bp, Arabidopsis thaliana
atctacggtttggtgga

SEQ ID NO: 53535 - DNA, 17 bp, Arabidopsis thaliana
atctacgtaatctggcg

SEQ ID NO: 53536 - DNA, 17 bp, Arabidopsis thaliana
atctacgtacatggctc

SEQ ID NO: 53537 - DNA, 17 bp, Arabidopsis thaliana
atctacgtcatgcttct

SEQ ID NO: 53538 - DNA, 17 bp, Arabidopsis thaliana
atctacgtccaaccgca

SEQ ID NO: 53539 - DNA, 17 bp, Arabidopsis thaliana
atctacgtccaacggca

SEQ ID NO: 53540 - DNA, 17 bp, Arabidopsis thaliana
atctacgtctgtgacgg

SEQ ID NO: 53541 - DNA, 17 bp, Arabidopsis thaliana
atctacgttcggtttgg

SEQ ID NO: 53542 - DNA, 17 bp, Arabidopsis thaliana
atctacgttgctcgccg

SEQ ID NO: 53543 - DNA, 17 bp, Arabidopsis thaliana
atctacgttgggttctt

SEQ ID NO: 53544 - DNA, 17 bp, Arabidopsis thaliana
atctactatcgcacccg

SEQ ID NO: 53545 - DNA, 17 bp, Arabidopsis thaliana
atctactatggccgcta

SEQ ID NO: 53546 - DNA, 17 bp, Arabidopsis thaliana
atctactatgggttccg

SEQ ID NO: 53547 - DNA, 17 bp, Arabidopsis thaliana
atctactattgcaccgc

SEQ ID NO: 53548 - DNA, 17 bp, Arabidopsis thaliana
atctactcgaatgtctg

SEQ ID NO: 53549 - DNA, 17 bp, Arabidopsis thaliana
atctactcgatccatta

SEQ ID NO: 53550 - DNA, 17 bp, Arabidopsis thaliana
atctactcgctttgttt

SEQ ID NO: 53551 - DNA, 17 bp, Arabidopsis thaliana
atctactcgttggaagc

SEQ ID NO: 53552 - DNA, 17 bp, Arabidopsis thaliana
atctactcttgcgaagt

SEQ ID NO: 53553 - DNA, 17 bp, Arabidopsis thaliana
atctactgatgttgcta

SEQ ID NO: 53554 - DNA, 17 bp, Arabidopsis thaliana
atctactgatgttgctg

SEQ ID NO: 53555 - DNA, 17 bp, Arabidopsis thaliana
atctactgatgtttctg

SEQ ID NO: 53556 - DNA, 17 bp, Arabidopsis thaliana
atctactgcatacttgc

SEQ ID NO: 53557 - DNA, 17 bp, Arabidopsis thaliana
atctactgccacgtgtc

SEQ ID NO: 53558 - DNA, 17 bp, Arabidopsis thaliana
atctactgcggatcact

SEQ ID NO: 53559 - DNA, 17 bp, Arabidopsis thaliana
atctactggaagaaagg

SEQ ID NO: 53560 - DNA, 17 bp, Arabidopsis thaliana
atctactggcgggtcag

SEQ ID NO: 53561 - DNA, 17 bp, Arabidopsis thaliana
atctactgttctttccg

SEQ ID NO: 53562 - DNA, 17 bp, Arabidopsis thaliana
atctactgttctttcct

SEQ ID NO: 53563 - DNA, 17 bp, Arabidopsis thaliana
atctactgttctttctt

SEQ ID NO: 53564 - DNA, 17 bp, Arabidopsis thaliana
atctactgtttttgtgt

SEQ ID NO: 53565 - DNA, 17 bp, Arabidopsis thaliana
atctacttactaatgca

SEQ ID NO: 53566 - DNA, 17 bp, Arabidopsis thaliana
atctacttccgcgttga

SEQ ID NO: 53567 - DNA, 17 bp, Arabidopsis thaliana
atctacttcttggttgt

SEQ ID NO: 53568 - DNA, 17 bp, Arabidopsis thaliana
atctacttgatccgctt

SEQ ID NO: 53569 - DNA, 17 bp, Arabidopsis thaliana
atctacttgctcgaaac

SEQ ID NO: 53570 - DNA, 17 bp, Arabidopsis thaliana
atctactttcgttgatg

SEQ ID NO: 53571 - DNA, 17 bp, Arabidopsis thaliana
atctactttgggtgcct

SEQ ID NO: 53572 - DNA, 17 bp, Arabidopsis thaliana
atctagactcaggggga

SEQ ID NO: 53573 - DNA, 17 bp, Arabidopsis thaliana
atctagatcttccagga

SEQ ID NO: 53574 - DNA, 17 bp, Arabidopsis thaliana
atctagatcttgtcacc

SEQ ID NO: 53575 - DNA, 17 bp, Arabidopsis thaliana
atctagattgcgggtaa

SEQ ID NO: 53576 - DNA, 17 bp, Arabidopsis thaliana
atctagcatttgaggcg

SEQ ID NO: 53577 - DNA, 17 bp, Arabidopsis thaliana
atctagccttctccatc

SEQ ID NO: 53578 - DNA, 17 bp, Arabidopsis thaliana
atctagcgggtttggat

SEQ ID NO: 53579 - DNA, 17 bp, Arabidopsis thaliana
atctagcggtttctatg

SEQ ID NO: 53580 - DNA, 17 bp, Arabidopsis thaliana
atctagctgagcaaata

SEQ ID NO: 53581 - DNA, 17 bp, Arabidopsis thaliana
atctaggattaccagag

SEQ ID NO: 53582 - DNA, 17 bp, Arabidopsis thaliana
atctaggccacaagtta

SEQ ID NO: 53583 - DNA, 17 bp, Arabidopsis thaliana
atctaggcccatttcat

SEQ ID NO: 53584 - DNA, 17 bp, Arabidopsis thaliana
atctaggcccggctctt

SEQ ID NO: 53585 - DNA, 17 bp, Arabidopsis thaliana
atctaggctttcttacg

SEQ ID NO: 53586 - DNA, 17 bp, Arabidopsis thaliana
atctagggattttggcc

SEQ ID NO: 53587 - DNA, 17 bp, Arabidopsis thaliana
atctaggttctctggat

SEQ ID NO: 53588 - DNA, 17 bp, Arabidopsis thaliana
atctagtcgacattgcg

SEQ ID NO: 53589 - DNA, 17 bp, Arabidopsis thaliana
atctagtcgcatcctgt

SEQ ID NO: 53590 - DNA, 17 bp, Arabidopsis thaliana
atctagtcttaacgagc

SEQ ID NO: 53591 - DNA, 17 bp, Arabidopsis thaliana
atctagtctttgaacgc

SEQ ID NO: 53592 - DNA, 17 bp, Arabidopsis thaliana
atctagttccggtgaca

SEQ ID NO: 53593 - DNA, 17 bp, Arabidopsis thaliana
atctagttctggctcct

SEQ ID NO: 53594 - DNA, 17 bp, Arabidopsis thaliana
atctataacggatacgg

SEQ ID NO: 53595 - DNA, 17 bp, Arabidopsis thaliana
atctataatgatcattg

SEQ ID NO: 53596 - DNA, 17 bp, Arabidopsis thaliana
atctatacatgtcgcag

SEQ ID NO: 53597 - DNA, 17 bp, Arabidopsis thaliana
atctataccgcatttgg

SEQ ID NO: 53598 - DNA, 17 bp, Arabidopsis thaliana
atctatacggcaagctt

SEQ ID NO: 53599 - DNA, 17 bp, Arabidopsis thaliana
atctatagaactcgtac

SEQ ID NO: 53600 - DNA, 17 bp, Arabidopsis thaliana
atctatagaggccggca

SEQ ID NO: 53601 - DNA, 17 bp, Arabidopsis thaliana
atctatagattgacccg

SEQ ID NO: 53602 - DNA, 17 bp, Arabidopsis thaliana
atctatagttgaacgcg

SEQ ID NO: 53603 - DNA, 17 bp, Arabidopsis thaliana
atctatcaacgatcgag

SEQ ID NO: 53604 - DNA, 17 bp, Arabidopsis thaliana
atctatcactgctccca

SEQ ID NO: 53605 - DNA, 17 bp, Arabidopsis thaliana
atctatcagcactgaca

SEQ ID NO: 53606 - DNA, 17 bp, Arabidopsis thaliana
atctatcaggtggcaca

SEQ ID NO: 53607 - DNA, 17 bp, Arabidopsis thaliana
atctatcagtcggattt

SEQ ID NO: 53608 - DNA, 17 bp, Arabidopsis thaliana
atctatccaaacccgtc

SEQ ID NO: 53609 - DNA, 17 bp, Arabidopsis thaliana
atctatcccgaccgccg

SEQ ID NO: 53610 - DNA, 17 bp, Arabidopsis thaliana
atctatcgaggtgttga

SEQ ID NO: 53611 - DNA, 17 bp, Arabidopsis thaliana
atctatcgcctagggta

SEQ ID NO: 53612 - DNA, 17 bp, Arabidopsis thaliana
atctatcgggtccgagg

SEQ ID NO: 53613 - DNA, 17 bp, Arabidopsis thaliana
atctatctatgaccagg

SEQ ID NO: 53614 - DNA, 17 bp, Arabidopsis thaliana
atctatctatggctaaa

SEQ ID NO: 53615 - DNA, 17 bp, Arabidopsis thaliana
atctatctgactatctc

SEQ ID NO: 53616 - DNA, 17 bp, Arabidopsis thaliana
atctatctgctgattcc

SEQ ID NO: 53617 - DNA, 17 bp, Arabidopsis thaliana
atctatctggcttggta

SEQ ID NO: 53618 - DNA, 17 bp, Arabidopsis thaliana
atctatctgttacctcg

SEQ ID NO: 53619 - DNA, 17 bp, Arabidopsis thaliana
atctatctttgctggat

SEQ ID NO: 53620 - DNA, 17 bp, Arabidopsis thaliana
atctatgaccaggagca

SEQ ID NO: 53621 - DNA, 17 bp, Arabidopsis thaliana
atctatgaccaggatga

SEQ ID NO: 53622 - DNA, 17 bp, Arabidopsis thaliana
atctatgactgctccaa

SEQ ID NO: 53623 - DNA, 17 bp, Arabidopsis thaliana
atctatgactgctccag

SEQ ID NO: 53624 - DNA, 17 bp, Arabidopsis thaliana
atctatgaggttctggg

SEQ ID NO: 53625 - DNA, 17 bp, Arabidopsis thaliana
atctatggaggtgttga

SEQ ID NO: 53626 - DNA, 17 bp, Arabidopsis thaliana
atctatggatggtgtcc

SEQ ID NO: 53627 - DNA, 17 bp, Arabidopsis thaliana
atctatggttgacaatc

SEQ ID NO: 53628 - DNA, 17 bp, Arabidopsis thaliana
atctatggtttcgctac

SEQ ID NO: 53629 - DNA, 17 bp, Arabidopsis thaliana
atctatgtcgtctgatc

SEQ ID NO: 53630 - DNA, 17 bp, Arabidopsis thaliana
atctatgtggaaagatt

SEQ ID NO: 53631 - DNA, 17 bp, Arabidopsis thaliana
atctatgtgggacggag

SEQ ID NO: 53632 - DNA, 17 bp, Arabidopsis thaliana
atctatgtgttgtggcc

SEQ ID NO: 53633 - DNA, 17 bp, Arabidopsis thaliana
atctatgttcgggagtt

SEQ ID NO: 53634 - DNA, 17 bp, Arabidopsis thaliana
atctattacccgtggat

SEQ ID NO: 53635 - DNA, 17 bp, Arabidopsis thaliana
atctattactgttcatc

SEQ ID NO: 53636 - DNA, 17 bp, Arabidopsis thaliana
atctattatcgacctga

SEQ ID NO: 53637 - DNA, 17 bp, Arabidopsis thaliana
atctattcctgcaaatt

SEQ ID NO: 53638 - DNA, 17 bp, Arabidopsis thaliana
atctattcgggttcgga

SEQ ID NO: 53639 - DNA, 17 bp, Arabidopsis thaliana
atctattcgggttcggg

SEQ ID NO: 53640 - DNA, 17 bp, Arabidopsis thaliana
atctattctggtgtcct

SEQ ID NO: 53641 - DNA, 17 bp, Arabidopsis thaliana
atctattgagatctcac

SEQ ID NO: 53642 - DNA, 17 bp, Arabidopsis thaliana
atctattggctttgttc

SEQ ID NO: 53643 - DNA, 17 bp, Arabidopsis thaliana
atctattggttttctgt

SEQ ID NO: 53644 - DNA, 17 bp, Arabidopsis thaliana
atctattgttttgtcgc

SEQ ID NO: 53645 - DNA, 17 bp, Arabidopsis thaliana
atctatttgacacatgt

SEQ ID NO: 53646 - DNA, 17 bp, Arabidopsis thaliana
atctcaaacccccttgc

SEQ ID NO: 53647 - DNA, 17 bp, Arabidopsis thaliana
atctcaaagccattcta

SEQ ID NO: 53648 - DNA, 17 bp, Arabidopsis thaliana
atctcaaagctcatagt

SEQ ID NO: 53649 - DNA, 17 bp, Arabidopsis thaliana
atctcaaatcgaaactg

SEQ ID NO: 53650 - DNA, 17 bp, Arabidopsis thaliana
atctcaaattttggatg

SEQ ID NO: 53651 - DNA, 17 bp, Arabidopsis thaliana
atctcaacagcgtcgtg

SEQ ID NO: 53652 - DNA, 17 bp, Arabidopsis thaliana
atctcaaccgaaggtcc

SEQ ID NO: 53653 - DNA, 17 bp, Arabidopsis thaliana
atctcaaccgaaggtgc

SEQ ID NO: 53654 - DNA, 17 bp, Arabidopsis thaliana
atctcaacctcagaccg

SEQ ID NO: 53655 - DNA, 17 bp, Arabidopsis thaliana
atctcaacggtggcaca

SEQ ID NO: 53656 - DNA, 17 bp, Arabidopsis thaliana
atctcaactcttctgct

SEQ ID NO: 53657 - DNA, 17 bp, Arabidopsis thaliana
atctcaactggttctcg

SEQ ID NO: 53658 - DNA, 17 bp, Arabidopsis thaliana
atctcaacttgaccact

SEQ ID NO: 53659 - DNA, 17 bp, Arabidopsis thaliana
atctcaactttacatgc

SEQ ID NO: 53660 - DNA, 17 bp, Arabidopsis thaliana
atctcaactttccaccc

SEQ ID NO: 53661 - DNA, 17 bp, Arabidopsis thaliana
atctcaactttccactt

SEQ ID NO: 53662 - DNA, 17 bp, Arabidopsis thaliana
atctcaactttccatcc

SEQ ID NO: 53663 - DNA, 17 bp, Arabidopsis thaliana
atctcaacttttcaccc

SEQ ID NO: 53664 - DNA, 17 bp, Arabidopsis thaliana
atctcaacttttcatcc

SEQ ID NO: 53665 - DNA, 17 bp, Arabidopsis thaliana
atctcaagagactagat

SEQ ID NO: 53666 - DNA, 17 bp, Arabidopsis thaliana
atctcaagagcgattga

SEQ ID NO: 53667 - DNA, 17 bp, Arabidopsis thaliana
atctcaagaggtgaagt

SEQ ID NO: 53668 - DNA, 17 bp, Arabidopsis thaliana
atctcaagatgtcgcga

SEQ ID NO: 53669 - DNA, 17 bp, Arabidopsis thaliana
atctcaagattttgtgc

SEQ ID NO: 53670 - DNA, 17 bp, Arabidopsis thaliana
atctcaagcagctccga

SEQ ID NO: 53671 - DNA, 17 bp, Arabidopsis thaliana
atctcaagcgggttttg

SEQ ID NO: 53672 - DNA, 17 bp, Arabidopsis thaliana
atctcaagctcgcaggc

SEQ ID NO: 53673 - DNA, 17 bp, Arabidopsis thaliana
atctcaaggccggtgtt

SEQ ID NO: 53674 - DNA, 17 bp, Arabidopsis thaliana
atctcaagggctttgat

SEQ ID NO: 53675 - DNA, 17 bp, Arabidopsis thaliana
atctcaagtccgtcacg

SEQ ID NO: 53676 - DNA, 17 bp, Arabidopsis thaliana
atctcaagttttcggcg

SEQ ID NO: 53677 - DNA, 17 bp, Arabidopsis thaliana
atctcaatcagatactc

SEQ ID NO: 53678 - DNA, 17 bp, Arabidopsis thaliana
atctcaatcctccatcc

SEQ ID NO: 53679 - DNA, 17 bp, Arabidopsis thaliana
atctcaatcgcgggtgc

SEQ ID NO: 53680 - DNA, 17 bp, Arabidopsis thaliana
atctcaatgtgttgaca

SEQ ID NO: 53681 - DNA, 17 bp, Arabidopsis thaliana
atctcaatttcttggcc

SEQ ID NO: 53682 - DNA, 17 bp, Arabidopsis thaliana
atctcacaacttgggac

SEQ ID NO: 53683 - DNA, 17 bp, Arabidopsis thaliana
atctcacaccttagatt

SEQ ID NO: 53684 - DNA, 17 bp, Arabidopsis thaliana
atctcacacgtggtata

SEQ ID NO: 53685 - DNA, 17 bp, Arabidopsis thaliana
atctcacagaaaatgcc

SEQ ID NO: 53686 - DNA, 17 bp, Arabidopsis thaliana
atctcacagaacggtga

SEQ ID NO: 53687 - DNA, 17 bp, Arabidopsis thaliana
atctcacagaacggtgg

SEQ ID NO: 53688 - DNA, 17 bp, Arabidopsis thaliana
atctcacaggtagaagt

SEQ ID NO: 53689 - DNA, 17 bp, Arabidopsis thaliana
atctcaccaatggagat

SEQ ID NO: 53690 - DNA, 17 bp, Arabidopsis thaliana
atctcaccaatggagct

SEQ ID NO: 53691 - DNA, 17 bp, Arabidopsis thaliana
atctcacccacccaccc

SEQ ID NO: 53692 - DNA, 17 bp, Arabidopsis thaliana
atctcacgggaagtgtt

SEQ ID NO: 53693 - DNA, 17 bp, Arabidopsis thaliana
atctcacggggaacatg

SEQ ID NO: 53694 - DNA, 17 bp, Arabidopsis thaliana
atctcacggtggcacag

SEQ ID NO: 53695 - DNA, 17 bp, Arabidopsis thaliana
atctcacgtctccattc

SEQ ID NO: 53696 - DNA, 17 bp, Arabidopsis thaliana
atctcactgatggaaat

SEQ ID NO: 53697 - DNA, 17 bp, Arabidopsis thaliana
atctcactgtgatctat

SEQ ID NO: 53698 - DNA, 17 bp, Arabidopsis thaliana
atctcacttccatagcg

SEQ ID NO: 53699 - DNA, 17 bp, Arabidopsis thaliana
atctcactttgccaaat

SEQ ID NO: 53700 - DNA, 17 bp, Arabidopsis thaliana
atctcagaagatcaagg

SEQ ID NO: 53701 - DNA, 17 bp, Arabidopsis thaliana
atctcagacttaagaac

SEQ ID NO: 53702 - DNA, 17 bp, Arabidopsis thaliana
atctcagagaaacagtt

SEQ ID NO: 53703 - DNA, 17 bp, Arabidopsis thaliana
atctcagagataacgaa

SEQ ID NO: 53704 - DNA, 17 bp, Arabidopsis thaliana
atctcagattaactgat

SEQ ID NO: 53705 - DNA, 17 bp, Arabidopsis thaliana
atctcagattttgacct

SEQ ID NO: 53706 - DNA, 17 bp, Arabidopsis thaliana
atctcagcagtgcaggc

SEQ ID NO: 53707 - DNA, 17 bp, Arabidopsis thaliana
atctcagcatttgctcc

SEQ ID NO: 53708 - DNA, 17 bp, Arabidopsis thaliana
atctcagcccaacatta

SEQ ID NO: 53709 - DNA, 17 bp, Arabidopsis thaliana
atctcagccctttgtcg

SEQ ID NO: 53710 - DNA, 17 bp, Arabidopsis thaliana
atctcagccgacggtgt

SEQ ID NO: 53711 - DNA, 17 bp, Arabidopsis thaliana
atctcagccgtccacgt

SEQ ID NO: 53712 - DNA, 17 bp, Arabidopsis thaliana
atctcagcgaattacat

SEQ ID NO: 53713 - DNA, 17 bp, Arabidopsis thaliana
atctcagcgacggaccg

SEQ ID NO: 53714 - DNA, 17 bp, Arabidopsis thaliana
atctcagcgattggatc

SEQ ID NO: 53715 - DNA, 17 bp, Arabidopsis thaliana
atctcagcttctttgac

SEQ ID NO: 53716 - DNA, 17 bp, Arabidopsis thaliana
atctcaggaatttctcg

SEQ ID NO: 53717 - DNA, 17 bp, Arabidopsis thaliana
atctcaggagggatagt

SEQ ID NO: 53718 - DNA, 17 bp, Arabidopsis thaliana
atctcaggatacctcag

SEQ ID NO: 53719 - DNA, 17 bp, Arabidopsis thaliana
atctcaggatatctcag

SEQ ID NO: 53720 - DNA, 17 bp, Arabidopsis thaliana
atctcaggatgagattt

SEQ ID NO: 53721 - DNA, 17 bp, Arabidopsis thaliana
atctcaggcacttcttc

SEQ ID NO: 53722 - DNA, 17 bp, Arabidopsis thaliana
atctcaggcactttctt

SEQ ID NO: 53723 - DNA, 17 bp, Arabidopsis thaliana
atctcaggcgagcgagg

SEQ ID NO: 53724 - DNA, 17 bp, Arabidopsis thaliana
atctcaggcgtcgcagt

SEQ ID NO: 53725 - DNA, 17 bp, Arabidopsis thaliana
atctcaggcttcaaatc

SEQ ID NO: 53726 - DNA, 17 bp, Arabidopsis thaliana
atctcagggcttcatac

SEQ ID NO: 53727 - DNA, 17 bp, Arabidopsis thaliana
atctcaggtaagttgtc

SEQ ID NO: 53728 - DNA, 17 bp, Arabidopsis thaliana
atctcaggtggcagatt

SEQ ID NO: 53729 - DNA, 17 bp, Arabidopsis thaliana
atctcaggtttacactg

SEQ ID NO: 53730 - DNA, 17 bp, Arabidopsis thaliana
atctcagtaatccgagt

SEQ ID NO: 53731 - DNA, 17 bp, Arabidopsis thaliana
atctcagtagactgcgc

SEQ ID NO: 53732 - DNA, 17 bp, Arabidopsis thaliana
atctcagtcgacggtgt

SEQ ID NO: 53733 - DNA, 17 bp, Arabidopsis thaliana
atctcagtctaatccgc

SEQ ID NO: 53734 - DNA, 17 bp, Arabidopsis thaliana
atctcagtctaattcgt

SEQ ID NO: 53735 - DNA, 17 bp, Arabidopsis thaliana
atctcagtcttatcgtg

SEQ ID NO: 53736 - DNA, 17 bp, Arabidopsis thaliana
atctcagtgcgtctgat

SEQ ID NO: 53737 - DNA, 17 bp, Arabidopsis thaliana
atctcagtggatcgtgg

SEQ ID NO: 53738 - DNA, 17 bp, Arabidopsis thaliana
atctcagtttgccaaat

SEQ ID NO: 53739 - DNA, 17 bp, Arabidopsis thaliana
atctcagttttgggttt

SEQ ID NO: 53740 - DNA, 17 bp, Arabidopsis thaliana
atctcataacctgcttt

SEQ ID NO: 53741 - DNA, 17 bp, Arabidopsis thaliana
atctcatacccggtgtc

SEQ ID NO: 53742 - DNA, 17 bp, Arabidopsis thaliana
atctcatatcagggtct

SEQ ID NO: 53743 - DNA, 17 bp, Arabidopsis thaliana
atctcatcaaacctgat

SEQ ID NO: 53744 - DNA, 17 bp, Arabidopsis thaliana
atctcatcaccaccaca

SEQ ID NO: 53745 - DNA, 17 bp, Arabidopsis thaliana
atctcatcagcttcgcg

SEQ ID NO: 53746 - DNA, 17 bp, Arabidopsis thaliana
atctcatcagtagcgta

SEQ ID NO: 53747 - DNA, 17 bp, Arabidopsis thaliana
atctcatcctacttgcc

SEQ ID NO: 53748 - DNA, 17 bp, Arabidopsis thaliana
atctcatcgatcatcca

SEQ ID NO: 53749 - DNA, 17 bp, Arabidopsis thaliana
atctcatcgtggtggta

SEQ ID NO: 53750 - DNA, 17 bp, Arabidopsis thaliana
atctcatctgctgcctc

SEQ ID NO: 53751 - DNA, 17 bp, Arabidopsis thaliana
atctcatctgtttgcat

SEQ ID NO: 53752 - DNA, 17 bp, Arabidopsis thaliana
atctcatcttacttgcc

SEQ ID NO: 53753 - DNA, 17 bp, Arabidopsis thaliana
atctcatgcacacttgc

SEQ ID NO: 53754 - DNA, 17 bp, Arabidopsis thaliana
atctcatgccccgttga

SEQ ID NO: 53755 - DNA, 17 bp, Arabidopsis thaliana
atctcatggagatggcc

SEQ ID NO: 53756 - DNA, 17 bp, Arabidopsis thaliana
atctcatggagctgagt

SEQ ID NO: 53757 - DNA, 17 bp, Arabidopsis thaliana
atctcatggattcgtgg

SEQ ID NO: 53758 - DNA, 17 bp, Arabidopsis thaliana
atctcatgtagacgggc

SEQ ID NO: 53759 - DNA, 17 bp, Arabidopsis thaliana
atctcatgtagttccaa

SEQ ID NO: 53760 - DNA, 17 bp, Arabidopsis thaliana
atctcatgttttgcggg

SEQ ID NO: 53761 - DNA, 17 bp, Arabidopsis thaliana
atctcattagcgaaact

SEQ ID NO: 53762 - DNA, 17 bp, Arabidopsis thaliana
atctcattcggatggtc

SEQ ID NO: 53763 - DNA, 17 bp, Arabidopsis thaliana
atctcattcgttgttcg

SEQ ID NO: 53764 - DNA, 17 bp, Arabidopsis thaliana
atctcattctcagagca

SEQ ID NO: 53765 - DNA, 17 bp, Arabidopsis thaliana
atctcattgcgttgtga

SEQ ID NO: 53766 - DNA, 17 bp, Arabidopsis thaliana
atctcattgtcgccatt

SEQ ID NO: 53767 - DNA, 17 bp, Arabidopsis thaliana
atctcatttcaggctcg

SEQ ID NO: 53768 - DNA, 17 bp, Arabidopsis thaliana
atctcatttctcggaac

SEQ ID NO: 53769 - DNA, 17 bp, Arabidopsis thaliana
atctcatttctcggaat

SEQ ID NO: 53770 - DNA, 17 bp, Arabidopsis thaliana
atctcatttctgagtct

SEQ ID NO: 53771 - DNA, 17 bp, Arabidopsis thaliana
atctcatttgacacgct

SEQ ID NO: 53772 - DNA, 17 bp, Arabidopsis thaliana
atctcatttgttgttcg

SEQ ID NO: 53773 - DNA, 17 bp, Arabidopsis thaliana
atctcatttttggggcg

SEQ ID NO: 53774 - DNA, 17 bp, Arabidopsis thaliana
atctccaaagacttgct

SEQ ID NO: 53775 - DNA, 17 bp, Arabidopsis thaliana
atctccaacaaatgcaa

SEQ ID NO: 53776 - DNA, 17 bp, Arabidopsis thaliana
atctccaacaaatgcag

SEQ ID NO: 53777 - DNA, 17 bp, Arabidopsis thaliana
atctccaaccgggagtt

SEQ ID NO: 53778 - DNA, 17 bp, Arabidopsis thaliana
atctccaacggacaatc

SEQ ID NO: 53779 - DNA, 17 bp, Arabidopsis thaliana
atctccaactgtgtgac

SEQ ID NO: 53780 - DNA, 17 bp, Arabidopsis thaliana
atctccaagcgaatgat

SEQ ID NO: 53781 - DNA, 17 bp, Arabidopsis thaliana
atctccaaggtcttgcg

SEQ ID NO: 53782 - DNA, 17 bp, Arabidopsis thaliana
atctccaatcgcgtctc

SEQ ID NO: 53783 - DNA, 17 bp, Arabidopsis thaliana
atctccaatgcctctga

SEQ ID NO: 53784 - DNA, 17 bp, Arabidopsis thaliana
atctccaatggtgagag

SEQ ID NO: 53785 - DNA, 17 bp, Arabidopsis thaliana
atctccaatggtgagga

SEQ ID NO: 53786 - DNA, 17 bp, Arabidopsis thaliana
atctccaatggttcgta

SEQ ID NO: 53787 - DNA, 17 bp, Arabidopsis thaliana
atctccaattacccagt

SEQ ID NO: 53788 - DNA, 17 bp, Arabidopsis thaliana
atctccaattcctcagg

SEQ ID NO: 53789 - DNA, 17 bp, Arabidopsis thaliana
atctccacactatttga

SEQ ID NO: 53790 - DNA, 17 bp, Arabidopsis thaliana
atctccacagggttttg

SEQ ID NO: 53791 - DNA, 17 bp, Arabidopsis thaliana
atctccacatctccatt

SEQ ID NO: 53792 - DNA, 17 bp, Arabidopsis thaliana
atctccaccaacgctgg

SEQ ID NO: 53793 - DNA, 17 bp, Arabidopsis thaliana
atctccaccaccgccgg

SEQ ID NO: 53794 - DNA, 17 bp, Arabidopsis thaliana
atctccaccagtagtct

SEQ ID NO: 53795 - DNA, 17 bp, Arabidopsis thaliana
atctccaccatcgctag

SEQ ID NO: 53796 - DNA, 17 bp, Arabidopsis thaliana
atctccacctggcagat

SEQ ID NO: 53797 - DNA, 17 bp, Arabidopsis thaliana
atctccacctgggagat

SEQ ID NO: 53798 - DNA, 17 bp, Arabidopsis thaliana
atctccacgtgttgaat

SEQ ID NO: 53799 - DNA, 17 bp, Arabidopsis thaliana
atctccactcaccgacc

SEQ ID NO: 53800 - DNA, 17 bp, Arabidopsis thaliana
atctccagattcgtact

SEQ ID NO: 53801 - DNA, 17 bp, Arabidopsis thaliana
atctccagatttctgcc

SEQ ID NO: 53802 - DNA, 17 bp, Arabidopsis thaliana
atctccaggattattcg

SEQ ID NO: 53803 - DNA, 17 bp, Arabidopsis thaliana
atctccaggttcctctt

SEQ ID NO: 53804 - DNA, 17 bp, Arabidopsis thaliana
atctccagtccactgcg

SEQ ID NO: 53805 - DNA, 17 bp, Arabidopsis thaliana
atctccagttcactgcg

SEQ ID NO: 53806 - DNA, 17 bp, Arabidopsis thaliana
atctccagttcattgtg

SEQ ID NO: 53807 - DNA, 17 bp, Arabidopsis thaliana
atctccagttgaaccgc

SEQ ID NO: 53808 - DNA, 17 bp, Arabidopsis thaliana
atctccatcaatagtct

SEQ ID NO: 53809 - DNA, 17 bp, Arabidopsis thaliana
atctccatcaatggttt

SEQ ID NO: 53810 - DNA, 17 bp, Arabidopsis thaliana
atctccatccaaatggt

SEQ ID NO: 53811 - DNA, 17 bp, Arabidopsis thaliana
atctccatccatgagaa

SEQ ID NO: 53812 - DNA, 17 bp, Arabidopsis thaliana
atctccatccattgtcc

SEQ ID NO: 53813 - DNA, 17 bp, Arabidopsis thaliana
atctccatccgaagttt

SEQ ID NO: 53814 - DNA, 17 bp, Arabidopsis thaliana
atctccatccggtatag

SEQ ID NO: 53815 - DNA, 17 bp, Arabidopsis thaliana
atctccatcgggagtat

SEQ ID NO: 53816 - DNA, 17 bp, Arabidopsis thaliana
atctccatctcgttgtt

SEQ ID NO: 53817 - DNA, 17 bp, Arabidopsis thaliana
atctccatctctaggtg

SEQ ID NO: 53818 - DNA, 17 bp, Arabidopsis thaliana
atctccatctctctttg

SEQ ID NO: 53819 - DNA, 17 bp, Arabidopsis thaliana
atctccatctgccttga

SEQ ID NO: 53820 - DNA, 17 bp, Arabidopsis thaliana
atctccatcttccttca

SEQ ID NO: 53821 - DNA, 17 bp, Arabidopsis thaliana
atctccatgcgagtatc

SEQ ID NO: 53822 - DNA, 17 bp, Arabidopsis thaliana
atctccatgtgtgatcg

SEQ ID NO: 53823 - DNA, 17 bp, Arabidopsis thaliana
atctccattgttgtccc

SEQ ID NO: 53824 - DNA, 17 bp, Arabidopsis thaliana
atctccattgttgtctc

SEQ ID NO: 53825 - DNA, 17 bp, Arabidopsis thaliana
atctccatttcgtatgc

SEQ ID NO: 53826 - DNA, 17 bp, Arabidopsis thaliana
atctccatttggatgga

SEQ ID NO: 53827 - DNA, 17 bp, Arabidopsis thaliana
atctcccagaggcggga

SEQ ID NO: 53828 - DNA, 17 bp, Arabidopsis thaliana
atctcccaggtgcaggt

SEQ ID NO: 53829 - DNA, 17 bp, Arabidopsis thaliana
atctcccagtggcggga

SEQ ID NO: 53830 - DNA, 17 bp, Arabidopsis thaliana
atctccccgtgagagat

SEQ ID NO: 53831 - DNA, 17 bp, Arabidopsis thaliana
atctcccctacaatatc

SEQ ID NO: 53832 - DNA, 17 bp, Arabidopsis thaliana
atctccctcaggacatg

SEQ ID NO: 53833 - DNA, 17 bp, Arabidopsis thaliana
atctccctcccgtcgcc

SEQ ID NO: 53834 - DNA, 17 bp, Arabidopsis thaliana
atctcccttcatcaggt

SEQ ID NO: 53835 - DNA, 17 bp, Arabidopsis thaliana
atctccgagaggcgtga

SEQ ID NO: 53836 - DNA, 17 bp, Arabidopsis thaliana
atctccgagtaccgctg

SEQ ID NO: 53837 - DNA, 17 bp, Arabidopsis thaliana
atctccgccatttgagt

SEQ ID NO: 53838 - DNA, 17 bp, Arabidopsis thaliana
atctccgcgattttgta

SEQ ID NO: 53839 - DNA, 17 bp, Arabidopsis thaliana
atctccgctcagatctg

SEQ ID NO: 53840 - DNA, 17 bp, Arabidopsis thaliana
atctccgctcggatctg

SEQ ID NO: 53841 - DNA, 17 bp, Arabidopsis thaliana
atctccggatctgttga

SEQ ID NO: 53842 - DNA, 17 bp, Arabidopsis thaliana
atctccggatctgttta

SEQ ID NO: 53843 - DNA, 17 bp, Arabidopsis thaliana
atctccggccaccgtca

SEQ ID NO: 53844 - DNA, 17 bp, Arabidopsis thaliana
atctccggcgagacgta

SEQ ID NO: 53845 - DNA, 17 bp, Arabidopsis thaliana
atctccggcgagctttg

SEQ ID NO: 53846 - DNA, 17 bp, Arabidopsis thaliana
atctccgggatggtggt

SEQ ID NO: 53847 - DNA, 17 bp, Arabidopsis thaliana
atctccgggtcactgtt

SEQ ID NO: 53848 - DNA, 17 bp, Arabidopsis thaliana
atctccgtcggtcctac

SEQ ID NO: 53849 - DNA, 17 bp, Arabidopsis thaliana
atctccgttggtgtgga

SEQ ID NO: 53850 - DNA, 17 bp, Arabidopsis thaliana
atctcctaagggcattt

SEQ ID NO: 53851 - DNA, 17 bp, Arabidopsis thaliana
atctcctagagaggttg

SEQ ID NO: 53852 - DNA, 17 bp, Arabidopsis thaliana
atctcctccattgatga

SEQ ID NO: 53853 - DNA, 17 bp, Arabidopsis thaliana
atctcctccggtcccct

SEQ ID NO: 53854 - DNA, 17 bp, Arabidopsis thaliana
atctcctcgaaggcatg

SEQ ID NO: 53855 - DNA, 17 bp, Arabidopsis thaliana
atctcctcgtcccgttc

SEQ ID NO: 53856 - DNA, 17 bp, Arabidopsis thaliana
atctcctgattggtcgc

SEQ ID NO: 53857 - DNA, 17 bp, Arabidopsis thaliana
atctcctgcacacttgc

SEQ ID NO: 53858 - DNA, 17 bp, Arabidopsis thaliana
atctcctgcaccagttt

SEQ ID NO: 53859 - DNA, 17 bp, Arabidopsis thaliana
atctcctgccagtggcg

SEQ ID NO: 53860 - DNA, 17 bp, Arabidopsis thaliana
atctcctggattagtag

SEQ ID NO: 53861 - DNA, 17 bp, Arabidopsis thaliana
atctcctggtggtggtg

SEQ ID NO: 53862 - DNA, 17 bp, Arabidopsis thaliana
atctcctggtgtcggtc

SEQ ID NO: 53863 - DNA, 17 bp, Arabidopsis thaliana
atctcctgtctgaatgt

SEQ ID NO: 53864 - DNA, 17 bp, Arabidopsis thaliana
atctccttccattgctg

SEQ ID NO: 53865 - DNA, 17 bp, Arabidopsis thaliana
atctccttcgaagcaga

SEQ ID NO: 53866 - DNA, 17 bp, Arabidopsis thaliana
atctccttctaccttcc

SEQ ID NO: 53867 - DNA, 17 bp, Arabidopsis thaliana
atctccttctacctttt

SEQ ID NO: 53868 - DNA, 17 bp, Arabidopsis thaliana
atctccttctcaaattc

SEQ ID NO: 53869 - DNA, 17 bp, Arabidopsis thaliana
atctccttctccttttt

SEQ ID NO: 53870 - DNA, 17 bp, Arabidopsis thaliana
atctccttctggatttg

SEQ ID NO: 53871 - DNA, 17 bp, Arabidopsis thaliana
atctccttggactgcac

SEQ ID NO: 53872 - DNA, 17 bp, Arabidopsis thaliana
atctccttggcttctga

SEQ ID NO: 53873 - DNA, 17 bp, Arabidopsis thaliana
atctccttgtgcttcag

SEQ ID NO: 53874 - DNA, 17 bp, Arabidopsis thaliana
atctccttgtggcagag

SEQ ID NO: 53875 - DNA, 17 bp, Arabidopsis thaliana
atctcctttgccatctc

SEQ ID NO: 53876 - DNA, 17 bp, Arabidopsis thaliana
atctcgaaaataaaccc

SEQ ID NO: 53877 - DNA, 17 bp, Arabidopsis thaliana
atctcgaaagaagactt

SEQ ID NO: 53878 - DNA, 17 bp, Arabidopsis thaliana
atctcgaaatcacagac

SEQ ID NO: 53879 - DNA, 17 bp, Arabidopsis thaliana
atctcgaagataccgca

SEQ ID NO: 53880 - DNA, 17 bp, Arabidopsis thaliana
atctcgaagtacggagt

SEQ ID NO: 53881 - DNA, 17 bp, Arabidopsis thaliana
atctcgaatccttccgt

SEQ ID NO: 53882 - DNA, 17 bp, Arabidopsis thaliana
atctcgaccgttcgaac

SEQ ID NO: 53883 - DNA, 17 bp, Arabidopsis thaliana
atctcgacttcactgca

SEQ ID NO: 53884 - DNA, 17 bp, Arabidopsis thaliana
atctcgacttcgggagg

SEQ ID NO: 53885 - DNA, 17 bp, Arabidopsis thaliana
atctcgagacgtatcag

SEQ ID NO: 53886 - DNA, 17 bp, Arabidopsis thaliana
atctcgagacgtatgta

SEQ ID NO: 53887 - DNA, 17 bp, Arabidopsis thaliana
atctcgagagcttgccg

SEQ ID NO: 53888 - DNA, 17 bp, Arabidopsis thaliana
atctcgagatcacagac

SEQ ID NO: 53889 - DNA, 17 bp, Arabidopsis thaliana
atctcgagcacctgtca

SEQ ID NO: 53890 - DNA, 17 bp, Arabidopsis thaliana
atctcgaggacttcgat

SEQ ID NO: 53891 - DNA, 17 bp, Arabidopsis thaliana
atctcgagggagcgtat

SEQ ID NO: 53892 - DNA, 17 bp, Arabidopsis thaliana
atctcgagggcttcgat

SEQ ID NO: 53893 - DNA, 17 bp, Arabidopsis thaliana
atctcgagtctatcact

SEQ ID NO: 53894 - DNA, 17 bp, Arabidopsis thaliana
atctcgataaccaagct

SEQ ID NO: 53895 - DNA, 17 bp, Arabidopsis thaliana
atctcgatcaatggctt

SEQ ID NO: 53896 - DNA, 17 bp, Arabidopsis thaliana
atctcgatcgtgtcgtc

SEQ ID NO: 53897 - DNA, 17 bp, Arabidopsis thaliana
atctcgatcgttgactt

SEQ ID NO: 53898 - DNA, 17 bp, Arabidopsis thaliana
atctcgatgaccgaggg

SEQ ID NO: 53899 - DNA, 17 bp, Arabidopsis thaliana
atctcgatgtgaaatat

SEQ ID NO: 53900 - DNA, 17 bp, Arabidopsis thaliana
atctcgatgtgaaccac

SEQ ID NO: 53901 - DNA, 17 bp, Arabidopsis thaliana
atctcgattatctcagg

SEQ ID NO: 53902 - DNA, 17 bp, Arabidopsis thaliana
atctcgattggctcgcg

SEQ ID NO: 53903 - DNA, 17 bp, Arabidopsis thaliana
atctcgattgttgtttc

SEQ ID NO: 53904 - DNA, 17 bp, Arabidopsis thaliana
atctcgcaagtacgctt

SEQ ID NO: 53905 - DNA, 17 bp, Arabidopsis thaliana
atctcgcaagtcaggtg

SEQ ID NO: 53906 - DNA, 17 bp, Arabidopsis thaliana
atctcgcagataaacag

SEQ ID NO: 53907 - DNA, 17 bp, Arabidopsis thaliana
atctcgcagtccgatct

SEQ ID NO: 53908 - DNA, 17 bp, Arabidopsis thaliana
atctcgcagttcccccg

SEQ ID NO: 53909 - DNA, 17 bp, Arabidopsis thaliana
atctcgcagttccctcg

SEQ ID NO: 53910 - DNA, 17 bp, Arabidopsis thaliana
atctcgccagcctcact

SEQ ID NO: 53911 - DNA, 17 bp, Arabidopsis thaliana
atctcgccatactgcaa

SEQ ID NO: 53912 - DNA, 17 bp, Arabidopsis thaliana
atctcgccgaatcacgg

SEQ ID NO: 53913 - DNA, 17 bp, Arabidopsis thaliana
atctcgccggcgaattt

SEQ ID NO: 53914 - DNA, 17 bp, Arabidopsis thaliana
atctcgccttatctaac

SEQ ID NO: 53915 - DNA, 17 bp, Arabidopsis thaliana
atctcgcgaggaagata

SEQ ID NO: 53916 - DNA, 17 bp, Arabidopsis thaliana
atctcgcgcttgtacgg

SEQ ID NO: 53917 - DNA, 17 bp, Arabidopsis thaliana
atctcgcggtgtgacca

SEQ ID NO: 53918 - DNA, 17 bp, Arabidopsis thaliana
atctcgcgttcgctttt

SEQ ID NO: 53919 - DNA, 17 bp, Arabidopsis thaliana
atctcgctctggggtgt

SEQ ID NO: 53920 - DNA, 17 bp, Arabidopsis thaliana
atctcgctgaagaatga

SEQ ID NO: 53921 - DNA, 17 bp, Arabidopsis thaliana
atctcggaatcggtgtt

SEQ ID NO: 53922 - DNA, 17 bp, Arabidopsis thaliana
atctcggaccaaggagt

SEQ ID NO: 53923 - DNA, 17 bp, Arabidopsis thaliana
atctcggactttagttt

SEQ ID NO: 53924 - DNA, 17 bp, Arabidopsis thaliana
atctcggagatcacgtc

SEQ ID NO: 53925 - DNA, 17 bp, Arabidopsis thaliana
atctcggagctgaactt

SEQ ID NO: 53926 - DNA, 17 bp, Arabidopsis thaliana
atctcggatcgcggcga

SEQ ID NO: 53927 - DNA, 17 bp, Arabidopsis thaliana
atctcggatgactcctt

SEQ ID NO: 53928 - DNA, 17 bp, Arabidopsis thaliana
atctcggatggtgtttg

SEQ ID NO: 53929 - DNA, 17 bp, Arabidopsis thaliana
atctcggccaccggcga

SEQ ID NO: 53930 - DNA, 17 bp, Arabidopsis thaliana
atctcggcccattatca

SEQ ID NO: 53931 - DNA, 17 bp, Arabidopsis thaliana
atctcggccggaacaac

SEQ ID NO: 53932 - DNA, 17 bp, Arabidopsis thaliana
atctcggcgagacgtag

SEQ ID NO: 53933 - DNA, 17 bp, Arabidopsis thaliana
atctcggctattctaag

SEQ ID NO: 53934 - DNA, 17 bp, Arabidopsis thaliana
atctcggctcccgacgc

SEQ ID NO: 53935 - DNA, 17 bp, Arabidopsis thaliana
atctcggctctcgcatt

SEQ ID NO: 53936 - DNA, 17 bp, Arabidopsis thaliana
atctcggcttgtccctt

SEQ ID NO: 53937 - DNA, 17 bp, Arabidopsis thaliana
atctcgggagggaagcg

SEQ ID NO: 53938 - DNA, 17 bp, Arabidopsis thaliana
atctcgggatatctcag

SEQ ID NO: 53939 - DNA, 17 bp, Arabidopsis thaliana
atctcgggggagatctc

SEQ ID NO: 53940 - DNA, 17 bp, Arabidopsis thaliana
atctcgggggtgttgat

SEQ ID NO: 53941 - DNA, 17 bp, Arabidopsis thaliana
atctcgggttgtctagc

SEQ ID NO: 53942 - DNA, 17 bp, Arabidopsis thaliana
atctcgggttgtgtact

SEQ ID NO: 53943 - DNA, 17 bp, Arabidopsis thaliana
atctcgggtttacggtt

SEQ ID NO: 53944 - DNA, 17 bp, Arabidopsis thaliana
atctcgggtttacgttt

SEQ ID NO: 53945 - DNA, 17 bp, Arabidopsis thaliana
atctcgggtttgagtac

SEQ ID NO: 53946 - DNA, 17 bp, Arabidopsis thaliana
atctcggtatgcgaatt

SEQ ID NO: 53947 - DNA, 17 bp, Arabidopsis thaliana
atctcggtatttcgtgc

SEQ ID NO: 53948 - DNA, 17 bp, Arabidopsis thaliana
atctcggtcggccaata

SEQ ID NO: 53949 - DNA, 17 bp, Arabidopsis thaliana
atctcggtcttttcatc

SEQ ID NO: 53950 - DNA, 17 bp, Arabidopsis thaliana
atctcggttatctcagg

SEQ ID NO: 53951 - DNA, 17 bp, Arabidopsis thaliana
atctcggttcgagtccg

SEQ ID NO: 53952 - DNA, 17 bp, Arabidopsis thaliana
atctcggttgcttgggt

SEQ ID NO: 53953 - DNA, 17 bp, Arabidopsis thaliana
atctcgtaatcttccag

SEQ ID NO: 53954 - DNA, 17 bp, Arabidopsis thaliana
atctcgtattcacggcg

SEQ ID NO: 53955 - DNA, 17 bp, Arabidopsis thaliana
atctcgtccgaccaaat

SEQ ID NO: 53956 - DNA, 17 bp, Arabidopsis thaliana
atctcgtccggccaaat

SEQ ID NO: 53957 - DNA, 17 bp, Arabidopsis thaliana
atctcgtccgtcttctt

SEQ ID NO: 53958 - DNA, 17 bp, Arabidopsis thaliana
atctcgtcgccggagtc

SEQ ID NO: 53959 - DNA, 17 bp, Arabidopsis thaliana
atctcgtctcagagatg

SEQ ID NO: 53960 - DNA, 17 bp, Arabidopsis thaliana
atctcgtctctctgcag

SEQ ID NO: 53961 - DNA, 17 bp, Arabidopsis thaliana
atctcgtcttattgacc

SEQ ID NO: 53962 - DNA, 17 bp, Arabidopsis thaliana
atctcgtgccgatcgga

SEQ ID NO: 53963 - DNA, 17 bp, Arabidopsis thaliana
atctcgtgctaaagagc

SEQ ID NO: 53964 - DNA, 17 bp, Arabidopsis thaliana
atctcgtgctttttcgc

SEQ ID NO: 53965 - DNA, 17 bp, Arabidopsis thaliana
atctcgtggatgtcgga

SEQ ID NO: 53966 - DNA, 17 bp, Arabidopsis thaliana
atctcgtggtgtaccaa

SEQ ID NO: 53967 - DNA, 17 bp, Arabidopsis thaliana
atctcgtggttgtatgg

SEQ ID NO: 53968 - DNA, 17 bp, Arabidopsis thaliana
atctcgtgtgggtggtg

SEQ ID NO: 53969 - DNA, 17 bp, Arabidopsis thaliana
atctcgtgttccatttg

SEQ ID NO: 53970 - DNA, 17 bp, Arabidopsis thaliana
atctcgttattcgagcc

SEQ ID NO: 53971 - DNA, 17 bp, Arabidopsis thaliana
atctcgttcaatgtcga

SEQ ID NO: 53972 - DNA, 17 bp, Arabidopsis thaliana
atctcgttcagtgatct

SEQ ID NO: 53973 - DNA, 17 bp, Arabidopsis thaliana
atctcgttctcgtgcta

SEQ ID NO: 53974 - DNA, 17 bp, Arabidopsis thaliana
atctcgttgctcttggt

SEQ ID NO: 53975 - DNA, 17 bp, Arabidopsis thaliana
atctcgtttgcaagttt

SEQ ID NO: 53976 - DNA, 17 bp, Arabidopsis thaliana
atctctaaaacttcagc

SEQ ID NO: 53977 - DNA, 17 bp, Arabidopsis thaliana
atctctaaaagatttgg

SEQ ID NO: 53978 - DNA, 17 bp, Arabidopsis thaliana
atctctaagatttcacc

SEQ ID NO: 53979 - DNA, 17 bp, Arabidopsis thaliana
atctctaaggcgtgccc

SEQ ID NO: 53980 - DNA, 17 bp, Arabidopsis thaliana
atctctacattttgggc

SEQ ID NO: 53981 - DNA, 17 bp, Arabidopsis thaliana
atctctacattttgggt

SEQ ID NO: 53982 - DNA, 17 bp, Arabidopsis thaliana
atctctaccacgttcaa

SEQ ID NO: 53983 - DNA, 17 bp, Arabidopsis thaliana
atctctaccgactttgt

SEQ ID NO: 53984 - DNA, 17 bp, Arabidopsis thaliana
atctctaccttgatgga

SEQ ID NO: 53985 - DNA, 17 bp, Arabidopsis thaliana
atctctacttgtttctg

SEQ ID NO: 53986 - DNA, 17 bp, Arabidopsis thaliana
atctctagaacttggat

SEQ ID NO: 53987 - DNA, 17 bp, Arabidopsis thaliana
atctctagggatgaacc

SEQ ID NO: 53988 - DNA, 17 bp, Arabidopsis thaliana
atctctaggttattcag

SEQ ID NO: 53989 - DNA, 17 bp, Arabidopsis thaliana
atctctatcagcgggct

SEQ ID NO: 53990 - DNA, 17 bp, Arabidopsis thaliana
atctctatcccattcct

SEQ ID NO: 53991 - DNA, 17 bp, Arabidopsis thaliana
atctctatccctatggc

SEQ ID NO: 53992 - DNA, 17 bp, Arabidopsis thaliana
atctctatctcacaagc

SEQ ID NO: 53993 - DNA, 17 bp, Arabidopsis thaliana
atctctatctccatccc

SEQ ID NO: 53994 - DNA, 17 bp, Arabidopsis thaliana
atctctatctccatcgt

SEQ ID NO: 53995 - DNA, 17 bp, Arabidopsis thaliana
atctctatggatcggaa

SEQ ID NO: 53996 - DNA, 17 bp, Arabidopsis thaliana
atctctatggtgtagtg

SEQ ID NO: 53997 - DNA, 17 bp, Arabidopsis thaliana
atctctattggtgagat

SEQ ID NO: 53998 - DNA, 17 bp, Arabidopsis thaliana
atctctatttccgagtt

SEQ ID NO: 53999 - DNA, 17 bp, Arabidopsis thaliana
atctctcaaacttccaa

SEQ ID NO: 54000 - DNA, 17 bp, Arabidopsis thaliana
atctctcaagctcggat

SEQ ID NO: 54001 - DNA, 17 bp, Arabidopsis thaliana
atctctcacagtttgca

SEQ ID NO: 54002 - DNA, 17 bp, Arabidopsis thaliana
atctctcaccgtaggtt

SEQ ID NO: 54003 - DNA, 17 bp, Arabidopsis thaliana
atctctcacgatttgat

SEQ ID NO: 54004 - DNA, 17 bp, Arabidopsis thaliana
atctctcagacgcttga

SEQ ID NO: 54005 - DNA, 17 bp, Arabidopsis thaliana
atctctcagacgcttta

SEQ ID NO: 54006 - DNA, 17 bp, Arabidopsis thaliana
atctctcagaggcggaa

SEQ ID NO: 54007 - DNA, 17 bp, Arabidopsis thaliana
atctctcagaggcggga

SEQ ID NO: 54008 - DNA, 17 bp, Arabidopsis thaliana
atctctcaggtccgaaa

SEQ ID NO: 54009 - DNA, 17 bp, Arabidopsis thaliana
atctctcaggtgaaagt

SEQ ID NO: 54010 - DNA, 17 bp, Arabidopsis thaliana
atctctcatcgatggtc

SEQ ID NO: 54011 - DNA, 17 bp, Arabidopsis thaliana
atctctcatcgtcgctc

SEQ ID NO: 54012 - DNA, 17 bp, Arabidopsis thaliana
atctctcatctcgaata

SEQ ID NO: 54013 - DNA, 17 bp, Arabidopsis thaliana
atctctcatcttcaaag

SEQ ID NO: 54014 - DNA, 17 bp, Arabidopsis thaliana
atctctccagatccgaa

SEQ ID NO: 54015 - DNA, 17 bp, Arabidopsis thaliana
atctctccagcacttat

SEQ ID NO: 54016 - DNA, 17 bp, Arabidopsis thaliana
atctctcccagcgtgcc

SEQ ID NO: 54017 - DNA, 17 bp, Arabidopsis thaliana
atctctcccatgtgcag

SEQ ID NO: 54018 - DNA, 17 bp, Arabidopsis thaliana
atctctccctctccctc

SEQ ID NO: 54019 - DNA, 17 bp, Arabidopsis thaliana
atctctcctctctaata

SEQ ID NO: 54020 - DNA, 17 bp, Arabidopsis thaliana
atctctcctggtttcag

SEQ ID NO: 54021 - DNA, 17 bp, Arabidopsis thaliana
atctctccttgtgacat

SEQ ID NO: 54022 - DNA, 17 bp, Arabidopsis thaliana
atctctcctttgctggt

SEQ ID NO: 54023 - DNA, 17 bp, Arabidopsis thaliana
atctctccttttgacat

SEQ ID NO: 54024 - DNA, 17 bp, Arabidopsis thaliana
atctctcgattttgctc

SEQ ID NO: 54025 - DNA, 17 bp, Arabidopsis thaliana
atctctcgcgtagacca

SEQ ID NO: 54026 - DNA, 17 bp, Arabidopsis thaliana
atctctcggtgcggccc

SEQ ID NO: 54027 - DNA, 17 bp, Arabidopsis thaliana
atctctctgaggcaaaa

SEQ ID NO: 54028 - DNA, 17 bp, Arabidopsis thaliana
atctctctgaggcgaga

SEQ ID NO: 54029 - DNA, 17 bp, Arabidopsis thaliana
atctctctggcgggttt

SEQ ID NO: 54030 - DNA, 17 bp, Arabidopsis thaliana
atctctctgggagtgct

SEQ ID NO: 54031 - DNA, 17 bp, Arabidopsis thaliana
atctctcttattgacag

SEQ ID NO: 54032 - DNA, 17 bp, Arabidopsis thaliana
atctctcttgtcacccc

SEQ ID NO: 54033 - DNA, 17 bp, Arabidopsis thaliana
atctctctttggttgca

SEQ ID NO: 54034 - DNA, 17 bp, Arabidopsis thaliana
atctctgaaatctgcag

SEQ ID NO: 54035 - DNA, 17 bp, Arabidopsis thaliana
atctctgaacttgacgg

SEQ ID NO: 54036 - DNA, 17 bp, Arabidopsis thaliana
atctctgaacttgatag

SEQ ID NO: 54037 - DNA, 17 bp, Arabidopsis thaliana
atctctgaatcgggcca

SEQ ID NO: 54038 - DNA, 17 bp, Arabidopsis thaliana
atctctgacccctaaaa

SEQ ID NO: 54039 - DNA, 17 bp, Arabidopsis thaliana
atctctgaccgagagct

SEQ ID NO: 54040 - DNA, 17 bp, Arabidopsis thaliana
atctctgacttttggta

SEQ ID NO: 54041 - DNA, 17 bp, Arabidopsis thaliana
atctctgagcgcagtgc

SEQ ID NO: 54042 - DNA, 17 bp, Arabidopsis thaliana
atctctgatagtacccg

SEQ ID NO: 54043 - DNA, 17 bp, Arabidopsis thaliana
atctctgatctacttgc

SEQ ID NO: 54044 - DNA, 17 bp, Arabidopsis thaliana
atctctgatgacatggc

SEQ ID NO: 54045 - DNA, 17 bp, Arabidopsis thaliana
atctctgattcggaacc

SEQ ID NO: 54046 - DNA, 17 bp, Arabidopsis thaliana
atctctgattttgatgg

SEQ ID NO: 54047 - DNA, 17 bp, Arabidopsis thaliana
atctctgcaatatgtcc

SEQ ID NO: 54048 - DNA, 17 bp, Arabidopsis thaliana
atctctgcaatatgtct

SEQ ID NO: 54049 - DNA, 17 bp, Arabidopsis thaliana
atctctgcagcagctca

SEQ ID NO: 54050 - DNA, 17 bp, Arabidopsis thaliana
atctctgcatacatccg

SEQ ID NO: 54051 - DNA, 17 bp, Arabidopsis thaliana
atctctgcatgctgtgg

SEQ ID NO: 54052 - DNA, 17 bp, Arabidopsis thaliana
atctctgccatctttgt

SEQ ID NO: 54053 - DNA, 17 bp, Arabidopsis thaliana
atctctgccgcagcgac

SEQ ID NO: 54054 - DNA, 17 bp, Arabidopsis thaliana
atctctgccgcagtgac

SEQ ID NO: 54055 - DNA, 17 bp, Arabidopsis thaliana
atctctgccgcagtgcc

SEQ ID NO: 54056 - DNA, 17 bp, Arabidopsis thaliana
atctctgccgcatcgac

SEQ ID NO: 54057 - DNA, 17 bp, Arabidopsis thaliana
atctctgccgcattgac

SEQ ID NO: 54058 - DNA, 17 bp, Arabidopsis thaliana
atctctgccttttagcg

SEQ ID NO: 54059 - DNA, 17 bp, Arabidopsis thaliana
atctctgcgacgaccat

SEQ ID NO: 54060 - DNA, 17 bp, Arabidopsis thaliana
atctctgcgagtgatac

SEQ ID NO: 54061 - DNA, 17 bp, Arabidopsis thaliana
atctctgcgctttgatg

SEQ ID NO: 54062 - DNA, 17 bp, Arabidopsis thaliana
atctctgcggtgtacta

SEQ ID NO: 54063 - DNA, 17 bp, Arabidopsis thaliana
atctctgcggtttgatg

SEQ ID NO: 54064 - DNA, 17 bp, Arabidopsis thaliana
atctctgctctcagctt

SEQ ID NO: 54065 - DNA, 17 bp, Arabidopsis thaliana
atctctgctttggagcg

SEQ ID NO: 54066 - DNA, 17 bp, Arabidopsis thaliana
atctctggaactttgag

SEQ ID NO: 54067 - DNA, 17 bp, Arabidopsis thaliana
atctctggaattagtgg

SEQ ID NO: 54068 - DNA, 17 bp, Arabidopsis thaliana
atctctggaattcgtag

SEQ ID NO: 54069 - DNA, 17 bp, Arabidopsis thaliana
atctctggaccgagaga

SEQ ID NO: 54070 - DNA, 17 bp, Arabidopsis thaliana
atctctggactggagcc

SEQ ID NO: 54071 - DNA, 17 bp, Arabidopsis thaliana
atctctggagagttaac

SEQ ID NO: 54072 - DNA, 17 bp, Arabidopsis thaliana
atctctggataaactac

SEQ ID NO: 54073 - DNA, 17 bp, Arabidopsis thaliana
atctctggataacgatc

SEQ ID NO: 54074 - DNA, 17 bp, Arabidopsis thaliana
atctctggccggctcat

SEQ ID NO: 54075 - DNA, 17 bp, Arabidopsis thaliana
atctctgggattgtttg

SEQ ID NO: 54076 - DNA, 17 bp, Arabidopsis thaliana
atctctgggcacttgta

SEQ ID NO: 54077 - DNA, 17 bp, Arabidopsis thaliana
atctctggggattgttt

SEQ ID NO: 54078 - DNA, 17 bp, Arabidopsis thaliana
atctctggtactttggg

SEQ ID NO: 54079 - DNA, 17 bp, Arabidopsis thaliana
atctctggttttgcagt

SEQ ID NO: 54080 - DNA, 17 bp, Arabidopsis thaliana
atctctgtatgcataac

SEQ ID NO: 54081 - DNA, 17 bp, Arabidopsis thaliana
atctctgtatgcatagc

SEQ ID NO: 54082 - DNA, 17 bp, Arabidopsis thaliana
atctctgtcatacttgg

SEQ ID NO: 54083 - DNA, 17 bp, Arabidopsis thaliana
atctctgtcgctctgta

SEQ ID NO: 54084 - DNA, 17 bp, Arabidopsis thaliana
atctctgtcgctggttt

SEQ ID NO: 54085 - DNA, 17 bp, Arabidopsis thaliana
atctctgtcgtgcgatt

SEQ ID NO: 54086 - DNA, 17 bp, Arabidopsis thaliana
atctctgtcttcagctt

SEQ ID NO: 54087 - DNA, 17 bp, Arabidopsis thaliana
atctctgtgagtgactc

SEQ ID NO: 54088 - DNA, 17 bp, Arabidopsis thaliana
atctctgtgagtgactg

SEQ ID NO: 54089 - DNA, 17 bp, Arabidopsis thaliana
atctctgtttcgtgcgc

SEQ ID NO: 54090 - DNA, 17 bp, Arabidopsis thaliana
atctcttacagacccgt

SEQ ID NO: 54091 - DNA, 17 bp, Arabidopsis thaliana
atctcttacgctgagct

SEQ ID NO: 54092 - DNA, 17 bp, Arabidopsis thaliana
atctcttacggatttgg

SEQ ID NO: 54093 - DNA, 17 bp, Arabidopsis thaliana
atctcttaggctatgaa

SEQ ID NO: 54094 - DNA, 17 bp, Arabidopsis thaliana
atctcttaggggtttgg

SEQ ID NO: 54095 - DNA, 17 bp, Arabidopsis thaliana
atctcttcagatctatt

SEQ ID NO: 54096 - DNA, 17 bp, Arabidopsis thaliana
atctcttcagattgtcg

SEQ ID NO: 54097 - DNA, 17 bp, Arabidopsis thaliana
atctcttcatcagttgc

SEQ ID NO: 54098 - DNA, 17 bp, Arabidopsis thaliana
atctcttcattgtcttg

SEQ ID NO: 54099 - DNA, 17 bp, Arabidopsis thaliana
atctcttccaacatgct

SEQ ID NO: 54100 - DNA, 17 bp, Arabidopsis thaliana
atctcttccttcaacag

SEQ ID NO: 54101 - DNA, 17 bp, Arabidopsis thaliana
atctcttccttcttgcc

SEQ ID NO: 54102 - DNA, 17 bp, Arabidopsis thaliana
atctcttctaagaaatg

SEQ ID NO: 54103 - DNA, 17 bp, Arabidopsis thaliana
atctcttctctgctctg

SEQ ID NO: 54104 - DNA, 17 bp, Arabidopsis thaliana
atctcttcttttcgcag

SEQ ID NO: 54105 - DNA, 17 bp, Arabidopsis thaliana
atctcttgactcttttt

SEQ ID NO: 54106 - DNA, 17 bp, Arabidopsis thaliana
atctcttgacttgtgta

SEQ ID NO: 54107 - DNA, 17 bp, Arabidopsis thaliana
atctcttgatcgagtta

SEQ ID NO: 54108 - DNA, 17 bp, Arabidopsis thaliana
atctcttgccggcttta

SEQ ID NO: 54109 - DNA, 17 bp, Arabidopsis thaliana
atctcttgccggctttg

SEQ ID NO: 54110 - DNA, 17 bp, Arabidopsis thaliana
atctcttgcgtttccca

SEQ ID NO: 54111 - DNA, 17 bp, Arabidopsis thaliana
atctcttgcgtttcccc

SEQ ID NO: 54112 - DNA, 17 bp, Arabidopsis thaliana
atctcttgctgctaatc

SEQ ID NO: 54113 - DNA, 17 bp, Arabidopsis thaliana
atctcttgcttttggac

SEQ ID NO: 54114 - DNA, 17 bp, Arabidopsis thaliana
atctcttggagagtcgc

SEQ ID NO: 54115 - DNA, 17 bp, Arabidopsis thaliana
atctcttggtatcgctt

SEQ ID NO: 54116 - DNA, 17 bp, Arabidopsis thaliana
atctcttgtcggctttg

SEQ ID NO: 54117 - DNA, 17 bp, Arabidopsis thaliana
atctcttgtggtggtac

SEQ ID NO: 54118 - DNA, 17 bp, Arabidopsis thaliana
atctcttgtgtcctagg

SEQ ID NO: 54119 - DNA, 17 bp, Arabidopsis thaliana
atctctttactgccggt

SEQ ID NO: 54120 - DNA, 17 bp, Arabidopsis thaliana
atctctttccgtctacc

SEQ ID NO: 54121 - DNA, 17 bp, Arabidopsis thaliana
atctctttcctttggca

SEQ ID NO: 54122 - DNA, 17 bp, Arabidopsis thaliana
atctctttctttgcgca

SEQ ID NO: 54123 - DNA, 17 bp, Arabidopsis thaliana
atctctttgaaaacacc

SEQ ID NO: 54124 - DNA, 17 bp, Arabidopsis thaliana
atctctttgaccaccta

SEQ ID NO: 54125 - DNA, 17 bp, Arabidopsis thaliana
atctctttgcggatgtt

SEQ ID NO: 54126 - DNA, 17 bp, Arabidopsis thaliana
atctctttgctcaagcg

SEQ ID NO: 54127 - DNA, 17 bp, Arabidopsis thaliana
atctctttggagtttca

SEQ ID NO: 54128 - DNA, 17 bp, Arabidopsis thaliana
atctctttggccccttt

SEQ ID NO: 54129 - DNA, 17 bp, Arabidopsis thaliana
atctctttggcgcagac

SEQ ID NO: 54130 - DNA, 17 bp, Arabidopsis thaliana
atctctttgtgcttctt

SEQ ID NO: 54131 - DNA, 17 bp, Arabidopsis thaliana
atctcttttgggagatg

SEQ ID NO: 54132 - DNA, 17 bp, Arabidopsis thaliana
atctcttttggttcgga

SEQ ID NO: 54133 - DNA, 17 bp, Arabidopsis thaliana
atctctttttgaggcca

SEQ ID NO: 54134 - DNA, 17 bp, Arabidopsis thaliana
atctgaaacattgaagg

SEQ ID NO: 54135 - DNA, 17 bp, Arabidopsis thaliana
atctgaaagttgtgttt

SEQ ID NO: 54136 - DNA, 17 bp, Arabidopsis thaliana
atctgaaccaaagccgc

SEQ ID NO: 54137 - DNA, 17 bp, Arabidopsis thaliana
atctgaaccatcttcgg

SEQ ID NO: 54138 - DNA, 17 bp, Arabidopsis thaliana
atctgaaccgcaccgta

SEQ ID NO: 54139 - DNA, 17 bp, Arabidopsis thaliana
atctgaaccgccatgcc

SEQ ID NO: 54140 - DNA, 17 bp, Arabidopsis thaliana
atctgaacgatagactt

SEQ ID NO: 54141 - DNA, 17 bp, Arabidopsis thaliana
atctgaactcgatacgc

SEQ ID NO: 54142 - DNA, 17 bp, Arabidopsis thaliana
atctgaactcgattcgc

SEQ ID NO: 54143 - DNA, 17 bp, Arabidopsis thaliana
atctgaactggggtctt

SEQ ID NO: 54144 - DNA, 17 bp, Arabidopsis thaliana
atctgaagatgtttagt

SEQ ID NO: 54145 - DNA, 17 bp, Arabidopsis thaliana
atctgaagattcgatgg

SEQ ID NO: 54146 - DNA, 17 bp, Arabidopsis thaliana
atctgaagatttccatg

SEQ ID NO: 54147 - DNA, 17 bp, Arabidopsis thaliana
atctgaagccttgtgcc

SEQ ID NO: 54148 - DNA, 17 bp, Arabidopsis thaliana
atctgaaggtcgcgtgt

SEQ ID NO: 54149 - DNA, 17 bp, Arabidopsis thaliana
atctgaagtactttggt

SEQ ID NO: 54150 - DNA, 17 bp, Arabidopsis thaliana
atctgaagtcctgtgat

SEQ ID NO: 54151 - DNA, 17 bp, Arabidopsis thaliana
atctgaagttggttgat

SEQ ID NO: 54152 - DNA, 17 bp, Arabidopsis thaliana
atctgaatcaagatcta

SEQ ID NO: 54153 - DNA, 17 bp, Arabidopsis thaliana
atctgaatcaagatctg

SEQ ID NO: 54154 - DNA, 17 bp, Arabidopsis thaliana
atctgaatcagtgactc

SEQ ID NO: 54155 - DNA, 17 bp, Arabidopsis thaliana
atctgaatccaccgctt

SEQ ID NO: 54156 - DNA, 17 bp, Arabidopsis thaliana
atctgaatggatcttct

SEQ ID NO: 54157 - DNA, 17 bp, Arabidopsis thaliana
atctgaattatcgttga

SEQ ID NO: 54158 - DNA, 17 bp, Arabidopsis thaliana
atctgaattcgtcggcg

SEQ ID NO: 54159 - DNA, 17 bp, Arabidopsis thaliana
atctgacacgctggcgg

SEQ ID NO: 54160 - DNA, 17 bp, Arabidopsis thaliana
atctgacactgatgtcc

SEQ ID NO: 54161 - DNA, 17 bp, Arabidopsis thaliana
atctgacatctgagtgc

SEQ ID NO: 54162 - DNA, 17 bp, Arabidopsis thaliana
atctgaccaaagactgc

SEQ ID NO: 54163 - DNA, 17 bp, Arabidopsis thaliana
atctgaccaagtcacta

SEQ ID NO: 54164 - DNA, 17 bp, Arabidopsis thaliana
atctgaccaatggagat

SEQ ID NO: 54165 - DNA, 17 bp, Arabidopsis thaliana
atctgaccacagaactg

SEQ ID NO: 54166 - DNA, 17 bp, Arabidopsis thaliana
atctgaccagttcaacc

SEQ ID NO: 54167 - DNA, 17 bp, Arabidopsis thaliana
atctgaccatgaagttt

SEQ ID NO: 54168 - DNA, 17 bp, Arabidopsis thaliana
atctgacccgtccgacg

SEQ ID NO: 54169 - DNA, 17 bp, Arabidopsis thaliana
atctgacgagctccgat

SEQ ID NO: 54170 - DNA, 17 bp, Arabidopsis thaliana
atctgacggaccagatc

SEQ ID NO: 54171 - DNA, 17 bp, Arabidopsis thaliana
atctgacggctttgctt

SEQ ID NO: 54172 - DNA, 17 bp, Arabidopsis thaliana
atctgacgtatgagtgc

SEQ ID NO: 54173 - DNA, 17 bp, Arabidopsis thaliana
atctgacgtgacttctt

SEQ ID NO: 54174 - DNA, 17 bp, Arabidopsis thaliana
atctgacgtgccatctt

SEQ ID NO: 54175 - DNA, 17 bp, Arabidopsis thaliana
atctgacgtggattctt

SEQ ID NO: 54176 - DNA, 17 bp, Arabidopsis thaliana
atctgacgtggcttctc

SEQ ID NO: 54177 - DNA, 17 bp, Arabidopsis thaliana
atctgacgtggcttctt

SEQ ID NO: 54178 - DNA, 17 bp, Arabidopsis thaliana
atctgacgtggtttctc

SEQ ID NO: 54179 - DNA, 17 bp, Arabidopsis thaliana
atctgacgttctatcca

SEQ ID NO: 54180 - DNA, 17 bp, Arabidopsis thaliana
atctgactagtccactg

SEQ ID NO: 54181 - DNA, 17 bp, Arabidopsis thaliana
atctgactagtccattg

SEQ ID NO: 54182 - DNA, 17 bp, Arabidopsis thaliana
atctgactcaggttggt

SEQ ID NO: 54183 - DNA, 17 bp, Arabidopsis thaliana
atctgactctagtccga

SEQ ID NO: 54184 - DNA, 17 bp, Arabidopsis thaliana
atctgactctgctcttc

SEQ ID NO: 54185 - DNA, 17 bp, Arabidopsis thaliana
atctgactctgctcttg

SEQ ID NO: 54186 - DNA, 17 bp, Arabidopsis thaliana
atctgactctgtttgtt

SEQ ID NO: 54187 - DNA, 17 bp, Arabidopsis thaliana
atctgactctgtttttt

SEQ ID NO: 54188 - DNA, 17 bp, Arabidopsis thaliana
atctgactgaacgactg

SEQ ID NO: 54189 - DNA, 17 bp, Arabidopsis thaliana
atctgactgagctagga

SEQ ID NO: 54190 - DNA, 17 bp, Arabidopsis thaliana
atctgactgagctaggt

SEQ ID NO: 54191 - DNA, 17 bp, Arabidopsis thaliana
atctgactgcgtgtaaa

SEQ ID NO: 54192 - DNA, 17 bp, Arabidopsis thaliana
atctgactgtgcttggt

SEQ ID NO: 54193 - DNA, 17 bp, Arabidopsis thaliana
atctgacttagttccaa

SEQ ID NO: 54194 - DNA, 17 bp, Arabidopsis thaliana
atctgacttggcatgat

SEQ ID NO: 54195 - DNA, 17 bp, Arabidopsis thaliana
atctgagactagagatc

SEQ ID NO: 54196 - DNA, 17 bp, Arabidopsis thaliana
atctgagactgagagtt

SEQ ID NO: 54197 - DNA, 17 bp, Arabidopsis thaliana
atctgagatggctgttg

SEQ ID NO: 54198 - DNA, 17 bp, Arabidopsis thaliana
atctgagcaaatgcttc

SEQ ID NO: 54199 - DNA, 17 bp, Arabidopsis thaliana
atctgagcccatcatcc

SEQ ID NO: 54200 - DNA, 17 bp, Arabidopsis thaliana
atctgagcccatcatct

SEQ ID NO: 54201 - DNA, 17 bp, Arabidopsis thaliana
atctgagcgattgggtt

SEQ ID NO: 54202 - DNA, 17 bp, Arabidopsis thaliana
atctgagctgcccagtc

SEQ ID NO: 54203 - DNA, 17 bp, Arabidopsis thaliana
atctgagcttctctctc

SEQ ID NO: 54204 - DNA, 17 bp, Arabidopsis thaliana
atctgagctttgtccgc

SEQ ID NO: 54205 - DNA, 17 bp, Arabidopsis thaliana
atctgaggatgtcacgt

SEQ ID NO: 54206 - DNA, 17 bp, Arabidopsis thaliana
atctgaggattgtgagt

SEQ ID NO: 54207 - DNA, 17 bp, Arabidopsis thaliana
atctgaggcatagttgt

SEQ ID NO: 54208 - DNA, 17 bp, Arabidopsis thaliana
atctgagtaatcccggg

SEQ ID NO: 54209 - DNA, 17 bp, Arabidopsis thaliana
atctgagtagtcgtgtg

SEQ ID NO: 54210 - DNA, 17 bp, Arabidopsis thaliana
atctgagtccaactttg

SEQ ID NO: 54211 - DNA, 17 bp, Arabidopsis thaliana
atctgagtccgagtttg

SEQ ID NO: 54212 - DNA, 17 bp, Arabidopsis thaliana
atctgagtgcttgcctt

SEQ ID NO: 54213 - DNA, 17 bp, Arabidopsis thaliana
atctgagttactccgtc

SEQ ID NO: 54214 - DNA, 17 bp, Arabidopsis thaliana
atctgatacccagctga

SEQ ID NO: 54215 - DNA, 17 bp, Arabidopsis thaliana
atctgatacccagctgc

SEQ ID NO: 54216 - DNA, 17 bp, Arabidopsis thaliana
atctgatagttgctcca

SEQ ID NO: 54217 - DNA, 17 bp, Arabidopsis thaliana
atctgatatgtgggcca

SEQ ID NO: 54218 - DNA, 17 bp, Arabidopsis thaliana
atctgatcagcttcccc

SEQ ID NO: 54219 - DNA, 17 bp, Arabidopsis thaliana
atctgatcagcttctta

SEQ ID NO: 54220 - DNA, 17 bp, Arabidopsis thaliana
atctgatcatcggccat

SEQ ID NO: 54221 - DNA, 17 bp, Arabidopsis thaliana
atctgatccatcttcgg

SEQ ID NO: 54222 - DNA, 17 bp, Arabidopsis thaliana
atctgatcccgactttg

SEQ ID NO: 54223 - DNA, 17 bp, Arabidopsis thaliana
atctgatccctttgctt

SEQ ID NO: 54224 - DNA, 17 bp, Arabidopsis thaliana
atctgatccgtcttgct

SEQ ID NO: 54225 - DNA, 17 bp, Arabidopsis thaliana
atctgatcctagatctg

SEQ ID NO: 54226 - DNA, 17 bp, Arabidopsis thaliana
atctgatcgacagactt

SEQ ID NO: 54227 - DNA, 17 bp, Arabidopsis thaliana
atctgatcgactcttga

SEQ ID NO: 54228 - DNA, 17 bp, Arabidopsis thaliana
atctgatcgttcgagag

SEQ ID NO: 54229 - DNA, 17 bp, Arabidopsis thaliana
atctgatcgttgacttg

SEQ ID NO: 54230 - DNA, 17 bp, Arabidopsis thaliana
atctgatcgtttgactt

SEQ ID NO: 54231 - DNA, 17 bp, Arabidopsis thaliana
atctgatctccataagg

SEQ ID NO: 54232 - DNA, 17 bp, Arabidopsis thaliana
atctgatctgtagacag

SEQ ID NO: 54233 - DNA, 17 bp, Arabidopsis thaliana
atctgatctttgtagcg

SEQ ID NO: 54234 - DNA, 17 bp, Arabidopsis thaliana
atctgatcttttgactt

SEQ ID NO: 54235 - DNA, 17 bp, Arabidopsis thaliana
atctgatgacgtgtcac

SEQ ID NO: 54236 - DNA, 17 bp, Arabidopsis thaliana
atctgatgactcggatt

SEQ ID NO: 54237 - DNA, 17 bp, Arabidopsis thaliana
atctgatggacttgagc

SEQ ID NO: 54238 - DNA, 17 bp, Arabidopsis thaliana
atctgatggatgtccac

SEQ ID NO: 54239 - DNA, 17 bp, Arabidopsis thaliana
atctgatgtcctatctg

SEQ ID NO: 54240 - DNA, 17 bp, Arabidopsis thaliana
atctgatgtcgtcggcg

SEQ ID NO: 54241 - DNA, 17 bp, Arabidopsis thaliana
atctgatgtcgtcggct

SEQ ID NO: 54242 - DNA, 17 bp, Arabidopsis thaliana
atctgattcatccccgg

SEQ ID NO: 54243 - DNA, 17 bp, Arabidopsis thaliana
atctgattcatcgacgc

SEQ ID NO: 54244 - DNA, 17 bp, Arabidopsis thaliana
atctgattctctaccag

SEQ ID NO: 54245 - DNA, 17 bp, Arabidopsis thaliana
atctgattctggcgatt

SEQ ID NO: 54246 - DNA, 17 bp, Arabidopsis thaliana
atctgattctgtgaacc

SEQ ID NO: 54247 - DNA, 17 bp, Arabidopsis thaliana
atctgattgagccgcgc

SEQ ID NO: 54248 - DNA, 17 bp, Arabidopsis thaliana
atctgattggatgaccg

SEQ ID NO: 54249 - DNA, 17 bp, Arabidopsis thaliana
atctgattggtgcggta

SEQ ID NO: 54250 - DNA, 17 bp, Arabidopsis thaliana
atctgattgttgagatg

SEQ ID NO: 54251 - DNA, 17 bp, Arabidopsis thaliana
atctgattttggggtct

SEQ ID NO: 54252 - DNA, 17 bp, Arabidopsis thaliana
atctgcaaatacgagag

SEQ ID NO: 54253 - DNA, 17 bp, Arabidopsis thaliana
atctgcaacgcgtgtgg

SEQ ID NO: 54254 - DNA, 17 bp, Arabidopsis thaliana
atctgcaactttagtct

SEQ ID NO: 54255 - DNA, 17 bp, Arabidopsis thaliana
atctgcaagcatagctg

SEQ ID NO: 54256 - DNA, 17 bp, Arabidopsis thaliana
atctgcaatttaaccgc

SEQ ID NO: 54257 - DNA, 17 bp, Arabidopsis thaliana
atctgcacagttcgagg

SEQ ID NO: 54258 - DNA, 17 bp, Arabidopsis thaliana
atctgcaccgatcatac

SEQ ID NO: 54259 - DNA, 17 bp, Arabidopsis thaliana
atctgcacctagatgaa

SEQ ID NO: 54260 - DNA, 17 bp, Arabidopsis thaliana
atctgcacctagatgga

SEQ ID NO: 54261 - DNA, 17 bp, Arabidopsis thaliana
atctgcagatgatttga

SEQ ID NO: 54262 - DNA, 17 bp, Arabidopsis thaliana
atctgcagattgtagtt

SEQ ID NO: 54263 - DNA, 17 bp, Arabidopsis thaliana
atctgcagcagctgtgt

SEQ ID NO: 54264 - DNA, 17 bp, Arabidopsis thaliana
atctgcagggggtgttg

SEQ ID NO: 54265 - DNA, 17 bp, Arabidopsis thaliana
atctgcaggtttgtttg

SEQ ID NO: 54266 - DNA, 17 bp, Arabidopsis thaliana
atctgcagtataccgcg

SEQ ID NO: 54267 - DNA, 17 bp, Arabidopsis thaliana
atctgcagtataccgtg

SEQ ID NO: 54268 - DNA, 17 bp, Arabidopsis thaliana
atctgcagttaaaccgc

SEQ ID NO: 54269 - DNA, 17 bp, Arabidopsis thaliana
atctgcagttgaaccac

SEQ ID NO: 54270 - DNA, 17 bp, Arabidopsis thaliana
atctgcagttgaaccga

SEQ ID NO: 54271 - DNA, 17 bp, Arabidopsis thaliana
atctgcagttgaaccgc

SEQ ID NO: 54272 - DNA, 17 bp, Arabidopsis thaliana
atctgcagttgaatcgc

SEQ ID NO: 54273 - DNA, 17 bp, Arabidopsis thaliana
atctgcagttgagccgc

SEQ ID NO: 54274 - DNA, 17 bp, Arabidopsis thaliana
atctgcagtttaaccgc

SEQ ID NO: 54275 - DNA, 17 bp, Arabidopsis thaliana
atctgcagtttcagttc

SEQ ID NO: 54276 - DNA, 17 bp, Arabidopsis thaliana
atctgcattgggtttgc

SEQ ID NO: 54277 - DNA, 17 bp, Arabidopsis thaliana
atctgcatttgagtttt

SEQ ID NO: 54278 - DNA, 17 bp, Arabidopsis thaliana
atctgcatttggtgaag

SEQ ID NO: 54279 - DNA, 17 bp, Arabidopsis thaliana
atctgccaaacccgtcc

SEQ ID NO: 54280 - DNA, 17 bp, Arabidopsis thaliana
atctgccaaacgggttc

SEQ ID NO: 54281 - DNA, 17 bp, Arabidopsis thaliana
atctgccacgaaaacct

SEQ ID NO: 54282 - DNA, 17 bp, Arabidopsis thaliana
atctgccataatttgct

SEQ ID NO: 54283 - DNA, 17 bp, Arabidopsis thaliana
atctgccatctttgtga

SEQ ID NO: 54284 - DNA, 17 bp, Arabidopsis thaliana
atctgcccatcgtttcg

SEQ ID NO: 54285 - DNA, 17 bp, Arabidopsis thaliana
atctgccgaagctgtcg

SEQ ID NO: 54286 - DNA, 17 bp, Arabidopsis thaliana
atctgccgaagctgtgg

SEQ ID NO: 54287 - DNA, 17 bp, Arabidopsis thaliana
atctgccgactcatcca

SEQ ID NO: 54288 - DNA, 17 bp, Arabidopsis thaliana
atctgccgagaaacaaa

SEQ ID NO: 54289 - DNA, 17 bp, Arabidopsis thaliana
atctgccgagtccgttt

SEQ ID NO: 54290 - DNA, 17 bp, Arabidopsis thaliana
atctgccgggggacgga

SEQ ID NO: 54291 - DNA, 17 bp, Arabidopsis thaliana
atctgccgttgagcggt

SEQ ID NO: 54292 - DNA, 17 bp, Arabidopsis thaliana
atctgcctatgcggggg

SEQ ID NO: 54293 - DNA, 17 bp, Arabidopsis thaliana
atctgcctggctccctg

SEQ ID NO: 54294 - DNA, 17 bp, Arabidopsis thaliana
atctgcgaaataaataa

SEQ ID NO: 54295 - DNA, 17 bp, Arabidopsis thaliana
atctgcgaaataaattt

SEQ ID NO: 54296 - DNA, 17 bp, Arabidopsis thaliana
atctgcgaaccagggca

SEQ ID NO: 54297 - DNA, 17 bp, Arabidopsis thaliana
atctgcgacagcttaac

SEQ ID NO: 54298 - DNA, 17 bp, Arabidopsis thaliana
atctgcgactttccgac

SEQ ID NO: 54299 - DNA, 17 bp, Arabidopsis thaliana
atctgcgagacgattag

SEQ ID NO: 54300 - DNA, 17 bp, Arabidopsis thaliana
atctgcgatactacgaa

SEQ ID NO: 54301 - DNA, 17 bp, Arabidopsis thaliana
atctgcgatatcacgaa

SEQ ID NO: 54302 - DNA, 17 bp, Arabidopsis thaliana
atctgcgattttgaggt

SEQ ID NO: 54303 - DNA, 17 bp, Arabidopsis thaliana
atctgcggaggtcgtcc

SEQ ID NO: 54304 - DNA, 17 bp, Arabidopsis thaliana
atctgcggcgtgaaatc

SEQ ID NO: 54305 - DNA, 17 bp, Arabidopsis thaliana
atctgcggcttgctatg

SEQ ID NO: 54306 - DNA, 17 bp, Arabidopsis thaliana
atctgcgggtttggtgg

SEQ ID NO: 54307 - DNA, 17 bp, Arabidopsis thaliana
atctgcggtacacagcg

SEQ ID NO: 54308 - DNA, 17 bp, Arabidopsis thaliana
atctgcggttgaaccgc

SEQ ID NO: 54309 - DNA, 17 bp, Arabidopsis thaliana
atctgcggtttagtcca

SEQ ID NO: 54310 - DNA, 17 bp, Arabidopsis thaliana
atctgcgtgtcgatcga

SEQ ID NO: 54311 - DNA, 17 bp, Arabidopsis thaliana
atctgcgttttctaaag

SEQ ID NO: 54312 - DNA, 17 bp, Arabidopsis thaliana
atctgctaacctgtgcg

SEQ ID NO: 54313 - DNA, 17 bp, Arabidopsis thaliana
atctgctacatggttcg

SEQ ID NO: 54314 - DNA, 17 bp, Arabidopsis thaliana
atctgctacttttgcaa

SEQ ID NO: 54315 - DNA, 17 bp, Arabidopsis thaliana
atctgctagccaaagct

SEQ ID NO: 54316 - DNA, 17 bp, Arabidopsis thaliana
atctgctatgtttcttg

SEQ ID NO: 54317 - DNA, 17 bp, Arabidopsis thaliana
atctgctcagagttaaa

SEQ ID NO: 54318 - DNA, 17 bp, Arabidopsis thaliana
atctgctcattactgca

SEQ ID NO: 54319 - DNA, 17 bp, Arabidopsis thaliana
atctgctccaatcatgc

SEQ ID NO: 54320 - DNA, 17 bp, Arabidopsis thaliana
atctgctcccgctatcg

SEQ ID NO: 54321 - DNA, 17 bp, Arabidopsis thaliana
atctgctccgcctgata

SEQ ID NO: 54322 - DNA, 17 bp, Arabidopsis thaliana
atctgctccttcatcgc

SEQ ID NO: 54323 - DNA, 17 bp, Arabidopsis thaliana
atctgctcggcagatcg

SEQ ID NO: 54324 - DNA, 17 bp, Arabidopsis thaliana
atctgctctgcttaaac

SEQ ID NO: 54325 - DNA, 17 bp, Arabidopsis thaliana
atctgctgaccttcctt

SEQ ID NO: 54326 - DNA, 17 bp, Arabidopsis thaliana
atctgctgagtgttggg

SEQ ID NO: 54327 - DNA, 17 bp, Arabidopsis thaliana
atctgctgatgtttgcc

SEQ ID NO: 54328 - DNA, 17 bp, Arabidopsis thaliana
atctgctgcgcgtggtg

SEQ ID NO: 54329 - DNA, 17 bp, Arabidopsis thaliana
atctgctgcttcatctt

SEQ ID NO: 54330 - DNA, 17 bp, Arabidopsis thaliana
atctgctggaaatgaat

SEQ ID NO: 54331 - DNA, 17 bp, Arabidopsis thaliana
atctgctggatttggcg

SEQ ID NO: 54332 - DNA, 17 bp, Arabidopsis thaliana
atctgctggctatacct

SEQ ID NO: 54333 - DNA, 17 bp, Arabidopsis thaliana
atctgctgggatcggac

SEQ ID NO: 54334 - DNA, 17 bp, Arabidopsis thaliana
atctgctgggcctcatc

SEQ ID NO: 54335 - DNA, 17 bp, Arabidopsis thaliana
atctgctgggcctcctc

SEQ ID NO: 54336 - DNA, 17 bp, Arabidopsis thaliana
atctgctgtagatcaca

SEQ ID NO: 54337 - DNA, 17 bp, Arabidopsis thaliana
atctgctgtgacaagct

SEQ ID NO: 54338 - DNA, 17 bp, Arabidopsis thaliana
atctgctgtttccattc

SEQ ID NO: 54339 - DNA, 17 bp, Arabidopsis thaliana
atctgcttagtggaaag

SEQ ID NO: 54340 - DNA, 17 bp, Arabidopsis thaliana
atctgcttgatccgctc

SEQ ID NO: 54341 - DNA, 17 bp, Arabidopsis thaliana
atctgcttgatccgctt

SEQ ID NO: 54342 - DNA, 17 bp, Arabidopsis thaliana
atctgctttgcaggata

SEQ ID NO: 54343 - DNA, 17 bp, Arabidopsis thaliana
atctgctttgtccgctt

SEQ ID NO: 54344 - DNA, 17 bp, Arabidopsis thaliana
atctggaaccggtgtcc

SEQ ID NO: 54345 - DNA, 17 bp, Arabidopsis thaliana
atctggaactaccggat

SEQ ID NO: 54346 - DNA, 17 bp, Arabidopsis thaliana
atctggacagtggtgta

SEQ ID NO: 54347 - DNA, 17 bp, Arabidopsis thaliana
atctggaccgagagaca

SEQ ID NO: 54348 - DNA, 17 bp, Arabidopsis thaliana
atctggacgcatgtgtg

SEQ ID NO: 54349 - DNA, 17 bp, Arabidopsis thaliana
atctggactaacaggat

SEQ ID NO: 54350 - DNA, 17 bp, Arabidopsis thaliana
atctggactcgggcaat

SEQ ID NO: 54351 - DNA, 17 bp, Arabidopsis thaliana
atctggactgccataag

SEQ ID NO: 54352 - DNA, 17 bp, Arabidopsis thaliana
atctggactgccatcag

SEQ ID NO: 54353 - DNA, 17 bp, Arabidopsis thaliana
atctggactggccctga

SEQ ID NO: 54354 - DNA, 17 bp, Arabidopsis thaliana
atctggactttggctaa

SEQ ID NO: 54355 - DNA, 17 bp, Arabidopsis thaliana
atctggagagattacgg

SEQ ID NO: 54356 - DNA, 17 bp, Arabidopsis thaliana
atctggaggcgggagca

SEQ ID NO: 54357 - DNA, 17 bp, Arabidopsis thaliana
atctggaggctacacgc

SEQ ID NO: 54358 - DNA, 17 bp, Arabidopsis thaliana
atctggatatcatacgg

SEQ ID NO: 54359 - DNA, 17 bp, Arabidopsis thaliana
atctggatcacggttgt

SEQ ID NO: 54360 - DNA, 17 bp, Arabidopsis thaliana
atctggatcgtggtcat

SEQ ID NO: 54361 - DNA, 17 bp, Arabidopsis thaliana
atctggatggagatgag

SEQ ID NO: 54362 - DNA, 17 bp, Arabidopsis thaliana
atctggatgtacctttc

SEQ ID NO: 54363 - DNA, 17 bp, Arabidopsis thaliana
atctggattttctaaag

SEQ ID NO: 54364 - DNA, 17 bp, Arabidopsis thaliana
atctggatttttaccac

SEQ ID NO: 54365 - DNA, 17 bp, Arabidopsis thaliana
atctggcagctgattta

SEQ ID NO: 54366 - DNA, 17 bp, Arabidopsis thaliana
atctggccaaagctgag

SEQ ID NO: 54367 - DNA, 17 bp, Arabidopsis thaliana
atctggccaaagttgag

SEQ ID NO: 54368 - DNA, 17 bp, Arabidopsis thaliana
atctggccgcaccgtcg

SEQ ID NO: 54369 - DNA, 17 bp, Arabidopsis thaliana
atctggccgcagcgtgg

SEQ ID NO: 54370 - DNA, 17 bp, Arabidopsis thaliana
atctggcgatttcaagc

SEQ ID NO: 54371 - DNA, 17 bp, Arabidopsis thaliana
atctggcgatttcgaac

SEQ ID NO: 54372 - DNA, 17 bp, Arabidopsis thaliana
atctggcgatttcgagc

SEQ ID NO: 54373 - DNA, 17 bp, Arabidopsis thaliana
atctggcgtaacagact

SEQ ID NO: 54374 - DNA, 17 bp, Arabidopsis thaliana
atctggctcacccagga

SEQ ID NO: 54375 - DNA, 17 bp, Arabidopsis thaliana
atctggctctcacccag

SEQ ID NO: 54376 - DNA, 17 bp, Arabidopsis thaliana
atctggcttcacccagg

SEQ ID NO: 54377 - DNA, 17 bp, Arabidopsis thaliana
atctggcttccgatcgg

SEQ ID NO: 54378 - DNA, 17 bp, Arabidopsis thaliana
atctggcttggtatctg

SEQ ID NO: 54379 - DNA, 17 bp, Arabidopsis thaliana
atctggctttggtttac

SEQ ID NO: 54380 - DNA, 17 bp, Arabidopsis thaliana
atctgggagtgacgcgt

SEQ ID NO: 54381 - DNA, 17 bp, Arabidopsis thaliana
atctgggcaaaactttt

SEQ ID NO: 54382 - DNA, 17 bp, Arabidopsis thaliana
atctgggcaccaatcat

SEQ ID NO: 54383 - DNA, 17 bp, Arabidopsis thaliana
atctgggccctgaaaaa

SEQ ID NO: 54384 - DNA, 17 bp, Arabidopsis thaliana
atctgggcctaagcccg

SEQ ID NO: 54385 - DNA, 17 bp, Arabidopsis thaliana
atctgggctgctttgtt

SEQ ID NO: 54386 - DNA, 17 bp, Arabidopsis thaliana
atctggggaagtatctt

SEQ ID NO: 54387 - DNA, 17 bp, Arabidopsis thaliana
atctggggcgtagccaa

SEQ ID NO: 54388 - DNA, 17 bp, Arabidopsis thaliana
atctgggtgatctatct

SEQ ID NO: 54389 - DNA, 17 bp, Arabidopsis thaliana
atctgggttcggctctg

SEQ ID NO: 54390 - DNA, 17 bp, Arabidopsis thaliana
atctgggttcgggtcgg

SEQ ID NO: 54391 - DNA, 17 bp, Arabidopsis thaliana
atctgggtttggttccc

SEQ ID NO: 54392 - DNA, 17 bp, Arabidopsis thaliana
atctggtagaacgagtt

SEQ ID NO: 54393 - DNA, 17 bp, Arabidopsis thaliana
atctggtagaccgatcg

SEQ ID NO: 54394 - DNA, 17 bp, Arabidopsis thaliana
atctggtagtcaaaaat

SEQ ID NO: 54395 - DNA, 17 bp, Arabidopsis thaliana
atctggtattccctcct

SEQ ID NO: 54396 - DNA, 17 bp, Arabidopsis thaliana
atctggtcacgggttcg

SEQ ID NO: 54397 - DNA, 17 bp, Arabidopsis thaliana
atctggtcacttctccg

SEQ ID NO: 54398 - DNA, 17 bp, Arabidopsis thaliana
atctggtcatgtggtta

SEQ ID NO: 54399 - DNA, 17 bp, Arabidopsis thaliana
atctggtcctagcgact

SEQ ID NO: 54400 - DNA, 17 bp, Arabidopsis thaliana
atctggtcctggaaaat

SEQ ID NO: 54401 - DNA, 17 bp, Arabidopsis thaliana
atctggtgctccacata

SEQ ID NO: 54402 - DNA, 17 bp, Arabidopsis thaliana
atctggtgctctacata

SEQ ID NO: 54403 - DNA, 17 bp, Arabidopsis thaliana
atctggtggaacgagtt

SEQ ID NO: 54404 - DNA, 17 bp, Arabidopsis thaliana
atctggtggatccggtg

SEQ ID NO: 54405 - DNA, 17 bp, Arabidopsis thaliana
atctggtgtcgaagagc

SEQ ID NO: 54406 - DNA, 17 bp, Arabidopsis thaliana
atctggtgtgcctctgg

SEQ ID NO: 54407 - DNA, 17 bp, Arabidopsis thaliana
atctggtgtggatcccg

SEQ ID NO: 54408 - DNA, 17 bp, Arabidopsis thaliana
atctggtgttgacggtc

SEQ ID NO: 54409 - DNA, 17 bp, Arabidopsis thaliana
atctggttaccggactt

SEQ ID NO: 54410 - DNA, 17 bp, Arabidopsis thaliana
atctggttaggattctg

SEQ ID NO: 54411 - DNA, 17 bp, Arabidopsis thaliana
atctggttccgactgac

SEQ ID NO: 54412 - DNA, 17 bp, Arabidopsis thaliana
atctggttcgctttgga

SEQ ID NO: 54413 - DNA, 17 bp, Arabidopsis thaliana
atctggttgacccaatg

SEQ ID NO: 54414 - DNA, 17 bp, Arabidopsis thaliana
atctggttgactcagtg

SEQ ID NO: 54415 - DNA, 17 bp, Arabidopsis thaliana
atctggttgattctggc

SEQ ID NO: 54416 - DNA, 17 bp, Arabidopsis thaliana
atctggttgcggtttaa

SEQ ID NO: 54417 - DNA, 17 bp, Arabidopsis thaliana
atctggttgctcttgga

SEQ ID NO: 54418 - DNA, 17 bp, Arabidopsis thaliana
atctggttgcttgagtt

SEQ ID NO: 54419 - DNA, 17 bp, Arabidopsis thaliana
atctggtttatctggtg

SEQ ID NO: 54420 - DNA, 17 bp, Arabidopsis thaliana
atctggtttgcggggca

SEQ ID NO: 54421 - DNA, 17 bp, Arabidopsis thaliana
atctgtacagtgatcta

SEQ ID NO: 54422 - DNA, 17 bp, Arabidopsis thaliana
atctgtagaccgtgata

SEQ ID NO: 54423 - DNA, 17 bp, Arabidopsis thaliana
atctgtaggatctatgg

SEQ ID NO: 54424 - DNA, 17 bp, Arabidopsis thaliana
atctgtagttaagctgc

SEQ ID NO: 54425 - DNA, 17 bp, Arabidopsis thaliana
atctgtatcaaacattg

SEQ ID NO: 54426 - DNA, 17 bp, Arabidopsis thaliana
atctgtcaaaagatctc

SEQ ID NO: 54427 - DNA, 17 bp, Arabidopsis thaliana
atctgtcactgatttgt

SEQ ID NO: 54428 - DNA, 17 bp, Arabidopsis thaliana
atctgtcagcggtccag

SEQ ID NO: 54429 - DNA, 17 bp, Arabidopsis thaliana
atctgtcagttgggctt

SEQ ID NO: 54430 - DNA, 17 bp, Arabidopsis thaliana
atctgtcagtttcatat

SEQ ID NO: 54431 - DNA, 17 bp, Arabidopsis thaliana
atctgtcccacactttg

SEQ ID NO: 54432 - DNA, 17 bp, Arabidopsis thaliana
atctgtcccgctatatt

SEQ ID NO: 54433 - DNA, 17 bp, Arabidopsis thaliana
atctgtccctgtctact

SEQ ID NO: 54434 - DNA, 17 bp, Arabidopsis thaliana
atctgtcgcatttgggt

SEQ ID NO: 54435 - DNA, 17 bp, Arabidopsis thaliana
atctgtcgctgagacaa

SEQ ID NO: 54436 - DNA, 17 bp, Arabidopsis thaliana
atctgtcgctgagacat

SEQ ID NO: 54437 - DNA, 17 bp, Arabidopsis thaliana
atctgtcggctttggtt

SEQ ID NO: 54438 - DNA, 17 bp, Arabidopsis thaliana
atctgtcgggaaagacc

SEQ ID NO: 54439 - DNA, 17 bp, Arabidopsis thaliana
atctgtctaactgtctt

SEQ ID NO: 54440 - DNA, 17 bp, Arabidopsis thaliana
atctgtctatccagggc

SEQ ID NO: 54441 - DNA, 17 bp, Arabidopsis thaliana
atctgtctcaggattga

SEQ ID NO: 54442 - DNA, 17 bp, Arabidopsis thaliana
atctgtctcccagactt

SEQ ID NO: 54443 - DNA, 17 bp, Arabidopsis thaliana
atctgtctgttactcga

SEQ ID NO: 54444 - DNA, 17 bp, Arabidopsis thaliana
atctgtgaagcgtaacc

SEQ ID NO: 54445 - DNA, 17 bp, Arabidopsis thaliana
atctgtgacatctactg

SEQ ID NO: 54446 - DNA, 17 bp, Arabidopsis thaliana
atctgtgacgcgtggta

SEQ ID NO: 54447 - DNA, 17 bp, Arabidopsis thaliana
atctgtgacggtcggca

SEQ ID NO: 54448 - DNA, 17 bp, Arabidopsis thaliana
atctgtgacttttgtcc

SEQ ID NO: 54449 - DNA, 17 bp, Arabidopsis thaliana
atctgtgataagtctcc

SEQ ID NO: 54450 - DNA, 17 bp, Arabidopsis thaliana
atctgtgattaacggcg

SEQ ID NO: 54451 - DNA, 17 bp, Arabidopsis thaliana
atctgtgcacaaggctt

SEQ ID NO: 54452 - DNA, 17 bp, Arabidopsis thaliana
atctgtgcaggttgtca

SEQ ID NO: 54453 - DNA, 17 bp, Arabidopsis thaliana
atctgtgcctaccggct

SEQ ID NO: 54454 - DNA, 17 bp, Arabidopsis thaliana
atctgtgcctgaagttc

SEQ ID NO: 54455 - DNA, 17 bp, Arabidopsis thaliana
atctgtgctatattacg

SEQ ID NO: 54456 - DNA, 17 bp, Arabidopsis thaliana
atctgtggcagtttatc

SEQ ID NO: 54457 - DNA, 17 bp, Arabidopsis thaliana
atctgtggctcttgttg

SEQ ID NO: 54458 - DNA, 17 bp, Arabidopsis thaliana
atctgtggtagtcggca

SEQ ID NO: 54459 - DNA, 17 bp, Arabidopsis thaliana
atctgtggtgtcgtagc

SEQ ID NO: 54460 - DNA, 17 bp, Arabidopsis thaliana
atctgtgtaacctcagg

SEQ ID NO: 54461 - DNA, 17 bp, Arabidopsis thaliana
atctgtgtaattgtgtg

SEQ ID NO: 54462 - DNA, 17 bp, Arabidopsis thaliana
atctgtgtccgtctaga

SEQ ID NO: 54463 - DNA, 17 bp, Arabidopsis thaliana
atctgtgtgactctgga

SEQ ID NO: 54464 - DNA, 17 bp, Arabidopsis thaliana
atctgtgttgaccggaa

SEQ ID NO: 54465 - DNA, 17 bp, Arabidopsis thaliana
atctgtgtttcgggttc

SEQ ID NO: 54466 - DNA, 17 bp, Arabidopsis thaliana
atctgttacagaggcgg

SEQ ID NO: 54467 - DNA, 17 bp, Arabidopsis thaliana
atctgttactaattggg

SEQ ID NO: 54468 - DNA, 17 bp, Arabidopsis thaliana
atctgttagagctttcc

SEQ ID NO: 54469 - DNA, 17 bp, Arabidopsis thaliana
atctgttagccaaagct

SEQ ID NO: 54470 - DNA, 17 bp, Arabidopsis thaliana
atctgttcagaagaggt

SEQ ID NO: 54471 - DNA, 17 bp, Arabidopsis thaliana
atctgttcggggacatc

SEQ ID NO: 54472 - DNA, 17 bp, Arabidopsis thaliana
atctgttcgtttgactg

SEQ ID NO: 54473 - DNA, 17 bp, Arabidopsis thaliana
atctgttcgtttgactt

SEQ ID NO: 54474 - DNA, 17 bp, Arabidopsis thaliana
atctgttctattgggtt

SEQ ID NO: 54475 - DNA, 17 bp, Arabidopsis thaliana
atctgttctttgctcct

SEQ ID NO: 54476 - DNA, 17 bp, Arabidopsis thaliana
atctgttgactggatcc

SEQ ID NO: 54477 - DNA, 17 bp, Arabidopsis thaliana
atctgttgaggccttgg

SEQ ID NO: 54478 - DNA, 17 bp, Arabidopsis thaliana
atctgttgcgtctacgt

SEQ ID NO: 54479 - DNA, 17 bp, Arabidopsis thaliana
atctgttggagctggat

SEQ ID NO: 54480 - DNA, 17 bp, Arabidopsis thaliana
atctgttgggcttcgcc

SEQ ID NO: 54481 - DNA, 17 bp, Arabidopsis thaliana
atctgttgggttagcca

SEQ ID NO: 54482 - DNA, 17 bp, Arabidopsis thaliana
atctgttgggttagccc

SEQ ID NO: 54483 - DNA, 17 bp, Arabidopsis thaliana
atctgttgtcactcagg

SEQ ID NO: 54484 - DNA, 17 bp, Arabidopsis thaliana
atctgttgttggtctgc

SEQ ID NO: 54485 - DNA, 17 bp, Arabidopsis thaliana
atctgtttcaaacgcct

SEQ ID NO: 54486 - DNA, 17 bp, Arabidopsis thaliana
atctgtttcgcttctct

SEQ ID NO: 54487 - DNA, 17 bp, Arabidopsis thaliana
atctgtttggtttgcaa

SEQ ID NO: 54488 - DNA, 17 bp, Arabidopsis thaliana
atctgttttccgacctg

SEQ ID NO: 54489 - DNA, 17 bp, Arabidopsis thaliana
atctgttttctgtagac

SEQ ID NO: 54490 - DNA, 17 bp, Arabidopsis thaliana
atcttaaacttgtgttg

SEQ ID NO: 54491 - DNA, 17 bp, Arabidopsis thaliana
atcttaaacttgttttg

SEQ ID NO: 54492 - DNA, 17 bp, Arabidopsis thaliana
atcttaaagtgtttgac

SEQ ID NO: 54493 - DNA, 17 bp, Arabidopsis thaliana
atcttaacatgccagtc

SEQ ID NO: 54494 - DNA, 17 bp, Arabidopsis thaliana
atcttaaccgttcatca

SEQ ID NO: 54495 - DNA, 17 bp, Arabidopsis thaliana
atcttaacttagccata

SEQ ID NO: 54496 - DNA, 17 bp, Arabidopsis thaliana
atcttaacttcgggaaa

SEQ ID NO: 54497 - DNA, 17 bp, Arabidopsis thaliana
atcttaagagtatcgca

SEQ ID NO: 54498 - DNA, 17 bp, Arabidopsis thaliana
atcttaaggatttgtgg

SEQ ID NO: 54499 - DNA, 17 bp, Arabidopsis thaliana
atcttaagggtaatttc

SEQ ID NO: 54500 - DNA, 17 bp, Arabidopsis thaliana
atcttaagtgtcgtctt

SEQ ID NO: 54501 - DNA, 17 bp, Arabidopsis thaliana
atcttaatgatccgacg

SEQ ID NO: 54502 - DNA, 17 bp, Arabidopsis thaliana
atcttaatgatccgccg

SEQ ID NO: 54503 - DNA, 17 bp, Arabidopsis thaliana
atcttacaaatgcactc

SEQ ID NO: 54504 - DNA, 17 bp, Arabidopsis thaliana
atcttacaatgtcggac

SEQ ID NO: 54505 - DNA, 17 bp, Arabidopsis thaliana
atcttacacccatctat

SEQ ID NO: 54506 - DNA, 17 bp, Arabidopsis thaliana
atcttacatcagcttag

SEQ ID NO: 54507 - DNA, 17 bp, Arabidopsis thaliana
atcttaccatcaaatgc

SEQ ID NO: 54508 - DNA, 17 bp, Arabidopsis thaliana
atcttacccaggttcga

SEQ ID NO: 54509 - DNA, 17 bp, Arabidopsis thaliana
atcttaccttgccttgg

SEQ ID NO: 54510 - DNA, 17 bp, Arabidopsis thaliana
atcttacgggtcgggtt

SEQ ID NO: 54511 - DNA, 17 bp, Arabidopsis thaliana
atcttactagcaggttt

SEQ ID NO: 54512 - DNA, 17 bp, Arabidopsis thaliana
atcttactcgactgcac

SEQ ID NO: 54513 - DNA, 17 bp, Arabidopsis thaliana
atcttagagcttgtcgc

SEQ ID NO: 54514 - DNA, 17 bp, Arabidopsis thaliana
atcttagaggttgccgg

SEQ ID NO: 54515 - DNA, 17 bp, Arabidopsis thaliana
atcttagagtcggtgat

SEQ ID NO: 54516 - DNA, 17 bp, Arabidopsis thaliana
atcttagatggacattg

SEQ ID NO: 54517 - DNA, 17 bp, Arabidopsis thaliana
atcttagcaaactatgc

SEQ ID NO: 54518 - DNA, 17 bp, Arabidopsis thaliana
atcttagccatacacac

SEQ ID NO: 54519 - DNA, 17 bp, Arabidopsis thaliana
atcttagccctgtcatc

SEQ ID NO: 54520 - DNA, 17 bp, Arabidopsis thaliana
atcttagccgcgccctg

SEQ ID NO: 54521 - DNA, 17 bp, Arabidopsis thaliana
atcttagcgtgctgtgg

SEQ ID NO: 54522 - DNA, 17 bp, Arabidopsis thaliana
atcttagcttctcagaa

SEQ ID NO: 54523 - DNA, 17 bp, Arabidopsis thaliana
atcttaggaactacttg

SEQ ID NO: 54524 - DNA, 17 bp, Arabidopsis thaliana
atcttaggaactgattg

SEQ ID NO: 54525 - DNA, 17 bp, Arabidopsis thaliana
atcttaggaactgcttg

SEQ ID NO: 54526 - DNA, 17 bp, Arabidopsis thaliana
atcttaggttaactcgt

SEQ ID NO: 54527 - DNA, 17 bp, Arabidopsis thaliana
atcttagtcaatgtcct

SEQ ID NO: 54528 - DNA, 17 bp, Arabidopsis thaliana
atcttagtcacatcctg

SEQ ID NO: 54529 - DNA, 17 bp, Arabidopsis thaliana
atcttagtcgcatccgg

SEQ ID NO: 54530 - DNA, 17 bp, Arabidopsis thaliana
atcttagtcgcatcctg

SEQ ID NO: 54531 - DNA, 17 bp, Arabidopsis thaliana
atcttagtcgcattctg

SEQ ID NO: 54532 - DNA, 17 bp, Arabidopsis thaliana
atcttagtgatccgacg

SEQ ID NO: 54533 - DNA, 17 bp, Arabidopsis thaliana
atcttagtggattgaca

SEQ ID NO: 54534 - DNA, 17 bp, Arabidopsis thaliana
atcttagtggcagccac

SEQ ID NO: 54535 - DNA, 17 bp, Arabidopsis thaliana
atcttatcctcagcgcg

SEQ ID NO: 54536 - DNA, 17 bp, Arabidopsis thaliana
atcttatccttagtgcg

SEQ ID NO: 54537 - DNA, 17 bp, Arabidopsis thaliana
atcttatctccagcgtg

SEQ ID NO: 54538 - DNA, 17 bp, Arabidopsis thaliana
atcttatctgagcgatt

SEQ ID NO: 54539 - DNA, 17 bp, Arabidopsis thaliana
atcttatctgcagttga

SEQ ID NO: 54540 - DNA, 17 bp, Arabidopsis thaliana
atcttatgctggaagat

SEQ ID NO: 54541 - DNA, 17 bp, Arabidopsis thaliana
atcttattcggatggtc

SEQ ID NO: 54542 - DNA, 17 bp, Arabidopsis thaliana
atcttattggtgcttcc

SEQ ID NO: 54543 - DNA, 17 bp, Arabidopsis thaliana
atcttattgtgttggcc

SEQ ID NO: 54544 - DNA, 17 bp, Arabidopsis thaliana
atcttattgttgtttac

SEQ ID NO: 54545 - DNA, 17 bp, Arabidopsis thaliana
atcttatttcgagatgt

SEQ ID NO: 54546 - DNA, 17 bp, Arabidopsis thaliana
atcttatttgctgatcc

SEQ ID NO: 54547 - DNA, 17 bp, Arabidopsis thaliana
atcttcaaaatgcatat

SEQ ID NO: 54548 - DNA, 17 bp, Arabidopsis thaliana
atcttcaaacttccaat

SEQ ID NO: 54549 - DNA, 17 bp, Arabidopsis thaliana
atcttcaaagtgacaca

SEQ ID NO: 54550 - DNA, 17 bp, Arabidopsis thaliana
atcttcaaccttggatc

SEQ ID NO: 54551 - DNA, 17 bp, Arabidopsis thaliana
atcttcaacgagatccg

SEQ ID NO: 54552 - DNA, 17 bp, Arabidopsis thaliana
atcttcaacgtttgaat

SEQ ID NO: 54553 - DNA, 17 bp, Arabidopsis thaliana
atcttcaactaaaccgg

SEQ ID NO: 54554 - DNA, 17 bp, Arabidopsis thaliana
atcttcaactcgggact

SEQ ID NO: 54555 - DNA, 17 bp, Arabidopsis thaliana
atcttcaagacaattag

SEQ ID NO: 54556 - DNA, 17 bp, Arabidopsis thaliana
atcttcaaggtggaggt

SEQ ID NO: 54557 - DNA, 17 bp, Arabidopsis thaliana
atcttcaagtgcatgat

SEQ ID NO: 54558 - DNA, 17 bp, Arabidopsis thaliana
atcttcaagttcgctga

SEQ ID NO: 54559 - DNA, 17 bp, Arabidopsis thaliana
atcttcaatggttacaa

SEQ ID NO: 54560 - DNA, 17 bp, Arabidopsis thaliana
atcttcacaagaacttt

SEQ ID NO: 54561 - DNA, 17 bp, Arabidopsis thaliana
atcttcaccaaatctga

SEQ ID NO: 54562 - DNA, 17 bp, Arabidopsis thaliana
atcttcaccaagtctga

SEQ ID NO: 54563 - DNA, 17 bp, Arabidopsis thaliana
atcttcaccaggtcaga

SEQ ID NO: 54564 - DNA, 17 bp, Arabidopsis thaliana
atcttcaccaggtctga

SEQ ID NO: 54565 - DNA, 17 bp, Arabidopsis thaliana
atcttcaccaggtctgc

SEQ ID NO: 54566 - DNA, 17 bp, Arabidopsis thaliana
atcttcaccaggtgaac

SEQ ID NO: 54567 - DNA, 17 bp, Arabidopsis thaliana
atcttcaccgctcgctg

SEQ ID NO: 54568 - DNA, 17 bp, Arabidopsis thaliana
atcttcacggcgagtaa

SEQ ID NO: 54569 - DNA, 17 bp, Arabidopsis thaliana
atcttcacgtcatgatc

SEQ ID NO: 54570 - DNA, 17 bp, Arabidopsis thaliana
atcttcacgtgcaactg

SEQ ID NO: 54571 - DNA, 17 bp, Arabidopsis thaliana
atcttcactaagtttga

SEQ ID NO: 54572 - DNA, 17 bp, Arabidopsis thaliana
atcttcactaggtctga

SEQ ID NO: 54573 - DNA, 17 bp, Arabidopsis thaliana
atcttcactggatctgc

SEQ ID NO: 54574 - DNA, 17 bp, Arabidopsis thaliana
atcttcagaaaacgcgg

SEQ ID NO: 54575 - DNA, 17 bp, Arabidopsis thaliana
atcttcagagatctcgt

SEQ ID NO: 54576 - DNA, 17 bp, Arabidopsis thaliana
atcttcagattggcggt

SEQ ID NO: 54577 - DNA, 17 bp, Arabidopsis thaliana
atcttcagcatgctttc

SEQ ID NO: 54578 - DNA, 17 bp, Arabidopsis thaliana
atcttcagcatgtaatg

SEQ ID NO: 54579 - DNA, 17 bp, Arabidopsis thaliana
atcttcagtagacagct

SEQ ID NO: 54580 - DNA, 17 bp, Arabidopsis thaliana
atcttcagtcgctgtgt

SEQ ID NO: 54581 - DNA, 17 bp, Arabidopsis thaliana
atcttcagtcttcttgg

SEQ ID NO: 54582 - DNA, 17 bp, Arabidopsis thaliana
atcttcagttcagcggt

SEQ ID NO: 54583 - DNA, 17 bp, Arabidopsis thaliana
atcttcagttggatcac

SEQ ID NO: 54584 - DNA, 17 bp, Arabidopsis thaliana
atcttcagtttgagtca

SEQ ID NO: 54585 - DNA, 17 bp, Arabidopsis thaliana
atcttcagttttagtct

SEQ ID NO: 54586 - DNA, 17 bp, Arabidopsis thaliana
atcttcatattcgtcga

SEQ ID NO: 54587 - DNA, 17 bp, Arabidopsis thaliana
atcttcatcaattggtt

SEQ ID NO: 54588 - DNA, 17 bp, Arabidopsis thaliana
atcttcatcaggtctga

SEQ ID NO: 54589 - DNA, 17 bp, Arabidopsis thaliana
atcttcatccgaggacg

SEQ ID NO: 54590 - DNA, 17 bp, Arabidopsis thaliana
atcttcatcgccagttc

SEQ ID NO: 54591 - DNA, 17 bp, Arabidopsis thaliana
atcttcatcggagtcgc

SEQ ID NO: 54592 - DNA, 17 bp, Arabidopsis thaliana
atcttcattgagatggt

SEQ ID NO: 54593 - DNA, 17 bp, Arabidopsis thaliana
atcttcattgctaaacc

SEQ ID NO: 54594 - DNA, 17 bp, Arabidopsis thaliana
atcttcattgttggcgc

SEQ ID NO: 54595 - DNA, 17 bp, Arabidopsis thaliana
atcttcatttgcattgt

SEQ ID NO: 54596 - DNA, 17 bp, Arabidopsis thaliana
atcttcatttggggtcg

SEQ ID NO: 54597 - DNA, 17 bp, Arabidopsis thaliana
atcttcatttggggtct

SEQ ID NO: 54598 - DNA, 17 bp, Arabidopsis thaliana
atcttcatttttgggtg

SEQ ID NO: 54599 - DNA, 17 bp, Arabidopsis thaliana
atcttccaaaagcgtta

SEQ ID NO: 54600 - DNA, 17 bp, Arabidopsis thaliana
atcttccaagtgtcgtt

SEQ ID NO: 54601 - DNA, 17 bp, Arabidopsis thaliana
atcttccaagttgacct

SEQ ID NO: 54602 - DNA, 17 bp, Arabidopsis thaliana
atcttccacttcggttt

SEQ ID NO: 54603 - DNA, 17 bp, Arabidopsis thaliana
atcttccagaggcggga

SEQ ID NO: 54604 - DNA, 17 bp, Arabidopsis thaliana
atcttccagagtccggg

SEQ ID NO: 54605 - DNA, 17 bp, Arabidopsis thaliana
atcttcccaaggtaaca

SEQ ID NO: 54606 - DNA, 17 bp, Arabidopsis thaliana
atcttcccgagtaatgg

SEQ ID NO: 54607 - DNA, 17 bp, Arabidopsis thaliana
atcttccgacaaaagat

SEQ ID NO: 54608 - DNA, 17 bp, Arabidopsis thaliana
atcttccgcaatgggcg

SEQ ID NO: 54609 - DNA, 17 bp, Arabidopsis thaliana
atcttccgcatttgccg

SEQ ID NO: 54610 - DNA, 17 bp, Arabidopsis thaliana
atcttccgctggatttt

SEQ ID NO: 54611 - DNA, 17 bp, Arabidopsis thaliana
atcttccgctgtcaggc

SEQ ID NO: 54612 - DNA, 17 bp, Arabidopsis thaliana
atcttccgggtggaagt

SEQ ID NO: 54613 - DNA, 17 bp, Arabidopsis thaliana
atcttccgttgtgggac

SEQ ID NO: 54614 - DNA, 17 bp, Arabidopsis thaliana
atcttcctatgttgggc

SEQ ID NO: 54615 - DNA, 17 bp, Arabidopsis thaliana
atcttcctctaatgcga

SEQ ID NO: 54616 - DNA, 17 bp, Arabidopsis thaliana
atcttcctctcgttgga

SEQ ID NO: 54617 - DNA, 17 bp, Arabidopsis thaliana
atcttcctgacgagatg

SEQ ID NO: 54618 - DNA, 17 bp, Arabidopsis thaliana
atcttccttattcgctg

SEQ ID NO: 54619 - DNA, 17 bp, Arabidopsis thaliana
atcttccttccaggctt

SEQ ID NO: 54620 - DNA, 17 bp, Arabidopsis thaliana
atcttccttgtcagaag

SEQ ID NO: 54621 - DNA, 17 bp, Arabidopsis thaliana
atcttcgaactatggat

SEQ ID NO: 54622 - DNA, 17 bp, Arabidopsis thaliana
atcttcgaactgtggat

SEQ ID NO: 54623 - DNA, 17 bp, Arabidopsis thaliana
atcttcgaagcgggact

SEQ ID NO: 54624 - DNA, 17 bp, Arabidopsis thaliana
atcttcgaaggcctagc

SEQ ID NO: 54625 - DNA, 17 bp, Arabidopsis thaliana
atcttcgaagtgtctgg

SEQ ID NO: 54626 - DNA, 17 bp, Arabidopsis thaliana
atcttcgaccttggatc

SEQ ID NO: 54627 - DNA, 17 bp, Arabidopsis thaliana
atcttcgacgagtgtgg

SEQ ID NO: 54628 - DNA, 17 bp, Arabidopsis thaliana
atcttcgacgcaggatc

SEQ ID NO: 54629 - DNA, 17 bp, Arabidopsis thaliana
atcttcgactttccgac

SEQ ID NO: 54630 - DNA, 17 bp, Arabidopsis thaliana
atcttcgagctcttgca

SEQ ID NO: 54631 - DNA, 17 bp, Arabidopsis thaliana
atcttcgagctcttgga

SEQ ID NO: 54632 - DNA, 17 bp, Arabidopsis thaliana
atcttcgatctccacac

SEQ ID NO: 54633 - DNA, 17 bp, Arabidopsis thaliana
atcttcgattaaggtgc

SEQ ID NO: 54634 - DNA, 17 bp, Arabidopsis thaliana
atcttcgattctggtgg

SEQ ID NO: 54635 - DNA, 17 bp, Arabidopsis thaliana
atcttcgatttgctagg

SEQ ID NO: 54636 - DNA, 17 bp, Arabidopsis thaliana
atcttcgcagattgagg

SEQ ID NO: 54637 - DNA, 17 bp, Arabidopsis thaliana
atcttcgcccaaatgtt

SEQ ID NO: 54638 - DNA, 17 bp, Arabidopsis thaliana
atcttcgccggataact

SEQ ID NO: 54639 - DNA, 17 bp, Arabidopsis thaliana
atcttcgccgtcgtaag

SEQ ID NO: 54640 - DNA, 17 bp, Arabidopsis thaliana
atcttcgcctttgtgtc

SEQ ID NO: 54641 - DNA, 17 bp, Arabidopsis thaliana
atcttcgcggatctaca

SEQ ID NO: 54642 - DNA, 17 bp, Arabidopsis thaliana
atcttcgctggaaccac

SEQ ID NO: 54643 - DNA, 17 bp, Arabidopsis thaliana
atcttcggaaaccagac

SEQ ID NO: 54644 - DNA, 17 bp, Arabidopsis thaliana
atcttcggacataacca

SEQ ID NO: 54645 - DNA, 17 bp, Arabidopsis thaliana
atcttcggacgtaacca

SEQ ID NO: 54646 - DNA, 17 bp, Arabidopsis thaliana
atcttcggacgtaactt

SEQ ID NO: 54647 - DNA, 17 bp, Arabidopsis thaliana
atcttcggactgtggat

SEQ ID NO: 54648 - DNA, 17 bp, Arabidopsis thaliana
atcttcggatctgttga

SEQ ID NO: 54649 - DNA, 17 bp, Arabidopsis thaliana
atcttcgggataagttt

SEQ ID NO: 54650 - DNA, 17 bp, Arabidopsis thaliana
atcttcgggtccaccat

SEQ ID NO: 54651 - DNA, 17 bp, Arabidopsis thaliana
atcttcgggttcggttt

SEQ ID NO: 54652 - DNA, 17 bp, Arabidopsis thaliana
atcttcggtgagcttcg

SEQ ID NO: 54653 - DNA, 17 bp, Arabidopsis thaliana
atcttcggtgtctcgtc

SEQ ID NO: 54654 - DNA, 17 bp, Arabidopsis thaliana
atcttcgtcaccgcgct

SEQ ID NO: 54655 - DNA, 17 bp, Arabidopsis thaliana
atcttcgtcagagcgag

SEQ ID NO: 54656 - DNA, 17 bp, Arabidopsis thaliana
atcttcgtcagagcgcg

SEQ ID NO: 54657 - DNA, 17 bp, Arabidopsis thaliana
atcttcgtcagagcgct

SEQ ID NO: 54658 - DNA, 17 bp, Arabidopsis thaliana
atcttcgtccaccaacc

SEQ ID NO: 54659 - DNA, 17 bp, Arabidopsis thaliana
atcttcgtccggctttg

SEQ ID NO: 54660 - DNA, 17 bp, Arabidopsis thaliana
atcttcgtggcaatatt

SEQ ID NO: 54661 - DNA, 17 bp, Arabidopsis thaliana
atcttcgtgtcggtgag

SEQ ID NO: 54662 - DNA, 17 bp, Arabidopsis thaliana
atcttcgttaggggcgt

SEQ ID NO: 54663 - DNA, 17 bp, Arabidopsis thaliana
atcttcgttgccaacaa

SEQ ID NO: 54664 - DNA, 17 bp, Arabidopsis thaliana
atcttcgttttgtccgc

SEQ ID NO: 54665 - DNA, 17 bp, Arabidopsis thaliana
atcttctaagaagtctg

SEQ ID NO: 54666 - DNA, 17 bp, Arabidopsis thaliana
atcttctacaagggtac

SEQ ID NO: 54667 - DNA, 17 bp, Arabidopsis thaliana
atcttctacagcaggtg

SEQ ID NO: 54668 - DNA, 17 bp, Arabidopsis thaliana
atcttctactgcggggt

SEQ ID NO: 54669 - DNA, 17 bp, Arabidopsis thaliana
atcttctactttcaggg

SEQ ID NO: 54670 - DNA, 17 bp, Arabidopsis thaliana
atcttctagagacgaga

SEQ ID NO: 54671 - DNA, 17 bp, Arabidopsis thaliana
atcttctaggttgccaa

SEQ ID NO: 54672 - DNA, 17 bp, Arabidopsis thaliana
atcttctaggtttgcca

SEQ ID NO: 54673 - DNA, 17 bp, Arabidopsis thaliana
atcttctattgttgtgc

SEQ ID NO: 54674 - DNA, 17 bp, Arabidopsis thaliana
atcttctcagcgcttct

SEQ ID NO: 54675 - DNA, 17 bp, Arabidopsis thaliana
atcttctccaagtccag

SEQ ID NO: 54676 - DNA, 17 bp, Arabidopsis thaliana
atcttctcccttctact

SEQ ID NO: 54677 - DNA, 17 bp, Arabidopsis thaliana
atcttctccttcttgcg

SEQ ID NO: 54678 - DNA, 17 bp, Arabidopsis thaliana
atcttctcgcaggtgtt

SEQ ID NO: 54679 - DNA, 17 bp, Arabidopsis thaliana
atcttctcgtactggat

SEQ ID NO: 54680 - DNA, 17 bp, Arabidopsis thaliana
atcttctcgtccacttc

SEQ ID NO: 54681 - DNA, 17 bp, Arabidopsis thaliana
atcttctctcagcattc

SEQ ID NO: 54682 - DNA, 17 bp, Arabidopsis thaliana
atcttctctcgatgatg

SEQ ID NO: 54683 - DNA, 17 bp, Arabidopsis thaliana
atcttctgaccttctga

SEQ ID NO: 54684 - DNA, 17 bp, Arabidopsis thaliana
atcttctgagaagggtt

SEQ ID NO: 54685 - DNA, 17 bp, Arabidopsis thaliana
atcttctgagcataatt

SEQ ID NO: 54686 - DNA, 17 bp, Arabidopsis thaliana
atcttctgcaactccac

SEQ ID NO: 54687 - DNA, 17 bp, Arabidopsis thaliana
atcttctgcacacttgc

SEQ ID NO: 54688 - DNA, 17 bp, Arabidopsis thaliana
atcttctgcacagttgc

SEQ ID NO: 54689 - DNA, 17 bp, Arabidopsis thaliana
atcttctgctgtggcca

SEQ ID NO: 54690 - DNA, 17 bp, Arabidopsis thaliana
atcttctggagtgtccc

SEQ ID NO: 54691 - DNA, 17 bp, Arabidopsis thaliana
atcttctggctagagat

SEQ ID NO: 54692 - DNA, 17 bp, Arabidopsis thaliana
atcttctgggttacgat

SEQ ID NO: 54693 - DNA, 17 bp, Arabidopsis thaliana
atcttctggtctcggtc

SEQ ID NO: 54694 - DNA, 17 bp, Arabidopsis thaliana
atcttctgtggaccagg

SEQ ID NO: 54695 - DNA, 17 bp, Arabidopsis thaliana
atcttctgtggcaaact

SEQ ID NO: 54696 - DNA, 17 bp, Arabidopsis thaliana
atcttctgttctgtctg

SEQ ID NO: 54697 - DNA, 17 bp, Arabidopsis thaliana
atcttctgttgtgggac

SEQ ID NO: 54698 - DNA, 17 bp, Arabidopsis thaliana
atcttcttaggtgccaa

SEQ ID NO: 54699 - DNA, 17 bp, Arabidopsis thaliana
atcttcttcagattcac

SEQ ID NO: 54700 - DNA, 17 bp, Arabidopsis thaliana
atcttcttcctcttcgc

SEQ ID NO: 54701 - DNA, 17 bp, Arabidopsis thaliana
atcttcttctcttctcc

SEQ ID NO: 54702 - DNA, 17 bp, Arabidopsis thaliana
atcttcttcttttcgca

SEQ ID NO: 54703 - DNA, 17 bp, Arabidopsis thaliana
atcttcttcttttctta

SEQ ID NO: 54704 - DNA, 17 bp, Arabidopsis thaliana
atcttcttgagagattc

SEQ ID NO: 54705 - DNA, 17 bp, Arabidopsis thaliana
atcttcttgccatatct

SEQ ID NO: 54706 - DNA, 17 bp, Arabidopsis thaliana
atcttcttggcgtgcag

SEQ ID NO: 54707 - DNA, 17 bp, Arabidopsis thaliana
atcttcttggcgtgctg

SEQ ID NO: 54708 - DNA, 17 bp, Arabidopsis thaliana
atcttcttgtgtacttg

SEQ ID NO: 54709 - DNA, 17 bp, Arabidopsis thaliana
atcttcttgtgtgatga

SEQ ID NO: 54710 - DNA, 17 bp, Arabidopsis thaliana
atcttctttgcgaagtg

SEQ ID NO: 54711 - DNA, 17 bp, Arabidopsis thaliana
atcttgaccctagtagc

SEQ ID NO: 54712 - DNA, 17 bp, Arabidopsis thaliana
atcttgaccgaacctct

SEQ ID NO: 54713 - DNA, 17 bp, Arabidopsis thaliana
atcttgactctagtccg

SEQ ID NO: 54714 - DNA, 17 bp, Arabidopsis thaliana
atcttgactgtctcttg

SEQ ID NO: 54715 - DNA, 17 bp, Arabidopsis thaliana
atcttgagacttgaacc

SEQ ID NO: 54716 - DNA, 17 bp, Arabidopsis thaliana
atcttgagccttggaca

SEQ ID NO: 54717 - DNA, 17 bp, Arabidopsis thaliana
atcttgaggtcgagagt

SEQ ID NO: 54718 - DNA, 17 bp, Arabidopsis thaliana
atcttgagttataggga

SEQ ID NO: 54719 - DNA, 17 bp, Arabidopsis thaliana
atcttgatccgcgctga

SEQ ID NO: 54720 - DNA, 17 bp, Arabidopsis thaliana
atcttgattatctgcac

SEQ ID NO: 54721 - DNA, 17 bp, Arabidopsis thaliana
atcttgattgttggcat

SEQ ID NO: 54722 - DNA, 17 bp, Arabidopsis thaliana
atcttgatttgcgccgt

SEQ ID NO: 54723 - DNA, 17 bp, Arabidopsis thaliana
atcttgcaaaccatctc

SEQ ID NO: 54724 - DNA, 17 bp, Arabidopsis thaliana
atcttgcaccttggaat

SEQ ID NO: 54725 - DNA, 17 bp, Arabidopsis thaliana
atcttgcactgagcctg

SEQ ID NO: 54726 - DNA, 17 bp, Arabidopsis thaliana
atcttgccgttttcgct

SEQ ID NO: 54727 - DNA, 17 bp, Arabidopsis thaliana
atcttgcctggtgtgtt

SEQ ID NO: 54728 - DNA, 17 bp, Arabidopsis thaliana
atcttgcgatccagtga

SEQ ID NO: 54729 - DNA, 17 bp, Arabidopsis thaliana
atcttgcgatcgagtga

SEQ ID NO: 54730 - DNA, 17 bp, Arabidopsis thaliana
atcttgcgtttcccagg

SEQ ID NO: 54731 - DNA, 17 bp, Arabidopsis thaliana
atcttgctaagtttcgg

SEQ ID NO: 54732 - DNA, 17 bp, Arabidopsis thaliana
atcttgctcatcttcag

SEQ ID NO: 54733 - DNA, 17 bp, Arabidopsis thaliana
atcttgctctcgggaga

SEQ ID NO: 54734 - DNA, 17 bp, Arabidopsis thaliana
atcttgctctgtctggt

SEQ ID NO: 54735 - DNA, 17 bp, Arabidopsis thaliana
atcttgctgagttccca

SEQ ID NO: 54736 - DNA, 17 bp, Arabidopsis thaliana
atcttgctgatgggtta

SEQ ID NO: 54737 - DNA, 17 bp, Arabidopsis thaliana
atcttgcttgcagagtc

SEQ ID NO: 54738 - DNA, 17 bp, Arabidopsis thaliana
atcttgctttttgatcc

SEQ ID NO: 54739 - DNA, 17 bp, Arabidopsis thaliana
atcttggaagagttttg

SEQ ID NO: 54740 - DNA, 17 bp, Arabidopsis thaliana
atcttggaggttcaacg

SEQ ID NO: 54741 - DNA, 17 bp, Arabidopsis thaliana
atcttggatagtcatgc

SEQ ID NO: 54742 - DNA, 17 bp, Arabidopsis thaliana
atcttggatcagttttt

SEQ ID NO: 54743 - DNA, 17 bp, Arabidopsis thaliana
atcttggcaggtcggat

SEQ ID NO: 54744 - DNA, 17 bp, Arabidopsis thaliana
atcttggcagtaggtga

SEQ ID NO: 54745 - DNA, 17 bp, Arabidopsis thaliana
atcttggcccgatacac

SEQ ID NO: 54746 - DNA, 17 bp, Arabidopsis thaliana
atcttggcccggtcaac

SEQ ID NO: 54747 - DNA, 17 bp, Arabidopsis thaliana
atcttggcgaacggcta

SEQ ID NO: 54748 - DNA, 17 bp, Arabidopsis thaliana
atcttggctcgtggata

SEQ ID NO: 54749 - DNA, 17 bp, Arabidopsis thaliana
atcttggctgtcctgtt

SEQ ID NO: 54750 - DNA, 17 bp, Arabidopsis thaliana
atcttgggatgggtcgg

SEQ ID NO: 54751 - DNA, 17 bp, Arabidopsis thaliana
atcttgggattagccgc

SEQ ID NO: 54752 - DNA, 17 bp, Arabidopsis thaliana
atcttgggcttccgctt

SEQ ID NO: 54753 - DNA, 17 bp, Arabidopsis thaliana
atcttggggcagaggga

SEQ ID NO: 54754 - DNA, 17 bp, Arabidopsis thaliana
atcttggggtgatttac

SEQ ID NO: 54755 - DNA, 17 bp, Arabidopsis thaliana
atcttgggtatcaggtc

SEQ ID NO: 54756 - DNA, 17 bp, Arabidopsis thaliana
atcttgggtgacaagat

SEQ ID NO: 54757 - DNA, 17 bp, Arabidopsis thaliana
atcttgggtggcaccga

SEQ ID NO: 54758 - DNA, 17 bp, Arabidopsis thaliana
atcttgggtttacgttt

SEQ ID NO: 54759 - DNA, 17 bp, Arabidopsis thaliana
atcttgggtttttgcgt

SEQ ID NO: 54760 - DNA, 17 bp, Arabidopsis thaliana
atcttggtagatgttat

SEQ ID NO: 54761 - DNA, 17 bp, Arabidopsis thaliana
atcttggtatgcactgt

SEQ ID NO: 54762 - DNA, 17 bp, Arabidopsis thaliana
atcttggtccaaccaaa

SEQ ID NO: 54763 - DNA, 17 bp, Arabidopsis thaliana
atcttggtctattgggt

SEQ ID NO: 54764 - DNA, 17 bp, Arabidopsis thaliana
atcttggtcttggctga

SEQ ID NO: 54765 - DNA, 17 bp, Arabidopsis thaliana
atcttggtgctcatctg

SEQ ID NO: 54766 - DNA, 17 bp, Arabidopsis thaliana
atcttggttagcgtttc

SEQ ID NO: 54767 - DNA, 17 bp, Arabidopsis thaliana
atcttggttatcggcgt

SEQ ID NO: 54768 - DNA, 17 bp, Arabidopsis thaliana
atcttggttcgcgcttt

SEQ ID NO: 54769 - DNA, 17 bp, Arabidopsis thaliana
atcttggttgtcggcac

SEQ ID NO: 54770 - DNA, 17 bp, Arabidopsis thaliana
atcttgtaatccctcca

SEQ ID NO: 54771 - DNA, 17 bp, Arabidopsis thaliana
atcttgtaattttcttg

SEQ ID NO: 54772 - DNA, 17 bp, Arabidopsis thaliana
atcttgtagagatgtaa

SEQ ID NO: 54773 - DNA, 17 bp, Arabidopsis thaliana
atcttgtagtcgcatcc

SEQ ID NO: 54774 - DNA, 17 bp, Arabidopsis thaliana
atcttgtagttgggact

SEQ ID NO: 54775 - DNA, 17 bp, Arabidopsis thaliana
atcttgtatgtgctctt

SEQ ID NO: 54776 - DNA, 17 bp, Arabidopsis thaliana
atcttgtcacaggatta

SEQ ID NO: 54777 - DNA, 17 bp, Arabidopsis thaliana
atcttgtcatctgctgc

SEQ ID NO: 54778 - DNA, 17 bp, Arabidopsis thaliana
atcttgtccagcttgtg

SEQ ID NO: 54779 - DNA, 17 bp, Arabidopsis thaliana
atcttgtccccgattgg

SEQ ID NO: 54780 - DNA, 17 bp, Arabidopsis thaliana
atcttgtccctctgaaa

SEQ ID NO: 54781 - DNA, 17 bp, Arabidopsis thaliana
atcttgtccctttgaaa

SEQ ID NO: 54782 - DNA, 17 bp, Arabidopsis thaliana
atcttgtctccatcaca

SEQ ID NO: 54783 - DNA, 17 bp, Arabidopsis thaliana
atcttgtcttaggcgca

SEQ ID NO: 54784 - DNA, 17 bp, Arabidopsis thaliana
atcttgtgacgcctcca

SEQ ID NO: 54785 - DNA, 17 bp, Arabidopsis thaliana
atcttgtgccttcttca

SEQ ID NO: 54786 - DNA, 17 bp, Arabidopsis thaliana
atcttgtgcgccaatag

SEQ ID NO: 54787 - DNA, 17 bp, Arabidopsis thaliana
atcttgtgctcatccac

SEQ ID NO: 54788 - DNA, 17 bp, Arabidopsis thaliana
atcttgtgctcattcac

SEQ ID NO: 54789 - DNA, 17 bp, Arabidopsis thaliana
atcttgtgctccgtctt

SEQ ID NO: 54790 - DNA, 17 bp, Arabidopsis thaliana
atcttgtgctttcgtcc

SEQ ID NO: 54791 - DNA, 17 bp, Arabidopsis thaliana
atcttgtgtactcagtt

SEQ ID NO: 54792 - DNA, 17 bp, Arabidopsis thaliana
atcttgtgtccgacaat

SEQ ID NO: 54793 - DNA, 17 bp, Arabidopsis thaliana
atcttgtgtctgcaggt

SEQ ID NO: 54794 - DNA, 17 bp, Arabidopsis thaliana
atcttgtgtgagctttt

SEQ ID NO: 54795 - DNA, 17 bp, Arabidopsis thaliana
atcttgtgttctctgga

SEQ ID NO: 54796 - DNA, 17 bp, Arabidopsis thaliana
atcttgtgtttctggaa

SEQ ID NO: 54797 - DNA, 17 bp, Arabidopsis thaliana
atcttgttcagactttg

SEQ ID NO: 54798 - DNA, 17 bp, Arabidopsis thaliana
atcttgttcagttgatg

SEQ ID NO: 54799 - DNA, 17 bp, Arabidopsis thaliana
atcttgttcccattcgg

SEQ ID NO: 54800 - DNA, 17 bp, Arabidopsis thaliana
atcttgttcgttcttgc

SEQ ID NO: 54801 - DNA, 17 bp, Arabidopsis thaliana
atcttgttgcgtctgat

SEQ ID NO: 54802 - DNA, 17 bp, Arabidopsis thaliana
atcttgttgggcctttg

SEQ ID NO: 54803 - DNA, 17 bp, Arabidopsis thaliana
atcttgttgttggacac

SEQ ID NO: 54804 - DNA, 17 bp, Arabidopsis thaliana
atcttgtttcgttggac

SEQ ID NO: 54805 - DNA, 17 bp, Arabidopsis thaliana
atcttgtttctggagtg

SEQ ID NO: 54806 - DNA, 17 bp, Arabidopsis thaliana
atcttgtttgctgagcg

SEQ ID NO: 54807 - DNA, 17 bp, Arabidopsis thaliana
atcttgttttccaggtt

SEQ ID NO: 54808 - DNA, 17 bp, Arabidopsis thaliana
atcttgttttctggggt

SEQ ID NO: 54809 - DNA, 17 bp, Arabidopsis thaliana
atcttgttttctgggtt

SEQ ID NO: 54810 - DNA, 17 bp, Arabidopsis thaliana
atctttacagttgccag

SEQ ID NO: 54811 - DNA, 17 bp, Arabidopsis thaliana
atctttacgtgccaccc

SEQ ID NO: 54812 - DNA, 17 bp, Arabidopsis thaliana
atctttagaggcctcaa

SEQ ID NO: 54813 - DNA, 17 bp, Arabidopsis thaliana
atctttagatacagtgg

SEQ ID NO: 54814 - DNA, 17 bp, Arabidopsis thaliana
atctttagggccgattg

SEQ ID NO: 54815 - DNA, 17 bp, Arabidopsis thaliana
atctttaggtcgctggt

SEQ ID NO: 54816 - DNA, 17 bp, Arabidopsis thaliana
atctttaggtgccaccc

SEQ ID NO: 54817 - DNA, 17 bp, Arabidopsis thaliana
atctttaggttcatttc

SEQ ID NO: 54818 - DNA, 17 bp, Arabidopsis thaliana
atctttatgccggcgag

SEQ ID NO: 54819 - DNA, 17 bp, Arabidopsis thaliana
atctttatttctgaggc

SEQ ID NO: 54820 - DNA, 17 bp, Arabidopsis thaliana
atctttcaaaaataacg

SEQ ID NO: 54821 - DNA, 17 bp, Arabidopsis thaliana
atctttcaagatcgtgt

SEQ ID NO: 54822 - DNA, 17 bp, Arabidopsis thaliana
atctttcacatctgcat

SEQ ID NO: 54823 - DNA, 17 bp, Arabidopsis thaliana
atctttcagagagagca

SEQ ID NO: 54824 - DNA, 17 bp, Arabidopsis thaliana
atctttcagatacctgc

SEQ ID NO: 54825 - DNA, 17 bp, Arabidopsis thaliana
atctttcagggtccggt

SEQ ID NO: 54826 - DNA, 17 bp, Arabidopsis thaliana
atctttcagtttctgcc

SEQ ID NO: 54827 - DNA, 17 bp, Arabidopsis thaliana
atctttcatgagacacg

SEQ ID NO: 54828 - DNA, 17 bp, Arabidopsis thaliana
atctttccatacctctt

SEQ ID NO: 54829 - DNA, 17 bp, Arabidopsis thaliana
atctttccatcactacc

SEQ ID NO: 54830 - DNA, 17 bp, Arabidopsis thaliana
atctttcccaaccatcc

SEQ ID NO: 54831 - DNA, 17 bp, Arabidopsis thaliana
atctttcccagatgtta

SEQ ID NO: 54832 - DNA, 17 bp, Arabidopsis thaliana
atctttcccgaagtgat

SEQ ID NO: 54833 - DNA, 17 bp, Arabidopsis thaliana
atctttccgttgagcag

SEQ ID NO: 54834 - DNA, 17 bp, Arabidopsis thaliana
atctttccttcgtttgg

SEQ ID NO: 54835 - DNA, 17 bp, Arabidopsis thaliana
atctttcgagcaagcaa

SEQ ID NO: 54836 - DNA, 17 bp, Arabidopsis thaliana
atctttcgagcaagcca

SEQ ID NO: 54837 - DNA, 17 bp, Arabidopsis thaliana
atctttcgagctggatc

SEQ ID NO: 54838 - DNA, 17 bp, Arabidopsis thaliana
atctttcgcttggcggg

SEQ ID NO: 54839 - DNA, 17 bp, Arabidopsis thaliana
atctttcggaaagccca

SEQ ID NO: 54840 - DNA, 17 bp, Arabidopsis thaliana
atctttcggagagatgg

SEQ ID NO: 54841 - DNA, 17 bp, Arabidopsis thaliana
atctttcgtggatgagg

SEQ ID NO: 54842 - DNA, 17 bp, Arabidopsis thaliana
atctttctcaacagctt

SEQ ID NO: 54843 - DNA, 17 bp, Arabidopsis thaliana
atctttctcaacatctc

SEQ ID NO: 54844 - DNA, 17 bp, Arabidopsis thaliana
atctttctcgcttaact

SEQ ID NO: 54845 - DNA, 17 bp, Arabidopsis thaliana
atctttctctatgcttt

SEQ ID NO: 54846 - DNA, 17 bp, Arabidopsis thaliana
atctttctctgtcaaca

SEQ ID NO: 54847 - DNA, 17 bp, Arabidopsis thaliana
atctttctgttgcacct

SEQ ID NO: 54848 - DNA, 17 bp, Arabidopsis thaliana
atctttctgttggcttc

SEQ ID NO: 54849 - DNA, 17 bp, Arabidopsis thaliana
atctttcttgaccactt

SEQ ID NO: 54850 - DNA, 17 bp, Arabidopsis thaliana
atctttcttgcgaatat

SEQ ID NO: 54851 - DNA, 17 bp, Arabidopsis thaliana
atctttgaaaccgcggc

SEQ ID NO: 54852 - DNA, 17 bp, Arabidopsis thaliana
atctttgaagacatccg

SEQ ID NO: 54853 - DNA, 17 bp, Arabidopsis thaliana
atctttgaatctgagag

SEQ ID NO: 54854 - DNA, 17 bp, Arabidopsis thaliana
atctttgacaacactga

SEQ ID NO: 54855 - DNA, 17 bp, Arabidopsis thaliana
atctttgaccatccgct

SEQ ID NO: 54856 - DNA, 17 bp, Arabidopsis thaliana
atctttgactaggggtc

SEQ ID NO: 54857 - DNA, 17 bp, Arabidopsis thaliana
atctttgacttggacaa

SEQ ID NO: 54858 - DNA, 17 bp, Arabidopsis thaliana
atctttgagacggggtc

SEQ ID NO: 54859 - DNA, 17 bp, Arabidopsis thaliana
atctttgaggctcagtt

SEQ ID NO: 54860 - DNA, 17 bp, Arabidopsis thaliana
atctttgaggctcggtt

SEQ ID NO: 54861 - DNA, 17 bp, Arabidopsis thaliana
atctttgagtctgagag

SEQ ID NO: 54862 - DNA, 17 bp, Arabidopsis thaliana
atctttgatagggctga

SEQ ID NO: 54863 - DNA, 17 bp, Arabidopsis thaliana
atctttgatctttcttc

SEQ ID NO: 54864 - DNA, 17 bp, Arabidopsis thaliana
atctttgatgacccgtc

SEQ ID NO: 54865 - DNA, 17 bp, Arabidopsis thaliana
atctttgcaaccaatgt

SEQ ID NO: 54866 - DNA, 17 bp, Arabidopsis thaliana
atctttgcaggcttgag

SEQ ID NO: 54867 - DNA, 17 bp, Arabidopsis thaliana
atctttgcaggtccgaa

SEQ ID NO: 54868 - DNA, 17 bp, Arabidopsis thaliana
atctttgcaggttgaag

SEQ ID NO: 54869 - DNA, 17 bp, Arabidopsis thaliana
atctttgccaaggatgt

SEQ ID NO: 54870 - DNA, 17 bp, Arabidopsis thaliana
atctttgccctactagt

SEQ ID NO: 54871 - DNA, 17 bp, Arabidopsis thaliana
atctttgccctacttgt

SEQ ID NO: 54872 - DNA, 17 bp, Arabidopsis thaliana
atctttgccgcagcgac

SEQ ID NO: 54873 - DNA, 17 bp, Arabidopsis thaliana
atctttgcgaagcttcc

SEQ ID NO: 54874 - DNA, 17 bp, Arabidopsis thaliana
atctttgcgagttgcga

SEQ ID NO: 54875 - DNA, 17 bp, Arabidopsis thaliana
atctttgctaatgttcc

SEQ ID NO: 54876 - DNA, 17 bp, Arabidopsis thaliana
atctttgctatattacg

SEQ ID NO: 54877 - DNA, 17 bp, Arabidopsis thaliana
atctttgctgaactgct

SEQ ID NO: 54878 - DNA, 17 bp, Arabidopsis thaliana
atctttgctgaacttct

SEQ ID NO: 54879 - DNA, 17 bp, Arabidopsis thaliana
atctttgctgaagacct

SEQ ID NO: 54880 - DNA, 17 bp, Arabidopsis thaliana
atctttgcttcggctaa

SEQ ID NO: 54881 - DNA, 17 bp, Arabidopsis thaliana
atctttggactggccct

SEQ ID NO: 54882 - DNA, 17 bp, Arabidopsis thaliana
atctttggactggctct

SEQ ID NO: 54883 - DNA, 17 bp, Arabidopsis thaliana
atctttggagaaggaga

SEQ ID NO: 54884 - DNA, 17 bp, Arabidopsis thaliana
atctttggattactgtg

SEQ ID NO: 54885 - DNA, 17 bp, Arabidopsis thaliana
atctttggattgaaggg

SEQ ID NO: 54886 - DNA, 17 bp, Arabidopsis thaliana
atctttggattgtcacg

SEQ ID NO: 54887 - DNA, 17 bp, Arabidopsis thaliana
atctttggctctgtagt

SEQ ID NO: 54888 - DNA, 17 bp, Arabidopsis thaliana
atctttgggctttccga

SEQ ID NO: 54889 - DNA, 17 bp, Arabidopsis thaliana
atctttggggctttgga

SEQ ID NO: 54890 - DNA, 17 bp, Arabidopsis thaliana
atctttgggtttcggtg

SEQ ID NO: 54891 - DNA, 17 bp, Arabidopsis thaliana
atctttggtccttgtag

SEQ ID NO: 54892 - DNA, 17 bp, Arabidopsis thaliana
atctttggtttacagtg

SEQ ID NO: 54893 - DNA, 17 bp, Arabidopsis thaliana
atctttgtacccagtgg

SEQ ID NO: 54894 - DNA, 17 bp, Arabidopsis thaliana
atctttgtcatccttcg

SEQ ID NO: 54895 - DNA, 17 bp, Arabidopsis thaliana
atctttgtcatggtatg

SEQ ID NO: 54896 - DNA, 17 bp, Arabidopsis thaliana
atctttgtccgttgcta

SEQ ID NO: 54897 - DNA, 17 bp, Arabidopsis thaliana
atctttgtcggatctgg

SEQ ID NO: 54898 - DNA, 17 bp, Arabidopsis thaliana
atctttgtcttgaggca

SEQ ID NO: 54899 - DNA, 17 bp, Arabidopsis thaliana
atctttgtgcactactt

SEQ ID NO: 54900 - DNA, 17 bp, Arabidopsis thaliana
atctttgtgccagcttt

SEQ ID NO: 54901 - DNA, 17 bp, Arabidopsis thaliana
atctttgtgccaggagg

SEQ ID NO: 54902 - DNA, 17 bp, Arabidopsis thaliana
atctttgtggaatggga

SEQ ID NO: 54903 - DNA, 17 bp, Arabidopsis thaliana
atctttgtgtcggcagt

SEQ ID NO: 54904 - DNA, 17 bp, Arabidopsis thaliana
atctttgttgctcagac

SEQ ID NO: 54905 - DNA, 17 bp, Arabidopsis thaliana
atctttgttggacggaa

SEQ ID NO: 54906 - DNA, 17 bp, Arabidopsis thaliana
atctttgtttgtggtgg

SEQ ID NO: 54907 - DNA, 17 bp, Arabidopsis thaliana
atctttgttttcctttg

SEQ ID NO: 54908 - DNA, 17 bp, Arabidopsis thaliana
atcttttaacagatgtg

SEQ ID NO: 54909 - DNA, 17 bp, Arabidopsis thaliana
atcttttacggttaaga

SEQ ID NO: 54910 - DNA, 17 bp, Arabidopsis thaliana
atcttttagatcggatt

SEQ ID NO: 54911 - DNA, 17 bp, Arabidopsis thaliana
atcttttcagttgaaat

SEQ ID NO: 54912 - DNA, 17 bp, Arabidopsis thaliana
atcttttccgacggctt

SEQ ID NO: 54913 - DNA, 17 bp, Arabidopsis thaliana
atcttttcgcagatagt

SEQ ID NO: 54914 - DNA, 17 bp, Arabidopsis thaliana
atcttttcgctagttat

SEQ ID NO: 54915 - DNA, 17 bp, Arabidopsis thaliana
atcttttcggggacatc

SEQ ID NO: 54916 - DNA, 17 bp, Arabidopsis thaliana
atcttttctagtcccaa

SEQ ID NO: 54917 - DNA, 17 bp, Arabidopsis thaliana
atcttttctgtcactgg

SEQ ID NO: 54918 - DNA, 17 bp, Arabidopsis thaliana
atcttttctgttttgac

SEQ ID NO: 54919 - DNA, 17 bp, Arabidopsis thaliana
atcttttgaaaaacgtt

SEQ ID NO: 54920 - DNA, 17 bp, Arabidopsis thaliana
atcttttgactagcatt

SEQ ID NO: 54921 - DNA, 17 bp, Arabidopsis thaliana
atcttttgacttgacac

SEQ ID NO: 54922 - DNA, 17 bp, Arabidopsis thaliana
atcttttgagctattgg

SEQ ID NO: 54923 - DNA, 17 bp, Arabidopsis thaliana
atcttttgatctgcatg

SEQ ID NO: 54924 - DNA, 17 bp, Arabidopsis thaliana
atcttttgattagctca

SEQ ID NO: 54925 - DNA, 17 bp, Arabidopsis thaliana
atcttttgattgcgttt

SEQ ID NO: 54926 - DNA, 17 bp, Arabidopsis thaliana
atcttttgcattttgtt

SEQ ID NO: 54927 - DNA, 17 bp, Arabidopsis thaliana
atcttttgcccatgagc

SEQ ID NO: 54928 - DNA, 17 bp, Arabidopsis thaliana
atcttttgccgttgtct

SEQ ID NO: 54929 - DNA, 17 bp, Arabidopsis thaliana
atcttttggacaagctt

SEQ ID NO: 54930 - DNA, 17 bp, Arabidopsis thaliana
atcttttgggtcatcgg

SEQ ID NO: 54931 - DNA, 17 bp, Arabidopsis thaliana
atcttttggttcatcgg

SEQ ID NO: 54932 - DNA, 17 bp, Arabidopsis thaliana
atcttttgtcggaaaat

SEQ ID NO: 54933 - DNA, 17 bp, Arabidopsis thaliana
atcttttgttatgccaa

SEQ ID NO: 54934 - DNA, 17 bp, Arabidopsis thaliana
atctttttacggaaact

SEQ ID NO: 54935 - DNA, 17 bp, Arabidopsis thaliana
atctttttccggctgga

SEQ ID NO: 54936 - DNA, 17 bp, Arabidopsis thaliana
atctttttcctttgtca

SEQ ID NO: 54937 - DNA, 17 bp, Arabidopsis thaliana
atctttttcggcggtgg

SEQ ID NO: 54938 - DNA, 17 bp, Arabidopsis thaliana
atctttttctgccatgg

SEQ ID NO: 54939 - DNA, 17 bp, Arabidopsis thaliana
atctttttctgctttca

SEQ ID NO: 54940 - DNA, 17 bp, Arabidopsis thaliana
atctttttcttcgcgtt

SEQ ID NO: 54941 - DNA, 17 bp, Arabidopsis thaliana
atcttttttggtccaga

SEQ ID NO: 54942 - DNA, 17 bp, Arabidopsis thaliana
atctttttttcctgtcc

SEQ ID NO: 54943 - DNA, 17 bp, Arabidopsis thaliana
atcttttttttttcgaa

SEQ ID NO: 54944 - DNA, 17 bp, Arabidopsis thaliana
atgaaaaactcgtgttg

SEQ ID NO: 54945 - DNA, 17 bp, Arabidopsis thaliana
atgaaaaagatcgtgtg

SEQ ID NO: 54946 - DNA, 17 bp, Arabidopsis thaliana
atgaaaactaaccggat

SEQ ID NO: 54947 - DNA, 17 bp, Arabidopsis thaliana
atgaaaagacagtgttg

SEQ ID NO: 54948 - DNA, 17 bp, Arabidopsis thaliana
atgaaaaggatgtctgc

SEQ ID NO: 54949 - DNA, 17 bp, Arabidopsis thaliana
atgaaaattggtcgtat

SEQ ID NO: 54950 - DNA, 17 bp, Arabidopsis thaliana
atgaaaattgttcagcc

SEQ ID NO: 54951 - DNA, 17 bp, Arabidopsis thaliana
atgaaacagttcatcat

SEQ ID NO: 54952 - DNA, 17 bp, Arabidopsis thaliana
atgaaacagttcatcgt

SEQ ID NO: 54953 - DNA, 17 bp, Arabidopsis thaliana
atgaaacctaccgtcaa

SEQ ID NO: 54954 - DNA, 17 bp, Arabidopsis thaliana
atgaaaccttttgacgg

SEQ ID NO: 54955 - DNA, 17 bp, Arabidopsis thaliana
atgaaactattgatttg

SEQ ID NO: 54956 - DNA, 17 bp, Arabidopsis thaliana
atgaaactccaaagagg

SEQ ID NO: 54957 - DNA, 17 bp, Arabidopsis thaliana
atgaaactcccatcagg

SEQ ID NO: 54958 - DNA, 17 bp, Arabidopsis thaliana
atgaaactgaagcgtct

SEQ ID NO: 54959 - DNA, 17 bp, Arabidopsis thaliana
atgaaactgagaatcac

SEQ ID NO: 54960 - DNA, 17 bp, Arabidopsis thaliana
atgaaactgggccacca

SEQ ID NO: 54961 - DNA, 17 bp, Arabidopsis thaliana
atgaaacttgtttcctt

SEQ ID NO: 54962 - DNA, 17 bp, Arabidopsis thaliana
atgaaactttgccatga

SEQ ID NO: 54963 - DNA, 17 bp, Arabidopsis thaliana
atgaaagaagcccaatt

SEQ ID NO: 54964 - DNA, 17 bp, Arabidopsis thaliana
atgaaagacacacgcat

SEQ ID NO: 54965 - DNA, 17 bp, Arabidopsis thaliana
atgaaagacacaggatc

SEQ ID NO: 54966 - DNA, 17 bp, Arabidopsis thaliana
atgaaagacatatggac

SEQ ID NO: 54967 - DNA, 17 bp, Arabidopsis thaliana
atgaaagactgctcttg

SEQ ID NO: 54968 - DNA, 17 bp, Arabidopsis thaliana
atgaaagactgctcttt

SEQ ID NO: 54969 - DNA, 17 bp, Arabidopsis thaliana
atgaaagactttgtccg

SEQ ID NO: 54970 - DNA, 17 bp, Arabidopsis thaliana
atgaaagagaactcatc

SEQ ID NO: 54971 - DNA, 17 bp, Arabidopsis thaliana
atgaaagagatcgtgtg

SEQ ID NO: 54972 - DNA, 17 bp, Arabidopsis thaliana
atgaaagctaccacttt

SEQ ID NO: 54973 - DNA, 17 bp, Arabidopsis thaliana
atgaaaggaggcggttc

SEQ ID NO: 54974 - DNA, 17 bp, Arabidopsis thaliana
atgaaaggatctaagcc

SEQ ID NO: 54975 - DNA, 17 bp, Arabidopsis thaliana
atgaaaggatctaagct

SEQ ID NO: 54976 - DNA, 17 bp, Arabidopsis thaliana
atgaaagtctactcgca

SEQ ID NO: 54977 - DNA, 17 bp, Arabidopsis thaliana
atgaaagtggccaactc

SEQ ID NO: 54978 - DNA, 17 bp, Arabidopsis thaliana
atgaaagtgtcggccat

SEQ ID NO: 54979 - DNA, 17 bp, Arabidopsis thaliana
atgaaagttgactatcc

SEQ ID NO: 54980 - DNA, 17 bp, Arabidopsis thaliana
atgaaagttggccaact

SEQ ID NO: 54981 - DNA, 17 bp, Arabidopsis thaliana
atgaaagttggctaact

SEQ ID NO: 54982 - DNA, 17 bp, Arabidopsis thaliana
atgaaatcgtttggtcc

SEQ ID NO: 54983 - DNA, 17 bp, Arabidopsis thaliana
atgaaatctagtcttgt

SEQ ID NO: 54984 - DNA, 17 bp, Arabidopsis thaliana
atgaaatctgccctgcg

SEQ ID NO: 54985 - DNA, 17 bp, Arabidopsis thaliana
atgaaatctttgatgac

SEQ ID NO: 54986 - DNA, 17 bp, Arabidopsis thaliana
atgaaatggactaaacc

SEQ ID NO: 54987 - DNA, 17 bp, Arabidopsis thaliana
atgaaattcgggcaggg

SEQ ID NO: 54988 - DNA, 17 bp, Arabidopsis thaliana
atgaacatttttcggac

SEQ ID NO: 54989 - DNA, 17 bp, Arabidopsis thaliana
atgaaccaagtgtcgtt

SEQ ID NO: 54990 - DNA, 17 bp, Arabidopsis thaliana
atgaacccatgcgaacc

SEQ ID NO: 54991 - DNA, 17 bp, Arabidopsis thaliana
atgaaccggaagccggg

SEQ ID NO: 54992 - DNA, 17 bp, Arabidopsis thaliana
atgaaccggactacctt

SEQ ID NO: 54993 - DNA, 17 bp, Arabidopsis thaliana
atgaaccgtcctctagg

SEQ ID NO: 54994 - DNA, 17 bp, Arabidopsis thaliana
atgaaccgtcggatcat

SEQ ID NO: 54995 - DNA, 17 bp, Arabidopsis thaliana
atgaaccttcctcattt

SEQ ID NO: 54996 - DNA, 17 bp, Arabidopsis thaliana
atgaacgagccactgtg

SEQ ID NO: 54997 - DNA, 17 bp, Arabidopsis thaliana
atgaacggatgagctga

SEQ ID NO: 54998 - DNA, 17 bp, Arabidopsis thaliana
atgaacggggctaagcg

SEQ ID NO: 54999 - DNA, 17 bp, Arabidopsis thaliana
atgaactttgcgttgac

SEQ ID NO: 55000 - DNA, 17 bp, Arabidopsis thaliana
atgaagagcaggattgg

SEQ ID NO: 55001 - DNA, 17 bp, Arabidopsis thaliana
atgaagatctcctcggg

SEQ ID NO: 55002 - DNA, 17 bp, Arabidopsis thaliana
atgaagcactcaagttg

SEQ ID NO: 55003 - DNA, 17 bp, Arabidopsis thaliana
atgaagcactttaccaa

SEQ ID NO: 55004 - DNA, 17 bp, Arabidopsis thaliana
atgaagcacttttccaa

SEQ ID NO: 55005 - DNA, 17 bp, Arabidopsis thaliana
atgaagcctggtccgag

SEQ ID NO: 55006 - DNA, 17 bp, Arabidopsis thaliana
atgaagcggcagcaatg

SEQ ID NO: 55007 - DNA, 17 bp, Arabidopsis thaliana
atgaagcggtcaatgcc

SEQ ID NO: 55008 - DNA, 17 bp, Arabidopsis thaliana
atgaagcggttcagtgc

SEQ ID NO: 55009 - DNA, 17 bp, Arabidopsis thaliana
atgaagcggttgggtac

SEQ ID NO: 55010 - DNA, 17 bp, Arabidopsis thaliana
atgaagcgtaatagacc

SEQ ID NO: 55011 - DNA, 17 bp, Arabidopsis thaliana
atgaagctcggggttga

SEQ ID NO: 55012 - DNA, 17 bp, Arabidopsis thaliana
atgaagctctcaagttg

SEQ ID NO: 55013 - DNA, 17 bp, Arabidopsis thaliana
atgaagctgccagcatg

SEQ ID NO: 55014 - DNA, 17 bp, Arabidopsis thaliana
atgaaggcaacagaccc

SEQ ID NO: 55015 - DNA, 17 bp, Arabidopsis thaliana
atgaaggtctttgcccg

SEQ ID NO: 55016 - DNA, 17 bp, Arabidopsis thaliana
atgaaggtctttgcctg

SEQ ID NO: 55017 - DNA, 17 bp, Arabidopsis thaliana
atgaagtgtatgattgg

SEQ ID NO: 55018 - DNA, 17 bp, Arabidopsis thaliana
atgaagttgctcttaag

SEQ ID NO: 55019 - DNA, 17 bp, Arabidopsis thaliana
atgaatacgaccacttg

SEQ ID NO: 55020 - DNA, 17 bp, Arabidopsis thaliana
atgaatagtgtcttcag

SEQ ID NO: 55021 - DNA, 17 bp, Arabidopsis thaliana
atgaatagtttgtggat

SEQ ID NO: 55022 - DNA, 17 bp, Arabidopsis thaliana
atgaatcatttggatgg

SEQ ID NO: 55023 - DNA, 17 bp, Arabidopsis thaliana
atgaatccctcattgcc

SEQ ID NO: 55024 - DNA, 17 bp, Arabidopsis thaliana
atgaatcggactttgtc

SEQ ID NO: 55025 - DNA, 17 bp, Arabidopsis thaliana
atgaatctaacctggtg

SEQ ID NO: 55026 - DNA, 17 bp, Arabidopsis thaliana
atgaatctaacctggtt

SEQ ID NO: 55027 - DNA, 17 bp, Arabidopsis thaliana
atgaatctacttttcca

SEQ ID NO: 55028 - DNA, 17 bp, Arabidopsis thaliana
atgaatgaaagagtcgc

SEQ ID NO: 55029 - DNA, 17 bp, Arabidopsis thaliana
atgaatgataaaccagc

SEQ ID NO: 55030 - DNA, 17 bp, Arabidopsis thaliana
atgaatgcaatacttgg

SEQ ID NO: 55031 - DNA, 17 bp, Arabidopsis thaliana
atgaatgctcatttccc

SEQ ID NO: 55032 - DNA, 17 bp, Arabidopsis thaliana
atgaatgggtacgggcg

SEQ ID NO: 55033 - DNA, 17 bp, Arabidopsis thaliana
atgaatgggtacgggct

SEQ ID NO: 55034 - DNA, 17 bp, Arabidopsis thaliana
atgaatggttgtgacgg

SEQ ID NO: 55035 - DNA, 17 bp, Arabidopsis thaliana
atgaattaggtctgtgg

SEQ ID NO: 55036 - DNA, 17 bp, Arabidopsis thaliana
atgaattatcttttccg

SEQ ID NO: 55037 - DNA, 17 bp, Arabidopsis thaliana
atgaattcaacttggtg

SEQ ID NO: 55038 - DNA, 17 bp, Arabidopsis thaliana
atgaattcagtccaacc

SEQ ID NO: 55039 - DNA, 17 bp, Arabidopsis thaliana
atgaattcattgtgcgc

SEQ ID NO: 55040 - DNA, 17 bp, Arabidopsis thaliana
atgaattcgtggtatag

SEQ ID NO: 55041 - DNA, 17 bp, Arabidopsis thaliana
atgaattgaaccgctga

SEQ ID NO: 55042 - DNA, 17 bp, Arabidopsis thaliana
atgaattggattggctg

SEQ ID NO: 55043 - DNA, 17 bp, Arabidopsis thaliana
atgaattgtctccgcgg

SEQ ID NO: 55044 - DNA, 17 bp, Arabidopsis thaliana
atgaattgtctctgcgg

SEQ ID NO: 55045 - DNA, 17 bp, Arabidopsis thaliana
atgaattgtcttcgcgg

SEQ ID NO: 55046 - DNA, 17 bp, Arabidopsis thaliana
atgaatttctttgatga

SEQ ID NO: 55047 - DNA, 17 bp, Arabidopsis thaliana
atgaatttgctgatgtg

SEQ ID NO: 55048 - DNA, 17 bp, Arabidopsis thaliana
atgaatttgggcctgat

SEQ ID NO: 55049 - DNA, 17 bp, Arabidopsis thaliana
atgaattttgaaccatt

SEQ ID NO: 55050 - DNA, 17 bp, Arabidopsis thaliana
atgaattttgacccatt

SEQ ID NO: 55051 - DNA, 17 bp, Arabidopsis thaliana
atgaattttgacccgtt

SEQ ID NO: 55052 - DNA, 17 bp, Arabidopsis thaliana
atgaattttgacccttt

SEQ ID NO: 55053 - DNA, 17 bp, Arabidopsis thaliana
atgacaaaaacattgac

SEQ ID NO: 55054 - DNA, 17 bp, Arabidopsis thaliana
atgacaaaaacgttgac

SEQ ID NO: 55055 - DNA, 17 bp, Arabidopsis thaliana
atgacaaagtctatcct

SEQ ID NO: 55056 - DNA, 17 bp, Arabidopsis thaliana
atgacaaatggcaatga

SEQ ID NO: 55057 - DNA, 17 bp, Arabidopsis thaliana
atgacaaggcccgcctc

SEQ ID NO: 55058 - DNA, 17 bp, Arabidopsis thaliana
atgacaagtggcaatga

SEQ ID NO: 55059 - DNA, 17 bp, Arabidopsis thaliana
atgacaatttgacaacc

SEQ ID NO: 55060 - DNA, 17 bp, Arabidopsis thaliana
atgacacctccggaggc

SEQ ID NO: 55061 - DNA, 17 bp, Arabidopsis thaliana
atgacacgtgtcaggtc

SEQ ID NO: 55062 - DNA, 17 bp, Arabidopsis thaliana
atgacactactctcgaa

SEQ ID NO: 55063 - DNA, 17 bp, Arabidopsis thaliana
atgacactgatgctgac

SEQ ID NO: 55064 - DNA, 17 bp, Arabidopsis thaliana
atgacactgatgctgag

SEQ ID NO: 55065 - DNA, 17 bp, Arabidopsis thaliana
atgacactgttgccaac

SEQ ID NO: 55066 - DNA, 17 bp, Arabidopsis thaliana
atgacagaaaccaagtt

SEQ ID NO: 55067 - DNA, 17 bp, Arabidopsis thaliana
atgacagctcaccacct

SEQ ID NO: 55068 - DNA, 17 bp, Arabidopsis thaliana
atgacaggagctcaact

SEQ ID NO: 55069 - DNA, 17 bp, Arabidopsis thaliana
atgacagtggcccgctt

SEQ ID NO: 55070 - DNA, 17 bp, Arabidopsis thaliana
atgacagtgttttggaa

SEQ ID NO: 55071 - DNA, 17 bp, Arabidopsis thaliana
atgacatccagtcatat

SEQ ID NO: 55072 - DNA, 17 bp, Arabidopsis thaliana
atgacatcttcctcgtt

SEQ ID NO: 55073 - DNA, 17 bp, Arabidopsis thaliana
atgacatggcggattat

SEQ ID NO: 55074 - DNA, 17 bp, Arabidopsis thaliana
atgacatggcggcttgt

SEQ ID NO: 55075 - DNA, 17 bp, Arabidopsis thaliana
atgacatgtacgatcct

SEQ ID NO: 55076 - DNA, 17 bp, Arabidopsis thaliana
atgacatgtggcactca

SEQ ID NO: 55077 - DNA, 17 bp, Arabidopsis thaliana
atgacattcctcaggat

SEQ ID NO: 55078 - DNA, 17 bp, Arabidopsis thaliana
atgacattctcgtgctt

SEQ ID NO: 55079 - DNA, 17 bp, Arabidopsis thaliana
atgacattctctctgtg

SEQ ID NO: 55080 - DNA, 17 bp, Arabidopsis thaliana
atgacattgctctggtg

SEQ ID NO: 55081 - DNA, 17 bp, Arabidopsis thaliana
atgacattgtgcctcca

SEQ ID NO: 55082 - DNA, 17 bp, Arabidopsis thaliana
atgacatttccggagtt

SEQ ID NO: 55083 - DNA, 17 bp, Arabidopsis thaliana
atgacatttcgaaagtt

SEQ ID NO: 55084 - DNA, 17 bp, Arabidopsis thaliana
atgaccaacttccggcc

SEQ ID NO: 55085 - DNA, 17 bp, Arabidopsis thaliana
atgaccaactttcggtg

SEQ ID NO: 55086 - DNA, 17 bp, Arabidopsis thaliana
atgaccaactttcgttg

SEQ ID NO: 55087 - DNA, 17 bp, Arabidopsis thaliana
atgaccacagacaaaac

SEQ ID NO: 55088 - DNA, 17 bp, Arabidopsis thaliana
atgaccagattttgttc

SEQ ID NO: 55089 - DNA, 17 bp, Arabidopsis thaliana
atgaccaggatgaagct

SEQ ID NO: 55090 - DNA, 17 bp, Arabidopsis thaliana
atgaccagttttgtcca

SEQ ID NO: 55091 - DNA, 17 bp, Arabidopsis thaliana
atgaccagttttgtccc

SEQ ID NO: 55092 - DNA, 17 bp, Arabidopsis thaliana
atgaccagttttgtccg

SEQ ID NO: 55093 - DNA, 17 bp, Arabidopsis thaliana
atgaccatgttcttttc

SEQ ID NO: 55094 - DNA, 17 bp, Arabidopsis thaliana
atgacccactttatcca

SEQ ID NO: 55095 - DNA, 17 bp, Arabidopsis thaliana
atgacccagtgactcag

SEQ ID NO: 55096 - DNA, 17 bp, Arabidopsis thaliana
atgacccgctttctcca

SEQ ID NO: 55097 - DNA, 17 bp, Arabidopsis thaliana
atgacccgggccgtgag

SEQ ID NO: 55098 - DNA, 17 bp, Arabidopsis thaliana
atgacccggtgacccag

SEQ ID NO: 55099 - DNA, 17 bp, Arabidopsis thaliana
atgaccctgaacctaac

SEQ ID NO: 55100 - DNA, 17 bp, Arabidopsis thaliana
atgaccctggctcatac

SEQ ID NO: 55101 - DNA, 17 bp, Arabidopsis thaliana
atgaccgacctatgtct

SEQ ID NO: 55102 - DNA, 17 bp, Arabidopsis thaliana
atgaccgagtgtcgctc

SEQ ID NO: 55103 - DNA, 17 bp, Arabidopsis thaliana
atgaccgagtgtcggtc

SEQ ID NO: 55104 - DNA, 17 bp, Arabidopsis thaliana
atgaccgatttattgct

SEQ ID NO: 55105 - DNA, 17 bp, Arabidopsis thaliana
atgaccgctacaccgct

SEQ ID NO: 55106 - DNA, 17 bp, Arabidopsis thaliana
atgaccgctacactgct

SEQ ID NO: 55107 - DNA, 17 bp, Arabidopsis thaliana
atgaccggaattgtcta

SEQ ID NO: 55108 - DNA, 17 bp, Arabidopsis thaliana
atgaccggcttggccat

SEQ ID NO: 55109 - DNA, 17 bp, Arabidopsis thaliana
atgaccgggtcttcaca

SEQ ID NO: 55110 - DNA, 17 bp, Arabidopsis thaliana
atgaccggttaggccat

SEQ ID NO: 55111 - DNA, 17 bp, Arabidopsis thaliana
atgaccggttttgtccg

SEQ ID NO: 55112 - DNA, 17 bp, Arabidopsis thaliana
atgaccgtcgtccgccc

SEQ ID NO: 55113 - DNA, 17 bp, Arabidopsis thaliana
atgaccgtcgtcggacg

SEQ ID NO: 55114 - DNA, 17 bp, Arabidopsis thaliana
atgacctatggctggcc

SEQ ID NO: 55115 - DNA, 17 bp, Arabidopsis thaliana
atgacctggtgaaccgg

SEQ ID NO: 55116 - DNA, 17 bp, Arabidopsis thaliana
atgacctgttctcgctt

SEQ ID NO: 55117 - DNA, 17 bp, Arabidopsis thaliana
atgaccttttctcatgg

SEQ ID NO: 55118 - DNA, 17 bp, Arabidopsis thaliana
atgacgacttgccagtg

SEQ ID NO: 55119 - DNA, 17 bp, Arabidopsis thaliana
atgacgaggacagtgtc

SEQ ID NO: 55120 - DNA, 17 bp, Arabidopsis thaliana
atgacgaggccgttgtt

SEQ ID NO: 55121 - DNA, 17 bp, Arabidopsis thaliana
atgacgagttttgggtt

SEQ ID NO: 55122 - DNA, 17 bp, Arabidopsis thaliana
atgacgatcttgtgcac

SEQ ID NO: 55123 - DNA, 17 bp, Arabidopsis thaliana
atgacgcaggctcttcc

SEQ ID NO: 55124 - DNA, 17 bp, Arabidopsis thaliana
atgacgcgcccgaacca

SEQ ID NO: 55125 - DNA, 17 bp, Arabidopsis thaliana
atgacgcgcccgagcca

SEQ ID NO: 55126 - DNA, 17 bp, Arabidopsis thaliana
atgacgcgcctttgtac

SEQ ID NO: 55127 - DNA, 17 bp, Arabidopsis thaliana
atgacggttcaactccg

SEQ ID NO: 55128 - DNA, 17 bp, Arabidopsis thaliana
atgacgtggtgtgtccc

SEQ ID NO: 55129 - DNA, 17 bp, Arabidopsis thaliana
atgactaaaacttggtt

SEQ ID NO: 55130 - DNA, 17 bp, Arabidopsis thaliana
atgactaactcgtgctc

SEQ ID NO: 55131 - DNA, 17 bp, Arabidopsis thaliana
atgactaagggtctgaa

SEQ ID NO: 55132 - DNA, 17 bp, Arabidopsis thaliana
atgactaagtcaaaaga

SEQ ID NO: 55133 - DNA, 17 bp, Arabidopsis thaliana
atgactaataactgtct

SEQ ID NO: 55134 - DNA, 17 bp, Arabidopsis thaliana
atgactacttctcagca

SEQ ID NO: 55135 - DNA, 17 bp, Arabidopsis thaliana
atgactagaccgcagaa

SEQ ID NO: 55136 - DNA, 17 bp, Arabidopsis thaliana
atgactagatattgacc

SEQ ID NO: 55137 - DNA, 17 bp, Arabidopsis thaliana
atgactaggtgagtgcc

SEQ ID NO: 55138 - DNA, 17 bp, Arabidopsis thaliana
atgactaggttgttctc

SEQ ID NO: 55139 - DNA, 17 bp, Arabidopsis thaliana
atgactcaaatcaattt

SEQ ID NO: 55140 - DNA, 17 bp, Arabidopsis thaliana
atgactcagatgaacca

SEQ ID NO: 55141 - DNA, 17 bp, Arabidopsis thaliana
atgactcaggctcatac

SEQ ID NO: 55142 - DNA, 17 bp, Arabidopsis thaliana
atgactcatcggatttt

SEQ ID NO: 55143 - DNA, 17 bp, Arabidopsis thaliana
atgactccataactcac

SEQ ID NO: 55144 - DNA, 17 bp, Arabidopsis thaliana
atgactcgaaaatcagc

SEQ ID NO: 55145 - DNA, 17 bp, Arabidopsis thaliana
atgactcgacaaagtga

SEQ ID NO: 55146 - DNA, 17 bp, Arabidopsis thaliana
atgactcgttcgtacag

SEQ ID NO: 55147 - DNA, 17 bp, Arabidopsis thaliana
atgactctccgattttc

SEQ ID NO: 55148 - DNA, 17 bp, Arabidopsis thaliana
atgactctcggcaacgg

SEQ ID NO: 55149 - DNA, 17 bp, Arabidopsis thaliana
atgactctggctcatac

SEQ ID NO: 55150 - DNA, 17 bp, Arabidopsis thaliana
atgactctttccgctgc

SEQ ID NO: 55151 - DNA, 17 bp, Arabidopsis thaliana
atgactctttggctgtc

SEQ ID NO: 55152 - DNA, 17 bp, Arabidopsis thaliana
atgactgaacgcctcaa

SEQ ID NO: 55153 - DNA, 17 bp, Arabidopsis thaliana
atgactgaacgcctcta

SEQ ID NO: 55154 - DNA, 17 bp, Arabidopsis thaliana
atgactgaacgccttaa

SEQ ID NO: 55155 - DNA, 17 bp, Arabidopsis thaliana
atgactgaatgcctaag

SEQ ID NO: 55156 - DNA, 17 bp, Arabidopsis thaliana
atgactgagaaactgag

SEQ ID NO: 55157 - DNA, 17 bp, Arabidopsis thaliana
atgactgcagattcggc

SEQ ID NO: 55158 - DNA, 17 bp, Arabidopsis thaliana
atgactgcgtgtagctg

SEQ ID NO: 55159 - DNA, 17 bp, Arabidopsis thaliana
atgactgcttcactcac

SEQ ID NO: 55160 - DNA, 17 bp, Arabidopsis thaliana
atgactgcttccatcgg

SEQ ID NO: 55161 - DNA, 17 bp, Arabidopsis thaliana
atgactgctttactcac

SEQ ID NO: 55162 - DNA, 17 bp, Arabidopsis thaliana
atgactggagctctttc

SEQ ID NO: 55163 - DNA, 17 bp, Arabidopsis thaliana
atgactggggtgctatg

SEQ ID NO: 55164 - DNA, 17 bp, Arabidopsis thaliana
atgactggtaaacatgc

SEQ ID NO: 55165 - DNA, 17 bp, Arabidopsis thaliana
atgactggtaaaccagc

SEQ ID NO: 55166 - DNA, 17 bp, Arabidopsis thaliana
atgactggtcgtgtgaa

SEQ ID NO: 55167 - DNA, 17 bp, Arabidopsis thaliana
atgactggttaaccagc

SEQ ID NO: 55168 - DNA, 17 bp, Arabidopsis thaliana
atgactggttaacggat

SEQ ID NO: 55169 - DNA, 17 bp, Arabidopsis thaliana
atgactgtgctgtagat

SEQ ID NO: 55170 - DNA, 17 bp, Arabidopsis thaliana
atgacttcacccgtggt

SEQ ID NO: 55171 - DNA, 17 bp, Arabidopsis thaliana
atgacttctaccggtgt

SEQ ID NO: 55172 - DNA, 17 bp, Arabidopsis thaliana
atgacttgatcacagag

SEQ ID NO: 55173 - DNA, 17 bp, Arabidopsis thaliana
atgacttgctccgtgct

SEQ ID NO: 55174 - DNA, 17 bp, Arabidopsis thaliana
atgacttgcttcatgta

SEQ ID NO: 55175 - DNA, 17 bp, Arabidopsis thaliana
atgacttggctcggctt

SEQ ID NO: 55176 - DNA, 17 bp, Arabidopsis thaliana
atgactttagtaagctc

SEQ ID NO: 55177 - DNA, 17 bp, Arabidopsis thaliana
atgactttagtcagccc

SEQ ID NO: 55178 - DNA, 17 bp, Arabidopsis thaliana
atgactttagtcagctc

SEQ ID NO: 55179 - DNA, 17 bp, Arabidopsis thaliana
atgactttagtcagctt

SEQ ID NO: 55180 - DNA, 17 bp, Arabidopsis thaliana
atgactttttgtggcgc

SEQ ID NO: 55181 - DNA, 17 bp, Arabidopsis thaliana
atgagaaaattgctcag

SEQ ID NO: 55182 - DNA, 17 bp, Arabidopsis thaliana
atgagaaacccggacta

SEQ ID NO: 55183 - DNA, 17 bp, Arabidopsis thaliana
atgagaaactctccttg

SEQ ID NO: 55184 - DNA, 17 bp, Arabidopsis thaliana
atgagaaatcaaagttt

SEQ ID NO: 55185 - DNA, 17 bp, Arabidopsis thaliana
atgagaacagatcatgt

SEQ ID NO: 55186 - DNA, 17 bp, Arabidopsis thaliana
atgagaacgccggtgac

SEQ ID NO: 55187 - DNA, 17 bp, Arabidopsis thaliana
atgagaactgtttcata

SEQ ID NO: 55188 - DNA, 17 bp, Arabidopsis thaliana
atgagaatgtgttgacc

SEQ ID NO: 55189 - DNA, 17 bp, Arabidopsis thaliana
atgagacaaagatggtc

SEQ ID NO: 55190 - DNA, 17 bp, Arabidopsis thaliana
atgagacacagcgtatt

SEQ ID NO: 55191 - DNA, 17 bp, Arabidopsis thaliana
atgagacacggttcact

SEQ ID NO: 55192 - DNA, 17 bp, Arabidopsis thaliana
atgagacacttagacca

SEQ ID NO: 55193 - DNA, 17 bp, Arabidopsis thaliana
atgagacatctccaaga

SEQ ID NO: 55194 - DNA, 17 bp, Arabidopsis thaliana
atgagaccatcttcatt

SEQ ID NO: 55195 - DNA, 17 bp, Arabidopsis thaliana
atgagacgcaggcgcag

SEQ ID NO: 55196 - DNA, 17 bp, Arabidopsis thaliana
atgagacgttgtttcca

SEQ ID NO: 55197 - DNA, 17 bp, Arabidopsis thaliana
atgagactccctgaggt

SEQ ID NO: 55198 - DNA, 17 bp, Arabidopsis thaliana
atgagactcttgacgga

SEQ ID NO: 55199 - DNA, 17 bp, Arabidopsis thaliana
atgagactgtgcgagtt

SEQ ID NO: 55200 - DNA, 17 bp, Arabidopsis thaliana
atgagacttgctcctga

SEQ ID NO: 55201 - DNA, 17 bp, Arabidopsis thaliana
atgagacttgtcatcat

SEQ ID NO: 55202 - DNA, 17 bp, Arabidopsis thaliana
atgagacttgtcatgat

SEQ ID NO: 55203 - DNA, 17 bp, Arabidopsis thaliana
atgagactttagcccaa

SEQ ID NO: 55204 - DNA, 17 bp, Arabidopsis thaliana
atgagacttttgattta

SEQ ID NO: 55205 - DNA, 17 bp, Arabidopsis thaliana
atgagacttttgatttt

SEQ ID NO: 55206 - DNA, 17 bp, Arabidopsis thaliana
atgagactttttcggcg

SEQ ID NO: 55207 - DNA, 17 bp, Arabidopsis thaliana
atgagagattcggacta

SEQ ID NO: 55208 - DNA, 17 bp, Arabidopsis thaliana
atgagagcttgacacct

SEQ ID NO: 55209 - DNA, 17 bp, Arabidopsis thaliana
atgagagcttgctacct

SEQ ID NO: 55210 - DNA, 17 bp, Arabidopsis thaliana
atgagaggattacggaa

SEQ ID NO: 55211 - DNA, 17 bp, Arabidopsis thaliana
atgagagggaccaaggg

SEQ ID NO: 55212 - DNA, 17 bp, Arabidopsis thaliana
atgagagttggaatggg

SEQ ID NO: 55213 - DNA, 17 bp, Arabidopsis thaliana
atgagagtttgccacct

SEQ ID NO: 55214 - DNA, 17 bp, Arabidopsis thaliana
atgagatactacccttg

SEQ ID NO: 55215 - DNA, 17 bp, Arabidopsis thaliana
atgagatactactcttg

SEQ ID NO: 55216 - DNA, 17 bp, Arabidopsis thaliana
atgagatccaggaccag

SEQ ID NO: 55217 - DNA, 17 bp, Arabidopsis thaliana
atgagatcggctttcga

SEQ ID NO: 55218 - DNA, 17 bp, Arabidopsis thaliana
atgagatgaactaaacc

SEQ ID NO: 55219 - DNA, 17 bp, Arabidopsis thaliana
atgagatgctgcagtat

SEQ ID NO: 55220 - DNA, 17 bp, Arabidopsis thaliana
atgagatggactaaacc

SEQ ID NO: 55221 - DNA, 17 bp, Arabidopsis thaliana
atgagatgtgcttatgt

SEQ ID NO: 55222 - DNA, 17 bp, Arabidopsis thaliana
atgagatgttcttcgtt

SEQ ID NO: 55223 - DNA, 17 bp, Arabidopsis thaliana
atgagattcgggttgag

SEQ ID NO: 55224 - DNA, 17 bp, Arabidopsis thaliana
atgagatttttggcggg

SEQ ID NO: 55225 - DNA, 17 bp, Arabidopsis thaliana
atgagcagttagcgcgt

SEQ ID NO: 55226 - DNA, 17 bp, Arabidopsis thaliana
atgagcagtttctctat

SEQ ID NO: 55227 - DNA, 17 bp, Arabidopsis thaliana
atgagccgaccggtgat

SEQ ID NO: 55228 - DNA, 17 bp, Arabidopsis thaliana
atgagccggcgactcat

SEQ ID NO: 55229 - DNA, 17 bp, Arabidopsis thaliana
atgagcctcactcaaga

SEQ ID NO: 55230 - DNA, 17 bp, Arabidopsis thaliana
atgagcctttgtttttg

SEQ ID NO: 55231 - DNA, 17 bp, Arabidopsis thaliana
atgagcgtgaggttgag

SEQ ID NO: 55232 - DNA, 17 bp, Arabidopsis thaliana
atgagcgttaatggaca

SEQ ID NO: 55233 - DNA, 17 bp, Arabidopsis thaliana
atgaggacctaggattc

SEQ ID NO: 55234 - DNA, 17 bp, Arabidopsis thaliana
atgaggcactctcactg

SEQ ID NO: 55235 - DNA, 17 bp, Arabidopsis thaliana
atgaggcacttttccaa

SEQ ID NO: 55236 - DNA, 17 bp, Arabidopsis thaliana
atgaggcacttttccat

SEQ ID NO: 55237 - DNA, 17 bp, Arabidopsis thaliana
atgaggccccaatccgt

SEQ ID NO: 55238 - DNA, 17 bp, Arabidopsis thaliana
atgaggccctctacaga

SEQ ID NO: 55239 - DNA, 17 bp, Arabidopsis thaliana
atgaggccctgtttgtt

SEQ ID NO: 55240 - DNA, 17 bp, Arabidopsis thaliana
atgaggcgagatctgcg

SEQ ID NO: 55241 - DNA, 17 bp, Arabidopsis thaliana
atgaggcgtcgtctgtc

SEQ ID NO: 55242 - DNA, 17 bp, Arabidopsis thaliana
atgagggtaatttggtc

SEQ ID NO: 55243 - DNA, 17 bp, Arabidopsis thaliana
atgagggtttgccacct

SEQ ID NO: 55244 - DNA, 17 bp, Arabidopsis thaliana
atgaggtccttcagcgg

SEQ ID NO: 55245 - DNA, 17 bp, Arabidopsis thaliana
atgaggtcttaaccgag

SEQ ID NO: 55246 - DNA, 17 bp, Arabidopsis thaliana
atgaggttcatccttcg

SEQ ID NO: 55247 - DNA, 17 bp, Arabidopsis thaliana
atgagtaactacagtgt

SEQ ID NO: 55248 - DNA, 17 bp, Arabidopsis thaliana
atgagtaactcggacta

SEQ ID NO: 55249 - DNA, 17 bp, Arabidopsis thaliana
atgagtaccggcttgat

SEQ ID NO: 55250 - DNA, 17 bp, Arabidopsis thaliana
atgagtactagataacg

SEQ ID NO: 55251 - DNA, 17 bp, Arabidopsis thaliana
atgagtagcggcttgat

SEQ ID NO: 55252 - DNA, 17 bp, Arabidopsis thaliana
atgagtaggagggcgcg

SEQ ID NO: 55253 - DNA, 17 bp, Arabidopsis thaliana
atgagtatcatgtgact

SEQ ID NO: 55254 - DNA, 17 bp, Arabidopsis thaliana
atgagtccttggctttg

SEQ ID NO: 55255 - DNA, 17 bp, Arabidopsis thaliana
atgagtcgacacaaaaa

SEQ ID NO: 55256 - DNA, 17 bp, Arabidopsis thaliana
atgagtcgatttggccc

SEQ ID NO: 55257 - DNA, 17 bp, Arabidopsis thaliana
atgagtcgatttggccg

SEQ ID NO: 55258 - DNA, 17 bp, Arabidopsis thaliana
atgagtcgcttcgaccc

SEQ ID NO: 55259 - DNA, 17 bp, Arabidopsis thaliana
atgagtcgctttgaccg

SEQ ID NO: 55260 - DNA, 17 bp, Arabidopsis thaliana
atgagtcggtttctcgc

SEQ ID NO: 55261 - DNA, 17 bp, Arabidopsis thaliana
atgagtcgtcgcatttt

SEQ ID NO: 55262 - DNA, 17 bp, Arabidopsis thaliana
atgagtctactatgcag

SEQ ID NO: 55263 - DNA, 17 bp, Arabidopsis thaliana
atgagtctcaaagtgtg

SEQ ID NO: 55264 - DNA, 17 bp, Arabidopsis thaliana
atgagtctctagatcac

SEQ ID NO: 55265 - DNA, 17 bp, Arabidopsis thaliana
atgagtctcttttcttt

SEQ ID NO: 55266 - DNA, 17 bp, Arabidopsis thaliana
atgagtctttggctttc

SEQ ID NO: 55267 - DNA, 17 bp, Arabidopsis thaliana
atgagtctttggctttg

SEQ ID NO: 55268 - DNA, 17 bp, Arabidopsis thaliana
atgagtctttgggtttg

SEQ ID NO: 55269 - DNA, 17 bp, Arabidopsis thaliana
atgagtgacacggattc

SEQ ID NO: 55270 - DNA, 17 bp, Arabidopsis thaliana
atgagtggaggagagtg

SEQ ID NO: 55271 - DNA, 17 bp, Arabidopsis thaliana
atgagtgtgccctttag

SEQ ID NO: 55272 - DNA, 17 bp, Arabidopsis thaliana
atgagttaagccagtct

SEQ ID NO: 55273 - DNA, 17 bp, Arabidopsis thaliana
atgagttagcaacttag

SEQ ID NO: 55274 - DNA, 17 bp, Arabidopsis thaliana
atgagttatcgactgtc

SEQ ID NO: 55275 - DNA, 17 bp, Arabidopsis thaliana
atgagttatgggttgac

SEQ ID NO: 55276 - DNA, 17 bp, Arabidopsis thaliana
atgagttctgctactgc

SEQ ID NO: 55277 - DNA, 17 bp, Arabidopsis thaliana
atgagttgatcaagaca

SEQ ID NO: 55278 - DNA, 17 bp, Arabidopsis thaliana
atgagttgtggttaggg

SEQ ID NO: 55279 - DNA, 17 bp, Arabidopsis thaliana
atgagttgtttcttacg

SEQ ID NO: 55280 - DNA, 17 bp, Arabidopsis thaliana
atgagttgtttcttatg

SEQ ID NO: 55281 - DNA, 17 bp, Arabidopsis thaliana
atgagtttcaccaactt

SEQ ID NO: 55282 - DNA, 17 bp, Arabidopsis thaliana
atgagtttccgcatgat

SEQ ID NO: 55283 - DNA, 17 bp, Arabidopsis thaliana
atgagtttgcaaagtcc

SEQ ID NO: 55284 - DNA, 17 bp, Arabidopsis thaliana
atgagtttgcctgtcgg

SEQ ID NO: 55285 - DNA, 17 bp, Arabidopsis thaliana
atgagtttgcttgtctg

SEQ ID NO: 55286 - DNA, 17 bp, Arabidopsis thaliana
atgagtttggcaggatg

SEQ ID NO: 55287 - DNA, 17 bp, Arabidopsis thaliana
atgagttttgacatgaa

SEQ ID NO: 55288 - DNA, 17 bp, Arabidopsis thaliana
atgagttttgacatgat

SEQ ID NO: 55289 - DNA, 17 bp, Arabidopsis thaliana
atgataaaccagcgggt

SEQ ID NO: 55290 - DNA, 17 bp, Arabidopsis thaliana
atgataaaccctatcgg

SEQ ID NO: 55291 - DNA, 17 bp, Arabidopsis thaliana
atgataactcgacgatc

SEQ ID NO: 55292 - DNA, 17 bp, Arabidopsis thaliana
atgataactcgacggat

SEQ ID NO: 55293 - DNA, 17 bp, Arabidopsis thaliana
atgataatcactaatcg

SEQ ID NO: 55294 - DNA, 17 bp, Arabidopsis thaliana
atgatacgttccaccat

SEQ ID NO: 55295 - DNA, 17 bp, Arabidopsis thaliana
atgatactatgccctgt

SEQ ID NO: 55296 - DNA, 17 bp, Arabidopsis thaliana
atgatagatttgagctt

SEQ ID NO: 55297 - DNA, 17 bp, Arabidopsis thaliana
atgatagtgcggtacgg

SEQ ID NO: 55298 - DNA, 17 bp, Arabidopsis thaliana
atgatatgtggctctat

SEQ ID NO: 55299 - DNA, 17 bp, Arabidopsis thaliana
atgatattgttctatcc

SEQ ID NO: 55300 - DNA, 17 bp, Arabidopsis thaliana
atgatattgttctatgc

SEQ ID NO: 55301 - DNA, 17 bp, Arabidopsis thaliana
atgatgactttgagggc

SEQ ID NO: 55302 - DNA, 17 bp, Arabidopsis thaliana
atgatgagggcatttgg

SEQ ID NO: 55303 - DNA, 17 bp, Arabidopsis thaliana
atgatgaggtcagcttc

SEQ ID NO: 55304 - DNA, 17 bp, Arabidopsis thaliana
atgatgcaggtgggtag

SEQ ID NO: 55305 - DNA, 17 bp, Arabidopsis thaliana
atgatggacttagataa

SEQ ID NO: 55306 - DNA, 17 bp, Arabidopsis thaliana
atgatgggacactggtt

SEQ ID NO: 55307 - DNA, 17 bp, Arabidopsis thaliana
atgatgggcttagatga

SEQ ID NO: 55308 - DNA, 17 bp, Arabidopsis thaliana
atgatgggttcatctac

SEQ ID NO: 55309 - DNA, 17 bp, Arabidopsis thaliana
atgatgtatttgagctc

SEQ ID NO: 55310 - DNA, 17 bp, Arabidopsis thaliana
atgatgtccttggagtg

SEQ ID NO: 55311 - DNA, 17 bp, Arabidopsis thaliana
atgatgtcgctggtcgc

SEQ ID NO: 55312 - DNA, 17 bp, Arabidopsis thaliana
atgatgtgatacttctc

SEQ ID NO: 55313 - DNA, 17 bp, Arabidopsis thaliana
atgatgtggtttcgggc

SEQ ID NO: 55314 - DNA, 17 bp, Arabidopsis thaliana
atgatgttgcggtttaa

SEQ ID NO: 55315 - DNA, 17 bp, Arabidopsis thaliana
atgattaacagggacag

SEQ ID NO: 55316 - DNA, 17 bp, Arabidopsis thaliana
atgattaacgcctgtta

SEQ ID NO: 55317 - DNA, 17 bp, Arabidopsis thaliana
atgattaaggcagtgaa

SEQ ID NO: 55318 - DNA, 17 bp, Arabidopsis thaliana
atgattaccgacatgga

SEQ ID NO: 55319 - DNA, 17 bp, Arabidopsis thaliana
atgattagaagatgtgg

SEQ ID NO: 55320 - DNA, 17 bp, Arabidopsis thaliana
atgattaggtttcacgt

SEQ ID NO: 55321 - DNA, 17 bp, Arabidopsis thaliana
atgattatcacagcagt

SEQ ID NO: 55322 - DNA, 17 bp, Arabidopsis thaliana
atgattatccaatggat

SEQ ID NO: 55323 - DNA, 17 bp, Arabidopsis thaliana
atgattatgaaccgtcc

SEQ ID NO: 55324 - DNA, 17 bp, Arabidopsis thaliana
atgattatggaccgtcg

SEQ ID NO: 55325 - DNA, 17 bp, Arabidopsis thaliana
atgattatgggcggcct

SEQ ID NO: 55326 - DNA, 17 bp, Arabidopsis thaliana
atgattattcgttgacc

SEQ ID NO: 55327 - DNA, 17 bp, Arabidopsis thaliana
atgattcagtgccggtc

SEQ ID NO: 55328 - DNA, 17 bp, Arabidopsis thaliana
atgattcctagaatgac

SEQ ID NO: 55329 - DNA, 17 bp, Arabidopsis thaliana
atgattcgacggggggt

SEQ ID NO: 55330 - DNA, 17 bp, Arabidopsis thaliana
atgattcgtagctgtgt

SEQ ID NO: 55331 - DNA, 17 bp, Arabidopsis thaliana
atgattcgttccaccat

SEQ ID NO: 55332 - DNA, 17 bp, Arabidopsis thaliana
atgattctgatcatctc

SEQ ID NO: 55333 - DNA, 17 bp, Arabidopsis thaliana
atgattctgccgagcca

SEQ ID NO: 55334 - DNA, 17 bp, Arabidopsis thaliana
atgattctggaccgttg

SEQ ID NO: 55335 - DNA, 17 bp, Arabidopsis thaliana
atgattctggctactgc

SEQ ID NO: 55336 - DNA, 17 bp, Arabidopsis thaliana
atgattgattcgttgcc

SEQ ID NO: 55337 - DNA, 17 bp, Arabidopsis thaliana
atgattgcaaaagacgt

SEQ ID NO: 55338 - DNA, 17 bp, Arabidopsis thaliana
atgattgcgacacgggt

SEQ ID NO: 55339 - DNA, 17 bp, Arabidopsis thaliana
atgattgcgagtcgttt

SEQ ID NO: 55340 - DNA, 17 bp, Arabidopsis thaliana
atgattggagcagcggg

SEQ ID NO: 55341 - DNA, 17 bp, Arabidopsis thaliana
atgattggcttaacctc

SEQ ID NO: 55342 - DNA, 17 bp, Arabidopsis thaliana
atgattgggatctcgtc

SEQ ID NO: 55343 - DNA, 17 bp, Arabidopsis thaliana
atgattggggctatcat

SEQ ID NO: 55344 - DNA, 17 bp, Arabidopsis thaliana
atgattgggtgaacgac

SEQ ID NO: 55345 - DNA, 17 bp, Arabidopsis thaliana
atgattggtaaaccagc

SEQ ID NO: 55346 - DNA, 17 bp, Arabidopsis thaliana
atgattggtgccgacaa

SEQ ID NO: 55347 - DNA, 17 bp, Arabidopsis thaliana
atgattggtgccgagaa

SEQ ID NO: 55348 - DNA, 17 bp, Arabidopsis thaliana
atgattggttgggctgt

SEQ ID NO: 55349 - DNA, 17 bp, Arabidopsis thaliana
atgattgttgccgacaa

SEQ ID NO: 55350 - DNA, 17 bp, Arabidopsis thaliana
atgattgtttctactct

SEQ ID NO: 55351 - DNA, 17 bp, Arabidopsis thaliana
atgatttaaccaaatat

SEQ ID NO: 55352 - DNA, 17 bp, Arabidopsis thaliana
atgatttactgcaggta

SEQ ID NO: 55353 - DNA, 17 bp, Arabidopsis thaliana
atgatttaggctgaaaa

SEQ ID NO: 55354 - DNA, 17 bp, Arabidopsis thaliana
atgatttagggttcgta

SEQ ID NO: 55355 - DNA, 17 bp, Arabidopsis thaliana
atgatttatcgtgtatc

SEQ ID NO: 55356 - DNA, 17 bp, Arabidopsis thaliana
atgatttccctcgtaaa

SEQ ID NO: 55357 - DNA, 17 bp, Arabidopsis thaliana
atgatttcgggtctggt

SEQ ID NO: 55358 - DNA, 17 bp, Arabidopsis thaliana
atgatttgccaagtgac

SEQ ID NO: 55359 - DNA, 17 bp, Arabidopsis thaliana
atgatttgcttttgctg

SEQ ID NO: 55360 - DNA, 17 bp, Arabidopsis thaliana
atgatttggaaatggcc

SEQ ID NO: 55361 - DNA, 17 bp, Arabidopsis thaliana
atgatttggcaaactga

SEQ ID NO: 55362 - DNA, 17 bp, Arabidopsis thaliana
atgatttggcgaaatct

SEQ ID NO: 55363 - DNA, 17 bp, Arabidopsis thaliana
atgatttggcgaaattt

SEQ ID NO: 55364 - DNA, 17 bp, Arabidopsis thaliana
atgatttgtcgttggtg

SEQ ID NO: 55365 - DNA, 17 bp, Arabidopsis thaliana
atgatttgttgaatggc

SEQ ID NO: 55366 - DNA, 17 bp, Arabidopsis thaliana
atgattttgcagtttgc

SEQ ID NO: 55367 - DNA, 17 bp, Arabidopsis thaliana
atgattttgcgattttc

SEQ ID NO: 55368 - DNA, 17 bp, Arabidopsis thaliana
atgattttggcagaaga

SEQ ID NO: 55369 - DNA, 17 bp, Arabidopsis thaliana
atgattttgggtgcgcc

SEQ ID NO: 55370 - DNA, 17 bp, Arabidopsis thaliana
atgcaaaacttgccaac

SEQ ID NO: 55371 - DNA, 17 bp, Arabidopsis thaliana
atgcaaacagatgagat

SEQ ID NO: 55372 - DNA, 17 bp, Arabidopsis thaliana
atgcaaacgcgtattct

SEQ ID NO: 55373 - DNA, 17 bp, Arabidopsis thaliana
atgcaaactgaacacaa

SEQ ID NO: 55374 - DNA, 17 bp, Arabidopsis thaliana
atgcaaagatcggttac

SEQ ID NO: 55375 - DNA, 17 bp, Arabidopsis thaliana
atgcaaatgccgccatg

SEQ ID NO: 55376 - DNA, 17 bp, Arabidopsis thaliana
atgcaaatggcttctcg

SEQ ID NO: 55377 - DNA, 17 bp, Arabidopsis thaliana
atgcaaatgtccgagtt

SEQ ID NO: 55378 - DNA, 17 bp, Arabidopsis thaliana
atgcaacaaccgcatat

SEQ ID NO: 55379 - DNA, 17 bp, Arabidopsis thaliana
atgcaacaaccgcatga

SEQ ID NO: 55380 - DNA, 17 bp, Arabidopsis thaliana
atgcaacaaccgcatgt

SEQ ID NO: 55381 - DNA, 17 bp, Arabidopsis thaliana
atgcaacacatgtggat

SEQ ID NO: 55382 - DNA, 17 bp, Arabidopsis thaliana
atgcaacacgaggactt

SEQ ID NO: 55383 - DNA, 17 bp, Arabidopsis thaliana
atgcaacataccacagt

SEQ ID NO: 55384 - DNA, 17 bp, Arabidopsis thaliana
atgcaaccacaagtaaa

SEQ ID NO: 55385 - DNA, 17 bp, Arabidopsis thaliana
atgcaacgggacttgtt

SEQ ID NO: 55386 - DNA, 17 bp, Arabidopsis thaliana
atgcaactatgaatctc

SEQ ID NO: 55387 - DNA, 17 bp, Arabidopsis thaliana
atgcaactctgttcttc

SEQ ID NO: 55388 - DNA, 17 bp, Arabidopsis thaliana
atgcaactgacgccatg

SEQ ID NO: 55389 - DNA, 17 bp, Arabidopsis thaliana
atgcaactggaaggtta

SEQ ID NO: 55390 - DNA, 17 bp, Arabidopsis thaliana
atgcaacttcacgatct

SEQ ID NO: 55391 - DNA, 17 bp, Arabidopsis thaliana
atgcaagaatcacaact

SEQ ID NO: 55392 - DNA, 17 bp, Arabidopsis thaliana
atgcaagacgctccatc

SEQ ID NO: 55393 - DNA, 17 bp, Arabidopsis thaliana
atgcaagacgctgcatg

SEQ ID NO: 55394 - DNA, 17 bp, Arabidopsis thaliana
atgcaagccgtcctccc

SEQ ID NO: 55395 - DNA, 17 bp, Arabidopsis thaliana
atgcaagcgcaatgtcc

SEQ ID NO: 55396 - DNA, 17 bp, Arabidopsis thaliana
atgcaagctcaatgtcc

SEQ ID NO: 55397 - DNA, 17 bp, Arabidopsis thaliana
atgcaaggatattcaat

SEQ ID NO: 55398 - DNA, 17 bp, Arabidopsis thaliana
atgcaaggatcagccca

SEQ ID NO: 55399 - DNA, 17 bp, Arabidopsis thaliana
atgcaaggatcagccga

SEQ ID NO: 55400 - DNA, 17 bp, Arabidopsis thaliana
atgcaaggatccgcccc

SEQ ID NO: 55401 - DNA, 17 bp, Arabidopsis thaliana
atgcaaggcgtgctggt

SEQ ID NO: 55402 - DNA, 17 bp, Arabidopsis thaliana
atgcaaggctgtaagcg

SEQ ID NO: 55403 - DNA, 17 bp, Arabidopsis thaliana
atgcaaggtaacgcgat

SEQ ID NO: 55404 - DNA, 17 bp, Arabidopsis thaliana
atgcaagtgtgcaggag

SEQ ID NO: 55405 - DNA, 17 bp, Arabidopsis thaliana
atgcaataccccagcac

SEQ ID NO: 55406 - DNA, 17 bp, Arabidopsis thaliana
atgcaatccgctaccta

SEQ ID NO: 55407 - DNA, 17 bp, Arabidopsis thaliana
atgcaatggggatggtc

SEQ ID NO: 55408 - DNA, 17 bp, Arabidopsis thaliana
atgcaattgcacattgg

SEQ ID NO: 55409 - DNA, 17 bp, Arabidopsis thaliana
atgcacaagccaaatgc

SEQ ID NO: 55410 - DNA, 17 bp, Arabidopsis thaliana
atgcacactgagcggac

SEQ ID NO: 55411 - DNA, 17 bp, Arabidopsis thaliana
atgcacactgatctgac

SEQ ID NO: 55412 - DNA, 17 bp, Arabidopsis thaliana
atgcacactgatgctga

SEQ ID NO: 55413 - DNA, 17 bp, Arabidopsis thaliana
atgcacactgatgtgac

SEQ ID NO: 55414 - DNA, 17 bp, Arabidopsis thaliana
atgcacagactcatcac

SEQ ID NO: 55415 - DNA, 17 bp, Arabidopsis thaliana
atgcacaggtccctgag

SEQ ID NO: 55416 - DNA, 17 bp, Arabidopsis thaliana
atgcacatggcgagact

SEQ ID NO: 55417 - DNA, 17 bp, Arabidopsis thaliana
atgcaccaagcacgaag

SEQ ID NO: 55418 - DNA, 17 bp, Arabidopsis thaliana
atgcaccgatttattgt

SEQ ID NO: 55419 - DNA, 17 bp, Arabidopsis thaliana
atgcaccgggtgccgta

SEQ ID NO: 55420 - DNA, 17 bp, Arabidopsis thaliana
atgcaccgtacgtccgt

SEQ ID NO: 55421 - DNA, 17 bp, Arabidopsis thaliana
atgcacctgatgctgac

SEQ ID NO: 55422 - DNA, 17 bp, Arabidopsis thaliana
atgcaccttcgtgagcg

SEQ ID NO: 55423 - DNA, 17 bp, Arabidopsis thaliana
atgcacctttgcgagcg

SEQ ID NO: 55424 - DNA, 17 bp, Arabidopsis thaliana
atgcacgattaactgac

SEQ ID NO: 55425 - DNA, 17 bp, Arabidopsis thaliana
atgcacggcggcggcag

SEQ ID NO: 55426 - DNA, 17 bp, Arabidopsis thaliana
atgcacgtgcattcgtc

SEQ ID NO: 55427 - DNA, 17 bp, Arabidopsis thaliana
atgcactctccagcgga

SEQ ID NO: 55428 - DNA, 17 bp, Arabidopsis thaliana
atgcactgccgcttccc

SEQ ID NO: 55429 - DNA, 17 bp, Arabidopsis thaliana
atgcactgcctcttccc

SEQ ID NO: 55430 - DNA, 17 bp, Arabidopsis thaliana
atgcactgcctcttctc

SEQ ID NO: 55431 - DNA, 17 bp, Arabidopsis thaliana
atgcactgttccatgtc

SEQ ID NO: 55432 - DNA, 17 bp, Arabidopsis thaliana
atgcacttgggcttata

SEQ ID NO: 55433 - DNA, 17 bp, Arabidopsis thaliana
atgcagacccctgttgt

SEQ ID NO: 55434 - DNA, 17 bp, Arabidopsis thaliana
atgcagacctgtgttat

SEQ ID NO: 55435 - DNA, 17 bp, Arabidopsis thaliana
atgcagacggcctgatt

SEQ ID NO: 55436 - DNA, 17 bp, Arabidopsis thaliana
atgcagacttgttcgat

SEQ ID NO: 55437 - DNA, 17 bp, Arabidopsis thaliana
atgcagatagttggcca

SEQ ID NO: 55438 - DNA, 17 bp, Arabidopsis thaliana
atgcagattcgccggag

SEQ ID NO: 55439 - DNA, 17 bp, Arabidopsis thaliana
atgcagccccttgcaga

SEQ ID NO: 55440 - DNA, 17 bp, Arabidopsis thaliana
atgcagcgagttttgca

SEQ ID NO: 55441 - DNA, 17 bp, Arabidopsis thaliana
atgcagcggttcaaccc

SEQ ID NO: 55442 - DNA, 17 bp, Arabidopsis thaliana
atgcagctgaggcatcc

SEQ ID NO: 55443 - DNA, 17 bp, Arabidopsis thaliana
atgcaggaaaatcactt

SEQ ID NO: 55444 - DNA, 17 bp, Arabidopsis thaliana
atgcaggacaccgttat

SEQ ID NO: 55445 - DNA, 17 bp, Arabidopsis thaliana
atgcaggagcggttcac

SEQ ID NO: 55446 - DNA, 17 bp, Arabidopsis thaliana
atgcaggagctgttcag

SEQ ID NO: 55447 - DNA, 17 bp, Arabidopsis thaliana
atgcaggcggcctgatt

SEQ ID NO: 55448 - DNA, 17 bp, Arabidopsis thaliana
atgcaggtcatacggga

SEQ ID NO: 55449 - DNA, 17 bp, Arabidopsis thaliana
atgcaggtcggccgtcc

SEQ ID NO: 55450 - DNA, 17 bp, Arabidopsis thaliana
atgcaggtgggttatgg

SEQ ID NO: 55451 - DNA, 17 bp, Arabidopsis thaliana
atgcaggttagtcgggt

SEQ ID NO: 55452 - DNA, 17 bp, Arabidopsis thaliana
atgcagtcatgtcagtt

SEQ ID NO: 55453 - DNA, 17 bp, Arabidopsis thaliana
atgcagtccgattgcca

SEQ ID NO: 55454 - DNA, 17 bp, Arabidopsis thaliana
atgcagtcgtcgaagaa

SEQ ID NO: 55455 - DNA, 17 bp, Arabidopsis thaliana
atgcagtgtcgtgtcgt

SEQ ID NO: 55456 - DNA, 17 bp, Arabidopsis thaliana
atgcagtgttttcacgc

SEQ ID NO: 55457 - DNA, 17 bp, Arabidopsis thaliana
atgcagttctagatctg

SEQ ID NO: 55458 - DNA, 17 bp, Arabidopsis thaliana
atgcataacttgggact

SEQ ID NO: 55459 - DNA, 17 bp, Arabidopsis thaliana
atgcataagtattctcc

SEQ ID NO: 55460 - DNA, 17 bp, Arabidopsis thaliana
atgcataatcatggtga

SEQ ID NO: 55461 - DNA, 17 bp, Arabidopsis thaliana
atgcatacctttcgcct

SEQ ID NO: 55462 - DNA, 17 bp, Arabidopsis thaliana
atgcatactgcactatg

SEQ ID NO: 55463 - DNA, 17 bp, Arabidopsis thaliana
atgcatagttcgctaac

SEQ ID NO: 55464 - DNA, 17 bp, Arabidopsis thaliana
atgcatatagccgacac

SEQ ID NO: 55465 - DNA, 17 bp, Arabidopsis thaliana
atgcatatccattgcta

SEQ ID NO: 55466 - DNA, 17 bp, Arabidopsis thaliana
atgcatctacaggatgc

SEQ ID NO: 55467 - DNA, 17 bp, Arabidopsis thaliana
atgcatgcaaccatgac

SEQ ID NO: 55468 - DNA, 17 bp, Arabidopsis thaliana
atgcatgcaggagcggt

SEQ ID NO: 55469 - DNA, 17 bp, Arabidopsis thaliana
atgcatgcgagaaattt

SEQ ID NO: 55470 - DNA, 17 bp, Arabidopsis thaliana
atgcatgctccacttgg

SEQ ID NO: 55471 - DNA, 17 bp, Arabidopsis thaliana
atgcatgctgtggtttc

SEQ ID NO: 55472 - DNA, 17 bp, Arabidopsis thaliana
atgcatgggcggatcca

SEQ ID NO: 55473 - DNA, 17 bp, Arabidopsis thaliana
atgcatgtccgcaaatg

SEQ ID NO: 55474 - DNA, 17 bp, Arabidopsis thaliana
atgcatgtcggcctgaa

SEQ ID NO: 55475 - DNA, 17 bp, Arabidopsis thaliana
atgcatgtctaggtcac

SEQ ID NO: 55476 - DNA, 17 bp, Arabidopsis thaliana
atgcatgtgccttggcc

SEQ ID NO: 55477 - DNA, 17 bp, Arabidopsis thaliana
atgcattaacggatctg

SEQ ID NO: 55478 - DNA, 17 bp, Arabidopsis thaliana
atgcattagcccaaccc

SEQ ID NO: 55479 - DNA, 17 bp, Arabidopsis thaliana
atgcattagccgacatc

SEQ ID NO: 55480 - DNA, 17 bp, Arabidopsis thaliana
atgcattagccgacccc

SEQ ID NO: 55481 - DNA, 17 bp, Arabidopsis thaliana
atgcattagggagtgtg

SEQ ID NO: 55482 - DNA, 17 bp, Arabidopsis thaliana
atgcattccgggctcgt

SEQ ID NO: 55483 - DNA, 17 bp, Arabidopsis thaliana
atgcattctagtagccc

SEQ ID NO: 55484 - DNA, 17 bp, Arabidopsis thaliana
atgcattgatcaagaca

SEQ ID NO: 55485 - DNA, 17 bp, Arabidopsis thaliana
atgcattgatttagcca

SEQ ID NO: 55486 - DNA, 17 bp, Arabidopsis thaliana
atgcattgctggatacc

SEQ ID NO: 55487 - DNA, 17 bp, Arabidopsis thaliana
atgcattgctttccttc

SEQ ID NO: 55488 - DNA, 17 bp, Arabidopsis thaliana
atgcatttcggcctgaa

SEQ ID NO: 55489 - DNA, 17 bp, Arabidopsis thaliana
atgcatttcggcctgac

SEQ ID NO: 55490 - DNA, 17 bp, Arabidopsis thaliana
atgcatttggactaggc

SEQ ID NO: 55491 - DNA, 17 bp, Arabidopsis thaliana
atgcatttggactgggc

SEQ ID NO: 55492 - DNA, 17 bp, Arabidopsis thaliana
atgcatttggccgcgca

SEQ ID NO: 55493 - DNA, 17 bp, Arabidopsis thaliana
atgcattttgtttgtaa

SEQ ID NO: 55494 - DNA, 17 bp, Arabidopsis thaliana
atgccaaactccaactg

SEQ ID NO: 55495 - DNA, 17 bp, Arabidopsis thaliana
atgccaaactccagctg

SEQ ID NO: 55496 - DNA, 17 bp, Arabidopsis thaliana
atgccaaagactgatat

SEQ ID NO: 55497 - DNA, 17 bp, Arabidopsis thaliana
atgccaaagtttgcaaa

SEQ ID NO: 55498 - DNA, 17 bp, Arabidopsis thaliana
atgccaaatgactgtct

SEQ ID NO: 55499 - DNA, 17 bp, Arabidopsis thaliana
atgccaacatctgatcg

SEQ ID NO: 55500 - DNA, 17 bp, Arabidopsis thaliana
atgccaactttcccccc

SEQ ID NO: 55501 - DNA, 17 bp, Arabidopsis thaliana
atgccaaggatgacttg

SEQ ID NO: 55502 - DNA, 17 bp, Arabidopsis thaliana
atgccaagggtgtcaat

SEQ ID NO: 55503 - DNA, 17 bp, Arabidopsis thaliana
atgccaagtttggcccc

SEQ ID NO: 55504 - DNA, 17 bp, Arabidopsis thaliana
atgccaagtttggcctc

SEQ ID NO: 55505 - DNA, 17 bp, Arabidopsis thaliana
atgccaagtttggcctt

SEQ ID NO: 55506 - DNA, 17 bp, Arabidopsis thaliana
atgccaagtttgggctc

SEQ ID NO: 55507 - DNA, 17 bp, Arabidopsis thaliana
atgccaatctcttactg

SEQ ID NO: 55508 - DNA, 17 bp, Arabidopsis thaliana
atgccaatgcatcaagt

SEQ ID NO: 55509 - DNA, 17 bp, Arabidopsis thaliana
atgccaattgcgatcac

SEQ ID NO: 55510 - DNA, 17 bp, Arabidopsis thaliana
atgccacaaaccgttct

SEQ ID NO: 55511 - DNA, 17 bp, Arabidopsis thaliana
atgccacaacactgctg

SEQ ID NO: 55512 - DNA, 17 bp, Arabidopsis thaliana
atgccacatatcaccgc

SEQ ID NO: 55513 - DNA, 17 bp, Arabidopsis thaliana
atgccacgtcgacggta

SEQ ID NO: 55514 - DNA, 17 bp, Arabidopsis thaliana
atgccacgtgtcaagta

SEQ ID NO: 55515 - DNA, 17 bp, Arabidopsis thaliana
atgccacgtgtcaagtc

SEQ ID NO: 55516 - DNA, 17 bp, Arabidopsis thaliana
atgccactggctgagac

SEQ ID NO: 55517 - DNA, 17 bp, Arabidopsis thaliana
atgccactggggactgt

SEQ ID NO: 55518 - DNA, 17 bp, Arabidopsis thaliana
atgccactttttgatct

SEQ ID NO: 55519 - DNA, 17 bp, Arabidopsis thaliana
atgccagaaatgttttg

SEQ ID NO: 55520 - DNA, 17 bp, Arabidopsis thaliana
atgccagcagatctgat

SEQ ID NO: 55521 - DNA, 17 bp, Arabidopsis thaliana
atgccagtggcagccgt

SEQ ID NO: 55522 - DNA, 17 bp, Arabidopsis thaliana
atgccagtggtagcgac

SEQ ID NO: 55523 - DNA, 17 bp, Arabidopsis thaliana
atgccatagccacaaag

SEQ ID NO: 55524 - DNA, 17 bp, Arabidopsis thaliana
atgccatccaggcgtca

SEQ ID NO: 55525 - DNA, 17 bp, Arabidopsis thaliana
atgccatcctactcgtc

SEQ ID NO: 55526 - DNA, 17 bp, Arabidopsis thaliana
atgccatctcattggcc

SEQ ID NO: 55527 - DNA, 17 bp, Arabidopsis thaliana
atgccatctccattggt

SEQ ID NO: 55528 - DNA, 17 bp, Arabidopsis thaliana
atgccattcggattgac

SEQ ID NO: 55529 - DNA, 17 bp, Arabidopsis thaliana
atgccatttcgagaatc

SEQ ID NO: 55530 - DNA, 17 bp, Arabidopsis thaliana
atgcccaataaagatca

SEQ ID NO: 55531 - DNA, 17 bp, Arabidopsis thaliana
atgcccaatagagacca

SEQ ID NO: 55532 - DNA, 17 bp, Arabidopsis thaliana
atgcccagatgctcact

SEQ ID NO: 55533 - DNA, 17 bp, Arabidopsis thaliana
atgcccagattgttagt

SEQ ID NO: 55534 - DNA, 17 bp, Arabidopsis thaliana
atgcccaggtctatgta

SEQ ID NO: 55535 - DNA, 17 bp, Arabidopsis thaliana
atgcccatgggcagccc

SEQ ID NO: 55536 - DNA, 17 bp, Arabidopsis thaliana
atgcccctgttatggta

SEQ ID NO: 55537 - DNA, 17 bp, Arabidopsis thaliana
atgccccttatgccctg

SEQ ID NO: 55538 - DNA, 17 bp, Arabidopsis thaliana
atgccccttcgcaggct

SEQ ID NO: 55539 - DNA, 17 bp, Arabidopsis thaliana
atgcccgcgtcgcgata

SEQ ID NO: 55540 - DNA, 17 bp, Arabidopsis thaliana
atgcccgttccgcacta

SEQ ID NO: 55541 - DNA, 17 bp, Arabidopsis thaliana
atgccctgggcgacaca

SEQ ID NO: 55542 - DNA, 17 bp, Arabidopsis thaliana
atgcccttagatgttct

SEQ ID NO: 55543 - DNA, 17 bp, Arabidopsis thaliana
atgccctttccgcacta

SEQ ID NO: 55544 - DNA, 17 bp, Arabidopsis thaliana
atgccctttctcaatcc

SEQ ID NO: 55545 - DNA, 17 bp, Arabidopsis thaliana
atgcccttttgcaactc

SEQ ID NO: 55546 - DNA, 17 bp, Arabidopsis thaliana
atgccgaccagggatca

SEQ ID NO: 55547 - DNA, 17 bp, Arabidopsis thaliana
atgccgaccatggatca

SEQ ID NO: 55548 - DNA, 17 bp, Arabidopsis thaliana
atgccgacctatggaag

SEQ ID NO: 55549 - DNA, 17 bp, Arabidopsis thaliana
atgccgataacaggacg

SEQ ID NO: 55550 - DNA, 17 bp, Arabidopsis thaliana
atgccgatctgtgtaag

SEQ ID NO: 55551 - DNA, 17 bp, Arabidopsis thaliana
atgccgatgtctgtggg

SEQ ID NO: 55552 - DNA, 17 bp, Arabidopsis thaliana
atgccgattaacttctc

SEQ ID NO: 55553 - DNA, 17 bp, Arabidopsis thaliana
atgccgattaacttctt

SEQ ID NO: 55554 - DNA, 17 bp, Arabidopsis thaliana
atgccgcctacccaccc

SEQ ID NO: 55555 - DNA, 17 bp, Arabidopsis thaliana
atgccgcgaacaaagtg

SEQ ID NO: 55556 - DNA, 17 bp, Arabidopsis thaliana
atgccgcggacagcccg

SEQ ID NO: 55557 - DNA, 17 bp, Arabidopsis thaliana
atgccgcgtggaggtct

SEQ ID NO: 55558 - DNA, 17 bp, Arabidopsis thaliana
atgccgctcagattatc

SEQ ID NO: 55559 - DNA, 17 bp, Arabidopsis thaliana
atgccggcaggatgtcg

SEQ ID NO: 55560 - DNA, 17 bp, Arabidopsis thaliana
atgccggcaggatgttg

SEQ ID NO: 55561 - DNA, 17 bp, Arabidopsis thaliana
atgccgggttatgcgat

SEQ ID NO: 55562 - DNA, 17 bp, Arabidopsis thaliana
atgccggtcgaggcctc

SEQ ID NO: 55563 - DNA, 17 bp, Arabidopsis thaliana
atgccggtgttaacttt

SEQ ID NO: 55564 - DNA, 17 bp, Arabidopsis thaliana
atgccggttgtccaagg

SEQ ID NO: 55565 - DNA, 17 bp, Arabidopsis thaliana
atgccgtacaagttctc

SEQ ID NO: 55566 - DNA, 17 bp, Arabidopsis thaliana
atgccgtccaggcgtca

SEQ ID NO: 55567 - DNA, 17 bp, Arabidopsis thaliana
atgccgtgatcgtggtc

SEQ ID NO: 55568 - DNA, 17 bp, Arabidopsis thaliana
atgccgtgcttgccacc

SEQ ID NO: 55569 - DNA, 17 bp, Arabidopsis thaliana
atgccgttcagattatc

SEQ ID NO: 55570 - DNA, 17 bp, Arabidopsis thaliana
atgcctaaactgtgaat

SEQ ID NO: 55571 - DNA, 17 bp, Arabidopsis thaliana
atgcctaagtctgttgc

SEQ ID NO: 55572 - DNA, 17 bp, Arabidopsis thaliana
atgcctagagctaagat

SEQ ID NO: 55573 - DNA, 17 bp, Arabidopsis thaliana
atgcctatttggctgcg

SEQ ID NO: 55574 - DNA, 17 bp, Arabidopsis thaliana
atgcctcgttctactgg

SEQ ID NO: 55575 - DNA, 17 bp, Arabidopsis thaliana
atgcctctacggtgtat

SEQ ID NO: 55576 - DNA, 17 bp, Arabidopsis thaliana
atgcctctgaaccaagt

SEQ ID NO: 55577 - DNA, 17 bp, Arabidopsis thaliana
atgcctctggctcatac

SEQ ID NO: 55578 - DNA, 17 bp, Arabidopsis thaliana
atgcctcttttggaatg

SEQ ID NO: 55579 - DNA, 17 bp, Arabidopsis thaliana
atgcctgaagcggcctg

SEQ ID NO: 55580 - DNA, 17 bp, Arabidopsis thaliana
atgcctgactccctgta

SEQ ID NO: 55581 - DNA, 17 bp, Arabidopsis thaliana
atgcctgaggaacagct

SEQ ID NO: 55582 - DNA, 17 bp, Arabidopsis thaliana
atgcctgcattgtccgc

SEQ ID NO: 55583 - DNA, 17 bp, Arabidopsis thaliana
atgcctgccactgatat

SEQ ID NO: 55584 - DNA, 17 bp, Arabidopsis thaliana
atgcctggctcccagta

SEQ ID NO: 55585 - DNA, 17 bp, Arabidopsis thaliana
atgcctggctccctgta

SEQ ID NO: 55586 - DNA, 17 bp, Arabidopsis thaliana
atgcctggcttcctgta

SEQ ID NO: 55587 - DNA, 17 bp, Arabidopsis thaliana
atgcctggttccctgta

SEQ ID NO: 55588 - DNA, 17 bp, Arabidopsis thaliana
atgcctgtcgggacccg

SEQ ID NO: 55589 - DNA, 17 bp, Arabidopsis thaliana
atgccttagcatggtgg

SEQ ID NO: 55590 - DNA, 17 bp, Arabidopsis thaliana
atgccttctacatcatt

SEQ ID NO: 55591 - DNA, 17 bp, Arabidopsis thaliana
atgccttctgacgccgg

SEQ ID NO: 55592 - DNA, 17 bp, Arabidopsis thaliana
atgccttgaggcacggc

SEQ ID NO: 55593 - DNA, 17 bp, Arabidopsis thaliana
atgcctttacgactccc

SEQ ID NO: 55594 - DNA, 17 bp, Arabidopsis thaliana
atgcctttcttgagcga

SEQ ID NO: 55595 - DNA, 17 bp, Arabidopsis thaliana
atgcctttgctgcttct

SEQ ID NO: 55596 - DNA, 17 bp, Arabidopsis thaliana
atgcctttttctcaatg

SEQ ID NO: 55597 - DNA, 17 bp, Arabidopsis thaliana
atgcctttttgtatcga

SEQ ID NO: 55598 - DNA, 17 bp, Arabidopsis thaliana
atgcgaaactcggacta

SEQ ID NO: 55599 - DNA, 17 bp, Arabidopsis thaliana
atgcgaagaaactcacc

SEQ ID NO: 55600 - DNA, 17 bp, Arabidopsis thaliana
atgcgaagtttggcctc

SEQ ID NO: 55601 - DNA, 17 bp, Arabidopsis thaliana
atgcgacaatgaatgtg

SEQ ID NO: 55602 - DNA, 17 bp, Arabidopsis thaliana
atgcgacatacgctgcc

SEQ ID NO: 55603 - DNA, 17 bp, Arabidopsis thaliana
atgcgaccaatctgagg

SEQ ID NO: 55604 - DNA, 17 bp, Arabidopsis thaliana
atgcgaccagtcaggaa

SEQ ID NO: 55605 - DNA, 17 bp, Arabidopsis thaliana
atgcgaccttctggggc

SEQ ID NO: 55606 - DNA, 17 bp, Arabidopsis thaliana
atgcgacgacgacgact

SEQ ID NO: 55607 - DNA, 17 bp, Arabidopsis thaliana
atgcgacgcggattacg

SEQ ID NO: 55608 - DNA, 17 bp, Arabidopsis thaliana
atgcgactctgatttag

SEQ ID NO: 55609 - DNA, 17 bp, Arabidopsis thaliana
atgcgacttaacaaggt

SEQ ID NO: 55610 - DNA, 17 bp, Arabidopsis thaliana
atgcgagaccaaacgtg

SEQ ID NO: 55611 - DNA, 17 bp, Arabidopsis thaliana
atgcgagagagaatcca

SEQ ID NO: 55612 - DNA, 17 bp, Arabidopsis thaliana
atgcgagccacaagcaa

SEQ ID NO: 55613 - DNA, 17 bp, Arabidopsis thaliana
atgcgaggtgggttcag

SEQ ID NO: 55614 - DNA, 17 bp, Arabidopsis thaliana
atgcgagttggggtgtg

SEQ ID NO: 55615 - DNA, 17 bp, Arabidopsis thaliana
atgcgatacgggagaag

SEQ ID NO: 55616 - DNA, 17 bp, Arabidopsis thaliana
atgcgatactgtgtgaa

SEQ ID NO: 55617 - DNA, 17 bp, Arabidopsis thaliana
atgcgatacttggtgtg

SEQ ID NO: 55618 - DNA, 17 bp, Arabidopsis thaliana
atgcgatagggtccccc

SEQ ID NO: 55619 - DNA, 17 bp, Arabidopsis thaliana
atgcgatatggtgcctt

SEQ ID NO: 55620 - DNA, 17 bp, Arabidopsis thaliana
atgcgatcataccagca

SEQ ID NO: 55621 - DNA, 17 bp, Arabidopsis thaliana
atgcgatctttccgtcc

SEQ ID NO: 55622 - DNA, 17 bp, Arabidopsis thaliana
atgcgatcttttcgtgt

SEQ ID NO: 55623 - DNA, 17 bp, Arabidopsis thaliana
atgcgatgatctgtcct

SEQ ID NO: 55624 - DNA, 17 bp, Arabidopsis thaliana
atgcgatgtggttttgg

SEQ ID NO: 55625 - DNA, 17 bp, Arabidopsis thaliana
atgcgatgttctgtcct

SEQ ID NO: 55626 - DNA, 17 bp, Arabidopsis thaliana
atgcgatgtttgccagt

SEQ ID NO: 55627 - DNA, 17 bp, Arabidopsis thaliana
atgcgattttgggtgcg

SEQ ID NO: 55628 - DNA, 17 bp, Arabidopsis thaliana
atgcgcagttgggcacc

SEQ ID NO: 55629 - DNA, 17 bp, Arabidopsis thaliana
atgcgctgctcggagag

SEQ ID NO: 55630 - DNA, 17 bp, Arabidopsis thaliana
atgcggaacaagtgcgg

SEQ ID NO: 55631 - DNA, 17 bp, Arabidopsis thaliana
atgcggaacggagcaat

SEQ ID NO: 55632 - DNA, 17 bp, Arabidopsis thaliana
atgcggaacggagcact

SEQ ID NO: 55633 - DNA, 17 bp, Arabidopsis thaliana
atgcggactacctgcac

SEQ ID NO: 55634 - DNA, 17 bp, Arabidopsis thaliana
atgcggactacctgccc

SEQ ID NO: 55635 - DNA, 17 bp, Arabidopsis thaliana
atgcggacttgctcagg

SEQ ID NO: 55636 - DNA, 17 bp, Arabidopsis thaliana
atgcggacttgctctag

SEQ ID NO: 55637 - DNA, 17 bp, Arabidopsis thaliana
atgcggatgggcgatgt

SEQ ID NO: 55638 - DNA, 17 bp, Arabidopsis thaliana
atgcggatttgctctgc

SEQ ID NO: 55639 - DNA, 17 bp, Arabidopsis thaliana
atgcggcagcggtagcg

SEQ ID NO: 55640 - DNA, 17 bp, Arabidopsis thaliana
atgcggcaggccgtggc

SEQ ID NO: 55641 - DNA, 17 bp, Arabidopsis thaliana
atgcggccctttgtcgc

SEQ ID NO: 55642 - DNA, 17 bp, Arabidopsis thaliana
atgcggcgcacaaacat

SEQ ID NO: 55643 - DNA, 17 bp, Arabidopsis thaliana
atgcggcgcacaacaat

SEQ ID NO: 55644 - DNA, 17 bp, Arabidopsis thaliana
atgcggcggagaggcgg

SEQ ID NO: 55645 - DNA, 17 bp, Arabidopsis thaliana
atgcggcggagctacgt

SEQ ID NO: 55646 - DNA, 17 bp, Arabidopsis thaliana
atgcggctacgaggcga

SEQ ID NO: 55647 - DNA, 17 bp, Arabidopsis thaliana
atgcggctatcagagaa

SEQ ID NO: 55648 - DNA, 17 bp, Arabidopsis thaliana
atgcggcttcactaccc

SEQ ID NO: 55649 - DNA, 17 bp, Arabidopsis thaliana
atgcgggagaaatatat

SEQ ID NO: 55650 - DNA, 17 bp, Arabidopsis thaliana
atgcgggatgaaccgga

SEQ ID NO: 55651 - DNA, 17 bp, Arabidopsis thaliana
atgcgggcaacagtcgg

SEQ ID NO: 55652 - DNA, 17 bp, Arabidopsis thaliana
atgcgggtcctaaggtt

SEQ ID NO: 55653 - DNA, 17 bp, Arabidopsis thaliana
atgcgggtcctacggtt

SEQ ID NO: 55654 - DNA, 17 bp, Arabidopsis thaliana
atgcgggttcgatttcc

SEQ ID NO: 55655 - DNA, 17 bp, Arabidopsis thaliana
atgcgggttgcaagtat

SEQ ID NO: 55656 - DNA, 17 bp, Arabidopsis thaliana
atgcggtacaacgcggg

SEQ ID NO: 55657 - DNA, 17 bp, Arabidopsis thaliana
atgcggtatgaaccgga

SEQ ID NO: 55658 - DNA, 17 bp, Arabidopsis thaliana
atgcggtccgcctttgg

SEQ ID NO: 55659 - DNA, 17 bp, Arabidopsis thaliana
atgcggtcgagacgccc

SEQ ID NO: 55660 - DNA, 17 bp, Arabidopsis thaliana
atgcggtcggaagtacg

SEQ ID NO: 55661 - DNA, 17 bp, Arabidopsis thaliana
atgcggtgttcgaagtt

SEQ ID NO: 55662 - DNA, 17 bp, Arabidopsis thaliana
atgcggttcggtttatt

SEQ ID NO: 55663 - DNA, 17 bp, Arabidopsis thaliana
atgcggttgcggtttaa

SEQ ID NO: 55664 - DNA, 17 bp, Arabidopsis thaliana
atgcggtttctgcgtct

SEQ ID NO: 55665 - DNA, 17 bp, Arabidopsis thaliana
atgcggttttcgctggc

SEQ ID NO: 55666 - DNA, 17 bp, Arabidopsis thaliana
atgcggttttgagtgcc

SEQ ID NO: 55667 - DNA, 17 bp, Arabidopsis thaliana
atgcggttttgagtgcg

SEQ ID NO: 55668 - DNA, 17 bp, Arabidopsis thaliana
atgcggttttggatgtg

SEQ ID NO: 55669 - DNA, 17 bp, Arabidopsis thaliana
atgcggttttgggtgcg

SEQ ID NO: 55670 - DNA, 17 bp, Arabidopsis thaliana
atgcgtacctcagacct

SEQ ID NO: 55671 - DNA, 17 bp, Arabidopsis thaliana
atgcgtagcatgggtgt

SEQ ID NO: 55672 - DNA, 17 bp, Arabidopsis thaliana
atgcgtatcgcaccaga

SEQ ID NO: 55673 - DNA, 17 bp, Arabidopsis thaliana
atgcgtattcaggtgcc

SEQ ID NO: 55674 - DNA, 17 bp, Arabidopsis thaliana
atgcgtcagcatctgca

SEQ ID NO: 55675 - DNA, 17 bp, Arabidopsis thaliana
atgcgtcatctacgaga

SEQ ID NO: 55676 - DNA, 17 bp, Arabidopsis thaliana
atgcgtccatcacattg

SEQ ID NO: 55677 - DNA, 17 bp, Arabidopsis thaliana
atgcgtcctggtcggag

SEQ ID NO: 55678 - DNA, 17 bp, Arabidopsis thaliana
atgcgtccttggattgc

SEQ ID NO: 55679 - DNA, 17 bp, Arabidopsis thaliana
atgcgtcgccagcacag

SEQ ID NO: 55680 - DNA, 17 bp, Arabidopsis thaliana
atgcgtcgcttctagcc

SEQ ID NO: 55681 - DNA, 17 bp, Arabidopsis thaliana
atgcgtcggactcgccg

SEQ ID NO: 55682 - DNA, 17 bp, Arabidopsis thaliana
atgcgtcgggcagttac

SEQ ID NO: 55683 - DNA, 17 bp, Arabidopsis thaliana
atgcgtctactgaacac

SEQ ID NO: 55684 - DNA, 17 bp, Arabidopsis thaliana
atgcgtctgtaaagcag

SEQ ID NO: 55685 - DNA, 17 bp, Arabidopsis thaliana
atgcgtgaggctggttc

SEQ ID NO: 55686 - DNA, 17 bp, Arabidopsis thaliana
atgcgtggcaactagga

SEQ ID NO: 55687 - DNA, 17 bp, Arabidopsis thaliana
atgcgtgtccactggga

SEQ ID NO: 55688 - DNA, 17 bp, Arabidopsis thaliana
atgcgttaccggtattt

SEQ ID NO: 55689 - DNA, 17 bp, Arabidopsis thaliana
atgcgttccaaccaaaa

SEQ ID NO: 55690 - DNA, 17 bp, Arabidopsis thaliana
atgcgttgattttgcac

SEQ ID NO: 55691 - DNA, 17 bp, Arabidopsis thaliana
atgcgttgctctgttga

SEQ ID NO: 55692 - DNA, 17 bp, Arabidopsis thaliana
atgcgtttgcgggagat

SEQ ID NO: 55693 - DNA, 17 bp, Arabidopsis thaliana
atgcgtttgcgggagtt

SEQ ID NO: 55694 - DNA, 17 bp, Arabidopsis thaliana
atgctaacatccgcatg

SEQ ID NO: 55695 - DNA, 17 bp, Arabidopsis thaliana
atgctaaccgactcctt

SEQ ID NO: 55696 - DNA, 17 bp, Arabidopsis thaliana
atgctaacgcaatgtga

SEQ ID NO: 55697 - DNA, 17 bp, Arabidopsis thaliana
atgctaacttttctttt

SEQ ID NO: 55698 - DNA, 17 bp, Arabidopsis thaliana
atgctaagcgaacggtg

SEQ ID NO: 55699 - DNA, 17 bp, Arabidopsis thaliana
atgctaaggctgctttc

SEQ ID NO: 55700 - DNA, 17 bp, Arabidopsis thaliana
atgctaagggtagttag

SEQ ID NO: 55701 - DNA, 17 bp, Arabidopsis thaliana
atgctaagtttggccgc

SEQ ID NO: 55702 - DNA, 17 bp, Arabidopsis thaliana
atgctaagtttggcctc

SEQ ID NO: 55703 - DNA, 17 bp, Arabidopsis thaliana
atgctaagttttgccac

SEQ ID NO: 55704 - DNA, 17 bp, Arabidopsis thaliana
atgctaatggcattggg

SEQ ID NO: 55705 - DNA, 17 bp, Arabidopsis thaliana
atgctaatgtgacgaaa

SEQ ID NO: 55706 - DNA, 17 bp, Arabidopsis thaliana
atgctaattccctggtg

SEQ ID NO: 55707 - DNA, 17 bp, Arabidopsis thaliana
atgctaatttgtttatc

SEQ ID NO: 55708 - DNA, 17 bp, Arabidopsis thaliana
atgctacaaccttcaat

SEQ ID NO: 55709 - DNA, 17 bp, Arabidopsis thaliana
atgctacatattcgctt

SEQ ID NO: 55710 - DNA, 17 bp, Arabidopsis thaliana
atgctacatcttggttg

SEQ ID NO: 55711 - DNA, 17 bp, Arabidopsis thaliana
atgctacgacaaattgc

SEQ ID NO: 55712 - DNA, 17 bp, Arabidopsis thaliana
atgctactccttgccga

SEQ ID NO: 55713 - DNA, 17 bp, Arabidopsis thaliana
atgctactgagctaatg

SEQ ID NO: 55714 - DNA, 17 bp, Arabidopsis thaliana
atgctactgcggatctt

SEQ ID NO: 55715 - DNA, 17 bp, Arabidopsis thaliana
atgctactgcgggtaca

SEQ ID NO: 55716 - DNA, 17 bp, Arabidopsis thaliana
atgctacttcttagttg

SEQ ID NO: 55717 - DNA, 17 bp, Arabidopsis thaliana
atgctacttcttggttg

SEQ ID NO: 55718 - DNA, 17 bp, Arabidopsis thaliana
atgctagagttcatccg

SEQ ID NO: 55719 - DNA, 17 bp, Arabidopsis thaliana
atgctagctgctttcca

SEQ ID NO: 55720 - DNA, 17 bp, Arabidopsis thaliana
atgctagggggtagtca

SEQ ID NO: 55721 - DNA, 17 bp, Arabidopsis thaliana
atgctaggtgctgaatt

SEQ ID NO: 55722 - DNA, 17 bp, Arabidopsis thaliana
atgctatactcccagga

SEQ ID NO: 55723 - DNA, 17 bp, Arabidopsis thaliana
atgctatggccgcagca

SEQ ID NO: 55724 - DNA, 17 bp, Arabidopsis thaliana
atgctatggtttcgggg

SEQ ID NO: 55725 - DNA, 17 bp, Arabidopsis thaliana
atgctatggtttcgggt

SEQ ID NO: 55726 - DNA, 17 bp, Arabidopsis thaliana
atgctatgtccatcgcc

SEQ ID NO: 55727 - DNA, 17 bp, Arabidopsis thaliana
atgctatgtccatcgct

SEQ ID NO: 55728 - DNA, 17 bp, Arabidopsis thaliana
atgctcaagtacacggg

SEQ ID NO: 55729 - DNA, 17 bp, Arabidopsis thaliana
atgctcacaacttccct

SEQ ID NO: 55730 - DNA, 17 bp, Arabidopsis thaliana
atgctcagacgactcga

SEQ ID NO: 55731 - DNA, 17 bp, Arabidopsis thaliana
atgctcagatcacggtc

SEQ ID NO: 55732 - DNA, 17 bp, Arabidopsis thaliana
atgctcaggaggtgcga

SEQ ID NO: 55733 - DNA, 17 bp, Arabidopsis thaliana
atgctcaggcatgcact

SEQ ID NO: 55734 - DNA, 17 bp, Arabidopsis thaliana
atgctcaggcatgtact

SEQ ID NO: 55735 - DNA, 17 bp, Arabidopsis thaliana
atgctcaggcctaacta

SEQ ID NO: 55736 - DNA, 17 bp, Arabidopsis thaliana
atgctcaggcctaactt

SEQ ID NO: 55737 - DNA, 17 bp, Arabidopsis thaliana
atgctcaggcctgcgcc

SEQ ID NO: 55738 - DNA, 17 bp, Arabidopsis thaliana
atgctcagttgtctggt

SEQ ID NO: 55739 - DNA, 17 bp, Arabidopsis thaliana
atgctcatcgacaaagt

SEQ ID NO: 55740 - DNA, 17 bp, Arabidopsis thaliana
atgctcatctccgtaaa

SEQ ID NO: 55741 - DNA, 17 bp, Arabidopsis thaliana
atgctcatctcctgcag

SEQ ID NO: 55742 - DNA, 17 bp, Arabidopsis thaliana
atgctcatgcgatgaac

SEQ ID NO: 55743 - DNA, 17 bp, Arabidopsis thaliana
atgctcatttccaattg

SEQ ID NO: 55744 - DNA, 17 bp, Arabidopsis thaliana
atgctcatttggtacga

SEQ ID NO: 55745 - DNA, 17 bp, Arabidopsis thaliana
atgctcccaatcagtgt

SEQ ID NO: 55746 - DNA, 17 bp, Arabidopsis thaliana
atgctccgccgtgattt

SEQ ID NO: 55747 - DNA, 17 bp, Arabidopsis thaliana
atgctccttttgtccac

SEQ ID NO: 55748 - DNA, 17 bp, Arabidopsis thaliana
atgctcgagctgcttcc

SEQ ID NO: 55749 - DNA, 17 bp, Arabidopsis thaliana
atgctcgaggggctgtg

SEQ ID NO: 55750 - DNA, 17 bp, Arabidopsis thaliana
atgctcgccggcatcgg

SEQ ID NO: 55751 - DNA, 17 bp, Arabidopsis thaliana
atgctcgccggcgtcgg

SEQ ID NO: 55752 - DNA, 17 bp, Arabidopsis thaliana
atgctcggacgttcaga

SEQ ID NO: 55753 - DNA, 17 bp, Arabidopsis thaliana
atgctcggtgtccggag

SEQ ID NO: 55754 - DNA, 17 bp, Arabidopsis thaliana
atgctcgtcttcatgct

SEQ ID NO: 55755 - DNA, 17 bp, Arabidopsis thaliana
atgctctaccctttgct

SEQ ID NO: 55756 - DNA, 17 bp, Arabidopsis thaliana
atgctctatcaagcgga

SEQ ID NO: 55757 - DNA, 17 bp, Arabidopsis thaliana
atgctctcacaaagact

SEQ ID NO: 55758 - DNA, 17 bp, Arabidopsis thaliana
atgctctgacccgagta

SEQ ID NO: 55759 - DNA, 17 bp, Arabidopsis thaliana
atgctctgatggctctt

SEQ ID NO: 55760 - DNA, 17 bp, Arabidopsis thaliana
atgctctgctgctggtt

SEQ ID NO: 55761 - DNA, 17 bp, Arabidopsis thaliana
atgctctttcaagactg

SEQ ID NO: 55762 - DNA, 17 bp, Arabidopsis thaliana
atgctctttccacacta

SEQ ID NO: 55763 - DNA, 17 bp, Arabidopsis thaliana
atgctcttttgcaaaaa

SEQ ID NO: 55764 - DNA, 17 bp, Arabidopsis thaliana
atgctgaaccgacgatg

SEQ ID NO: 55765 - DNA, 17 bp, Arabidopsis thaliana
atgctgaacgaacgcct

SEQ ID NO: 55766 - DNA, 17 bp, Arabidopsis thaliana
atgctgaccgaatcgca

SEQ ID NO: 55767 - DNA, 17 bp, Arabidopsis thaliana
atgctgagaacggtgac

SEQ ID NO: 55768 - DNA, 17 bp, Arabidopsis thaliana
atgctgagaatcgtttc

SEQ ID NO: 55769 - DNA, 17 bp, Arabidopsis thaliana
atgctgatgtgtcaagt

SEQ ID NO: 55770 - DNA, 17 bp, Arabidopsis thaliana
atgctgattcgaaaacg

SEQ ID NO: 55771 - DNA, 17 bp, Arabidopsis thaliana
atgctgcaaccatccat

SEQ ID NO: 55772 - DNA, 17 bp, Arabidopsis thaliana
atgctgcactgtttgtt

SEQ ID NO: 55773 - DNA, 17 bp, Arabidopsis thaliana
atgctgcagcggcaatt

SEQ ID NO: 55774 - DNA, 17 bp, Arabidopsis thaliana
atgctgcaggttcaatt

SEQ ID NO: 55775 - DNA, 17 bp, Arabidopsis thaliana
atgctgccatcttgaga

SEQ ID NO: 55776 - DNA, 17 bp, Arabidopsis thaliana
atgctgcccctgcgttt

SEQ ID NO: 55777 - DNA, 17 bp, Arabidopsis thaliana
atgctgcctcattaaaa

SEQ ID NO: 55778 - DNA, 17 bp, Arabidopsis thaliana
atgctgcggctgagatc

SEQ ID NO: 55779 - DNA, 17 bp, Arabidopsis thaliana
atgctgcggttttgggc

SEQ ID NO: 55780 - DNA, 17 bp, Arabidopsis thaliana
atgctgctaaagcaatc

SEQ ID NO: 55781 - DNA, 17 bp, Arabidopsis thaliana
atgctgctcagctgtat

SEQ ID NO: 55782 - DNA, 17 bp, Arabidopsis thaliana
atgctgctccttcacta

SEQ ID NO: 55783 - DNA, 17 bp, Arabidopsis thaliana
atgctgctgctgtgcac

SEQ ID NO: 55784 - DNA, 17 bp, Arabidopsis thaliana
atgctgcttgcatcgtc

SEQ ID NO: 55785 - DNA, 17 bp, Arabidopsis thaliana
atgctgcttggattgtc

SEQ ID NO: 55786 - DNA, 17 bp, Arabidopsis thaliana
atgctggcagcttcaga

SEQ ID NO: 55787 - DNA, 17 bp, Arabidopsis thaliana
atgctggcatagatcta

SEQ ID NO: 55788 - DNA, 17 bp, Arabidopsis thaliana
atgctggccagtttgac

SEQ ID NO: 55789 - DNA, 17 bp, Arabidopsis thaliana
atgctggtttgtgcttg

SEQ ID NO: 55790 - DNA, 17 bp, Arabidopsis thaliana
atgctgtacattgtgac

SEQ ID NO: 55791 - DNA, 17 bp, Arabidopsis thaliana
atgctgtgctgcgaact

SEQ ID NO: 55792 - DNA, 17 bp, Arabidopsis thaliana
atgctgtggtttcggac

SEQ ID NO: 55793 - DNA, 17 bp, Arabidopsis thaliana
atgctgtggtttcggcc

SEQ ID NO: 55794 - DNA, 17 bp, Arabidopsis thaliana
atgctgtggtttcgtgc

SEQ ID NO: 55795 - DNA, 17 bp, Arabidopsis thaliana
atgctgtggttttggac

SEQ ID NO: 55796 - DNA, 17 bp, Arabidopsis thaliana
atgctgtggttttggtt

SEQ ID NO: 55797 - DNA, 17 bp, Arabidopsis thaliana
atgctgttcatgcgcac

SEQ ID NO: 55798 - DNA, 17 bp, Arabidopsis thaliana
atgctgttgttagcaga

SEQ ID NO: 55799 - DNA, 17 bp, Arabidopsis thaliana
atgctgttttggattga

SEQ ID NO: 55800 - DNA, 17 bp, Arabidopsis thaliana
atgcttaaatggatgat

SEQ ID NO: 55801 - DNA, 17 bp, Arabidopsis thaliana
atgcttaagactactgg

SEQ ID NO: 55802 - DNA, 17 bp, Arabidopsis thaliana
atgcttaagatatcaca

SEQ ID NO: 55803 - DNA, 17 bp, Arabidopsis thaliana
atgcttaaggtcttccc

SEQ ID NO: 55804 - DNA, 17 bp, Arabidopsis thaliana
atgcttacggctgattt

SEQ ID NO: 55805 - DNA, 17 bp, Arabidopsis thaliana
atgcttactgtaccgcg

SEQ ID NO: 55806 - DNA, 17 bp, Arabidopsis thaliana
atgcttagtccttggcc

SEQ ID NO: 55807 - DNA, 17 bp, Arabidopsis thaliana
atgcttatggtctttgc

SEQ ID NO: 55808 - DNA, 17 bp, Arabidopsis thaliana
atgcttattttgggggt

SEQ ID NO: 55809 - DNA, 17 bp, Arabidopsis thaliana
atgcttcaagccaaggg

SEQ ID NO: 55810 - DNA, 17 bp, Arabidopsis thaliana
atgcttcagagtggact

SEQ ID NO: 55811 - DNA, 17 bp, Arabidopsis thaliana
atgcttcatcgacacct

SEQ ID NO: 55812 - DNA, 17 bp, Arabidopsis thaliana
atgcttccctgtgccgt

SEQ ID NO: 55813 - DNA, 17 bp, Arabidopsis thaliana
atgcttccgactaatgc

SEQ ID NO: 55814 - DNA, 17 bp, Arabidopsis thaliana
atgcttccgaggatgtg

SEQ ID NO: 55815 - DNA, 17 bp, Arabidopsis thaliana
atgcttccttcggatcg

SEQ ID NO: 55816 - DNA, 17 bp, Arabidopsis thaliana
atgcttcgatccagaat

SEQ ID NO: 55817 - DNA, 17 bp, Arabidopsis thaliana
atgcttcgtcgctgttc

SEQ ID NO: 55818 - DNA, 17 bp, Arabidopsis thaliana
atgcttctaccggtcta

SEQ ID NO: 55819 - DNA, 17 bp, Arabidopsis thaliana
atgcttctcagtgacag

SEQ ID NO: 55820 - DNA, 17 bp, Arabidopsis thaliana
atgcttctcgactactc

SEQ ID NO: 55821 - DNA, 17 bp, Arabidopsis thaliana
atgcttctcgtttgttt

SEQ ID NO: 55822 - DNA, 17 bp, Arabidopsis thaliana
atgcttctctttgtcca

SEQ ID NO: 55823 - DNA, 17 bp, Arabidopsis thaliana
atgcttctgaagaaacc

SEQ ID NO: 55824 - DNA, 17 bp, Arabidopsis thaliana
atgcttctgattcattg

SEQ ID NO: 55825 - DNA, 17 bp, Arabidopsis thaliana
atgcttctggtcgtgct

SEQ ID NO: 55826 - DNA, 17 bp, Arabidopsis thaliana
atgcttcttcgctacac

SEQ ID NO: 55827 - DNA, 17 bp, Arabidopsis thaliana
atgcttcttcttcgaac

SEQ ID NO: 55828 - DNA, 17 bp, Arabidopsis thaliana
atgcttctttgcggtct

SEQ ID NO: 55829 - DNA, 17 bp, Arabidopsis thaliana
atgcttgacccttgtat

SEQ ID NO: 55830 - DNA, 17 bp, Arabidopsis thaliana
atgcttgactcgctttc

SEQ ID NO: 55831 - DNA, 17 bp, Arabidopsis thaliana
atgcttgagctgaagtg

SEQ ID NO: 55832 - DNA, 17 bp, Arabidopsis thaliana
atgcttgcaagggttga

SEQ ID NO: 55833 - DNA, 17 bp, Arabidopsis thaliana
atgcttgccaaccctcg

SEQ ID NO: 55834 - DNA, 17 bp, Arabidopsis thaliana
atgcttgccgcacaagc

SEQ ID NO: 55835 - DNA, 17 bp, Arabidopsis thaliana
atgcttgcggcaaatta

SEQ ID NO: 55836 - DNA, 17 bp, Arabidopsis thaliana
atgcttgcggcagatta

SEQ ID NO: 55837 - DNA, 17 bp, Arabidopsis thaliana
atgcttgctgccaaaca

SEQ ID NO: 55838 - DNA, 17 bp, Arabidopsis thaliana
atgcttggaacatagac

SEQ ID NO: 55839 - DNA, 17 bp, Arabidopsis thaliana
atgcttggccctgttcg

SEQ ID NO: 55840 - DNA, 17 bp, Arabidopsis thaliana
atgcttgggcgacacac

SEQ ID NO: 55841 - DNA, 17 bp, Arabidopsis thaliana
atgcttgtccttgcaca

SEQ ID NO: 55842 - DNA, 17 bp, Arabidopsis thaliana
atgcttgtgccagtggt

SEQ ID NO: 55843 - DNA, 17 bp, Arabidopsis thaliana
atgctttaagctacatg

SEQ ID NO: 55844 - DNA, 17 bp, Arabidopsis thaliana
atgctttaagctacccc

SEQ ID NO: 55845 - DNA, 17 bp, Arabidopsis thaliana
atgctttacgtcttgct

SEQ ID NO: 55846 - DNA, 17 bp, Arabidopsis thaliana
atgctttacgtcttggt

SEQ ID NO: 55847 - DNA, 17 bp, Arabidopsis thaliana
atgctttcatggtttag

SEQ ID NO: 55848 - DNA, 17 bp, Arabidopsis thaliana
atgctttccaaatgtac

SEQ ID NO: 55849 - DNA, 17 bp, Arabidopsis thaliana
atgctttccatcctctt

SEQ ID NO: 55850 - DNA, 17 bp, Arabidopsis thaliana
atgctttccgactaatg

SEQ ID NO: 55851 - DNA, 17 bp, Arabidopsis thaliana
atgctttccgactattg

SEQ ID NO: 55852 - DNA, 17 bp, Arabidopsis thaliana
atgctttcgcagttgtt

SEQ ID NO: 55853 - DNA, 17 bp, Arabidopsis thaliana
atgctttgaaatgtgtg

SEQ ID NO: 55854 - DNA, 17 bp, Arabidopsis thaliana
atgctttgatgtcgcag

SEQ ID NO: 55855 - DNA, 17 bp, Arabidopsis thaliana
atgctttgatttgcaac

SEQ ID NO: 55856 - DNA, 17 bp, Arabidopsis thaliana
atgctttgcggctgttg

SEQ ID NO: 55857 - DNA, 17 bp, Arabidopsis thaliana
atgctttggagaccact

SEQ ID NO: 55858 - DNA, 17 bp, Arabidopsis thaliana
atgctttggatggtcac

SEQ ID NO: 55859 - DNA, 17 bp, Arabidopsis thaliana
atgctttggtccgctgt

SEQ ID NO: 55860 - DNA, 17 bp, Arabidopsis thaliana
atgctttgtcctctctc

SEQ ID NO: 55861 - DNA, 17 bp, Arabidopsis thaliana
atgctttgtccttactt

SEQ ID NO: 55862 - DNA, 17 bp, Arabidopsis thaliana
atgctttgtgaaaccct

SEQ ID NO: 55863 - DNA, 17 bp, Arabidopsis thaliana
atgctttgtgacccaag

SEQ ID NO: 55864 - DNA, 17 bp, Arabidopsis thaliana
atgctttgttttcagac

SEQ ID NO: 55865 - DNA, 17 bp, Arabidopsis thaliana
atggaaaaaacggaata

SEQ ID NO: 55866 - DNA, 17 bp, Arabidopsis thaliana
atggaaaagttccattg

SEQ ID NO: 55867 - DNA, 17 bp, Arabidopsis thaliana
atggaaaagttctattg

SEQ ID NO: 55868 - DNA, 17 bp, Arabidopsis thaliana
atggaaacccgttccga

SEQ ID NO: 55869 - DNA, 17 bp, Arabidopsis thaliana
atggaaactccttccga

SEQ ID NO: 55870 - DNA, 17 bp, Arabidopsis thaliana
atggaaactcgctccga

SEQ ID NO: 55871 - DNA, 17 bp, Arabidopsis thaliana
atggaaactctatgcgg

SEQ ID NO: 55872 - DNA, 17 bp, Arabidopsis thaliana
atggaaactctgtgcgg

SEQ ID NO: 55873 - DNA, 17 bp, Arabidopsis thaliana
atggaaagagttggcca

SEQ ID NO: 55874 - DNA, 17 bp, Arabidopsis thaliana
atggaaaggatgaaagt

SEQ ID NO: 55875 - DNA, 17 bp, Arabidopsis thaliana
atggaaagtggcaatgt

SEQ ID NO: 55876 - DNA, 17 bp, Arabidopsis thaliana
atggaaagtgttggcca

SEQ ID NO: 55877 - DNA, 17 bp, Arabidopsis thaliana
atggaaagtttgtggag

SEQ ID NO: 55878 - DNA, 17 bp, Arabidopsis thaliana
atggaaatctctggttt

SEQ ID NO: 55879 - DNA, 17 bp, Arabidopsis thaliana
atggaaatgccatctcc

SEQ ID NO: 55880 - DNA, 17 bp, Arabidopsis thaliana
atggaaatggccagtgt

SEQ ID NO: 55881 - DNA, 17 bp, Arabidopsis thaliana
atggaaattcagtcgtc

SEQ ID NO: 55882 - DNA, 17 bp, Arabidopsis thaliana
atggaacaatgtaggca

SEQ ID NO: 55883 - DNA, 17 bp, Arabidopsis thaliana
atggaacattagaccat

SEQ ID NO: 55884 - DNA, 17 bp, Arabidopsis thaliana
atggaaccatctgatta

SEQ ID NO: 55885 - DNA, 17 bp, Arabidopsis thaliana
atggaacccaatccact

SEQ ID NO: 55886 - DNA, 17 bp, Arabidopsis thaliana
atggaacgggttggcgg

SEQ ID NO: 55887 - DNA, 17 bp, Arabidopsis thaliana
atggaactccggtggcg

SEQ ID NO: 55888 - DNA, 17 bp, Arabidopsis thaliana
atggaactcgcagtagg

SEQ ID NO: 55889 - DNA, 17 bp, Arabidopsis thaliana
atggaactcttacgcat

SEQ ID NO: 55890 - DNA, 17 bp, Arabidopsis thaliana
atggaacttgacttgct

SEQ ID NO: 55891 - DNA, 17 bp, Arabidopsis thaliana
atggaacttgatttgct

SEQ ID NO: 55892 - DNA, 17 bp, Arabidopsis thaliana
atggaacttttccactg

SEQ ID NO: 55893 - DNA, 17 bp, Arabidopsis thaliana
atggaacttttccattg

SEQ ID NO: 55894 - DNA, 17 bp, Arabidopsis thaliana
atggaagccgcgtctgg

SEQ ID NO: 55895 - DNA, 17 bp, Arabidopsis thaliana
atggaagctatgtgggt

SEQ ID NO: 55896 - DNA, 17 bp, Arabidopsis thaliana
atggaaggttcgatgtt

SEQ ID NO: 55897 - DNA, 17 bp, Arabidopsis thaliana
atggaagtcgaaatccg

SEQ ID NO: 55898 - DNA, 17 bp, Arabidopsis thaliana
atggaataaccggtggg

SEQ ID NO: 55899 - DNA, 17 bp, Arabidopsis thaliana
atggaatactagatttt

SEQ ID NO: 55900 - DNA, 17 bp, Arabidopsis thaliana
atggaatactccaccaa

SEQ ID NO: 55901 - DNA, 17 bp, Arabidopsis thaliana
atggaatccactgcggg

SEQ ID NO: 55902 - DNA, 17 bp, Arabidopsis thaliana
atggaatccagatggtt

SEQ ID NO: 55903 - DNA, 17 bp, Arabidopsis thaliana
atggaatctgagacggc

SEQ ID NO: 55904 - DNA, 17 bp, Arabidopsis thaliana
atggaatcttcgttcct

SEQ ID NO: 55905 - DNA, 17 bp, Arabidopsis thaliana
atggaatgcttacggct

SEQ ID NO: 55906 - DNA, 17 bp, Arabidopsis thaliana
atggaatgttgagtcac

SEQ ID NO: 55907 - DNA, 17 bp, Arabidopsis thaliana
atggaattctctgaacc

SEQ ID NO: 55908 - DNA, 17 bp, Arabidopsis thaliana
atggaattgggcaagca

SEQ ID NO: 55909 - DNA, 17 bp, Arabidopsis thaliana
atggacaacgggctgcc

SEQ ID NO: 55910 - DNA, 17 bp, Arabidopsis thaliana
atggacaatgggctgcc

SEQ ID NO: 55911 - DNA, 17 bp, Arabidopsis thaliana
atggacatggcctttac

SEQ ID NO: 55912 - DNA, 17 bp, Arabidopsis thaliana
atggacatgtagaccgg

SEQ ID NO: 55913 - DNA, 17 bp, Arabidopsis thaliana
atggacatgttgaatgg

SEQ ID NO: 55914 - DNA, 17 bp, Arabidopsis thaliana
atggaccaagcacggtg

SEQ ID NO: 55915 - DNA, 17 bp, Arabidopsis thaliana
atggaccatccaaatga

SEQ ID NO: 55916 - DNA, 17 bp, Arabidopsis thaliana
atggaccatctttgtga

SEQ ID NO: 55917 - DNA, 17 bp, Arabidopsis thaliana
atggaccgaggttaaag

SEQ ID NO: 55918 - DNA, 17 bp, Arabidopsis thaliana
atggaccgatccgtagg

SEQ ID NO: 55919 - DNA, 17 bp, Arabidopsis thaliana
atggaccgatcctaggc

SEQ ID NO: 55920 - DNA, 17 bp, Arabidopsis thaliana
atggaccgcacggaaaa

SEQ ID NO: 55921 - DNA, 17 bp, Arabidopsis thaliana
atggaccgcatttcaaa

SEQ ID NO: 55922 - DNA, 17 bp, Arabidopsis thaliana
atggaccgtccaacccc

SEQ ID NO: 55923 - DNA, 17 bp, Arabidopsis thaliana
atggaccgtccaacttg

SEQ ID NO: 55924 - DNA, 17 bp, Arabidopsis thaliana
atggaccgtcgaatcat

SEQ ID NO: 55925 - DNA, 17 bp, Arabidopsis thaliana
atggaccgtcggatcaa

SEQ ID NO: 55926 - DNA, 17 bp, Arabidopsis thaliana
atggaccgtcggatcac

SEQ ID NO: 55927 - DNA, 17 bp, Arabidopsis thaliana
atggaccgtcggatcat

SEQ ID NO: 55928 - DNA, 17 bp, Arabidopsis thaliana
atggaccgtcgttgaac

SEQ ID NO: 55929 - DNA, 17 bp, Arabidopsis thaliana
atggaccgtggtataag

SEQ ID NO: 55930 - DNA, 17 bp, Arabidopsis thaliana
atggacctcttcaccta

SEQ ID NO: 55931 - DNA, 17 bp, Arabidopsis thaliana
atggacggactattttg

SEQ ID NO: 55932 - DNA, 17 bp, Arabidopsis thaliana
atggacgggatgttgtg

SEQ ID NO: 55933 - DNA, 17 bp, Arabidopsis thaliana
atggacgtgccggagtg

SEQ ID NO: 55934 - DNA, 17 bp, Arabidopsis thaliana
atggacgttttggccgg

SEQ ID NO: 55935 - DNA, 17 bp, Arabidopsis thaliana
atggactcaaggaagct

SEQ ID NO: 55936 - DNA, 17 bp, Arabidopsis thaliana
atggactgaaccgctga

SEQ ID NO: 55937 - DNA, 17 bp, Arabidopsis thaliana
atggactgcgctgttgc

SEQ ID NO: 55938 - DNA, 17 bp, Arabidopsis thaliana
atggactggaccgctga

SEQ ID NO: 55939 - DNA, 17 bp, Arabidopsis thaliana
atggactggatattgtt

SEQ ID NO: 55940 - DNA, 17 bp, Arabidopsis thaliana
atggactggtgttggac

SEQ ID NO: 55941 - DNA, 17 bp, Arabidopsis thaliana
atggacttacccacgtg

SEQ ID NO: 55942 - DNA, 17 bp, Arabidopsis thaliana
atggactttggctacac

SEQ ID NO: 55943 - DNA, 17 bp, Arabidopsis thaliana
atggagagagttgacca

SEQ ID NO: 55944 - DNA, 17 bp, Arabidopsis thaliana
atggagagagttggcca

SEQ ID NO: 55945 - DNA, 17 bp, Arabidopsis thaliana
atggagagcccattcag

SEQ ID NO: 55946 - DNA, 17 bp, Arabidopsis thaliana
atggagatggacacatt

SEQ ID NO: 55947 - DNA, 17 bp, Arabidopsis thaliana
atggagatggccaagct

SEQ ID NO: 55948 - DNA, 17 bp, Arabidopsis thaliana
atggagatttggaacgg

SEQ ID NO: 55949 - DNA, 17 bp, Arabidopsis thaliana
atggagattttgccctg

SEQ ID NO: 55950 - DNA, 17 bp, Arabidopsis thaliana
atggagcaccctttccg

SEQ ID NO: 55951 - DNA, 17 bp, Arabidopsis thaliana
atggagcaccgagtgca

SEQ ID NO: 55952 - DNA, 17 bp, Arabidopsis thaliana
atggagcagcagggcag

SEQ ID NO: 55953 - DNA, 17 bp, Arabidopsis thaliana
atggagctctttgactt

SEQ ID NO: 55954 - DNA, 17 bp, Arabidopsis thaliana
atggaggattgttggaa

SEQ ID NO: 55955 - DNA, 17 bp, Arabidopsis thaliana
atggaggcaagtgtgca

SEQ ID NO: 55956 - DNA, 17 bp, Arabidopsis thaliana
atggaggtttaacggca

SEQ ID NO: 55957 - DNA, 17 bp, Arabidopsis thaliana
atggagttcgacttgag

SEQ ID NO: 55958 - DNA, 17 bp, Arabidopsis thaliana
atggagttctctcagga

SEQ ID NO: 55959 - DNA, 17 bp, Arabidopsis thaliana
atggataaagcttgggt

SEQ ID NO: 55960 - DNA, 17 bp, Arabidopsis thaliana
atggataaaggaggggg

SEQ ID NO: 55961 - DNA, 17 bp, Arabidopsis thaliana
atggataaaggaggtgg

SEQ ID NO: 55962 - DNA, 17 bp, Arabidopsis thaliana
atggataatcaggccgc

SEQ ID NO: 55963 - DNA, 17 bp, Arabidopsis thaliana
atggataccgaggcctg

SEQ ID NO: 55964 - DNA, 17 bp, Arabidopsis thaliana
atggatactaggcgctg

SEQ ID NO: 55965 - DNA, 17 bp, Arabidopsis thaliana
atggatactcgactgca

SEQ ID NO: 55966 - DNA, 17 bp, Arabidopsis thaliana
atggatagtgacctagt

SEQ ID NO: 55967 - DNA, 17 bp, Arabidopsis thaliana
atggatatcgacttcac

SEQ ID NO: 55968 - DNA, 17 bp, Arabidopsis thaliana
atggatattttacgcgg

SEQ ID NO: 55969 - DNA, 17 bp, Arabidopsis thaliana
atggatcaaaagtggta

SEQ ID NO: 55970 - DNA, 17 bp, Arabidopsis thaliana
atggatcaagcgttcgt

SEQ ID NO: 55971 - DNA, 17 bp, Arabidopsis thaliana
atggatcaagcttggat

SEQ ID NO: 55972 - DNA, 17 bp, Arabidopsis thaliana
atggatcacatcctgta

SEQ ID NO: 55973 - DNA, 17 bp, Arabidopsis thaliana
atggatcaccgttcgct

SEQ ID NO: 55974 - DNA, 17 bp, Arabidopsis thaliana
atggatcacgcataatt

SEQ ID NO: 55975 - DNA, 17 bp, Arabidopsis thaliana
atggatcacgctatgca

SEQ ID NO: 55976 - DNA, 17 bp, Arabidopsis thaliana
atggatcacgggttaac

SEQ ID NO: 55977 - DNA, 17 bp, Arabidopsis thaliana
atggatcagagcttcct

SEQ ID NO: 55978 - DNA, 17 bp, Arabidopsis thaliana
atggatcagcagattct

SEQ ID NO: 55979 - DNA, 17 bp, Arabidopsis thaliana
atggatcagccgattct

SEQ ID NO: 55980 - DNA, 17 bp, Arabidopsis thaliana
atggatcagtcgcatcc

SEQ ID NO: 55981 - DNA, 17 bp, Arabidopsis thaliana
atggatcagttggatgg

SEQ ID NO: 55982 - DNA, 17 bp, Arabidopsis thaliana
atggatcatacattttt

SEQ ID NO: 55983 - DNA, 17 bp, Arabidopsis thaliana
atggatcatcctactga

SEQ ID NO: 55984 - DNA, 17 bp, Arabidopsis thaliana
atggatcatcctgtaga

SEQ ID NO: 55985 - DNA, 17 bp, Arabidopsis thaliana
atggatcatctgaatga

SEQ ID NO: 55986 - DNA, 17 bp, Arabidopsis thaliana
atggatcatctggatga

SEQ ID NO: 55987 - DNA, 17 bp, Arabidopsis thaliana
atggatcatttgatcga

SEQ ID NO: 55988 - DNA, 17 bp, Arabidopsis thaliana
atggatccaccattcgg

SEQ ID NO: 55989 - DNA, 17 bp, Arabidopsis thaliana
atggatccatacatctc

SEQ ID NO: 55990 - DNA, 17 bp, Arabidopsis thaliana
atggatccatcctggag

SEQ ID NO: 55991 - DNA, 17 bp, Arabidopsis thaliana
atggatccatcctgtaa

SEQ ID NO: 55992 - DNA, 17 bp, Arabidopsis thaliana
atggatcccacgatcca

SEQ ID NO: 55993 - DNA, 17 bp, Arabidopsis thaliana
atggatccctggagagt

SEQ ID NO: 55994 - DNA, 17 bp, Arabidopsis thaliana
atggatccgacgagtat

SEQ ID NO: 55995 - DNA, 17 bp, Arabidopsis thaliana
atggatccgatcctgta

SEQ ID NO: 55996 - DNA, 17 bp, Arabidopsis thaliana
atggatcctaagagtga

SEQ ID NO: 55997 - DNA, 17 bp, Arabidopsis thaliana
atggatcctatgtaccc

SEQ ID NO: 55998 - DNA, 17 bp, Arabidopsis thaliana
atggatccttaccgatt

SEQ ID NO: 55999 - DNA, 17 bp, Arabidopsis thaliana
atggatccttcagcgac

SEQ ID NO: 56000 - DNA, 17 bp, Arabidopsis thaliana
atggatccttcttcaag

SEQ ID NO: 56001 - DNA, 17 bp, Arabidopsis thaliana
atggatcctttctctct

SEQ ID NO: 56002 - DNA, 17 bp, Arabidopsis thaliana
atggatcgacgggccaa

SEQ ID NO: 56003 - DNA, 17 bp, Arabidopsis thaliana
atggatcgactgaggga

SEQ ID NO: 56004 - DNA, 17 bp, Arabidopsis thaliana
atggatcgagggaagca

SEQ ID NO: 56005 - DNA, 17 bp, Arabidopsis thaliana
atggatcgagggaagcg

SEQ ID NO: 56006 - DNA, 17 bp, Arabidopsis thaliana
atggatcgattgtgtga

SEQ ID NO: 56007 - DNA, 17 bp, Arabidopsis thaliana
atggatcgcatcctgta

SEQ ID NO: 56008 - DNA, 17 bp, Arabidopsis thaliana
atggatcgccgtcgtga

SEQ ID NO: 56009 - DNA, 17 bp, Arabidopsis thaliana
atggatcggatgtagaa

SEQ ID NO: 56010 - DNA, 17 bp, Arabidopsis thaliana
atggatcggccgagggc

SEQ ID NO: 56011 - DNA, 17 bp, Arabidopsis thaliana
atggatcggtgaatgcg

SEQ ID NO: 56012 - DNA, 17 bp, Arabidopsis thaliana
atggatcggtttcgtcg

SEQ ID NO: 56013 - DNA, 17 bp, Arabidopsis thaliana
atggatcgtctccaact

SEQ ID NO: 56014 - DNA, 17 bp, Arabidopsis thaliana
atggatctaacgattaa

SEQ ID NO: 56015 - DNA, 17 bp, Arabidopsis thaliana
atggatctatatcagta

SEQ ID NO: 56016 - DNA, 17 bp, Arabidopsis thaliana
atggatctcaccgattc

SEQ ID NO: 56017 - DNA, 17 bp, Arabidopsis thaliana
atggatctctccctttg

SEQ ID NO: 56018 - DNA, 17 bp, Arabidopsis thaliana
atggatctgaaactgcc

SEQ ID NO: 56019 - DNA, 17 bp, Arabidopsis thaliana
atggatctgaagcaccc

SEQ ID NO: 56020 - DNA, 17 bp, Arabidopsis thaliana
atggatctgaagcgcca

SEQ ID NO: 56021 - DNA, 17 bp, Arabidopsis thaliana
atggatctgaccaaagt

SEQ ID NO: 56022 - DNA, 17 bp, Arabidopsis thaliana
atggatctgacgcaccc

SEQ ID NO: 56023 - DNA, 17 bp, Arabidopsis thaliana
atggatctgcgggaagc

SEQ ID NO: 56024 - DNA, 17 bp, Arabidopsis thaliana
atggatctggatcggga

SEQ ID NO: 56025 - DNA, 17 bp, Arabidopsis thaliana
atggatctggatcggta

SEQ ID NO: 56026 - DNA, 17 bp, Arabidopsis thaliana
atggatctggccaaagg

SEQ ID NO: 56027 - DNA, 17 bp, Arabidopsis thaliana
atggatctggccaaagt

SEQ ID NO: 56028 - DNA, 17 bp, Arabidopsis thaliana
atggatctggtgatttc

SEQ ID NO: 56029 - DNA, 17 bp, Arabidopsis thaliana
atggatcttagtcgcag

SEQ ID NO: 56030 - DNA, 17 bp, Arabidopsis thaliana
atggatcttagtcgcat

SEQ ID NO: 56031 - DNA, 17 bp, Arabidopsis thaliana
atggatcttccacagct

SEQ ID NO: 56032 - DNA, 17 bp, Arabidopsis thaliana
atggatctttggattga

SEQ ID NO: 56033 - DNA, 17 bp, Arabidopsis thaliana
atggatctttggcattc

SEQ ID NO: 56034 - DNA, 17 bp, Arabidopsis thaliana
atggatctttttgtctc

SEQ ID NO: 56035 - DNA, 17 bp, Arabidopsis thaliana
atggatgcaagtgccgt

SEQ ID NO: 56036 - DNA, 17 bp, Arabidopsis thaliana
atggatgcagcttgtca

SEQ ID NO: 56037 - DNA, 17 bp, Arabidopsis thaliana
atggatgctcactgctc

SEQ ID NO: 56038 - DNA, 17 bp, Arabidopsis thaliana
atggatggaatggatga

SEQ ID NO: 56039 - DNA, 17 bp, Arabidopsis thaliana
atggatggagtttgcca

SEQ ID NO: 56040 - DNA, 17 bp, Arabidopsis thaliana
atggatggcgcttaagc

SEQ ID NO: 56041 - DNA, 17 bp, Arabidopsis thaliana
atggatggcgcttaggc

SEQ ID NO: 56042 - DNA, 17 bp, Arabidopsis thaliana
atggatggtgtcctcgg

SEQ ID NO: 56043 - DNA, 17 bp, Arabidopsis thaliana
atggatgtccgattcac

SEQ ID NO: 56044 - DNA, 17 bp, Arabidopsis thaliana
atggatgtggttgattc

SEQ ID NO: 56045 - DNA, 17 bp, Arabidopsis thaliana
atggatgtttcagaatc

SEQ ID NO: 56046 - DNA, 17 bp, Arabidopsis thaliana
atggattatgcgaagcc

SEQ ID NO: 56047 - DNA, 17 bp, Arabidopsis thaliana
atggattcaagcgtctt

SEQ ID NO: 56048 - DNA, 17 bp, Arabidopsis thaliana
atggattccagcgtctt

SEQ ID NO: 56049 - DNA, 17 bp, Arabidopsis thaliana
atggattccatccatgt

SEQ ID NO: 56050 - DNA, 17 bp, Arabidopsis thaliana
atggattcggctccaag

SEQ ID NO: 56051 - DNA, 17 bp, Arabidopsis thaliana
atggattcgtggtatac

SEQ ID NO: 56052 - DNA, 17 bp, Arabidopsis thaliana
atggattgcctaaccga

SEQ ID NO: 56053 - DNA, 17 bp, Arabidopsis thaliana
atggattggccaaagct

SEQ ID NO: 56054 - DNA, 17 bp, Arabidopsis thaliana
atggattggtgtaaaag

SEQ ID NO: 56055 - DNA, 17 bp, Arabidopsis thaliana
atggattgttatcctat

SEQ ID NO: 56056 - DNA, 17 bp, Arabidopsis thaliana
atggatttacgtttttg

SEQ ID NO: 56057 - DNA, 17 bp, Arabidopsis thaliana
atggatttctcaagacg

SEQ ID NO: 56058 - DNA, 17 bp, Arabidopsis thaliana
atggatttgcccttttg

SEQ ID NO: 56059 - DNA, 17 bp, Arabidopsis thaliana
atggatttttctttcag

SEQ ID NO: 56060 - DNA, 17 bp, Arabidopsis thaliana
atggcaaagtcgtcgca

SEQ ID NO: 56061 - DNA, 17 bp, Arabidopsis thaliana
atggcaaagtgcccacc

SEQ ID NO: 56062 - DNA, 17 bp, Arabidopsis thaliana
atggcacaactacggcc

SEQ ID NO: 56063 - DNA, 17 bp, Arabidopsis thaliana
atggcacacaggtcgtt

SEQ ID NO: 56064 - DNA, 17 bp, Arabidopsis thaliana
atggcacacagtagcca

SEQ ID NO: 56065 - DNA, 17 bp, Arabidopsis thaliana
atggcacataacaaccc

SEQ ID NO: 56066 - DNA, 17 bp, Arabidopsis thaliana
atggcacataacaggct

SEQ ID NO: 56067 - DNA, 17 bp, Arabidopsis thaliana
atggcacctcccccccc

SEQ ID NO: 56068 - DNA, 17 bp, Arabidopsis thaliana
atggcacgtctgccggg

SEQ ID NO: 56069 - DNA, 17 bp, Arabidopsis thaliana
atggcacgtctgcctgg

SEQ ID NO: 56070 - DNA, 17 bp, Arabidopsis thaliana
atggcactcgataactc

SEQ ID NO: 56071 - DNA, 17 bp, Arabidopsis thaliana
atggcactcgcgtcctt

SEQ ID NO: 56072 - DNA, 17 bp, Arabidopsis thaliana
atggcactttgaagcag

SEQ ID NO: 56073 - DNA, 17 bp, Arabidopsis thaliana
atggcatttccattgga

SEQ ID NO: 56074 - DNA, 17 bp, Arabidopsis thaliana
atggcatttgccctact

SEQ ID NO: 56075 - DNA, 17 bp, Arabidopsis thaliana
atggcatttgtagacaa

SEQ ID NO: 56076 - DNA, 17 bp, Arabidopsis thaliana
atggcccattggaggac

SEQ ID NO: 56077 - DNA, 17 bp, Arabidopsis thaliana
atggccgagtggccaaa

SEQ ID NO: 56078 - DNA, 17 bp, Arabidopsis thaliana
atggcgacaggtgtcta

SEQ ID NO: 56079 - DNA, 17 bp, Arabidopsis thaliana
atggcgatcaagtgaca

SEQ ID NO: 56080 - DNA, 17 bp, Arabidopsis thaliana
atggcgatttcatctcc

SEQ ID NO: 56081 - DNA, 17 bp, Arabidopsis thaliana
atggcgctcgcagtaga

SEQ ID NO: 56082 - DNA, 17 bp, Arabidopsis thaliana
atggcgctgttgtctgc

SEQ ID NO: 56083 - DNA, 17 bp, Arabidopsis thaliana
atggcggaccgaccgac

SEQ ID NO: 56084 - DNA, 17 bp, Arabidopsis thaliana
atggcggcttgtgagta

SEQ ID NO: 56085 - DNA, 17 bp, Arabidopsis thaliana
atggcgggtgggacgga

SEQ ID NO: 56086 - DNA, 17 bp, Arabidopsis thaliana
atggcggttctcagtga

SEQ ID NO: 56087 - DNA, 17 bp, Arabidopsis thaliana
atggcgtcagacacggt

SEQ ID NO: 56088 - DNA, 17 bp, Arabidopsis thaliana
atggctaaaacgtggtt

SEQ ID NO: 56089 - DNA, 17 bp, Arabidopsis thaliana
atggctaatgcgcagcc

SEQ ID NO: 56090 - DNA, 17 bp, Arabidopsis thaliana
atggctaatgcgcagta

SEQ ID NO: 56091 - DNA, 17 bp, Arabidopsis thaliana
atggctaatgcgcagtc

SEQ ID NO: 56092 - DNA, 17 bp, Arabidopsis thaliana
atggctaatgcgcagtt

SEQ ID NO: 56093 - DNA, 17 bp, Arabidopsis thaliana
atggctacagcggtcca

SEQ ID NO: 56094 - DNA, 17 bp, Arabidopsis thaliana
atggctaccaggtcatt

SEQ ID NO: 56095 - DNA, 17 bp, Arabidopsis thaliana
atggctactgtgtgcaa

SEQ ID NO: 56096 - DNA, 17 bp, Arabidopsis thaliana
atggctagaactcgtag

SEQ ID NO: 56097 - DNA, 17 bp, Arabidopsis thaliana
atggctagatccgccat

SEQ ID NO: 56098 - DNA, 17 bp, Arabidopsis thaliana
atggctatcagactcga

SEQ ID NO: 56099 - DNA, 17 bp, Arabidopsis thaliana
atggctcaactttggct

SEQ ID NO: 56100 - DNA, 17 bp, Arabidopsis thaliana
atggctcagacattgtg

SEQ ID NO: 56101 - DNA, 17 bp, Arabidopsis thaliana
atggctcaggaccgcca

SEQ ID NO: 56102 - DNA, 17 bp, Arabidopsis thaliana
atggctccagcctccaa

SEQ ID NO: 56103 - DNA, 17 bp, Arabidopsis thaliana
atggctccttgtggttc

SEQ ID NO: 56104 - DNA, 17 bp, Arabidopsis thaliana
atggctcgctctctgtc

SEQ ID NO: 56105 - DNA, 17 bp, Arabidopsis thaliana
atggctcggtgctttac

SEQ ID NO: 56106 - DNA, 17 bp, Arabidopsis thaliana
atggctctgaaccattg

SEQ ID NO: 56107 - DNA, 17 bp, Arabidopsis thaliana
atggctctgagattatc

SEQ ID NO: 56108 - DNA, 17 bp, Arabidopsis thaliana
atggctctggctgggga

SEQ ID NO: 56109 - DNA, 17 bp, Arabidopsis thaliana
atggctcttgaccattg

SEQ ID NO: 56110 - DNA, 17 bp, Arabidopsis thaliana
atggctgagagtgtttc

SEQ ID NO: 56111 - DNA, 17 bp, Arabidopsis thaliana
atggctgagcagggccc

SEQ ID NO: 56112 - DNA, 17 bp, Arabidopsis thaliana
atggctgagcagggccg

SEQ ID NO: 56113 - DNA, 17 bp, Arabidopsis thaliana
atggctgagcaggggcg

SEQ ID NO: 56114 - DNA, 17 bp, Arabidopsis thaliana
atggctgagcagggggg

SEQ ID NO: 56115 - DNA, 17 bp, Arabidopsis thaliana
atggctgagcggcttga

SEQ ID NO: 56116 - DNA, 17 bp, Arabidopsis thaliana
atggctgcaaaaatgta

SEQ ID NO: 56117 - DNA, 17 bp, Arabidopsis thaliana
atggctgcaactggtaa

SEQ ID NO: 56118 - DNA, 17 bp, Arabidopsis thaliana
atggctgcagcagtggg

SEQ ID NO: 56119 - DNA, 17 bp, Arabidopsis thaliana
atggctgccactgggtt

SEQ ID NO: 56120 - DNA, 17 bp, Arabidopsis thaliana
atggctgccgctggatt

SEQ ID NO: 56121 - DNA, 17 bp, Arabidopsis thaliana
atggctgcgactgggaa

SEQ ID NO: 56122 - DNA, 17 bp, Arabidopsis thaliana
atggctgcgactggtaa

SEQ ID NO: 56123 - DNA, 17 bp, Arabidopsis thaliana
atggctgcggtaatctt

SEQ ID NO: 56124 - DNA, 17 bp, Arabidopsis thaliana
atggctgggctcggggg

SEQ ID NO: 56125 - DNA, 17 bp, Arabidopsis thaliana
atggctggggagaggaa

SEQ ID NO: 56126 - DNA, 17 bp, Arabidopsis thaliana
atggctgttgcgggttc

SEQ ID NO: 56127 - DNA, 17 bp, Arabidopsis thaliana
atggcttaatctttgag

SEQ ID NO: 56128 - DNA, 17 bp, Arabidopsis thaliana
atggcttcaacctttta

SEQ ID NO: 56129 - DNA, 17 bp, Arabidopsis thaliana
atggcttcaagtatgca

SEQ ID NO: 56130 - DNA, 17 bp, Arabidopsis thaliana
atggcttcaagtctgca

SEQ ID NO: 56131 - DNA, 17 bp, Arabidopsis thaliana
atggcttcttatcaaga

SEQ ID NO: 56132 - DNA, 17 bp, Arabidopsis thaliana
atggcttgcttggagtg

SEQ ID NO: 56133 - DNA, 17 bp, Arabidopsis thaliana
atggcttgtggagtgcc

SEQ ID NO: 56134 - DNA, 17 bp, Arabidopsis thaliana
atggctttcggacttgt

SEQ ID NO: 56135 - DNA, 17 bp, Arabidopsis thaliana
atggctttctttagtgc

SEQ ID NO: 56136 - DNA, 17 bp, Arabidopsis thaliana
atggctttggccgagtg

SEQ ID NO: 56137 - DNA, 17 bp, Arabidopsis thaliana
atggcttttcaaagcgt

SEQ ID NO: 56138 - DNA, 17 bp, Arabidopsis thaliana
atgggaaaccaatcttt

SEQ ID NO: 56139 - DNA, 17 bp, Arabidopsis thaliana
atgggaatctcctacag

SEQ ID NO: 56140 - DNA, 17 bp, Arabidopsis thaliana
atgggaatgtaccttat

SEQ ID NO: 56141 - DNA, 17 bp, Arabidopsis thaliana
atgggaatttgtctgtt

SEQ ID NO: 56142 - DNA, 17 bp, Arabidopsis thaliana
atgggacacataggtgg

SEQ ID NO: 56143 - DNA, 17 bp, Arabidopsis thaliana
atgggacagactctcgg

SEQ ID NO: 56144 - DNA, 17 bp, Arabidopsis thaliana
atgggacagtggcttca

SEQ ID NO: 56145 - DNA, 17 bp, Arabidopsis thaliana
atgggacctgcacacgt

SEQ ID NO: 56146 - DNA, 17 bp, Arabidopsis thaliana
atgggacctgctaatct

SEQ ID NO: 56147 - DNA, 17 bp, Arabidopsis thaliana
atgggacctttgtcaat

SEQ ID NO: 56148 - DNA, 17 bp, Arabidopsis thaliana
atgggacgagttggcgg

SEQ ID NO: 56149 - DNA, 17 bp, Arabidopsis thaliana
atgggacgagttggggg

SEQ ID NO: 56150 - DNA, 17 bp, Arabidopsis thaliana
atgggacggacctaaat

SEQ ID NO: 56151 - DNA, 17 bp, Arabidopsis thaliana
atgggacggacctagat

SEQ ID NO: 56152 - DNA, 17 bp, Arabidopsis thaliana
atgggacggattggcgg

SEQ ID NO: 56153 - DNA, 17 bp, Arabidopsis thaliana
atgggacgggctggcgg

SEQ ID NO: 56154 - DNA, 17 bp, Arabidopsis thaliana
atgggacggggttatat

SEQ ID NO: 56155 - DNA, 17 bp, Arabidopsis thaliana
atgggacgggttggcgg

SEQ ID NO: 56156 - DNA, 17 bp, Arabidopsis thaliana
atgggacgtctgttact

SEQ ID NO: 56157 - DNA, 17 bp, Arabidopsis thaliana
atgggacgtctgttagt

SEQ ID NO: 56158 - DNA, 17 bp, Arabidopsis thaliana
atgggactcgactctcc

SEQ ID NO: 56159 - DNA, 17 bp, Arabidopsis thaliana
atgggacttcctcccaa

SEQ ID NO: 56160 - DNA, 17 bp, Arabidopsis thaliana
atgggagaaatgcggtg

SEQ ID NO: 56161 - DNA, 17 bp, Arabidopsis thaliana
atgggagatgtccggaa

SEQ ID NO: 56162 - DNA, 17 bp, Arabidopsis thaliana
atgggagcaaccaaaca

SEQ ID NO: 56163 - DNA, 17 bp, Arabidopsis thaliana
atgggagctgctaatct

SEQ ID NO: 56164 - DNA, 17 bp, Arabidopsis thaliana
atgggagctggccatcc

SEQ ID NO: 56165 - DNA, 17 bp, Arabidopsis thaliana
atgggagctggccatgc

SEQ ID NO: 56166 - DNA, 17 bp, Arabidopsis thaliana
atgggagttgctaattt

SEQ ID NO: 56167 - DNA, 17 bp, Arabidopsis thaliana
atgggatccgccaaaac

SEQ ID NO: 56168 - DNA, 17 bp, Arabidopsis thaliana
atgggatccggtgcatt

SEQ ID NO: 56169 - DNA, 17 bp, Arabidopsis thaliana
atgggatctcaagcggg

SEQ ID NO: 56170 - DNA, 17 bp, Arabidopsis thaliana
atgggatgggtcggccg

SEQ ID NO: 56171 - DNA, 17 bp, Arabidopsis thaliana
atgggatggtgtattac

SEQ ID NO: 56172 - DNA, 17 bp, Arabidopsis thaliana
atgggattcgactcagc

SEQ ID NO: 56173 - DNA, 17 bp, Arabidopsis thaliana
atgggattcggcccaga

SEQ ID NO: 56174 - DNA, 17 bp, Arabidopsis thaliana
atgggattgatctctgt

SEQ ID NO: 56175 - DNA, 17 bp, Arabidopsis thaliana
atgggattggatttgcc

SEQ ID NO: 56176 - DNA, 17 bp, Arabidopsis thaliana
atgggattttccgattt

SEQ ID NO: 56177 - DNA, 17 bp, Arabidopsis thaliana
atgggccacataggtgg

SEQ ID NO: 56178 - DNA, 17 bp, Arabidopsis thaliana
atgggccgaactaacac

SEQ ID NO: 56179 - DNA, 17 bp, Arabidopsis thaliana
atgggccgaagcccgta

SEQ ID NO: 56180 - DNA, 17 bp, Arabidopsis thaliana
atgggccgagcgattag

SEQ ID NO: 56181 - DNA, 17 bp, Arabidopsis thaliana
atgggccgggcctgacg

SEQ ID NO: 56182 - DNA, 17 bp, Arabidopsis thaliana
atgggccgggcctgact

SEQ ID NO: 56183 - DNA, 17 bp, Arabidopsis thaliana
atgggccgttcttctcg

SEQ ID NO: 56184 - DNA, 17 bp, Arabidopsis thaliana
atgggcctctccaccta

SEQ ID NO: 56185 - DNA, 17 bp, Arabidopsis thaliana
atgggcgaaagcctgac

SEQ ID NO: 56186 - DNA, 17 bp, Arabidopsis thaliana
atgggcgatgaagtgca

SEQ ID NO: 56187 - DNA, 17 bp, Arabidopsis thaliana
atgggcgcctcagtcga

SEQ ID NO: 56188 - DNA, 17 bp, Arabidopsis thaliana
atgggcgtcagcggggg

SEQ ID NO: 56189 - DNA, 17 bp, Arabidopsis thaliana
atgggctagccctttcc

SEQ ID NO: 56190 - DNA, 17 bp, Arabidopsis thaliana
atgggctatttccggat

SEQ ID NO: 56191 - DNA, 17 bp, Arabidopsis thaliana
atgggctatttgatcaa

SEQ ID NO: 56192 - DNA, 17 bp, Arabidopsis thaliana
atgggctatttgattaa

SEQ ID NO: 56193 - DNA, 17 bp, Arabidopsis thaliana
atgggctattttcggat

SEQ ID NO: 56194 - DNA, 17 bp, Arabidopsis thaliana
atgggcttgaccatgtg

SEQ ID NO: 56195 - DNA, 17 bp, Arabidopsis thaliana
atggggattttggcctg

SEQ ID NO: 56196 - DNA, 17 bp, Arabidopsis thaliana
atggggcgcttgttgct

SEQ ID NO: 56197 - DNA, 17 bp, Arabidopsis thaliana
atggggctcattcatga

SEQ ID NO: 56198 - DNA, 17 bp, Arabidopsis thaliana
atgggggccggcgatgt

SEQ ID NO: 56199 - DNA, 17 bp, Arabidopsis thaliana
atgggtaagccatcaga

SEQ ID NO: 56200 - DNA, 17 bp, Arabidopsis thaliana
atgggtccccgggaagt

SEQ ID NO: 56201 - DNA, 17 bp, Arabidopsis thaliana
atgggtcggattcagct

SEQ ID NO: 56202 - DNA, 17 bp, Arabidopsis thaliana
atgggtcggccggtccg

SEQ ID NO: 56203 - DNA, 17 bp, Arabidopsis thaliana
atgggtcggccggtcgg

SEQ ID NO: 56204 - DNA, 17 bp, Arabidopsis thaliana
atgggtcgtggctcagt

SEQ ID NO: 56205 - DNA, 17 bp, Arabidopsis thaliana
atgggtctaaactcttt

SEQ ID NO: 56206 - DNA, 17 bp, Arabidopsis thaliana
atgggtctgaaccatta

SEQ ID NO: 56207 - DNA, 17 bp, Arabidopsis thaliana
atgggtctgaaccattg

SEQ ID NO: 56208 - DNA, 17 bp, Arabidopsis thaliana
atgggtgacctccagga

SEQ ID NO: 56209 - DNA, 17 bp, Arabidopsis thaliana
atgggtgacctcccggg

SEQ ID NO: 56210 - DNA, 17 bp, Arabidopsis thaliana
atgggtgacctcctggg

SEQ ID NO: 56211 - DNA, 17 bp, Arabidopsis thaliana
atgggtgaccttccgat

SEQ ID NO: 56212 - DNA, 17 bp, Arabidopsis thaliana
atgggtgacctttccgg

SEQ ID NO: 56213 - DNA, 17 bp, Arabidopsis thaliana
atgggtgagaactgtta

SEQ ID NO: 56214 - DNA, 17 bp, Arabidopsis thaliana
atgggtgagttcaactg

SEQ ID NO: 56215 - DNA, 17 bp, Arabidopsis thaliana
atgggtgattcagggcc

SEQ ID NO: 56216 - DNA, 17 bp, Arabidopsis thaliana
atgggtgattctggtcc

SEQ ID NO: 56217 - DNA, 17 bp, Arabidopsis thaliana
atgggtgctgacgcctg

SEQ ID NO: 56218 - DNA, 17 bp, Arabidopsis thaliana
atgggtggatgtcggtg

SEQ ID NO: 56219 - DNA, 17 bp, Arabidopsis thaliana
atgggtggctatgagca

SEQ ID NO: 56220 - DNA, 17 bp, Arabidopsis thaliana
atgggtgggtgtgtgtg

SEQ ID NO: 56221 - DNA, 17 bp, Arabidopsis thaliana
atgggtggtggggtggg

SEQ ID NO: 56222 - DNA, 17 bp, Arabidopsis thaliana
atgggtggtggtgcatg

SEQ ID NO: 56223 - DNA, 17 bp, Arabidopsis thaliana
atgggtggtggtgcgtg

SEQ ID NO: 56224 - DNA, 17 bp, Arabidopsis thaliana
atgggtgttgagcgcag

SEQ ID NO: 56225 - DNA, 17 bp, Arabidopsis thaliana
atgggtgttggtgcgtg

SEQ ID NO: 56226 - DNA, 17 bp, Arabidopsis thaliana
atgggttcccccccccc

SEQ ID NO: 56227 - DNA, 17 bp, Arabidopsis thaliana
atgggttcgtgccccac

SEQ ID NO: 56228 - DNA, 17 bp, Arabidopsis thaliana
atgggttgacgggacgg

SEQ ID NO: 56229 - DNA, 17 bp, Arabidopsis thaliana
atgggttgacgggtggg

SEQ ID NO: 56230 - DNA, 17 bp, Arabidopsis thaliana
atgggttgagctgagtt

SEQ ID NO: 56231 - DNA, 17 bp, Arabidopsis thaliana
atgggttgggcttcagt

SEQ ID NO: 56232 - DNA, 17 bp, Arabidopsis thaliana
atgggttgtgctccgat

SEQ ID NO: 56233 - DNA, 17 bp, Arabidopsis thaliana
atgggtttcggtccaga

SEQ ID NO: 56234 - DNA, 17 bp, Arabidopsis thaliana
atgggtttcggttcaga

SEQ ID NO: 56235 - DNA, 17 bp, Arabidopsis thaliana
atgggtttctcagagtt

SEQ ID NO: 56236 - DNA, 17 bp, Arabidopsis thaliana
atgggtttgtccatgac

SEQ ID NO: 56237 - DNA, 17 bp, Arabidopsis thaliana
atgggttttctccggca

SEQ ID NO: 56238 - DNA, 17 bp, Arabidopsis thaliana
atgggttttgcgggacg

SEQ ID NO: 56239 - DNA, 17 bp, Arabidopsis thaliana
atggtaaactgatttgt

SEQ ID NO: 56240 - DNA, 17 bp, Arabidopsis thaliana
atggtaagacgggttgg

SEQ ID NO: 56241 - DNA, 17 bp, Arabidopsis thaliana
atggtaatcagaaatgc

SEQ ID NO: 56242 - DNA, 17 bp, Arabidopsis thaliana
atggtaatgcaacactg

SEQ ID NO: 56243 - DNA, 17 bp, Arabidopsis thaliana
atggtacagtgggagac

SEQ ID NO: 56244 - DNA, 17 bp, Arabidopsis thaliana
atggtacatcagatgca

SEQ ID NO: 56245 - DNA, 17 bp, Arabidopsis thaliana
atggtaccagagcccga

SEQ ID NO: 56246 - DNA, 17 bp, Arabidopsis thaliana
atggtaccattaggcca

SEQ ID NO: 56247 - DNA, 17 bp, Arabidopsis thaliana
atggtacgagagaagtg

SEQ ID NO: 56248 - DNA, 17 bp, Arabidopsis thaliana
atggtactcgaccccat

SEQ ID NO: 56249 - DNA, 17 bp, Arabidopsis thaliana
atggtagcacacccccc

SEQ ID NO: 56250 - DNA, 17 bp, Arabidopsis thaliana
atggtagccctgtgact

SEQ ID NO: 56251 - DNA, 17 bp, Arabidopsis thaliana
atggtaggacaagtccc

SEQ ID NO: 56252 - DNA, 17 bp, Arabidopsis thaliana
atggtaggacaagtgcg

SEQ ID NO: 56253 - DNA, 17 bp, Arabidopsis thaliana
atggtagtcaacgctta

SEQ ID NO: 56254 - DNA, 17 bp, Arabidopsis thaliana
atggtatcttggtgccg

SEQ ID NO: 56255 - DNA, 17 bp, Arabidopsis thaliana
atggtatgttgtctggt

SEQ ID NO: 56256 - DNA, 17 bp, Arabidopsis thaliana
atggtattcacgttgcg

SEQ ID NO: 56257 - DNA, 17 bp, Arabidopsis thaliana
atggtcaaaatgtgtca

SEQ ID NO: 56258 - DNA, 17 bp, Arabidopsis thaliana
atggtcagaatgattta

SEQ ID NO: 56259 - DNA, 17 bp, Arabidopsis thaliana
atggtcatcagggggag

SEQ ID NO: 56260 - DNA, 17 bp, Arabidopsis thaliana
atggtccaccgtctgaa

SEQ ID NO: 56261 - DNA, 17 bp, Arabidopsis thaliana
atggtccacttaagcat

SEQ ID NO: 56262 - DNA, 17 bp, Arabidopsis thaliana
atggtccatctgaatga

SEQ ID NO: 56263 - DNA, 17 bp, Arabidopsis thaliana
atggtcccatgatgtgt

SEQ ID NO: 56264 - DNA, 17 bp, Arabidopsis thaliana
atggtccctgcggatgc

SEQ ID NO: 56265 - DNA, 17 bp, Arabidopsis thaliana
atggtccgctgcggttt

SEQ ID NO: 56266 - DNA, 17 bp, Arabidopsis thaliana
atggtcctggcgccctt

SEQ ID NO: 56267 - DNA, 17 bp, Arabidopsis thaliana
atggtcgaacggttgct

SEQ ID NO: 56268 - DNA, 17 bp, Arabidopsis thaliana
atggtcgaatccgccaa

SEQ ID NO: 56269 - DNA, 17 bp, Arabidopsis thaliana
atggtcgcttctcttgt

SEQ ID NO: 56270 - DNA, 17 bp, Arabidopsis thaliana
atggtcgcttctttggg

SEQ ID NO: 56271 - DNA, 17 bp, Arabidopsis thaliana
atggtcggattgctgtt

SEQ ID NO: 56272 - DNA, 17 bp, Arabidopsis thaliana
atggtcgtcgaccgaga

SEQ ID NO: 56273 - DNA, 17 bp, Arabidopsis thaliana
atggtctaattgggcat

SEQ ID NO: 56274 - DNA, 17 bp, Arabidopsis thaliana
atggtctctattgggca

SEQ ID NO: 56275 - DNA, 17 bp, Arabidopsis thaliana
atggtctgcctgggtgt

SEQ ID NO: 56276 - DNA, 17 bp, Arabidopsis thaliana
atggtgaatcgattggt

SEQ ID NO: 56277 - DNA, 17 bp, Arabidopsis thaliana
atggtgactacgttttt

SEQ ID NO: 56278 - DNA, 17 bp, Arabidopsis thaliana
atggtgagtcgatttga

SEQ ID NO: 56279 - DNA, 17 bp, Arabidopsis thaliana
atggtgatcgtcaagct

SEQ ID NO: 56280 - DNA, 17 bp, Arabidopsis thaliana
atggtgcaaatacggtg

SEQ ID NO: 56281 - DNA, 17 bp, Arabidopsis thaliana
atggtgcactcctatgt

SEQ ID NO: 56282 - DNA, 17 bp, Arabidopsis thaliana
atggtggcggttgttag

SEQ ID NO: 56283 - DNA, 17 bp, Arabidopsis thaliana
atggtgtagccaaagtc

SEQ ID NO: 56284 - DNA, 17 bp, Arabidopsis thaliana
atggtgtctcgagcccg

SEQ ID NO: 56285 - DNA, 17 bp, Arabidopsis thaliana
atggttaaagcgcacag

SEQ ID NO: 56286 - DNA, 17 bp, Arabidopsis thaliana
atggttaatacgccgga

SEQ ID NO: 56287 - DNA, 17 bp, Arabidopsis thaliana
atggttacaaacgggtt

SEQ ID NO: 56288 - DNA, 17 bp, Arabidopsis thaliana
atggttactattctggt

SEQ ID NO: 56289 - DNA, 17 bp, Arabidopsis thaliana
atggttactccttcttt

SEQ ID NO: 56290 - DNA, 17 bp, Arabidopsis thaliana
atggttactcggatggt

SEQ ID NO: 56291 - DNA, 17 bp, Arabidopsis thaliana
atggttatacggtagga

SEQ ID NO: 56292 - DNA, 17 bp, Arabidopsis thaliana
atggttcacgggattct

SEQ ID NO: 56293 - DNA, 17 bp, Arabidopsis thaliana
atggttcagactcaact

SEQ ID NO: 56294 - DNA, 17 bp, Arabidopsis thaliana
atggttcagactccggg

SEQ ID NO: 56295 - DNA, 17 bp, Arabidopsis thaliana
atggttcatccgtatgc

SEQ ID NO: 56296 - DNA, 17 bp, Arabidopsis thaliana
atggttcatccttccgc

SEQ ID NO: 56297 - DNA, 17 bp, Arabidopsis thaliana
atggttcccatggttct

SEQ ID NO: 56298 - DNA, 17 bp, Arabidopsis thaliana
atggttccgccgcatag

SEQ ID NO: 56299 - DNA, 17 bp, Arabidopsis thaliana
atggttcgacgacagcc

SEQ ID NO: 56300 - DNA, 17 bp, Arabidopsis thaliana
atggttcgattagtctt

SEQ ID NO: 56301 - DNA, 17 bp, Arabidopsis thaliana
atggttcggattttgtt

SEQ ID NO: 56302 - DNA, 17 bp, Arabidopsis thaliana
atggttcggcaatccag

SEQ ID NO: 56303 - DNA, 17 bp, Arabidopsis thaliana
atggttctctcatcggt

SEQ ID NO: 56304 - DNA, 17 bp, Arabidopsis thaliana
atggttctgtcattctg

SEQ ID NO: 56305 - DNA, 17 bp, Arabidopsis thaliana
atggttcttcatcgggg

SEQ ID NO: 56306 - DNA, 17 bp, Arabidopsis thaliana
atggttcttggagaaac

SEQ ID NO: 56307 - DNA, 17 bp, Arabidopsis thaliana
atggttgacaatcgccc

SEQ ID NO: 56308 - DNA, 17 bp, Arabidopsis thaliana
atggttgacaatcgccg

SEQ ID NO: 56309 - DNA, 17 bp, Arabidopsis thaliana
atggttgacaatcgcct

SEQ ID NO: 56310 - DNA, 17 bp, Arabidopsis thaliana
atggttgacagactgtt

SEQ ID NO: 56311 - DNA, 17 bp, Arabidopsis thaliana
atggttgaccacaggtt

SEQ ID NO: 56312 - DNA, 17 bp, Arabidopsis thaliana
atggttgagcggcttga

SEQ ID NO: 56313 - DNA, 17 bp, Arabidopsis thaliana
atggttgagtctagcaa

SEQ ID NO: 56314 - DNA, 17 bp, Arabidopsis thaliana
atggttgatggttgatc

SEQ ID NO: 56315 - DNA, 17 bp, Arabidopsis thaliana
atggttgccacaagatt

SEQ ID NO: 56316 - DNA, 17 bp, Arabidopsis thaliana
atggttgcctctgattt

SEQ ID NO: 56317 - DNA, 17 bp, Arabidopsis thaliana
atggttgcctgaatttt

SEQ ID NO: 56318 - DNA, 17 bp, Arabidopsis thaliana
atggttgcggaagtttg

SEQ ID NO: 56319 - DNA, 17 bp, Arabidopsis thaliana
atggttggtggtgcatg

SEQ ID NO: 56320 - DNA, 17 bp, Arabidopsis thaliana
atggtttacgcgatgat

SEQ ID NO: 56321 - DNA, 17 bp, Arabidopsis thaliana
atggtttagccaaagta

SEQ ID NO: 56322 - DNA, 17 bp, Arabidopsis thaliana
atggtttagggtttagg

SEQ ID NO: 56323 - DNA, 17 bp, Arabidopsis thaliana
atggtttagtagatcgc

SEQ ID NO: 56324 - DNA, 17 bp, Arabidopsis thaliana
atggtttcccacctatg

SEQ ID NO: 56325 - DNA, 17 bp, Arabidopsis thaliana
atggtttcccacctatt

SEQ ID NO: 56326 - DNA, 17 bp, Arabidopsis thaliana
atggtttccccactggg

SEQ ID NO: 56327 - DNA, 17 bp, Arabidopsis thaliana
atggtttttttacggga

SEQ ID NO: 56328 - DNA, 17 bp, Arabidopsis thaliana
atgtaaacatccgatcg

SEQ ID NO: 56329 - DNA, 17 bp, Arabidopsis thaliana
atgtaaacatctgatcg

SEQ ID NO: 56330 - DNA, 17 bp, Arabidopsis thaliana
atgtaaaccagttgggt

SEQ ID NO: 56331 - DNA, 17 bp, Arabidopsis thaliana
atgtaaagaatctgtga

SEQ ID NO: 56332 - DNA, 17 bp, Arabidopsis thaliana
atgtaaagaatctgtgc

SEQ ID NO: 56333 - DNA, 17 bp, Arabidopsis thaliana
atgtaaagtttgcctca

SEQ ID NO: 56334 - DNA, 17 bp, Arabidopsis thaliana
atgtaaatactcggtcc

SEQ ID NO: 56335 - DNA, 17 bp, Arabidopsis thaliana
atgtaaatgggtatgcg

SEQ ID NO: 56336 - DNA, 17 bp, Arabidopsis thaliana
atgtaaatggtatttca

SEQ ID NO: 56337 - DNA, 17 bp, Arabidopsis thaliana
atgtaaccgcacgatct

SEQ ID NO: 56338 - DNA, 17 bp, Arabidopsis thaliana
atgtaaccgtcctgccg

SEQ ID NO: 56339 - DNA, 17 bp, Arabidopsis thaliana
atgtaaccgtcctgcgg

SEQ ID NO: 56340 - DNA, 17 bp, Arabidopsis thaliana
atgtaaccgtcctgctg

SEQ ID NO: 56341 - DNA, 17 bp, Arabidopsis thaliana
atgtaacctctggcttt

SEQ ID NO: 56342 - DNA, 17 bp, Arabidopsis thaliana
atgtaaccttgttcgta

SEQ ID NO: 56343 - DNA, 17 bp, Arabidopsis thaliana
atgtaacgtcacgaccg

SEQ ID NO: 56344 - DNA, 17 bp, Arabidopsis thaliana
atgtaactaaaccgctg

SEQ ID NO: 56345 - DNA, 17 bp, Arabidopsis thaliana
atgtaactgcggcttgc

SEQ ID NO: 56346 - DNA, 17 bp, Arabidopsis thaliana
atgtaagcaagtcggtt

SEQ ID NO: 56347 - DNA, 17 bp, Arabidopsis thaliana
atgtaaggttgattgag

SEQ ID NO: 56348 - DNA, 17 bp, Arabidopsis thaliana
atgtaagttcaacggtt

SEQ ID NO: 56349 - DNA, 17 bp, Arabidopsis thaliana
atgtaatatgaagcggt

SEQ ID NO: 56350 - DNA, 17 bp, Arabidopsis thaliana
atgtaatcgcctatgtg

SEQ ID NO: 56351 - DNA, 17 bp, Arabidopsis thaliana
atgtaattcgctgagat

SEQ ID NO: 56352 - DNA, 17 bp, Arabidopsis thaliana
atgtaattctaaacgga

SEQ ID NO: 56353 - DNA, 17 bp, Arabidopsis thaliana
atgtagaccaaggttgg

SEQ ID NO: 56354 - DNA, 17 bp, Arabidopsis thaliana
atgtagaccatttccca

SEQ ID NO: 56355 - DNA, 17 bp, Arabidopsis thaliana
atgtagaccattttcca

SEQ ID NO: 56356 - DNA, 17 bp, Arabidopsis thaliana
atgtagaccggggacga

SEQ ID NO: 56357 - DNA, 17 bp, Arabidopsis thaliana
atgtagaccggggtgta

SEQ ID NO: 56358 - DNA, 17 bp, Arabidopsis thaliana
atgtagaccggggttga

SEQ ID NO: 56359 - DNA, 17 bp, Arabidopsis thaliana
atgtagatagcgggtct

SEQ ID NO: 56360 - DNA, 17 bp, Arabidopsis thaliana
atgtagattggcggatc

SEQ ID NO: 56361 - DNA, 17 bp, Arabidopsis thaliana
atgtagccctagatgtg

SEQ ID NO: 56362 - DNA, 17 bp, Arabidopsis thaliana
atgtagcgatgacacag

SEQ ID NO: 56363 - DNA, 17 bp, Arabidopsis thaliana
atgtagcgatgacgtta

SEQ ID NO: 56364 - DNA, 17 bp, Arabidopsis thaliana
atgtagcggttctgcac

SEQ ID NO: 56365 - DNA, 17 bp, Arabidopsis thaliana
atgtagcgttcactggt

SEQ ID NO: 56366 - DNA, 17 bp, Arabidopsis thaliana
atgtaggcaagggaact

SEQ ID NO: 56367 - DNA, 17 bp, Arabidopsis thaliana
atgtaggcaagggaagt

SEQ ID NO: 56368 - DNA, 17 bp, Arabidopsis thaliana
atgtaggccattcgtta

SEQ ID NO: 56369 - DNA, 17 bp, Arabidopsis thaliana
atgtaggccctgttcgt

SEQ ID NO: 56370 - DNA, 17 bp, Arabidopsis thaliana
atgtaggcttgtatggg

SEQ ID NO: 56371 - DNA, 17 bp, Arabidopsis thaliana
atgtatatgtacagttg

SEQ ID NO: 56372 - DNA, 17 bp, Arabidopsis thaliana
atgtatcactcggacac

SEQ ID NO: 56373 - DNA, 17 bp, Arabidopsis thaliana
atgtatcatctcattca

SEQ ID NO: 56374 - DNA, 17 bp, Arabidopsis thaliana
atgtatcgtctgtcgtg

SEQ ID NO: 56375 - DNA, 17 bp, Arabidopsis thaliana
atgtatctaccgctgca

SEQ ID NO: 56376 - DNA, 17 bp, Arabidopsis thaliana
atgtatctatgtcagca

SEQ ID NO: 56377 - DNA, 17 bp, Arabidopsis thaliana
atgtatcttcgcgactt

SEQ ID NO: 56378 - DNA, 17 bp, Arabidopsis thaliana
atgtatggctttcggac

SEQ ID NO: 56379 - DNA, 17 bp, Arabidopsis thaliana
atgtatggggcgcttgt

SEQ ID NO: 56380 - DNA, 17 bp, Arabidopsis thaliana
atgtatgtagtcgccgg

SEQ ID NO: 56381 - DNA, 17 bp, Arabidopsis thaliana
atgtatgtctaatgtct

SEQ ID NO: 56382 - DNA, 17 bp, Arabidopsis thaliana
atgtatgtgtgacgatg

SEQ ID NO: 56383 - DNA, 17 bp, Arabidopsis thaliana
atgtattaggtgatcac

SEQ ID NO: 56384 - DNA, 17 bp, Arabidopsis thaliana
atgtattaggtgcgctg

SEQ ID NO: 56385 - DNA, 17 bp, Arabidopsis thaliana
atgtattcacgatggaa

SEQ ID NO: 56386 - DNA, 17 bp, Arabidopsis thaliana
atgtattcacgatggat

SEQ ID NO: 56387 - DNA, 17 bp, Arabidopsis thaliana
atgtattccgaccacaa

SEQ ID NO: 56388 - DNA, 17 bp, Arabidopsis thaliana
atgtatttgaccatcaa

SEQ ID NO: 56389 - DNA, 17 bp, Arabidopsis thaliana
atgtattttccgaactg

SEQ ID NO: 56390 - DNA, 17 bp, Arabidopsis thaliana
atgtattttttctggcc

SEQ ID NO: 56391 - DNA, 17 bp, Arabidopsis thaliana
atgtcaaagtgcactat

SEQ ID NO: 56392 - DNA, 17 bp, Arabidopsis thaliana
atgtcaacatctcaatg

SEQ ID NO: 56393 - DNA, 17 bp, Arabidopsis thaliana
atgtcaactctcggcgc

SEQ ID NO: 56394 - DNA, 17 bp, Arabidopsis thaliana
atgtcaaggccagggtg

SEQ ID NO: 56395 - DNA, 17 bp, Arabidopsis thaliana
atgtcaagggtactcag

SEQ ID NO: 56396 - DNA, 17 bp, Arabidopsis thaliana
atgtcaatccattccgg

SEQ ID NO: 56397 - DNA, 17 bp, Arabidopsis thaliana
atgtcaatcgcgggttg

SEQ ID NO: 56398 - DNA, 17 bp, Arabidopsis thaliana
atgtcaattccgctgcg

SEQ ID NO: 56399 - DNA, 17 bp, Arabidopsis thaliana
atgtcacagttctatac

SEQ ID NO: 56400 - DNA, 17 bp, Arabidopsis thaliana
atgtcaccaaagtccac

SEQ ID NO: 56401 - DNA, 17 bp, Arabidopsis thaliana
atgtcaccaccgcttca

SEQ ID NO: 56402 - DNA, 17 bp, Arabidopsis thaliana
atgtcaccattggcgta

SEQ ID NO: 56403 - DNA, 17 bp, Arabidopsis thaliana
atgtcacctcgggatgg

SEQ ID NO: 56404 - DNA, 17 bp, Arabidopsis thaliana
atgtcacgaccgtttgg

SEQ ID NO: 56405 - DNA, 17 bp, Arabidopsis thaliana
atgtcacgacggattca

SEQ ID NO: 56406 - DNA, 17 bp, Arabidopsis thaliana
atgtcacgtttcaggcc

SEQ ID NO: 56407 - DNA, 17 bp, Arabidopsis thaliana
atgtcactggccgaacc

SEQ ID NO: 56408 - DNA, 17 bp, Arabidopsis thaliana
atgtcagcaacttagac

SEQ ID NO: 56409 - DNA, 17 bp, Arabidopsis thaliana
atgtcagcagccaatcc

SEQ ID NO: 56410 - DNA, 17 bp, Arabidopsis thaliana
atgtcagcgtgacattt

SEQ ID NO: 56411 - DNA, 17 bp, Arabidopsis thaliana
atgtcaggattccgttg

SEQ ID NO: 56412 - DNA, 17 bp, Arabidopsis thaliana
atgtcatcatcaggtcc

SEQ ID NO: 56413 - DNA, 17 bp, Arabidopsis thaliana
atgtcatccgctttcac

SEQ ID NO: 56414 - DNA, 17 bp, Arabidopsis thaliana
atgtcatcctgcagctt

SEQ ID NO: 56415 - DNA, 17 bp, Arabidopsis thaliana
atgtcatctgcacttct

SEQ ID NO: 56416 - DNA, 17 bp, Arabidopsis thaliana
atgtcatctgcagaatc

SEQ ID NO: 56417 - DNA, 17 bp, Arabidopsis thaliana
atgtcatctgcatttct

SEQ ID NO: 56418 - DNA, 17 bp, Arabidopsis thaliana
atgtcatcttcctcgcg

SEQ ID NO: 56419 - DNA, 17 bp, Arabidopsis thaliana
atgtcatgaagcagtcc

SEQ ID NO: 56420 - DNA, 17 bp, Arabidopsis thaliana
atgtcatgagaccgatc

SEQ ID NO: 56421 - DNA, 17 bp, Arabidopsis thaliana
atgtcatgatctcgcga

SEQ ID NO: 56422 - DNA, 17 bp, Arabidopsis thaliana
atgtcatgtcacggctg

SEQ ID NO: 56423 - DNA, 17 bp, Arabidopsis thaliana
atgtcattcgaaccggc

SEQ ID NO: 56424 - DNA, 17 bp, Arabidopsis thaliana
atgtcattcgcggtttc

SEQ ID NO: 56425 - DNA, 17 bp, Arabidopsis thaliana
atgtcattcgtggtgtg

SEQ ID NO: 56426 - DNA, 17 bp, Arabidopsis thaliana
atgtcattcgtggtttg

SEQ ID NO: 56427 - DNA, 17 bp, Arabidopsis thaliana
atgtcattggccgaacc

SEQ ID NO: 56428 - DNA, 17 bp, Arabidopsis thaliana
atgtcatttccgggaaa

SEQ ID NO: 56429 - DNA, 17 bp, Arabidopsis thaliana
atgtccaactgggctgt

SEQ ID NO: 56430 - DNA, 17 bp, Arabidopsis thaliana
atgtccaagtaccaatt

SEQ ID NO: 56431 - DNA, 17 bp, Arabidopsis thaliana
atgtccacatgttttct

SEQ ID NO: 56432 - DNA, 17 bp, Arabidopsis thaliana
atgtccactaaggccca

SEQ ID NO: 56433 - DNA, 17 bp, Arabidopsis thaliana
atgtccactgcgagcac

SEQ ID NO: 56434 - DNA, 17 bp, Arabidopsis thaliana
atgtccaggctaggcat

SEQ ID NO: 56435 - DNA, 17 bp, Arabidopsis thaliana
atgtccagtggtgattt

SEQ ID NO: 56436 - DNA, 17 bp, Arabidopsis thaliana
atgtccagtggtggttt

SEQ ID NO: 56437 - DNA, 17 bp, Arabidopsis thaliana
atgtccagtgtaattgt

SEQ ID NO: 56438 - DNA, 17 bp, Arabidopsis thaliana
atgtccataatcctcag

SEQ ID NO: 56439 - DNA, 17 bp, Arabidopsis thaliana
atgtccatgcctgtgta

SEQ ID NO: 56440 - DNA, 17 bp, Arabidopsis thaliana
atgtccatgttgcggtt

SEQ ID NO: 56441 - DNA, 17 bp, Arabidopsis thaliana
atgtccattaacgcccg

SEQ ID NO: 56442 - DNA, 17 bp, Arabidopsis thaliana
atgtccattaaggccca

SEQ ID NO: 56443 - DNA, 17 bp, Arabidopsis thaliana
atgtccattaatgtcca

SEQ ID NO: 56444 - DNA, 17 bp, Arabidopsis thaliana
atgtcccaaatttgaaa

SEQ ID NO: 56445 - DNA, 17 bp, Arabidopsis thaliana
atgtcccagaaggtgtg

SEQ ID NO: 56446 - DNA, 17 bp, Arabidopsis thaliana
atgtcccatattctccg

SEQ ID NO: 56447 - DNA, 17 bp, Arabidopsis thaliana
atgtcccccatttttga

SEQ ID NO: 56448 - DNA, 17 bp, Arabidopsis thaliana
atgtcccggttgctgtg

SEQ ID NO: 56449 - DNA, 17 bp, Arabidopsis thaliana
atgtccctcatcggttg

SEQ ID NO: 56450 - DNA, 17 bp, Arabidopsis thaliana
atgtccgaagccgtggc

SEQ ID NO: 56451 - DNA, 17 bp, Arabidopsis thaliana
atgtccgaattggccca

SEQ ID NO: 56452 - DNA, 17 bp, Arabidopsis thaliana
atgtccgactaagtgtg

SEQ ID NO: 56453 - DNA, 17 bp, Arabidopsis thaliana
atgtccgagggcacgtc

SEQ ID NO: 56454 - DNA, 17 bp, Arabidopsis thaliana
atgtccgccagaacggg

SEQ ID NO: 56455 - DNA, 17 bp, Arabidopsis thaliana
atgtccgcctatctatg

SEQ ID NO: 56456 - DNA, 17 bp, Arabidopsis thaliana
atgtccgcgtgaatact

SEQ ID NO: 56457 - DNA, 17 bp, Arabidopsis thaliana
atgtccggattgctcgc

SEQ ID NO: 56458 - DNA, 17 bp, Arabidopsis thaliana
atgtccgtaagttaccg

SEQ ID NO: 56459 - DNA, 17 bp, Arabidopsis thaliana
atgtccgtaattttcct

SEQ ID NO: 56460 - DNA, 17 bp, Arabidopsis thaliana
atgtccgtgctgattgt

SEQ ID NO: 56461 - DNA, 17 bp, Arabidopsis thaliana
atgtcctaagccgtggc

SEQ ID NO: 56462 - DNA, 17 bp, Arabidopsis thaliana
atgtcctacatcgcttg

SEQ ID NO: 56463 - DNA, 17 bp, Arabidopsis thaliana
atgtcctcagtggttcg

SEQ ID NO: 56464 - DNA, 17 bp, Arabidopsis thaliana
atgtcctcgtctctgaa

SEQ ID NO: 56465 - DNA, 17 bp, Arabidopsis thaliana
atgtcctgagggagatg

SEQ ID NO: 56466 - DNA, 17 bp, Arabidopsis thaliana
atgtcctgagggagctg

SEQ ID NO: 56467 - DNA, 17 bp, Arabidopsis thaliana
atgtccttagtagccgt

SEQ ID NO: 56468 - DNA, 17 bp, Arabidopsis thaliana
atgtccttcttgcgtct

SEQ ID NO: 56469 - DNA, 17 bp, Arabidopsis thaliana
atgtccttgggcgatct

SEQ ID NO: 56470 - DNA, 17 bp, Arabidopsis thaliana
atgtcgaaacacaactc

SEQ ID NO: 56471 - DNA, 17 bp, Arabidopsis thaliana
atgtcgaacctggctac

SEQ ID NO: 56472 - DNA, 17 bp, Arabidopsis thaliana
atgtcgaacgacttaca

SEQ ID NO: 56473 - DNA, 17 bp, Arabidopsis thaliana
atgtcgaatcagatgtg

SEQ ID NO: 56474 - DNA, 17 bp, Arabidopsis thaliana
atgtcgaccgttacgaa

SEQ ID NO: 56475 - DNA, 17 bp, Arabidopsis thaliana
atgtcgacgaaatgtcc

SEQ ID NO: 56476 - DNA, 17 bp, Arabidopsis thaliana
atgtcgacgatgttgtg

SEQ ID NO: 56477 - DNA, 17 bp, Arabidopsis thaliana
atgtcgactaggaaatg

SEQ ID NO: 56478 - DNA, 17 bp, Arabidopsis thaliana
atgtcgagtagatatga

SEQ ID NO: 56479 - DNA, 17 bp, Arabidopsis thaliana
atgtcgatcgacacctc

SEQ ID NO: 56480 - DNA, 17 bp, Arabidopsis thaliana
atgtcgatcgataccag

SEQ ID NO: 56481 - DNA, 17 bp, Arabidopsis thaliana
atgtcgatcgtcagcta

SEQ ID NO: 56482 - DNA, 17 bp, Arabidopsis thaliana
atgtcgatcgtcggcta

SEQ ID NO: 56483 - DNA, 17 bp, Arabidopsis thaliana
atgtcgcagaagtgtag

SEQ ID NO: 56484 - DNA, 17 bp, Arabidopsis thaliana
atgtcgcattagtaggc

SEQ ID NO: 56485 - DNA, 17 bp, Arabidopsis thaliana
atgtcgcattccaattg

SEQ ID NO: 56486 - DNA, 17 bp, Arabidopsis thaliana
atgtcgctcgacactgt

SEQ ID NO: 56487 - DNA, 17 bp, Arabidopsis thaliana
atgtcgctttccttcga

SEQ ID NO: 56488 - DNA, 17 bp, Arabidopsis thaliana
atgtcggagcaacagac

SEQ ID NO: 56489 - DNA, 17 bp, Arabidopsis thaliana
atgtcggattcagacac

SEQ ID NO: 56490 - DNA, 17 bp, Arabidopsis thaliana
atgtcggcaagactttg

SEQ ID NO: 56491 - DNA, 17 bp, Arabidopsis thaliana
atgtcggccaatcttct

SEQ ID NO: 56492 - DNA, 17 bp, Arabidopsis thaliana
atgtcggccgagtacca

SEQ ID NO: 56493 - DNA, 17 bp, Arabidopsis thaliana
atgtcggccgagtacta

SEQ ID NO: 56494 - DNA, 17 bp, Arabidopsis thaliana
atgtcggcgatctgtct

SEQ ID NO: 56495 - DNA, 17 bp, Arabidopsis thaliana
atgtcggctaatcgtct

SEQ ID NO: 56496 - DNA, 17 bp, Arabidopsis thaliana
atgtcggctctcctatc

SEQ ID NO: 56497 - DNA, 17 bp, Arabidopsis thaliana
atgtcggcttctatcag

SEQ ID NO: 56498 - DNA, 17 bp, Arabidopsis thaliana
atgtcggcttgagtaac

SEQ ID NO: 56499 - DNA, 17 bp, Arabidopsis thaliana
atgtcggtctgattggt

SEQ ID NO: 56500 - DNA, 17 bp, Arabidopsis thaliana
atgtcgtcgccgtcgta

SEQ ID NO: 56501 - DNA, 17 bp, Arabidopsis thaliana
atgtcgtcttctgttgc

SEQ ID NO: 56502 - DNA, 17 bp, Arabidopsis thaliana
atgtcgtgatcgggtgc

SEQ ID NO: 56503 - DNA, 17 bp, Arabidopsis thaliana
atgtcgttactcagctg

SEQ ID NO: 56504 - DNA, 17 bp, Arabidopsis thaliana
atgtcgttttcggtttg

SEQ ID NO: 56505 - DNA, 17 bp, Arabidopsis thaliana
atgtctaaattctgagg

SEQ ID NO: 56506 - DNA, 17 bp, Arabidopsis thaliana
atgtctaacgtctcaaa

SEQ ID NO: 56507 - DNA, 17 bp, Arabidopsis thaliana
atgtctaactgccgttg

SEQ ID NO: 56508 - DNA, 17 bp, Arabidopsis thaliana
atgtctaaggaggtgta

SEQ ID NO: 56509 - DNA, 17 bp, Arabidopsis thaliana
atgtctaatgtctagga

SEQ ID NO: 56510 - DNA, 17 bp, Arabidopsis thaliana
atgtctaatgtctcgga

SEQ ID NO: 56511 - DNA, 17 bp, Arabidopsis thaliana
atgtctagatcttgtcc

SEQ ID NO: 56512 - DNA, 17 bp, Arabidopsis thaliana
atgtctatttgagtgac

SEQ ID NO: 56513 - DNA, 17 bp, Arabidopsis thaliana
atgtctattttggcctc

SEQ ID NO: 56514 - DNA, 17 bp, Arabidopsis thaliana
atgtctattttggcctg

SEQ ID NO: 56515 - DNA, 17 bp, Arabidopsis thaliana
atgtctcaaagaccgca

SEQ ID NO: 56516 - DNA, 17 bp, Arabidopsis thaliana
atgtctcaaggaccgca

SEQ ID NO: 56517 - DNA, 17 bp, Arabidopsis thaliana
atgtctcaagtcatctc

SEQ ID NO: 56518 - DNA, 17 bp, Arabidopsis thaliana
atgtctcagcgctttga

SEQ ID NO: 56519 - DNA, 17 bp, Arabidopsis thaliana
atgtctcaggcgcccag

SEQ ID NO: 56520 - DNA, 17 bp, Arabidopsis thaliana
atgtctcagtcgcccag

SEQ ID NO: 56521 - DNA, 17 bp, Arabidopsis thaliana
atgtctccaaggtgaac

SEQ ID NO: 56522 - DNA, 17 bp, Arabidopsis thaliana
atgtctccatctggact

SEQ ID NO: 56523 - DNA, 17 bp, Arabidopsis thaliana
atgtctccctttaggtc

SEQ ID NO: 56524 - DNA, 17 bp, Arabidopsis thaliana
atgtctcgaagcaacta

SEQ ID NO: 56525 - DNA, 17 bp, Arabidopsis thaliana
atgtctcgaatccagca

SEQ ID NO: 56526 - DNA, 17 bp, Arabidopsis thaliana
atgtctcggatgaacat

SEQ ID NO: 56527 - DNA, 17 bp, Arabidopsis thaliana
atgtctcggatgaccat

SEQ ID NO: 56528 - DNA, 17 bp, Arabidopsis thaliana
atgtctcgtttggaccg

SEQ ID NO: 56529 - DNA, 17 bp, Arabidopsis thaliana
atgtctctcactaacag

SEQ ID NO: 56530 - DNA, 17 bp, Arabidopsis thaliana
atgtctctcggggacct

SEQ ID NO: 56531 - DNA, 17 bp, Arabidopsis thaliana
atgtctctgaccaatgg

SEQ ID NO: 56532 - DNA, 17 bp, Arabidopsis thaliana
atgtctctgcgctttga

SEQ ID NO: 56533 - DNA, 17 bp, Arabidopsis thaliana
atgtctctggtttctct

SEQ ID NO: 56534 - DNA, 17 bp, Arabidopsis thaliana
atgtctctggttttccg

SEQ ID NO: 56535 - DNA, 17 bp, Arabidopsis thaliana
atgtctgcattgtccgc

SEQ ID NO: 56536 - DNA, 17 bp, Arabidopsis thaliana
atgtctgcctgggtgtc

SEQ ID NO: 56537 - DNA, 17 bp, Arabidopsis thaliana
atgtctgcgggaggatt

SEQ ID NO: 56538 - DNA, 17 bp, Arabidopsis thaliana
atgtctgctagcccatt

SEQ ID NO: 56539 - DNA, 17 bp, Arabidopsis thaliana
atgtctgctgaagattc

SEQ ID NO: 56540 - DNA, 17 bp, Arabidopsis thaliana
atgtctggacctggtaa

SEQ ID NO: 56541 - DNA, 17 bp, Arabidopsis thaliana
atgtctggcggacagtg

SEQ ID NO: 56542 - DNA, 17 bp, Arabidopsis thaliana
atgtctgggctcaaatt

SEQ ID NO: 56543 - DNA, 17 bp, Arabidopsis thaliana
atgtctggtgtcctagg

SEQ ID NO: 56544 - DNA, 17 bp, Arabidopsis thaliana
atgtctgtggtacgctt

SEQ ID NO: 56545 - DNA, 17 bp, Arabidopsis thaliana
atgtctgttggtgccaa

SEQ ID NO: 56546 - DNA, 17 bp, Arabidopsis thaliana
atgtcttagatttcggt

SEQ ID NO: 56547 - DNA, 17 bp, Arabidopsis thaliana
atgtcttcacagttgcc

SEQ ID NO: 56548 - DNA, 17 bp, Arabidopsis thaliana
atgtcttccaaaatgca

SEQ ID NO: 56549 - DNA, 17 bp, Arabidopsis thaliana
atgtcttccacccaaac

SEQ ID NO: 56550 - DNA, 17 bp, Arabidopsis thaliana
atgtcttctcctgatcg

SEQ ID NO: 56551 - DNA, 17 bp, Arabidopsis thaliana
atgtcttctggttcagg

SEQ ID NO: 56552 - DNA, 17 bp, Arabidopsis thaliana
atgtcttctggttctgg

SEQ ID NO: 56553 - DNA, 17 bp, Arabidopsis thaliana
atgtcttgaaacttctg

SEQ ID NO: 56554 - DNA, 17 bp, Arabidopsis thaliana
atgtcttgaaggatctt

SEQ ID NO: 56555 - DNA, 17 bp, Arabidopsis thaliana
atgtcttgcttgccact

SEQ ID NO: 56556 - DNA, 17 bp, Arabidopsis thaliana
atgtcttgtctgcctgt

SEQ ID NO: 56557 - DNA, 17 bp, Arabidopsis thaliana
atgtctttagtcttaga

SEQ ID NO: 56558 - DNA, 17 bp, Arabidopsis thaliana
atgtctttgacagtttt

SEQ ID NO: 56559 - DNA, 17 bp, Arabidopsis thaliana
atgtctttgatttgctg

SEQ ID NO: 56560 - DNA, 17 bp, Arabidopsis thaliana
atgtctttggagccaca

SEQ ID NO: 56561 - DNA, 17 bp, Arabidopsis thaliana
atgtctttggttggcag

SEQ ID NO: 56562 - DNA, 17 bp, Arabidopsis thaliana
atgtctttgtagatgga

SEQ ID NO: 56563 - DNA, 17 bp, Arabidopsis thaliana
atgtctttgttccaggt

SEQ ID NO: 56564 - DNA, 17 bp, Arabidopsis thaliana
atgtcttttcagccttt

SEQ ID NO: 56565 - DNA, 17 bp, Arabidopsis thaliana
atgtctttttgtgttcc

SEQ ID NO: 56566 - DNA, 17 bp, Arabidopsis thaliana
atgtcttttttggcctg

SEQ ID NO: 56567 - DNA, 17 bp, Arabidopsis thaliana
atgtcttttttggcggt

SEQ ID NO: 56568 - DNA, 17 bp, Arabidopsis thaliana
atgtgaaaaccacactc

SEQ ID NO: 56569 - DNA, 17 bp, Arabidopsis thaliana
atgtgaaatacggactc

SEQ ID NO: 56570 - DNA, 17 bp, Arabidopsis thaliana
atgtgaacagtcttggg

SEQ ID NO: 56571 - DNA, 17 bp, Arabidopsis thaliana
atgtgaactggtttgtc

SEQ ID NO: 56572 - DNA, 17 bp, Arabidopsis thaliana
atgtgaacttcgcatgt

SEQ ID NO: 56573 - DNA, 17 bp, Arabidopsis thaliana
atgtgaacttcgtatgt

SEQ ID NO: 56574 - DNA, 17 bp, Arabidopsis thaliana
atgtgaactttgaggtc

SEQ ID NO: 56575 - DNA, 17 bp, Arabidopsis thaliana
atgtgaagaaacttaga

SEQ ID NO: 56576 - DNA, 17 bp, Arabidopsis thaliana
atgtgaagcaggaacgg

SEQ ID NO: 56577 - DNA, 17 bp, Arabidopsis thaliana
atgtgaagccccgtccg

SEQ ID NO: 56578 - DNA, 17 bp, Arabidopsis thaliana
atgtgaagtcgctcaag

SEQ ID NO: 56579 - DNA, 17 bp, Arabidopsis thaliana
atgtgaagtttgccaga

SEQ ID NO: 56580 - DNA, 17 bp, Arabidopsis thaliana
atgtgaatagtctgaac

SEQ ID NO: 56581 - DNA, 17 bp, Arabidopsis thaliana
atgtgaattgacatcac

SEQ ID NO: 56582 - DNA, 17 bp, Arabidopsis thaliana
atgtgaattgattttac

SEQ ID NO: 56583 - DNA, 17 bp, Arabidopsis thaliana
atgtgacacacggacta

SEQ ID NO: 56584 - DNA, 17 bp, Arabidopsis thaliana
atgtgacactcactggt

SEQ ID NO: 56585 - DNA, 17 bp, Arabidopsis thaliana
atgtgacactcattcgt

SEQ ID NO: 56586 - DNA, 17 bp, Arabidopsis thaliana
atgtgacactgactggt

SEQ ID NO: 56587 - DNA, 17 bp, Arabidopsis thaliana
atgtgacattcactggt

SEQ ID NO: 56588 - DNA, 17 bp, Arabidopsis thaliana
atgtgacattcgatcta

SEQ ID NO: 56589 - DNA, 17 bp, Arabidopsis thaliana
atgtgaccatgcattct

SEQ ID NO: 56590 - DNA, 17 bp, Arabidopsis thaliana
atgtgaccattcgagca

SEQ ID NO: 56591 - DNA, 17 bp, Arabidopsis thaliana
atgtgaccattggagca

SEQ ID NO: 56592 - DNA, 17 bp, Arabidopsis thaliana
atgtgaccattggagga

SEQ ID NO: 56593 - DNA, 17 bp, Arabidopsis thaliana
atgtgaccattggagta

SEQ ID NO: 56594 - DNA, 17 bp, Arabidopsis thaliana
atgtgaccgttgctcag

SEQ ID NO: 56595 - DNA, 17 bp, Arabidopsis thaliana
atgtgaccgttgctcat

SEQ ID NO: 56596 - DNA, 17 bp, Arabidopsis thaliana
atgtgaccttgccatcc

SEQ ID NO: 56597 - DNA, 17 bp, Arabidopsis thaliana
atgtgacgaaaaatgca

SEQ ID NO: 56598 - DNA, 17 bp, Arabidopsis thaliana
atgtgacgaagggtatt

SEQ ID NO: 56599 - DNA, 17 bp, Arabidopsis thaliana
atgtgacgaccgagtta

SEQ ID NO: 56600 - DNA, 17 bp, Arabidopsis thaliana
atgtgacgagagagttt

SEQ ID NO: 56601 - DNA, 17 bp, Arabidopsis thaliana
atgtgacgcaaccaagg

SEQ ID NO: 56602 - DNA, 17 bp, Arabidopsis thaliana
atgtgactgcgttttgc

SEQ ID NO: 56603 - DNA, 17 bp, Arabidopsis thaliana
atgtgactgctctggat

SEQ ID NO: 56604 - DNA, 17 bp, Arabidopsis thaliana
atgtgacttcttgagta

SEQ ID NO: 56605 - DNA, 17 bp, Arabidopsis thaliana
atgtgacttgcacacca

SEQ ID NO: 56606 - DNA, 17 bp, Arabidopsis thaliana
atgtgacttttgagatt

SEQ ID NO: 56607 - DNA, 17 bp, Arabidopsis thaliana
atgtgagtgactggtac

SEQ ID NO: 56608 - DNA, 17 bp, Arabidopsis thaliana
atgtgagttaatcgact

SEQ ID NO: 56609 - DNA, 17 bp, Arabidopsis thaliana
atgtgataccttttcgg

SEQ ID NO: 56610 - DNA, 17 bp, Arabidopsis thaliana
atgtgataccttttctg

SEQ ID NO: 56611 - DNA, 17 bp, Arabidopsis thaliana
atgtgatacggttcgga

SEQ ID NO: 56612 - DNA, 17 bp, Arabidopsis thaliana
atgtgatatgatgtggt

SEQ ID NO: 56613 - DNA, 17 bp, Arabidopsis thaliana
atgtgatgatgtggcgc

SEQ ID NO: 56614 - DNA, 17 bp, Arabidopsis thaliana
atgtgatggtgcatgta

SEQ ID NO: 56615 - DNA, 17 bp, Arabidopsis thaliana
atgtgattcggcttgga

SEQ ID NO: 56616 - DNA, 17 bp, Arabidopsis thaliana
atgtgattgatggacac

SEQ ID NO: 56617 - DNA, 17 bp, Arabidopsis thaliana
atgtgatttctgcccag

SEQ ID NO: 56618 - DNA, 17 bp, Arabidopsis thaliana
atgtgatttctgcccat

SEQ ID NO: 56619 - DNA, 17 bp, Arabidopsis thaliana
atgtgatttctgccctg

SEQ ID NO: 56620 - DNA, 17 bp, Arabidopsis thaliana
atgtgcaaatgcttccc

SEQ ID NO: 56621 - DNA, 17 bp, Arabidopsis thaliana
atgtgcaaatgctttct

SEQ ID NO: 56622 - DNA, 17 bp, Arabidopsis thaliana
atgtgcaacagcggacc

SEQ ID NO: 56623 - DNA, 17 bp, Arabidopsis thaliana
atgtgcaactgtcgatg

SEQ ID NO: 56624 - DNA, 17 bp, Arabidopsis thaliana
atgtgcaatgcagatgg

SEQ ID NO: 56625 - DNA, 17 bp, Arabidopsis thaliana
atgtgcacagtgatcaa

SEQ ID NO: 56626 - DNA, 17 bp, Arabidopsis thaliana
atgtgccatatccacgg

SEQ ID NO: 56627 - DNA, 17 bp, Arabidopsis thaliana
atgtgcccaaaaggtga

SEQ ID NO: 56628 - DNA, 17 bp, Arabidopsis thaliana
atgtgcccgatactcaa

SEQ ID NO: 56629 - DNA, 17 bp, Arabidopsis thaliana
atgtgccgttctagttc

SEQ ID NO: 56630 - DNA, 17 bp, Arabidopsis thaliana
atgtgcctctcgtgctt

SEQ ID NO: 56631 - DNA, 17 bp, Arabidopsis thaliana
atgtgcgaatcggactc

SEQ ID NO: 56632 - DNA, 17 bp, Arabidopsis thaliana
atgtgcgatggagatgg

SEQ ID NO: 56633 - DNA, 17 bp, Arabidopsis thaliana
atgtgcgattatttctc

SEQ ID NO: 56634 - DNA, 17 bp, Arabidopsis thaliana
atgtgcgccttgttttc

SEQ ID NO: 56635 - DNA, 17 bp, Arabidopsis thaliana
atgtgcggaccgggctc

SEQ ID NO: 56636 - DNA, 17 bp, Arabidopsis thaliana
atgtgcggatagggcta

SEQ ID NO: 56637 - DNA, 17 bp, Arabidopsis thaliana
atgtgcggatcaagcgg

SEQ ID NO: 56638 - DNA, 17 bp, Arabidopsis thaliana
atgtgcggatcgatggc

SEQ ID NO: 56639 - DNA, 17 bp, Arabidopsis thaliana
atgtgcggatcgattgc

SEQ ID NO: 56640 - DNA, 17 bp, Arabidopsis thaliana
atgtgcggatcggactc

SEQ ID NO: 56641 - DNA, 17 bp, Arabidopsis thaliana
atgtgcggatcgggctc

SEQ ID NO: 56642 - DNA, 17 bp, Arabidopsis thaliana
atgtgcggatcgggctt

SEQ ID NO: 56643 - DNA, 17 bp, Arabidopsis thaliana
atgtgcggattgggctc

SEQ ID NO: 56644 - DNA, 17 bp, Arabidopsis thaliana
atgtgcgggtcagaatc

SEQ ID NO: 56645 - DNA, 17 bp, Arabidopsis thaliana
atgtgctgatgtgtcaa

SEQ ID NO: 56646 - DNA, 17 bp, Arabidopsis thaliana
atgtgctgggcctcatc

SEQ ID NO: 56647 - DNA, 17 bp, Arabidopsis thaliana
atgtggaaagattgcac

SEQ ID NO: 56648 - DNA, 17 bp, Arabidopsis thaliana
atgtggaactcggactc

SEQ ID NO: 56649 - DNA, 17 bp, Arabidopsis thaliana
atgtggaagtccccttg

SEQ ID NO: 56650 - DNA, 17 bp, Arabidopsis thaliana
atgtggaccaatggacc

SEQ ID NO: 56651 - DNA, 17 bp, Arabidopsis thaliana
atgtggacgccggcgac

SEQ ID NO: 56652 - DNA, 17 bp, Arabidopsis thaliana
atgtggactggaaacga

SEQ ID NO: 56653 - DNA, 17 bp, Arabidopsis thaliana
atgtggactttggtcac

SEQ ID NO: 56654 - DNA, 17 bp, Arabidopsis thaliana
atgtggaggaagaggcc

SEQ ID NO: 56655 - DNA, 17 bp, Arabidopsis thaliana
atgtggatgtcttaatt

SEQ ID NO: 56656 - DNA, 17 bp, Arabidopsis thaliana
atgtggcacgatcgtat

SEQ ID NO: 56657 - DNA, 17 bp, Arabidopsis thaliana
atgtggcattcactggt

SEQ ID NO: 56658 - DNA, 17 bp, Arabidopsis thaliana
atgtggccgcaaaactg

SEQ ID NO: 56659 - DNA, 17 bp, Arabidopsis thaliana
atgtggcgcttactggg

SEQ ID NO: 56660 - DNA, 17 bp, Arabidopsis thaliana
atgtggcttgcctggct

SEQ ID NO: 56661 - DNA, 17 bp, Arabidopsis thaliana
atgtgggacctttggtt

SEQ ID NO: 56662 - DNA, 17 bp, Arabidopsis thaliana
atgtgggccctgttctt

SEQ ID NO: 56663 - DNA, 17 bp, Arabidopsis thaliana
atgtgggtgatttgttc

SEQ ID NO: 56664 - DNA, 17 bp, Arabidopsis thaliana
atgtgggttatgggtct

SEQ ID NO: 56665 - DNA, 17 bp, Arabidopsis thaliana
atgtggtagccgtttct

SEQ ID NO: 56666 - DNA, 17 bp, Arabidopsis thaliana
atgtggtgtaaccgtca

SEQ ID NO: 56667 - DNA, 17 bp, Arabidopsis thaliana
atgtggttgcggtttaa

SEQ ID NO: 56668 - DNA, 17 bp, Arabidopsis thaliana
atgtggtttcaggcttt

SEQ ID NO: 56669 - DNA, 17 bp, Arabidopsis thaliana
atgtgtaaatctcatgc

SEQ ID NO: 56670 - DNA, 17 bp, Arabidopsis thaliana
atgtgtacaaggtccca

SEQ ID NO: 56671 - DNA, 17 bp, Arabidopsis thaliana
atgtgtaccgtggtttt

SEQ ID NO: 56672 - DNA, 17 bp, Arabidopsis thaliana
atgtgtaccttgagaca

SEQ ID NO: 56673 - DNA, 17 bp, Arabidopsis thaliana
atgtgtacgcgccttcg

SEQ ID NO: 56674 - DNA, 17 bp, Arabidopsis thaliana
atgtgtactttgaaaca

SEQ ID NO: 56675 - DNA, 17 bp, Arabidopsis thaliana
atgtgtcaaactcgttt

SEQ ID NO: 56676 - DNA, 17 bp, Arabidopsis thaliana
atgtgtcaactgctgga

SEQ ID NO: 56677 - DNA, 17 bp, Arabidopsis thaliana
atgtgtcaccgatggtg

SEQ ID NO: 56678 - DNA, 17 bp, Arabidopsis thaliana
atgtgtcagactctctc

SEQ ID NO: 56679 - DNA, 17 bp, Arabidopsis thaliana
atgtgtcccaagttcag

SEQ ID NO: 56680 - DNA, 17 bp, Arabidopsis thaliana
atgtgtcgccgtcgaat

SEQ ID NO: 56681 - DNA, 17 bp, Arabidopsis thaliana
atgtgtcgctatgtgaa

SEQ ID NO: 56682 - DNA, 17 bp, Arabidopsis thaliana
atgtgtcgtctgtcgtg

SEQ ID NO: 56683 - DNA, 17 bp, Arabidopsis thaliana
atgtgtctaacttgttt

SEQ ID NO: 56684 - DNA, 17 bp, Arabidopsis thaliana
atgtgtctcgggtgctg

SEQ ID NO: 56685 - DNA, 17 bp, Arabidopsis thaliana
atgtgtgatgactgtag

SEQ ID NO: 56686 - DNA, 17 bp, Arabidopsis thaliana
atgtgtgatggtgcgtt

SEQ ID NO: 56687 - DNA, 17 bp, Arabidopsis thaliana
atgtgtgattcggactc

SEQ ID NO: 56688 - DNA, 17 bp, Arabidopsis thaliana
atgtgtgatttggactc

SEQ ID NO: 56689 - DNA, 17 bp, Arabidopsis thaliana
atgtgtgcgagtcaacg

SEQ ID NO: 56690 - DNA, 17 bp, Arabidopsis thaliana
atgtgtgcggatcgggc

SEQ ID NO: 56691 - DNA, 17 bp, Arabidopsis thaliana
atgtgtggcgatatgtt

SEQ ID NO: 56692 - DNA, 17 bp, Arabidopsis thaliana
atgtgtggcgatgtgtt

SEQ ID NO: 56693 - DNA, 17 bp, Arabidopsis thaliana
atgtgtggctgagattg

SEQ ID NO: 56694 - DNA, 17 bp, Arabidopsis thaliana
atgtgtgtccgtcggtt

SEQ ID NO: 56695 - DNA, 17 bp, Arabidopsis thaliana
atgtgtgtgctgatgtg

SEQ ID NO: 56696 - DNA, 17 bp, Arabidopsis thaliana
atgtgtgtttccctcag

SEQ ID NO: 56697 - DNA, 17 bp, Arabidopsis thaliana
atgtgttccctttccgg

SEQ ID NO: 56698 - DNA, 17 bp, Arabidopsis thaliana
atgtgttccgcataatg

SEQ ID NO: 56699 - DNA, 17 bp, Arabidopsis thaliana
atgtgttgagccgccta

SEQ ID NO: 56700 - DNA, 17 bp, Arabidopsis thaliana
atgtgttgctgtatgct

SEQ ID NO: 56701 - DNA, 17 bp, Arabidopsis thaliana
atgtgttggagtcttcc

SEQ ID NO: 56702 - DNA, 17 bp, Arabidopsis thaliana
atgtgttgggccgcacg

SEQ ID NO: 56703 - DNA, 17 bp, Arabidopsis thaliana
atgtgttgttcgtttga

SEQ ID NO: 56704 - DNA, 17 bp, Arabidopsis thaliana
atgtgttgttcgtttgt

SEQ ID NO: 56705 - DNA, 17 bp, Arabidopsis thaliana
atgtgtttcccggatca

SEQ ID NO: 56706 - DNA, 17 bp, Arabidopsis thaliana
atgttaaacccagttct

SEQ ID NO: 56707 - DNA, 17 bp, Arabidopsis thaliana
atgttaaagtcgcatgg

SEQ ID NO: 56708 - DNA, 17 bp, Arabidopsis thaliana
atgttaaatcaaagccc

SEQ ID NO: 56709 - DNA, 17 bp, Arabidopsis thaliana
atgttaaatcaaagctc

SEQ ID NO: 56710 - DNA, 17 bp, Arabidopsis thaliana
atgttaacaatttgcat

SEQ ID NO: 56711 - DNA, 17 bp, Arabidopsis thaliana
atgttaacccagttcac

SEQ ID NO: 56712 - DNA, 17 bp, Arabidopsis thaliana
atgttaactcgccgatt

SEQ ID NO: 56713 - DNA, 17 bp, Arabidopsis thaliana
atgttaagtgcgagact

SEQ ID NO: 56714 - DNA, 17 bp, Arabidopsis thaliana
atgttaagttgattgcg

SEQ ID NO: 56715 - DNA, 17 bp, Arabidopsis thaliana
atgttaattccctggtg

SEQ ID NO: 56716 - DNA, 17 bp, Arabidopsis thaliana
atgttacagcattagtg

SEQ ID NO: 56717 - DNA, 17 bp, Arabidopsis thaliana
atgttacagcattattg

SEQ ID NO: 56718 - DNA, 17 bp, Arabidopsis thaliana
atgttacagcattattt

SEQ ID NO: 56719 - DNA, 17 bp, Arabidopsis thaliana
atgttacctttgacgtc

SEQ ID NO: 56720 - DNA, 17 bp, Arabidopsis thaliana
atgttacgctttcaccc

SEQ ID NO: 56721 - DNA, 17 bp, Arabidopsis thaliana
atgttagacttttgtcc

SEQ ID NO: 56722 - DNA, 17 bp, Arabidopsis thaliana
atgttagagcggactgc

SEQ ID NO: 56723 - DNA, 17 bp, Arabidopsis thaliana
atgttaggtgcgagact

SEQ ID NO: 56724 - DNA, 17 bp, Arabidopsis thaliana
atgttagtaagaccttg

SEQ ID NO: 56725 - DNA, 17 bp, Arabidopsis thaliana
atgttagtgacggcgaa

SEQ ID NO: 56726 - DNA, 17 bp, Arabidopsis thaliana
atgttagtgcaccctct

SEQ ID NO: 56727 - DNA, 17 bp, Arabidopsis thaliana
atgttatccaggatccg

SEQ ID NO: 56728 - DNA, 17 bp, Arabidopsis thaliana
atgttatccgtcggctt

SEQ ID NO: 56729 - DNA, 17 bp, Arabidopsis thaliana
atgttatcggcgttgtg

SEQ ID NO: 56730 - DNA, 17 bp, Arabidopsis thaliana
atgttatctaagtttct

SEQ ID NO: 56731 - DNA, 17 bp, Arabidopsis thaliana
atgttatctcggaccaa

SEQ ID NO: 56732 - DNA, 17 bp, Arabidopsis thaliana
atgttatctgattgctt

SEQ ID NO: 56733 - DNA, 17 bp, Arabidopsis thaliana
atgttatctggttgctc

SEQ ID NO: 56734 - DNA, 17 bp, Arabidopsis thaliana
atgttatctggttgctt

SEQ ID NO: 56735 - DNA, 17 bp, Arabidopsis thaliana
atgttatcttcgatgtg

SEQ ID NO: 56736 - DNA, 17 bp, Arabidopsis thaliana
atgttatgctcattgga

SEQ ID NO: 56737 - DNA, 17 bp, Arabidopsis thaliana
atgttatgcttctcacc

SEQ ID NO: 56738 - DNA, 17 bp, Arabidopsis thaliana
atgttatggccgtaatt

SEQ ID NO: 56739 - DNA, 17 bp, Arabidopsis thaliana
atgttatggtttgactg

SEQ ID NO: 56740 - DNA, 17 bp, Arabidopsis thaliana
atgttatgtgtggctga

SEQ ID NO: 56741 - DNA, 17 bp, Arabidopsis thaliana
atgttattcggttgctt

SEQ ID NO: 56742 - DNA, 17 bp, Arabidopsis thaliana
atgttcaagcccatatt

SEQ ID NO: 56743 - DNA, 17 bp, Arabidopsis thaliana
atgttcaccaactgcat

SEQ ID NO: 56744 - DNA, 17 bp, Arabidopsis thaliana
atgttcacttaggactg

SEQ ID NO: 56745 - DNA, 17 bp, Arabidopsis thaliana
atgttcagaaccaaggc

SEQ ID NO: 56746 - DNA, 17 bp, Arabidopsis thaliana
atgttcatttgggtgct

SEQ ID NO: 56747 - DNA, 17 bp, Arabidopsis thaliana
atgttccaaaaccagga

SEQ ID NO: 56748 - DNA, 17 bp, Arabidopsis thaliana
atgttccaagggttggg

SEQ ID NO: 56749 - DNA, 17 bp, Arabidopsis thaliana
atgttccacggctaagg

SEQ ID NO: 56750 - DNA, 17 bp, Arabidopsis thaliana
atgttccagttccagct

SEQ ID NO: 56751 - DNA, 17 bp, Arabidopsis thaliana
atgttccatctgaatga

SEQ ID NO: 56752 - DNA, 17 bp, Arabidopsis thaliana
atgttccattccatttt

SEQ ID NO: 56753 - DNA, 17 bp, Arabidopsis thaliana
atgttcccgacaaagtg

SEQ ID NO: 56754 - DNA, 17 bp, Arabidopsis thaliana
atgttccggccggcctt

SEQ ID NO: 56755 - DNA, 17 bp, Arabidopsis thaliana
atgttcctatatcgaca

SEQ ID NO: 56756 - DNA, 17 bp, Arabidopsis thaliana
atgttcctcgacgaagc

SEQ ID NO: 56757 - DNA, 17 bp, Arabidopsis thaliana
atgttccttagaaactc

SEQ ID NO: 56758 - DNA, 17 bp, Arabidopsis thaliana
atgttccttctggccat

SEQ ID NO: 56759 - DNA, 17 bp, Arabidopsis thaliana
atgttcgaccacgcgtt

SEQ ID NO: 56760 - DNA, 17 bp, Arabidopsis thaliana
atgttcgacgctttagt

SEQ ID NO: 56761 - DNA, 17 bp, Arabidopsis thaliana
atgttcgagtaccaggc

SEQ ID NO: 56762 - DNA, 17 bp, Arabidopsis thaliana
atgttcgagtgtcgatg

SEQ ID NO: 56763 - DNA, 17 bp, Arabidopsis thaliana
atgttcgcatattctgc

SEQ ID NO: 56764 - DNA, 17 bp, Arabidopsis thaliana
atgttcgccatgtgtta

SEQ ID NO: 56765 - DNA, 17 bp, Arabidopsis thaliana
atgttcggatcacgatc

SEQ ID NO: 56766 - DNA, 17 bp, Arabidopsis thaliana
atgttcgtgacttttca

SEQ ID NO: 56767 - DNA, 17 bp, Arabidopsis thaliana
atgttcgtttagttgcc

SEQ ID NO: 56768 - DNA, 17 bp, Arabidopsis thaliana
atgttctccggtgtcta

SEQ ID NO: 56769 - DNA, 17 bp, Arabidopsis thaliana
atgttctccggtgtgta

SEQ ID NO: 56770 - DNA, 17 bp, Arabidopsis thaliana
atgttctgggccgcacg

SEQ ID NO: 56771 - DNA, 17 bp, Arabidopsis thaliana
atgttctgtccgactgg

SEQ ID NO: 56772 - DNA, 17 bp, Arabidopsis thaliana
atgttctttgtgatgac

SEQ ID NO: 56773 - DNA, 17 bp, Arabidopsis thaliana
atgttctttgttccagg

SEQ ID NO: 56774 - DNA, 17 bp, Arabidopsis thaliana
atgttgaatggcactat

SEQ ID NO: 56775 - DNA, 17 bp, Arabidopsis thaliana
atgttgaatggctctat

SEQ ID NO: 56776 - DNA, 17 bp, Arabidopsis thaliana
atgttgaccacctagct

SEQ ID NO: 56777 - DNA, 17 bp, Arabidopsis thaliana
atgttgactaaccttct

SEQ ID NO: 56778 - DNA, 17 bp, Arabidopsis thaliana
atgttgactacttggct

SEQ ID NO: 56779 - DNA, 17 bp, Arabidopsis thaliana
atgttgatagcagtcgg

SEQ ID NO: 56780 - DNA, 17 bp, Arabidopsis thaliana
atgttgatggtgggtag

SEQ ID NO: 56781 - DNA, 17 bp, Arabidopsis thaliana
atgttgattcgtaagcc

SEQ ID NO: 56782 - DNA, 17 bp, Arabidopsis thaliana
atgttgcaaggaatctc

SEQ ID NO: 56783 - DNA, 17 bp, Arabidopsis thaliana
atgttgcattgcagcgg

SEQ ID NO: 56784 - DNA, 17 bp, Arabidopsis thaliana
atgttgccacatttgac

SEQ ID NO: 56785 - DNA, 17 bp, Arabidopsis thaliana
atgttgccacgagtgaa

SEQ ID NO: 56786 - DNA, 17 bp, Arabidopsis thaliana
atgttgcgctcggccac

SEQ ID NO: 56787 - DNA, 17 bp, Arabidopsis thaliana
atgttgctattatccct

SEQ ID NO: 56788 - DNA, 17 bp, Arabidopsis thaliana
atgttgcttataggact

SEQ ID NO: 56789 - DNA, 17 bp, Arabidopsis thaliana
atgttggaccatcttga

SEQ ID NO: 56790 - DNA, 17 bp, Arabidopsis thaliana
atgttggagattcagtc

SEQ ID NO: 56791 - DNA, 17 bp, Arabidopsis thaliana
atgttgggcgtgttcca

SEQ ID NO: 56792 - DNA, 17 bp, Arabidopsis thaliana
atgttgggtacagacca

SEQ ID NO: 56793 - DNA, 17 bp, Arabidopsis thaliana
atgttgtcaacgatctc

SEQ ID NO: 56794 - DNA, 17 bp, Arabidopsis thaliana
atgttgtcacgtcacct

SEQ ID NO: 56795 - DNA, 17 bp, Arabidopsis thaliana
atgttgtcgctggttgc

SEQ ID NO: 56796 - DNA, 17 bp, Arabidopsis thaliana
atgttgtcgctggttgt

SEQ ID NO: 56797 - DNA, 17 bp, Arabidopsis thaliana
atgttgtgattagtggc

SEQ ID NO: 56798 - DNA, 17 bp, Arabidopsis thaliana
atgttgtggcgaaatcg

SEQ ID NO: 56799 - DNA, 17 bp, Arabidopsis thaliana
atgttgtggttaggcgg

SEQ ID NO: 56800 - DNA, 17 bp, Arabidopsis thaliana
atgttgtggttttgcgc

SEQ ID NO: 56801 - DNA, 17 bp, Arabidopsis thaliana
atgttgtgttttgattt

SEQ ID NO: 56802 - DNA, 17 bp, Arabidopsis thaliana
atgtttacgagttgctt

SEQ ID NO: 56803 - DNA, 17 bp, Arabidopsis thaliana
atgtttacggcgtttag

SEQ ID NO: 56804 - DNA, 17 bp, Arabidopsis thaliana
atgtttacttatcgact

SEQ ID NO: 56805 - DNA, 17 bp, Arabidopsis thaliana
atgtttacttgacttcc

SEQ ID NO: 56806 - DNA, 17 bp, Arabidopsis thaliana
atgtttagattgtgaga

SEQ ID NO: 56807 - DNA, 17 bp, Arabidopsis thaliana
atgtttaggagttgcca

SEQ ID NO: 56808 - DNA, 17 bp, Arabidopsis thaliana
atgtttatcctgagaat

SEQ ID NO: 56809 - DNA, 17 bp, Arabidopsis thaliana
atgtttatcctgagatt

SEQ ID NO: 56810 - DNA, 17 bp, Arabidopsis thaliana
atgtttatcgtctagcc

SEQ ID NO: 56811 - DNA, 17 bp, Arabidopsis thaliana
atgtttcaagtcatcga

SEQ ID NO: 56812 - DNA, 17 bp, Arabidopsis thaliana
atgtttcacaagatctt

SEQ ID NO: 56813 - DNA, 17 bp, Arabidopsis thaliana
atgtttcagattggact

SEQ ID NO: 56814 - DNA, 17 bp, Arabidopsis thaliana
atgtttccgaaaagata

SEQ ID NO: 56815 - DNA, 17 bp, Arabidopsis thaliana
atgtttccgacaagata

SEQ ID NO: 56816 - DNA, 17 bp, Arabidopsis thaliana
atgtttccgacaaggta

SEQ ID NO: 56817 - DNA, 17 bp, Arabidopsis thaliana
atgtttccgttggctca

SEQ ID NO: 56818 - DNA, 17 bp, Arabidopsis thaliana
atgtttcgaacttagca

SEQ ID NO: 56819 - DNA, 17 bp, Arabidopsis thaliana
atgtttcggccaagaca

SEQ ID NO: 56820 - DNA, 17 bp, Arabidopsis thaliana
atgtttcgttcactcag

SEQ ID NO: 56821 - DNA, 17 bp, Arabidopsis thaliana
atgtttctctgacgtgc

SEQ ID NO: 56822 - DNA, 17 bp, Arabidopsis thaliana
atgtttgaatttagtaa

SEQ ID NO: 56823 - DNA, 17 bp, Arabidopsis thaliana
atgtttgacaaagtgaa

SEQ ID NO: 56824 - DNA, 17 bp, Arabidopsis thaliana
atgtttgacacgccttc

SEQ ID NO: 56825 - DNA, 17 bp, Arabidopsis thaliana
atgtttgacctcccatc

SEQ ID NO: 56826 - DNA, 17 bp, Arabidopsis thaliana
atgtttgacgcgtgtga

SEQ ID NO: 56827 - DNA, 17 bp, Arabidopsis thaliana
atgtttgactcgctttc

SEQ ID NO: 56828 - DNA, 17 bp, Arabidopsis thaliana
atgtttgaggcactttc

SEQ ID NO: 56829 - DNA, 17 bp, Arabidopsis thaliana
atgtttgcttctgaatg

SEQ ID NO: 56830 - DNA, 17 bp, Arabidopsis thaliana
atgtttggagcgtgttt

SEQ ID NO: 56831 - DNA, 17 bp, Arabidopsis thaliana
atgtttggatacccggt

SEQ ID NO: 56832 - DNA, 17 bp, Arabidopsis thaliana
atgtttgggcatggatc

SEQ ID NO: 56833 - DNA, 17 bp, Arabidopsis thaliana
atgtttgggtttagtct

SEQ ID NO: 56834 - DNA, 17 bp, Arabidopsis thaliana
atgtttgggtttagttg

SEQ ID NO: 56835 - DNA, 17 bp, Arabidopsis thaliana
atgtttgtcagtttctt

SEQ ID NO: 56836 - DNA, 17 bp, Arabidopsis thaliana
atgtttgtccgagcggt

SEQ ID NO: 56837 - DNA, 17 bp, Arabidopsis thaliana
atgtttgtgagcatgtt

SEQ ID NO: 56838 - DNA, 17 bp, Arabidopsis thaliana
atgtttgtgctggagca

SEQ ID NO: 56839 - DNA, 17 bp, Arabidopsis thaliana
atgtttgtgtttgtcca

SEQ ID NO: 56840 - DNA, 17 bp, Arabidopsis thaliana
atgttttagacggccgc

SEQ ID NO: 56841 - DNA, 17 bp, Arabidopsis thaliana
atgttttatgtccgagg

SEQ ID NO: 56842 - DNA, 17 bp, Arabidopsis thaliana
atgttttcatttgctgt

SEQ ID NO: 56843 - DNA, 17 bp, Arabidopsis thaliana
atgttttccgactaact

SEQ ID NO: 56844 - DNA, 17 bp, Arabidopsis thaliana
atgttttctacattcag

SEQ ID NO: 56845 - DNA, 17 bp, Arabidopsis thaliana
atgttttctctctcgag

SEQ ID NO: 56846 - DNA, 17 bp, Arabidopsis thaliana
atgttttgcttgcgctt

SEQ ID NO: 56847 - DNA, 17 bp, Arabidopsis thaliana
atgttttggtgtgtttt

SEQ ID NO: 56848 - DNA, 17 bp, Arabidopsis thaliana
atgttttggtttcggac

SEQ ID NO: 56849 - DNA, 17 bp, Arabidopsis thaliana
atgttttgtcctcattc

SEQ ID NO: 56850 - DNA, 17 bp, Arabidopsis thaliana
atgttttgttccgatat

SEQ ID NO: 56851 - DNA, 17 bp, Arabidopsis thaliana
atgtttttctgtcggac

SEQ ID NO: 56852 - DNA, 17 bp, Arabidopsis thaliana
attaaaaccaaccaggc

SEQ ID NO: 56853 - DNA, 17 bp, Arabidopsis thaliana
attaaaattcttcgtcc

SEQ ID NO: 56854 - DNA, 17 bp, Arabidopsis thaliana
attaaacagggattggc

SEQ ID NO: 56855 - DNA, 17 bp, Arabidopsis thaliana
attaaaccaatgtggga

SEQ ID NO: 56856 - DNA, 17 bp, Arabidopsis thaliana
attaaaccaatgtgggg

SEQ ID NO: 56857 - DNA, 17 bp, Arabidopsis thaliana
attaaactgtggacttc

SEQ ID NO: 56858 - DNA, 17 bp, Arabidopsis thaliana
attaaacttgtcagccc

SEQ ID NO: 56859 - DNA, 17 bp, Arabidopsis thaliana
attaaagaaccagcaga

SEQ ID NO: 56860 - DNA, 17 bp, Arabidopsis thaliana
attaaagatgtcaactg

SEQ ID NO: 56861 - DNA, 17 bp, Arabidopsis thaliana
attaaagtccagtggca

SEQ ID NO: 56862 - DNA, 17 bp, Arabidopsis thaliana
attaaagtctgcttttg

SEQ ID NO: 56863 - DNA, 17 bp, Arabidopsis thaliana
attaaatgatttctggg

SEQ ID NO: 56864 - DNA, 17 bp, Arabidopsis thaliana
attaaatgccagtgaca

SEQ ID NO: 56865 - DNA, 17 bp, Arabidopsis thaliana
attaaatgccagtggca

SEQ ID NO: 56866 - DNA, 17 bp, Arabidopsis thaliana
attaaatgcgaaaaccg

SEQ ID NO: 56867 - DNA, 17 bp, Arabidopsis thaliana
attaaatgtcggtttgg

SEQ ID NO: 56868 - DNA, 17 bp, Arabidopsis thaliana
attaaatgttaggacgg

SEQ ID NO: 56869 - DNA, 17 bp, Arabidopsis thaliana
attaaattactcgctga

SEQ ID NO: 56870 - DNA, 17 bp, Arabidopsis thaliana
attaacaaagcagtctg

SEQ ID NO: 56871 - DNA, 17 bp, Arabidopsis thaliana
attaacactggttacca

SEQ ID NO: 56872 - DNA, 17 bp, Arabidopsis thaliana
attaacagaccggtaga

SEQ ID NO: 56873 - DNA, 17 bp, Arabidopsis thaliana
attaacagctcatttgg

SEQ ID NO: 56874 - DNA, 17 bp, Arabidopsis thaliana
attaacaggctaaaccg

SEQ ID NO: 56875 - DNA, 17 bp, Arabidopsis thaliana
attaacaggctaaccgg

SEQ ID NO: 56876 - DNA, 17 bp, Arabidopsis thaliana
attaacagggacagtcg

SEQ ID NO: 56877 - DNA, 17 bp, Arabidopsis thaliana
attaacatgcggacttg

SEQ ID NO: 56878 - DNA, 17 bp, Arabidopsis thaliana
attaacattccttgcta

SEQ ID NO: 56879 - DNA, 17 bp, Arabidopsis thaliana
attaaccatactcggcc

SEQ ID NO: 56880 - DNA, 17 bp, Arabidopsis thaliana
attaaccgtgagctcgt

SEQ ID NO: 56881 - DNA, 17 bp, Arabidopsis thaliana
attaacgacttccaagc

SEQ ID NO: 56882 - DNA, 17 bp, Arabidopsis thaliana
attaacgagattcccac

SEQ ID NO: 56883 - DNA, 17 bp, Arabidopsis thaliana
attaacgagattccccc

SEQ ID NO: 56884 - DNA, 17 bp, Arabidopsis thaliana
attaacgatcccgcacc

SEQ ID NO: 56885 - DNA, 17 bp, Arabidopsis thaliana
attaacgattgtggcca

SEQ ID NO: 56886 - DNA, 17 bp, Arabidopsis thaliana
attaacgcccgtgccca

SEQ ID NO: 56887 - DNA, 17 bp, Arabidopsis thaliana
attaacgcctgttatcg

SEQ ID NO: 56888 - DNA, 17 bp, Arabidopsis thaliana
attaacggtttggtttc

SEQ ID NO: 56889 - DNA, 17 bp, Arabidopsis thaliana
attaacgtctgaggcgg

SEQ ID NO: 56890 - DNA, 17 bp, Arabidopsis thaliana
attaacgtctgctaacg

SEQ ID NO: 56891 - DNA, 17 bp, Arabidopsis thaliana
attaactagattttgac

SEQ ID NO: 56892 - DNA, 17 bp, Arabidopsis thaliana
attaacttcatctcagg

SEQ ID NO: 56893 - DNA, 17 bp, Arabidopsis thaliana
attaacttttgttgact

SEQ ID NO: 56894 - DNA, 17 bp, Arabidopsis thaliana
attaagacagcaggacg

SEQ ID NO: 56895 - DNA, 17 bp, Arabidopsis thaliana
attaagacgaagacgac

SEQ ID NO: 56896 - DNA, 17 bp, Arabidopsis thaliana
attaagactcctgtgac

SEQ ID NO: 56897 - DNA, 17 bp, Arabidopsis thaliana
attaagagcagccccaa

SEQ ID NO: 56898 - DNA, 17 bp, Arabidopsis thaliana
attaagagtttcaccgg

SEQ ID NO: 56899 - DNA, 17 bp, Arabidopsis thaliana
attaagagtttcggccc

SEQ ID NO: 56900 - DNA, 17 bp, Arabidopsis thaliana
attaagatggtggaaca

SEQ ID NO: 56901 - DNA, 17 bp, Arabidopsis thaliana
attaagatgtcaggaag

SEQ ID NO: 56902 - DNA, 17 bp, Arabidopsis thaliana
attaagatttgcggtcc

SEQ ID NO: 56903 - DNA, 17 bp, Arabidopsis thaliana
attaagccaaaggacga

SEQ ID NO: 56904 - DNA, 17 bp, Arabidopsis thaliana
attaagcctcacgttaa

SEQ ID NO: 56905 - DNA, 17 bp, Arabidopsis thaliana
attaagcggttgctgca

SEQ ID NO: 56906 - DNA, 17 bp, Arabidopsis thaliana
attaagcttctataact

SEQ ID NO: 56907 - DNA, 17 bp, Arabidopsis thaliana
attaaggaggttctggg

SEQ ID NO: 56908 - DNA, 17 bp, Arabidopsis thaliana
attaaggcccatgtcca

SEQ ID NO: 56909 - DNA, 17 bp, Arabidopsis thaliana
attaaggccctgtttgt

SEQ ID NO: 56910 - DNA, 17 bp, Arabidopsis thaliana
attaaggctccgaatgg

SEQ ID NO: 56911 - DNA, 17 bp, Arabidopsis thaliana
attaaggctgtgaatgg

SEQ ID NO: 56912 - DNA, 17 bp, Arabidopsis thaliana
attaagggtcctgataa

SEQ ID NO: 56913 - DNA, 17 bp, Arabidopsis thaliana
attaagggtctcggccc

SEQ ID NO: 56914 - DNA, 17 bp, Arabidopsis thaliana
attaagggtgtttgcaa

SEQ ID NO: 56915 - DNA, 17 bp, Arabidopsis thaliana
attaaggttccgtcgac

SEQ ID NO: 56916 - DNA, 17 bp, Arabidopsis thaliana
attaagtaacgtcctgc

SEQ ID NO: 56917 - DNA, 17 bp, Arabidopsis thaliana
attaagtaacgtcctgt

SEQ ID NO: 56918 - DNA, 17 bp, Arabidopsis thaliana
attaagtaacgtcgtgc

SEQ ID NO: 56919 - DNA, 17 bp, Arabidopsis thaliana
attaagtaacgttctgc

SEQ ID NO: 56920 - DNA, 17 bp, Arabidopsis thaliana
attaagtactgacccaa

SEQ ID NO: 56921 - DNA, 17 bp, Arabidopsis thaliana
attaagtccatccaaat

SEQ ID NO: 56922 - DNA, 17 bp, Arabidopsis thaliana
attaagtccgcatgatt

SEQ ID NO: 56923 - DNA, 17 bp, Arabidopsis thaliana
attaagtcctggagttg

SEQ ID NO: 56924 - DNA, 17 bp, Arabidopsis thaliana
attaagtcgtgatcctt

SEQ ID NO: 56925 - DNA, 17 bp, Arabidopsis thaliana
attaagtctgcagccgt

SEQ ID NO: 56926 - DNA, 17 bp, Arabidopsis thaliana
attaagtgaccgggctt

SEQ ID NO: 56927 - DNA, 17 bp, Arabidopsis thaliana
attaagtgactacatcg

SEQ ID NO: 56928 - DNA, 17 bp, Arabidopsis thaliana
attaagtgcggcttgta

SEQ ID NO: 56929 - DNA, 17 bp, Arabidopsis thaliana
attaagtgttcatctcg

SEQ ID NO: 56930 - DNA, 17 bp, Arabidopsis thaliana
attaagtgtttatccag

SEQ ID NO: 56931 - DNA, 17 bp, Arabidopsis thaliana
attaagtttgtgtgaaa

SEQ ID NO: 56932 - DNA, 17 bp, Arabidopsis thaliana
attaatactcctgggcg

SEQ ID NO: 56933 - DNA, 17 bp, Arabidopsis thaliana
attaatcacaattttgc

SEQ ID NO: 56934 - DNA, 17 bp, Arabidopsis thaliana
attaatcactggctaaa

SEQ ID NO: 56935 - DNA, 17 bp, Arabidopsis thaliana
attaatcatctcatacc

SEQ ID NO: 56936 - DNA, 17 bp, Arabidopsis thaliana
attaatccaccgcttaa

SEQ ID NO: 56937 - DNA, 17 bp, Arabidopsis thaliana
attaatccgtcagcgat

SEQ ID NO: 56938 - DNA, 17 bp, Arabidopsis thaliana
attaatccgtcagcggt

SEQ ID NO: 56939 - DNA, 17 bp, Arabidopsis thaliana
attaatcgcttctttat

SEQ ID NO: 56940 - DNA, 17 bp, Arabidopsis thaliana
attaatcgttgcgacag

SEQ ID NO: 56941 - DNA, 17 bp, Arabidopsis thaliana
attaatgcccgtgctat

SEQ ID NO: 56942 - DNA, 17 bp, Arabidopsis thaliana
attaatgcccgtgctgt

SEQ ID NO: 56943 - DNA, 17 bp, Arabidopsis thaliana
attaatgcgctgctttg

SEQ ID NO: 56944 - DNA, 17 bp, Arabidopsis thaliana
attaatgtgtggatgga

SEQ ID NO: 56945 - DNA, 17 bp, Arabidopsis thaliana
attaattattgatgtgg

SEQ ID NO: 56946 - DNA, 17 bp, Arabidopsis thaliana
attaattccccaacatg

SEQ ID NO: 56947 - DNA, 17 bp, Arabidopsis thaliana
attaattcgtctcgtct

SEQ ID NO: 56948 - DNA, 17 bp, Arabidopsis thaliana
attaattgatccaacca

SEQ ID NO: 56949 - DNA, 17 bp, Arabidopsis thaliana
attaattgatccgtggt

SEQ ID NO: 56950 - DNA, 17 bp, Arabidopsis thaliana
attaatttcatcgtcgt

SEQ ID NO: 56951 - DNA, 17 bp, Arabidopsis thaliana
attaatttgacctcaca

SEQ ID NO: 56952 - DNA, 17 bp, Arabidopsis thaliana
attaatttgtctcgtct

SEQ ID NO: 56953 - DNA, 17 bp, Arabidopsis thaliana
attacaaaacggtaggc

SEQ ID NO: 56954 - DNA, 17 bp, Arabidopsis thaliana
attacaaagatattgca

SEQ ID NO: 56955 - DNA, 17 bp, Arabidopsis thaliana
attacaaagggacaatc

SEQ ID NO: 56956 - DNA, 17 bp, Arabidopsis thaliana
attacaacaaatttgca

SEQ ID NO: 56957 - DNA, 17 bp, Arabidopsis thaliana
attacaacccaactcat

SEQ ID NO: 56958 - DNA, 17 bp, Arabidopsis thaliana
attacaaccgaacttgt

SEQ ID NO: 56959 - DNA, 17 bp, Arabidopsis thaliana
attacaacgtgcgacgt

SEQ ID NO: 56960 - DNA, 17 bp, Arabidopsis thaliana
attacaagtgtggcaag

SEQ ID NO: 56961 - DNA, 17 bp, Arabidopsis thaliana
attacaattgtcaaggc

SEQ ID NO: 56962 - DNA, 17 bp, Arabidopsis thaliana
attacacagatgggatc

SEQ ID NO: 56963 - DNA, 17 bp, Arabidopsis thaliana
attacacattctcggac

SEQ ID NO: 56964 - DNA, 17 bp, Arabidopsis thaliana
attacacctagccggtt

SEQ ID NO: 56965 - DNA, 17 bp, Arabidopsis thaliana
attacacgatgtggttt

SEQ ID NO: 56966 - DNA, 17 bp, Arabidopsis thaliana
attacacggatgtgttt

SEQ ID NO: 56967 - DNA, 17 bp, Arabidopsis thaliana
attacacgtttaggcac

SEQ ID NO: 56968 - DNA, 17 bp, Arabidopsis thaliana
attacactacaggttct

SEQ ID NO: 56969 - DNA, 17 bp, Arabidopsis thaliana
attacactccagatgtc

SEQ ID NO: 56970 - DNA, 17 bp, Arabidopsis thaliana
attacactgcggtacgg

SEQ ID NO: 56971 - DNA, 17 bp, Arabidopsis thaliana
attacagactgaccttc

SEQ ID NO: 56972 - DNA, 17 bp, Arabidopsis thaliana
attacagccccaagaag

SEQ ID NO: 56973 - DNA, 17 bp, Arabidopsis thaliana
attacaggccacacccg

SEQ ID NO: 56974 - DNA, 17 bp, Arabidopsis thaliana
attacaggcttcggccc

SEQ ID NO: 56975 - DNA, 17 bp, Arabidopsis thaliana
attacaggctttggccc

SEQ ID NO: 56976 - DNA, 17 bp, Arabidopsis thaliana
attacagggacctgatt

SEQ ID NO: 56977 - DNA, 17 bp, Arabidopsis thaliana
attacaggtttttgccg

SEQ ID NO: 56978 - DNA, 17 bp, Arabidopsis thaliana
attacagtgcggtacgg

SEQ ID NO: 56979 - DNA, 17 bp, Arabidopsis thaliana
attacagtgggtggaca

SEQ ID NO: 56980 - DNA, 17 bp, Arabidopsis thaliana
attacagtgggtggact

SEQ ID NO: 56981 - DNA, 17 bp, Arabidopsis thaliana
attacatactgtggttt

SEQ ID NO: 56982 - DNA, 17 bp, Arabidopsis thaliana
attacatactttggttt

SEQ ID NO: 56983 - DNA, 17 bp, Arabidopsis thaliana
attacatagtgtggttt

SEQ ID NO: 56984 - DNA, 17 bp, Arabidopsis thaliana
attacatattgtggttt

SEQ ID NO: 56985 - DNA, 17 bp, Arabidopsis thaliana
attacatcacaggatgg

SEQ ID NO: 56986 - DNA, 17 bp, Arabidopsis thaliana
attacatcaccaaccac

SEQ ID NO: 56987 - DNA, 17 bp, Arabidopsis thaliana
attacatcaggtattag

SEQ ID NO: 56988 - DNA, 17 bp, Arabidopsis thaliana
attacatccgcactagt

SEQ ID NO: 56989 - DNA, 17 bp, Arabidopsis thaliana
attacatgatgtggttt

SEQ ID NO: 56990 - DNA, 17 bp, Arabidopsis thaliana
attacatgctacgtttc

SEQ ID NO: 56991 - DNA, 17 bp, Arabidopsis thaliana
attacatgctagttgcg

SEQ ID NO: 56992 - DNA, 17 bp, Arabidopsis thaliana
attacatgctatggttt

SEQ ID NO: 56993 - DNA, 17 bp, Arabidopsis thaliana
attacatgctgcggttt

SEQ ID NO: 56994 - DNA, 17 bp, Arabidopsis thaliana
attacatgctggtcttg

SEQ ID NO: 56995 - DNA, 17 bp, Arabidopsis thaliana
attacatgctgtagttt

SEQ ID NO: 56996 - DNA, 17 bp, Arabidopsis thaliana
attacatgctgtgattt

SEQ ID NO: 56997 - DNA, 17 bp, Arabidopsis thaliana
attacatgctgtggtct

SEQ ID NO: 56998 - DNA, 17 bp, Arabidopsis thaliana
attacatgctgtggtta

SEQ ID NO: 56999 - DNA, 17 bp, Arabidopsis thaliana
attacatgctgtggttc

SEQ ID NO: 57000 - DNA, 17 bp, Arabidopsis thaliana
attacatgctgtggttt

SEQ ID NO: 57001 - DNA, 17 bp, Arabidopsis thaliana
attacatgctttggttt

SEQ ID NO: 57002 - DNA, 17 bp, Arabidopsis thaliana
attacatggtgtggttt

SEQ ID NO: 57003 - DNA, 17 bp, Arabidopsis thaliana
attacatgtcgtggttt

SEQ ID NO: 57004 - DNA, 17 bp, Arabidopsis thaliana
attacatgttatggttt

SEQ ID NO: 57005 - DNA, 17 bp, Arabidopsis thaliana
attacatgttgtagttt

SEQ ID NO: 57006 - DNA, 17 bp, Arabidopsis thaliana
attacatgttgtgattt

SEQ ID NO: 57007 - DNA, 17 bp, Arabidopsis thaliana
attacatgttgtgcttt

SEQ ID NO: 57008 - DNA, 17 bp, Arabidopsis thaliana
attacatgttgtggtta

SEQ ID NO: 57009 - DNA, 17 bp, Arabidopsis thaliana
attacatgttgtggttt

SEQ ID NO: 57010 - DNA, 17 bp, Arabidopsis thaliana
attacatgttttggttt

SEQ ID NO: 57011 - DNA, 17 bp, Arabidopsis thaliana
attacattctgtagttc

SEQ ID NO: 57012 - DNA, 17 bp, Arabidopsis thaliana
attacattctgtagttt

SEQ ID NO: 57013 - DNA, 17 bp, Arabidopsis thaliana
attacattctgtggttt

SEQ ID NO: 57014 - DNA, 17 bp, Arabidopsis thaliana
attacattggtatttgg

SEQ ID NO: 57015 - DNA, 17 bp, Arabidopsis thaliana
attaccaacggcagagc

SEQ ID NO: 57016 - DNA, 17 bp, Arabidopsis thaliana
attaccaacggcgtcgt

SEQ ID NO: 57017 - DNA, 17 bp, Arabidopsis thaliana
attaccaatgatatccg

SEQ ID NO: 57018 - DNA, 17 bp, Arabidopsis thaliana
attaccaattccttgat

SEQ ID NO: 57019 - DNA, 17 bp, Arabidopsis thaliana
attaccaccaccaccac

SEQ ID NO: 57020 - DNA, 17 bp, Arabidopsis thaliana
attaccaccgaacggcg

SEQ ID NO: 57021 - DNA, 17 bp, Arabidopsis thaliana
attaccaccgagcggcc

SEQ ID NO: 57022 - DNA, 17 bp, Arabidopsis thaliana
attaccaccgagcggcg

SEQ ID NO: 57023 - DNA, 17 bp, Arabidopsis thaliana
attaccaccgatccggg

SEQ ID NO: 57024 - DNA, 17 bp, Arabidopsis thaliana
attaccaccggcggcgg

SEQ ID NO: 57025 - DNA, 17 bp, Arabidopsis thaliana
attaccagaatgtaagt

SEQ ID NO: 57026 - DNA, 17 bp, Arabidopsis thaliana
attaccagatttaccgc

SEQ ID NO: 57027 - DNA, 17 bp, Arabidopsis thaliana
attaccaggtaaaccaa

SEQ ID NO: 57028 - DNA, 17 bp, Arabidopsis thaliana
attaccaggtaggttgg

SEQ ID NO: 57029 - DNA, 17 bp, Arabidopsis thaliana
attaccagttatggttt

SEQ ID NO: 57030 - DNA, 17 bp, Arabidopsis thaliana
attaccatcacgatgtc

SEQ ID NO: 57031 - DNA, 17 bp, Arabidopsis thaliana
attaccatcacggtgtc

SEQ ID NO: 57032 - DNA, 17 bp, Arabidopsis thaliana
attaccatccaatgcca

SEQ ID NO: 57033 - DNA, 17 bp, Arabidopsis thaliana
attaccatctacaatgc

SEQ ID NO: 57034 - DNA, 17 bp, Arabidopsis thaliana
attaccatctacaatgg

SEQ ID NO: 57035 - DNA, 17 bp, Arabidopsis thaliana
attaccatggacccacg

SEQ ID NO: 57036 - DNA, 17 bp, Arabidopsis thaliana
attaccattatccgtcg

SEQ ID NO: 57037 - DNA, 17 bp, Arabidopsis thaliana
attacccaatcctgaca

SEQ ID NO: 57038 - DNA, 17 bp, Arabidopsis thaliana
attacccccatggtagc

SEQ ID NO: 57039 - DNA, 17 bp, Arabidopsis thaliana
attaccccccgtgtttt

SEQ ID NO: 57040 - DNA, 17 bp, Arabidopsis thaliana
attacccgccgtctaca

SEQ ID NO: 57041 - DNA, 17 bp, Arabidopsis thaliana
attacccgctgagttta

SEQ ID NO: 57042 - DNA, 17 bp, Arabidopsis thaliana
attacccttaatgagct

SEQ ID NO: 57043 - DNA, 17 bp, Arabidopsis thaliana
attaccgacgaacactg

SEQ ID NO: 57044 - DNA, 17 bp, Arabidopsis thaliana
attaccgacgcggatta

SEQ ID NO: 57045 - DNA, 17 bp, Arabidopsis thaliana
attaccgacgtctaact

SEQ ID NO: 57046 - DNA, 17 bp, Arabidopsis thaliana
attaccgcctctcttgc

SEQ ID NO: 57047 - DNA, 17 bp, Arabidopsis thaliana
attaccgcggctgctgg

SEQ ID NO: 57048 - DNA, 17 bp, Arabidopsis thaliana
attaccgcggtcgctgg

SEQ ID NO: 57049 - DNA, 17 bp, Arabidopsis thaliana
attaccgctcaggacag

SEQ ID NO: 57050 - DNA, 17 bp, Arabidopsis thaliana
attaccgcttcatgcag

SEQ ID NO: 57051 - DNA, 17 bp, Arabidopsis thaliana
attaccggccggattgt

SEQ ID NO: 57052 - DNA, 17 bp, Arabidopsis thaliana
attaccgtatacagggc

SEQ ID NO: 57053 - DNA, 17 bp, Arabidopsis thaliana
attaccgtcgtctaact

SEQ ID NO: 57054 - DNA, 17 bp, Arabidopsis thaliana
attacctacaaagtttt

SEQ ID NO: 57055 - DNA, 17 bp, Arabidopsis thaliana
attacctagctgatcca

SEQ ID NO: 57056 - DNA, 17 bp, Arabidopsis thaliana
attacctattgatgggc

SEQ ID NO: 57057 - DNA, 17 bp, Arabidopsis thaliana
attacctcgattcgcgg

SEQ ID NO: 57058 - DNA, 17 bp, Arabidopsis thaliana
attacctctcgttcatg

SEQ ID NO: 57059 - DNA, 17 bp, Arabidopsis thaliana
attacctctgttgctgg

SEQ ID NO: 57060 - DNA, 17 bp, Arabidopsis thaliana
attacctgggtcgagta

SEQ ID NO: 57061 - DNA, 17 bp, Arabidopsis thaliana
attacctgtctgagaag

SEQ ID NO: 57062 - DNA, 17 bp, Arabidopsis thaliana
attacctgttatggttt

SEQ ID NO: 57063 - DNA, 17 bp, Arabidopsis thaliana
attacctttggctgcac

SEQ ID NO: 57064 - DNA, 17 bp, Arabidopsis thaliana
attacgaacggctctac

SEQ ID NO: 57065 - DNA, 17 bp, Arabidopsis thaliana
attacgaacggctctgc

SEQ ID NO: 57066 - DNA, 17 bp, Arabidopsis thaliana
attacgaacttgttaag

SEQ ID NO: 57067 - DNA, 17 bp, Arabidopsis thaliana
attacgacccaactcat

SEQ ID NO: 57068 - DNA, 17 bp, Arabidopsis thaliana
attacgacggcgggtcg

SEQ ID NO: 57069 - DNA, 17 bp, Arabidopsis thaliana
attacgactctcggcaa

SEQ ID NO: 57070 - DNA, 17 bp, Arabidopsis thaliana
attacgagcccgagctt

SEQ ID NO: 57071 - DNA, 17 bp, Arabidopsis thaliana
attacgagtccgagctt

SEQ ID NO: 57072 - DNA, 17 bp, Arabidopsis thaliana
attacgatgtttgcgtc

SEQ ID NO: 57073 - DNA, 17 bp, Arabidopsis thaliana
attacgcaaatgtcatg

SEQ ID NO: 57074 - DNA, 17 bp, Arabidopsis thaliana
attacgcagacccgtgt

SEQ ID NO: 57075 - DNA, 17 bp, Arabidopsis thaliana
attacgccatcattagc

SEQ ID NO: 57076 - DNA, 17 bp, Arabidopsis thaliana
attacgccatgacgggc

SEQ ID NO: 57077 - DNA, 17 bp, Arabidopsis thaliana
attacgccattacgggc

SEQ ID NO: 57078 - DNA, 17 bp, Arabidopsis thaliana
attacgcctttaagatc

SEQ ID NO: 57079 - DNA, 17 bp, Arabidopsis thaliana
attacgcgagacaagtc

SEQ ID NO: 57080 - DNA, 17 bp, Arabidopsis thaliana
attacgcggaaacgaca

SEQ ID NO: 57081 - DNA, 17 bp, Arabidopsis thaliana
attacgcggattacggt

SEQ ID NO: 57082 - DNA, 17 bp, Arabidopsis thaliana
attacgcttctgatcat

SEQ ID NO: 57083 - DNA, 17 bp, Arabidopsis thaliana
attacggaattcggccc

SEQ ID NO: 57084 - DNA, 17 bp, Arabidopsis thaliana
attacggacttcggtcc

SEQ ID NO: 57085 - DNA, 17 bp, Arabidopsis thaliana
attacggactttgaccc

SEQ ID NO: 57086 - DNA, 17 bp, Arabidopsis thaliana
attacggattgtggcca

SEQ ID NO: 57087 - DNA, 17 bp, Arabidopsis thaliana
attacggatttcagcgc

SEQ ID NO: 57088 - DNA, 17 bp, Arabidopsis thaliana
attacggatttcggccc

SEQ ID NO: 57089 - DNA, 17 bp, Arabidopsis thaliana
attacggatttggaggg

SEQ ID NO: 57090 - DNA, 17 bp, Arabidopsis thaliana
attacggatttggcagg

SEQ ID NO: 57091 - DNA, 17 bp, Arabidopsis thaliana
attacggcggtagtgac

SEQ ID NO: 57092 - DNA, 17 bp, Arabidopsis thaliana
attacggctttggttca

SEQ ID NO: 57093 - DNA, 17 bp, Arabidopsis thaliana
attacgggattcagccc

SEQ ID NO: 57094 - DNA, 17 bp, Arabidopsis thaliana
attacgggccgaccatg

SEQ ID NO: 57095 - DNA, 17 bp, Arabidopsis thaliana
attacgggcttcagtcc

SEQ ID NO: 57096 - DNA, 17 bp, Arabidopsis thaliana
attacgggcttcgaacc

SEQ ID NO: 57097 - DNA, 17 bp, Arabidopsis thaliana
attacgggcttcgaccc

SEQ ID NO: 57098 - DNA, 17 bp, Arabidopsis thaliana
attacgggcttcgatcc

SEQ ID NO: 57099 - DNA, 17 bp, Arabidopsis thaliana
attacgggcttcgcccc

SEQ ID NO: 57100 - DNA, 17 bp, Arabidopsis thaliana
attacgggcttcgcctc

SEQ ID NO: 57101 - DNA, 17 bp, Arabidopsis thaliana
attacgggcttcggcca

SEQ ID NO: 57102 - DNA, 17 bp, Arabidopsis thaliana
attacgggcttcggccc

SEQ ID NO: 57103 - DNA, 17 bp, Arabidopsis thaliana
attacgggctttggccc

SEQ ID NO: 57104 - DNA, 17 bp, Arabidopsis thaliana
attacgggctttggtca

SEQ ID NO: 57105 - DNA, 17 bp, Arabidopsis thaliana
attacgggctttgtccc

SEQ ID NO: 57106 - DNA, 17 bp, Arabidopsis thaliana
attacggggcggcctca

SEQ ID NO: 57107 - DNA, 17 bp, Arabidopsis thaliana
attacgggtttacggtt

SEQ ID NO: 57108 - DNA, 17 bp, Arabidopsis thaliana
attacgggtttacgttt

SEQ ID NO: 57109 - DNA, 17 bp, Arabidopsis thaliana
attacgggtttcagcgc

SEQ ID NO: 57110 - DNA, 17 bp, Arabidopsis thaliana
attacgggtttcggccc

SEQ ID NO: 57111 - DNA, 17 bp, Arabidopsis thaliana
attacgggtttcggtcc

SEQ ID NO: 57112 - DNA, 17 bp, Arabidopsis thaliana
attacgggtttcggttc

SEQ ID NO: 57113 - DNA, 17 bp, Arabidopsis thaliana
attacgggtttggcagg

SEQ ID NO: 57114 - DNA, 17 bp, Arabidopsis thaliana
attacgggttttggtcc

SEQ ID NO: 57115 - DNA, 17 bp, Arabidopsis thaliana
attacggtgaccatgac

SEQ ID NO: 57116 - DNA, 17 bp, Arabidopsis thaliana
attacggtgcggcctaa

SEQ ID NO: 57117 - DNA, 17 bp, Arabidopsis thaliana
attacggtggccgcaga

SEQ ID NO: 57118 - DNA, 17 bp, Arabidopsis thaliana
attacggtggcggccta

SEQ ID NO: 57119 - DNA, 17 bp, Arabidopsis thaliana
attacggtggcggggta

SEQ ID NO: 57120 - DNA, 17 bp, Arabidopsis thaliana
attacggtggcgtccta

SEQ ID NO: 57121 - DNA, 17 bp, Arabidopsis thaliana
attacgtgcgctgacgt

SEQ ID NO: 57122 - DNA, 17 bp, Arabidopsis thaliana
attacgtgcgggctttc

SEQ ID NO: 57123 - DNA, 17 bp, Arabidopsis thaliana
attacgtgtctccgccc

SEQ ID NO: 57124 - DNA, 17 bp, Arabidopsis thaliana
attactacatcttggtt

SEQ ID NO: 57125 - DNA, 17 bp, Arabidopsis thaliana
attactactgggatgaa

SEQ ID NO: 57126 - DNA, 17 bp, Arabidopsis thaliana
attactagattctgacc

SEQ ID NO: 57127 - DNA, 17 bp, Arabidopsis thaliana
attactaggatgggtga

SEQ ID NO: 57128 - DNA, 17 bp, Arabidopsis thaliana
attactaggtgatcacc

SEQ ID NO: 57129 - DNA, 17 bp, Arabidopsis thaliana
attactatcgaccaaaa

SEQ ID NO: 57130 - DNA, 17 bp, Arabidopsis thaliana
attactatcgacccaac

SEQ ID NO: 57131 - DNA, 17 bp, Arabidopsis thaliana
attactatcgcacccgc

SEQ ID NO: 57132 - DNA, 17 bp, Arabidopsis thaliana
attactatcgcacctgc

SEQ ID NO: 57133 - DNA, 17 bp, Arabidopsis thaliana
attactatcgtacccgc

SEQ ID NO: 57134 - DNA, 17 bp, Arabidopsis thaliana
attactatttgaaccgc

SEQ ID NO: 57135 - DNA, 17 bp, Arabidopsis thaliana
attactcaagctcggta

SEQ ID NO: 57136 - DNA, 17 bp, Arabidopsis thaliana
attactcaggctcaagt

SEQ ID NO: 57137 - DNA, 17 bp, Arabidopsis thaliana
attactcgacctgtcac

SEQ ID NO: 57138 - DNA, 17 bp, Arabidopsis thaliana
attactctagtccgact

SEQ ID NO: 57139 - DNA, 17 bp, Arabidopsis thaliana
attactctgaccttgag

SEQ ID NO: 57140 - DNA, 17 bp, Arabidopsis thaliana
attactctgaccttggg

SEQ ID NO: 57141 - DNA, 17 bp, Arabidopsis thaliana
attactctgccgtaacg

SEQ ID NO: 57142 - DNA, 17 bp, Arabidopsis thaliana
attactgcaagggctgg

SEQ ID NO: 57143 - DNA, 17 bp, Arabidopsis thaliana
attactgctccggtcgg

SEQ ID NO: 57144 - DNA, 17 bp, Arabidopsis thaliana
attactgctggtgcgtt

SEQ ID NO: 57145 - DNA, 17 bp, Arabidopsis thaliana
attactggattcgaatg

SEQ ID NO: 57146 - DNA, 17 bp, Arabidopsis thaliana
attactggctgcgtttc

SEQ ID NO: 57147 - DNA, 17 bp, Arabidopsis thaliana
attactggctgcgtttg

SEQ ID NO: 57148 - DNA, 17 bp, Arabidopsis thaliana
attactggctgtagttt

SEQ ID NO: 57149 - DNA, 17 bp, Arabidopsis thaliana
attactgtccgcttagc

SEQ ID NO: 57150 - DNA, 17 bp, Arabidopsis thaliana
attactgtctgctgggt

SEQ ID NO: 57151 - DNA, 17 bp, Arabidopsis thaliana
attactgtggaccaggg

SEQ ID NO: 57152 - DNA, 17 bp, Arabidopsis thaliana
attactgtggcggccta

SEQ ID NO: 57153 - DNA, 17 bp, Arabidopsis thaliana
attacttaaatacgcga

SEQ ID NO: 57154 - DNA, 17 bp, Arabidopsis thaliana
attacttcatccgcact

SEQ ID NO: 57155 - DNA, 17 bp, Arabidopsis thaliana
attacttgacccgcttg

SEQ ID NO: 57156 - DNA, 17 bp, Arabidopsis thaliana
attacttgaccgagctg

SEQ ID NO: 57157 - DNA, 17 bp, Arabidopsis thaliana
attacttggtgcgttcc

SEQ ID NO: 57158 - DNA, 17 bp, Arabidopsis thaliana
attacttgtatgactcg

SEQ ID NO: 57159 - DNA, 17 bp, Arabidopsis thaliana
attactttggttgcctc

SEQ ID NO: 57160 - DNA, 17 bp, Arabidopsis thaliana
attacttttgatcgctg

SEQ ID NO: 57161 - DNA, 17 bp, Arabidopsis thaliana
attagaaaaacaccatt

SEQ ID NO: 57162 - DNA, 17 bp, Arabidopsis thaliana
attagaaactgaaagtt

SEQ ID NO: 57163 - DNA, 17 bp, Arabidopsis thaliana
attagaagtcgtcgtcg

SEQ ID NO: 57164 - DNA, 17 bp, Arabidopsis thaliana
attagaattttttcgca

SEQ ID NO: 57165 - DNA, 17 bp, Arabidopsis thaliana
attagaccatcctcatc

SEQ ID NO: 57166 - DNA, 17 bp, Arabidopsis thaliana
attagaccatctccaat

SEQ ID NO: 57167 - DNA, 17 bp, Arabidopsis thaliana
attagaccgctatgtcc

SEQ ID NO: 57168 - DNA, 17 bp, Arabidopsis thaliana
attagaccgctgacgga

SEQ ID NO: 57169 - DNA, 17 bp, Arabidopsis thaliana
attagaccgctttatcc

SEQ ID NO: 57170 - DNA, 17 bp, Arabidopsis thaliana
attagaccgctttgtcc

SEQ ID NO: 57171 - DNA, 17 bp, Arabidopsis thaliana
attagaccggtcctgga

SEQ ID NO: 57172 - DNA, 17 bp, Arabidopsis thaliana
attagaccgtcgggtcc

SEQ ID NO: 57173 - DNA, 17 bp, Arabidopsis thaliana
attagaccgtcgtgaga

SEQ ID NO: 57174 - DNA, 17 bp, Arabidopsis thaliana
attagaccgttttgtcc

SEQ ID NO: 57175 - DNA, 17 bp, Arabidopsis thaliana
attagaccgttttgtct

SEQ ID NO: 57176 - DNA, 17 bp, Arabidopsis thaliana
attagacctctggatgt

SEQ ID NO: 57177 - DNA, 17 bp, Arabidopsis thaliana
attagacgctgcggtgg

SEQ ID NO: 57178 - DNA, 17 bp, Arabidopsis thaliana
attagacgtttttggcc

SEQ ID NO: 57179 - DNA, 17 bp, Arabidopsis thaliana
attagacttgcagcaac

SEQ ID NO: 57180 - DNA, 17 bp, Arabidopsis thaliana
attagagacaatgtccc

SEQ ID NO: 57181 - DNA, 17 bp, Arabidopsis thaliana
attagagattgatccgc

SEQ ID NO: 57182 - DNA, 17 bp, Arabidopsis thaliana
attagagcgcccatatt

SEQ ID NO: 57183 - DNA, 17 bp, Arabidopsis thaliana
attagagctgtcaaacc

SEQ ID NO: 57184 - DNA, 17 bp, Arabidopsis thaliana
attagagctgtcaaagc

SEQ ID NO: 57185 - DNA, 17 bp, Arabidopsis thaliana
attagaggtgtcaaact

SEQ ID NO: 57186 - DNA, 17 bp, Arabidopsis thaliana
attagagtactaaggcc

SEQ ID NO: 57187 - DNA, 17 bp, Arabidopsis thaliana
attagagtgtggacttc

SEQ ID NO: 57188 - DNA, 17 bp, Arabidopsis thaliana
attagataccactggca

SEQ ID NO: 57189 - DNA, 17 bp, Arabidopsis thaliana
attagatactgctttag

SEQ ID NO: 57190 - DNA, 17 bp, Arabidopsis thaliana
attagatactttctaca

SEQ ID NO: 57191 - DNA, 17 bp, Arabidopsis thaliana
attagatccacgacaga

SEQ ID NO: 57192 - DNA, 17 bp, Arabidopsis thaliana
attagatcgaccggctc

SEQ ID NO: 57193 - DNA, 17 bp, Arabidopsis thaliana
attagatctacgacagc

SEQ ID NO: 57194 - DNA, 17 bp, Arabidopsis thaliana
attagatgacgccgaaa

SEQ ID NO: 57195 - DNA, 17 bp, Arabidopsis thaliana
attagatgatatgacgg

SEQ ID NO: 57196 - DNA, 17 bp, Arabidopsis thaliana
attagatggtacgacgg

SEQ ID NO: 57197 - DNA, 17 bp, Arabidopsis thaliana
attagatggtaggacgg

SEQ ID NO: 57198 - DNA, 17 bp, Arabidopsis thaliana
attagatgtccagttgc

SEQ ID NO: 57199 - DNA, 17 bp, Arabidopsis thaliana
attagattcggttcgga

SEQ ID NO: 57200 - DNA, 17 bp, Arabidopsis thaliana
attagattcggttcggg

SEQ ID NO: 57201 - DNA, 17 bp, Arabidopsis thaliana
attagattgcggatttt

SEQ ID NO: 57202 - DNA, 17 bp, Arabidopsis thaliana
attagattgtaggcttc

SEQ ID NO: 57203 - DNA, 17 bp, Arabidopsis thaliana
attagattgtgcggttt

SEQ ID NO: 57204 - DNA, 17 bp, Arabidopsis thaliana
attagattgtggacttc

SEQ ID NO: 57205 - DNA, 17 bp, Arabidopsis thaliana
attagattttaacttgc

SEQ ID NO: 57206 - DNA, 17 bp, Arabidopsis thaliana
attagcaaccatgagct

SEQ ID NO: 57207 - DNA, 17 bp, Arabidopsis thaliana
attagcagtaggtagcg

SEQ ID NO: 57208 - DNA, 17 bp, Arabidopsis thaliana
attagcagtgttgtggc

SEQ ID NO: 57209 - DNA, 17 bp, Arabidopsis thaliana
attagcatgtcggagaa

SEQ ID NO: 57210 - DNA, 17 bp, Arabidopsis thaliana
attagcatttgccaagg

SEQ ID NO: 57211 - DNA, 17 bp, Arabidopsis thaliana
attagccataagagcac

SEQ ID NO: 57212 - DNA, 17 bp, Arabidopsis thaliana
attagcggatcaaattt

SEQ ID NO: 57213 - DNA, 17 bp, Arabidopsis thaliana
attagcgggatccctcg

SEQ ID NO: 57214 - DNA, 17 bp, Arabidopsis thaliana
attagcggtgtactgca

SEQ ID NO: 57215 - DNA, 17 bp, Arabidopsis thaliana
attagcggttggcacca

SEQ ID NO: 57216 - DNA, 17 bp, Arabidopsis thaliana
attagcggttgggtaga

SEQ ID NO: 57217 - DNA, 17 bp, Arabidopsis thaliana
attagcgtcaggcttaa

SEQ ID NO: 57218 - DNA, 17 bp, Arabidopsis thaliana
attagcgtctcaagcgt

SEQ ID NO: 57219 - DNA, 17 bp, Arabidopsis thaliana
attagctgtccgctcgc

SEQ ID NO: 57220 - DNA, 17 bp, Arabidopsis thaliana
attaggaagtcggctag

SEQ ID NO: 57221 - DNA, 17 bp, Arabidopsis thaliana
attaggacacggaactg

SEQ ID NO: 57222 - DNA, 17 bp, Arabidopsis thaliana
attaggacagttgattc

SEQ ID NO: 57223 - DNA, 17 bp, Arabidopsis thaliana
attaggaccagctcaag

SEQ ID NO: 57224 - DNA, 17 bp, Arabidopsis thaliana
attaggacccatcggct

SEQ ID NO: 57225 - DNA, 17 bp, Arabidopsis thaliana
attaggagggcgcggcg

SEQ ID NO: 57226 - DNA, 17 bp, Arabidopsis thaliana
attaggaggttctgagc

SEQ ID NO: 57227 - DNA, 17 bp, Arabidopsis thaliana
attaggattgtgggatt

SEQ ID NO: 57228 - DNA, 17 bp, Arabidopsis thaliana
attaggatttgggtgga

SEQ ID NO: 57229 - DNA, 17 bp, Arabidopsis thaliana
attaggcacaagagtca

SEQ ID NO: 57230 - DNA, 17 bp, Arabidopsis thaliana
attaggccatctccatt

SEQ ID NO: 57231 - DNA, 17 bp, Arabidopsis thaliana
attaggctcatggtgca

SEQ ID NO: 57232 - DNA, 17 bp, Arabidopsis thaliana
attagggactattccag

SEQ ID NO: 57233 - DNA, 17 bp, Arabidopsis thaliana
attagggcacgtctgcc

SEQ ID NO: 57234 - DNA, 17 bp, Arabidopsis thaliana
attaggggttgcaggcc

SEQ ID NO: 57235 - DNA, 17 bp, Arabidopsis thaliana
attagggttcatgagtt

SEQ ID NO: 57236 - DNA, 17 bp, Arabidopsis thaliana
attagggttcatgggtt

SEQ ID NO: 57237 - DNA, 17 bp, Arabidopsis thaliana
attagggttcgattccg

SEQ ID NO: 57238 - DNA, 17 bp, Arabidopsis thaliana
attagggttgatgggtt

SEQ ID NO: 57239 - DNA, 17 bp, Arabidopsis thaliana
attaggtactaggcttt

SEQ ID NO: 57240 - DNA, 17 bp, Arabidopsis thaliana
attaggtcatctccaac

SEQ ID NO: 57241 - DNA, 17 bp, Arabidopsis thaliana
attaggtcatcttcaac

SEQ ID NO: 57242 - DNA, 17 bp, Arabidopsis thaliana
attaggtccctgaatct

SEQ ID NO: 57243 - DNA, 17 bp, Arabidopsis thaliana
attaggtctaaaatact

SEQ ID NO: 57244 - DNA, 17 bp, Arabidopsis thaliana
attaggtgcgctgacgt

SEQ ID NO: 57245 - DNA, 17 bp, Arabidopsis thaliana
attaggtgcttcggagc

SEQ ID NO: 57246 - DNA, 17 bp, Arabidopsis thaliana
attaggtgcttcgtagc

SEQ ID NO: 57247 - DNA, 17 bp, Arabidopsis thaliana
attaggttcttctgcgc

SEQ ID NO: 57248 - DNA, 17 bp, Arabidopsis thaliana
attaggttggttatcgg

SEQ ID NO: 57249 - DNA, 17 bp, Arabidopsis thaliana
attaggtttattggatt

SEQ ID NO: 57250 - DNA, 17 bp, Arabidopsis thaliana
attagtaaactaggtta

SEQ ID NO: 57251 - DNA, 17 bp, Arabidopsis thaliana
attagtaagtcggctag

SEQ ID NO: 57252 - DNA, 17 bp, Arabidopsis thaliana
attagtactttttcggg

SEQ ID NO: 57253 - DNA, 17 bp, Arabidopsis thaliana
attagtccatatgattc

SEQ ID NO: 57254 - DNA, 17 bp, Arabidopsis thaliana
attagtcgcatcctgca

SEQ ID NO: 57255 - DNA, 17 bp, Arabidopsis thaliana
attagtcgcatcctgta

SEQ ID NO: 57256 - DNA, 17 bp, Arabidopsis thaliana
attagtcgctaagattg

SEQ ID NO: 57257 - DNA, 17 bp, Arabidopsis thaliana
attagtcgctacttttg

SEQ ID NO: 57258 - DNA, 17 bp, Arabidopsis thaliana
attagtcgctatacgtc

SEQ ID NO: 57259 - DNA, 17 bp, Arabidopsis thaliana
attagtctttgggccgg

SEQ ID NO: 57260 - DNA, 17 bp, Arabidopsis thaliana
attagtgacgcgcatga

SEQ ID NO: 57261 - DNA, 17 bp, Arabidopsis thaliana
attagtgcccgcaaacg

SEQ ID NO: 57262 - DNA, 17 bp, Arabidopsis thaliana
attagtgctggtatgaa

SEQ ID NO: 57263 - DNA, 17 bp, Arabidopsis thaliana
attagtgtttatgcgga

SEQ ID NO: 57264 - DNA, 17 bp, Arabidopsis thaliana
attagttcaaccgctta

SEQ ID NO: 57265 - DNA, 17 bp, Arabidopsis thaliana
attagttcaaccgcttg

SEQ ID NO: 57266 - DNA, 17 bp, Arabidopsis thaliana
attagttcaaccgcttt

SEQ ID NO: 57267 - DNA, 17 bp, Arabidopsis thaliana
attagttgaagaactgg

SEQ ID NO: 57268 - DNA, 17 bp, Arabidopsis thaliana
attagttgactttggct

SEQ ID NO: 57269 - DNA, 17 bp, Arabidopsis thaliana
attagttgcactgttcc

SEQ ID NO: 57270 - DNA, 17 bp, Arabidopsis thaliana
attagttggaacgattg

SEQ ID NO: 57271 - DNA, 17 bp, Arabidopsis thaliana
attagttgttcgtttgc

SEQ ID NO: 57272 - DNA, 17 bp, Arabidopsis thaliana
attagttgttttaggcc

SEQ ID NO: 57273 - DNA, 17 bp, Arabidopsis thaliana
attagtttaccaacgcg

SEQ ID NO: 57274 - DNA, 17 bp, Arabidopsis thaliana
attagtttattgtgcgg

SEQ ID NO: 57275 - DNA, 17 bp, Arabidopsis thaliana
attagtttcacccacgc

SEQ ID NO: 57276 - DNA, 17 bp, Arabidopsis thaliana
attagtttcgcaaatgc

SEQ ID NO: 57277 - DNA, 17 bp, Arabidopsis thaliana
attagtttggccgagtg

SEQ ID NO: 57278 - DNA, 17 bp, Arabidopsis thaliana
attagtttgtgacacat

SEQ ID NO: 57279 - DNA, 17 bp, Arabidopsis thaliana
attataacactgttgcg

SEQ ID NO: 57280 - DNA, 17 bp, Arabidopsis thaliana
attataattaccaccga

SEQ ID NO: 57281 - DNA, 17 bp, Arabidopsis thaliana
attataccgctttgtcc

SEQ ID NO: 57282 - DNA, 17 bp, Arabidopsis thaliana
attatactgagcttgcg

SEQ ID NO: 57283 - DNA, 17 bp, Arabidopsis thaliana
attatagaccgcccaac

SEQ ID NO: 57284 - DNA, 17 bp, Arabidopsis thaliana
attatagccgcttgcca

SEQ ID NO: 57285 - DNA, 17 bp, Arabidopsis thaliana
attatagccgttcgcca

SEQ ID NO: 57286 - DNA, 17 bp, Arabidopsis thaliana
attatagctgttcgcca

SEQ ID NO: 57287 - DNA, 17 bp, Arabidopsis thaliana
attataggcattcggct

SEQ ID NO: 57288 - DNA, 17 bp, Arabidopsis thaliana
attataggctaactttt

SEQ ID NO: 57289 - DNA, 17 bp, Arabidopsis thaliana
attatcaaaatgatgga

SEQ ID NO: 57290 - DNA, 17 bp, Arabidopsis thaliana
attatcaaacgctcgac

SEQ ID NO: 57291 - DNA, 17 bp, Arabidopsis thaliana
attatcaaagcggtaga

SEQ ID NO: 57292 - DNA, 17 bp, Arabidopsis thaliana
attatcacagcagtgac

SEQ ID NO: 57293 - DNA, 17 bp, Arabidopsis thaliana
attatcaccgagcggcg

SEQ ID NO: 57294 - DNA, 17 bp, Arabidopsis thaliana
attatcagaatgatgaa

SEQ ID NO: 57295 - DNA, 17 bp, Arabidopsis thaliana
attatcagctcaccctt

SEQ ID NO: 57296 - DNA, 17 bp, Arabidopsis thaliana
attatcaggttgtgtgt

SEQ ID NO: 57297 - DNA, 17 bp, Arabidopsis thaliana
attatccactagcaaaa

SEQ ID NO: 57298 - DNA, 17 bp, Arabidopsis thaliana
attatccactcaaaccc

SEQ ID NO: 57299 - DNA, 17 bp, Arabidopsis thaliana
attatcccccgtgcttt

SEQ ID NO: 57300 - DNA, 17 bp, Arabidopsis thaliana
attatcccccgtgtttt

SEQ ID NO: 57301 - DNA, 17 bp, Arabidopsis thaliana
attatccgacccttgct

SEQ ID NO: 57302 - DNA, 17 bp, Arabidopsis thaliana
attatccgacgttaccg

SEQ ID NO: 57303 - DNA, 17 bp, Arabidopsis thaliana
attatccgagcggatca

SEQ ID NO: 57304 - DNA, 17 bp, Arabidopsis thaliana
attatccgccagtgtgg

SEQ ID NO: 57305 - DNA, 17 bp, Arabidopsis thaliana
attatccgccggtgaag

SEQ ID NO: 57306 - DNA, 17 bp, Arabidopsis thaliana
attatccgcggacaaaa

SEQ ID NO: 57307 - DNA, 17 bp, Arabidopsis thaliana
attatccgctctgtccg

SEQ ID NO: 57308 - DNA, 17 bp, Arabidopsis thaliana
attatccgctctttccg

SEQ ID NO: 57309 - DNA, 17 bp, Arabidopsis thaliana
attatccgctttgacat

SEQ ID NO: 57310 - DNA, 17 bp, Arabidopsis thaliana
attatccgtcgcaaatc

SEQ ID NO: 57311 - DNA, 17 bp, Arabidopsis thaliana
attatccgtggacaaaa

SEQ ID NO: 57312 - DNA, 17 bp, Arabidopsis thaliana
attatccgttttgacat

SEQ ID NO: 57313 - DNA, 17 bp, Arabidopsis thaliana
attatcctctagaaccg

SEQ ID NO: 57314 - DNA, 17 bp, Arabidopsis thaliana
attatcgaacaattcat

SEQ ID NO: 57315 - DNA, 17 bp, Arabidopsis thaliana
attatcgaacgtgcggt

SEQ ID NO: 57316 - DNA, 17 bp, Arabidopsis thaliana
attatcgaatcgacgat

SEQ ID NO: 57317 - DNA, 17 bp, Arabidopsis thaliana
attatcgacattgcggt

SEQ ID NO: 57318 - DNA, 17 bp, Arabidopsis thaliana
attatcgatccaaagcc

SEQ ID NO: 57319 - DNA, 17 bp, Arabidopsis thaliana
attatcgctgatcgtct

SEQ ID NO: 57320 - DNA, 17 bp, Arabidopsis thaliana
attatcgctgccatctt

SEQ ID NO: 57321 - DNA, 17 bp, Arabidopsis thaliana
attatcgctgccttctt

SEQ ID NO: 57322 - DNA, 17 bp, Arabidopsis thaliana
attatcggatgactcag

SEQ ID NO: 57323 - DNA, 17 bp, Arabidopsis thaliana
attatcggcccagaacc

SEQ ID NO: 57324 - DNA, 17 bp, Arabidopsis thaliana
attatcggttaactggt

SEQ ID NO: 57325 - DNA, 17 bp, Arabidopsis thaliana
attatcggttctttgcc

SEQ ID NO: 57326 - DNA, 17 bp, Arabidopsis thaliana
attatcgtcaaaactca

SEQ ID NO: 57327 - DNA, 17 bp, Arabidopsis thaliana
attatcgtcgtttccct

SEQ ID NO: 57328 - DNA, 17 bp, Arabidopsis thaliana
attatcgttatttccgg

SEQ ID NO: 57329 - DNA, 17 bp, Arabidopsis thaliana
attatctaaccggattt

SEQ ID NO: 57330 - DNA, 17 bp, Arabidopsis thaliana
attatctccgcgatttt

SEQ ID NO: 57331 - DNA, 17 bp, Arabidopsis thaliana
attatctgacagaagac

SEQ ID NO: 57332 - DNA, 17 bp, Arabidopsis thaliana
attatctgcacaagtag

SEQ ID NO: 57333 - DNA, 17 bp, Arabidopsis thaliana
attatcttggcggatct

SEQ ID NO: 57334 - DNA, 17 bp, Arabidopsis thaliana
attatgaaccgtccaac

SEQ ID NO: 57335 - DNA, 17 bp, Arabidopsis thaliana
attatgaagttccagct

SEQ ID NO: 57336 - DNA, 17 bp, Arabidopsis thaliana
attatgactgaacgccc

SEQ ID NO: 57337 - DNA, 17 bp, Arabidopsis thaliana
attatgactgaacgcct

SEQ ID NO: 57338 - DNA, 17 bp, Arabidopsis thaliana
attatgactgaagcatc

SEQ ID NO: 57339 - DNA, 17 bp, Arabidopsis thaliana
attatgactggtaaacc

SEQ ID NO: 57340 - DNA, 17 bp, Arabidopsis thaliana
attatgagcttcggtcc

SEQ ID NO: 57341 - DNA, 17 bp, Arabidopsis thaliana
attatgagcttgattgg

SEQ ID NO: 57342 - DNA, 17 bp, Arabidopsis thaliana
attatgatccgccttgt

SEQ ID NO: 57343 - DNA, 17 bp, Arabidopsis thaliana
attatgattttgcggtt

SEQ ID NO: 57344 - DNA, 17 bp, Arabidopsis thaliana
attatgcagatggcacg

SEQ ID NO: 57345 - DNA, 17 bp, Arabidopsis thaliana
attatgccacgtgtcaa

SEQ ID NO: 57346 - DNA, 17 bp, Arabidopsis thaliana
attatgcggaacacatg

SEQ ID NO: 57347 - DNA, 17 bp, Arabidopsis thaliana
attatgctccttcttgt

SEQ ID NO: 57348 - DNA, 17 bp, Arabidopsis thaliana
attatggacaattcctt

SEQ ID NO: 57349 - DNA, 17 bp, Arabidopsis thaliana
attatggaccgtccaac

SEQ ID NO: 57350 - DNA, 17 bp, Arabidopsis thaliana
attatggaccgtccaag

SEQ ID NO: 57351 - DNA, 17 bp, Arabidopsis thaliana
attatggatcgtccaac

SEQ ID NO: 57352 - DNA, 17 bp, Arabidopsis thaliana
attatggcacctagtat

SEQ ID NO: 57353 - DNA, 17 bp, Arabidopsis thaliana
attatggcattcggccc

SEQ ID NO: 57354 - DNA, 17 bp, Arabidopsis thaliana
attatgggcttcggcca

SEQ ID NO: 57355 - DNA, 17 bp, Arabidopsis thaliana
attatgggttgagttga

SEQ ID NO: 57356 - DNA, 17 bp, Arabidopsis thaliana
attatgggtttcagccc

SEQ ID NO: 57357 - DNA, 17 bp, Arabidopsis thaliana
attatgggtttcgatcc

SEQ ID NO: 57358 - DNA, 17 bp, Arabidopsis thaliana
attatgggtttcggtcc

SEQ ID NO: 57359 - DNA, 17 bp, Arabidopsis thaliana
attatggttctagatcc

SEQ ID NO: 57360 - DNA, 17 bp, Arabidopsis thaliana
attatggtttgtgctaa

SEQ ID NO: 57361 - DNA, 17 bp, Arabidopsis thaliana
attatgtagttgattca

SEQ ID NO: 57362 - DNA, 17 bp, Arabidopsis thaliana
attatgtatcaccatcc

SEQ ID NO: 57363 - DNA, 17 bp, Arabidopsis thaliana
attatgtctcaccatcc

SEQ ID NO: 57364 - DNA, 17 bp, Arabidopsis thaliana
attatgttgagcggtaa

SEQ ID NO: 57365 - DNA, 17 bp, Arabidopsis thaliana
attatgttgcagctggt

SEQ ID NO: 57366 - DNA, 17 bp, Arabidopsis thaliana
attatgttgtccccgct

SEQ ID NO: 57367 - DNA, 17 bp, Arabidopsis thaliana
attattacatgctggtc

SEQ ID NO: 57368 - DNA, 17 bp, Arabidopsis thaliana
attattagattatgggc

SEQ ID NO: 57369 - DNA, 17 bp, Arabidopsis thaliana
attattaggtgcttcgt

SEQ ID NO: 57370 - DNA, 17 bp, Arabidopsis thaliana
attattaggttcgtctc

SEQ ID NO: 57371 - DNA, 17 bp, Arabidopsis thaliana
attattatccatggcca

SEQ ID NO: 57372 - DNA, 17 bp, Arabidopsis thaliana
attattatgacatttgg

SEQ ID NO: 57373 - DNA, 17 bp, Arabidopsis thaliana
attattcacccaaaccc

SEQ ID NO: 57374 - DNA, 17 bp, Arabidopsis thaliana
attattcactggccgcg

SEQ ID NO: 57375 - DNA, 17 bp, Arabidopsis thaliana
attattccaagggtttt

SEQ ID NO: 57376 - DNA, 17 bp, Arabidopsis thaliana
attattccccctaggta

SEQ ID NO: 57377 - DNA, 17 bp, Arabidopsis thaliana
attattcgaaattccgg

SEQ ID NO: 57378 - DNA, 17 bp, Arabidopsis thaliana
attattcggcccaagtt

SEQ ID NO: 57379 - DNA, 17 bp, Arabidopsis thaliana
attattcgggttagtga

SEQ ID NO: 57380 - DNA, 17 bp, Arabidopsis thaliana
attattctgagtttctg

SEQ ID NO: 57381 - DNA, 17 bp, Arabidopsis thaliana
attattgaccggccaac

SEQ ID NO: 57382 - DNA, 17 bp, Arabidopsis thaliana
attattgcgccactata

SEQ ID NO: 57383 - DNA, 17 bp, Arabidopsis thaliana
attattgcggtgcggtt

SEQ ID NO: 57384 - DNA, 17 bp, Arabidopsis thaliana
attattgcgtcttattt

SEQ ID NO: 57385 - DNA, 17 bp, Arabidopsis thaliana
attattgctcgacgcat

SEQ ID NO: 57386 - DNA, 17 bp, Arabidopsis thaliana
attattgcttcctgtgg

SEQ ID NO: 57387 - DNA, 17 bp, Arabidopsis thaliana
attattggaccttgtgc

SEQ ID NO: 57388 - DNA, 17 bp, Arabidopsis thaliana
attattggaccttgtgt

SEQ ID NO: 57389 - DNA, 17 bp, Arabidopsis thaliana
attattgtctcatggat

SEQ ID NO: 57390 - DNA, 17 bp, Arabidopsis thaliana
attatttcctggatccg

SEQ ID NO: 57391 - DNA, 17 bp, Arabidopsis thaliana
attatttgaaccgcact

SEQ ID NO: 57392 - DNA, 17 bp, Arabidopsis thaliana
attatttgcaacaagca

SEQ ID NO: 57393 - DNA, 17 bp, Arabidopsis thaliana
attatttgctgtagcca

SEQ ID NO: 57394 - DNA, 17 bp, Arabidopsis thaliana
attatttggacgtggac

SEQ ID NO: 57395 - DNA, 17 bp, Arabidopsis thaliana
attatttgggatattcc

SEQ ID NO: 57396 - DNA, 17 bp, Arabidopsis thaliana
attcaaaactgatgatt

SEQ ID NO: 57397 - DNA, 17 bp, Arabidopsis thaliana
attcaaaatgcgggatt

SEQ ID NO: 57398 - DNA, 17 bp, Arabidopsis thaliana
attcaaacactctgtgg

SEQ ID NO: 57399 - DNA, 17 bp, Arabidopsis thaliana
attcaaaccattacgaa

SEQ ID NO: 57400 - DNA, 17 bp, Arabidopsis thaliana
attcaaagtccggttag

SEQ ID NO: 57401 - DNA, 17 bp, Arabidopsis thaliana
attcaaatctggttcta

SEQ ID NO: 57402 - DNA, 17 bp, Arabidopsis thaliana
attcaaattcgaattgg

SEQ ID NO: 57403 - DNA, 17 bp, Arabidopsis thaliana
attcaaattgcagggcg

SEQ ID NO: 57404 - DNA, 17 bp, Arabidopsis thaliana
attcaacaaatctaccg

SEQ ID NO: 57405 - DNA, 17 bp, Arabidopsis thaliana
attcaacaccctacttt

SEQ ID NO: 57406 - DNA, 17 bp, Arabidopsis thaliana
attcaacaccctcgacc

SEQ ID NO: 57407 - DNA, 17 bp, Arabidopsis thaliana
attcaacatagcgttcg

SEQ ID NO: 57408 - DNA, 17 bp, Arabidopsis thaliana
attcaacatttatttgg

SEQ ID NO: 57409 - DNA, 17 bp, Arabidopsis thaliana
attcaaccctaaatcgc

SEQ ID NO: 57410 - DNA, 17 bp, Arabidopsis thaliana
attcaacctcgtagtcg

SEQ ID NO: 57411 - DNA, 17 bp, Arabidopsis thaliana
attcaacgactattcgg

SEQ ID NO: 57412 - DNA, 17 bp, Arabidopsis thaliana
attcaacgagttcacaa

SEQ ID NO: 57413 - DNA, 17 bp, Arabidopsis thaliana
attcaacgagttcacac

SEQ ID NO: 57414 - DNA, 17 bp, Arabidopsis thaliana
attcaactcataaaacc

SEQ ID NO: 57415 - DNA, 17 bp, Arabidopsis thaliana
attcaactggatcatct

SEQ ID NO: 57416 - DNA, 17 bp, Arabidopsis thaliana
attcaacttcccctggg

SEQ ID NO: 57417 - DNA, 17 bp, Arabidopsis thaliana
attcaacttccgatgtg

SEQ ID NO: 57418 - DNA, 17 bp, Arabidopsis thaliana
attcaacttctgatgta

SEQ ID NO: 57419 - DNA, 17 bp, Arabidopsis thaliana
attcaacttctgatgtg

SEQ ID NO: 57420 - DNA, 17 bp, Arabidopsis thaliana
attcaacttgatgtgga

SEQ ID NO: 57421 - DNA, 17 bp, Arabidopsis thaliana
attcaacttgatgtggg

SEQ ID NO: 57422 - DNA, 17 bp, Arabidopsis thaliana
attcaacttggtgtgga

SEQ ID NO: 57423 - DNA, 17 bp, Arabidopsis thaliana
attcaacttggtgtgtg

SEQ ID NO: 57424 - DNA, 17 bp, Arabidopsis thaliana
attcaagaaccgatgtg

SEQ ID NO: 57425 - DNA, 17 bp, Arabidopsis thaliana
attcaagacaaaagctt

SEQ ID NO: 57426 - DNA, 17 bp, Arabidopsis thaliana
attcaagacacgttggg

SEQ ID NO: 57427 - DNA, 17 bp, Arabidopsis thaliana
attcaagagaagctgga

SEQ ID NO: 57428 - DNA, 17 bp, Arabidopsis thaliana
attcaagagacccaaag

SEQ ID NO: 57429 - DNA, 17 bp, Arabidopsis thaliana
attcaagcaaaactact

SEQ ID NO: 57430 - DNA, 17 bp, Arabidopsis thaliana
attcaagcagatgtggc

SEQ ID NO: 57431 - DNA, 17 bp, Arabidopsis thaliana
attcaagcagatgtggt

SEQ ID NO: 57432 - DNA, 17 bp, Arabidopsis thaliana
attcaagccaagtcgga

SEQ ID NO: 57433 - DNA, 17 bp, Arabidopsis thaliana
attcaagccgatcttac

SEQ ID NO: 57434 - DNA, 17 bp, Arabidopsis thaliana
attcaagcttcgcaatg

SEQ ID NO: 57435 - DNA, 17 bp, Arabidopsis thaliana
attcaaggataggagat

SEQ ID NO: 57436 - DNA, 17 bp, Arabidopsis thaliana
attcaaggccatctcca

SEQ ID NO: 57437 - DNA, 17 bp, Arabidopsis thaliana
attcaaggctcatgagt

SEQ ID NO: 57438 - DNA, 17 bp, Arabidopsis thaliana
attcaaggttcgcaatg

SEQ ID NO: 57439 - DNA, 17 bp, Arabidopsis thaliana
attcaagtcctaactac

SEQ ID NO: 57440 - DNA, 17 bp, Arabidopsis thaliana
attcaatattccgttcg

SEQ ID NO: 57441 - DNA, 17 bp, Arabidopsis thaliana
attcaatcatgttgctc

SEQ ID NO: 57442 - DNA, 17 bp, Arabidopsis thaliana
attcaatcccctcttgt

SEQ ID NO: 57443 - DNA, 17 bp, Arabidopsis thaliana
attcaatcccgatagat

SEQ ID NO: 57444 - DNA, 17 bp, Arabidopsis thaliana
attcaatccgctttgcc

SEQ ID NO: 57445 - DNA, 17 bp, Arabidopsis thaliana
attcaatcgcagatctc

SEQ ID NO: 57446 - DNA, 17 bp, Arabidopsis thaliana
attcaatgaagtcagtt

SEQ ID NO: 57447 - DNA, 17 bp, Arabidopsis thaliana
attcaatgccacttgct

SEQ ID NO: 57448 - DNA, 17 bp, Arabidopsis thaliana
attcaatgctggagtaa

SEQ ID NO: 57449 - DNA, 17 bp, Arabidopsis thaliana
attcaattgggtttgga

SEQ ID NO: 57450 - DNA, 17 bp, Arabidopsis thaliana
attcacaagagactttt

SEQ ID NO: 57451 - DNA, 17 bp, Arabidopsis thaliana
attcacaagcatgatga

SEQ ID NO: 57452 - DNA, 17 bp, Arabidopsis thaliana
attcacaaggatgtctt

SEQ ID NO: 57453 - DNA, 17 bp, Arabidopsis thaliana
attcacaatggctgcca

SEQ ID NO: 57454 - DNA, 17 bp, Arabidopsis thaliana
attcacaccaagtatcg

SEQ ID NO: 57455 - DNA, 17 bp, Arabidopsis thaliana
attcacactcttttcgg

SEQ ID NO: 57456 - DNA, 17 bp, Arabidopsis thaliana
attcacagacatgccac

SEQ ID NO: 57457 - DNA, 17 bp, Arabidopsis thaliana
attcacagacctgttat

SEQ ID NO: 57458 - DNA, 17 bp, Arabidopsis thaliana
attcacagatgatttgc

SEQ ID NO: 57459 - DNA, 17 bp, Arabidopsis thaliana
attcacaggtggtgaag

SEQ ID NO: 57460 - DNA, 17 bp, Arabidopsis thaliana
attcacagtctgtagat

SEQ ID NO: 57461 - DNA, 17 bp, Arabidopsis thaliana
attcacagtctgtaggc

SEQ ID NO: 57462 - DNA, 17 bp, Arabidopsis thaliana
attcacagtctgtaggt

SEQ ID NO: 57463 - DNA, 17 bp, Arabidopsis thaliana
attcacagttaagcaaa

SEQ ID NO: 57464 - DNA, 17 bp, Arabidopsis thaliana
attcacatagcgacaca

SEQ ID NO: 57465 - DNA, 17 bp, Arabidopsis thaliana
attcacatagcgacaga

SEQ ID NO: 57466 - DNA, 17 bp, Arabidopsis thaliana
attcacatcaccacccc

SEQ ID NO: 57467 - DNA, 17 bp, Arabidopsis thaliana
attcacatcagcttcac

SEQ ID NO: 57468 - DNA, 17 bp, Arabidopsis thaliana
attcaccaaggcgctac

SEQ ID NO: 57469 - DNA, 17 bp, Arabidopsis thaliana
attcaccaagtgttgga

SEQ ID NO: 57470 - DNA, 17 bp, Arabidopsis thaliana
attcaccaatcggtttg

SEQ ID NO: 57471 - DNA, 17 bp, Arabidopsis thaliana
attcaccaggaccactt

SEQ ID NO: 57472 - DNA, 17 bp, Arabidopsis thaliana
attcaccaggaccgctt

SEQ ID NO: 57473 - DNA, 17 bp, Arabidopsis thaliana
attcaccaggtctgaac

SEQ ID NO: 57474 - DNA, 17 bp, Arabidopsis thaliana
attcaccaggtgttaga

SEQ ID NO: 57475 - DNA, 17 bp, Arabidopsis thaliana
attcaccatcgcgggtt

SEQ ID NO: 57476 - DNA, 17 bp, Arabidopsis thaliana
attcaccatgtttcgac

SEQ ID NO: 57477 - DNA, 17 bp, Arabidopsis thaliana
attcacccctagggatg

SEQ ID NO: 57478 - DNA, 17 bp, Arabidopsis thaliana
attcacccctttgtcgc

SEQ ID NO: 57479 - DNA, 17 bp, Arabidopsis thaliana
attcaccgcacgtcgcg

SEQ ID NO: 57480 - DNA, 17 bp, Arabidopsis thaliana
attcaccgccgccgccg

SEQ ID NO: 57481 - DNA, 17 bp, Arabidopsis thaliana
attcaccgcgtgacgcc

SEQ ID NO: 57482 - DNA, 17 bp, Arabidopsis thaliana
attcaccgtatcggaat

SEQ ID NO: 57483 - DNA, 17 bp, Arabidopsis thaliana
attcaccgtttgacatt

SEQ ID NO: 57484 - DNA, 17 bp, Arabidopsis thaliana
attcacctgactgtgac

SEQ ID NO: 57485 - DNA, 17 bp, Arabidopsis thaliana
attcacctgtctgaaaa

SEQ ID NO: 57486 - DNA, 17 bp, Arabidopsis thaliana
attcacgatgatgaccg

SEQ ID NO: 57487 - DNA, 17 bp, Arabidopsis thaliana
attcacgcagtcggatg

SEQ ID NO: 57488 - DNA, 17 bp, Arabidopsis thaliana
attcacggccaacaagt

SEQ ID NO: 57489 - DNA, 17 bp, Arabidopsis thaliana
attcacggttaatttgg

SEQ ID NO: 57490 - DNA, 17 bp, Arabidopsis thaliana
attcacggttgtcacgt

SEQ ID NO: 57491 - DNA, 17 bp, Arabidopsis thaliana
attcacgtctgcctggg

SEQ ID NO: 57492 - DNA, 17 bp, Arabidopsis thaliana
attcacgttgcggatgt

SEQ ID NO: 57493 - DNA, 17 bp, Arabidopsis thaliana
attcacgttgttccttt

SEQ ID NO: 57494 - DNA, 17 bp, Arabidopsis thaliana
attcactaaattgtggc

SEQ ID NO: 57495 - DNA, 17 bp, Arabidopsis thaliana
attcactacagctggac

SEQ ID NO: 57496 - DNA, 17 bp, Arabidopsis thaliana
attcactacttggcgtt

SEQ ID NO: 57497 - DNA, 17 bp, Arabidopsis thaliana
attcactatctgcgtcg

SEQ ID NO: 57498 - DNA, 17 bp, Arabidopsis thaliana
attcactccaaattgcc

SEQ ID NO: 57499 - DNA, 17 bp, Arabidopsis thaliana
attcactcctctccgcg

SEQ ID NO: 57500 - DNA, 17 bp, Arabidopsis thaliana
attcactcgaccaatca

SEQ ID NO: 57501 - DNA, 17 bp, Arabidopsis thaliana
attcactcgacgacggg

SEQ ID NO: 57502 - DNA, 17 bp, Arabidopsis thaliana
attcactcttaaggcgg

SEQ ID NO: 57503 - DNA, 17 bp, Arabidopsis thaliana
attcactgatggcagtc

SEQ ID NO: 57504 - DNA, 17 bp, Arabidopsis thaliana
attcactgcctcttccc

SEQ ID NO: 57505 - DNA, 17 bp, Arabidopsis thaliana
attcactgcggatgaaa

SEQ ID NO: 57506 - DNA, 17 bp, Arabidopsis thaliana
attcactgctctatctg

SEQ ID NO: 57507 - DNA, 17 bp, Arabidopsis thaliana
attcactgctgcgccaa

SEQ ID NO: 57508 - DNA, 17 bp, Arabidopsis thaliana
attcactgctgcgccac

SEQ ID NO: 57509 - DNA, 17 bp, Arabidopsis thaliana
attcactggagacaagt

SEQ ID NO: 57510 - DNA, 17 bp, Arabidopsis thaliana
attcactggatcccatc

SEQ ID NO: 57511 - DNA, 17 bp, Arabidopsis thaliana
attcactggatcgtggt

SEQ ID NO: 57512 - DNA, 17 bp, Arabidopsis thaliana
attcactggtgtgatga

SEQ ID NO: 57513 - DNA, 17 bp, Arabidopsis thaliana
attcactgtttcttgcg

SEQ ID NO: 57514 - DNA, 17 bp, Arabidopsis thaliana
attcacttgcctgctat

SEQ ID NO: 57515 - DNA, 17 bp, Arabidopsis thaliana
attcacttgggcttata

SEQ ID NO: 57516 - DNA, 17 bp, Arabidopsis thaliana
attcacttgtacagcag

SEQ ID NO: 57517 - DNA, 17 bp, Arabidopsis thaliana
attcacttgttggctgt

SEQ ID NO: 57518 - DNA, 17 bp, Arabidopsis thaliana
attcagaaacgctgatg

SEQ ID NO: 57519 - DNA, 17 bp, Arabidopsis thaliana
attcagaattacccccc

SEQ ID NO: 57520 - DNA, 17 bp, Arabidopsis thaliana
attcagaatttgattca

SEQ ID NO: 57521 - DNA, 17 bp, Arabidopsis thaliana
attcagacagctgtgtt

SEQ ID NO: 57522 - DNA, 17 bp, Arabidopsis thaliana
attcagaccatccgcca

SEQ ID NO: 57523 - DNA, 17 bp, Arabidopsis thaliana
attcagaccctaaagct

SEQ ID NO: 57524 - DNA, 17 bp, Arabidopsis thaliana
attcagacctcgactcc

SEQ ID NO: 57525 - DNA, 17 bp, Arabidopsis thaliana
attcagacctggtgaag

SEQ ID NO: 57526 - DNA, 17 bp, Arabidopsis thaliana
attcagactgagatttg

SEQ ID NO: 57527 - DNA, 17 bp, Arabidopsis thaliana
attcagactgtgaaact

SEQ ID NO: 57528 - DNA, 17 bp, Arabidopsis thaliana
attcagagcccattcag

SEQ ID NO: 57529 - DNA, 17 bp, Arabidopsis thaliana
attcagagccgtgctca

SEQ ID NO: 57530 - DNA, 17 bp, Arabidopsis thaliana
attcagagccttcaacg

SEQ ID NO: 57531 - DNA, 17 bp, Arabidopsis thaliana
attcagagtgacgctta

SEQ ID NO: 57532 - DNA, 17 bp, Arabidopsis thaliana
attcagagttggtatag

SEQ ID NO: 57533 - DNA, 17 bp, Arabidopsis thaliana
attcagatcaggtgaag

SEQ ID NO: 57534 - DNA, 17 bp, Arabidopsis thaliana
attcagatcaggtgacg

SEQ ID NO: 57535 - DNA, 17 bp, Arabidopsis thaliana
attcagatcggattcgg

SEQ ID NO: 57536 - DNA, 17 bp, Arabidopsis thaliana
attcagatcgtccatgc

SEQ ID NO: 57537 - DNA, 17 bp, Arabidopsis thaliana
attcagatctggtgaat

SEQ ID NO: 57538 - DNA, 17 bp, Arabidopsis thaliana
attcagatctggtggag

SEQ ID NO: 57539 - DNA, 17 bp, Arabidopsis thaliana
attcagatttcatgacc

SEQ ID NO: 57540 - DNA, 17 bp, Arabidopsis thaliana
attcagatttgcctcgc

SEQ ID NO: 57541 - DNA, 17 bp, Arabidopsis thaliana
attcagcaccagagtct

SEQ ID NO: 57542 - DNA, 17 bp, Arabidopsis thaliana
attcagcagaggtatgg

SEQ ID NO: 57543 - DNA, 17 bp, Arabidopsis thaliana
attcagcaggacgttct

SEQ ID NO: 57544 - DNA, 17 bp, Arabidopsis thaliana
attcagcaggtcagttc

SEQ ID NO: 57545 - DNA, 17 bp, Arabidopsis thaliana
attcagcatgctctcgt

SEQ ID NO: 57546 - DNA, 17 bp, Arabidopsis thaliana
attcagccaattttgca

SEQ ID NO: 57547 - DNA, 17 bp, Arabidopsis thaliana
attcagcccagaacctt

SEQ ID NO: 57548 - DNA, 17 bp, Arabidopsis thaliana
attcagccccttgtccc

SEQ ID NO: 57549 - DNA, 17 bp, Arabidopsis thaliana
attcagccccttgtcgc

SEQ ID NO: 57550 - DNA, 17 bp, Arabidopsis thaliana
attcagccctctgtcgc

SEQ ID NO: 57551 - DNA, 17 bp, Arabidopsis thaliana
attcagcccttcatcgc

SEQ ID NO: 57552 - DNA, 17 bp, Arabidopsis thaliana
attcagcccttcctccc

SEQ ID NO: 57553 - DNA, 17 bp, Arabidopsis thaliana
attcagcccttcctcgc

SEQ ID NO: 57554 - DNA, 17 bp, Arabidopsis thaliana
attcagcccttgtcgct

SEQ ID NO: 57555 - DNA, 17 bp, Arabidopsis thaliana
attcagccctttatcgc

SEQ ID NO: 57556 - DNA, 17 bp, Arabidopsis thaliana
attcagccctttatctc

SEQ ID NO: 57557 - DNA, 17 bp, Arabidopsis thaliana
attcagccctttctccc

SEQ ID NO: 57558 - DNA, 17 bp, Arabidopsis thaliana
attcagccctttctcgc

SEQ ID NO: 57559 - DNA, 17 bp, Arabidopsis thaliana
attcagccctttgccgc

SEQ ID NO: 57560 - DNA, 17 bp, Arabidopsis thaliana
attcagccctttgtcac

SEQ ID NO: 57561 - DNA, 17 bp, Arabidopsis thaliana
attcagccctttgtccc

SEQ ID NO: 57562 - DNA, 17 bp, Arabidopsis thaliana
attcagccctttgtcct

SEQ ID NO: 57563 - DNA, 17 bp, Arabidopsis thaliana
attcagccctttgtcgc

SEQ ID NO: 57564 - DNA, 17 bp, Arabidopsis thaliana
attcagccctttgtcgg

SEQ ID NO: 57565 - DNA, 17 bp, Arabidopsis thaliana
attcagccctttgtctc

SEQ ID NO: 57566 - DNA, 17 bp, Arabidopsis thaliana
attcagccctttgttgc

SEQ ID NO: 57567 - DNA, 17 bp, Arabidopsis thaliana
attcagcctgtcgctaa

SEQ ID NO: 57568 - DNA, 17 bp, Arabidopsis thaliana
attcagccttagccctg

SEQ ID NO: 57569 - DNA, 17 bp, Arabidopsis thaliana
attcagcctttgtcgct

SEQ ID NO: 57570 - DNA, 17 bp, Arabidopsis thaliana
attcagccttttgtcgc

SEQ ID NO: 57571 - DNA, 17 bp, Arabidopsis thaliana
attcagcgagcggtgaa

SEQ ID NO: 57572 - DNA, 17 bp, Arabidopsis thaliana
attcagcgatgagtatc

SEQ ID NO: 57573 - DNA, 17 bp, Arabidopsis thaliana
attcagcgctctgtagt

SEQ ID NO: 57574 - DNA, 17 bp, Arabidopsis thaliana
attcagcgtgcttctac

SEQ ID NO: 57575 - DNA, 17 bp, Arabidopsis thaliana
attcagctcctgttgca

SEQ ID NO: 57576 - DNA, 17 bp, Arabidopsis thaliana
attcagctcgccaatga

SEQ ID NO: 57577 - DNA, 17 bp, Arabidopsis thaliana
attcagctgagtttgat

SEQ ID NO: 57578 - DNA, 17 bp, Arabidopsis thaliana
attcagcttttgtcgct

SEQ ID NO: 57579 - DNA, 17 bp, Arabidopsis thaliana
attcagctttttgtcgc

SEQ ID NO: 57580 - DNA, 17 bp, Arabidopsis thaliana
attcaggaaccgacgtg

SEQ ID NO: 57581 - DNA, 17 bp, Arabidopsis thaliana
attcaggaaccgatgtg

SEQ ID NO: 57582 - DNA, 17 bp, Arabidopsis thaliana
attcaggaaggtccgtt

SEQ ID NO: 57583 - DNA, 17 bp, Arabidopsis thaliana
attcaggaccgatccaa

SEQ ID NO: 57584 - DNA, 17 bp, Arabidopsis thaliana
attcaggagatgagtta

SEQ ID NO: 57585 - DNA, 17 bp, Arabidopsis thaliana
attcaggagattcttag

SEQ ID NO: 57586 - DNA, 17 bp, Arabidopsis thaliana
attcaggaggttctggg

SEQ ID NO: 57587 - DNA, 17 bp, Arabidopsis thaliana
attcaggatgtgtcaga

SEQ ID NO: 57588 - DNA, 17 bp, Arabidopsis thaliana
attcaggattggcaatg

SEQ ID NO: 57589 - DNA, 17 bp, Arabidopsis thaliana
attcagggaatcgactt

SEQ ID NO: 57590 - DNA, 17 bp, Arabidopsis thaliana
attcagggatactggga

SEQ ID NO: 57591 - DNA, 17 bp, Arabidopsis thaliana
attcagggcctgaatct

SEQ ID NO: 57592 - DNA, 17 bp, Arabidopsis thaliana
attcagggctggtccga

SEQ ID NO: 57593 - DNA, 17 bp, Arabidopsis thaliana
attcaggtcactgtggc

SEQ ID NO: 57594 - DNA, 17 bp, Arabidopsis thaliana
attcaggtcatatggtg

SEQ ID NO: 57595 - DNA, 17 bp, Arabidopsis thaliana
attcaggtccaaaggtt

SEQ ID NO: 57596 - DNA, 17 bp, Arabidopsis thaliana
attcaggtcgcgcctta

SEQ ID NO: 57597 - DNA, 17 bp, Arabidopsis thaliana
attcaggtgccatgtaa

SEQ ID NO: 57598 - DNA, 17 bp, Arabidopsis thaliana
attcaggttcaaaggcc

SEQ ID NO: 57599 - DNA, 17 bp, Arabidopsis thaliana
attcaggtttatccgca

SEQ ID NO: 57600 - DNA, 17 bp, Arabidopsis thaliana
attcaggttttgtgttt

SEQ ID NO: 57601 - DNA, 17 bp, Arabidopsis thaliana
attcagtacttacggtt

SEQ ID NO: 57602 - DNA, 17 bp, Arabidopsis thaliana
attcagtcaccaaagga

SEQ ID NO: 57603 - DNA, 17 bp, Arabidopsis thaliana
attcagtccgatttttt

SEQ ID NO: 57604 - DNA, 17 bp, Arabidopsis thaliana
attcagtcctttgtcgc

SEQ ID NO: 57605 - DNA, 17 bp, Arabidopsis thaliana
attcagtctctcccctg

SEQ ID NO: 57606 - DNA, 17 bp, Arabidopsis thaliana
attcagtgaaatgacaa

SEQ ID NO: 57607 - DNA, 17 bp, Arabidopsis thaliana
attcagtgattgcagtt

SEQ ID NO: 57608 - DNA, 17 bp, Arabidopsis thaliana
attcagtgcatttctac

SEQ ID NO: 57609 - DNA, 17 bp, Arabidopsis thaliana
attcagtggacacatgg

SEQ ID NO: 57610 - DNA, 17 bp, Arabidopsis thaliana
attcagtggctctcttt

SEQ ID NO: 57611 - DNA, 17 bp, Arabidopsis thaliana
attcagttctttgtcgc

SEQ ID NO: 57612 - DNA, 17 bp, Arabidopsis thaliana
attcagttgccgtagac

SEQ ID NO: 57613 - DNA, 17 bp, Arabidopsis thaliana
attcagttgccgtagcc

SEQ ID NO: 57614 - DNA, 17 bp, Arabidopsis thaliana
attcagttgcgtagacc

SEQ ID NO: 57615 - DNA, 17 bp, Arabidopsis thaliana
attcagtttcacgggct

SEQ ID NO: 57616 - DNA, 17 bp, Arabidopsis thaliana
attcagtttgaaagtgg

SEQ ID NO: 57617 - DNA, 17 bp, Arabidopsis thaliana
attcagtttgaccagaa

SEQ ID NO: 57618 - DNA, 17 bp, Arabidopsis thaliana
attcagtttgataactc

SEQ ID NO: 57619 - DNA, 17 bp, Arabidopsis thaliana
attcagtttgggtcaac

SEQ ID NO: 57620 - DNA, 17 bp, Arabidopsis thaliana
attcatacgacatgacc

SEQ ID NO: 57621 - DNA, 17 bp, Arabidopsis thaliana
attcatacgattgtgcc

SEQ ID NO: 57622 - DNA, 17 bp, Arabidopsis thaliana
attcatactaaaccgct

SEQ ID NO: 57623 - DNA, 17 bp, Arabidopsis thaliana
attcatactgaaaaggc

SEQ ID NO: 57624 - DNA, 17 bp, Arabidopsis thaliana
attcataggacactgtt

SEQ ID NO: 57625 - DNA, 17 bp, Arabidopsis thaliana
attcataggaccgtgcc

SEQ ID NO: 57626 - DNA, 17 bp, Arabidopsis thaliana
attcataggatagtgcc

SEQ ID NO: 57627 - DNA, 17 bp, Arabidopsis thaliana
attcataggatcgtgcc

SEQ ID NO: 57628 - DNA, 17 bp, Arabidopsis thaliana
attcataggatcgtgtc

SEQ ID NO: 57629 - DNA, 17 bp, Arabidopsis thaliana
attcataggattatgcc

SEQ ID NO: 57630 - DNA, 17 bp, Arabidopsis thaliana
attcataggattgtccc

SEQ ID NO: 57631 - DNA, 17 bp, Arabidopsis thaliana
attcataggattgtgcc

SEQ ID NO: 57632 - DNA, 17 bp, Arabidopsis thaliana
attcatagggttatgcc

SEQ ID NO: 57633 - DNA, 17 bp, Arabidopsis thaliana
attcataggtcaactca

SEQ ID NO: 57634 - DNA, 17 bp, Arabidopsis thaliana
attcatatgcggatagt

SEQ ID NO: 57635 - DNA, 17 bp, Arabidopsis thaliana
attcatatggagagagt

SEQ ID NO: 57636 - DNA, 17 bp, Arabidopsis thaliana
attcatatgtgttgact

SEQ ID NO: 57637 - DNA, 17 bp, Arabidopsis thaliana
attcatcaaaatttttg

SEQ ID NO: 57638 - DNA, 17 bp, Arabidopsis thaliana
attcatcaacccgtctg

SEQ ID NO: 57639 - DNA, 17 bp, Arabidopsis thaliana
attcatcacaggcttgt

SEQ ID NO: 57640 - DNA, 17 bp, Arabidopsis thaliana
attcatcaccatcgccg

SEQ ID NO: 57641 - DNA, 17 bp, Arabidopsis thaliana
attcatcacgcgatatc

SEQ ID NO: 57642 - DNA, 17 bp, Arabidopsis thaliana
attcatcagcatgaccg

SEQ ID NO: 57643 - DNA, 17 bp, Arabidopsis thaliana
attcatcagcatgatcg

SEQ ID NO: 57644 - DNA, 17 bp, Arabidopsis thaliana
attcatcaggccgagta

SEQ ID NO: 57645 - DNA, 17 bp, Arabidopsis thaliana
attcatcatccttgttg

SEQ ID NO: 57646 - DNA, 17 bp, Arabidopsis thaliana
attcatcatctggtcac

SEQ ID NO: 57647 - DNA, 17 bp, Arabidopsis thaliana
attcatcatttaaagct

SEQ ID NO: 57648 - DNA, 17 bp, Arabidopsis thaliana
attcatccaagactggt

SEQ ID NO: 57649 - DNA, 17 bp, Arabidopsis thaliana
attcatccatcctccct

SEQ ID NO: 57650 - DNA, 17 bp, Arabidopsis thaliana
attcatccgctattctt

SEQ ID NO: 57651 - DNA, 17 bp, Arabidopsis thaliana
attcatcctccggtcac

SEQ ID NO: 57652 - DNA, 17 bp, Arabidopsis thaliana
attcatcgatcacggca

SEQ ID NO: 57653 - DNA, 17 bp, Arabidopsis thaliana
attcatcgcctaagatt

SEQ ID NO: 57654 - DNA, 17 bp, Arabidopsis thaliana
attcatcgcggtttctt

SEQ ID NO: 57655 - DNA, 17 bp, Arabidopsis thaliana
attcatcggctatcatc

SEQ ID NO: 57656 - DNA, 17 bp, Arabidopsis thaliana
attcatcggtctaggcc

SEQ ID NO: 57657 - DNA, 17 bp, Arabidopsis thaliana
attcatctcatgagcac

SEQ ID NO: 57658 - DNA, 17 bp, Arabidopsis thaliana
attcatctgcggtttag

SEQ ID NO: 57659 - DNA, 17 bp, Arabidopsis thaliana
attcatctgtagaactt

SEQ ID NO: 57660 - DNA, 17 bp, Arabidopsis thaliana
attcatcttagtgagac

SEQ ID NO: 57661 - DNA, 17 bp, Arabidopsis thaliana
attcatcttagtgggac

SEQ ID NO: 57662 - DNA, 17 bp, Arabidopsis thaliana
attcatcttcttcagat

SEQ ID NO: 57663 - DNA, 17 bp, Arabidopsis thaliana
attcatctttccttcgg

SEQ ID NO: 57664 - DNA, 17 bp, Arabidopsis thaliana
attcatctttgtgtgac

SEQ ID NO: 57665 - DNA, 17 bp, Arabidopsis thaliana
attcatcttttcgctgc

SEQ ID NO: 57666 - DNA, 17 bp, Arabidopsis thaliana
attcatgataactcgac

SEQ ID NO: 57667 - DNA, 17 bp, Arabidopsis thaliana
attcatgataattcgac

SEQ ID NO: 57668 - DNA, 17 bp, Arabidopsis thaliana
attcatgcaactctgtt

SEQ ID NO: 57669 - DNA, 17 bp, Arabidopsis thaliana
attcatgcccatgggta

SEQ ID NO: 57670 - DNA, 17 bp, Arabidopsis thaliana
attcatgctcatgggca

SEQ ID NO: 57671 - DNA, 17 bp, Arabidopsis thaliana
attcatggacgttgtta

SEQ ID NO: 57672 - DNA, 17 bp, Arabidopsis thaliana
attcatggacttcttcc

SEQ ID NO: 57673 - DNA, 17 bp, Arabidopsis thaliana
attcatggggcttggtt

SEQ ID NO: 57674 - DNA, 17 bp, Arabidopsis thaliana
attcatggtgcacttgc

SEQ ID NO: 57675 - DNA, 17 bp, Arabidopsis thaliana
attcatgtccatgggca

SEQ ID NO: 57676 - DNA, 17 bp, Arabidopsis thaliana
attcatgtgtgcggccc

SEQ ID NO: 57677 - DNA, 17 bp, Arabidopsis thaliana
attcattaagtaacgtc

SEQ ID NO: 57678 - DNA, 17 bp, Arabidopsis thaliana
attcattacaattgtca

SEQ ID NO: 57679 - DNA, 17 bp, Arabidopsis thaliana
attcattacatgctatg

SEQ ID NO: 57680 - DNA, 17 bp, Arabidopsis thaliana
attcattacatgtcgtg

SEQ ID NO: 57681 - DNA, 17 bp, Arabidopsis thaliana
attcattaccaccgagc

SEQ ID NO: 57682 - DNA, 17 bp, Arabidopsis thaliana
attcattacgggcttcg

SEQ ID NO: 57683 - DNA, 17 bp, Arabidopsis thaliana
attcattacgggtttcg

SEQ ID NO: 57684 - DNA, 17 bp, Arabidopsis thaliana
attcattactggctgcg

SEQ ID NO: 57685 - DNA, 17 bp, Arabidopsis thaliana
attcattagaagagtga

SEQ ID NO: 57686 - DNA, 17 bp, Arabidopsis thaliana
attcattagatggtagg

SEQ ID NO: 57687 - DNA, 17 bp, Arabidopsis thaliana
attcattaggcccaggt

SEQ ID NO: 57688 - DNA, 17 bp, Arabidopsis thaliana
attcattaggctaaggt

SEQ ID NO: 57689 - DNA, 17 bp, Arabidopsis thaliana
attcattagtaagtcgg

SEQ ID NO: 57690 - DNA, 17 bp, Arabidopsis thaliana
attcattatcagctcac

SEQ ID NO: 57691 - DNA, 17 bp, Arabidopsis thaliana
attcattatctgcgctt

SEQ ID NO: 57692 - DNA, 17 bp, Arabidopsis thaliana
attcattatgaaccgtc

SEQ ID NO: 57693 - DNA, 17 bp, Arabidopsis thaliana
attcattatgatcaaga

SEQ ID NO: 57694 - DNA, 17 bp, Arabidopsis thaliana
attcattcaccgccgcc

SEQ ID NO: 57695 - DNA, 17 bp, Arabidopsis thaliana
attcattcacgatttta

SEQ ID NO: 57696 - DNA, 17 bp, Arabidopsis thaliana
attcattcagacctggt

SEQ ID NO: 57697 - DNA, 17 bp, Arabidopsis thaliana
attcattcagagcccat

SEQ ID NO: 57698 - DNA, 17 bp, Arabidopsis thaliana
attcattcagcccttcc

SEQ ID NO: 57699 - DNA, 17 bp, Arabidopsis thaliana
attcattcaggtcatat

SEQ ID NO: 57700 - DNA, 17 bp, Arabidopsis thaliana
attcattcaggtcgcgc

SEQ ID NO: 57701 - DNA, 17 bp, Arabidopsis thaliana
attcattcataggatag

SEQ ID NO: 57702 - DNA, 17 bp, Arabidopsis thaliana
attcattcataggatcg

SEQ ID NO: 57703 - DNA, 17 bp, Arabidopsis thaliana
attcattcatcgttgta

SEQ ID NO: 57704 - DNA, 17 bp, Arabidopsis thaliana
attcattcattcctcag

SEQ ID NO: 57705 - DNA, 17 bp, Arabidopsis thaliana
attcattccacactcat

SEQ ID NO: 57706 - DNA, 17 bp, Arabidopsis thaliana
attcattccacagtgtt

SEQ ID NO: 57707 - DNA, 17 bp, Arabidopsis thaliana
attcattcccactgtcc

SEQ ID NO: 57708 - DNA, 17 bp, Arabidopsis thaliana
attcattcccatgcgtc

SEQ ID NO: 57709 - DNA, 17 bp, Arabidopsis thaliana
attcattccgcagggag

SEQ ID NO: 57710 - DNA, 17 bp, Arabidopsis thaliana
attcattcctcaggatt

SEQ ID NO: 57711 - DNA, 17 bp, Arabidopsis thaliana
attcattcctctggatt

SEQ ID NO: 57712 - DNA, 17 bp, Arabidopsis thaliana
attcattcctgaccatt

SEQ ID NO: 57713 - DNA, 17 bp, Arabidopsis thaliana
attcattcgaactacgg

SEQ ID NO: 57714 - DNA, 17 bp, Arabidopsis thaliana
attcattcgactcttgt

SEQ ID NO: 57715 - DNA, 17 bp, Arabidopsis thaliana
attcattcgatgtcgta

SEQ ID NO: 57716 - DNA, 17 bp, Arabidopsis thaliana
attcattcgctcaaact

SEQ ID NO: 57717 - DNA, 17 bp, Arabidopsis thaliana
attcattcgggcagagt

SEQ ID NO: 57718 - DNA, 17 bp, Arabidopsis thaliana
attcattcggggcgtgg

SEQ ID NO: 57719 - DNA, 17 bp, Arabidopsis thaliana
attcattctaaaccatt

SEQ ID NO: 57720 - DNA, 17 bp, Arabidopsis thaliana
attcattctatgggtgc

SEQ ID NO: 57721 - DNA, 17 bp, Arabidopsis thaliana
attcattctcaagttgg

SEQ ID NO: 57722 - DNA, 17 bp, Arabidopsis thaliana
attcattctcatcaaat

SEQ ID NO: 57723 - DNA, 17 bp, Arabidopsis thaliana
attcattctctcaaaac

SEQ ID NO: 57724 - DNA, 17 bp, Arabidopsis thaliana
attcattctgaactcag

SEQ ID NO: 57725 - DNA, 17 bp, Arabidopsis thaliana
attcattctgaagttgt

SEQ ID NO: 57726 - DNA, 17 bp, Arabidopsis thaliana
attcattctgacgtggc

SEQ ID NO: 57727 - DNA, 17 bp, Arabidopsis thaliana
attcattctgctgcgaa

SEQ ID NO: 57728 - DNA, 17 bp, Arabidopsis thaliana
attcattctgtcagttg

SEQ ID NO: 57729 - DNA, 17 bp, Arabidopsis thaliana
attcattcttacgcctt

SEQ ID NO: 57730 - DNA, 17 bp, Arabidopsis thaliana
attcattgaaattctcc

SEQ ID NO: 57731 - DNA, 17 bp, Arabidopsis thaliana
attcattgaataagcca

SEQ ID NO: 57732 - DNA, 17 bp, Arabidopsis thaliana
attcattgactttttgt

SEQ ID NO: 57733 - DNA, 17 bp, Arabidopsis thaliana
attcattgagtaaccag

SEQ ID NO: 57734 - DNA, 17 bp, Arabidopsis thaliana
attcattgcaggccaca

SEQ ID NO: 57735 - DNA, 17 bp, Arabidopsis thaliana
attcattgccagacgca

SEQ ID NO: 57736 - DNA, 17 bp, Arabidopsis thaliana
attcattgcgatggtcc

SEQ ID NO: 57737 - DNA, 17 bp, Arabidopsis thaliana
attcattgctggatttg

SEQ ID NO: 57738 - DNA, 17 bp, Arabidopsis thaliana
attcattggaacccggt

SEQ ID NO: 57739 - DNA, 17 bp, Arabidopsis thaliana
attcattgggatccttc

SEQ ID NO: 57740 - DNA, 17 bp, Arabidopsis thaliana
attcattgggatgggtc

SEQ ID NO: 57741 - DNA, 17 bp, Arabidopsis thaliana
attcattgggttccttc

SEQ ID NO: 57742 - DNA, 17 bp, Arabidopsis thaliana
attcattggtcggcttg

SEQ ID NO: 57743 - DNA, 17 bp, Arabidopsis thaliana
attcattgtatccaact

SEQ ID NO: 57744 - DNA, 17 bp, Arabidopsis thaliana
attcattgtcaggtggg

SEQ ID NO: 57745 - DNA, 17 bp, Arabidopsis thaliana
attcattgtcggacccg

SEQ ID NO: 57746 - DNA, 17 bp, Arabidopsis thaliana
attcattgtcggaggtg

SEQ ID NO: 57747 - DNA, 17 bp, Arabidopsis thaliana
attcattgttggcgccg

SEQ ID NO: 57748 - DNA, 17 bp, Arabidopsis thaliana
attcattgtttgtcagg

SEQ ID NO: 57749 - DNA, 17 bp, Arabidopsis thaliana
attcatttaaccgggat

SEQ ID NO: 57750 - DNA, 17 bp, Arabidopsis thaliana
attcatttacaatggct

SEQ ID NO: 57751 - DNA, 17 bp, Arabidopsis thaliana
attcatttcaaagtcca

SEQ ID NO: 57752 - DNA, 17 bp, Arabidopsis thaliana
attcatttcagagtgga

SEQ ID NO: 57753 - DNA, 17 bp, Arabidopsis thaliana
attcatttcattgctca

SEQ ID NO: 57754 - DNA, 17 bp, Arabidopsis thaliana
attcatttccagagaat

SEQ ID NO: 57755 - DNA, 17 bp, Arabidopsis thaliana
attcatttccgtggtta

SEQ ID NO: 57756 - DNA, 17 bp, Arabidopsis thaliana
attcatttcctaagatc

SEQ ID NO: 57757 - DNA, 17 bp, Arabidopsis thaliana
attcatttcctcgccag

SEQ ID NO: 57758 - DNA, 17 bp, Arabidopsis thaliana
attcatttcctttctca

SEQ ID NO: 57759 - DNA, 17 bp, Arabidopsis thaliana
attcatttcgtttcgcc

SEQ ID NO: 57760 - DNA, 17 bp, Arabidopsis thaliana
attcatttctttccgac

SEQ ID NO: 57761 - DNA, 17 bp, Arabidopsis thaliana
attcatttctttgctga

SEQ ID NO: 57762 - DNA, 17 bp, Arabidopsis thaliana
attcatttcttttggtc

SEQ ID NO: 57763 - DNA, 17 bp, Arabidopsis thaliana
attcatttgaaccgcac

SEQ ID NO: 57764 - DNA, 17 bp, Arabidopsis thaliana
attcatttgcctgtcgc

SEQ ID NO: 57765 - DNA, 17 bp, Arabidopsis thaliana
attcatttggacctcca

SEQ ID NO: 57766 - DNA, 17 bp, Arabidopsis thaliana
attcatttggagagaat

SEQ ID NO: 57767 - DNA, 17 bp, Arabidopsis thaliana
attcatttggagagagt

SEQ ID NO: 57768 - DNA, 17 bp, Arabidopsis thaliana
attcatttgggctatat

SEQ ID NO: 57769 - DNA, 17 bp, Arabidopsis thaliana
attcatttgggttgcct

SEQ ID NO: 57770 - DNA, 17 bp, Arabidopsis thaliana
attcatttgtgcgcttg

SEQ ID NO: 57771 - DNA, 17 bp, Arabidopsis thaliana
attcatttgtgctatat

SEQ ID NO: 57772 - DNA, 17 bp, Arabidopsis thaliana
attcatttgtggaacac

SEQ ID NO: 57773 - DNA, 17 bp, Arabidopsis thaliana
attcatttgtgtcaacc

SEQ ID NO: 57774 - DNA, 17 bp, Arabidopsis thaliana
attcattttagagtttc

SEQ ID NO: 57775 - DNA, 17 bp, Arabidopsis thaliana
attcattttagtaggca

SEQ ID NO: 57776 - DNA, 17 bp, Arabidopsis thaliana
attcattttcaatggat

SEQ ID NO: 57777 - DNA, 17 bp, Arabidopsis thaliana
attcattttccacaaaa

SEQ ID NO: 57778 - DNA, 17 bp, Arabidopsis thaliana
attcattttcgccatct

SEQ ID NO: 57779 - DNA, 17 bp, Arabidopsis thaliana
attcattttctaagatc

SEQ ID NO: 57780 - DNA, 17 bp, Arabidopsis thaliana
attcattttgcaatcgt

SEQ ID NO: 57781 - DNA, 17 bp, Arabidopsis thaliana
attcattttggcgttca

SEQ ID NO: 57782 - DNA, 17 bp, Arabidopsis thaliana
attcattttgtgccatc

SEQ ID NO: 57783 - DNA, 17 bp, Arabidopsis thaliana
attcattttgtgtttaa

SEQ ID NO: 57784 - DNA, 17 bp, Arabidopsis thaliana
attcatttttccgccaa

SEQ ID NO: 57785 - DNA, 17 bp, Arabidopsis thaliana
attcatttttccggata

SEQ ID NO: 57786 - DNA, 17 bp, Arabidopsis thaliana
attcatttttgactcgt

SEQ ID NO: 57787 - DNA, 17 bp, Arabidopsis thaliana
attcatttttgcagcca

SEQ ID NO: 57788 - DNA, 17 bp, Arabidopsis thaliana
attcattttttccgctg

SEQ ID NO: 57789 - DNA, 17 bp, Arabidopsis thaliana
attcattttttgttgct

SEQ ID NO: 57790 - DNA, 17 bp, Arabidopsis thaliana
attccaaaacattgatc

SEQ ID NO: 57791 - DNA, 17 bp, Arabidopsis thaliana
attccaaaacgaaatcc

SEQ ID NO: 57792 - DNA, 17 bp, Arabidopsis thaliana
attccaaaagaggctcg

SEQ ID NO: 57793 - DNA, 17 bp, Arabidopsis thaliana
attccaaaataaaaccc

SEQ ID NO: 57794 - DNA, 17 bp, Arabidopsis thaliana
attccaaaccagcaagt

SEQ ID NO: 57795 - DNA, 17 bp, Arabidopsis thaliana
attccaaactcgggaca

SEQ ID NO: 57796 - DNA, 17 bp, Arabidopsis thaliana
attccaaatttgaaagt

SEQ ID NO: 57797 - DNA, 17 bp, Arabidopsis thaliana
attccaaatttgttagg

SEQ ID NO: 57798 - DNA, 17 bp, Arabidopsis thaliana
attccaacaaggaaact

SEQ ID NO: 57799 - DNA, 17 bp, Arabidopsis thaliana
attccaaccttgagttt

SEQ ID NO: 57800 - DNA, 17 bp, Arabidopsis thaliana
attccaacgtgtaggaa

SEQ ID NO: 57801 - DNA, 17 bp, Arabidopsis thaliana
attccaactgtgaatga

SEQ ID NO: 57802 - DNA, 17 bp, Arabidopsis thaliana
attccaagatcgttgat

SEQ ID NO: 57803 - DNA, 17 bp, Arabidopsis thaliana
attccaagatgagtctg

SEQ ID NO: 57804 - DNA, 17 bp, Arabidopsis thaliana
attccaaggatgacttg

SEQ ID NO: 57805 - DNA, 17 bp, Arabidopsis thaliana
attccaagggcgttgga

SEQ ID NO: 57806 - DNA, 17 bp, Arabidopsis thaliana
attccaagtttacttct

SEQ ID NO: 57807 - DNA, 17 bp, Arabidopsis thaliana
attccaatgacagtgct

SEQ ID NO: 57808 - DNA, 17 bp, Arabidopsis thaliana
attccaatgccacttac

SEQ ID NO: 57809 - DNA, 17 bp, Arabidopsis thaliana
attccacaaagctctca

SEQ ID NO: 57810 - DNA, 17 bp, Arabidopsis thaliana
attccacactcatctgg

SEQ ID NO: 57811 - DNA, 17 bp, Arabidopsis thaliana
attccacaggatccagg

SEQ ID NO: 57812 - DNA, 17 bp, Arabidopsis thaliana
attccacagtgaagcgc

SEQ ID NO: 57813 - DNA, 17 bp, Arabidopsis thaliana
attccacagtgttctga

SEQ ID NO: 57814 - DNA, 17 bp, Arabidopsis thaliana
attccacatattgcgtt

SEQ ID NO: 57815 - DNA, 17 bp, Arabidopsis thaliana
attccacccgcctaggt

SEQ ID NO: 57816 - DNA, 17 bp, Arabidopsis thaliana
attccacccggatgatc

SEQ ID NO: 57817 - DNA, 17 bp, Arabidopsis thaliana
attccaccgaggagtgt

SEQ ID NO: 57818 - DNA, 17 bp, Arabidopsis thaliana
attccacgacgcaccat

SEQ ID NO: 57819 - DNA, 17 bp, Arabidopsis thaliana
attccacgatcacactt

SEQ ID NO: 57820 - DNA, 17 bp, Arabidopsis thaliana
attccacgccaaaattg

SEQ ID NO: 57821 - DNA, 17 bp, Arabidopsis thaliana
attccacggtgttaatg

SEQ ID NO: 57822 - DNA, 17 bp, Arabidopsis thaliana
attccacgtagaccaaa

SEQ ID NO: 57823 - DNA, 17 bp, Arabidopsis thaliana
attccacgtggaccaaa

SEQ ID NO: 57824 - DNA, 17 bp, Arabidopsis thaliana
attccactaagtcgcgt

SEQ ID NO: 57825 - DNA, 17 bp, Arabidopsis thaliana
attccactatcccaccc

SEQ ID NO: 57826 - DNA, 17 bp, Arabidopsis thaliana
attccactatccggacc

SEQ ID NO: 57827 - DNA, 17 bp, Arabidopsis thaliana
attccactcttcttcct

SEQ ID NO: 57828 - DNA, 17 bp, Arabidopsis thaliana
attccactgacttttgt

SEQ ID NO: 57829 - DNA, 17 bp, Arabidopsis thaliana
attccacttattccgcc

SEQ ID NO: 57830 - DNA, 17 bp, Arabidopsis thaliana
attccacttctcctcga

SEQ ID NO: 57831 - DNA, 17 bp, Arabidopsis thaliana
attccacttgtttcaat

SEQ ID NO: 57832 - DNA, 17 bp, Arabidopsis thaliana
attccagacgagataga

SEQ ID NO: 57833 - DNA, 17 bp, Arabidopsis thaliana
attccagcaggttacag

SEQ ID NO: 57834 - DNA, 17 bp, Arabidopsis thaliana
attccagcgcacccgaa

SEQ ID NO: 57835 - DNA, 17 bp, Arabidopsis thaliana
attccagcgtcaccaga

SEQ ID NO: 57836 - DNA, 17 bp, Arabidopsis thaliana
attccagcgtctacgga

SEQ ID NO: 57837 - DNA, 17 bp, Arabidopsis thaliana
attccagctacacaaac

SEQ ID NO: 57838 - DNA, 17 bp, Arabidopsis thaliana
attccaggagcatatca

SEQ ID NO: 57839 - DNA, 17 bp, Arabidopsis thaliana
attccaggaggttttgg

SEQ ID NO: 57840 - DNA, 17 bp, Arabidopsis thaliana
attccagggagtctaca

SEQ ID NO: 57841 - DNA, 17 bp, Arabidopsis thaliana
attccagggtgtatcgt

SEQ ID NO: 57842 - DNA, 17 bp, Arabidopsis thaliana
attccaggttcgcaatg

SEQ ID NO: 57843 - DNA, 17 bp, Arabidopsis thaliana
attccagtcagggccgg

SEQ ID NO: 57844 - DNA, 17 bp, Arabidopsis thaliana
attccagtgactcttct

SEQ ID NO: 57845 - DNA, 17 bp, Arabidopsis thaliana
attccagttcttaggtt

SEQ ID NO: 57846 - DNA, 17 bp, Arabidopsis thaliana
attccagttcttcggtt

SEQ ID NO: 57847 - DNA, 17 bp, Arabidopsis thaliana
attccagtttcgacgag

SEQ ID NO: 57848 - DNA, 17 bp, Arabidopsis thaliana
attccagttttcagtat

SEQ ID NO: 57849 - DNA, 17 bp, Arabidopsis thaliana
attccataatcaccacc

SEQ ID NO: 57850 - DNA, 17 bp, Arabidopsis thaliana
attccatagaattcaag

SEQ ID NO: 57851 - DNA, 17 bp, Arabidopsis thaliana
attccatagggatgtca

SEQ ID NO: 57852 - DNA, 17 bp, Arabidopsis thaliana
attccatatggacaatg

SEQ ID NO: 57853 - DNA, 17 bp, Arabidopsis thaliana
attccatccatcgctag

SEQ ID NO: 57854 - DNA, 17 bp, Arabidopsis thaliana
attccatccatcggtag

SEQ ID NO: 57855 - DNA, 17 bp, Arabidopsis thaliana
attccatcgggttcgag

SEQ ID NO: 57856 - DNA, 17 bp, Arabidopsis thaliana
attccatcgttctgatg

SEQ ID NO: 57857 - DNA, 17 bp, Arabidopsis thaliana
attccatctactcttaa

SEQ ID NO: 57858 - DNA, 17 bp, Arabidopsis thaliana
attccatctactttggt

SEQ ID NO: 57859 - DNA, 17 bp, Arabidopsis thaliana
attccatctgcgaatgt

SEQ ID NO: 57860 - DNA, 17 bp, Arabidopsis thaliana
attccatgaggttctgg

SEQ ID NO: 57861 - DNA, 17 bp, Arabidopsis thaliana
attccatgatctgtgag

SEQ ID NO: 57862 - DNA, 17 bp, Arabidopsis thaliana
attccatggaacccaat

SEQ ID NO: 57863 - DNA, 17 bp, Arabidopsis thaliana
attccatgggatgtgtg

SEQ ID NO: 57864 - DNA, 17 bp, Arabidopsis thaliana
attccattgcgggtgaa

SEQ ID NO: 57865 - DNA, 17 bp, Arabidopsis thaliana
attccattggttggtga

SEQ ID NO: 57866 - DNA, 17 bp, Arabidopsis thaliana
attccatttccaacggt

SEQ ID NO: 57867 - DNA, 17 bp, Arabidopsis thaliana
attccatttcggtagca

SEQ ID NO: 57868 - DNA, 17 bp, Arabidopsis thaliana
attccatttgaggcact

SEQ ID NO: 57869 - DNA, 17 bp, Arabidopsis thaliana
attccatttgcactagc

SEQ ID NO: 57870 - DNA, 17 bp, Arabidopsis thaliana
attccatttgctcgttg

SEQ ID NO: 57871 - DNA, 17 bp, Arabidopsis thaliana
attcccaactcggttcg

SEQ ID NO: 57872 - DNA, 17 bp, Arabidopsis thaliana
attcccacgctactgtc

SEQ ID NO: 57873 - DNA, 17 bp, Arabidopsis thaliana
attcccacggaggagcc

SEQ ID NO: 57874 - DNA, 17 bp, Arabidopsis thaliana
attcccactgtccctgt

SEQ ID NO: 57875 - DNA, 17 bp, Arabidopsis thaliana
attcccagagaattggt

SEQ ID NO: 57876 - DNA, 17 bp, Arabidopsis thaliana
attcccagctcgtcgcg

SEQ ID NO: 57877 - DNA, 17 bp, Arabidopsis thaliana
attcccaggctttacac

SEQ ID NO: 57878 - DNA, 17 bp, Arabidopsis thaliana
attcccatagctcagtg

SEQ ID NO: 57879 - DNA, 17 bp, Arabidopsis thaliana
attcccatctcgggacg

SEQ ID NO: 57880 - DNA, 17 bp, Arabidopsis thaliana
attcccatctttcgtta

SEQ ID NO: 57881 - DNA, 17 bp, Arabidopsis thaliana
attcccatgcgtcatcg

SEQ ID NO: 57882 - DNA, 17 bp, Arabidopsis thaliana
attccccaacatggcca

SEQ ID NO: 57883 - DNA, 17 bp, Arabidopsis thaliana
attccccacgtgtgcgc

SEQ ID NO: 57884 - DNA, 17 bp, Arabidopsis thaliana
attccccactcaaccag

SEQ ID NO: 57885 - DNA, 17 bp, Arabidopsis thaliana
attcccccaccagcaag

SEQ ID NO: 57886 - DNA, 17 bp, Arabidopsis thaliana
attccccctctagacaa

SEQ ID NO: 57887 - DNA, 17 bp, Arabidopsis thaliana
attccccggcggaactt

SEQ ID NO: 57888 - DNA, 17 bp, Arabidopsis thaliana
attcccctccaggaatc

SEQ ID NO: 57889 - DNA, 17 bp, Arabidopsis thaliana
attcccctggatgttga

SEQ ID NO: 57890 - DNA, 17 bp, Arabidopsis thaliana
attcccctggtgtgaga

SEQ ID NO: 57891 - DNA, 17 bp, Arabidopsis thaliana
attcccgaaaaggctga

SEQ ID NO: 57892 - DNA, 17 bp, Arabidopsis thaliana
attcccgattcctgaca

SEQ ID NO: 57893 - DNA, 17 bp, Arabidopsis thaliana
attcccgcaagcgtttg

SEQ ID NO: 57894 - DNA, 17 bp, Arabidopsis thaliana
attcccgccaaaaccgc

SEQ ID NO: 57895 - DNA, 17 bp, Arabidopsis thaliana
attcccgccaaaaccgt

SEQ ID NO: 57896 - DNA, 17 bp, Arabidopsis thaliana
attcccgccatcgccgg

SEQ ID NO: 57897 - DNA, 17 bp, Arabidopsis thaliana
attcccgcctgtcacgc

SEQ ID NO: 57898 - DNA, 17 bp, Arabidopsis thaliana
attcccgctgtcacgcg

SEQ ID NO: 57899 - DNA, 17 bp, Arabidopsis thaliana
attcccggatggtgcac

SEQ ID NO: 57900 - DNA, 17 bp, Arabidopsis thaliana
attcccggcaaggactg

SEQ ID NO: 57901 - DNA, 17 bp, Arabidopsis thaliana
attcccggctggtgcac

SEQ ID NO: 57902 - DNA, 17 bp, Arabidopsis thaliana
attcccgggcgtcctcc

SEQ ID NO: 57903 - DNA, 17 bp, Arabidopsis thaliana
attccctactgttgaca

SEQ ID NO: 57904 - DNA, 17 bp, Arabidopsis thaliana
attccctattgggtgtg

SEQ ID NO: 57905 - DNA, 17 bp, Arabidopsis thaliana
attccctcagtaattcg

SEQ ID NO: 57906 - DNA, 17 bp, Arabidopsis thaliana
attccctcgacacagct

SEQ ID NO: 57907 - DNA, 17 bp, Arabidopsis thaliana
attccctgctctgctat

SEQ ID NO: 57908 - DNA, 17 bp, Arabidopsis thaliana
attcccttaagattctc

SEQ ID NO: 57909 - DNA, 17 bp, Arabidopsis thaliana
attcccttcatcgcttc

SEQ ID NO: 57910 - DNA, 17 bp, Arabidopsis thaliana
attcccttctcatcgat

SEQ ID NO: 57911 - DNA, 17 bp, Arabidopsis thaliana
attcccttgggacatct

SEQ ID NO: 57912 - DNA, 17 bp, Arabidopsis thaliana
attcccttggttcacga

SEQ ID NO: 57913 - DNA, 17 bp, Arabidopsis thaliana
attcccttgtcgcatgt

SEQ ID NO: 57914 - DNA, 17 bp, Arabidopsis thaliana
attccctttcattggat

SEQ ID NO: 57915 - DNA, 17 bp, Arabidopsis thaliana
attccctttgtcgctaa

SEQ ID NO: 57916 - DNA, 17 bp, Arabidopsis thaliana
attccgaattgtgccca

SEQ ID NO: 57917 - DNA, 17 bp, Arabidopsis thaliana
attccgacaataatttt

SEQ ID NO: 57918 - DNA, 17 bp, Arabidopsis thaliana
attccgaccctttggtg

SEQ ID NO: 57919 - DNA, 17 bp, Arabidopsis thaliana
attccgacgagataggc

SEQ ID NO: 57920 - DNA, 17 bp, Arabidopsis thaliana
attccgacttagaggcg

SEQ ID NO: 57921 - DNA, 17 bp, Arabidopsis thaliana
attccgagaattagcaa

SEQ ID NO: 57922 - DNA, 17 bp, Arabidopsis thaliana
attccgagaattgcatc

SEQ ID NO: 57923 - DNA, 17 bp, Arabidopsis thaliana
attccgagtttccgaca

SEQ ID NO: 57924 - DNA, 17 bp, Arabidopsis thaliana
attccgagtttggtgtt

SEQ ID NO: 57925 - DNA, 17 bp, Arabidopsis thaliana
attccgatagccggctc

SEQ ID NO: 57926 - DNA, 17 bp, Arabidopsis thaliana
attccgatcccgagttg

SEQ ID NO: 57927 - DNA, 17 bp, Arabidopsis thaliana
attccgatttgtcgtct

SEQ ID NO: 57928 - DNA, 17 bp, Arabidopsis thaliana
attccgcagacactgtg

SEQ ID NO: 57929 - DNA, 17 bp, Arabidopsis thaliana
attccgcagaccttgtg

SEQ ID NO: 57930 - DNA, 17 bp, Arabidopsis thaliana
attccgcagctgatgga

SEQ ID NO: 57931 - DNA, 17 bp, Arabidopsis thaliana
attccgcagggagagcc

SEQ ID NO: 57932 - DNA, 17 bp, Arabidopsis thaliana
attccgcctcggaatgt

SEQ ID NO: 57933 - DNA, 17 bp, Arabidopsis thaliana
attccgcgggtgaaaat

SEQ ID NO: 57934 - DNA, 17 bp, Arabidopsis thaliana
attccgctatctgataa

SEQ ID NO: 57935 - DNA, 17 bp, Arabidopsis thaliana
attccgctgcgaatgtc

SEQ ID NO: 57936 - DNA, 17 bp, Arabidopsis thaliana
attccgcttgggccgct

SEQ ID NO: 57937 - DNA, 17 bp, Arabidopsis thaliana
attccgcttttctcaat

SEQ ID NO: 57938 - DNA, 17 bp, Arabidopsis thaliana
attccgctttttccacc

SEQ ID NO: 57939 - DNA, 17 bp, Arabidopsis thaliana
attccgctttttcggga

SEQ ID NO: 57940 - DNA, 17 bp, Arabidopsis thaliana
attccggaaccaatact

SEQ ID NO: 57941 - DNA, 17 bp, Arabidopsis thaliana
attccggaaccgggacc

SEQ ID NO: 57942 - DNA, 17 bp, Arabidopsis thaliana
attccggaagcctaaag

SEQ ID NO: 57943 - DNA, 17 bp, Arabidopsis thaliana
attccggacatctccca

SEQ ID NO: 57944 - DNA, 17 bp, Arabidopsis thaliana
attccggaccactgcgg

SEQ ID NO: 57945 - DNA, 17 bp, Arabidopsis thaliana
attccggagtcttgcag

SEQ ID NO: 57946 - DNA, 17 bp, Arabidopsis thaliana
attccggattcgaagcc

SEQ ID NO: 57947 - DNA, 17 bp, Arabidopsis thaliana
attccggcggtggtgat

SEQ ID NO: 57948 - DNA, 17 bp, Arabidopsis thaliana
attccgggctacaaaac

SEQ ID NO: 57949 - DNA, 17 bp, Arabidopsis thaliana
attccggtcatccttat

SEQ ID NO: 57950 - DNA, 17 bp, Arabidopsis thaliana
attccggttgaggaacg

SEQ ID NO: 57951 - DNA, 17 bp, Arabidopsis thaliana
attccgtagacactgtg

SEQ ID NO: 57952 - DNA, 17 bp, Arabidopsis thaliana
attccgtcaaggtcgaa

SEQ ID NO: 57953 - DNA, 17 bp, Arabidopsis thaliana
attccgtcagttgggat

SEQ ID NO: 57954 - DNA, 17 bp, Arabidopsis thaliana
attccgtccaaggctaa

SEQ ID NO: 57955 - DNA, 17 bp, Arabidopsis thaliana
attccgtcgcagttttc

SEQ ID NO: 57956 - DNA, 17 bp, Arabidopsis thaliana
attccgtggtctgatct

SEQ ID NO: 57957 - DNA, 17 bp, Arabidopsis thaliana
attccgttcgcactagc

SEQ ID NO: 57958 - DNA, 17 bp, Arabidopsis thaliana
attccgttcgcgctagc

SEQ ID NO: 57959 - DNA, 17 bp, Arabidopsis thaliana
attccgtttattgctct

SEQ ID NO: 57960 - DNA, 17 bp, Arabidopsis thaliana
attccgtttgcactagc

SEQ ID NO: 57961 - DNA, 17 bp, Arabidopsis thaliana
attccgttttgaagatt

SEQ ID NO: 57962 - DNA, 17 bp, Arabidopsis thaliana
attcctaaagctccatc

SEQ ID NO: 57963 - DNA, 17 bp, Arabidopsis thaliana
attcctaaattgccctc

SEQ ID NO: 57964 - DNA, 17 bp, Arabidopsis thaliana
attcctaatgagaacca

SEQ ID NO: 57965 - DNA, 17 bp, Arabidopsis thaliana
attcctaatgagaaccg

SEQ ID NO: 57966 - DNA, 17 bp, Arabidopsis thaliana
attcctacacagctggt

SEQ ID NO: 57967 - DNA, 17 bp, Arabidopsis thaliana
attcctacatagatggt

SEQ ID NO: 57968 - DNA, 17 bp, Arabidopsis thaliana
attcctacatagctggt

SEQ ID NO: 57969 - DNA, 17 bp, Arabidopsis thaliana
attcctacatagttggt

SEQ ID NO: 57970 - DNA, 17 bp, Arabidopsis thaliana
attcctacggtcccagg

SEQ ID NO: 57971 - DNA, 17 bp, Arabidopsis thaliana
attcctacggtcccggg

SEQ ID NO: 57972 - DNA, 17 bp, Arabidopsis thaliana
attcctacgtcgcagtc

SEQ ID NO: 57973 - DNA, 17 bp, Arabidopsis thaliana
attcctagatgtttgcc

SEQ ID NO: 57974 - DNA, 17 bp, Arabidopsis thaliana
attcctaggccgtaact

SEQ ID NO: 57975 - DNA, 17 bp, Arabidopsis thaliana
attcctagtaagcgcga

SEQ ID NO: 57976 - DNA, 17 bp, Arabidopsis thaliana
attcctcaacagaaatt

SEQ ID NO: 57977 - DNA, 17 bp, Arabidopsis thaliana
attcctcaccttctctc

SEQ ID NO: 57978 - DNA, 17 bp, Arabidopsis thaliana
attcctcaccttctctg

SEQ ID NO: 57979 - DNA, 17 bp, Arabidopsis thaliana
attcctcaccttctctt

SEQ ID NO: 57980 - DNA, 17 bp, Arabidopsis thaliana
attcctcaggattagct

SEQ ID NO: 57981 - DNA, 17 bp, Arabidopsis thaliana
attcctcaggattggct

SEQ ID NO: 57982 - DNA, 17 bp, Arabidopsis thaliana
attcctcaggtcagacc

SEQ ID NO: 57983 - DNA, 17 bp, Arabidopsis thaliana
attcctcaggtttgact

SEQ ID NO: 57984 - DNA, 17 bp, Arabidopsis thaliana
attcctcagttttggct

SEQ ID NO: 57985 - DNA, 17 bp, Arabidopsis thaliana
attcctcatctccgctc

SEQ ID NO: 57986 - DNA, 17 bp, Arabidopsis thaliana
attcctccactctgttt

SEQ ID NO: 57987 - DNA, 17 bp, Arabidopsis thaliana
attcctccaggtccgaa

SEQ ID NO: 57988 - DNA, 17 bp, Arabidopsis thaliana
attcctccgttgaatct

SEQ ID NO: 57989 - DNA, 17 bp, Arabidopsis thaliana
attcctcctgatgttcg

SEQ ID NO: 57990 - DNA, 17 bp, Arabidopsis thaliana
attcctccttaactctt

SEQ ID NO: 57991 - DNA, 17 bp, Arabidopsis thaliana
attcctcggaattggtt

SEQ ID NO: 57992 - DNA, 17 bp, Arabidopsis thaliana
attcctcgtcctggtcg

SEQ ID NO: 57993 - DNA, 17 bp, Arabidopsis thaliana
attcctctcaacgtgct

SEQ ID NO: 57994 - DNA, 17 bp, Arabidopsis thaliana
attcctctccttgcaaa

SEQ ID NO: 57995 - DNA, 17 bp, Arabidopsis thaliana
attcctctcgaatgaat

SEQ ID NO: 57996 - DNA, 17 bp, Arabidopsis thaliana
attcctctcggatgaca

SEQ ID NO: 57997 - DNA, 17 bp, Arabidopsis thaliana
attcctctctcttgcaa

SEQ ID NO: 57998 - DNA, 17 bp, Arabidopsis thaliana
attcctctgcgatattc

SEQ ID NO: 57999 - DNA, 17 bp, Arabidopsis thaliana
attcctctggattcctg

SEQ ID NO: 58000 - DNA, 17 bp, Arabidopsis thaliana
attcctcttatcgatta

SEQ ID NO: 58001 - DNA, 17 bp, Arabidopsis thaliana
attcctcttccacgctc

SEQ ID NO: 58002 - DNA, 17 bp, Arabidopsis thaliana
attcctcttctacgatc

SEQ ID NO: 58003 - DNA, 17 bp, Arabidopsis thaliana
attcctcttctacgttc

SEQ ID NO: 58004 - DNA, 17 bp, Arabidopsis thaliana
attcctcttctgagaat

SEQ ID NO: 58005 - DNA, 17 bp, Arabidopsis thaliana
attcctctttgagcttg

SEQ ID NO: 58006 - DNA, 17 bp, Arabidopsis thaliana
attcctcttttgagctt

SEQ ID NO: 58007 - DNA, 17 bp, Arabidopsis thaliana
attcctgaaaccgttgc

SEQ ID NO: 58008 - DNA, 17 bp, Arabidopsis thaliana
attcctgaacaatgttc

SEQ ID NO: 58009 - DNA, 17 bp, Arabidopsis thaliana
attcctgaatatgtgcc

SEQ ID NO: 58010 - DNA, 17 bp, Arabidopsis thaliana
attcctgaccattgctg

SEQ ID NO: 58011 - DNA, 17 bp, Arabidopsis thaliana
attcctgaggtgtaggg

SEQ ID NO: 58012 - DNA, 17 bp, Arabidopsis thaliana
attcctgcagggatgaa

SEQ ID NO: 58013 - DNA, 17 bp, Arabidopsis thaliana
attcctgccaaattcaa

SEQ ID NO: 58014 - DNA, 17 bp, Arabidopsis thaliana
attcctggaggtgatag

SEQ ID NO: 58015 - DNA, 17 bp, Arabidopsis thaliana
attcctggagtttgcaa

SEQ ID NO: 58016 - DNA, 17 bp, Arabidopsis thaliana
attcctggttacttttt

SEQ ID NO: 58017 - DNA, 17 bp, Arabidopsis thaliana
attcctgtcggaaacca

SEQ ID NO: 58018 - DNA, 17 bp, Arabidopsis thaliana
attccttaacaggcaat

SEQ ID NO: 58019 - DNA, 17 bp, Arabidopsis thaliana
attccttaccattgctg

SEQ ID NO: 58020 - DNA, 17 bp, Arabidopsis thaliana
attccttccttcatgtg

SEQ ID NO: 58021 - DNA, 17 bp, Arabidopsis thaliana
attccttcgggttctgt

SEQ ID NO: 58022 - DNA, 17 bp, Arabidopsis thaliana
attccttcggtggttgt

SEQ ID NO: 58023 - DNA, 17 bp, Arabidopsis thaliana
attccttctaccgcagc

SEQ ID NO: 58024 - DNA, 17 bp, Arabidopsis thaliana
attccttctgaccctta

SEQ ID NO: 58025 - DNA, 17 bp, Arabidopsis thaliana
attccttgattgtaggc

SEQ ID NO: 58026 - DNA, 17 bp, Arabidopsis thaliana
attccttggcttgactt

SEQ ID NO: 58027 - DNA, 17 bp, Arabidopsis thaliana
attccttgtgatcgcaa

SEQ ID NO: 58028 - DNA, 17 bp, Arabidopsis thaliana
attcctttaggcccgaa

SEQ ID NO: 58029 - DNA, 17 bp, Arabidopsis thaliana
attcctttgtcgctaag

SEQ ID NO: 58030 - DNA, 17 bp, Arabidopsis thaliana
attcctttgtcgtggcc

SEQ ID NO: 58031 - DNA, 17 bp, Arabidopsis thaliana
attccttttcggaaagc

SEQ ID NO: 58032 - DNA, 17 bp, Arabidopsis thaliana
attcgaaacagacagtg

SEQ ID NO: 58033 - DNA, 17 bp, Arabidopsis thaliana
attcgaaatcagtcatg

SEQ ID NO: 58034 - DNA, 17 bp, Arabidopsis thaliana
attcgaaccgatgacct

SEQ ID NO: 58035 - DNA, 17 bp, Arabidopsis thaliana
attcgaaccgattcctg

SEQ ID NO: 58036 - DNA, 17 bp, Arabidopsis thaliana
attcgaacctttatccc

SEQ ID NO: 58037 - DNA, 17 bp, Arabidopsis thaliana
attcgaactacgggtcg

SEQ ID NO: 58038 - DNA, 17 bp, Arabidopsis thaliana
attcgaactatgggtcg

SEQ ID NO: 58039 - DNA, 17 bp, Arabidopsis thaliana
attcgaactggcgacct

SEQ ID NO: 58040 - DNA, 17 bp, Arabidopsis thaliana
attcgaacttgaactgt

SEQ ID NO: 58041 - DNA, 17 bp, Arabidopsis thaliana
attcgaatccgatccga

SEQ ID NO: 58042 - DNA, 17 bp, Arabidopsis thaliana
attcgaatctctatctc

SEQ ID NO: 58043 - DNA, 17 bp, Arabidopsis thaliana
attcgaatctctcaggt

SEQ ID NO: 58044 - DNA, 17 bp, Arabidopsis thaliana
attcgaatggttactgc

SEQ ID NO: 58045 - DNA, 17 bp, Arabidopsis thaliana
attcgaattcttcgtca

SEQ ID NO: 58046 - DNA, 17 bp, Arabidopsis thaliana
attcgaatttgcgtaac

SEQ ID NO: 58047 - DNA, 17 bp, Arabidopsis thaliana
attcgacaaagtgaagg

SEQ ID NO: 58048 - DNA, 17 bp, Arabidopsis thaliana
attcgacaaagtgaatg

SEQ ID NO: 58049 - DNA, 17 bp, Arabidopsis thaliana
attcgacatgatcaggt

SEQ ID NO: 58050 - DNA, 17 bp, Arabidopsis thaliana
attcgaccctccgagaa

SEQ ID NO: 58051 - DNA, 17 bp, Arabidopsis thaliana
attcgaccgctaacaga

SEQ ID NO: 58052 - DNA, 17 bp, Arabidopsis thaliana
attcgacctttgccgtt

SEQ ID NO: 58053 - DNA, 17 bp, Arabidopsis thaliana
attcgacgcggattacg

SEQ ID NO: 58054 - DNA, 17 bp, Arabidopsis thaliana
attcgacggatcgcatg

SEQ ID NO: 58055 - DNA, 17 bp, Arabidopsis thaliana
attcgacggcgacacac

SEQ ID NO: 58056 - DNA, 17 bp, Arabidopsis thaliana
attcgactccaaggttg

SEQ ID NO: 58057 - DNA, 17 bp, Arabidopsis thaliana
attcgactccccctggg

SEQ ID NO: 58058 - DNA, 17 bp, Arabidopsis thaliana
attcgactgtttgggcg

SEQ ID NO: 58059 - DNA, 17 bp, Arabidopsis thaliana
attcgacttcccctggg

SEQ ID NO: 58060 - DNA, 17 bp, Arabidopsis thaliana
attcgacttgccctggg

SEQ ID NO: 58061 - DNA, 17 bp, Arabidopsis thaliana
attcgagatccgaccat

SEQ ID NO: 58062 - DNA, 17 bp, Arabidopsis thaliana
attcgagcatagacgtt

SEQ ID NO: 58063 - DNA, 17 bp, Arabidopsis thaliana
attcgagctgcttccgc

SEQ ID NO: 58064 - DNA, 17 bp, Arabidopsis thaliana
attcgagggcacgtctg

SEQ ID NO: 58065 - DNA, 17 bp, Arabidopsis thaliana
attcgagtagaccttgt

SEQ ID NO: 58066 - DNA, 17 bp, Arabidopsis thaliana
attcgagtcaggttcgg

SEQ ID NO: 58067 - DNA, 17 bp, Arabidopsis thaliana
attcgagtcgtgttacg

SEQ ID NO: 58068 - DNA, 17 bp, Arabidopsis thaliana
attcgagtctcggatct

SEQ ID NO: 58069 - DNA, 17 bp, Arabidopsis thaliana
attcgagtgagtgttcc

SEQ ID NO: 58070 - DNA, 17 bp, Arabidopsis thaliana
attcgagtgatacttct

SEQ ID NO: 58071 - DNA, 17 bp, Arabidopsis thaliana
attcgagtgggttctga

SEQ ID NO: 58072 - DNA, 17 bp, Arabidopsis thaliana
attcgatacgagatgga

SEQ ID NO: 58073 - DNA, 17 bp, Arabidopsis thaliana
attcgatcataccatca

SEQ ID NO: 58074 - DNA, 17 bp, Arabidopsis thaliana
attcgatcatagacgtc

SEQ ID NO: 58075 - DNA, 17 bp, Arabidopsis thaliana
attcgatccagttgccc

SEQ ID NO: 58076 - DNA, 17 bp, Arabidopsis thaliana
attcgatccgctgattt

SEQ ID NO: 58077 - DNA, 17 bp, Arabidopsis thaliana
attcgatcggtcgattg

SEQ ID NO: 58078 - DNA, 17 bp, Arabidopsis thaliana
attcgatctacgtccgt

SEQ ID NO: 58079 - DNA, 17 bp, Arabidopsis thaliana
attcgatctgactttgt

SEQ ID NO: 58080 - DNA, 17 bp, Arabidopsis thaliana
attcgatctgcttgatc

SEQ ID NO: 58081 - DNA, 17 bp, Arabidopsis thaliana
attcgatgaaacctaaa

SEQ ID NO: 58082 - DNA, 17 bp, Arabidopsis thaliana
attcgatggttgagctc

SEQ ID NO: 58083 - DNA, 17 bp, Arabidopsis thaliana
attcgatgtcgtactcg

SEQ ID NO: 58084 - DNA, 17 bp, Arabidopsis thaliana
attcgatgtggcctttg

SEQ ID NO: 58085 - DNA, 17 bp, Arabidopsis thaliana
attcgattaattgagcc

SEQ ID NO: 58086 - DNA, 17 bp, Arabidopsis thaliana
attcgattaattttggg

SEQ ID NO: 58087 - DNA, 17 bp, Arabidopsis thaliana
attcgattattggacga

SEQ ID NO: 58088 - DNA, 17 bp, Arabidopsis thaliana
attcgattcccgctatc

SEQ ID NO: 58089 - DNA, 17 bp, Arabidopsis thaliana
attcgattctatggaac

SEQ ID NO: 58090 - DNA, 17 bp, Arabidopsis thaliana
attcgattgaattgttt

SEQ ID NO: 58091 - DNA, 17 bp, Arabidopsis thaliana
attcgatttctgtattt

SEQ ID NO: 58092 - DNA, 17 bp, Arabidopsis thaliana
attcgattttcgtccct

SEQ ID NO: 58093 - DNA, 17 bp, Arabidopsis thaliana
attcgcaaagttttggc

SEQ ID NO: 58094 - DNA, 17 bp, Arabidopsis thaliana
attcgcaagacaagatt

SEQ ID NO: 58095 - DNA, 17 bp, Arabidopsis thaliana
attcgcaagttgcaact

SEQ ID NO: 58096 - DNA, 17 bp, Arabidopsis thaliana
attcgcaagttttggtg

SEQ ID NO: 58097 - DNA, 17 bp, Arabidopsis thaliana
attcgcaattaaacttc

SEQ ID NO: 58098 - DNA, 17 bp, Arabidopsis thaliana
attcgcacaattggtca

SEQ ID NO: 58099 - DNA, 17 bp, Arabidopsis thaliana
attcgcacagttccgac

SEQ ID NO: 58100 - DNA, 17 bp, Arabidopsis thaliana
attcgcactacctgcac

SEQ ID NO: 58101 - DNA, 17 bp, Arabidopsis thaliana
attcgcagacaggttat

SEQ ID NO: 58102 - DNA, 17 bp, Arabidopsis thaliana
attcgcagaggcgattc

SEQ ID NO: 58103 - DNA, 17 bp, Arabidopsis thaliana
attcgcagcggaattga

SEQ ID NO: 58104 - DNA, 17 bp, Arabidopsis thaliana
attcgcagcgtttgtta

SEQ ID NO: 58105 - DNA, 17 bp, Arabidopsis thaliana
attcgcaggagattcgt

SEQ ID NO: 58106 - DNA, 17 bp, Arabidopsis thaliana
attcgcagttcgtgaga

SEQ ID NO: 58107 - DNA, 17 bp, Arabidopsis thaliana
attcgcagtttcgtgag

SEQ ID NO: 58108 - DNA, 17 bp, Arabidopsis thaliana
attcgcatcctgtagat

SEQ ID NO: 58109 - DNA, 17 bp, Arabidopsis thaliana
attcgcatggcctctgt

SEQ ID NO: 58110 - DNA, 17 bp, Arabidopsis thaliana
attcgcattttgctgca

SEQ ID NO: 58111 - DNA, 17 bp, Arabidopsis thaliana
attcgccacagtatctc

SEQ ID NO: 58112 - DNA, 17 bp, Arabidopsis thaliana
attcgcccacactccgt

SEQ ID NO: 58113 - DNA, 17 bp, Arabidopsis thaliana
attcgccgctcttctct

SEQ ID NO: 58114 - DNA, 17 bp, Arabidopsis thaliana
attcgccggcgtgataa

SEQ ID NO: 58115 - DNA, 17 bp, Arabidopsis thaliana
attcgccggtgttcgat

SEQ ID NO: 58116 - DNA, 17 bp, Arabidopsis thaliana
attcgccgtgggtccca

SEQ ID NO: 58117 - DNA, 17 bp, Arabidopsis thaliana
attcgccgtggtgtgcc

SEQ ID NO: 58118 - DNA, 17 bp, Arabidopsis thaliana
attcgccgttttcttta

SEQ ID NO: 58119 - DNA, 17 bp, Arabidopsis thaliana
attcgcctaagtcgcag

SEQ ID NO: 58120 - DNA, 17 bp, Arabidopsis thaliana
attcgcctccaaggtgt

SEQ ID NO: 58121 - DNA, 17 bp, Arabidopsis thaliana
attcgcctctgtcatct

SEQ ID NO: 58122 - DNA, 17 bp, Arabidopsis thaliana
attcgcctgatgattga

SEQ ID NO: 58123 - DNA, 17 bp, Arabidopsis thaliana
attcgcgacccccggat

SEQ ID NO: 58124 - DNA, 17 bp, Arabidopsis thaliana
attcgcgataagtgatc

SEQ ID NO: 58125 - DNA, 17 bp, Arabidopsis thaliana
attcgcggagcggacct

SEQ ID NO: 58126 - DNA, 17 bp, Arabidopsis thaliana
attcgcggcgtggaccg

SEQ ID NO: 58127 - DNA, 17 bp, Arabidopsis thaliana
attcgcggtagaacaat

SEQ ID NO: 58128 - DNA, 17 bp, Arabidopsis thaliana
attcgcgtctgaggaaa

SEQ ID NO: 58129 - DNA, 17 bp, Arabidopsis thaliana
attcgctacttgattcg

SEQ ID NO: 58130 - DNA, 17 bp, Arabidopsis thaliana
attcgctaggtgcaacg

SEQ ID NO: 58131 - DNA, 17 bp, Arabidopsis thaliana
attcgctatttccagag

SEQ ID NO: 58132 - DNA, 17 bp, Arabidopsis thaliana
attcgctcaaactcagt

SEQ ID NO: 58133 - DNA, 17 bp, Arabidopsis thaliana
attcgctcggccagttg

SEQ ID NO: 58134 - DNA, 17 bp, Arabidopsis thaliana
attcgctgatcacgtgt

SEQ ID NO: 58135 - DNA, 17 bp, Arabidopsis thaliana
attcgctggaaagttta

SEQ ID NO: 58136 - DNA, 17 bp, Arabidopsis thaliana
attcgctggcttctgct

SEQ ID NO: 58137 - DNA, 17 bp, Arabidopsis thaliana
attcgcttacgtcaacc

SEQ ID NO: 58138 - DNA, 17 bp, Arabidopsis thaliana
attcgcttatcagaggc

SEQ ID NO: 58139 - DNA, 17 bp, Arabidopsis thaliana
attcgcttcgtgcccag

SEQ ID NO: 58140 - DNA, 17 bp, Arabidopsis thaliana
attcgcttgacgatttt

SEQ ID NO: 58141 - DNA, 17 bp, Arabidopsis thaliana
attcgcttgggaaagac

SEQ ID NO: 58142 - DNA, 17 bp, Arabidopsis thaliana
attcgctttggaagtac

SEQ ID NO: 58143 - DNA, 17 bp, Arabidopsis thaliana
attcgctttgtgcccag

SEQ ID NO: 58144 - DNA, 17 bp, Arabidopsis thaliana
attcgcttttcttcctg

SEQ ID NO: 58145 - DNA, 17 bp, Arabidopsis thaliana
attcggaaacctttcta

SEQ ID NO: 58146 - DNA, 17 bp, Arabidopsis thaliana
attcggaaatttgcgtg

SEQ ID NO: 58147 - DNA, 17 bp, Arabidopsis thaliana
attcggaacggtttcgg

SEQ ID NO: 58148 - DNA, 17 bp, Arabidopsis thaliana
attcggaattagatggt

SEQ ID NO: 58149 - DNA, 17 bp, Arabidopsis thaliana
attcggacacttcatgg

SEQ ID NO: 58150 - DNA, 17 bp, Arabidopsis thaliana
attcggaccaaccagtc

SEQ ID NO: 58151 - DNA, 17 bp, Arabidopsis thaliana
attcggaccctgaattt

SEQ ID NO: 58152 - DNA, 17 bp, Arabidopsis thaliana
attcggagaaagtagct

SEQ ID NO: 58153 - DNA, 17 bp, Arabidopsis thaliana
attcggagaattagggt

SEQ ID NO: 58154 - DNA, 17 bp, Arabidopsis thaliana
attcggagacgacggca

SEQ ID NO: 58155 - DNA, 17 bp, Arabidopsis thaliana
attcggagatcgtgtgt

SEQ ID NO: 58156 - DNA, 17 bp, Arabidopsis thaliana
attcggagcctgaattt

SEQ ID NO: 58157 - DNA, 17 bp, Arabidopsis thaliana
attcggaggaccgagtg

SEQ ID NO: 58158 - DNA, 17 bp, Arabidopsis thaliana
attcggaggtgaccgtc

SEQ ID NO: 58159 - DNA, 17 bp, Arabidopsis thaliana
attcggatcatacaggt

SEQ ID NO: 58160 - DNA, 17 bp, Arabidopsis thaliana
attcggatcatatggta

SEQ ID NO: 58161 - DNA, 17 bp, Arabidopsis thaliana
attcggatcttgaataa

SEQ ID NO: 58162 - DNA, 17 bp, Arabidopsis thaliana
attcggatggactctct

SEQ ID NO: 58163 - DNA, 17 bp, Arabidopsis thaliana
attcggattcgtaatta

SEQ ID NO: 58164 - DNA, 17 bp, Arabidopsis thaliana
attcggattgttgcact

SEQ ID NO: 58165 - DNA, 17 bp, Arabidopsis thaliana
attcggcaggtcagttc

SEQ ID NO: 58166 - DNA, 17 bp, Arabidopsis thaliana
attcggccattctatag

SEQ ID NO: 58167 - DNA, 17 bp, Arabidopsis thaliana
attcggcccaaaacctc

SEQ ID NO: 58168 - DNA, 17 bp, Arabidopsis thaliana
attcggcccagccagac

SEQ ID NO: 58169 - DNA, 17 bp, Arabidopsis thaliana
attcggcccagttgtat

SEQ ID NO: 58170 - DNA, 17 bp, Arabidopsis thaliana
attcggccctttgtcgc

SEQ ID NO: 58171 - DNA, 17 bp, Arabidopsis thaliana
attcggccctttgtctg

SEQ ID NO: 58172 - DNA, 17 bp, Arabidopsis thaliana
attcggccgacctcggt

SEQ ID NO: 58173 - DNA, 17 bp, Arabidopsis thaliana
attcggcctgtccatat

SEQ ID NO: 58174 - DNA, 17 bp, Arabidopsis thaliana
attcggccttcaaaaga

SEQ ID NO: 58175 - DNA, 17 bp, Arabidopsis thaliana
attcggcgagattgatg

SEQ ID NO: 58176 - DNA, 17 bp, Arabidopsis thaliana
attcggcgataatgggc

SEQ ID NO: 58177 - DNA, 17 bp, Arabidopsis thaliana
attcggcgatagatcaa

SEQ ID NO: 58178 - DNA, 17 bp, Arabidopsis thaliana
attcggcgatagatcag

SEQ ID NO: 58179 - DNA, 17 bp, Arabidopsis thaliana
attcggctatccatcat

SEQ ID NO: 58180 - DNA, 17 bp, Arabidopsis thaliana
attcggcttggttttct

SEQ ID NO: 58181 - DNA, 17 bp, Arabidopsis thaliana
attcggctttggttcgg

SEQ ID NO: 58182 - DNA, 17 bp, Arabidopsis thaliana
attcgggaaccgacgtg

SEQ ID NO: 58183 - DNA, 17 bp, Arabidopsis thaliana
attcgggacaaatagtg

SEQ ID NO: 58184 - DNA, 17 bp, Arabidopsis thaliana
attcgggatacctagat

SEQ ID NO: 58185 - DNA, 17 bp, Arabidopsis thaliana
attcgggatggctcaga

SEQ ID NO: 58186 - DNA, 17 bp, Arabidopsis thaliana
attcgggcagagttttc

SEQ ID NO: 58187 - DNA, 17 bp, Arabidopsis thaliana
attcggggacaagatct

SEQ ID NO: 58188 - DNA, 17 bp, Arabidopsis thaliana
attcggggcgtggaccg

SEQ ID NO: 58189 - DNA, 17 bp, Arabidopsis thaliana
attcgggggcgtaggcg

SEQ ID NO: 58190 - DNA, 17 bp, Arabidopsis thaliana
attcgggggtcccagtt

SEQ ID NO: 58191 - DNA, 17 bp, Arabidopsis thaliana
attcggggtgcccagag

SEQ ID NO: 58192 - DNA, 17 bp, Arabidopsis thaliana
attcgggtattttcggg

SEQ ID NO: 58193 - DNA, 17 bp, Arabidopsis thaliana
attcgggtcaggtattt

SEQ ID NO: 58194 - DNA, 17 bp, Arabidopsis thaliana
attcgggtcatatggta

SEQ ID NO: 58195 - DNA, 17 bp, Arabidopsis thaliana
attcgggtcatgtggta

SEQ ID NO: 58196 - DNA, 17 bp, Arabidopsis thaliana
attcggtaaagtcagat

SEQ ID NO: 58197 - DNA, 17 bp, Arabidopsis thaliana
attcggtacaaactttt

SEQ ID NO: 58198 - DNA, 17 bp, Arabidopsis thaliana
attcggtattgatcggc

SEQ ID NO: 58199 - DNA, 17 bp, Arabidopsis thaliana
attcggtattgtgcgtg

SEQ ID NO: 58200 - DNA, 17 bp, Arabidopsis thaliana
attcggtccatgtgctg

SEQ ID NO: 58201 - DNA, 17 bp, Arabidopsis thaliana
attcggtccgcctttgg

SEQ ID NO: 58202 - DNA, 17 bp, Arabidopsis thaliana
attcggtcgagacgccc

SEQ ID NO: 58203 - DNA, 17 bp, Arabidopsis thaliana
attcggtcgcaggatca

SEQ ID NO: 58204 - DNA, 17 bp, Arabidopsis thaliana
attcggtcgtacattgg

SEQ ID NO: 58205 - DNA, 17 bp, Arabidopsis thaliana
attcggtgaagatgtca

SEQ ID NO: 58206 - DNA, 17 bp, Arabidopsis thaliana
attcggtgcctacagcg

SEQ ID NO: 58207 - DNA, 17 bp, Arabidopsis thaliana
attcggtgcgatctgca

SEQ ID NO: 58208 - DNA, 17 bp, Arabidopsis thaliana
attcggttaaccaggcg

SEQ ID NO: 58209 - DNA, 17 bp, Arabidopsis thaliana
attcggttaaccggttc

SEQ ID NO: 58210 - DNA, 17 bp, Arabidopsis thaliana
attcggttaggattgtc

SEQ ID NO: 58211 - DNA, 17 bp, Arabidopsis thaliana
attcggttcatcgaggc

SEQ ID NO: 58212 - DNA, 17 bp, Arabidopsis thaliana
attcggttccatatttg

SEQ ID NO: 58213 - DNA, 17 bp, Arabidopsis thaliana
attcggttccgttacaa

SEQ ID NO: 58214 - DNA, 17 bp, Arabidopsis thaliana
attcggttcgggtcggg

SEQ ID NO: 58215 - DNA, 17 bp, Arabidopsis thaliana
attcggttctggttcgg

SEQ ID NO: 58216 - DNA, 17 bp, Arabidopsis thaliana
attcggttggagaagac

SEQ ID NO: 58217 - DNA, 17 bp, Arabidopsis thaliana
attcggttgggaagaca

SEQ ID NO: 58218 - DNA, 17 bp, Arabidopsis thaliana
attcggtttccttgcac

SEQ ID NO: 58219 - DNA, 17 bp, Arabidopsis thaliana
attcggtttcgacgcct

SEQ ID NO: 58220 - DNA, 17 bp, Arabidopsis thaliana
attcggtttgcatttgg

SEQ ID NO: 58221 - DNA, 17 bp, Arabidopsis thaliana
attcggttttggtttgt

SEQ ID NO: 58222 - DNA, 17 bp, Arabidopsis thaliana
attcgtaaccgcctgaa

SEQ ID NO: 58223 - DNA, 17 bp, Arabidopsis thaliana
attcgtacccgggctca

SEQ ID NO: 58224 - DNA, 17 bp, Arabidopsis thaliana
attcgtactgaaccgct

SEQ ID NO: 58225 - DNA, 17 bp, Arabidopsis thaliana
attcgtagctacatttg

SEQ ID NO: 58226 - DNA, 17 bp, Arabidopsis thaliana
attcgtaggcactggat

SEQ ID NO: 58227 - DNA, 17 bp, Arabidopsis thaliana
attcgtatatgccagat

SEQ ID NO: 58228 - DNA, 17 bp, Arabidopsis thaliana
attcgtatgccggaaaa

SEQ ID NO: 58229 - DNA, 17 bp, Arabidopsis thaliana
attcgtcaactacgtac

SEQ ID NO: 58230 - DNA, 17 bp, Arabidopsis thaliana
attcgtcaacttcgtat

SEQ ID NO: 58231 - DNA, 17 bp, Arabidopsis thaliana
attcgtcacaaggctgg

SEQ ID NO: 58232 - DNA, 17 bp, Arabidopsis thaliana
attcgtcaccgtgacag

SEQ ID NO: 58233 - DNA, 17 bp, Arabidopsis thaliana
attcgtcagcagttttg

SEQ ID NO: 58234 - DNA, 17 bp, Arabidopsis thaliana
attcgtcaggccctaca

SEQ ID NO: 58235 - DNA, 17 bp, Arabidopsis thaliana
attcgtcagggtccaag

SEQ ID NO: 58236 - DNA, 17 bp, Arabidopsis thaliana
attcgtcatatgcgtag

SEQ ID NO: 58237 - DNA, 17 bp, Arabidopsis thaliana
attcgtccaaggtcagc

SEQ ID NO: 58238 - DNA, 17 bp, Arabidopsis thaliana
attcgtccacgggcata

SEQ ID NO: 58239 - DNA, 17 bp, Arabidopsis thaliana
attcgtccatcgtgacc

SEQ ID NO: 58240 - DNA, 17 bp, Arabidopsis thaliana
attcgtccatgtctgca

SEQ ID NO: 58241 - DNA, 17 bp, Arabidopsis thaliana
attcgtccattcggagc

SEQ ID NO: 58242 - DNA, 17 bp, Arabidopsis thaliana
attcgtccattttgggt

SEQ ID NO: 58243 - DNA, 17 bp, Arabidopsis thaliana
attcgtcctcgaatcta

SEQ ID NO: 58244 - DNA, 17 bp, Arabidopsis thaliana
attcgtcctcgaattaa

SEQ ID NO: 58245 - DNA, 17 bp, Arabidopsis thaliana
attcgtcctcgaattca

SEQ ID NO: 58246 - DNA, 17 bp, Arabidopsis thaliana
attcgtccttccttaca

SEQ ID NO: 58247 - DNA, 17 bp, Arabidopsis thaliana
attcgtcgaccaggacg

SEQ ID NO: 58248 - DNA, 17 bp, Arabidopsis thaliana
attcgtcgaccaggtcc

SEQ ID NO: 58249 - DNA, 17 bp, Arabidopsis thaliana
attcgtcgagatctttg

SEQ ID NO: 58250 - DNA, 17 bp, Arabidopsis thaliana
attcgtcgatctcagga

SEQ ID NO: 58251 - DNA, 17 bp, Arabidopsis thaliana
attcgtcgatctttgag

SEQ ID NO: 58252 - DNA, 17 bp, Arabidopsis thaliana
attcgtcgccgtcgttt

SEQ ID NO: 58253 - DNA, 17 bp, Arabidopsis thaliana
attcgtcgctaattata

SEQ ID NO: 58254 - DNA, 17 bp, Arabidopsis thaliana
attcgtcggaggaattg

SEQ ID NO: 58255 - DNA, 17 bp, Arabidopsis thaliana
attcgtcggcgattttg

SEQ ID NO: 58256 - DNA, 17 bp, Arabidopsis thaliana
attcgtcggtctaggcc

SEQ ID NO: 58257 - DNA, 17 bp, Arabidopsis thaliana
attcgtcggtttaggcc

SEQ ID NO: 58258 - DNA, 17 bp, Arabidopsis thaliana
attcgtcgtgcgatcac

SEQ ID NO: 58259 - DNA, 17 bp, Arabidopsis thaliana
attcgtcgttgtaacca

SEQ ID NO: 58260 - DNA, 17 bp, Arabidopsis thaliana
attcgtctaatccgctt

SEQ ID NO: 58261 - DNA, 17 bp, Arabidopsis thaliana
attcgtctcaaatgcgt

SEQ ID NO: 58262 - DNA, 17 bp, Arabidopsis thaliana
attcgtctcacgtgttg

SEQ ID NO: 58263 - DNA, 17 bp, Arabidopsis thaliana
attcgtctcgatctcgt

SEQ ID NO: 58264 - DNA, 17 bp, Arabidopsis thaliana
attcgtctcgatgtcgt

SEQ ID NO: 58265 - DNA, 17 bp, Arabidopsis thaliana
attcgtctctgaatctg

SEQ ID NO: 58266 - DNA, 17 bp, Arabidopsis thaliana
attcgtctgcctgggtg

SEQ ID NO: 58267 - DNA, 17 bp, Arabidopsis thaliana
attcgtcttagccttac

SEQ ID NO: 58268 - DNA, 17 bp, Arabidopsis thaliana
attcgtcttgccttgag

SEQ ID NO: 58269 - DNA, 17 bp, Arabidopsis thaliana
attcgtctttctttaca

SEQ ID NO: 58270 - DNA, 17 bp, Arabidopsis thaliana
attcgtgaaatggccgt

SEQ ID NO: 58271 - DNA, 17 bp, Arabidopsis thaliana
attcgtgcagaaccgct

SEQ ID NO: 58272 - DNA, 17 bp, Arabidopsis thaliana
attcgtgcggaaccgct

SEQ ID NO: 58273 - DNA, 17 bp, Arabidopsis thaliana
attcgtggaaagaattg

SEQ ID NO: 58274 - DNA, 17 bp, Arabidopsis thaliana
attcgtggactattgtg

SEQ ID NO: 58275 - DNA, 17 bp, Arabidopsis thaliana
attcgtggccgtattga

SEQ ID NO: 58276 - DNA, 17 bp, Arabidopsis thaliana
attcgtggcgtaagatt

SEQ ID NO: 58277 - DNA, 17 bp, Arabidopsis thaliana
attcgtgggaagaccct

SEQ ID NO: 58278 - DNA, 17 bp, Arabidopsis thaliana
attcgtgtgagccaact

SEQ ID NO: 58279 - DNA, 17 bp, Arabidopsis thaliana
attcgtgttgtcgattt

SEQ ID NO: 58280 - DNA, 17 bp, Arabidopsis thaliana
attcgtgtttaggcact

SEQ ID NO: 58281 - DNA, 17 bp, Arabidopsis thaliana
attcgttacgggatgtt

SEQ ID NO: 58282 - DNA, 17 bp, Arabidopsis thaliana
attcgttatttttccga

SEQ ID NO: 58283 - DNA, 17 bp, Arabidopsis thaliana
attcgttcaccatgcca

SEQ ID NO: 58284 - DNA, 17 bp, Arabidopsis thaliana
attcgttcatcttccaa

SEQ ID NO: 58285 - DNA, 17 bp, Arabidopsis thaliana
attcgttcccagcatta

SEQ ID NO: 58286 - DNA, 17 bp, Arabidopsis thaliana
attcgttcgatcagttc

SEQ ID NO: 58287 - DNA, 17 bp, Arabidopsis thaliana
attcgttcgtctgactt

SEQ ID NO: 58288 - DNA, 17 bp, Arabidopsis thaliana
attcgttcgtgtccgcc

SEQ ID NO: 58289 - DNA, 17 bp, Arabidopsis thaliana
attcgttctcctgagtt

SEQ ID NO: 58290 - DNA, 17 bp, Arabidopsis thaliana
attcgttgagttaatca

SEQ ID NO: 58291 - DNA, 17 bp, Arabidopsis thaliana
attcgttgccctctgct

SEQ ID NO: 58292 - DNA, 17 bp, Arabidopsis thaliana
attcgttgcgggacgtc

SEQ ID NO: 58293 - DNA, 17 bp, Arabidopsis thaliana
attcgttgcgggacgtt

SEQ ID NO: 58294 - DNA, 17 bp, Arabidopsis thaliana
attcgttgtagagtctc

SEQ ID NO: 58295 - DNA, 17 bp, Arabidopsis thaliana
attcgtttaggacattt

SEQ ID NO: 58296 - DNA, 17 bp, Arabidopsis thaliana
attcgtttccccgcacc

SEQ ID NO: 58297 - DNA, 17 bp, Arabidopsis thaliana
attcgtttcttgcattg

SEQ ID NO: 58298 - DNA, 17 bp, Arabidopsis thaliana
attcgtttgattttctc

SEQ ID NO: 58299 - DNA, 17 bp, Arabidopsis thaliana
attcgtttgcgcgaacc

SEQ ID NO: 58300 - DNA, 17 bp, Arabidopsis thaliana
attcgtttgcggattga

SEQ ID NO: 58301 - DNA, 17 bp, Arabidopsis thaliana
attcgtttgcgggttaa

SEQ ID NO: 58302 - DNA, 17 bp, Arabidopsis thaliana
attcgtttgcggtttga

SEQ ID NO: 58303 - DNA, 17 bp, Arabidopsis thaliana
attcgttttcgctcagt

SEQ ID NO: 58304 - DNA, 17 bp, Arabidopsis thaliana
attcgtttttctttaca

SEQ ID NO: 58305 - DNA, 17 bp, Arabidopsis thaliana
attctaaaaattaggtt

SEQ ID NO: 58306 - DNA, 17 bp, Arabidopsis thaliana
attctaaaatcacgagt

SEQ ID NO: 58307 - DNA, 17 bp, Arabidopsis thaliana
attctaaaccattggga

SEQ ID NO: 58308 - DNA, 17 bp, Arabidopsis thaliana
attctaaacggacgcca

SEQ ID NO: 58309 - DNA, 17 bp, Arabidopsis thaliana
attctaaacttggatca

SEQ ID NO: 58310 - DNA, 17 bp, Arabidopsis thaliana
attctaaagtttctctg

SEQ ID NO: 58311 - DNA, 17 bp, Arabidopsis thaliana
attctaaatacgggcga

SEQ ID NO: 58312 - DNA, 17 bp, Arabidopsis thaliana
attctaacaccgtcgaa

SEQ ID NO: 58313 - DNA, 17 bp, Arabidopsis thaliana
attctaacccagttcct

SEQ ID NO: 58314 - DNA, 17 bp, Arabidopsis thaliana
attctaaccttcaggtt

SEQ ID NO: 58315 - DNA, 17 bp, Arabidopsis thaliana
attctaaccttgtgtca

SEQ ID NO: 58316 - DNA, 17 bp, Arabidopsis thaliana
attctaactaactcgtc

SEQ ID NO: 58317 - DNA, 17 bp, Arabidopsis thaliana
attctaactgaacctgc

SEQ ID NO: 58318 - DNA, 17 bp, Arabidopsis thaliana
attctaagatttcaccc

SEQ ID NO: 58319 - DNA, 17 bp, Arabidopsis thaliana
attctaaggacccaaga

SEQ ID NO: 58320 - DNA, 17 bp, Arabidopsis thaliana
attctaagtcactactc

SEQ ID NO: 58321 - DNA, 17 bp, Arabidopsis thaliana
attctaatccaacggca

SEQ ID NO: 58322 - DNA, 17 bp, Arabidopsis thaliana
attctaatcgggctaag

SEQ ID NO: 58323 - DNA, 17 bp, Arabidopsis thaliana
attctaatgcggactgt

SEQ ID NO: 58324 - DNA, 17 bp, Arabidopsis thaliana
attctaattgcggattc

SEQ ID NO: 58325 - DNA, 17 bp, Arabidopsis thaliana
attctacagatctcaat

SEQ ID NO: 58326 - DNA, 17 bp, Arabidopsis thaliana
attctacaggttgaggc

SEQ ID NO: 58327 - DNA, 17 bp, Arabidopsis thaliana
attctacagttgaaacc

SEQ ID NO: 58328 - DNA, 17 bp, Arabidopsis thaliana
attctacagttggtttc

SEQ ID NO: 58329 - DNA, 17 bp, Arabidopsis thaliana
attctacagttggtttt

SEQ ID NO: 58330 - DNA, 17 bp, Arabidopsis thaliana
attctacatcatttgtc

SEQ ID NO: 58331 - DNA, 17 bp, Arabidopsis thaliana
attctacatcttagcaa

SEQ ID NO: 58332 - DNA, 17 bp, Arabidopsis thaliana
attctaccaaaggatct

SEQ ID NO: 58333 - DNA, 17 bp, Arabidopsis thaliana
attctaccaaggagtgt

SEQ ID NO: 58334 - DNA, 17 bp, Arabidopsis thaliana
attctaccacggataat

SEQ ID NO: 58335 - DNA, 17 bp, Arabidopsis thaliana
attctacccggagtcgg

SEQ ID NO: 58336 - DNA, 17 bp, Arabidopsis thaliana
attctacccttgatgac

SEQ ID NO: 58337 - DNA, 17 bp, Arabidopsis thaliana
attctaccgaccagatc

SEQ ID NO: 58338 - DNA, 17 bp, Arabidopsis thaliana
attctaccgtgcgctgg

SEQ ID NO: 58339 - DNA, 17 bp, Arabidopsis thaliana
attctaccgttgtgcga

SEQ ID NO: 58340 - DNA, 17 bp, Arabidopsis thaliana
attctacctttggtgtc

SEQ ID NO: 58341 - DNA, 17 bp, Arabidopsis thaliana
attctacgacatccatt

SEQ ID NO: 58342 - DNA, 17 bp, Arabidopsis thaliana
attctacgagcatggcg

SEQ ID NO: 58343 - DNA, 17 bp, Arabidopsis thaliana
attctacgagtcgggtt

SEQ ID NO: 58344 - DNA, 17 bp, Arabidopsis thaliana
attctacggaaactagg

SEQ ID NO: 58345 - DNA, 17 bp, Arabidopsis thaliana
attctacggataaacgc

SEQ ID NO: 58346 - DNA, 17 bp, Arabidopsis thaliana
attctacggataagcgc

SEQ ID NO: 58347 - DNA, 17 bp, Arabidopsis thaliana
attctacggatataagc

SEQ ID NO: 58348 - DNA, 17 bp, Arabidopsis thaliana
attctacggatttatgg

SEQ ID NO: 58349 - DNA, 17 bp, Arabidopsis thaliana
attctactacggacaaa

SEQ ID NO: 58350 - DNA, 17 bp, Arabidopsis thaliana
attctactacggacaac

SEQ ID NO: 58351 - DNA, 17 bp, Arabidopsis thaliana
attctactacggacaat

SEQ ID NO: 58352 - DNA, 17 bp, Arabidopsis thaliana
attctactcagaggcct

SEQ ID NO: 58353 - DNA, 17 bp, Arabidopsis thaliana
attctactcagttgctg

SEQ ID NO: 58354 - DNA, 17 bp, Arabidopsis thaliana
attctactcgctttgat

SEQ ID NO: 58355 - DNA, 17 bp, Arabidopsis thaliana
attctactcttggcaag

SEQ ID NO: 58356 - DNA, 17 bp, Arabidopsis thaliana
attctacttgattcacc

SEQ ID NO: 58357 - DNA, 17 bp, Arabidopsis thaliana
attctactttggcgatc

SEQ ID NO: 58358 - DNA, 17 bp, Arabidopsis thaliana
attctagcggaaaacgg

SEQ ID NO: 58359 - DNA, 17 bp, Arabidopsis thaliana
attctaggaaacacatc

SEQ ID NO: 58360 - DNA, 17 bp, Arabidopsis thaliana
attctaggatttcaccc

SEQ ID NO: 58361 - DNA, 17 bp, Arabidopsis thaliana
attctaggatttcactc

SEQ ID NO: 58362 - DNA, 17 bp, Arabidopsis thaliana
attctaggattttccag

SEQ ID NO: 58363 - DNA, 17 bp, Arabidopsis thaliana
attctagttcgtctgag

SEQ ID NO: 58364 - DNA, 17 bp, Arabidopsis thaliana
attctagtttgccggtt

SEQ ID NO: 58365 - DNA, 17 bp, Arabidopsis thaliana
attctataatttttgtt

SEQ ID NO: 58366 - DNA, 17 bp, Arabidopsis thaliana
attctatatgggacaga

SEQ ID NO: 58367 - DNA, 17 bp, Arabidopsis thaliana
attctatcatttcggtt

SEQ ID NO: 58368 - DNA, 17 bp, Arabidopsis thaliana
attctatcgattgcgct

SEQ ID NO: 58369 - DNA, 17 bp, Arabidopsis thaliana
attctatgacttcaccc

SEQ ID NO: 58370 - DNA, 17 bp, Arabidopsis thaliana
attctatggataagcgc

SEQ ID NO: 58371 - DNA, 17 bp, Arabidopsis thaliana
attctatggcggtttcg

SEQ ID NO: 58372 - DNA, 17 bp, Arabidopsis thaliana
attctatgggtgctggt

SEQ ID NO: 58373 - DNA, 17 bp, Arabidopsis thaliana
attctatgggtggtggt

SEQ ID NO: 58374 - DNA, 17 bp, Arabidopsis thaliana
attctatgttcttcctt

SEQ ID NO: 58375 - DNA, 17 bp, Arabidopsis thaliana
attctattagctcagtg

SEQ ID NO: 58376 - DNA, 17 bp, Arabidopsis thaliana
attctattagctcagtt

SEQ ID NO: 58377 - DNA, 17 bp, Arabidopsis thaliana
attctattcggagacaa

SEQ ID NO: 58378 - DNA, 17 bp, Arabidopsis thaliana
attctattgtgcgagtt

SEQ ID NO: 58379 - DNA, 17 bp, Arabidopsis thaliana
attctatttgtgatagg

SEQ ID NO: 58380 - DNA, 17 bp, Arabidopsis thaliana
attctcaaaatttcccc

SEQ ID NO: 58381 - DNA, 17 bp, Arabidopsis thaliana
attctcaaatgtgtgtg

SEQ ID NO: 58382 - DNA, 17 bp, Arabidopsis thaliana
attctcaaggctcttgt

SEQ ID NO: 58383 - DNA, 17 bp, Arabidopsis thaliana
attctcaagtgtcaact

SEQ ID NO: 58384 - DNA, 17 bp, Arabidopsis thaliana
attctcaagttgggtct

SEQ ID NO: 58385 - DNA, 17 bp, Arabidopsis thaliana
attctcactatgcacct

SEQ ID NO: 58386 - DNA, 17 bp, Arabidopsis thaliana
attctcagagcgttttg

SEQ ID NO: 58387 - DNA, 17 bp, Arabidopsis thaliana
attctcagattttcctc

SEQ ID NO: 58388 - DNA, 17 bp, Arabidopsis thaliana
attctcagctcgttgcc

SEQ ID NO: 58389 - DNA, 17 bp, Arabidopsis thaliana
attctcagctgccagaa

SEQ ID NO: 58390 - DNA, 17 bp, Arabidopsis thaliana
attctcaggatcgagta

SEQ ID NO: 58391 - DNA, 17 bp, Arabidopsis thaliana
attctcaggggacttta

SEQ ID NO: 58392 - DNA, 17 bp, Arabidopsis thaliana
attctcagtggatgaac

SEQ ID NO: 58393 - DNA, 17 bp, Arabidopsis thaliana
attctcagttggttcag

SEQ ID NO: 58394 - DNA, 17 bp, Arabidopsis thaliana
attctcatacagaatcg

SEQ ID NO: 58395 - DNA, 17 bp, Arabidopsis thaliana
attctcatcaaatttgg

SEQ ID NO: 58396 - DNA, 17 bp, Arabidopsis thaliana
attctcatccaatttgg

SEQ ID NO: 58397 - DNA, 17 bp, Arabidopsis thaliana
attctcatgatgtgttt

SEQ ID NO: 58398 - DNA, 17 bp, Arabidopsis thaliana
attctcatgtttttccg

SEQ ID NO: 58399 - DNA, 17 bp, Arabidopsis thaliana
attctccagaagctgac

SEQ ID NO: 58400 - DNA, 17 bp, Arabidopsis thaliana
attctccagaagttcag

SEQ ID NO: 58401 - DNA, 17 bp, Arabidopsis thaliana
attctccatcgcgtgac

SEQ ID NO: 58402 - DNA, 17 bp, Arabidopsis thaliana
attctccatttgaggct

SEQ ID NO: 58403 - DNA, 17 bp, Arabidopsis thaliana
attctccgctacagaga

SEQ ID NO: 58404 - DNA, 17 bp, Arabidopsis thaliana
attctccggcgccggtg

SEQ ID NO: 58405 - DNA, 17 bp, Arabidopsis thaliana
attctccggttcaatga

SEQ ID NO: 58406 - DNA, 17 bp, Arabidopsis thaliana
attctcctacatattta

SEQ ID NO: 58407 - DNA, 17 bp, Arabidopsis thaliana
attctcctacatcttac

SEQ ID NO: 58408 - DNA, 17 bp, Arabidopsis thaliana
attctcctacatcttag

SEQ ID NO: 58409 - DNA, 17 bp, Arabidopsis thaliana
attctcctgatgattga

SEQ ID NO: 58410 - DNA, 17 bp, Arabidopsis thaliana
attctccttcttcgctg

SEQ ID NO: 58411 - DNA, 17 bp, Arabidopsis thaliana
attctcctttggtagtt

SEQ ID NO: 58412 - DNA, 17 bp, Arabidopsis thaliana
attctccttttgtccgc

SEQ ID NO: 58413 - DNA, 17 bp, Arabidopsis thaliana
attctcgaaccttacag

SEQ ID NO: 58414 - DNA, 17 bp, Arabidopsis thaliana
attctcgaatccgttag

SEQ ID NO: 58415 - DNA, 17 bp, Arabidopsis thaliana
attctcgaattctctgg

SEQ ID NO: 58416 - DNA, 17 bp, Arabidopsis thaliana
attctcgaccgatctgt

SEQ ID NO: 58417 - DNA, 17 bp, Arabidopsis thaliana
attctcgacgaacactg

SEQ ID NO: 58418 - DNA, 17 bp, Arabidopsis thaliana
attctcgactaaaggct

SEQ ID NO: 58419 - DNA, 17 bp, Arabidopsis thaliana
attctcgactctcttgt

SEQ ID NO: 58420 - DNA, 17 bp, Arabidopsis thaliana
attctcgagccgtcatc

SEQ ID NO: 58421 - DNA, 17 bp, Arabidopsis thaliana
attctcgataccttgtg

SEQ ID NO: 58422 - DNA, 17 bp, Arabidopsis thaliana
attctcgatcttggtcc

SEQ ID NO: 58423 - DNA, 17 bp, Arabidopsis thaliana
attctcggacccggtcg

SEQ ID NO: 58424 - DNA, 17 bp, Arabidopsis thaliana
attctcggagatcctaa

SEQ ID NO: 58425 - DNA, 17 bp, Arabidopsis thaliana
attctcggagatctcag

SEQ ID NO: 58426 - DNA, 17 bp, Arabidopsis thaliana
attctcggcaggtcagt

SEQ ID NO: 58427 - DNA, 17 bp, Arabidopsis thaliana
attctcggctcgggacg

SEQ ID NO: 58428 - DNA, 17 bp, Arabidopsis thaliana
attctcgggctttgtga

SEQ ID NO: 58429 - DNA, 17 bp, Arabidopsis thaliana
attctcggtccccagag

SEQ ID NO: 58430 - DNA, 17 bp, Arabidopsis thaliana
attctcgtccgacttca

SEQ ID NO: 58431 - DNA, 17 bp, Arabidopsis thaliana
attctcgtgatgacgga

SEQ ID NO: 58432 - DNA, 17 bp, Arabidopsis thaliana
attctcgtgcttgccta

SEQ ID NO: 58433 - DNA, 17 bp, Arabidopsis thaliana
attctcgttactcaaat

SEQ ID NO: 58434 - DNA, 17 bp, Arabidopsis thaliana
attctctaaggtttctc

SEQ ID NO: 58435 - DNA, 17 bp, Arabidopsis thaliana
attctctaaggtttttc

SEQ ID NO: 58436 - DNA, 17 bp, Arabidopsis thaliana
attctctacataaatgc

SEQ ID NO: 58437 - DNA, 17 bp, Arabidopsis thaliana
attctctagtccgactt

SEQ ID NO: 58438 - DNA, 17 bp, Arabidopsis thaliana
attctctcaggagaagc

SEQ ID NO: 58439 - DNA, 17 bp, Arabidopsis thaliana
attctctcagttctact

SEQ ID NO: 58440 - DNA, 17 bp, Arabidopsis thaliana
attctctccaaatgaat

SEQ ID NO: 58441 - DNA, 17 bp, Arabidopsis thaliana
attctctccctcgccgg

SEQ ID NO: 58442 - DNA, 17 bp, Arabidopsis thaliana
attctctctttctgcat

SEQ ID NO: 58443 - DNA, 17 bp, Arabidopsis thaliana
attctctgacggttcca

SEQ ID NO: 58444 - DNA, 17 bp, Arabidopsis thaliana
attctctgagtggtgac

SEQ ID NO: 58445 - DNA, 17 bp, Arabidopsis thaliana
attctctgagtggtgat

SEQ ID NO: 58446 - DNA, 17 bp, Arabidopsis thaliana
attctctgccacatctt

SEQ ID NO: 58447 - DNA, 17 bp, Arabidopsis thaliana
attctctgccctctgct

SEQ ID NO: 58448 - DNA, 17 bp, Arabidopsis thaliana
attctctgcgtagaatc

SEQ ID NO: 58449 - DNA, 17 bp, Arabidopsis thaliana
attctctgcttctcctg

SEQ ID NO: 58450 - DNA, 17 bp, Arabidopsis thaliana
attctctggcttgcgtt

SEQ ID NO: 58451 - DNA, 17 bp, Arabidopsis thaliana
attctctggttgctctt

SEQ ID NO: 58452 - DNA, 17 bp, Arabidopsis thaliana
attctctgtgttgtttt

SEQ ID NO: 58453 - DNA, 17 bp, Arabidopsis thaliana
attctcttcgtcttcag

SEQ ID NO: 58454 - DNA, 17 bp, Arabidopsis thaliana
attctcttctctcctcc

SEQ ID NO: 58455 - DNA, 17 bp, Arabidopsis thaliana
attctcttgaggaattt

SEQ ID NO: 58456 - DNA, 17 bp, Arabidopsis thaliana
attctcttggatattcg

SEQ ID NO: 58457 - DNA, 17 bp, Arabidopsis thaliana
attctcttgggtgaacg

SEQ ID NO: 58458 - DNA, 17 bp, Arabidopsis thaliana
attctctttcgcgatct

SEQ ID NO: 58459 - DNA, 17 bp, Arabidopsis thaliana
attctgaaaagcttacc

SEQ ID NO: 58460 - DNA, 17 bp, Arabidopsis thaliana
attctgaaccaaagccg

SEQ ID NO: 58461 - DNA, 17 bp, Arabidopsis thaliana
attctgaactcagtcgt

SEQ ID NO: 58462 - DNA, 17 bp, Arabidopsis thaliana
attctgaagaatgtatt

SEQ ID NO: 58463 - DNA, 17 bp, Arabidopsis thaliana
attctgaaggcaatcga

SEQ ID NO: 58464 - DNA, 17 bp, Arabidopsis thaliana
attctgaagttagtgct

SEQ ID NO: 58465 - DNA, 17 bp, Arabidopsis thaliana
attctgaagttgtatgt

SEQ ID NO: 58466 - DNA, 17 bp, Arabidopsis thaliana
attctgaagttgtgtgt

SEQ ID NO: 58467 - DNA, 17 bp, Arabidopsis thaliana
attctgaatcaggtcgt

SEQ ID NO: 58468 - DNA, 17 bp, Arabidopsis thaliana
attctgaatctacgact

SEQ ID NO: 58469 - DNA, 17 bp, Arabidopsis thaliana
attctgaccgcacatac

SEQ ID NO: 58470 - DNA, 17 bp, Arabidopsis thaliana
attctgacttagaggcg

SEQ ID NO: 58471 - DNA, 17 bp, Arabidopsis thaliana
attctgactttggtctc

SEQ ID NO: 58472 - DNA, 17 bp, Arabidopsis thaliana
attctgagaccatgcaa

SEQ ID NO: 58473 - DNA, 17 bp, Arabidopsis thaliana
attctgagaggatatgt

SEQ ID NO: 58474 - DNA, 17 bp, Arabidopsis thaliana
attctgagaggtgacct

SEQ ID NO: 58475 - DNA, 17 bp, Arabidopsis thaliana
attctgagatttgggaa

SEQ ID NO: 58476 - DNA, 17 bp, Arabidopsis thaliana
attctgagctgcattcg

SEQ ID NO: 58477 - DNA, 17 bp, Arabidopsis thaliana
attctgaggaggctcca

SEQ ID NO: 58478 - DNA, 17 bp, Arabidopsis thaliana
attctgagtaccactcc

SEQ ID NO: 58479 - DNA, 17 bp, Arabidopsis thaliana
attctgagtaccactct

SEQ ID NO: 58480 - DNA, 17 bp, Arabidopsis thaliana
attctgagttcttgacg

SEQ ID NO: 58481 - DNA, 17 bp, Arabidopsis thaliana
attctgagtttctgacc

SEQ ID NO: 58482 - DNA, 17 bp, Arabidopsis thaliana
attctgataccgctgtt

SEQ ID NO: 58483 - DNA, 17 bp, Arabidopsis thaliana
attctgatcaccggcaa

SEQ ID NO: 58484 - DNA, 17 bp, Arabidopsis thaliana
attctgatccaacttgc

SEQ ID NO: 58485 - DNA, 17 bp, Arabidopsis thaliana
attctgatccacttcgg

SEQ ID NO: 58486 - DNA, 17 bp, Arabidopsis thaliana
attctgatcgtcactcg

SEQ ID NO: 58487 - DNA, 17 bp, Arabidopsis thaliana
attctgatcgtgccctg

SEQ ID NO: 58488 - DNA, 17 bp, Arabidopsis thaliana
attctgatgggccgttc

SEQ ID NO: 58489 - DNA, 17 bp, Arabidopsis thaliana
attctgatgggccgttg

SEQ ID NO: 58490 - DNA, 17 bp, Arabidopsis thaliana
attctgatgtacgctga

SEQ ID NO: 58491 - DNA, 17 bp, Arabidopsis thaliana
attctgatttcctcgcg

SEQ ID NO: 58492 - DNA, 17 bp, Arabidopsis thaliana
attctgatttccttgtg

SEQ ID NO: 58493 - DNA, 17 bp, Arabidopsis thaliana
attctgcaacgataaac

SEQ ID NO: 58494 - DNA, 17 bp, Arabidopsis thaliana
attctgcaactatccat

SEQ ID NO: 58495 - DNA, 17 bp, Arabidopsis thaliana
attctgcaagggctggc

SEQ ID NO: 58496 - DNA, 17 bp, Arabidopsis thaliana
attctgcaatttctcca

SEQ ID NO: 58497 - DNA, 17 bp, Arabidopsis thaliana
attctgcacagtccgac

SEQ ID NO: 58498 - DNA, 17 bp, Arabidopsis thaliana
attctgcacgagatcct

SEQ ID NO: 58499 - DNA, 17 bp, Arabidopsis thaliana
attctgcactcagagat

SEQ ID NO: 58500 - DNA, 17 bp, Arabidopsis thaliana
attctgcagaccttgtg

SEQ ID NO: 58501 - DNA, 17 bp, Arabidopsis thaliana
attctgcagcacttggt

SEQ ID NO: 58502 - DNA, 17 bp, Arabidopsis thaliana
attctgcagcagtttgt

SEQ ID NO: 58503 - DNA, 17 bp, Arabidopsis thaliana
attctgcagtgaatcgc

SEQ ID NO: 58504 - DNA, 17 bp, Arabidopsis thaliana
attctgccaaagatctc

SEQ ID NO: 58505 - DNA, 17 bp, Arabidopsis thaliana
attctgccaccgcaacc

SEQ ID NO: 58506 - DNA, 17 bp, Arabidopsis thaliana
attctgccactagacca

SEQ ID NO: 58507 - DNA, 17 bp, Arabidopsis thaliana
attctgcccatgtcgta

SEQ ID NO: 58508 - DNA, 17 bp, Arabidopsis thaliana
attctgcctccgctact

SEQ ID NO: 58509 - DNA, 17 bp, Arabidopsis thaliana
attctgcgaatgtcggc

SEQ ID NO: 58510 - DNA, 17 bp, Arabidopsis thaliana
attctgcgcttagagac

SEQ ID NO: 58511 - DNA, 17 bp, Arabidopsis thaliana
attctgcggcaggttat

SEQ ID NO: 58512 - DNA, 17 bp, Arabidopsis thaliana
attctgcgggagacaac

SEQ ID NO: 58513 - DNA, 17 bp, Arabidopsis thaliana
attctgcgtacaatggt

SEQ ID NO: 58514 - DNA, 17 bp, Arabidopsis thaliana
attctgcgtctttgatt

SEQ ID NO: 58515 - DNA, 17 bp, Arabidopsis thaliana
attctgctcttagagac

SEQ ID NO: 58516 - DNA, 17 bp, Arabidopsis thaliana
attctgctgcgaatgtc

SEQ ID NO: 58517 - DNA, 17 bp, Arabidopsis thaliana
attctgctgcgccgctt

SEQ ID NO: 58518 - DNA, 17 bp, Arabidopsis thaliana
attctgctggttctggc

SEQ ID NO: 58519 - DNA, 17 bp, Arabidopsis thaliana
attctgcttcgtccgtc

SEQ ID NO: 58520 - DNA, 17 bp, Arabidopsis thaliana
attctggacgaatcccg

SEQ ID NO: 58521 - DNA, 17 bp, Arabidopsis thaliana
attctggacttggtgat

SEQ ID NO: 58522 - DNA, 17 bp, Arabidopsis thaliana
attctggagcaaaaccg

SEQ ID NO: 58523 - DNA, 17 bp, Arabidopsis thaliana
attctggagcaagtctc

SEQ ID NO: 58524 - DNA, 17 bp, Arabidopsis thaliana
attctggatcgaagcat

SEQ ID NO: 58525 - DNA, 17 bp, Arabidopsis thaliana
attctggcccactacat

SEQ ID NO: 58526 - DNA, 17 bp, Arabidopsis thaliana
attctggcgatcattgt

SEQ ID NO: 58527 - DNA, 17 bp, Arabidopsis thaliana
attctggctactgctca

SEQ ID NO: 58528 - DNA, 17 bp, Arabidopsis thaliana
attctgggacgaagccc

SEQ ID NO: 58529 - DNA, 17 bp, Arabidopsis thaliana
attctggggcgtgtgat

SEQ ID NO: 58530 - DNA, 17 bp, Arabidopsis thaliana
attctggggctggacca

SEQ ID NO: 58531 - DNA, 17 bp, Arabidopsis thaliana
attctggggtaagtgac

SEQ ID NO: 58532 - DNA, 17 bp, Arabidopsis thaliana
attctggggtaagtgat

SEQ ID NO: 58533 - DNA, 17 bp, Arabidopsis thaliana
attctggtatacggcaa

SEQ ID NO: 58534 - DNA, 17 bp, Arabidopsis thaliana
attctggtcaaagtagg

SEQ ID NO: 58535 - DNA, 17 bp, Arabidopsis thaliana
attctggtccagcccca

SEQ ID NO: 58536 - DNA, 17 bp, Arabidopsis thaliana
attctggtgtcctaggc

SEQ ID NO: 58537 - DNA, 17 bp, Arabidopsis thaliana
attctggtgtttgcttc

SEQ ID NO: 58538 - DNA, 17 bp, Arabidopsis thaliana
attctggttccactact

SEQ ID NO: 58539 - DNA, 17 bp, Arabidopsis thaliana
attctggttgggtatcg

SEQ ID NO: 58540 - DNA, 17 bp, Arabidopsis thaliana
attctgtaatagtgcgg

SEQ ID NO: 58541 - DNA, 17 bp, Arabidopsis thaliana
attctgtaatgcgaggt

SEQ ID NO: 58542 - DNA, 17 bp, Arabidopsis thaliana
attctgtacgggatcag

SEQ ID NO: 58543 - DNA, 17 bp, Arabidopsis thaliana
attctgtacgttcggtt

SEQ ID NO: 58544 - DNA, 17 bp, Arabidopsis thaliana
attctgtagtccggtcg

SEQ ID NO: 58545 - DNA, 17 bp, Arabidopsis thaliana
attctgtagtctggtcg

SEQ ID NO: 58546 - DNA, 17 bp, Arabidopsis thaliana
attctgtagttgatggc

SEQ ID NO: 58547 - DNA, 17 bp, Arabidopsis thaliana
attctgtcagttgagat

SEQ ID NO: 58548 - DNA, 17 bp, Arabidopsis thaliana
attctgtcagttgggat

SEQ ID NO: 58549 - DNA, 17 bp, Arabidopsis thaliana
attctgtcagttggggt

SEQ ID NO: 58550 - DNA, 17 bp, Arabidopsis thaliana
attctgtctaagctgcg

SEQ ID NO: 58551 - DNA, 17 bp, Arabidopsis thaliana
attctgtgaatgtcgac

SEQ ID NO: 58552 - DNA, 17 bp, Arabidopsis thaliana
attctgtgatgttggcc

SEQ ID NO: 58553 - DNA, 17 bp, Arabidopsis thaliana
attctgtgatgttggcg

SEQ ID NO: 58554 - DNA, 17 bp, Arabidopsis thaliana
attctgtggaggtctga

SEQ ID NO: 58555 - DNA, 17 bp, Arabidopsis thaliana
attctgtgtgaccacgt

SEQ ID NO: 58556 - DNA, 17 bp, Arabidopsis thaliana
attctgttagcgaggca

SEQ ID NO: 58557 - DNA, 17 bp, Arabidopsis thaliana
attctgttcatcgtatc

SEQ ID NO: 58558 - DNA, 17 bp, Arabidopsis thaliana
attctgttccccccccc

SEQ ID NO: 58559 - DNA, 17 bp, Arabidopsis thaliana
attctgttcctagcccg

SEQ ID NO: 58560 - DNA, 17 bp, Arabidopsis thaliana
attctgttcgaacattg

SEQ ID NO: 58561 - DNA, 17 bp, Arabidopsis thaliana
attctgttgtcgtcgca

SEQ ID NO: 58562 - DNA, 17 bp, Arabidopsis thaliana
attctgtttcgaatcgg

SEQ ID NO: 58563 - DNA, 17 bp, Arabidopsis thaliana
attctgtttgtggcttg

SEQ ID NO: 58564 - DNA, 17 bp, Arabidopsis thaliana
attctgttttcccgcca

SEQ ID NO: 58565 - DNA, 17 bp, Arabidopsis thaliana
attcttaagagctctgt

SEQ ID NO: 58566 - DNA, 17 bp, Arabidopsis thaliana
attcttaatctgcgtgc

SEQ ID NO: 58567 - DNA, 17 bp, Arabidopsis thaliana
attcttaatgggatcaa

SEQ ID NO: 58568 - DNA, 17 bp, Arabidopsis thaliana
attcttacaaaatcatg

SEQ ID NO: 58569 - DNA, 17 bp, Arabidopsis thaliana
attcttacaagatcggg

SEQ ID NO: 58570 - DNA, 17 bp, Arabidopsis thaliana
attcttacaagttgccg

SEQ ID NO: 58571 - DNA, 17 bp, Arabidopsis thaliana
attcttacgcctctaag

SEQ ID NO: 58572 - DNA, 17 bp, Arabidopsis thaliana
attcttacgccttcaag

SEQ ID NO: 58573 - DNA, 17 bp, Arabidopsis thaliana
attcttacgcctttaag

SEQ ID NO: 58574 - DNA, 17 bp, Arabidopsis thaliana
attcttacgcctttcag

SEQ ID NO: 58575 - DNA, 17 bp, Arabidopsis thaliana
attcttagcccgttttg

SEQ ID NO: 58576 - DNA, 17 bp, Arabidopsis thaliana
attcttaggcctgtcga

SEQ ID NO: 58577 - DNA, 17 bp, Arabidopsis thaliana
attcttaggctgtgaat

SEQ ID NO: 58578 - DNA, 17 bp, Arabidopsis thaliana
attcttagtcggggttg

SEQ ID NO: 58579 - DNA, 17 bp, Arabidopsis thaliana
attcttagtggaagctc

SEQ ID NO: 58580 - DNA, 17 bp, Arabidopsis thaliana
attcttagttggtggag

SEQ ID NO: 58581 - DNA, 17 bp, Arabidopsis thaliana
attcttatgttgcagct

SEQ ID NO: 58582 - DNA, 17 bp, Arabidopsis thaliana
attcttattcttattct

SEQ ID NO: 58583 - DNA, 17 bp, Arabidopsis thaliana
attcttattggtgcttc

SEQ ID NO: 58584 - DNA, 17 bp, Arabidopsis thaliana
attcttcaacttggcga

SEQ ID NO: 58585 - DNA, 17 bp, Arabidopsis thaliana
attcttcaacttggttt

SEQ ID NO: 58586 - DNA, 17 bp, Arabidopsis thaliana
attcttcaagagactgc

SEQ ID NO: 58587 - DNA, 17 bp, Arabidopsis thaliana
attcttcacaagcaggc

SEQ ID NO: 58588 - DNA, 17 bp, Arabidopsis thaliana
attcttcacagggattg

SEQ ID NO: 58589 - DNA, 17 bp, Arabidopsis thaliana
attcttcaccgctttat

SEQ ID NO: 58590 - DNA, 17 bp, Arabidopsis thaliana
attcttcaccgtttctt

SEQ ID NO: 58591 - DNA, 17 bp, Arabidopsis thaliana
attcttcactggagact

SEQ ID NO: 58592 - DNA, 17 bp, Arabidopsis thaliana
attcttcagcattgact

SEQ ID NO: 58593 - DNA, 17 bp, Arabidopsis thaliana
attcttcagcctgagtg

SEQ ID NO: 58594 - DNA, 17 bp, Arabidopsis thaliana
attcttcaggagactgc

SEQ ID NO: 58595 - DNA, 17 bp, Arabidopsis thaliana
attcttcaggattggct

SEQ ID NO: 58596 - DNA, 17 bp, Arabidopsis thaliana
attcttcagggaactct

SEQ ID NO: 58597 - DNA, 17 bp, Arabidopsis thaliana
attcttcagggaactgt

SEQ ID NO: 58598 - DNA, 17 bp, Arabidopsis thaliana
attcttcagggcactct

SEQ ID NO: 58599 - DNA, 17 bp, Arabidopsis thaliana
attcttcaggggaatgt

SEQ ID NO: 58600 - DNA, 17 bp, Arabidopsis thaliana
attcttcaggggactgt

SEQ ID NO: 58601 - DNA, 17 bp, Arabidopsis thaliana
attcttcaggtcgggca

SEQ ID NO: 58602 - DNA, 17 bp, Arabidopsis thaliana
attcttcagtttggttt

SEQ ID NO: 58603 - DNA, 17 bp, Arabidopsis thaliana
attcttcatcgatcttc

SEQ ID NO: 58604 - DNA, 17 bp, Arabidopsis thaliana
attcttccattgagtag

SEQ ID NO: 58605 - DNA, 17 bp, Arabidopsis thaliana
attcttccctgtcgctc

SEQ ID NO: 58606 - DNA, 17 bp, Arabidopsis thaliana
attcttccgccgaccgg

SEQ ID NO: 58607 - DNA, 17 bp, Arabidopsis thaliana
attcttccgtcgttgca

SEQ ID NO: 58608 - DNA, 17 bp, Arabidopsis thaliana
attcttccttctctgcc

SEQ ID NO: 58609 - DNA, 17 bp, Arabidopsis thaliana
attcttcgactgaggta

SEQ ID NO: 58610 - DNA, 17 bp, Arabidopsis thaliana
attcttcgactgttctt

SEQ ID NO: 58611 - DNA, 17 bp, Arabidopsis thaliana
attcttcgccaagatgt

SEQ ID NO: 58612 - DNA, 17 bp, Arabidopsis thaliana
attcttcggtcaagatg

SEQ ID NO: 58613 - DNA, 17 bp, Arabidopsis thaliana
attcttcggtgcaggcc

SEQ ID NO: 58614 - DNA, 17 bp, Arabidopsis thaliana
attcttcggttctgtgg

SEQ ID NO: 58615 - DNA, 17 bp, Arabidopsis thaliana
attcttcgtcaatgtcc

SEQ ID NO: 58616 - DNA, 17 bp, Arabidopsis thaliana
attcttcgtcttaagca

SEQ ID NO: 58617 - DNA, 17 bp, Arabidopsis thaliana
attcttcgtgcaatttt

SEQ ID NO: 58618 - DNA, 17 bp, Arabidopsis thaliana
attcttctacaagctga

SEQ ID NO: 58619 - DNA, 17 bp, Arabidopsis thaliana
attcttctcatgttggg

SEQ ID NO: 58620 - DNA, 17 bp, Arabidopsis thaliana
attcttctccctgtggc

SEQ ID NO: 58621 - DNA, 17 bp, Arabidopsis thaliana
attcttctctcagtgtg

SEQ ID NO: 58622 - DNA, 17 bp, Arabidopsis thaliana
attcttctggttcggct

SEQ ID NO: 58623 - DNA, 17 bp, Arabidopsis thaliana
attcttcttctccatgc

SEQ ID NO: 58624 - DNA, 17 bp, Arabidopsis thaliana
attcttcttcttcatgg

SEQ ID NO: 58625 - DNA, 17 bp, Arabidopsis thaliana
attcttctttgtcgctt

SEQ ID NO: 58626 - DNA, 17 bp, Arabidopsis thaliana
attcttgaaatgaccgt

SEQ ID NO: 58627 - DNA, 17 bp, Arabidopsis thaliana
attcttgaaatggccgt

SEQ ID NO: 58628 - DNA, 17 bp, Arabidopsis thaliana
attcttgaacttggttg

SEQ ID NO: 58629 - DNA, 17 bp, Arabidopsis thaliana
attcttgactacactaa

SEQ ID NO: 58630 - DNA, 17 bp, Arabidopsis thaliana
attcttgactctagtcc

SEQ ID NO: 58631 - DNA, 17 bp, Arabidopsis thaliana
attcttgactgtaaaat

SEQ ID NO: 58632 - DNA, 17 bp, Arabidopsis thaliana
attcttgagagatccct

SEQ ID NO: 58633 - DNA, 17 bp, Arabidopsis thaliana
attcttgagtcgattga

SEQ ID NO: 58634 - DNA, 17 bp, Arabidopsis thaliana
attcttgatcagtatca

SEQ ID NO: 58635 - DNA, 17 bp, Arabidopsis thaliana
attcttgatctgctggc

SEQ ID NO: 58636 - DNA, 17 bp, Arabidopsis thaliana
attcttgatgatgacct

SEQ ID NO: 58637 - DNA, 17 bp, Arabidopsis thaliana
attcttgatttggagac

SEQ ID NO: 58638 - DNA, 17 bp, Arabidopsis thaliana
attcttgccaagggtcg

SEQ ID NO: 58639 - DNA, 17 bp, Arabidopsis thaliana
attcttgcccatttttg

SEQ ID NO: 58640 - DNA, 17 bp, Arabidopsis thaliana
attcttgcccccggtcg

SEQ ID NO: 58641 - DNA, 17 bp, Arabidopsis thaliana
attcttgccctctgctg

SEQ ID NO: 58642 - DNA, 17 bp, Arabidopsis thaliana
attcttgctccagaccc

SEQ ID NO: 58643 - DNA, 17 bp, Arabidopsis thaliana
attcttggacccggtcg

SEQ ID NO: 58644 - DNA, 17 bp, Arabidopsis thaliana
attcttggaccttcttt

SEQ ID NO: 58645 - DNA, 17 bp, Arabidopsis thaliana
attcttggactgggtta

SEQ ID NO: 58646 - DNA, 17 bp, Arabidopsis thaliana
attcttgggtcacaaag

SEQ ID NO: 58647 - DNA, 17 bp, Arabidopsis thaliana
attcttggtgcaggtcg

SEQ ID NO: 58648 - DNA, 17 bp, Arabidopsis thaliana
attcttggttcaagcat

SEQ ID NO: 58649 - DNA, 17 bp, Arabidopsis thaliana
attcttgtaggggacga

SEQ ID NO: 58650 - DNA, 17 bp, Arabidopsis thaliana
attcttgtgacgaattg

SEQ ID NO: 58651 - DNA, 17 bp, Arabidopsis thaliana
attcttgtgtgactaat

SEQ ID NO: 58652 - DNA, 17 bp, Arabidopsis thaliana
attcttgttattgggtt

SEQ ID NO: 58653 - DNA, 17 bp, Arabidopsis thaliana
attcttgttggaccgtg

SEQ ID NO: 58654 - DNA, 17 bp, Arabidopsis thaliana
attctttaaagcctaac

SEQ ID NO: 58655 - DNA, 17 bp, Arabidopsis thaliana
attctttacgaagacaa

SEQ ID NO: 58656 - DNA, 17 bp, Arabidopsis thaliana
attctttactgtcgttc

SEQ ID NO: 58657 - DNA, 17 bp, Arabidopsis thaliana
attctttccactcatcc

SEQ ID NO: 58658 - DNA, 17 bp, Arabidopsis thaliana
attctttccgctgcacg

SEQ ID NO: 58659 - DNA, 17 bp, Arabidopsis thaliana
attctttccttcagatt

SEQ ID NO: 58660 - DNA, 17 bp, Arabidopsis thaliana
attctttcgtcttgagc

SEQ ID NO: 58661 - DNA, 17 bp, Arabidopsis thaliana
attctttcgtgagattg

SEQ ID NO: 58662 - DNA, 17 bp, Arabidopsis thaliana
attctttctcggttaga

SEQ ID NO: 58663 - DNA, 17 bp, Arabidopsis thaliana
attctttctctgtgggt

SEQ ID NO: 58664 - DNA, 17 bp, Arabidopsis thaliana
attctttgaatcgtaag

SEQ ID NO: 58665 - DNA, 17 bp, Arabidopsis thaliana
attctttgactaaggta

SEQ ID NO: 58666 - DNA, 17 bp, Arabidopsis thaliana
attctttgactgaggta

SEQ ID NO: 58667 - DNA, 17 bp, Arabidopsis thaliana
attctttgacttcggtc

SEQ ID NO: 58668 - DNA, 17 bp, Arabidopsis thaliana
attctttgacttcgttc

SEQ ID NO: 58669 - DNA, 17 bp, Arabidopsis thaliana
attctttgagacacatg

SEQ ID NO: 58670 - DNA, 17 bp, Arabidopsis thaliana
attctttgagctgccat

SEQ ID NO: 58671 - DNA, 17 bp, Arabidopsis thaliana
attctttgagctgcgat

SEQ ID NO: 58672 - DNA, 17 bp, Arabidopsis thaliana
attctttgattttccaa

SEQ ID NO: 58673 - DNA, 17 bp, Arabidopsis thaliana
attctttgccacattgg

SEQ ID NO: 58674 - DNA, 17 bp, Arabidopsis thaliana
attctttggaccatctt

SEQ ID NO: 58675 - DNA, 17 bp, Arabidopsis thaliana
attctttggagatgatt

SEQ ID NO: 58676 - DNA, 17 bp, Arabidopsis thaliana
attctttggcgtcgtcg

SEQ ID NO: 58677 - DNA, 17 bp, Arabidopsis thaliana
attctttgtcctcactc

SEQ ID NO: 58678 - DNA, 17 bp, Arabidopsis thaliana
attcttttcttcgcgga

SEQ ID NO: 58679 - DNA, 17 bp, Arabidopsis thaliana
attcttttgacgaattg

SEQ ID NO: 58680 - DNA, 17 bp, Arabidopsis thaliana
attcttttgatcgttgt

SEQ ID NO: 58681 - DNA, 17 bp, Arabidopsis thaliana
attcttttgggccaaca

SEQ ID NO: 58682 - DNA, 17 bp, Arabidopsis thaliana
attgaaaaaccaactca

SEQ ID NO: 58683 - DNA, 17 bp, Arabidopsis thaliana
attgaaaaacctgctca

SEQ ID NO: 58684 - DNA, 17 bp, Arabidopsis thaliana
attgaaaaaggagttcg

SEQ ID NO: 58685 - DNA, 17 bp, Arabidopsis thaliana
attgaaaaatctgatag

SEQ ID NO: 58686 - DNA, 17 bp, Arabidopsis thaliana
attgaaaactagattca

SEQ ID NO: 58687 - DNA, 17 bp, Arabidopsis thaliana
attgaaaactgaacttt

SEQ ID NO: 58688 - DNA, 17 bp, Arabidopsis thaliana
attgaaaatgctggcca

SEQ ID NO: 58689 - DNA, 17 bp, Arabidopsis thaliana
attgaaacatttggcgg

SEQ ID NO: 58690 - DNA, 17 bp, Arabidopsis thaliana
attgaaaccatgattcc

SEQ ID NO: 58691 - DNA, 17 bp, Arabidopsis thaliana
attgaaaccatgattgc

SEQ ID NO: 58692 - DNA, 17 bp, Arabidopsis thaliana
attgaaacccactggat

SEQ ID NO: 58693 - DNA, 17 bp, Arabidopsis thaliana
attgaaacctgataagc

SEQ ID NO: 58694 - DNA, 17 bp, Arabidopsis thaliana
attgaaaccttgggctc

SEQ ID NO: 58695 - DNA, 17 bp, Arabidopsis thaliana
attgaaacggtgtgagt

SEQ ID NO: 58696 - DNA, 17 bp, Arabidopsis thaliana
attgaaactctctctga

SEQ ID NO: 58697 - DNA, 17 bp, Arabidopsis thaliana
attgaaactttagccga

SEQ ID NO: 58698 - DNA, 17 bp, Arabidopsis thaliana
attgaaattcaggaggt

SEQ ID NO: 58699 - DNA, 17 bp, Arabidopsis thaliana
attgaaattctccacgt

SEQ ID NO: 58700 - DNA, 17 bp, Arabidopsis thaliana
attgaacaatgagcgac

SEQ ID NO: 58701 - DNA, 17 bp, Arabidopsis thaliana
attgaacacatatggat

SEQ ID NO: 58702 - DNA, 17 bp, Arabidopsis thaliana
attgaaccaaggaggct

SEQ ID NO: 58703 - DNA, 17 bp, Arabidopsis thaliana
attgaaccgatgacgcc

SEQ ID NO: 58704 - DNA, 17 bp, Arabidopsis thaliana
attgaaccgctgacgga

SEQ ID NO: 58705 - DNA, 17 bp, Arabidopsis thaliana
attgaaccgctgatgat

SEQ ID NO: 58706 - DNA, 17 bp, Arabidopsis thaliana
attgaacctggtgtggg

SEQ ID NO: 58707 - DNA, 17 bp, Arabidopsis thaliana
attgaaccttgtggtat

SEQ ID NO: 58708 - DNA, 17 bp, Arabidopsis thaliana
attgaacgcttgctcac

SEQ ID NO: 58709 - DNA, 17 bp, Arabidopsis thaliana
attgaacggggttagat

SEQ ID NO: 58710 - DNA, 17 bp, Arabidopsis thaliana
attgaacgtgattttgc

SEQ ID NO: 58711 - DNA, 17 bp, Arabidopsis thaliana
attgaactgcagagaca

SEQ ID NO: 58712 - DNA, 17 bp, Arabidopsis thaliana
attgaactgcttgtgga

SEQ ID NO: 58713 - DNA, 17 bp, Arabidopsis thaliana
attgaacttagtcgtga

SEQ ID NO: 58714 - DNA, 17 bp, Arabidopsis thaliana
attgaagaatctgcttc

SEQ ID NO: 58715 - DNA, 17 bp, Arabidopsis thaliana
attgaagattgaagcag

SEQ ID NO: 58716 - DNA, 17 bp, Arabidopsis thaliana
attgaagattgggacag

SEQ ID NO: 58717 - DNA, 17 bp, Arabidopsis thaliana
attgaagcggctatacc

SEQ ID NO: 58718 - DNA, 17 bp, Arabidopsis thaliana
attgaagcttctgacgg

SEQ ID NO: 58719 - DNA, 17 bp, Arabidopsis thaliana
attgaagcttgggtgaa

SEQ ID NO: 58720 - DNA, 17 bp, Arabidopsis thaliana
attgaagctttatcgcg

SEQ ID NO: 58721 - DNA, 17 bp, Arabidopsis thaliana
attgaaggagagacaat

SEQ ID NO: 58722 - DNA, 17 bp, Arabidopsis thaliana
attgaaggcagtcttac

SEQ ID NO: 58723 - DNA, 17 bp, Arabidopsis thaliana
attgaaggtcgcgattc

SEQ ID NO: 58724 - DNA, 17 bp, Arabidopsis thaliana
attgaaggtgtgtcgcc

SEQ ID NO: 58725 - DNA, 17 bp, Arabidopsis thaliana
attgaagtggcgagtta

SEQ ID NO: 58726 - DNA, 17 bp, Arabidopsis thaliana
attgaataaccagtggc

SEQ ID NO: 58727 - DNA, 17 bp, Arabidopsis thaliana
attgaataagccagtga

SEQ ID NO: 58728 - DNA, 17 bp, Arabidopsis thaliana
attgaatacttggtggt

SEQ ID NO: 58729 - DNA, 17 bp, Arabidopsis thaliana
attgaatcccgagatct

SEQ ID NO: 58730 - DNA, 17 bp, Arabidopsis thaliana
attgaatccgcagatcc

SEQ ID NO: 58731 - DNA, 17 bp, Arabidopsis thaliana
attgaatcggaccaggc

SEQ ID NO: 58732 - DNA, 17 bp, Arabidopsis thaliana
attgaatctgaccgatc

SEQ ID NO: 58733 - DNA, 17 bp, Arabidopsis thaliana
attgaatcttcattgac

SEQ ID NO: 58734 - DNA, 17 bp, Arabidopsis thaliana
attgaatgatccggtga

SEQ ID NO: 58735 - DNA, 17 bp, Arabidopsis thaliana
attgaatggccactttt

SEQ ID NO: 58736 - DNA, 17 bp, Arabidopsis thaliana
attgaattccacgccct

SEQ ID NO: 58737 - DNA, 17 bp, Arabidopsis thaliana
attgaattgacgggttt

SEQ ID NO: 58738 - DNA, 17 bp, Arabidopsis thaliana
attgaattgataatgtt

SEQ ID NO: 58739 - DNA, 17 bp, Arabidopsis thaliana
attgaattggcgtcgga

SEQ ID NO: 58740 - DNA, 17 bp, Arabidopsis thaliana
attgaatttgctccaag

SEQ ID NO: 58741 - DNA, 17 bp, Arabidopsis thaliana
attgacaacaccggcct

SEQ ID NO: 58742 - DNA, 17 bp, Arabidopsis thaliana
attgacaacttcagttt

SEQ ID NO: 58743 - DNA, 17 bp, Arabidopsis thaliana
attgacaataggtggag

SEQ ID NO: 58744 - DNA, 17 bp, Arabidopsis thaliana
attgacaccaagaaccg

SEQ ID NO: 58745 - DNA, 17 bp, Arabidopsis thaliana
attgacacgtggcatgt

SEQ ID NO: 58746 - DNA, 17 bp, Arabidopsis thaliana
attgacagactgagagc

SEQ ID NO: 58747 - DNA, 17 bp, Arabidopsis thaliana
attgacagccgttttag

SEQ ID NO: 58748 - DNA, 17 bp, Arabidopsis thaliana
attgacagcgtctaagc

SEQ ID NO: 58749 - DNA, 17 bp, Arabidopsis thaliana
attgacatgtggcacga

SEQ ID NO: 58750 - DNA, 17 bp, Arabidopsis thaliana
attgaccaaaatgtcca

SEQ ID NO: 58751 - DNA, 17 bp, Arabidopsis thaliana
attgaccaacatccggc

SEQ ID NO: 58752 - DNA, 17 bp, Arabidopsis thaliana
attgaccaatgtgtttg

SEQ ID NO: 58753 - DNA, 17 bp, Arabidopsis thaliana
attgaccagatacatcg

SEQ ID NO: 58754 - DNA, 17 bp, Arabidopsis thaliana
attgaccagatacgtaa

SEQ ID NO: 58755 - DNA, 17 bp, Arabidopsis thaliana
attgaccagcaattgtg

SEQ ID NO: 58756 - DNA, 17 bp, Arabidopsis thaliana
attgaccaggccagacg

SEQ ID NO: 58757 - DNA, 17 bp, Arabidopsis thaliana
attgaccaggttagata

SEQ ID NO: 58758 - DNA, 17 bp, Arabidopsis thaliana
attgaccaggttagatc

SEQ ID NO: 58759 - DNA, 17 bp, Arabidopsis thaliana
attgaccagttgaagga

SEQ ID NO: 58760 - DNA, 17 bp, Arabidopsis thaliana
attgaccatctcataac

SEQ ID NO: 58761 - DNA, 17 bp, Arabidopsis thaliana
attgaccatcttctgcc

SEQ ID NO: 58762 - DNA, 17 bp, Arabidopsis thaliana
attgaccgaaacttctg

SEQ ID NO: 58763 - DNA, 17 bp, Arabidopsis thaliana
attgaccgacgcggaga

SEQ ID NO: 58764 - DNA, 17 bp, Arabidopsis thaliana
attgaccgattttgaca

SEQ ID NO: 58765 - DNA, 17 bp, Arabidopsis thaliana
attgaccgcaacttctg

SEQ ID NO: 58766 - DNA, 17 bp, Arabidopsis thaliana
attgaccgcatattctc

SEQ ID NO: 58767 - DNA, 17 bp, Arabidopsis thaliana
attgaccgttagcaaca

SEQ ID NO: 58768 - DNA, 17 bp, Arabidopsis thaliana
attgaccgttagcaaga

SEQ ID NO: 58769 - DNA, 17 bp, Arabidopsis thaliana
attgacctgaccttggg

SEQ ID NO: 58770 - DNA, 17 bp, Arabidopsis thaliana
attgacctggcaggttc

SEQ ID NO: 58771 - DNA, 17 bp, Arabidopsis thaliana
attgacctgggctcgta

SEQ ID NO: 58772 - DNA, 17 bp, Arabidopsis thaliana
attgacctgttactttt

SEQ ID NO: 58773 - DNA, 17 bp, Arabidopsis thaliana
attgaccttactgttca

SEQ ID NO: 58774 - DNA, 17 bp, Arabidopsis thaliana
attgacctttgttgcct

SEQ ID NO: 58775 - DNA, 17 bp, Arabidopsis thaliana
attgacgaaattgcccc

SEQ ID NO: 58776 - DNA, 17 bp, Arabidopsis thaliana
attgacgaaccgctggt

SEQ ID NO: 58777 - DNA, 17 bp, Arabidopsis thaliana
attgacgaactgggaca

SEQ ID NO: 58778 - DNA, 17 bp, Arabidopsis thaliana
attgacgaagcaaatct

SEQ ID NO: 58779 - DNA, 17 bp, Arabidopsis thaliana
attgacgagcaactacg

SEQ ID NO: 58780 - DNA, 17 bp, Arabidopsis thaliana
attgacgatgttgccct

SEQ ID NO: 58781 - DNA, 17 bp, Arabidopsis thaliana
attgacgcaaatgagct

SEQ ID NO: 58782 - DNA, 17 bp, Arabidopsis thaliana
attgacgccgttcgtta

SEQ ID NO: 58783 - DNA, 17 bp, Arabidopsis thaliana
attgacgcgtcaagtga

SEQ ID NO: 58784 - DNA, 17 bp, Arabidopsis thaliana
attgacggaagggcacc

SEQ ID NO: 58785 - DNA, 17 bp, Arabidopsis thaliana
attgacgggtttgattc

SEQ ID NO: 58786 - DNA, 17 bp, Arabidopsis thaliana
attgacggttttgtccg

SEQ ID NO: 58787 - DNA, 17 bp, Arabidopsis thaliana
attgacgtctcaagcaa

SEQ ID NO: 58788 - DNA, 17 bp, Arabidopsis thaliana
attgactaaatcccttg

SEQ ID NO: 58789 - DNA, 17 bp, Arabidopsis thaliana
attgactacaagctcca

SEQ ID NO: 58790 - DNA, 17 bp, Arabidopsis thaliana
attgactaggagcttgc

SEQ ID NO: 58791 - DNA, 17 bp, Arabidopsis thaliana
attgactagggaaattc

SEQ ID NO: 58792 - DNA, 17 bp, Arabidopsis thaliana
attgactatggatcgga

SEQ ID NO: 58793 - DNA, 17 bp, Arabidopsis thaliana
attgactcatcaaccca

SEQ ID NO: 58794 - DNA, 17 bp, Arabidopsis thaliana
attgactcatcaactaa

SEQ ID NO: 58795 - DNA, 17 bp, Arabidopsis thaliana
attgactcatcaactca

SEQ ID NO: 58796 - DNA, 17 bp, Arabidopsis thaliana
attgactcatcaactta

SEQ ID NO: 58797 - DNA, 17 bp, Arabidopsis thaliana
attgactctcgactcat

SEQ ID NO: 58798 - DNA, 17 bp, Arabidopsis thaliana
attgactctcggcaacg

SEQ ID NO: 58799 - DNA, 17 bp, Arabidopsis thaliana
attgactctgtacactc

SEQ ID NO: 58800 - DNA, 17 bp, Arabidopsis thaliana
attgactgcagatcaat

SEQ ID NO: 58801 - DNA, 17 bp, Arabidopsis thaliana
attgactgccggaatgt

SEQ ID NO: 58802 - DNA, 17 bp, Arabidopsis thaliana
attgactgcttgacccg

SEQ ID NO: 58803 - DNA, 17 bp, Arabidopsis thaliana
attgactggaccgctga

SEQ ID NO: 58804 - DNA, 17 bp, Arabidopsis thaliana
attgactggatgagatg

SEQ ID NO: 58805 - DNA, 17 bp, Arabidopsis thaliana
attgactgggccaactc

SEQ ID NO: 58806 - DNA, 17 bp, Arabidopsis thaliana
attgactgtgcttatcg

SEQ ID NO: 58807 - DNA, 17 bp, Arabidopsis thaliana
attgacttacgcgtatg

SEQ ID NO: 58808 - DNA, 17 bp, Arabidopsis thaliana
attgacttcccaactgc

SEQ ID NO: 58809 - DNA, 17 bp, Arabidopsis thaliana
attgacttcccctgggg

SEQ ID NO: 58810 - DNA, 17 bp, Arabidopsis thaliana
attgacttctcgacgct

SEQ ID NO: 58811 - DNA, 17 bp, Arabidopsis thaliana
attgactttctcacatc

SEQ ID NO: 58812 - DNA, 17 bp, Arabidopsis thaliana
attgactttgatcctcc

SEQ ID NO: 58813 - DNA, 17 bp, Arabidopsis thaliana
attgactttttctcgac

SEQ ID NO: 58814 - DNA, 17 bp, Arabidopsis thaliana
attgactttttgtcgac

SEQ ID NO: 58815 - DNA, 17 bp, Arabidopsis thaliana
attgagaagatcaagag

SEQ ID NO: 58816 - DNA, 17 bp, Arabidopsis thaliana
attgagaatgctcctaa

SEQ ID NO: 58817 - DNA, 17 bp, Arabidopsis thaliana
attgagacagatacggt

SEQ ID NO: 58818 - DNA, 17 bp, Arabidopsis thaliana
attgagaccatcgttgc

SEQ ID NO: 58819 - DNA, 17 bp, Arabidopsis thaliana
attgagacgactttcag

SEQ ID NO: 58820 - DNA, 17 bp, Arabidopsis thaliana
attgagacggcgtgctt

SEQ ID NO: 58821 - DNA, 17 bp, Arabidopsis thaliana
attgagacgggcctgcc

SEQ ID NO: 58822 - DNA, 17 bp, Arabidopsis thaliana
attgagactcgtcttgg

SEQ ID NO: 58823 - DNA, 17 bp, Arabidopsis thaliana
attgagacttagcttcc

SEQ ID NO: 58824 - DNA, 17 bp, Arabidopsis thaliana
attgagagaaccggccc

SEQ ID NO: 58825 - DNA, 17 bp, Arabidopsis thaliana
attgagagcggagattg

SEQ ID NO: 58826 - DNA, 17 bp, Arabidopsis thaliana
attgagatctgagaggt

SEQ ID NO: 58827 - DNA, 17 bp, Arabidopsis thaliana
attgagatctgagagtt

SEQ ID NO: 58828 - DNA, 17 bp, Arabidopsis thaliana
attgagatggttcatcc

SEQ ID NO: 58829 - DNA, 17 bp, Arabidopsis thaliana
attgagcaatctgtggc

SEQ ID NO: 58830 - DNA, 17 bp, Arabidopsis thaliana
attgagcacagtagccg

SEQ ID NO: 58831 - DNA, 17 bp, Arabidopsis thaliana
attgagcagtctgttga

SEQ ID NO: 58832 - DNA, 17 bp, Arabidopsis thaliana
attgagcattctggagc

SEQ ID NO: 58833 - DNA, 17 bp, Arabidopsis thaliana
attgagccaaaagtggt

SEQ ID NO: 58834 - DNA, 17 bp, Arabidopsis thaliana
attgagccaccggcaca

SEQ ID NO: 58835 - DNA, 17 bp, Arabidopsis thaliana
attgagccagaatgcca

SEQ ID NO: 58836 - DNA, 17 bp, Arabidopsis thaliana
attgagcccagttaaat

SEQ ID NO: 58837 - DNA, 17 bp, Arabidopsis thaliana
attgagccctaatgttg

SEQ ID NO: 58838 - DNA, 17 bp, Arabidopsis thaliana
attgagccgcgccaata

SEQ ID NO: 58839 - DNA, 17 bp, Arabidopsis thaliana
attgagccgtgccaata

SEQ ID NO: 58840 - DNA, 17 bp, Arabidopsis thaliana
attgagccgtgtcaata

SEQ ID NO: 58841 - DNA, 17 bp, Arabidopsis thaliana
attgagcgacccggtct

SEQ ID NO: 58842 - DNA, 17 bp, Arabidopsis thaliana
attgagcggggttagat

SEQ ID NO: 58843 - DNA, 17 bp, Arabidopsis thaliana
attgagcgtgcgaaaac

SEQ ID NO: 58844 - DNA, 17 bp, Arabidopsis thaliana
attgagctaacgacact

SEQ ID NO: 58845 - DNA, 17 bp, Arabidopsis thaliana
attgagctccttgattt

SEQ ID NO: 58846 - DNA, 17 bp, Arabidopsis thaliana
attgagctgccgcaacc

SEQ ID NO: 58847 - DNA, 17 bp, Arabidopsis thaliana
attgagctgtctgtggt

SEQ ID NO: 58848 - DNA, 17 bp, Arabidopsis thaliana
attgagcttgacgttgt

SEQ ID NO: 58849 - DNA, 17 bp, Arabidopsis thaliana
attgaggaacgagatct

SEQ ID NO: 58850 - DNA, 17 bp, Arabidopsis thaliana
attgaggatcgcgggcg

SEQ ID NO: 58851 - DNA, 17 bp, Arabidopsis thaliana
attgaggcaagtgtgca

SEQ ID NO: 58852 - DNA, 17 bp, Arabidopsis thaliana
attgaggcgaggattat

SEQ ID NO: 58853 - DNA, 17 bp, Arabidopsis thaliana
attgaggcggaactgca

SEQ ID NO: 58854 - DNA, 17 bp, Arabidopsis thaliana
attgagggcacgtctgc

SEQ ID NO: 58855 - DNA, 17 bp, Arabidopsis thaliana
attgagtaaccagtgat

SEQ ID NO: 58856 - DNA, 17 bp, Arabidopsis thaliana
attgagtagtttcgttt

SEQ ID NO: 58857 - DNA, 17 bp, Arabidopsis thaliana
attgagtatgtgtagat

SEQ ID NO: 58858 - DNA, 17 bp, Arabidopsis thaliana
attgagtcttgttgcaa

SEQ ID NO: 58859 - DNA, 17 bp, Arabidopsis thaliana
attgagtgagtgtggtc

SEQ ID NO: 58860 - DNA, 17 bp, Arabidopsis thaliana
attgagtgccttgtctt

SEQ ID NO: 58861 - DNA, 17 bp, Arabidopsis thaliana
attgagttatgaatgca

SEQ ID NO: 58862 - DNA, 17 bp, Arabidopsis thaliana
attgagttgccgcagct

SEQ ID NO: 58863 - DNA, 17 bp, Arabidopsis thaliana
attgagttggttattgg

SEQ ID NO: 58864 - DNA, 17 bp, Arabidopsis thaliana
attgagtttccaccaag

SEQ ID NO: 58865 - DNA, 17 bp, Arabidopsis thaliana
attgataatgtggaccg

SEQ ID NO: 58866 - DNA, 17 bp, Arabidopsis thaliana
attgataattacggcgt

SEQ ID NO: 58867 - DNA, 17 bp, Arabidopsis thaliana
attgataccttcgacca

SEQ ID NO: 58868 - DNA, 17 bp, Arabidopsis thaliana
attgatactccctccgt

SEQ ID NO: 58869 - DNA, 17 bp, Arabidopsis thaliana
attgatactgcggtggt

SEQ ID NO: 58870 - DNA, 17 bp, Arabidopsis thaliana
attgatagtcttactgc

SEQ ID NO: 58871 - DNA, 17 bp, Arabidopsis thaliana
attgatatgtcgtggct

SEQ ID NO: 58872 - DNA, 17 bp, Arabidopsis thaliana
attgatattctctaccc

SEQ ID NO: 58873 - DNA, 17 bp, Arabidopsis thaliana
attgatcaagcgctgcg

SEQ ID NO: 58874 - DNA, 17 bp, Arabidopsis thaliana
attgatcactcggagca

SEQ ID NO: 58875 - DNA, 17 bp, Arabidopsis thaliana
attgatcagcgattgtt

SEQ ID NO: 58876 - DNA, 17 bp, Arabidopsis thaliana
attgatccagtggattg

SEQ ID NO: 58877 - DNA, 17 bp, Arabidopsis thaliana
attgatccgcggtatac

SEQ ID NO: 58878 - DNA, 17 bp, Arabidopsis thaliana
attgatcctctcgcggg

SEQ ID NO: 58879 - DNA, 17 bp, Arabidopsis thaliana
attgatcgccggctttt

SEQ ID NO: 58880 - DNA, 17 bp, Arabidopsis thaliana
attgatcgggccttgtc

SEQ ID NO: 58881 - DNA, 17 bp, Arabidopsis thaliana
attgatcgtcatcgcta

SEQ ID NO: 58882 - DNA, 17 bp, Arabidopsis thaliana
attgatctgcagcggta

SEQ ID NO: 58883 - DNA, 17 bp, Arabidopsis thaliana
attgatctgcagcggtt

SEQ ID NO: 58884 - DNA, 17 bp, Arabidopsis thaliana
attgatctgcttaccgg

SEQ ID NO: 58885 - DNA, 17 bp, Arabidopsis thaliana
attgatgacaaagtttt

SEQ ID NO: 58886 - DNA, 17 bp, Arabidopsis thaliana
attgatgatacttctgc

SEQ ID NO: 58887 - DNA, 17 bp, Arabidopsis thaliana
attgatgatggatccgg

SEQ ID NO: 58888 - DNA, 17 bp, Arabidopsis thaliana
attgatgattctggacc

SEQ ID NO: 58889 - DNA, 17 bp, Arabidopsis thaliana
attgatgccgacaacca

SEQ ID NO: 58890 - DNA, 17 bp, Arabidopsis thaliana
attgatgcttgaatgta

SEQ ID NO: 58891 - DNA, 17 bp, Arabidopsis thaliana
attgatggaaatcgccg

SEQ ID NO: 58892 - DNA, 17 bp, Arabidopsis thaliana
attgatggactttctga

SEQ ID NO: 58893 - DNA, 17 bp, Arabidopsis thaliana
attgatggcagcctgat

SEQ ID NO: 58894 - DNA, 17 bp, Arabidopsis thaliana
attgatggctgacttac

SEQ ID NO: 58895 - DNA, 17 bp, Arabidopsis thaliana
attgatgtctaactgcc

SEQ ID NO: 58896 - DNA, 17 bp, Arabidopsis thaliana
attgatgtcttaccgcc

SEQ ID NO: 58897 - DNA, 17 bp, Arabidopsis thaliana
attgatgtgcggccaac

SEQ ID NO: 58898 - DNA, 17 bp, Arabidopsis thaliana
attgatgtggcagctcc

SEQ ID NO: 58899 - DNA, 17 bp, Arabidopsis thaliana
attgatgttagctcagg

SEQ ID NO: 58900 - DNA, 17 bp, Arabidopsis thaliana
attgattaacgccttga

SEQ ID NO: 58901 - DNA, 17 bp, Arabidopsis thaliana
attgattagcaaaggcg

SEQ ID NO: 58902 - DNA, 17 bp, Arabidopsis thaliana
attgattataacggcgg

SEQ ID NO: 58903 - DNA, 17 bp, Arabidopsis thaliana
attgattatgacggcgg

SEQ ID NO: 58904 - DNA, 17 bp, Arabidopsis thaliana
attgattcaatcaaaag

SEQ ID NO: 58905 - DNA, 17 bp, Arabidopsis thaliana
attgattccgtcgtaac

SEQ ID NO: 58906 - DNA, 17 bp, Arabidopsis thaliana
attgattcgcagtctca

SEQ ID NO: 58907 - DNA, 17 bp, Arabidopsis thaliana
attgattctaacgctga

SEQ ID NO: 58908 - DNA, 17 bp, Arabidopsis thaliana
attgattctggctatgt

SEQ ID NO: 58909 - DNA, 17 bp, Arabidopsis thaliana
attgattgatacaccct

SEQ ID NO: 58910 - DNA, 17 bp, Arabidopsis thaliana
attgattgatactccct

SEQ ID NO: 58911 - DNA, 17 bp, Arabidopsis thaliana
attgattgatgatgagg

SEQ ID NO: 58912 - DNA, 17 bp, Arabidopsis thaliana
attgattgcctaactgc

SEQ ID NO: 58913 - DNA, 17 bp, Arabidopsis thaliana
attgattgcgcctcgat

SEQ ID NO: 58914 - DNA, 17 bp, Arabidopsis thaliana
attgattggattgtgac

SEQ ID NO: 58915 - DNA, 17 bp, Arabidopsis thaliana
attgattggattgttac

SEQ ID NO: 58916 - DNA, 17 bp, Arabidopsis thaliana
attgattggtcaattca

SEQ ID NO: 58917 - DNA, 17 bp, Arabidopsis thaliana
attgattgtcctaggct

SEQ ID NO: 58918 - DNA, 17 bp, Arabidopsis thaliana
attgattgtctgcaggt

SEQ ID NO: 58919 - DNA, 17 bp, Arabidopsis thaliana
attgattgtctgtgaaa

SEQ ID NO: 58920 - DNA, 17 bp, Arabidopsis thaliana
attgattgtggttgtcg

SEQ ID NO: 58921 - DNA, 17 bp, Arabidopsis thaliana
attgatttctaacttcg

SEQ ID NO: 58922 - DNA, 17 bp, Arabidopsis thaliana
attgatttgaccaccta

SEQ ID NO: 58923 - DNA, 17 bp, Arabidopsis thaliana
attgatttgcattcttc

SEQ ID NO: 58924 - DNA, 17 bp, Arabidopsis thaliana
attgatttggccaccaa

SEQ ID NO: 58925 - DNA, 17 bp, Arabidopsis thaliana
attgatttggccaccta

SEQ ID NO: 58926 - DNA, 17 bp, Arabidopsis thaliana
attgatttggcggatgg

SEQ ID NO: 58927 - DNA, 17 bp, Arabidopsis thaliana
attgatttgtcacttcc

SEQ ID NO: 58928 - DNA, 17 bp, Arabidopsis thaliana
attgcaaacaaaccagg

SEQ ID NO: 58929 - DNA, 17 bp, Arabidopsis thaliana
attgcaaatctggggat

SEQ ID NO: 58930 - DNA, 17 bp, Arabidopsis thaliana
attgcaaatgctttcta

SEQ ID NO: 58931 - DNA, 17 bp, Arabidopsis thaliana
attgcaaccaaggtgtg

SEQ ID NO: 58932 - DNA, 17 bp, Arabidopsis thaliana
attgcaaccattgtaga

SEQ ID NO: 58933 - DNA, 17 bp, Arabidopsis thaliana
attgcaacctcatgaaa

SEQ ID NO: 58934 - DNA, 17 bp, Arabidopsis thaliana
attgcaacgacggaaga

SEQ ID NO: 58935 - DNA, 17 bp, Arabidopsis thaliana
attgcaagccggtgcct

SEQ ID NO: 58936 - DNA, 17 bp, Arabidopsis thaliana
attgcaagcggactttc

SEQ ID NO: 58937 - DNA, 17 bp, Arabidopsis thaliana
attgcaatcttcaggcc

SEQ ID NO: 58938 - DNA, 17 bp, Arabidopsis thaliana
attgcaattcaccctaa

SEQ ID NO: 58939 - DNA, 17 bp, Arabidopsis thaliana
attgcacaacatacatg

SEQ ID NO: 58940 - DNA, 17 bp, Arabidopsis thaliana
attgcacacagtagcca

SEQ ID NO: 58941 - DNA, 17 bp, Arabidopsis thaliana
attgcacacagtagccg

SEQ ID NO: 58942 - DNA, 17 bp, Arabidopsis thaliana
attgcacaccttccaac

SEQ ID NO: 58943 - DNA, 17 bp, Arabidopsis thaliana
attgcacagacatttta

SEQ ID NO: 58944 - DNA, 17 bp, Arabidopsis thaliana
attgcacagcctccaac

SEQ ID NO: 58945 - DNA, 17 bp, Arabidopsis thaliana
attgcacagcctccgac

SEQ ID NO: 58946 - DNA, 17 bp, Arabidopsis thaliana
attgcacatgaaaatgg

SEQ ID NO: 58947 - DNA, 17 bp, Arabidopsis thaliana
attgcacattgttgaag

SEQ ID NO: 58948 - DNA, 17 bp, Arabidopsis thaliana
attgcaccacctgtttt

SEQ ID NO: 58949 - DNA, 17 bp, Arabidopsis thaliana
attgcacccgctggttt

SEQ ID NO: 58950 - DNA, 17 bp, Arabidopsis thaliana
attgcaccgcacttctc

SEQ ID NO: 58951 - DNA, 17 bp, Arabidopsis thaliana
attgcaccgggcccacc

SEQ ID NO: 58952 - DNA, 17 bp, Arabidopsis thaliana
attgcacctgctggttt

SEQ ID NO: 58953 - DNA, 17 bp, Arabidopsis thaliana
attgcacgaggtatcaa

SEQ ID NO: 58954 - DNA, 17 bp, Arabidopsis thaliana
attgcacgcaccttgcc

SEQ ID NO: 58955 - DNA, 17 bp, Arabidopsis thaliana
attgcacggaccttgca

SEQ ID NO: 58956 - DNA, 17 bp, Arabidopsis thaliana
attgcacggactttgca

SEQ ID NO: 58957 - DNA, 17 bp, Arabidopsis thaliana
attgcacgtctgcctgg

SEQ ID NO: 58958 - DNA, 17 bp, Arabidopsis thaliana
attgcactgatcggggg

SEQ ID NO: 58959 - DNA, 17 bp, Arabidopsis thaliana
attgcacttgcggtggt

SEQ ID NO: 58960 - DNA, 17 bp, Arabidopsis thaliana
attgcagaatcccgtga

SEQ ID NO: 58961 - DNA, 17 bp, Arabidopsis thaliana
attgcagacgcaacaag

SEQ ID NO: 58962 - DNA, 17 bp, Arabidopsis thaliana
attgcagagacgcggcg

SEQ ID NO: 58963 - DNA, 17 bp, Arabidopsis thaliana
attgcagagactgtctc

SEQ ID NO: 58964 - DNA, 17 bp, Arabidopsis thaliana
attgcagataaagtgcg

SEQ ID NO: 58965 - DNA, 17 bp, Arabidopsis thaliana
attgcagatctgttttt

SEQ ID NO: 58966 - DNA, 17 bp, Arabidopsis thaliana
attgcagcgactgcctc

SEQ ID NO: 58967 - DNA, 17 bp, Arabidopsis thaliana
attgcagcgaggttgcg

SEQ ID NO: 58968 - DNA, 17 bp, Arabidopsis thaliana
attgcagcggcaccgca

SEQ ID NO: 58969 - DNA, 17 bp, Arabidopsis thaliana
attgcagctggctcgga

SEQ ID NO: 58970 - DNA, 17 bp, Arabidopsis thaliana
attgcaggacgtatcga

SEQ ID NO: 58971 - DNA, 17 bp, Arabidopsis thaliana
attgcaggagtttcggc

SEQ ID NO: 58972 - DNA, 17 bp, Arabidopsis thaliana
attgcaggccacacccg

SEQ ID NO: 58973 - DNA, 17 bp, Arabidopsis thaliana
attgcaggccacacctg

SEQ ID NO: 58974 - DNA, 17 bp, Arabidopsis thaliana
attgcaggctgcaactc

SEQ ID NO: 58975 - DNA, 17 bp, Arabidopsis thaliana
attgcaggcttcaactc

SEQ ID NO: 58976 - DNA, 17 bp, Arabidopsis thaliana
attgcagggaccttgca

SEQ ID NO: 58977 - DNA, 17 bp, Arabidopsis thaliana
attgcagggtgtatcgc

SEQ ID NO: 58978 - DNA, 17 bp, Arabidopsis thaliana
attgcaggtgacttttg

SEQ ID NO: 58979 - DNA, 17 bp, Arabidopsis thaliana
attgcataacctcttgt

SEQ ID NO: 58980 - DNA, 17 bp, Arabidopsis thaliana
attgcatagcgtgatcc

SEQ ID NO: 58981 - DNA, 17 bp, Arabidopsis thaliana
attgcatatgagccgac

SEQ ID NO: 58982 - DNA, 17 bp, Arabidopsis thaliana
attgcatatgcgagatc

SEQ ID NO: 58983 - DNA, 17 bp, Arabidopsis thaliana
attgcatattgttgttt

SEQ ID NO: 58984 - DNA, 17 bp, Arabidopsis thaliana
attgcatgccaagttcc

SEQ ID NO: 58985 - DNA, 17 bp, Arabidopsis thaliana
attgcatgttgtggttt

SEQ ID NO: 58986 - DNA, 17 bp, Arabidopsis thaliana
attgcattagtcccgct

SEQ ID NO: 58987 - DNA, 17 bp, Arabidopsis thaliana
attgcattctctgcttt

SEQ ID NO: 58988 - DNA, 17 bp, Arabidopsis thaliana
attgcattggaccttct

SEQ ID NO: 58989 - DNA, 17 bp, Arabidopsis thaliana
attgcattggattgtga

SEQ ID NO: 58990 - DNA, 17 bp, Arabidopsis thaliana
attgccaaacagtcgtg

SEQ ID NO: 58991 - DNA, 17 bp, Arabidopsis thaliana
attgccaagagcgtgac

SEQ ID NO: 58992 - DNA, 17 bp, Arabidopsis thaliana
attgccaagagcgtggc

SEQ ID NO: 58993 - DNA, 17 bp, Arabidopsis thaliana
attgccaatagagcagc

SEQ ID NO: 58994 - DNA, 17 bp, Arabidopsis thaliana
attgccacagatttttg

SEQ ID NO: 58995 - DNA, 17 bp, Arabidopsis thaliana
attgccacatgacttaa

SEQ ID NO: 58996 - DNA, 17 bp, Arabidopsis thaliana
attgccaccactaccac

SEQ ID NO: 58997 - DNA, 17 bp, Arabidopsis thaliana
attgccacctaagcaaa

SEQ ID NO: 58998 - DNA, 17 bp, Arabidopsis thaliana
attgccagacctctact

SEQ ID NO: 58999 - DNA, 17 bp, Arabidopsis thaliana
attgccagacgcatttg

SEQ ID NO: 59000 - DNA, 17 bp, Arabidopsis thaliana
attgccagagaagacga

SEQ ID NO: 59001 - DNA, 17 bp, Arabidopsis thaliana
attgccaggtccgttgc

SEQ ID NO: 59002 - DNA, 17 bp, Arabidopsis thaliana
attgccagtgagaaaga

SEQ ID NO: 59003 - DNA, 17 bp, Arabidopsis thaliana
attgccataagtgttga

SEQ ID NO: 59004 - DNA, 17 bp, Arabidopsis thaliana
attgccatccggtgtat

SEQ ID NO: 59005 - DNA, 17 bp, Arabidopsis thaliana
attgccatctccagaag

SEQ ID NO: 59006 - DNA, 17 bp, Arabidopsis thaliana
attgccatctgattgag

SEQ ID NO: 59007 - DNA, 17 bp, Arabidopsis thaliana
attgccattcgcgagga

SEQ ID NO: 59008 - DNA, 17 bp, Arabidopsis thaliana
attgcccacagtagccg

SEQ ID NO: 59009 - DNA, 17 bp, Arabidopsis thaliana
attgcccactgcagttt

SEQ ID NO: 59010 - DNA, 17 bp, Arabidopsis thaliana
attgcccagacgagtgc

SEQ ID NO: 59011 - DNA, 17 bp, Arabidopsis thaliana
attgcccattggaggac

SEQ ID NO: 59012 - DNA, 17 bp, Arabidopsis thaliana
attgccccctttgtcgc

SEQ ID NO: 59013 - DNA, 17 bp, Arabidopsis thaliana
attgcccgagtccagat

SEQ ID NO: 59014 - DNA, 17 bp, Arabidopsis thaliana
attgccgaccaggtgac

SEQ ID NO: 59015 - DNA, 17 bp, Arabidopsis thaliana
attgccgaccctcagta

SEQ ID NO: 59016 - DNA, 17 bp, Arabidopsis thaliana
attgccgaccctcagtg

SEQ ID NO: 59017 - DNA, 17 bp, Arabidopsis thaliana
attgccgacctgctcct

SEQ ID NO: 59018 - DNA, 17 bp, Arabidopsis thaliana
attgccgctacaatagc

SEQ ID NO: 59019 - DNA, 17 bp, Arabidopsis thaliana
attgccggctcagaatg

SEQ ID NO: 59020 - DNA, 17 bp, Arabidopsis thaliana
attgccgtgatcgatga

SEQ ID NO: 59021 - DNA, 17 bp, Arabidopsis thaliana
attgccgttaattccac

SEQ ID NO: 59022 - DNA, 17 bp, Arabidopsis thaliana
attgcctatgtggcggc

SEQ ID NO: 59023 - DNA, 17 bp, Arabidopsis thaliana
attgcctcaaggccctg

SEQ ID NO: 59024 - DNA, 17 bp, Arabidopsis thaliana
attgcctcacggctggg

SEQ ID NO: 59025 - DNA, 17 bp, Arabidopsis thaliana
attgcctctgatcacct

SEQ ID NO: 59026 - DNA, 17 bp, Arabidopsis thaliana
attgcctctttagccct

SEQ ID NO: 59027 - DNA, 17 bp, Arabidopsis thaliana
attgcctctttctggtt

SEQ ID NO: 59028 - DNA, 17 bp, Arabidopsis thaliana
attgcctgactgggagc

SEQ ID NO: 59029 - DNA, 17 bp, Arabidopsis thaliana
attgcctggagttagga

SEQ ID NO: 59030 - DNA, 17 bp, Arabidopsis thaliana
attgcctgtccgccggc

SEQ ID NO: 59031 - DNA, 17 bp, Arabidopsis thaliana
attgccttccaagcaat

SEQ ID NO: 59032 - DNA, 17 bp, Arabidopsis thaliana
attgccttccatcctct

SEQ ID NO: 59033 - DNA, 17 bp, Arabidopsis thaliana
attgccttcgtgtccag

SEQ ID NO: 59034 - DNA, 17 bp, Arabidopsis thaliana
attgcgaacgttcagcc

SEQ ID NO: 59035 - DNA, 17 bp, Arabidopsis thaliana
attgcgaactcaacact

SEQ ID NO: 59036 - DNA, 17 bp, Arabidopsis thaliana
attgcgaactgagaacg

SEQ ID NO: 59037 - DNA, 17 bp, Arabidopsis thaliana
attgcgaaggcgagccc

SEQ ID NO: 59038 - DNA, 17 bp, Arabidopsis thaliana
attgcgaaggtgataga

SEQ ID NO: 59039 - DNA, 17 bp, Arabidopsis thaliana
attgcgaattaagtgtg

SEQ ID NO: 59040 - DNA, 17 bp, Arabidopsis thaliana
attgcgacctatacccg

SEQ ID NO: 59041 - DNA, 17 bp, Arabidopsis thaliana
attgcgacgattgtgca

SEQ ID NO: 59042 - DNA, 17 bp, Arabidopsis thaliana
attgcgacttgttcatt

SEQ ID NO: 59043 - DNA, 17 bp, Arabidopsis thaliana
attgcgacttttctctc

SEQ ID NO: 59044 - DNA, 17 bp, Arabidopsis thaliana
attgcgaggaacttgcg

SEQ ID NO: 59045 - DNA, 17 bp, Arabidopsis thaliana
attgcgagggacaatgc

SEQ ID NO: 59046 - DNA, 17 bp, Arabidopsis thaliana
attgcgagggacttgca

SEQ ID NO: 59047 - DNA, 17 bp, Arabidopsis thaliana
attgcgagggacttgcg

SEQ ID NO: 59048 - DNA, 17 bp, Arabidopsis thaliana
attgcgagttttgtgca

SEQ ID NO: 59049 - DNA, 17 bp, Arabidopsis thaliana
attgcgatgaagctttt

SEQ ID NO: 59050 - DNA, 17 bp, Arabidopsis thaliana
attgcgatggagctttt

SEQ ID NO: 59051 - DNA, 17 bp, Arabidopsis thaliana
attgcgatggtccctgc

SEQ ID NO: 59052 - DNA, 17 bp, Arabidopsis thaliana
attgcgatttacccgat

SEQ ID NO: 59053 - DNA, 17 bp, Arabidopsis thaliana
attgcgatttcatctcc

SEQ ID NO: 59054 - DNA, 17 bp, Arabidopsis thaliana
attgcgattttaggtgc

SEQ ID NO: 59055 - DNA, 17 bp, Arabidopsis thaliana
attgcgcacagtagccg

SEQ ID NO: 59056 - DNA, 17 bp, Arabidopsis thaliana
attgcgcacagtgccgt

SEQ ID NO: 59057 - DNA, 17 bp, Arabidopsis thaliana
attgcgccgtacagatt

SEQ ID NO: 59058 - DNA, 17 bp, Arabidopsis thaliana
attgcgcttcgtgccgg

SEQ ID NO: 59059 - DNA, 17 bp, Arabidopsis thaliana
attgcgcttgaagttgt

SEQ ID NO: 59060 - DNA, 17 bp, Arabidopsis thaliana
attgcggaaacattgtg

SEQ ID NO: 59061 - DNA, 17 bp, Arabidopsis thaliana
attgcggactagacgtg

SEQ ID NO: 59062 - DNA, 17 bp, Arabidopsis thaliana
attgcggatcggattaa

SEQ ID NO: 59063 - DNA, 17 bp, Arabidopsis thaliana
attgcggatggagttgc

SEQ ID NO: 59064 - DNA, 17 bp, Arabidopsis thaliana
attgcggattcaagcgg

SEQ ID NO: 59065 - DNA, 17 bp, Arabidopsis thaliana
attgcggcgtagtagtc

SEQ ID NO: 59066 - DNA, 17 bp, Arabidopsis thaliana
attgcggctccgaatgg

SEQ ID NO: 59067 - DNA, 17 bp, Arabidopsis thaliana
attgcgggacgcggatc

SEQ ID NO: 59068 - DNA, 17 bp, Arabidopsis thaliana
attgcgggagaacggtc

SEQ ID NO: 59069 - DNA, 17 bp, Arabidopsis thaliana
attgcgggcggtagcag

SEQ ID NO: 59070 - DNA, 17 bp, Arabidopsis thaliana
attgcgggtgactttag

SEQ ID NO: 59071 - DNA, 17 bp, Arabidopsis thaliana
attgcgggtgacttttg

SEQ ID NO: 59072 - DNA, 17 bp, Arabidopsis thaliana
attgcgggtgatttgcg

SEQ ID NO: 59073 - DNA, 17 bp, Arabidopsis thaliana
attgcggtacaaatgcg

SEQ ID NO: 59074 - DNA, 17 bp, Arabidopsis thaliana
attgcggtactccaaca

SEQ ID NO: 59075 - DNA, 17 bp, Arabidopsis thaliana
attgcggtcgagtggtg

SEQ ID NO: 59076 - DNA, 17 bp, Arabidopsis thaliana
attgcggtgcggtttta

SEQ ID NO: 59077 - DNA, 17 bp, Arabidopsis thaliana
attgcggtgcggttttg

SEQ ID NO: 59078 - DNA, 17 bp, Arabidopsis thaliana
attgcggtggacggctt

SEQ ID NO: 59079 - DNA, 17 bp, Arabidopsis thaliana
attgcggttgcaggagt

SEQ ID NO: 59080 - DNA, 17 bp, Arabidopsis thaliana
attgcggttttaggtgc

SEQ ID NO: 59081 - DNA, 17 bp, Arabidopsis thaliana
attgcggttttaggttc

SEQ ID NO: 59082 - DNA, 17 bp, Arabidopsis thaliana
attgcgtaagccggttc

SEQ ID NO: 59083 - DNA, 17 bp, Arabidopsis thaliana
attgcgtacagtagccg

SEQ ID NO: 59084 - DNA, 17 bp, Arabidopsis thaliana
attgcgtcgacacgggg

SEQ ID NO: 59085 - DNA, 17 bp, Arabidopsis thaliana
attgcgtcggccgcagc

SEQ ID NO: 59086 - DNA, 17 bp, Arabidopsis thaliana
attgcgtcttatctccg

SEQ ID NO: 59087 - DNA, 17 bp, Arabidopsis thaliana
attgcgtcttatttccg

SEQ ID NO: 59088 - DNA, 17 bp, Arabidopsis thaliana
attgcgtcttatttcct

SEQ ID NO: 59089 - DNA, 17 bp, Arabidopsis thaliana
attgcgtgagaccccgt

SEQ ID NO: 59090 - DNA, 17 bp, Arabidopsis thaliana
attgcgtggcaattgcg

SEQ ID NO: 59091 - DNA, 17 bp, Arabidopsis thaliana
attgcgttacgtggaac

SEQ ID NO: 59092 - DNA, 17 bp, Arabidopsis thaliana
attgcgttaggcttgtg

SEQ ID NO: 59093 - DNA, 17 bp, Arabidopsis thaliana
attgcgttcacggagtt

SEQ ID NO: 59094 - DNA, 17 bp, Arabidopsis thaliana
attgcgttcatggacgg

SEQ ID NO: 59095 - DNA, 17 bp, Arabidopsis thaliana
attgcgttgtacacggt

SEQ ID NO: 59096 - DNA, 17 bp, Arabidopsis thaliana
attgcgttgtccgaagt

SEQ ID NO: 59097 - DNA, 17 bp, Arabidopsis thaliana
attgcgtttcaaccgac

SEQ ID NO: 59098 - DNA, 17 bp, Arabidopsis thaliana
attgcgtttcaaccggc

SEQ ID NO: 59099 - DNA, 17 bp, Arabidopsis thaliana
attgcgtttctgaggca

SEQ ID NO: 59100 - DNA, 17 bp, Arabidopsis thaliana
attgcgttttcggcgga

SEQ ID NO: 59101 - DNA, 17 bp, Arabidopsis thaliana
attgcgttttgcggtgc

SEQ ID NO: 59102 - DNA, 17 bp, Arabidopsis thaliana
attgctaaaccgtggag

SEQ ID NO: 59103 - DNA, 17 bp, Arabidopsis thaliana
attgctaatgagctacc

SEQ ID NO: 59104 - DNA, 17 bp, Arabidopsis thaliana
attgctacagtgtcggc

SEQ ID NO: 59105 - DNA, 17 bp, Arabidopsis thaliana
attgctactctctcttg

SEQ ID NO: 59106 - DNA, 17 bp, Arabidopsis thaliana
attgctagccgtatctt

SEQ ID NO: 59107 - DNA, 17 bp, Arabidopsis thaliana
attgctagccgtttctt

SEQ ID NO: 59108 - DNA, 17 bp, Arabidopsis thaliana
attgctagctacacgaa

SEQ ID NO: 59109 - DNA, 17 bp, Arabidopsis thaliana
attgctagtcagcggtt

SEQ ID NO: 59110 - DNA, 17 bp, Arabidopsis thaliana
attgctagtctcgctac

SEQ ID NO: 59111 - DNA, 17 bp, Arabidopsis thaliana
attgctataccatcatt

SEQ ID NO: 59112 - DNA, 17 bp, Arabidopsis thaliana
attgctatgtcacgtgt

SEQ ID NO: 59113 - DNA, 17 bp, Arabidopsis thaliana
attgctatgtcacgttt

SEQ ID NO: 59114 - DNA, 17 bp, Arabidopsis thaliana
attgctattgcacctcc

SEQ ID NO: 59115 - DNA, 17 bp, Arabidopsis thaliana
attgctattgcacctgc

SEQ ID NO: 59116 - DNA, 17 bp, Arabidopsis thaliana
attgctcaaagtgtcac

SEQ ID NO: 59117 - DNA, 17 bp, Arabidopsis thaliana
attgctcaacaactttt

SEQ ID NO: 59118 - DNA, 17 bp, Arabidopsis thaliana
attgctcaagagatctg

SEQ ID NO: 59119 - DNA, 17 bp, Arabidopsis thaliana
attgctcacctgagact

SEQ ID NO: 59120 - DNA, 17 bp, Arabidopsis thaliana
attgctcagatcacggt

SEQ ID NO: 59121 - DNA, 17 bp, Arabidopsis thaliana
attgctcatatgcgaat

SEQ ID NO: 59122 - DNA, 17 bp, Arabidopsis thaliana
attgctccacaatttat

SEQ ID NO: 59123 - DNA, 17 bp, Arabidopsis thaliana
attgctccgttccgcat

SEQ ID NO: 59124 - DNA, 17 bp, Arabidopsis thaliana
attgctcgacgcatgga

SEQ ID NO: 59125 - DNA, 17 bp, Arabidopsis thaliana
attgctcgacgcgtgga

SEQ ID NO: 59126 - DNA, 17 bp, Arabidopsis thaliana
attgctcgctctataat

SEQ ID NO: 59127 - DNA, 17 bp, Arabidopsis thaliana
attgctcgtggctcaag

SEQ ID NO: 59128 - DNA, 17 bp, Arabidopsis thaliana
attgctctaagtgttaa

SEQ ID NO: 59129 - DNA, 17 bp, Arabidopsis thaliana
attgctctaagtgttac

SEQ ID NO: 59130 - DNA, 17 bp, Arabidopsis thaliana
attgctctacagtcgtg

SEQ ID NO: 59131 - DNA, 17 bp, Arabidopsis thaliana
attgctctccgattttt

SEQ ID NO: 59132 - DNA, 17 bp, Arabidopsis thaliana
attgctctcgcagaccg

SEQ ID NO: 59133 - DNA, 17 bp, Arabidopsis thaliana
attgctctctagactta

SEQ ID NO: 59134 - DNA, 17 bp, Arabidopsis thaliana
attgctcttgtgcagaa

SEQ ID NO: 59135 - DNA, 17 bp, Arabidopsis thaliana
attgctgaagatgatcg

SEQ ID NO: 59136 - DNA, 17 bp, Arabidopsis thaliana
attgctgaatactgtgt

SEQ ID NO: 59137 - DNA, 17 bp, Arabidopsis thaliana
attgctgacggatttat

SEQ ID NO: 59138 - DNA, 17 bp, Arabidopsis thaliana
attgctgactttggacg

SEQ ID NO: 59139 - DNA, 17 bp, Arabidopsis thaliana
attgctgagccagaaca

SEQ ID NO: 59140 - DNA, 17 bp, Arabidopsis thaliana
attgctgattaccgggg

SEQ ID NO: 59141 - DNA, 17 bp, Arabidopsis thaliana
attgctgattctggacc

SEQ ID NO: 59142 - DNA, 17 bp, Arabidopsis thaliana
attgctgatttaacgcc

SEQ ID NO: 59143 - DNA, 17 bp, Arabidopsis thaliana
attgctgattttggaac

SEQ ID NO: 59144 - DNA, 17 bp, Arabidopsis thaliana
attgctgcagcttggtc

SEQ ID NO: 59145 - DNA, 17 bp, Arabidopsis thaliana
attgctgccaacacatg

SEQ ID NO: 59146 - DNA, 17 bp, Arabidopsis thaliana
attgctgccactggact

SEQ ID NO: 59147 - DNA, 17 bp, Arabidopsis thaliana
attgctgccgcagccaa

SEQ ID NO: 59148 - DNA, 17 bp, Arabidopsis thaliana
attgctgccgcagccta

SEQ ID NO: 59149 - DNA, 17 bp, Arabidopsis thaliana
attgctgcgacaagcac

SEQ ID NO: 59150 - DNA, 17 bp, Arabidopsis thaliana
attgctgcgactctttc

SEQ ID NO: 59151 - DNA, 17 bp, Arabidopsis thaliana
attgctgcgctaacagt

SEQ ID NO: 59152 - DNA, 17 bp, Arabidopsis thaliana
attgctgcgggcttcca

SEQ ID NO: 59153 - DNA, 17 bp, Arabidopsis thaliana
attgctgctaatacccc

SEQ ID NO: 59154 - DNA, 17 bp, Arabidopsis thaliana
attgctgctacagggct

SEQ ID NO: 59155 - DNA, 17 bp, Arabidopsis thaliana
attgctgctgccctaag

SEQ ID NO: 59156 - DNA, 17 bp, Arabidopsis thaliana
attgctgctgctctaat

SEQ ID NO: 59157 - DNA, 17 bp, Arabidopsis thaliana
attgctgctgggttggc

SEQ ID NO: 59158 - DNA, 17 bp, Arabidopsis thaliana
attgctgctgtagactt

SEQ ID NO: 59159 - DNA, 17 bp, Arabidopsis thaliana
attgctggatcacttgg

SEQ ID NO: 59160 - DNA, 17 bp, Arabidopsis thaliana
attgctggatttggcga

SEQ ID NO: 59161 - DNA, 17 bp, Arabidopsis thaliana
attgctgggccgaaact

SEQ ID NO: 59162 - DNA, 17 bp, Arabidopsis thaliana
attgctgtcgacgagtc

SEQ ID NO: 59163 - DNA, 17 bp, Arabidopsis thaliana
attgctgtctcctgaac

SEQ ID NO: 59164 - DNA, 17 bp, Arabidopsis thaliana
attgctgtggacttgtg

SEQ ID NO: 59165 - DNA, 17 bp, Arabidopsis thaliana
attgctgttgccctaag

SEQ ID NO: 59166 - DNA, 17 bp, Arabidopsis thaliana
attgctgttgcggcccg

SEQ ID NO: 59167 - DNA, 17 bp, Arabidopsis thaliana
attgctgttgcggtccg

SEQ ID NO: 59168 - DNA, 17 bp, Arabidopsis thaliana
attgctgtttcctcaag

SEQ ID NO: 59169 - DNA, 17 bp, Arabidopsis thaliana
attgcttacctgagact

SEQ ID NO: 59170 - DNA, 17 bp, Arabidopsis thaliana
attgcttagccaaatgt

SEQ ID NO: 59171 - DNA, 17 bp, Arabidopsis thaliana
attgcttcaaatatgga

SEQ ID NO: 59172 - DNA, 17 bp, Arabidopsis thaliana
attgcttcgtactgatt

SEQ ID NO: 59173 - DNA, 17 bp, Arabidopsis thaliana
attgcttctaccgcaag

SEQ ID NO: 59174 - DNA, 17 bp, Arabidopsis thaliana
attgcttctgacctatg

SEQ ID NO: 59175 - DNA, 17 bp, Arabidopsis thaliana
attgcttcttgggcatg

SEQ ID NO: 59176 - DNA, 17 bp, Arabidopsis thaliana
attgcttctttccaccc

SEQ ID NO: 59177 - DNA, 17 bp, Arabidopsis thaliana
attgcttctttcccccc

SEQ ID NO: 59178 - DNA, 17 bp, Arabidopsis thaliana
attgcttctttcccgcc

SEQ ID NO: 59179 - DNA, 17 bp, Arabidopsis thaliana
attgcttgaatggcctg

SEQ ID NO: 59180 - DNA, 17 bp, Arabidopsis thaliana
attgcttgaccagcctt

SEQ ID NO: 59181 - DNA, 17 bp, Arabidopsis thaliana
attgcttgatccgcttg

SEQ ID NO: 59182 - DNA, 17 bp, Arabidopsis thaliana
attgcttgcagagagaa

SEQ ID NO: 59183 - DNA, 17 bp, Arabidopsis thaliana
attgcttggcctgagga

SEQ ID NO: 59184 - DNA, 17 bp, Arabidopsis thaliana
attgcttgggttgtcaa

SEQ ID NO: 59185 - DNA, 17 bp, Arabidopsis thaliana
attgcttgtcgtgtcca

SEQ ID NO: 59186 - DNA, 17 bp, Arabidopsis thaliana
attgctttggccgagtg

SEQ ID NO: 59187 - DNA, 17 bp, Arabidopsis thaliana
attgcttttgaaagtct

SEQ ID NO: 59188 - DNA, 17 bp, Arabidopsis thaliana
attggaaaaggaattcg

SEQ ID NO: 59189 - DNA, 17 bp, Arabidopsis thaliana
attggaaactaaaattt

SEQ ID NO: 59190 - DNA, 17 bp, Arabidopsis thaliana
attggaaactaagccaa

SEQ ID NO: 59191 - DNA, 17 bp, Arabidopsis thaliana
attggaaactgaaaatt

SEQ ID NO: 59192 - DNA, 17 bp, Arabidopsis thaliana
attggaaactgaaactt

SEQ ID NO: 59193 - DNA, 17 bp, Arabidopsis thaliana
attggaaactgaaaggt

SEQ ID NO: 59194 - DNA, 17 bp, Arabidopsis thaliana
attggaaactgaaagtt

SEQ ID NO: 59195 - DNA, 17 bp, Arabidopsis thaliana
attggaaactgaaattt

SEQ ID NO: 59196 - DNA, 17 bp, Arabidopsis thaliana
attggaaactgaacttt

SEQ ID NO: 59197 - DNA, 17 bp, Arabidopsis thaliana
attggaaactttcagtt

SEQ ID NO: 59198 - DNA, 17 bp, Arabidopsis thaliana
attggaaagtgttacgc

SEQ ID NO: 59199 - DNA, 17 bp, Arabidopsis thaliana
attggaacacggttagg

SEQ ID NO: 59200 - DNA, 17 bp, Arabidopsis thaliana
attggaacccggttagg

SEQ ID NO: 59201 - DNA, 17 bp, Arabidopsis thaliana
attggaaccgcactgta

SEQ ID NO: 59202 - DNA, 17 bp, Arabidopsis thaliana
attggaaccggttaggg

SEQ ID NO: 59203 - DNA, 17 bp, Arabidopsis thaliana
attggaactaaagacgg

SEQ ID NO: 59204 - DNA, 17 bp, Arabidopsis thaliana
attggaactgcgatcgt

SEQ ID NO: 59205 - DNA, 17 bp, Arabidopsis thaliana
attggaagcaccttgtg

SEQ ID NO: 59206 - DNA, 17 bp, Arabidopsis thaliana
attggaagcccacactc

SEQ ID NO: 59207 - DNA, 17 bp, Arabidopsis thaliana
attggaagcccatacga

SEQ ID NO: 59208 - DNA, 17 bp, Arabidopsis thaliana
attggaagtggcgagag

SEQ ID NO: 59209 - DNA, 17 bp, Arabidopsis thaliana
attggaagtttggatgg

SEQ ID NO: 59210 - DNA, 17 bp, Arabidopsis thaliana
attggaatatccaccgg

SEQ ID NO: 59211 - DNA, 17 bp, Arabidopsis thaliana
attggaatccggttagg

SEQ ID NO: 59212 - DNA, 17 bp, Arabidopsis thaliana
attggaatccttgggtt

SEQ ID NO: 59213 - DNA, 17 bp, Arabidopsis thaliana
attggaatcgctaatga

SEQ ID NO: 59214 - DNA, 17 bp, Arabidopsis thaliana
attggaatctcgccatg

SEQ ID NO: 59215 - DNA, 17 bp, Arabidopsis thaliana
attggacaaatccctaa

SEQ ID NO: 59216 - DNA, 17 bp, Arabidopsis thaliana
attggacaacccatttg

SEQ ID NO: 59217 - DNA, 17 bp, Arabidopsis thaliana
attggacacgcatttgc

SEQ ID NO: 59218 - DNA, 17 bp, Arabidopsis thaliana
attggacacgggccgcc

SEQ ID NO: 59219 - DNA, 17 bp, Arabidopsis thaliana
attggaccaacagattg

SEQ ID NO: 59220 - DNA, 17 bp, Arabidopsis thaliana
attggaccaagactgga

SEQ ID NO: 59221 - DNA, 17 bp, Arabidopsis thaliana
attggaccagtactagg

SEQ ID NO: 59222 - DNA, 17 bp, Arabidopsis thaliana
attggacccggttagga

SEQ ID NO: 59223 - DNA, 17 bp, Arabidopsis thaliana
attggaccctgtgctat

SEQ ID NO: 59224 - DNA, 17 bp, Arabidopsis thaliana
attggacccttctttgt

SEQ ID NO: 59225 - DNA, 17 bp, Arabidopsis thaliana
attggacccttcttttg

SEQ ID NO: 59226 - DNA, 17 bp, Arabidopsis thaliana
attggaccgaaacgacg

SEQ ID NO: 59227 - DNA, 17 bp, Arabidopsis thaliana
attggaccgttgacgga

SEQ ID NO: 59228 - DNA, 17 bp, Arabidopsis thaliana
attggaccgtttttcac

SEQ ID NO: 59229 - DNA, 17 bp, Arabidopsis thaliana
attggacctaagacggt

SEQ ID NO: 59230 - DNA, 17 bp, Arabidopsis thaliana
attggacctgttcgttt

SEQ ID NO: 59231 - DNA, 17 bp, Arabidopsis thaliana
attggaccttgtgctat

SEQ ID NO: 59232 - DNA, 17 bp, Arabidopsis thaliana
attggaccttgtgcttt

SEQ ID NO: 59233 - DNA, 17 bp, Arabidopsis thaliana
attggaccttgtgttat

SEQ ID NO: 59234 - DNA, 17 bp, Arabidopsis thaliana
attggacggaccgctca

SEQ ID NO: 59235 - DNA, 17 bp, Arabidopsis thaliana
attggacggagcggatc

SEQ ID NO: 59236 - DNA, 17 bp, Arabidopsis thaliana
attggacgggttggcgt

SEQ ID NO: 59237 - DNA, 17 bp, Arabidopsis thaliana
attggacgtatccggtt

SEQ ID NO: 59238 - DNA, 17 bp, Arabidopsis thaliana
attggactaaaccaaac

SEQ ID NO: 59239 - DNA, 17 bp, Arabidopsis thaliana
attggactccttccaaa

SEQ ID NO: 59240 - DNA, 17 bp, Arabidopsis thaliana
attggactcttagctgc

SEQ ID NO: 59241 - DNA, 17 bp, Arabidopsis thaliana
attggactgaacggccc

SEQ ID NO: 59242 - DNA, 17 bp, Arabidopsis thaliana
attggactgaagggccc

SEQ ID NO: 59243 - DNA, 17 bp, Arabidopsis thaliana
attggagaatcagagga

SEQ ID NO: 59244 - DNA, 17 bp, Arabidopsis thaliana
attggagaatggttcag

SEQ ID NO: 59245 - DNA, 17 bp, Arabidopsis thaliana
attggagactgattcca

SEQ ID NO: 59246 - DNA, 17 bp, Arabidopsis thaliana
attggagagccggtgaa

SEQ ID NO: 59247 - DNA, 17 bp, Arabidopsis thaliana
attggagatggtcttag

SEQ ID NO: 59248 - DNA, 17 bp, Arabidopsis thaliana
attggagcatttttccg

SEQ ID NO: 59249 - DNA, 17 bp, Arabidopsis thaliana
attggagcgatttgtct

SEQ ID NO: 59250 - DNA, 17 bp, Arabidopsis thaliana
attggagcggccgtcgg

SEQ ID NO: 59251 - DNA, 17 bp, Arabidopsis thaliana
attggaggacacgaggc

SEQ ID NO: 59252 - DNA, 17 bp, Arabidopsis thaliana
attggaggtgtgtgact

SEQ ID NO: 59253 - DNA, 17 bp, Arabidopsis thaliana
attggaggtgtgtgcat

SEQ ID NO: 59254 - DNA, 17 bp, Arabidopsis thaliana
attggagtccaaggcca

SEQ ID NO: 59255 - DNA, 17 bp, Arabidopsis thaliana
attggagtgaagggagg

SEQ ID NO: 59256 - DNA, 17 bp, Arabidopsis thaliana
attggagttggcctaag

SEQ ID NO: 59257 - DNA, 17 bp, Arabidopsis thaliana
attggatatgcagagac

SEQ ID NO: 59258 - DNA, 17 bp, Arabidopsis thaliana
attggatatgtagagac

SEQ ID NO: 59259 - DNA, 17 bp, Arabidopsis thaliana
attggatccgctgtgct

SEQ ID NO: 59260 - DNA, 17 bp, Arabidopsis thaliana
attggatcgccaatagt

SEQ ID NO: 59261 - DNA, 17 bp, Arabidopsis thaliana
attggatcggattctgg

SEQ ID NO: 59262 - DNA, 17 bp, Arabidopsis thaliana
attggatcgtgatacat

SEQ ID NO: 59263 - DNA, 17 bp, Arabidopsis thaliana
attggatctaaagacgg

SEQ ID NO: 59264 - DNA, 17 bp, Arabidopsis thaliana
attggatctgcgctaca

SEQ ID NO: 59265 - DNA, 17 bp, Arabidopsis thaliana
attggatgacaactttt

SEQ ID NO: 59266 - DNA, 17 bp, Arabidopsis thaliana
attggatgagggtaatt

SEQ ID NO: 59267 - DNA, 17 bp, Arabidopsis thaliana
attggatgatcgggccc

SEQ ID NO: 59268 - DNA, 17 bp, Arabidopsis thaliana
attggatgatcgggccg

SEQ ID NO: 59269 - DNA, 17 bp, Arabidopsis thaliana
attggatgatcgggcct

SEQ ID NO: 59270 - DNA, 17 bp, Arabidopsis thaliana
attggatgctctcggtt

SEQ ID NO: 59271 - DNA, 17 bp, Arabidopsis thaliana
attggatggaccggctt

SEQ ID NO: 59272 - DNA, 17 bp, Arabidopsis thaliana
attggattctcagcttt

SEQ ID NO: 59273 - DNA, 17 bp, Arabidopsis thaliana
attggattctcagtttt

SEQ ID NO: 59274 - DNA, 17 bp, Arabidopsis thaliana
attggattctgacacat

SEQ ID NO: 59275 - DNA, 17 bp, Arabidopsis thaliana
attggattcttgtggat

SEQ ID NO: 59276 - DNA, 17 bp, Arabidopsis thaliana
attggattggtccactt

SEQ ID NO: 59277 - DNA, 17 bp, Arabidopsis thaliana
attggattggttatcgg

SEQ ID NO: 59278 - DNA, 17 bp, Arabidopsis thaliana
attggattgtgacacag

SEQ ID NO: 59279 - DNA, 17 bp, Arabidopsis thaliana
attggattgtgacacat

SEQ ID NO: 59280 - DNA, 17 bp, Arabidopsis thaliana
attggattgtgacaccg

SEQ ID NO: 59281 - DNA, 17 bp, Arabidopsis thaliana
attggattgtgacacgg

SEQ ID NO: 59282 - DNA, 17 bp, Arabidopsis thaliana
attggatttctgattgc

SEQ ID NO: 59283 - DNA, 17 bp, Arabidopsis thaliana
attggattttcaggttc

SEQ ID NO: 59284 - DNA, 17 bp, Arabidopsis thaliana
attggattttgattcgc

SEQ ID NO: 59285 - DNA, 17 bp, Arabidopsis thaliana
attggattttgtggcca

SEQ ID NO: 59286 - DNA, 17 bp, Arabidopsis thaliana
attggcaaaggatatga

SEQ ID NO: 59287 - DNA, 17 bp, Arabidopsis thaliana
attggcaacccaaataa

SEQ ID NO: 59288 - DNA, 17 bp, Arabidopsis thaliana
attggcaacggcgcaac

SEQ ID NO: 59289 - DNA, 17 bp, Arabidopsis thaliana
attggcaagcattgtgt

SEQ ID NO: 59290 - DNA, 17 bp, Arabidopsis thaliana
attggcaaggagctgat

SEQ ID NO: 59291 - DNA, 17 bp, Arabidopsis thaliana
attggcaaggttagttg

SEQ ID NO: 59292 - DNA, 17 bp, Arabidopsis thaliana
attggcaataggtggag

SEQ ID NO: 59293 - DNA, 17 bp, Arabidopsis thaliana
attggcaatcggtggag

SEQ ID NO: 59294 - DNA, 17 bp, Arabidopsis thaliana
attggcactgtaccttc

SEQ ID NO: 59295 - DNA, 17 bp, Arabidopsis thaliana
attggcagatgagttgc

SEQ ID NO: 59296 - DNA, 17 bp, Arabidopsis thaliana
attggcagctctcagtt

SEQ ID NO: 59297 - DNA, 17 bp, Arabidopsis thaliana
attggcagctctgtacc

SEQ ID NO: 59298 - DNA, 17 bp, Arabidopsis thaliana
attggcagtgatcctcc

SEQ ID NO: 59299 - DNA, 17 bp, Arabidopsis thaliana
attggcagtttggaagt

SEQ ID NO: 59300 - DNA, 17 bp, Arabidopsis thaliana
attggcatttgagattt

SEQ ID NO: 59301 - DNA, 17 bp, Arabidopsis thaliana
attggccgaaccgacag

SEQ ID NO: 59302 - DNA, 17 bp, Arabidopsis thaliana
attggccgagtccaaag

SEQ ID NO: 59303 - DNA, 17 bp, Arabidopsis thaliana
attggccgggtcgtgcc

SEQ ID NO: 59304 - DNA, 17 bp, Arabidopsis thaliana
attggccgttttcccca

SEQ ID NO: 59305 - DNA, 17 bp, Arabidopsis thaliana
attggcctaaaactggt

SEQ ID NO: 59306 - DNA, 17 bp, Arabidopsis thaliana
attggcctggttcactc

SEQ ID NO: 59307 - DNA, 17 bp, Arabidopsis thaliana
attggcgactgctcgct

SEQ ID NO: 59308 - DNA, 17 bp, Arabidopsis thaliana
attggcgcggctcaatc

SEQ ID NO: 59309 - DNA, 17 bp, Arabidopsis thaliana
attggcggaatccctcg

SEQ ID NO: 59310 - DNA, 17 bp, Arabidopsis thaliana
attggcggagtgatagg

SEQ ID NO: 59311 - DNA, 17 bp, Arabidopsis thaliana
attggcggcccaatagt

SEQ ID NO: 59312 - DNA, 17 bp, Arabidopsis thaliana
attggcggcgatcctcc

SEQ ID NO: 59313 - DNA, 17 bp, Arabidopsis thaliana
attggcggcttttttct

SEQ ID NO: 59314 - DNA, 17 bp, Arabidopsis thaliana
attggcgggacgagtgg

SEQ ID NO: 59315 - DNA, 17 bp, Arabidopsis thaliana
attggcgggacgggttt

SEQ ID NO: 59316 - DNA, 17 bp, Arabidopsis thaliana
attggcgggatccctcg

SEQ ID NO: 59317 - DNA, 17 bp, Arabidopsis thaliana
attggcgggatccctgg

SEQ ID NO: 59318 - DNA, 17 bp, Arabidopsis thaliana
attggcgggatcccttg

SEQ ID NO: 59319 - DNA, 17 bp, Arabidopsis thaliana
attggcgggattcctcg

SEQ ID NO: 59320 - DNA, 17 bp, Arabidopsis thaliana
attggcggtctagaagt

SEQ ID NO: 59321 - DNA, 17 bp, Arabidopsis thaliana
attggcgtttcttggcc

SEQ ID NO: 59322 - DNA, 17 bp, Arabidopsis thaliana
attggctaatgactggc

SEQ ID NO: 59323 - DNA, 17 bp, Arabidopsis thaliana
attggctagggatctat

SEQ ID NO: 59324 - DNA, 17 bp, Arabidopsis thaliana
attggctattgggctgt

SEQ ID NO: 59325 - DNA, 17 bp, Arabidopsis thaliana
attggctctgagggctg

SEQ ID NO: 59326 - DNA, 17 bp, Arabidopsis thaliana
attggctctgatggctg

SEQ ID NO: 59327 - DNA, 17 bp, Arabidopsis thaliana
attggctgagtgatagg

SEQ ID NO: 59328 - DNA, 17 bp, Arabidopsis thaliana
attggctgagtgattga

SEQ ID NO: 59329 - DNA, 17 bp, Arabidopsis thaliana
attggctgattctcact

SEQ ID NO: 59330 - DNA, 17 bp, Arabidopsis thaliana
attggctgctgacatct

SEQ ID NO: 59331 - DNA, 17 bp, Arabidopsis thaliana
attggctgctgcgactc

SEQ ID NO: 59332 - DNA, 17 bp, Arabidopsis thaliana
attggctgtgactctga

SEQ ID NO: 59333 - DNA, 17 bp, Arabidopsis thaliana
attggctgtgctcaggg

SEQ ID NO: 59334 - DNA, 17 bp, Arabidopsis thaliana
attggcttcgggcaccg

SEQ ID NO: 59335 - DNA, 17 bp, Arabidopsis thaliana
attggcttcgtggatat

SEQ ID NO: 59336 - DNA, 17 bp, Arabidopsis thaliana
attggcttctaccgcaa

SEQ ID NO: 59337 - DNA, 17 bp, Arabidopsis thaliana
attggcttcttccaaaa

SEQ ID NO: 59338 - DNA, 17 bp, Arabidopsis thaliana
attggcttgcccagtcc

SEQ ID NO: 59339 - DNA, 17 bp, Arabidopsis thaliana
attggcttgcgatgtag

SEQ ID NO: 59340 - DNA, 17 bp, Arabidopsis thaliana
attggctttgggctttt

SEQ ID NO: 59341 - DNA, 17 bp, Arabidopsis thaliana
attgggaacccaatcaa

SEQ ID NO: 59342 - DNA, 17 bp, Arabidopsis thaliana
attgggaactgggtcca

SEQ ID NO: 59343 - DNA, 17 bp, Arabidopsis thaliana
attgggaacttgctcca

SEQ ID NO: 59344 - DNA, 17 bp, Arabidopsis thaliana
attgggaacttgctccc

SEQ ID NO: 59345 - DNA, 17 bp, Arabidopsis thaliana
attgggaagtgatggcc

SEQ ID NO: 59346 - DNA, 17 bp, Arabidopsis thaliana
attgggaatgcctattt

SEQ ID NO: 59347 - DNA, 17 bp, Arabidopsis thaliana
attgggaccaaaaatga

SEQ ID NO: 59348 - DNA, 17 bp, Arabidopsis thaliana
attgggatccatgatcg

SEQ ID NO: 59349 - DNA, 17 bp, Arabidopsis thaliana
attgggatccttcccaa

SEQ ID NO: 59350 - DNA, 17 bp, Arabidopsis thaliana
attgggatcttgaataa

SEQ ID NO: 59351 - DNA, 17 bp, Arabidopsis thaliana
attgggatgaccaatga

SEQ ID NO: 59352 - DNA, 17 bp, Arabidopsis thaliana
attgggattcttgcgat

SEQ ID NO: 59353 - DNA, 17 bp, Arabidopsis thaliana
attgggattgtgtatgg

SEQ ID NO: 59354 - DNA, 17 bp, Arabidopsis thaliana
attgggcacttcccgag

SEQ ID NO: 59355 - DNA, 17 bp, Arabidopsis thaliana
attgggcagaacaattt

SEQ ID NO: 59356 - DNA, 17 bp, Arabidopsis thaliana
attgggcagaaccagtt

SEQ ID NO: 59357 - DNA, 17 bp, Arabidopsis thaliana
attgggcatatgaccag

SEQ ID NO: 59358 - DNA, 17 bp, Arabidopsis thaliana
attgggcatatgaccgg

SEQ ID NO: 59359 - DNA, 17 bp, Arabidopsis thaliana
attgggcatatgactag

SEQ ID NO: 59360 - DNA, 17 bp, Arabidopsis thaliana
attgggcatggacatct

SEQ ID NO: 59361 - DNA, 17 bp, Arabidopsis thaliana
attgggccaaccggatt

SEQ ID NO: 59362 - DNA, 17 bp, Arabidopsis thaliana
attgggccaacttctga

SEQ ID NO: 59363 - DNA, 17 bp, Arabidopsis thaliana
attgggccaaggggact

SEQ ID NO: 59364 - DNA, 17 bp, Arabidopsis thaliana
attgggccaagggggct

SEQ ID NO: 59365 - DNA, 17 bp, Arabidopsis thaliana
attgggccaatccaccc

SEQ ID NO: 59366 - DNA, 17 bp, Arabidopsis thaliana
attgggccgaaccaata

SEQ ID NO: 59367 - DNA, 17 bp, Arabidopsis thaliana
attgggcgcaagccgga

SEQ ID NO: 59368 - DNA, 17 bp, Arabidopsis thaliana
attgggcgtgtccatgc

SEQ ID NO: 59369 - DNA, 17 bp, Arabidopsis thaliana
attgggcgtgtccgtac

SEQ ID NO: 59370 - DNA, 17 bp, Arabidopsis thaliana
attgggctatgaccagt

SEQ ID NO: 59371 - DNA, 17 bp, Arabidopsis thaliana
attgggctgatactgat

SEQ ID NO: 59372 - DNA, 17 bp, Arabidopsis thaliana
attgggctgcgcgagat

SEQ ID NO: 59373 - DNA, 17 bp, Arabidopsis thaliana
attgggcttctgttttt

SEQ ID NO: 59374 - DNA, 17 bp, Arabidopsis thaliana
attgggcttgctgagtt

SEQ ID NO: 59375 - DNA, 17 bp, Arabidopsis thaliana
attgggcttgggatacc

SEQ ID NO: 59376 - DNA, 17 bp, Arabidopsis thaliana
attgggcttgggtcgga

SEQ ID NO: 59377 - DNA, 17 bp, Arabidopsis thaliana
attgggctttgcccgcg

SEQ ID NO: 59378 - DNA, 17 bp, Arabidopsis thaliana
attgggctttgtttgta

SEQ ID NO: 59379 - DNA, 17 bp, Arabidopsis thaliana
attgggcttttaccggc

SEQ ID NO: 59380 - DNA, 17 bp, Arabidopsis thaliana
attggggagccgttgca

SEQ ID NO: 59381 - DNA, 17 bp, Arabidopsis thaliana
attggggctatcataac

SEQ ID NO: 59382 - DNA, 17 bp, Arabidopsis thaliana
attgggggcgcaacgcc

SEQ ID NO: 59383 - DNA, 17 bp, Arabidopsis thaliana
attgggtaatttgctcg

SEQ ID NO: 59384 - DNA, 17 bp, Arabidopsis thaliana
attgggtacccacgggt

SEQ ID NO: 59385 - DNA, 17 bp, Arabidopsis thaliana
attgggtacgatgatcc

SEQ ID NO: 59386 - DNA, 17 bp, Arabidopsis thaliana
attgggtcaaccaggtt

SEQ ID NO: 59387 - DNA, 17 bp, Arabidopsis thaliana
attgggtcatcggatta

SEQ ID NO: 59388 - DNA, 17 bp, Arabidopsis thaliana
attgggtcatcgggtta

SEQ ID NO: 59389 - DNA, 17 bp, Arabidopsis thaliana
attgggtcctaaacttc

SEQ ID NO: 59390 - DNA, 17 bp, Arabidopsis thaliana
attgggtcggattctgg

SEQ ID NO: 59391 - DNA, 17 bp, Arabidopsis thaliana
attgggtctcactacca

SEQ ID NO: 59392 - DNA, 17 bp, Arabidopsis thaliana
attgggtctggaagcaa

SEQ ID NO: 59393 - DNA, 17 bp, Arabidopsis thaliana
attgggtcttcccaaaa

SEQ ID NO: 59394 - DNA, 17 bp, Arabidopsis thaliana
attgggtgaacgacatg

SEQ ID NO: 59395 - DNA, 17 bp, Arabidopsis thaliana
attgggtggcggtttaa

SEQ ID NO: 59396 - DNA, 17 bp, Arabidopsis thaliana
attgggttcagtcacaa

SEQ ID NO: 59397 - DNA, 17 bp, Arabidopsis thaliana
attgggttccatggaat

SEQ ID NO: 59398 - DNA, 17 bp, Arabidopsis thaliana
attgggttccttcccaa

SEQ ID NO: 59399 - DNA, 17 bp, Arabidopsis thaliana
attgggttccttcccac

SEQ ID NO: 59400 - DNA, 17 bp, Arabidopsis thaliana
attgggttccttcccta

SEQ ID NO: 59401 - DNA, 17 bp, Arabidopsis thaliana
attgggttgcagagtgc

SEQ ID NO: 59402 - DNA, 17 bp, Arabidopsis thaliana
attgggttggttatcag

SEQ ID NO: 59403 - DNA, 17 bp, Arabidopsis thaliana
attgggttggttatcgg

SEQ ID NO: 59404 - DNA, 17 bp, Arabidopsis thaliana
attgggttggttattgg

SEQ ID NO: 59405 - DNA, 17 bp, Arabidopsis thaliana
attgggttggttgtcgg

SEQ ID NO: 59406 - DNA, 17 bp, Arabidopsis thaliana
attgggttgtgtgattt

SEQ ID NO: 59407 - DNA, 17 bp, Arabidopsis thaliana
attgggttgttgcaatg

SEQ ID NO: 59408 - DNA, 17 bp, Arabidopsis thaliana
attgggtttcactttct

SEQ ID NO: 59409 - DNA, 17 bp, Arabidopsis thaliana
attggtaaagaccctag

SEQ ID NO: 59410 - DNA, 17 bp, Arabidopsis thaliana
attggtacatggtgctt

SEQ ID NO: 59411 - DNA, 17 bp, Arabidopsis thaliana
attggtactttttggcc

SEQ ID NO: 59412 - DNA, 17 bp, Arabidopsis thaliana
attggtagtctctcaag

SEQ ID NO: 59413 - DNA, 17 bp, Arabidopsis thaliana
attggtcaatccatctc

SEQ ID NO: 59414 - DNA, 17 bp, Arabidopsis thaliana
attggtcagagcaccgc

SEQ ID NO: 59415 - DNA, 17 bp, Arabidopsis thaliana
attggtcagcatttttg

SEQ ID NO: 59416 - DNA, 17 bp, Arabidopsis thaliana
attggtcatctgtagcg

SEQ ID NO: 59417 - DNA, 17 bp, Arabidopsis thaliana
attggtccaagtgctat

SEQ ID NO: 59418 - DNA, 17 bp, Arabidopsis thaliana
attggtccacgacggat

SEQ ID NO: 59419 - DNA, 17 bp, Arabidopsis thaliana
attggtccgacctaaag

SEQ ID NO: 59420 - DNA, 17 bp, Arabidopsis thaliana
attggtccgacttggaa

SEQ ID NO: 59421 - DNA, 17 bp, Arabidopsis thaliana
attggtccgcagatggt

SEQ ID NO: 59422 - DNA, 17 bp, Arabidopsis thaliana
attggtccgtaagtctt

SEQ ID NO: 59423 - DNA, 17 bp, Arabidopsis thaliana
attggtccgtgacaagt

SEQ ID NO: 59424 - DNA, 17 bp, Arabidopsis thaliana
attggtcgatcttcttc

SEQ ID NO: 59425 - DNA, 17 bp, Arabidopsis thaliana
attggtcggactttttt

SEQ ID NO: 59426 - DNA, 17 bp, Arabidopsis thaliana
attggtcggcttctccc

SEQ ID NO: 59427 - DNA, 17 bp, Arabidopsis thaliana
attggtcggcttgtccc

SEQ ID NO: 59428 - DNA, 17 bp, Arabidopsis thaliana
attggtcggcttgtcct

SEQ ID NO: 59429 - DNA, 17 bp, Arabidopsis thaliana
attggtcggcttgtctc

SEQ ID NO: 59430 - DNA, 17 bp, Arabidopsis thaliana
attggtcggcttgtctg

SEQ ID NO: 59431 - DNA, 17 bp, Arabidopsis thaliana
attggtcgtcttgtccc

SEQ ID NO: 59432 - DNA, 17 bp, Arabidopsis thaliana
attggtctaagttactg

SEQ ID NO: 59433 - DNA, 17 bp, Arabidopsis thaliana
attggtctcaggcatgt

SEQ ID NO: 59434 - DNA, 17 bp, Arabidopsis thaliana
attggtctctcaagtga

SEQ ID NO: 59435 - DNA, 17 bp, Arabidopsis thaliana
attggtctcttggactc

SEQ ID NO: 59436 - DNA, 17 bp, Arabidopsis thaliana
attggtctgtaagcttt

SEQ ID NO: 59437 - DNA, 17 bp, Arabidopsis thaliana
attggtctgtaagtctt

SEQ ID NO: 59438 - DNA, 17 bp, Arabidopsis thaliana
attggtctgtgcagtag

SEQ ID NO: 59439 - DNA, 17 bp, Arabidopsis thaliana
attggtcttacacgctc

SEQ ID NO: 59440 - DNA, 17 bp, Arabidopsis thaliana
attggtgaccgatcatt

SEQ ID NO: 59441 - DNA, 17 bp, Arabidopsis thaliana
attggtgaccttccaga

SEQ ID NO: 59442 - DNA, 17 bp, Arabidopsis thaliana
attggtgaccttccggg

SEQ ID NO: 59443 - DNA, 17 bp, Arabidopsis thaliana
attggtgagaaagacaa

SEQ ID NO: 59444 - DNA, 17 bp, Arabidopsis thaliana
attggtgagattatgtc

SEQ ID NO: 59445 - DNA, 17 bp, Arabidopsis thaliana
attggtgagtgctgaag

SEQ ID NO: 59446 - DNA, 17 bp, Arabidopsis thaliana
attggtgatctcggact

SEQ ID NO: 59447 - DNA, 17 bp, Arabidopsis thaliana
attggtgatgaaattga

SEQ ID NO: 59448 - DNA, 17 bp, Arabidopsis thaliana
attggtgcacaatgcct

SEQ ID NO: 59449 - DNA, 17 bp, Arabidopsis thaliana
attggtgcactcgtgaa

SEQ ID NO: 59450 - DNA, 17 bp, Arabidopsis thaliana
attggtgcattgagatc

SEQ ID NO: 59451 - DNA, 17 bp, Arabidopsis thaliana
attggtgccgacaacca

SEQ ID NO: 59452 - DNA, 17 bp, Arabidopsis thaliana
attggtgccgttggacc

SEQ ID NO: 59453 - DNA, 17 bp, Arabidopsis thaliana
attggtgccgttggtcc

SEQ ID NO: 59454 - DNA, 17 bp, Arabidopsis thaliana
attggtgctggtgggcg

SEQ ID NO: 59455 - DNA, 17 bp, Arabidopsis thaliana
attggtgcttctgatgt

SEQ ID NO: 59456 - DNA, 17 bp, Arabidopsis thaliana
attggtgctttgcggtt

SEQ ID NO: 59457 - DNA, 17 bp, Arabidopsis thaliana
attggtgcttttgtatt

SEQ ID NO: 59458 - DNA, 17 bp, Arabidopsis thaliana
attggtggagtgatttg

SEQ ID NO: 59459 - DNA, 17 bp, Arabidopsis thaliana
attggtggcagttgccc

SEQ ID NO: 59460 - DNA, 17 bp, Arabidopsis thaliana
attggtgtgacggccca

SEQ ID NO: 59461 - DNA, 17 bp, Arabidopsis thaliana
attggttactgttttga

SEQ ID NO: 59462 - DNA, 17 bp, Arabidopsis thaliana
attggttagggtttgta

SEQ ID NO: 59463 - DNA, 17 bp, Arabidopsis thaliana
attggttagtccgagtt

SEQ ID NO: 59464 - DNA, 17 bp, Arabidopsis thaliana
attggttcaccgtccgc

SEQ ID NO: 59465 - DNA, 17 bp, Arabidopsis thaliana
attggttcatgactttc

SEQ ID NO: 59466 - DNA, 17 bp, Arabidopsis thaliana
attggttccctggaacg

SEQ ID NO: 59467 - DNA, 17 bp, Arabidopsis thaliana
attggttccttatcatc

SEQ ID NO: 59468 - DNA, 17 bp, Arabidopsis thaliana
attggttccttggattc

SEQ ID NO: 59469 - DNA, 17 bp, Arabidopsis thaliana
attggttcgagccccac

SEQ ID NO: 59470 - DNA, 17 bp, Arabidopsis thaliana
attggttcgatgagtgc

SEQ ID NO: 59471 - DNA, 17 bp, Arabidopsis thaliana
attggttctccttctac

SEQ ID NO: 59472 - DNA, 17 bp, Arabidopsis thaliana
attggttctccttctat

SEQ ID NO: 59473 - DNA, 17 bp, Arabidopsis thaliana
attggttctcttcggtg

SEQ ID NO: 59474 - DNA, 17 bp, Arabidopsis thaliana
attggttctgctagtct

SEQ ID NO: 59475 - DNA, 17 bp, Arabidopsis thaliana
attggttgaccaaggat

SEQ ID NO: 59476 - DNA, 17 bp, Arabidopsis thaliana
attggttgaccaagggt

SEQ ID NO: 59477 - DNA, 17 bp, Arabidopsis thaliana
attggttgcagggagcg

SEQ ID NO: 59478 - DNA, 17 bp, Arabidopsis thaliana
attggttggctcaaatt

SEQ ID NO: 59479 - DNA, 17 bp, Arabidopsis thaliana
attggttgggattgcaa

SEQ ID NO: 59480 - DNA, 17 bp, Arabidopsis thaliana
attggttgtcgggtccg

SEQ ID NO: 59481 - DNA, 17 bp, Arabidopsis thaliana
attggttgtgtgactaa

SEQ ID NO: 59482 - DNA, 17 bp, Arabidopsis thaliana
attggtttcgttcttcg

SEQ ID NO: 59483 - DNA, 17 bp, Arabidopsis thaliana
attggttttgagttgga

SEQ ID NO: 59484 - DNA, 17 bp, Arabidopsis thaliana
attggttttggctcatg

SEQ ID NO: 59485 - DNA, 17 bp, Arabidopsis thaliana
attggttttggtttctg

SEQ ID NO: 59486 - DNA, 17 bp, Arabidopsis thaliana
attgtaaacgctatctt

SEQ ID NO: 59487 - DNA, 17 bp, Arabidopsis thaliana
attgtaaatccgaccac

SEQ ID NO: 59488 - DNA, 17 bp, Arabidopsis thaliana
attgtaacaacccatcc

SEQ ID NO: 59489 - DNA, 17 bp, Arabidopsis thaliana
attgtaaccgatggaga

SEQ ID NO: 59490 - DNA, 17 bp, Arabidopsis thaliana
attgtaagataggatag

SEQ ID NO: 59491 - DNA, 17 bp, Arabidopsis thaliana
attgtaagcaccgcgat

SEQ ID NO: 59492 - DNA, 17 bp, Arabidopsis thaliana
attgtaagcgtcactct

SEQ ID NO: 59493 - DNA, 17 bp, Arabidopsis thaliana
attgtaagtggcagagt

SEQ ID NO: 59494 - DNA, 17 bp, Arabidopsis thaliana
attgtaatcaggttcca

SEQ ID NO: 59495 - DNA, 17 bp, Arabidopsis thaliana
attgtaattgccatccg

SEQ ID NO: 59496 - DNA, 17 bp, Arabidopsis thaliana
attgtactctcagagcc

SEQ ID NO: 59497 - DNA, 17 bp, Arabidopsis thaliana
attgtactgcggattgg

SEQ ID NO: 59498 - DNA, 17 bp, Arabidopsis thaliana
attgtagaccgcgttaa

SEQ ID NO: 59499 - DNA, 17 bp, Arabidopsis thaliana
attgtagatatgtggtg

SEQ ID NO: 59500 - DNA, 17 bp, Arabidopsis thaliana
attgtagatgtgtgcgg

SEQ ID NO: 59501 - DNA, 17 bp, Arabidopsis thaliana
attgtagcagcttcgga

SEQ ID NO: 59502 - DNA, 17 bp, Arabidopsis thaliana
attgtagctgcgataac

SEQ ID NO: 59503 - DNA, 17 bp, Arabidopsis thaliana
attgtagctgctcacgg

SEQ ID NO: 59504 - DNA, 17 bp, Arabidopsis thaliana
attgtagctggagaaag

SEQ ID NO: 59505 - DNA, 17 bp, Arabidopsis thaliana
attgtagcttcagattt

SEQ ID NO: 59506 - DNA, 17 bp, Arabidopsis thaliana
attgtaggcaccgcttt

SEQ ID NO: 59507 - DNA, 17 bp, Arabidopsis thaliana
attgtaggcttgcccat

SEQ ID NO: 59508 - DNA, 17 bp, Arabidopsis thaliana
attgtataaatgtccaa

SEQ ID NO: 59509 - DNA, 17 bp, Arabidopsis thaliana
attgtatccaactcaaa

SEQ ID NO: 59510 - DNA, 17 bp, Arabidopsis thaliana
attgtatccattacagt

SEQ ID NO: 59511 - DNA, 17 bp, Arabidopsis thaliana
attgtatgcacatccgt

SEQ ID NO: 59512 - DNA, 17 bp, Arabidopsis thaliana
attgtatgcggagaatg

SEQ ID NO: 59513 - DNA, 17 bp, Arabidopsis thaliana
attgtattatccgagcg

SEQ ID NO: 59514 - DNA, 17 bp, Arabidopsis thaliana
attgtattccaggctga

SEQ ID NO: 59515 - DNA, 17 bp, Arabidopsis thaliana
attgtattccatttcca

SEQ ID NO: 59516 - DNA, 17 bp, Arabidopsis thaliana
attgtattggctgagtg

SEQ ID NO: 59517 - DNA, 17 bp, Arabidopsis thaliana
attgtcaacggagttca

SEQ ID NO: 59518 - DNA, 17 bp, Arabidopsis thaliana
attgtcaagggccagtt

SEQ ID NO: 59519 - DNA, 17 bp, Arabidopsis thaliana
attgtcacagaaacgcg

SEQ ID NO: 59520 - DNA, 17 bp, Arabidopsis thaliana
attgtcaccaggtaagc

SEQ ID NO: 59521 - DNA, 17 bp, Arabidopsis thaliana
attgtcacccgattttt

SEQ ID NO: 59522 - DNA, 17 bp, Arabidopsis thaliana
attgtcactcgacctca

SEQ ID NO: 59523 - DNA, 17 bp, Arabidopsis thaliana
attgtcacttaggattg

SEQ ID NO: 59524 - DNA, 17 bp, Arabidopsis thaliana
attgtcaggtggggagt

SEQ ID NO: 59525 - DNA, 17 bp, Arabidopsis thaliana
attgtcagtgacactag

SEQ ID NO: 59526 - DNA, 17 bp, Arabidopsis thaliana
attgtcatcaccgttga

SEQ ID NO: 59527 - DNA, 17 bp, Arabidopsis thaliana
attgtcatttttgccgt

SEQ ID NO: 59528 - DNA, 17 bp, Arabidopsis thaliana
attgtccactaggatac

SEQ ID NO: 59529 - DNA, 17 bp, Arabidopsis thaliana
attgtccactctattgt

SEQ ID NO: 59530 - DNA, 17 bp, Arabidopsis thaliana
attgtccatacggtcaa

SEQ ID NO: 59531 - DNA, 17 bp, Arabidopsis thaliana
attgtccattatgaacc

SEQ ID NO: 59532 - DNA, 17 bp, Arabidopsis thaliana
attgtccattattaacc

SEQ ID NO: 59533 - DNA, 17 bp, Arabidopsis thaliana
attgtcccgcactgtct

SEQ ID NO: 59534 - DNA, 17 bp, Arabidopsis thaliana
attgtccctaatacgcc

SEQ ID NO: 59535 - DNA, 17 bp, Arabidopsis thaliana
attgtccctaatactcc

SEQ ID NO: 59536 - DNA, 17 bp, Arabidopsis thaliana
attgtccctggtttctc

SEQ ID NO: 59537 - DNA, 17 bp, Arabidopsis thaliana
attgtccgcaaccgctt

SEQ ID NO: 59538 - DNA, 17 bp, Arabidopsis thaliana
attgtccgccaaatcta

SEQ ID NO: 59539 - DNA, 17 bp, Arabidopsis thaliana
attgtccgtgctgtcta

SEQ ID NO: 59540 - DNA, 17 bp, Arabidopsis thaliana
attgtccgttttgaccc

SEQ ID NO: 59541 - DNA, 17 bp, Arabidopsis thaliana
attgtcctcgctgtgtg

SEQ ID NO: 59542 - DNA, 17 bp, Arabidopsis thaliana
attgtccttcgtagacc

SEQ ID NO: 59543 - DNA, 17 bp, Arabidopsis thaliana
attgtcgaaggtgctaa

SEQ ID NO: 59544 - DNA, 17 bp, Arabidopsis thaliana
attgtcgaagtcgcaga

SEQ ID NO: 59545 - DNA, 17 bp, Arabidopsis thaliana
attgtcgacttaagtct

SEQ ID NO: 59546 - DNA, 17 bp, Arabidopsis thaliana
attgtcgacttgatgga

SEQ ID NO: 59547 - DNA, 17 bp, Arabidopsis thaliana
attgtcgattgaaccga

SEQ ID NO: 59548 - DNA, 17 bp, Arabidopsis thaliana
attgtcgatttagatct

SEQ ID NO: 59549 - DNA, 17 bp, Arabidopsis thaliana
attgtcgctgtgttgtt

SEQ ID NO: 59550 - DNA, 17 bp, Arabidopsis thaliana
attgtcgcttatgagag

SEQ ID NO: 59551 - DNA, 17 bp, Arabidopsis thaliana
attgtcgctttgcaatt

SEQ ID NO: 59552 - DNA, 17 bp, Arabidopsis thaliana
attgtcggaaccatgcg

SEQ ID NO: 59553 - DNA, 17 bp, Arabidopsis thaliana
attgtcggaactgtgca

SEQ ID NO: 59554 - DNA, 17 bp, Arabidopsis thaliana
attgtcggaactgtgcg

SEQ ID NO: 59555 - DNA, 17 bp, Arabidopsis thaliana
attgtcggacacaagat

SEQ ID NO: 59556 - DNA, 17 bp, Arabidopsis thaliana
attgtcggaggtgccaa

SEQ ID NO: 59557 - DNA, 17 bp, Arabidopsis thaliana
attgtcggaggtgctaa

SEQ ID NO: 59558 - DNA, 17 bp, Arabidopsis thaliana
attgtcggcctcctcag

SEQ ID NO: 59559 - DNA, 17 bp, Arabidopsis thaliana
attgtcgggagggaagc

SEQ ID NO: 59560 - DNA, 17 bp, Arabidopsis thaliana
attgtcgtatgtgttga

SEQ ID NO: 59561 - DNA, 17 bp, Arabidopsis thaliana
attgtcgtccttgaaca

SEQ ID NO: 59562 - DNA, 17 bp, Arabidopsis thaliana
attgtcgtgcctaggct

SEQ ID NO: 59563 - DNA, 17 bp, Arabidopsis thaliana
attgtcgttctatccac

SEQ ID NO: 59564 - DNA, 17 bp, Arabidopsis thaliana
attgtcgttggttgctg

SEQ ID NO: 59565 - DNA, 17 bp, Arabidopsis thaliana
attgtcgttggttgttg

SEQ ID NO: 59566 - DNA, 17 bp, Arabidopsis thaliana
attgtctaacccgaaat

SEQ ID NO: 59567 - DNA, 17 bp, Arabidopsis thaliana
attgtctacagtcgttg

SEQ ID NO: 59568 - DNA, 17 bp, Arabidopsis thaliana
attgtctaccgtccgga

SEQ ID NO: 59569 - DNA, 17 bp, Arabidopsis thaliana
attgtctagtagttgtt

SEQ ID NO: 59570 - DNA, 17 bp, Arabidopsis thaliana
attgtctatgtgattta

SEQ ID NO: 59571 - DNA, 17 bp, Arabidopsis thaliana
attgtctcagcgacaga

SEQ ID NO: 59572 - DNA, 17 bp, Arabidopsis thaliana
attgtctcatggattcg

SEQ ID NO: 59573 - DNA, 17 bp, Arabidopsis thaliana
attgtctctggttactg

SEQ ID NO: 59574 - DNA, 17 bp, Arabidopsis thaliana
attgtcttaggcgccta

SEQ ID NO: 59575 - DNA, 17 bp, Arabidopsis thaliana
attgtcttcaggtatcc

SEQ ID NO: 59576 - DNA, 17 bp, Arabidopsis thaliana
attgtcttcgcggtgta

SEQ ID NO: 59577 - DNA, 17 bp, Arabidopsis thaliana
attgtcttctcggtgta

SEQ ID NO: 59578 - DNA, 17 bp, Arabidopsis thaliana
attgtcttgtccgtagc

SEQ ID NO: 59579 - DNA, 17 bp, Arabidopsis thaliana
attgtctttgcttcgca

SEQ ID NO: 59580 - DNA, 17 bp, Arabidopsis thaliana
attgtgaaaggtgcttg

SEQ ID NO: 59581 - DNA, 17 bp, Arabidopsis thaliana
attgtgaaattcgccgt

SEQ ID NO: 59582 - DNA, 17 bp, Arabidopsis thaliana
attgtgaatccaccatg

SEQ ID NO: 59583 - DNA, 17 bp, Arabidopsis thaliana
attgtgaatgccgttga

SEQ ID NO: 59584 - DNA, 17 bp, Arabidopsis thaliana
attgtgaattcaccatc

SEQ ID NO: 59585 - DNA, 17 bp, Arabidopsis thaliana
attgtgacaccaacggt

SEQ ID NO: 59586 - DNA, 17 bp, Arabidopsis thaliana
attgtgaccatcggagc

SEQ ID NO: 59587 - DNA, 17 bp, Arabidopsis thaliana
attgtgacctttgggct

SEQ ID NO: 59588 - DNA, 17 bp, Arabidopsis thaliana
attgtgacgagagcttg

SEQ ID NO: 59589 - DNA, 17 bp, Arabidopsis thaliana
attgtgacgccaattct

SEQ ID NO: 59590 - DNA, 17 bp, Arabidopsis thaliana
attgtgactcaaggtta

SEQ ID NO: 59591 - DNA, 17 bp, Arabidopsis thaliana
attgtgagataccgtct

SEQ ID NO: 59592 - DNA, 17 bp, Arabidopsis thaliana
attgtgaggccgtcacc

SEQ ID NO: 59593 - DNA, 17 bp, Arabidopsis thaliana
attgtgagggactctgt

SEQ ID NO: 59594 - DNA, 17 bp, Arabidopsis thaliana
attgtgagtcgcgtggg

SEQ ID NO: 59595 - DNA, 17 bp, Arabidopsis thaliana
attgtgagtgggccttg

SEQ ID NO: 59596 - DNA, 17 bp, Arabidopsis thaliana
attgtgagttgagttga

SEQ ID NO: 59597 - DNA, 17 bp, Arabidopsis thaliana
attgtgcattggtcggc

SEQ ID NO: 59598 - DNA, 17 bp, Arabidopsis thaliana
attgtgccaaacccgat

SEQ ID NO: 59599 - DNA, 17 bp, Arabidopsis thaliana
attgtgccaaaggaagt

SEQ ID NO: 59600 - DNA, 17 bp, Arabidopsis thaliana
attgtgccactgaactc

SEQ ID NO: 59601 - DNA, 17 bp, Arabidopsis thaliana
attgtgccagacaagtg

SEQ ID NO: 59602 - DNA, 17 bp, Arabidopsis thaliana
attgtgcctctagtccg

SEQ ID NO: 59603 - DNA, 17 bp, Arabidopsis thaliana
attgtgcgaatcaacgg

SEQ ID NO: 59604 - DNA, 17 bp, Arabidopsis thaliana
attgtgcgaattgaact

SEQ ID NO: 59605 - DNA, 17 bp, Arabidopsis thaliana
attgtgcgaccgaataa

SEQ ID NO: 59606 - DNA, 17 bp, Arabidopsis thaliana
attgtgcgaccgaatag

SEQ ID NO: 59607 - DNA, 17 bp, Arabidopsis thaliana
attgtgcgaccgaatca

SEQ ID NO: 59608 - DNA, 17 bp, Arabidopsis thaliana
attgtgcgaccgaatga

SEQ ID NO: 59609 - DNA, 17 bp, Arabidopsis thaliana
attgtgcgaccgaatgg

SEQ ID NO: 59610 - DNA, 17 bp, Arabidopsis thaliana
attgtgcgagttttgac

SEQ ID NO: 59611 - DNA, 17 bp, Arabidopsis thaliana
attgtgcgagttttgat

SEQ ID NO: 59612 - DNA, 17 bp, Arabidopsis thaliana
attgtgcggtgcagtgt

SEQ ID NO: 59613 - DNA, 17 bp, Arabidopsis thaliana
attgtgcggttcgatca

SEQ ID NO: 59614 - DNA, 17 bp, Arabidopsis thaliana
attgtgcgtgtgcgagt

SEQ ID NO: 59615 - DNA, 17 bp, Arabidopsis thaliana
attgtgctccaatggtc

SEQ ID NO: 59616 - DNA, 17 bp, Arabidopsis thaliana
attgtgctgcggattga

SEQ ID NO: 59617 - DNA, 17 bp, Arabidopsis thaliana
attgtgcttgtctacgg

SEQ ID NO: 59618 - DNA, 17 bp, Arabidopsis thaliana
attgtgctttaaactct

SEQ ID NO: 59619 - DNA, 17 bp, Arabidopsis thaliana
attgtggacccttggag

SEQ ID NO: 59620 - DNA, 17 bp, Arabidopsis thaliana
attgtggactcgcgaag

SEQ ID NO: 59621 - DNA, 17 bp, Arabidopsis thaliana
attgtggactgcgcctt

SEQ ID NO: 59622 - DNA, 17 bp, Arabidopsis thaliana
attgtggactggtccgt

SEQ ID NO: 59623 - DNA, 17 bp, Arabidopsis thaliana
attgtggagcgtagtgt

SEQ ID NO: 59624 - DNA, 17 bp, Arabidopsis thaliana
attgtggatgtgggttt

SEQ ID NO: 59625 - DNA, 17 bp, Arabidopsis thaliana
attgtggatgttggttt

SEQ ID NO: 59626 - DNA, 17 bp, Arabidopsis thaliana
attgtggattgtcaaga

SEQ ID NO: 59627 - DNA, 17 bp, Arabidopsis thaliana
attgtggcgctttcttc

SEQ ID NO: 59628 - DNA, 17 bp, Arabidopsis thaliana
attgtggctacgagttt

SEQ ID NO: 59629 - DNA, 17 bp, Arabidopsis thaliana
attgtgggctggccttt

SEQ ID NO: 59630 - DNA, 17 bp, Arabidopsis thaliana
attgtgggtgattggtt

SEQ ID NO: 59631 - DNA, 17 bp, Arabidopsis thaliana
attgtgggttcgggtcc

SEQ ID NO: 59632 - DNA, 17 bp, Arabidopsis thaliana
attgtgggttcgtgtcc

SEQ ID NO: 59633 - DNA, 17 bp, Arabidopsis thaliana
attgtggtcattgttcg

SEQ ID NO: 59634 - DNA, 17 bp, Arabidopsis thaliana
attgtggtctaatggtc

SEQ ID NO: 59635 - DNA, 17 bp, Arabidopsis thaliana
attgtggtgggcttttt

SEQ ID NO: 59636 - DNA, 17 bp, Arabidopsis thaliana
attgtggtttcgggcct

SEQ ID NO: 59637 - DNA, 17 bp, Arabidopsis thaliana
attgtggtttcggggtt

SEQ ID NO: 59638 - DNA, 17 bp, Arabidopsis thaliana
attgtgtactaaccgaa

SEQ ID NO: 59639 - DNA, 17 bp, Arabidopsis thaliana
attgtgtactaaccgca

SEQ ID NO: 59640 - DNA, 17 bp, Arabidopsis thaliana
attgtgtactagatgac

SEQ ID NO: 59641 - DNA, 17 bp, Arabidopsis thaliana
attgtgtagaatgtcga

SEQ ID NO: 59642 - DNA, 17 bp, Arabidopsis thaliana
attgtgtagatgttcgc

SEQ ID NO: 59643 - DNA, 17 bp, Arabidopsis thaliana
attgtgtcatttgctat

SEQ ID NO: 59644 - DNA, 17 bp, Arabidopsis thaliana
attgtgtcccaaatcag

SEQ ID NO: 59645 - DNA, 17 bp, Arabidopsis thaliana
attgtgtccgacttgtt

SEQ ID NO: 59646 - DNA, 17 bp, Arabidopsis thaliana
attgtgtcgcccaatgt

SEQ ID NO: 59647 - DNA, 17 bp, Arabidopsis thaliana
attgtgtcggccattgt

SEQ ID NO: 59648 - DNA, 17 bp, Arabidopsis thaliana
attgtgtcttcgggttt

SEQ ID NO: 59649 - DNA, 17 bp, Arabidopsis thaliana
attgtgtgatgggttcg

SEQ ID NO: 59650 - DNA, 17 bp, Arabidopsis thaliana
attgtgtgatgggttct

SEQ ID NO: 59651 - DNA, 17 bp, Arabidopsis thaliana
attgtgtgcggctcgta

SEQ ID NO: 59652 - DNA, 17 bp, Arabidopsis thaliana
attgtgtgtcagccaaa

SEQ ID NO: 59653 - DNA, 17 bp, Arabidopsis thaliana
attgtgttccaatcctg

SEQ ID NO: 59654 - DNA, 17 bp, Arabidopsis thaliana
attgtgttgcggaatct

SEQ ID NO: 59655 - DNA, 17 bp, Arabidopsis thaliana
attgtgttggccttcgg

SEQ ID NO: 59656 - DNA, 17 bp, Arabidopsis thaliana
attgtgtttggacttga

SEQ ID NO: 59657 - DNA, 17 bp, Arabidopsis thaliana
attgtgtttgggttccg

SEQ ID NO: 59658 - DNA, 17 bp, Arabidopsis thaliana
attgtgttttcatcact

SEQ ID NO: 59659 - DNA, 17 bp, Arabidopsis thaliana
attgttaaaacactgtt

SEQ ID NO: 59660 - DNA, 17 bp, Arabidopsis thaliana
attgttaccgagactca

SEQ ID NO: 59661 - DNA, 17 bp, Arabidopsis thaliana
attgttactaagtaacg

SEQ ID NO: 59662 - DNA, 17 bp, Arabidopsis thaliana
attgttagtcttgggca

SEQ ID NO: 59663 - DNA, 17 bp, Arabidopsis thaliana
attgttatccggtttac

SEQ ID NO: 59664 - DNA, 17 bp, Arabidopsis thaliana
attgttatctgactgac

SEQ ID NO: 59665 - DNA, 17 bp, Arabidopsis thaliana
attgttcaaggtaacga

SEQ ID NO: 59666 - DNA, 17 bp, Arabidopsis thaliana
attgttcaatgactggt

SEQ ID NO: 59667 - DNA, 17 bp, Arabidopsis thaliana
attgttcactggtggca

SEQ ID NO: 59668 - DNA, 17 bp, Arabidopsis thaliana
attgttcagtacagata

SEQ ID NO: 59669 - DNA, 17 bp, Arabidopsis thaliana
attgttccatccacccc

SEQ ID NO: 59670 - DNA, 17 bp, Arabidopsis thaliana
attgttccatcgaccag

SEQ ID NO: 59671 - DNA, 17 bp, Arabidopsis thaliana
attgttccgagactacc

SEQ ID NO: 59672 - DNA, 17 bp, Arabidopsis thaliana
attgttccgagactatc

SEQ ID NO: 59673 - DNA, 17 bp, Arabidopsis thaliana
attgttccgagtctact

SEQ ID NO: 59674 - DNA, 17 bp, Arabidopsis thaliana
attgttccgtaattcct

SEQ ID NO: 59675 - DNA, 17 bp, Arabidopsis thaliana
attgttcctcgcaaaac

SEQ ID NO: 59676 - DNA, 17 bp, Arabidopsis thaliana
attgttcctgctgagtg

SEQ ID NO: 59677 - DNA, 17 bp, Arabidopsis thaliana
attgttcctgtgagctt

SEQ ID NO: 59678 - DNA, 17 bp, Arabidopsis thaliana
attgttccttggctgca

SEQ ID NO: 59679 - DNA, 17 bp, Arabidopsis thaliana
attgttcgacttcttgg

SEQ ID NO: 59680 - DNA, 17 bp, Arabidopsis thaliana
attgttcgggagacatg

SEQ ID NO: 59681 - DNA, 17 bp, Arabidopsis thaliana
attgttcggtcaagact

SEQ ID NO: 59682 - DNA, 17 bp, Arabidopsis thaliana
attgttcggtctgaccg

SEQ ID NO: 59683 - DNA, 17 bp, Arabidopsis thaliana
attgttcggtctgagcc

SEQ ID NO: 59684 - DNA, 17 bp, Arabidopsis thaliana
attgttcgtttgactgt

SEQ ID NO: 59685 - DNA, 17 bp, Arabidopsis thaliana
attgttcgtttgtctgt

SEQ ID NO: 59686 - DNA, 17 bp, Arabidopsis thaliana
attgttctaacagtacg

SEQ ID NO: 59687 - DNA, 17 bp, Arabidopsis thaliana
attgttctactgcgccg

SEQ ID NO: 59688 - DNA, 17 bp, Arabidopsis thaliana
attgttctgtagagacc

SEQ ID NO: 59689 - DNA, 17 bp, Arabidopsis thaliana
attgttgaagatctcct

SEQ ID NO: 59690 - DNA, 17 bp, Arabidopsis thaliana
attgttgacagaatcgg

SEQ ID NO: 59691 - DNA, 17 bp, Arabidopsis thaliana
attgttgacaggttgtt

SEQ ID NO: 59692 - DNA, 17 bp, Arabidopsis thaliana
attgttgagccgtgagc

SEQ ID NO: 59693 - DNA, 17 bp, Arabidopsis thaliana
attgttgataacaagat

SEQ ID NO: 59694 - DNA, 17 bp, Arabidopsis thaliana
attgttgatagcctaaa

SEQ ID NO: 59695 - DNA, 17 bp, Arabidopsis thaliana
attgttgatcgactctc

SEQ ID NO: 59696 - DNA, 17 bp, Arabidopsis thaliana
attgttgattctgggct

SEQ ID NO: 59697 - DNA, 17 bp, Arabidopsis thaliana
attgttgattttgctcc

SEQ ID NO: 59698 - DNA, 17 bp, Arabidopsis thaliana
attgttgcacgggtacg

SEQ ID NO: 59699 - DNA, 17 bp, Arabidopsis thaliana
attgttgcagccttgac

SEQ ID NO: 59700 - DNA, 17 bp, Arabidopsis thaliana
attgttgcataagagcg

SEQ ID NO: 59701 - DNA, 17 bp, Arabidopsis thaliana
attgttgccaactgctt

SEQ ID NO: 59702 - DNA, 17 bp, Arabidopsis thaliana
attgttgccactggctt

SEQ ID NO: 59703 - DNA, 17 bp, Arabidopsis thaliana
attgttgccttgcccag

SEQ ID NO: 59704 - DNA, 17 bp, Arabidopsis thaliana
attgttgcgataattag

SEQ ID NO: 59705 - DNA, 17 bp, Arabidopsis thaliana
attgttgcgtgccatag

SEQ ID NO: 59706 - DNA, 17 bp, Arabidopsis thaliana
attgttgcttaccgggt

SEQ ID NO: 59707 - DNA, 17 bp, Arabidopsis thaliana
attgttggagtgaggct

SEQ ID NO: 59708 - DNA, 17 bp, Arabidopsis thaliana
attgttggatttgtttg

SEQ ID NO: 59709 - DNA, 17 bp, Arabidopsis thaliana
attgttggcctaccgcg

SEQ ID NO: 59710 - DNA, 17 bp, Arabidopsis thaliana
attgttggcgccgttgt

SEQ ID NO: 59711 - DNA, 17 bp, Arabidopsis thaliana
attgttggcgcgtgccg

SEQ ID NO: 59712 - DNA, 17 bp, Arabidopsis thaliana
attgttggctatcctca

SEQ ID NO: 59713 - DNA, 17 bp, Arabidopsis thaliana
attgttgggcctcactg

SEQ ID NO: 59714 - DNA, 17 bp, Arabidopsis thaliana
attgttgggtaaattgc

SEQ ID NO: 59715 - DNA, 17 bp, Arabidopsis thaliana
attgttggtttgcacga

SEQ ID NO: 59716 - DNA, 17 bp, Arabidopsis thaliana
attgttgtcccactgca

SEQ ID NO: 59717 - DNA, 17 bp, Arabidopsis thaliana
attgttgtctcctgaac

SEQ ID NO: 59718 - DNA, 17 bp, Arabidopsis thaliana
attgttgtcttcctccg

SEQ ID NO: 59719 - DNA, 17 bp, Arabidopsis thaliana
attgttgtgcagtggaa

SEQ ID NO: 59720 - DNA, 17 bp, Arabidopsis thaliana
attgttgttgactacac

SEQ ID NO: 59721 - DNA, 17 bp, Arabidopsis thaliana
attgttgtttacacgga

SEQ ID NO: 59722 - DNA, 17 bp, Arabidopsis thaliana
attgtttaccgacgaaa

SEQ ID NO: 59723 - DNA, 17 bp, Arabidopsis thaliana
attgtttcaactgggtt

SEQ ID NO: 59724 - DNA, 17 bp, Arabidopsis thaliana
attgtttcattgatggc

SEQ ID NO: 59725 - DNA, 17 bp, Arabidopsis thaliana
attgtttcgccgaagat

SEQ ID NO: 59726 - DNA, 17 bp, Arabidopsis thaliana
attgtttctacttggga

SEQ ID NO: 59727 - DNA, 17 bp, Arabidopsis thaliana
attgtttctgacagtgc

SEQ ID NO: 59728 - DNA, 17 bp, Arabidopsis thaliana
attgtttgattacgggc

SEQ ID NO: 59729 - DNA, 17 bp, Arabidopsis thaliana
attgtttgcagtgtttc

SEQ ID NO: 59730 - DNA, 17 bp, Arabidopsis thaliana
attgtttggaccggctc

SEQ ID NO: 59731 - DNA, 17 bp, Arabidopsis thaliana
attgtttggcctcggga

SEQ ID NO: 59732 - DNA, 17 bp, Arabidopsis thaliana
attgttttaccgtcccg

SEQ ID NO: 59733 - DNA, 17 bp, Arabidopsis thaliana
attgttttccggaagtt

SEQ ID NO: 59734 - DNA, 17 bp, Arabidopsis thaliana
attgttttcgtaggacc

SEQ ID NO: 59735 - DNA, 17 bp, Arabidopsis thaliana
attgtttttttgaacga

SEQ ID NO: 59736 - DNA, 17 bp, Arabidopsis thaliana
atttaaaccgtaccgca

SEQ ID NO: 59737 - DNA, 17 bp, Arabidopsis thaliana
atttaacattttcccgc

SEQ ID NO: 59738 - DNA, 17 bp, Arabidopsis thaliana
atttaacccgtggtaca

SEQ ID NO: 59739 - DNA, 17 bp, Arabidopsis thaliana
atttaaccggtggctac

SEQ ID NO: 59740 - DNA, 17 bp, Arabidopsis thaliana
atttaaccgtggtcatt

SEQ ID NO: 59741 - DNA, 17 bp, Arabidopsis thaliana
atttaacctgctgtggg

SEQ ID NO: 59742 - DNA, 17 bp, Arabidopsis thaliana
atttaacctggtatgca

SEQ ID NO: 59743 - DNA, 17 bp, Arabidopsis thaliana
atttaacctggtgtagg

SEQ ID NO: 59744 - DNA, 17 bp, Arabidopsis thaliana
atttaacgacatgctcg

SEQ ID NO: 59745 - DNA, 17 bp, Arabidopsis thaliana
atttaacgtgatgtgag

SEQ ID NO: 59746 - DNA, 17 bp, Arabidopsis thaliana
atttaacttggtgtgag

SEQ ID NO: 59747 - DNA, 17 bp, Arabidopsis thaliana
atttaagactttgggtc

SEQ ID NO: 59748 - DNA, 17 bp, Arabidopsis thaliana
atttaagatttcgggtc

SEQ ID NO: 59749 - DNA, 17 bp, Arabidopsis thaliana
atttaagtaagaaagcc

SEQ ID NO: 59750 - DNA, 17 bp, Arabidopsis thaliana
atttaagtctgctttga

SEQ ID NO: 59751 - DNA, 17 bp, Arabidopsis thaliana
atttaataagtcagtgg

SEQ ID NO: 59752 - DNA, 17 bp, Arabidopsis thaliana
atttaatccaaaacctg

SEQ ID NO: 59753 - DNA, 17 bp, Arabidopsis thaliana
atttaatcccagccgac

SEQ ID NO: 59754 - DNA, 17 bp, Arabidopsis thaliana
atttaatcgcaggtcaa

SEQ ID NO: 59755 - DNA, 17 bp, Arabidopsis thaliana
atttaatctaacctaac

SEQ ID NO: 59756 - DNA, 17 bp, Arabidopsis thaliana
atttaatctaatgtggg

SEQ ID NO: 59757 - DNA, 17 bp, Arabidopsis thaliana
atttaatctggtgtgcc

SEQ ID NO: 59758 - DNA, 17 bp, Arabidopsis thaliana
atttaattgatccgtgg

SEQ ID NO: 59759 - DNA, 17 bp, Arabidopsis thaliana
atttacaatagctgcca

SEQ ID NO: 59760 - DNA, 17 bp, Arabidopsis thaliana
atttacaatgcggttag

SEQ ID NO: 59761 - DNA, 17 bp, Arabidopsis thaliana
atttacaatggctacca

SEQ ID NO: 59762 - DNA, 17 bp, Arabidopsis thaliana
atttacaatggctgcca

SEQ ID NO: 59763 - DNA, 17 bp, Arabidopsis thaliana
atttacaatggctggca

SEQ ID NO: 59764 - DNA, 17 bp, Arabidopsis thaliana
atttacaatggctgtca

SEQ ID NO: 59765 - DNA, 17 bp, Arabidopsis thaliana
atttacaatggttgtca

SEQ ID NO: 59766 - DNA, 17 bp, Arabidopsis thaliana
atttacaatgtgcgggc

SEQ ID NO: 59767 - DNA, 17 bp, Arabidopsis thaliana
atttacaattgctgcca

SEQ ID NO: 59768 - DNA, 17 bp, Arabidopsis thaliana
atttacacagcattacg

SEQ ID NO: 59769 - DNA, 17 bp, Arabidopsis thaliana
atttacacctgcttggc

SEQ ID NO: 59770 - DNA, 17 bp, Arabidopsis thaliana
atttacagacacgccac

SEQ ID NO: 59771 - DNA, 17 bp, Arabidopsis thaliana
atttacagcggctgcca

SEQ ID NO: 59772 - DNA, 17 bp, Arabidopsis thaliana
atttacagcggctgtca

SEQ ID NO: 59773 - DNA, 17 bp, Arabidopsis thaliana
atttacagcgggcctcg

SEQ ID NO: 59774 - DNA, 17 bp, Arabidopsis thaliana
atttacagtagctgcca

SEQ ID NO: 59775 - DNA, 17 bp, Arabidopsis thaliana
atttacagtagctgtca

SEQ ID NO: 59776 - DNA, 17 bp, Arabidopsis thaliana
atttacagtagttgtca

SEQ ID NO: 59777 - DNA, 17 bp, Arabidopsis thaliana
atttacagtggctgcca

SEQ ID NO: 59778 - DNA, 17 bp, Arabidopsis thaliana
atttacagtggctgtca

SEQ ID NO: 59779 - DNA, 17 bp, Arabidopsis thaliana
atttaccactggaccaa

SEQ ID NO: 59780 - DNA, 17 bp, Arabidopsis thaliana
atttaccatcgcagagc

SEQ ID NO: 59781 - DNA, 17 bp, Arabidopsis thaliana
atttaccattggaccaa

SEQ ID NO: 59782 - DNA, 17 bp, Arabidopsis thaliana
atttacccgccaacgct

SEQ ID NO: 59783 - DNA, 17 bp, Arabidopsis thaliana
atttaccgactctcgat

SEQ ID NO: 59784 - DNA, 17 bp, Arabidopsis thaliana
atttaccggcgcagaat

SEQ ID NO: 59785 - DNA, 17 bp, Arabidopsis thaliana
atttacctggcctccat

SEQ ID NO: 59786 - DNA, 17 bp, Arabidopsis thaliana
atttacgactaactctg

SEQ ID NO: 59787 - DNA, 17 bp, Arabidopsis thaliana
atttacgactggttgat

SEQ ID NO: 59788 - DNA, 17 bp, Arabidopsis thaliana
atttacgagagtcagcc

SEQ ID NO: 59789 - DNA, 17 bp, Arabidopsis thaliana
atttacgagatgtgcca

SEQ ID NO: 59790 - DNA, 17 bp, Arabidopsis thaliana
atttacgatctaatgcc

SEQ ID NO: 59791 - DNA, 17 bp, Arabidopsis thaliana
atttacgcacgggtact

SEQ ID NO: 59792 - DNA, 17 bp, Arabidopsis thaliana
atttacgcgctgaagat

SEQ ID NO: 59793 - DNA, 17 bp, Arabidopsis thaliana
atttacggaccaaattt

SEQ ID NO: 59794 - DNA, 17 bp, Arabidopsis thaliana
atttacggatggattgg

SEQ ID NO: 59795 - DNA, 17 bp, Arabidopsis thaliana
atttacgggcgttacac

SEQ ID NO: 59796 - DNA, 17 bp, Arabidopsis thaliana
atttacgtcaaaatcgc

SEQ ID NO: 59797 - DNA, 17 bp, Arabidopsis thaliana
atttacgtttgaggcac

SEQ ID NO: 59798 - DNA, 17 bp, Arabidopsis thaliana
atttactaaatgagtac

SEQ ID NO: 59799 - DNA, 17 bp, Arabidopsis thaliana
atttactagattttcac

SEQ ID NO: 59800 - DNA, 17 bp, Arabidopsis thaliana
atttactccacactgct

SEQ ID NO: 59801 - DNA, 17 bp, Arabidopsis thaliana
atttactccagactggt

SEQ ID NO: 59802 - DNA, 17 bp, Arabidopsis thaliana
atttactcgaccaaggg

SEQ ID NO: 59803 - DNA, 17 bp, Arabidopsis thaliana
atttactcgacttcgca

SEQ ID NO: 59804 - DNA, 17 bp, Arabidopsis thaliana
atttactgtgcctgcca

SEQ ID NO: 59805 - DNA, 17 bp, Arabidopsis thaliana
atttacttcttggttgt

SEQ ID NO: 59806 - DNA, 17 bp, Arabidopsis thaliana
atttacttgatcaatcc

SEQ ID NO: 59807 - DNA, 17 bp, Arabidopsis thaliana
atttacttgccaatcca

SEQ ID NO: 59808 - DNA, 17 bp, Arabidopsis thaliana
atttagaccagggtggc

SEQ ID NO: 59809 - DNA, 17 bp, Arabidopsis thaliana
atttagaccgttttgtc

SEQ ID NO: 59810 - DNA, 17 bp, Arabidopsis thaliana
atttagactatgacatc

SEQ ID NO: 59811 - DNA, 17 bp, Arabidopsis thaliana
atttagacttgcaccaa

SEQ ID NO: 59812 - DNA, 17 bp, Arabidopsis thaliana
atttagacttgcagcaa

SEQ ID NO: 59813 - DNA, 17 bp, Arabidopsis thaliana
atttagatttctgggaa

SEQ ID NO: 59814 - DNA, 17 bp, Arabidopsis thaliana
atttagccctttgtcgc

SEQ ID NO: 59815 - DNA, 17 bp, Arabidopsis thaliana
atttagcctcaattttg

SEQ ID NO: 59816 - DNA, 17 bp, Arabidopsis thaliana
atttagccttggacgga

SEQ ID NO: 59817 - DNA, 17 bp, Arabidopsis thaliana
atttagcgcgtcttctc

SEQ ID NO: 59818 - DNA, 17 bp, Arabidopsis thaliana
atttagcgttttgaccg

SEQ ID NO: 59819 - DNA, 17 bp, Arabidopsis thaliana
atttagctaataaagct

SEQ ID NO: 59820 - DNA, 17 bp, Arabidopsis thaliana
atttagctcctaggatc

SEQ ID NO: 59821 - DNA, 17 bp, Arabidopsis thaliana
atttagctcgctcttca

SEQ ID NO: 59822 - DNA, 17 bp, Arabidopsis thaliana
atttagctgactttgat

SEQ ID NO: 59823 - DNA, 17 bp, Arabidopsis thaliana
atttagcttcctcgggt

SEQ ID NO: 59824 - DNA, 17 bp, Arabidopsis thaliana
atttaggaaccgacgtg

SEQ ID NO: 59825 - DNA, 17 bp, Arabidopsis thaliana
atttaggaccgctcttg

SEQ ID NO: 59826 - DNA, 17 bp, Arabidopsis thaliana
atttaggccatctccat

SEQ ID NO: 59827 - DNA, 17 bp, Arabidopsis thaliana
atttaggcgggtgtacc

SEQ ID NO: 59828 - DNA, 17 bp, Arabidopsis thaliana
atttaggggtttagggt

SEQ ID NO: 59829 - DNA, 17 bp, Arabidopsis thaliana
atttaggtcaatcttct

SEQ ID NO: 59830 - DNA, 17 bp, Arabidopsis thaliana
atttaggttcactcttc

SEQ ID NO: 59831 - DNA, 17 bp, Arabidopsis thaliana
atttagtattccgttcg

SEQ ID NO: 59832 - DNA, 17 bp, Arabidopsis thaliana
atttagtccagtctgtt

SEQ ID NO: 59833 - DNA, 17 bp, Arabidopsis thaliana
atttagtccgttgctgg

SEQ ID NO: 59834 - DNA, 17 bp, Arabidopsis thaliana
atttagtcgcatcctgt

SEQ ID NO: 59835 - DNA, 17 bp, Arabidopsis thaliana
atttagtgagagcttcc

SEQ ID NO: 59836 - DNA, 17 bp, Arabidopsis thaliana
atttagtggacacatga

SEQ ID NO: 59837 - DNA, 17 bp, Arabidopsis thaliana
atttagtggacacatgg

SEQ ID NO: 59838 - DNA, 17 bp, Arabidopsis thaliana
atttagtggacggacct

SEQ ID NO: 59839 - DNA, 17 bp, Arabidopsis thaliana
atttagtgggtgattgg

SEQ ID NO: 59840 - DNA, 17 bp, Arabidopsis thaliana
atttagttgactgtgga

SEQ ID NO: 59841 - DNA, 17 bp, Arabidopsis thaliana
atttagttggtctgccg

SEQ ID NO: 59842 - DNA, 17 bp, Arabidopsis thaliana
atttagtttgcaacttt

SEQ ID NO: 59843 - DNA, 17 bp, Arabidopsis thaliana
atttataaatgagtttg

SEQ ID NO: 59844 - DNA, 17 bp, Arabidopsis thaliana
atttatcactgggccaa

SEQ ID NO: 59845 - DNA, 17 bp, Arabidopsis thaliana
atttatccagatctcgt

SEQ ID NO: 59846 - DNA, 17 bp, Arabidopsis thaliana
atttatccatgagcaca

SEQ ID NO: 59847 - DNA, 17 bp, Arabidopsis thaliana
atttatccccaactcgg

SEQ ID NO: 59848 - DNA, 17 bp, Arabidopsis thaliana
atttatcgagcacgtca

SEQ ID NO: 59849 - DNA, 17 bp, Arabidopsis thaliana
atttatcgcagggcact

SEQ ID NO: 59850 - DNA, 17 bp, Arabidopsis thaliana
atttatcgttgacccgg

SEQ ID NO: 59851 - DNA, 17 bp, Arabidopsis thaliana
atttatctatgtgggac

SEQ ID NO: 59852 - DNA, 17 bp, Arabidopsis thaliana
atttatctgccaacgct

SEQ ID NO: 59853 - DNA, 17 bp, Arabidopsis thaliana
atttatctgcgatttag

SEQ ID NO: 59854 - DNA, 17 bp, Arabidopsis thaliana
atttatctgcggtttag

SEQ ID NO: 59855 - DNA, 17 bp, Arabidopsis thaliana
atttatctggccgacac

SEQ ID NO: 59856 - DNA, 17 bp, Arabidopsis thaliana
atttatgaagacggact

SEQ ID NO: 59857 - DNA, 17 bp, Arabidopsis thaliana
atttatgacatggtgcc

SEQ ID NO: 59858 - DNA, 17 bp, Arabidopsis thaliana
atttatgcccatgggca

SEQ ID NO: 59859 - DNA, 17 bp, Arabidopsis thaliana
atttatggcatagcaga

SEQ ID NO: 59860 - DNA, 17 bp, Arabidopsis thaliana
atttatggcggaccgat

SEQ ID NO: 59861 - DNA, 17 bp, Arabidopsis thaliana
atttatgggtccgccgc

SEQ ID NO: 59862 - DNA, 17 bp, Arabidopsis thaliana
atttatgtccacgaaat

SEQ ID NO: 59863 - DNA, 17 bp, Arabidopsis thaliana
atttatgtccgatcaga

SEQ ID NO: 59864 - DNA, 17 bp, Arabidopsis thaliana
atttattagactgtggg

SEQ ID NO: 59865 - DNA, 17 bp, Arabidopsis thaliana
atttattcatctcagcg

SEQ ID NO: 59866 - DNA, 17 bp, Arabidopsis thaliana
atttattctccacctgc

SEQ ID NO: 59867 - DNA, 17 bp, Arabidopsis thaliana
atttattgacacgtgga

SEQ ID NO: 59868 - DNA, 17 bp, Arabidopsis thaliana
atttattgggccggcct

SEQ ID NO: 59869 - DNA, 17 bp, Arabidopsis thaliana
atttatttacaatggct

SEQ ID NO: 59870 - DNA, 17 bp, Arabidopsis thaliana
atttatttacggtggct

SEQ ID NO: 59871 - DNA, 17 bp, Arabidopsis thaliana
atttatttcacaaagtg

SEQ ID NO: 59872 - DNA, 17 bp, Arabidopsis thaliana
atttatttcgcagatgg

SEQ ID NO: 59873 - DNA, 17 bp, Arabidopsis thaliana
atttatttgacaactgt

SEQ ID NO: 59874 - DNA, 17 bp, Arabidopsis thaliana
atttatttgcagaatca

SEQ ID NO: 59875 - DNA, 17 bp, Arabidopsis thaliana
atttatttgcggacccc

SEQ ID NO: 59876 - DNA, 17 bp, Arabidopsis thaliana
atttatttggataccca

SEQ ID NO: 59877 - DNA, 17 bp, Arabidopsis thaliana
atttatttgggaagtct

SEQ ID NO: 59878 - DNA, 17 bp, Arabidopsis thaliana
atttatttgtgtcgaca

SEQ ID NO: 59879 - DNA, 17 bp, Arabidopsis thaliana
atttcaaaagtctatgg

SEQ ID NO: 59880 - DNA, 17 bp, Arabidopsis thaliana
atttcaaactcggatct

SEQ ID NO: 59881 - DNA, 17 bp, Arabidopsis thaliana
atttcaaagattacccg

SEQ ID NO: 59882 - DNA, 17 bp, Arabidopsis thaliana
atttcaaaggtccgtct

SEQ ID NO: 59883 - DNA, 17 bp, Arabidopsis thaliana
atttcaaagtccagttc

SEQ ID NO: 59884 - DNA, 17 bp, Arabidopsis thaliana
atttcaacaacttgatg

SEQ ID NO: 59885 - DNA, 17 bp, Arabidopsis thaliana
atttcaacagttggtga

SEQ ID NO: 59886 - DNA, 17 bp, Arabidopsis thaliana
atttcaacattagtcca

SEQ ID NO: 59887 - DNA, 17 bp, Arabidopsis thaliana
atttcaaccgctaccac

SEQ ID NO: 59888 - DNA, 17 bp, Arabidopsis thaliana
atttcaacctcgatctt

SEQ ID NO: 59889 - DNA, 17 bp, Arabidopsis thaliana
atttcaacggttgcttt

SEQ ID NO: 59890 - DNA, 17 bp, Arabidopsis thaliana
atttcaagcagttccgg

SEQ ID NO: 59891 - DNA, 17 bp, Arabidopsis thaliana
atttcaaggccgtaact

SEQ ID NO: 59892 - DNA, 17 bp, Arabidopsis thaliana
atttcaatccacgaacc

SEQ ID NO: 59893 - DNA, 17 bp, Arabidopsis thaliana
atttcaatgcagcactg

SEQ ID NO: 59894 - DNA, 17 bp, Arabidopsis thaliana
atttcaatgtctgttgg

SEQ ID NO: 59895 - DNA, 17 bp, Arabidopsis thaliana
atttcaatttgttcctt

SEQ ID NO: 59896 - DNA, 17 bp, Arabidopsis thaliana
atttcacaaaatggcta

SEQ ID NO: 59897 - DNA, 17 bp, Arabidopsis thaliana
atttcacaaaatggctg

SEQ ID NO: 59898 - DNA, 17 bp, Arabidopsis thaliana
atttcacaaagtcggac

SEQ ID NO: 59899 - DNA, 17 bp, Arabidopsis thaliana
atttcacaaagtcgggc

SEQ ID NO: 59900 - DNA, 17 bp, Arabidopsis thaliana
atttcacaaagtggctg

SEQ ID NO: 59901 - DNA, 17 bp, Arabidopsis thaliana
atttcacacgatccagc

SEQ ID NO: 59902 - DNA, 17 bp, Arabidopsis thaliana
atttcaccagtggtcta

SEQ ID NO: 59903 - DNA, 17 bp, Arabidopsis thaliana
atttcacccaactggat

SEQ ID NO: 59904 - DNA, 17 bp, Arabidopsis thaliana
atttcacccgtggtata

SEQ ID NO: 59905 - DNA, 17 bp, Arabidopsis thaliana
atttcaccgaacgggat

SEQ ID NO: 59906 - DNA, 17 bp, Arabidopsis thaliana
atttcaccgacaacttc

SEQ ID NO: 59907 - DNA, 17 bp, Arabidopsis thaliana
atttcaccggcgagtta

SEQ ID NO: 59908 - DNA, 17 bp, Arabidopsis thaliana
atttcacgaccaaacgc

SEQ ID NO: 59909 - DNA, 17 bp, Arabidopsis thaliana
atttcacgagttcacgg

SEQ ID NO: 59910 - DNA, 17 bp, Arabidopsis thaliana
atttcacgggacggggt

SEQ ID NO: 59911 - DNA, 17 bp, Arabidopsis thaliana
atttcacgtgttccaga

SEQ ID NO: 59912 - DNA, 17 bp, Arabidopsis thaliana
atttcacgttgacgcga

SEQ ID NO: 59913 - DNA, 17 bp, Arabidopsis thaliana
atttcactccaacgcac

SEQ ID NO: 59914 - DNA, 17 bp, Arabidopsis thaliana
atttcactcgtagattg

SEQ ID NO: 59915 - DNA, 17 bp, Arabidopsis thaliana
atttcactgaacggggt

SEQ ID NO: 59916 - DNA, 17 bp, Arabidopsis thaliana
atttcactgcggaggat

SEQ ID NO: 59917 - DNA, 17 bp, Arabidopsis thaliana
atttcactggaagggat

SEQ ID NO: 59918 - DNA, 17 bp, Arabidopsis thaliana
atttcactgtccaaaaa

SEQ ID NO: 59919 - DNA, 17 bp, Arabidopsis thaliana
atttcactgtccatcta

SEQ ID NO: 59920 - DNA, 17 bp, Arabidopsis thaliana
atttcactgtccatctg

SEQ ID NO: 59921 - DNA, 17 bp, Arabidopsis thaliana
atttcactgtgcaggat

SEQ ID NO: 59922 - DNA, 17 bp, Arabidopsis thaliana
atttcacttcatttttt

SEQ ID NO: 59923 - DNA, 17 bp, Arabidopsis thaliana
atttcacttgcgccgaa

SEQ ID NO: 59924 - DNA, 17 bp, Arabidopsis thaliana
atttcacttgggctcac

SEQ ID NO: 59925 - DNA, 17 bp, Arabidopsis thaliana
atttcacttgggcttac

SEQ ID NO: 59926 - DNA, 17 bp, Arabidopsis thaliana
atttcacttgtcacggt

SEQ ID NO: 59927 - DNA, 17 bp, Arabidopsis thaliana
atttcagaagtgactct

SEQ ID NO: 59928 - DNA, 17 bp, Arabidopsis thaliana
atttcagaatgagtgac

SEQ ID NO: 59929 - DNA, 17 bp, Arabidopsis thaliana
atttcagacatcggccc

SEQ ID NO: 59930 - DNA, 17 bp, Arabidopsis thaliana
atttcagactatgttcc

SEQ ID NO: 59931 - DNA, 17 bp, Arabidopsis thaliana
atttcagagaccaaaaa

SEQ ID NO: 59932 - DNA, 17 bp, Arabidopsis thaliana
atttcagagtggacttc

SEQ ID NO: 59933 - DNA, 17 bp, Arabidopsis thaliana
atttcagatccttggga

SEQ ID NO: 59934 - DNA, 17 bp, Arabidopsis thaliana
atttcagattctttggc

SEQ ID NO: 59935 - DNA, 17 bp, Arabidopsis thaliana
atttcagattttacgat

SEQ ID NO: 59936 - DNA, 17 bp, Arabidopsis thaliana
atttcagattttgacac

SEQ ID NO: 59937 - DNA, 17 bp, Arabidopsis thaliana
atttcagattttgacat

SEQ ID NO: 59938 - DNA, 17 bp, Arabidopsis thaliana
atttcagattttgagac

SEQ ID NO: 59939 - DNA, 17 bp, Arabidopsis thaliana
atttcagcaaggacgag

SEQ ID NO: 59940 - DNA, 17 bp, Arabidopsis thaliana
atttcagccaaattttt

SEQ ID NO: 59941 - DNA, 17 bp, Arabidopsis thaliana
atttcagcgaccaaaaa

SEQ ID NO: 59942 - DNA, 17 bp, Arabidopsis thaliana
atttcagctaccgactt

SEQ ID NO: 59943 - DNA, 17 bp, Arabidopsis thaliana
atttcagctaccgattt

SEQ ID NO: 59944 - DNA, 17 bp, Arabidopsis thaliana
atttcagggcctttgtc

SEQ ID NO: 59945 - DNA, 17 bp, Arabidopsis thaliana
atttcaggtctattttg

SEQ ID NO: 59946 - DNA, 17 bp, Arabidopsis thaliana
atttcaggttggtacga

SEQ ID NO: 59947 - DNA, 17 bp, Arabidopsis thaliana
atttcagtagagcgtat

SEQ ID NO: 59948 - DNA, 17 bp, Arabidopsis thaliana
atttcagtctatttttt

SEQ ID NO: 59949 - DNA, 17 bp, Arabidopsis thaliana
atttcagtgcatttcca

SEQ ID NO: 59950 - DNA, 17 bp, Arabidopsis thaliana
atttcagtgcatttcta

SEQ ID NO: 59951 - DNA, 17 bp, Arabidopsis thaliana
atttcagtgcggtacag

SEQ ID NO: 59952 - DNA, 17 bp, Arabidopsis thaliana
atttcagtgtcactaga

SEQ ID NO: 59953 - DNA, 17 bp, Arabidopsis thaliana
atttcagtgtggctgag

SEQ ID NO: 59954 - DNA, 17 bp, Arabidopsis thaliana
atttcagtgtgtttctg

SEQ ID NO: 59955 - DNA, 17 bp, Arabidopsis thaliana
atttcagttgttgtagt

SEQ ID NO: 59956 - DNA, 17 bp, Arabidopsis thaliana
atttcagttgttgtatt

SEQ ID NO: 59957 - DNA, 17 bp, Arabidopsis thaliana
atttcagtttcgatgat

SEQ ID NO: 59958 - DNA, 17 bp, Arabidopsis thaliana
atttcagttttgaccag

SEQ ID NO: 59959 - DNA, 17 bp, Arabidopsis thaliana
atttcatacagcgtggg

SEQ ID NO: 59960 - DNA, 17 bp, Arabidopsis thaliana
atttcatacgctgatca

SEQ ID NO: 59961 - DNA, 17 bp, Arabidopsis thaliana
atttcataggattgtgc

SEQ ID NO: 59962 - DNA, 17 bp, Arabidopsis thaliana
atttcataggccatgtt

SEQ ID NO: 59963 - DNA, 17 bp, Arabidopsis thaliana
atttcatagttttgtcg

SEQ ID NO: 59964 - DNA, 17 bp, Arabidopsis thaliana
atttcatccatccatca

SEQ ID NO: 59965 - DNA, 17 bp, Arabidopsis thaliana
atttcatccgcactata

SEQ ID NO: 59966 - DNA, 17 bp, Arabidopsis thaliana
atttcatcctctagcat

SEQ ID NO: 59967 - DNA, 17 bp, Arabidopsis thaliana
atttcatcgactggacg

SEQ ID NO: 59968 - DNA, 17 bp, Arabidopsis thaliana
atttcatcgattggacg

SEQ ID NO: 59969 - DNA, 17 bp, Arabidopsis thaliana
atttcatcgtcgtgttt

SEQ ID NO: 59970 - DNA, 17 bp, Arabidopsis thaliana
atttcatcgtgatgggg

SEQ ID NO: 59971 - DNA, 17 bp, Arabidopsis thaliana
atttcatctacaccgtc

SEQ ID NO: 59972 - DNA, 17 bp, Arabidopsis thaliana
atttcatctcaggcgtc

SEQ ID NO: 59973 - DNA, 17 bp, Arabidopsis thaliana
atttcatctcaggcttt

SEQ ID NO: 59974 - DNA, 17 bp, Arabidopsis thaliana
atttcatctgatgacgt

SEQ ID NO: 59975 - DNA, 17 bp, Arabidopsis thaliana
atttcatctgcagcttc

SEQ ID NO: 59976 - DNA, 17 bp, Arabidopsis thaliana
atttcatctgttgtcgt

SEQ ID NO: 59977 - DNA, 17 bp, Arabidopsis thaliana
atttcatcttagtggga

SEQ ID NO: 59978 - DNA, 17 bp, Arabidopsis thaliana
atttcatcttgatggga

SEQ ID NO: 59979 - DNA, 17 bp, Arabidopsis thaliana
atttcatgtcggcaaga

SEQ ID NO: 59980 - DNA, 17 bp, Arabidopsis thaliana
atttcatgttgtggttt

SEQ ID NO: 59981 - DNA, 17 bp, Arabidopsis thaliana
atttcattagtttcctc

SEQ ID NO: 59982 - DNA, 17 bp, Arabidopsis thaliana
atttcattgaacggaat

SEQ ID NO: 59983 - DNA, 17 bp, Arabidopsis thaliana
atttcattgctcagatc

SEQ ID NO: 59984 - DNA, 17 bp, Arabidopsis thaliana
atttcattgtgcggttc

SEQ ID NO: 59985 - DNA, 17 bp, Arabidopsis thaliana
atttcatttagattttt

SEQ ID NO: 59986 - DNA, 17 bp, Arabidopsis thaliana
atttcatttgcaccgta

SEQ ID NO: 59987 - DNA, 17 bp, Arabidopsis thaliana
atttccaaaactttgca

SEQ ID NO: 59988 - DNA, 17 bp, Arabidopsis thaliana
atttccaaacccttgca

SEQ ID NO: 59989 - DNA, 17 bp, Arabidopsis thaliana
atttccaaagaaggccc

SEQ ID NO: 59990 - DNA, 17 bp, Arabidopsis thaliana
atttccaacaagctgaa

SEQ ID NO: 59991 - DNA, 17 bp, Arabidopsis thaliana
atttccaacatggtatc

SEQ ID NO: 59992 - DNA, 17 bp, Arabidopsis thaliana
atttccaacctggtgag

SEQ ID NO: 59993 - DNA, 17 bp, Arabidopsis thaliana
atttccaacgaaactcc

SEQ ID NO: 59994 - DNA, 17 bp, Arabidopsis thaliana
atttccaacggcaagag

SEQ ID NO: 59995 - DNA, 17 bp, Arabidopsis thaliana
atttccaagactctttg

SEQ ID NO: 59996 - DNA, 17 bp, Arabidopsis thaliana
atttccaatcgaagttt

SEQ ID NO: 59997 - DNA, 17 bp, Arabidopsis thaliana
atttccacaagcgatct

SEQ ID NO: 59998 - DNA, 17 bp, Arabidopsis thaliana
atttccacatgcacagt

SEQ ID NO: 59999 - DNA, 17 bp, Arabidopsis thaliana
atttccaccgtcggagg

SEQ ID NO: 60000 - DNA, 17 bp, Arabidopsis thaliana
atttccacctaccacca

SEQ ID NO: 60001 - DNA, 17 bp, Arabidopsis thaliana
atttccactgcagtcga

SEQ ID NO: 60002 - DNA, 17 bp, Arabidopsis thaliana
atttccactgcagttga

SEQ ID NO: 60003 - DNA, 17 bp, Arabidopsis thaliana
atttccacttatcctcc

SEQ ID NO: 60004 - DNA, 17 bp, Arabidopsis thaliana
atttccacttatcctcg

SEQ ID NO: 60005 - DNA, 17 bp, Arabidopsis thaliana
atttccagccgattgac

SEQ ID NO: 60006 - DNA, 17 bp, Arabidopsis thaliana
atttccaggtctgttga

SEQ ID NO: 60007 - DNA, 17 bp, Arabidopsis thaliana
atttccaggtttttccc

SEQ ID NO: 60008 - DNA, 17 bp, Arabidopsis thaliana
atttccagtgaaggttt

SEQ ID NO: 60009 - DNA, 17 bp, Arabidopsis thaliana
atttccatcaatggttt

SEQ ID NO: 60010 - DNA, 17 bp, Arabidopsis thaliana
atttccatcgtctggat

SEQ ID NO: 60011 - DNA, 17 bp, Arabidopsis thaliana
atttccatctgattgag

SEQ ID NO: 60012 - DNA, 17 bp, Arabidopsis thaliana
atttccatcttgcaggt

SEQ ID NO: 60013 - DNA, 17 bp, Arabidopsis thaliana
atttccatggattgtca

SEQ ID NO: 60014 - DNA, 17 bp, Arabidopsis thaliana
atttccattgacttttt

SEQ ID NO: 60015 - DNA, 17 bp, Arabidopsis thaliana
atttcccaagatcgccg

SEQ ID NO: 60016 - DNA, 17 bp, Arabidopsis thaliana
atttcccaccaaaattt

SEQ ID NO: 60017 - DNA, 17 bp, Arabidopsis thaliana
atttcccaggtttgtgt

SEQ ID NO: 60018 - DNA, 17 bp, Arabidopsis thaliana
atttcccattgttagaa

SEQ ID NO: 60019 - DNA, 17 bp, Arabidopsis thaliana
atttcccgagatctaca

SEQ ID NO: 60020 - DNA, 17 bp, Arabidopsis thaliana
atttcccgatcagagtc

SEQ ID NO: 60021 - DNA, 17 bp, Arabidopsis thaliana
atttcccgccaaaaacg

SEQ ID NO: 60022 - DNA, 17 bp, Arabidopsis thaliana
atttcccgccaaaattt

SEQ ID NO: 60023 - DNA, 17 bp, Arabidopsis thaliana
atttcccggctggcgca

SEQ ID NO: 60024 - DNA, 17 bp, Arabidopsis thaliana
atttcccggctggtgca

SEQ ID NO: 60025 - DNA, 17 bp, Arabidopsis thaliana
atttccctccaggagtc

SEQ ID NO: 60026 - DNA, 17 bp, Arabidopsis thaliana
atttccctcgtaaagcc

SEQ ID NO: 60027 - DNA, 17 bp, Arabidopsis thaliana
atttccctctgaagcca

SEQ ID NO: 60028 - DNA, 17 bp, Arabidopsis thaliana
atttcccttaaggtttc

SEQ ID NO: 60029 - DNA, 17 bp, Arabidopsis thaliana
atttccgaatctgtgga

SEQ ID NO: 60030 - DNA, 17 bp, Arabidopsis thaliana
atttccgacaagatact

SEQ ID NO: 60031 - DNA, 17 bp, Arabidopsis thaliana
atttccgacaggtacta

SEQ ID NO: 60032 - DNA, 17 bp, Arabidopsis thaliana
atttccgacggatttgc

SEQ ID NO: 60033 - DNA, 17 bp, Arabidopsis thaliana
atttccgacggcatggg

SEQ ID NO: 60034 - DNA, 17 bp, Arabidopsis thaliana
atttccgacggcgaaga

SEQ ID NO: 60035 - DNA, 17 bp, Arabidopsis thaliana
atttccgactatgttcc

SEQ ID NO: 60036 - DNA, 17 bp, Arabidopsis thaliana
atttccgagacctaaga

SEQ ID NO: 60037 - DNA, 17 bp, Arabidopsis thaliana
atttccgagatgttgga

SEQ ID NO: 60038 - DNA, 17 bp, Arabidopsis thaliana
atttccgagatgttggc

SEQ ID NO: 60039 - DNA, 17 bp, Arabidopsis thaliana
atttccgagatgttggg

SEQ ID NO: 60040 - DNA, 17 bp, Arabidopsis thaliana
atttccgatggctgcca

SEQ ID NO: 60041 - DNA, 17 bp, Arabidopsis thaliana
atttccgatgtgagacc

SEQ ID NO: 60042 - DNA, 17 bp, Arabidopsis thaliana
atttccgatgtgggacc

SEQ ID NO: 60043 - DNA, 17 bp, Arabidopsis thaliana
atttccgccaccacctc

SEQ ID NO: 60044 - DNA, 17 bp, Arabidopsis thaliana
atttccgcgagtttgtc

SEQ ID NO: 60045 - DNA, 17 bp, Arabidopsis thaliana
atttccgctgcgaatgt

SEQ ID NO: 60046 - DNA, 17 bp, Arabidopsis thaliana
atttccgcttgtgtttt

SEQ ID NO: 60047 - DNA, 17 bp, Arabidopsis thaliana
atttccggatttaggct

SEQ ID NO: 60048 - DNA, 17 bp, Arabidopsis thaliana
atttccggcactttttc

SEQ ID NO: 60049 - DNA, 17 bp, Arabidopsis thaliana
atttccggccaagaaaa

SEQ ID NO: 60050 - DNA, 17 bp, Arabidopsis thaliana
atttccggcccattctt

SEQ ID NO: 60051 - DNA, 17 bp, Arabidopsis thaliana
atttccggctcagacta

SEQ ID NO: 60052 - DNA, 17 bp, Arabidopsis thaliana
atttccggtcagattgt

SEQ ID NO: 60053 - DNA, 17 bp, Arabidopsis thaliana
atttccggtgcacagaa

SEQ ID NO: 60054 - DNA, 17 bp, Arabidopsis thaliana
atttccggtgccattat

SEQ ID NO: 60055 - DNA, 17 bp, Arabidopsis thaliana
atttccggtgctgttct

SEQ ID NO: 60056 - DNA, 17 bp, Arabidopsis thaliana
atttccggtggagcggt

SEQ ID NO: 60057 - DNA, 17 bp, Arabidopsis thaliana
atttccggttcggtttg

SEQ ID NO: 60058 - DNA, 17 bp, Arabidopsis thaliana
atttccgtactaagttg

SEQ ID NO: 60059 - DNA, 17 bp, Arabidopsis thaliana
atttccgtactacggct

SEQ ID NO: 60060 - DNA, 17 bp, Arabidopsis thaliana
atttccgtagtcggcaa

SEQ ID NO: 60061 - DNA, 17 bp, Arabidopsis thaliana
atttccgtcacttgatg

SEQ ID NO: 60062 - DNA, 17 bp, Arabidopsis thaliana
atttccgtcattggtga

SEQ ID NO: 60063 - DNA, 17 bp, Arabidopsis thaliana
atttccgtggttaggca

SEQ ID NO: 60064 - DNA, 17 bp, Arabidopsis thaliana
atttccgtgtttaggca

SEQ ID NO: 60065 - DNA, 17 bp, Arabidopsis thaliana
atttccgttaacggggt

SEQ ID NO: 60066 - DNA, 17 bp, Arabidopsis thaliana
atttcctaagatccaat

SEQ ID NO: 60067 - DNA, 17 bp, Arabidopsis thaliana
atttcctacggtgtctc

SEQ ID NO: 60068 - DNA, 17 bp, Arabidopsis thaliana
atttcctcagattctcg

SEQ ID NO: 60069 - DNA, 17 bp, Arabidopsis thaliana
atttcctccaatcatgg

SEQ ID NO: 60070 - DNA, 17 bp, Arabidopsis thaliana
atttcctcgccaggtgg

SEQ ID NO: 60071 - DNA, 17 bp, Arabidopsis thaliana
atttcctcgctaagtct

SEQ ID NO: 60072 - DNA, 17 bp, Arabidopsis thaliana
atttcctcgtgttgcat

SEQ ID NO: 60073 - DNA, 17 bp, Arabidopsis thaliana
atttcctctcgctcttc

SEQ ID NO: 60074 - DNA, 17 bp, Arabidopsis thaliana
atttcctctgcattgat

SEQ ID NO: 60075 - DNA, 17 bp, Arabidopsis thaliana
atttcctctgcattgct

SEQ ID NO: 60076 - DNA, 17 bp, Arabidopsis thaliana
atttcctctgcattggt

SEQ ID NO: 60077 - DNA, 17 bp, Arabidopsis thaliana
atttcctctttgagctc

SEQ ID NO: 60078 - DNA, 17 bp, Arabidopsis thaliana
atttcctgactggtcgc

SEQ ID NO: 60079 - DNA, 17 bp, Arabidopsis thaliana
atttcctgatatgtggg

SEQ ID NO: 60080 - DNA, 17 bp, Arabidopsis thaliana
atttcctgcaaactttg

SEQ ID NO: 60081 - DNA, 17 bp, Arabidopsis thaliana
atttcctggatccgtca

SEQ ID NO: 60082 - DNA, 17 bp, Arabidopsis thaliana
atttcctggctggtgca

SEQ ID NO: 60083 - DNA, 17 bp, Arabidopsis thaliana
atttcctggtgtatccg

SEQ ID NO: 60084 - DNA, 17 bp, Arabidopsis thaliana
atttcctggtgttttca

SEQ ID NO: 60085 - DNA, 17 bp, Arabidopsis thaliana
atttccttaccaaattg

SEQ ID NO: 60086 - DNA, 17 bp, Arabidopsis thaliana
atttccttcaatctaaa

SEQ ID NO: 60087 - DNA, 17 bp, Arabidopsis thaliana
atttccttgggtgacct

SEQ ID NO: 60088 - DNA, 17 bp, Arabidopsis thaliana
atttccttggttcatga

SEQ ID NO: 60089 - DNA, 17 bp, Arabidopsis thaliana
atttcctttctcaggcg

SEQ ID NO: 60090 - DNA, 17 bp, Arabidopsis thaliana
atttcctttgccgtcaa

SEQ ID NO: 60091 - DNA, 17 bp, Arabidopsis thaliana
atttcgaaacgcggttc

SEQ ID NO: 60092 - DNA, 17 bp, Arabidopsis thaliana
atttcgaaccctctctt

SEQ ID NO: 60093 - DNA, 17 bp, Arabidopsis thaliana
atttcgaacggtccaaa

SEQ ID NO: 60094 - DNA, 17 bp, Arabidopsis thaliana
atttcgaactcggttga

SEQ ID NO: 60095 - DNA, 17 bp, Arabidopsis thaliana
atttcgaaggtttgcag

SEQ ID NO: 60096 - DNA, 17 bp, Arabidopsis thaliana
atttcgaccttctcctt

SEQ ID NO: 60097 - DNA, 17 bp, Arabidopsis thaliana
atttcgagttttggcgg

SEQ ID NO: 60098 - DNA, 17 bp, Arabidopsis thaliana
atttcgatcctattgtg

SEQ ID NO: 60099 - DNA, 17 bp, Arabidopsis thaliana
atttcgattatgtgagt

SEQ ID NO: 60100 - DNA, 17 bp, Arabidopsis thaliana
atttcgattctcagctt

SEQ ID NO: 60101 - DNA, 17 bp, Arabidopsis thaliana
atttcgattctcagttt

SEQ ID NO: 60102 - DNA, 17 bp, Arabidopsis thaliana
atttcgcacaagaagtt

SEQ ID NO: 60103 - DNA, 17 bp, Arabidopsis thaliana
atttcgcagataccaga

SEQ ID NO: 60104 - DNA, 17 bp, Arabidopsis thaliana
atttcgcatatgccaca

SEQ ID NO: 60105 - DNA, 17 bp, Arabidopsis thaliana
atttcgccggagtcgtc

SEQ ID NO: 60106 - DNA, 17 bp, Arabidopsis thaliana
atttcgcctaaagctgt

SEQ ID NO: 60107 - DNA, 17 bp, Arabidopsis thaliana
atttcgcctcaagcttt

SEQ ID NO: 60108 - DNA, 17 bp, Arabidopsis thaliana
atttcgcctgtgagaaa

SEQ ID NO: 60109 - DNA, 17 bp, Arabidopsis thaliana
atttcgccttaggggat

SEQ ID NO: 60110 - DNA, 17 bp, Arabidopsis thaliana
atttcgcgggtgcaccg

SEQ ID NO: 60111 - DNA, 17 bp, Arabidopsis thaliana
atttcgcggtcgaacta

SEQ ID NO: 60112 - DNA, 17 bp, Arabidopsis thaliana
atttcgcgttatctctg

SEQ ID NO: 60113 - DNA, 17 bp, Arabidopsis thaliana
atttcgctacggttact

SEQ ID NO: 60114 - DNA, 17 bp, Arabidopsis thaliana
atttcgctgaaccgggt

SEQ ID NO: 60115 - DNA, 17 bp, Arabidopsis thaliana
atttcggaaacatctgt

SEQ ID NO: 60116 - DNA, 17 bp, Arabidopsis thaliana
atttcggattagcggat

SEQ ID NO: 60117 - DNA, 17 bp, Arabidopsis thaliana
atttcggcccagaacct

SEQ ID NO: 60118 - DNA, 17 bp, Arabidopsis thaliana
atttcggctccagacgc

SEQ ID NO: 60119 - DNA, 17 bp, Arabidopsis thaliana
atttcggctcggtttta

SEQ ID NO: 60120 - DNA, 17 bp, Arabidopsis thaliana
atttcgggtttgagtgg

SEQ ID NO: 60121 - DNA, 17 bp, Arabidopsis thaliana
atttcggtccagatgtc

SEQ ID NO: 60122 - DNA, 17 bp, Arabidopsis thaliana
atttcggtgaaatctaa

SEQ ID NO: 60123 - DNA, 17 bp, Arabidopsis thaliana
atttcggtgcatttcta

SEQ ID NO: 60124 - DNA, 17 bp, Arabidopsis thaliana
atttcggtgcgtttcta

SEQ ID NO: 60125 - DNA, 17 bp, Arabidopsis thaliana
atttcggtgcgtttctg

SEQ ID NO: 60126 - DNA, 17 bp, Arabidopsis thaliana
atttcggtgtgttccta

SEQ ID NO: 60127 - DNA, 17 bp, Arabidopsis thaliana
atttcggtgtgttttta

SEQ ID NO: 60128 - DNA, 17 bp, Arabidopsis thaliana
atttcggttccgattgg

SEQ ID NO: 60129 - DNA, 17 bp, Arabidopsis thaliana
atttcggttcgggtcta

SEQ ID NO: 60130 - DNA, 17 bp, Arabidopsis thaliana
atttcggttcgggttca

SEQ ID NO: 60131 - DNA, 17 bp, Arabidopsis thaliana
atttcggttcggttcaa

SEQ ID NO: 60132 - DNA, 17 bp, Arabidopsis thaliana
atttcggttctccgttt

SEQ ID NO: 60133 - DNA, 17 bp, Arabidopsis thaliana
atttcggttgaggttgt

SEQ ID NO: 60134 - DNA, 17 bp, Arabidopsis thaliana
atttcgtaacagtttac

SEQ ID NO: 60135 - DNA, 17 bp, Arabidopsis thaliana
atttcgtacccactcgc

SEQ ID NO: 60136 - DNA, 17 bp, Arabidopsis thaliana
atttcgtaggagaccgt

SEQ ID NO: 60137 - DNA, 17 bp, Arabidopsis thaliana
atttcgtagttgaacct

SEQ ID NO: 60138 - DNA, 17 bp, Arabidopsis thaliana
atttcgtatctaggtat

SEQ ID NO: 60139 - DNA, 17 bp, Arabidopsis thaliana
atttcgtattatctttt

SEQ ID NO: 60140 - DNA, 17 bp, Arabidopsis thaliana
atttcgtccactgaatt

SEQ ID NO: 60141 - DNA, 17 bp, Arabidopsis thaliana
atttcgtccattcttgg

SEQ ID NO: 60142 - DNA, 17 bp, Arabidopsis thaliana
atttcgtcgcattgtca

SEQ ID NO: 60143 - DNA, 17 bp, Arabidopsis thaliana
atttcgtcggagggctg

SEQ ID NO: 60144 - DNA, 17 bp, Arabidopsis thaliana
atttcgtctccagattg

SEQ ID NO: 60145 - DNA, 17 bp, Arabidopsis thaliana
atttcgtctcgcggtga

SEQ ID NO: 60146 - DNA, 17 bp, Arabidopsis thaliana
atttcgtgcccgagttt

SEQ ID NO: 60147 - DNA, 17 bp, Arabidopsis thaliana
atttcgtgccggttgag

SEQ ID NO: 60148 - DNA, 17 bp, Arabidopsis thaliana
atttcgtgcgcaagacg

SEQ ID NO: 60149 - DNA, 17 bp, Arabidopsis thaliana
atttcgtggacaaaatt

SEQ ID NO: 60150 - DNA, 17 bp, Arabidopsis thaliana
atttcgtggccgtagaa

SEQ ID NO: 60151 - DNA, 17 bp, Arabidopsis thaliana
atttcgtggctgttaag

SEQ ID NO: 60152 - DNA, 17 bp, Arabidopsis thaliana
atttcgttcctgggcag

SEQ ID NO: 60153 - DNA, 17 bp, Arabidopsis thaliana
atttcgttcggagatga

SEQ ID NO: 60154 - DNA, 17 bp, Arabidopsis thaliana
atttcgttcgtcggctt

SEQ ID NO: 60155 - DNA, 17 bp, Arabidopsis thaliana
atttcgtttcgccttaa

SEQ ID NO: 60156 - DNA, 17 bp, Arabidopsis thaliana
atttcgtttcgcttctg

SEQ ID NO: 60157 - DNA, 17 bp, Arabidopsis thaliana
atttctaaaaccacaaa

SEQ ID NO: 60158 - DNA, 17 bp, Arabidopsis thaliana
atttctaaaccgaccga

SEQ ID NO: 60159 - DNA, 17 bp, Arabidopsis thaliana
atttctaaactgctggt

SEQ ID NO: 60160 - DNA, 17 bp, Arabidopsis thaliana
atttctaacctctgcgc

SEQ ID NO: 60161 - DNA, 17 bp, Arabidopsis thaliana
atttctaacgacacctt

SEQ ID NO: 60162 - DNA, 17 bp, Arabidopsis thaliana
atttctaacttcgccag

SEQ ID NO: 60163 - DNA, 17 bp, Arabidopsis thaliana
atttctaagatgttggt

SEQ ID NO: 60164 - DNA, 17 bp, Arabidopsis thaliana
atttctaagtcttgcag

SEQ ID NO: 60165 - DNA, 17 bp, Arabidopsis thaliana
atttctaatgacttcta

SEQ ID NO: 60166 - DNA, 17 bp, Arabidopsis thaliana
atttctaatgtggcaaa

SEQ ID NO: 60167 - DNA, 17 bp, Arabidopsis thaliana
atttctacagtttgggc

SEQ ID NO: 60168 - DNA, 17 bp, Arabidopsis thaliana
atttctaccgactcccg

SEQ ID NO: 60169 - DNA, 17 bp, Arabidopsis thaliana
atttctacgagcttgga

SEQ ID NO: 60170 - DNA, 17 bp, Arabidopsis thaliana
atttctactgggccgag

SEQ ID NO: 60171 - DNA, 17 bp, Arabidopsis thaliana
atttctacttgttgcgg

SEQ ID NO: 60172 - DNA, 17 bp, Arabidopsis thaliana
atttctagaaatgtttg

SEQ ID NO: 60173 - DNA, 17 bp, Arabidopsis thaliana
atttctagccacgttac

SEQ ID NO: 60174 - DNA, 17 bp, Arabidopsis thaliana
atttctagtttcgccat

SEQ ID NO: 60175 - DNA, 17 bp, Arabidopsis thaliana
atttctatcgaggataa

SEQ ID NO: 60176 - DNA, 17 bp, Arabidopsis thaliana
atttctatcgatcggca

SEQ ID NO: 60177 - DNA, 17 bp, Arabidopsis thaliana
atttctatgattgatgg

SEQ ID NO: 60178 - DNA, 17 bp, Arabidopsis thaliana
atttctattgttcgctt

SEQ ID NO: 60179 - DNA, 17 bp, Arabidopsis thaliana
atttctcaactttccga

SEQ ID NO: 60180 - DNA, 17 bp, Arabidopsis thaliana
atttctcacaatgacct

SEQ ID NO: 60181 - DNA, 17 bp, Arabidopsis thaliana
atttctcaggattggct

SEQ ID NO: 60182 - DNA, 17 bp, Arabidopsis thaliana
atttctcaggtttggtt

SEQ ID NO: 60183 - DNA, 17 bp, Arabidopsis thaliana
atttctcagtcccaccc

SEQ ID NO: 60184 - DNA, 17 bp, Arabidopsis thaliana
atttctcagttcgacgg

SEQ ID NO: 60185 - DNA, 17 bp, Arabidopsis thaliana
atttctcatcgtggtgg

SEQ ID NO: 60186 - DNA, 17 bp, Arabidopsis thaliana
atttctccagtttcttt

SEQ ID NO: 60187 - DNA, 17 bp, Arabidopsis thaliana
atttctcccgcacatac

SEQ ID NO: 60188 - DNA, 17 bp, Arabidopsis thaliana
atttctcccgcatgtac

SEQ ID NO: 60189 - DNA, 17 bp, Arabidopsis thaliana
atttctccctgaaacct

SEQ ID NO: 60190 - DNA, 17 bp, Arabidopsis thaliana
atttctccgaatgcccc

SEQ ID NO: 60191 - DNA, 17 bp, Arabidopsis thaliana
atttctccgagaagtat

SEQ ID NO: 60192 - DNA, 17 bp, Arabidopsis thaliana
atttctcctcatctttg

SEQ ID NO: 60193 - DNA, 17 bp, Arabidopsis thaliana
atttctccttcgatggc

SEQ ID NO: 60194 - DNA, 17 bp, Arabidopsis thaliana
atttctcgccaaaattt

SEQ ID NO: 60195 - DNA, 17 bp, Arabidopsis thaliana
atttctcggaacgcccc

SEQ ID NO: 60196 - DNA, 17 bp, Arabidopsis thaliana
atttctcggaatgcccc

SEQ ID NO: 60197 - DNA, 17 bp, Arabidopsis thaliana
atttctcggaatgctcc

SEQ ID NO: 60198 - DNA, 17 bp, Arabidopsis thaliana
atttctcgggtggaggt

SEQ ID NO: 60199 - DNA, 17 bp, Arabidopsis thaliana
atttctcggtagaacct

SEQ ID NO: 60200 - DNA, 17 bp, Arabidopsis thaliana
atttctcgtggagaaat

SEQ ID NO: 60201 - DNA, 17 bp, Arabidopsis thaliana
atttctcgttccagggc

SEQ ID NO: 60202 - DNA, 17 bp, Arabidopsis thaliana
atttctcgttttgatct

SEQ ID NO: 60203 - DNA, 17 bp, Arabidopsis thaliana
atttctctacccgtccc

SEQ ID NO: 60204 - DNA, 17 bp, Arabidopsis thaliana
atttctctacgctatgt

SEQ ID NO: 60205 - DNA, 17 bp, Arabidopsis thaliana
atttctctacgctctga

SEQ ID NO: 60206 - DNA, 17 bp, Arabidopsis thaliana
atttctctaggcctgaa

SEQ ID NO: 60207 - DNA, 17 bp, Arabidopsis thaliana
atttctctcaacgtgcc

SEQ ID NO: 60208 - DNA, 17 bp, Arabidopsis thaliana
atttctctcaagtgccg

SEQ ID NO: 60209 - DNA, 17 bp, Arabidopsis thaliana
atttctctcacctcgga

SEQ ID NO: 60210 - DNA, 17 bp, Arabidopsis thaliana
atttctctccaccgtcc

SEQ ID NO: 60211 - DNA, 17 bp, Arabidopsis thaliana
atttctctccttgtgga

SEQ ID NO: 60212 - DNA, 17 bp, Arabidopsis thaliana
atttctctcggaagctc

SEQ ID NO: 60213 - DNA, 17 bp, Arabidopsis thaliana
atttctcttcaaagaaa

SEQ ID NO: 60214 - DNA, 17 bp, Arabidopsis thaliana
atttctcttcgttgtat

SEQ ID NO: 60215 - DNA, 17 bp, Arabidopsis thaliana
atttctctttcagtgtt

SEQ ID NO: 60216 - DNA, 17 bp, Arabidopsis thaliana
atttctctttccgtcta

SEQ ID NO: 60217 - DNA, 17 bp, Arabidopsis thaliana
atttctcttttgcccaa

SEQ ID NO: 60218 - DNA, 17 bp, Arabidopsis thaliana
atttctgaaaaggtgtt

SEQ ID NO: 60219 - DNA, 17 bp, Arabidopsis thaliana
atttctgactaccagga

SEQ ID NO: 60220 - DNA, 17 bp, Arabidopsis thaliana
atttctgactaccaggt

SEQ ID NO: 60221 - DNA, 17 bp, Arabidopsis thaliana
atttctgagatgttggg

SEQ ID NO: 60222 - DNA, 17 bp, Arabidopsis thaliana
atttctgagtcttgcag

SEQ ID NO: 60223 - DNA, 17 bp, Arabidopsis thaliana
atttctgatgtggagat

SEQ ID NO: 60224 - DNA, 17 bp, Arabidopsis thaliana
atttctgattggctcat

SEQ ID NO: 60225 - DNA, 17 bp, Arabidopsis thaliana
atttctgattttgacac

SEQ ID NO: 60226 - DNA, 17 bp, Arabidopsis thaliana
atttctgcagtcaattg

SEQ ID NO: 60227 - DNA, 17 bp, Arabidopsis thaliana
atttctgcccagtgctc

SEQ ID NO: 60228 - DNA, 17 bp, Arabidopsis thaliana
atttctgcccagtgctt

SEQ ID NO: 60229 - DNA, 17 bp, Arabidopsis thaliana
atttctgccctatcaac

SEQ ID NO: 60230 - DNA, 17 bp, Arabidopsis thaliana
atttctgcctgggtgtc

SEQ ID NO: 60231 - DNA, 17 bp, Arabidopsis thaliana
atttctgcgaatttgat

SEQ ID NO: 60232 - DNA, 17 bp, Arabidopsis thaliana
atttctgcggatgtcgt

SEQ ID NO: 60233 - DNA, 17 bp, Arabidopsis thaliana
atttctgcggatgtctt

SEQ ID NO: 60234 - DNA, 17 bp, Arabidopsis thaliana
atttctgctaggactgc

SEQ ID NO: 60235 - DNA, 17 bp, Arabidopsis thaliana
atttctgctggactcga

SEQ ID NO: 60236 - DNA, 17 bp, Arabidopsis thaliana
atttctgcttcgatggc

SEQ ID NO: 60237 - DNA, 17 bp, Arabidopsis thaliana
atttctggaggataggc

SEQ ID NO: 60238 - DNA, 17 bp, Arabidopsis thaliana
atttctgggacatcttc

SEQ ID NO: 60239 - DNA, 17 bp, Arabidopsis thaliana
atttctgggatagcagc

SEQ ID NO: 60240 - DNA, 17 bp, Arabidopsis thaliana
atttctgggcttagttt

SEQ ID NO: 60241 - DNA, 17 bp, Arabidopsis thaliana
atttctggggtcatcca

SEQ ID NO: 60242 - DNA, 17 bp, Arabidopsis thaliana
atttctgggtctcgatt

SEQ ID NO: 60243 - DNA, 17 bp, Arabidopsis thaliana
atttctgggtttcggcg

SEQ ID NO: 60244 - DNA, 17 bp, Arabidopsis thaliana
atttctggtatggtccc

SEQ ID NO: 60245 - DNA, 17 bp, Arabidopsis thaliana
atttctggtgagttatt

SEQ ID NO: 60246 - DNA, 17 bp, Arabidopsis thaliana
atttctggtgtcctagg

SEQ ID NO: 60247 - DNA, 17 bp, Arabidopsis thaliana
atttctggtgtgtccgt

SEQ ID NO: 60248 - DNA, 17 bp, Arabidopsis thaliana
atttctgtcaattgccc

SEQ ID NO: 60249 - DNA, 17 bp, Arabidopsis thaliana
atttctgtcagcgccga

SEQ ID NO: 60250 - DNA, 17 bp, Arabidopsis thaliana
atttctgtcttggccaa

SEQ ID NO: 60251 - DNA, 17 bp, Arabidopsis thaliana
atttctgtgacagttga

SEQ ID NO: 60252 - DNA, 17 bp, Arabidopsis thaliana
atttctgtggattagcc

SEQ ID NO: 60253 - DNA, 17 bp, Arabidopsis thaliana
atttctgtggttgccac

SEQ ID NO: 60254 - DNA, 17 bp, Arabidopsis thaliana
atttctgttctcgttga

SEQ ID NO: 60255 - DNA, 17 bp, Arabidopsis thaliana
atttcttaggtccacgt

SEQ ID NO: 60256 - DNA, 17 bp, Arabidopsis thaliana
atttcttcaaccgttgc

SEQ ID NO: 60257 - DNA, 17 bp, Arabidopsis thaliana
atttcttcaggggctca

SEQ ID NO: 60258 - DNA, 17 bp, Arabidopsis thaliana
atttcttccgaagtcag

SEQ ID NO: 60259 - DNA, 17 bp, Arabidopsis thaliana
atttcttccgacaactt

SEQ ID NO: 60260 - DNA, 17 bp, Arabidopsis thaliana
atttcttccttattcgc

SEQ ID NO: 60261 - DNA, 17 bp, Arabidopsis thaliana
atttcttctaacttggc

SEQ ID NO: 60262 - DNA, 17 bp, Arabidopsis thaliana
atttcttctacgcagat

SEQ ID NO: 60263 - DNA, 17 bp, Arabidopsis thaliana
atttcttctctccggcg

SEQ ID NO: 60264 - DNA, 17 bp, Arabidopsis thaliana
atttcttggaatctccg

SEQ ID NO: 60265 - DNA, 17 bp, Arabidopsis thaliana
atttcttggatccgcca

SEQ ID NO: 60266 - DNA, 17 bp, Arabidopsis thaliana
atttcttggcgctctat

SEQ ID NO: 60267 - DNA, 17 bp, Arabidopsis thaliana
atttcttggtccaaaag

SEQ ID NO: 60268 - DNA, 17 bp, Arabidopsis thaliana
atttcttggttgtcggc

SEQ ID NO: 60269 - DNA, 17 bp, Arabidopsis thaliana
atttcttgtgccggcag

SEQ ID NO: 60270 - DNA, 17 bp, Arabidopsis thaliana
atttcttgtgtcgagat

SEQ ID NO: 60271 - DNA, 17 bp, Arabidopsis thaliana
atttctttacccgtccc

SEQ ID NO: 60272 - DNA, 17 bp, Arabidopsis thaliana
atttctttcgccacttg

SEQ ID NO: 60273 - DNA, 17 bp, Arabidopsis thaliana
atttctttcttcggatc

SEQ ID NO: 60274 - DNA, 17 bp, Arabidopsis thaliana
atttctttgctgagaaa

SEQ ID NO: 60275 - DNA, 17 bp, Arabidopsis thaliana
atttctttgctgagtaa

SEQ ID NO: 60276 - DNA, 17 bp, Arabidopsis thaliana
atttctttgttcgtcgg

SEQ ID NO: 60277 - DNA, 17 bp, Arabidopsis thaliana
atttctttgttgagttc

SEQ ID NO: 60278 - DNA, 17 bp, Arabidopsis thaliana
atttctttgttgtggcc

SEQ ID NO: 60279 - DNA, 17 bp, Arabidopsis thaliana
atttctttgttgtgtcc

SEQ ID NO: 60280 - DNA, 17 bp, Arabidopsis thaliana
atttcttttggtccgga

SEQ ID NO: 60281 - DNA, 17 bp, Arabidopsis thaliana
atttgaaacatcaacaa

SEQ ID NO: 60282 - DNA, 17 bp, Arabidopsis thaliana
atttgaaactagggact

SEQ ID NO: 60283 - DNA, 17 bp, Arabidopsis thaliana
atttgaaagttcggttc

SEQ ID NO: 60284 - DNA, 17 bp, Arabidopsis thaliana
atttgaaagtttgcgca

SEQ ID NO: 60285 - DNA, 17 bp, Arabidopsis thaliana
atttgaaagtttgtgct

SEQ ID NO: 60286 - DNA, 17 bp, Arabidopsis thaliana
atttgaacagggttttt

SEQ ID NO: 60287 - DNA, 17 bp, Arabidopsis thaliana
atttgaaccacaccgca

SEQ ID NO: 60288 - DNA, 17 bp, Arabidopsis thaliana
atttgaaccgcaccgca

SEQ ID NO: 60289 - DNA, 17 bp, Arabidopsis thaliana
atttgaaccgcaccgta

SEQ ID NO: 60290 - DNA, 17 bp, Arabidopsis thaliana
atttgaaccgcactgca

SEQ ID NO: 60291 - DNA, 17 bp, Arabidopsis thaliana
atttgaacgatgtcggg

SEQ ID NO: 60292 - DNA, 17 bp, Arabidopsis thaliana
atttgaacttgggatgg

SEQ ID NO: 60293 - DNA, 17 bp, Arabidopsis thaliana
atttgaagtttctcgag

SEQ ID NO: 60294 - DNA, 17 bp, Arabidopsis thaliana
atttgaatgctactgcg

SEQ ID NO: 60295 - DNA, 17 bp, Arabidopsis thaliana
atttgaatggttacgga

SEQ ID NO: 60296 - DNA, 17 bp, Arabidopsis thaliana
atttgaattcggatgat

SEQ ID NO: 60297 - DNA, 17 bp, Arabidopsis thaliana
atttgaattgacgatgt

SEQ ID NO: 60298 - DNA, 17 bp, Arabidopsis thaliana
atttgaattgtgttgac

SEQ ID NO: 60299 - DNA, 17 bp, Arabidopsis thaliana
atttgacaagggttcgc

SEQ ID NO: 60300 - DNA, 17 bp, Arabidopsis thaliana
atttgacacatgtccgg

SEQ ID NO: 60301 - DNA, 17 bp, Arabidopsis thaliana
atttgacagacggtgtt

SEQ ID NO: 60302 - DNA, 17 bp, Arabidopsis thaliana
atttgacagatccatac

SEQ ID NO: 60303 - DNA, 17 bp, Arabidopsis thaliana
atttgacagatccatcc

SEQ ID NO: 60304 - DNA, 17 bp, Arabidopsis thaliana
atttgacagctgttaag

SEQ ID NO: 60305 - DNA, 17 bp, Arabidopsis thaliana
atttgacatttatttgg

SEQ ID NO: 60306 - DNA, 17 bp, Arabidopsis thaliana
atttgaccactgtacag

SEQ ID NO: 60307 - DNA, 17 bp, Arabidopsis thaliana
atttgaccattttgccc

SEQ ID NO: 60308 - DNA, 17 bp, Arabidopsis thaliana
atttgaccattttgtcc

SEQ ID NO: 60309 - DNA, 17 bp, Arabidopsis thaliana
atttgaccgccaccatc

SEQ ID NO: 60310 - DNA, 17 bp, Arabidopsis thaliana
atttgaccgggttgaac

SEQ ID NO: 60311 - DNA, 17 bp, Arabidopsis thaliana
atttgaccgggttgaag

SEQ ID NO: 60312 - DNA, 17 bp, Arabidopsis thaliana
atttgacctcggctatg

SEQ ID NO: 60313 - DNA, 17 bp, Arabidopsis thaliana
atttgaccttgtgtcag

SEQ ID NO: 60314 - DNA, 17 bp, Arabidopsis thaliana
atttgacggtgctgtga

SEQ ID NO: 60315 - DNA, 17 bp, Arabidopsis thaliana
atttgactctcaaaaca

SEQ ID NO: 60316 - DNA, 17 bp, Arabidopsis thaliana
atttgactctcaaaact

SEQ ID NO: 60317 - DNA, 17 bp, Arabidopsis thaliana
atttgagactgcttgtt

SEQ ID NO: 60318 - DNA, 17 bp, Arabidopsis thaliana
atttgagatggcgtaaa

SEQ ID NO: 60319 - DNA, 17 bp, Arabidopsis thaliana
atttgagcattaggctc

SEQ ID NO: 60320 - DNA, 17 bp, Arabidopsis thaliana
atttgagcccagacatt

SEQ ID NO: 60321 - DNA, 17 bp, Arabidopsis thaliana
atttgagcccagccgag

SEQ ID NO: 60322 - DNA, 17 bp, Arabidopsis thaliana
atttgaggacaatggag

SEQ ID NO: 60323 - DNA, 17 bp, Arabidopsis thaliana
atttgaggctcgtcgag

SEQ ID NO: 60324 - DNA, 17 bp, Arabidopsis thaliana
atttgaggggacctcca

SEQ ID NO: 60325 - DNA, 17 bp, Arabidopsis thaliana
atttgagtcaaacttgg

SEQ ID NO: 60326 - DNA, 17 bp, Arabidopsis thaliana
atttgagtctggcagtg

SEQ ID NO: 60327 - DNA, 17 bp, Arabidopsis thaliana
atttgagtgacgcttgg

SEQ ID NO: 60328 - DNA, 17 bp, Arabidopsis thaliana
atttgagttttcacgtg

SEQ ID NO: 60329 - DNA, 17 bp, Arabidopsis thaliana
atttgataacgagaccg

SEQ ID NO: 60330 - DNA, 17 bp, Arabidopsis thaliana
atttgatataaaccgca

SEQ ID NO: 60331 - DNA, 17 bp, Arabidopsis thaliana
atttgatatgcgttcgg

SEQ ID NO: 60332 - DNA, 17 bp, Arabidopsis thaliana
atttgatccatcctctt

SEQ ID NO: 60333 - DNA, 17 bp, Arabidopsis thaliana
atttgatcccttaccgt

SEQ ID NO: 60334 - DNA, 17 bp, Arabidopsis thaliana
atttgatccttagacgc

SEQ ID NO: 60335 - DNA, 17 bp, Arabidopsis thaliana
atttgatccttctatgt

SEQ ID NO: 60336 - DNA, 17 bp, Arabidopsis thaliana
atttgatccttttgccc

SEQ ID NO: 60337 - DNA, 17 bp, Arabidopsis thaliana
atttgatctcagtctgg

SEQ ID NO: 60338 - DNA, 17 bp, Arabidopsis thaliana
atttgatcttaacccga

SEQ ID NO: 60339 - DNA, 17 bp, Arabidopsis thaliana
atttgatgatcgcacca

SEQ ID NO: 60340 - DNA, 17 bp, Arabidopsis thaliana
atttgatgatcgcttca

SEQ ID NO: 60341 - DNA, 17 bp, Arabidopsis thaliana
atttgatgatggatccc

SEQ ID NO: 60342 - DNA, 17 bp, Arabidopsis thaliana
atttgatgatggatctc

SEQ ID NO: 60343 - DNA, 17 bp, Arabidopsis thaliana
atttgatgtccctcgaa

SEQ ID NO: 60344 - DNA, 17 bp, Arabidopsis thaliana
atttgatgttagataac

SEQ ID NO: 60345 - DNA, 17 bp, Arabidopsis thaliana
atttgatgtttgtccaa

SEQ ID NO: 60346 - DNA, 17 bp, Arabidopsis thaliana
atttgatgtttgtcgaa

SEQ ID NO: 60347 - DNA, 17 bp, Arabidopsis thaliana
atttgattatgagttga

SEQ ID NO: 60348 - DNA, 17 bp, Arabidopsis thaliana
atttgattcgtatgccg

SEQ ID NO: 60349 - DNA, 17 bp, Arabidopsis thaliana
atttgattgtgcgtttg

SEQ ID NO: 60350 - DNA, 17 bp, Arabidopsis thaliana
atttgatttagattttt

SEQ ID NO: 60351 - DNA, 17 bp, Arabidopsis thaliana
atttgatttcgcttttc

SEQ ID NO: 60352 - DNA, 17 bp, Arabidopsis thaliana
atttgatttgtgttgtt

SEQ ID NO: 60353 - DNA, 17 bp, Arabidopsis thaliana
atttgcaagcgccttgg

SEQ ID NO: 60354 - DNA, 17 bp, Arabidopsis thaliana
atttgcagaatcggtac

SEQ ID NO: 60355 - DNA, 17 bp, Arabidopsis thaliana
atttgcagatatccgct

SEQ ID NO: 60356 - DNA, 17 bp, Arabidopsis thaliana
atttgcattttcgtgtg

SEQ ID NO: 60357 - DNA, 17 bp, Arabidopsis thaliana
atttgccaacttgggtt

SEQ ID NO: 60358 - DNA, 17 bp, Arabidopsis thaliana
atttgccaagaccgcta

SEQ ID NO: 60359 - DNA, 17 bp, Arabidopsis thaliana
atttgccaagccgtttc

SEQ ID NO: 60360 - DNA, 17 bp, Arabidopsis thaliana
atttgccaaggatgttt

SEQ ID NO: 60361 - DNA, 17 bp, Arabidopsis thaliana
atttgccacgttggctt

SEQ ID NO: 60362 - DNA, 17 bp, Arabidopsis thaliana
atttgccaggtgtcgca

SEQ ID NO: 60363 - DNA, 17 bp, Arabidopsis thaliana
atttgccatgggtccca

SEQ ID NO: 60364 - DNA, 17 bp, Arabidopsis thaliana
atttgccatggttcaaa

SEQ ID NO: 60365 - DNA, 17 bp, Arabidopsis thaliana
atttgccatgtcgagtt

SEQ ID NO: 60366 - DNA, 17 bp, Arabidopsis thaliana
atttgccattagatcgc

SEQ ID NO: 60367 - DNA, 17 bp, Arabidopsis thaliana
atttgccatttcctggg

SEQ ID NO: 60368 - DNA, 17 bp, Arabidopsis thaliana
atttgccattttcttgc

SEQ ID NO: 60369 - DNA, 17 bp, Arabidopsis thaliana
atttgcccactggtgaa

SEQ ID NO: 60370 - DNA, 17 bp, Arabidopsis thaliana
atttgccccatggtgta

SEQ ID NO: 60371 - DNA, 17 bp, Arabidopsis thaliana
atttgccgacgtgtaca

SEQ ID NO: 60372 - DNA, 17 bp, Arabidopsis thaliana
atttgccgatagcgaga

SEQ ID NO: 60373 - DNA, 17 bp, Arabidopsis thaliana
atttgccgccaggatta

SEQ ID NO: 60374 - DNA, 17 bp, Arabidopsis thaliana
atttgccgctggatgtt

SEQ ID NO: 60375 - DNA, 17 bp, Arabidopsis thaliana
atttgccgtggctccca

SEQ ID NO: 60376 - DNA, 17 bp, Arabidopsis thaliana
atttgccgtgggtccca

SEQ ID NO: 60377 - DNA, 17 bp, Arabidopsis thaliana
atttgcctaaattttta

SEQ ID NO: 60378 - DNA, 17 bp, Arabidopsis thaliana
atttgcctcgctaacag

SEQ ID NO: 60379 - DNA, 17 bp, Arabidopsis thaliana
atttgcctctgaatctg

SEQ ID NO: 60380 - DNA, 17 bp, Arabidopsis thaliana
atttgcctgtcgctgac

SEQ ID NO: 60381 - DNA, 17 bp, Arabidopsis thaliana
atttgcgacgtatctgc

SEQ ID NO: 60382 - DNA, 17 bp, Arabidopsis thaliana
atttgcgagggatttac

SEQ ID NO: 60383 - DNA, 17 bp, Arabidopsis thaliana
atttgcgagggatttgc

SEQ ID NO: 60384 - DNA, 17 bp, Arabidopsis thaliana
atttgcgatagaactag

SEQ ID NO: 60385 - DNA, 17 bp, Arabidopsis thaliana
atttgcgatcataccag

SEQ ID NO: 60386 - DNA, 17 bp, Arabidopsis thaliana
atttgcgatgaatgtcc

SEQ ID NO: 60387 - DNA, 17 bp, Arabidopsis thaliana
atttgcgcagatgtgag

SEQ ID NO: 60388 - DNA, 17 bp, Arabidopsis thaliana
atttgcgcagatgtgcc

SEQ ID NO: 60389 - DNA, 17 bp, Arabidopsis thaliana
atttgcgcgcctgctgc

SEQ ID NO: 60390 - DNA, 17 bp, Arabidopsis thaliana
atttgcgctatatgacg

SEQ ID NO: 60391 - DNA, 17 bp, Arabidopsis thaliana
atttgcggatatccact

SEQ ID NO: 60392 - DNA, 17 bp, Arabidopsis thaliana
atttgcggatgactcac

SEQ ID NO: 60393 - DNA, 17 bp, Arabidopsis thaliana
atttgcggctgcggtta

SEQ ID NO: 60394 - DNA, 17 bp, Arabidopsis thaliana
atttgcgggacaagtat

SEQ ID NO: 60395 - DNA, 17 bp, Arabidopsis thaliana
atttgcgggacaagtgc

SEQ ID NO: 60396 - DNA, 17 bp, Arabidopsis thaliana
atttgcgggataagtac

SEQ ID NO: 60397 - DNA, 17 bp, Arabidopsis thaliana
atttgcgggataagtgc

SEQ ID NO: 60398 - DNA, 17 bp, Arabidopsis thaliana
atttgcgggctaacgtc

SEQ ID NO: 60399 - DNA, 17 bp, Arabidopsis thaliana
atttgcgggggatttac

SEQ ID NO: 60400 - DNA, 17 bp, Arabidopsis thaliana
atttgcgggttcagatt

SEQ ID NO: 60401 - DNA, 17 bp, Arabidopsis thaliana
atttgcgggtttacgat

SEQ ID NO: 60402 - DNA, 17 bp, Arabidopsis thaliana
atttgcggttcgactcg

SEQ ID NO: 60403 - DNA, 17 bp, Arabidopsis thaliana
atttgcggttgcgggcg

SEQ ID NO: 60404 - DNA, 17 bp, Arabidopsis thaliana
atttgcgtccagaggat

SEQ ID NO: 60405 - DNA, 17 bp, Arabidopsis thaliana
atttgcgtggttgccac

SEQ ID NO: 60406 - DNA, 17 bp, Arabidopsis thaliana
atttgcgttcggagaat

SEQ ID NO: 60407 - DNA, 17 bp, Arabidopsis thaliana
atttgctacgactcgtt

SEQ ID NO: 60408 - DNA, 17 bp, Arabidopsis thaliana
atttgctagaatcaact

SEQ ID NO: 60409 - DNA, 17 bp, Arabidopsis thaliana
atttgctatgaccgtag

SEQ ID NO: 60410 - DNA, 17 bp, Arabidopsis thaliana
atttgctcacgcaatca

SEQ ID NO: 60411 - DNA, 17 bp, Arabidopsis thaliana
atttgctccagaatgct

SEQ ID NO: 60412 - DNA, 17 bp, Arabidopsis thaliana
atttgctcctaacggga

SEQ ID NO: 60413 - DNA, 17 bp, Arabidopsis thaliana
atttgctcctcaatgtg

SEQ ID NO: 60414 - DNA, 17 bp, Arabidopsis thaliana
atttgctccttcgacga

SEQ ID NO: 60415 - DNA, 17 bp, Arabidopsis thaliana
atttgctctcgactatc

SEQ ID NO: 60416 - DNA, 17 bp, Arabidopsis thaliana
atttgctctctgttccc

SEQ ID NO: 60417 - DNA, 17 bp, Arabidopsis thaliana
atttgctctgagggctg

SEQ ID NO: 60418 - DNA, 17 bp, Arabidopsis thaliana
atttgctctttcagtgt

SEQ ID NO: 60419 - DNA, 17 bp, Arabidopsis thaliana
atttgctgagtgtcctc

SEQ ID NO: 60420 - DNA, 17 bp, Arabidopsis thaliana
atttgctgatcggccat

SEQ ID NO: 60421 - DNA, 17 bp, Arabidopsis thaliana
atttgctgcagtggaca

SEQ ID NO: 60422 - DNA, 17 bp, Arabidopsis thaliana
atttgctgccagaagcc

SEQ ID NO: 60423 - DNA, 17 bp, Arabidopsis thaliana
atttgctgcgatgattc

SEQ ID NO: 60424 - DNA, 17 bp, Arabidopsis thaliana
atttgctggctgactgc

SEQ ID NO: 60425 - DNA, 17 bp, Arabidopsis thaliana
atttgctgggtgtcctc

SEQ ID NO: 60426 - DNA, 17 bp, Arabidopsis thaliana
atttgctgtgctcagga

SEQ ID NO: 60427 - DNA, 17 bp, Arabidopsis thaliana
atttgcttccgcttctt

SEQ ID NO: 60428 - DNA, 17 bp, Arabidopsis thaliana
atttgcttcgtgtccag

SEQ ID NO: 60429 - DNA, 17 bp, Arabidopsis thaliana
atttgcttctaaaggtg

SEQ ID NO: 60430 - DNA, 17 bp, Arabidopsis thaliana
atttgcttgttgagcca

SEQ ID NO: 60431 - DNA, 17 bp, Arabidopsis thaliana
atttgcttgttgggcca

SEQ ID NO: 60432 - DNA, 17 bp, Arabidopsis thaliana
atttgctttgctccaaa

SEQ ID NO: 60433 - DNA, 17 bp, Arabidopsis thaliana
atttggaaccgcttgat

SEQ ID NO: 60434 - DNA, 17 bp, Arabidopsis thaliana
atttggaaccgctttac

SEQ ID NO: 60435 - DNA, 17 bp, Arabidopsis thaliana
atttggaacctgcctag

SEQ ID NO: 60436 - DNA, 17 bp, Arabidopsis thaliana
atttggaatgttcctcg

SEQ ID NO: 60437 - DNA, 17 bp, Arabidopsis thaliana
atttggaccacttgtgt

SEQ ID NO: 60438 - DNA, 17 bp, Arabidopsis thaliana
atttggacccatggact

SEQ ID NO: 60439 - DNA, 17 bp, Arabidopsis thaliana
atttggaccgctaattc

SEQ ID NO: 60440 - DNA, 17 bp, Arabidopsis thaliana
atttggaccgcttctgc

SEQ ID NO: 60441 - DNA, 17 bp, Arabidopsis thaliana
atttggaccgcttcttc

SEQ ID NO: 60442 - DNA, 17 bp, Arabidopsis thaliana
atttggacctccaggtt

SEQ ID NO: 60443 - DNA, 17 bp, Arabidopsis thaliana
atttggaccttaggcaa

SEQ ID NO: 60444 - DNA, 17 bp, Arabidopsis thaliana
atttggacggagatgat

SEQ ID NO: 60445 - DNA, 17 bp, Arabidopsis thaliana
atttggactgatccttg

SEQ ID NO: 60446 - DNA, 17 bp, Arabidopsis thaliana
atttggactggacaagc

SEQ ID NO: 60447 - DNA, 17 bp, Arabidopsis thaliana
atttggactggacaatc

SEQ ID NO: 60448 - DNA, 17 bp, Arabidopsis thaliana
atttggactttttgaca

SEQ ID NO: 60449 - DNA, 17 bp, Arabidopsis thaliana
atttggagagatgtgcg

SEQ ID NO: 60450 - DNA, 17 bp, Arabidopsis thaliana
atttggagattattgag

SEQ ID NO: 60451 - DNA, 17 bp, Arabidopsis thaliana
atttggaggatcagcaa

SEQ ID NO: 60452 - DNA, 17 bp, Arabidopsis thaliana
atttggagtcttagcta

SEQ ID NO: 60453 - DNA, 17 bp, Arabidopsis thaliana
atttggagtgacttgtg

SEQ ID NO: 60454 - DNA, 17 bp, Arabidopsis thaliana
atttggatcttcaacag

SEQ ID NO: 60455 - DNA, 17 bp, Arabidopsis thaliana
atttggatgaatcattt

SEQ ID NO: 60456 - DNA, 17 bp, Arabidopsis thaliana
atttggatgatcctgat

SEQ ID NO: 60457 - DNA, 17 bp, Arabidopsis thaliana
atttggatgccaactgt

SEQ ID NO: 60458 - DNA, 17 bp, Arabidopsis thaliana
atttggatggacttggt

SEQ ID NO: 60459 - DNA, 17 bp, Arabidopsis thaliana
atttggatggatcatct

SEQ ID NO: 60460 - DNA, 17 bp, Arabidopsis thaliana
atttggatgtcaactgt

SEQ ID NO: 60461 - DNA, 17 bp, Arabidopsis thaliana
atttggatgtgttcctc

SEQ ID NO: 60462 - DNA, 17 bp, Arabidopsis thaliana
atttggcaaagtgagat

SEQ ID NO: 60463 - DNA, 17 bp, Arabidopsis thaliana
atttggcacgacatttg

SEQ ID NO: 60464 - DNA, 17 bp, Arabidopsis thaliana
atttggcactctacttt

SEQ ID NO: 60465 - DNA, 17 bp, Arabidopsis thaliana
atttggcagtgcgagaa

SEQ ID NO: 60466 - DNA, 17 bp, Arabidopsis thaliana
atttggcatagagtgcc

SEQ ID NO: 60467 - DNA, 17 bp, Arabidopsis thaliana
atttggccacaccatga

SEQ ID NO: 60468 - DNA, 17 bp, Arabidopsis thaliana
atttggccactttttta

SEQ ID NO: 60469 - DNA, 17 bp, Arabidopsis thaliana
atttggccattttttga

SEQ ID NO: 60470 - DNA, 17 bp, Arabidopsis thaliana
atttggccgggtcaacg

SEQ ID NO: 60471 - DNA, 17 bp, Arabidopsis thaliana
atttggccgtgtcaacg

SEQ ID NO: 60472 - DNA, 17 bp, Arabidopsis thaliana
atttggcctgtgagtat

SEQ ID NO: 60473 - DNA, 17 bp, Arabidopsis thaliana
atttggcggactatgcg

SEQ ID NO: 60474 - DNA, 17 bp, Arabidopsis thaliana
atttggcggcttaggcg

SEQ ID NO: 60475 - DNA, 17 bp, Arabidopsis thaliana
atttggcgggaaacttt

SEQ ID NO: 60476 - DNA, 17 bp, Arabidopsis thaliana
atttggctacttcaggt

SEQ ID NO: 60477 - DNA, 17 bp, Arabidopsis thaliana
atttggctcagacagcg

SEQ ID NO: 60478 - DNA, 17 bp, Arabidopsis thaliana
atttggcttaaccggat

SEQ ID NO: 60479 - DNA, 17 bp, Arabidopsis thaliana
atttggctttatcagtg

SEQ ID NO: 60480 - DNA, 17 bp, Arabidopsis thaliana
atttgggaagtctgtca

SEQ ID NO: 60481 - DNA, 17 bp, Arabidopsis thaliana
atttgggaattctactc

SEQ ID NO: 60482 - DNA, 17 bp, Arabidopsis thaliana
atttgggacaaacttta

SEQ ID NO: 60483 - DNA, 17 bp, Arabidopsis thaliana
atttgggaccgctaaat

SEQ ID NO: 60484 - DNA, 17 bp, Arabidopsis thaliana
atttgggcctgagccgt

SEQ ID NO: 60485 - DNA, 17 bp, Arabidopsis thaliana
atttgggctatatgacg

SEQ ID NO: 60486 - DNA, 17 bp, Arabidopsis thaliana
atttgggctatattacg

SEQ ID NO: 60487 - DNA, 17 bp, Arabidopsis thaliana
atttggggtccaagctt

SEQ ID NO: 60488 - DNA, 17 bp, Arabidopsis thaliana
atttggggtcgacaaaa

SEQ ID NO: 60489 - DNA, 17 bp, Arabidopsis thaliana
atttggggtgcccagag

SEQ ID NO: 60490 - DNA, 17 bp, Arabidopsis thaliana
atttgggtcagcaaatg

SEQ ID NO: 60491 - DNA, 17 bp, Arabidopsis thaliana
atttgggtgatcgttga

SEQ ID NO: 60492 - DNA, 17 bp, Arabidopsis thaliana
atttgggtgctgcagct

SEQ ID NO: 60493 - DNA, 17 bp, Arabidopsis thaliana
atttgggttctgcctat

SEQ ID NO: 60494 - DNA, 17 bp, Arabidopsis thaliana
atttgggttgcctgaat

SEQ ID NO: 60495 - DNA, 17 bp, Arabidopsis thaliana
atttgggtttggttccg

SEQ ID NO: 60496 - DNA, 17 bp, Arabidopsis thaliana
atttggtcagatgagat

SEQ ID NO: 60497 - DNA, 17 bp, Arabidopsis thaliana
atttggtccctttgtgc

SEQ ID NO: 60498 - DNA, 17 bp, Arabidopsis thaliana
atttggtccgtccatct

SEQ ID NO: 60499 - DNA, 17 bp, Arabidopsis thaliana
atttggtcgcatttgcc

SEQ ID NO: 60500 - DNA, 17 bp, Arabidopsis thaliana
atttggtcgggtcaacg

SEQ ID NO: 60501 - DNA, 17 bp, Arabidopsis thaliana
atttggtctgcagcgat

SEQ ID NO: 60502 - DNA, 17 bp, Arabidopsis thaliana
atttggtctgtggcgat

SEQ ID NO: 60503 - DNA, 17 bp, Arabidopsis thaliana
atttggtcttccggtct

SEQ ID NO: 60504 - DNA, 17 bp, Arabidopsis thaliana
atttggtctttgtgtgt

SEQ ID NO: 60505 - DNA, 17 bp, Arabidopsis thaliana
atttggtgcggtttcat

SEQ ID NO: 60506 - DNA, 17 bp, Arabidopsis thaliana
atttggtgtctcgtcat

SEQ ID NO: 60507 - DNA, 17 bp, Arabidopsis thaliana
atttggttagccacttt

SEQ ID NO: 60508 - DNA, 17 bp, Arabidopsis thaliana
atttggttcagattcac

SEQ ID NO: 60509 - DNA, 17 bp, Arabidopsis thaliana
atttggttctggttcgg

SEQ ID NO: 60510 - DNA, 17 bp, Arabidopsis thaliana
atttggttgatccgcgc

SEQ ID NO: 60511 - DNA, 17 bp, Arabidopsis thaliana
atttggttgattggttg

SEQ ID NO: 60512 - DNA, 17 bp, Arabidopsis thaliana
atttggttgcggtttaa

SEQ ID NO: 60513 - DNA, 17 bp, Arabidopsis thaliana
atttggttgctgacgct

SEQ ID NO: 60514 - DNA, 17 bp, Arabidopsis thaliana
atttggttggttctgcg

SEQ ID NO: 60515 - DNA, 17 bp, Arabidopsis thaliana
atttgtaccacaagcag

SEQ ID NO: 60516 - DNA, 17 bp, Arabidopsis thaliana
atttgtaccatcgagtt

SEQ ID NO: 60517 - DNA, 17 bp, Arabidopsis thaliana
atttgtactaggtgatc

SEQ ID NO: 60518 - DNA, 17 bp, Arabidopsis thaliana
atttgtagccgccgtga

SEQ ID NO: 60519 - DNA, 17 bp, Arabidopsis thaliana
atttgtaggacaaatgc

SEQ ID NO: 60520 - DNA, 17 bp, Arabidopsis thaliana
atttgtagggccggtaa

SEQ ID NO: 60521 - DNA, 17 bp, Arabidopsis thaliana
atttgtagggctggtaa

SEQ ID NO: 60522 - DNA, 17 bp, Arabidopsis thaliana
atttgtagtcccgttct

SEQ ID NO: 60523 - DNA, 17 bp, Arabidopsis thaliana
atttgtagtctgcagac

SEQ ID NO: 60524 - DNA, 17 bp, Arabidopsis thaliana
atttgtatggcctcgat

SEQ ID NO: 60525 - DNA, 17 bp, Arabidopsis thaliana
atttgtattccggtacc

SEQ ID NO: 60526 - DNA, 17 bp, Arabidopsis thaliana
atttgtcaaccgtatca

SEQ ID NO: 60527 - DNA, 17 bp, Arabidopsis thaliana
atttgtcacttgttggt

SEQ ID NO: 60528 - DNA, 17 bp, Arabidopsis thaliana
atttgtcagcggtttag

SEQ ID NO: 60529 - DNA, 17 bp, Arabidopsis thaliana
atttgtcaggcgttcga

SEQ ID NO: 60530 - DNA, 17 bp, Arabidopsis thaliana
atttgtcaggtggggag

SEQ ID NO: 60531 - DNA, 17 bp, Arabidopsis thaliana
atttgtcatctgagacg

SEQ ID NO: 60532 - DNA, 17 bp, Arabidopsis thaliana
atttgtcccctcaacca

SEQ ID NO: 60533 - DNA, 17 bp, Arabidopsis thaliana
atttgtccgatagggat

SEQ ID NO: 60534 - DNA, 17 bp, Arabidopsis thaliana
atttgtccgatggggat

SEQ ID NO: 60535 - DNA, 17 bp, Arabidopsis thaliana
atttgtccgtctcaact

SEQ ID NO: 60536 - DNA, 17 bp, Arabidopsis thaliana
atttgtcgacccgacct

SEQ ID NO: 60537 - DNA, 17 bp, Arabidopsis thaliana
atttgtcgcaattccct

SEQ ID NO: 60538 - DNA, 17 bp, Arabidopsis thaliana
atttgtcgccattgctg

SEQ ID NO: 60539 - DNA, 17 bp, Arabidopsis thaliana
atttgtcgctggttgct

SEQ ID NO: 60540 - DNA, 17 bp, Arabidopsis thaliana
atttgtcggataagtgc

SEQ ID NO: 60541 - DNA, 17 bp, Arabidopsis thaliana
atttgtcggctatagag

SEQ ID NO: 60542 - DNA, 17 bp, Arabidopsis thaliana
atttgtcggggagtgtt

SEQ ID NO: 60543 - DNA, 17 bp, Arabidopsis thaliana
atttgtcggtggacctt

SEQ ID NO: 60544 - DNA, 17 bp, Arabidopsis thaliana
atttgtcggttgatcgg

SEQ ID NO: 60545 - DNA, 17 bp, Arabidopsis thaliana
atttgtcgtattggtgc

SEQ ID NO: 60546 - DNA, 17 bp, Arabidopsis thaliana
atttgtcgttttaggta

SEQ ID NO: 60547 - DNA, 17 bp, Arabidopsis thaliana
atttgtctcacgtggac

SEQ ID NO: 60548 - DNA, 17 bp, Arabidopsis thaliana
atttgtctcgtctcggg

SEQ ID NO: 60549 - DNA, 17 bp, Arabidopsis thaliana
atttgtctgcggtttag

SEQ ID NO: 60550 - DNA, 17 bp, Arabidopsis thaliana
atttgtctgttggacca

SEQ ID NO: 60551 - DNA, 17 bp, Arabidopsis thaliana
atttgtctgttgggcca

SEQ ID NO: 60552 - DNA, 17 bp, Arabidopsis thaliana
atttgtgaacctaattg

SEQ ID NO: 60553 - DNA, 17 bp, Arabidopsis thaliana
atttgtgacataaacca

SEQ ID NO: 60554 - DNA, 17 bp, Arabidopsis thaliana
atttgtgacatggcttg

SEQ ID NO: 60555 - DNA, 17 bp, Arabidopsis thaliana
atttgtgataaccaccc

SEQ ID NO: 60556 - DNA, 17 bp, Arabidopsis thaliana
atttgtgatcgtggtgg

SEQ ID NO: 60557 - DNA, 17 bp, Arabidopsis thaliana
atttgtgattgctgcac

SEQ ID NO: 60558 - DNA, 17 bp, Arabidopsis thaliana
atttgtgcaatggagat

SEQ ID NO: 60559 - DNA, 17 bp, Arabidopsis thaliana
atttgtgcaatggagtt

SEQ ID NO: 60560 - DNA, 17 bp, Arabidopsis thaliana
atttgtgccatatgacc

SEQ ID NO: 60561 - DNA, 17 bp, Arabidopsis thaliana
atttgtgccatatgacg

SEQ ID NO: 60562 - DNA, 17 bp, Arabidopsis thaliana
atttgtgccgcagttct

SEQ ID NO: 60563 - DNA, 17 bp, Arabidopsis thaliana
atttgtgcgcttgggag

SEQ ID NO: 60564 - DNA, 17 bp, Arabidopsis thaliana
atttgtgcgttgagaca

SEQ ID NO: 60565 - DNA, 17 bp, Arabidopsis thaliana
atttgtgctatatgacg

SEQ ID NO: 60566 - DNA, 17 bp, Arabidopsis thaliana
atttgtgctatatgatg

SEQ ID NO: 60567 - DNA, 17 bp, Arabidopsis thaliana
atttgtgctatatggcg

SEQ ID NO: 60568 - DNA, 17 bp, Arabidopsis thaliana
atttgtgctatattacg

SEQ ID NO: 60569 - DNA, 17 bp, Arabidopsis thaliana
atttgtgctatgacgga

SEQ ID NO: 60570 - DNA, 17 bp, Arabidopsis thaliana
atttgtgctcttcgcag

SEQ ID NO: 60571 - DNA, 17 bp, Arabidopsis thaliana
atttgtggaagttgcgt

SEQ ID NO: 60572 - DNA, 17 bp, Arabidopsis thaliana
atttgtgggttaagacc

SEQ ID NO: 60573 - DNA, 17 bp, Arabidopsis thaliana
atttgtgtcaacccccg

SEQ ID NO: 60574 - DNA, 17 bp, Arabidopsis thaliana
atttgtgtgaaacgacc

SEQ ID NO: 60575 - DNA, 17 bp, Arabidopsis thaliana
atttgtgtgaaacgacg

SEQ ID NO: 60576 - DNA, 17 bp, Arabidopsis thaliana
atttgtgtggaccaaga

SEQ ID NO: 60577 - DNA, 17 bp, Arabidopsis thaliana
atttgtgtgtcgaattt

SEQ ID NO: 60578 - DNA, 17 bp, Arabidopsis thaliana
atttgtgtgtgattgtg

SEQ ID NO: 60579 - DNA, 17 bp, Arabidopsis thaliana
atttgtgttatatgacg

SEQ ID NO: 60580 - DNA, 17 bp, Arabidopsis thaliana
atttgtgtttgggccac

SEQ ID NO: 60581 - DNA, 17 bp, Arabidopsis thaliana
atttgtgtttgggccga

SEQ ID NO: 60582 - DNA, 17 bp, Arabidopsis thaliana
atttgttactatgcaac

SEQ ID NO: 60583 - DNA, 17 bp, Arabidopsis thaliana
atttgttactatttgaa

SEQ ID NO: 60584 - DNA, 17 bp, Arabidopsis thaliana
atttgttactggaccac

SEQ ID NO: 60585 - DNA, 17 bp, Arabidopsis thaliana
atttgttagatcgggtt

SEQ ID NO: 60586 - DNA, 17 bp, Arabidopsis thaliana
atttgttcaactacagt

SEQ ID NO: 60587 - DNA, 17 bp, Arabidopsis thaliana
atttgttccttgcgcag

SEQ ID NO: 60588 - DNA, 17 bp, Arabidopsis thaliana
atttgttcgaatccatg

SEQ ID NO: 60589 - DNA, 17 bp, Arabidopsis thaliana
atttgttcttccgtcgt

SEQ ID NO: 60590 - DNA, 17 bp, Arabidopsis thaliana
atttgttgagggagtct

SEQ ID NO: 60591 - DNA, 17 bp, Arabidopsis thaliana
atttgttgatttcacgc

SEQ ID NO: 60592 - DNA, 17 bp, Arabidopsis thaliana
atttgttgcccatcaag

SEQ ID NO: 60593 - DNA, 17 bp, Arabidopsis thaliana
atttgttggaccaccct

SEQ ID NO: 60594 - DNA, 17 bp, Arabidopsis thaliana
atttgttggcatgtacc

SEQ ID NO: 60595 - DNA, 17 bp, Arabidopsis thaliana
atttgttgggccaacct

SEQ ID NO: 60596 - DNA, 17 bp, Arabidopsis thaliana
atttgtttaggaagtct

SEQ ID NO: 60597 - DNA, 17 bp, Arabidopsis thaliana
atttgtttgggaaatct

SEQ ID NO: 60598 - DNA, 17 bp, Arabidopsis thaliana
atttgtttgggaagtct

SEQ ID NO: 60599 - DNA, 17 bp, Arabidopsis thaliana
atttgttttgaccactc

SEQ ID NO: 60600 - DNA, 17 bp, Arabidopsis thaliana
atttgtttttgactttg

SEQ ID NO: 60601 - DNA, 17 bp, Arabidopsis thaliana
atttgtttttgctgcta

SEQ ID NO: 60602 - DNA, 17 bp, Arabidopsis thaliana
attttacacccgactgc

SEQ ID NO: 60603 - DNA, 17 bp, Arabidopsis thaliana
attttacaggtcaacgg

SEQ ID NO: 60604 - DNA, 17 bp, Arabidopsis thaliana
attttacagtttcgacg

SEQ ID NO: 60605 - DNA, 17 bp, Arabidopsis thaliana
attttaccaagtgggtc

SEQ ID NO: 60606 - DNA, 17 bp, Arabidopsis thaliana
attttaccatcgcagag

SEQ ID NO: 60607 - DNA, 17 bp, Arabidopsis thaliana
attttacccgacgagca

SEQ ID NO: 60608 - DNA, 17 bp, Arabidopsis thaliana
attttaccgttgaggtt

SEQ ID NO: 60609 - DNA, 17 bp, Arabidopsis thaliana
attttaccgttggggct

SEQ ID NO: 60610 - DNA, 17 bp, Arabidopsis thaliana
attttacctcccttctt

SEQ ID NO: 60611 - DNA, 17 bp, Arabidopsis thaliana
attttacctttgtgcgc

SEQ ID NO: 60612 - DNA, 17 bp, Arabidopsis thaliana
attttacgattttggcg

SEQ ID NO: 60613 - DNA, 17 bp, Arabidopsis thaliana
attttacggtttttgcg

SEQ ID NO: 60614 - DNA, 17 bp, Arabidopsis thaliana
attttactctactgcgc

SEQ ID NO: 60615 - DNA, 17 bp, Arabidopsis thaliana
attttacttagtttggc

SEQ ID NO: 60616 - DNA, 17 bp, Arabidopsis thaliana
attttagagattgccgg

SEQ ID NO: 60617 - DNA, 17 bp, Arabidopsis thaliana
attttagagtttctggc

SEQ ID NO: 60618 - DNA, 17 bp, Arabidopsis thaliana
attttagcgtgaaattt

SEQ ID NO: 60619 - DNA, 17 bp, Arabidopsis thaliana
attttagctaccgattt

SEQ ID NO: 60620 - DNA, 17 bp, Arabidopsis thaliana
attttagctgcgataac

SEQ ID NO: 60621 - DNA, 17 bp, Arabidopsis thaliana
attttagcttagccggc

SEQ ID NO: 60622 - DNA, 17 bp, Arabidopsis thaliana
attttagtcaccagcga

SEQ ID NO: 60623 - DNA, 17 bp, Arabidopsis thaliana
attttagtcgttgcggg

SEQ ID NO: 60624 - DNA, 17 bp, Arabidopsis thaliana
attttagtcttgccgtt

SEQ ID NO: 60625 - DNA, 17 bp, Arabidopsis thaliana
attttagtgcgtgttta

SEQ ID NO: 60626 - DNA, 17 bp, Arabidopsis thaliana
attttagtggacttgac

SEQ ID NO: 60627 - DNA, 17 bp, Arabidopsis thaliana
attttatccgcagttga

SEQ ID NO: 60628 - DNA, 17 bp, Arabidopsis thaliana
attttatcgtggtgcgc

SEQ ID NO: 60629 - DNA, 17 bp, Arabidopsis thaliana
attttatctgcagttga

SEQ ID NO: 60630 - DNA, 17 bp, Arabidopsis thaliana
attttattcgtcacggt

SEQ ID NO: 60631 - DNA, 17 bp, Arabidopsis thaliana
attttattttctgggac

SEQ ID NO: 60632 - DNA, 17 bp, Arabidopsis thaliana
attttcaaataccaaac

SEQ ID NO: 60633 - DNA, 17 bp, Arabidopsis thaliana
attttcaaatactcgaa

SEQ ID NO: 60634 - DNA, 17 bp, Arabidopsis thaliana
attttcaacagtcgcgg

SEQ ID NO: 60635 - DNA, 17 bp, Arabidopsis thaliana
attttcaaccagcggtt

SEQ ID NO: 60636 - DNA, 17 bp, Arabidopsis thaliana
attttcaaggcccaaga

SEQ ID NO: 60637 - DNA, 17 bp, Arabidopsis thaliana
attttcaagggccgccg

SEQ ID NO: 60638 - DNA, 17 bp, Arabidopsis thaliana
attttcacatcgacaag

SEQ ID NO: 60639 - DNA, 17 bp, Arabidopsis thaliana
attttcaccgtggacac

SEQ ID NO: 60640 - DNA, 17 bp, Arabidopsis thaliana
attttcacgcaggattt

SEQ ID NO: 60641 - DNA, 17 bp, Arabidopsis thaliana
attttcactaaggacgc

SEQ ID NO: 60642 - DNA, 17 bp, Arabidopsis thaliana
attttcactaaggctct

SEQ ID NO: 60643 - DNA, 17 bp, Arabidopsis thaliana
attttcactagcttcgc

SEQ ID NO: 60644 - DNA, 17 bp, Arabidopsis thaliana
attttcactctcctccg

SEQ ID NO: 60645 - DNA, 17 bp, Arabidopsis thaliana
attttcagagattggca

SEQ ID NO: 60646 - DNA, 17 bp, Arabidopsis thaliana
attttcagaggctatga

SEQ ID NO: 60647 - DNA, 17 bp, Arabidopsis thaliana
attttcagcaagcacga

SEQ ID NO: 60648 - DNA, 17 bp, Arabidopsis thaliana
attttcagcggctggga

SEQ ID NO: 60649 - DNA, 17 bp, Arabidopsis thaliana
attttcagctttatggt

SEQ ID NO: 60650 - DNA, 17 bp, Arabidopsis thaliana
attttcaggagagtcag

SEQ ID NO: 60651 - DNA, 17 bp, Arabidopsis thaliana
attttcagggatggaat

SEQ ID NO: 60652 - DNA, 17 bp, Arabidopsis thaliana
attttcaggggcaaatt

SEQ ID NO: 60653 - DNA, 17 bp, Arabidopsis thaliana
attttcaggggttggca

SEQ ID NO: 60654 - DNA, 17 bp, Arabidopsis thaliana
attttcagggttgtttg

SEQ ID NO: 60655 - DNA, 17 bp, Arabidopsis thaliana
attttcagggttgtttt

SEQ ID NO: 60656 - DNA, 17 bp, Arabidopsis thaliana
attttcagttttccata

SEQ ID NO: 60657 - DNA, 17 bp, Arabidopsis thaliana
attttcatcttcttcgc

SEQ ID NO: 60658 - DNA, 17 bp, Arabidopsis thaliana
attttcatgatgattga

SEQ ID NO: 60659 - DNA, 17 bp, Arabidopsis thaliana
attttcatgtgatggat

SEQ ID NO: 60660 - DNA, 17 bp, Arabidopsis thaliana
attttcatgtgtgtgat

SEQ ID NO: 60661 - DNA, 17 bp, Arabidopsis thaliana
attttcattctaaccga

SEQ ID NO: 60662 - DNA, 17 bp, Arabidopsis thaliana
attttcattctaactta

SEQ ID NO: 60663 - DNA, 17 bp, Arabidopsis thaliana
attttcatttaggttcg

SEQ ID NO: 60664 - DNA, 17 bp, Arabidopsis thaliana
attttccaagactgtgc

SEQ ID NO: 60665 - DNA, 17 bp, Arabidopsis thaliana
attttccacaaaaacac

SEQ ID NO: 60666 - DNA, 17 bp, Arabidopsis thaliana
attttccacaaaaaccc

SEQ ID NO: 60667 - DNA, 17 bp, Arabidopsis thaliana
attttccacaaaaacgc

SEQ ID NO: 60668 - DNA, 17 bp, Arabidopsis thaliana
attttccacaggagccc

SEQ ID NO: 60669 - DNA, 17 bp, Arabidopsis thaliana
attttccacttccacca

SEQ ID NO: 60670 - DNA, 17 bp, Arabidopsis thaliana
attttccactttcgtct

SEQ ID NO: 60671 - DNA, 17 bp, Arabidopsis thaliana
attttccagccgaatgc

SEQ ID NO: 60672 - DNA, 17 bp, Arabidopsis thaliana
attttccagcctatggt

SEQ ID NO: 60673 - DNA, 17 bp, Arabidopsis thaliana
attttccatggaagtaa

SEQ ID NO: 60674 - DNA, 17 bp, Arabidopsis thaliana
attttcccaactgagtg

SEQ ID NO: 60675 - DNA, 17 bp, Arabidopsis thaliana
attttcccgccaaaacg

SEQ ID NO: 60676 - DNA, 17 bp, Arabidopsis thaliana
attttccctctccgcct

SEQ ID NO: 60677 - DNA, 17 bp, Arabidopsis thaliana
attttccctctctgccg

SEQ ID NO: 60678 - DNA, 17 bp, Arabidopsis thaliana
attttccctttccgccg

SEQ ID NO: 60679 - DNA, 17 bp, Arabidopsis thaliana
attttccctttgaaccg

SEQ ID NO: 60680 - DNA, 17 bp, Arabidopsis thaliana
attttccctttgtcgag

SEQ ID NO: 60681 - DNA, 17 bp, Arabidopsis thaliana
attttccctttgttttg

SEQ ID NO: 60682 - DNA, 17 bp, Arabidopsis thaliana
attttccgacgactttt

SEQ ID NO: 60683 - DNA, 17 bp, Arabidopsis thaliana
attttccgcagaccttg

SEQ ID NO: 60684 - DNA, 17 bp, Arabidopsis thaliana
attttccgccaaaaccg

SEQ ID NO: 60685 - DNA, 17 bp, Arabidopsis thaliana
attttccgccaaatttt

SEQ ID NO: 60686 - DNA, 17 bp, Arabidopsis thaliana
attttccgcgtctgctt

SEQ ID NO: 60687 - DNA, 17 bp, Arabidopsis thaliana
attttccgctacgggaa

SEQ ID NO: 60688 - DNA, 17 bp, Arabidopsis thaliana
attttccgctgtcaggc

SEQ ID NO: 60689 - DNA, 17 bp, Arabidopsis thaliana
attttccgcttttctga

SEQ ID NO: 60690 - DNA, 17 bp, Arabidopsis thaliana
attttccggcgagtgag

SEQ ID NO: 60691 - DNA, 17 bp, Arabidopsis thaliana
attttccggttcacagg

SEQ ID NO: 60692 - DNA, 17 bp, Arabidopsis thaliana
attttccgtatgagcta

SEQ ID NO: 60693 - DNA, 17 bp, Arabidopsis thaliana
attttccgtatgagtga

SEQ ID NO: 60694 - DNA, 17 bp, Arabidopsis thaliana
attttccgtcgcttaga

SEQ ID NO: 60695 - DNA, 17 bp, Arabidopsis thaliana
attttcctggagttttg

SEQ ID NO: 60696 - DNA, 17 bp, Arabidopsis thaliana
attttcctgggaccgta

SEQ ID NO: 60697 - DNA, 17 bp, Arabidopsis thaliana
attttcctgtgctttct

SEQ ID NO: 60698 - DNA, 17 bp, Arabidopsis thaliana
attttcctgtgctttgt

SEQ ID NO: 60699 - DNA, 17 bp, Arabidopsis thaliana
attttccttaaggtttc

SEQ ID NO: 60700 - DNA, 17 bp, Arabidopsis thaliana
attttccttagttacag

SEQ ID NO: 60701 - DNA, 17 bp, Arabidopsis thaliana
attttccttcaccaaat

SEQ ID NO: 60702 - DNA, 17 bp, Arabidopsis thaliana
attttcctttacggaga

SEQ ID NO: 60703 - DNA, 17 bp, Arabidopsis thaliana
attttcgacctggttta

SEQ ID NO: 60704 - DNA, 17 bp, Arabidopsis thaliana
attttcgacggcattac

SEQ ID NO: 60705 - DNA, 17 bp, Arabidopsis thaliana
attttcgagtagtctgg

SEQ ID NO: 60706 - DNA, 17 bp, Arabidopsis thaliana
attttcgatcatcagct

SEQ ID NO: 60707 - DNA, 17 bp, Arabidopsis thaliana
attttcgatcgagcctg

SEQ ID NO: 60708 - DNA, 17 bp, Arabidopsis thaliana
attttcgatttaagctc

SEQ ID NO: 60709 - DNA, 17 bp, Arabidopsis thaliana
attttcgcacgaaccgg

SEQ ID NO: 60710 - DNA, 17 bp, Arabidopsis thaliana
attttcgcagcaggtgt

SEQ ID NO: 60711 - DNA, 17 bp, Arabidopsis thaliana
attttcgcaggtggatt

SEQ ID NO: 60712 - DNA, 17 bp, Arabidopsis thaliana
attttcgccaaaacgca

SEQ ID NO: 60713 - DNA, 17 bp, Arabidopsis thaliana
attttcgccaacgtctg

SEQ ID NO: 60714 - DNA, 17 bp, Arabidopsis thaliana
attttcgccatctattt

SEQ ID NO: 60715 - DNA, 17 bp, Arabidopsis thaliana
attttcgctagcggtgt

SEQ ID NO: 60716 - DNA, 17 bp, Arabidopsis thaliana
attttcgcttcctttag

SEQ ID NO: 60717 - DNA, 17 bp, Arabidopsis thaliana
attttcgcttgggttct

SEQ ID NO: 60718 - DNA, 17 bp, Arabidopsis thaliana
attttcggacccggtaa

SEQ ID NO: 60719 - DNA, 17 bp, Arabidopsis thaliana
attttcggctatcttcg

SEQ ID NO: 60720 - DNA, 17 bp, Arabidopsis thaliana
attttcgggcattttcg

SEQ ID NO: 60721 - DNA, 17 bp, Arabidopsis thaliana
attttcgggttattcgc

SEQ ID NO: 60722 - DNA, 17 bp, Arabidopsis thaliana
attttcggtccatatgc

SEQ ID NO: 60723 - DNA, 17 bp, Arabidopsis thaliana
attttcgtcaatgtccg

SEQ ID NO: 60724 - DNA, 17 bp, Arabidopsis thaliana
attttcgtcagaaccac

SEQ ID NO: 60725 - DNA, 17 bp, Arabidopsis thaliana
attttcgtcagagcgct

SEQ ID NO: 60726 - DNA, 17 bp, Arabidopsis thaliana
attttcgtccacctcat

SEQ ID NO: 60727 - DNA, 17 bp, Arabidopsis thaliana
attttcgtgatttgcgc

SEQ ID NO: 60728 - DNA, 17 bp, Arabidopsis thaliana
attttcgtgatttgggc

SEQ ID NO: 60729 - DNA, 17 bp, Arabidopsis thaliana
attttcgtgatttgtgc

SEQ ID NO: 60730 - DNA, 17 bp, Arabidopsis thaliana
attttcgtggatgttgt

SEQ ID NO: 60731 - DNA, 17 bp, Arabidopsis thaliana
attttcgtgtgcaggcc

SEQ ID NO: 60732 - DNA, 17 bp, Arabidopsis thaliana
attttcgtgttggttca

SEQ ID NO: 60733 - DNA, 17 bp, Arabidopsis thaliana
attttcgttactatttg

SEQ ID NO: 60734 - DNA, 17 bp, Arabidopsis thaliana
attttcgttagcgactg

SEQ ID NO: 60735 - DNA, 17 bp, Arabidopsis thaliana
attttcgttagtgactc

SEQ ID NO: 60736 - DNA, 17 bp, Arabidopsis thaliana
attttcgttagtgactg

SEQ ID NO: 60737 - DNA, 17 bp, Arabidopsis thaliana
attttcgtttgccttcg

SEQ ID NO: 60738 - DNA, 17 bp, Arabidopsis thaliana
attttctaaaatttcac

SEQ ID NO: 60739 - DNA, 17 bp, Arabidopsis thaliana
attttctaagatccacc

SEQ ID NO: 60740 - DNA, 17 bp, Arabidopsis thaliana
attttctaagatccacg

SEQ ID NO: 60741 - DNA, 17 bp, Arabidopsis thaliana
attttctaatctttgtt

SEQ ID NO: 60742 - DNA, 17 bp, Arabidopsis thaliana
attttctaccgcagccg

SEQ ID NO: 60743 - DNA, 17 bp, Arabidopsis thaliana
attttctacgcgcttga

SEQ ID NO: 60744 - DNA, 17 bp, Arabidopsis thaliana
attttctagaatcattt

SEQ ID NO: 60745 - DNA, 17 bp, Arabidopsis thaliana
attttctaggaaccggt

SEQ ID NO: 60746 - DNA, 17 bp, Arabidopsis thaliana
attttctagtgccacga

SEQ ID NO: 60747 - DNA, 17 bp, Arabidopsis thaliana
attttctattgacgtag

SEQ ID NO: 60748 - DNA, 17 bp, Arabidopsis thaliana
attttctcccggctttt

SEQ ID NO: 60749 - DNA, 17 bp, Arabidopsis thaliana
attttctcgcacggtca

SEQ ID NO: 60750 - DNA, 17 bp, Arabidopsis thaliana
attttctcgcatttgcc

SEQ ID NO: 60751 - DNA, 17 bp, Arabidopsis thaliana
attttctctacgctatg

SEQ ID NO: 60752 - DNA, 17 bp, Arabidopsis thaliana
attttctctcaggtgtt

SEQ ID NO: 60753 - DNA, 17 bp, Arabidopsis thaliana
attttctctgacttcgc

SEQ ID NO: 60754 - DNA, 17 bp, Arabidopsis thaliana
attttctctgagactgt

SEQ ID NO: 60755 - DNA, 17 bp, Arabidopsis thaliana
attttctctttacttgg

SEQ ID NO: 60756 - DNA, 17 bp, Arabidopsis thaliana
attttctgacccttttc

SEQ ID NO: 60757 - DNA, 17 bp, Arabidopsis thaliana
attttctgactcgttga

SEQ ID NO: 60758 - DNA, 17 bp, Arabidopsis thaliana
attttctgagatctaca

SEQ ID NO: 60759 - DNA, 17 bp, Arabidopsis thaliana
attttctgcaaagatct

SEQ ID NO: 60760 - DNA, 17 bp, Arabidopsis thaliana
attttctgccatgaaca

SEQ ID NO: 60761 - DNA, 17 bp, Arabidopsis thaliana
attttctgcgccgaaga

SEQ ID NO: 60762 - DNA, 17 bp, Arabidopsis thaliana
attttctggaaaggatc

SEQ ID NO: 60763 - DNA, 17 bp, Arabidopsis thaliana
attttctggttgctcct

SEQ ID NO: 60764 - DNA, 17 bp, Arabidopsis thaliana
attttctgtgcaatgag

SEQ ID NO: 60765 - DNA, 17 bp, Arabidopsis thaliana
attttctgtttgaggca

SEQ ID NO: 60766 - DNA, 17 bp, Arabidopsis thaliana
attttcttccaacggtc

SEQ ID NO: 60767 - DNA, 17 bp, Arabidopsis thaliana
attttcttccacagtct

SEQ ID NO: 60768 - DNA, 17 bp, Arabidopsis thaliana
attttcttccgacaaca

SEQ ID NO: 60769 - DNA, 17 bp, Arabidopsis thaliana
attttcttcggcttgat

SEQ ID NO: 60770 - DNA, 17 bp, Arabidopsis thaliana
attttcttctgggctgc

SEQ ID NO: 60771 - DNA, 17 bp, Arabidopsis thaliana
attttcttggaagccat

SEQ ID NO: 60772 - DNA, 17 bp, Arabidopsis thaliana
attttcttgtattcccg

SEQ ID NO: 60773 - DNA, 17 bp, Arabidopsis thaliana
attttcttgtgcgatga

SEQ ID NO: 60774 - DNA, 17 bp, Arabidopsis thaliana
attttcttgtgtgatga

SEQ ID NO: 60775 - DNA, 17 bp, Arabidopsis thaliana
attttctttgatggcgg

SEQ ID NO: 60776 - DNA, 17 bp, Arabidopsis thaliana
attttgaaacggcagat

SEQ ID NO: 60777 - DNA, 17 bp, Arabidopsis thaliana
attttgaaatgcatggc

SEQ ID NO: 60778 - DNA, 17 bp, Arabidopsis thaliana
attttgacaaagtggga

SEQ ID NO: 60779 - DNA, 17 bp, Arabidopsis thaliana
attttgacaaatcccgg

SEQ ID NO: 60780 - DNA, 17 bp, Arabidopsis thaliana
attttgacactgcttca

SEQ ID NO: 60781 - DNA, 17 bp, Arabidopsis thaliana
attttgacactgttgcg

SEQ ID NO: 60782 - DNA, 17 bp, Arabidopsis thaliana
attttgacagatccatc

SEQ ID NO: 60783 - DNA, 17 bp, Arabidopsis thaliana
attttgacattgtgggc

SEQ ID NO: 60784 - DNA, 17 bp, Arabidopsis thaliana
attttgaccactgtaca

SEQ ID NO: 60785 - DNA, 17 bp, Arabidopsis thaliana
attttgacccattttga

SEQ ID NO: 60786 - DNA, 17 bp, Arabidopsis thaliana
attttgacccattttta

SEQ ID NO: 60787 - DNA, 17 bp, Arabidopsis thaliana
attttgacccgcggtat

SEQ ID NO: 60788 - DNA, 17 bp, Arabidopsis thaliana
attttgactatgggatc

SEQ ID NO: 60789 - DNA, 17 bp, Arabidopsis thaliana
attttgactcggtttgg

SEQ ID NO: 60790 - DNA, 17 bp, Arabidopsis thaliana
attttgactttggtctc

SEQ ID NO: 60791 - DNA, 17 bp, Arabidopsis thaliana
attttgactttttgtcg

SEQ ID NO: 60792 - DNA, 17 bp, Arabidopsis thaliana
attttgagacgtttaga

SEQ ID NO: 60793 - DNA, 17 bp, Arabidopsis thaliana
attttgagtttctactg

SEQ ID NO: 60794 - DNA, 17 bp, Arabidopsis thaliana
attttgatgacggttcg

SEQ ID NO: 60795 - DNA, 17 bp, Arabidopsis thaliana
attttgatgtgggtccg

SEQ ID NO: 60796 - DNA, 17 bp, Arabidopsis thaliana
attttgattattgacac

SEQ ID NO: 60797 - DNA, 17 bp, Arabidopsis thaliana
attttgattgacggact

SEQ ID NO: 60798 - DNA, 17 bp, Arabidopsis thaliana
attttgattgcttacag

SEQ ID NO: 60799 - DNA, 17 bp, Arabidopsis thaliana
attttgatttcgccttt

SEQ ID NO: 60800 - DNA, 17 bp, Arabidopsis thaliana
attttgcaatcgtcttc

SEQ ID NO: 60801 - DNA, 17 bp, Arabidopsis thaliana
attttgcagaggcttat

SEQ ID NO: 60802 - DNA, 17 bp, Arabidopsis thaliana
attttgcaggctcttcg

SEQ ID NO: 60803 - DNA, 17 bp, Arabidopsis thaliana
attttgcaggttgtttc

SEQ ID NO: 60804 - DNA, 17 bp, Arabidopsis thaliana
attttgcagtcccaaca

SEQ ID NO: 60805 - DNA, 17 bp, Arabidopsis thaliana
attttgcagttgataga

SEQ ID NO: 60806 - DNA, 17 bp, Arabidopsis thaliana
attttgccatgagagtt

SEQ ID NO: 60807 - DNA, 17 bp, Arabidopsis thaliana
attttgcccggaacttt

SEQ ID NO: 60808 - DNA, 17 bp, Arabidopsis thaliana
attttgcctgtcgctgg

SEQ ID NO: 60809 - DNA, 17 bp, Arabidopsis thaliana
attttgcgaccgtcttt

SEQ ID NO: 60810 - DNA, 17 bp, Arabidopsis thaliana
attttgcgacgatttag

SEQ ID NO: 60811 - DNA, 17 bp, Arabidopsis thaliana
attttgcgatttagcga

SEQ ID NO: 60812 - DNA, 17 bp, Arabidopsis thaliana
attttgcgccgattctg

SEQ ID NO: 60813 - DNA, 17 bp, Arabidopsis thaliana
attttgcggtcgtcttt

SEQ ID NO: 60814 - DNA, 17 bp, Arabidopsis thaliana
attttgcgtcggagttg

SEQ ID NO: 60815 - DNA, 17 bp, Arabidopsis thaliana
attttgctacgaatttg

SEQ ID NO: 60816 - DNA, 17 bp, Arabidopsis thaliana
attttgctactggtgtc

SEQ ID NO: 60817 - DNA, 17 bp, Arabidopsis thaliana
attttgctccgtcgatg

SEQ ID NO: 60818 - DNA, 17 bp, Arabidopsis thaliana
attttgctgactcgtta

SEQ ID NO: 60819 - DNA, 17 bp, Arabidopsis thaliana
attttgctgatgtgtac

SEQ ID NO: 60820 - DNA, 17 bp, Arabidopsis thaliana
attttggaccactcctt

SEQ ID NO: 60821 - DNA, 17 bp, Arabidopsis thaliana
attttggaccatgattc

SEQ ID NO: 60822 - DNA, 17 bp, Arabidopsis thaliana
attttggaccgcagtca

SEQ ID NO: 60823 - DNA, 17 bp, Arabidopsis thaliana
attttggacgtaagcga

SEQ ID NO: 60824 - DNA, 17 bp, Arabidopsis thaliana
attttggactcgaccat

SEQ ID NO: 60825 - DNA, 17 bp, Arabidopsis thaliana
attttggagatgagact

SEQ ID NO: 60826 - DNA, 17 bp, Arabidopsis thaliana
attttggatacttgcct

SEQ ID NO: 60827 - DNA, 17 bp, Arabidopsis thaliana
attttggatttgggctg

SEQ ID NO: 60828 - DNA, 17 bp, Arabidopsis thaliana
attttggccactggttt

SEQ ID NO: 60829 - DNA, 17 bp, Arabidopsis thaliana
attttggccaggcaaac

SEQ ID NO: 60830 - DNA, 17 bp, Arabidopsis thaliana
attttggccaggcagac

SEQ ID NO: 60831 - DNA, 17 bp, Arabidopsis thaliana
attttggccaggtcaac

SEQ ID NO: 60832 - DNA, 17 bp, Arabidopsis thaliana
attttggcccaaaacca

SEQ ID NO: 60833 - DNA, 17 bp, Arabidopsis thaliana
attttggcccactacat

SEQ ID NO: 60834 - DNA, 17 bp, Arabidopsis thaliana
attttggcccattacca

SEQ ID NO: 60835 - DNA, 17 bp, Arabidopsis thaliana
attttggcccattagca

SEQ ID NO: 60836 - DNA, 17 bp, Arabidopsis thaliana
attttggcccggtcaac

SEQ ID NO: 60837 - DNA, 17 bp, Arabidopsis thaliana
attttggccctgaatgt

SEQ ID NO: 60838 - DNA, 17 bp, Arabidopsis thaliana
attttggccgacgtcag

SEQ ID NO: 60839 - DNA, 17 bp, Arabidopsis thaliana
attttggcctagtcaac

SEQ ID NO: 60840 - DNA, 17 bp, Arabidopsis thaliana
attttggcctctcttgt

SEQ ID NO: 60841 - DNA, 17 bp, Arabidopsis thaliana
attttggcctggtcaac

SEQ ID NO: 60842 - DNA, 17 bp, Arabidopsis thaliana
attttggcctggtcgac

SEQ ID NO: 60843 - DNA, 17 bp, Arabidopsis thaliana
attttggcggaaaaaca

SEQ ID NO: 60844 - DNA, 17 bp, Arabidopsis thaliana
attttggcgttcacaac

SEQ ID NO: 60845 - DNA, 17 bp, Arabidopsis thaliana
attttggctctgattgg

SEQ ID NO: 60846 - DNA, 17 bp, Arabidopsis thaliana
attttgggacacagcaa

SEQ ID NO: 60847 - DNA, 17 bp, Arabidopsis thaliana
attttgggccacagcaa

SEQ ID NO: 60848 - DNA, 17 bp, Arabidopsis thaliana
attttgggcctaacgca

SEQ ID NO: 60849 - DNA, 17 bp, Arabidopsis thaliana
attttgggcggtgagtt

SEQ ID NO: 60850 - DNA, 17 bp, Arabidopsis thaliana
attttggggtgatttac

SEQ ID NO: 60851 - DNA, 17 bp, Arabidopsis thaliana
attttgggtaaggatcg

SEQ ID NO: 60852 - DNA, 17 bp, Arabidopsis thaliana
attttgggtcgacacgg

SEQ ID NO: 60853 - DNA, 17 bp, Arabidopsis thaliana
attttgggtgtgagtcg

SEQ ID NO: 60854 - DNA, 17 bp, Arabidopsis thaliana
attttgggttcaggtcc

SEQ ID NO: 60855 - DNA, 17 bp, Arabidopsis thaliana
attttgggttcggattc

SEQ ID NO: 60856 - DNA, 17 bp, Arabidopsis thaliana
attttgggttttgcttc

SEQ ID NO: 60857 - DNA, 17 bp, Arabidopsis thaliana
attttggtcccaaggct

SEQ ID NO: 60858 - DNA, 17 bp, Arabidopsis thaliana
attttggtccgacttgg

SEQ ID NO: 60859 - DNA, 17 bp, Arabidopsis thaliana
attttggtcctcatact

SEQ ID NO: 60860 - DNA, 17 bp, Arabidopsis thaliana
attttggtcctttctct

SEQ ID NO: 60861 - DNA, 17 bp, Arabidopsis thaliana
attttggtgcaatgtaa

SEQ ID NO: 60862 - DNA, 17 bp, Arabidopsis thaliana
attttggttcaccagat

SEQ ID NO: 60863 - DNA, 17 bp, Arabidopsis thaliana
attttggttcggcttcg

SEQ ID NO: 60864 - DNA, 17 bp, Arabidopsis thaliana
attttgtactagataag

SEQ ID NO: 60865 - DNA, 17 bp, Arabidopsis thaliana
attttgtagcctcagcc

SEQ ID NO: 60866 - DNA, 17 bp, Arabidopsis thaliana
attttgtcctctccaag

SEQ ID NO: 60867 - DNA, 17 bp, Arabidopsis thaliana
attttgtcgctaagatt

SEQ ID NO: 60868 - DNA, 17 bp, Arabidopsis thaliana
attttgtgaatgtcgac

SEQ ID NO: 60869 - DNA, 17 bp, Arabidopsis thaliana
attttgtgattgacccg

SEQ ID NO: 60870 - DNA, 17 bp, Arabidopsis thaliana
attttgtgccaccgtct

SEQ ID NO: 60871 - DNA, 17 bp, Arabidopsis thaliana
attttgtgccatcttcg

SEQ ID NO: 60872 - DNA, 17 bp, Arabidopsis thaliana
attttgtgcgacagatt

SEQ ID NO: 60873 - DNA, 17 bp, Arabidopsis thaliana
attttgtgctgcctcgt

SEQ ID NO: 60874 - DNA, 17 bp, Arabidopsis thaliana
attttgtgtaaccctgc

SEQ ID NO: 60875 - DNA, 17 bp, Arabidopsis thaliana
attttgtgtgaaacggc

SEQ ID NO: 60876 - DNA, 17 bp, Arabidopsis thaliana
attttgtgttgcctcgt

SEQ ID NO: 60877 - DNA, 17 bp, Arabidopsis thaliana
attttgtgttgtgctgc

SEQ ID NO: 60878 - DNA, 17 bp, Arabidopsis thaliana
attttgtgtttaaccgc

SEQ ID NO: 60879 - DNA, 17 bp, Arabidopsis thaliana
attttgtgtttaactcc

SEQ ID NO: 60880 - DNA, 17 bp, Arabidopsis thaliana
attttgttacagtttgc

SEQ ID NO: 60881 - DNA, 17 bp, Arabidopsis thaliana
attttgttatggctaaa

SEQ ID NO: 60882 - DNA, 17 bp, Arabidopsis thaliana
attttgttcaaattcgg

SEQ ID NO: 60883 - DNA, 17 bp, Arabidopsis thaliana
attttgttcaaatttgg

SEQ ID NO: 60884 - DNA, 17 bp, Arabidopsis thaliana
attttgttgaacctact

SEQ ID NO: 60885 - DNA, 17 bp, Arabidopsis thaliana
attttgttttcggggtt

SEQ ID NO: 60886 - DNA, 17 bp, Arabidopsis thaliana
attttgttttctggggt

SEQ ID NO: 60887 - DNA, 17 bp, Arabidopsis thaliana
attttgttttctgggtt

SEQ ID NO: 60888 - DNA, 17 bp, Arabidopsis thaliana
attttgttttgtttctt

SEQ ID NO: 60889 - DNA, 17 bp, Arabidopsis thaliana
atttttacgatttcgct

SEQ ID NO: 60890 - DNA, 17 bp, Arabidopsis thaliana
atttttactgtaacatg

SEQ ID NO: 60891 - DNA, 17 bp, Arabidopsis thaliana
atttttagaccgtgagg

SEQ ID NO: 60892 - DNA, 17 bp, Arabidopsis thaliana
atttttaggtccaagcc

SEQ ID NO: 60893 - DNA, 17 bp, Arabidopsis thaliana
atttttatcattggtga

SEQ ID NO: 60894 - DNA, 17 bp, Arabidopsis thaliana
atttttattggaccgtt

SEQ ID NO: 60895 - DNA, 17 bp, Arabidopsis thaliana
atttttcaaggttcgca

SEQ ID NO: 60896 - DNA, 17 bp, Arabidopsis thaliana
atttttcacccggatag

SEQ ID NO: 60897 - DNA, 17 bp, Arabidopsis thaliana
atttttcagaccattgt

SEQ ID NO: 60898 - DNA, 17 bp, Arabidopsis thaliana
atttttcagaggtttcg

SEQ ID NO: 60899 - DNA, 17 bp, Arabidopsis thaliana
atttttcaggtggaggt

SEQ ID NO: 60900 - DNA, 17 bp, Arabidopsis thaliana
atttttcagttggaccg

SEQ ID NO: 60901 - DNA, 17 bp, Arabidopsis thaliana
atttttcatacagttcg

SEQ ID NO: 60902 - DNA, 17 bp, Arabidopsis thaliana
atttttcatggcttaga

SEQ ID NO: 60903 - DNA, 17 bp, Arabidopsis thaliana
atttttccaggctttat

SEQ ID NO: 60904 - DNA, 17 bp, Arabidopsis thaliana
atttttccatctgggat

SEQ ID NO: 60905 - DNA, 17 bp, Arabidopsis thaliana
atttttccattctgaga

SEQ ID NO: 60906 - DNA, 17 bp, Arabidopsis thaliana
atttttcccgatcgcat

SEQ ID NO: 60907 - DNA, 17 bp, Arabidopsis thaliana
atttttcccgcctaaaa

SEQ ID NO: 60908 - DNA, 17 bp, Arabidopsis thaliana
atttttccctcacgtac

SEQ ID NO: 60909 - DNA, 17 bp, Arabidopsis thaliana
atttttccgacaaagtg

SEQ ID NO: 60910 - DNA, 17 bp, Arabidopsis thaliana
atttttccgccaaaaac

SEQ ID NO: 60911 - DNA, 17 bp, Arabidopsis thaliana
atttttccgccaaaaat

SEQ ID NO: 60912 - DNA, 17 bp, Arabidopsis thaliana
atttttccgctgccggg

SEQ ID NO: 60913 - DNA, 17 bp, Arabidopsis thaliana
atttttccggatatccg

SEQ ID NO: 60914 - DNA, 17 bp, Arabidopsis thaliana
atttttcctctcgatcg

SEQ ID NO: 60915 - DNA, 17 bp, Arabidopsis thaliana
atttttcgatgtgggac

SEQ ID NO: 60916 - DNA, 17 bp, Arabidopsis thaliana
atttttcggccactgaa

SEQ ID NO: 60917 - DNA, 17 bp, Arabidopsis thaliana
atttttcgggcattttc

SEQ ID NO: 60918 - DNA, 17 bp, Arabidopsis thaliana
atttttcgtgccaaact

SEQ ID NO: 60919 - DNA, 17 bp, Arabidopsis thaliana
atttttcgtgccaaatt

SEQ ID NO: 60920 - DNA, 17 bp, Arabidopsis thaliana
atttttcgtgtgcaggc

SEQ ID NO: 60921 - DNA, 17 bp, Arabidopsis thaliana
atttttcgttaagacgg

SEQ ID NO: 60922 - DNA, 17 bp, Arabidopsis thaliana
atttttcgttggaccgt

SEQ ID NO: 60923 - DNA, 17 bp, Arabidopsis thaliana
atttttctaagcgatgt

SEQ ID NO: 60924 - DNA, 17 bp, Arabidopsis thaliana
atttttctatgctcttg

SEQ ID NO: 60925 - DNA, 17 bp, Arabidopsis thaliana
atttttctcctgctgct

SEQ ID NO: 60926 - DNA, 17 bp, Arabidopsis thaliana
atttttctcgacgattt

SEQ ID NO: 60927 - DNA, 17 bp, Arabidopsis thaliana
atttttctctgatccag

SEQ ID NO: 60928 - DNA, 17 bp, Arabidopsis thaliana
atttttcttctaaggcc

SEQ ID NO: 60929 - DNA, 17 bp, Arabidopsis thaliana
atttttcttggcgatat

SEQ ID NO: 60930 - DNA, 17 bp, Arabidopsis thaliana
atttttgaaggcagact

SEQ ID NO: 60931 - DNA, 17 bp, Arabidopsis thaliana
atttttgacatatgcgc

SEQ ID NO: 60932 - DNA, 17 bp, Arabidopsis thaliana
atttttgactcgtttga

SEQ ID NO: 60933 - DNA, 17 bp, Arabidopsis thaliana
atttttgactgaatcat

SEQ ID NO: 60934 - DNA, 17 bp, Arabidopsis thaliana
atttttgacttgcggtt

SEQ ID NO: 60935 - DNA, 17 bp, Arabidopsis thaliana
atttttgagcgcggact

SEQ ID NO: 60936 - DNA, 17 bp, Arabidopsis thaliana
atttttgatcgccacac

SEQ ID NO: 60937 - DNA, 17 bp, Arabidopsis thaliana
atttttgatgacccgtc

SEQ ID NO: 60938 - DNA, 17 bp, Arabidopsis thaliana
atttttgatttggacag

SEQ ID NO: 60939 - DNA, 17 bp, Arabidopsis thaliana
atttttgatttggacat

SEQ ID NO: 60940 - DNA, 17 bp, Arabidopsis thaliana
atttttgcagagatctt

SEQ ID NO: 60941 - DNA, 17 bp, Arabidopsis thaliana
atttttgcagccactta

SEQ ID NO: 60942 - DNA, 17 bp, Arabidopsis thaliana
atttttgcagccacttt

SEQ ID NO: 60943 - DNA, 17 bp, Arabidopsis thaliana
atttttgcagccatttt

SEQ ID NO: 60944 - DNA, 17 bp, Arabidopsis thaliana
atttttgcgatttagcg

SEQ ID NO: 60945 - DNA, 17 bp, Arabidopsis thaliana
atttttgctggtgttgt

SEQ ID NO: 60946 - DNA, 17 bp, Arabidopsis thaliana
atttttgcttagattga

SEQ ID NO: 60947 - DNA, 17 bp, Arabidopsis thaliana
atttttggatcgaggga

SEQ ID NO: 60948 - DNA, 17 bp, Arabidopsis thaliana
atttttggatgtcagcg

SEQ ID NO: 60949 - DNA, 17 bp, Arabidopsis thaliana
atttttggcccaaaatg

SEQ ID NO: 60950 - DNA, 17 bp, Arabidopsis thaliana
atttttggctaaatatt

SEQ ID NO: 60951 - DNA, 17 bp, Arabidopsis thaliana
atttttgggtgtgttgg

SEQ ID NO: 60952 - DNA, 17 bp, Arabidopsis thaliana
atttttggtgagccgcc

SEQ ID NO: 60953 - DNA, 17 bp, Arabidopsis thaliana
atttttggtggttcagt

SEQ ID NO: 60954 - DNA, 17 bp, Arabidopsis thaliana
atttttggttttcggat

SEQ ID NO: 60955 - DNA, 17 bp, Arabidopsis thaliana
atttttgtaagaccgcg

SEQ ID NO: 60956 - DNA, 17 bp, Arabidopsis thaliana
atttttgtatcttacac

SEQ ID NO: 60957 - DNA, 17 bp, Arabidopsis thaliana
atttttgtattcttgct

SEQ ID NO: 60958 - DNA, 17 bp, Arabidopsis thaliana
atttttgtccgtctaga

SEQ ID NO: 60959 - DNA, 17 bp, Arabidopsis thaliana
atttttgtgcgttctga

SEQ ID NO: 60960 - DNA, 17 bp, Arabidopsis thaliana
atttttgtgtgaactag

SEQ ID NO: 60961 - DNA, 17 bp, Arabidopsis thaliana
atttttgttgcggcccg

SEQ ID NO: 60962 - DNA, 17 bp, Arabidopsis thaliana
atttttgtttcaaaatg

SEQ ID NO: 60963 - DNA, 17 bp, Arabidopsis thaliana
attttttaaccgctgca

SEQ ID NO: 60964 - DNA, 17 bp, Arabidopsis thaliana
attttttacaatggctg

SEQ ID NO: 60965 - DNA, 17 bp, Arabidopsis thaliana
attttttacactggtcc

SEQ ID NO: 60966 - DNA, 17 bp, Arabidopsis thaliana
attttttacttcaagct

SEQ ID NO: 60967 - DNA, 17 bp, Arabidopsis thaliana
attttttccatcggcca

SEQ ID NO: 60968 - DNA, 17 bp, Arabidopsis thaliana
attttttccatctgcca

SEQ ID NO: 60969 - DNA, 17 bp, Arabidopsis thaliana
attttttccgctgcgtc

SEQ ID NO: 60970 - DNA, 17 bp, Arabidopsis thaliana
attttttcgtcggagcg

SEQ ID NO: 60971 - DNA, 17 bp, Arabidopsis thaliana
attttttctcagcgacc

SEQ ID NO: 60972 - DNA, 17 bp, Arabidopsis thaliana
attttttctcgccgcag

SEQ ID NO: 60973 - DNA, 17 bp, Arabidopsis thaliana
attttttctctcgatcg

SEQ ID NO: 60974 - DNA, 17 bp, Arabidopsis thaliana
attttttctcttgtatt

SEQ ID NO: 60975 - DNA, 17 bp, Arabidopsis thaliana
attttttctgtaggcgg

SEQ ID NO: 60976 - DNA, 17 bp, Arabidopsis thaliana
attttttctttgcccat

SEQ ID NO: 60977 - DNA, 17 bp, Arabidopsis thaliana
attttttgatgtgtcct

SEQ ID NO: 60978 - DNA, 17 bp, Arabidopsis thaliana
attttttgcccaacgtg

SEQ ID NO: 60979 - DNA, 17 bp, Arabidopsis thaliana
attttttgccgttgtct

SEQ ID NO: 60980 - DNA, 17 bp, Arabidopsis thaliana
attttttgctcctgaaa

SEQ ID NO: 60981 - DNA, 17 bp, Arabidopsis thaliana
attttttggcttgctta

SEQ ID NO: 60982 - DNA, 17 bp, Arabidopsis thaliana
attttttggtcggccaa

SEQ ID NO: 60983 - DNA, 17 bp, Arabidopsis thaliana
attttttggttaggtgg

SEQ ID NO: 60984 - DNA, 17 bp, Arabidopsis thaliana
attttttgtcgacggga

SEQ ID NO: 60985 - DNA, 17 bp, Arabidopsis thaliana
attttttgtgcattgca

SEQ ID NO: 60986 - DNA, 17 bp, Arabidopsis thaliana
attttttgtgtttagct

SEQ ID NO: 60987 - DNA, 17 bp, Arabidopsis thaliana
attttttgttgctcgac

SEQ ID NO: 60988 - DNA, 17 bp, Arabidopsis thaliana
atttttttacccgtccc

SEQ ID NO: 60989 - DNA, 17 bp, Arabidopsis thaliana
atttttttcctcaaggg

SEQ ID NO: 60990 - DNA, 17 bp, Arabidopsis thaliana
atttttttcctgtcaaa

SEQ ID NO: 60991 - DNA, 17 bp, Arabidopsis thaliana
atttttttctcttcatt

SEQ ID NO: 60992 - DNA, 17 bp, Arabidopsis thaliana
atttttttgcttcgtcg

SEQ ID NO: 60993 - DNA, 17 bp, Arabidopsis thaliana
atttttttgtgcaatga

SEQ ID NO: 60994 - DNA, 17 bp, Arabidopsis thaliana
attttttttctctcctc

SEQ ID NO: 60995 - DNA, 17 bp, Arabidopsis thaliana
attttttttggtccaga

SEQ ID NO: 60996 - DNA, 17 bp, Arabidopsis thaliana
attttttttggtccgga

SEQ ID NO: 60997 - DNA, 17 bp, Arabidopsis thaliana
atttttttttcgcatat

SEQ ID NO: 60998 - DNA, 17 bp, Arabidopsis thaliana
atttttttttggcttga

SEQ ID NO: 60999 - DNA, 17 bp, Arabidopsis thaliana
caaaaaactcgatctat

SEQ ID NO: 61000 - DNA, 17 bp, Arabidopsis thaliana
caaaaaagatgtggact

SEQ ID NO: 61001 - DNA, 17 bp, Arabidopsis thaliana
caaaaaatctgaaaata

SEQ ID NO: 61002 - DNA, 17 bp, Arabidopsis thaliana
caaaaaatctgaaggtc

SEQ ID NO: 61003 - DNA, 17 bp, Arabidopsis thaliana
caaaaaatgtgctgact

SEQ ID NO: 61004 - DNA, 17 bp, Arabidopsis thaliana
caaaaacagagcttctt

SEQ ID NO: 61005 - DNA, 17 bp, Arabidopsis thaliana
caaaaacaggcggatca

SEQ ID NO: 61006 - DNA, 17 bp, Arabidopsis thaliana
caaaaaccacatgatgt

SEQ ID NO: 61007 - DNA, 17 bp, Arabidopsis thaliana
caaaaacccatctgagt

SEQ ID NO: 61008 - DNA, 17 bp, Arabidopsis thaliana
caaaaacccgtgatttt

SEQ ID NO: 61009 - DNA, 17 bp, Arabidopsis thaliana
caaaaaccctgcgacgt

SEQ ID NO: 61010 - DNA, 17 bp, Arabidopsis thaliana
caaaaaccgtgttttca

SEQ ID NO: 61011 - DNA, 17 bp, Arabidopsis thaliana
caaaaacctatcacgat

SEQ ID NO: 61012 - DNA, 17 bp, Arabidopsis thaliana
caaaaacctccaacgtt

SEQ ID NO: 61013 - DNA, 17 bp, Arabidopsis thaliana
caaaaacgaaaagattc

SEQ ID NO: 61014 - DNA, 17 bp, Arabidopsis thaliana
caaaaacgatgcctagg

SEQ ID NO: 61015 - DNA, 17 bp, Arabidopsis thaliana
caaaaacgatggtgtgg

SEQ ID NO: 61016 - DNA, 17 bp, Arabidopsis thaliana
caaaaacgccggaccgc

SEQ ID NO: 61017 - DNA, 17 bp, Arabidopsis thaliana
caaaaacggtttgcaga

SEQ ID NO: 61018 - DNA, 17 bp, Arabidopsis thaliana
caaaaacgtggagagac

SEQ ID NO: 61019 - DNA, 17 bp, Arabidopsis thaliana
caaaaacgttggaccgg

SEQ ID NO: 61020 - DNA, 17 bp, Arabidopsis thaliana
caaaaactgagctgtcc

SEQ ID NO: 61021 - DNA, 17 bp, Arabidopsis thaliana
caaaaactgggtgattg

SEQ ID NO: 61022 - DNA, 17 bp, Arabidopsis thaliana
caaaaagacttgggccg

SEQ ID NO: 61023 - DNA, 17 bp, Arabidopsis thaliana
caaaaagatggcaaagt

SEQ ID NO: 61024 - DNA, 17 bp, Arabidopsis thaliana
caaaaagctttaccgcc

SEQ ID NO: 61025 - DNA, 17 bp, Arabidopsis thaliana
caaaaagctttaccggc

SEQ ID NO: 61026 - DNA, 17 bp, Arabidopsis thaliana
caaaaaggctagtgagc

SEQ ID NO: 61027 - DNA, 17 bp, Arabidopsis thaliana
caaaaagggattgtgac

SEQ ID NO: 61028 - DNA, 17 bp, Arabidopsis thaliana
caaaaagtgtaacagtg

SEQ ID NO: 61029 - DNA, 17 bp, Arabidopsis thaliana
caaaaataaacatccac

SEQ ID NO: 61030 - DNA, 17 bp, Arabidopsis thaliana
caaaaatatctgcaaat

SEQ ID NO: 61031 - DNA, 17 bp, Arabidopsis thaliana
caaaaatcctagaattg

SEQ ID NO: 61032 - DNA, 17 bp, Arabidopsis thaliana
caaaaatcggcggggga

SEQ ID NO: 61033 - DNA, 17 bp, Arabidopsis thaliana
caaaaatctggttgcgg

SEQ ID NO: 61034 - DNA, 17 bp, Arabidopsis thaliana
caaaaatgcaggtggcc

SEQ ID NO: 61035 - DNA, 17 bp, Arabidopsis thaliana
caaaaattcatcagcga

SEQ ID NO: 61036 - DNA, 17 bp, Arabidopsis thaliana
caaaaattctgttgcgt

SEQ ID NO: 61037 - DNA, 17 bp, Arabidopsis thaliana
caaaaattgagacttat

SEQ ID NO: 61038 - DNA, 17 bp, Arabidopsis thaliana
caaaaattgcgatgatc

SEQ ID NO: 61039 - DNA, 17 bp, Arabidopsis thaliana
caaaaatttgaccgttc

SEQ ID NO: 61040 - DNA, 17 bp, Arabidopsis thaliana
caaaaattttacgtgcg

SEQ ID NO: 61041 - DNA, 17 bp, Arabidopsis thaliana
caaaacaaagcattgcg

SEQ ID NO: 61042 - DNA, 17 bp, Arabidopsis thaliana
caaaacaacaagctgaa

SEQ ID NO: 61043 - DNA, 17 bp, Arabidopsis thaliana
caaaacaactttctcac

SEQ ID NO: 61044 - DNA, 17 bp, Arabidopsis thaliana
caaaacactttgtcctg

SEQ ID NO: 61045 - DNA, 17 bp, Arabidopsis thaliana
caaaacagaagcagatc

SEQ ID NO: 61046 - DNA, 17 bp, Arabidopsis thaliana
caaaacagcctcgagtg

SEQ ID NO: 61047 - DNA, 17 bp, Arabidopsis thaliana
caaaacagcttcgagtg

SEQ ID NO: 61048 - DNA, 17 bp, Arabidopsis thaliana
caaaacaggtttttagt

SEQ ID NO: 61049 - DNA, 17 bp, Arabidopsis thaliana
caaaacagtcgctaggt

SEQ ID NO: 61050 - DNA, 17 bp, Arabidopsis thaliana
caaaacagtttgtgcta

SEQ ID NO: 61051 - DNA, 17 bp, Arabidopsis thaliana
caaaacatatgtgagcg

SEQ ID NO: 61052 - DNA, 17 bp, Arabidopsis thaliana
caaaaccagcagggata

SEQ ID NO: 61053 - DNA, 17 bp, Arabidopsis thaliana
caaaacccatagcaatt

SEQ ID NO: 61054 - DNA, 17 bp, Arabidopsis thaliana
caaaaccgattaatccg

SEQ ID NO: 61055 - DNA, 17 bp, Arabidopsis thaliana
caaaaccgctagaaact

SEQ ID NO: 61056 - DNA, 17 bp, Arabidopsis thaliana
caaaaccggtaatccct

SEQ ID NO: 61057 - DNA, 17 bp, Arabidopsis thaliana
caaaaccggtggcttaa

SEQ ID NO: 61058 - DNA, 17 bp, Arabidopsis thaliana
caaaaccgtatcgcaac

SEQ ID NO: 61059 - DNA, 17 bp, Arabidopsis thaliana
caaaaccgtctacagtg

SEQ ID NO: 61060 - DNA, 17 bp, Arabidopsis thaliana
caaaaccgtgtatggac

SEQ ID NO: 61061 - DNA, 17 bp, Arabidopsis thaliana
caaaacctgttattgct

SEQ ID NO: 61062 - DNA, 17 bp, Arabidopsis thaliana
caaaacgacggtgatgt

SEQ ID NO: 61063 - DNA, 17 bp, Arabidopsis thaliana
caaaacgactctcggca

SEQ ID NO: 61064 - DNA, 17 bp, Arabidopsis thaliana
caaaacgatgacgacag

SEQ ID NO: 61065 - DNA, 17 bp, Arabidopsis thaliana
caaaacgcctagggtgc

SEQ ID NO: 61066 - DNA, 17 bp, Arabidopsis thaliana
caaaacgggatcgatcg

SEQ ID NO: 61067 - DNA, 17 bp, Arabidopsis thaliana
caaaacgggctaagaat

SEQ ID NO: 61068 - DNA, 17 bp, Arabidopsis thaliana
caaaacgtttacagtgg

SEQ ID NO: 61069 - DNA, 17 bp, Arabidopsis thaliana
caaaactaactgctgtg

SEQ ID NO: 61070 - DNA, 17 bp, Arabidopsis thaliana
caaaactaccaacaaag

SEQ ID NO: 61071 - DNA, 17 bp, Arabidopsis thaliana
caaaactacttgtggct

SEQ ID NO: 61072 - DNA, 17 bp, Arabidopsis thaliana
caaaactatctcgggtt

SEQ ID NO: 61073 - DNA, 17 bp, Arabidopsis thaliana
caaaactcagagtgcct

SEQ ID NO: 61074 - DNA, 17 bp, Arabidopsis thaliana
caaaactcggagaaaat

SEQ ID NO: 61075 - DNA, 17 bp, Arabidopsis thaliana
caaaactctcaaggacc

SEQ ID NO: 61076 - DNA, 17 bp, Arabidopsis thaliana
caaaactgcacttgttc

SEQ ID NO: 61077 - DNA, 17 bp, Arabidopsis thaliana
caaaactggtggtggcg

SEQ ID NO: 61078 - DNA, 17 bp, Arabidopsis thaliana
caaaactggttcggtcg

SEQ ID NO: 61079 - DNA, 17 bp, Arabidopsis thaliana
caaaactggtttgcatg

SEQ ID NO: 61080 - DNA, 17 bp, Arabidopsis thaliana
caaaactgtcaagttga

SEQ ID NO: 61081 - DNA, 17 bp, Arabidopsis thaliana
caaaactgtggactgcg

SEQ ID NO: 61082 - DNA, 17 bp, Arabidopsis thaliana
caaaacttgccaaccat

SEQ ID NO: 61083 - DNA, 17 bp, Arabidopsis thaliana
caaaacttgctcactaa

SEQ ID NO: 61084 - DNA, 17 bp, Arabidopsis thaliana
caaaactttccctacta

SEQ ID NO: 61085 - DNA, 17 bp, Arabidopsis thaliana
caaaactttgcgaattc

SEQ ID NO: 61086 - DNA, 17 bp, Arabidopsis thaliana
caaaagaaaccgatcga

SEQ ID NO: 61087 - DNA, 17 bp, Arabidopsis thaliana
caaaagaacgtccaggg

SEQ ID NO: 61088 - DNA, 17 bp, Arabidopsis thaliana
caaaagaagatcctaac

SEQ ID NO: 61089 - DNA, 17 bp, Arabidopsis thaliana
caaaagacgaatgctcc

SEQ ID NO: 61090 - DNA, 17 bp, Arabidopsis thaliana
caaaagacgaccgtgag

SEQ ID NO: 61091 - DNA, 17 bp, Arabidopsis thaliana
caaaagactgcgctagg

SEQ ID NO: 61092 - DNA, 17 bp, Arabidopsis thaliana
caaaagactggacacca

SEQ ID NO: 61093 - DNA, 17 bp, Arabidopsis thaliana
caaaagagaaggcactt

SEQ ID NO: 61094 - DNA, 17 bp, Arabidopsis thaliana
caaaagagcgggagaac

SEQ ID NO: 61095 - DNA, 17 bp, Arabidopsis thaliana
caaaagatccatagcgg

SEQ ID NO: 61096 - DNA, 17 bp, Arabidopsis thaliana
caaaagatctggtgatg

SEQ ID NO: 61097 - DNA, 17 bp, Arabidopsis thaliana
caaaagatgtgcgatca

SEQ ID NO: 61098 - DNA, 17 bp, Arabidopsis thaliana
caaaagatttaaggatg

SEQ ID NO: 61099 - DNA, 17 bp, Arabidopsis thaliana
caaaagcaacatgcgat

SEQ ID NO: 61100 - DNA, 17 bp, Arabidopsis thaliana
caaaagcaccattggcg

SEQ ID NO: 61101 - DNA, 17 bp, Arabidopsis thaliana
caaaagcagtccacatc

SEQ ID NO: 61102 - DNA, 17 bp, Arabidopsis thaliana
caaaagccattcaggaa

SEQ ID NO: 61103 - DNA, 17 bp, Arabidopsis thaliana
caaaagcccgaagcaaa

SEQ ID NO: 61104 - DNA, 17 bp, Arabidopsis thaliana
caaaagcggacggttgc

SEQ ID NO: 61105 - DNA, 17 bp, Arabidopsis thaliana
caaaagcgtttcgtctt

SEQ ID NO: 61106 - DNA, 17 bp, Arabidopsis thaliana
caaaagctagaccttgg

SEQ ID NO: 61107 - DNA, 17 bp, Arabidopsis thaliana
caaaagctccttcccgc

SEQ ID NO: 61108 - DNA, 17 bp, Arabidopsis thaliana
caaaagcttcatcgcaa

SEQ ID NO: 61109 - DNA, 17 bp, Arabidopsis thaliana
caaaaggaagctatcga

SEQ ID NO: 61110 - DNA, 17 bp, Arabidopsis thaliana
caaaaggaccatgggct

SEQ ID NO: 61111 - DNA, 17 bp, Arabidopsis thaliana
caaaaggacttgctctt

SEQ ID NO: 61112 - DNA, 17 bp, Arabidopsis thaliana
caaaaggacttgttgtt

SEQ ID NO: 61113 - DNA, 17 bp, Arabidopsis thaliana
caaaaggattcgaagaa

SEQ ID NO: 61114 - DNA, 17 bp, Arabidopsis thaliana
caaaaggcttcctctag

SEQ ID NO: 61115 - DNA, 17 bp, Arabidopsis thaliana
caaaaggcttggacgga

SEQ ID NO: 61116 - DNA, 17 bp, Arabidopsis thaliana
caaaagggcgtccgacg

SEQ ID NO: 61117 - DNA, 17 bp, Arabidopsis thaliana
caaaagggttggtgact

SEQ ID NO: 61118 - DNA, 17 bp, Arabidopsis thaliana
caaaaggtcctttactg

SEQ ID NO: 61119 - DNA, 17 bp, Arabidopsis thaliana
caaaagtacgtccaggg

SEQ ID NO: 61120 - DNA, 17 bp, Arabidopsis thaliana
caaaagtcaaagtgacc

SEQ ID NO: 61121 - DNA, 17 bp, Arabidopsis thaliana
caaaagtccgaacactg

SEQ ID NO: 61122 - DNA, 17 bp, Arabidopsis thaliana
caaaagtccggacactg

SEQ ID NO: 61123 - DNA, 17 bp, Arabidopsis thaliana
caaaagtccgggggtga

SEQ ID NO: 61124 - DNA, 17 bp, Arabidopsis thaliana
caaaagtccgggtgtaa

SEQ ID NO: 61125 - DNA, 17 bp, Arabidopsis thaliana
caaaagtccgggtgtga

SEQ ID NO: 61126 - DNA, 17 bp, Arabidopsis thaliana
caaaagtcgtctgcatg

SEQ ID NO: 61127 - DNA, 17 bp, Arabidopsis thaliana
caaaagtctgcacgtgt

SEQ ID NO: 61128 - DNA, 17 bp, Arabidopsis thaliana
caaaagtctgtcaccaa

SEQ ID NO: 61129 - DNA, 17 bp, Arabidopsis thaliana
caaaagtgacatgaagc

SEQ ID NO: 61130 - DNA, 17 bp, Arabidopsis thaliana
caaaagtgactaatttg

SEQ ID NO: 61131 - DNA, 17 bp, Arabidopsis thaliana
caaaagtgactacatcg

SEQ ID NO: 61132 - DNA, 17 bp, Arabidopsis thaliana
caaaagtggcttggtct

SEQ ID NO: 61133 - DNA, 17 bp, Arabidopsis thaliana
caaaagtgtacctaaca

SEQ ID NO: 61134 - DNA, 17 bp, Arabidopsis thaliana
caaaagtgttgtggatg

SEQ ID NO: 61135 - DNA, 17 bp, Arabidopsis thaliana
caaaagttacagctgca

SEQ ID NO: 61136 - DNA, 17 bp, Arabidopsis thaliana
caaaagttcacggttaa

SEQ ID NO: 61137 - DNA, 17 bp, Arabidopsis thaliana
caaaagttctaccattt

SEQ ID NO: 61138 - DNA, 17 bp, Arabidopsis thaliana
caaaagttgtaagtctc

SEQ ID NO: 61139 - DNA, 17 bp, Arabidopsis thaliana
caaaagttgttcgtttg

SEQ ID NO: 61140 - DNA, 17 bp, Arabidopsis thaliana
caaaagttgtttgtttg

SEQ ID NO: 61141 - DNA, 17 bp, Arabidopsis thaliana
caaaagtttggacgttt

SEQ ID NO: 61142 - DNA, 17 bp, Arabidopsis thaliana
caaaagtttgtcttgtc

SEQ ID NO: 61143 - DNA, 17 bp, Arabidopsis thaliana
caaaagtttgtcttgtg

SEQ ID NO: 61144 - DNA, 17 bp, Arabidopsis thaliana
caaaagtttttgtgtga

SEQ ID NO: 61145 - DNA, 17 bp, Arabidopsis thaliana
caaaataaatgatccaa

SEQ ID NO: 61146 - DNA, 17 bp, Arabidopsis thaliana
caaaataaccatggacc

SEQ ID NO: 61147 - DNA, 17 bp, Arabidopsis thaliana
caaaataactatgggcc

SEQ ID NO: 61148 - DNA, 17 bp, Arabidopsis thaliana
caaaatacccgacccga

SEQ ID NO: 61149 - DNA, 17 bp, Arabidopsis thaliana
caaaatacggggatgac

SEQ ID NO: 61150 - DNA, 17 bp, Arabidopsis thaliana
caaaatactgcgcatta

SEQ ID NO: 61151 - DNA, 17 bp, Arabidopsis thaliana
caaaatagccatggtgt

SEQ ID NO: 61152 - DNA, 17 bp, Arabidopsis thaliana
caaaatagtcccacggt

SEQ ID NO: 61153 - DNA, 17 bp, Arabidopsis thaliana
caaaatatctccaaggt

SEQ ID NO: 61154 - DNA, 17 bp, Arabidopsis thaliana
caaaatcacaagtcact

SEQ ID NO: 61155 - DNA, 17 bp, Arabidopsis thaliana
caaaatcactctctcct

SEQ ID NO: 61156 - DNA, 17 bp, Arabidopsis thaliana
caaaatcaggatcatct

SEQ ID NO: 61157 - DNA, 17 bp, Arabidopsis thaliana
caaaatcagtagggttg

SEQ ID NO: 61158 - DNA, 17 bp, Arabidopsis thaliana
caaaatcattgccgcta

SEQ ID NO: 61159 - DNA, 17 bp, Arabidopsis thaliana
caaaatcgcaggggtaa

SEQ ID NO: 61160 - DNA, 17 bp, Arabidopsis thaliana
caaaatcggttaagatt

SEQ ID NO: 61161 - DNA, 17 bp, Arabidopsis thaliana
caaaatcgtcccgccaa

SEQ ID NO: 61162 - DNA, 17 bp, Arabidopsis thaliana
caaaatcgtcccgtcaa

SEQ ID NO: 61163 - DNA, 17 bp, Arabidopsis thaliana
caaaatcgtctccaaat

SEQ ID NO: 61164 - DNA, 17 bp, Arabidopsis thaliana
caaaatctacaaaacaa

SEQ ID NO: 61165 - DNA, 17 bp, Arabidopsis thaliana
caaaatctacaaaacag

SEQ ID NO: 61166 - DNA, 17 bp, Arabidopsis thaliana
caaaatctatagtcgga

SEQ ID NO: 61167 - DNA, 17 bp, Arabidopsis thaliana
caaaatctcggatatct

SEQ ID NO: 61168 - DNA, 17 bp, Arabidopsis thaliana
caaaatctgccaggtat

SEQ ID NO: 61169 - DNA, 17 bp, Arabidopsis thaliana
caaaatctggtcatgtg

SEQ ID NO: 61170 - DNA, 17 bp, Arabidopsis thaliana
caaaatctgtagaggac

SEQ ID NO: 61171 - DNA, 17 bp, Arabidopsis thaliana
caaaatctgtatcatct

SEQ ID NO: 61172 - DNA, 17 bp, Arabidopsis thaliana
caaaatgaaatctacag

SEQ ID NO: 61173 - DNA, 17 bp, Arabidopsis thaliana
caaaatgactcttgtgc

SEQ ID NO: 61174 - DNA, 17 bp, Arabidopsis thaliana
caaaatgatgattctgc

SEQ ID NO: 61175 - DNA, 17 bp, Arabidopsis thaliana
caaaatggatccgtaac

SEQ ID NO: 61176 - DNA, 17 bp, Arabidopsis thaliana
caaaatgggaacaggaa

SEQ ID NO: 61177 - DNA, 17 bp, Arabidopsis thaliana
caaaatgggtcaagatt

SEQ ID NO: 61178 - DNA, 17 bp, Arabidopsis thaliana
caaaatggttcccctta

SEQ ID NO: 61179 - DNA, 17 bp, Arabidopsis thaliana
caaaatgtccggaggga

SEQ ID NO: 61180 - DNA, 17 bp, Arabidopsis thaliana
caaaatgtgcaggtcaa

SEQ ID NO: 61181 - DNA, 17 bp, Arabidopsis thaliana
caaaattaccgcatttc

SEQ ID NO: 61182 - DNA, 17 bp, Arabidopsis thaliana
caaaattagtgtggatt

SEQ ID NO: 61183 - DNA, 17 bp, Arabidopsis thaliana
caaaattcgggtcctcc

SEQ ID NO: 61184 - DNA, 17 bp, Arabidopsis thaliana
caaaattggtgtctatt

SEQ ID NO: 61185 - DNA, 17 bp, Arabidopsis thaliana
caaaattgttcttcggg

SEQ ID NO: 61186 - DNA, 17 bp, Arabidopsis thaliana
caaaatttcagggtcta

SEQ ID NO: 61187 - DNA, 17 bp, Arabidopsis thaliana
caaaatttctctaccag

SEQ ID NO: 61188 - DNA, 17 bp, Arabidopsis thaliana
caaaatttctgtagccg

SEQ ID NO: 61189 - DNA, 17 bp, Arabidopsis thaliana
caaaatttgctacagaa

SEQ ID NO: 61190 - DNA, 17 bp, Arabidopsis thaliana
caaaatttggggtcgac

SEQ ID NO: 61191 - DNA, 17 bp, Arabidopsis thaliana
caaaattttgactccat

SEQ ID NO: 61192 - DNA, 17 bp, Arabidopsis thaliana
caaaattttgggtcgac

SEQ ID NO: 61193 - DNA, 17 bp, Arabidopsis thaliana
caaaattttgtggaccg

SEQ ID NO: 61194 - DNA, 17 bp, Arabidopsis thaliana
caaacaaaaaggtgcgt

SEQ ID NO: 61195 - DNA, 17 bp, Arabidopsis thaliana
caaacaaacctgcagat

SEQ ID NO: 61196 - DNA, 17 bp, Arabidopsis thaliana
caaacaaagcattgcga

SEQ ID NO: 61197 - DNA, 17 bp, Arabidopsis thaliana
caaacaaaggggtgtct

SEQ ID NO: 61198 - DNA, 17 bp, Arabidopsis thaliana
caaacaaatagccatca

SEQ ID NO: 61199 - DNA, 17 bp, Arabidopsis thaliana
caaacaaatgtgtcatg

SEQ ID NO: 61200 - DNA, 17 bp, Arabidopsis thaliana
caaacaacttcctcaca

SEQ ID NO: 61201 - DNA, 17 bp, Arabidopsis thaliana
caaacaactttctcaca

SEQ ID NO: 61202 - DNA, 17 bp, Arabidopsis thaliana
caaacaagcatgcgtct

SEQ ID NO: 61203 - DNA, 17 bp, Arabidopsis thaliana
caaacaaggggttagtc

SEQ ID NO: 61204 - DNA, 17 bp, Arabidopsis thaliana
caaacaatgtagtggtc

SEQ ID NO: 61205 - DNA, 17 bp, Arabidopsis thaliana
caaacaattcgccgtca

SEQ ID NO: 61206 - DNA, 17 bp, Arabidopsis thaliana
caaacacaaatggtggc

SEQ ID NO: 61207 - DNA, 17 bp, Arabidopsis thaliana
caaacacgtgctgagct

SEQ ID NO: 61208 - DNA, 17 bp, Arabidopsis thaliana
caaacactaggttcgtc

SEQ ID NO: 61209 - DNA, 17 bp, Arabidopsis thaliana
caaacactcttgttcct

SEQ ID NO: 61210 - DNA, 17 bp, Arabidopsis thaliana
caaacagatgtaccgaa

SEQ ID NO: 61211 - DNA, 17 bp, Arabidopsis thaliana
caaacagcctcgagtga

SEQ ID NO: 61212 - DNA, 17 bp, Arabidopsis thaliana
caaacagcctttgccca

SEQ ID NO: 61213 - DNA, 17 bp, Arabidopsis thaliana
caaacagctctttgctc

SEQ ID NO: 61214 - DNA, 17 bp, Arabidopsis thaliana
caaacagctgtccaaat

SEQ ID NO: 61215 - DNA, 17 bp, Arabidopsis thaliana
caaacagggattggctg

SEQ ID NO: 61216 - DNA, 17 bp, Arabidopsis thaliana
caaacaggttcaccgga

SEQ ID NO: 61217 - DNA, 17 bp, Arabidopsis thaliana
caaacaggttgcgggtg

SEQ ID NO: 61218 - DNA, 17 bp, Arabidopsis thaliana
caaacagtccgcagatg

SEQ ID NO: 61219 - DNA, 17 bp, Arabidopsis thaliana
caaacagtgcgcgttaa

SEQ ID NO: 61220 - DNA, 17 bp, Arabidopsis thaliana
caaacagtggaggcttc

SEQ ID NO: 61221 - DNA, 17 bp, Arabidopsis thaliana
caaacagtggaggcttg

SEQ ID NO: 61222 - DNA, 17 bp, Arabidopsis thaliana
caaacagttttggctca

SEQ ID NO: 61223 - DNA, 17 bp, Arabidopsis thaliana
caaacataggccgtgtt

SEQ ID NO: 61224 - DNA, 17 bp, Arabidopsis thaliana
caaacatcactcgaacc

SEQ ID NO: 61225 - DNA, 17 bp, Arabidopsis thaliana
caaacatcatatggttg

SEQ ID NO: 61226 - DNA, 17 bp, Arabidopsis thaliana
caaacatctgatcgaca

SEQ ID NO: 61227 - DNA, 17 bp, Arabidopsis thaliana
caaacatctttagtttg

SEQ ID NO: 61228 - DNA, 17 bp, Arabidopsis thaliana
caaacatgagctgccta

SEQ ID NO: 61229 - DNA, 17 bp, Arabidopsis thaliana
caaacatggttaacccg

SEQ ID NO: 61230 - DNA, 17 bp, Arabidopsis thaliana
caaacatgtcccctcaa

SEQ ID NO: 61231 - DNA, 17 bp, Arabidopsis thaliana
caaacatgtgcttggcc

SEQ ID NO: 61232 - DNA, 17 bp, Arabidopsis thaliana
caaacattgcaaacgac

SEQ ID NO: 61233 - DNA, 17 bp, Arabidopsis thaliana
caaacattggcattgca

SEQ ID NO: 61234 - DNA, 17 bp, Arabidopsis thaliana
caaacattgttgttgct

SEQ ID NO: 61235 - DNA, 17 bp, Arabidopsis thaliana
caaaccaattgacccac

SEQ ID NO: 61236 - DNA, 17 bp, Arabidopsis thaliana
caaaccacctgcatttc

SEQ ID NO: 61237 - DNA, 17 bp, Arabidopsis thaliana
caaaccagaaggagtgt

SEQ ID NO: 61238 - DNA, 17 bp, Arabidopsis thaliana
caaaccagtctcttaag

SEQ ID NO: 61239 - DNA, 17 bp, Arabidopsis thaliana
caaaccagtggtcgagt

SEQ ID NO: 61240 - DNA, 17 bp, Arabidopsis thaliana
caaaccatagggtctga

SEQ ID NO: 61241 - DNA, 17 bp, Arabidopsis thaliana
caaaccatcggctggcg

SEQ ID NO: 61242 - DNA, 17 bp, Arabidopsis thaliana
caaaccatcttcctcct

SEQ ID NO: 61243 - DNA, 17 bp, Arabidopsis thaliana
caaaccatgagagcaat

SEQ ID NO: 61244 - DNA, 17 bp, Arabidopsis thaliana
caaaccatgtgggtggc

SEQ ID NO: 61245 - DNA, 17 bp, Arabidopsis thaliana
caaaccattacgaacgg

SEQ ID NO: 61246 - DNA, 17 bp, Arabidopsis thaliana
caaaccattttttgcct

SEQ ID NO: 61247 - DNA, 17 bp, Arabidopsis thaliana
caaacccaaagttggtg

SEQ ID NO: 61248 - DNA, 17 bp, Arabidopsis thaliana
caaacccaaatggaccc

SEQ ID NO: 61249 - DNA, 17 bp, Arabidopsis thaliana
caaacccaactagagac

SEQ ID NO: 61250 - DNA, 17 bp, Arabidopsis thaliana
caaacccaactagaggc

SEQ ID NO: 61251 - DNA, 17 bp, Arabidopsis thaliana
caaacccaactggaccc

SEQ ID NO: 61252 - DNA, 17 bp, Arabidopsis thaliana
caaacccaactggatcc

SEQ ID NO: 61253 - DNA, 17 bp, Arabidopsis thaliana
caaacccaactggatct

SEQ ID NO: 61254 - DNA, 17 bp, Arabidopsis thaliana
caaacccaagaaatttc

SEQ ID NO: 61255 - DNA, 17 bp, Arabidopsis thaliana
caaacccaatctatcat

SEQ ID NO: 61256 - DNA, 17 bp, Arabidopsis thaliana
caaacccatcccgccaa

SEQ ID NO: 61257 - DNA, 17 bp, Arabidopsis thaliana
caaaccccacagcagtt

SEQ ID NO: 61258 - DNA, 17 bp, Arabidopsis thaliana
caaaccccactacgctt

SEQ ID NO: 61259 - DNA, 17 bp, Arabidopsis thaliana
caaaccccacttctgac

SEQ ID NO: 61260 - DNA, 17 bp, Arabidopsis thaliana
caaaccccgacttatgg

SEQ ID NO: 61261 - DNA, 17 bp, Arabidopsis thaliana
caaaccccggtagcgga

SEQ ID NO: 61262 - DNA, 17 bp, Arabidopsis thaliana
caaacccctaagcggcg

SEQ ID NO: 61263 - DNA, 17 bp, Arabidopsis thaliana
caaacccctcccgccaa

SEQ ID NO: 61264 - DNA, 17 bp, Arabidopsis thaliana
caaacccgaaatcacag

SEQ ID NO: 61265 - DNA, 17 bp, Arabidopsis thaliana
caaacccgaactcgaat

SEQ ID NO: 61266 - DNA, 17 bp, Arabidopsis thaliana
caaacccgggccaactc

SEQ ID NO: 61267 - DNA, 17 bp, Arabidopsis thaliana
caaacccgggctcagac

SEQ ID NO: 61268 - DNA, 17 bp, Arabidopsis thaliana
caaacccgtaccgccaa

SEQ ID NO: 61269 - DNA, 17 bp, Arabidopsis thaliana
caaacccgtcccgcaaa

SEQ ID NO: 61270 - DNA, 17 bp, Arabidopsis thaliana
caaacccgtcccgccaa

SEQ ID NO: 61271 - DNA, 17 bp, Arabidopsis thaliana
caaacccgtcccgtcaa

SEQ ID NO: 61272 - DNA, 17 bp, Arabidopsis thaliana
caaacccgtccgccaac

SEQ ID NO: 61273 - DNA, 17 bp, Arabidopsis thaliana
caaacccgtccgcccac

SEQ ID NO: 61274 - DNA, 17 bp, Arabidopsis thaliana
caaacccgtcctgccaa

SEQ ID NO: 61275 - DNA, 17 bp, Arabidopsis thaliana
caaacccgtcctgctaa

SEQ ID NO: 61276 - DNA, 17 bp, Arabidopsis thaliana
caaacccgtctcgccaa

SEQ ID NO: 61277 - DNA, 17 bp, Arabidopsis thaliana
caaacccgtcttgccaa

SEQ ID NO: 61278 - DNA, 17 bp, Arabidopsis thaliana
caaacccgttctgtcaa

SEQ ID NO: 61279 - DNA, 17 bp, Arabidopsis thaliana
caaaccctaccggctaa

SEQ ID NO: 61280 - DNA, 17 bp, Arabidopsis thaliana
caaaccctattcccacc

SEQ ID NO: 61281 - DNA, 17 bp, Arabidopsis thaliana
caaaccctgggtgttac

SEQ ID NO: 61282 - DNA, 17 bp, Arabidopsis thaliana
caaaccgacccgaaccc

SEQ ID NO: 61283 - DNA, 17 bp, Arabidopsis thaliana
caaaccgactacaagct

SEQ ID NO: 61284 - DNA, 17 bp, Arabidopsis thaliana
caaaccgagaccttgtg

SEQ ID NO: 61285 - DNA, 17 bp, Arabidopsis thaliana
caaaccgccccaccaat

SEQ ID NO: 61286 - DNA, 17 bp, Arabidopsis thaliana
caaaccgccgcacaccc

SEQ ID NO: 61287 - DNA, 17 bp, Arabidopsis thaliana
caaaccgcgggttaaat

SEQ ID NO: 61288 - DNA, 17 bp, Arabidopsis thaliana
caaaccgcgttcgtggg

SEQ ID NO: 61289 - DNA, 17 bp, Arabidopsis thaliana
caaaccggattaagcat

SEQ ID NO: 61290 - DNA, 17 bp, Arabidopsis thaliana
caaaccgggagaagctt

SEQ ID NO: 61291 - DNA, 17 bp, Arabidopsis thaliana
caaaccgggcactacgg

SEQ ID NO: 61292 - DNA, 17 bp, Arabidopsis thaliana
caaaccggggatgtaac

SEQ ID NO: 61293 - DNA, 17 bp, Arabidopsis thaliana
caaaccgtccatcttga

SEQ ID NO: 61294 - DNA, 17 bp, Arabidopsis thaliana
caaacctaaggctttga

SEQ ID NO: 61295 - DNA, 17 bp, Arabidopsis thaliana
caaacctatggacaaac

SEQ ID NO: 61296 - DNA, 17 bp, Arabidopsis thaliana
caaacctgtcccgccaa

SEQ ID NO: 61297 - DNA, 17 bp, Arabidopsis thaliana
caaaccttatggttcaa

SEQ ID NO: 61298 - DNA, 17 bp, Arabidopsis thaliana
caaaccttcaagtttgc

SEQ ID NO: 61299 - DNA, 17 bp, Arabidopsis thaliana
caaaccttctcgattgc

SEQ ID NO: 61300 - DNA, 17 bp, Arabidopsis thaliana
caaacgaaatatgtggc

SEQ ID NO: 61301 - DNA, 17 bp, Arabidopsis thaliana
caaacgaacagggccga

SEQ ID NO: 61302 - DNA, 17 bp, Arabidopsis thaliana
caaacgaacggctggca

SEQ ID NO: 61303 - DNA, 17 bp, Arabidopsis thaliana
caaacgaactgacctac

SEQ ID NO: 61304 - DNA, 17 bp, Arabidopsis thaliana
caaacgaagtccatttt

SEQ ID NO: 61305 - DNA, 17 bp, Arabidopsis thaliana
caaacgaccaatcggca

SEQ ID NO: 61306 - DNA, 17 bp, Arabidopsis thaliana
caaacgaccacgtacga

SEQ ID NO: 61307 - DNA, 17 bp, Arabidopsis thaliana
caaacgactctcggcaa

SEQ ID NO: 61308 - DNA, 17 bp, Arabidopsis thaliana
caaacgaggaaaggctt

SEQ ID NO: 61309 - DNA, 17 bp, Arabidopsis thaliana
caaacgagttggcccgg

SEQ ID NO: 61310 - DNA, 17 bp, Arabidopsis thaliana
caaacgatcagatgttt

SEQ ID NO: 61311 - DNA, 17 bp, Arabidopsis thaliana
caaacgatccatttggt

SEQ ID NO: 61312 - DNA, 17 bp, Arabidopsis thaliana
caaacgattaggaaagt

SEQ ID NO: 61313 - DNA, 17 bp, Arabidopsis thaliana
caaacgattccgaccag

SEQ ID NO: 61314 - DNA, 17 bp, Arabidopsis thaliana
caaacgattgcggaaaa

SEQ ID NO: 61315 - DNA, 17 bp, Arabidopsis thaliana
caaacgcaaccgtttgg

SEQ ID NO: 61316 - DNA, 17 bp, Arabidopsis thaliana
caaacgcaagccagaga

SEQ ID NO: 61317 - DNA, 17 bp, Arabidopsis thaliana
caaacgcagatttgtgg

SEQ ID NO: 61318 - DNA, 17 bp, Arabidopsis thaliana
caaacgcagcgtttgcg

SEQ ID NO: 61319 - DNA, 17 bp, Arabidopsis thaliana
caaacgcctgacacttt

SEQ ID NO: 61320 - DNA, 17 bp, Arabidopsis thaliana
caaacgcctgacccgac

SEQ ID NO: 61321 - DNA, 17 bp, Arabidopsis thaliana
caaacgcgcacgtagga

SEQ ID NO: 61322 - DNA, 17 bp, Arabidopsis thaliana
caaacgcggattacggt

SEQ ID NO: 61323 - DNA, 17 bp, Arabidopsis thaliana
caaacgcggatttgtgg

SEQ ID NO: 61324 - DNA, 17 bp, Arabidopsis thaliana
caaacgcgttcagttaa

SEQ ID NO: 61325 - DNA, 17 bp, Arabidopsis thaliana
caaacgctcaaaccgca

SEQ ID NO: 61326 - DNA, 17 bp, Arabidopsis thaliana
caaacgctgcgtttatg

SEQ ID NO: 61327 - DNA, 17 bp, Arabidopsis thaliana
caaacgctgcgtttgcg

SEQ ID NO: 61328 - DNA, 17 bp, Arabidopsis thaliana
caaacgctgggacaaca

SEQ ID NO: 61329 - DNA, 17 bp, Arabidopsis thaliana
caaacgcttgcggaaag

SEQ ID NO: 61330 - DNA, 17 bp, Arabidopsis thaliana
caaacggaccattcccg

SEQ ID NO: 61331 - DNA, 17 bp, Arabidopsis thaliana
caaacggagttgagttc

SEQ ID NO: 61332 - DNA, 17 bp, Arabidopsis thaliana
caaacggccacatacga

SEQ ID NO: 61333 - DNA, 17 bp, Arabidopsis thaliana
caaacggcccccccccc

SEQ ID NO: 61334 - DNA, 17 bp, Arabidopsis thaliana
caaacggcctgagtact

SEQ ID NO: 61335 - DNA, 17 bp, Arabidopsis thaliana
caaacggcgaggcggca

SEQ ID NO: 61336 - DNA, 17 bp, Arabidopsis thaliana
caaacgggaaaacgtcc

SEQ ID NO: 61337 - DNA, 17 bp, Arabidopsis thaliana
caaacggtagatgaaat

SEQ ID NO: 61338 - DNA, 17 bp, Arabidopsis thaliana
caaacggttcatgcaga

SEQ ID NO: 61339 - DNA, 17 bp, Arabidopsis thaliana
caaacggttgcatttgc

SEQ ID NO: 61340 - DNA, 17 bp, Arabidopsis thaliana
caaacgtccaaagccgc

SEQ ID NO: 61341 - DNA, 17 bp, Arabidopsis thaliana
caaactaaccactttgg

SEQ ID NO: 61342 - DNA, 17 bp, Arabidopsis thaliana
caaactaagcagagacg

SEQ ID NO: 61343 - DNA, 17 bp, Arabidopsis thaliana
caaactacagctacctt

SEQ ID NO: 61344 - DNA, 17 bp, Arabidopsis thaliana
caaactactccggtgcg

SEQ ID NO: 61345 - DNA, 17 bp, Arabidopsis thaliana
caaactactgtgaattg

SEQ ID NO: 61346 - DNA, 17 bp, Arabidopsis thaliana
caaactacttgcggtgt

SEQ ID NO: 61347 - DNA, 17 bp, Arabidopsis thaliana
caaactagagaaacctt

SEQ ID NO: 61348 - DNA, 17 bp, Arabidopsis thaliana
caaactaggtgccgaac

SEQ ID NO: 61349 - DNA, 17 bp, Arabidopsis thaliana
caaactatatcgcgaac

SEQ ID NO: 61350 - DNA, 17 bp, Arabidopsis thaliana
caaactatcttcctgac

SEQ ID NO: 61351 - DNA, 17 bp, Arabidopsis thaliana
caaactatggctcaacg

SEQ ID NO: 61352 - DNA, 17 bp, Arabidopsis thaliana
caaactatggctcaatg

SEQ ID NO: 61353 - DNA, 17 bp, Arabidopsis thaliana
caaactattcgatgtcc

SEQ ID NO: 61354 - DNA, 17 bp, Arabidopsis thaliana
caaactattcttgtctt

SEQ ID NO: 61355 - DNA, 17 bp, Arabidopsis thaliana
caaactatttgctggcg

SEQ ID NO: 61356 - DNA, 17 bp, Arabidopsis thaliana
caaactatttttgacaa

SEQ ID NO: 61357 - DNA, 17 bp, Arabidopsis thaliana
caaactcaacacctcca

SEQ ID NO: 61358 - DNA, 17 bp, Arabidopsis thaliana
caaactcaactggatct

SEQ ID NO: 61359 - DNA, 17 bp, Arabidopsis thaliana
caaactcaagtgctatt

SEQ ID NO: 61360 - DNA, 17 bp, Arabidopsis thaliana
caaactcaagtgctccc

SEQ ID NO: 61361 - DNA, 17 bp, Arabidopsis thaliana
caaactcagaataatgg

SEQ ID NO: 61362 - DNA, 17 bp, Arabidopsis thaliana
caaactcagagtgcctt

SEQ ID NO: 61363 - DNA, 17 bp, Arabidopsis thaliana
caaactcagtctgattt

SEQ ID NO: 61364 - DNA, 17 bp, Arabidopsis thaliana
caaactcatagccgacg

SEQ ID NO: 61365 - DNA, 17 bp, Arabidopsis thaliana
caaactccataatgcta

SEQ ID NO: 61366 - DNA, 17 bp, Arabidopsis thaliana
caaactccgaccgtctg

SEQ ID NO: 61367 - DNA, 17 bp, Arabidopsis thaliana
caaactcctgggatctc

SEQ ID NO: 61368 - DNA, 17 bp, Arabidopsis thaliana
caaactcggaccaggca

SEQ ID NO: 61369 - DNA, 17 bp, Arabidopsis thaliana
caaactcggatcatgca

SEQ ID NO: 61370 - DNA, 17 bp, Arabidopsis thaliana
caaactcggatttgtgg

SEQ ID NO: 61371 - DNA, 17 bp, Arabidopsis thaliana
caaactcggtttgctgc

SEQ ID NO: 61372 - DNA, 17 bp, Arabidopsis thaliana
caaactcgtcacgtgtg

SEQ ID NO: 61373 - DNA, 17 bp, Arabidopsis thaliana
caaactcgtccatgcgt

SEQ ID NO: 61374 - DNA, 17 bp, Arabidopsis thaliana
caaactcgtcccgacaa

SEQ ID NO: 61375 - DNA, 17 bp, Arabidopsis thaliana
caaactcgtcccgccaa

SEQ ID NO: 61376 - DNA, 17 bp, Arabidopsis thaliana
caaactcgtctatgcgt

SEQ ID NO: 61377 - DNA, 17 bp, Arabidopsis thaliana
caaactcgttcagccaa

SEQ ID NO: 61378 - DNA, 17 bp, Arabidopsis thaliana
caaactctcatgtgctg

SEQ ID NO: 61379 - DNA, 17 bp, Arabidopsis thaliana
caaactctcccagacgc

SEQ ID NO: 61380 - DNA, 17 bp, Arabidopsis thaliana
caaactctgaactaaca

SEQ ID NO: 61381 - DNA, 17 bp, Arabidopsis thaliana
caaactctggcttcaca

SEQ ID NO: 61382 - DNA, 17 bp, Arabidopsis thaliana
caaactcttccgcagaa

SEQ ID NO: 61383 - DNA, 17 bp, Arabidopsis thaliana
caaactcttgaaagcag

SEQ ID NO: 61384 - DNA, 17 bp, Arabidopsis thaliana
caaactgaaggacaatt

SEQ ID NO: 61385 - DNA, 17 bp, Arabidopsis thaliana
caaactgagatgtggtt

SEQ ID NO: 61386 - DNA, 17 bp, Arabidopsis thaliana
caaactgatctttggtt

SEQ ID NO: 61387 - DNA, 17 bp, Arabidopsis thaliana
caaactgcgaggtagga

SEQ ID NO: 61388 - DNA, 17 bp, Arabidopsis thaliana
caaactggatcgacacc

SEQ ID NO: 61389 - DNA, 17 bp, Arabidopsis thaliana
caaactggtgaaggtta

SEQ ID NO: 61390 - DNA, 17 bp, Arabidopsis thaliana
caaactgtaaacggatt

SEQ ID NO: 61391 - DNA, 17 bp, Arabidopsis thaliana
caaactgtcattggctt

SEQ ID NO: 61392 - DNA, 17 bp, Arabidopsis thaliana
caaactgtctcacgcgt

SEQ ID NO: 61393 - DNA, 17 bp, Arabidopsis thaliana
caaactgtgatccgtcc

SEQ ID NO: 61394 - DNA, 17 bp, Arabidopsis thaliana
caaactgtttgaaattc

SEQ ID NO: 61395 - DNA, 17 bp, Arabidopsis thaliana
caaacttacatgtctca

SEQ ID NO: 61396 - DNA, 17 bp, Arabidopsis thaliana
caaacttagagacacaa

SEQ ID NO: 61397 - DNA, 17 bp, Arabidopsis thaliana
caaacttagccaccagt

SEQ ID NO: 61398 - DNA, 17 bp, Arabidopsis thaliana
caaacttagggcctgac

SEQ ID NO: 61399 - DNA, 17 bp, Arabidopsis thaliana
caaacttatctcttgct

SEQ ID NO: 61400 - DNA, 17 bp, Arabidopsis thaliana
caaacttattggaaggt

SEQ ID NO: 61401 - DNA, 17 bp, Arabidopsis thaliana
caaacttccataatcat

SEQ ID NO: 61402 - DNA, 17 bp, Arabidopsis thaliana
caaacttcgcatgtgat

SEQ ID NO: 61403 - DNA, 17 bp, Arabidopsis thaliana
caaacttctatttggat

SEQ ID NO: 61404 - DNA, 17 bp, Arabidopsis thaliana
caaacttctcattaaac

SEQ ID NO: 61405 - DNA, 17 bp, Arabidopsis thaliana
caaacttctctcgtcat

SEQ ID NO: 61406 - DNA, 17 bp, Arabidopsis thaliana
caaacttgacatgtgat

SEQ ID NO: 61407 - DNA, 17 bp, Arabidopsis thaliana
caaacttgatctttcca

SEQ ID NO: 61408 - DNA, 17 bp, Arabidopsis thaliana
caaacttgatgtgcttg

SEQ ID NO: 61409 - DNA, 17 bp, Arabidopsis thaliana
caaacttgcgagattga

SEQ ID NO: 61410 - DNA, 17 bp, Arabidopsis thaliana
caaacttggcatgtgat

SEQ ID NO: 61411 - DNA, 17 bp, Arabidopsis thaliana
caaacttggtatgtgat

SEQ ID NO: 61412 - DNA, 17 bp, Arabidopsis thaliana
caaacttgtgaagccca

SEQ ID NO: 61413 - DNA, 17 bp, Arabidopsis thaliana
caaacttgtgcaccatt

SEQ ID NO: 61414 - DNA, 17 bp, Arabidopsis thaliana
caaactttcaatcttgg

SEQ ID NO: 61415 - DNA, 17 bp, Arabidopsis thaliana
caaactttcatgactaa

SEQ ID NO: 61416 - DNA, 17 bp, Arabidopsis thaliana
caaactttcatgactat

SEQ ID NO: 61417 - DNA, 17 bp, Arabidopsis thaliana
caaactttcatgtgctg

SEQ ID NO: 61418 - DNA, 17 bp, Arabidopsis thaliana
caaactttcgttgacga

SEQ ID NO: 61419 - DNA, 17 bp, Arabidopsis thaliana
caaactttcgttgacgg

SEQ ID NO: 61420 - DNA, 17 bp, Arabidopsis thaliana
caaactttctgctgatg

SEQ ID NO: 61421 - DNA, 17 bp, Arabidopsis thaliana
caaactttgccatactt

SEQ ID NO: 61422 - DNA, 17 bp, Arabidopsis thaliana
caaactttgtgtggaat

SEQ ID NO: 61423 - DNA, 17 bp, Arabidopsis thaliana
caaagaaaacattctac

SEQ ID NO: 61424 - DNA, 17 bp, Arabidopsis thaliana
caaagaaaatgtgactg

SEQ ID NO: 61425 - DNA, 17 bp, Arabidopsis thaliana
caaagaacaaaaatggg

SEQ ID NO: 61426 - DNA, 17 bp, Arabidopsis thaliana
caaagaacgcggctttg

SEQ ID NO: 61427 - DNA, 17 bp, Arabidopsis thaliana
caaagaagcaggtcgct

SEQ ID NO: 61428 - DNA, 17 bp, Arabidopsis thaliana
caaagaagcggcaggcc

SEQ ID NO: 61429 - DNA, 17 bp, Arabidopsis thaliana
caaagaatcagaaagct

SEQ ID NO: 61430 - DNA, 17 bp, Arabidopsis thaliana
caaagaattctgcgtgt

SEQ ID NO: 61431 - DNA, 17 bp, Arabidopsis thaliana
caaagacaattggtttt

SEQ ID NO: 61432 - DNA, 17 bp, Arabidopsis thaliana
caaagacatctgtggca

SEQ ID NO: 61433 - DNA, 17 bp, Arabidopsis thaliana
caaagacattccctgag

SEQ ID NO: 61434 - DNA, 17 bp, Arabidopsis thaliana
caaagacatttggagga

SEQ ID NO: 61435 - DNA, 17 bp, Arabidopsis thaliana
caaagacgacgttagta

SEQ ID NO: 61436 - DNA, 17 bp, Arabidopsis thaliana
caaagacgctggctgag

SEQ ID NO: 61437 - DNA, 17 bp, Arabidopsis thaliana
caaagacggcaaaagct

SEQ ID NO: 61438 - DNA, 17 bp, Arabidopsis thaliana
caaagacgggttggtgg

SEQ ID NO: 61439 - DNA, 17 bp, Arabidopsis thaliana
caaagacgtgtgtgatt

SEQ ID NO: 61440 - DNA, 17 bp, Arabidopsis thaliana
caaagacgttgaagctg

SEQ ID NO: 61441 - DNA, 17 bp, Arabidopsis thaliana
caaagactatgtccggg

SEQ ID NO: 61442 - DNA, 17 bp, Arabidopsis thaliana
caaagactcatacggac

SEQ ID NO: 61443 - DNA, 17 bp, Arabidopsis thaliana
caaagactcatagggac

SEQ ID NO: 61444 - DNA, 17 bp, Arabidopsis thaliana
caaagactcatatggac

SEQ ID NO: 61445 - DNA, 17 bp, Arabidopsis thaliana
caaagactcgtatggac

SEQ ID NO: 61446 - DNA, 17 bp, Arabidopsis thaliana
caaagacttggtgggct

SEQ ID NO: 61447 - DNA, 17 bp, Arabidopsis thaliana
caaagacttggtggtct

SEQ ID NO: 61448 - DNA, 17 bp, Arabidopsis thaliana
caaagagcgtctcggcg

SEQ ID NO: 61449 - DNA, 17 bp, Arabidopsis thaliana
caaagaggattggttgg

SEQ ID NO: 61450 - DNA, 17 bp, Arabidopsis thaliana
caaagagtcttcagaca

SEQ ID NO: 61451 - DNA, 17 bp, Arabidopsis thaliana
caaagagttccttgcga

SEQ ID NO: 61452 - DNA, 17 bp, Arabidopsis thaliana
caaagagttttaatgtc

SEQ ID NO: 61453 - DNA, 17 bp, Arabidopsis thaliana
caaagatacacccgttt

SEQ ID NO: 61454 - DNA, 17 bp, Arabidopsis thaliana
caaagatcaaggaccaa

SEQ ID NO: 61455 - DNA, 17 bp, Arabidopsis thaliana
caaagatcaatctccag

SEQ ID NO: 61456 - DNA, 17 bp, Arabidopsis thaliana
caaagatcacgttgcgg

SEQ ID NO: 61457 - DNA, 17 bp, Arabidopsis thaliana
caaagatcagatgagag

SEQ ID NO: 61458 - DNA, 17 bp, Arabidopsis thaliana
caaagatcagggaaatc

SEQ ID NO: 61459 - DNA, 17 bp, Arabidopsis thaliana
caaagatcagtccgaag

SEQ ID NO: 61460 - DNA, 17 bp, Arabidopsis thaliana
caaagatcataatttga

SEQ ID NO: 61461 - DNA, 17 bp, Arabidopsis thaliana
caaagatccctcctcgg

SEQ ID NO: 61462 - DNA, 17 bp, Arabidopsis thaliana
caaagatccctggacgg

SEQ ID NO: 61463 - DNA, 17 bp, Arabidopsis thaliana
caaagatcgagcttcat

SEQ ID NO: 61464 - DNA, 17 bp, Arabidopsis thaliana
caaagatcggggtttat

SEQ ID NO: 61465 - DNA, 17 bp, Arabidopsis thaliana
caaagatctcggatcac

SEQ ID NO: 61466 - DNA, 17 bp, Arabidopsis thaliana
caaagatctgagccatc

SEQ ID NO: 61467 - DNA, 17 bp, Arabidopsis thaliana
caaagatctggcatgtg

SEQ ID NO: 61468 - DNA, 17 bp, Arabidopsis thaliana
caaagattaagccatgc

SEQ ID NO: 61469 - DNA, 17 bp, Arabidopsis thaliana
caaagattacccgggtc

SEQ ID NO: 61470 - DNA, 17 bp, Arabidopsis thaliana
caaagattaccggggcc

SEQ ID NO: 61471 - DNA, 17 bp, Arabidopsis thaliana
caaagattatacatcca

SEQ ID NO: 61472 - DNA, 17 bp, Arabidopsis thaliana
caaagattattctgtac

SEQ ID NO: 61473 - DNA, 17 bp, Arabidopsis thaliana
caaagattcctacggtc

SEQ ID NO: 61474 - DNA, 17 bp, Arabidopsis thaliana
caaagattcctattagc

SEQ ID NO: 61475 - DNA, 17 bp, Arabidopsis thaliana
caaagattgtgcgtata

SEQ ID NO: 61476 - DNA, 17 bp, Arabidopsis thaliana
caaagatttgggccaga

SEQ ID NO: 61477 - DNA, 17 bp, Arabidopsis thaliana
caaagatttttgacggg

SEQ ID NO: 61478 - DNA, 17 bp, Arabidopsis thaliana
caaagcaaagactatgt

SEQ ID NO: 61479 - DNA, 17 bp, Arabidopsis thaliana
caaagcaaaggcccata

SEQ ID NO: 61480 - DNA, 17 bp, Arabidopsis thaliana
caaagcaaaggcttata

SEQ ID NO: 61481 - DNA, 17 bp, Arabidopsis thaliana
caaagcaagcctacgct

SEQ ID NO: 61482 - DNA, 17 bp, Arabidopsis thaliana
caaagcacatgcaacta

SEQ ID NO: 61483 - DNA, 17 bp, Arabidopsis thaliana
caaagcactaactttgg

SEQ ID NO: 61484 - DNA, 17 bp, Arabidopsis thaliana
caaagcagccgacacgt

SEQ ID NO: 61485 - DNA, 17 bp, Arabidopsis thaliana
caaagcagcctagagct

SEQ ID NO: 61486 - DNA, 17 bp, Arabidopsis thaliana
caaagcaggtgacctta

SEQ ID NO: 61487 - DNA, 17 bp, Arabidopsis thaliana
caaagcatcgcgatggt

SEQ ID NO: 61488 - DNA, 17 bp, Arabidopsis thaliana
caaagcattccaaactc

SEQ ID NO: 61489 - DNA, 17 bp, Arabidopsis thaliana
caaagcattgcgatgat

SEQ ID NO: 61490 - DNA, 17 bp, Arabidopsis thaliana
caaagcattgcgatgct

SEQ ID NO: 61491 - DNA, 17 bp, Arabidopsis thaliana
caaagcattgcgatggt

SEQ ID NO: 61492 - DNA, 17 bp, Arabidopsis thaliana
caaagcattgcgattgt

SEQ ID NO: 61493 - DNA, 17 bp, Arabidopsis thaliana
caaagccacagtgtctc

SEQ ID NO: 61494 - DNA, 17 bp, Arabidopsis thaliana
caaagccacgtctgtca

SEQ ID NO: 61495 - DNA, 17 bp, Arabidopsis thaliana
caaagccactacatccg

SEQ ID NO: 61496 - DNA, 17 bp, Arabidopsis thaliana
caaagccactttgcagt

SEQ ID NO: 61497 - DNA, 17 bp, Arabidopsis thaliana
caaagccatcgcgttga

SEQ ID NO: 61498 - DNA, 17 bp, Arabidopsis thaliana
caaagcccaactgacag

SEQ ID NO: 61499 - DNA, 17 bp, Arabidopsis thaliana
caaagcccgaacgtctc

SEQ ID NO: 61500 - DNA, 17 bp, Arabidopsis thaliana
caaagcccgatttgcac

SEQ ID NO: 61501 - DNA, 17 bp, Arabidopsis thaliana
caaagcccgtaatctcc

SEQ ID NO: 61502 - DNA, 17 bp, Arabidopsis thaliana
caaagccctccgtctaa

SEQ ID NO: 61503 - DNA, 17 bp, Arabidopsis thaliana
caaagccgatcttcttg

SEQ ID NO: 61504 - DNA, 17 bp, Arabidopsis thaliana
caaagccgcgttctatg

SEQ ID NO: 61505 - DNA, 17 bp, Arabidopsis thaliana
caaagccgtcagattca

SEQ ID NO: 61506 - DNA, 17 bp, Arabidopsis thaliana
caaagcctaggaaatgt

SEQ ID NO: 61507 - DNA, 17 bp, Arabidopsis thaliana
caaagcctccctctgga

SEQ ID NO: 61508 - DNA, 17 bp, Arabidopsis thaliana
caaagccttcatcggag

SEQ ID NO: 61509 - DNA, 17 bp, Arabidopsis thaliana
caaagcgactgttttgt

SEQ ID NO: 61510 - DNA, 17 bp, Arabidopsis thaliana
caaagcgatctatggtc

SEQ ID NO: 61511 - DNA, 17 bp, Arabidopsis thaliana
caaagcggcatggagcg

SEQ ID NO: 61512 - DNA, 17 bp, Arabidopsis thaliana
caaagcggctcaccctc

SEQ ID NO: 61513 - DNA, 17 bp, Arabidopsis thaliana
caaagcggtctaattta

SEQ ID NO: 61514 - DNA, 17 bp, Arabidopsis thaliana
caaagcggtctaatttg

SEQ ID NO: 61515 - DNA, 17 bp, Arabidopsis thaliana
caaagcggtgtatgcct

SEQ ID NO: 61516 - DNA, 17 bp, Arabidopsis thaliana
caaagcgtcttcggatc

SEQ ID NO: 61517 - DNA, 17 bp, Arabidopsis thaliana
caaagctaagttccctt

SEQ ID NO: 61518 - DNA, 17 bp, Arabidopsis thaliana
caaagctatgacatgga

SEQ ID NO: 61519 - DNA, 17 bp, Arabidopsis thaliana
caaagctcaggtaagat

SEQ ID NO: 61520 - DNA, 17 bp, Arabidopsis thaliana
caaagctgccagcatga

SEQ ID NO: 61521 - DNA, 17 bp, Arabidopsis thaliana
caaagctgccagtagct

SEQ ID NO: 61522 - DNA, 17 bp, Arabidopsis thaliana
caaagctgttagaaaga

SEQ ID NO: 61523 - DNA, 17 bp, Arabidopsis thaliana
caaagcttctatggatc

SEQ ID NO: 61524 - DNA, 17 bp, Arabidopsis thaliana
caaagcttgcatggtag

SEQ ID NO: 61525 - DNA, 17 bp, Arabidopsis thaliana
caaagctttcagggttt

SEQ ID NO: 61526 - DNA, 17 bp, Arabidopsis thaliana
caaagctttcatcggag

SEQ ID NO: 61527 - DNA, 17 bp, Arabidopsis thaliana
caaaggaatcaactact

SEQ ID NO: 61528 - DNA, 17 bp, Arabidopsis thaliana
caaaggaattgacgggg

SEQ ID NO: 61529 - DNA, 17 bp, Arabidopsis thaliana
caaaggacacatctctg

SEQ ID NO: 61530 - DNA, 17 bp, Arabidopsis thaliana
caaaggactggatagtg

SEQ ID NO: 61531 - DNA, 17 bp, Arabidopsis thaliana
caaaggactttggagag

SEQ ID NO: 61532 - DNA, 17 bp, Arabidopsis thaliana
caaaggagaagacactt

SEQ ID NO: 61533 - DNA, 17 bp, Arabidopsis thaliana
caaaggagacgacggcg

SEQ ID NO: 61534 - DNA, 17 bp, Arabidopsis thaliana
caaaggagagacgatcg

SEQ ID NO: 61535 - DNA, 17 bp, Arabidopsis thaliana
caaaggagcagttgtgc

SEQ ID NO: 61536 - DNA, 17 bp, Arabidopsis thaliana
caaaggaggatactaga

SEQ ID NO: 61537 - DNA, 17 bp, Arabidopsis thaliana
caaaggatcatggtcgt

SEQ ID NO: 61538 - DNA, 17 bp, Arabidopsis thaliana
caaaggatgacttgccg

SEQ ID NO: 61539 - DNA, 17 bp, Arabidopsis thaliana
caaaggattttggctac

SEQ ID NO: 61540 - DNA, 17 bp, Arabidopsis thaliana
caaaggcaacggaggaa

SEQ ID NO: 61541 - DNA, 17 bp, Arabidopsis thaliana
caaaggcacgtgtcctt

SEQ ID NO: 61542 - DNA, 17 bp, Arabidopsis thaliana
caaaggcacgtgtcgtt

SEQ ID NO: 61543 - DNA, 17 bp, Arabidopsis thaliana
caaaggcagaagggagc

SEQ ID NO: 61544 - DNA, 17 bp, Arabidopsis thaliana
caaaggcagcgtctgcg

SEQ ID NO: 61545 - DNA, 17 bp, Arabidopsis thaliana
caaaggccactctttct

SEQ ID NO: 61546 - DNA, 17 bp, Arabidopsis thaliana
caaaggccatcattctt

SEQ ID NO: 61547 - DNA, 17 bp, Arabidopsis thaliana
caaaggccatcattttg

SEQ ID NO: 61548 - DNA, 17 bp, Arabidopsis thaliana
caaaggccccagagcaa

SEQ ID NO: 61549 - DNA, 17 bp, Arabidopsis thaliana
caaaggccgtgttgatt

SEQ ID NO: 61550 - DNA, 17 bp, Arabidopsis thaliana
caaaggccttgctgtca

SEQ ID NO: 61551 - DNA, 17 bp, Arabidopsis thaliana
caaaggcgatgaagtgt

SEQ ID NO: 61552 - DNA, 17 bp, Arabidopsis thaliana
caaaggcggaccggccg

SEQ ID NO: 61553 - DNA, 17 bp, Arabidopsis thaliana
caaaggctacatcttgg

SEQ ID NO: 61554 - DNA, 17 bp, Arabidopsis thaliana
caaaggctccctagccc

SEQ ID NO: 61555 - DNA, 17 bp, Arabidopsis thaliana
caaaggctccgaacctg

SEQ ID NO: 61556 - DNA, 17 bp, Arabidopsis thaliana
caaaggctcgggcacat

SEQ ID NO: 61557 - DNA, 17 bp, Arabidopsis thaliana
caaaggctggcaggatg

SEQ ID NO: 61558 - DNA, 17 bp, Arabidopsis thaliana
caaaggcttcaccagtt

SEQ ID NO: 61559 - DNA, 17 bp, Arabidopsis thaliana
caaaggctttggattgt

SEQ ID NO: 61560 - DNA, 17 bp, Arabidopsis thaliana
caaagggaacttagctt

SEQ ID NO: 61561 - DNA, 17 bp, Arabidopsis thaliana
caaagggattcctcttc

SEQ ID NO: 61562 - DNA, 17 bp, Arabidopsis thaliana
caaagggatttctgaga

SEQ ID NO: 61563 - DNA, 17 bp, Arabidopsis thaliana
caaagggctgaatctca

SEQ ID NO: 61564 - DNA, 17 bp, Arabidopsis thaliana
caaaggggtgtctgcag

SEQ ID NO: 61565 - DNA, 17 bp, Arabidopsis thaliana
caaagggtaaacgactt

SEQ ID NO: 61566 - DNA, 17 bp, Arabidopsis thaliana
caaagggtcagactagg

SEQ ID NO: 61567 - DNA, 17 bp, Arabidopsis thaliana
caaagggtcgcgatccc

SEQ ID NO: 61568 - DNA, 17 bp, Arabidopsis thaliana
caaagggtgctactatc

SEQ ID NO: 61569 - DNA, 17 bp, Arabidopsis thaliana
caaagggtgtggcctgc

SEQ ID NO: 61570 - DNA, 17 bp, Arabidopsis thaliana
caaagggtgttggtcga

SEQ ID NO: 61571 - DNA, 17 bp, Arabidopsis thaliana
caaagggttgccttcca

SEQ ID NO: 61572 - DNA, 17 bp, Arabidopsis thaliana
caaaggtagaccactca

SEQ ID NO: 61573 - DNA, 17 bp, Arabidopsis thaliana
caaaggtatgagctcgc

SEQ ID NO: 61574 - DNA, 17 bp, Arabidopsis thaliana
caaaggtccgtcttctt

SEQ ID NO: 61575 - DNA, 17 bp, Arabidopsis thaliana
caaaggtgacggcggtc

SEQ ID NO: 61576 - DNA, 17 bp, Arabidopsis thaliana
caaaggttcatcaggct

SEQ ID NO: 61577 - DNA, 17 bp, Arabidopsis thaliana
caaaggttgtcaaccag

SEQ ID NO: 61578 - DNA, 17 bp, Arabidopsis thaliana
caaaggttttgcgttat

SEQ ID NO: 61579 - DNA, 17 bp, Arabidopsis thaliana
caaagtaagactacaag

SEQ ID NO: 61580 - DNA, 17 bp, Arabidopsis thaliana
caaagtaggaccgatct

SEQ ID NO: 61581 - DNA, 17 bp, Arabidopsis thaliana
caaagtagtttacagat

SEQ ID NO: 61582 - DNA, 17 bp, Arabidopsis thaliana
caaagtataagcgccca

SEQ ID NO: 61583 - DNA, 17 bp, Arabidopsis thaliana
caaagtattgcaatgcg

SEQ ID NO: 61584 - DNA, 17 bp, Arabidopsis thaliana
caaagtatttctttgaa

SEQ ID NO: 61585 - DNA, 17 bp, Arabidopsis thaliana
caaagtcaaggacgagg

SEQ ID NO: 61586 - DNA, 17 bp, Arabidopsis thaliana
caaagtcaagggtgcgt

SEQ ID NO: 61587 - DNA, 17 bp, Arabidopsis thaliana
caaagtcaatattttgg

SEQ ID NO: 61588 - DNA, 17 bp, Arabidopsis thaliana
caaagtcaatttacttg

SEQ ID NO: 61589 - DNA, 17 bp, Arabidopsis thaliana
caaagtccactgctttg

SEQ ID NO: 61590 - DNA, 17 bp, Arabidopsis thaliana
caaagtccatatgagtc

SEQ ID NO: 61591 - DNA, 17 bp, Arabidopsis thaliana
caaagtccgtaatcccc

SEQ ID NO: 61592 - DNA, 17 bp, Arabidopsis thaliana
caaagtcctacgcttgg

SEQ ID NO: 61593 - DNA, 17 bp, Arabidopsis thaliana
caaagtcggtatgtgtc

SEQ ID NO: 61594 - DNA, 17 bp, Arabidopsis thaliana
caaagtctgaacaagat

SEQ ID NO: 61595 - DNA, 17 bp, Arabidopsis thaliana
caaagtcttattcttag

SEQ ID NO: 61596 - DNA, 17 bp, Arabidopsis thaliana
caaagtcttttggttgg

SEQ ID NO: 61597 - DNA, 17 bp, Arabidopsis thaliana
caaagtgaaacatttgc

SEQ ID NO: 61598 - DNA, 17 bp, Arabidopsis thaliana
caaagtgaatgtaggcc

SEQ ID NO: 61599 - DNA, 17 bp, Arabidopsis thaliana
caaagtgactgacccta

SEQ ID NO: 61600 - DNA, 17 bp, Arabidopsis thaliana
caaagtgagtcaccaat

SEQ ID NO: 61601 - DNA, 17 bp, Arabidopsis thaliana
caaagtgattcaggtag

SEQ ID NO: 61602 - DNA, 17 bp, Arabidopsis thaliana
caaagtgattctgatca

SEQ ID NO: 61603 - DNA, 17 bp, Arabidopsis thaliana
caaagtgattgggatct

SEQ ID NO: 61604 - DNA, 17 bp, Arabidopsis thaliana
caaagtgatttcaggct

SEQ ID NO: 61605 - DNA, 17 bp, Arabidopsis thaliana
caaagtgcacggtcctc

SEQ ID NO: 61606 - DNA, 17 bp, Arabidopsis thaliana
caaagtgcgactgtgtt

SEQ ID NO: 61607 - DNA, 17 bp, Arabidopsis thaliana
caaagtgctaatgtccg

SEQ ID NO: 61608 - DNA, 17 bp, Arabidopsis thaliana
caaagtgctcacgtttg

SEQ ID NO: 61609 - DNA, 17 bp, Arabidopsis thaliana
caaagtggactgcctgg

SEQ ID NO: 61610 - DNA, 17 bp, Arabidopsis thaliana
caaagtgggctgggtca

SEQ ID NO: 61611 - DNA, 17 bp, Arabidopsis thaliana
caaagtgggctgggtga

SEQ ID NO: 61612 - DNA, 17 bp, Arabidopsis thaliana
caaagtgtcctcgcgcc

SEQ ID NO: 61613 - DNA, 17 bp, Arabidopsis thaliana
caaagtgttggacttgg

SEQ ID NO: 61614 - DNA, 17 bp, Arabidopsis thaliana
caaagtgttttggaaca

SEQ ID NO: 61615 - DNA, 17 bp, Arabidopsis thaliana
caaagttaactggaccg

SEQ ID NO: 61616 - DNA, 17 bp, Arabidopsis thaliana
caaagttagactttgtc

SEQ ID NO: 61617 - DNA, 17 bp, Arabidopsis thaliana
caaagttatgaaccgga

SEQ ID NO: 61618 - DNA, 17 bp, Arabidopsis thaliana
caaagttatgactttga

SEQ ID NO: 61619 - DNA, 17 bp, Arabidopsis thaliana
caaagttccagagatgt

SEQ ID NO: 61620 - DNA, 17 bp, Arabidopsis thaliana
caaagttccatgtccat

SEQ ID NO: 61621 - DNA, 17 bp, Arabidopsis thaliana
caaagttctgttgaccg

SEQ ID NO: 61622 - DNA, 17 bp, Arabidopsis thaliana
caaagttgcggttgaaa

SEQ ID NO: 61623 - DNA, 17 bp, Arabidopsis thaliana
caaagttgctaactcat

SEQ ID NO: 61624 - DNA, 17 bp, Arabidopsis thaliana
caaagttgctagctcag

SEQ ID NO: 61625 - DNA, 17 bp, Arabidopsis thaliana
caaagttgtagaagctg

SEQ ID NO: 61626 - DNA, 17 bp, Arabidopsis thaliana
caaagtttcatcggaga

SEQ ID NO: 61627 - DNA, 17 bp, Arabidopsis thaliana
caaagtttgcgcctttg

SEQ ID NO: 61628 - DNA, 17 bp, Arabidopsis thaliana
caaagttttggaccgca

SEQ ID NO: 61629 - DNA, 17 bp, Arabidopsis thaliana
caaagttttggctgaca

SEQ ID NO: 61630 - DNA, 17 bp, Arabidopsis thaliana
caaagttttgggttccg

SEQ ID NO: 61631 - DNA, 17 bp, Arabidopsis thaliana
caaagtttttgggtccc

SEQ ID NO: 61632 - DNA, 17 bp, Arabidopsis thaliana
caaagtttttgggttcc

SEQ ID NO: 61633 - DNA, 17 bp, Arabidopsis thaliana
caaataaacttggtctg

SEQ ID NO: 61634 - DNA, 17 bp, Arabidopsis thaliana
caaataaccatggaccc

SEQ ID NO: 61635 - DNA, 17 bp, Arabidopsis thaliana
caaataacttgagtacc

SEQ ID NO: 61636 - DNA, 17 bp, Arabidopsis thaliana
caaataatctcccaacc

SEQ ID NO: 61637 - DNA, 17 bp, Arabidopsis thaliana
caaataattcgggtcaa

SEQ ID NO: 61638 - DNA, 17 bp, Arabidopsis thaliana
caaataatttcctaacg

SEQ ID NO: 61639 - DNA, 17 bp, Arabidopsis thaliana
caaatacagctgagcag

SEQ ID NO: 61640 - DNA, 17 bp, Arabidopsis thaliana
caaataccacacgaact

SEQ ID NO: 61641 - DNA, 17 bp, Arabidopsis thaliana
caaataccgttttggct

SEQ ID NO: 61642 - DNA, 17 bp, Arabidopsis thaliana
caaatacgctgagaaag

SEQ ID NO: 61643 - DNA, 17 bp, Arabidopsis thaliana
caaatactggtgatttg

SEQ ID NO: 61644 - DNA, 17 bp, Arabidopsis thaliana
caaatactggtgatttt

SEQ ID NO: 61645 - DNA, 17 bp, Arabidopsis thaliana
caaatacttttggcggg

SEQ ID NO: 61646 - DNA, 17 bp, Arabidopsis thaliana
caaatagagatttatgg

SEQ ID NO: 61647 - DNA, 17 bp, Arabidopsis thaliana
caaataggtcacaggtc

SEQ ID NO: 61648 - DNA, 17 bp, Arabidopsis thaliana
caaatagtacttgtcgg

SEQ ID NO: 61649 - DNA, 17 bp, Arabidopsis thaliana
caaatatctctgcggtt

SEQ ID NO: 61650 - DNA, 17 bp, Arabidopsis thaliana
caaatattatgtgcctt

SEQ ID NO: 61651 - DNA, 17 bp, Arabidopsis thaliana
caaatattggcaagacc

SEQ ID NO: 61652 - DNA, 17 bp, Arabidopsis thaliana
caaatattgtgttggcc

SEQ ID NO: 61653 - DNA, 17 bp, Arabidopsis thaliana
caaatcaaccactctac

SEQ ID NO: 61654 - DNA, 17 bp, Arabidopsis thaliana
caaatcaacccatctca

SEQ ID NO: 61655 - DNA, 17 bp, Arabidopsis thaliana
caaatcaactaaaggac

SEQ ID NO: 61656 - DNA, 17 bp, Arabidopsis thaliana
caaatcaatgcagaggt

SEQ ID NO: 61657 - DNA, 17 bp, Arabidopsis thaliana
caaatcacacaactcaa

SEQ ID NO: 61658 - DNA, 17 bp, Arabidopsis thaliana
caaatcagaatgcgaag

SEQ ID NO: 61659 - DNA, 17 bp, Arabidopsis thaliana
caaatcaggcactaaat

SEQ ID NO: 61660 - DNA, 17 bp, Arabidopsis thaliana
caaatcagtgatgtttt

SEQ ID NO: 61661 - DNA, 17 bp, Arabidopsis thaliana
caaatcatcatccgttt

SEQ ID NO: 61662 - DNA, 17 bp, Arabidopsis thaliana
caaatcatgtggttttt

SEQ ID NO: 61663 - DNA, 17 bp, Arabidopsis thaliana
caaatccaccaccacca

SEQ ID NO: 61664 - DNA, 17 bp, Arabidopsis thaliana
caaatccaggaagtttt

SEQ ID NO: 61665 - DNA, 17 bp, Arabidopsis thaliana
caaatccaggaggttct

SEQ ID NO: 61666 - DNA, 17 bp, Arabidopsis thaliana
caaatccaggatgcccc

SEQ ID NO: 61667 - DNA, 17 bp, Arabidopsis thaliana
caaatccaggatggccc

SEQ ID NO: 61668 - DNA, 17 bp, Arabidopsis thaliana
caaatccaggatggttc

SEQ ID NO: 61669 - DNA, 17 bp, Arabidopsis thaliana
caaatccagtggcagcc

SEQ ID NO: 61670 - DNA, 17 bp, Arabidopsis thaliana
caaatccattcggttgg

SEQ ID NO: 61671 - DNA, 17 bp, Arabidopsis thaliana
caaatcccacagctgtc

SEQ ID NO: 61672 - DNA, 17 bp, Arabidopsis thaliana
caaatcccactcttgac

SEQ ID NO: 61673 - DNA, 17 bp, Arabidopsis thaliana
caaatcccacttctgac

SEQ ID NO: 61674 - DNA, 17 bp, Arabidopsis thaliana
caaatccctcgcagaag

SEQ ID NO: 61675 - DNA, 17 bp, Arabidopsis thaliana
caaatccgataaggggc

SEQ ID NO: 61676 - DNA, 17 bp, Arabidopsis thaliana
caaatccgcatgttaat

SEQ ID NO: 61677 - DNA, 17 bp, Arabidopsis thaliana
caaatccggaggaccga

SEQ ID NO: 61678 - DNA, 17 bp, Arabidopsis thaliana
caaatccgggtgccgcc

SEQ ID NO: 61679 - DNA, 17 bp, Arabidopsis thaliana
caaatccgtcctgctaa

SEQ ID NO: 61680 - DNA, 17 bp, Arabidopsis thaliana
caaatcctacgcgaagt

SEQ ID NO: 61681 - DNA, 17 bp, Arabidopsis thaliana
caaatcctattggacgc

SEQ ID NO: 61682 - DNA, 17 bp, Arabidopsis thaliana
caaatcctccgactcct

SEQ ID NO: 61683 - DNA, 17 bp, Arabidopsis thaliana
caaatcctgagcttagt

SEQ ID NO: 61684 - DNA, 17 bp, Arabidopsis thaliana
caaatcctggaggagtg

SEQ ID NO: 61685 - DNA, 17 bp, Arabidopsis thaliana
caaatcctgttgggtgt

SEQ ID NO: 61686 - DNA, 17 bp, Arabidopsis thaliana
caaatccttcggccaga

SEQ ID NO: 61687 - DNA, 17 bp, Arabidopsis thaliana
caaatccttctaggatg

SEQ ID NO: 61688 - DNA, 17 bp, Arabidopsis thaliana
caaatcctttgctctct

SEQ ID NO: 61689 - DNA, 17 bp, Arabidopsis thaliana
caaatcctttggtctct

SEQ ID NO: 61690 - DNA, 17 bp, Arabidopsis thaliana
caaatcgagattttgcg

SEQ ID NO: 61691 - DNA, 17 bp, Arabidopsis thaliana
caaatcgagtcagaccg

SEQ ID NO: 61692 - DNA, 17 bp, Arabidopsis thaliana
caaatcgatgtgtgcaa

SEQ ID NO: 61693 - DNA, 17 bp, Arabidopsis thaliana
caaatcgattatactag

SEQ ID NO: 61694 - DNA, 17 bp, Arabidopsis thaliana
caaatcgatttggtcgt

SEQ ID NO: 61695 - DNA, 17 bp, Arabidopsis thaliana
caaatcgccgccggagt

SEQ ID NO: 61696 - DNA, 17 bp, Arabidopsis thaliana
caaatcggaccaaactt

SEQ ID NO: 61697 - DNA, 17 bp, Arabidopsis thaliana
caaatcggatgtctgcc

SEQ ID NO: 61698 - DNA, 17 bp, Arabidopsis thaliana
caaatcggccataacat

SEQ ID NO: 61699 - DNA, 17 bp, Arabidopsis thaliana
caaatcgggaattttgt

SEQ ID NO: 61700 - DNA, 17 bp, Arabidopsis thaliana
caaatcggggataagat

SEQ ID NO: 61701 - DNA, 17 bp, Arabidopsis thaliana
caaatcgtatgcgggaa

SEQ ID NO: 61702 - DNA, 17 bp, Arabidopsis thaliana
caaatcgtcttcatatc

SEQ ID NO: 61703 - DNA, 17 bp, Arabidopsis thaliana
caaatcgttagacgcta

SEQ ID NO: 61704 - DNA, 17 bp, Arabidopsis thaliana
caaatcgttcgtctgac

SEQ ID NO: 61705 - DNA, 17 bp, Arabidopsis thaliana
caaatctaaggtggtgt

SEQ ID NO: 61706 - DNA, 17 bp, Arabidopsis thaliana
caaatctcattgatgtc

SEQ ID NO: 61707 - DNA, 17 bp, Arabidopsis thaliana
caaatctcgtgcagtta

SEQ ID NO: 61708 - DNA, 17 bp, Arabidopsis thaliana
caaatctcgtgcttttt

SEQ ID NO: 61709 - DNA, 17 bp, Arabidopsis thaliana
caaatctctatcgccgg

SEQ ID NO: 61710 - DNA, 17 bp, Arabidopsis thaliana
caaatctctcaggtgtc

SEQ ID NO: 61711 - DNA, 17 bp, Arabidopsis thaliana
caaatctctcggatgtt

SEQ ID NO: 61712 - DNA, 17 bp, Arabidopsis thaliana
caaatctctgctgtgct

SEQ ID NO: 61713 - DNA, 17 bp, Arabidopsis thaliana
caaatctctgtggagct

SEQ ID NO: 61714 - DNA, 17 bp, Arabidopsis thaliana
caaatctcttacccaat

SEQ ID NO: 61715 - DNA, 17 bp, Arabidopsis thaliana
caaatctgcagagagta

SEQ ID NO: 61716 - DNA, 17 bp, Arabidopsis thaliana
caaatctgggatggtgc

SEQ ID NO: 61717 - DNA, 17 bp, Arabidopsis thaliana
caaatctggttgactca

SEQ ID NO: 61718 - DNA, 17 bp, Arabidopsis thaliana
caaatctgtctcgtctc

SEQ ID NO: 61719 - DNA, 17 bp, Arabidopsis thaliana
caaatctgtcttgcatg

SEQ ID NO: 61720 - DNA, 17 bp, Arabidopsis thaliana
caaatctgtgcgcttta

SEQ ID NO: 61721 - DNA, 17 bp, Arabidopsis thaliana
caaatctgttgaggccc

SEQ ID NO: 61722 - DNA, 17 bp, Arabidopsis thaliana
caaatctgttgcgaagg

SEQ ID NO: 61723 - DNA, 17 bp, Arabidopsis thaliana
caaatctgttgtagtga

SEQ ID NO: 61724 - DNA, 17 bp, Arabidopsis thaliana
caaatcttcgacgcagg

SEQ ID NO: 61725 - DNA, 17 bp, Arabidopsis thaliana
caaatcttgtgatctct

SEQ ID NO: 61726 - DNA, 17 bp, Arabidopsis thaliana
caaatctttatttggac

SEQ ID NO: 61727 - DNA, 17 bp, Arabidopsis thaliana
caaatctttttaagtcc

SEQ ID NO: 61728 - DNA, 17 bp, Arabidopsis thaliana
caaatcttttttcgtcc

SEQ ID NO: 61729 - DNA, 17 bp, Arabidopsis thaliana
caaatgaaccggcccct

SEQ ID NO: 61730 - DNA, 17 bp, Arabidopsis thaliana
caaatgaactaatttgc

SEQ ID NO: 61731 - DNA, 17 bp, Arabidopsis thaliana
caaatgaagggtgagga

SEQ ID NO: 61732 - DNA, 17 bp, Arabidopsis thaliana
caaatgaccaaattacc

SEQ ID NO: 61733 - DNA, 17 bp, Arabidopsis thaliana
caaatgaccccccccca

SEQ ID NO: 61734 - DNA, 17 bp, Arabidopsis thaliana
caaatgacctagctaga

SEQ ID NO: 61735 - DNA, 17 bp, Arabidopsis thaliana
caaatgacctccttatt

SEQ ID NO: 61736 - DNA, 17 bp, Arabidopsis thaliana
caaatgacggtccttgg

SEQ ID NO: 61737 - DNA, 17 bp, Arabidopsis thaliana
caaatgacgtgacacat

SEQ ID NO: 61738 - DNA, 17 bp, Arabidopsis thaliana
caaatgacgtggcaagt

SEQ ID NO: 61739 - DNA, 17 bp, Arabidopsis thaliana
caaatgactataaccct

SEQ ID NO: 61740 - DNA, 17 bp, Arabidopsis thaliana
caaatgactatcaccct

SEQ ID NO: 61741 - DNA, 17 bp, Arabidopsis thaliana
caaatgacttaccacac

SEQ ID NO: 61742 - DNA, 17 bp, Arabidopsis thaliana
caaatgacttcatcaac

SEQ ID NO: 61743 - DNA, 17 bp, Arabidopsis thaliana
caaatgagaactttgaa

SEQ ID NO: 61744 - DNA, 17 bp, Arabidopsis thaliana
caaatgaggccactgcg

SEQ ID NO: 61745 - DNA, 17 bp, Arabidopsis thaliana
caaatgagtctactccc

SEQ ID NO: 61746 - DNA, 17 bp, Arabidopsis thaliana
caaatgagttcagtcct

SEQ ID NO: 61747 - DNA, 17 bp, Arabidopsis thaliana
caaatgagtttatgggt

SEQ ID NO: 61748 - DNA, 17 bp, Arabidopsis thaliana
caaatgatccgctgcgg

SEQ ID NO: 61749 - DNA, 17 bp, Arabidopsis thaliana
caaatgatcgttgtgct

SEQ ID NO: 61750 - DNA, 17 bp, Arabidopsis thaliana
caaatgatgttgatcac

SEQ ID NO: 61751 - DNA, 17 bp, Arabidopsis thaliana
caaatgcaaccgtttgg

SEQ ID NO: 61752 - DNA, 17 bp, Arabidopsis thaliana
caaatgcaactgacgcc

SEQ ID NO: 61753 - DNA, 17 bp, Arabidopsis thaliana
caaatgcaccacgatgg

SEQ ID NO: 61754 - DNA, 17 bp, Arabidopsis thaliana
caaatgcagcgtctgcg

SEQ ID NO: 61755 - DNA, 17 bp, Arabidopsis thaliana
caaatgcatatgatgtg

SEQ ID NO: 61756 - DNA, 17 bp, Arabidopsis thaliana
caaatgcattggagtgt

SEQ ID NO: 61757 - DNA, 17 bp, Arabidopsis thaliana
caaatgcattggattgt

SEQ ID NO: 61758 - DNA, 17 bp, Arabidopsis thaliana
caaatgcccaatcgact

SEQ ID NO: 61759 - DNA, 17 bp, Arabidopsis thaliana
caaatgcctcgtcatct

SEQ ID NO: 61760 - DNA, 17 bp, Arabidopsis thaliana
caaatgcggtatagatg

SEQ ID NO: 61761 - DNA, 17 bp, Arabidopsis thaliana
caaatgcgtctcaatgg

SEQ ID NO: 61762 - DNA, 17 bp, Arabidopsis thaliana
caaatgcttcaagccaa

SEQ ID NO: 61763 - DNA, 17 bp, Arabidopsis thaliana
caaatgcttgggcttat

SEQ ID NO: 61764 - DNA, 17 bp, Arabidopsis thaliana
caaatggacccgacccg

SEQ ID NO: 61765 - DNA, 17 bp, Arabidopsis thaliana
caaatggaggaccgacc

SEQ ID NO: 61766 - DNA, 17 bp, Arabidopsis thaliana
caaatggattttggcct

SEQ ID NO: 61767 - DNA, 17 bp, Arabidopsis thaliana
caaatggccgggttttg

SEQ ID NO: 61768 - DNA, 17 bp, Arabidopsis thaliana
caaatggctgggttttg

SEQ ID NO: 61769 - DNA, 17 bp, Arabidopsis thaliana
caaatggtagtcaacgt

SEQ ID NO: 61770 - DNA, 17 bp, Arabidopsis thaliana
caaatggtccgctgcgg

SEQ ID NO: 61771 - DNA, 17 bp, Arabidopsis thaliana
caaatggtctgcagtga

SEQ ID NO: 61772 - DNA, 17 bp, Arabidopsis thaliana
caaatggtgcggtgagc

SEQ ID NO: 61773 - DNA, 17 bp, Arabidopsis thaliana
caaatggtgtgaaccga

SEQ ID NO: 61774 - DNA, 17 bp, Arabidopsis thaliana
caaatgtacttgatgtg

SEQ ID NO: 61775 - DNA, 17 bp, Arabidopsis thaliana
caaatgtagctacgaat

SEQ ID NO: 61776 - DNA, 17 bp, Arabidopsis thaliana
caaatgtatcacggcca

SEQ ID NO: 61777 - DNA, 17 bp, Arabidopsis thaliana
caaatgtcccgcccacc

SEQ ID NO: 61778 - DNA, 17 bp, Arabidopsis thaliana
caaatgtctcgaaggta

SEQ ID NO: 61779 - DNA, 17 bp, Arabidopsis thaliana
caaatgtctctttgttg

SEQ ID NO: 61780 - DNA, 17 bp, Arabidopsis thaliana
caaatgtctttgggtag

SEQ ID NO: 61781 - DNA, 17 bp, Arabidopsis thaliana
caaatgtgatgatgaga

SEQ ID NO: 61782 - DNA, 17 bp, Arabidopsis thaliana
caaatgtggcatgagtt

SEQ ID NO: 61783 - DNA, 17 bp, Arabidopsis thaliana
caaatgtggcgggactt

SEQ ID NO: 61784 - DNA, 17 bp, Arabidopsis thaliana
caaatgttacggatcat

SEQ ID NO: 61785 - DNA, 17 bp, Arabidopsis thaliana
caaatgttgaactttgg

SEQ ID NO: 61786 - DNA, 17 bp, Arabidopsis thaliana
caaatgttgcggtgata

SEQ ID NO: 61787 - DNA, 17 bp, Arabidopsis thaliana
caaattaaggctgtgaa

SEQ ID NO: 61788 - DNA, 17 bp, Arabidopsis thaliana
caaattaagggcctgac

SEQ ID NO: 61789 - DNA, 17 bp, Arabidopsis thaliana
caaattacccaatcctg

SEQ ID NO: 61790 - DNA, 17 bp, Arabidopsis thaliana
caaattagaccgcttta

SEQ ID NO: 61791 - DNA, 17 bp, Arabidopsis thaliana
caaattagaccgctttg

SEQ ID NO: 61792 - DNA, 17 bp, Arabidopsis thaliana
caaattagtttaaagtc

SEQ ID NO: 61793 - DNA, 17 bp, Arabidopsis thaliana
caaattatccgctttga

SEQ ID NO: 61794 - DNA, 17 bp, Arabidopsis thaliana
caaattcagggtccgaa

SEQ ID NO: 61795 - DNA, 17 bp, Arabidopsis thaliana
caaattctattttcctt

SEQ ID NO: 61796 - DNA, 17 bp, Arabidopsis thaliana
caaattctgacgtggca

SEQ ID NO: 61797 - DNA, 17 bp, Arabidopsis thaliana
caaattctggggctgga

SEQ ID NO: 61798 - DNA, 17 bp, Arabidopsis thaliana
caaattgaagtctaatt

SEQ ID NO: 61799 - DNA, 17 bp, Arabidopsis thaliana
caaattgaccttaagct

SEQ ID NO: 61800 - DNA, 17 bp, Arabidopsis thaliana
caaattgcaatgactct

SEQ ID NO: 61801 - DNA, 17 bp, Arabidopsis thaliana
caaattgcgccaagttg

SEQ ID NO: 61802 - DNA, 17 bp, Arabidopsis thaliana
caaattgtcccaccagc

SEQ ID NO: 61803 - DNA, 17 bp, Arabidopsis thaliana
caaattgtgtatgtgaa

SEQ ID NO: 61804 - DNA, 17 bp, Arabidopsis thaliana
caaatttaaaatagatc

SEQ ID NO: 61805 - DNA, 17 bp, Arabidopsis thaliana
caaatttcctcaaggtt

SEQ ID NO: 61806 - DNA, 17 bp, Arabidopsis thaliana
caaatttcctcttctgt

SEQ ID NO: 61807 - DNA, 17 bp, Arabidopsis thaliana
caaatttctgagcttcg

SEQ ID NO: 61808 - DNA, 17 bp, Arabidopsis thaliana
caaatttcttgagcctt

SEQ ID NO: 61809 - DNA, 17 bp, Arabidopsis thaliana
caaatttggcatgtgat

SEQ ID NO: 61810 - DNA, 17 bp, Arabidopsis thaliana
caaatttggtaattcag

SEQ ID NO: 61811 - DNA, 17 bp, Arabidopsis thaliana
caaattttagtcttctg

SEQ ID NO: 61812 - DNA, 17 bp, Arabidopsis thaliana
caacaaaacatgccact

SEQ ID NO: 61813 - DNA, 17 bp, Arabidopsis thaliana
caacaaaactcgggatg

SEQ ID NO: 61814 - DNA, 17 bp, Arabidopsis thaliana
caacaaaatttcaagcg

SEQ ID NO: 61815 - DNA, 17 bp, Arabidopsis thaliana
caacaaacggattgcgc

SEQ ID NO: 61816 - DNA, 17 bp, Arabidopsis thaliana
caacaaaggacttctgg

SEQ ID NO: 61817 - DNA, 17 bp, Arabidopsis thaliana
caacaaaggcccattgg

SEQ ID NO: 61818 - DNA, 17 bp, Arabidopsis thaliana
caacaaagggtgtcttg

SEQ ID NO: 61819 - DNA, 17 bp, Arabidopsis thaliana
caacaaatcgctgtgaa

SEQ ID NO: 61820 - DNA, 17 bp, Arabidopsis thaliana
caacaaatctgttatgg

SEQ ID NO: 61821 - DNA, 17 bp, Arabidopsis thaliana
caacaaatgatgtggca

SEQ ID NO: 61822 - DNA, 17 bp, Arabidopsis thaliana
caacaaatttgacagac

SEQ ID NO: 61823 - DNA, 17 bp, Arabidopsis thaliana
caacaacaagagcacca

SEQ ID NO: 61824 - DNA, 17 bp, Arabidopsis thaliana
caacaacattcctcagg

SEQ ID NO: 61825 - DNA, 17 bp, Arabidopsis thaliana
caacaaccgtgatttcc

SEQ ID NO: 61826 - DNA, 17 bp, Arabidopsis thaliana
caacaacgtgataagtc

SEQ ID NO: 61827 - DNA, 17 bp, Arabidopsis thaliana
caacaactccgccaact

SEQ ID NO: 61828 - DNA, 17 bp, Arabidopsis thaliana
caacaactgtggctcag

SEQ ID NO: 61829 - DNA, 17 bp, Arabidopsis thaliana
caacaacttgatgaccg

SEQ ID NO: 61830 - DNA, 17 bp, Arabidopsis thaliana
caacaactttctcacag

SEQ ID NO: 61831 - DNA, 17 bp, Arabidopsis thaliana
caacaagacatgccact

SEQ ID NO: 61832 - DNA, 17 bp, Arabidopsis thaliana
caacaagactcaatgag

SEQ ID NO: 61833 - DNA, 17 bp, Arabidopsis thaliana
caacaagacttctgaca

SEQ ID NO: 61834 - DNA, 17 bp, Arabidopsis thaliana
caacaagacttttccaa

SEQ ID NO: 61835 - DNA, 17 bp, Arabidopsis thaliana
caacaagcgtatcgaat

SEQ ID NO: 61836 - DNA, 17 bp, Arabidopsis thaliana
caacaagctcgactgtc

SEQ ID NO: 61837 - DNA, 17 bp, Arabidopsis thaliana
caacaagctcgcagact

SEQ ID NO: 61838 - DNA, 17 bp, Arabidopsis thaliana
caacaaggctaaggtcg

SEQ ID NO: 61839 - DNA, 17 bp, Arabidopsis thaliana
caacaaggctactgtgg

SEQ ID NO: 61840 - DNA, 17 bp, Arabidopsis thaliana
caacaagggtcggcctc

SEQ ID NO: 61841 - DNA, 17 bp, Arabidopsis thaliana
caacaagtctggtgcca

SEQ ID NO: 61842 - DNA, 17 bp, Arabidopsis thaliana
caacaagtcttctatca

SEQ ID NO: 61843 - DNA, 17 bp, Arabidopsis thaliana
caacaagtgcagttttg

SEQ ID NO: 61844 - DNA, 17 bp, Arabidopsis thaliana
caacaagtgctactgag

SEQ ID NO: 61845 - DNA, 17 bp, Arabidopsis thaliana
caacaagtgtgactgac

SEQ ID NO: 61846 - DNA, 17 bp, Arabidopsis thaliana
caacaagttccacggcc

SEQ ID NO: 61847 - DNA, 17 bp, Arabidopsis thaliana
caacaagtttacaagcc

SEQ ID NO: 61848 - DNA, 17 bp, Arabidopsis thaliana
caacaagtttatggacc

SEQ ID NO: 61849 - DNA, 17 bp, Arabidopsis thaliana
caacaagtttcatggac

SEQ ID NO: 61850 - DNA, 17 bp, Arabidopsis thaliana
caacaagtttcatggat

SEQ ID NO: 61851 - DNA, 17 bp, Arabidopsis thaliana
caacaataggctatatg

SEQ ID NO: 61852 - DNA, 17 bp, Arabidopsis thaliana
caacaatattcctgaac

SEQ ID NO: 61853 - DNA, 17 bp, Arabidopsis thaliana
caacaatccaactctga

SEQ ID NO: 61854 - DNA, 17 bp, Arabidopsis thaliana
caacaatcctaggatct

SEQ ID NO: 61855 - DNA, 17 bp, Arabidopsis thaliana
caacaatctgccagcag

SEQ ID NO: 61856 - DNA, 17 bp, Arabidopsis thaliana
caacaatgaagatcact

SEQ ID NO: 61857 - DNA, 17 bp, Arabidopsis thaliana
caacaatgccgacatca

SEQ ID NO: 61858 - DNA, 17 bp, Arabidopsis thaliana
caacaatggatcatcac

SEQ ID NO: 61859 - DNA, 17 bp, Arabidopsis thaliana
caacaatgggtgctctc

SEQ ID NO: 61860 - DNA, 17 bp, Arabidopsis thaliana
caacaatgtccagtcca

SEQ ID NO: 61861 - DNA, 17 bp, Arabidopsis thaliana
caacaatgttgaatcgg

SEQ ID NO: 61862 - DNA, 17 bp, Arabidopsis thaliana
caacaattgtctcatgg

SEQ ID NO: 61863 - DNA, 17 bp, Arabidopsis thaliana
caacaatttttgggaat

SEQ ID NO: 61864 - DNA, 17 bp, Arabidopsis thaliana
caacacaaggactttcc

SEQ ID NO: 61865 - DNA, 17 bp, Arabidopsis thaliana
caacacacttggatacg

SEQ ID NO: 61866 - DNA, 17 bp, Arabidopsis thaliana
caacacagggaaactta

SEQ ID NO: 61867 - DNA, 17 bp, Arabidopsis thaliana
caacacagtccaggatt

SEQ ID NO: 61868 - DNA, 17 bp, Arabidopsis thaliana
caacacagttgctttcg

SEQ ID NO: 61869 - DNA, 17 bp, Arabidopsis thaliana
caacaccaggcctattt

SEQ ID NO: 61870 - DNA, 17 bp, Arabidopsis thaliana
caacaccaggctctatt

SEQ ID NO: 61871 - DNA, 17 bp, Arabidopsis thaliana
caacacccacccccccc

SEQ ID NO: 61872 - DNA, 17 bp, Arabidopsis thaliana
caacaccgacatcgact

SEQ ID NO: 61873 - DNA, 17 bp, Arabidopsis thaliana
caacaccggatttcgac

SEQ ID NO: 61874 - DNA, 17 bp, Arabidopsis thaliana
caacaccggcgaatgat

SEQ ID NO: 61875 - DNA, 17 bp, Arabidopsis thaliana
caacaccggcggttcct

SEQ ID NO: 61876 - DNA, 17 bp, Arabidopsis thaliana
caacaccggtggtcggc

SEQ ID NO: 61877 - DNA, 17 bp, Arabidopsis thaliana
caacacctctgtgaatt

SEQ ID NO: 61878 - DNA, 17 bp, Arabidopsis thaliana
caacacgaaaattccaa

SEQ ID NO: 61879 - DNA, 17 bp, Arabidopsis thaliana
caacacgaatccgacaa

SEQ ID NO: 61880 - DNA, 17 bp, Arabidopsis thaliana
caacacgaggacttccc

SEQ ID NO: 61881 - DNA, 17 bp, Arabidopsis thaliana
caacacgagtttttcat

SEQ ID NO: 61882 - DNA, 17 bp, Arabidopsis thaliana
caacacgcggcatgggt

SEQ ID NO: 61883 - DNA, 17 bp, Arabidopsis thaliana
caacacggccagagggt

SEQ ID NO: 61884 - DNA, 17 bp, Arabidopsis thaliana
caacacggggaaactta

SEQ ID NO: 61885 - DNA, 17 bp, Arabidopsis thaliana
caacacgtctgcctggg

SEQ ID NO: 61886 - DNA, 17 bp, Arabidopsis thaliana
caacacgtctttctatt

SEQ ID NO: 61887 - DNA, 17 bp, Arabidopsis thaliana
caacacgttgtgatgat

SEQ ID NO: 61888 - DNA, 17 bp, Arabidopsis thaliana
caacacgtttcttctct

SEQ ID NO: 61889 - DNA, 17 bp, Arabidopsis thaliana
caacacgttttctatta

SEQ ID NO: 61890 - DNA, 17 bp, Arabidopsis thaliana
caacactacgggatttc

SEQ ID NO: 61891 - DNA, 17 bp, Arabidopsis thaliana
caacactatcttgttgc

SEQ ID NO: 61892 - DNA, 17 bp, Arabidopsis thaliana
caacactgaggtggtgg

SEQ ID NO: 61893 - DNA, 17 bp, Arabidopsis thaliana
caacactgcagctgttt

SEQ ID NO: 61894 - DNA, 17 bp, Arabidopsis thaliana
caacactgctgattaga

SEQ ID NO: 61895 - DNA, 17 bp, Arabidopsis thaliana
caacactgttgtgatac

SEQ ID NO: 61896 - DNA, 17 bp, Arabidopsis thaliana
caacacttcttgcggca

SEQ ID NO: 61897 - DNA, 17 bp, Arabidopsis thaliana
caacacttgctttttgg

SEQ ID NO: 61898 - DNA, 17 bp, Arabidopsis thaliana
caacacttgtgtgattc

SEQ ID NO: 61899 - DNA, 17 bp, Arabidopsis thaliana
caacactttgatacatc

SEQ ID NO: 61900 - DNA, 17 bp, Arabidopsis thaliana
caacacttttgactact

SEQ ID NO: 61901 - DNA, 17 bp, Arabidopsis thaliana
caacagaaatgttaccg

SEQ ID NO: 61902 - DNA, 17 bp, Arabidopsis thaliana
caacagaaattactttc

SEQ ID NO: 61903 - DNA, 17 bp, Arabidopsis thaliana
caacagaaccgttgact

SEQ ID NO: 61904 - DNA, 17 bp, Arabidopsis thaliana
caacagaagcagatcgc

SEQ ID NO: 61905 - DNA, 17 bp, Arabidopsis thaliana
caacagactaacggtgt

SEQ ID NO: 61906 - DNA, 17 bp, Arabidopsis thaliana
caacagacttgttcggg

SEQ ID NO: 61907 - DNA, 17 bp, Arabidopsis thaliana
caacagacttgtttcgt

SEQ ID NO: 61908 - DNA, 17 bp, Arabidopsis thaliana
caacagacttttttggt

SEQ ID NO: 61909 - DNA, 17 bp, Arabidopsis thaliana
caacagagagaagcaaa

SEQ ID NO: 61910 - DNA, 17 bp, Arabidopsis thaliana
caacagagcgattactg

SEQ ID NO: 61911 - DNA, 17 bp, Arabidopsis thaliana
caacagaggtgtacctg

SEQ ID NO: 61912 - DNA, 17 bp, Arabidopsis thaliana
caacagagttcattgtc

SEQ ID NO: 61913 - DNA, 17 bp, Arabidopsis thaliana
caacagatccggagatt

SEQ ID NO: 61914 - DNA, 17 bp, Arabidopsis thaliana
caacagatctatttaca

SEQ ID NO: 61915 - DNA, 17 bp, Arabidopsis thaliana
caacagatttggagcag

SEQ ID NO: 61916 - DNA, 17 bp, Arabidopsis thaliana
caacagatttttcacac

SEQ ID NO: 61917 - DNA, 17 bp, Arabidopsis thaliana
caacagccacgcttggt

SEQ ID NO: 61918 - DNA, 17 bp, Arabidopsis thaliana
caacagcctttgtgatt

SEQ ID NO: 61919 - DNA, 17 bp, Arabidopsis thaliana
caacagcgatggagcca

SEQ ID NO: 61920 - DNA, 17 bp, Arabidopsis thaliana
caacagcgttcgacgat

SEQ ID NO: 61921 - DNA, 17 bp, Arabidopsis thaliana
caacagctactgtgcgc

SEQ ID NO: 61922 - DNA, 17 bp, Arabidopsis thaliana
caacagctattgtgcgc

SEQ ID NO: 61923 - DNA, 17 bp, Arabidopsis thaliana
caacagctccatgatgt

SEQ ID NO: 61924 - DNA, 17 bp, Arabidopsis thaliana
caacagctccatgttat

SEQ ID NO: 61925 - DNA, 17 bp, Arabidopsis thaliana
caacagctggaaacggc

SEQ ID NO: 61926 - DNA, 17 bp, Arabidopsis thaliana
caacagctgtaaacggc

SEQ ID NO: 61927 - DNA, 17 bp, Arabidopsis thaliana
caacagcttgcgatatg

SEQ ID NO: 61928 - DNA, 17 bp, Arabidopsis thaliana
caacagcttgttctctg

SEQ ID NO: 61929 - DNA, 17 bp, Arabidopsis thaliana
caacagctttatgggtt

SEQ ID NO: 61930 - DNA, 17 bp, Arabidopsis thaliana
caacaggaagttatgcc

SEQ ID NO: 61931 - DNA, 17 bp, Arabidopsis thaliana
caacaggattgggttct

SEQ ID NO: 61932 - DNA, 17 bp, Arabidopsis thaliana
caacaggcaacagcgtt

SEQ ID NO: 61933 - DNA, 17 bp, Arabidopsis thaliana
caacaggcggttttgcg

SEQ ID NO: 61934 - DNA, 17 bp, Arabidopsis thaliana
caacaggctcattgcat

SEQ ID NO: 61935 - DNA, 17 bp, Arabidopsis thaliana
caacaggctgtgtcagc

SEQ ID NO: 61936 - DNA, 17 bp, Arabidopsis thaliana
caacaggtgcagatcct

SEQ ID NO: 61937 - DNA, 17 bp, Arabidopsis thaliana
caacaggtggcggtttg

SEQ ID NO: 61938 - DNA, 17 bp, Arabidopsis thaliana
caacaggtttactggga

SEQ ID NO: 61939 - DNA, 17 bp, Arabidopsis thaliana
caacaggtttggcccca

SEQ ID NO: 61940 - DNA, 17 bp, Arabidopsis thaliana
caacaggtttggccccc

SEQ ID NO: 61941 - DNA, 17 bp, Arabidopsis thaliana
caacaggttttggtgtg

SEQ ID NO: 61942 - DNA, 17 bp, Arabidopsis thaliana
caacagtaaaccatcgg

SEQ ID NO: 61943 - DNA, 17 bp, Arabidopsis thaliana
caacagtcattccaccc

SEQ ID NO: 61944 - DNA, 17 bp, Arabidopsis thaliana
caacagtcccaggtggc

SEQ ID NO: 61945 - DNA, 17 bp, Arabidopsis thaliana
caacagtcgcagcgact

SEQ ID NO: 61946 - DNA, 17 bp, Arabidopsis thaliana
caacagtcggcgagaca

SEQ ID NO: 61947 - DNA, 17 bp, Arabidopsis thaliana
caacagtgctgtaacag

SEQ ID NO: 61948 - DNA, 17 bp, Arabidopsis thaliana
caacagtgggtccctcg

SEQ ID NO: 61949 - DNA, 17 bp, Arabidopsis thaliana
caacagtgtcggctata

SEQ ID NO: 61950 - DNA, 17 bp, Arabidopsis thaliana
caacagttacatttgct

SEQ ID NO: 61951 - DNA, 17 bp, Arabidopsis thaliana
caacagttgctatggct

SEQ ID NO: 61952 - DNA, 17 bp, Arabidopsis thaliana
caacagttgcttcctta

SEQ ID NO: 61953 - DNA, 17 bp, Arabidopsis thaliana
caacagttgcttccttg

SEQ ID NO: 61954 - DNA, 17 bp, Arabidopsis thaliana
caacagttggtgaccgg

SEQ ID NO: 61955 - DNA, 17 bp, Arabidopsis thaliana
caacagttgtaagtccg

SEQ ID NO: 61956 - DNA, 17 bp, Arabidopsis thaliana
caacagtttgcgcagct

SEQ ID NO: 61957 - DNA, 17 bp, Arabidopsis thaliana
caacagttttccggcga

SEQ ID NO: 61958 - DNA, 17 bp, Arabidopsis thaliana
caacataatcaagcccg

SEQ ID NO: 61959 - DNA, 17 bp, Arabidopsis thaliana
caacataattcacgccg

SEQ ID NO: 61960 - DNA, 17 bp, Arabidopsis thaliana
caacatagcgttcgata

SEQ ID NO: 61961 - DNA, 17 bp, Arabidopsis thaliana
caacatagttggccgag

SEQ ID NO: 61962 - DNA, 17 bp, Arabidopsis thaliana
caacatcaccggattgt

SEQ ID NO: 61963 - DNA, 17 bp, Arabidopsis thaliana
caacatcagcctctatt

SEQ ID NO: 61964 - DNA, 17 bp, Arabidopsis thaliana
caacatccagattcttc

SEQ ID NO: 61965 - DNA, 17 bp, Arabidopsis thaliana
caacatccgatgtggga

SEQ ID NO: 61966 - DNA, 17 bp, Arabidopsis thaliana
caacatcctcaaatagt

SEQ ID NO: 61967 - DNA, 17 bp, Arabidopsis thaliana
caacatcctgcacgacc

SEQ ID NO: 61968 - DNA, 17 bp, Arabidopsis thaliana
caacatcggaagttgag

SEQ ID NO: 61969 - DNA, 17 bp, Arabidopsis thaliana
caacatcgggcctaggc

SEQ ID NO: 61970 - DNA, 17 bp, Arabidopsis thaliana
caacatcggggcaagac

SEQ ID NO: 61971 - DNA, 17 bp, Arabidopsis thaliana
caacatcgtcttctgcg

SEQ ID NO: 61972 - DNA, 17 bp, Arabidopsis thaliana
caacatctatgtgttgt

SEQ ID NO: 61973 - DNA, 17 bp, Arabidopsis thaliana
caacatctcattcggat

SEQ ID NO: 61974 - DNA, 17 bp, Arabidopsis thaliana
caacatctccttcaggc

SEQ ID NO: 61975 - DNA, 17 bp, Arabidopsis thaliana
caacatctctctgttct

SEQ ID NO: 61976 - DNA, 17 bp, Arabidopsis thaliana
caacatctctggaactt

SEQ ID NO: 61977 - DNA, 17 bp, Arabidopsis thaliana
caacatctgatcgatag

SEQ ID NO: 61978 - DNA, 17 bp, Arabidopsis thaliana
caacatctgttcgtttg

SEQ ID NO: 61979 - DNA, 17 bp, Arabidopsis thaliana
caacatcttcgacgccg

SEQ ID NO: 61980 - DNA, 17 bp, Arabidopsis thaliana
caacatcttctaaaacc

SEQ ID NO: 61981 - DNA, 17 bp, Arabidopsis thaliana
caacatcttgtttggga

SEQ ID NO: 61982 - DNA, 17 bp, Arabidopsis thaliana
caacatctttgttctgg

SEQ ID NO: 61983 - DNA, 17 bp, Arabidopsis thaliana
caacatgaaggacggat

SEQ ID NO: 61984 - DNA, 17 bp, Arabidopsis thaliana
caacatgaatagtcccg

SEQ ID NO: 61985 - DNA, 17 bp, Arabidopsis thaliana
caacatgactctggtgt

SEQ ID NO: 61986 - DNA, 17 bp, Arabidopsis thaliana
caacatgactgcttcca

SEQ ID NO: 61987 - DNA, 17 bp, Arabidopsis thaliana
caacatgcggacttgct

SEQ ID NO: 61988 - DNA, 17 bp, Arabidopsis thaliana
caacatgtgtccattga

SEQ ID NO: 61989 - DNA, 17 bp, Arabidopsis thaliana
caacattagagtgcttg

SEQ ID NO: 61990 - DNA, 17 bp, Arabidopsis thaliana
caacattagattgatca

SEQ ID NO: 61991 - DNA, 17 bp, Arabidopsis thaliana
caacattagtcgttagc

SEQ ID NO: 61992 - DNA, 17 bp, Arabidopsis thaliana
caacattcccagttgag

SEQ ID NO: 61993 - DNA, 17 bp, Arabidopsis thaliana
caacattcctcaggatt

SEQ ID NO: 61994 - DNA, 17 bp, Arabidopsis thaliana
caacattcctcaggttt

SEQ ID NO: 61995 - DNA, 17 bp, Arabidopsis thaliana
caacattcctcagtttt

SEQ ID NO: 61996 - DNA, 17 bp, Arabidopsis thaliana
caacattctccttcttc

SEQ ID NO: 61997 - DNA, 17 bp, Arabidopsis thaliana
caacattctgtctaagc

SEQ ID NO: 61998 - DNA, 17 bp, Arabidopsis thaliana
caacattcttcaggttt

SEQ ID NO: 61999 - DNA, 17 bp, Arabidopsis thaliana
caacattgaatggtcgc

SEQ ID NO: 62000 - DNA, 17 bp, Arabidopsis thaliana
caacattgccggtagtg

SEQ ID NO: 62001 - DNA, 17 bp, Arabidopsis thaliana
caacattgccttccggc

SEQ ID NO: 62002 - DNA, 17 bp, Arabidopsis thaliana
caacatttgcaaagtgc

SEQ ID NO: 62003 - DNA, 17 bp, Arabidopsis thaliana
caacatttgtggtggtt

SEQ ID NO: 62004 - DNA, 17 bp, Arabidopsis thaliana
caaccaaaataactatg

SEQ ID NO: 62005 - DNA, 17 bp, Arabidopsis thaliana
caaccaaacccaactgg

SEQ ID NO: 62006 - DNA, 17 bp, Arabidopsis thaliana
caaccaaacccgtcccg

SEQ ID NO: 62007 - DNA, 17 bp, Arabidopsis thaliana
caaccaaacccgtcttg

SEQ ID NO: 62008 - DNA, 17 bp, Arabidopsis thaliana
caaccaaactcgtcccg

SEQ ID NO: 62009 - DNA, 17 bp, Arabidopsis thaliana
caaccaaacttggcatg

SEQ ID NO: 62010 - DNA, 17 bp, Arabidopsis thaliana
caaccaaactttctgct

SEQ ID NO: 62011 - DNA, 17 bp, Arabidopsis thaliana
caaccaaagattaagcc

SEQ ID NO: 62012 - DNA, 17 bp, Arabidopsis thaliana
caaccaaaggattttcc

SEQ ID NO: 62013 - DNA, 17 bp, Arabidopsis thaliana
caaccaaagttctgttg

SEQ ID NO: 62014 - DNA, 17 bp, Arabidopsis thaliana
caaccaaagttttggac

SEQ ID NO: 62015 - DNA, 17 bp, Arabidopsis thaliana
caaccaaagtttttggg

SEQ ID NO: 62016 - DNA, 17 bp, Arabidopsis thaliana
caaccaaatccgggtgc

SEQ ID NO: 62017 - DNA, 17 bp, Arabidopsis thaliana
caaccaaattatccgct

SEQ ID NO: 62018 - DNA, 17 bp, Arabidopsis thaliana
caaccaaattggaccgt

SEQ ID NO: 62019 - DNA, 17 bp, Arabidopsis thaliana
caaccaaatttcctctt

SEQ ID NO: 62020 - DNA, 17 bp, Arabidopsis thaliana
caaccaacacgaggact

SEQ ID NO: 62021 - DNA, 17 bp, Arabidopsis thaliana
caaccaacagtcattcc

SEQ ID NO: 62022 - DNA, 17 bp, Arabidopsis thaliana
caaccaaccaaattgga

SEQ ID NO: 62023 - DNA, 17 bp, Arabidopsis thaliana
caaccaaccaaccaacc

SEQ ID NO: 62024 - DNA, 17 bp, Arabidopsis thaliana
caaccaaccaaccgtat

SEQ ID NO: 62025 - DNA, 17 bp, Arabidopsis thaliana
caaccaaccgaatgacc

SEQ ID NO: 62026 - DNA, 17 bp, Arabidopsis thaliana
caaccaacgtcacctga

SEQ ID NO: 62027 - DNA, 17 bp, Arabidopsis thaliana
caaccaactctctgtgt

SEQ ID NO: 62028 - DNA, 17 bp, Arabidopsis thaliana
caaccaacttagtcgca

SEQ ID NO: 62029 - DNA, 17 bp, Arabidopsis thaliana
caaccaacttatgtagt

SEQ ID NO: 62030 - DNA, 17 bp, Arabidopsis thaliana
caaccaactttacatgc

SEQ ID NO: 62031 - DNA, 17 bp, Arabidopsis thaliana
caaccaagaagtcgtga

SEQ ID NO: 62032 - DNA, 17 bp, Arabidopsis thaliana
caaccaagaatgagatc

SEQ ID NO: 62033 - DNA, 17 bp, Arabidopsis thaliana
caaccaagagggtctgg

SEQ ID NO: 62034 - DNA, 17 bp, Arabidopsis thaliana
caaccaagcagatctgg

SEQ ID NO: 62035 - DNA, 17 bp, Arabidopsis thaliana
caaccaagcgattgtgg

SEQ ID NO: 62036 - DNA, 17 bp, Arabidopsis thaliana
caaccaagcggattaag

SEQ ID NO: 62037 - DNA, 17 bp, Arabidopsis thaliana
caaccaaggaaaagtgt

SEQ ID NO: 62038 - DNA, 17 bp, Arabidopsis thaliana
caaccaaggaaacttcc

SEQ ID NO: 62039 - DNA, 17 bp, Arabidopsis thaliana
caaccaaggaccagccg

SEQ ID NO: 62040 - DNA, 17 bp, Arabidopsis thaliana
caaccaaggatgacttg

SEQ ID NO: 62041 - DNA, 17 bp, Arabidopsis thaliana
caaccaagggtgttgat

SEQ ID NO: 62042 - DNA, 17 bp, Arabidopsis thaliana
caaccaatggaccaaag

SEQ ID NO: 62043 - DNA, 17 bp, Arabidopsis thaliana
caaccaatgtgacttag

SEQ ID NO: 62044 - DNA, 17 bp, Arabidopsis thaliana
caaccaatgtgatttct

SEQ ID NO: 62045 - DNA, 17 bp, Arabidopsis thaliana
caaccaattcatcggat

SEQ ID NO: 62046 - DNA, 17 bp, Arabidopsis thaliana
caaccaattggctatag

SEQ ID NO: 62047 - DNA, 17 bp, Arabidopsis thaliana
caaccacagttgcttag

SEQ ID NO: 62048 - DNA, 17 bp, Arabidopsis thaliana
caaccaccatctttctt

SEQ ID NO: 62049 - DNA, 17 bp, Arabidopsis thaliana
caaccacgggccgactt

SEQ ID NO: 62050 - DNA, 17 bp, Arabidopsis thaliana
caaccactgtcaccatc

SEQ ID NO: 62051 - DNA, 17 bp, Arabidopsis thaliana
caaccagaccggtgtcc

SEQ ID NO: 62052 - DNA, 17 bp, Arabidopsis thaliana
caaccagatctgaaagg

SEQ ID NO: 62053 - DNA, 17 bp, Arabidopsis thaliana
caaccagcgacagcaac

SEQ ID NO: 62054 - DNA, 17 bp, Arabidopsis thaliana
caaccagcttttgccca

SEQ ID NO: 62055 - DNA, 17 bp, Arabidopsis thaliana
caaccaggaggttcggg

SEQ ID NO: 62056 - DNA, 17 bp, Arabidopsis thaliana
caaccaggttggaccat

SEQ ID NO: 62057 - DNA, 17 bp, Arabidopsis thaliana
caaccaggttggacgcc

SEQ ID NO: 62058 - DNA, 17 bp, Arabidopsis thaliana
caaccaggttggactac

SEQ ID NO: 62059 - DNA, 17 bp, Arabidopsis thaliana
caaccagtcctgaaggg

SEQ ID NO: 62060 - DNA, 17 bp, Arabidopsis thaliana
caaccagtggtgttccg

SEQ ID NO: 62061 - DNA, 17 bp, Arabidopsis thaliana
caaccataaacgatgcc

SEQ ID NO: 62062 - DNA, 17 bp, Arabidopsis thaliana
caaccatatgagttttg

SEQ ID NO: 62063 - DNA, 17 bp, Arabidopsis thaliana
caaccatccatagactt

SEQ ID NO: 62064 - DNA, 17 bp, Arabidopsis thaliana
caaccatcccccatgaa

SEQ ID NO: 62065 - DNA, 17 bp, Arabidopsis thaliana
caaccatcctgtgatgt

SEQ ID NO: 62066 - DNA, 17 bp, Arabidopsis thaliana
caaccatgatgtctaca

SEQ ID NO: 62067 - DNA, 17 bp, Arabidopsis thaliana
caaccatgcaagcgatt

SEQ ID NO: 62068 - DNA, 17 bp, Arabidopsis thaliana
caaccattgaagttgct

SEQ ID NO: 62069 - DNA, 17 bp, Arabidopsis thaliana
caaccattgggccaaag

SEQ ID NO: 62070 - DNA, 17 bp, Arabidopsis thaliana
caacccacggagctatc

SEQ ID NO: 62071 - DNA, 17 bp, Arabidopsis thaliana
caacccactttgcctct

SEQ ID NO: 62072 - DNA, 17 bp, Arabidopsis thaliana
caacccatccatatttt

SEQ ID NO: 62073 - DNA, 17 bp, Arabidopsis thaliana
caacccatccgctagac

SEQ ID NO: 62074 - DNA, 17 bp, Arabidopsis thaliana
caacccatgaaccctaa

SEQ ID NO: 62075 - DNA, 17 bp, Arabidopsis thaliana
caaccccaaatccagcc

SEQ ID NO: 62076 - DNA, 17 bp, Arabidopsis thaliana
caaccccaacaacccca

SEQ ID NO: 62077 - DNA, 17 bp, Arabidopsis thaliana
caaccccaggtcaggcg

SEQ ID NO: 62078 - DNA, 17 bp, Arabidopsis thaliana
caacccccaagcaggcg

SEQ ID NO: 62079 - DNA, 17 bp, Arabidopsis thaliana
caacccctgcttttgct

SEQ ID NO: 62080 - DNA, 17 bp, Arabidopsis thaliana
caacccctgcttttggt

SEQ ID NO: 62081 - DNA, 17 bp, Arabidopsis thaliana
caacccctgcttttgtt

SEQ ID NO: 62082 - DNA, 17 bp, Arabidopsis thaliana
caacccctggtcgacaa

SEQ ID NO: 62083 - DNA, 17 bp, Arabidopsis thaliana
caacccggcttgactct

SEQ ID NO: 62084 - DNA, 17 bp, Arabidopsis thaliana
caacccggttgacccca

SEQ ID NO: 62085 - DNA, 17 bp, Arabidopsis thaliana
caacccgtcccgtggga

SEQ ID NO: 62086 - DNA, 17 bp, Arabidopsis thaliana
caacccgttcagtgcga

SEQ ID NO: 62087 - DNA, 17 bp, Arabidopsis thaliana
caaccctatttttttcc

SEQ ID NO: 62088 - DNA, 17 bp, Arabidopsis thaliana
caaccctcgtgtttact

SEQ ID NO: 62089 - DNA, 17 bp, Arabidopsis thaliana
caaccctcgtgtttagt

SEQ ID NO: 62090 - DNA, 17 bp, Arabidopsis thaliana
caaccctggtttagtca

SEQ ID NO: 62091 - DNA, 17 bp, Arabidopsis thaliana
caacccttagattttat

SEQ ID NO: 62092 - DNA, 17 bp, Arabidopsis thaliana
caaccctttgtcgctaa

SEQ ID NO: 62093 - DNA, 17 bp, Arabidopsis thaliana
caaccgaaagcattcag

SEQ ID NO: 62094 - DNA, 17 bp, Arabidopsis thaliana
caaccgaaccggatgtt

SEQ ID NO: 62095 - DNA, 17 bp, Arabidopsis thaliana
caaccgaatgaccagca

SEQ ID NO: 62096 - DNA, 17 bp, Arabidopsis thaliana
caaccgaatgaccagcg

SEQ ID NO: 62097 - DNA, 17 bp, Arabidopsis thaliana
caaccgaatgaccgatg

SEQ ID NO: 62098 - DNA, 17 bp, Arabidopsis thaliana
caaccgaatggccaaca

SEQ ID NO: 62099 - DNA, 17 bp, Arabidopsis thaliana
caaccgaatggccagca

SEQ ID NO: 62100 - DNA, 17 bp, Arabidopsis thaliana
caaccgaatggccagcg

SEQ ID NO: 62101 - DNA, 17 bp, Arabidopsis thaliana
caaccgaatggccatca

SEQ ID NO: 62102 - DNA, 17 bp, Arabidopsis thaliana
caaccgaatggccgacc

SEQ ID NO: 62103 - DNA, 17 bp, Arabidopsis thaliana
caaccgaatggccggct

SEQ ID NO: 62104 - DNA, 17 bp, Arabidopsis thaliana
caaccgaatggcggacc

SEQ ID NO: 62105 - DNA, 17 bp, Arabidopsis thaliana
caaccgaatgtaccgaa

SEQ ID NO: 62106 - DNA, 17 bp, Arabidopsis thaliana
caaccgaccgtcggaca

SEQ ID NO: 62107 - DNA, 17 bp, Arabidopsis thaliana
caaccgactttggaatt

SEQ ID NO: 62108 - DNA, 17 bp, Arabidopsis thaliana
caaccgagtttctcttt

SEQ ID NO: 62109 - DNA, 17 bp, Arabidopsis thaliana
caaccgattggtttgcg

SEQ ID NO: 62110 - DNA, 17 bp, Arabidopsis thaliana
caaccgcaaccgcatcc

SEQ ID NO: 62111 - DNA, 17 bp, Arabidopsis thaliana
caaccgcaagtaagttg

SEQ ID NO: 62112 - DNA, 17 bp, Arabidopsis thaliana
caaccgcaatgcaacaa

SEQ ID NO: 62113 - DNA, 17 bp, Arabidopsis thaliana
caaccgcacagagttga

SEQ ID NO: 62114 - DNA, 17 bp, Arabidopsis thaliana
caaccgcaccaggaatg

SEQ ID NO: 62115 - DNA, 17 bp, Arabidopsis thaliana
caaccgcagacagaggt

SEQ ID NO: 62116 - DNA, 17 bp, Arabidopsis thaliana
caaccgcagcggaccat

SEQ ID NO: 62117 - DNA, 17 bp, Arabidopsis thaliana
caaccgcaggagacaac

SEQ ID NO: 62118 - DNA, 17 bp, Arabidopsis thaliana
caaccgcagtcggaaaa

SEQ ID NO: 62119 - DNA, 17 bp, Arabidopsis thaliana
caaccgccgtgatgacc

SEQ ID NO: 62120 - DNA, 17 bp, Arabidopsis thaliana
caaccgccttgcggatg

SEQ ID NO: 62121 - DNA, 17 bp, Arabidopsis thaliana
caaccgcgtggccagct

SEQ ID NO: 62122 - DNA, 17 bp, Arabidopsis thaliana
caaccgctacagagcag

SEQ ID NO: 62123 - DNA, 17 bp, Arabidopsis thaliana
caaccgctaccgcccgt

SEQ ID NO: 62124 - DNA, 17 bp, Arabidopsis thaliana
caaccggactatcttct

SEQ ID NO: 62125 - DNA, 17 bp, Arabidopsis thaliana
caaccggatacccgtca

SEQ ID NO: 62126 - DNA, 17 bp, Arabidopsis thaliana
caaccggcggtgtaccg

SEQ ID NO: 62127 - DNA, 17 bp, Arabidopsis thaliana
caaccgggttggaccac

SEQ ID NO: 62128 - DNA, 17 bp, Arabidopsis thaliana
caaccggttattggatg

SEQ ID NO: 62129 - DNA, 17 bp, Arabidopsis thaliana
caaccgtgaaggggctg

SEQ ID NO: 62130 - DNA, 17 bp, Arabidopsis thaliana
caaccgtgattccagcc

SEQ ID NO: 62131 - DNA, 17 bp, Arabidopsis thaliana
caaccgtgatttccagc

SEQ ID NO: 62132 - DNA, 17 bp, Arabidopsis thaliana
caaccgtggtcattgcg

SEQ ID NO: 62133 - DNA, 17 bp, Arabidopsis thaliana
caaccgttattagatct

SEQ ID NO: 62134 - DNA, 17 bp, Arabidopsis thaliana
caaccgttcagagtgca

SEQ ID NO: 62135 - DNA, 17 bp, Arabidopsis thaliana
caaccgttcataagtgt

SEQ ID NO: 62136 - DNA, 17 bp, Arabidopsis thaliana
caaccgttcgccctggg

SEQ ID NO: 62137 - DNA, 17 bp, Arabidopsis thaliana
caaccgttgcggaccat

SEQ ID NO: 62138 - DNA, 17 bp, Arabidopsis thaliana
caaccgttgttttgcta

SEQ ID NO: 62139 - DNA, 17 bp, Arabidopsis thaliana
caaccgtttggaccgtc

SEQ ID NO: 62140 - DNA, 17 bp, Arabidopsis thaliana
caaccgtttggtctatt

SEQ ID NO: 62141 - DNA, 17 bp, Arabidopsis thaliana
caacctaaatgggtgac

SEQ ID NO: 62142 - DNA, 17 bp, Arabidopsis thaliana
caacctaccatggtggt

SEQ ID NO: 62143 - DNA, 17 bp, Arabidopsis thaliana
caacctagaatgctttg

SEQ ID NO: 62144 - DNA, 17 bp, Arabidopsis thaliana
caacctcaggccctttt

SEQ ID NO: 62145 - DNA, 17 bp, Arabidopsis thaliana
caacctcctgcagtaca

SEQ ID NO: 62146 - DNA, 17 bp, Arabidopsis thaliana
caacctctaagattcgt

SEQ ID NO: 62147 - DNA, 17 bp, Arabidopsis thaliana
caacctctcatgtgctg

SEQ ID NO: 62148 - DNA, 17 bp, Arabidopsis thaliana
caacctctctttttttg

SEQ ID NO: 62149 - DNA, 17 bp, Arabidopsis thaliana
caacctctgagcagaga

SEQ ID NO: 62150 - DNA, 17 bp, Arabidopsis thaliana
caacctctgctcgcaat

SEQ ID NO: 62151 - DNA, 17 bp, Arabidopsis thaliana
caacctctggggaaatc

SEQ ID NO: 62152 - DNA, 17 bp, Arabidopsis thaliana
caacctcttcgacaagt

SEQ ID NO: 62153 - DNA, 17 bp, Arabidopsis thaliana
caacctctttgcatgca

SEQ ID NO: 62154 - DNA, 17 bp, Arabidopsis thaliana
caacctgatccacatcg

SEQ ID NO: 62155 - DNA, 17 bp, Arabidopsis thaliana
caacctgcatgggccac

SEQ ID NO: 62156 - DNA, 17 bp, Arabidopsis thaliana
caacctgcccgcttgtc

SEQ ID NO: 62157 - DNA, 17 bp, Arabidopsis thaliana
caacctgcttggcctgc

SEQ ID NO: 62158 - DNA, 17 bp, Arabidopsis thaliana
caacctggctctgatac

SEQ ID NO: 62159 - DNA, 17 bp, Arabidopsis thaliana
caacctggctctgctac

SEQ ID NO: 62160 - DNA, 17 bp, Arabidopsis thaliana
caacctggttgacccga

SEQ ID NO: 62161 - DNA, 17 bp, Arabidopsis thaliana
caacctgtagggtgcct

SEQ ID NO: 62162 - DNA, 17 bp, Arabidopsis thaliana
caacctgtcaccatctg

SEQ ID NO: 62163 - DNA, 17 bp, Arabidopsis thaliana
caacctgtggctggatt

SEQ ID NO: 62164 - DNA, 17 bp, Arabidopsis thaliana
caacctgtttggaccgg

SEQ ID NO: 62165 - DNA, 17 bp, Arabidopsis thaliana
caaccttaaattttgtg

SEQ ID NO: 62166 - DNA, 17 bp, Arabidopsis thaliana
caaccttctaccgggtg

SEQ ID NO: 62167 - DNA, 17 bp, Arabidopsis thaliana
caaccttgatgtgtttg

SEQ ID NO: 62168 - DNA, 17 bp, Arabidopsis thaliana
caaccttggcaacccag

SEQ ID NO: 62169 - DNA, 17 bp, Arabidopsis thaliana
caaccttgggaagcaca

SEQ ID NO: 62170 - DNA, 17 bp, Arabidopsis thaliana
caacctttcacaaccat

SEQ ID NO: 62171 - DNA, 17 bp, Arabidopsis thaliana
caacctttcctggatgt

SEQ ID NO: 62172 - DNA, 17 bp, Arabidopsis thaliana
caaccttttcctggatg

SEQ ID NO: 62173 - DNA, 17 bp, Arabidopsis thaliana
caaccttttctctttcg

SEQ ID NO: 62174 - DNA, 17 bp, Arabidopsis thaliana
caaccttttttttggaa

SEQ ID NO: 62175 - DNA, 17 bp, Arabidopsis thaliana
caacgaaaaccgcatag

SEQ ID NO: 62176 - DNA, 17 bp, Arabidopsis thaliana
caacgaaagtccaagac

SEQ ID NO: 62177 - DNA, 17 bp, Arabidopsis thaliana
caacgaactgcagacac

SEQ ID NO: 62178 - DNA, 17 bp, Arabidopsis thaliana
caacgaagatattacgc

SEQ ID NO: 62179 - DNA, 17 bp, Arabidopsis thaliana
caacgaatcaagacttt

SEQ ID NO: 62180 - DNA, 17 bp, Arabidopsis thaliana
caacgacacgtgccttt

SEQ ID NO: 62181 - DNA, 17 bp, Arabidopsis thaliana
caacgacagagtgttcc

SEQ ID NO: 62182 - DNA, 17 bp, Arabidopsis thaliana
caacgacattgtgatag

SEQ ID NO: 62183 - DNA, 17 bp, Arabidopsis thaliana
caacgaccagcgacagc

SEQ ID NO: 62184 - DNA, 17 bp, Arabidopsis thaliana
caacgaccctttggttg

SEQ ID NO: 62185 - DNA, 17 bp, Arabidopsis thaliana
caacgaccggtgacccc

SEQ ID NO: 62186 - DNA, 17 bp, Arabidopsis thaliana
caacgaccgtgatgtat

SEQ ID NO: 62187 - DNA, 17 bp, Arabidopsis thaliana
caacgacctctaaattt

SEQ ID NO: 62188 - DNA, 17 bp, Arabidopsis thaliana
caacgaccttctctctt

SEQ ID NO: 62189 - DNA, 17 bp, Arabidopsis thaliana
caacgacgctgcaggca

SEQ ID NO: 62190 - DNA, 17 bp, Arabidopsis thaliana
caacgacggcgagtggc

SEQ ID NO: 62191 - DNA, 17 bp, Arabidopsis thaliana
caacgactctcggcaac

SEQ ID NO: 62192 - DNA, 17 bp, Arabidopsis thaliana
caacgactgttgttgcg

SEQ ID NO: 62193 - DNA, 17 bp, Arabidopsis thaliana
caacgacttgtggacac

SEQ ID NO: 62194 - DNA, 17 bp, Arabidopsis thaliana
caacgactttaaaccga

SEQ ID NO: 62195 - DNA, 17 bp, Arabidopsis thaliana
caacgagcgcaaccctc

SEQ ID NO: 62196 - DNA, 17 bp, Arabidopsis thaliana
caacgaggaattcctag

SEQ ID NO: 62197 - DNA, 17 bp, Arabidopsis thaliana
caacgaggcgggccttg

SEQ ID NO: 62198 - DNA, 17 bp, Arabidopsis thaliana
caacgagggcacgtctg

SEQ ID NO: 62199 - DNA, 17 bp, Arabidopsis thaliana
caacgagtgtgactgac

SEQ ID NO: 62200 - DNA, 17 bp, Arabidopsis thaliana
caacgagttcacacctt

SEQ ID NO: 62201 - DNA, 17 bp, Arabidopsis thaliana
caacgataacgacagat

SEQ ID NO: 62202 - DNA, 17 bp, Arabidopsis thaliana
caacgataactcagctg

SEQ ID NO: 62203 - DNA, 17 bp, Arabidopsis thaliana
caacgatatgtgctgaa

SEQ ID NO: 62204 - DNA, 17 bp, Arabidopsis thaliana
caacgatcgatacgcca

SEQ ID NO: 62205 - DNA, 17 bp, Arabidopsis thaliana
caacgatctgttggccc

SEQ ID NO: 62206 - DNA, 17 bp, Arabidopsis thaliana
caacgatcttgacgctg

SEQ ID NO: 62207 - DNA, 17 bp, Arabidopsis thaliana
caacgatgtcgacacaa

SEQ ID NO: 62208 - DNA, 17 bp, Arabidopsis thaliana
caacgattcccgattga

SEQ ID NO: 62209 - DNA, 17 bp, Arabidopsis thaliana
caacgattcccgattgg

SEQ ID NO: 62210 - DNA, 17 bp, Arabidopsis thaliana
caacgatttctggacac

SEQ ID NO: 62211 - DNA, 17 bp, Arabidopsis thaliana
caacgatttgatttcaa

SEQ ID NO: 62212 - DNA, 17 bp, Arabidopsis thaliana
caacgcaagatcatgtg

SEQ ID NO: 62213 - DNA, 17 bp, Arabidopsis thaliana
caacgcaatgtgatttc

SEQ ID NO: 62214 - DNA, 17 bp, Arabidopsis thaliana
caacgcatttcctagat

SEQ ID NO: 62215 - DNA, 17 bp, Arabidopsis thaliana
caacgccattcttctgc

SEQ ID NO: 62216 - DNA, 17 bp, Arabidopsis thaliana
caacgccgttgagtcgc

SEQ ID NO: 62217 - DNA, 17 bp, Arabidopsis thaliana
caacgcctttaaaccga

SEQ ID NO: 62218 - DNA, 17 bp, Arabidopsis thaliana
caacgcggattacggtg

SEQ ID NO: 62219 - DNA, 17 bp, Arabidopsis thaliana
caacgctacgtctcggg

SEQ ID NO: 62220 - DNA, 17 bp, Arabidopsis thaliana
caacgctcagattgtgt

SEQ ID NO: 62221 - DNA, 17 bp, Arabidopsis thaliana
caacgctctatggctaa

SEQ ID NO: 62222 - DNA, 17 bp, Arabidopsis thaliana
caacgctcttgctcatc

SEQ ID NO: 62223 - DNA, 17 bp, Arabidopsis thaliana
caacgctgagattcacg

SEQ ID NO: 62224 - DNA, 17 bp, Arabidopsis thaliana
caacgctgttgcctgtt

SEQ ID NO: 62225 - DNA, 17 bp, Arabidopsis thaliana
caacgcttactatgctg

SEQ ID NO: 62226 - DNA, 17 bp, Arabidopsis thaliana
caacgcttgcggaaatg

SEQ ID NO: 62227 - DNA, 17 bp, Arabidopsis thaliana
caacgctttctcctcat

SEQ ID NO: 62228 - DNA, 17 bp, Arabidopsis thaliana
caacgcttttgtttctc

SEQ ID NO: 62229 - DNA, 17 bp, Arabidopsis thaliana
caacggaaatatgcggt

SEQ ID NO: 62230 - DNA, 17 bp, Arabidopsis thaliana
caacggaatattgttgt

SEQ ID NO: 62231 - DNA, 17 bp, Arabidopsis thaliana
caacggacaattccttc

SEQ ID NO: 62232 - DNA, 17 bp, Arabidopsis thaliana
caacggaccttcttgaa

SEQ ID NO: 62233 - DNA, 17 bp, Arabidopsis thaliana
caacggagtacctgagt

SEQ ID NO: 62234 - DNA, 17 bp, Arabidopsis thaliana
caacggatatctcggct

SEQ ID NO: 62235 - DNA, 17 bp, Arabidopsis thaliana
caacggatggatcgctg

SEQ ID NO: 62236 - DNA, 17 bp, Arabidopsis thaliana
caacggatgttctgtaa

SEQ ID NO: 62237 - DNA, 17 bp, Arabidopsis thaliana
caacggccaagatttta

SEQ ID NO: 62238 - DNA, 17 bp, Arabidopsis thaliana
caacggccgcatacgaa

SEQ ID NO: 62239 - DNA, 17 bp, Arabidopsis thaliana
caacggccgggggacgg

SEQ ID NO: 62240 - DNA, 17 bp, Arabidopsis thaliana
caacggcgaaagcactc

SEQ ID NO: 62241 - DNA, 17 bp, Arabidopsis thaliana
caacggctacgctcttt

SEQ ID NO: 62242 - DNA, 17 bp, Arabidopsis thaliana
caacggctactgtgcac

SEQ ID NO: 62243 - DNA, 17 bp, Arabidopsis thaliana
caacggctactgtgcgc

SEQ ID NO: 62244 - DNA, 17 bp, Arabidopsis thaliana
caacggctactgtgctc

SEQ ID NO: 62245 - DNA, 17 bp, Arabidopsis thaliana
caacggctgtggtgaag

SEQ ID NO: 62246 - DNA, 17 bp, Arabidopsis thaliana
caacggcttcaccgcca

SEQ ID NO: 62247 - DNA, 17 bp, Arabidopsis thaliana
caacggctttgttcttt

SEQ ID NO: 62248 - DNA, 17 bp, Arabidopsis thaliana
caacgggatcaccaacg

SEQ ID NO: 62249 - DNA, 17 bp, Arabidopsis thaliana
caacgggctgggcatat

SEQ ID NO: 62250 - DNA, 17 bp, Arabidopsis thaliana
caacggggcccaactct

SEQ ID NO: 62251 - DNA, 17 bp, Arabidopsis thaliana
caacggggcttgtttgg

SEQ ID NO: 62252 - DNA, 17 bp, Arabidopsis thaliana
caacggggttaatcgga

SEQ ID NO: 62253 - DNA, 17 bp, Arabidopsis thaliana
caacgggtaatttctgg

SEQ ID NO: 62254 - DNA, 17 bp, Arabidopsis thaliana
caacgggtcggattttg

SEQ ID NO: 62255 - DNA, 17 bp, Arabidopsis thaliana
caacgggtgtggcctgc

SEQ ID NO: 62256 - DNA, 17 bp, Arabidopsis thaliana
caacgggtgttgtatca

SEQ ID NO: 62257 - DNA, 17 bp, Arabidopsis thaliana
caacgggttcgtgggca

SEQ ID NO: 62258 - DNA, 17 bp, Arabidopsis thaliana
caacgggttttggctaa

SEQ ID NO: 62259 - DNA, 17 bp, Arabidopsis thaliana
caacggtcacatgtccc

SEQ ID NO: 62260 - DNA, 17 bp, Arabidopsis thaliana
caacggtcacatgtcgc

SEQ ID NO: 62261 - DNA, 17 bp, Arabidopsis thaliana
caacggtcccaggaatt

SEQ ID NO: 62262 - DNA, 17 bp, Arabidopsis thaliana
caacggtgatgtgcggt

SEQ ID NO: 62263 - DNA, 17 bp, Arabidopsis thaliana
caacggtggagaatcgg

SEQ ID NO: 62264 - DNA, 17 bp, Arabidopsis thaliana
caacggtggcacagatc

SEQ ID NO: 62265 - DNA, 17 bp, Arabidopsis thaliana
caacggtggtgattatg

SEQ ID NO: 62266 - DNA, 17 bp, Arabidopsis thaliana
caacggtgttctacaag

SEQ ID NO: 62267 - DNA, 17 bp, Arabidopsis thaliana
caacggttaggataatt

SEQ ID NO: 62268 - DNA, 17 bp, Arabidopsis thaliana
caacggttgagatcttt

SEQ ID NO: 62269 - DNA, 17 bp, Arabidopsis thaliana
caacggttgctttggcc

SEQ ID NO: 62270 - DNA, 17 bp, Arabidopsis thaliana
caacggtttggtttcgg

SEQ ID NO: 62271 - DNA, 17 bp, Arabidopsis thaliana
caacggttttcggtgag

SEQ ID NO: 62272 - DNA, 17 bp, Arabidopsis thaliana
caacgtacatagttaca

SEQ ID NO: 62273 - DNA, 17 bp, Arabidopsis thaliana
caacgtattcacctaag

SEQ ID NO: 62274 - DNA, 17 bp, Arabidopsis thaliana
caacgtcacctgagact

SEQ ID NO: 62275 - DNA, 17 bp, Arabidopsis thaliana
caacgtcacctgatact

SEQ ID NO: 62276 - DNA, 17 bp, Arabidopsis thaliana
caacgtcacgacgaaga

SEQ ID NO: 62277 - DNA, 17 bp, Arabidopsis thaliana
caacgtcattcgaatcg

SEQ ID NO: 62278 - DNA, 17 bp, Arabidopsis thaliana
caacgtccgttggaaat

SEQ ID NO: 62279 - DNA, 17 bp, Arabidopsis thaliana
caacgtcgtgtagattt

SEQ ID NO: 62280 - DNA, 17 bp, Arabidopsis thaliana
caacgtctacaaaaaag

SEQ ID NO: 62281 - DNA, 17 bp, Arabidopsis thaliana
caacgtctatgctgatg

SEQ ID NO: 62282 - DNA, 17 bp, Arabidopsis thaliana
caacgtcttttactcca

SEQ ID NO: 62283 - DNA, 17 bp, Arabidopsis thaliana
caacgtgacaaccgtca

SEQ ID NO: 62284 - DNA, 17 bp, Arabidopsis thaliana
caacgtgcgacggtgtt

SEQ ID NO: 62285 - DNA, 17 bp, Arabidopsis thaliana
caacgtgcgactgtaat

SEQ ID NO: 62286 - DNA, 17 bp, Arabidopsis thaliana
caacgtgcgactgtgtt

SEQ ID NO: 62287 - DNA, 17 bp, Arabidopsis thaliana
caacgtgcgactgtttc

SEQ ID NO: 62288 - DNA, 17 bp, Arabidopsis thaliana
caacgtgcgctgttggc

SEQ ID NO: 62289 - DNA, 17 bp, Arabidopsis thaliana
caacgtgctccgggcgt

SEQ ID NO: 62290 - DNA, 17 bp, Arabidopsis thaliana
caacgtggttggattgg

SEQ ID NO: 62291 - DNA, 17 bp, Arabidopsis thaliana
caacgtgtctcgaatcc

SEQ ID NO: 62292 - DNA, 17 bp, Arabidopsis thaliana
caacgtgttgttcagcg

SEQ ID NO: 62293 - DNA, 17 bp, Arabidopsis thaliana
caacgttaagactcaga

SEQ ID NO: 62294 - DNA, 17 bp, Arabidopsis thaliana
caacgttagggagtccg

SEQ ID NO: 62295 - DNA, 17 bp, Arabidopsis thaliana
caacgttgtgaccattt

SEQ ID NO: 62296 - DNA, 17 bp, Arabidopsis thaliana
caacgtttacggcaaga

SEQ ID NO: 62297 - DNA, 17 bp, Arabidopsis thaliana
caacgtttactatgctc

SEQ ID NO: 62298 - DNA, 17 bp, Arabidopsis thaliana
caacgtttactatgctg

SEQ ID NO: 62299 - DNA, 17 bp, Arabidopsis thaliana
caacgtttggatttctg

SEQ ID NO: 62300 - DNA, 17 bp, Arabidopsis thaliana
caacgttttgatgtcat

SEQ ID NO: 62301 - DNA, 17 bp, Arabidopsis thaliana
caactaaaaacccggtg

SEQ ID NO: 62302 - DNA, 17 bp, Arabidopsis thaliana
caactaaactgctaaac

SEQ ID NO: 62303 - DNA, 17 bp, Arabidopsis thaliana
caactaagaatcttgcg

SEQ ID NO: 62304 - DNA, 17 bp, Arabidopsis thaliana
caactaagactctgatt

SEQ ID NO: 62305 - DNA, 17 bp, Arabidopsis thaliana
caactaagcacattttg

SEQ ID NO: 62306 - DNA, 17 bp, Arabidopsis thaliana
caactaagtccttcctg

SEQ ID NO: 62307 - DNA, 17 bp, Arabidopsis thaliana
caactaatcacaagccg

SEQ ID NO: 62308 - DNA, 17 bp, Arabidopsis thaliana
caactaatggaccaatg

SEQ ID NO: 62309 - DNA, 17 bp, Arabidopsis thaliana
caactacaattgacact

SEQ ID NO: 62310 - DNA, 17 bp, Arabidopsis thaliana
caactacacgcattatc

SEQ ID NO: 62311 - DNA, 17 bp, Arabidopsis thaliana
caactacagtcggatgt

SEQ ID NO: 62312 - DNA, 17 bp, Arabidopsis thaliana
caactacattttctacc

SEQ ID NO: 62313 - DNA, 17 bp, Arabidopsis thaliana
caactacctgcggctgc

SEQ ID NO: 62314 - DNA, 17 bp, Arabidopsis thaliana
caactacgatctttggc

SEQ ID NO: 62315 - DNA, 17 bp, Arabidopsis thaliana
caactacgcatactcga

SEQ ID NO: 62316 - DNA, 17 bp, Arabidopsis thaliana
caactacggctaatgcg

SEQ ID NO: 62317 - DNA, 17 bp, Arabidopsis thaliana
caactactcgaactcct

SEQ ID NO: 62318 - DNA, 17 bp, Arabidopsis thaliana
caactactggaaggatc

SEQ ID NO: 62319 - DNA, 17 bp, Arabidopsis thaliana
caactagagattgacct

SEQ ID NO: 62320 - DNA, 17 bp, Arabidopsis thaliana
caactagattataaccc

SEQ ID NO: 62321 - DNA, 17 bp, Arabidopsis thaliana
caactagattttgaccc

SEQ ID NO: 62322 - DNA, 17 bp, Arabidopsis thaliana
caactagccccgaaaat

SEQ ID NO: 62323 - DNA, 17 bp, Arabidopsis thaliana
caactagcgatggtgga

SEQ ID NO: 62324 - DNA, 17 bp, Arabidopsis thaliana
caactaggatgagatta

SEQ ID NO: 62325 - DNA, 17 bp, Arabidopsis thaliana
caactaggatgagattt

SEQ ID NO: 62326 - DNA, 17 bp, Arabidopsis thaliana
caactaggggaccagac

SEQ ID NO: 62327 - DNA, 17 bp, Arabidopsis thaliana
caactaggtggaattca

SEQ ID NO: 62328 - DNA, 17 bp, Arabidopsis thaliana
caactagtcaagtgcgc

SEQ ID NO: 62329 - DNA, 17 bp, Arabidopsis thaliana
caactagtcggaatatg

SEQ ID NO: 62330 - DNA, 17 bp, Arabidopsis thaliana
caactataaaccgcgaa

SEQ ID NO: 62331 - DNA, 17 bp, Arabidopsis thaliana
caactatatgacgacat

SEQ ID NO: 62332 - DNA, 17 bp, Arabidopsis thaliana
caactatctgcatatga

SEQ ID NO: 62333 - DNA, 17 bp, Arabidopsis thaliana
caactatcttcaacatg

SEQ ID NO: 62334 - DNA, 17 bp, Arabidopsis thaliana
caactatcttgttaggc

SEQ ID NO: 62335 - DNA, 17 bp, Arabidopsis thaliana
caactatgccggtcaac

SEQ ID NO: 62336 - DNA, 17 bp, Arabidopsis thaliana
caactatgcttctgacg

SEQ ID NO: 62337 - DNA, 17 bp, Arabidopsis thaliana
caactatggctactgcg

SEQ ID NO: 62338 - DNA, 17 bp, Arabidopsis thaliana
caactatggctggtgtc

SEQ ID NO: 62339 - DNA, 17 bp, Arabidopsis thaliana
caactatggctggtgtt

SEQ ID NO: 62340 - DNA, 17 bp, Arabidopsis thaliana
caactatgggacctgct

SEQ ID NO: 62341 - DNA, 17 bp, Arabidopsis thaliana
caactatgtgcaatgga

SEQ ID NO: 62342 - DNA, 17 bp, Arabidopsis thaliana
caactattcacattatc

SEQ ID NO: 62343 - DNA, 17 bp, Arabidopsis thaliana
caactattgcgatacgg

SEQ ID NO: 62344 - DNA, 17 bp, Arabidopsis thaliana
caactattgggccaagg

SEQ ID NO: 62345 - DNA, 17 bp, Arabidopsis thaliana
caactattggtttcact

SEQ ID NO: 62346 - DNA, 17 bp, Arabidopsis thaliana
caactatttgcgtattt

SEQ ID NO: 62347 - DNA, 17 bp, Arabidopsis thaliana
caactcaaacatgtgct

SEQ ID NO: 62348 - DNA, 17 bp, Arabidopsis thaliana
caactcaactgatgaat

SEQ ID NO: 62349 - DNA, 17 bp, Arabidopsis thaliana
caactcaactgtgttaa

SEQ ID NO: 62350 - DNA, 17 bp, Arabidopsis thaliana
caactcaagcagctgga

SEQ ID NO: 62351 - DNA, 17 bp, Arabidopsis thaliana
caactcaatccatattg

SEQ ID NO: 62352 - DNA, 17 bp, Arabidopsis thaliana
caactcacctcgtgcgg

SEQ ID NO: 62353 - DNA, 17 bp, Arabidopsis thaliana
caactcacctgccgaat

SEQ ID NO: 62354 - DNA, 17 bp, Arabidopsis thaliana
caactcacctgcggaat

SEQ ID NO: 62355 - DNA, 17 bp, Arabidopsis thaliana
caactcacggattcggt

SEQ ID NO: 62356 - DNA, 17 bp, Arabidopsis thaliana
caactcagggatgtgtt

SEQ ID NO: 62357 - DNA, 17 bp, Arabidopsis thaliana
caactcaggtctgctgc

SEQ ID NO: 62358 - DNA, 17 bp, Arabidopsis thaliana
caactcagtggcagaca

SEQ ID NO: 62359 - DNA, 17 bp, Arabidopsis thaliana
caactcataggattgtg

SEQ ID NO: 62360 - DNA, 17 bp, Arabidopsis thaliana
caactcatgatgacatg

SEQ ID NO: 62361 - DNA, 17 bp, Arabidopsis thaliana
caactcatggttctctg

SEQ ID NO: 62362 - DNA, 17 bp, Arabidopsis thaliana
caactcatttgacccat

SEQ ID NO: 62363 - DNA, 17 bp, Arabidopsis thaliana
caactccaaagtctcct

SEQ ID NO: 62364 - DNA, 17 bp, Arabidopsis thaliana
caactccagatctgaga

SEQ ID NO: 62365 - DNA, 17 bp, Arabidopsis thaliana
caactccaggattggac

SEQ ID NO: 62366 - DNA, 17 bp, Arabidopsis thaliana
caactccaggatttatt

SEQ ID NO: 62367 - DNA, 17 bp, Arabidopsis thaliana
caactccatgcaagctg

SEQ ID NO: 62368 - DNA, 17 bp, Arabidopsis thaliana
caactccatgcaagttg

SEQ ID NO: 62369 - DNA, 17 bp, Arabidopsis thaliana
caactccattttgttca

SEQ ID NO: 62370 - DNA, 17 bp, Arabidopsis thaliana
caactcccacgtgcggg

SEQ ID NO: 62371 - DNA, 17 bp, Arabidopsis thaliana
caactccgatggcgatt

SEQ ID NO: 62372 - DNA, 17 bp, Arabidopsis thaliana
caactccggcgattttg

SEQ ID NO: 62373 - DNA, 17 bp, Arabidopsis thaliana
caactccggtctacata

SEQ ID NO: 62374 - DNA, 17 bp, Arabidopsis thaliana
caactcctcttttccac

SEQ ID NO: 62375 - DNA, 17 bp, Arabidopsis thaliana
caactccttctctgtag

SEQ ID NO: 62376 - DNA, 17 bp, Arabidopsis thaliana
caactccttctctgtat

SEQ ID NO: 62377 - DNA, 17 bp, Arabidopsis thaliana
caactcgaactaaatag

SEQ ID NO: 62378 - DNA, 17 bp, Arabidopsis thaliana
caactcgaccatctata

SEQ ID NO: 62379 - DNA, 17 bp, Arabidopsis thaliana
caactcgactctcttag

SEQ ID NO: 62380 - DNA, 17 bp, Arabidopsis thaliana
caactcgagttgtcttg

SEQ ID NO: 62381 - DNA, 17 bp, Arabidopsis thaliana
caactcgatcaagtgaa

SEQ ID NO: 62382 - DNA, 17 bp, Arabidopsis thaliana
caactcgatctgcaagg

SEQ ID NO: 62383 - DNA, 17 bp, Arabidopsis thaliana
caactcgcctgcatgaa

SEQ ID NO: 62384 - DNA, 17 bp, Arabidopsis thaliana
caactcggattactgag

SEQ ID NO: 62385 - DNA, 17 bp, Arabidopsis thaliana
caactcggtgaaaagga

SEQ ID NO: 62386 - DNA, 17 bp, Arabidopsis thaliana
caactcgtgcagtttgg

SEQ ID NO: 62387 - DNA, 17 bp, Arabidopsis thaliana
caactctaagttgtgcc

SEQ ID NO: 62388 - DNA, 17 bp, Arabidopsis thaliana
caactctacatgtggtg

SEQ ID NO: 62389 - DNA, 17 bp, Arabidopsis thaliana
caactctagggtttgaa

SEQ ID NO: 62390 - DNA, 17 bp, Arabidopsis thaliana
caactctagtccgactt

SEQ ID NO: 62391 - DNA, 17 bp, Arabidopsis thaliana
caactctatcgatccga

SEQ ID NO: 62392 - DNA, 17 bp, Arabidopsis thaliana
caactctatttgtatgt

SEQ ID NO: 62393 - DNA, 17 bp, Arabidopsis thaliana
caactctcctagaggtc

SEQ ID NO: 62394 - DNA, 17 bp, Arabidopsis thaliana
caactctcgagcttttg

SEQ ID NO: 62395 - DNA, 17 bp, Arabidopsis thaliana
caactctcgatttttgc

SEQ ID NO: 62396 - DNA, 17 bp, Arabidopsis thaliana
caactctcggcgccctg

SEQ ID NO: 62397 - DNA, 17 bp, Arabidopsis thaliana
caactctctccatatgt

SEQ ID NO: 62398 - DNA, 17 bp, Arabidopsis thaliana
caactctctccatttgg

SEQ ID NO: 62399 - DNA, 17 bp, Arabidopsis thaliana
caactctctctaaggaa

SEQ ID NO: 62400 - DNA, 17 bp, Arabidopsis thaliana
caactctctgtgttgtg

SEQ ID NO: 62401 - DNA, 17 bp, Arabidopsis thaliana
caactctctgttgacct

SEQ ID NO: 62402 - DNA, 17 bp, Arabidopsis thaliana
caactctcttcatatgg

SEQ ID NO: 62403 - DNA, 17 bp, Arabidopsis thaliana
caactctgagatgtttg

SEQ ID NO: 62404 - DNA, 17 bp, Arabidopsis thaliana
caactctggctagtctc

SEQ ID NO: 62405 - DNA, 17 bp, Arabidopsis thaliana
caactctgtgcggttgt

SEQ ID NO: 62406 - DNA, 17 bp, Arabidopsis thaliana
caactctgttgtcgtcc

SEQ ID NO: 62407 - DNA, 17 bp, Arabidopsis thaliana
caactcttacggttgtg

SEQ ID NO: 62408 - DNA, 17 bp, Arabidopsis thaliana
caactcttgcgggagaa

SEQ ID NO: 62409 - DNA, 17 bp, Arabidopsis thaliana
caactctttcatctttg

SEQ ID NO: 62410 - DNA, 17 bp, Arabidopsis thaliana
caactctttggtgcgtt

SEQ ID NO: 62411 - DNA, 17 bp, Arabidopsis thaliana
caactgaagctgataac

SEQ ID NO: 62412 - DNA, 17 bp, Arabidopsis thaliana
caactgaattccacgga

SEQ ID NO: 62413 - DNA, 17 bp, Arabidopsis thaliana
caactgacatgtgctat

SEQ ID NO: 62414 - DNA, 17 bp, Arabidopsis thaliana
caactgacgaggagcgt

SEQ ID NO: 62415 - DNA, 17 bp, Arabidopsis thaliana
caactgagctaaggtcg

SEQ ID NO: 62416 - DNA, 17 bp, Arabidopsis thaliana
caactgagggaattcat

SEQ ID NO: 62417 - DNA, 17 bp, Arabidopsis thaliana
caactgattgccttctg

SEQ ID NO: 62418 - DNA, 17 bp, Arabidopsis thaliana
caactgcaaatgccttg

SEQ ID NO: 62419 - DNA, 17 bp, Arabidopsis thaliana
caactgcaactgtgcga

SEQ ID NO: 62420 - DNA, 17 bp, Arabidopsis thaliana
caactgcactaacaagt

SEQ ID NO: 62421 - DNA, 17 bp, Arabidopsis thaliana
caactgcagccttgtgt

SEQ ID NO: 62422 - DNA, 17 bp, Arabidopsis thaliana
caactgcataggctctc

SEQ ID NO: 62423 - DNA, 17 bp, Arabidopsis thaliana
caactgcatgcaggtgt

SEQ ID NO: 62424 - DNA, 17 bp, Arabidopsis thaliana
caactgcctcaacaggc

SEQ ID NO: 62425 - DNA, 17 bp, Arabidopsis thaliana
caactgcgagatgtgtt

SEQ ID NO: 62426 - DNA, 17 bp, Arabidopsis thaliana
caactgcggataaagta

SEQ ID NO: 62427 - DNA, 17 bp, Arabidopsis thaliana
caactgcggataaagtg

SEQ ID NO: 62428 - DNA, 17 bp, Arabidopsis thaliana
caactgcgtggtaactg

SEQ ID NO: 62429 - DNA, 17 bp, Arabidopsis thaliana
caactgctgccttgtgt

SEQ ID NO: 62430 - DNA, 17 bp, Arabidopsis thaliana
caactgctggaatgctg

SEQ ID NO: 62431 - DNA, 17 bp, Arabidopsis thaliana
caactgctggattgctg

SEQ ID NO: 62432 - DNA, 17 bp, Arabidopsis thaliana
caactggaatcaagtcg

SEQ ID NO: 62433 - DNA, 17 bp, Arabidopsis thaliana
caactggacggccatgt

SEQ ID NO: 62434 - DNA, 17 bp, Arabidopsis thaliana
caactggagctgaagaa

SEQ ID NO: 62435 - DNA, 17 bp, Arabidopsis thaliana
caactggatcatctgac

SEQ ID NO: 62436 - DNA, 17 bp, Arabidopsis thaliana
caactggatccgacccg

SEQ ID NO: 62437 - DNA, 17 bp, Arabidopsis thaliana
caactggatgaaataac

SEQ ID NO: 62438 - DNA, 17 bp, Arabidopsis thaliana
caactggcaggatggct

SEQ ID NO: 62439 - DNA, 17 bp, Arabidopsis thaliana
caactggcgagacgtgc

SEQ ID NO: 62440 - DNA, 17 bp, Arabidopsis thaliana
caactgggaatgtgatg

SEQ ID NO: 62441 - DNA, 17 bp, Arabidopsis thaliana
caactgggacaacttag

SEQ ID NO: 62442 - DNA, 17 bp, Arabidopsis thaliana
caactgggtcgcgtctt

SEQ ID NO: 62443 - DNA, 17 bp, Arabidopsis thaliana
caactgggtggtcgagt

SEQ ID NO: 62444 - DNA, 17 bp, Arabidopsis thaliana
caactgggtgtcgatcg

SEQ ID NO: 62445 - DNA, 17 bp, Arabidopsis thaliana
caactgggttggaccac

SEQ ID NO: 62446 - DNA, 17 bp, Arabidopsis thaliana
caactggtcatgctcct

SEQ ID NO: 62447 - DNA, 17 bp, Arabidopsis thaliana
caactggtcgatggttg

SEQ ID NO: 62448 - DNA, 17 bp, Arabidopsis thaliana
caactggtgctcttcgt

SEQ ID NO: 62449 - DNA, 17 bp, Arabidopsis thaliana
caactggttcatcgggt

SEQ ID NO: 62450 - DNA, 17 bp, Arabidopsis thaliana
caactggttcgctggac

SEQ ID NO: 62451 - DNA, 17 bp, Arabidopsis thaliana
caactggttgtagcaag

SEQ ID NO: 62452 - DNA, 17 bp, Arabidopsis thaliana
caactgtacaactatgg

SEQ ID NO: 62453 - DNA, 17 bp, Arabidopsis thaliana
caactgtatcgtggcaa

SEQ ID NO: 62454 - DNA, 17 bp, Arabidopsis thaliana
caactgtcaacaagtcg

SEQ ID NO: 62455 - DNA, 17 bp, Arabidopsis thaliana
caactgtcgctactttt

SEQ ID NO: 62456 - DNA, 17 bp, Arabidopsis thaliana
caactgtcgggaaagtc

SEQ ID NO: 62457 - DNA, 17 bp, Arabidopsis thaliana
caactgtcttgcttctg

SEQ ID NO: 62458 - DNA, 17 bp, Arabidopsis thaliana
caactgtggaccaaaat

SEQ ID NO: 62459 - DNA, 17 bp, Arabidopsis thaliana
caactgtggactgcgca

SEQ ID NO: 62460 - DNA, 17 bp, Arabidopsis thaliana
caactgtgtggaccgat

SEQ ID NO: 62461 - DNA, 17 bp, Arabidopsis thaliana
caactgttggaccattg

SEQ ID NO: 62462 - DNA, 17 bp, Arabidopsis thaliana
caactgttgtgattccg

SEQ ID NO: 62463 - DNA, 17 bp, Arabidopsis thaliana
caactgtttggaccatt

SEQ ID NO: 62464 - DNA, 17 bp, Arabidopsis thaliana
caactgtttgtgattcc

SEQ ID NO: 62465 - DNA, 17 bp, Arabidopsis thaliana
caacttaaaccgcaacc

SEQ ID NO: 62466 - DNA, 17 bp, Arabidopsis thaliana
caacttaacgaggatcc

SEQ ID NO: 62467 - DNA, 17 bp, Arabidopsis thaliana
caacttaaggcaacaaa

SEQ ID NO: 62468 - DNA, 17 bp, Arabidopsis thaliana
caacttaaggcaccgaa

SEQ ID NO: 62469 - DNA, 17 bp, Arabidopsis thaliana
caacttaatcactgagc

SEQ ID NO: 62470 - DNA, 17 bp, Arabidopsis thaliana
caacttaatcattgagc

SEQ ID NO: 62471 - DNA, 17 bp, Arabidopsis thaliana
caacttaatccacatcg

SEQ ID NO: 62472 - DNA, 17 bp, Arabidopsis thaliana
caacttaatgtttggag

SEQ ID NO: 62473 - DNA, 17 bp, Arabidopsis thaliana
caacttacaagatcggg

SEQ ID NO: 62474 - DNA, 17 bp, Arabidopsis thaliana
caacttaccgtcttggc

SEQ ID NO: 62475 - DNA, 17 bp, Arabidopsis thaliana
caacttagtatccgatg

SEQ ID NO: 62476 - DNA, 17 bp, Arabidopsis thaliana
caacttagtcgcatcct

SEQ ID NO: 62477 - DNA, 17 bp, Arabidopsis thaliana
caacttagttttgcgga

SEQ ID NO: 62478 - DNA, 17 bp, Arabidopsis thaliana
caacttatcagtccgtt

SEQ ID NO: 62479 - DNA, 17 bp, Arabidopsis thaliana
caacttatggaagggac

SEQ ID NO: 62480 - DNA, 17 bp, Arabidopsis thaliana
caacttatggttgcaac

SEQ ID NO: 62481 - DNA, 17 bp, Arabidopsis thaliana
caacttcaagaccttca

SEQ ID NO: 62482 - DNA, 17 bp, Arabidopsis thaliana
caacttcaagctctgct

SEQ ID NO: 62483 - DNA, 17 bp, Arabidopsis thaliana
caacttcaaggtgtgtt

SEQ ID NO: 62484 - DNA, 17 bp, Arabidopsis thaliana
caacttcacatatggcc

SEQ ID NO: 62485 - DNA, 17 bp, Arabidopsis thaliana
caacttcacatgtgacc

SEQ ID NO: 62486 - DNA, 17 bp, Arabidopsis thaliana
caacttcacatgtggcc

SEQ ID NO: 62487 - DNA, 17 bp, Arabidopsis thaliana
caacttcagtctcagtc

SEQ ID NO: 62488 - DNA, 17 bp, Arabidopsis thaliana
caacttcagttgaccag

SEQ ID NO: 62489 - DNA, 17 bp, Arabidopsis thaliana
caacttcatcgactgga

SEQ ID NO: 62490 - DNA, 17 bp, Arabidopsis thaliana
caacttccatgtgcaat

SEQ ID NO: 62491 - DNA, 17 bp, Arabidopsis thaliana
caacttcccctgggggt

SEQ ID NO: 62492 - DNA, 17 bp, Arabidopsis thaliana
caacttccgatgtggca

SEQ ID NO: 62493 - DNA, 17 bp, Arabidopsis thaliana
caacttccgatgtggga

SEQ ID NO: 62494 - DNA, 17 bp, Arabidopsis thaliana
caacttccgatgtggta

SEQ ID NO: 62495 - DNA, 17 bp, Arabidopsis thaliana
caacttcctattcgtct

SEQ ID NO: 62496 - DNA, 17 bp, Arabidopsis thaliana
caacttccttgtggcct

SEQ ID NO: 62497 - DNA, 17 bp, Arabidopsis thaliana
caacttcgtatgcggtc

SEQ ID NO: 62498 - DNA, 17 bp, Arabidopsis thaliana
caacttcgtatgtggcc

SEQ ID NO: 62499 - DNA, 17 bp, Arabidopsis thaliana
caacttctcacaggcga

SEQ ID NO: 62500 - DNA, 17 bp, Arabidopsis thaliana
caacttctcctacaact

SEQ ID NO: 62501 - DNA, 17 bp, Arabidopsis thaliana
caacttctcgtagtcgt

SEQ ID NO: 62502 - DNA, 17 bp, Arabidopsis thaliana
caacttctctgcccatg

SEQ ID NO: 62503 - DNA, 17 bp, Arabidopsis thaliana
caacttctctgggccgc

SEQ ID NO: 62504 - DNA, 17 bp, Arabidopsis thaliana
caacttctgatgtggga

SEQ ID NO: 62505 - DNA, 17 bp, Arabidopsis thaliana
caacttctggaatgatg

SEQ ID NO: 62506 - DNA, 17 bp, Arabidopsis thaliana
caacttgaactaaatag

SEQ ID NO: 62507 - DNA, 17 bp, Arabidopsis thaliana
caacttgaactaagtag

SEQ ID NO: 62508 - DNA, 17 bp, Arabidopsis thaliana
caacttgctcgatgtag

SEQ ID NO: 62509 - DNA, 17 bp, Arabidopsis thaliana
caacttggcgcaatttg

SEQ ID NO: 62510 - DNA, 17 bp, Arabidopsis thaliana
caacttggtatgcgaag

SEQ ID NO: 62511 - DNA, 17 bp, Arabidopsis thaliana
caacttggtgtaacttc

SEQ ID NO: 62512 - DNA, 17 bp, Arabidopsis thaliana
caacttggtgtggatcc

SEQ ID NO: 62513 - DNA, 17 bp, Arabidopsis thaliana
caacttggttattttgg

SEQ ID NO: 62514 - DNA, 17 bp, Arabidopsis thaliana
caacttggtttcacgcc

SEQ ID NO: 62515 - DNA, 17 bp, Arabidopsis thaliana
caacttgtcacagttct

SEQ ID NO: 62516 - DNA, 17 bp, Arabidopsis thaliana
caacttgtcagctaaga

SEQ ID NO: 62517 - DNA, 17 bp, Arabidopsis thaliana
caacttgtcattgccag

SEQ ID NO: 62518 - DNA, 17 bp, Arabidopsis thaliana
caacttgtcttcttaca

SEQ ID NO: 62519 - DNA, 17 bp, Arabidopsis thaliana
caacttgtgcccaagag

SEQ ID NO: 62520 - DNA, 17 bp, Arabidopsis thaliana
caacttgtgttgatgga

SEQ ID NO: 62521 - DNA, 17 bp, Arabidopsis thaliana
caacttgttgcagagca

SEQ ID NO: 62522 - DNA, 17 bp, Arabidopsis thaliana
caactttaaattgtggc

SEQ ID NO: 62523 - DNA, 17 bp, Arabidopsis thaliana
caactttacatccgccc

SEQ ID NO: 62524 - DNA, 17 bp, Arabidopsis thaliana
caactttacatccggcc

SEQ ID NO: 62525 - DNA, 17 bp, Arabidopsis thaliana
caactttacatgcggcc

SEQ ID NO: 62526 - DNA, 17 bp, Arabidopsis thaliana
caactttacttcatagg

SEQ ID NO: 62527 - DNA, 17 bp, Arabidopsis thaliana
caactttagcccagggc

SEQ ID NO: 62528 - DNA, 17 bp, Arabidopsis thaliana
caactttagcccagggg

SEQ ID NO: 62529 - DNA, 17 bp, Arabidopsis thaliana
caactttcaaatttggg

SEQ ID NO: 62530 - DNA, 17 bp, Arabidopsis thaliana
caactttcacttgcgtt

SEQ ID NO: 62531 - DNA, 17 bp, Arabidopsis thaliana
caactttcataaggccc

SEQ ID NO: 62532 - DNA, 17 bp, Arabidopsis thaliana
caactttccttgagtct

SEQ ID NO: 62533 - DNA, 17 bp, Arabidopsis thaliana
caactttcgatggtagg

SEQ ID NO: 62534 - DNA, 17 bp, Arabidopsis thaliana
caactttcgatgtggga

SEQ ID NO: 62535 - DNA, 17 bp, Arabidopsis thaliana
caactttcgatttgtcg

SEQ ID NO: 62536 - DNA, 17 bp, Arabidopsis thaliana
caactttcggctcagaa

SEQ ID NO: 62537 - DNA, 17 bp, Arabidopsis thaliana
caactttcgttgaccag

SEQ ID NO: 62538 - DNA, 17 bp, Arabidopsis thaliana
caactttctcacaggcg

SEQ ID NO: 62539 - DNA, 17 bp, Arabidopsis thaliana
caactttctgacgggag

SEQ ID NO: 62540 - DNA, 17 bp, Arabidopsis thaliana
caactttcttgatgttc

SEQ ID NO: 62541 - DNA, 17 bp, Arabidopsis thaliana
caactttgacttcatca

SEQ ID NO: 62542 - DNA, 17 bp, Arabidopsis thaliana
caactttgagaaactat

SEQ ID NO: 62543 - DNA, 17 bp, Arabidopsis thaliana
caactttgattgtcttc

SEQ ID NO: 62544 - DNA, 17 bp, Arabidopsis thaliana
caactttggccagatcc

SEQ ID NO: 62545 - DNA, 17 bp, Arabidopsis thaliana
caactttgggacgattc

SEQ ID NO: 62546 - DNA, 17 bp, Arabidopsis thaliana
caactttgggacgattt

SEQ ID NO: 62547 - DNA, 17 bp, Arabidopsis thaliana
caactttggtccaaatg

SEQ ID NO: 62548 - DNA, 17 bp, Arabidopsis thaliana
caacttttagaccgtga

SEQ ID NO: 62549 - DNA, 17 bp, Arabidopsis thaliana
caacttttccagaccct

SEQ ID NO: 62550 - DNA, 17 bp, Arabidopsis thaliana
caacttttcgcgctaag

SEQ ID NO: 62551 - DNA, 17 bp, Arabidopsis thaliana
caacttttgatcgctat

SEQ ID NO: 62552 - DNA, 17 bp, Arabidopsis thaliana
caacttttggtcgctgg

SEQ ID NO: 62553 - DNA, 17 bp, Arabidopsis thaliana
caacttttgtctgacgg

SEQ ID NO: 62554 - DNA, 17 bp, Arabidopsis thaliana
caacttttgtctgactg

SEQ ID NO: 62555 - DNA, 17 bp, Arabidopsis thaliana
caactttttgcctatcc

SEQ ID NO: 62556 - DNA, 17 bp, Arabidopsis thaliana
caactttttgtgtgacg

SEQ ID NO: 62557 - DNA, 17 bp, Arabidopsis thaliana
caagaaaaacaatcgat

SEQ ID NO: 62558 - DNA, 17 bp, Arabidopsis thaliana
caagaaaactcgatttt

SEQ ID NO: 62559 - DNA, 17 bp, Arabidopsis thaliana
caagaaaaggccttaca

SEQ ID NO: 62560 - DNA, 17 bp, Arabidopsis thaliana
caagaaaccgggagact

SEQ ID NO: 62561 - DNA, 17 bp, Arabidopsis thaliana
caagaaactttgcttgg

SEQ ID NO: 62562 - DNA, 17 bp, Arabidopsis thaliana
caagaaagacttgacct

SEQ ID NO: 62563 - DNA, 17 bp, Arabidopsis thaliana
caagaaagagcacgcag

SEQ ID NO: 62564 - DNA, 17 bp, Arabidopsis thaliana
caagaaagagttagatt

SEQ ID NO: 62565 - DNA, 17 bp, Arabidopsis thaliana
caagaaaggcttgacct

SEQ ID NO: 62566 - DNA, 17 bp, Arabidopsis thaliana
caagaaagtcgtatctc

SEQ ID NO: 62567 - DNA, 17 bp, Arabidopsis thaliana
caagaaagtctgtcagt

SEQ ID NO: 62568 - DNA, 17 bp, Arabidopsis thaliana
caagaaatctacaatgg

SEQ ID NO: 62569 - DNA, 17 bp, Arabidopsis thaliana
caagaaattcattgtgg

SEQ ID NO: 62570 - DNA, 17 bp, Arabidopsis thaliana
caagaacatcatgtggt

SEQ ID NO: 62571 - DNA, 17 bp, Arabidopsis thaliana
caagaaccattgggcgt

SEQ ID NO: 62572 - DNA, 17 bp, Arabidopsis thaliana
caagaacctggtgctcc

SEQ ID NO: 62573 - DNA, 17 bp, Arabidopsis thaliana
caagaacgaaagttggg

SEQ ID NO: 62574 - DNA, 17 bp, Arabidopsis thaliana
caagaactaccgcagaa

SEQ ID NO: 62575 - DNA, 17 bp, Arabidopsis thaliana
caagaactaccgcagat

SEQ ID NO: 62576 - DNA, 17 bp, Arabidopsis thaliana
caagaactcactaaggc

SEQ ID NO: 62577 - DNA, 17 bp, Arabidopsis thaliana
caagaacttctctgact

SEQ ID NO: 62578 - DNA, 17 bp, Arabidopsis thaliana
caagaagaaccaagtcc

SEQ ID NO: 62579 - DNA, 17 bp, Arabidopsis thaliana
caagaagaccctgttga

SEQ ID NO: 62580 - DNA, 17 bp, Arabidopsis thaliana
caagaagatgtgattca

SEQ ID NO: 62581 - DNA, 17 bp, Arabidopsis thaliana
caagaagattcacaagc

SEQ ID NO: 62582 - DNA, 17 bp, Arabidopsis thaliana
caagaagattgcaaaat

SEQ ID NO: 62583 - DNA, 17 bp, Arabidopsis thaliana
caagaagccatgttatc

SEQ ID NO: 62584 - DNA, 17 bp, Arabidopsis thaliana
caagaagccctgttttt

SEQ ID NO: 62585 - DNA, 17 bp, Arabidopsis thaliana
caagaagctgatctagg

SEQ ID NO: 62586 - DNA, 17 bp, Arabidopsis thaliana
caagaagctgggatttc

SEQ ID NO: 62587 - DNA, 17 bp, Arabidopsis thaliana
caagaagcttctcattg

SEQ ID NO: 62588 - DNA, 17 bp, Arabidopsis thaliana
caagaaggatcatttgt

SEQ ID NO: 62589 - DNA, 17 bp, Arabidopsis thaliana
caagaaggtcgtgtcta

SEQ ID NO: 62590 - DNA, 17 bp, Arabidopsis thaliana
caagaaggtctccagct

SEQ ID NO: 62591 - DNA, 17 bp, Arabidopsis thaliana
caagaagtcggctgggc

SEQ ID NO: 62592 - DNA, 17 bp, Arabidopsis thaliana
caagaagtcgtgaaaaa

SEQ ID NO: 62593 - DNA, 17 bp, Arabidopsis thaliana
caagaagttgctgctta

SEQ ID NO: 62594 - DNA, 17 bp, Arabidopsis thaliana
caagaatagagtcagat

SEQ ID NO: 62595 - DNA, 17 bp, Arabidopsis thaliana
caagaatattggttcga

SEQ ID NO: 62596 - DNA, 17 bp, Arabidopsis thaliana
caagaatcaacgaactg

SEQ ID NO: 62597 - DNA, 17 bp, Arabidopsis thaliana
caagaatccaggcatac

SEQ ID NO: 62598 - DNA, 17 bp, Arabidopsis thaliana
caagaatgagatcaggt

SEQ ID NO: 62599 - DNA, 17 bp, Arabidopsis thaliana
caagaatgagatcgggt

SEQ ID NO: 62600 - DNA, 17 bp, Arabidopsis thaliana
caagaattcaccaaaca

SEQ ID NO: 62601 - DNA, 17 bp, Arabidopsis thaliana
caagaatttttggggcc

SEQ ID NO: 62602 - DNA, 17 bp, Arabidopsis thaliana
caagacaaatatgggct

SEQ ID NO: 62603 - DNA, 17 bp, Arabidopsis thaliana
caagacaagtccattga

SEQ ID NO: 62604 - DNA, 17 bp, Arabidopsis thaliana
caagacaatggaacttt

SEQ ID NO: 62605 - DNA, 17 bp, Arabidopsis thaliana
caagacaatttaccata

SEQ ID NO: 62606 - DNA, 17 bp, Arabidopsis thaliana
caagacaatttaccatg

SEQ ID NO: 62607 - DNA, 17 bp, Arabidopsis thaliana
caagacactcagcacat

SEQ ID NO: 62608 - DNA, 17 bp, Arabidopsis thaliana
caagacataggccttga

SEQ ID NO: 62609 - DNA, 17 bp, Arabidopsis thaliana
caagacatgccacttgt

SEQ ID NO: 62610 - DNA, 17 bp, Arabidopsis thaliana
caagaccaagacttgat

SEQ ID NO: 62611 - DNA, 17 bp, Arabidopsis thaliana
caagaccaccccacggc

SEQ ID NO: 62612 - DNA, 17 bp, Arabidopsis thaliana
caagaccacttgcaatg

SEQ ID NO: 62613 - DNA, 17 bp, Arabidopsis thaliana
caagaccatctccattg

SEQ ID NO: 62614 - DNA, 17 bp, Arabidopsis thaliana
caagaccccatgatagc

SEQ ID NO: 62615 - DNA, 17 bp, Arabidopsis thaliana
caagacccggtgctagt

SEQ ID NO: 62616 - DNA, 17 bp, Arabidopsis thaliana
caagaccgaagctagct

SEQ ID NO: 62617 - DNA, 17 bp, Arabidopsis thaliana
caagaccgctagttcta

SEQ ID NO: 62618 - DNA, 17 bp, Arabidopsis thaliana
caagaccgcttgatctg

SEQ ID NO: 62619 - DNA, 17 bp, Arabidopsis thaliana
caagaccggttggtgaa

SEQ ID NO: 62620 - DNA, 17 bp, Arabidopsis thaliana
caagaccgtcagattcc

SEQ ID NO: 62621 - DNA, 17 bp, Arabidopsis thaliana
caagacctctttctttc

SEQ ID NO: 62622 - DNA, 17 bp, Arabidopsis thaliana
caagacctctttctttg

SEQ ID NO: 62623 - DNA, 17 bp, Arabidopsis thaliana
caagacgatggtatccg

SEQ ID NO: 62624 - DNA, 17 bp, Arabidopsis thaliana
caagacgcgacagcgag

SEQ ID NO: 62625 - DNA, 17 bp, Arabidopsis thaliana
caagacggatttggagg

SEQ ID NO: 62626 - DNA, 17 bp, Arabidopsis thaliana
caagacggatttggatg

SEQ ID NO: 62627 - DNA, 17 bp, Arabidopsis thaliana
caagacggctactttag

SEQ ID NO: 62628 - DNA, 17 bp, Arabidopsis thaliana
caagacgggaagtggat

SEQ ID NO: 62629 - DNA, 17 bp, Arabidopsis thaliana
caagacgggtcatcaaa

SEQ ID NO: 62630 - DNA, 17 bp, Arabidopsis thaliana
caagacggttacatcgc

SEQ ID NO: 62631 - DNA, 17 bp, Arabidopsis thaliana
caagacgtcttggcatg

SEQ ID NO: 62632 - DNA, 17 bp, Arabidopsis thaliana
caagacgtgccggagtg

SEQ ID NO: 62633 - DNA, 17 bp, Arabidopsis thaliana
caagactaaaaaccgcg

SEQ ID NO: 62634 - DNA, 17 bp, Arabidopsis thaliana
caagactaaaatggcgc

SEQ ID NO: 62635 - DNA, 17 bp, Arabidopsis thaliana
caagactactcagatgg

SEQ ID NO: 62636 - DNA, 17 bp, Arabidopsis thaliana
caagactatgtccatca

SEQ ID NO: 62637 - DNA, 17 bp, Arabidopsis thaliana
caagactccaatcccac

SEQ ID NO: 62638 - DNA, 17 bp, Arabidopsis thaliana
caagactccaatcccat

SEQ ID NO: 62639 - DNA, 17 bp, Arabidopsis thaliana
caagactccgtctacgg

SEQ ID NO: 62640 - DNA, 17 bp, Arabidopsis thaliana
caagactcgactgatgg

SEQ ID NO: 62641 - DNA, 17 bp, Arabidopsis thaliana
caagactcggatgttct

SEQ ID NO: 62642 - DNA, 17 bp, Arabidopsis thaliana
caagactcgggcccatg

SEQ ID NO: 62643 - DNA, 17 bp, Arabidopsis thaliana
caagactcggtcaacta

SEQ ID NO: 62644 - DNA, 17 bp, Arabidopsis thaliana
caagactcggtccgagt

SEQ ID NO: 62645 - DNA, 17 bp, Arabidopsis thaliana
caagactcttctcttca

SEQ ID NO: 62646 - DNA, 17 bp, Arabidopsis thaliana
caagactcttttgctct

SEQ ID NO: 62647 - DNA, 17 bp, Arabidopsis thaliana
caagactgagaatagct

SEQ ID NO: 62648 - DNA, 17 bp, Arabidopsis thaliana
caagactgcaaaaccag

SEQ ID NO: 62649 - DNA, 17 bp, Arabidopsis thaliana
caagactgcccaaaaag

SEQ ID NO: 62650 - DNA, 17 bp, Arabidopsis thaliana
caagactggttggctca

SEQ ID NO: 62651 - DNA, 17 bp, Arabidopsis thaliana
caagacttacactggtc

SEQ ID NO: 62652 - DNA, 17 bp, Arabidopsis thaliana
caagacttcatcgaccg

SEQ ID NO: 62653 - DNA, 17 bp, Arabidopsis thaliana
caagacttctgacatcc

SEQ ID NO: 62654 - DNA, 17 bp, Arabidopsis thaliana
caagacttctgacatct

SEQ ID NO: 62655 - DNA, 17 bp, Arabidopsis thaliana
caagacttggatatcaa

SEQ ID NO: 62656 - DNA, 17 bp, Arabidopsis thaliana
caagacttggtggatgt

SEQ ID NO: 62657 - DNA, 17 bp, Arabidopsis thaliana
caagacttgttgatcgt

SEQ ID NO: 62658 - DNA, 17 bp, Arabidopsis thaliana
caagacttttttggtgg

SEQ ID NO: 62659 - DNA, 17 bp, Arabidopsis thaliana
caagactttttttggtg

SEQ ID NO: 62660 - DNA, 17 bp, Arabidopsis thaliana
caagagaatctctgcgg

SEQ ID NO: 62661 - DNA, 17 bp, Arabidopsis thaliana
caagagaattagctcag

SEQ ID NO: 62662 - DNA, 17 bp, Arabidopsis thaliana
caagagaccactcgacc

SEQ ID NO: 62663 - DNA, 17 bp, Arabidopsis thaliana
caagagacttgaggcgg

SEQ ID NO: 62664 - DNA, 17 bp, Arabidopsis thaliana
caagagacttggaactt

SEQ ID NO: 62665 - DNA, 17 bp, Arabidopsis thaliana
caagagagctagcttcg

SEQ ID NO: 62666 - DNA, 17 bp, Arabidopsis thaliana
caagagatccagttttg

SEQ ID NO: 62667 - DNA, 17 bp, Arabidopsis thaliana
caagagatcgcctttgc

SEQ ID NO: 62668 - DNA, 17 bp, Arabidopsis thaliana
caagagattctggatcg

SEQ ID NO: 62669 - DNA, 17 bp, Arabidopsis thaliana
caagagcaaccagattc

SEQ ID NO: 62670 - DNA, 17 bp, Arabidopsis thaliana
caagagcacactatgcc

SEQ ID NO: 62671 - DNA, 17 bp, Arabidopsis thaliana
caagagcacgaggttct

SEQ ID NO: 62672 - DNA, 17 bp, Arabidopsis thaliana
caagagcagagtcagat

SEQ ID NO: 62673 - DNA, 17 bp, Arabidopsis thaliana
caagagccaatcacttc

SEQ ID NO: 62674 - DNA, 17 bp, Arabidopsis thaliana
caagagccaggcctcga

SEQ ID NO: 62675 - DNA, 17 bp, Arabidopsis thaliana
caagagccaggtctcga

SEQ ID NO: 62676 - DNA, 17 bp, Arabidopsis thaliana
caagagccgagttctga

SEQ ID NO: 62677 - DNA, 17 bp, Arabidopsis thaliana
caagagccgcagtcaca

SEQ ID NO: 62678 - DNA, 17 bp, Arabidopsis thaliana
caagagcgagctaagtg

SEQ ID NO: 62679 - DNA, 17 bp, Arabidopsis thaliana
caagagcggatcaagcg

SEQ ID NO: 62680 - DNA, 17 bp, Arabidopsis thaliana
caagagctttctggacc

SEQ ID NO: 62681 - DNA, 17 bp, Arabidopsis thaliana
caagaggcaagagggtc

SEQ ID NO: 62682 - DNA, 17 bp, Arabidopsis thaliana
caagaggcgttcttgag

SEQ ID NO: 62683 - DNA, 17 bp, Arabidopsis thaliana
caagagggtctgggagt

SEQ ID NO: 62684 - DNA, 17 bp, Arabidopsis thaliana
caagagggttgtgcttg

SEQ ID NO: 62685 - DNA, 17 bp, Arabidopsis thaliana
caagagtctgccttaaa

SEQ ID NO: 62686 - DNA, 17 bp, Arabidopsis thaliana
caagagtctgggaactg

SEQ ID NO: 62687 - DNA, 17 bp, Arabidopsis thaliana
caagagtggaggcttat

SEQ ID NO: 62688 - DNA, 17 bp, Arabidopsis thaliana
caagagtgtttgagacc

SEQ ID NO: 62689 - DNA, 17 bp, Arabidopsis thaliana
caagagttcagccctat

SEQ ID NO: 62690 - DNA, 17 bp, Arabidopsis thaliana
caagagttcattctccg

SEQ ID NO: 62691 - DNA, 17 bp, Arabidopsis thaliana
caagagttccgcaattt

SEQ ID NO: 62692 - DNA, 17 bp, Arabidopsis thaliana
caagagttccggtattc

SEQ ID NO: 62693 - DNA, 17 bp, Arabidopsis thaliana
caagagttccggtattt

SEQ ID NO: 62694 - DNA, 17 bp, Arabidopsis thaliana
caagagttctcggttgc

SEQ ID NO: 62695 - DNA, 17 bp, Arabidopsis thaliana
caagataccttgtgtgg

SEQ ID NO: 62696 - DNA, 17 bp, Arabidopsis thaliana
caagatacgtaaagcgg

SEQ ID NO: 62697 - DNA, 17 bp, Arabidopsis thaliana
caagatactgagacaga

SEQ ID NO: 62698 - DNA, 17 bp, Arabidopsis thaliana
caagatactgtgacaaa

SEQ ID NO: 62699 - DNA, 17 bp, Arabidopsis thaliana
caagatactgtgactca

SEQ ID NO: 62700 - DNA, 17 bp, Arabidopsis thaliana
caagatagatcctaaag

SEQ ID NO: 62701 - DNA, 17 bp, Arabidopsis thaliana
caagatagatctgatgt

SEQ ID NO: 62702 - DNA, 17 bp, Arabidopsis thaliana
caagatagcagcgatcc

SEQ ID NO: 62703 - DNA, 17 bp, Arabidopsis thaliana
caagatatgggtgaaaa

SEQ ID NO: 62704 - DNA, 17 bp, Arabidopsis thaliana
caagatcaaatgggctt

SEQ ID NO: 62705 - DNA, 17 bp, Arabidopsis thaliana
caagatcacttggatgt

SEQ ID NO: 62706 - DNA, 17 bp, Arabidopsis thaliana
caagatcagcccctccc

SEQ ID NO: 62707 - DNA, 17 bp, Arabidopsis thaliana
caagatcagtggctcga

SEQ ID NO: 62708 - DNA, 17 bp, Arabidopsis thaliana
caagatccagttgcggt

SEQ ID NO: 62709 - DNA, 17 bp, Arabidopsis thaliana
caagatccggttgcggt

SEQ ID NO: 62710 - DNA, 17 bp, Arabidopsis thaliana
caagatccgtttgcggt

SEQ ID NO: 62711 - DNA, 17 bp, Arabidopsis thaliana
caagatcctcccccacg

SEQ ID NO: 62712 - DNA, 17 bp, Arabidopsis thaliana
caagatcgaaacttggc

SEQ ID NO: 62713 - DNA, 17 bp, Arabidopsis thaliana
caagatcgagagggaaa

SEQ ID NO: 62714 - DNA, 17 bp, Arabidopsis thaliana
caagatcgaggttcaaa

SEQ ID NO: 62715 - DNA, 17 bp, Arabidopsis thaliana
caagatcgcctagccaa

SEQ ID NO: 62716 - DNA, 17 bp, Arabidopsis thaliana
caagatcggaacttggc

SEQ ID NO: 62717 - DNA, 17 bp, Arabidopsis thaliana
caagatcggattgcggt

SEQ ID NO: 62718 - DNA, 17 bp, Arabidopsis thaliana
caagatcgggttgcggt

SEQ ID NO: 62719 - DNA, 17 bp, Arabidopsis thaliana
caagatcgggttgtggt

SEQ ID NO: 62720 - DNA, 17 bp, Arabidopsis thaliana
caagatcggtgtgacca

SEQ ID NO: 62721 - DNA, 17 bp, Arabidopsis thaliana
caagatcgtgttgcggt

SEQ ID NO: 62722 - DNA, 17 bp, Arabidopsis thaliana
caagatcgttgacggga

SEQ ID NO: 62723 - DNA, 17 bp, Arabidopsis thaliana
caagatctaagcaccaa

SEQ ID NO: 62724 - DNA, 17 bp, Arabidopsis thaliana
caagatctggttgcggt

SEQ ID NO: 62725 - DNA, 17 bp, Arabidopsis thaliana
caagatgaagcgcacgt

SEQ ID NO: 62726 - DNA, 17 bp, Arabidopsis thaliana
caagatgaaggcagatt

SEQ ID NO: 62727 - DNA, 17 bp, Arabidopsis thaliana
caagatgactggcgtgg

SEQ ID NO: 62728 - DNA, 17 bp, Arabidopsis thaliana
caagatgagatgtcacc

SEQ ID NO: 62729 - DNA, 17 bp, Arabidopsis thaliana
caagatgagctcaacga

SEQ ID NO: 62730 - DNA, 17 bp, Arabidopsis thaliana
caagatgcagcactcgg

SEQ ID NO: 62731 - DNA, 17 bp, Arabidopsis thaliana
caagatgcagttgcggt

SEQ ID NO: 62732 - DNA, 17 bp, Arabidopsis thaliana
caagatgcccaacaaga

SEQ ID NO: 62733 - DNA, 17 bp, Arabidopsis thaliana
caagatgcggaatgcac

SEQ ID NO: 62734 - DNA, 17 bp, Arabidopsis thaliana
caagatgcggttcggtt

SEQ ID NO: 62735 - DNA, 17 bp, Arabidopsis thaliana
caagatggaggagtaag

SEQ ID NO: 62736 - DNA, 17 bp, Arabidopsis thaliana
caagatgtcgtctgtcg

SEQ ID NO: 62737 - DNA, 17 bp, Arabidopsis thaliana
caagatgtgcgttctca

SEQ ID NO: 62738 - DNA, 17 bp, Arabidopsis thaliana
caagatgttcagccatg

SEQ ID NO: 62739 - DNA, 17 bp, Arabidopsis thaliana
caagattagttgctgct

SEQ ID NO: 62740 - DNA, 17 bp, Arabidopsis thaliana
caagattcctctggatt

SEQ ID NO: 62741 - DNA, 17 bp, Arabidopsis thaliana
caagattctacgcagag

SEQ ID NO: 62742 - DNA, 17 bp, Arabidopsis thaliana
caagattgggtctcact

SEQ ID NO: 62743 - DNA, 17 bp, Arabidopsis thaliana
caagattggtgttccgg

SEQ ID NO: 62744 - DNA, 17 bp, Arabidopsis thaliana
caagattgtggtttggg

SEQ ID NO: 62745 - DNA, 17 bp, Arabidopsis thaliana
caagatttcgggtcggg

SEQ ID NO: 62746 - DNA, 17 bp, Arabidopsis thaliana
caagatttgaggattgt

SEQ ID NO: 62747 - DNA, 17 bp, Arabidopsis thaliana
caagatttgtgttggca

SEQ ID NO: 62748 - DNA, 17 bp, Arabidopsis thaliana
caagattttggaactga

SEQ ID NO: 62749 - DNA, 17 bp, Arabidopsis thaliana
caagattttggaactgt

SEQ ID NO: 62750 - DNA, 17 bp, Arabidopsis thaliana
caagattttggatgcgg

SEQ ID NO: 62751 - DNA, 17 bp, Arabidopsis thaliana
caagattttggctatga

SEQ ID NO: 62752 - DNA, 17 bp, Arabidopsis thaliana
caagatttttgatcagg

SEQ ID NO: 62753 - DNA, 17 bp, Arabidopsis thaliana
caagcaaatgattcgtt

SEQ ID NO: 62754 - DNA, 17 bp, Arabidopsis thaliana
caagcaagccatgatct

SEQ ID NO: 62755 - DNA, 17 bp, Arabidopsis thaliana
caagcaagcggagaccg

SEQ ID NO: 62756 - DNA, 17 bp, Arabidopsis thaliana
caagcaaggaagtgact

SEQ ID NO: 62757 - DNA, 17 bp, Arabidopsis thaliana
caagcaaggtgcaactg

SEQ ID NO: 62758 - DNA, 17 bp, Arabidopsis thaliana
caagcaagtccgactag

SEQ ID NO: 62759 - DNA, 17 bp, Arabidopsis thaliana
caagcaagttttgcagg

SEQ ID NO: 62760 - DNA, 17 bp, Arabidopsis thaliana
caagcaatagtttgcgc

SEQ ID NO: 62761 - DNA, 17 bp, Arabidopsis thaliana
caagcaatagtttgcgg

SEQ ID NO: 62762 - DNA, 17 bp, Arabidopsis thaliana
caagcaatctgcatgtt

SEQ ID NO: 62763 - DNA, 17 bp, Arabidopsis thaliana
caagcaatgcgtatgac

SEQ ID NO: 62764 - DNA, 17 bp, Arabidopsis thaliana
caagcacctgcgtctca

SEQ ID NO: 62765 - DNA, 17 bp, Arabidopsis thaliana
caagcacgcttaactgc

SEQ ID NO: 62766 - DNA, 17 bp, Arabidopsis thaliana
caagcacgtcggttgct

SEQ ID NO: 62767 - DNA, 17 bp, Arabidopsis thaliana
caagcacgtctgcctgg

SEQ ID NO: 62768 - DNA, 17 bp, Arabidopsis thaliana
caagcactccacgctag

SEQ ID NO: 62769 - DNA, 17 bp, Arabidopsis thaliana
caagcactctacgcagc

SEQ ID NO: 62770 - DNA, 17 bp, Arabidopsis thaliana
caagcagagatatacgc

SEQ ID NO: 62771 - DNA, 17 bp, Arabidopsis thaliana
caagcagatctggcagt

SEQ ID NO: 62772 - DNA, 17 bp, Arabidopsis thaliana
caagcagatgtgattca

SEQ ID NO: 62773 - DNA, 17 bp, Arabidopsis thaliana
caagcagatgttgacat

SEQ ID NO: 62774 - DNA, 17 bp, Arabidopsis thaliana
caagcagcatgattgca

SEQ ID NO: 62775 - DNA, 17 bp, Arabidopsis thaliana
caagcagctaatacgtt

SEQ ID NO: 62776 - DNA, 17 bp, Arabidopsis thaliana
caagcagctccggcgcc

SEQ ID NO: 62777 - DNA, 17 bp, Arabidopsis thaliana
caagcaggagtcaccag

SEQ ID NO: 62778 - DNA, 17 bp, Arabidopsis thaliana
caagcaggggcaggtct

SEQ ID NO: 62779 - DNA, 17 bp, Arabidopsis thaliana
caagcaggtatacagtg

SEQ ID NO: 62780 - DNA, 17 bp, Arabidopsis thaliana
caagcaggttggcccat

SEQ ID NO: 62781 - DNA, 17 bp, Arabidopsis thaliana
caagcagttatatggat

SEQ ID NO: 62782 - DNA, 17 bp, Arabidopsis thaliana
caagcagttccggtgcc

SEQ ID NO: 62783 - DNA, 17 bp, Arabidopsis thaliana
caagcagttgacaagtt

SEQ ID NO: 62784 - DNA, 17 bp, Arabidopsis thaliana
caagcataaatttggtc

SEQ ID NO: 62785 - DNA, 17 bp, Arabidopsis thaliana
caagcatgaatttggtc

SEQ ID NO: 62786 - DNA, 17 bp, Arabidopsis thaliana
caagcattctccactgt

SEQ ID NO: 62787 - DNA, 17 bp, Arabidopsis thaliana
caagcattggacatgga

SEQ ID NO: 62788 - DNA, 17 bp, Arabidopsis thaliana
caagccaaagtgccttc

SEQ ID NO: 62789 - DNA, 17 bp, Arabidopsis thaliana
caagccaagctgacagc

SEQ ID NO: 62790 - DNA, 17 bp, Arabidopsis thaliana
caagccaagggatttgc

SEQ ID NO: 62791 - DNA, 17 bp, Arabidopsis thaliana
caagccaagtattgggc

SEQ ID NO: 62792 - DNA, 17 bp, Arabidopsis thaliana
caagccacaatactacc

SEQ ID NO: 62793 - DNA, 17 bp, Arabidopsis thaliana
caagccactcggcctag

SEQ ID NO: 62794 - DNA, 17 bp, Arabidopsis thaliana
caagccactcggcctgg

SEQ ID NO: 62795 - DNA, 17 bp, Arabidopsis thaliana
caagccagactgcaaaa

SEQ ID NO: 62796 - DNA, 17 bp, Arabidopsis thaliana
caagccatcgtcactgg

SEQ ID NO: 62797 - DNA, 17 bp, Arabidopsis thaliana
caagcccaaaggcccta

SEQ ID NO: 62798 - DNA, 17 bp, Arabidopsis thaliana
caagcccaaccagttca

SEQ ID NO: 62799 - DNA, 17 bp, Arabidopsis thaliana
caagcccatattatccg

SEQ ID NO: 62800 - DNA, 17 bp, Arabidopsis thaliana
caagcccatattgtccg

SEQ ID NO: 62801 - DNA, 17 bp, Arabidopsis thaliana
caagcccatcatctaga

SEQ ID NO: 62802 - DNA, 17 bp, Arabidopsis thaliana
caagcccatgggccgcc

SEQ ID NO: 62803 - DNA, 17 bp, Arabidopsis thaliana
caagcccatgggcgtcc

SEQ ID NO: 62804 - DNA, 17 bp, Arabidopsis thaliana
caagcccgcttaactat

SEQ ID NO: 62805 - DNA, 17 bp, Arabidopsis thaliana
caagcccgttcaagacg

SEQ ID NO: 62806 - DNA, 17 bp, Arabidopsis thaliana
caagccgaccaatgcac

SEQ ID NO: 62807 - DNA, 17 bp, Arabidopsis thaliana
caagccgacggcgaaga

SEQ ID NO: 62808 - DNA, 17 bp, Arabidopsis thaliana
caagccgatctacgacg

SEQ ID NO: 62809 - DNA, 17 bp, Arabidopsis thaliana
caagccgatgtcctctt

SEQ ID NO: 62810 - DNA, 17 bp, Arabidopsis thaliana
caagccgattctacctt

SEQ ID NO: 62811 - DNA, 17 bp, Arabidopsis thaliana
caagccggacctgccga

SEQ ID NO: 62812 - DNA, 17 bp, Arabidopsis thaliana
caagccggattgttttg

SEQ ID NO: 62813 - DNA, 17 bp, Arabidopsis thaliana
caagccggcaaagatat

SEQ ID NO: 62814 - DNA, 17 bp, Arabidopsis thaliana
caagccggttgctcgct

SEQ ID NO: 62815 - DNA, 17 bp, Arabidopsis thaliana
caagccgtgatgggccg

SEQ ID NO: 62816 - DNA, 17 bp, Arabidopsis thaliana
caagccgtgatgggcgg

SEQ ID NO: 62817 - DNA, 17 bp, Arabidopsis thaliana
caagcctacgctctgga

SEQ ID NO: 62818 - DNA, 17 bp, Arabidopsis thaliana
caagcctactctctgga

SEQ ID NO: 62819 - DNA, 17 bp, Arabidopsis thaliana
caagcctatgggccgcc

SEQ ID NO: 62820 - DNA, 17 bp, Arabidopsis thaliana
caagcctcgtctgcgtt

SEQ ID NO: 62821 - DNA, 17 bp, Arabidopsis thaliana
caagcctgacgtattgc

SEQ ID NO: 62822 - DNA, 17 bp, Arabidopsis thaliana
caagccttctggccgag

SEQ ID NO: 62823 - DNA, 17 bp, Arabidopsis thaliana
caagccttgcgattgtt

SEQ ID NO: 62824 - DNA, 17 bp, Arabidopsis thaliana
caagcctttcgcaggag

SEQ ID NO: 62825 - DNA, 17 bp, Arabidopsis thaliana
caagcgaaacattgaag

SEQ ID NO: 62826 - DNA, 17 bp, Arabidopsis thaliana
caagcgaagagactatg

SEQ ID NO: 62827 - DNA, 17 bp, Arabidopsis thaliana
caagcgacagctgcggc

SEQ ID NO: 62828 - DNA, 17 bp, Arabidopsis thaliana
caagcgacgcatgcgcc

SEQ ID NO: 62829 - DNA, 17 bp, Arabidopsis thaliana
caagcgactatcgttcc

SEQ ID NO: 62830 - DNA, 17 bp, Arabidopsis thaliana
caagcgactatcgtttc

SEQ ID NO: 62831 - DNA, 17 bp, Arabidopsis thaliana
caagcgacttttccgaa

SEQ ID NO: 62832 - DNA, 17 bp, Arabidopsis thaliana
caagcgagacattgaag

SEQ ID NO: 62833 - DNA, 17 bp, Arabidopsis thaliana
caagcgaggaacgatct

SEQ ID NO: 62834 - DNA, 17 bp, Arabidopsis thaliana
caagcgattctgagttc

SEQ ID NO: 62835 - DNA, 17 bp, Arabidopsis thaliana
caagcgattcttccgat

SEQ ID NO: 62836 - DNA, 17 bp, Arabidopsis thaliana
caagcgattgtgggtgt

SEQ ID NO: 62837 - DNA, 17 bp, Arabidopsis thaliana
caagcgcctcttgacga

SEQ ID NO: 62838 - DNA, 17 bp, Arabidopsis thaliana
caagcgcgatgaccaat

SEQ ID NO: 62839 - DNA, 17 bp, Arabidopsis thaliana
caagcgcttatggcggt

SEQ ID NO: 62840 - DNA, 17 bp, Arabidopsis thaliana
caagcggacggttgcgg

SEQ ID NO: 62841 - DNA, 17 bp, Arabidopsis thaliana
caagcggagaggacggt

SEQ ID NO: 62842 - DNA, 17 bp, Arabidopsis thaliana
caagcggattaagcggt

SEQ ID NO: 62843 - DNA, 17 bp, Arabidopsis thaliana
caagcggattaagtagt

SEQ ID NO: 62844 - DNA, 17 bp, Arabidopsis thaliana
caagcggccacaggtag

SEQ ID NO: 62845 - DNA, 17 bp, Arabidopsis thaliana
caagcggctcctctgtc

SEQ ID NO: 62846 - DNA, 17 bp, Arabidopsis thaliana
caagcggctgcaaaatt

SEQ ID NO: 62847 - DNA, 17 bp, Arabidopsis thaliana
caagcgggacctatgtt

SEQ ID NO: 62848 - DNA, 17 bp, Arabidopsis thaliana
caagcgggttttggtcc

SEQ ID NO: 62849 - DNA, 17 bp, Arabidopsis thaliana
caagcggtaaggcaacg

SEQ ID NO: 62850 - DNA, 17 bp, Arabidopsis thaliana
caagcggtgacctctat

SEQ ID NO: 62851 - DNA, 17 bp, Arabidopsis thaliana
caagcggtgacttctat

SEQ ID NO: 62852 - DNA, 17 bp, Arabidopsis thaliana
caagcggtggagcatgt

SEQ ID NO: 62853 - DNA, 17 bp, Arabidopsis thaliana
caagcggtggatcatgt

SEQ ID NO: 62854 - DNA, 17 bp, Arabidopsis thaliana
caagcggtgttgaacgt

SEQ ID NO: 62855 - DNA, 17 bp, Arabidopsis thaliana
caagcggtgtttgaggt

SEQ ID NO: 62856 - DNA, 17 bp, Arabidopsis thaliana
caagcggttatagaaat

SEQ ID NO: 62857 - DNA, 17 bp, Arabidopsis thaliana
caagcgtatcgaatgag

SEQ ID NO: 62858 - DNA, 17 bp, Arabidopsis thaliana
caagcgtatcgtgacat

SEQ ID NO: 62859 - DNA, 17 bp, Arabidopsis thaliana
caagcgtcactcgaacc

SEQ ID NO: 62860 - DNA, 17 bp, Arabidopsis thaliana
caagcgtcattcgaacc

SEQ ID NO: 62861 - DNA, 17 bp, Arabidopsis thaliana
caagcgtcctgttaccg

SEQ ID NO: 62862 - DNA, 17 bp, Arabidopsis thaliana
caagcgtcgcatcatca

SEQ ID NO: 62863 - DNA, 17 bp, Arabidopsis thaliana
caagcgtctactgtgaa

SEQ ID NO: 62864 - DNA, 17 bp, Arabidopsis thaliana
caagcgtgacttcaagg

SEQ ID NO: 62865 - DNA, 17 bp, Arabidopsis thaliana
caagcgtgcttaggcga

SEQ ID NO: 62866 - DNA, 17 bp, Arabidopsis thaliana
caagcgtgcttgggcga

SEQ ID NO: 62867 - DNA, 17 bp, Arabidopsis thaliana
caagcgttatcaagtgt

SEQ ID NO: 62868 - DNA, 17 bp, Arabidopsis thaliana
caagcgttctgaacgac

SEQ ID NO: 62869 - DNA, 17 bp, Arabidopsis thaliana
caagcgtttacagttgc

SEQ ID NO: 62870 - DNA, 17 bp, Arabidopsis thaliana
caagcgtttgcggttgc

SEQ ID NO: 62871 - DNA, 17 bp, Arabidopsis thaliana
caagcgtttgcggtttc

SEQ ID NO: 62872 - DNA, 17 bp, Arabidopsis thaliana
caagcgtttggattttg

SEQ ID NO: 62873 - DNA, 17 bp, Arabidopsis thaliana
caagctaaccactttag

SEQ ID NO: 62874 - DNA, 17 bp, Arabidopsis thaliana
caagctaactggaccca

SEQ ID NO: 62875 - DNA, 17 bp, Arabidopsis thaliana
caagctaagattctgct

SEQ ID NO: 62876 - DNA, 17 bp, Arabidopsis thaliana
caagctaatagcgtggg

SEQ ID NO: 62877 - DNA, 17 bp, Arabidopsis thaliana
caagctacggaccatgg

SEQ ID NO: 62878 - DNA, 17 bp, Arabidopsis thaliana
caagctactgtcgttca

SEQ ID NO: 62879 - DNA, 17 bp, Arabidopsis thaliana
caagctatccctagaca

SEQ ID NO: 62880 - DNA, 17 bp, Arabidopsis thaliana
caagctatctctctcca

SEQ ID NO: 62881 - DNA, 17 bp, Arabidopsis thaliana
caagctcaacagggtct

SEQ ID NO: 62882 - DNA, 17 bp, Arabidopsis thaliana
caagctcagtctttgtt

SEQ ID NO: 62883 - DNA, 17 bp, Arabidopsis thaliana
caagctcgctccgccat

SEQ ID NO: 62884 - DNA, 17 bp, Arabidopsis thaliana
caagctcgctgtgctca

SEQ ID NO: 62885 - DNA, 17 bp, Arabidopsis thaliana
caagctcgtctgcccag

SEQ ID NO: 62886 - DNA, 17 bp, Arabidopsis thaliana
caagctctcatgtgctg

SEQ ID NO: 62887 - DNA, 17 bp, Arabidopsis thaliana
caagctctcatgtgtgt

SEQ ID NO: 62888 - DNA, 17 bp, Arabidopsis thaliana
caagctcttatctcgca

SEQ ID NO: 62889 - DNA, 17 bp, Arabidopsis thaliana
caagctgaagatcatgg

SEQ ID NO: 62890 - DNA, 17 bp, Arabidopsis thaliana
caagctgacacgtggca

SEQ ID NO: 62891 - DNA, 17 bp, Arabidopsis thaliana
caagctgagacgaggga

SEQ ID NO: 62892 - DNA, 17 bp, Arabidopsis thaliana
caagctgagagtgatcc

SEQ ID NO: 62893 - DNA, 17 bp, Arabidopsis thaliana
caagctgccccattatg

SEQ ID NO: 62894 - DNA, 17 bp, Arabidopsis thaliana
caagctggagaccttct

SEQ ID NO: 62895 - DNA, 17 bp, Arabidopsis thaliana
caagctggtcaagatgt

SEQ ID NO: 62896 - DNA, 17 bp, Arabidopsis thaliana
caagcttagttgaccaa

SEQ ID NO: 62897 - DNA, 17 bp, Arabidopsis thaliana
caagcttctaccacagt

SEQ ID NO: 62898 - DNA, 17 bp, Arabidopsis thaliana
caagcttgagggcgttt

SEQ ID NO: 62899 - DNA, 17 bp, Arabidopsis thaliana
caagcttgctatgggct

SEQ ID NO: 62900 - DNA, 17 bp, Arabidopsis thaliana
caagcttgcttgcctcc

SEQ ID NO: 62901 - DNA, 17 bp, Arabidopsis thaliana
caagcttgtctctcttc

SEQ ID NO: 62902 - DNA, 17 bp, Arabidopsis thaliana
caagcttgtctgccact

SEQ ID NO: 62903 - DNA, 17 bp, Arabidopsis thaliana
caagcttgtgctctcat

SEQ ID NO: 62904 - DNA, 17 bp, Arabidopsis thaliana
caagcttgtggatggcg

SEQ ID NO: 62905 - DNA, 17 bp, Arabidopsis thaliana
caagctttcgggaaata

SEQ ID NO: 62906 - DNA, 17 bp, Arabidopsis thaliana
caaggaaaagtgtcccg

SEQ ID NO: 62907 - DNA, 17 bp, Arabidopsis thaliana
caaggaaaagtgtctgg

SEQ ID NO: 62908 - DNA, 17 bp, Arabidopsis thaliana
caaggaacaagcagagc

SEQ ID NO: 62909 - DNA, 17 bp, Arabidopsis thaliana
caaggaagctgattggc

SEQ ID NO: 62910 - DNA, 17 bp, Arabidopsis thaliana
caaggaagctgctgttc

SEQ ID NO: 62911 - DNA, 17 bp, Arabidopsis thaliana
caaggaagcttgggctt

SEQ ID NO: 62912 - DNA, 17 bp, Arabidopsis thaliana
caaggaaggcagcaggc

SEQ ID NO: 62913 - DNA, 17 bp, Arabidopsis thaliana
caaggaagtgactagca

SEQ ID NO: 62914 - DNA, 17 bp, Arabidopsis thaliana
caaggaagtttgggttt

SEQ ID NO: 62915 - DNA, 17 bp, Arabidopsis thaliana
caaggaatcaactactt

SEQ ID NO: 62916 - DNA, 17 bp, Arabidopsis thaliana
caaggaatggtggtgct

SEQ ID NO: 62917 - DNA, 17 bp, Arabidopsis thaliana
caaggaattccccggat

SEQ ID NO: 62918 - DNA, 17 bp, Arabidopsis thaliana
caaggaattccgacaat

SEQ ID NO: 62919 - DNA, 17 bp, Arabidopsis thaliana
caaggaattgacggaaa

SEQ ID NO: 62920 - DNA, 17 bp, Arabidopsis thaliana
caaggaatttaaggctg

SEQ ID NO: 62921 - DNA, 17 bp, Arabidopsis thaliana
caaggacagtcgggggc

SEQ ID NO: 62922 - DNA, 17 bp, Arabidopsis thaliana
caaggaccaccgctgcc

SEQ ID NO: 62923 - DNA, 17 bp, Arabidopsis thaliana
caaggaccaccttgcaa

SEQ ID NO: 62924 - DNA, 17 bp, Arabidopsis thaliana
caaggaccattgggcgt

SEQ ID NO: 62925 - DNA, 17 bp, Arabidopsis thaliana
caaggaccgtcatttga

SEQ ID NO: 62926 - DNA, 17 bp, Arabidopsis thaliana
caaggaccgtccctcct

SEQ ID NO: 62927 - DNA, 17 bp, Arabidopsis thaliana
caaggacgagctctttg

SEQ ID NO: 62928 - DNA, 17 bp, Arabidopsis thaliana
caaggacgattccggag

SEQ ID NO: 62929 - DNA, 17 bp, Arabidopsis thaliana
caaggacgtgggttgat

SEQ ID NO: 62930 - DNA, 17 bp, Arabidopsis thaliana
caaggacttgaaagccc

SEQ ID NO: 62931 - DNA, 17 bp, Arabidopsis thaliana
caaggactttgggttcg

SEQ ID NO: 62932 - DNA, 17 bp, Arabidopsis thaliana
caaggagaaacaattga

SEQ ID NO: 62933 - DNA, 17 bp, Arabidopsis thaliana
caaggagccatggttgc

SEQ ID NO: 62934 - DNA, 17 bp, Arabidopsis thaliana
caaggagccgagtgacg

SEQ ID NO: 62935 - DNA, 17 bp, Arabidopsis thaliana
caaggagcctttctggg

SEQ ID NO: 62936 - DNA, 17 bp, Arabidopsis thaliana
caaggagctctatcatc

SEQ ID NO: 62937 - DNA, 17 bp, Arabidopsis thaliana
caaggagctgatctagg

SEQ ID NO: 62938 - DNA, 17 bp, Arabidopsis thaliana
caaggagctgcttccac

SEQ ID NO: 62939 - DNA, 17 bp, Arabidopsis thaliana
caaggaggactcttcgc

SEQ ID NO: 62940 - DNA, 17 bp, Arabidopsis thaliana
caaggaggacttctccc

SEQ ID NO: 62941 - DNA, 17 bp, Arabidopsis thaliana
caaggaggctttctggg

SEQ ID NO: 62942 - DNA, 17 bp, Arabidopsis thaliana
caaggagtcggcagata

SEQ ID NO: 62943 - DNA, 17 bp, Arabidopsis thaliana
caaggagtctgacatgt

SEQ ID NO: 62944 - DNA, 17 bp, Arabidopsis thaliana
caaggagtttactcgac

SEQ ID NO: 62945 - DNA, 17 bp, Arabidopsis thaliana
caaggatacaattctta

SEQ ID NO: 62946 - DNA, 17 bp, Arabidopsis thaliana
caaggatacagttctta

SEQ ID NO: 62947 - DNA, 17 bp, Arabidopsis thaliana
caaggatctgaaccgga

SEQ ID NO: 62948 - DNA, 17 bp, Arabidopsis thaliana
caaggatgacttgccga

SEQ ID NO: 62949 - DNA, 17 bp, Arabidopsis thaliana
caaggatgacttgcctg

SEQ ID NO: 62950 - DNA, 17 bp, Arabidopsis thaliana
caaggatgtcgaaacta

SEQ ID NO: 62951 - DNA, 17 bp, Arabidopsis thaliana
caaggattcattttccg

SEQ ID NO: 62952 - DNA, 17 bp, Arabidopsis thaliana
caaggattggctctgag

SEQ ID NO: 62953 - DNA, 17 bp, Arabidopsis thaliana
caaggatttgttattgg

SEQ ID NO: 62954 - DNA, 17 bp, Arabidopsis thaliana
caaggattttgggatgt

SEQ ID NO: 62955 - DNA, 17 bp, Arabidopsis thaliana
caaggcaattgcctcaa

SEQ ID NO: 62956 - DNA, 17 bp, Arabidopsis thaliana
caaggcacaatcttttg

SEQ ID NO: 62957 - DNA, 17 bp, Arabidopsis thaliana
caaggcactttgaatgg

SEQ ID NO: 62958 - DNA, 17 bp, Arabidopsis thaliana
caaggcagagacgtgtc

SEQ ID NO: 62959 - DNA, 17 bp, Arabidopsis thaliana
caaggcagagacgtttc

SEQ ID NO: 62960 - DNA, 17 bp, Arabidopsis thaliana
caaggcagaggcgtttc

SEQ ID NO: 62961 - DNA, 17 bp, Arabidopsis thaliana
caaggcagcctttaccc

SEQ ID NO: 62962 - DNA, 17 bp, Arabidopsis thaliana
caaggcagttcgtctat

SEQ ID NO: 62963 - DNA, 17 bp, Arabidopsis thaliana
caaggcatttggaaggt

SEQ ID NO: 62964 - DNA, 17 bp, Arabidopsis thaliana
caaggccaaatttgatg

SEQ ID NO: 62965 - DNA, 17 bp, Arabidopsis thaliana
caaggcccaaagggatt

SEQ ID NO: 62966 - DNA, 17 bp, Arabidopsis thaliana
caaggcccgcctcgttg

SEQ ID NO: 62967 - DNA, 17 bp, Arabidopsis thaliana
caaggccctgttcgttt

SEQ ID NO: 62968 - DNA, 17 bp, Arabidopsis thaliana
caaggcctatcggatgt

SEQ ID NO: 62969 - DNA, 17 bp, Arabidopsis thaliana
caaggcctcaacactct

SEQ ID NO: 62970 - DNA, 17 bp, Arabidopsis thaliana
caaggcctgagagagaa

SEQ ID NO: 62971 - DNA, 17 bp, Arabidopsis thaliana
caaggcgactgctcgtc

SEQ ID NO: 62972 - DNA, 17 bp, Arabidopsis thaliana
caaggcgatgatcagta

SEQ ID NO: 62973 - DNA, 17 bp, Arabidopsis thaliana
caaggcggaagcacgac

SEQ ID NO: 62974 - DNA, 17 bp, Arabidopsis thaliana
caaggcggttcgtctat

SEQ ID NO: 62975 - DNA, 17 bp, Arabidopsis thaliana
caaggcgtaactgagct

SEQ ID NO: 62976 - DNA, 17 bp, Arabidopsis thaliana
caaggcgtaactgagtt

SEQ ID NO: 62977 - DNA, 17 bp, Arabidopsis thaliana
caaggcgtggccgctac

SEQ ID NO: 62978 - DNA, 17 bp, Arabidopsis thaliana
caaggctaaacaccaac

SEQ ID NO: 62979 - DNA, 17 bp, Arabidopsis thaliana
caaggctaaggccaagc

SEQ ID NO: 62980 - DNA, 17 bp, Arabidopsis thaliana
caaggctagagaacatt

SEQ ID NO: 62981 - DNA, 17 bp, Arabidopsis thaliana
caaggctcgcttcggcg

SEQ ID NO: 62982 - DNA, 17 bp, Arabidopsis thaliana
caaggctctccttacca

SEQ ID NO: 62983 - DNA, 17 bp, Arabidopsis thaliana
caaggctgaaacttaaa

SEQ ID NO: 62984 - DNA, 17 bp, Arabidopsis thaliana
caaggctgctaagatcc

SEQ ID NO: 62985 - DNA, 17 bp, Arabidopsis thaliana
caaggcttcttgagaca

SEQ ID NO: 62986 - DNA, 17 bp, Arabidopsis thaliana
caaggcttggacttggg

SEQ ID NO: 62987 - DNA, 17 bp, Arabidopsis thaliana
caaggctttgcgttagc

SEQ ID NO: 62988 - DNA, 17 bp, Arabidopsis thaliana
caaggcttttgagttgt

SEQ ID NO: 62989 - DNA, 17 bp, Arabidopsis thaliana
caagggaaacgcttact

SEQ ID NO: 62990 - DNA, 17 bp, Arabidopsis thaliana
caagggaacgggcttgg

SEQ ID NO: 62991 - DNA, 17 bp, Arabidopsis thaliana
caagggaagtgcaaaac

SEQ ID NO: 62992 - DNA, 17 bp, Arabidopsis thaliana
caagggaatgaaaggcc

SEQ ID NO: 62993 - DNA, 17 bp, Arabidopsis thaliana
caagggacagtagatgt

SEQ ID NO: 62994 - DNA, 17 bp, Arabidopsis thaliana
caagggactcgtcaacg

SEQ ID NO: 62995 - DNA, 17 bp, Arabidopsis thaliana
caagggactcgtcaatg

SEQ ID NO: 62996 - DNA, 17 bp, Arabidopsis thaliana
caagggagtcgatgctt

SEQ ID NO: 62997 - DNA, 17 bp, Arabidopsis thaliana
caagggatcggctgggg

SEQ ID NO: 62998 - DNA, 17 bp, Arabidopsis thaliana
caagggatctcctatgt

SEQ ID NO: 62999 - DNA, 17 bp, Arabidopsis thaliana
caagggatctttgtttt

SEQ ID NO: 63000 - DNA, 17 bp, Arabidopsis thaliana
caagggatggagtaacg

SEQ ID NO: 63001 - DNA, 17 bp, Arabidopsis thaliana
caagggatgtcctatgt

SEQ ID NO: 63002 - DNA, 17 bp, Arabidopsis thaliana
caagggcacgtctgcct

SEQ ID NO: 63003 - DNA, 17 bp, Arabidopsis thaliana
caagggcattttggtca

SEQ ID NO: 63004 - DNA, 17 bp, Arabidopsis thaliana
caagggcccggatttag

SEQ ID NO: 63005 - DNA, 17 bp, Arabidopsis thaliana
caagggcctggatttag

SEQ ID NO: 63006 - DNA, 17 bp, Arabidopsis thaliana
caagggcgggcttggca

SEQ ID NO: 63007 - DNA, 17 bp, Arabidopsis thaliana
caagggctaaacggatc

SEQ ID NO: 63008 - DNA, 17 bp, Arabidopsis thaliana
caagggctcgagacctc

SEQ ID NO: 63009 - DNA, 17 bp, Arabidopsis thaliana
caaggggaatccgactg

SEQ ID NO: 63010 - DNA, 17 bp, Arabidopsis thaliana
caaggggaattcccact

SEQ ID NO: 63011 - DNA, 17 bp, Arabidopsis thaliana
caaggggataatcagac

SEQ ID NO: 63012 - DNA, 17 bp, Arabidopsis thaliana
caagggggcttccacag

SEQ ID NO: 63013 - DNA, 17 bp, Arabidopsis thaliana
caagggggcttctagta

SEQ ID NO: 63014 - DNA, 17 bp, Arabidopsis thaliana
caaggggtcctcgaacc

SEQ ID NO: 63015 - DNA, 17 bp, Arabidopsis thaliana
caaggggttaggtgcaa

SEQ ID NO: 63016 - DNA, 17 bp, Arabidopsis thaliana
caaggggttagtcaagc

SEQ ID NO: 63017 - DNA, 17 bp, Arabidopsis thaliana
caaggggttgattccag

SEQ ID NO: 63018 - DNA, 17 bp, Arabidopsis thaliana
caaggggtttgcgagta

SEQ ID NO: 63019 - DNA, 17 bp, Arabidopsis thaliana
caagggtccggataatc

SEQ ID NO: 63020 - DNA, 17 bp, Arabidopsis thaliana
caagggtcgaaccacat

SEQ ID NO: 63021 - DNA, 17 bp, Arabidopsis thaliana
caagggtcgaattgata

SEQ ID NO: 63022 - DNA, 17 bp, Arabidopsis thaliana
caagggtgaacgacctg

SEQ ID NO: 63023 - DNA, 17 bp, Arabidopsis thaliana
caagggtggccgttcct

SEQ ID NO: 63024 - DNA, 17 bp, Arabidopsis thaliana
caagggtggtccgtgat

SEQ ID NO: 63025 - DNA, 17 bp, Arabidopsis thaliana
caagggtgttgatgtca

SEQ ID NO: 63026 - DNA, 17 bp, Arabidopsis thaliana
caagggttcctccgcaa

SEQ ID NO: 63027 - DNA, 17 bp, Arabidopsis thaliana
caagggttcgctgaggg

SEQ ID NO: 63028 - DNA, 17 bp, Arabidopsis thaliana
caagggttttggccaag

SEQ ID NO: 63029 - DNA, 17 bp, Arabidopsis thaliana
caagggttttgggatgt

SEQ ID NO: 63030 - DNA, 17 bp, Arabidopsis thaliana
caaggtaactatttgga

SEQ ID NO: 63031 - DNA, 17 bp, Arabidopsis thaliana
caaggtaagacgttgct

SEQ ID NO: 63032 - DNA, 17 bp, Arabidopsis thaliana
caaggtaatttgattgt

SEQ ID NO: 63033 - DNA, 17 bp, Arabidopsis thaliana
caaggtactgtactgtg

SEQ ID NO: 63034 - DNA, 17 bp, Arabidopsis thaliana
caaggtagccgtactgg

SEQ ID NO: 63035 - DNA, 17 bp, Arabidopsis thaliana
caaggtagccgtatcgg

SEQ ID NO: 63036 - DNA, 17 bp, Arabidopsis thaliana
caaggtatgttgggaag

SEQ ID NO: 63037 - DNA, 17 bp, Arabidopsis thaliana
caaggtcaaaatttggg

SEQ ID NO: 63038 - DNA, 17 bp, Arabidopsis thaliana
caaggtcaaggctggtg

SEQ ID NO: 63039 - DNA, 17 bp, Arabidopsis thaliana
caaggtcatttgtgtta

SEQ ID NO: 63040 - DNA, 17 bp, Arabidopsis thaliana
caaggtccggtggggta

SEQ ID NO: 63041 - DNA, 17 bp, Arabidopsis thaliana
caaggtccttcatctgc

SEQ ID NO: 63042 - DNA, 17 bp, Arabidopsis thaliana
caaggtcgaatccgcca

SEQ ID NO: 63043 - DNA, 17 bp, Arabidopsis thaliana
caaggtcgacgcgggct

SEQ ID NO: 63044 - DNA, 17 bp, Arabidopsis thaliana
caaggtcgattgtcggt

SEQ ID NO: 63045 - DNA, 17 bp, Arabidopsis thaliana
caaggtcgtattcgtag

SEQ ID NO: 63046 - DNA, 17 bp, Arabidopsis thaliana
caaggtctcgaggttag

SEQ ID NO: 63047 - DNA, 17 bp, Arabidopsis thaliana
caaggtctctgctgttg

SEQ ID NO: 63048 - DNA, 17 bp, Arabidopsis thaliana
caaggtctgcgagggat

SEQ ID NO: 63049 - DNA, 17 bp, Arabidopsis thaliana
caaggtcttggaggtgg

SEQ ID NO: 63050 - DNA, 17 bp, Arabidopsis thaliana
caaggtgaatccgactg

SEQ ID NO: 63051 - DNA, 17 bp, Arabidopsis thaliana
caaggtgaattgctgag

SEQ ID NO: 63052 - DNA, 17 bp, Arabidopsis thaliana
caaggtgatgtagccta

SEQ ID NO: 63053 - DNA, 17 bp, Arabidopsis thaliana
caaggtgccaaaattag

SEQ ID NO: 63054 - DNA, 17 bp, Arabidopsis thaliana
caaggtggctatagttt

SEQ ID NO: 63055 - DNA, 17 bp, Arabidopsis thaliana
caaggtgggtcagcgct

SEQ ID NO: 63056 - DNA, 17 bp, Arabidopsis thaliana
caaggtgttctaaaggg

SEQ ID NO: 63057 - DNA, 17 bp, Arabidopsis thaliana
caaggttaggtcacaag

SEQ ID NO: 63058 - DNA, 17 bp, Arabidopsis thaliana
caaggttattgttcaca

SEQ ID NO: 63059 - DNA, 17 bp, Arabidopsis thaliana
caaggttcacggggatt

SEQ ID NO: 63060 - DNA, 17 bp, Arabidopsis thaliana
caaggttcagatccgtc

SEQ ID NO: 63061 - DNA, 17 bp, Arabidopsis thaliana
caaggttcgcaatggcc

SEQ ID NO: 63062 - DNA, 17 bp, Arabidopsis thaliana
caaggttcgcgatggcc

SEQ ID NO: 63063 - DNA, 17 bp, Arabidopsis thaliana
caaggttcgtccacgca

SEQ ID NO: 63064 - DNA, 17 bp, Arabidopsis thaliana
caaggttcgtccacgga

SEQ ID NO: 63065 - DNA, 17 bp, Arabidopsis thaliana
caaggttcgtttcccgg

SEQ ID NO: 63066 - DNA, 17 bp, Arabidopsis thaliana
caaggttctcatggcca

SEQ ID NO: 63067 - DNA, 17 bp, Arabidopsis thaliana
caaggttctctactagg

SEQ ID NO: 63068 - DNA, 17 bp, Arabidopsis thaliana
caaggttgagacttttc

SEQ ID NO: 63069 - DNA, 17 bp, Arabidopsis thaliana
caaggttgatttatcag

SEQ ID NO: 63070 - DNA, 17 bp, Arabidopsis thaliana
caaggttgcaactgcca

SEQ ID NO: 63071 - DNA, 17 bp, Arabidopsis thaliana
caaggttgcttgagggc

SEQ ID NO: 63072 - DNA, 17 bp, Arabidopsis thaliana
caaggttgcttttggtt

SEQ ID NO: 63073 - DNA, 17 bp, Arabidopsis thaliana
caaggttggcgacgtgg

SEQ ID NO: 63074 - DNA, 17 bp, Arabidopsis thaliana
caaggttgtcaaccaga

SEQ ID NO: 63075 - DNA, 17 bp, Arabidopsis thaliana
caaggttgttgtggcag

SEQ ID NO: 63076 - DNA, 17 bp, Arabidopsis thaliana
caaggtttagactgttt

SEQ ID NO: 63077 - DNA, 17 bp, Arabidopsis thaliana
caaggtttcatcgctgg

SEQ ID NO: 63078 - DNA, 17 bp, Arabidopsis thaliana
caaggtttccgtaggaa

SEQ ID NO: 63079 - DNA, 17 bp, Arabidopsis thaliana
caaggtttccgtaggtg

SEQ ID NO: 63080 - DNA, 17 bp, Arabidopsis thaliana
caaggttttggttatga

SEQ ID NO: 63081 - DNA, 17 bp, Arabidopsis thaliana
caagtaaaccatgaggg

SEQ ID NO: 63082 - DNA, 17 bp, Arabidopsis thaliana
caagtaaactgcagcct

SEQ ID NO: 63083 - DNA, 17 bp, Arabidopsis thaliana
caagtaaagatctcggt

SEQ ID NO: 63084 - DNA, 17 bp, Arabidopsis thaliana
caagtaactcaacaagt

SEQ ID NO: 63085 - DNA, 17 bp, Arabidopsis thaliana
caagtaagaccatctcc

SEQ ID NO: 63086 - DNA, 17 bp, Arabidopsis thaliana
caagtaattgattgtct

SEQ ID NO: 63087 - DNA, 17 bp, Arabidopsis thaliana
caagtaattttgggtca

SEQ ID NO: 63088 - DNA, 17 bp, Arabidopsis thaliana
caagtaattttgggtcc

SEQ ID NO: 63089 - DNA, 17 bp, Arabidopsis thaliana
caagtaattttgggtct

SEQ ID NO: 63090 - DNA, 17 bp, Arabidopsis thaliana
caagtacacgggacgag

SEQ ID NO: 63091 - DNA, 17 bp, Arabidopsis thaliana
caagtactatacgccca

SEQ ID NO: 63092 - DNA, 17 bp, Arabidopsis thaliana
caagtactttttcgggc

SEQ ID NO: 63093 - DNA, 17 bp, Arabidopsis thaliana
caagtagagtcggcttg

SEQ ID NO: 63094 - DNA, 17 bp, Arabidopsis thaliana
caagtagcaaacgatga

SEQ ID NO: 63095 - DNA, 17 bp, Arabidopsis thaliana
caagtagctcaggcgct

SEQ ID NO: 63096 - DNA, 17 bp, Arabidopsis thaliana
caagtatcgcatttcgc

SEQ ID NO: 63097 - DNA, 17 bp, Arabidopsis thaliana
caagtatctatgttcgt

SEQ ID NO: 63098 - DNA, 17 bp, Arabidopsis thaliana
caagtatgttgactatc

SEQ ID NO: 63099 - DNA, 17 bp, Arabidopsis thaliana
caagtattaggccggac

SEQ ID NO: 63100 - DNA, 17 bp, Arabidopsis thaliana
caagtattaggtgatgt

SEQ ID NO: 63101 - DNA, 17 bp, Arabidopsis thaliana
caagtattctatgcagt

SEQ ID NO: 63102 - DNA, 17 bp, Arabidopsis thaliana
caagtcaaacaagaaac

SEQ ID NO: 63103 - DNA, 17 bp, Arabidopsis thaliana
caagtcaaacgatcaga

SEQ ID NO: 63104 - DNA, 17 bp, Arabidopsis thaliana
caagtcaaacgatcagg

SEQ ID NO: 63105 - DNA, 17 bp, Arabidopsis thaliana
caagtcaaacgattaga

SEQ ID NO: 63106 - DNA, 17 bp, Arabidopsis thaliana
caagtcaattagggcca

SEQ ID NO: 63107 - DNA, 17 bp, Arabidopsis thaliana
caagtcaattagggcct

SEQ ID NO: 63108 - DNA, 17 bp, Arabidopsis thaliana
caagtcacactcgaccg

SEQ ID NO: 63109 - DNA, 17 bp, Arabidopsis thaliana
caagtcacctgcatttc

SEQ ID NO: 63110 - DNA, 17 bp, Arabidopsis thaliana
caagtcagaatccgggc

SEQ ID NO: 63111 - DNA, 17 bp, Arabidopsis thaliana
caagtcagatcggcatt

SEQ ID NO: 63112 - DNA, 17 bp, Arabidopsis thaliana
caagtcagatttcgtca

SEQ ID NO: 63113 - DNA, 17 bp, Arabidopsis thaliana
caagtcagcgcaggcct

SEQ ID NO: 63114 - DNA, 17 bp, Arabidopsis thaliana
caagtcaggctgtctct

SEQ ID NO: 63115 - DNA, 17 bp, Arabidopsis thaliana
caagtcataatccgcca

SEQ ID NO: 63116 - DNA, 17 bp, Arabidopsis thaliana
caagtcatccttggctc

SEQ ID NO: 63117 - DNA, 17 bp, Arabidopsis thaliana
caagtcatccttggctg

SEQ ID NO: 63118 - DNA, 17 bp, Arabidopsis thaliana
caagtcatcggctggcg

SEQ ID NO: 63119 - DNA, 17 bp, Arabidopsis thaliana
caagtcattcgaagtca

SEQ ID NO: 63120 - DNA, 17 bp, Arabidopsis thaliana
caagtcattgaggcctt

SEQ ID NO: 63121 - DNA, 17 bp, Arabidopsis thaliana
caagtccagatcgacga

SEQ ID NO: 63122 - DNA, 17 bp, Arabidopsis thaliana
caagtccagtgtctgtg

SEQ ID NO: 63123 - DNA, 17 bp, Arabidopsis thaliana
caagtccatatctgtca

SEQ ID NO: 63124 - DNA, 17 bp, Arabidopsis thaliana
caagtcccaactactgc

SEQ ID NO: 63125 - DNA, 17 bp, Arabidopsis thaliana
caagtcccagaagtttg

SEQ ID NO: 63126 - DNA, 17 bp, Arabidopsis thaliana
caagtcccagaccttga

SEQ ID NO: 63127 - DNA, 17 bp, Arabidopsis thaliana
caagtccctccttccgc

SEQ ID NO: 63128 - DNA, 17 bp, Arabidopsis thaliana
caagtccggtcttgtta

SEQ ID NO: 63129 - DNA, 17 bp, Arabidopsis thaliana
caagtccggtggttcca

SEQ ID NO: 63130 - DNA, 17 bp, Arabidopsis thaliana
caagtccgtctcgctta

SEQ ID NO: 63131 - DNA, 17 bp, Arabidopsis thaliana
caagtccgtcttgctga

SEQ ID NO: 63132 - DNA, 17 bp, Arabidopsis thaliana
caagtccgtcttgctta

SEQ ID NO: 63133 - DNA, 17 bp, Arabidopsis thaliana
caagtcctaactactgc

SEQ ID NO: 63134 - DNA, 17 bp, Arabidopsis thaliana
caagtcctcgtgttgca

SEQ ID NO: 63135 - DNA, 17 bp, Arabidopsis thaliana
caagtccttaggttgaa

SEQ ID NO: 63136 - DNA, 17 bp, Arabidopsis thaliana
caagtccttgcggttgt

SEQ ID NO: 63137 - DNA, 17 bp, Arabidopsis thaliana
caagtccttgttcatgc

SEQ ID NO: 63138 - DNA, 17 bp, Arabidopsis thaliana
caagtcgaaatccgcta

SEQ ID NO: 63139 - DNA, 17 bp, Arabidopsis thaliana
caagtcgaagctgtact

SEQ ID NO: 63140 - DNA, 17 bp, Arabidopsis thaliana
caagtcgacggatatca

SEQ ID NO: 63141 - DNA, 17 bp, Arabidopsis thaliana
caagtcgagagtggagt

SEQ ID NO: 63142 - DNA, 17 bp, Arabidopsis thaliana
caagtcgagtcacaagt

SEQ ID NO: 63143 - DNA, 17 bp, Arabidopsis thaliana
caagtcgatagtcggtc

SEQ ID NO: 63144 - DNA, 17 bp, Arabidopsis thaliana
caagtcgcaggggagac

SEQ ID NO: 63145 - DNA, 17 bp, Arabidopsis thaliana
caagtcggacctaaatt

SEQ ID NO: 63146 - DNA, 17 bp, Arabidopsis thaliana
caagtcggacgggaagt

SEQ ID NO: 63147 - DNA, 17 bp, Arabidopsis thaliana
caagtcggctaggcttc

SEQ ID NO: 63148 - DNA, 17 bp, Arabidopsis thaliana
caagtcgtctaaagaac

SEQ ID NO: 63149 - DNA, 17 bp, Arabidopsis thaliana
caagtctatcgatcaga

SEQ ID NO: 63150 - DNA, 17 bp, Arabidopsis thaliana
caagtctatttggttct

SEQ ID NO: 63151 - DNA, 17 bp, Arabidopsis thaliana
caagtctcaagattggt

SEQ ID NO: 63152 - DNA, 17 bp, Arabidopsis thaliana
caagtctcatgtgctga

SEQ ID NO: 63153 - DNA, 17 bp, Arabidopsis thaliana
caagtctccacagtgtt

SEQ ID NO: 63154 - DNA, 17 bp, Arabidopsis thaliana
caagtctccagtagcgt

SEQ ID NO: 63155 - DNA, 17 bp, Arabidopsis thaliana
caagtctctcatgtgat

SEQ ID NO: 63156 - DNA, 17 bp, Arabidopsis thaliana
caagtctctcttttgct

SEQ ID NO: 63157 - DNA, 17 bp, Arabidopsis thaliana
caagtctgagaatgagc

SEQ ID NO: 63158 - DNA, 17 bp, Arabidopsis thaliana
caagtctgcctgggtgt

SEQ ID NO: 63159 - DNA, 17 bp, Arabidopsis thaliana
caagtctggtgccagca

SEQ ID NO: 63160 - DNA, 17 bp, Arabidopsis thaliana
caagtctgtcagttggg

SEQ ID NO: 63161 - DNA, 17 bp, Arabidopsis thaliana
caagtctgtcagttggt

SEQ ID NO: 63162 - DNA, 17 bp, Arabidopsis thaliana
caagtctttagttcctg

SEQ ID NO: 63163 - DNA, 17 bp, Arabidopsis thaliana
caagtctttcctgtgct

SEQ ID NO: 63164 - DNA, 17 bp, Arabidopsis thaliana
caagtctttgtggaagc

SEQ ID NO: 63165 - DNA, 17 bp, Arabidopsis thaliana
caagtgactcagttgcc

SEQ ID NO: 63166 - DNA, 17 bp, Arabidopsis thaliana
caagtgagaaacgaggt

SEQ ID NO: 63167 - DNA, 17 bp, Arabidopsis thaliana
caagtgagagatttggt

SEQ ID NO: 63168 - DNA, 17 bp, Arabidopsis thaliana
caagtgagctttggcta

SEQ ID NO: 63169 - DNA, 17 bp, Arabidopsis thaliana
caagtgatatcgtcgac

SEQ ID NO: 63170 - DNA, 17 bp, Arabidopsis thaliana
caagtgatcccctctgt

SEQ ID NO: 63171 - DNA, 17 bp, Arabidopsis thaliana
caagtgatgtcgccggc

SEQ ID NO: 63172 - DNA, 17 bp, Arabidopsis thaliana
caagtgatgtgattcgg

SEQ ID NO: 63173 - DNA, 17 bp, Arabidopsis thaliana
caagtgattcagttgcc

SEQ ID NO: 63174 - DNA, 17 bp, Arabidopsis thaliana
caagtgatttcggcttg

SEQ ID NO: 63175 - DNA, 17 bp, Arabidopsis thaliana
caagtgcagttttgcgc

SEQ ID NO: 63176 - DNA, 17 bp, Arabidopsis thaliana
caagtgcagttttgcgg

SEQ ID NO: 63177 - DNA, 17 bp, Arabidopsis thaliana
caagtgccagcttcaga

SEQ ID NO: 63178 - DNA, 17 bp, Arabidopsis thaliana
caagtgccgttcacatg

SEQ ID NO: 63179 - DNA, 17 bp, Arabidopsis thaliana
caagtgcgatgtcaagt

SEQ ID NO: 63180 - DNA, 17 bp, Arabidopsis thaliana
caagtgcgcatgagatc

SEQ ID NO: 63181 - DNA, 17 bp, Arabidopsis thaliana
caagtgcggcttgtggt

SEQ ID NO: 63182 - DNA, 17 bp, Arabidopsis thaliana
caagtgcggcttgtgtt

SEQ ID NO: 63183 - DNA, 17 bp, Arabidopsis thaliana
caagtgctcctggagct

SEQ ID NO: 63184 - DNA, 17 bp, Arabidopsis thaliana
caagtgctgcagaatgg

SEQ ID NO: 63185 - DNA, 17 bp, Arabidopsis thaliana
caagtgcttcaaggcca

SEQ ID NO: 63186 - DNA, 17 bp, Arabidopsis thaliana
caagtgcttcgttcgtg

SEQ ID NO: 63187 - DNA, 17 bp, Arabidopsis thaliana
caagtggaagtgcagtg

SEQ ID NO: 63188 - DNA, 17 bp, Arabidopsis thaliana
caagtggactgtttctg

SEQ ID NO: 63189 - DNA, 17 bp, Arabidopsis thaliana
caagtggaggcggagga

SEQ ID NO: 63190 - DNA, 17 bp, Arabidopsis thaliana
caagtggcggcgcccaa

SEQ ID NO: 63191 - DNA, 17 bp, Arabidopsis thaliana
caagtggcggttggatc

SEQ ID NO: 63192 - DNA, 17 bp, Arabidopsis thaliana
caagtggctcttttgcg

SEQ ID NO: 63193 - DNA, 17 bp, Arabidopsis thaliana
caagtggggcaaccatg

SEQ ID NO: 63194 - DNA, 17 bp, Arabidopsis thaliana
caagtggtttgctgctt

SEQ ID NO: 63195 - DNA, 17 bp, Arabidopsis thaliana
caagtgtcacaggtgat

SEQ ID NO: 63196 - DNA, 17 bp, Arabidopsis thaliana
caagtgtcgtctttcgt

SEQ ID NO: 63197 - DNA, 17 bp, Arabidopsis thaliana
caagtgtgactgacatg

SEQ ID NO: 63198 - DNA, 17 bp, Arabidopsis thaliana
caagtgtgcaggagatc

SEQ ID NO: 63199 - DNA, 17 bp, Arabidopsis thaliana
caagtgtgccacgagac

SEQ ID NO: 63200 - DNA, 17 bp, Arabidopsis thaliana
caagtgtggcaagcacg

SEQ ID NO: 63201 - DNA, 17 bp, Arabidopsis thaliana
caagtgtgtcacgatca

SEQ ID NO: 63202 - DNA, 17 bp, Arabidopsis thaliana
caagtgttcttatgggt

SEQ ID NO: 63203 - DNA, 17 bp, Arabidopsis thaliana
caagtgttgaaggctat

SEQ ID NO: 63204 - DNA, 17 bp, Arabidopsis thaliana
caagtgttgctgatagg

SEQ ID NO: 63205 - DNA, 17 bp, Arabidopsis thaliana
caagtgtttcgtcacgg

SEQ ID NO: 63206 - DNA, 17 bp, Arabidopsis thaliana
caagttaaataacctgg

SEQ ID NO: 63207 - DNA, 17 bp, Arabidopsis thaliana
caagttaactcagggtg

SEQ ID NO: 63208 - DNA, 17 bp, Arabidopsis thaliana
caagttaattcgtggtt

SEQ ID NO: 63209 - DNA, 17 bp, Arabidopsis thaliana
caagttacatatgcgga

SEQ ID NO: 63210 - DNA, 17 bp, Arabidopsis thaliana
caagttaccaagaagct

SEQ ID NO: 63211 - DNA, 17 bp, Arabidopsis thaliana
caagttaccacagggat

SEQ ID NO: 63212 - DNA, 17 bp, Arabidopsis thaliana
caagttagcttttgggt

SEQ ID NO: 63213 - DNA, 17 bp, Arabidopsis thaliana
caagttatatgcggttg

SEQ ID NO: 63214 - DNA, 17 bp, Arabidopsis thaliana
caagttcaggaatattg

SEQ ID NO: 63215 - DNA, 17 bp, Arabidopsis thaliana
caagttccatacggcag

SEQ ID NO: 63216 - DNA, 17 bp, Arabidopsis thaliana
caagttccgttgacttg

SEQ ID NO: 63217 - DNA, 17 bp, Arabidopsis thaliana
caagttcctgattcaag

SEQ ID NO: 63218 - DNA, 17 bp, Arabidopsis thaliana
caagttcgcagattccg

SEQ ID NO: 63219 - DNA, 17 bp, Arabidopsis thaliana
caagttctacagatccg

SEQ ID NO: 63220 - DNA, 17 bp, Arabidopsis thaliana
caagttctagaccaagt

SEQ ID NO: 63221 - DNA, 17 bp, Arabidopsis thaliana
caagttctaggtgatgt

SEQ ID NO: 63222 - DNA, 17 bp, Arabidopsis thaliana
caagttctcatatgctg

SEQ ID NO: 63223 - DNA, 17 bp, Arabidopsis thaliana
caagttctcatgtgctg

SEQ ID NO: 63224 - DNA, 17 bp, Arabidopsis thaliana
caagttctctcttgcag

SEQ ID NO: 63225 - DNA, 17 bp, Arabidopsis thaliana
caagttgaaggagtctg

SEQ ID NO: 63226 - DNA, 17 bp, Arabidopsis thaliana
caagttgaccttgcctc

SEQ ID NO: 63227 - DNA, 17 bp, Arabidopsis thaliana
caagttgaccttggcgc

SEQ ID NO: 63228 - DNA, 17 bp, Arabidopsis thaliana
caagttgaccttggctc

SEQ ID NO: 63229 - DNA, 17 bp, Arabidopsis thaliana
caagttgactttggctc

SEQ ID NO: 63230 - DNA, 17 bp, Arabidopsis thaliana
caagttgaggaagatta

SEQ ID NO: 63231 - DNA, 17 bp, Arabidopsis thaliana
caagttgaggcctgaaa

SEQ ID NO: 63232 - DNA, 17 bp, Arabidopsis thaliana
caagttgagtgctatga

SEQ ID NO: 63233 - DNA, 17 bp, Arabidopsis thaliana
caagttgagttcaggat

SEQ ID NO: 63234 - DNA, 17 bp, Arabidopsis thaliana
caagttgatttgttgtg

SEQ ID NO: 63235 - DNA, 17 bp, Arabidopsis thaliana
caagttgccatcacacc

SEQ ID NO: 63236 - DNA, 17 bp, Arabidopsis thaliana
caagttgcctgtcgatg

SEQ ID NO: 63237 - DNA, 17 bp, Arabidopsis thaliana
caagttgcgaaagtagc

SEQ ID NO: 63238 - DNA, 17 bp, Arabidopsis thaliana
caagttgcgccccaagc

SEQ ID NO: 63239 - DNA, 17 bp, Arabidopsis thaliana
caagttgcgttgactcg

SEQ ID NO: 63240 - DNA, 17 bp, Arabidopsis thaliana
caagttgctaggaaatt

SEQ ID NO: 63241 - DNA, 17 bp, Arabidopsis thaliana
caagttggaccgttttg

SEQ ID NO: 63242 - DNA, 17 bp, Arabidopsis thaliana
caagttggacggtccat

SEQ ID NO: 63243 - DNA, 17 bp, Arabidopsis thaliana
caagttggatctcccgc

SEQ ID NO: 63244 - DNA, 17 bp, Arabidopsis thaliana
caagttgtaggagagag

SEQ ID NO: 63245 - DNA, 17 bp, Arabidopsis thaliana
caagttgtccttcggct

SEQ ID NO: 63246 - DNA, 17 bp, Arabidopsis thaliana
caagttgtccttggcta

SEQ ID NO: 63247 - DNA, 17 bp, Arabidopsis thaliana
caagttgtctaaggcgt

SEQ ID NO: 63248 - DNA, 17 bp, Arabidopsis thaliana
caagttgtgacgtcttg

SEQ ID NO: 63249 - DNA, 17 bp, Arabidopsis thaliana
caagttgtggaagagag

SEQ ID NO: 63250 - DNA, 17 bp, Arabidopsis thaliana
caagttgtgggagagag

SEQ ID NO: 63251 - DNA, 17 bp, Arabidopsis thaliana
caagttgtgttatctcg

SEQ ID NO: 63252 - DNA, 17 bp, Arabidopsis thaliana
caagttgttaggttgca

SEQ ID NO: 63253 - DNA, 17 bp, Arabidopsis thaliana
caagttgttgaaattgc

SEQ ID NO: 63254 - DNA, 17 bp, Arabidopsis thaliana
caagtttaaaccttgct

SEQ ID NO: 63255 - DNA, 17 bp, Arabidopsis thaliana
caagtttaccgcaggtt

SEQ ID NO: 63256 - DNA, 17 bp, Arabidopsis thaliana
caagtttcagtatgtgt

SEQ ID NO: 63257 - DNA, 17 bp, Arabidopsis thaliana
caagtttcgcattcaac

SEQ ID NO: 63258 - DNA, 17 bp, Arabidopsis thaliana
caagtttcgttgaattt

SEQ ID NO: 63259 - DNA, 17 bp, Arabidopsis thaliana
caagtttcgttgacttg

SEQ ID NO: 63260 - DNA, 17 bp, Arabidopsis thaliana
caagtttcgttgacttt

SEQ ID NO: 63261 - DNA, 17 bp, Arabidopsis thaliana
caagtttgcagtagtca

SEQ ID NO: 63262 - DNA, 17 bp, Arabidopsis thaliana
caagtttgcagtatggc

SEQ ID NO: 63263 - DNA, 17 bp, Arabidopsis thaliana
caagtttgccccagaag

SEQ ID NO: 63264 - DNA, 17 bp, Arabidopsis thaliana
caagtttgcgttgactc

SEQ ID NO: 63265 - DNA, 17 bp, Arabidopsis thaliana
caagtttggacggtcca

SEQ ID NO: 63266 - DNA, 17 bp, Arabidopsis thaliana
caagtttggcaggacgt

SEQ ID NO: 63267 - DNA, 17 bp, Arabidopsis thaliana
caagtttggctccaatg

SEQ ID NO: 63268 - DNA, 17 bp, Arabidopsis thaliana
caagtttggtatcgatg

SEQ ID NO: 63269 - DNA, 17 bp, Arabidopsis thaliana
caagtttgtgcacggga

SEQ ID NO: 63270 - DNA, 17 bp, Arabidopsis thaliana
caagttttattgactgg

SEQ ID NO: 63271 - DNA, 17 bp, Arabidopsis thaliana
caagttttctacatgat

SEQ ID NO: 63272 - DNA, 17 bp, Arabidopsis thaliana
caagttttctcagtttg

SEQ ID NO: 63273 - DNA, 17 bp, Arabidopsis thaliana
caagttttctcggttgt

SEQ ID NO: 63274 - DNA, 17 bp, Arabidopsis thaliana
caagttttgcggtgttc

SEQ ID NO: 63275 - DNA, 17 bp, Arabidopsis thaliana
caagttttgtgccgaag

SEQ ID NO: 63276 - DNA, 17 bp, Arabidopsis thaliana
caagttttgttgactgg

SEQ ID NO: 63277 - DNA, 17 bp, Arabidopsis thaliana
caagtttttcgggtttt

SEQ ID NO: 63278 - DNA, 17 bp, Arabidopsis thaliana
caataaactcgggagac

SEQ ID NO: 63279 - DNA, 17 bp, Arabidopsis thaliana
caataaatcgtatggtg

SEQ ID NO: 63280 - DNA, 17 bp, Arabidopsis thaliana
caataacaaatccttgc

SEQ ID NO: 63281 - DNA, 17 bp, Arabidopsis thaliana
caataacaaatgacgtg

SEQ ID NO: 63282 - DNA, 17 bp, Arabidopsis thaliana
caataacacctctcacg

SEQ ID NO: 63283 - DNA, 17 bp, Arabidopsis thaliana
caataacaggtctgtaa

SEQ ID NO: 63284 - DNA, 17 bp, Arabidopsis thaliana
caataacaggtctgtga

SEQ ID NO: 63285 - DNA, 17 bp, Arabidopsis thaliana
caataacaggttcgccg

SEQ ID NO: 63286 - DNA, 17 bp, Arabidopsis thaliana
caataaccctttcaact

SEQ ID NO: 63287 - DNA, 17 bp, Arabidopsis thaliana
caataaccgggtggtct

SEQ ID NO: 63288 - DNA, 17 bp, Arabidopsis thaliana
caataacctaatcgccc

SEQ ID NO: 63289 - DNA, 17 bp, Arabidopsis thaliana
caataacggtcctaagg

SEQ ID NO: 63290 - DNA, 17 bp, Arabidopsis thaliana
caataagaatacaatgt

SEQ ID NO: 63291 - DNA, 17 bp, Arabidopsis thaliana
caataataaatccttgc

SEQ ID NO: 63292 - DNA, 17 bp, Arabidopsis thaliana
caataatactgggtcgg

SEQ ID NO: 63293 - DNA, 17 bp, Arabidopsis thaliana
caatacatgtgcacttt

SEQ ID NO: 63294 - DNA, 17 bp, Arabidopsis thaliana
caatacccgtgggtacc

SEQ ID NO: 63295 - DNA, 17 bp, Arabidopsis thaliana
caataccgggctctctc

SEQ ID NO: 63296 - DNA, 17 bp, Arabidopsis thaliana
caataccgggctctttc

SEQ ID NO: 63297 - DNA, 17 bp, Arabidopsis thaliana
caatacgaagttgattt

SEQ ID NO: 63298 - DNA, 17 bp, Arabidopsis thaliana
caatacgaggacttccc

SEQ ID NO: 63299 - DNA, 17 bp, Arabidopsis thaliana
caatacgaggtacttgg

SEQ ID NO: 63300 - DNA, 17 bp, Arabidopsis thaliana
caatacgtctggaatta

SEQ ID NO: 63301 - DNA, 17 bp, Arabidopsis thaliana
caatacgtgaatttttg

SEQ ID NO: 63302 - DNA, 17 bp, Arabidopsis thaliana
caatactaaataaggtc

SEQ ID NO: 63303 - DNA, 17 bp, Arabidopsis thaliana
caatactaactgaccac

SEQ ID NO: 63304 - DNA, 17 bp, Arabidopsis thaliana
caatactaactgaccag

SEQ ID NO: 63305 - DNA, 17 bp, Arabidopsis thaliana
caatactaggatatgac

SEQ ID NO: 63306 - DNA, 17 bp, Arabidopsis thaliana
caatactagtttcatcc

SEQ ID NO: 63307 - DNA, 17 bp, Arabidopsis thaliana
caatactgggttttgga

SEQ ID NO: 63308 - DNA, 17 bp, Arabidopsis thaliana
caatactggtgtttcaa

SEQ ID NO: 63309 - DNA, 17 bp, Arabidopsis thaliana
caatacttctgatcgat

SEQ ID NO: 63310 - DNA, 17 bp, Arabidopsis thaliana
caatacttggcttgccg

SEQ ID NO: 63311 - DNA, 17 bp, Arabidopsis thaliana
caatactttttcgggca

SEQ ID NO: 63312 - DNA, 17 bp, Arabidopsis thaliana
caatagactttctttca

SEQ ID NO: 63313 - DNA, 17 bp, Arabidopsis thaliana
caatagccatggtgtca

SEQ ID NO: 63314 - DNA, 17 bp, Arabidopsis thaliana
caatagcccaattgcca

SEQ ID NO: 63315 - DNA, 17 bp, Arabidopsis thaliana
caatagcccttttccct

SEQ ID NO: 63316 - DNA, 17 bp, Arabidopsis thaliana
caatagcggctttggtt

SEQ ID NO: 63317 - DNA, 17 bp, Arabidopsis thaliana
caatagctcgacgccag

SEQ ID NO: 63318 - DNA, 17 bp, Arabidopsis thaliana
caatagctgccactgga

SEQ ID NO: 63319 - DNA, 17 bp, Arabidopsis thaliana
caatagcttaccaaggc

SEQ ID NO: 63320 - DNA, 17 bp, Arabidopsis thaliana
caataggcgatggatca

SEQ ID NO: 63321 - DNA, 17 bp, Arabidopsis thaliana
caataggcgggtttgca

SEQ ID NO: 63322 - DNA, 17 bp, Arabidopsis thaliana
caatagggaacgtgagc

SEQ ID NO: 63323 - DNA, 17 bp, Arabidopsis thaliana
caataggtccgactcct

SEQ ID NO: 63324 - DNA, 17 bp, Arabidopsis thaliana
caataggtggagaggcc

SEQ ID NO: 63325 - DNA, 17 bp, Arabidopsis thaliana
caataggttgctatggt

SEQ ID NO: 63326 - DNA, 17 bp, Arabidopsis thaliana
caatagtctatggacgg

SEQ ID NO: 63327 - DNA, 17 bp, Arabidopsis thaliana
caatagttacgttgagg

SEQ ID NO: 63328 - DNA, 17 bp, Arabidopsis thaliana
caatagttgcttcgaga

SEQ ID NO: 63329 - DNA, 17 bp, Arabidopsis thaliana
caatagttgcttcgata

SEQ ID NO: 63330 - DNA, 17 bp, Arabidopsis thaliana
caatagtttgcggatta

SEQ ID NO: 63331 - DNA, 17 bp, Arabidopsis thaliana
caatagtttgcttccag

SEQ ID NO: 63332 - DNA, 17 bp, Arabidopsis thaliana
caatatcaacttttccc

SEQ ID NO: 63333 - DNA, 17 bp, Arabidopsis thaliana
caatatcatctgacgcg

SEQ ID NO: 63334 - DNA, 17 bp, Arabidopsis thaliana
caatatccctccggatt

SEQ ID NO: 63335 - DNA, 17 bp, Arabidopsis thaliana
caatatccctcgggatt

SEQ ID NO: 63336 - DNA, 17 bp, Arabidopsis thaliana
caatatgcctcttggtc

SEQ ID NO: 63337 - DNA, 17 bp, Arabidopsis thaliana
caatatgcttgacgcca

SEQ ID NO: 63338 - DNA, 17 bp, Arabidopsis thaliana
caatatggttcatcctt

SEQ ID NO: 63339 - DNA, 17 bp, Arabidopsis thaliana
caatatgttcgtctgct

SEQ ID NO: 63340 - DNA, 17 bp, Arabidopsis thaliana
caatatgtttgtgacca

SEQ ID NO: 63341 - DNA, 17 bp, Arabidopsis thaliana
caatattatcacagtcc

SEQ ID NO: 63342 - DNA, 17 bp, Arabidopsis thaliana
caatattgctctgcggc

SEQ ID NO: 63343 - DNA, 17 bp, Arabidopsis thaliana
caatatttaccgacatt

SEQ ID NO: 63344 - DNA, 17 bp, Arabidopsis thaliana
caatatttctcaacatt

SEQ ID NO: 63345 - DNA, 17 bp, Arabidopsis thaliana
caatatttgagccgaac

SEQ ID NO: 63346 - DNA, 17 bp, Arabidopsis thaliana
caatattttcggtttgg

SEQ ID NO: 63347 - DNA, 17 bp, Arabidopsis thaliana
caatcaaaccagtgggt

SEQ ID NO: 63348 - DNA, 17 bp, Arabidopsis thaliana
caatcaaacgctatgtt

SEQ ID NO: 63349 - DNA, 17 bp, Arabidopsis thaliana
caatcaaagcggtgcct

SEQ ID NO: 63350 - DNA, 17 bp, Arabidopsis thaliana
caatcaaatgtttgctc

SEQ ID NO: 63351 - DNA, 17 bp, Arabidopsis thaliana
caatcaaccctggttta

SEQ ID NO: 63352 - DNA, 17 bp, Arabidopsis thaliana
caatcaacgagcttatc

SEQ ID NO: 63353 - DNA, 17 bp, Arabidopsis thaliana
caatcaactcgccggta

SEQ ID NO: 63354 - DNA, 17 bp, Arabidopsis thaliana
caatcaagcccgttcaa

SEQ ID NO: 63355 - DNA, 17 bp, Arabidopsis thaliana
caatcaaggagccgtac

SEQ ID NO: 63356 - DNA, 17 bp, Arabidopsis thaliana
caatcaatccagatatg

SEQ ID NO: 63357 - DNA, 17 bp, Arabidopsis thaliana
caatcaatgcgctgaaa

SEQ ID NO: 63358 - DNA, 17 bp, Arabidopsis thaliana
caatcacaactttgcga

SEQ ID NO: 63359 - DNA, 17 bp, Arabidopsis thaliana
caatcacaatctacgca

SEQ ID NO: 63360 - DNA, 17 bp, Arabidopsis thaliana
caatcacaggcagccat

SEQ ID NO: 63361 - DNA, 17 bp, Arabidopsis thaliana
caatcacaggtttacgt

SEQ ID NO: 63362 - DNA, 17 bp, Arabidopsis thaliana
caatcacagttttcaga

SEQ ID NO: 63363 - DNA, 17 bp, Arabidopsis thaliana
caatcaccaaagtggaa

SEQ ID NO: 63364 - DNA, 17 bp, Arabidopsis thaliana
caatcaccaactttcgg

SEQ ID NO: 63365 - DNA, 17 bp, Arabidopsis thaliana
caatcaccattcggagc

SEQ ID NO: 63366 - DNA, 17 bp, Arabidopsis thaliana
caatcacccatggggtt

SEQ ID NO: 63367 - DNA, 17 bp, Arabidopsis thaliana
caatcacctaacaaacg

SEQ ID NO: 63368 - DNA, 17 bp, Arabidopsis thaliana
caatcacgagagttagc

SEQ ID NO: 63369 - DNA, 17 bp, Arabidopsis thaliana
caatcacgcaaatttcc

SEQ ID NO: 63370 - DNA, 17 bp, Arabidopsis thaliana
caatcacgggacaggat

SEQ ID NO: 63371 - DNA, 17 bp, Arabidopsis thaliana
caatcacgggttttcgt

SEQ ID NO: 63372 - DNA, 17 bp, Arabidopsis thaliana
caatcagacccatcatt

SEQ ID NO: 63373 - DNA, 17 bp, Arabidopsis thaliana
caatcagacctcatacc

SEQ ID NO: 63374 - DNA, 17 bp, Arabidopsis thaliana
caatcagagcgcaccgg

SEQ ID NO: 63375 - DNA, 17 bp, Arabidopsis thaliana
caatcagaggcgctatg

SEQ ID NO: 63376 - DNA, 17 bp, Arabidopsis thaliana
caatcagatacgcagcc

SEQ ID NO: 63377 - DNA, 17 bp, Arabidopsis thaliana
caatcagatctgattca

SEQ ID NO: 63378 - DNA, 17 bp, Arabidopsis thaliana
caatcagatgttgacac

SEQ ID NO: 63379 - DNA, 17 bp, Arabidopsis thaliana
caatcagattttcaatt

SEQ ID NO: 63380 - DNA, 17 bp, Arabidopsis thaliana
caatcaggagcggaccc

SEQ ID NO: 63381 - DNA, 17 bp, Arabidopsis thaliana
caatcaggctgctgctc

SEQ ID NO: 63382 - DNA, 17 bp, Arabidopsis thaliana
caatcaggtcgcctgca

SEQ ID NO: 63383 - DNA, 17 bp, Arabidopsis thaliana
caatcaggttttttcgg

SEQ ID NO: 63384 - DNA, 17 bp, Arabidopsis thaliana
caatcaggtttttttcg

SEQ ID NO: 63385 - DNA, 17 bp, Arabidopsis thaliana
caatcagtctatcaaca

SEQ ID NO: 63386 - DNA, 17 bp, Arabidopsis thaliana
caatcagtctatcaacc

SEQ ID NO: 63387 - DNA, 17 bp, Arabidopsis thaliana
caatcagttccgtggtg

SEQ ID NO: 63388 - DNA, 17 bp, Arabidopsis thaliana
caatcagttctcggttg

SEQ ID NO: 63389 - DNA, 17 bp, Arabidopsis thaliana
caatcataccagtgggt

SEQ ID NO: 63390 - DNA, 17 bp, Arabidopsis thaliana
caatcatacggagagag

SEQ ID NO: 63391 - DNA, 17 bp, Arabidopsis thaliana
caatcataggctctgat

SEQ ID NO: 63392 - DNA, 17 bp, Arabidopsis thaliana
caatcatatgaagagag

SEQ ID NO: 63393 - DNA, 17 bp, Arabidopsis thaliana
caatcatatggagagag

SEQ ID NO: 63394 - DNA, 17 bp, Arabidopsis thaliana
caatcatatggagagcg

SEQ ID NO: 63395 - DNA, 17 bp, Arabidopsis thaliana
caatcatctcttgattc

SEQ ID NO: 63396 - DNA, 17 bp, Arabidopsis thaliana
caatcatgcggtagctt

SEQ ID NO: 63397 - DNA, 17 bp, Arabidopsis thaliana
caatcatgtgactgcgt

SEQ ID NO: 63398 - DNA, 17 bp, Arabidopsis thaliana
caatcattcagtttgct

SEQ ID NO: 63399 - DNA, 17 bp, Arabidopsis thaliana
caatcatttggagagag

SEQ ID NO: 63400 - DNA, 17 bp, Arabidopsis thaliana
caatccaactatttagg

SEQ ID NO: 63401 - DNA, 17 bp, Arabidopsis thaliana
caatccacctctattag

SEQ ID NO: 63402 - DNA, 17 bp, Arabidopsis thaliana
caatccactggatcaat

SEQ ID NO: 63403 - DNA, 17 bp, Arabidopsis thaliana
caatccagcgacaggtt

SEQ ID NO: 63404 - DNA, 17 bp, Arabidopsis thaliana
caatccagcgatttcga

SEQ ID NO: 63405 - DNA, 17 bp, Arabidopsis thaliana
caatccagctttcacaa

SEQ ID NO: 63406 - DNA, 17 bp, Arabidopsis thaliana
caatccagtcaagccaa

SEQ ID NO: 63407 - DNA, 17 bp, Arabidopsis thaliana
caatccatcccgaactt

SEQ ID NO: 63408 - DNA, 17 bp, Arabidopsis thaliana
caatccatcggttcacg

SEQ ID NO: 63409 - DNA, 17 bp, Arabidopsis thaliana
caatccatggtgcagca

SEQ ID NO: 63410 - DNA, 17 bp, Arabidopsis thaliana
caatcccagtcgcagtt

SEQ ID NO: 63411 - DNA, 17 bp, Arabidopsis thaliana
caatcccattagtgatg

SEQ ID NO: 63412 - DNA, 17 bp, Arabidopsis thaliana
caatccccatagtctat

SEQ ID NO: 63413 - DNA, 17 bp, Arabidopsis thaliana
caatcccgtctcctggc

SEQ ID NO: 63414 - DNA, 17 bp, Arabidopsis thaliana
caatccctccggatccg

SEQ ID NO: 63415 - DNA, 17 bp, Arabidopsis thaliana
caatccctgacaatgaa

SEQ ID NO: 63416 - DNA, 17 bp, Arabidopsis thaliana
caatccgctgtaggcac

SEQ ID NO: 63417 - DNA, 17 bp, Arabidopsis thaliana
caatccgcttatctaga

SEQ ID NO: 63418 - DNA, 17 bp, Arabidopsis thaliana
caatccggaaaaaggca

SEQ ID NO: 63419 - DNA, 17 bp, Arabidopsis thaliana
caatccggaggaccgag

SEQ ID NO: 63420 - DNA, 17 bp, Arabidopsis thaliana
caatcctacttttgccg

SEQ ID NO: 63421 - DNA, 17 bp, Arabidopsis thaliana
caatcctatacaaagcc

SEQ ID NO: 63422 - DNA, 17 bp, Arabidopsis thaliana
caatcctatggtcatct

SEQ ID NO: 63423 - DNA, 17 bp, Arabidopsis thaliana
caatcctctgttgctgc

SEQ ID NO: 63424 - DNA, 17 bp, Arabidopsis thaliana
caatcctcttttggtct

SEQ ID NO: 63425 - DNA, 17 bp, Arabidopsis thaliana
caatcctgaagttggta

SEQ ID NO: 63426 - DNA, 17 bp, Arabidopsis thaliana
caatcctgacacgggga

SEQ ID NO: 63427 - DNA, 17 bp, Arabidopsis thaliana
caatcctgacgatgttg

SEQ ID NO: 63428 - DNA, 17 bp, Arabidopsis thaliana
caatcctgagacagatt

SEQ ID NO: 63429 - DNA, 17 bp, Arabidopsis thaliana
caatcctgaggaatgtt

SEQ ID NO: 63430 - DNA, 17 bp, Arabidopsis thaliana
caatccttgacagttcc

SEQ ID NO: 63431 - DNA, 17 bp, Arabidopsis thaliana
caatccttgatcatcgt

SEQ ID NO: 63432 - DNA, 17 bp, Arabidopsis thaliana
caatcgaaaccggccat

SEQ ID NO: 63433 - DNA, 17 bp, Arabidopsis thaliana
caatcgaagtttgtgct

SEQ ID NO: 63434 - DNA, 17 bp, Arabidopsis thaliana
caatcgacatagagata

SEQ ID NO: 63435 - DNA, 17 bp, Arabidopsis thaliana
caatcgatacgggccat

SEQ ID NO: 63436 - DNA, 17 bp, Arabidopsis thaliana
caatcgatcgcttggtt

SEQ ID NO: 63437 - DNA, 17 bp, Arabidopsis thaliana
caatcgattcacggcca

SEQ ID NO: 63438 - DNA, 17 bp, Arabidopsis thaliana
caatcgattcggggcgt

SEQ ID NO: 63439 - DNA, 17 bp, Arabidopsis thaliana
caatcgattcgtcgttt

SEQ ID NO: 63440 - DNA, 17 bp, Arabidopsis thaliana
caatcgcagatctcaag

SEQ ID NO: 63441 - DNA, 17 bp, Arabidopsis thaliana
caatcgcagcagtatga

SEQ ID NO: 63442 - DNA, 17 bp, Arabidopsis thaliana
caatcgcagcgactcaa

SEQ ID NO: 63443 - DNA, 17 bp, Arabidopsis thaliana
caatcgcaggggtaatt

SEQ ID NO: 63444 - DNA, 17 bp, Arabidopsis thaliana
caatcgccagtgaccag

SEQ ID NO: 63445 - DNA, 17 bp, Arabidopsis thaliana
caatcgccggacatagc

SEQ ID NO: 63446 - DNA, 17 bp, Arabidopsis thaliana
caatcgcctcgggcaaa

SEQ ID NO: 63447 - DNA, 17 bp, Arabidopsis thaliana
caatcgcctctggtcgg

SEQ ID NO: 63448 - DNA, 17 bp, Arabidopsis thaliana
caatcgctaacaaccgc

SEQ ID NO: 63449 - DNA, 17 bp, Arabidopsis thaliana
caatcgctaattactgt

SEQ ID NO: 63450 - DNA, 17 bp, Arabidopsis thaliana
caatcgctattgcctgc

SEQ ID NO: 63451 - DNA, 17 bp, Arabidopsis thaliana
caatcggacgtgctcct

SEQ ID NO: 63452 - DNA, 17 bp, Arabidopsis thaliana
caatcggctggaaatca

SEQ ID NO: 63453 - DNA, 17 bp, Arabidopsis thaliana
caatcgggaatgtgcct

SEQ ID NO: 63454 - DNA, 17 bp, Arabidopsis thaliana
caatcgggtgttcaaag

SEQ ID NO: 63455 - DNA, 17 bp, Arabidopsis thaliana
caatcggtttggatttg

SEQ ID NO: 63456 - DNA, 17 bp, Arabidopsis thaliana
caatcgtaccaggaaag

SEQ ID NO: 63457 - DNA, 17 bp, Arabidopsis thaliana
caatcgtacttgcaggt

SEQ ID NO: 63458 - DNA, 17 bp, Arabidopsis thaliana
caatcgtatgaagcaac

SEQ ID NO: 63459 - DNA, 17 bp, Arabidopsis thaliana
caatcgtatgtagcaac

SEQ ID NO: 63460 - DNA, 17 bp, Arabidopsis thaliana
caatcgtatgtagcaat

SEQ ID NO: 63461 - DNA, 17 bp, Arabidopsis thaliana
caatcgtattgccgtca

SEQ ID NO: 63462 - DNA, 17 bp, Arabidopsis thaliana
caatcgtctcgcggatg

SEQ ID NO: 63463 - DNA, 17 bp, Arabidopsis thaliana
caatcgtctctcacgat

SEQ ID NO: 63464 - DNA, 17 bp, Arabidopsis thaliana
caatcgtgtgacggttc

SEQ ID NO: 63465 - DNA, 17 bp, Arabidopsis thaliana
caatcgttcaggaattc

SEQ ID NO: 63466 - DNA, 17 bp, Arabidopsis thaliana
caatcgttggaccatca

SEQ ID NO: 63467 - DNA, 17 bp, Arabidopsis thaliana
caatcgttgtggatatg

SEQ ID NO: 63468 - DNA, 17 bp, Arabidopsis thaliana
caatcgtttggaccatc

SEQ ID NO: 63469 - DNA, 17 bp, Arabidopsis thaliana
caatcgtttgggactgt

SEQ ID NO: 63470 - DNA, 17 bp, Arabidopsis thaliana
caatctactcgttggaa

SEQ ID NO: 63471 - DNA, 17 bp, Arabidopsis thaliana
caatctcaacgattcga

SEQ ID NO: 63472 - DNA, 17 bp, Arabidopsis thaliana
caatctcaagtgtcaaa

SEQ ID NO: 63473 - DNA, 17 bp, Arabidopsis thaliana
caatctcacttccatag

SEQ ID NO: 63474 - DNA, 17 bp, Arabidopsis thaliana
caatctccaaattctag

SEQ ID NO: 63475 - DNA, 17 bp, Arabidopsis thaliana
caatctccatcagcgtt

SEQ ID NO: 63476 - DNA, 17 bp, Arabidopsis thaliana
caatctccggatcggtt

SEQ ID NO: 63477 - DNA, 17 bp, Arabidopsis thaliana
caatctcctttaggccc

SEQ ID NO: 63478 - DNA, 17 bp, Arabidopsis thaliana
caatctcggctggcttt

SEQ ID NO: 63479 - DNA, 17 bp, Arabidopsis thaliana
caatctctacaatccgg

SEQ ID NO: 63480 - DNA, 17 bp, Arabidopsis thaliana
caatctctatcgccgca

SEQ ID NO: 63481 - DNA, 17 bp, Arabidopsis thaliana
caatctctatcgccgga

SEQ ID NO: 63482 - DNA, 17 bp, Arabidopsis thaliana
caatctctctactaaga

SEQ ID NO: 63483 - DNA, 17 bp, Arabidopsis thaliana
caatctcttttggctgt

SEQ ID NO: 63484 - DNA, 17 bp, Arabidopsis thaliana
caatctcttttggggcc

SEQ ID NO: 63485 - DNA, 17 bp, Arabidopsis thaliana
caatctgaagtggatgt

SEQ ID NO: 63486 - DNA, 17 bp, Arabidopsis thaliana
caatctgcacaaatgcc

SEQ ID NO: 63487 - DNA, 17 bp, Arabidopsis thaliana
caatctgcatgttccac

SEQ ID NO: 63488 - DNA, 17 bp, Arabidopsis thaliana
caatctgcatttggtga

SEQ ID NO: 63489 - DNA, 17 bp, Arabidopsis thaliana
caatctgccaccaatcg

SEQ ID NO: 63490 - DNA, 17 bp, Arabidopsis thaliana
caatctgcgactacttt

SEQ ID NO: 63491 - DNA, 17 bp, Arabidopsis thaliana
caatctgcggtacacag

SEQ ID NO: 63492 - DNA, 17 bp, Arabidopsis thaliana
caatctgctagacgatc

SEQ ID NO: 63493 - DNA, 17 bp, Arabidopsis thaliana
caatctgcttaggatta

SEQ ID NO: 63494 - DNA, 17 bp, Arabidopsis thaliana
caatctgctttgacacg

SEQ ID NO: 63495 - DNA, 17 bp, Arabidopsis thaliana
caatctggaaccgtcct

SEQ ID NO: 63496 - DNA, 17 bp, Arabidopsis thaliana
caatctggattataggg

SEQ ID NO: 63497 - DNA, 17 bp, Arabidopsis thaliana
caatctggttgggcgaa

SEQ ID NO: 63498 - DNA, 17 bp, Arabidopsis thaliana
caatctgtgtgctacga

SEQ ID NO: 63499 - DNA, 17 bp, Arabidopsis thaliana
caatctgtttcgtctgt

SEQ ID NO: 63500 - DNA, 17 bp, Arabidopsis thaliana
caatcttaacgcgtagg

SEQ ID NO: 63501 - DNA, 17 bp, Arabidopsis thaliana
caatcttagattcaatc

SEQ ID NO: 63502 - DNA, 17 bp, Arabidopsis thaliana
caatcttagttgtctca

SEQ ID NO: 63503 - DNA, 17 bp, Arabidopsis thaliana
caatcttatacgacgca

SEQ ID NO: 63504 - DNA, 17 bp, Arabidopsis thaliana
caatcttcaggccagct

SEQ ID NO: 63505 - DNA, 17 bp, Arabidopsis thaliana
caatcttcgctggtcct

SEQ ID NO: 63506 - DNA, 17 bp, Arabidopsis thaliana
caatcttctcgtactgg

SEQ ID NO: 63507 - DNA, 17 bp, Arabidopsis thaliana
caatcttgggctcacat

SEQ ID NO: 63508 - DNA, 17 bp, Arabidopsis thaliana
caatctttgcgaattgg

SEQ ID NO: 63509 - DNA, 17 bp, Arabidopsis thaliana
caatgaactgagtagca

SEQ ID NO: 63510 - DNA, 17 bp, Arabidopsis thaliana
caatgacaaccatggaa

SEQ ID NO: 63511 - DNA, 17 bp, Arabidopsis thaliana
caatgacactctctgtt

SEQ ID NO: 63512 - DNA, 17 bp, Arabidopsis thaliana
caatgacaggaatccaa

SEQ ID NO: 63513 - DNA, 17 bp, Arabidopsis thaliana
caatgactactactgct

SEQ ID NO: 63514 - DNA, 17 bp, Arabidopsis thaliana
caatgactctttccgct

SEQ ID NO: 63515 - DNA, 17 bp, Arabidopsis thaliana
caatgactctttgtttg

SEQ ID NO: 63516 - DNA, 17 bp, Arabidopsis thaliana
caatgagctccaacggc

SEQ ID NO: 63517 - DNA, 17 bp, Arabidopsis thaliana
caatgagctgtgttggt

SEQ ID NO: 63518 - DNA, 17 bp, Arabidopsis thaliana
caatgagcttctcattg

SEQ ID NO: 63519 - DNA, 17 bp, Arabidopsis thaliana
caatgagtacgtcttgc

SEQ ID NO: 63520 - DNA, 17 bp, Arabidopsis thaliana
caatgagtcgctttgac

SEQ ID NO: 63521 - DNA, 17 bp, Arabidopsis thaliana
caatgagtgtcagaggg

SEQ ID NO: 63522 - DNA, 17 bp, Arabidopsis thaliana
caatgatccttccgcag

SEQ ID NO: 63523 - DNA, 17 bp, Arabidopsis thaliana
caatgatcgagtagggc

SEQ ID NO: 63524 - DNA, 17 bp, Arabidopsis thaliana
caatgatggagaaattg

SEQ ID NO: 63525 - DNA, 17 bp, Arabidopsis thaliana
caatgattatggaccgt

SEQ ID NO: 63526 - DNA, 17 bp, Arabidopsis thaliana
caatgattcagtgcggt

SEQ ID NO: 63527 - DNA, 17 bp, Arabidopsis thaliana
caatgcaactgccgcat

SEQ ID NO: 63528 - DNA, 17 bp, Arabidopsis thaliana
caatgcaagatggtcca

SEQ ID NO: 63529 - DNA, 17 bp, Arabidopsis thaliana
caatgcaatattttgtg

SEQ ID NO: 63530 - DNA, 17 bp, Arabidopsis thaliana
caatgcacaagccaaat

SEQ ID NO: 63531 - DNA, 17 bp, Arabidopsis thaliana
caatgcagccacaaggg

SEQ ID NO: 63532 - DNA, 17 bp, Arabidopsis thaliana
caatgccagaactgcaa

SEQ ID NO: 63533 - DNA, 17 bp, Arabidopsis thaliana
caatgccagggggtagt

SEQ ID NO: 63534 - DNA, 17 bp, Arabidopsis thaliana
caatgccgcgtggaggt

SEQ ID NO: 63535 - DNA, 17 bp, Arabidopsis thaliana
caatgccggtgttaact

SEQ ID NO: 63536 - DNA, 17 bp, Arabidopsis thaliana
caatgcctaacttcttt

SEQ ID NO: 63537 - DNA, 17 bp, Arabidopsis thaliana
caatgcgacgactcaac

SEQ ID NO: 63538 - DNA, 17 bp, Arabidopsis thaliana
caatgcgattggtttac

SEQ ID NO: 63539 - DNA, 17 bp, Arabidopsis thaliana
caatgcgcccgctgccc

SEQ ID NO: 63540 - DNA, 17 bp, Arabidopsis thaliana
caatgcgcctctatgtg

SEQ ID NO: 63541 - DNA, 17 bp, Arabidopsis thaliana
caatgcggtatgggttg

SEQ ID NO: 63542 - DNA, 17 bp, Arabidopsis thaliana
caatgcggtgcggttca

SEQ ID NO: 63543 - DNA, 17 bp, Arabidopsis thaliana
caatgcggtgtagtgca

SEQ ID NO: 63544 - DNA, 17 bp, Arabidopsis thaliana
caatgcggttttgagtg

SEQ ID NO: 63545 - DNA, 17 bp, Arabidopsis thaliana
caatgcgtcaacatcat

SEQ ID NO: 63546 - DNA, 17 bp, Arabidopsis thaliana
caatgctgacaccatca

SEQ ID NO: 63547 - DNA, 17 bp, Arabidopsis thaliana
caatgctgcctagtgga

SEQ ID NO: 63548 - DNA, 17 bp, Arabidopsis thaliana
caatgctgcttcacacc

SEQ ID NO: 63549 - DNA, 17 bp, Arabidopsis thaliana
caatgctggagtaacag

SEQ ID NO: 63550 - DNA, 17 bp, Arabidopsis thaliana
caatgctggattacggt

SEQ ID NO: 63551 - DNA, 17 bp, Arabidopsis thaliana
caatggacccagactag

SEQ ID NO: 63552 - DNA, 17 bp, Arabidopsis thaliana
caatggaccgcatgtgc

SEQ ID NO: 63553 - DNA, 17 bp, Arabidopsis thaliana
caatggactggtgggcc

SEQ ID NO: 63554 - DNA, 17 bp, Arabidopsis thaliana
caatggaggatcgccgc

SEQ ID NO: 63555 - DNA, 17 bp, Arabidopsis thaliana
caatggaggtggtgggg

SEQ ID NO: 63556 - DNA, 17 bp, Arabidopsis thaliana
caatggatatcatctac

SEQ ID NO: 63557 - DNA, 17 bp, Arabidopsis thaliana
caatggatcatcaccac

SEQ ID NO: 63558 - DNA, 17 bp, Arabidopsis thaliana
caatggattttgagcat

SEQ ID NO: 63559 - DNA, 17 bp, Arabidopsis thaliana
caatggcacacaggtcg

SEQ ID NO: 63560 - DNA, 17 bp, Arabidopsis thaliana
caatggcagccattgac

SEQ ID NO: 63561 - DNA, 17 bp, Arabidopsis thaliana
caatggcagtgattgtg

SEQ ID NO: 63562 - DNA, 17 bp, Arabidopsis thaliana
caatggccatgccaaca

SEQ ID NO: 63563 - DNA, 17 bp, Arabidopsis thaliana
caatggccatttttgaa

SEQ ID NO: 63564 - DNA, 17 bp, Arabidopsis thaliana
caatggccgatgatcag

SEQ ID NO: 63565 - DNA, 17 bp, Arabidopsis thaliana
caatggccttgacacac

SEQ ID NO: 63566 - DNA, 17 bp, Arabidopsis thaliana
caatggctaacctaaga

SEQ ID NO: 63567 - DNA, 17 bp, Arabidopsis thaliana
caatggctactgtgtgc

SEQ ID NO: 63568 - DNA, 17 bp, Arabidopsis thaliana
caatggctatggatctt

SEQ ID NO: 63569 - DNA, 17 bp, Arabidopsis thaliana
caatggctctatttgtg

SEQ ID NO: 63570 - DNA, 17 bp, Arabidopsis thaliana
caatggctgcagttgtt

SEQ ID NO: 63571 - DNA, 17 bp, Arabidopsis thaliana
caatggctgccactgga

SEQ ID NO: 63572 - DNA, 17 bp, Arabidopsis thaliana
caatggctgcctgtgat

SEQ ID NO: 63573 - DNA, 17 bp, Arabidopsis thaliana
caatggctgtcactggg

SEQ ID NO: 63574 - DNA, 17 bp, Arabidopsis thaliana
caatggctttgttggag

SEQ ID NO: 63575 - DNA, 17 bp, Arabidopsis thaliana
caatggctttgttggtg

SEQ ID NO: 63576 - DNA, 17 bp, Arabidopsis thaliana
caatgggcgaaagcctg

SEQ ID NO: 63577 - DNA, 17 bp, Arabidopsis thaliana
caatgggtccaggcggt

SEQ ID NO: 63578 - DNA, 17 bp, Arabidopsis thaliana
caatgggtgcgttttcg

SEQ ID NO: 63579 - DNA, 17 bp, Arabidopsis thaliana
caatggtcatccgaggc

SEQ ID NO: 63580 - DNA, 17 bp, Arabidopsis thaliana
caatggtccaaacagtt

SEQ ID NO: 63581 - DNA, 17 bp, Arabidopsis thaliana
caatggtcttgcgattc

SEQ ID NO: 63582 - DNA, 17 bp, Arabidopsis thaliana
caatggtgtcgtgctga

SEQ ID NO: 63583 - DNA, 17 bp, Arabidopsis thaliana
caatggtgtgatagggt

SEQ ID NO: 63584 - DNA, 17 bp, Arabidopsis thaliana
caatggttacattcatg

SEQ ID NO: 63585 - DNA, 17 bp, Arabidopsis thaliana
caatggttcacctggat

SEQ ID NO: 63586 - DNA, 17 bp, Arabidopsis thaliana
caatggttgccactgga

SEQ ID NO: 63587 - DNA, 17 bp, Arabidopsis thaliana
caatggttgtcactgac

SEQ ID NO: 63588 - DNA, 17 bp, Arabidopsis thaliana
caatgtaaccggtgtgt

SEQ ID NO: 63589 - DNA, 17 bp, Arabidopsis thaliana
caatgtacggatgtaga

SEQ ID NO: 63590 - DNA, 17 bp, Arabidopsis thaliana
caatgtagttgactcgt

SEQ ID NO: 63591 - DNA, 17 bp, Arabidopsis thaliana
caatgtatctcatcgga

SEQ ID NO: 63592 - DNA, 17 bp, Arabidopsis thaliana
caatgtcattggccgaa

SEQ ID NO: 63593 - DNA, 17 bp, Arabidopsis thaliana
caatgtccacatggccg

SEQ ID NO: 63594 - DNA, 17 bp, Arabidopsis thaliana
caatgtccaggttgtta

SEQ ID NO: 63595 - DNA, 17 bp, Arabidopsis thaliana
caatgtccctcatcggt

SEQ ID NO: 63596 - DNA, 17 bp, Arabidopsis thaliana
caatgtccgtgctgatt

SEQ ID NO: 63597 - DNA, 17 bp, Arabidopsis thaliana
caatgtcgactagatgt

SEQ ID NO: 63598 - DNA, 17 bp, Arabidopsis thaliana
caatgtcggacttacaa

SEQ ID NO: 63599 - DNA, 17 bp, Arabidopsis thaliana
caatgtcggtgctgatt

SEQ ID NO: 63600 - DNA, 17 bp, Arabidopsis thaliana
caatgtcgtccagcggt

SEQ ID NO: 63601 - DNA, 17 bp, Arabidopsis thaliana
caatgtctctgctgatt

SEQ ID NO: 63602 - DNA, 17 bp, Arabidopsis thaliana
caatgtctcttcgacct

SEQ ID NO: 63603 - DNA, 17 bp, Arabidopsis thaliana
caatgtctgttggtgcc

SEQ ID NO: 63604 - DNA, 17 bp, Arabidopsis thaliana
caatgtcttcaaagagc

SEQ ID NO: 63605 - DNA, 17 bp, Arabidopsis thaliana
caatgtcttcggatgat

SEQ ID NO: 63606 - DNA, 17 bp, Arabidopsis thaliana
caatgtctttgggtaga

SEQ ID NO: 63607 - DNA, 17 bp, Arabidopsis thaliana
caatgtgacttagtgac

SEQ ID NO: 63608 - DNA, 17 bp, Arabidopsis thaliana
caatgtgatttctgccc

SEQ ID NO: 63609 - DNA, 17 bp, Arabidopsis thaliana
caatgtgcgggccgatt

SEQ ID NO: 63610 - DNA, 17 bp, Arabidopsis thaliana
caatgtgctcatcagcg

SEQ ID NO: 63611 - DNA, 17 bp, Arabidopsis thaliana
caatgtggaggatgttg

SEQ ID NO: 63612 - DNA, 17 bp, Arabidopsis thaliana
caatgtgggagtgtttt

SEQ ID NO: 63613 - DNA, 17 bp, Arabidopsis thaliana
caatgtgggatgtgctt

SEQ ID NO: 63614 - DNA, 17 bp, Arabidopsis thaliana
caatgtgtatgatgtcc

SEQ ID NO: 63615 - DNA, 17 bp, Arabidopsis thaliana
caatgtgtgttggtgcc

SEQ ID NO: 63616 - DNA, 17 bp, Arabidopsis thaliana
caatgtgtttcgctagg

SEQ ID NO: 63617 - DNA, 17 bp, Arabidopsis thaliana
caatgttatggccgatt

SEQ ID NO: 63618 - DNA, 17 bp, Arabidopsis thaliana
caatgttcagtccaact

SEQ ID NO: 63619 - DNA, 17 bp, Arabidopsis thaliana
caatgttcgagtaccag

SEQ ID NO: 63620 - DNA, 17 bp, Arabidopsis thaliana
caatgttgattgttcgg

SEQ ID NO: 63621 - DNA, 17 bp, Arabidopsis thaliana
caatgttgcaatgcggt

SEQ ID NO: 63622 - DNA, 17 bp, Arabidopsis thaliana
caatgttgtaatggttg

SEQ ID NO: 63623 - DNA, 17 bp, Arabidopsis thaliana
caatgttgtatcaactt

SEQ ID NO: 63624 - DNA, 17 bp, Arabidopsis thaliana
caatgtttattgaactc

SEQ ID NO: 63625 - DNA, 17 bp, Arabidopsis thaliana
caatgtttcagtggcac

SEQ ID NO: 63626 - DNA, 17 bp, Arabidopsis thaliana
caatgtttctgacttgg

SEQ ID NO: 63627 - DNA, 17 bp, Arabidopsis thaliana
caattaagtgatacggc

SEQ ID NO: 63628 - DNA, 17 bp, Arabidopsis thaliana
caattaattccccaaca

SEQ ID NO: 63629 - DNA, 17 bp, Arabidopsis thaliana
caattacaacgctaaat

SEQ ID NO: 63630 - DNA, 17 bp, Arabidopsis thaliana
caattacacagatggga

SEQ ID NO: 63631 - DNA, 17 bp, Arabidopsis thaliana
caattacaccattttta

SEQ ID NO: 63632 - DNA, 17 bp, Arabidopsis thaliana
caattaccgttttgcag

SEQ ID NO: 63633 - DNA, 17 bp, Arabidopsis thaliana
caattacggggttttct

SEQ ID NO: 63634 - DNA, 17 bp, Arabidopsis thaliana
caattacggttgggtta

SEQ ID NO: 63635 - DNA, 17 bp, Arabidopsis thaliana
caattacgtgcgtgttg

SEQ ID NO: 63636 - DNA, 17 bp, Arabidopsis thaliana
caattactgtctactgg

SEQ ID NO: 63637 - DNA, 17 bp, Arabidopsis thaliana
caattactgtctgctgg

SEQ ID NO: 63638 - DNA, 17 bp, Arabidopsis thaliana
caattagacttattggg

SEQ ID NO: 63639 - DNA, 17 bp, Arabidopsis thaliana
caattatagccgttcgc

SEQ ID NO: 63640 - DNA, 17 bp, Arabidopsis thaliana
caattatagttgttcgc

SEQ ID NO: 63641 - DNA, 17 bp, Arabidopsis thaliana
caattatcctaaccgtt

SEQ ID NO: 63642 - DNA, 17 bp, Arabidopsis thaliana
caattatctcatggatt

SEQ ID NO: 63643 - DNA, 17 bp, Arabidopsis thaliana
caattatctggccgaca

SEQ ID NO: 63644 - DNA, 17 bp, Arabidopsis thaliana
caattatcttcggccgt

SEQ ID NO: 63645 - DNA, 17 bp, Arabidopsis thaliana
caattatggccgttcgc

SEQ ID NO: 63646 - DNA, 17 bp, Arabidopsis thaliana
caattcaaattccgtcg

SEQ ID NO: 63647 - DNA, 17 bp, Arabidopsis thaliana
caattcaagttgccttc

SEQ ID NO: 63648 - DNA, 17 bp, Arabidopsis thaliana
caattcaatttaatggc

SEQ ID NO: 63649 - DNA, 17 bp, Arabidopsis thaliana
caattcacagtctgtag

SEQ ID NO: 63650 - DNA, 17 bp, Arabidopsis thaliana
caattcactgctgcgcc

SEQ ID NO: 63651 - DNA, 17 bp, Arabidopsis thaliana
caattcagccctttgtc

SEQ ID NO: 63652 - DNA, 17 bp, Arabidopsis thaliana
caattcatgctttactg

SEQ ID NO: 63653 - DNA, 17 bp, Arabidopsis thaliana
caattcattgatcaacg

SEQ ID NO: 63654 - DNA, 17 bp, Arabidopsis thaliana
caattccaaagatacca

SEQ ID NO: 63655 - DNA, 17 bp, Arabidopsis thaliana
caattccaatcgactag

SEQ ID NO: 63656 - DNA, 17 bp, Arabidopsis thaliana
caattccacctcttgat

SEQ ID NO: 63657 - DNA, 17 bp, Arabidopsis thaliana
caattccagagattcgt

SEQ ID NO: 63658 - DNA, 17 bp, Arabidopsis thaliana
caattcccaagatggga

SEQ ID NO: 63659 - DNA, 17 bp, Arabidopsis thaliana
caattcccgaggatggg

SEQ ID NO: 63660 - DNA, 17 bp, Arabidopsis thaliana
caattcccggctggtgc

SEQ ID NO: 63661 - DNA, 17 bp, Arabidopsis thaliana
caattcccggctgttgc

SEQ ID NO: 63662 - DNA, 17 bp, Arabidopsis thaliana
caattcccgtcgttcgc

SEQ ID NO: 63663 - DNA, 17 bp, Arabidopsis thaliana
caattccctggtggcca

SEQ ID NO: 63664 - DNA, 17 bp, Arabidopsis thaliana
caattccgattgaggct

SEQ ID NO: 63665 - DNA, 17 bp, Arabidopsis thaliana
caattccgccggtttga

SEQ ID NO: 63666 - DNA, 17 bp, Arabidopsis thaliana
caattccgctgcgaatg

SEQ ID NO: 63667 - DNA, 17 bp, Arabidopsis thaliana
caattccggaaccggga

SEQ ID NO: 63668 - DNA, 17 bp, Arabidopsis thaliana
caattccggatataggt

SEQ ID NO: 63669 - DNA, 17 bp, Arabidopsis thaliana
caattcctggtcgatga

SEQ ID NO: 63670 - DNA, 17 bp, Arabidopsis thaliana
caattcgagtgacactt

SEQ ID NO: 63671 - DNA, 17 bp, Arabidopsis thaliana
caattcgatccggtaag

SEQ ID NO: 63672 - DNA, 17 bp, Arabidopsis thaliana
caattcgatggacgaga

SEQ ID NO: 63673 - DNA, 17 bp, Arabidopsis thaliana
caattcgcaaagttttg

SEQ ID NO: 63674 - DNA, 17 bp, Arabidopsis thaliana
caattcggccggagatg

SEQ ID NO: 63675 - DNA, 17 bp, Arabidopsis thaliana
caattcgggtctattcg

SEQ ID NO: 63676 - DNA, 17 bp, Arabidopsis thaliana
caattcggtccatgtgc

SEQ ID NO: 63677 - DNA, 17 bp, Arabidopsis thaliana
caattcggtggaggaac

SEQ ID NO: 63678 - DNA, 17 bp, Arabidopsis thaliana
caattcgtattaagtga

SEQ ID NO: 63679 - DNA, 17 bp, Arabidopsis thaliana
caattcgtcctggactt

SEQ ID NO: 63680 - DNA, 17 bp, Arabidopsis thaliana
caattcgtcttactccg

SEQ ID NO: 63681 - DNA, 17 bp, Arabidopsis thaliana
caattcgtgtcccaccg

SEQ ID NO: 63682 - DNA, 17 bp, Arabidopsis thaliana
caattctaagatccacc

SEQ ID NO: 63683 - DNA, 17 bp, Arabidopsis thaliana
caattctacccggagtc

SEQ ID NO: 63684 - DNA, 17 bp, Arabidopsis thaliana
caattctacctatcgcg

SEQ ID NO: 63685 - DNA, 17 bp, Arabidopsis thaliana
caattctactcagttgc

SEQ ID NO: 63686 - DNA, 17 bp, Arabidopsis thaliana
caattctactgatgaag

SEQ ID NO: 63687 - DNA, 17 bp, Arabidopsis thaliana
caattctaggatttcac

SEQ ID NO: 63688 - DNA, 17 bp, Arabidopsis thaliana
caattctaggattttcc

SEQ ID NO: 63689 - DNA, 17 bp, Arabidopsis thaliana
caattctaggattttcg

SEQ ID NO: 63690 - DNA, 17 bp, Arabidopsis thaliana
caattctaggatttttc

SEQ ID NO: 63691 - DNA, 17 bp, Arabidopsis thaliana
caattctagggttttcc

SEQ ID NO: 63692 - DNA, 17 bp, Arabidopsis thaliana
caattctcatctcacta

SEQ ID NO: 63693 - DNA, 17 bp, Arabidopsis thaliana
caattctcggaacgccc

SEQ ID NO: 63694 - DNA, 17 bp, Arabidopsis thaliana
caattctcggaatgccc

SEQ ID NO: 63695 - DNA, 17 bp, Arabidopsis thaliana
caattctcggttaccca

SEQ ID NO: 63696 - DNA, 17 bp, Arabidopsis thaliana
caattctgctgcgaatg

SEQ ID NO: 63697 - DNA, 17 bp, Arabidopsis thaliana
caattctttctaacaat

SEQ ID NO: 63698 - DNA, 17 bp, Arabidopsis thaliana
caattctttctaacagg

SEQ ID NO: 63699 - DNA, 17 bp, Arabidopsis thaliana
caattctttgtaagctg

SEQ ID NO: 63700 - DNA, 17 bp, Arabidopsis thaliana
caattgaactacaaacc

SEQ ID NO: 63701 - DNA, 17 bp, Arabidopsis thaliana
caattgacattaagtgc

SEQ ID NO: 63702 - DNA, 17 bp, Arabidopsis thaliana
caattgacccaataact

SEQ ID NO: 63703 - DNA, 17 bp, Arabidopsis thaliana
caattgactcatcaact

SEQ ID NO: 63704 - DNA, 17 bp, Arabidopsis thaliana
caattgactgacgagtt

SEQ ID NO: 63705 - DNA, 17 bp, Arabidopsis thaliana
caattgactgcagatca

SEQ ID NO: 63706 - DNA, 17 bp, Arabidopsis thaliana
caattgcagttttgcgg

SEQ ID NO: 63707 - DNA, 17 bp, Arabidopsis thaliana
caattgcatctgttgga

SEQ ID NO: 63708 - DNA, 17 bp, Arabidopsis thaliana
caattgcattaaccacc

SEQ ID NO: 63709 - DNA, 17 bp, Arabidopsis thaliana
caattgcattggattgt

SEQ ID NO: 63710 - DNA, 17 bp, Arabidopsis thaliana
caattgccacagacctg

SEQ ID NO: 63711 - DNA, 17 bp, Arabidopsis thaliana
caattgcccaacaaatg

SEQ ID NO: 63712 - DNA, 17 bp, Arabidopsis thaliana
caattgcctcaaggccc

SEQ ID NO: 63713 - DNA, 17 bp, Arabidopsis thaliana
caattgcctttttcgtt

SEQ ID NO: 63714 - DNA, 17 bp, Arabidopsis thaliana
caattgcggtttaagtt

SEQ ID NO: 63715 - DNA, 17 bp, Arabidopsis thaliana
caattgcggtttggttg

SEQ ID NO: 63716 - DNA, 17 bp, Arabidopsis thaliana
caattgcgtctcctgct

SEQ ID NO: 63717 - DNA, 17 bp, Arabidopsis thaliana
caattgcttactggcgt

SEQ ID NO: 63718 - DNA, 17 bp, Arabidopsis thaliana
caattggaccaaggctc

SEQ ID NO: 63719 - DNA, 17 bp, Arabidopsis thaliana
caattggaccctttatt

SEQ ID NO: 63720 - DNA, 17 bp, Arabidopsis thaliana
caattggactggggttt

SEQ ID NO: 63721 - DNA, 17 bp, Arabidopsis thaliana
caattggaggcgtagtt

SEQ ID NO: 63722 - DNA, 17 bp, Arabidopsis thaliana
caattggattttgggat

SEQ ID NO: 63723 - DNA, 17 bp, Arabidopsis thaliana
caattggcaataggtgg

SEQ ID NO: 63724 - DNA, 17 bp, Arabidopsis thaliana
caattggctataggtgg

SEQ ID NO: 63725 - DNA, 17 bp, Arabidopsis thaliana
caattgggatgttctgg

SEQ ID NO: 63726 - DNA, 17 bp, Arabidopsis thaliana
caattgggctttgcccg

SEQ ID NO: 63727 - DNA, 17 bp, Arabidopsis thaliana
caattgggtgcttgttt

SEQ ID NO: 63728 - DNA, 17 bp, Arabidopsis thaliana
caattgggtgtttgttt

SEQ ID NO: 63729 - DNA, 17 bp, Arabidopsis thaliana
caattggtcatcgcctt

SEQ ID NO: 63730 - DNA, 17 bp, Arabidopsis thaliana
caattggtcatcgcgct

SEQ ID NO: 63731 - DNA, 17 bp, Arabidopsis thaliana
caattggtccgacctaa

SEQ ID NO: 63732 - DNA, 17 bp, Arabidopsis thaliana
caattggttggcctcct

SEQ ID NO: 63733 - DNA, 17 bp, Arabidopsis thaliana
caattgtcctgcggtat

SEQ ID NO: 63734 - DNA, 17 bp, Arabidopsis thaliana
caattgtctcatggatt

SEQ ID NO: 63735 - DNA, 17 bp, Arabidopsis thaliana
caattgtctcatggttt

SEQ ID NO: 63736 - DNA, 17 bp, Arabidopsis thaliana
caattgtcttatggatt

SEQ ID NO: 63737 - DNA, 17 bp, Arabidopsis thaliana
caattgtgattccgaac

SEQ ID NO: 63738 - DNA, 17 bp, Arabidopsis thaliana
caattgtgccaaggttt

SEQ ID NO: 63739 - DNA, 17 bp, Arabidopsis thaliana
caattgttcggctgtct

SEQ ID NO: 63740 - DNA, 17 bp, Arabidopsis thaliana
caattgttctcctcttg

SEQ ID NO: 63741 - DNA, 17 bp, Arabidopsis thaliana
caatttaaagattctcg

SEQ ID NO: 63742 - DNA, 17 bp, Arabidopsis thaliana
caatttaacttggtgtg

SEQ ID NO: 63743 - DNA, 17 bp, Arabidopsis thaliana
caatttaagctgatatg

SEQ ID NO: 63744 - DNA, 17 bp, Arabidopsis thaliana
caatttacttgtgttag

SEQ ID NO: 63745 - DNA, 17 bp, Arabidopsis thaliana
caatttcaaaactgggg

SEQ ID NO: 63746 - DNA, 17 bp, Arabidopsis thaliana
caatttcaagcactctt

SEQ ID NO: 63747 - DNA, 17 bp, Arabidopsis thaliana
caatttcatcgactgga

SEQ ID NO: 63748 - DNA, 17 bp, Arabidopsis thaliana
caatttcatcgacttga

SEQ ID NO: 63749 - DNA, 17 bp, Arabidopsis thaliana
caatttcatgcaatcca

SEQ ID NO: 63750 - DNA, 17 bp, Arabidopsis thaliana
caatttccaacagacag

SEQ ID NO: 63751 - DNA, 17 bp, Arabidopsis thaliana
caatttccaccattttt

SEQ ID NO: 63752 - DNA, 17 bp, Arabidopsis thaliana
caatttccgccatcatt

SEQ ID NO: 63753 - DNA, 17 bp, Arabidopsis thaliana
caatttcgaatatggcc

SEQ ID NO: 63754 - DNA, 17 bp, Arabidopsis thaliana
caatttcgtatatggcc

SEQ ID NO: 63755 - DNA, 17 bp, Arabidopsis thaliana
caatttctaagccggaa

SEQ ID NO: 63756 - DNA, 17 bp, Arabidopsis thaliana
caatttctcaagtcttg

SEQ ID NO: 63757 - DNA, 17 bp, Arabidopsis thaliana
caatttctctacgcttt

SEQ ID NO: 63758 - DNA, 17 bp, Arabidopsis thaliana
caatttctgacgtggca

SEQ ID NO: 63759 - DNA, 17 bp, Arabidopsis thaliana
caatttgagttcaggtc

SEQ ID NO: 63760 - DNA, 17 bp, Arabidopsis thaliana
caatttgatttctgtct

SEQ ID NO: 63761 - DNA, 17 bp, Arabidopsis thaliana
caatttgatttctttgt

SEQ ID NO: 63762 - DNA, 17 bp, Arabidopsis thaliana
caatttgcagggggtct

SEQ ID NO: 63763 - DNA, 17 bp, Arabidopsis thaliana
caatttgcctcagtcta

SEQ ID NO: 63764 - DNA, 17 bp, Arabidopsis thaliana
caatttgctacggattt

SEQ ID NO: 63765 - DNA, 17 bp, Arabidopsis thaliana
caatttgctgcagtgga

SEQ ID NO: 63766 - DNA, 17 bp, Arabidopsis thaliana
caatttgctttgcatgg

SEQ ID NO: 63767 - DNA, 17 bp, Arabidopsis thaliana
caatttggacaagtgtc

SEQ ID NO: 63768 - DNA, 17 bp, Arabidopsis thaliana
caatttggagtgaatat

SEQ ID NO: 63769 - DNA, 17 bp, Arabidopsis thaliana
caatttggattcaggga

SEQ ID NO: 63770 - DNA, 17 bp, Arabidopsis thaliana
caatttggattgtcggc

SEQ ID NO: 63771 - DNA, 17 bp, Arabidopsis thaliana
caatttgtacaggggtc

SEQ ID NO: 63772 - DNA, 17 bp, Arabidopsis thaliana
caatttgtccaccttaa

SEQ ID NO: 63773 - DNA, 17 bp, Arabidopsis thaliana
caatttgtctgcggttt

SEQ ID NO: 63774 - DNA, 17 bp, Arabidopsis thaliana
caatttgtgaacttttc

SEQ ID NO: 63775 - DNA, 17 bp, Arabidopsis thaliana
caatttgttattgggga

SEQ ID NO: 63776 - DNA, 17 bp, Arabidopsis thaliana
caatttgttgctccttc

SEQ ID NO: 63777 - DNA, 17 bp, Arabidopsis thaliana
caattttacatatgtgg

SEQ ID NO: 63778 - DNA, 17 bp, Arabidopsis thaliana
caattttccggattagg

SEQ ID NO: 63779 - DNA, 17 bp, Arabidopsis thaliana
caattttcggttcagat

SEQ ID NO: 63780 - DNA, 17 bp, Arabidopsis thaliana
caattttgacaaatcct

SEQ ID NO: 63781 - DNA, 17 bp, Arabidopsis thaliana
caattttgccctttcct

SEQ ID NO: 63782 - DNA, 17 bp, Arabidopsis thaliana
caattttgcggtcgtct

SEQ ID NO: 63783 - DNA, 17 bp, Arabidopsis thaliana
caattttgctcctgcaa

SEQ ID NO: 63784 - DNA, 17 bp, Arabidopsis thaliana
caattttggcgtgctac

SEQ ID NO: 63785 - DNA, 17 bp, Arabidopsis thaliana
caattttgggcccgcct

SEQ ID NO: 63786 - DNA, 17 bp, Arabidopsis thaliana
caatttttctaagcgat

SEQ ID NO: 63787 - DNA, 17 bp, Arabidopsis thaliana
caatttttctctgacgt

SEQ ID NO: 63788 - DNA, 17 bp, Arabidopsis thaliana
caatttttgttcgtcta

SEQ ID NO: 63789 - DNA, 17 bp, Arabidopsis thaliana
caattttttgatgtgtc

SEQ ID NO: 63790 - DNA, 17 bp, Arabidopsis thaliana
caattttttgcttcaat

SEQ ID NO: 63791 - DNA, 17 bp, Arabidopsis thaliana
caatttttttaagcgat

SEQ ID NO: 63792 - DNA, 17 bp, Arabidopsis thaliana
caatttttttgcgacga

SEQ ID NO: 63793 - DNA, 17 bp, Arabidopsis thaliana
cacaaaaatctgcatgg

SEQ ID NO: 63794 - DNA, 17 bp, Arabidopsis thaliana
cacaaaacagtcgctag

SEQ ID NO: 63795 - DNA, 17 bp, Arabidopsis thaliana
cacaaaaccgcactgaa

SEQ ID NO: 63796 - DNA, 17 bp, Arabidopsis thaliana
cacaaaatgacaaagtg

SEQ ID NO: 63797 - DNA, 17 bp, Arabidopsis thaliana
cacaaaattgttgtggc

SEQ ID NO: 63798 - DNA, 17 bp, Arabidopsis thaliana
cacaaacatcggcgctt

SEQ ID NO: 63799 - DNA, 17 bp, Arabidopsis thaliana
cacaaaccatatctatc

SEQ ID NO: 63800 - DNA, 17 bp, Arabidopsis thaliana
cacaaacgatgtttagg

SEQ ID NO: 63801 - DNA, 17 bp, Arabidopsis thaliana
cacaaacttttcggttc

SEQ ID NO: 63802 - DNA, 17 bp, Arabidopsis thaliana
cacaaagcattgcgatg

SEQ ID NO: 63803 - DNA, 17 bp, Arabidopsis thaliana
cacaaagcgactgtttt

SEQ ID NO: 63804 - DNA, 17 bp, Arabidopsis thaliana
cacaaagggtgttggtc

SEQ ID NO: 63805 - DNA, 17 bp, Arabidopsis thaliana
cacaaaggtcccgcaca

SEQ ID NO: 63806 - DNA, 17 bp, Arabidopsis thaliana
cacaaaggtcccgcata

SEQ ID NO: 63807 - DNA, 17 bp, Arabidopsis thaliana
cacaaagttagctcatc

SEQ ID NO: 63808 - DNA, 17 bp, Arabidopsis thaliana
cacaaatcatgtccgta

SEQ ID NO: 63809 - DNA, 17 bp, Arabidopsis thaliana
cacaaatcttgatgatg

SEQ ID NO: 63810 - DNA, 17 bp, Arabidopsis thaliana
cacaaatgcaaatgccg

SEQ ID NO: 63811 - DNA, 17 bp, Arabidopsis thaliana
cacaaatgcgtttcatt

SEQ ID NO: 63812 - DNA, 17 bp, Arabidopsis thaliana
cacaaatggtggctttg

SEQ ID NO: 63813 - DNA, 17 bp, Arabidopsis thaliana
cacaaatggttgatggc

SEQ ID NO: 63814 - DNA, 17 bp, Arabidopsis thaliana
cacaaatgtaaatgccg

SEQ ID NO: 63815 - DNA, 17 bp, Arabidopsis thaliana
cacaaatgtgatctttt

SEQ ID NO: 63816 - DNA, 17 bp, Arabidopsis thaliana
cacaaatgttatcgttg

SEQ ID NO: 63817 - DNA, 17 bp, Arabidopsis thaliana
cacaaattgcgaagtcg

SEQ ID NO: 63818 - DNA, 17 bp, Arabidopsis thaliana
cacaacacggggaaact

SEQ ID NO: 63819 - DNA, 17 bp, Arabidopsis thaliana
cacaacaggatcttaaa

SEQ ID NO: 63820 - DNA, 17 bp, Arabidopsis thaliana
cacaacatcggggcaag

SEQ ID NO: 63821 - DNA, 17 bp, Arabidopsis thaliana
cacaacatctagtttgg

SEQ ID NO: 63822 - DNA, 17 bp, Arabidopsis thaliana
cacaacatcttgattgt

SEQ ID NO: 63823 - DNA, 17 bp, Arabidopsis thaliana
cacaaccggatcttaaa

SEQ ID NO: 63824 - DNA, 17 bp, Arabidopsis thaliana
cacaactacggctaatg

SEQ ID NO: 63825 - DNA, 17 bp, Arabidopsis thaliana
cacaactcctaggcgct

SEQ ID NO: 63826 - DNA, 17 bp, Arabidopsis thaliana
cacaactcctggatgtc

SEQ ID NO: 63827 - DNA, 17 bp, Arabidopsis thaliana
cacaactgctgggatcg

SEQ ID NO: 63828 - DNA, 17 bp, Arabidopsis thaliana
cacaactggatacggga

SEQ ID NO: 63829 - DNA, 17 bp, Arabidopsis thaliana
cacaactggatcttaaa

SEQ ID NO: 63830 - DNA, 17 bp, Arabidopsis thaliana
cacaacttcatgtagct

SEQ ID NO: 63831 - DNA, 17 bp, Arabidopsis thaliana
cacaactttcacttgcg

SEQ ID NO: 63832 - DNA, 17 bp, Arabidopsis thaliana
cacaagaaagggttcag

SEQ ID NO: 63833 - DNA, 17 bp, Arabidopsis thaliana
cacaagacgcgtcagac

SEQ ID NO: 63834 - DNA, 17 bp, Arabidopsis thaliana
cacaagacttagactgt

SEQ ID NO: 63835 - DNA, 17 bp, Arabidopsis thaliana
cacaagacttaggctgt

SEQ ID NO: 63836 - DNA, 17 bp, Arabidopsis thaliana
cacaagagacttttttt

SEQ ID NO: 63837 - DNA, 17 bp, Arabidopsis thaliana
cacaagaggaatcgaat

SEQ ID NO: 63838 - DNA, 17 bp, Arabidopsis thaliana
cacaagatgacatgtgt

SEQ ID NO: 63839 - DNA, 17 bp, Arabidopsis thaliana
cacaagattcatggctc

SEQ ID NO: 63840 - DNA, 17 bp, Arabidopsis thaliana
cacaagcaggcgtctat

SEQ ID NO: 63841 - DNA, 17 bp, Arabidopsis thaliana
cacaagccaggctatct

SEQ ID NO: 63842 - DNA, 17 bp, Arabidopsis thaliana
cacaagcggaggtggca

SEQ ID NO: 63843 - DNA, 17 bp, Arabidopsis thaliana
cacaagcgtaacaggaa

SEQ ID NO: 63844 - DNA, 17 bp, Arabidopsis thaliana
cacaagctcagtttcag

SEQ ID NO: 63845 - DNA, 17 bp, Arabidopsis thaliana
cacaagcttcagagggt

SEQ ID NO: 63846 - DNA, 17 bp, Arabidopsis thaliana
cacaagcttgcggtgtc

SEQ ID NO: 63847 - DNA, 17 bp, Arabidopsis thaliana
cacaagcttgctatggg

SEQ ID NO: 63848 - DNA, 17 bp, Arabidopsis thaliana
cacaaggaaagtcggag

SEQ ID NO: 63849 - DNA, 17 bp, Arabidopsis thaliana
cacaaggtgaacagcct

SEQ ID NO: 63850 - DNA, 17 bp, Arabidopsis thaliana
cacaaggtgctattcca

SEQ ID NO: 63851 - DNA, 17 bp, Arabidopsis thaliana
cacaagtcagcgattga

SEQ ID NO: 63852 - DNA, 17 bp, Arabidopsis thaliana
cacaagtccattaggca

SEQ ID NO: 63853 - DNA, 17 bp, Arabidopsis thaliana
cacaagtcggctcagct

SEQ ID NO: 63854 - DNA, 17 bp, Arabidopsis thaliana
cacaagtctgttagttg

SEQ ID NO: 63855 - DNA, 17 bp, Arabidopsis thaliana
cacaagtgactacatcg

SEQ ID NO: 63856 - DNA, 17 bp, Arabidopsis thaliana
cacaagtgtgactgaca

SEQ ID NO: 63857 - DNA, 17 bp, Arabidopsis thaliana
cacaagttagcgtgtct

SEQ ID NO: 63858 - DNA, 17 bp, Arabidopsis thaliana
cacaagttcttgtcggc

SEQ ID NO: 63859 - DNA, 17 bp, Arabidopsis thaliana
cacaagtttatcaaact

SEQ ID NO: 63860 - DNA, 17 bp, Arabidopsis thaliana
cacaagtttctctttat

SEQ ID NO: 63861 - DNA, 17 bp, Arabidopsis thaliana
cacaagtttgcagagag

SEQ ID NO: 63862 - DNA, 17 bp, Arabidopsis thaliana
cacaataacgtgaccac

SEQ ID NO: 63863 - DNA, 17 bp, Arabidopsis thaliana
cacaatacatctcccgg

SEQ ID NO: 63864 - DNA, 17 bp, Arabidopsis thaliana
cacaatactgctgattg

SEQ ID NO: 63865 - DNA, 17 bp, Arabidopsis thaliana
cacaatagggccacctc

SEQ ID NO: 63866 - DNA, 17 bp, Arabidopsis thaliana
cacaatatcttgattgt

SEQ ID NO: 63867 - DNA, 17 bp, Arabidopsis thaliana
cacaatattgctgattg

SEQ ID NO: 63868 - DNA, 17 bp, Arabidopsis thaliana
cacaatcacaagccgat

SEQ ID NO: 63869 - DNA, 17 bp, Arabidopsis thaliana
cacaatccaatgcattt

SEQ ID NO: 63870 - DNA, 17 bp, Arabidopsis thaliana
cacaatcggatcttaaa

SEQ ID NO: 63871 - DNA, 17 bp, Arabidopsis thaliana
cacaatctacgcatatc

SEQ ID NO: 63872 - DNA, 17 bp, Arabidopsis thaliana
cacaatctgataggtgc

SEQ ID NO: 63873 - DNA, 17 bp, Arabidopsis thaliana
cacaatctgatgggggc

SEQ ID NO: 63874 - DNA, 17 bp, Arabidopsis thaliana
cacaatgcaggtcagtc

SEQ ID NO: 63875 - DNA, 17 bp, Arabidopsis thaliana
cacaatgcgtgtctaat

SEQ ID NO: 63876 - DNA, 17 bp, Arabidopsis thaliana
cacaatggctgcagttg

SEQ ID NO: 63877 - DNA, 17 bp, Arabidopsis thaliana
cacaatggtgcagcggg

SEQ ID NO: 63878 - DNA, 17 bp, Arabidopsis thaliana
cacaatggtgtatgcga

SEQ ID NO: 63879 - DNA, 17 bp, Arabidopsis thaliana
cacaatgtatgtagtcg

SEQ ID NO: 63880 - DNA, 17 bp, Arabidopsis thaliana
cacaatgtgatagttga

SEQ ID NO: 63881 - DNA, 17 bp, Arabidopsis thaliana
cacaatgtgtatgatgt

SEQ ID NO: 63882 - DNA, 17 bp, Arabidopsis thaliana
cacaattacacagatgg

SEQ ID NO: 63883 - DNA, 17 bp, Arabidopsis thaliana
cacaattattgccaagt

SEQ ID NO: 63884 - DNA, 17 bp, Arabidopsis thaliana
cacaattattgccattc

SEQ ID NO: 63885 - DNA, 17 bp, Arabidopsis thaliana
cacaattcggtctgaga

SEQ ID NO: 63886 - DNA, 17 bp, Arabidopsis thaliana
cacaattctactacgga

SEQ ID NO: 63887 - DNA, 17 bp, Arabidopsis thaliana
cacaattgataacacct

SEQ ID NO: 63888 - DNA, 17 bp, Arabidopsis thaliana
cacaattggactggggt

SEQ ID NO: 63889 - DNA, 17 bp, Arabidopsis thaliana
cacaattgggatgttct

SEQ ID NO: 63890 - DNA, 17 bp, Arabidopsis thaliana
cacaatttccgatggag

SEQ ID NO: 63891 - DNA, 17 bp, Arabidopsis thaliana
cacacaaacttaatcgt

SEQ ID NO: 63892 - DNA, 17 bp, Arabidopsis thaliana
cacacaaacttttcggt

SEQ ID NO: 63893 - DNA, 17 bp, Arabidopsis thaliana
cacacaaatggaccttg

SEQ ID NO: 63894 - DNA, 17 bp, Arabidopsis thaliana
cacacaacaagcgactg

SEQ ID NO: 63895 - DNA, 17 bp, Arabidopsis thaliana
cacacaacgtcaaggcc

SEQ ID NO: 63896 - DNA, 17 bp, Arabidopsis thaliana
cacacaaggtgtcttgc

SEQ ID NO: 63897 - DNA, 17 bp, Arabidopsis thaliana
cacacaatgggtcttcc

SEQ ID NO: 63898 - DNA, 17 bp, Arabidopsis thaliana
cacacaattacacagat

SEQ ID NO: 63899 - DNA, 17 bp, Arabidopsis thaliana
cacacacacggtgggag

SEQ ID NO: 63900 - DNA, 17 bp, Arabidopsis thaliana
cacacacagctctactt

SEQ ID NO: 63901 - DNA, 17 bp, Arabidopsis thaliana
cacacacggtgggaggg

SEQ ID NO: 63902 - DNA, 17 bp, Arabidopsis thaliana
cacacagagttgatggc

SEQ ID NO: 63903 - DNA, 17 bp, Arabidopsis thaliana
cacacagatgggatctg

SEQ ID NO: 63904 - DNA, 17 bp, Arabidopsis thaliana
cacacagccggcgtgac

SEQ ID NO: 63905 - DNA, 17 bp, Arabidopsis thaliana
cacacaggtggtgcatg

SEQ ID NO: 63906 - DNA, 17 bp, Arabidopsis thaliana
cacacagtctgtaggtt

SEQ ID NO: 63907 - DNA, 17 bp, Arabidopsis thaliana
cacacatcgatttggcc

SEQ ID NO: 63908 - DNA, 17 bp, Arabidopsis thaliana
cacacatctctcagacg

SEQ ID NO: 63909 - DNA, 17 bp, Arabidopsis thaliana
cacacatgtcagactcc

SEQ ID NO: 63910 - DNA, 17 bp, Arabidopsis thaliana
cacacatttttgactat

SEQ ID NO: 63911 - DNA, 17 bp, Arabidopsis thaliana
cacaccaaaggcggacc

SEQ ID NO: 63912 - DNA, 17 bp, Arabidopsis thaliana
cacaccaagattctatt

SEQ ID NO: 63913 - DNA, 17 bp, Arabidopsis thaliana
cacaccacagggataac

SEQ ID NO: 63914 - DNA, 17 bp, Arabidopsis thaliana
cacaccacctcttagca

SEQ ID NO: 63915 - DNA, 17 bp, Arabidopsis thaliana
cacaccactggattctc

SEQ ID NO: 63916 - DNA, 17 bp, Arabidopsis thaliana
cacaccactgggcgctg

SEQ ID NO: 63917 - DNA, 17 bp, Arabidopsis thaliana
cacaccagtgagtgcca

SEQ ID NO: 63918 - DNA, 17 bp, Arabidopsis thaliana
cacaccattacctctac

SEQ ID NO: 63919 - DNA, 17 bp, Arabidopsis thaliana
cacacccgctggtttac

SEQ ID NO: 63920 - DNA, 17 bp, Arabidopsis thaliana
cacacccggtgggacac

SEQ ID NO: 63921 - DNA, 17 bp, Arabidopsis thaliana
cacacccggttggagcg

SEQ ID NO: 63922 - DNA, 17 bp, Arabidopsis thaliana
cacacccgttgactatg

SEQ ID NO: 63923 - DNA, 17 bp, Arabidopsis thaliana
cacaccgaaatccctcc

SEQ ID NO: 63924 - DNA, 17 bp, Arabidopsis thaliana
cacaccgacgcggatta

SEQ ID NO: 63925 - DNA, 17 bp, Arabidopsis thaliana
cacaccgcccgtcacac

SEQ ID NO: 63926 - DNA, 17 bp, Arabidopsis thaliana
cacaccgcccgtcgctc

SEQ ID NO: 63927 - DNA, 17 bp, Arabidopsis thaliana
cacaccgcccgtcgctt

SEQ ID NO: 63928 - DNA, 17 bp, Arabidopsis thaliana
cacaccggatatggacc

SEQ ID NO: 63929 - DNA, 17 bp, Arabidopsis thaliana
cacaccggattggattg

SEQ ID NO: 63930 - DNA, 17 bp, Arabidopsis thaliana
cacacctccactggctc

SEQ ID NO: 63931 - DNA, 17 bp, Arabidopsis thaliana
cacacctgacctgagag

SEQ ID NO: 63932 - DNA, 17 bp, Arabidopsis thaliana
cacacctggtaaccgct

SEQ ID NO: 63933 - DNA, 17 bp, Arabidopsis thaliana
cacaccttggtttatta

SEQ ID NO: 63934 - DNA, 17 bp, Arabidopsis thaliana
cacacctttttggtttg

SEQ ID NO: 63935 - DNA, 17 bp, Arabidopsis thaliana
cacacgaaagacatgtc

SEQ ID NO: 63936 - DNA, 17 bp, Arabidopsis thaliana
cacacgaacaatgttct

SEQ ID NO: 63937 - DNA, 17 bp, Arabidopsis thaliana
cacacgacctcagaaac

SEQ ID NO: 63938 - DNA, 17 bp, Arabidopsis thaliana
cacacgaccttcttgac

SEQ ID NO: 63939 - DNA, 17 bp, Arabidopsis thaliana
cacacgacgacatctca

SEQ ID NO: 63940 - DNA, 17 bp, Arabidopsis thaliana
cacacgactactcagac

SEQ ID NO: 63941 - DNA, 17 bp, Arabidopsis thaliana
cacacgactactcagat

SEQ ID NO: 63942 - DNA, 17 bp, Arabidopsis thaliana
cacacgactagatggtt

SEQ ID NO: 63943 - DNA, 17 bp, Arabidopsis thaliana
cacacgattggtcagca

SEQ ID NO: 63944 - DNA, 17 bp, Arabidopsis thaliana
cacacgcgatgatgaac

SEQ ID NO: 63945 - DNA, 17 bp, Arabidopsis thaliana
cacacgcggattacggt

SEQ ID NO: 63946 - DNA, 17 bp, Arabidopsis thaliana
cacacgcttattcttgg

SEQ ID NO: 63947 - DNA, 17 bp, Arabidopsis thaliana
cacacggactctatggg

SEQ ID NO: 63948 - DNA, 17 bp, Arabidopsis thaliana
cacacggcgtgaggccg

SEQ ID NO: 63949 - DNA, 17 bp, Arabidopsis thaliana
cacacggctctcggctt

SEQ ID NO: 63950 - DNA, 17 bp, Arabidopsis thaliana
cacacgggcgatttcga

SEQ ID NO: 63951 - DNA, 17 bp, Arabidopsis thaliana
cacacggggaaacttac

SEQ ID NO: 63952 - DNA, 17 bp, Arabidopsis thaliana
cacacgggtttggaagg

SEQ ID NO: 63953 - DNA, 17 bp, Arabidopsis thaliana
cacacgggtttggcggg

SEQ ID NO: 63954 - DNA, 17 bp, Arabidopsis thaliana
cacacggttttgacgat

SEQ ID NO: 63955 - DNA, 17 bp, Arabidopsis thaliana
cacacgtctaaatatgt

SEQ ID NO: 63956 - DNA, 17 bp, Arabidopsis thaliana
cacacgtctgcctgggt

SEQ ID NO: 63957 - DNA, 17 bp, Arabidopsis thaliana
cacacgtgagcttcttt

SEQ ID NO: 63958 - DNA, 17 bp, Arabidopsis thaliana
cacacgtgccacgatct

SEQ ID NO: 63959 - DNA, 17 bp, Arabidopsis thaliana
cacacgtggccataaac

SEQ ID NO: 63960 - DNA, 17 bp, Arabidopsis thaliana
cacacgtgtgacttctt

SEQ ID NO: 63961 - DNA, 17 bp, Arabidopsis thaliana
cacacgttgtgatgatt

SEQ ID NO: 63962 - DNA, 17 bp, Arabidopsis thaliana
cacacgtttgcgggctc

SEQ ID NO: 63963 - DNA, 17 bp, Arabidopsis thaliana
cacactaaaatctaccc

SEQ ID NO: 63964 - DNA, 17 bp, Arabidopsis thaliana
cacactaagcacatgtg

SEQ ID NO: 63965 - DNA, 17 bp, Arabidopsis thaliana
cacactacaatgtttct

SEQ ID NO: 63966 - DNA, 17 bp, Arabidopsis thaliana
cacactacgggctaact

SEQ ID NO: 63967 - DNA, 17 bp, Arabidopsis thaliana
cacactaggatgggtga

SEQ ID NO: 63968 - DNA, 17 bp, Arabidopsis thaliana
cacactaggcgctaggc

SEQ ID NO: 63969 - DNA, 17 bp, Arabidopsis thaliana
cacactagtgagtgcca

SEQ ID NO: 63970 - DNA, 17 bp, Arabidopsis thaliana
cacactatatctctgtg

SEQ ID NO: 63971 - DNA, 17 bp, Arabidopsis thaliana
cacactatcgacgggat

SEQ ID NO: 63972 - DNA, 17 bp, Arabidopsis thaliana
cacactatgggagctgg

SEQ ID NO: 63973 - DNA, 17 bp, Arabidopsis thaliana
cacactcagctcaactg

SEQ ID NO: 63974 - DNA, 17 bp, Arabidopsis thaliana
cacactcccgccttagt

SEQ ID NO: 63975 - DNA, 17 bp, Arabidopsis thaliana
cacactccgtctccggg

SEQ ID NO: 63976 - DNA, 17 bp, Arabidopsis thaliana
cacactccttagcggat

SEQ ID NO: 63977 - DNA, 17 bp, Arabidopsis thaliana
cacactcgtcttgggct

SEQ ID NO: 63978 - DNA, 17 bp, Arabidopsis thaliana
cacactctcatccttgg

SEQ ID NO: 63979 - DNA, 17 bp, Arabidopsis thaliana
cacactcttcggacgac

SEQ ID NO: 63980 - DNA, 17 bp, Arabidopsis thaliana
cacactcttggtgtcga

SEQ ID NO: 63981 - DNA, 17 bp, Arabidopsis thaliana
cacactgagactgagac

SEQ ID NO: 63982 - DNA, 17 bp, Arabidopsis thaliana
cacactgatgatccttc

SEQ ID NO: 63983 - DNA, 17 bp, Arabidopsis thaliana
cacactgatgctgacac

SEQ ID NO: 63984 - DNA, 17 bp, Arabidopsis thaliana
cacactgattttcttgt

SEQ ID NO: 63985 - DNA, 17 bp, Arabidopsis thaliana
cacactgccgctaccac

SEQ ID NO: 63986 - DNA, 17 bp, Arabidopsis thaliana
cacactgcctgggtgtc

SEQ ID NO: 63987 - DNA, 17 bp, Arabidopsis thaliana
cacactgtctgtcccga

SEQ ID NO: 63988 - DNA, 17 bp, Arabidopsis thaliana
cacactgtgaaactaca

SEQ ID NO: 63989 - DNA, 17 bp, Arabidopsis thaliana
cacactgtgaaactgca

SEQ ID NO: 63990 - DNA, 17 bp, Arabidopsis thaliana
cacactgttacgatgcg

SEQ ID NO: 63991 - DNA, 17 bp, Arabidopsis thaliana
cacacttaggaggactt

SEQ ID NO: 63992 - DNA, 17 bp, Arabidopsis thaliana
cacacttcagtccatgc

SEQ ID NO: 63993 - DNA, 17 bp, Arabidopsis thaliana
cacacttcgtgtagcta

SEQ ID NO: 63994 - DNA, 17 bp, Arabidopsis thaliana
cacacttgatgagtggc

SEQ ID NO: 63995 - DNA, 17 bp, Arabidopsis thaliana
cacactttacagaggtg

SEQ ID NO: 63996 - DNA, 17 bp, Arabidopsis thaliana
cacactttagggtttct

SEQ ID NO: 63997 - DNA, 17 bp, Arabidopsis thaliana
cacacttttctaaaggg

SEQ ID NO: 63998 - DNA, 17 bp, Arabidopsis thaliana
cacagaacggtgggctc

SEQ ID NO: 63999 - DNA, 17 bp, Arabidopsis thaliana
cacagaactcgacagtg

SEQ ID NO: 64000 - DNA, 17 bp, Arabidopsis thaliana
cacagaactgtagacgt

SEQ ID NO: 64001 - DNA, 17 bp, Arabidopsis thaliana
cacagaagcgacgcatg

SEQ ID NO: 64002 - DNA, 17 bp, Arabidopsis thaliana
cacagaatggtgaagat

SEQ ID NO: 64003 - DNA, 17 bp, Arabidopsis thaliana
cacagacacggctatgt

SEQ ID NO: 64004 - DNA, 17 bp, Arabidopsis thaliana
cacagacccgggttcgt

SEQ ID NO: 64005 - DNA, 17 bp, Arabidopsis thaliana
cacagacccgggtttcc

SEQ ID NO: 64006 - DNA, 17 bp, Arabidopsis thaliana
cacagaccgtcggactg

SEQ ID NO: 64007 - DNA, 17 bp, Arabidopsis thaliana
cacagacctgttattgc

SEQ ID NO: 64008 - DNA, 17 bp, Arabidopsis thaliana
cacagacggccacttgt

SEQ ID NO: 64009 - DNA, 17 bp, Arabidopsis thaliana
cacagactccttcaact

SEQ ID NO: 64010 - DNA, 17 bp, Arabidopsis thaliana
cacagactcgcagggag

SEQ ID NO: 64011 - DNA, 17 bp, Arabidopsis thaliana
cacagactcggattaac

SEQ ID NO: 64012 - DNA, 17 bp, Arabidopsis thaliana
cacagactttaacgtgt

SEQ ID NO: 64013 - DNA, 17 bp, Arabidopsis thaliana
cacagagacccattgca

SEQ ID NO: 64014 - DNA, 17 bp, Arabidopsis thaliana
cacagagacgggctagg

SEQ ID NO: 64015 - DNA, 17 bp, Arabidopsis thaliana
cacagagctgtagacgt

SEQ ID NO: 64016 - DNA, 17 bp, Arabidopsis thaliana
cacagagctgtcttggt

SEQ ID NO: 64017 - DNA, 17 bp, Arabidopsis thaliana
cacagaggactccgggg

SEQ ID NO: 64018 - DNA, 17 bp, Arabidopsis thaliana
cacagaggccatgcgat

SEQ ID NO: 64019 - DNA, 17 bp, Arabidopsis thaliana
cacagaggctcagttac

SEQ ID NO: 64020 - DNA, 17 bp, Arabidopsis thaliana
cacagaggcttgggcaa

SEQ ID NO: 64021 - DNA, 17 bp, Arabidopsis thaliana
cacagaggtgtcctccc

SEQ ID NO: 64022 - DNA, 17 bp, Arabidopsis thaliana
cacagaggttgtttgca

SEQ ID NO: 64023 - DNA, 17 bp, Arabidopsis thaliana
cacagagtgttgatgtt

SEQ ID NO: 64024 - DNA, 17 bp, Arabidopsis thaliana
cacagagttcattgtca

SEQ ID NO: 64025 - DNA, 17 bp, Arabidopsis thaliana
cacagagttctcagggc

SEQ ID NO: 64026 - DNA, 17 bp, Arabidopsis thaliana
cacagagttgattgcgc

SEQ ID NO: 64027 - DNA, 17 bp, Arabidopsis thaliana
cacagatcgcatttcgc

SEQ ID NO: 64028 - DNA, 17 bp, Arabidopsis thaliana
cacagatcgctgttaac

SEQ ID NO: 64029 - DNA, 17 bp, Arabidopsis thaliana
cacagatcggttcaatt

SEQ ID NO: 64030 - DNA, 17 bp, Arabidopsis thaliana
cacagatctgtctatcc

SEQ ID NO: 64031 - DNA, 17 bp, Arabidopsis thaliana
cacagatgggatctggt

SEQ ID NO: 64032 - DNA, 17 bp, Arabidopsis thaliana
cacagatgggatctgtt

SEQ ID NO: 64033 - DNA, 17 bp, Arabidopsis thaliana
cacagatgggctttatc

SEQ ID NO: 64034 - DNA, 17 bp, Arabidopsis thaliana
cacagattcttcaatgc

SEQ ID NO: 64035 - DNA, 17 bp, Arabidopsis thaliana
cacagattgaccgatag

SEQ ID NO: 64036 - DNA, 17 bp, Arabidopsis thaliana
cacagattgcgccgtac

SEQ ID NO: 64037 - DNA, 17 bp, Arabidopsis thaliana
cacagattgcggtgtac

SEQ ID NO: 64038 - DNA, 17 bp, Arabidopsis thaliana
cacagattgtgtcttgg

SEQ ID NO: 64039 - DNA, 17 bp, Arabidopsis thaliana
cacagattttagttacc

SEQ ID NO: 64040 - DNA, 17 bp, Arabidopsis thaliana
cacagcaaatgtttcac

SEQ ID NO: 64041 - DNA, 17 bp, Arabidopsis thaliana
cacagcaatgatcacca

SEQ ID NO: 64042 - DNA, 17 bp, Arabidopsis thaliana
cacagcagtgactgcaa

SEQ ID NO: 64043 - DNA, 17 bp, Arabidopsis thaliana
cacagcatatgctaaat

SEQ ID NO: 64044 - DNA, 17 bp, Arabidopsis thaliana
cacagccacaatcgccg

SEQ ID NO: 64045 - DNA, 17 bp, Arabidopsis thaliana
cacagccatccatcttc

SEQ ID NO: 64046 - DNA, 17 bp, Arabidopsis thaliana
cacagcccggctaccga

SEQ ID NO: 64047 - DNA, 17 bp, Arabidopsis thaliana
cacagccggatcttata

SEQ ID NO: 64048 - DNA, 17 bp, Arabidopsis thaliana
cacagcgatttgttgcc

SEQ ID NO: 64049 - DNA, 17 bp, Arabidopsis thaliana
cacagcgtacactttac

SEQ ID NO: 64050 - DNA, 17 bp, Arabidopsis thaliana
cacagcgtattcgcccc

SEQ ID NO: 64051 - DNA, 17 bp, Arabidopsis thaliana
cacagcgtccaagaatt

SEQ ID NO: 64052 - DNA, 17 bp, Arabidopsis thaliana
cacagctgggtttcttc

SEQ ID NO: 64053 - DNA, 17 bp, Arabidopsis thaliana
cacagcttcggcccatg

SEQ ID NO: 64054 - DNA, 17 bp, Arabidopsis thaliana
cacaggaacagtcttgg

SEQ ID NO: 64055 - DNA, 17 bp, Arabidopsis thaliana
cacaggaattaacgagt

SEQ ID NO: 64056 - DNA, 17 bp, Arabidopsis thaliana
cacaggacgagttggcc

SEQ ID NO: 64057 - DNA, 17 bp, Arabidopsis thaliana
cacaggactctgctaag

SEQ ID NO: 64058 - DNA, 17 bp, Arabidopsis thaliana
cacaggagggttgtatt

SEQ ID NO: 64059 - DNA, 17 bp, Arabidopsis thaliana
cacaggattttctgagc

SEQ ID NO: 64060 - DNA, 17 bp, Arabidopsis thaliana
cacaggcagatgacagg

SEQ ID NO: 64061 - DNA, 17 bp, Arabidopsis thaliana
cacaggccaagtgttga

SEQ ID NO: 64062 - DNA, 17 bp, Arabidopsis thaliana
cacaggccaagtttggg

SEQ ID NO: 64063 - DNA, 17 bp, Arabidopsis thaliana
cacaggcccgggtaatc

SEQ ID NO: 64064 - DNA, 17 bp, Arabidopsis thaliana
cacaggcgaaataccga

SEQ ID NO: 64065 - DNA, 17 bp, Arabidopsis thaliana
cacaggcgacaggtgtc

SEQ ID NO: 64066 - DNA, 17 bp, Arabidopsis thaliana
cacaggctcctctaccg

SEQ ID NO: 64067 - DNA, 17 bp, Arabidopsis thaliana
cacaggctcttcctcta

SEQ ID NO: 64068 - DNA, 17 bp, Arabidopsis thaliana
cacaggcttctagcttc

SEQ ID NO: 64069 - DNA, 17 bp, Arabidopsis thaliana
cacaggcttgtcataaa

SEQ ID NO: 64070 - DNA, 17 bp, Arabidopsis thaliana
cacagggaagcccattt

SEQ ID NO: 64071 - DNA, 17 bp, Arabidopsis thaliana
cacagggataactggct

SEQ ID NO: 64072 - DNA, 17 bp, Arabidopsis thaliana
cacagggcacgtctgcc

SEQ ID NO: 64073 - DNA, 17 bp, Arabidopsis thaliana
cacaggtacagtggtat

SEQ ID NO: 64074 - DNA, 17 bp, Arabidopsis thaliana
cacaggtactggtgact

SEQ ID NO: 64075 - DNA, 17 bp, Arabidopsis thaliana
cacaggtcactaaaggt

SEQ ID NO: 64076 - DNA, 17 bp, Arabidopsis thaliana
cacaggtcccaggatcg

SEQ ID NO: 64077 - DNA, 17 bp, Arabidopsis thaliana
cacaggtcgtggagtcg

SEQ ID NO: 64078 - DNA, 17 bp, Arabidopsis thaliana
cacaggtcgttcaccct

SEQ ID NO: 64079 - DNA, 17 bp, Arabidopsis thaliana
cacaggtctgtgatgcc

SEQ ID NO: 64080 - DNA, 17 bp, Arabidopsis thaliana
cacaggtgctcatcttc

SEQ ID NO: 64081 - DNA, 17 bp, Arabidopsis thaliana
cacaggtggaggcacga

SEQ ID NO: 64082 - DNA, 17 bp, Arabidopsis thaliana
cacaggtgggtaggtag

SEQ ID NO: 64083 - DNA, 17 bp, Arabidopsis thaliana
cacaggtggtcatggct

SEQ ID NO: 64084 - DNA, 17 bp, Arabidopsis thaliana
cacaggtggtgcaaggc

SEQ ID NO: 64085 - DNA, 17 bp, Arabidopsis thaliana
cacaggtggtgcatggc

SEQ ID NO: 64086 - DNA, 17 bp, Arabidopsis thaliana
cacaggtggtgcatggt

SEQ ID NO: 64087 - DNA, 17 bp, Arabidopsis thaliana
cacaggttcgagtcctg

SEQ ID NO: 64088 - DNA, 17 bp, Arabidopsis thaliana
cacaggttcgttccctg

SEQ ID NO: 64089 - DNA, 17 bp, Arabidopsis thaliana
cacaggttggctgattg

SEQ ID NO: 64090 - DNA, 17 bp, Arabidopsis thaliana
cacaggttggctgattt

SEQ ID NO: 64091 - DNA, 17 bp, Arabidopsis thaliana
cacaggtttacgttttt

SEQ ID NO: 64092 - DNA, 17 bp, Arabidopsis thaliana
cacaggtttatgttttt

SEQ ID NO: 64093 - DNA, 17 bp, Arabidopsis thaliana
cacaggttttacttcag

SEQ ID NO: 64094 - DNA, 17 bp, Arabidopsis thaliana
cacagtacatgaacttg

SEQ ID NO: 64095 - DNA, 17 bp, Arabidopsis thaliana
cacagtaccattttctg

SEQ ID NO: 64096 - DNA, 17 bp, Arabidopsis thaliana
cacagtattgcctcgtg

SEQ ID NO: 64097 - DNA, 17 bp, Arabidopsis thaliana
cacagtattgggacgga

SEQ ID NO: 64098 - DNA, 17 bp, Arabidopsis thaliana
cacagtcaccattcgga

SEQ ID NO: 64099 - DNA, 17 bp, Arabidopsis thaliana
cacagtccactgtgtga

SEQ ID NO: 64100 - DNA, 17 bp, Arabidopsis thaliana
cacagtccacttggtta

SEQ ID NO: 64101 - DNA, 17 bp, Arabidopsis thaliana
cacagtccaggatttga

SEQ ID NO: 64102 - DNA, 17 bp, Arabidopsis thaliana
cacagtcgcacgttgca

SEQ ID NO: 64103 - DNA, 17 bp, Arabidopsis thaliana
cacagtcgtgtgagtgg

SEQ ID NO: 64104 - DNA, 17 bp, Arabidopsis thaliana
cacagtctgtaggttgc

SEQ ID NO: 64105 - DNA, 17 bp, Arabidopsis thaliana
cacagtgacgacaaggg

SEQ ID NO: 64106 - DNA, 17 bp, Arabidopsis thaliana
cacagtgagtgccggtt

SEQ ID NO: 64107 - DNA, 17 bp, Arabidopsis thaliana
cacagtgcggtgcgttt

SEQ ID NO: 64108 - DNA, 17 bp, Arabidopsis thaliana
cacagtggtatccacat

SEQ ID NO: 64109 - DNA, 17 bp, Arabidopsis thaliana
cacagttaagcgtgctt

SEQ ID NO: 64110 - DNA, 17 bp, Arabidopsis thaliana
cacagttaagtgtgctt

SEQ ID NO: 64111 - DNA, 17 bp, Arabidopsis thaliana
cacagttctccgggaat

SEQ ID NO: 64112 - DNA, 17 bp, Arabidopsis thaliana
cacagttgcggtgcggt

SEQ ID NO: 64113 - DNA, 17 bp, Arabidopsis thaliana
cacagttgcttaggctc

SEQ ID NO: 64114 - DNA, 17 bp, Arabidopsis thaliana
cacagttgtactcggtt

SEQ ID NO: 64115 - DNA, 17 bp, Arabidopsis thaliana
cacagtttcaaatcgga

SEQ ID NO: 64116 - DNA, 17 bp, Arabidopsis thaliana
cacagtttcatgcgaac

SEQ ID NO: 64117 - DNA, 17 bp, Arabidopsis thaliana
cacagtttcctctggac

SEQ ID NO: 64118 - DNA, 17 bp, Arabidopsis thaliana
cacagtttgcttgcatg

SEQ ID NO: 64119 - DNA, 17 bp, Arabidopsis thaliana
cacagtttgttgtgcga

SEQ ID NO: 64120 - DNA, 17 bp, Arabidopsis thaliana
cacagttttcagagcca

SEQ ID NO: 64121 - DNA, 17 bp, Arabidopsis thaliana
cacagttttggaatgcg

SEQ ID NO: 64122 - DNA, 17 bp, Arabidopsis thaliana
cacagtttttgccactt

SEQ ID NO: 64123 - DNA, 17 bp, Arabidopsis thaliana
cacagttttttgtgact

SEQ ID NO: 64124 - DNA, 17 bp, Arabidopsis thaliana
cacataacgatggactt

SEQ ID NO: 64125 - DNA, 17 bp, Arabidopsis thaliana
cacatacacggttttgt

SEQ ID NO: 64126 - DNA, 17 bp, Arabidopsis thaliana
cacatacatatacgggg

SEQ ID NO: 64127 - DNA, 17 bp, Arabidopsis thaliana
cacataccatgcaagct

SEQ ID NO: 64128 - DNA, 17 bp, Arabidopsis thaliana
cacatacgtcacaggca

SEQ ID NO: 64129 - DNA, 17 bp, Arabidopsis thaliana
cacatacgtgcggggtt

SEQ ID NO: 64130 - DNA, 17 bp, Arabidopsis thaliana
cacatactttgaccgta

SEQ ID NO: 64131 - DNA, 17 bp, Arabidopsis thaliana
cacatagcgacacatgt

SEQ ID NO: 64132 - DNA, 17 bp, Arabidopsis thaliana
cacatagctacttacga

SEQ ID NO: 64133 - DNA, 17 bp, Arabidopsis thaliana
cacataggccctgttcg

SEQ ID NO: 64134 - DNA, 17 bp, Arabidopsis thaliana
cacatatacagacgggt

SEQ ID NO: 64135 - DNA, 17 bp, Arabidopsis thaliana
cacatataggccctgtt

SEQ ID NO: 64136 - DNA, 17 bp, Arabidopsis thaliana
cacatatcaccgcttct

SEQ ID NO: 64137 - DNA, 17 bp, Arabidopsis thaliana
cacatcaagtgcggctt

SEQ ID NO: 64138 - DNA, 17 bp, Arabidopsis thaliana
cacatcaattgtgacca

SEQ ID NO: 64139 - DNA, 17 bp, Arabidopsis thaliana
cacatcaccgtcgtttt

SEQ ID NO: 64140 - DNA, 17 bp, Arabidopsis thaliana
cacatcactaagtctat

SEQ ID NO: 64141 - DNA, 17 bp, Arabidopsis thaliana
cacatcactcgaccccg

SEQ ID NO: 64142 - DNA, 17 bp, Arabidopsis thaliana
cacatcagcacatgaga

SEQ ID NO: 64143 - DNA, 17 bp, Arabidopsis thaliana
cacatcagccgcacgac

SEQ ID NO: 64144 - DNA, 17 bp, Arabidopsis thaliana
cacatcaggcaaaacag

SEQ ID NO: 64145 - DNA, 17 bp, Arabidopsis thaliana
cacatcatcaatttgac

SEQ ID NO: 64146 - DNA, 17 bp, Arabidopsis thaliana
cacatcatcattcagca

SEQ ID NO: 64147 - DNA, 17 bp, Arabidopsis thaliana
cacatcatctgaacccc

SEQ ID NO: 64148 - DNA, 17 bp, Arabidopsis thaliana
cacatcattacctttgt

SEQ ID NO: 64149 - DNA, 17 bp, Arabidopsis thaliana
cacatcatttggctcta

SEQ ID NO: 64150 - DNA, 17 bp, Arabidopsis thaliana
cacatccctgagttaag

SEQ ID NO: 64151 - DNA, 17 bp, Arabidopsis thaliana
cacatccgttgaccatg

SEQ ID NO: 64152 - DNA, 17 bp, Arabidopsis thaliana
cacatcctccagtaacc

SEQ ID NO: 64153 - DNA, 17 bp, Arabidopsis thaliana
cacatcctcgaatatgt

SEQ ID NO: 64154 - DNA, 17 bp, Arabidopsis thaliana
cacatcctcggaagcat

SEQ ID NO: 64155 - DNA, 17 bp, Arabidopsis thaliana
cacatcctgtagatgga

SEQ ID NO: 64156 - DNA, 17 bp, Arabidopsis thaliana
cacatcctttgtagcat

SEQ ID NO: 64157 - DNA, 17 bp, Arabidopsis thaliana
cacatcgaaagttgagt

SEQ ID NO: 64158 - DNA, 17 bp, Arabidopsis thaliana
cacatcgacaattatta

SEQ ID NO: 64159 - DNA, 17 bp, Arabidopsis thaliana
cacatcgacgggaaggt

SEQ ID NO: 64160 - DNA, 17 bp, Arabidopsis thaliana
cacatcgactgtactta

SEQ ID NO: 64161 - DNA, 17 bp, Arabidopsis thaliana
cacatcgagatactaca

SEQ ID NO: 64162 - DNA, 17 bp, Arabidopsis thaliana
cacatcgataagagcgc

SEQ ID NO: 64163 - DNA, 17 bp, Arabidopsis thaliana
cacatcgatttggccac

SEQ ID NO: 64164 - DNA, 17 bp, Arabidopsis thaliana
cacatcgctattgtccg

SEQ ID NO: 64165 - DNA, 17 bp, Arabidopsis thaliana
cacatcgctttattgtc

SEQ ID NO: 64166 - DNA, 17 bp, Arabidopsis thaliana
cacatcggaagttaagt

SEQ ID NO: 64167 - DNA, 17 bp, Arabidopsis thaliana
cacatcggaagttgagt

SEQ ID NO: 64168 - DNA, 17 bp, Arabidopsis thaliana
cacatcggaagttgcgt

SEQ ID NO: 64169 - DNA, 17 bp, Arabidopsis thaliana
cacatcggtagctttac

SEQ ID NO: 64170 - DNA, 17 bp, Arabidopsis thaliana
cacatcggtccggccca

SEQ ID NO: 64171 - DNA, 17 bp, Arabidopsis thaliana
cacatcggttcctgaat

SEQ ID NO: 64172 - DNA, 17 bp, Arabidopsis thaliana
cacatcgtattttgggt

SEQ ID NO: 64173 - DNA, 17 bp, Arabidopsis thaliana
cacatcgttattccaca

SEQ ID NO: 64174 - DNA, 17 bp, Arabidopsis thaliana
cacatcgttccacttct

SEQ ID NO: 64175 - DNA, 17 bp, Arabidopsis thaliana
cacatcgttccatttct

SEQ ID NO: 64176 - DNA, 17 bp, Arabidopsis thaliana
cacatcgttgcttacta

SEQ ID NO: 64177 - DNA, 17 bp, Arabidopsis thaliana
cacatctaaaccgtacc

SEQ ID NO: 64178 - DNA, 17 bp, Arabidopsis thaliana
cacatctccgttgaggc

SEQ ID NO: 64179 - DNA, 17 bp, Arabidopsis thaliana
cacatctctggaacttt

SEQ ID NO: 64180 - DNA, 17 bp, Arabidopsis thaliana
cacatctcttgttgacc

SEQ ID NO: 64181 - DNA, 17 bp, Arabidopsis thaliana
cacatctgcctgggtgt

SEQ ID NO: 64182 - DNA, 17 bp, Arabidopsis thaliana
cacatctggacacagca

SEQ ID NO: 64183 - DNA, 17 bp, Arabidopsis thaliana
cacatcttattggtaat

SEQ ID NO: 64184 - DNA, 17 bp, Arabidopsis thaliana
cacatcttcctcatcct

SEQ ID NO: 64185 - DNA, 17 bp, Arabidopsis thaliana
cacatcttcctcatcgt

SEQ ID NO: 64186 - DNA, 17 bp, Arabidopsis thaliana
cacatcttctagagctt

SEQ ID NO: 64187 - DNA, 17 bp, Arabidopsis thaliana
cacatcttgatgatgct

SEQ ID NO: 64188 - DNA, 17 bp, Arabidopsis thaliana
cacatcttggttgtcgg

SEQ ID NO: 64189 - DNA, 17 bp, Arabidopsis thaliana
cacatcttgtcagctcc

SEQ ID NO: 64190 - DNA, 17 bp, Arabidopsis thaliana
cacatctttgtcgttag

SEQ ID NO: 64191 - DNA, 17 bp, Arabidopsis thaliana
cacatcttttgtacagt

SEQ ID NO: 64192 - DNA, 17 bp, Arabidopsis thaliana
cacatgaggtttgtgta

SEQ ID NO: 64193 - DNA, 17 bp, Arabidopsis thaliana
cacatggcgtggagcct

SEQ ID NO: 64194 - DNA, 17 bp, Arabidopsis thaliana
cacatgggttagtcgat

SEQ ID NO: 64195 - DNA, 17 bp, Arabidopsis thaliana
cacatgtacacagtggc

SEQ ID NO: 64196 - DNA, 17 bp, Arabidopsis thaliana
cacattaacgcgattcg

SEQ ID NO: 64197 - DNA, 17 bp, Arabidopsis thaliana
cacattagccgataggg

SEQ ID NO: 64198 - DNA, 17 bp, Arabidopsis thaliana
cacattatgcgggttgt

SEQ ID NO: 64199 - DNA, 17 bp, Arabidopsis thaliana
cacattcagtgtcgacc

SEQ ID NO: 64200 - DNA, 17 bp, Arabidopsis thaliana
cacattcatgccagcaa

SEQ ID NO: 64201 - DNA, 17 bp, Arabidopsis thaliana
cacattcggtcgcagga

SEQ ID NO: 64202 - DNA, 17 bp, Arabidopsis thaliana
cacattcttctacacgg

SEQ ID NO: 64203 - DNA, 17 bp, Arabidopsis thaliana
cacattcttctccgcgc

SEQ ID NO: 64204 - DNA, 17 bp, Arabidopsis thaliana
cacattgatcaccaggg

SEQ ID NO: 64205 - DNA, 17 bp, Arabidopsis thaliana
cacattgcccgcttgca

SEQ ID NO: 64206 - DNA, 17 bp, Arabidopsis thaliana
cacattgcgcttgacca

SEQ ID NO: 64207 - DNA, 17 bp, Arabidopsis thaliana
cacattgctaagcatgt

SEQ ID NO: 64208 - DNA, 17 bp, Arabidopsis thaliana
cacattgctctcgcaga

SEQ ID NO: 64209 - DNA, 17 bp, Arabidopsis thaliana
cacattggaagtttgaa

SEQ ID NO: 64210 - DNA, 17 bp, Arabidopsis thaliana
cacattggcaaggttag

SEQ ID NO: 64211 - DNA, 17 bp, Arabidopsis thaliana
cacattgtcgtgcctag

SEQ ID NO: 64212 - DNA, 17 bp, Arabidopsis thaliana
cacattgtcttctgggt

SEQ ID NO: 64213 - DNA, 17 bp, Arabidopsis thaliana
cacattgttctaccgcc

SEQ ID NO: 64214 - DNA, 17 bp, Arabidopsis thaliana
cacattgttctaccgcg

SEQ ID NO: 64215 - DNA, 17 bp, Arabidopsis thaliana
cacatttactcggtggc

SEQ ID NO: 64216 - DNA, 17 bp, Arabidopsis thaliana
cacatttagttggtctg

SEQ ID NO: 64217 - DNA, 17 bp, Arabidopsis thaliana
cacatttcagtcgttgt

SEQ ID NO: 64218 - DNA, 17 bp, Arabidopsis thaliana
cacatttccgcgacgca

SEQ ID NO: 64219 - DNA, 17 bp, Arabidopsis thaliana
cacatttccgcgacgta

SEQ ID NO: 64220 - DNA, 17 bp, Arabidopsis thaliana
cacatttcctaggcttt

SEQ ID NO: 64221 - DNA, 17 bp, Arabidopsis thaliana
cacatttgagacaattg

SEQ ID NO: 64222 - DNA, 17 bp, Arabidopsis thaliana
cacatttgccaaggatg

SEQ ID NO: 64223 - DNA, 17 bp, Arabidopsis thaliana
cacatttgctcttgacg

SEQ ID NO: 64224 - DNA, 17 bp, Arabidopsis thaliana
cacatttggagctgctt

SEQ ID NO: 64225 - DNA, 17 bp, Arabidopsis thaliana
cacatttgtttggaatg

SEQ ID NO: 64226 - DNA, 17 bp, Arabidopsis thaliana
cacatttgtttgggaag

SEQ ID NO: 64227 - DNA, 17 bp, Arabidopsis thaliana
cacattttcggtggcat

SEQ ID NO: 64228 - DNA, 17 bp, Arabidopsis thaliana
cacattttggtctacgt

SEQ ID NO: 64229 - DNA, 17 bp, Arabidopsis thaliana
cacatttttcagaccat

SEQ ID NO: 64230 - DNA, 17 bp, Arabidopsis thaliana
cacatttttcgccaatt

SEQ ID NO: 64231 - DNA, 17 bp, Arabidopsis thaliana
cacatttttgactatca

SEQ ID NO: 64232 - DNA, 17 bp, Arabidopsis thaliana
cacatttttggctttgg

SEQ ID NO: 64233 - DNA, 17 bp, Arabidopsis thaliana
cacatttttttggatag

SEQ ID NO: 64234 - DNA, 17 bp, Arabidopsis thaliana
caccaaaaccaatgttt

SEQ ID NO: 64235 - DNA, 17 bp, Arabidopsis thaliana
caccaaaaccgccaaag

SEQ ID NO: 64236 - DNA, 17 bp, Arabidopsis thaliana
caccaaaacctgttatt

SEQ ID NO: 64237 - DNA, 17 bp, Arabidopsis thaliana
caccaaaatctccgtag

SEQ ID NO: 64238 - DNA, 17 bp, Arabidopsis thaliana
caccaaaatggtgttga

SEQ ID NO: 64239 - DNA, 17 bp, Arabidopsis thaliana
caccaaaatgtcacttg

SEQ ID NO: 64240 - DNA, 17 bp, Arabidopsis thaliana
caccaaaccgtacagtg

SEQ ID NO: 64241 - DNA, 17 bp, Arabidopsis thaliana
caccaaactttctactt

SEQ ID NO: 64242 - DNA, 17 bp, Arabidopsis thaliana
caccaaactttgaccac

SEQ ID NO: 64243 - DNA, 17 bp, Arabidopsis thaliana
caccaaagtccgatcgg

SEQ ID NO: 64244 - DNA, 17 bp, Arabidopsis thaliana
caccaaatctgacttct

SEQ ID NO: 64245 - DNA, 17 bp, Arabidopsis thaliana
caccaaatctttagtga

SEQ ID NO: 64246 - DNA, 17 bp, Arabidopsis thaliana
caccaaatgggcctaca

SEQ ID NO: 64247 - DNA, 17 bp, Arabidopsis thaliana
caccaaattgagtggtc

SEQ ID NO: 64248 - DNA, 17 bp, Arabidopsis thaliana
caccaaattgtggttcc

SEQ ID NO: 64249 - DNA, 17 bp, Arabidopsis thaliana
caccaacaacttcactg

SEQ ID NO: 64250 - DNA, 17 bp, Arabidopsis thaliana
caccaacaggtttggcc

SEQ ID NO: 64251 - DNA, 17 bp, Arabidopsis thaliana
caccaaccttcctcggg

SEQ ID NO: 64252 - DNA, 17 bp, Arabidopsis thaliana
caccaaccttctaccgg

SEQ ID NO: 64253 - DNA, 17 bp, Arabidopsis thaliana
caccaactaagactctg

SEQ ID NO: 64254 - DNA, 17 bp, Arabidopsis thaliana
caccaactctcgagctt

SEQ ID NO: 64255 - DNA, 17 bp, Arabidopsis thaliana
caccaactttagcccag

SEQ ID NO: 64256 - DNA, 17 bp, Arabidopsis thaliana
caccaagaatttggact

SEQ ID NO: 64257 - DNA, 17 bp, Arabidopsis thaliana
caccaagactgggtttc

SEQ ID NO: 64258 - DNA, 17 bp, Arabidopsis thaliana
caccaagaggtctgggg

SEQ ID NO: 64259 - DNA, 17 bp, Arabidopsis thaliana
caccaaggatgacttgc

SEQ ID NO: 64260 - DNA, 17 bp, Arabidopsis thaliana
caccaagggtgcagaat

SEQ ID NO: 64261 - DNA, 17 bp, Arabidopsis thaliana
caccaagtgctgcagaa

SEQ ID NO: 64262 - DNA, 17 bp, Arabidopsis thaliana
caccaagtgttggattg

SEQ ID NO: 64263 - DNA, 17 bp, Arabidopsis thaliana
caccaagttcgggatgg

SEQ ID NO: 64264 - DNA, 17 bp, Arabidopsis thaliana
caccaagttcgggtgct

SEQ ID NO: 64265 - DNA, 17 bp, Arabidopsis thaliana
caccaataacctatatg

SEQ ID NO: 64266 - DNA, 17 bp, Arabidopsis thaliana
caccaatacggcaatgt

SEQ ID NO: 64267 - DNA, 17 bp, Arabidopsis thaliana
caccaatagggaacgtg

SEQ ID NO: 64268 - DNA, 17 bp, Arabidopsis thaliana
caccacactgtacagtt

SEQ ID NO: 64269 - DNA, 17 bp, Arabidopsis thaliana
caccacagtgacgacaa

SEQ ID NO: 64270 - DNA, 17 bp, Arabidopsis thaliana
caccaccaacgtcacca

SEQ ID NO: 64271 - DNA, 17 bp, Arabidopsis thaliana
caccaccaccaaccaac

SEQ ID NO: 64272 - DNA, 17 bp, Arabidopsis thaliana
caccaccaccaccaacg

SEQ ID NO: 64273 - DNA, 17 bp, Arabidopsis thaliana
caccaccaccaccaccg

SEQ ID NO: 64274 - DNA, 17 bp, Arabidopsis thaliana
caccaccaccaccagcg

SEQ ID NO: 64275 - DNA, 17 bp, Arabidopsis thaliana
caccaccaccaccggaa

SEQ ID NO: 64276 - DNA, 17 bp, Arabidopsis thaliana
caccaccaccaccggta

SEQ ID NO: 64277 - DNA, 17 bp, Arabidopsis thaliana
caccaccaccacctcca

SEQ ID NO: 64278 - DNA, 17 bp, Arabidopsis thaliana
caccaccaccagcgccg

SEQ ID NO: 64279 - DNA, 17 bp, Arabidopsis thaliana
caccaccactcggccga

SEQ ID NO: 64280 - DNA, 17 bp, Arabidopsis thaliana
caccaccactgaagcct

SEQ ID NO: 64281 - DNA, 17 bp, Arabidopsis thaliana
caccaccagcgccgcca

SEQ ID NO: 64282 - DNA, 17 bp, Arabidopsis thaliana
caccaccaggaatggag

SEQ ID NO: 64283 - DNA, 17 bp, Arabidopsis thaliana
caccaccaggactgccc

SEQ ID NO: 64284 - DNA, 17 bp, Arabidopsis thaliana
caccaccaggagaggag

SEQ ID NO: 64285 - DNA, 17 bp, Arabidopsis thaliana
caccaccaggagcgaag

SEQ ID NO: 64286 - DNA, 17 bp, Arabidopsis thaliana
caccaccaggagcggag

SEQ ID NO: 64287 - DNA, 17 bp, Arabidopsis thaliana
caccaccaggagtcgag

SEQ ID NO: 64288 - DNA, 17 bp, Arabidopsis thaliana
caccaccaggagtgaag

SEQ ID NO: 64289 - DNA, 17 bp, Arabidopsis thaliana
caccaccaggagtggac

SEQ ID NO: 64290 - DNA, 17 bp, Arabidopsis thaliana
caccaccaggagtggag

SEQ ID NO: 64291 - DNA, 17 bp, Arabidopsis thaliana
caccaccaggagtggat

SEQ ID NO: 64292 - DNA, 17 bp, Arabidopsis thaliana
caccaccattaccggac

SEQ ID NO: 64293 - DNA, 17 bp, Arabidopsis thaliana
caccaccgccggcgctc

SEQ ID NO: 64294 - DNA, 17 bp, Arabidopsis thaliana
caccaccggttgcatag

SEQ ID NO: 64295 - DNA, 17 bp, Arabidopsis thaliana
caccaccgtcggccacc

SEQ ID NO: 64296 - DNA, 17 bp, Arabidopsis thaliana
caccacctccagcgcca

SEQ ID NO: 64297 - DNA, 17 bp, Arabidopsis thaliana
caccacctccgccgcgg

SEQ ID NO: 64298 - DNA, 17 bp, Arabidopsis thaliana
caccacctcggatgtgt

SEQ ID NO: 64299 - DNA, 17 bp, Arabidopsis thaliana
caccacgagctggaggc

SEQ ID NO: 64300 - DNA, 17 bp, Arabidopsis thaliana
caccacgaggcgctgtc

SEQ ID NO: 64301 - DNA, 17 bp, Arabidopsis thaliana
caccacgtctgcctggg

SEQ ID NO: 64302 - DNA, 17 bp, Arabidopsis thaliana
caccactacatggttgg

SEQ ID NO: 64303 - DNA, 17 bp, Arabidopsis thaliana
caccactagacccgtct

SEQ ID NO: 64304 - DNA, 17 bp, Arabidopsis thaliana
caccactcacttctgca

SEQ ID NO: 64305 - DNA, 17 bp, Arabidopsis thaliana
caccactcagccgcttc

SEQ ID NO: 64306 - DNA, 17 bp, Arabidopsis thaliana
caccactccctttctac

SEQ ID NO: 64307 - DNA, 17 bp, Arabidopsis thaliana
caccactccgggacgcc

SEQ ID NO: 64308 - DNA, 17 bp, Arabidopsis thaliana
caccactcgaccacaac

SEQ ID NO: 64309 - DNA, 17 bp, Arabidopsis thaliana
caccactcgtgccaagg

SEQ ID NO: 64310 - DNA, 17 bp, Arabidopsis thaliana
caccactgagacccttg

SEQ ID NO: 64311 - DNA, 17 bp, Arabidopsis thaliana
caccactgctctatctg

SEQ ID NO: 64312 - DNA, 17 bp, Arabidopsis thaliana
caccacttgcttctaaa

SEQ ID NO: 64313 - DNA, 17 bp, Arabidopsis thaliana
caccacttggacggccg

SEQ ID NO: 64314 - DNA, 17 bp, Arabidopsis thaliana
caccacttgtggctact

SEQ ID NO: 64315 - DNA, 17 bp, Arabidopsis thaliana
caccacttttccggcat

SEQ ID NO: 64316 - DNA, 17 bp, Arabidopsis thaliana
caccacttttggcaaac

SEQ ID NO: 64317 - DNA, 17 bp, Arabidopsis thaliana
caccagaaccacctgac

SEQ ID NO: 64318 - DNA, 17 bp, Arabidopsis thaliana
caccagacgatccgaat

SEQ ID NO: 64319 - DNA, 17 bp, Arabidopsis thaliana
caccagactatctcgtt

SEQ ID NO: 64320 - DNA, 17 bp, Arabidopsis thaliana
caccagacttgttttcc

SEQ ID NO: 64321 - DNA, 17 bp, Arabidopsis thaliana
caccagaggttagggtc

SEQ ID NO: 64322 - DNA, 17 bp, Arabidopsis thaliana
caccagagttctactac

SEQ ID NO: 64323 - DNA, 17 bp, Arabidopsis thaliana
caccagatgtgattggt

SEQ ID NO: 64324 - DNA, 17 bp, Arabidopsis thaliana
caccagattagtccgca

SEQ ID NO: 64325 - DNA, 17 bp, Arabidopsis thaliana
caccagccgggaaacga

SEQ ID NO: 64326 - DNA, 17 bp, Arabidopsis thaliana
caccagccgggaaacgg

SEQ ID NO: 64327 - DNA, 17 bp, Arabidopsis thaliana
caccagcgacaggcaaa

SEQ ID NO: 64328 - DNA, 17 bp, Arabidopsis thaliana
caccagcgccgccacca

SEQ ID NO: 64329 - DNA, 17 bp, Arabidopsis thaliana
caccagctacagccgct

SEQ ID NO: 64330 - DNA, 17 bp, Arabidopsis thaliana
caccagctgttgcggcg

SEQ ID NO: 64331 - DNA, 17 bp, Arabidopsis thaliana
caccaggaagttctggg

SEQ ID NO: 64332 - DNA, 17 bp, Arabidopsis thaliana
caccaggaccacttgat

SEQ ID NO: 64333 - DNA, 17 bp, Arabidopsis thaliana
caccaggaccgcttgat

SEQ ID NO: 64334 - DNA, 17 bp, Arabidopsis thaliana
caccaggagtgaagcca

SEQ ID NO: 64335 - DNA, 17 bp, Arabidopsis thaliana
caccaggagtggaccct

SEQ ID NO: 64336 - DNA, 17 bp, Arabidopsis thaliana
caccaggagtggagcct

SEQ ID NO: 64337 - DNA, 17 bp, Arabidopsis thaliana
caccaggagtggtgcct

SEQ ID NO: 64338 - DNA, 17 bp, Arabidopsis thaliana
caccaggattggagcct

SEQ ID NO: 64339 - DNA, 17 bp, Arabidopsis thaliana
caccaggattgtgtcga

SEQ ID NO: 64340 - DNA, 17 bp, Arabidopsis thaliana
caccaggattttgttga

SEQ ID NO: 64341 - DNA, 17 bp, Arabidopsis thaliana
caccaggctctattttc

SEQ ID NO: 64342 - DNA, 17 bp, Arabidopsis thaliana
caccagggcaagatcct

SEQ ID NO: 64343 - DNA, 17 bp, Arabidopsis thaliana
caccaggtcgtcaagga

SEQ ID NO: 64344 - DNA, 17 bp, Arabidopsis thaliana
caccaggtcgtcaaggg

SEQ ID NO: 64345 - DNA, 17 bp, Arabidopsis thaliana
caccaggtctgaacagt

SEQ ID NO: 64346 - DNA, 17 bp, Arabidopsis thaliana
caccagtaacgcgatac

SEQ ID NO: 64347 - DNA, 17 bp, Arabidopsis thaliana
caccagtaatgcctctg

SEQ ID NO: 64348 - DNA, 17 bp, Arabidopsis thaliana
caccagttccaggggac

SEQ ID NO: 64349 - DNA, 17 bp, Arabidopsis thaliana
caccagttccagggggc

SEQ ID NO: 64350 - DNA, 17 bp, Arabidopsis thaliana
caccagttcgaatccgg

SEQ ID NO: 64351 - DNA, 17 bp, Arabidopsis thaliana
caccagtttcagtagat

SEQ ID NO: 64352 - DNA, 17 bp, Arabidopsis thaliana
caccagtttgttgtccg

SEQ ID NO: 64353 - DNA, 17 bp, Arabidopsis thaliana
caccataaatctgtggt

SEQ ID NO: 64354 - DNA, 17 bp, Arabidopsis thaliana
caccatagtttgcgtag

SEQ ID NO: 64355 - DNA, 17 bp, Arabidopsis thaliana
caccatattcctaaaac

SEQ ID NO: 64356 - DNA, 17 bp, Arabidopsis thaliana
caccatatttctgaaat

SEQ ID NO: 64357 - DNA, 17 bp, Arabidopsis thaliana
caccatcaagggcaatt

SEQ ID NO: 64358 - DNA, 17 bp, Arabidopsis thaliana
caccatcatcgttcggc

SEQ ID NO: 64359 - DNA, 17 bp, Arabidopsis thaliana
caccatcatcttctcag

SEQ ID NO: 64360 - DNA, 17 bp, Arabidopsis thaliana
caccatccaagcagtgt

SEQ ID NO: 64361 - DNA, 17 bp, Arabidopsis thaliana
caccatccaagtgtcgg

SEQ ID NO: 64362 - DNA, 17 bp, Arabidopsis thaliana
caccatccactagtagg

SEQ ID NO: 64363 - DNA, 17 bp, Arabidopsis thaliana
caccatccgggttcaat

SEQ ID NO: 64364 - DNA, 17 bp, Arabidopsis thaliana
caccatcctcgccatcc

SEQ ID NO: 64365 - DNA, 17 bp, Arabidopsis thaliana
caccatcgagacagatt

SEQ ID NO: 64366 - DNA, 17 bp, Arabidopsis thaliana
caccatcgctagttgct

SEQ ID NO: 64367 - DNA, 17 bp, Arabidopsis thaliana
caccatcggctggcgga

SEQ ID NO: 64368 - DNA, 17 bp, Arabidopsis thaliana
caccatcggtgacacat

SEQ ID NO: 64369 - DNA, 17 bp, Arabidopsis thaliana
caccatcggtttggaca

SEQ ID NO: 64370 - DNA, 17 bp, Arabidopsis thaliana
caccatcgtagtcgcca

SEQ ID NO: 64371 - DNA, 17 bp, Arabidopsis thaliana
caccatcgtcactacct

SEQ ID NO: 64372 - DNA, 17 bp, Arabidopsis thaliana
caccatctatttattga

SEQ ID NO: 64373 - DNA, 17 bp, Arabidopsis thaliana
caccatctcaagtcctg

SEQ ID NO: 64374 - DNA, 17 bp, Arabidopsis thaliana
caccatctctaagatgt

SEQ ID NO: 64375 - DNA, 17 bp, Arabidopsis thaliana
caccatcttcaccagct

SEQ ID NO: 64376 - DNA, 17 bp, Arabidopsis thaliana
caccatcttcaccaggt

SEQ ID NO: 64377 - DNA, 17 bp, Arabidopsis thaliana
caccatcttcgtcagag

SEQ ID NO: 64378 - DNA, 17 bp, Arabidopsis thaliana
caccatctttgggtttg

SEQ ID NO: 64379 - DNA, 17 bp, Arabidopsis thaliana
caccatctttggttcac

SEQ ID NO: 64380 - DNA, 17 bp, Arabidopsis thaliana
caccatgaaagctttga

SEQ ID NO: 64381 - DNA, 17 bp, Arabidopsis thaliana
caccatgaacgctttga

SEQ ID NO: 64382 - DNA, 17 bp, Arabidopsis thaliana
caccatgacaagcgttt

SEQ ID NO: 64383 - DNA, 17 bp, Arabidopsis thaliana
caccatgagtggatcct

SEQ ID NO: 64384 - DNA, 17 bp, Arabidopsis thaliana
caccatgctgttgacct

SEQ ID NO: 64385 - DNA, 17 bp, Arabidopsis thaliana
caccatggctattttgt

SEQ ID NO: 64386 - DNA, 17 bp, Arabidopsis thaliana
caccattaacccgtgac

SEQ ID NO: 64387 - DNA, 17 bp, Arabidopsis thaliana
caccattaatcattaca

SEQ ID NO: 64388 - DNA, 17 bp, Arabidopsis thaliana
caccattacctctactc

SEQ ID NO: 64389 - DNA, 17 bp, Arabidopsis thaliana
caccattaggtgtgtga

SEQ ID NO: 64390 - DNA, 17 bp, Arabidopsis thaliana
caccattatcgctatcg

SEQ ID NO: 64391 - DNA, 17 bp, Arabidopsis thaliana
caccattcagttcgagt

SEQ ID NO: 64392 - DNA, 17 bp, Arabidopsis thaliana
caccattctgtgaatgt

SEQ ID NO: 64393 - DNA, 17 bp, Arabidopsis thaliana
caccattgacaaagccg

SEQ ID NO: 64394 - DNA, 17 bp, Arabidopsis thaliana
caccattgctggtgcag

SEQ ID NO: 64395 - DNA, 17 bp, Arabidopsis thaliana
caccatttaagtgaatg

SEQ ID NO: 64396 - DNA, 17 bp, Arabidopsis thaliana
caccatttatcgcttgg

SEQ ID NO: 64397 - DNA, 17 bp, Arabidopsis thaliana
caccatttgaggatgtt

SEQ ID NO: 64398 - DNA, 17 bp, Arabidopsis thaliana
caccatttgcggaccat

SEQ ID NO: 64399 - DNA, 17 bp, Arabidopsis thaliana
caccatttgtgattgct

SEQ ID NO: 64400 - DNA, 17 bp, Arabidopsis thaliana
caccattttcagatcca

SEQ ID NO: 64401 - DNA, 17 bp, Arabidopsis thaliana
caccattttcgtgattt

SEQ ID NO: 64402 - DNA, 17 bp, Arabidopsis thaliana
cacccaaaaccgcaccg

SEQ ID NO: 64403 - DNA, 17 bp, Arabidopsis thaliana
cacccaaaaccgcactg

SEQ ID NO: 64404 - DNA, 17 bp, Arabidopsis thaliana
cacccaaaatttaccgg

SEQ ID NO: 64405 - DNA, 17 bp, Arabidopsis thaliana
cacccaaatggagagag

SEQ ID NO: 64406 - DNA, 17 bp, Arabidopsis thaliana
cacccaaggatgacttg

SEQ ID NO: 64407 - DNA, 17 bp, Arabidopsis thaliana
cacccaagggttcctcc

SEQ ID NO: 64408 - DNA, 17 bp, Arabidopsis thaliana
cacccaataacaaatcc

SEQ ID NO: 64409 - DNA, 17 bp, Arabidopsis thaliana
cacccaatctatcattg

SEQ ID NO: 64410 - DNA, 17 bp, Arabidopsis thaliana
cacccacaaaaccgcac

SEQ ID NO: 64411 - DNA, 17 bp, Arabidopsis thaliana
cacccacaaagggtgtt

SEQ ID NO: 64412 - DNA, 17 bp, Arabidopsis thaliana
cacccacagacgcacga

SEQ ID NO: 64413 - DNA, 17 bp, Arabidopsis thaliana
cacccacatcgactgta

SEQ ID NO: 64414 - DNA, 17 bp, Arabidopsis thaliana
cacccacatgtacacag

SEQ ID NO: 64415 - DNA, 17 bp, Arabidopsis thaliana
cacccacatttcgagga

SEQ ID NO: 64416 - DNA, 17 bp, Arabidopsis thaliana
cacccacatttgctctt

SEQ ID NO: 64417 - DNA, 17 bp, Arabidopsis thaliana
cacccaccaatagggaa

SEQ ID NO: 64418 - DNA, 17 bp, Arabidopsis thaliana
cacccaccaccaggaat

SEQ ID NO: 64419 - DNA, 17 bp, Arabidopsis thaliana
cacccaccaccaggagt

SEQ ID NO: 64420 - DNA, 17 bp, Arabidopsis thaliana
cacccaccactaagcac

SEQ ID NO: 64421 - DNA, 17 bp, Arabidopsis thaliana
cacccaccatcggtttg

SEQ ID NO: 64422 - DNA, 17 bp, Arabidopsis thaliana
cacccaccccaagatga

SEQ ID NO: 64423 - DNA, 17 bp, Arabidopsis thaliana
cacccaccgcatagtgc

SEQ ID NO: 64424 - DNA, 17 bp, Arabidopsis thaliana
cacccaccgccagtagc

SEQ ID NO: 64425 - DNA, 17 bp, Arabidopsis thaliana
cacccaccgttgagttt

SEQ ID NO: 64426 - DNA, 17 bp, Arabidopsis thaliana
cacccacctcgatgtcg

SEQ ID NO: 64427 - DNA, 17 bp, Arabidopsis thaliana
cacccacctgacagatc

SEQ ID NO: 64428 - DNA, 17 bp, Arabidopsis thaliana
cacccaccttgctgttc

SEQ ID NO: 64429 - DNA, 17 bp, Arabidopsis thaliana
cacccaccttggccgac

SEQ ID NO: 64430 - DNA, 17 bp, Arabidopsis thaliana
cacccaccttgtggtgc

SEQ ID NO: 64431 - DNA, 17 bp, Arabidopsis thaliana
cacccacggaccaagga

SEQ ID NO: 64432 - DNA, 17 bp, Arabidopsis thaliana
cacccacggatgtttcc

SEQ ID NO: 64433 - DNA, 17 bp, Arabidopsis thaliana
cacccacggggttcgat

SEQ ID NO: 64434 - DNA, 17 bp, Arabidopsis thaliana
cacccacggtactgacc

SEQ ID NO: 64435 - DNA, 17 bp, Arabidopsis thaliana
cacccacggtgactttg

SEQ ID NO: 64436 - DNA, 17 bp, Arabidopsis thaliana
cacccacggtggggtct

SEQ ID NO: 64437 - DNA, 17 bp, Arabidopsis thaliana
cacccacgtcgcgtggt

SEQ ID NO: 64438 - DNA, 17 bp, Arabidopsis thaliana
cacccacgtctgcctgg

SEQ ID NO: 64439 - DNA, 17 bp, Arabidopsis thaliana
cacccacgtctgcctgt

SEQ ID NO: 64440 - DNA, 17 bp, Arabidopsis thaliana
cacccacgtgtcgttgg

SEQ ID NO: 64441 - DNA, 17 bp, Arabidopsis thaliana
cacccacgttgtggccg

SEQ ID NO: 64442 - DNA, 17 bp, Arabidopsis thaliana
cacccacgtttaggcac

SEQ ID NO: 64443 - DNA, 17 bp, Arabidopsis thaliana
cacccactaccgctgtt

SEQ ID NO: 64444 - DNA, 17 bp, Arabidopsis thaliana
cacccactaggtctgaa

SEQ ID NO: 64445 - DNA, 17 bp, Arabidopsis thaliana
cacccactcatatggag

SEQ ID NO: 64446 - DNA, 17 bp, Arabidopsis thaliana
cacccactcattggtgt

SEQ ID NO: 64447 - DNA, 17 bp, Arabidopsis thaliana
cacccactgagattcat

SEQ ID NO: 64448 - DNA, 17 bp, Arabidopsis thaliana
cacccactgatttgttt

SEQ ID NO: 64449 - DNA, 17 bp, Arabidopsis thaliana
cacccactggaattttg

SEQ ID NO: 64450 - DNA, 17 bp, Arabidopsis thaliana
cacccactgggttatcg

SEQ ID NO: 64451 - DNA, 17 bp, Arabidopsis thaliana
cacccactggtctggtg

SEQ ID NO: 64452 - DNA, 17 bp, Arabidopsis thaliana
cacccactggtggagac

SEQ ID NO: 64453 - DNA, 17 bp, Arabidopsis thaliana
cacccacttctataacc

SEQ ID NO: 64454 - DNA, 17 bp, Arabidopsis thaliana
cacccacttgtacatgg

SEQ ID NO: 64455 - DNA, 17 bp, Arabidopsis thaliana
cacccacttgtatgggc

SEQ ID NO: 64456 - DNA, 17 bp, Arabidopsis thaliana
cacccactttgatgtgc

SEQ ID NO: 64457 - DNA, 17 bp, Arabidopsis thaliana
cacccactttggctcgg

SEQ ID NO: 64458 - DNA, 17 bp, Arabidopsis thaliana
cacccacttttacattt

SEQ ID NO: 64459 - DNA, 17 bp, Arabidopsis thaliana
cacccagagccgtgact

SEQ ID NO: 64460 - DNA, 17 bp, Arabidopsis thaliana
cacccaggagacccggg

SEQ ID NO: 64461 - DNA, 17 bp, Arabidopsis thaliana
cacccaggcaaacgtga

SEQ ID NO: 64462 - DNA, 17 bp, Arabidopsis thaliana
cacccaggcagacgtga

SEQ ID NO: 64463 - DNA, 17 bp, Arabidopsis thaliana
cacccaggcagacgtgc

SEQ ID NO: 64464 - DNA, 17 bp, Arabidopsis thaliana
cacccaggcagacgtgg

SEQ ID NO: 64465 - DNA, 17 bp, Arabidopsis thaliana
cacccagtcatctggat

SEQ ID NO: 64466 - DNA, 17 bp, Arabidopsis thaliana
cacccagttgtttggca

SEQ ID NO: 64467 - DNA, 17 bp, Arabidopsis thaliana
cacccatcagactgacg

SEQ ID NO: 64468 - DNA, 17 bp, Arabidopsis thaliana
cacccatgtcgcgtgtt

SEQ ID NO: 64469 - DNA, 17 bp, Arabidopsis thaliana
cacccatgtggattgac

SEQ ID NO: 64470 - DNA, 17 bp, Arabidopsis thaliana
cacccattcaggaactg

SEQ ID NO: 64471 - DNA, 17 bp, Arabidopsis thaliana
cacccattggacctgct

SEQ ID NO: 64472 - DNA, 17 bp, Arabidopsis thaliana
cacccatttcacatgtt

SEQ ID NO: 64473 - DNA, 17 bp, Arabidopsis thaliana
cacccatttgctcaagg

SEQ ID NO: 64474 - DNA, 17 bp, Arabidopsis thaliana
cacccatttgctcaagt

SEQ ID NO: 64475 - DNA, 17 bp, Arabidopsis thaliana
caccccaagatgagtgc

SEQ ID NO: 64476 - DNA, 17 bp, Arabidopsis thaliana
caccccaggtcaggcgg

SEQ ID NO: 64477 - DNA, 17 bp, Arabidopsis thaliana
caccccatcaaaaccac

SEQ ID NO: 64478 - DNA, 17 bp, Arabidopsis thaliana
caccccccatctaaatg

SEQ ID NO: 64479 - DNA, 17 bp, Arabidopsis thaliana
caccccccccccccccc

SEQ ID NO: 64480 - DNA, 17 bp, Arabidopsis thaliana
cacccccgacgagagag

SEQ ID NO: 64481 - DNA, 17 bp, Arabidopsis thaliana
cacccccggacttttgg

SEQ ID NO: 64482 - DNA, 17 bp, Arabidopsis thaliana
caccccctatagttgca

SEQ ID NO: 64483 - DNA, 17 bp, Arabidopsis thaliana
caccccgcccatctcct

SEQ ID NO: 64484 - DNA, 17 bp, Arabidopsis thaliana
caccccgtaggaactac

SEQ ID NO: 64485 - DNA, 17 bp, Arabidopsis thaliana
cacccctttgtcgctaa

SEQ ID NO: 64486 - DNA, 17 bp, Arabidopsis thaliana
cacccctttgtttgacc

SEQ ID NO: 64487 - DNA, 17 bp, Arabidopsis thaliana
cacccgaaagagactgc

SEQ ID NO: 64488 - DNA, 17 bp, Arabidopsis thaliana
cacccgaaagatggtga

SEQ ID NO: 64489 - DNA, 17 bp, Arabidopsis thaliana
cacccgaagcggttgtg

SEQ ID NO: 64490 - DNA, 17 bp, Arabidopsis thaliana
cacccgaccggagcagt

SEQ ID NO: 64491 - DNA, 17 bp, Arabidopsis thaliana
cacccgcaaagggtgtt

SEQ ID NO: 64492 - DNA, 17 bp, Arabidopsis thaliana
cacccgcagactcaggc

SEQ ID NO: 64493 - DNA, 17 bp, Arabidopsis thaliana
cacccgccatgtagaga

SEQ ID NO: 64494 - DNA, 17 bp, Arabidopsis thaliana
cacccgccatgtaggga

SEQ ID NO: 64495 - DNA, 17 bp, Arabidopsis thaliana
cacccgccgtctacagt

SEQ ID NO: 64496 - DNA, 17 bp, Arabidopsis thaliana
cacccgctatgtaggga

SEQ ID NO: 64497 - DNA, 17 bp, Arabidopsis thaliana
cacccggccgtcggggc

SEQ ID NO: 64498 - DNA, 17 bp, Arabidopsis thaliana
cacccgggcgaagccac

SEQ ID NO: 64499 - DNA, 17 bp, Arabidopsis thaliana
cacccgggttcgattcc

SEQ ID NO: 64500 - DNA, 17 bp, Arabidopsis thaliana
cacccgggttcgggtcc

SEQ ID NO: 64501 - DNA, 17 bp, Arabidopsis thaliana
cacccgggttcgtttcc

SEQ ID NO: 64502 - DNA, 17 bp, Arabidopsis thaliana
cacccgtatttgtagtt

SEQ ID NO: 64503 - DNA, 17 bp, Arabidopsis thaliana
cacccgtcatatcatct

SEQ ID NO: 64504 - DNA, 17 bp, Arabidopsis thaliana
cacccgtcgagcaggga

SEQ ID NO: 64505 - DNA, 17 bp, Arabidopsis thaliana
caccctaaagcgtgctc

SEQ ID NO: 64506 - DNA, 17 bp, Arabidopsis thaliana
caccctagatggcgaga

SEQ ID NO: 64507 - DNA, 17 bp, Arabidopsis thaliana
caccctatgaacggcct

SEQ ID NO: 64508 - DNA, 17 bp, Arabidopsis thaliana
caccctcaactttggcc

SEQ ID NO: 64509 - DNA, 17 bp, Arabidopsis thaliana
caccctcaccctcgttc

SEQ ID NO: 64510 - DNA, 17 bp, Arabidopsis thaliana
caccctcaggtcgagtt

SEQ ID NO: 64511 - DNA, 17 bp, Arabidopsis thaliana
caccctcggacttttgg

SEQ ID NO: 64512 - DNA, 17 bp, Arabidopsis thaliana
caccctcgtttctaata

SEQ ID NO: 64513 - DNA, 17 bp, Arabidopsis thaliana
caccctctcccacgctt

SEQ ID NO: 64514 - DNA, 17 bp, Arabidopsis thaliana
caccctctgggagagac

SEQ ID NO: 64515 - DNA, 17 bp, Arabidopsis thaliana
caccctcttctgggaca

SEQ ID NO: 64516 - DNA, 17 bp, Arabidopsis thaliana
caccctggaaacggctc

SEQ ID NO: 64517 - DNA, 17 bp, Arabidopsis thaliana
cacccttaggaagagat

SEQ ID NO: 64518 - DNA, 17 bp, Arabidopsis thaliana
cacccttctgcaatttt

SEQ ID NO: 64519 - DNA, 17 bp, Arabidopsis thaliana
cacccttggggaaatgc

SEQ ID NO: 64520 - DNA, 17 bp, Arabidopsis thaliana
cacccttggttgagtaa

SEQ ID NO: 64521 - DNA, 17 bp, Arabidopsis thaliana
caccctttgcctttcct

SEQ ID NO: 64522 - DNA, 17 bp, Arabidopsis thaliana
caccctttgtcgctaag

SEQ ID NO: 64523 - DNA, 17 bp, Arabidopsis thaliana
caccgaaatacttcaga

SEQ ID NO: 64524 - DNA, 17 bp, Arabidopsis thaliana
caccgaagagaaccact

SEQ ID NO: 64525 - DNA, 17 bp, Arabidopsis thaliana
caccgaaggattaccat

SEQ ID NO: 64526 - DNA, 17 bp, Arabidopsis thaliana
caccgaatggctgactt

SEQ ID NO: 64527 - DNA, 17 bp, Arabidopsis thaliana
caccgaattagggtcag

SEQ ID NO: 64528 - DNA, 17 bp, Arabidopsis thaliana
caccgacacggctgagg

SEQ ID NO: 64529 - DNA, 17 bp, Arabidopsis thaliana
caccgaccaaaagcacc

SEQ ID NO: 64530 - DNA, 17 bp, Arabidopsis thaliana
caccgaccgtcggacag

SEQ ID NO: 64531 - DNA, 17 bp, Arabidopsis thaliana
caccgacctctctaaac

SEQ ID NO: 64532 - DNA, 17 bp, Arabidopsis thaliana
caccgacgcggattacg

SEQ ID NO: 64533 - DNA, 17 bp, Arabidopsis thaliana
caccgagacttcccccc

SEQ ID NO: 64534 - DNA, 17 bp, Arabidopsis thaliana
caccgagacttcccgct

SEQ ID NO: 64535 - DNA, 17 bp, Arabidopsis thaliana
caccgagcggcgggtag

SEQ ID NO: 64536 - DNA, 17 bp, Arabidopsis thaliana
caccgaggcggcataca

SEQ ID NO: 64537 - DNA, 17 bp, Arabidopsis thaliana
caccgagggcacgtctg

SEQ ID NO: 64538 - DNA, 17 bp, Arabidopsis thaliana
caccgaggtacggttat

SEQ ID NO: 64539 - DNA, 17 bp, Arabidopsis thaliana
caccgagtggactaccc

SEQ ID NO: 64540 - DNA, 17 bp, Arabidopsis thaliana
caccgagtggacttaca

SEQ ID NO: 64541 - DNA, 17 bp, Arabidopsis thaliana
caccgagtggacttccc

SEQ ID NO: 64542 - DNA, 17 bp, Arabidopsis thaliana
caccgatcgtcttcatt

SEQ ID NO: 64543 - DNA, 17 bp, Arabidopsis thaliana
caccgatcgtgggacgg

SEQ ID NO: 64544 - DNA, 17 bp, Arabidopsis thaliana
caccgatctgaccaacc

SEQ ID NO: 64545 - DNA, 17 bp, Arabidopsis thaliana
caccgatgataatgccc

SEQ ID NO: 64546 - DNA, 17 bp, Arabidopsis thaliana
caccgattattgtgtac

SEQ ID NO: 64547 - DNA, 17 bp, Arabidopsis thaliana
caccgattccaaagtgt

SEQ ID NO: 64548 - DNA, 17 bp, Arabidopsis thaliana
caccgattcgaacccgg

SEQ ID NO: 64549 - DNA, 17 bp, Arabidopsis thaliana
caccgattggttgactt

SEQ ID NO: 64550 - DNA, 17 bp, Arabidopsis thaliana
caccgatttattgtccg

SEQ ID NO: 64551 - DNA, 17 bp, Arabidopsis thaliana
caccgatttgcgtggac

SEQ ID NO: 64552 - DNA, 17 bp, Arabidopsis thaliana
caccgcaaaacgcagtc

SEQ ID NO: 64553 - DNA, 17 bp, Arabidopsis thaliana
caccgcaaacggatctt

SEQ ID NO: 64554 - DNA, 17 bp, Arabidopsis thaliana
caccgcaaccggatctt

SEQ ID NO: 64555 - DNA, 17 bp, Arabidopsis thaliana
caccgcaactggattcc

SEQ ID NO: 64556 - DNA, 17 bp, Arabidopsis thaliana
caccgcaagcttgtgga

SEQ ID NO: 64557 - DNA, 17 bp, Arabidopsis thaliana
caccgcaccgcatttcc

SEQ ID NO: 64558 - DNA, 17 bp, Arabidopsis thaliana
caccgcacgtcgcgtgg

SEQ ID NO: 64559 - DNA, 17 bp, Arabidopsis thaliana
caccgcactatgcgatt

SEQ ID NO: 64560 - DNA, 17 bp, Arabidopsis thaliana
caccgcactgtgcgatt

SEQ ID NO: 64561 - DNA, 17 bp, Arabidopsis thaliana
caccgcacttctcccgc

SEQ ID NO: 64562 - DNA, 17 bp, Arabidopsis thaliana
caccgcacttttcaaat

SEQ ID NO: 64563 - DNA, 17 bp, Arabidopsis thaliana
caccgcagagacaattt

SEQ ID NO: 64564 - DNA, 17 bp, Arabidopsis thaliana
caccgcagggctacact

SEQ ID NO: 64565 - DNA, 17 bp, Arabidopsis thaliana
caccgcagggctacata

SEQ ID NO: 64566 - DNA, 17 bp, Arabidopsis thaliana
caccgcagggttacact

SEQ ID NO: 64567 - DNA, 17 bp, Arabidopsis thaliana
caccgcagtgtgtggtg

SEQ ID NO: 64568 - DNA, 17 bp, Arabidopsis thaliana
caccgcagtttgcgagg

SEQ ID NO: 64569 - DNA, 17 bp, Arabidopsis thaliana
caccgcatagtgcgatt

SEQ ID NO: 64570 - DNA, 17 bp, Arabidopsis thaliana
caccgccacatggcaga

SEQ ID NO: 64571 - DNA, 17 bp, Arabidopsis thaliana
caccgccagtagcaggg

SEQ ID NO: 64572 - DNA, 17 bp, Arabidopsis thaliana
caccgccattgtagtca

SEQ ID NO: 64573 - DNA, 17 bp, Arabidopsis thaliana
caccgccccgcgctcac

SEQ ID NO: 64574 - DNA, 17 bp, Arabidopsis thaliana
caccgcccgattgccga

SEQ ID NO: 64575 - DNA, 17 bp, Arabidopsis thaliana
caccgcccgtcacacta

SEQ ID NO: 64576 - DNA, 17 bp, Arabidopsis thaliana
caccgcccgtcgctcct

SEQ ID NO: 64577 - DNA, 17 bp, Arabidopsis thaliana
caccgcccgtctctcct

SEQ ID NO: 64578 - DNA, 17 bp, Arabidopsis thaliana
caccgccgaccgacctt

SEQ ID NO: 64579 - DNA, 17 bp, Arabidopsis thaliana
caccgccggcgctcgtc

SEQ ID NO: 64580 - DNA, 17 bp, Arabidopsis thaliana
caccgccgtctacaccg

SEQ ID NO: 64581 - DNA, 17 bp, Arabidopsis thaliana
caccgccgtgatgacct

SEQ ID NO: 64582 - DNA, 17 bp, Arabidopsis thaliana
caccgccgttgccggaa

SEQ ID NO: 64583 - DNA, 17 bp, Arabidopsis thaliana
caccgccttcgctccta

SEQ ID NO: 64584 - DNA, 17 bp, Arabidopsis thaliana
caccgcgaagggacgct

SEQ ID NO: 64585 - DNA, 17 bp, Arabidopsis thaliana
caccgcgacaccaccag

SEQ ID NO: 64586 - DNA, 17 bp, Arabidopsis thaliana
caccgcggtgacaatct

SEQ ID NO: 64587 - DNA, 17 bp, Arabidopsis thaliana
caccgcggtgacaattt

SEQ ID NO: 64588 - DNA, 17 bp, Arabidopsis thaliana
caccgctaccttgtggt

SEQ ID NO: 64589 - DNA, 17 bp, Arabidopsis thaliana
caccgctataccggatg

SEQ ID NO: 64590 - DNA, 17 bp, Arabidopsis thaliana
caccgctcgtcgctcct

SEQ ID NO: 64591 - DNA, 17 bp, Arabidopsis thaliana
caccgctgagtatgtat

SEQ ID NO: 64592 - DNA, 17 bp, Arabidopsis thaliana
caccgctggaactccct

SEQ ID NO: 64593 - DNA, 17 bp, Arabidopsis thaliana
caccgctgggcatggac

SEQ ID NO: 64594 - DNA, 17 bp, Arabidopsis thaliana
caccgctgggcatggtc

SEQ ID NO: 64595 - DNA, 17 bp, Arabidopsis thaliana
caccgcttgctacttgg

SEQ ID NO: 64596 - DNA, 17 bp, Arabidopsis thaliana
caccgcttttcagccac

SEQ ID NO: 64597 - DNA, 17 bp, Arabidopsis thaliana
caccgctttttctcaat

SEQ ID NO: 64598 - DNA, 17 bp, Arabidopsis thaliana
caccggaaaggcttgtc

SEQ ID NO: 64599 - DNA, 17 bp, Arabidopsis thaliana
caccggactgtgccaca

SEQ ID NO: 64600 - DNA, 17 bp, Arabidopsis thaliana
caccggactttgttgat

SEQ ID NO: 64601 - DNA, 17 bp, Arabidopsis thaliana
caccggataaactcagt

SEQ ID NO: 64602 - DNA, 17 bp, Arabidopsis thaliana
caccggatccaccgtag

SEQ ID NO: 64603 - DNA, 17 bp, Arabidopsis thaliana
caccggatcccatcaga

SEQ ID NO: 64604 - DNA, 17 bp, Arabidopsis thaliana
caccggatctggcgatt

SEQ ID NO: 64605 - DNA, 17 bp, Arabidopsis thaliana
caccggatgaattccct

SEQ ID NO: 64606 - DNA, 17 bp, Arabidopsis thaliana
caccggatggcaatgtg

SEQ ID NO: 64607 - DNA, 17 bp, Arabidopsis thaliana
caccggcaaatgtcggc

SEQ ID NO: 64608 - DNA, 17 bp, Arabidopsis thaliana
caccggcattgacgagt

SEQ ID NO: 64609 - DNA, 17 bp, Arabidopsis thaliana
caccggcgctgttgctt

SEQ ID NO: 64610 - DNA, 17 bp, Arabidopsis thaliana
caccggcggaaatggcg

SEQ ID NO: 64611 - DNA, 17 bp, Arabidopsis thaliana
caccggctggcggactg

SEQ ID NO: 64612 - DNA, 17 bp, Arabidopsis thaliana
caccggctgttgtggtt

SEQ ID NO: 64613 - DNA, 17 bp, Arabidopsis thaliana
caccgggtgccgtagcc

SEQ ID NO: 64614 - DNA, 17 bp, Arabidopsis thaliana
caccgggtgggacccag

SEQ ID NO: 64615 - DNA, 17 bp, Arabidopsis thaliana
caccggtgtgacctgcc

SEQ ID NO: 64616 - DNA, 17 bp, Arabidopsis thaliana
caccggttcggatccgg

SEQ ID NO: 64617 - DNA, 17 bp, Arabidopsis thaliana
caccggttcgtatccgg

SEQ ID NO: 64618 - DNA, 17 bp, Arabidopsis thaliana
caccggttttgcaatga

SEQ ID NO: 64619 - DNA, 17 bp, Arabidopsis thaliana
caccgtaaacctgttgg

SEQ ID NO: 64620 - DNA, 17 bp, Arabidopsis thaliana
caccgtaccccttctgt

SEQ ID NO: 64621 - DNA, 17 bp, Arabidopsis thaliana
caccgtacttgtcccgc

SEQ ID NO: 64622 - DNA, 17 bp, Arabidopsis thaliana
caccgtatccattgaga

SEQ ID NO: 64623 - DNA, 17 bp, Arabidopsis thaliana
caccgtccgcttatcgt

SEQ ID NO: 64624 - DNA, 17 bp, Arabidopsis thaliana
caccgtccgtttcatct

SEQ ID NO: 64625 - DNA, 17 bp, Arabidopsis thaliana
caccgtcgcctcgacct

SEQ ID NO: 64626 - DNA, 17 bp, Arabidopsis thaliana
caccgtcgtgtagacac

SEQ ID NO: 64627 - DNA, 17 bp, Arabidopsis thaliana
caccgtctcttagatct

SEQ ID NO: 64628 - DNA, 17 bp, Arabidopsis thaliana
caccgtctgcctgggtg

SEQ ID NO: 64629 - DNA, 17 bp, Arabidopsis thaliana
caccgtctgcctgtgtc

SEQ ID NO: 64630 - DNA, 17 bp, Arabidopsis thaliana
caccgtgaggccaaact

SEQ ID NO: 64631 - DNA, 17 bp, Arabidopsis thaliana
caccgtgatctttgcag

SEQ ID NO: 64632 - DNA, 17 bp, Arabidopsis thaliana
caccgtgctttctccca

SEQ ID NO: 64633 - DNA, 17 bp, Arabidopsis thaliana
caccgtgggtcccaccc

SEQ ID NO: 64634 - DNA, 17 bp, Arabidopsis thaliana
caccgtgtcttcttgca

SEQ ID NO: 64635 - DNA, 17 bp, Arabidopsis thaliana
caccgtgtgattccaag

SEQ ID NO: 64636 - DNA, 17 bp, Arabidopsis thaliana
caccgtgtttctcctgt

SEQ ID NO: 64637 - DNA, 17 bp, Arabidopsis thaliana
caccgttcaatccgccg

SEQ ID NO: 64638 - DNA, 17 bp, Arabidopsis thaliana
caccgttcaatccgctg

SEQ ID NO: 64639 - DNA, 17 bp, Arabidopsis thaliana
caccgttcaccgatgtt

SEQ ID NO: 64640 - DNA, 17 bp, Arabidopsis thaliana
caccgttccgtaaagat

SEQ ID NO: 64641 - DNA, 17 bp, Arabidopsis thaliana
caccgttgagaggttga

SEQ ID NO: 64642 - DNA, 17 bp, Arabidopsis thaliana
caccgttgagtttggaa

SEQ ID NO: 64643 - DNA, 17 bp, Arabidopsis thaliana
caccgtttcccggctgg

SEQ ID NO: 64644 - DNA, 17 bp, Arabidopsis thaliana
caccgtttcttgtgatt

SEQ ID NO: 64645 - DNA, 17 bp, Arabidopsis thaliana
caccgtttgcggttgcg

SEQ ID NO: 64646 - DNA, 17 bp, Arabidopsis thaliana
caccgtttttcggtttg

SEQ ID NO: 64647 - DNA, 17 bp, Arabidopsis thaliana
cacctaaaaccgcaatg

SEQ ID NO: 64648 - DNA, 17 bp, Arabidopsis thaliana
cacctaaacagagtgtc

SEQ ID NO: 64649 - DNA, 17 bp, Arabidopsis thaliana
cacctaaagggattacg

SEQ ID NO: 64650 - DNA, 17 bp, Arabidopsis thaliana
cacctacaggatgcgac

SEQ ID NO: 64651 - DNA, 17 bp, Arabidopsis thaliana
cacctacaggatgcgga

SEQ ID NO: 64652 - DNA, 17 bp, Arabidopsis thaliana
cacctacgcggattgct

SEQ ID NO: 64653 - DNA, 17 bp, Arabidopsis thaliana
cacctacttcttggttg

SEQ ID NO: 64654 - DNA, 17 bp, Arabidopsis thaliana
cacctactttgtccgct

SEQ ID NO: 64655 - DNA, 17 bp, Arabidopsis thaliana
cacctagtgactggttg

SEQ ID NO: 64656 - DNA, 17 bp, Arabidopsis thaliana
cacctatattggactgg

SEQ ID NO: 64657 - DNA, 17 bp, Arabidopsis thaliana
cacctatctaggttagg

SEQ ID NO: 64658 - DNA, 17 bp, Arabidopsis thaliana
cacctatgatagatcat

SEQ ID NO: 64659 - DNA, 17 bp, Arabidopsis thaliana
cacctatgtggcccata

SEQ ID NO: 64660 - DNA, 17 bp, Arabidopsis thaliana
cacctattagctcagtg

SEQ ID NO: 64661 - DNA, 17 bp, Arabidopsis thaliana
cacctattgccatggct

SEQ ID NO: 64662 - DNA, 17 bp, Arabidopsis thaliana
cacctcaagatgagtgc

SEQ ID NO: 64663 - DNA, 17 bp, Arabidopsis thaliana
cacctcagcactatgca

SEQ ID NO: 64664 - DNA, 17 bp, Arabidopsis thaliana
cacctcagcactatgta

SEQ ID NO: 64665 - DNA, 17 bp, Arabidopsis thaliana
cacctcaggattggctc

SEQ ID NO: 64666 - DNA, 17 bp, Arabidopsis thaliana
cacctcatgtgtgctgc

SEQ ID NO: 64667 - DNA, 17 bp, Arabidopsis thaliana
cacctccattgatgttg

SEQ ID NO: 64668 - DNA, 17 bp, Arabidopsis thaliana
cacctcccccccccccc

SEQ ID NO: 64669 - DNA, 17 bp, Arabidopsis thaliana
cacctccgaagacactc

SEQ ID NO: 64670 - DNA, 17 bp, Arabidopsis thaliana
cacctccgccgcagacg

SEQ ID NO: 64671 - DNA, 17 bp, Arabidopsis thaliana
cacctccgtcacaggct

SEQ ID NO: 64672 - DNA, 17 bp, Arabidopsis thaliana
cacctcctccttagcca

SEQ ID NO: 64673 - DNA, 17 bp, Arabidopsis thaliana
cacctcgaccggcgtta

SEQ ID NO: 64674 - DNA, 17 bp, Arabidopsis thaliana
cacctcgacggatcatg

SEQ ID NO: 64675 - DNA, 17 bp, Arabidopsis thaliana
cacctcgatgtcggctc

SEQ ID NO: 64676 - DNA, 17 bp, Arabidopsis thaliana
cacctcgatttcaggaa

SEQ ID NO: 64677 - DNA, 17 bp, Arabidopsis thaliana
cacctcgcgacaggcga

SEQ ID NO: 64678 - DNA, 17 bp, Arabidopsis thaliana
cacctcgtcgattactt

SEQ ID NO: 64679 - DNA, 17 bp, Arabidopsis thaliana
cacctcgtgcttgtttt

SEQ ID NO: 64680 - DNA, 17 bp, Arabidopsis thaliana
cacctcgttaccaccat

SEQ ID NO: 64681 - DNA, 17 bp, Arabidopsis thaliana
cacctctaagtatgcta

SEQ ID NO: 64682 - DNA, 17 bp, Arabidopsis thaliana
cacctctactgtgttct

SEQ ID NO: 64683 - DNA, 17 bp, Arabidopsis thaliana
cacctctacttctatta

SEQ ID NO: 64684 - DNA, 17 bp, Arabidopsis thaliana
cacctctcggcaacgga

SEQ ID NO: 64685 - DNA, 17 bp, Arabidopsis thaliana
cacctctgctgtatgca

SEQ ID NO: 64686 - DNA, 17 bp, Arabidopsis thaliana
cacctctggagcttaaa

SEQ ID NO: 64687 - DNA, 17 bp, Arabidopsis thaliana
cacctctgtcgattaag

SEQ ID NO: 64688 - DNA, 17 bp, Arabidopsis thaliana
cacctcttacagacccg

SEQ ID NO: 64689 - DNA, 17 bp, Arabidopsis thaliana
cacctcttatgccacta

SEQ ID NO: 64690 - DNA, 17 bp, Arabidopsis thaliana
cacctcttatgccatta

SEQ ID NO: 64691 - DNA, 17 bp, Arabidopsis thaliana
cacctcttcccggctgg

SEQ ID NO: 64692 - DNA, 17 bp, Arabidopsis thaliana
cacctcttggaaaggcc

SEQ ID NO: 64693 - DNA, 17 bp, Arabidopsis thaliana
cacctcttggtgtaaaa

SEQ ID NO: 64694 - DNA, 17 bp, Arabidopsis thaliana
cacctgaactatgcgtt

SEQ ID NO: 64695 - DNA, 17 bp, Arabidopsis thaliana
cacctgacagatccatc

SEQ ID NO: 64696 - DNA, 17 bp, Arabidopsis thaliana
cacctgaggattatgga

SEQ ID NO: 64697 - DNA, 17 bp, Arabidopsis thaliana
cacctgaggcacagggt

SEQ ID NO: 64698 - DNA, 17 bp, Arabidopsis thaliana
cacctgcatttctgact

SEQ ID NO: 64699 - DNA, 17 bp, Arabidopsis thaliana
cacctgccatgggcgtc

SEQ ID NO: 64700 - DNA, 17 bp, Arabidopsis thaliana
cacctgccgaatcaact

SEQ ID NO: 64701 - DNA, 17 bp, Arabidopsis thaliana
cacctgctgctgagtct

SEQ ID NO: 64702 - DNA, 17 bp, Arabidopsis thaliana
cacctgctggagctgat

SEQ ID NO: 64703 - DNA, 17 bp, Arabidopsis thaliana
cacctgggactgttgag

SEQ ID NO: 64704 - DNA, 17 bp, Arabidopsis thaliana
cacctggtcgttcagtt

SEQ ID NO: 64705 - DNA, 17 bp, Arabidopsis thaliana
cacctggtgtggatccc

SEQ ID NO: 64706 - DNA, 17 bp, Arabidopsis thaliana
cacctgtcacaattatg

SEQ ID NO: 64707 - DNA, 17 bp, Arabidopsis thaliana
cacctgtgagtccaggt

SEQ ID NO: 64708 - DNA, 17 bp, Arabidopsis thaliana
cacctgtgcaaatattg

SEQ ID NO: 64709 - DNA, 17 bp, Arabidopsis thaliana
cacctgttccaacacat

SEQ ID NO: 64710 - DNA, 17 bp, Arabidopsis thaliana
cacctgtttcacagacg

SEQ ID NO: 64711 - DNA, 17 bp, Arabidopsis thaliana
caccttcaagaccttat

SEQ ID NO: 64712 - DNA, 17 bp, Arabidopsis thaliana
caccttcaaggtaaacc

SEQ ID NO: 64713 - DNA, 17 bp, Arabidopsis thaliana
caccttcacctgagact

SEQ ID NO: 64714 - DNA, 17 bp, Arabidopsis thaliana
caccttccttgaggttt

SEQ ID NO: 64715 - DNA, 17 bp, Arabidopsis thaliana
caccttcgatgttgtta

SEQ ID NO: 64716 - DNA, 17 bp, Arabidopsis thaliana
caccttcgatgttgttt

SEQ ID NO: 64717 - DNA, 17 bp, Arabidopsis thaliana
caccttcggacttttgg

SEQ ID NO: 64718 - DNA, 17 bp, Arabidopsis thaliana
caccttcggtgcggtgg

SEQ ID NO: 64719 - DNA, 17 bp, Arabidopsis thaliana
caccttcggtgtgactg

SEQ ID NO: 64720 - DNA, 17 bp, Arabidopsis thaliana
caccttctgggtgcggg

SEQ ID NO: 64721 - DNA, 17 bp, Arabidopsis thaliana
caccttcttgtggcttt

SEQ ID NO: 64722 - DNA, 17 bp, Arabidopsis thaliana
caccttgaccttgtcgt

SEQ ID NO: 64723 - DNA, 17 bp, Arabidopsis thaliana
caccttgacgatctgcg

SEQ ID NO: 64724 - DNA, 17 bp, Arabidopsis thaliana
caccttgatggtgcaag

SEQ ID NO: 64725 - DNA, 17 bp, Arabidopsis thaliana
caccttgcaaggagtgg

SEQ ID NO: 64726 - DNA, 17 bp, Arabidopsis thaliana
caccttgcaaggctaaa

SEQ ID NO: 64727 - DNA, 17 bp, Arabidopsis thaliana
caccttgctgttctagg

SEQ ID NO: 64728 - DNA, 17 bp, Arabidopsis thaliana
caccttggccgacaggc

SEQ ID NO: 64729 - DNA, 17 bp, Arabidopsis thaliana
caccttgggatgggtcg

SEQ ID NO: 64730 - DNA, 17 bp, Arabidopsis thaliana
caccttgggcaaagagt

SEQ ID NO: 64731 - DNA, 17 bp, Arabidopsis thaliana
caccttggtgcaggtcg

SEQ ID NO: 64732 - DNA, 17 bp, Arabidopsis thaliana
caccttgtaaacggccg

SEQ ID NO: 64733 - DNA, 17 bp, Arabidopsis thaliana
caccttgtcttccggtg

SEQ ID NO: 64734 - DNA, 17 bp, Arabidopsis thaliana
caccttgtggtgcagaa

SEQ ID NO: 64735 - DNA, 17 bp, Arabidopsis thaliana
cacctttagggtgaacc

SEQ ID NO: 64736 - DNA, 17 bp, Arabidopsis thaliana
cacctttccttgagtct

SEQ ID NO: 64737 - DNA, 17 bp, Arabidopsis thaliana
cacctttgcgacgcgta

SEQ ID NO: 64738 - DNA, 17 bp, Arabidopsis thaliana
cacctttgggatggaga

SEQ ID NO: 64739 - DNA, 17 bp, Arabidopsis thaliana
cacctttggtttttcca

SEQ ID NO: 64740 - DNA, 17 bp, Arabidopsis thaliana
caccttttcaccgtcca

SEQ ID NO: 64741 - DNA, 17 bp, Arabidopsis thaliana
caccttttcagatcgcc

SEQ ID NO: 64742 - DNA, 17 bp, Arabidopsis thaliana
caccttttcggaaagcc

SEQ ID NO: 64743 - DNA, 17 bp, Arabidopsis thaliana
caccttttggtttgctt

SEQ ID NO: 64744 - DNA, 17 bp, Arabidopsis thaliana
cacgaaaaatatctgcc

SEQ ID NO: 64745 - DNA, 17 bp, Arabidopsis thaliana
cacgaaaatgcaaatag

SEQ ID NO: 64746 - DNA, 17 bp, Arabidopsis thaliana
cacgaaacagagcaaca

SEQ ID NO: 64747 - DNA, 17 bp, Arabidopsis thaliana
cacgaaactgcgaataa

SEQ ID NO: 64748 - DNA, 17 bp, Arabidopsis thaliana
cacgaaacttaaggatc

SEQ ID NO: 64749 - DNA, 17 bp, Arabidopsis thaliana
cacgaaatcgatttctt

SEQ ID NO: 64750 - DNA, 17 bp, Arabidopsis thaliana
cacgaacaaatgaaatc

SEQ ID NO: 64751 - DNA, 17 bp, Arabidopsis thaliana
cacgaacaaggttctca

SEQ ID NO: 64752 - DNA, 17 bp, Arabidopsis thaliana
cacgaacaatgttctca

SEQ ID NO: 64753 - DNA, 17 bp, Arabidopsis thaliana
cacgaacgattccagat

SEQ ID NO: 64754 - DNA, 17 bp, Arabidopsis thaliana
cacgaacggaccggcag

SEQ ID NO: 64755 - DNA, 17 bp, Arabidopsis thaliana
cacgaacgttgttgcgg

SEQ ID NO: 64756 - DNA, 17 bp, Arabidopsis thaliana
cacgaactatccagcca

SEQ ID NO: 64757 - DNA, 17 bp, Arabidopsis thaliana
cacgaacttggtgacaa

SEQ ID NO: 64758 - DNA, 17 bp, Arabidopsis thaliana
cacgaacttggttccaa

SEQ ID NO: 64759 - DNA, 17 bp, Arabidopsis thaliana
cacgaagagcatgatgg

SEQ ID NO: 64760 - DNA, 17 bp, Arabidopsis thaliana
cacgaaggagaagccgc

SEQ ID NO: 64761 - DNA, 17 bp, Arabidopsis thaliana
cacgaagtcctcgtgtt

SEQ ID NO: 64762 - DNA, 17 bp, Arabidopsis thaliana
cacgaatcagcgtcttc

SEQ ID NO: 64763 - DNA, 17 bp, Arabidopsis thaliana
cacgaatccatgagaca

SEQ ID NO: 64764 - DNA, 17 bp, Arabidopsis thaliana
cacgaatccgagtttct

SEQ ID NO: 64765 - DNA, 17 bp, Arabidopsis thaliana
cacgaatcgaagtattc

SEQ ID NO: 64766 - DNA, 17 bp, Arabidopsis thaliana
cacgaatctttcgagcc

SEQ ID NO: 64767 - DNA, 17 bp, Arabidopsis thaliana
cacgaatgggtgggccg

SEQ ID NO: 64768 - DNA, 17 bp, Arabidopsis thaliana
cacgaatggtgtaacga

SEQ ID NO: 64769 - DNA, 17 bp, Arabidopsis thaliana
cacgaattctctgtctt

SEQ ID NO: 64770 - DNA, 17 bp, Arabidopsis thaliana
cacgaattcttcgcgtc

SEQ ID NO: 64771 - DNA, 17 bp, Arabidopsis thaliana
cacgaattggtggtcat

SEQ ID NO: 64772 - DNA, 17 bp, Arabidopsis thaliana
cacgacaagtaggaagg

SEQ ID NO: 64773 - DNA, 17 bp, Arabidopsis thaliana
cacgacaagtaggacat

SEQ ID NO: 64774 - DNA, 17 bp, Arabidopsis thaliana
cacgaccacgactaccg

SEQ ID NO: 64775 - DNA, 17 bp, Arabidopsis thaliana
cacgaccaggcttcatt

SEQ ID NO: 64776 - DNA, 17 bp, Arabidopsis thaliana
cacgaccgtttggttaa

SEQ ID NO: 64777 - DNA, 17 bp, Arabidopsis thaliana
cacgaccttcttgaccg

SEQ ID NO: 64778 - DNA, 17 bp, Arabidopsis thaliana
cacgacgaaaattttga

SEQ ID NO: 64779 - DNA, 17 bp, Arabidopsis thaliana
cacgacgtctctgcgct

SEQ ID NO: 64780 - DNA, 17 bp, Arabidopsis thaliana
cacgacgtgtggtttgt

SEQ ID NO: 64781 - DNA, 17 bp, Arabidopsis thaliana
cacgacgttcggtcctg

SEQ ID NO: 64782 - DNA, 17 bp, Arabidopsis thaliana
cacgactaactcagccg

SEQ ID NO: 64783 - DNA, 17 bp, Arabidopsis thaliana
cacgactaccctgtcca

SEQ ID NO: 64784 - DNA, 17 bp, Arabidopsis thaliana
cacgactaccgaggtgc

SEQ ID NO: 64785 - DNA, 17 bp, Arabidopsis thaliana
cacgactactcagatgg

SEQ ID NO: 64786 - DNA, 17 bp, Arabidopsis thaliana
cacgactagatggttat

SEQ ID NO: 64787 - DNA, 17 bp, Arabidopsis thaliana
cacgactaggctacaaa

SEQ ID NO: 64788 - DNA, 17 bp, Arabidopsis thaliana
cacgactatgccactcc

SEQ ID NO: 64789 - DNA, 17 bp, Arabidopsis thaliana
cacgactcctacgttgt

SEQ ID NO: 64790 - DNA, 17 bp, Arabidopsis thaliana
cacgactctaagtgaaa

SEQ ID NO: 64791 - DNA, 17 bp, Arabidopsis thaliana
cacgactctcggcaacg

SEQ ID NO: 64792 - DNA, 17 bp, Arabidopsis thaliana
cacgactctgaggcggt

SEQ ID NO: 64793 - DNA, 17 bp, Arabidopsis thaliana
cacgactgtggcggtgt

SEQ ID NO: 64794 - DNA, 17 bp, Arabidopsis thaliana
cacgactgttcttcacc

SEQ ID NO: 64795 - DNA, 17 bp, Arabidopsis thaliana
cacgactgtttggcaat

SEQ ID NO: 64796 - DNA, 17 bp, Arabidopsis thaliana
cacgacttcgcaatttg

SEQ ID NO: 64797 - DNA, 17 bp, Arabidopsis thaliana
cacgactttagattttg

SEQ ID NO: 64798 - DNA, 17 bp, Arabidopsis thaliana
cacgagaccggagaaga

SEQ ID NO: 64799 - DNA, 17 bp, Arabidopsis thaliana
cacgagacgatgagagc

SEQ ID NO: 64800 - DNA, 17 bp, Arabidopsis thaliana
cacgagaggatggatca

SEQ ID NO: 64801 - DNA, 17 bp, Arabidopsis thaliana
cacgagatcatgacacg

SEQ ID NO: 64802 - DNA, 17 bp, Arabidopsis thaliana
cacgagatcgtgctgct

SEQ ID NO: 64803 - DNA, 17 bp, Arabidopsis thaliana
cacgagcacttccggag

SEQ ID NO: 64804 - DNA, 17 bp, Arabidopsis thaliana
cacgagccggtctgtct

SEQ ID NO: 64805 - DNA, 17 bp, Arabidopsis thaliana
cacgagctaggaccttg

SEQ ID NO: 64806 - DNA, 17 bp, Arabidopsis thaliana
cacgagctggaggctgg

SEQ ID NO: 64807 - DNA, 17 bp, Arabidopsis thaliana
cacgaggaaaggctaag

SEQ ID NO: 64808 - DNA, 17 bp, Arabidopsis thaliana
cacgaggacttcccggg

SEQ ID NO: 64809 - DNA, 17 bp, Arabidopsis thaliana
cacgaggcgctgtctac

SEQ ID NO: 64810 - DNA, 17 bp, Arabidopsis thaliana
cacgagtaccaagtgtc

SEQ ID NO: 64811 - DNA, 17 bp, Arabidopsis thaliana
cacgagtcctttgggtc

SEQ ID NO: 64812 - DNA, 17 bp, Arabidopsis thaliana
cacgagtcgcttccaga

SEQ ID NO: 64813 - DNA, 17 bp, Arabidopsis thaliana
cacgagttcacggttac

SEQ ID NO: 64814 - DNA, 17 bp, Arabidopsis thaliana
cacgagttcgtgttcgg

SEQ ID NO: 64815 - DNA, 17 bp, Arabidopsis thaliana
cacgagtttggcaggac

SEQ ID NO: 64816 - DNA, 17 bp, Arabidopsis thaliana
cacgagtttttcataca

SEQ ID NO: 64817 - DNA, 17 bp, Arabidopsis thaliana
cacgataaggtaccggt

SEQ ID NO: 64818 - DNA, 17 bp, Arabidopsis thaliana
cacgatagtggattgac

SEQ ID NO: 64819 - DNA, 17 bp, Arabidopsis thaliana
cacgatcaagcgcagct

SEQ ID NO: 64820 - DNA, 17 bp, Arabidopsis thaliana
cacgatcacaaatgcaa

SEQ ID NO: 64821 - DNA, 17 bp, Arabidopsis thaliana
cacgatcacggcagcca

SEQ ID NO: 64822 - DNA, 17 bp, Arabidopsis thaliana
cacgatcacggcagcga

SEQ ID NO: 64823 - DNA, 17 bp, Arabidopsis thaliana
cacgatccactgagatt

SEQ ID NO: 64824 - DNA, 17 bp, Arabidopsis thaliana
cacgatcctatgagtta

SEQ ID NO: 64825 - DNA, 17 bp, Arabidopsis thaliana
cacgatcctgcagattc

SEQ ID NO: 64826 - DNA, 17 bp, Arabidopsis thaliana
cacgatcgagatgagct

SEQ ID NO: 64827 - DNA, 17 bp, Arabidopsis thaliana
cacgatcgtctctccgg

SEQ ID NO: 64828 - DNA, 17 bp, Arabidopsis thaliana
cacgatcgtttagacga

SEQ ID NO: 64829 - DNA, 17 bp, Arabidopsis thaliana
cacgatcttcatccgcg

SEQ ID NO: 64830 - DNA, 17 bp, Arabidopsis thaliana
cacgatcttttgattgc

SEQ ID NO: 64831 - DNA, 17 bp, Arabidopsis thaliana
cacgatgccgaccaggg

SEQ ID NO: 64832 - DNA, 17 bp, Arabidopsis thaliana
cacgatggatgtacctt

SEQ ID NO: 64833 - DNA, 17 bp, Arabidopsis thaliana
cacgatggctgcagttg

SEQ ID NO: 64834 - DNA, 17 bp, Arabidopsis thaliana
cacgatgtcggctgatt

SEQ ID NO: 64835 - DNA, 17 bp, Arabidopsis thaliana
cacgatgtctgtacctt

SEQ ID NO: 64836 - DNA, 17 bp, Arabidopsis thaliana
cacgatgttacttactc

SEQ ID NO: 64837 - DNA, 17 bp, Arabidopsis thaliana
cacgattagttgctgct

SEQ ID NO: 64838 - DNA, 17 bp, Arabidopsis thaliana
cacgattcctttaccac

SEQ ID NO: 64839 - DNA, 17 bp, Arabidopsis thaliana
cacgattctgattccgg

SEQ ID NO: 64840 - DNA, 17 bp, Arabidopsis thaliana
cacgattctttcagatt

SEQ ID NO: 64841 - DNA, 17 bp, Arabidopsis thaliana
cacgattgtgccacatg

SEQ ID NO: 64842 - DNA, 17 bp, Arabidopsis thaliana
cacgcaaatttccgagt

SEQ ID NO: 64843 - DNA, 17 bp, Arabidopsis thaliana
cacgcaaccccggttcg

SEQ ID NO: 64844 - DNA, 17 bp, Arabidopsis thaliana
cacgcaaccccggttct

SEQ ID NO: 64845 - DNA, 17 bp, Arabidopsis thaliana
cacgcaaggtgtccctg

SEQ ID NO: 64846 - DNA, 17 bp, Arabidopsis thaliana
cacgcaatgtgatttct

SEQ ID NO: 64847 - DNA, 17 bp, Arabidopsis thaliana
cacgcaatttaagtgtg

SEQ ID NO: 64848 - DNA, 17 bp, Arabidopsis thaliana
cacgcaccaccagtaat

SEQ ID NO: 64849 - DNA, 17 bp, Arabidopsis thaliana
cacgcagatgtctgagc

SEQ ID NO: 64850 - DNA, 17 bp, Arabidopsis thaliana
cacgcagtcagattagt

SEQ ID NO: 64851 - DNA, 17 bp, Arabidopsis thaliana
cacgcatatgggattgt

SEQ ID NO: 64852 - DNA, 17 bp, Arabidopsis thaliana
cacgcatcctgtagatg

SEQ ID NO: 64853 - DNA, 17 bp, Arabidopsis thaliana
cacgcatgcgcccaccg

SEQ ID NO: 64854 - DNA, 17 bp, Arabidopsis thaliana
cacgcatgcgcccgccg

SEQ ID NO: 64855 - DNA, 17 bp, Arabidopsis thaliana
cacgcatggacgagttt

SEQ ID NO: 64856 - DNA, 17 bp, Arabidopsis thaliana
cacgccaagaagattca

SEQ ID NO: 64857 - DNA, 17 bp, Arabidopsis thaliana
cacgccaccggagacac

SEQ ID NO: 64858 - DNA, 17 bp, Arabidopsis thaliana
cacgccacggttgactt

SEQ ID NO: 64859 - DNA, 17 bp, Arabidopsis thaliana
cacgccacttgtatggg

SEQ ID NO: 64860 - DNA, 17 bp, Arabidopsis thaliana
cacgccatactcttcag

SEQ ID NO: 64861 - DNA, 17 bp, Arabidopsis thaliana
cacgccatcgcccgaga

SEQ ID NO: 64862 - DNA, 17 bp, Arabidopsis thaliana
cacgccatgtggtgccg

SEQ ID NO: 64863 - DNA, 17 bp, Arabidopsis thaliana
cacgcccaatggtcttt

SEQ ID NO: 64864 - DNA, 17 bp, Arabidopsis thaliana
cacgccgagtaccccac

SEQ ID NO: 64865 - DNA, 17 bp, Arabidopsis thaliana
cacgccgagtaccccag

SEQ ID NO: 64866 - DNA, 17 bp, Arabidopsis thaliana
cacgccgattctgtcca

SEQ ID NO: 64867 - DNA, 17 bp, Arabidopsis thaliana
cacgccgggggacggac

SEQ ID NO: 64868 - DNA, 17 bp, Arabidopsis thaliana
cacgccggtcatgttga

SEQ ID NO: 64869 - DNA, 17 bp, Arabidopsis thaliana
cacgcctctaagatcag

SEQ ID NO: 64870 - DNA, 17 bp, Arabidopsis thaliana
cacgcctctcggagatg

SEQ ID NO: 64871 - DNA, 17 bp, Arabidopsis thaliana
cacgcctgcctgcgtgc

SEQ ID NO: 64872 - DNA, 17 bp, Arabidopsis thaliana
cacgcctgcctgggtgt

SEQ ID NO: 64873 - DNA, 17 bp, Arabidopsis thaliana
cacgcctgggtgtcaca

SEQ ID NO: 64874 - DNA, 17 bp, Arabidopsis thaliana
cacgccttctgggcgct

SEQ ID NO: 64875 - DNA, 17 bp, Arabidopsis thaliana
cacgccttggggataac

SEQ ID NO: 64876 - DNA, 17 bp, Arabidopsis thaliana
cacgcgacagaagtttg

SEQ ID NO: 64877 - DNA, 17 bp, Arabidopsis thaliana
cacgcgacgcatgggtc

SEQ ID NO: 64878 - DNA, 17 bp, Arabidopsis thaliana
cacgcgactttctctct

SEQ ID NO: 64879 - DNA, 17 bp, Arabidopsis thaliana
cacgcgagattcccgtt

SEQ ID NO: 64880 - DNA, 17 bp, Arabidopsis thaliana
cacgcgggtgacccggg

SEQ ID NO: 64881 - DNA, 17 bp, Arabidopsis thaliana
cacgcggtctaatttat

SEQ ID NO: 64882 - DNA, 17 bp, Arabidopsis thaliana
cacgctaacttgtggtc

SEQ ID NO: 64883 - DNA, 17 bp, Arabidopsis thaliana
cacgctaacttgtgttc

SEQ ID NO: 64884 - DNA, 17 bp, Arabidopsis thaliana
cacgctaagggtgagag

SEQ ID NO: 64885 - DNA, 17 bp, Arabidopsis thaliana
cacgctacacgttggtc

SEQ ID NO: 64886 - DNA, 17 bp, Arabidopsis thaliana
cacgctacactgtgcag

SEQ ID NO: 64887 - DNA, 17 bp, Arabidopsis thaliana
cacgctacgatatcaca

SEQ ID NO: 64888 - DNA, 17 bp, Arabidopsis thaliana
cacgctagattttgacc

SEQ ID NO: 64889 - DNA, 17 bp, Arabidopsis thaliana
cacgctatcaccatctg

SEQ ID NO: 64890 - DNA, 17 bp, Arabidopsis thaliana
cacgctatggattctaa

SEQ ID NO: 64891 - DNA, 17 bp, Arabidopsis thaliana
cacgctcaatgattaag

SEQ ID NO: 64892 - DNA, 17 bp, Arabidopsis thaliana
cacgctcaccgcactat

SEQ ID NO: 64893 - DNA, 17 bp, Arabidopsis thaliana
cacgctcgaccaactac

SEQ ID NO: 64894 - DNA, 17 bp, Arabidopsis thaliana
cacgctctatgtagact

SEQ ID NO: 64895 - DNA, 17 bp, Arabidopsis thaliana
cacgctctcattggcca

SEQ ID NO: 64896 - DNA, 17 bp, Arabidopsis thaliana
cacgctgacttgtgtac

SEQ ID NO: 64897 - DNA, 17 bp, Arabidopsis thaliana
cacgctgcaagtggagc

SEQ ID NO: 64898 - DNA, 17 bp, Arabidopsis thaliana
cacgctgcgtccgagaa

SEQ ID NO: 64899 - DNA, 17 bp, Arabidopsis thaliana
cacgctgctgatgtttg

SEQ ID NO: 64900 - DNA, 17 bp, Arabidopsis thaliana
cacgcttagttttctca

SEQ ID NO: 64901 - DNA, 17 bp, Arabidopsis thaliana
cacgcttcagatgtcca

SEQ ID NO: 64902 - DNA, 17 bp, Arabidopsis thaliana
cacgcttcagccgacga

SEQ ID NO: 64903 - DNA, 17 bp, Arabidopsis thaliana
cacgcttgcagagagaa

SEQ ID NO: 64904 - DNA, 17 bp, Arabidopsis thaliana
cacgcttggtgatgaca

SEQ ID NO: 64905 - DNA, 17 bp, Arabidopsis thaliana
cacgcttgtgccatgac

SEQ ID NO: 64906 - DNA, 17 bp, Arabidopsis thaliana
cacgcttgtgctatggc

SEQ ID NO: 64907 - DNA, 17 bp, Arabidopsis thaliana
cacgctttggccgagtg

SEQ ID NO: 64908 - DNA, 17 bp, Arabidopsis thaliana
cacgcttttgatggaga

SEQ ID NO: 64909 - DNA, 17 bp, Arabidopsis thaliana
cacggaaaaaagtttga

SEQ ID NO: 64910 - DNA, 17 bp, Arabidopsis thaliana
cacggaaatcataggca

SEQ ID NO: 64911 - DNA, 17 bp, Arabidopsis thaliana
cacggaacactggatat

SEQ ID NO: 64912 - DNA, 17 bp, Arabidopsis thaliana
cacggaactattacccc

SEQ ID NO: 64913 - DNA, 17 bp, Arabidopsis thaliana
cacggaatcataagcgg

SEQ ID NO: 64914 - DNA, 17 bp, Arabidopsis thaliana
cacggaatcgagagctc

SEQ ID NO: 64915 - DNA, 17 bp, Arabidopsis thaliana
cacggaattagatggta

SEQ ID NO: 64916 - DNA, 17 bp, Arabidopsis thaliana
cacggacaatatgggct

SEQ ID NO: 64917 - DNA, 17 bp, Arabidopsis thaliana
cacggacagtatgggct

SEQ ID NO: 64918 - DNA, 17 bp, Arabidopsis thaliana
cacggacataggagatc

SEQ ID NO: 64919 - DNA, 17 bp, Arabidopsis thaliana
cacggaccaaggagtct

SEQ ID NO: 64920 - DNA, 17 bp, Arabidopsis thaliana
cacggaccgcgtcgttg

SEQ ID NO: 64921 - DNA, 17 bp, Arabidopsis thaliana
cacggaccgggcctaag

SEQ ID NO: 64922 - DNA, 17 bp, Arabidopsis thaliana
cacggacctctgctaag

SEQ ID NO: 64923 - DNA, 17 bp, Arabidopsis thaliana
cacggaccttgcaagta

SEQ ID NO: 64924 - DNA, 17 bp, Arabidopsis thaliana
cacggaccttgcaagtt

SEQ ID NO: 64925 - DNA, 17 bp, Arabidopsis thaliana
cacggactaactgtgga

SEQ ID NO: 64926 - DNA, 17 bp, Arabidopsis thaliana
cacggactctatgggct

SEQ ID NO: 64927 - DNA, 17 bp, Arabidopsis thaliana
cacggactgcccagact

SEQ ID NO: 64928 - DNA, 17 bp, Arabidopsis thaliana
cacggagcggacctatt

SEQ ID NO: 64929 - DNA, 17 bp, Arabidopsis thaliana
cacggaggatttaacgg

SEQ ID NO: 64930 - DNA, 17 bp, Arabidopsis thaliana
cacggaggttttgtgga

SEQ ID NO: 64931 - DNA, 17 bp, Arabidopsis thaliana
cacggagtcatggaatg

SEQ ID NO: 64932 - DNA, 17 bp, Arabidopsis thaliana
cacggataagctaaaga

SEQ ID NO: 64933 - DNA, 17 bp, Arabidopsis thaliana
cacggatacaattctta

SEQ ID NO: 64934 - DNA, 17 bp, Arabidopsis thaliana
cacggatatggagcttc

SEQ ID NO: 64935 - DNA, 17 bp, Arabidopsis thaliana
cacggatccgacaataa

SEQ ID NO: 64936 - DNA, 17 bp, Arabidopsis thaliana
cacggatccggcgggca

SEQ ID NO: 64937 - DNA, 17 bp, Arabidopsis thaliana
cacggatcgcatggcct

SEQ ID NO: 64938 - DNA, 17 bp, Arabidopsis thaliana
cacggatcgtttcttag

SEQ ID NO: 64939 - DNA, 17 bp, Arabidopsis thaliana
cacggatggtctacaat

SEQ ID NO: 64940 - DNA, 17 bp, Arabidopsis thaliana
cacggatggttctcgag

SEQ ID NO: 64941 - DNA, 17 bp, Arabidopsis thaliana
cacggatgttctgtaac

SEQ ID NO: 64942 - DNA, 17 bp, Arabidopsis thaliana
cacggatgtttccgcgt

SEQ ID NO: 64943 - DNA, 17 bp, Arabidopsis thaliana
cacggatgtttcctcgt

SEQ ID NO: 64944 - DNA, 17 bp, Arabidopsis thaliana
cacggatgtttgactca

SEQ ID NO: 64945 - DNA, 17 bp, Arabidopsis thaliana
cacggattacggtggcg

SEQ ID NO: 64946 - DNA, 17 bp, Arabidopsis thaliana
cacggattggcgggacg

SEQ ID NO: 64947 - DNA, 17 bp, Arabidopsis thaliana
cacggatttacgttttt

SEQ ID NO: 64948 - DNA, 17 bp, Arabidopsis thaliana
cacggatttggcgagac

SEQ ID NO: 64949 - DNA, 17 bp, Arabidopsis thaliana
cacggatttgtctcggg

SEQ ID NO: 64950 - DNA, 17 bp, Arabidopsis thaliana
cacggatttttgaaata

SEQ ID NO: 64951 - DNA, 17 bp, Arabidopsis thaliana
cacggcaaatgaatcat

SEQ ID NO: 64952 - DNA, 17 bp, Arabidopsis thaliana
cacggcacccgggcgaa

SEQ ID NO: 64953 - DNA, 17 bp, Arabidopsis thaliana
cacggcacgtctgcctg

SEQ ID NO: 64954 - DNA, 17 bp, Arabidopsis thaliana
cacggcactgtcgcggg

SEQ ID NO: 64955 - DNA, 17 bp, Arabidopsis thaliana
cacggcagagtttagat

SEQ ID NO: 64956 - DNA, 17 bp, Arabidopsis thaliana
cacggcatgtccgaaat

SEQ ID NO: 64957 - DNA, 17 bp, Arabidopsis thaliana
cacggcatgtccgaatt

SEQ ID NO: 64958 - DNA, 17 bp, Arabidopsis thaliana
cacggccatcggcagac

SEQ ID NO: 64959 - DNA, 17 bp, Arabidopsis thaliana
cacggccggcttctccc

SEQ ID NO: 64960 - DNA, 17 bp, Arabidopsis thaliana
cacggccggcttctttc

SEQ ID NO: 64961 - DNA, 17 bp, Arabidopsis thaliana
cacggcctatgtttgtt

SEQ ID NO: 64962 - DNA, 17 bp, Arabidopsis thaliana
cacggccttgtgacgga

SEQ ID NO: 64963 - DNA, 17 bp, Arabidopsis thaliana
cacggcctttttttcag

SEQ ID NO: 64964 - DNA, 17 bp, Arabidopsis thaliana
cacggcctttttttctg

SEQ ID NO: 64965 - DNA, 17 bp, Arabidopsis thaliana
cacggcgaatggttcat

SEQ ID NO: 64966 - DNA, 17 bp, Arabidopsis thaliana
cacggcgacaatgacgg

SEQ ID NO: 64967 - DNA, 17 bp, Arabidopsis thaliana
cacggcgatctccgacc

SEQ ID NO: 64968 - DNA, 17 bp, Arabidopsis thaliana
cacggcggttctgataa

SEQ ID NO: 64969 - DNA, 17 bp, Arabidopsis thaliana
cacggcgtagccaagcg

SEQ ID NO: 64970 - DNA, 17 bp, Arabidopsis thaliana
cacggcgtcggcggagg

SEQ ID NO: 64971 - DNA, 17 bp, Arabidopsis thaliana
cacggcgtgaggccggc

SEQ ID NO: 64972 - DNA, 17 bp, Arabidopsis thaliana
cacggctaaggaaaggg

SEQ ID NO: 64973 - DNA, 17 bp, Arabidopsis thaliana
cacggctagcaccctct

SEQ ID NO: 64974 - DNA, 17 bp, Arabidopsis thaliana
cacggctcgagcagagg

SEQ ID NO: 64975 - DNA, 17 bp, Arabidopsis thaliana
cacggctctgcgcataa

SEQ ID NO: 64976 - DNA, 17 bp, Arabidopsis thaliana
cacggctctgggtgaag

SEQ ID NO: 64977 - DNA, 17 bp, Arabidopsis thaliana
cacggctctgggtgaat

SEQ ID NO: 64978 - DNA, 17 bp, Arabidopsis thaliana
cacggctctgtgacgga

SEQ ID NO: 64979 - DNA, 17 bp, Arabidopsis thaliana
cacggctgagttacggt

SEQ ID NO: 64980 - DNA, 17 bp, Arabidopsis thaliana
cacggctgagttactgt

SEQ ID NO: 64981 - DNA, 17 bp, Arabidopsis thaliana
cacggctgctagtgagt

SEQ ID NO: 64982 - DNA, 17 bp, Arabidopsis thaliana
cacggctttgacggcga

SEQ ID NO: 64983 - DNA, 17 bp, Arabidopsis thaliana
cacgggaaagctgtatt

SEQ ID NO: 64984 - DNA, 17 bp, Arabidopsis thaliana
cacgggacaaacggggg

SEQ ID NO: 64985 - DNA, 17 bp, Arabidopsis thaliana
cacgggacattgatgtg

SEQ ID NO: 64986 - DNA, 17 bp, Arabidopsis thaliana
cacgggacccacggcga

SEQ ID NO: 64987 - DNA, 17 bp, Arabidopsis thaliana
cacgggacgaattggcg

SEQ ID NO: 64988 - DNA, 17 bp, Arabidopsis thaliana
cacgggacggattggcg

SEQ ID NO: 64989 - DNA, 17 bp, Arabidopsis thaliana
cacgggacgggttggcg

SEQ ID NO: 64990 - DNA, 17 bp, Arabidopsis thaliana
cacgggacgggtttggc

SEQ ID NO: 64991 - DNA, 17 bp, Arabidopsis thaliana
cacgggactcctcacta

SEQ ID NO: 64992 - DNA, 17 bp, Arabidopsis thaliana
cacgggaggactgtatt

SEQ ID NO: 64993 - DNA, 17 bp, Arabidopsis thaliana
cacgggatacacttacc

SEQ ID NO: 64994 - DNA, 17 bp, Arabidopsis thaliana
cacgggatctatgttcg

SEQ ID NO: 64995 - DNA, 17 bp, Arabidopsis thaliana
cacgggattctgcaatt

SEQ ID NO: 64996 - DNA, 17 bp, Arabidopsis thaliana
cacgggcaaaagggttg

SEQ ID NO: 64997 - DNA, 17 bp, Arabidopsis thaliana
cacgggcattgtggata

SEQ ID NO: 64998 - DNA, 17 bp, Arabidopsis thaliana
cacgggccgaccatgga

SEQ ID NO: 64999 - DNA, 17 bp, Arabidopsis thaliana
cacgggctggaggctgg

SEQ ID NO: 65000 - DNA, 17 bp, Arabidopsis thaliana
cacgggcttcagcgcag

SEQ ID NO: 65001 - DNA, 17 bp, Arabidopsis thaliana
cacgggcttggctcaac

SEQ ID NO: 65002 - DNA, 17 bp, Arabidopsis thaliana
cacgggcttggctcatt

SEQ ID NO: 65003 - DNA, 17 bp, Arabidopsis thaliana
cacggggaaacttacca

SEQ ID NO: 65004 - DNA, 17 bp, Arabidopsis thaliana
cacggggatcgataccc

SEQ ID NO: 65005 - DNA, 17 bp, Arabidopsis thaliana
cacggggtctttgctag

SEQ ID NO: 65006 - DNA, 17 bp, Arabidopsis thaliana
cacggggttcgatcccc

SEQ ID NO: 65007 - DNA, 17 bp, Arabidopsis thaliana
cacggggttcggtttcc

SEQ ID NO: 65008 - DNA, 17 bp, Arabidopsis thaliana
cacggggttcgtttccc

SEQ ID NO: 65009 - DNA, 17 bp, Arabidopsis thaliana
cacggggttctccccca

SEQ ID NO: 65010 - DNA, 17 bp, Arabidopsis thaliana
cacgggtgcaccgccga

SEQ ID NO: 65011 - DNA, 17 bp, Arabidopsis thaliana
cacgggttcaaatcctg

SEQ ID NO: 65012 - DNA, 17 bp, Arabidopsis thaliana
cacgggttcacgttttt

SEQ ID NO: 65013 - DNA, 17 bp, Arabidopsis thaliana
cacgggttggcaggacg

SEQ ID NO: 65014 - DNA, 17 bp, Arabidopsis thaliana
cacgggttggcggaatg

SEQ ID NO: 65015 - DNA, 17 bp, Arabidopsis thaliana
cacgggttggcgggacg

SEQ ID NO: 65016 - DNA, 17 bp, Arabidopsis thaliana
cacgggtttacgttttt

SEQ ID NO: 65017 - DNA, 17 bp, Arabidopsis thaliana
cacgggtttatgttttt

SEQ ID NO: 65018 - DNA, 17 bp, Arabidopsis thaliana
cacgggtttcggcccag

SEQ ID NO: 65019 - DNA, 17 bp, Arabidopsis thaliana
cacgggtttgcgttttt

SEQ ID NO: 65020 - DNA, 17 bp, Arabidopsis thaliana
cacgggtttggcaggac

SEQ ID NO: 65021 - DNA, 17 bp, Arabidopsis thaliana
cacgggtttggcgggat

SEQ ID NO: 65022 - DNA, 17 bp, Arabidopsis thaliana
cacgggttttcgttttt

SEQ ID NO: 65023 - DNA, 17 bp, Arabidopsis thaliana
cacggtaaacgctgggt

SEQ ID NO: 65024 - DNA, 17 bp, Arabidopsis thaliana
cacggtacagacccggg

SEQ ID NO: 65025 - DNA, 17 bp, Arabidopsis thaliana
cacggtacggactgaga

SEQ ID NO: 65026 - DNA, 17 bp, Arabidopsis thaliana
cacggtactgaccaggg

SEQ ID NO: 65027 - DNA, 17 bp, Arabidopsis thaliana
cacggtatccatgggcc

SEQ ID NO: 65028 - DNA, 17 bp, Arabidopsis thaliana
cacggtctaaaagttaa

SEQ ID NO: 65029 - DNA, 17 bp, Arabidopsis thaliana
cacggtctaaaagttat

SEQ ID NO: 65030 - DNA, 17 bp, Arabidopsis thaliana
cacggtctcgggatgac

SEQ ID NO: 65031 - DNA, 17 bp, Arabidopsis thaliana
cacggtctgcgcactca

SEQ ID NO: 65032 - DNA, 17 bp, Arabidopsis thaliana
cacggtgaaacttacca

SEQ ID NO: 65033 - DNA, 17 bp, Arabidopsis thaliana
cacggtgactttgatgt

SEQ ID NO: 65034 - DNA, 17 bp, Arabidopsis thaliana
cacggtgcctgtagatt

SEQ ID NO: 65035 - DNA, 17 bp, Arabidopsis thaliana
cacggtgcctgtagctt

SEQ ID NO: 65036 - DNA, 17 bp, Arabidopsis thaliana
cacggtgcggttcagtt

SEQ ID NO: 65037 - DNA, 17 bp, Arabidopsis thaliana
cacggtgctgattacgg

SEQ ID NO: 65038 - DNA, 17 bp, Arabidopsis thaliana
cacggtggcggcctaag

SEQ ID NO: 65039 - DNA, 17 bp, Arabidopsis thaliana
cacggtgggacgggttt

SEQ ID NO: 65040 - DNA, 17 bp, Arabidopsis thaliana
cacggtggggtcttcga

SEQ ID NO: 65041 - DNA, 17 bp, Arabidopsis thaliana
cacggtggttctttaac

SEQ ID NO: 65042 - DNA, 17 bp, Arabidopsis thaliana
cacggtgtgctgtactc

SEQ ID NO: 65043 - DNA, 17 bp, Arabidopsis thaliana
cacggtgtttgttgaca

SEQ ID NO: 65044 - DNA, 17 bp, Arabidopsis thaliana
cacggttaaatggcggg

SEQ ID NO: 65045 - DNA, 17 bp, Arabidopsis thaliana
cacggttaacagttacg

SEQ ID NO: 65046 - DNA, 17 bp, Arabidopsis thaliana
cacggttacggttatta

SEQ ID NO: 65047 - DNA, 17 bp, Arabidopsis thaliana
cacggttacggttggat

SEQ ID NO: 65048 - DNA, 17 bp, Arabidopsis thaliana
cacggttatagctgtag

SEQ ID NO: 65049 - DNA, 17 bp, Arabidopsis thaliana
cacggttattttggccg

SEQ ID NO: 65050 - DNA, 17 bp, Arabidopsis thaliana
cacggttccagattcac

SEQ ID NO: 65051 - DNA, 17 bp, Arabidopsis thaliana
cacggttccctgtcgat

SEQ ID NO: 65052 - DNA, 17 bp, Arabidopsis thaliana
cacggttgactgtacgg

SEQ ID NO: 65053 - DNA, 17 bp, Arabidopsis thaliana
cacggttgcagtgattc

SEQ ID NO: 65054 - DNA, 17 bp, Arabidopsis thaliana
cacggttgcggttatta

SEQ ID NO: 65055 - DNA, 17 bp, Arabidopsis thaliana
cacggttggataagagg

SEQ ID NO: 65056 - DNA, 17 bp, Arabidopsis thaliana
cacggtttctacgaaaa

SEQ ID NO: 65057 - DNA, 17 bp, Arabidopsis thaliana
cacggttttgctccaga

SEQ ID NO: 65058 - DNA, 17 bp, Arabidopsis thaliana
cacgtaaaagctttctc

SEQ ID NO: 65059 - DNA, 17 bp, Arabidopsis thaliana
cacgtaaccaaccaacc

SEQ ID NO: 65060 - DNA, 17 bp, Arabidopsis thaliana
cacgtaaccgcctcgag

SEQ ID NO: 65061 - DNA, 17 bp, Arabidopsis thaliana
cacgtaacgttcttccc

SEQ ID NO: 65062 - DNA, 17 bp, Arabidopsis thaliana
cacgtaacgttcttcgc

SEQ ID NO: 65063 - DNA, 17 bp, Arabidopsis thaliana
cacgtaagttacccagt

SEQ ID NO: 65064 - DNA, 17 bp, Arabidopsis thaliana
cacgtaatgcgggtact

SEQ ID NO: 65065 - DNA, 17 bp, Arabidopsis thaliana
cacgtacacgggacgag

SEQ ID NO: 65066 - DNA, 17 bp, Arabidopsis thaliana
cacgtacattgacgggt

SEQ ID NO: 65067 - DNA, 17 bp, Arabidopsis thaliana
cacgtaccgctggagtt

SEQ ID NO: 65068 - DNA, 17 bp, Arabidopsis thaliana
cacgtacctccagcgcg

SEQ ID NO: 65069 - DNA, 17 bp, Arabidopsis thaliana
cacgtactacaatcgcc

SEQ ID NO: 65070 - DNA, 17 bp, Arabidopsis thaliana
cacgtactacaatggcc

SEQ ID NO: 65071 - DNA, 17 bp, Arabidopsis thaliana
cacgtactttatgcagt

SEQ ID NO: 65072 - DNA, 17 bp, Arabidopsis thaliana
cacgtagtgcgggtact

SEQ ID NO: 65073 - DNA, 17 bp, Arabidopsis thaliana
cacgtatccggttgttg

SEQ ID NO: 65074 - DNA, 17 bp, Arabidopsis thaliana
cacgtatcgttggctaa

SEQ ID NO: 65075 - DNA, 17 bp, Arabidopsis thaliana
cacgtatgggacctaag

SEQ ID NO: 65076 - DNA, 17 bp, Arabidopsis thaliana
cacgtcaagtgcgaatg

SEQ ID NO: 65077 - DNA, 17 bp, Arabidopsis thaliana
cacgtcagatgatactg

SEQ ID NO: 65078 - DNA, 17 bp, Arabidopsis thaliana
cacgtcagcctgggtgt

SEQ ID NO: 65079 - DNA, 17 bp, Arabidopsis thaliana
cacgtcaggtccctgcg

SEQ ID NO: 65080 - DNA, 17 bp, Arabidopsis thaliana
cacgtcatcgctatacg

SEQ ID NO: 65081 - DNA, 17 bp, Arabidopsis thaliana
cacgtcattcaccggcc

SEQ ID NO: 65082 - DNA, 17 bp, Arabidopsis thaliana
cacgtcattgaaagatc

SEQ ID NO: 65083 - DNA, 17 bp, Arabidopsis thaliana
cacgtccataggttctg

SEQ ID NO: 65084 - DNA, 17 bp, Arabidopsis thaliana
cacgtccgcctgggtgt

SEQ ID NO: 65085 - DNA, 17 bp, Arabidopsis thaliana
cacgtcctgggtgtcac

SEQ ID NO: 65086 - DNA, 17 bp, Arabidopsis thaliana
cacgtcgcgtggtgtcc

SEQ ID NO: 65087 - DNA, 17 bp, Arabidopsis thaliana
cacgtcggagagtaggt

SEQ ID NO: 65088 - DNA, 17 bp, Arabidopsis thaliana
cacgtcggcaattgtag

SEQ ID NO: 65089 - DNA, 17 bp, Arabidopsis thaliana
cacgtcggcctgcgtgt

SEQ ID NO: 65090 - DNA, 17 bp, Arabidopsis thaliana
cacgtcggcttgtctct

SEQ ID NO: 65091 - DNA, 17 bp, Arabidopsis thaliana
cacgtcggggatggagc

SEQ ID NO: 65092 - DNA, 17 bp, Arabidopsis thaliana
cacgtcgtacgctgtct

SEQ ID NO: 65093 - DNA, 17 bp, Arabidopsis thaliana
cacgtcgtcttcgttgg

SEQ ID NO: 65094 - DNA, 17 bp, Arabidopsis thaliana
cacgtcgtctttggtct

SEQ ID NO: 65095 - DNA, 17 bp, Arabidopsis thaliana
cacgtcgttgtttatca

SEQ ID NO: 65096 - DNA, 17 bp, Arabidopsis thaliana
cacgtctaaatatgtgg

SEQ ID NO: 65097 - DNA, 17 bp, Arabidopsis thaliana
cacgtctacatggaccc

SEQ ID NO: 65098 - DNA, 17 bp, Arabidopsis thaliana
cacgtctacctggctct

SEQ ID NO: 65099 - DNA, 17 bp, Arabidopsis thaliana
cacgtctacctgggtgt

SEQ ID NO: 65100 - DNA, 17 bp, Arabidopsis thaliana
cacgtctccataacttc

SEQ ID NO: 65101 - DNA, 17 bp, Arabidopsis thaliana
cacgtctccataacttt

SEQ ID NO: 65102 - DNA, 17 bp, Arabidopsis thaliana
cacgtctccctccgccc

SEQ ID NO: 65103 - DNA, 17 bp, Arabidopsis thaliana
cacgtctccctcggccc

SEQ ID NO: 65104 - DNA, 17 bp, Arabidopsis thaliana
cacgtctccctcggtcc

SEQ ID NO: 65105 - DNA, 17 bp, Arabidopsis thaliana
cacgtctccctgcgtgc

SEQ ID NO: 65106 - DNA, 17 bp, Arabidopsis thaliana
cacgtctccctgggtgt

SEQ ID NO: 65107 - DNA, 17 bp, Arabidopsis thaliana
cacgtctccctggtggt

SEQ ID NO: 65108 - DNA, 17 bp, Arabidopsis thaliana
cacgtctcctgggtgtc

SEQ ID NO: 65109 - DNA, 17 bp, Arabidopsis thaliana
cacgtctcgggttgcgg

SEQ ID NO: 65110 - DNA, 17 bp, Arabidopsis thaliana
cacgtctctgggtgtca

SEQ ID NO: 65111 - DNA, 17 bp, Arabidopsis thaliana
cacgtctctttagccga

SEQ ID NO: 65112 - DNA, 17 bp, Arabidopsis thaliana
cacgtctgcccgggtgt

SEQ ID NO: 65113 - DNA, 17 bp, Arabidopsis thaliana
cacgtctgccgggtgtc

SEQ ID NO: 65114 - DNA, 17 bp, Arabidopsis thaliana
cacgtctgccggtgtcg

SEQ ID NO: 65115 - DNA, 17 bp, Arabidopsis thaliana
cacgtctgcctaggtgt

SEQ ID NO: 65116 - DNA, 17 bp, Arabidopsis thaliana
cacgtctgcctcggtgt

SEQ ID NO: 65117 - DNA, 17 bp, Arabidopsis thaliana
cacgtctgcctgagtgt

SEQ ID NO: 65118 - DNA, 17 bp, Arabidopsis thaliana
cacgtctgcctgcctgt

SEQ ID NO: 65119 - DNA, 17 bp, Arabidopsis thaliana
cacgtctgcctgcgtgc

SEQ ID NO: 65120 - DNA, 17 bp, Arabidopsis thaliana
cacgtctgcctgcgtgt

SEQ ID NO: 65121 - DNA, 17 bp, Arabidopsis thaliana
cacgtctgcctggatgt

SEQ ID NO: 65122 - DNA, 17 bp, Arabidopsis thaliana
cacgtctgcctggccgc

SEQ ID NO: 65123 - DNA, 17 bp, Arabidopsis thaliana
cacgtctgcctggctgt

SEQ ID NO: 65124 - DNA, 17 bp, Arabidopsis thaliana
cacgtctgcctgggccc

SEQ ID NO: 65125 - DNA, 17 bp, Arabidopsis thaliana
cacgtctgcctgggcgt

SEQ ID NO: 65126 - DNA, 17 bp, Arabidopsis thaliana
cacgtctgcctgggggt

SEQ ID NO: 65127 - DNA, 17 bp, Arabidopsis thaliana
cacgtctgcctgggtat

SEQ ID NO: 65128 - DNA, 17 bp, Arabidopsis thaliana
cacgtctgcctgggtca

SEQ ID NO: 65129 - DNA, 17 bp, Arabidopsis thaliana
cacgtctgcctgggtct

SEQ ID NO: 65130 - DNA, 17 bp, Arabidopsis thaliana
cacgtctgcctgggtga

SEQ ID NO: 65131 - DNA, 17 bp, Arabidopsis thaliana
cacgtctgcctgggtgc

SEQ ID NO: 65132 - DNA, 17 bp, Arabidopsis thaliana
cacgtctgcctgggtgg

SEQ ID NO: 65133 - DNA, 17 bp, Arabidopsis thaliana
cacgtctgcctgggtgt

SEQ ID NO: 65134 - DNA, 17 bp, Arabidopsis thaliana
cacgtctgcctgggttc

SEQ ID NO: 65135 - DNA, 17 bp, Arabidopsis thaliana
cacgtctgcctgggttt

SEQ ID NO: 65136 - DNA, 17 bp, Arabidopsis thaliana
cacgtctgcctggtctc

SEQ ID NO: 65137 - DNA, 17 bp, Arabidopsis thaliana
cacgtctgcctggtgtc

SEQ ID NO: 65138 - DNA, 17 bp, Arabidopsis thaliana
cacgtctgcctggttgt

SEQ ID NO: 65139 - DNA, 17 bp, Arabidopsis thaliana
cacgtctgcctgtcaca

SEQ ID NO: 65140 - DNA, 17 bp, Arabidopsis thaliana
cacgtctgcctgtctca

SEQ ID NO: 65141 - DNA, 17 bp, Arabidopsis thaliana
cacgtctgcctgtggtg

SEQ ID NO: 65142 - DNA, 17 bp, Arabidopsis thaliana
cacgtctgcctgtgtca

SEQ ID NO: 65143 - DNA, 17 bp, Arabidopsis thaliana
cacgtctgcctgtgtgt

SEQ ID NO: 65144 - DNA, 17 bp, Arabidopsis thaliana
cacgtctgcctgttgtc

SEQ ID NO: 65145 - DNA, 17 bp, Arabidopsis thaliana
cacgtctgccttggtgt

SEQ ID NO: 65146 - DNA, 17 bp, Arabidopsis thaliana
cacgtctgcgtgggtgt

SEQ ID NO: 65147 - DNA, 17 bp, Arabidopsis thaliana
cacgtctgctaggtgtc

SEQ ID NO: 65148 - DNA, 17 bp, Arabidopsis thaliana
cacgtctgctgggtgtc

SEQ ID NO: 65149 - DNA, 17 bp, Arabidopsis thaliana
cacgtctgcttgggtgt

SEQ ID NO: 65150 - DNA, 17 bp, Arabidopsis thaliana
cacgtctggctgggtgt

SEQ ID NO: 65151 - DNA, 17 bp, Arabidopsis thaliana
cacgtctggtgtgctgt

SEQ ID NO: 65152 - DNA, 17 bp, Arabidopsis thaliana
cacgtctgtcaggtaag

SEQ ID NO: 65153 - DNA, 17 bp, Arabidopsis thaliana
cacgtctgtcagttggg

SEQ ID NO: 65154 - DNA, 17 bp, Arabidopsis thaliana
cacgtctgtctgggtgt

SEQ ID NO: 65155 - DNA, 17 bp, Arabidopsis thaliana
cacgtctgttgggtgtc

SEQ ID NO: 65156 - DNA, 17 bp, Arabidopsis thaliana
cacgtctgttgttcgtt

SEQ ID NO: 65157 - DNA, 17 bp, Arabidopsis thaliana
cacgtcttcagctggca

SEQ ID NO: 65158 - DNA, 17 bp, Arabidopsis thaliana
cacgtcttcctgggtgt

SEQ ID NO: 65159 - DNA, 17 bp, Arabidopsis thaliana
cacgtcttgggtgtcac

SEQ ID NO: 65160 - DNA, 17 bp, Arabidopsis thaliana
cacgtcttgtacacttg

SEQ ID NO: 65161 - DNA, 17 bp, Arabidopsis thaliana
cacgtctttcactgcga

SEQ ID NO: 65162 - DNA, 17 bp, Arabidopsis thaliana
cacgtctttctattatg

SEQ ID NO: 65163 - DNA, 17 bp, Arabidopsis thaliana
cacgtgaccttggacta

SEQ ID NO: 65164 - DNA, 17 bp, Arabidopsis thaliana
cacgtgactttaggttt

SEQ ID NO: 65165 - DNA, 17 bp, Arabidopsis thaliana
cacgtgccttgcctaaa

SEQ ID NO: 65166 - DNA, 17 bp, Arabidopsis thaliana
cacgtgccttgcctact

SEQ ID NO: 65167 - DNA, 17 bp, Arabidopsis thaliana
cacgtgcctttgggagc

SEQ ID NO: 65168 - DNA, 17 bp, Arabidopsis thaliana
cacgtgctacaatggcc

SEQ ID NO: 65169 - DNA, 17 bp, Arabidopsis thaliana
cacgtgctccgggcgtc

SEQ ID NO: 65170 - DNA, 17 bp, Arabidopsis thaliana
cacgtgctgctgggtct

SEQ ID NO: 65171 - DNA, 17 bp, Arabidopsis thaliana
cacgtggaccaaaatat

SEQ ID NO: 65172 - DNA, 17 bp, Arabidopsis thaliana
cacgtggaccaaaatgt

SEQ ID NO: 65173 - DNA, 17 bp, Arabidopsis thaliana
cacgtggacgcccgtag

SEQ ID NO: 65174 - DNA, 17 bp, Arabidopsis thaliana
cacgtggagttggatag

SEQ ID NO: 65175 - DNA, 17 bp, Arabidopsis thaliana
cacgtggcttcttctga

SEQ ID NO: 65176 - DNA, 17 bp, Arabidopsis thaliana
cacgtgggacagactcg

SEQ ID NO: 65177 - DNA, 17 bp, Arabidopsis thaliana
cacgtggtctccgtccg

SEQ ID NO: 65178 - DNA, 17 bp, Arabidopsis thaliana
cacgtgtcaacatctga

SEQ ID NO: 65179 - DNA, 17 bp, Arabidopsis thaliana
cacgtgtcataatttgg

SEQ ID NO: 65180 - DNA, 17 bp, Arabidopsis thaliana
cacgtgtccatggtgcg

SEQ ID NO: 65181 - DNA, 17 bp, Arabidopsis thaliana
cacgtgtcgccaaaaaa

SEQ ID NO: 65182 - DNA, 17 bp, Arabidopsis thaliana
cacgtgtcgtacccccc

SEQ ID NO: 65183 - DNA, 17 bp, Arabidopsis thaliana
cacgtgtcgttggctaa

SEQ ID NO: 65184 - DNA, 17 bp, Arabidopsis thaliana
cacgtgtgatactcggc

SEQ ID NO: 65185 - DNA, 17 bp, Arabidopsis thaliana
cacgtgtgcctgggtgt

SEQ ID NO: 65186 - DNA, 17 bp, Arabidopsis thaliana
cacgtgtgtgcgggtca

SEQ ID NO: 65187 - DNA, 17 bp, Arabidopsis thaliana
cacgtgttacatggacc

SEQ ID NO: 65188 - DNA, 17 bp, Arabidopsis thaliana
cacgtgttgttggctaa

SEQ ID NO: 65189 - DNA, 17 bp, Arabidopsis thaliana
cacgtgtttctgagact

SEQ ID NO: 65190 - DNA, 17 bp, Arabidopsis thaliana
cacgttaagtgatggca

SEQ ID NO: 65191 - DNA, 17 bp, Arabidopsis thaliana
cacgttaccattcggag

SEQ ID NO: 65192 - DNA, 17 bp, Arabidopsis thaliana
cacgttatcagagactg

SEQ ID NO: 65193 - DNA, 17 bp, Arabidopsis thaliana
cacgttattcacacttt

SEQ ID NO: 65194 - DNA, 17 bp, Arabidopsis thaliana
cacgttatttgcacgat

SEQ ID NO: 65195 - DNA, 17 bp, Arabidopsis thaliana
cacgttcaggctatgcg

SEQ ID NO: 65196 - DNA, 17 bp, Arabidopsis thaliana
cacgttcatcggaaatg

SEQ ID NO: 65197 - DNA, 17 bp, Arabidopsis thaliana
cacgttcgccgggacct

SEQ ID NO: 65198 - DNA, 17 bp, Arabidopsis thaliana
cacgttctgcaggtgct

SEQ ID NO: 65199 - DNA, 17 bp, Arabidopsis thaliana
cacgttgacacgattcg

SEQ ID NO: 65200 - DNA, 17 bp, Arabidopsis thaliana
cacgttgacgcgattca

SEQ ID NO: 65201 - DNA, 17 bp, Arabidopsis thaliana
cacgttgacgcgattcg

SEQ ID NO: 65202 - DNA, 17 bp, Arabidopsis thaliana
cacgttgagccatagtt

SEQ ID NO: 65203 - DNA, 17 bp, Arabidopsis thaliana
cacgttgcctgggtgtc

SEQ ID NO: 65204 - DNA, 17 bp, Arabidopsis thaliana
cacgttggatccagtca

SEQ ID NO: 65205 - DNA, 17 bp, Arabidopsis thaliana
cacgttggatgagacta

SEQ ID NO: 65206 - DNA, 17 bp, Arabidopsis thaliana
cacgttggtgcttagat

SEQ ID NO: 65207 - DNA, 17 bp, Arabidopsis thaliana
cacgttgtgatgattgc

SEQ ID NO: 65208 - DNA, 17 bp, Arabidopsis thaliana
cacgttgtggccgtgga

SEQ ID NO: 65209 - DNA, 17 bp, Arabidopsis thaliana
cacgtttacctgggtgt

SEQ ID NO: 65210 - DNA, 17 bp, Arabidopsis thaliana
cacgtttaggcacttat

SEQ ID NO: 65211 - DNA, 17 bp, Arabidopsis thaliana
cacgtttaggcactttt

SEQ ID NO: 65212 - DNA, 17 bp, Arabidopsis thaliana
cacgtttataagggtaa

SEQ ID NO: 65213 - DNA, 17 bp, Arabidopsis thaliana
cacgtttatagaaggga

SEQ ID NO: 65214 - DNA, 17 bp, Arabidopsis thaliana
cacgtttctggactgtt

SEQ ID NO: 65215 - DNA, 17 bp, Arabidopsis thaliana
cacgtttctgggctgtt

SEQ ID NO: 65216 - DNA, 17 bp, Arabidopsis thaliana
cacgtttgcctgggtgt

SEQ ID NO: 65217 - DNA, 17 bp, Arabidopsis thaliana
cacgtttgcgacgacat

SEQ ID NO: 65218 - DNA, 17 bp, Arabidopsis thaliana
cacgtttgcgggcacgg

SEQ ID NO: 65219 - DNA, 17 bp, Arabidopsis thaliana
cacgtttggctgtgctt

SEQ ID NO: 65220 - DNA, 17 bp, Arabidopsis thaliana
cacgtttgtctgggtgt

SEQ ID NO: 65221 - DNA, 17 bp, Arabidopsis thaliana
cacgtttgtgccaaggc

SEQ ID NO: 65222 - DNA, 17 bp, Arabidopsis thaliana
cacgtttgtgccatgac

SEQ ID NO: 65223 - DNA, 17 bp, Arabidopsis thaliana
cacgtttgtgccatggc

SEQ ID NO: 65224 - DNA, 17 bp, Arabidopsis thaliana
cacgtttgttgtgtccg

SEQ ID NO: 65225 - DNA, 17 bp, Arabidopsis thaliana
cacgttttcccgccaaa

SEQ ID NO: 65226 - DNA, 17 bp, Arabidopsis thaliana
cacgttttctcactttc

SEQ ID NO: 65227 - DNA, 17 bp, Arabidopsis thaliana
cacgttttctcagacgc

SEQ ID NO: 65228 - DNA, 17 bp, Arabidopsis thaliana
cactaaacggtcaatca

SEQ ID NO: 65229 - DNA, 17 bp, Arabidopsis thaliana
cactaaatcgcataacc

SEQ ID NO: 65230 - DNA, 17 bp, Arabidopsis thaliana
cactaacaaatgcggtg

SEQ ID NO: 65231 - DNA, 17 bp, Arabidopsis thaliana
cactaacgaccaaagct

SEQ ID NO: 65232 - DNA, 17 bp, Arabidopsis thaliana
cactaacggtgactagc

SEQ ID NO: 65233 - DNA, 17 bp, Arabidopsis thaliana
cactaactgctacgtgc

SEQ ID NO: 65234 - DNA, 17 bp, Arabidopsis thaliana
cactaactttcaatgag

SEQ ID NO: 65235 - DNA, 17 bp, Arabidopsis thaliana
cactaagaacaacgtcg

SEQ ID NO: 65236 - DNA, 17 bp, Arabidopsis thaliana
cactaagcgaggctttc

SEQ ID NO: 65237 - DNA, 17 bp, Arabidopsis thaliana
cactaagcggttgtcat

SEQ ID NO: 65238 - DNA, 17 bp, Arabidopsis thaliana
cactaagctcaggcctg

SEQ ID NO: 65239 - DNA, 17 bp, Arabidopsis thaliana
cactaaggtcatctcca

SEQ ID NO: 65240 - DNA, 17 bp, Arabidopsis thaliana
cactaatattctcggaa

SEQ ID NO: 65241 - DNA, 17 bp, Arabidopsis thaliana
cactaatcgctgcgtag

SEQ ID NO: 65242 - DNA, 17 bp, Arabidopsis thaliana
cactaattggagaatac

SEQ ID NO: 65243 - DNA, 17 bp, Arabidopsis thaliana
cactacaagagcaattt

SEQ ID NO: 65244 - DNA, 17 bp, Arabidopsis thaliana
cactacaatagtggcat

SEQ ID NO: 65245 - DNA, 17 bp, Arabidopsis thaliana
cactacaatcgtattgc

SEQ ID NO: 65246 - DNA, 17 bp, Arabidopsis thaliana
cactacacgagcgtgca

SEQ ID NO: 65247 - DNA, 17 bp, Arabidopsis thaliana
cactacactcccaaccc

SEQ ID NO: 65248 - DNA, 17 bp, Arabidopsis thaliana
cactacactctcgtttg

SEQ ID NO: 65249 - DNA, 17 bp, Arabidopsis thaliana
cactacagctggctgat

SEQ ID NO: 65250 - DNA, 17 bp, Arabidopsis thaliana
cactacaggatgagact

SEQ ID NO: 65251 - DNA, 17 bp, Arabidopsis thaliana
cactacatccggggtca

SEQ ID NO: 65252 - DNA, 17 bp, Arabidopsis thaliana
cactaccagataagttt

SEQ ID NO: 65253 - DNA, 17 bp, Arabidopsis thaliana
cactaccaggcaaacca

SEQ ID NO: 65254 - DNA, 17 bp, Arabidopsis thaliana
cactaccaggtaaacca

SEQ ID NO: 65255 - DNA, 17 bp, Arabidopsis thaliana
cactaccatcactattg

SEQ ID NO: 65256 - DNA, 17 bp, Arabidopsis thaliana
cactaccgatggaacca

SEQ ID NO: 65257 - DNA, 17 bp, Arabidopsis thaliana
cactaccgctgttgccg

SEQ ID NO: 65258 - DNA, 17 bp, Arabidopsis thaliana
cactaccttctgggtgg

SEQ ID NO: 65259 - DNA, 17 bp, Arabidopsis thaliana
cactacgaagtctgtgg

SEQ ID NO: 65260 - DNA, 17 bp, Arabidopsis thaliana
cactacgaccgcccacg

SEQ ID NO: 65261 - DNA, 17 bp, Arabidopsis thaliana
cactacgatttcatgag

SEQ ID NO: 65262 - DNA, 17 bp, Arabidopsis thaliana
cactacgctgtgtccga

SEQ ID NO: 65263 - DNA, 17 bp, Arabidopsis thaliana
cactacgggatttcatt

SEQ ID NO: 65264 - DNA, 17 bp, Arabidopsis thaliana
cactacgtctacagttc

SEQ ID NO: 65265 - DNA, 17 bp, Arabidopsis thaliana
cactactcagccgcccc

SEQ ID NO: 65266 - DNA, 17 bp, Arabidopsis thaliana
cactactcagcggcgat

SEQ ID NO: 65267 - DNA, 17 bp, Arabidopsis thaliana
cactactgcaagggctg

SEQ ID NO: 65268 - DNA, 17 bp, Arabidopsis thaliana
cactactgcacgggcat

SEQ ID NO: 65269 - DNA, 17 bp, Arabidopsis thaliana
cactactgcacgggccg

SEQ ID NO: 65270 - DNA, 17 bp, Arabidopsis thaliana
cactactgcacgggcct

SEQ ID NO: 65271 - DNA, 17 bp, Arabidopsis thaliana
cactactgcacgggctt

SEQ ID NO: 65272 - DNA, 17 bp, Arabidopsis thaliana
cactactgggtttgaag

SEQ ID NO: 65273 - DNA, 17 bp, Arabidopsis thaliana
cactagatcttcagcgt

SEQ ID NO: 65274 - DNA, 17 bp, Arabidopsis thaliana
cactaggctctaactgt

SEQ ID NO: 65275 - DNA, 17 bp, Arabidopsis thaliana
cactaggtctgaacagt

SEQ ID NO: 65276 - DNA, 17 bp, Arabidopsis thaliana
cactaggtctgaacatt

SEQ ID NO: 65277 - DNA, 17 bp, Arabidopsis thaliana
cactaggtgaacctggg

SEQ ID NO: 65278 - DNA, 17 bp, Arabidopsis thaliana
cactagttcaggtgctt

SEQ ID NO: 65279 - DNA, 17 bp, Arabidopsis thaliana
cactatagccagagtct

SEQ ID NO: 65280 - DNA, 17 bp, Arabidopsis thaliana
cactatagtccgcactc

SEQ ID NO: 65281 - DNA, 17 bp, Arabidopsis thaliana
cactatagttgactttg

SEQ ID NO: 65282 - DNA, 17 bp, Arabidopsis thaliana
cactatcacttccatcg

SEQ ID NO: 65283 - DNA, 17 bp, Arabidopsis thaliana
cactatccatcctgagt

SEQ ID NO: 65284 - DNA, 17 bp, Arabidopsis thaliana
cactatcgaaggatttt

SEQ ID NO: 65285 - DNA, 17 bp, Arabidopsis thaliana
cactatcggagttggcc

SEQ ID NO: 65286 - DNA, 17 bp, Arabidopsis thaliana
cactatctctgagcgtt

SEQ ID NO: 65287 - DNA, 17 bp, Arabidopsis thaliana
cactatgacgcagccac

SEQ ID NO: 65288 - DNA, 17 bp, Arabidopsis thaliana
cactatgacggaggtgg

SEQ ID NO: 65289 - DNA, 17 bp, Arabidopsis thaliana
cactatgccgcggtttt

SEQ ID NO: 65290 - DNA, 17 bp, Arabidopsis thaliana
cactatgcgtgtagggc

SEQ ID NO: 65291 - DNA, 17 bp, Arabidopsis thaliana
cactatggatactaggc

SEQ ID NO: 65292 - DNA, 17 bp, Arabidopsis thaliana
cactatggcctgatggt

SEQ ID NO: 65293 - DNA, 17 bp, Arabidopsis thaliana
cactatggcctgctggt

SEQ ID NO: 65294 - DNA, 17 bp, Arabidopsis thaliana
cactatgggagctggcc

SEQ ID NO: 65295 - DNA, 17 bp, Arabidopsis thaliana
cactatgtagctggcca

SEQ ID NO: 65296 - DNA, 17 bp, Arabidopsis thaliana
cactatgtatgtagtcg

SEQ ID NO: 65297 - DNA, 17 bp, Arabidopsis thaliana
cactattaaatgccagt

SEQ ID NO: 65298 - DNA, 17 bp, Arabidopsis thaliana
cactattgcggtgcact

SEQ ID NO: 65299 - DNA, 17 bp, Arabidopsis thaliana
cactattgcggtgcagt

SEQ ID NO: 65300 - DNA, 17 bp, Arabidopsis thaliana
cactattgcggtgcggt

SEQ ID NO: 65301 - DNA, 17 bp, Arabidopsis thaliana
cactattgctgctgccc

SEQ ID NO: 65302 - DNA, 17 bp, Arabidopsis thaliana
cactattggagctggcc

SEQ ID NO: 65303 - DNA, 17 bp, Arabidopsis thaliana
cactattggcagttgta

SEQ ID NO: 65304 - DNA, 17 bp, Arabidopsis thaliana
cactatttccgacggca

SEQ ID NO: 65305 - DNA, 17 bp, Arabidopsis thaliana
cactcaaaaccgcaccg

SEQ ID NO: 65306 - DNA, 17 bp, Arabidopsis thaliana
cactcaacagtcccagg

SEQ ID NO: 65307 - DNA, 17 bp, Arabidopsis thaliana
cactcaacttccgatgt

SEQ ID NO: 65308 - DNA, 17 bp, Arabidopsis thaliana
cactcaaggatgacttg

SEQ ID NO: 65309 - DNA, 17 bp, Arabidopsis thaliana
cactcaattaatggcgg

SEQ ID NO: 65310 - DNA, 17 bp, Arabidopsis thaliana
cactcacaatgcattgg

SEQ ID NO: 65311 - DNA, 17 bp, Arabidopsis thaliana
cactcacacggttccga

SEQ ID NO: 65312 - DNA, 17 bp, Arabidopsis thaliana
cactcacacggtttcga

SEQ ID NO: 65313 - DNA, 17 bp, Arabidopsis thaliana
cactcactggtgtgatg

SEQ ID NO: 65314 - DNA, 17 bp, Arabidopsis thaliana
cactcacttaacatggc

SEQ ID NO: 65315 - DNA, 17 bp, Arabidopsis thaliana
cactcactttgatttct

SEQ ID NO: 65316 - DNA, 17 bp, Arabidopsis thaliana
cactcagaaatttgcgt

SEQ ID NO: 65317 - DNA, 17 bp, Arabidopsis thaliana
cactcagacatttcgac

SEQ ID NO: 65318 - DNA, 17 bp, Arabidopsis thaliana
cactcagagtgtcgtct

SEQ ID NO: 65319 - DNA, 17 bp, Arabidopsis thaliana
cactcagatgggatctg

SEQ ID NO: 65320 - DNA, 17 bp, Arabidopsis thaliana
cactcagattcaccatg

SEQ ID NO: 65321 - DNA, 17 bp, Arabidopsis thaliana
cactcagccctttgtcg

SEQ ID NO: 65322 - DNA, 17 bp, Arabidopsis thaliana
cactcagtagaggcctt

SEQ ID NO: 65323 - DNA, 17 bp, Arabidopsis thaliana
cactcagttgctgccgt

SEQ ID NO: 65324 - DNA, 17 bp, Arabidopsis thaliana
cactcagttttatgccg

SEQ ID NO: 65325 - DNA, 17 bp, Arabidopsis thaliana
cactcataattctcacg

SEQ ID NO: 65326 - DNA, 17 bp, Arabidopsis thaliana
cactcataggatcgtgt

SEQ ID NO: 65327 - DNA, 17 bp, Arabidopsis thaliana
cactcatatggaaagtg

SEQ ID NO: 65328 - DNA, 17 bp, Arabidopsis thaliana
cactcatatggagagag

SEQ ID NO: 65329 - DNA, 17 bp, Arabidopsis thaliana
cactcatatggagagtg

SEQ ID NO: 65330 - DNA, 17 bp, Arabidopsis thaliana
cactcatatggggagag

SEQ ID NO: 65331 - DNA, 17 bp, Arabidopsis thaliana
cactcatccgagggggg

SEQ ID NO: 65332 - DNA, 17 bp, Arabidopsis thaliana
cactcatcctggagttc

SEQ ID NO: 65333 - DNA, 17 bp, Arabidopsis thaliana
cactcatcggcaagacc

SEQ ID NO: 65334 - DNA, 17 bp, Arabidopsis thaliana
cactcatcggtggtgga

SEQ ID NO: 65335 - DNA, 17 bp, Arabidopsis thaliana
cactcatgcgacgtatt

SEQ ID NO: 65336 - DNA, 17 bp, Arabidopsis thaliana
cactcatgtcaaaagcc

SEQ ID NO: 65337 - DNA, 17 bp, Arabidopsis thaliana
cactcattggtgtgatg

SEQ ID NO: 65338 - DNA, 17 bp, Arabidopsis thaliana
cactcattgtgcgggaa

SEQ ID NO: 65339 - DNA, 17 bp, Arabidopsis thaliana
cactcatttccaccgtt

SEQ ID NO: 65340 - DNA, 17 bp, Arabidopsis thaliana
cactccacctcgccgct

SEQ ID NO: 65341 - DNA, 17 bp, Arabidopsis thaliana
cactccacgtacaaggc

SEQ ID NO: 65342 - DNA, 17 bp, Arabidopsis thaliana
cactccagcgatggatc

SEQ ID NO: 65343 - DNA, 17 bp, Arabidopsis thaliana
cactccaggtcgccatg

SEQ ID NO: 65344 - DNA, 17 bp, Arabidopsis thaliana
cactcccagacttttgg

SEQ ID NO: 65345 - DNA, 17 bp, Arabidopsis thaliana
cactcccatcgacagct

SEQ ID NO: 65346 - DNA, 17 bp, Arabidopsis thaliana
cactccctattggacga

SEQ ID NO: 65347 - DNA, 17 bp, Arabidopsis thaliana
cactccctctccttctc

SEQ ID NO: 65348 - DNA, 17 bp, Arabidopsis thaliana
cactccgattggaccat

SEQ ID NO: 65349 - DNA, 17 bp, Arabidopsis thaliana
cactccggaactaagtg

SEQ ID NO: 65350 - DNA, 17 bp, Arabidopsis thaliana
cactccggatcttcttt

SEQ ID NO: 65351 - DNA, 17 bp, Arabidopsis thaliana
cactccggtctgctgct

SEQ ID NO: 65352 - DNA, 17 bp, Arabidopsis thaliana
cactccgtggagcacgt

SEQ ID NO: 65353 - DNA, 17 bp, Arabidopsis thaliana
cactcctaagtgtgcgt

SEQ ID NO: 65354 - DNA, 17 bp, Arabidopsis thaliana
cactcctatttcctctc

SEQ ID NO: 65355 - DNA, 17 bp, Arabidopsis thaliana
cactcctggatcacttg

SEQ ID NO: 65356 - DNA, 17 bp, Arabidopsis thaliana
cactcctggtggtccga

SEQ ID NO: 65357 - DNA, 17 bp, Arabidopsis thaliana
cactcctgttgcagccg

SEQ ID NO: 65358 - DNA, 17 bp, Arabidopsis thaliana
cactcctgttgcagctg

SEQ ID NO: 65359 - DNA, 17 bp, Arabidopsis thaliana
cactcgaacatgtgatc

SEQ ID NO: 65360 - DNA, 17 bp, Arabidopsis thaliana
cactcgaaccgacgatc

SEQ ID NO: 65361 - DNA, 17 bp, Arabidopsis thaliana
cactcgaaccggcgacc

SEQ ID NO: 65362 - DNA, 17 bp, Arabidopsis thaliana
cactcgaaccggtgacc

SEQ ID NO: 65363 - DNA, 17 bp, Arabidopsis thaliana
cactcgaatgatacggc

SEQ ID NO: 65364 - DNA, 17 bp, Arabidopsis thaliana
cactcgaccaaggtgcc

SEQ ID NO: 65365 - DNA, 17 bp, Arabidopsis thaliana
cactcgaccacctagcc

SEQ ID NO: 65366 - DNA, 17 bp, Arabidopsis thaliana
cactcgaccactcactc

SEQ ID NO: 65367 - DNA, 17 bp, Arabidopsis thaliana
cactcgaccatgtgtaa

SEQ ID NO: 65368 - DNA, 17 bp, Arabidopsis thaliana
cactcgaccgcaagagc

SEQ ID NO: 65369 - DNA, 17 bp, Arabidopsis thaliana
cactcgaccgcggcccc

SEQ ID NO: 65370 - DNA, 17 bp, Arabidopsis thaliana
cactcgaccgcggtgct

SEQ ID NO: 65371 - DNA, 17 bp, Arabidopsis thaliana
cactcgacctcacccag

SEQ ID NO: 65372 - DNA, 17 bp, Arabidopsis thaliana
cactcgactgcacagtc

SEQ ID NO: 65373 - DNA, 17 bp, Arabidopsis thaliana
cactcgacttcttagta

SEQ ID NO: 65374 - DNA, 17 bp, Arabidopsis thaliana
cactcgagcggccactc

SEQ ID NO: 65375 - DNA, 17 bp, Arabidopsis thaliana
cactcgatcacgtcttc

SEQ ID NO: 65376 - DNA, 17 bp, Arabidopsis thaliana
cactcgattcgtgggat

SEQ ID NO: 65377 - DNA, 17 bp, Arabidopsis thaliana
cactcgattgcgatgtc

SEQ ID NO: 65378 - DNA, 17 bp, Arabidopsis thaliana
cactcgccaaaggtgtg

SEQ ID NO: 65379 - DNA, 17 bp, Arabidopsis thaliana
cactcgccgtcgttgca

SEQ ID NO: 65380 - DNA, 17 bp, Arabidopsis thaliana
cactcggcctagggcca

SEQ ID NO: 65381 - DNA, 17 bp, Arabidopsis thaliana
cactcggttatctgcag

SEQ ID NO: 65382 - DNA, 17 bp, Arabidopsis thaliana
cactcggttttagattt

SEQ ID NO: 65383 - DNA, 17 bp, Arabidopsis thaliana
cactcgttgtgtgacgg

SEQ ID NO: 65384 - DNA, 17 bp, Arabidopsis thaliana
cactcgttgtgtgttga

SEQ ID NO: 65385 - DNA, 17 bp, Arabidopsis thaliana
cactctacagaggaggc

SEQ ID NO: 65386 - DNA, 17 bp, Arabidopsis thaliana
cactctaccgactgcag

SEQ ID NO: 65387 - DNA, 17 bp, Arabidopsis thaliana
cactctacgcagcgatt

SEQ ID NO: 65388 - DNA, 17 bp, Arabidopsis thaliana
cactctactgcgccgct

SEQ ID NO: 65389 - DNA, 17 bp, Arabidopsis thaliana
cactctactttgatcac

SEQ ID NO: 65390 - DNA, 17 bp, Arabidopsis thaliana
cactctagaacttggat

SEQ ID NO: 65391 - DNA, 17 bp, Arabidopsis thaliana
cactctcaggcctcgac

SEQ ID NO: 65392 - DNA, 17 bp, Arabidopsis thaliana
cactctcatccttggga

SEQ ID NO: 65393 - DNA, 17 bp, Arabidopsis thaliana
cactctccggtgtgatg

SEQ ID NO: 65394 - DNA, 17 bp, Arabidopsis thaliana
cactctcgccatgtgtt

SEQ ID NO: 65395 - DNA, 17 bp, Arabidopsis thaliana
cactctcgcggatgggt

SEQ ID NO: 65396 - DNA, 17 bp, Arabidopsis thaliana
cactctcgttgtcagcc

SEQ ID NO: 65397 - DNA, 17 bp, Arabidopsis thaliana
cactctctagtgtcggt

SEQ ID NO: 65398 - DNA, 17 bp, Arabidopsis thaliana
cactctctccagtgttt

SEQ ID NO: 65399 - DNA, 17 bp, Arabidopsis thaliana
cactctctctggatttg

SEQ ID NO: 65400 - DNA, 17 bp, Arabidopsis thaliana
cactctctgttgcgggc

SEQ ID NO: 65401 - DNA, 17 bp, Arabidopsis thaliana
cactctgaacggttgtg

SEQ ID NO: 65402 - DNA, 17 bp, Arabidopsis thaliana
cactctgagagccggcg

SEQ ID NO: 65403 - DNA, 17 bp, Arabidopsis thaliana
cactctgatggcttatc

SEQ ID NO: 65404 - DNA, 17 bp, Arabidopsis thaliana
cactctgatggtgcaag

SEQ ID NO: 65405 - DNA, 17 bp, Arabidopsis thaliana
cactctgcctgggtgtc

SEQ ID NO: 65406 - DNA, 17 bp, Arabidopsis thaliana
cactctgctgggccgac

SEQ ID NO: 65407 - DNA, 17 bp, Arabidopsis thaliana
cactctgtagtacttcg

SEQ ID NO: 65408 - DNA, 17 bp, Arabidopsis thaliana
cactctgtccatatgat

SEQ ID NO: 65409 - DNA, 17 bp, Arabidopsis thaliana
cactctgtccgctctgc

SEQ ID NO: 65410 - DNA, 17 bp, Arabidopsis thaliana
cactctgtggaaacgac

SEQ ID NO: 65411 - DNA, 17 bp, Arabidopsis thaliana
cactctgtttcatgttg

SEQ ID NO: 65412 - DNA, 17 bp, Arabidopsis thaliana
cactcttattttctggg

SEQ ID NO: 65413 - DNA, 17 bp, Arabidopsis thaliana
cactcttctctcggctt

SEQ ID NO: 65414 - DNA, 17 bp, Arabidopsis thaliana
cactctttcgtctaagg

SEQ ID NO: 65415 - DNA, 17 bp, Arabidopsis thaliana
cactctttctgggctac

SEQ ID NO: 65416 - DNA, 17 bp, Arabidopsis thaliana
cactgaacaggagaaac

SEQ ID NO: 65417 - DNA, 17 bp, Arabidopsis thaliana
cactgaacatcatcaag

SEQ ID NO: 65418 - DNA, 17 bp, Arabidopsis thaliana
cactgaacgctatggag

SEQ ID NO: 65419 - DNA, 17 bp, Arabidopsis thaliana
cactgaacggagttaga

SEQ ID NO: 65420 - DNA, 17 bp, Arabidopsis thaliana
cactgaacgggttggtt

SEQ ID NO: 65421 - DNA, 17 bp, Arabidopsis thaliana
cactgaatccactgagc

SEQ ID NO: 65422 - DNA, 17 bp, Arabidopsis thaliana
cactgaatcttccgagg

SEQ ID NO: 65423 - DNA, 17 bp, Arabidopsis thaliana
cactgaattcagtttcc

SEQ ID NO: 65424 - DNA, 17 bp, Arabidopsis thaliana
cactgacaaatctggtg

SEQ ID NO: 65425 - DNA, 17 bp, Arabidopsis thaliana
cactgacctcttcgggg

SEQ ID NO: 65426 - DNA, 17 bp, Arabidopsis thaliana
cactgagaatgtcggct

SEQ ID NO: 65427 - DNA, 17 bp, Arabidopsis thaliana
cactgagacaactaaga

SEQ ID NO: 65428 - DNA, 17 bp, Arabidopsis thaliana
cactgagattcagccat

SEQ ID NO: 65429 - DNA, 17 bp, Arabidopsis thaliana
cactgagattcagccct

SEQ ID NO: 65430 - DNA, 17 bp, Arabidopsis thaliana
cactgagattccgccct

SEQ ID NO: 65431 - DNA, 17 bp, Arabidopsis thaliana
cactgagctaagacggc

SEQ ID NO: 65432 - DNA, 17 bp, Arabidopsis thaliana
cactgagctaatagccc

SEQ ID NO: 65433 - DNA, 17 bp, Arabidopsis thaliana
cactgagctctcgatag

SEQ ID NO: 65434 - DNA, 17 bp, Arabidopsis thaliana
cactgagctgttcatct

SEQ ID NO: 65435 - DNA, 17 bp, Arabidopsis thaliana
cactgagtcaactaacc

SEQ ID NO: 65436 - DNA, 17 bp, Arabidopsis thaliana
cactgagtgtccagccc

SEQ ID NO: 65437 - DNA, 17 bp, Arabidopsis thaliana
cactgatagatcttgag

SEQ ID NO: 65438 - DNA, 17 bp, Arabidopsis thaliana
cactgatatggatagtc

SEQ ID NO: 65439 - DNA, 17 bp, Arabidopsis thaliana
cactgatctcctaggct

SEQ ID NO: 65440 - DNA, 17 bp, Arabidopsis thaliana
cactgatctcgaaagcc

SEQ ID NO: 65441 - DNA, 17 bp, Arabidopsis thaliana
cactgatcttctgtgcg

SEQ ID NO: 65442 - DNA, 17 bp, Arabidopsis thaliana
cactgatgctgacacac

SEQ ID NO: 65443 - DNA, 17 bp, Arabidopsis thaliana
cactgatgctgacaccc

SEQ ID NO: 65444 - DNA, 17 bp, Arabidopsis thaliana
cactgatgctgacacct

SEQ ID NO: 65445 - DNA, 17 bp, Arabidopsis thaliana
cactgatttgttttcca

SEQ ID NO: 65446 - DNA, 17 bp, Arabidopsis thaliana
cactgatttgttttccc

SEQ ID NO: 65447 - DNA, 17 bp, Arabidopsis thaliana
cactgatttgttttccg

SEQ ID NO: 65448 - DNA, 17 bp, Arabidopsis thaliana
cactgatttgttttttt

SEQ ID NO: 65449 - DNA, 17 bp, Arabidopsis thaliana
cactgattttcttgttc

SEQ ID NO: 65450 - DNA, 17 bp, Arabidopsis thaliana
cactgcaacttgatgtg

SEQ ID NO: 65451 - DNA, 17 bp, Arabidopsis thaliana
cactgcaatcggatctt

SEQ ID NO: 65452 - DNA, 17 bp, Arabidopsis thaliana
cactgcaccagcccaac

SEQ ID NO: 65453 - DNA, 17 bp, Arabidopsis thaliana
cactgcactgtgcggtt

SEQ ID NO: 65454 - DNA, 17 bp, Arabidopsis thaliana
cactgcagatttcgaag

SEQ ID NO: 65455 - DNA, 17 bp, Arabidopsis thaliana
cactgcagggagagggg

SEQ ID NO: 65456 - DNA, 17 bp, Arabidopsis thaliana
cactgcagttgaaccgt

SEQ ID NO: 65457 - DNA, 17 bp, Arabidopsis thaliana
cactgcagttttcggtt

SEQ ID NO: 65458 - DNA, 17 bp, Arabidopsis thaliana
cactgccatgctaggaa

SEQ ID NO: 65459 - DNA, 17 bp, Arabidopsis thaliana
cactgccgcaaccacca

SEQ ID NO: 65460 - DNA, 17 bp, Arabidopsis thaliana
cactgccggttgatcgt

SEQ ID NO: 65461 - DNA, 17 bp, Arabidopsis thaliana
cactgcctctttttttt

SEQ ID NO: 65462 - DNA, 17 bp, Arabidopsis thaliana
cactgcctgggtgtcac

SEQ ID NO: 65463 - DNA, 17 bp, Arabidopsis thaliana
cactgcggaattggtgg

SEQ ID NO: 65464 - DNA, 17 bp, Arabidopsis thaliana
cactgcggactaaaatt

SEQ ID NO: 65465 - DNA, 17 bp, Arabidopsis thaliana
cactgcgtattcagatt

SEQ ID NO: 65466 - DNA, 17 bp, Arabidopsis thaliana
cactgcgtccactggtt

SEQ ID NO: 65467 - DNA, 17 bp, Arabidopsis thaliana
cactgcgtttctaccga

SEQ ID NO: 65468 - DNA, 17 bp, Arabidopsis thaliana
cactgcgttttttggtt

SEQ ID NO: 65469 - DNA, 17 bp, Arabidopsis thaliana
cactgctacgtgcgaaa

SEQ ID NO: 65470 - DNA, 17 bp, Arabidopsis thaliana
cactgctataaccgtat

SEQ ID NO: 65471 - DNA, 17 bp, Arabidopsis thaliana
cactgctataactgtat

SEQ ID NO: 65472 - DNA, 17 bp, Arabidopsis thaliana
cactgctcactccgccc

SEQ ID NO: 65473 - DNA, 17 bp, Arabidopsis thaliana
cactgctgcgccaagga

SEQ ID NO: 65474 - DNA, 17 bp, Arabidopsis thaliana
cactgctgctgaatggg

SEQ ID NO: 65475 - DNA, 17 bp, Arabidopsis thaliana
cactgctggaattaggc

SEQ ID NO: 65476 - DNA, 17 bp, Arabidopsis thaliana
cactgctgggcatggtc

SEQ ID NO: 65477 - DNA, 17 bp, Arabidopsis thaliana
cactgctgtgataatca

SEQ ID NO: 65478 - DNA, 17 bp, Arabidopsis thaliana
cactgcttatggacccg

SEQ ID NO: 65479 - DNA, 17 bp, Arabidopsis thaliana
cactgcttcatcatcgg

SEQ ID NO: 65480 - DNA, 17 bp, Arabidopsis thaliana
cactgcttcttctgaca

SEQ ID NO: 65481 - DNA, 17 bp, Arabidopsis thaliana
cactgcttgtatagggt

SEQ ID NO: 65482 - DNA, 17 bp, Arabidopsis thaliana
cactgctttccaagatc

SEQ ID NO: 65483 - DNA, 17 bp, Arabidopsis thaliana
cactgcttttctatggg

SEQ ID NO: 65484 - DNA, 17 bp, Arabidopsis thaliana
cactgcttttctgagac

SEQ ID NO: 65485 - DNA, 17 bp, Arabidopsis thaliana
cactggaattttgattc

SEQ ID NO: 65486 - DNA, 17 bp, Arabidopsis thaliana
cactggaccacaaatgc

SEQ ID NO: 65487 - DNA, 17 bp, Arabidopsis thaliana
cactggacccgttttta

SEQ ID NO: 65488 - DNA, 17 bp, Arabidopsis thaliana
cactggactatgcggtt

SEQ ID NO: 65489 - DNA, 17 bp, Arabidopsis thaliana
cactggactgccaacgg

SEQ ID NO: 65490 - DNA, 17 bp, Arabidopsis thaliana
cactggagcacaatgcg

SEQ ID NO: 65491 - DNA, 17 bp, Arabidopsis thaliana
cactggagcgatttgtc

SEQ ID NO: 65492 - DNA, 17 bp, Arabidopsis thaliana
cactggataagcttgag

SEQ ID NO: 65493 - DNA, 17 bp, Arabidopsis thaliana
cactggatagactgatc

SEQ ID NO: 65494 - DNA, 17 bp, Arabidopsis thaliana
cactggattagatggtg

SEQ ID NO: 65495 - DNA, 17 bp, Arabidopsis thaliana
cactggattctcgtacg

SEQ ID NO: 65496 - DNA, 17 bp, Arabidopsis thaliana
cactggctgagaaaaga

SEQ ID NO: 65497 - DNA, 17 bp, Arabidopsis thaliana
cactgggactaagacac

SEQ ID NO: 65498 - DNA, 17 bp, Arabidopsis thaliana
cactgggactgaaacac

SEQ ID NO: 65499 - DNA, 17 bp, Arabidopsis thaliana
cactgggactgagacac

SEQ ID NO: 65500 - DNA, 17 bp, Arabidopsis thaliana
cactgggccaacagctc

SEQ ID NO: 65501 - DNA, 17 bp, Arabidopsis thaliana
cactgggtggcgagacc

SEQ ID NO: 65502 - DNA, 17 bp, Arabidopsis thaliana
cactgggttatcgggtc

SEQ ID NO: 65503 - DNA, 17 bp, Arabidopsis thaliana
cactggtcccaactcgg

SEQ ID NO: 65504 - DNA, 17 bp, Arabidopsis thaliana
cactggtcctaagtcgg

SEQ ID NO: 65505 - DNA, 17 bp, Arabidopsis thaliana
cactggtcgacggatct

SEQ ID NO: 65506 - DNA, 17 bp, Arabidopsis thaliana
cactggtctggtgttac

SEQ ID NO: 65507 - DNA, 17 bp, Arabidopsis thaliana
cactggtggagacgcct

SEQ ID NO: 65508 - DNA, 17 bp, Arabidopsis thaliana
cactggtggagacggct

SEQ ID NO: 65509 - DNA, 17 bp, Arabidopsis thaliana
cactggtggagacgggt

SEQ ID NO: 65510 - DNA, 17 bp, Arabidopsis thaliana
cactggtgtgaggatgt

SEQ ID NO: 65511 - DNA, 17 bp, Arabidopsis thaliana
cactggtgtgatgatgt

SEQ ID NO: 65512 - DNA, 17 bp, Arabidopsis thaliana
cactggttcaattggag

SEQ ID NO: 65513 - DNA, 17 bp, Arabidopsis thaliana
cactggttccattcctt

SEQ ID NO: 65514 - DNA, 17 bp, Arabidopsis thaliana
cactggttcgaacccgg

SEQ ID NO: 65515 - DNA, 17 bp, Arabidopsis thaliana
cactgtaacatgggcct

SEQ ID NO: 65516 - DNA, 17 bp, Arabidopsis thaliana
cactgtactcggcctgt

SEQ ID NO: 65517 - DNA, 17 bp, Arabidopsis thaliana
cactgtagctgagatcg

SEQ ID NO: 65518 - DNA, 17 bp, Arabidopsis thaliana
cactgtatctttgtacc

SEQ ID NO: 65519 - DNA, 17 bp, Arabidopsis thaliana
cactgtccctgggattg

SEQ ID NO: 65520 - DNA, 17 bp, Arabidopsis thaliana
cactgtccctgtctacc

SEQ ID NO: 65521 - DNA, 17 bp, Arabidopsis thaliana
cactgtccctgtctact

SEQ ID NO: 65522 - DNA, 17 bp, Arabidopsis thaliana
cactgtccctgtctcct

SEQ ID NO: 65523 - DNA, 17 bp, Arabidopsis thaliana
cactgtctcactcactc

SEQ ID NO: 65524 - DNA, 17 bp, Arabidopsis thaliana
cactgtctgtcccgagt

SEQ ID NO: 65525 - DNA, 17 bp, Arabidopsis thaliana
cactgtcttggtgggtg

SEQ ID NO: 65526 - DNA, 17 bp, Arabidopsis thaliana
cactgtgaaactgcgaa

SEQ ID NO: 65527 - DNA, 17 bp, Arabidopsis thaliana
cactgtgaatatgtttg

SEQ ID NO: 65528 - DNA, 17 bp, Arabidopsis thaliana
cactgtgcgattcggcc

SEQ ID NO: 65529 - DNA, 17 bp, Arabidopsis thaliana
cactgtgcgattcggtc

SEQ ID NO: 65530 - DNA, 17 bp, Arabidopsis thaliana
cactgtggctttgatgt

SEQ ID NO: 65531 - DNA, 17 bp, Arabidopsis thaliana
cactgtggtgatccttg

SEQ ID NO: 65532 - DNA, 17 bp, Arabidopsis thaliana
cactgtgtggtctggac

SEQ ID NO: 65533 - DNA, 17 bp, Arabidopsis thaliana
cactgttaacgcccgtt

SEQ ID NO: 65534 - DNA, 17 bp, Arabidopsis thaliana
cactgttacgcaggaaa

SEQ ID NO: 65535 - DNA, 17 bp, Arabidopsis thaliana
cactgttagtagactgg

SEQ ID NO: 65536 - DNA, 17 bp, Arabidopsis thaliana
cactgttcagatgatgg

SEQ ID NO: 65537 - DNA, 17 bp, Arabidopsis thaliana
cactgttcaggaagaaa

SEQ ID NO: 65538 - DNA, 17 bp, Arabidopsis thaliana
cactgttccctgcgatc

SEQ ID NO: 65539 - DNA, 17 bp, Arabidopsis thaliana
cactgttccctgggatt

SEQ ID NO: 65540 - DNA, 17 bp, Arabidopsis thaliana
cactgttcctgtctact

SEQ ID NO: 65541 - DNA, 17 bp, Arabidopsis thaliana
cactgttgcagtgcggt

SEQ ID NO: 65542 - DNA, 17 bp, Arabidopsis thaliana
cactgttgcctgggtgt

SEQ ID NO: 65543 - DNA, 17 bp, Arabidopsis thaliana
cactgttgcgctgcgat

SEQ ID NO: 65544 - DNA, 17 bp, Arabidopsis thaliana
cactgttgcggtgcggt

SEQ ID NO: 65545 - DNA, 17 bp, Arabidopsis thaliana
cactgttggggtgcggt

SEQ ID NO: 65546 - DNA, 17 bp, Arabidopsis thaliana
cactgttgtgatacgat

SEQ ID NO: 65547 - DNA, 17 bp, Arabidopsis thaliana
cactgtttacatgggct

SEQ ID NO: 65548 - DNA, 17 bp, Arabidopsis thaliana
cactgtttcaaccaccg

SEQ ID NO: 65549 - DNA, 17 bp, Arabidopsis thaliana
cactgtttcagtgcggt

SEQ ID NO: 65550 - DNA, 17 bp, Arabidopsis thaliana
cactgtttcggtgcggg

SEQ ID NO: 65551 - DNA, 17 bp, Arabidopsis thaliana
cactgtttgattcgtac

SEQ ID NO: 65552 - DNA, 17 bp, Arabidopsis thaliana
cactgttttgtcatcgc

SEQ ID NO: 65553 - DNA, 17 bp, Arabidopsis thaliana
cactgtttttcgttgga

SEQ ID NO: 65554 - DNA, 17 bp, Arabidopsis thaliana
cacttaaaatggatctc

SEQ ID NO: 65555 - DNA, 17 bp, Arabidopsis thaliana
cacttaactctgtcatc

SEQ ID NO: 65556 - DNA, 17 bp, Arabidopsis thaliana
cacttaacttccgatgt

SEQ ID NO: 65557 - DNA, 17 bp, Arabidopsis thaliana
cacttaaggtcgttgtc

SEQ ID NO: 65558 - DNA, 17 bp, Arabidopsis thaliana
cacttaatcagctgcgc

SEQ ID NO: 65559 - DNA, 17 bp, Arabidopsis thaliana
cacttaattacctaatg

SEQ ID NO: 65560 - DNA, 17 bp, Arabidopsis thaliana
cacttacgctgagactg

SEQ ID NO: 65561 - DNA, 17 bp, Arabidopsis thaliana
cacttactggcttgctt

SEQ ID NO: 65562 - DNA, 17 bp, Arabidopsis thaliana
cacttactggtgtgatg

SEQ ID NO: 65563 - DNA, 17 bp, Arabidopsis thaliana
cacttactggtgtgttg

SEQ ID NO: 65564 - DNA, 17 bp, Arabidopsis thaliana
cacttacttgtcttagg

SEQ ID NO: 65565 - DNA, 17 bp, Arabidopsis thaliana
cacttagaccgaaccgt

SEQ ID NO: 65566 - DNA, 17 bp, Arabidopsis thaliana
cacttagaggttccgaa

SEQ ID NO: 65567 - DNA, 17 bp, Arabidopsis thaliana
cacttaggatggttagt

SEQ ID NO: 65568 - DNA, 17 bp, Arabidopsis thaliana
cacttaggattgttaga

SEQ ID NO: 65569 - DNA, 17 bp, Arabidopsis thaliana
cacttagtcgtatcctg

SEQ ID NO: 65570 - DNA, 17 bp, Arabidopsis thaliana
cacttagttccattgac

SEQ ID NO: 65571 - DNA, 17 bp, Arabidopsis thaliana
cacttatccaccattgc

SEQ ID NO: 65572 - DNA, 17 bp, Arabidopsis thaliana
cacttcaccggatgtgg

SEQ ID NO: 65573 - DNA, 17 bp, Arabidopsis thaliana
cacttcacggccggctt

SEQ ID NO: 65574 - DNA, 17 bp, Arabidopsis thaliana
cacttcagaacgcaaag

SEQ ID NO: 65575 - DNA, 17 bp, Arabidopsis thaliana
cacttcagccctttgtc

SEQ ID NO: 65576 - DNA, 17 bp, Arabidopsis thaliana
cacttcagtttgggtga

SEQ ID NO: 65577 - DNA, 17 bp, Arabidopsis thaliana
cacttcataacgcaaag

SEQ ID NO: 65578 - DNA, 17 bp, Arabidopsis thaliana
cacttcatcatcttcaa

SEQ ID NO: 65579 - DNA, 17 bp, Arabidopsis thaliana
cacttcatctgcagaag

SEQ ID NO: 65580 - DNA, 17 bp, Arabidopsis thaliana
cacttcatggcgatcaa

SEQ ID NO: 65581 - DNA, 17 bp, Arabidopsis thaliana
cacttcatttagttttc

SEQ ID NO: 65582 - DNA, 17 bp, Arabidopsis thaliana
cacttcatttttgggcg

SEQ ID NO: 65583 - DNA, 17 bp, Arabidopsis thaliana
cacttccaattgggctt

SEQ ID NO: 65584 - DNA, 17 bp, Arabidopsis thaliana
cacttccacggccacgg

SEQ ID NO: 65585 - DNA, 17 bp, Arabidopsis thaliana
cacttccataactactt

SEQ ID NO: 65586 - DNA, 17 bp, Arabidopsis thaliana
cacttcccgatctggat

SEQ ID NO: 65587 - DNA, 17 bp, Arabidopsis thaliana
cacttccgttatcgacg

SEQ ID NO: 65588 - DNA, 17 bp, Arabidopsis thaliana
cacttcctaaaggtctg

SEQ ID NO: 65589 - DNA, 17 bp, Arabidopsis thaliana
cacttcctatggatttg

SEQ ID NO: 65590 - DNA, 17 bp, Arabidopsis thaliana
cacttcctcaattctct

SEQ ID NO: 65591 - DNA, 17 bp, Arabidopsis thaliana
cacttcctctgctgctt

SEQ ID NO: 65592 - DNA, 17 bp, Arabidopsis thaliana
cacttcctgtaccatct

SEQ ID NO: 65593 - DNA, 17 bp, Arabidopsis thaliana
cacttcctttgtccgaa

SEQ ID NO: 65594 - DNA, 17 bp, Arabidopsis thaliana
cacttcgaaagttgtga

SEQ ID NO: 65595 - DNA, 17 bp, Arabidopsis thaliana
cacttcgcaggtcagca

SEQ ID NO: 65596 - DNA, 17 bp, Arabidopsis thaliana
cacttcggcctagaatc

SEQ ID NO: 65597 - DNA, 17 bp, Arabidopsis thaliana
cacttcgggctttacca

SEQ ID NO: 65598 - DNA, 17 bp, Arabidopsis thaliana
cacttcgggtccgataa

SEQ ID NO: 65599 - DNA, 17 bp, Arabidopsis thaliana
cacttcgtcctgggcag

SEQ ID NO: 65600 - DNA, 17 bp, Arabidopsis thaliana
cacttcgtgcccagacc

SEQ ID NO: 65601 - DNA, 17 bp, Arabidopsis thaliana
cacttcgttgactgggc

SEQ ID NO: 65602 - DNA, 17 bp, Arabidopsis thaliana
cacttctaagttcggtg

SEQ ID NO: 65603 - DNA, 17 bp, Arabidopsis thaliana
cacttctcacgttcaac

SEQ ID NO: 65604 - DNA, 17 bp, Arabidopsis thaliana
cacttctcagtcagctc

SEQ ID NO: 65605 - DNA, 17 bp, Arabidopsis thaliana
cacttctccccgaagga

SEQ ID NO: 65606 - DNA, 17 bp, Arabidopsis thaliana
cacttctccctgggtgt

SEQ ID NO: 65607 - DNA, 17 bp, Arabidopsis thaliana
cacttctccgatgaagg

SEQ ID NO: 65608 - DNA, 17 bp, Arabidopsis thaliana
cacttctccgatgatgt

SEQ ID NO: 65609 - DNA, 17 bp, Arabidopsis thaliana
cacttctcctcgatcgg

SEQ ID NO: 65610 - DNA, 17 bp, Arabidopsis thaliana
cacttctccttgcgatt

SEQ ID NO: 65611 - DNA, 17 bp, Arabidopsis thaliana
cacttctgattgctgag

SEQ ID NO: 65612 - DNA, 17 bp, Arabidopsis thaliana
cacttctgcaaggctct

SEQ ID NO: 65613 - DNA, 17 bp, Arabidopsis thaliana
cacttctgcctgggtgt

SEQ ID NO: 65614 - DNA, 17 bp, Arabidopsis thaliana
cacttctgctgcgaatg

SEQ ID NO: 65615 - DNA, 17 bp, Arabidopsis thaliana
cacttctgtagatggtt

SEQ ID NO: 65616 - DNA, 17 bp, Arabidopsis thaliana
cacttcttcgatgaagg

SEQ ID NO: 65617 - DNA, 17 bp, Arabidopsis thaliana
cacttgactgctgacgg

SEQ ID NO: 65618 - DNA, 17 bp, Arabidopsis thaliana
cacttgagcctgagtaa

SEQ ID NO: 65619 - DNA, 17 bp, Arabidopsis thaliana
cacttgatggaacttat

SEQ ID NO: 65620 - DNA, 17 bp, Arabidopsis thaliana
cacttgcaacattggcg

SEQ ID NO: 65621 - DNA, 17 bp, Arabidopsis thaliana
cacttgcacatgggtta

SEQ ID NO: 65622 - DNA, 17 bp, Arabidopsis thaliana
cacttgcacttctgacc

SEQ ID NO: 65623 - DNA, 17 bp, Arabidopsis thaliana
cacttgcaggagaggtt

SEQ ID NO: 65624 - DNA, 17 bp, Arabidopsis thaliana
cacttgcataaggtttc

SEQ ID NO: 65625 - DNA, 17 bp, Arabidopsis thaliana
cacttgcatatgcgcac

SEQ ID NO: 65626 - DNA, 17 bp, Arabidopsis thaliana
cacttgccaatttttct

SEQ ID NO: 65627 - DNA, 17 bp, Arabidopsis thaliana
cacttgccatttgccgg

SEQ ID NO: 65628 - DNA, 17 bp, Arabidopsis thaliana
cacttgcgaatcgttca

SEQ ID NO: 65629 - DNA, 17 bp, Arabidopsis thaliana
cacttgcgcttaagctt

SEQ ID NO: 65630 - DNA, 17 bp, Arabidopsis thaliana
cacttgcggctagcttc

SEQ ID NO: 65631 - DNA, 17 bp, Arabidopsis thaliana
cacttgctgggccacaa

SEQ ID NO: 65632 - DNA, 17 bp, Arabidopsis thaliana
cacttgcttcaagctgc

SEQ ID NO: 65633 - DNA, 17 bp, Arabidopsis thaliana
cacttgctttttggatg

SEQ ID NO: 65634 - DNA, 17 bp, Arabidopsis thaliana
cacttggatgacataac

SEQ ID NO: 65635 - DNA, 17 bp, Arabidopsis thaliana
cacttggcctgtcttct

SEQ ID NO: 65636 - DNA, 17 bp, Arabidopsis thaliana
cacttggctacatccgc

SEQ ID NO: 65637 - DNA, 17 bp, Arabidopsis thaliana
cacttgggccaaaccgg

SEQ ID NO: 65638 - DNA, 17 bp, Arabidopsis thaliana
cacttggtgggcaaatc

SEQ ID NO: 65639 - DNA, 17 bp, Arabidopsis thaliana
cacttggtttacatttc

SEQ ID NO: 65640 - DNA, 17 bp, Arabidopsis thaliana
cacttgtacatgggtta

SEQ ID NO: 65641 - DNA, 17 bp, Arabidopsis thaliana
cacttgtcagagatgac

SEQ ID NO: 65642 - DNA, 17 bp, Arabidopsis thaliana
cacttgtccgtgagaga

SEQ ID NO: 65643 - DNA, 17 bp, Arabidopsis thaliana
cacttgtctccattgat

SEQ ID NO: 65644 - DNA, 17 bp, Arabidopsis thaliana
cacttgtcttatggatt

SEQ ID NO: 65645 - DNA, 17 bp, Arabidopsis thaliana
cacttgtcttctgagct

SEQ ID NO: 65646 - DNA, 17 bp, Arabidopsis thaliana
cacttgtggccgtggag

SEQ ID NO: 65647 - DNA, 17 bp, Arabidopsis thaliana
cacttgtggctacttct

SEQ ID NO: 65648 - DNA, 17 bp, Arabidopsis thaliana
cacttgtgttagcagat

SEQ ID NO: 65649 - DNA, 17 bp, Arabidopsis thaliana
cacttgtgtttgcagat

SEQ ID NO: 65650 - DNA, 17 bp, Arabidopsis thaliana
cacttgttcaagttttg

SEQ ID NO: 65651 - DNA, 17 bp, Arabidopsis thaliana
cacttgttggccgtgaa

SEQ ID NO: 65652 - DNA, 17 bp, Arabidopsis thaliana
cacttgttgttgcgttg

SEQ ID NO: 65653 - DNA, 17 bp, Arabidopsis thaliana
cactttaaggattccac

SEQ ID NO: 65654 - DNA, 17 bp, Arabidopsis thaliana
cactttaaggggtactt

SEQ ID NO: 65655 - DNA, 17 bp, Arabidopsis thaliana
cactttatccgcagttg

SEQ ID NO: 65656 - DNA, 17 bp, Arabidopsis thaliana
cactttcaaaacacaag

SEQ ID NO: 65657 - DNA, 17 bp, Arabidopsis thaliana
cactttccaaggttgag

SEQ ID NO: 65658 - DNA, 17 bp, Arabidopsis thaliana
cactttcggggtgttat

SEQ ID NO: 65659 - DNA, 17 bp, Arabidopsis thaliana
cactttctatccacctc

SEQ ID NO: 65660 - DNA, 17 bp, Arabidopsis thaliana
cactttgaatggatgat

SEQ ID NO: 65661 - DNA, 17 bp, Arabidopsis thaliana
cactttgacttgttaaa

SEQ ID NO: 65662 - DNA, 17 bp, Arabidopsis thaliana
cactttgacttgttaat

SEQ ID NO: 65663 - DNA, 17 bp, Arabidopsis thaliana
cactttgatcatcaaat

SEQ ID NO: 65664 - DNA, 17 bp, Arabidopsis thaliana
cactttgatctccttcc

SEQ ID NO: 65665 - DNA, 17 bp, Arabidopsis thaliana
cactttgatgtgcttag

SEQ ID NO: 65666 - DNA, 17 bp, Arabidopsis thaliana
cactttgatttcttcag

SEQ ID NO: 65667 - DNA, 17 bp, Arabidopsis thaliana
cactttgcacaatacgt

SEQ ID NO: 65668 - DNA, 17 bp, Arabidopsis thaliana
cactttgcatcaaggtt

SEQ ID NO: 65669 - DNA, 17 bp, Arabidopsis thaliana
cactttgcatgattagg

SEQ ID NO: 65670 - DNA, 17 bp, Arabidopsis thaliana
cactttgcgaattcaca

SEQ ID NO: 65671 - DNA, 17 bp, Arabidopsis thaliana
cactttgctgtgctcag

SEQ ID NO: 65672 - DNA, 17 bp, Arabidopsis thaliana
cactttgcttcaaggtt

SEQ ID NO: 65673 - DNA, 17 bp, Arabidopsis thaliana
cactttgcttggactcc

SEQ ID NO: 65674 - DNA, 17 bp, Arabidopsis thaliana
cactttggctcggaacg

SEQ ID NO: 65675 - DNA, 17 bp, Arabidopsis thaliana
cactttggtgacatagg

SEQ ID NO: 65676 - DNA, 17 bp, Arabidopsis thaliana
cactttggtgattggct

SEQ ID NO: 65677 - DNA, 17 bp, Arabidopsis thaliana
cactttggttcgtcgca

SEQ ID NO: 65678 - DNA, 17 bp, Arabidopsis thaliana
cactttgtcaacaaggc

SEQ ID NO: 65679 - DNA, 17 bp, Arabidopsis thaliana
cactttgtgggtttctc

SEQ ID NO: 65680 - DNA, 17 bp, Arabidopsis thaliana
cactttgttgtgctcag

SEQ ID NO: 65681 - DNA, 17 bp, Arabidopsis thaliana
cactttgttgtgctcat

SEQ ID NO: 65682 - DNA, 17 bp, Arabidopsis thaliana
cacttttaagctagctt

SEQ ID NO: 65683 - DNA, 17 bp, Arabidopsis thaliana
cacttttacatttgcac

SEQ ID NO: 65684 - DNA, 17 bp, Arabidopsis thaliana
cacttttcaaagtcttg

SEQ ID NO: 65685 - DNA, 17 bp, Arabidopsis thaliana
cacttttcactgtttga

SEQ ID NO: 65686 - DNA, 17 bp, Arabidopsis thaliana
cacttttcagatttcat

SEQ ID NO: 65687 - DNA, 17 bp, Arabidopsis thaliana
cacttttccttctttga

SEQ ID NO: 65688 - DNA, 17 bp, Arabidopsis thaliana
cacttttcgtgatttgg

SEQ ID NO: 65689 - DNA, 17 bp, Arabidopsis thaliana
cacttttctaaagggtg

SEQ ID NO: 65690 - DNA, 17 bp, Arabidopsis thaliana
cacttttgagggagtga

SEQ ID NO: 65691 - DNA, 17 bp, Arabidopsis thaliana
cacttttgccgatggag

SEQ ID NO: 65692 - DNA, 17 bp, Arabidopsis thaliana
cacttttgccttctggt

SEQ ID NO: 65693 - DNA, 17 bp, Arabidopsis thaliana
cacttttgtctctcgac

SEQ ID NO: 65694 - DNA, 17 bp, Arabidopsis thaliana
cactttttctgcacttt

SEQ ID NO: 65695 - DNA, 17 bp, Arabidopsis thaliana
cactttttctgtcaacc

SEQ ID NO: 65696 - DNA, 17 bp, Arabidopsis thaliana
cactttttgaaagttca

SEQ ID NO: 65697 - DNA, 17 bp, Arabidopsis thaliana
cactttttgtagaacga

SEQ ID NO: 65698 - DNA, 17 bp, Arabidopsis thaliana
cactttttgtgatttgt

SEQ ID NO: 65699 - DNA, 17 bp, Arabidopsis thaliana
cactttttgtgattttg

SEQ ID NO: 65700 - DNA, 17 bp, Arabidopsis thaliana
cacttttttccccatgg

SEQ ID NO: 65701 - DNA, 17 bp, Arabidopsis thaliana
cacttttttgtctccgg

SEQ ID NO: 65702 - DNA, 17 bp, Arabidopsis thaliana
cagaaaacattgtgcaa

SEQ ID NO: 65703 - DNA, 17 bp, Arabidopsis thaliana
cagaaaactttctggag

SEQ ID NO: 65704 - DNA, 17 bp, Arabidopsis thaliana
cagaaaatcgaatcctc

SEQ ID NO: 65705 - DNA, 17 bp, Arabidopsis thaliana
cagaaaatgaattgtct

SEQ ID NO: 65706 - DNA, 17 bp, Arabidopsis thaliana
cagaaacagcgtgttta

SEQ ID NO: 65707 - DNA, 17 bp, Arabidopsis thaliana
cagaaaccatcaaaggt

SEQ ID NO: 65708 - DNA, 17 bp, Arabidopsis thaliana
cagaaaccgcttttact

SEQ ID NO: 65709 - DNA, 17 bp, Arabidopsis thaliana
cagaaacgctgatggag

SEQ ID NO: 65710 - DNA, 17 bp, Arabidopsis thaliana
cagaaacgcttctctag

SEQ ID NO: 65711 - DNA, 17 bp, Arabidopsis thaliana
cagaaacgtcctacaac

SEQ ID NO: 65712 - DNA, 17 bp, Arabidopsis thaliana
cagaaacgtcgtcgtgc

SEQ ID NO: 65713 - DNA, 17 bp, Arabidopsis thaliana
cagaaacgtctctcaga

SEQ ID NO: 65714 - DNA, 17 bp, Arabidopsis thaliana
cagaaacgtctctgact

SEQ ID NO: 65715 - DNA, 17 bp, Arabidopsis thaliana
cagaaactaaagccggc

SEQ ID NO: 65716 - DNA, 17 bp, Arabidopsis thaliana
cagaaactcagacgtgt

SEQ ID NO: 65717 - DNA, 17 bp, Arabidopsis thaliana
cagaaactctttggcac

SEQ ID NO: 65718 - DNA, 17 bp, Arabidopsis thaliana
cagaaactgcgtcatgt

SEQ ID NO: 65719 - DNA, 17 bp, Arabidopsis thaliana
cagaaactgtcacacta

SEQ ID NO: 65720 - DNA, 17 bp, Arabidopsis thaliana
cagaaactgtgtgtgct

SEQ ID NO: 65721 - DNA, 17 bp, Arabidopsis thaliana
cagaaagacgtgttgct

SEQ ID NO: 65722 - DNA, 17 bp, Arabidopsis thaliana
cagaaagatcacagtcg

SEQ ID NO: 65723 - DNA, 17 bp, Arabidopsis thaliana
cagaaagcaggaggatc

SEQ ID NO: 65724 - DNA, 17 bp, Arabidopsis thaliana
cagaaagcctccttggt

SEQ ID NO: 65725 - DNA, 17 bp, Arabidopsis thaliana
cagaaagcgggtcattc

SEQ ID NO: 65726 - DNA, 17 bp, Arabidopsis thaliana
cagaaagctcaaaaggc

SEQ ID NO: 65727 - DNA, 17 bp, Arabidopsis thaliana
cagaaaggtagttcacg

SEQ ID NO: 65728 - DNA, 17 bp, Arabidopsis thaliana
cagaaagtgtgccgact

SEQ ID NO: 65729 - DNA, 17 bp, Arabidopsis thaliana
cagaaagtttgactcgg

SEQ ID NO: 65730 - DNA, 17 bp, Arabidopsis thaliana
cagaaatacagacagtc

SEQ ID NO: 65731 - DNA, 17 bp, Arabidopsis thaliana
cagaaatacaggcggcc

SEQ ID NO: 65732 - DNA, 17 bp, Arabidopsis thaliana
cagaaatactatgaatt

SEQ ID NO: 65733 - DNA, 17 bp, Arabidopsis thaliana
cagaaatactatggatt

SEQ ID NO: 65734 - DNA, 17 bp, Arabidopsis thaliana
cagaaatatccgaaagt

SEQ ID NO: 65735 - DNA, 17 bp, Arabidopsis thaliana
cagaaatatggttctgt

SEQ ID NO: 65736 - DNA, 17 bp, Arabidopsis thaliana
cagaaatctccaaggac

SEQ ID NO: 65737 - DNA, 17 bp, Arabidopsis thaliana
cagaaatcttcgctctc

SEQ ID NO: 65738 - DNA, 17 bp, Arabidopsis thaliana
cagaaatgcaagttgct

SEQ ID NO: 65739 - DNA, 17 bp, Arabidopsis thaliana
cagaaatgcaggcggcc

SEQ ID NO: 65740 - DNA, 17 bp, Arabidopsis thaliana
cagaaatgcaggcggtc

SEQ ID NO: 65741 - DNA, 17 bp, Arabidopsis thaliana
cagaaatgcaggcggtt

SEQ ID NO: 65742 - DNA, 17 bp, Arabidopsis thaliana
cagaaatgcaggtgact

SEQ ID NO: 65743 - DNA, 17 bp, Arabidopsis thaliana
cagaaatgcagtgtggc

SEQ ID NO: 65744 - DNA, 17 bp, Arabidopsis thaliana
cagaaatgcatgcggct

SEQ ID NO: 65745 - DNA, 17 bp, Arabidopsis thaliana
cagaaatgcatgcggtc

SEQ ID NO: 65746 - DNA, 17 bp, Arabidopsis thaliana
cagaaatgcatgtggct

SEQ ID NO: 65747 - DNA, 17 bp, Arabidopsis thaliana
cagaaatgtaagtgacc

SEQ ID NO: 65748 - DNA, 17 bp, Arabidopsis thaliana
cagaaattcctgagttt

SEQ ID NO: 65749 - DNA, 17 bp, Arabidopsis thaliana
cagaaattggtactttt

SEQ ID NO: 65750 - DNA, 17 bp, Arabidopsis thaliana
cagaacaagcgtcagct

SEQ ID NO: 65751 - DNA, 17 bp, Arabidopsis thaliana
cagaacacttgttttgc

SEQ ID NO: 65752 - DNA, 17 bp, Arabidopsis thaliana
cagaacagctgcaaaat

SEQ ID NO: 65753 - DNA, 17 bp, Arabidopsis thaliana
cagaacatcaacatttg

SEQ ID NO: 65754 - DNA, 17 bp, Arabidopsis thaliana
cagaacattatcagtgg

SEQ ID NO: 65755 - DNA, 17 bp, Arabidopsis thaliana
cagaaccaaagcatatg

SEQ ID NO: 65756 - DNA, 17 bp, Arabidopsis thaliana
cagaaccagcgtcagct

SEQ ID NO: 65757 - DNA, 17 bp, Arabidopsis thaliana
cagaaccatctctgagt

SEQ ID NO: 65758 - DNA, 17 bp, Arabidopsis thaliana
cagaacccgtgatgatt

SEQ ID NO: 65759 - DNA, 17 bp, Arabidopsis thaliana
cagaaccctaaacctag

SEQ ID NO: 65760 - DNA, 17 bp, Arabidopsis thaliana
cagaaccggtctgtgat

SEQ ID NO: 65761 - DNA, 17 bp, Arabidopsis thaliana
cagaacctcctggcggt

SEQ ID NO: 65762 - DNA, 17 bp, Arabidopsis thaliana
cagaacgaagtcgatat

SEQ ID NO: 65763 - DNA, 17 bp, Arabidopsis thaliana
cagaacggtttattatc

SEQ ID NO: 65764 - DNA, 17 bp, Arabidopsis thaliana
cagaactagattggatt

SEQ ID NO: 65765 - DNA, 17 bp, Arabidopsis thaliana
cagaactattggctctg

SEQ ID NO: 65766 - DNA, 17 bp, Arabidopsis thaliana
cagaactccgcagttaa

SEQ ID NO: 65767 - DNA, 17 bp, Arabidopsis thaliana
cagaactggacagggta

SEQ ID NO: 65768 - DNA, 17 bp, Arabidopsis thaliana
cagaactggtacggaca

SEQ ID NO: 65769 - DNA, 17 bp, Arabidopsis thaliana
cagaactggttcggaca

SEQ ID NO: 65770 - DNA, 17 bp, Arabidopsis thaliana
cagaactgtgtaatgct

SEQ ID NO: 65771 - DNA, 17 bp, Arabidopsis thaliana
cagaacttgaaccatca

SEQ ID NO: 65772 - DNA, 17 bp, Arabidopsis thaliana
cagaagaagaaggaagg

SEQ ID NO: 65773 - DNA, 17 bp, Arabidopsis thaliana
cagaagaccttgtggct

SEQ ID NO: 65774 - DNA, 17 bp, Arabidopsis thaliana
cagaagacgaatggaat

SEQ ID NO: 65775 - DNA, 17 bp, Arabidopsis thaliana
cagaagacgatacaagt

SEQ ID NO: 65776 - DNA, 17 bp, Arabidopsis thaliana
cagaagactctgctaca

SEQ ID NO: 65777 - DNA, 17 bp, Arabidopsis thaliana
cagaagagatttcttcc

SEQ ID NO: 65778 - DNA, 17 bp, Arabidopsis thaliana
cagaagaggcagccacc

SEQ ID NO: 65779 - DNA, 17 bp, Arabidopsis thaliana
cagaagatgatgataga

SEQ ID NO: 65780 - DNA, 17 bp, Arabidopsis thaliana
cagaagattcagctaga

SEQ ID NO: 65781 - DNA, 17 bp, Arabidopsis thaliana
cagaagattgcgtgatt

SEQ ID NO: 65782 - DNA, 17 bp, Arabidopsis thaliana
cagaagcccatcaagca

SEQ ID NO: 65783 - DNA, 17 bp, Arabidopsis thaliana
cagaagcctgatactga

SEQ ID NO: 65784 - DNA, 17 bp, Arabidopsis thaliana
cagaaggcttggggccc

SEQ ID NO: 65785 - DNA, 17 bp, Arabidopsis thaliana
cagaaggcttggggcgc

SEQ ID NO: 65786 - DNA, 17 bp, Arabidopsis thaliana
cagaagggtgaaagcgt

SEQ ID NO: 65787 - DNA, 17 bp, Arabidopsis thaliana
cagaaggtgtgttcgat

SEQ ID NO: 65788 - DNA, 17 bp, Arabidopsis thaliana
cagaaggttctgggccg

SEQ ID NO: 65789 - DNA, 17 bp, Arabidopsis thaliana
cagaaggttctgggctg

SEQ ID NO: 65790 - DNA, 17 bp, Arabidopsis thaliana
cagaagtactgggatct

SEQ ID NO: 65791 - DNA, 17 bp, Arabidopsis thaliana
cagaagtccttggaagc

SEQ ID NO: 65792 - DNA, 17 bp, Arabidopsis thaliana
cagaagtctacagcagc

SEQ ID NO: 65793 - DNA, 17 bp, Arabidopsis thaliana
cagaagtctattttgtg

SEQ ID NO: 65794 - DNA, 17 bp, Arabidopsis thaliana
cagaagtcttggcttgg

SEQ ID NO: 65795 - DNA, 17 bp, Arabidopsis thaliana
cagaagttcacgattgg

SEQ ID NO: 65796 - DNA, 17 bp, Arabidopsis thaliana
cagaagttggtgattga

SEQ ID NO: 65797 - DNA, 17 bp, Arabidopsis thaliana
cagaataaccgagcgtt

SEQ ID NO: 65798 - DNA, 17 bp, Arabidopsis thaliana
cagaatagccagccttc

SEQ ID NO: 65799 - DNA, 17 bp, Arabidopsis thaliana
cagaatagtggacaagt

SEQ ID NO: 65800 - DNA, 17 bp, Arabidopsis thaliana
cagaatatgtccatctc

SEQ ID NO: 65801 - DNA, 17 bp, Arabidopsis thaliana
cagaatatgtccgagtg

SEQ ID NO: 65802 - DNA, 17 bp, Arabidopsis thaliana
cagaatattttgagact

SEQ ID NO: 65803 - DNA, 17 bp, Arabidopsis thaliana
cagaatcaacatttggc

SEQ ID NO: 65804 - DNA, 17 bp, Arabidopsis thaliana
cagaatcaaggcaagaa

SEQ ID NO: 65805 - DNA, 17 bp, Arabidopsis thaliana
cagaatcaccaagttcg

SEQ ID NO: 65806 - DNA, 17 bp, Arabidopsis thaliana
cagaatcactttgtcga

SEQ ID NO: 65807 - DNA, 17 bp, Arabidopsis thaliana
cagaatcagtgattgca

SEQ ID NO: 65808 - DNA, 17 bp, Arabidopsis thaliana
cagaatccgcctcagac

SEQ ID NO: 65809 - DNA, 17 bp, Arabidopsis thaliana
cagaatcgatttggcgg

SEQ ID NO: 65810 - DNA, 17 bp, Arabidopsis thaliana
cagaatcggcgtgaaaa

SEQ ID NO: 65811 - DNA, 17 bp, Arabidopsis thaliana
cagaatcggcgtgaaag

SEQ ID NO: 65812 - DNA, 17 bp, Arabidopsis thaliana
cagaatcgggcaactag

SEQ ID NO: 65813 - DNA, 17 bp, Arabidopsis thaliana
cagaatctaacgttctt

SEQ ID NO: 65814 - DNA, 17 bp, Arabidopsis thaliana
cagaatctacgcaagca

SEQ ID NO: 65815 - DNA, 17 bp, Arabidopsis thaliana
cagaatctctgcaccac

SEQ ID NO: 65816 - DNA, 17 bp, Arabidopsis thaliana
cagaatctcttaatcac

SEQ ID NO: 65817 - DNA, 17 bp, Arabidopsis thaliana
cagaatcttgagatgga

SEQ ID NO: 65818 - DNA, 17 bp, Arabidopsis thaliana
cagaatcttgatgacgc

SEQ ID NO: 65819 - DNA, 17 bp, Arabidopsis thaliana
cagaatcttgatgatgc

SEQ ID NO: 65820 - DNA, 17 bp, Arabidopsis thaliana
cagaatgaaacaacgtt

SEQ ID NO: 65821 - DNA, 17 bp, Arabidopsis thaliana
cagaatgctgatactcc

SEQ ID NO: 65822 - DNA, 17 bp, Arabidopsis thaliana
cagaatgctgatacttc

SEQ ID NO: 65823 - DNA, 17 bp, Arabidopsis thaliana
cagaatgtagtccggtt

SEQ ID NO: 65824 - DNA, 17 bp, Arabidopsis thaliana
cagaatgtttagtggac

SEQ ID NO: 65825 - DNA, 17 bp, Arabidopsis thaliana
cagaattaaccgaggtt

SEQ ID NO: 65826 - DNA, 17 bp, Arabidopsis thaliana
cagaattcttgctgagc

SEQ ID NO: 65827 - DNA, 17 bp, Arabidopsis thaliana
cagaatttccgaccaaa

SEQ ID NO: 65828 - DNA, 17 bp, Arabidopsis thaliana
cagacaaaaccgtgtat

SEQ ID NO: 65829 - DNA, 17 bp, Arabidopsis thaliana
cagacaaaagactgcgc

SEQ ID NO: 65830 - DNA, 17 bp, Arabidopsis thaliana
cagacaaaagccatttg

SEQ ID NO: 65831 - DNA, 17 bp, Arabidopsis thaliana
cagacaaagggtgttgg

SEQ ID NO: 65832 - DNA, 17 bp, Arabidopsis thaliana
cagacaaattagaccgc

SEQ ID NO: 65833 - DNA, 17 bp, Arabidopsis thaliana
cagacaagacttgtctt

SEQ ID NO: 65834 - DNA, 17 bp, Arabidopsis thaliana
cagacaagattcagcat

SEQ ID NO: 65835 - DNA, 17 bp, Arabidopsis thaliana
cagacaagcttggaccc

SEQ ID NO: 65836 - DNA, 17 bp, Arabidopsis thaliana
cagacaaggaacggctg

SEQ ID NO: 65837 - DNA, 17 bp, Arabidopsis thaliana
cagacaaggatgacttg

SEQ ID NO: 65838 - DNA, 17 bp, Arabidopsis thaliana
cagacaagttttttcgc

SEQ ID NO: 65839 - DNA, 17 bp, Arabidopsis thaliana
cagacaataaaccgttg

SEQ ID NO: 65840 - DNA, 17 bp, Arabidopsis thaliana
cagacaataaactgtcg

SEQ ID NO: 65841 - DNA, 17 bp, Arabidopsis thaliana
cagacaatctttgctaa

SEQ ID NO: 65842 - DNA, 17 bp, Arabidopsis thaliana
cagacaatgacaaccgt

SEQ ID NO: 65843 - DNA, 17 bp, Arabidopsis thaliana
cagacacagcagaagca

SEQ ID NO: 65844 - DNA, 17 bp, Arabidopsis thaliana
cagacacccctttgttt

SEQ ID NO: 65845 - DNA, 17 bp, Arabidopsis thaliana
cagacacctgagcaggc

SEQ ID NO: 65846 - DNA, 17 bp, Arabidopsis thaliana
cagacactcggccaagg

SEQ ID NO: 65847 - DNA, 17 bp, Arabidopsis thaliana
cagacactgggtgtggt

SEQ ID NO: 65848 - DNA, 17 bp, Arabidopsis thaliana
cagacactgtgttctag

SEQ ID NO: 65849 - DNA, 17 bp, Arabidopsis thaliana
cagacagctgcttttta

SEQ ID NO: 65850 - DNA, 17 bp, Arabidopsis thaliana
cagacaggttgcctgaa

SEQ ID NO: 65851 - DNA, 17 bp, Arabidopsis thaliana
cagacagtagcacactg

SEQ ID NO: 65852 - DNA, 17 bp, Arabidopsis thaliana
cagacagtgacgatagc

SEQ ID NO: 65853 - DNA, 17 bp, Arabidopsis thaliana
cagacagtgtggtggtc

SEQ ID NO: 65854 - DNA, 17 bp, Arabidopsis thaliana
cagacagtttttttgat

SEQ ID NO: 65855 - DNA, 17 bp, Arabidopsis thaliana
cagacatacgggtgcca

SEQ ID NO: 65856 - DNA, 17 bp, Arabidopsis thaliana
cagacatcaaagtggtg

SEQ ID NO: 65857 - DNA, 17 bp, Arabidopsis thaliana
cagacatcaaatttggg

SEQ ID NO: 65858 - DNA, 17 bp, Arabidopsis thaliana
cagacatcatcttcacc

SEQ ID NO: 65859 - DNA, 17 bp, Arabidopsis thaliana
cagacatccgatttgct

SEQ ID NO: 65860 - DNA, 17 bp, Arabidopsis thaliana
cagacatcgtctgcacc

SEQ ID NO: 65861 - DNA, 17 bp, Arabidopsis thaliana
cagacatgccacttgta

SEQ ID NO: 65862 - DNA, 17 bp, Arabidopsis thaliana
cagacatgcgagttaac

SEQ ID NO: 65863 - DNA, 17 bp, Arabidopsis thaliana
cagacattcatcacgcg

SEQ ID NO: 65864 - DNA, 17 bp, Arabidopsis thaliana
cagaccaaagatgtcgt

SEQ ID NO: 65865 - DNA, 17 bp, Arabidopsis thaliana
cagaccacacagtgatc

SEQ ID NO: 65866 - DNA, 17 bp, Arabidopsis thaliana
cagaccaccaccaccgc

SEQ ID NO: 65867 - DNA, 17 bp, Arabidopsis thaliana
cagaccaccattcatgt

SEQ ID NO: 65868 - DNA, 17 bp, Arabidopsis thaliana
cagaccactgacagctt

SEQ ID NO: 65869 - DNA, 17 bp, Arabidopsis thaliana
cagaccacttcactcga

SEQ ID NO: 65870 - DNA, 17 bp, Arabidopsis thaliana
cagaccagaaggagtgc

SEQ ID NO: 65871 - DNA, 17 bp, Arabidopsis thaliana
cagaccagcccgaggta

SEQ ID NO: 65872 - DNA, 17 bp, Arabidopsis thaliana
cagaccaggcttcattc

SEQ ID NO: 65873 - DNA, 17 bp, Arabidopsis thaliana
cagaccagtcatctgaa

SEQ ID NO: 65874 - DNA, 17 bp, Arabidopsis thaliana
cagaccataggtttgct

SEQ ID NO: 65875 - DNA, 17 bp, Arabidopsis thaliana
cagaccatccttatcaa

SEQ ID NO: 65876 - DNA, 17 bp, Arabidopsis thaliana
cagaccatctccatcgg

SEQ ID NO: 65877 - DNA, 17 bp, Arabidopsis thaliana
cagaccatttgtgagaa

SEQ ID NO: 65878 - DNA, 17 bp, Arabidopsis thaliana
cagacccaaaccgtccg

SEQ ID NO: 65879 - DNA, 17 bp, Arabidopsis thaliana
cagacccatcgtttttg

SEQ ID NO: 65880 - DNA, 17 bp, Arabidopsis thaliana
cagaccccatctatttg

SEQ ID NO: 65881 - DNA, 17 bp, Arabidopsis thaliana
cagacccgaaaccatag

SEQ ID NO: 65882 - DNA, 17 bp, Arabidopsis thaliana
cagacccgaaatagttt

SEQ ID NO: 65883 - DNA, 17 bp, Arabidopsis thaliana
cagacccgaaccgtccg

SEQ ID NO: 65884 - DNA, 17 bp, Arabidopsis thaliana
cagacccgatggaagca

SEQ ID NO: 65885 - DNA, 17 bp, Arabidopsis thaliana
cagacccgggttcattt

SEQ ID NO: 65886 - DNA, 17 bp, Arabidopsis thaliana
cagacccgggttcgatt

SEQ ID NO: 65887 - DNA, 17 bp, Arabidopsis thaliana
cagacccgggttcgttt

SEQ ID NO: 65888 - DNA, 17 bp, Arabidopsis thaliana
cagacccgggtttcccg

SEQ ID NO: 65889 - DNA, 17 bp, Arabidopsis thaliana
cagacccgtaggttggg

SEQ ID NO: 65890 - DNA, 17 bp, Arabidopsis thaliana
cagaccctgtcgcacca

SEQ ID NO: 65891 - DNA, 17 bp, Arabidopsis thaliana
cagaccctgttgagctt

SEQ ID NO: 65892 - DNA, 17 bp, Arabidopsis thaliana
cagaccgaagtcgatat

SEQ ID NO: 65893 - DNA, 17 bp, Arabidopsis thaliana
cagaccgacatttaact

SEQ ID NO: 65894 - DNA, 17 bp, Arabidopsis thaliana
cagaccgactgggccac

SEQ ID NO: 65895 - DNA, 17 bp, Arabidopsis thaliana
cagaccgagaagacaag

SEQ ID NO: 65896 - DNA, 17 bp, Arabidopsis thaliana
cagaccgagacacaagg

SEQ ID NO: 65897 - DNA, 17 bp, Arabidopsis thaliana
cagaccgagcgagtgaa

SEQ ID NO: 65898 - DNA, 17 bp, Arabidopsis thaliana
cagaccgagcgagtgca

SEQ ID NO: 65899 - DNA, 17 bp, Arabidopsis thaliana
cagaccgagtgccgctc

SEQ ID NO: 65900 - DNA, 17 bp, Arabidopsis thaliana
cagaccgcctgcatttc

SEQ ID NO: 65901 - DNA, 17 bp, Arabidopsis thaliana
cagaccgctttgtccgc

SEQ ID NO: 65902 - DNA, 17 bp, Arabidopsis thaliana
cagaccgctttgtccgt

SEQ ID NO: 65903 - DNA, 17 bp, Arabidopsis thaliana
cagaccgcttttcttcc

SEQ ID NO: 65904 - DNA, 17 bp, Arabidopsis thaliana
cagaccggtagacttga

SEQ ID NO: 65905 - DNA, 17 bp, Arabidopsis thaliana
cagaccggtgtccatcc

SEQ ID NO: 65906 - DNA, 17 bp, Arabidopsis thaliana
cagaccgtgaatcagct

SEQ ID NO: 65907 - DNA, 17 bp, Arabidopsis thaliana
cagaccgttccacatta

SEQ ID NO: 65908 - DNA, 17 bp, Arabidopsis thaliana
cagaccgttcctaaccc

SEQ ID NO: 65909 - DNA, 17 bp, Arabidopsis thaliana
cagaccgtttgcttcca

SEQ ID NO: 65910 - DNA, 17 bp, Arabidopsis thaliana
cagacctaggggattac

SEQ ID NO: 65911 - DNA, 17 bp, Arabidopsis thaliana
cagacctagtgaagatg

SEQ ID NO: 65912 - DNA, 17 bp, Arabidopsis thaliana
cagacctcacacaattg

SEQ ID NO: 65913 - DNA, 17 bp, Arabidopsis thaliana
cagacctcagcctgcta

SEQ ID NO: 65914 - DNA, 17 bp, Arabidopsis thaliana
cagacctcgttccgagt

SEQ ID NO: 65915 - DNA, 17 bp, Arabidopsis thaliana
cagacctctgtggacaa

SEQ ID NO: 65916 - DNA, 17 bp, Arabidopsis thaliana
cagacctcttggtgtaa

SEQ ID NO: 65917 - DNA, 17 bp, Arabidopsis thaliana
cagacctcttggtgtag

SEQ ID NO: 65918 - DNA, 17 bp, Arabidopsis thaliana
cagacctgatgaagatg

SEQ ID NO: 65919 - DNA, 17 bp, Arabidopsis thaliana
cagacctggtgaagatg

SEQ ID NO: 65920 - DNA, 17 bp, Arabidopsis thaliana
cagaccttctctacatg

SEQ ID NO: 65921 - DNA, 17 bp, Arabidopsis thaliana
cagaccttggtccaatt

SEQ ID NO: 65922 - DNA, 17 bp, Arabidopsis thaliana
cagacctttgtcgctaa

SEQ ID NO: 65923 - DNA, 17 bp, Arabidopsis thaliana
cagaccttttggtgtag

SEQ ID NO: 65924 - DNA, 17 bp, Arabidopsis thaliana
cagacgaaatgacccgt

SEQ ID NO: 65925 - DNA, 17 bp, Arabidopsis thaliana
cagacgaagctgcgcag

SEQ ID NO: 65926 - DNA, 17 bp, Arabidopsis thaliana
cagacgaccttactaca

SEQ ID NO: 65927 - DNA, 17 bp, Arabidopsis thaliana
cagacgacgcctcattc

SEQ ID NO: 65928 - DNA, 17 bp, Arabidopsis thaliana
cagacgacgcctcattt

SEQ ID NO: 65929 - DNA, 17 bp, Arabidopsis thaliana
cagacgactgaattccc

SEQ ID NO: 65930 - DNA, 17 bp, Arabidopsis thaliana
cagacgacttcggtgtt

SEQ ID NO: 65931 - DNA, 17 bp, Arabidopsis thaliana
cagacgagcgggcaggt

SEQ ID NO: 65932 - DNA, 17 bp, Arabidopsis thaliana
cagacgatcatcatgtt

SEQ ID NO: 65933 - DNA, 17 bp, Arabidopsis thaliana
cagacgatggcggctag

SEQ ID NO: 65934 - DNA, 17 bp, Arabidopsis thaliana
cagacgattcctatgga

SEQ ID NO: 65935 - DNA, 17 bp, Arabidopsis thaliana
cagacgcaaggagagtc

SEQ ID NO: 65936 - DNA, 17 bp, Arabidopsis thaliana
cagacgcctattggaca

SEQ ID NO: 65937 - DNA, 17 bp, Arabidopsis thaliana
cagacgcctggcggcat

SEQ ID NO: 65938 - DNA, 17 bp, Arabidopsis thaliana
cagacgcggattacggt

SEQ ID NO: 65939 - DNA, 17 bp, Arabidopsis thaliana
cagacgctgcatttgcg

SEQ ID NO: 65940 - DNA, 17 bp, Arabidopsis thaliana
cagacgcttgcgaacaa

SEQ ID NO: 65941 - DNA, 17 bp, Arabidopsis thaliana
cagacggcagagaacta

SEQ ID NO: 65942 - DNA, 17 bp, Arabidopsis thaliana
cagacggtgccaaaatg

SEQ ID NO: 65943 - DNA, 17 bp, Arabidopsis thaliana
cagacggtgttgattat

SEQ ID NO: 65944 - DNA, 17 bp, Arabidopsis thaliana
cagacggttctctatca

SEQ ID NO: 65945 - DNA, 17 bp, Arabidopsis thaliana
cagacgtcgctgccgtg

SEQ ID NO: 65946 - DNA, 17 bp, Arabidopsis thaliana
cagacgttagcagacgt

SEQ ID NO: 65947 - DNA, 17 bp, Arabidopsis thaliana
cagacgttggaggtgcg

SEQ ID NO: 65948 - DNA, 17 bp, Arabidopsis thaliana
cagactaaccaacacag

SEQ ID NO: 65949 - DNA, 17 bp, Arabidopsis thaliana
cagactacaaccatgtc

SEQ ID NO: 65950 - DNA, 17 bp, Arabidopsis thaliana
cagactaccgatctaac

SEQ ID NO: 65951 - DNA, 17 bp, Arabidopsis thaliana
cagactacggctacacc

SEQ ID NO: 65952 - DNA, 17 bp, Arabidopsis thaliana
cagactacttttggtaa

SEQ ID NO: 65953 - DNA, 17 bp, Arabidopsis thaliana
cagactagatttcatcc

SEQ ID NO: 65954 - DNA, 17 bp, Arabidopsis thaliana
cagactaggaggactgg

SEQ ID NO: 65955 - DNA, 17 bp, Arabidopsis thaliana
cagactatggctggcat

SEQ ID NO: 65956 - DNA, 17 bp, Arabidopsis thaliana
cagactcagccggatcc

SEQ ID NO: 65957 - DNA, 17 bp, Arabidopsis thaliana
cagactcagccggattc

SEQ ID NO: 65958 - DNA, 17 bp, Arabidopsis thaliana
cagactcaggctgcata

SEQ ID NO: 65959 - DNA, 17 bp, Arabidopsis thaliana
cagactcatgtgtaacg

SEQ ID NO: 65960 - DNA, 17 bp, Arabidopsis thaliana
cagactcattggttccg

SEQ ID NO: 65961 - DNA, 17 bp, Arabidopsis thaliana
cagactccctcaacacc

SEQ ID NO: 65962 - DNA, 17 bp, Arabidopsis thaliana
cagactcctacgggagg

SEQ ID NO: 65963 - DNA, 17 bp, Arabidopsis thaliana
cagactcctgtcagttg

SEQ ID NO: 65964 - DNA, 17 bp, Arabidopsis thaliana
cagactccttatctcgt

SEQ ID NO: 65965 - DNA, 17 bp, Arabidopsis thaliana
cagactcgagttcggga

SEQ ID NO: 65966 - DNA, 17 bp, Arabidopsis thaliana
cagactcgagttcgggg

SEQ ID NO: 65967 - DNA, 17 bp, Arabidopsis thaliana
cagactcgagttcgtgg

SEQ ID NO: 65968 - DNA, 17 bp, Arabidopsis thaliana
cagactcgatcagctct

SEQ ID NO: 65969 - DNA, 17 bp, Arabidopsis thaliana
cagactcgcaaaatgta

SEQ ID NO: 65970 - DNA, 17 bp, Arabidopsis thaliana
cagactcgtcggaagtc

SEQ ID NO: 65971 - DNA, 17 bp, Arabidopsis thaliana
cagactctcgagaggta

SEQ ID NO: 65972 - DNA, 17 bp, Arabidopsis thaliana
cagactcttcttgactc

SEQ ID NO: 65973 - DNA, 17 bp, Arabidopsis thaliana
cagactcttttgctctc

SEQ ID NO: 65974 - DNA, 17 bp, Arabidopsis thaliana
cagactgaagctctttg

SEQ ID NO: 65975 - DNA, 17 bp, Arabidopsis thaliana
cagactgactaactcca

SEQ ID NO: 65976 - DNA, 17 bp, Arabidopsis thaliana
cagactgagagctcttt

SEQ ID NO: 65977 - DNA, 17 bp, Arabidopsis thaliana
cagactgagattcgtcg

SEQ ID NO: 65978 - DNA, 17 bp, Arabidopsis thaliana
cagactgagatttgtcg

SEQ ID NO: 65979 - DNA, 17 bp, Arabidopsis thaliana
cagactgagttgtagtt

SEQ ID NO: 65980 - DNA, 17 bp, Arabidopsis thaliana
cagactgatatcaacgc

SEQ ID NO: 65981 - DNA, 17 bp, Arabidopsis thaliana
cagactgattttgattg

SEQ ID NO: 65982 - DNA, 17 bp, Arabidopsis thaliana
cagactgccggtgataa

SEQ ID NO: 65983 - DNA, 17 bp, Arabidopsis thaliana
cagactgcgaggactgc

SEQ ID NO: 65984 - DNA, 17 bp, Arabidopsis thaliana
cagactgctcaagatgg

SEQ ID NO: 65985 - DNA, 17 bp, Arabidopsis thaliana
cagactgctctgattgg

SEQ ID NO: 65986 - DNA, 17 bp, Arabidopsis thaliana
cagactggcaggcactc

SEQ ID NO: 65987 - DNA, 17 bp, Arabidopsis thaliana
cagactggcccaggttt

SEQ ID NO: 65988 - DNA, 17 bp, Arabidopsis thaliana
cagactgtaaaactgcg

SEQ ID NO: 65989 - DNA, 17 bp, Arabidopsis thaliana
cagactgtctggtccga

SEQ ID NO: 65990 - DNA, 17 bp, Arabidopsis thaliana
cagactgtgaaactgcc

SEQ ID NO: 65991 - DNA, 17 bp, Arabidopsis thaliana
cagactgtgaaactgcg

SEQ ID NO: 65992 - DNA, 17 bp, Arabidopsis thaliana
cagactgtgaaactgct

SEQ ID NO: 65993 - DNA, 17 bp, Arabidopsis thaliana
cagactgtgaaattgcg

SEQ ID NO: 65994 - DNA, 17 bp, Arabidopsis thaliana
cagactgtgaattgcca

SEQ ID NO: 65995 - DNA, 17 bp, Arabidopsis thaliana
cagactgtgacaaatga

SEQ ID NO: 65996 - DNA, 17 bp, Arabidopsis thaliana
cagactgtgcagtcgag

SEQ ID NO: 65997 - DNA, 17 bp, Arabidopsis thaliana
cagactgtggaactgcg

SEQ ID NO: 65998 - DNA, 17 bp, Arabidopsis thaliana
cagactgtgggttcgca

SEQ ID NO: 65999 - DNA, 17 bp, Arabidopsis thaliana
cagactgttcagatctg

SEQ ID NO: 66000 - DNA, 17 bp, Arabidopsis thaliana
cagacttaggtttgtct

SEQ ID NO: 66001 - DNA, 17 bp, Arabidopsis thaliana
cagacttatcgacccgg

SEQ ID NO: 66002 - DNA, 17 bp, Arabidopsis thaliana
cagacttatcgactcag

SEQ ID NO: 66003 - DNA, 17 bp, Arabidopsis thaliana
cagacttatttacaatg

SEQ ID NO: 66004 - DNA, 17 bp, Arabidopsis thaliana
cagacttatttacgatg

SEQ ID NO: 66005 - DNA, 17 bp, Arabidopsis thaliana
cagacttcatttgcgga

SEQ ID NO: 66006 - DNA, 17 bp, Arabidopsis thaliana
cagacttcggttcagaa

SEQ ID NO: 66007 - DNA, 17 bp, Arabidopsis thaliana
cagacttctcatcaagt

SEQ ID NO: 66008 - DNA, 17 bp, Arabidopsis thaliana
cagacttgaagtggggt

SEQ ID NO: 66009 - DNA, 17 bp, Arabidopsis thaliana
cagacttgcagtgatat

SEQ ID NO: 66010 - DNA, 17 bp, Arabidopsis thaliana
cagacttgccctccaat

SEQ ID NO: 66011 - DNA, 17 bp, Arabidopsis thaliana
cagacttggtgaagatg

SEQ ID NO: 66012 - DNA, 17 bp, Arabidopsis thaliana
cagacttgtcttgtacc

SEQ ID NO: 66013 - DNA, 17 bp, Arabidopsis thaliana
cagactttgctgccatc

SEQ ID NO: 66014 - DNA, 17 bp, Arabidopsis thaliana
cagacttttcagctgaa

SEQ ID NO: 66015 - DNA, 17 bp, Arabidopsis thaliana
cagacttttcatcaagt

SEQ ID NO: 66016 - DNA, 17 bp, Arabidopsis thaliana
cagacttttcgatacaa

SEQ ID NO: 66017 - DNA, 17 bp, Arabidopsis thaliana
cagacttttttggttga

SEQ ID NO: 66018 - DNA, 17 bp, Arabidopsis thaliana
cagagaaacccattttg

SEQ ID NO: 66019 - DNA, 17 bp, Arabidopsis thaliana
cagagaacctgatgatc

SEQ ID NO: 66020 - DNA, 17 bp, Arabidopsis thaliana
cagagaacttctctagg

SEQ ID NO: 66021 - DNA, 17 bp, Arabidopsis thaliana
cagagaagattgagacg

SEQ ID NO: 66022 - DNA, 17 bp, Arabidopsis thaliana
cagagaatctgtgcagg

SEQ ID NO: 66023 - DNA, 17 bp, Arabidopsis thaliana
cagagacagccaggagg

SEQ ID NO: 66024 - DNA, 17 bp, Arabidopsis thaliana
cagagacatatggaccg

SEQ ID NO: 66025 - DNA, 17 bp, Arabidopsis thaliana
cagagacatatggacct

SEQ ID NO: 66026 - DNA, 17 bp, Arabidopsis thaliana
cagagacccatttgcac

SEQ ID NO: 66027 - DNA, 17 bp, Arabidopsis thaliana
cagagaccgatacgacg

SEQ ID NO: 66028 - DNA, 17 bp, Arabidopsis thaliana
cagagacgattctcact

SEQ ID NO: 66029 - DNA, 17 bp, Arabidopsis thaliana
cagagacgcagcagggc

SEQ ID NO: 66030 - DNA, 17 bp, Arabidopsis thaliana
cagagacgcaggagagg

SEQ ID NO: 66031 - DNA, 17 bp, Arabidopsis thaliana
cagagacgcggcggttt

SEQ ID NO: 66032 - DNA, 17 bp, Arabidopsis thaliana
cagagacggagcagggc

SEQ ID NO: 66033 - DNA, 17 bp, Arabidopsis thaliana
cagagacgggatccacc

SEQ ID NO: 66034 - DNA, 17 bp, Arabidopsis thaliana
cagagactctctttcat

SEQ ID NO: 66035 - DNA, 17 bp, Arabidopsis thaliana
cagagactctgacttag

SEQ ID NO: 66036 - DNA, 17 bp, Arabidopsis thaliana
cagagactcttcaatgg

SEQ ID NO: 66037 - DNA, 17 bp, Arabidopsis thaliana
cagagactgtgatagct

SEQ ID NO: 66038 - DNA, 17 bp, Arabidopsis thaliana
cagagacttgcagggat

SEQ ID NO: 66039 - DNA, 17 bp, Arabidopsis thaliana
cagagacttgtgttagc

SEQ ID NO: 66040 - DNA, 17 bp, Arabidopsis thaliana
cagagagaacgcgctgc

SEQ ID NO: 66041 - DNA, 17 bp, Arabidopsis thaliana
cagagagaactcgttga

SEQ ID NO: 66042 - DNA, 17 bp, Arabidopsis thaliana
cagagagaagaacaaaa

SEQ ID NO: 66043 - DNA, 17 bp, Arabidopsis thaliana
cagagagaagtgactat

SEQ ID NO: 66044 - DNA, 17 bp, Arabidopsis thaliana
cagagagaatcaagctt

SEQ ID NO: 66045 - DNA, 17 bp, Arabidopsis thaliana
cagagagatgttgccag

SEQ ID NO: 66046 - DNA, 17 bp, Arabidopsis thaliana
cagagagccaaaagctg

SEQ ID NO: 66047 - DNA, 17 bp, Arabidopsis thaliana
cagagagccttccccct

SEQ ID NO: 66048 - DNA, 17 bp, Arabidopsis thaliana
cagagagctttggtgtg

SEQ ID NO: 66049 - DNA, 17 bp, Arabidopsis thaliana
cagagaggaccagttat

SEQ ID NO: 66050 - DNA, 17 bp, Arabidopsis thaliana
cagagaggatcgtcctg

SEQ ID NO: 66051 - DNA, 17 bp, Arabidopsis thaliana
cagagagggtgagagcc

SEQ ID NO: 66052 - DNA, 17 bp, Arabidopsis thaliana
cagagagtccatccgaa

SEQ ID NO: 66053 - DNA, 17 bp, Arabidopsis thaliana
cagagagtgtgagagag

SEQ ID NO: 66054 - DNA, 17 bp, Arabidopsis thaliana
cagagatcaccattgga

SEQ ID NO: 66055 - DNA, 17 bp, Arabidopsis thaliana
cagagatccattgcgct

SEQ ID NO: 66056 - DNA, 17 bp, Arabidopsis thaliana
cagagatcccagcttga

SEQ ID NO: 66057 - DNA, 17 bp, Arabidopsis thaliana
cagagatcgtcggcttg

SEQ ID NO: 66058 - DNA, 17 bp, Arabidopsis thaliana
cagagatgattcttgca

SEQ ID NO: 66059 - DNA, 17 bp, Arabidopsis thaliana
cagagatggagctcgac

SEQ ID NO: 66060 - DNA, 17 bp, Arabidopsis thaliana
cagagatgggcatccaa

SEQ ID NO: 66061 - DNA, 17 bp, Arabidopsis thaliana
cagagatgggccatatg

SEQ ID NO: 66062 - DNA, 17 bp, Arabidopsis thaliana
cagagatggttctgatg

SEQ ID NO: 66063 - DNA, 17 bp, Arabidopsis thaliana
cagagatgttgctcgat

SEQ ID NO: 66064 - DNA, 17 bp, Arabidopsis thaliana
cagagattaagccatgc

SEQ ID NO: 66065 - DNA, 17 bp, Arabidopsis thaliana
cagagattaggattagg

SEQ ID NO: 66066 - DNA, 17 bp, Arabidopsis thaliana
cagagattccccgaacc

SEQ ID NO: 66067 - DNA, 17 bp, Arabidopsis thaliana
cagagattcgtggctct

SEQ ID NO: 66068 - DNA, 17 bp, Arabidopsis thaliana
cagagattctggatcga

SEQ ID NO: 66069 - DNA, 17 bp, Arabidopsis thaliana
cagagattctgggtcaa

SEQ ID NO: 66070 - DNA, 17 bp, Arabidopsis thaliana
cagagatttagggattt

SEQ ID NO: 66071 - DNA, 17 bp, Arabidopsis thaliana
cagagatttctgcagat

SEQ ID NO: 66072 - DNA, 17 bp, Arabidopsis thaliana
cagagcaacccacagca

SEQ ID NO: 66073 - DNA, 17 bp, Arabidopsis thaliana
cagagcaaccccaatgg

SEQ ID NO: 66074 - DNA, 17 bp, Arabidopsis thaliana
cagagcaaggccttggt

SEQ ID NO: 66075 - DNA, 17 bp, Arabidopsis thaliana
cagagcaatgtcatgga

SEQ ID NO: 66076 - DNA, 17 bp, Arabidopsis thaliana
cagagcattgcgatggt

SEQ ID NO: 66077 - DNA, 17 bp, Arabidopsis thaliana
cagagccaaggtcaact

SEQ ID NO: 66078 - DNA, 17 bp, Arabidopsis thaliana
cagagccataaacccag

SEQ ID NO: 66079 - DNA, 17 bp, Arabidopsis thaliana
cagagccataaacccgg

SEQ ID NO: 66080 - DNA, 17 bp, Arabidopsis thaliana
cagagcccacttgtgac

SEQ ID NO: 66081 - DNA, 17 bp, Arabidopsis thaliana
cagagcccagcgttgga

SEQ ID NO: 66082 - DNA, 17 bp, Arabidopsis thaliana
cagagccccgtcgtgcc

SEQ ID NO: 66083 - DNA, 17 bp, Arabidopsis thaliana
cagagccgagacccaac

SEQ ID NO: 66084 - DNA, 17 bp, Arabidopsis thaliana
cagagccggagctcgga

SEQ ID NO: 66085 - DNA, 17 bp, Arabidopsis thaliana
cagagcctccatctccg

SEQ ID NO: 66086 - DNA, 17 bp, Arabidopsis thaliana
cagagcgatgtgccagg

SEQ ID NO: 66087 - DNA, 17 bp, Arabidopsis thaliana
cagagcgatgttggccg

SEQ ID NO: 66088 - DNA, 17 bp, Arabidopsis thaliana
cagagcgcaggtgcagc

SEQ ID NO: 66089 - DNA, 17 bp, Arabidopsis thaliana
cagagcgctccggactt

SEQ ID NO: 66090 - DNA, 17 bp, Arabidopsis thaliana
cagagcggtgctggctg

SEQ ID NO: 66091 - DNA, 17 bp, Arabidopsis thaliana
cagagcgtaggcttgct

SEQ ID NO: 66092 - DNA, 17 bp, Arabidopsis thaliana
cagagcttctctggctg

SEQ ID NO: 66093 - DNA, 17 bp, Arabidopsis thaliana
cagaggaagcgaggatc

SEQ ID NO: 66094 - DNA, 17 bp, Arabidopsis thaliana
cagaggacaacctcgct

SEQ ID NO: 66095 - DNA, 17 bp, Arabidopsis thaliana
cagaggaccagattcga

SEQ ID NO: 66096 - DNA, 17 bp, Arabidopsis thaliana
cagaggaccagggtagc

SEQ ID NO: 66097 - DNA, 17 bp, Arabidopsis thaliana
cagaggacgggttagca

SEQ ID NO: 66098 - DNA, 17 bp, Arabidopsis thaliana
cagaggacgggttggcg

SEQ ID NO: 66099 - DNA, 17 bp, Arabidopsis thaliana
cagaggactgttcgggt

SEQ ID NO: 66100 - DNA, 17 bp, Arabidopsis thaliana
cagaggagggtgggcac

SEQ ID NO: 66101 - DNA, 17 bp, Arabidopsis thaliana
cagaggagggtgggcag

SEQ ID NO: 66102 - DNA, 17 bp, Arabidopsis thaliana
cagaggagggtgggccc

SEQ ID NO: 66103 - DNA, 17 bp, Arabidopsis thaliana
cagaggattgtcgttga

SEQ ID NO: 66104 - DNA, 17 bp, Arabidopsis thaliana
cagaggatttgatggtg

SEQ ID NO: 66105 - DNA, 17 bp, Arabidopsis thaliana
cagaggatttgcgttcg

SEQ ID NO: 66106 - DNA, 17 bp, Arabidopsis thaliana
cagaggcattactggtg

SEQ ID NO: 66107 - DNA, 17 bp, Arabidopsis thaliana
cagaggccggctggcag

SEQ ID NO: 66108 - DNA, 17 bp, Arabidopsis thaliana
cagaggcctttcattcc

SEQ ID NO: 66109 - DNA, 17 bp, Arabidopsis thaliana
cagaggcggagaagatg

SEQ ID NO: 66110 - DNA, 17 bp, Arabidopsis thaliana
cagaggcggtttggtca

SEQ ID NO: 66111 - DNA, 17 bp, Arabidopsis thaliana
cagaggctccgagatcg

SEQ ID NO: 66112 - DNA, 17 bp, Arabidopsis thaliana
cagaggctcgggaacag

SEQ ID NO: 66113 - DNA, 17 bp, Arabidopsis thaliana
cagaggctctccttctt

SEQ ID NO: 66114 - DNA, 17 bp, Arabidopsis thaliana
cagaggctgtcaaccag

SEQ ID NO: 66115 - DNA, 17 bp, Arabidopsis thaliana
cagaggcttcgacatcg

SEQ ID NO: 66116 - DNA, 17 bp, Arabidopsis thaliana
cagagggaggctttgct

SEQ ID NO: 66117 - DNA, 17 bp, Arabidopsis thaliana
cagagggcacgtctgcc

SEQ ID NO: 66118 - DNA, 17 bp, Arabidopsis thaliana
cagagggccgtccgcgc

SEQ ID NO: 66119 - DNA, 17 bp, Arabidopsis thaliana
cagagggctgcggttgc

SEQ ID NO: 66120 - DNA, 17 bp, Arabidopsis thaliana
cagaggggatctccgag

SEQ ID NO: 66121 - DNA, 17 bp, Arabidopsis thaliana
cagaggggcgggctcgg

SEQ ID NO: 66122 - DNA, 17 bp, Arabidopsis thaliana
cagagggtagtcaggcc

SEQ ID NO: 66123 - DNA, 17 bp, Arabidopsis thaliana
cagagggtgatagtcat

SEQ ID NO: 66124 - DNA, 17 bp, Arabidopsis thaliana
cagaggtctcgctatca

SEQ ID NO: 66125 - DNA, 17 bp, Arabidopsis thaliana
cagaggtctgcattcct

SEQ ID NO: 66126 - DNA, 17 bp, Arabidopsis thaliana
cagaggtcttcatcctc

SEQ ID NO: 66127 - DNA, 17 bp, Arabidopsis thaliana
cagaggtgagcaagcgt

SEQ ID NO: 66128 - DNA, 17 bp, Arabidopsis thaliana
cagaggtggtgcccata

SEQ ID NO: 66129 - DNA, 17 bp, Arabidopsis thaliana
cagaggtgtcattctat

SEQ ID NO: 66130 - DNA, 17 bp, Arabidopsis thaliana
cagaggtgtcttgtttg

SEQ ID NO: 66131 - DNA, 17 bp, Arabidopsis thaliana
cagaggtgttataccac

SEQ ID NO: 66132 - DNA, 17 bp, Arabidopsis thaliana
cagaggttcgtcccctc

SEQ ID NO: 66133 - DNA, 17 bp, Arabidopsis thaliana
cagaggttggtttggcg

SEQ ID NO: 66134 - DNA, 17 bp, Arabidopsis thaliana
cagaggtttgagattga

SEQ ID NO: 66135 - DNA, 17 bp, Arabidopsis thaliana
cagagtacatcttgacg

SEQ ID NO: 66136 - DNA, 17 bp, Arabidopsis thaliana
cagagtacgaagacgac

SEQ ID NO: 66137 - DNA, 17 bp, Arabidopsis thaliana
cagagtaggacaaatgc

SEQ ID NO: 66138 - DNA, 17 bp, Arabidopsis thaliana
cagagtattggaccttt

SEQ ID NO: 66139 - DNA, 17 bp, Arabidopsis thaliana
cagagtcaaacaacaca

SEQ ID NO: 66140 - DNA, 17 bp, Arabidopsis thaliana
cagagtcactaaagcct

SEQ ID NO: 66141 - DNA, 17 bp, Arabidopsis thaliana
cagagtcagatatggcc

SEQ ID NO: 66142 - DNA, 17 bp, Arabidopsis thaliana
cagagtcagatctggcc

SEQ ID NO: 66143 - DNA, 17 bp, Arabidopsis thaliana
cagagtcatcgacagat

SEQ ID NO: 66144 - DNA, 17 bp, Arabidopsis thaliana
cagagtcatggcgcagg

SEQ ID NO: 66145 - DNA, 17 bp, Arabidopsis thaliana
cagagtccaccggttgt

SEQ ID NO: 66146 - DNA, 17 bp, Arabidopsis thaliana
cagagtcctcaatttgc

SEQ ID NO: 66147 - DNA, 17 bp, Arabidopsis thaliana
cagagtcgataacaggc

SEQ ID NO: 66148 - DNA, 17 bp, Arabidopsis thaliana
cagagtcgggtcttctt

SEQ ID NO: 66149 - DNA, 17 bp, Arabidopsis thaliana
cagagtcgttgaccacc

SEQ ID NO: 66150 - DNA, 17 bp, Arabidopsis thaliana
cagagtctctcggcgac

SEQ ID NO: 66151 - DNA, 17 bp, Arabidopsis thaliana
cagagtctctcttactt

SEQ ID NO: 66152 - DNA, 17 bp, Arabidopsis thaliana
cagagtctctgttgcgg

SEQ ID NO: 66153 - DNA, 17 bp, Arabidopsis thaliana
cagagtctgcgtttttg

SEQ ID NO: 66154 - DNA, 17 bp, Arabidopsis thaliana
cagagtcttctcgctta

SEQ ID NO: 66155 - DNA, 17 bp, Arabidopsis thaliana
cagagtcttgagcgtct

SEQ ID NO: 66156 - DNA, 17 bp, Arabidopsis thaliana
cagagtgaatcggtccc

SEQ ID NO: 66157 - DNA, 17 bp, Arabidopsis thaliana
cagagtggccttgctgc

SEQ ID NO: 66158 - DNA, 17 bp, Arabidopsis thaliana
cagagtggccttgctgt

SEQ ID NO: 66159 - DNA, 17 bp, Arabidopsis thaliana
cagagtgtggccaatct

SEQ ID NO: 66160 - DNA, 17 bp, Arabidopsis thaliana
cagagttaggattgtgc

SEQ ID NO: 66161 - DNA, 17 bp, Arabidopsis thaliana
cagagttatctcgctct

SEQ ID NO: 66162 - DNA, 17 bp, Arabidopsis thaliana
cagagttattgagtgcc

SEQ ID NO: 66163 - DNA, 17 bp, Arabidopsis thaliana
cagagttccagagatgt

SEQ ID NO: 66164 - DNA, 17 bp, Arabidopsis thaliana
cagagttctactacaag

SEQ ID NO: 66165 - DNA, 17 bp, Arabidopsis thaliana
cagagttctgcttgtga

SEQ ID NO: 66166 - DNA, 17 bp, Arabidopsis thaliana
cagagttgactgcagag

SEQ ID NO: 66167 - DNA, 17 bp, Arabidopsis thaliana
cagagttgattgcgctg

SEQ ID NO: 66168 - DNA, 17 bp, Arabidopsis thaliana
cagagttgtatgtgggc

SEQ ID NO: 66169 - DNA, 17 bp, Arabidopsis thaliana
cagagtttctggattgc

SEQ ID NO: 66170 - DNA, 17 bp, Arabidopsis thaliana
cagagtttcttcgggag

SEQ ID NO: 66171 - DNA, 17 bp, Arabidopsis thaliana
cagagtttctttgggag

SEQ ID NO: 66172 - DNA, 17 bp, Arabidopsis thaliana
cagagtttgtgaatctg

SEQ ID NO: 66173 - DNA, 17 bp, Arabidopsis thaliana
cagagttttcgactttg

SEQ ID NO: 66174 - DNA, 17 bp, Arabidopsis thaliana
cagataaaaggtcgacg

SEQ ID NO: 66175 - DNA, 17 bp, Arabidopsis thaliana
cagataaaatgcggtgc

SEQ ID NO: 66176 - DNA, 17 bp, Arabidopsis thaliana
cagataaagtgcggtgc

SEQ ID NO: 66177 - DNA, 17 bp, Arabidopsis thaliana
cagataaattagaccgc

SEQ ID NO: 66178 - DNA, 17 bp, Arabidopsis thaliana
cagataacgactgctcg

SEQ ID NO: 66179 - DNA, 17 bp, Arabidopsis thaliana
cagataacggatttgcc

SEQ ID NO: 66180 - DNA, 17 bp, Arabidopsis thaliana
cagataagcgccttagt

SEQ ID NO: 66181 - DNA, 17 bp, Arabidopsis thaliana
cagataattggttgcaa

SEQ ID NO: 66182 - DNA, 17 bp, Arabidopsis thaliana
cagatacaacatcgtta

SEQ ID NO: 66183 - DNA, 17 bp, Arabidopsis thaliana
cagatacacgacgaacg

SEQ ID NO: 66184 - DNA, 17 bp, Arabidopsis thaliana
cagatacgatgagattc

SEQ ID NO: 66185 - DNA, 17 bp, Arabidopsis thaliana
cagatactcggacacag

SEQ ID NO: 66186 - DNA, 17 bp, Arabidopsis thaliana
cagatactgaacatggt

SEQ ID NO: 66187 - DNA, 17 bp, Arabidopsis thaliana
cagatactgtgactcaa

SEQ ID NO: 66188 - DNA, 17 bp, Arabidopsis thaliana
cagatagagcccgatct

SEQ ID NO: 66189 - DNA, 17 bp, Arabidopsis thaliana
cagataggcaatcgcgg

SEQ ID NO: 66190 - DNA, 17 bp, Arabidopsis thaliana
cagatagttgatggcgg

SEQ ID NO: 66191 - DNA, 17 bp, Arabidopsis thaliana
cagatagttggccaact

SEQ ID NO: 66192 - DNA, 17 bp, Arabidopsis thaliana
cagatattgctgttgcg

SEQ ID NO: 66193 - DNA, 17 bp, Arabidopsis thaliana
cagatattggtgcggtt

SEQ ID NO: 66194 - DNA, 17 bp, Arabidopsis thaliana
cagatcaagagcgttag

SEQ ID NO: 66195 - DNA, 17 bp, Arabidopsis thaliana
cagatcacgctagatag

SEQ ID NO: 66196 - DNA, 17 bp, Arabidopsis thaliana
cagatcacgctgataga

SEQ ID NO: 66197 - DNA, 17 bp, Arabidopsis thaliana
cagatcactcctcctcc

SEQ ID NO: 66198 - DNA, 17 bp, Arabidopsis thaliana
cagatcagaatcctggt

SEQ ID NO: 66199 - DNA, 17 bp, Arabidopsis thaliana
cagatcagccgataggc

SEQ ID NO: 66200 - DNA, 17 bp, Arabidopsis thaliana
cagatcagccgataggg

SEQ ID NO: 66201 - DNA, 17 bp, Arabidopsis thaliana
cagatcagctgataggg

SEQ ID NO: 66202 - DNA, 17 bp, Arabidopsis thaliana
cagatcagggtctcgga

SEQ ID NO: 66203 - DNA, 17 bp, Arabidopsis thaliana
cagatcagtcatctatc

SEQ ID NO: 66204 - DNA, 17 bp, Arabidopsis thaliana
cagatcagttaagaccc

SEQ ID NO: 66205 - DNA, 17 bp, Arabidopsis thaliana
cagatcataaccagtag

SEQ ID NO: 66206 - DNA, 17 bp, Arabidopsis thaliana
cagatccagttgagttt

SEQ ID NO: 66207 - DNA, 17 bp, Arabidopsis thaliana
cagatccatttctaagc

SEQ ID NO: 66208 - DNA, 17 bp, Arabidopsis thaliana
cagatcccaaaacgtaa

SEQ ID NO: 66209 - DNA, 17 bp, Arabidopsis thaliana
cagatcccaaatcgtga

SEQ ID NO: 66210 - DNA, 17 bp, Arabidopsis thaliana
cagatcccacagttgtc

SEQ ID NO: 66211 - DNA, 17 bp, Arabidopsis thaliana
cagatcccatctgagta

SEQ ID NO: 66212 - DNA, 17 bp, Arabidopsis thaliana
cagatcccggacggagc

SEQ ID NO: 66213 - DNA, 17 bp, Arabidopsis thaliana
cagatccgcaacatttt

SEQ ID NO: 66214 - DNA, 17 bp, Arabidopsis thaliana
cagatccggagattgct

SEQ ID NO: 66215 - DNA, 17 bp, Arabidopsis thaliana
cagatccgtcatatttg

SEQ ID NO: 66216 - DNA, 17 bp, Arabidopsis thaliana
cagatcctgctgattta

SEQ ID NO: 66217 - DNA, 17 bp, Arabidopsis thaliana
cagatcgactcagatgt

SEQ ID NO: 66218 - DNA, 17 bp, Arabidopsis thaliana
cagatcgagagttgttg

SEQ ID NO: 66219 - DNA, 17 bp, Arabidopsis thaliana
cagatcgccgacattat

SEQ ID NO: 66220 - DNA, 17 bp, Arabidopsis thaliana
cagatcgccgccggagt

SEQ ID NO: 66221 - DNA, 17 bp, Arabidopsis thaliana
cagatcgcgcataagca

SEQ ID NO: 66222 - DNA, 17 bp, Arabidopsis thaliana
cagatcgctggtttcca

SEQ ID NO: 66223 - DNA, 17 bp, Arabidopsis thaliana
cagatcgctggtttcct

SEQ ID NO: 66224 - DNA, 17 bp, Arabidopsis thaliana
cagatcgtacgctaagg

SEQ ID NO: 66225 - DNA, 17 bp, Arabidopsis thaliana
cagatcgtgaaatcttg

SEQ ID NO: 66226 - DNA, 17 bp, Arabidopsis thaliana
cagatctaaccggattt

SEQ ID NO: 66227 - DNA, 17 bp, Arabidopsis thaliana
cagatctacaggtggtt

SEQ ID NO: 66228 - DNA, 17 bp, Arabidopsis thaliana
cagatctacgaaggaac

SEQ ID NO: 66229 - DNA, 17 bp, Arabidopsis thaliana
cagatctagaagctggt

SEQ ID NO: 66230 - DNA, 17 bp, Arabidopsis thaliana
cagatctagatctgtga

SEQ ID NO: 66231 - DNA, 17 bp, Arabidopsis thaliana
cagatctcaccgccgtc

SEQ ID NO: 66232 - DNA, 17 bp, Arabidopsis thaliana
cagatctccaaggtgaa

SEQ ID NO: 66233 - DNA, 17 bp, Arabidopsis thaliana
cagatctccgcagttaa

SEQ ID NO: 66234 - DNA, 17 bp, Arabidopsis thaliana
cagatctctatctccct

SEQ ID NO: 66235 - DNA, 17 bp, Arabidopsis thaliana
cagatctctgtgtccgt

SEQ ID NO: 66236 - DNA, 17 bp, Arabidopsis thaliana
cagatctgacccgtgga

SEQ ID NO: 66237 - DNA, 17 bp, Arabidopsis thaliana
cagatctgcaggattga

SEQ ID NO: 66238 - DNA, 17 bp, Arabidopsis thaliana
cagatctgcaggtttgt

SEQ ID NO: 66239 - DNA, 17 bp, Arabidopsis thaliana
cagatctgctagccaaa

SEQ ID NO: 66240 - DNA, 17 bp, Arabidopsis thaliana
cagatctgctgcttaag

SEQ ID NO: 66241 - DNA, 17 bp, Arabidopsis thaliana
cagatctggtgaatatg

SEQ ID NO: 66242 - DNA, 17 bp, Arabidopsis thaliana
cagatctggtgcagagg

SEQ ID NO: 66243 - DNA, 17 bp, Arabidopsis thaliana
cagatctggtggagatg

SEQ ID NO: 66244 - DNA, 17 bp, Arabidopsis thaliana
cagatctggtggaggtt

SEQ ID NO: 66245 - DNA, 17 bp, Arabidopsis thaliana
cagatctggttgacaac

SEQ ID NO: 66246 - DNA, 17 bp, Arabidopsis thaliana
cagatctggttgacagc

SEQ ID NO: 66247 - DNA, 17 bp, Arabidopsis thaliana
cagatctggttgacatc

SEQ ID NO: 66248 - DNA, 17 bp, Arabidopsis thaliana
cagatctgtctatccag

SEQ ID NO: 66249 - DNA, 17 bp, Arabidopsis thaliana
cagatctgtctgtgttt

SEQ ID NO: 66250 - DNA, 17 bp, Arabidopsis thaliana
cagatctgtggttgctt

SEQ ID NO: 66251 - DNA, 17 bp, Arabidopsis thaliana
cagatctgttgcaagaa

SEQ ID NO: 66252 - DNA, 17 bp, Arabidopsis thaliana
cagatcttccatctgaa

SEQ ID NO: 66253 - DNA, 17 bp, Arabidopsis thaliana
cagatcttcgcaggtac

SEQ ID NO: 66254 - DNA, 17 bp, Arabidopsis thaliana
cagatcttcgtctataa

SEQ ID NO: 66255 - DNA, 17 bp, Arabidopsis thaliana
cagatcttgttgcggtt

SEQ ID NO: 66256 - DNA, 17 bp, Arabidopsis thaliana
cagatctttttcagttg

SEQ ID NO: 66257 - DNA, 17 bp, Arabidopsis thaliana
cagatgaaatggggccg

SEQ ID NO: 66258 - DNA, 17 bp, Arabidopsis thaliana
cagatgaagattttgca

SEQ ID NO: 66259 - DNA, 17 bp, Arabidopsis thaliana
cagatgacactctttct

SEQ ID NO: 66260 - DNA, 17 bp, Arabidopsis thaliana
cagatgagccgaacgca

SEQ ID NO: 66261 - DNA, 17 bp, Arabidopsis thaliana
cagatgatcatccgcgc

SEQ ID NO: 66262 - DNA, 17 bp, Arabidopsis thaliana
cagatgatccatccaaa

SEQ ID NO: 66263 - DNA, 17 bp, Arabidopsis thaliana
cagatgatcgtcatggc

SEQ ID NO: 66264 - DNA, 17 bp, Arabidopsis thaliana
cagatgatgggcttaga

SEQ ID NO: 66265 - DNA, 17 bp, Arabidopsis thaliana
cagatgattagcggtaa

SEQ ID NO: 66266 - DNA, 17 bp, Arabidopsis thaliana
cagatgatttcgcctac

SEQ ID NO: 66267 - DNA, 17 bp, Arabidopsis thaliana
cagatgccttggacatg

SEQ ID NO: 66268 - DNA, 17 bp, Arabidopsis thaliana
cagatgcggaagattcg

SEQ ID NO: 66269 - DNA, 17 bp, Arabidopsis thaliana
cagatgctgcaagggtt

SEQ ID NO: 66270 - DNA, 17 bp, Arabidopsis thaliana
cagatggacctcttggt

SEQ ID NO: 66271 - DNA, 17 bp, Arabidopsis thaliana
cagatggatgactaggc

SEQ ID NO: 66272 - DNA, 17 bp, Arabidopsis thaliana
cagatggctcataccat

SEQ ID NO: 66273 - DNA, 17 bp, Arabidopsis thaliana
cagatgggatctggata

SEQ ID NO: 66274 - DNA, 17 bp, Arabidopsis thaliana
cagatgggctaagttca

SEQ ID NO: 66275 - DNA, 17 bp, Arabidopsis thaliana
cagatgggtcggccggt

SEQ ID NO: 66276 - DNA, 17 bp, Arabidopsis thaliana
cagatggtccgctgcgg

SEQ ID NO: 66277 - DNA, 17 bp, Arabidopsis thaliana
cagatggtctaggacgg

SEQ ID NO: 66278 - DNA, 17 bp, Arabidopsis thaliana
cagatggttcacgaaag

SEQ ID NO: 66279 - DNA, 17 bp, Arabidopsis thaliana
cagatgtaatcgccgca

SEQ ID NO: 66280 - DNA, 17 bp, Arabidopsis thaliana
cagatgtatctgcacag

SEQ ID NO: 66281 - DNA, 17 bp, Arabidopsis thaliana
cagatgtctttggttgg

SEQ ID NO: 66282 - DNA, 17 bp, Arabidopsis thaliana
cagatgtgccgccccag

SEQ ID NO: 66283 - DNA, 17 bp, Arabidopsis thaliana
cagatgtgtgctttgtc

SEQ ID NO: 66284 - DNA, 17 bp, Arabidopsis thaliana
cagatgttgacatttag

SEQ ID NO: 66285 - DNA, 17 bp, Arabidopsis thaliana
cagatgtttcatgtagg

SEQ ID NO: 66286 - DNA, 17 bp, Arabidopsis thaliana
cagatgtttttacctac

SEQ ID NO: 66287 - DNA, 17 bp, Arabidopsis thaliana
cagattaagctgtacag

SEQ ID NO: 66288 - DNA, 17 bp, Arabidopsis thaliana
cagattaatcggagtgt

SEQ ID NO: 66289 - DNA, 17 bp, Arabidopsis thaliana
cagattaccatcacgat

SEQ ID NO: 66290 - DNA, 17 bp, Arabidopsis thaliana
cagattagcaggcatgc

SEQ ID NO: 66291 - DNA, 17 bp, Arabidopsis thaliana
cagattagccaataggg

SEQ ID NO: 66292 - DNA, 17 bp, Arabidopsis thaliana
cagattagccggtaggg

SEQ ID NO: 66293 - DNA, 17 bp, Arabidopsis thaliana
cagattaggtcgctggt

SEQ ID NO: 66294 - DNA, 17 bp, Arabidopsis thaliana
cagattagtccgcacta

SEQ ID NO: 66295 - DNA, 17 bp, Arabidopsis thaliana
cagattatgacacgtgg

SEQ ID NO: 66296 - DNA, 17 bp, Arabidopsis thaliana
cagattatggccctgtt

SEQ ID NO: 66297 - DNA, 17 bp, Arabidopsis thaliana
cagattattgcacccga

SEQ ID NO: 66298 - DNA, 17 bp, Arabidopsis thaliana
cagattattgctcgacg

SEQ ID NO: 66299 - DNA, 17 bp, Arabidopsis thaliana
cagattcaacgtgaccc

SEQ ID NO: 66300 - DNA, 17 bp, Arabidopsis thaliana
cagattcacagatttat

SEQ ID NO: 66301 - DNA, 17 bp, Arabidopsis thaliana
cagattcaccacattga

SEQ ID NO: 66302 - DNA, 17 bp, Arabidopsis thaliana
cagattcaccatggcct

SEQ ID NO: 66303 - DNA, 17 bp, Arabidopsis thaliana
cagattcagccctttgt

SEQ ID NO: 66304 - DNA, 17 bp, Arabidopsis thaliana
cagattcagccttttgt

SEQ ID NO: 66305 - DNA, 17 bp, Arabidopsis thaliana
cagattccatcgatttt

SEQ ID NO: 66306 - DNA, 17 bp, Arabidopsis thaliana
cagattcccccacaagc

SEQ ID NO: 66307 - DNA, 17 bp, Arabidopsis thaliana
cagattcgaagcactgt

SEQ ID NO: 66308 - DNA, 17 bp, Arabidopsis thaliana
cagattcgagcgttctt

SEQ ID NO: 66309 - DNA, 17 bp, Arabidopsis thaliana
cagattcgattaaccgt

SEQ ID NO: 66310 - DNA, 17 bp, Arabidopsis thaliana
cagattcggatcgggtt

SEQ ID NO: 66311 - DNA, 17 bp, Arabidopsis thaliana
cagattcgtggagttcc

SEQ ID NO: 66312 - DNA, 17 bp, Arabidopsis thaliana
cagattcgttcttagtc

SEQ ID NO: 66313 - DNA, 17 bp, Arabidopsis thaliana
cagattctaaccggtgt

SEQ ID NO: 66314 - DNA, 17 bp, Arabidopsis thaliana
cagattctacaacatga

SEQ ID NO: 66315 - DNA, 17 bp, Arabidopsis thaliana
cagattctgagcaagtt

SEQ ID NO: 66316 - DNA, 17 bp, Arabidopsis thaliana
cagattctttggcagac

SEQ ID NO: 66317 - DNA, 17 bp, Arabidopsis thaliana
cagattgaactacacag

SEQ ID NO: 66318 - DNA, 17 bp, Arabidopsis thaliana
cagattgagtagtgcgg

SEQ ID NO: 66319 - DNA, 17 bp, Arabidopsis thaliana
cagattgatcttgtacc

SEQ ID NO: 66320 - DNA, 17 bp, Arabidopsis thaliana
cagattgatgttgtgga

SEQ ID NO: 66321 - DNA, 17 bp, Arabidopsis thaliana
cagattgcaaaattggc

SEQ ID NO: 66322 - DNA, 17 bp, Arabidopsis thaliana
cagattgccgtttcaac

SEQ ID NO: 66323 - DNA, 17 bp, Arabidopsis thaliana
cagattgccttggcggg

SEQ ID NO: 66324 - DNA, 17 bp, Arabidopsis thaliana
cagattggaagtgattt

SEQ ID NO: 66325 - DNA, 17 bp, Arabidopsis thaliana
cagattggacttcttcc

SEQ ID NO: 66326 - DNA, 17 bp, Arabidopsis thaliana
cagattgttccgacccg

SEQ ID NO: 66327 - DNA, 17 bp, Arabidopsis thaliana
cagattgttcggtctga

SEQ ID NO: 66328 - DNA, 17 bp, Arabidopsis thaliana
cagattgttcgtttgac

SEQ ID NO: 66329 - DNA, 17 bp, Arabidopsis thaliana
cagattgttgctgaact

SEQ ID NO: 66330 - DNA, 17 bp, Arabidopsis thaliana
cagatttaagtttttgg

SEQ ID NO: 66331 - DNA, 17 bp, Arabidopsis thaliana
cagatttaccgcagtgt

SEQ ID NO: 66332 - DNA, 17 bp, Arabidopsis thaliana
cagatttactagtgcgg

SEQ ID NO: 66333 - DNA, 17 bp, Arabidopsis thaliana
cagatttactctttgcg

SEQ ID NO: 66334 - DNA, 17 bp, Arabidopsis thaliana
cagatttagatgattcg

SEQ ID NO: 66335 - DNA, 17 bp, Arabidopsis thaliana
cagatttaggccacaat

SEQ ID NO: 66336 - DNA, 17 bp, Arabidopsis thaliana
cagatttatggcagact

SEQ ID NO: 66337 - DNA, 17 bp, Arabidopsis thaliana
cagatttatttcacaaa

SEQ ID NO: 66338 - DNA, 17 bp, Arabidopsis thaliana
cagatttcagagctgac

SEQ ID NO: 66339 - DNA, 17 bp, Arabidopsis thaliana
cagatttcggacctcgt

SEQ ID NO: 66340 - DNA, 17 bp, Arabidopsis thaliana
cagatttcgtggctgag

SEQ ID NO: 66341 - DNA, 17 bp, Arabidopsis thaliana
cagatttgacagaacgt

SEQ ID NO: 66342 - DNA, 17 bp, Arabidopsis thaliana
cagatttgacaggacgt

SEQ ID NO: 66343 - DNA, 17 bp, Arabidopsis thaliana
cagatttgagatgttag

SEQ ID NO: 66344 - DNA, 17 bp, Arabidopsis thaliana
cagatttgagtgatcct

SEQ ID NO: 66345 - DNA, 17 bp, Arabidopsis thaliana
cagatttgattgtggag

SEQ ID NO: 66346 - DNA, 17 bp, Arabidopsis thaliana
cagatttgctcgtggca

SEQ ID NO: 66347 - DNA, 17 bp, Arabidopsis thaliana
cagatttggagcaggtg

SEQ ID NO: 66348 - DNA, 17 bp, Arabidopsis thaliana
cagatttggtttcaaca

SEQ ID NO: 66349 - DNA, 17 bp, Arabidopsis thaliana
cagatttgttgaccaaa

SEQ ID NO: 66350 - DNA, 17 bp, Arabidopsis thaliana
cagatttgttgtgcacc

SEQ ID NO: 66351 - DNA, 17 bp, Arabidopsis thaliana
cagattttagtcattca

SEQ ID NO: 66352 - DNA, 17 bp, Arabidopsis thaliana
cagattttagttaccat

SEQ ID NO: 66353 - DNA, 17 bp, Arabidopsis thaliana
cagattttccaggaaga

SEQ ID NO: 66354 - DNA, 17 bp, Arabidopsis thaliana
cagattttccaggaagt

SEQ ID NO: 66355 - DNA, 17 bp, Arabidopsis thaliana
cagattttccgtgccaa

SEQ ID NO: 66356 - DNA, 17 bp, Arabidopsis thaliana
cagattttctgccatca

SEQ ID NO: 66357 - DNA, 17 bp, Arabidopsis thaliana
cagattttctgccatga

SEQ ID NO: 66358 - DNA, 17 bp, Arabidopsis thaliana
cagattttgacaaagtg

SEQ ID NO: 66359 - DNA, 17 bp, Arabidopsis thaliana
cagattttgacactgtg

SEQ ID NO: 66360 - DNA, 17 bp, Arabidopsis thaliana
cagattttgacattgtg

SEQ ID NO: 66361 - DNA, 17 bp, Arabidopsis thaliana
cagattttgcagaacat

SEQ ID NO: 66362 - DNA, 17 bp, Arabidopsis thaliana
cagattttggctaaaac

SEQ ID NO: 66363 - DNA, 17 bp, Arabidopsis thaliana
cagattttggtttgacc

SEQ ID NO: 66364 - DNA, 17 bp, Arabidopsis thaliana
cagatttttgtgcttgt

SEQ ID NO: 66365 - DNA, 17 bp, Arabidopsis thaliana
cagattttttctggctt

SEQ ID NO: 66366 - DNA, 17 bp, Arabidopsis thaliana
cagattttttggcttag

SEQ ID NO: 66367 - DNA, 17 bp, Arabidopsis thaliana
cagcaaaggatggtgag

SEQ ID NO: 66368 - DNA, 17 bp, Arabidopsis thaliana
cagcaaagtttcgttga

SEQ ID NO: 66369 - DNA, 17 bp, Arabidopsis thaliana
cagcaaatcggatgtct

SEQ ID NO: 66370 - DNA, 17 bp, Arabidopsis thaliana
cagcaaattacaggttt

SEQ ID NO: 66371 - DNA, 17 bp, Arabidopsis thaliana
cagcaaattcaggatct

SEQ ID NO: 66372 - DNA, 17 bp, Arabidopsis thaliana
cagcaaccatcacacaa

SEQ ID NO: 66373 - DNA, 17 bp, Arabidopsis thaliana
cagcaacctgagcgcct

SEQ ID NO: 66374 - DNA, 17 bp, Arabidopsis thaliana
cagcaactattgcgata

SEQ ID NO: 66375 - DNA, 17 bp, Arabidopsis thaliana
cagcaacttttgttgag

SEQ ID NO: 66376 - DNA, 17 bp, Arabidopsis thaliana
cagcaagaaacgatcaa

SEQ ID NO: 66377 - DNA, 17 bp, Arabidopsis thaliana
cagcaagaccgtcagat

SEQ ID NO: 66378 - DNA, 17 bp, Arabidopsis thaliana
cagcaagacgattagct

SEQ ID NO: 66379 - DNA, 17 bp, Arabidopsis thaliana
cagcaagacggttagct

SEQ ID NO: 66380 - DNA, 17 bp, Arabidopsis thaliana
cagcaagagagcgatta

SEQ ID NO: 66381 - DNA, 17 bp, Arabidopsis thaliana
cagcaagagcttaccat

SEQ ID NO: 66382 - DNA, 17 bp, Arabidopsis thaliana
cagcaagattccagtca

SEQ ID NO: 66383 - DNA, 17 bp, Arabidopsis thaliana
cagcaagctgcagaagt

SEQ ID NO: 66384 - DNA, 17 bp, Arabidopsis thaliana
cagcaaggattgaactt

SEQ ID NO: 66385 - DNA, 17 bp, Arabidopsis thaliana
cagcaaggccactctgc

SEQ ID NO: 66386 - DNA, 17 bp, Arabidopsis thaliana
cagcaaggcttaaactt

SEQ ID NO: 66387 - DNA, 17 bp, Arabidopsis thaliana
cagcaaggcttgaactt

SEQ ID NO: 66388 - DNA, 17 bp, Arabidopsis thaliana
cagcaagtcccagtatc

SEQ ID NO: 66389 - DNA, 17 bp, Arabidopsis thaliana
cagcaagtctatcaggt

SEQ ID NO: 66390 - DNA, 17 bp, Arabidopsis thaliana
cagcaagtttgttcacc

SEQ ID NO: 66391 - DNA, 17 bp, Arabidopsis thaliana
cagcaatacctgatcac

SEQ ID NO: 66392 - DNA, 17 bp, Arabidopsis thaliana
cagcaatctgtcaccgt

SEQ ID NO: 66393 - DNA, 17 bp, Arabidopsis thaliana
cagcaatgttaccggtg

SEQ ID NO: 66394 - DNA, 17 bp, Arabidopsis thaliana
cagcaatgttatcggtg

SEQ ID NO: 66395 - DNA, 17 bp, Arabidopsis thaliana
cagcaattggccaacgt

SEQ ID NO: 66396 - DNA, 17 bp, Arabidopsis thaliana
cagcaatttctccttga

SEQ ID NO: 66397 - DNA, 17 bp, Arabidopsis thaliana
cagcaatttggagtgaa

SEQ ID NO: 66398 - DNA, 17 bp, Arabidopsis thaliana
cagcaatttttgtccga

SEQ ID NO: 66399 - DNA, 17 bp, Arabidopsis thaliana
cagcacacgattggtca

SEQ ID NO: 66400 - DNA, 17 bp, Arabidopsis thaliana
cagcacagaggccatgc

SEQ ID NO: 66401 - DNA, 17 bp, Arabidopsis thaliana
cagcacatgaaagtttg

SEQ ID NO: 66402 - DNA, 17 bp, Arabidopsis thaliana
cagcacatgagagcttg

SEQ ID NO: 66403 - DNA, 17 bp, Arabidopsis thaliana
cagcacatgtaccagag

SEQ ID NO: 66404 - DNA, 17 bp, Arabidopsis thaliana
cagcacatgtgtagagt

SEQ ID NO: 66405 - DNA, 17 bp, Arabidopsis thaliana
cagcacattcagcttca

SEQ ID NO: 66406 - DNA, 17 bp, Arabidopsis thaliana
cagcaccaacaagatgt

SEQ ID NO: 66407 - DNA, 17 bp, Arabidopsis thaliana
cagcaccagcacatagc

SEQ ID NO: 66408 - DNA, 17 bp, Arabidopsis thaliana
cagcaccaggagtggag

SEQ ID NO: 66409 - DNA, 17 bp, Arabidopsis thaliana
cagcaccgctctgagga

SEQ ID NO: 66410 - DNA, 17 bp, Arabidopsis thaliana
cagcaccttaggatggc

SEQ ID NO: 66411 - DNA, 17 bp, Arabidopsis thaliana
cagcacgacttagttcc

SEQ ID NO: 66412 - DNA, 17 bp, Arabidopsis thaliana
cagcacgatcgtctctt

SEQ ID NO: 66413 - DNA, 17 bp, Arabidopsis thaliana
cagcacggagcgctggt

SEQ ID NO: 66414 - DNA, 17 bp, Arabidopsis thaliana
cagcacgggttatgatc

SEQ ID NO: 66415 - DNA, 17 bp, Arabidopsis thaliana
cagcacgtctgcctggg

SEQ ID NO: 66416 - DNA, 17 bp, Arabidopsis thaliana
cagcactaatgcaccgg

SEQ ID NO: 66417 - DNA, 17 bp, Arabidopsis thaliana
cagcactagtggggatt

SEQ ID NO: 66418 - DNA, 17 bp, Arabidopsis thaliana
cagcactataggtgtct

SEQ ID NO: 66419 - DNA, 17 bp, Arabidopsis thaliana
cagcactctgctgggcc

SEQ ID NO: 66420 - DNA, 17 bp, Arabidopsis thaliana
cagcactgctctatctg

SEQ ID NO: 66421 - DNA, 17 bp, Arabidopsis thaliana
cagcactggactatgcg

SEQ ID NO: 66422 - DNA, 17 bp, Arabidopsis thaliana
cagcactggagctgcca

SEQ ID NO: 66423 - DNA, 17 bp, Arabidopsis thaliana
cagcactggatcggggg

SEQ ID NO: 66424 - DNA, 17 bp, Arabidopsis thaliana
cagcactttgtcgctaa

SEQ ID NO: 66425 - DNA, 17 bp, Arabidopsis thaliana
cagcagaaactaatgag

SEQ ID NO: 66426 - DNA, 17 bp, Arabidopsis thaliana
cagcagaaactgatcac

SEQ ID NO: 66427 - DNA, 17 bp, Arabidopsis thaliana
cagcagaaatgcaagtt

SEQ ID NO: 66428 - DNA, 17 bp, Arabidopsis thaliana
cagcagaacaggtgctc

SEQ ID NO: 66429 - DNA, 17 bp, Arabidopsis thaliana
cagcagaagcatgtgca

SEQ ID NO: 66430 - DNA, 17 bp, Arabidopsis thaliana
cagcagaagtatgtgca

SEQ ID NO: 66431 - DNA, 17 bp, Arabidopsis thaliana
cagcagaccattttgtg

SEQ ID NO: 66432 - DNA, 17 bp, Arabidopsis thaliana
cagcagacccgggttcg

SEQ ID NO: 66433 - DNA, 17 bp, Arabidopsis thaliana
cagcagactccgccgcc

SEQ ID NO: 66434 - DNA, 17 bp, Arabidopsis thaliana
cagcagagggctgcggt

SEQ ID NO: 66435 - DNA, 17 bp, Arabidopsis thaliana
cagcagatctgcaggtt

SEQ ID NO: 66436 - DNA, 17 bp, Arabidopsis thaliana
cagcagcaacttccacc

SEQ ID NO: 66437 - DNA, 17 bp, Arabidopsis thaliana
cagcagccaactcagga

SEQ ID NO: 66438 - DNA, 17 bp, Arabidopsis thaliana
cagcagccctttgtcgc

SEQ ID NO: 66439 - DNA, 17 bp, Arabidopsis thaliana
cagcagccgcggtaatt

SEQ ID NO: 66440 - DNA, 17 bp, Arabidopsis thaliana
cagcagccgcggtcatt

SEQ ID NO: 66441 - DNA, 17 bp, Arabidopsis thaliana
cagcagccttgtgttct

SEQ ID NO: 66442 - DNA, 17 bp, Arabidopsis thaliana
cagcagcgctaccagtt

SEQ ID NO: 66443 - DNA, 17 bp, Arabidopsis thaliana
cagcagcgtcagaggct

SEQ ID NO: 66444 - DNA, 17 bp, Arabidopsis thaliana
cagcagctatgagtatg

SEQ ID NO: 66445 - DNA, 17 bp, Arabidopsis thaliana
cagcagcttcaggcgac

SEQ ID NO: 66446 - DNA, 17 bp, Arabidopsis thaliana
cagcagcttctgcccaa

SEQ ID NO: 66447 - DNA, 17 bp, Arabidopsis thaliana
cagcaggaaagagtatt

SEQ ID NO: 66448 - DNA, 17 bp, Arabidopsis thaliana
cagcaggaatcaacccg

SEQ ID NO: 66449 - DNA, 17 bp, Arabidopsis thaliana
cagcaggaccaacctcc

SEQ ID NO: 66450 - DNA, 17 bp, Arabidopsis thaliana
cagcaggacggtgctca

SEQ ID NO: 66451 - DNA, 17 bp, Arabidopsis thaliana
cagcaggacggtggtca

SEQ ID NO: 66452 - DNA, 17 bp, Arabidopsis thaliana
cagcaggaggcccgcac

SEQ ID NO: 66453 - DNA, 17 bp, Arabidopsis thaliana
cagcaggagtgaagcca

SEQ ID NO: 66454 - DNA, 17 bp, Arabidopsis thaliana
cagcagggacagtcggg

SEQ ID NO: 66455 - DNA, 17 bp, Arabidopsis thaliana
cagcagggctcattgtt

SEQ ID NO: 66456 - DNA, 17 bp, Arabidopsis thaliana
cagcagggcttgaactt

SEQ ID NO: 66457 - DNA, 17 bp, Arabidopsis thaliana
cagcaggtgggctatgc

SEQ ID NO: 66458 - DNA, 17 bp, Arabidopsis thaliana
cagcaggtgggtactcg

SEQ ID NO: 66459 - DNA, 17 bp, Arabidopsis thaliana
cagcagtatgttttttt

SEQ ID NO: 66460 - DNA, 17 bp, Arabidopsis thaliana
cagcagtattgtggcat

SEQ ID NO: 66461 - DNA, 17 bp, Arabidopsis thaliana
cagcagtattgtggctt

SEQ ID NO: 66462 - DNA, 17 bp, Arabidopsis thaliana
cagcagtatttcgcgga

SEQ ID NO: 66463 - DNA, 17 bp, Arabidopsis thaliana
cagcagtcagctccagg

SEQ ID NO: 66464 - DNA, 17 bp, Arabidopsis thaliana
cagcagtggacggatca

SEQ ID NO: 66465 - DNA, 17 bp, Arabidopsis thaliana
cagcagtgttgtggcat

SEQ ID NO: 66466 - DNA, 17 bp, Arabidopsis thaliana
cagcagttgactagaca

SEQ ID NO: 66467 - DNA, 17 bp, Arabidopsis thaliana
cagcagttgactggaca

SEQ ID NO: 66468 - DNA, 17 bp, Arabidopsis thaliana
cagcagttggtttcggt

SEQ ID NO: 66469 - DNA, 17 bp, Arabidopsis thaliana
cagcagtttgctccgga

SEQ ID NO: 66470 - DNA, 17 bp, Arabidopsis thaliana
cagcatacggttggtca

SEQ ID NO: 66471 - DNA, 17 bp, Arabidopsis thaliana
cagcataggatgttgca

SEQ ID NO: 66472 - DNA, 17 bp, Arabidopsis thaliana
cagcatattgatgtgcg

SEQ ID NO: 66473 - DNA, 17 bp, Arabidopsis thaliana
cagcatatttcactgtc

SEQ ID NO: 66474 - DNA, 17 bp, Arabidopsis thaliana
cagcatcatcaagatgg

SEQ ID NO: 66475 - DNA, 17 bp, Arabidopsis thaliana
cagcatgatagacttgg

SEQ ID NO: 66476 - DNA, 17 bp, Arabidopsis thaliana
cagcatggtttgtggga

SEQ ID NO: 66477 - DNA, 17 bp, Arabidopsis thaliana
cagcattaagccaactt

SEQ ID NO: 66478 - DNA, 17 bp, Arabidopsis thaliana
cagcattattgcggtgc

SEQ ID NO: 66479 - DNA, 17 bp, Arabidopsis thaliana
cagcattctgggacttt

SEQ ID NO: 66480 - DNA, 17 bp, Arabidopsis thaliana
cagcattcttggcactg

SEQ ID NO: 66481 - DNA, 17 bp, Arabidopsis thaliana
cagcattgctcagatca

SEQ ID NO: 66482 - DNA, 17 bp, Arabidopsis thaliana
cagcattgtgattccag

SEQ ID NO: 66483 - DNA, 17 bp, Arabidopsis thaliana
cagcatttgaacacgag

SEQ ID NO: 66484 - DNA, 17 bp, Arabidopsis thaliana
cagcattttcgtgattg

SEQ ID NO: 66485 - DNA, 17 bp, Arabidopsis thaliana
cagcattttcgtgattt

SEQ ID NO: 66486 - DNA, 17 bp, Arabidopsis thaliana
cagccaaaatttgcgct

SEQ ID NO: 66487 - DNA, 17 bp, Arabidopsis thaliana
cagccaaagatgacttc

SEQ ID NO: 66488 - DNA, 17 bp, Arabidopsis thaliana
cagccaaagatgacttg

SEQ ID NO: 66489 - DNA, 17 bp, Arabidopsis thaliana
cagccaaatcagccgat

SEQ ID NO: 66490 - DNA, 17 bp, Arabidopsis thaliana
cagccaacacgtctgcc

SEQ ID NO: 66491 - DNA, 17 bp, Arabidopsis thaliana
cagccaacactcctgag

SEQ ID NO: 66492 - DNA, 17 bp, Arabidopsis thaliana
cagccaaccatcccccc

SEQ ID NO: 66493 - DNA, 17 bp, Arabidopsis thaliana
cagccaacgaccccccc

SEQ ID NO: 66494 - DNA, 17 bp, Arabidopsis thaliana
cagccaacgatgacttg

SEQ ID NO: 66495 - DNA, 17 bp, Arabidopsis thaliana
cagccaagaatgactta

SEQ ID NO: 66496 - DNA, 17 bp, Arabidopsis thaliana
cagccaagaatgacttg

SEQ ID NO: 66497 - DNA, 17 bp, Arabidopsis thaliana
cagccaagatgacttgc

SEQ ID NO: 66498 - DNA, 17 bp, Arabidopsis thaliana
cagccaagatttgtgaa

SEQ ID NO: 66499 - DNA, 17 bp, Arabidopsis thaliana
cagccaagcatgacttg

SEQ ID NO: 66500 - DNA, 17 bp, Arabidopsis thaliana
cagccaagcatgccttc

SEQ ID NO: 66501 - DNA, 17 bp, Arabidopsis thaliana
cagccaagcgttcatag

SEQ ID NO: 66502 - DNA, 17 bp, Arabidopsis thaliana
cagccaagctgacttgc

SEQ ID NO: 66503 - DNA, 17 bp, Arabidopsis thaliana
cagccaaggaacttgcc

SEQ ID NO: 66504 - DNA, 17 bp, Arabidopsis thaliana
cagccaaggaagactga

SEQ ID NO: 66505 - DNA, 17 bp, Arabidopsis thaliana
cagccaaggaagacttg

SEQ ID NO: 66506 - DNA, 17 bp, Arabidopsis thaliana
cagccaaggaccaaccc

SEQ ID NO: 66507 - DNA, 17 bp, Arabidopsis thaliana
cagccaaggacccaccc

SEQ ID NO: 66508 - DNA, 17 bp, Arabidopsis thaliana
cagccaaggaccctccc

SEQ ID NO: 66509 - DNA, 17 bp, Arabidopsis thaliana
cagccaaggacgacttg

SEQ ID NO: 66510 - DNA, 17 bp, Arabidopsis thaliana
cagccaaggacttgccg

SEQ ID NO: 66511 - DNA, 17 bp, Arabidopsis thaliana
cagccaaggagaaccta

SEQ ID NO: 66512 - DNA, 17 bp, Arabidopsis thaliana
cagccaaggaggactta

SEQ ID NO: 66513 - DNA, 17 bp, Arabidopsis thaliana
cagccaaggaggacttg

SEQ ID NO: 66514 - DNA, 17 bp, Arabidopsis thaliana
cagccaaggaggacttt

SEQ ID NO: 66515 - DNA, 17 bp, Arabidopsis thaliana
cagccaaggataacgcc

SEQ ID NO: 66516 - DNA, 17 bp, Arabidopsis thaliana
cagccaaggataacttc

SEQ ID NO: 66517 - DNA, 17 bp, Arabidopsis thaliana
cagccaaggataacttg

SEQ ID NO: 66518 - DNA, 17 bp, Arabidopsis thaliana
cagccaaggatacttgc

SEQ ID NO: 66519 - DNA, 17 bp, Arabidopsis thaliana
cagccaaggatcacccc

SEQ ID NO: 66520 - DNA, 17 bp, Arabidopsis thaliana
cagccaaggatcacctg

SEQ ID NO: 66521 - DNA, 17 bp, Arabidopsis thaliana
cagccaaggatcacgtg

SEQ ID NO: 66522 - DNA, 17 bp, Arabidopsis thaliana
cagccaaggatcactcc

SEQ ID NO: 66523 - DNA, 17 bp, Arabidopsis thaliana
cagccaaggatcactcg

SEQ ID NO: 66524 - DNA, 17 bp, Arabidopsis thaliana
cagccaaggatcactta

SEQ ID NO: 66525 - DNA, 17 bp, Arabidopsis thaliana
cagccaaggatcacttg

SEQ ID NO: 66526 - DNA, 17 bp, Arabidopsis thaliana
cagccaaggatcattta

SEQ ID NO: 66527 - DNA, 17 bp, Arabidopsis thaliana
cagccaaggatcttgcc

SEQ ID NO: 66528 - DNA, 17 bp, Arabidopsis thaliana
cagccaaggatgaatcg

SEQ ID NO: 66529 - DNA, 17 bp, Arabidopsis thaliana
cagccaaggatgaatta

SEQ ID NO: 66530 - DNA, 17 bp, Arabidopsis thaliana
cagccaaggatgaattc

SEQ ID NO: 66531 - DNA, 17 bp, Arabidopsis thaliana
cagccaaggatgaattg

SEQ ID NO: 66532 - DNA, 17 bp, Arabidopsis thaliana
cagccaaggatgacatg

SEQ ID NO: 66533 - DNA, 17 bp, Arabidopsis thaliana
cagccaaggatgacctc

SEQ ID NO: 66534 - DNA, 17 bp, Arabidopsis thaliana
cagccaaggatgacctg

SEQ ID NO: 66535 - DNA, 17 bp, Arabidopsis thaliana
cagccaaggatgacgtg

SEQ ID NO: 66536 - DNA, 17 bp, Arabidopsis thaliana
cagccaaggatgactcc

SEQ ID NO: 66537 - DNA, 17 bp, Arabidopsis thaliana
cagccaaggatgactcg

SEQ ID NO: 66538 - DNA, 17 bp, Arabidopsis thaliana
cagccaaggatgactga

SEQ ID NO: 66539 - DNA, 17 bp, Arabidopsis thaliana
cagccaaggatgactgc

SEQ ID NO: 66540 - DNA, 17 bp, Arabidopsis thaliana
cagccaaggatgactgg

SEQ ID NO: 66541 - DNA, 17 bp, Arabidopsis thaliana
cagccaaggatgactta

SEQ ID NO: 66542 - DNA, 17 bp, Arabidopsis thaliana
cagccaaggatgacttc

SEQ ID NO: 66543 - DNA, 17 bp, Arabidopsis thaliana
cagccaaggatgacttg

SEQ ID NO: 66544 - DNA, 17 bp, Arabidopsis thaliana
cagccaaggatgacttt

SEQ ID NO: 66545 - DNA, 17 bp, Arabidopsis thaliana
cagccaaggatgagttg

SEQ ID NO: 66546 - DNA, 17 bp, Arabidopsis thaliana
cagccaaggatgatgga

SEQ ID NO: 66547 - DNA, 17 bp, Arabidopsis thaliana
cagccaaggatgattcg

SEQ ID NO: 66548 - DNA, 17 bp, Arabidopsis thaliana
cagccaaggatgattgc

SEQ ID NO: 66549 - DNA, 17 bp, Arabidopsis thaliana
cagccaaggatgatttg

SEQ ID NO: 66550 - DNA, 17 bp, Arabidopsis thaliana
cagccaaggatggcttg

SEQ ID NO: 66551 - DNA, 17 bp, Arabidopsis thaliana
cagccaaggatgtgccg

SEQ ID NO: 66552 - DNA, 17 bp, Arabidopsis thaliana
cagccaaggatgtttgc

SEQ ID NO: 66553 - DNA, 17 bp, Arabidopsis thaliana
cagccaaggattacgtg

SEQ ID NO: 66554 - DNA, 17 bp, Arabidopsis thaliana
cagccaaggattacttg

SEQ ID NO: 66555 - DNA, 17 bp, Arabidopsis thaliana
cagccaaggcacttgcc

SEQ ID NO: 66556 - DNA, 17 bp, Arabidopsis thaliana
cagccaagggaacgggc

SEQ ID NO: 66557 - DNA, 17 bp, Arabidopsis thaliana
cagccaagggtgacttg

SEQ ID NO: 66558 - DNA, 17 bp, Arabidopsis thaliana
cagccaagtaacttccc

SEQ ID NO: 66559 - DNA, 17 bp, Arabidopsis thaliana
cagccaagtatgacttg

SEQ ID NO: 66560 - DNA, 17 bp, Arabidopsis thaliana
cagccaatgatgacttg

SEQ ID NO: 66561 - DNA, 17 bp, Arabidopsis thaliana
cagccaatggaccacat

SEQ ID NO: 66562 - DNA, 17 bp, Arabidopsis thaliana
cagccaatttgagattc

SEQ ID NO: 66563 - DNA, 17 bp, Arabidopsis thaliana
cagccacaaggatgttc

SEQ ID NO: 66564 - DNA, 17 bp, Arabidopsis thaliana
cagccacactgggactg

SEQ ID NO: 66565 - DNA, 17 bp, Arabidopsis thaliana
cagccaccaacatcaat

SEQ ID NO: 66566 - DNA, 17 bp, Arabidopsis thaliana
cagccacccacccaccc

SEQ ID NO: 66567 - DNA, 17 bp, Arabidopsis thaliana
cagccaccgttcctccc

SEQ ID NO: 66568 - DNA, 17 bp, Arabidopsis thaliana
cagccacggatgacttg

SEQ ID NO: 66569 - DNA, 17 bp, Arabidopsis thaliana
cagccactaccgctgtt

SEQ ID NO: 66570 - DNA, 17 bp, Arabidopsis thaliana
cagccagaactattggc

SEQ ID NO: 66571 - DNA, 17 bp, Arabidopsis thaliana
cagccagacctcttggt

SEQ ID NO: 66572 - DNA, 17 bp, Arabidopsis thaliana
cagccagactgagagct

SEQ ID NO: 66573 - DNA, 17 bp, Arabidopsis thaliana
cagccagactgtgaaac

SEQ ID NO: 66574 - DNA, 17 bp, Arabidopsis thaliana
cagccagactgtggaac

SEQ ID NO: 66575 - DNA, 17 bp, Arabidopsis thaliana
cagccagagagaacgcg

SEQ ID NO: 66576 - DNA, 17 bp, Arabidopsis thaliana
cagccagatcagccgat

SEQ ID NO: 66577 - DNA, 17 bp, Arabidopsis thaliana
cagccagatctggttga

SEQ ID NO: 66578 - DNA, 17 bp, Arabidopsis thaliana
cagccagatcttccatc

SEQ ID NO: 66579 - DNA, 17 bp, Arabidopsis thaliana
cagccagatggtccgct

SEQ ID NO: 66580 - DNA, 17 bp, Arabidopsis thaliana
cagccagattttccagg

SEQ ID NO: 66581 - DNA, 17 bp, Arabidopsis thaliana
cagccagccaaggatga

SEQ ID NO: 66582 - DNA, 17 bp, Arabidopsis thaliana
cagccagccagccaagg

SEQ ID NO: 66583 - DNA, 17 bp, Arabidopsis thaliana
cagccagccagccagcc

SEQ ID NO: 66584 - DNA, 17 bp, Arabidopsis thaliana
cagccagccctttgtcg

SEQ ID NO: 66585 - DNA, 17 bp, Arabidopsis thaliana
cagccagcctaagcgcc

SEQ ID NO: 66586 - DNA, 17 bp, Arabidopsis thaliana
cagccagcctaagcgct

SEQ ID NO: 66587 - DNA, 17 bp, Arabidopsis thaliana
cagccagcctgcccacc

SEQ ID NO: 66588 - DNA, 17 bp, Arabidopsis thaliana
cagccagccttcaaatc

SEQ ID NO: 66589 - DNA, 17 bp, Arabidopsis thaliana
cagccagcgtgctccgg

SEQ ID NO: 66590 - DNA, 17 bp, Arabidopsis thaliana
cagccagctcctgttgc

SEQ ID NO: 66591 - DNA, 17 bp, Arabidopsis thaliana
cagccagctcgcctcac

SEQ ID NO: 66592 - DNA, 17 bp, Arabidopsis thaliana
cagccagctcgcgttga

SEQ ID NO: 66593 - DNA, 17 bp, Arabidopsis thaliana
cagccagctttagccca

SEQ ID NO: 66594 - DNA, 17 bp, Arabidopsis thaliana
cagccaggagaagtgcg

SEQ ID NO: 66595 - DNA, 17 bp, Arabidopsis thaliana
cagccaggaggactgta

SEQ ID NO: 66596 - DNA, 17 bp, Arabidopsis thaliana
cagccaggatgacttgc

SEQ ID NO: 66597 - DNA, 17 bp, Arabidopsis thaliana
cagccaggatgacttgt

SEQ ID NO: 66598 - DNA, 17 bp, Arabidopsis thaliana
cagccaggccagttcat

SEQ ID NO: 66599 - DNA, 17 bp, Arabidopsis thaliana
cagccaggcccgggcga

SEQ ID NO: 66600 - DNA, 17 bp, Arabidopsis thaliana
cagccaggccgagtgac

SEQ ID NO: 66601 - DNA, 17 bp, Arabidopsis thaliana
cagccaggctggtccat

SEQ ID NO: 66602 - DNA, 17 bp, Arabidopsis thaliana
cagccagggaacagtga

SEQ ID NO: 66603 - DNA, 17 bp, Arabidopsis thaliana
cagccagggaaggtggg

SEQ ID NO: 66604 - DNA, 17 bp, Arabidopsis thaliana
cagccagggatgacttg

SEQ ID NO: 66605 - DNA, 17 bp, Arabidopsis thaliana
cagccagggatttgccg

SEQ ID NO: 66606 - DNA, 17 bp, Arabidopsis thaliana
cagccagggttccttgg

SEQ ID NO: 66607 - DNA, 17 bp, Arabidopsis thaliana
cagccaggtctccaagg

SEQ ID NO: 66608 - DNA, 17 bp, Arabidopsis thaliana
cagccaggttcgaatcc

SEQ ID NO: 66609 - DNA, 17 bp, Arabidopsis thaliana
cagccaggttcgagtcc

SEQ ID NO: 66610 - DNA, 17 bp, Arabidopsis thaliana
cagccaggttgttccat

SEQ ID NO: 66611 - DNA, 17 bp, Arabidopsis thaliana
cagccaggtttagggtt

SEQ ID NO: 66612 - DNA, 17 bp, Arabidopsis thaliana
cagccagtatggccgag

SEQ ID NO: 66613 - DNA, 17 bp, Arabidopsis thaliana
cagccagtggattatgt

SEQ ID NO: 66614 - DNA, 17 bp, Arabidopsis thaliana
cagccagtgtcggtcta

SEQ ID NO: 66615 - DNA, 17 bp, Arabidopsis thaliana
cagccagtgttctgcgc

SEQ ID NO: 66616 - DNA, 17 bp, Arabidopsis thaliana
cagccagtgttgacctg

SEQ ID NO: 66617 - DNA, 17 bp, Arabidopsis thaliana
cagccagttcaaatccg

SEQ ID NO: 66618 - DNA, 17 bp, Arabidopsis thaliana
cagccagttgatcctgg

SEQ ID NO: 66619 - DNA, 17 bp, Arabidopsis thaliana
cagccatacttgtaagc

SEQ ID NO: 66620 - DNA, 17 bp, Arabidopsis thaliana
cagccatccctttgtcg

SEQ ID NO: 66621 - DNA, 17 bp, Arabidopsis thaliana
cagccatgatgacttgc

SEQ ID NO: 66622 - DNA, 17 bp, Arabidopsis thaliana
cagccatggatgacttg

SEQ ID NO: 66623 - DNA, 17 bp, Arabidopsis thaliana
cagccatggtacaaccg

SEQ ID NO: 66624 - DNA, 17 bp, Arabidopsis thaliana
cagccattgtaaataag

SEQ ID NO: 66625 - DNA, 17 bp, Arabidopsis thaliana
cagccatttcttcgact

SEQ ID NO: 66626 - DNA, 17 bp, Arabidopsis thaliana
cagccatttgggttctg

SEQ ID NO: 66627 - DNA, 17 bp, Arabidopsis thaliana
cagccatttggttccaa

SEQ ID NO: 66628 - DNA, 17 bp, Arabidopsis thaliana
cagcccaacataggaag

SEQ ID NO: 66629 - DNA, 17 bp, Arabidopsis thaliana
cagcccagaaccaccac

SEQ ID NO: 66630 - DNA, 17 bp, Arabidopsis thaliana
cagcccagaaccacccc

SEQ ID NO: 66631 - DNA, 17 bp, Arabidopsis thaliana
cagcccagaacctcctg

SEQ ID NO: 66632 - DNA, 17 bp, Arabidopsis thaliana
cagcccagccatttctg

SEQ ID NO: 66633 - DNA, 17 bp, Arabidopsis thaliana
cagcccaggatgacttg

SEQ ID NO: 66634 - DNA, 17 bp, Arabidopsis thaliana
cagcccattggtgtgac

SEQ ID NO: 66635 - DNA, 17 bp, Arabidopsis thaliana
cagcccattgtccatac

SEQ ID NO: 66636 - DNA, 17 bp, Arabidopsis thaliana
cagcccattttaagcct

SEQ ID NO: 66637 - DNA, 17 bp, Arabidopsis thaliana
cagccccaatcgggcgg

SEQ ID NO: 66638 - DNA, 17 bp, Arabidopsis thaliana
cagcccccaacactcct

SEQ ID NO: 66639 - DNA, 17 bp, Arabidopsis thaliana
cagcccctaccagtgcc

SEQ ID NO: 66640 - DNA, 17 bp, Arabidopsis thaliana
cagcccctccgtaagct

SEQ ID NO: 66641 - DNA, 17 bp, Arabidopsis thaliana
cagcccctgtcgctaag

SEQ ID NO: 66642 - DNA, 17 bp, Arabidopsis thaliana
cagcccctgttgcagct

SEQ ID NO: 66643 - DNA, 17 bp, Arabidopsis thaliana
cagccccttcacggttg

SEQ ID NO: 66644 - DNA, 17 bp, Arabidopsis thaliana
cagccccttgtcgctaa

SEQ ID NO: 66645 - DNA, 17 bp, Arabidopsis thaliana
cagcccgacctgaaccc

SEQ ID NO: 66646 - DNA, 17 bp, Arabidopsis thaliana
cagccctaagtgagccc

SEQ ID NO: 66647 - DNA, 17 bp, Arabidopsis thaliana
cagccctcgtcgctaag

SEQ ID NO: 66648 - DNA, 17 bp, Arabidopsis thaliana
cagccctctgtcgctaa

SEQ ID NO: 66649 - DNA, 17 bp, Arabidopsis thaliana
cagccctggctgagaac

SEQ ID NO: 66650 - DNA, 17 bp, Arabidopsis thaliana
cagccctggctgagacc

SEQ ID NO: 66651 - DNA, 17 bp, Arabidopsis thaliana
cagccctgtcgctaaga

SEQ ID NO: 66652 - DNA, 17 bp, Arabidopsis thaliana
cagcccttcgctaagat

SEQ ID NO: 66653 - DNA, 17 bp, Arabidopsis thaliana
cagcccttggtcgtggc

SEQ ID NO: 66654 - DNA, 17 bp, Arabidopsis thaliana
cagcccttgtccctaag

SEQ ID NO: 66655 - DNA, 17 bp, Arabidopsis thaliana
cagcccttgtcgctaag

SEQ ID NO: 66656 - DNA, 17 bp, Arabidopsis thaliana
cagccctttcgctaaga

SEQ ID NO: 66657 - DNA, 17 bp, Arabidopsis thaliana
cagccctttctcgctaa

SEQ ID NO: 66658 - DNA, 17 bp, Arabidopsis thaliana
cagccctttgcccaccc

SEQ ID NO: 66659 - DNA, 17 bp, Arabidopsis thaliana
cagccctttgccctccc

SEQ ID NO: 66660 - DNA, 17 bp, Arabidopsis thaliana
cagccctttgtcactaa

SEQ ID NO: 66661 - DNA, 17 bp, Arabidopsis thaliana
cagccctttgtcccccc

SEQ ID NO: 66662 - DNA, 17 bp, Arabidopsis thaliana
cagccctttgtccctcc

SEQ ID NO: 66663 - DNA, 17 bp, Arabidopsis thaliana
cagccctttgtcgccaa

SEQ ID NO: 66664 - DNA, 17 bp, Arabidopsis thaliana
cagccctttgtcgccac

SEQ ID NO: 66665 - DNA, 17 bp, Arabidopsis thaliana
cagccctttgtcgcccc

SEQ ID NO: 66666 - DNA, 17 bp, Arabidopsis thaliana
cagccctttgtcgctaa

SEQ ID NO: 66667 - DNA, 17 bp, Arabidopsis thaliana
cagccctttgtcgctac

SEQ ID NO: 66668 - DNA, 17 bp, Arabidopsis thaliana
cagccctttgtcgctag

SEQ ID NO: 66669 - DNA, 17 bp, Arabidopsis thaliana
cagccctttgtcgctcg

SEQ ID NO: 66670 - DNA, 17 bp, Arabidopsis thaliana
cagccctttgtcgcttt

SEQ ID NO: 66671 - DNA, 17 bp, Arabidopsis thaliana
cagcccttttgtcgcta

SEQ ID NO: 66672 - DNA, 17 bp, Arabidopsis thaliana
cagccctttttcgctaa

SEQ ID NO: 66673 - DNA, 17 bp, Arabidopsis thaliana
cagcccttttttccgta

SEQ ID NO: 66674 - DNA, 17 bp, Arabidopsis thaliana
cagccgacatctgtgaa

SEQ ID NO: 66675 - DNA, 17 bp, Arabidopsis thaliana
cagccgacggtgtatgt

SEQ ID NO: 66676 - DNA, 17 bp, Arabidopsis thaliana
cagccgactgctctagc

SEQ ID NO: 66677 - DNA, 17 bp, Arabidopsis thaliana
cagccgacttgtgtgat

SEQ ID NO: 66678 - DNA, 17 bp, Arabidopsis thaliana
cagccgaggatgacttg

SEQ ID NO: 66679 - DNA, 17 bp, Arabidopsis thaliana
cagccgaggatgctttg

SEQ ID NO: 66680 - DNA, 17 bp, Arabidopsis thaliana
cagccgagggcacgtct

SEQ ID NO: 66681 - DNA, 17 bp, Arabidopsis thaliana
cagccgatggtacttga

SEQ ID NO: 66682 - DNA, 17 bp, Arabidopsis thaliana
cagccgattgacgattt

SEQ ID NO: 66683 - DNA, 17 bp, Arabidopsis thaliana
cagccgcaactacttgc

SEQ ID NO: 66684 - DNA, 17 bp, Arabidopsis thaliana
cagccgcacgaccatat

SEQ ID NO: 66685 - DNA, 17 bp, Arabidopsis thaliana
cagccgcagaacgaccc

SEQ ID NO: 66686 - DNA, 17 bp, Arabidopsis thaliana
cagccgcagcgattaga

SEQ ID NO: 66687 - DNA, 17 bp, Arabidopsis thaliana
cagccgccatagaagtt

SEQ ID NO: 66688 - DNA, 17 bp, Arabidopsis thaliana
cagccgccatgttcagt

SEQ ID NO: 66689 - DNA, 17 bp, Arabidopsis thaliana
cagccgcggtaattcag

SEQ ID NO: 66690 - DNA, 17 bp, Arabidopsis thaliana
cagccgcggtaattcca

SEQ ID NO: 66691 - DNA, 17 bp, Arabidopsis thaliana
cagccgcggtaattccc

SEQ ID NO: 66692 - DNA, 17 bp, Arabidopsis thaliana
cagccgcgtgatatcct

SEQ ID NO: 66693 - DNA, 17 bp, Arabidopsis thaliana
cagccgcttcgttgttg

SEQ ID NO: 66694 - DNA, 17 bp, Arabidopsis thaliana
cagccggaatccgacag

SEQ ID NO: 66695 - DNA, 17 bp, Arabidopsis thaliana
cagccggaggtagggtc

SEQ ID NO: 66696 - DNA, 17 bp, Arabidopsis thaliana
cagccggcgtgaccgcc

SEQ ID NO: 66697 - DNA, 17 bp, Arabidopsis thaliana
cagccggtatatgtgat

SEQ ID NO: 66698 - DNA, 17 bp, Arabidopsis thaliana
cagccgtaacgcgatac

SEQ ID NO: 66699 - DNA, 17 bp, Arabidopsis thaliana
cagccgtcacattatcc

SEQ ID NO: 66700 - DNA, 17 bp, Arabidopsis thaliana
cagccgtctatttgaga

SEQ ID NO: 66701 - DNA, 17 bp, Arabidopsis thaliana
cagccgtgacatgacgc

SEQ ID NO: 66702 - DNA, 17 bp, Arabidopsis thaliana
cagccgttgataagttg

SEQ ID NO: 66703 - DNA, 17 bp, Arabidopsis thaliana
cagccgttttaatgtgc

SEQ ID NO: 66704 - DNA, 17 bp, Arabidopsis thaliana
cagcctacggggtatta

SEQ ID NO: 66705 - DNA, 17 bp, Arabidopsis thaliana
cagcctccaaatctggt

SEQ ID NO: 66706 - DNA, 17 bp, Arabidopsis thaliana
cagcctcctttgggatc

SEQ ID NO: 66707 - DNA, 17 bp, Arabidopsis thaliana
cagcctcgactagttga

SEQ ID NO: 66708 - DNA, 17 bp, Arabidopsis thaliana
cagcctctataagcttc

SEQ ID NO: 66709 - DNA, 17 bp, Arabidopsis thaliana
cagcctctggtcgatgg

SEQ ID NO: 66710 - DNA, 17 bp, Arabidopsis thaliana
cagcctgatgaagagta

SEQ ID NO: 66711 - DNA, 17 bp, Arabidopsis thaliana
cagcctgcccaccctcc

SEQ ID NO: 66712 - DNA, 17 bp, Arabidopsis thaliana
cagcctgcccaccctgc

SEQ ID NO: 66713 - DNA, 17 bp, Arabidopsis thaliana
cagcctgcccaccctgg

SEQ ID NO: 66714 - DNA, 17 bp, Arabidopsis thaliana
cagcctgcccactctgg

SEQ ID NO: 66715 - DNA, 17 bp, Arabidopsis thaliana
cagcctgctaactagcc

SEQ ID NO: 66716 - DNA, 17 bp, Arabidopsis thaliana
cagcctgctaactagct

SEQ ID NO: 66717 - DNA, 17 bp, Arabidopsis thaliana
cagcctggaaccttgaa

SEQ ID NO: 66718 - DNA, 17 bp, Arabidopsis thaliana
cagcctggagcaagccc

SEQ ID NO: 66719 - DNA, 17 bp, Arabidopsis thaliana
cagccttagccctgttt

SEQ ID NO: 66720 - DNA, 17 bp, Arabidopsis thaliana
cagccttagctgtttct

SEQ ID NO: 66721 - DNA, 17 bp, Arabidopsis thaliana
cagccttcaaatcccgg

SEQ ID NO: 66722 - DNA, 17 bp, Arabidopsis thaliana
cagccttcagcattgca

SEQ ID NO: 66723 - DNA, 17 bp, Arabidopsis thaliana
cagccttgagctatgag

SEQ ID NO: 66724 - DNA, 17 bp, Arabidopsis thaliana
cagccttggatgacttg

SEQ ID NO: 66725 - DNA, 17 bp, Arabidopsis thaliana
cagccttggggttgtag

SEQ ID NO: 66726 - DNA, 17 bp, Arabidopsis thaliana
cagccttgtgttctaga

SEQ ID NO: 66727 - DNA, 17 bp, Arabidopsis thaliana
cagccttgtgttctgga

SEQ ID NO: 66728 - DNA, 17 bp, Arabidopsis thaliana
cagcctttgcgttttca

SEQ ID NO: 66729 - DNA, 17 bp, Arabidopsis thaliana
cagcctttgtcgctaag

SEQ ID NO: 66730 - DNA, 17 bp, Arabidopsis thaliana
cagccttttgtcgctaa

SEQ ID NO: 66731 - DNA, 17 bp, Arabidopsis thaliana
cagcctttttgcgatct

SEQ ID NO: 66732 - DNA, 17 bp, Arabidopsis thaliana
cagcgaaaaaccagaaa

SEQ ID NO: 66733 - DNA, 17 bp, Arabidopsis thaliana
cagcgaacgtgaaatta

SEQ ID NO: 66734 - DNA, 17 bp, Arabidopsis thaliana
cagcgaagaaccttacc

SEQ ID NO: 66735 - DNA, 17 bp, Arabidopsis thaliana
cagcgaaggatgacttg

SEQ ID NO: 66736 - DNA, 17 bp, Arabidopsis thaliana
cagcgaattacagtaac

SEQ ID NO: 66737 - DNA, 17 bp, Arabidopsis thaliana
cagcgaattgtgcgatt

SEQ ID NO: 66738 - DNA, 17 bp, Arabidopsis thaliana
cagcgacaagcaaacaa

SEQ ID NO: 66739 - DNA, 17 bp, Arabidopsis thaliana
cagcgacaagcaaacga

SEQ ID NO: 66740 - DNA, 17 bp, Arabidopsis thaliana
cagcgacaccaattcca

SEQ ID NO: 66741 - DNA, 17 bp, Arabidopsis thaliana
cagcgacagatctaaac

SEQ ID NO: 66742 - DNA, 17 bp, Arabidopsis thaliana
cagcgacagcaaccagc

SEQ ID NO: 66743 - DNA, 17 bp, Arabidopsis thaliana
cagcgacagcgaccagc

SEQ ID NO: 66744 - DNA, 17 bp, Arabidopsis thaliana
cagcgacagcggcagcg

SEQ ID NO: 66745 - DNA, 17 bp, Arabidopsis thaliana
cagcgacaggcaaacaa

SEQ ID NO: 66746 - DNA, 17 bp, Arabidopsis thaliana
cagcgacaggcaaacga

SEQ ID NO: 66747 - DNA, 17 bp, Arabidopsis thaliana
cagcgacagggaaacca

SEQ ID NO: 66748 - DNA, 17 bp, Arabidopsis thaliana
cagcgacagggaaacga

SEQ ID NO: 66749 - DNA, 17 bp, Arabidopsis thaliana
cagcgacatctccgatc

SEQ ID NO: 66750 - DNA, 17 bp, Arabidopsis thaliana
cagcgaccaaaagttgt

SEQ ID NO: 66751 - DNA, 17 bp, Arabidopsis thaliana
cagcgaccagcgacagc

SEQ ID NO: 66752 - DNA, 17 bp, Arabidopsis thaliana
cagcgaccagcgacagt

SEQ ID NO: 66753 - DNA, 17 bp, Arabidopsis thaliana
cagcgaccagcgaccag

SEQ ID NO: 66754 - DNA, 17 bp, Arabidopsis thaliana
cagcgaccagcgatcat

SEQ ID NO: 66755 - DNA, 17 bp, Arabidopsis thaliana
cagcgaccccaggtcag

SEQ ID NO: 66756 - DNA, 17 bp, Arabidopsis thaliana
cagcgacctctaagctt

SEQ ID NO: 66757 - DNA, 17 bp, Arabidopsis thaliana
cagcgacctctaagttt

SEQ ID NO: 66758 - DNA, 17 bp, Arabidopsis thaliana
cagcgacctgggttcgg

SEQ ID NO: 66759 - DNA, 17 bp, Arabidopsis thaliana
cagcgacctgggttctc

SEQ ID NO: 66760 - DNA, 17 bp, Arabidopsis thaliana
cagcgacgcatgacttc

SEQ ID NO: 66761 - DNA, 17 bp, Arabidopsis thaliana
cagcgacgcggattacg

SEQ ID NO: 66762 - DNA, 17 bp, Arabidopsis thaliana
cagcgacggatcgcatg

SEQ ID NO: 66763 - DNA, 17 bp, Arabidopsis thaliana
cagcgacggatttgggt

SEQ ID NO: 66764 - DNA, 17 bp, Arabidopsis thaliana
cagcgacgggattgaag

SEQ ID NO: 66765 - DNA, 17 bp, Arabidopsis thaliana
cagcgacgtagggaaag

SEQ ID NO: 66766 - DNA, 17 bp, Arabidopsis thaliana
cagcgactatcaccagg

SEQ ID NO: 66767 - DNA, 17 bp, Arabidopsis thaliana
cagcgactcgtttgcgt

SEQ ID NO: 66768 - DNA, 17 bp, Arabidopsis thaliana
cagcgactgtcgccacc

SEQ ID NO: 66769 - DNA, 17 bp, Arabidopsis thaliana
cagcgactgtcgccagc

SEQ ID NO: 66770 - DNA, 17 bp, Arabidopsis thaliana
cagcgactgtcgccggc

SEQ ID NO: 66771 - DNA, 17 bp, Arabidopsis thaliana
cagcgactttcaggctc

SEQ ID NO: 66772 - DNA, 17 bp, Arabidopsis thaliana
cagcgagatattatccg

SEQ ID NO: 66773 - DNA, 17 bp, Arabidopsis thaliana
cagcgagccacctgacc

SEQ ID NO: 66774 - DNA, 17 bp, Arabidopsis thaliana
cagcgagctgagacgag

SEQ ID NO: 66775 - DNA, 17 bp, Arabidopsis thaliana
cagcgagggcacgtctg

SEQ ID NO: 66776 - DNA, 17 bp, Arabidopsis thaliana
cagcgaggttggccagc

SEQ ID NO: 66777 - DNA, 17 bp, Arabidopsis thaliana
cagcgagtcctcttcaa

SEQ ID NO: 66778 - DNA, 17 bp, Arabidopsis thaliana
cagcgataaaagataac

SEQ ID NO: 66779 - DNA, 17 bp, Arabidopsis thaliana
cagcgataatcaacacc

SEQ ID NO: 66780 - DNA, 17 bp, Arabidopsis thaliana
cagcgatactgacatgc

SEQ ID NO: 66781 - DNA, 17 bp, Arabidopsis thaliana
cagcgatactgacgccc

SEQ ID NO: 66782 - DNA, 17 bp, Arabidopsis thaliana
cagcgatactgacggac

SEQ ID NO: 66783 - DNA, 17 bp, Arabidopsis thaliana
cagcgatactgacgtcc

SEQ ID NO: 66784 - DNA, 17 bp, Arabidopsis thaliana
cagcgatactgacgtgc

SEQ ID NO: 66785 - DNA, 17 bp, Arabidopsis thaliana
cagcgatactgtcgtgc

SEQ ID NO: 66786 - DNA, 17 bp, Arabidopsis thaliana
cagcgatagcgaccagc

SEQ ID NO: 66787 - DNA, 17 bp, Arabidopsis thaliana
cagcgatctcggagcct

SEQ ID NO: 66788 - DNA, 17 bp, Arabidopsis thaliana
cagcgatgaagactgct

SEQ ID NO: 66789 - DNA, 17 bp, Arabidopsis thaliana
cagcgatgtgtgccgat

SEQ ID NO: 66790 - DNA, 17 bp, Arabidopsis thaliana
cagcgatgttgcttagg

SEQ ID NO: 66791 - DNA, 17 bp, Arabidopsis thaliana
cagcgattagttgctgc

SEQ ID NO: 66792 - DNA, 17 bp, Arabidopsis thaliana
cagcgattccgttatca

SEQ ID NO: 66793 - DNA, 17 bp, Arabidopsis thaliana
cagcgattgtctcagcg

SEQ ID NO: 66794 - DNA, 17 bp, Arabidopsis thaliana
cagcgattgtctgtgcg

SEQ ID NO: 66795 - DNA, 17 bp, Arabidopsis thaliana
cagcgattgtctttgcg

SEQ ID NO: 66796 - DNA, 17 bp, Arabidopsis thaliana
cagcgatttattgtccg

SEQ ID NO: 66797 - DNA, 17 bp, Arabidopsis thaliana
cagcgattttaaaccga

SEQ ID NO: 66798 - DNA, 17 bp, Arabidopsis thaliana
cagcgattttgcggatg

SEQ ID NO: 66799 - DNA, 17 bp, Arabidopsis thaliana
cagcgatttttttgagt

SEQ ID NO: 66800 - DNA, 17 bp, Arabidopsis thaliana
cagcgcatcctgtagat

SEQ ID NO: 66801 - DNA, 17 bp, Arabidopsis thaliana
cagcgccgattttgtac

SEQ ID NO: 66802 - DNA, 17 bp, Arabidopsis thaliana
cagcgccggaggcacga

SEQ ID NO: 66803 - DNA, 17 bp, Arabidopsis thaliana
cagcgccgtctccatgg

SEQ ID NO: 66804 - DNA, 17 bp, Arabidopsis thaliana
cagcgcctgtggtgtac

SEQ ID NO: 66805 - DNA, 17 bp, Arabidopsis thaliana
cagcgctctgacgaaaa

SEQ ID NO: 66806 - DNA, 17 bp, Arabidopsis thaliana
cagcgctctgacgaaga

SEQ ID NO: 66807 - DNA, 17 bp, Arabidopsis thaliana
cagcgctttgatatcct

SEQ ID NO: 66808 - DNA, 17 bp, Arabidopsis thaliana
cagcgctttgtcgctaa

SEQ ID NO: 66809 - DNA, 17 bp, Arabidopsis thaliana
cagcggaaaacggtcta

SEQ ID NO: 66810 - DNA, 17 bp, Arabidopsis thaliana
cagcggaatatgcggat

SEQ ID NO: 66811 - DNA, 17 bp, Arabidopsis thaliana
cagcggaatcagagtga

SEQ ID NO: 66812 - DNA, 17 bp, Arabidopsis thaliana
cagcggaccatctgcca

SEQ ID NO: 66813 - DNA, 17 bp, Arabidopsis thaliana
cagcggaccatctgcga

SEQ ID NO: 66814 - DNA, 17 bp, Arabidopsis thaliana
cagcggaccatttgcga

SEQ ID NO: 66815 - DNA, 17 bp, Arabidopsis thaliana
cagcggactccctctat

SEQ ID NO: 66816 - DNA, 17 bp, Arabidopsis thaliana
cagcggactgctcagct

SEQ ID NO: 66817 - DNA, 17 bp, Arabidopsis thaliana
cagcggactgctcgaac

SEQ ID NO: 66818 - DNA, 17 bp, Arabidopsis thaliana
cagcggactgctcgacc

SEQ ID NO: 66819 - DNA, 17 bp, Arabidopsis thaliana
cagcggactgctcgagc

SEQ ID NO: 66820 - DNA, 17 bp, Arabidopsis thaliana
cagcggactgctcgata

SEQ ID NO: 66821 - DNA, 17 bp, Arabidopsis thaliana
cagcggactgctcgccc

SEQ ID NO: 66822 - DNA, 17 bp, Arabidopsis thaliana
cagcggaggaccgcctc

SEQ ID NO: 66823 - DNA, 17 bp, Arabidopsis thaliana
cagcggatcatttgcgg

SEQ ID NO: 66824 - DNA, 17 bp, Arabidopsis thaliana
cagcggatcggacggag

SEQ ID NO: 66825 - DNA, 17 bp, Arabidopsis thaliana
cagcggatgagttgtgg

SEQ ID NO: 66826 - DNA, 17 bp, Arabidopsis thaliana
cagcggatggacagtca

SEQ ID NO: 66827 - DNA, 17 bp, Arabidopsis thaliana
cagcggatgttccttat

SEQ ID NO: 66828 - DNA, 17 bp, Arabidopsis thaliana
cagcggatgttgctagg

SEQ ID NO: 66829 - DNA, 17 bp, Arabidopsis thaliana
cagcggatgttgctccc

SEQ ID NO: 66830 - DNA, 17 bp, Arabidopsis thaliana
cagcggatgttgcttat

SEQ ID NO: 66831 - DNA, 17 bp, Arabidopsis thaliana
cagcggatttccaaaac

SEQ ID NO: 66832 - DNA, 17 bp, Arabidopsis thaliana
cagcggcaaattcagca

SEQ ID NO: 66833 - DNA, 17 bp, Arabidopsis thaliana
cagcggcaacggcagcg

SEQ ID NO: 66834 - DNA, 17 bp, Arabidopsis thaliana
cagcggcaatcagcagt

SEQ ID NO: 66835 - DNA, 17 bp, Arabidopsis thaliana
cagcggcaccgcagggt

SEQ ID NO: 66836 - DNA, 17 bp, Arabidopsis thaliana
cagcggcagaacgaccc

SEQ ID NO: 66837 - DNA, 17 bp, Arabidopsis thaliana
cagcggcagttacggct

SEQ ID NO: 66838 - DNA, 17 bp, Arabidopsis thaliana
cagcggccgtcggtgca

SEQ ID NO: 66839 - DNA, 17 bp, Arabidopsis thaliana
cagcggcgacgtgggtg

SEQ ID NO: 66840 - DNA, 17 bp, Arabidopsis thaliana
cagcggctaccagataa

SEQ ID NO: 66841 - DNA, 17 bp, Arabidopsis thaliana
cagcggctgcaagcaac

SEQ ID NO: 66842 - DNA, 17 bp, Arabidopsis thaliana
cagcggctggaagagca

SEQ ID NO: 66843 - DNA, 17 bp, Arabidopsis thaliana
cagcggctgtcattggc

SEQ ID NO: 66844 - DNA, 17 bp, Arabidopsis thaliana
cagcgggacttgataga

SEQ ID NO: 66845 - DNA, 17 bp, Arabidopsis thaliana
cagcggtctatatctgt

SEQ ID NO: 66846 - DNA, 17 bp, Arabidopsis thaliana
cagcggtcttgattgga

SEQ ID NO: 66847 - DNA, 17 bp, Arabidopsis thaliana
cagcggttaggatatct

SEQ ID NO: 66848 - DNA, 17 bp, Arabidopsis thaliana
cagcggttcctctgctg

SEQ ID NO: 66849 - DNA, 17 bp, Arabidopsis thaliana
cagcggttcgagtccgc

SEQ ID NO: 66850 - DNA, 17 bp, Arabidopsis thaliana
cagcggttgttatcgat

SEQ ID NO: 66851 - DNA, 17 bp, Arabidopsis thaliana
cagcggtttctatgatt

SEQ ID NO: 66852 - DNA, 17 bp, Arabidopsis thaliana
cagcggtttgacacaag

SEQ ID NO: 66853 - DNA, 17 bp, Arabidopsis thaliana
cagcgtcagaggctttt

SEQ ID NO: 66854 - DNA, 17 bp, Arabidopsis thaliana
cagcgtcatggactttt

SEQ ID NO: 66855 - DNA, 17 bp, Arabidopsis thaliana
cagcgtccttaaactga

SEQ ID NO: 66856 - DNA, 17 bp, Arabidopsis thaliana
cagcgtcgagcactatg

SEQ ID NO: 66857 - DNA, 17 bp, Arabidopsis thaliana
cagcgtcggaaagcatg

SEQ ID NO: 66858 - DNA, 17 bp, Arabidopsis thaliana
cagcgtcgtgtatggtg

SEQ ID NO: 66859 - DNA, 17 bp, Arabidopsis thaliana
cagcgtctacggaatgg

SEQ ID NO: 66860 - DNA, 17 bp, Arabidopsis thaliana
cagcgtctcaagatggc

SEQ ID NO: 66861 - DNA, 17 bp, Arabidopsis thaliana
cagcgtctgccaatatc

SEQ ID NO: 66862 - DNA, 17 bp, Arabidopsis thaliana
cagcgtctgcctgggtg

SEQ ID NO: 66863 - DNA, 17 bp, Arabidopsis thaliana
cagcgtcttcttccatt

SEQ ID NO: 66864 - DNA, 17 bp, Arabidopsis thaliana
cagcgtctttccttttt

SEQ ID NO: 66865 - DNA, 17 bp, Arabidopsis thaliana
cagcgtctttggcagat

SEQ ID NO: 66866 - DNA, 17 bp, Arabidopsis thaliana
cagcgtgatggactttg

SEQ ID NO: 66867 - DNA, 17 bp, Arabidopsis thaliana
cagcgtgcgccgggcgt

SEQ ID NO: 66868 - DNA, 17 bp, Arabidopsis thaliana
cagcgtgcgggcgtccg

SEQ ID NO: 66869 - DNA, 17 bp, Arabidopsis thaliana
cagcgtgcgggcgtcgg

SEQ ID NO: 66870 - DNA, 17 bp, Arabidopsis thaliana
cagcgtgctccggccgt

SEQ ID NO: 66871 - DNA, 17 bp, Arabidopsis thaliana
cagcgtgctccgggcat

SEQ ID NO: 66872 - DNA, 17 bp, Arabidopsis thaliana
cagcgtgctccgggcct

SEQ ID NO: 66873 - DNA, 17 bp, Arabidopsis thaliana
cagcgtgctccgggcgt

SEQ ID NO: 66874 - DNA, 17 bp, Arabidopsis thaliana
cagcgtgctccggggcg

SEQ ID NO: 66875 - DNA, 17 bp, Arabidopsis thaliana
cagcgtgctccgggtgt

SEQ ID NO: 66876 - DNA, 17 bp, Arabidopsis thaliana
cagcgtgctccggtcgt

SEQ ID NO: 66877 - DNA, 17 bp, Arabidopsis thaliana
cagcgtgctcctggcgt

SEQ ID NO: 66878 - DNA, 17 bp, Arabidopsis thaliana
cagcgtggcctatcgat

SEQ ID NO: 66879 - DNA, 17 bp, Arabidopsis thaliana
cagcgtgttccgggcgt

SEQ ID NO: 66880 - DNA, 17 bp, Arabidopsis thaliana
cagcgttaggtcatccg

SEQ ID NO: 66881 - DNA, 17 bp, Arabidopsis thaliana
cagcgttatcagttgtt

SEQ ID NO: 66882 - DNA, 17 bp, Arabidopsis thaliana
cagcgttatcgacggag

SEQ ID NO: 66883 - DNA, 17 bp, Arabidopsis thaliana
cagcgttcattcgcgtg

SEQ ID NO: 66884 - DNA, 17 bp, Arabidopsis thaliana
cagcgtttactatgctg

SEQ ID NO: 66885 - DNA, 17 bp, Arabidopsis thaliana
cagcgtttattcgcgtg

SEQ ID NO: 66886 - DNA, 17 bp, Arabidopsis thaliana
cagcgtttgcggatgga

SEQ ID NO: 66887 - DNA, 17 bp, Arabidopsis thaliana
cagcgtttgcggatggt

SEQ ID NO: 66888 - DNA, 17 bp, Arabidopsis thaliana
cagcgtttgcggttgcg

SEQ ID NO: 66889 - DNA, 17 bp, Arabidopsis thaliana
cagcgtttgctcatttg

SEQ ID NO: 66890 - DNA, 17 bp, Arabidopsis thaliana
cagcgtttggccgcagc

SEQ ID NO: 66891 - DNA, 17 bp, Arabidopsis thaliana
cagcgtttgtaaaggac

SEQ ID NO: 66892 - DNA, 17 bp, Arabidopsis thaliana
cagcgttttttacattc

SEQ ID NO: 66893 - DNA, 17 bp, Arabidopsis thaliana
cagctaaatgcggaagt

SEQ ID NO: 66894 - DNA, 17 bp, Arabidopsis thaliana
cagctaaccaagttgtt

SEQ ID NO: 66895 - DNA, 17 bp, Arabidopsis thaliana
cagctaacgacacttgg

SEQ ID NO: 66896 - DNA, 17 bp, Arabidopsis thaliana
cagctaactttgtgtcg

SEQ ID NO: 66897 - DNA, 17 bp, Arabidopsis thaliana
cagctaagcgtgcttgg

SEQ ID NO: 66898 - DNA, 17 bp, Arabidopsis thaliana
cagctaaggatgacttg

SEQ ID NO: 66899 - DNA, 17 bp, Arabidopsis thaliana
cagctaaggcccctaaa

SEQ ID NO: 66900 - DNA, 17 bp, Arabidopsis thaliana
cagctaaggctgttgtg

SEQ ID NO: 66901 - DNA, 17 bp, Arabidopsis thaliana
cagctaatccaattctc

SEQ ID NO: 66902 - DNA, 17 bp, Arabidopsis thaliana
cagctaatctaccactg

SEQ ID NO: 66903 - DNA, 17 bp, Arabidopsis thaliana
cagctacagagagtggg

SEQ ID NO: 66904 - DNA, 17 bp, Arabidopsis thaliana
cagctaccgatttatct

SEQ ID NO: 66905 - DNA, 17 bp, Arabidopsis thaliana
cagctaccgtgcgctgg

SEQ ID NO: 66906 - DNA, 17 bp, Arabidopsis thaliana
cagctacggttccacgt

SEQ ID NO: 66907 - DNA, 17 bp, Arabidopsis thaliana
cagctactctcagtttg

SEQ ID NO: 66908 - DNA, 17 bp, Arabidopsis thaliana
cagctactcttgtttct

SEQ ID NO: 66909 - DNA, 17 bp, Arabidopsis thaliana
cagctactttcgcaact

SEQ ID NO: 66910 - DNA, 17 bp, Arabidopsis thaliana
cagctagcaggctatga

SEQ ID NO: 66911 - DNA, 17 bp, Arabidopsis thaliana
cagctagtccctcgacc

SEQ ID NO: 66912 - DNA, 17 bp, Arabidopsis thaliana
cagctataactgcgatc

SEQ ID NO: 66913 - DNA, 17 bp, Arabidopsis thaliana
cagctatagcgatgatg

SEQ ID NO: 66914 - DNA, 17 bp, Arabidopsis thaliana
cagctatggcggtgaag

SEQ ID NO: 66915 - DNA, 17 bp, Arabidopsis thaliana
cagctatggtcgttagc

SEQ ID NO: 66916 - DNA, 17 bp, Arabidopsis thaliana
cagctattagctcagtg

SEQ ID NO: 66917 - DNA, 17 bp, Arabidopsis thaliana
cagctattgtacggatg

SEQ ID NO: 66918 - DNA, 17 bp, Arabidopsis thaliana
cagctatttggactctc

SEQ ID NO: 66919 - DNA, 17 bp, Arabidopsis thaliana
cagctattttatcgtgg

SEQ ID NO: 66920 - DNA, 17 bp, Arabidopsis thaliana
cagctcaaagctgacca

SEQ ID NO: 66921 - DNA, 17 bp, Arabidopsis thaliana
cagctcaacccgaactc

SEQ ID NO: 66922 - DNA, 17 bp, Arabidopsis thaliana
cagctcaagcatgctta

SEQ ID NO: 66923 - DNA, 17 bp, Arabidopsis thaliana
cagctcactctgtcaat

SEQ ID NO: 66924 - DNA, 17 bp, Arabidopsis thaliana
cagctcagaactggtac

SEQ ID NO: 66925 - DNA, 17 bp, Arabidopsis thaliana
cagctcagaccactcaa

SEQ ID NO: 66926 - DNA, 17 bp, Arabidopsis thaliana
cagctcagctcatgatg

SEQ ID NO: 66927 - DNA, 17 bp, Arabidopsis thaliana
cagctcaggagctcatg

SEQ ID NO: 66928 - DNA, 17 bp, Arabidopsis thaliana
cagctcaggagggatag

SEQ ID NO: 66929 - DNA, 17 bp, Arabidopsis thaliana
cagctcagtttttgtgg

SEQ ID NO: 66930 - DNA, 17 bp, Arabidopsis thaliana
cagctcatgaacgttgc

SEQ ID NO: 66931 - DNA, 17 bp, Arabidopsis thaliana
cagctccaagtggccat

SEQ ID NO: 66932 - DNA, 17 bp, Arabidopsis thaliana
cagctccatgatgttta

SEQ ID NO: 66933 - DNA, 17 bp, Arabidopsis thaliana
cagctccattcactggt

SEQ ID NO: 66934 - DNA, 17 bp, Arabidopsis thaliana
cagctcccgttgactac

SEQ ID NO: 66935 - DNA, 17 bp, Arabidopsis thaliana
cagctccgacgacgatc

SEQ ID NO: 66936 - DNA, 17 bp, Arabidopsis thaliana
cagctccgactaaactt

SEQ ID NO: 66937 - DNA, 17 bp, Arabidopsis thaliana
cagctccgccgccggca

SEQ ID NO: 66938 - DNA, 17 bp, Arabidopsis thaliana
cagctccgcgacggaag

SEQ ID NO: 66939 - DNA, 17 bp, Arabidopsis thaliana
cagctcctactgagggt

SEQ ID NO: 66940 - DNA, 17 bp, Arabidopsis thaliana
cagctcctccatcttga

SEQ ID NO: 66941 - DNA, 17 bp, Arabidopsis thaliana
cagctcctgttgcagct

SEQ ID NO: 66942 - DNA, 17 bp, Arabidopsis thaliana
cagctcctgtttcagct

SEQ ID NO: 66943 - DNA, 17 bp, Arabidopsis thaliana
cagctccttgatttcga

SEQ ID NO: 66944 - DNA, 17 bp, Arabidopsis thaliana
cagctcgaccggcgtta

SEQ ID NO: 66945 - DNA, 17 bp, Arabidopsis thaliana
cagctcgacgccactca

SEQ ID NO: 66946 - DNA, 17 bp, Arabidopsis thaliana
cagctcgagcagtccgc

SEQ ID NO: 66947 - DNA, 17 bp, Arabidopsis thaliana
cagctcgccagctcgcc

SEQ ID NO: 66948 - DNA, 17 bp, Arabidopsis thaliana
cagctcgcctcacatgt

SEQ ID NO: 66949 - DNA, 17 bp, Arabidopsis thaliana
cagctcgcgttctctac

SEQ ID NO: 66950 - DNA, 17 bp, Arabidopsis thaliana
cagctcgcgttgactac

SEQ ID NO: 66951 - DNA, 17 bp, Arabidopsis thaliana
cagctcgcgttgactag

SEQ ID NO: 66952 - DNA, 17 bp, Arabidopsis thaliana
cagctcggaaactgcga

SEQ ID NO: 66953 - DNA, 17 bp, Arabidopsis thaliana
cagctcgggcagaccat

SEQ ID NO: 66954 - DNA, 17 bp, Arabidopsis thaliana
cagctcgtaattcctct

SEQ ID NO: 66955 - DNA, 17 bp, Arabidopsis thaliana
cagctcgttgcctagcc

SEQ ID NO: 66956 - DNA, 17 bp, Arabidopsis thaliana
cagctctaatgtttcct

SEQ ID NO: 66957 - DNA, 17 bp, Arabidopsis thaliana
cagctctacagacacaa

SEQ ID NO: 66958 - DNA, 17 bp, Arabidopsis thaliana
cagctctacagacacac

SEQ ID NO: 66959 - DNA, 17 bp, Arabidopsis thaliana
cagctctacatacacaa

SEQ ID NO: 66960 - DNA, 17 bp, Arabidopsis thaliana
cagctctactcaactca

SEQ ID NO: 66961 - DNA, 17 bp, Arabidopsis thaliana
cagctctactcgactca

SEQ ID NO: 66962 - DNA, 17 bp, Arabidopsis thaliana
cagctctagtgtttcaa

SEQ ID NO: 66963 - DNA, 17 bp, Arabidopsis thaliana
cagctctataaatgcca

SEQ ID NO: 66964 - DNA, 17 bp, Arabidopsis thaliana
cagctctataagtgcca

SEQ ID NO: 66965 - DNA, 17 bp, Arabidopsis thaliana
cagctctatttgcctct

SEQ ID NO: 66966 - DNA, 17 bp, Arabidopsis thaliana
cagctctccaaggtgaa

SEQ ID NO: 66967 - DNA, 17 bp, Arabidopsis thaliana
cagctctcctctcattg

SEQ ID NO: 66968 - DNA, 17 bp, Arabidopsis thaliana
cagctctgactttgatt

SEQ ID NO: 66969 - DNA, 17 bp, Arabidopsis thaliana
cagctctgatgactctg

SEQ ID NO: 66970 - DNA, 17 bp, Arabidopsis thaliana
cagctctgcctgggtgt

SEQ ID NO: 66971 - DNA, 17 bp, Arabidopsis thaliana
cagctctgtatcctact

SEQ ID NO: 66972 - DNA, 17 bp, Arabidopsis thaliana
cagctctgtggcagcca

SEQ ID NO: 66973 - DNA, 17 bp, Arabidopsis thaliana
cagctctgtggcagccc

SEQ ID NO: 66974 - DNA, 17 bp, Arabidopsis thaliana
cagctctgtggcggcca

SEQ ID NO: 66975 - DNA, 17 bp, Arabidopsis thaliana
cagctctttccggtgtt

SEQ ID NO: 66976 - DNA, 17 bp, Arabidopsis thaliana
cagctctttgtcgctaa

SEQ ID NO: 66977 - DNA, 17 bp, Arabidopsis thaliana
cagctgaaatctcatcc

SEQ ID NO: 66978 - DNA, 17 bp, Arabidopsis thaliana
cagctgaacgcctctaa

SEQ ID NO: 66979 - DNA, 17 bp, Arabidopsis thaliana
cagctgaagccacagag

SEQ ID NO: 66980 - DNA, 17 bp, Arabidopsis thaliana
cagctgaaggagtgacg

SEQ ID NO: 66981 - DNA, 17 bp, Arabidopsis thaliana
cagctgaatggagatga

SEQ ID NO: 66982 - DNA, 17 bp, Arabidopsis thaliana
cagctgacacttgctgg

SEQ ID NO: 66983 - DNA, 17 bp, Arabidopsis thaliana
cagctgacggtttatgt

SEQ ID NO: 66984 - DNA, 17 bp, Arabidopsis thaliana
cagctgacttcggaagg

SEQ ID NO: 66985 - DNA, 17 bp, Arabidopsis thaliana
cagctgactttgatcgg

SEQ ID NO: 66986 - DNA, 17 bp, Arabidopsis thaliana
cagctgagagtccatta

SEQ ID NO: 66987 - DNA, 17 bp, Arabidopsis thaliana
cagctgaggcatcctaa

SEQ ID NO: 66988 - DNA, 17 bp, Arabidopsis thaliana
cagctgatctttgtagc

SEQ ID NO: 66989 - DNA, 17 bp, Arabidopsis thaliana
cagctgatggttgtggc

SEQ ID NO: 66990 - DNA, 17 bp, Arabidopsis thaliana
cagctgattacgaaacg

SEQ ID NO: 66991 - DNA, 17 bp, Arabidopsis thaliana
cagctgcaacggccata

SEQ ID NO: 66992 - DNA, 17 bp, Arabidopsis thaliana
cagctgcacgactcgta

SEQ ID NO: 66993 - DNA, 17 bp, Arabidopsis thaliana
cagctgcaggaggtctt

SEQ ID NO: 66994 - DNA, 17 bp, Arabidopsis thaliana
cagctgcatggggaaca

SEQ ID NO: 66995 - DNA, 17 bp, Arabidopsis thaliana
cagctgctaagatttat

SEQ ID NO: 66996 - DNA, 17 bp, Arabidopsis thaliana
cagctggaaacggctgc

SEQ ID NO: 66997 - DNA, 17 bp, Arabidopsis thaliana
cagctggaccaccaatt

SEQ ID NO: 66998 - DNA, 17 bp, Arabidopsis thaliana
cagctggattggatggt

SEQ ID NO: 66999 - DNA, 17 bp, Arabidopsis thaliana
cagctggcctcctttaa

SEQ ID NO: 67000 - DNA, 17 bp, Arabidopsis thaliana
cagctgggccattatgg

SEQ ID NO: 67001 - DNA, 17 bp, Arabidopsis thaliana
cagctggttacgaccaa

SEQ ID NO: 67002 - DNA, 17 bp, Arabidopsis thaliana
cagctgtaggtgttgat

SEQ ID NO: 67003 - DNA, 17 bp, Arabidopsis thaliana
cagctgtcatcgtatta

SEQ ID NO: 67004 - DNA, 17 bp, Arabidopsis thaliana
cagctgtctatttgttg

SEQ ID NO: 67005 - DNA, 17 bp, Arabidopsis thaliana
cagctgtctccaccagt

SEQ ID NO: 67006 - DNA, 17 bp, Arabidopsis thaliana
cagctgtgctggcgacg

SEQ ID NO: 67007 - DNA, 17 bp, Arabidopsis thaliana
cagctgtgggatgtcaa

SEQ ID NO: 67008 - DNA, 17 bp, Arabidopsis thaliana
cagctgttgccgtttac

SEQ ID NO: 67009 - DNA, 17 bp, Arabidopsis thaliana
cagcttagcttccctct

SEQ ID NO: 67010 - DNA, 17 bp, Arabidopsis thaliana
cagcttaggtggaaggc

SEQ ID NO: 67011 - DNA, 17 bp, Arabidopsis thaliana
cagcttatggcatttga

SEQ ID NO: 67012 - DNA, 17 bp, Arabidopsis thaliana
cagcttattggtgcttc

SEQ ID NO: 67013 - DNA, 17 bp, Arabidopsis thaliana
cagcttatttcatcgga

SEQ ID NO: 67014 - DNA, 17 bp, Arabidopsis thaliana
cagcttatttcgtcgga

SEQ ID NO: 67015 - DNA, 17 bp, Arabidopsis thaliana
cagcttatttcgtcgta

SEQ ID NO: 67016 - DNA, 17 bp, Arabidopsis thaliana
cagcttcactcgaccgc

SEQ ID NO: 67017 - DNA, 17 bp, Arabidopsis thaliana
cagcttcagggcagatg

SEQ ID NO: 67018 - DNA, 17 bp, Arabidopsis thaliana
cagcttcaggtgtttgc

SEQ ID NO: 67019 - DNA, 17 bp, Arabidopsis thaliana
cagcttcagtcaaacac

SEQ ID NO: 67020 - DNA, 17 bp, Arabidopsis thaliana
cagcttcattaggatct

SEQ ID NO: 67021 - DNA, 17 bp, Arabidopsis thaliana
cagcttccatgcgtcat

SEQ ID NO: 67022 - DNA, 17 bp, Arabidopsis thaliana
cagcttcggagcaacgt

SEQ ID NO: 67023 - DNA, 17 bp, Arabidopsis thaliana
cagcttcggcccatgta

SEQ ID NO: 67024 - DNA, 17 bp, Arabidopsis thaliana
cagcttcgtctccttgc

SEQ ID NO: 67025 - DNA, 17 bp, Arabidopsis thaliana
cagcttctatcttccaa

SEQ ID NO: 67026 - DNA, 17 bp, Arabidopsis thaliana
cagcttctcccattcca

SEQ ID NO: 67027 - DNA, 17 bp, Arabidopsis thaliana
cagcttctcgactcgtc

SEQ ID NO: 67028 - DNA, 17 bp, Arabidopsis thaliana
cagcttctctaaagaaa

SEQ ID NO: 67029 - DNA, 17 bp, Arabidopsis thaliana
cagcttctgataggcca

SEQ ID NO: 67030 - DNA, 17 bp, Arabidopsis thaliana
cagcttcttctcattgc

SEQ ID NO: 67031 - DNA, 17 bp, Arabidopsis thaliana
cagcttcttgagatcga

SEQ ID NO: 67032 - DNA, 17 bp, Arabidopsis thaliana
cagcttctttcgtcgga

SEQ ID NO: 67033 - DNA, 17 bp, Arabidopsis thaliana
cagcttcttttacaggc

SEQ ID NO: 67034 - DNA, 17 bp, Arabidopsis thaliana
cagcttgccacgtgtga

SEQ ID NO: 67035 - DNA, 17 bp, Arabidopsis thaliana
cagcttgcggtgtcttg

SEQ ID NO: 67036 - DNA, 17 bp, Arabidopsis thaliana
cagcttgggtcaactct

SEQ ID NO: 67037 - DNA, 17 bp, Arabidopsis thaliana
cagcttgtcccttcggt

SEQ ID NO: 67038 - DNA, 17 bp, Arabidopsis thaliana
cagcttgtgacttacac

SEQ ID NO: 67039 - DNA, 17 bp, Arabidopsis thaliana
cagcttgttgcagctgc

SEQ ID NO: 67040 - DNA, 17 bp, Arabidopsis thaliana
cagcttgttggagatga

SEQ ID NO: 67041 - DNA, 17 bp, Arabidopsis thaliana
cagctttaattccaaca

SEQ ID NO: 67042 - DNA, 17 bp, Arabidopsis thaliana
cagctttacgagaagtt

SEQ ID NO: 67043 - DNA, 17 bp, Arabidopsis thaliana
cagctttagcccaggac

SEQ ID NO: 67044 - DNA, 17 bp, Arabidopsis thaliana
cagctttataagtgcca

SEQ ID NO: 67045 - DNA, 17 bp, Arabidopsis thaliana
cagctttatctgtcaaa

SEQ ID NO: 67046 - DNA, 17 bp, Arabidopsis thaliana
cagctttcatttcctgg

SEQ ID NO: 67047 - DNA, 17 bp, Arabidopsis thaliana
cagctttcccgtgtagc

SEQ ID NO: 67048 - DNA, 17 bp, Arabidopsis thaliana
cagctttctcagtggtg

SEQ ID NO: 67049 - DNA, 17 bp, Arabidopsis thaliana
cagctttctgagtcctt

SEQ ID NO: 67050 - DNA, 17 bp, Arabidopsis thaliana
cagctttctgattcctt

SEQ ID NO: 67051 - DNA, 17 bp, Arabidopsis thaliana
cagctttgacccggatg

SEQ ID NO: 67052 - DNA, 17 bp, Arabidopsis thaliana
cagctttggacgacaca

SEQ ID NO: 67053 - DNA, 17 bp, Arabidopsis thaliana
cagctttggcaggtggg

SEQ ID NO: 67054 - DNA, 17 bp, Arabidopsis thaliana
cagctttgggatggaga

SEQ ID NO: 67055 - DNA, 17 bp, Arabidopsis thaliana
cagctttgtcgctaaga

SEQ ID NO: 67056 - DNA, 17 bp, Arabidopsis thaliana
cagcttttgggatggat

SEQ ID NO: 67057 - DNA, 17 bp, Arabidopsis thaliana
cagcttttgtcgctaag

SEQ ID NO: 67058 - DNA, 17 bp, Arabidopsis thaliana
cagctttttgcgcggat

SEQ ID NO: 67059 - DNA, 17 bp, Arabidopsis thaliana
cagctttttgtcgctaa

SEQ ID NO: 67060 - DNA, 17 bp, Arabidopsis thaliana
caggaaaagatgatcgt

SEQ ID NO: 67061 - DNA, 17 bp, Arabidopsis thaliana
caggaaacccgattgct

SEQ ID NO: 67062 - DNA, 17 bp, Arabidopsis thaliana
caggaaacctggctctg

SEQ ID NO: 67063 - DNA, 17 bp, Arabidopsis thaliana
caggaaactatgtgacg

SEQ ID NO: 67064 - DNA, 17 bp, Arabidopsis thaliana
caggaaagatggtgaac

SEQ ID NO: 67065 - DNA, 17 bp, Arabidopsis thaliana
caggaaagcggaatagg

SEQ ID NO: 67066 - DNA, 17 bp, Arabidopsis thaliana
caggaaagttcagacgt

SEQ ID NO: 67067 - DNA, 17 bp, Arabidopsis thaliana
caggaaatatgcattta

SEQ ID NO: 67068 - DNA, 17 bp, Arabidopsis thaliana
caggaaatggggcttca

SEQ ID NO: 67069 - DNA, 17 bp, Arabidopsis thaliana
caggaaccattgggcgt

SEQ ID NO: 67070 - DNA, 17 bp, Arabidopsis thaliana
caggaaccgatcctcat

SEQ ID NO: 67071 - DNA, 17 bp, Arabidopsis thaliana
caggaacctggctctga

SEQ ID NO: 67072 - DNA, 17 bp, Arabidopsis thaliana
caggaaccttagcaaca

SEQ ID NO: 67073 - DNA, 17 bp, Arabidopsis thaliana
caggaacgactggttga

SEQ ID NO: 67074 - DNA, 17 bp, Arabidopsis thaliana
caggaagaggctctcct

SEQ ID NO: 67075 - DNA, 17 bp, Arabidopsis thaliana
caggaagatcacagtga

SEQ ID NO: 67076 - DNA, 17 bp, Arabidopsis thaliana
caggaagctgcaagtct

SEQ ID NO: 67077 - DNA, 17 bp, Arabidopsis thaliana
caggaagcttatactcg

SEQ ID NO: 67078 - DNA, 17 bp, Arabidopsis thaliana
caggaagcttgatttat

SEQ ID NO: 67079 - DNA, 17 bp, Arabidopsis thaliana
caggaaggtccgttgat

SEQ ID NO: 67080 - DNA, 17 bp, Arabidopsis thaliana
caggaagttgtcgggca

SEQ ID NO: 67081 - DNA, 17 bp, Arabidopsis thaliana
caggaatagggcaatct

SEQ ID NO: 67082 - DNA, 17 bp, Arabidopsis thaliana
caggaatatccaggagg

SEQ ID NO: 67083 - DNA, 17 bp, Arabidopsis thaliana
caggaatcaggcccaac

SEQ ID NO: 67084 - DNA, 17 bp, Arabidopsis thaliana
caggaatccgcttcgtt

SEQ ID NO: 67085 - DNA, 17 bp, Arabidopsis thaliana
caggaatcgccatgtta

SEQ ID NO: 67086 - DNA, 17 bp, Arabidopsis thaliana
caggaatgcagattcac

SEQ ID NO: 67087 - DNA, 17 bp, Arabidopsis thaliana
caggaatgggcacgaat

SEQ ID NO: 67088 - DNA, 17 bp, Arabidopsis thaliana
caggaatgtcactcctt

SEQ ID NO: 67089 - DNA, 17 bp, Arabidopsis thaliana
caggacaaaattttgac

SEQ ID NO: 67090 - DNA, 17 bp, Arabidopsis thaliana
caggacaagttactcgc

SEQ ID NO: 67091 - DNA, 17 bp, Arabidopsis thaliana
caggacaatggaacttt

SEQ ID NO: 67092 - DNA, 17 bp, Arabidopsis thaliana
caggacacgaagggcga

SEQ ID NO: 67093 - DNA, 17 bp, Arabidopsis thaliana
caggacagacagtgtga

SEQ ID NO: 67094 - DNA, 17 bp, Arabidopsis thaliana
caggacagacagtgtgg

SEQ ID NO: 67095 - DNA, 17 bp, Arabidopsis thaliana
caggacaggatccacgg

SEQ ID NO: 67096 - DNA, 17 bp, Arabidopsis thaliana
caggacattgactatgc

SEQ ID NO: 67097 - DNA, 17 bp, Arabidopsis thaliana
caggacattggactctg

SEQ ID NO: 67098 - DNA, 17 bp, Arabidopsis thaliana
caggaccaaaacgaagt

SEQ ID NO: 67099 - DNA, 17 bp, Arabidopsis thaliana
caggaccaaccgccttc

SEQ ID NO: 67100 - DNA, 17 bp, Arabidopsis thaliana
caggaccaaccgtccga

SEQ ID NO: 67101 - DNA, 17 bp, Arabidopsis thaliana
caggaccaaccgtcttc

SEQ ID NO: 67102 - DNA, 17 bp, Arabidopsis thaliana
caggaccgagtgccgct

SEQ ID NO: 67103 - DNA, 17 bp, Arabidopsis thaliana
caggaccgatccaacaa

SEQ ID NO: 67104 - DNA, 17 bp, Arabidopsis thaliana
caggaccgattcgtaac

SEQ ID NO: 67105 - DNA, 17 bp, Arabidopsis thaliana
caggaccgcttgatctg

SEQ ID NO: 67106 - DNA, 17 bp, Arabidopsis thaliana
caggaccggatcagcct

SEQ ID NO: 67107 - DNA, 17 bp, Arabidopsis thaliana
caggacctacgggccaa

SEQ ID NO: 67108 - DNA, 17 bp, Arabidopsis thaliana
caggaccttaggcaggt

SEQ ID NO: 67109 - DNA, 17 bp, Arabidopsis thaliana
caggaccttaggcatgt

SEQ ID NO: 67110 - DNA, 17 bp, Arabidopsis thaliana
caggacgagttggcggg

SEQ ID NO: 67111 - DNA, 17 bp, Arabidopsis thaliana
caggacgcaggaaatag

SEQ ID NO: 67112 - DNA, 17 bp, Arabidopsis thaliana
caggacgcatcgccggc

SEQ ID NO: 67113 - DNA, 17 bp, Arabidopsis thaliana
caggacgcccatgggct

SEQ ID NO: 67114 - DNA, 17 bp, Arabidopsis thaliana
caggacgcttgttagga

SEQ ID NO: 67115 - DNA, 17 bp, Arabidopsis thaliana
caggacggatttggcag

SEQ ID NO: 67116 - DNA, 17 bp, Arabidopsis thaliana
caggacgggtttgacag

SEQ ID NO: 67117 - DNA, 17 bp, Arabidopsis thaliana
caggacgggtttggcag

SEQ ID NO: 67118 - DNA, 17 bp, Arabidopsis thaliana
caggacgggttttgcgg

SEQ ID NO: 67119 - DNA, 17 bp, Arabidopsis thaliana
caggacgtgccggagtg

SEQ ID NO: 67120 - DNA, 17 bp, Arabidopsis thaliana
caggacgtgtcggctgc

SEQ ID NO: 67121 - DNA, 17 bp, Arabidopsis thaliana
caggactatggtggcct

SEQ ID NO: 67122 - DNA, 17 bp, Arabidopsis thaliana
caggactctgagatgtc

SEQ ID NO: 67123 - DNA, 17 bp, Arabidopsis thaliana
caggactgagtagtaag

SEQ ID NO: 67124 - DNA, 17 bp, Arabidopsis thaliana
caggactgatgggtgcc

SEQ ID NO: 67125 - DNA, 17 bp, Arabidopsis thaliana
caggactggtacggaca

SEQ ID NO: 67126 - DNA, 17 bp, Arabidopsis thaliana
caggactgtcaccaact

SEQ ID NO: 67127 - DNA, 17 bp, Arabidopsis thaliana
caggagaagcagcgacg

SEQ ID NO: 67128 - DNA, 17 bp, Arabidopsis thaliana
caggagaagtgcggtgc

SEQ ID NO: 67129 - DNA, 17 bp, Arabidopsis thaliana
caggagacccgggctcg

SEQ ID NO: 67130 - DNA, 17 bp, Arabidopsis thaliana
caggagacccgggttcg

SEQ ID NO: 67131 - DNA, 17 bp, Arabidopsis thaliana
caggagatctacaacga

SEQ ID NO: 67132 - DNA, 17 bp, Arabidopsis thaliana
caggagatgggtctgaa

SEQ ID NO: 67133 - DNA, 17 bp, Arabidopsis thaliana
caggagatgtttcatgg

SEQ ID NO: 67134 - DNA, 17 bp, Arabidopsis thaliana
caggagattcgattaac

SEQ ID NO: 67135 - DNA, 17 bp, Arabidopsis thaliana
caggagccgacacgtgg

SEQ ID NO: 67136 - DNA, 17 bp, Arabidopsis thaliana
caggagcgctcggccct

SEQ ID NO: 67137 - DNA, 17 bp, Arabidopsis thaliana
caggagcgtatcgccga

SEQ ID NO: 67138 - DNA, 17 bp, Arabidopsis thaliana
caggagctgaggcacag

SEQ ID NO: 67139 - DNA, 17 bp, Arabidopsis thaliana
caggagctggaccccag

SEQ ID NO: 67140 - DNA, 17 bp, Arabidopsis thaliana
caggaggacatgtgtta

SEQ ID NO: 67141 - DNA, 17 bp, Arabidopsis thaliana
caggaggactgtattgc

SEQ ID NO: 67142 - DNA, 17 bp, Arabidopsis thaliana
caggaggatcgccgcag

SEQ ID NO: 67143 - DNA, 17 bp, Arabidopsis thaliana
caggaggattacgggct

SEQ ID NO: 67144 - DNA, 17 bp, Arabidopsis thaliana
caggaggccaaggagtg

SEQ ID NO: 67145 - DNA, 17 bp, Arabidopsis thaliana
caggaggccgccagtca

SEQ ID NO: 67146 - DNA, 17 bp, Arabidopsis thaliana
caggaggcggtattgag

SEQ ID NO: 67147 - DNA, 17 bp, Arabidopsis thaliana
caggaggctacacgcca

SEQ ID NO: 67148 - DNA, 17 bp, Arabidopsis thaliana
caggagggaggtcgtct

SEQ ID NO: 67149 - DNA, 17 bp, Arabidopsis thaliana
caggagggcacgtctac

SEQ ID NO: 67150 - DNA, 17 bp, Arabidopsis thaliana
caggagggctgggctcg

SEQ ID NO: 67151 - DNA, 17 bp, Arabidopsis thaliana
caggagggtgaacaggg

SEQ ID NO: 67152 - DNA, 17 bp, Arabidopsis thaliana
caggaggtgggcttgga

SEQ ID NO: 67153 - DNA, 17 bp, Arabidopsis thaliana
caggaggttaagagcgt

SEQ ID NO: 67154 - DNA, 17 bp, Arabidopsis thaliana
caggaggttcggggccg

SEQ ID NO: 67155 - DNA, 17 bp, Arabidopsis thaliana
caggaggttctgctttc

SEQ ID NO: 67156 - DNA, 17 bp, Arabidopsis thaliana
caggaggttctggaccg

SEQ ID NO: 67157 - DNA, 17 bp, Arabidopsis thaliana
caggaggttctggccga

SEQ ID NO: 67158 - DNA, 17 bp, Arabidopsis thaliana
caggaggttctgggccg

SEQ ID NO: 67159 - DNA, 17 bp, Arabidopsis thaliana
caggaggttctgggctg

SEQ ID NO: 67160 - DNA, 17 bp, Arabidopsis thaliana
caggaggttttggaccg

SEQ ID NO: 67161 - DNA, 17 bp, Arabidopsis thaliana
caggaggtttttggccg

SEQ ID NO: 67162 - DNA, 17 bp, Arabidopsis thaliana
caggagtaaactatgta

SEQ ID NO: 67163 - DNA, 17 bp, Arabidopsis thaliana
caggagtagagcatgcg

SEQ ID NO: 67164 - DNA, 17 bp, Arabidopsis thaliana
caggagtagcctgcggc

SEQ ID NO: 67165 - DNA, 17 bp, Arabidopsis thaliana
caggagtcagatcttga

SEQ ID NO: 67166 - DNA, 17 bp, Arabidopsis thaliana
caggagtcctgttgtgc

SEQ ID NO: 67167 - DNA, 17 bp, Arabidopsis thaliana
caggagtgatgggtgcc

SEQ ID NO: 67168 - DNA, 17 bp, Arabidopsis thaliana
caggagtggagcctgcg

SEQ ID NO: 67169 - DNA, 17 bp, Arabidopsis thaliana
caggagttcgaggatgt

SEQ ID NO: 67170 - DNA, 17 bp, Arabidopsis thaliana
caggagttggccacatc

SEQ ID NO: 67171 - DNA, 17 bp, Arabidopsis thaliana
caggagttggcgatttt

SEQ ID NO: 67172 - DNA, 17 bp, Arabidopsis thaliana
caggagtttcgatcgct

SEQ ID NO: 67173 - DNA, 17 bp, Arabidopsis thaliana
caggataaaggatgttg

SEQ ID NO: 67174 - DNA, 17 bp, Arabidopsis thaliana
caggatacatcagatgg

SEQ ID NO: 67175 - DNA, 17 bp, Arabidopsis thaliana
caggatagctggagctc

SEQ ID NO: 67176 - DNA, 17 bp, Arabidopsis thaliana
caggatagctggagtta

SEQ ID NO: 67177 - DNA, 17 bp, Arabidopsis thaliana
caggatagctggagttc

SEQ ID NO: 67178 - DNA, 17 bp, Arabidopsis thaliana
caggatcaacctggctc

SEQ ID NO: 67179 - DNA, 17 bp, Arabidopsis thaliana
caggatcaacgctcggc

SEQ ID NO: 67180 - DNA, 17 bp, Arabidopsis thaliana
caggatccgaacagaga

SEQ ID NO: 67181 - DNA, 17 bp, Arabidopsis thaliana
caggatccgaacagagt

SEQ ID NO: 67182 - DNA, 17 bp, Arabidopsis thaliana
caggatccgagtcatcc

SEQ ID NO: 67183 - DNA, 17 bp, Arabidopsis thaliana
caggatcctaacttggt

SEQ ID NO: 67184 - DNA, 17 bp, Arabidopsis thaliana
caggatccttctacgag

SEQ ID NO: 67185 - DNA, 17 bp, Arabidopsis thaliana
caggatcgaaacctgac

SEQ ID NO: 67186 - DNA, 17 bp, Arabidopsis thaliana
caggatcgaaacctgct

SEQ ID NO: 67187 - DNA, 17 bp, Arabidopsis thaliana
caggatcgaaacctgga

SEQ ID NO: 67188 - DNA, 17 bp, Arabidopsis thaliana
caggatcgaaacctggc

SEQ ID NO: 67189 - DNA, 17 bp, Arabidopsis thaliana
caggatcgaaatttggc

SEQ ID NO: 67190 - DNA, 17 bp, Arabidopsis thaliana
caggatcgcaacctggc

SEQ ID NO: 67191 - DNA, 17 bp, Arabidopsis thaliana
caggatcggaacctggc

SEQ ID NO: 67192 - DNA, 17 bp, Arabidopsis thaliana
caggatcgtaacctggc

SEQ ID NO: 67193 - DNA, 17 bp, Arabidopsis thaliana
caggatctaacgatcgc

SEQ ID NO: 67194 - DNA, 17 bp, Arabidopsis thaliana
caggatctcacccgtgg

SEQ ID NO: 67195 - DNA, 17 bp, Arabidopsis thaliana
caggatgaacgctcgcg

SEQ ID NO: 67196 - DNA, 17 bp, Arabidopsis thaliana
caggatgaacgctggag

SEQ ID NO: 67197 - DNA, 17 bp, Arabidopsis thaliana
caggatgaacgctggcg

SEQ ID NO: 67198 - DNA, 17 bp, Arabidopsis thaliana
caggatgaacgctggct

SEQ ID NO: 67199 - DNA, 17 bp, Arabidopsis thaliana
caggatgagtggaaaga

SEQ ID NO: 67200 - DNA, 17 bp, Arabidopsis thaliana
caggatgccatgtgcgg

SEQ ID NO: 67201 - DNA, 17 bp, Arabidopsis thaliana
caggatgcgactaagac

SEQ ID NO: 67202 - DNA, 17 bp, Arabidopsis thaliana
caggatggactggttct

SEQ ID NO: 67203 - DNA, 17 bp, Arabidopsis thaliana
caggatggccgagtggt

SEQ ID NO: 67204 - DNA, 17 bp, Arabidopsis thaliana
caggatgggggaagcga

SEQ ID NO: 67205 - DNA, 17 bp, Arabidopsis thaliana
caggatgggtgaccttc

SEQ ID NO: 67206 - DNA, 17 bp, Arabidopsis thaliana
caggatgtagcggtgga

SEQ ID NO: 67207 - DNA, 17 bp, Arabidopsis thaliana
caggatgtagcggtggc

SEQ ID NO: 67208 - DNA, 17 bp, Arabidopsis thaliana
caggattagacccgcgg

SEQ ID NO: 67209 - DNA, 17 bp, Arabidopsis thaliana
caggattagatggtatg

SEQ ID NO: 67210 - DNA, 17 bp, Arabidopsis thaliana
caggattatgcaatctg

SEQ ID NO: 67211 - DNA, 17 bp, Arabidopsis thaliana
caggattatgtcagaga

SEQ ID NO: 67212 - DNA, 17 bp, Arabidopsis thaliana
caggattatgtcagagt

SEQ ID NO: 67213 - DNA, 17 bp, Arabidopsis thaliana
caggattccttgatagc

SEQ ID NO: 67214 - DNA, 17 bp, Arabidopsis thaliana
caggattcgcatatgag

SEQ ID NO: 67215 - DNA, 17 bp, Arabidopsis thaliana
caggattctcaagcgtt

SEQ ID NO: 67216 - DNA, 17 bp, Arabidopsis thaliana
caggattcttcttagcc

SEQ ID NO: 67217 - DNA, 17 bp, Arabidopsis thaliana
caggattggagtatcta

SEQ ID NO: 67218 - DNA, 17 bp, Arabidopsis thaliana
caggattggctcgttcg

SEQ ID NO: 67219 - DNA, 17 bp, Arabidopsis thaliana
caggattgggatcggtt

SEQ ID NO: 67220 - DNA, 17 bp, Arabidopsis thaliana
caggatttccttctttt

SEQ ID NO: 67221 - DNA, 17 bp, Arabidopsis thaliana
caggcaaggatgacttg

SEQ ID NO: 67222 - DNA, 17 bp, Arabidopsis thaliana
caggcaagtcatcctac

SEQ ID NO: 67223 - DNA, 17 bp, Arabidopsis thaliana
caggcaagtcatcctgc

SEQ ID NO: 67224 - DNA, 17 bp, Arabidopsis thaliana
caggcaattgcctcaag

SEQ ID NO: 67225 - DNA, 17 bp, Arabidopsis thaliana
caggcaccataaggttc

SEQ ID NO: 67226 - DNA, 17 bp, Arabidopsis thaliana
caggcacctccacattt

SEQ ID NO: 67227 - DNA, 17 bp, Arabidopsis thaliana
caggcacgcgtatctca

SEQ ID NO: 67228 - DNA, 17 bp, Arabidopsis thaliana
caggcacggctctgcgc

SEQ ID NO: 67229 - DNA, 17 bp, Arabidopsis thaliana
caggcacgtctgcctgg

SEQ ID NO: 67230 - DNA, 17 bp, Arabidopsis thaliana
caggcacgtgtcgttgg

SEQ ID NO: 67231 - DNA, 17 bp, Arabidopsis thaliana
caggcacttgtcaggga

SEQ ID NO: 67232 - DNA, 17 bp, Arabidopsis thaliana
caggcacttttcaggga

SEQ ID NO: 67233 - DNA, 17 bp, Arabidopsis thaliana
caggcagagatgggcac

SEQ ID NO: 67234 - DNA, 17 bp, Arabidopsis thaliana
caggcagaggcgctatg

SEQ ID NO: 67235 - DNA, 17 bp, Arabidopsis thaliana
caggcagatttaggcac

SEQ ID NO: 67236 - DNA, 17 bp, Arabidopsis thaliana
caggcagcaaagtttcg

SEQ ID NO: 67237 - DNA, 17 bp, Arabidopsis thaliana
caggcagcggacaaagc

SEQ ID NO: 67238 - DNA, 17 bp, Arabidopsis thaliana
caggcaggagcaggaga

SEQ ID NO: 67239 - DNA, 17 bp, Arabidopsis thaliana
caggcaggtctgtagtg

SEQ ID NO: 67240 - DNA, 17 bp, Arabidopsis thaliana
caggcaggttgttaggt

SEQ ID NO: 67241 - DNA, 17 bp, Arabidopsis thaliana
caggcagtctccttggc

SEQ ID NO: 67242 - DNA, 17 bp, Arabidopsis thaliana
caggcagtctctttggc

SEQ ID NO: 67243 - DNA, 17 bp, Arabidopsis thaliana
caggcagtgtggtggcc

SEQ ID NO: 67244 - DNA, 17 bp, Arabidopsis thaliana
caggcatggacattttt

SEQ ID NO: 67245 - DNA, 17 bp, Arabidopsis thaliana
caggcattggcgtttct

SEQ ID NO: 67246 - DNA, 17 bp, Arabidopsis thaliana
caggcattttcgtgatt

SEQ ID NO: 67247 - DNA, 17 bp, Arabidopsis thaliana
caggccaagcgttcata

SEQ ID NO: 67248 - DNA, 17 bp, Arabidopsis thaliana
caggccaagtgttgaca

SEQ ID NO: 67249 - DNA, 17 bp, Arabidopsis thaliana
caggccaagttagttgt

SEQ ID NO: 67250 - DNA, 17 bp, Arabidopsis thaliana
caggccaagtttgggct

SEQ ID NO: 67251 - DNA, 17 bp, Arabidopsis thaliana
caggccaatcaggagcg

SEQ ID NO: 67252 - DNA, 17 bp, Arabidopsis thaliana
caggccacagtgtttca

SEQ ID NO: 67253 - DNA, 17 bp, Arabidopsis thaliana
caggccacctgcattta

SEQ ID NO: 67254 - DNA, 17 bp, Arabidopsis thaliana
caggccacctgcatttc

SEQ ID NO: 67255 - DNA, 17 bp, Arabidopsis thaliana
caggccacctgcatttt

SEQ ID NO: 67256 - DNA, 17 bp, Arabidopsis thaliana
caggccacctgtatttc

SEQ ID NO: 67257 - DNA, 17 bp, Arabidopsis thaliana
caggccagacatgttct

SEQ ID NO: 67258 - DNA, 17 bp, Arabidopsis thaliana
caggccagacctgttct

SEQ ID NO: 67259 - DNA, 17 bp, Arabidopsis thaliana
caggccagctcctaaag

SEQ ID NO: 67260 - DNA, 17 bp, Arabidopsis thaliana
caggccagtgatgtctt

SEQ ID NO: 67261 - DNA, 17 bp, Arabidopsis thaliana
caggccatagacgagcc

SEQ ID NO: 67262 - DNA, 17 bp, Arabidopsis thaliana
caggccatctactaagg

SEQ ID NO: 67263 - DNA, 17 bp, Arabidopsis thaliana
caggccatggtgactga

SEQ ID NO: 67264 - DNA, 17 bp, Arabidopsis thaliana
caggcccaaaaccaccg

SEQ ID NO: 67265 - DNA, 17 bp, Arabidopsis thaliana
caggcccaaaggcctta

SEQ ID NO: 67266 - DNA, 17 bp, Arabidopsis thaliana
caggcccactgcagttt

SEQ ID NO: 67267 - DNA, 17 bp, Arabidopsis thaliana
caggcccattacggact

SEQ ID NO: 67268 - DNA, 17 bp, Arabidopsis thaliana
caggcccgccaaaccaa

SEQ ID NO: 67269 - DNA, 17 bp, Arabidopsis thaliana
caggcccgggcgactgt

SEQ ID NO: 67270 - DNA, 17 bp, Arabidopsis thaliana
caggccctacgggtgaa

SEQ ID NO: 67271 - DNA, 17 bp, Arabidopsis thaliana
caggccctccttctagc

SEQ ID NO: 67272 - DNA, 17 bp, Arabidopsis thaliana
caggccctctggcctct

SEQ ID NO: 67273 - DNA, 17 bp, Arabidopsis thaliana
caggccgagggcacgtc

SEQ ID NO: 67274 - DNA, 17 bp, Arabidopsis thaliana
caggccgagtagctcac

SEQ ID NO: 67275 - DNA, 17 bp, Arabidopsis thaliana
caggccgagtgactttg

SEQ ID NO: 67276 - DNA, 17 bp, Arabidopsis thaliana
caggccgagtgttgtat

SEQ ID NO: 67277 - DNA, 17 bp, Arabidopsis thaliana
caggccgatacacccca

SEQ ID NO: 67278 - DNA, 17 bp, Arabidopsis thaliana
caggccgcccatgtact

SEQ ID NO: 67279 - DNA, 17 bp, Arabidopsis thaliana
caggccgcctgcatttc

SEQ ID NO: 67280 - DNA, 17 bp, Arabidopsis thaliana
caggccgcctgcatttt

SEQ ID NO: 67281 - DNA, 17 bp, Arabidopsis thaliana
caggccgcctgtatttc

SEQ ID NO: 67282 - DNA, 17 bp, Arabidopsis thaliana
caggccgcttaacaggt

SEQ ID NO: 67283 - DNA, 17 bp, Arabidopsis thaliana
caggccgtctccatttt

SEQ ID NO: 67284 - DNA, 17 bp, Arabidopsis thaliana
caggccgtggctctccg

SEQ ID NO: 67285 - DNA, 17 bp, Arabidopsis thaliana
caggccgttctcgtttg

SEQ ID NO: 67286 - DNA, 17 bp, Arabidopsis thaliana
caggcctagagaaatgc

SEQ ID NO: 67287 - DNA, 17 bp, Arabidopsis thaliana
caggcctaggcccaatt

SEQ ID NO: 67288 - DNA, 17 bp, Arabidopsis thaliana
caggcctcctaagatga

SEQ ID NO: 67289 - DNA, 17 bp, Arabidopsis thaliana
caggcctgcgtgctgtg

SEQ ID NO: 67290 - DNA, 17 bp, Arabidopsis thaliana
caggccttgatgagtag

SEQ ID NO: 67291 - DNA, 17 bp, Arabidopsis thaliana
caggccttgggattcct

SEQ ID NO: 67292 - DNA, 17 bp, Arabidopsis thaliana
caggcctttgtcgctaa

SEQ ID NO: 67293 - DNA, 17 bp, Arabidopsis thaliana
caggccttttttgaaac

SEQ ID NO: 67294 - DNA, 17 bp, Arabidopsis thaliana
caggcgaaagctccgaa

SEQ ID NO: 67295 - DNA, 17 bp, Arabidopsis thaliana
caggcgaaataccgagg

SEQ ID NO: 67296 - DNA, 17 bp, Arabidopsis thaliana
caggcgaatggtgcgtt

SEQ ID NO: 67297 - DNA, 17 bp, Arabidopsis thaliana
caggcgaccgcccacat

SEQ ID NO: 67298 - DNA, 17 bp, Arabidopsis thaliana
caggcgacctgattacc

SEQ ID NO: 67299 - DNA, 17 bp, Arabidopsis thaliana
caggcgagccgcccggt

SEQ ID NO: 67300 - DNA, 17 bp, Arabidopsis thaliana
caggcgagtattgggat

SEQ ID NO: 67301 - DNA, 17 bp, Arabidopsis thaliana
caggcgagtcatccttc

SEQ ID NO: 67302 - DNA, 17 bp, Arabidopsis thaliana
caggcgatcctcttatc

SEQ ID NO: 67303 - DNA, 17 bp, Arabidopsis thaliana
caggcgatctcgatcat

SEQ ID NO: 67304 - DNA, 17 bp, Arabidopsis thaliana
caggcgattacataccg

SEQ ID NO: 67305 - DNA, 17 bp, Arabidopsis thaliana
caggcgcccaggctcgt

SEQ ID NO: 67306 - DNA, 17 bp, Arabidopsis thaliana
caggcgcccgccacccc

SEQ ID NO: 67307 - DNA, 17 bp, Arabidopsis thaliana
caggcgcccgccacccg

SEQ ID NO: 67308 - DNA, 17 bp, Arabidopsis thaliana
caggcgcctactacgtc

SEQ ID NO: 67309 - DNA, 17 bp, Arabidopsis thaliana
caggcgcctctgagaga

SEQ ID NO: 67310 - DNA, 17 bp, Arabidopsis thaliana
caggcgctacggcgctg

SEQ ID NO: 67311 - DNA, 17 bp, Arabidopsis thaliana
caggcgctgtctacgag

SEQ ID NO: 67312 - DNA, 17 bp, Arabidopsis thaliana
caggcggatcaagcagc

SEQ ID NO: 67313 - DNA, 17 bp, Arabidopsis thaliana
caggcggcctgactacc

SEQ ID NO: 67314 - DNA, 17 bp, Arabidopsis thaliana
caggcggcctgattacc

SEQ ID NO: 67315 - DNA, 17 bp, Arabidopsis thaliana
caggcggcctgattatc

SEQ ID NO: 67316 - DNA, 17 bp, Arabidopsis thaliana
caggcggcgaaaaagag

SEQ ID NO: 67317 - DNA, 17 bp, Arabidopsis thaliana
caggcggctttgtaagt

SEQ ID NO: 67318 - DNA, 17 bp, Arabidopsis thaliana
caggcggtctaactact

SEQ ID NO: 67319 - DNA, 17 bp, Arabidopsis thaliana
caggcggtcttgtgtgt

SEQ ID NO: 67320 - DNA, 17 bp, Arabidopsis thaliana
caggcggtgtgtttctc

SEQ ID NO: 67321 - DNA, 17 bp, Arabidopsis thaliana
caggcgtcctaagatga

SEQ ID NO: 67322 - DNA, 17 bp, Arabidopsis thaliana
caggcgtcgtctgtcgt

SEQ ID NO: 67323 - DNA, 17 bp, Arabidopsis thaliana
caggcgtggccgctacc

SEQ ID NO: 67324 - DNA, 17 bp, Arabidopsis thaliana
caggcgttacattatta

SEQ ID NO: 67325 - DNA, 17 bp, Arabidopsis thaliana
caggctaaactggattg

SEQ ID NO: 67326 - DNA, 17 bp, Arabidopsis thaliana
caggctaacgtccaagc

SEQ ID NO: 67327 - DNA, 17 bp, Arabidopsis thaliana
caggctacatcgaaggc

SEQ ID NO: 67328 - DNA, 17 bp, Arabidopsis thaliana
caggctaccctggtcct

SEQ ID NO: 67329 - DNA, 17 bp, Arabidopsis thaliana
caggctatgagccaagt

SEQ ID NO: 67330 - DNA, 17 bp, Arabidopsis thaliana
caggctcaaaggcccta

SEQ ID NO: 67331 - DNA, 17 bp, Arabidopsis thaliana
caggctcaagttgtttc

SEQ ID NO: 67332 - DNA, 17 bp, Arabidopsis thaliana
caggctcattttgacaa

SEQ ID NO: 67333 - DNA, 17 bp, Arabidopsis thaliana
caggctccctaaccacc

SEQ ID NO: 67334 - DNA, 17 bp, Arabidopsis thaliana
caggctccgatcctgtc

SEQ ID NO: 67335 - DNA, 17 bp, Arabidopsis thaliana
caggctccgatcctgtt

SEQ ID NO: 67336 - DNA, 17 bp, Arabidopsis thaliana
caggctcgactctacac

SEQ ID NO: 67337 - DNA, 17 bp, Arabidopsis thaliana
caggctctgtctggtgc

SEQ ID NO: 67338 - DNA, 17 bp, Arabidopsis thaliana
caggctctgtggtggga

SEQ ID NO: 67339 - DNA, 17 bp, Arabidopsis thaliana
caggctcttgggaggtg

SEQ ID NO: 67340 - DNA, 17 bp, Arabidopsis thaliana
caggctgagagtcttct

SEQ ID NO: 67341 - DNA, 17 bp, Arabidopsis thaliana
caggctgagcacaacat

SEQ ID NO: 67342 - DNA, 17 bp, Arabidopsis thaliana
caggctgaggtctcgtt

SEQ ID NO: 67343 - DNA, 17 bp, Arabidopsis thaliana
caggctgatagctaggg

SEQ ID NO: 67344 - DNA, 17 bp, Arabidopsis thaliana
caggctgatcgccaagt

SEQ ID NO: 67345 - DNA, 17 bp, Arabidopsis thaliana
caggctggatacacatt

SEQ ID NO: 67346 - DNA, 17 bp, Arabidopsis thaliana
caggctggtccatctgg

SEQ ID NO: 67347 - DNA, 17 bp, Arabidopsis thaliana
caggctgtaattgggtc

SEQ ID NO: 67348 - DNA, 17 bp, Arabidopsis thaliana
caggcttagccgcttag

SEQ ID NO: 67349 - DNA, 17 bp, Arabidopsis thaliana
caggcttcgaatggtga

SEQ ID NO: 67350 - DNA, 17 bp, Arabidopsis thaliana
caggcttgacgaggttc

SEQ ID NO: 67351 - DNA, 17 bp, Arabidopsis thaliana
caggcttggctcatccc

SEQ ID NO: 67352 - DNA, 17 bp, Arabidopsis thaliana
caggctttacaggtgat

SEQ ID NO: 67353 - DNA, 17 bp, Arabidopsis thaliana
caggctttggcccagaa

SEQ ID NO: 67354 - DNA, 17 bp, Arabidopsis thaliana
caggctttgttccagaa

SEQ ID NO: 67355 - DNA, 17 bp, Arabidopsis thaliana
caggcttttacgataag

SEQ ID NO: 67356 - DNA, 17 bp, Arabidopsis thaliana
cagggaaatacttattg

SEQ ID NO: 67357 - DNA, 17 bp, Arabidopsis thaliana
cagggaacaagcagagc

SEQ ID NO: 67358 - DNA, 17 bp, Arabidopsis thaliana
cagggaacagtgaagct

SEQ ID NO: 67359 - DNA, 17 bp, Arabidopsis thaliana
cagggaacctcaaagcg

SEQ ID NO: 67360 - DNA, 17 bp, Arabidopsis thaliana
cagggaagacgaaaggt

SEQ ID NO: 67361 - DNA, 17 bp, Arabidopsis thaliana
cagggaagagtgacgct

SEQ ID NO: 67362 - DNA, 17 bp, Arabidopsis thaliana
cagggaagcagcagcgg

SEQ ID NO: 67363 - DNA, 17 bp, Arabidopsis thaliana
cagggaagcgacgtcgg

SEQ ID NO: 67364 - DNA, 17 bp, Arabidopsis thaliana
cagggaaggtggggcca

SEQ ID NO: 67365 - DNA, 17 bp, Arabidopsis thaliana
cagggaaggtggggcga

SEQ ID NO: 67366 - DNA, 17 bp, Arabidopsis thaliana
cagggaagtcctcgtgt

SEQ ID NO: 67367 - DNA, 17 bp, Arabidopsis thaliana
cagggaatcgactttcg

SEQ ID NO: 67368 - DNA, 17 bp, Arabidopsis thaliana
cagggaatctacaggca

SEQ ID NO: 67369 - DNA, 17 bp, Arabidopsis thaliana
cagggaatgctcgaagc

SEQ ID NO: 67370 - DNA, 17 bp, Arabidopsis thaliana
cagggaattaacatgcg

SEQ ID NO: 67371 - DNA, 17 bp, Arabidopsis thaliana
cagggaattacaggctt

SEQ ID NO: 67372 - DNA, 17 bp, Arabidopsis thaliana
cagggaattgattgtcg

SEQ ID NO: 67373 - DNA, 17 bp, Arabidopsis thaliana
cagggaattggacatgt

SEQ ID NO: 67374 - DNA, 17 bp, Arabidopsis thaliana
cagggacagtcgggggc

SEQ ID NO: 67375 - DNA, 17 bp, Arabidopsis thaliana
cagggacattgcatagg

SEQ ID NO: 67376 - DNA, 17 bp, Arabidopsis thaliana
cagggaccaggaatcac

SEQ ID NO: 67377 - DNA, 17 bp, Arabidopsis thaliana
cagggaccaggtgtttc

SEQ ID NO: 67378 - DNA, 17 bp, Arabidopsis thaliana
cagggaccattgggcgt

SEQ ID NO: 67379 - DNA, 17 bp, Arabidopsis thaliana
cagggaccgccggtggt

SEQ ID NO: 67380 - DNA, 17 bp, Arabidopsis thaliana
cagggaccgtgtcaggt

SEQ ID NO: 67381 - DNA, 17 bp, Arabidopsis thaliana
cagggaccgtgtgaggt

SEQ ID NO: 67382 - DNA, 17 bp, Arabidopsis thaliana
cagggacctagtgttac

SEQ ID NO: 67383 - DNA, 17 bp, Arabidopsis thaliana
cagggacctgtgagact

SEQ ID NO: 67384 - DNA, 17 bp, Arabidopsis thaliana
cagggacgaaagtcggc

SEQ ID NO: 67385 - DNA, 17 bp, Arabidopsis thaliana
cagggacgaaccaatgg

SEQ ID NO: 67386 - DNA, 17 bp, Arabidopsis thaliana
cagggacggtggaggct

SEQ ID NO: 67387 - DNA, 17 bp, Arabidopsis thaliana
cagggacgtttttcctt

SEQ ID NO: 67388 - DNA, 17 bp, Arabidopsis thaliana
cagggacttgtcaactg

SEQ ID NO: 67389 - DNA, 17 bp, Arabidopsis thaliana
cagggagagaactgatc

SEQ ID NO: 67390 - DNA, 17 bp, Arabidopsis thaliana
cagggagagcgtcctca

SEQ ID NO: 67391 - DNA, 17 bp, Arabidopsis thaliana
cagggaggaaacagaga

SEQ ID NO: 67392 - DNA, 17 bp, Arabidopsis thaliana
cagggagggctggcaac

SEQ ID NO: 67393 - DNA, 17 bp, Arabidopsis thaliana
cagggagtcaactttgg

SEQ ID NO: 67394 - DNA, 17 bp, Arabidopsis thaliana
cagggagtctacaggca

SEQ ID NO: 67395 - DNA, 17 bp, Arabidopsis thaliana
cagggagtgggttgtgc

SEQ ID NO: 67396 - DNA, 17 bp, Arabidopsis thaliana
cagggataactggcttg

SEQ ID NO: 67397 - DNA, 17 bp, Arabidopsis thaliana
cagggataacttgcttg

SEQ ID NO: 67398 - DNA, 17 bp, Arabidopsis thaliana
cagggataccggattct

SEQ ID NO: 67399 - DNA, 17 bp, Arabidopsis thaliana
cagggatcagcggacgc

SEQ ID NO: 67400 - DNA, 17 bp, Arabidopsis thaliana
cagggatcagcggatat

SEQ ID NO: 67401 - DNA, 17 bp, Arabidopsis thaliana
cagggatcagcggatgc

SEQ ID NO: 67402 - DNA, 17 bp, Arabidopsis thaliana
cagggatcagcggatgt

SEQ ID NO: 67403 - DNA, 17 bp, Arabidopsis thaliana
cagggatcatcattgca

SEQ ID NO: 67404 - DNA, 17 bp, Arabidopsis thaliana
cagggatgaagcacttt

SEQ ID NO: 67405 - DNA, 17 bp, Arabidopsis thaliana
cagggatgagacatttt

SEQ ID NO: 67406 - DNA, 17 bp, Arabidopsis thaliana
cagggatgaggcacttt

SEQ ID NO: 67407 - DNA, 17 bp, Arabidopsis thaliana
cagggatgattcatcta

SEQ ID NO: 67408 - DNA, 17 bp, Arabidopsis thaliana
cagggatgggctggggt

SEQ ID NO: 67409 - DNA, 17 bp, Arabidopsis thaliana
cagggatgtcaaaatcg

SEQ ID NO: 67410 - DNA, 17 bp, Arabidopsis thaliana
cagggatgtccggaatt

SEQ ID NO: 67411 - DNA, 17 bp, Arabidopsis thaliana
cagggatgtgtttcctt

SEQ ID NO: 67412 - DNA, 17 bp, Arabidopsis thaliana
cagggattaccggtttt

SEQ ID NO: 67413 - DNA, 17 bp, Arabidopsis thaliana
cagggattccaagttta

SEQ ID NO: 67414 - DNA, 17 bp, Arabidopsis thaliana
cagggattccacttctc

SEQ ID NO: 67415 - DNA, 17 bp, Arabidopsis thaliana
cagggattgcgaaggtg

SEQ ID NO: 67416 - DNA, 17 bp, Arabidopsis thaliana
cagggattggctgctga

SEQ ID NO: 67417 - DNA, 17 bp, Arabidopsis thaliana
cagggatttggttagcc

SEQ ID NO: 67418 - DNA, 17 bp, Arabidopsis thaliana
cagggatttttgagcct

SEQ ID NO: 67419 - DNA, 17 bp, Arabidopsis thaliana
cagggcaaactcgggcg

SEQ ID NO: 67420 - DNA, 17 bp, Arabidopsis thaliana
cagggcacgtctgccgg

SEQ ID NO: 67421 - DNA, 17 bp, Arabidopsis thaliana
cagggcacgtctgcctg

SEQ ID NO: 67422 - DNA, 17 bp, Arabidopsis thaliana
cagggcacgtgcattac

SEQ ID NO: 67423 - DNA, 17 bp, Arabidopsis thaliana
cagggcactctgcctgg

SEQ ID NO: 67424 - DNA, 17 bp, Arabidopsis thaliana
cagggcagagtgttgag

SEQ ID NO: 67425 - DNA, 17 bp, Arabidopsis thaliana
cagggcagccggcgacc

SEQ ID NO: 67426 - DNA, 17 bp, Arabidopsis thaliana
cagggcagtgaacgacg

SEQ ID NO: 67427 - DNA, 17 bp, Arabidopsis thaliana
cagggccatttccattt

SEQ ID NO: 67428 - DNA, 17 bp, Arabidopsis thaliana
cagggccggccctgctc

SEQ ID NO: 67429 - DNA, 17 bp, Arabidopsis thaliana
cagggccggccggccgg

SEQ ID NO: 67430 - DNA, 17 bp, Arabidopsis thaliana
cagggccgtcctgaaca

SEQ ID NO: 67431 - DNA, 17 bp, Arabidopsis thaliana
cagggcggacgatttca

SEQ ID NO: 67432 - DNA, 17 bp, Arabidopsis thaliana
cagggcgtatgtggtat

SEQ ID NO: 67433 - DNA, 17 bp, Arabidopsis thaliana
cagggcgtcggcgactt

SEQ ID NO: 67434 - DNA, 17 bp, Arabidopsis thaliana
cagggctaaccagataa

SEQ ID NO: 67435 - DNA, 17 bp, Arabidopsis thaliana
cagggctaccgtctccc

SEQ ID NO: 67436 - DNA, 17 bp, Arabidopsis thaliana
cagggctagtgactgga

SEQ ID NO: 67437 - DNA, 17 bp, Arabidopsis thaliana
cagggctataaaccgtt

SEQ ID NO: 67438 - DNA, 17 bp, Arabidopsis thaliana
cagggctcaaccctgga

SEQ ID NO: 67439 - DNA, 17 bp, Arabidopsis thaliana
cagggctctttctccga

SEQ ID NO: 67440 - DNA, 17 bp, Arabidopsis thaliana
cagggctggagtgatta

SEQ ID NO: 67441 - DNA, 17 bp, Arabidopsis thaliana
cagggctgggctcgggg

SEQ ID NO: 67442 - DNA, 17 bp, Arabidopsis thaliana
cagggctggtgactgga

SEQ ID NO: 67443 - DNA, 17 bp, Arabidopsis thaliana
cagggcttcttggactg

SEQ ID NO: 67444 - DNA, 17 bp, Arabidopsis thaliana
cagggcttgtatgtttc

SEQ ID NO: 67445 - DNA, 17 bp, Arabidopsis thaliana
caggggaagcatttgca

SEQ ID NO: 67446 - DNA, 17 bp, Arabidopsis thaliana
caggggaattacgggtt

SEQ ID NO: 67447 - DNA, 17 bp, Arabidopsis thaliana
caggggagccggcgacc

SEQ ID NO: 67448 - DNA, 17 bp, Arabidopsis thaliana
caggggagtggaccggc

SEQ ID NO: 67449 - DNA, 17 bp, Arabidopsis thaliana
caggggcgccagagagg

SEQ ID NO: 67450 - DNA, 17 bp, Arabidopsis thaliana
caggggcggactcagca

SEQ ID NO: 67451 - DNA, 17 bp, Arabidopsis thaliana
caggggctcagctgaat

SEQ ID NO: 67452 - DNA, 17 bp, Arabidopsis thaliana
caggggcttttgtaaga

SEQ ID NO: 67453 - DNA, 17 bp, Arabidopsis thaliana
cagggggatcttggtct

SEQ ID NO: 67454 - DNA, 17 bp, Arabidopsis thaliana
cagggggtagtcaggcc

SEQ ID NO: 67455 - DNA, 17 bp, Arabidopsis thaliana
caggggtaacggactac

SEQ ID NO: 67456 - DNA, 17 bp, Arabidopsis thaliana
caggggtagtcaggccg

SEQ ID NO: 67457 - DNA, 17 bp, Arabidopsis thaliana
caggggtatttatgact

SEQ ID NO: 67458 - DNA, 17 bp, Arabidopsis thaliana
caggggtattttcgtca

SEQ ID NO: 67459 - DNA, 17 bp, Arabidopsis thaliana
caggggtctccctgtcg

SEQ ID NO: 67460 - DNA, 17 bp, Arabidopsis thaliana
caggggtgagtttcttc

SEQ ID NO: 67461 - DNA, 17 bp, Arabidopsis thaliana
caggggtgcaatgtggc

SEQ ID NO: 67462 - DNA, 17 bp, Arabidopsis thaliana
caggggtgttgatgtca

SEQ ID NO: 67463 - DNA, 17 bp, Arabidopsis thaliana
caggggttcccaagtgt

SEQ ID NO: 67464 - DNA, 17 bp, Arabidopsis thaliana
caggggttcgagtcccc

SEQ ID NO: 67465 - DNA, 17 bp, Arabidopsis thaliana
caggggttcgagtgccc

SEQ ID NO: 67466 - DNA, 17 bp, Arabidopsis thaliana
caggggtttccctggat

SEQ ID NO: 67467 - DNA, 17 bp, Arabidopsis thaliana
caggggtttgttccaaa

SEQ ID NO: 67468 - DNA, 17 bp, Arabidopsis thaliana
cagggtacgtaggcaat

SEQ ID NO: 67469 - DNA, 17 bp, Arabidopsis thaliana
cagggtccaagtgtgta

SEQ ID NO: 67470 - DNA, 17 bp, Arabidopsis thaliana
cagggtccaagtgtgtc

SEQ ID NO: 67471 - DNA, 17 bp, Arabidopsis thaliana
cagggtccgaacttggt

SEQ ID NO: 67472 - DNA, 17 bp, Arabidopsis thaliana
cagggtcgaacttatgc

SEQ ID NO: 67473 - DNA, 17 bp, Arabidopsis thaliana
cagggtctattacgctt

SEQ ID NO: 67474 - DNA, 17 bp, Arabidopsis thaliana
cagggtgacttaggttc

SEQ ID NO: 67475 - DNA, 17 bp, Arabidopsis thaliana
cagggtgagcggtcggt

SEQ ID NO: 67476 - DNA, 17 bp, Arabidopsis thaliana
cagggtgattcagagct

SEQ ID NO: 67477 - DNA, 17 bp, Arabidopsis thaliana
cagggtgggactcaagt

SEQ ID NO: 67478 - DNA, 17 bp, Arabidopsis thaliana
cagggtggtcgtgcagg

SEQ ID NO: 67479 - DNA, 17 bp, Arabidopsis thaliana
cagggtgtctcgggacc

SEQ ID NO: 67480 - DNA, 17 bp, Arabidopsis thaliana
cagggttaagagtttgg

SEQ ID NO: 67481 - DNA, 17 bp, Arabidopsis thaliana
cagggttagcaccgaga

SEQ ID NO: 67482 - DNA, 17 bp, Arabidopsis thaliana
cagggttcagagttatt

SEQ ID NO: 67483 - DNA, 17 bp, Arabidopsis thaliana
cagggttcatccctcta

SEQ ID NO: 67484 - DNA, 17 bp, Arabidopsis thaliana
cagggttccttggagta

SEQ ID NO: 67485 - DNA, 17 bp, Arabidopsis thaliana
cagggttcgagccccac

SEQ ID NO: 67486 - DNA, 17 bp, Arabidopsis thaliana
cagggttcgattccctg

SEQ ID NO: 67487 - DNA, 17 bp, Arabidopsis thaliana
cagggttcggttccctg

SEQ ID NO: 67488 - DNA, 17 bp, Arabidopsis thaliana
cagggttcgttccctcc

SEQ ID NO: 67489 - DNA, 17 bp, Arabidopsis thaliana
cagggttcgttccctgg

SEQ ID NO: 67490 - DNA, 17 bp, Arabidopsis thaliana
cagggttcgtttccctg

SEQ ID NO: 67491 - DNA, 17 bp, Arabidopsis thaliana
cagggttgtcggcacca

SEQ ID NO: 67492 - DNA, 17 bp, Arabidopsis thaliana
cagggtttcgctggttc

SEQ ID NO: 67493 - DNA, 17 bp, Arabidopsis thaliana
cagggtttcttggactg

SEQ ID NO: 67494 - DNA, 17 bp, Arabidopsis thaliana
cagggtttggctatgtt

SEQ ID NO: 67495 - DNA, 17 bp, Arabidopsis thaliana
cagggtttgtttccctg

SEQ ID NO: 67496 - DNA, 17 bp, Arabidopsis thaliana
cagggttttcttcagga

SEQ ID NO: 67497 - DNA, 17 bp, Arabidopsis thaliana
caggtaaaccaattggc

SEQ ID NO: 67498 - DNA, 17 bp, Arabidopsis thaliana
caggtaaaccaattggg

SEQ ID NO: 67499 - DNA, 17 bp, Arabidopsis thaliana
caggtaagattgaattg

SEQ ID NO: 67500 - DNA, 17 bp, Arabidopsis thaliana
caggtaagccataaact

SEQ ID NO: 67501 - DNA, 17 bp, Arabidopsis thaliana
caggtacataactgatt

SEQ ID NO: 67502 - DNA, 17 bp, Arabidopsis thaliana
caggtacggttttttac

SEQ ID NO: 67503 - DNA, 17 bp, Arabidopsis thaliana
caggtactgtgtctcag

SEQ ID NO: 67504 - DNA, 17 bp, Arabidopsis thaliana
caggtagacagtttcta

SEQ ID NO: 67505 - DNA, 17 bp, Arabidopsis thaliana
caggtagcagctgttgt

SEQ ID NO: 67506 - DNA, 17 bp, Arabidopsis thaliana
caggtagctgacgtagc

SEQ ID NO: 67507 - DNA, 17 bp, Arabidopsis thaliana
caggtaggacgtgtcgg

SEQ ID NO: 67508 - DNA, 17 bp, Arabidopsis thaliana
caggtaggacgttgctg

SEQ ID NO: 67509 - DNA, 17 bp, Arabidopsis thaliana
caggtaggttggaagcc

SEQ ID NO: 67510 - DNA, 17 bp, Arabidopsis thaliana
caggtatacgttctgac

SEQ ID NO: 67511 - DNA, 17 bp, Arabidopsis thaliana
caggtatctgactagct

SEQ ID NO: 67512 - DNA, 17 bp, Arabidopsis thaliana
caggtattcgagcgccg

SEQ ID NO: 67513 - DNA, 17 bp, Arabidopsis thaliana
caggtcaaccaggttgg

SEQ ID NO: 67514 - DNA, 17 bp, Arabidopsis thaliana
caggtcaacgattcgat

SEQ ID NO: 67515 - DNA, 17 bp, Arabidopsis thaliana
caggtcaagaccaacgc

SEQ ID NO: 67516 - DNA, 17 bp, Arabidopsis thaliana
caggtcaatgtagctac

SEQ ID NO: 67517 - DNA, 17 bp, Arabidopsis thaliana
caggtcactgcacgcca

SEQ ID NO: 67518 - DNA, 17 bp, Arabidopsis thaliana
caggtcacttacatttc

SEQ ID NO: 67519 - DNA, 17 bp, Arabidopsis thaliana
caggtcatcacggcggg

SEQ ID NO: 67520 - DNA, 17 bp, Arabidopsis thaliana
caggtcatttattcggt

SEQ ID NO: 67521 - DNA, 17 bp, Arabidopsis thaliana
caggtccaaaggttcta

SEQ ID NO: 67522 - DNA, 17 bp, Arabidopsis thaliana
caggtcccaggatcgga

SEQ ID NO: 67523 - DNA, 17 bp, Arabidopsis thaliana
caggtcccatcatcggg

SEQ ID NO: 67524 - DNA, 17 bp, Arabidopsis thaliana
caggtccgagacttcat

SEQ ID NO: 67525 - DNA, 17 bp, Arabidopsis thaliana
caggtccgcttcttgta

SEQ ID NO: 67526 - DNA, 17 bp, Arabidopsis thaliana
caggtccgttttttttg

SEQ ID NO: 67527 - DNA, 17 bp, Arabidopsis thaliana
caggtcctcctctgcgg

SEQ ID NO: 67528 - DNA, 17 bp, Arabidopsis thaliana
caggtcctgagatcgat

SEQ ID NO: 67529 - DNA, 17 bp, Arabidopsis thaliana
caggtcgaatccgccaa

SEQ ID NO: 67530 - DNA, 17 bp, Arabidopsis thaliana
caggtcgacgactgagc

SEQ ID NO: 67531 - DNA, 17 bp, Arabidopsis thaliana
caggtcgagtaacagac

SEQ ID NO: 67532 - DNA, 17 bp, Arabidopsis thaliana
caggtcgccggttcgaa

SEQ ID NO: 67533 - DNA, 17 bp, Arabidopsis thaliana
caggtcgcctgcatttc

SEQ ID NO: 67534 - DNA, 17 bp, Arabidopsis thaliana
caggtcgctttgcaatt

SEQ ID NO: 67535 - DNA, 17 bp, Arabidopsis thaliana
caggtcggctattttgg

SEQ ID NO: 67536 - DNA, 17 bp, Arabidopsis thaliana
caggtcggctctgatgt

SEQ ID NO: 67537 - DNA, 17 bp, Arabidopsis thaliana
caggtcgggattgttca

SEQ ID NO: 67538 - DNA, 17 bp, Arabidopsis thaliana
caggtcggggctttgag

SEQ ID NO: 67539 - DNA, 17 bp, Arabidopsis thaliana
caggtcgtctgcatttc

SEQ ID NO: 67540 - DNA, 17 bp, Arabidopsis thaliana
caggtctaccaggattg

SEQ ID NO: 67541 - DNA, 17 bp, Arabidopsis thaliana
caggtctagattattgc

SEQ ID NO: 67542 - DNA, 17 bp, Arabidopsis thaliana
caggtctatcattgaga

SEQ ID NO: 67543 - DNA, 17 bp, Arabidopsis thaliana
caggtctcaggtaggct

SEQ ID NO: 67544 - DNA, 17 bp, Arabidopsis thaliana
caggtctccaaggtgaa

SEQ ID NO: 67545 - DNA, 17 bp, Arabidopsis thaliana
caggtctcggtgggacc

SEQ ID NO: 67546 - DNA, 17 bp, Arabidopsis thaliana
caggtctctctttgcta

SEQ ID NO: 67547 - DNA, 17 bp, Arabidopsis thaliana
caggtctgcctgggtgt

SEQ ID NO: 67548 - DNA, 17 bp, Arabidopsis thaliana
caggtctgtgatgccct

SEQ ID NO: 67549 - DNA, 17 bp, Arabidopsis thaliana
caggtcttcaggcttga

SEQ ID NO: 67550 - DNA, 17 bp, Arabidopsis thaliana
caggtcttcatcctcgg

SEQ ID NO: 67551 - DNA, 17 bp, Arabidopsis thaliana
caggtctttacatgttt

SEQ ID NO: 67552 - DNA, 17 bp, Arabidopsis thaliana
caggtgacggtgatgga

SEQ ID NO: 67553 - DNA, 17 bp, Arabidopsis thaliana
caggtgaggctttttct

SEQ ID NO: 67554 - DNA, 17 bp, Arabidopsis thaliana
caggtgatcatccgcac

SEQ ID NO: 67555 - DNA, 17 bp, Arabidopsis thaliana
caggtgatcatccgcgc

SEQ ID NO: 67556 - DNA, 17 bp, Arabidopsis thaliana
caggtgatctttgtagc

SEQ ID NO: 67557 - DNA, 17 bp, Arabidopsis thaliana
caggtgattgacatgct

SEQ ID NO: 67558 - DNA, 17 bp, Arabidopsis thaliana
caggtgatttgctaagg

SEQ ID NO: 67559 - DNA, 17 bp, Arabidopsis thaliana
caggtgatttggggctg

SEQ ID NO: 67560 - DNA, 17 bp, Arabidopsis thaliana
caggtgcaattctaccg

SEQ ID NO: 67561 - DNA, 17 bp, Arabidopsis thaliana
caggtgcaccgccgacc

SEQ ID NO: 67562 - DNA, 17 bp, Arabidopsis thaliana
caggtgcattggtcggc

SEQ ID NO: 67563 - DNA, 17 bp, Arabidopsis thaliana
caggtgccacgtgttat

SEQ ID NO: 67564 - DNA, 17 bp, Arabidopsis thaliana
caggtgctgcatggctg

SEQ ID NO: 67565 - DNA, 17 bp, Arabidopsis thaliana
caggtgctgccgctgca

SEQ ID NO: 67566 - DNA, 17 bp, Arabidopsis thaliana
caggtggattctgagat

SEQ ID NO: 67567 - DNA, 17 bp, Arabidopsis thaliana
caggtgggcagtgactc

SEQ ID NO: 67568 - DNA, 17 bp, Arabidopsis thaliana
caggtggggagtttagc

SEQ ID NO: 67569 - DNA, 17 bp, Arabidopsis thaliana
caggtggggagtttggc

SEQ ID NO: 67570 - DNA, 17 bp, Arabidopsis thaliana
caggtggtagcggttga

SEQ ID NO: 67571 - DNA, 17 bp, Arabidopsis thaliana
caggtggtaggatagaa

SEQ ID NO: 67572 - DNA, 17 bp, Arabidopsis thaliana
caggtggtgattaagtc

SEQ ID NO: 67573 - DNA, 17 bp, Arabidopsis thaliana
caggtggtgcatggccg

SEQ ID NO: 67574 - DNA, 17 bp, Arabidopsis thaliana
caggtggtgcatggctg

SEQ ID NO: 67575 - DNA, 17 bp, Arabidopsis thaliana
caggtggtgggagtgag

SEQ ID NO: 67576 - DNA, 17 bp, Arabidopsis thaliana
caggtggtggtggcggc

SEQ ID NO: 67577 - DNA, 17 bp, Arabidopsis thaliana
caggtggtgtggcaaag

SEQ ID NO: 67578 - DNA, 17 bp, Arabidopsis thaliana
caggtggtgtggcagag

SEQ ID NO: 67579 - DNA, 17 bp, Arabidopsis thaliana
caggtggtgtggcgaag

SEQ ID NO: 67580 - DNA, 17 bp, Arabidopsis thaliana
caggtgtcagcatcagt

SEQ ID NO: 67581 - DNA, 17 bp, Arabidopsis thaliana
caggtgtcagtatcagt

SEQ ID NO: 67582 - DNA, 17 bp, Arabidopsis thaliana
caggtgtcctaagatca

SEQ ID NO: 67583 - DNA, 17 bp, Arabidopsis thaliana
caggtgtcctaagatga

SEQ ID NO: 67584 - DNA, 17 bp, Arabidopsis thaliana
caggtgtggagtttggc

SEQ ID NO: 67585 - DNA, 17 bp, Arabidopsis thaliana
caggtgtggagtttgtc

SEQ ID NO: 67586 - DNA, 17 bp, Arabidopsis thaliana
caggtgttaaactgtcg

SEQ ID NO: 67587 - DNA, 17 bp, Arabidopsis thaliana
caggttaaccgctggac

SEQ ID NO: 67588 - DNA, 17 bp, Arabidopsis thaliana
caggttaccacacatgc

SEQ ID NO: 67589 - DNA, 17 bp, Arabidopsis thaliana
caggttaccagcctcta

SEQ ID NO: 67590 - DNA, 17 bp, Arabidopsis thaliana
caggttaccgtgttgcg

SEQ ID NO: 67591 - DNA, 17 bp, Arabidopsis thaliana
caggttagtggactatg

SEQ ID NO: 67592 - DNA, 17 bp, Arabidopsis thaliana
caggttagttggtagcg

SEQ ID NO: 67593 - DNA, 17 bp, Arabidopsis thaliana
caggttagttttaccct

SEQ ID NO: 67594 - DNA, 17 bp, Arabidopsis thaliana
caggttatggactccaa

SEQ ID NO: 67595 - DNA, 17 bp, Arabidopsis thaliana
caggttcaaaggcccta

SEQ ID NO: 67596 - DNA, 17 bp, Arabidopsis thaliana
caggttcaccctgctgt

SEQ ID NO: 67597 - DNA, 17 bp, Arabidopsis thaliana
caggttcaggattagag

SEQ ID NO: 67598 - DNA, 17 bp, Arabidopsis thaliana
caggttcatacgaggca

SEQ ID NO: 67599 - DNA, 17 bp, Arabidopsis thaliana
caggttcgaaacctgca

SEQ ID NO: 67600 - DNA, 17 bp, Arabidopsis thaliana
caggttcgaaccctgct

SEQ ID NO: 67601 - DNA, 17 bp, Arabidopsis thaliana
caggttcgaacctgctg

SEQ ID NO: 67602 - DNA, 17 bp, Arabidopsis thaliana
caggttcgaatccagcc

SEQ ID NO: 67603 - DNA, 17 bp, Arabidopsis thaliana
caggttcgaatcctact

SEQ ID NO: 67604 - DNA, 17 bp, Arabidopsis thaliana
caggttcgaatcctgcc

SEQ ID NO: 67605 - DNA, 17 bp, Arabidopsis thaliana
caggttcgaatcctgct

SEQ ID NO: 67606 - DNA, 17 bp, Arabidopsis thaliana
caggttcgaatcctgtc

SEQ ID NO: 67607 - DNA, 17 bp, Arabidopsis thaliana
caggttcgaatggtgcg

SEQ ID NO: 67608 - DNA, 17 bp, Arabidopsis thaliana
caggttcgacattctac

SEQ ID NO: 67609 - DNA, 17 bp, Arabidopsis thaliana
caggttcgacgccaact

SEQ ID NO: 67610 - DNA, 17 bp, Arabidopsis thaliana
caggttcgagtcctgtt

SEQ ID NO: 67611 - DNA, 17 bp, Arabidopsis thaliana
caggttcgatccctgta

SEQ ID NO: 67612 - DNA, 17 bp, Arabidopsis thaliana
caggttcgattccacta

SEQ ID NO: 67613 - DNA, 17 bp, Arabidopsis thaliana
caggttcggaacctgca

SEQ ID NO: 67614 - DNA, 17 bp, Arabidopsis thaliana
caggttcggatcctgcc

SEQ ID NO: 67615 - DNA, 17 bp, Arabidopsis thaliana
caggttcggtccctgta

SEQ ID NO: 67616 - DNA, 17 bp, Arabidopsis thaliana
caggttcggtttgagtt

SEQ ID NO: 67617 - DNA, 17 bp, Arabidopsis thaliana
caggttcgtatcctgcc

SEQ ID NO: 67618 - DNA, 17 bp, Arabidopsis thaliana
caggttcgttccctgta

SEQ ID NO: 67619 - DNA, 17 bp, Arabidopsis thaliana
caggttcgtttcccggc

SEQ ID NO: 67620 - DNA, 17 bp, Arabidopsis thaliana
caggttctattccacta

SEQ ID NO: 67621 - DNA, 17 bp, Arabidopsis thaliana
caggttctcaggtcacc

SEQ ID NO: 67622 - DNA, 17 bp, Arabidopsis thaliana
caggttctccctgtata

SEQ ID NO: 67623 - DNA, 17 bp, Arabidopsis thaliana
caggttctcggccgaat

SEQ ID NO: 67624 - DNA, 17 bp, Arabidopsis thaliana
caggttctgagccgaaa

SEQ ID NO: 67625 - DNA, 17 bp, Arabidopsis thaliana
caggttctggttgcctg

SEQ ID NO: 67626 - DNA, 17 bp, Arabidopsis thaliana
caggttcttctgctgct

SEQ ID NO: 67627 - DNA, 17 bp, Arabidopsis thaliana
caggttcttttgaccta

SEQ ID NO: 67628 - DNA, 17 bp, Arabidopsis thaliana
caggttgagtatgtacg

SEQ ID NO: 67629 - DNA, 17 bp, Arabidopsis thaliana
caggttgataacgcgtt

SEQ ID NO: 67630 - DNA, 17 bp, Arabidopsis thaliana
caggttgcgggttcaat

SEQ ID NO: 67631 - DNA, 17 bp, Arabidopsis thaliana
caggttggaccatgggt

SEQ ID NO: 67632 - DNA, 17 bp, Arabidopsis thaliana
caggttggcgggtcggg

SEQ ID NO: 67633 - DNA, 17 bp, Arabidopsis thaliana
caggttgtcttgaatgg

SEQ ID NO: 67634 - DNA, 17 bp, Arabidopsis thaliana
caggttgtgctgatgta

SEQ ID NO: 67635 - DNA, 17 bp, Arabidopsis thaliana
caggttgtgtgaggcta

SEQ ID NO: 67636 - DNA, 17 bp, Arabidopsis thaliana
caggtttaaaatgggct

SEQ ID NO: 67637 - DNA, 17 bp, Arabidopsis thaliana
caggtttaaattgggct

SEQ ID NO: 67638 - DNA, 17 bp, Arabidopsis thaliana
caggtttagggtttctc

SEQ ID NO: 67639 - DNA, 17 bp, Arabidopsis thaliana
caggtttagtgtctcaa

SEQ ID NO: 67640 - DNA, 17 bp, Arabidopsis thaliana
caggtttctagaatcca

SEQ ID NO: 67641 - DNA, 17 bp, Arabidopsis thaliana
caggtttctgcaatggg

SEQ ID NO: 67642 - DNA, 17 bp, Arabidopsis thaliana
caggtttgagcactcta

SEQ ID NO: 67643 - DNA, 17 bp, Arabidopsis thaliana
caggtttgcgttgactc

SEQ ID NO: 67644 - DNA, 17 bp, Arabidopsis thaliana
caggtttggcaggacgt

SEQ ID NO: 67645 - DNA, 17 bp, Arabidopsis thaliana
caggtttgggctatctt

SEQ ID NO: 67646 - DNA, 17 bp, Arabidopsis thaliana
caggtttgtacctacgg

SEQ ID NO: 67647 - DNA, 17 bp, Arabidopsis thaliana
caggtttgtgttgctct

SEQ ID NO: 67648 - DNA, 17 bp, Arabidopsis thaliana
caggttttggtgtgttc

SEQ ID NO: 67649 - DNA, 17 bp, Arabidopsis thaliana
caggttttttcgggctt

SEQ ID NO: 67650 - DNA, 17 bp, Arabidopsis thaliana
cagtaaaccatcggctg

SEQ ID NO: 67651 - DNA, 17 bp, Arabidopsis thaliana
cagtaaccgttgaccca

SEQ ID NO: 67652 - DNA, 17 bp, Arabidopsis thaliana
cagtaagtcatcggctg

SEQ ID NO: 67653 - DNA, 17 bp, Arabidopsis thaliana
cagtaagtcgaacatcg

SEQ ID NO: 67654 - DNA, 17 bp, Arabidopsis thaliana
cagtacaccgcggggct

SEQ ID NO: 67655 - DNA, 17 bp, Arabidopsis thaliana
cagtacaggatgcgact

SEQ ID NO: 67656 - DNA, 17 bp, Arabidopsis thaliana
cagtacgattcgtcagg

SEQ ID NO: 67657 - DNA, 17 bp, Arabidopsis thaliana
cagtacggacccgattg

SEQ ID NO: 67658 - DNA, 17 bp, Arabidopsis thaliana
cagtacggaggtgatct

SEQ ID NO: 67659 - DNA, 17 bp, Arabidopsis thaliana
cagtacggtggcggcct

SEQ ID NO: 67660 - DNA, 17 bp, Arabidopsis thaliana
cagtacgttgccactca

SEQ ID NO: 67661 - DNA, 17 bp, Arabidopsis thaliana
cagtactcgacctgtca

SEQ ID NO: 67662 - DNA, 17 bp, Arabidopsis thaliana
cagtactgtgactcaag

SEQ ID NO: 67663 - DNA, 17 bp, Arabidopsis thaliana
cagtacttctctcaacg

SEQ ID NO: 67664 - DNA, 17 bp, Arabidopsis thaliana
cagtactttcacctgag

SEQ ID NO: 67665 - DNA, 17 bp, Arabidopsis thaliana
cagtagaccaatcgaga

SEQ ID NO: 67666 - DNA, 17 bp, Arabidopsis thaliana
cagtagacgagcataga

SEQ ID NO: 67667 - DNA, 17 bp, Arabidopsis thaliana
cagtagatgtcacagat

SEQ ID NO: 67668 - DNA, 17 bp, Arabidopsis thaliana
cagtagatgtcacaggt

SEQ ID NO: 67669 - DNA, 17 bp, Arabidopsis thaliana
cagtagcacgaccgatg

SEQ ID NO: 67670 - DNA, 17 bp, Arabidopsis thaliana
cagtagctgttctgacg

SEQ ID NO: 67671 - DNA, 17 bp, Arabidopsis thaliana
cagtaggttcttagccg

SEQ ID NO: 67672 - DNA, 17 bp, Arabidopsis thaliana
cagtagttggtggagcg

SEQ ID NO: 67673 - DNA, 17 bp, Arabidopsis thaliana
cagtatagaggccggct

SEQ ID NO: 67674 - DNA, 17 bp, Arabidopsis thaliana
cagtatcagcccattgg

SEQ ID NO: 67675 - DNA, 17 bp, Arabidopsis thaliana
cagtatcatctgacgtg

SEQ ID NO: 67676 - DNA, 17 bp, Arabidopsis thaliana
cagtatccatcctgagt

SEQ ID NO: 67677 - DNA, 17 bp, Arabidopsis thaliana
cagtatctgccatttga

SEQ ID NO: 67678 - DNA, 17 bp, Arabidopsis thaliana
cagtatcttatgcgtcc

SEQ ID NO: 67679 - DNA, 17 bp, Arabidopsis thaliana
cagtatgcaggctatat

SEQ ID NO: 67680 - DNA, 17 bp, Arabidopsis thaliana
cagtatgcggaacgagt

SEQ ID NO: 67681 - DNA, 17 bp, Arabidopsis thaliana
cagtatggccgagtggt

SEQ ID NO: 67682 - DNA, 17 bp, Arabidopsis thaliana
cagtatgtatcttcttt

SEQ ID NO: 67683 - DNA, 17 bp, Arabidopsis thaliana
cagtattagacattgag

SEQ ID NO: 67684 - DNA, 17 bp, Arabidopsis thaliana
cagtattccgtttgcac

SEQ ID NO: 67685 - DNA, 17 bp, Arabidopsis thaliana
cagtattcgtcacctgc

SEQ ID NO: 67686 - DNA, 17 bp, Arabidopsis thaliana
cagtattggactgtccc

SEQ ID NO: 67687 - DNA, 17 bp, Arabidopsis thaliana
cagtattgggaacttgc

SEQ ID NO: 67688 - DNA, 17 bp, Arabidopsis thaliana
cagtattggtaccgttg

SEQ ID NO: 67689 - DNA, 17 bp, Arabidopsis thaliana
cagtattttgtctgggc

SEQ ID NO: 67690 - DNA, 17 bp, Arabidopsis thaliana
cagtcaaaattgttaag

SEQ ID NO: 67691 - DNA, 17 bp, Arabidopsis thaliana
cagtcaacctcaggacc

SEQ ID NO: 67692 - DNA, 17 bp, Arabidopsis thaliana
cagtcaacctccggacc

SEQ ID NO: 67693 - DNA, 17 bp, Arabidopsis thaliana
cagtcaagattaacagg

SEQ ID NO: 67694 - DNA, 17 bp, Arabidopsis thaliana
cagtcaaggatgacttg

SEQ ID NO: 67695 - DNA, 17 bp, Arabidopsis thaliana
cagtcaaggtcgtattc

SEQ ID NO: 67696 - DNA, 17 bp, Arabidopsis thaliana
cagtcaatcaatcggct

SEQ ID NO: 67697 - DNA, 17 bp, Arabidopsis thaliana
cagtcacaagtagtttt

SEQ ID NO: 67698 - DNA, 17 bp, Arabidopsis thaliana
cagtcacaatttacgag

SEQ ID NO: 67699 - DNA, 17 bp, Arabidopsis thaliana
cagtcacattgctgtaa

SEQ ID NO: 67700 - DNA, 17 bp, Arabidopsis thaliana
cagtcaccacacctccc

SEQ ID NO: 67701 - DNA, 17 bp, Arabidopsis thaliana
cagtcaccaccttctgg

SEQ ID NO: 67702 - DNA, 17 bp, Arabidopsis thaliana
cagtcaccggtgcgtcg

SEQ ID NO: 67703 - DNA, 17 bp, Arabidopsis thaliana
cagtcacgatcaaccag

SEQ ID NO: 67704 - DNA, 17 bp, Arabidopsis thaliana
cagtcactatcttcaac

SEQ ID NO: 67705 - DNA, 17 bp, Arabidopsis thaliana
cagtcagaagtagtttt

SEQ ID NO: 67706 - DNA, 17 bp, Arabidopsis thaliana
cagtcagaggagcaacg

SEQ ID NO: 67707 - DNA, 17 bp, Arabidopsis thaliana
cagtcagaggcgctatg

SEQ ID NO: 67708 - DNA, 17 bp, Arabidopsis thaliana
cagtcagccaaggatga

SEQ ID NO: 67709 - DNA, 17 bp, Arabidopsis thaliana
cagtcagccctttgtcg

SEQ ID NO: 67710 - DNA, 17 bp, Arabidopsis thaliana
cagtcagctcagaactg

SEQ ID NO: 67711 - DNA, 17 bp, Arabidopsis thaliana
cagtcaggccaaaatct

SEQ ID NO: 67712 - DNA, 17 bp, Arabidopsis thaliana
cagtcaggtcgaagggg

SEQ ID NO: 67713 - DNA, 17 bp, Arabidopsis thaliana
cagtcagttccaggagt

SEQ ID NO: 67714 - DNA, 17 bp, Arabidopsis thaliana
cagtcatcaccgtcgca

SEQ ID NO: 67715 - DNA, 17 bp, Arabidopsis thaliana
cagtcatcggctggcgg

SEQ ID NO: 67716 - DNA, 17 bp, Arabidopsis thaliana
cagtcatcgggattctg

SEQ ID NO: 67717 - DNA, 17 bp, Arabidopsis thaliana
cagtcatctcctctgat

SEQ ID NO: 67718 - DNA, 17 bp, Arabidopsis thaliana
cagtcatcttctgtagg

SEQ ID NO: 67719 - DNA, 17 bp, Arabidopsis thaliana
cagtcatgcggtgttcg

SEQ ID NO: 67720 - DNA, 17 bp, Arabidopsis thaliana
cagtcattaacgggttt

SEQ ID NO: 67721 - DNA, 17 bp, Arabidopsis thaliana
cagtcattccatccatc

SEQ ID NO: 67722 - DNA, 17 bp, Arabidopsis thaliana
cagtcattctgatgggc

SEQ ID NO: 67723 - DNA, 17 bp, Arabidopsis thaliana
cagtcattggaaagcag

SEQ ID NO: 67724 - DNA, 17 bp, Arabidopsis thaliana
cagtcattgtgtggcca

SEQ ID NO: 67725 - DNA, 17 bp, Arabidopsis thaliana
cagtccaaccgatgtgg

SEQ ID NO: 67726 - DNA, 17 bp, Arabidopsis thaliana
cagtccaagaagttcac

SEQ ID NO: 67727 - DNA, 17 bp, Arabidopsis thaliana
cagtccacagaaaagga

SEQ ID NO: 67728 - DNA, 17 bp, Arabidopsis thaliana
cagtccactttcgtacg

SEQ ID NO: 67729 - DNA, 17 bp, Arabidopsis thaliana
cagtccatcgtctggat

SEQ ID NO: 67730 - DNA, 17 bp, Arabidopsis thaliana
cagtcccaggtggctac

SEQ ID NO: 67731 - DNA, 17 bp, Arabidopsis thaliana
cagtcccgatcttgatg

SEQ ID NO: 67732 - DNA, 17 bp, Arabidopsis thaliana
cagtcccgctcgatgtg

SEQ ID NO: 67733 - DNA, 17 bp, Arabidopsis thaliana
cagtcccgctctgcttt

SEQ ID NO: 67734 - DNA, 17 bp, Arabidopsis thaliana
cagtccctggtttcagc

SEQ ID NO: 67735 - DNA, 17 bp, Arabidopsis thaliana
cagtccgcagatggtcc

SEQ ID NO: 67736 - DNA, 17 bp, Arabidopsis thaliana
cagtccgccagccgatg

SEQ ID NO: 67737 - DNA, 17 bp, Arabidopsis thaliana
cagtccgggatttgaag

SEQ ID NO: 67738 - DNA, 17 bp, Arabidopsis thaliana
cagtccgttcttattgc

SEQ ID NO: 67739 - DNA, 17 bp, Arabidopsis thaliana
cagtcctcagcgacgga

SEQ ID NO: 67740 - DNA, 17 bp, Arabidopsis thaliana
cagtcctcttcaaggca

SEQ ID NO: 67741 - DNA, 17 bp, Arabidopsis thaliana
cagtcctgcgtgtgggc

SEQ ID NO: 67742 - DNA, 17 bp, Arabidopsis thaliana
cagtcctttgtcgctaa

SEQ ID NO: 67743 - DNA, 17 bp, Arabidopsis thaliana
cagtcgaccctgtagat

SEQ ID NO: 67744 - DNA, 17 bp, Arabidopsis thaliana
cagtcgacgaccatgag

SEQ ID NO: 67745 - DNA, 17 bp, Arabidopsis thaliana
cagtcgacggtgtacgt

SEQ ID NO: 67746 - DNA, 17 bp, Arabidopsis thaliana
cagtcgagggaagtcta

SEQ ID NO: 67747 - DNA, 17 bp, Arabidopsis thaliana
cagtcgagtaagattgt

SEQ ID NO: 67748 - DNA, 17 bp, Arabidopsis thaliana
cagtcgataactccgtt

SEQ ID NO: 67749 - DNA, 17 bp, Arabidopsis thaliana
cagtcgcaacctgtaga

SEQ ID NO: 67750 - DNA, 17 bp, Arabidopsis thaliana
cagtcgcaatcctgtag

SEQ ID NO: 67751 - DNA, 17 bp, Arabidopsis thaliana
cagtcgcacctgtagat

SEQ ID NO: 67752 - DNA, 17 bp, Arabidopsis thaliana
cagtcgcactgtagatg

SEQ ID NO: 67753 - DNA, 17 bp, Arabidopsis thaliana
cagtcgcatcctctaga

SEQ ID NO: 67754 - DNA, 17 bp, Arabidopsis thaliana
cagtcgcatcctgtaga

SEQ ID NO: 67755 - DNA, 17 bp, Arabidopsis thaliana
cagtcgccattatcatc

SEQ ID NO: 67756 - DNA, 17 bp, Arabidopsis thaliana
cagtcgctgcgatcggt

SEQ ID NO: 67757 - DNA, 17 bp, Arabidopsis thaliana
cagtcgcttgcttgtgg

SEQ ID NO: 67758 - DNA, 17 bp, Arabidopsis thaliana
cagtcgctttgttcaac

SEQ ID NO: 67759 - DNA, 17 bp, Arabidopsis thaliana
cagtcggaacatgtaag

SEQ ID NO: 67760 - DNA, 17 bp, Arabidopsis thaliana
cagtcggagatcaggct

SEQ ID NO: 67761 - DNA, 17 bp, Arabidopsis thaliana
cagtcggatattcgctt

SEQ ID NO: 67762 - DNA, 17 bp, Arabidopsis thaliana
cagtcggattccccttg

SEQ ID NO: 67763 - DNA, 17 bp, Arabidopsis thaliana
cagtcggcccaccagtc

SEQ ID NO: 67764 - DNA, 17 bp, Arabidopsis thaliana
cagtcggcgaaggtagc

SEQ ID NO: 67765 - DNA, 17 bp, Arabidopsis thaliana
cagtcggcggcggccag

SEQ ID NO: 67766 - DNA, 17 bp, Arabidopsis thaliana
cagtcgggggcattcgt

SEQ ID NO: 67767 - DNA, 17 bp, Arabidopsis thaliana
cagtcgggtgcactacg

SEQ ID NO: 67768 - DNA, 17 bp, Arabidopsis thaliana
cagtcggttttgaggat

SEQ ID NO: 67769 - DNA, 17 bp, Arabidopsis thaliana
cagtcgtcaagagacac

SEQ ID NO: 67770 - DNA, 17 bp, Arabidopsis thaliana
cagtcgtcagccgaaga

SEQ ID NO: 67771 - DNA, 17 bp, Arabidopsis thaliana
cagtcgtcatcttcacc

SEQ ID NO: 67772 - DNA, 17 bp, Arabidopsis thaliana
cagtcgtctattggcag

SEQ ID NO: 67773 - DNA, 17 bp, Arabidopsis thaliana
cagtcgtgatttagacc

SEQ ID NO: 67774 - DNA, 17 bp, Arabidopsis thaliana
cagtcgtgtgtccgccc

SEQ ID NO: 67775 - DNA, 17 bp, Arabidopsis thaliana
cagtcgtgtgtgcgtca

SEQ ID NO: 67776 - DNA, 17 bp, Arabidopsis thaliana
cagtcgttagcgattcc

SEQ ID NO: 67777 - DNA, 17 bp, Arabidopsis thaliana
cagtctaaggccctgtt

SEQ ID NO: 67778 - DNA, 17 bp, Arabidopsis thaliana
cagtctaattcgtaatt

SEQ ID NO: 67779 - DNA, 17 bp, Arabidopsis thaliana
cagtctaccatcattgt

SEQ ID NO: 67780 - DNA, 17 bp, Arabidopsis thaliana
cagtctagattctgtgt

SEQ ID NO: 67781 - DNA, 17 bp, Arabidopsis thaliana
cagtctatccagtttcg

SEQ ID NO: 67782 - DNA, 17 bp, Arabidopsis thaliana
cagtctcactccctttc

SEQ ID NO: 67783 - DNA, 17 bp, Arabidopsis thaliana
cagtctcactcctcttt

SEQ ID NO: 67784 - DNA, 17 bp, Arabidopsis thaliana
cagtctcactctctttc

SEQ ID NO: 67785 - DNA, 17 bp, Arabidopsis thaliana
cagtctcaggtagacag

SEQ ID NO: 67786 - DNA, 17 bp, Arabidopsis thaliana
cagtctccaaggtgaac

SEQ ID NO: 67787 - DNA, 17 bp, Arabidopsis thaliana
cagtctccttggctatc

SEQ ID NO: 67788 - DNA, 17 bp, Arabidopsis thaliana
cagtctctctggtagct

SEQ ID NO: 67789 - DNA, 17 bp, Arabidopsis thaliana
cagtctctttgtgcaac

SEQ ID NO: 67790 - DNA, 17 bp, Arabidopsis thaliana
cagtctgacatggagag

SEQ ID NO: 67791 - DNA, 17 bp, Arabidopsis thaliana
cagtctgaggaggtgtg

SEQ ID NO: 67792 - DNA, 17 bp, Arabidopsis thaliana
cagtctgattcagtctc

SEQ ID NO: 67793 - DNA, 17 bp, Arabidopsis thaliana
cagtctgcaaatcgacc

SEQ ID NO: 67794 - DNA, 17 bp, Arabidopsis thaliana
cagtctgcctgggtgtc

SEQ ID NO: 67795 - DNA, 17 bp, Arabidopsis thaliana
cagtctgctttgttgtt

SEQ ID NO: 67796 - DNA, 17 bp, Arabidopsis thaliana
cagtctggaatgatgac

SEQ ID NO: 67797 - DNA, 17 bp, Arabidopsis thaliana
cagtctgggcatggatg

SEQ ID NO: 67798 - DNA, 17 bp, Arabidopsis thaliana
cagtctggtgagcggtc

SEQ ID NO: 67799 - DNA, 17 bp, Arabidopsis thaliana
cagtctggtgtcctagg

SEQ ID NO: 67800 - DNA, 17 bp, Arabidopsis thaliana
cagtctgtaggttgcag

SEQ ID NO: 67801 - DNA, 17 bp, Arabidopsis thaliana
cagtcttcaagatttag

SEQ ID NO: 67802 - DNA, 17 bp, Arabidopsis thaliana
cagtcttcccaccggcc

SEQ ID NO: 67803 - DNA, 17 bp, Arabidopsis thaliana
cagtcttctttcggcca

SEQ ID NO: 67804 - DNA, 17 bp, Arabidopsis thaliana
cagtcttgagcgtctgg

SEQ ID NO: 67805 - DNA, 17 bp, Arabidopsis thaliana
cagtctttgatcattgt

SEQ ID NO: 67806 - DNA, 17 bp, Arabidopsis thaliana
cagtctttggcgatgga

SEQ ID NO: 67807 - DNA, 17 bp, Arabidopsis thaliana
cagtcttttgtctgggg

SEQ ID NO: 67808 - DNA, 17 bp, Arabidopsis thaliana
cagtgaaagtggaacgt

SEQ ID NO: 67809 - DNA, 17 bp, Arabidopsis thaliana
cagtgaagaagacgatg

SEQ ID NO: 67810 - DNA, 17 bp, Arabidopsis thaliana
cagtgaagaatcatctg

SEQ ID NO: 67811 - DNA, 17 bp, Arabidopsis thaliana
cagtgaagcttcatagg

SEQ ID NO: 67812 - DNA, 17 bp, Arabidopsis thaliana
cagtgaattcaaggcct

SEQ ID NO: 67813 - DNA, 17 bp, Arabidopsis thaliana
cagtgacagatttggtt

SEQ ID NO: 67814 - DNA, 17 bp, Arabidopsis thaliana
cagtgacagccattgta

SEQ ID NO: 67815 - DNA, 17 bp, Arabidopsis thaliana
cagtgacattcttgact

SEQ ID NO: 67816 - DNA, 17 bp, Arabidopsis thaliana
cagtgaccacgttggtg

SEQ ID NO: 67817 - DNA, 17 bp, Arabidopsis thaliana
cagtgaccaggcccggg

SEQ ID NO: 67818 - DNA, 17 bp, Arabidopsis thaliana
cagtgacctggtctacg

SEQ ID NO: 67819 - DNA, 17 bp, Arabidopsis thaliana
cagtgacgtggcttctt

SEQ ID NO: 67820 - DNA, 17 bp, Arabidopsis thaliana
cagtgactaattcagcc

SEQ ID NO: 67821 - DNA, 17 bp, Arabidopsis thaliana
cagtgactactttgcca

SEQ ID NO: 67822 - DNA, 17 bp, Arabidopsis thaliana
cagtgactcagaaggta

SEQ ID NO: 67823 - DNA, 17 bp, Arabidopsis thaliana
cagtgactggttgatcg

SEQ ID NO: 67824 - DNA, 17 bp, Arabidopsis thaliana
cagtgagacggtggggg

SEQ ID NO: 67825 - DNA, 17 bp, Arabidopsis thaliana
cagtgagagctgggacg

SEQ ID NO: 67826 - DNA, 17 bp, Arabidopsis thaliana
cagtgagagttcaaagt

SEQ ID NO: 67827 - DNA, 17 bp, Arabidopsis thaliana
cagtgagccgaaagttg

SEQ ID NO: 67828 - DNA, 17 bp, Arabidopsis thaliana
cagtgaggcacttttca

SEQ ID NO: 67829 - DNA, 17 bp, Arabidopsis thaliana
cagtgagtccagcggta

SEQ ID NO: 67830 - DNA, 17 bp, Arabidopsis thaliana
cagtgatccagagcagt

SEQ ID NO: 67831 - DNA, 17 bp, Arabidopsis thaliana
cagtgatcgccctgaag

SEQ ID NO: 67832 - DNA, 17 bp, Arabidopsis thaliana
cagtgatctatgtgtga

SEQ ID NO: 67833 - DNA, 17 bp, Arabidopsis thaliana
cagtgatgatgaccgca

SEQ ID NO: 67834 - DNA, 17 bp, Arabidopsis thaliana
cagtgatgtatgcagct

SEQ ID NO: 67835 - DNA, 17 bp, Arabidopsis thaliana
cagtgatttctgcagtt

SEQ ID NO: 67836 - DNA, 17 bp, Arabidopsis thaliana
cagtgatttgttacagc

SEQ ID NO: 67837 - DNA, 17 bp, Arabidopsis thaliana
cagtgattttgcaaact

SEQ ID NO: 67838 - DNA, 17 bp, Arabidopsis thaliana
cagtgcaaccactacgg

SEQ ID NO: 67839 - DNA, 17 bp, Arabidopsis thaliana
cagtgcaaggcgtttga

SEQ ID NO: 67840 - DNA, 17 bp, Arabidopsis thaliana
cagtgcaggtttcctaa

SEQ ID NO: 67841 - DNA, 17 bp, Arabidopsis thaliana
cagtgccaaaactgctt

SEQ ID NO: 67842 - DNA, 17 bp, Arabidopsis thaliana
cagtgccgataaacctc

SEQ ID NO: 67843 - DNA, 17 bp, Arabidopsis thaliana
cagtgccggttgggtct

SEQ ID NO: 67844 - DNA, 17 bp, Arabidopsis thaliana
cagtgcctgcagggcgt

SEQ ID NO: 67845 - DNA, 17 bp, Arabidopsis thaliana
cagtgcggctagtgcgt

SEQ ID NO: 67846 - DNA, 17 bp, Arabidopsis thaliana
cagtgcggtgacgatac

SEQ ID NO: 67847 - DNA, 17 bp, Arabidopsis thaliana
cagtgcggttttaggtg

SEQ ID NO: 67848 - DNA, 17 bp, Arabidopsis thaliana
cagtgcggttttgggtg

SEQ ID NO: 67849 - DNA, 17 bp, Arabidopsis thaliana
cagtgcggttttgtgta

SEQ ID NO: 67850 - DNA, 17 bp, Arabidopsis thaliana
cagtgcggttttgtgtt

SEQ ID NO: 67851 - DNA, 17 bp, Arabidopsis thaliana
cagtgcgtcacaaactt

SEQ ID NO: 67852 - DNA, 17 bp, Arabidopsis thaliana
cagtgcgtcagccacct

SEQ ID NO: 67853 - DNA, 17 bp, Arabidopsis thaliana
cagtgcgtctgatcttg

SEQ ID NO: 67854 - DNA, 17 bp, Arabidopsis thaliana
cagtgctttcgtcttta

SEQ ID NO: 67855 - DNA, 17 bp, Arabidopsis thaliana
cagtggacacggattta

SEQ ID NO: 67856 - DNA, 17 bp, Arabidopsis thaliana
cagtggactaactgcgg

SEQ ID NO: 67857 - DNA, 17 bp, Arabidopsis thaliana
cagtggactgtgtgatt

SEQ ID NO: 67858 - DNA, 17 bp, Arabidopsis thaliana
cagtggagcaagcctgt

SEQ ID NO: 67859 - DNA, 17 bp, Arabidopsis thaliana
cagtggagcgatttgtc

SEQ ID NO: 67860 - DNA, 17 bp, Arabidopsis thaliana
cagtggaggctccagtt

SEQ ID NO: 67861 - DNA, 17 bp, Arabidopsis thaliana
cagtggatgttgtggaa

SEQ ID NO: 67862 - DNA, 17 bp, Arabidopsis thaliana
cagtggattatgtctcc

SEQ ID NO: 67863 - DNA, 17 bp, Arabidopsis thaliana
cagtggattgtgaattc

SEQ ID NO: 67864 - DNA, 17 bp, Arabidopsis thaliana
cagtggcagacaagctt

SEQ ID NO: 67865 - DNA, 17 bp, Arabidopsis thaliana
cagtggccacgtgtgcg

SEQ ID NO: 67866 - DNA, 17 bp, Arabidopsis thaliana
cagtggccctagacgga

SEQ ID NO: 67867 - DNA, 17 bp, Arabidopsis thaliana
cagtggcgaatcctcca

SEQ ID NO: 67868 - DNA, 17 bp, Arabidopsis thaliana
cagtggcgctagaagga

SEQ ID NO: 67869 - DNA, 17 bp, Arabidopsis thaliana
cagtggcggacgggtga

SEQ ID NO: 67870 - DNA, 17 bp, Arabidopsis thaliana
cagtggcggatatctcc

SEQ ID NO: 67871 - DNA, 17 bp, Arabidopsis thaliana
cagtggctttagttgac

SEQ ID NO: 67872 - DNA, 17 bp, Arabidopsis thaliana
cagtgggcggaaaggat

SEQ ID NO: 67873 - DNA, 17 bp, Arabidopsis thaliana
cagtgggctgcgccact

SEQ ID NO: 67874 - DNA, 17 bp, Arabidopsis thaliana
cagtggggtttctcata

SEQ ID NO: 67875 - DNA, 17 bp, Arabidopsis thaliana
cagtggtggtttgctac

SEQ ID NO: 67876 - DNA, 17 bp, Arabidopsis thaliana
cagtgtaattgtgacac

SEQ ID NO: 67877 - DNA, 17 bp, Arabidopsis thaliana
cagtgtaattgtgatac

SEQ ID NO: 67878 - DNA, 17 bp, Arabidopsis thaliana
cagtgtacctctcgaat

SEQ ID NO: 67879 - DNA, 17 bp, Arabidopsis thaliana
cagtgtacgcgtcaact

SEQ ID NO: 67880 - DNA, 17 bp, Arabidopsis thaliana
cagtgtacgcgtcaatt

SEQ ID NO: 67881 - DNA, 17 bp, Arabidopsis thaliana
cagtgtactactatcgg

SEQ ID NO: 67882 - DNA, 17 bp, Arabidopsis thaliana
cagtgtcaccagggcaa

SEQ ID NO: 67883 - DNA, 17 bp, Arabidopsis thaliana
cagtgtcagaacgaggg

SEQ ID NO: 67884 - DNA, 17 bp, Arabidopsis thaliana
cagtgtcatctggggtc

SEQ ID NO: 67885 - DNA, 17 bp, Arabidopsis thaliana
cagtgtcgctacttttg

SEQ ID NO: 67886 - DNA, 17 bp, Arabidopsis thaliana
cagtgtcggtctaacgt

SEQ ID NO: 67887 - DNA, 17 bp, Arabidopsis thaliana
cagtgtcgtgtcgtgcc

SEQ ID NO: 67888 - DNA, 17 bp, Arabidopsis thaliana
cagtgtctgttttacca

SEQ ID NO: 67889 - DNA, 17 bp, Arabidopsis thaliana
cagtgtgacgaaaagct

SEQ ID NO: 67890 - DNA, 17 bp, Arabidopsis thaliana
cagtgtgctactgtctg

SEQ ID NO: 67891 - DNA, 17 bp, Arabidopsis thaliana
cagtgtggaagctaagt

SEQ ID NO: 67892 - DNA, 17 bp, Arabidopsis thaliana
cagtgtggacttgttac

SEQ ID NO: 67893 - DNA, 17 bp, Arabidopsis thaliana
cagtgtggtggtccatt

SEQ ID NO: 67894 - DNA, 17 bp, Arabidopsis thaliana
cagtgtgtccacaaaac

SEQ ID NO: 67895 - DNA, 17 bp, Arabidopsis thaliana
cagtgttaatgtgccca

SEQ ID NO: 67896 - DNA, 17 bp, Arabidopsis thaliana
cagtgttaattgagttg

SEQ ID NO: 67897 - DNA, 17 bp, Arabidopsis thaliana
cagtgttacaccactgt

SEQ ID NO: 67898 - DNA, 17 bp, Arabidopsis thaliana
cagtgttaccgttgccg

SEQ ID NO: 67899 - DNA, 17 bp, Arabidopsis thaliana
cagtgttactggttctg

SEQ ID NO: 67900 - DNA, 17 bp, Arabidopsis thaliana
cagtgttcagacggtgg

SEQ ID NO: 67901 - DNA, 17 bp, Arabidopsis thaliana
cagtgttccataagatt

SEQ ID NO: 67902 - DNA, 17 bp, Arabidopsis thaliana
cagtgttccgtctctta

SEQ ID NO: 67903 - DNA, 17 bp, Arabidopsis thaliana
cagtgttccgtctttat

SEQ ID NO: 67904 - DNA, 17 bp, Arabidopsis thaliana
cagtgttcgataagatt

SEQ ID NO: 67905 - DNA, 17 bp, Arabidopsis thaliana
cagtgttctgcgctgca

SEQ ID NO: 67906 - DNA, 17 bp, Arabidopsis thaliana
cagtgttctgcgctgcc

SEQ ID NO: 67907 - DNA, 17 bp, Arabidopsis thaliana
cagtgttgagatctcct

SEQ ID NO: 67908 - DNA, 17 bp, Arabidopsis thaliana
cagtgttggtgacaatg

SEQ ID NO: 67909 - DNA, 17 bp, Arabidopsis thaliana
cagtgttgtctggctcg

SEQ ID NO: 67910 - DNA, 17 bp, Arabidopsis thaliana
cagtgttgtggcattta

SEQ ID NO: 67911 - DNA, 17 bp, Arabidopsis thaliana
cagtgtttacatcgcga

SEQ ID NO: 67912 - DNA, 17 bp, Arabidopsis thaliana
cagtgtttgtccttttc

SEQ ID NO: 67913 - DNA, 17 bp, Arabidopsis thaliana
cagttaaccacagcttg

SEQ ID NO: 67914 - DNA, 17 bp, Arabidopsis thaliana
cagttaagcgtgcttgg

SEQ ID NO: 67915 - DNA, 17 bp, Arabidopsis thaliana
cagttaaggatgacttg

SEQ ID NO: 67916 - DNA, 17 bp, Arabidopsis thaliana
cagttaagtgtgcttgg

SEQ ID NO: 67917 - DNA, 17 bp, Arabidopsis thaliana
cagttaatcctacggga

SEQ ID NO: 67918 - DNA, 17 bp, Arabidopsis thaliana
cagttacagtccaacca

SEQ ID NO: 67919 - DNA, 17 bp, Arabidopsis thaliana
cagttaccacagttaaa

SEQ ID NO: 67920 - DNA, 17 bp, Arabidopsis thaliana
cagttaccacgcagttg

SEQ ID NO: 67921 - DNA, 17 bp, Arabidopsis thaliana
cagttacggctgcttgt

SEQ ID NO: 67922 - DNA, 17 bp, Arabidopsis thaliana
cagttactaattcatga

SEQ ID NO: 67923 - DNA, 17 bp, Arabidopsis thaliana
cagttactgcgtttgta

SEQ ID NO: 67924 - DNA, 17 bp, Arabidopsis thaliana
cagttacttcacgaaat

SEQ ID NO: 67925 - DNA, 17 bp, Arabidopsis thaliana
cagttagcacatattgc

SEQ ID NO: 67926 - DNA, 17 bp, Arabidopsis thaliana
cagttaggcgcatcctg

SEQ ID NO: 67927 - DNA, 17 bp, Arabidopsis thaliana
cagttagtctgcagcgg

SEQ ID NO: 67928 - DNA, 17 bp, Arabidopsis thaliana
cagttagtgcggaacag

SEQ ID NO: 67929 - DNA, 17 bp, Arabidopsis thaliana
cagttatagtcttagat

SEQ ID NO: 67930 - DNA, 17 bp, Arabidopsis thaliana
cagttatagtttgtttg

SEQ ID NO: 67931 - DNA, 17 bp, Arabidopsis thaliana
cagttatgtatttggga

SEQ ID NO: 67932 - DNA, 17 bp, Arabidopsis thaliana
cagttatgtttgactgt

SEQ ID NO: 67933 - DNA, 17 bp, Arabidopsis thaliana
cagttattagcgtttga

SEQ ID NO: 67934 - DNA, 17 bp, Arabidopsis thaliana
cagttcaaatcccactc

SEQ ID NO: 67935 - DNA, 17 bp, Arabidopsis thaliana
cagttcaaatccgggtc

SEQ ID NO: 67936 - DNA, 17 bp, Arabidopsis thaliana
cagttcaaatccgggtg

SEQ ID NO: 67937 - DNA, 17 bp, Arabidopsis thaliana
cagttcaaatctggttc

SEQ ID NO: 67938 - DNA, 17 bp, Arabidopsis thaliana
cagttcaaccggttagc

SEQ ID NO: 67939 - DNA, 17 bp, Arabidopsis thaliana
cagttcaagaagccctg

SEQ ID NO: 67940 - DNA, 17 bp, Arabidopsis thaliana
cagttcaattcccttag

SEQ ID NO: 67941 - DNA, 17 bp, Arabidopsis thaliana
cagttcaccacttggac

SEQ ID NO: 67942 - DNA, 17 bp, Arabidopsis thaliana
cagttcactggttcacc

SEQ ID NO: 67943 - DNA, 17 bp, Arabidopsis thaliana
cagttcagtttgcgcgc

SEQ ID NO: 67944 - DNA, 17 bp, Arabidopsis thaliana
cagttcatcgtcgccga

SEQ ID NO: 67945 - DNA, 17 bp, Arabidopsis thaliana
cagttcattcccgggca

SEQ ID NO: 67946 - DNA, 17 bp, Arabidopsis thaliana
cagttcattcctgggca

SEQ ID NO: 67947 - DNA, 17 bp, Arabidopsis thaliana
cagttcatttcgacggt

SEQ ID NO: 67948 - DNA, 17 bp, Arabidopsis thaliana
cagttcatttgtcccac

SEQ ID NO: 67949 - DNA, 17 bp, Arabidopsis thaliana
cagttcattttcatgtt

SEQ ID NO: 67950 - DNA, 17 bp, Arabidopsis thaliana
cagttccaaaatcttgt

SEQ ID NO: 67951 - DNA, 17 bp, Arabidopsis thaliana
cagttccaagcatgagc

SEQ ID NO: 67952 - DNA, 17 bp, Arabidopsis thaliana
cagttccagctactgcg

SEQ ID NO: 67953 - DNA, 17 bp, Arabidopsis thaliana
cagttccaggagttttg

SEQ ID NO: 67954 - DNA, 17 bp, Arabidopsis thaliana
cagttcccagactcttg

SEQ ID NO: 67955 - DNA, 17 bp, Arabidopsis thaliana
cagttcccggctggtgc

SEQ ID NO: 67956 - DNA, 17 bp, Arabidopsis thaliana
cagttccgaacccgtcg

SEQ ID NO: 67957 - DNA, 17 bp, Arabidopsis thaliana
cagttccggtctttttt

SEQ ID NO: 67958 - DNA, 17 bp, Arabidopsis thaliana
cagttccgttacaagtg

SEQ ID NO: 67959 - DNA, 17 bp, Arabidopsis thaliana
cagttcctgggcagcac

SEQ ID NO: 67960 - DNA, 17 bp, Arabidopsis thaliana
cagttcgaatccgccaa

SEQ ID NO: 67961 - DNA, 17 bp, Arabidopsis thaliana
cagttcgaatgacgctt

SEQ ID NO: 67962 - DNA, 17 bp, Arabidopsis thaliana
cagttcgacggataagc

SEQ ID NO: 67963 - DNA, 17 bp, Arabidopsis thaliana
cagttcgagcctgatta

SEQ ID NO: 67964 - DNA, 17 bp, Arabidopsis thaliana
cagttcgagtgacgctt

SEQ ID NO: 67965 - DNA, 17 bp, Arabidopsis thaliana
cagttcgatcctgggca

SEQ ID NO: 67966 - DNA, 17 bp, Arabidopsis thaliana
cagttcggattgcaggc

SEQ ID NO: 67967 - DNA, 17 bp, Arabidopsis thaliana
cagttcgggtaaaattt

SEQ ID NO: 67968 - DNA, 17 bp, Arabidopsis thaliana
cagttcggtccatatcc

SEQ ID NO: 67969 - DNA, 17 bp, Arabidopsis thaliana
cagttcggtcctgggca

SEQ ID NO: 67970 - DNA, 17 bp, Arabidopsis thaliana
cagttcggtgcggtata

SEQ ID NO: 67971 - DNA, 17 bp, Arabidopsis thaliana
cagttcgtcctgggcag

SEQ ID NO: 67972 - DNA, 17 bp, Arabidopsis thaliana
cagttcgttcctgggca

SEQ ID NO: 67973 - DNA, 17 bp, Arabidopsis thaliana
cagttcgttttgttctc

SEQ ID NO: 67974 - DNA, 17 bp, Arabidopsis thaliana
cagttctaaccttgtgt

SEQ ID NO: 67975 - DNA, 17 bp, Arabidopsis thaliana
cagttctacctcatctt

SEQ ID NO: 67976 - DNA, 17 bp, Arabidopsis thaliana
cagttctacctgatctt

SEQ ID NO: 67977 - DNA, 17 bp, Arabidopsis thaliana
cagttctactcggttgt

SEQ ID NO: 67978 - DNA, 17 bp, Arabidopsis thaliana
cagttctcggttgccag

SEQ ID NO: 67979 - DNA, 17 bp, Arabidopsis thaliana
cagttctcttgggattc

SEQ ID NO: 67980 - DNA, 17 bp, Arabidopsis thaliana
cagttctctttattctg

SEQ ID NO: 67981 - DNA, 17 bp, Arabidopsis thaliana
cagttctctttattctt

SEQ ID NO: 67982 - DNA, 17 bp, Arabidopsis thaliana
cagttctgcgattggaa

SEQ ID NO: 67983 - DNA, 17 bp, Arabidopsis thaliana
cagttctgtagcaggca

SEQ ID NO: 67984 - DNA, 17 bp, Arabidopsis thaliana
cagttctgtagctaacg

SEQ ID NO: 67985 - DNA, 17 bp, Arabidopsis thaliana
cagttcttacgccttta

SEQ ID NO: 67986 - DNA, 17 bp, Arabidopsis thaliana
cagttcttcggttatgt

SEQ ID NO: 67987 - DNA, 17 bp, Arabidopsis thaliana
cagttctttgacctttt

SEQ ID NO: 67988 - DNA, 17 bp, Arabidopsis thaliana
cagttctttgactcttt

SEQ ID NO: 67989 - DNA, 17 bp, Arabidopsis thaliana
cagttctttgacttttt

SEQ ID NO: 67990 - DNA, 17 bp, Arabidopsis thaliana
cagttcttttgttgttg

SEQ ID NO: 67991 - DNA, 17 bp, Arabidopsis thaliana
cagttgaaccgcacgtc

SEQ ID NO: 67992 - DNA, 17 bp, Arabidopsis thaliana
cagttgaatgcgatgtc

SEQ ID NO: 67993 - DNA, 17 bp, Arabidopsis thaliana
cagttgacagctcgatt

SEQ ID NO: 67994 - DNA, 17 bp, Arabidopsis thaliana
cagttgaccactccgcc

SEQ ID NO: 67995 - DNA, 17 bp, Arabidopsis thaliana
cagttgaccagtccgcc

SEQ ID NO: 67996 - DNA, 17 bp, Arabidopsis thaliana
cagttgacgatgaagga

SEQ ID NO: 67997 - DNA, 17 bp, Arabidopsis thaliana
cagttgactctagtccg

SEQ ID NO: 67998 - DNA, 17 bp, Arabidopsis thaliana
cagttgactgattcatc

SEQ ID NO: 67999 - DNA, 17 bp, Arabidopsis thaliana
cagttgacttaacgacg

SEQ ID NO: 68000 - DNA, 17 bp, Arabidopsis thaliana
cagttgacttcggcgtt

SEQ ID NO: 68001 - DNA, 17 bp, Arabidopsis thaliana
cagttgagtgctatgat

SEQ ID NO: 68002 - DNA, 17 bp, Arabidopsis thaliana
cagttgatcctgggcag

SEQ ID NO: 68003 - DNA, 17 bp, Arabidopsis thaliana
cagttgatggtggccgc

SEQ ID NO: 68004 - DNA, 17 bp, Arabidopsis thaliana
cagttgcatttgtgatc

SEQ ID NO: 68005 - DNA, 17 bp, Arabidopsis thaliana
cagttgccgtagaccag

SEQ ID NO: 68006 - DNA, 17 bp, Arabidopsis thaliana
cagttgcggcttggttg

SEQ ID NO: 68007 - DNA, 17 bp, Arabidopsis thaliana
cagttgcggtttaagtt

SEQ ID NO: 68008 - DNA, 17 bp, Arabidopsis thaliana
cagttgctaacgttatt

SEQ ID NO: 68009 - DNA, 17 bp, Arabidopsis thaliana
cagttgctgctggtgct

SEQ ID NO: 68010 - DNA, 17 bp, Arabidopsis thaliana
cagttgcttaggctctt

SEQ ID NO: 68011 - DNA, 17 bp, Arabidopsis thaliana
cagttggcaagctaaaa

SEQ ID NO: 68012 - DNA, 17 bp, Arabidopsis thaliana
cagttgggtcgaggttg

SEQ ID NO: 68013 - DNA, 17 bp, Arabidopsis thaliana
cagttggtgcatggctg

SEQ ID NO: 68014 - DNA, 17 bp, Arabidopsis thaliana
cagttggttcacgaaag

SEQ ID NO: 68015 - DNA, 17 bp, Arabidopsis thaliana
cagttggttgtttgtta

SEQ ID NO: 68016 - DNA, 17 bp, Arabidopsis thaliana
cagttgtaagtagccct

SEQ ID NO: 68017 - DNA, 17 bp, Arabidopsis thaliana
cagttgtaagtccgaca

SEQ ID NO: 68018 - DNA, 17 bp, Arabidopsis thaliana
cagttgtctcatttcct

SEQ ID NO: 68019 - DNA, 17 bp, Arabidopsis thaliana
cagttgtctttgcccca

SEQ ID NO: 68020 - DNA, 17 bp, Arabidopsis thaliana
cagttgtgcttctgacg

SEQ ID NO: 68021 - DNA, 17 bp, Arabidopsis thaliana
cagttgtgtgaggtctt

SEQ ID NO: 68022 - DNA, 17 bp, Arabidopsis thaliana
cagttgtgtttggtgct

SEQ ID NO: 68023 - DNA, 17 bp, Arabidopsis thaliana
cagttgttcgtttgcat

SEQ ID NO: 68024 - DNA, 17 bp, Arabidopsis thaliana
cagttgttgggcttaac

SEQ ID NO: 68025 - DNA, 17 bp, Arabidopsis thaliana
cagttgtttgactcttt

SEQ ID NO: 68026 - DNA, 17 bp, Arabidopsis thaliana
cagtttaatggttctgg

SEQ ID NO: 68027 - DNA, 17 bp, Arabidopsis thaliana
cagtttacagctattga

SEQ ID NO: 68028 - DNA, 17 bp, Arabidopsis thaliana
cagtttagactttcgct

SEQ ID NO: 68029 - DNA, 17 bp, Arabidopsis thaliana
cagtttagtggcattgt

SEQ ID NO: 68030 - DNA, 17 bp, Arabidopsis thaliana
cagtttagttagtcagg

SEQ ID NO: 68031 - DNA, 17 bp, Arabidopsis thaliana
cagtttatggaggatcc

SEQ ID NO: 68032 - DNA, 17 bp, Arabidopsis thaliana
cagtttatggggttggg

SEQ ID NO: 68033 - DNA, 17 bp, Arabidopsis thaliana
cagtttcaaggcatgca

SEQ ID NO: 68034 - DNA, 17 bp, Arabidopsis thaliana
cagtttcaccagatttg

SEQ ID NO: 68035 - DNA, 17 bp, Arabidopsis thaliana
cagtttcagcattgtac

SEQ ID NO: 68036 - DNA, 17 bp, Arabidopsis thaliana
cagtttcagcgggtaag

SEQ ID NO: 68037 - DNA, 17 bp, Arabidopsis thaliana
cagtttcagcgggtaat

SEQ ID NO: 68038 - DNA, 17 bp, Arabidopsis thaliana
cagtttcagcgtgtaag

SEQ ID NO: 68039 - DNA, 17 bp, Arabidopsis thaliana
cagtttcagttccggcc

SEQ ID NO: 68040 - DNA, 17 bp, Arabidopsis thaliana
cagtttcagttctggcc

SEQ ID NO: 68041 - DNA, 17 bp, Arabidopsis thaliana
cagtttcagtttggtcc

SEQ ID NO: 68042 - DNA, 17 bp, Arabidopsis thaliana
cagtttcagtttggttc

SEQ ID NO: 68043 - DNA, 17 bp, Arabidopsis thaliana
cagtttccaattacatg

SEQ ID NO: 68044 - DNA, 17 bp, Arabidopsis thaliana
cagtttccagttacatg

SEQ ID NO: 68045 - DNA, 17 bp, Arabidopsis thaliana
cagtttccgccaaactt

SEQ ID NO: 68046 - DNA, 17 bp, Arabidopsis thaliana
cagtttccgtctcttat

SEQ ID NO: 68047 - DNA, 17 bp, Arabidopsis thaliana
cagtttccgtcttctat

SEQ ID NO: 68048 - DNA, 17 bp, Arabidopsis thaliana
cagtttcgcaactttgc

SEQ ID NO: 68049 - DNA, 17 bp, Arabidopsis thaliana
cagtttcgtctagggtt

SEQ ID NO: 68050 - DNA, 17 bp, Arabidopsis thaliana
cagtttctatggggcgt

SEQ ID NO: 68051 - DNA, 17 bp, Arabidopsis thaliana
cagtttctgctgctggc

SEQ ID NO: 68052 - DNA, 17 bp, Arabidopsis thaliana
cagtttctgctgctgta

SEQ ID NO: 68053 - DNA, 17 bp, Arabidopsis thaliana
cagtttctgcttctttg

SEQ ID NO: 68054 - DNA, 17 bp, Arabidopsis thaliana
cagtttcttcgattcat

SEQ ID NO: 68055 - DNA, 17 bp, Arabidopsis thaliana
cagtttctttggctttc

SEQ ID NO: 68056 - DNA, 17 bp, Arabidopsis thaliana
cagtttgaagttaccgg

SEQ ID NO: 68057 - DNA, 17 bp, Arabidopsis thaliana
cagtttgactggggcgg

SEQ ID NO: 68058 - DNA, 17 bp, Arabidopsis thaliana
cagtttgacttttgggg

SEQ ID NO: 68059 - DNA, 17 bp, Arabidopsis thaliana
cagtttgagcctccaat

SEQ ID NO: 68060 - DNA, 17 bp, Arabidopsis thaliana
cagtttgagtagattcc

SEQ ID NO: 68061 - DNA, 17 bp, Arabidopsis thaliana
cagtttgccgagccttt

SEQ ID NO: 68062 - DNA, 17 bp, Arabidopsis thaliana
cagtttgccgagctttt

SEQ ID NO: 68063 - DNA, 17 bp, Arabidopsis thaliana
cagtttgccttcgcttc

SEQ ID NO: 68064 - DNA, 17 bp, Arabidopsis thaliana
cagtttgcggttgtgtc

SEQ ID NO: 68065 - DNA, 17 bp, Arabidopsis thaliana
cagtttgctcgcggtgg

SEQ ID NO: 68066 - DNA, 17 bp, Arabidopsis thaliana
cagtttgcttcaaggtt

SEQ ID NO: 68067 - DNA, 17 bp, Arabidopsis thaliana
cagtttgcttggcatga

SEQ ID NO: 68068 - DNA, 17 bp, Arabidopsis thaliana
cagtttggaagcttgcc

SEQ ID NO: 68069 - DNA, 17 bp, Arabidopsis thaliana
cagtttgggtcaactat

SEQ ID NO: 68070 - DNA, 17 bp, Arabidopsis thaliana
cagtttggtagagcggc

SEQ ID NO: 68071 - DNA, 17 bp, Arabidopsis thaliana
cagtttgtggtgcgaat

SEQ ID NO: 68072 - DNA, 17 bp, Arabidopsis thaliana
cagtttgtgttgtgacg

SEQ ID NO: 68073 - DNA, 17 bp, Arabidopsis thaliana
cagtttgttgcgttcca

SEQ ID NO: 68074 - DNA, 17 bp, Arabidopsis thaliana
cagtttgtttcgggcca

SEQ ID NO: 68075 - DNA, 17 bp, Arabidopsis thaliana
cagttttaagatccacc

SEQ ID NO: 68076 - DNA, 17 bp, Arabidopsis thaliana
cagttttacaaagtgtt

SEQ ID NO: 68077 - DNA, 17 bp, Arabidopsis thaliana
cagttttaccctcactc

SEQ ID NO: 68078 - DNA, 17 bp, Arabidopsis thaliana
cagttttacttttgaga

SEQ ID NO: 68079 - DNA, 17 bp, Arabidopsis thaliana
cagttttaggccctgaa

SEQ ID NO: 68080 - DNA, 17 bp, Arabidopsis thaliana
cagttttagtaacaatt

SEQ ID NO: 68081 - DNA, 17 bp, Arabidopsis thaliana
cagttttcaattgtggc

SEQ ID NO: 68082 - DNA, 17 bp, Arabidopsis thaliana
cagttttcacctttgga

SEQ ID NO: 68083 - DNA, 17 bp, Arabidopsis thaliana
cagttttcaggtcaatg

SEQ ID NO: 68084 - DNA, 17 bp, Arabidopsis thaliana
cagttttgactgtctac

SEQ ID NO: 68085 - DNA, 17 bp, Arabidopsis thaliana
cagttttggaatgcgtt

SEQ ID NO: 68086 - DNA, 17 bp, Arabidopsis thaliana
cagttttggcgggacgg

SEQ ID NO: 68087 - DNA, 17 bp, Arabidopsis thaliana
cagttttgggtgcagtt

SEQ ID NO: 68088 - DNA, 17 bp, Arabidopsis thaliana
cagttttgggtgcggtg

SEQ ID NO: 68089 - DNA, 17 bp, Arabidopsis thaliana
cagttttgggtgcggtt

SEQ ID NO: 68090 - DNA, 17 bp, Arabidopsis thaliana
cagttttgtaagacacg

SEQ ID NO: 68091 - DNA, 17 bp, Arabidopsis thaliana
cagttttgtcgctaaga

SEQ ID NO: 68092 - DNA, 17 bp, Arabidopsis thaliana
cagtttttccgccaggg

SEQ ID NO: 68093 - DNA, 17 bp, Arabidopsis thaliana
cagtttttggtgcatag

SEQ ID NO: 68094 - DNA, 17 bp, Arabidopsis thaliana
cagtttttgtccttttc

SEQ ID NO: 68095 - DNA, 17 bp, Arabidopsis thaliana
cagtttttttacaggac

SEQ ID NO: 68096 - DNA, 17 bp, Arabidopsis thaliana
cagtttttttgtgaaag

SEQ ID NO: 68097 - DNA, 17 bp, Arabidopsis thaliana
cataaaaaattaaaaca

SEQ ID NO: 68098 - DNA, 17 bp, Arabidopsis thaliana
cataaaacttttcctct

SEQ ID NO: 68099 - DNA, 17 bp, Arabidopsis thaliana
cataaaacttttcttcc

SEQ ID NO: 68100 - DNA, 17 bp, Arabidopsis thaliana
cataaaatatcgaaacg

SEQ ID NO: 68101 - DNA, 17 bp, Arabidopsis thaliana
cataaacaatgccgacc

SEQ ID NO: 68102 - DNA, 17 bp, Arabidopsis thaliana
cataaacccatcaatat

SEQ ID NO: 68103 - DNA, 17 bp, Arabidopsis thaliana
cataaactgtgacttag

SEQ ID NO: 68104 - DNA, 17 bp, Arabidopsis thaliana
cataaacttggtccgca

SEQ ID NO: 68105 - DNA, 17 bp, Arabidopsis thaliana
cataaacttggtccgta

SEQ ID NO: 68106 - DNA, 17 bp, Arabidopsis thaliana
cataaagattcctcccg

SEQ ID NO: 68107 - DNA, 17 bp, Arabidopsis thaliana
cataaatgcaggtggcc

SEQ ID NO: 68108 - DNA, 17 bp, Arabidopsis thaliana
cataaattctggacttg

SEQ ID NO: 68109 - DNA, 17 bp, Arabidopsis thaliana
cataacaaaaatgagac

SEQ ID NO: 68110 - DNA, 17 bp, Arabidopsis thaliana
cataacaacgataatct

SEQ ID NO: 68111 - DNA, 17 bp, Arabidopsis thaliana
cataacacgtctagcgg

SEQ ID NO: 68112 - DNA, 17 bp, Arabidopsis thaliana
cataacagatagagccc

SEQ ID NO: 68113 - DNA, 17 bp, Arabidopsis thaliana
cataaccaggcaaccac

SEQ ID NO: 68114 - DNA, 17 bp, Arabidopsis thaliana
cataaccatccgtgtgt

SEQ ID NO: 68115 - DNA, 17 bp, Arabidopsis thaliana
cataacccaagctcata

SEQ ID NO: 68116 - DNA, 17 bp, Arabidopsis thaliana
cataacccggcatagta

SEQ ID NO: 68117 - DNA, 17 bp, Arabidopsis thaliana
cataacccgtgctatac

SEQ ID NO: 68118 - DNA, 17 bp, Arabidopsis thaliana
cataaccgtctcggctt

SEQ ID NO: 68119 - DNA, 17 bp, Arabidopsis thaliana
cataacctcttgtggat

SEQ ID NO: 68120 - DNA, 17 bp, Arabidopsis thaliana
cataaccttccgttttt

SEQ ID NO: 68121 - DNA, 17 bp, Arabidopsis thaliana
cataacctttcgttcag

SEQ ID NO: 68122 - DNA, 17 bp, Arabidopsis thaliana
cataacgacgtcatgct

SEQ ID NO: 68123 - DNA, 17 bp, Arabidopsis thaliana
cataacgtgttcgatac

SEQ ID NO: 68124 - DNA, 17 bp, Arabidopsis thaliana
cataactatgagtaggg

SEQ ID NO: 68125 - DNA, 17 bp, Arabidopsis thaliana
cataactatttcttccg

SEQ ID NO: 68126 - DNA, 17 bp, Arabidopsis thaliana
cataactcaagcttgtg

SEQ ID NO: 68127 - DNA, 17 bp, Arabidopsis thaliana
cataactcgaccgatcg

SEQ ID NO: 68128 - DNA, 17 bp, Arabidopsis thaliana
cataacttctaggctcg

SEQ ID NO: 68129 - DNA, 17 bp, Arabidopsis thaliana
cataacttctaggtttg

SEQ ID NO: 68130 - DNA, 17 bp, Arabidopsis thaliana
cataacttctcggtttt

SEQ ID NO: 68131 - DNA, 17 bp, Arabidopsis thaliana
cataacttggcaagcaa

SEQ ID NO: 68132 - DNA, 17 bp, Arabidopsis thaliana
cataacttgggacttac

SEQ ID NO: 68133 - DNA, 17 bp, Arabidopsis thaliana
cataactttgtagatgt

SEQ ID NO: 68134 - DNA, 17 bp, Arabidopsis thaliana
cataacttttagaccgt

SEQ ID NO: 68135 - DNA, 17 bp, Arabidopsis thaliana
cataagactaaactgtc

SEQ ID NO: 68136 - DNA, 17 bp, Arabidopsis thaliana
cataagattgtgccacg

SEQ ID NO: 68137 - DNA, 17 bp, Arabidopsis thaliana
cataagcagagtgatag

SEQ ID NO: 68138 - DNA, 17 bp, Arabidopsis thaliana
cataagccggcaaggaa

SEQ ID NO: 68139 - DNA, 17 bp, Arabidopsis thaliana
cataagcgcttgcatct

SEQ ID NO: 68140 - DNA, 17 bp, Arabidopsis thaliana
cataaggctcgttgatt

SEQ ID NO: 68141 - DNA, 17 bp, Arabidopsis thaliana
cataaggtgccagcgga

SEQ ID NO: 68142 - DNA, 17 bp, Arabidopsis thaliana
cataaggttctaaggcg

SEQ ID NO: 68143 - DNA, 17 bp, Arabidopsis thaliana
cataaggtttctatgct

SEQ ID NO: 68144 - DNA, 17 bp, Arabidopsis thaliana
cataagtcggggtttgt

SEQ ID NO: 68145 - DNA, 17 bp, Arabidopsis thaliana
cataagtgactacatcg

SEQ ID NO: 68146 - DNA, 17 bp, Arabidopsis thaliana
cataatacgtacgaagg

SEQ ID NO: 68147 - DNA, 17 bp, Arabidopsis thaliana
cataatccgtccagtgt

SEQ ID NO: 68148 - DNA, 17 bp, Arabidopsis thaliana
cataatcgttcctctgg

SEQ ID NO: 68149 - DNA, 17 bp, Arabidopsis thaliana
cataatcgttccttcag

SEQ ID NO: 68150 - DNA, 17 bp, Arabidopsis thaliana
cataatcgttcgtctga

SEQ ID NO: 68151 - DNA, 17 bp, Arabidopsis thaliana
cataatctgttcaccat

SEQ ID NO: 68152 - DNA, 17 bp, Arabidopsis thaliana
cataatcttcgaaaccg

SEQ ID NO: 68153 - DNA, 17 bp, Arabidopsis thaliana
cataattatgccgttac

SEQ ID NO: 68154 - DNA, 17 bp, Arabidopsis thaliana
cataattcctccaactt

SEQ ID NO: 68155 - DNA, 17 bp, Arabidopsis thaliana
catacaaaattttgtgg

SEQ ID NO: 68156 - DNA, 17 bp, Arabidopsis thaliana
catacaaacggcaacgt

SEQ ID NO: 68157 - DNA, 17 bp, Arabidopsis thaliana
catacaaccacgagatc

SEQ ID NO: 68158 - DNA, 17 bp, Arabidopsis thaliana
catacaagtttggatat

SEQ ID NO: 68159 - DNA, 17 bp, Arabidopsis thaliana
catacacacgtggtgtt

SEQ ID NO: 68160 - DNA, 17 bp, Arabidopsis thaliana
catacacatgtagaccg

SEQ ID NO: 68161 - DNA, 17 bp, Arabidopsis thaliana
catacactcatcatctt

SEQ ID NO: 68162 - DNA, 17 bp, Arabidopsis thaliana
catacagatagcggtgt

SEQ ID NO: 68163 - DNA, 17 bp, Arabidopsis thaliana
catacagctcgttgttt

SEQ ID NO: 68164 - DNA, 17 bp, Arabidopsis thaliana
catacaggactcttttc

SEQ ID NO: 68165 - DNA, 17 bp, Arabidopsis thaliana
catacaggtgctgcatg

SEQ ID NO: 68166 - DNA, 17 bp, Arabidopsis thaliana
catacagtccgcagatg

SEQ ID NO: 68167 - DNA, 17 bp, Arabidopsis thaliana
catacagttttgacatt

SEQ ID NO: 68168 - DNA, 17 bp, Arabidopsis thaliana
catacatcaacttcgta

SEQ ID NO: 68169 - DNA, 17 bp, Arabidopsis thaliana
catacatgcgtattcag

SEQ ID NO: 68170 - DNA, 17 bp, Arabidopsis thaliana
catacatggtgatggac

SEQ ID NO: 68171 - DNA, 17 bp, Arabidopsis thaliana
catacatgtggttctgc

SEQ ID NO: 68172 - DNA, 17 bp, Arabidopsis thaliana
cataccaagtaaagaat

SEQ ID NO: 68173 - DNA, 17 bp, Arabidopsis thaliana
cataccaagttaacaat

SEQ ID NO: 68174 - DNA, 17 bp, Arabidopsis thaliana
cataccaccaagattag

SEQ ID NO: 68175 - DNA, 17 bp, Arabidopsis thaliana
cataccacggtggggtc

SEQ ID NO: 68176 - DNA, 17 bp, Arabidopsis thaliana
cataccactcggcccat

SEQ ID NO: 68177 - DNA, 17 bp, Arabidopsis thaliana
cataccagcactaatgc

SEQ ID NO: 68178 - DNA, 17 bp, Arabidopsis thaliana
cataccagtgaatgcca

SEQ ID NO: 68179 - DNA, 17 bp, Arabidopsis thaliana
cataccagtgggttgcc

SEQ ID NO: 68180 - DNA, 17 bp, Arabidopsis thaliana
catacccggccgtcggg

SEQ ID NO: 68181 - DNA, 17 bp, Arabidopsis thaliana
cataccggttccagagt

SEQ ID NO: 68182 - DNA, 17 bp, Arabidopsis thaliana
catacctcagactcgct

SEQ ID NO: 68183 - DNA, 17 bp, Arabidopsis thaliana
catacctcgtcagcggg

SEQ ID NO: 68184 - DNA, 17 bp, Arabidopsis thaliana
catacctctttgaccgt

SEQ ID NO: 68185 - DNA, 17 bp, Arabidopsis thaliana
cataccttgctgatgag

SEQ ID NO: 68186 - DNA, 17 bp, Arabidopsis thaliana
cataccttggttgcgcc

SEQ ID NO: 68187 - DNA, 17 bp, Arabidopsis thaliana
catacctttcgaaaatg

SEQ ID NO: 68188 - DNA, 17 bp, Arabidopsis thaliana
catacgacgtgcaatgg

SEQ ID NO: 68189 - DNA, 17 bp, Arabidopsis thaliana
catacgagtaatccgct

SEQ ID NO: 68190 - DNA, 17 bp, Arabidopsis thaliana
catacgagttataaggc

SEQ ID NO: 68191 - DNA, 17 bp, Arabidopsis thaliana
catacgatggagcgtct

SEQ ID NO: 68192 - DNA, 17 bp, Arabidopsis thaliana
catacgattggcggcga

SEQ ID NO: 68193 - DNA, 17 bp, Arabidopsis thaliana
catacgcccaacagaga

SEQ ID NO: 68194 - DNA, 17 bp, Arabidopsis thaliana
catacgcccgagttcat

SEQ ID NO: 68195 - DNA, 17 bp, Arabidopsis thaliana
catacgcggattacggt

SEQ ID NO: 68196 - DNA, 17 bp, Arabidopsis thaliana
catacgcttgatggaca

SEQ ID NO: 68197 - DNA, 17 bp, Arabidopsis thaliana
catacggactttggcta

SEQ ID NO: 68198 - DNA, 17 bp, Arabidopsis thaliana
catacggaggaggcggt

SEQ ID NO: 68199 - DNA, 17 bp, Arabidopsis thaliana
catacggcagcggactc

SEQ ID NO: 68200 - DNA, 17 bp, Arabidopsis thaliana
catacggctcatgctct

SEQ ID NO: 68201 - DNA, 17 bp, Arabidopsis thaliana
catacggggccggacca

SEQ ID NO: 68202 - DNA, 17 bp, Arabidopsis thaliana
catacggtctcagaatt

SEQ ID NO: 68203 - DNA, 17 bp, Arabidopsis thaliana
catacggtggattgcgc

SEQ ID NO: 68204 - DNA, 17 bp, Arabidopsis thaliana
catacggttttatgtgg

SEQ ID NO: 68205 - DNA, 17 bp, Arabidopsis thaliana
catacgtgatagattgt

SEQ ID NO: 68206 - DNA, 17 bp, Arabidopsis thaliana
catactaatgcgtcacg

SEQ ID NO: 68207 - DNA, 17 bp, Arabidopsis thaliana
catactagttggagttg

SEQ ID NO: 68208 - DNA, 17 bp, Arabidopsis thaliana
catactatggacgggat

SEQ ID NO: 68209 - DNA, 17 bp, Arabidopsis thaliana
catactcccgaaccgac

SEQ ID NO: 68210 - DNA, 17 bp, Arabidopsis thaliana
catactcgatcatcatg

SEQ ID NO: 68211 - DNA, 17 bp, Arabidopsis thaliana
catactgaggtaggact

SEQ ID NO: 68212 - DNA, 17 bp, Arabidopsis thaliana
catactgcttggaaagt

SEQ ID NO: 68213 - DNA, 17 bp, Arabidopsis thaliana
catactggatcagattg

SEQ ID NO: 68214 - DNA, 17 bp, Arabidopsis thaliana
catactggatcgacacc

SEQ ID NO: 68215 - DNA, 17 bp, Arabidopsis thaliana
catactgggtaaatgga

SEQ ID NO: 68216 - DNA, 17 bp, Arabidopsis thaliana
catactgttgcctgagt

SEQ ID NO: 68217 - DNA, 17 bp, Arabidopsis thaliana
catactgttggtgatcg

SEQ ID NO: 68218 - DNA, 17 bp, Arabidopsis thaliana
catacttaccgttgacc

SEQ ID NO: 68219 - DNA, 17 bp, Arabidopsis thaliana
catacttcgattgtcaa

SEQ ID NO: 68220 - DNA, 17 bp, Arabidopsis thaliana
catacttgcgtggatcg

SEQ ID NO: 68221 - DNA, 17 bp, Arabidopsis thaliana
catacttggaccgcagg

SEQ ID NO: 68222 - DNA, 17 bp, Arabidopsis thaliana
catacttgtgttggtaa

SEQ ID NO: 68223 - DNA, 17 bp, Arabidopsis thaliana
catacttgtgttgttaa

SEQ ID NO: 68224 - DNA, 17 bp, Arabidopsis thaliana
catactttatgttgcag

SEQ ID NO: 68225 - DNA, 17 bp, Arabidopsis thaliana
catactttcaagcttta

SEQ ID NO: 68226 - DNA, 17 bp, Arabidopsis thaliana
catactttgccatactt

SEQ ID NO: 68227 - DNA, 17 bp, Arabidopsis thaliana
catactttgccgtctgt

SEQ ID NO: 68228 - DNA, 17 bp, Arabidopsis thaliana
catactttggcccattt

SEQ ID NO: 68229 - DNA, 17 bp, Arabidopsis thaliana
catactttgggctctat

SEQ ID NO: 68230 - DNA, 17 bp, Arabidopsis thaliana
catagaaaccgctttgg

SEQ ID NO: 68231 - DNA, 17 bp, Arabidopsis thaliana
catagacatgtagaccg

SEQ ID NO: 68232 - DNA, 17 bp, Arabidopsis thaliana
catagacgacccgcctt

SEQ ID NO: 68233 - DNA, 17 bp, Arabidopsis thaliana
catagacggttttgtcc

SEQ ID NO: 68234 - DNA, 17 bp, Arabidopsis thaliana
catagactattgggcgt

SEQ ID NO: 68235 - DNA, 17 bp, Arabidopsis thaliana
catagagaatggtctga

SEQ ID NO: 68236 - DNA, 17 bp, Arabidopsis thaliana
catagagacttgaagcc

SEQ ID NO: 68237 - DNA, 17 bp, Arabidopsis thaliana
catagagacttgcggca

SEQ ID NO: 68238 - DNA, 17 bp, Arabidopsis thaliana
catagagatctgtcgat

SEQ ID NO: 68239 - DNA, 17 bp, Arabidopsis thaliana
catagagtccagcgttg

SEQ ID NO: 68240 - DNA, 17 bp, Arabidopsis thaliana
catagatcatggagctc

SEQ ID NO: 68241 - DNA, 17 bp, Arabidopsis thaliana
catagatctcttcagaa

SEQ ID NO: 68242 - DNA, 17 bp, Arabidopsis thaliana
catagatgtgtggttgg

SEQ ID NO: 68243 - DNA, 17 bp, Arabidopsis thaliana
catagattgacctgcgg

SEQ ID NO: 68244 - DNA, 17 bp, Arabidopsis thaliana
catagatttgctcgtgg

SEQ ID NO: 68245 - DNA, 17 bp, Arabidopsis thaliana
catagcaataagccatc

SEQ ID NO: 68246 - DNA, 17 bp, Arabidopsis thaliana
catagcaggtgcttttg

SEQ ID NO: 68247 - DNA, 17 bp, Arabidopsis thaliana
catagcatattggttga

SEQ ID NO: 68248 - DNA, 17 bp, Arabidopsis thaliana
catagccagtgacggat

SEQ ID NO: 68249 - DNA, 17 bp, Arabidopsis thaliana
catagcccggctatcga

SEQ ID NO: 68250 - DNA, 17 bp, Arabidopsis thaliana
catagcgaactattctt

SEQ ID NO: 68251 - DNA, 17 bp, Arabidopsis thaliana
catagcgacgttgcttt

SEQ ID NO: 68252 - DNA, 17 bp, Arabidopsis thaliana
catagcgatttgttgcc

SEQ ID NO: 68253 - DNA, 17 bp, Arabidopsis thaliana
catagcggaagcgtggt

SEQ ID NO: 68254 - DNA, 17 bp, Arabidopsis thaliana
catagcgggtgggaccc

SEQ ID NO: 68255 - DNA, 17 bp, Arabidopsis thaliana
catagcgttcgataaga

SEQ ID NO: 68256 - DNA, 17 bp, Arabidopsis thaliana
catagcgtttgattgaa

SEQ ID NO: 68257 - DNA, 17 bp, Arabidopsis thaliana
catagcgtttgattgac

SEQ ID NO: 68258 - DNA, 17 bp, Arabidopsis thaliana
catagcgtttgattgat

SEQ ID NO: 68259 - DNA, 17 bp, Arabidopsis thaliana
catagcgtttgattgga

SEQ ID NO: 68260 - DNA, 17 bp, Arabidopsis thaliana
catagcgttttttctaa

SEQ ID NO: 68261 - DNA, 17 bp, Arabidopsis thaliana
catagctcaatcgtcca

SEQ ID NO: 68262 - DNA, 17 bp, Arabidopsis thaliana
catagctgatgaaaact

SEQ ID NO: 68263 - DNA, 17 bp, Arabidopsis thaliana
cataggactccgctggc

SEQ ID NO: 68264 - DNA, 17 bp, Arabidopsis thaliana
cataggacttttgctgg

SEQ ID NO: 68265 - DNA, 17 bp, Arabidopsis thaliana
cataggatcgtgcaacg

SEQ ID NO: 68266 - DNA, 17 bp, Arabidopsis thaliana
cataggatcgtgtcacg

SEQ ID NO: 68267 - DNA, 17 bp, Arabidopsis thaliana
cataggattgtgcaacg

SEQ ID NO: 68268 - DNA, 17 bp, Arabidopsis thaliana
cataggattgtgccacg

SEQ ID NO: 68269 - DNA, 17 bp, Arabidopsis thaliana
cataggcagtggcttgg

SEQ ID NO: 68270 - DNA, 17 bp, Arabidopsis thaliana
cataggccatgattggt

SEQ ID NO: 68271 - DNA, 17 bp, Arabidopsis thaliana
cataggccgactgttga

SEQ ID NO: 68272 - DNA, 17 bp, Arabidopsis thaliana
catagggcacgtctgcc

SEQ ID NO: 68273 - DNA, 17 bp, Arabidopsis thaliana
catagggcctgttcgtt

SEQ ID NO: 68274 - DNA, 17 bp, Arabidopsis thaliana
catagggtgtactcaat

SEQ ID NO: 68275 - DNA, 17 bp, Arabidopsis thaliana
cataggttgtcggagta

SEQ ID NO: 68276 - DNA, 17 bp, Arabidopsis thaliana
catagtatttctgtgtg

SEQ ID NO: 68277 - DNA, 17 bp, Arabidopsis thaliana
catagtcaatccctact

SEQ ID NO: 68278 - DNA, 17 bp, Arabidopsis thaliana
catagtcgcatcctgta

SEQ ID NO: 68279 - DNA, 17 bp, Arabidopsis thaliana
catagtcgttcgccagg

SEQ ID NO: 68280 - DNA, 17 bp, Arabidopsis thaliana
catagtctatttggtgg

SEQ ID NO: 68281 - DNA, 17 bp, Arabidopsis thaliana
catagtctcgggcatgg

SEQ ID NO: 68282 - DNA, 17 bp, Arabidopsis thaliana
catagtctttcttggaa

SEQ ID NO: 68283 - DNA, 17 bp, Arabidopsis thaliana
catagtgcctccaaatt

SEQ ID NO: 68284 - DNA, 17 bp, Arabidopsis thaliana
catagtgcttcgcttcc

SEQ ID NO: 68285 - DNA, 17 bp, Arabidopsis thaliana
catagtggaccgaccat

SEQ ID NO: 68286 - DNA, 17 bp, Arabidopsis thaliana
catagtggttctgagcg

SEQ ID NO: 68287 - DNA, 17 bp, Arabidopsis thaliana
catagtgtgctcttggg

SEQ ID NO: 68288 - DNA, 17 bp, Arabidopsis thaliana
catagttacaggctcac

SEQ ID NO: 68289 - DNA, 17 bp, Arabidopsis thaliana
catagttccaagatcat

SEQ ID NO: 68290 - DNA, 17 bp, Arabidopsis thaliana
catagttctcgggggaa

SEQ ID NO: 68291 - DNA, 17 bp, Arabidopsis thaliana
catagttgagtatgggc

SEQ ID NO: 68292 - DNA, 17 bp, Arabidopsis thaliana
catagttgcacctttcc

SEQ ID NO: 68293 - DNA, 17 bp, Arabidopsis thaliana
catagttggccgagttt

SEQ ID NO: 68294 - DNA, 17 bp, Arabidopsis thaliana
catagttggctaatcca

SEQ ID NO: 68295 - DNA, 17 bp, Arabidopsis thaliana
catagttggctaattaa

SEQ ID NO: 68296 - DNA, 17 bp, Arabidopsis thaliana
catagttgttgctgcct

SEQ ID NO: 68297 - DNA, 17 bp, Arabidopsis thaliana
catagtttcaggagttg

SEQ ID NO: 68298 - DNA, 17 bp, Arabidopsis thaliana
catagtttgctaactca

SEQ ID NO: 68299 - DNA, 17 bp, Arabidopsis thaliana
catatacaatcagctcg

SEQ ID NO: 68300 - DNA, 17 bp, Arabidopsis thaliana
catatagatccgtgttc

SEQ ID NO: 68301 - DNA, 17 bp, Arabidopsis thaliana
catatcaaactgctcat

SEQ ID NO: 68302 - DNA, 17 bp, Arabidopsis thaliana
catatcaccgacaactt

SEQ ID NO: 68303 - DNA, 17 bp, Arabidopsis thaliana
catatcactccgcctac

SEQ ID NO: 68304 - DNA, 17 bp, Arabidopsis thaliana
catatcagagacgatca

SEQ ID NO: 68305 - DNA, 17 bp, Arabidopsis thaliana
catatcaggatgtaatt

SEQ ID NO: 68306 - DNA, 17 bp, Arabidopsis thaliana
catatcaggatgtgatt

SEQ ID NO: 68307 - DNA, 17 bp, Arabidopsis thaliana
catatcatctggacggc

SEQ ID NO: 68308 - DNA, 17 bp, Arabidopsis thaliana
catatcatgccagatag

SEQ ID NO: 68309 - DNA, 17 bp, Arabidopsis thaliana
catatcatttgcgggtg

SEQ ID NO: 68310 - DNA, 17 bp, Arabidopsis thaliana
catatccaactacttga

SEQ ID NO: 68311 - DNA, 17 bp, Arabidopsis thaliana
catatccatttgtgcgt

SEQ ID NO: 68312 - DNA, 17 bp, Arabidopsis thaliana
catatcccacagttgtc

SEQ ID NO: 68313 - DNA, 17 bp, Arabidopsis thaliana
catatccgaaacgcagg

SEQ ID NO: 68314 - DNA, 17 bp, Arabidopsis thaliana
catatccgctctgtaat

SEQ ID NO: 68315 - DNA, 17 bp, Arabidopsis thaliana
catatccggtgtgggcg

SEQ ID NO: 68316 - DNA, 17 bp, Arabidopsis thaliana
catatcgaaagatgtct

SEQ ID NO: 68317 - DNA, 17 bp, Arabidopsis thaliana
catatcgacacatgtgc

SEQ ID NO: 68318 - DNA, 17 bp, Arabidopsis thaliana
catatcgatgtaggttg

SEQ ID NO: 68319 - DNA, 17 bp, Arabidopsis thaliana
catatcgcaagctgttc

SEQ ID NO: 68320 - DNA, 17 bp, Arabidopsis thaliana
catatcgcacaatagga

SEQ ID NO: 68321 - DNA, 17 bp, Arabidopsis thaliana
catatcgctgaagttgt

SEQ ID NO: 68322 - DNA, 17 bp, Arabidopsis thaliana
catatcggttggtgttt

SEQ ID NO: 68323 - DNA, 17 bp, Arabidopsis thaliana
catatctaatggcgtcc

SEQ ID NO: 68324 - DNA, 17 bp, Arabidopsis thaliana
catatctactggtcatt

SEQ ID NO: 68325 - DNA, 17 bp, Arabidopsis thaliana
catatctaggtatgtca

SEQ ID NO: 68326 - DNA, 17 bp, Arabidopsis thaliana
catatctctgaaagttt

SEQ ID NO: 68327 - DNA, 17 bp, Arabidopsis thaliana
catatctctgcgctttg

SEQ ID NO: 68328 - DNA, 17 bp, Arabidopsis thaliana
catatctctggaattcg

SEQ ID NO: 68329 - DNA, 17 bp, Arabidopsis thaliana
catatctctgtgagtga

SEQ ID NO: 68330 - DNA, 17 bp, Arabidopsis thaliana
catatctgaaaagtgag

SEQ ID NO: 68331 - DNA, 17 bp, Arabidopsis thaliana
catatctgaatctccgt

SEQ ID NO: 68332 - DNA, 17 bp, Arabidopsis thaliana
catatctgatcagtccc

SEQ ID NO: 68333 - DNA, 17 bp, Arabidopsis thaliana
catatcttctcaaccga

SEQ ID NO: 68334 - DNA, 17 bp, Arabidopsis thaliana
catatgaaccgaatgca

SEQ ID NO: 68335 - DNA, 17 bp, Arabidopsis thaliana
catatgaccagttttgt

SEQ ID NO: 68336 - DNA, 17 bp, Arabidopsis thaliana
catatgacccgaatgaa

SEQ ID NO: 68337 - DNA, 17 bp, Arabidopsis thaliana
catatgacccgaatgca

SEQ ID NO: 68338 - DNA, 17 bp, Arabidopsis thaliana
catatgagatcggacca

SEQ ID NO: 68339 - DNA, 17 bp, Arabidopsis thaliana
catatgagatgtcgtgt

SEQ ID NO: 68340 - DNA, 17 bp, Arabidopsis thaliana
catatgagccgaacgaa

SEQ ID NO: 68341 - DNA, 17 bp, Arabidopsis thaliana
catatgagccgaacgca

SEQ ID NO: 68342 - DNA, 17 bp, Arabidopsis thaliana
catatgattcttttttc

SEQ ID NO: 68343 - DNA, 17 bp, Arabidopsis thaliana
catatgatttgttgaat

SEQ ID NO: 68344 - DNA, 17 bp, Arabidopsis thaliana
catatgattttaagtcg

SEQ ID NO: 68345 - DNA, 17 bp, Arabidopsis thaliana
catatgcagagctgatc

SEQ ID NO: 68346 - DNA, 17 bp, Arabidopsis thaliana
catatgcatttggactg

SEQ ID NO: 68347 - DNA, 17 bp, Arabidopsis thaliana
catatgcccaattagac

SEQ ID NO: 68348 - DNA, 17 bp, Arabidopsis thaliana
catatgcccaattggac

SEQ ID NO: 68349 - DNA, 17 bp, Arabidopsis thaliana
catatgcgaatcctgct

SEQ ID NO: 68350 - DNA, 17 bp, Arabidopsis thaliana
catatgcgccatgttcg

SEQ ID NO: 68351 - DNA, 17 bp, Arabidopsis thaliana
catatggacaatgggct

SEQ ID NO: 68352 - DNA, 17 bp, Arabidopsis thaliana
catatggactttggcta

SEQ ID NO: 68353 - DNA, 17 bp, Arabidopsis thaliana
catatggagagagttgg

SEQ ID NO: 68354 - DNA, 17 bp, Arabidopsis thaliana
catatggcccatctggc

SEQ ID NO: 68355 - DNA, 17 bp, Arabidopsis thaliana
catatggcttgaagtgt

SEQ ID NO: 68356 - DNA, 17 bp, Arabidopsis thaliana
catatgggaaagctcca

SEQ ID NO: 68357 - DNA, 17 bp, Arabidopsis thaliana
catatgggaattggcac

SEQ ID NO: 68358 - DNA, 17 bp, Arabidopsis thaliana
catatggtagagcgctc

SEQ ID NO: 68359 - DNA, 17 bp, Arabidopsis thaliana
catatgtccggtctagt

SEQ ID NO: 68360 - DNA, 17 bp, Arabidopsis thaliana
catatgtgacgatgtgt

SEQ ID NO: 68361 - DNA, 17 bp, Arabidopsis thaliana
catatgtgccgaggata

SEQ ID NO: 68362 - DNA, 17 bp, Arabidopsis thaliana
catatgttgatgacagc

SEQ ID NO: 68363 - DNA, 17 bp, Arabidopsis thaliana
catattaaaaacctcgg

SEQ ID NO: 68364 - DNA, 17 bp, Arabidopsis thaliana
catattagaccgctttg

SEQ ID NO: 68365 - DNA, 17 bp, Arabidopsis thaliana
catattagactgtgggc

SEQ ID NO: 68366 - DNA, 17 bp, Arabidopsis thaliana
catattagagtgtgggc

SEQ ID NO: 68367 - DNA, 17 bp, Arabidopsis thaliana
catattagtgcagtgat

SEQ ID NO: 68368 - DNA, 17 bp, Arabidopsis thaliana
catattatggacgggat

SEQ ID NO: 68369 - DNA, 17 bp, Arabidopsis thaliana
catattatttgtggggc

SEQ ID NO: 68370 - DNA, 17 bp, Arabidopsis thaliana
catattcaaggttcgca

SEQ ID NO: 68371 - DNA, 17 bp, Arabidopsis thaliana
catattcaccaggtctg

SEQ ID NO: 68372 - DNA, 17 bp, Arabidopsis thaliana
catattccacatattgc

SEQ ID NO: 68373 - DNA, 17 bp, Arabidopsis thaliana
catattcccaattggac

SEQ ID NO: 68374 - DNA, 17 bp, Arabidopsis thaliana
catattctttgattcgc

SEQ ID NO: 68375 - DNA, 17 bp, Arabidopsis thaliana
catattgatgtgcggcc

SEQ ID NO: 68376 - DNA, 17 bp, Arabidopsis thaliana
catattggcggtctaga

SEQ ID NO: 68377 - DNA, 17 bp, Arabidopsis thaliana
catattggcttctaccg

SEQ ID NO: 68378 - DNA, 17 bp, Arabidopsis thaliana
catattgtgtggatctg

SEQ ID NO: 68379 - DNA, 17 bp, Arabidopsis thaliana
catatttcattttgctc

SEQ ID NO: 68380 - DNA, 17 bp, Arabidopsis thaliana
catatttctgaaatcgg

SEQ ID NO: 68381 - DNA, 17 bp, Arabidopsis thaliana
catcaaaaccgtccatc

SEQ ID NO: 68382 - DNA, 17 bp, Arabidopsis thaliana
catcaaaactcctggaa

SEQ ID NO: 68383 - DNA, 17 bp, Arabidopsis thaliana
catcaaaagccggggcc

SEQ ID NO: 68384 - DNA, 17 bp, Arabidopsis thaliana
catcaaaatgcagtttt

SEQ ID NO: 68385 - DNA, 17 bp, Arabidopsis thaliana
catcaaacccggtcagg

SEQ ID NO: 68386 - DNA, 17 bp, Arabidopsis thaliana
catcaaaccttgaatct

SEQ ID NO: 68387 - DNA, 17 bp, Arabidopsis thaliana
catcaaacgaccgatct

SEQ ID NO: 68388 - DNA, 17 bp, Arabidopsis thaliana
catcaaacgaccgatgt

SEQ ID NO: 68389 - DNA, 17 bp, Arabidopsis thaliana
catcaaacttggtgata

SEQ ID NO: 68390 - DNA, 17 bp, Arabidopsis thaliana
catcaaagcatgtgcgg

SEQ ID NO: 68391 - DNA, 17 bp, Arabidopsis thaliana
catcaaagcttccgtgt

SEQ ID NO: 68392 - DNA, 17 bp, Arabidopsis thaliana
catcaaaggttgttgct

SEQ ID NO: 68393 - DNA, 17 bp, Arabidopsis thaliana
catcaaagtctgggtgg

SEQ ID NO: 68394 - DNA, 17 bp, Arabidopsis thaliana
catcaaatttggatgtt

SEQ ID NO: 68395 - DNA, 17 bp, Arabidopsis thaliana
catcaaatttggggtgc

SEQ ID NO: 68396 - DNA, 17 bp, Arabidopsis thaliana
catcaacaaggggtttt

SEQ ID NO: 68397 - DNA, 17 bp, Arabidopsis thaliana
catcaacagagggtcgc

SEQ ID NO: 68398 - DNA, 17 bp, Arabidopsis thaliana
catcaacagcgtcctcg

SEQ ID NO: 68399 - DNA, 17 bp, Arabidopsis thaliana
catcaacagctgtccgg

SEQ ID NO: 68400 - DNA, 17 bp, Arabidopsis thaliana
catcaacaggctaaccg

SEQ ID NO: 68401 - DNA, 17 bp, Arabidopsis thaliana
catcaacagttacgtcc

SEQ ID NO: 68402 - DNA, 17 bp, Arabidopsis thaliana
catcaaccaacgctcca

SEQ ID NO: 68403 - DNA, 17 bp, Arabidopsis thaliana
catcaaccaagttcaag

SEQ ID NO: 68404 - DNA, 17 bp, Arabidopsis thaliana
catcaacgacagggaga

SEQ ID NO: 68405 - DNA, 17 bp, Arabidopsis thaliana
catcaacgatattttgg

SEQ ID NO: 68406 - DNA, 17 bp, Arabidopsis thaliana
catcaacgccatagcga

SEQ ID NO: 68407 - DNA, 17 bp, Arabidopsis thaliana
catcaacggaccttcct

SEQ ID NO: 68408 - DNA, 17 bp, Arabidopsis thaliana
catcaacggttctgtct

SEQ ID NO: 68409 - DNA, 17 bp, Arabidopsis thaliana
catcaactacaacctcg

SEQ ID NO: 68410 - DNA, 17 bp, Arabidopsis thaliana
catcaactctgtgtggt

SEQ ID NO: 68411 - DNA, 17 bp, Arabidopsis thaliana
catcaactgcagtgtac

SEQ ID NO: 68412 - DNA, 17 bp, Arabidopsis thaliana
catcaacttaccatcag

SEQ ID NO: 68413 - DNA, 17 bp, Arabidopsis thaliana
catcaacttcacatgtg

SEQ ID NO: 68414 - DNA, 17 bp, Arabidopsis thaliana
catcaacttcgtaggtg

SEQ ID NO: 68415 - DNA, 17 bp, Arabidopsis thaliana
catcaacttcgtatgcg

SEQ ID NO: 68416 - DNA, 17 bp, Arabidopsis thaliana
catcaacttcgtatggg

SEQ ID NO: 68417 - DNA, 17 bp, Arabidopsis thaliana
catcaacttcgtatgtg

SEQ ID NO: 68418 - DNA, 17 bp, Arabidopsis thaliana
catcaacttcttatgtg

SEQ ID NO: 68419 - DNA, 17 bp, Arabidopsis thaliana
catcaagaagctatgac

SEQ ID NO: 68420 - DNA, 17 bp, Arabidopsis thaliana
catcaagatcgggactg

SEQ ID NO: 68421 - DNA, 17 bp, Arabidopsis thaliana
catcaagcgagtccctt

SEQ ID NO: 68422 - DNA, 17 bp, Arabidopsis thaliana
catcaagcttgggtgcg

SEQ ID NO: 68423 - DNA, 17 bp, Arabidopsis thaliana
catcaaggatctctgaa

SEQ ID NO: 68424 - DNA, 17 bp, Arabidopsis thaliana
catcaaggatgacttgc

SEQ ID NO: 68425 - DNA, 17 bp, Arabidopsis thaliana
catcaagtactcggatt

SEQ ID NO: 68426 - DNA, 17 bp, Arabidopsis thaliana
catcaagtccaggaaca

SEQ ID NO: 68427 - DNA, 17 bp, Arabidopsis thaliana
catcaagtgttgctgat

SEQ ID NO: 68428 - DNA, 17 bp, Arabidopsis thaliana
catcaagttcatatgtg

SEQ ID NO: 68429 - DNA, 17 bp, Arabidopsis thaliana
catcaagttgaccgagg

SEQ ID NO: 68430 - DNA, 17 bp, Arabidopsis thaliana
catcaattccatctact

SEQ ID NO: 68431 - DNA, 17 bp, Arabidopsis thaliana
catcaattcgacccttc

SEQ ID NO: 68432 - DNA, 17 bp, Arabidopsis thaliana
catcaattgagccacac

SEQ ID NO: 68433 - DNA, 17 bp, Arabidopsis thaliana
catcaattggggtgatt

SEQ ID NO: 68434 - DNA, 17 bp, Arabidopsis thaliana
catcaatttcgtatgcg

SEQ ID NO: 68435 - DNA, 17 bp, Arabidopsis thaliana
catcaatttgaccgcca

SEQ ID NO: 68436 - DNA, 17 bp, Arabidopsis thaliana
catcacaagatctctgg

SEQ ID NO: 68437 - DNA, 17 bp, Arabidopsis thaliana
catcacaattcagaaga

SEQ ID NO: 68438 - DNA, 17 bp, Arabidopsis thaliana
catcacacaagaagatg

SEQ ID NO: 68439 - DNA, 17 bp, Arabidopsis thaliana
catcacactgatgctga

SEQ ID NO: 68440 - DNA, 17 bp, Arabidopsis thaliana
catcacagctcatgtgc

SEQ ID NO: 68441 - DNA, 17 bp, Arabidopsis thaliana
catcacaggatggttgg

SEQ ID NO: 68442 - DNA, 17 bp, Arabidopsis thaliana
catcacagtccactttc

SEQ ID NO: 68443 - DNA, 17 bp, Arabidopsis thaliana
catcacatacaatgact

SEQ ID NO: 68444 - DNA, 17 bp, Arabidopsis thaliana
catcacatgattgctcg

SEQ ID NO: 68445 - DNA, 17 bp, Arabidopsis thaliana
catcaccaaatctctac

SEQ ID NO: 68446 - DNA, 17 bp, Arabidopsis thaliana
catcaccaagcgtggct

SEQ ID NO: 68447 - DNA, 17 bp, Arabidopsis thaliana
catcaccactagaggcg

SEQ ID NO: 68448 - DNA, 17 bp, Arabidopsis thaliana
catcaccactttggaaa

SEQ ID NO: 68449 - DNA, 17 bp, Arabidopsis thaliana
catcaccagacggacac

SEQ ID NO: 68450 - DNA, 17 bp, Arabidopsis thaliana
catcaccagacggtcac

SEQ ID NO: 68451 - DNA, 17 bp, Arabidopsis thaliana
catcaccataagtgagg

SEQ ID NO: 68452 - DNA, 17 bp, Arabidopsis thaliana
catcaccatcacttatg

SEQ ID NO: 68453 - DNA, 17 bp, Arabidopsis thaliana
catcaccctctgggaga

SEQ ID NO: 68454 - DNA, 17 bp, Arabidopsis thaliana
catcaccgagttgtatg

SEQ ID NO: 68455 - DNA, 17 bp, Arabidopsis thaliana
catcaccgtcgttttgc

SEQ ID NO: 68456 - DNA, 17 bp, Arabidopsis thaliana
catcaccgttgagagaa

SEQ ID NO: 68457 - DNA, 17 bp, Arabidopsis thaliana
catcacgaccccctctc

SEQ ID NO: 68458 - DNA, 17 bp, Arabidopsis thaliana
catcacgacctgagtgg

SEQ ID NO: 68459 - DNA, 17 bp, Arabidopsis thaliana
catcacgatggatgtac

SEQ ID NO: 68460 - DNA, 17 bp, Arabidopsis thaliana
catcacgatgtttgtac

SEQ ID NO: 68461 - DNA, 17 bp, Arabidopsis thaliana
catcacggatgaccaac

SEQ ID NO: 68462 - DNA, 17 bp, Arabidopsis thaliana
catcacggcggttctga

SEQ ID NO: 68463 - DNA, 17 bp, Arabidopsis thaliana
catcacggctcggccca

SEQ ID NO: 68464 - DNA, 17 bp, Arabidopsis thaliana
catcacggcttggtcca

SEQ ID NO: 68465 - DNA, 17 bp, Arabidopsis thaliana
catcacgggtttacgtt

SEQ ID NO: 68466 - DNA, 17 bp, Arabidopsis thaliana
catcacgtctacatgca

SEQ ID NO: 68467 - DNA, 17 bp, Arabidopsis thaliana
catcacgttctcgacaa

SEQ ID NO: 68468 - DNA, 17 bp, Arabidopsis thaliana
catcactaagtacttca

SEQ ID NO: 68469 - DNA, 17 bp, Arabidopsis thaliana
catcactaatgcaccgg

SEQ ID NO: 68470 - DNA, 17 bp, Arabidopsis thaliana
catcactatctcgctgc

SEQ ID NO: 68471 - DNA, 17 bp, Arabidopsis thaliana
catcactcgaggaaaga

SEQ ID NO: 68472 - DNA, 17 bp, Arabidopsis thaliana
catcactgagaaccgcc

SEQ ID NO: 68473 - DNA, 17 bp, Arabidopsis thaliana
catcactgctctatctg

SEQ ID NO: 68474 - DNA, 17 bp, Arabidopsis thaliana
catcactgtaacaacac

SEQ ID NO: 68475 - DNA, 17 bp, Arabidopsis thaliana
catcacttatgaccact

SEQ ID NO: 68476 - DNA, 17 bp, Arabidopsis thaliana
catcactttccagttac

SEQ ID NO: 68477 - DNA, 17 bp, Arabidopsis thaliana
catcactttgtcaacaa

SEQ ID NO: 68478 - DNA, 17 bp, Arabidopsis thaliana
catcagaaaagactgga

SEQ ID NO: 68479 - DNA, 17 bp, Arabidopsis thaliana
catcagaacggtgctgg

SEQ ID NO: 68480 - DNA, 17 bp, Arabidopsis thaliana
catcagaactccgcagt

SEQ ID NO: 68481 - DNA, 17 bp, Arabidopsis thaliana
catcagaatgactgctc

SEQ ID NO: 68482 - DNA, 17 bp, Arabidopsis thaliana
catcagaatgcttctgg

SEQ ID NO: 68483 - DNA, 17 bp, Arabidopsis thaliana
catcagagagagcctca

SEQ ID NO: 68484 - DNA, 17 bp, Arabidopsis thaliana
catcagaggctgctccg

SEQ ID NO: 68485 - DNA, 17 bp, Arabidopsis thaliana
catcagagtccgctgcc

SEQ ID NO: 68486 - DNA, 17 bp, Arabidopsis thaliana
catcagagtgtatctaa

SEQ ID NO: 68487 - DNA, 17 bp, Arabidopsis thaliana
catcagatctatcttgg

SEQ ID NO: 68488 - DNA, 17 bp, Arabidopsis thaliana
catcagatgtgattggg

SEQ ID NO: 68489 - DNA, 17 bp, Arabidopsis thaliana
catcagatgtgtacatg

SEQ ID NO: 68490 - DNA, 17 bp, Arabidopsis thaliana
catcagattccacgtgt

SEQ ID NO: 68491 - DNA, 17 bp, Arabidopsis thaliana
catcagcaaggacaaca

SEQ ID NO: 68492 - DNA, 17 bp, Arabidopsis thaliana
catcagcaatctggtgt

SEQ ID NO: 68493 - DNA, 17 bp, Arabidopsis thaliana
catcagcaatgcttgaa

SEQ ID NO: 68494 - DNA, 17 bp, Arabidopsis thaliana
catcagcacatgagagc

SEQ ID NO: 68495 - DNA, 17 bp, Arabidopsis thaliana
catcagcacatgagagt

SEQ ID NO: 68496 - DNA, 17 bp, Arabidopsis thaliana
catcagcacatgagcgc

SEQ ID NO: 68497 - DNA, 17 bp, Arabidopsis thaliana
catcagcactttgcctt

SEQ ID NO: 68498 - DNA, 17 bp, Arabidopsis thaliana
catcagcagaggtccga

SEQ ID NO: 68499 - DNA, 17 bp, Arabidopsis thaliana
catcagcagcagctaca

SEQ ID NO: 68500 - DNA, 17 bp, Arabidopsis thaliana
catcagcagcgtcagag

SEQ ID NO: 68501 - DNA, 17 bp, Arabidopsis thaliana
catcagcatgaccgata

SEQ ID NO: 68502 - DNA, 17 bp, Arabidopsis thaliana
catcagcctctatttcc

SEQ ID NO: 68503 - DNA, 17 bp, Arabidopsis thaliana
catcagcctctattttc

SEQ ID NO: 68504 - DNA, 17 bp, Arabidopsis thaliana
catcagcgtctgcaaca

SEQ ID NO: 68505 - DNA, 17 bp, Arabidopsis thaliana
catcagcgtcttgcgcg

SEQ ID NO: 68506 - DNA, 17 bp, Arabidopsis thaliana
catcagcgtgctccccc

SEQ ID NO: 68507 - DNA, 17 bp, Arabidopsis thaliana
catcagcgtgctccggg

SEQ ID NO: 68508 - DNA, 17 bp, Arabidopsis thaliana
catcagctcactctaca

SEQ ID NO: 68509 - DNA, 17 bp, Arabidopsis thaliana
catcagctcccggagca

SEQ ID NO: 68510 - DNA, 17 bp, Arabidopsis thaliana
catcagctcgcgttgac

SEQ ID NO: 68511 - DNA, 17 bp, Arabidopsis thaliana
catcagctcgtgccgta

SEQ ID NO: 68512 - DNA, 17 bp, Arabidopsis thaliana
catcagctcgttgttgt

SEQ ID NO: 68513 - DNA, 17 bp, Arabidopsis thaliana
catcagctctgtggcag

SEQ ID NO: 68514 - DNA, 17 bp, Arabidopsis thaliana
catcagctgcggaattg

SEQ ID NO: 68515 - DNA, 17 bp, Arabidopsis thaliana
catcagcttcacggatc

SEQ ID NO: 68516 - DNA, 17 bp, Arabidopsis thaliana
catcagcttgttgtggt

SEQ ID NO: 68517 - DNA, 17 bp, Arabidopsis thaliana
catcaggagcgtctgtc

SEQ ID NO: 68518 - DNA, 17 bp, Arabidopsis thaliana
catcaggcaagtcatcc

SEQ ID NO: 68519 - DNA, 17 bp, Arabidopsis thaliana
catcagggaatcctact

SEQ ID NO: 68520 - DNA, 17 bp, Arabidopsis thaliana
catcagggtatgtcgtg

SEQ ID NO: 68521 - DNA, 17 bp, Arabidopsis thaliana
catcaggtattggtggc

SEQ ID NO: 68522 - DNA, 17 bp, Arabidopsis thaliana
catcaggtctccaaggt

SEQ ID NO: 68523 - DNA, 17 bp, Arabidopsis thaliana
catcaggtttcatttcc

SEQ ID NO: 68524 - DNA, 17 bp, Arabidopsis thaliana
catcaggtttctgaagg

SEQ ID NO: 68525 - DNA, 17 bp, Arabidopsis thaliana
catcaggttttctgtgt

SEQ ID NO: 68526 - DNA, 17 bp, Arabidopsis thaliana
catcaggttttttcgtg

SEQ ID NO: 68527 - DNA, 17 bp, Arabidopsis thaliana
catcagtcaatgaaggg

SEQ ID NO: 68528 - DNA, 17 bp, Arabidopsis thaliana
catcagtcccgatcttg

SEQ ID NO: 68529 - DNA, 17 bp, Arabidopsis thaliana
catcagtccggccgatt

SEQ ID NO: 68530 - DNA, 17 bp, Arabidopsis thaliana
catcagtccttgtattg

SEQ ID NO: 68531 - DNA, 17 bp, Arabidopsis thaliana
catcagtcggtggagcg

SEQ ID NO: 68532 - DNA, 17 bp, Arabidopsis thaliana
catcagtcgtctttgta

SEQ ID NO: 68533 - DNA, 17 bp, Arabidopsis thaliana
catcagtctttgaacgc

SEQ ID NO: 68534 - DNA, 17 bp, Arabidopsis thaliana
catcagtgtgactttgc

SEQ ID NO: 68535 - DNA, 17 bp, Arabidopsis thaliana
catcagttctcatagtc

SEQ ID NO: 68536 - DNA, 17 bp, Arabidopsis thaliana
catcagttctcggttgc

SEQ ID NO: 68537 - DNA, 17 bp, Arabidopsis thaliana
catcagttgctcgaact

SEQ ID NO: 68538 - DNA, 17 bp, Arabidopsis thaliana
catcagtttatggtttc

SEQ ID NO: 68539 - DNA, 17 bp, Arabidopsis thaliana
catcagttttttgcaag

SEQ ID NO: 68540 - DNA, 17 bp, Arabidopsis thaliana
catcatagacatatttt

SEQ ID NO: 68541 - DNA, 17 bp, Arabidopsis thaliana
catcatatattcgtcag

SEQ ID NO: 68542 - DNA, 17 bp, Arabidopsis thaliana
catcatatcctgttgaa

SEQ ID NO: 68543 - DNA, 17 bp, Arabidopsis thaliana
catcatatttccgtcac

SEQ ID NO: 68544 - DNA, 17 bp, Arabidopsis thaliana
catcatcaaattgagag

SEQ ID NO: 68545 - DNA, 17 bp, Arabidopsis thaliana
catcatcaagaagggct

SEQ ID NO: 68546 - DNA, 17 bp, Arabidopsis thaliana
catcatcaagatggatc

SEQ ID NO: 68547 - DNA, 17 bp, Arabidopsis thaliana
catcatcacacaatctg

SEQ ID NO: 68548 - DNA, 17 bp, Arabidopsis thaliana
catcatcaccattacta

SEQ ID NO: 68549 - DNA, 17 bp, Arabidopsis thaliana
catcatcactagcttgc

SEQ ID NO: 68550 - DNA, 17 bp, Arabidopsis thaliana
catcatcactttagcat

SEQ ID NO: 68551 - DNA, 17 bp, Arabidopsis thaliana
catcatcatgatttcac

SEQ ID NO: 68552 - DNA, 17 bp, Arabidopsis thaliana
catcatccaaaccccta

SEQ ID NO: 68553 - DNA, 17 bp, Arabidopsis thaliana
catcatccatcgttctg

SEQ ID NO: 68554 - DNA, 17 bp, Arabidopsis thaliana
catcatccatggtggtg

SEQ ID NO: 68555 - DNA, 17 bp, Arabidopsis thaliana
catcatccattgaggcc

SEQ ID NO: 68556 - DNA, 17 bp, Arabidopsis thaliana
catcatcccaggtggtg

SEQ ID NO: 68557 - DNA, 17 bp, Arabidopsis thaliana
catcatccgtttgactc

SEQ ID NO: 68558 - DNA, 17 bp, Arabidopsis thaliana
catcatcctaactcatg

SEQ ID NO: 68559 - DNA, 17 bp, Arabidopsis thaliana
catcatcctcaacagat

SEQ ID NO: 68560 - DNA, 17 bp, Arabidopsis thaliana
catcatcctgtttctgc

SEQ ID NO: 68561 - DNA, 17 bp, Arabidopsis thaliana
catcatccttaggagct

SEQ ID NO: 68562 - DNA, 17 bp, Arabidopsis thaliana
catcatccttctggttt

SEQ ID NO: 68563 - DNA, 17 bp, Arabidopsis thaliana
catcatcgaccatcttt

SEQ ID NO: 68564 - DNA, 17 bp, Arabidopsis thaliana
catcatcgactaactgg

SEQ ID NO: 68565 - DNA, 17 bp, Arabidopsis thaliana
catcatcgctgatacgt

SEQ ID NO: 68566 - DNA, 17 bp, Arabidopsis thaliana
catcatctacaccgacg

SEQ ID NO: 68567 - DNA, 17 bp, Arabidopsis thaliana
catcatctacgaggtca

SEQ ID NO: 68568 - DNA, 17 bp, Arabidopsis thaliana
catcatctactttcgga

SEQ ID NO: 68569 - DNA, 17 bp, Arabidopsis thaliana
catcatctattgactcg

SEQ ID NO: 68570 - DNA, 17 bp, Arabidopsis thaliana
catcatctcaacagatc

SEQ ID NO: 68571 - DNA, 17 bp, Arabidopsis thaliana
catcatctcgagggggc

SEQ ID NO: 68572 - DNA, 17 bp, Arabidopsis thaliana
catcatctcttgcctgt

SEQ ID NO: 68573 - DNA, 17 bp, Arabidopsis thaliana
catcatctgaccaagat

SEQ ID NO: 68574 - DNA, 17 bp, Arabidopsis thaliana
catcatctggtcacggg

SEQ ID NO: 68575 - DNA, 17 bp, Arabidopsis thaliana
catcatctggtgggtgt

SEQ ID NO: 68576 - DNA, 17 bp, Arabidopsis thaliana
catcatcttcagaggac

SEQ ID NO: 68577 - DNA, 17 bp, Arabidopsis thaliana
catcatcttctcttctg

SEQ ID NO: 68578 - DNA, 17 bp, Arabidopsis thaliana
catcatcttctctttct

SEQ ID NO: 68579 - DNA, 17 bp, Arabidopsis thaliana
catcatcttctgaagca

SEQ ID NO: 68580 - DNA, 17 bp, Arabidopsis thaliana
catcatcttcttggttc

SEQ ID NO: 68581 - DNA, 17 bp, Arabidopsis thaliana
catcatcttgagagagc

SEQ ID NO: 68582 - DNA, 17 bp, Arabidopsis thaliana
catcatctttgtggcta

SEQ ID NO: 68583 - DNA, 17 bp, Arabidopsis thaliana
catcatgaagtttgcag

SEQ ID NO: 68584 - DNA, 17 bp, Arabidopsis thaliana
catcatgccagatagag

SEQ ID NO: 68585 - DNA, 17 bp, Arabidopsis thaliana
catcatgccccttatgc

SEQ ID NO: 68586 - DNA, 17 bp, Arabidopsis thaliana
catcatgcgatctcttt

SEQ ID NO: 68587 - DNA, 17 bp, Arabidopsis thaliana
catcatggacagtgata

SEQ ID NO: 68588 - DNA, 17 bp, Arabidopsis thaliana
catcatgtggtttttgc

SEQ ID NO: 68589 - DNA, 17 bp, Arabidopsis thaliana
catcatgtgttgctcta

SEQ ID NO: 68590 - DNA, 17 bp, Arabidopsis thaliana
catcatgttcgcagttt

SEQ ID NO: 68591 - DNA, 17 bp, Arabidopsis thaliana
catcattacggctttcc

SEQ ID NO: 68592 - DNA, 17 bp, Arabidopsis thaliana
catcattagcgtcaggt

SEQ ID NO: 68593 - DNA, 17 bp, Arabidopsis thaliana
catcattaggctcattg

SEQ ID NO: 68594 - DNA, 17 bp, Arabidopsis thaliana
catcattatcttggacg

SEQ ID NO: 68595 - DNA, 17 bp, Arabidopsis thaliana
catcattcacagcttca

SEQ ID NO: 68596 - DNA, 17 bp, Arabidopsis thaliana
catcattccactcaatg

SEQ ID NO: 68597 - DNA, 17 bp, Arabidopsis thaliana
catcattctcaacataa

SEQ ID NO: 68598 - DNA, 17 bp, Arabidopsis thaliana
catcattgacgacgtag

SEQ ID NO: 68599 - DNA, 17 bp, Arabidopsis thaliana
catcattggctggctct

SEQ ID NO: 68600 - DNA, 17 bp, Arabidopsis thaliana
catcattgtaggcaatg

SEQ ID NO: 68601 - DNA, 17 bp, Arabidopsis thaliana
catcattgtctaagcaa

SEQ ID NO: 68602 - DNA, 17 bp, Arabidopsis thaliana
catcatttctttgggtg

SEQ ID NO: 68603 - DNA, 17 bp, Arabidopsis thaliana
catccaaaagttgtgaa

SEQ ID NO: 68604 - DNA, 17 bp, Arabidopsis thaliana
catccaaactggttgtt

SEQ ID NO: 68605 - DNA, 17 bp, Arabidopsis thaliana
catccaaatgatccatt

SEQ ID NO: 68606 - DNA, 17 bp, Arabidopsis thaliana
catccaaatggaccatc

SEQ ID NO: 68607 - DNA, 17 bp, Arabidopsis thaliana
catccaaatggatcatc

SEQ ID NO: 68608 - DNA, 17 bp, Arabidopsis thaliana
catccaaatggttcgat

SEQ ID NO: 68609 - DNA, 17 bp, Arabidopsis thaliana
catccaaattgggcttt

SEQ ID NO: 68610 - DNA, 17 bp, Arabidopsis thaliana
catccaacaataggcta

SEQ ID NO: 68611 - DNA, 17 bp, Arabidopsis thaliana
catccaaccatgggcta

SEQ ID NO: 68612 - DNA, 17 bp, Arabidopsis thaliana
catccaacgttgtgacc

SEQ ID NO: 68613 - DNA, 17 bp, Arabidopsis thaliana
catccaactataaaccg

SEQ ID NO: 68614 - DNA, 17 bp, Arabidopsis thaliana
catccaagcgaaacgaa

SEQ ID NO: 68615 - DNA, 17 bp, Arabidopsis thaliana
catccaaggatcacttg

SEQ ID NO: 68616 - DNA, 17 bp, Arabidopsis thaliana
catccaaggatgactcg

SEQ ID NO: 68617 - DNA, 17 bp, Arabidopsis thaliana
catccaaggatgacttg

SEQ ID NO: 68618 - DNA, 17 bp, Arabidopsis thaliana
catccaaggcctcaact

SEQ ID NO: 68619 - DNA, 17 bp, Arabidopsis thaliana
catccaatgatgacttg

SEQ ID NO: 68620 - DNA, 17 bp, Arabidopsis thaliana
catccaatggagtttgg

SEQ ID NO: 68621 - DNA, 17 bp, Arabidopsis thaliana
catccaatttggacaag

SEQ ID NO: 68622 - DNA, 17 bp, Arabidopsis thaliana
catccacagttgactgc

SEQ ID NO: 68623 - DNA, 17 bp, Arabidopsis thaliana
catccacatcatcaatt

SEQ ID NO: 68624 - DNA, 17 bp, Arabidopsis thaliana
catccacatttccgcga

SEQ ID NO: 68625 - DNA, 17 bp, Arabidopsis thaliana
catccaccatctggtaa

SEQ ID NO: 68626 - DNA, 17 bp, Arabidopsis thaliana
catccacccatgtcgcg

SEQ ID NO: 68627 - DNA, 17 bp, Arabidopsis thaliana
catccaccgatattgga

SEQ ID NO: 68628 - DNA, 17 bp, Arabidopsis thaliana
catccacctctacttct

SEQ ID NO: 68629 - DNA, 17 bp, Arabidopsis thaliana
catccacgggtggtcca

SEQ ID NO: 68630 - DNA, 17 bp, Arabidopsis thaliana
catccactaaggtcatc

SEQ ID NO: 68631 - DNA, 17 bp, Arabidopsis thaliana
catccactgagattcag

SEQ ID NO: 68632 - DNA, 17 bp, Arabidopsis thaliana
catccactgagtgtgac

SEQ ID NO: 68633 - DNA, 17 bp, Arabidopsis thaliana
catccactgtggtgacc

SEQ ID NO: 68634 - DNA, 17 bp, Arabidopsis thaliana
catccagacttgtgatc

SEQ ID NO: 68635 - DNA, 17 bp, Arabidopsis thaliana
catccagagagaactcg

SEQ ID NO: 68636 - DNA, 17 bp, Arabidopsis thaliana
catccagatgatcgtca

SEQ ID NO: 68637 - DNA, 17 bp, Arabidopsis thaliana
catccagcagactcgac

SEQ ID NO: 68638 - DNA, 17 bp, Arabidopsis thaliana
catccagcatgtccttc

SEQ ID NO: 68639 - DNA, 17 bp, Arabidopsis thaliana
catccagccaaggatga

SEQ ID NO: 68640 - DNA, 17 bp, Arabidopsis thaliana
catccagctgcggtcga

SEQ ID NO: 68641 - DNA, 17 bp, Arabidopsis thaliana
catccaggagcggatct

SEQ ID NO: 68642 - DNA, 17 bp, Arabidopsis thaliana
catccaggagttgtgaa

SEQ ID NO: 68643 - DNA, 17 bp, Arabidopsis thaliana
catccagttgaatgcaa

SEQ ID NO: 68644 - DNA, 17 bp, Arabidopsis thaliana
catccatacgagagatc

SEQ ID NO: 68645 - DNA, 17 bp, Arabidopsis thaliana
catccatacttcgattg

SEQ ID NO: 68646 - DNA, 17 bp, Arabidopsis thaliana
catccatactttgggct

SEQ ID NO: 68647 - DNA, 17 bp, Arabidopsis thaliana
catccatagagagtgcg

SEQ ID NO: 68648 - DNA, 17 bp, Arabidopsis thaliana
catccataggattgtgc

SEQ ID NO: 68649 - DNA, 17 bp, Arabidopsis thaliana
catccatatgagccgaa

SEQ ID NO: 68650 - DNA, 17 bp, Arabidopsis thaliana
catccatatgccttatc

SEQ ID NO: 68651 - DNA, 17 bp, Arabidopsis thaliana
catccatcacacaagaa

SEQ ID NO: 68652 - DNA, 17 bp, Arabidopsis thaliana
catccatcaccaaatct

SEQ ID NO: 68653 - DNA, 17 bp, Arabidopsis thaliana
catccatcagcaatgct

SEQ ID NO: 68654 - DNA, 17 bp, Arabidopsis thaliana
catccatcagctgcgga

SEQ ID NO: 68655 - DNA, 17 bp, Arabidopsis thaliana
catccatcagggaagtg

SEQ ID NO: 68656 - DNA, 17 bp, Arabidopsis thaliana
catccatccaccatctg

SEQ ID NO: 68657 - DNA, 17 bp, Arabidopsis thaliana
catccatcctgtagacg

SEQ ID NO: 68658 - DNA, 17 bp, Arabidopsis thaliana
catccatcctgtagatg

SEQ ID NO: 68659 - DNA, 17 bp, Arabidopsis thaliana
catccatcgacgggaag

SEQ ID NO: 68660 - DNA, 17 bp, Arabidopsis thaliana
catccatcgagtctttg

SEQ ID NO: 68661 - DNA, 17 bp, Arabidopsis thaliana
catccatcgctatgcaa

SEQ ID NO: 68662 - DNA, 17 bp, Arabidopsis thaliana
catccatcggaagttga

SEQ ID NO: 68663 - DNA, 17 bp, Arabidopsis thaliana
catccatcggtagagat

SEQ ID NO: 68664 - DNA, 17 bp, Arabidopsis thaliana
catccatcgtacgatgg

SEQ ID NO: 68665 - DNA, 17 bp, Arabidopsis thaliana
catccatctattctttg

SEQ ID NO: 68666 - DNA, 17 bp, Arabidopsis thaliana
catccatctcttaggct

SEQ ID NO: 68667 - DNA, 17 bp, Arabidopsis thaliana
catccatcttaagggta

SEQ ID NO: 68668 - DNA, 17 bp, Arabidopsis thaliana
catccatcttcagcatg

SEQ ID NO: 68669 - DNA, 17 bp, Arabidopsis thaliana
catccatcttccagagg

SEQ ID NO: 68670 - DNA, 17 bp, Arabidopsis thaliana
catccatcttcgaatgt

SEQ ID NO: 68671 - DNA, 17 bp, Arabidopsis thaliana
catccatcttggacttg

SEQ ID NO: 68672 - DNA, 17 bp, Arabidopsis thaliana
catccatgaagacttag

SEQ ID NO: 68673 - DNA, 17 bp, Arabidopsis thaliana
catccatgaattttgac

SEQ ID NO: 68674 - DNA, 17 bp, Arabidopsis thaliana
catccatgactacggcc

SEQ ID NO: 68675 - DNA, 17 bp, Arabidopsis thaliana
catccatgcctgtcggg

SEQ ID NO: 68676 - DNA, 17 bp, Arabidopsis thaliana
catccatgctaatgtat

SEQ ID NO: 68677 - DNA, 17 bp, Arabidopsis thaliana
catccatggagagttcg

SEQ ID NO: 68678 - DNA, 17 bp, Arabidopsis thaliana
catccatggtgctttgg

SEQ ID NO: 68679 - DNA, 17 bp, Arabidopsis thaliana
catccatggtggtgtat

SEQ ID NO: 68680 - DNA, 17 bp, Arabidopsis thaliana
catccatggtttgcaat

SEQ ID NO: 68681 - DNA, 17 bp, Arabidopsis thaliana
catccatgtcatctgca

SEQ ID NO: 68682 - DNA, 17 bp, Arabidopsis thaliana
catccatgtgtctaccc

SEQ ID NO: 68683 - DNA, 17 bp, Arabidopsis thaliana
catccatgtgtctactc

SEQ ID NO: 68684 - DNA, 17 bp, Arabidopsis thaliana
catccatgttcggccta

SEQ ID NO: 68685 - DNA, 17 bp, Arabidopsis thaliana
catccattagacctctg

SEQ ID NO: 68686 - DNA, 17 bp, Arabidopsis thaliana
catccattatgttcagg

SEQ ID NO: 68687 - DNA, 17 bp, Arabidopsis thaliana
catccattcaaagtgcc

SEQ ID NO: 68688 - DNA, 17 bp, Arabidopsis thaliana
catccattgctcagatc

SEQ ID NO: 68689 - DNA, 17 bp, Arabidopsis thaliana
catccattgctgctgct

SEQ ID NO: 68690 - DNA, 17 bp, Arabidopsis thaliana
catccattggtgccaat

SEQ ID NO: 68691 - DNA, 17 bp, Arabidopsis thaliana
catccattgtcgacttg

SEQ ID NO: 68692 - DNA, 17 bp, Arabidopsis thaliana
catccattgtgacacca

SEQ ID NO: 68693 - DNA, 17 bp, Arabidopsis thaliana
catccattgttcgttta

SEQ ID NO: 68694 - DNA, 17 bp, Arabidopsis thaliana
catccatttcagtttgg

SEQ ID NO: 68695 - DNA, 17 bp, Arabidopsis thaliana
catccatttcccggctg

SEQ ID NO: 68696 - DNA, 17 bp, Arabidopsis thaliana
catccatttctctacgc

SEQ ID NO: 68697 - DNA, 17 bp, Arabidopsis thaliana
catccatttggactggg

SEQ ID NO: 68698 - DNA, 17 bp, Arabidopsis thaliana
catccatttggagcttc

SEQ ID NO: 68699 - DNA, 17 bp, Arabidopsis thaliana
catccatttggcactct

SEQ ID NO: 68700 - DNA, 17 bp, Arabidopsis thaliana
catccatttggtccgtc

SEQ ID NO: 68701 - DNA, 17 bp, Arabidopsis thaliana
catccattttatctgca

SEQ ID NO: 68702 - DNA, 17 bp, Arabidopsis thaliana
catcccaaagctgaggt

SEQ ID NO: 68703 - DNA, 17 bp, Arabidopsis thaliana
catcccaaggttcaact

SEQ ID NO: 68704 - DNA, 17 bp, Arabidopsis thaliana
catcccacagctgtcac

SEQ ID NO: 68705 - DNA, 17 bp, Arabidopsis thaliana
catcccactcttgacac

SEQ ID NO: 68706 - DNA, 17 bp, Arabidopsis thaliana
catcccactgtcaacac

SEQ ID NO: 68707 - DNA, 17 bp, Arabidopsis thaliana
catcccacttaccagta

SEQ ID NO: 68708 - DNA, 17 bp, Arabidopsis thaliana
catcccatatgattcaa

SEQ ID NO: 68709 - DNA, 17 bp, Arabidopsis thaliana
catcccatatgattcca

SEQ ID NO: 68710 - DNA, 17 bp, Arabidopsis thaliana
catcccatccgacgatc

SEQ ID NO: 68711 - DNA, 17 bp, Arabidopsis thaliana
catccccactgtttgat

SEQ ID NO: 68712 - DNA, 17 bp, Arabidopsis thaliana
catcccccatgcattag

SEQ ID NO: 68713 - DNA, 17 bp, Arabidopsis thaliana
catccccgaaaatggat

SEQ ID NO: 68714 - DNA, 17 bp, Arabidopsis thaliana
catcccctgaggctgca

SEQ ID NO: 68715 - DNA, 17 bp, Arabidopsis thaliana
catcccggctggtgcac

SEQ ID NO: 68716 - DNA, 17 bp, Arabidopsis thaliana
catcccgggacccaccc

SEQ ID NO: 68717 - DNA, 17 bp, Arabidopsis thaliana
catcccgtccatagtac

SEQ ID NO: 68718 - DNA, 17 bp, Arabidopsis thaliana
catcccgtccatagtat

SEQ ID NO: 68719 - DNA, 17 bp, Arabidopsis thaliana
catcccgtgcgcaggct

SEQ ID NO: 68720 - DNA, 17 bp, Arabidopsis thaliana
catccctacatagcggg

SEQ ID NO: 68721 - DNA, 17 bp, Arabidopsis thaliana
catccctcgcgggtgca

SEQ ID NO: 68722 - DNA, 17 bp, Arabidopsis thaliana
catccctcttaactcga

SEQ ID NO: 68723 - DNA, 17 bp, Arabidopsis thaliana
catcccttcacggccgg

SEQ ID NO: 68724 - DNA, 17 bp, Arabidopsis thaliana
catcccttctatgtttc

SEQ ID NO: 68725 - DNA, 17 bp, Arabidopsis thaliana
catccctttgtcgctaa

SEQ ID NO: 68726 - DNA, 17 bp, Arabidopsis thaliana
catccgaatgacatgtt

SEQ ID NO: 68727 - DNA, 17 bp, Arabidopsis thaliana
catccgaatgggaacaa

SEQ ID NO: 68728 - DNA, 17 bp, Arabidopsis thaliana
catccgaccaggacgca

SEQ ID NO: 68729 - DNA, 17 bp, Arabidopsis thaliana
catccgactgtgccaag

SEQ ID NO: 68730 - DNA, 17 bp, Arabidopsis thaliana
catccgaggcggagact

SEQ ID NO: 68731 - DNA, 17 bp, Arabidopsis thaliana
catccgatcatcccggt

SEQ ID NO: 68732 - DNA, 17 bp, Arabidopsis thaliana
catccgatcgttgggtc

SEQ ID NO: 68733 - DNA, 17 bp, Arabidopsis thaliana
catccgatgagtttaag

SEQ ID NO: 68734 - DNA, 17 bp, Arabidopsis thaliana
catccgattcgtacaca

SEQ ID NO: 68735 - DNA, 17 bp, Arabidopsis thaliana
catccgcagggaccatc

SEQ ID NO: 68736 - DNA, 17 bp, Arabidopsis thaliana
catccgcatggccgtga

SEQ ID NO: 68737 - DNA, 17 bp, Arabidopsis thaliana
catccgcgagttggaca

SEQ ID NO: 68738 - DNA, 17 bp, Arabidopsis thaliana
catccgctgagacgcct

SEQ ID NO: 68739 - DNA, 17 bp, Arabidopsis thaliana
catccgctgcggttttc

SEQ ID NO: 68740 - DNA, 17 bp, Arabidopsis thaliana
catccgcttgcggtcta

SEQ ID NO: 68741 - DNA, 17 bp, Arabidopsis thaliana
catccggaggaccgagt

SEQ ID NO: 68742 - DNA, 17 bp, Arabidopsis thaliana
catccggggtaattcca

SEQ ID NO: 68743 - DNA, 17 bp, Arabidopsis thaliana
catccggtccgtatgct

SEQ ID NO: 68744 - DNA, 17 bp, Arabidopsis thaliana
catccggttaaaattcc

SEQ ID NO: 68745 - DNA, 17 bp, Arabidopsis thaliana
catccggttcaccgtac

SEQ ID NO: 68746 - DNA, 17 bp, Arabidopsis thaliana
catccggttcgactgat

SEQ ID NO: 68747 - DNA, 17 bp, Arabidopsis thaliana
catccgtacacaggact

SEQ ID NO: 68748 - DNA, 17 bp, Arabidopsis thaliana
catccgtagatggatca

SEQ ID NO: 68749 - DNA, 17 bp, Arabidopsis thaliana
catccgtagatggatcg

SEQ ID NO: 68750 - DNA, 17 bp, Arabidopsis thaliana
catccgtcaacggtgca

SEQ ID NO: 68751 - DNA, 17 bp, Arabidopsis thaliana
catccgtgacaagtgcc

SEQ ID NO: 68752 - DNA, 17 bp, Arabidopsis thaliana
catccgtgatggatatt

SEQ ID NO: 68753 - DNA, 17 bp, Arabidopsis thaliana
catccgtgatgggccaa

SEQ ID NO: 68754 - DNA, 17 bp, Arabidopsis thaliana
catccgtggatgtccag

SEQ ID NO: 68755 - DNA, 17 bp, Arabidopsis thaliana
catccgtggtagttatt

SEQ ID NO: 68756 - DNA, 17 bp, Arabidopsis thaliana
catccgtgtgtttgatg

SEQ ID NO: 68757 - DNA, 17 bp, Arabidopsis thaliana
catccgttctttgcatc

SEQ ID NO: 68758 - DNA, 17 bp, Arabidopsis thaliana
catcctaacagaccggt

SEQ ID NO: 68759 - DNA, 17 bp, Arabidopsis thaliana
catcctaagcttgtgtc

SEQ ID NO: 68760 - DNA, 17 bp, Arabidopsis thaliana
catcctacagttggagc

SEQ ID NO: 68761 - DNA, 17 bp, Arabidopsis thaliana
catcctagcactactct

SEQ ID NO: 68762 - DNA, 17 bp, Arabidopsis thaliana
catcctaggacatccct

SEQ ID NO: 68763 - DNA, 17 bp, Arabidopsis thaliana
catcctatcggctgatt

SEQ ID NO: 68764 - DNA, 17 bp, Arabidopsis thaliana
catcctatgtgcaactt

SEQ ID NO: 68765 - DNA, 17 bp, Arabidopsis thaliana
catcctcaggcgccacc

SEQ ID NO: 68766 - DNA, 17 bp, Arabidopsis thaliana
catcctcaggtggggag

SEQ ID NO: 68767 - DNA, 17 bp, Arabidopsis thaliana
catcctcagtgactgac

SEQ ID NO: 68768 - DNA, 17 bp, Arabidopsis thaliana
catcctcggaagcatac

SEQ ID NO: 68769 - DNA, 17 bp, Arabidopsis thaliana
catcctctcttcatttc

SEQ ID NO: 68770 - DNA, 17 bp, Arabidopsis thaliana
catcctctggggaaatc

SEQ ID NO: 68771 - DNA, 17 bp, Arabidopsis thaliana
catcctctgtggctttt

SEQ ID NO: 68772 - DNA, 17 bp, Arabidopsis thaliana
catcctcttactccggc

SEQ ID NO: 68773 - DNA, 17 bp, Arabidopsis thaliana
catcctgcacgaccacc

SEQ ID NO: 68774 - DNA, 17 bp, Arabidopsis thaliana
catcctgcagatggatc

SEQ ID NO: 68775 - DNA, 17 bp, Arabidopsis thaliana
catcctgcgatgtgcgt

SEQ ID NO: 68776 - DNA, 17 bp, Arabidopsis thaliana
catcctgctgactctgc

SEQ ID NO: 68777 - DNA, 17 bp, Arabidopsis thaliana
catcctgctgtgtgcgt

SEQ ID NO: 68778 - DNA, 17 bp, Arabidopsis thaliana
catcctggaagccactg

SEQ ID NO: 68779 - DNA, 17 bp, Arabidopsis thaliana
catcctggagttcgact

SEQ ID NO: 68780 - DNA, 17 bp, Arabidopsis thaliana
catcctggcgaacggct

SEQ ID NO: 68781 - DNA, 17 bp, Arabidopsis thaliana
catcctggctaggaaga

SEQ ID NO: 68782 - DNA, 17 bp, Arabidopsis thaliana
catcctggctttcttca

SEQ ID NO: 68783 - DNA, 17 bp, Arabidopsis thaliana
catcctgggatggatcg

SEQ ID NO: 68784 - DNA, 17 bp, Arabidopsis thaliana
catcctgtaaatggatg

SEQ ID NO: 68785 - DNA, 17 bp, Arabidopsis thaliana
catcctgtacatggatc

SEQ ID NO: 68786 - DNA, 17 bp, Arabidopsis thaliana
catcctgtagacggatc

SEQ ID NO: 68787 - DNA, 17 bp, Arabidopsis thaliana
catcctgtagatgactc

SEQ ID NO: 68788 - DNA, 17 bp, Arabidopsis thaliana
catcctgtagatggatc

SEQ ID NO: 68789 - DNA, 17 bp, Arabidopsis thaliana
catcctgtagatggatg

SEQ ID NO: 68790 - DNA, 17 bp, Arabidopsis thaliana
catcctgtagatggatt

SEQ ID NO: 68791 - DNA, 17 bp, Arabidopsis thaliana
catcctgtagatggtca

SEQ ID NO: 68792 - DNA, 17 bp, Arabidopsis thaliana
catcctgtagatggtcg

SEQ ID NO: 68793 - DNA, 17 bp, Arabidopsis thaliana
catcctgtaggatggat

SEQ ID NO: 68794 - DNA, 17 bp, Arabidopsis thaliana
catcctgtgttccatgt

SEQ ID NO: 68795 - DNA, 17 bp, Arabidopsis thaliana
catccttacaggttcga

SEQ ID NO: 68796 - DNA, 17 bp, Arabidopsis thaliana
catccttccaaacccgt

SEQ ID NO: 68797 - DNA, 17 bp, Arabidopsis thaliana
catccttccagagtttc

SEQ ID NO: 68798 - DNA, 17 bp, Arabidopsis thaliana
catccttcgatgtcggc

SEQ ID NO: 68799 - DNA, 17 bp, Arabidopsis thaliana
catccttcgatgttgtg

SEQ ID NO: 68800 - DNA, 17 bp, Arabidopsis thaliana
catccttctggttttgg

SEQ ID NO: 68801 - DNA, 17 bp, Arabidopsis thaliana
catccttctggtttttg

SEQ ID NO: 68802 - DNA, 17 bp, Arabidopsis thaliana
catccttgatggacttc

SEQ ID NO: 68803 - DNA, 17 bp, Arabidopsis thaliana
catccttgatttccgtc

SEQ ID NO: 68804 - DNA, 17 bp, Arabidopsis thaliana
catccttgggatgggtc

SEQ ID NO: 68805 - DNA, 17 bp, Arabidopsis thaliana
catccttgtggctttgg

SEQ ID NO: 68806 - DNA, 17 bp, Arabidopsis thaliana
catcctttctacaggta

SEQ ID NO: 68807 - DNA, 17 bp, Arabidopsis thaliana
catcctttgtcgctaag

SEQ ID NO: 68808 - DNA, 17 bp, Arabidopsis thaliana
catcctttttggttagg

SEQ ID NO: 68809 - DNA, 17 bp, Arabidopsis thaliana
catcgaaagttgagtag

SEQ ID NO: 68810 - DNA, 17 bp, Arabidopsis thaliana
catcgaacacagcttat

SEQ ID NO: 68811 - DNA, 17 bp, Arabidopsis thaliana
catcgaacttcttggat

SEQ ID NO: 68812 - DNA, 17 bp, Arabidopsis thaliana
catcgaaggagagatat

SEQ ID NO: 68813 - DNA, 17 bp, Arabidopsis thaliana
catcgaaggtgctttga

SEQ ID NO: 68814 - DNA, 17 bp, Arabidopsis thaliana
catcgaagttgagtagg

SEQ ID NO: 68815 - DNA, 17 bp, Arabidopsis thaliana
catcgaatctttgggtc

SEQ ID NO: 68816 - DNA, 17 bp, Arabidopsis thaliana
catcgaattcgcagatg

SEQ ID NO: 68817 - DNA, 17 bp, Arabidopsis thaliana
catcgacaaaggctttg

SEQ ID NO: 68818 - DNA, 17 bp, Arabidopsis thaliana
catcgacagatctaaac

SEQ ID NO: 68819 - DNA, 17 bp, Arabidopsis thaliana
catcgaccagaggctgt

SEQ ID NO: 68820 - DNA, 17 bp, Arabidopsis thaliana
catcgacgagctttggt

SEQ ID NO: 68821 - DNA, 17 bp, Arabidopsis thaliana
catcgacgccactgatc

SEQ ID NO: 68822 - DNA, 17 bp, Arabidopsis thaliana
catcgacgcggattacg

SEQ ID NO: 68823 - DNA, 17 bp, Arabidopsis thaliana
catcgacggattatcaa

SEQ ID NO: 68824 - DNA, 17 bp, Arabidopsis thaliana
catcgacgggaaggttt

SEQ ID NO: 68825 - DNA, 17 bp, Arabidopsis thaliana
catcgacgtcagatggc

SEQ ID NO: 68826 - DNA, 17 bp, Arabidopsis thaliana
catcgactgtacttagg

SEQ ID NO: 68827 - DNA, 17 bp, Arabidopsis thaliana
catcgacttcgctctga

SEQ ID NO: 68828 - DNA, 17 bp, Arabidopsis thaliana
catcgagatcttgcttg

SEQ ID NO: 68829 - DNA, 17 bp, Arabidopsis thaliana
catcgagcagtcgcttc

SEQ ID NO: 68830 - DNA, 17 bp, Arabidopsis thaliana
catcgagcttgtgctag

SEQ ID NO: 68831 - DNA, 17 bp, Arabidopsis thaliana
catcgaggcgggcttta

SEQ ID NO: 68832 - DNA, 17 bp, Arabidopsis thaliana
catcgaggctctattct

SEQ ID NO: 68833 - DNA, 17 bp, Arabidopsis thaliana
catcgagggcacgtctg

SEQ ID NO: 68834 - DNA, 17 bp, Arabidopsis thaliana
catcgaggtgtgacgtt

SEQ ID NO: 68835 - DNA, 17 bp, Arabidopsis thaliana
catcgagtctttgaacg

SEQ ID NO: 68836 - DNA, 17 bp, Arabidopsis thaliana
catcgagtggttgactg

SEQ ID NO: 68837 - DNA, 17 bp, Arabidopsis thaliana
catcgagttgataccgt

SEQ ID NO: 68838 - DNA, 17 bp, Arabidopsis thaliana
catcgatactgacatgc

SEQ ID NO: 68839 - DNA, 17 bp, Arabidopsis thaliana
catcgatcgcaccgagt

SEQ ID NO: 68840 - DNA, 17 bp, Arabidopsis thaliana
catcgatcggctcatat

SEQ ID NO: 68841 - DNA, 17 bp, Arabidopsis thaliana
catcgatctacaatgct

SEQ ID NO: 68842 - DNA, 17 bp, Arabidopsis thaliana
catcgatggaatctttg

SEQ ID NO: 68843 - DNA, 17 bp, Arabidopsis thaliana
catcgatggaatttttg

SEQ ID NO: 68844 - DNA, 17 bp, Arabidopsis thaliana
catcgatggatcagata

SEQ ID NO: 68845 - DNA, 17 bp, Arabidopsis thaliana
catcgatggatctgtcg

SEQ ID NO: 68846 - DNA, 17 bp, Arabidopsis thaliana
catcgatgggtgagaac

SEQ ID NO: 68847 - DNA, 17 bp, Arabidopsis thaliana
catcgatggtggtgctc

SEQ ID NO: 68848 - DNA, 17 bp, Arabidopsis thaliana
catcgattccgcctcta

SEQ ID NO: 68849 - DNA, 17 bp, Arabidopsis thaliana
catcgattcttaaaatt

SEQ ID NO: 68850 - DNA, 17 bp, Arabidopsis thaliana
catcgattttagtatct

SEQ ID NO: 68851 - DNA, 17 bp, Arabidopsis thaliana
catcgcaaaggtgaagc

SEQ ID NO: 68852 - DNA, 17 bp, Arabidopsis thaliana
catcgcaatagttgctt

SEQ ID NO: 68853 - DNA, 17 bp, Arabidopsis thaliana
catcgcaatgcaaatgg

SEQ ID NO: 68854 - DNA, 17 bp, Arabidopsis thaliana
catcgcaatggctatgg

SEQ ID NO: 68855 - DNA, 17 bp, Arabidopsis thaliana
catcgcacagttgcagt

SEQ ID NO: 68856 - DNA, 17 bp, Arabidopsis thaliana
catcgcacccgctggtt

SEQ ID NO: 68857 - DNA, 17 bp, Arabidopsis thaliana
catcgcacttctcccgc

SEQ ID NO: 68858 - DNA, 17 bp, Arabidopsis thaliana
catcgcagagctcatct

SEQ ID NO: 68859 - DNA, 17 bp, Arabidopsis thaliana
catcgcagcttagacag

SEQ ID NO: 68860 - DNA, 17 bp, Arabidopsis thaliana
catcgcattgcttcatt

SEQ ID NO: 68861 - DNA, 17 bp, Arabidopsis thaliana
catcgccactggccaag

SEQ ID NO: 68862 - DNA, 17 bp, Arabidopsis thaliana
catcgccagttccgacg

SEQ ID NO: 68863 - DNA, 17 bp, Arabidopsis thaliana
catcgccatccacaaac

SEQ ID NO: 68864 - DNA, 17 bp, Arabidopsis thaliana
catcgccatccacaagc

SEQ ID NO: 68865 - DNA, 17 bp, Arabidopsis thaliana
catcgccatctttgtga

SEQ ID NO: 68866 - DNA, 17 bp, Arabidopsis thaliana
catcgcccagaggagag

SEQ ID NO: 68867 - DNA, 17 bp, Arabidopsis thaliana
catcgcccgagacacct

SEQ ID NO: 68868 - DNA, 17 bp, Arabidopsis thaliana
catcgccgaaagtgact

SEQ ID NO: 68869 - DNA, 17 bp, Arabidopsis thaliana
catcgccgattatgagt

SEQ ID NO: 68870 - DNA, 17 bp, Arabidopsis thaliana
catcgccgcgacgtggg

SEQ ID NO: 68871 - DNA, 17 bp, Arabidopsis thaliana
catcgccgctttcatca

SEQ ID NO: 68872 - DNA, 17 bp, Arabidopsis thaliana
catcgccgtcgcagtcg

SEQ ID NO: 68873 - DNA, 17 bp, Arabidopsis thaliana
catcgcctattgcctaa

SEQ ID NO: 68874 - DNA, 17 bp, Arabidopsis thaliana
catcgcctctgtgctgg

SEQ ID NO: 68875 - DNA, 17 bp, Arabidopsis thaliana
catcgcctgctttaaga

SEQ ID NO: 68876 - DNA, 17 bp, Arabidopsis thaliana
catcgcctggttcgtcg

SEQ ID NO: 68877 - DNA, 17 bp, Arabidopsis thaliana
catcgccttgcgtctca

SEQ ID NO: 68878 - DNA, 17 bp, Arabidopsis thaliana
catcgcgcaggctacga

SEQ ID NO: 68879 - DNA, 17 bp, Arabidopsis thaliana
catcgcgggtgggaccc

SEQ ID NO: 68880 - DNA, 17 bp, Arabidopsis thaliana
catcgcggtgtttttgg

SEQ ID NO: 68881 - DNA, 17 bp, Arabidopsis thaliana
catcgcggtttcttctg

SEQ ID NO: 68882 - DNA, 17 bp, Arabidopsis thaliana
catcgctaagttgtcga

SEQ ID NO: 68883 - DNA, 17 bp, Arabidopsis thaliana
catcgctacaaagatca

SEQ ID NO: 68884 - DNA, 17 bp, Arabidopsis thaliana
catcgctacacaggagg

SEQ ID NO: 68885 - DNA, 17 bp, Arabidopsis thaliana
catcgctacacgggagg

SEQ ID NO: 68886 - DNA, 17 bp, Arabidopsis thaliana
catcgctacatgggagg

SEQ ID NO: 68887 - DNA, 17 bp, Arabidopsis thaliana
catcgctacgtcagcta

SEQ ID NO: 68888 - DNA, 17 bp, Arabidopsis thaliana
catcgctatagctgcca

SEQ ID NO: 68889 - DNA, 17 bp, Arabidopsis thaliana
catcgctatctgtgcac

SEQ ID NO: 68890 - DNA, 17 bp, Arabidopsis thaliana
catcgctatgcaaatga

SEQ ID NO: 68891 - DNA, 17 bp, Arabidopsis thaliana
catcgctatttggccga

SEQ ID NO: 68892 - DNA, 17 bp, Arabidopsis thaliana
catcgctcaaatcgtgc

SEQ ID NO: 68893 - DNA, 17 bp, Arabidopsis thaliana
catcgctgcgacaagca

SEQ ID NO: 68894 - DNA, 17 bp, Arabidopsis thaliana
catcgctgcgagcttta

SEQ ID NO: 68895 - DNA, 17 bp, Arabidopsis thaliana
catcgctggattacaga

SEQ ID NO: 68896 - DNA, 17 bp, Arabidopsis thaliana
catcgctggctatactg

SEQ ID NO: 68897 - DNA, 17 bp, Arabidopsis thaliana
catcgctgtttcagaga

SEQ ID NO: 68898 - DNA, 17 bp, Arabidopsis thaliana
catcgcttatggatggt

SEQ ID NO: 68899 - DNA, 17 bp, Arabidopsis thaliana
catcgcttctagcccgg

SEQ ID NO: 68900 - DNA, 17 bp, Arabidopsis thaliana
catcgcttgctacttgg

SEQ ID NO: 68901 - DNA, 17 bp, Arabidopsis thaliana
catcgcttggaatgtcc

SEQ ID NO: 68902 - DNA, 17 bp, Arabidopsis thaliana
catcggaaactgggcaa

SEQ ID NO: 68903 - DNA, 17 bp, Arabidopsis thaliana
catcggaaaggtgggaa

SEQ ID NO: 68904 - DNA, 17 bp, Arabidopsis thaliana
catcggaaatgcttctc

SEQ ID NO: 68905 - DNA, 17 bp, Arabidopsis thaliana
catcggaagttgaatag

SEQ ID NO: 68906 - DNA, 17 bp, Arabidopsis thaliana
catcggaagttgagtag

SEQ ID NO: 68907 - DNA, 17 bp, Arabidopsis thaliana
catcggacaaccgccgc

SEQ ID NO: 68908 - DNA, 17 bp, Arabidopsis thaliana
catcggaccatctgcgg

SEQ ID NO: 68909 - DNA, 17 bp, Arabidopsis thaliana
catcggagaagtgacca

SEQ ID NO: 68910 - DNA, 17 bp, Arabidopsis thaliana
catcggagaggaaattc

SEQ ID NO: 68911 - DNA, 17 bp, Arabidopsis thaliana
catcggagcaacaccct

SEQ ID NO: 68912 - DNA, 17 bp, Arabidopsis thaliana
catcggagttttgatcg

SEQ ID NO: 68913 - DNA, 17 bp, Arabidopsis thaliana
catcggatggatctact

SEQ ID NO: 68914 - DNA, 17 bp, Arabidopsis thaliana
catcggatttagaaccg

SEQ ID NO: 68915 - DNA, 17 bp, Arabidopsis thaliana
catcggattttcaccta

SEQ ID NO: 68916 - DNA, 17 bp, Arabidopsis thaliana
catcggcaagacccggt

SEQ ID NO: 68917 - DNA, 17 bp, Arabidopsis thaliana
catcggcaagacgatta

SEQ ID NO: 68918 - DNA, 17 bp, Arabidopsis thaliana
catcggccagttcttgt

SEQ ID NO: 68919 - DNA, 17 bp, Arabidopsis thaliana
catcggccgatctttct

SEQ ID NO: 68920 - DNA, 17 bp, Arabidopsis thaliana
catcggctaactctgtg

SEQ ID NO: 68921 - DNA, 17 bp, Arabidopsis thaliana
catcggctaccagataa

SEQ ID NO: 68922 - DNA, 17 bp, Arabidopsis thaliana
catcggctatcatcggc

SEQ ID NO: 68923 - DNA, 17 bp, Arabidopsis thaliana
catcggctgatccggtt

SEQ ID NO: 68924 - DNA, 17 bp, Arabidopsis thaliana
catcggctggcggactg

SEQ ID NO: 68925 - DNA, 17 bp, Arabidopsis thaliana
catcggctgggagagat

SEQ ID NO: 68926 - DNA, 17 bp, Arabidopsis thaliana
catcgggacaacggtcg

SEQ ID NO: 68927 - DNA, 17 bp, Arabidopsis thaliana
catcgggagtttctgga

SEQ ID NO: 68928 - DNA, 17 bp, Arabidopsis thaliana
catcgggttcggattgg

SEQ ID NO: 68929 - DNA, 17 bp, Arabidopsis thaliana
catcgggttcgtgacgg

SEQ ID NO: 68930 - DNA, 17 bp, Arabidopsis thaliana
catcggtaggggagcgt

SEQ ID NO: 68931 - DNA, 17 bp, Arabidopsis thaliana
catcggtgaactcgtgg

SEQ ID NO: 68932 - DNA, 17 bp, Arabidopsis thaliana
catcggttacaatctct

SEQ ID NO: 68933 - DNA, 17 bp, Arabidopsis thaliana
catcggttagggtcatg

SEQ ID NO: 68934 - DNA, 17 bp, Arabidopsis thaliana
catcggttcctgaatgg

SEQ ID NO: 68935 - DNA, 17 bp, Arabidopsis thaliana
catcggttcttaaatgg

SEQ ID NO: 68936 - DNA, 17 bp, Arabidopsis thaliana
catcggttcttgaatgg

SEQ ID NO: 68937 - DNA, 17 bp, Arabidopsis thaliana
catcggtttacagtttt

SEQ ID NO: 68938 - DNA, 17 bp, Arabidopsis thaliana
catcggtttgcggatga

SEQ ID NO: 68939 - DNA, 17 bp, Arabidopsis thaliana
catcggtttgttgtcca

SEQ ID NO: 68940 - DNA, 17 bp, Arabidopsis thaliana
catcgtacatcttttgc

SEQ ID NO: 68941 - DNA, 17 bp, Arabidopsis thaliana
catcgtaccccttctgt

SEQ ID NO: 68942 - DNA, 17 bp, Arabidopsis thaliana
catcgtaccccttgcac

SEQ ID NO: 68943 - DNA, 17 bp, Arabidopsis thaliana
catcgtacgatggagcg

SEQ ID NO: 68944 - DNA, 17 bp, Arabidopsis thaliana
catcgtagatgtcaacc

SEQ ID NO: 68945 - DNA, 17 bp, Arabidopsis thaliana
catcgtagatgtcaagc

SEQ ID NO: 68946 - DNA, 17 bp, Arabidopsis thaliana
catcgtatcacgctaga

SEQ ID NO: 68947 - DNA, 17 bp, Arabidopsis thaliana
catcgtcaacgtcaccg

SEQ ID NO: 68948 - DNA, 17 bp, Arabidopsis thaliana
catcgtcactggtaagg

SEQ ID NO: 68949 - DNA, 17 bp, Arabidopsis thaliana
catcgtcagaccaggtt

SEQ ID NO: 68950 - DNA, 17 bp, Arabidopsis thaliana
catcgtcatctgatagc

SEQ ID NO: 68951 - DNA, 17 bp, Arabidopsis thaliana
catcgtccaaatttctc

SEQ ID NO: 68952 - DNA, 17 bp, Arabidopsis thaliana
catcgtccaccactcga

SEQ ID NO: 68953 - DNA, 17 bp, Arabidopsis thaliana
catcgtcgacatagaca

SEQ ID NO: 68954 - DNA, 17 bp, Arabidopsis thaliana
catcgtcgattagcact

SEQ ID NO: 68955 - DNA, 17 bp, Arabidopsis thaliana
catcgtcggttctgaat

SEQ ID NO: 68956 - DNA, 17 bp, Arabidopsis thaliana
catcgtcgtatctggaa

SEQ ID NO: 68957 - DNA, 17 bp, Arabidopsis thaliana
catcgtctccgagactg

SEQ ID NO: 68958 - DNA, 17 bp, Arabidopsis thaliana
catcgtctctatctcac

SEQ ID NO: 68959 - DNA, 17 bp, Arabidopsis thaliana
catcgtctcttggtccc

SEQ ID NO: 68960 - DNA, 17 bp, Arabidopsis thaliana
catcgtctcttggttcc

SEQ ID NO: 68961 - DNA, 17 bp, Arabidopsis thaliana
catcgtcttaaacagcg

SEQ ID NO: 68962 - DNA, 17 bp, Arabidopsis thaliana
catcgtgaactatctct

SEQ ID NO: 68963 - DNA, 17 bp, Arabidopsis thaliana
catcgtgagactgctcg

SEQ ID NO: 68964 - DNA, 17 bp, Arabidopsis thaliana
catcgtgagagtcttgt

SEQ ID NO: 68965 - DNA, 17 bp, Arabidopsis thaliana
catcgtgatggggatag

SEQ ID NO: 68966 - DNA, 17 bp, Arabidopsis thaliana
catcgtgcaggttttgg

SEQ ID NO: 68967 - DNA, 17 bp, Arabidopsis thaliana
catcgtgccgatgacga

SEQ ID NO: 68968 - DNA, 17 bp, Arabidopsis thaliana
catcgtgctccgggcgt

SEQ ID NO: 68969 - DNA, 17 bp, Arabidopsis thaliana
catcgtggtctgcagca

SEQ ID NO: 68970 - DNA, 17 bp, Arabidopsis thaliana
catcgtggtggtagcgg

SEQ ID NO: 68971 - DNA, 17 bp, Arabidopsis thaliana
catcgttaattgactca

SEQ ID NO: 68972 - DNA, 17 bp, Arabidopsis thaliana
catcgttagactgtgat

SEQ ID NO: 68973 - DNA, 17 bp, Arabidopsis thaliana
catcgttataacgcatg

SEQ ID NO: 68974 - DNA, 17 bp, Arabidopsis thaliana
catcgttccagtcagtg

SEQ ID NO: 68975 - DNA, 17 bp, Arabidopsis thaliana
catcgttccccacagac

SEQ ID NO: 68976 - DNA, 17 bp, Arabidopsis thaliana
catcgttgacccgacca

SEQ ID NO: 68977 - DNA, 17 bp, Arabidopsis thaliana
catcgttgcgacaagca

SEQ ID NO: 68978 - DNA, 17 bp, Arabidopsis thaliana
catcgttgggcatggtc

SEQ ID NO: 68979 - DNA, 17 bp, Arabidopsis thaliana
catcgttggtcattgtg

SEQ ID NO: 68980 - DNA, 17 bp, Arabidopsis thaliana
catcgtttctatggcgg

SEQ ID NO: 68981 - DNA, 17 bp, Arabidopsis thaliana
catcgtttcttgaatgt

SEQ ID NO: 68982 - DNA, 17 bp, Arabidopsis thaliana
catcgttttctcgtcct

SEQ ID NO: 68983 - DNA, 17 bp, Arabidopsis thaliana
catcgttttgcctctgc

SEQ ID NO: 68984 - DNA, 17 bp, Arabidopsis thaliana
catcgttttgcggatga

SEQ ID NO: 68985 - DNA, 17 bp, Arabidopsis thaliana
catcgtttttggctcct

SEQ ID NO: 68986 - DNA, 17 bp, Arabidopsis thaliana
catctaaacccatcatc

SEQ ID NO: 68987 - DNA, 17 bp, Arabidopsis thaliana
catctaaactttgtggg

SEQ ID NO: 68988 - DNA, 17 bp, Arabidopsis thaliana
catctaaatgcggaagt

SEQ ID NO: 68989 - DNA, 17 bp, Arabidopsis thaliana
catctaaccgctctcat

SEQ ID NO: 68990 - DNA, 17 bp, Arabidopsis thaliana
catctaacgcctttagc

SEQ ID NO: 68991 - DNA, 17 bp, Arabidopsis thaliana
catctaactcggcgacg

SEQ ID NO: 68992 - DNA, 17 bp, Arabidopsis thaliana
catctaagccaatcatc

SEQ ID NO: 68993 - DNA, 17 bp, Arabidopsis thaliana
catctaagcccatcacc

SEQ ID NO: 68994 - DNA, 17 bp, Arabidopsis thaliana
catctaagcccatcatc

SEQ ID NO: 68995 - DNA, 17 bp, Arabidopsis thaliana
catctaagtcaagtgac

SEQ ID NO: 68996 - DNA, 17 bp, Arabidopsis thaliana
catctaagttccggtga

SEQ ID NO: 68997 - DNA, 17 bp, Arabidopsis thaliana
catctaattagtgaccc

SEQ ID NO: 68998 - DNA, 17 bp, Arabidopsis thaliana
catctacaactgcagcc

SEQ ID NO: 68999 - DNA, 17 bp, Arabidopsis thaliana
catctacaatcagctcg

SEQ ID NO: 69000 - DNA, 17 bp, Arabidopsis thaliana
catctacaatcggctcg

SEQ ID NO: 69001 - DNA, 17 bp, Arabidopsis thaliana
catctacaatggtgggc

SEQ ID NO: 69002 - DNA, 17 bp, Arabidopsis thaliana
catctacacgatccgac

SEQ ID NO: 69003 - DNA, 17 bp, Arabidopsis thaliana
catctacagaatgcgac

SEQ ID NO: 69004 - DNA, 17 bp, Arabidopsis thaliana
catctacagatgcgacc

SEQ ID NO: 69005 - DNA, 17 bp, Arabidopsis thaliana
catctacagatgcgact

SEQ ID NO: 69006 - DNA, 17 bp, Arabidopsis thaliana
catctacagattcggga

SEQ ID NO: 69007 - DNA, 17 bp, Arabidopsis thaliana
catctacagcagagggc

SEQ ID NO: 69008 - DNA, 17 bp, Arabidopsis thaliana
catctacagctacaaac

SEQ ID NO: 69009 - DNA, 17 bp, Arabidopsis thaliana
catctacaggaccgcat

SEQ ID NO: 69010 - DNA, 17 bp, Arabidopsis thaliana
catctacaggacgcgga

SEQ ID NO: 69011 - DNA, 17 bp, Arabidopsis thaliana
catctacaggatcgact

SEQ ID NO: 69012 - DNA, 17 bp, Arabidopsis thaliana
catctacaggatcgcat

SEQ ID NO: 69013 - DNA, 17 bp, Arabidopsis thaliana
catctacaggatgagac

SEQ ID NO: 69014 - DNA, 17 bp, Arabidopsis thaliana
catctacaggatgcatt

SEQ ID NO: 69015 - DNA, 17 bp, Arabidopsis thaliana
catctacaggatgcgac

SEQ ID NO: 69016 - DNA, 17 bp, Arabidopsis thaliana
catctacaggatgcgag

SEQ ID NO: 69017 - DNA, 17 bp, Arabidopsis thaliana
catctacaggatgcgat

SEQ ID NO: 69018 - DNA, 17 bp, Arabidopsis thaliana
catctacaggatgcgcc

SEQ ID NO: 69019 - DNA, 17 bp, Arabidopsis thaliana
catctacaggatgcgga

SEQ ID NO: 69020 - DNA, 17 bp, Arabidopsis thaliana
catctacaggatgcgta

SEQ ID NO: 69021 - DNA, 17 bp, Arabidopsis thaliana
catctacaggatggatc

SEQ ID NO: 69022 - DNA, 17 bp, Arabidopsis thaliana
catctacaggcgactga

SEQ ID NO: 69023 - DNA, 17 bp, Arabidopsis thaliana
catctacagggcgagat

SEQ ID NO: 69024 - DNA, 17 bp, Arabidopsis thaliana
catctacagggtgcggc

SEQ ID NO: 69025 - DNA, 17 bp, Arabidopsis thaliana
catctacagtagcagcc

SEQ ID NO: 69026 - DNA, 17 bp, Arabidopsis thaliana
catctacatacttgcgt

SEQ ID NO: 69027 - DNA, 17 bp, Arabidopsis thaliana
catctacatcggttgat

SEQ ID NO: 69028 - DNA, 17 bp, Arabidopsis thaliana
catctacatttacagcg

SEQ ID NO: 69029 - DNA, 17 bp, Arabidopsis thaliana
catctaccgacaagtgc

SEQ ID NO: 69030 - DNA, 17 bp, Arabidopsis thaliana
catctacgagcacggca

SEQ ID NO: 69031 - DNA, 17 bp, Arabidopsis thaliana
catctacgaggtcagtc

SEQ ID NO: 69032 - DNA, 17 bp, Arabidopsis thaliana
catctacgctgaagctt

SEQ ID NO: 69033 - DNA, 17 bp, Arabidopsis thaliana
catctacggctagttgc

SEQ ID NO: 69034 - DNA, 17 bp, Arabidopsis thaliana
catctacgggatgcgac

SEQ ID NO: 69035 - DNA, 17 bp, Arabidopsis thaliana
catctactgttctttcc

SEQ ID NO: 69036 - DNA, 17 bp, Arabidopsis thaliana
catctactgtttttgtg

SEQ ID NO: 69037 - DNA, 17 bp, Arabidopsis thaliana
catctacttacacttaa

SEQ ID NO: 69038 - DNA, 17 bp, Arabidopsis thaliana
catctacttccctatgt

SEQ ID NO: 69039 - DNA, 17 bp, Arabidopsis thaliana
catctacttccggaggc

SEQ ID NO: 69040 - DNA, 17 bp, Arabidopsis thaliana
catctacttccttgttc

SEQ ID NO: 69041 - DNA, 17 bp, Arabidopsis thaliana
catctactttcggattc

SEQ ID NO: 69042 - DNA, 17 bp, Arabidopsis thaliana
catctagaatcgaccct

SEQ ID NO: 69043 - DNA, 17 bp, Arabidopsis thaliana
catctagacatcatctc

SEQ ID NO: 69044 - DNA, 17 bp, Arabidopsis thaliana
catctagctaactctct

SEQ ID NO: 69045 - DNA, 17 bp, Arabidopsis thaliana
catctaggatcatcttg

SEQ ID NO: 69046 - DNA, 17 bp, Arabidopsis thaliana
catctagggccaagagt

SEQ ID NO: 69047 - DNA, 17 bp, Arabidopsis thaliana
catctagggttcaattt

SEQ ID NO: 69048 - DNA, 17 bp, Arabidopsis thaliana
catctagtgggacgagt

SEQ ID NO: 69049 - DNA, 17 bp, Arabidopsis thaliana
catctagtttggtatga

SEQ ID NO: 69050 - DNA, 17 bp, Arabidopsis thaliana
catctatctattggacc

SEQ ID NO: 69051 - DNA, 17 bp, Arabidopsis thaliana
catctatctgcggtagt

SEQ ID NO: 69052 - DNA, 17 bp, Arabidopsis thaliana
catctatggagctttgc

SEQ ID NO: 69053 - DNA, 17 bp, Arabidopsis thaliana
catctatgtcctaacta

SEQ ID NO: 69054 - DNA, 17 bp, Arabidopsis thaliana
catctattagctcagtg

SEQ ID NO: 69055 - DNA, 17 bp, Arabidopsis thaliana
catctattctttgagtg

SEQ ID NO: 69056 - DNA, 17 bp, Arabidopsis thaliana
catctattctttgggag

SEQ ID NO: 69057 - DNA, 17 bp, Arabidopsis thaliana
catctattgcccagatt

SEQ ID NO: 69058 - DNA, 17 bp, Arabidopsis thaliana
catctatttaatttttg

SEQ ID NO: 69059 - DNA, 17 bp, Arabidopsis thaliana
catctatttgctgggtt

SEQ ID NO: 69060 - DNA, 17 bp, Arabidopsis thaliana
catctattttggtccac

SEQ ID NO: 69061 - DNA, 17 bp, Arabidopsis thaliana
catctcaaaggctttga

SEQ ID NO: 69062 - DNA, 17 bp, Arabidopsis thaliana
catctcaaagtaggctg

SEQ ID NO: 69063 - DNA, 17 bp, Arabidopsis thaliana
catctcaagttttcggc

SEQ ID NO: 69064 - DNA, 17 bp, Arabidopsis thaliana
catctcacagaacggtg

SEQ ID NO: 69065 - DNA, 17 bp, Arabidopsis thaliana
catctcactccgcctac

SEQ ID NO: 69066 - DNA, 17 bp, Arabidopsis thaliana
catctcactcgacaacc

SEQ ID NO: 69067 - DNA, 17 bp, Arabidopsis thaliana
catctcactttggagtg

SEQ ID NO: 69068 - DNA, 17 bp, Arabidopsis thaliana
catctcaggccgaattg

SEQ ID NO: 69069 - DNA, 17 bp, Arabidopsis thaliana
catctcaggcgtcgcag

SEQ ID NO: 69070 - DNA, 17 bp, Arabidopsis thaliana
catctcatcggcagctg

SEQ ID NO: 69071 - DNA, 17 bp, Arabidopsis thaliana
catctcatggccgttat

SEQ ID NO: 69072 - DNA, 17 bp, Arabidopsis thaliana
catctcattcggatagt

SEQ ID NO: 69073 - DNA, 17 bp, Arabidopsis thaliana
catctcattgagatact

SEQ ID NO: 69074 - DNA, 17 bp, Arabidopsis thaliana
catctcatttttagggc

SEQ ID NO: 69075 - DNA, 17 bp, Arabidopsis thaliana
catctcatttttggggc

SEQ ID NO: 69076 - DNA, 17 bp, Arabidopsis thaliana
catctccaaatctatcg

SEQ ID NO: 69077 - DNA, 17 bp, Arabidopsis thaliana
catctccaatagagaga

SEQ ID NO: 69078 - DNA, 17 bp, Arabidopsis thaliana
catctccagtgagaata

SEQ ID NO: 69079 - DNA, 17 bp, Arabidopsis thaliana
catctccatcaattgtt

SEQ ID NO: 69080 - DNA, 17 bp, Arabidopsis thaliana
catctccatcatcgtgt

SEQ ID NO: 69081 - DNA, 17 bp, Arabidopsis thaliana
catctccatcggttaca

SEQ ID NO: 69082 - DNA, 17 bp, Arabidopsis thaliana
catctccatgtccgtgt

SEQ ID NO: 69083 - DNA, 17 bp, Arabidopsis thaliana
catctccattggtcaga

SEQ ID NO: 69084 - DNA, 17 bp, Arabidopsis thaliana
catctcccagaggcaca

SEQ ID NO: 69085 - DNA, 17 bp, Arabidopsis thaliana
catctcccagaggcggg

SEQ ID NO: 69086 - DNA, 17 bp, Arabidopsis thaliana
catctcccgggaagtcc

SEQ ID NO: 69087 - DNA, 17 bp, Arabidopsis thaliana
catctccgacgaaataa

SEQ ID NO: 69088 - DNA, 17 bp, Arabidopsis thaliana
catctccgagaggcgtg

SEQ ID NO: 69089 - DNA, 17 bp, Arabidopsis thaliana
catctccgatctgtcta

SEQ ID NO: 69090 - DNA, 17 bp, Arabidopsis thaliana
catctccggcgagacgt

SEQ ID NO: 69091 - DNA, 17 bp, Arabidopsis thaliana
catctccgggctgtgat

SEQ ID NO: 69092 - DNA, 17 bp, Arabidopsis thaliana
catctccggttagatca

SEQ ID NO: 69093 - DNA, 17 bp, Arabidopsis thaliana
catctcctcgagggcct

SEQ ID NO: 69094 - DNA, 17 bp, Arabidopsis thaliana
catctcctgaccaccac

SEQ ID NO: 69095 - DNA, 17 bp, Arabidopsis thaliana
catctccttcatggcgg

SEQ ID NO: 69096 - DNA, 17 bp, Arabidopsis thaliana
catctcgaccaggatcg

SEQ ID NO: 69097 - DNA, 17 bp, Arabidopsis thaliana
catctcgactgtcgatc

SEQ ID NO: 69098 - DNA, 17 bp, Arabidopsis thaliana
catctcgacttctacac

SEQ ID NO: 69099 - DNA, 17 bp, Arabidopsis thaliana
catctcgagttttgttg

SEQ ID NO: 69100 - DNA, 17 bp, Arabidopsis thaliana
catctcgatgaccgagg

SEQ ID NO: 69101 - DNA, 17 bp, Arabidopsis thaliana
catctcgatgttcattg

SEQ ID NO: 69102 - DNA, 17 bp, Arabidopsis thaliana
catctcgcaatgggctg

SEQ ID NO: 69103 - DNA, 17 bp, Arabidopsis thaliana
catctcgcgagctctgc

SEQ ID NO: 69104 - DNA, 17 bp, Arabidopsis thaliana
catctcggtaggacctc

SEQ ID NO: 69105 - DNA, 17 bp, Arabidopsis thaliana
catctcggtgtcaacag

SEQ ID NO: 69106 - DNA, 17 bp, Arabidopsis thaliana
catctcgtataatctag

SEQ ID NO: 69107 - DNA, 17 bp, Arabidopsis thaliana
catctcgtataatgtcc

SEQ ID NO: 69108 - DNA, 17 bp, Arabidopsis thaliana
catctctaccgatggat

SEQ ID NO: 69109 - DNA, 17 bp, Arabidopsis thaliana
catctctagactctaga

SEQ ID NO: 69110 - DNA, 17 bp, Arabidopsis thaliana
catctctagaggaggtt

SEQ ID NO: 69111 - DNA, 17 bp, Arabidopsis thaliana
catctctcaactatcca

SEQ ID NO: 69112 - DNA, 17 bp, Arabidopsis thaliana
catctctcaagacggac

SEQ ID NO: 69113 - DNA, 17 bp, Arabidopsis thaliana
catctctcagaggcggg

SEQ ID NO: 69114 - DNA, 17 bp, Arabidopsis thaliana
catctctctgttccacg

SEQ ID NO: 69115 - DNA, 17 bp, Arabidopsis thaliana
catctctgccgcagtga

SEQ ID NO: 69116 - DNA, 17 bp, Arabidopsis thaliana
catctctgcgtgctgtg

SEQ ID NO: 69117 - DNA, 17 bp, Arabidopsis thaliana
catctctggaactttga

SEQ ID NO: 69118 - DNA, 17 bp, Arabidopsis thaliana
catctctggagacgaac

SEQ ID NO: 69119 - DNA, 17 bp, Arabidopsis thaliana
catctctgggcacttgt

SEQ ID NO: 69120 - DNA, 17 bp, Arabidopsis thaliana
catctctggtgaattgg

SEQ ID NO: 69121 - DNA, 17 bp, Arabidopsis thaliana
catctctggttaaatac

SEQ ID NO: 69122 - DNA, 17 bp, Arabidopsis thaliana
catctctggtttcgcct

SEQ ID NO: 69123 - DNA, 17 bp, Arabidopsis thaliana
catctctgtcaatccac

SEQ ID NO: 69124 - DNA, 17 bp, Arabidopsis thaliana
catctctgttgtcgtcg

SEQ ID NO: 69125 - DNA, 17 bp, Arabidopsis thaliana
catctcttagatctgct

SEQ ID NO: 69126 - DNA, 17 bp, Arabidopsis thaliana
catctcttaggctatga

SEQ ID NO: 69127 - DNA, 17 bp, Arabidopsis thaliana
catctcttagtggcgta

SEQ ID NO: 69128 - DNA, 17 bp, Arabidopsis thaliana
catctcttattgccaga

SEQ ID NO: 69129 - DNA, 17 bp, Arabidopsis thaliana
catctcttccattgcat

SEQ ID NO: 69130 - DNA, 17 bp, Arabidopsis thaliana
catctcttcccctttac

SEQ ID NO: 69131 - DNA, 17 bp, Arabidopsis thaliana
catctcttccgctttac

SEQ ID NO: 69132 - DNA, 17 bp, Arabidopsis thaliana
catctcttcgtgacctt

SEQ ID NO: 69133 - DNA, 17 bp, Arabidopsis thaliana
catctcttgatctcttc

SEQ ID NO: 69134 - DNA, 17 bp, Arabidopsis thaliana
catctcttgccgacatg

SEQ ID NO: 69135 - DNA, 17 bp, Arabidopsis thaliana
catctcttgcggagcgg

SEQ ID NO: 69136 - DNA, 17 bp, Arabidopsis thaliana
catctcttggagagtcg

SEQ ID NO: 69137 - DNA, 17 bp, Arabidopsis thaliana
catctctttccatcact

SEQ ID NO: 69138 - DNA, 17 bp, Arabidopsis thaliana
catctgaaatgaactgg

SEQ ID NO: 69139 - DNA, 17 bp, Arabidopsis thaliana
catctgacccgagtagc

SEQ ID NO: 69140 - DNA, 17 bp, Arabidopsis thaliana
catctgacgcatggtgg

SEQ ID NO: 69141 - DNA, 17 bp, Arabidopsis thaliana
catctgacgtgccatct

SEQ ID NO: 69142 - DNA, 17 bp, Arabidopsis thaliana
catctgacgtggctctg

SEQ ID NO: 69143 - DNA, 17 bp, Arabidopsis thaliana
catctgacgtggcttca

SEQ ID NO: 69144 - DNA, 17 bp, Arabidopsis thaliana
catctgacgtggcttct

SEQ ID NO: 69145 - DNA, 17 bp, Arabidopsis thaliana
catctgagacacagtac

SEQ ID NO: 69146 - DNA, 17 bp, Arabidopsis thaliana
catctgaggagttggat

SEQ ID NO: 69147 - DNA, 17 bp, Arabidopsis thaliana
catctgaggcatagttg

SEQ ID NO: 69148 - DNA, 17 bp, Arabidopsis thaliana
catctgagggctgggct

SEQ ID NO: 69149 - DNA, 17 bp, Arabidopsis thaliana
catctgagtagtcgtgt

SEQ ID NO: 69150 - DNA, 17 bp, Arabidopsis thaliana
catctgatcgacagact

SEQ ID NO: 69151 - DNA, 17 bp, Arabidopsis thaliana
catctgatcgtttgact

SEQ ID NO: 69152 - DNA, 17 bp, Arabidopsis thaliana
catctgattgagcgagg

SEQ ID NO: 69153 - DNA, 17 bp, Arabidopsis thaliana
catctgatttcgaaata

SEQ ID NO: 69154 - DNA, 17 bp, Arabidopsis thaliana
catctgcacatggctgg

SEQ ID NO: 69155 - DNA, 17 bp, Arabidopsis thaliana
catctgcagccttttga

SEQ ID NO: 69156 - DNA, 17 bp, Arabidopsis thaliana
catctgcagttgaaccg

SEQ ID NO: 69157 - DNA, 17 bp, Arabidopsis thaliana
catctgcagtttcagtt

SEQ ID NO: 69158 - DNA, 17 bp, Arabidopsis thaliana
catctgcattcagatga

SEQ ID NO: 69159 - DNA, 17 bp, Arabidopsis thaliana
catctgcattgcacatg

SEQ ID NO: 69160 - DNA, 17 bp, Arabidopsis thaliana
catctgcattgggagtc

SEQ ID NO: 69161 - DNA, 17 bp, Arabidopsis thaliana
catctgcatttggatga

SEQ ID NO: 69162 - DNA, 17 bp, Arabidopsis thaliana
catctgccattacgaca

SEQ ID NO: 69163 - DNA, 17 bp, Arabidopsis thaliana
catctgcccaatttgtc

SEQ ID NO: 69164 - DNA, 17 bp, Arabidopsis thaliana
catctgccgaccgtttt

SEQ ID NO: 69165 - DNA, 17 bp, Arabidopsis thaliana
catctgcgattgagagt

SEQ ID NO: 69166 - DNA, 17 bp, Arabidopsis thaliana
catctgcggactgtttt

SEQ ID NO: 69167 - DNA, 17 bp, Arabidopsis thaliana
catctgcgtctgtttgc

SEQ ID NO: 69168 - DNA, 17 bp, Arabidopsis thaliana
catctgctacagctgtg

SEQ ID NO: 69169 - DNA, 17 bp, Arabidopsis thaliana
catctgctgcctgtagc

SEQ ID NO: 69170 - DNA, 17 bp, Arabidopsis thaliana
catctgcttcagcttgc

SEQ ID NO: 69171 - DNA, 17 bp, Arabidopsis thaliana
catctgctttttttgac

SEQ ID NO: 69172 - DNA, 17 bp, Arabidopsis thaliana
catctgctttttttttt

SEQ ID NO: 69173 - DNA, 17 bp, Arabidopsis thaliana
catctggaacctctact

SEQ ID NO: 69174 - DNA, 17 bp, Arabidopsis thaliana
catctggactgccatca

SEQ ID NO: 69175 - DNA, 17 bp, Arabidopsis thaliana
catctggattggaccac

SEQ ID NO: 69176 - DNA, 17 bp, Arabidopsis thaliana
catctggccaaagctga

SEQ ID NO: 69177 - DNA, 17 bp, Arabidopsis thaliana
catctggtggaacgagt

SEQ ID NO: 69178 - DNA, 17 bp, Arabidopsis thaliana
catctggtgtagtggta

SEQ ID NO: 69179 - DNA, 17 bp, Arabidopsis thaliana
catctggttgcttgggt

SEQ ID NO: 69180 - DNA, 17 bp, Arabidopsis thaliana
catctgtaaacggatct

SEQ ID NO: 69181 - DNA, 17 bp, Arabidopsis thaliana
catctgtacagtgatct

SEQ ID NO: 69182 - DNA, 17 bp, Arabidopsis thaliana
catctgtagatggacat

SEQ ID NO: 69183 - DNA, 17 bp, Arabidopsis thaliana
catctgtagatggaccc

SEQ ID NO: 69184 - DNA, 17 bp, Arabidopsis thaliana
catctgtagatggatca

SEQ ID NO: 69185 - DNA, 17 bp, Arabidopsis thaliana
catctgtagatggatct

SEQ ID NO: 69186 - DNA, 17 bp, Arabidopsis thaliana
catctgtaggatggatc

SEQ ID NO: 69187 - DNA, 17 bp, Arabidopsis thaliana
catctgtagtgcgttga

SEQ ID NO: 69188 - DNA, 17 bp, Arabidopsis thaliana
catctgtcatcttagag

SEQ ID NO: 69189 - DNA, 17 bp, Arabidopsis thaliana
catctgtctatccaggg

SEQ ID NO: 69190 - DNA, 17 bp, Arabidopsis thaliana
catctgtgaatgtcggg

SEQ ID NO: 69191 - DNA, 17 bp, Arabidopsis thaliana
catctgtgtaattgtgt

SEQ ID NO: 69192 - DNA, 17 bp, Arabidopsis thaliana
catctgtgtgactctgg

SEQ ID NO: 69193 - DNA, 17 bp, Arabidopsis thaliana
catctgtgttaatcgga

SEQ ID NO: 69194 - DNA, 17 bp, Arabidopsis thaliana
catctgttcgagctgga

SEQ ID NO: 69195 - DNA, 17 bp, Arabidopsis thaliana
catctgttggagctgga

SEQ ID NO: 69196 - DNA, 17 bp, Arabidopsis thaliana
catctgttggtggttgt

SEQ ID NO: 69197 - DNA, 17 bp, Arabidopsis thaliana
catctgttgtgacgaat

SEQ ID NO: 69198 - DNA, 17 bp, Arabidopsis thaliana
catctgttttacgtttg

SEQ ID NO: 69199 - DNA, 17 bp, Arabidopsis thaliana
catcttaaacttgtgtt

SEQ ID NO: 69200 - DNA, 17 bp, Arabidopsis thaliana
catcttaaccattgggg

SEQ ID NO: 69201 - DNA, 17 bp, Arabidopsis thaliana
catcttaaccgattttg

SEQ ID NO: 69202 - DNA, 17 bp, Arabidopsis thaliana
catcttaagggtaatta

SEQ ID NO: 69203 - DNA, 17 bp, Arabidopsis thaliana
catcttaagggtaattt

SEQ ID NO: 69204 - DNA, 17 bp, Arabidopsis thaliana
catcttacaagatcggg

SEQ ID NO: 69205 - DNA, 17 bp, Arabidopsis thaliana
catcttacacccgctta

SEQ ID NO: 69206 - DNA, 17 bp, Arabidopsis thaliana
catcttagtggattgac

SEQ ID NO: 69207 - DNA, 17 bp, Arabidopsis thaliana
catcttatcatgatcca

SEQ ID NO: 69208 - DNA, 17 bp, Arabidopsis thaliana
catcttatcctcagtgc

SEQ ID NO: 69209 - DNA, 17 bp, Arabidopsis thaliana
catcttcaatggttaca

SEQ ID NO: 69210 - DNA, 17 bp, Arabidopsis thaliana
catcttcaccaggtctg

SEQ ID NO: 69211 - DNA, 17 bp, Arabidopsis thaliana
catcttcactagctctg

SEQ ID NO: 69212 - DNA, 17 bp, Arabidopsis thaliana
catcttcactaggtctg

SEQ ID NO: 69213 - DNA, 17 bp, Arabidopsis thaliana
catcttcagcatacttt

SEQ ID NO: 69214 - DNA, 17 bp, Arabidopsis thaliana
catcttcagcatgcttt

SEQ ID NO: 69215 - DNA, 17 bp, Arabidopsis thaliana
catcttcagtcgctgtg

SEQ ID NO: 69216 - DNA, 17 bp, Arabidopsis thaliana
catcttcatcgcgtctt

SEQ ID NO: 69217 - DNA, 17 bp, Arabidopsis thaliana
catcttcatcgtgacgc

SEQ ID NO: 69218 - DNA, 17 bp, Arabidopsis thaliana
catcttcatcgtgtagg

SEQ ID NO: 69219 - DNA, 17 bp, Arabidopsis thaliana
catcttcatcttcaggt

SEQ ID NO: 69220 - DNA, 17 bp, Arabidopsis thaliana
catcttcatgggacgga

SEQ ID NO: 69221 - DNA, 17 bp, Arabidopsis thaliana
catcttcatttggggtc

SEQ ID NO: 69222 - DNA, 17 bp, Arabidopsis thaliana
catcttccagaggcggg

SEQ ID NO: 69223 - DNA, 17 bp, Arabidopsis thaliana
catcttccattgtgctg

SEQ ID NO: 69224 - DNA, 17 bp, Arabidopsis thaliana
catcttcccgagtaatg

SEQ ID NO: 69225 - DNA, 17 bp, Arabidopsis thaliana
catcttccgctggattt

SEQ ID NO: 69226 - DNA, 17 bp, Arabidopsis thaliana
catcttcgaatgtgcag

SEQ ID NO: 69227 - DNA, 17 bp, Arabidopsis thaliana
catcttcgatgtgcgcg

SEQ ID NO: 69228 - DNA, 17 bp, Arabidopsis thaliana
catcttcgccggagttt

SEQ ID NO: 69229 - DNA, 17 bp, Arabidopsis thaliana
catcttcgctggaacca

SEQ ID NO: 69230 - DNA, 17 bp, Arabidopsis thaliana
catcttcgtgggttttg

SEQ ID NO: 69231 - DNA, 17 bp, Arabidopsis thaliana
catcttctaaaggcggg

SEQ ID NO: 69232 - DNA, 17 bp, Arabidopsis thaliana
catcttctctctcgcta

SEQ ID NO: 69233 - DNA, 17 bp, Arabidopsis thaliana
catcttctgcagagcta

SEQ ID NO: 69234 - DNA, 17 bp, Arabidopsis thaliana
catcttctgcctttgct

SEQ ID NO: 69235 - DNA, 17 bp, Arabidopsis thaliana
catcttctgcctttgga

SEQ ID NO: 69236 - DNA, 17 bp, Arabidopsis thaliana
catcttcttcagattca

SEQ ID NO: 69237 - DNA, 17 bp, Arabidopsis thaliana
catcttcttcttttcgc

SEQ ID NO: 69238 - DNA, 17 bp, Arabidopsis thaliana
catcttcttggcgtgca

SEQ ID NO: 69239 - DNA, 17 bp, Arabidopsis thaliana
catcttgaaaggaagtt

SEQ ID NO: 69240 - DNA, 17 bp, Arabidopsis thaliana
catcttgagttgaaccg

SEQ ID NO: 69241 - DNA, 17 bp, Arabidopsis thaliana
catcttgcaggtttgtc

SEQ ID NO: 69242 - DNA, 17 bp, Arabidopsis thaliana
catcttgccgttttcgc

SEQ ID NO: 69243 - DNA, 17 bp, Arabidopsis thaliana
catcttgctgatgggtt

SEQ ID NO: 69244 - DNA, 17 bp, Arabidopsis thaliana
catcttgctgattggat

SEQ ID NO: 69245 - DNA, 17 bp, Arabidopsis thaliana
catcttggacttgatat

SEQ ID NO: 69246 - DNA, 17 bp, Arabidopsis thaliana
catcttgggactgtcct

SEQ ID NO: 69247 - DNA, 17 bp, Arabidopsis thaliana
catcttgggatgggtcg

SEQ ID NO: 69248 - DNA, 17 bp, Arabidopsis thaliana
catcttggttatcggcg

SEQ ID NO: 69249 - DNA, 17 bp, Arabidopsis thaliana
catcttgtcatggtatg

SEQ ID NO: 69250 - DNA, 17 bp, Arabidopsis thaliana
catcttgtctccatcac

SEQ ID NO: 69251 - DNA, 17 bp, Arabidopsis thaliana
catcttgtgagcaggaa

SEQ ID NO: 69252 - DNA, 17 bp, Arabidopsis thaliana
catcttgtgctcatcca

SEQ ID NO: 69253 - DNA, 17 bp, Arabidopsis thaliana
catcttgtggaatcgaa

SEQ ID NO: 69254 - DNA, 17 bp, Arabidopsis thaliana
catcttgttccgttcgc

SEQ ID NO: 69255 - DNA, 17 bp, Arabidopsis thaliana
catcttgttgggccttt

SEQ ID NO: 69256 - DNA, 17 bp, Arabidopsis thaliana
catctttaggctggcct

SEQ ID NO: 69257 - DNA, 17 bp, Arabidopsis thaliana
catctttcaactcggtg

SEQ ID NO: 69258 - DNA, 17 bp, Arabidopsis thaliana
catctttctcctgtatg

SEQ ID NO: 69259 - DNA, 17 bp, Arabidopsis thaliana
catctttctctgaaact

SEQ ID NO: 69260 - DNA, 17 bp, Arabidopsis thaliana
catctttgcccatcttt

SEQ ID NO: 69261 - DNA, 17 bp, Arabidopsis thaliana
catctttgccctactag

SEQ ID NO: 69262 - DNA, 17 bp, Arabidopsis thaliana
catctttgcttcctggg

SEQ ID NO: 69263 - DNA, 17 bp, Arabidopsis thaliana
catctttggctaacctt

SEQ ID NO: 69264 - DNA, 17 bp, Arabidopsis thaliana
catctttgggttggcgg

SEQ ID NO: 69265 - DNA, 17 bp, Arabidopsis thaliana
catctttggtctgtcct

SEQ ID NO: 69266 - DNA, 17 bp, Arabidopsis thaliana
catctttgtcatccttc

SEQ ID NO: 69267 - DNA, 17 bp, Arabidopsis thaliana
catctttgtcatggtat

SEQ ID NO: 69268 - DNA, 17 bp, Arabidopsis thaliana
catctttgtgactcgtg

SEQ ID NO: 69269 - DNA, 17 bp, Arabidopsis thaliana
catctttgtgattcgct

SEQ ID NO: 69270 - DNA, 17 bp, Arabidopsis thaliana
catcttttctcactgct

SEQ ID NO: 69271 - DNA, 17 bp, Arabidopsis thaliana
catcttttgatctgcat

SEQ ID NO: 69272 - DNA, 17 bp, Arabidopsis thaliana
catcttttggatggaga

SEQ ID NO: 69273 - DNA, 17 bp, Arabidopsis thaliana
catcttttgttccaacc

SEQ ID NO: 69274 - DNA, 17 bp, Arabidopsis thaliana
catctttttcttcagct

SEQ ID NO: 69275 - DNA, 17 bp, Arabidopsis thaliana
catgaaaaaattcgaaa

SEQ ID NO: 69276 - DNA, 17 bp, Arabidopsis thaliana
catgaaaacgttgacta

SEQ ID NO: 69277 - DNA, 17 bp, Arabidopsis thaliana
catgaaaccttggaaat

SEQ ID NO: 69278 - DNA, 17 bp, Arabidopsis thaliana
catgaaactgtgagtag

SEQ ID NO: 69279 - DNA, 17 bp, Arabidopsis thaliana
catgaaacttcacgatc

SEQ ID NO: 69280 - DNA, 17 bp, Arabidopsis thaliana
catgaaagttgaccaac

SEQ ID NO: 69281 - DNA, 17 bp, Arabidopsis thaliana
catgaaataccgagatc

SEQ ID NO: 69282 - DNA, 17 bp, Arabidopsis thaliana
catgaaatagcagcact

SEQ ID NO: 69283 - DNA, 17 bp, Arabidopsis thaliana
catgaaatcgtccatcg

SEQ ID NO: 69284 - DNA, 17 bp, Arabidopsis thaliana
catgaacaagttgccat

SEQ ID NO: 69285 - DNA, 17 bp, Arabidopsis thaliana
catgaaccccaatccgc

SEQ ID NO: 69286 - DNA, 17 bp, Arabidopsis thaliana
catgaacgacaaggtcg

SEQ ID NO: 69287 - DNA, 17 bp, Arabidopsis thaliana
catgaacggtccagcca

SEQ ID NO: 69288 - DNA, 17 bp, Arabidopsis thaliana
catgaacggtccagcta

SEQ ID NO: 69289 - DNA, 17 bp, Arabidopsis thaliana
catgaacgtttgttgtg

SEQ ID NO: 69290 - DNA, 17 bp, Arabidopsis thaliana
catgaactgcttgattt

SEQ ID NO: 69291 - DNA, 17 bp, Arabidopsis thaliana
catgaactttgcaggct

SEQ ID NO: 69292 - DNA, 17 bp, Arabidopsis thaliana
catgaagacttaggtgg

SEQ ID NO: 69293 - DNA, 17 bp, Arabidopsis thaliana
catgaagatcttgcttc

SEQ ID NO: 69294 - DNA, 17 bp, Arabidopsis thaliana
catgaagcgtaatagac

SEQ ID NO: 69295 - DNA, 17 bp, Arabidopsis thaliana
catgaagttagataagg

SEQ ID NO: 69296 - DNA, 17 bp, Arabidopsis thaliana
catgaagttatcgttga

SEQ ID NO: 69297 - DNA, 17 bp, Arabidopsis thaliana
catgaagtttgcaggct

SEQ ID NO: 69298 - DNA, 17 bp, Arabidopsis thaliana
catgaatacttttggcc

SEQ ID NO: 69299 - DNA, 17 bp, Arabidopsis thaliana
catgaatccagaggagt

SEQ ID NO: 69300 - DNA, 17 bp, Arabidopsis thaliana
catgaatcttgtgggat

SEQ ID NO: 69301 - DNA, 17 bp, Arabidopsis thaliana
catgaatcttttcaggg

SEQ ID NO: 69302 - DNA, 17 bp, Arabidopsis thaliana
catgaatgttgcaagat

SEQ ID NO: 69303 - DNA, 17 bp, Arabidopsis thaliana
catgaattcaacttggt

SEQ ID NO: 69304 - DNA, 17 bp, Arabidopsis thaliana
catgaattttgacccat

SEQ ID NO: 69305 - DNA, 17 bp, Arabidopsis thaliana
catgacaaaaactttga

SEQ ID NO: 69306 - DNA, 17 bp, Arabidopsis thaliana
catgacaatgactcatc

SEQ ID NO: 69307 - DNA, 17 bp, Arabidopsis thaliana
catgacacgtgtcaggt

SEQ ID NO: 69308 - DNA, 17 bp, Arabidopsis thaliana
catgacactgatgctga

SEQ ID NO: 69309 - DNA, 17 bp, Arabidopsis thaliana
catgacagtgttttgga

SEQ ID NO: 69310 - DNA, 17 bp, Arabidopsis thaliana
catgacatttgcgtaat

SEQ ID NO: 69311 - DNA, 17 bp, Arabidopsis thaliana
catgaccaatgggcttt

SEQ ID NO: 69312 - DNA, 17 bp, Arabidopsis thaliana
catgaccacggttacgg

SEQ ID NO: 69313 - DNA, 17 bp, Arabidopsis thaliana
catgaccagattttgtt

SEQ ID NO: 69314 - DNA, 17 bp, Arabidopsis thaliana
catgaccagttacattg

SEQ ID NO: 69315 - DNA, 17 bp, Arabidopsis thaliana
catgaccatcaaagcac

SEQ ID NO: 69316 - DNA, 17 bp, Arabidopsis thaliana
catgacccgaatgcact

SEQ ID NO: 69317 - DNA, 17 bp, Arabidopsis thaliana
catgaccctcagtagga

SEQ ID NO: 69318 - DNA, 17 bp, Arabidopsis thaliana
catgaccctctctctct

SEQ ID NO: 69319 - DNA, 17 bp, Arabidopsis thaliana
catgaccgaactgtcct

SEQ ID NO: 69320 - DNA, 17 bp, Arabidopsis thaliana
catgaccggcttggcca

SEQ ID NO: 69321 - DNA, 17 bp, Arabidopsis thaliana
catgacctatggctggc

SEQ ID NO: 69322 - DNA, 17 bp, Arabidopsis thaliana
catgaccttgggatagt

SEQ ID NO: 69323 - DNA, 17 bp, Arabidopsis thaliana
catgacgagttcattga

SEQ ID NO: 69324 - DNA, 17 bp, Arabidopsis thaliana
catgacgagtttattga

SEQ ID NO: 69325 - DNA, 17 bp, Arabidopsis thaliana
catgacggactgggaac

SEQ ID NO: 69326 - DNA, 17 bp, Arabidopsis thaliana
catgacggtcaataact

SEQ ID NO: 69327 - DNA, 17 bp, Arabidopsis thaliana
catgacgtctgcctggg

SEQ ID NO: 69328 - DNA, 17 bp, Arabidopsis thaliana
catgacgtgccggagtg

SEQ ID NO: 69329 - DNA, 17 bp, Arabidopsis thaliana
catgactaatactggca

SEQ ID NO: 69330 - DNA, 17 bp, Arabidopsis thaliana
catgactacaagcaaca

SEQ ID NO: 69331 - DNA, 17 bp, Arabidopsis thaliana
catgactacggccagtg

SEQ ID NO: 69332 - DNA, 17 bp, Arabidopsis thaliana
catgactatccaaggtc

SEQ ID NO: 69333 - DNA, 17 bp, Arabidopsis thaliana
catgactattttccgct

SEQ ID NO: 69334 - DNA, 17 bp, Arabidopsis thaliana
catgactcaaccaggtt

SEQ ID NO: 69335 - DNA, 17 bp, Arabidopsis thaliana
catgactcattggatgg

SEQ ID NO: 69336 - DNA, 17 bp, Arabidopsis thaliana
catgactctcggcaacg

SEQ ID NO: 69337 - DNA, 17 bp, Arabidopsis thaliana
catgactctggctcata

SEQ ID NO: 69338 - DNA, 17 bp, Arabidopsis thaliana
catgactctggtgttgt

SEQ ID NO: 69339 - DNA, 17 bp, Arabidopsis thaliana
catgactgcagattcgg

SEQ ID NO: 69340 - DNA, 17 bp, Arabidopsis thaliana
catgactgcgccgttga

SEQ ID NO: 69341 - DNA, 17 bp, Arabidopsis thaliana
catgactgcttccatcc

SEQ ID NO: 69342 - DNA, 17 bp, Arabidopsis thaliana
catgactgcttccatcg

SEQ ID NO: 69343 - DNA, 17 bp, Arabidopsis thaliana
catgacttacggaccaa

SEQ ID NO: 69344 - DNA, 17 bp, Arabidopsis thaliana
catgacttggccgtact

SEQ ID NO: 69345 - DNA, 17 bp, Arabidopsis thaliana
catgactttcagcgtct

SEQ ID NO: 69346 - DNA, 17 bp, Arabidopsis thaliana
catgactttctttcgag

SEQ ID NO: 69347 - DNA, 17 bp, Arabidopsis thaliana
catgagaaccttgttcg

SEQ ID NO: 69348 - DNA, 17 bp, Arabidopsis thaliana
catgagaagaaaccaaa

SEQ ID NO: 69349 - DNA, 17 bp, Arabidopsis thaliana
catgagacacggtgact

SEQ ID NO: 69350 - DNA, 17 bp, Arabidopsis thaliana
catgagagcttgccacc

SEQ ID NO: 69351 - DNA, 17 bp, Arabidopsis thaliana
catgagaggattacgga

SEQ ID NO: 69352 - DNA, 17 bp, Arabidopsis thaliana
catgagaggccgccggc

SEQ ID NO: 69353 - DNA, 17 bp, Arabidopsis thaliana
catgagagtgagaccct

SEQ ID NO: 69354 - DNA, 17 bp, Arabidopsis thaliana
catgagatctccaacga

SEQ ID NO: 69355 - DNA, 17 bp, Arabidopsis thaliana
catgagatgggtctgaa

SEQ ID NO: 69356 - DNA, 17 bp, Arabidopsis thaliana
catgagatttttcaaag

SEQ ID NO: 69357 - DNA, 17 bp, Arabidopsis thaliana
catgagcagttagcgcg

SEQ ID NO: 69358 - DNA, 17 bp, Arabidopsis thaliana
catgagccacgggaggc

SEQ ID NO: 69359 - DNA, 17 bp, Arabidopsis thaliana
catgagcggctttcggt

SEQ ID NO: 69360 - DNA, 17 bp, Arabidopsis thaliana
catgagcttatctgagc

SEQ ID NO: 69361 - DNA, 17 bp, Arabidopsis thaliana
catgagcttctttttcc

SEQ ID NO: 69362 - DNA, 17 bp, Arabidopsis thaliana
catgaggatgaccaggc

SEQ ID NO: 69363 - DNA, 17 bp, Arabidopsis thaliana
catgaggcccaagtcca

SEQ ID NO: 69364 - DNA, 17 bp, Arabidopsis thaliana
catgagggtggtcaaga

SEQ ID NO: 69365 - DNA, 17 bp, Arabidopsis thaliana
catgaggtattctccct

SEQ ID NO: 69366 - DNA, 17 bp, Arabidopsis thaliana
catgaggttccgaagat

SEQ ID NO: 69367 - DNA, 17 bp, Arabidopsis thaliana
catgagtccgtgtgccg

SEQ ID NO: 69368 - DNA, 17 bp, Arabidopsis thaliana
catgagtcttcgtaggt

SEQ ID NO: 69369 - DNA, 17 bp, Arabidopsis thaliana
catgagtggtttacaac

SEQ ID NO: 69370 - DNA, 17 bp, Arabidopsis thaliana
catgagttaagccagtc

SEQ ID NO: 69371 - DNA, 17 bp, Arabidopsis thaliana
catgataactcgacgca

SEQ ID NO: 69372 - DNA, 17 bp, Arabidopsis thaliana
catgataactcgacgga

SEQ ID NO: 69373 - DNA, 17 bp, Arabidopsis thaliana
catgataactcgacggc

SEQ ID NO: 69374 - DNA, 17 bp, Arabidopsis thaliana
catgataactcgacggg

SEQ ID NO: 69375 - DNA, 17 bp, Arabidopsis thaliana
catgataactcgacgta

SEQ ID NO: 69376 - DNA, 17 bp, Arabidopsis thaliana
catgataactcggaagg

SEQ ID NO: 69377 - DNA, 17 bp, Arabidopsis thaliana
catgatacttttggcct

SEQ ID NO: 69378 - DNA, 17 bp, Arabidopsis thaliana
catgatatccgtcgact

SEQ ID NO: 69379 - DNA, 17 bp, Arabidopsis thaliana
catgatatcggatatct

SEQ ID NO: 69380 - DNA, 17 bp, Arabidopsis thaliana
catgatatctttcgtga

SEQ ID NO: 69381 - DNA, 17 bp, Arabidopsis thaliana
catgatcaacggatgtg

SEQ ID NO: 69382 - DNA, 17 bp, Arabidopsis thaliana
catgatcaggaacgctt

SEQ ID NO: 69383 - DNA, 17 bp, Arabidopsis thaliana
catgatcaggtccgctt

SEQ ID NO: 69384 - DNA, 17 bp, Arabidopsis thaliana
catgatcaggtctgctt

SEQ ID NO: 69385 - DNA, 17 bp, Arabidopsis thaliana
catgatcatatcactga

SEQ ID NO: 69386 - DNA, 17 bp, Arabidopsis thaliana
catgatcatcttgacga

SEQ ID NO: 69387 - DNA, 17 bp, Arabidopsis thaliana
catgatccacaagatct

SEQ ID NO: 69388 - DNA, 17 bp, Arabidopsis thaliana
catgatcccgccactag

SEQ ID NO: 69389 - DNA, 17 bp, Arabidopsis thaliana
catgatccgagtttgaa

SEQ ID NO: 69390 - DNA, 17 bp, Arabidopsis thaliana
catgatcgagttcattc

SEQ ID NO: 69391 - DNA, 17 bp, Arabidopsis thaliana
catgatcgccctgttgt

SEQ ID NO: 69392 - DNA, 17 bp, Arabidopsis thaliana
catgatcgtcgcagaga

SEQ ID NO: 69393 - DNA, 17 bp, Arabidopsis thaliana
catgatcgtctagatga

SEQ ID NO: 69394 - DNA, 17 bp, Arabidopsis thaliana
catgatctcgccgtccc

SEQ ID NO: 69395 - DNA, 17 bp, Arabidopsis thaliana
catgatctcgcgagtta

SEQ ID NO: 69396 - DNA, 17 bp, Arabidopsis thaliana
catgatctcggtgctcc

SEQ ID NO: 69397 - DNA, 17 bp, Arabidopsis thaliana
catgatcttgaactgct

SEQ ID NO: 69398 - DNA, 17 bp, Arabidopsis thaliana
catgatctttcgtcccc

SEQ ID NO: 69399 - DNA, 17 bp, Arabidopsis thaliana
catgatctttcgtccgc

SEQ ID NO: 69400 - DNA, 17 bp, Arabidopsis thaliana
catgatgacatgtcctt

SEQ ID NO: 69401 - DNA, 17 bp, Arabidopsis thaliana
catgatgagggcattgg

SEQ ID NO: 69402 - DNA, 17 bp, Arabidopsis thaliana
catgatgatcgtctctg

SEQ ID NO: 69403 - DNA, 17 bp, Arabidopsis thaliana
catgatgatttgttttt

SEQ ID NO: 69404 - DNA, 17 bp, Arabidopsis thaliana
catgatgcgacatcaat

SEQ ID NO: 69405 - DNA, 17 bp, Arabidopsis thaliana
catgatgcggtacttct

SEQ ID NO: 69406 - DNA, 17 bp, Arabidopsis thaliana
catgatgcggttcggtg

SEQ ID NO: 69407 - DNA, 17 bp, Arabidopsis thaliana
catgatggagaggggtc

SEQ ID NO: 69408 - DNA, 17 bp, Arabidopsis thaliana
catgatggatctttgga

SEQ ID NO: 69409 - DNA, 17 bp, Arabidopsis thaliana
catgatgggttatagag

SEQ ID NO: 69410 - DNA, 17 bp, Arabidopsis thaliana
catgatgggttgtagag

SEQ ID NO: 69411 - DNA, 17 bp, Arabidopsis thaliana
catgatgtcatagttct

SEQ ID NO: 69412 - DNA, 17 bp, Arabidopsis thaliana
catgatgtggtttcggg

SEQ ID NO: 69413 - DNA, 17 bp, Arabidopsis thaliana
catgatgttgtcttaca

SEQ ID NO: 69414 - DNA, 17 bp, Arabidopsis thaliana
catgattagatggtaga

SEQ ID NO: 69415 - DNA, 17 bp, Arabidopsis thaliana
catgattatctgatagc

SEQ ID NO: 69416 - DNA, 17 bp, Arabidopsis thaliana
catgattcaggtgctaa

SEQ ID NO: 69417 - DNA, 17 bp, Arabidopsis thaliana
catgattcccatgttga

SEQ ID NO: 69418 - DNA, 17 bp, Arabidopsis thaliana
catgattcgagacccgt

SEQ ID NO: 69419 - DNA, 17 bp, Arabidopsis thaliana
catgattcgttacaggt

SEQ ID NO: 69420 - DNA, 17 bp, Arabidopsis thaliana
catgattctagacccgt

SEQ ID NO: 69421 - DNA, 17 bp, Arabidopsis thaliana
catgattggtgccgaca

SEQ ID NO: 69422 - DNA, 17 bp, Arabidopsis thaliana
catgatttcaccggagc

SEQ ID NO: 69423 - DNA, 17 bp, Arabidopsis thaliana
catgatttcgattacga

SEQ ID NO: 69424 - DNA, 17 bp, Arabidopsis thaliana
catgatttgtgattttg

SEQ ID NO: 69425 - DNA, 17 bp, Arabidopsis thaliana
catgattttgttattgg

SEQ ID NO: 69426 - DNA, 17 bp, Arabidopsis thaliana
catgcaaaaggccaata

SEQ ID NO: 69427 - DNA, 17 bp, Arabidopsis thaliana
catgcaaatggctgaac

SEQ ID NO: 69428 - DNA, 17 bp, Arabidopsis thaliana
catgcaactctgttctt

SEQ ID NO: 69429 - DNA, 17 bp, Arabidopsis thaliana
catgcaactttgttctt

SEQ ID NO: 69430 - DNA, 17 bp, Arabidopsis thaliana
catgcaagccaacttcg

SEQ ID NO: 69431 - DNA, 17 bp, Arabidopsis thaliana
catgcaagtcggacggg

SEQ ID NO: 69432 - DNA, 17 bp, Arabidopsis thaliana
catgcaagttctcagcc

SEQ ID NO: 69433 - DNA, 17 bp, Arabidopsis thaliana
catgcaagttttctctg

SEQ ID NO: 69434 - DNA, 17 bp, Arabidopsis thaliana
catgcaattggtgctga

SEQ ID NO: 69435 - DNA, 17 bp, Arabidopsis thaliana
catgcaccaagaccaac

SEQ ID NO: 69436 - DNA, 17 bp, Arabidopsis thaliana
catgcacgtctgcctgg

SEQ ID NO: 69437 - DNA, 17 bp, Arabidopsis thaliana
catgcactgcctcttcc

SEQ ID NO: 69438 - DNA, 17 bp, Arabidopsis thaliana
catgcactggctgactg

SEQ ID NO: 69439 - DNA, 17 bp, Arabidopsis thaliana
catgcactggctgactt

SEQ ID NO: 69440 - DNA, 17 bp, Arabidopsis thaliana
catgcagacgacttttg

SEQ ID NO: 69441 - DNA, 17 bp, Arabidopsis thaliana
catgcagatagttggcc

SEQ ID NO: 69442 - DNA, 17 bp, Arabidopsis thaliana
catgcagatttttgtga

SEQ ID NO: 69443 - DNA, 17 bp, Arabidopsis thaliana
catgcagctgacggttt

SEQ ID NO: 69444 - DNA, 17 bp, Arabidopsis thaliana
catgcagcttcattagg

SEQ ID NO: 69445 - DNA, 17 bp, Arabidopsis thaliana
catgcaggacaccgtta

SEQ ID NO: 69446 - DNA, 17 bp, Arabidopsis thaliana
catgcaggagctgttca

SEQ ID NO: 69447 - DNA, 17 bp, Arabidopsis thaliana
catgcaggtaatgtggt

SEQ ID NO: 69448 - DNA, 17 bp, Arabidopsis thaliana
catgcagtcaactgtgg

SEQ ID NO: 69449 - DNA, 17 bp, Arabidopsis thaliana
catgcataacttgggac

SEQ ID NO: 69450 - DNA, 17 bp, Arabidopsis thaliana
catgcatgtttgtggga

SEQ ID NO: 69451 - DNA, 17 bp, Arabidopsis thaliana
catgcatttctgactac

SEQ ID NO: 69452 - DNA, 17 bp, Arabidopsis thaliana
catgccaagtttggcct

SEQ ID NO: 69453 - DNA, 17 bp, Arabidopsis thaliana
catgccagatagagccc

SEQ ID NO: 69454 - DNA, 17 bp, Arabidopsis thaliana
catgccagctatcaaca

SEQ ID NO: 69455 - DNA, 17 bp, Arabidopsis thaliana
catgccagtctaggttc

SEQ ID NO: 69456 - DNA, 17 bp, Arabidopsis thaliana
catgccatttcgagaat

SEQ ID NO: 69457 - DNA, 17 bp, Arabidopsis thaliana
catgcccccgccgcccg

SEQ ID NO: 69458 - DNA, 17 bp, Arabidopsis thaliana
catgccccttatgccct

SEQ ID NO: 69459 - DNA, 17 bp, Arabidopsis thaliana
catgcccggcttgccca

SEQ ID NO: 69460 - DNA, 17 bp, Arabidopsis thaliana
catgcccttgtggattc

SEQ ID NO: 69461 - DNA, 17 bp, Arabidopsis thaliana
catgccgatggatttgc

SEQ ID NO: 69462 - DNA, 17 bp, Arabidopsis thaliana
catgccgatttttgttt

SEQ ID NO: 69463 - DNA, 17 bp, Arabidopsis thaliana
catgccgcgtgttgaag

SEQ ID NO: 69464 - DNA, 17 bp, Arabidopsis thaliana
catgccgggttatgcga

SEQ ID NO: 69465 - DNA, 17 bp, Arabidopsis thaliana
catgccggttgtccaag

SEQ ID NO: 69466 - DNA, 17 bp, Arabidopsis thaliana
catgccgtcggaaataa

SEQ ID NO: 69467 - DNA, 17 bp, Arabidopsis thaliana
catgcctaggcccaatt

SEQ ID NO: 69468 - DNA, 17 bp, Arabidopsis thaliana
catgcctgcgacttgtt

SEQ ID NO: 69469 - DNA, 17 bp, Arabidopsis thaliana
catgcctgctagtctct

SEQ ID NO: 69470 - DNA, 17 bp, Arabidopsis thaliana
catgcctgtcgggaccc

SEQ ID NO: 69471 - DNA, 17 bp, Arabidopsis thaliana
catgccttatgcaaatt

SEQ ID NO: 69472 - DNA, 17 bp, Arabidopsis thaliana
catgcgaagtgactgtt

SEQ ID NO: 69473 - DNA, 17 bp, Arabidopsis thaliana
catgcgacgcatgcgcc

SEQ ID NO: 69474 - DNA, 17 bp, Arabidopsis thaliana
catgcgagccacaagca

SEQ ID NO: 69475 - DNA, 17 bp, Arabidopsis thaliana
catgcgattgatgagct

SEQ ID NO: 69476 - DNA, 17 bp, Arabidopsis thaliana
catgcgatttatcgtcc

SEQ ID NO: 69477 - DNA, 17 bp, Arabidopsis thaliana
catgcgcattggtcggc

SEQ ID NO: 69478 - DNA, 17 bp, Arabidopsis thaliana
catgcgcccgccgccca

SEQ ID NO: 69479 - DNA, 17 bp, Arabidopsis thaliana
catgcgcccgccgcccc

SEQ ID NO: 69480 - DNA, 17 bp, Arabidopsis thaliana
catgcgcccgccgcccg

SEQ ID NO: 69481 - DNA, 17 bp, Arabidopsis thaliana
catgcgcgacaaggggg

SEQ ID NO: 69482 - DNA, 17 bp, Arabidopsis thaliana
catgcgcttgatgaaca

SEQ ID NO: 69483 - DNA, 17 bp, Arabidopsis thaliana
catgcgcttgatggaca

SEQ ID NO: 69484 - DNA, 17 bp, Arabidopsis thaliana
catgcgctttactggtt

SEQ ID NO: 69485 - DNA, 17 bp, Arabidopsis thaliana
catgcggactacctgca

SEQ ID NO: 69486 - DNA, 17 bp, Arabidopsis thaliana
catgcggacttgctcag

SEQ ID NO: 69487 - DNA, 17 bp, Arabidopsis thaliana
catgcggacttgctcta

SEQ ID NO: 69488 - DNA, 17 bp, Arabidopsis thaliana
catgcggaggtatgcgt

SEQ ID NO: 69489 - DNA, 17 bp, Arabidopsis thaliana
catgcggataaggtgcc

SEQ ID NO: 69490 - DNA, 17 bp, Arabidopsis thaliana
catgcggctacgaggcg

SEQ ID NO: 69491 - DNA, 17 bp, Arabidopsis thaliana
catgcggcttacatttt

SEQ ID NO: 69492 - DNA, 17 bp, Arabidopsis thaliana
catgcggttagcttctc

SEQ ID NO: 69493 - DNA, 17 bp, Arabidopsis thaliana
catgcggttatccacta

SEQ ID NO: 69494 - DNA, 17 bp, Arabidopsis thaliana
catgcggtttaagcaga

SEQ ID NO: 69495 - DNA, 17 bp, Arabidopsis thaliana
catgcgtcgcttctagc

SEQ ID NO: 69496 - DNA, 17 bp, Arabidopsis thaliana
catgcgttactcgttcc

SEQ ID NO: 69497 - DNA, 17 bp, Arabidopsis thaliana
catgcgttctacttaaa

SEQ ID NO: 69498 - DNA, 17 bp, Arabidopsis thaliana
catgcgtttcaagattc

SEQ ID NO: 69499 - DNA, 17 bp, Arabidopsis thaliana
catgctaaatttctctg

SEQ ID NO: 69500 - DNA, 17 bp, Arabidopsis thaliana
catgctaatcttctctg

SEQ ID NO: 69501 - DNA, 17 bp, Arabidopsis thaliana
catgctaatgtatccag

SEQ ID NO: 69502 - DNA, 17 bp, Arabidopsis thaliana
catgctacttcttggtt

SEQ ID NO: 69503 - DNA, 17 bp, Arabidopsis thaliana
catgctattgctgacga

SEQ ID NO: 69504 - DNA, 17 bp, Arabidopsis thaliana
catgctattggttggtg

SEQ ID NO: 69505 - DNA, 17 bp, Arabidopsis thaliana
catgctattttggcctg

SEQ ID NO: 69506 - DNA, 17 bp, Arabidopsis thaliana
catgctcacttaacgac

SEQ ID NO: 69507 - DNA, 17 bp, Arabidopsis thaliana
catgctcatcgacaaag

SEQ ID NO: 69508 - DNA, 17 bp, Arabidopsis thaliana
catgctcgtttattcac

SEQ ID NO: 69509 - DNA, 17 bp, Arabidopsis thaliana
catgctctaagtcttga

SEQ ID NO: 69510 - DNA, 17 bp, Arabidopsis thaliana
catgctctaagttgccc

SEQ ID NO: 69511 - DNA, 17 bp, Arabidopsis thaliana
catgctctctaagcctt

SEQ ID NO: 69512 - DNA, 17 bp, Arabidopsis thaliana
catgctcttaaggatct

SEQ ID NO: 69513 - DNA, 17 bp, Arabidopsis thaliana
catgctcttcatgcgca

SEQ ID NO: 69514 - DNA, 17 bp, Arabidopsis thaliana
catgctcttgtggactc

SEQ ID NO: 69515 - DNA, 17 bp, Arabidopsis thaliana
catgctgaaagacctac

SEQ ID NO: 69516 - DNA, 17 bp, Arabidopsis thaliana
catgctgactgcataat

SEQ ID NO: 69517 - DNA, 17 bp, Arabidopsis thaliana
catgctgcaccttcacc

SEQ ID NO: 69518 - DNA, 17 bp, Arabidopsis thaliana
catgctgcctaaggcca

SEQ ID NO: 69519 - DNA, 17 bp, Arabidopsis thaliana
catgctgcttagtgcac

SEQ ID NO: 69520 - DNA, 17 bp, Arabidopsis thaliana
catgctggcagcttcag

SEQ ID NO: 69521 - DNA, 17 bp, Arabidopsis thaliana
catgcttaatttggccg

SEQ ID NO: 69522 - DNA, 17 bp, Arabidopsis thaliana
catgcttagtccgatca

SEQ ID NO: 69523 - DNA, 17 bp, Arabidopsis thaliana
catgcttcagccatggt

SEQ ID NO: 69524 - DNA, 17 bp, Arabidopsis thaliana
catgcttccgaggatgt

SEQ ID NO: 69525 - DNA, 17 bp, Arabidopsis thaliana
catgcttctactttctg

SEQ ID NO: 69526 - DNA, 17 bp, Arabidopsis thaliana
catgctttagttggagc

SEQ ID NO: 69527 - DNA, 17 bp, Arabidopsis thaliana
catgctttggatggtca

SEQ ID NO: 69528 - DNA, 17 bp, Arabidopsis thaliana
catggaaacatcggtgg

SEQ ID NO: 69529 - DNA, 17 bp, Arabidopsis thaliana
catggaaacccttgttc

SEQ ID NO: 69530 - DNA, 17 bp, Arabidopsis thaliana
catggaaactctgtgcg

SEQ ID NO: 69531 - DNA, 17 bp, Arabidopsis thaliana
catggaaagattgcgcc

SEQ ID NO: 69532 - DNA, 17 bp, Arabidopsis thaliana
catggaacttgacttgc

SEQ ID NO: 69533 - DNA, 17 bp, Arabidopsis thaliana
catggaagacacgggtc

SEQ ID NO: 69534 - DNA, 17 bp, Arabidopsis thaliana
catggaaggcaaagccc

SEQ ID NO: 69535 - DNA, 17 bp, Arabidopsis thaliana
catggaagtcgaaatcc

SEQ ID NO: 69536 - DNA, 17 bp, Arabidopsis thaliana
catggaagtgattgcta

SEQ ID NO: 69537 - DNA, 17 bp, Arabidopsis thaliana
catggaatgaccgaatt

SEQ ID NO: 69538 - DNA, 17 bp, Arabidopsis thaliana
catggacaaaatcgtca

SEQ ID NO: 69539 - DNA, 17 bp, Arabidopsis thaliana
catggacacaagtatcc

SEQ ID NO: 69540 - DNA, 17 bp, Arabidopsis thaliana
catggacactggctgta

SEQ ID NO: 69541 - DNA, 17 bp, Arabidopsis thaliana
catggacagttttttct

SEQ ID NO: 69542 - DNA, 17 bp, Arabidopsis thaliana
catggacatatgtccca

SEQ ID NO: 69543 - DNA, 17 bp, Arabidopsis thaliana
catggacatgtagacag

SEQ ID NO: 69544 - DNA, 17 bp, Arabidopsis thaliana
catggacatgtagaccg

SEQ ID NO: 69545 - DNA, 17 bp, Arabidopsis thaliana
catggacccacgttgtc

SEQ ID NO: 69546 - DNA, 17 bp, Arabidopsis thaliana
catggacccgagagagg

SEQ ID NO: 69547 - DNA, 17 bp, Arabidopsis thaliana
catggaccgaagggata

SEQ ID NO: 69548 - DNA, 17 bp, Arabidopsis thaliana
catggaccgatccgtag

SEQ ID NO: 69549 - DNA, 17 bp, Arabidopsis thaliana
catggaccgcgtctcag

SEQ ID NO: 69550 - DNA, 17 bp, Arabidopsis thaliana
catggaccgtccaactt

SEQ ID NO: 69551 - DNA, 17 bp, Arabidopsis thaliana
catggaccgtcggatca

SEQ ID NO: 69552 - DNA, 17 bp, Arabidopsis thaliana
catggacgtaatctgta

SEQ ID NO: 69553 - DNA, 17 bp, Arabidopsis thaliana
catggactcggcactct

SEQ ID NO: 69554 - DNA, 17 bp, Arabidopsis thaliana
catggactgcgctgttg

SEQ ID NO: 69555 - DNA, 17 bp, Arabidopsis thaliana
catggacttgcccatat

SEQ ID NO: 69556 - DNA, 17 bp, Arabidopsis thaliana
catggactttgctgggc

SEQ ID NO: 69557 - DNA, 17 bp, Arabidopsis thaliana
catggactttggctaca

SEQ ID NO: 69558 - DNA, 17 bp, Arabidopsis thaliana
catggagagcgtttggg

SEQ ID NO: 69559 - DNA, 17 bp, Arabidopsis thaliana
catggagaggaaggcgg

SEQ ID NO: 69560 - DNA, 17 bp, Arabidopsis thaliana
catggagagttcgatcc

SEQ ID NO: 69561 - DNA, 17 bp, Arabidopsis thaliana
catggagatggccaagc

SEQ ID NO: 69562 - DNA, 17 bp, Arabidopsis thaliana
catggaggatgaccagg

SEQ ID NO: 69563 - DNA, 17 bp, Arabidopsis thaliana
catggaggctaattgat

SEQ ID NO: 69564 - DNA, 17 bp, Arabidopsis thaliana
catggagtccatcccac

SEQ ID NO: 69565 - DNA, 17 bp, Arabidopsis thaliana
catggataaagcttggg

SEQ ID NO: 69566 - DNA, 17 bp, Arabidopsis thaliana
catggatactaggtgct

SEQ ID NO: 69567 - DNA, 17 bp, Arabidopsis thaliana
catggatagacatggga

SEQ ID NO: 69568 - DNA, 17 bp, Arabidopsis thaliana
catggatccattctcgt

SEQ ID NO: 69569 - DNA, 17 bp, Arabidopsis thaliana
catggatccgcatcctg

SEQ ID NO: 69570 - DNA, 17 bp, Arabidopsis thaliana
catggatccttagtcgc

SEQ ID NO: 69571 - DNA, 17 bp, Arabidopsis thaliana
catggatctaataaggg

SEQ ID NO: 69572 - DNA, 17 bp, Arabidopsis thaliana
catggatctggccaaag

SEQ ID NO: 69573 - DNA, 17 bp, Arabidopsis thaliana
catggatctggccaacg

SEQ ID NO: 69574 - DNA, 17 bp, Arabidopsis thaliana
catggatcttcggacca

SEQ ID NO: 69575 - DNA, 17 bp, Arabidopsis thaliana
catggatcttctctccg

SEQ ID NO: 69576 - DNA, 17 bp, Arabidopsis thaliana
catggatgagtggtcaa

SEQ ID NO: 69577 - DNA, 17 bp, Arabidopsis thaliana
catggatggtgcacccc

SEQ ID NO: 69578 - DNA, 17 bp, Arabidopsis thaliana
catggattacgggtttt

SEQ ID NO: 69579 - DNA, 17 bp, Arabidopsis thaliana
catggattccagcgtct

SEQ ID NO: 69580 - DNA, 17 bp, Arabidopsis thaliana
catggattccatcttac

SEQ ID NO: 69581 - DNA, 17 bp, Arabidopsis thaliana
catggattcgtggtata

SEQ ID NO: 69582 - DNA, 17 bp, Arabidopsis thaliana
catggattcgtggtcta

SEQ ID NO: 69583 - DNA, 17 bp, Arabidopsis thaliana
catggattggccagttc

SEQ ID NO: 69584 - DNA, 17 bp, Arabidopsis thaliana
catggatttgggtcact

SEQ ID NO: 69585 - DNA, 17 bp, Arabidopsis thaliana
catggatttgtggtata

SEQ ID NO: 69586 - DNA, 17 bp, Arabidopsis thaliana
catggatttttggatga

SEQ ID NO: 69587 - DNA, 17 bp, Arabidopsis thaliana
catggcaaatgctaaag

SEQ ID NO: 69588 - DNA, 17 bp, Arabidopsis thaliana
catggcaagaatctcct

SEQ ID NO: 69589 - DNA, 17 bp, Arabidopsis thaliana
catggcacagtgcctca

SEQ ID NO: 69590 - DNA, 17 bp, Arabidopsis thaliana
catggcacggttggccg

SEQ ID NO: 69591 - DNA, 17 bp, Arabidopsis thaliana
catggcaggggtgttct

SEQ ID NO: 69592 - DNA, 17 bp, Arabidopsis thaliana
catggccactacaagag

SEQ ID NO: 69593 - DNA, 17 bp, Arabidopsis thaliana
catggcccaatggagac

SEQ ID NO: 69594 - DNA, 17 bp, Arabidopsis thaliana
catggccggttgtcttc

SEQ ID NO: 69595 - DNA, 17 bp, Arabidopsis thaliana
catggccgttcttagtt

SEQ ID NO: 69596 - DNA, 17 bp, Arabidopsis thaliana
catggcctctgtgctgg

SEQ ID NO: 69597 - DNA, 17 bp, Arabidopsis thaliana
catggcctctgtgttgg

SEQ ID NO: 69598 - DNA, 17 bp, Arabidopsis thaliana
catggcgacatttgcat

SEQ ID NO: 69599 - DNA, 17 bp, Arabidopsis thaliana
catggcgacctggagtg

SEQ ID NO: 69600 - DNA, 17 bp, Arabidopsis thaliana
catggcgatgacacatg

SEQ ID NO: 69601 - DNA, 17 bp, Arabidopsis thaliana
catggcgattatgctct

SEQ ID NO: 69602 - DNA, 17 bp, Arabidopsis thaliana
catggcggaagcgtcgt

SEQ ID NO: 69603 - DNA, 17 bp, Arabidopsis thaliana
catggcggcatttgcat

SEQ ID NO: 69604 - DNA, 17 bp, Arabidopsis thaliana
catggcggcttgtgatt

SEQ ID NO: 69605 - DNA, 17 bp, Arabidopsis thaliana
catggcgggacgagttt

SEQ ID NO: 69606 - DNA, 17 bp, Arabidopsis thaliana
catggcgggtgggaccc

SEQ ID NO: 69607 - DNA, 17 bp, Arabidopsis thaliana
catggcggttcagattc

SEQ ID NO: 69608 - DNA, 17 bp, Arabidopsis thaliana
catggcgtattgcgaca

SEQ ID NO: 69609 - DNA, 17 bp, Arabidopsis thaliana
catggcgtctcggatcg

SEQ ID NO: 69610 - DNA, 17 bp, Arabidopsis thaliana
catggcgtctttggctc

SEQ ID NO: 69611 - DNA, 17 bp, Arabidopsis thaliana
catggctaaattttgga

SEQ ID NO: 69612 - DNA, 17 bp, Arabidopsis thaliana
catggctaatggtctcc

SEQ ID NO: 69613 - DNA, 17 bp, Arabidopsis thaliana
catggctccatatcgaa

SEQ ID NO: 69614 - DNA, 17 bp, Arabidopsis thaliana
catggctctgagcctct

SEQ ID NO: 69615 - DNA, 17 bp, Arabidopsis thaliana
catggctggagattcaa

SEQ ID NO: 69616 - DNA, 17 bp, Arabidopsis thaliana
catggctgtcgtcagct

SEQ ID NO: 69617 - DNA, 17 bp, Arabidopsis thaliana
catggctgtctattcag

SEQ ID NO: 69618 - DNA, 17 bp, Arabidopsis thaliana
catggcttcctctcaaa

SEQ ID NO: 69619 - DNA, 17 bp, Arabidopsis thaliana
catggcttcttggactg

SEQ ID NO: 69620 - DNA, 17 bp, Arabidopsis thaliana
catggctttgcgatgtt

SEQ ID NO: 69621 - DNA, 17 bp, Arabidopsis thaliana
catggctttttggactg

SEQ ID NO: 69622 - DNA, 17 bp, Arabidopsis thaliana
catgggactggtttttg

SEQ ID NO: 69623 - DNA, 17 bp, Arabidopsis thaliana
catgggagaccattctc

SEQ ID NO: 69624 - DNA, 17 bp, Arabidopsis thaliana
catgggagctgctaacc

SEQ ID NO: 69625 - DNA, 17 bp, Arabidopsis thaliana
catgggagcttagccta

SEQ ID NO: 69626 - DNA, 17 bp, Arabidopsis thaliana
catgggcaggacccgaa

SEQ ID NO: 69627 - DNA, 17 bp, Arabidopsis thaliana
catgggccaaggcatcg

SEQ ID NO: 69628 - DNA, 17 bp, Arabidopsis thaliana
catgggccaaggcattg

SEQ ID NO: 69629 - DNA, 17 bp, Arabidopsis thaliana
catgggccaagttggac

SEQ ID NO: 69630 - DNA, 17 bp, Arabidopsis thaliana
catgggccacgagaagt

SEQ ID NO: 69631 - DNA, 17 bp, Arabidopsis thaliana
catgggccatgacctcc

SEQ ID NO: 69632 - DNA, 17 bp, Arabidopsis thaliana
catgggcccaccttgtc

SEQ ID NO: 69633 - DNA, 17 bp, Arabidopsis thaliana
catgggccgggcctgac

SEQ ID NO: 69634 - DNA, 17 bp, Arabidopsis thaliana
catgggctcgttacaat

SEQ ID NO: 69635 - DNA, 17 bp, Arabidopsis thaliana
catgggctgctcatatc

SEQ ID NO: 69636 - DNA, 17 bp, Arabidopsis thaliana
catgggcttgtgacttt

SEQ ID NO: 69637 - DNA, 17 bp, Arabidopsis thaliana
catgggctttaacggac

SEQ ID NO: 69638 - DNA, 17 bp, Arabidopsis thaliana
catgggctttgatttga

SEQ ID NO: 69639 - DNA, 17 bp, Arabidopsis thaliana
catgggctttggttaac

SEQ ID NO: 69640 - DNA, 17 bp, Arabidopsis thaliana
catggggaaggaattgg

SEQ ID NO: 69641 - DNA, 17 bp, Arabidopsis thaliana
catggggactagacata

SEQ ID NO: 69642 - DNA, 17 bp, Arabidopsis thaliana
catggggcacttccttg

SEQ ID NO: 69643 - DNA, 17 bp, Arabidopsis thaliana
catggggcttggttaca

SEQ ID NO: 69644 - DNA, 17 bp, Arabidopsis thaliana
catggggttaggcttct

SEQ ID NO: 69645 - DNA, 17 bp, Arabidopsis thaliana
catgggtctctagtgat

SEQ ID NO: 69646 - DNA, 17 bp, Arabidopsis thaliana
catgggtctgcctatgg

SEQ ID NO: 69647 - DNA, 17 bp, Arabidopsis thaliana
catgggtgattctggtc

SEQ ID NO: 69648 - DNA, 17 bp, Arabidopsis thaliana
catgggtggatgtatgt

SEQ ID NO: 69649 - DNA, 17 bp, Arabidopsis thaliana
catgggtgtggatgact

SEQ ID NO: 69650 - DNA, 17 bp, Arabidopsis thaliana
catgggttagtcgatcc

SEQ ID NO: 69651 - DNA, 17 bp, Arabidopsis thaliana
catgggttcttggactg

SEQ ID NO: 69652 - DNA, 17 bp, Arabidopsis thaliana
catgggttgagctgagt

SEQ ID NO: 69653 - DNA, 17 bp, Arabidopsis thaliana
catgggttggctgacta

SEQ ID NO: 69654 - DNA, 17 bp, Arabidopsis thaliana
catgggttgtagaaagt

SEQ ID NO: 69655 - DNA, 17 bp, Arabidopsis thaliana
catgggtttacgttttt

SEQ ID NO: 69656 - DNA, 17 bp, Arabidopsis thaliana
catgggtttcgacttac

SEQ ID NO: 69657 - DNA, 17 bp, Arabidopsis thaliana
catgggtttcggttttt

SEQ ID NO: 69658 - DNA, 17 bp, Arabidopsis thaliana
catggtatgcggctacg

SEQ ID NO: 69659 - DNA, 17 bp, Arabidopsis thaliana
catggtcaacaggtgtg

SEQ ID NO: 69660 - DNA, 17 bp, Arabidopsis thaliana
catggtcaacgggtgtg

SEQ ID NO: 69661 - DNA, 17 bp, Arabidopsis thaliana
catggtcagatccgtca

SEQ ID NO: 69662 - DNA, 17 bp, Arabidopsis thaliana
catggtcatccgagaca

SEQ ID NO: 69663 - DNA, 17 bp, Arabidopsis thaliana
catggtccaacctggtt

SEQ ID NO: 69664 - DNA, 17 bp, Arabidopsis thaliana
catggtccaagcccggt

SEQ ID NO: 69665 - DNA, 17 bp, Arabidopsis thaliana
catggtccagggaagga

SEQ ID NO: 69666 - DNA, 17 bp, Arabidopsis thaliana
catggtcctgttcgttt

SEQ ID NO: 69667 - DNA, 17 bp, Arabidopsis thaliana
catggtcgactaccttc

SEQ ID NO: 69668 - DNA, 17 bp, Arabidopsis thaliana
catggtcggcatagatc

SEQ ID NO: 69669 - DNA, 17 bp, Arabidopsis thaliana
catggtcggcatagatg

SEQ ID NO: 69670 - DNA, 17 bp, Arabidopsis thaliana
catggtcgtcgactgag

SEQ ID NO: 69671 - DNA, 17 bp, Arabidopsis thaliana
catggtctacagcagag

SEQ ID NO: 69672 - DNA, 17 bp, Arabidopsis thaliana
catggtctatttaggtt

SEQ ID NO: 69673 - DNA, 17 bp, Arabidopsis thaliana
catggtctcaattatcg

SEQ ID NO: 69674 - DNA, 17 bp, Arabidopsis thaliana
catggtctttaatgggc

SEQ ID NO: 69675 - DNA, 17 bp, Arabidopsis thaliana
catggtgaacttaccac

SEQ ID NO: 69676 - DNA, 17 bp, Arabidopsis thaliana
catggtgaaggggtcgg

SEQ ID NO: 69677 - DNA, 17 bp, Arabidopsis thaliana
catggtgcaggctaggc

SEQ ID NO: 69678 - DNA, 17 bp, Arabidopsis thaliana
catggtgctccaagcta

SEQ ID NO: 69679 - DNA, 17 bp, Arabidopsis thaliana
catggtgctttggattc

SEQ ID NO: 69680 - DNA, 17 bp, Arabidopsis thaliana
catggtggtgtctttag

SEQ ID NO: 69681 - DNA, 17 bp, Arabidopsis thaliana
catggtgtacacagacg

SEQ ID NO: 69682 - DNA, 17 bp, Arabidopsis thaliana
catggtgtagccaaagt

SEQ ID NO: 69683 - DNA, 17 bp, Arabidopsis thaliana
catggtgtaggcaaagt

SEQ ID NO: 69684 - DNA, 17 bp, Arabidopsis thaliana
catggtgtcagaccaca

SEQ ID NO: 69685 - DNA, 17 bp, Arabidopsis thaliana
catggtgtccggcgttt

SEQ ID NO: 69686 - DNA, 17 bp, Arabidopsis thaliana
catggtgttccttcttc

SEQ ID NO: 69687 - DNA, 17 bp, Arabidopsis thaliana
catggttacagcggccc

SEQ ID NO: 69688 - DNA, 17 bp, Arabidopsis thaliana
catggttacatcaagtg

SEQ ID NO: 69689 - DNA, 17 bp, Arabidopsis thaliana
catggttaggctaaccc

SEQ ID NO: 69690 - DNA, 17 bp, Arabidopsis thaliana
catggttatccacagat

SEQ ID NO: 69691 - DNA, 17 bp, Arabidopsis thaliana
catggttattcggctcg

SEQ ID NO: 69692 - DNA, 17 bp, Arabidopsis thaliana
catggttccgacgatca

SEQ ID NO: 69693 - DNA, 17 bp, Arabidopsis thaliana
catggttctctcatcgg

SEQ ID NO: 69694 - DNA, 17 bp, Arabidopsis thaliana
catggttgaatccgctt

SEQ ID NO: 69695 - DNA, 17 bp, Arabidopsis thaliana
catggttgagtctgatc

SEQ ID NO: 69696 - DNA, 17 bp, Arabidopsis thaliana
catggttgattctagcg

SEQ ID NO: 69697 - DNA, 17 bp, Arabidopsis thaliana
catggttgctccctctt

SEQ ID NO: 69698 - DNA, 17 bp, Arabidopsis thaliana
catggttgctctgcttt

SEQ ID NO: 69699 - DNA, 17 bp, Arabidopsis thaliana
catggttggcgagtctc

SEQ ID NO: 69700 - DNA, 17 bp, Arabidopsis thaliana
catggttgtgcttttgg

SEQ ID NO: 69701 - DNA, 17 bp, Arabidopsis thaliana
catggtttagtccgctc

SEQ ID NO: 69702 - DNA, 17 bp, Arabidopsis thaliana
catggtttatcaataga

SEQ ID NO: 69703 - DNA, 17 bp, Arabidopsis thaliana
catggtttcgctatagg

SEQ ID NO: 69704 - DNA, 17 bp, Arabidopsis thaliana
catggtttgatatcagg

SEQ ID NO: 69705 - DNA, 17 bp, Arabidopsis thaliana
catggtttgcaatggct

SEQ ID NO: 69706 - DNA, 17 bp, Arabidopsis thaliana
catgtaaaattgggcca

SEQ ID NO: 69707 - DNA, 17 bp, Arabidopsis thaliana
catgtaaacagttgatc

SEQ ID NO: 69708 - DNA, 17 bp, Arabidopsis thaliana
catgtaaacatctgatc

SEQ ID NO: 69709 - DNA, 17 bp, Arabidopsis thaliana
catgtaagaaacgaatt

SEQ ID NO: 69710 - DNA, 17 bp, Arabidopsis thaliana
catgtaaggttccatct

SEQ ID NO: 69711 - DNA, 17 bp, Arabidopsis thaliana
catgtaattcgacttcg

SEQ ID NO: 69712 - DNA, 17 bp, Arabidopsis thaliana
catgtacaatggttggg

SEQ ID NO: 69713 - DNA, 17 bp, Arabidopsis thaliana
catgtacagtttttgcc

SEQ ID NO: 69714 - DNA, 17 bp, Arabidopsis thaliana
catgtaccgcctaagct

SEQ ID NO: 69715 - DNA, 17 bp, Arabidopsis thaliana
catgtactcgatcacgc

SEQ ID NO: 69716 - DNA, 17 bp, Arabidopsis thaliana
catgtactcgtcttcca

SEQ ID NO: 69717 - DNA, 17 bp, Arabidopsis thaliana
catgtactttcggattc

SEQ ID NO: 69718 - DNA, 17 bp, Arabidopsis thaliana
catgtactttgcgatga

SEQ ID NO: 69719 - DNA, 17 bp, Arabidopsis thaliana
catgtagaccaaggttg

SEQ ID NO: 69720 - DNA, 17 bp, Arabidopsis thaliana
catgtagaccggggttg

SEQ ID NO: 69721 - DNA, 17 bp, Arabidopsis thaliana
catgtagatctctgcca

SEQ ID NO: 69722 - DNA, 17 bp, Arabidopsis thaliana
catgtagctgcggtttt

SEQ ID NO: 69723 - DNA, 17 bp, Arabidopsis thaliana
catgtaggtgtgggcca

SEQ ID NO: 69724 - DNA, 17 bp, Arabidopsis thaliana
catgtagtctctaagat

SEQ ID NO: 69725 - DNA, 17 bp, Arabidopsis thaliana
catgtagttgcggttgc

SEQ ID NO: 69726 - DNA, 17 bp, Arabidopsis thaliana
catgtatcaggcggcgg

SEQ ID NO: 69727 - DNA, 17 bp, Arabidopsis thaliana
catgtattcacgatgga

SEQ ID NO: 69728 - DNA, 17 bp, Arabidopsis thaliana
catgtattttagatgtc

SEQ ID NO: 69729 - DNA, 17 bp, Arabidopsis thaliana
catgtcaatcacctgta

SEQ ID NO: 69730 - DNA, 17 bp, Arabidopsis thaliana
catgtcaatcctataca

SEQ ID NO: 69731 - DNA, 17 bp, Arabidopsis thaliana
catgtcaatcgcgggtt

SEQ ID NO: 69732 - DNA, 17 bp, Arabidopsis thaliana
catgtcaatcgggtgct

SEQ ID NO: 69733 - DNA, 17 bp, Arabidopsis thaliana
catgtcaatgttatggc

SEQ ID NO: 69734 - DNA, 17 bp, Arabidopsis thaliana
catgtcagatgggccat

SEQ ID NO: 69735 - DNA, 17 bp, Arabidopsis thaliana
catgtcatcatctccat

SEQ ID NO: 69736 - DNA, 17 bp, Arabidopsis thaliana
catgtcatctgcatttc

SEQ ID NO: 69737 - DNA, 17 bp, Arabidopsis thaliana
catgtcatgcttgcctc

SEQ ID NO: 69738 - DNA, 17 bp, Arabidopsis thaliana
catgtcatgtaccagtt

SEQ ID NO: 69739 - DNA, 17 bp, Arabidopsis thaliana
catgtcatgtgcgctta

SEQ ID NO: 69740 - DNA, 17 bp, Arabidopsis thaliana
catgtccaacgacaaaa

SEQ ID NO: 69741 - DNA, 17 bp, Arabidopsis thaliana
catgtccaacgacaaga

SEQ ID NO: 69742 - DNA, 17 bp, Arabidopsis thaliana
catgtccactaaggcac

SEQ ID NO: 69743 - DNA, 17 bp, Arabidopsis thaliana
catgtccactactgatg

SEQ ID NO: 69744 - DNA, 17 bp, Arabidopsis thaliana
catgtccactgaagccc

SEQ ID NO: 69745 - DNA, 17 bp, Arabidopsis thaliana
catgtccagacaagtac

SEQ ID NO: 69746 - DNA, 17 bp, Arabidopsis thaliana
catgtccagtatgtact

SEQ ID NO: 69747 - DNA, 17 bp, Arabidopsis thaliana
catgtccagtggtggtt

SEQ ID NO: 69748 - DNA, 17 bp, Arabidopsis thaliana
catgtccatatggcaag

SEQ ID NO: 69749 - DNA, 17 bp, Arabidopsis thaliana
catgtccatatgggcaa

SEQ ID NO: 69750 - DNA, 17 bp, Arabidopsis thaliana
catgtccatctggatga

SEQ ID NO: 69751 - DNA, 17 bp, Arabidopsis thaliana
catgtccatgtgggtaa

SEQ ID NO: 69752 - DNA, 17 bp, Arabidopsis thaliana
catgtccattaacgccc

SEQ ID NO: 69753 - DNA, 17 bp, Arabidopsis thaliana
catgtccattaaggccc

SEQ ID NO: 69754 - DNA, 17 bp, Arabidopsis thaliana
catgtccattgcacgga

SEQ ID NO: 69755 - DNA, 17 bp, Arabidopsis thaliana
catgtcccggttgctgt

SEQ ID NO: 69756 - DNA, 17 bp, Arabidopsis thaliana
catgtccctctcgtgtg

SEQ ID NO: 69757 - DNA, 17 bp, Arabidopsis thaliana
catgtccgaagattaaa

SEQ ID NO: 69758 - DNA, 17 bp, Arabidopsis thaliana
catgtccgcaaatgaag

SEQ ID NO: 69759 - DNA, 17 bp, Arabidopsis thaliana
catgtccgctgactcag

SEQ ID NO: 69760 - DNA, 17 bp, Arabidopsis thaliana
catgtccgtcgttgcca

SEQ ID NO: 69761 - DNA, 17 bp, Arabidopsis thaliana
catgtcctatcatataa

SEQ ID NO: 69762 - DNA, 17 bp, Arabidopsis thaliana
catgtcctccatgcagc

SEQ ID NO: 69763 - DNA, 17 bp, Arabidopsis thaliana
catgtcctcgtctctga

SEQ ID NO: 69764 - DNA, 17 bp, Arabidopsis thaliana
catgtcgacatcattca

SEQ ID NO: 69765 - DNA, 17 bp, Arabidopsis thaliana
catgtcgacattgtaga

SEQ ID NO: 69766 - DNA, 17 bp, Arabidopsis thaliana
catgtcgctcatgttca

SEQ ID NO: 69767 - DNA, 17 bp, Arabidopsis thaliana
catgtcggagaaaaccc

SEQ ID NO: 69768 - DNA, 17 bp, Arabidopsis thaliana
catgtcgtcgaggatgg

SEQ ID NO: 69769 - DNA, 17 bp, Arabidopsis thaliana
catgtctaaataggggc

SEQ ID NO: 69770 - DNA, 17 bp, Arabidopsis thaliana
catgtctacatttggca

SEQ ID NO: 69771 - DNA, 17 bp, Arabidopsis thaliana
catgtctacgaggtcca

SEQ ID NO: 69772 - DNA, 17 bp, Arabidopsis thaliana
catgtctactctagtgc

SEQ ID NO: 69773 - DNA, 17 bp, Arabidopsis thaliana
catgtctattctggcct

SEQ ID NO: 69774 - DNA, 17 bp, Arabidopsis thaliana
catgtctattttggcct

SEQ ID NO: 69775 - DNA, 17 bp, Arabidopsis thaliana
catgtctcaatgcttga

SEQ ID NO: 69776 - DNA, 17 bp, Arabidopsis thaliana
catgtctcagtttgcaa

SEQ ID NO: 69777 - DNA, 17 bp, Arabidopsis thaliana
catgtctcgaagcaact

SEQ ID NO: 69778 - DNA, 17 bp, Arabidopsis thaliana
catgtctcgggactgct

SEQ ID NO: 69779 - DNA, 17 bp, Arabidopsis thaliana
catgtctcggtgggacc

SEQ ID NO: 69780 - DNA, 17 bp, Arabidopsis thaliana
catgtctctgagggttt

SEQ ID NO: 69781 - DNA, 17 bp, Arabidopsis thaliana
catgtctgcctgggtgt

SEQ ID NO: 69782 - DNA, 17 bp, Arabidopsis thaliana
catgtctgggccttgga

SEQ ID NO: 69783 - DNA, 17 bp, Arabidopsis thaliana
catgtctgtaccgtact

SEQ ID NO: 69784 - DNA, 17 bp, Arabidopsis thaliana
catgtcttactgctctt

SEQ ID NO: 69785 - DNA, 17 bp, Arabidopsis thaliana
catgtcttcatcaccgg

SEQ ID NO: 69786 - DNA, 17 bp, Arabidopsis thaliana
catgtcttcgacctgtt

SEQ ID NO: 69787 - DNA, 17 bp, Arabidopsis thaliana
catgtcttgacgattgg

SEQ ID NO: 69788 - DNA, 17 bp, Arabidopsis thaliana
catgtcttgcgaaccga

SEQ ID NO: 69789 - DNA, 17 bp, Arabidopsis thaliana
catgtcttttccaaccg

SEQ ID NO: 69790 - DNA, 17 bp, Arabidopsis thaliana
catgtgaacggcacttg

SEQ ID NO: 69791 - DNA, 17 bp, Arabidopsis thaliana
catgtgaagactatgtt

SEQ ID NO: 69792 - DNA, 17 bp, Arabidopsis thaliana
catgtgaagtagagcgg

SEQ ID NO: 69793 - DNA, 17 bp, Arabidopsis thaliana
catgtgaagtccagact

SEQ ID NO: 69794 - DNA, 17 bp, Arabidopsis thaliana
catgtgaatgtggaggc

SEQ ID NO: 69795 - DNA, 17 bp, Arabidopsis thaliana
catgtgaccattggaac

SEQ ID NO: 69796 - DNA, 17 bp, Arabidopsis thaliana
catgtgaccattggagc

SEQ ID NO: 69797 - DNA, 17 bp, Arabidopsis thaliana
catgtgaccgttgctca

SEQ ID NO: 69798 - DNA, 17 bp, Arabidopsis thaliana
catgtgactatgacttg

SEQ ID NO: 69799 - DNA, 17 bp, Arabidopsis thaliana
catgtgagggttacccg

SEQ ID NO: 69800 - DNA, 17 bp, Arabidopsis thaliana
catgtgaggtcacggtt

SEQ ID NO: 69801 - DNA, 17 bp, Arabidopsis thaliana
catgtgagttagccgtg

SEQ ID NO: 69802 - DNA, 17 bp, Arabidopsis thaliana
catgtgataagtgggca

SEQ ID NO: 69803 - DNA, 17 bp, Arabidopsis thaliana
catgtgataccttttcg

SEQ ID NO: 69804 - DNA, 17 bp, Arabidopsis thaliana
catgtgatgagatgtgc

SEQ ID NO: 69805 - DNA, 17 bp, Arabidopsis thaliana
catgtgattatgtgtca

SEQ ID NO: 69806 - DNA, 17 bp, Arabidopsis thaliana
catgtgattgatggaca

SEQ ID NO: 69807 - DNA, 17 bp, Arabidopsis thaliana
catgtgatttttgctgt

SEQ ID NO: 69808 - DNA, 17 bp, Arabidopsis thaliana
catgtgcaaatgctttc

SEQ ID NO: 69809 - DNA, 17 bp, Arabidopsis thaliana
catgtgcaatgcagatg

SEQ ID NO: 69810 - DNA, 17 bp, Arabidopsis thaliana
catgtgcatagattaat

SEQ ID NO: 69811 - DNA, 17 bp, Arabidopsis thaliana
catgtgcatagattact

SEQ ID NO: 69812 - DNA, 17 bp, Arabidopsis thaliana
catgtgcattggtcggc

SEQ ID NO: 69813 - DNA, 17 bp, Arabidopsis thaliana
catgtgcccatcttcac

SEQ ID NO: 69814 - DNA, 17 bp, Arabidopsis thaliana
catgtgcccatcttccc

SEQ ID NO: 69815 - DNA, 17 bp, Arabidopsis thaliana
catgtgcctctcgtgct

SEQ ID NO: 69816 - DNA, 17 bp, Arabidopsis thaliana
catgtgccttttacctc

SEQ ID NO: 69817 - DNA, 17 bp, Arabidopsis thaliana
catgtgcgcagcctttt

SEQ ID NO: 69818 - DNA, 17 bp, Arabidopsis thaliana
catgtgctctacaggcc

SEQ ID NO: 69819 - DNA, 17 bp, Arabidopsis thaliana
catgtgctctacgagat

SEQ ID NO: 69820 - DNA, 17 bp, Arabidopsis thaliana
catgtgctgatctgagt

SEQ ID NO: 69821 - DNA, 17 bp, Arabidopsis thaliana
catgtgctgatgtgtca

SEQ ID NO: 69822 - DNA, 17 bp, Arabidopsis thaliana
catgtgctgatgtgtga

SEQ ID NO: 69823 - DNA, 17 bp, Arabidopsis thaliana
catgtgcttggcctcgt

SEQ ID NO: 69824 - DNA, 17 bp, Arabidopsis thaliana
catgtggactggggacg

SEQ ID NO: 69825 - DNA, 17 bp, Arabidopsis thaliana
catgtggactttggcta

SEQ ID NO: 69826 - DNA, 17 bp, Arabidopsis thaliana
catgtggagctatgtga

SEQ ID NO: 69827 - DNA, 17 bp, Arabidopsis thaliana
catgtggagggcctctt

SEQ ID NO: 69828 - DNA, 17 bp, Arabidopsis thaliana
catgtggagtgccattt

SEQ ID NO: 69829 - DNA, 17 bp, Arabidopsis thaliana
catgtggcaagaagagt

SEQ ID NO: 69830 - DNA, 17 bp, Arabidopsis thaliana
catgtggcacgatcgta

SEQ ID NO: 69831 - DNA, 17 bp, Arabidopsis thaliana
catgtggcattcttttt

SEQ ID NO: 69832 - DNA, 17 bp, Arabidopsis thaliana
catgtggctttgttgtt

SEQ ID NO: 69833 - DNA, 17 bp, Arabidopsis thaliana
catgtgggctttgcccg

SEQ ID NO: 69834 - DNA, 17 bp, Arabidopsis thaliana
catgtgggtaatccggc

SEQ ID NO: 69835 - DNA, 17 bp, Arabidopsis thaliana
catgtgggtcatcgcgc

SEQ ID NO: 69836 - DNA, 17 bp, Arabidopsis thaliana
catgtggttatgtccga

SEQ ID NO: 69837 - DNA, 17 bp, Arabidopsis thaliana
catgtgtatagggaagc

SEQ ID NO: 69838 - DNA, 17 bp, Arabidopsis thaliana
catgtgtattggtcggc

SEQ ID NO: 69839 - DNA, 17 bp, Arabidopsis thaliana
catgtgtcgctatgtga

SEQ ID NO: 69840 - DNA, 17 bp, Arabidopsis thaliana
catgtgtcgtctgtcgt

SEQ ID NO: 69841 - DNA, 17 bp, Arabidopsis thaliana
catgtgtctactcgagt

SEQ ID NO: 69842 - DNA, 17 bp, Arabidopsis thaliana
catgtgtctctggaaat

SEQ ID NO: 69843 - DNA, 17 bp, Arabidopsis thaliana
catgtgtgaccatgtat

SEQ ID NO: 69844 - DNA, 17 bp, Arabidopsis thaliana
catgtgtgacgatgtgt

SEQ ID NO: 69845 - DNA, 17 bp, Arabidopsis thaliana
catgtgtgattcggact

SEQ ID NO: 69846 - DNA, 17 bp, Arabidopsis thaliana
catgtgtgcgagtcaac

SEQ ID NO: 69847 - DNA, 17 bp, Arabidopsis thaliana
catgtgtgcgatgtgtt

SEQ ID NO: 69848 - DNA, 17 bp, Arabidopsis thaliana
catgtgtggcgatgtgt

SEQ ID NO: 69849 - DNA, 17 bp, Arabidopsis thaliana
catgtgtgtgctgatgt

SEQ ID NO: 69850 - DNA, 17 bp, Arabidopsis thaliana
catgtgttactcgttcc

SEQ ID NO: 69851 - DNA, 17 bp, Arabidopsis thaliana
catgtgttagcggcaat

SEQ ID NO: 69852 - DNA, 17 bp, Arabidopsis thaliana
catgtgttagtcgatcc

SEQ ID NO: 69853 - DNA, 17 bp, Arabidopsis thaliana
catgtgttgggactttg

SEQ ID NO: 69854 - DNA, 17 bp, Arabidopsis thaliana
catgtgtttgcggtttt

SEQ ID NO: 69855 - DNA, 17 bp, Arabidopsis thaliana
catgtgtttgttggtta

SEQ ID NO: 69856 - DNA, 17 bp, Arabidopsis thaliana
catgttaacggtcgtaa

SEQ ID NO: 69857 - DNA, 17 bp, Arabidopsis thaliana
catgttacaagtgtggc

SEQ ID NO: 69858 - DNA, 17 bp, Arabidopsis thaliana
catgttatccaagatat

SEQ ID NO: 69859 - DNA, 17 bp, Arabidopsis thaliana
catgttatccaggatcc

SEQ ID NO: 69860 - DNA, 17 bp, Arabidopsis thaliana
catgttcaagatgagac

SEQ ID NO: 69861 - DNA, 17 bp, Arabidopsis thaliana
catgttcaggaactctc

SEQ ID NO: 69862 - DNA, 17 bp, Arabidopsis thaliana
catgttcatcacaagga

SEQ ID NO: 69863 - DNA, 17 bp, Arabidopsis thaliana
catgttcatcacgtttt

SEQ ID NO: 69864 - DNA, 17 bp, Arabidopsis thaliana
catgttccaagggttgg

SEQ ID NO: 69865 - DNA, 17 bp, Arabidopsis thaliana
catgttccattggtcaa

SEQ ID NO: 69866 - DNA, 17 bp, Arabidopsis thaliana
catgttcccgacaaagt

SEQ ID NO: 69867 - DNA, 17 bp, Arabidopsis thaliana
catgttccttcagctgt

SEQ ID NO: 69868 - DNA, 17 bp, Arabidopsis thaliana
catgttccttctggcca

SEQ ID NO: 69869 - DNA, 17 bp, Arabidopsis thaliana
catgttcggatatcggt

SEQ ID NO: 69870 - DNA, 17 bp, Arabidopsis thaliana
catgttcggtgtgacga

SEQ ID NO: 69871 - DNA, 17 bp, Arabidopsis thaliana
catgttcgtcgttgcca

SEQ ID NO: 69872 - DNA, 17 bp, Arabidopsis thaliana
catgttcgttaacgaca

SEQ ID NO: 69873 - DNA, 17 bp, Arabidopsis thaliana
catgttcgtttgcttct

SEQ ID NO: 69874 - DNA, 17 bp, Arabidopsis thaliana
catgttcgtttgcttgt

SEQ ID NO: 69875 - DNA, 17 bp, Arabidopsis thaliana
catgttctcttagccgt

SEQ ID NO: 69876 - DNA, 17 bp, Arabidopsis thaliana
catgttgactggtggtg

SEQ ID NO: 69877 - DNA, 17 bp, Arabidopsis thaliana
catgttgagagattcca

SEQ ID NO: 69878 - DNA, 17 bp, Arabidopsis thaliana
catgttgatgacagcct

SEQ ID NO: 69879 - DNA, 17 bp, Arabidopsis thaliana
catgttgcatatgagcc

SEQ ID NO: 69880 - DNA, 17 bp, Arabidopsis thaliana
catgttgcgtctcaatg

SEQ ID NO: 69881 - DNA, 17 bp, Arabidopsis thaliana
catgttgctagctcctg

SEQ ID NO: 69882 - DNA, 17 bp, Arabidopsis thaliana
catgttgctcgtcactt

SEQ ID NO: 69883 - DNA, 17 bp, Arabidopsis thaliana
catgttgggcctgttga

SEQ ID NO: 69884 - DNA, 17 bp, Arabidopsis thaliana
catgttgtctgagtagt

SEQ ID NO: 69885 - DNA, 17 bp, Arabidopsis thaliana
catgttgtgcgggtatt

SEQ ID NO: 69886 - DNA, 17 bp, Arabidopsis thaliana
catgttgtggtttcagg

SEQ ID NO: 69887 - DNA, 17 bp, Arabidopsis thaliana
catgttgtggttttggg

SEQ ID NO: 69888 - DNA, 17 bp, Arabidopsis thaliana
catgttgttccagtcgc

SEQ ID NO: 69889 - DNA, 17 bp, Arabidopsis thaliana
catgtttacggttagag

SEQ ID NO: 69890 - DNA, 17 bp, Arabidopsis thaliana
catgtttagacccaagc

SEQ ID NO: 69891 - DNA, 17 bp, Arabidopsis thaliana
catgtttatccttaggg

SEQ ID NO: 69892 - DNA, 17 bp, Arabidopsis thaliana
catgtttcgaacccagc

SEQ ID NO: 69893 - DNA, 17 bp, Arabidopsis thaliana
catgtttctcggataaa

SEQ ID NO: 69894 - DNA, 17 bp, Arabidopsis thaliana
catgtttctctggccat

SEQ ID NO: 69895 - DNA, 17 bp, Arabidopsis thaliana
catgtttcttttggcct

SEQ ID NO: 69896 - DNA, 17 bp, Arabidopsis thaliana
catgtttgacacgactt

SEQ ID NO: 69897 - DNA, 17 bp, Arabidopsis thaliana
catgtttgacacgcctt

SEQ ID NO: 69898 - DNA, 17 bp, Arabidopsis thaliana
catgtttgaggtggaac

SEQ ID NO: 69899 - DNA, 17 bp, Arabidopsis thaliana
catgtttgctactcatc

SEQ ID NO: 69900 - DNA, 17 bp, Arabidopsis thaliana
catgtttgtgctggagc

SEQ ID NO: 69901 - DNA, 17 bp, Arabidopsis thaliana
catgttttacggacggg

SEQ ID NO: 69902 - DNA, 17 bp, Arabidopsis thaliana
catgttttcatttgctg

SEQ ID NO: 69903 - DNA, 17 bp, Arabidopsis thaliana
catgttttggatgtgga

SEQ ID NO: 69904 - DNA, 17 bp, Arabidopsis thaliana
catgttttggtttcgga

SEQ ID NO: 69905 - DNA, 17 bp, Arabidopsis thaliana
cattaataaagaagcta

SEQ ID NO: 69906 - DNA, 17 bp, Arabidopsis thaliana
cattacactgagaattt

SEQ ID NO: 69907 - DNA, 17 bp, Arabidopsis thaliana
cattacatgctgtggtt

SEQ ID NO: 69908 - DNA, 17 bp, Arabidopsis thaliana
cattaccatatacaggg

SEQ ID NO: 69909 - DNA, 17 bp, Arabidopsis thaliana
cattaccgctcaggaca

SEQ ID NO: 69910 - DNA, 17 bp, Arabidopsis thaliana
cattaccttcaccattt

SEQ ID NO: 69911 - DNA, 17 bp, Arabidopsis thaliana
cattaccttctgggtgg

SEQ ID NO: 69912 - DNA, 17 bp, Arabidopsis thaliana
cattacgggtttatgtt

SEQ ID NO: 69913 - DNA, 17 bp, Arabidopsis thaliana
cattacggtggcggcct

SEQ ID NO: 69914 - DNA, 17 bp, Arabidopsis thaliana
cattacgtgcgggcttt

SEQ ID NO: 69915 - DNA, 17 bp, Arabidopsis thaliana
cattacgttggcccgtg

SEQ ID NO: 69916 - DNA, 17 bp, Arabidopsis thaliana
cattacgttttctgaca

SEQ ID NO: 69917 - DNA, 17 bp, Arabidopsis thaliana
cattacgttttctgtca

SEQ ID NO: 69918 - DNA, 17 bp, Arabidopsis thaliana
cattactgagatcccgt

SEQ ID NO: 69919 - DNA, 17 bp, Arabidopsis thaliana
cattactggtggtgcgt

SEQ ID NO: 69920 - DNA, 17 bp, Arabidopsis thaliana
cattactgtaggatagg

SEQ ID NO: 69921 - DNA, 17 bp, Arabidopsis thaliana
cattactgttcttgctg

SEQ ID NO: 69922 - DNA, 17 bp, Arabidopsis thaliana
cattagaccaagaggtt

SEQ ID NO: 69923 - DNA, 17 bp, Arabidopsis thaliana
cattagattttaacccg

SEQ ID NO: 69924 - DNA, 17 bp, Arabidopsis thaliana
cattagcaacatcaacg

SEQ ID NO: 69925 - DNA, 17 bp, Arabidopsis thaliana
cattagcctcactgctt

SEQ ID NO: 69926 - DNA, 17 bp, Arabidopsis thaliana
cattagcgtcaggtgat

SEQ ID NO: 69927 - DNA, 17 bp, Arabidopsis thaliana
cattagcgttagtcctc

SEQ ID NO: 69928 - DNA, 17 bp, Arabidopsis thaliana
cattagctgtccactcg

SEQ ID NO: 69929 - DNA, 17 bp, Arabidopsis thaliana
cattagggttggtgtcg

SEQ ID NO: 69930 - DNA, 17 bp, Arabidopsis thaliana
cattaggtttctagggt

SEQ ID NO: 69931 - DNA, 17 bp, Arabidopsis thaliana
cattagtccattcggca

SEQ ID NO: 69932 - DNA, 17 bp, Arabidopsis thaliana
cattagtcgataatccg

SEQ ID NO: 69933 - DNA, 17 bp, Arabidopsis thaliana
cattagtcgctcctgta

SEQ ID NO: 69934 - DNA, 17 bp, Arabidopsis thaliana
cattagtgagacaatgg

SEQ ID NO: 69935 - DNA, 17 bp, Arabidopsis thaliana
cattagttgaagaactg

SEQ ID NO: 69936 - DNA, 17 bp, Arabidopsis thaliana
cattagttgtggctttt

SEQ ID NO: 69937 - DNA, 17 bp, Arabidopsis thaliana
cattatcagtggcggct

SEQ ID NO: 69938 - DNA, 17 bp, Arabidopsis thaliana
cattatccacgtgttcg

SEQ ID NO: 69939 - DNA, 17 bp, Arabidopsis thaliana
cattatccacgtgtttg

SEQ ID NO: 69940 - DNA, 17 bp, Arabidopsis thaliana
cattatccatatggtca

SEQ ID NO: 69941 - DNA, 17 bp, Arabidopsis thaliana
cattatccccgcggtat

SEQ ID NO: 69942 - DNA, 17 bp, Arabidopsis thaliana
cattatcgtcgccggtt

SEQ ID NO: 69943 - DNA, 17 bp, Arabidopsis thaliana
cattatgcggaacacat

SEQ ID NO: 69944 - DNA, 17 bp, Arabidopsis thaliana
cattatggaccgtccaa

SEQ ID NO: 69945 - DNA, 17 bp, Arabidopsis thaliana
cattatgttcaggacgg

SEQ ID NO: 69946 - DNA, 17 bp, Arabidopsis thaliana
cattattatttggacgt

SEQ ID NO: 69947 - DNA, 17 bp, Arabidopsis thaliana
cattattgcggtgcggt

SEQ ID NO: 69948 - DNA, 17 bp, Arabidopsis thaliana
cattatttcaagcagtt

SEQ ID NO: 69949 - DNA, 17 bp, Arabidopsis thaliana
cattatttctgacggca

SEQ ID NO: 69950 - DNA, 17 bp, Arabidopsis thaliana
cattcaacatgtccatc

SEQ ID NO: 69951 - DNA, 17 bp, Arabidopsis thaliana
cattcaacatttatttg

SEQ ID NO: 69952 - DNA, 17 bp, Arabidopsis thaliana
cattcaacctaggcgaa

SEQ ID NO: 69953 - DNA, 17 bp, Arabidopsis thaliana
cattcaactggatagag

SEQ ID NO: 69954 - DNA, 17 bp, Arabidopsis thaliana
cattcaagtgcagtttt

SEQ ID NO: 69955 - DNA, 17 bp, Arabidopsis thaliana
cattcaatgtgcctgga

SEQ ID NO: 69956 - DNA, 17 bp, Arabidopsis thaliana
cattcacagttaagcaa

SEQ ID NO: 69957 - DNA, 17 bp, Arabidopsis thaliana
cattcaccttcgaacgc

SEQ ID NO: 69958 - DNA, 17 bp, Arabidopsis thaliana
cattcacgccattgttc

SEQ ID NO: 69959 - DNA, 17 bp, Arabidopsis thaliana
cattcacgcccggttag

SEQ ID NO: 69960 - DNA, 17 bp, Arabidopsis thaliana
cattcacggccggttag

SEQ ID NO: 69961 - DNA, 17 bp, Arabidopsis thaliana
cattcactacttggcgt

SEQ ID NO: 69962 - DNA, 17 bp, Arabidopsis thaliana
cattcactcttaaggcg

SEQ ID NO: 69963 - DNA, 17 bp, Arabidopsis thaliana
cattcactgctgcgcca

SEQ ID NO: 69964 - DNA, 17 bp, Arabidopsis thaliana
cattcactggtgtgatg

SEQ ID NO: 69965 - DNA, 17 bp, Arabidopsis thaliana
cattcacttggctgaac

SEQ ID NO: 69966 - DNA, 17 bp, Arabidopsis thaliana
cattcagagatccattg

SEQ ID NO: 69967 - DNA, 17 bp, Arabidopsis thaliana
cattcagagcccattca

SEQ ID NO: 69968 - DNA, 17 bp, Arabidopsis thaliana
cattcagatagtgactg

SEQ ID NO: 69969 - DNA, 17 bp, Arabidopsis thaliana
cattcagcataggaagt

SEQ ID NO: 69970 - DNA, 17 bp, Arabidopsis thaliana
cattcagccccttgtcg

SEQ ID NO: 69971 - DNA, 17 bp, Arabidopsis thaliana
cattcagccctttgtcg

SEQ ID NO: 69972 - DNA, 17 bp, Arabidopsis thaliana
cattcagctgcaacctc

SEQ ID NO: 69973 - DNA, 17 bp, Arabidopsis thaliana
cattcagctgccatgac

SEQ ID NO: 69974 - DNA, 17 bp, Arabidopsis thaliana
cattcaggaaccgatgt

SEQ ID NO: 69975 - DNA, 17 bp, Arabidopsis thaliana
cattcagggcctaaatc

SEQ ID NO: 69976 - DNA, 17 bp, Arabidopsis thaliana
cattcagtccgttgttt

SEQ ID NO: 69977 - DNA, 17 bp, Arabidopsis thaliana
cattcagttcgagtaca

SEQ ID NO: 69978 - DNA, 17 bp, Arabidopsis thaliana
cattcagttgccgtaga

SEQ ID NO: 69979 - DNA, 17 bp, Arabidopsis thaliana
cattcagttggcaagct

SEQ ID NO: 69980 - DNA, 17 bp, Arabidopsis thaliana
cattcagtttgctgtca

SEQ ID NO: 69981 - DNA, 17 bp, Arabidopsis thaliana
cattcatatgcagatag

SEQ ID NO: 69982 - DNA, 17 bp, Arabidopsis thaliana
cattcatatggagagag

SEQ ID NO: 69983 - DNA, 17 bp, Arabidopsis thaliana
cattcatccgcactatt

SEQ ID NO: 69984 - DNA, 17 bp, Arabidopsis thaliana
cattcatcgctgcgaca

SEQ ID NO: 69985 - DNA, 17 bp, Arabidopsis thaliana
cattcatctcaaagtag

SEQ ID NO: 69986 - DNA, 17 bp, Arabidopsis thaliana
cattcatgtcatgggct

SEQ ID NO: 69987 - DNA, 17 bp, Arabidopsis thaliana
cattcatttggagagaa

SEQ ID NO: 69988 - DNA, 17 bp, Arabidopsis thaliana
cattccaaactcaggac

SEQ ID NO: 69989 - DNA, 17 bp, Arabidopsis thaliana
cattccaaactcggacc

SEQ ID NO: 69990 - DNA, 17 bp, Arabidopsis thaliana
cattccaaactcgggac

SEQ ID NO: 69991 - DNA, 17 bp, Arabidopsis thaliana
cattccatctgcgaatg

SEQ ID NO: 69992 - DNA, 17 bp, Arabidopsis thaliana
cattccattcgtcttct

SEQ ID NO: 69993 - DNA, 17 bp, Arabidopsis thaliana
cattccattggattctt

SEQ ID NO: 69994 - DNA, 17 bp, Arabidopsis thaliana
cattcccaacttggatg

SEQ ID NO: 69995 - DNA, 17 bp, Arabidopsis thaliana
cattcccaaggatctga

SEQ ID NO: 69996 - DNA, 17 bp, Arabidopsis thaliana
cattcccgcctgtcacg

SEQ ID NO: 69997 - DNA, 17 bp, Arabidopsis thaliana
cattcccttggatgttg

SEQ ID NO: 69998 - DNA, 17 bp, Arabidopsis thaliana
cattccgaatgattcag

SEQ ID NO: 69999 - DNA, 17 bp, Arabidopsis thaliana
cattccggagcagaccc

SEQ ID NO: 70000 - DNA, 17 bp, Arabidopsis thaliana
cattcctcaggattggc

SEQ ID NO: 70001 - DNA, 17 bp, Arabidopsis thaliana
cattcctcaggtttggc

SEQ ID NO: 70002 - DNA, 17 bp, Arabidopsis thaliana
cattccttagatttggc

SEQ ID NO: 70003 - DNA, 17 bp, Arabidopsis thaliana
cattccttctactgccg

SEQ ID NO: 70004 - DNA, 17 bp, Arabidopsis thaliana
cattccttctgctgatg

SEQ ID NO: 70005 - DNA, 17 bp, Arabidopsis thaliana
cattccttggtcgtggc

SEQ ID NO: 70006 - DNA, 17 bp, Arabidopsis thaliana
cattccttgtgctgatg

SEQ ID NO: 70007 - DNA, 17 bp, Arabidopsis thaliana
cattcctttttggtcgg

SEQ ID NO: 70008 - DNA, 17 bp, Arabidopsis thaliana
cattcgaaccggtgacc

SEQ ID NO: 70009 - DNA, 17 bp, Arabidopsis thaliana
cattcgacatctaagtt

SEQ ID NO: 70010 - DNA, 17 bp, Arabidopsis thaliana
cattcgaccaggggttt

SEQ ID NO: 70011 - DNA, 17 bp, Arabidopsis thaliana
cattcgacccgtcttga

SEQ ID NO: 70012 - DNA, 17 bp, Arabidopsis thaliana
cattcgacccgtcttgg

SEQ ID NO: 70013 - DNA, 17 bp, Arabidopsis thaliana
cattcgaccgctaacag

SEQ ID NO: 70014 - DNA, 17 bp, Arabidopsis thaliana
cattcgacttcccctga

SEQ ID NO: 70015 - DNA, 17 bp, Arabidopsis thaliana
cattcgagatccgacca

SEQ ID NO: 70016 - DNA, 17 bp, Arabidopsis thaliana
cattcgagggttcttct

SEQ ID NO: 70017 - DNA, 17 bp, Arabidopsis thaliana
cattcgccaaatgccgg

SEQ ID NO: 70018 - DNA, 17 bp, Arabidopsis thaliana
cattcgccgtcgtcgac

SEQ ID NO: 70019 - DNA, 17 bp, Arabidopsis thaliana
cattcgccgtgggtccc

SEQ ID NO: 70020 - DNA, 17 bp, Arabidopsis thaliana
cattcgctctgttgctg

SEQ ID NO: 70021 - DNA, 17 bp, Arabidopsis thaliana
cattcggaccctaagtt

SEQ ID NO: 70022 - DNA, 17 bp, Arabidopsis thaliana
cattcggatggactctc

SEQ ID NO: 70023 - DNA, 17 bp, Arabidopsis thaliana
cattcggccaaaaatgg

SEQ ID NO: 70024 - DNA, 17 bp, Arabidopsis thaliana
cattcggcttgtccctt

SEQ ID NO: 70025 - DNA, 17 bp, Arabidopsis thaliana
cattcgggatacctaga

SEQ ID NO: 70026 - DNA, 17 bp, Arabidopsis thaliana
cattcgggtaagcgggt

SEQ ID NO: 70027 - DNA, 17 bp, Arabidopsis thaliana
cattcgggtcatagggt

SEQ ID NO: 70028 - DNA, 17 bp, Arabidopsis thaliana
cattcggtcgcgggatc

SEQ ID NO: 70029 - DNA, 17 bp, Arabidopsis thaliana
cattcgtcaacttcgta

SEQ ID NO: 70030 - DNA, 17 bp, Arabidopsis thaliana
cattcgtcgccgtagtt

SEQ ID NO: 70031 - DNA, 17 bp, Arabidopsis thaliana
cattcgtggaatttaaa

SEQ ID NO: 70032 - DNA, 17 bp, Arabidopsis thaliana
cattcgtggtcagagtc

SEQ ID NO: 70033 - DNA, 17 bp, Arabidopsis thaliana
cattcgtgttgtcgatt

SEQ ID NO: 70034 - DNA, 17 bp, Arabidopsis thaliana
cattcgttctcctgagt

SEQ ID NO: 70035 - DNA, 17 bp, Arabidopsis thaliana
cattctaaactcgggat

SEQ ID NO: 70036 - DNA, 17 bp, Arabidopsis thaliana
cattctagttggaattg

SEQ ID NO: 70037 - DNA, 17 bp, Arabidopsis thaliana
cattctatatgagagtc

SEQ ID NO: 70038 - DNA, 17 bp, Arabidopsis thaliana
cattctcaaaggaggtg

SEQ ID NO: 70039 - DNA, 17 bp, Arabidopsis thaliana
cattctcacggaaaccg

SEQ ID NO: 70040 - DNA, 17 bp, Arabidopsis thaliana
cattctcagcaaagtgt

SEQ ID NO: 70041 - DNA, 17 bp, Arabidopsis thaliana
cattctcagctttttcc

SEQ ID NO: 70042 - DNA, 17 bp, Arabidopsis thaliana
cattctcagttggttca

SEQ ID NO: 70043 - DNA, 17 bp, Arabidopsis thaliana
cattctccagcggtgtg

SEQ ID NO: 70044 - DNA, 17 bp, Arabidopsis thaliana
cattctcccctgaacta

SEQ ID NO: 70045 - DNA, 17 bp, Arabidopsis thaliana
cattctcccctgaactt

SEQ ID NO: 70046 - DNA, 17 bp, Arabidopsis thaliana
cattctccttcttcgct

SEQ ID NO: 70047 - DNA, 17 bp, Arabidopsis thaliana
cattctcggtttgactc

SEQ ID NO: 70048 - DNA, 17 bp, Arabidopsis thaliana
cattctcgttactcaaa

SEQ ID NO: 70049 - DNA, 17 bp, Arabidopsis thaliana
cattctctgcgggaggc

SEQ ID NO: 70050 - DNA, 17 bp, Arabidopsis thaliana
cattctcttcggttcat

SEQ ID NO: 70051 - DNA, 17 bp, Arabidopsis thaliana
cattctctttaaggcaa

SEQ ID NO: 70052 - DNA, 17 bp, Arabidopsis thaliana
cattctctttaggaagc

SEQ ID NO: 70053 - DNA, 17 bp, Arabidopsis thaliana
cattctgatgggccgtt

SEQ ID NO: 70054 - DNA, 17 bp, Arabidopsis thaliana
cattctgctgcttgctc

SEQ ID NO: 70055 - DNA, 17 bp, Arabidopsis thaliana
cattctgcttcaagttc

SEQ ID NO: 70056 - DNA, 17 bp, Arabidopsis thaliana
cattctggaatgttgca

SEQ ID NO: 70057 - DNA, 17 bp, Arabidopsis thaliana
cattctgggatctgcct

SEQ ID NO: 70058 - DNA, 17 bp, Arabidopsis thaliana
cattctggggtaagtga

SEQ ID NO: 70059 - DNA, 17 bp, Arabidopsis thaliana
cattctggtcaacgctc

SEQ ID NO: 70060 - DNA, 17 bp, Arabidopsis thaliana
cattctggtgtcctagg

SEQ ID NO: 70061 - DNA, 17 bp, Arabidopsis thaliana
cattctggttaggcacg

SEQ ID NO: 70062 - DNA, 17 bp, Arabidopsis thaliana
cattctgtagtttcggc

SEQ ID NO: 70063 - DNA, 17 bp, Arabidopsis thaliana
cattctgtcagttgggc

SEQ ID NO: 70064 - DNA, 17 bp, Arabidopsis thaliana
cattctgtcttccggca

SEQ ID NO: 70065 - DNA, 17 bp, Arabidopsis thaliana
cattctgtgaatgtcga

SEQ ID NO: 70066 - DNA, 17 bp, Arabidopsis thaliana
cattctgtgaatttcga

SEQ ID NO: 70067 - DNA, 17 bp, Arabidopsis thaliana
cattcttacagattgga

SEQ ID NO: 70068 - DNA, 17 bp, Arabidopsis thaliana
cattcttataagatgtc

SEQ ID NO: 70069 - DNA, 17 bp, Arabidopsis thaliana
cattcttatgcacccat

SEQ ID NO: 70070 - DNA, 17 bp, Arabidopsis thaliana
cattcttctatgggcga

SEQ ID NO: 70071 - DNA, 17 bp, Arabidopsis thaliana
cattcttctcgtagtga

SEQ ID NO: 70072 - DNA, 17 bp, Arabidopsis thaliana
cattcttcttctccatg

SEQ ID NO: 70073 - DNA, 17 bp, Arabidopsis thaliana
cattcttctttctcgtt

SEQ ID NO: 70074 - DNA, 17 bp, Arabidopsis thaliana
cattcttggttcaagca

SEQ ID NO: 70075 - DNA, 17 bp, Arabidopsis thaliana
cattcttggttttgctg

SEQ ID NO: 70076 - DNA, 17 bp, Arabidopsis thaliana
cattctttagtgccttg

SEQ ID NO: 70077 - DNA, 17 bp, Arabidopsis thaliana
cattctttctctcgaat

SEQ ID NO: 70078 - DNA, 17 bp, Arabidopsis thaliana
cattcttttttggtcgg

SEQ ID NO: 70079 - DNA, 17 bp, Arabidopsis thaliana
cattgaaccaaggaggc

SEQ ID NO: 70080 - DNA, 17 bp, Arabidopsis thaliana
cattgaaccaccagaga

SEQ ID NO: 70081 - DNA, 17 bp, Arabidopsis thaliana
cattgaacgatctgtgt

SEQ ID NO: 70082 - DNA, 17 bp, Arabidopsis thaliana
cattgaagcgtcaattg

SEQ ID NO: 70083 - DNA, 17 bp, Arabidopsis thaliana
cattgaagctggttggc

SEQ ID NO: 70084 - DNA, 17 bp, Arabidopsis thaliana
cattgacaaaggttcca

SEQ ID NO: 70085 - DNA, 17 bp, Arabidopsis thaliana
cattgacacatcagctt

SEQ ID NO: 70086 - DNA, 17 bp, Arabidopsis thaliana
cattgacacgattgcct

SEQ ID NO: 70087 - DNA, 17 bp, Arabidopsis thaliana
cattgaccaaactaggc

SEQ ID NO: 70088 - DNA, 17 bp, Arabidopsis thaliana
cattgacctgaccttcg

SEQ ID NO: 70089 - DNA, 17 bp, Arabidopsis thaliana
cattgacctgaccttgg

SEQ ID NO: 70090 - DNA, 17 bp, Arabidopsis thaliana
cattgacctggtctacg

SEQ ID NO: 70091 - DNA, 17 bp, Arabidopsis thaliana
cattgacgagagaactt

SEQ ID NO: 70092 - DNA, 17 bp, Arabidopsis thaliana
cattgacgttttgtcga

SEQ ID NO: 70093 - DNA, 17 bp, Arabidopsis thaliana
cattgactccggacgtg

SEQ ID NO: 70094 - DNA, 17 bp, Arabidopsis thaliana
cattgactcgattgttg

SEQ ID NO: 70095 - DNA, 17 bp, Arabidopsis thaliana
cattgacttttgtcgac

SEQ ID NO: 70096 - DNA, 17 bp, Arabidopsis thaliana
cattgactttttgtcga

SEQ ID NO: 70097 - DNA, 17 bp, Arabidopsis thaliana
cattgagatcgattgtc

SEQ ID NO: 70098 - DNA, 17 bp, Arabidopsis thaliana
cattgagcctgagcgac

SEQ ID NO: 70099 - DNA, 17 bp, Arabidopsis thaliana
cattgagcgatttgtcg

SEQ ID NO: 70100 - DNA, 17 bp, Arabidopsis thaliana
cattgagcgtgcgaaaa

SEQ ID NO: 70101 - DNA, 17 bp, Arabidopsis thaliana
cattgatcaacgggttt

SEQ ID NO: 70102 - DNA, 17 bp, Arabidopsis thaliana
cattgatcagtgttgac

SEQ ID NO: 70103 - DNA, 17 bp, Arabidopsis thaliana
cattgatcatggtgtct

SEQ ID NO: 70104 - DNA, 17 bp, Arabidopsis thaliana
cattgatccagtggatt

SEQ ID NO: 70105 - DNA, 17 bp, Arabidopsis thaliana
cattgatccggctttag

SEQ ID NO: 70106 - DNA, 17 bp, Arabidopsis thaliana
cattgatctccttctac

SEQ ID NO: 70107 - DNA, 17 bp, Arabidopsis thaliana
cattgatctctgggtgc

SEQ ID NO: 70108 - DNA, 17 bp, Arabidopsis thaliana
cattgatgatgatcaca

SEQ ID NO: 70109 - DNA, 17 bp, Arabidopsis thaliana
cattgatgggtgttacg

SEQ ID NO: 70110 - DNA, 17 bp, Arabidopsis thaliana
cattgattacagagtga

SEQ ID NO: 70111 - DNA, 17 bp, Arabidopsis thaliana
cattgattatcgactgc

SEQ ID NO: 70112 - DNA, 17 bp, Arabidopsis thaliana
cattgcagggatgatgg

SEQ ID NO: 70113 - DNA, 17 bp, Arabidopsis thaliana
cattgcattggctacac

SEQ ID NO: 70114 - DNA, 17 bp, Arabidopsis thaliana
cattgccatctgattga

SEQ ID NO: 70115 - DNA, 17 bp, Arabidopsis thaliana
cattgccattttcttgc

SEQ ID NO: 70116 - DNA, 17 bp, Arabidopsis thaliana
cattgcccagactagtg

SEQ ID NO: 70117 - DNA, 17 bp, Arabidopsis thaliana
cattgccctgaagacgt

SEQ ID NO: 70118 - DNA, 17 bp, Arabidopsis thaliana
cattgccggtgcagatg

SEQ ID NO: 70119 - DNA, 17 bp, Arabidopsis thaliana
cattgcgatgaagcttt

SEQ ID NO: 70120 - DNA, 17 bp, Arabidopsis thaliana
cattgcgatggtccctg

SEQ ID NO: 70121 - DNA, 17 bp, Arabidopsis thaliana
cattgcgatggtccctt

SEQ ID NO: 70122 - DNA, 17 bp, Arabidopsis thaliana
cattgcgcacagtagcc

SEQ ID NO: 70123 - DNA, 17 bp, Arabidopsis thaliana
cattgcggatggagttg

SEQ ID NO: 70124 - DNA, 17 bp, Arabidopsis thaliana
cattgcggcggaggagc

SEQ ID NO: 70125 - DNA, 17 bp, Arabidopsis thaliana
cattgcgttgaggtctt

SEQ ID NO: 70126 - DNA, 17 bp, Arabidopsis thaliana
cattgcgtttaccattg

SEQ ID NO: 70127 - DNA, 17 bp, Arabidopsis thaliana
cattgctaaaccgtgga

SEQ ID NO: 70128 - DNA, 17 bp, Arabidopsis thaliana
cattgctagtagctgca

SEQ ID NO: 70129 - DNA, 17 bp, Arabidopsis thaliana
cattgctatgtcacgtt

SEQ ID NO: 70130 - DNA, 17 bp, Arabidopsis thaliana
cattgctcacagctcga

SEQ ID NO: 70131 - DNA, 17 bp, Arabidopsis thaliana
cattgctcagatcacga

SEQ ID NO: 70132 - DNA, 17 bp, Arabidopsis thaliana
cattgctcagatcacgg

SEQ ID NO: 70133 - DNA, 17 bp, Arabidopsis thaliana
cattgctcagttcacgg

SEQ ID NO: 70134 - DNA, 17 bp, Arabidopsis thaliana
cattgctgaatcttcta

SEQ ID NO: 70135 - DNA, 17 bp, Arabidopsis thaliana
cattgctgattctgggc

SEQ ID NO: 70136 - DNA, 17 bp, Arabidopsis thaliana
cattgctgccaaattac

SEQ ID NO: 70137 - DNA, 17 bp, Arabidopsis thaliana
cattgctgccaaattag

SEQ ID NO: 70138 - DNA, 17 bp, Arabidopsis thaliana
cattgctgccgcttcat

SEQ ID NO: 70139 - DNA, 17 bp, Arabidopsis thaliana
cattgctgctgctctaa

SEQ ID NO: 70140 - DNA, 17 bp, Arabidopsis thaliana
cattgctggatttggcg

SEQ ID NO: 70141 - DNA, 17 bp, Arabidopsis thaliana
cattgctggctctggtc

SEQ ID NO: 70142 - DNA, 17 bp, Arabidopsis thaliana
cattgctgtggacttgt

SEQ ID NO: 70143 - DNA, 17 bp, Arabidopsis thaliana
cattgctgttgcggccc

SEQ ID NO: 70144 - DNA, 17 bp, Arabidopsis thaliana
cattgcttcgtagatca

SEQ ID NO: 70145 - DNA, 17 bp, Arabidopsis thaliana
cattgcttctgctttgg

SEQ ID NO: 70146 - DNA, 17 bp, Arabidopsis thaliana
cattgcttgatcccgtt

SEQ ID NO: 70147 - DNA, 17 bp, Arabidopsis thaliana
cattggaatcttctggg

SEQ ID NO: 70148 - DNA, 17 bp, Arabidopsis thaliana
cattggaccaaaggtac

SEQ ID NO: 70149 - DNA, 17 bp, Arabidopsis thaliana
cattggactcacacatg

SEQ ID NO: 70150 - DNA, 17 bp, Arabidopsis thaliana
cattggagagatctctt

SEQ ID NO: 70151 - DNA, 17 bp, Arabidopsis thaliana
cattggagggcaagtct

SEQ ID NO: 70152 - DNA, 17 bp, Arabidopsis thaliana
cattggatcttttcact

SEQ ID NO: 70153 - DNA, 17 bp, Arabidopsis thaliana
cattggcaaggttagtt

SEQ ID NO: 70154 - DNA, 17 bp, Arabidopsis thaliana
cattggcactggaagca

SEQ ID NO: 70155 - DNA, 17 bp, Arabidopsis thaliana
cattggccacagttcac

SEQ ID NO: 70156 - DNA, 17 bp, Arabidopsis thaliana
cattggccatgagaaca

SEQ ID NO: 70157 - DNA, 17 bp, Arabidopsis thaliana
cattggccatgagaacc

SEQ ID NO: 70158 - DNA, 17 bp, Arabidopsis thaliana
cattggccgaaccgaca

SEQ ID NO: 70159 - DNA, 17 bp, Arabidopsis thaliana
cattggcctctattttc

SEQ ID NO: 70160 - DNA, 17 bp, Arabidopsis thaliana
cattggcctggttcact

SEQ ID NO: 70161 - DNA, 17 bp, Arabidopsis thaliana
cattggcgtttcttggc

SEQ ID NO: 70162 - DNA, 17 bp, Arabidopsis thaliana
cattggctcagctcacg

SEQ ID NO: 70163 - DNA, 17 bp, Arabidopsis thaliana
cattggctctgagggct

SEQ ID NO: 70164 - DNA, 17 bp, Arabidopsis thaliana
cattggcttggacaggt

SEQ ID NO: 70165 - DNA, 17 bp, Arabidopsis thaliana
cattgggacaaaacttg

SEQ ID NO: 70166 - DNA, 17 bp, Arabidopsis thaliana
cattgggagataaaaac

SEQ ID NO: 70167 - DNA, 17 bp, Arabidopsis thaliana
cattgggatgggtcggc

SEQ ID NO: 70168 - DNA, 17 bp, Arabidopsis thaliana
cattgggccaagactgg

SEQ ID NO: 70169 - DNA, 17 bp, Arabidopsis thaliana
cattgggttcaagtatg

SEQ ID NO: 70170 - DNA, 17 bp, Arabidopsis thaliana
cattgggttgcttttaa

SEQ ID NO: 70171 - DNA, 17 bp, Arabidopsis thaliana
cattggtatttggtcgc

SEQ ID NO: 70172 - DNA, 17 bp, Arabidopsis thaliana
cattggtcatgtccact

SEQ ID NO: 70173 - DNA, 17 bp, Arabidopsis thaliana
cattggtcggcttgtcc

SEQ ID NO: 70174 - DNA, 17 bp, Arabidopsis thaliana
cattggtgaccgatcat

SEQ ID NO: 70175 - DNA, 17 bp, Arabidopsis thaliana
cattggtgccaatccat

SEQ ID NO: 70176 - DNA, 17 bp, Arabidopsis thaliana
cattggtggttgtctgt

SEQ ID NO: 70177 - DNA, 17 bp, Arabidopsis thaliana
cattggttcttgctggg

SEQ ID NO: 70178 - DNA, 17 bp, Arabidopsis thaliana
cattggttggtgatagg

SEQ ID NO: 70179 - DNA, 17 bp, Arabidopsis thaliana
cattggttgtgatagtg

SEQ ID NO: 70180 - DNA, 17 bp, Arabidopsis thaliana
cattggttgtggttttg

SEQ ID NO: 70181 - DNA, 17 bp, Arabidopsis thaliana
cattggttttcggaccg

SEQ ID NO: 70182 - DNA, 17 bp, Arabidopsis thaliana
cattgtaatacaaggag

SEQ ID NO: 70183 - DNA, 17 bp, Arabidopsis thaliana
cattgtacatccgaacg

SEQ ID NO: 70184 - DNA, 17 bp, Arabidopsis thaliana
cattgtactcggcctgt

SEQ ID NO: 70185 - DNA, 17 bp, Arabidopsis thaliana
cattgtacttacaccag

SEQ ID NO: 70186 - DNA, 17 bp, Arabidopsis thaliana
cattgtagacgccgtta

SEQ ID NO: 70187 - DNA, 17 bp, Arabidopsis thaliana
cattgtagagtactcgc

SEQ ID NO: 70188 - DNA, 17 bp, Arabidopsis thaliana
cattgtagagtacttgg

SEQ ID NO: 70189 - DNA, 17 bp, Arabidopsis thaliana
cattgtatccgactata

SEQ ID NO: 70190 - DNA, 17 bp, Arabidopsis thaliana
cattgtatgggctggcc

SEQ ID NO: 70191 - DNA, 17 bp, Arabidopsis thaliana
cattgtcaaaaccaaca

SEQ ID NO: 70192 - DNA, 17 bp, Arabidopsis thaliana
cattgtcacaagctctt

SEQ ID NO: 70193 - DNA, 17 bp, Arabidopsis thaliana
cattgtcacagagtctc

SEQ ID NO: 70194 - DNA, 17 bp, Arabidopsis thaliana
cattgtcaccccggtct

SEQ ID NO: 70195 - DNA, 17 bp, Arabidopsis thaliana
cattgtcactggagcca

SEQ ID NO: 70196 - DNA, 17 bp, Arabidopsis thaliana
cattgtcagagacttca

SEQ ID NO: 70197 - DNA, 17 bp, Arabidopsis thaliana
cattgtcaggtggggag

SEQ ID NO: 70198 - DNA, 17 bp, Arabidopsis thaliana
cattgtccagcgatgtt

SEQ ID NO: 70199 - DNA, 17 bp, Arabidopsis thaliana
cattgtccatacggtca

SEQ ID NO: 70200 - DNA, 17 bp, Arabidopsis thaliana
cattgtccatatggccc

SEQ ID NO: 70201 - DNA, 17 bp, Arabidopsis thaliana
cattgtccatatggtca

SEQ ID NO: 70202 - DNA, 17 bp, Arabidopsis thaliana
cattgtccatatggtta

SEQ ID NO: 70203 - DNA, 17 bp, Arabidopsis thaliana
cattgtccatatggttt

SEQ ID NO: 70204 - DNA, 17 bp, Arabidopsis thaliana
cattgtccattgacgag

SEQ ID NO: 70205 - DNA, 17 bp, Arabidopsis thaliana
cattgtcctgctcgagg

SEQ ID NO: 70206 - DNA, 17 bp, Arabidopsis thaliana
cattgtcgacttgatgg

SEQ ID NO: 70207 - DNA, 17 bp, Arabidopsis thaliana
cattgtcgccgtcgtca

SEQ ID NO: 70208 - DNA, 17 bp, Arabidopsis thaliana
cattgtcgtagctctgg

SEQ ID NO: 70209 - DNA, 17 bp, Arabidopsis thaliana
cattgtcgtccttgaac

SEQ ID NO: 70210 - DNA, 17 bp, Arabidopsis thaliana
cattgtctcagcgacag

SEQ ID NO: 70211 - DNA, 17 bp, Arabidopsis thaliana
cattgtctctcagctgc

SEQ ID NO: 70212 - DNA, 17 bp, Arabidopsis thaliana
cattgtctttaggaagt

SEQ ID NO: 70213 - DNA, 17 bp, Arabidopsis thaliana
cattgtctttgcgatct

SEQ ID NO: 70214 - DNA, 17 bp, Arabidopsis thaliana
cattgtgaagcagaatt

SEQ ID NO: 70215 - DNA, 17 bp, Arabidopsis thaliana
cattgtgagacttttct

SEQ ID NO: 70216 - DNA, 17 bp, Arabidopsis thaliana
cattgtgcattggtcgg

SEQ ID NO: 70217 - DNA, 17 bp, Arabidopsis thaliana
cattgtggactgcgcct

SEQ ID NO: 70218 - DNA, 17 bp, Arabidopsis thaliana
cattgtggtttcaatgt

SEQ ID NO: 70219 - DNA, 17 bp, Arabidopsis thaliana
cattgtgtatcttctag

SEQ ID NO: 70220 - DNA, 17 bp, Arabidopsis thaliana
cattgtgtcgcccaatg

SEQ ID NO: 70221 - DNA, 17 bp, Arabidopsis thaliana
cattgtgtcgtactatg

SEQ ID NO: 70222 - DNA, 17 bp, Arabidopsis thaliana
cattgtgtctttctaac

SEQ ID NO: 70223 - DNA, 17 bp, Arabidopsis thaliana
cattgtgttctcctcat

SEQ ID NO: 70224 - DNA, 17 bp, Arabidopsis thaliana
cattgttactaagtaag

SEQ ID NO: 70225 - DNA, 17 bp, Arabidopsis thaliana
cattgttccaaccaggg

SEQ ID NO: 70226 - DNA, 17 bp, Arabidopsis thaliana
cattgttccttggctgc

SEQ ID NO: 70227 - DNA, 17 bp, Arabidopsis thaliana
cattgttcgtttatcta

SEQ ID NO: 70228 - DNA, 17 bp, Arabidopsis thaliana
cattgttcgtttatctg

SEQ ID NO: 70229 - DNA, 17 bp, Arabidopsis thaliana
cattgttcttcaggcta

SEQ ID NO: 70230 - DNA, 17 bp, Arabidopsis thaliana
cattgttgaataagagc

SEQ ID NO: 70231 - DNA, 17 bp, Arabidopsis thaliana
cattgttggcgatgtgt

SEQ ID NO: 70232 - DNA, 17 bp, Arabidopsis thaliana
cattgttggtgacctcg

SEQ ID NO: 70233 - DNA, 17 bp, Arabidopsis thaliana
cattgtttctgcagagg

SEQ ID NO: 70234 - DNA, 17 bp, Arabidopsis thaliana
cattgtttgtcaggtgg

SEQ ID NO: 70235 - DNA, 17 bp, Arabidopsis thaliana
cattgttttgcctctcc

SEQ ID NO: 70236 - DNA, 17 bp, Arabidopsis thaliana
cattgttttgcctctgc

SEQ ID NO: 70237 - DNA, 17 bp, Arabidopsis thaliana
catttacacgagctatg

SEQ ID NO: 70238 - DNA, 17 bp, Arabidopsis thaliana
catttacagaccggatc

SEQ ID NO: 70239 - DNA, 17 bp, Arabidopsis thaliana
catttacatcatgtgga

SEQ ID NO: 70240 - DNA, 17 bp, Arabidopsis thaliana
catttaccatcgcagag

SEQ ID NO: 70241 - DNA, 17 bp, Arabidopsis thaliana
catttaccgttggaaca

SEQ ID NO: 70242 - DNA, 17 bp, Arabidopsis thaliana
catttacggccggttag

SEQ ID NO: 70243 - DNA, 17 bp, Arabidopsis thaliana
catttagctggggggtg

SEQ ID NO: 70244 - DNA, 17 bp, Arabidopsis thaliana
catttagttcacgtgac

SEQ ID NO: 70245 - DNA, 17 bp, Arabidopsis thaliana
catttcaaagcttacca

SEQ ID NO: 70246 - DNA, 17 bp, Arabidopsis thaliana
catttcaacaatctttg

SEQ ID NO: 70247 - DNA, 17 bp, Arabidopsis thaliana
catttcaatggtgtcgt

SEQ ID NO: 70248 - DNA, 17 bp, Arabidopsis thaliana
catttcaatgtctgttg

SEQ ID NO: 70249 - DNA, 17 bp, Arabidopsis thaliana
catttcaatttgttcct

SEQ ID NO: 70250 - DNA, 17 bp, Arabidopsis thaliana
catttcaccaatggctg

SEQ ID NO: 70251 - DNA, 17 bp, Arabidopsis thaliana
catttcactgttgcatt

SEQ ID NO: 70252 - DNA, 17 bp, Arabidopsis thaliana
catttcagattctttgg

SEQ ID NO: 70253 - DNA, 17 bp, Arabidopsis thaliana
catttcagtttgggagg

SEQ ID NO: 70254 - DNA, 17 bp, Arabidopsis thaliana
catttccatcgctctag

SEQ ID NO: 70255 - DNA, 17 bp, Arabidopsis thaliana
catttccattagtagtc

SEQ ID NO: 70256 - DNA, 17 bp, Arabidopsis thaliana
catttcccggctggtgc

SEQ ID NO: 70257 - DNA, 17 bp, Arabidopsis thaliana
catttccgcctattgga

SEQ ID NO: 70258 - DNA, 17 bp, Arabidopsis thaliana
catttccgcgacgtagg

SEQ ID NO: 70259 - DNA, 17 bp, Arabidopsis thaliana
catttccggacaacgct

SEQ ID NO: 70260 - DNA, 17 bp, Arabidopsis thaliana
catttccggcccattct

SEQ ID NO: 70261 - DNA, 17 bp, Arabidopsis thaliana
catttccgtggttaggc

SEQ ID NO: 70262 - DNA, 17 bp, Arabidopsis thaliana
catttcctgactggtcg

SEQ ID NO: 70263 - DNA, 17 bp, Arabidopsis thaliana
catttcctggtcttcta

SEQ ID NO: 70264 - DNA, 17 bp, Arabidopsis thaliana
catttccttgatgtggg

SEQ ID NO: 70265 - DNA, 17 bp, Arabidopsis thaliana
catttcgagaatcgatt

SEQ ID NO: 70266 - DNA, 17 bp, Arabidopsis thaliana
catttcgagtcccctac

SEQ ID NO: 70267 - DNA, 17 bp, Arabidopsis thaliana
catttcggggaaatcta

SEQ ID NO: 70268 - DNA, 17 bp, Arabidopsis thaliana
catttcgggtgctgacg

SEQ ID NO: 70269 - DNA, 17 bp, Arabidopsis thaliana
catttctaagttgagcc

SEQ ID NO: 70270 - DNA, 17 bp, Arabidopsis thaliana
catttctaggacccttg

SEQ ID NO: 70271 - DNA, 17 bp, Arabidopsis thaliana
catttctcagaggcggg

SEQ ID NO: 70272 - DNA, 17 bp, Arabidopsis thaliana
catttctcatcgtggtg

SEQ ID NO: 70273 - DNA, 17 bp, Arabidopsis thaliana
catttctcatgtcctcg

SEQ ID NO: 70274 - DNA, 17 bp, Arabidopsis thaliana
catttctccgaatgccc

SEQ ID NO: 70275 - DNA, 17 bp, Arabidopsis thaliana
catttctcggaacgccc

SEQ ID NO: 70276 - DNA, 17 bp, Arabidopsis thaliana
catttctcggaatgccc

SEQ ID NO: 70277 - DNA, 17 bp, Arabidopsis thaliana
catttctcggaatgctt

SEQ ID NO: 70278 - DNA, 17 bp, Arabidopsis thaliana
catttctcgtcggagtt

SEQ ID NO: 70279 - DNA, 17 bp, Arabidopsis thaliana
catttctctacgctatg

SEQ ID NO: 70280 - DNA, 17 bp, Arabidopsis thaliana
catttctctgttgagca

SEQ ID NO: 70281 - DNA, 17 bp, Arabidopsis thaliana
catttctgcgagtttgt

SEQ ID NO: 70282 - DNA, 17 bp, Arabidopsis thaliana
catttctgtccgtcatg

SEQ ID NO: 70283 - DNA, 17 bp, Arabidopsis thaliana
catttctgtgatggatt

SEQ ID NO: 70284 - DNA, 17 bp, Arabidopsis thaliana
catttcttcagatggct

SEQ ID NO: 70285 - DNA, 17 bp, Arabidopsis thaliana
catttcttcagatggtt

SEQ ID NO: 70286 - DNA, 17 bp, Arabidopsis thaliana
catttcttttgggtctc

SEQ ID NO: 70287 - DNA, 17 bp, Arabidopsis thaliana
catttgaatgaaccgtt

SEQ ID NO: 70288 - DNA, 17 bp, Arabidopsis thaliana
catttgacactccatga

SEQ ID NO: 70289 - DNA, 17 bp, Arabidopsis thaliana
catttgacagatccatc

SEQ ID NO: 70290 - DNA, 17 bp, Arabidopsis thaliana
catttgacagctctaga

SEQ ID NO: 70291 - DNA, 17 bp, Arabidopsis thaliana
catttgaccactgtaca

SEQ ID NO: 70292 - DNA, 17 bp, Arabidopsis thaliana
catttgactggaccatc

SEQ ID NO: 70293 - DNA, 17 bp, Arabidopsis thaliana
catttgactggatcatc

SEQ ID NO: 70294 - DNA, 17 bp, Arabidopsis thaliana
catttgagccaagtatc

SEQ ID NO: 70295 - DNA, 17 bp, Arabidopsis thaliana
catttgaggctattcca

SEQ ID NO: 70296 - DNA, 17 bp, Arabidopsis thaliana
catttgcactagcgtcc

SEQ ID NO: 70297 - DNA, 17 bp, Arabidopsis thaliana
catttgcataagatctc

SEQ ID NO: 70298 - DNA, 17 bp, Arabidopsis thaliana
catttgcatttgtgatc

SEQ ID NO: 70299 - DNA, 17 bp, Arabidopsis thaliana
catttgccaaggacgtt

SEQ ID NO: 70300 - DNA, 17 bp, Arabidopsis thaliana
catttgccaaggaggtt

SEQ ID NO: 70301 - DNA, 17 bp, Arabidopsis thaliana
catttgccaaggatgct

SEQ ID NO: 70302 - DNA, 17 bp, Arabidopsis thaliana
catttgccaaggatgtt

SEQ ID NO: 70303 - DNA, 17 bp, Arabidopsis thaliana
catttgccatgtcgagt

SEQ ID NO: 70304 - DNA, 17 bp, Arabidopsis thaliana
catttgccctactctgc

SEQ ID NO: 70305 - DNA, 17 bp, Arabidopsis thaliana
catttgcgcagatgtga

SEQ ID NO: 70306 - DNA, 17 bp, Arabidopsis thaliana
catttgcgctactgcaa

SEQ ID NO: 70307 - DNA, 17 bp, Arabidopsis thaliana
catttgcgttaagactc

SEQ ID NO: 70308 - DNA, 17 bp, Arabidopsis thaliana
catttgcgttactgcaa

SEQ ID NO: 70309 - DNA, 17 bp, Arabidopsis thaliana
catttgctcgttgctca

SEQ ID NO: 70310 - DNA, 17 bp, Arabidopsis thaliana
catttgctgaccgcctg

SEQ ID NO: 70311 - DNA, 17 bp, Arabidopsis thaliana
catttgctgtccttcta

SEQ ID NO: 70312 - DNA, 17 bp, Arabidopsis thaliana
catttgctgtgctcacg

SEQ ID NO: 70313 - DNA, 17 bp, Arabidopsis thaliana
catttgctgtgctcagg

SEQ ID NO: 70314 - DNA, 17 bp, Arabidopsis thaliana
catttggaccaaagttg

SEQ ID NO: 70315 - DNA, 17 bp, Arabidopsis thaliana
catttggacccttgatc

SEQ ID NO: 70316 - DNA, 17 bp, Arabidopsis thaliana
catttggactgggcaag

SEQ ID NO: 70317 - DNA, 17 bp, Arabidopsis thaliana
catttggatgaacaaac

SEQ ID NO: 70318 - DNA, 17 bp, Arabidopsis thaliana
catttggatgattcact

SEQ ID NO: 70319 - DNA, 17 bp, Arabidopsis thaliana
catttggcactctactt

SEQ ID NO: 70320 - DNA, 17 bp, Arabidopsis thaliana
catttggccaacaattt

SEQ ID NO: 70321 - DNA, 17 bp, Arabidopsis thaliana
catttggctaagggtaa

SEQ ID NO: 70322 - DNA, 17 bp, Arabidopsis thaliana
catttggctctcaaatc

SEQ ID NO: 70323 - DNA, 17 bp, Arabidopsis thaliana
catttggctttatcagt

SEQ ID NO: 70324 - DNA, 17 bp, Arabidopsis thaliana
catttggtccgtccatc

SEQ ID NO: 70325 - DNA, 17 bp, Arabidopsis thaliana
catttggtctagtggta

SEQ ID NO: 70326 - DNA, 17 bp, Arabidopsis thaliana
catttggtgatgtggta

SEQ ID NO: 70327 - DNA, 17 bp, Arabidopsis thaliana
catttggtggtgttccc

SEQ ID NO: 70328 - DNA, 17 bp, Arabidopsis thaliana
catttggttcacaatgc

SEQ ID NO: 70329 - DNA, 17 bp, Arabidopsis thaliana
catttgtaaaagaccgg

SEQ ID NO: 70330 - DNA, 17 bp, Arabidopsis thaliana
catttgtcacgcattag

SEQ ID NO: 70331 - DNA, 17 bp, Arabidopsis thaliana
catttgtcatctgatac

SEQ ID NO: 70332 - DNA, 17 bp, Arabidopsis thaliana
catttgtcccacacttc

SEQ ID NO: 70333 - DNA, 17 bp, Arabidopsis thaliana
catttgtcccacacttt

SEQ ID NO: 70334 - DNA, 17 bp, Arabidopsis thaliana
catttgtcttcctcagc

SEQ ID NO: 70335 - DNA, 17 bp, Arabidopsis thaliana
catttgtcttgatggtg

SEQ ID NO: 70336 - DNA, 17 bp, Arabidopsis thaliana
catttgtgatcgtggtg

SEQ ID NO: 70337 - DNA, 17 bp, Arabidopsis thaliana
catttgtgtgaaacgac

SEQ ID NO: 70338 - DNA, 17 bp, Arabidopsis thaliana
catttgttcactaactt

SEQ ID NO: 70339 - DNA, 17 bp, Arabidopsis thaliana
catttgttggtgatagg

SEQ ID NO: 70340 - DNA, 17 bp, Arabidopsis thaliana
catttgtttctcggcag

SEQ ID NO: 70341 - DNA, 17 bp, Arabidopsis thaliana
catttgtttggaaagtc

SEQ ID NO: 70342 - DNA, 17 bp, Arabidopsis thaliana
cattttaccttggaccg

SEQ ID NO: 70343 - DNA, 17 bp, Arabidopsis thaliana
cattttataatctgagt

SEQ ID NO: 70344 - DNA, 17 bp, Arabidopsis thaliana
cattttatctgcagttg

SEQ ID NO: 70345 - DNA, 17 bp, Arabidopsis thaliana
cattttcaatggattgg

SEQ ID NO: 70346 - DNA, 17 bp, Arabidopsis thaliana
cattttcagacaggtgg

SEQ ID NO: 70347 - DNA, 17 bp, Arabidopsis thaliana
cattttcagacatctgg

SEQ ID NO: 70348 - DNA, 17 bp, Arabidopsis thaliana
cattttcagacatgtgg

SEQ ID NO: 70349 - DNA, 17 bp, Arabidopsis thaliana
cattttcaggaatgaag

SEQ ID NO: 70350 - DNA, 17 bp, Arabidopsis thaliana
cattttcagtcaaccgc

SEQ ID NO: 70351 - DNA, 17 bp, Arabidopsis thaliana
cattttcattgggctca

SEQ ID NO: 70352 - DNA, 17 bp, Arabidopsis thaliana
cattttcattggtgacc

SEQ ID NO: 70353 - DNA, 17 bp, Arabidopsis thaliana
cattttcctatccgatt

SEQ ID NO: 70354 - DNA, 17 bp, Arabidopsis thaliana
cattttcgacggcatta

SEQ ID NO: 70355 - DNA, 17 bp, Arabidopsis thaliana
cattttcgcagtttcac

SEQ ID NO: 70356 - DNA, 17 bp, Arabidopsis thaliana
cattttcgcgattagcg

SEQ ID NO: 70357 - DNA, 17 bp, Arabidopsis thaliana
cattttcggtggcattc

SEQ ID NO: 70358 - DNA, 17 bp, Arabidopsis thaliana
cattttcgtgatttggg

SEQ ID NO: 70359 - DNA, 17 bp, Arabidopsis thaliana
cattttcgtgtgcaggc

SEQ ID NO: 70360 - DNA, 17 bp, Arabidopsis thaliana
cattttcgttttaggtt

SEQ ID NO: 70361 - DNA, 17 bp, Arabidopsis thaliana
cattttctagatccgcc

SEQ ID NO: 70362 - DNA, 17 bp, Arabidopsis thaliana
cattttctccagcatgg

SEQ ID NO: 70363 - DNA, 17 bp, Arabidopsis thaliana
cattttctctggcgata

SEQ ID NO: 70364 - DNA, 17 bp, Arabidopsis thaliana
cattttcttaaggtgcc

SEQ ID NO: 70365 - DNA, 17 bp, Arabidopsis thaliana
cattttcttacgatgtc

SEQ ID NO: 70366 - DNA, 17 bp, Arabidopsis thaliana
cattttcttgtgtgatg

SEQ ID NO: 70367 - DNA, 17 bp, Arabidopsis thaliana
cattttgaaaccatgag

SEQ ID NO: 70368 - DNA, 17 bp, Arabidopsis thaliana
cattttgacaaacctct

SEQ ID NO: 70369 - DNA, 17 bp, Arabidopsis thaliana
cattttgacaaacggtg

SEQ ID NO: 70370 - DNA, 17 bp, Arabidopsis thaliana
cattttgactagaatcg

SEQ ID NO: 70371 - DNA, 17 bp, Arabidopsis thaliana
cattttgagtaggtctg

SEQ ID NO: 70372 - DNA, 17 bp, Arabidopsis thaliana
cattttgctgcacctgc

SEQ ID NO: 70373 - DNA, 17 bp, Arabidopsis thaliana
cattttgctgcacgtgg

SEQ ID NO: 70374 - DNA, 17 bp, Arabidopsis thaliana
cattttggagtaagcga

SEQ ID NO: 70375 - DNA, 17 bp, Arabidopsis thaliana
cattttggcagccattt

SEQ ID NO: 70376 - DNA, 17 bp, Arabidopsis thaliana
cattttgggattttggc

SEQ ID NO: 70377 - DNA, 17 bp, Arabidopsis thaliana
cattttggttatatcgg

SEQ ID NO: 70378 - DNA, 17 bp, Arabidopsis thaliana
cattttgtccgtcggtt

SEQ ID NO: 70379 - DNA, 17 bp, Arabidopsis thaliana
cattttgtctacgtcgc

SEQ ID NO: 70380 - DNA, 17 bp, Arabidopsis thaliana
cattttgtgcctcgtca

SEQ ID NO: 70381 - DNA, 17 bp, Arabidopsis thaliana
cattttgttatttggat

SEQ ID NO: 70382 - DNA, 17 bp, Arabidopsis thaliana
cattttgttgaccggtg

SEQ ID NO: 70383 - DNA, 17 bp, Arabidopsis thaliana
catttttacccaatctg

SEQ ID NO: 70384 - DNA, 17 bp, Arabidopsis thaliana
catttttcctcgaaggt

SEQ ID NO: 70385 - DNA, 17 bp, Arabidopsis thaliana
catttttcgtttcggga

SEQ ID NO: 70386 - DNA, 17 bp, Arabidopsis thaliana
catttttggacagtgaa

SEQ ID NO: 70387 - DNA, 17 bp, Arabidopsis thaliana
catttttggtggttcag

SEQ ID NO: 70388 - DNA, 17 bp, Arabidopsis thaliana
catttttgtgcgttctg

SEQ ID NO: 70389 - DNA, 17 bp, Arabidopsis thaliana
cattttttgaaagttgg

SEQ ID NO: 70390 - DNA, 17 bp, Arabidopsis thaliana
cattttttgaacatgtc

SEQ ID NO: 70391 - DNA, 17 bp, Arabidopsis thaliana
cattttttgttacgctc

SEQ ID NO: 70392 - DNA, 17 bp, Arabidopsis thaliana
catttttttcttccagc

SEQ ID NO: 70393 - DNA, 17 bp, Arabidopsis thaliana
cattttttttggtgcct

SEQ ID NO: 70394 - DNA, 17 bp, Arabidopsis thaliana
ccaaaaaattctacacg

SEQ ID NO: 70395 - DNA, 17 bp, Arabidopsis thaliana
ccaaaaacagagctctc

SEQ ID NO: 70396 - DNA, 17 bp, Arabidopsis thaliana
ccaaaaatttgaccggc

SEQ ID NO: 70397 - DNA, 17 bp, Arabidopsis thaliana
ccaaaaccgcaccgcaa

SEQ ID NO: 70398 - DNA, 17 bp, Arabidopsis thaliana
ccaaaacctgccgattg

SEQ ID NO: 70399 - DNA, 17 bp, Arabidopsis thaliana
ccaaaacgttgatccat

SEQ ID NO: 70400 - DNA, 17 bp, Arabidopsis thaliana
ccaaaactcagtttccg

SEQ ID NO: 70401 - DNA, 17 bp, Arabidopsis thaliana
ccaaaactcatggtcgt

SEQ ID NO: 70402 - DNA, 17 bp, Arabidopsis thaliana
ccaaaactgaccggatc

SEQ ID NO: 70403 - DNA, 17 bp, Arabidopsis thaliana
ccaaaactgtagacatc

SEQ ID NO: 70404 - DNA, 17 bp, Arabidopsis thaliana
ccaaaactttgcgaatt

SEQ ID NO: 70405 - DNA, 17 bp, Arabidopsis thaliana
ccaaaagactgtgctag

SEQ ID NO: 70406 - DNA, 17 bp, Arabidopsis thaliana
ccaaaaggacgatgaat

SEQ ID NO: 70407 - DNA, 17 bp, Arabidopsis thaliana
ccaaaaggatttcgacg

SEQ ID NO: 70408 - DNA, 17 bp, Arabidopsis thaliana
ccaaaaggatttttctt

SEQ ID NO: 70409 - DNA, 17 bp, Arabidopsis thaliana
ccaaaaggttaggattg

SEQ ID NO: 70410 - DNA, 17 bp, Arabidopsis thaliana
ccaaaagttcactgggg

SEQ ID NO: 70411 - DNA, 17 bp, Arabidopsis thaliana
ccaaaatccgtaattct

SEQ ID NO: 70412 - DNA, 17 bp, Arabidopsis thaliana
ccaaaatcgaagacgtg

SEQ ID NO: 70413 - DNA, 17 bp, Arabidopsis thaliana
ccaaaatctacatgacg

SEQ ID NO: 70414 - DNA, 17 bp, Arabidopsis thaliana
ccaaaatctgccaggta

SEQ ID NO: 70415 - DNA, 17 bp, Arabidopsis thaliana
ccaaaatggccaagtca

SEQ ID NO: 70416 - DNA, 17 bp, Arabidopsis thaliana
ccaaaatgtcacttgtg

SEQ ID NO: 70417 - DNA, 17 bp, Arabidopsis thaliana
ccaaaatgtggatgtcg

SEQ ID NO: 70418 - DNA, 17 bp, Arabidopsis thaliana
ccaaaatgttcccttat

SEQ ID NO: 70419 - DNA, 17 bp, Arabidopsis thaliana
ccaaaatttcatcaaca

SEQ ID NO: 70420 - DNA, 17 bp, Arabidopsis thaliana
ccaaacaacaagggtcg

SEQ ID NO: 70421 - DNA, 17 bp, Arabidopsis thaliana
ccaaacaatgcgttgcg

SEQ ID NO: 70422 - DNA, 17 bp, Arabidopsis thaliana
ccaaacatgctcaagga

SEQ ID NO: 70423 - DNA, 17 bp, Arabidopsis thaliana
ccaaacccctcccgcca

SEQ ID NO: 70424 - DNA, 17 bp, Arabidopsis thaliana
ccaaacccgtaccgcca

SEQ ID NO: 70425 - DNA, 17 bp, Arabidopsis thaliana
ccaaacccgtcccgcca

SEQ ID NO: 70426 - DNA, 17 bp, Arabidopsis thaliana
ccaaaccctaacgattc

SEQ ID NO: 70427 - DNA, 17 bp, Arabidopsis thaliana
ccaaacctgtcgagctg

SEQ ID NO: 70428 - DNA, 17 bp, Arabidopsis thaliana
ccaaacgcagccagtaa

SEQ ID NO: 70429 - DNA, 17 bp, Arabidopsis thaliana
ccaaacgccaatatgga

SEQ ID NO: 70430 - DNA, 17 bp, Arabidopsis thaliana
ccaaacggattgcgggt

SEQ ID NO: 70431 - DNA, 17 bp, Arabidopsis thaliana
ccaaacggcctaggaga

SEQ ID NO: 70432 - DNA, 17 bp, Arabidopsis thaliana
ccaaacgtcaaaccggt

SEQ ID NO: 70433 - DNA, 17 bp, Arabidopsis thaliana
ccaaacgtgattgggtt

SEQ ID NO: 70434 - DNA, 17 bp, Arabidopsis thaliana
ccaaactaagtgcatga

SEQ ID NO: 70435 - DNA, 17 bp, Arabidopsis thaliana
ccaaactaggcatgacc

SEQ ID NO: 70436 - DNA, 17 bp, Arabidopsis thaliana
ccaaactcggaccaggc

SEQ ID NO: 70437 - DNA, 17 bp, Arabidopsis thaliana
ccaaactcgggacagac

SEQ ID NO: 70438 - DNA, 17 bp, Arabidopsis thaliana
ccaaactcgtcttacca

SEQ ID NO: 70439 - DNA, 17 bp, Arabidopsis thaliana
ccaaactctgaccacgt

SEQ ID NO: 70440 - DNA, 17 bp, Arabidopsis thaliana
ccaaactcttgtttgta

SEQ ID NO: 70441 - DNA, 17 bp, Arabidopsis thaliana
ccaaactgaatgcttgc

SEQ ID NO: 70442 - DNA, 17 bp, Arabidopsis thaliana
ccaaactgctctacccc

SEQ ID NO: 70443 - DNA, 17 bp, Arabidopsis thaliana
ccaaactgtcaaaccct

SEQ ID NO: 70444 - DNA, 17 bp, Arabidopsis thaliana
ccaaacttaacctcggt

SEQ ID NO: 70445 - DNA, 17 bp, Arabidopsis thaliana
ccaaacttccttgtggc

SEQ ID NO: 70446 - DNA, 17 bp, Arabidopsis thaliana
ccaaacttgccatgtga

SEQ ID NO: 70447 - DNA, 17 bp, Arabidopsis thaliana
ccaaacttggcatgcga

SEQ ID NO: 70448 - DNA, 17 bp, Arabidopsis thaliana
ccaaacttggcatgtaa

SEQ ID NO: 70449 - DNA, 17 bp, Arabidopsis thaliana
ccaaacttggcatgtga

SEQ ID NO: 70450 - DNA, 17 bp, Arabidopsis thaliana
ccaaacttggcctgtga

SEQ ID NO: 70451 - DNA, 17 bp, Arabidopsis thaliana
ccaaacttgtcatgtga

SEQ ID NO: 70452 - DNA, 17 bp, Arabidopsis thaliana
ccaaagaaatatccagg

SEQ ID NO: 70453 - DNA, 17 bp, Arabidopsis thaliana
ccaaagaatttttgatg

SEQ ID NO: 70454 - DNA, 17 bp, Arabidopsis thaliana
ccaaagacatctgatgg

SEQ ID NO: 70455 - DNA, 17 bp, Arabidopsis thaliana
ccaaagacgaatgctcc

SEQ ID NO: 70456 - DNA, 17 bp, Arabidopsis thaliana
ccaaagatccctatggt

SEQ ID NO: 70457 - DNA, 17 bp, Arabidopsis thaliana
ccaaagattacgggctt

SEQ ID NO: 70458 - DNA, 17 bp, Arabidopsis thaliana
ccaaagcaccatgaggt

SEQ ID NO: 70459 - DNA, 17 bp, Arabidopsis thaliana
ccaaagcagaaggacac

SEQ ID NO: 70460 - DNA, 17 bp, Arabidopsis thaliana
ccaaagcagaaggactc

SEQ ID NO: 70461 - DNA, 17 bp, Arabidopsis thaliana
ccaaagcgatatctagc

SEQ ID NO: 70462 - DNA, 17 bp, Arabidopsis thaliana
ccaaagcggtatctagc

SEQ ID NO: 70463 - DNA, 17 bp, Arabidopsis thaliana
ccaaagctcatccgtcc

SEQ ID NO: 70464 - DNA, 17 bp, Arabidopsis thaliana
ccaaaggatgggggggc

SEQ ID NO: 70465 - DNA, 17 bp, Arabidopsis thaliana
ccaaaggatgtgaagat

SEQ ID NO: 70466 - DNA, 17 bp, Arabidopsis thaliana
ccaaaggcacgtgtcgt

SEQ ID NO: 70467 - DNA, 17 bp, Arabidopsis thaliana
ccaaaggccttacatct

SEQ ID NO: 70468 - DNA, 17 bp, Arabidopsis thaliana
ccaaaggctgaaaccag

SEQ ID NO: 70469 - DNA, 17 bp, Arabidopsis thaliana
ccaaaggcttgaacttg

SEQ ID NO: 70470 - DNA, 17 bp, Arabidopsis thaliana
ccaaagggacttctgct

SEQ ID NO: 70471 - DNA, 17 bp, Arabidopsis thaliana
ccaaagggatcgcattg

SEQ ID NO: 70472 - DNA, 17 bp, Arabidopsis thaliana
ccaaagggccattgtta

SEQ ID NO: 70473 - DNA, 17 bp, Arabidopsis thaliana
ccaaaggtccgaaagtg

SEQ ID NO: 70474 - DNA, 17 bp, Arabidopsis thaliana
ccaaaggtctagaactc

SEQ ID NO: 70475 - DNA, 17 bp, Arabidopsis thaliana
ccaaaggttgaccttaa

SEQ ID NO: 70476 - DNA, 17 bp, Arabidopsis thaliana
ccaaagtcactcgacct

SEQ ID NO: 70477 - DNA, 17 bp, Arabidopsis thaliana
ccaaagtcactcggcct

SEQ ID NO: 70478 - DNA, 17 bp, Arabidopsis thaliana
ccaaagtcccgatcttg

SEQ ID NO: 70479 - DNA, 17 bp, Arabidopsis thaliana
ccaaagtcgatttgtgt

SEQ ID NO: 70480 - DNA, 17 bp, Arabidopsis thaliana
ccaaagtgactacatcg

SEQ ID NO: 70481 - DNA, 17 bp, Arabidopsis thaliana
ccaaagtgccttctctt

SEQ ID NO: 70482 - DNA, 17 bp, Arabidopsis thaliana
ccaaagtgcttcagatt

SEQ ID NO: 70483 - DNA, 17 bp, Arabidopsis thaliana
ccaaagttcgttctcca

SEQ ID NO: 70484 - DNA, 17 bp, Arabidopsis thaliana
ccaaagttcttacataa

SEQ ID NO: 70485 - DNA, 17 bp, Arabidopsis thaliana
ccaaagttgtaaatgtg

SEQ ID NO: 70486 - DNA, 17 bp, Arabidopsis thaliana
ccaaagttgtgtgagat

SEQ ID NO: 70487 - DNA, 17 bp, Arabidopsis thaliana
ccaaataaaccgattgc

SEQ ID NO: 70488 - DNA, 17 bp, Arabidopsis thaliana
ccaaatatgctgagaac

SEQ ID NO: 70489 - DNA, 17 bp, Arabidopsis thaliana
ccaaatatgtcctggat

SEQ ID NO: 70490 - DNA, 17 bp, Arabidopsis thaliana
ccaaatatttggaggct

SEQ ID NO: 70491 - DNA, 17 bp, Arabidopsis thaliana
ccaaatcacttggaaga

SEQ ID NO: 70492 - DNA, 17 bp, Arabidopsis thaliana
ccaaatcctggtccgcc

SEQ ID NO: 70493 - DNA, 17 bp, Arabidopsis thaliana
ccaaatctctcggatgt

SEQ ID NO: 70494 - DNA, 17 bp, Arabidopsis thaliana
ccaaatctggcccaagt

SEQ ID NO: 70495 - DNA, 17 bp, Arabidopsis thaliana
ccaaatctggttgactc

SEQ ID NO: 70496 - DNA, 17 bp, Arabidopsis thaliana
ccaaatctgttgcgaag

SEQ ID NO: 70497 - DNA, 17 bp, Arabidopsis thaliana
ccaaatgaccccccccc

SEQ ID NO: 70498 - DNA, 17 bp, Arabidopsis thaliana
ccaaatgattgagtgga

SEQ ID NO: 70499 - DNA, 17 bp, Arabidopsis thaliana
ccaaatggaggatcgat

SEQ ID NO: 70500 - DNA, 17 bp, Arabidopsis thaliana
ccaaatggattagccct

SEQ ID NO: 70501 - DNA, 17 bp, Arabidopsis thaliana
ccaaatggctggatttt

SEQ ID NO: 70502 - DNA, 17 bp, Arabidopsis thaliana
ccaaatgggttgtacaa

SEQ ID NO: 70503 - DNA, 17 bp, Arabidopsis thaliana
ccaaatgggttgttcag

SEQ ID NO: 70504 - DNA, 17 bp, Arabidopsis thaliana
ccaaatgtggagagcca

SEQ ID NO: 70505 - DNA, 17 bp, Arabidopsis thaliana
ccaaatgtggcctgttc

SEQ ID NO: 70506 - DNA, 17 bp, Arabidopsis thaliana
ccaaattacgatagtat

SEQ ID NO: 70507 - DNA, 17 bp, Arabidopsis thaliana
ccaaattgcgatgtggt

SEQ ID NO: 70508 - DNA, 17 bp, Arabidopsis thaliana
ccaaattgctgcatttc

SEQ ID NO: 70509 - DNA, 17 bp, Arabidopsis thaliana
ccaaattggatgagaat

SEQ ID NO: 70510 - DNA, 17 bp, Arabidopsis thaliana
ccaaatttttggaggct

SEQ ID NO: 70511 - DNA, 17 bp, Arabidopsis thaliana
ccaacaaaatggccaac

SEQ ID NO: 70512 - DNA, 17 bp, Arabidopsis thaliana
ccaacaaatagacagct

SEQ ID NO: 70513 - DNA, 17 bp, Arabidopsis thaliana
ccaacaacaaatccttg

SEQ ID NO: 70514 - DNA, 17 bp, Arabidopsis thaliana
ccaacaagtgtgactga

SEQ ID NO: 70515 - DNA, 17 bp, Arabidopsis thaliana
ccaacaataggctatat

SEQ ID NO: 70516 - DNA, 17 bp, Arabidopsis thaliana
ccaacaatgtatactgc

SEQ ID NO: 70517 - DNA, 17 bp, Arabidopsis thaliana
ccaacacaaagacgcag

SEQ ID NO: 70518 - DNA, 17 bp, Arabidopsis thaliana
ccaacacacgaggctga

SEQ ID NO: 70519 - DNA, 17 bp, Arabidopsis thaliana
ccaacacatctcatctt

SEQ ID NO: 70520 - DNA, 17 bp, Arabidopsis thaliana
ccaacacggggaaacaa

SEQ ID NO: 70521 - DNA, 17 bp, Arabidopsis thaliana
ccaacacggggaaactt

SEQ ID NO: 70522 - DNA, 17 bp, Arabidopsis thaliana
ccaacactgacaggtct

SEQ ID NO: 70523 - DNA, 17 bp, Arabidopsis thaliana
ccaacagacgactgatt

SEQ ID NO: 70524 - DNA, 17 bp, Arabidopsis thaliana
ccaacaggagtcgagcc

SEQ ID NO: 70525 - DNA, 17 bp, Arabidopsis thaliana
ccaacaggcgactgatt

SEQ ID NO: 70526 - DNA, 17 bp, Arabidopsis thaliana
ccaacaggcttgctagg

SEQ ID NO: 70527 - DNA, 17 bp, Arabidopsis thaliana
ccaacaggttgcgggtg

SEQ ID NO: 70528 - DNA, 17 bp, Arabidopsis thaliana
ccaacaggtttacggtg

SEQ ID NO: 70529 - DNA, 17 bp, Arabidopsis thaliana
ccaacagttgttgccga

SEQ ID NO: 70530 - DNA, 17 bp, Arabidopsis thaliana
ccaacagtttattcatc

SEQ ID NO: 70531 - DNA, 17 bp, Arabidopsis thaliana
ccaacatagcgttcgat

SEQ ID NO: 70532 - DNA, 17 bp, Arabidopsis thaliana
ccaacatgactacatcg

SEQ ID NO: 70533 - DNA, 17 bp, Arabidopsis thaliana
ccaacatgactttggag

SEQ ID NO: 70534 - DNA, 17 bp, Arabidopsis thaliana
ccaacatgttattggat

SEQ ID NO: 70535 - DNA, 17 bp, Arabidopsis thaliana
ccaacattcaggcttcc

SEQ ID NO: 70536 - DNA, 17 bp, Arabidopsis thaliana
ccaaccatcctgtgatg

SEQ ID NO: 70537 - DNA, 17 bp, Arabidopsis thaliana
ccaacccatcgaatcag

SEQ ID NO: 70538 - DNA, 17 bp, Arabidopsis thaliana
ccaaccgattcttggta

SEQ ID NO: 70539 - DNA, 17 bp, Arabidopsis thaliana
ccaaccgtatgctgcaa

SEQ ID NO: 70540 - DNA, 17 bp, Arabidopsis thaliana
ccaaccgtcgattgaac

SEQ ID NO: 70541 - DNA, 17 bp, Arabidopsis thaliana
ccaacctaaaaccaatt

SEQ ID NO: 70542 - DNA, 17 bp, Arabidopsis thaliana
ccaacctaagtcttgta

SEQ ID NO: 70543 - DNA, 17 bp, Arabidopsis thaliana
ccaacctcgatcttggt

SEQ ID NO: 70544 - DNA, 17 bp, Arabidopsis thaliana
ccaacctctccagccca

SEQ ID NO: 70545 - DNA, 17 bp, Arabidopsis thaliana
ccaaccttagctcagtt

SEQ ID NO: 70546 - DNA, 17 bp, Arabidopsis thaliana
ccaaccttcttcttgct

SEQ ID NO: 70547 - DNA, 17 bp, Arabidopsis thaliana
ccaacgaatctgtaggt

SEQ ID NO: 70548 - DNA, 17 bp, Arabidopsis thaliana
ccaacgacacgtgcctt

SEQ ID NO: 70549 - DNA, 17 bp, Arabidopsis thaliana
ccaacgatcaagtggct

SEQ ID NO: 70550 - DNA, 17 bp, Arabidopsis thaliana
ccaacgatgatcaagga

SEQ ID NO: 70551 - DNA, 17 bp, Arabidopsis thaliana
ccaacgcggattacggt

SEQ ID NO: 70552 - DNA, 17 bp, Arabidopsis thaliana
ccaacgcgtttgagaca

SEQ ID NO: 70553 - DNA, 17 bp, Arabidopsis thaliana
ccaacggataatgattg

SEQ ID NO: 70554 - DNA, 17 bp, Arabidopsis thaliana
ccaacggataatgattt

SEQ ID NO: 70555 - DNA, 17 bp, Arabidopsis thaliana
ccaacggcgaaagcact

SEQ ID NO: 70556 - DNA, 17 bp, Arabidopsis thaliana
ccaacggctactgtgct

SEQ ID NO: 70557 - DNA, 17 bp, Arabidopsis thaliana
ccaacggggaatgtgat

SEQ ID NO: 70558 - DNA, 17 bp, Arabidopsis thaliana
ccaacgggttggcggga

SEQ ID NO: 70559 - DNA, 17 bp, Arabidopsis thaliana
ccaacggtatttggtgc

SEQ ID NO: 70560 - DNA, 17 bp, Arabidopsis thaliana
ccaacggtggttcctta

SEQ ID NO: 70561 - DNA, 17 bp, Arabidopsis thaliana
ccaacggttcgatggag

SEQ ID NO: 70562 - DNA, 17 bp, Arabidopsis thaliana
ccaacgtggaccttggg

SEQ ID NO: 70563 - DNA, 17 bp, Arabidopsis thaliana
ccaacgttgggagccga

SEQ ID NO: 70564 - DNA, 17 bp, Arabidopsis thaliana
ccaacgtttactatgct

SEQ ID NO: 70565 - DNA, 17 bp, Arabidopsis thaliana
ccaactaaatgcggaag

SEQ ID NO: 70566 - DNA, 17 bp, Arabidopsis thaliana
ccaactagcatagggct

SEQ ID NO: 70567 - DNA, 17 bp, Arabidopsis thaliana
ccaactcaagggcagcc

SEQ ID NO: 70568 - DNA, 17 bp, Arabidopsis thaliana
ccaactcaatgactatt

SEQ ID NO: 70569 - DNA, 17 bp, Arabidopsis thaliana
ccaactccggagaagca

SEQ ID NO: 70570 - DNA, 17 bp, Arabidopsis thaliana
ccaactcgcggattcaa

SEQ ID NO: 70571 - DNA, 17 bp, Arabidopsis thaliana
ccaactcgcggattcta

SEQ ID NO: 70572 - DNA, 17 bp, Arabidopsis thaliana
ccaactctattatcacc

SEQ ID NO: 70573 - DNA, 17 bp, Arabidopsis thaliana
ccaactgacaagtcgtg

SEQ ID NO: 70574 - DNA, 17 bp, Arabidopsis thaliana
ccaactgagaatgtgat

SEQ ID NO: 70575 - DNA, 17 bp, Arabidopsis thaliana
ccaactgatacaaggct

SEQ ID NO: 70576 - DNA, 17 bp, Arabidopsis thaliana
ccaactgatccattcaa

SEQ ID NO: 70577 - DNA, 17 bp, Arabidopsis thaliana
ccaactgatcttcgcgt

SEQ ID NO: 70578 - DNA, 17 bp, Arabidopsis thaliana
ccaactgcatgccaaag

SEQ ID NO: 70579 - DNA, 17 bp, Arabidopsis thaliana
ccaactggacaagacca

SEQ ID NO: 70580 - DNA, 17 bp, Arabidopsis thaliana
ccaactgggaatgtgat

SEQ ID NO: 70581 - DNA, 17 bp, Arabidopsis thaliana
ccaactggtgtaagtac

SEQ ID NO: 70582 - DNA, 17 bp, Arabidopsis thaliana
ccaactggtttactgga

SEQ ID NO: 70583 - DNA, 17 bp, Arabidopsis thaliana
ccaactgtcggcctcct

SEQ ID NO: 70584 - DNA, 17 bp, Arabidopsis thaliana
ccaactgtggcctcaag

SEQ ID NO: 70585 - DNA, 17 bp, Arabidopsis thaliana
ccaactgtgtgacaccg

SEQ ID NO: 70586 - DNA, 17 bp, Arabidopsis thaliana
ccaactgtttcccaatt

SEQ ID NO: 70587 - DNA, 17 bp, Arabidopsis thaliana
ccaacttatcttttggc

SEQ ID NO: 70588 - DNA, 17 bp, Arabidopsis thaliana
ccaacttccgatgtggg

SEQ ID NO: 70589 - DNA, 17 bp, Arabidopsis thaliana
ccaacttggtttgagac

SEQ ID NO: 70590 - DNA, 17 bp, Arabidopsis thaliana
ccaactttagcccaggg

SEQ ID NO: 70591 - DNA, 17 bp, Arabidopsis thaliana
ccaactttcaaaaagtg

SEQ ID NO: 70592 - DNA, 17 bp, Arabidopsis thaliana
ccaactttcataaggcc

SEQ ID NO: 70593 - DNA, 17 bp, Arabidopsis thaliana
ccaactttcggctcaga

SEQ ID NO: 70594 - DNA, 17 bp, Arabidopsis thaliana
ccaactttctccatatg

SEQ ID NO: 70595 - DNA, 17 bp, Arabidopsis thaliana
ccaactttctctctcct

SEQ ID NO: 70596 - DNA, 17 bp, Arabidopsis thaliana
ccaactttgacgggatg

SEQ ID NO: 70597 - DNA, 17 bp, Arabidopsis thaliana
ccaactttgattgtctt

SEQ ID NO: 70598 - DNA, 17 bp, Arabidopsis thaliana
ccaactttgggtctggt

SEQ ID NO: 70599 - DNA, 17 bp, Arabidopsis thaliana
ccaactttgtatgcggc

SEQ ID NO: 70600 - DNA, 17 bp, Arabidopsis thaliana
ccaagaacgctgaccat

SEQ ID NO: 70601 - DNA, 17 bp, Arabidopsis thaliana
ccaagaacttctacggc

SEQ ID NO: 70602 - DNA, 17 bp, Arabidopsis thaliana
ccaagaacttttcgtgc

SEQ ID NO: 70603 - DNA, 17 bp, Arabidopsis thaliana
ccaagaagcttctcatt

SEQ ID NO: 70604 - DNA, 17 bp, Arabidopsis thaliana
ccaagaagtaggttttt

SEQ ID NO: 70605 - DNA, 17 bp, Arabidopsis thaliana
ccaagaatcggatctag

SEQ ID NO: 70606 - DNA, 17 bp, Arabidopsis thaliana
ccaagacctttagctgt

SEQ ID NO: 70607 - DNA, 17 bp, Arabidopsis thaliana
ccaagacgtttattcag

SEQ ID NO: 70608 - DNA, 17 bp, Arabidopsis thaliana
ccaagactacccttggg

SEQ ID NO: 70609 - DNA, 17 bp, Arabidopsis thaliana
ccaagactcggatgttc

SEQ ID NO: 70610 - DNA, 17 bp, Arabidopsis thaliana
ccaagactttgtgacat

SEQ ID NO: 70611 - DNA, 17 bp, Arabidopsis thaliana
ccaagacttttgggctg

SEQ ID NO: 70612 - DNA, 17 bp, Arabidopsis thaliana
ccaagagaggaatgtta

SEQ ID NO: 70613 - DNA, 17 bp, Arabidopsis thaliana
ccaagagattggcttgt

SEQ ID NO: 70614 - DNA, 17 bp, Arabidopsis thaliana
ccaagagcgttacaagc

SEQ ID NO: 70615 - DNA, 17 bp, Arabidopsis thaliana
ccaagagtaaagattcc

SEQ ID NO: 70616 - DNA, 17 bp, Arabidopsis thaliana
ccaagagttccggtatt

SEQ ID NO: 70617 - DNA, 17 bp, Arabidopsis thaliana
ccaagatccctctgcct

SEQ ID NO: 70618 - DNA, 17 bp, Arabidopsis thaliana
ccaagatcggcattgat

SEQ ID NO: 70619 - DNA, 17 bp, Arabidopsis thaliana
ccaagatcgtctagcag

SEQ ID NO: 70620 - DNA, 17 bp, Arabidopsis thaliana
ccaagatctggttgcgg

SEQ ID NO: 70621 - DNA, 17 bp, Arabidopsis thaliana
ccaagatgaacaggcag

SEQ ID NO: 70622 - DNA, 17 bp, Arabidopsis thaliana
ccaagatgaggaagctt

SEQ ID NO: 70623 - DNA, 17 bp, Arabidopsis thaliana
ccaagatggatcgacat

SEQ ID NO: 70624 - DNA, 17 bp, Arabidopsis thaliana
ccaagattcgcactgga

SEQ ID NO: 70625 - DNA, 17 bp, Arabidopsis thaliana
ccaagattcgggatggc

SEQ ID NO: 70626 - DNA, 17 bp, Arabidopsis thaliana
ccaagcaataacaggtt

SEQ ID NO: 70627 - DNA, 17 bp, Arabidopsis thaliana
ccaagcaatagacccgg

SEQ ID NO: 70628 - DNA, 17 bp, Arabidopsis thaliana
ccaagcagcagcttctc

SEQ ID NO: 70629 - DNA, 17 bp, Arabidopsis thaliana
ccaagcaggtatacagt

SEQ ID NO: 70630 - DNA, 17 bp, Arabidopsis thaliana
ccaagcagtgatatttt

SEQ ID NO: 70631 - DNA, 17 bp, Arabidopsis thaliana
ccaagcattctcttctg

SEQ ID NO: 70632 - DNA, 17 bp, Arabidopsis thaliana
ccaagcattgaccagag

SEQ ID NO: 70633 - DNA, 17 bp, Arabidopsis thaliana
ccaagccaagaagtcga

SEQ ID NO: 70634 - DNA, 17 bp, Arabidopsis thaliana
ccaagccactaagtgac

SEQ ID NO: 70635 - DNA, 17 bp, Arabidopsis thaliana
ccaagcccaatgggccc

SEQ ID NO: 70636 - DNA, 17 bp, Arabidopsis thaliana
ccaagcccacgaccacg

SEQ ID NO: 70637 - DNA, 17 bp, Arabidopsis thaliana
ccaagcccgaggagcct

SEQ ID NO: 70638 - DNA, 17 bp, Arabidopsis thaliana
ccaagcgagaatggcta

SEQ ID NO: 70639 - DNA, 17 bp, Arabidopsis thaliana
ccaagcggtttagtcca

SEQ ID NO: 70640 - DNA, 17 bp, Arabidopsis thaliana
ccaagcgttgtgacaat

SEQ ID NO: 70641 - DNA, 17 bp, Arabidopsis thaliana
ccaaggaagtttgaggc

SEQ ID NO: 70642 - DNA, 17 bp, Arabidopsis thaliana
ccaaggaccattgggcg

SEQ ID NO: 70643 - DNA, 17 bp, Arabidopsis thaliana
ccaaggaccttggacca

SEQ ID NO: 70644 - DNA, 17 bp, Arabidopsis thaliana
ccaaggaccttggatca

SEQ ID NO: 70645 - DNA, 17 bp, Arabidopsis thaliana
ccaaggactatagactg

SEQ ID NO: 70646 - DNA, 17 bp, Arabidopsis thaliana
ccaaggagagaggttag

SEQ ID NO: 70647 - DNA, 17 bp, Arabidopsis thaliana
ccaaggagcaaggaccg

SEQ ID NO: 70648 - DNA, 17 bp, Arabidopsis thaliana
ccaaggagccgcaaacc

SEQ ID NO: 70649 - DNA, 17 bp, Arabidopsis thaliana
ccaaggagctcactcag

SEQ ID NO: 70650 - DNA, 17 bp, Arabidopsis thaliana
ccaaggaggctttctgg

SEQ ID NO: 70651 - DNA, 17 bp, Arabidopsis thaliana
ccaaggagtctgacatc

SEQ ID NO: 70652 - DNA, 17 bp, Arabidopsis thaliana
ccaaggagtctgacatg

SEQ ID NO: 70653 - DNA, 17 bp, Arabidopsis thaliana
ccaaggagtctgacctg

SEQ ID NO: 70654 - DNA, 17 bp, Arabidopsis thaliana
ccaaggatcgatgagtt

SEQ ID NO: 70655 - DNA, 17 bp, Arabidopsis thaliana
ccaaggatcggtttgct

SEQ ID NO: 70656 - DNA, 17 bp, Arabidopsis thaliana
ccaaggatgacttgccg

SEQ ID NO: 70657 - DNA, 17 bp, Arabidopsis thaliana
ccaaggcagagacgttt

SEQ ID NO: 70658 - DNA, 17 bp, Arabidopsis thaliana
ccaaggcagatcccaga

SEQ ID NO: 70659 - DNA, 17 bp, Arabidopsis thaliana
ccaaggcctgaagcaat

SEQ ID NO: 70660 - DNA, 17 bp, Arabidopsis thaliana
ccaaggcgagataggct

SEQ ID NO: 70661 - DNA, 17 bp, Arabidopsis thaliana
ccaaggcgatgatcagt

SEQ ID NO: 70662 - DNA, 17 bp, Arabidopsis thaliana
ccaaggcgggccattcg

SEQ ID NO: 70663 - DNA, 17 bp, Arabidopsis thaliana
ccaaggcgtggccgcta

SEQ ID NO: 70664 - DNA, 17 bp, Arabidopsis thaliana
ccaagggaacgggcttg

SEQ ID NO: 70665 - DNA, 17 bp, Arabidopsis thaliana
ccaagggatctcctatg

SEQ ID NO: 70666 - DNA, 17 bp, Arabidopsis thaliana
ccaagggcacgtctgcc

SEQ ID NO: 70667 - DNA, 17 bp, Arabidopsis thaliana
ccaagggctgagacaag

SEQ ID NO: 70668 - DNA, 17 bp, Arabidopsis thaliana
ccaagggttcctccgca

SEQ ID NO: 70669 - DNA, 17 bp, Arabidopsis thaliana
ccaagggttcgagcttt

SEQ ID NO: 70670 - DNA, 17 bp, Arabidopsis thaliana
ccaaggtaagacgttgc

SEQ ID NO: 70671 - DNA, 17 bp, Arabidopsis thaliana
ccaaggtagcgaacaaa

SEQ ID NO: 70672 - DNA, 17 bp, Arabidopsis thaliana
ccaaggtcaacgattgc

SEQ ID NO: 70673 - DNA, 17 bp, Arabidopsis thaliana
ccaaggtcaggggtatg

SEQ ID NO: 70674 - DNA, 17 bp, Arabidopsis thaliana
ccaaggtcattatgggt

SEQ ID NO: 70675 - DNA, 17 bp, Arabidopsis thaliana
ccaaggtgattatgtta

SEQ ID NO: 70676 - DNA, 17 bp, Arabidopsis thaliana
ccaaggtgattggtgac

SEQ ID NO: 70677 - DNA, 17 bp, Arabidopsis thaliana
ccaaggtgattggttgg

SEQ ID NO: 70678 - DNA, 17 bp, Arabidopsis thaliana
ccaaggtgctacagagt

SEQ ID NO: 70679 - DNA, 17 bp, Arabidopsis thaliana
ccaaggtgcttctcgca

SEQ ID NO: 70680 - DNA, 17 bp, Arabidopsis thaliana
ccaaggtgcttctcgcc

SEQ ID NO: 70681 - DNA, 17 bp, Arabidopsis thaliana
ccaaggttcaactacga

SEQ ID NO: 70682 - DNA, 17 bp, Arabidopsis thaliana
ccaaggtttcatgttga

SEQ ID NO: 70683 - DNA, 17 bp, Arabidopsis thaliana
ccaagtagtctgttcat

SEQ ID NO: 70684 - DNA, 17 bp, Arabidopsis thaliana
ccaagtatcgcatttcg

SEQ ID NO: 70685 - DNA, 17 bp, Arabidopsis thaliana
ccaagtattgggccgga

SEQ ID NO: 70686 - DNA, 17 bp, Arabidopsis thaliana
ccaagtattgggtccgc

SEQ ID NO: 70687 - DNA, 17 bp, Arabidopsis thaliana
ccaagtattgggtccgg

SEQ ID NO: 70688 - DNA, 17 bp, Arabidopsis thaliana
ccaagtccactgaggcg

SEQ ID NO: 70689 - DNA, 17 bp, Arabidopsis thaliana
ccaagtccataagggtg

SEQ ID NO: 70690 - DNA, 17 bp, Arabidopsis thaliana
ccaagtccatccaaatg

SEQ ID NO: 70691 - DNA, 17 bp, Arabidopsis thaliana
ccaagtcccatccggcg

SEQ ID NO: 70692 - DNA, 17 bp, Arabidopsis thaliana
ccaagtcctcgtgttgc

SEQ ID NO: 70693 - DNA, 17 bp, Arabidopsis thaliana
ccaagtcgacggatatc

SEQ ID NO: 70694 - DNA, 17 bp, Arabidopsis thaliana
ccaagtcggcgttctag

SEQ ID NO: 70695 - DNA, 17 bp, Arabidopsis thaliana
ccaagtctgttgaacag

SEQ ID NO: 70696 - DNA, 17 bp, Arabidopsis thaliana
ccaagtcttgttcttca

SEQ ID NO: 70697 - DNA, 17 bp, Arabidopsis thaliana
ccaagtgattacgggtt

SEQ ID NO: 70698 - DNA, 17 bp, Arabidopsis thaliana
ccaagtgattcagttgc

SEQ ID NO: 70699 - DNA, 17 bp, Arabidopsis thaliana
ccaagtgcttcgttctg

SEQ ID NO: 70700 - DNA, 17 bp, Arabidopsis thaliana
ccaagtggaacgagggc

SEQ ID NO: 70701 - DNA, 17 bp, Arabidopsis thaliana
ccaagtggacatgaccg

SEQ ID NO: 70702 - DNA, 17 bp, Arabidopsis thaliana
ccaagtggattaaggca

SEQ ID NO: 70703 - DNA, 17 bp, Arabidopsis thaliana
ccaagtggctcaggggg

SEQ ID NO: 70704 - DNA, 17 bp, Arabidopsis thaliana
ccaagtgggccattttt

SEQ ID NO: 70705 - DNA, 17 bp, Arabidopsis thaliana
ccaagtgttcgatgtgc

SEQ ID NO: 70706 - DNA, 17 bp, Arabidopsis thaliana
ccaagttagccaagcca

SEQ ID NO: 70707 - DNA, 17 bp, Arabidopsis thaliana
ccaagttcggaccctga

SEQ ID NO: 70708 - DNA, 17 bp, Arabidopsis thaliana
ccaagttcgtctccaga

SEQ ID NO: 70709 - DNA, 17 bp, Arabidopsis thaliana
ccaagttctctgacatc

SEQ ID NO: 70710 - DNA, 17 bp, Arabidopsis thaliana
ccaagttgaccttggct

SEQ ID NO: 70711 - DNA, 17 bp, Arabidopsis thaliana
ccaagttgcgaaagtag

SEQ ID NO: 70712 - DNA, 17 bp, Arabidopsis thaliana
ccaataacaaatccttg

SEQ ID NO: 70713 - DNA, 17 bp, Arabidopsis thaliana
ccaataacaggtctgtg

SEQ ID NO: 70714 - DNA, 17 bp, Arabidopsis thaliana
ccaataacttttagacc

SEQ ID NO: 70715 - DNA, 17 bp, Arabidopsis thaliana
ccaataagatacagcca

SEQ ID NO: 70716 - DNA, 17 bp, Arabidopsis thaliana
ccaataccgtcctatac

SEQ ID NO: 70717 - DNA, 17 bp, Arabidopsis thaliana
ccaatacctgtgccaga

SEQ ID NO: 70718 - DNA, 17 bp, Arabidopsis thaliana
ccaatactgacttggct

SEQ ID NO: 70719 - DNA, 17 bp, Arabidopsis thaliana
ccaatagggaacgtgag

SEQ ID NO: 70720 - DNA, 17 bp, Arabidopsis thaliana
ccaatagggaacgtggg

SEQ ID NO: 70721 - DNA, 17 bp, Arabidopsis thaliana
ccaatagggaaggagag

SEQ ID NO: 70722 - DNA, 17 bp, Arabidopsis thaliana
ccaatagttgaccaaat

SEQ ID NO: 70723 - DNA, 17 bp, Arabidopsis thaliana
ccaatcagacccaactt

SEQ ID NO: 70724 - DNA, 17 bp, Arabidopsis thaliana
ccaatcaggtgcaagag

SEQ ID NO: 70725 - DNA, 17 bp, Arabidopsis thaliana
ccaatccatcccgaact

SEQ ID NO: 70726 - DNA, 17 bp, Arabidopsis thaliana
ccaatcctctgcaactg

SEQ ID NO: 70727 - DNA, 17 bp, Arabidopsis thaliana
ccaatcctgacacgggg

SEQ ID NO: 70728 - DNA, 17 bp, Arabidopsis thaliana
ccaatcctgaccctggg

SEQ ID NO: 70729 - DNA, 17 bp, Arabidopsis thaliana
ccaatcgaagtttgtgc

SEQ ID NO: 70730 - DNA, 17 bp, Arabidopsis thaliana
ccaatcgaatggccagc

SEQ ID NO: 70731 - DNA, 17 bp, Arabidopsis thaliana
ccaatcgactaggggtg

SEQ ID NO: 70732 - DNA, 17 bp, Arabidopsis thaliana
ccaatcgatgatgtctt

SEQ ID NO: 70733 - DNA, 17 bp, Arabidopsis thaliana
ccaatcgcagcgactgt

SEQ ID NO: 70734 - DNA, 17 bp, Arabidopsis thaliana
ccaatcggaatcgacgt

SEQ ID NO: 70735 - DNA, 17 bp, Arabidopsis thaliana
ccaatcggatatccacg

SEQ ID NO: 70736 - DNA, 17 bp, Arabidopsis thaliana
ccaatcgggaatcgttg

SEQ ID NO: 70737 - DNA, 17 bp, Arabidopsis thaliana
ccaatcgggcggtaaac

SEQ ID NO: 70738 - DNA, 17 bp, Arabidopsis thaliana
ccaatcggtttggattt

SEQ ID NO: 70739 - DNA, 17 bp, Arabidopsis thaliana
ccaatcgttggatcatc

SEQ ID NO: 70740 - DNA, 17 bp, Arabidopsis thaliana
ccaatctcattttcttc

SEQ ID NO: 70741 - DNA, 17 bp, Arabidopsis thaliana
ccaatctctatcgccgg

SEQ ID NO: 70742 - DNA, 17 bp, Arabidopsis thaliana
ccaatctgtggatttga

SEQ ID NO: 70743 - DNA, 17 bp, Arabidopsis thaliana
ccaatcttgagactttc

SEQ ID NO: 70744 - DNA, 17 bp, Arabidopsis thaliana
ccaatctttgatctcgt

SEQ ID NO: 70745 - DNA, 17 bp, Arabidopsis thaliana
ccaatgacacattcggt

SEQ ID NO: 70746 - DNA, 17 bp, Arabidopsis thaliana
ccaatgactcatatgga

SEQ ID NO: 70747 - DNA, 17 bp, Arabidopsis thaliana
ccaatgagatggtctcg

SEQ ID NO: 70748 - DNA, 17 bp, Arabidopsis thaliana
ccaatgataggtcctta

SEQ ID NO: 70749 - DNA, 17 bp, Arabidopsis thaliana
ccaatgatcgagtaggg

SEQ ID NO: 70750 - DNA, 17 bp, Arabidopsis thaliana
ccaatgccttaagaaaa

SEQ ID NO: 70751 - DNA, 17 bp, Arabidopsis thaliana
ccaatgccttcgagtag

SEQ ID NO: 70752 - DNA, 17 bp, Arabidopsis thaliana
ccaatgcgacatttggc

SEQ ID NO: 70753 - DNA, 17 bp, Arabidopsis thaliana
ccaatggaaatggctaa

SEQ ID NO: 70754 - DNA, 17 bp, Arabidopsis thaliana
ccaatggaccaaagggc

SEQ ID NO: 70755 - DNA, 17 bp, Arabidopsis thaliana
ccaatgggttttcttga

SEQ ID NO: 70756 - DNA, 17 bp, Arabidopsis thaliana
ccaatggtcatgtccac

SEQ ID NO: 70757 - DNA, 17 bp, Arabidopsis thaliana
ccaatggttgtggactt

SEQ ID NO: 70758 - DNA, 17 bp, Arabidopsis thaliana
ccaatgtaaactgcgag

SEQ ID NO: 70759 - DNA, 17 bp, Arabidopsis thaliana
ccaatgtaacttcatca

SEQ ID NO: 70760 - DNA, 17 bp, Arabidopsis thaliana
ccaatgtcttttctagt

SEQ ID NO: 70761 - DNA, 17 bp, Arabidopsis thaliana
ccaatgtgcgactggtg

SEQ ID NO: 70762 - DNA, 17 bp, Arabidopsis thaliana
ccaattaggaaccgact

SEQ ID NO: 70763 - DNA, 17 bp, Arabidopsis thaliana
ccaattagggcttgtcg

SEQ ID NO: 70764 - DNA, 17 bp, Arabidopsis thaliana
ccaattatgctaagcgt

SEQ ID NO: 70765 - DNA, 17 bp, Arabidopsis thaliana
ccaattcaaaagtatgc

SEQ ID NO: 70766 - DNA, 17 bp, Arabidopsis thaliana
ccaattccgctgcgaat

SEQ ID NO: 70767 - DNA, 17 bp, Arabidopsis thaliana
ccaattcctttcgacgt

SEQ ID NO: 70768 - DNA, 17 bp, Arabidopsis thaliana
ccaattcggacggctct

SEQ ID NO: 70769 - DNA, 17 bp, Arabidopsis thaliana
ccaattcggactgttct

SEQ ID NO: 70770 - DNA, 17 bp, Arabidopsis thaliana
ccaattcgtattaagtg

SEQ ID NO: 70771 - DNA, 17 bp, Arabidopsis thaliana
ccaattgacaatatgtg

SEQ ID NO: 70772 - DNA, 17 bp, Arabidopsis thaliana
ccaattgactggtaata

SEQ ID NO: 70773 - DNA, 17 bp, Arabidopsis thaliana
ccaattgatttacctgg

SEQ ID NO: 70774 - DNA, 17 bp, Arabidopsis thaliana
ccaattggcaataggtg

SEQ ID NO: 70775 - DNA, 17 bp, Arabidopsis thaliana
ccaattggctataggtg

SEQ ID NO: 70776 - DNA, 17 bp, Arabidopsis thaliana
ccaattgggtgaagctg

SEQ ID NO: 70777 - DNA, 17 bp, Arabidopsis thaliana
ccaattggtcgctgagt

SEQ ID NO: 70778 - DNA, 17 bp, Arabidopsis thaliana
ccaattggtttacctgg

SEQ ID NO: 70779 - DNA, 17 bp, Arabidopsis thaliana
ccaattggttttaggtt

SEQ ID NO: 70780 - DNA, 17 bp, Arabidopsis thaliana
ccaattgtgcgaatcaa

SEQ ID NO: 70781 - DNA, 17 bp, Arabidopsis thaliana
ccaattgtttcagaggc

SEQ ID NO: 70782 - DNA, 17 bp, Arabidopsis thaliana
ccaatttatctggtcca

SEQ ID NO: 70783 - DNA, 17 bp, Arabidopsis thaliana
ccaatttcgctcgtggt

SEQ ID NO: 70784 - DNA, 17 bp, Arabidopsis thaliana
ccaatttcttaggacgg

SEQ ID NO: 70785 - DNA, 17 bp, Arabidopsis thaliana
ccaatttggacaggtgt

SEQ ID NO: 70786 - DNA, 17 bp, Arabidopsis thaliana
ccaattttcaaattgtg

SEQ ID NO: 70787 - DNA, 17 bp, Arabidopsis thaliana
ccaattttctctcaaaa

SEQ ID NO: 70788 - DNA, 17 bp, Arabidopsis thaliana
ccacaaactatcttcgg

SEQ ID NO: 70789 - DNA, 17 bp, Arabidopsis thaliana
ccacaaagatttgttat

SEQ ID NO: 70790 - DNA, 17 bp, Arabidopsis thaliana
ccacaaagggtgttggt

SEQ ID NO: 70791 - DNA, 17 bp, Arabidopsis thaliana
ccacaaatgcttgggca

SEQ ID NO: 70792 - DNA, 17 bp, Arabidopsis thaliana
ccacaaatggtgttgat

SEQ ID NO: 70793 - DNA, 17 bp, Arabidopsis thaliana
ccacaaattctttggct

SEQ ID NO: 70794 - DNA, 17 bp, Arabidopsis thaliana
ccacaacatggcacagt

SEQ ID NO: 70795 - DNA, 17 bp, Arabidopsis thaliana
ccacaaccaccacatct

SEQ ID NO: 70796 - DNA, 17 bp, Arabidopsis thaliana
ccacaactcccgaggcg

SEQ ID NO: 70797 - DNA, 17 bp, Arabidopsis thaliana
ccacaactgacacatca

SEQ ID NO: 70798 - DNA, 17 bp, Arabidopsis thaliana
ccacaactgctacatct

SEQ ID NO: 70799 - DNA, 17 bp, Arabidopsis thaliana
ccacaacttttagaccg

SEQ ID NO: 70800 - DNA, 17 bp, Arabidopsis thaliana
ccacaagcgataagaaa

SEQ ID NO: 70801 - DNA, 17 bp, Arabidopsis thaliana
ccacaagcgataagaat

SEQ ID NO: 70802 - DNA, 17 bp, Arabidopsis thaliana
ccacaaggatgttcttt

SEQ ID NO: 70803 - DNA, 17 bp, Arabidopsis thaliana
ccacaaggatgtttttt

SEQ ID NO: 70804 - DNA, 17 bp, Arabidopsis thaliana
ccacaagtagactcgga

SEQ ID NO: 70805 - DNA, 17 bp, Arabidopsis thaliana
ccacaagtcggctaggc

SEQ ID NO: 70806 - DNA, 17 bp, Arabidopsis thaliana
ccacaagtggtggacga

SEQ ID NO: 70807 - DNA, 17 bp, Arabidopsis thaliana
ccacaagttagcgtgtc

SEQ ID NO: 70808 - DNA, 17 bp, Arabidopsis thaliana
ccacaatccactgagat

SEQ ID NO: 70809 - DNA, 17 bp, Arabidopsis thaliana
ccacaattgatctacat

SEQ ID NO: 70810 - DNA, 17 bp, Arabidopsis thaliana
ccacaattgggatgttc

SEQ ID NO: 70811 - DNA, 17 bp, Arabidopsis thaliana
ccacacaacacttgatt

SEQ ID NO: 70812 - DNA, 17 bp, Arabidopsis thaliana
ccacacatattatgagg

SEQ ID NO: 70813 - DNA, 17 bp, Arabidopsis thaliana
ccacacatctatgggac

SEQ ID NO: 70814 - DNA, 17 bp, Arabidopsis thaliana
ccacaccaaagattcgt

SEQ ID NO: 70815 - DNA, 17 bp, Arabidopsis thaliana
ccacaccacaaaacgct

SEQ ID NO: 70816 - DNA, 17 bp, Arabidopsis thaliana
ccacaccactcggccca

SEQ ID NO: 70817 - DNA, 17 bp, Arabidopsis thaliana
ccacaccccctcctttt

SEQ ID NO: 70818 - DNA, 17 bp, Arabidopsis thaliana
ccacacccgttgaccat

SEQ ID NO: 70819 - DNA, 17 bp, Arabidopsis thaliana
ccacacgacggacggtc

SEQ ID NO: 70820 - DNA, 17 bp, Arabidopsis thaliana
ccacacggactctatgg

SEQ ID NO: 70821 - DNA, 17 bp, Arabidopsis thaliana
ccacacggactctattg

SEQ ID NO: 70822 - DNA, 17 bp, Arabidopsis thaliana
ccacacggctctcggct

SEQ ID NO: 70823 - DNA, 17 bp, Arabidopsis thaliana
ccacacggtttatggtt

SEQ ID NO: 70824 - DNA, 17 bp, Arabidopsis thaliana
ccacactagaaagggca

SEQ ID NO: 70825 - DNA, 17 bp, Arabidopsis thaliana
ccacactccgtctccgg

SEQ ID NO: 70826 - DNA, 17 bp, Arabidopsis thaliana
ccacactgggactgaga

SEQ ID NO: 70827 - DNA, 17 bp, Arabidopsis thaliana
ccacactgtctgtcccg

SEQ ID NO: 70828 - DNA, 17 bp, Arabidopsis thaliana
ccacactttttggctct

SEQ ID NO: 70829 - DNA, 17 bp, Arabidopsis thaliana
ccacagaaacgattcag

SEQ ID NO: 70830 - DNA, 17 bp, Arabidopsis thaliana
ccacagaagatttcctt

SEQ ID NO: 70831 - DNA, 17 bp, Arabidopsis thaliana
ccacagacggcgatttg

SEQ ID NO: 70832 - DNA, 17 bp, Arabidopsis thaliana
ccacagatccgtcgtac

SEQ ID NO: 70833 - DNA, 17 bp, Arabidopsis thaliana
ccacagatctgtctatc

SEQ ID NO: 70834 - DNA, 17 bp, Arabidopsis thaliana
ccacagattgaccgata

SEQ ID NO: 70835 - DNA, 17 bp, Arabidopsis thaliana
ccacagcaccaggactt

SEQ ID NO: 70836 - DNA, 17 bp, Arabidopsis thaliana
ccacagccctttgtcgc

SEQ ID NO: 70837 - DNA, 17 bp, Arabidopsis thaliana
ccacagcgaatggttca

SEQ ID NO: 70838 - DNA, 17 bp, Arabidopsis thaliana
ccacagcggatgttgct

SEQ ID NO: 70839 - DNA, 17 bp, Arabidopsis thaliana
ccacagcttcggaagct

SEQ ID NO: 70840 - DNA, 17 bp, Arabidopsis thaliana
ccacaggatttgttggc

SEQ ID NO: 70841 - DNA, 17 bp, Arabidopsis thaliana
ccacaggcataactggc

SEQ ID NO: 70842 - DNA, 17 bp, Arabidopsis thaliana
ccacaggcgacaggtgt

SEQ ID NO: 70843 - DNA, 17 bp, Arabidopsis thaliana
ccacagggataactggc

SEQ ID NO: 70844 - DNA, 17 bp, Arabidopsis thaliana
ccacagggataactggt

SEQ ID NO: 70845 - DNA, 17 bp, Arabidopsis thaliana
ccacagggtcagttctt

SEQ ID NO: 70846 - DNA, 17 bp, Arabidopsis thaliana
ccacaggtaatccgaag

SEQ ID NO: 70847 - DNA, 17 bp, Arabidopsis thaliana
ccacaggtataactgga

SEQ ID NO: 70848 - DNA, 17 bp, Arabidopsis thaliana
ccacaggtggtgcatgg

SEQ ID NO: 70849 - DNA, 17 bp, Arabidopsis thaliana
ccacaggttcgttccct

SEQ ID NO: 70850 - DNA, 17 bp, Arabidopsis thaliana
ccacagtcgtggatgtc

SEQ ID NO: 70851 - DNA, 17 bp, Arabidopsis thaliana
ccacagtcgtgtgagtg

SEQ ID NO: 70852 - DNA, 17 bp, Arabidopsis thaliana
ccacagttaagcgtgct

SEQ ID NO: 70853 - DNA, 17 bp, Arabidopsis thaliana
ccacagttgcttaggct

SEQ ID NO: 70854 - DNA, 17 bp, Arabidopsis thaliana
ccacatacagcattgct

SEQ ID NO: 70855 - DNA, 17 bp, Arabidopsis thaliana
ccacatatcaccgcttc

SEQ ID NO: 70856 - DNA, 17 bp, Arabidopsis thaliana
ccacatcaagggaatgc

SEQ ID NO: 70857 - DNA, 17 bp, Arabidopsis thaliana
ccacatcaccggagcta

SEQ ID NO: 70858 - DNA, 17 bp, Arabidopsis thaliana
ccacatccaaggaaggc

SEQ ID NO: 70859 - DNA, 17 bp, Arabidopsis thaliana
ccacatcgaaagttgaa

SEQ ID NO: 70860 - DNA, 17 bp, Arabidopsis thaliana
ccacatcgatgttctct

SEQ ID NO: 70861 - DNA, 17 bp, Arabidopsis thaliana
ccacatcggaagttgag

SEQ ID NO: 70862 - DNA, 17 bp, Arabidopsis thaliana
ccacatcggcacacagc

SEQ ID NO: 70863 - DNA, 17 bp, Arabidopsis thaliana
ccacatcttagcgctac

SEQ ID NO: 70864 - DNA, 17 bp, Arabidopsis thaliana
ccacatgctgtttccat

SEQ ID NO: 70865 - DNA, 17 bp, Arabidopsis thaliana
ccacatgggtgggttaa

SEQ ID NO: 70866 - DNA, 17 bp, Arabidopsis thaliana
ccacatgtattagattc

SEQ ID NO: 70867 - DNA, 17 bp, Arabidopsis thaliana
ccacatgtcatgatctc

SEQ ID NO: 70868 - DNA, 17 bp, Arabidopsis thaliana
ccacatgtgtcaagatc

SEQ ID NO: 70869 - DNA, 17 bp, Arabidopsis thaliana
ccacattgactaaatcc

SEQ ID NO: 70870 - DNA, 17 bp, Arabidopsis thaliana
ccacatttattctattt

SEQ ID NO: 70871 - DNA, 17 bp, Arabidopsis thaliana
ccacatttccgcgacgt

SEQ ID NO: 70872 - DNA, 17 bp, Arabidopsis thaliana
ccacatttgactttgac

SEQ ID NO: 70873 - DNA, 17 bp, Arabidopsis thaliana
ccacatttgactttgcc

SEQ ID NO: 70874 - DNA, 17 bp, Arabidopsis thaliana
ccacatttggatgggaa

SEQ ID NO: 70875 - DNA, 17 bp, Arabidopsis thaliana
ccaccaactccggccac

SEQ ID NO: 70876 - DNA, 17 bp, Arabidopsis thaliana
ccaccaaggatgacttg

SEQ ID NO: 70877 - DNA, 17 bp, Arabidopsis thaliana
ccaccaatccggctatg

SEQ ID NO: 70878 - DNA, 17 bp, Arabidopsis thaliana
ccaccaccaacgtcacc

SEQ ID NO: 70879 - DNA, 17 bp, Arabidopsis thaliana
ccaccaccagcgccgcc

SEQ ID NO: 70880 - DNA, 17 bp, Arabidopsis thaliana
ccaccaccaggagtgga

SEQ ID NO: 70881 - DNA, 17 bp, Arabidopsis thaliana
ccaccaccggaaccttt

SEQ ID NO: 70882 - DNA, 17 bp, Arabidopsis thaliana
ccaccaccgtcgggctt

SEQ ID NO: 70883 - DNA, 17 bp, Arabidopsis thaliana
ccaccacctggatttgc

SEQ ID NO: 70884 - DNA, 17 bp, Arabidopsis thaliana
ccaccacgtgatcaccg

SEQ ID NO: 70885 - DNA, 17 bp, Arabidopsis thaliana
ccaccagagaatgggcc

SEQ ID NO: 70886 - DNA, 17 bp, Arabidopsis thaliana
ccaccagcaagaccgtc

SEQ ID NO: 70887 - DNA, 17 bp, Arabidopsis thaliana
ccaccagctcagatggt

SEQ ID NO: 70888 - DNA, 17 bp, Arabidopsis thaliana
ccaccaggagtggagcc

SEQ ID NO: 70889 - DNA, 17 bp, Arabidopsis thaliana
ccaccaggagtggagtc

SEQ ID NO: 70890 - DNA, 17 bp, Arabidopsis thaliana
ccaccagttccagggga

SEQ ID NO: 70891 - DNA, 17 bp, Arabidopsis thaliana
ccaccagttccaggggg

SEQ ID NO: 70892 - DNA, 17 bp, Arabidopsis thaliana
ccaccagttgacctagt

SEQ ID NO: 70893 - DNA, 17 bp, Arabidopsis thaliana
ccaccagtttgttgtcc

SEQ ID NO: 70894 - DNA, 17 bp, Arabidopsis thaliana
ccaccataacgaccatc

SEQ ID NO: 70895 - DNA, 17 bp, Arabidopsis thaliana
ccaccatataacttcat

SEQ ID NO: 70896 - DNA, 17 bp, Arabidopsis thaliana
ccaccatattcctaaaa

SEQ ID NO: 70897 - DNA, 17 bp, Arabidopsis thaliana
ccaccatcaaccactgc

SEQ ID NO: 70898 - DNA, 17 bp, Arabidopsis thaliana
ccaccatcgctagttgc

SEQ ID NO: 70899 - DNA, 17 bp, Arabidopsis thaliana
ccaccatcggtttggac

SEQ ID NO: 70900 - DNA, 17 bp, Arabidopsis thaliana
ccaccatctccgacccc

SEQ ID NO: 70901 - DNA, 17 bp, Arabidopsis thaliana
ccaccatctcgccttcg

SEQ ID NO: 70902 - DNA, 17 bp, Arabidopsis thaliana
ccaccatctggtaatct

SEQ ID NO: 70903 - DNA, 17 bp, Arabidopsis thaliana
ccaccatgctgttgacc

SEQ ID NO: 70904 - DNA, 17 bp, Arabidopsis thaliana
ccaccattactgctggt

SEQ ID NO: 70905 - DNA, 17 bp, Arabidopsis thaliana
ccaccattatcgctatc

SEQ ID NO: 70906 - DNA, 17 bp, Arabidopsis thaliana
ccaccatttgatgtcgg

SEQ ID NO: 70907 - DNA, 17 bp, Arabidopsis thaliana
ccaccatttttgtgagc

SEQ ID NO: 70908 - DNA, 17 bp, Arabidopsis thaliana
ccacccaaactcgtcct

SEQ ID NO: 70909 - DNA, 17 bp, Arabidopsis thaliana
ccacccaaactctgacc

SEQ ID NO: 70910 - DNA, 17 bp, Arabidopsis thaliana
ccacccaaacttggcct

SEQ ID NO: 70911 - DNA, 17 bp, Arabidopsis thaliana
ccacccaaagacgaatg

SEQ ID NO: 70912 - DNA, 17 bp, Arabidopsis thaliana
ccacccaaaggccttac

SEQ ID NO: 70913 - DNA, 17 bp, Arabidopsis thaliana
ccacccaaagtatgatc

SEQ ID NO: 70914 - DNA, 17 bp, Arabidopsis thaliana
ccacccaacggataatg

SEQ ID NO: 70915 - DNA, 17 bp, Arabidopsis thaliana
ccacccaactttgtatg

SEQ ID NO: 70916 - DNA, 17 bp, Arabidopsis thaliana
ccacccaaggtcaacga

SEQ ID NO: 70917 - DNA, 17 bp, Arabidopsis thaliana
ccacccaatagggaacg

SEQ ID NO: 70918 - DNA, 17 bp, Arabidopsis thaliana
ccacccaatcagaccca

SEQ ID NO: 70919 - DNA, 17 bp, Arabidopsis thaliana
ccacccacaactgctac

SEQ ID NO: 70920 - DNA, 17 bp, Arabidopsis thaliana
ccacccacagggataac

SEQ ID NO: 70921 - DNA, 17 bp, Arabidopsis thaliana
ccacccacaggtaatcc

SEQ ID NO: 70922 - DNA, 17 bp, Arabidopsis thaliana
ccacccaccaccggaac

SEQ ID NO: 70923 - DNA, 17 bp, Arabidopsis thaliana
ccacccaccaggagtgg

SEQ ID NO: 70924 - DNA, 17 bp, Arabidopsis thaliana
ccacccacccacccacc

SEQ ID NO: 70925 - DNA, 17 bp, Arabidopsis thaliana
ccacccaccctggaaac

SEQ ID NO: 70926 - DNA, 17 bp, Arabidopsis thaliana
ccacccaccgagcggcg

SEQ ID NO: 70927 - DNA, 17 bp, Arabidopsis thaliana
ccacccaccttgcaagg

SEQ ID NO: 70928 - DNA, 17 bp, Arabidopsis thaliana
ccacccacggactaact

SEQ ID NO: 70929 - DNA, 17 bp, Arabidopsis thaliana
ccacccacggtacagac

SEQ ID NO: 70930 - DNA, 17 bp, Arabidopsis thaliana
ccacccacggtggggtc

SEQ ID NO: 70931 - DNA, 17 bp, Arabidopsis thaliana
ccacccactaacgctaa

SEQ ID NO: 70932 - DNA, 17 bp, Arabidopsis thaliana
ccacccactgagattca

SEQ ID NO: 70933 - DNA, 17 bp, Arabidopsis thaliana
ccacccactgcttctga

SEQ ID NO: 70934 - DNA, 17 bp, Arabidopsis thaliana
ccacccactgtccctgt

SEQ ID NO: 70935 - DNA, 17 bp, Arabidopsis thaliana
ccacccacttccaattg

SEQ ID NO: 70936 - DNA, 17 bp, Arabidopsis thaliana
ccacccactttgatacg

SEQ ID NO: 70937 - DNA, 17 bp, Arabidopsis thaliana
ccacccacttttggcaa

SEQ ID NO: 70938 - DNA, 17 bp, Arabidopsis thaliana
ccacccagcgacagcaa

SEQ ID NO: 70939 - DNA, 17 bp, Arabidopsis thaliana
ccacccagcgacagcga

SEQ ID NO: 70940 - DNA, 17 bp, Arabidopsis thaliana
ccacccagcgacctggg

SEQ ID NO: 70941 - DNA, 17 bp, Arabidopsis thaliana
ccacccagctcactccg

SEQ ID NO: 70942 - DNA, 17 bp, Arabidopsis thaliana
ccacccaggagacccgg

SEQ ID NO: 70943 - DNA, 17 bp, Arabidopsis thaliana
ccacccaggagtggagc

SEQ ID NO: 70944 - DNA, 17 bp, Arabidopsis thaliana
ccacccagtgccgctac

SEQ ID NO: 70945 - DNA, 17 bp, Arabidopsis thaliana
ccacccagttcaaatct

SEQ ID NO: 70946 - DNA, 17 bp, Arabidopsis thaliana
ccacccatagactattg

SEQ ID NO: 70947 - DNA, 17 bp, Arabidopsis thaliana
ccacccatatcgatgta

SEQ ID NO: 70948 - DNA, 17 bp, Arabidopsis thaliana
ccacccattcggagctt

SEQ ID NO: 70949 - DNA, 17 bp, Arabidopsis thaliana
ccacccattgacttttt

SEQ ID NO: 70950 - DNA, 17 bp, Arabidopsis thaliana
ccacccattgtcgtcca

SEQ ID NO: 70951 - DNA, 17 bp, Arabidopsis thaliana
ccacccatttgatcgcc

SEQ ID NO: 70952 - DNA, 17 bp, Arabidopsis thaliana
ccaccccaagaagagtg

SEQ ID NO: 70953 - DNA, 17 bp, Arabidopsis thaliana
ccaccccaagatgagta

SEQ ID NO: 70954 - DNA, 17 bp, Arabidopsis thaliana
ccaccccaagatgagtg

SEQ ID NO: 70955 - DNA, 17 bp, Arabidopsis thaliana
ccacccgccgtctacag

SEQ ID NO: 70956 - DNA, 17 bp, Arabidopsis thaliana
ccacccgtcgagcaggg

SEQ ID NO: 70957 - DNA, 17 bp, Arabidopsis thaliana
ccaccctggaaacggcc

SEQ ID NO: 70958 - DNA, 17 bp, Arabidopsis thaliana
ccaccctggaaacggct

SEQ ID NO: 70959 - DNA, 17 bp, Arabidopsis thaliana
ccacccttgaaagagtg

SEQ ID NO: 70960 - DNA, 17 bp, Arabidopsis thaliana
ccaccctttgtcgctaa

SEQ ID NO: 70961 - DNA, 17 bp, Arabidopsis thaliana
ccaccgaaacccccccc

SEQ ID NO: 70962 - DNA, 17 bp, Arabidopsis thaliana
ccaccgagcggcgggta

SEQ ID NO: 70963 - DNA, 17 bp, Arabidopsis thaliana
ccaccgccttttccgta

SEQ ID NO: 70964 - DNA, 17 bp, Arabidopsis thaliana
ccaccggaccttgccaa

SEQ ID NO: 70965 - DNA, 17 bp, Arabidopsis thaliana
ccaccggagccgtgcac

SEQ ID NO: 70966 - DNA, 17 bp, Arabidopsis thaliana
ccaccggcatcgacttt

SEQ ID NO: 70967 - DNA, 17 bp, Arabidopsis thaliana
ccaccgggtcgagtaac

SEQ ID NO: 70968 - DNA, 17 bp, Arabidopsis thaliana
ccaccggttgcataggc

SEQ ID NO: 70969 - DNA, 17 bp, Arabidopsis thaliana
ccaccgtcagatcaatg

SEQ ID NO: 70970 - DNA, 17 bp, Arabidopsis thaliana
ccaccgtctacgattgg

SEQ ID NO: 70971 - DNA, 17 bp, Arabidopsis thaliana
ccaccgtctcacgctgc

SEQ ID NO: 70972 - DNA, 17 bp, Arabidopsis thaliana
ccacctaagttgtgttt

SEQ ID NO: 70973 - DNA, 17 bp, Arabidopsis thaliana
ccacctaatgagagtct

SEQ ID NO: 70974 - DNA, 17 bp, Arabidopsis thaliana
ccacctactaagattat

SEQ ID NO: 70975 - DNA, 17 bp, Arabidopsis thaliana
ccacctaggagagcccg

SEQ ID NO: 70976 - DNA, 17 bp, Arabidopsis thaliana
ccacctagtgactggtt

SEQ ID NO: 70977 - DNA, 17 bp, Arabidopsis thaliana
ccacctatagccaattg

SEQ ID NO: 70978 - DNA, 17 bp, Arabidopsis thaliana
ccacctcccgaggtttg

SEQ ID NO: 70979 - DNA, 17 bp, Arabidopsis thaliana
ccacctgacccacgctc

SEQ ID NO: 70980 - DNA, 17 bp, Arabidopsis thaliana
ccacctgcatttatgac

SEQ ID NO: 70981 - DNA, 17 bp, Arabidopsis thaliana
ccacctgcatttttgac

SEQ ID NO: 70982 - DNA, 17 bp, Arabidopsis thaliana
ccacctgccatgtaggg

SEQ ID NO: 70983 - DNA, 17 bp, Arabidopsis thaliana
ccacctgggactgttga

SEQ ID NO: 70984 - DNA, 17 bp, Arabidopsis thaliana
ccaccttcatgttcctt

SEQ ID NO: 70985 - DNA, 17 bp, Arabidopsis thaliana
ccacctttccgatgtgg

SEQ ID NO: 70986 - DNA, 17 bp, Arabidopsis thaliana
ccacgaagaacagttat

SEQ ID NO: 70987 - DNA, 17 bp, Arabidopsis thaliana
ccacgaagctaactatc

SEQ ID NO: 70988 - DNA, 17 bp, Arabidopsis thaliana
ccacgaagctttcatag

SEQ ID NO: 70989 - DNA, 17 bp, Arabidopsis thaliana
ccacgaatctatgagac

SEQ ID NO: 70990 - DNA, 17 bp, Arabidopsis thaliana
ccacgacaaatggatca

SEQ ID NO: 70991 - DNA, 17 bp, Arabidopsis thaliana
ccacgacagcggcagcg

SEQ ID NO: 70992 - DNA, 17 bp, Arabidopsis thaliana
ccacgacgcggattacg

SEQ ID NO: 70993 - DNA, 17 bp, Arabidopsis thaliana
ccacgacgtcgcgagaa

SEQ ID NO: 70994 - DNA, 17 bp, Arabidopsis thaliana
ccacgactcccgaggcg

SEQ ID NO: 70995 - DNA, 17 bp, Arabidopsis thaliana
ccacgagctggaggctg

SEQ ID NO: 70996 - DNA, 17 bp, Arabidopsis thaliana
ccacgaggcgctgtcta

SEQ ID NO: 70997 - DNA, 17 bp, Arabidopsis thaliana
ccacgagggcacgtctg

SEQ ID NO: 70998 - DNA, 17 bp, Arabidopsis thaliana
ccacgagggcgattcgt

SEQ ID NO: 70999 - DNA, 17 bp, Arabidopsis thaliana
ccacgaggttgaacgcc

SEQ ID NO: 71000 - DNA, 17 bp, Arabidopsis thaliana
ccacgagtaccaagtgt

SEQ ID NO: 71001 - DNA, 17 bp, Arabidopsis thaliana
ccacgagtttggcctta

SEQ ID NO: 71002 - DNA, 17 bp, Arabidopsis thaliana
ccacgatcacggcagcg

SEQ ID NO: 71003 - DNA, 17 bp, Arabidopsis thaliana
ccacgatccactgagat

SEQ ID NO: 71004 - DNA, 17 bp, Arabidopsis thaliana
ccacgatccactgagct

SEQ ID NO: 71005 - DNA, 17 bp, Arabidopsis thaliana
ccacgatggagagggac

SEQ ID NO: 71006 - DNA, 17 bp, Arabidopsis thaliana
ccacgatggagagggag

SEQ ID NO: 71007 - DNA, 17 bp, Arabidopsis thaliana
ccacgatgtcggctgat

SEQ ID NO: 71008 - DNA, 17 bp, Arabidopsis thaliana
ccacgattggctcgggc

SEQ ID NO: 71009 - DNA, 17 bp, Arabidopsis thaliana
ccacgattttgtagttg

SEQ ID NO: 71010 - DNA, 17 bp, Arabidopsis thaliana
ccacgcaaaagccgttt

SEQ ID NO: 71011 - DNA, 17 bp, Arabidopsis thaliana
ccacgctacactgtgca

SEQ ID NO: 71012 - DNA, 17 bp, Arabidopsis thaliana
ccacggacaatatgggc

SEQ ID NO: 71013 - DNA, 17 bp, Arabidopsis thaliana
ccacggactaactgtgg

SEQ ID NO: 71014 - DNA, 17 bp, Arabidopsis thaliana
ccacggactgcccagac

SEQ ID NO: 71015 - DNA, 17 bp, Arabidopsis thaliana
ccacggactgcccagcc

SEQ ID NO: 71016 - DNA, 17 bp, Arabidopsis thaliana
ccacggactgcctagac

SEQ ID NO: 71017 - DNA, 17 bp, Arabidopsis thaliana
ccacggactgttcagac

SEQ ID NO: 71018 - DNA, 17 bp, Arabidopsis thaliana
ccacggatcagaatgct

SEQ ID NO: 71019 - DNA, 17 bp, Arabidopsis thaliana
ccacggattacggtggc

SEQ ID NO: 71020 - DNA, 17 bp, Arabidopsis thaliana
ccacgggatgttgggct

SEQ ID NO: 71021 - DNA, 17 bp, Arabidopsis thaliana
ccacgggccgacttcag

SEQ ID NO: 71022 - DNA, 17 bp, Arabidopsis thaliana
ccacgggtagtctcagg

SEQ ID NO: 71023 - DNA, 17 bp, Arabidopsis thaliana
ccacgggtattagattc

SEQ ID NO: 71024 - DNA, 17 bp, Arabidopsis thaliana
ccacgggtctgagacct

SEQ ID NO: 71025 - DNA, 17 bp, Arabidopsis thaliana
ccacgggtgttagattc

SEQ ID NO: 71026 - DNA, 17 bp, Arabidopsis thaliana
ccacgggtgttggtcga

SEQ ID NO: 71027 - DNA, 17 bp, Arabidopsis thaliana
ccacgggttgcccatat

SEQ ID NO: 71028 - DNA, 17 bp, Arabidopsis thaliana
ccacgggtttacgtttt

SEQ ID NO: 71029 - DNA, 17 bp, Arabidopsis thaliana
ccacggtacagacccgg

SEQ ID NO: 71030 - DNA, 17 bp, Arabidopsis thaliana
ccacggtactgaccagg

SEQ ID NO: 71031 - DNA, 17 bp, Arabidopsis thaliana
ccacggtccaaacatct

SEQ ID NO: 71032 - DNA, 17 bp, Arabidopsis thaliana
ccacggtgataatagag

SEQ ID NO: 71033 - DNA, 17 bp, Arabidopsis thaliana
ccacggtggggtcttcg

SEQ ID NO: 71034 - DNA, 17 bp, Arabidopsis thaliana
ccacggtttacggtcta

SEQ ID NO: 71035 - DNA, 17 bp, Arabidopsis thaliana
ccacgtatcctaacact

SEQ ID NO: 71036 - DNA, 17 bp, Arabidopsis thaliana
ccacgtcatcagttgct

SEQ ID NO: 71037 - DNA, 17 bp, Arabidopsis thaliana
ccacgtcgtccacactg

SEQ ID NO: 71038 - DNA, 17 bp, Arabidopsis thaliana
ccacgtctgcctgcctg

SEQ ID NO: 71039 - DNA, 17 bp, Arabidopsis thaliana
ccacgtctgcctgcgtg

SEQ ID NO: 71040 - DNA, 17 bp, Arabidopsis thaliana
ccacgtctgcctgggtc

SEQ ID NO: 71041 - DNA, 17 bp, Arabidopsis thaliana
ccacgtctgcctgggtg

SEQ ID NO: 71042 - DNA, 17 bp, Arabidopsis thaliana
ccacgtctgcctgtcac

SEQ ID NO: 71043 - DNA, 17 bp, Arabidopsis thaliana
ccacgtctgtcaggtaa

SEQ ID NO: 71044 - DNA, 17 bp, Arabidopsis thaliana
ccacgtctgtttgggtg

SEQ ID NO: 71045 - DNA, 17 bp, Arabidopsis thaliana
ccacgtcttctaaggcc

SEQ ID NO: 71046 - DNA, 17 bp, Arabidopsis thaliana
ccacgtggccgtgggtt

SEQ ID NO: 71047 - DNA, 17 bp, Arabidopsis thaliana
ccacgtgtcaagtctat

SEQ ID NO: 71048 - DNA, 17 bp, Arabidopsis thaliana
ccacgtgtgcgggtccc

SEQ ID NO: 71049 - DNA, 17 bp, Arabidopsis thaliana
ccacgtttcccggctgg

SEQ ID NO: 71050 - DNA, 17 bp, Arabidopsis thaliana
ccacgtttctgcaaaag

SEQ ID NO: 71051 - DNA, 17 bp, Arabidopsis thaliana
ccacgttttagccatta

SEQ ID NO: 71052 - DNA, 17 bp, Arabidopsis thaliana
ccactaaatcgcataac

SEQ ID NO: 71053 - DNA, 17 bp, Arabidopsis thaliana
ccactaacggccgcaaa

SEQ ID NO: 71054 - DNA, 17 bp, Arabidopsis thaliana
ccactaacttgtgatgt

SEQ ID NO: 71055 - DNA, 17 bp, Arabidopsis thaliana
ccactaagcagatttct

SEQ ID NO: 71056 - DNA, 17 bp, Arabidopsis thaliana
ccactaaggtccatgtc

SEQ ID NO: 71057 - DNA, 17 bp, Arabidopsis thaliana
ccactaaggttctactt

SEQ ID NO: 71058 - DNA, 17 bp, Arabidopsis thaliana
ccactaatccaggcgtt

SEQ ID NO: 71059 - DNA, 17 bp, Arabidopsis thaliana
ccactaatcgttgtttc

SEQ ID NO: 71060 - DNA, 17 bp, Arabidopsis thaliana
ccactaattccagagat

SEQ ID NO: 71061 - DNA, 17 bp, Arabidopsis thaliana
ccactacattcggaagt

SEQ ID NO: 71062 - DNA, 17 bp, Arabidopsis thaliana
ccactacgcagggtgat

SEQ ID NO: 71063 - DNA, 17 bp, Arabidopsis thaliana
ccactagaaccttcctt

SEQ ID NO: 71064 - DNA, 17 bp, Arabidopsis thaliana
ccactagattataaccc

SEQ ID NO: 71065 - DNA, 17 bp, Arabidopsis thaliana
ccactaggattgaacct

SEQ ID NO: 71066 - DNA, 17 bp, Arabidopsis thaliana
ccactaggctctaactg

SEQ ID NO: 71067 - DNA, 17 bp, Arabidopsis thaliana
ccactagtgctgctatt

SEQ ID NO: 71068 - DNA, 17 bp, Arabidopsis thaliana
ccactatggcctgatgg

SEQ ID NO: 71069 - DNA, 17 bp, Arabidopsis thaliana
ccactattatctcagtg

SEQ ID NO: 71070 - DNA, 17 bp, Arabidopsis thaliana
ccactatttcctgcgtc

SEQ ID NO: 71071 - DNA, 17 bp, Arabidopsis thaliana
ccactcagattcaccat

SEQ ID NO: 71072 - DNA, 17 bp, Arabidopsis thaliana
ccactcagtcaggtggt

SEQ ID NO: 71073 - DNA, 17 bp, Arabidopsis thaliana
ccactcatcacggtgca

SEQ ID NO: 71074 - DNA, 17 bp, Arabidopsis thaliana
ccactcatcctggagtt

SEQ ID NO: 71075 - DNA, 17 bp, Arabidopsis thaliana
ccactcatcgggagtgt

SEQ ID NO: 71076 - DNA, 17 bp, Arabidopsis thaliana
ccactccaactccgccg

SEQ ID NO: 71077 - DNA, 17 bp, Arabidopsis thaliana
ccactccggatcttctt

SEQ ID NO: 71078 - DNA, 17 bp, Arabidopsis thaliana
ccactccgggccttctg

SEQ ID NO: 71079 - DNA, 17 bp, Arabidopsis thaliana
ccactcgaacccagagc

SEQ ID NO: 71080 - DNA, 17 bp, Arabidopsis thaliana
ccactcgaccatcttca

SEQ ID NO: 71081 - DNA, 17 bp, Arabidopsis thaliana
ccactcgaccatgtgta

SEQ ID NO: 71082 - DNA, 17 bp, Arabidopsis thaliana
ccactcgaccgcgtttc

SEQ ID NO: 71083 - DNA, 17 bp, Arabidopsis thaliana
ccactcgaccgtctcat

SEQ ID NO: 71084 - DNA, 17 bp, Arabidopsis thaliana
ccactctaatcgcttca

SEQ ID NO: 71085 - DNA, 17 bp, Arabidopsis thaliana
ccactctaccacaagga

SEQ ID NO: 71086 - DNA, 17 bp, Arabidopsis thaliana
ccactctcaccggcgag

SEQ ID NO: 71087 - DNA, 17 bp, Arabidopsis thaliana
ccactctcgtgacagag

SEQ ID NO: 71088 - DNA, 17 bp, Arabidopsis thaliana
ccactctggattcgctg

SEQ ID NO: 71089 - DNA, 17 bp, Arabidopsis thaliana
ccactctgtcgcagatt

SEQ ID NO: 71090 - DNA, 17 bp, Arabidopsis thaliana
ccactctgtttgctcaa

SEQ ID NO: 71091 - DNA, 17 bp, Arabidopsis thaliana
ccactgaacggggttag

SEQ ID NO: 71092 - DNA, 17 bp, Arabidopsis thaliana
ccactgaattctacgtg

SEQ ID NO: 71093 - DNA, 17 bp, Arabidopsis thaliana
ccactgaattgtgaacc

SEQ ID NO: 71094 - DNA, 17 bp, Arabidopsis thaliana
ccactgaccattcgccg

SEQ ID NO: 71095 - DNA, 17 bp, Arabidopsis thaliana
ccactgactaaaccacc

SEQ ID NO: 71096 - DNA, 17 bp, Arabidopsis thaliana
ccactgactttttgtcg

SEQ ID NO: 71097 - DNA, 17 bp, Arabidopsis thaliana
ccactgagacaactaag

SEQ ID NO: 71098 - DNA, 17 bp, Arabidopsis thaliana
ccactgagattcagccc

SEQ ID NO: 71099 - DNA, 17 bp, Arabidopsis thaliana
ccactgagattcagcct

SEQ ID NO: 71100 - DNA, 17 bp, Arabidopsis thaliana
ccactgagattcagctt

SEQ ID NO: 71101 - DNA, 17 bp, Arabidopsis thaliana
ccactgagattcagtcc

SEQ ID NO: 71102 - DNA, 17 bp, Arabidopsis thaliana
ccactgaggttcagccc

SEQ ID NO: 71103 - DNA, 17 bp, Arabidopsis thaliana
ccactgatagtaccgct

SEQ ID NO: 71104 - DNA, 17 bp, Arabidopsis thaliana
ccactgcagatttcgaa

SEQ ID NO: 71105 - DNA, 17 bp, Arabidopsis thaliana
ccactgcgagtttgtga

SEQ ID NO: 71106 - DNA, 17 bp, Arabidopsis thaliana
ccactgcgcttcactga

SEQ ID NO: 71107 - DNA, 17 bp, Arabidopsis thaliana
ccactgctgggtttgaa

SEQ ID NO: 71108 - DNA, 17 bp, Arabidopsis thaliana
ccactgcttctgaagct

SEQ ID NO: 71109 - DNA, 17 bp, Arabidopsis thaliana
ccactgcttctgaagtt

SEQ ID NO: 71110 - DNA, 17 bp, Arabidopsis thaliana
ccactgcttttctatgg

SEQ ID NO: 71111 - DNA, 17 bp, Arabidopsis thaliana
ccactggagttggtcga

SEQ ID NO: 71112 - DNA, 17 bp, Arabidopsis thaliana
ccactggatcaatgagg

SEQ ID NO: 71113 - DNA, 17 bp, Arabidopsis thaliana
ccactggatctgttccc

SEQ ID NO: 71114 - DNA, 17 bp, Arabidopsis thaliana
ccactggatgatccaac

SEQ ID NO: 71115 - DNA, 17 bp, Arabidopsis thaliana
ccactggattctcgtac

SEQ ID NO: 71116 - DNA, 17 bp, Arabidopsis thaliana
ccactggattggcaatg

SEQ ID NO: 71117 - DNA, 17 bp, Arabidopsis thaliana
ccactgggtgatgtgtg

SEQ ID NO: 71118 - DNA, 17 bp, Arabidopsis thaliana
ccactggtacggacaag

SEQ ID NO: 71119 - DNA, 17 bp, Arabidopsis thaliana
ccactggtcctggattc

SEQ ID NO: 71120 - DNA, 17 bp, Arabidopsis thaliana
ccactggtttgataggg

SEQ ID NO: 71121 - DNA, 17 bp, Arabidopsis thaliana
ccactgtcaccactcgg

SEQ ID NO: 71122 - DNA, 17 bp, Arabidopsis thaliana
ccactgtccctgtctac

SEQ ID NO: 71123 - DNA, 17 bp, Arabidopsis thaliana
ccactgtctgatgatca

SEQ ID NO: 71124 - DNA, 17 bp, Arabidopsis thaliana
ccactgtgggctctcca

SEQ ID NO: 71125 - DNA, 17 bp, Arabidopsis thaliana
ccactgtggtgatcctt

SEQ ID NO: 71126 - DNA, 17 bp, Arabidopsis thaliana
ccactgtgtgaatacca

SEQ ID NO: 71127 - DNA, 17 bp, Arabidopsis thaliana
ccactgttgaagcatcg

SEQ ID NO: 71128 - DNA, 17 bp, Arabidopsis thaliana
ccactgttgcggtgcgg

SEQ ID NO: 71129 - DNA, 17 bp, Arabidopsis thaliana
ccacttaacaggcgttg

SEQ ID NO: 71130 - DNA, 17 bp, Arabidopsis thaliana
ccacttaagatccgatg

SEQ ID NO: 71131 - DNA, 17 bp, Arabidopsis thaliana
ccacttaaggattccac

SEQ ID NO: 71132 - DNA, 17 bp, Arabidopsis thaliana
ccacttaatcagcttcg

SEQ ID NO: 71133 - DNA, 17 bp, Arabidopsis thaliana
ccacttagcgtggagag

SEQ ID NO: 71134 - DNA, 17 bp, Arabidopsis thaliana
ccacttattgccaattg

SEQ ID NO: 71135 - DNA, 17 bp, Arabidopsis thaliana
ccacttcaccagtttta

SEQ ID NO: 71136 - DNA, 17 bp, Arabidopsis thaliana
ccacttcatccgagggg

SEQ ID NO: 71137 - DNA, 17 bp, Arabidopsis thaliana
ccacttccaattgggct

SEQ ID NO: 71138 - DNA, 17 bp, Arabidopsis thaliana
ccacttccttggttgtg

SEQ ID NO: 71139 - DNA, 17 bp, Arabidopsis thaliana
ccacttcggttttcggc

SEQ ID NO: 71140 - DNA, 17 bp, Arabidopsis thaliana
ccacttcggttttcggt

SEQ ID NO: 71141 - DNA, 17 bp, Arabidopsis thaliana
ccacttctccgatgaag

SEQ ID NO: 71142 - DNA, 17 bp, Arabidopsis thaliana
ccacttctcctcgatcg

SEQ ID NO: 71143 - DNA, 17 bp, Arabidopsis thaliana
ccacttctgcctgggtg

SEQ ID NO: 71144 - DNA, 17 bp, Arabidopsis thaliana
ccacttgggagatttat

SEQ ID NO: 71145 - DNA, 17 bp, Arabidopsis thaliana
ccacttggtgcaggtcg

SEQ ID NO: 71146 - DNA, 17 bp, Arabidopsis thaliana
ccacttgtatgggccac

SEQ ID NO: 71147 - DNA, 17 bp, Arabidopsis thaliana
ccactttctcatggaat

SEQ ID NO: 71148 - DNA, 17 bp, Arabidopsis thaliana
ccactttctgggctgta

SEQ ID NO: 71149 - DNA, 17 bp, Arabidopsis thaliana
ccactttgatacgtagt

SEQ ID NO: 71150 - DNA, 17 bp, Arabidopsis thaliana
ccactttgcagtttgag

SEQ ID NO: 71151 - DNA, 17 bp, Arabidopsis thaliana
ccactttgcttctagtt

SEQ ID NO: 71152 - DNA, 17 bp, Arabidopsis thaliana
ccactttggcattcagg

SEQ ID NO: 71153 - DNA, 17 bp, Arabidopsis thaliana
ccactttggtgattggc

SEQ ID NO: 71154 - DNA, 17 bp, Arabidopsis thaliana
ccactttggttggatgt

SEQ ID NO: 71155 - DNA, 17 bp, Arabidopsis thaliana
ccacttttacatttgca

SEQ ID NO: 71156 - DNA, 17 bp, Arabidopsis thaliana
ccacttttacatttgta

SEQ ID NO: 71157 - DNA, 17 bp, Arabidopsis thaliana
ccacttttgccgatgga

SEQ ID NO: 71158 - DNA, 17 bp, Arabidopsis thaliana
ccacttttggcaaactg

SEQ ID NO: 71159 - DNA, 17 bp, Arabidopsis thaliana
ccacttttgttgatcac

SEQ ID NO: 71160 - DNA, 17 bp, Arabidopsis thaliana
ccactttttctgcactt

SEQ ID NO: 71161 - DNA, 17 bp, Arabidopsis thaliana
ccagaaaaccgaataac

SEQ ID NO: 71162 - DNA, 17 bp, Arabidopsis thaliana
ccagaaaactacttggg

SEQ ID NO: 71163 - DNA, 17 bp, Arabidopsis thaliana
ccagaaaactgggtggt

SEQ ID NO: 71164 - DNA, 17 bp, Arabidopsis thaliana
ccagaaaaggccggatt

SEQ ID NO: 71165 - DNA, 17 bp, Arabidopsis thaliana
ccagaaacggctttgac

SEQ ID NO: 71166 - DNA, 17 bp, Arabidopsis thaliana
ccagaaacgtctctgac

SEQ ID NO: 71167 - DNA, 17 bp, Arabidopsis thaliana
ccagaaatcgaatccgg

SEQ ID NO: 71168 - DNA, 17 bp, Arabidopsis thaliana
ccagaaatttgaccggc

SEQ ID NO: 71169 - DNA, 17 bp, Arabidopsis thaliana
ccagaacagggccaaac

SEQ ID NO: 71170 - DNA, 17 bp, Arabidopsis thaliana
ccagaacctcctgatat

SEQ ID NO: 71171 - DNA, 17 bp, Arabidopsis thaliana
ccagaactctaaaccct

SEQ ID NO: 71172 - DNA, 17 bp, Arabidopsis thaliana
ccagaagacatgccatc

SEQ ID NO: 71173 - DNA, 17 bp, Arabidopsis thaliana
ccagaaggagtgctgat

SEQ ID NO: 71174 - DNA, 17 bp, Arabidopsis thaliana
ccagaaggcccggagtg

SEQ ID NO: 71175 - DNA, 17 bp, Arabidopsis thaliana
ccagaagttgtcatgtg

SEQ ID NO: 71176 - DNA, 17 bp, Arabidopsis thaliana
ccagaatccagattacc

SEQ ID NO: 71177 - DNA, 17 bp, Arabidopsis thaliana
ccagaattcagtaggga

SEQ ID NO: 71178 - DNA, 17 bp, Arabidopsis thaliana
ccagaatttgtagtccc

SEQ ID NO: 71179 - DNA, 17 bp, Arabidopsis thaliana
ccagacagtagcacact

SEQ ID NO: 71180 - DNA, 17 bp, Arabidopsis thaliana
ccagacccaaagttagt

SEQ ID NO: 71181 - DNA, 17 bp, Arabidopsis thaliana
ccagaccctcagtagga

SEQ ID NO: 71182 - DNA, 17 bp, Arabidopsis thaliana
ccagaccctgtcgcacc

SEQ ID NO: 71183 - DNA, 17 bp, Arabidopsis thaliana
ccagaccgtttgcttcc

SEQ ID NO: 71184 - DNA, 17 bp, Arabidopsis thaliana
ccagacctaccagatcc

SEQ ID NO: 71185 - DNA, 17 bp, Arabidopsis thaliana
ccagacgcttgtcatga

SEQ ID NO: 71186 - DNA, 17 bp, Arabidopsis thaliana
ccagacgtagactccaa

SEQ ID NO: 71187 - DNA, 17 bp, Arabidopsis thaliana
ccagacgttacggctga

SEQ ID NO: 71188 - DNA, 17 bp, Arabidopsis thaliana
ccagactagcgtttggc

SEQ ID NO: 71189 - DNA, 17 bp, Arabidopsis thaliana
ccagactccctcaacac

SEQ ID NO: 71190 - DNA, 17 bp, Arabidopsis thaliana
ccagactcgtcggaagt

SEQ ID NO: 71191 - DNA, 17 bp, Arabidopsis thaliana
ccagactgaccgtcgga

SEQ ID NO: 71192 - DNA, 17 bp, Arabidopsis thaliana
ccagacttgctttccac

SEQ ID NO: 71193 - DNA, 17 bp, Arabidopsis thaliana
ccagacttgtgatctct

SEQ ID NO: 71194 - DNA, 17 bp, Arabidopsis thaliana
ccagagaagaagcgtaa

SEQ ID NO: 71195 - DNA, 17 bp, Arabidopsis thaliana
ccagagacctgagcgac

SEQ ID NO: 71196 - DNA, 17 bp, Arabidopsis thaliana
ccagagactctgggttc

SEQ ID NO: 71197 - DNA, 17 bp, Arabidopsis thaliana
ccagagagagcataatc

SEQ ID NO: 71198 - DNA, 17 bp, Arabidopsis thaliana
ccagagagtccatccga

SEQ ID NO: 71199 - DNA, 17 bp, Arabidopsis thaliana
ccagagatctttgggcg

SEQ ID NO: 71200 - DNA, 17 bp, Arabidopsis thaliana
ccagagatgttgagaaa

SEQ ID NO: 71201 - DNA, 17 bp, Arabidopsis thaliana
ccagagattcgtggctc

SEQ ID NO: 71202 - DNA, 17 bp, Arabidopsis thaliana
ccagagattctgggttc

SEQ ID NO: 71203 - DNA, 17 bp, Arabidopsis thaliana
ccagagccttctgtggg

SEQ ID NO: 71204 - DNA, 17 bp, Arabidopsis thaliana
ccagagcgctgacccac

SEQ ID NO: 71205 - DNA, 17 bp, Arabidopsis thaliana
ccagagctagctggttc

SEQ ID NO: 71206 - DNA, 17 bp, Arabidopsis thaliana
ccagaggactcttgtca

SEQ ID NO: 71207 - DNA, 17 bp, Arabidopsis thaliana
ccagaggagagcttcca

SEQ ID NO: 71208 - DNA, 17 bp, Arabidopsis thaliana
ccagaggattgctacct

SEQ ID NO: 71209 - DNA, 17 bp, Arabidopsis thaliana
ccagaggatttgcgttc

SEQ ID NO: 71210 - DNA, 17 bp, Arabidopsis thaliana
ccagaggcgttgaactt

SEQ ID NO: 71211 - DNA, 17 bp, Arabidopsis thaliana
ccagagggtagtcaggc

SEQ ID NO: 71212 - DNA, 17 bp, Arabidopsis thaliana
ccagagtcaggccgcca

SEQ ID NO: 71213 - DNA, 17 bp, Arabidopsis thaliana
ccagagtcccttgagcg

SEQ ID NO: 71214 - DNA, 17 bp, Arabidopsis thaliana
ccagatacgacgtcggt

SEQ ID NO: 71215 - DNA, 17 bp, Arabidopsis thaliana
ccagatcacctgatgga

SEQ ID NO: 71216 - DNA, 17 bp, Arabidopsis thaliana
ccagatcagaaagttgc

SEQ ID NO: 71217 - DNA, 17 bp, Arabidopsis thaliana
ccagatcagaaggttgc

SEQ ID NO: 71218 - DNA, 17 bp, Arabidopsis thaliana
ccagatcagccgatagg

SEQ ID NO: 71219 - DNA, 17 bp, Arabidopsis thaliana
ccagatcatcaggaccg

SEQ ID NO: 71220 - DNA, 17 bp, Arabidopsis thaliana
ccagatccatcactttt

SEQ ID NO: 71221 - DNA, 17 bp, Arabidopsis thaliana
ccagatcgggtttggga

SEQ ID NO: 71222 - DNA, 17 bp, Arabidopsis thaliana
ccagatctgactctgct

SEQ ID NO: 71223 - DNA, 17 bp, Arabidopsis thaliana
ccagatgagactatgat

SEQ ID NO: 71224 - DNA, 17 bp, Arabidopsis thaliana
ccagatgattcatttgg

SEQ ID NO: 71225 - DNA, 17 bp, Arabidopsis thaliana
ccagatggagacattat

SEQ ID NO: 71226 - DNA, 17 bp, Arabidopsis thaliana
ccagatggaggtgttga

SEQ ID NO: 71227 - DNA, 17 bp, Arabidopsis thaliana
ccagatgtgtcgaagat

SEQ ID NO: 71228 - DNA, 17 bp, Arabidopsis thaliana
ccagatgtgtgctttgt

SEQ ID NO: 71229 - DNA, 17 bp, Arabidopsis thaliana
ccagatgttgccatgtg

SEQ ID NO: 71230 - DNA, 17 bp, Arabidopsis thaliana
ccagattatcattcgaa

SEQ ID NO: 71231 - DNA, 17 bp, Arabidopsis thaliana
ccagattattgctcgaa

SEQ ID NO: 71232 - DNA, 17 bp, Arabidopsis thaliana
ccagatttactctttgc

SEQ ID NO: 71233 - DNA, 17 bp, Arabidopsis thaliana
ccagatttctctgacca

SEQ ID NO: 71234 - DNA, 17 bp, Arabidopsis thaliana
ccagatttggttgctct

SEQ ID NO: 71235 - DNA, 17 bp, Arabidopsis thaliana
ccagattttgttcttga

SEQ ID NO: 71236 - DNA, 17 bp, Arabidopsis thaliana
ccagcaaccaaaagttg

SEQ ID NO: 71237 - DNA, 17 bp, Arabidopsis thaliana
ccagcaaccgcagcccg

SEQ ID NO: 71238 - DNA, 17 bp, Arabidopsis thaliana
ccagcaagtcccagtat

SEQ ID NO: 71239 - DNA, 17 bp, Arabidopsis thaliana
ccagcacgtctgcctgg

SEQ ID NO: 71240 - DNA, 17 bp, Arabidopsis thaliana
ccagcacttattggatc

SEQ ID NO: 71241 - DNA, 17 bp, Arabidopsis thaliana
ccagcagaccatgggga

SEQ ID NO: 71242 - DNA, 17 bp, Arabidopsis thaliana
ccagcagagtaatggtc

SEQ ID NO: 71243 - DNA, 17 bp, Arabidopsis thaliana
ccagcagatggtcgtct

SEQ ID NO: 71244 - DNA, 17 bp, Arabidopsis thaliana
ccagcagattggtagat

SEQ ID NO: 71245 - DNA, 17 bp, Arabidopsis thaliana
ccagcagatttgattat

SEQ ID NO: 71246 - DNA, 17 bp, Arabidopsis thaliana
ccagcagccgcggtaac

SEQ ID NO: 71247 - DNA, 17 bp, Arabidopsis thaliana
ccagcagccgcggtaat

SEQ ID NO: 71248 - DNA, 17 bp, Arabidopsis thaliana
ccagcaggaccaacctc

SEQ ID NO: 71249 - DNA, 17 bp, Arabidopsis thaliana
ccagcaggtgggtactc

SEQ ID NO: 71250 - DNA, 17 bp, Arabidopsis thaliana
ccagcaggttgttcagc

SEQ ID NO: 71251 - DNA, 17 bp, Arabidopsis thaliana
ccagcagtggtttgtct

SEQ ID NO: 71252 - DNA, 17 bp, Arabidopsis thaliana
ccagcatttgtcgttag

SEQ ID NO: 71253 - DNA, 17 bp, Arabidopsis thaliana
ccagccaaaactttgcg

SEQ ID NO: 71254 - DNA, 17 bp, Arabidopsis thaliana
ccagccaaggatgactt

SEQ ID NO: 71255 - DNA, 17 bp, Arabidopsis thaliana
ccagccatttgggttct

SEQ ID NO: 71256 - DNA, 17 bp, Arabidopsis thaliana
ccagcccaaatgcatat

SEQ ID NO: 71257 - DNA, 17 bp, Arabidopsis thaliana
ccagcccactttgcctt

SEQ ID NO: 71258 - DNA, 17 bp, Arabidopsis thaliana
ccagcccgacctgaacc

SEQ ID NO: 71259 - DNA, 17 bp, Arabidopsis thaliana
ccagccctttgtcgcta

SEQ ID NO: 71260 - DNA, 17 bp, Arabidopsis thaliana
ccagccgagtgtggagg

SEQ ID NO: 71261 - DNA, 17 bp, Arabidopsis thaliana
ccagccgccgcctgtat

SEQ ID NO: 71262 - DNA, 17 bp, Arabidopsis thaliana
ccagccggtatcttaat

SEQ ID NO: 71263 - DNA, 17 bp, Arabidopsis thaliana
ccagcctatggtatgtt

SEQ ID NO: 71264 - DNA, 17 bp, Arabidopsis thaliana
ccagcctcttggaccgt

SEQ ID NO: 71265 - DNA, 17 bp, Arabidopsis thaliana
ccagcgaaaccacagcc

SEQ ID NO: 71266 - DNA, 17 bp, Arabidopsis thaliana
ccagcgaacaagagcaa

SEQ ID NO: 71267 - DNA, 17 bp, Arabidopsis thaliana
ccagcgacaacaaccag

SEQ ID NO: 71268 - DNA, 17 bp, Arabidopsis thaliana
ccagcgacagcaacaag

SEQ ID NO: 71269 - DNA, 17 bp, Arabidopsis thaliana
ccagcgacagcaaccag

SEQ ID NO: 71270 - DNA, 17 bp, Arabidopsis thaliana
ccagcgacagcgacagc

SEQ ID NO: 71271 - DNA, 17 bp, Arabidopsis thaliana
ccagcgacagcgaccag

SEQ ID NO: 71272 - DNA, 17 bp, Arabidopsis thaliana
ccagcgacaggcaaaca

SEQ ID NO: 71273 - DNA, 17 bp, Arabidopsis thaliana
ccagcgacaggcaaacg

SEQ ID NO: 71274 - DNA, 17 bp, Arabidopsis thaliana
ccagcgacagggaaacg

SEQ ID NO: 71275 - DNA, 17 bp, Arabidopsis thaliana
ccagcgaccaaaagttg

SEQ ID NO: 71276 - DNA, 17 bp, Arabidopsis thaliana
ccagcgaccagcgacag

SEQ ID NO: 71277 - DNA, 17 bp, Arabidopsis thaliana
ccagcgaccagcgaccg

SEQ ID NO: 71278 - DNA, 17 bp, Arabidopsis thaliana
ccagcgacctggcccgg

SEQ ID NO: 71279 - DNA, 17 bp, Arabidopsis thaliana
ccagcgacctggggggc

SEQ ID NO: 71280 - DNA, 17 bp, Arabidopsis thaliana
ccagcgacctgggttcc

SEQ ID NO: 71281 - DNA, 17 bp, Arabidopsis thaliana
ccagcgacctgggttcg

SEQ ID NO: 71282 - DNA, 17 bp, Arabidopsis thaliana
ccagcgacctgggtttc

SEQ ID NO: 71283 - DNA, 17 bp, Arabidopsis thaliana
ccagcgactgtcgccag

SEQ ID NO: 71284 - DNA, 17 bp, Arabidopsis thaliana
ccagcgacttaaaccag

SEQ ID NO: 71285 - DNA, 17 bp, Arabidopsis thaliana
ccagcgatcacgttttt

SEQ ID NO: 71286 - DNA, 17 bp, Arabidopsis thaliana
ccagcgattgtctcagc

SEQ ID NO: 71287 - DNA, 17 bp, Arabidopsis thaliana
ccagcgcacggtagctt

SEQ ID NO: 71288 - DNA, 17 bp, Arabidopsis thaliana
ccagcgccgccaccacc

SEQ ID NO: 71289 - DNA, 17 bp, Arabidopsis thaliana
ccagcggacaaaaccgt

SEQ ID NO: 71290 - DNA, 17 bp, Arabidopsis thaliana
ccagcggctggaagagc

SEQ ID NO: 71291 - DNA, 17 bp, Arabidopsis thaliana
ccagcggtgtgcaatgc

SEQ ID NO: 71292 - DNA, 17 bp, Arabidopsis thaliana
ccagcggttaggatatc

SEQ ID NO: 71293 - DNA, 17 bp, Arabidopsis thaliana
ccagcgtctacggaatg

SEQ ID NO: 71294 - DNA, 17 bp, Arabidopsis thaliana
ccagcgtctgcttctcc

SEQ ID NO: 71295 - DNA, 17 bp, Arabidopsis thaliana
ccagcgtttgcggttgt

SEQ ID NO: 71296 - DNA, 17 bp, Arabidopsis thaliana
ccagcgtttttgagtcc

SEQ ID NO: 71297 - DNA, 17 bp, Arabidopsis thaliana
ccagctaaatgcggaag

SEQ ID NO: 71298 - DNA, 17 bp, Arabidopsis thaliana
ccagctaaccactttag

SEQ ID NO: 71299 - DNA, 17 bp, Arabidopsis thaliana
ccagctaaggcccctaa

SEQ ID NO: 71300 - DNA, 17 bp, Arabidopsis thaliana
ccagctaattccagagg

SEQ ID NO: 71301 - DNA, 17 bp, Arabidopsis thaliana
ccagctacatctctagt

SEQ ID NO: 71302 - DNA, 17 bp, Arabidopsis thaliana
ccagctacatcttgctt

SEQ ID NO: 71303 - DNA, 17 bp, Arabidopsis thaliana
ccagctcactccggcgg

SEQ ID NO: 71304 - DNA, 17 bp, Arabidopsis thaliana
ccagctcagatggtagg

SEQ ID NO: 71305 - DNA, 17 bp, Arabidopsis thaliana
ccagctcagtgatcttt

SEQ ID NO: 71306 - DNA, 17 bp, Arabidopsis thaliana
ccagctcagtggaatga

SEQ ID NO: 71307 - DNA, 17 bp, Arabidopsis thaliana
ccagctctggaaggatg

SEQ ID NO: 71308 - DNA, 17 bp, Arabidopsis thaliana
ccagctgagagtccatt

SEQ ID NO: 71309 - DNA, 17 bp, Arabidopsis thaliana
ccagctgaggagtatat

SEQ ID NO: 71310 - DNA, 17 bp, Arabidopsis thaliana
ccagctggaccaccaat

SEQ ID NO: 71311 - DNA, 17 bp, Arabidopsis thaliana
ccagctgtccagattga

SEQ ID NO: 71312 - DNA, 17 bp, Arabidopsis thaliana
ccagctgtctatagtcc

SEQ ID NO: 71313 - DNA, 17 bp, Arabidopsis thaliana
ccagcttatttcgtcgg

SEQ ID NO: 71314 - DNA, 17 bp, Arabidopsis thaliana
ccagcttcagagaaacc

SEQ ID NO: 71315 - DNA, 17 bp, Arabidopsis thaliana
ccagcttctaatggtcg

SEQ ID NO: 71316 - DNA, 17 bp, Arabidopsis thaliana
ccagcttctatagagtt

SEQ ID NO: 71317 - DNA, 17 bp, Arabidopsis thaliana
ccagcttcttagatgtt

SEQ ID NO: 71318 - DNA, 17 bp, Arabidopsis thaliana
ccagctttagccccccc

SEQ ID NO: 71319 - DNA, 17 bp, Arabidopsis thaliana
ccagctttcgttgaaca

SEQ ID NO: 71320 - DNA, 17 bp, Arabidopsis thaliana
ccagctttggccgagtg

SEQ ID NO: 71321 - DNA, 17 bp, Arabidopsis thaliana
ccaggaaaagctcgaac

SEQ ID NO: 71322 - DNA, 17 bp, Arabidopsis thaliana
ccaggaaatctacgggc

SEQ ID NO: 71323 - DNA, 17 bp, Arabidopsis thaliana
ccaggaaatctcagcgg

SEQ ID NO: 71324 - DNA, 17 bp, Arabidopsis thaliana
ccaggaaccattgggcg

SEQ ID NO: 71325 - DNA, 17 bp, Arabidopsis thaliana
ccaggaagtcctcgtgt

SEQ ID NO: 71326 - DNA, 17 bp, Arabidopsis thaliana
ccaggaagttgtccggg

SEQ ID NO: 71327 - DNA, 17 bp, Arabidopsis thaliana
ccaggaatacgcaccat

SEQ ID NO: 71328 - DNA, 17 bp, Arabidopsis thaliana
ccaggaccaaaccacgt

SEQ ID NO: 71329 - DNA, 17 bp, Arabidopsis thaliana
ccaggaccaaatcgccg

SEQ ID NO: 71330 - DNA, 17 bp, Arabidopsis thaliana
ccaggaccagttgtttg

SEQ ID NO: 71331 - DNA, 17 bp, Arabidopsis thaliana
ccaggaccgacgcggat

SEQ ID NO: 71332 - DNA, 17 bp, Arabidopsis thaliana
ccaggaccgcttgatct

SEQ ID NO: 71333 - DNA, 17 bp, Arabidopsis thaliana
ccaggacgaggaatcgt

SEQ ID NO: 71334 - DNA, 17 bp, Arabidopsis thaliana
ccaggacgtaatctccc

SEQ ID NO: 71335 - DNA, 17 bp, Arabidopsis thaliana
ccaggactgtatggtgt

SEQ ID NO: 71336 - DNA, 17 bp, Arabidopsis thaliana
ccaggagaagtgcggtg

SEQ ID NO: 71337 - DNA, 17 bp, Arabidopsis thaliana
ccaggagacccggggtt

SEQ ID NO: 71338 - DNA, 17 bp, Arabidopsis thaliana
ccaggagacccgggtcc

SEQ ID NO: 71339 - DNA, 17 bp, Arabidopsis thaliana
ccaggagacccgggtga

SEQ ID NO: 71340 - DNA, 17 bp, Arabidopsis thaliana
ccaggagacccgggtgc

SEQ ID NO: 71341 - DNA, 17 bp, Arabidopsis thaliana
ccaggagacccgggttc

SEQ ID NO: 71342 - DNA, 17 bp, Arabidopsis thaliana
ccaggagacccgggttt

SEQ ID NO: 71343 - DNA, 17 bp, Arabidopsis thaliana
ccaggagattctggatc

SEQ ID NO: 71344 - DNA, 17 bp, Arabidopsis thaliana
ccaggagcggaccctcc

SEQ ID NO: 71345 - DNA, 17 bp, Arabidopsis thaliana
ccaggaggacaaatgtc

SEQ ID NO: 71346 - DNA, 17 bp, Arabidopsis thaliana
ccaggaggagctgattg

SEQ ID NO: 71347 - DNA, 17 bp, Arabidopsis thaliana
ccaggaggttcagggcc

SEQ ID NO: 71348 - DNA, 17 bp, Arabidopsis thaliana
ccaggaggttcggggcc

SEQ ID NO: 71349 - DNA, 17 bp, Arabidopsis thaliana
ccaggaggttctgggcc

SEQ ID NO: 71350 - DNA, 17 bp, Arabidopsis thaliana
ccaggagtggagcctgc

SEQ ID NO: 71351 - DNA, 17 bp, Arabidopsis thaliana
ccaggagttttgatagt

SEQ ID NO: 71352 - DNA, 17 bp, Arabidopsis thaliana
ccaggatatctcagcgg

SEQ ID NO: 71353 - DNA, 17 bp, Arabidopsis thaliana
ccaggatcagagatctt

SEQ ID NO: 71354 - DNA, 17 bp, Arabidopsis thaliana
ccaggatcgaaacctgg

SEQ ID NO: 71355 - DNA, 17 bp, Arabidopsis thaliana
ccaggatcgcaacctgg

SEQ ID NO: 71356 - DNA, 17 bp, Arabidopsis thaliana
ccaggatcggaacctgg

SEQ ID NO: 71357 - DNA, 17 bp, Arabidopsis thaliana
ccaggatcgtaacctgg

SEQ ID NO: 71358 - DNA, 17 bp, Arabidopsis thaliana
ccaggatcgtgccacgt

SEQ ID NO: 71359 - DNA, 17 bp, Arabidopsis thaliana
ccaggatgttggcttag

SEQ ID NO: 71360 - DNA, 17 bp, Arabidopsis thaliana
ccaggattcgttgattt

SEQ ID NO: 71361 - DNA, 17 bp, Arabidopsis thaliana
ccaggcagtccactttg

SEQ ID NO: 71362 - DNA, 17 bp, Arabidopsis thaliana
ccaggcggcctgattat

SEQ ID NO: 71363 - DNA, 17 bp, Arabidopsis thaliana
ccaggcgtcatgacatt

SEQ ID NO: 71364 - DNA, 17 bp, Arabidopsis thaliana
ccaggcgtctctgtgcg

SEQ ID NO: 71365 - DNA, 17 bp, Arabidopsis thaliana
ccaggctaggcattcgt

SEQ ID NO: 71366 - DNA, 17 bp, Arabidopsis thaliana
ccaggctatcatgacaa

SEQ ID NO: 71367 - DNA, 17 bp, Arabidopsis thaliana
ccaggcttgagaaacgg

SEQ ID NO: 71368 - DNA, 17 bp, Arabidopsis thaliana
ccagggaaggtggggcc

SEQ ID NO: 71369 - DNA, 17 bp, Arabidopsis thaliana
ccagggaattaacacac

SEQ ID NO: 71370 - DNA, 17 bp, Arabidopsis thaliana
ccagggaattaacacgc

SEQ ID NO: 71371 - DNA, 17 bp, Arabidopsis thaliana
ccagggaccgtaattct

SEQ ID NO: 71372 - DNA, 17 bp, Arabidopsis thaliana
ccagggagcgggttgtg

SEQ ID NO: 71373 - DNA, 17 bp, Arabidopsis thaliana
ccagggagtagtcaggc

SEQ ID NO: 71374 - DNA, 17 bp, Arabidopsis thaliana
ccagggagtctacaggc

SEQ ID NO: 71375 - DNA, 17 bp, Arabidopsis thaliana
ccagggatcagcggatg

SEQ ID NO: 71376 - DNA, 17 bp, Arabidopsis thaliana
ccagggatcagtggatg

SEQ ID NO: 71377 - DNA, 17 bp, Arabidopsis thaliana
ccagggatctttgggcg

SEQ ID NO: 71378 - DNA, 17 bp, Arabidopsis thaliana
ccagggcacgtctgcct

SEQ ID NO: 71379 - DNA, 17 bp, Arabidopsis thaliana
ccagggccaggcgacag

SEQ ID NO: 71380 - DNA, 17 bp, Arabidopsis thaliana
ccagggccggccctgct

SEQ ID NO: 71381 - DNA, 17 bp, Arabidopsis thaliana
ccaggggaattacgggt

SEQ ID NO: 71382 - DNA, 17 bp, Arabidopsis thaliana
ccagggggattccgcca

SEQ ID NO: 71383 - DNA, 17 bp, Arabidopsis thaliana
ccagggggtaatcaggc

SEQ ID NO: 71384 - DNA, 17 bp, Arabidopsis thaliana
ccagggggtagtcagac

SEQ ID NO: 71385 - DNA, 17 bp, Arabidopsis thaliana
ccagggggtagtcaggc

SEQ ID NO: 71386 - DNA, 17 bp, Arabidopsis thaliana
ccagggggtcgagtgat

SEQ ID NO: 71387 - DNA, 17 bp, Arabidopsis thaliana
ccagggtccatgctgct

SEQ ID NO: 71388 - DNA, 17 bp, Arabidopsis thaliana
ccagggtcgccgtaccg

SEQ ID NO: 71389 - DNA, 17 bp, Arabidopsis thaliana
ccagggtggtcgtgcag

SEQ ID NO: 71390 - DNA, 17 bp, Arabidopsis thaliana
ccagggtgtttcgtaga

SEQ ID NO: 71391 - DNA, 17 bp, Arabidopsis thaliana
ccagggttcgtttccct

SEQ ID NO: 71392 - DNA, 17 bp, Arabidopsis thaliana
ccagggttgcggcgaat

SEQ ID NO: 71393 - DNA, 17 bp, Arabidopsis thaliana
ccaggtaagcctcgcag

SEQ ID NO: 71394 - DNA, 17 bp, Arabidopsis thaliana
ccaggtaagcctcgcgc

SEQ ID NO: 71395 - DNA, 17 bp, Arabidopsis thaliana
ccaggtacacctcggtt

SEQ ID NO: 71396 - DNA, 17 bp, Arabidopsis thaliana
ccaggtacacctctact

SEQ ID NO: 71397 - DNA, 17 bp, Arabidopsis thaliana
ccaggtaggttggaagc

SEQ ID NO: 71398 - DNA, 17 bp, Arabidopsis thaliana
ccaggtagtccactttg

SEQ ID NO: 71399 - DNA, 17 bp, Arabidopsis thaliana
ccaggtatctaggacca

SEQ ID NO: 71400 - DNA, 17 bp, Arabidopsis thaliana
ccaggtatgcaggcagt

SEQ ID NO: 71401 - DNA, 17 bp, Arabidopsis thaliana
ccaggtcaggcgggaat

SEQ ID NO: 71402 - DNA, 17 bp, Arabidopsis thaliana
ccaggtcaggcgggagg

SEQ ID NO: 71403 - DNA, 17 bp, Arabidopsis thaliana
ccaggtcaggcgggatt

SEQ ID NO: 71404 - DNA, 17 bp, Arabidopsis thaliana
ccaggtccagacatagt

SEQ ID NO: 71405 - DNA, 17 bp, Arabidopsis thaliana
ccaggtccgagacttca

SEQ ID NO: 71406 - DNA, 17 bp, Arabidopsis thaliana
ccaggtccgttatgcag

SEQ ID NO: 71407 - DNA, 17 bp, Arabidopsis thaliana
ccaggtccgttatgccg

SEQ ID NO: 71408 - DNA, 17 bp, Arabidopsis thaliana
ccaggtctgtgtgtctt

SEQ ID NO: 71409 - DNA, 17 bp, Arabidopsis thaliana
ccaggtgaaagtctctg

SEQ ID NO: 71410 - DNA, 17 bp, Arabidopsis thaliana
ccaggtgaaccattgta

SEQ ID NO: 71411 - DNA, 17 bp, Arabidopsis thaliana
ccaggtgatttgctaag

SEQ ID NO: 71412 - DNA, 17 bp, Arabidopsis thaliana
ccaggtgcatggctgtc

SEQ ID NO: 71413 - DNA, 17 bp, Arabidopsis thaliana
ccaggtggatctatgat

SEQ ID NO: 71414 - DNA, 17 bp, Arabidopsis thaliana
ccaggtggcacaggcac

SEQ ID NO: 71415 - DNA, 17 bp, Arabidopsis thaliana
ccaggtggtcgagtagg

SEQ ID NO: 71416 - DNA, 17 bp, Arabidopsis thaliana
ccaggtggtcgagtggt

SEQ ID NO: 71417 - DNA, 17 bp, Arabidopsis thaliana
ccaggtggtgcatggct

SEQ ID NO: 71418 - DNA, 17 bp, Arabidopsis thaliana
ccaggtggtgtggcgaa

SEQ ID NO: 71419 - DNA, 17 bp, Arabidopsis thaliana
ccaggtgtagcgcagtc

SEQ ID NO: 71420 - DNA, 17 bp, Arabidopsis thaliana
ccaggttccagaggttg

SEQ ID NO: 71421 - DNA, 17 bp, Arabidopsis thaliana
ccaggttcgataagtga

SEQ ID NO: 71422 - DNA, 17 bp, Arabidopsis thaliana
ccaggttcgatcacgta

SEQ ID NO: 71423 - DNA, 17 bp, Arabidopsis thaliana
ccaggttgttaacgcgg

SEQ ID NO: 71424 - DNA, 17 bp, Arabidopsis thaliana
ccaggtttcgatcttgg

SEQ ID NO: 71425 - DNA, 17 bp, Arabidopsis thaliana
ccaggtttgatttctaa

SEQ ID NO: 71426 - DNA, 17 bp, Arabidopsis thaliana
ccagtaaaaccatcagc

SEQ ID NO: 71427 - DNA, 17 bp, Arabidopsis thaliana
ccagtaacccaccaccc

SEQ ID NO: 71428 - DNA, 17 bp, Arabidopsis thaliana
ccagtaaccctaaacgg

SEQ ID NO: 71429 - DNA, 17 bp, Arabidopsis thaliana
ccagtactcggactcat

SEQ ID NO: 71430 - DNA, 17 bp, Arabidopsis thaliana
ccagtagcggcactggg

SEQ ID NO: 71431 - DNA, 17 bp, Arabidopsis thaliana
ccagtatcatctgacgt

SEQ ID NO: 71432 - DNA, 17 bp, Arabidopsis thaliana
ccagtatcttatgcgtc

SEQ ID NO: 71433 - DNA, 17 bp, Arabidopsis thaliana
ccagtatgggccaggcc

SEQ ID NO: 71434 - DNA, 17 bp, Arabidopsis thaliana
ccagtatgttatgcgtc

SEQ ID NO: 71435 - DNA, 17 bp, Arabidopsis thaliana
ccagtcactcgagcagc

SEQ ID NO: 71436 - DNA, 17 bp, Arabidopsis thaliana
ccagtcatcaatgggtt

SEQ ID NO: 71437 - DNA, 17 bp, Arabidopsis thaliana
ccagtcatctggattgg

SEQ ID NO: 71438 - DNA, 17 bp, Arabidopsis thaliana
ccagtcatcttctgtag

SEQ ID NO: 71439 - DNA, 17 bp, Arabidopsis thaliana
ccagtcatctttgctca

SEQ ID NO: 71440 - DNA, 17 bp, Arabidopsis thaliana
ccagtcccaattgggct

SEQ ID NO: 71441 - DNA, 17 bp, Arabidopsis thaliana
ccagtccctacgagttg

SEQ ID NO: 71442 - DNA, 17 bp, Arabidopsis thaliana
ccagtccgccagccgat

SEQ ID NO: 71443 - DNA, 17 bp, Arabidopsis thaliana
ccagtccgtcccccggc

SEQ ID NO: 71444 - DNA, 17 bp, Arabidopsis thaliana
ccagtcctaacgggtcg

SEQ ID NO: 71445 - DNA, 17 bp, Arabidopsis thaliana
ccagtcctagatccaga

SEQ ID NO: 71446 - DNA, 17 bp, Arabidopsis thaliana
ccagtcgcatcctgtag

SEQ ID NO: 71447 - DNA, 17 bp, Arabidopsis thaliana
ccagtcgtacagcgaga

SEQ ID NO: 71448 - DNA, 17 bp, Arabidopsis thaliana
ccagtctcggagattca

SEQ ID NO: 71449 - DNA, 17 bp, Arabidopsis thaliana
ccagtctgcctgggtgt

SEQ ID NO: 71450 - DNA, 17 bp, Arabidopsis thaliana
ccagtgaaggaagaaag

SEQ ID NO: 71451 - DNA, 17 bp, Arabidopsis thaliana
ccagtgaaggaagaagg

SEQ ID NO: 71452 - DNA, 17 bp, Arabidopsis thaliana
ccagtgaatgaacccac

SEQ ID NO: 71453 - DNA, 17 bp, Arabidopsis thaliana
ccagtgatcctgggcag

SEQ ID NO: 71454 - DNA, 17 bp, Arabidopsis thaliana
ccagtgatgttgggctt

SEQ ID NO: 71455 - DNA, 17 bp, Arabidopsis thaliana
ccagtgcaggttccagt

SEQ ID NO: 71456 - DNA, 17 bp, Arabidopsis thaliana
ccagtgccgtgcttagg

SEQ ID NO: 71457 - DNA, 17 bp, Arabidopsis thaliana
ccagtgcgatcaccagg

SEQ ID NO: 71458 - DNA, 17 bp, Arabidopsis thaliana
ccagtggaccaaggtcg

SEQ ID NO: 71459 - DNA, 17 bp, Arabidopsis thaliana
ccagtggattcggttca

SEQ ID NO: 71460 - DNA, 17 bp, Arabidopsis thaliana
ccagtggattttggcat

SEQ ID NO: 71461 - DNA, 17 bp, Arabidopsis thaliana
ccagtggcaggaggatg

SEQ ID NO: 71462 - DNA, 17 bp, Arabidopsis thaliana
ccagtggcccgaagcta

SEQ ID NO: 71463 - DNA, 17 bp, Arabidopsis thaliana
ccagtggcctttaccta

SEQ ID NO: 71464 - DNA, 17 bp, Arabidopsis thaliana
ccagtggcggatgtagg

SEQ ID NO: 71465 - DNA, 17 bp, Arabidopsis thaliana
ccagtgggcgaacgttg

SEQ ID NO: 71466 - DNA, 17 bp, Arabidopsis thaliana
ccagtgggctgcgccac

SEQ ID NO: 71467 - DNA, 17 bp, Arabidopsis thaliana
ccagtgggttgccttcc

SEQ ID NO: 71468 - DNA, 17 bp, Arabidopsis thaliana
ccagtggtcgaggtgca

SEQ ID NO: 71469 - DNA, 17 bp, Arabidopsis thaliana
ccagtggtctaagtctc

SEQ ID NO: 71470 - DNA, 17 bp, Arabidopsis thaliana
ccagtggtctagtggta

SEQ ID NO: 71471 - DNA, 17 bp, Arabidopsis thaliana
ccagtggtgtgccttgt

SEQ ID NO: 71472 - DNA, 17 bp, Arabidopsis thaliana
ccagtggtgtgcctttt

SEQ ID NO: 71473 - DNA, 17 bp, Arabidopsis thaliana
ccagtgtaattgtgaca

SEQ ID NO: 71474 - DNA, 17 bp, Arabidopsis thaliana
ccagtgtagcaggtttg

SEQ ID NO: 71475 - DNA, 17 bp, Arabidopsis thaliana
ccagtgtgatgatgtgt

SEQ ID NO: 71476 - DNA, 17 bp, Arabidopsis thaliana
ccagtgtgtgcggtcta

SEQ ID NO: 71477 - DNA, 17 bp, Arabidopsis thaliana
ccagtgttagcattgcc

SEQ ID NO: 71478 - DNA, 17 bp, Arabidopsis thaliana
ccagtgttcagacggtg

SEQ ID NO: 71479 - DNA, 17 bp, Arabidopsis thaliana
ccagttaaatccgtgtc

SEQ ID NO: 71480 - DNA, 17 bp, Arabidopsis thaliana
ccagttaactttggacc

SEQ ID NO: 71481 - DNA, 17 bp, Arabidopsis thaliana
ccagttacacaaacgtt

SEQ ID NO: 71482 - DNA, 17 bp, Arabidopsis thaliana
ccagttatactttgggc

SEQ ID NO: 71483 - DNA, 17 bp, Arabidopsis thaliana
ccagttcaaatccgggt

SEQ ID NO: 71484 - DNA, 17 bp, Arabidopsis thaliana
ccagttcaaatctgggt

SEQ ID NO: 71485 - DNA, 17 bp, Arabidopsis thaliana
ccagttcaaatctggtt

SEQ ID NO: 71486 - DNA, 17 bp, Arabidopsis thaliana
ccagttccagctactgc

SEQ ID NO: 71487 - DNA, 17 bp, Arabidopsis thaliana
ccagttcccagactctt

SEQ ID NO: 71488 - DNA, 17 bp, Arabidopsis thaliana
ccagttccgaacccgcc

SEQ ID NO: 71489 - DNA, 17 bp, Arabidopsis thaliana
ccagttccgaacccgtc

SEQ ID NO: 71490 - DNA, 17 bp, Arabidopsis thaliana
ccagttcgagtctgggt

SEQ ID NO: 71491 - DNA, 17 bp, Arabidopsis thaliana
ccagttcgagtgacgct

SEQ ID NO: 71492 - DNA, 17 bp, Arabidopsis thaliana
ccagttcgatcctgggc

SEQ ID NO: 71493 - DNA, 17 bp, Arabidopsis thaliana
ccagttcgttcctgggc

SEQ ID NO: 71494 - DNA, 17 bp, Arabidopsis thaliana
ccagttcttcggttttg

SEQ ID NO: 71495 - DNA, 17 bp, Arabidopsis thaliana
ccagttgaatgcggtgt

SEQ ID NO: 71496 - DNA, 17 bp, Arabidopsis thaliana
ccagttgagccggcaaa

SEQ ID NO: 71497 - DNA, 17 bp, Arabidopsis thaliana
ccagttgctaactcata

SEQ ID NO: 71498 - DNA, 17 bp, Arabidopsis thaliana
ccagttgctgctattaa

SEQ ID NO: 71499 - DNA, 17 bp, Arabidopsis thaliana
ccagttggaggttccta

SEQ ID NO: 71500 - DNA, 17 bp, Arabidopsis thaliana
ccagttggaggttgcta

SEQ ID NO: 71501 - DNA, 17 bp, Arabidopsis thaliana
ccagttggatttaggtc

SEQ ID NO: 71502 - DNA, 17 bp, Arabidopsis thaliana
ccagttggctattggcc

SEQ ID NO: 71503 - DNA, 17 bp, Arabidopsis thaliana
ccagttgggtttaggcc

SEQ ID NO: 71504 - DNA, 17 bp, Arabidopsis thaliana
ccagttgggtttaggtc

SEQ ID NO: 71505 - DNA, 17 bp, Arabidopsis thaliana
ccagttgtaacaccgcc

SEQ ID NO: 71506 - DNA, 17 bp, Arabidopsis thaliana
ccagttgtctagcaaca

SEQ ID NO: 71507 - DNA, 17 bp, Arabidopsis thaliana
ccagtttaggttccatt

SEQ ID NO: 71508 - DNA, 17 bp, Arabidopsis thaliana
ccagtttattagcctcg

SEQ ID NO: 71509 - DNA, 17 bp, Arabidopsis thaliana
ccagtttgcttcaaggt

SEQ ID NO: 71510 - DNA, 17 bp, Arabidopsis thaliana
ccagtttgtgtgcgtgt

SEQ ID NO: 71511 - DNA, 17 bp, Arabidopsis thaliana
ccagtttgttctccatc

SEQ ID NO: 71512 - DNA, 17 bp, Arabidopsis thaliana
ccagttttcaggtcaat

SEQ ID NO: 71513 - DNA, 17 bp, Arabidopsis thaliana
ccagttttccatgatgt

SEQ ID NO: 71514 - DNA, 17 bp, Arabidopsis thaliana
ccagttttctacgattg

SEQ ID NO: 71515 - DNA, 17 bp, Arabidopsis thaliana
ccagtttttgctgggct

SEQ ID NO: 71516 - DNA, 17 bp, Arabidopsis thaliana
ccagtttttttgttcgg

SEQ ID NO: 71517 - DNA, 17 bp, Arabidopsis thaliana
ccataaactaattgcat

SEQ ID NO: 71518 - DNA, 17 bp, Arabidopsis thaliana
ccataaatcttagagtt

SEQ ID NO: 71519 - DNA, 17 bp, Arabidopsis thaliana
ccataacgggtgggacc

SEQ ID NO: 71520 - DNA, 17 bp, Arabidopsis thaliana
ccataacttttagaccg

SEQ ID NO: 71521 - DNA, 17 bp, Arabidopsis thaliana
ccataacttttagactg

SEQ ID NO: 71522 - DNA, 17 bp, Arabidopsis thaliana
ccataacttttagatcg

SEQ ID NO: 71523 - DNA, 17 bp, Arabidopsis thaliana
ccataagcgtatcaaga

SEQ ID NO: 71524 - DNA, 17 bp, Arabidopsis thaliana
ccataagcgtgccaaga

SEQ ID NO: 71525 - DNA, 17 bp, Arabidopsis thaliana
ccataagttcatttttg

SEQ ID NO: 71526 - DNA, 17 bp, Arabidopsis thaliana
ccataatgtgcggttgg

SEQ ID NO: 71527 - DNA, 17 bp, Arabidopsis thaliana
ccataatttttagaccg

SEQ ID NO: 71528 - DNA, 17 bp, Arabidopsis thaliana
ccatacacagcgaagaa

SEQ ID NO: 71529 - DNA, 17 bp, Arabidopsis thaliana
ccatacaccgcctcgtg

SEQ ID NO: 71530 - DNA, 17 bp, Arabidopsis thaliana
ccatacattttcaagag

SEQ ID NO: 71531 - DNA, 17 bp, Arabidopsis thaliana
ccatacgaatgtttggc

SEQ ID NO: 71532 - DNA, 17 bp, Arabidopsis thaliana
ccatactaaatctggat

SEQ ID NO: 71533 - DNA, 17 bp, Arabidopsis thaliana
ccatagacgaaccgcct

SEQ ID NO: 71534 - DNA, 17 bp, Arabidopsis thaliana
ccatagactattgggcg

SEQ ID NO: 71535 - DNA, 17 bp, Arabidopsis thaliana
ccatagcctattgggcg

SEQ ID NO: 71536 - DNA, 17 bp, Arabidopsis thaliana
ccatagcgatggacgat

SEQ ID NO: 71537 - DNA, 17 bp, Arabidopsis thaliana
ccataggagtgtgctca

SEQ ID NO: 71538 - DNA, 17 bp, Arabidopsis thaliana
ccataggcttttgactc

SEQ ID NO: 71539 - DNA, 17 bp, Arabidopsis thaliana
ccatagggatgtcattg

SEQ ID NO: 71540 - DNA, 17 bp, Arabidopsis thaliana
ccatagggttctgtctg

SEQ ID NO: 71541 - DNA, 17 bp, Arabidopsis thaliana
ccataggttccggaatg

SEQ ID NO: 71542 - DNA, 17 bp, Arabidopsis thaliana
ccataggttgtcggagt

SEQ ID NO: 71543 - DNA, 17 bp, Arabidopsis thaliana
ccatagtctatttggtg

SEQ ID NO: 71544 - DNA, 17 bp, Arabidopsis thaliana
ccatagttagtttggat

SEQ ID NO: 71545 - DNA, 17 bp, Arabidopsis thaliana
ccatagttgtacagttg

SEQ ID NO: 71546 - DNA, 17 bp, Arabidopsis thaliana
ccatatcatttgcgggt

SEQ ID NO: 71547 - DNA, 17 bp, Arabidopsis thaliana
ccatatcgaaagatgtc

SEQ ID NO: 71548 - DNA, 17 bp, Arabidopsis thaliana
ccatatcgatgtaggtt

SEQ ID NO: 71549 - DNA, 17 bp, Arabidopsis thaliana
ccatatgacaacgggct

SEQ ID NO: 71550 - DNA, 17 bp, Arabidopsis thaliana
ccatatgacccgaatgc

SEQ ID NO: 71551 - DNA, 17 bp, Arabidopsis thaliana
ccatatgagtctttggc

SEQ ID NO: 71552 - DNA, 17 bp, Arabidopsis thaliana
ccatatggacaacgggc

SEQ ID NO: 71553 - DNA, 17 bp, Arabidopsis thaliana
ccatatggacaatgggc

SEQ ID NO: 71554 - DNA, 17 bp, Arabidopsis thaliana
ccatatggacaatgtgc

SEQ ID NO: 71555 - DNA, 17 bp, Arabidopsis thaliana
ccatatggataatgggc

SEQ ID NO: 71556 - DNA, 17 bp, Arabidopsis thaliana
ccatatggattgcaccg

SEQ ID NO: 71557 - DNA, 17 bp, Arabidopsis thaliana
ccatatgggaattggca

SEQ ID NO: 71558 - DNA, 17 bp, Arabidopsis thaliana
ccatatggttaattcta

SEQ ID NO: 71559 - DNA, 17 bp, Arabidopsis thaliana
ccatatggttgattcta

SEQ ID NO: 71560 - DNA, 17 bp, Arabidopsis thaliana
ccatatgtactggactg

SEQ ID NO: 71561 - DNA, 17 bp, Arabidopsis thaliana
ccatatgtggccacaaa

SEQ ID NO: 71562 - DNA, 17 bp, Arabidopsis thaliana
ccatatgttgccacatt

SEQ ID NO: 71563 - DNA, 17 bp, Arabidopsis thaliana
ccatattagactgtggg

SEQ ID NO: 71564 - DNA, 17 bp, Arabidopsis thaliana
ccatcaaccatcatctt

SEQ ID NO: 71565 - DNA, 17 bp, Arabidopsis thaliana
ccatcacggcttggtcc

SEQ ID NO: 71566 - DNA, 17 bp, Arabidopsis thaliana
ccatcagaactccgcag

SEQ ID NO: 71567 - DNA, 17 bp, Arabidopsis thaliana
ccatcagaactccgccg

SEQ ID NO: 71568 - DNA, 17 bp, Arabidopsis thaliana
ccatcagccgtacttgc

SEQ ID NO: 71569 - DNA, 17 bp, Arabidopsis thaliana
ccatcagctcccggacc

SEQ ID NO: 71570 - DNA, 17 bp, Arabidopsis thaliana
ccatcaggtctggggga

SEQ ID NO: 71571 - DNA, 17 bp, Arabidopsis thaliana
ccatcagtatccattac

SEQ ID NO: 71572 - DNA, 17 bp, Arabidopsis thaliana
ccatcagtatccattcg

SEQ ID NO: 71573 - DNA, 17 bp, Arabidopsis thaliana
ccatcatcataccgtct

SEQ ID NO: 71574 - DNA, 17 bp, Arabidopsis thaliana
ccatcatcgccggacaa

SEQ ID NO: 71575 - DNA, 17 bp, Arabidopsis thaliana
ccatcatctaagcccat

SEQ ID NO: 71576 - DNA, 17 bp, Arabidopsis thaliana
ccatcatctctctggtt

SEQ ID NO: 71577 - DNA, 17 bp, Arabidopsis thaliana
ccatcatgacaagtctc

SEQ ID NO: 71578 - DNA, 17 bp, Arabidopsis thaliana
ccatcatgtgcggtctt

SEQ ID NO: 71579 - DNA, 17 bp, Arabidopsis thaliana
ccatcatgttcgcagtt

SEQ ID NO: 71580 - DNA, 17 bp, Arabidopsis thaliana
ccatccaaggtttgatt

SEQ ID NO: 71581 - DNA, 17 bp, Arabidopsis thaliana
ccatccaccaactctcg

SEQ ID NO: 71582 - DNA, 17 bp, Arabidopsis thaliana
ccatccacctcttgtac

SEQ ID NO: 71583 - DNA, 17 bp, Arabidopsis thaliana
ccatccaccttggatat

SEQ ID NO: 71584 - DNA, 17 bp, Arabidopsis thaliana
ccatccactggcggcgt

SEQ ID NO: 71585 - DNA, 17 bp, Arabidopsis thaliana
ccatccattttcggggc

SEQ ID NO: 71586 - DNA, 17 bp, Arabidopsis thaliana
ccatcccaaagctgagg

SEQ ID NO: 71587 - DNA, 17 bp, Arabidopsis thaliana
ccatccccatctgaata

SEQ ID NO: 71588 - DNA, 17 bp, Arabidopsis thaliana
ccatcccgccaatccgt

SEQ ID NO: 71589 - DNA, 17 bp, Arabidopsis thaliana
ccatcccgttatttttt

SEQ ID NO: 71590 - DNA, 17 bp, Arabidopsis thaliana
ccatccctcctcaactg

SEQ ID NO: 71591 - DNA, 17 bp, Arabidopsis thaliana
ccatccgaatgggaaca

SEQ ID NO: 71592 - DNA, 17 bp, Arabidopsis thaliana
ccatccgacgatcggtc

SEQ ID NO: 71593 - DNA, 17 bp, Arabidopsis thaliana
ccatccgagatggagcc

SEQ ID NO: 71594 - DNA, 17 bp, Arabidopsis thaliana
ccatccgtctggccgat

SEQ ID NO: 71595 - DNA, 17 bp, Arabidopsis thaliana
ccatccgttcccaccgt

SEQ ID NO: 71596 - DNA, 17 bp, Arabidopsis thaliana
ccatcctaatagccact

SEQ ID NO: 71597 - DNA, 17 bp, Arabidopsis thaliana
ccatcctgccagttgct

SEQ ID NO: 71598 - DNA, 17 bp, Arabidopsis thaliana
ccatcctgtagatggat

SEQ ID NO: 71599 - DNA, 17 bp, Arabidopsis thaliana
ccatcctgtcactccgt

SEQ ID NO: 71600 - DNA, 17 bp, Arabidopsis thaliana
ccatccttagctcagtg

SEQ ID NO: 71601 - DNA, 17 bp, Arabidopsis thaliana
ccatccttccatctcct

SEQ ID NO: 71602 - DNA, 17 bp, Arabidopsis thaliana
ccatccttgcgtacaag

SEQ ID NO: 71603 - DNA, 17 bp, Arabidopsis thaliana
ccatcgagtctttgaac

SEQ ID NO: 71604 - DNA, 17 bp, Arabidopsis thaliana
ccatcgagttttccatc

SEQ ID NO: 71605 - DNA, 17 bp, Arabidopsis thaliana
ccatcgattctacgggg

SEQ ID NO: 71606 - DNA, 17 bp, Arabidopsis thaliana
ccatcgattggctttgt

SEQ ID NO: 71607 - DNA, 17 bp, Arabidopsis thaliana
ccatcgccatccacaag

SEQ ID NO: 71608 - DNA, 17 bp, Arabidopsis thaliana
ccatcgccatcgtaacc

SEQ ID NO: 71609 - DNA, 17 bp, Arabidopsis thaliana
ccatcgccatctttgta

SEQ ID NO: 71610 - DNA, 17 bp, Arabidopsis thaliana
ccatcgccatctttgtg

SEQ ID NO: 71611 - DNA, 17 bp, Arabidopsis thaliana
ccatcgccgcaattcag

SEQ ID NO: 71612 - DNA, 17 bp, Arabidopsis thaliana
ccatcgcttgtctgcag

SEQ ID NO: 71613 - DNA, 17 bp, Arabidopsis thaliana
ccatcgtagatgtcaag

SEQ ID NO: 71614 - DNA, 17 bp, Arabidopsis thaliana
ccatcgtcactaccttt

SEQ ID NO: 71615 - DNA, 17 bp, Arabidopsis thaliana
ccatcgtcggccagaag

SEQ ID NO: 71616 - DNA, 17 bp, Arabidopsis thaliana
ccatcgtctatctacta

SEQ ID NO: 71617 - DNA, 17 bp, Arabidopsis thaliana
ccatcgtgatggtaatc

SEQ ID NO: 71618 - DNA, 17 bp, Arabidopsis thaliana
ccatctagtagctggtt

SEQ ID NO: 71619 - DNA, 17 bp, Arabidopsis thaliana
ccatctattgatcctgg

SEQ ID NO: 71620 - DNA, 17 bp, Arabidopsis thaliana
ccatctccactaagtcg

SEQ ID NO: 71621 - DNA, 17 bp, Arabidopsis thaliana
ccatctccatcaatggt

SEQ ID NO: 71622 - DNA, 17 bp, Arabidopsis thaliana
ccatctccatcggagta

SEQ ID NO: 71623 - DNA, 17 bp, Arabidopsis thaliana
ccatctccttcaccgcg

SEQ ID NO: 71624 - DNA, 17 bp, Arabidopsis thaliana
ccatctcgggtttacgt

SEQ ID NO: 71625 - DNA, 17 bp, Arabidopsis thaliana
ccatctcgttggaacta

SEQ ID NO: 71626 - DNA, 17 bp, Arabidopsis thaliana
ccatctctgctggagcc

SEQ ID NO: 71627 - DNA, 17 bp, Arabidopsis thaliana
ccatctgaggaagatgt

SEQ ID NO: 71628 - DNA, 17 bp, Arabidopsis thaliana
ccatctgattgagccaa

SEQ ID NO: 71629 - DNA, 17 bp, Arabidopsis thaliana
ccatcttatttcacttc

SEQ ID NO: 71630 - DNA, 17 bp, Arabidopsis thaliana
ccatcttcgaccatcaa

SEQ ID NO: 71631 - DNA, 17 bp, Arabidopsis thaliana
ccatcttgttgacatcg

SEQ ID NO: 71632 - DNA, 17 bp, Arabidopsis thaliana
ccatctttttttggatc

SEQ ID NO: 71633 - DNA, 17 bp, Arabidopsis thaliana
ccatgaatttgatgacc

SEQ ID NO: 71634 - DNA, 17 bp, Arabidopsis thaliana
ccatgaattttgaccca

SEQ ID NO: 71635 - DNA, 17 bp, Arabidopsis thaliana
ccatgaccacttgtttc

SEQ ID NO: 71636 - DNA, 17 bp, Arabidopsis thaliana
ccatgacccagaagctt

SEQ ID NO: 71637 - DNA, 17 bp, Arabidopsis thaliana
ccatgaccgggttgaac

SEQ ID NO: 71638 - DNA, 17 bp, Arabidopsis thaliana
ccatgacgattgtggac

SEQ ID NO: 71639 - DNA, 17 bp, Arabidopsis thaliana
ccatgactcatcggatt

SEQ ID NO: 71640 - DNA, 17 bp, Arabidopsis thaliana
ccatgactctcgggacc

SEQ ID NO: 71641 - DNA, 17 bp, Arabidopsis thaliana
ccatgactctggctcat

SEQ ID NO: 71642 - DNA, 17 bp, Arabidopsis thaliana
ccatgacttctgtgtac

SEQ ID NO: 71643 - DNA, 17 bp, Arabidopsis thaliana
ccatgatatagtcgcgg

SEQ ID NO: 71644 - DNA, 17 bp, Arabidopsis thaliana
ccatgatatccgtcgac

SEQ ID NO: 71645 - DNA, 17 bp, Arabidopsis thaliana
ccatgatcaatggtgcc

SEQ ID NO: 71646 - DNA, 17 bp, Arabidopsis thaliana
ccatgatcaatggtgtc

SEQ ID NO: 71647 - DNA, 17 bp, Arabidopsis thaliana
ccatgatcactggtgtc

SEQ ID NO: 71648 - DNA, 17 bp, Arabidopsis thaliana
ccatgatcattggtgtc

SEQ ID NO: 71649 - DNA, 17 bp, Arabidopsis thaliana
ccatgatgtttatcagc

SEQ ID NO: 71650 - DNA, 17 bp, Arabidopsis thaliana
ccatgattccgactctg

SEQ ID NO: 71651 - DNA, 17 bp, Arabidopsis thaliana
ccatgccagacttttcc

SEQ ID NO: 71652 - DNA, 17 bp, Arabidopsis thaliana
ccatgcctgtcgggacc

SEQ ID NO: 71653 - DNA, 17 bp, Arabidopsis thaliana
ccatgcgccaaaatcta

SEQ ID NO: 71654 - DNA, 17 bp, Arabidopsis thaliana
ccatgcgcttgatggac

SEQ ID NO: 71655 - DNA, 17 bp, Arabidopsis thaliana
ccatgcgcttgatggat

SEQ ID NO: 71656 - DNA, 17 bp, Arabidopsis thaliana
ccatgcgttgcactact

SEQ ID NO: 71657 - DNA, 17 bp, Arabidopsis thaliana
ccatgctaacgcactgt

SEQ ID NO: 71658 - DNA, 17 bp, Arabidopsis thaliana
ccatgctatttgacctg

SEQ ID NO: 71659 - DNA, 17 bp, Arabidopsis thaliana
ccatgctcttggtgact

SEQ ID NO: 71660 - DNA, 17 bp, Arabidopsis thaliana
ccatgctgctgcgcaag

SEQ ID NO: 71661 - DNA, 17 bp, Arabidopsis thaliana
ccatgctgtggtttgac

SEQ ID NO: 71662 - DNA, 17 bp, Arabidopsis thaliana
ccatgcttctttccact

SEQ ID NO: 71663 - DNA, 17 bp, Arabidopsis thaliana
ccatggaaaattccttt

SEQ ID NO: 71664 - DNA, 17 bp, Arabidopsis thaliana
ccatggacttaggatca

SEQ ID NO: 71665 - DNA, 17 bp, Arabidopsis thaliana
ccatggacttgcccata

SEQ ID NO: 71666 - DNA, 17 bp, Arabidopsis thaliana
ccatggatactaggcgc

SEQ ID NO: 71667 - DNA, 17 bp, Arabidopsis thaliana
ccatggcacgtctgccc

SEQ ID NO: 71668 - DNA, 17 bp, Arabidopsis thaliana
ccatggcatttgcccta

SEQ ID NO: 71669 - DNA, 17 bp, Arabidopsis thaliana
ccatggcctgctggctc

SEQ ID NO: 71670 - DNA, 17 bp, Arabidopsis thaliana
ccatggcctgttctaga

SEQ ID NO: 71671 - DNA, 17 bp, Arabidopsis thaliana
ccatggccttcaacacg

SEQ ID NO: 71672 - DNA, 17 bp, Arabidopsis thaliana
ccatggcctttccagtg

SEQ ID NO: 71673 - DNA, 17 bp, Arabidopsis thaliana
ccatggcgtcagaccat

SEQ ID NO: 71674 - DNA, 17 bp, Arabidopsis thaliana
ccatggctctgagcctc

SEQ ID NO: 71675 - DNA, 17 bp, Arabidopsis thaliana
ccatggctgaaactgag

SEQ ID NO: 71676 - DNA, 17 bp, Arabidopsis thaliana
ccatggctgtctattca

SEQ ID NO: 71677 - DNA, 17 bp, Arabidopsis thaliana
ccatggcttactttcaa

SEQ ID NO: 71678 - DNA, 17 bp, Arabidopsis thaliana
ccatggcttactttcta

SEQ ID NO: 71679 - DNA, 17 bp, Arabidopsis thaliana
ccatggcttcatattaa

SEQ ID NO: 71680 - DNA, 17 bp, Arabidopsis thaliana
ccatgggaagatttcgt

SEQ ID NO: 71681 - DNA, 17 bp, Arabidopsis thaliana
ccatgggaattggcact

SEQ ID NO: 71682 - DNA, 17 bp, Arabidopsis thaliana
ccatgggataccctctc

SEQ ID NO: 71683 - DNA, 17 bp, Arabidopsis thaliana
ccatgggatgggtcggc

SEQ ID NO: 71684 - DNA, 17 bp, Arabidopsis thaliana
ccatgggccaagtgctt

SEQ ID NO: 71685 - DNA, 17 bp, Arabidopsis thaliana
ccatgggccatgacctc

SEQ ID NO: 71686 - DNA, 17 bp, Arabidopsis thaliana
ccatgggcgctaatatt

SEQ ID NO: 71687 - DNA, 17 bp, Arabidopsis thaliana
ccatgggctaagctcag

SEQ ID NO: 71688 - DNA, 17 bp, Arabidopsis thaliana
ccatgggctgcgatcat

SEQ ID NO: 71689 - DNA, 17 bp, Arabidopsis thaliana
ccatggggatggtcgac

SEQ ID NO: 71690 - DNA, 17 bp, Arabidopsis thaliana
ccatgggtttaggcttc

SEQ ID NO: 71691 - DNA, 17 bp, Arabidopsis thaliana
ccatggtccaacctggt

SEQ ID NO: 71692 - DNA, 17 bp, Arabidopsis thaliana
ccatggttgaatccgct

SEQ ID NO: 71693 - DNA, 17 bp, Arabidopsis thaliana
ccatggttggcgactct

SEQ ID NO: 71694 - DNA, 17 bp, Arabidopsis thaliana
ccatgtaagatgagcaa

SEQ ID NO: 71695 - DNA, 17 bp, Arabidopsis thaliana
ccatgtaagcacatcgg

SEQ ID NO: 71696 - DNA, 17 bp, Arabidopsis thaliana
ccatgtaagcacgtcgg

SEQ ID NO: 71697 - DNA, 17 bp, Arabidopsis thaliana
ccatgtcatccaatgca

SEQ ID NO: 71698 - DNA, 17 bp, Arabidopsis thaliana
ccatgtccagatgggtt

SEQ ID NO: 71699 - DNA, 17 bp, Arabidopsis thaliana
ccatgtccatatgggca

SEQ ID NO: 71700 - DNA, 17 bp, Arabidopsis thaliana
ccatgtccctctcgtgt

SEQ ID NO: 71701 - DNA, 17 bp, Arabidopsis thaliana
ccatgtccgtcgttgcc

SEQ ID NO: 71702 - DNA, 17 bp, Arabidopsis thaliana
ccatgtcggctctcttg

SEQ ID NO: 71703 - DNA, 17 bp, Arabidopsis thaliana
ccatgtctatttaggct

SEQ ID NO: 71704 - DNA, 17 bp, Arabidopsis thaliana
ccatgtcttcatcaccg

SEQ ID NO: 71705 - DNA, 17 bp, Arabidopsis thaliana
ccatgtcttgaggattg

SEQ ID NO: 71706 - DNA, 17 bp, Arabidopsis thaliana
ccatgtcttttctgcgc

SEQ ID NO: 71707 - DNA, 17 bp, Arabidopsis thaliana
ccatgtggcgtggaatg

SEQ ID NO: 71708 - DNA, 17 bp, Arabidopsis thaliana
ccatgtggcttggatcg

SEQ ID NO: 71709 - DNA, 17 bp, Arabidopsis thaliana
ccatgtgggtcatcgtg

SEQ ID NO: 71710 - DNA, 17 bp, Arabidopsis thaliana
ccatgtgttctctttgc

SEQ ID NO: 71711 - DNA, 17 bp, Arabidopsis thaliana
ccatgtgtttcccgcga

SEQ ID NO: 71712 - DNA, 17 bp, Arabidopsis thaliana
ccatgttggaagtttcc

SEQ ID NO: 71713 - DNA, 17 bp, Arabidopsis thaliana
ccatgttgggtgcagct

SEQ ID NO: 71714 - DNA, 17 bp, Arabidopsis thaliana
ccatgtttctttgtccc

SEQ ID NO: 71715 - DNA, 17 bp, Arabidopsis thaliana
ccatgtttgctgatttg

SEQ ID NO: 71716 - DNA, 17 bp, Arabidopsis thaliana
ccatgttttattttcag

SEQ ID NO: 71717 - DNA, 17 bp, Arabidopsis thaliana
ccatgttttgttcaatg

SEQ ID NO: 71718 - DNA, 17 bp, Arabidopsis thaliana
ccattacaagcctaagg

SEQ ID NO: 71719 - DNA, 17 bp, Arabidopsis thaliana
ccattacagaccacctt

SEQ ID NO: 71720 - DNA, 17 bp, Arabidopsis thaliana
ccattacattttatcgg

SEQ ID NO: 71721 - DNA, 17 bp, Arabidopsis thaliana
ccattaccgctcaggac

SEQ ID NO: 71722 - DNA, 17 bp, Arabidopsis thaliana
ccattacgactggtgtg

SEQ ID NO: 71723 - DNA, 17 bp, Arabidopsis thaliana
ccattactggccagttc

SEQ ID NO: 71724 - DNA, 17 bp, Arabidopsis thaliana
ccattagattttgaccc

SEQ ID NO: 71725 - DNA, 17 bp, Arabidopsis thaliana
ccattagtcgcttgatt

SEQ ID NO: 71726 - DNA, 17 bp, Arabidopsis thaliana
ccattagtgatgagggt

SEQ ID NO: 71727 - DNA, 17 bp, Arabidopsis thaliana
ccattagttgaagaact

SEQ ID NO: 71728 - DNA, 17 bp, Arabidopsis thaliana
ccattagtttcacctag

SEQ ID NO: 71729 - DNA, 17 bp, Arabidopsis thaliana
ccattatactctggatg

SEQ ID NO: 71730 - DNA, 17 bp, Arabidopsis thaliana
ccattatagcgtttgac

SEQ ID NO: 71731 - DNA, 17 bp, Arabidopsis thaliana
ccattatcactctatgg

SEQ ID NO: 71732 - DNA, 17 bp, Arabidopsis thaliana
ccattatcattctatgg

SEQ ID NO: 71733 - DNA, 17 bp, Arabidopsis thaliana
ccattatggaccgtcca

SEQ ID NO: 71734 - DNA, 17 bp, Arabidopsis thaliana
ccattattgttcgggat

SEQ ID NO: 71735 - DNA, 17 bp, Arabidopsis thaliana
ccattcaacatgtccat

SEQ ID NO: 71736 - DNA, 17 bp, Arabidopsis thaliana
ccattcacggataggat

SEQ ID NO: 71737 - DNA, 17 bp, Arabidopsis thaliana
ccattcaggaaccgatg

SEQ ID NO: 71738 - DNA, 17 bp, Arabidopsis thaliana
ccattcaggaactgatg

SEQ ID NO: 71739 - DNA, 17 bp, Arabidopsis thaliana
ccattcagttgtgtcgt

SEQ ID NO: 71740 - DNA, 17 bp, Arabidopsis thaliana
ccattccggtttcagtt

SEQ ID NO: 71741 - DNA, 17 bp, Arabidopsis thaliana
ccattcctcatagtagg

SEQ ID NO: 71742 - DNA, 17 bp, Arabidopsis thaliana
ccattcgattgggaaag

SEQ ID NO: 71743 - DNA, 17 bp, Arabidopsis thaliana
ccattcgccgtgggtcc

SEQ ID NO: 71744 - DNA, 17 bp, Arabidopsis thaliana
ccattcgccgtgggtct

SEQ ID NO: 71745 - DNA, 17 bp, Arabidopsis thaliana
ccattcggagctttcgc

SEQ ID NO: 71746 - DNA, 17 bp, Arabidopsis thaliana
ccattcggagctttcgt

SEQ ID NO: 71747 - DNA, 17 bp, Arabidopsis thaliana
ccattcggatggactct

SEQ ID NO: 71748 - DNA, 17 bp, Arabidopsis thaliana
ccattcggttgcttctt

SEQ ID NO: 71749 - DNA, 17 bp, Arabidopsis thaliana
ccattcggttggagaag

SEQ ID NO: 71750 - DNA, 17 bp, Arabidopsis thaliana
ccattcggttgggaaga

SEQ ID NO: 71751 - DNA, 17 bp, Arabidopsis thaliana
ccattcggttggggaag

SEQ ID NO: 71752 - DNA, 17 bp, Arabidopsis thaliana
ccattctcatacagaat

SEQ ID NO: 71753 - DNA, 17 bp, Arabidopsis thaliana
ccattctctctagggct

SEQ ID NO: 71754 - DNA, 17 bp, Arabidopsis thaliana
ccattctcttactccct

SEQ ID NO: 71755 - DNA, 17 bp, Arabidopsis thaliana
ccattctcttcggttca

SEQ ID NO: 71756 - DNA, 17 bp, Arabidopsis thaliana
ccattctctttaaggca

SEQ ID NO: 71757 - DNA, 17 bp, Arabidopsis thaliana
ccattctgtgaatgtcg

SEQ ID NO: 71758 - DNA, 17 bp, Arabidopsis thaliana
ccattcttcatggtttc

SEQ ID NO: 71759 - DNA, 17 bp, Arabidopsis thaliana
ccattcttctcaaatgg

SEQ ID NO: 71760 - DNA, 17 bp, Arabidopsis thaliana
ccattgaacaaatttag

SEQ ID NO: 71761 - DNA, 17 bp, Arabidopsis thaliana
ccattgaccaatgtgtt

SEQ ID NO: 71762 - DNA, 17 bp, Arabidopsis thaliana
ccattgacgagagaact

SEQ ID NO: 71763 - DNA, 17 bp, Arabidopsis thaliana
ccattgactggcagtca

SEQ ID NO: 71764 - DNA, 17 bp, Arabidopsis thaliana
ccattgacttattgtcg

SEQ ID NO: 71765 - DNA, 17 bp, Arabidopsis thaliana
ccattgactttgtcgac

SEQ ID NO: 71766 - DNA, 17 bp, Arabidopsis thaliana
ccattgacttttgtcga

SEQ ID NO: 71767 - DNA, 17 bp, Arabidopsis thaliana
ccattgactttttgtcc

SEQ ID NO: 71768 - DNA, 17 bp, Arabidopsis thaliana
ccattgactttttgtcg

SEQ ID NO: 71769 - DNA, 17 bp, Arabidopsis thaliana
ccattgactttttgtct

SEQ ID NO: 71770 - DNA, 17 bp, Arabidopsis thaliana
ccattgactttttgtta

SEQ ID NO: 71771 - DNA, 17 bp, Arabidopsis thaliana
ccattgacttttttgtt

SEQ ID NO: 71772 - DNA, 17 bp, Arabidopsis thaliana
ccattgatgattctgga

SEQ ID NO: 71773 - DNA, 17 bp, Arabidopsis thaliana
ccattgcacggaccttg

SEQ ID NO: 71774 - DNA, 17 bp, Arabidopsis thaliana
ccattgcgctttgattt

SEQ ID NO: 71775 - DNA, 17 bp, Arabidopsis thaliana
ccattgcgttcattagc

SEQ ID NO: 71776 - DNA, 17 bp, Arabidopsis thaliana
ccattgcgttgcgtaga

SEQ ID NO: 71777 - DNA, 17 bp, Arabidopsis thaliana
ccattgcgtttgagagg

SEQ ID NO: 71778 - DNA, 17 bp, Arabidopsis thaliana
ccattgctcatgtggct

SEQ ID NO: 71779 - DNA, 17 bp, Arabidopsis thaliana
ccattgctctgtattct

SEQ ID NO: 71780 - DNA, 17 bp, Arabidopsis thaliana
ccattgctgtggacttg

SEQ ID NO: 71781 - DNA, 17 bp, Arabidopsis thaliana
ccattgctttccccatc

SEQ ID NO: 71782 - DNA, 17 bp, Arabidopsis thaliana
ccattggaccaacagct

SEQ ID NO: 71783 - DNA, 17 bp, Arabidopsis thaliana
ccattggactctcaatt

SEQ ID NO: 71784 - DNA, 17 bp, Arabidopsis thaliana
ccattggagatgctcta

SEQ ID NO: 71785 - DNA, 17 bp, Arabidopsis thaliana
ccattggagatggccta

SEQ ID NO: 71786 - DNA, 17 bp, Arabidopsis thaliana
ccattggagatggtcta

SEQ ID NO: 71787 - DNA, 17 bp, Arabidopsis thaliana
ccattggagggcaagtc

SEQ ID NO: 71788 - DNA, 17 bp, Arabidopsis thaliana
ccattgggaagcgcttg

SEQ ID NO: 71789 - DNA, 17 bp, Arabidopsis thaliana
ccattgggccaagggga

SEQ ID NO: 71790 - DNA, 17 bp, Arabidopsis thaliana
ccattgggcctaagccc

SEQ ID NO: 71791 - DNA, 17 bp, Arabidopsis thaliana
ccattgggtcgaggttg

SEQ ID NO: 71792 - DNA, 17 bp, Arabidopsis thaliana
ccattggtcatgtccac

SEQ ID NO: 71793 - DNA, 17 bp, Arabidopsis thaliana
ccattggtctaacgggc

SEQ ID NO: 71794 - DNA, 17 bp, Arabidopsis thaliana
ccattggtgctgctcta

SEQ ID NO: 71795 - DNA, 17 bp, Arabidopsis thaliana
ccattggtgtgacggcc

SEQ ID NO: 71796 - DNA, 17 bp, Arabidopsis thaliana
ccattgtccacgtgtac

SEQ ID NO: 71797 - DNA, 17 bp, Arabidopsis thaliana
ccattgtccattatgga

SEQ ID NO: 71798 - DNA, 17 bp, Arabidopsis thaliana
ccattgtccctgtctac

SEQ ID NO: 71799 - DNA, 17 bp, Arabidopsis thaliana
ccattgtcctgcttatt

SEQ ID NO: 71800 - DNA, 17 bp, Arabidopsis thaliana
ccattgtcctgcttctt

SEQ ID NO: 71801 - DNA, 17 bp, Arabidopsis thaliana
ccattgtcgtccagcgg

SEQ ID NO: 71802 - DNA, 17 bp, Arabidopsis thaliana
ccattgtcgtccagcgt

SEQ ID NO: 71803 - DNA, 17 bp, Arabidopsis thaliana
ccattgtgctgaccgca

SEQ ID NO: 71804 - DNA, 17 bp, Arabidopsis thaliana
ccattgtggactcgcga

SEQ ID NO: 71805 - DNA, 17 bp, Arabidopsis thaliana
ccattgtgtatcttcta

SEQ ID NO: 71806 - DNA, 17 bp, Arabidopsis thaliana
ccattgtgtcgtactat

SEQ ID NO: 71807 - DNA, 17 bp, Arabidopsis thaliana
ccatttactcgaacagg

SEQ ID NO: 71808 - DNA, 17 bp, Arabidopsis thaliana
ccatttactttttgtcg

SEQ ID NO: 71809 - DNA, 17 bp, Arabidopsis thaliana
ccatttagggcatcagg

SEQ ID NO: 71810 - DNA, 17 bp, Arabidopsis thaliana
ccatttcatccatgcgt

SEQ ID NO: 71811 - DNA, 17 bp, Arabidopsis thaliana
ccatttcccggctggtg

SEQ ID NO: 71812 - DNA, 17 bp, Arabidopsis thaliana
ccatttccctatgtcgc

SEQ ID NO: 71813 - DNA, 17 bp, Arabidopsis thaliana
ccatttcggaaagccca

SEQ ID NO: 71814 - DNA, 17 bp, Arabidopsis thaliana
ccatttctaagcatttg

SEQ ID NO: 71815 - DNA, 17 bp, Arabidopsis thaliana
ccatttctctacccaat

SEQ ID NO: 71816 - DNA, 17 bp, Arabidopsis thaliana
ccatttctctacgctat

SEQ ID NO: 71817 - DNA, 17 bp, Arabidopsis thaliana
ccatttgacgttatcgg

SEQ ID NO: 71818 - DNA, 17 bp, Arabidopsis thaliana
ccatttgatcgccttgt

SEQ ID NO: 71819 - DNA, 17 bp, Arabidopsis thaliana
ccatttgatcgtcttgt

SEQ ID NO: 71820 - DNA, 17 bp, Arabidopsis thaliana
ccatttgatgtggcaag

SEQ ID NO: 71821 - DNA, 17 bp, Arabidopsis thaliana
ccatttgcactcgtttg

SEQ ID NO: 71822 - DNA, 17 bp, Arabidopsis thaliana
ccatttgccaaggatgt

SEQ ID NO: 71823 - DNA, 17 bp, Arabidopsis thaliana
ccatttgccgtccatta

SEQ ID NO: 71824 - DNA, 17 bp, Arabidopsis thaliana
ccatttggacttgactt

SEQ ID NO: 71825 - DNA, 17 bp, Arabidopsis thaliana
ccatttggttgattcta

SEQ ID NO: 71826 - DNA, 17 bp, Arabidopsis thaliana
ccatttggttgcaaagc

SEQ ID NO: 71827 - DNA, 17 bp, Arabidopsis thaliana
ccatttgtctaatggtt

SEQ ID NO: 71828 - DNA, 17 bp, Arabidopsis thaliana
ccatttgtgatgggcgt

SEQ ID NO: 71829 - DNA, 17 bp, Arabidopsis thaliana
ccatttgttcacatgtc

SEQ ID NO: 71830 - DNA, 17 bp, Arabidopsis thaliana
ccatttgttccttgcgc

SEQ ID NO: 71831 - DNA, 17 bp, Arabidopsis thaliana
ccattttagtcttgccg

SEQ ID NO: 71832 - DNA, 17 bp, Arabidopsis thaliana
ccattttagtttggccc

SEQ ID NO: 71833 - DNA, 17 bp, Arabidopsis thaliana
ccattttcgtgatttgg

SEQ ID NO: 71834 - DNA, 17 bp, Arabidopsis thaliana
ccattttctcaaagcca

SEQ ID NO: 71835 - DNA, 17 bp, Arabidopsis thaliana
ccattttctctcagaag

SEQ ID NO: 71836 - DNA, 17 bp, Arabidopsis thaliana
ccattttctttaggctt

SEQ ID NO: 71837 - DNA, 17 bp, Arabidopsis thaliana
ccattttgacacatagt

SEQ ID NO: 71838 - DNA, 17 bp, Arabidopsis thaliana
ccattttgatacatagt

SEQ ID NO: 71839 - DNA, 17 bp, Arabidopsis thaliana
ccatttttagcaatgtg

SEQ ID NO: 71840 - DNA, 17 bp, Arabidopsis thaliana
ccatttttgatcgaaca

SEQ ID NO: 71841 - DNA, 17 bp, Arabidopsis thaliana
ccatttttgggaacgct

SEQ ID NO: 71842 - DNA, 17 bp, Arabidopsis thaliana
ccattttttctccttgg

SEQ ID NO: 71843 - DNA, 17 bp, Arabidopsis thaliana
ccattttttgaaagttc

SEQ ID NO: 71844 - DNA, 17 bp, Arabidopsis thaliana
ccattttttgaaagttg

SEQ ID NO: 71845 - DNA, 17 bp, Arabidopsis thaliana
ccatttttttggtgcct

SEQ ID NO: 71846 - DNA, 17 bp, Arabidopsis thaliana
cccaaaaaccagatccg

SEQ ID NO: 71847 - DNA, 17 bp, Arabidopsis thaliana
cccaaaaccgcaccgca

SEQ ID NO: 71848 - DNA, 17 bp, Arabidopsis thaliana
cccaaacccaactggac

SEQ ID NO: 71849 - DNA, 17 bp, Arabidopsis thaliana
cccaaacttggcatgta

SEQ ID NO: 71850 - DNA, 17 bp, Arabidopsis thaliana
cccaaacttggcatgtg

SEQ ID NO: 71851 - DNA, 17 bp, Arabidopsis thaliana
cccaaagattacgggct

SEQ ID NO: 71852 - DNA, 17 bp, Arabidopsis thaliana
cccaaagcggtaagccg

SEQ ID NO: 71853 - DNA, 17 bp, Arabidopsis thaliana
cccaaaggcacgtgtcg

SEQ ID NO: 71854 - DNA, 17 bp, Arabidopsis thaliana
cccaaatctgggttctc

SEQ ID NO: 71855 - DNA, 17 bp, Arabidopsis thaliana
cccaaattcgctacagt

SEQ ID NO: 71856 - DNA, 17 bp, Arabidopsis thaliana
cccaacaactgcgggaa

SEQ ID NO: 71857 - DNA, 17 bp, Arabidopsis thaliana
cccaacacggggaaact

SEQ ID NO: 71858 - DNA, 17 bp, Arabidopsis thaliana
cccaaccgaatgaccag

SEQ ID NO: 71859 - DNA, 17 bp, Arabidopsis thaliana
cccaaccgaatggccga

SEQ ID NO: 71860 - DNA, 17 bp, Arabidopsis thaliana
cccaaccgaatggccgg

SEQ ID NO: 71861 - DNA, 17 bp, Arabidopsis thaliana
cccaaccggatcttaaa

SEQ ID NO: 71862 - DNA, 17 bp, Arabidopsis thaliana
cccaactctgttctgtc

SEQ ID NO: 71863 - DNA, 17 bp, Arabidopsis thaliana
cccaactgacagacttt

SEQ ID NO: 71864 - DNA, 17 bp, Arabidopsis thaliana
cccaactggatctgacc

SEQ ID NO: 71865 - DNA, 17 bp, Arabidopsis thaliana
cccaactggatcttaaa

SEQ ID NO: 71866 - DNA, 17 bp, Arabidopsis thaliana
cccaactggatttgacc

SEQ ID NO: 71867 - DNA, 17 bp, Arabidopsis thaliana
cccaactttcaaaaaat

SEQ ID NO: 71868 - DNA, 17 bp, Arabidopsis thaliana
cccaagaccttggatgt

SEQ ID NO: 71869 - DNA, 17 bp, Arabidopsis thaliana
cccaagaggccgtcaga

SEQ ID NO: 71870 - DNA, 17 bp, Arabidopsis thaliana
cccaagatgagtgctct

SEQ ID NO: 71871 - DNA, 17 bp, Arabidopsis thaliana
cccaagattcgcactgg

SEQ ID NO: 71872 - DNA, 17 bp, Arabidopsis thaliana
cccaagcagatagactc

SEQ ID NO: 71873 - DNA, 17 bp, Arabidopsis thaliana
cccaagcatttgtggtc

SEQ ID NO: 71874 - DNA, 17 bp, Arabidopsis thaliana
cccaagcccaaaaccgc

SEQ ID NO: 71875 - DNA, 17 bp, Arabidopsis thaliana
cccaaggacaggttttg

SEQ ID NO: 71876 - DNA, 17 bp, Arabidopsis thaliana
cccaaggcggaagtcag

SEQ ID NO: 71877 - DNA, 17 bp, Arabidopsis thaliana
cccaaggctcgcttcgg

SEQ ID NO: 71878 - DNA, 17 bp, Arabidopsis thaliana
cccaagggggtgttatt

SEQ ID NO: 71879 - DNA, 17 bp, Arabidopsis thaliana
cccaagggttcctccgc

SEQ ID NO: 71880 - DNA, 17 bp, Arabidopsis thaliana
cccaagtcaggtctatc

SEQ ID NO: 71881 - DNA, 17 bp, Arabidopsis thaliana
cccaagtgactacatca

SEQ ID NO: 71882 - DNA, 17 bp, Arabidopsis thaliana
cccaagtgactacatcg

SEQ ID NO: 71883 - DNA, 17 bp, Arabidopsis thaliana
cccaagtgtctacagaa

SEQ ID NO: 71884 - DNA, 17 bp, Arabidopsis thaliana
cccaagttcaggaatac

SEQ ID NO: 71885 - DNA, 17 bp, Arabidopsis thaliana
cccaagttcaggaatat

SEQ ID NO: 71886 - DNA, 17 bp, Arabidopsis thaliana
cccaataccttggtaca

SEQ ID NO: 71887 - DNA, 17 bp, Arabidopsis thaliana
cccaatacttggcttgc

SEQ ID NO: 71888 - DNA, 17 bp, Arabidopsis thaliana
cccaatacttgggtcgg

SEQ ID NO: 71889 - DNA, 17 bp, Arabidopsis thaliana
cccaatagggtacatct

SEQ ID NO: 71890 - DNA, 17 bp, Arabidopsis thaliana
cccaatatgtgtttgtg

SEQ ID NO: 71891 - DNA, 17 bp, Arabidopsis thaliana
cccaatccactttgcct

SEQ ID NO: 71892 - DNA, 17 bp, Arabidopsis thaliana
cccaatcccttgggata

SEQ ID NO: 71893 - DNA, 17 bp, Arabidopsis thaliana
cccaatcctgacacggg

SEQ ID NO: 71894 - DNA, 17 bp, Arabidopsis thaliana
cccaatggctgcatatg

SEQ ID NO: 71895 - DNA, 17 bp, Arabidopsis thaliana
cccaatgggagaaacac

SEQ ID NO: 71896 - DNA, 17 bp, Arabidopsis thaliana
cccaatgggtgagtcgt

SEQ ID NO: 71897 - DNA, 17 bp, Arabidopsis thaliana
cccaatgggttttcttg

SEQ ID NO: 71898 - DNA, 17 bp, Arabidopsis thaliana
cccacaaagggtgttgg

SEQ ID NO: 71899 - DNA, 17 bp, Arabidopsis thaliana
cccacaaatggcaatga

SEQ ID NO: 71900 - DNA, 17 bp, Arabidopsis thaliana
cccacaaatttgggatt

SEQ ID NO: 71901 - DNA, 17 bp, Arabidopsis thaliana
cccacagacggcgccaa

SEQ ID NO: 71902 - DNA, 17 bp, Arabidopsis thaliana
cccacagatgggctttg

SEQ ID NO: 71903 - DNA, 17 bp, Arabidopsis thaliana
cccacagctaaggacgg

SEQ ID NO: 71904 - DNA, 17 bp, Arabidopsis thaliana
cccacagctgttggacc

SEQ ID NO: 71905 - DNA, 17 bp, Arabidopsis thaliana
cccacagggacagcctc

SEQ ID NO: 71906 - DNA, 17 bp, Arabidopsis thaliana
cccacatatgaagtttg

SEQ ID NO: 71907 - DNA, 17 bp, Arabidopsis thaliana
cccacatcatcaacctc

SEQ ID NO: 71908 - DNA, 17 bp, Arabidopsis thaliana
cccacatcctgaactcc

SEQ ID NO: 71909 - DNA, 17 bp, Arabidopsis thaliana
cccacatcggaagttga

SEQ ID NO: 71910 - DNA, 17 bp, Arabidopsis thaliana
cccacatgggttagtcg

SEQ ID NO: 71911 - DNA, 17 bp, Arabidopsis thaliana
cccacattggaagtttg

SEQ ID NO: 71912 - DNA, 17 bp, Arabidopsis thaliana
cccacatttgtcgctaa

SEQ ID NO: 71913 - DNA, 17 bp, Arabidopsis thaliana
cccaccaaacccaccag

SEQ ID NO: 71914 - DNA, 17 bp, Arabidopsis thaliana
cccaccaaatttttgca

SEQ ID NO: 71915 - DNA, 17 bp, Arabidopsis thaliana
cccaccaatagggaacg

SEQ ID NO: 71916 - DNA, 17 bp, Arabidopsis thaliana
cccaccagtccatcggc

SEQ ID NO: 71917 - DNA, 17 bp, Arabidopsis thaliana
cccaccccaagatgagt

SEQ ID NO: 71918 - DNA, 17 bp, Arabidopsis thaliana
cccacccctggcattag

SEQ ID NO: 71919 - DNA, 17 bp, Arabidopsis thaliana
cccaccctggaaacggc

SEQ ID NO: 71920 - DNA, 17 bp, Arabidopsis thaliana
cccaccctggcaacggc

SEQ ID NO: 71921 - DNA, 17 bp, Arabidopsis thaliana
cccaccgttggggctgc

SEQ ID NO: 71922 - DNA, 17 bp, Arabidopsis thaliana
cccacctatagggaacg

SEQ ID NO: 71923 - DNA, 17 bp, Arabidopsis thaliana
cccacctgggtaaccaa

SEQ ID NO: 71924 - DNA, 17 bp, Arabidopsis thaliana
cccaccttagctcagtt

SEQ ID NO: 71925 - DNA, 17 bp, Arabidopsis thaliana
cccacgagaagtaccgc

SEQ ID NO: 71926 - DNA, 17 bp, Arabidopsis thaliana
cccacgcaaggcaagcc

SEQ ID NO: 71927 - DNA, 17 bp, Arabidopsis thaliana
cccacgcggactaccat

SEQ ID NO: 71928 - DNA, 17 bp, Arabidopsis thaliana
cccacgcggactaccgt

SEQ ID NO: 71929 - DNA, 17 bp, Arabidopsis thaliana
cccacgcggattacggc

SEQ ID NO: 71930 - DNA, 17 bp, Arabidopsis thaliana
cccacgcggattacggt

SEQ ID NO: 71931 - DNA, 17 bp, Arabidopsis thaliana
cccacggagctatctga

SEQ ID NO: 71932 - DNA, 17 bp, Arabidopsis thaliana
cccacgggtttttttaa

SEQ ID NO: 71933 - DNA, 17 bp, Arabidopsis thaliana
cccacggtggggatgtt

SEQ ID NO: 71934 - DNA, 17 bp, Arabidopsis thaliana
cccacggtgtacagatt

SEQ ID NO: 71935 - DNA, 17 bp, Arabidopsis thaliana
cccacgtattaaggctt

SEQ ID NO: 71936 - DNA, 17 bp, Arabidopsis thaliana
cccacgtctgcccgtgt

SEQ ID NO: 71937 - DNA, 17 bp, Arabidopsis thaliana
cccacgtctgcctgggt

SEQ ID NO: 71938 - DNA, 17 bp, Arabidopsis thaliana
cccactagtgctgctat

SEQ ID NO: 71939 - DNA, 17 bp, Arabidopsis thaliana
cccactattagctgact

SEQ ID NO: 71940 - DNA, 17 bp, Arabidopsis thaliana
cccactcacaatgccct

SEQ ID NO: 71941 - DNA, 17 bp, Arabidopsis thaliana
cccactcacaatgccgt

SEQ ID NO: 71942 - DNA, 17 bp, Arabidopsis thaliana
cccactcgacccgtctt

SEQ ID NO: 71943 - DNA, 17 bp, Arabidopsis thaliana
cccactcgagatgatgg

SEQ ID NO: 71944 - DNA, 17 bp, Arabidopsis thaliana
cccactgccatgctagg

SEQ ID NO: 71945 - DNA, 17 bp, Arabidopsis thaliana
cccactggtaaagacga

SEQ ID NO: 71946 - DNA, 17 bp, Arabidopsis thaliana
cccactggtaggggcgg

SEQ ID NO: 71947 - DNA, 17 bp, Arabidopsis thaliana
cccactgtccctgtcta

SEQ ID NO: 71948 - DNA, 17 bp, Arabidopsis thaliana
cccacttccatttcctg

SEQ ID NO: 71949 - DNA, 17 bp, Arabidopsis thaliana
cccacttggtgtttgat

SEQ ID NO: 71950 - DNA, 17 bp, Arabidopsis thaliana
cccactttgcagtttga

SEQ ID NO: 71951 - DNA, 17 bp, Arabidopsis thaliana
cccagaacatcaggtgt

SEQ ID NO: 71952 - DNA, 17 bp, Arabidopsis thaliana
cccagaacctcctgata

SEQ ID NO: 71953 - DNA, 17 bp, Arabidopsis thaliana
cccagacacctacggaa

SEQ ID NO: 71954 - DNA, 17 bp, Arabidopsis thaliana
cccagacccgaaaccat

SEQ ID NO: 71955 - DNA, 17 bp, Arabidopsis thaliana
cccagacctagttgtca

SEQ ID NO: 71956 - DNA, 17 bp, Arabidopsis thaliana
cccagacctttgagcat

SEQ ID NO: 71957 - DNA, 17 bp, Arabidopsis thaliana
cccagagacgaggaagg

SEQ ID NO: 71958 - DNA, 17 bp, Arabidopsis thaliana
cccagagacttaaccgc

SEQ ID NO: 71959 - DNA, 17 bp, Arabidopsis thaliana
cccagatattcgtactc

SEQ ID NO: 71960 - DNA, 17 bp, Arabidopsis thaliana
cccagatcgtacgctaa

SEQ ID NO: 71961 - DNA, 17 bp, Arabidopsis thaliana
cccagatgtaagttgct

SEQ ID NO: 71962 - DNA, 17 bp, Arabidopsis thaliana
cccagatgttctgggcc

SEQ ID NO: 71963 - DNA, 17 bp, Arabidopsis thaliana
cccagcagagtccaaga

SEQ ID NO: 71964 - DNA, 17 bp, Arabidopsis thaliana
cccagcaggaggcccgc

SEQ ID NO: 71965 - DNA, 17 bp, Arabidopsis thaliana
cccagcagtggtttgtc

SEQ ID NO: 71966 - DNA, 17 bp, Arabidopsis thaliana
cccagccgacagtgtac

SEQ ID NO: 71967 - DNA, 17 bp, Arabidopsis thaliana
cccagccgtgaggcaat

SEQ ID NO: 71968 - DNA, 17 bp, Arabidopsis thaliana
cccagcgatttccatcg

SEQ ID NO: 71969 - DNA, 17 bp, Arabidopsis thaliana
cccagcgattttgcgga

SEQ ID NO: 71970 - DNA, 17 bp, Arabidopsis thaliana
cccagctacattgggat

SEQ ID NO: 71971 - DNA, 17 bp, Arabidopsis thaliana
cccagctcgggggtccc

SEQ ID NO: 71972 - DNA, 17 bp, Arabidopsis thaliana
cccagctggaccaccaa

SEQ ID NO: 71973 - DNA, 17 bp, Arabidopsis thaliana
cccaggaaaagctcgaa

SEQ ID NO: 71974 - DNA, 17 bp, Arabidopsis thaliana
cccaggaaagactctcc

SEQ ID NO: 71975 - DNA, 17 bp, Arabidopsis thaliana
cccaggactagcagtaa

SEQ ID NO: 71976 - DNA, 17 bp, Arabidopsis thaliana
cccaggagacccgggtt

SEQ ID NO: 71977 - DNA, 17 bp, Arabidopsis thaliana
cccaggagtgatgggtg

SEQ ID NO: 71978 - DNA, 17 bp, Arabidopsis thaliana
cccaggagtgttggctg

SEQ ID NO: 71979 - DNA, 17 bp, Arabidopsis thaliana
cccaggatcgaaacctg

SEQ ID NO: 71980 - DNA, 17 bp, Arabidopsis thaliana
cccaggatcggaacctg

SEQ ID NO: 71981 - DNA, 17 bp, Arabidopsis thaliana
cccaggatcgtaacctg

SEQ ID NO: 71982 - DNA, 17 bp, Arabidopsis thaliana
cccaggcagacgtgccc

SEQ ID NO: 71983 - DNA, 17 bp, Arabidopsis thaliana
cccaggccgatgatctt

SEQ ID NO: 71984 - DNA, 17 bp, Arabidopsis thaliana
cccagggcacgtctgcc

SEQ ID NO: 71985 - DNA, 17 bp, Arabidopsis thaliana
cccaggtcagccgcgcc

SEQ ID NO: 71986 - DNA, 17 bp, Arabidopsis thaliana
cccaggtcaggcgggat

SEQ ID NO: 71987 - DNA, 17 bp, Arabidopsis thaliana
cccaggtcgagtaaccg

SEQ ID NO: 71988 - DNA, 17 bp, Arabidopsis thaliana
cccaggtcgcggtgaga

SEQ ID NO: 71989 - DNA, 17 bp, Arabidopsis thaliana
cccaggtggtcgagtga

SEQ ID NO: 71990 - DNA, 17 bp, Arabidopsis thaliana
cccaggtggtcgagtgg

SEQ ID NO: 71991 - DNA, 17 bp, Arabidopsis thaliana
cccaggtggtgattgag

SEQ ID NO: 71992 - DNA, 17 bp, Arabidopsis thaliana
cccaggttgtttctcgg

SEQ ID NO: 71993 - DNA, 17 bp, Arabidopsis thaliana
cccaggttttttgctta

SEQ ID NO: 71994 - DNA, 17 bp, Arabidopsis thaliana
cccagtatgccccagtt

SEQ ID NO: 71995 - DNA, 17 bp, Arabidopsis thaliana
cccagtattcccgtagt

SEQ ID NO: 71996 - DNA, 17 bp, Arabidopsis thaliana
cccagtctttgtaggca

SEQ ID NO: 71997 - DNA, 17 bp, Arabidopsis thaliana
cccagtgcacgtctgcc

SEQ ID NO: 71998 - DNA, 17 bp, Arabidopsis thaliana
cccagtggtaaatctcc

SEQ ID NO: 71999 - DNA, 17 bp, Arabidopsis thaliana
cccagtgttgatcagag

SEQ ID NO: 72000 - DNA, 17 bp, Arabidopsis thaliana
cccagttatctactgcg

SEQ ID NO: 72001 - DNA, 17 bp, Arabidopsis thaliana
cccagttcaaatccggc

SEQ ID NO: 72002 - DNA, 17 bp, Arabidopsis thaliana
cccagttcaaatccggg

SEQ ID NO: 72003 - DNA, 17 bp, Arabidopsis thaliana
cccagttccgaacccgc

SEQ ID NO: 72004 - DNA, 17 bp, Arabidopsis thaliana
cccagttccgaacccgt

SEQ ID NO: 72005 - DNA, 17 bp, Arabidopsis thaliana
cccagttccgaatccgt

SEQ ID NO: 72006 - DNA, 17 bp, Arabidopsis thaliana
cccagtttctctcagcc

SEQ ID NO: 72007 - DNA, 17 bp, Arabidopsis thaliana
cccatactaacccgagt

SEQ ID NO: 72008 - DNA, 17 bp, Arabidopsis thaliana
cccatatctgtcgcgca

SEQ ID NO: 72009 - DNA, 17 bp, Arabidopsis thaliana
cccatcaacaggctaac

SEQ ID NO: 72010 - DNA, 17 bp, Arabidopsis thaliana
cccatcaactctgtgcg

SEQ ID NO: 72011 - DNA, 17 bp, Arabidopsis thaliana
cccatcagaatgacggc

SEQ ID NO: 72012 - DNA, 17 bp, Arabidopsis thaliana
cccatcagaatgactgc

SEQ ID NO: 72013 - DNA, 17 bp, Arabidopsis thaliana
cccatcatgctcttcgt

SEQ ID NO: 72014 - DNA, 17 bp, Arabidopsis thaliana
cccatccagatcctgga

SEQ ID NO: 72015 - DNA, 17 bp, Arabidopsis thaliana
cccatccgttgataagt

SEQ ID NO: 72016 - DNA, 17 bp, Arabidopsis thaliana
cccatcgaggttggaat

SEQ ID NO: 72017 - DNA, 17 bp, Arabidopsis thaliana
cccatctatcgtttcac

SEQ ID NO: 72018 - DNA, 17 bp, Arabidopsis thaliana
cccatctcggctcttcg

SEQ ID NO: 72019 - DNA, 17 bp, Arabidopsis thaliana
cccatctcttacactca

SEQ ID NO: 72020 - DNA, 17 bp, Arabidopsis thaliana
cccatctggcatgagct

SEQ ID NO: 72021 - DNA, 17 bp, Arabidopsis thaliana
cccatctggcgacgagg

SEQ ID NO: 72022 - DNA, 17 bp, Arabidopsis thaliana
cccatcttgttgagcag

SEQ ID NO: 72023 - DNA, 17 bp, Arabidopsis thaliana
cccatctttcgtcttcc

SEQ ID NO: 72024 - DNA, 17 bp, Arabidopsis thaliana
cccatgaattttgaccc

SEQ ID NO: 72025 - DNA, 17 bp, Arabidopsis thaliana
cccatgagccaacgaac

SEQ ID NO: 72026 - DNA, 17 bp, Arabidopsis thaliana
cccatgaggaccttgct

SEQ ID NO: 72027 - DNA, 17 bp, Arabidopsis thaliana
cccatggcctctgtgct

SEQ ID NO: 72028 - DNA, 17 bp, Arabidopsis thaliana
cccatgggcagcccatt

SEQ ID NO: 72029 - DNA, 17 bp, Arabidopsis thaliana
cccatgtacggtttgct

SEQ ID NO: 72030 - DNA, 17 bp, Arabidopsis thaliana
cccatgtccctctcgtg

SEQ ID NO: 72031 - DNA, 17 bp, Arabidopsis thaliana
cccattagtgatgaggg

SEQ ID NO: 72032 - DNA, 17 bp, Arabidopsis thaliana
cccattcgccgtgcgtc

SEQ ID NO: 72033 - DNA, 17 bp, Arabidopsis thaliana
cccattcgtatttcata

SEQ ID NO: 72034 - DNA, 17 bp, Arabidopsis thaliana
cccattgactaatgcat

SEQ ID NO: 72035 - DNA, 17 bp, Arabidopsis thaliana
cccattgactttttgtc

SEQ ID NO: 72036 - DNA, 17 bp, Arabidopsis thaliana
cccattgcgagatgagg

SEQ ID NO: 72037 - DNA, 17 bp, Arabidopsis thaliana
cccattgggtgatctat

SEQ ID NO: 72038 - DNA, 17 bp, Arabidopsis thaliana
ccccaaatcgattataa

SEQ ID NO: 72039 - DNA, 17 bp, Arabidopsis thaliana
ccccaaccgaatgaccg

SEQ ID NO: 72040 - DNA, 17 bp, Arabidopsis thaliana
ccccaaccgaatgcccg

SEQ ID NO: 72041 - DNA, 17 bp, Arabidopsis thaliana
ccccaaccgaatggccg

SEQ ID NO: 72042 - DNA, 17 bp, Arabidopsis thaliana
ccccaaccgaatggcgg

SEQ ID NO: 72043 - DNA, 17 bp, Arabidopsis thaliana
ccccaactcttcatgcg

SEQ ID NO: 72044 - DNA, 17 bp, Arabidopsis thaliana
ccccaagaagagtgctc

SEQ ID NO: 72045 - DNA, 17 bp, Arabidopsis thaliana
ccccaagatgagtgcac

SEQ ID NO: 72046 - DNA, 17 bp, Arabidopsis thaliana
ccccaagatgagtgccc

SEQ ID NO: 72047 - DNA, 17 bp, Arabidopsis thaliana
ccccaagatgagtgctc

SEQ ID NO: 72048 - DNA, 17 bp, Arabidopsis thaliana
ccccaagcgacaatagt

SEQ ID NO: 72049 - DNA, 17 bp, Arabidopsis thaliana
ccccaagttcgtcatgg

SEQ ID NO: 72050 - DNA, 17 bp, Arabidopsis thaliana
ccccacaaagtttcggg

SEQ ID NO: 72051 - DNA, 17 bp, Arabidopsis thaliana
ccccacagacggcgcca

SEQ ID NO: 72052 - DNA, 17 bp, Arabidopsis thaliana
ccccacagacggcgcct

SEQ ID NO: 72053 - DNA, 17 bp, Arabidopsis thaliana
ccccaccacaagcctcc

SEQ ID NO: 72054 - DNA, 17 bp, Arabidopsis thaliana
ccccacgcagcctgtat

SEQ ID NO: 72055 - DNA, 17 bp, Arabidopsis thaliana
ccccacggccggcttct

SEQ ID NO: 72056 - DNA, 17 bp, Arabidopsis thaliana
ccccacgtctgcctggg

SEQ ID NO: 72057 - DNA, 17 bp, Arabidopsis thaliana
ccccactgctctatctg

SEQ ID NO: 72058 - DNA, 17 bp, Arabidopsis thaliana
ccccagacccaagatag

SEQ ID NO: 72059 - DNA, 17 bp, Arabidopsis thaliana
ccccagacctcttggtg

SEQ ID NO: 72060 - DNA, 17 bp, Arabidopsis thaliana
ccccagattcgcggcat

SEQ ID NO: 72061 - DNA, 17 bp, Arabidopsis thaliana
ccccagcaccacccaac

SEQ ID NO: 72062 - DNA, 17 bp, Arabidopsis thaliana
ccccagcaggaggcccg

SEQ ID NO: 72063 - DNA, 17 bp, Arabidopsis thaliana
ccccagcggtatatctt

SEQ ID NO: 72064 - DNA, 17 bp, Arabidopsis thaliana
ccccagctcagtgactt

SEQ ID NO: 72065 - DNA, 17 bp, Arabidopsis thaliana
ccccagctgcggtaact

SEQ ID NO: 72066 - DNA, 17 bp, Arabidopsis thaliana
ccccaggccgagtgact

SEQ ID NO: 72067 - DNA, 17 bp, Arabidopsis thaliana
ccccagggcacgtctgc

SEQ ID NO: 72068 - DNA, 17 bp, Arabidopsis thaliana
ccccaggtcaggcggcg

SEQ ID NO: 72069 - DNA, 17 bp, Arabidopsis thaliana
ccccaggtcaggcggga

SEQ ID NO: 72070 - DNA, 17 bp, Arabidopsis thaliana
ccccaggtcaggcgtcc

SEQ ID NO: 72071 - DNA, 17 bp, Arabidopsis thaliana
ccccaggtcgagtaacc

SEQ ID NO: 72072 - DNA, 17 bp, Arabidopsis thaliana
ccccagtccaattgtgt

SEQ ID NO: 72073 - DNA, 17 bp, Arabidopsis thaliana
ccccagtgaagtcgcca

SEQ ID NO: 72074 - DNA, 17 bp, Arabidopsis thaliana
ccccataggacccgcac

SEQ ID NO: 72075 - DNA, 17 bp, Arabidopsis thaliana
ccccatagtcctcgttt

SEQ ID NO: 72076 - DNA, 17 bp, Arabidopsis thaliana
ccccatccgcttccctc

SEQ ID NO: 72077 - DNA, 17 bp, Arabidopsis thaliana
ccccatcgtctagtggt

SEQ ID NO: 72078 - DNA, 17 bp, Arabidopsis thaliana
ccccatcttccatttcc

SEQ ID NO: 72079 - DNA, 17 bp, Arabidopsis thaliana
ccccatcttggacttga

SEQ ID NO: 72080 - DNA, 17 bp, Arabidopsis thaliana
ccccatgaggaagggag

SEQ ID NO: 72081 - DNA, 17 bp, Arabidopsis thaliana
ccccatgctgataccgg

SEQ ID NO: 72082 - DNA, 17 bp, Arabidopsis thaliana
ccccatggtgatgaact

SEQ ID NO: 72083 - DNA, 17 bp, Arabidopsis thaliana
ccccattaaggatgtca

SEQ ID NO: 72084 - DNA, 17 bp, Arabidopsis thaliana
ccccattcacggatagg

SEQ ID NO: 72085 - DNA, 17 bp, Arabidopsis thaliana
ccccattgttgcttatg

SEQ ID NO: 72086 - DNA, 17 bp, Arabidopsis thaliana
cccccaaaatggttttc

SEQ ID NO: 72087 - DNA, 17 bp, Arabidopsis thaliana
cccccaaccgaatggcc

SEQ ID NO: 72088 - DNA, 17 bp, Arabidopsis thaliana
cccccaactctggagcc

SEQ ID NO: 72089 - DNA, 17 bp, Arabidopsis thaliana
cccccaagagcgcagcc

SEQ ID NO: 72090 - DNA, 17 bp, Arabidopsis thaliana
cccccaagatcttcacc

SEQ ID NO: 72091 - DNA, 17 bp, Arabidopsis thaliana
cccccaaggatgacttg

SEQ ID NO: 72092 - DNA, 17 bp, Arabidopsis thaliana
cccccacattccagcaa

SEQ ID NO: 72093 - DNA, 17 bp, Arabidopsis thaliana
cccccaccagcaagacc

SEQ ID NO: 72094 - DNA, 17 bp, Arabidopsis thaliana
cccccacccacccaccc

SEQ ID NO: 72095 - DNA, 17 bp, Arabidopsis thaliana
cccccacgagaagtacc

SEQ ID NO: 72096 - DNA, 17 bp, Arabidopsis thaliana
cccccacggccggcttc

SEQ ID NO: 72097 - DNA, 17 bp, Arabidopsis thaliana
cccccagacctgaaacc

SEQ ID NO: 72098 - DNA, 17 bp, Arabidopsis thaliana
cccccatccgcttccct

SEQ ID NO: 72099 - DNA, 17 bp, Arabidopsis thaliana
cccccatcgtctagtgt

SEQ ID NO: 72100 - DNA, 17 bp, Arabidopsis thaliana
cccccattgtggatggc

SEQ ID NO: 72101 - DNA, 17 bp, Arabidopsis thaliana
cccccattttgttttgt

SEQ ID NO: 72102 - DNA, 17 bp, Arabidopsis thaliana
ccccccaaggctatcta

SEQ ID NO: 72103 - DNA, 17 bp, Arabidopsis thaliana
cccccccacaaagggtg

SEQ ID NO: 72104 - DNA, 17 bp, Arabidopsis thaliana
cccccccacgcggatta

SEQ ID NO: 72105 - DNA, 17 bp, Arabidopsis thaliana
cccccccagggcacgtc

SEQ ID NO: 72106 - DNA, 17 bp, Arabidopsis thaliana
cccccccaggtcaggcg

SEQ ID NO: 72107 - DNA, 17 bp, Arabidopsis thaliana
ccccccccaagatgagt

SEQ ID NO: 72108 - DNA, 17 bp, Arabidopsis thaliana
ccccccccagacctctt

SEQ ID NO: 72109 - DNA, 17 bp, Arabidopsis thaliana
ccccccccataggaccc

SEQ ID NO: 72110 - DNA, 17 bp, Arabidopsis thaliana
ccccccccccccccccc

SEQ ID NO: 72111 - DNA, 17 bp, Arabidopsis thaliana
cccccccccccgggaag

SEQ ID NO: 72112 - DNA, 17 bp, Arabidopsis thaliana
cccccccccccgggttc

SEQ ID NO: 72113 - DNA, 17 bp, Arabidopsis thaliana
ccccccccgaaaatgga

SEQ ID NO: 72114 - DNA, 17 bp, Arabidopsis thaliana
ccccccccggtaggacc

SEQ ID NO: 72115 - DNA, 17 bp, Arabidopsis thaliana
ccccccccggtgaacgg

SEQ ID NO: 72116 - DNA, 17 bp, Arabidopsis thaliana
ccccccccgtaacttcg

SEQ ID NO: 72117 - DNA, 17 bp, Arabidopsis thaliana
cccccccctgcgaggag

SEQ ID NO: 72118 - DNA, 17 bp, Arabidopsis thaliana
cccccccgaaagatggt

SEQ ID NO: 72119 - DNA, 17 bp, Arabidopsis thaliana
cccccccgattgccgac

SEQ ID NO: 72120 - DNA, 17 bp, Arabidopsis thaliana
cccccccggcaatgtct

SEQ ID NO: 72121 - DNA, 17 bp, Arabidopsis thaliana
cccccccgggttcggct

SEQ ID NO: 72122 - DNA, 17 bp, Arabidopsis thaliana
cccccccgggttcgggt

SEQ ID NO: 72123 - DNA, 17 bp, Arabidopsis thaliana
cccccccgggttcggtc

SEQ ID NO: 72124 - DNA, 17 bp, Arabidopsis thaliana
cccccccgggttcgtct

SEQ ID NO: 72125 - DNA, 17 bp, Arabidopsis thaliana
cccccccgggttcgtgt

SEQ ID NO: 72126 - DNA, 17 bp, Arabidopsis thaliana
cccccccgggttcgttc

SEQ ID NO: 72127 - DNA, 17 bp, Arabidopsis thaliana
cccccccgggttcgttt

SEQ ID NO: 72128 - DNA, 17 bp, Arabidopsis thaliana
cccccccgtcgtgcccg

SEQ ID NO: 72129 - DNA, 17 bp, Arabidopsis thaliana
ccccccctacatagcgg

SEQ ID NO: 72130 - DNA, 17 bp, Arabidopsis thaliana
ccccccctacgggtcct

SEQ ID NO: 72131 - DNA, 17 bp, Arabidopsis thaliana
ccccccctactgatgcc

SEQ ID NO: 72132 - DNA, 17 bp, Arabidopsis thaliana
ccccccctcaggatagc

SEQ ID NO: 72133 - DNA, 17 bp, Arabidopsis thaliana
ccccccctccgaagttt

SEQ ID NO: 72134 - DNA, 17 bp, Arabidopsis thaliana
ccccccctccttctagc

SEQ ID NO: 72135 - DNA, 17 bp, Arabidopsis thaliana
ccccccctgcgaggagt

SEQ ID NO: 72136 - DNA, 17 bp, Arabidopsis thaliana
ccccccctgttgagctt

SEQ ID NO: 72137 - DNA, 17 bp, Arabidopsis thaliana
cccccccttagatgttc

SEQ ID NO: 72138 - DNA, 17 bp, Arabidopsis thaliana
cccccccttcacggccg

SEQ ID NO: 72139 - DNA, 17 bp, Arabidopsis thaliana
cccccccttttccctct

SEQ ID NO: 72140 - DNA, 17 bp, Arabidopsis thaliana
ccccccgcgaaactggg

SEQ ID NO: 72141 - DNA, 17 bp, Arabidopsis thaliana
cccccctacctggcgcg

SEQ ID NO: 72142 - DNA, 17 bp, Arabidopsis thaliana
cccccctttcatctctc

SEQ ID NO: 72143 - DNA, 17 bp, Arabidopsis thaliana
cccccctttcatctctg

SEQ ID NO: 72144 - DNA, 17 bp, Arabidopsis thaliana
cccccgactcttaggat

SEQ ID NO: 72145 - DNA, 17 bp, Arabidopsis thaliana
cccccgattggaccatc

SEQ ID NO: 72146 - DNA, 17 bp, Arabidopsis thaliana
cccccgcaaccgcaaat

SEQ ID NO: 72147 - DNA, 17 bp, Arabidopsis thaliana
cccccggacccgggctc

SEQ ID NO: 72148 - DNA, 17 bp, Arabidopsis thaliana
cccccgtgttgcgtttt

SEQ ID NO: 72149 - DNA, 17 bp, Arabidopsis thaliana
ccccctacctgacgcgc

SEQ ID NO: 72150 - DNA, 17 bp, Arabidopsis thaliana
ccccctacctgccgccc

SEQ ID NO: 72151 - DNA, 17 bp, Arabidopsis thaliana
ccccctacctgccgcgt

SEQ ID NO: 72152 - DNA, 17 bp, Arabidopsis thaliana
ccccctacctggcgcgc

SEQ ID NO: 72153 - DNA, 17 bp, Arabidopsis thaliana
ccccctacctggcgcgt

SEQ ID NO: 72154 - DNA, 17 bp, Arabidopsis thaliana
ccccctatttggcgcgc

SEQ ID NO: 72155 - DNA, 17 bp, Arabidopsis thaliana
ccccctccctccctccc

SEQ ID NO: 72156 - DNA, 17 bp, Arabidopsis thaliana
ccccctccgattggacc

SEQ ID NO: 72157 - DNA, 17 bp, Arabidopsis thaliana
ccccctgaatggaattg

SEQ ID NO: 72158 - DNA, 17 bp, Arabidopsis thaliana
ccccctgtacgatcgtt

SEQ ID NO: 72159 - DNA, 17 bp, Arabidopsis thaliana
cccccttagctcagttg

SEQ ID NO: 72160 - DNA, 17 bp, Arabidopsis thaliana
cccccttcttcttcacc

SEQ ID NO: 72161 - DNA, 17 bp, Arabidopsis thaliana
ccccctttctctagcgc

SEQ ID NO: 72162 - DNA, 17 bp, Arabidopsis thaliana
cccccttttggtcccaa

SEQ ID NO: 72163 - DNA, 17 bp, Arabidopsis thaliana
ccccgaaaatggatggc

SEQ ID NO: 72164 - DNA, 17 bp, Arabidopsis thaliana
ccccgaaagaccacact

SEQ ID NO: 72165 - DNA, 17 bp, Arabidopsis thaliana
ccccgaaggaccaccac

SEQ ID NO: 72166 - DNA, 17 bp, Arabidopsis thaliana
ccccgaatcgatcggcg

SEQ ID NO: 72167 - DNA, 17 bp, Arabidopsis thaliana
ccccgaatcttagtggg

SEQ ID NO: 72168 - DNA, 17 bp, Arabidopsis thaliana
ccccgaccgttcctata

SEQ ID NO: 72169 - DNA, 17 bp, Arabidopsis thaliana
ccccgagggcacgtctg

SEQ ID NO: 72170 - DNA, 17 bp, Arabidopsis thaliana
ccccgattggaccatca

SEQ ID NO: 72171 - DNA, 17 bp, Arabidopsis thaliana
ccccgatttgacaactc

SEQ ID NO: 72172 - DNA, 17 bp, Arabidopsis thaliana
ccccgccgttccaaatc

SEQ ID NO: 72173 - DNA, 17 bp, Arabidopsis thaliana
ccccgcgagagttcgaa

SEQ ID NO: 72174 - DNA, 17 bp, Arabidopsis thaliana
ccccgcgggtctcctcc

SEQ ID NO: 72175 - DNA, 17 bp, Arabidopsis thaliana
ccccggacttttgggcc

SEQ ID NO: 72176 - DNA, 17 bp, Arabidopsis thaliana
ccccggcaatgtcttcg

SEQ ID NO: 72177 - DNA, 17 bp, Arabidopsis thaliana
ccccggctggtgcacca

SEQ ID NO: 72178 - DNA, 17 bp, Arabidopsis thaliana
ccccgggaccgtaggaa

SEQ ID NO: 72179 - DNA, 17 bp, Arabidopsis thaliana
ccccgggcgtcgaacag

SEQ ID NO: 72180 - DNA, 17 bp, Arabidopsis thaliana
ccccgggggggtcccgg

SEQ ID NO: 72181 - DNA, 17 bp, Arabidopsis thaliana
ccccggtaggacctcca

SEQ ID NO: 72182 - DNA, 17 bp, Arabidopsis thaliana
ccccggtgaacggcggc

SEQ ID NO: 72183 - DNA, 17 bp, Arabidopsis thaliana
ccccggtggcagcttcg

SEQ ID NO: 72184 - DNA, 17 bp, Arabidopsis thaliana
ccccggttcgtacccgg

SEQ ID NO: 72185 - DNA, 17 bp, Arabidopsis thaliana
ccccgtaacttcgggag

SEQ ID NO: 72186 - DNA, 17 bp, Arabidopsis thaliana
ccccgtaatccctccag

SEQ ID NO: 72187 - DNA, 17 bp, Arabidopsis thaliana
ccccgtaattcctccag

SEQ ID NO: 72188 - DNA, 17 bp, Arabidopsis thaliana
ccccgtagttacagagg

SEQ ID NO: 72189 - DNA, 17 bp, Arabidopsis thaliana
ccccgtcaggtgttaac

SEQ ID NO: 72190 - DNA, 17 bp, Arabidopsis thaliana
ccccgtcgtgcccggaa

SEQ ID NO: 72191 - DNA, 17 bp, Arabidopsis thaliana
ccccgtcgtgcccggac

SEQ ID NO: 72192 - DNA, 17 bp, Arabidopsis thaliana
ccccgtcgtgcccggag

SEQ ID NO: 72193 - DNA, 17 bp, Arabidopsis thaliana
ccccgtcgtgcccgggc

SEQ ID NO: 72194 - DNA, 17 bp, Arabidopsis thaliana
ccccgtcgtgccgagtg

SEQ ID NO: 72195 - DNA, 17 bp, Arabidopsis thaliana
ccccgtctagctcagtt

SEQ ID NO: 72196 - DNA, 17 bp, Arabidopsis thaliana
ccccgtctgatagcgct

SEQ ID NO: 72197 - DNA, 17 bp, Arabidopsis thaliana
ccccgtgtcccaccggg

SEQ ID NO: 72198 - DNA, 17 bp, Arabidopsis thaliana
ccccgttagtctacatg

SEQ ID NO: 72199 - DNA, 17 bp, Arabidopsis thaliana
ccccgttcccagcgttg

SEQ ID NO: 72200 - DNA, 17 bp, Arabidopsis thaliana
cccctaaatgaccgctc

SEQ ID NO: 72201 - DNA, 17 bp, Arabidopsis thaliana
cccctaactagctacgt

SEQ ID NO: 72202 - DNA, 17 bp, Arabidopsis thaliana
cccctaactcaaagcat

SEQ ID NO: 72203 - DNA, 17 bp, Arabidopsis thaliana
cccctaagacgcgtcat

SEQ ID NO: 72204 - DNA, 17 bp, Arabidopsis thaliana
cccctaagagatgtgcc

SEQ ID NO: 72205 - DNA, 17 bp, Arabidopsis thaliana
cccctacaagcagagcc

SEQ ID NO: 72206 - DNA, 17 bp, Arabidopsis thaliana
cccctacctggcgcgcc

SEQ ID NO: 72207 - DNA, 17 bp, Arabidopsis thaliana
cccctatcagttgtgct

SEQ ID NO: 72208 - DNA, 17 bp, Arabidopsis thaliana
cccctattagctcagtt

SEQ ID NO: 72209 - DNA, 17 bp, Arabidopsis thaliana
cccctatttggtgaacc

SEQ ID NO: 72210 - DNA, 17 bp, Arabidopsis thaliana
cccctccgattggacca

SEQ ID NO: 72211 - DNA, 17 bp, Arabidopsis thaliana
cccctccttctagcgcc

SEQ ID NO: 72212 - DNA, 17 bp, Arabidopsis thaliana
cccctcgagatgatggc

SEQ ID NO: 72213 - DNA, 17 bp, Arabidopsis thaliana
cccctcgtgcccggacc

SEQ ID NO: 72214 - DNA, 17 bp, Arabidopsis thaliana
cccctctcaaatgttgc

SEQ ID NO: 72215 - DNA, 17 bp, Arabidopsis thaliana
cccctctctctagcgcc

SEQ ID NO: 72216 - DNA, 17 bp, Arabidopsis thaliana
cccctgagactacattg

SEQ ID NO: 72217 - DNA, 17 bp, Arabidopsis thaliana
cccctgcgaggagtccg

SEQ ID NO: 72218 - DNA, 17 bp, Arabidopsis thaliana
cccctgcgcaggcttgc

SEQ ID NO: 72219 - DNA, 17 bp, Arabidopsis thaliana
cccctgcggggatggag

SEQ ID NO: 72220 - DNA, 17 bp, Arabidopsis thaliana
cccctggctccctgtat

SEQ ID NO: 72221 - DNA, 17 bp, Arabidopsis thaliana
cccctgggtaaagactg

SEQ ID NO: 72222 - DNA, 17 bp, Arabidopsis thaliana
cccctgtcgctaagatt

SEQ ID NO: 72223 - DNA, 17 bp, Arabidopsis thaliana
cccctgttatggtagac

SEQ ID NO: 72224 - DNA, 17 bp, Arabidopsis thaliana
cccctgttgagcttgac

SEQ ID NO: 72225 - DNA, 17 bp, Arabidopsis thaliana
cccctgttgttggtccc

SEQ ID NO: 72226 - DNA, 17 bp, Arabidopsis thaliana
cccctgtttggtcccaa

SEQ ID NO: 72227 - DNA, 17 bp, Arabidopsis thaliana
cccctgtttttggtccc

SEQ ID NO: 72228 - DNA, 17 bp, Arabidopsis thaliana
ccccttagctcagttgg

SEQ ID NO: 72229 - DNA, 17 bp, Arabidopsis thaliana
ccccttatgcttgggcg

SEQ ID NO: 72230 - DNA, 17 bp, Arabidopsis thaliana
ccccttatggaagggac

SEQ ID NO: 72231 - DNA, 17 bp, Arabidopsis thaliana
ccccttcacggccggct

SEQ ID NO: 72232 - DNA, 17 bp, Arabidopsis thaliana
ccccttcggtcggcgat

SEQ ID NO: 72233 - DNA, 17 bp, Arabidopsis thaliana
ccccttcggtcggtggt

SEQ ID NO: 72234 - DNA, 17 bp, Arabidopsis thaliana
ccccttgaccaaatgaa

SEQ ID NO: 72235 - DNA, 17 bp, Arabidopsis thaliana
ccccttgctcgaacccg

SEQ ID NO: 72236 - DNA, 17 bp, Arabidopsis thaliana
ccccttggcccaatggt

SEQ ID NO: 72237 - DNA, 17 bp, Arabidopsis thaliana
ccccttggtgcaggtcg

SEQ ID NO: 72238 - DNA, 17 bp, Arabidopsis thaliana
cccctttctaatacttt

SEQ ID NO: 72239 - DNA, 17 bp, Arabidopsis thaliana
cccctttggcaggtggg

SEQ ID NO: 72240 - DNA, 17 bp, Arabidopsis thaliana
cccctttgggcctgaac

SEQ ID NO: 72241 - DNA, 17 bp, Arabidopsis thaliana
cccctttgtcgctaaga

SEQ ID NO: 72242 - DNA, 17 bp, Arabidopsis thaliana
cccgaaaaaacctgatt

SEQ ID NO: 72243 - DNA, 17 bp, Arabidopsis thaliana
cccgaaaacagtgggct

SEQ ID NO: 72244 - DNA, 17 bp, Arabidopsis thaliana
cccgaaaacctgtagta

SEQ ID NO: 72245 - DNA, 17 bp, Arabidopsis thaliana
cccgaaaacctgtagtg

SEQ ID NO: 72246 - DNA, 17 bp, Arabidopsis thaliana
cccgaaaatggatggcg

SEQ ID NO: 72247 - DNA, 17 bp, Arabidopsis thaliana
cccgaaaccgacacagg

SEQ ID NO: 72248 - DNA, 17 bp, Arabidopsis thaliana
cccgaaacgggcccggt

SEQ ID NO: 72249 - DNA, 17 bp, Arabidopsis thaliana
cccgaaagaagacgtgg

SEQ ID NO: 72250 - DNA, 17 bp, Arabidopsis thaliana
cccgaaagaatagagcg

SEQ ID NO: 72251 - DNA, 17 bp, Arabidopsis thaliana
cccgaaagaccacactg

SEQ ID NO: 72252 - DNA, 17 bp, Arabidopsis thaliana
cccgaaagaggatgtgg

SEQ ID NO: 72253 - DNA, 17 bp, Arabidopsis thaliana
cccgaaagatggtgaac

SEQ ID NO: 72254 - DNA, 17 bp, Arabidopsis thaliana
cccgaaagatggtgagc

SEQ ID NO: 72255 - DNA, 17 bp, Arabidopsis thaliana
cccgaaccatccctgct

SEQ ID NO: 72256 - DNA, 17 bp, Arabidopsis thaliana
cccgaaccgagaacaac

SEQ ID NO: 72257 - DNA, 17 bp, Arabidopsis thaliana
cccgaacctgggtgatc

SEQ ID NO: 72258 - DNA, 17 bp, Arabidopsis thaliana
cccgaacgggtcctaaa

SEQ ID NO: 72259 - DNA, 17 bp, Arabidopsis thaliana
cccgaacgggtcttaaa

SEQ ID NO: 72260 - DNA, 17 bp, Arabidopsis thaliana
cccgaagaagacaaccg

SEQ ID NO: 72261 - DNA, 17 bp, Arabidopsis thaliana
cccgaaggaccaccaca

SEQ ID NO: 72262 - DNA, 17 bp, Arabidopsis thaliana
cccgaagtacgacggat

SEQ ID NO: 72263 - DNA, 17 bp, Arabidopsis thaliana
cccgaatccaactggac

SEQ ID NO: 72264 - DNA, 17 bp, Arabidopsis thaliana
cccgaatcgatcggcgg

SEQ ID NO: 72265 - DNA, 17 bp, Arabidopsis thaliana
cccgaatctatcggcgg

SEQ ID NO: 72266 - DNA, 17 bp, Arabidopsis thaliana
cccgaattcgaatgggt

SEQ ID NO: 72267 - DNA, 17 bp, Arabidopsis thaliana
cccgacacccggattcg

SEQ ID NO: 72268 - DNA, 17 bp, Arabidopsis thaliana
cccgacagggtaaagcc

SEQ ID NO: 72269 - DNA, 17 bp, Arabidopsis thaliana
cccgaccagggatcagc

SEQ ID NO: 72270 - DNA, 17 bp, Arabidopsis thaliana
cccgaccggttcaccag

SEQ ID NO: 72271 - DNA, 17 bp, Arabidopsis thaliana
cccgaccgtctttatta

SEQ ID NO: 72272 - DNA, 17 bp, Arabidopsis thaliana
cccgaccgtctttctta

SEQ ID NO: 72273 - DNA, 17 bp, Arabidopsis thaliana
cccgaccttagctcagt

SEQ ID NO: 72274 - DNA, 17 bp, Arabidopsis thaliana
cccgacgaacaggagga

SEQ ID NO: 72275 - DNA, 17 bp, Arabidopsis thaliana
cccgacgaagcggttcg

SEQ ID NO: 72276 - DNA, 17 bp, Arabidopsis thaliana
cccgacgcggattacgg

SEQ ID NO: 72277 - DNA, 17 bp, Arabidopsis thaliana
cccgacgcggattacgt

SEQ ID NO: 72278 - DNA, 17 bp, Arabidopsis thaliana
cccgacggtgaaaagtt

SEQ ID NO: 72279 - DNA, 17 bp, Arabidopsis thaliana
cccgactcctacgttgt

SEQ ID NO: 72280 - DNA, 17 bp, Arabidopsis thaliana
cccgacttatggaaggg

SEQ ID NO: 72281 - DNA, 17 bp, Arabidopsis thaliana
cccgagagacccgggtt

SEQ ID NO: 72282 - DNA, 17 bp, Arabidopsis thaliana
cccgagagagccgtccc

SEQ ID NO: 72283 - DNA, 17 bp, Arabidopsis thaliana
cccgagagagccgttcc

SEQ ID NO: 72284 - DNA, 17 bp, Arabidopsis thaliana
cccgagagagccttccc

SEQ ID NO: 72285 - DNA, 17 bp, Arabidopsis thaliana
cccgagagaggacgttt

SEQ ID NO: 72286 - DNA, 17 bp, Arabidopsis thaliana
cccgagagccgttccca

SEQ ID NO: 72287 - DNA, 17 bp, Arabidopsis thaliana
cccgagatagccgttcc

SEQ ID NO: 72288 - DNA, 17 bp, Arabidopsis thaliana
cccgagatgtcgaaata

SEQ ID NO: 72289 - DNA, 17 bp, Arabidopsis thaliana
cccgagatgttgggctt

SEQ ID NO: 72290 - DNA, 17 bp, Arabidopsis thaliana
cccgagattggggagct

SEQ ID NO: 72291 - DNA, 17 bp, Arabidopsis thaliana
cccgagcgatggatggt

SEQ ID NO: 72292 - DNA, 17 bp, Arabidopsis thaliana
cccgaggaggggctcgc

SEQ ID NO: 72293 - DNA, 17 bp, Arabidopsis thaliana
cccgaggatgaagacct

SEQ ID NO: 72294 - DNA, 17 bp, Arabidopsis thaliana
cccgaggcggttgtggc

SEQ ID NO: 72295 - DNA, 17 bp, Arabidopsis thaliana
cccgagggcacgtctgc

SEQ ID NO: 72296 - DNA, 17 bp, Arabidopsis thaliana
cccgagtctgatcgggc

SEQ ID NO: 72297 - DNA, 17 bp, Arabidopsis thaliana
cccgagtggttaaggct

SEQ ID NO: 72298 - DNA, 17 bp, Arabidopsis thaliana
cccgagttcaggtctcg

SEQ ID NO: 72299 - DNA, 17 bp, Arabidopsis thaliana
cccgagttcagttctcg

SEQ ID NO: 72300 - DNA, 17 bp, Arabidopsis thaliana
cccgagttcatttctcg

SEQ ID NO: 72301 - DNA, 17 bp, Arabidopsis thaliana
cccgagttgggaccagt

SEQ ID NO: 72302 - DNA, 17 bp, Arabidopsis thaliana
cccgataccaggactat

SEQ ID NO: 72303 - DNA, 17 bp, Arabidopsis thaliana
cccgatatgtccgagtg

SEQ ID NO: 72304 - DNA, 17 bp, Arabidopsis thaliana
cccgatcaaagcgaagc

SEQ ID NO: 72305 - DNA, 17 bp, Arabidopsis thaliana
cccgatcacaggaacga

SEQ ID NO: 72306 - DNA, 17 bp, Arabidopsis thaliana
cccgatccacatcggtc

SEQ ID NO: 72307 - DNA, 17 bp, Arabidopsis thaliana
cccgatcctaattccgg

SEQ ID NO: 72308 - DNA, 17 bp, Arabidopsis thaliana
cccgatcttggagaaga

SEQ ID NO: 72309 - DNA, 17 bp, Arabidopsis thaliana
cccgatgaaccggttga

SEQ ID NO: 72310 - DNA, 17 bp, Arabidopsis thaliana
cccgatgacccggtgac

SEQ ID NO: 72311 - DNA, 17 bp, Arabidopsis thaliana
cccgatgacttctacgc

SEQ ID NO: 72312 - DNA, 17 bp, Arabidopsis thaliana
cccgattaggcgttcta

SEQ ID NO: 72313 - DNA, 17 bp, Arabidopsis thaliana
cccgattaggtagacct

SEQ ID NO: 72314 - DNA, 17 bp, Arabidopsis thaliana
cccgattcccgaccctc

SEQ ID NO: 72315 - DNA, 17 bp, Arabidopsis thaliana
cccgattgatcccttgc

SEQ ID NO: 72316 - DNA, 17 bp, Arabidopsis thaliana
cccgattgccaacgccc

SEQ ID NO: 72317 - DNA, 17 bp, Arabidopsis thaliana
cccgattgccgacccac

SEQ ID NO: 72318 - DNA, 17 bp, Arabidopsis thaliana
cccgattgccgacccgc

SEQ ID NO: 72319 - DNA, 17 bp, Arabidopsis thaliana
cccgattgccgaccctc

SEQ ID NO: 72320 - DNA, 17 bp, Arabidopsis thaliana
cccgattgccggccctc

SEQ ID NO: 72321 - DNA, 17 bp, Arabidopsis thaliana
cccgattgcctaccctc

SEQ ID NO: 72322 - DNA, 17 bp, Arabidopsis thaliana
cccgattgcctcccccc

SEQ ID NO: 72323 - DNA, 17 bp, Arabidopsis thaliana
cccgattggaccatcac

SEQ ID NO: 72324 - DNA, 17 bp, Arabidopsis thaliana
cccgattggatcgcgaa

SEQ ID NO: 72325 - DNA, 17 bp, Arabidopsis thaliana
cccgattgttgaccctc

SEQ ID NO: 72326 - DNA, 17 bp, Arabidopsis thaliana
cccgatttcccctgggg

SEQ ID NO: 72327 - DNA, 17 bp, Arabidopsis thaliana
cccgattttacggtttt

SEQ ID NO: 72328 - DNA, 17 bp, Arabidopsis thaliana
cccgatttttgaatcta

SEQ ID NO: 72329 - DNA, 17 bp, Arabidopsis thaliana
cccgcaaccgcaaccgc

SEQ ID NO: 72330 - DNA, 17 bp, Arabidopsis thaliana
cccgcaacgagcgcaac

SEQ ID NO: 72331 - DNA, 17 bp, Arabidopsis thaliana
cccgcaaggatttgtta

SEQ ID NO: 72332 - DNA, 17 bp, Arabidopsis thaliana
cccgcacgtctgcctgg

SEQ ID NO: 72333 - DNA, 17 bp, Arabidopsis thaliana
cccgcactgtctgttcc

SEQ ID NO: 72334 - DNA, 17 bp, Arabidopsis thaliana
cccgcagaggaagcgag

SEQ ID NO: 72335 - DNA, 17 bp, Arabidopsis thaliana
cccgcagcgatactgac

SEQ ID NO: 72336 - DNA, 17 bp, Arabidopsis thaliana
cccgcaggattgtcggt

SEQ ID NO: 72337 - DNA, 17 bp, Arabidopsis thaliana
cccgcaggtgacggagc

SEQ ID NO: 72338 - DNA, 17 bp, Arabidopsis thaliana
cccgcagtttgtgttct

SEQ ID NO: 72339 - DNA, 17 bp, Arabidopsis thaliana
cccgccaaaaacgtaag

SEQ ID NO: 72340 - DNA, 17 bp, Arabidopsis thaliana
cccgccatcgccggaca

SEQ ID NO: 72341 - DNA, 17 bp, Arabidopsis thaliana
cccgccatgtagggata

SEQ ID NO: 72342 - DNA, 17 bp, Arabidopsis thaliana
cccgcccgattgccgac

SEQ ID NO: 72343 - DNA, 17 bp, Arabidopsis thaliana
cccgccctttgtcgcta

SEQ ID NO: 72344 - DNA, 17 bp, Arabidopsis thaliana
cccgccgactttgtctc

SEQ ID NO: 72345 - DNA, 17 bp, Arabidopsis thaliana
cccgccgcccgactgcc

SEQ ID NO: 72346 - DNA, 17 bp, Arabidopsis thaliana
cccgccgcccgattgcc

SEQ ID NO: 72347 - DNA, 17 bp, Arabidopsis thaliana
cccgccgcccgatttcc

SEQ ID NO: 72348 - DNA, 17 bp, Arabidopsis thaliana
cccgccggagaccgagt

SEQ ID NO: 72349 - DNA, 17 bp, Arabidopsis thaliana
cccgccggatccgtggt

SEQ ID NO: 72350 - DNA, 17 bp, Arabidopsis thaliana
cccgccgtctacagtac

SEQ ID NO: 72351 - DNA, 17 bp, Arabidopsis thaliana
cccgcctaaatccgtcc

SEQ ID NO: 72352 - DNA, 17 bp, Arabidopsis thaliana
cccgcctaaatcggcgg

SEQ ID NO: 72353 - DNA, 17 bp, Arabidopsis thaliana
cccgcctagggtttcca

SEQ ID NO: 72354 - DNA, 17 bp, Arabidopsis thaliana
cccgcctctgggagatg

SEQ ID NO: 72355 - DNA, 17 bp, Arabidopsis thaliana
cccgccttgcatcaact

SEQ ID NO: 72356 - DNA, 17 bp, Arabidopsis thaliana
cccgcgacgtcgcgaga

SEQ ID NO: 72357 - DNA, 17 bp, Arabidopsis thaliana
cccgcgagggtgagcta

SEQ ID NO: 72358 - DNA, 17 bp, Arabidopsis thaliana
cccgcgataggtatctg

SEQ ID NO: 72359 - DNA, 17 bp, Arabidopsis thaliana
cccgcgattgtcccttt

SEQ ID NO: 72360 - DNA, 17 bp, Arabidopsis thaliana
cccgctaggtttagcgg

SEQ ID NO: 72361 - DNA, 17 bp, Arabidopsis thaliana
cccgctcaaggattcca

SEQ ID NO: 72362 - DNA, 17 bp, Arabidopsis thaliana
cccgctcctcacgagtc

SEQ ID NO: 72363 - DNA, 17 bp, Arabidopsis thaliana
cccgctgggggactgac

SEQ ID NO: 72364 - DNA, 17 bp, Arabidopsis thaliana
cccgctggttcgatctc

SEQ ID NO: 72365 - DNA, 17 bp, Arabidopsis thaliana
cccgcttacagcagtgg

SEQ ID NO: 72366 - DNA, 17 bp, Arabidopsis thaliana
cccgcttgcagagagaa

SEQ ID NO: 72367 - DNA, 17 bp, Arabidopsis thaliana
cccgcttgccgtggtcc

SEQ ID NO: 72368 - DNA, 17 bp, Arabidopsis thaliana
cccgctttgaatggatg

SEQ ID NO: 72369 - DNA, 17 bp, Arabidopsis thaliana
cccgcttttgcaggtcg

SEQ ID NO: 72370 - DNA, 17 bp, Arabidopsis thaliana
cccggaaactaagccaa

SEQ ID NO: 72371 - DNA, 17 bp, Arabidopsis thaliana
cccggaaactaagccga

SEQ ID NO: 72372 - DNA, 17 bp, Arabidopsis thaliana
cccggaacgtccgtgga

SEQ ID NO: 72373 - DNA, 17 bp, Arabidopsis thaliana
cccggaagtcctcgtgt

SEQ ID NO: 72374 - DNA, 17 bp, Arabidopsis thaliana
cccggacatttgtgtga

SEQ ID NO: 72375 - DNA, 17 bp, Arabidopsis thaliana
cccggaccaggctccat

SEQ ID NO: 72376 - DNA, 17 bp, Arabidopsis thaliana
cccggacccgaagatcc

SEQ ID NO: 72377 - DNA, 17 bp, Arabidopsis thaliana
cccggaccctgcccccc

SEQ ID NO: 72378 - DNA, 17 bp, Arabidopsis thaliana
cccggaccctgccgcac

SEQ ID NO: 72379 - DNA, 17 bp, Arabidopsis thaliana
cccggaccctgccgccc

SEQ ID NO: 72380 - DNA, 17 bp, Arabidopsis thaliana
cccggaccctgtcgcac

SEQ ID NO: 72381 - DNA, 17 bp, Arabidopsis thaliana
cccggaccctgtcgccc

SEQ ID NO: 72382 - DNA, 17 bp, Arabidopsis thaliana
cccggagaaggttgtcg

SEQ ID NO: 72383 - DNA, 17 bp, Arabidopsis thaliana
cccggagtcctctgtgg

SEQ ID NO: 72384 - DNA, 17 bp, Arabidopsis thaliana
cccggattacggtggcg

SEQ ID NO: 72385 - DNA, 17 bp, Arabidopsis thaliana
cccggattctgacttag

SEQ ID NO: 72386 - DNA, 17 bp, Arabidopsis thaliana
cccggcaacggcgccaa

SEQ ID NO: 72387 - DNA, 17 bp, Arabidopsis thaliana
cccggcaatgcaaggga

SEQ ID NO: 72388 - DNA, 17 bp, Arabidopsis thaliana
cccggcaatgtctctag

SEQ ID NO: 72389 - DNA, 17 bp, Arabidopsis thaliana
cccggcccacgctccat

SEQ ID NO: 72390 - DNA, 17 bp, Arabidopsis thaliana
cccggccgggggacgga

SEQ ID NO: 72391 - DNA, 17 bp, Arabidopsis thaliana
cccggccggggggactg

SEQ ID NO: 72392 - DNA, 17 bp, Arabidopsis thaliana
cccggccgtcggggcaa

SEQ ID NO: 72393 - DNA, 17 bp, Arabidopsis thaliana
cccggccgtcgggggaa

SEQ ID NO: 72394 - DNA, 17 bp, Arabidopsis thaliana
cccggcgactcataggc

SEQ ID NO: 72395 - DNA, 17 bp, Arabidopsis thaliana
cccggcggcccttgaaa

SEQ ID NO: 72396 - DNA, 17 bp, Arabidopsis thaliana
cccggctaatccggtta

SEQ ID NO: 72397 - DNA, 17 bp, Arabidopsis thaliana
cccggctcaggccacca

SEQ ID NO: 72398 - DNA, 17 bp, Arabidopsis thaliana
cccggctcttgggaggt

SEQ ID NO: 72399 - DNA, 17 bp, Arabidopsis thaliana
cccggctggggactgac

SEQ ID NO: 72400 - DNA, 17 bp, Arabidopsis thaliana
cccggctggggactgat

SEQ ID NO: 72401 - DNA, 17 bp, Arabidopsis thaliana
cccggcttaactctgtt

SEQ ID NO: 72402 - DNA, 17 bp, Arabidopsis thaliana
cccggcttaatcctgtt

SEQ ID NO: 72403 - DNA, 17 bp, Arabidopsis thaliana
cccgggaactcctcccc

SEQ ID NO: 72404 - DNA, 17 bp, Arabidopsis thaliana
cccgggaactcctcgtg

SEQ ID NO: 72405 - DNA, 17 bp, Arabidopsis thaliana
cccgggaagccctcgtg

SEQ ID NO: 72406 - DNA, 17 bp, Arabidopsis thaliana
cccgggaagtcccactg

SEQ ID NO: 72407 - DNA, 17 bp, Arabidopsis thaliana
cccgggaagtcctcgtg

SEQ ID NO: 72408 - DNA, 17 bp, Arabidopsis thaliana
cccgggaagttctcgtg

SEQ ID NO: 72409 - DNA, 17 bp, Arabidopsis thaliana
cccgggattccgcctcg

SEQ ID NO: 72410 - DNA, 17 bp, Arabidopsis thaliana
cccgggattctcgctct

SEQ ID NO: 72411 - DNA, 17 bp, Arabidopsis thaliana
cccgggccttgtacaca

SEQ ID NO: 72412 - DNA, 17 bp, Arabidopsis thaliana
cccgggcgaagcggccg

SEQ ID NO: 72413 - DNA, 17 bp, Arabidopsis thaliana
cccgggcggagcggccg

SEQ ID NO: 72414 - DNA, 17 bp, Arabidopsis thaliana
cccgggcgtcgaacagt

SEQ ID NO: 72415 - DNA, 17 bp, Arabidopsis thaliana
cccgggcttcgaacagt

SEQ ID NO: 72416 - DNA, 17 bp, Arabidopsis thaliana
cccgggcttttgatacg

SEQ ID NO: 72417 - DNA, 17 bp, Arabidopsis thaliana
cccgggggtcccggcaa

SEQ ID NO: 72418 - DNA, 17 bp, Arabidopsis thaliana
cccggggtttcccggca

SEQ ID NO: 72419 - DNA, 17 bp, Arabidopsis thaliana
cccggggtttcccggct

SEQ ID NO: 72420 - DNA, 17 bp, Arabidopsis thaliana
cccgggtcccggcaacg

SEQ ID NO: 72421 - DNA, 17 bp, Arabidopsis thaliana
cccgggtgactcccggc

SEQ ID NO: 72422 - DNA, 17 bp, Arabidopsis thaliana
cccgggtggagggatag

SEQ ID NO: 72423 - DNA, 17 bp, Arabidopsis thaliana
cccgggtgtcccggcaa

SEQ ID NO: 72424 - DNA, 17 bp, Arabidopsis thaliana
cccgggttaccacgcga

SEQ ID NO: 72425 - DNA, 17 bp, Arabidopsis thaliana
cccgggttcagcacttt

SEQ ID NO: 72426 - DNA, 17 bp, Arabidopsis thaliana
cccgggttcaggtcccg

SEQ ID NO: 72427 - DNA, 17 bp, Arabidopsis thaliana
cccgggttcatttcccg

SEQ ID NO: 72428 - DNA, 17 bp, Arabidopsis thaliana
cccgggttccccggcaa

SEQ ID NO: 72429 - DNA, 17 bp, Arabidopsis thaliana
cccgggttccccggcag

SEQ ID NO: 72430 - DNA, 17 bp, Arabidopsis thaliana
cccgggttcccggctgg

SEQ ID NO: 72431 - DNA, 17 bp, Arabidopsis thaliana
cccgggttcctggctgg

SEQ ID NO: 72432 - DNA, 17 bp, Arabidopsis thaliana
cccgggttcgagtcccc

SEQ ID NO: 72433 - DNA, 17 bp, Arabidopsis thaliana
cccgggttcgagtccgg

SEQ ID NO: 72434 - DNA, 17 bp, Arabidopsis thaliana
cccgggttcggctcccg

SEQ ID NO: 72435 - DNA, 17 bp, Arabidopsis thaliana
cccgggttcgggtcccg

SEQ ID NO: 72436 - DNA, 17 bp, Arabidopsis thaliana
cccgggttcggtccccg

SEQ ID NO: 72437 - DNA, 17 bp, Arabidopsis thaliana
cccgggttcggttcccg

SEQ ID NO: 72438 - DNA, 17 bp, Arabidopsis thaliana
cccgggttcgtcccccc

SEQ ID NO: 72439 - DNA, 17 bp, Arabidopsis thaliana
cccgggttcgtcccggc

SEQ ID NO: 72440 - DNA, 17 bp, Arabidopsis thaliana
cccgggttcgtccctgc

SEQ ID NO: 72441 - DNA, 17 bp, Arabidopsis thaliana
cccgggttcgtctcccg

SEQ ID NO: 72442 - DNA, 17 bp, Arabidopsis thaliana
cccgggttcgtgtcccg

SEQ ID NO: 72443 - DNA, 17 bp, Arabidopsis thaliana
cccgggttcgtgtctgg

SEQ ID NO: 72444 - DNA, 17 bp, Arabidopsis thaliana
cccgggttcgttccccc

SEQ ID NO: 72445 - DNA, 17 bp, Arabidopsis thaliana
cccgggttcgttccccg

SEQ ID NO: 72446 - DNA, 17 bp, Arabidopsis thaliana
cccgggttcgttcctcc

SEQ ID NO: 72447 - DNA, 17 bp, Arabidopsis thaliana
cccgggttcgttcgttt

SEQ ID NO: 72448 - DNA, 17 bp, Arabidopsis thaliana
cccgggttcgtttcccc

SEQ ID NO: 72449 - DNA, 17 bp, Arabidopsis thaliana
cccgggttcgtttcccg

SEQ ID NO: 72450 - DNA, 17 bp, Arabidopsis thaliana
cccgggttctccccggc

SEQ ID NO: 72451 - DNA, 17 bp, Arabidopsis thaliana
cccgggttctcctgtga

SEQ ID NO: 72452 - DNA, 17 bp, Arabidopsis thaliana
cccgggttcttctgcgt

SEQ ID NO: 72453 - DNA, 17 bp, Arabidopsis thaliana
cccgggttgagtcccgg

SEQ ID NO: 72454 - DNA, 17 bp, Arabidopsis thaliana
cccgggttgattcccgg

SEQ ID NO: 72455 - DNA, 17 bp, Arabidopsis thaliana
cccgggtttcccggctg

SEQ ID NO: 72456 - DNA, 17 bp, Arabidopsis thaliana
cccgggtttttcccggc

SEQ ID NO: 72457 - DNA, 17 bp, Arabidopsis thaliana
cccggtccgcctttggt

SEQ ID NO: 72458 - DNA, 17 bp, Arabidopsis thaliana
cccggtccgtaggcaga

SEQ ID NO: 72459 - DNA, 17 bp, Arabidopsis thaliana
cccggtcgacgattcct

SEQ ID NO: 72460 - DNA, 17 bp, Arabidopsis thaliana
cccggtcgagtaccgct

SEQ ID NO: 72461 - DNA, 17 bp, Arabidopsis thaliana
cccggtcgatgaagtct

SEQ ID NO: 72462 - DNA, 17 bp, Arabidopsis thaliana
cccggtcgtactcataa

SEQ ID NO: 72463 - DNA, 17 bp, Arabidopsis thaliana
cccggtcgtactcatag

SEQ ID NO: 72464 - DNA, 17 bp, Arabidopsis thaliana
cccggtctactgattaa

SEQ ID NO: 72465 - DNA, 17 bp, Arabidopsis thaliana
cccggtgaacggcggcc

SEQ ID NO: 72466 - DNA, 17 bp, Arabidopsis thaliana
cccggtgctaaggtact

SEQ ID NO: 72467 - DNA, 17 bp, Arabidopsis thaliana
cccggtgttgtctcgtg

SEQ ID NO: 72468 - DNA, 17 bp, Arabidopsis thaliana
cccggttaacggcggcc

SEQ ID NO: 72469 - DNA, 17 bp, Arabidopsis thaliana
cccggttagcgtcttgg

SEQ ID NO: 72470 - DNA, 17 bp, Arabidopsis thaliana
cccggttaggattgtca

SEQ ID NO: 72471 - DNA, 17 bp, Arabidopsis thaliana
cccggttaggattgtta

SEQ ID NO: 72472 - DNA, 17 bp, Arabidopsis thaliana
cccggttaggcggtgga

SEQ ID NO: 72473 - DNA, 17 bp, Arabidopsis thaliana
cccggttcgaacccggg

SEQ ID NO: 72474 - DNA, 17 bp, Arabidopsis thaliana
cccggttctacagcagg

SEQ ID NO: 72475 - DNA, 17 bp, Arabidopsis thaliana
cccggtttaactctgtt

SEQ ID NO: 72476 - DNA, 17 bp, Arabidopsis thaliana
cccggtttcccggctgg

SEQ ID NO: 72477 - DNA, 17 bp, Arabidopsis thaliana
cccgtaacttcgggaga

SEQ ID NO: 72478 - DNA, 17 bp, Arabidopsis thaliana
cccgtaatccctccaga

SEQ ID NO: 72479 - DNA, 17 bp, Arabidopsis thaliana
cccgtaatcctcccagg

SEQ ID NO: 72480 - DNA, 17 bp, Arabidopsis thaliana
cccgtagacttgacacg

SEQ ID NO: 72481 - DNA, 17 bp, Arabidopsis thaliana
cccgtatccagttgtga

SEQ ID NO: 72482 - DNA, 17 bp, Arabidopsis thaliana
cccgtcacactatggaa

SEQ ID NO: 72483 - DNA, 17 bp, Arabidopsis thaliana
cccgtcacactatggga

SEQ ID NO: 72484 - DNA, 17 bp, Arabidopsis thaliana
cccgtcactactcgagc

SEQ ID NO: 72485 - DNA, 17 bp, Arabidopsis thaliana
cccgtcatatcatcaaa

SEQ ID NO: 72486 - DNA, 17 bp, Arabidopsis thaliana
cccgtcccactaaccag

SEQ ID NO: 72487 - DNA, 17 bp, Arabidopsis thaliana
cccgtccccccaccccc

SEQ ID NO: 72488 - DNA, 17 bp, Arabidopsis thaliana
cccgtcccgcaaaaccc

SEQ ID NO: 72489 - DNA, 17 bp, Arabidopsis thaliana
cccgtcccgccaaacct

SEQ ID NO: 72490 - DNA, 17 bp, Arabidopsis thaliana
cccgtcccgccaacccg

SEQ ID NO: 72491 - DNA, 17 bp, Arabidopsis thaliana
cccgtcccgtcaacccg

SEQ ID NO: 72492 - DNA, 17 bp, Arabidopsis thaliana
cccgtccgctcaactgc

SEQ ID NO: 72493 - DNA, 17 bp, Arabidopsis thaliana
cccgtccgtgtagtagg

SEQ ID NO: 72494 - DNA, 17 bp, Arabidopsis thaliana
cccgtcctcagttcgga

SEQ ID NO: 72495 - DNA, 17 bp, Arabidopsis thaliana
cccgtcctgctaacccg

SEQ ID NO: 72496 - DNA, 17 bp, Arabidopsis thaliana
cccgtcgagcagggacg

SEQ ID NO: 72497 - DNA, 17 bp, Arabidopsis thaliana
cccgtcgccaactgtcg

SEQ ID NO: 72498 - DNA, 17 bp, Arabidopsis thaliana
cccgtcgctcctaccga

SEQ ID NO: 72499 - DNA, 17 bp, Arabidopsis thaliana
cccgtcggctgtcacgg

SEQ ID NO: 72500 - DNA, 17 bp, Arabidopsis thaliana
cccgtcggctgtcagcg

SEQ ID NO: 72501 - DNA, 17 bp, Arabidopsis thaliana
cccgtcggttgtgttcc

SEQ ID NO: 72502 - DNA, 17 bp, Arabidopsis thaliana
cccgtcggttgtgttct

SEQ ID NO: 72503 - DNA, 17 bp, Arabidopsis thaliana
cccgtcgtgcccggacc

SEQ ID NO: 72504 - DNA, 17 bp, Arabidopsis thaliana
cccgtcgtttagaattg

SEQ ID NO: 72505 - DNA, 17 bp, Arabidopsis thaliana
cccgtctagctcacttg

SEQ ID NO: 72506 - DNA, 17 bp, Arabidopsis thaliana
cccgtctagctcagttg

SEQ ID NO: 72507 - DNA, 17 bp, Arabidopsis thaliana
cccgtctatttagccgg

SEQ ID NO: 72508 - DNA, 17 bp, Arabidopsis thaliana
cccgtctctgttcgtgt

SEQ ID NO: 72509 - DNA, 17 bp, Arabidopsis thaliana
cccgtctgatagcgctt

SEQ ID NO: 72510 - DNA, 17 bp, Arabidopsis thaliana
cccgtctgcctgggtgt

SEQ ID NO: 72511 - DNA, 17 bp, Arabidopsis thaliana
cccgtctgttggtgcca

SEQ ID NO: 72512 - DNA, 17 bp, Arabidopsis thaliana
cccgtcttagctcagtg

SEQ ID NO: 72513 - DNA, 17 bp, Arabidopsis thaliana
cccgtgaactgtggtta

SEQ ID NO: 72514 - DNA, 17 bp, Arabidopsis thaliana
cccgtgcagtgctgtac

SEQ ID NO: 72515 - DNA, 17 bp, Arabidopsis thaliana
cccgtgcagttctgtag

SEQ ID NO: 72516 - DNA, 17 bp, Arabidopsis thaliana
cccgtgcattggtcggc

SEQ ID NO: 72517 - DNA, 17 bp, Arabidopsis thaliana
cccgtggatatccgatt

SEQ ID NO: 72518 - DNA, 17 bp, Arabidopsis thaliana
cccgtggccctgtaaac

SEQ ID NO: 72519 - DNA, 17 bp, Arabidopsis thaliana
cccgtggtgatttgtgg

SEQ ID NO: 72520 - DNA, 17 bp, Arabidopsis thaliana
cccgtgtcctccatgca

SEQ ID NO: 72521 - DNA, 17 bp, Arabidopsis thaliana
cccgttagattcgcaac

SEQ ID NO: 72522 - DNA, 17 bp, Arabidopsis thaliana
cccgttccgtaaaaaaa

SEQ ID NO: 72523 - DNA, 17 bp, Arabidopsis thaliana
cccgttgctctgatgat

SEQ ID NO: 72524 - DNA, 17 bp, Arabidopsis thaliana
cccgttggttatccgtc

SEQ ID NO: 72525 - DNA, 17 bp, Arabidopsis thaliana
cccgtttaggccaagga

SEQ ID NO: 72526 - DNA, 17 bp, Arabidopsis thaliana
cccgtttatctcagtgc

SEQ ID NO: 72527 - DNA, 17 bp, Arabidopsis thaliana
cccgtttgcagagagaa

SEQ ID NO: 72528 - DNA, 17 bp, Arabidopsis thaliana
cccgtttgtatcctcta

SEQ ID NO: 72529 - DNA, 17 bp, Arabidopsis thaliana
ccctaaatgaccgctca

SEQ ID NO: 72530 - DNA, 17 bp, Arabidopsis thaliana
ccctaacgattctgctc

SEQ ID NO: 72531 - DNA, 17 bp, Arabidopsis thaliana
ccctaacgttggattgt

SEQ ID NO: 72532 - DNA, 17 bp, Arabidopsis thaliana
ccctaagactgcattgg

SEQ ID NO: 72533 - DNA, 17 bp, Arabidopsis thaliana
ccctaatacagcctaga

SEQ ID NO: 72534 - DNA, 17 bp, Arabidopsis thaliana
ccctaatgggcttaggg

SEQ ID NO: 72535 - DNA, 17 bp, Arabidopsis thaliana
ccctaatttggctcgtg

SEQ ID NO: 72536 - DNA, 17 bp, Arabidopsis thaliana
ccctaatttgttcaggc

SEQ ID NO: 72537 - DNA, 17 bp, Arabidopsis thaliana
ccctacatagcaggtgg

SEQ ID NO: 72538 - DNA, 17 bp, Arabidopsis thaliana
ccctacatagcgggtgg

SEQ ID NO: 72539 - DNA, 17 bp, Arabidopsis thaliana
ccctacatcttccagag

SEQ ID NO: 72540 - DNA, 17 bp, Arabidopsis thaliana
ccctacatgcgggtggg

SEQ ID NO: 72541 - DNA, 17 bp, Arabidopsis thaliana
ccctacatggcgggtgg

SEQ ID NO: 72542 - DNA, 17 bp, Arabidopsis thaliana
ccctacatgtagcagct

SEQ ID NO: 72543 - DNA, 17 bp, Arabidopsis thaliana
ccctaccgactaagaga

SEQ ID NO: 72544 - DNA, 17 bp, Arabidopsis thaliana
ccctaccgattgaatga

SEQ ID NO: 72545 - DNA, 17 bp, Arabidopsis thaliana
ccctaccgtcgtcggaa

SEQ ID NO: 72546 - DNA, 17 bp, Arabidopsis thaliana
ccctacgctactggcgc

SEQ ID NO: 72547 - DNA, 17 bp, Arabidopsis thaliana
ccctacggagattttgg

SEQ ID NO: 72548 - DNA, 17 bp, Arabidopsis thaliana
ccctactgatccccgcg

SEQ ID NO: 72549 - DNA, 17 bp, Arabidopsis thaliana
ccctactgatgcccgcc

SEQ ID NO: 72550 - DNA, 17 bp, Arabidopsis thaliana
ccctactgatgcccgcg

SEQ ID NO: 72551 - DNA, 17 bp, Arabidopsis thaliana
ccctactgatgtccgcc

SEQ ID NO: 72552 - DNA, 17 bp, Arabidopsis thaliana
ccctactgatgtccgcg

SEQ ID NO: 72553 - DNA, 17 bp, Arabidopsis thaliana
ccctacttgtggttggt

SEQ ID NO: 72554 - DNA, 17 bp, Arabidopsis thaliana
ccctagaccgctttgtc

SEQ ID NO: 72555 - DNA, 17 bp, Arabidopsis thaliana
ccctagacctagctgct

SEQ ID NO: 72556 - DNA, 17 bp, Arabidopsis thaliana
ccctagcggatagcgtc

SEQ ID NO: 72557 - DNA, 17 bp, Arabidopsis thaliana
ccctaggaggtgtgcca

SEQ ID NO: 72558 - DNA, 17 bp, Arabidopsis thaliana
ccctagggatagacaca

SEQ ID NO: 72559 - DNA, 17 bp, Arabidopsis thaliana
ccctaggtacgtgcggg

SEQ ID NO: 72560 - DNA, 17 bp, Arabidopsis thaliana
ccctaggttttgcagcg

SEQ ID NO: 72561 - DNA, 17 bp, Arabidopsis thaliana
ccctagtcgattatcga

SEQ ID NO: 72562 - DNA, 17 bp, Arabidopsis thaliana
ccctagtggagaggatg

SEQ ID NO: 72563 - DNA, 17 bp, Arabidopsis thaliana
ccctatatggcgggtgg

SEQ ID NO: 72564 - DNA, 17 bp, Arabidopsis thaliana
ccctatccatcctgagt

SEQ ID NO: 72565 - DNA, 17 bp, Arabidopsis thaliana
ccctatccatcctgatt

SEQ ID NO: 72566 - DNA, 17 bp, Arabidopsis thaliana
ccctatcggctgatctg

SEQ ID NO: 72567 - DNA, 17 bp, Arabidopsis thaliana
ccctatcgtatctgtgg

SEQ ID NO: 72568 - DNA, 17 bp, Arabidopsis thaliana
ccctatcgtctagaggc

SEQ ID NO: 72569 - DNA, 17 bp, Arabidopsis thaliana
ccctatgtggacgcctt

SEQ ID NO: 72570 - DNA, 17 bp, Arabidopsis thaliana
ccctatgtgtgctacaa

SEQ ID NO: 72571 - DNA, 17 bp, Arabidopsis thaliana
ccctattgatccccgcg

SEQ ID NO: 72572 - DNA, 17 bp, Arabidopsis thaliana
ccctattgtgcgttagt

SEQ ID NO: 72573 - DNA, 17 bp, Arabidopsis thaliana
ccctcaacacccacccc

SEQ ID NO: 72574 - DNA, 17 bp, Arabidopsis thaliana
ccctcaacttcggctag

SEQ ID NO: 72575 - DNA, 17 bp, Arabidopsis thaliana
ccctcaacttggctaga

SEQ ID NO: 72576 - DNA, 17 bp, Arabidopsis thaliana
ccctcaactttggccag

SEQ ID NO: 72577 - DNA, 17 bp, Arabidopsis thaliana
ccctcaactttggctag

SEQ ID NO: 72578 - DNA, 17 bp, Arabidopsis thaliana
ccctcaccatcctttgc

SEQ ID NO: 72579 - DNA, 17 bp, Arabidopsis thaliana
ccctcacggccatcggc

SEQ ID NO: 72580 - DNA, 17 bp, Arabidopsis thaliana
ccctcacgtgctcttcc

SEQ ID NO: 72581 - DNA, 17 bp, Arabidopsis thaliana
ccctcagattcctgaca

SEQ ID NO: 72582 - DNA, 17 bp, Arabidopsis thaliana
ccctcaggatagctgga

SEQ ID NO: 72583 - DNA, 17 bp, Arabidopsis thaliana
ccctcaggattagctct

SEQ ID NO: 72584 - DNA, 17 bp, Arabidopsis thaliana
ccctcaggggcggatcc

SEQ ID NO: 72585 - DNA, 17 bp, Arabidopsis thaliana
ccctcaggtggctaaca

SEQ ID NO: 72586 - DNA, 17 bp, Arabidopsis thaliana
ccctcataaatgcctct

SEQ ID NO: 72587 - DNA, 17 bp, Arabidopsis thaliana
ccctcataagttgcctt

SEQ ID NO: 72588 - DNA, 17 bp, Arabidopsis thaliana
ccctcatatcccacagc

SEQ ID NO: 72589 - DNA, 17 bp, Arabidopsis thaliana
ccctcatcccacagctg

SEQ ID NO: 72590 - DNA, 17 bp, Arabidopsis thaliana
ccctcatggattcgcgt

SEQ ID NO: 72591 - DNA, 17 bp, Arabidopsis thaliana
ccctcatgttccttctg

SEQ ID NO: 72592 - DNA, 17 bp, Arabidopsis thaliana
ccctccaccgtcgtttc

SEQ ID NO: 72593 - DNA, 17 bp, Arabidopsis thaliana
ccctccaggttttgtag

SEQ ID NO: 72594 - DNA, 17 bp, Arabidopsis thaliana
ccctcccctgtcgcaag

SEQ ID NO: 72595 - DNA, 17 bp, Arabidopsis thaliana
ccctccgaagtttccct

SEQ ID NO: 72596 - DNA, 17 bp, Arabidopsis thaliana
ccctccgacgaaataag

SEQ ID NO: 72597 - DNA, 17 bp, Arabidopsis thaliana
ccctcctctgatccttc

SEQ ID NO: 72598 - DNA, 17 bp, Arabidopsis thaliana
ccctcgccggatctatg

SEQ ID NO: 72599 - DNA, 17 bp, Arabidopsis thaliana
ccctcgcgggtcccccc

SEQ ID NO: 72600 - DNA, 17 bp, Arabidopsis thaliana
ccctcgcgggtgcaccc

SEQ ID NO: 72601 - DNA, 17 bp, Arabidopsis thaliana
ccctcgcgggtgcaccg

SEQ ID NO: 72602 - DNA, 17 bp, Arabidopsis thaliana
ccctcgcttggaccata

SEQ ID NO: 72603 - DNA, 17 bp, Arabidopsis thaliana
ccctcggcaacggatat

SEQ ID NO: 72604 - DNA, 17 bp, Arabidopsis thaliana
ccctcgggtcggcagcg

SEQ ID NO: 72605 - DNA, 17 bp, Arabidopsis thaliana
ccctcgtggaagttttg

SEQ ID NO: 72606 - DNA, 17 bp, Arabidopsis thaliana
ccctcgtggctcagaca

SEQ ID NO: 72607 - DNA, 17 bp, Arabidopsis thaliana
ccctctaactagctacg

SEQ ID NO: 72608 - DNA, 17 bp, Arabidopsis thaliana
ccctctaagaagccggc

SEQ ID NO: 72609 - DNA, 17 bp, Arabidopsis thaliana
ccctctatctctgtagt

SEQ ID NO: 72610 - DNA, 17 bp, Arabidopsis thaliana
ccctctcaaatgttaca

SEQ ID NO: 72611 - DNA, 17 bp, Arabidopsis thaliana
ccctctcaaatgttgca

SEQ ID NO: 72612 - DNA, 17 bp, Arabidopsis thaliana
ccctctcacggatctat

SEQ ID NO: 72613 - DNA, 17 bp, Arabidopsis thaliana
ccctctcagatttcgtc

SEQ ID NO: 72614 - DNA, 17 bp, Arabidopsis thaliana
ccctctcctccgccgat

SEQ ID NO: 72615 - DNA, 17 bp, Arabidopsis thaliana
ccctctgcccccccccc

SEQ ID NO: 72616 - DNA, 17 bp, Arabidopsis thaliana
ccctctgctgtagacca

SEQ ID NO: 72617 - DNA, 17 bp, Arabidopsis thaliana
ccctctggcttgcgttt

SEQ ID NO: 72618 - DNA, 17 bp, Arabidopsis thaliana
ccctctgggagagactc

SEQ ID NO: 72619 - DNA, 17 bp, Arabidopsis thaliana
ccctctgttttcaacta

SEQ ID NO: 72620 - DNA, 17 bp, Arabidopsis thaliana
ccctcttcagggaccta

SEQ ID NO: 72621 - DNA, 17 bp, Arabidopsis thaliana
ccctgaacagactgccg

SEQ ID NO: 72622 - DNA, 17 bp, Arabidopsis thaliana
ccctgacacggggaggg

SEQ ID NO: 72623 - DNA, 17 bp, Arabidopsis thaliana
ccctgacacggggaggt

SEQ ID NO: 72624 - DNA, 17 bp, Arabidopsis thaliana
ccctgacttattccccg

SEQ ID NO: 72625 - DNA, 17 bp, Arabidopsis thaliana
ccctgagaactgggatc

SEQ ID NO: 72626 - DNA, 17 bp, Arabidopsis thaliana
ccctgagactgcattgg

SEQ ID NO: 72627 - DNA, 17 bp, Arabidopsis thaliana
ccctgagacttcgacgg

SEQ ID NO: 72628 - DNA, 17 bp, Arabidopsis thaliana
ccctgagttgtctttag

SEQ ID NO: 72629 - DNA, 17 bp, Arabidopsis thaliana
ccctgatcacatcctga

SEQ ID NO: 72630 - DNA, 17 bp, Arabidopsis thaliana
ccctgccacatgaggcc

SEQ ID NO: 72631 - DNA, 17 bp, Arabidopsis thaliana
ccctgccacggtacaga

SEQ ID NO: 72632 - DNA, 17 bp, Arabidopsis thaliana
ccctgccaggggctttg

SEQ ID NO: 72633 - DNA, 17 bp, Arabidopsis thaliana
ccctgccgcaccacgag

SEQ ID NO: 72634 - DNA, 17 bp, Arabidopsis thaliana
ccctgcctaatacccgg

SEQ ID NO: 72635 - DNA, 17 bp, Arabidopsis thaliana
ccctgcgaggagtccga

SEQ ID NO: 72636 - DNA, 17 bp, Arabidopsis thaliana
ccctgcgcaaggatgac

SEQ ID NO: 72637 - DNA, 17 bp, Arabidopsis thaliana
ccctgcgctggattatg

SEQ ID NO: 72638 - DNA, 17 bp, Arabidopsis thaliana
ccctgcggttcaagcgg

SEQ ID NO: 72639 - DNA, 17 bp, Arabidopsis thaliana
ccctggaaacggctcag

SEQ ID NO: 72640 - DNA, 17 bp, Arabidopsis thaliana
ccctggaaagctctcca

SEQ ID NO: 72641 - DNA, 17 bp, Arabidopsis thaliana
ccctggaccatgctgct

SEQ ID NO: 72642 - DNA, 17 bp, Arabidopsis thaliana
ccctggatctatgtcgt

SEQ ID NO: 72643 - DNA, 17 bp, Arabidopsis thaliana
ccctggcagggctccga

SEQ ID NO: 72644 - DNA, 17 bp, Arabidopsis thaliana
ccctgggattggctttg

SEQ ID NO: 72645 - DNA, 17 bp, Arabidopsis thaliana
ccctgggctctgacccc

SEQ ID NO: 72646 - DNA, 17 bp, Arabidopsis thaliana
ccctgggctctgaccgc

SEQ ID NO: 72647 - DNA, 17 bp, Arabidopsis thaliana
ccctgggtcaaccattg

SEQ ID NO: 72648 - DNA, 17 bp, Arabidopsis thaliana
ccctgggtcccacccgc

SEQ ID NO: 72649 - DNA, 17 bp, Arabidopsis thaliana
ccctgggttgtcggagc

SEQ ID NO: 72650 - DNA, 17 bp, Arabidopsis thaliana
ccctggtctactcctgc

SEQ ID NO: 72651 - DNA, 17 bp, Arabidopsis thaliana
ccctgtaccggctggag

SEQ ID NO: 72652 - DNA, 17 bp, Arabidopsis thaliana
ccctgtagattcgttcc

SEQ ID NO: 72653 - DNA, 17 bp, Arabidopsis thaliana
ccctgtagtgaccctcg

SEQ ID NO: 72654 - DNA, 17 bp, Arabidopsis thaliana
ccctgtccccgaagtgc

SEQ ID NO: 72655 - DNA, 17 bp, Arabidopsis thaliana
ccctgtcgcaccacgag

SEQ ID NO: 72656 - DNA, 17 bp, Arabidopsis thaliana
ccctgtctactatccag

SEQ ID NO: 72657 - DNA, 17 bp, Arabidopsis thaliana
ccctgtgcaggattcag

SEQ ID NO: 72658 - DNA, 17 bp, Arabidopsis thaliana
ccctgtgcaggcttgcc

SEQ ID NO: 72659 - DNA, 17 bp, Arabidopsis thaliana
ccctgtgctatgctcca

SEQ ID NO: 72660 - DNA, 17 bp, Arabidopsis thaliana
ccctgttgagctcgact

SEQ ID NO: 72661 - DNA, 17 bp, Arabidopsis thaliana
ccctgttgagcttgact

SEQ ID NO: 72662 - DNA, 17 bp, Arabidopsis thaliana
ccctgtttgatttagtt

SEQ ID NO: 72663 - DNA, 17 bp, Arabidopsis thaliana
ccctgtttttgacatct

SEQ ID NO: 72664 - DNA, 17 bp, Arabidopsis thaliana
ccctgtttttggtccca

SEQ ID NO: 72665 - DNA, 17 bp, Arabidopsis thaliana
cccttaaacctagttgg

SEQ ID NO: 72666 - DNA, 17 bp, Arabidopsis thaliana
cccttaaccatggtttt

SEQ ID NO: 72667 - DNA, 17 bp, Arabidopsis thaliana
cccttaacgaggatcca

SEQ ID NO: 72668 - DNA, 17 bp, Arabidopsis thaliana
cccttaactttggccag

SEQ ID NO: 72669 - DNA, 17 bp, Arabidopsis thaliana
cccttaaggtttcatgc

SEQ ID NO: 72670 - DNA, 17 bp, Arabidopsis thaliana
cccttaccttttgactt

SEQ ID NO: 72671 - DNA, 17 bp, Arabidopsis thaliana
cccttacggacaattcc

SEQ ID NO: 72672 - DNA, 17 bp, Arabidopsis thaliana
cccttacggccggcttc

SEQ ID NO: 72673 - DNA, 17 bp, Arabidopsis thaliana
cccttactcgttggggg

SEQ ID NO: 72674 - DNA, 17 bp, Arabidopsis thaliana
cccttagatgttcgggg

SEQ ID NO: 72675 - DNA, 17 bp, Arabidopsis thaliana
cccttagatgttctgac

SEQ ID NO: 72676 - DNA, 17 bp, Arabidopsis thaliana
cccttagatgttctggg

SEQ ID NO: 72677 - DNA, 17 bp, Arabidopsis thaliana
cccttagatgttctgtc

SEQ ID NO: 72678 - DNA, 17 bp, Arabidopsis thaliana
cccttagatgttctgtg

SEQ ID NO: 72679 - DNA, 17 bp, Arabidopsis thaliana
cccttagcccatctctg

SEQ ID NO: 72680 - DNA, 17 bp, Arabidopsis thaliana
cccttaggattcttcac

SEQ ID NO: 72681 - DNA, 17 bp, Arabidopsis thaliana
cccttagtaacgacgag

SEQ ID NO: 72682 - DNA, 17 bp, Arabidopsis thaliana
cccttagtttcgttcta

SEQ ID NO: 72683 - DNA, 17 bp, Arabidopsis thaliana
cccttagttttaccatc

SEQ ID NO: 72684 - DNA, 17 bp, Arabidopsis thaliana
cccttatgccctgggcg

SEQ ID NO: 72685 - DNA, 17 bp, Arabidopsis thaliana
cccttattttgctacca

SEQ ID NO: 72686 - DNA, 17 bp, Arabidopsis thaliana
cccttattttgctacga

SEQ ID NO: 72687 - DNA, 17 bp, Arabidopsis thaliana
cccttatttttcgccgg

SEQ ID NO: 72688 - DNA, 17 bp, Arabidopsis thaliana
cccttcaaagacacgcc

SEQ ID NO: 72689 - DNA, 17 bp, Arabidopsis thaliana
cccttcaccgccggctt

SEQ ID NO: 72690 - DNA, 17 bp, Arabidopsis thaliana
cccttcacggccagctt

SEQ ID NO: 72691 - DNA, 17 bp, Arabidopsis thaliana
cccttcacggccccccc

SEQ ID NO: 72692 - DNA, 17 bp, Arabidopsis thaliana
cccttcacggccggccc

SEQ ID NO: 72693 - DNA, 17 bp, Arabidopsis thaliana
cccttcacggccggccg

SEQ ID NO: 72694 - DNA, 17 bp, Arabidopsis thaliana
cccttcacggccggcct

SEQ ID NO: 72695 - DNA, 17 bp, Arabidopsis thaliana
cccttcacggccggcgc

SEQ ID NO: 72696 - DNA, 17 bp, Arabidopsis thaliana
cccttcacggccggctc

SEQ ID NO: 72697 - DNA, 17 bp, Arabidopsis thaliana
cccttcacggccggctg

SEQ ID NO: 72698 - DNA, 17 bp, Arabidopsis thaliana
cccttcacggccggctt

SEQ ID NO: 72699 - DNA, 17 bp, Arabidopsis thaliana
cccttcacggccggttt

SEQ ID NO: 72700 - DNA, 17 bp, Arabidopsis thaliana
cccttcacggccttaga

SEQ ID NO: 72701 - DNA, 17 bp, Arabidopsis thaliana
cccttcacggctggctt

SEQ ID NO: 72702 - DNA, 17 bp, Arabidopsis thaliana
cccttcacggttgcgac

SEQ ID NO: 72703 - DNA, 17 bp, Arabidopsis thaliana
cccttcacgtccagcgt

SEQ ID NO: 72704 - DNA, 17 bp, Arabidopsis thaliana
cccttcagccctttgtc

SEQ ID NO: 72705 - DNA, 17 bp, Arabidopsis thaliana
cccttcagttttgggct

SEQ ID NO: 72706 - DNA, 17 bp, Arabidopsis thaliana
cccttcatggccggctt

SEQ ID NO: 72707 - DNA, 17 bp, Arabidopsis thaliana
cccttccataagtcggg

SEQ ID NO: 72708 - DNA, 17 bp, Arabidopsis thaliana
cccttccgacaagtgag

SEQ ID NO: 72709 - DNA, 17 bp, Arabidopsis thaliana
cccttccgggggggccc

SEQ ID NO: 72710 - DNA, 17 bp, Arabidopsis thaliana
cccttcgatagggtttt

SEQ ID NO: 72711 - DNA, 17 bp, Arabidopsis thaliana
cccttcggaccaggctt

SEQ ID NO: 72712 - DNA, 17 bp, Arabidopsis thaliana
cccttcggtcggcgata

SEQ ID NO: 72713 - DNA, 17 bp, Arabidopsis thaliana
cccttcggtcggcggta

SEQ ID NO: 72714 - DNA, 17 bp, Arabidopsis thaliana
cccttcgtcgtaacggg

SEQ ID NO: 72715 - DNA, 17 bp, Arabidopsis thaliana
cccttcgtttgcagtca

SEQ ID NO: 72716 - DNA, 17 bp, Arabidopsis thaliana
cccttctaatattgtgt

SEQ ID NO: 72717 - DNA, 17 bp, Arabidopsis thaliana
cccttctacttggtata

SEQ ID NO: 72718 - DNA, 17 bp, Arabidopsis thaliana
cccttctacttggttta

SEQ ID NO: 72719 - DNA, 17 bp, Arabidopsis thaliana
cccttctactttcatgg

SEQ ID NO: 72720 - DNA, 17 bp, Arabidopsis thaliana
cccttctatggtaggct

SEQ ID NO: 72721 - DNA, 17 bp, Arabidopsis thaliana
cccttctattgtacttg

SEQ ID NO: 72722 - DNA, 17 bp, Arabidopsis thaliana
cccttctatttccggca

SEQ ID NO: 72723 - DNA, 17 bp, Arabidopsis thaliana
cccttctatttccggct

SEQ ID NO: 72724 - DNA, 17 bp, Arabidopsis thaliana
cccttctatttgtgttt

SEQ ID NO: 72725 - DNA, 17 bp, Arabidopsis thaliana
cccttctcagtatgtgt

SEQ ID NO: 72726 - DNA, 17 bp, Arabidopsis thaliana
cccttctcatcgatggt

SEQ ID NO: 72727 - DNA, 17 bp, Arabidopsis thaliana
cccttctggattagttg

SEQ ID NO: 72728 - DNA, 17 bp, Arabidopsis thaliana
cccttctggattcgctt

SEQ ID NO: 72729 - DNA, 17 bp, Arabidopsis thaliana
cccttctttggaccatt

SEQ ID NO: 72730 - DNA, 17 bp, Arabidopsis thaliana
cccttgaccaaatcgtg

SEQ ID NO: 72731 - DNA, 17 bp, Arabidopsis thaliana
cccttgactctagcccg

SEQ ID NO: 72732 - DNA, 17 bp, Arabidopsis thaliana
cccttgatgtctgtctc

SEQ ID NO: 72733 - DNA, 17 bp, Arabidopsis thaliana
cccttgcagcatctgtt

SEQ ID NO: 72734 - DNA, 17 bp, Arabidopsis thaliana
cccttgcatgtagttag

SEQ ID NO: 72735 - DNA, 17 bp, Arabidopsis thaliana
cccttgcccgcgcaggt

SEQ ID NO: 72736 - DNA, 17 bp, Arabidopsis thaliana
cccttgccgctggtcgc

SEQ ID NO: 72737 - DNA, 17 bp, Arabidopsis thaliana
cccttggaccttggtct

SEQ ID NO: 72738 - DNA, 17 bp, Arabidopsis thaliana
cccttgggacatctatt

SEQ ID NO: 72739 - DNA, 17 bp, Arabidopsis thaliana
cccttgggatgggtcgg

SEQ ID NO: 72740 - DNA, 17 bp, Arabidopsis thaliana
cccttgggggtactcga

SEQ ID NO: 72741 - DNA, 17 bp, Arabidopsis thaliana
cccttggtggagcgatt

SEQ ID NO: 72742 - DNA, 17 bp, Arabidopsis thaliana
cccttgtaaatctattt

SEQ ID NO: 72743 - DNA, 17 bp, Arabidopsis thaliana
cccttgtagattttgcc

SEQ ID NO: 72744 - DNA, 17 bp, Arabidopsis thaliana
cccttgtccctaagatt

SEQ ID NO: 72745 - DNA, 17 bp, Arabidopsis thaliana
cccttgtcgctaagatt

SEQ ID NO: 72746 - DNA, 17 bp, Arabidopsis thaliana
cccttgtctctctgtcg

SEQ ID NO: 72747 - DNA, 17 bp, Arabidopsis thaliana
cccttgtgttggccttc

SEQ ID NO: 72748 - DNA, 17 bp, Arabidopsis thaliana
cccttgttggtcccgag

SEQ ID NO: 72749 - DNA, 17 bp, Arabidopsis thaliana
ccctttccctttctaca

SEQ ID NO: 72750 - DNA, 17 bp, Arabidopsis thaliana
ccctttccggcaggtcg

SEQ ID NO: 72751 - DNA, 17 bp, Arabidopsis thaliana
ccctttcggttgtgacc

SEQ ID NO: 72752 - DNA, 17 bp, Arabidopsis thaliana
ccctttgaccgatgttg

SEQ ID NO: 72753 - DNA, 17 bp, Arabidopsis thaliana
ccctttgactgttgtcc

SEQ ID NO: 72754 - DNA, 17 bp, Arabidopsis thaliana
ccctttgatattggcct

SEQ ID NO: 72755 - DNA, 17 bp, Arabidopsis thaliana
ccctttgatcaaggcgt

SEQ ID NO: 72756 - DNA, 17 bp, Arabidopsis thaliana
ccctttgcccttcgcag

SEQ ID NO: 72757 - DNA, 17 bp, Arabidopsis thaliana
ccctttgctcgggttgt

SEQ ID NO: 72758 - DNA, 17 bp, Arabidopsis thaliana
ccctttggctcctggta

SEQ ID NO: 72759 - DNA, 17 bp, Arabidopsis thaliana
ccctttggtcccaaggc

SEQ ID NO: 72760 - DNA, 17 bp, Arabidopsis thaliana
ccctttggtgtccagac

SEQ ID NO: 72761 - DNA, 17 bp, Arabidopsis thaliana
ccctttggttggaccaa

SEQ ID NO: 72762 - DNA, 17 bp, Arabidopsis thaliana
ccctttgtacacacccc

SEQ ID NO: 72763 - DNA, 17 bp, Arabidopsis thaliana
ccctttgtacacaccgc

SEQ ID NO: 72764 - DNA, 17 bp, Arabidopsis thaliana
ccctttgtcactaagat

SEQ ID NO: 72765 - DNA, 17 bp, Arabidopsis thaliana
ccctttgtcgctaagat

SEQ ID NO: 72766 - DNA, 17 bp, Arabidopsis thaliana
ccctttgtttgactatt

SEQ ID NO: 72767 - DNA, 17 bp, Arabidopsis thaliana
ccctttgtttgttctct

SEQ ID NO: 72768 - DNA, 17 bp, Arabidopsis thaliana
cccttttatgttggcca

SEQ ID NO: 72769 - DNA, 17 bp, Arabidopsis thaliana
cccttttccctcttggc

SEQ ID NO: 72770 - DNA, 17 bp, Arabidopsis thaliana
cccttttggcccaatag

SEQ ID NO: 72771 - DNA, 17 bp, Arabidopsis thaliana
cccttttgtcgctaaga

SEQ ID NO: 72772 - DNA, 17 bp, Arabidopsis thaliana
cccttttgttgtgtctc

SEQ ID NO: 72773 - DNA, 17 bp, Arabidopsis thaliana
ccctttttccccaggtc

SEQ ID NO: 72774 - DNA, 17 bp, Arabidopsis thaliana
ccctttttcgatggcca

SEQ ID NO: 72775 - DNA, 17 bp, Arabidopsis thaliana
ccctttttctgggcata

SEQ ID NO: 72776 - DNA, 17 bp, Arabidopsis thaliana
ccctttttgtagttcgg

SEQ ID NO: 72777 - DNA, 17 bp, Arabidopsis thaliana
ccgaaaaagtacttaaa

SEQ ID NO: 72778 - DNA, 17 bp, Arabidopsis thaliana
ccgaaaaagttcgtctt

SEQ ID NO: 72779 - DNA, 17 bp, Arabidopsis thaliana
ccgaaaacagtggactt

SEQ ID NO: 72780 - DNA, 17 bp, Arabidopsis thaliana
ccgaaaagataagtgca

SEQ ID NO: 72781 - DNA, 17 bp, Arabidopsis thaliana
ccgaaaaggtatcacag

SEQ ID NO: 72782 - DNA, 17 bp, Arabidopsis thaliana
ccgaaaatggatggcgc

SEQ ID NO: 72783 - DNA, 17 bp, Arabidopsis thaliana
ccgaaaatgtgatatac

SEQ ID NO: 72784 - DNA, 17 bp, Arabidopsis thaliana
ccgaaaccaactgctgt

SEQ ID NO: 72785 - DNA, 17 bp, Arabidopsis thaliana
ccgaaaccacagcatgt

SEQ ID NO: 72786 - DNA, 17 bp, Arabidopsis thaliana
ccgaaacccgtaatccc

SEQ ID NO: 72787 - DNA, 17 bp, Arabidopsis thaliana
ccgaaagaccacactgt

SEQ ID NO: 72788 - DNA, 17 bp, Arabidopsis thaliana
ccgaaagaccaccacac

SEQ ID NO: 72789 - DNA, 17 bp, Arabidopsis thaliana
ccgaaagatggtgaact

SEQ ID NO: 72790 - DNA, 17 bp, Arabidopsis thaliana
ccgaaagatggtgaagt

SEQ ID NO: 72791 - DNA, 17 bp, Arabidopsis thaliana
ccgaaagcattcaggtt

SEQ ID NO: 72792 - DNA, 17 bp, Arabidopsis thaliana
ccgaaagcatttgccaa

SEQ ID NO: 72793 - DNA, 17 bp, Arabidopsis thaliana
ccgaaagtgcttcgatg

SEQ ID NO: 72794 - DNA, 17 bp, Arabidopsis thaliana
ccgaaagttgatcttaa

SEQ ID NO: 72795 - DNA, 17 bp, Arabidopsis thaliana
ccgaaatacttcagagt

SEQ ID NO: 72796 - DNA, 17 bp, Arabidopsis thaliana
ccgaaatatagcccgtc

SEQ ID NO: 72797 - DNA, 17 bp, Arabidopsis thaliana
ccgaaatcaagtgctgt

SEQ ID NO: 72798 - DNA, 17 bp, Arabidopsis thaliana
ccgaaatcggggtgtta

SEQ ID NO: 72799 - DNA, 17 bp, Arabidopsis thaliana
ccgaaatcgtctgcttt

SEQ ID NO: 72800 - DNA, 17 bp, Arabidopsis thaliana
ccgaaatgatgattctg

SEQ ID NO: 72801 - DNA, 17 bp, Arabidopsis thaliana
ccgaaatgttacggaat

SEQ ID NO: 72802 - DNA, 17 bp, Arabidopsis thaliana
ccgaaatgttgggctca

SEQ ID NO: 72803 - DNA, 17 bp, Arabidopsis thaliana
ccgaaattagttatgta

SEQ ID NO: 72804 - DNA, 17 bp, Arabidopsis thaliana
ccgaaattcagacgccg

SEQ ID NO: 72805 - DNA, 17 bp, Arabidopsis thaliana
ccgaacagagtcgtttt

SEQ ID NO: 72806 - DNA, 17 bp, Arabidopsis thaliana
ccgaacagataattttg

SEQ ID NO: 72807 - DNA, 17 bp, Arabidopsis thaliana
ccgaacatttcgtgcca

SEQ ID NO: 72808 - DNA, 17 bp, Arabidopsis thaliana
ccgaaccccaaatacct

SEQ ID NO: 72809 - DNA, 17 bp, Arabidopsis thaliana
ccgaaccccgtaatccc

SEQ ID NO: 72810 - DNA, 17 bp, Arabidopsis thaliana
ccgaacccgcagagaat

SEQ ID NO: 72811 - DNA, 17 bp, Arabidopsis thaliana
ccgaacccgtcggctca

SEQ ID NO: 72812 - DNA, 17 bp, Arabidopsis thaliana
ccgaaccggatcttaaa

SEQ ID NO: 72813 - DNA, 17 bp, Arabidopsis thaliana
ccgaacctggccggact

SEQ ID NO: 72814 - DNA, 17 bp, Arabidopsis thaliana
ccgaacctgggtgatct

SEQ ID NO: 72815 - DNA, 17 bp, Arabidopsis thaliana
ccgaacggggttagatg

SEQ ID NO: 72816 - DNA, 17 bp, Arabidopsis thaliana
ccgaacgggtcctaaac

SEQ ID NO: 72817 - DNA, 17 bp, Arabidopsis thaliana
ccgaactccagccgctg

SEQ ID NO: 72818 - DNA, 17 bp, Arabidopsis thaliana
ccgaactgacgcggtaa

SEQ ID NO: 72819 - DNA, 17 bp, Arabidopsis thaliana
ccgaactggtggcctga

SEQ ID NO: 72820 - DNA, 17 bp, Arabidopsis thaliana
ccgaacttggcatgtga

SEQ ID NO: 72821 - DNA, 17 bp, Arabidopsis thaliana
ccgaagaaaatgcgggc

SEQ ID NO: 72822 - DNA, 17 bp, Arabidopsis thaliana
ccgaagaagacaaccaa

SEQ ID NO: 72823 - DNA, 17 bp, Arabidopsis thaliana
ccgaagaagacaaccgg

SEQ ID NO: 72824 - DNA, 17 bp, Arabidopsis thaliana
ccgaagacagttagaca

SEQ ID NO: 72825 - DNA, 17 bp, Arabidopsis thaliana
ccgaagacattgccggg

SEQ ID NO: 72826 - DNA, 17 bp, Arabidopsis thaliana
ccgaagacccaaagatt

SEQ ID NO: 72827 - DNA, 17 bp, Arabidopsis thaliana
ccgaagacggtgacaga

SEQ ID NO: 72828 - DNA, 17 bp, Arabidopsis thaliana
ccgaagaggggaaagga

SEQ ID NO: 72829 - DNA, 17 bp, Arabidopsis thaliana
ccgaagaggggaaaggt

SEQ ID NO: 72830 - DNA, 17 bp, Arabidopsis thaliana
ccgaagatgtcgtctgt

SEQ ID NO: 72831 - DNA, 17 bp, Arabidopsis thaliana
ccgaagccaccgctatc

SEQ ID NO: 72832 - DNA, 17 bp, Arabidopsis thaliana
ccgaagccaccgtaccc

SEQ ID NO: 72833 - DNA, 17 bp, Arabidopsis thaliana
ccgaagccccggtgaac

SEQ ID NO: 72834 - DNA, 17 bp, Arabidopsis thaliana
ccgaagcccgtaatccc

SEQ ID NO: 72835 - DNA, 17 bp, Arabidopsis thaliana
ccgaagcccgtaatcct

SEQ ID NO: 72836 - DNA, 17 bp, Arabidopsis thaliana
ccgaagcccgtaatctc

SEQ ID NO: 72837 - DNA, 17 bp, Arabidopsis thaliana
ccgaagcccgttatccc

SEQ ID NO: 72838 - DNA, 17 bp, Arabidopsis thaliana
ccgaagcctgtaatcct

SEQ ID NO: 72839 - DNA, 17 bp, Arabidopsis thaliana
ccgaagcgagccttggg

SEQ ID NO: 72840 - DNA, 17 bp, Arabidopsis thaliana
ccgaagcggattacggt

SEQ ID NO: 72841 - DNA, 17 bp, Arabidopsis thaliana
ccgaagcggtcgtttag

SEQ ID NO: 72842 - DNA, 17 bp, Arabidopsis thaliana
ccgaagctagctctctt

SEQ ID NO: 72843 - DNA, 17 bp, Arabidopsis thaliana
ccgaagctcgtaatccc

SEQ ID NO: 72844 - DNA, 17 bp, Arabidopsis thaliana
ccgaagctgccaccttc

SEQ ID NO: 72845 - DNA, 17 bp, Arabidopsis thaliana
ccgaagctgcctccttc

SEQ ID NO: 72846 - DNA, 17 bp, Arabidopsis thaliana
ccgaagctgctacaatt

SEQ ID NO: 72847 - DNA, 17 bp, Arabidopsis thaliana
ccgaagctgtgggatgt

SEQ ID NO: 72848 - DNA, 17 bp, Arabidopsis thaliana
ccgaagcttgtaatctc

SEQ ID NO: 72849 - DNA, 17 bp, Arabidopsis thaliana
ccgaaggaccaccacac

SEQ ID NO: 72850 - DNA, 17 bp, Arabidopsis thaliana
ccgaaggactaccatac

SEQ ID NO: 72851 - DNA, 17 bp, Arabidopsis thaliana
ccgaaggcacgtctgcc

SEQ ID NO: 72852 - DNA, 17 bp, Arabidopsis thaliana
ccgaaggcagggctagt

SEQ ID NO: 72853 - DNA, 17 bp, Arabidopsis thaliana
ccgaaggtctaaaggaa

SEQ ID NO: 72854 - DNA, 17 bp, Arabidopsis thaliana
ccgaaggtctaaaggat

SEQ ID NO: 72855 - DNA, 17 bp, Arabidopsis thaliana
ccgaaggtctaaggatc

SEQ ID NO: 72856 - DNA, 17 bp, Arabidopsis thaliana
ccgaagtgactacatcg

SEQ ID NO: 72857 - DNA, 17 bp, Arabidopsis thaliana
ccgaagtgattggctct

SEQ ID NO: 72858 - DNA, 17 bp, Arabidopsis thaliana
ccgaagttcgttctcca

SEQ ID NO: 72859 - DNA, 17 bp, Arabidopsis thaliana
ccgaagtttccctcagg

SEQ ID NO: 72860 - DNA, 17 bp, Arabidopsis thaliana
ccgaataccgtctgacg

SEQ ID NO: 72861 - DNA, 17 bp, Arabidopsis thaliana
ccgaatacttgatttgc

SEQ ID NO: 72862 - DNA, 17 bp, Arabidopsis thaliana
ccgaatagcgtctgacc

SEQ ID NO: 72863 - DNA, 17 bp, Arabidopsis thaliana
ccgaatagcgtctgacg

SEQ ID NO: 72864 - DNA, 17 bp, Arabidopsis thaliana
ccgaatagggactaacg

SEQ ID NO: 72865 - DNA, 17 bp, Arabidopsis thaliana
ccgaatagggactaact

SEQ ID NO: 72866 - DNA, 17 bp, Arabidopsis thaliana
ccgaatcagccgatagg

SEQ ID NO: 72867 - DNA, 17 bp, Arabidopsis thaliana
ccgaatcatcagtttgc

SEQ ID NO: 72868 - DNA, 17 bp, Arabidopsis thaliana
ccgaatccattcgggca

SEQ ID NO: 72869 - DNA, 17 bp, Arabidopsis thaliana
ccgaatcccgtaatccc

SEQ ID NO: 72870 - DNA, 17 bp, Arabidopsis thaliana
ccgaatccgggtgccgc

SEQ ID NO: 72871 - DNA, 17 bp, Arabidopsis thaliana
ccgaatccgggtggcaa

SEQ ID NO: 72872 - DNA, 17 bp, Arabidopsis thaliana
ccgaatcctgtttcccc

SEQ ID NO: 72873 - DNA, 17 bp, Arabidopsis thaliana
ccgaatcgatcggcgga

SEQ ID NO: 72874 - DNA, 17 bp, Arabidopsis thaliana
ccgaatcttgtaatccc

SEQ ID NO: 72875 - DNA, 17 bp, Arabidopsis thaliana
ccgaatcttgtgcagga

SEQ ID NO: 72876 - DNA, 17 bp, Arabidopsis thaliana
ccgaatgaccaaccttc

SEQ ID NO: 72877 - DNA, 17 bp, Arabidopsis thaliana
ccgaatgaccggcattt

SEQ ID NO: 72878 - DNA, 17 bp, Arabidopsis thaliana
ccgaatgaccggctttc

SEQ ID NO: 72879 - DNA, 17 bp, Arabidopsis thaliana
ccgaatgagtagcggct

SEQ ID NO: 72880 - DNA, 17 bp, Arabidopsis thaliana
ccgaatggacgactttc

SEQ ID NO: 72881 - DNA, 17 bp, Arabidopsis thaliana
ccgaatggagaaagcgg

SEQ ID NO: 72882 - DNA, 17 bp, Arabidopsis thaliana
ccgaatggccaaccttc

SEQ ID NO: 72883 - DNA, 17 bp, Arabidopsis thaliana
ccgaatggccagtgttt

SEQ ID NO: 72884 - DNA, 17 bp, Arabidopsis thaliana
ccgaatggccgaccttc

SEQ ID NO: 72885 - DNA, 17 bp, Arabidopsis thaliana
ccgaatggccggcgttt

SEQ ID NO: 72886 - DNA, 17 bp, Arabidopsis thaliana
ccgaatggcggaccttc

SEQ ID NO: 72887 - DNA, 17 bp, Arabidopsis thaliana
ccgaatggctgacttct

SEQ ID NO: 72888 - DNA, 17 bp, Arabidopsis thaliana
ccgaatggtcgaccttc

SEQ ID NO: 72889 - DNA, 17 bp, Arabidopsis thaliana
ccgaatggtgactgcgt

SEQ ID NO: 72890 - DNA, 17 bp, Arabidopsis thaliana
ccgaattcttgtttgga

SEQ ID NO: 72891 - DNA, 17 bp, Arabidopsis thaliana
ccgaatttttgagtaaa

SEQ ID NO: 72892 - DNA, 17 bp, Arabidopsis thaliana
ccgacaaaagatctggt

SEQ ID NO: 72893 - DNA, 17 bp, Arabidopsis thaliana
ccgacaaaccggggctt

SEQ ID NO: 72894 - DNA, 17 bp, Arabidopsis thaliana
ccgacaaccaagatgta

SEQ ID NO: 72895 - DNA, 17 bp, Arabidopsis thaliana
ccgacaagatactgttg

SEQ ID NO: 72896 - DNA, 17 bp, Arabidopsis thaliana
ccgacaagtactatttg

SEQ ID NO: 72897 - DNA, 17 bp, Arabidopsis thaliana
ccgacaagttactgtag

SEQ ID NO: 72898 - DNA, 17 bp, Arabidopsis thaliana
ccgacaatagctgctac

SEQ ID NO: 72899 - DNA, 17 bp, Arabidopsis thaliana
ccgacaatagtcccatc

SEQ ID NO: 72900 - DNA, 17 bp, Arabidopsis thaliana
ccgacaatcaagatgtt

SEQ ID NO: 72901 - DNA, 17 bp, Arabidopsis thaliana
ccgacaatggctttgtt

SEQ ID NO: 72902 - DNA, 17 bp, Arabidopsis thaliana
ccgacaatttcaagcac

SEQ ID NO: 72903 - DNA, 17 bp, Arabidopsis thaliana
ccgacacaagtttccag

SEQ ID NO: 72904 - DNA, 17 bp, Arabidopsis thaliana
ccgacacaggtggggag

SEQ ID NO: 72905 - DNA, 17 bp, Arabidopsis thaliana
ccgacacaggtgggtag

SEQ ID NO: 72906 - DNA, 17 bp, Arabidopsis thaliana
ccgacaccatcatcgat

SEQ ID NO: 72907 - DNA, 17 bp, Arabidopsis thaliana
ccgacaccgacacctgc

SEQ ID NO: 72908 - DNA, 17 bp, Arabidopsis thaliana
ccgacaccggaacttag

SEQ ID NO: 72909 - DNA, 17 bp, Arabidopsis thaliana
ccgacacggattacggt

SEQ ID NO: 72910 - DNA, 17 bp, Arabidopsis thaliana
ccgacacgtcgtgtagg

SEQ ID NO: 72911 - DNA, 17 bp, Arabidopsis thaliana
ccgacagaagatctggt

SEQ ID NO: 72912 - DNA, 17 bp, Arabidopsis thaliana
ccgacagaccgacggac

SEQ ID NO: 72913 - DNA, 17 bp, Arabidopsis thaliana
ccgacagaccgacggcc

SEQ ID NO: 72914 - DNA, 17 bp, Arabidopsis thaliana
ccgacagaccgacgggc

SEQ ID NO: 72915 - DNA, 17 bp, Arabidopsis thaliana
ccgacagacctgggtaa

SEQ ID NO: 72916 - DNA, 17 bp, Arabidopsis thaliana
ccgacaggcccgggtaa

SEQ ID NO: 72917 - DNA, 17 bp, Arabidopsis thaliana
ccgacaggccgaaacga

SEQ ID NO: 72918 - DNA, 17 bp, Arabidopsis thaliana
ccgacaggccgacgggc

SEQ ID NO: 72919 - DNA, 17 bp, Arabidopsis thaliana
ccgacagttggaggtcg

SEQ ID NO: 72920 - DNA, 17 bp, Arabidopsis thaliana
ccgacatcatttggctt

SEQ ID NO: 72921 - DNA, 17 bp, Arabidopsis thaliana
ccgacatccacaatttg

SEQ ID NO: 72922 - DNA, 17 bp, Arabidopsis thaliana
ccgacatcgactagggt

SEQ ID NO: 72923 - DNA, 17 bp, Arabidopsis thaliana
ccgacatcgttgtagat

SEQ ID NO: 72924 - DNA, 17 bp, Arabidopsis thaliana
ccgacatggttctgtag

SEQ ID NO: 72925 - DNA, 17 bp, Arabidopsis thaliana
ccgacattaccggattc

SEQ ID NO: 72926 - DNA, 17 bp, Arabidopsis thaliana
ccgacattcgcagcaga

SEQ ID NO: 72927 - DNA, 17 bp, Arabidopsis thaliana
ccgaccaagagcgagat

SEQ ID NO: 72928 - DNA, 17 bp, Arabidopsis thaliana
ccgaccaagagctagat

SEQ ID NO: 72929 - DNA, 17 bp, Arabidopsis thaliana
ccgaccaagcttcattc

SEQ ID NO: 72930 - DNA, 17 bp, Arabidopsis thaliana
ccgaccaatccggatcg

SEQ ID NO: 72931 - DNA, 17 bp, Arabidopsis thaliana
ccgaccacccagttgtc

SEQ ID NO: 72932 - DNA, 17 bp, Arabidopsis thaliana
ccgaccactcacacctg

SEQ ID NO: 72933 - DNA, 17 bp, Arabidopsis thaliana
ccgaccactcgacctga

SEQ ID NO: 72934 - DNA, 17 bp, Arabidopsis thaliana
ccgaccagaatatccac

SEQ ID NO: 72935 - DNA, 17 bp, Arabidopsis thaliana
ccgaccaggacgcatcg

SEQ ID NO: 72936 - DNA, 17 bp, Arabidopsis thaliana
ccgaccaggagttaaag

SEQ ID NO: 72937 - DNA, 17 bp, Arabidopsis thaliana
ccgaccaggcttcatcc

SEQ ID NO: 72938 - DNA, 17 bp, Arabidopsis thaliana
ccgaccaggcttcattc

SEQ ID NO: 72939 - DNA, 17 bp, Arabidopsis thaliana
ccgaccagggatcagcg

SEQ ID NO: 72940 - DNA, 17 bp, Arabidopsis thaliana
ccgaccagggattagcg

SEQ ID NO: 72941 - DNA, 17 bp, Arabidopsis thaliana
ccgaccagtgatcagcg

SEQ ID NO: 72942 - DNA, 17 bp, Arabidopsis thaliana
ccgaccatcgtttcggc

SEQ ID NO: 72943 - DNA, 17 bp, Arabidopsis thaliana
ccgaccatggactgtcc

SEQ ID NO: 72944 - DNA, 17 bp, Arabidopsis thaliana
ccgaccccaggtcaggc

SEQ ID NO: 72945 - DNA, 17 bp, Arabidopsis thaliana
ccgacccgaaccacagc

SEQ ID NO: 72946 - DNA, 17 bp, Arabidopsis thaliana
ccgacccggattacggt

SEQ ID NO: 72947 - DNA, 17 bp, Arabidopsis thaliana
ccgaccctaggtgagac

SEQ ID NO: 72948 - DNA, 17 bp, Arabidopsis thaliana
ccgaccctcagtaggag

SEQ ID NO: 72949 - DNA, 17 bp, Arabidopsis thaliana
ccgaccctgtcggcaga

SEQ ID NO: 72950 - DNA, 17 bp, Arabidopsis thaliana
ccgacccttggcacaaa

SEQ ID NO: 72951 - DNA, 17 bp, Arabidopsis thaliana
ccgaccgacctaaagtc

SEQ ID NO: 72952 - DNA, 17 bp, Arabidopsis thaliana
ccgaccgaccttgatct

SEQ ID NO: 72953 - DNA, 17 bp, Arabidopsis thaliana
ccgaccgagatctttac

SEQ ID NO: 72954 - DNA, 17 bp, Arabidopsis thaliana
ccgaccgattctcggca

SEQ ID NO: 72955 - DNA, 17 bp, Arabidopsis thaliana
ccgaccgctcaccctgt

SEQ ID NO: 72956 - DNA, 17 bp, Arabidopsis thaliana
ccgaccggattacggtg

SEQ ID NO: 72957 - DNA, 17 bp, Arabidopsis thaliana
ccgaccggtcgaacatc

SEQ ID NO: 72958 - DNA, 17 bp, Arabidopsis thaliana
ccgaccgtcagacatgg

SEQ ID NO: 72959 - DNA, 17 bp, Arabidopsis thaliana
ccgaccgtccggccgcc

SEQ ID NO: 72960 - DNA, 17 bp, Arabidopsis thaliana
ccgaccgtcggacaagg

SEQ ID NO: 72961 - DNA, 17 bp, Arabidopsis thaliana
ccgacctaacctcagtc

SEQ ID NO: 72962 - DNA, 17 bp, Arabidopsis thaliana
ccgacctaacttcagtt

SEQ ID NO: 72963 - DNA, 17 bp, Arabidopsis thaliana
ccgacctaagctccgtc

SEQ ID NO: 72964 - DNA, 17 bp, Arabidopsis thaliana
ccgacctaagttcagtc

SEQ ID NO: 72965 - DNA, 17 bp, Arabidopsis thaliana
ccgacctaagttccgtt

SEQ ID NO: 72966 - DNA, 17 bp, Arabidopsis thaliana
ccgacctatggaagtca

SEQ ID NO: 72967 - DNA, 17 bp, Arabidopsis thaliana
ccgacctccatcgtctc

SEQ ID NO: 72968 - DNA, 17 bp, Arabidopsis thaliana
ccgacctcggtaggaac

SEQ ID NO: 72969 - DNA, 17 bp, Arabidopsis thaliana
ccgacctgcaccaagcg

SEQ ID NO: 72970 - DNA, 17 bp, Arabidopsis thaliana
ccgacctggactgcccg

SEQ ID NO: 72971 - DNA, 17 bp, Arabidopsis thaliana
ccgacctgtactttcgg

SEQ ID NO: 72972 - DNA, 17 bp, Arabidopsis thaliana
ccgaccttaactcagtc

SEQ ID NO: 72973 - DNA, 17 bp, Arabidopsis thaliana
ccgaccttaactcagtt

SEQ ID NO: 72974 - DNA, 17 bp, Arabidopsis thaliana
ccgaccttaactccgtt

SEQ ID NO: 72975 - DNA, 17 bp, Arabidopsis thaliana
ccgaccttacccagttg

SEQ ID NO: 72976 - DNA, 17 bp, Arabidopsis thaliana
ccgaccttacctcagtt

SEQ ID NO: 72977 - DNA, 17 bp, Arabidopsis thaliana
ccgaccttagcacaatc

SEQ ID NO: 72978 - DNA, 17 bp, Arabidopsis thaliana
ccgaccttagcccagtt

SEQ ID NO: 72979 - DNA, 17 bp, Arabidopsis thaliana
ccgaccttagcgctgga

SEQ ID NO: 72980 - DNA, 17 bp, Arabidopsis thaliana
ccgaccttagctcaatt

SEQ ID NO: 72981 - DNA, 17 bp, Arabidopsis thaliana
ccgaccttagctcactc

SEQ ID NO: 72982 - DNA, 17 bp, Arabidopsis thaliana
ccgaccttagctcagag

SEQ ID NO: 72983 - DNA, 17 bp, Arabidopsis thaliana
ccgaccttagctcagat

SEQ ID NO: 72984 - DNA, 17 bp, Arabidopsis thaliana
ccgaccttagctcaggt

SEQ ID NO: 72985 - DNA, 17 bp, Arabidopsis thaliana
ccgaccttagctcagtc

SEQ ID NO: 72986 - DNA, 17 bp, Arabidopsis thaliana
ccgaccttagctcagtg

SEQ ID NO: 72987 - DNA, 17 bp, Arabidopsis thaliana
ccgaccttagctcagtt

SEQ ID NO: 72988 - DNA, 17 bp, Arabidopsis thaliana
ccgaccttagctcattt

SEQ ID NO: 72989 - DNA, 17 bp, Arabidopsis thaliana
ccgaccttagctccgtc

SEQ ID NO: 72990 - DNA, 17 bp, Arabidopsis thaliana
ccgaccttagctcggtt

SEQ ID NO: 72991 - DNA, 17 bp, Arabidopsis thaliana
ccgaccttagcttagcg

SEQ ID NO: 72992 - DNA, 17 bp, Arabidopsis thaliana
ccgaccttagcttagtt

SEQ ID NO: 72993 - DNA, 17 bp, Arabidopsis thaliana
ccgaccttatctcagtt

SEQ ID NO: 72994 - DNA, 17 bp, Arabidopsis thaliana
ccgaccttcgctcagtc

SEQ ID NO: 72995 - DNA, 17 bp, Arabidopsis thaliana
ccgaccttcgctcagtt

SEQ ID NO: 72996 - DNA, 17 bp, Arabidopsis thaliana
ccgaccttctcagtgta

SEQ ID NO: 72997 - DNA, 17 bp, Arabidopsis thaliana
ccgaccttctcagttgt

SEQ ID NO: 72998 - DNA, 17 bp, Arabidopsis thaliana
ccgaccttgatcttctg

SEQ ID NO: 72999 - DNA, 17 bp, Arabidopsis thaliana
ccgaccttgctcagttg

SEQ ID NO: 73000 - DNA, 17 bp, Arabidopsis thaliana
ccgaccttttatcaaat

SEQ ID NO: 73001 - DNA, 17 bp, Arabidopsis thaliana
ccgacgaaataagcagg

SEQ ID NO: 73002 - DNA, 17 bp, Arabidopsis thaliana
ccgacgaagcgtttgtg

SEQ ID NO: 73003 - DNA, 17 bp, Arabidopsis thaliana
ccgacgactctcggcaa

SEQ ID NO: 73004 - DNA, 17 bp, Arabidopsis thaliana
ccgacgagcagtcgcct

SEQ ID NO: 73005 - DNA, 17 bp, Arabidopsis thaliana
ccgacgaggattacggt

SEQ ID NO: 73006 - DNA, 17 bp, Arabidopsis thaliana
ccgacgatagctgctac

SEQ ID NO: 73007 - DNA, 17 bp, Arabidopsis thaliana
ccgacgatctctaagct

SEQ ID NO: 73008 - DNA, 17 bp, Arabidopsis thaliana
ccgacgcagatgtggca

SEQ ID NO: 73009 - DNA, 17 bp, Arabidopsis thaliana
ccgacgcagattacgct

SEQ ID NO: 73010 - DNA, 17 bp, Arabidopsis thaliana
ccgacgcagattacggt

SEQ ID NO: 73011 - DNA, 17 bp, Arabidopsis thaliana
ccgacgcaggtcgacgt

SEQ ID NO: 73012 - DNA, 17 bp, Arabidopsis thaliana
ccgacgcattacggtgg

SEQ ID NO: 73013 - DNA, 17 bp, Arabidopsis thaliana
ccgacgccgaccccccc

SEQ ID NO: 73014 - DNA, 17 bp, Arabidopsis thaliana
ccgacgccgacgccgag

SEQ ID NO: 73015 - DNA, 17 bp, Arabidopsis thaliana
ccgacgccgattacggt

SEQ ID NO: 73016 - DNA, 17 bp, Arabidopsis thaliana
ccgacgccggagaggtc

SEQ ID NO: 73017 - DNA, 17 bp, Arabidopsis thaliana
ccgacgccggcgctatg

SEQ ID NO: 73018 - DNA, 17 bp, Arabidopsis thaliana
ccgacgcgaattacggt

SEQ ID NO: 73019 - DNA, 17 bp, Arabidopsis thaliana
ccgacgcgacagtttat

SEQ ID NO: 73020 - DNA, 17 bp, Arabidopsis thaliana
ccgacgcgactgcgttt

SEQ ID NO: 73021 - DNA, 17 bp, Arabidopsis thaliana
ccgacgcgattacggtg

SEQ ID NO: 73022 - DNA, 17 bp, Arabidopsis thaliana
ccgacgcgcatcccggt

SEQ ID NO: 73023 - DNA, 17 bp, Arabidopsis thaliana
ccgacgcgcattacggt

SEQ ID NO: 73024 - DNA, 17 bp, Arabidopsis thaliana
ccgacgcgcattacgtg

SEQ ID NO: 73025 - DNA, 17 bp, Arabidopsis thaliana
ccgacgcgcattccggc

SEQ ID NO: 73026 - DNA, 17 bp, Arabidopsis thaliana
ccgacgcggacccaccc

SEQ ID NO: 73027 - DNA, 17 bp, Arabidopsis thaliana
ccgacgcggacggtggc

SEQ ID NO: 73028 - DNA, 17 bp, Arabidopsis thaliana
ccgacgcggactacgat

SEQ ID NO: 73029 - DNA, 17 bp, Arabidopsis thaliana
ccgacgcggactacggt

SEQ ID NO: 73030 - DNA, 17 bp, Arabidopsis thaliana
ccgacgcggagaacggg

SEQ ID NO: 73031 - DNA, 17 bp, Arabidopsis thaliana
ccgacgcggagtaaggt

SEQ ID NO: 73032 - DNA, 17 bp, Arabidopsis thaliana
ccgacgcggagtacggt

SEQ ID NO: 73033 - DNA, 17 bp, Arabidopsis thaliana
ccgacgcggataacgcc

SEQ ID NO: 73034 - DNA, 17 bp, Arabidopsis thaliana
ccgacgcggataacggc

SEQ ID NO: 73035 - DNA, 17 bp, Arabidopsis thaliana
ccgacgcggataacggt

SEQ ID NO: 73036 - DNA, 17 bp, Arabidopsis thaliana
ccgacgcggataatagg

SEQ ID NO: 73037 - DNA, 17 bp, Arabidopsis thaliana
ccgacgcggatattctg

SEQ ID NO: 73038 - DNA, 17 bp, Arabidopsis thaliana
ccgacgcggatcacgcc

SEQ ID NO: 73039 - DNA, 17 bp, Arabidopsis thaliana
ccgacgcggatcacgct

SEQ ID NO: 73040 - DNA, 17 bp, Arabidopsis thaliana
ccgacgcggatcacggt

SEQ ID NO: 73041 - DNA, 17 bp, Arabidopsis thaliana
ccgacgcggatcgttga

SEQ ID NO: 73042 - DNA, 17 bp, Arabidopsis thaliana
ccgacgcggatgactgt

SEQ ID NO: 73043 - DNA, 17 bp, Arabidopsis thaliana
ccgacgcggatgatgga

SEQ ID NO: 73044 - DNA, 17 bp, Arabidopsis thaliana
ccgacgcggatgtggca

SEQ ID NO: 73045 - DNA, 17 bp, Arabidopsis thaliana
ccgacgcggattacagt

SEQ ID NO: 73046 - DNA, 17 bp, Arabidopsis thaliana
ccgacgcggattaccgt

SEQ ID NO: 73047 - DNA, 17 bp, Arabidopsis thaliana
ccgacgcggattacctg

SEQ ID NO: 73048 - DNA, 17 bp, Arabidopsis thaliana
ccgacgcggattacgat

SEQ ID NO: 73049 - DNA, 17 bp, Arabidopsis thaliana
ccgacgcggattacgct

SEQ ID NO: 73050 - DNA, 17 bp, Arabidopsis thaliana
ccgacgcggattacgga

SEQ ID NO: 73051 - DNA, 17 bp, Arabidopsis thaliana
ccgacgcggattacggc

SEQ ID NO: 73052 - DNA, 17 bp, Arabidopsis thaliana
ccgacgcggattacggg

SEQ ID NO: 73053 - DNA, 17 bp, Arabidopsis thaliana
ccgacgcggattacggt

SEQ ID NO: 73054 - DNA, 17 bp, Arabidopsis thaliana
ccgacgcggattacgtg

SEQ ID NO: 73055 - DNA, 17 bp, Arabidopsis thaliana
ccgacgcggattacgtt

SEQ ID NO: 73056 - DNA, 17 bp, Arabidopsis thaliana
ccgacgcggattactgg

SEQ ID NO: 73057 - DNA, 17 bp, Arabidopsis thaliana
ccgacgcggattactgt

SEQ ID NO: 73058 - DNA, 17 bp, Arabidopsis thaliana
ccgacgcggattagggt

SEQ ID NO: 73059 - DNA, 17 bp, Arabidopsis thaliana
ccgacgcggattaggtg

SEQ ID NO: 73060 - DNA, 17 bp, Arabidopsis thaliana
ccgacgcggattatggt

SEQ ID NO: 73061 - DNA, 17 bp, Arabidopsis thaliana
ccgacgcggattgcggt

SEQ ID NO: 73062 - DNA, 17 bp, Arabidopsis thaliana
ccgacgcggatttggtg

SEQ ID NO: 73063 - DNA, 17 bp, Arabidopsis thaliana
ccgacgcgggttacggt

SEQ ID NO: 73064 - DNA, 17 bp, Arabidopsis thaliana
ccgacgcggtgtagggt

SEQ ID NO: 73065 - DNA, 17 bp, Arabidopsis thaliana
ccgacgcggtttacggt

SEQ ID NO: 73066 - DNA, 17 bp, Arabidopsis thaliana
ccgacgcgtattacggt

SEQ ID NO: 73067 - DNA, 17 bp, Arabidopsis thaliana
ccgacgcgtattactgt

SEQ ID NO: 73068 - DNA, 17 bp, Arabidopsis thaliana
ccgacgctctgcctggg

SEQ ID NO: 73069 - DNA, 17 bp, Arabidopsis thaliana
ccgacgctgattacgat

SEQ ID NO: 73070 - DNA, 17 bp, Arabidopsis thaliana
ccgacgctgattacggt

SEQ ID NO: 73071 - DNA, 17 bp, Arabidopsis thaliana
ccgacgcttcagtgacc

SEQ ID NO: 73072 - DNA, 17 bp, Arabidopsis thaliana
ccgacggcacgtctgcc

SEQ ID NO: 73073 - DNA, 17 bp, Arabidopsis thaliana
ccgacggcgaagatggg

SEQ ID NO: 73074 - DNA, 17 bp, Arabidopsis thaliana
ccgacgggccgatggac

SEQ ID NO: 73075 - DNA, 17 bp, Arabidopsis thaliana
ccgacggggattacggt

SEQ ID NO: 73076 - DNA, 17 bp, Arabidopsis thaliana
ccgacgggtctgttttc

SEQ ID NO: 73077 - DNA, 17 bp, Arabidopsis thaliana
ccgacgggtttggcagg

SEQ ID NO: 73078 - DNA, 17 bp, Arabidopsis thaliana
ccgacggtgtacgtgac

SEQ ID NO: 73079 - DNA, 17 bp, Arabidopsis thaliana
ccgacggttttgatacg

SEQ ID NO: 73080 - DNA, 17 bp, Arabidopsis thaliana
ccgacgtcggcagggga

SEQ ID NO: 73081 - DNA, 17 bp, Arabidopsis thaliana
ccgacgtctccggactc

SEQ ID NO: 73082 - DNA, 17 bp, Arabidopsis thaliana
ccgacgtggattacggt

SEQ ID NO: 73083 - DNA, 17 bp, Arabidopsis thaliana
ccgactaataaggtccc

SEQ ID NO: 73084 - DNA, 17 bp, Arabidopsis thaliana
ccgactaatactcagac

SEQ ID NO: 73085 - DNA, 17 bp, Arabidopsis thaliana
ccgactaatgccagagg

SEQ ID NO: 73086 - DNA, 17 bp, Arabidopsis thaliana
ccgactaatgccagggg

SEQ ID NO: 73087 - DNA, 17 bp, Arabidopsis thaliana
ccgactaatgtcaaagg

SEQ ID NO: 73088 - DNA, 17 bp, Arabidopsis thaliana
ccgactaatgtcaaagt

SEQ ID NO: 73089 - DNA, 17 bp, Arabidopsis thaliana
ccgactaatgtcagagg

SEQ ID NO: 73090 - DNA, 17 bp, Arabidopsis thaliana
ccgactactcagatggg

SEQ ID NO: 73091 - DNA, 17 bp, Arabidopsis thaliana
ccgactaggatgggtga

SEQ ID NO: 73092 - DNA, 17 bp, Arabidopsis thaliana
ccgactaggtgtagtca

SEQ ID NO: 73093 - DNA, 17 bp, Arabidopsis thaliana
ccgactatgttccaacc

SEQ ID NO: 73094 - DNA, 17 bp, Arabidopsis thaliana
ccgactatttcctgcgt

SEQ ID NO: 73095 - DNA, 17 bp, Arabidopsis thaliana
ccgactattttcatgac

SEQ ID NO: 73096 - DNA, 17 bp, Arabidopsis thaliana
ccgactcaaatattggc

SEQ ID NO: 73097 - DNA, 17 bp, Arabidopsis thaliana
ccgactcggactaagtc

SEQ ID NO: 73098 - DNA, 17 bp, Arabidopsis thaliana
ccgactcggattacggt

SEQ ID NO: 73099 - DNA, 17 bp, Arabidopsis thaliana
ccgactcgtcaggctct

SEQ ID NO: 73100 - DNA, 17 bp, Arabidopsis thaliana
ccgactctcggcaacgg

SEQ ID NO: 73101 - DNA, 17 bp, Arabidopsis thaliana
ccgactgaccctgttaa

SEQ ID NO: 73102 - DNA, 17 bp, Arabidopsis thaliana
ccgactgacctaaacat

SEQ ID NO: 73103 - DNA, 17 bp, Arabidopsis thaliana
ccgactgcatttctaac

SEQ ID NO: 73104 - DNA, 17 bp, Arabidopsis thaliana
ccgactgcctcttccct

SEQ ID NO: 73105 - DNA, 17 bp, Arabidopsis thaliana
ccgactgcttagatctt

SEQ ID NO: 73106 - DNA, 17 bp, Arabidopsis thaliana
ccgactggttaatctgc

SEQ ID NO: 73107 - DNA, 17 bp, Arabidopsis thaliana
ccgactgtccctgttaa

SEQ ID NO: 73108 - DNA, 17 bp, Arabidopsis thaliana
ccgactgtccggccgcc

SEQ ID NO: 73109 - DNA, 17 bp, Arabidopsis thaliana
ccgactgtctgtatttc

SEQ ID NO: 73110 - DNA, 17 bp, Arabidopsis thaliana
ccgacttaactgccact

SEQ ID NO: 73111 - DNA, 17 bp, Arabidopsis thaliana
ccgacttaagctcagtt

SEQ ID NO: 73112 - DNA, 17 bp, Arabidopsis thaliana
ccgacttaagttcagtt

SEQ ID NO: 73113 - DNA, 17 bp, Arabidopsis thaliana
ccgacttagggataaat

SEQ ID NO: 73114 - DNA, 17 bp, Arabidopsis thaliana
ccgacttagtttccttg

SEQ ID NO: 73115 - DNA, 17 bp, Arabidopsis thaliana
ccgacttatagagatcc

SEQ ID NO: 73116 - DNA, 17 bp, Arabidopsis thaliana
ccgacttatcacgttgt

SEQ ID NO: 73117 - DNA, 17 bp, Arabidopsis thaliana
ccgacttatccggattg

SEQ ID NO: 73118 - DNA, 17 bp, Arabidopsis thaliana
ccgacttatggaaggaa

SEQ ID NO: 73119 - DNA, 17 bp, Arabidopsis thaliana
ccgacttatggaaggga

SEQ ID NO: 73120 - DNA, 17 bp, Arabidopsis thaliana
ccgacttatgtaaggaa

SEQ ID NO: 73121 - DNA, 17 bp, Arabidopsis thaliana
ccgacttcaggtgtcct

SEQ ID NO: 73122 - DNA, 17 bp, Arabidopsis thaliana
ccgacttcccctggggg

SEQ ID NO: 73123 - DNA, 17 bp, Arabidopsis thaliana
ccgacttctggctcatt

SEQ ID NO: 73124 - DNA, 17 bp, Arabidopsis thaliana
ccgacttctttctagta

SEQ ID NO: 73125 - DNA, 17 bp, Arabidopsis thaliana
ccgacttgaaccgtccg

SEQ ID NO: 73126 - DNA, 17 bp, Arabidopsis thaliana
ccgacttggaaccggta

SEQ ID NO: 73127 - DNA, 17 bp, Arabidopsis thaliana
ccgacttggaagggacg

SEQ ID NO: 73128 - DNA, 17 bp, Arabidopsis thaliana
ccgacttggctcgagtg

SEQ ID NO: 73129 - DNA, 17 bp, Arabidopsis thaliana
ccgacttgtactttcgg

SEQ ID NO: 73130 - DNA, 17 bp, Arabidopsis thaliana
ccgacttgtatcgatga

SEQ ID NO: 73131 - DNA, 17 bp, Arabidopsis thaliana
ccgacttgtcattgctt

SEQ ID NO: 73132 - DNA, 17 bp, Arabidopsis thaliana
ccgacttgttgacagtt

SEQ ID NO: 73133 - DNA, 17 bp, Arabidopsis thaliana
ccgactttagctcagtt

SEQ ID NO: 73134 - DNA, 17 bp, Arabidopsis thaliana
ccgactttctcatgcga

SEQ ID NO: 73135 - DNA, 17 bp, Arabidopsis thaliana
ccgactttgactccgga

SEQ ID NO: 73136 - DNA, 17 bp, Arabidopsis thaliana
ccgactttgtgaaataa

SEQ ID NO: 73137 - DNA, 17 bp, Arabidopsis thaliana
ccgactttgtgaaatga

SEQ ID NO: 73138 - DNA, 17 bp, Arabidopsis thaliana
ccgacttttcttcttca

SEQ ID NO: 73139 - DNA, 17 bp, Arabidopsis thaliana
ccgagaaatttaccact

SEQ ID NO: 73140 - DNA, 17 bp, Arabidopsis thaliana
ccgagaacgggctaagt

SEQ ID NO: 73141 - DNA, 17 bp, Arabidopsis thaliana
ccgagaagattatgggc

SEQ ID NO: 73142 - DNA, 17 bp, Arabidopsis thaliana
ccgagaagtccactaaa

SEQ ID NO: 73143 - DNA, 17 bp, Arabidopsis thaliana
ccgagaatcttgtttgc

SEQ ID NO: 73144 - DNA, 17 bp, Arabidopsis thaliana
ccgagacaagttatggg

SEQ ID NO: 73145 - DNA, 17 bp, Arabidopsis thaliana
ccgagacacaatcagcc

SEQ ID NO: 73146 - DNA, 17 bp, Arabidopsis thaliana
ccgagacagagccgctt

SEQ ID NO: 73147 - DNA, 17 bp, Arabidopsis thaliana
ccgagacatcatcgacc

SEQ ID NO: 73148 - DNA, 17 bp, Arabidopsis thaliana
ccgagaccccgttagta

SEQ ID NO: 73149 - DNA, 17 bp, Arabidopsis thaliana
ccgagacccgtacatcg

SEQ ID NO: 73150 - DNA, 17 bp, Arabidopsis thaliana
ccgagaccttgtgcttc

SEQ ID NO: 73151 - DNA, 17 bp, Arabidopsis thaliana
ccgagacgaaaccatat

SEQ ID NO: 73152 - DNA, 17 bp, Arabidopsis thaliana
ccgagacgtagcggtta

SEQ ID NO: 73153 - DNA, 17 bp, Arabidopsis thaliana
ccgagacgtagcgtgag

SEQ ID NO: 73154 - DNA, 17 bp, Arabidopsis thaliana
ccgagacgtagcgtttg

SEQ ID NO: 73155 - DNA, 17 bp, Arabidopsis thaliana
ccgagacgtcggcgggg

SEQ ID NO: 73156 - DNA, 17 bp, Arabidopsis thaliana
ccgagactacccgtagg

SEQ ID NO: 73157 - DNA, 17 bp, Arabidopsis thaliana
ccgagactacccgtggg

SEQ ID NO: 73158 - DNA, 17 bp, Arabidopsis thaliana
ccgagactacctgtggg

SEQ ID NO: 73159 - DNA, 17 bp, Arabidopsis thaliana
ccgagactcaatcagcc

SEQ ID NO: 73160 - DNA, 17 bp, Arabidopsis thaliana
ccgagactcggtatttg

SEQ ID NO: 73161 - DNA, 17 bp, Arabidopsis thaliana
ccgagactgaccggatc

SEQ ID NO: 73162 - DNA, 17 bp, Arabidopsis thaliana
ccgagacttcatcgacc

SEQ ID NO: 73163 - DNA, 17 bp, Arabidopsis thaliana
ccgagagacccaggttc

SEQ ID NO: 73164 - DNA, 17 bp, Arabidopsis thaliana
ccgagagacccgggtac

SEQ ID NO: 73165 - DNA, 17 bp, Arabidopsis thaliana
ccgagagacccgggtcc

SEQ ID NO: 73166 - DNA, 17 bp, Arabidopsis thaliana
ccgagagacccgggttc

SEQ ID NO: 73167 - DNA, 17 bp, Arabidopsis thaliana
ccgagagacctgtggat

SEQ ID NO: 73168 - DNA, 17 bp, Arabidopsis thaliana
ccgagagacttgattag

SEQ ID NO: 73169 - DNA, 17 bp, Arabidopsis thaliana
ccgagagagccgttccc

SEQ ID NO: 73170 - DNA, 17 bp, Arabidopsis thaliana
ccgagagcacgtctgcc

SEQ ID NO: 73171 - DNA, 17 bp, Arabidopsis thaliana
ccgagaggatgatcagc

SEQ ID NO: 73172 - DNA, 17 bp, Arabidopsis thaliana
ccgagaggcgtgaccca

SEQ ID NO: 73173 - DNA, 17 bp, Arabidopsis thaliana
ccgagagtccgatccac

SEQ ID NO: 73174 - DNA, 17 bp, Arabidopsis thaliana
ccgagataatggcctac

SEQ ID NO: 73175 - DNA, 17 bp, Arabidopsis thaliana
ccgagataggatgtggg

SEQ ID NO: 73176 - DNA, 17 bp, Arabidopsis thaliana
ccgagatgagtgatggg

SEQ ID NO: 73177 - DNA, 17 bp, Arabidopsis thaliana
ccgagatggacctgtta

SEQ ID NO: 73178 - DNA, 17 bp, Arabidopsis thaliana
ccgagattttcactgtc

SEQ ID NO: 73179 - DNA, 17 bp, Arabidopsis thaliana
ccgagattttggtgttg

SEQ ID NO: 73180 - DNA, 17 bp, Arabidopsis thaliana
ccgagcaacgggaactg

SEQ ID NO: 73181 - DNA, 17 bp, Arabidopsis thaliana
ccgagcacgtctgcctg

SEQ ID NO: 73182 - DNA, 17 bp, Arabidopsis thaliana
ccgagcagatgacctct

SEQ ID NO: 73183 - DNA, 17 bp, Arabidopsis thaliana
ccgagccatcagtgaga

SEQ ID NO: 73184 - DNA, 17 bp, Arabidopsis thaliana
ccgagcgcacgtctgcc

SEQ ID NO: 73185 - DNA, 17 bp, Arabidopsis thaliana
ccgagcggattacggtg

SEQ ID NO: 73186 - DNA, 17 bp, Arabidopsis thaliana
ccgagcggcgggtagaa

SEQ ID NO: 73187 - DNA, 17 bp, Arabidopsis thaliana
ccgagcttagctcagtt

SEQ ID NO: 73188 - DNA, 17 bp, Arabidopsis thaliana
ccgaggaatcgtcgacc

SEQ ID NO: 73189 - DNA, 17 bp, Arabidopsis thaliana
ccgaggacacgtctgcc

SEQ ID NO: 73190 - DNA, 17 bp, Arabidopsis thaliana
ccgaggactccgctggc

SEQ ID NO: 73191 - DNA, 17 bp, Arabidopsis thaliana
ccgaggactgtaccaga

SEQ ID NO: 73192 - DNA, 17 bp, Arabidopsis thaliana
ccgaggacttgatgaac

SEQ ID NO: 73193 - DNA, 17 bp, Arabidopsis thaliana
ccgaggaggggctcgcg

SEQ ID NO: 73194 - DNA, 17 bp, Arabidopsis thaliana
ccgaggatagactttgt

SEQ ID NO: 73195 - DNA, 17 bp, Arabidopsis thaliana
ccgaggatgggtgacct

SEQ ID NO: 73196 - DNA, 17 bp, Arabidopsis thaliana
ccgaggcacgtctgcct

SEQ ID NO: 73197 - DNA, 17 bp, Arabidopsis thaliana
ccgaggccacgtctgcc

SEQ ID NO: 73198 - DNA, 17 bp, Arabidopsis thaliana
ccgaggcgcgtctattg

SEQ ID NO: 73199 - DNA, 17 bp, Arabidopsis thaliana
ccgaggcggattacggt

SEQ ID NO: 73200 - DNA, 17 bp, Arabidopsis thaliana
ccgaggcggtttttgtt

SEQ ID NO: 73201 - DNA, 17 bp, Arabidopsis thaliana
ccgagggaacgtctgcc

SEQ ID NO: 73202 - DNA, 17 bp, Arabidopsis thaliana
ccgagggaccaccacac

SEQ ID NO: 73203 - DNA, 17 bp, Arabidopsis thaliana
ccgagggagtagtcgta

SEQ ID NO: 73204 - DNA, 17 bp, Arabidopsis thaliana
ccgagggcacgcctgcc

SEQ ID NO: 73205 - DNA, 17 bp, Arabidopsis thaliana
ccgagggcacgtatgcc

SEQ ID NO: 73206 - DNA, 17 bp, Arabidopsis thaliana
ccgagggcacgtccgcc

SEQ ID NO: 73207 - DNA, 17 bp, Arabidopsis thaliana
ccgagggcacgtctacc

SEQ ID NO: 73208 - DNA, 17 bp, Arabidopsis thaliana
ccgagggcacgtctcct

SEQ ID NO: 73209 - DNA, 17 bp, Arabidopsis thaliana
ccgagggcacgtctgac

SEQ ID NO: 73210 - DNA, 17 bp, Arabidopsis thaliana
ccgagggcacgtctgcc

SEQ ID NO: 73211 - DNA, 17 bp, Arabidopsis thaliana
ccgagggcacgtctgcg

SEQ ID NO: 73212 - DNA, 17 bp, Arabidopsis thaliana
ccgagggcacgtctgct

SEQ ID NO: 73213 - DNA, 17 bp, Arabidopsis thaliana
ccgagggcacgtctggg

SEQ ID NO: 73214 - DNA, 17 bp, Arabidopsis thaliana
ccgagggcacgtctgtc

SEQ ID NO: 73215 - DNA, 17 bp, Arabidopsis thaliana
ccgagggcacgttgcct

SEQ ID NO: 73216 - DNA, 17 bp, Arabidopsis thaliana
ccgagggcaggtctgcc

SEQ ID NO: 73217 - DNA, 17 bp, Arabidopsis thaliana
ccgagggcccgtctgcc

SEQ ID NO: 73218 - DNA, 17 bp, Arabidopsis thaliana
ccgagggctcgatttcc

SEQ ID NO: 73219 - DNA, 17 bp, Arabidopsis thaliana
ccgagggggacacaggt

SEQ ID NO: 73220 - DNA, 17 bp, Arabidopsis thaliana
ccgagggtacgtctgcc

SEQ ID NO: 73221 - DNA, 17 bp, Arabidopsis thaliana
ccgagggtacgtttgcc

SEQ ID NO: 73222 - DNA, 17 bp, Arabidopsis thaliana
ccgaggtagggtccatc

SEQ ID NO: 73223 - DNA, 17 bp, Arabidopsis thaliana
ccgaggtattggctatg

SEQ ID NO: 73224 - DNA, 17 bp, Arabidopsis thaliana
ccgaggtcacgtctgcc

SEQ ID NO: 73225 - DNA, 17 bp, Arabidopsis thaliana
ccgaggtcacgtcttca

SEQ ID NO: 73226 - DNA, 17 bp, Arabidopsis thaliana
ccgaggtgctcctacgg

SEQ ID NO: 73227 - DNA, 17 bp, Arabidopsis thaliana
ccgaggttaaacggttg

SEQ ID NO: 73228 - DNA, 17 bp, Arabidopsis thaliana
ccgaggttctttgctat

SEQ ID NO: 73229 - DNA, 17 bp, Arabidopsis thaliana
ccgagtacccgtcgcgt

SEQ ID NO: 73230 - DNA, 17 bp, Arabidopsis thaliana
ccgagtagtcattctga

SEQ ID NO: 73231 - DNA, 17 bp, Arabidopsis thaliana
ccgagtatggccccgga

SEQ ID NO: 73232 - DNA, 17 bp, Arabidopsis thaliana
ccgagtcactcgggacg

SEQ ID NO: 73233 - DNA, 17 bp, Arabidopsis thaliana
ccgagtcattcggaacg

SEQ ID NO: 73234 - DNA, 17 bp, Arabidopsis thaliana
ccgagtcctcgtgttgc

SEQ ID NO: 73235 - DNA, 17 bp, Arabidopsis thaliana
ccgagtcgtatcagttt

SEQ ID NO: 73236 - DNA, 17 bp, Arabidopsis thaliana
ccgagtgatggttgagg

SEQ ID NO: 73237 - DNA, 17 bp, Arabidopsis thaliana
ccgagtgatggttgggg

SEQ ID NO: 73238 - DNA, 17 bp, Arabidopsis thaliana
ccgagtgcacgtctgcc

SEQ ID NO: 73239 - DNA, 17 bp, Arabidopsis thaliana
ccgagtgccgctcacgc

SEQ ID NO: 73240 - DNA, 17 bp, Arabidopsis thaliana
ccgagtgcttaggcgac

SEQ ID NO: 73241 - DNA, 17 bp, Arabidopsis thaliana
ccgagtggtaaggcggg

SEQ ID NO: 73242 - DNA, 17 bp, Arabidopsis thaliana
ccgagtggttaaggcgt

SEQ ID NO: 73243 - DNA, 17 bp, Arabidopsis thaliana
ccgagtggtttattctt

SEQ ID NO: 73244 - DNA, 17 bp, Arabidopsis thaliana
ccgagtgtctacacgat

SEQ ID NO: 73245 - DNA, 17 bp, Arabidopsis thaliana
ccgagtgttaggtccaa

SEQ ID NO: 73246 - DNA, 17 bp, Arabidopsis thaliana
ccgagttaacgactgtt

SEQ ID NO: 73247 - DNA, 17 bp, Arabidopsis thaliana
ccgagttcagttctcgg

SEQ ID NO: 73248 - DNA, 17 bp, Arabidopsis thaliana
ccgagttcatttctcgg

SEQ ID NO: 73249 - DNA, 17 bp, Arabidopsis thaliana
ccgagttcgtttcccgg

SEQ ID NO: 73250 - DNA, 17 bp, Arabidopsis thaliana
ccgagttgaaccttggg

SEQ ID NO: 73251 - DNA, 17 bp, Arabidopsis thaliana
ccgagttgaccttggct

SEQ ID NO: 73252 - DNA, 17 bp, Arabidopsis thaliana
ccgagtttagcggtaga

SEQ ID NO: 73253 - DNA, 17 bp, Arabidopsis thaliana
ccgagtttggccactat

SEQ ID NO: 73254 - DNA, 17 bp, Arabidopsis thaliana
ccgagttttctcagcag

SEQ ID NO: 73255 - DNA, 17 bp, Arabidopsis thaliana
ccgataaacctccgcct

SEQ ID NO: 73256 - DNA, 17 bp, Arabidopsis thaliana
ccgataagaagccgacc

SEQ ID NO: 73257 - DNA, 17 bp, Arabidopsis thaliana
ccgataagatagaagat

SEQ ID NO: 73258 - DNA, 17 bp, Arabidopsis thaliana
ccgatacacggatcgcc

SEQ ID NO: 73259 - DNA, 17 bp, Arabidopsis thaliana
ccgataccatccctcga

SEQ ID NO: 73260 - DNA, 17 bp, Arabidopsis thaliana
ccgatagaagatgatcc

SEQ ID NO: 73261 - DNA, 17 bp, Arabidopsis thaliana
ccgatagaaggagtgaa

SEQ ID NO: 73262 - DNA, 17 bp, Arabidopsis thaliana
ccgatagattcggggcg

SEQ ID NO: 73263 - DNA, 17 bp, Arabidopsis thaliana
ccgatagcggaggcaga

SEQ ID NO: 73264 - DNA, 17 bp, Arabidopsis thaliana
ccgatcaaaccacttca

SEQ ID NO: 73265 - DNA, 17 bp, Arabidopsis thaliana
ccgatcaagccgaaatc

SEQ ID NO: 73266 - DNA, 17 bp, Arabidopsis thaliana
ccgatcaattcggggcg

SEQ ID NO: 73267 - DNA, 17 bp, Arabidopsis thaliana
ccgatcacaaggcgata

SEQ ID NO: 73268 - DNA, 17 bp, Arabidopsis thaliana
ccgatcagcacgagtcc

SEQ ID NO: 73269 - DNA, 17 bp, Arabidopsis thaliana
ccgatcaggcttcattc

SEQ ID NO: 73270 - DNA, 17 bp, Arabidopsis thaliana
ccgatcatagcccaagt

SEQ ID NO: 73271 - DNA, 17 bp, Arabidopsis thaliana
ccgatcatcccggtgag

SEQ ID NO: 73272 - DNA, 17 bp, Arabidopsis thaliana
ccgatccatccaaggca

SEQ ID NO: 73273 - DNA, 17 bp, Arabidopsis thaliana
ccgatcccatcccgaac

SEQ ID NO: 73274 - DNA, 17 bp, Arabidopsis thaliana
ccgatccgcagtttcct

SEQ ID NO: 73275 - DNA, 17 bp, Arabidopsis thaliana
ccgatccgtaggcttag

SEQ ID NO: 73276 - DNA, 17 bp, Arabidopsis thaliana
ccgatcgactgactcca

SEQ ID NO: 73277 - DNA, 17 bp, Arabidopsis thaliana
ccgatcgagcgtgtgga

SEQ ID NO: 73278 - DNA, 17 bp, Arabidopsis thaliana
ccgatcgatagacttga

SEQ ID NO: 73279 - DNA, 17 bp, Arabidopsis thaliana
ccgatcgattcggggcg

SEQ ID NO: 73280 - DNA, 17 bp, Arabidopsis thaliana
ccgatcgcagcgactgt

SEQ ID NO: 73281 - DNA, 17 bp, Arabidopsis thaliana
ccgatcgcggcgacgtg

SEQ ID NO: 73282 - DNA, 17 bp, Arabidopsis thaliana
ccgatctacagcagagg

SEQ ID NO: 73283 - DNA, 17 bp, Arabidopsis thaliana
ccgatctcatatcaacc

SEQ ID NO: 73284 - DNA, 17 bp, Arabidopsis thaliana
ccgatctcatatgaacc

SEQ ID NO: 73285 - DNA, 17 bp, Arabidopsis thaliana
ccgatctcatctgaacc

SEQ ID NO: 73286 - DNA, 17 bp, Arabidopsis thaliana
ccgatctcattgggccg

SEQ ID NO: 73287 - DNA, 17 bp, Arabidopsis thaliana
ccgatctctgatccgtt

SEQ ID NO: 73288 - DNA, 17 bp, Arabidopsis thaliana
ccgatcttagctcagtt

SEQ ID NO: 73289 - DNA, 17 bp, Arabidopsis thaliana
ccgatcttcagaccagc

SEQ ID NO: 73290 - DNA, 17 bp, Arabidopsis thaliana
ccgatcttccaagtgat

SEQ ID NO: 73291 - DNA, 17 bp, Arabidopsis thaliana
ccgatctttgacctctg

SEQ ID NO: 73292 - DNA, 17 bp, Arabidopsis thaliana
ccgatgaacgtgtatta

SEQ ID NO: 73293 - DNA, 17 bp, Arabidopsis thaliana
ccgatgaaggctttgac

SEQ ID NO: 73294 - DNA, 17 bp, Arabidopsis thaliana
ccgatgacctctaagct

SEQ ID NO: 73295 - DNA, 17 bp, Arabidopsis thaliana
ccgatgacctttaagct

SEQ ID NO: 73296 - DNA, 17 bp, Arabidopsis thaliana
ccgatgacgcctcttag

SEQ ID NO: 73297 - DNA, 17 bp, Arabidopsis thaliana
ccgatgagtacacagag

SEQ ID NO: 73298 - DNA, 17 bp, Arabidopsis thaliana
ccgatgataccggtccg

SEQ ID NO: 73299 - DNA, 17 bp, Arabidopsis thaliana
ccgatgatctgtcggct

SEQ ID NO: 73300 - DNA, 17 bp, Arabidopsis thaliana
ccgatgatgatcttttt

SEQ ID NO: 73301 - DNA, 17 bp, Arabidopsis thaliana
ccgatgatgtagacact

SEQ ID NO: 73302 - DNA, 17 bp, Arabidopsis thaliana
ccgatgcattgaaagtg

SEQ ID NO: 73303 - DNA, 17 bp, Arabidopsis thaliana
ccgatgcgtcctggtcg

SEQ ID NO: 73304 - DNA, 17 bp, Arabidopsis thaliana
ccgatggagatggtctt

SEQ ID NO: 73305 - DNA, 17 bp, Arabidopsis thaliana
ccgatggatggaatgac

SEQ ID NO: 73306 - DNA, 17 bp, Arabidopsis thaliana
ccgatggcacgtctgcc

SEQ ID NO: 73307 - DNA, 17 bp, Arabidopsis thaliana
ccgatggcgaagacgcg

SEQ ID NO: 73308 - DNA, 17 bp, Arabidopsis thaliana
ccgatggtacttggacc

SEQ ID NO: 73309 - DNA, 17 bp, Arabidopsis thaliana
ccgatgtcgcccagcgg

SEQ ID NO: 73310 - DNA, 17 bp, Arabidopsis thaliana
ccgatgtcgtccagcag

SEQ ID NO: 73311 - DNA, 17 bp, Arabidopsis thaliana
ccgatgtcgtccagcct

SEQ ID NO: 73312 - DNA, 17 bp, Arabidopsis thaliana
ccgatgtcgtccagcga

SEQ ID NO: 73313 - DNA, 17 bp, Arabidopsis thaliana
ccgatgtcgtccagcgg

SEQ ID NO: 73314 - DNA, 17 bp, Arabidopsis thaliana
ccgatgtcgtccagcgt

SEQ ID NO: 73315 - DNA, 17 bp, Arabidopsis thaliana
ccgatgtcttcggttgc

SEQ ID NO: 73316 - DNA, 17 bp, Arabidopsis thaliana
ccgatgtgcgacctttg

SEQ ID NO: 73317 - DNA, 17 bp, Arabidopsis thaliana
ccgatgtgctctatctg

SEQ ID NO: 73318 - DNA, 17 bp, Arabidopsis thaliana
ccgatgtgtgacctttg

SEQ ID NO: 73319 - DNA, 17 bp, Arabidopsis thaliana
ccgatgttttgcaagaa

SEQ ID NO: 73320 - DNA, 17 bp, Arabidopsis thaliana
ccgattaggcgttctag

SEQ ID NO: 73321 - DNA, 17 bp, Arabidopsis thaliana
ccgattaggtacttgaa

SEQ ID NO: 73322 - DNA, 17 bp, Arabidopsis thaliana
ccgattagttgtggaca

SEQ ID NO: 73323 - DNA, 17 bp, Arabidopsis thaliana
ccgattatcaactggtg

SEQ ID NO: 73324 - DNA, 17 bp, Arabidopsis thaliana
ccgattccgatcgcttg

SEQ ID NO: 73325 - DNA, 17 bp, Arabidopsis thaliana
ccgattccggcaggtcg

SEQ ID NO: 73326 - DNA, 17 bp, Arabidopsis thaliana
ccgattcgagtgacgct

SEQ ID NO: 73327 - DNA, 17 bp, Arabidopsis thaliana
ccgattcgatccagttc

SEQ ID NO: 73328 - DNA, 17 bp, Arabidopsis thaliana
ccgattcgcaggtttca

SEQ ID NO: 73329 - DNA, 17 bp, Arabidopsis thaliana
ccgattcggattctgcg

SEQ ID NO: 73330 - DNA, 17 bp, Arabidopsis thaliana
ccgattcggggcgtgga

SEQ ID NO: 73331 - DNA, 17 bp, Arabidopsis thaliana
ccgattcggggcgtggg

SEQ ID NO: 73332 - DNA, 17 bp, Arabidopsis thaliana
ccgattcgtaatgtgtc

SEQ ID NO: 73333 - DNA, 17 bp, Arabidopsis thaliana
ccgattcgttaatggcg

SEQ ID NO: 73334 - DNA, 17 bp, Arabidopsis thaliana
ccgattctacctttggt

SEQ ID NO: 73335 - DNA, 17 bp, Arabidopsis thaliana
ccgattctgatcgcttg

SEQ ID NO: 73336 - DNA, 17 bp, Arabidopsis thaliana
ccgattcttacgcctgg

SEQ ID NO: 73337 - DNA, 17 bp, Arabidopsis thaliana
ccgattgaaccatcact

SEQ ID NO: 73338 - DNA, 17 bp, Arabidopsis thaliana
ccgattgaaggatccgg

SEQ ID NO: 73339 - DNA, 17 bp, Arabidopsis thaliana
ccgattgaatgatccgg

SEQ ID NO: 73340 - DNA, 17 bp, Arabidopsis thaliana
ccgattgacagactgag

SEQ ID NO: 73341 - DNA, 17 bp, Arabidopsis thaliana
ccgattgactggaaaca

SEQ ID NO: 73342 - DNA, 17 bp, Arabidopsis thaliana
ccgattgagctgcccga

SEQ ID NO: 73343 - DNA, 17 bp, Arabidopsis thaliana
ccgattgcccgcggtaa

SEQ ID NO: 73344 - DNA, 17 bp, Arabidopsis thaliana
ccgattgccgaacctca

SEQ ID NO: 73345 - DNA, 17 bp, Arabidopsis thaliana
ccgattgccgacccccc

SEQ ID NO: 73346 - DNA, 17 bp, Arabidopsis thaliana
ccgattgccgacccgcc

SEQ ID NO: 73347 - DNA, 17 bp, Arabidopsis thaliana
ccgattgccgaccctca

SEQ ID NO: 73348 - DNA, 17 bp, Arabidopsis thaliana
ccgattgccgaccctcc

SEQ ID NO: 73349 - DNA, 17 bp, Arabidopsis thaliana
ccgattgccgaccttca

SEQ ID NO: 73350 - DNA, 17 bp, Arabidopsis thaliana
ccgattgcgataataac

SEQ ID NO: 73351 - DNA, 17 bp, Arabidopsis thaliana
ccgattggaccatcact

SEQ ID NO: 73352 - DNA, 17 bp, Arabidopsis thaliana
ccgattggatcgggggc

SEQ ID NO: 73353 - DNA, 17 bp, Arabidopsis thaliana
ccgattggccgaccttc

SEQ ID NO: 73354 - DNA, 17 bp, Arabidopsis thaliana
ccgattgggttagcggc

SEQ ID NO: 73355 - DNA, 17 bp, Arabidopsis thaliana
ccgattgttccgaaact

SEQ ID NO: 73356 - DNA, 17 bp, Arabidopsis thaliana
ccgattgttgaccctca

SEQ ID NO: 73357 - DNA, 17 bp, Arabidopsis thaliana
ccgatttccaacgaaac

SEQ ID NO: 73358 - DNA, 17 bp, Arabidopsis thaliana
ccgatttcccaaaccat

SEQ ID NO: 73359 - DNA, 17 bp, Arabidopsis thaliana
ccgatttcgagatcagg

SEQ ID NO: 73360 - DNA, 17 bp, Arabidopsis thaliana
ccgatttcgccggcgat

SEQ ID NO: 73361 - DNA, 17 bp, Arabidopsis thaliana
ccgatttgactatgaac

SEQ ID NO: 73362 - DNA, 17 bp, Arabidopsis thaliana
ccgatttgagtccgaga

SEQ ID NO: 73363 - DNA, 17 bp, Arabidopsis thaliana
ccgatttgccaaggatg

SEQ ID NO: 73364 - DNA, 17 bp, Arabidopsis thaliana
ccgatttggtttcggca

SEQ ID NO: 73365 - DNA, 17 bp, Arabidopsis thaliana
ccgatttgttattgggt

SEQ ID NO: 73366 - DNA, 17 bp, Arabidopsis thaliana
ccgattttcccagttcg

SEQ ID NO: 73367 - DNA, 17 bp, Arabidopsis thaliana
ccgattttttgcccagt

SEQ ID NO: 73368 - DNA, 17 bp, Arabidopsis thaliana
ccgcaaaacgcaatcac

SEQ ID NO: 73369 - DNA, 17 bp, Arabidopsis thaliana
ccgcaaactcccgcaac

SEQ ID NO: 73370 - DNA, 17 bp, Arabidopsis thaliana
ccgcaaaggaatggtca

SEQ ID NO: 73371 - DNA, 17 bp, Arabidopsis thaliana
ccgcaaaggtagaccac

SEQ ID NO: 73372 - DNA, 17 bp, Arabidopsis thaliana
ccgcaaaggttcagagg

SEQ ID NO: 73373 - DNA, 17 bp, Arabidopsis thaliana
ccgcaaagtgattcgcc

SEQ ID NO: 73374 - DNA, 17 bp, Arabidopsis thaliana
ccgcaaagtttcgttga

SEQ ID NO: 73375 - DNA, 17 bp, Arabidopsis thaliana
ccgcaacaaggcacctc

SEQ ID NO: 73376 - DNA, 17 bp, Arabidopsis thaliana
ccgcaacagtgctgtaa

SEQ ID NO: 73377 - DNA, 17 bp, Arabidopsis thaliana
ccgcaacataccgtacc

SEQ ID NO: 73378 - DNA, 17 bp, Arabidopsis thaliana
ccgcaacatcattgacg

SEQ ID NO: 73379 - DNA, 17 bp, Arabidopsis thaliana
ccgcaaccagatcttaa

SEQ ID NO: 73380 - DNA, 17 bp, Arabidopsis thaliana
ccgcaaccggatcttaa

SEQ ID NO: 73381 - DNA, 17 bp, Arabidopsis thaliana
ccgcaacgagcgcaacc

SEQ ID NO: 73382 - DNA, 17 bp, Arabidopsis thaliana
ccgcaacgggcttgtcc

SEQ ID NO: 73383 - DNA, 17 bp, Arabidopsis thaliana
ccgcaactctctccatt

SEQ ID NO: 73384 - DNA, 17 bp, Arabidopsis thaliana
ccgcaactgacagatca

SEQ ID NO: 73385 - DNA, 17 bp, Arabidopsis thaliana
ccgcaactggatcttaa

SEQ ID NO: 73386 - DNA, 17 bp, Arabidopsis thaliana
ccgcaagatcaccattg

SEQ ID NO: 73387 - DNA, 17 bp, Arabidopsis thaliana
ccgcaagattcgtctgc

SEQ ID NO: 73388 - DNA, 17 bp, Arabidopsis thaliana
ccgcaagcttgtggatg

SEQ ID NO: 73389 - DNA, 17 bp, Arabidopsis thaliana
ccgcaaggatttgttat

SEQ ID NO: 73390 - DNA, 17 bp, Arabidopsis thaliana
ccgcaaggatttgttga

SEQ ID NO: 73391 - DNA, 17 bp, Arabidopsis thaliana
ccgcaaggatttgttgt

SEQ ID NO: 73392 - DNA, 17 bp, Arabidopsis thaliana
ccgcaaggttcgtccac

SEQ ID NO: 73393 - DNA, 17 bp, Arabidopsis thaliana
ccgcaatcggatcttaa

SEQ ID NO: 73394 - DNA, 17 bp, Arabidopsis thaliana
ccgcaatgggcgaaagc

SEQ ID NO: 73395 - DNA, 17 bp, Arabidopsis thaliana
ccgcaattaagcgtgct

SEQ ID NO: 73396 - DNA, 17 bp, Arabidopsis thaliana
ccgcaattgtgtgaggt

SEQ ID NO: 73397 - DNA, 17 bp, Arabidopsis thaliana
ccgcacaatgcggttcg

SEQ ID NO: 73398 - DNA, 17 bp, Arabidopsis thaliana
ccgcacaattggactgg

SEQ ID NO: 73399 - DNA, 17 bp, Arabidopsis thaliana
ccgcacaccgcccgtcg

SEQ ID NO: 73400 - DNA, 17 bp, Arabidopsis thaliana
ccgcacactaagtggcc

SEQ ID NO: 73401 - DNA, 17 bp, Arabidopsis thaliana
ccgcacagattgcggtg

SEQ ID NO: 73402 - DNA, 17 bp, Arabidopsis thaliana
ccgcaccacgaggcgct

SEQ ID NO: 73403 - DNA, 17 bp, Arabidopsis thaliana
ccgcaccaggagtttgg

SEQ ID NO: 73404 - DNA, 17 bp, Arabidopsis thaliana
ccgcacccgctggttta

SEQ ID NO: 73405 - DNA, 17 bp, Arabidopsis thaliana
ccgcaccgcaagtagtt

SEQ ID NO: 73406 - DNA, 17 bp, Arabidopsis thaliana
ccgcacgaccatattcc

SEQ ID NO: 73407 - DNA, 17 bp, Arabidopsis thaliana
ccgcacgacgcggatta

SEQ ID NO: 73408 - DNA, 17 bp, Arabidopsis thaliana
ccgcacgattgccgacc

SEQ ID NO: 73409 - DNA, 17 bp, Arabidopsis thaliana
ccgcacgtcgcgtggtg

SEQ ID NO: 73410 - DNA, 17 bp, Arabidopsis thaliana
ccgcacgtcgcttggtg

SEQ ID NO: 73411 - DNA, 17 bp, Arabidopsis thaliana
ccgcacgtctgcctgag

SEQ ID NO: 73412 - DNA, 17 bp, Arabidopsis thaliana
ccgcacgtctgcctggg

SEQ ID NO: 73413 - DNA, 17 bp, Arabidopsis thaliana
ccgcactaatgcaccgg

SEQ ID NO: 73414 - DNA, 17 bp, Arabidopsis thaliana
ccgcactatgccgtccg

SEQ ID NO: 73415 - DNA, 17 bp, Arabidopsis thaliana
ccgcactcgaccacaac

SEQ ID NO: 73416 - DNA, 17 bp, Arabidopsis thaliana
ccgcactgctataaccg

SEQ ID NO: 73417 - DNA, 17 bp, Arabidopsis thaliana
ccgcactgctctatctg

SEQ ID NO: 73418 - DNA, 17 bp, Arabidopsis thaliana
ccgcactgctctttctg

SEQ ID NO: 73419 - DNA, 17 bp, Arabidopsis thaliana
ccgcactgtgcgattcg

SEQ ID NO: 73420 - DNA, 17 bp, Arabidopsis thaliana
ccgcacttttcaaatca

SEQ ID NO: 73421 - DNA, 17 bp, Arabidopsis thaliana
ccgcagaacggccacct

SEQ ID NO: 73422 - DNA, 17 bp, Arabidopsis thaliana
ccgcagaagaggcgatg

SEQ ID NO: 73423 - DNA, 17 bp, Arabidopsis thaliana
ccgcagaaggttgcgtg

SEQ ID NO: 73424 - DNA, 17 bp, Arabidopsis thaliana
ccgcagacatatcctcc

SEQ ID NO: 73425 - DNA, 17 bp, Arabidopsis thaliana
ccgcagacttcaggtgc

SEQ ID NO: 73426 - DNA, 17 bp, Arabidopsis thaliana
ccgcagagactgagact

SEQ ID NO: 73427 - DNA, 17 bp, Arabidopsis thaliana
ccgcagagactgagagg

SEQ ID NO: 73428 - DNA, 17 bp, Arabidopsis thaliana
ccgcagagtggccttgc

SEQ ID NO: 73429 - DNA, 17 bp, Arabidopsis thaliana
ccgcagatcctcagtgt

SEQ ID NO: 73430 - DNA, 17 bp, Arabidopsis thaliana
ccgcagatttttctaac

SEQ ID NO: 73431 - DNA, 17 bp, Arabidopsis thaliana
ccgcagccaaggatgac

SEQ ID NO: 73432 - DNA, 17 bp, Arabidopsis thaliana
ccgcagccctttgtcgc

SEQ ID NO: 73433 - DNA, 17 bp, Arabidopsis thaliana
ccgcagccgcaggtacc

SEQ ID NO: 73434 - DNA, 17 bp, Arabidopsis thaliana
ccgcagcgaaccgtttt

SEQ ID NO: 73435 - DNA, 17 bp, Arabidopsis thaliana
ccgcagcgactgtaatt

SEQ ID NO: 73436 - DNA, 17 bp, Arabidopsis thaliana
ccgcagcgatactgacg

SEQ ID NO: 73437 - DNA, 17 bp, Arabidopsis thaliana
ccgcagcgatactgcca

SEQ ID NO: 73438 - DNA, 17 bp, Arabidopsis thaliana
ccgcagcgatttattgt

SEQ ID NO: 73439 - DNA, 17 bp, Arabidopsis thaliana
ccgcagcgtaacgcgaa

SEQ ID NO: 73440 - DNA, 17 bp, Arabidopsis thaliana
ccgcagcttggactggg

SEQ ID NO: 73441 - DNA, 17 bp, Arabidopsis thaliana
ccgcaggattaggttgg

SEQ ID NO: 73442 - DNA, 17 bp, Arabidopsis thaliana
ccgcagggctgcctatg

SEQ ID NO: 73443 - DNA, 17 bp, Arabidopsis thaliana
ccgcaggtctctctttg

SEQ ID NO: 73444 - DNA, 17 bp, Arabidopsis thaliana
ccgcaggtggtgcatgg

SEQ ID NO: 73445 - DNA, 17 bp, Arabidopsis thaliana
ccgcagtaggtggacaa

SEQ ID NO: 73446 - DNA, 17 bp, Arabidopsis thaliana
ccgcagtcaacttaagg

SEQ ID NO: 73447 - DNA, 17 bp, Arabidopsis thaliana
ccgcagtctcacaacct

SEQ ID NO: 73448 - DNA, 17 bp, Arabidopsis thaliana
ccgcagtctcaccgttg

SEQ ID NO: 73449 - DNA, 17 bp, Arabidopsis thaliana
ccgcagtgactgtaatt

SEQ ID NO: 73450 - DNA, 17 bp, Arabidopsis thaliana
ccgcagtgggctgcgcc

SEQ ID NO: 73451 - DNA, 17 bp, Arabidopsis thaliana
ccgcagttaagcgtgct

SEQ ID NO: 73452 - DNA, 17 bp, Arabidopsis thaliana
ccgcagtttagcgtgct

SEQ ID NO: 73453 - DNA, 17 bp, Arabidopsis thaliana
ccgcagtttgcgagact

SEQ ID NO: 73454 - DNA, 17 bp, Arabidopsis thaliana
ccgcagtttgcgaggct

SEQ ID NO: 73455 - DNA, 17 bp, Arabidopsis thaliana
ccgcataactttgatct

SEQ ID NO: 73456 - DNA, 17 bp, Arabidopsis thaliana
ccgcataggggccaacg

SEQ ID NO: 73457 - DNA, 17 bp, Arabidopsis thaliana
ccgcatagtccagtgct

SEQ ID NO: 73458 - DNA, 17 bp, Arabidopsis thaliana
ccgcatcaggtctccaa

SEQ ID NO: 73459 - DNA, 17 bp, Arabidopsis thaliana
ccgcatcctgtagatgg

SEQ ID NO: 73460 - DNA, 17 bp, Arabidopsis thaliana
ccgcatcgaaagttgag

SEQ ID NO: 73461 - DNA, 17 bp, Arabidopsis thaliana
ccgcatctgaccgtttg

SEQ ID NO: 73462 - DNA, 17 bp, Arabidopsis thaliana
ccgcatctgatcgtttg

SEQ ID NO: 73463 - DNA, 17 bp, Arabidopsis thaliana
ccgcatgagagtgagac

SEQ ID NO: 73464 - DNA, 17 bp, Arabidopsis thaliana
ccgcatgcatttctgat

SEQ ID NO: 73465 - DNA, 17 bp, Arabidopsis thaliana
ccgcatgtaaagttgag

SEQ ID NO: 73466 - DNA, 17 bp, Arabidopsis thaliana
ccgcatgtagtggcttt

SEQ ID NO: 73467 - DNA, 17 bp, Arabidopsis thaliana
ccgcattatgggaaaag

SEQ ID NO: 73468 - DNA, 17 bp, Arabidopsis thaliana
ccgcattatttgatccg

SEQ ID NO: 73469 - DNA, 17 bp, Arabidopsis thaliana
ccgcatttagctggggg

SEQ ID NO: 73470 - DNA, 17 bp, Arabidopsis thaliana
ccgcatttgacactctg

SEQ ID NO: 73471 - DNA, 17 bp, Arabidopsis thaliana
ccgcattttcattggtg

SEQ ID NO: 73472 - DNA, 17 bp, Arabidopsis thaliana
ccgccaaaagactgtgc

SEQ ID NO: 73473 - DNA, 17 bp, Arabidopsis thaliana
ccgccaaacttttctcc

SEQ ID NO: 73474 - DNA, 17 bp, Arabidopsis thaliana
ccgccaaatctacttca

SEQ ID NO: 73475 - DNA, 17 bp, Arabidopsis thaliana
ccgccaaatctatcaga

SEQ ID NO: 73476 - DNA, 17 bp, Arabidopsis thaliana
ccgccaactgaggaggt

SEQ ID NO: 73477 - DNA, 17 bp, Arabidopsis thaliana
ccgccaaggatgacttg

SEQ ID NO: 73478 - DNA, 17 bp, Arabidopsis thaliana
ccgccaatcagcttcct

SEQ ID NO: 73479 - DNA, 17 bp, Arabidopsis thaliana
ccgccaatctttacttt

SEQ ID NO: 73480 - DNA, 17 bp, Arabidopsis thaliana
ccgccaattctgtgaac

SEQ ID NO: 73481 - DNA, 17 bp, Arabidopsis thaliana
ccgccacaagtgatgtg

SEQ ID NO: 73482 - DNA, 17 bp, Arabidopsis thaliana
ccgccacacaaggtgtc

SEQ ID NO: 73483 - DNA, 17 bp, Arabidopsis thaliana
ccgccacagccaccgtc

SEQ ID NO: 73484 - DNA, 17 bp, Arabidopsis thaliana
ccgccacaggcttcatc

SEQ ID NO: 73485 - DNA, 17 bp, Arabidopsis thaliana
ccgccacccgggttcga

SEQ ID NO: 73486 - DNA, 17 bp, Arabidopsis thaliana
ccgccacggtggggtct

SEQ ID NO: 73487 - DNA, 17 bp, Arabidopsis thaliana
ccgccacgtcccggttc

SEQ ID NO: 73488 - DNA, 17 bp, Arabidopsis thaliana
ccgccaggagtggagcc

SEQ ID NO: 73489 - DNA, 17 bp, Arabidopsis thaliana
ccgccagtcaacactac

SEQ ID NO: 73490 - DNA, 17 bp, Arabidopsis thaliana
ccgccagttgacttaac

SEQ ID NO: 73491 - DNA, 17 bp, Arabidopsis thaliana
ccgccatataaatctgt

SEQ ID NO: 73492 - DNA, 17 bp, Arabidopsis thaliana
ccgccatctacatcgtt

SEQ ID NO: 73493 - DNA, 17 bp, Arabidopsis thaliana
ccgccatgctgttgacc

SEQ ID NO: 73494 - DNA, 17 bp, Arabidopsis thaliana
ccgccatgggatgtgtg

SEQ ID NO: 73495 - DNA, 17 bp, Arabidopsis thaliana
ccgccatgggctacttg

SEQ ID NO: 73496 - DNA, 17 bp, Arabidopsis thaliana
ccgccatgtaggaattt

SEQ ID NO: 73497 - DNA, 17 bp, Arabidopsis thaliana
ccgccatgtagggatac

SEQ ID NO: 73498 - DNA, 17 bp, Arabidopsis thaliana
ccgccattaattgagtg

SEQ ID NO: 73499 - DNA, 17 bp, Arabidopsis thaliana
ccgccattatgccaagt

SEQ ID NO: 73500 - DNA, 17 bp, Arabidopsis thaliana
ccgccatttttgcaaga

SEQ ID NO: 73501 - DNA, 17 bp, Arabidopsis thaliana
ccgcccaagatccacga

SEQ ID NO: 73502 - DNA, 17 bp, Arabidopsis thaliana
ccgcccaattgcgaccc

SEQ ID NO: 73503 - DNA, 17 bp, Arabidopsis thaliana
ccgcccacactccgtct

SEQ ID NO: 73504 - DNA, 17 bp, Arabidopsis thaliana
ccgcccatcagagccat

SEQ ID NO: 73505 - DNA, 17 bp, Arabidopsis thaliana
ccgcccatcatgtaacc

SEQ ID NO: 73506 - DNA, 17 bp, Arabidopsis thaliana
ccgccccaccaatccat

SEQ ID NO: 73507 - DNA, 17 bp, Arabidopsis thaliana
ccgccccatcaacttcg

SEQ ID NO: 73508 - DNA, 17 bp, Arabidopsis thaliana
ccgcccccccgcccccc

SEQ ID NO: 73509 - DNA, 17 bp, Arabidopsis thaliana
ccgcccctactcgttcg

SEQ ID NO: 73510 - DNA, 17 bp, Arabidopsis thaliana
ccgcccctgggctaaag

SEQ ID NO: 73511 - DNA, 17 bp, Arabidopsis thaliana
ccgcccgaaagatggtg

SEQ ID NO: 73512 - DNA, 17 bp, Arabidopsis thaliana
ccgcccgaaggcacgtc

SEQ ID NO: 73513 - DNA, 17 bp, Arabidopsis thaliana
ccgcccgaatgaccaac

SEQ ID NO: 73514 - DNA, 17 bp, Arabidopsis thaliana
ccgcccgacacggatta

SEQ ID NO: 73515 - DNA, 17 bp, Arabidopsis thaliana
ccgcccgaccggggatc

SEQ ID NO: 73516 - DNA, 17 bp, Arabidopsis thaliana
ccgcccgaccggtcgaa

SEQ ID NO: 73517 - DNA, 17 bp, Arabidopsis thaliana
ccgcccgaccttagctc

SEQ ID NO: 73518 - DNA, 17 bp, Arabidopsis thaliana
ccgcccgaccttatctc

SEQ ID NO: 73519 - DNA, 17 bp, Arabidopsis thaliana
ccgcccgacgatctcta

SEQ ID NO: 73520 - DNA, 17 bp, Arabidopsis thaliana
ccgcccgacgccgatta

SEQ ID NO: 73521 - DNA, 17 bp, Arabidopsis thaliana
ccgcccgacgcggatta

SEQ ID NO: 73522 - DNA, 17 bp, Arabidopsis thaliana
ccgcccgacttctcgag

SEQ ID NO: 73523 - DNA, 17 bp, Arabidopsis thaliana
ccgcccgactttagctc

SEQ ID NO: 73524 - DNA, 17 bp, Arabidopsis thaliana
ccgcccgagagacccgg

SEQ ID NO: 73525 - DNA, 17 bp, Arabidopsis thaliana
ccgcccgagggcacgtc

SEQ ID NO: 73526 - DNA, 17 bp, Arabidopsis thaliana
ccgcccgaggtcacgtc

SEQ ID NO: 73527 - DNA, 17 bp, Arabidopsis thaliana
ccgcccgaggttctttg

SEQ ID NO: 73528 - DNA, 17 bp, Arabidopsis thaliana
ccgcccgataaacctcc

SEQ ID NO: 73529 - DNA, 17 bp, Arabidopsis thaliana
ccgcccgatcgattcgg

SEQ ID NO: 73530 - DNA, 17 bp, Arabidopsis thaliana
ccgcccgatgtcgtcca

SEQ ID NO: 73531 - DNA, 17 bp, Arabidopsis thaliana
ccgcccgattgccgacc

SEQ ID NO: 73532 - DNA, 17 bp, Arabidopsis thaliana
ccgcccgcaaccgcaaa

SEQ ID NO: 73533 - DNA, 17 bp, Arabidopsis thaliana
ccgcccgccaccctacc

SEQ ID NO: 73534 - DNA, 17 bp, Arabidopsis thaliana
ccgcccgccattaattg

SEQ ID NO: 73535 - DNA, 17 bp, Arabidopsis thaliana
ccgcccgccattatgcc

SEQ ID NO: 73536 - DNA, 17 bp, Arabidopsis thaliana
ccgcccgcctaacggat

SEQ ID NO: 73537 - DNA, 17 bp, Arabidopsis thaliana
ccgcccgcgacgtcgcg

SEQ ID NO: 73538 - DNA, 17 bp, Arabidopsis thaliana
ccgcccgcgctttttgc

SEQ ID NO: 73539 - DNA, 17 bp, Arabidopsis thaliana
ccgcccgctccgattgg

SEQ ID NO: 73540 - DNA, 17 bp, Arabidopsis thaliana
ccgcccgctgttgagct

SEQ ID NO: 73541 - DNA, 17 bp, Arabidopsis thaliana
ccgcccggaaagtttat

SEQ ID NO: 73542 - DNA, 17 bp, Arabidopsis thaliana
ccgcccggaggaccgag

SEQ ID NO: 73543 - DNA, 17 bp, Arabidopsis thaliana
ccgcccggatttttaag

SEQ ID NO: 73544 - DNA, 17 bp, Arabidopsis thaliana
ccgcccggccgggggac

SEQ ID NO: 73545 - DNA, 17 bp, Arabidopsis thaliana
ccgcccggcgaagaagt

SEQ ID NO: 73546 - DNA, 17 bp, Arabidopsis thaliana
ccgcccggcgaccgaag

SEQ ID NO: 73547 - DNA, 17 bp, Arabidopsis thaliana
ccgcccggcgacggcgg

SEQ ID NO: 73548 - DNA, 17 bp, Arabidopsis thaliana
ccgcccggcgaggcagt

SEQ ID NO: 73549 - DNA, 17 bp, Arabidopsis thaliana
ccgcccggcttcttaga

SEQ ID NO: 73550 - DNA, 17 bp, Arabidopsis thaliana
ccgcccgggaagtcctc

SEQ ID NO: 73551 - DNA, 17 bp, Arabidopsis thaliana
ccgcccgggacgtggcg

SEQ ID NO: 73552 - DNA, 17 bp, Arabidopsis thaliana
ccgcccgggagggtgct

SEQ ID NO: 73553 - DNA, 17 bp, Arabidopsis thaliana
ccgcccgggcggaggac

SEQ ID NO: 73554 - DNA, 17 bp, Arabidopsis thaliana
ccgcccgggcttttgat

SEQ ID NO: 73555 - DNA, 17 bp, Arabidopsis thaliana
ccgcccgggggacggac

SEQ ID NO: 73556 - DNA, 17 bp, Arabidopsis thaliana
ccgcccgggtgccgtag

SEQ ID NO: 73557 - DNA, 17 bp, Arabidopsis thaliana
ccgcccgggttacggtg

SEQ ID NO: 73558 - DNA, 17 bp, Arabidopsis thaliana
ccgcccgggttcgagtc

SEQ ID NO: 73559 - DNA, 17 bp, Arabidopsis thaliana
ccgcccgggttcgattc

SEQ ID NO: 73560 - DNA, 17 bp, Arabidopsis thaliana
ccgcccgggttcgtttc

SEQ ID NO: 73561 - DNA, 17 bp, Arabidopsis thaliana
ccgcccgggttgagtcc

SEQ ID NO: 73562 - DNA, 17 bp, Arabidopsis thaliana
ccgcccgggtttcccgg

SEQ ID NO: 73563 - DNA, 17 bp, Arabidopsis thaliana
ccgcccggtccgccttt

SEQ ID NO: 73564 - DNA, 17 bp, Arabidopsis thaliana
ccgcccggtcgagtgat

SEQ ID NO: 73565 - DNA, 17 bp, Arabidopsis thaliana
ccgcccggtgaagtgtt

SEQ ID NO: 73566 - DNA, 17 bp, Arabidopsis thaliana
ccgcccggttcaatcac

SEQ ID NO: 73567 - DNA, 17 bp, Arabidopsis thaliana
ccgcccggtttgacttg

SEQ ID NO: 73568 - DNA, 17 bp, Arabidopsis thaliana
ccgcccgtcacactatg

SEQ ID NO: 73569 - DNA, 17 bp, Arabidopsis thaliana
ccgcccgtcagtgtccg

SEQ ID NO: 73570 - DNA, 17 bp, Arabidopsis thaliana
ccgcccgtcgcggcagc

SEQ ID NO: 73571 - DNA, 17 bp, Arabidopsis thaliana
ccgcccgtcgctcctac

SEQ ID NO: 73572 - DNA, 17 bp, Arabidopsis thaliana
ccgcccgtcggctgtca

SEQ ID NO: 73573 - DNA, 17 bp, Arabidopsis thaliana
ccgcccgtcgtgagaca

SEQ ID NO: 73574 - DNA, 17 bp, Arabidopsis thaliana
ccgcccgtgatcgtggt

SEQ ID NO: 73575 - DNA, 17 bp, Arabidopsis thaliana
ccgcccgtgcgctggat

SEQ ID NO: 73576 - DNA, 17 bp, Arabidopsis thaliana
ccgcccgtgggttcgtt

SEQ ID NO: 73577 - DNA, 17 bp, Arabidopsis thaliana
ccgcccgttcttagttg

SEQ ID NO: 73578 - DNA, 17 bp, Arabidopsis thaliana
ccgcccgttttaatgtg

SEQ ID NO: 73579 - DNA, 17 bp, Arabidopsis thaliana
ccgccctcaggttcagc

SEQ ID NO: 73580 - DNA, 17 bp, Arabidopsis thaliana
ccgccctgccatagtcg

SEQ ID NO: 73581 - DNA, 17 bp, Arabidopsis thaliana
ccgccctgcctttctgc

SEQ ID NO: 73582 - DNA, 17 bp, Arabidopsis thaliana
ccgccctgtcaagcgga

SEQ ID NO: 73583 - DNA, 17 bp, Arabidopsis thaliana
ccgccctttgtcgcgaa

SEQ ID NO: 73584 - DNA, 17 bp, Arabidopsis thaliana
ccgccctttgtcgctaa

SEQ ID NO: 73585 - DNA, 17 bp, Arabidopsis thaliana
ccgccgaacggacttag

SEQ ID NO: 73586 - DNA, 17 bp, Arabidopsis thaliana
ccgccgacgggttggat

SEQ ID NO: 73587 - DNA, 17 bp, Arabidopsis thaliana
ccgccgagagacaggat

SEQ ID NO: 73588 - DNA, 17 bp, Arabidopsis thaliana
ccgccgagcagagcaat

SEQ ID NO: 73589 - DNA, 17 bp, Arabidopsis thaliana
ccgccgagtgccttatg

SEQ ID NO: 73590 - DNA, 17 bp, Arabidopsis thaliana
ccgccgatcgattcggg

SEQ ID NO: 73591 - DNA, 17 bp, Arabidopsis thaliana
ccgccgattttttctct

SEQ ID NO: 73592 - DNA, 17 bp, Arabidopsis thaliana
ccgccgcagtgactgta

SEQ ID NO: 73593 - DNA, 17 bp, Arabidopsis thaliana
ccgccgcccgactgccg

SEQ ID NO: 73594 - DNA, 17 bp, Arabidopsis thaliana
ccgccgcccgattgccg

SEQ ID NO: 73595 - DNA, 17 bp, Arabidopsis thaliana
ccgccgcccgcttgccg

SEQ ID NO: 73596 - DNA, 17 bp, Arabidopsis thaliana
ccgccgccgaccccccc

SEQ ID NO: 73597 - DNA, 17 bp, Arabidopsis thaliana
ccgccgccgccggaact

SEQ ID NO: 73598 - DNA, 17 bp, Arabidopsis thaliana
ccgccgcggattacggt

SEQ ID NO: 73599 - DNA, 17 bp, Arabidopsis thaliana
ccgccgctgaggcccat

SEQ ID NO: 73600 - DNA, 17 bp, Arabidopsis thaliana
ccgccgcttttcttggg

SEQ ID NO: 73601 - DNA, 17 bp, Arabidopsis thaliana
ccgccggacacgcagag

SEQ ID NO: 73602 - DNA, 17 bp, Arabidopsis thaliana
ccgccggagcgacacag

SEQ ID NO: 73603 - DNA, 17 bp, Arabidopsis thaliana
ccgccggagcgacatag

SEQ ID NO: 73604 - DNA, 17 bp, Arabidopsis thaliana
ccgccggaggcttgaga

SEQ ID NO: 73605 - DNA, 17 bp, Arabidopsis thaliana
ccgccggcttcatattt

SEQ ID NO: 73606 - DNA, 17 bp, Arabidopsis thaliana
ccgccggcttcgggaaa

SEQ ID NO: 73607 - DNA, 17 bp, Arabidopsis thaliana
ccgccggttattgacat

SEQ ID NO: 73608 - DNA, 17 bp, Arabidopsis thaliana
ccgccgtaatctctcag

SEQ ID NO: 73609 - DNA, 17 bp, Arabidopsis thaliana
ccgccgtcaaatcccag

SEQ ID NO: 73610 - DNA, 17 bp, Arabidopsis thaliana
ccgccgtccaccgccac

SEQ ID NO: 73611 - DNA, 17 bp, Arabidopsis thaliana
ccgccgtcgctggagcc

SEQ ID NO: 73612 - DNA, 17 bp, Arabidopsis thaliana
ccgccgtcgtgcccaga

SEQ ID NO: 73613 - DNA, 17 bp, Arabidopsis thaliana
ccgccgtggaggatgta

SEQ ID NO: 73614 - DNA, 17 bp, Arabidopsis thaliana
ccgccgttgttgctaag

SEQ ID NO: 73615 - DNA, 17 bp, Arabidopsis thaliana
ccgcctaacggatgtgt

SEQ ID NO: 73616 - DNA, 17 bp, Arabidopsis thaliana
ccgcctaagacgcgtgg

SEQ ID NO: 73617 - DNA, 17 bp, Arabidopsis thaliana
ccgcctaagcactcggt

SEQ ID NO: 73618 - DNA, 17 bp, Arabidopsis thaliana
ccgcctaagcttgccgt

SEQ ID NO: 73619 - DNA, 17 bp, Arabidopsis thaliana
ccgcctaattcgacaga

SEQ ID NO: 73620 - DNA, 17 bp, Arabidopsis thaliana
ccgcctatctaccgttg

SEQ ID NO: 73621 - DNA, 17 bp, Arabidopsis thaliana
ccgcctatctcacgcgt

SEQ ID NO: 73622 - DNA, 17 bp, Arabidopsis thaliana
ccgcctattggcaacat

SEQ ID NO: 73623 - DNA, 17 bp, Arabidopsis thaliana
ccgcctctcaggacctt

SEQ ID NO: 73624 - DNA, 17 bp, Arabidopsis thaliana
ccgcctgatacgtttga

SEQ ID NO: 73625 - DNA, 17 bp, Arabidopsis thaliana
ccgcctgcatttctgac

SEQ ID NO: 73626 - DNA, 17 bp, Arabidopsis thaliana
ccgcctgcggaaggatc

SEQ ID NO: 73627 - DNA, 17 bp, Arabidopsis thaliana
ccgcctgggctctgacc

SEQ ID NO: 73628 - DNA, 17 bp, Arabidopsis thaliana
ccgcctgtcacgcgggt

SEQ ID NO: 73629 - DNA, 17 bp, Arabidopsis thaliana
ccgcctgtcgaccgttt

SEQ ID NO: 73630 - DNA, 17 bp, Arabidopsis thaliana
ccgccttactgacgggt

SEQ ID NO: 73631 - DNA, 17 bp, Arabidopsis thaliana
ccgccttgcgatcgagt

SEQ ID NO: 73632 - DNA, 17 bp, Arabidopsis thaliana
ccgccttgcggatgcgt

SEQ ID NO: 73633 - DNA, 17 bp, Arabidopsis thaliana
ccgccttgcggatgggt

SEQ ID NO: 73634 - DNA, 17 bp, Arabidopsis thaliana
ccgccttgttacttgcc

SEQ ID NO: 73635 - DNA, 17 bp, Arabidopsis thaliana
ccgcctttcccgacggc

SEQ ID NO: 73636 - DNA, 17 bp, Arabidopsis thaliana
ccgcctttggtgtgcag

SEQ ID NO: 73637 - DNA, 17 bp, Arabidopsis thaliana
ccgcctttggtgtgcat

SEQ ID NO: 73638 - DNA, 17 bp, Arabidopsis thaliana
ccgcgaaaaagagtgtt

SEQ ID NO: 73639 - DNA, 17 bp, Arabidopsis thaliana
ccgcgaaagcactctgc

SEQ ID NO: 73640 - DNA, 17 bp, Arabidopsis thaliana
ccgcgaaatcttgattt

SEQ ID NO: 73641 - DNA, 17 bp, Arabidopsis thaliana
ccgcgaacccgggctca

SEQ ID NO: 73642 - DNA, 17 bp, Arabidopsis thaliana
ccgcgaactcggattcc

SEQ ID NO: 73643 - DNA, 17 bp, Arabidopsis thaliana
ccgcgaagaaccttacc

SEQ ID NO: 73644 - DNA, 17 bp, Arabidopsis thaliana
ccgcgacaaatcctcgg

SEQ ID NO: 73645 - DNA, 17 bp, Arabidopsis thaliana
ccgcgacaccgtggcct

SEQ ID NO: 73646 - DNA, 17 bp, Arabidopsis thaliana
ccgcgacatgtgaccgt

SEQ ID NO: 73647 - DNA, 17 bp, Arabidopsis thaliana
ccgcgacgaaggagcag

SEQ ID NO: 73648 - DNA, 17 bp, Arabidopsis thaliana
ccgcgacgcggattacg

SEQ ID NO: 73649 - DNA, 17 bp, Arabidopsis thaliana
ccgcgacggggtattgt

SEQ ID NO: 73650 - DNA, 17 bp, Arabidopsis thaliana
ccgcgacgtcgcgagaa

SEQ ID NO: 73651 - DNA, 17 bp, Arabidopsis thaliana
ccgcgactgacttactt

SEQ ID NO: 73652 - DNA, 17 bp, Arabidopsis thaliana
ccgcgacttccaactgt

SEQ ID NO: 73653 - DNA, 17 bp, Arabidopsis thaliana
ccgcgacttccgctggt

SEQ ID NO: 73654 - DNA, 17 bp, Arabidopsis thaliana
ccgcgagacgacatttt

SEQ ID NO: 73655 - DNA, 17 bp, Arabidopsis thaliana
ccgcgagactactaaat

SEQ ID NO: 73656 - DNA, 17 bp, Arabidopsis thaliana
ccgcgagactactaagt

SEQ ID NO: 73657 - DNA, 17 bp, Arabidopsis thaliana
ccgcgaggaatcgtcga

SEQ ID NO: 73658 - DNA, 17 bp, Arabidopsis thaliana
ccgcgaggaccgagtgc

SEQ ID NO: 73659 - DNA, 17 bp, Arabidopsis thaliana
ccgcgaggccccgtctg

SEQ ID NO: 73660 - DNA, 17 bp, Arabidopsis thaliana
ccgcgaggcgattagct

SEQ ID NO: 73661 - DNA, 17 bp, Arabidopsis thaliana
ccgcgagggatcccgcc

SEQ ID NO: 73662 - DNA, 17 bp, Arabidopsis thaliana
ccgcgagggcacgtctg

SEQ ID NO: 73663 - DNA, 17 bp, Arabidopsis thaliana
ccgcgaggtaaagatga

SEQ ID NO: 73664 - DNA, 17 bp, Arabidopsis thaliana
ccgcgagtgaggtgtcc

SEQ ID NO: 73665 - DNA, 17 bp, Arabidopsis thaliana
ccgcgagttcgatcctc

SEQ ID NO: 73666 - DNA, 17 bp, Arabidopsis thaliana
ccgcgataaaccgtggg

SEQ ID NO: 73667 - DNA, 17 bp, Arabidopsis thaliana
ccgcgatagcgaagtag

SEQ ID NO: 73668 - DNA, 17 bp, Arabidopsis thaliana
ccgcgatagcgaagtgg

SEQ ID NO: 73669 - DNA, 17 bp, Arabidopsis thaliana
ccgcgatagtgccgtga

SEQ ID NO: 73670 - DNA, 17 bp, Arabidopsis thaliana
ccgcgatcaaggagcag

SEQ ID NO: 73671 - DNA, 17 bp, Arabidopsis thaliana
ccgcgatcagatgttgc

SEQ ID NO: 73672 - DNA, 17 bp, Arabidopsis thaliana
ccgcgatcagggatttt

SEQ ID NO: 73673 - DNA, 17 bp, Arabidopsis thaliana
ccgcgatccactgagat

SEQ ID NO: 73674 - DNA, 17 bp, Arabidopsis thaliana
ccgcgatcctgggcaga

SEQ ID NO: 73675 - DNA, 17 bp, Arabidopsis thaliana
ccgcgatttttagatga

SEQ ID NO: 73676 - DNA, 17 bp, Arabidopsis thaliana
ccgcgcaaggcactctc

SEQ ID NO: 73677 - DNA, 17 bp, Arabidopsis thaliana
ccgcgcaagggtgcggg

SEQ ID NO: 73678 - DNA, 17 bp, Arabidopsis thaliana
ccgcgcaggacctgacg

SEQ ID NO: 73679 - DNA, 17 bp, Arabidopsis thaliana
ccgcgcaggttcgaatc

SEQ ID NO: 73680 - DNA, 17 bp, Arabidopsis thaliana
ccgcgcatagcgcagtg

SEQ ID NO: 73681 - DNA, 17 bp, Arabidopsis thaliana
ccgcgcatggccatctt

SEQ ID NO: 73682 - DNA, 17 bp, Arabidopsis thaliana
ccgcgcctctgtgctgg

SEQ ID NO: 73683 - DNA, 17 bp, Arabidopsis thaliana
ccgcgcctgtggtgtac

SEQ ID NO: 73684 - DNA, 17 bp, Arabidopsis thaliana
ccgcgcctttttggaca

SEQ ID NO: 73685 - DNA, 17 bp, Arabidopsis thaliana
ccgcgctatgttggact

SEQ ID NO: 73686 - DNA, 17 bp, Arabidopsis thaliana
ccgcgcttcaagttatc

SEQ ID NO: 73687 - DNA, 17 bp, Arabidopsis thaliana
ccgcgcttgtacggctt

SEQ ID NO: 73688 - DNA, 17 bp, Arabidopsis thaliana
ccgcgctttttgcgatt

SEQ ID NO: 73689 - DNA, 17 bp, Arabidopsis thaliana
ccgcggaagcagctcga

SEQ ID NO: 73690 - DNA, 17 bp, Arabidopsis thaliana
ccgcggacgcagctgcc

SEQ ID NO: 73691 - DNA, 17 bp, Arabidopsis thaliana
ccgcggatgggacaccg

SEQ ID NO: 73692 - DNA, 17 bp, Arabidopsis thaliana
ccgcggcaggtaaggct

SEQ ID NO: 73693 - DNA, 17 bp, Arabidopsis thaliana
ccgcggccgttccaaat

SEQ ID NO: 73694 - DNA, 17 bp, Arabidopsis thaliana
ccgcggcgagagcgggt

SEQ ID NO: 73695 - DNA, 17 bp, Arabidopsis thaliana
ccgcggctgctggcacc

SEQ ID NO: 73696 - DNA, 17 bp, Arabidopsis thaliana
ccgcggcttggcgcgcg

SEQ ID NO: 73697 - DNA, 17 bp, Arabidopsis thaliana
ccgcggcttgtcccttc

SEQ ID NO: 73698 - DNA, 17 bp, Arabidopsis thaliana
ccgcgggccaatctcta

SEQ ID NO: 73699 - DNA, 17 bp, Arabidopsis thaliana
ccgcgggcgacccagct

SEQ ID NO: 73700 - DNA, 17 bp, Arabidopsis thaliana
ccgcggggacaatttat

SEQ ID NO: 73701 - DNA, 17 bp, Arabidopsis thaliana
ccgcgggggacggactg

SEQ ID NO: 73702 - DNA, 17 bp, Arabidopsis thaliana
ccgcgggtaaggaagtt

SEQ ID NO: 73703 - DNA, 17 bp, Arabidopsis thaliana
ccgcgggtattcaaatc

SEQ ID NO: 73704 - DNA, 17 bp, Arabidopsis thaliana
ccgcgggtcaagttctg

SEQ ID NO: 73705 - DNA, 17 bp, Arabidopsis thaliana
ccgcgggttaaaatgta

SEQ ID NO: 73706 - DNA, 17 bp, Arabidopsis thaliana
ccgcgggttcgaatccc

SEQ ID NO: 73707 - DNA, 17 bp, Arabidopsis thaliana
ccgcgggttcgagcccc

SEQ ID NO: 73708 - DNA, 17 bp, Arabidopsis thaliana
ccgcgggttcgggcccc

SEQ ID NO: 73709 - DNA, 17 bp, Arabidopsis thaliana
ccgcgggttcgtgcccc

SEQ ID NO: 73710 - DNA, 17 bp, Arabidopsis thaliana
ccgcggtaattccagct

SEQ ID NO: 73711 - DNA, 17 bp, Arabidopsis thaliana
ccgcggtacatcgttgg

SEQ ID NO: 73712 - DNA, 17 bp, Arabidopsis thaliana
ccgcggtataccgctct

SEQ ID NO: 73713 - DNA, 17 bp, Arabidopsis thaliana
ccgcggtataccggagg

SEQ ID NO: 73714 - DNA, 17 bp, Arabidopsis thaliana
ccgcggtccgcctttgg

SEQ ID NO: 73715 - DNA, 17 bp, Arabidopsis thaliana
ccgcggtctgtctgctc

SEQ ID NO: 73716 - DNA, 17 bp, Arabidopsis thaliana
ccgcggtgacaatttat

SEQ ID NO: 73717 - DNA, 17 bp, Arabidopsis thaliana
ccgcggtggattgcgca

SEQ ID NO: 73718 - DNA, 17 bp, Arabidopsis thaliana
ccgcggttttaagaaat

SEQ ID NO: 73719 - DNA, 17 bp, Arabidopsis thaliana
ccgcggtttttttttac

SEQ ID NO: 73720 - DNA, 17 bp, Arabidopsis thaliana
ccgcgtaaaaatagcta

SEQ ID NO: 73721 - DNA, 17 bp, Arabidopsis thaliana
ccgcgtaaacctgttgg

SEQ ID NO: 73722 - DNA, 17 bp, Arabidopsis thaliana
ccgcgtaagaactgtat

SEQ ID NO: 73723 - DNA, 17 bp, Arabidopsis thaliana
ccgcgtattcgacaaga

SEQ ID NO: 73724 - DNA, 17 bp, Arabidopsis thaliana
ccgcgtattgaccaact

SEQ ID NO: 73725 - DNA, 17 bp, Arabidopsis thaliana
ccgcgtatttccgatcc

SEQ ID NO: 73726 - DNA, 17 bp, Arabidopsis thaliana
ccgcgtcctcagttcgg

SEQ ID NO: 73727 - DNA, 17 bp, Arabidopsis thaliana
ccgcgtcgttggagccg

SEQ ID NO: 73728 - DNA, 17 bp, Arabidopsis thaliana
ccgcgtctctgctgacc

SEQ ID NO: 73729 - DNA, 17 bp, Arabidopsis thaliana
ccgcgtctgcctgggtg

SEQ ID NO: 73730 - DNA, 17 bp, Arabidopsis thaliana
ccgcgtctgtttaacag

SEQ ID NO: 73731 - DNA, 17 bp, Arabidopsis thaliana
ccgcgtctgttttgatc

SEQ ID NO: 73732 - DNA, 17 bp, Arabidopsis thaliana
ccgcgtgaactttgctc

SEQ ID NO: 73733 - DNA, 17 bp, Arabidopsis thaliana
ccgcgtgacgccgcgtt

SEQ ID NO: 73734 - DNA, 17 bp, Arabidopsis thaliana
ccgcgtgccggccgggg

SEQ ID NO: 73735 - DNA, 17 bp, Arabidopsis thaliana
ccgcgtggaggtagaag

SEQ ID NO: 73736 - DNA, 17 bp, Arabidopsis thaliana
ccgcgtgttggtgatga

SEQ ID NO: 73737 - DNA, 17 bp, Arabidopsis thaliana
ccgcgttctatggatgt

SEQ ID NO: 73738 - DNA, 17 bp, Arabidopsis thaliana
ccgcgtttactctaccg

SEQ ID NO: 73739 - DNA, 17 bp, Arabidopsis thaliana
ccgcgtttactgtaccg

SEQ ID NO: 73740 - DNA, 17 bp, Arabidopsis thaliana
ccgcgtttactgtgccg

SEQ ID NO: 73741 - DNA, 17 bp, Arabidopsis thaliana
ccgcgtttgcggttgcg

SEQ ID NO: 73742 - DNA, 17 bp, Arabidopsis thaliana
ccgctaaggagtgtgta

SEQ ID NO: 73743 - DNA, 17 bp, Arabidopsis thaliana
ccgctaattagcctcag

SEQ ID NO: 73744 - DNA, 17 bp, Arabidopsis thaliana
ccgctaattccgtttga

SEQ ID NO: 73745 - DNA, 17 bp, Arabidopsis thaliana
ccgctacactgcttatc

SEQ ID NO: 73746 - DNA, 17 bp, Arabidopsis thaliana
ccgctacctcgccgacg

SEQ ID NO: 73747 - DNA, 17 bp, Arabidopsis thaliana
ccgctacgtcgtggatg

SEQ ID NO: 73748 - DNA, 17 bp, Arabidopsis thaliana
ccgctacgtctcgggga

SEQ ID NO: 73749 - DNA, 17 bp, Arabidopsis thaliana
ccgctactctccggtgc

SEQ ID NO: 73750 - DNA, 17 bp, Arabidopsis thaliana
ccgctactttcagcgat

SEQ ID NO: 73751 - DNA, 17 bp, Arabidopsis thaliana
ccgctagattttgttgg

SEQ ID NO: 73752 - DNA, 17 bp, Arabidopsis thaliana
ccgctaggcggttagcc

SEQ ID NO: 73753 - DNA, 17 bp, Arabidopsis thaliana
ccgctatatttctcgtc

SEQ ID NO: 73754 - DNA, 17 bp, Arabidopsis thaliana
ccgctatcaaaaacgct

SEQ ID NO: 73755 - DNA, 17 bp, Arabidopsis thaliana
ccgctatccatcctgag

SEQ ID NO: 73756 - DNA, 17 bp, Arabidopsis thaliana
ccgctatgaccgcccac

SEQ ID NO: 73757 - DNA, 17 bp, Arabidopsis thaliana
ccgctatggtgaaattg

SEQ ID NO: 73758 - DNA, 17 bp, Arabidopsis thaliana
ccgctattagctcagtg

SEQ ID NO: 73759 - DNA, 17 bp, Arabidopsis thaliana
ccgctattatctcagtg

SEQ ID NO: 73760 - DNA, 17 bp, Arabidopsis thaliana
ccgctattcggaggttc

SEQ ID NO: 73761 - DNA, 17 bp, Arabidopsis thaliana
ccgctcaaggattccac

SEQ ID NO: 73762 - DNA, 17 bp, Arabidopsis thaliana
ccgctcaatgagtgaca

SEQ ID NO: 73763 - DNA, 17 bp, Arabidopsis thaliana
ccgctcacgcccgctcg

SEQ ID NO: 73764 - DNA, 17 bp, Arabidopsis thaliana
ccgctcacgcccggtca

SEQ ID NO: 73765 - DNA, 17 bp, Arabidopsis thaliana
ccgctcacgcccggtcg

SEQ ID NO: 73766 - DNA, 17 bp, Arabidopsis thaliana
ccgctcacgcccggtgg

SEQ ID NO: 73767 - DNA, 17 bp, Arabidopsis thaliana
ccgctcaggacagggac

SEQ ID NO: 73768 - DNA, 17 bp, Arabidopsis thaliana
ccgctcaggagggatag

SEQ ID NO: 73769 - DNA, 17 bp, Arabidopsis thaliana
ccgctcaggcatagttc

SEQ ID NO: 73770 - DNA, 17 bp, Arabidopsis thaliana
ccgctcagtcaggtggt

SEQ ID NO: 73771 - DNA, 17 bp, Arabidopsis thaliana
ccgctcagtcccggtaa

SEQ ID NO: 73772 - DNA, 17 bp, Arabidopsis thaliana
ccgctcatggattcgtg

SEQ ID NO: 73773 - DNA, 17 bp, Arabidopsis thaliana
ccgctccaccagatacg

SEQ ID NO: 73774 - DNA, 17 bp, Arabidopsis thaliana
ccgctccgatccgttgt

SEQ ID NO: 73775 - DNA, 17 bp, Arabidopsis thaliana
ccgctccgattgaccat

SEQ ID NO: 73776 - DNA, 17 bp, Arabidopsis thaliana
ccgctccgattggacca

SEQ ID NO: 73777 - DNA, 17 bp, Arabidopsis thaliana
ccgctccgattggaccg

SEQ ID NO: 73778 - DNA, 17 bp, Arabidopsis thaliana
ccgctccgattggccca

SEQ ID NO: 73779 - DNA, 17 bp, Arabidopsis thaliana
ccgctccgcagatggtc

SEQ ID NO: 73780 - DNA, 17 bp, Arabidopsis thaliana
ccgctccggctcttgga

SEQ ID NO: 73781 - DNA, 17 bp, Arabidopsis thaliana
ccgctcctcgtcaatgc

SEQ ID NO: 73782 - DNA, 17 bp, Arabidopsis thaliana
ccgctcgacaagccgtc

SEQ ID NO: 73783 - DNA, 17 bp, Arabidopsis thaliana
ccgctcgacgcggatta

SEQ ID NO: 73784 - DNA, 17 bp, Arabidopsis thaliana
ccgctcggttatggatt

SEQ ID NO: 73785 - DNA, 17 bp, Arabidopsis thaliana
ccgctctaaacacgctc

SEQ ID NO: 73786 - DNA, 17 bp, Arabidopsis thaliana
ccgctctacgaggtcgt

SEQ ID NO: 73787 - DNA, 17 bp, Arabidopsis thaliana
ccgctctagccttctgt

SEQ ID NO: 73788 - DNA, 17 bp, Arabidopsis thaliana
ccgctctatcggctgat

SEQ ID NO: 73789 - DNA, 17 bp, Arabidopsis thaliana
ccgctctcagcagtgga

SEQ ID NO: 73790 - DNA, 17 bp, Arabidopsis thaliana
ccgctctgaggaaactt

SEQ ID NO: 73791 - DNA, 17 bp, Arabidopsis thaliana
ccgctctgaggatactc

SEQ ID NO: 73792 - DNA, 17 bp, Arabidopsis thaliana
ccgctctgctcgatacg

SEQ ID NO: 73793 - DNA, 17 bp, Arabidopsis thaliana
ccgctctgtccgctccg

SEQ ID NO: 73794 - DNA, 17 bp, Arabidopsis thaliana
ccgctctgttgttcttt

SEQ ID NO: 73795 - DNA, 17 bp, Arabidopsis thaliana
ccgctcttctccggttc

SEQ ID NO: 73796 - DNA, 17 bp, Arabidopsis thaliana
ccgctcttgtctctttc

SEQ ID NO: 73797 - DNA, 17 bp, Arabidopsis thaliana
ccgctctttacagccta

SEQ ID NO: 73798 - DNA, 17 bp, Arabidopsis thaliana
ccgctgaagatcagaat

SEQ ID NO: 73799 - DNA, 17 bp, Arabidopsis thaliana
ccgctgacagccgacgg

SEQ ID NO: 73800 - DNA, 17 bp, Arabidopsis thaliana
ccgctgactccccggct

SEQ ID NO: 73801 - DNA, 17 bp, Arabidopsis thaliana
ccgctgagaatgcaatt

SEQ ID NO: 73802 - DNA, 17 bp, Arabidopsis thaliana
ccgctgagacgctcttt

SEQ ID NO: 73803 - DNA, 17 bp, Arabidopsis thaliana
ccgctgagcattgtcta

SEQ ID NO: 73804 - DNA, 17 bp, Arabidopsis thaliana
ccgctgagcttaaagat

SEQ ID NO: 73805 - DNA, 17 bp, Arabidopsis thaliana
ccgctgcaactatttgg

SEQ ID NO: 73806 - DNA, 17 bp, Arabidopsis thaliana
ccgctgcaatagctccg

SEQ ID NO: 73807 - DNA, 17 bp, Arabidopsis thaliana
ccgctgcagaatatcca

SEQ ID NO: 73808 - DNA, 17 bp, Arabidopsis thaliana
ccgctgcagaccaagtt

SEQ ID NO: 73809 - DNA, 17 bp, Arabidopsis thaliana
ccgctgcagcctaggac

SEQ ID NO: 73810 - DNA, 17 bp, Arabidopsis thaliana
ccgctgccgtatggaac

SEQ ID NO: 73811 - DNA, 17 bp, Arabidopsis thaliana
ccgctgcgggttttttc

SEQ ID NO: 73812 - DNA, 17 bp, Arabidopsis thaliana
ccgctgcggttttcttc

SEQ ID NO: 73813 - DNA, 17 bp, Arabidopsis thaliana
ccgctgcgtttaaacca

SEQ ID NO: 73814 - DNA, 17 bp, Arabidopsis thaliana
ccgctgctccggtctta

SEQ ID NO: 73815 - DNA, 17 bp, Arabidopsis thaliana
ccgctggactcactccc

SEQ ID NO: 73816 - DNA, 17 bp, Arabidopsis thaliana
ccgctggagcagaccta

SEQ ID NO: 73817 - DNA, 17 bp, Arabidopsis thaliana
ccgctggagcgttgtcg

SEQ ID NO: 73818 - DNA, 17 bp, Arabidopsis thaliana
ccgctggatctgattcc

SEQ ID NO: 73819 - DNA, 17 bp, Arabidopsis thaliana
ccgctggcaccttatga

SEQ ID NO: 73820 - DNA, 17 bp, Arabidopsis thaliana
ccgctgggaagcccaaa

SEQ ID NO: 73821 - DNA, 17 bp, Arabidopsis thaliana
ccgctgggaccgctgta

SEQ ID NO: 73822 - DNA, 17 bp, Arabidopsis thaliana
ccgctgggccgaaactg

SEQ ID NO: 73823 - DNA, 17 bp, Arabidopsis thaliana
ccgctggggctactctg

SEQ ID NO: 73824 - DNA, 17 bp, Arabidopsis thaliana
ccgctggtcctaattcg

SEQ ID NO: 73825 - DNA, 17 bp, Arabidopsis thaliana
ccgctggtctatccgcc

SEQ ID NO: 73826 - DNA, 17 bp, Arabidopsis thaliana
ccgctggtcttaattcg

SEQ ID NO: 73827 - DNA, 17 bp, Arabidopsis thaliana
ccgctggttgatcctgc

SEQ ID NO: 73828 - DNA, 17 bp, Arabidopsis thaliana
ccgctgtcctgactcac

SEQ ID NO: 73829 - DNA, 17 bp, Arabidopsis thaliana
ccgctgtctacgagtcg

SEQ ID NO: 73830 - DNA, 17 bp, Arabidopsis thaliana
ccgctgtgcgtatcgac

SEQ ID NO: 73831 - DNA, 17 bp, Arabidopsis thaliana
ccgctgtgttgttcgtt

SEQ ID NO: 73832 - DNA, 17 bp, Arabidopsis thaliana
ccgcttaacagggtctc

SEQ ID NO: 73833 - DNA, 17 bp, Arabidopsis thaliana
ccgcttaagccgctctg

SEQ ID NO: 73834 - DNA, 17 bp, Arabidopsis thaliana
ccgcttaaggacctcat

SEQ ID NO: 73835 - DNA, 17 bp, Arabidopsis thaliana
ccgcttacaagatcggg

SEQ ID NO: 73836 - DNA, 17 bp, Arabidopsis thaliana
ccgcttacagcagtgga

SEQ ID NO: 73837 - DNA, 17 bp, Arabidopsis thaliana
ccgcttagaatacgcta

SEQ ID NO: 73838 - DNA, 17 bp, Arabidopsis thaliana
ccgcttagactgctaaa

SEQ ID NO: 73839 - DNA, 17 bp, Arabidopsis thaliana
ccgcttagtgatgtgta

SEQ ID NO: 73840 - DNA, 17 bp, Arabidopsis thaliana
ccgcttcacgccatcct

SEQ ID NO: 73841 - DNA, 17 bp, Arabidopsis thaliana
ccgcttcgattggacca

SEQ ID NO: 73842 - DNA, 17 bp, Arabidopsis thaliana
ccgcttcggttctgtgg

SEQ ID NO: 73843 - DNA, 17 bp, Arabidopsis thaliana
ccgcttcgtcttcttgt

SEQ ID NO: 73844 - DNA, 17 bp, Arabidopsis thaliana
ccgcttcgtgcccaggc

SEQ ID NO: 73845 - DNA, 17 bp, Arabidopsis thaliana
ccgcttctagtggtgtg

SEQ ID NO: 73846 - DNA, 17 bp, Arabidopsis thaliana
ccgcttctccacgatct

SEQ ID NO: 73847 - DNA, 17 bp, Arabidopsis thaliana
ccgcttctccttccctg

SEQ ID NO: 73848 - DNA, 17 bp, Arabidopsis thaliana
ccgcttctgggagacaa

SEQ ID NO: 73849 - DNA, 17 bp, Arabidopsis thaliana
ccgcttctgtatctctt

SEQ ID NO: 73850 - DNA, 17 bp, Arabidopsis thaliana
ccgcttctttggcttgc

SEQ ID NO: 73851 - DNA, 17 bp, Arabidopsis thaliana
ccgcttgaaccgcattt

SEQ ID NO: 73852 - DNA, 17 bp, Arabidopsis thaliana
ccgcttgacctcaacag

SEQ ID NO: 73853 - DNA, 17 bp, Arabidopsis thaliana
ccgcttgactaaaagcc

SEQ ID NO: 73854 - DNA, 17 bp, Arabidopsis thaliana
ccgcttgactctagtcc

SEQ ID NO: 73855 - DNA, 17 bp, Arabidopsis thaliana
ccgcttgatatgcttga

SEQ ID NO: 73856 - DNA, 17 bp, Arabidopsis thaliana
ccgcttgattgtgtaga

SEQ ID NO: 73857 - DNA, 17 bp, Arabidopsis thaliana
ccgcttgcaggtttcta

SEQ ID NO: 73858 - DNA, 17 bp, Arabidopsis thaliana
ccgcttgcaggtttgct

SEQ ID NO: 73859 - DNA, 17 bp, Arabidopsis thaliana
ccgcttgcagtattcaa

SEQ ID NO: 73860 - DNA, 17 bp, Arabidopsis thaliana
ccgcttgccgacccgcc

SEQ ID NO: 73861 - DNA, 17 bp, Arabidopsis thaliana
ccgcttgctacttggtg

SEQ ID NO: 73862 - DNA, 17 bp, Arabidopsis thaliana
ccgcttggaccgctgta

SEQ ID NO: 73863 - DNA, 17 bp, Arabidopsis thaliana
ccgcttgggatgggtcg

SEQ ID NO: 73864 - DNA, 17 bp, Arabidopsis thaliana
ccgcttggtgcaggtcg

SEQ ID NO: 73865 - DNA, 17 bp, Arabidopsis thaliana
ccgcttggtgcaggtct

SEQ ID NO: 73866 - DNA, 17 bp, Arabidopsis thaliana
ccgcttgtttagggcgt

SEQ ID NO: 73867 - DNA, 17 bp, Arabidopsis thaliana
ccgctttaagatcggtt

SEQ ID NO: 73868 - DNA, 17 bp, Arabidopsis thaliana
ccgctttagaggtgtag

SEQ ID NO: 73869 - DNA, 17 bp, Arabidopsis thaliana
ccgctttatctgcttta

SEQ ID NO: 73870 - DNA, 17 bp, Arabidopsis thaliana
ccgctttgaccactctg

SEQ ID NO: 73871 - DNA, 17 bp, Arabidopsis thaliana
ccgctttggccctgctg

SEQ ID NO: 73872 - DNA, 17 bp, Arabidopsis thaliana
ccgctttgtccgctgcc

SEQ ID NO: 73873 - DNA, 17 bp, Arabidopsis thaliana
ccgctttgtccgttaca

SEQ ID NO: 73874 - DNA, 17 bp, Arabidopsis thaliana
ccgcttttactgcaact

SEQ ID NO: 73875 - DNA, 17 bp, Arabidopsis thaliana
ccgcttttcgatgaaag

SEQ ID NO: 73876 - DNA, 17 bp, Arabidopsis thaliana
ccgcttttgaggtagtt

SEQ ID NO: 73877 - DNA, 17 bp, Arabidopsis thaliana
ccgcttttgcaggtcgg

SEQ ID NO: 73878 - DNA, 17 bp, Arabidopsis thaliana
ccgcttttgcttctaca

SEQ ID NO: 73879 - DNA, 17 bp, Arabidopsis thaliana
ccgcttttgcttctgca

SEQ ID NO: 73880 - DNA, 17 bp, Arabidopsis thaliana
ccgcttttgtccagctt

SEQ ID NO: 73881 - DNA, 17 bp, Arabidopsis thaliana
ccgcttttgttttgctt

SEQ ID NO: 73882 - DNA, 17 bp, Arabidopsis thaliana
ccgctttttctgtgacc

SEQ ID NO: 73883 - DNA, 17 bp, Arabidopsis thaliana
ccgcttttttctatgat

SEQ ID NO: 73884 - DNA, 17 bp, Arabidopsis thaliana
ccggaaaaaatcgaata

SEQ ID NO: 73885 - DNA, 17 bp, Arabidopsis thaliana
ccggaaaaacggtctat

SEQ ID NO: 73886 - DNA, 17 bp, Arabidopsis thaliana
ccggaaaacttttccgg

SEQ ID NO: 73887 - DNA, 17 bp, Arabidopsis thaliana
ccggaaaagtgaggccc

SEQ ID NO: 73888 - DNA, 17 bp, Arabidopsis thaliana
ccggaaaccaccgccgg

SEQ ID NO: 73889 - DNA, 17 bp, Arabidopsis thaliana
ccggaaaccaccgccgt

SEQ ID NO: 73890 - DNA, 17 bp, Arabidopsis thaliana
ccggaaacgagtagcaa

SEQ ID NO: 73891 - DNA, 17 bp, Arabidopsis thaliana
ccggaaactaagccgaa

SEQ ID NO: 73892 - DNA, 17 bp, Arabidopsis thaliana
ccggaaactatatggtt

SEQ ID NO: 73893 - DNA, 17 bp, Arabidopsis thaliana
ccggaaagcccaaagac

SEQ ID NO: 73894 - DNA, 17 bp, Arabidopsis thaliana
ccggaaagcttgggcag

SEQ ID NO: 73895 - DNA, 17 bp, Arabidopsis thaliana
ccggaaagtcctcgtgt

SEQ ID NO: 73896 - DNA, 17 bp, Arabidopsis thaliana
ccggaaagtgattgtcg

SEQ ID NO: 73897 - DNA, 17 bp, Arabidopsis thaliana
ccggaaagtttataggc

SEQ ID NO: 73898 - DNA, 17 bp, Arabidopsis thaliana
ccggaaccttgggatgg

SEQ ID NO: 73899 - DNA, 17 bp, Arabidopsis thaliana
ccggaactacttgagat

SEQ ID NO: 73900 - DNA, 17 bp, Arabidopsis thaliana
ccggaactgtgtgtcgc

SEQ ID NO: 73901 - DNA, 17 bp, Arabidopsis thaliana
ccggaacttctccgact

SEQ ID NO: 73902 - DNA, 17 bp, Arabidopsis thaliana
ccggaagaaacctcttg

SEQ ID NO: 73903 - DNA, 17 bp, Arabidopsis thaliana
ccggaagacgaacttga

SEQ ID NO: 73904 - DNA, 17 bp, Arabidopsis thaliana
ccggaagccgggttacg

SEQ ID NO: 73905 - DNA, 17 bp, Arabidopsis thaliana
ccggaagccgggttact

SEQ ID NO: 73906 - DNA, 17 bp, Arabidopsis thaliana
ccggaaggattacgggc

SEQ ID NO: 73907 - DNA, 17 bp, Arabidopsis thaliana
ccggaagggtgctatgc

SEQ ID NO: 73908 - DNA, 17 bp, Arabidopsis thaliana
ccggaatcaaggatgcc

SEQ ID NO: 73909 - DNA, 17 bp, Arabidopsis thaliana
ccggaatcccgtgaacc

SEQ ID NO: 73910 - DNA, 17 bp, Arabidopsis thaliana
ccggaatccgacaaagc

SEQ ID NO: 73911 - DNA, 17 bp, Arabidopsis thaliana
ccggaatgccccgatgt

SEQ ID NO: 73912 - DNA, 17 bp, Arabidopsis thaliana
ccggacaacttctaagc

SEQ ID NO: 73913 - DNA, 17 bp, Arabidopsis thaliana
ccggacactcgatcacg

SEQ ID NO: 73914 - DNA, 17 bp, Arabidopsis thaliana
ccggacagactgatgtg

SEQ ID NO: 73915 - DNA, 17 bp, Arabidopsis thaliana
ccggacatctcacggct

SEQ ID NO: 73916 - DNA, 17 bp, Arabidopsis thaliana
ccggacatgtgtgcgag

SEQ ID NO: 73917 - DNA, 17 bp, Arabidopsis thaliana
ccggacatttgtgtgat

SEQ ID NO: 73918 - DNA, 17 bp, Arabidopsis thaliana
ccggaccactgcggact

SEQ ID NO: 73919 - DNA, 17 bp, Arabidopsis thaliana
ccggaccaggcatcctt

SEQ ID NO: 73920 - DNA, 17 bp, Arabidopsis thaliana
ccggaccaggcttcatc

SEQ ID NO: 73921 - DNA, 17 bp, Arabidopsis thaliana
ccggaccaggcttcatt

SEQ ID NO: 73922 - DNA, 17 bp, Arabidopsis thaliana
ccggaccctgccgcacc

SEQ ID NO: 73923 - DNA, 17 bp, Arabidopsis thaliana
ccggaccctgccgtacc

SEQ ID NO: 73924 - DNA, 17 bp, Arabidopsis thaliana
ccggaccctgtcgcacc

SEQ ID NO: 73925 - DNA, 17 bp, Arabidopsis thaliana
ccggaccgatgtggatc

SEQ ID NO: 73926 - DNA, 17 bp, Arabidopsis thaliana
ccggaccggcactgatc

SEQ ID NO: 73927 - DNA, 17 bp, Arabidopsis thaliana
ccggaccggtgggcaag

SEQ ID NO: 73928 - DNA, 17 bp, Arabidopsis thaliana
ccggaccttcacggggg

SEQ ID NO: 73929 - DNA, 17 bp, Arabidopsis thaliana
ccggacgcgcatgaatg

SEQ ID NO: 73930 - DNA, 17 bp, Arabidopsis thaliana
ccggacggagtgctaac

SEQ ID NO: 73931 - DNA, 17 bp, Arabidopsis thaliana
ccggacggtccggatca

SEQ ID NO: 73932 - DNA, 17 bp, Arabidopsis thaliana
ccggacggtccgggtcg

SEQ ID NO: 73933 - DNA, 17 bp, Arabidopsis thaliana
ccggacggttcgggtcg

SEQ ID NO: 73934 - DNA, 17 bp, Arabidopsis thaliana
ccggacgtctgcctggg

SEQ ID NO: 73935 - DNA, 17 bp, Arabidopsis thaliana
ccggacgtgccggagtg

SEQ ID NO: 73936 - DNA, 17 bp, Arabidopsis thaliana
ccggactacgcccactc

SEQ ID NO: 73937 - DNA, 17 bp, Arabidopsis thaliana
ccggactcatctcgttt

SEQ ID NO: 73938 - DNA, 17 bp, Arabidopsis thaliana
ccggactctcggcaacg

SEQ ID NO: 73939 - DNA, 17 bp, Arabidopsis thaliana
ccggactgggagagtgc

SEQ ID NO: 73940 - DNA, 17 bp, Arabidopsis thaliana
ccggactggttggtggg

SEQ ID NO: 73941 - DNA, 17 bp, Arabidopsis thaliana
ccggactgtgccacgcg

SEQ ID NO: 73942 - DNA, 17 bp, Arabidopsis thaliana
ccggacttcttcccctc

SEQ ID NO: 73943 - DNA, 17 bp, Arabidopsis thaliana
ccggactttggatcccg

SEQ ID NO: 73944 - DNA, 17 bp, Arabidopsis thaliana
ccggactttgttgatgg

SEQ ID NO: 73945 - DNA, 17 bp, Arabidopsis thaliana
ccggagaacacatgagc

SEQ ID NO: 73946 - DNA, 17 bp, Arabidopsis thaliana
ccggagaacgcgagacg

SEQ ID NO: 73947 - DNA, 17 bp, Arabidopsis thaliana
ccggagaagacggagta

SEQ ID NO: 73948 - DNA, 17 bp, Arabidopsis thaliana
ccggagaagcgtttgga

SEQ ID NO: 73949 - DNA, 17 bp, Arabidopsis thaliana
ccggagaagtgaggccc

SEQ ID NO: 73950 - DNA, 17 bp, Arabidopsis thaliana
ccggagaatcgaacttg

SEQ ID NO: 73951 - DNA, 17 bp, Arabidopsis thaliana
ccggagaattttcatgt

SEQ ID NO: 73952 - DNA, 17 bp, Arabidopsis thaliana
ccggagacgtcgacggg

SEQ ID NO: 73953 - DNA, 17 bp, Arabidopsis thaliana
ccggagacgtcggcggg

SEQ ID NO: 73954 - DNA, 17 bp, Arabidopsis thaliana
ccggagacgtcggcgtg

SEQ ID NO: 73955 - DNA, 17 bp, Arabidopsis thaliana
ccggagagattgctaac

SEQ ID NO: 73956 - DNA, 17 bp, Arabidopsis thaliana
ccggagaggaccttggt

SEQ ID NO: 73957 - DNA, 17 bp, Arabidopsis thaliana
ccggagatctcgtgtgg

SEQ ID NO: 73958 - DNA, 17 bp, Arabidopsis thaliana
ccggagatggctgagtg

SEQ ID NO: 73959 - DNA, 17 bp, Arabidopsis thaliana
ccggagattcccgagcg

SEQ ID NO: 73960 - DNA, 17 bp, Arabidopsis thaliana
ccggagccaccgacggg

SEQ ID NO: 73961 - DNA, 17 bp, Arabidopsis thaliana
ccggagcgctctgattg

SEQ ID NO: 73962 - DNA, 17 bp, Arabidopsis thaliana
ccggaggaccgagcgcc

SEQ ID NO: 73963 - DNA, 17 bp, Arabidopsis thaliana
ccggaggaccgagtccc

SEQ ID NO: 73964 - DNA, 17 bp, Arabidopsis thaliana
ccggaggaccgagtgac

SEQ ID NO: 73965 - DNA, 17 bp, Arabidopsis thaliana
ccggaggaccgagtgcc

SEQ ID NO: 73966 - DNA, 17 bp, Arabidopsis thaliana
ccggaggaccgagtgtc

SEQ ID NO: 73967 - DNA, 17 bp, Arabidopsis thaliana
ccggaggaccgattgcc

SEQ ID NO: 73968 - DNA, 17 bp, Arabidopsis thaliana
ccggaggataaggcgca

SEQ ID NO: 73969 - DNA, 17 bp, Arabidopsis thaliana
ccggaggctcagggttt

SEQ ID NO: 73970 - DNA, 17 bp, Arabidopsis thaliana
ccggagggcacgtctgc

SEQ ID NO: 73971 - DNA, 17 bp, Arabidopsis thaliana
ccggaggggcgagatcg

SEQ ID NO: 73972 - DNA, 17 bp, Arabidopsis thaliana
ccggaggtagggtccag

SEQ ID NO: 73973 - DNA, 17 bp, Arabidopsis thaliana
ccggaggtaggttccag

SEQ ID NO: 73974 - DNA, 17 bp, Arabidopsis thaliana
ccggaggtcgtgaagag

SEQ ID NO: 73975 - DNA, 17 bp, Arabidopsis thaliana
ccggaggtgtggataac

SEQ ID NO: 73976 - DNA, 17 bp, Arabidopsis thaliana
ccggaggttttcccccg

SEQ ID NO: 73977 - DNA, 17 bp, Arabidopsis thaliana
ccggagtaccgtccagc

SEQ ID NO: 73978 - DNA, 17 bp, Arabidopsis thaliana
ccggagtcctctatggg

SEQ ID NO: 73979 - DNA, 17 bp, Arabidopsis thaliana
ccggagtcgatttggcc

SEQ ID NO: 73980 - DNA, 17 bp, Arabidopsis thaliana
ccggagtcggcaggatt

SEQ ID NO: 73981 - DNA, 17 bp, Arabidopsis thaliana
ccggagtgccgctcacg

SEQ ID NO: 73982 - DNA, 17 bp, Arabidopsis thaliana
ccggagttagggtccag

SEQ ID NO: 73983 - DNA, 17 bp, Arabidopsis thaliana
ccggagttgaagtttgg

SEQ ID NO: 73984 - DNA, 17 bp, Arabidopsis thaliana
ccggataaccaagatgt

SEQ ID NO: 73985 - DNA, 17 bp, Arabidopsis thaliana
ccggataagctgtgtac

SEQ ID NO: 73986 - DNA, 17 bp, Arabidopsis thaliana
ccggatactacgatgga

SEQ ID NO: 73987 - DNA, 17 bp, Arabidopsis thaliana
ccggataggagactgtg

SEQ ID NO: 73988 - DNA, 17 bp, Arabidopsis thaliana
ccggatatccggctccg

SEQ ID NO: 73989 - DNA, 17 bp, Arabidopsis thaliana
ccggatattcgattcgt

SEQ ID NO: 73990 - DNA, 17 bp, Arabidopsis thaliana
ccggatattcgctttgt

SEQ ID NO: 73991 - DNA, 17 bp, Arabidopsis thaliana
ccggatcaacgttttgg

SEQ ID NO: 73992 - DNA, 17 bp, Arabidopsis thaliana
ccggatcagccgataga

SEQ ID NO: 73993 - DNA, 17 bp, Arabidopsis thaliana
ccggatcagccgatagg

SEQ ID NO: 73994 - DNA, 17 bp, Arabidopsis thaliana
ccggatcagccgatagt

SEQ ID NO: 73995 - DNA, 17 bp, Arabidopsis thaliana
ccggatcagtcgataga

SEQ ID NO: 73996 - DNA, 17 bp, Arabidopsis thaliana
ccggatcagtcgatagg

SEQ ID NO: 73997 - DNA, 17 bp, Arabidopsis thaliana
ccggatccacagcggtg

SEQ ID NO: 73998 - DNA, 17 bp, Arabidopsis thaliana
ccggatccgtggtttcg

SEQ ID NO: 73999 - DNA, 17 bp, Arabidopsis thaliana
ccggatggtgcacatga

SEQ ID NO: 74000 - DNA, 17 bp, Arabidopsis thaliana
ccggatggttgtgaaag

SEQ ID NO: 74001 - DNA, 17 bp, Arabidopsis thaliana
ccggatgtagtggcttt

SEQ ID NO: 74002 - DNA, 17 bp, Arabidopsis thaliana
ccggatgtttagaggtt

SEQ ID NO: 74003 - DNA, 17 bp, Arabidopsis thaliana
ccggattaggatggtgt

SEQ ID NO: 74004 - DNA, 17 bp, Arabidopsis thaliana
ccggattcagagagatg

SEQ ID NO: 74005 - DNA, 17 bp, Arabidopsis thaliana
ccggattcgctggagtc

SEQ ID NO: 74006 - DNA, 17 bp, Arabidopsis thaliana
ccggattctcacacgga

SEQ ID NO: 74007 - DNA, 17 bp, Arabidopsis thaliana
ccggattctgacttaga

SEQ ID NO: 74008 - DNA, 17 bp, Arabidopsis thaliana
ccggattgctgctacct

SEQ ID NO: 74009 - DNA, 17 bp, Arabidopsis thaliana
ccggatttcaagtcggc

SEQ ID NO: 74010 - DNA, 17 bp, Arabidopsis thaliana
ccggatttgctgctgga

SEQ ID NO: 74011 - DNA, 17 bp, Arabidopsis thaliana
ccggattttcaagggcc

SEQ ID NO: 74012 - DNA, 17 bp, Arabidopsis thaliana
ccggcaacggcgccatt

SEQ ID NO: 74013 - DNA, 17 bp, Arabidopsis thaliana
ccggcaagaccatcact

SEQ ID NO: 74014 - DNA, 17 bp, Arabidopsis thaliana
ccggcaagccaatcttt

SEQ ID NO: 74015 - DNA, 17 bp, Arabidopsis thaliana
ccggcaagtcctcgtgt

SEQ ID NO: 74016 - DNA, 17 bp, Arabidopsis thaliana
ccggcaagttgaccttg

SEQ ID NO: 74017 - DNA, 17 bp, Arabidopsis thaliana
ccggcaatgactggctt

SEQ ID NO: 74018 - DNA, 17 bp, Arabidopsis thaliana
ccggcaccactccattc

SEQ ID NO: 74019 - DNA, 17 bp, Arabidopsis thaliana
ccggcaccgacaccagc

SEQ ID NO: 74020 - DNA, 17 bp, Arabidopsis thaliana
ccggcacgtctgcctgg

SEQ ID NO: 74021 - DNA, 17 bp, Arabidopsis thaliana
ccggcagagagaaagtt

SEQ ID NO: 74022 - DNA, 17 bp, Arabidopsis thaliana
ccggcagtgatcccgag

SEQ ID NO: 74023 - DNA, 17 bp, Arabidopsis thaliana
ccggcagttccaggggg

SEQ ID NO: 74024 - DNA, 17 bp, Arabidopsis thaliana
ccggcatattcgggata

SEQ ID NO: 74025 - DNA, 17 bp, Arabidopsis thaliana
ccggcatgccacttttt

SEQ ID NO: 74026 - DNA, 17 bp, Arabidopsis thaliana
ccggcatgggattcaac

SEQ ID NO: 74027 - DNA, 17 bp, Arabidopsis thaliana
ccggcattccgtcatcc

SEQ ID NO: 74028 - DNA, 17 bp, Arabidopsis thaliana
ccggcattgcggcttcc

SEQ ID NO: 74029 - DNA, 17 bp, Arabidopsis thaliana
ccggcattttcgtgatt

SEQ ID NO: 74030 - DNA, 17 bp, Arabidopsis thaliana
ccggccaactgggacaa

SEQ ID NO: 74031 - DNA, 17 bp, Arabidopsis thaliana
ccggccaatctttactt

SEQ ID NO: 74032 - DNA, 17 bp, Arabidopsis thaliana
ccggccagattagtttc

SEQ ID NO: 74033 - DNA, 17 bp, Arabidopsis thaliana
ccggccagcagccgcgg

SEQ ID NO: 74034 - DNA, 17 bp, Arabidopsis thaliana
ccggccaggggacggac

SEQ ID NO: 74035 - DNA, 17 bp, Arabidopsis thaliana
ccggccatactcttcag

SEQ ID NO: 74036 - DNA, 17 bp, Arabidopsis thaliana
ccggccatgtggacatt

SEQ ID NO: 74037 - DNA, 17 bp, Arabidopsis thaliana
ccggcccaaaagggaag

SEQ ID NO: 74038 - DNA, 17 bp, Arabidopsis thaliana
ccggccccagacgtagg

SEQ ID NO: 74039 - DNA, 17 bp, Arabidopsis thaliana
ccggcccccatccgctt

SEQ ID NO: 74040 - DNA, 17 bp, Arabidopsis thaliana
ccggcccggggacggac

SEQ ID NO: 74041 - DNA, 17 bp, Arabidopsis thaliana
ccggccctaagttattt

SEQ ID NO: 74042 - DNA, 17 bp, Arabidopsis thaliana
ccggccctacaaatcac

SEQ ID NO: 74043 - DNA, 17 bp, Arabidopsis thaliana
ccggccctgattgagag

SEQ ID NO: 74044 - DNA, 17 bp, Arabidopsis thaliana
ccggccctgggctaaag

SEQ ID NO: 74045 - DNA, 17 bp, Arabidopsis thaliana
ccggccgacacacgact

SEQ ID NO: 74046 - DNA, 17 bp, Arabidopsis thaliana
ccggccgagggacggac

SEQ ID NO: 74047 - DNA, 17 bp, Arabidopsis thaliana
ccggccgagggcacgtc

SEQ ID NO: 74048 - DNA, 17 bp, Arabidopsis thaliana
ccggccgagttcgatcc

SEQ ID NO: 74049 - DNA, 17 bp, Arabidopsis thaliana
ccggccgccgcgatttt

SEQ ID NO: 74050 - DNA, 17 bp, Arabidopsis thaliana
ccggccggccgggggac

SEQ ID NO: 74051 - DNA, 17 bp, Arabidopsis thaliana
ccggccggggaacggac

SEQ ID NO: 74052 - DNA, 17 bp, Arabidopsis thaliana
ccggccggggacggact

SEQ ID NO: 74053 - DNA, 17 bp, Arabidopsis thaliana
ccggccgggggaccgac

SEQ ID NO: 74054 - DNA, 17 bp, Arabidopsis thaliana
ccggccgggggacgatg

SEQ ID NO: 74055 - DNA, 17 bp, Arabidopsis thaliana
ccggccgggggacggac

SEQ ID NO: 74056 - DNA, 17 bp, Arabidopsis thaliana
ccggccgggggactgac

SEQ ID NO: 74057 - DNA, 17 bp, Arabidopsis thaliana
ccggccggttttgttta

SEQ ID NO: 74058 - DNA, 17 bp, Arabidopsis thaliana
ccggccgtcagggcaag

SEQ ID NO: 74059 - DNA, 17 bp, Arabidopsis thaliana
ccggccgtcctggtcga

SEQ ID NO: 74060 - DNA, 17 bp, Arabidopsis thaliana
ccggccgtcggggcaag

SEQ ID NO: 74061 - DNA, 17 bp, Arabidopsis thaliana
ccggcctaacggcgtgc

SEQ ID NO: 74062 - DNA, 17 bp, Arabidopsis thaliana
ccggcctcctcacggat

SEQ ID NO: 74063 - DNA, 17 bp, Arabidopsis thaliana
ccggcctctttggtacc

SEQ ID NO: 74064 - DNA, 17 bp, Arabidopsis thaliana
ccggcctggggacggac

SEQ ID NO: 74065 - DNA, 17 bp, Arabidopsis thaliana
ccggcgaaaatcccgcc

SEQ ID NO: 74066 - DNA, 17 bp, Arabidopsis thaliana
ccggcgaaaatcccggc

SEQ ID NO: 74067 - DNA, 17 bp, Arabidopsis thaliana
ccggcgaagaagttcag

SEQ ID NO: 74068 - DNA, 17 bp, Arabidopsis thaliana
ccggcgaccgaagccac

SEQ ID NO: 74069 - DNA, 17 bp, Arabidopsis thaliana
ccggcgaccgaagcccc

SEQ ID NO: 74070 - DNA, 17 bp, Arabidopsis thaliana
ccggcgacctataagct

SEQ ID NO: 74071 - DNA, 17 bp, Arabidopsis thaliana
ccggcgacctatacccg

SEQ ID NO: 74072 - DNA, 17 bp, Arabidopsis thaliana
ccggcgacctatccggt

SEQ ID NO: 74073 - DNA, 17 bp, Arabidopsis thaliana
ccggcgacggcgacggt

SEQ ID NO: 74074 - DNA, 17 bp, Arabidopsis thaliana
ccggcgacggcggcggt

SEQ ID NO: 74075 - DNA, 17 bp, Arabidopsis thaliana
ccggcgacggtgattgt

SEQ ID NO: 74076 - DNA, 17 bp, Arabidopsis thaliana
ccggcgacgtgggtggt

SEQ ID NO: 74077 - DNA, 17 bp, Arabidopsis thaliana
ccggcgactcataggca

SEQ ID NO: 74078 - DNA, 17 bp, Arabidopsis thaliana
ccggcgacttttccggc

SEQ ID NO: 74079 - DNA, 17 bp, Arabidopsis thaliana
ccggcgactttttcggt

SEQ ID NO: 74080 - DNA, 17 bp, Arabidopsis thaliana
ccggcgagacgtagcga

SEQ ID NO: 74081 - DNA, 17 bp, Arabidopsis thaliana
ccggcgagacgtagcgt

SEQ ID NO: 74082 - DNA, 17 bp, Arabidopsis thaliana
ccggcgagacgtagggt

SEQ ID NO: 74083 - DNA, 17 bp, Arabidopsis thaliana
ccggcgaggcagttccg

SEQ ID NO: 74084 - DNA, 17 bp, Arabidopsis thaliana
ccggcgagggagaatcc

SEQ ID NO: 74085 - DNA, 17 bp, Arabidopsis thaliana
ccggcgatacgctcctg

SEQ ID NO: 74086 - DNA, 17 bp, Arabidopsis thaliana
ccggcgatgcgtcctgg

SEQ ID NO: 74087 - DNA, 17 bp, Arabidopsis thaliana
ccggcgattgatgtagc

SEQ ID NO: 74088 - DNA, 17 bp, Arabidopsis thaliana
ccggcgattgtcaacca

SEQ ID NO: 74089 - DNA, 17 bp, Arabidopsis thaliana
ccggcgcttactttgaa

SEQ ID NO: 74090 - DNA, 17 bp, Arabidopsis thaliana
ccggcggaccaggttgc

SEQ ID NO: 74091 - DNA, 17 bp, Arabidopsis thaliana
ccggcggcgaagtcgga

SEQ ID NO: 74092 - DNA, 17 bp, Arabidopsis thaliana
ccggcggcgaccgatgt

SEQ ID NO: 74093 - DNA, 17 bp, Arabidopsis thaliana
ccggcggctatggtaag

SEQ ID NO: 74094 - DNA, 17 bp, Arabidopsis thaliana
ccggcggtggctggcgg

SEQ ID NO: 74095 - DNA, 17 bp, Arabidopsis thaliana
ccggcggttgatgagga

SEQ ID NO: 74096 - DNA, 17 bp, Arabidopsis thaliana
ccggcgtcaggagtctc

SEQ ID NO: 74097 - DNA, 17 bp, Arabidopsis thaliana
ccggcgtccatattgag

SEQ ID NO: 74098 - DNA, 17 bp, Arabidopsis thaliana
ccggcgtcgggactttt

SEQ ID NO: 74099 - DNA, 17 bp, Arabidopsis thaliana
ccggcgtcggtagggct

SEQ ID NO: 74100 - DNA, 17 bp, Arabidopsis thaliana
ccggcgtctatactgag

SEQ ID NO: 74101 - DNA, 17 bp, Arabidopsis thaliana
ccggcgtgatgatgtgt

SEQ ID NO: 74102 - DNA, 17 bp, Arabidopsis thaliana
ccggcgttgactagtgt

SEQ ID NO: 74103 - DNA, 17 bp, Arabidopsis thaliana
ccggcgttgttagtttc

SEQ ID NO: 74104 - DNA, 17 bp, Arabidopsis thaliana
ccggcgttttcagtgta

SEQ ID NO: 74105 - DNA, 17 bp, Arabidopsis thaliana
ccggcgttttcctactc

SEQ ID NO: 74106 - DNA, 17 bp, Arabidopsis thaliana
ccggctaaatgttcatt

SEQ ID NO: 74107 - DNA, 17 bp, Arabidopsis thaliana
ccggctaaatttgttat

SEQ ID NO: 74108 - DNA, 17 bp, Arabidopsis thaliana
ccggctaactacgtgcc

SEQ ID NO: 74109 - DNA, 17 bp, Arabidopsis thaliana
ccggctaactagctacg

SEQ ID NO: 74110 - DNA, 17 bp, Arabidopsis thaliana
ccggctaactccgtgcc

SEQ ID NO: 74111 - DNA, 17 bp, Arabidopsis thaliana
ccggctaatctggtcag

SEQ ID NO: 74112 - DNA, 17 bp, Arabidopsis thaliana
ccggctaattatccgat

SEQ ID NO: 74113 - DNA, 17 bp, Arabidopsis thaliana
ccggctatctattgatt

SEQ ID NO: 74114 - DNA, 17 bp, Arabidopsis thaliana
ccggctatggagatttg

SEQ ID NO: 74115 - DNA, 17 bp, Arabidopsis thaliana
ccggctcaagccattat

SEQ ID NO: 74116 - DNA, 17 bp, Arabidopsis thaliana
ccggctcagaaacttgt

SEQ ID NO: 74117 - DNA, 17 bp, Arabidopsis thaliana
ccggctcaggccactat

SEQ ID NO: 74118 - DNA, 17 bp, Arabidopsis thaliana
ccggctcctccgtggga

SEQ ID NO: 74119 - DNA, 17 bp, Arabidopsis thaliana
ccggctcgccagtagca

SEQ ID NO: 74120 - DNA, 17 bp, Arabidopsis thaliana
ccggctcgttcttcttc

SEQ ID NO: 74121 - DNA, 17 bp, Arabidopsis thaliana
ccggctctcgctaagac

SEQ ID NO: 74122 - DNA, 17 bp, Arabidopsis thaliana
ccggctctgactattga

SEQ ID NO: 74123 - DNA, 17 bp, Arabidopsis thaliana
ccggctctgactattta

SEQ ID NO: 74124 - DNA, 17 bp, Arabidopsis thaliana
ccggctcttgctggtga

SEQ ID NO: 74125 - DNA, 17 bp, Arabidopsis thaliana
ccggctcttgggaggtg

SEQ ID NO: 74126 - DNA, 17 bp, Arabidopsis thaliana
ccggctgagcaggagta

SEQ ID NO: 74127 - DNA, 17 bp, Arabidopsis thaliana
ccggctgagccgtttcc

SEQ ID NO: 74128 - DNA, 17 bp, Arabidopsis thaliana
ccggctggacaggggcc

SEQ ID NO: 74129 - DNA, 17 bp, Arabidopsis thaliana
ccggctggggactgacc

SEQ ID NO: 74130 - DNA, 17 bp, Arabidopsis thaliana
ccggctgtgttacggtg

SEQ ID NO: 74131 - DNA, 17 bp, Arabidopsis thaliana
ccggcttaactctgttc

SEQ ID NO: 74132 - DNA, 17 bp, Arabidopsis thaliana
ccggcttacacgtgtca

SEQ ID NO: 74133 - DNA, 17 bp, Arabidopsis thaliana
ccggcttagtggtgctg

SEQ ID NO: 74134 - DNA, 17 bp, Arabidopsis thaliana
ccggcttcggtggcgga

SEQ ID NO: 74135 - DNA, 17 bp, Arabidopsis thaliana
ccggcttctatcgtcgt

SEQ ID NO: 74136 - DNA, 17 bp, Arabidopsis thaliana
ccggcttcttacaggga

SEQ ID NO: 74137 - DNA, 17 bp, Arabidopsis thaliana
ccggcttcttagaggga

SEQ ID NO: 74138 - DNA, 17 bp, Arabidopsis thaliana
ccggcttcttagagtga

SEQ ID NO: 74139 - DNA, 17 bp, Arabidopsis thaliana
ccggcttgaagtcatcc

SEQ ID NO: 74140 - DNA, 17 bp, Arabidopsis thaliana
ccggcttgggttgtggt

SEQ ID NO: 74141 - DNA, 17 bp, Arabidopsis thaliana
ccggctttccgattgag

SEQ ID NO: 74142 - DNA, 17 bp, Arabidopsis thaliana
ccggctttgaacaaagc

SEQ ID NO: 74143 - DNA, 17 bp, Arabidopsis thaliana
ccggctttggccgagtg

SEQ ID NO: 74144 - DNA, 17 bp, Arabidopsis thaliana
ccgggaaaacgtccatc

SEQ ID NO: 74145 - DNA, 17 bp, Arabidopsis thaliana
ccgggaaatccccgtgt

SEQ ID NO: 74146 - DNA, 17 bp, Arabidopsis thaliana
ccgggaagccgggttac

SEQ ID NO: 74147 - DNA, 17 bp, Arabidopsis thaliana
ccgggaagcgaggtcga

SEQ ID NO: 74148 - DNA, 17 bp, Arabidopsis thaliana
ccgggaaggacgcacct

SEQ ID NO: 74149 - DNA, 17 bp, Arabidopsis thaliana
ccgggaagtccccgtgt

SEQ ID NO: 74150 - DNA, 17 bp, Arabidopsis thaliana
ccgggaagtcctcctgt

SEQ ID NO: 74151 - DNA, 17 bp, Arabidopsis thaliana
ccgggaagtcctcgagt

SEQ ID NO: 74152 - DNA, 17 bp, Arabidopsis thaliana
ccgggaagtcctcgtat

SEQ ID NO: 74153 - DNA, 17 bp, Arabidopsis thaliana
ccgggaagtcctcgtct

SEQ ID NO: 74154 - DNA, 17 bp, Arabidopsis thaliana
ccgggaagtcctcgtgt

SEQ ID NO: 74155 - DNA, 17 bp, Arabidopsis thaliana
ccgggaagtccttgtgt

SEQ ID NO: 74156 - DNA, 17 bp, Arabidopsis thaliana
ccgggaattcctcgtgt

SEQ ID NO: 74157 - DNA, 17 bp, Arabidopsis thaliana
ccgggacaaagggtcgc

SEQ ID NO: 74158 - DNA, 17 bp, Arabidopsis thaliana
ccgggacctatgttcga

SEQ ID NO: 74159 - DNA, 17 bp, Arabidopsis thaliana
ccgggacgacgattctt

SEQ ID NO: 74160 - DNA, 17 bp, Arabidopsis thaliana
ccgggacgtggcggtgg

SEQ ID NO: 74161 - DNA, 17 bp, Arabidopsis thaliana
ccgggacgtggcggttg

SEQ ID NO: 74162 - DNA, 17 bp, Arabidopsis thaliana
ccgggagactatctttt

SEQ ID NO: 74163 - DNA, 17 bp, Arabidopsis thaliana
ccgggagagattacggg

SEQ ID NO: 74164 - DNA, 17 bp, Arabidopsis thaliana
ccgggagaggattcgta

SEQ ID NO: 74165 - DNA, 17 bp, Arabidopsis thaliana
ccgggagattctgatca

SEQ ID NO: 74166 - DNA, 17 bp, Arabidopsis thaliana
ccgggagatttaccact

SEQ ID NO: 74167 - DNA, 17 bp, Arabidopsis thaliana
ccgggaggacgattggg

SEQ ID NO: 74168 - DNA, 17 bp, Arabidopsis thaliana
ccgggagggtgctatgc

SEQ ID NO: 74169 - DNA, 17 bp, Arabidopsis thaliana
ccgggaggtagtatgcg

SEQ ID NO: 74170 - DNA, 17 bp, Arabidopsis thaliana
ccgggaggtcacccatc

SEQ ID NO: 74171 - DNA, 17 bp, Arabidopsis thaliana
ccgggaggtcctcgtgt

SEQ ID NO: 74172 - DNA, 17 bp, Arabidopsis thaliana
ccgggatacaagcccgg

SEQ ID NO: 74173 - DNA, 17 bp, Arabidopsis thaliana
ccgggatagctcagttg

SEQ ID NO: 74174 - DNA, 17 bp, Arabidopsis thaliana
ccgggatcaagctacct

SEQ ID NO: 74175 - DNA, 17 bp, Arabidopsis thaliana
ccgggatgaagacaaga

SEQ ID NO: 74176 - DNA, 17 bp, Arabidopsis thaliana
ccgggatgggtcggccg

SEQ ID NO: 74177 - DNA, 17 bp, Arabidopsis thaliana
ccgggatgtagttgcca

SEQ ID NO: 74178 - DNA, 17 bp, Arabidopsis thaliana
ccgggatgttgcttata

SEQ ID NO: 74179 - DNA, 17 bp, Arabidopsis thaliana
ccgggattacgccatta

SEQ ID NO: 74180 - DNA, 17 bp, Arabidopsis thaliana
ccgggcacgtctgcctg

SEQ ID NO: 74181 - DNA, 17 bp, Arabidopsis thaliana
ccgggcagcggccgtcg

SEQ ID NO: 74182 - DNA, 17 bp, Arabidopsis thaliana
ccgggcataagcatacg

SEQ ID NO: 74183 - DNA, 17 bp, Arabidopsis thaliana
ccgggcatttgagattt

SEQ ID NO: 74184 - DNA, 17 bp, Arabidopsis thaliana
ccgggcattttcgtgat

SEQ ID NO: 74185 - DNA, 17 bp, Arabidopsis thaliana
ccgggccttgtacacat

SEQ ID NO: 74186 - DNA, 17 bp, Arabidopsis thaliana
ccgggcgaagccatatc

SEQ ID NO: 74187 - DNA, 17 bp, Arabidopsis thaliana
ccgggcggagaacacgt

SEQ ID NO: 74188 - DNA, 17 bp, Arabidopsis thaliana
ccgggcggaggacattg

SEQ ID NO: 74189 - DNA, 17 bp, Arabidopsis thaliana
ccgggcgtcgaacagtc

SEQ ID NO: 74190 - DNA, 17 bp, Arabidopsis thaliana
ccgggcgtcggcctgtg

SEQ ID NO: 74191 - DNA, 17 bp, Arabidopsis thaliana
ccgggctagaagcgacg

SEQ ID NO: 74192 - DNA, 17 bp, Arabidopsis thaliana
ccgggctgcccagtcca

SEQ ID NO: 74193 - DNA, 17 bp, Arabidopsis thaliana
ccgggcttaggccgcca

SEQ ID NO: 74194 - DNA, 17 bp, Arabidopsis thaliana
ccgggcttgggcttggg

SEQ ID NO: 74195 - DNA, 17 bp, Arabidopsis thaliana
ccgggcttgtcccttcg

SEQ ID NO: 74196 - DNA, 17 bp, Arabidopsis thaliana
ccgggctttgatacgct

SEQ ID NO: 74197 - DNA, 17 bp, Arabidopsis thaliana
ccgggcttttgatacgc

SEQ ID NO: 74198 - DNA, 17 bp, Arabidopsis thaliana
ccggggaaaatcacgag

SEQ ID NO: 74199 - DNA, 17 bp, Arabidopsis thaliana
ccggggaaatttaccac

SEQ ID NO: 74200 - DNA, 17 bp, Arabidopsis thaliana
ccggggacactgaggat

SEQ ID NO: 74201 - DNA, 17 bp, Arabidopsis thaliana
ccggggacggactggga

SEQ ID NO: 74202 - DNA, 17 bp, Arabidopsis thaliana
ccggggacgtctgcctg

SEQ ID NO: 74203 - DNA, 17 bp, Arabidopsis thaliana
ccggggagattacgggc

SEQ ID NO: 74204 - DNA, 17 bp, Arabidopsis thaliana
ccggggaggactgtctg

SEQ ID NO: 74205 - DNA, 17 bp, Arabidopsis thaliana
ccggggaggggtgcctc

SEQ ID NO: 74206 - DNA, 17 bp, Arabidopsis thaliana
ccggggagtcccggcaa

SEQ ID NO: 74207 - DNA, 17 bp, Arabidopsis thaliana
ccggggataacaggctg

SEQ ID NO: 74208 - DNA, 17 bp, Arabidopsis thaliana
ccggggccctgtacaca

SEQ ID NO: 74209 - DNA, 17 bp, Arabidopsis thaliana
ccggggcctgtgtttcg

SEQ ID NO: 74210 - DNA, 17 bp, Arabidopsis thaliana
ccggggctctccgggag

SEQ ID NO: 74211 - DNA, 17 bp, Arabidopsis thaliana
ccgggggaccgagtgcc

SEQ ID NO: 74212 - DNA, 17 bp, Arabidopsis thaliana
ccgggggacggactggg

SEQ ID NO: 74213 - DNA, 17 bp, Arabidopsis thaliana
ccgggggagggactggg

SEQ ID NO: 74214 - DNA, 17 bp, Arabidopsis thaliana
ccggggggagtatggtc

SEQ ID NO: 74215 - DNA, 17 bp, Arabidopsis thaliana
ccgggggtacgcagacc

SEQ ID NO: 74216 - DNA, 17 bp, Arabidopsis thaliana
ccgggggtcccagttcc

SEQ ID NO: 74217 - DNA, 17 bp, Arabidopsis thaliana
ccgggggttcgaatccc

SEQ ID NO: 74218 - DNA, 17 bp, Arabidopsis thaliana
ccgggggttgaactggg

SEQ ID NO: 74219 - DNA, 17 bp, Arabidopsis thaliana
ccggggtctgtgttgca

SEQ ID NO: 74220 - DNA, 17 bp, Arabidopsis thaliana
ccggggtcttttgtttt

SEQ ID NO: 74221 - DNA, 17 bp, Arabidopsis thaliana
ccggggtgtggaggctc

SEQ ID NO: 74222 - DNA, 17 bp, Arabidopsis thaliana
ccggggttagatttttg

SEQ ID NO: 74223 - DNA, 17 bp, Arabidopsis thaliana
ccggggttcgtttcccc

SEQ ID NO: 74224 - DNA, 17 bp, Arabidopsis thaliana
ccggggttctagcttcg

SEQ ID NO: 74225 - DNA, 17 bp, Arabidopsis thaliana
ccggggttgaagtttgg

SEQ ID NO: 74226 - DNA, 17 bp, Arabidopsis thaliana
ccggggtttgcaacggc

SEQ ID NO: 74227 - DNA, 17 bp, Arabidopsis thaliana
ccgggtacaactatgca

SEQ ID NO: 74228 - DNA, 17 bp, Arabidopsis thaliana
ccgggtacgagattata

SEQ ID NO: 74229 - DNA, 17 bp, Arabidopsis thaliana
ccgggtacgggagaagt

SEQ ID NO: 74230 - DNA, 17 bp, Arabidopsis thaliana
ccgggtatagctcagtt

SEQ ID NO: 74231 - DNA, 17 bp, Arabidopsis thaliana
ccgggtcacgggttaat

SEQ ID NO: 74232 - DNA, 17 bp, Arabidopsis thaliana
ccgggtccgaggattcg

SEQ ID NO: 74233 - DNA, 17 bp, Arabidopsis thaliana
ccgggtccgaggatttg

SEQ ID NO: 74234 - DNA, 17 bp, Arabidopsis thaliana
ccgggtccgcctttggt

SEQ ID NO: 74235 - DNA, 17 bp, Arabidopsis thaliana
ccgggtccggtataggt

SEQ ID NO: 74236 - DNA, 17 bp, Arabidopsis thaliana
ccgggtccgttttttcg

SEQ ID NO: 74237 - DNA, 17 bp, Arabidopsis thaliana
ccgggtcgattcccggc

SEQ ID NO: 74238 - DNA, 17 bp, Arabidopsis thaliana
ccgggtgcaccgccgac

SEQ ID NO: 74239 - DNA, 17 bp, Arabidopsis thaliana
ccgggtgccccacggtg

SEQ ID NO: 74240 - DNA, 17 bp, Arabidopsis thaliana
ccgggtgccgtagccaa

SEQ ID NO: 74241 - DNA, 17 bp, Arabidopsis thaliana
ccgggtgcgatgtacgg

SEQ ID NO: 74242 - DNA, 17 bp, Arabidopsis thaliana
ccgggtggtcacagatc

SEQ ID NO: 74243 - DNA, 17 bp, Arabidopsis thaliana
ccgggttacggtgccca

SEQ ID NO: 74244 - DNA, 17 bp, Arabidopsis thaliana
ccgggttactcgaccag

SEQ ID NO: 74245 - DNA, 17 bp, Arabidopsis thaliana
ccgggttcatttcccgg

SEQ ID NO: 74246 - DNA, 17 bp, Arabidopsis thaliana
ccgggttccccggcaac

SEQ ID NO: 74247 - DNA, 17 bp, Arabidopsis thaliana
ccgggttcgactcccgg

SEQ ID NO: 74248 - DNA, 17 bp, Arabidopsis thaliana
ccgggttcgagtcccgg

SEQ ID NO: 74249 - DNA, 17 bp, Arabidopsis thaliana
ccgggttcgatccccgc

SEQ ID NO: 74250 - DNA, 17 bp, Arabidopsis thaliana
ccgggttcgatccccgg

SEQ ID NO: 74251 - DNA, 17 bp, Arabidopsis thaliana
ccgggttcgattcccgg

SEQ ID NO: 74252 - DNA, 17 bp, Arabidopsis thaliana
ccgggttcgattccctg

SEQ ID NO: 74253 - DNA, 17 bp, Arabidopsis thaliana
ccgggttcgattccggc

SEQ ID NO: 74254 - DNA, 17 bp, Arabidopsis thaliana
ccgggttcgattcctgg

SEQ ID NO: 74255 - DNA, 17 bp, Arabidopsis thaliana
ccgggttcggctcccgg

SEQ ID NO: 74256 - DNA, 17 bp, Arabidopsis thaliana
ccgggttcgggtcccgg

SEQ ID NO: 74257 - DNA, 17 bp, Arabidopsis thaliana
ccgggttcgggttccgg

SEQ ID NO: 74258 - DNA, 17 bp, Arabidopsis thaliana
ccgggttcgggttgggc

SEQ ID NO: 74259 - DNA, 17 bp, Arabidopsis thaliana
ccgggttcggtccccgg

SEQ ID NO: 74260 - DNA, 17 bp, Arabidopsis thaliana
ccgggttcggttcccgg

SEQ ID NO: 74261 - DNA, 17 bp, Arabidopsis thaliana
ccgggttcgtcccggca

SEQ ID NO: 74262 - DNA, 17 bp, Arabidopsis thaliana
ccgggttcgttccccgg

SEQ ID NO: 74263 - DNA, 17 bp, Arabidopsis thaliana
ccgggttcgtttcccgg

SEQ ID NO: 74264 - DNA, 17 bp, Arabidopsis thaliana
ccgggttcgtttccctg

SEQ ID NO: 74265 - DNA, 17 bp, Arabidopsis thaliana
ccgggttcgtttccggg

SEQ ID NO: 74266 - DNA, 17 bp, Arabidopsis thaliana
ccgggttcgtttcctgc

SEQ ID NO: 74267 - DNA, 17 bp, Arabidopsis thaliana
ccgggttctggttaagt

SEQ ID NO: 74268 - DNA, 17 bp, Arabidopsis thaliana
ccgggttgagtcccggc

SEQ ID NO: 74269 - DNA, 17 bp, Arabidopsis thaliana
ccgggttgcagtgattc

SEQ ID NO: 74270 - DNA, 17 bp, Arabidopsis thaliana
ccgggttggaccacggg

SEQ ID NO: 74271 - DNA, 17 bp, Arabidopsis thaliana
ccgggttggactacggg

SEQ ID NO: 74272 - DNA, 17 bp, Arabidopsis thaliana
ccgggttgttggcttgt

SEQ ID NO: 74273 - DNA, 17 bp, Arabidopsis thaliana
ccgggtttacgtttttt

SEQ ID NO: 74274 - DNA, 17 bp, Arabidopsis thaliana
ccgggtttcccggctgg

SEQ ID NO: 74275 - DNA, 17 bp, Arabidopsis thaliana
ccgggtttccctgcttc

SEQ ID NO: 74276 - DNA, 17 bp, Arabidopsis thaliana
ccgggtttggcgggacg

SEQ ID NO: 74277 - DNA, 17 bp, Arabidopsis thaliana
ccgggtttttttggccc

SEQ ID NO: 74278 - DNA, 17 bp, Arabidopsis thaliana
ccggtaaaagtgcattc

SEQ ID NO: 74279 - DNA, 17 bp, Arabidopsis thaliana
ccggtaagcgagtgacc

SEQ ID NO: 74280 - DNA, 17 bp, Arabidopsis thaliana
ccggtaagtcctcgtgt

SEQ ID NO: 74281 - DNA, 17 bp, Arabidopsis thaliana
ccggtaatccctcaggc

SEQ ID NO: 74282 - DNA, 17 bp, Arabidopsis thaliana
ccggtagataacgcatc

SEQ ID NO: 74283 - DNA, 17 bp, Arabidopsis thaliana
ccggtagatggatcgat

SEQ ID NO: 74284 - DNA, 17 bp, Arabidopsis thaliana
ccggtagattctgtaag

SEQ ID NO: 74285 - DNA, 17 bp, Arabidopsis thaliana
ccggtaggattctccag

SEQ ID NO: 74286 - DNA, 17 bp, Arabidopsis thaliana
ccggtatccctacatgg

SEQ ID NO: 74287 - DNA, 17 bp, Arabidopsis thaliana
ccggtatctttggactg

SEQ ID NO: 74288 - DNA, 17 bp, Arabidopsis thaliana
ccggtattggcctaaaa

SEQ ID NO: 74289 - DNA, 17 bp, Arabidopsis thaliana
ccggtcaaaccggttaa

SEQ ID NO: 74290 - DNA, 17 bp, Arabidopsis thaliana
ccggtcagccatacggc

SEQ ID NO: 74291 - DNA, 17 bp, Arabidopsis thaliana
ccggtccaacagctgtg

SEQ ID NO: 74292 - DNA, 17 bp, Arabidopsis thaliana
ccggtccgcccttggtg

SEQ ID NO: 74293 - DNA, 17 bp, Arabidopsis thaliana
ccggtccgccgatcgat

SEQ ID NO: 74294 - DNA, 17 bp, Arabidopsis thaliana
ccggtccgccttggtgt

SEQ ID NO: 74295 - DNA, 17 bp, Arabidopsis thaliana
ccggtccgcctttgatg

SEQ ID NO: 74296 - DNA, 17 bp, Arabidopsis thaliana
ccggtccgcctttggtg

SEQ ID NO: 74297 - DNA, 17 bp, Arabidopsis thaliana
ccggtccgccttttgtg

SEQ ID NO: 74298 - DNA, 17 bp, Arabidopsis thaliana
ccggtccgtcgctgagg

SEQ ID NO: 74299 - DNA, 17 bp, Arabidopsis thaliana
ccggtccgtctcaagca

SEQ ID NO: 74300 - DNA, 17 bp, Arabidopsis thaliana
ccggtccgtctttggtg

SEQ ID NO: 74301 - DNA, 17 bp, Arabidopsis thaliana
ccggtcctgccaaaccc

SEQ ID NO: 74302 - DNA, 17 bp, Arabidopsis thaliana
ccggtcctgtgaccatg

SEQ ID NO: 74303 - DNA, 17 bp, Arabidopsis thaliana
ccggtcgacgatttcaa

SEQ ID NO: 74304 - DNA, 17 bp, Arabidopsis thaliana
ccggtcgagtgatggtg

SEQ ID NO: 74305 - DNA, 17 bp, Arabidopsis thaliana
ccggtcgatgaagtctc

SEQ ID NO: 74306 - DNA, 17 bp, Arabidopsis thaliana
ccggtcgccctacgcta

SEQ ID NO: 74307 - DNA, 17 bp, Arabidopsis thaliana
ccggtcggcggaagaat

SEQ ID NO: 74308 - DNA, 17 bp, Arabidopsis thaliana
ccggtcgtactcataac

SEQ ID NO: 74309 - DNA, 17 bp, Arabidopsis thaliana
ccggtcgtcggggcaag

SEQ ID NO: 74310 - DNA, 17 bp, Arabidopsis thaliana
ccggtctatttgtcacc

SEQ ID NO: 74311 - DNA, 17 bp, Arabidopsis thaliana
ccggtctcagttcggat

SEQ ID NO: 74312 - DNA, 17 bp, Arabidopsis thaliana
ccggtctccatccacag

SEQ ID NO: 74313 - DNA, 17 bp, Arabidopsis thaliana
ccggtctctaatctact

SEQ ID NO: 74314 - DNA, 17 bp, Arabidopsis thaliana
ccggtctgcctgggtgt

SEQ ID NO: 74315 - DNA, 17 bp, Arabidopsis thaliana
ccggtcttatgggaaac

SEQ ID NO: 74316 - DNA, 17 bp, Arabidopsis thaliana
ccggtgaaagcgtggcc

SEQ ID NO: 74317 - DNA, 17 bp, Arabidopsis thaliana
ccggtgaaagtttgcat

SEQ ID NO: 74318 - DNA, 17 bp, Arabidopsis thaliana
ccggtgaacggcggccg

SEQ ID NO: 74319 - DNA, 17 bp, Arabidopsis thaliana
ccggtgaacttctaacc

SEQ ID NO: 74320 - DNA, 17 bp, Arabidopsis thaliana
ccggtgaagtgttagga

SEQ ID NO: 74321 - DNA, 17 bp, Arabidopsis thaliana
ccggtgaagtgttcgaa

SEQ ID NO: 74322 - DNA, 17 bp, Arabidopsis thaliana
ccggtgaagtgttcgag

SEQ ID NO: 74323 - DNA, 17 bp, Arabidopsis thaliana
ccggtgaagtgttcgca

SEQ ID NO: 74324 - DNA, 17 bp, Arabidopsis thaliana
ccggtgaagtgttcgga

SEQ ID NO: 74325 - DNA, 17 bp, Arabidopsis thaliana
ccggtgaagtgttcggc

SEQ ID NO: 74326 - DNA, 17 bp, Arabidopsis thaliana
ccggtgaagtgttcggg

SEQ ID NO: 74327 - DNA, 17 bp, Arabidopsis thaliana
ccggtgaagtgttcgta

SEQ ID NO: 74328 - DNA, 17 bp, Arabidopsis thaliana
ccggtgaagtgttcgtt

SEQ ID NO: 74329 - DNA, 17 bp, Arabidopsis thaliana
ccggtgaagttcggatc

SEQ ID NO: 74330 - DNA, 17 bp, Arabidopsis thaliana
ccggtgaagttttcgga

SEQ ID NO: 74331 - DNA, 17 bp, Arabidopsis thaliana
ccggtgaccgtccctaa

SEQ ID NO: 74332 - DNA, 17 bp, Arabidopsis thaliana
ccggtgacggtgaactg

SEQ ID NO: 74333 - DNA, 17 bp, Arabidopsis thaliana
ccggtgactatgttcgc

SEQ ID NO: 74334 - DNA, 17 bp, Arabidopsis thaliana
ccggtgagcattttcat

SEQ ID NO: 74335 - DNA, 17 bp, Arabidopsis thaliana
ccggtgagcttgtgaac

SEQ ID NO: 74336 - DNA, 17 bp, Arabidopsis thaliana
ccggtgagttccccggt

SEQ ID NO: 74337 - DNA, 17 bp, Arabidopsis thaliana
ccggtgcaccgccgacc

SEQ ID NO: 74338 - DNA, 17 bp, Arabidopsis thaliana
ccggtgcattggtcggc

SEQ ID NO: 74339 - DNA, 17 bp, Arabidopsis thaliana
ccggtgcgcccccggcg

SEQ ID NO: 74340 - DNA, 17 bp, Arabidopsis thaliana
ccggtgctgaccagatc

SEQ ID NO: 74341 - DNA, 17 bp, Arabidopsis thaliana
ccggtggaagggccgtc

SEQ ID NO: 74342 - DNA, 17 bp, Arabidopsis thaliana
ccggtggacgcctcaga

SEQ ID NO: 74343 - DNA, 17 bp, Arabidopsis thaliana
ccggtggatggaatcct

SEQ ID NO: 74344 - DNA, 17 bp, Arabidopsis thaliana
ccggtgtataaattgca

SEQ ID NO: 74345 - DNA, 17 bp, Arabidopsis thaliana
ccggtgtatagacggtt

SEQ ID NO: 74346 - DNA, 17 bp, Arabidopsis thaliana
ccggtgtcagatgtggc

SEQ ID NO: 74347 - DNA, 17 bp, Arabidopsis thaliana
ccggtgtctacggcata

SEQ ID NO: 74348 - DNA, 17 bp, Arabidopsis thaliana
ccggtgtgatgatgtgt

SEQ ID NO: 74349 - DNA, 17 bp, Arabidopsis thaliana
ccggtgtgggcgttaga

SEQ ID NO: 74350 - DNA, 17 bp, Arabidopsis thaliana
ccggtgtgtctctgata

SEQ ID NO: 74351 - DNA, 17 bp, Arabidopsis thaliana
ccggttaacccgcgatt

SEQ ID NO: 74352 - DNA, 17 bp, Arabidopsis thaliana
ccggttaagagtgtttg

SEQ ID NO: 74353 - DNA, 17 bp, Arabidopsis thaliana
ccggttacatcatgtgg

SEQ ID NO: 74354 - DNA, 17 bp, Arabidopsis thaliana
ccggttacggctccgcc

SEQ ID NO: 74355 - DNA, 17 bp, Arabidopsis thaliana
ccggttacggtaagatt

SEQ ID NO: 74356 - DNA, 17 bp, Arabidopsis thaliana
ccggttagcagattaat

SEQ ID NO: 74357 - DNA, 17 bp, Arabidopsis thaliana
ccggttaggattgtcag

SEQ ID NO: 74358 - DNA, 17 bp, Arabidopsis thaliana
ccggttaggattgtcgg

SEQ ID NO: 74359 - DNA, 17 bp, Arabidopsis thaliana
ccggttaggattgtgtt

SEQ ID NO: 74360 - DNA, 17 bp, Arabidopsis thaliana
ccggttatcttgatggc

SEQ ID NO: 74361 - DNA, 17 bp, Arabidopsis thaliana
ccggttatggagtcctt

SEQ ID NO: 74362 - DNA, 17 bp, Arabidopsis thaliana
ccggttatgtgcacaat

SEQ ID NO: 74363 - DNA, 17 bp, Arabidopsis thaliana
ccggttcaagccggatt

SEQ ID NO: 74364 - DNA, 17 bp, Arabidopsis thaliana
ccggttcaatcaccatt

SEQ ID NO: 74365 - DNA, 17 bp, Arabidopsis thaliana
ccggttcaccaggtcat

SEQ ID NO: 74366 - DNA, 17 bp, Arabidopsis thaliana
ccggttcaccgggtcac

SEQ ID NO: 74367 - DNA, 17 bp, Arabidopsis thaliana
ccggttcacggtgttac

SEQ ID NO: 74368 - DNA, 17 bp, Arabidopsis thaliana
ccggttcactgtctggg

SEQ ID NO: 74369 - DNA, 17 bp, Arabidopsis thaliana
ccggttccgttcgtttt

SEQ ID NO: 74370 - DNA, 17 bp, Arabidopsis thaliana
ccggttcgaaccagggc

SEQ ID NO: 74371 - DNA, 17 bp, Arabidopsis thaliana
ccggttcgaacccgggc

SEQ ID NO: 74372 - DNA, 17 bp, Arabidopsis thaliana
ccggttcgaacctgggc

SEQ ID NO: 74373 - DNA, 17 bp, Arabidopsis thaliana
ccggttcgaatccggtt

SEQ ID NO: 74374 - DNA, 17 bp, Arabidopsis thaliana
ccggttcgagccccacg

SEQ ID NO: 74375 - DNA, 17 bp, Arabidopsis thaliana
ccggttcgatcttgtgc

SEQ ID NO: 74376 - DNA, 17 bp, Arabidopsis thaliana
ccggttcggtccccagt

SEQ ID NO: 74377 - DNA, 17 bp, Arabidopsis thaliana
ccggttcgtacccgggc

SEQ ID NO: 74378 - DNA, 17 bp, Arabidopsis thaliana
ccggttcttcggttgtg

SEQ ID NO: 74379 - DNA, 17 bp, Arabidopsis thaliana
ccggttctttgcgatta

SEQ ID NO: 74380 - DNA, 17 bp, Arabidopsis thaliana
ccggttgacccgtgtcc

SEQ ID NO: 74381 - DNA, 17 bp, Arabidopsis thaliana
ccggttgatgtgatgaa

SEQ ID NO: 74382 - DNA, 17 bp, Arabidopsis thaliana
ccggttgcggttctagt

SEQ ID NO: 74383 - DNA, 17 bp, Arabidopsis thaliana
ccggttgggtctatgac

SEQ ID NO: 74384 - DNA, 17 bp, Arabidopsis thaliana
ccggttgtaggctgaat

SEQ ID NO: 74385 - DNA, 17 bp, Arabidopsis thaliana
ccggttgttagcgattg

SEQ ID NO: 74386 - DNA, 17 bp, Arabidopsis thaliana
ccggtttaactctgttc

SEQ ID NO: 74387 - DNA, 17 bp, Arabidopsis thaliana
ccggtttacagggccac

SEQ ID NO: 74388 - DNA, 17 bp, Arabidopsis thaliana
ccggtttagtgattccg

SEQ ID NO: 74389 - DNA, 17 bp, Arabidopsis thaliana
ccggtttagttgaagat

SEQ ID NO: 74390 - DNA, 17 bp, Arabidopsis thaliana
ccggtttcattcaagga

SEQ ID NO: 74391 - DNA, 17 bp, Arabidopsis thaliana
ccggtttcttccatctt

SEQ ID NO: 74392 - DNA, 17 bp, Arabidopsis thaliana
ccggtttgacttgatac

SEQ ID NO: 74393 - DNA, 17 bp, Arabidopsis thaliana
ccggtttgaggattcgt

SEQ ID NO: 74394 - DNA, 17 bp, Arabidopsis thaliana
ccggtttgattaagtta

SEQ ID NO: 74395 - DNA, 17 bp, Arabidopsis thaliana
ccggttttatcgacttt

SEQ ID NO: 74396 - DNA, 17 bp, Arabidopsis thaliana
ccggttttgttgcatac

SEQ ID NO: 74397 - DNA, 17 bp, Arabidopsis thaliana
ccgtaaacccccaggcc

SEQ ID NO: 74398 - DNA, 17 bp, Arabidopsis thaliana
ccgtaaacgaacgagac

SEQ ID NO: 74399 - DNA, 17 bp, Arabidopsis thaliana
ccgtaaacgatggataa

SEQ ID NO: 74400 - DNA, 17 bp, Arabidopsis thaliana
ccgtaaacgatggatac

SEQ ID NO: 74401 - DNA, 17 bp, Arabidopsis thaliana
ccgtaaactaactatct

SEQ ID NO: 74402 - DNA, 17 bp, Arabidopsis thaliana
ccgtaacaccaccgcct

SEQ ID NO: 74403 - DNA, 17 bp, Arabidopsis thaliana
ccgtaacagaacaggtg

SEQ ID NO: 74404 - DNA, 17 bp, Arabidopsis thaliana
ccgtaacagtgctgtaa

SEQ ID NO: 74405 - DNA, 17 bp, Arabidopsis thaliana
ccgtaactcacaaccgc

SEQ ID NO: 74406 - DNA, 17 bp, Arabidopsis thaliana
ccgtaacttcgggaaaa

SEQ ID NO: 74407 - DNA, 17 bp, Arabidopsis thaliana
ccgtaacttcgggagaa

SEQ ID NO: 74408 - DNA, 17 bp, Arabidopsis thaliana
ccgtaacttcgggagga

SEQ ID NO: 74409 - DNA, 17 bp, Arabidopsis thaliana
ccgtaagaaaaccctag

SEQ ID NO: 74410 - DNA, 17 bp, Arabidopsis thaliana
ccgtaagcggtgttcta

SEQ ID NO: 74411 - DNA, 17 bp, Arabidopsis thaliana
ccgtaagctcccaagca

SEQ ID NO: 74412 - DNA, 17 bp, Arabidopsis thaliana
ccgtaaggtgttggggt

SEQ ID NO: 74413 - DNA, 17 bp, Arabidopsis thaliana
ccgtaaggtgttgggtt

SEQ ID NO: 74414 - DNA, 17 bp, Arabidopsis thaliana
ccgtaatcaaccggccc

SEQ ID NO: 74415 - DNA, 17 bp, Arabidopsis thaliana
ccgtaatccctccaggc

SEQ ID NO: 74416 - DNA, 17 bp, Arabidopsis thaliana
ccgtaatccgcgtccgg

SEQ ID NO: 74417 - DNA, 17 bp, Arabidopsis thaliana
ccgtaatccgcgtccgt

SEQ ID NO: 74418 - DNA, 17 bp, Arabidopsis thaliana
ccgtaatccgcgtcggg

SEQ ID NO: 74419 - DNA, 17 bp, Arabidopsis thaliana
ccgtaatcctcccaggc

SEQ ID NO: 74420 - DNA, 17 bp, Arabidopsis thaliana
ccgtaatcgctctgata

SEQ ID NO: 74421 - DNA, 17 bp, Arabidopsis thaliana
ccgtaatctctcaggtc

SEQ ID NO: 74422 - DNA, 17 bp, Arabidopsis thaliana
ccgtaatgtgcggttga

SEQ ID NO: 74423 - DNA, 17 bp, Arabidopsis thaliana
ccgtaattaggcacttc

SEQ ID NO: 74424 - DNA, 17 bp, Arabidopsis thaliana
ccgtacaccagctgtga

SEQ ID NO: 74425 - DNA, 17 bp, Arabidopsis thaliana
ccgtacacctgcccttc

SEQ ID NO: 74426 - DNA, 17 bp, Arabidopsis thaliana
ccgtaccaggaggtttt

SEQ ID NO: 74427 - DNA, 17 bp, Arabidopsis thaliana
ccgtacgaacacgccca

SEQ ID NO: 74428 - DNA, 17 bp, Arabidopsis thaliana
ccgtactactcggctac

SEQ ID NO: 74429 - DNA, 17 bp, Arabidopsis thaliana
ccgtactaggaaagaca

SEQ ID NO: 74430 - DNA, 17 bp, Arabidopsis thaliana
ccgtactggaaggtgcg

SEQ ID NO: 74431 - DNA, 17 bp, Arabidopsis thaliana
ccgtactggtaggtgcg

SEQ ID NO: 74432 - DNA, 17 bp, Arabidopsis thaliana
ccgtactttgtcgggcc

SEQ ID NO: 74433 - DNA, 17 bp, Arabidopsis thaliana
ccgtagaccaggtcact

SEQ ID NO: 74434 - DNA, 17 bp, Arabidopsis thaliana
ccgtagacccaaaggcg

SEQ ID NO: 74435 - DNA, 17 bp, Arabidopsis thaliana
ccgtagccaggttcgac

SEQ ID NO: 74436 - DNA, 17 bp, Arabidopsis thaliana
ccgtagcggcggaggct

SEQ ID NO: 74437 - DNA, 17 bp, Arabidopsis thaliana
ccgtaggcttacaagat

SEQ ID NO: 74438 - DNA, 17 bp, Arabidopsis thaliana
ccgtaggtgaacctacg

SEQ ID NO: 74439 - DNA, 17 bp, Arabidopsis thaliana
ccgtaggtgaacctgcg

SEQ ID NO: 74440 - DNA, 17 bp, Arabidopsis thaliana
ccgtagtgggttgcccg

SEQ ID NO: 74441 - DNA, 17 bp, Arabidopsis thaliana
ccgtatcagtaatggtg

SEQ ID NO: 74442 - DNA, 17 bp, Arabidopsis thaliana
ccgtatcagttgtgctt

SEQ ID NO: 74443 - DNA, 17 bp, Arabidopsis thaliana
ccgtatccaagctccct

SEQ ID NO: 74444 - DNA, 17 bp, Arabidopsis thaliana
ccgtatccaagctccgt

SEQ ID NO: 74445 - DNA, 17 bp, Arabidopsis thaliana
ccgtatcgcagtgacta

SEQ ID NO: 74446 - DNA, 17 bp, Arabidopsis thaliana
ccgtatctaacgcgtta

SEQ ID NO: 74447 - DNA, 17 bp, Arabidopsis thaliana
ccgtatcttagtggttg

SEQ ID NO: 74448 - DNA, 17 bp, Arabidopsis thaliana
ccgtatcttggccttgt

SEQ ID NO: 74449 - DNA, 17 bp, Arabidopsis thaliana
ccgtatgaagagtttgc

SEQ ID NO: 74450 - DNA, 17 bp, Arabidopsis thaliana
ccgtatgactatagccc

SEQ ID NO: 74451 - DNA, 17 bp, Arabidopsis thaliana
ccgtatggacaatgggc

SEQ ID NO: 74452 - DNA, 17 bp, Arabidopsis thaliana
ccgtattatcgcacccg

SEQ ID NO: 74453 - DNA, 17 bp, Arabidopsis thaliana
ccgtattggtgccgttg

SEQ ID NO: 74454 - DNA, 17 bp, Arabidopsis thaliana
ccgtcaaccgccacgtc

SEQ ID NO: 74455 - DNA, 17 bp, Arabidopsis thaliana
ccgtcaagtctcgatct

SEQ ID NO: 74456 - DNA, 17 bp, Arabidopsis thaliana
ccgtcaatgtctgagat

SEQ ID NO: 74457 - DNA, 17 bp, Arabidopsis thaliana
ccgtcaattcaatgtag

SEQ ID NO: 74458 - DNA, 17 bp, Arabidopsis thaliana
ccgtcacacggaatcga

SEQ ID NO: 74459 - DNA, 17 bp, Arabidopsis thaliana
ccgtcacactatgggag

SEQ ID NO: 74460 - DNA, 17 bp, Arabidopsis thaliana
ccgtcacattatgggag

SEQ ID NO: 74461 - DNA, 17 bp, Arabidopsis thaliana
ccgtcacctctctttct

SEQ ID NO: 74462 - DNA, 17 bp, Arabidopsis thaliana
ccgtcactcgaaccggc

SEQ ID NO: 74463 - DNA, 17 bp, Arabidopsis thaliana
ccgtcactgatggagat

SEQ ID NO: 74464 - DNA, 17 bp, Arabidopsis thaliana
ccgtcactgggagatgt

SEQ ID NO: 74465 - DNA, 17 bp, Arabidopsis thaliana
ccgtcagacatgtgggt

SEQ ID NO: 74466 - DNA, 17 bp, Arabidopsis thaliana
ccgtcagaggaaaggaa

SEQ ID NO: 74467 - DNA, 17 bp, Arabidopsis thaliana
ccgtcagattcccccac

SEQ ID NO: 74468 - DNA, 17 bp, Arabidopsis thaliana
ccgtcagcagtcaagtc

SEQ ID NO: 74469 - DNA, 17 bp, Arabidopsis thaliana
ccgtcagccctttgtcg

SEQ ID NO: 74470 - DNA, 17 bp, Arabidopsis thaliana
ccgtcagccgatagggt

SEQ ID NO: 74471 - DNA, 17 bp, Arabidopsis thaliana
ccgtcagcggtctaatc

SEQ ID NO: 74472 - DNA, 17 bp, Arabidopsis thaliana
ccgtcagctcctgttgc

SEQ ID NO: 74473 - DNA, 17 bp, Arabidopsis thaliana
ccgtcagctgcatggat

SEQ ID NO: 74474 - DNA, 17 bp, Arabidopsis thaliana
ccgtcagcttgtgatgg

SEQ ID NO: 74475 - DNA, 17 bp, Arabidopsis thaliana
ccgtcagtgtccgaact

SEQ ID NO: 74476 - DNA, 17 bp, Arabidopsis thaliana
ccgtcagttgacttaac

SEQ ID NO: 74477 - DNA, 17 bp, Arabidopsis thaliana
ccgtcagttgccccgac

SEQ ID NO: 74478 - DNA, 17 bp, Arabidopsis thaliana
ccgtcatcagaaggagc

SEQ ID NO: 74479 - DNA, 17 bp, Arabidopsis thaliana
ccgtcatcgacacagca

SEQ ID NO: 74480 - DNA, 17 bp, Arabidopsis thaliana
ccgtcattcggtcttat

SEQ ID NO: 74481 - DNA, 17 bp, Arabidopsis thaliana
ccgtcattgtttgtgtt

SEQ ID NO: 74482 - DNA, 17 bp, Arabidopsis thaliana
ccgtcatttctctgaag

SEQ ID NO: 74483 - DNA, 17 bp, Arabidopsis thaliana
ccgtccaaggctaaata

SEQ ID NO: 74484 - DNA, 17 bp, Arabidopsis thaliana
ccgtccaccgtcaccaa

SEQ ID NO: 74485 - DNA, 17 bp, Arabidopsis thaliana
ccgtccagtttgcttca

SEQ ID NO: 74486 - DNA, 17 bp, Arabidopsis thaliana
ccgtccatctacaaaga

SEQ ID NO: 74487 - DNA, 17 bp, Arabidopsis thaliana
ccgtccatgagtggttt

SEQ ID NO: 74488 - DNA, 17 bp, Arabidopsis thaliana
ccgtcccaccgggtgtg

SEQ ID NO: 74489 - DNA, 17 bp, Arabidopsis thaliana
ccgtcccactgggtgtg

SEQ ID NO: 74490 - DNA, 17 bp, Arabidopsis thaliana
ccgtcccatcctacggg

SEQ ID NO: 74491 - DNA, 17 bp, Arabidopsis thaliana
ccgtcccgatgttgctc

SEQ ID NO: 74492 - DNA, 17 bp, Arabidopsis thaliana
ccgtcccgccaatccgt

SEQ ID NO: 74493 - DNA, 17 bp, Arabidopsis thaliana
ccgtcccgtgatttttt

SEQ ID NO: 74494 - DNA, 17 bp, Arabidopsis thaliana
ccgtccctatgatttac

SEQ ID NO: 74495 - DNA, 17 bp, Arabidopsis thaliana
ccgtccgacgatcggtc

SEQ ID NO: 74496 - DNA, 17 bp, Arabidopsis thaliana
ccgtccgagggcacgtc

SEQ ID NO: 74497 - DNA, 17 bp, Arabidopsis thaliana
ccgtccgccgtaattga

SEQ ID NO: 74498 - DNA, 17 bp, Arabidopsis thaliana
ccgtccgcttggtgcag

SEQ ID NO: 74499 - DNA, 17 bp, Arabidopsis thaliana
ccgtccggtgattccaa

SEQ ID NO: 74500 - DNA, 17 bp, Arabidopsis thaliana
ccgtccgttggtgccgg

SEQ ID NO: 74501 - DNA, 17 bp, Arabidopsis thaliana
ccgtcctcagcgacgga

SEQ ID NO: 74502 - DNA, 17 bp, Arabidopsis thaliana
ccgtcctcagttcggat

SEQ ID NO: 74503 - DNA, 17 bp, Arabidopsis thaliana
ccgtcctctccatctcc

SEQ ID NO: 74504 - DNA, 17 bp, Arabidopsis thaliana
ccgtcctgaacataatg

SEQ ID NO: 74505 - DNA, 17 bp, Arabidopsis thaliana
ccgtccttctctatgtg

SEQ ID NO: 74506 - DNA, 17 bp, Arabidopsis thaliana
ccgtcgacttggctgga

SEQ ID NO: 74507 - DNA, 17 bp, Arabidopsis thaliana
ccgtcgattttcagttc

SEQ ID NO: 74508 - DNA, 17 bp, Arabidopsis thaliana
ccgtcgcaacaagagcc

SEQ ID NO: 74509 - DNA, 17 bp, Arabidopsis thaliana
ccgtcgctgtcatcttc

SEQ ID NO: 74510 - DNA, 17 bp, Arabidopsis thaliana
ccgtcgcttcggttggc

SEQ ID NO: 74511 - DNA, 17 bp, Arabidopsis thaliana
ccgtcggcctgtgggct

SEQ ID NO: 74512 - DNA, 17 bp, Arabidopsis thaliana
ccgtcggcgataccgtg

SEQ ID NO: 74513 - DNA, 17 bp, Arabidopsis thaliana
ccgtcggctcagcggac

SEQ ID NO: 74514 - DNA, 17 bp, Arabidopsis thaliana
ccgtcggctgtcagcgg

SEQ ID NO: 74515 - DNA, 17 bp, Arabidopsis thaliana
ccgtcggctgttagcgg

SEQ ID NO: 74516 - DNA, 17 bp, Arabidopsis thaliana
ccgtcggcttcaggagc

SEQ ID NO: 74517 - DNA, 17 bp, Arabidopsis thaliana
ccgtcggctttggtttc

SEQ ID NO: 74518 - DNA, 17 bp, Arabidopsis thaliana
ccgtcggggcaagagcc

SEQ ID NO: 74519 - DNA, 17 bp, Arabidopsis thaliana
ccgtcggtcctgggcag

SEQ ID NO: 74520 - DNA, 17 bp, Arabidopsis thaliana
ccgtcggtgcagatctt

SEQ ID NO: 74521 - DNA, 17 bp, Arabidopsis thaliana
ccgtcgtaccaggcgag

SEQ ID NO: 74522 - DNA, 17 bp, Arabidopsis thaliana
ccgtcgtagtctagctg

SEQ ID NO: 74523 - DNA, 17 bp, Arabidopsis thaliana
ccgtcgtgaaatgaccg

SEQ ID NO: 74524 - DNA, 17 bp, Arabidopsis thaliana
ccgtcgtgagacaggtt

SEQ ID NO: 74525 - DNA, 17 bp, Arabidopsis thaliana
ccgtcgtgccccgccgg

SEQ ID NO: 74526 - DNA, 17 bp, Arabidopsis thaliana
ccgtcgtgcccgcaccc

SEQ ID NO: 74527 - DNA, 17 bp, Arabidopsis thaliana
ccgtcgtgcccggaccc

SEQ ID NO: 74528 - DNA, 17 bp, Arabidopsis thaliana
ccgtcgtggagattttg

SEQ ID NO: 74529 - DNA, 17 bp, Arabidopsis thaliana
ccgtcgttcccggaccc

SEQ ID NO: 74530 - DNA, 17 bp, Arabidopsis thaliana
ccgtcgttccctgtata

SEQ ID NO: 74531 - DNA, 17 bp, Arabidopsis thaliana
ccgtcgttcggaccgcc

SEQ ID NO: 74532 - DNA, 17 bp, Arabidopsis thaliana
ccgtcgtttagatctgt

SEQ ID NO: 74533 - DNA, 17 bp, Arabidopsis thaliana
ccgtctactcgaccctg

SEQ ID NO: 74534 - DNA, 17 bp, Arabidopsis thaliana
ccgtctagctcacttgg

SEQ ID NO: 74535 - DNA, 17 bp, Arabidopsis thaliana
ccgtctagctcagttgg

SEQ ID NO: 74536 - DNA, 17 bp, Arabidopsis thaliana
ccgtctcactccaggtc

SEQ ID NO: 74537 - DNA, 17 bp, Arabidopsis thaliana
ccgtctcagattgtgtg

SEQ ID NO: 74538 - DNA, 17 bp, Arabidopsis thaliana
ccgtctcgccaacccgt

SEQ ID NO: 74539 - DNA, 17 bp, Arabidopsis thaliana
ccgtctctacttctgct

SEQ ID NO: 74540 - DNA, 17 bp, Arabidopsis thaliana
ccgtctctcattgccag

SEQ ID NO: 74541 - DNA, 17 bp, Arabidopsis thaliana
ccgtctcttagatctgt

SEQ ID NO: 74542 - DNA, 17 bp, Arabidopsis thaliana
ccgtctgacttgggtat

SEQ ID NO: 74543 - DNA, 17 bp, Arabidopsis thaliana
ccgtctgatagcgctta

SEQ ID NO: 74544 - DNA, 17 bp, Arabidopsis thaliana
ccgtctgatttccttat

SEQ ID NO: 74545 - DNA, 17 bp, Arabidopsis thaliana
ccgtctggaccaggcgc

SEQ ID NO: 74546 - DNA, 17 bp, Arabidopsis thaliana
ccgtctgtagtccaacg

SEQ ID NO: 74547 - DNA, 17 bp, Arabidopsis thaliana
ccgtctgtcagttgggc

SEQ ID NO: 74548 - DNA, 17 bp, Arabidopsis thaliana
ccgtcttccatagcaac

SEQ ID NO: 74549 - DNA, 17 bp, Arabidopsis thaliana
ccgtcttctgatgggcc

SEQ ID NO: 74550 - DNA, 17 bp, Arabidopsis thaliana
ccgtcttcttgacacta

SEQ ID NO: 74551 - DNA, 17 bp, Arabidopsis thaliana
ccgtcttctttcttctt

SEQ ID NO: 74552 - DNA, 17 bp, Arabidopsis thaliana
ccgtcttctttgggcga

SEQ ID NO: 74553 - DNA, 17 bp, Arabidopsis thaliana
ccgtcttgaaacacgga

SEQ ID NO: 74554 - DNA, 17 bp, Arabidopsis thaliana
ccgtcttgccaaaaagt

SEQ ID NO: 74555 - DNA, 17 bp, Arabidopsis thaliana
ccgtcttggtttccctg

SEQ ID NO: 74556 - DNA, 17 bp, Arabidopsis thaliana
ccgtcttgtgagactca

SEQ ID NO: 74557 - DNA, 17 bp, Arabidopsis thaliana
ccgtctttagtccaacg

SEQ ID NO: 74558 - DNA, 17 bp, Arabidopsis thaliana
ccgtgaaagcgtggcct

SEQ ID NO: 74559 - DNA, 17 bp, Arabidopsis thaliana
ccgtgaaccatcgagtc

SEQ ID NO: 74560 - DNA, 17 bp, Arabidopsis thaliana
ccgtgaacctgcggaag

SEQ ID NO: 74561 - DNA, 17 bp, Arabidopsis thaliana
ccgtgaactatgcctga

SEQ ID NO: 74562 - DNA, 17 bp, Arabidopsis thaliana
ccgtgaatcggaggcgg

SEQ ID NO: 74563 - DNA, 17 bp, Arabidopsis thaliana
ccgtgaattcgtgaaat

SEQ ID NO: 74564 - DNA, 17 bp, Arabidopsis thaliana
ccgtgacaagttttgtt

SEQ ID NO: 74565 - DNA, 17 bp, Arabidopsis thaliana
ccgtgacagattcctcc

SEQ ID NO: 74566 - DNA, 17 bp, Arabidopsis thaliana
ccgtgacatgacgcagt

SEQ ID NO: 74567 - DNA, 17 bp, Arabidopsis thaliana
ccgtgaccaaaagttgt

SEQ ID NO: 74568 - DNA, 17 bp, Arabidopsis thaliana
ccgtgacccggtgaacc

SEQ ID NO: 74569 - DNA, 17 bp, Arabidopsis thaliana
ccgtgactctagtccga

SEQ ID NO: 74570 - DNA, 17 bp, Arabidopsis thaliana
ccgtgagctcaacatgg

SEQ ID NO: 74571 - DNA, 17 bp, Arabidopsis thaliana
ccgtgaggccaaacttg

SEQ ID NO: 74572 - DNA, 17 bp, Arabidopsis thaliana
ccgtgagggttcgcagg

SEQ ID NO: 74573 - DNA, 17 bp, Arabidopsis thaliana
ccgtgagtcatctgtta

SEQ ID NO: 74574 - DNA, 17 bp, Arabidopsis thaliana
ccgtgatagcagttgga

SEQ ID NO: 74575 - DNA, 17 bp, Arabidopsis thaliana
ccgtgatatcaggtccg

SEQ ID NO: 74576 - DNA, 17 bp, Arabidopsis thaliana
ccgtgatcatgcctaag

SEQ ID NO: 74577 - DNA, 17 bp, Arabidopsis thaliana
ccgtgatccgtccactg

SEQ ID NO: 74578 - DNA, 17 bp, Arabidopsis thaliana
ccgtgatcgtggtcggc

SEQ ID NO: 74579 - DNA, 17 bp, Arabidopsis thaliana
ccgtgatcgtggtctgc

SEQ ID NO: 74580 - DNA, 17 bp, Arabidopsis thaliana
ccgtgatgacacgatcc

SEQ ID NO: 74581 - DNA, 17 bp, Arabidopsis thaliana
ccgtgattgcgctgtac

SEQ ID NO: 74582 - DNA, 17 bp, Arabidopsis thaliana
ccgtgccctggattatg

SEQ ID NO: 74583 - DNA, 17 bp, Arabidopsis thaliana
ccgtgcgaatgatcgac

SEQ ID NO: 74584 - DNA, 17 bp, Arabidopsis thaliana
ccgtgcgcaggcttgcc

SEQ ID NO: 74585 - DNA, 17 bp, Arabidopsis thaliana
ccgtgcgccgccggaag

SEQ ID NO: 74586 - DNA, 17 bp, Arabidopsis thaliana
ccgtgcgccggattatg

SEQ ID NO: 74587 - DNA, 17 bp, Arabidopsis thaliana
ccgtgcgcgggattatg

SEQ ID NO: 74588 - DNA, 17 bp, Arabidopsis thaliana
ccgtgcgctggattatc

SEQ ID NO: 74589 - DNA, 17 bp, Arabidopsis thaliana
ccgtgcgctggattatg

SEQ ID NO: 74590 - DNA, 17 bp, Arabidopsis thaliana
ccgtgcgctggattgac

SEQ ID NO: 74591 - DNA, 17 bp, Arabidopsis thaliana
ccgtgcgctggattgtg

SEQ ID NO: 74592 - DNA, 17 bp, Arabidopsis thaliana
ccgtgcgcttgattatg

SEQ ID NO: 74593 - DNA, 17 bp, Arabidopsis thaliana
ccgtgcggcttcgctat

SEQ ID NO: 74594 - DNA, 17 bp, Arabidopsis thaliana
ccgtgcgtacaatggtt

SEQ ID NO: 74595 - DNA, 17 bp, Arabidopsis thaliana
ccgtgcgttggattatg

SEQ ID NO: 74596 - DNA, 17 bp, Arabidopsis thaliana
ccgtgctaaagcacctt

SEQ ID NO: 74597 - DNA, 17 bp, Arabidopsis thaliana
ccgtgctagaagcgacg

SEQ ID NO: 74598 - DNA, 17 bp, Arabidopsis thaliana
ccgtgcttctacaaagt

SEQ ID NO: 74599 - DNA, 17 bp, Arabidopsis thaliana
ccgtggaaagttggtta

SEQ ID NO: 74600 - DNA, 17 bp, Arabidopsis thaliana
ccgtggaaatggccgtg

SEQ ID NO: 74601 - DNA, 17 bp, Arabidopsis thaliana
ccgtggacaacgggctg

SEQ ID NO: 74602 - DNA, 17 bp, Arabidopsis thaliana
ccgtggacgaggcatac

SEQ ID NO: 74603 - DNA, 17 bp, Arabidopsis thaliana
ccgtggagcgatttgtc

SEQ ID NO: 74604 - DNA, 17 bp, Arabidopsis thaliana
ccgtggaggttgttagg

SEQ ID NO: 74605 - DNA, 17 bp, Arabidopsis thaliana
ccgtggcagtttgtgga

SEQ ID NO: 74606 - DNA, 17 bp, Arabidopsis thaliana
ccgtgggacccagggcg

SEQ ID NO: 74607 - DNA, 17 bp, Arabidopsis thaliana
ccgtgggtcccacccgc

SEQ ID NO: 74608 - DNA, 17 bp, Arabidopsis thaliana
ccgtgggtgtggctcca

SEQ ID NO: 74609 - DNA, 17 bp, Arabidopsis thaliana
ccgtgggttccccacag

SEQ ID NO: 74610 - DNA, 17 bp, Arabidopsis thaliana
ccgtgggttcggtcccc

SEQ ID NO: 74611 - DNA, 17 bp, Arabidopsis thaliana
ccgtgggttcgttcccc

SEQ ID NO: 74612 - DNA, 17 bp, Arabidopsis thaliana
ccgtgggttggcttttt

SEQ ID NO: 74613 - DNA, 17 bp, Arabidopsis thaliana
ccgtggtataagtttgg

SEQ ID NO: 74614 - DNA, 17 bp, Arabidopsis thaliana
ccgtggtcaacgggtgt

SEQ ID NO: 74615 - DNA, 17 bp, Arabidopsis thaliana
ccgtggtgatttgtgga

SEQ ID NO: 74616 - DNA, 17 bp, Arabidopsis thaliana
ccgtggtggagcgattt

SEQ ID NO: 74617 - DNA, 17 bp, Arabidopsis thaliana
ccgtggtgtgaagaaga

SEQ ID NO: 74618 - DNA, 17 bp, Arabidopsis thaliana
ccgtggttcatcgtcaa

SEQ ID NO: 74619 - DNA, 17 bp, Arabidopsis thaliana
ccgtggttgctttggca

SEQ ID NO: 74620 - DNA, 17 bp, Arabidopsis thaliana
ccgtggtttcgcgtatc

SEQ ID NO: 74621 - DNA, 17 bp, Arabidopsis thaliana
ccgtgtacttgagcatg

SEQ ID NO: 74622 - DNA, 17 bp, Arabidopsis thaliana
ccgtgtagtagggtctc

SEQ ID NO: 74623 - DNA, 17 bp, Arabidopsis thaliana
ccgtgtcaggattgggt

SEQ ID NO: 74624 - DNA, 17 bp, Arabidopsis thaliana
ccgtgtctctcctgttc

SEQ ID NO: 74625 - DNA, 17 bp, Arabidopsis thaliana
ccgtgtgacaatcgatc

SEQ ID NO: 74626 - DNA, 17 bp, Arabidopsis thaliana
ccgtgtgcagtacctgt

SEQ ID NO: 74627 - DNA, 17 bp, Arabidopsis thaliana
ccgtgtgcattggtcgg

SEQ ID NO: 74628 - DNA, 17 bp, Arabidopsis thaliana
ccgtgtgcttagacctg

SEQ ID NO: 74629 - DNA, 17 bp, Arabidopsis thaliana
ccgtgtgtacatgcgat

SEQ ID NO: 74630 - DNA, 17 bp, Arabidopsis thaliana
ccgtgttcaaatgctgg

SEQ ID NO: 74631 - DNA, 17 bp, Arabidopsis thaliana
ccgtgttgcagtgcggt

SEQ ID NO: 74632 - DNA, 17 bp, Arabidopsis thaliana
ccgttaaccaacgagac

SEQ ID NO: 74633 - DNA, 17 bp, Arabidopsis thaliana
ccgttaaccaacgagcc

SEQ ID NO: 74634 - DNA, 17 bp, Arabidopsis thaliana
ccgttaacgaacgagac

SEQ ID NO: 74635 - DNA, 17 bp, Arabidopsis thaliana
ccgttaagtcaggatat

SEQ ID NO: 74636 - DNA, 17 bp, Arabidopsis thaliana
ccgttacatcgatttgg

SEQ ID NO: 74637 - DNA, 17 bp, Arabidopsis thaliana
ccgttaccattcgcagc

SEQ ID NO: 74638 - DNA, 17 bp, Arabidopsis thaliana
ccgttactagtcaactc

SEQ ID NO: 74639 - DNA, 17 bp, Arabidopsis thaliana
ccgttactgaacgacaa

SEQ ID NO: 74640 - DNA, 17 bp, Arabidopsis thaliana
ccgttaggcggttagtt

SEQ ID NO: 74641 - DNA, 17 bp, Arabidopsis thaliana
ccgttatcgatctcaaa

SEQ ID NO: 74642 - DNA, 17 bp, Arabidopsis thaliana
ccgttatcgtccagcgg

SEQ ID NO: 74643 - DNA, 17 bp, Arabidopsis thaliana
ccgttatcgtccatcga

SEQ ID NO: 74644 - DNA, 17 bp, Arabidopsis thaliana
ccgttatctatggtacc

SEQ ID NO: 74645 - DNA, 17 bp, Arabidopsis thaliana
ccgttatctccgggttt

SEQ ID NO: 74646 - DNA, 17 bp, Arabidopsis thaliana
ccgttcaatgtctgttg

SEQ ID NO: 74647 - DNA, 17 bp, Arabidopsis thaliana
ccgttcatcaccggatt

SEQ ID NO: 74648 - DNA, 17 bp, Arabidopsis thaliana
ccgttcatcagtaattg

SEQ ID NO: 74649 - DNA, 17 bp, Arabidopsis thaliana
ccgttccaactgatttc

SEQ ID NO: 74650 - DNA, 17 bp, Arabidopsis thaliana
ccgttccaccagtgact

SEQ ID NO: 74651 - DNA, 17 bp, Arabidopsis thaliana
ccgttccacctcttgat

SEQ ID NO: 74652 - DNA, 17 bp, Arabidopsis thaliana
ccgttccccgaatacca

SEQ ID NO: 74653 - DNA, 17 bp, Arabidopsis thaliana
ccgttcccttggctgtg

SEQ ID NO: 74654 - DNA, 17 bp, Arabidopsis thaliana
ccgttccgcatccgacc

SEQ ID NO: 74655 - DNA, 17 bp, Arabidopsis thaliana
ccgttccgctatatttt

SEQ ID NO: 74656 - DNA, 17 bp, Arabidopsis thaliana
ccgttcgaatctctctg

SEQ ID NO: 74657 - DNA, 17 bp, Arabidopsis thaliana
ccgttcgagcctttttt

SEQ ID NO: 74658 - DNA, 17 bp, Arabidopsis thaliana
ccgttcgatccccccta

SEQ ID NO: 74659 - DNA, 17 bp, Arabidopsis thaliana
ccgttcgatcccgctag

SEQ ID NO: 74660 - DNA, 17 bp, Arabidopsis thaliana
ccgttcgccaggattat

SEQ ID NO: 74661 - DNA, 17 bp, Arabidopsis thaliana
ccgttcgccctgggtcc

SEQ ID NO: 74662 - DNA, 17 bp, Arabidopsis thaliana
ccgttcggacccgggct

SEQ ID NO: 74663 - DNA, 17 bp, Arabidopsis thaliana
ccgttcggcggaagcgt

SEQ ID NO: 74664 - DNA, 17 bp, Arabidopsis thaliana
ccgttcgtctgacttgg

SEQ ID NO: 74665 - DNA, 17 bp, Arabidopsis thaliana
ccgttctactgagtaac

SEQ ID NO: 74666 - DNA, 17 bp, Arabidopsis thaliana
ccgttctatttattggg

SEQ ID NO: 74667 - DNA, 17 bp, Arabidopsis thaliana
ccgttctgggatctgtc

SEQ ID NO: 74668 - DNA, 17 bp, Arabidopsis thaliana
ccgttctgtaaattttt

SEQ ID NO: 74669 - DNA, 17 bp, Arabidopsis thaliana
ccgttctgtacttacgg

SEQ ID NO: 74670 - DNA, 17 bp, Arabidopsis thaliana
ccgttcttagttggtgg

SEQ ID NO: 74671 - DNA, 17 bp, Arabidopsis thaliana
ccgttcttctacgagaa

SEQ ID NO: 74672 - DNA, 17 bp, Arabidopsis thaliana
ccgttctttggctgtgg

SEQ ID NO: 74673 - DNA, 17 bp, Arabidopsis thaliana
ccgttgaccaactctct

SEQ ID NO: 74674 - DNA, 17 bp, Arabidopsis thaliana
ccgttgacttaacgacg

SEQ ID NO: 74675 - DNA, 17 bp, Arabidopsis thaliana
ccgttgactttttgtcg

SEQ ID NO: 74676 - DNA, 17 bp, Arabidopsis thaliana
ccgttgaggcttagttt

SEQ ID NO: 74677 - DNA, 17 bp, Arabidopsis thaliana
ccgttgagtcgctgcga

SEQ ID NO: 74678 - DNA, 17 bp, Arabidopsis thaliana
ccgttgatcgtcgcctt

SEQ ID NO: 74679 - DNA, 17 bp, Arabidopsis thaliana
ccgttgatggttcctct

SEQ ID NO: 74680 - DNA, 17 bp, Arabidopsis thaliana
ccgttgctatgaagtct

SEQ ID NO: 74681 - DNA, 17 bp, Arabidopsis thaliana
ccgttgctcatcttaca

SEQ ID NO: 74682 - DNA, 17 bp, Arabidopsis thaliana
ccgttgctctgatgatt

SEQ ID NO: 74683 - DNA, 17 bp, Arabidopsis thaliana
ccgttgctgcgacatgg

SEQ ID NO: 74684 - DNA, 17 bp, Arabidopsis thaliana
ccgttgcttttaggccc

SEQ ID NO: 74685 - DNA, 17 bp, Arabidopsis thaliana
ccgttggaccgtttccc

SEQ ID NO: 74686 - DNA, 17 bp, Arabidopsis thaliana
ccgttgggctttgcgga

SEQ ID NO: 74687 - DNA, 17 bp, Arabidopsis thaliana
ccgttggtgtgcgccca

SEQ ID NO: 74688 - DNA, 17 bp, Arabidopsis thaliana
ccgttggttttgactat

SEQ ID NO: 74689 - DNA, 17 bp, Arabidopsis thaliana
ccgttgtaacgattcgg

SEQ ID NO: 74690 - DNA, 17 bp, Arabidopsis thaliana
ccgttgtagtctagctg

SEQ ID NO: 74691 - DNA, 17 bp, Arabidopsis thaliana
ccgttgtcgtccagcgg

SEQ ID NO: 74692 - DNA, 17 bp, Arabidopsis thaliana
ccgttgtggacaaggtg

SEQ ID NO: 74693 - DNA, 17 bp, Arabidopsis thaliana
ccgttgttctgatggcc

SEQ ID NO: 74694 - DNA, 17 bp, Arabidopsis thaliana
ccgttgttgcgcttggt

SEQ ID NO: 74695 - DNA, 17 bp, Arabidopsis thaliana
ccgttgttttcctcaag

SEQ ID NO: 74696 - DNA, 17 bp, Arabidopsis thaliana
ccgtttaatcgctaagt

SEQ ID NO: 74697 - DNA, 17 bp, Arabidopsis thaliana
ccgtttaggcaaaggaa

SEQ ID NO: 74698 - DNA, 17 bp, Arabidopsis thaliana
ccgtttaggccaaggaa

SEQ ID NO: 74699 - DNA, 17 bp, Arabidopsis thaliana
ccgtttattcgtttcag

SEQ ID NO: 74700 - DNA, 17 bp, Arabidopsis thaliana
ccgtttcacaaaaatct

SEQ ID NO: 74701 - DNA, 17 bp, Arabidopsis thaliana
ccgtttccgagatgtta

SEQ ID NO: 74702 - DNA, 17 bp, Arabidopsis thaliana
ccgtttcggttgccgat

SEQ ID NO: 74703 - DNA, 17 bp, Arabidopsis thaliana
ccgtttctgacctctaa

SEQ ID NO: 74704 - DNA, 17 bp, Arabidopsis thaliana
ccgtttgagacataggc

SEQ ID NO: 74705 - DNA, 17 bp, Arabidopsis thaliana
ccgtttgctgaccgcct

SEQ ID NO: 74706 - DNA, 17 bp, Arabidopsis thaliana
ccgtttgcttcgtttcg

SEQ ID NO: 74707 - DNA, 17 bp, Arabidopsis thaliana
ccgtttggaccgtcatc

SEQ ID NO: 74708 - DNA, 17 bp, Arabidopsis thaliana
ccgtttgggttttgatt

SEQ ID NO: 74709 - DNA, 17 bp, Arabidopsis thaliana
ccgtttgtgagggattt

SEQ ID NO: 74710 - DNA, 17 bp, Arabidopsis thaliana
ccgtttgtgcgttctga

SEQ ID NO: 74711 - DNA, 17 bp, Arabidopsis thaliana
ccgttttaatgtgcgga

SEQ ID NO: 74712 - DNA, 17 bp, Arabidopsis thaliana
ccgttttcacgccgatt

SEQ ID NO: 74713 - DNA, 17 bp, Arabidopsis thaliana
ccgttttccctagtccg

SEQ ID NO: 74714 - DNA, 17 bp, Arabidopsis thaliana
ccgttttcgtgatttgg

SEQ ID NO: 74715 - DNA, 17 bp, Arabidopsis thaliana
ccgttttgcttacagtt

SEQ ID NO: 74716 - DNA, 17 bp, Arabidopsis thaliana
ccgttttgttaggaaac

SEQ ID NO: 74717 - DNA, 17 bp, Arabidopsis thaliana
ccgtttttatggatgga

SEQ ID NO: 74718 - DNA, 17 bp, Arabidopsis thaliana
ccgttttttcgaccgtg

SEQ ID NO: 74719 - DNA, 17 bp, Arabidopsis thaliana
ccgttttttcgtcagcc

SEQ ID NO: 74720 - DNA, 17 bp, Arabidopsis thaliana
ccgttttttggcggtaa

SEQ ID NO: 74721 - DNA, 17 bp, Arabidopsis thaliana
ccgtttttttggtgcct

SEQ ID NO: 74722 - DNA, 17 bp, Arabidopsis thaliana
cctaaaacaccaatcac

SEQ ID NO: 74723 - DNA, 17 bp, Arabidopsis thaliana
cctaaaaccgcactgca

SEQ ID NO: 74724 - DNA, 17 bp, Arabidopsis thaliana
cctaaaaccgtaccgca

SEQ ID NO: 74725 - DNA, 17 bp, Arabidopsis thaliana
cctaaaactttgcgagg

SEQ ID NO: 74726 - DNA, 17 bp, Arabidopsis thaliana
cctaaaagttgacttcc

SEQ ID NO: 74727 - DNA, 17 bp, Arabidopsis thaliana
cctaaaagtttaaaacc

SEQ ID NO: 74728 - DNA, 17 bp, Arabidopsis thaliana
cctaaaatactacaggc

SEQ ID NO: 74729 - DNA, 17 bp, Arabidopsis thaliana
cctaaacagagacgatt

SEQ ID NO: 74730 - DNA, 17 bp, Arabidopsis thaliana
cctaaactgtgaatgcg

SEQ ID NO: 74731 - DNA, 17 bp, Arabidopsis thaliana
cctaaaggaattacggg

SEQ ID NO: 74732 - DNA, 17 bp, Arabidopsis thaliana
cctaaataggcaggcct

SEQ ID NO: 74733 - DNA, 17 bp, Arabidopsis thaliana
cctaaataggcggacct

SEQ ID NO: 74734 - DNA, 17 bp, Arabidopsis thaliana
cctaaataggcgggcct

SEQ ID NO: 74735 - DNA, 17 bp, Arabidopsis thaliana
cctaaatctgtctcgat

SEQ ID NO: 74736 - DNA, 17 bp, Arabidopsis thaliana
cctaaatgaccgctcag

SEQ ID NO: 74737 - DNA, 17 bp, Arabidopsis thaliana
cctaaatggctctctct

SEQ ID NO: 74738 - DNA, 17 bp, Arabidopsis thaliana
cctaaatgggtttttga

SEQ ID NO: 74739 - DNA, 17 bp, Arabidopsis thaliana
cctaacagaccggtaga

SEQ ID NO: 74740 - DNA, 17 bp, Arabidopsis thaliana
cctaacagacgtttctc

SEQ ID NO: 74741 - DNA, 17 bp, Arabidopsis thaliana
cctaacagaggtcagta

SEQ ID NO: 74742 - DNA, 17 bp, Arabidopsis thaliana
cctaacaggaaaggcta

SEQ ID NO: 74743 - DNA, 17 bp, Arabidopsis thaliana
cctaacagtgtggtcga

SEQ ID NO: 74744 - DNA, 17 bp, Arabidopsis thaliana
cctaacagtgtggtgat

SEQ ID NO: 74745 - DNA, 17 bp, Arabidopsis thaliana
cctaaccccatggtagc

SEQ ID NO: 74746 - DNA, 17 bp, Arabidopsis thaliana
cctaaccgctaccgccc

SEQ ID NO: 74747 - DNA, 17 bp, Arabidopsis thaliana
cctaacgactctcggca

SEQ ID NO: 74748 - DNA, 17 bp, Arabidopsis thaliana
cctaacggcgtgcctcc

SEQ ID NO: 74749 - DNA, 17 bp, Arabidopsis thaliana
cctaacggcgtgcctcg

SEQ ID NO: 74750 - DNA, 17 bp, Arabidopsis thaliana
cctaactcgggacctgt

SEQ ID NO: 74751 - DNA, 17 bp, Arabidopsis thaliana
cctaacttcgggaaaag

SEQ ID NO: 74752 - DNA, 17 bp, Arabidopsis thaliana
cctaacttttgacttag

SEQ ID NO: 74753 - DNA, 17 bp, Arabidopsis thaliana
cctaagacagttagaca

SEQ ID NO: 74754 - DNA, 17 bp, Arabidopsis thaliana
cctaagagcagctccat

SEQ ID NO: 74755 - DNA, 17 bp, Arabidopsis thaliana
cctaagagcatgtccat

SEQ ID NO: 74756 - DNA, 17 bp, Arabidopsis thaliana
cctaagaggagggctag

SEQ ID NO: 74757 - DNA, 17 bp, Arabidopsis thaliana
cctaagatcaggccgaa

SEQ ID NO: 74758 - DNA, 17 bp, Arabidopsis thaliana
cctaagatgagctcaac

SEQ ID NO: 74759 - DNA, 17 bp, Arabidopsis thaliana
cctaagcccaattggga

SEQ ID NO: 74760 - DNA, 17 bp, Arabidopsis thaliana
cctaagcccgggctttt

SEQ ID NO: 74761 - DNA, 17 bp, Arabidopsis thaliana
cctaagccgtggcttca

SEQ ID NO: 74762 - DNA, 17 bp, Arabidopsis thaliana
cctaagcggcgtcatcg

SEQ ID NO: 74763 - DNA, 17 bp, Arabidopsis thaliana
cctaagctcctaccgag

SEQ ID NO: 74764 - DNA, 17 bp, Arabidopsis thaliana
cctaagctcctgctgag

SEQ ID NO: 74765 - DNA, 17 bp, Arabidopsis thaliana
cctaagcttgggaacgt

SEQ ID NO: 74766 - DNA, 17 bp, Arabidopsis thaliana
cctaagcttgggaatgt

SEQ ID NO: 74767 - DNA, 17 bp, Arabidopsis thaliana
cctaaggctttgaatgg

SEQ ID NO: 74768 - DNA, 17 bp, Arabidopsis thaliana
cctaaggctttggtagt

SEQ ID NO: 74769 - DNA, 17 bp, Arabidopsis thaliana
cctaaggggattacggg

SEQ ID NO: 74770 - DNA, 17 bp, Arabidopsis thaliana
cctaaggtttcgttttg

SEQ ID NO: 74771 - DNA, 17 bp, Arabidopsis thaliana
cctaagtaccttgttcc

SEQ ID NO: 74772 - DNA, 17 bp, Arabidopsis thaliana
cctaagtcaccactcag

SEQ ID NO: 74773 - DNA, 17 bp, Arabidopsis thaliana
cctaagtccatatgagt

SEQ ID NO: 74774 - DNA, 17 bp, Arabidopsis thaliana
cctaagtccttaatgtg

SEQ ID NO: 74775 - DNA, 17 bp, Arabidopsis thaliana
cctaagtgccacgtgtc

SEQ ID NO: 74776 - DNA, 17 bp, Arabidopsis thaliana
cctaagtgcgagcttct

SEQ ID NO: 74777 - DNA, 17 bp, Arabidopsis thaliana
cctaagttgcgatcaga

SEQ ID NO: 74778 - DNA, 17 bp, Arabidopsis thaliana
cctaatatgtccgagtg

SEQ ID NO: 74779 - DNA, 17 bp, Arabidopsis thaliana
cctaatctggccatagg

SEQ ID NO: 74780 - DNA, 17 bp, Arabidopsis thaliana
cctaatctgtttgggac

SEQ ID NO: 74781 - DNA, 17 bp, Arabidopsis thaliana
cctaatggaacctaaac

SEQ ID NO: 74782 - DNA, 17 bp, Arabidopsis thaliana
cctaatggaccgtaatc

SEQ ID NO: 74783 - DNA, 17 bp, Arabidopsis thaliana
cctaatggactgggatt

SEQ ID NO: 74784 - DNA, 17 bp, Arabidopsis thaliana
cctaatggctaaaacgt

SEQ ID NO: 74785 - DNA, 17 bp, Arabidopsis thaliana
cctaattgggcatatga

SEQ ID NO: 74786 - DNA, 17 bp, Arabidopsis thaliana
cctaatttgttcaggct

SEQ ID NO: 74787 - DNA, 17 bp, Arabidopsis thaliana
cctaattttgcggccgt

SEQ ID NO: 74788 - DNA, 17 bp, Arabidopsis thaliana
cctacaaatgggacgca

SEQ ID NO: 74789 - DNA, 17 bp, Arabidopsis thaliana
cctacaactttagccag

SEQ ID NO: 74790 - DNA, 17 bp, Arabidopsis thaliana
cctacaatctgtgtgct

SEQ ID NO: 74791 - DNA, 17 bp, Arabidopsis thaliana
cctacaatgaggctggt

SEQ ID NO: 74792 - DNA, 17 bp, Arabidopsis thaliana
cctacacaattggactg

SEQ ID NO: 74793 - DNA, 17 bp, Arabidopsis thaliana
cctacacagctggtggg

SEQ ID NO: 74794 - DNA, 17 bp, Arabidopsis thaliana
cctacaccgtcgggttg

SEQ ID NO: 74795 - DNA, 17 bp, Arabidopsis thaliana
cctacagacccgggtac

SEQ ID NO: 74796 - DNA, 17 bp, Arabidopsis thaliana
cctacagactgtgaatt

SEQ ID NO: 74797 - DNA, 17 bp, Arabidopsis thaliana
cctacagattcgttggc

SEQ ID NO: 74798 - DNA, 17 bp, Arabidopsis thaliana
cctacagcagttggttt

SEQ ID NO: 74799 - DNA, 17 bp, Arabidopsis thaliana
cctacagctttgcgtgg

SEQ ID NO: 74800 - DNA, 17 bp, Arabidopsis thaliana
cctacaggacaagtgtt

SEQ ID NO: 74801 - DNA, 17 bp, Arabidopsis thaliana
cctacatagcgggtggg

SEQ ID NO: 74802 - DNA, 17 bp, Arabidopsis thaliana
cctacatctctcagagg

SEQ ID NO: 74803 - DNA, 17 bp, Arabidopsis thaliana
cctacatcttccagagg

SEQ ID NO: 74804 - DNA, 17 bp, Arabidopsis thaliana
cctacatgaggtagtgc

SEQ ID NO: 74805 - DNA, 17 bp, Arabidopsis thaliana
cctacatggcgggtggg

SEQ ID NO: 74806 - DNA, 17 bp, Arabidopsis thaliana
cctacatgtagcagcta

SEQ ID NO: 74807 - DNA, 17 bp, Arabidopsis thaliana
cctacattggaagtttg

SEQ ID NO: 74808 - DNA, 17 bp, Arabidopsis thaliana
cctacattgttccatcg

SEQ ID NO: 74809 - DNA, 17 bp, Arabidopsis thaliana
cctacatttcctacatg

SEQ ID NO: 74810 - DNA, 17 bp, Arabidopsis thaliana
cctacatttctcagagg

SEQ ID NO: 74811 - DNA, 17 bp, Arabidopsis thaliana
cctacattttccagagg

SEQ ID NO: 74812 - DNA, 17 bp, Arabidopsis thaliana
cctaccatggtggtaac

SEQ ID NO: 74813 - DNA, 17 bp, Arabidopsis thaliana
cctacccgtcttgccaa

SEQ ID NO: 74814 - DNA, 17 bp, Arabidopsis thaliana
cctaccctactggagtt

SEQ ID NO: 74815 - DNA, 17 bp, Arabidopsis thaliana
cctaccgattgaatgat

SEQ ID NO: 74816 - DNA, 17 bp, Arabidopsis thaliana
cctaccggaggtgcgcc

SEQ ID NO: 74817 - DNA, 17 bp, Arabidopsis thaliana
cctaccggtgacagagc

SEQ ID NO: 74818 - DNA, 17 bp, Arabidopsis thaliana
cctaccgtcaatgtgcc

SEQ ID NO: 74819 - DNA, 17 bp, Arabidopsis thaliana
cctacctattggcgttg

SEQ ID NO: 74820 - DNA, 17 bp, Arabidopsis thaliana
cctacctatttaggcgg

SEQ ID NO: 74821 - DNA, 17 bp, Arabidopsis thaliana
cctacctcagttgctct

SEQ ID NO: 74822 - DNA, 17 bp, Arabidopsis thaliana
cctacctggcgcgcttc

SEQ ID NO: 74823 - DNA, 17 bp, Arabidopsis thaliana
cctacgaaaagatcgct

SEQ ID NO: 74824 - DNA, 17 bp, Arabidopsis thaliana
cctacgatgacgggcgc

SEQ ID NO: 74825 - DNA, 17 bp, Arabidopsis thaliana
cctacgcatttaagatt

SEQ ID NO: 74826 - DNA, 17 bp, Arabidopsis thaliana
cctacgcctttaagatc

SEQ ID NO: 74827 - DNA, 17 bp, Arabidopsis thaliana
cctacgcggattacggt

SEQ ID NO: 74828 - DNA, 17 bp, Arabidopsis thaliana
cctacgctacagcggtc

SEQ ID NO: 74829 - DNA, 17 bp, Arabidopsis thaliana
cctacgctactggcgct

SEQ ID NO: 74830 - DNA, 17 bp, Arabidopsis thaliana
cctacgctctggataca

SEQ ID NO: 74831 - DNA, 17 bp, Arabidopsis thaliana
cctacggacctcagtct

SEQ ID NO: 74832 - DNA, 17 bp, Arabidopsis thaliana
cctacggatcctgaact

SEQ ID NO: 74833 - DNA, 17 bp, Arabidopsis thaliana
cctacgggaggcagcag

SEQ ID NO: 74834 - DNA, 17 bp, Arabidopsis thaliana
cctacgggccaagggac

SEQ ID NO: 74835 - DNA, 17 bp, Arabidopsis thaliana
cctacgggtcctgaact

SEQ ID NO: 74836 - DNA, 17 bp, Arabidopsis thaliana
cctacgggtccttaagc

SEQ ID NO: 74837 - DNA, 17 bp, Arabidopsis thaliana
cctacgggtctgtaaga

SEQ ID NO: 74838 - DNA, 17 bp, Arabidopsis thaliana
cctacggtcccaggggt

SEQ ID NO: 74839 - DNA, 17 bp, Arabidopsis thaliana
cctactaaagatcttgt

SEQ ID NO: 74840 - DNA, 17 bp, Arabidopsis thaliana
cctactacttctgggat

SEQ ID NO: 74841 - DNA, 17 bp, Arabidopsis thaliana
cctactagaaaccgttc

SEQ ID NO: 74842 - DNA, 17 bp, Arabidopsis thaliana
cctactagatgagggtg

SEQ ID NO: 74843 - DNA, 17 bp, Arabidopsis thaliana
cctactcattgcgggct

SEQ ID NO: 74844 - DNA, 17 bp, Arabidopsis thaliana
cctactcatttcagctg

SEQ ID NO: 74845 - DNA, 17 bp, Arabidopsis thaliana
cctactccctccaaagt

SEQ ID NO: 74846 - DNA, 17 bp, Arabidopsis thaliana
cctactcgattcggttt

SEQ ID NO: 74847 - DNA, 17 bp, Arabidopsis thaliana
cctactcgtttgatgaa

SEQ ID NO: 74848 - DNA, 17 bp, Arabidopsis thaliana
cctactgatgaatgatc

SEQ ID NO: 74849 - DNA, 17 bp, Arabidopsis thaliana
cctactgatgcccgcgt

SEQ ID NO: 74850 - DNA, 17 bp, Arabidopsis thaliana
cctactgatgttcacaa

SEQ ID NO: 74851 - DNA, 17 bp, Arabidopsis thaliana
cctactggttatgatct

SEQ ID NO: 74852 - DNA, 17 bp, Arabidopsis thaliana
cctactgtccctgtcta

SEQ ID NO: 74853 - DNA, 17 bp, Arabidopsis thaliana
cctactgtttcaccggc

SEQ ID NO: 74854 - DNA, 17 bp, Arabidopsis thaliana
cctacttcccctggggg

SEQ ID NO: 74855 - DNA, 17 bp, Arabidopsis thaliana
cctactttccctgtacg

SEQ ID NO: 74856 - DNA, 17 bp, Arabidopsis thaliana
cctacttttgagagatc

SEQ ID NO: 74857 - DNA, 17 bp, Arabidopsis thaliana
cctagaacttacctctc

SEQ ID NO: 74858 - DNA, 17 bp, Arabidopsis thaliana
cctagaatgtaccatat

SEQ ID NO: 74859 - DNA, 17 bp, Arabidopsis thaliana
cctagagaaattacggg

SEQ ID NO: 74860 - DNA, 17 bp, Arabidopsis thaliana
cctagagccgagctgtg

SEQ ID NO: 74861 - DNA, 17 bp, Arabidopsis thaliana
cctagagtcttctactg

SEQ ID NO: 74862 - DNA, 17 bp, Arabidopsis thaliana
cctagataggcgggcct

SEQ ID NO: 74863 - DNA, 17 bp, Arabidopsis thaliana
cctagatattcggcagg

SEQ ID NO: 74864 - DNA, 17 bp, Arabidopsis thaliana
cctagatcagctccttg

SEQ ID NO: 74865 - DNA, 17 bp, Arabidopsis thaliana
cctagatcatcctctct

SEQ ID NO: 74866 - DNA, 17 bp, Arabidopsis thaliana
cctagatccgcacgacg

SEQ ID NO: 74867 - DNA, 17 bp, Arabidopsis thaliana
cctagatcgtcgctttg

SEQ ID NO: 74868 - DNA, 17 bp, Arabidopsis thaliana
cctagatggcgagagtc

SEQ ID NO: 74869 - DNA, 17 bp, Arabidopsis thaliana
cctagatgtcgagtatg

SEQ ID NO: 74870 - DNA, 17 bp, Arabidopsis thaliana
cctagattcgtcggtag

SEQ ID NO: 74871 - DNA, 17 bp, Arabidopsis thaliana
cctagcgcattactgag

SEQ ID NO: 74872 - DNA, 17 bp, Arabidopsis thaliana
cctaggaagacctttct

SEQ ID NO: 74873 - DNA, 17 bp, Arabidopsis thaliana
cctaggacaccgctgaa

SEQ ID NO: 74874 - DNA, 17 bp, Arabidopsis thaliana
cctaggacttgggctat

SEQ ID NO: 74875 - DNA, 17 bp, Arabidopsis thaliana
cctaggaggattacggg

SEQ ID NO: 74876 - DNA, 17 bp, Arabidopsis thaliana
cctaggagttgtgcgat

SEQ ID NO: 74877 - DNA, 17 bp, Arabidopsis thaliana
cctaggatacgccgtgc

SEQ ID NO: 74878 - DNA, 17 bp, Arabidopsis thaliana
cctaggatgggtgacct

SEQ ID NO: 74879 - DNA, 17 bp, Arabidopsis thaliana
cctaggattcgtgggtc

SEQ ID NO: 74880 - DNA, 17 bp, Arabidopsis thaliana
cctaggattggctttgg

SEQ ID NO: 74881 - DNA, 17 bp, Arabidopsis thaliana
cctaggcccgaaaccac

SEQ ID NO: 74882 - DNA, 17 bp, Arabidopsis thaliana
cctaggcgaaacttaga

SEQ ID NO: 74883 - DNA, 17 bp, Arabidopsis thaliana
cctaggcggattagtcg

SEQ ID NO: 74884 - DNA, 17 bp, Arabidopsis thaliana
cctaggctaagcttaga

SEQ ID NO: 74885 - DNA, 17 bp, Arabidopsis thaliana
cctaggctttggattgt

SEQ ID NO: 74886 - DNA, 17 bp, Arabidopsis thaliana
cctagggatagctttca

SEQ ID NO: 74887 - DNA, 17 bp, Arabidopsis thaliana
cctagggcacgtctgcc

SEQ ID NO: 74888 - DNA, 17 bp, Arabidopsis thaliana
cctagggcctaggtgac

SEQ ID NO: 74889 - DNA, 17 bp, Arabidopsis thaliana
cctagggggtgaatcta

SEQ ID NO: 74890 - DNA, 17 bp, Arabidopsis thaliana
cctagggtttgaccttc

SEQ ID NO: 74891 - DNA, 17 bp, Arabidopsis thaliana
cctaggttggatgggcg

SEQ ID NO: 74892 - DNA, 17 bp, Arabidopsis thaliana
cctagtacgagaggaac

SEQ ID NO: 74893 - DNA, 17 bp, Arabidopsis thaliana
cctagtactactctcgc

SEQ ID NO: 74894 - DNA, 17 bp, Arabidopsis thaliana
cctagtcgatcctgtag

SEQ ID NO: 74895 - DNA, 17 bp, Arabidopsis thaliana
cctagtcgatttgtgcc

SEQ ID NO: 74896 - DNA, 17 bp, Arabidopsis thaliana
cctagtcgcacctgtag

SEQ ID NO: 74897 - DNA, 17 bp, Arabidopsis thaliana
cctagtcgcactgtaga

SEQ ID NO: 74898 - DNA, 17 bp, Arabidopsis thaliana
cctagtcgcatcctgta

SEQ ID NO: 74899 - DNA, 17 bp, Arabidopsis thaliana
cctagtgaagggggcgt

SEQ ID NO: 74900 - DNA, 17 bp, Arabidopsis thaliana
cctagtgactggttgat

SEQ ID NO: 74901 - DNA, 17 bp, Arabidopsis thaliana
cctagtgatgtggacag

SEQ ID NO: 74902 - DNA, 17 bp, Arabidopsis thaliana
cctagtgctcaggtggt

SEQ ID NO: 74903 - DNA, 17 bp, Arabidopsis thaliana
cctagtgcttgtgtcca

SEQ ID NO: 74904 - DNA, 17 bp, Arabidopsis thaliana
cctagtgggaccaaacc

SEQ ID NO: 74905 - DNA, 17 bp, Arabidopsis thaliana
cctagtgttgctggctg

SEQ ID NO: 74906 - DNA, 17 bp, Arabidopsis thaliana
cctagttgcgattttgg

SEQ ID NO: 74907 - DNA, 17 bp, Arabidopsis thaliana
cctagttggatgtaagc

SEQ ID NO: 74908 - DNA, 17 bp, Arabidopsis thaliana
cctataattcttcattg

SEQ ID NO: 74909 - DNA, 17 bp, Arabidopsis thaliana
cctatacgtttttcact

SEQ ID NO: 74910 - DNA, 17 bp, Arabidopsis thaliana
cctatagcgaaaccata

SEQ ID NO: 74911 - DNA, 17 bp, Arabidopsis thaliana
cctatcacgttgagagc

SEQ ID NO: 74912 - DNA, 17 bp, Arabidopsis thaliana
cctatcagaagctgcac

SEQ ID NO: 74913 - DNA, 17 bp, Arabidopsis thaliana
cctatcatgctcaagat

SEQ ID NO: 74914 - DNA, 17 bp, Arabidopsis thaliana
cctatcattgtgaagca

SEQ ID NO: 74915 - DNA, 17 bp, Arabidopsis thaliana
cctatccatcctgagtt

SEQ ID NO: 74916 - DNA, 17 bp, Arabidopsis thaliana
cctatcctgagcggtaa

SEQ ID NO: 74917 - DNA, 17 bp, Arabidopsis thaliana
cctatcgaattcatcaa

SEQ ID NO: 74918 - DNA, 17 bp, Arabidopsis thaliana
cctatcggatgtctctg

SEQ ID NO: 74919 - DNA, 17 bp, Arabidopsis thaliana
cctatcggctgattcag

SEQ ID NO: 74920 - DNA, 17 bp, Arabidopsis thaliana
cctatcggctgattcgg

SEQ ID NO: 74921 - DNA, 17 bp, Arabidopsis thaliana
cctatcggtcttcgtgg

SEQ ID NO: 74922 - DNA, 17 bp, Arabidopsis thaliana
cctatctagacgggcat

SEQ ID NO: 74923 - DNA, 17 bp, Arabidopsis thaliana
cctatctagacgggcct

SEQ ID NO: 74924 - DNA, 17 bp, Arabidopsis thaliana
cctatctagacgggtct

SEQ ID NO: 74925 - DNA, 17 bp, Arabidopsis thaliana
cctatctaggttaggcc

SEQ ID NO: 74926 - DNA, 17 bp, Arabidopsis thaliana
cctatctatttaggcgg

SEQ ID NO: 74927 - DNA, 17 bp, Arabidopsis thaliana
cctatctcgataacagt

SEQ ID NO: 74928 - DNA, 17 bp, Arabidopsis thaliana
cctatctgcgatcgtgc

SEQ ID NO: 74929 - DNA, 17 bp, Arabidopsis thaliana
cctatctgctcgcaaag

SEQ ID NO: 74930 - DNA, 17 bp, Arabidopsis thaliana
cctatgaattttgaccc

SEQ ID NO: 74931 - DNA, 17 bp, Arabidopsis thaliana
cctatgagattacgagt

SEQ ID NO: 74932 - DNA, 17 bp, Arabidopsis thaliana
cctatgatactcatttt

SEQ ID NO: 74933 - DNA, 17 bp, Arabidopsis thaliana
cctatgccctgttcgtt

SEQ ID NO: 74934 - DNA, 17 bp, Arabidopsis thaliana
cctatgctggaccatcg

SEQ ID NO: 74935 - DNA, 17 bp, Arabidopsis thaliana
cctatggatggttggca

SEQ ID NO: 74936 - DNA, 17 bp, Arabidopsis thaliana
cctatggggtcgcttct

SEQ ID NO: 74937 - DNA, 17 bp, Arabidopsis thaliana
cctatggttagactttg

SEQ ID NO: 74938 - DNA, 17 bp, Arabidopsis thaliana
cctatgtcaccattcat

SEQ ID NO: 74939 - DNA, 17 bp, Arabidopsis thaliana
cctatgtggctcataca

SEQ ID NO: 74940 - DNA, 17 bp, Arabidopsis thaliana
cctatgttgggctgtga

SEQ ID NO: 74941 - DNA, 17 bp, Arabidopsis thaliana
cctatgtttctaccatc

SEQ ID NO: 74942 - DNA, 17 bp, Arabidopsis thaliana
cctattacatgctgtgg

SEQ ID NO: 74943 - DNA, 17 bp, Arabidopsis thaliana
cctattaccaggtaggt

SEQ ID NO: 74944 - DNA, 17 bp, Arabidopsis thaliana
cctattagtaggcccag

SEQ ID NO: 74945 - DNA, 17 bp, Arabidopsis thaliana
cctattccgttcgcagt

SEQ ID NO: 74946 - DNA, 17 bp, Arabidopsis thaliana
cctattcgggttcgggt

SEQ ID NO: 74947 - DNA, 17 bp, Arabidopsis thaliana
cctattcgggtttgggt

SEQ ID NO: 74948 - DNA, 17 bp, Arabidopsis thaliana
cctattctcaggtggct

SEQ ID NO: 74949 - DNA, 17 bp, Arabidopsis thaliana
cctattctccagaagct

SEQ ID NO: 74950 - DNA, 17 bp, Arabidopsis thaliana
cctattggtcagttttt

SEQ ID NO: 74951 - DNA, 17 bp, Arabidopsis thaliana
cctattggttctagacg

SEQ ID NO: 74952 - DNA, 17 bp, Arabidopsis thaliana
cctattggttgcattgc

SEQ ID NO: 74953 - DNA, 17 bp, Arabidopsis thaliana
cctattgtgttggcctt

SEQ ID NO: 74954 - DNA, 17 bp, Arabidopsis thaliana
cctattgtgttggcttt

SEQ ID NO: 74955 - DNA, 17 bp, Arabidopsis thaliana
cctattgttcttgcgat

SEQ ID NO: 74956 - DNA, 17 bp, Arabidopsis thaliana
cctatttactaaactgc

SEQ ID NO: 74957 - DNA, 17 bp, Arabidopsis thaliana
cctatttactacggcga

SEQ ID NO: 74958 - DNA, 17 bp, Arabidopsis thaliana
cctatttacttaactac

SEQ ID NO: 74959 - DNA, 17 bp, Arabidopsis thaliana
cctatttaggcgggcct

SEQ ID NO: 74960 - DNA, 17 bp, Arabidopsis thaliana
cctatttaggcgggtgt

SEQ ID NO: 74961 - DNA, 17 bp, Arabidopsis thaliana
cctatttatgcgggcct

SEQ ID NO: 74962 - DNA, 17 bp, Arabidopsis thaliana
cctatttcccggctgtt

SEQ ID NO: 74963 - DNA, 17 bp, Arabidopsis thaliana
cctatttcctatatgtg

SEQ ID NO: 74964 - DNA, 17 bp, Arabidopsis thaliana
cctatttggctgcgtga

SEQ ID NO: 74965 - DNA, 17 bp, Arabidopsis thaliana
cctatttggcttgatcg

SEQ ID NO: 74966 - DNA, 17 bp, Arabidopsis thaliana
cctatttgtgacgatct

SEQ ID NO: 74967 - DNA, 17 bp, Arabidopsis thaliana
cctatttgtggccaaag

SEQ ID NO: 74968 - DNA, 17 bp, Arabidopsis thaliana
cctatttgtggctaaag

SEQ ID NO: 74969 - DNA, 17 bp, Arabidopsis thaliana
cctattttgggcttaga

SEQ ID NO: 74970 - DNA, 17 bp, Arabidopsis thaliana
cctatttttgcacgaat

SEQ ID NO: 74971 - DNA, 17 bp, Arabidopsis thaliana
cctcaaaattaccgttt

SEQ ID NO: 74972 - DNA, 17 bp, Arabidopsis thaliana
cctcaaccggaatcgct

SEQ ID NO: 74973 - DNA, 17 bp, Arabidopsis thaliana
cctcaactctcatctac

SEQ ID NO: 74974 - DNA, 17 bp, Arabidopsis thaliana
cctcaactggatcttaa

SEQ ID NO: 74975 - DNA, 17 bp, Arabidopsis thaliana
cctcaacttcatacaca

SEQ ID NO: 74976 - DNA, 17 bp, Arabidopsis thaliana
cctcaacttctcttgcg

SEQ ID NO: 74977 - DNA, 17 bp, Arabidopsis thaliana
cctcaacttgattcgtc

SEQ ID NO: 74978 - DNA, 17 bp, Arabidopsis thaliana
cctcaactttacatgcg

SEQ ID NO: 74979 - DNA, 17 bp, Arabidopsis thaliana
cctcaactttggccaga

SEQ ID NO: 74980 - DNA, 17 bp, Arabidopsis thaliana
cctcaactttggccagc

SEQ ID NO: 74981 - DNA, 17 bp, Arabidopsis thaliana
cctcaactttggctaga

SEQ ID NO: 74982 - DNA, 17 bp, Arabidopsis thaliana
cctcaactttggctagc

SEQ ID NO: 74983 - DNA, 17 bp, Arabidopsis thaliana
cctcaacttttgccaga

SEQ ID NO: 74984 - DNA, 17 bp, Arabidopsis thaliana
cctcaagactctggtcg

SEQ ID NO: 74985 - DNA, 17 bp, Arabidopsis thaliana
cctcaaggcccaaccaa

SEQ ID NO: 74986 - DNA, 17 bp, Arabidopsis thaliana
cctcaaggcccaaccca

SEQ ID NO: 74987 - DNA, 17 bp, Arabidopsis thaliana
cctcaagtctgtcatgt

SEQ ID NO: 74988 - DNA, 17 bp, Arabidopsis thaliana
cctcaagtctgttggtt

SEQ ID NO: 74989 - DNA, 17 bp, Arabidopsis thaliana
cctcaagtttgcgttga

SEQ ID NO: 74990 - DNA, 17 bp, Arabidopsis thaliana
cctcaataggcggacct

SEQ ID NO: 74991 - DNA, 17 bp, Arabidopsis thaliana
cctcaatccgagccaag

SEQ ID NO: 74992 - DNA, 17 bp, Arabidopsis thaliana
cctcaatcgatcttagt

SEQ ID NO: 74993 - DNA, 17 bp, Arabidopsis thaliana
cctcaatgattatgaac

SEQ ID NO: 74994 - DNA, 17 bp, Arabidopsis thaliana
cctcaattccgcaacat

SEQ ID NO: 74995 - DNA, 17 bp, Arabidopsis thaliana
cctcaattggcttagtc

SEQ ID NO: 74996 - DNA, 17 bp, Arabidopsis thaliana
cctcaatttacggattc

SEQ ID NO: 74997 - DNA, 17 bp, Arabidopsis thaliana
cctcaattttggccagc

SEQ ID NO: 74998 - DNA, 17 bp, Arabidopsis thaliana
cctcacaccgcccgtcg

SEQ ID NO: 74999 - DNA, 17 bp, Arabidopsis thaliana
cctcacacgactttgag

SEQ ID NO: 75000 - DNA, 17 bp, Arabidopsis thaliana
cctcaccacgaggcgct

SEQ ID NO: 75001 - DNA, 17 bp, Arabidopsis thaliana
cctcaccgaaacaacac

SEQ ID NO: 75002 - DNA, 17 bp, Arabidopsis thaliana
cctcaccggtgggaaga

SEQ ID NO: 75003 - DNA, 17 bp, Arabidopsis thaliana
cctcaccgttgcggcta

SEQ ID NO: 75004 - DNA, 17 bp, Arabidopsis thaliana
cctcacctagggtatgg

SEQ ID NO: 75005 - DNA, 17 bp, Arabidopsis thaliana
cctcacggccaccacaa

SEQ ID NO: 75006 - DNA, 17 bp, Arabidopsis thaliana
cctcacggtctaaaagt

SEQ ID NO: 75007 - DNA, 17 bp, Arabidopsis thaliana
cctcactactgagagct

SEQ ID NO: 75008 - DNA, 17 bp, Arabidopsis thaliana
cctcactgctctatctg

SEQ ID NO: 75009 - DNA, 17 bp, Arabidopsis thaliana
cctcacttctccggtct

SEQ ID NO: 75010 - DNA, 17 bp, Arabidopsis thaliana
cctcagactcgctgaat

SEQ ID NO: 75011 - DNA, 17 bp, Arabidopsis thaliana
cctcagagccaatcctt

SEQ ID NO: 75012 - DNA, 17 bp, Arabidopsis thaliana
cctcagatccatcttct

SEQ ID NO: 75013 - DNA, 17 bp, Arabidopsis thaliana
cctcagcctgctaacta

SEQ ID NO: 75014 - DNA, 17 bp, Arabidopsis thaliana
cctcagcgacggaccga

SEQ ID NO: 75015 - DNA, 17 bp, Arabidopsis thaliana
cctcagcgacggaccgg

SEQ ID NO: 75016 - DNA, 17 bp, Arabidopsis thaliana
cctcagctatggtgtat

SEQ ID NO: 75017 - DNA, 17 bp, Arabidopsis thaliana
cctcagctgcggtaact

SEQ ID NO: 75018 - DNA, 17 bp, Arabidopsis thaliana
cctcagctttggccaga

SEQ ID NO: 75019 - DNA, 17 bp, Arabidopsis thaliana
cctcagctttgggatgg

SEQ ID NO: 75020 - DNA, 17 bp, Arabidopsis thaliana
cctcaggactaattccg

SEQ ID NO: 75021 - DNA, 17 bp, Arabidopsis thaliana
cctcaggaggcttagca

SEQ ID NO: 75022 - DNA, 17 bp, Arabidopsis thaliana
cctcaggatagctggag

SEQ ID NO: 75023 - DNA, 17 bp, Arabidopsis thaliana
cctcaggattgcggtaa

SEQ ID NO: 75024 - DNA, 17 bp, Arabidopsis thaliana
cctcaggattggctcgt

SEQ ID NO: 75025 - DNA, 17 bp, Arabidopsis thaliana
cctcaggccgaattgtc

SEQ ID NO: 75026 - DNA, 17 bp, Arabidopsis thaliana
cctcaggcgaccaagga

SEQ ID NO: 75027 - DNA, 17 bp, Arabidopsis thaliana
cctcaggcgaccgagga

SEQ ID NO: 75028 - DNA, 17 bp, Arabidopsis thaliana
cctcaggctaaaatcta

SEQ ID NO: 75029 - DNA, 17 bp, Arabidopsis thaliana
cctcaggtggtgcatgg

SEQ ID NO: 75030 - DNA, 17 bp, Arabidopsis thaliana
cctcaggtttgacttgt

SEQ ID NO: 75031 - DNA, 17 bp, Arabidopsis thaliana
cctcagtaggagcttag

SEQ ID NO: 75032 - DNA, 17 bp, Arabidopsis thaliana
cctcagtaggagcttat

SEQ ID NO: 75033 - DNA, 17 bp, Arabidopsis thaliana
cctcagtatttccctca

SEQ ID NO: 75034 - DNA, 17 bp, Arabidopsis thaliana
cctcagtgactgacttg

SEQ ID NO: 75035 - DNA, 17 bp, Arabidopsis thaliana
cctcagtgttgaactag

SEQ ID NO: 75036 - DNA, 17 bp, Arabidopsis thaliana
cctcagtgttgttgcgt

SEQ ID NO: 75037 - DNA, 17 bp, Arabidopsis thaliana
cctcagttcggattgca

SEQ ID NO: 75038 - DNA, 17 bp, Arabidopsis thaliana
cctcataagtggaggct

SEQ ID NO: 75039 - DNA, 17 bp, Arabidopsis thaliana
cctcatatggttccgac

SEQ ID NO: 75040 - DNA, 17 bp, Arabidopsis thaliana
cctcatattggcttcta

SEQ ID NO: 75041 - DNA, 17 bp, Arabidopsis thaliana
cctcatcactcgactcc

SEQ ID NO: 75042 - DNA, 17 bp, Arabidopsis thaliana
cctcatcactgagaacc

SEQ ID NO: 75043 - DNA, 17 bp, Arabidopsis thaliana
cctcatcagctctgtgg

SEQ ID NO: 75044 - DNA, 17 bp, Arabidopsis thaliana
cctcatcattacaaggc

SEQ ID NO: 75045 - DNA, 17 bp, Arabidopsis thaliana
cctcatccaatggcgga

SEQ ID NO: 75046 - DNA, 17 bp, Arabidopsis thaliana
cctcatccctgacaagt

SEQ ID NO: 75047 - DNA, 17 bp, Arabidopsis thaliana
cctcatcctcacacgca

SEQ ID NO: 75048 - DNA, 17 bp, Arabidopsis thaliana
cctcatcctgttgtgat

SEQ ID NO: 75049 - DNA, 17 bp, Arabidopsis thaliana
cctcatcctgttgtgct

SEQ ID NO: 75050 - DNA, 17 bp, Arabidopsis thaliana
cctcatcgatgatggtg

SEQ ID NO: 75051 - DNA, 17 bp, Arabidopsis thaliana
cctcatcgttcgccgga

SEQ ID NO: 75052 - DNA, 17 bp, Arabidopsis thaliana
cctcatgagggtgggaa

SEQ ID NO: 75053 - DNA, 17 bp, Arabidopsis thaliana
cctcatgagtggaggct

SEQ ID NO: 75054 - DNA, 17 bp, Arabidopsis thaliana
cctcatggattccattc

SEQ ID NO: 75055 - DNA, 17 bp, Arabidopsis thaliana
cctcatgtggttctcat

SEQ ID NO: 75056 - DNA, 17 bp, Arabidopsis thaliana
cctcatgttccatcaca

SEQ ID NO: 75057 - DNA, 17 bp, Arabidopsis thaliana
cctcatgttccttctgg

SEQ ID NO: 75058 - DNA, 17 bp, Arabidopsis thaliana
cctcattacatgtgccc

SEQ ID NO: 75059 - DNA, 17 bp, Arabidopsis thaliana
cctcattctccattagc

SEQ ID NO: 75060 - DNA, 17 bp, Arabidopsis thaliana
cctcattctcctacatg

SEQ ID NO: 75061 - DNA, 17 bp, Arabidopsis thaliana
cctcatttctgggttcc

SEQ ID NO: 75062 - DNA, 17 bp, Arabidopsis thaliana
cctcatttgccgccagg

SEQ ID NO: 75063 - DNA, 17 bp, Arabidopsis thaliana
cctcatttgctgccagc

SEQ ID NO: 75064 - DNA, 17 bp, Arabidopsis thaliana
cctcatttgctgccagg

SEQ ID NO: 75065 - DNA, 17 bp, Arabidopsis thaliana
cctcatttgtttctcgg

SEQ ID NO: 75066 - DNA, 17 bp, Arabidopsis thaliana
cctcattttccaggtaa

SEQ ID NO: 75067 - DNA, 17 bp, Arabidopsis thaliana
cctcattttgcgccgat

SEQ ID NO: 75068 - DNA, 17 bp, Arabidopsis thaliana
cctccaaagtgcggtgc

SEQ ID NO: 75069 - DNA, 17 bp, Arabidopsis thaliana
cctccaaatggtccaca

SEQ ID NO: 75070 - DNA, 17 bp, Arabidopsis thaliana
cctccaactgtgtgaca

SEQ ID NO: 75071 - DNA, 17 bp, Arabidopsis thaliana
cctccaaggatgacttg

SEQ ID NO: 75072 - DNA, 17 bp, Arabidopsis thaliana
cctccaattttcgatgt

SEQ ID NO: 75073 - DNA, 17 bp, Arabidopsis thaliana
cctccaccaccaccgcc

SEQ ID NO: 75074 - DNA, 17 bp, Arabidopsis thaliana
cctccaccgtacgggtt

SEQ ID NO: 75075 - DNA, 17 bp, Arabidopsis thaliana
cctccaccttcaagacc

SEQ ID NO: 75076 - DNA, 17 bp, Arabidopsis thaliana
cctccactgcagttaga

SEQ ID NO: 75077 - DNA, 17 bp, Arabidopsis thaliana
cctccagacccgtaacc

SEQ ID NO: 75078 - DNA, 17 bp, Arabidopsis thaliana
cctccagcaaattcagg

SEQ ID NO: 75079 - DNA, 17 bp, Arabidopsis thaliana
cctccagctcgatgagc

SEQ ID NO: 75080 - DNA, 17 bp, Arabidopsis thaliana
cctccaggagcccatca

SEQ ID NO: 75081 - DNA, 17 bp, Arabidopsis thaliana
cctccaggcccgaaacc

SEQ ID NO: 75082 - DNA, 17 bp, Arabidopsis thaliana
cctccaggtccgaaacc

SEQ ID NO: 75083 - DNA, 17 bp, Arabidopsis thaliana
cctccaggtcgatgagc

SEQ ID NO: 75084 - DNA, 17 bp, Arabidopsis thaliana
cctccatacggtcgagc

SEQ ID NO: 75085 - DNA, 17 bp, Arabidopsis thaliana
cctccatccttgcctgc

SEQ ID NO: 75086 - DNA, 17 bp, Arabidopsis thaliana
cctccatcgggagggac

SEQ ID NO: 75087 - DNA, 17 bp, Arabidopsis thaliana
cctccatcgggagtttc

SEQ ID NO: 75088 - DNA, 17 bp, Arabidopsis thaliana
cctcccaatcaggatcg

SEQ ID NO: 75089 - DNA, 17 bp, Arabidopsis thaliana
cctcccacatttgatga

SEQ ID NO: 75090 - DNA, 17 bp, Arabidopsis thaliana
cctcccacccacccacc

SEQ ID NO: 75091 - DNA, 17 bp, Arabidopsis thaliana
cctcccagggagtagtc

SEQ ID NO: 75092 - DNA, 17 bp, Arabidopsis thaliana
cctcccctccttctatc

SEQ ID NO: 75093 - DNA, 17 bp, Arabidopsis thaliana
cctcccctgtggtttct

SEQ ID NO: 75094 - DNA, 17 bp, Arabidopsis thaliana
cctcccgatccaacggt

SEQ ID NO: 75095 - DNA, 17 bp, Arabidopsis thaliana
cctcccgtgtagcgatg

SEQ ID NO: 75096 - DNA, 17 bp, Arabidopsis thaliana
cctccctaacagaccgg

SEQ ID NO: 75097 - DNA, 17 bp, Arabidopsis thaliana
cctccctacatccgcca

SEQ ID NO: 75098 - DNA, 17 bp, Arabidopsis thaliana
cctccctacgggtcctg

SEQ ID NO: 75099 - DNA, 17 bp, Arabidopsis thaliana
cctccctcaagactctg

SEQ ID NO: 75100 - DNA, 17 bp, Arabidopsis thaliana
cctccctcagcgacgga

SEQ ID NO: 75101 - DNA, 17 bp, Arabidopsis thaliana
cctccctcaggactaat

SEQ ID NO: 75102 - DNA, 17 bp, Arabidopsis thaliana
cctccctcaggatagct

SEQ ID NO: 75103 - DNA, 17 bp, Arabidopsis thaliana
cctccctcagttcggat

SEQ ID NO: 75104 - DNA, 17 bp, Arabidopsis thaliana
cctccctccaggtccga

SEQ ID NO: 75105 - DNA, 17 bp, Arabidopsis thaliana
cctccctccgagacgtc

SEQ ID NO: 75106 - DNA, 17 bp, Arabidopsis thaliana
cctccctcctaactagc

SEQ ID NO: 75107 - DNA, 17 bp, Arabidopsis thaliana
cctccctcctcgaccgg

SEQ ID NO: 75108 - DNA, 17 bp, Arabidopsis thaliana
cctccctctcaaatgtt

SEQ ID NO: 75109 - DNA, 17 bp, Arabidopsis thaliana
cctccctgagaaacggc

SEQ ID NO: 75110 - DNA, 17 bp, Arabidopsis thaliana
cctccctgagggattac

SEQ ID NO: 75111 - DNA, 17 bp, Arabidopsis thaliana
cctccctgcaatagtgc

SEQ ID NO: 75112 - DNA, 17 bp, Arabidopsis thaliana
cctccctgcatttctga

SEQ ID NO: 75113 - DNA, 17 bp, Arabidopsis thaliana
cctccctgcatttttga

SEQ ID NO: 75114 - DNA, 17 bp, Arabidopsis thaliana
cctccctgctaactagc

SEQ ID NO: 75115 - DNA, 17 bp, Arabidopsis thaliana
cctccctgcttttgtac

SEQ ID NO: 75116 - DNA, 17 bp, Arabidopsis thaliana
cctccctggaggattaa

SEQ ID NO: 75117 - DNA, 17 bp, Arabidopsis thaliana
cctccctggagggatta

SEQ ID NO: 75118 - DNA, 17 bp, Arabidopsis thaliana
cctccctgggaggatta

SEQ ID NO: 75119 - DNA, 17 bp, Arabidopsis thaliana
cctccctgggattggct

SEQ ID NO: 75120 - DNA, 17 bp, Arabidopsis thaliana
cctccctgggttcagct

SEQ ID NO: 75121 - DNA, 17 bp, Arabidopsis thaliana
cctccctgggttcggct

SEQ ID NO: 75122 - DNA, 17 bp, Arabidopsis thaliana
cctccctgttcgggttt

SEQ ID NO: 75123 - DNA, 17 bp, Arabidopsis thaliana
cctcccttacaatcgtg

SEQ ID NO: 75124 - DNA, 17 bp, Arabidopsis thaliana
cctcccttagatgttct

SEQ ID NO: 75125 - DNA, 17 bp, Arabidopsis thaliana
cctcccttctcatcaat

SEQ ID NO: 75126 - DNA, 17 bp, Arabidopsis thaliana
cctcccttctcatcgat

SEQ ID NO: 75127 - DNA, 17 bp, Arabidopsis thaliana
cctcccttcttgggatt

SEQ ID NO: 75128 - DNA, 17 bp, Arabidopsis thaliana
cctcccttgatcttctg

SEQ ID NO: 75129 - DNA, 17 bp, Arabidopsis thaliana
cctccctttacggaatg

SEQ ID NO: 75130 - DNA, 17 bp, Arabidopsis thaliana
cctccctttgtcgctaa

SEQ ID NO: 75131 - DNA, 17 bp, Arabidopsis thaliana
cctccgaagtttccctc

SEQ ID NO: 75132 - DNA, 17 bp, Arabidopsis thaliana
cctccgacaagcttcta

SEQ ID NO: 75133 - DNA, 17 bp, Arabidopsis thaliana
cctccgacgaaataagc

SEQ ID NO: 75134 - DNA, 17 bp, Arabidopsis thaliana
cctccgacgatttcttt

SEQ ID NO: 75135 - DNA, 17 bp, Arabidopsis thaliana
cctccgagacgtcggga

SEQ ID NO: 75136 - DNA, 17 bp, Arabidopsis thaliana
cctccgatttctttctt

SEQ ID NO: 75137 - DNA, 17 bp, Arabidopsis thaliana
cctccgccgattttccc

SEQ ID NO: 75138 - DNA, 17 bp, Arabidopsis thaliana
cctccgccgggatttct

SEQ ID NO: 75139 - DNA, 17 bp, Arabidopsis thaliana
cctccgctacacgctgc

SEQ ID NO: 75140 - DNA, 17 bp, Arabidopsis thaliana
cctccgcttaaaattac

SEQ ID NO: 75141 - DNA, 17 bp, Arabidopsis thaliana
cctccggattttcaagg

SEQ ID NO: 75142 - DNA, 17 bp, Arabidopsis thaliana
cctccggctttccttca

SEQ ID NO: 75143 - DNA, 17 bp, Arabidopsis thaliana
cctccggtgctgttact

SEQ ID NO: 75144 - DNA, 17 bp, Arabidopsis thaliana
cctccggttggggatgg

SEQ ID NO: 75145 - DNA, 17 bp, Arabidopsis thaliana
cctccgtcaccgacctt

SEQ ID NO: 75146 - DNA, 17 bp, Arabidopsis thaliana
cctccgtctgcgtttag

SEQ ID NO: 75147 - DNA, 17 bp, Arabidopsis thaliana
cctccgtgacgtcggga

SEQ ID NO: 75148 - DNA, 17 bp, Arabidopsis thaliana
cctccgtgactgcgagc

SEQ ID NO: 75149 - DNA, 17 bp, Arabidopsis thaliana
cctccgtggatggcgta

SEQ ID NO: 75150 - DNA, 17 bp, Arabidopsis thaliana
cctccgtttattcgttt

SEQ ID NO: 75151 - DNA, 17 bp, Arabidopsis thaliana
cctcctaactagctacg

SEQ ID NO: 75152 - DNA, 17 bp, Arabidopsis thaliana
cctcctatttcctctcg

SEQ ID NO: 75153 - DNA, 17 bp, Arabidopsis thaliana
cctcctcagaattggcg

SEQ ID NO: 75154 - DNA, 17 bp, Arabidopsis thaliana
cctcctcatcgatggtc

SEQ ID NO: 75155 - DNA, 17 bp, Arabidopsis thaliana
cctcctccctctgccta

SEQ ID NO: 75156 - DNA, 17 bp, Arabidopsis thaliana
cctcctcgaccggcgtt

SEQ ID NO: 75157 - DNA, 17 bp, Arabidopsis thaliana
cctcctcgcactccggt

SEQ ID NO: 75158 - DNA, 17 bp, Arabidopsis thaliana
cctcctcgcccaccaat

SEQ ID NO: 75159 - DNA, 17 bp, Arabidopsis thaliana
cctcctcggaaaggtcg

SEQ ID NO: 75160 - DNA, 17 bp, Arabidopsis thaliana
cctcctcttaggatgtc

SEQ ID NO: 75161 - DNA, 17 bp, Arabidopsis thaliana
cctccttagatgttctg

SEQ ID NO: 75162 - DNA, 17 bp, Arabidopsis thaliana
cctccttattgtggttt

SEQ ID NO: 75163 - DNA, 17 bp, Arabidopsis thaliana
cctccttgttgcgcccg

SEQ ID NO: 75164 - DNA, 17 bp, Arabidopsis thaliana
cctcctttccggtgcca

SEQ ID NO: 75165 - DNA, 17 bp, Arabidopsis thaliana
cctcctttggtgactga

SEQ ID NO: 75166 - DNA, 17 bp, Arabidopsis thaliana
cctcctttggtggatac

SEQ ID NO: 75167 - DNA, 17 bp, Arabidopsis thaliana
cctcgaaaaccgcatag

SEQ ID NO: 75168 - DNA, 17 bp, Arabidopsis thaliana
cctcgaaatcaggatcg

SEQ ID NO: 75169 - DNA, 17 bp, Arabidopsis thaliana
cctcgaagctactgcga

SEQ ID NO: 75170 - DNA, 17 bp, Arabidopsis thaliana
cctcgaatgatacggct

SEQ ID NO: 75171 - DNA, 17 bp, Arabidopsis thaliana
cctcgacctgccagcat

SEQ ID NO: 75172 - DNA, 17 bp, Arabidopsis thaliana
cctcgacgtcgcgagaa

SEQ ID NO: 75173 - DNA, 17 bp, Arabidopsis thaliana
cctcgactggatctgtt

SEQ ID NO: 75174 - DNA, 17 bp, Arabidopsis thaliana
cctcgactgtcattcag

SEQ ID NO: 75175 - DNA, 17 bp, Arabidopsis thaliana
cctcgactttggctagg

SEQ ID NO: 75176 - DNA, 17 bp, Arabidopsis thaliana
cctcgagatctgtgcgc

SEQ ID NO: 75177 - DNA, 17 bp, Arabidopsis thaliana
cctcgaggcgtgtcggc

SEQ ID NO: 75178 - DNA, 17 bp, Arabidopsis thaliana
cctcgataaatgtgcct

SEQ ID NO: 75179 - DNA, 17 bp, Arabidopsis thaliana
cctcgatatcgccgaat

SEQ ID NO: 75180 - DNA, 17 bp, Arabidopsis thaliana
cctcgatcctactattg

SEQ ID NO: 75181 - DNA, 17 bp, Arabidopsis thaliana
cctcgatcctgtagatg

SEQ ID NO: 75182 - DNA, 17 bp, Arabidopsis thaliana
cctcgatcggactctcc

SEQ ID NO: 75183 - DNA, 17 bp, Arabidopsis thaliana
cctcgatgagtaggagg

SEQ ID NO: 75184 - DNA, 17 bp, Arabidopsis thaliana
cctcgatggatcacgat

SEQ ID NO: 75185 - DNA, 17 bp, Arabidopsis thaliana
cctcgatgtcggctctt

SEQ ID NO: 75186 - DNA, 17 bp, Arabidopsis thaliana
cctcgattgtgaaaacc

SEQ ID NO: 75187 - DNA, 17 bp, Arabidopsis thaliana
cctcgcaaaacgactgt

SEQ ID NO: 75188 - DNA, 17 bp, Arabidopsis thaliana
cctcgcagcggcaggtg

SEQ ID NO: 75189 - DNA, 17 bp, Arabidopsis thaliana
cctcgcaggggagagac

SEQ ID NO: 75190 - DNA, 17 bp, Arabidopsis thaliana
cctcgcatagcgcagtg

SEQ ID NO: 75191 - DNA, 17 bp, Arabidopsis thaliana
cctcgccggaaaccacc

SEQ ID NO: 75192 - DNA, 17 bp, Arabidopsis thaliana
cctcgccggtgagagtg

SEQ ID NO: 75193 - DNA, 17 bp, Arabidopsis thaliana
cctcgcgggtgcaccgc

SEQ ID NO: 75194 - DNA, 17 bp, Arabidopsis thaliana
cctcgctaatatgtggt

SEQ ID NO: 75195 - DNA, 17 bp, Arabidopsis thaliana
cctcggaattagatggt

SEQ ID NO: 75196 - DNA, 17 bp, Arabidopsis thaliana
cctcggaccaggcttca

SEQ ID NO: 75197 - DNA, 17 bp, Arabidopsis thaliana
cctcggacccggtcgat

SEQ ID NO: 75198 - DNA, 17 bp, Arabidopsis thaliana
cctcggccacggccagc

SEQ ID NO: 75199 - DNA, 17 bp, Arabidopsis thaliana
cctcggctcaggccacc

SEQ ID NO: 75200 - DNA, 17 bp, Arabidopsis thaliana
cctcggctggtgaactc

SEQ ID NO: 75201 - DNA, 17 bp, Arabidopsis thaliana
cctcgggaagagttatc

SEQ ID NO: 75202 - DNA, 17 bp, Arabidopsis thaliana
cctcgggatgagggtat

SEQ ID NO: 75203 - DNA, 17 bp, Arabidopsis thaliana
cctcgggatgggtcggc

SEQ ID NO: 75204 - DNA, 17 bp, Arabidopsis thaliana
cctcgggattcgctaat

SEQ ID NO: 75205 - DNA, 17 bp, Arabidopsis thaliana
cctcgggtcttagcgag

SEQ ID NO: 75206 - DNA, 17 bp, Arabidopsis thaliana
cctcggtcagtttgtca

SEQ ID NO: 75207 - DNA, 17 bp, Arabidopsis thaliana
cctcggtccatatgtct

SEQ ID NO: 75208 - DNA, 17 bp, Arabidopsis thaliana
cctcggtggcggatgga

SEQ ID NO: 75209 - DNA, 17 bp, Arabidopsis thaliana
cctcggtgtgtacaaag

SEQ ID NO: 75210 - DNA, 17 bp, Arabidopsis thaliana
cctcgtaaacaggtaga

SEQ ID NO: 75211 - DNA, 17 bp, Arabidopsis thaliana
cctcgtaagtgaccaaa

SEQ ID NO: 75212 - DNA, 17 bp, Arabidopsis thaliana
cctcgtcactaatctcg

SEQ ID NO: 75213 - DNA, 17 bp, Arabidopsis thaliana
cctcgtcgccgctgcct

SEQ ID NO: 75214 - DNA, 17 bp, Arabidopsis thaliana
cctcgtctctgaaggca

SEQ ID NO: 75215 - DNA, 17 bp, Arabidopsis thaliana
cctcgtctgcctgggtg

SEQ ID NO: 75216 - DNA, 17 bp, Arabidopsis thaliana
cctcgtgcccggaccct

SEQ ID NO: 75217 - DNA, 17 bp, Arabidopsis thaliana
cctcgtggtgcgacagg

SEQ ID NO: 75218 - DNA, 17 bp, Arabidopsis thaliana
cctcgtggttaggcgtt

SEQ ID NO: 75219 - DNA, 17 bp, Arabidopsis thaliana
cctcgtggttagtggcg

SEQ ID NO: 75220 - DNA, 17 bp, Arabidopsis thaliana
cctcgtgtcctccaatg

SEQ ID NO: 75221 - DNA, 17 bp, Arabidopsis thaliana
cctcgtgttgcatctct

SEQ ID NO: 75222 - DNA, 17 bp, Arabidopsis thaliana
cctcgttcataagacgt

SEQ ID NO: 75223 - DNA, 17 bp, Arabidopsis thaliana
cctcgttccacttggag

SEQ ID NO: 75224 - DNA, 17 bp, Arabidopsis thaliana
cctcgttgagccaccgt

SEQ ID NO: 75225 - DNA, 17 bp, Arabidopsis thaliana
cctcgttgtctacgtcg

SEQ ID NO: 75226 - DNA, 17 bp, Arabidopsis thaliana
cctcgtttacacgtgcg

SEQ ID NO: 75227 - DNA, 17 bp, Arabidopsis thaliana
cctcgttttcgaatggc

SEQ ID NO: 75228 - DNA, 17 bp, Arabidopsis thaliana
cctctaaaatagagttt

SEQ ID NO: 75229 - DNA, 17 bp, Arabidopsis thaliana
cctctaaaggtgcactc

SEQ ID NO: 75230 - DNA, 17 bp, Arabidopsis thaliana
cctctaagcaatgtctt

SEQ ID NO: 75231 - DNA, 17 bp, Arabidopsis thaliana
cctctaagctctgagtg

SEQ ID NO: 75232 - DNA, 17 bp, Arabidopsis thaliana
cctctaagcttcaagtt

SEQ ID NO: 75233 - DNA, 17 bp, Arabidopsis thaliana
cctctaagcttcgtcta

SEQ ID NO: 75234 - DNA, 17 bp, Arabidopsis thaliana
cctctaagctttgcgta

SEQ ID NO: 75235 - DNA, 17 bp, Arabidopsis thaliana
cctctaaggtctgaggt

SEQ ID NO: 75236 - DNA, 17 bp, Arabidopsis thaliana
cctctaagtcagaatcc

SEQ ID NO: 75237 - DNA, 17 bp, Arabidopsis thaliana
cctctaagtcagaatgt

SEQ ID NO: 75238 - DNA, 17 bp, Arabidopsis thaliana
cctctaagtttcgccta

SEQ ID NO: 75239 - DNA, 17 bp, Arabidopsis thaliana
cctctaatatcctgcgg

SEQ ID NO: 75240 - DNA, 17 bp, Arabidopsis thaliana
cctctaattcgttcgag

SEQ ID NO: 75241 - DNA, 17 bp, Arabidopsis thaliana
cctctacagtggtaatt

SEQ ID NO: 75242 - DNA, 17 bp, Arabidopsis thaliana
cctctacatagatggtc

SEQ ID NO: 75243 - DNA, 17 bp, Arabidopsis thaliana
cctctacattttgggtg

SEQ ID NO: 75244 - DNA, 17 bp, Arabidopsis thaliana
cctctaccaatcatcaa

SEQ ID NO: 75245 - DNA, 17 bp, Arabidopsis thaliana
cctctacgctgctgcag

SEQ ID NO: 75246 - DNA, 17 bp, Arabidopsis thaliana
cctctacttacggttgg

SEQ ID NO: 75247 - DNA, 17 bp, Arabidopsis thaliana
cctctagatttctctcc

SEQ ID NO: 75248 - DNA, 17 bp, Arabidopsis thaliana
cctctatatggtggcct

SEQ ID NO: 75249 - DNA, 17 bp, Arabidopsis thaliana
cctctatcgtcttttgc

SEQ ID NO: 75250 - DNA, 17 bp, Arabidopsis thaliana
cctctatctgtgaagcg

SEQ ID NO: 75251 - DNA, 17 bp, Arabidopsis thaliana
cctctatgtagagcggc

SEQ ID NO: 75252 - DNA, 17 bp, Arabidopsis thaliana
cctctatgtgtacgcgc

SEQ ID NO: 75253 - DNA, 17 bp, Arabidopsis thaliana
cctctattacagtgctt

SEQ ID NO: 75254 - DNA, 17 bp, Arabidopsis thaliana
cctctattcggtccttc

SEQ ID NO: 75255 - DNA, 17 bp, Arabidopsis thaliana
cctctattggccgaaac

SEQ ID NO: 75256 - DNA, 17 bp, Arabidopsis thaliana
cctctatttcacgctcg

SEQ ID NO: 75257 - DNA, 17 bp, Arabidopsis thaliana
cctctatttcgctgtga

SEQ ID NO: 75258 - DNA, 17 bp, Arabidopsis thaliana
cctctcaaatgttgcaa

SEQ ID NO: 75259 - DNA, 17 bp, Arabidopsis thaliana
cctctcaagattgaaat

SEQ ID NO: 75260 - DNA, 17 bp, Arabidopsis thaliana
cctctcaccgtttgaga

SEQ ID NO: 75261 - DNA, 17 bp, Arabidopsis thaliana
cctctcacgatttggga

SEQ ID NO: 75262 - DNA, 17 bp, Arabidopsis thaliana
cctctcagacatggctt

SEQ ID NO: 75263 - DNA, 17 bp, Arabidopsis thaliana
cctctcaggagggatag

SEQ ID NO: 75264 - DNA, 17 bp, Arabidopsis thaliana
cctctccatttgggtga

SEQ ID NO: 75265 - DNA, 17 bp, Arabidopsis thaliana
cctctccctgcagtggt

SEQ ID NO: 75266 - DNA, 17 bp, Arabidopsis thaliana
cctctccgaagagagct

SEQ ID NO: 75267 - DNA, 17 bp, Arabidopsis thaliana
cctctccggctcaggcc

SEQ ID NO: 75268 - DNA, 17 bp, Arabidopsis thaliana
cctctcgacgtaccggg

SEQ ID NO: 75269 - DNA, 17 bp, Arabidopsis thaliana
cctctcgatcggttaac

SEQ ID NO: 75270 - DNA, 17 bp, Arabidopsis thaliana
cctctcggcaacggata

SEQ ID NO: 75271 - DNA, 17 bp, Arabidopsis thaliana
cctctcggcagttgcgg

SEQ ID NO: 75272 - DNA, 17 bp, Arabidopsis thaliana
cctctctaatacagccc

SEQ ID NO: 75273 - DNA, 17 bp, Arabidopsis thaliana
cctctctagccttctgt

SEQ ID NO: 75274 - DNA, 17 bp, Arabidopsis thaliana
cctctctagggctttgt

SEQ ID NO: 75275 - DNA, 17 bp, Arabidopsis thaliana
cctctctccgagacagt

SEQ ID NO: 75276 - DNA, 17 bp, Arabidopsis thaliana
cctctctcctgagtgac

SEQ ID NO: 75277 - DNA, 17 bp, Arabidopsis thaliana
cctctctccttctactg

SEQ ID NO: 75278 - DNA, 17 bp, Arabidopsis thaliana
cctctctctaaggaact

SEQ ID NO: 75279 - DNA, 17 bp, Arabidopsis thaliana
cctctctttgtgctgat

SEQ ID NO: 75280 - DNA, 17 bp, Arabidopsis thaliana
cctctgaatagactgtc

SEQ ID NO: 75281 - DNA, 17 bp, Arabidopsis thaliana
cctctgaatctggaacg

SEQ ID NO: 75282 - DNA, 17 bp, Arabidopsis thaliana
cctctgacccgagtagc

SEQ ID NO: 75283 - DNA, 17 bp, Arabidopsis thaliana
cctctgaccgcgtgcct

SEQ ID NO: 75284 - DNA, 17 bp, Arabidopsis thaliana
cctctgacgctgctgat

SEQ ID NO: 75285 - DNA, 17 bp, Arabidopsis thaliana
cctctgagctaggttcc

SEQ ID NO: 75286 - DNA, 17 bp, Arabidopsis thaliana
cctctgaggctgtgagc

SEQ ID NO: 75287 - DNA, 17 bp, Arabidopsis thaliana
cctctgagtggtgactt

SEQ ID NO: 75288 - DNA, 17 bp, Arabidopsis thaliana
cctctgatcccatagtg

SEQ ID NO: 75289 - DNA, 17 bp, Arabidopsis thaliana
cctctgattggtcgcat

SEQ ID NO: 75290 - DNA, 17 bp, Arabidopsis thaliana
cctctgctgtagaccat

SEQ ID NO: 75291 - DNA, 17 bp, Arabidopsis thaliana
cctctgcttcttcctgc

SEQ ID NO: 75292 - DNA, 17 bp, Arabidopsis thaliana
cctctggactttgactg

SEQ ID NO: 75293 - DNA, 17 bp, Arabidopsis thaliana
cctctggattgggacgg

SEQ ID NO: 75294 - DNA, 17 bp, Arabidopsis thaliana
cctctggcccaaaactg

SEQ ID NO: 75295 - DNA, 17 bp, Arabidopsis thaliana
cctctggcctcttctag

SEQ ID NO: 75296 - DNA, 17 bp, Arabidopsis thaliana
cctctgggacgtagtca

SEQ ID NO: 75297 - DNA, 17 bp, Arabidopsis thaliana
cctctgggagagactca

SEQ ID NO: 75298 - DNA, 17 bp, Arabidopsis thaliana
cctctggggattacggt

SEQ ID NO: 75299 - DNA, 17 bp, Arabidopsis thaliana
cctctggggcgataggg

SEQ ID NO: 75300 - DNA, 17 bp, Arabidopsis thaliana
cctctggtcgatggaac

SEQ ID NO: 75301 - DNA, 17 bp, Arabidopsis thaliana
cctctggttcaaatcca

SEQ ID NO: 75302 - DNA, 17 bp, Arabidopsis thaliana
cctctgtcagcctaatg

SEQ ID NO: 75303 - DNA, 17 bp, Arabidopsis thaliana
cctctgtgaagagaccc

SEQ ID NO: 75304 - DNA, 17 bp, Arabidopsis thaliana
cctctgtgacactgtca

SEQ ID NO: 75305 - DNA, 17 bp, Arabidopsis thaliana
cctctgtgatcgagtaa

SEQ ID NO: 75306 - DNA, 17 bp, Arabidopsis thaliana
cctctgtgctggcgacg

SEQ ID NO: 75307 - DNA, 17 bp, Arabidopsis thaliana
cctctgttgctgctctg

SEQ ID NO: 75308 - DNA, 17 bp, Arabidopsis thaliana
cctcttaaggtagccaa

SEQ ID NO: 75309 - DNA, 17 bp, Arabidopsis thaliana
cctcttacagcagtgga

SEQ ID NO: 75310 - DNA, 17 bp, Arabidopsis thaliana
cctcttacgagggcgtg

SEQ ID NO: 75311 - DNA, 17 bp, Arabidopsis thaliana
cctcttagatctgtcgc

SEQ ID NO: 75312 - DNA, 17 bp, Arabidopsis thaliana
cctcttagcttagagag

SEQ ID NO: 75313 - DNA, 17 bp, Arabidopsis thaliana
cctcttatttataggca

SEQ ID NO: 75314 - DNA, 17 bp, Arabidopsis thaliana
cctcttcaagttaagcg

SEQ ID NO: 75315 - DNA, 17 bp, Arabidopsis thaliana
cctcttcatcgaccggg

SEQ ID NO: 75316 - DNA, 17 bp, Arabidopsis thaliana
cctcttcgccgacgaat

SEQ ID NO: 75317 - DNA, 17 bp, Arabidopsis thaliana
cctcttcgctgctttct

SEQ ID NO: 75318 - DNA, 17 bp, Arabidopsis thaliana
cctcttcgggaagcggg

SEQ ID NO: 75319 - DNA, 17 bp, Arabidopsis thaliana
cctcttcgggtgctttg

SEQ ID NO: 75320 - DNA, 17 bp, Arabidopsis thaliana
cctcttctgagattgta

SEQ ID NO: 75321 - DNA, 17 bp, Arabidopsis thaliana
cctcttctttgtgatag

SEQ ID NO: 75322 - DNA, 17 bp, Arabidopsis thaliana
cctcttgagacatctcg

SEQ ID NO: 75323 - DNA, 17 bp, Arabidopsis thaliana
cctcttggcaccaacag

SEQ ID NO: 75324 - DNA, 17 bp, Arabidopsis thaliana
cctcttggcaccaacat

SEQ ID NO: 75325 - DNA, 17 bp, Arabidopsis thaliana
cctcttggtgcaggtcg

SEQ ID NO: 75326 - DNA, 17 bp, Arabidopsis thaliana
cctctttaagtactttt

SEQ ID NO: 75327 - DNA, 17 bp, Arabidopsis thaliana
cctctttacaccaggtt

SEQ ID NO: 75328 - DNA, 17 bp, Arabidopsis thaliana
cctctttaggatctgta

SEQ ID NO: 75329 - DNA, 17 bp, Arabidopsis thaliana
cctctttctgaattcac

SEQ ID NO: 75330 - DNA, 17 bp, Arabidopsis thaliana
cctctttctggttttgc

SEQ ID NO: 75331 - DNA, 17 bp, Arabidopsis thaliana
cctctttctttcttttt

SEQ ID NO: 75332 - DNA, 17 bp, Arabidopsis thaliana
cctctttgagcttgacc

SEQ ID NO: 75333 - DNA, 17 bp, Arabidopsis thaliana
cctctttgtttcttggg

SEQ ID NO: 75334 - DNA, 17 bp, Arabidopsis thaliana
cctcttttaggagaaaa

SEQ ID NO: 75335 - DNA, 17 bp, Arabidopsis thaliana
cctcttttggactttag

SEQ ID NO: 75336 - DNA, 17 bp, Arabidopsis thaliana
cctcttttgggcttagg

SEQ ID NO: 75337 - DNA, 17 bp, Arabidopsis thaliana
cctcttttgggtctctt

SEQ ID NO: 75338 - DNA, 17 bp, Arabidopsis thaliana
cctgaaacggctttgac

SEQ ID NO: 75339 - DNA, 17 bp, Arabidopsis thaliana
cctgaaagaaaccttgc

SEQ ID NO: 75340 - DNA, 17 bp, Arabidopsis thaliana
cctgaaagtcttcccat

SEQ ID NO: 75341 - DNA, 17 bp, Arabidopsis thaliana
cctgaaatcatgtgtag

SEQ ID NO: 75342 - DNA, 17 bp, Arabidopsis thaliana
cctgaaatccagaggtt

SEQ ID NO: 75343 - DNA, 17 bp, Arabidopsis thaliana
cctgaaattgtttgttg

SEQ ID NO: 75344 - DNA, 17 bp, Arabidopsis thaliana
cctgaacagactgccgg

SEQ ID NO: 75345 - DNA, 17 bp, Arabidopsis thaliana
cctgaacatctgtctgg

SEQ ID NO: 75346 - DNA, 17 bp, Arabidopsis thaliana
cctgaaccgcagaggag

SEQ ID NO: 75347 - DNA, 17 bp, Arabidopsis thaliana
cctgaacgcctctaagt

SEQ ID NO: 75348 - DNA, 17 bp, Arabidopsis thaliana
cctgaacgtcgaccttt

SEQ ID NO: 75349 - DNA, 17 bp, Arabidopsis thaliana
cctgaacttgggacaca

SEQ ID NO: 75350 - DNA, 17 bp, Arabidopsis thaliana
cctgaactttcaaaaag

SEQ ID NO: 75351 - DNA, 17 bp, Arabidopsis thaliana
cctgaagaagcaggggc

SEQ ID NO: 75352 - DNA, 17 bp, Arabidopsis thaliana
cctgaagaagcttcatg

SEQ ID NO: 75353 - DNA, 17 bp, Arabidopsis thaliana
cctgaagccgagtgatg

SEQ ID NO: 75354 - DNA, 17 bp, Arabidopsis thaliana
cctgaagctctggtaaa

SEQ ID NO: 75355 - DNA, 17 bp, Arabidopsis thaliana
cctgaagctgccagcat

SEQ ID NO: 75356 - DNA, 17 bp, Arabidopsis thaliana
cctgaagggattacggg

SEQ ID NO: 75357 - DNA, 17 bp, Arabidopsis thaliana
cctgaaggtggactgtt

SEQ ID NO: 75358 - DNA, 17 bp, Arabidopsis thaliana
cctgaaggttatgacgg

SEQ ID NO: 75359 - DNA, 17 bp, Arabidopsis thaliana
cctgaagtcctcgtgtt

SEQ ID NO: 75360 - DNA, 17 bp, Arabidopsis thaliana
cctgaatagacagccat

SEQ ID NO: 75361 - DNA, 17 bp, Arabidopsis thaliana
cctgaatcactttgcat

SEQ ID NO: 75362 - DNA, 17 bp, Arabidopsis thaliana
cctgaatcatttctggg

SEQ ID NO: 75363 - DNA, 17 bp, Arabidopsis thaliana
cctgaatctgaaccgcc

SEQ ID NO: 75364 - DNA, 17 bp, Arabidopsis thaliana
cctgaatggctcgatgg

SEQ ID NO: 75365 - DNA, 17 bp, Arabidopsis thaliana
cctgacaaagccccggg

SEQ ID NO: 75366 - DNA, 17 bp, Arabidopsis thaliana
cctgacaagtgcctcaa

SEQ ID NO: 75367 - DNA, 17 bp, Arabidopsis thaliana
cctgacacggggaggtg

SEQ ID NO: 75368 - DNA, 17 bp, Arabidopsis thaliana
cctgacagacgtggctt

SEQ ID NO: 75369 - DNA, 17 bp, Arabidopsis thaliana
cctgacgcggttactta

SEQ ID NO: 75370 - DNA, 17 bp, Arabidopsis thaliana
cctgacggagcaatgcc

SEQ ID NO: 75371 - DNA, 17 bp, Arabidopsis thaliana
cctgacgtgttgcctaa

SEQ ID NO: 75372 - DNA, 17 bp, Arabidopsis thaliana
cctgactatccccggca

SEQ ID NO: 75373 - DNA, 17 bp, Arabidopsis thaliana
cctgactatccctggca

SEQ ID NO: 75374 - DNA, 17 bp, Arabidopsis thaliana
cctgactatttctggca

SEQ ID NO: 75375 - DNA, 17 bp, Arabidopsis thaliana
cctgactcgaatgatcc

SEQ ID NO: 75376 - DNA, 17 bp, Arabidopsis thaliana
cctgactctcggcaacg

SEQ ID NO: 75377 - DNA, 17 bp, Arabidopsis thaliana
cctgactcttgggctcg

SEQ ID NO: 75378 - DNA, 17 bp, Arabidopsis thaliana
cctgagaaacggctacc

SEQ ID NO: 75379 - DNA, 17 bp, Arabidopsis thaliana
cctgagaccgtccaaca

SEQ ID NO: 75380 - DNA, 17 bp, Arabidopsis thaliana
cctgagagaactcttga

SEQ ID NO: 75381 - DNA, 17 bp, Arabidopsis thaliana
cctgagagaattacggg

SEQ ID NO: 75382 - DNA, 17 bp, Arabidopsis thaliana
cctgagagattacgggc

SEQ ID NO: 75383 - DNA, 17 bp, Arabidopsis thaliana
cctgagaggattacggg

SEQ ID NO: 75384 - DNA, 17 bp, Arabidopsis thaliana
cctgagatgaacggtga

SEQ ID NO: 75385 - DNA, 17 bp, Arabidopsis thaliana
cctgagcccatgctcgg

SEQ ID NO: 75386 - DNA, 17 bp, Arabidopsis thaliana
cctgagcgctggacgtc

SEQ ID NO: 75387 - DNA, 17 bp, Arabidopsis thaliana
cctgagcggtaatggag

SEQ ID NO: 75388 - DNA, 17 bp, Arabidopsis thaliana
cctgagctatggttatt

SEQ ID NO: 75389 - DNA, 17 bp, Arabidopsis thaliana
cctgaggctggattgaa

SEQ ID NO: 75390 - DNA, 17 bp, Arabidopsis thaliana
cctgagggattaccggt

SEQ ID NO: 75391 - DNA, 17 bp, Arabidopsis thaliana
cctgagggattacgagt

SEQ ID NO: 75392 - DNA, 17 bp, Arabidopsis thaliana
cctgagggctgggctcg

SEQ ID NO: 75393 - DNA, 17 bp, Arabidopsis thaliana
cctgaggggattacggg

SEQ ID NO: 75394 - DNA, 17 bp, Arabidopsis thaliana
cctgagggtcgagtgtg

SEQ ID NO: 75395 - DNA, 17 bp, Arabidopsis thaliana
cctgaggtaggtctcac

SEQ ID NO: 75396 - DNA, 17 bp, Arabidopsis thaliana
cctgagtatactagacc

SEQ ID NO: 75397 - DNA, 17 bp, Arabidopsis thaliana
cctgataggcggtggtt

SEQ ID NO: 75398 - DNA, 17 bp, Arabidopsis thaliana
cctgatatctcagaact

SEQ ID NO: 75399 - DNA, 17 bp, Arabidopsis thaliana
cctgatatctcggaact

SEQ ID NO: 75400 - DNA, 17 bp, Arabidopsis thaliana
cctgatccacatcggtc

SEQ ID NO: 75401 - DNA, 17 bp, Arabidopsis thaliana
cctgatcctgaggatta

SEQ ID NO: 75402 - DNA, 17 bp, Arabidopsis thaliana
cctgatccttgttgcaa

SEQ ID NO: 75403 - DNA, 17 bp, Arabidopsis thaliana
cctgatcgattctcctg

SEQ ID NO: 75404 - DNA, 17 bp, Arabidopsis thaliana
cctgatgaagatggtgt

SEQ ID NO: 75405 - DNA, 17 bp, Arabidopsis thaliana
cctgatgacagaataag

SEQ ID NO: 75406 - DNA, 17 bp, Arabidopsis thaliana
cctgatgacagggctac

SEQ ID NO: 75407 - DNA, 17 bp, Arabidopsis thaliana
cctgatgacaggggagc

SEQ ID NO: 75408 - DNA, 17 bp, Arabidopsis thaliana
cctgatggatcgagcat

SEQ ID NO: 75409 - DNA, 17 bp, Arabidopsis thaliana
cctgatgtcggctcttc

SEQ ID NO: 75410 - DNA, 17 bp, Arabidopsis thaliana
cctgattacctgtctga

SEQ ID NO: 75411 - DNA, 17 bp, Arabidopsis thaliana
cctgattagactggtta

SEQ ID NO: 75412 - DNA, 17 bp, Arabidopsis thaliana
cctgattcgtgcgtcgg

SEQ ID NO: 75413 - DNA, 17 bp, Arabidopsis thaliana
cctgattggttgagacg

SEQ ID NO: 75414 - DNA, 17 bp, Arabidopsis thaliana
cctgattgttccgagac

SEQ ID NO: 75415 - DNA, 17 bp, Arabidopsis thaliana
cctgattgttctgagac

SEQ ID NO: 75416 - DNA, 17 bp, Arabidopsis thaliana
cctgatttgaaaagtgc

SEQ ID NO: 75417 - DNA, 17 bp, Arabidopsis thaliana
cctgatttgactgattc

SEQ ID NO: 75418 - DNA, 17 bp, Arabidopsis thaliana
cctgcaaaacagaagat

SEQ ID NO: 75419 - DNA, 17 bp, Arabidopsis thaliana
cctgcaaactactgtga

SEQ ID NO: 75420 - DNA, 17 bp, Arabidopsis thaliana
cctgcaacctacagact

SEQ ID NO: 75421 - DNA, 17 bp, Arabidopsis thaliana
cctgcaaggatttgtta

SEQ ID NO: 75422 - DNA, 17 bp, Arabidopsis thaliana
cctgcaatagtgcggat

SEQ ID NO: 75423 - DNA, 17 bp, Arabidopsis thaliana
cctgcacgtctgcctgg

SEQ ID NO: 75424 - DNA, 17 bp, Arabidopsis thaliana
cctgcactagctacgta

SEQ ID NO: 75425 - DNA, 17 bp, Arabidopsis thaliana
cctgcactgtagacggt

SEQ ID NO: 75426 - DNA, 17 bp, Arabidopsis thaliana
cctgcagataaagtgcg

SEQ ID NO: 75427 - DNA, 17 bp, Arabidopsis thaliana
cctgcagatctgctagc

SEQ ID NO: 75428 - DNA, 17 bp, Arabidopsis thaliana
cctgcagctgctggtgt

SEQ ID NO: 75429 - DNA, 17 bp, Arabidopsis thaliana
cctgcaggttaatgccg

SEQ ID NO: 75430 - DNA, 17 bp, Arabidopsis thaliana
cctgcagtagtcgtgtg

SEQ ID NO: 75431 - DNA, 17 bp, Arabidopsis thaliana
cctgcagtgatcagttt

SEQ ID NO: 75432 - DNA, 17 bp, Arabidopsis thaliana
cctgcagttatcttcaa

SEQ ID NO: 75433 - DNA, 17 bp, Arabidopsis thaliana
cctgcatgggccaccaa

SEQ ID NO: 75434 - DNA, 17 bp, Arabidopsis thaliana
cctgcatttctaactac

SEQ ID NO: 75435 - DNA, 17 bp, Arabidopsis thaliana
cctgcatttctgactac

SEQ ID NO: 75436 - DNA, 17 bp, Arabidopsis thaliana
cctgcatttttgactac

SEQ ID NO: 75437 - DNA, 17 bp, Arabidopsis thaliana
cctgccaaacccgtccc

SEQ ID NO: 75438 - DNA, 17 bp, Arabidopsis thaliana
cctgccaaacccgtcct

SEQ ID NO: 75439 - DNA, 17 bp, Arabidopsis thaliana
cctgccaaacccgtctc

SEQ ID NO: 75440 - DNA, 17 bp, Arabidopsis thaliana
cctgccacaattccctc

SEQ ID NO: 75441 - DNA, 17 bp, Arabidopsis thaliana
cctgccacggtacagac

SEQ ID NO: 75442 - DNA, 17 bp, Arabidopsis thaliana
cctgccagtagtcatat

SEQ ID NO: 75443 - DNA, 17 bp, Arabidopsis thaliana
cctgccagttgctcaag

SEQ ID NO: 75444 - DNA, 17 bp, Arabidopsis thaliana
cctgccattgactgtga

SEQ ID NO: 75445 - DNA, 17 bp, Arabidopsis thaliana
cctgcccaccctcgaaa

SEQ ID NO: 75446 - DNA, 17 bp, Arabidopsis thaliana
cctgcccaccctggaaa

SEQ ID NO: 75447 - DNA, 17 bp, Arabidopsis thaliana
cctgcccactttgtcaa

SEQ ID NO: 75448 - DNA, 17 bp, Arabidopsis thaliana
cctgccctttgtacaca

SEQ ID NO: 75449 - DNA, 17 bp, Arabidopsis thaliana
cctgccgaatatccagg

SEQ ID NO: 75450 - DNA, 17 bp, Arabidopsis thaliana
cctgccgaatcaactag

SEQ ID NO: 75451 - DNA, 17 bp, Arabidopsis thaliana
cctgccgcaccacgagg

SEQ ID NO: 75452 - DNA, 17 bp, Arabidopsis thaliana
cctgccgcttctttggc

SEQ ID NO: 75453 - DNA, 17 bp, Arabidopsis thaliana
cctgcctgcgacctggg

SEQ ID NO: 75454 - DNA, 17 bp, Arabidopsis thaliana
cctgcctttctgactac

SEQ ID NO: 75455 - DNA, 17 bp, Arabidopsis thaliana
cctgcgaaaggcttgta

SEQ ID NO: 75456 - DNA, 17 bp, Arabidopsis thaliana
cctgcgacctggggctc

SEQ ID NO: 75457 - DNA, 17 bp, Arabidopsis thaliana
cctgcgacctgggttcg

SEQ ID NO: 75458 - DNA, 17 bp, Arabidopsis thaliana
cctgcgagagccctcga

SEQ ID NO: 75459 - DNA, 17 bp, Arabidopsis thaliana
cctgcgaggagtccgac

SEQ ID NO: 75460 - DNA, 17 bp, Arabidopsis thaliana
cctgcgaggattccgac

SEQ ID NO: 75461 - DNA, 17 bp, Arabidopsis thaliana
cctgcgataaggtctga

SEQ ID NO: 75462 - DNA, 17 bp, Arabidopsis thaliana
cctgcgattcgctaaac

SEQ ID NO: 75463 - DNA, 17 bp, Arabidopsis thaliana
cctgcgattgaactacc

SEQ ID NO: 75464 - DNA, 17 bp, Arabidopsis thaliana
cctgcgattttgaagtc

SEQ ID NO: 75465 - DNA, 17 bp, Arabidopsis thaliana
cctgcgcattgtgtgtc

SEQ ID NO: 75466 - DNA, 17 bp, Arabidopsis thaliana
cctgcgcgtgatgagct

SEQ ID NO: 75467 - DNA, 17 bp, Arabidopsis thaliana
cctgcggaaggatcatt

SEQ ID NO: 75468 - DNA, 17 bp, Arabidopsis thaliana
cctgcgggtaacgtcca

SEQ ID NO: 75469 - DNA, 17 bp, Arabidopsis thaliana
cctgcggtgtgcgttac

SEQ ID NO: 75470 - DNA, 17 bp, Arabidopsis thaliana
cctgcggttgttgattt

SEQ ID NO: 75471 - DNA, 17 bp, Arabidopsis thaliana
cctgcgtcgaagatttg

SEQ ID NO: 75472 - DNA, 17 bp, Arabidopsis thaliana
cctgcgtgatctgaacc

SEQ ID NO: 75473 - DNA, 17 bp, Arabidopsis thaliana
cctgcgttcatggacgg

SEQ ID NO: 75474 - DNA, 17 bp, Arabidopsis thaliana
cctgctaactagctacg

SEQ ID NO: 75475 - DNA, 17 bp, Arabidopsis thaliana
cctgctaactagctact

SEQ ID NO: 75476 - DNA, 17 bp, Arabidopsis thaliana
cctgctaactagctgcg

SEQ ID NO: 75477 - DNA, 17 bp, Arabidopsis thaliana
cctgctaagaaggcgcg

SEQ ID NO: 75478 - DNA, 17 bp, Arabidopsis thaliana
cctgctaagttagagat

SEQ ID NO: 75479 - DNA, 17 bp, Arabidopsis thaliana
cctgctagcgggagaca

SEQ ID NO: 75480 - DNA, 17 bp, Arabidopsis thaliana
cctgctagtggaggaag

SEQ ID NO: 75481 - DNA, 17 bp, Arabidopsis thaliana
cctgctatctcctcttt

SEQ ID NO: 75482 - DNA, 17 bp, Arabidopsis thaliana
cctgctcctcagccggc

SEQ ID NO: 75483 - DNA, 17 bp, Arabidopsis thaliana
cctgctccttggttctc

SEQ ID NO: 75484 - DNA, 17 bp, Arabidopsis thaliana
cctgctctctacgccca

SEQ ID NO: 75485 - DNA, 17 bp, Arabidopsis thaliana
cctgctctctaggctca

SEQ ID NO: 75486 - DNA, 17 bp, Arabidopsis thaliana
cctgctgatgtttgatc

SEQ ID NO: 75487 - DNA, 17 bp, Arabidopsis thaliana
cctgctgctgagtcttc

SEQ ID NO: 75488 - DNA, 17 bp, Arabidopsis thaliana
cctgctggtccgatctc

SEQ ID NO: 75489 - DNA, 17 bp, Arabidopsis thaliana
cctgctggttccggaag

SEQ ID NO: 75490 - DNA, 17 bp, Arabidopsis thaliana
cctgctgtttacggatg

SEQ ID NO: 75491 - DNA, 17 bp, Arabidopsis thaliana
cctgcttaaaggtgtga

SEQ ID NO: 75492 - DNA, 17 bp, Arabidopsis thaliana
cctgcttaccgatctat

SEQ ID NO: 75493 - DNA, 17 bp, Arabidopsis thaliana
cctgcttatttcgtccg

SEQ ID NO: 75494 - DNA, 17 bp, Arabidopsis thaliana
cctgcttatttcgtcgg

SEQ ID NO: 75495 - DNA, 17 bp, Arabidopsis thaliana
cctgcttggtgtctttg

SEQ ID NO: 75496 - DNA, 17 bp, Arabidopsis thaliana
cctgctttgaccgagat

SEQ ID NO: 75497 - DNA, 17 bp, Arabidopsis thaliana
cctgcttttggtcgctg

SEQ ID NO: 75498 - DNA, 17 bp, Arabidopsis thaliana
cctgcttttgtacacac

SEQ ID NO: 75499 - DNA, 17 bp, Arabidopsis thaliana
cctggaaacggctcagc

SEQ ID NO: 75500 - DNA, 17 bp, Arabidopsis thaliana
cctggaaacggcttagc

SEQ ID NO: 75501 - DNA, 17 bp, Arabidopsis thaliana
cctggaaattagcgtct

SEQ ID NO: 75502 - DNA, 17 bp, Arabidopsis thaliana
cctggaacagatggtga

SEQ ID NO: 75503 - DNA, 17 bp, Arabidopsis thaliana
cctggaacgagactttg

SEQ ID NO: 75504 - DNA, 17 bp, Arabidopsis thaliana
cctggaactgactgctg

SEQ ID NO: 75505 - DNA, 17 bp, Arabidopsis thaliana
cctggaactgtggtctg

SEQ ID NO: 75506 - DNA, 17 bp, Arabidopsis thaliana
cctggaagcaagcattt

SEQ ID NO: 75507 - DNA, 17 bp, Arabidopsis thaliana
cctggaagtcgagtatc

SEQ ID NO: 75508 - DNA, 17 bp, Arabidopsis thaliana
cctggaattttgggtgc

SEQ ID NO: 75509 - DNA, 17 bp, Arabidopsis thaliana
cctggaccagtctctga

SEQ ID NO: 75510 - DNA, 17 bp, Arabidopsis thaliana
cctggacctccatcgga

SEQ ID NO: 75511 - DNA, 17 bp, Arabidopsis thaliana
cctggacgttcttttgg

SEQ ID NO: 75512 - DNA, 17 bp, Arabidopsis thaliana
cctggacttccgcttgc

SEQ ID NO: 75513 - DNA, 17 bp, Arabidopsis thaliana
cctggagaccctgtgat

SEQ ID NO: 75514 - DNA, 17 bp, Arabidopsis thaliana
cctggagacttgcctta

SEQ ID NO: 75515 - DNA, 17 bp, Arabidopsis thaliana
cctggagagattacagg

SEQ ID NO: 75516 - DNA, 17 bp, Arabidopsis thaliana
cctggagagattacggg

SEQ ID NO: 75517 - DNA, 17 bp, Arabidopsis thaliana
cctggagattccgagac

SEQ ID NO: 75518 - DNA, 17 bp, Arabidopsis thaliana
cctggaggaattacggg

SEQ ID NO: 75519 - DNA, 17 bp, Arabidopsis thaliana
cctggaggattaagagt

SEQ ID NO: 75520 - DNA, 17 bp, Arabidopsis thaliana
cctggaggattacaggc

SEQ ID NO: 75521 - DNA, 17 bp, Arabidopsis thaliana
cctggaggattacgggt

SEQ ID NO: 75522 - DNA, 17 bp, Arabidopsis thaliana
cctggagggattacggg

SEQ ID NO: 75523 - DNA, 17 bp, Arabidopsis thaliana
cctggaggtccaaagtt

SEQ ID NO: 75524 - DNA, 17 bp, Arabidopsis thaliana
cctggagttgggactta

SEQ ID NO: 75525 - DNA, 17 bp, Arabidopsis thaliana
cctggatattcggcagg

SEQ ID NO: 75526 - DNA, 17 bp, Arabidopsis thaliana
cctggatcacgtcaaaa

SEQ ID NO: 75527 - DNA, 17 bp, Arabidopsis thaliana
cctggatccgccattgt

SEQ ID NO: 75528 - DNA, 17 bp, Arabidopsis thaliana
cctggatgcccgatacc

SEQ ID NO: 75529 - DNA, 17 bp, Arabidopsis thaliana
cctggatggcgcttaag

SEQ ID NO: 75530 - DNA, 17 bp, Arabidopsis thaliana
cctggatgtgaatttct

SEQ ID NO: 75531 - DNA, 17 bp, Arabidopsis thaliana
cctggatgtgcgccttg

SEQ ID NO: 75532 - DNA, 17 bp, Arabidopsis thaliana
cctggatgttgagcagt

SEQ ID NO: 75533 - DNA, 17 bp, Arabidopsis thaliana
cctggatttggcgaagt

SEQ ID NO: 75534 - DNA, 17 bp, Arabidopsis thaliana
cctggcaccggaaagga

SEQ ID NO: 75535 - DNA, 17 bp, Arabidopsis thaliana
cctggcaggttctgaga

SEQ ID NO: 75536 - DNA, 17 bp, Arabidopsis thaliana
cctggccgaagcccgta

SEQ ID NO: 75537 - DNA, 17 bp, Arabidopsis thaliana
cctggcgaacggctata

SEQ ID NO: 75538 - DNA, 17 bp, Arabidopsis thaliana
cctggcgatcgtctata

SEQ ID NO: 75539 - DNA, 17 bp, Arabidopsis thaliana
cctggcgctcgagccgg

SEQ ID NO: 75540 - DNA, 17 bp, Arabidopsis thaliana
cctggctcagaatgaac

SEQ ID NO: 75541 - DNA, 17 bp, Arabidopsis thaliana
cctggctcaggatgaac

SEQ ID NO: 75542 - DNA, 17 bp, Arabidopsis thaliana
cctggctccctgtatgc

SEQ ID NO: 75543 - DNA, 17 bp, Arabidopsis thaliana
cctggctgcaagcgagg

SEQ ID NO: 75544 - DNA, 17 bp, Arabidopsis thaliana
cctggcttgtcccttcg

SEQ ID NO: 75545 - DNA, 17 bp, Arabidopsis thaliana
cctgggaacaccgggtg

SEQ ID NO: 75546 - DNA, 17 bp, Arabidopsis thaliana
cctgggaactcagcaag

SEQ ID NO: 75547 - DNA, 17 bp, Arabidopsis thaliana
cctgggaagtcctcgtg

SEQ ID NO: 75548 - DNA, 17 bp, Arabidopsis thaliana
cctgggaccgtaggaat

SEQ ID NO: 75549 - DNA, 17 bp, Arabidopsis thaliana
cctgggactgttgagtg

SEQ ID NO: 75550 - DNA, 17 bp, Arabidopsis thaliana
cctgggagagaagacca

SEQ ID NO: 75551 - DNA, 17 bp, Arabidopsis thaliana
cctgggagagtaggacg

SEQ ID NO: 75552 - DNA, 17 bp, Arabidopsis thaliana
cctgggaggattacggg

SEQ ID NO: 75553 - DNA, 17 bp, Arabidopsis thaliana
cctgggattggctttgg

SEQ ID NO: 75554 - DNA, 17 bp, Arabidopsis thaliana
cctgggcacgaagcgga

SEQ ID NO: 75555 - DNA, 17 bp, Arabidopsis thaliana
cctgggcattcgtttaa

SEQ ID NO: 75556 - DNA, 17 bp, Arabidopsis thaliana
cctgggctcccggtagg

SEQ ID NO: 75557 - DNA, 17 bp, Arabidopsis thaliana
cctgggctctatctgtt

SEQ ID NO: 75558 - DNA, 17 bp, Arabidopsis thaliana
cctgggctctcacaccc

SEQ ID NO: 75559 - DNA, 17 bp, Arabidopsis thaliana
cctgggctctgaccgcg

SEQ ID NO: 75560 - DNA, 17 bp, Arabidopsis thaliana
cctgggctctgaccgtg

SEQ ID NO: 75561 - DNA, 17 bp, Arabidopsis thaliana
cctggggccgagctgtg

SEQ ID NO: 75562 - DNA, 17 bp, Arabidopsis thaliana
cctggggctcccggtag

SEQ ID NO: 75563 - DNA, 17 bp, Arabidopsis thaliana
cctggggctgtagtatg

SEQ ID NO: 75564 - DNA, 17 bp, Arabidopsis thaliana
cctgggggattacgggt

SEQ ID NO: 75565 - DNA, 17 bp, Arabidopsis thaliana
cctggggggctcccggt

SEQ ID NO: 75566 - DNA, 17 bp, Arabidopsis thaliana
cctgggtacgaagcgga

SEQ ID NO: 75567 - DNA, 17 bp, Arabidopsis thaliana
cctgggtgaccgatagc

SEQ ID NO: 75568 - DNA, 17 bp, Arabidopsis thaliana
cctgggtgatctatcta

SEQ ID NO: 75569 - DNA, 17 bp, Arabidopsis thaliana
cctgggtgcggttgcgg

SEQ ID NO: 75570 - DNA, 17 bp, Arabidopsis thaliana
cctgggtgtcacaaatc

SEQ ID NO: 75571 - DNA, 17 bp, Arabidopsis thaliana
cctgggtgttcggttat

SEQ ID NO: 75572 - DNA, 17 bp, Arabidopsis thaliana
cctgggtgtttggttgt

SEQ ID NO: 75573 - DNA, 17 bp, Arabidopsis thaliana
cctgggttcaaagtcat

SEQ ID NO: 75574 - DNA, 17 bp, Arabidopsis thaliana
cctgggttcagctcccg

SEQ ID NO: 75575 - DNA, 17 bp, Arabidopsis thaliana
cctgggttcagctcctg

SEQ ID NO: 75576 - DNA, 17 bp, Arabidopsis thaliana
cctgggttcctcccggt

SEQ ID NO: 75577 - DNA, 17 bp, Arabidopsis thaliana
cctgggttcgcctcccg

SEQ ID NO: 75578 - DNA, 17 bp, Arabidopsis thaliana
cctgggttcggctcccg

SEQ ID NO: 75579 - DNA, 17 bp, Arabidopsis thaliana
cctgggttcggctcgcg

SEQ ID NO: 75580 - DNA, 17 bp, Arabidopsis thaliana
cctgggttcgtctcccg

SEQ ID NO: 75581 - DNA, 17 bp, Arabidopsis thaliana
cctgggttgactcccgg

SEQ ID NO: 75582 - DNA, 17 bp, Arabidopsis thaliana
cctgggttgtttcgagg

SEQ ID NO: 75583 - DNA, 17 bp, Arabidopsis thaliana
cctggtaaccgtcatat

SEQ ID NO: 75584 - DNA, 17 bp, Arabidopsis thaliana
cctggtaataggtggag

SEQ ID NO: 75585 - DNA, 17 bp, Arabidopsis thaliana
cctggtagtcagaaatg

SEQ ID NO: 75586 - DNA, 17 bp, Arabidopsis thaliana
cctggtcctgttacttg

SEQ ID NO: 75587 - DNA, 17 bp, Arabidopsis thaliana
cctggtcgacaaatcct

SEQ ID NO: 75588 - DNA, 17 bp, Arabidopsis thaliana
cctggtcgacgaatcct

SEQ ID NO: 75589 - DNA, 17 bp, Arabidopsis thaliana
cctggtcgacgaattct

SEQ ID NO: 75590 - DNA, 17 bp, Arabidopsis thaliana
cctggtcgacgattcct

SEQ ID NO: 75591 - DNA, 17 bp, Arabidopsis thaliana
cctggtcgatgaattct

SEQ ID NO: 75592 - DNA, 17 bp, Arabidopsis thaliana
cctggtcgatgattacc

SEQ ID NO: 75593 - DNA, 17 bp, Arabidopsis thaliana
cctggtctacggcaact

SEQ ID NO: 75594 - DNA, 17 bp, Arabidopsis thaliana
cctggtgaagctggtgt

SEQ ID NO: 75595 - DNA, 17 bp, Arabidopsis thaliana
cctggtgaattacgggc

SEQ ID NO: 75596 - DNA, 17 bp, Arabidopsis thaliana
cctggtgtccggtgcgc

SEQ ID NO: 75597 - DNA, 17 bp, Arabidopsis thaliana
cctggtgtcggtctcgc

SEQ ID NO: 75598 - DNA, 17 bp, Arabidopsis thaliana
cctggtgtgggtccatc

SEQ ID NO: 75599 - DNA, 17 bp, Arabidopsis thaliana
cctggttagaggattaa

SEQ ID NO: 75600 - DNA, 17 bp, Arabidopsis thaliana
cctggttcaaatccagc

SEQ ID NO: 75601 - DNA, 17 bp, Arabidopsis thaliana
cctggttcaaatccagg

SEQ ID NO: 75602 - DNA, 17 bp, Arabidopsis thaliana
cctggttccgctcccgg

SEQ ID NO: 75603 - DNA, 17 bp, Arabidopsis thaliana
cctggttcggctcccgg

SEQ ID NO: 75604 - DNA, 17 bp, Arabidopsis thaliana
cctggttgatgagtgct

SEQ ID NO: 75605 - DNA, 17 bp, Arabidopsis thaliana
cctggttgcgcatcaag

SEQ ID NO: 75606 - DNA, 17 bp, Arabidopsis thaliana
cctggttgggacctgcg

SEQ ID NO: 75607 - DNA, 17 bp, Arabidopsis thaliana
cctggttgtagcattag

SEQ ID NO: 75608 - DNA, 17 bp, Arabidopsis thaliana
cctggttgtcgagtggt

SEQ ID NO: 75609 - DNA, 17 bp, Arabidopsis thaliana
cctggttgtctctccag

SEQ ID NO: 75610 - DNA, 17 bp, Arabidopsis thaliana
cctggtttagtcacttt

SEQ ID NO: 75611 - DNA, 17 bp, Arabidopsis thaliana
cctggtttttggaattt

SEQ ID NO: 75612 - DNA, 17 bp, Arabidopsis thaliana
cctgtagaatcctgacg

SEQ ID NO: 75613 - DNA, 17 bp, Arabidopsis thaliana
cctgtagatggatcatg

SEQ ID NO: 75614 - DNA, 17 bp, Arabidopsis thaliana
cctgtagatggatcccc

SEQ ID NO: 75615 - DNA, 17 bp, Arabidopsis thaliana
cctgtagatggatcctg

SEQ ID NO: 75616 - DNA, 17 bp, Arabidopsis thaliana
cctgtagatggatcgat

SEQ ID NO: 75617 - DNA, 17 bp, Arabidopsis thaliana
cctgtagatggatcgca

SEQ ID NO: 75618 - DNA, 17 bp, Arabidopsis thaliana
cctgtagatggatctag

SEQ ID NO: 75619 - DNA, 17 bp, Arabidopsis thaliana
cctgtagatggatctta

SEQ ID NO: 75620 - DNA, 17 bp, Arabidopsis thaliana
cctgtagatgggatcga

SEQ ID NO: 75621 - DNA, 17 bp, Arabidopsis thaliana
cctgtagatgttaactc

SEQ ID NO: 75622 - DNA, 17 bp, Arabidopsis thaliana
cctgtagccaacacaga

SEQ ID NO: 75623 - DNA, 17 bp, Arabidopsis thaliana
cctgtaggatggatcag

SEQ ID NO: 75624 - DNA, 17 bp, Arabidopsis thaliana
cctgtatttctgactac

SEQ ID NO: 75625 - DNA, 17 bp, Arabidopsis thaliana
cctgtcaaccgacgcga

SEQ ID NO: 75626 - DNA, 17 bp, Arabidopsis thaliana
cctgtcaattggtatca

SEQ ID NO: 75627 - DNA, 17 bp, Arabidopsis thaliana
cctgtcatacttgtcac

SEQ ID NO: 75628 - DNA, 17 bp, Arabidopsis thaliana
cctgtccgacagtcggt

SEQ ID NO: 75629 - DNA, 17 bp, Arabidopsis thaliana
cctgtccgcctttggtg

SEQ ID NO: 75630 - DNA, 17 bp, Arabidopsis thaliana
cctgtcctccgccgatt

SEQ ID NO: 75631 - DNA, 17 bp, Arabidopsis thaliana
cctgtcctctctggtgt

SEQ ID NO: 75632 - DNA, 17 bp, Arabidopsis thaliana
cctgtcgctctgtagtt

SEQ ID NO: 75633 - DNA, 17 bp, Arabidopsis thaliana
cctgtcggactcctcgc

SEQ ID NO: 75634 - DNA, 17 bp, Arabidopsis thaliana
cctgtcgggacccgaaa

SEQ ID NO: 75635 - DNA, 17 bp, Arabidopsis thaliana
cctgtcgggacccgtaa

SEQ ID NO: 75636 - DNA, 17 bp, Arabidopsis thaliana
cctgtcggtttgctatt

SEQ ID NO: 75637 - DNA, 17 bp, Arabidopsis thaliana
cctgtcgtgcccggacc

SEQ ID NO: 75638 - DNA, 17 bp, Arabidopsis thaliana
cctgtctactatccagc

SEQ ID NO: 75639 - DNA, 17 bp, Arabidopsis thaliana
cctgtctctcggtccag

SEQ ID NO: 75640 - DNA, 17 bp, Arabidopsis thaliana
cctgtgatattggatgt

SEQ ID NO: 75641 - DNA, 17 bp, Arabidopsis thaliana
cctgtgatgacttggcc

SEQ ID NO: 75642 - DNA, 17 bp, Arabidopsis thaliana
cctgtgcaaatattgtc

SEQ ID NO: 75643 - DNA, 17 bp, Arabidopsis thaliana
cctgtgcattggtcggc

SEQ ID NO: 75644 - DNA, 17 bp, Arabidopsis thaliana
cctgtgccgtttgctgc

SEQ ID NO: 75645 - DNA, 17 bp, Arabidopsis thaliana
cctgtgccgtttgcttc

SEQ ID NO: 75646 - DNA, 17 bp, Arabidopsis thaliana
cctgtgcgcccccggcg

SEQ ID NO: 75647 - DNA, 17 bp, Arabidopsis thaliana
cctgtgcgtatcgaccc

SEQ ID NO: 75648 - DNA, 17 bp, Arabidopsis thaliana
cctgtgctttaacatgc

SEQ ID NO: 75649 - DNA, 17 bp, Arabidopsis thaliana
cctgtgctttaactcac

SEQ ID NO: 75650 - DNA, 17 bp, Arabidopsis thaliana
cctgtggcgacttgggt

SEQ ID NO: 75651 - DNA, 17 bp, Arabidopsis thaliana
cctgtggctggattgaa

SEQ ID NO: 75652 - DNA, 17 bp, Arabidopsis thaliana
cctgtgggctccccatt

SEQ ID NO: 75653 - DNA, 17 bp, Arabidopsis thaliana
cctgtgggctccccccc

SEQ ID NO: 75654 - DNA, 17 bp, Arabidopsis thaliana
cctgtggggattacagg

SEQ ID NO: 75655 - DNA, 17 bp, Arabidopsis thaliana
cctgtggtccttgggtg

SEQ ID NO: 75656 - DNA, 17 bp, Arabidopsis thaliana
cctgtgtccgagtatct

SEQ ID NO: 75657 - DNA, 17 bp, Arabidopsis thaliana
cctgtgtgccattcgga

SEQ ID NO: 75658 - DNA, 17 bp, Arabidopsis thaliana
cctgtgtgctggcgacg

SEQ ID NO: 75659 - DNA, 17 bp, Arabidopsis thaliana
cctgttaataggaggga

SEQ ID NO: 75660 - DNA, 17 bp, Arabidopsis thaliana
cctgttaccatcctcgt

SEQ ID NO: 75661 - DNA, 17 bp, Arabidopsis thaliana
cctgttacgactaattg

SEQ ID NO: 75662 - DNA, 17 bp, Arabidopsis thaliana
cctgttattgcttggct

SEQ ID NO: 75663 - DNA, 17 bp, Arabidopsis thaliana
cctgttcagcgcattaa

SEQ ID NO: 75664 - DNA, 17 bp, Arabidopsis thaliana
cctgttccctaagtttt

SEQ ID NO: 75665 - DNA, 17 bp, Arabidopsis thaliana
cctgttccctcttggca

SEQ ID NO: 75666 - DNA, 17 bp, Arabidopsis thaliana
cctgttcgggtttggga

SEQ ID NO: 75667 - DNA, 17 bp, Arabidopsis thaliana
cctgttcgtcccaccgg

SEQ ID NO: 75668 - DNA, 17 bp, Arabidopsis thaliana
cctgttcgtttctgtgt

SEQ ID NO: 75669 - DNA, 17 bp, Arabidopsis thaliana
cctgttgagcttgactc

SEQ ID NO: 75670 - DNA, 17 bp, Arabidopsis thaliana
cctgttgagcttgggag

SEQ ID NO: 75671 - DNA, 17 bp, Arabidopsis thaliana
cctgttgcaggtgtgag

SEQ ID NO: 75672 - DNA, 17 bp, Arabidopsis thaliana
cctgttgcagtgcggtt

SEQ ID NO: 75673 - DNA, 17 bp, Arabidopsis thaliana
cctgttgtctagggata

SEQ ID NO: 75674 - DNA, 17 bp, Arabidopsis thaliana
cctgtttatttaaagtc

SEQ ID NO: 75675 - DNA, 17 bp, Arabidopsis thaliana
cctgtttctcggacgca

SEQ ID NO: 75676 - DNA, 17 bp, Arabidopsis thaliana
cctgtttctgatctctt

SEQ ID NO: 75677 - DNA, 17 bp, Arabidopsis thaliana
cctgtttctttttccca

SEQ ID NO: 75678 - DNA, 17 bp, Arabidopsis thaliana
cctgtttgctatcttag

SEQ ID NO: 75679 - DNA, 17 bp, Arabidopsis thaliana
cctgttttgaccgagat

SEQ ID NO: 75680 - DNA, 17 bp, Arabidopsis thaliana
cctgttttgcagtgtgt

SEQ ID NO: 75681 - DNA, 17 bp, Arabidopsis thaliana
cctgtttttggtcccaa

SEQ ID NO: 75682 - DNA, 17 bp, Arabidopsis thaliana
ccttaaaactctgatca

SEQ ID NO: 75683 - DNA, 17 bp, Arabidopsis thaliana
ccttaaaccaacgataa

SEQ ID NO: 75684 - DNA, 17 bp, Arabidopsis thaliana
ccttaaattttgcaccg

SEQ ID NO: 75685 - DNA, 17 bp, Arabidopsis thaliana
ccttaacagggtctctg

SEQ ID NO: 75686 - DNA, 17 bp, Arabidopsis thaliana
ccttaaccgatcgcatg

SEQ ID NO: 75687 - DNA, 17 bp, Arabidopsis thaliana
ccttaacttggtatgcg

SEQ ID NO: 75688 - DNA, 17 bp, Arabidopsis thaliana
ccttaagcggtgttcta

SEQ ID NO: 75689 - DNA, 17 bp, Arabidopsis thaliana
ccttaagtttcagcctt

SEQ ID NO: 75690 - DNA, 17 bp, Arabidopsis thaliana
ccttaatctctcgtgtg

SEQ ID NO: 75691 - DNA, 17 bp, Arabidopsis thaliana
ccttaatctcttgcgtg

SEQ ID NO: 75692 - DNA, 17 bp, Arabidopsis thaliana
ccttaattggtccgtaa

SEQ ID NO: 75693 - DNA, 17 bp, Arabidopsis thaliana
ccttaattttcctaccc

SEQ ID NO: 75694 - DNA, 17 bp, Arabidopsis thaliana
ccttacaatcgtgcgat

SEQ ID NO: 75695 - DNA, 17 bp, Arabidopsis thaliana
ccttaccagggcttgac

SEQ ID NO: 75696 - DNA, 17 bp, Arabidopsis thaliana
ccttacccaggttcgag

SEQ ID NO: 75697 - DNA, 17 bp, Arabidopsis thaliana
ccttacgccatgactct

SEQ ID NO: 75698 - DNA, 17 bp, Arabidopsis thaliana
ccttactagttccttcg

SEQ ID NO: 75699 - DNA, 17 bp, Arabidopsis thaliana
ccttactcggtcgttca

SEQ ID NO: 75700 - DNA, 17 bp, Arabidopsis thaliana
ccttagatgttctgggc

SEQ ID NO: 75701 - DNA, 17 bp, Arabidopsis thaliana
ccttagattcaactccg

SEQ ID NO: 75702 - DNA, 17 bp, Arabidopsis thaliana
ccttagcgacggaccgg

SEQ ID NO: 75703 - DNA, 17 bp, Arabidopsis thaliana
ccttagcggatttcgac

SEQ ID NO: 75704 - DNA, 17 bp, Arabidopsis thaliana
ccttagcttctgttgac

SEQ ID NO: 75705 - DNA, 17 bp, Arabidopsis thaliana
ccttaggctatgccgct

SEQ ID NO: 75706 - DNA, 17 bp, Arabidopsis thaliana
ccttaggggattacggg

SEQ ID NO: 75707 - DNA, 17 bp, Arabidopsis thaliana
ccttaggtttgctcgcg

SEQ ID NO: 75708 - DNA, 17 bp, Arabidopsis thaliana
ccttagtaacggcgagc

SEQ ID NO: 75709 - DNA, 17 bp, Arabidopsis thaliana
ccttagtacgagaggac

SEQ ID NO: 75710 - DNA, 17 bp, Arabidopsis thaliana
ccttagtcacatcctgt

SEQ ID NO: 75711 - DNA, 17 bp, Arabidopsis thaliana
ccttagtcgatcctgta

SEQ ID NO: 75712 - DNA, 17 bp, Arabidopsis thaliana
ccttagtcgcatcctgt

SEQ ID NO: 75713 - DNA, 17 bp, Arabidopsis thaliana
ccttagtcgccctgtag

SEQ ID NO: 75714 - DNA, 17 bp, Arabidopsis thaliana
ccttagtcgctcctgta

SEQ ID NO: 75715 - DNA, 17 bp, Arabidopsis thaliana
ccttagtgacgacttcc

SEQ ID NO: 75716 - DNA, 17 bp, Arabidopsis thaliana
ccttagtgatccgacgg

SEQ ID NO: 75717 - DNA, 17 bp, Arabidopsis thaliana
ccttagtggttctcttc

SEQ ID NO: 75718 - DNA, 17 bp, Arabidopsis thaliana
ccttagttggtccgtaa

SEQ ID NO: 75719 - DNA, 17 bp, Arabidopsis thaliana
ccttatccctgacaatt

SEQ ID NO: 75720 - DNA, 17 bp, Arabidopsis thaliana
ccttatctctaaaactt

SEQ ID NO: 75721 - DNA, 17 bp, Arabidopsis thaliana
ccttatctgttggatct

SEQ ID NO: 75722 - DNA, 17 bp, Arabidopsis thaliana
ccttatgagatgtgata

SEQ ID NO: 75723 - DNA, 17 bp, Arabidopsis thaliana
ccttatggagaggatta

SEQ ID NO: 75724 - DNA, 17 bp, Arabidopsis thaliana
ccttatgggacttttgc

SEQ ID NO: 75725 - DNA, 17 bp, Arabidopsis thaliana
ccttatgggctgggcca

SEQ ID NO: 75726 - DNA, 17 bp, Arabidopsis thaliana
ccttatgtgattcgggt

SEQ ID NO: 75727 - DNA, 17 bp, Arabidopsis thaliana
ccttattccctaggagc

SEQ ID NO: 75728 - DNA, 17 bp, Arabidopsis thaliana
ccttattgaccgcaact

SEQ ID NO: 75729 - DNA, 17 bp, Arabidopsis thaliana
ccttattgtggtttcga

SEQ ID NO: 75730 - DNA, 17 bp, Arabidopsis thaliana
ccttatttcggcattca

SEQ ID NO: 75731 - DNA, 17 bp, Arabidopsis thaliana
ccttatttcgttgctct

SEQ ID NO: 75732 - DNA, 17 bp, Arabidopsis thaliana
ccttcaaatccgggtgc

SEQ ID NO: 75733 - DNA, 17 bp, Arabidopsis thaliana
ccttcaactatggcgca

SEQ ID NO: 75734 - DNA, 17 bp, Arabidopsis thaliana
ccttcaactgagacact

SEQ ID NO: 75735 - DNA, 17 bp, Arabidopsis thaliana
ccttcaactttggccag

SEQ ID NO: 75736 - DNA, 17 bp, Arabidopsis thaliana
ccttcaaggtaccgcga

SEQ ID NO: 75737 - DNA, 17 bp, Arabidopsis thaliana
ccttcaagtttgcagta

SEQ ID NO: 75738 - DNA, 17 bp, Arabidopsis thaliana
ccttcaatccaaagatc

SEQ ID NO: 75739 - DNA, 17 bp, Arabidopsis thaliana
ccttcaatccaagatcc

SEQ ID NO: 75740 - DNA, 17 bp, Arabidopsis thaliana
ccttcaatcccgtcgct

SEQ ID NO: 75741 - DNA, 17 bp, Arabidopsis thaliana
ccttcaattctcggaat

SEQ ID NO: 75742 - DNA, 17 bp, Arabidopsis thaliana
ccttcacacctataggc

SEQ ID NO: 75743 - DNA, 17 bp, Arabidopsis thaliana
ccttcacggccggcttc

SEQ ID NO: 75744 - DNA, 17 bp, Arabidopsis thaliana
ccttcacggtgagcttt

SEQ ID NO: 75745 - DNA, 17 bp, Arabidopsis thaliana
ccttcagacgatgtggc

SEQ ID NO: 75746 - DNA, 17 bp, Arabidopsis thaliana
ccttcaggaagaagtcc

SEQ ID NO: 75747 - DNA, 17 bp, Arabidopsis thaliana
ccttcagggagaagtcc

SEQ ID NO: 75748 - DNA, 17 bp, Arabidopsis thaliana
ccttcatcaccacagct

SEQ ID NO: 75749 - DNA, 17 bp, Arabidopsis thaliana
ccttcatcggagaagtg

SEQ ID NO: 75750 - DNA, 17 bp, Arabidopsis thaliana
ccttcatctccaacaaa

SEQ ID NO: 75751 - DNA, 17 bp, Arabidopsis thaliana
ccttcatgctccaagac

SEQ ID NO: 75752 - DNA, 17 bp, Arabidopsis thaliana
ccttcattggatcatgg

SEQ ID NO: 75753 - DNA, 17 bp, Arabidopsis thaliana
ccttcattggttcatgg

SEQ ID NO: 75754 - DNA, 17 bp, Arabidopsis thaliana
ccttcatttcaggtcga

SEQ ID NO: 75755 - DNA, 17 bp, Arabidopsis thaliana
ccttccaagcaatagac

SEQ ID NO: 75756 - DNA, 17 bp, Arabidopsis thaliana
ccttccagacatagtgg

SEQ ID NO: 75757 - DNA, 17 bp, Arabidopsis thaliana
ccttccagccaagtcga

SEQ ID NO: 75758 - DNA, 17 bp, Arabidopsis thaliana
ccttccattttgtccga

SEQ ID NO: 75759 - DNA, 17 bp, Arabidopsis thaliana
ccttccccctttggatg

SEQ ID NO: 75760 - DNA, 17 bp, Arabidopsis thaliana
ccttccctcttggcacc

SEQ ID NO: 75761 - DNA, 17 bp, Arabidopsis thaliana
ccttcccttgaacagaa

SEQ ID NO: 75762 - DNA, 17 bp, Arabidopsis thaliana
ccttccgacctttatta

SEQ ID NO: 75763 - DNA, 17 bp, Arabidopsis thaliana
ccttccgactaatgcca

SEQ ID NO: 75764 - DNA, 17 bp, Arabidopsis thaliana
ccttccgactcttatta

SEQ ID NO: 75765 - DNA, 17 bp, Arabidopsis thaliana
ccttccggcttagtggt

SEQ ID NO: 75766 - DNA, 17 bp, Arabidopsis thaliana
ccttcctcgttcaagtg

SEQ ID NO: 75767 - DNA, 17 bp, Arabidopsis thaliana
ccttcctctctggcgtc

SEQ ID NO: 75768 - DNA, 17 bp, Arabidopsis thaliana
ccttcctgaattgctgg

SEQ ID NO: 75769 - DNA, 17 bp, Arabidopsis thaliana
ccttcctgctttgcctg

SEQ ID NO: 75770 - DNA, 17 bp, Arabidopsis thaliana
ccttccttgccatgatt

SEQ ID NO: 75771 - DNA, 17 bp, Arabidopsis thaliana
ccttccttggatgtctg

SEQ ID NO: 75772 - DNA, 17 bp, Arabidopsis thaliana
ccttcgaaaatcacagg

SEQ ID NO: 75773 - DNA, 17 bp, Arabidopsis thaliana
ccttcgacagactctct

SEQ ID NO: 75774 - DNA, 17 bp, Arabidopsis thaliana
ccttcgacagattctct

SEQ ID NO: 75775 - DNA, 17 bp, Arabidopsis thaliana
ccttcgaggtggatgtg

SEQ ID NO: 75776 - DNA, 17 bp, Arabidopsis thaliana
ccttcgatgtcggctct

SEQ ID NO: 75777 - DNA, 17 bp, Arabidopsis thaliana
ccttcgatgtcggcttt

SEQ ID NO: 75778 - DNA, 17 bp, Arabidopsis thaliana
ccttcgatttcaccatg

SEQ ID NO: 75779 - DNA, 17 bp, Arabidopsis thaliana
ccttcgatttcggctct

SEQ ID NO: 75780 - DNA, 17 bp, Arabidopsis thaliana
ccttcgcggtgccacac

SEQ ID NO: 75781 - DNA, 17 bp, Arabidopsis thaliana
ccttcgctctgatcgca

SEQ ID NO: 75782 - DNA, 17 bp, Arabidopsis thaliana
ccttcgggaacgcggac

SEQ ID NO: 75783 - DNA, 17 bp, Arabidopsis thaliana
ccttcgggaacgcggag

SEQ ID NO: 75784 - DNA, 17 bp, Arabidopsis thaliana
ccttcgggatcgagtat

SEQ ID NO: 75785 - DNA, 17 bp, Arabidopsis thaliana
ccttcgggatcggagta

SEQ ID NO: 75786 - DNA, 17 bp, Arabidopsis thaliana
ccttcgggattagcgct

SEQ ID NO: 75787 - DNA, 17 bp, Arabidopsis thaliana
ccttcgggattagctct

SEQ ID NO: 75788 - DNA, 17 bp, Arabidopsis thaliana
ccttcggtcggcgatac

SEQ ID NO: 75789 - DNA, 17 bp, Arabidopsis thaliana
ccttcggtgaaagattt

SEQ ID NO: 75790 - DNA, 17 bp, Arabidopsis thaliana
ccttcgtaccattcctt

SEQ ID NO: 75791 - DNA, 17 bp, Arabidopsis thaliana
ccttcgtccatgatcgg

SEQ ID NO: 75792 - DNA, 17 bp, Arabidopsis thaliana
ccttcgtgatcttctct

SEQ ID NO: 75793 - DNA, 17 bp, Arabidopsis thaliana
ccttcgtgtagacactc

SEQ ID NO: 75794 - DNA, 17 bp, Arabidopsis thaliana
ccttcgtgtcttgtgat

SEQ ID NO: 75795 - DNA, 17 bp, Arabidopsis thaliana
ccttcgttgcttcttct

SEQ ID NO: 75796 - DNA, 17 bp, Arabidopsis thaliana
ccttcgttttggccggt

SEQ ID NO: 75797 - DNA, 17 bp, Arabidopsis thaliana
ccttctaactagctacg

SEQ ID NO: 75798 - DNA, 17 bp, Arabidopsis thaliana
ccttctaccacccgcaa

SEQ ID NO: 75799 - DNA, 17 bp, Arabidopsis thaliana
ccttctagagggaaaac

SEQ ID NO: 75800 - DNA, 17 bp, Arabidopsis thaliana
ccttctattctaccaaa

SEQ ID NO: 75801 - DNA, 17 bp, Arabidopsis thaliana
ccttctcagatcgccgt

SEQ ID NO: 75802 - DNA, 17 bp, Arabidopsis thaliana
ccttctcagttgtggta

SEQ ID NO: 75803 - DNA, 17 bp, Arabidopsis thaliana
ccttctcatcgatggcc

SEQ ID NO: 75804 - DNA, 17 bp, Arabidopsis thaliana
ccttctcatcgatggtc

SEQ ID NO: 75805 - DNA, 17 bp, Arabidopsis thaliana
ccttctcatcgatgttc

SEQ ID NO: 75806 - DNA, 17 bp, Arabidopsis thaliana
ccttctcatctatggtc

SEQ ID NO: 75807 - DNA, 17 bp, Arabidopsis thaliana
ccttctccctcttggca

SEQ ID NO: 75808 - DNA, 17 bp, Arabidopsis thaliana
ccttctccgtccaaccc

SEQ ID NO: 75809 - DNA, 17 bp, Arabidopsis thaliana
ccttctccgtcgaaacc

SEQ ID NO: 75810 - DNA, 17 bp, Arabidopsis thaliana
ccttctccgtcgaaccc

SEQ ID NO: 75811 - DNA, 17 bp, Arabidopsis thaliana
ccttctccttctccacg

SEQ ID NO: 75812 - DNA, 17 bp, Arabidopsis thaliana
ccttctccttctccatg

SEQ ID NO: 75813 - DNA, 17 bp, Arabidopsis thaliana
ccttctccttgccgcat

SEQ ID NO: 75814 - DNA, 17 bp, Arabidopsis thaliana
ccttctcttctctgcgg

SEQ ID NO: 75815 - DNA, 17 bp, Arabidopsis thaliana
ccttctgattccaattg

SEQ ID NO: 75816 - DNA, 17 bp, Arabidopsis thaliana
ccttctgcctgggtgtc

SEQ ID NO: 75817 - DNA, 17 bp, Arabidopsis thaliana
ccttctgctttgggtgg

SEQ ID NO: 75818 - DNA, 17 bp, Arabidopsis thaliana
ccttctggccatttggt

SEQ ID NO: 75819 - DNA, 17 bp, Arabidopsis thaliana
ccttctggccgagggca

SEQ ID NO: 75820 - DNA, 17 bp, Arabidopsis thaliana
ccttctgggacatagag

SEQ ID NO: 75821 - DNA, 17 bp, Arabidopsis thaliana
ccttctgggtgcgggaa

SEQ ID NO: 75822 - DNA, 17 bp, Arabidopsis thaliana
ccttctggtttttgctg

SEQ ID NO: 75823 - DNA, 17 bp, Arabidopsis thaliana
ccttctgtcggcgatac

SEQ ID NO: 75824 - DNA, 17 bp, Arabidopsis thaliana
ccttcttacagtcatcc

SEQ ID NO: 75825 - DNA, 17 bp, Arabidopsis thaliana
ccttcttagccttcatt

SEQ ID NO: 75826 - DNA, 17 bp, Arabidopsis thaliana
ccttcttatcaagggac

SEQ ID NO: 75827 - DNA, 17 bp, Arabidopsis thaliana
ccttcttcggcgtctca

SEQ ID NO: 75828 - DNA, 17 bp, Arabidopsis thaliana
ccttcttctgattggcc

SEQ ID NO: 75829 - DNA, 17 bp, Arabidopsis thaliana
ccttcttctgattggtc

SEQ ID NO: 75830 - DNA, 17 bp, Arabidopsis thaliana
ccttcttcttctccatg

SEQ ID NO: 75831 - DNA, 17 bp, Arabidopsis thaliana
ccttcttcttctctgcg

SEQ ID NO: 75832 - DNA, 17 bp, Arabidopsis thaliana
ccttcttgaattgctgg

SEQ ID NO: 75833 - DNA, 17 bp, Arabidopsis thaliana
ccttcttgattcctcgg

SEQ ID NO: 75834 - DNA, 17 bp, Arabidopsis thaliana
ccttcttgcaatcatcc

SEQ ID NO: 75835 - DNA, 17 bp, Arabidopsis thaliana
ccttcttgggattcgcg

SEQ ID NO: 75836 - DNA, 17 bp, Arabidopsis thaliana
ccttcttggtgcaattt

SEQ ID NO: 75837 - DNA, 17 bp, Arabidopsis thaliana
ccttctttataagattc

SEQ ID NO: 75838 - DNA, 17 bp, Arabidopsis thaliana
ccttctttccatctagt

SEQ ID NO: 75839 - DNA, 17 bp, Arabidopsis thaliana
ccttctttcgtcggagg

SEQ ID NO: 75840 - DNA, 17 bp, Arabidopsis thaliana
ccttctttgcaataacg

SEQ ID NO: 75841 - DNA, 17 bp, Arabidopsis thaliana
ccttctttggatttggc

SEQ ID NO: 75842 - DNA, 17 bp, Arabidopsis thaliana
ccttctttggccaaagt

SEQ ID NO: 75843 - DNA, 17 bp, Arabidopsis thaliana
ccttctttgtggtggac

SEQ ID NO: 75844 - DNA, 17 bp, Arabidopsis thaliana
ccttgaaaatccggagg

SEQ ID NO: 75845 - DNA, 17 bp, Arabidopsis thaliana
ccttgaaacggctcagc

SEQ ID NO: 75846 - DNA, 17 bp, Arabidopsis thaliana
ccttgaaccgtaagtca

SEQ ID NO: 75847 - DNA, 17 bp, Arabidopsis thaliana
ccttgaagatacattcc

SEQ ID NO: 75848 - DNA, 17 bp, Arabidopsis thaliana
ccttgacccaatggttg

SEQ ID NO: 75849 - DNA, 17 bp, Arabidopsis thaliana
ccttgactctagtccga

SEQ ID NO: 75850 - DNA, 17 bp, Arabidopsis thaliana
ccttgagaacggaccgg

SEQ ID NO: 75851 - DNA, 17 bp, Arabidopsis thaliana
ccttgaggattatgctg

SEQ ID NO: 75852 - DNA, 17 bp, Arabidopsis thaliana
ccttgatatacggtggt

SEQ ID NO: 75853 - DNA, 17 bp, Arabidopsis thaliana
ccttgatcagctgcgca

SEQ ID NO: 75854 - DNA, 17 bp, Arabidopsis thaliana
ccttgatcttagcagga

SEQ ID NO: 75855 - DNA, 17 bp, Arabidopsis thaliana
ccttgatcttctgagaa

SEQ ID NO: 75856 - DNA, 17 bp, Arabidopsis thaliana
ccttgatgtcggctctt

SEQ ID NO: 75857 - DNA, 17 bp, Arabidopsis thaliana
ccttgcgcataaggcgt

SEQ ID NO: 75858 - DNA, 17 bp, Arabidopsis thaliana
ccttgcgctatctctac

SEQ ID NO: 75859 - DNA, 17 bp, Arabidopsis thaliana
ccttgcgctggattatg

SEQ ID NO: 75860 - DNA, 17 bp, Arabidopsis thaliana
ccttgcggaccgttcta

SEQ ID NO: 75861 - DNA, 17 bp, Arabidopsis thaliana
ccttgcgggcttgagga

SEQ ID NO: 75862 - DNA, 17 bp, Arabidopsis thaliana
ccttgcgtcacggtgag

SEQ ID NO: 75863 - DNA, 17 bp, Arabidopsis thaliana
ccttgcgtcttctccac

SEQ ID NO: 75864 - DNA, 17 bp, Arabidopsis thaliana
ccttgctctctgggatc

SEQ ID NO: 75865 - DNA, 17 bp, Arabidopsis thaliana
ccttgctgccacgatcc

SEQ ID NO: 75866 - DNA, 17 bp, Arabidopsis thaliana
ccttgctgtcacgggtg

SEQ ID NO: 75867 - DNA, 17 bp, Arabidopsis thaliana
ccttgcttctgatccaa

SEQ ID NO: 75868 - DNA, 17 bp, Arabidopsis thaliana
ccttgcttgatctgatt

SEQ ID NO: 75869 - DNA, 17 bp, Arabidopsis thaliana
ccttgcttggccatggg

SEQ ID NO: 75870 - DNA, 17 bp, Arabidopsis thaliana
ccttgctttgtgattgt

SEQ ID NO: 75871 - DNA, 17 bp, Arabidopsis thaliana
ccttggaatgggtcggc

SEQ ID NO: 75872 - DNA, 17 bp, Arabidopsis thaliana
ccttggacttctttgat

SEQ ID NO: 75873 - DNA, 17 bp, Arabidopsis thaliana
ccttggagaaatatgcg

SEQ ID NO: 75874 - DNA, 17 bp, Arabidopsis thaliana
ccttggagatggtctaa

SEQ ID NO: 75875 - DNA, 17 bp, Arabidopsis thaliana
ccttggagattcgtcct

SEQ ID NO: 75876 - DNA, 17 bp, Arabidopsis thaliana
ccttggatccgttgatt

SEQ ID NO: 75877 - DNA, 17 bp, Arabidopsis thaliana
ccttggatgggtcggcc

SEQ ID NO: 75878 - DNA, 17 bp, Arabidopsis thaliana
ccttggcaccaacagac

SEQ ID NO: 75879 - DNA, 17 bp, Arabidopsis thaliana
ccttggcccaatggttg

SEQ ID NO: 75880 - DNA, 17 bp, Arabidopsis thaliana
ccttggcccaattggtt

SEQ ID NO: 75881 - DNA, 17 bp, Arabidopsis thaliana
ccttggccgacaggccc

SEQ ID NO: 75882 - DNA, 17 bp, Arabidopsis thaliana
ccttggctaacgacaaa

SEQ ID NO: 75883 - DNA, 17 bp, Arabidopsis thaliana
ccttgggacatctattg

SEQ ID NO: 75884 - DNA, 17 bp, Arabidopsis thaliana
ccttgggacggcccggc

SEQ ID NO: 75885 - DNA, 17 bp, Arabidopsis thaliana
ccttgggatgagtcggc

SEQ ID NO: 75886 - DNA, 17 bp, Arabidopsis thaliana
ccttgggatggatcggt

SEQ ID NO: 75887 - DNA, 17 bp, Arabidopsis thaliana
ccttgggatggatgggc

SEQ ID NO: 75888 - DNA, 17 bp, Arabidopsis thaliana
ccttgggatggatgggt

SEQ ID NO: 75889 - DNA, 17 bp, Arabidopsis thaliana
ccttgggatggctcgcc

SEQ ID NO: 75890 - DNA, 17 bp, Arabidopsis thaliana
ccttgggatgggtcggc

SEQ ID NO: 75891 - DNA, 17 bp, Arabidopsis thaliana
ccttgggatgggtcggt

SEQ ID NO: 75892 - DNA, 17 bp, Arabidopsis thaliana
ccttgggatgggtctgc

SEQ ID NO: 75893 - DNA, 17 bp, Arabidopsis thaliana
ccttgggatgggtgggc

SEQ ID NO: 75894 - DNA, 17 bp, Arabidopsis thaliana
ccttgggatggtcggcc

SEQ ID NO: 75895 - DNA, 17 bp, Arabidopsis thaliana
ccttgggatggttcggc

SEQ ID NO: 75896 - DNA, 17 bp, Arabidopsis thaliana
ccttgggatgtgtcggc

SEQ ID NO: 75897 - DNA, 17 bp, Arabidopsis thaliana
ccttgggccaattggtt

SEQ ID NO: 75898 - DNA, 17 bp, Arabidopsis thaliana
ccttgggtgacaaagca

SEQ ID NO: 75899 - DNA, 17 bp, Arabidopsis thaliana
ccttggtctcccaactg

SEQ ID NO: 75900 - DNA, 17 bp, Arabidopsis thaliana
ccttggttgtgatcgtg

SEQ ID NO: 75901 - DNA, 17 bp, Arabidopsis thaliana
ccttgtaaatcaatttg

SEQ ID NO: 75902 - DNA, 17 bp, Arabidopsis thaliana
ccttgtaaggccttttc

SEQ ID NO: 75903 - DNA, 17 bp, Arabidopsis thaliana
ccttgtatcaatttgtc

SEQ ID NO: 75904 - DNA, 17 bp, Arabidopsis thaliana
ccttgtcaggacctacg

SEQ ID NO: 75905 - DNA, 17 bp, Arabidopsis thaliana
ccttgtcctgttacttg

SEQ ID NO: 75906 - DNA, 17 bp, Arabidopsis thaliana
ccttgtcgctaagattc

SEQ ID NO: 75907 - DNA, 17 bp, Arabidopsis thaliana
ccttgtcgtcatgtgct

SEQ ID NO: 75908 - DNA, 17 bp, Arabidopsis thaliana
ccttgtcttagtcctct

SEQ ID NO: 75909 - DNA, 17 bp, Arabidopsis thaliana
ccttgtgacctgacttt

SEQ ID NO: 75910 - DNA, 17 bp, Arabidopsis thaliana
ccttgtgatgggtcggc

SEQ ID NO: 75911 - DNA, 17 bp, Arabidopsis thaliana
ccttgtgcattggtcgg

SEQ ID NO: 75912 - DNA, 17 bp, Arabidopsis thaliana
ccttgtgctatatgacg

SEQ ID NO: 75913 - DNA, 17 bp, Arabidopsis thaliana
ccttgtgcttcaggacc

SEQ ID NO: 75914 - DNA, 17 bp, Arabidopsis thaliana
ccttgtgcttcttagca

SEQ ID NO: 75915 - DNA, 17 bp, Arabidopsis thaliana
ccttgtggatgtcaaaa

SEQ ID NO: 75916 - DNA, 17 bp, Arabidopsis thaliana
ccttgtggctggccagt

SEQ ID NO: 75917 - DNA, 17 bp, Arabidopsis thaliana
ccttgtgtcaggaccta

SEQ ID NO: 75918 - DNA, 17 bp, Arabidopsis thaliana
ccttgttatgcaactct

SEQ ID NO: 75919 - DNA, 17 bp, Arabidopsis thaliana
ccttgtttagtcacttt

SEQ ID NO: 75920 - DNA, 17 bp, Arabidopsis thaliana
ccttgtttctttaggct

SEQ ID NO: 75921 - DNA, 17 bp, Arabidopsis thaliana
cctttaccccggataga

SEQ ID NO: 75922 - DNA, 17 bp, Arabidopsis thaliana
cctttacggactgttca

SEQ ID NO: 75923 - DNA, 17 bp, Arabidopsis thaliana
cctttacggcaggtcgg

SEQ ID NO: 75924 - DNA, 17 bp, Arabidopsis thaliana
cctttagcggtttagtt

SEQ ID NO: 75925 - DNA, 17 bp, Arabidopsis thaliana
cctttataactgcagtt

SEQ ID NO: 75926 - DNA, 17 bp, Arabidopsis thaliana
cctttatctgtaccctt

SEQ ID NO: 75927 - DNA, 17 bp, Arabidopsis thaliana
cctttatttctgctgtg

SEQ ID NO: 75928 - DNA, 17 bp, Arabidopsis thaliana
cctttcaagcaatagac

SEQ ID NO: 75929 - DNA, 17 bp, Arabidopsis thaliana
cctttcagcctggattg

SEQ ID NO: 75930 - DNA, 17 bp, Arabidopsis thaliana
cctttcatcaggctcct

SEQ ID NO: 75931 - DNA, 17 bp, Arabidopsis thaliana
cctttcattattttgct

SEQ ID NO: 75932 - DNA, 17 bp, Arabidopsis thaliana
cctttccaacccgtagt

SEQ ID NO: 75933 - DNA, 17 bp, Arabidopsis thaliana
cctttccacatatgcca

SEQ ID NO: 75934 - DNA, 17 bp, Arabidopsis thaliana
cctttccattgactttt

SEQ ID NO: 75935 - DNA, 17 bp, Arabidopsis thaliana
cctttcccagctggacc

SEQ ID NO: 75936 - DNA, 17 bp, Arabidopsis thaliana
cctttcccgagtttttc

SEQ ID NO: 75937 - DNA, 17 bp, Arabidopsis thaliana
cctttccgatgtgggac

SEQ ID NO: 75938 - DNA, 17 bp, Arabidopsis thaliana
cctttccgatgtgggcc

SEQ ID NO: 75939 - DNA, 17 bp, Arabidopsis thaliana
cctttccggcgagctac

SEQ ID NO: 75940 - DNA, 17 bp, Arabidopsis thaliana
cctttccgtactttgta

SEQ ID NO: 75941 - DNA, 17 bp, Arabidopsis thaliana
cctttcgaagggtctga

SEQ ID NO: 75942 - DNA, 17 bp, Arabidopsis thaliana
cctttcgaataggctag

SEQ ID NO: 75943 - DNA, 17 bp, Arabidopsis thaliana
cctttcgccacttgacc

SEQ ID NO: 75944 - DNA, 17 bp, Arabidopsis thaliana
cctttcgccgtgggtcc

SEQ ID NO: 75945 - DNA, 17 bp, Arabidopsis thaliana
cctttcgctacagttgc

SEQ ID NO: 75946 - DNA, 17 bp, Arabidopsis thaliana
cctttcggcccctcctt

SEQ ID NO: 75947 - DNA, 17 bp, Arabidopsis thaliana
cctttcggtggtgttga

SEQ ID NO: 75948 - DNA, 17 bp, Arabidopsis thaliana
cctttcggttgggtaag

SEQ ID NO: 75949 - DNA, 17 bp, Arabidopsis thaliana
cctttctaaaggtcggt

SEQ ID NO: 75950 - DNA, 17 bp, Arabidopsis thaliana
cctttctacattgtcaa

SEQ ID NO: 75951 - DNA, 17 bp, Arabidopsis thaliana
cctttctaggtttttgc

SEQ ID NO: 75952 - DNA, 17 bp, Arabidopsis thaliana
cctttctagtctgcgct

SEQ ID NO: 75953 - DNA, 17 bp, Arabidopsis thaliana
cctttctcaggcgttgt

SEQ ID NO: 75954 - DNA, 17 bp, Arabidopsis thaliana
cctttctccacaatatg

SEQ ID NO: 75955 - DNA, 17 bp, Arabidopsis thaliana
cctttctccagctcagc

SEQ ID NO: 75956 - DNA, 17 bp, Arabidopsis thaliana
cctttctctctgcaaat

SEQ ID NO: 75957 - DNA, 17 bp, Arabidopsis thaliana
cctttctcttcgatggg

SEQ ID NO: 75958 - DNA, 17 bp, Arabidopsis thaliana
cctttctgcagttggcc

SEQ ID NO: 75959 - DNA, 17 bp, Arabidopsis thaliana
cctttcttagcaactac

SEQ ID NO: 75960 - DNA, 17 bp, Arabidopsis thaliana
cctttcttccgacaacg

SEQ ID NO: 75961 - DNA, 17 bp, Arabidopsis thaliana
cctttcttcgtgtctac

SEQ ID NO: 75962 - DNA, 17 bp, Arabidopsis thaliana
cctttcttgatcggact

SEQ ID NO: 75963 - DNA, 17 bp, Arabidopsis thaliana
cctttgacatcggtgca

SEQ ID NO: 75964 - DNA, 17 bp, Arabidopsis thaliana
cctttgaccttttgtcg

SEQ ID NO: 75965 - DNA, 17 bp, Arabidopsis thaliana
cctttgacgatgaagct

SEQ ID NO: 75966 - DNA, 17 bp, Arabidopsis thaliana
cctttgacgtgttcagc

SEQ ID NO: 75967 - DNA, 17 bp, Arabidopsis thaliana
cctttgacttggatttg

SEQ ID NO: 75968 - DNA, 17 bp, Arabidopsis thaliana
cctttgactttttgtcg

SEQ ID NO: 75969 - DNA, 17 bp, Arabidopsis thaliana
cctttgatactctctgg

SEQ ID NO: 75970 - DNA, 17 bp, Arabidopsis thaliana
cctttgatcaaagttct

SEQ ID NO: 75971 - DNA, 17 bp, Arabidopsis thaliana
cctttgatcacagggac

SEQ ID NO: 75972 - DNA, 17 bp, Arabidopsis thaliana
cctttgatgggtgttgc

SEQ ID NO: 75973 - DNA, 17 bp, Arabidopsis thaliana
cctttgattttgggaag

SEQ ID NO: 75974 - DNA, 17 bp, Arabidopsis thaliana
cctttgcaaggacggga

SEQ ID NO: 75975 - DNA, 17 bp, Arabidopsis thaliana
cctttgcagagcactgg

SEQ ID NO: 75976 - DNA, 17 bp, Arabidopsis thaliana
cctttgcaggtggagaa

SEQ ID NO: 75977 - DNA, 17 bp, Arabidopsis thaliana
cctttgcatttggcggc

SEQ ID NO: 75978 - DNA, 17 bp, Arabidopsis thaliana
cctttgcccggaggagg

SEQ ID NO: 75979 - DNA, 17 bp, Arabidopsis thaliana
cctttggaccgatccag

SEQ ID NO: 75980 - DNA, 17 bp, Arabidopsis thaliana
cctttggattaaccttg

SEQ ID NO: 75981 - DNA, 17 bp, Arabidopsis thaliana
cctttggattcacttac

SEQ ID NO: 75982 - DNA, 17 bp, Arabidopsis thaliana
cctttggattcacttgg

SEQ ID NO: 75983 - DNA, 17 bp, Arabidopsis thaliana
cctttggcaccaacaga

SEQ ID NO: 75984 - DNA, 17 bp, Arabidopsis thaliana
cctttggctcctggtaa

SEQ ID NO: 75985 - DNA, 17 bp, Arabidopsis thaliana
cctttggtggataccga

SEQ ID NO: 75986 - DNA, 17 bp, Arabidopsis thaliana
cctttggtgtgcattgg

SEQ ID NO: 75987 - DNA, 17 bp, Arabidopsis thaliana
cctttgtacacaccgac

SEQ ID NO: 75988 - DNA, 17 bp, Arabidopsis thaliana
cctttgtacacaccgcc

SEQ ID NO: 75989 - DNA, 17 bp, Arabidopsis thaliana
cctttgtcaataggtca

SEQ ID NO: 75990 - DNA, 17 bp, Arabidopsis thaliana
cctttgtcaggatctaa

SEQ ID NO: 75991 - DNA, 17 bp, Arabidopsis thaliana
cctttgtcgctaagatt

SEQ ID NO: 75992 - DNA, 17 bp, Arabidopsis thaliana
cctttgtggctatagct

SEQ ID NO: 75993 - DNA, 17 bp, Arabidopsis thaliana
cctttgtgtctatgctc

SEQ ID NO: 75994 - DNA, 17 bp, Arabidopsis thaliana
cctttgtgtctgaactt

SEQ ID NO: 75995 - DNA, 17 bp, Arabidopsis thaliana
cctttgtgttgaccaag

SEQ ID NO: 75996 - DNA, 17 bp, Arabidopsis thaliana
cctttgttcaagattcg

SEQ ID NO: 75997 - DNA, 17 bp, Arabidopsis thaliana
cctttgttccaatggtt

SEQ ID NO: 75998 - DNA, 17 bp, Arabidopsis thaliana
cctttgtttgaccattc

SEQ ID NO: 75999 - DNA, 17 bp, Arabidopsis thaliana
ccttttaaaatatccca

SEQ ID NO: 76000 - DNA, 17 bp, Arabidopsis thaliana
ccttttaaaatgtccca

SEQ ID NO: 76001 - DNA, 17 bp, Arabidopsis thaliana
ccttttaagattgggtt

SEQ ID NO: 76002 - DNA, 17 bp, Arabidopsis thaliana
ccttttcaaccctttgg

SEQ ID NO: 76003 - DNA, 17 bp, Arabidopsis thaliana
ccttttccattgacttt

SEQ ID NO: 76004 - DNA, 17 bp, Arabidopsis thaliana
ccttttcccccctggca

SEQ ID NO: 76005 - DNA, 17 bp, Arabidopsis thaliana
ccttttccctcttggca

SEQ ID NO: 76006 - DNA, 17 bp, Arabidopsis thaliana
ccttttcgcctgcaaaa

SEQ ID NO: 76007 - DNA, 17 bp, Arabidopsis thaliana
ccttttcggaaagccca

SEQ ID NO: 76008 - DNA, 17 bp, Arabidopsis thaliana
ccttttcgggaagcggg

SEQ ID NO: 76009 - DNA, 17 bp, Arabidopsis thaliana
ccttttctcaccgtcgc

SEQ ID NO: 76010 - DNA, 17 bp, Arabidopsis thaliana
ccttttgacggcttttt

SEQ ID NO: 76011 - DNA, 17 bp, Arabidopsis thaliana
ccttttgagacacttgt

SEQ ID NO: 76012 - DNA, 17 bp, Arabidopsis thaliana
ccttttgagccacttgt

SEQ ID NO: 76013 - DNA, 17 bp, Arabidopsis thaliana
ccttttgagcgctggat

SEQ ID NO: 76014 - DNA, 17 bp, Arabidopsis thaliana
ccttttgggggttctgt

SEQ ID NO: 76015 - DNA, 17 bp, Arabidopsis thaliana
ccttttgtcgctaagat

SEQ ID NO: 76016 - DNA, 17 bp, Arabidopsis thaliana
cctttttacgttggcgg

SEQ ID NO: 76017 - DNA, 17 bp, Arabidopsis thaliana
cctttttccatttgctg

SEQ ID NO: 76018 - DNA, 17 bp, Arabidopsis thaliana
cctttttccgacaacat

SEQ ID NO: 76019 - DNA, 17 bp, Arabidopsis thaliana
cctttttcgtgatttgg

SEQ ID NO: 76020 - DNA, 17 bp, Arabidopsis thaliana
cctttttcttcgtttcc

SEQ ID NO: 76021 - DNA, 17 bp, Arabidopsis thaliana
cctttttggacaagatc

SEQ ID NO: 76022 - DNA, 17 bp, Arabidopsis thaliana
cctttttggcgagacaa

SEQ ID NO: 76023 - DNA, 17 bp, Arabidopsis thaliana
cctttttggtcccaagg

SEQ ID NO: 76024 - DNA, 17 bp, Arabidopsis thaliana
cctttttggttgctcgc

SEQ ID NO: 76025 - DNA, 17 bp, Arabidopsis thaliana
ccttttttggagggtcg

SEQ ID NO: 76026 - DNA, 17 bp, Arabidopsis thaliana
cgaaaaaacagtggatg

SEQ ID NO: 76027 - DNA, 17 bp, Arabidopsis thaliana
cgaaaaaacctcggcgt

SEQ ID NO: 76028 - DNA, 17 bp, Arabidopsis thaliana
cgaaaaaccgaatccga

SEQ ID NO: 76029 - DNA, 17 bp, Arabidopsis thaliana
cgaaaaagcatagtttg

SEQ ID NO: 76030 - DNA, 17 bp, Arabidopsis thaliana
cgaaaaagttcgtcttt

SEQ ID NO: 76031 - DNA, 17 bp, Arabidopsis thaliana
cgaaaaatctacttctt

SEQ ID NO: 76032 - DNA, 17 bp, Arabidopsis thaliana
cgaaaaatctattttcg

SEQ ID NO: 76033 - DNA, 17 bp, Arabidopsis thaliana
cgaaaaattccatttcc

SEQ ID NO: 76034 - DNA, 17 bp, Arabidopsis thaliana
cgaaaaattcgtattga

SEQ ID NO: 76035 - DNA, 17 bp, Arabidopsis thaliana
cgaaaaccgcacatcat

SEQ ID NO: 76036 - DNA, 17 bp, Arabidopsis thaliana
cgaaaacgatttatcca

SEQ ID NO: 76037 - DNA, 17 bp, Arabidopsis thaliana
cgaaaacggatgttaaa

SEQ ID NO: 76038 - DNA, 17 bp, Arabidopsis thaliana
cgaaaacggcaagatac

SEQ ID NO: 76039 - DNA, 17 bp, Arabidopsis thaliana
cgaaaactaaaatctga

SEQ ID NO: 76040 - DNA, 17 bp, Arabidopsis thaliana
cgaaaactctgtctcac

SEQ ID NO: 76041 - DNA, 17 bp, Arabidopsis thaliana
cgaaaagataagtgcgc

SEQ ID NO: 76042 - DNA, 17 bp, Arabidopsis thaliana
cgaaaagcaaacggtta

SEQ ID NO: 76043 - DNA, 17 bp, Arabidopsis thaliana
cgaaaagctagggtttg

SEQ ID NO: 76044 - DNA, 17 bp, Arabidopsis thaliana
cgaaaaggtatcacacg

SEQ ID NO: 76045 - DNA, 17 bp, Arabidopsis thaliana
cgaaaaggtatcacata

SEQ ID NO: 76046 - DNA, 17 bp, Arabidopsis thaliana
cgaaaaggtatcacatg

SEQ ID NO: 76047 - DNA, 17 bp, Arabidopsis thaliana
cgaaaaggtgttcggtc

SEQ ID NO: 76048 - DNA, 17 bp, Arabidopsis thaliana
cgaaaagtctgacatgg

SEQ ID NO: 76049 - DNA, 17 bp, Arabidopsis thaliana
cgaaaagttccattgtc

SEQ ID NO: 76050 - DNA, 17 bp, Arabidopsis thaliana
cgaaaatagacctagcg

SEQ ID NO: 76051 - DNA, 17 bp, Arabidopsis thaliana
cgaaaatagcggttacc

SEQ ID NO: 76052 - DNA, 17 bp, Arabidopsis thaliana
cgaaaatagtgcctggg

SEQ ID NO: 76053 - DNA, 17 bp, Arabidopsis thaliana
cgaaaatccaaacctga

SEQ ID NO: 76054 - DNA, 17 bp, Arabidopsis thaliana
cgaaaatcccggcggcc

SEQ ID NO: 76055 - DNA, 17 bp, Arabidopsis thaliana
cgaaaatccgaatgtcc

SEQ ID NO: 76056 - DNA, 17 bp, Arabidopsis thaliana
cgaaaatcgaactgata

SEQ ID NO: 76057 - DNA, 17 bp, Arabidopsis thaliana
cgaaaatcgatcttaaa

SEQ ID NO: 76058 - DNA, 17 bp, Arabidopsis thaliana
cgaaaatgacttttggc

SEQ ID NO: 76059 - DNA, 17 bp, Arabidopsis thaliana
cgaaaatgcaaatagga

SEQ ID NO: 76060 - DNA, 17 bp, Arabidopsis thaliana
cgaaaatgcccgaaaaa

SEQ ID NO: 76061 - DNA, 17 bp, Arabidopsis thaliana
cgaaaatggatggcgct

SEQ ID NO: 76062 - DNA, 17 bp, Arabidopsis thaliana
cgaaaattacattcgca

SEQ ID NO: 76063 - DNA, 17 bp, Arabidopsis thaliana
cgaaaattcacagtaga

SEQ ID NO: 76064 - DNA, 17 bp, Arabidopsis thaliana
cgaaaattcgggtataa

SEQ ID NO: 76065 - DNA, 17 bp, Arabidopsis thaliana
cgaaaattcgggtatcg

SEQ ID NO: 76066 - DNA, 17 bp, Arabidopsis thaliana
cgaaaatttcacggcat

SEQ ID NO: 76067 - DNA, 17 bp, Arabidopsis thaliana
cgaaacaaaatttctaa

SEQ ID NO: 76068 - DNA, 17 bp, Arabidopsis thaliana
cgaaacacttactggct

SEQ ID NO: 76069 - DNA, 17 bp, Arabidopsis thaliana
cgaaacagagagagatt

SEQ ID NO: 76070 - DNA, 17 bp, Arabidopsis thaliana
cgaaacagtggtagagt

SEQ ID NO: 76071 - DNA, 17 bp, Arabidopsis thaliana
cgaaacagttatggcgt

SEQ ID NO: 76072 - DNA, 17 bp, Arabidopsis thaliana
cgaaacatgttaggagg

SEQ ID NO: 76073 - DNA, 17 bp, Arabidopsis thaliana
cgaaaccacagcatgta

SEQ ID NO: 76074 - DNA, 17 bp, Arabidopsis thaliana
cgaaaccacggacccag

SEQ ID NO: 76075 - DNA, 17 bp, Arabidopsis thaliana
cgaaaccaggctctgat

SEQ ID NO: 76076 - DNA, 17 bp, Arabidopsis thaliana
cgaaacccgtaatcccc

SEQ ID NO: 76077 - DNA, 17 bp, Arabidopsis thaliana
cgaaacccgtaatccct

SEQ ID NO: 76078 - DNA, 17 bp, Arabidopsis thaliana
cgaaacccgtaatcctc

SEQ ID NO: 76079 - DNA, 17 bp, Arabidopsis thaliana
cgaaaccgattgttcag

SEQ ID NO: 76080 - DNA, 17 bp, Arabidopsis thaliana
cgaaaccggatcttaaa

SEQ ID NO: 76081 - DNA, 17 bp, Arabidopsis thaliana
cgaaacctgcatgggcc

SEQ ID NO: 76082 - DNA, 17 bp, Arabidopsis thaliana
cgaaacctggctctgat

SEQ ID NO: 76083 - DNA, 17 bp, Arabidopsis thaliana
cgaaacctggctctgct

SEQ ID NO: 76084 - DNA, 17 bp, Arabidopsis thaliana
cgaaaccttgctctgat

SEQ ID NO: 76085 - DNA, 17 bp, Arabidopsis thaliana
cgaaaccttgttacgac

SEQ ID NO: 76086 - DNA, 17 bp, Arabidopsis thaliana
cgaaacgacagtcgatt

SEQ ID NO: 76087 - DNA, 17 bp, Arabidopsis thaliana
cgaaacgaggtgtggca

SEQ ID NO: 76088 - DNA, 17 bp, Arabidopsis thaliana
cgaaacgatggtcggat

SEQ ID NO: 76089 - DNA, 17 bp, Arabidopsis thaliana
cgaaacggcgacctcta

SEQ ID NO: 76090 - DNA, 17 bp, Arabidopsis thaliana
cgaaacggtctgtatag

SEQ ID NO: 76091 - DNA, 17 bp, Arabidopsis thaliana
cgaaactaatcatgacc

SEQ ID NO: 76092 - DNA, 17 bp, Arabidopsis thaliana
cgaaactacaaagtcgc

SEQ ID NO: 76093 - DNA, 17 bp, Arabidopsis thaliana
cgaaactcatagccgac

SEQ ID NO: 76094 - DNA, 17 bp, Arabidopsis thaliana
cgaaactccttcggtgg

SEQ ID NO: 76095 - DNA, 17 bp, Arabidopsis thaliana
cgaaactcggacatttg

SEQ ID NO: 76096 - DNA, 17 bp, Arabidopsis thaliana
cgaaactctttcggtga

SEQ ID NO: 76097 - DNA, 17 bp, Arabidopsis thaliana
cgaaactgacacatggc

SEQ ID NO: 76098 - DNA, 17 bp, Arabidopsis thaliana
cgaaactggatagactg

SEQ ID NO: 76099 - DNA, 17 bp, Arabidopsis thaliana
cgaaacttggctctgat

SEQ ID NO: 76100 - DNA, 17 bp, Arabidopsis thaliana
cgaaactttgtatcgga

SEQ ID NO: 76101 - DNA, 17 bp, Arabidopsis thaliana
cgaaagaaaggccttcc

SEQ ID NO: 76102 - DNA, 17 bp, Arabidopsis thaliana
cgaaagaaccgtcgcct

SEQ ID NO: 76103 - DNA, 17 bp, Arabidopsis thaliana
cgaaagaagtgcggtgc

SEQ ID NO: 76104 - DNA, 17 bp, Arabidopsis thaliana
cgaaagaatggtaacag

SEQ ID NO: 76105 - DNA, 17 bp, Arabidopsis thaliana
cgaaagagcccggtatt

SEQ ID NO: 76106 - DNA, 17 bp, Arabidopsis thaliana
cgaaagaggagatagaa

SEQ ID NO: 76107 - DNA, 17 bp, Arabidopsis thaliana
cgaaagagtcgcagcga

SEQ ID NO: 76108 - DNA, 17 bp, Arabidopsis thaliana
cgaaagatgatgtgagg

SEQ ID NO: 76109 - DNA, 17 bp, Arabidopsis thaliana
cgaaagatggtgaacta

SEQ ID NO: 76110 - DNA, 17 bp, Arabidopsis thaliana
cgaaagattatgttgcc

SEQ ID NO: 76111 - DNA, 17 bp, Arabidopsis thaliana
cgaaagattcgcaccct

SEQ ID NO: 76112 - DNA, 17 bp, Arabidopsis thaliana
cgaaagcacgggattat

SEQ ID NO: 76113 - DNA, 17 bp, Arabidopsis thaliana
cgaaagcactctactgg

SEQ ID NO: 76114 - DNA, 17 bp, Arabidopsis thaliana
cgaaagcactctgctgg

SEQ ID NO: 76115 - DNA, 17 bp, Arabidopsis thaliana
cgaaagcacttacggcc

SEQ ID NO: 76116 - DNA, 17 bp, Arabidopsis thaliana
cgaaagcattcaggttt

SEQ ID NO: 76117 - DNA, 17 bp, Arabidopsis thaliana
cgaaagcatttgccaag

SEQ ID NO: 76118 - DNA, 17 bp, Arabidopsis thaliana
cgaaagcatttgcctaa

SEQ ID NO: 76119 - DNA, 17 bp, Arabidopsis thaliana
cgaaagcctatggggcc

SEQ ID NO: 76120 - DNA, 17 bp, Arabidopsis thaliana
cgaaagcctatggggtc

SEQ ID NO: 76121 - DNA, 17 bp, Arabidopsis thaliana
cgaaaggaattgtccgt

SEQ ID NO: 76122 - DNA, 17 bp, Arabidopsis thaliana
cgaaaggccgatctagt

SEQ ID NO: 76123 - DNA, 17 bp, Arabidopsis thaliana
cgaaaggccgcgagttc

SEQ ID NO: 76124 - DNA, 17 bp, Arabidopsis thaliana
cgaaaggccttacatct

SEQ ID NO: 76125 - DNA, 17 bp, Arabidopsis thaliana
cgaaaggcgtaacgatc

SEQ ID NO: 76126 - DNA, 17 bp, Arabidopsis thaliana
cgaaaggggatccggtt

SEQ ID NO: 76127 - DNA, 17 bp, Arabidopsis thaliana
cgaaaggtatcacatgc

SEQ ID NO: 76128 - DNA, 17 bp, Arabidopsis thaliana
cgaaaggtgcgtggtgg

SEQ ID NO: 76129 - DNA, 17 bp, Arabidopsis thaliana
cgaaagtattattgact

SEQ ID NO: 76130 - DNA, 17 bp, Arabidopsis thaliana
cgaaagtcattgataac

SEQ ID NO: 76131 - DNA, 17 bp, Arabidopsis thaliana
cgaaagtcttcaccgag

SEQ ID NO: 76132 - DNA, 17 bp, Arabidopsis thaliana
cgaaagtgactacatca

SEQ ID NO: 76133 - DNA, 17 bp, Arabidopsis thaliana
cgaaagtgactacatcg

SEQ ID NO: 76134 - DNA, 17 bp, Arabidopsis thaliana
cgaaagtgcctcaatgt

SEQ ID NO: 76135 - DNA, 17 bp, Arabidopsis thaliana
cgaaagtgcgttcaatt

SEQ ID NO: 76136 - DNA, 17 bp, Arabidopsis thaliana
cgaaagtgcttcgatga

SEQ ID NO: 76137 - DNA, 17 bp, Arabidopsis thaliana
cgaaagttcgaatctaa

SEQ ID NO: 76138 - DNA, 17 bp, Arabidopsis thaliana
cgaaagtttgggcctgt

SEQ ID NO: 76139 - DNA, 17 bp, Arabidopsis thaliana
cgaaatacttcagaatg

SEQ ID NO: 76140 - DNA, 17 bp, Arabidopsis thaliana
cgaaatacttcagagtg

SEQ ID NO: 76141 - DNA, 17 bp, Arabidopsis thaliana
cgaaatagagtggagtg

SEQ ID NO: 76142 - DNA, 17 bp, Arabidopsis thaliana
cgaaatatggatggggt

SEQ ID NO: 76143 - DNA, 17 bp, Arabidopsis thaliana
cgaaatatgtccgagtg

SEQ ID NO: 76144 - DNA, 17 bp, Arabidopsis thaliana
cgaaatcaagtgctgtg

SEQ ID NO: 76145 - DNA, 17 bp, Arabidopsis thaliana
cgaaatccgatttcctt

SEQ ID NO: 76146 - DNA, 17 bp, Arabidopsis thaliana
cgaaatccgcaaaggac

SEQ ID NO: 76147 - DNA, 17 bp, Arabidopsis thaliana
cgaaatccgctaaggag

SEQ ID NO: 76148 - DNA, 17 bp, Arabidopsis thaliana
cgaaatccgtaatttcc

SEQ ID NO: 76149 - DNA, 17 bp, Arabidopsis thaliana
cgaaatcctatggggtc

SEQ ID NO: 76150 - DNA, 17 bp, Arabidopsis thaliana
cgaaatcgaagcaacct

SEQ ID NO: 76151 - DNA, 17 bp, Arabidopsis thaliana
cgaaatcgctagacagc

SEQ ID NO: 76152 - DNA, 17 bp, Arabidopsis thaliana
cgaaatcgctgttagaa

SEQ ID NO: 76153 - DNA, 17 bp, Arabidopsis thaliana
cgaaatcggagcagcct

SEQ ID NO: 76154 - DNA, 17 bp, Arabidopsis thaliana
cgaaatcgttgaccggt

SEQ ID NO: 76155 - DNA, 17 bp, Arabidopsis thaliana
cgaaatctaagtgttga

SEQ ID NO: 76156 - DNA, 17 bp, Arabidopsis thaliana
cgaaatctgttgtgatt

SEQ ID NO: 76157 - DNA, 17 bp, Arabidopsis thaliana
cgaaatgaccggaatcg

SEQ ID NO: 76158 - DNA, 17 bp, Arabidopsis thaliana
cgaaatgcctggactta

SEQ ID NO: 76159 - DNA, 17 bp, Arabidopsis thaliana
cgaaatgcctggacttg

SEQ ID NO: 76160 - DNA, 17 bp, Arabidopsis thaliana
cgaaatgcgatacttgg

SEQ ID NO: 76161 - DNA, 17 bp, Arabidopsis thaliana
cgaaatgggagcagcct

SEQ ID NO: 76162 - DNA, 17 bp, Arabidopsis thaliana
cgaaatggggtcatccg

SEQ ID NO: 76163 - DNA, 17 bp, Arabidopsis thaliana
cgaaatgtctaggctca

SEQ ID NO: 76164 - DNA, 17 bp, Arabidopsis thaliana
cgaaatgttttactagg

SEQ ID NO: 76165 - DNA, 17 bp, Arabidopsis thaliana
cgaaatgttttgtcggg

SEQ ID NO: 76166 - DNA, 17 bp, Arabidopsis thaliana
cgaaattacaggtttcg

SEQ ID NO: 76167 - DNA, 17 bp, Arabidopsis thaliana
cgaaattatcgggtccg

SEQ ID NO: 76168 - DNA, 17 bp, Arabidopsis thaliana
cgaaattgacggttcag

SEQ ID NO: 76169 - DNA, 17 bp, Arabidopsis thaliana
cgaaattgctcttgatg

SEQ ID NO: 76170 - DNA, 17 bp, Arabidopsis thaliana
cgaaattgtgatcaact

SEQ ID NO: 76171 - DNA, 17 bp, Arabidopsis thaliana
cgaaatttcgaatatcc

SEQ ID NO: 76172 - DNA, 17 bp, Arabidopsis thaliana
cgaaatttgtctgttgg

SEQ ID NO: 76173 - DNA, 17 bp, Arabidopsis thaliana
cgaacaaacggcgattt

SEQ ID NO: 76174 - DNA, 17 bp, Arabidopsis thaliana
cgaacaaagtgttgaat

SEQ ID NO: 76175 - DNA, 17 bp, Arabidopsis thaliana
cgaacaactttggtcgc

SEQ ID NO: 76176 - DNA, 17 bp, Arabidopsis thaliana
cgaacaacttttgatcc

SEQ ID NO: 76177 - DNA, 17 bp, Arabidopsis thaliana
cgaacaacttttgatcg

SEQ ID NO: 76178 - DNA, 17 bp, Arabidopsis thaliana
cgaacaacttttggtcg

SEQ ID NO: 76179 - DNA, 17 bp, Arabidopsis thaliana
cgaacaagagtcgaatg

SEQ ID NO: 76180 - DNA, 17 bp, Arabidopsis thaliana
cgaacaagattctcatg

SEQ ID NO: 76181 - DNA, 17 bp, Arabidopsis thaliana
cgaacaaggaccaatga

SEQ ID NO: 76182 - DNA, 17 bp, Arabidopsis thaliana
cgaacaaggttctcatg

SEQ ID NO: 76183 - DNA, 17 bp, Arabidopsis thaliana
cgaacaataatgggatc

SEQ ID NO: 76184 - DNA, 17 bp, Arabidopsis thaliana
cgaacaattggcaagta

SEQ ID NO: 76185 - DNA, 17 bp, Arabidopsis thaliana
cgaacacacccggttgg

SEQ ID NO: 76186 - DNA, 17 bp, Arabidopsis thaliana
cgaacacaggccgttct

SEQ ID NO: 76187 - DNA, 17 bp, Arabidopsis thaliana
cgaacaccttttggtcg

SEQ ID NO: 76188 - DNA, 17 bp, Arabidopsis thaliana
cgaacactcctcgtcct

SEQ ID NO: 76189 - DNA, 17 bp, Arabidopsis thaliana
cgaacactttttcgact

SEQ ID NO: 76190 - DNA, 17 bp, Arabidopsis thaliana
cgaacagacagtgtggt

SEQ ID NO: 76191 - DNA, 17 bp, Arabidopsis thaliana
cgaacagagttggtagg

SEQ ID NO: 76192 - DNA, 17 bp, Arabidopsis thaliana
cgaacagatgctgtacg

SEQ ID NO: 76193 - DNA, 17 bp, Arabidopsis thaliana
cgaacaggaccatcgtc

SEQ ID NO: 76194 - DNA, 17 bp, Arabidopsis thaliana
cgaacaggccaagagag

SEQ ID NO: 76195 - DNA, 17 bp, Arabidopsis thaliana
cgaacagggcctatgtg

SEQ ID NO: 76196 - DNA, 17 bp, Arabidopsis thaliana
cgaacagtcagctcaga

SEQ ID NO: 76197 - DNA, 17 bp, Arabidopsis thaliana
cgaacagttgaggatga

SEQ ID NO: 76198 - DNA, 17 bp, Arabidopsis thaliana
cgaacatctgatcgttt

SEQ ID NO: 76199 - DNA, 17 bp, Arabidopsis thaliana
cgaacatgtcgctcagg

SEQ ID NO: 76200 - DNA, 17 bp, Arabidopsis thaliana
cgaacattgtttaggaa

SEQ ID NO: 76201 - DNA, 17 bp, Arabidopsis thaliana
cgaaccaaagacctctt

SEQ ID NO: 76202 - DNA, 17 bp, Arabidopsis thaliana
cgaaccaatagggaacg

SEQ ID NO: 76203 - DNA, 17 bp, Arabidopsis thaliana
cgaaccacccacgtcgc

SEQ ID NO: 76204 - DNA, 17 bp, Arabidopsis thaliana
cgaaccaccggaagcag

SEQ ID NO: 76205 - DNA, 17 bp, Arabidopsis thaliana
cgaaccacgagtaccaa

SEQ ID NO: 76206 - DNA, 17 bp, Arabidopsis thaliana
cgaaccagttcggggga

SEQ ID NO: 76207 - DNA, 17 bp, Arabidopsis thaliana
cgaaccatctagtagct

SEQ ID NO: 76208 - DNA, 17 bp, Arabidopsis thaliana
cgaaccattggagatga

SEQ ID NO: 76209 - DNA, 17 bp, Arabidopsis thaliana
cgaacccacactcctcc

SEQ ID NO: 76210 - DNA, 17 bp, Arabidopsis thaliana
cgaacccagagctagct

SEQ ID NO: 76211 - DNA, 17 bp, Arabidopsis thaliana
cgaacccaggcgaagcc

SEQ ID NO: 76212 - DNA, 17 bp, Arabidopsis thaliana
cgaacccatctggacat

SEQ ID NO: 76213 - DNA, 17 bp, Arabidopsis thaliana
cgaaccccacagcctgc

SEQ ID NO: 76214 - DNA, 17 bp, Arabidopsis thaliana
cgaaccccagacctctt

SEQ ID NO: 76215 - DNA, 17 bp, Arabidopsis thaliana
cgaaccccagacctttt

SEQ ID NO: 76216 - DNA, 17 bp, Arabidopsis thaliana
cgaacccggaattctga

SEQ ID NO: 76217 - DNA, 17 bp, Arabidopsis thaliana
cgaacccggacgaagcc

SEQ ID NO: 76218 - DNA, 17 bp, Arabidopsis thaliana
cgaacccgggcgaagcc

SEQ ID NO: 76219 - DNA, 17 bp, Arabidopsis thaliana
cgaacccgggctcagac

SEQ ID NO: 76220 - DNA, 17 bp, Arabidopsis thaliana
cgaacccgggtctgtac

SEQ ID NO: 76221 - DNA, 17 bp, Arabidopsis thaliana
cgaacccgggtggcggg

SEQ ID NO: 76222 - DNA, 17 bp, Arabidopsis thaliana
cgaacccggttgagccc

SEQ ID NO: 76223 - DNA, 17 bp, Arabidopsis thaliana
cgaacccggttgggccc

SEQ ID NO: 76224 - DNA, 17 bp, Arabidopsis thaliana
cgaacccgtcggctgtc

SEQ ID NO: 76225 - DNA, 17 bp, Arabidopsis thaliana
cgaaccctgctgccgac

SEQ ID NO: 76226 - DNA, 17 bp, Arabidopsis thaliana
cgaaccctgctgtcgac

SEQ ID NO: 76227 - DNA, 17 bp, Arabidopsis thaliana
cgaaccctgctgttgac

SEQ ID NO: 76228 - DNA, 17 bp, Arabidopsis thaliana
cgaaccctgtatttcgc

SEQ ID NO: 76229 - DNA, 17 bp, Arabidopsis thaliana
cgaaccgaccgttcacc

SEQ ID NO: 76230 - DNA, 17 bp, Arabidopsis thaliana
cgaaccgcatttttcct

SEQ ID NO: 76231 - DNA, 17 bp, Arabidopsis thaliana
cgaaccgcttcatatca

SEQ ID NO: 76232 - DNA, 17 bp, Arabidopsis thaliana
cgaaccggataacgctg

SEQ ID NO: 76233 - DNA, 17 bp, Arabidopsis thaliana
cgaaccggcaacctcta

SEQ ID NO: 76234 - DNA, 17 bp, Arabidopsis thaliana
cgaaccggcagaaacca

SEQ ID NO: 76235 - DNA, 17 bp, Arabidopsis thaliana
cgaaccggcataaacca

SEQ ID NO: 76236 - DNA, 17 bp, Arabidopsis thaliana
cgaaccggtgacctatt

SEQ ID NO: 76237 - DNA, 17 bp, Arabidopsis thaliana
cgaaccgtgaaagcgtg

SEQ ID NO: 76238 - DNA, 17 bp, Arabidopsis thaliana
cgaaccgtggttcatcg

SEQ ID NO: 76239 - DNA, 17 bp, Arabidopsis thaliana
cgaacctaagacctctt

SEQ ID NO: 76240 - DNA, 17 bp, Arabidopsis thaliana
cgaacctatggaccaac

SEQ ID NO: 76241 - DNA, 17 bp, Arabidopsis thaliana
cgaacctatggaccatc

SEQ ID NO: 76242 - DNA, 17 bp, Arabidopsis thaliana
cgaacctcgtttccatg

SEQ ID NO: 76243 - DNA, 17 bp, Arabidopsis thaliana
cgaacctgcatgggcca

SEQ ID NO: 76244 - DNA, 17 bp, Arabidopsis thaliana
cgaacctggctacgaag

SEQ ID NO: 76245 - DNA, 17 bp, Arabidopsis thaliana
cgaacctgggtgatcga

SEQ ID NO: 76246 - DNA, 17 bp, Arabidopsis thaliana
cgaacctgggtgatcta

SEQ ID NO: 76247 - DNA, 17 bp, Arabidopsis thaliana
cgaacgaagcacatcga

SEQ ID NO: 76248 - DNA, 17 bp, Arabidopsis thaliana
cgaacgacgacctggtc

SEQ ID NO: 76249 - DNA, 17 bp, Arabidopsis thaliana
cgaacgagaccccaacc

SEQ ID NO: 76250 - DNA, 17 bp, Arabidopsis thaliana
cgaacgagacctcagcc

SEQ ID NO: 76251 - DNA, 17 bp, Arabidopsis thaliana
cgaacgagaccttagcc

SEQ ID NO: 76252 - DNA, 17 bp, Arabidopsis thaliana
cgaacgagactttagcc

SEQ ID NO: 76253 - DNA, 17 bp, Arabidopsis thaliana
cgaacgattaagaaaat

SEQ ID NO: 76254 - DNA, 17 bp, Arabidopsis thaliana
cgaacgatttgcattcc

SEQ ID NO: 76255 - DNA, 17 bp, Arabidopsis thaliana
cgaacgatttgcatttc

SEQ ID NO: 76256 - DNA, 17 bp, Arabidopsis thaliana
cgaacgcagattacggt

SEQ ID NO: 76257 - DNA, 17 bp, Arabidopsis thaliana
cgaacgccaagttattg

SEQ ID NO: 76258 - DNA, 17 bp, Arabidopsis thaliana
cgaacgccctgcagccc

SEQ ID NO: 76259 - DNA, 17 bp, Arabidopsis thaliana
cgaacgcctttaagatc

SEQ ID NO: 76260 - DNA, 17 bp, Arabidopsis thaliana
cgaacgcgaagggtgac

SEQ ID NO: 76261 - DNA, 17 bp, Arabidopsis thaliana
cgaacgcggatgacggt

SEQ ID NO: 76262 - DNA, 17 bp, Arabidopsis thaliana
cgaacgcggattacggg

SEQ ID NO: 76263 - DNA, 17 bp, Arabidopsis thaliana
cgaacgcggattacggt

SEQ ID NO: 76264 - DNA, 17 bp, Arabidopsis thaliana
cgaacgctatgttggac

SEQ ID NO: 76265 - DNA, 17 bp, Arabidopsis thaliana
cgaacggacgacggacg

SEQ ID NO: 76266 - DNA, 17 bp, Arabidopsis thaliana
cgaacggacttagccaa

SEQ ID NO: 76267 - DNA, 17 bp, Arabidopsis thaliana
cgaacggatctgtagaa

SEQ ID NO: 76268 - DNA, 17 bp, Arabidopsis thaliana
cgaacggctataattgt

SEQ ID NO: 76269 - DNA, 17 bp, Arabidopsis thaliana
cgaacggctatttgact

SEQ ID NO: 76270 - DNA, 17 bp, Arabidopsis thaliana
cgaacggttagttacag

SEQ ID NO: 76271 - DNA, 17 bp, Arabidopsis thaliana
cgaacgtagcgaaatgc

SEQ ID NO: 76272 - DNA, 17 bp, Arabidopsis thaliana
cgaacgtcatggatatc

SEQ ID NO: 76273 - DNA, 17 bp, Arabidopsis thaliana
cgaacgtgtatgttcta

SEQ ID NO: 76274 - DNA, 17 bp, Arabidopsis thaliana
cgaacgttggcagatcc

SEQ ID NO: 76275 - DNA, 17 bp, Arabidopsis thaliana
cgaacgttgttacggca

SEQ ID NO: 76276 - DNA, 17 bp, Arabidopsis thaliana
cgaactaactgcggatt

SEQ ID NO: 76277 - DNA, 17 bp, Arabidopsis thaliana
cgaactaatcacgaaca

SEQ ID NO: 76278 - DNA, 17 bp, Arabidopsis thaliana
cgaactaatccgtcaac

SEQ ID NO: 76279 - DNA, 17 bp, Arabidopsis thaliana
cgaactaatgcagggag

SEQ ID NO: 76280 - DNA, 17 bp, Arabidopsis thaliana
cgaactagcaccgggtc

SEQ ID NO: 76281 - DNA, 17 bp, Arabidopsis thaliana
cgaactagctaaaatgg

SEQ ID NO: 76282 - DNA, 17 bp, Arabidopsis thaliana
cgaactagggcttgatt

SEQ ID NO: 76283 - DNA, 17 bp, Arabidopsis thaliana
cgaactatctaggttaa

SEQ ID NO: 76284 - DNA, 17 bp, Arabidopsis thaliana
cgaactatttgcacgtc

SEQ ID NO: 76285 - DNA, 17 bp, Arabidopsis thaliana
cgaactcaatacttcca

SEQ ID NO: 76286 - DNA, 17 bp, Arabidopsis thaliana
cgaactcacgccaccac

SEQ ID NO: 76287 - DNA, 17 bp, Arabidopsis thaliana
cgaactcagtaacgcgg

SEQ ID NO: 76288 - DNA, 17 bp, Arabidopsis thaliana
cgaactccaggatgagt

SEQ ID NO: 76289 - DNA, 17 bp, Arabidopsis thaliana
cgaactccatctctgcg

SEQ ID NO: 76290 - DNA, 17 bp, Arabidopsis thaliana
cgaactcccagaacatc

SEQ ID NO: 76291 - DNA, 17 bp, Arabidopsis thaliana
cgaactccgtgacggtc

SEQ ID NO: 76292 - DNA, 17 bp, Arabidopsis thaliana
cgaactcgggatcgcag

SEQ ID NO: 76293 - DNA, 17 bp, Arabidopsis thaliana
cgaactcgggctcgaga

SEQ ID NO: 76294 - DNA, 17 bp, Arabidopsis thaliana
cgaactctctagcaggt

SEQ ID NO: 76295 - DNA, 17 bp, Arabidopsis thaliana
cgaactctgcttgaaga

SEQ ID NO: 76296 - DNA, 17 bp, Arabidopsis thaliana
cgaactgaaacatctaa

SEQ ID NO: 76297 - DNA, 17 bp, Arabidopsis thaliana
cgaactgaatggtagag

SEQ ID NO: 76298 - DNA, 17 bp, Arabidopsis thaliana
cgaactgaccaggatcc

SEQ ID NO: 76299 - DNA, 17 bp, Arabidopsis thaliana
cgaactgacttgcttta

SEQ ID NO: 76300 - DNA, 17 bp, Arabidopsis thaliana
cgaactgcaagtgtaaa

SEQ ID NO: 76301 - DNA, 17 bp, Arabidopsis thaliana
cgaactgggtcccgtcg

SEQ ID NO: 76302 - DNA, 17 bp, Arabidopsis thaliana
cgaactggtttcagcga

SEQ ID NO: 76303 - DNA, 17 bp, Arabidopsis thaliana
cgaactgtacaatgcgg

SEQ ID NO: 76304 - DNA, 17 bp, Arabidopsis thaliana
cgaacttgagacttggt

SEQ ID NO: 76305 - DNA, 17 bp, Arabidopsis thaliana
cgaacttgcaactatcg

SEQ ID NO: 76306 - DNA, 17 bp, Arabidopsis thaliana
cgaacttggagtgttta

SEQ ID NO: 76307 - DNA, 17 bp, Arabidopsis thaliana
cgaacttgtcctgcaaa

SEQ ID NO: 76308 - DNA, 17 bp, Arabidopsis thaliana
cgaactttacgcgccaa

SEQ ID NO: 76309 - DNA, 17 bp, Arabidopsis thaliana
cgaactttatgtcccaa

SEQ ID NO: 76310 - DNA, 17 bp, Arabidopsis thaliana
cgaactttatgtgccaa

SEQ ID NO: 76311 - DNA, 17 bp, Arabidopsis thaliana
cgaactttcaaatttgg

SEQ ID NO: 76312 - DNA, 17 bp, Arabidopsis thaliana
cgaactttgcgccgttc

SEQ ID NO: 76313 - DNA, 17 bp, Arabidopsis thaliana
cgaacttttcgtgccaa

SEQ ID NO: 76314 - DNA, 17 bp, Arabidopsis thaliana
cgaactttttcggccat

SEQ ID NO: 76315 - DNA, 17 bp, Arabidopsis thaliana
cgaactttttcggccct

SEQ ID NO: 76316 - DNA, 17 bp, Arabidopsis thaliana
cgaagaacatcaacaag

SEQ ID NO: 76317 - DNA, 17 bp, Arabidopsis thaliana
cgaagaacatcatcaag

SEQ ID NO: 76318 - DNA, 17 bp, Arabidopsis thaliana
cgaagaagcagggcacg

SEQ ID NO: 76319 - DNA, 17 bp, Arabidopsis thaliana
cgaagaagcctgaaacc

SEQ ID NO: 76320 - DNA, 17 bp, Arabidopsis thaliana
cgaagaatacggttaga

SEQ ID NO: 76321 - DNA, 17 bp, Arabidopsis thaliana
cgaagacaagaccgtcg

SEQ ID NO: 76322 - DNA, 17 bp, Arabidopsis thaliana
cgaagacgacgacgacc

SEQ ID NO: 76323 - DNA, 17 bp, Arabidopsis thaliana
cgaagacgatcagatac

SEQ ID NO: 76324 - DNA, 17 bp, Arabidopsis thaliana
cgaagacggatcgcatg

SEQ ID NO: 76325 - DNA, 17 bp, Arabidopsis thaliana
cgaagacttcacggtag

SEQ ID NO: 76326 - DNA, 17 bp, Arabidopsis thaliana
cgaagactttctaatgt

SEQ ID NO: 76327 - DNA, 17 bp, Arabidopsis thaliana
cgaagagaaccactaag

SEQ ID NO: 76328 - DNA, 17 bp, Arabidopsis thaliana
cgaagagtgccacttgt

SEQ ID NO: 76329 - DNA, 17 bp, Arabidopsis thaliana
cgaagatagaccgacac

SEQ ID NO: 76330 - DNA, 17 bp, Arabidopsis thaliana
cgaagatgaaagaagcc

SEQ ID NO: 76331 - DNA, 17 bp, Arabidopsis thaliana
cgaagatgaaagaagct

SEQ ID NO: 76332 - DNA, 17 bp, Arabidopsis thaliana
cgaagatgactttgtga

SEQ ID NO: 76333 - DNA, 17 bp, Arabidopsis thaliana
cgaagatgattgtgccg

SEQ ID NO: 76334 - DNA, 17 bp, Arabidopsis thaliana
cgaagatgggttctcac

SEQ ID NO: 76335 - DNA, 17 bp, Arabidopsis thaliana
cgaagatgttgcagccg

SEQ ID NO: 76336 - DNA, 17 bp, Arabidopsis thaliana
cgaagattacccatgga

SEQ ID NO: 76337 - DNA, 17 bp, Arabidopsis thaliana
cgaagattatctattcc

SEQ ID NO: 76338 - DNA, 17 bp, Arabidopsis thaliana
cgaagattcacccccga

SEQ ID NO: 76339 - DNA, 17 bp, Arabidopsis thaliana
cgaagattcgggatggc

SEQ ID NO: 76340 - DNA, 17 bp, Arabidopsis thaliana
cgaagattctccatggt

SEQ ID NO: 76341 - DNA, 17 bp, Arabidopsis thaliana
cgaagattgctctggac

SEQ ID NO: 76342 - DNA, 17 bp, Arabidopsis thaliana
cgaagattgctctggtg

SEQ ID NO: 76343 - DNA, 17 bp, Arabidopsis thaliana
cgaagatttcctttctc

SEQ ID NO: 76344 - DNA, 17 bp, Arabidopsis thaliana
cgaagatttctgatttt

SEQ ID NO: 76345 - DNA, 17 bp, Arabidopsis thaliana
cgaagatttttgatttt

SEQ ID NO: 76346 - DNA, 17 bp, Arabidopsis thaliana
cgaagcagtcaaatgga

SEQ ID NO: 76347 - DNA, 17 bp, Arabidopsis thaliana
cgaagcagtttttcctc

SEQ ID NO: 76348 - DNA, 17 bp, Arabidopsis thaliana
cgaagcatgcggttatc

SEQ ID NO: 76349 - DNA, 17 bp, Arabidopsis thaliana
cgaagccaagcgagttc

SEQ ID NO: 76350 - DNA, 17 bp, Arabidopsis thaliana
cgaagcccagcctggtc

SEQ ID NO: 76351 - DNA, 17 bp, Arabidopsis thaliana
cgaagcccatttgaagc

SEQ ID NO: 76352 - DNA, 17 bp, Arabidopsis thaliana
cgaagcccgtaatcccc

SEQ ID NO: 76353 - DNA, 17 bp, Arabidopsis thaliana
cgaagcccgtaatccct

SEQ ID NO: 76354 - DNA, 17 bp, Arabidopsis thaliana
cgaagcccgtaatctct

SEQ ID NO: 76355 - DNA, 17 bp, Arabidopsis thaliana
cgaagcccgtaattcac

SEQ ID NO: 76356 - DNA, 17 bp, Arabidopsis thaliana
cgaagcccgttatccct

SEQ ID NO: 76357 - DNA, 17 bp, Arabidopsis thaliana
cgaagccgaaattcgta

SEQ ID NO: 76358 - DNA, 17 bp, Arabidopsis thaliana
cgaagccttgacagacc

SEQ ID NO: 76359 - DNA, 17 bp, Arabidopsis thaliana
cgaagcggatgggggcc

SEQ ID NO: 76360 - DNA, 17 bp, Arabidopsis thaliana
cgaagcggtactcgacc

SEQ ID NO: 76361 - DNA, 17 bp, Arabidopsis thaliana
cgaagcggtcgtttagg

SEQ ID NO: 76362 - DNA, 17 bp, Arabidopsis thaliana
cgaagcgtcgttcggac

SEQ ID NO: 76363 - DNA, 17 bp, Arabidopsis thaliana
cgaagctaccgtgcgct

SEQ ID NO: 76364 - DNA, 17 bp, Arabidopsis thaliana
cgaagctaccgtgtgct

SEQ ID NO: 76365 - DNA, 17 bp, Arabidopsis thaliana
cgaagctactgcgatgg

SEQ ID NO: 76366 - DNA, 17 bp, Arabidopsis thaliana
cgaagctcgtaaccccc

SEQ ID NO: 76367 - DNA, 17 bp, Arabidopsis thaliana
cgaagctgccagcatga

SEQ ID NO: 76368 - DNA, 17 bp, Arabidopsis thaliana
cgaagctgtgggatggc

SEQ ID NO: 76369 - DNA, 17 bp, Arabidopsis thaliana
cgaagctgtgggatgtc

SEQ ID NO: 76370 - DNA, 17 bp, Arabidopsis thaliana
cgaagctttcattgggg

SEQ ID NO: 76371 - DNA, 17 bp, Arabidopsis thaliana
cgaaggaccaccacact

SEQ ID NO: 76372 - DNA, 17 bp, Arabidopsis thaliana
cgaaggacccttgctcc

SEQ ID NO: 76373 - DNA, 17 bp, Arabidopsis thaliana
cgaaggagtccatcctg

SEQ ID NO: 76374 - DNA, 17 bp, Arabidopsis thaliana
cgaaggatgtttgattt

SEQ ID NO: 76375 - DNA, 17 bp, Arabidopsis thaliana
cgaaggatttgatccct

SEQ ID NO: 76376 - DNA, 17 bp, Arabidopsis thaliana
cgaaggcacgtctgcct

SEQ ID NO: 76377 - DNA, 17 bp, Arabidopsis thaliana
cgaaggcagggctagtg

SEQ ID NO: 76378 - DNA, 17 bp, Arabidopsis thaliana
cgaaggctttgcatttg

SEQ ID NO: 76379 - DNA, 17 bp, Arabidopsis thaliana
cgaagggacgctcgttt

SEQ ID NO: 76380 - DNA, 17 bp, Arabidopsis thaliana
cgaagggcacgtctgcc

SEQ ID NO: 76381 - DNA, 17 bp, Arabidopsis thaliana
cgaagggctgcgaggct

SEQ ID NO: 76382 - DNA, 17 bp, Arabidopsis thaliana
cgaagggggccagtcca

SEQ ID NO: 76383 - DNA, 17 bp, Arabidopsis thaliana
cgaagggtcaggacgac

SEQ ID NO: 76384 - DNA, 17 bp, Arabidopsis thaliana
cgaagggtttcagcggc

SEQ ID NO: 76385 - DNA, 17 bp, Arabidopsis thaliana
cgaagggtttcagcggg

SEQ ID NO: 76386 - DNA, 17 bp, Arabidopsis thaliana
cgaaggtattcgtgctt

SEQ ID NO: 76387 - DNA, 17 bp, Arabidopsis thaliana
cgaaggtcatgagttaa

SEQ ID NO: 76388 - DNA, 17 bp, Arabidopsis thaliana
cgaaggtcgagtaagtc

SEQ ID NO: 76389 - DNA, 17 bp, Arabidopsis thaliana
cgaaggtcggttgatcc

SEQ ID NO: 76390 - DNA, 17 bp, Arabidopsis thaliana
cgaaggttactattggc

SEQ ID NO: 76391 - DNA, 17 bp, Arabidopsis thaliana
cgaaggttttgtgatgt

SEQ ID NO: 76392 - DNA, 17 bp, Arabidopsis thaliana
cgaagtacggagtgcca

SEQ ID NO: 76393 - DNA, 17 bp, Arabidopsis thaliana
cgaagtatttcagagtg

SEQ ID NO: 76394 - DNA, 17 bp, Arabidopsis thaliana
cgaagtccaggatttat

SEQ ID NO: 76395 - DNA, 17 bp, Arabidopsis thaliana
cgaagtccatcgttatg

SEQ ID NO: 76396 - DNA, 17 bp, Arabidopsis thaliana
cgaagtccatgatttat

SEQ ID NO: 76397 - DNA, 17 bp, Arabidopsis thaliana
cgaagtccgaggtgttt

SEQ ID NO: 76398 - DNA, 17 bp, Arabidopsis thaliana
cgaagtcctctcgcctg

SEQ ID NO: 76399 - DNA, 17 bp, Arabidopsis thaliana
cgaagtcgaactccagg

SEQ ID NO: 76400 - DNA, 17 bp, Arabidopsis thaliana
cgaagtcggtggatgag

SEQ ID NO: 76401 - DNA, 17 bp, Arabidopsis thaliana
cgaagtcgtgtgtggta

SEQ ID NO: 76402 - DNA, 17 bp, Arabidopsis thaliana
cgaagtgacttgaaacg

SEQ ID NO: 76403 - DNA, 17 bp, Arabidopsis thaliana
cgaagtgccgcaggctg

SEQ ID NO: 76404 - DNA, 17 bp, Arabidopsis thaliana
cgaagtgcgaccttttt

SEQ ID NO: 76405 - DNA, 17 bp, Arabidopsis thaliana
cgaagttaaagaatggg

SEQ ID NO: 76406 - DNA, 17 bp, Arabidopsis thaliana
cgaagttaagtcctttg

SEQ ID NO: 76407 - DNA, 17 bp, Arabidopsis thaliana
cgaagttactgcgatgg

SEQ ID NO: 76408 - DNA, 17 bp, Arabidopsis thaliana
cgaagttatgccttggt

SEQ ID NO: 76409 - DNA, 17 bp, Arabidopsis thaliana
cgaagttattacatgtg

SEQ ID NO: 76410 - DNA, 17 bp, Arabidopsis thaliana
cgaagttcagagggagg

SEQ ID NO: 76411 - DNA, 17 bp, Arabidopsis thaliana
cgaagttccaagtcctc

SEQ ID NO: 76412 - DNA, 17 bp, Arabidopsis thaliana
cgaagttcctatcgcgc

SEQ ID NO: 76413 - DNA, 17 bp, Arabidopsis thaliana
cgaagttcggtcctgcg

SEQ ID NO: 76414 - DNA, 17 bp, Arabidopsis thaliana
cgaagttgaccttggct

SEQ ID NO: 76415 - DNA, 17 bp, Arabidopsis thaliana
cgaagttgatcgattca

SEQ ID NO: 76416 - DNA, 17 bp, Arabidopsis thaliana
cgaagttgatgtataaa

SEQ ID NO: 76417 - DNA, 17 bp, Arabidopsis thaliana
cgaagttggtcttctct

SEQ ID NO: 76418 - DNA, 17 bp, Arabidopsis thaliana
cgaagtttactttggag

SEQ ID NO: 76419 - DNA, 17 bp, Arabidopsis thaliana
cgaagtttccctcagga

SEQ ID NO: 76420 - DNA, 17 bp, Arabidopsis thaliana
cgaagtttgtcagttgg

SEQ ID NO: 76421 - DNA, 17 bp, Arabidopsis thaliana
cgaagttttgagatcgc

SEQ ID NO: 76422 - DNA, 17 bp, Arabidopsis thaliana
cgaagttttgtggacgg

SEQ ID NO: 76423 - DNA, 17 bp, Arabidopsis thaliana
cgaataaagattgatcc

SEQ ID NO: 76424 - DNA, 17 bp, Arabidopsis thaliana
cgaataagcgtcacagt

SEQ ID NO: 76425 - DNA, 17 bp, Arabidopsis thaliana
cgaatacaaggccaact

SEQ ID NO: 76426 - DNA, 17 bp, Arabidopsis thaliana
cgaatacaggccgttct

SEQ ID NO: 76427 - DNA, 17 bp, Arabidopsis thaliana
cgaataccaaaacgctt

SEQ ID NO: 76428 - DNA, 17 bp, Arabidopsis thaliana
cgaatacgaaccgtgaa

SEQ ID NO: 76429 - DNA, 17 bp, Arabidopsis thaliana
cgaatacgttgacctca

SEQ ID NO: 76430 - DNA, 17 bp, Arabidopsis thaliana
cgaatactcttcagacc

SEQ ID NO: 76431 - DNA, 17 bp, Arabidopsis thaliana
cgaatactcttcagatc

SEQ ID NO: 76432 - DNA, 17 bp, Arabidopsis thaliana
cgaatagtgcaagcgaa

SEQ ID NO: 76433 - DNA, 17 bp, Arabidopsis thaliana
cgaatagtgccaaaact

SEQ ID NO: 76434 - DNA, 17 bp, Arabidopsis thaliana
cgaatatcctcggcagg

SEQ ID NO: 76435 - DNA, 17 bp, Arabidopsis thaliana
cgaatatgacttgatct

SEQ ID NO: 76436 - DNA, 17 bp, Arabidopsis thaliana
cgaatcaacgagcttag

SEQ ID NO: 76437 - DNA, 17 bp, Arabidopsis thaliana
cgaatcaactagccccg

SEQ ID NO: 76438 - DNA, 17 bp, Arabidopsis thaliana
cgaatcaagactttccg

SEQ ID NO: 76439 - DNA, 17 bp, Arabidopsis thaliana
cgaatcaatcctgaggg

SEQ ID NO: 76440 - DNA, 17 bp, Arabidopsis thaliana
cgaatcactttgcggat

SEQ ID NO: 76441 - DNA, 17 bp, Arabidopsis thaliana
cgaatcagccgatagga

SEQ ID NO: 76442 - DNA, 17 bp, Arabidopsis thaliana
cgaatcagtatttgcga

SEQ ID NO: 76443 - DNA, 17 bp, Arabidopsis thaliana
cgaatccaagtttgtgt

SEQ ID NO: 76444 - DNA, 17 bp, Arabidopsis thaliana
cgaatccagcacctcta

SEQ ID NO: 76445 - DNA, 17 bp, Arabidopsis thaliana
cgaatcccagcagccac

SEQ ID NO: 76446 - DNA, 17 bp, Arabidopsis thaliana
cgaatcccagggtgttg

SEQ ID NO: 76447 - DNA, 17 bp, Arabidopsis thaliana
cgaatccctcctcgccc

SEQ ID NO: 76448 - DNA, 17 bp, Arabidopsis thaliana
cgaatccctctctctcc

SEQ ID NO: 76449 - DNA, 17 bp, Arabidopsis thaliana
cgaatccctctctttcc

SEQ ID NO: 76450 - DNA, 17 bp, Arabidopsis thaliana
cgaatccgatccgatgt

SEQ ID NO: 76451 - DNA, 17 bp, Arabidopsis thaliana
cgaatccgggtgtcggg

SEQ ID NO: 76452 - DNA, 17 bp, Arabidopsis thaliana
cgaatccggtagggccc

SEQ ID NO: 76453 - DNA, 17 bp, Arabidopsis thaliana
cgaatccggttgggctc

SEQ ID NO: 76454 - DNA, 17 bp, Arabidopsis thaliana
cgaatcctactgttgac

SEQ ID NO: 76455 - DNA, 17 bp, Arabidopsis thaliana
cgaatcctacttgggaa

SEQ ID NO: 76456 - DNA, 17 bp, Arabidopsis thaliana
cgaatcctacttgggga

SEQ ID NO: 76457 - DNA, 17 bp, Arabidopsis thaliana
cgaatcctcggacccgg

SEQ ID NO: 76458 - DNA, 17 bp, Arabidopsis thaliana
cgaatcctgactttcta

SEQ ID NO: 76459 - DNA, 17 bp, Arabidopsis thaliana
cgaatcctgccgttcac

SEQ ID NO: 76460 - DNA, 17 bp, Arabidopsis thaliana
cgaatcctgctagtcac

SEQ ID NO: 76461 - DNA, 17 bp, Arabidopsis thaliana
cgaatcctgctgtcgac

SEQ ID NO: 76462 - DNA, 17 bp, Arabidopsis thaliana
cgaatcctgctgttgac

SEQ ID NO: 76463 - DNA, 17 bp, Arabidopsis thaliana
cgaatccttccgtccca

SEQ ID NO: 76464 - DNA, 17 bp, Arabidopsis thaliana
cgaatcgacgcctgaag

SEQ ID NO: 76465 - DNA, 17 bp, Arabidopsis thaliana
cgaatcgagtcggagga

SEQ ID NO: 76466 - DNA, 17 bp, Arabidopsis thaliana
cgaatcgatcggcggac

SEQ ID NO: 76467 - DNA, 17 bp, Arabidopsis thaliana
cgaatcgatggcttatg

SEQ ID NO: 76468 - DNA, 17 bp, Arabidopsis thaliana
cgaatcgccattgtggg

SEQ ID NO: 76469 - DNA, 17 bp, Arabidopsis thaliana
cgaatcgcttgttcttg

SEQ ID NO: 76470 - DNA, 17 bp, Arabidopsis thaliana
cgaatcggaatcgggat

SEQ ID NO: 76471 - DNA, 17 bp, Arabidopsis thaliana
cgaatcgtccgaatgca

SEQ ID NO: 76472 - DNA, 17 bp, Arabidopsis thaliana
cgaatctaatacccgtg

SEQ ID NO: 76473 - DNA, 17 bp, Arabidopsis thaliana
cgaatctatcaggttgg

SEQ ID NO: 76474 - DNA, 17 bp, Arabidopsis thaliana
cgaatctattgcaatgg

SEQ ID NO: 76475 - DNA, 17 bp, Arabidopsis thaliana
cgaatctcaagagcggt

SEQ ID NO: 76476 - DNA, 17 bp, Arabidopsis thaliana
cgaatctctcaggcgac

SEQ ID NO: 76477 - DNA, 17 bp, Arabidopsis thaliana
cgaatctctcagggcac

SEQ ID NO: 76478 - DNA, 17 bp, Arabidopsis thaliana
cgaatctctcaggtgtc

SEQ ID NO: 76479 - DNA, 17 bp, Arabidopsis thaliana
cgaatctcttttcgacg

SEQ ID NO: 76480 - DNA, 17 bp, Arabidopsis thaliana
cgaatctggacttggtc

SEQ ID NO: 76481 - DNA, 17 bp, Arabidopsis thaliana
cgaatcttagcgacaaa

SEQ ID NO: 76482 - DNA, 17 bp, Arabidopsis thaliana
cgaatcttagtgggtgt

SEQ ID NO: 76483 - DNA, 17 bp, Arabidopsis thaliana
cgaatcttgtaatccct

SEQ ID NO: 76484 - DNA, 17 bp, Arabidopsis thaliana
cgaatctttgggtcttc

SEQ ID NO: 76485 - DNA, 17 bp, Arabidopsis thaliana
cgaatgaagtggggagg

SEQ ID NO: 76486 - DNA, 17 bp, Arabidopsis thaliana
cgaatgaatgctattcg

SEQ ID NO: 76487 - DNA, 17 bp, Arabidopsis thaliana
cgaatgaccgatctttt

SEQ ID NO: 76488 - DNA, 17 bp, Arabidopsis thaliana
cgaatgaccgatgtttt

SEQ ID NO: 76489 - DNA, 17 bp, Arabidopsis thaliana
cgaatgaccggcatttt

SEQ ID NO: 76490 - DNA, 17 bp, Arabidopsis thaliana
cgaatgactggattgtc

SEQ ID NO: 76491 - DNA, 17 bp, Arabidopsis thaliana
cgaatgagaaaagcaaa

SEQ ID NO: 76492 - DNA, 17 bp, Arabidopsis thaliana
cgaatgatggattgtcg

SEQ ID NO: 76493 - DNA, 17 bp, Arabidopsis thaliana
cgaatgccactgagatc

SEQ ID NO: 76494 - DNA, 17 bp, Arabidopsis thaliana
cgaatgccgtactgggc

SEQ ID NO: 76495 - DNA, 17 bp, Arabidopsis thaliana
cgaatgcgatcgagtgg

SEQ ID NO: 76496 - DNA, 17 bp, Arabidopsis thaliana
cgaatgcgcagatgtaa

SEQ ID NO: 76497 - DNA, 17 bp, Arabidopsis thaliana
cgaatgcgcagatgtga

SEQ ID NO: 76498 - DNA, 17 bp, Arabidopsis thaliana
cgaatgctacatggttg

SEQ ID NO: 76499 - DNA, 17 bp, Arabidopsis thaliana
cgaatggaccggttcat

SEQ ID NO: 76500 - DNA, 17 bp, Arabidopsis thaliana
cgaatggagacgtgcgg

SEQ ID NO: 76501 - DNA, 17 bp, Arabidopsis thaliana
cgaatggatctcttagt

SEQ ID NO: 76502 - DNA, 17 bp, Arabidopsis thaliana
cgaatggcattgcagta

SEQ ID NO: 76503 - DNA, 17 bp, Arabidopsis thaliana
cgaatggccggcgttct

SEQ ID NO: 76504 - DNA, 17 bp, Arabidopsis thaliana
cgaatggccggcgtttt

SEQ ID NO: 76505 - DNA, 17 bp, Arabidopsis thaliana
cgaatggccggctttct

SEQ ID NO: 76506 - DNA, 17 bp, Arabidopsis thaliana
cgaatggctcttgacca

SEQ ID NO: 76507 - DNA, 17 bp, Arabidopsis thaliana
cgaatgggaacaagatc

SEQ ID NO: 76508 - DNA, 17 bp, Arabidopsis thaliana
cgaatgggataggccga

SEQ ID NO: 76509 - DNA, 17 bp, Arabidopsis thaliana
cgaatgggccttctctt

SEQ ID NO: 76510 - DNA, 17 bp, Arabidopsis thaliana
cgaatgggtcctagatc

SEQ ID NO: 76511 - DNA, 17 bp, Arabidopsis thaliana
cgaatgggttaagcgga

SEQ ID NO: 76512 - DNA, 17 bp, Arabidopsis thaliana
cgaatggtccgctgcgg

SEQ ID NO: 76513 - DNA, 17 bp, Arabidopsis thaliana
cgaatggtcggtgtttc

SEQ ID NO: 76514 - DNA, 17 bp, Arabidopsis thaliana
cgaatggtgaccgaacc

SEQ ID NO: 76515 - DNA, 17 bp, Arabidopsis thaliana
cgaatggtgatcgcgtt

SEQ ID NO: 76516 - DNA, 17 bp, Arabidopsis thaliana
cgaatggtgcgtgaata

SEQ ID NO: 76517 - DNA, 17 bp, Arabidopsis thaliana
cgaatggttatagcggt

SEQ ID NO: 76518 - DNA, 17 bp, Arabidopsis thaliana
cgaatggtttaagcgga

SEQ ID NO: 76519 - DNA, 17 bp, Arabidopsis thaliana
cgaatgtcgctcactgc

SEQ ID NO: 76520 - DNA, 17 bp, Arabidopsis thaliana
cgaatgtcgtccagcgt

SEQ ID NO: 76521 - DNA, 17 bp, Arabidopsis thaliana
cgaatgtcgttttgcga

SEQ ID NO: 76522 - DNA, 17 bp, Arabidopsis thaliana
cgaatgtgcttgagttg

SEQ ID NO: 76523 - DNA, 17 bp, Arabidopsis thaliana
cgaatgttgaagcctag

SEQ ID NO: 76524 - DNA, 17 bp, Arabidopsis thaliana
cgaatgttgtttggatt

SEQ ID NO: 76525 - DNA, 17 bp, Arabidopsis thaliana
cgaatgtttgccatatg

SEQ ID NO: 76526 - DNA, 17 bp, Arabidopsis thaliana
cgaattaagtgtggtcc

SEQ ID NO: 76527 - DNA, 17 bp, Arabidopsis thaliana
cgaattacagtcactgc

SEQ ID NO: 76528 - DNA, 17 bp, Arabidopsis thaliana
cgaattacagtcgctgc

SEQ ID NO: 76529 - DNA, 17 bp, Arabidopsis thaliana
cgaattaccgacacttc

SEQ ID NO: 76530 - DNA, 17 bp, Arabidopsis thaliana
cgaattagggtcagtca

SEQ ID NO: 76531 - DNA, 17 bp, Arabidopsis thaliana
cgaattaggtaaatgtt

SEQ ID NO: 76532 - DNA, 17 bp, Arabidopsis thaliana
cgaattatccggacccg

SEQ ID NO: 76533 - DNA, 17 bp, Arabidopsis thaliana
cgaattcagtggctctc

SEQ ID NO: 76534 - DNA, 17 bp, Arabidopsis thaliana
cgaattccgtaatcctc

SEQ ID NO: 76535 - DNA, 17 bp, Arabidopsis thaliana
cgaattcggctgagtct

SEQ ID NO: 76536 - DNA, 17 bp, Arabidopsis thaliana
cgaattctctcgaccca

SEQ ID NO: 76537 - DNA, 17 bp, Arabidopsis thaliana
cgaattctgcgcgagcc

SEQ ID NO: 76538 - DNA, 17 bp, Arabidopsis thaliana
cgaattcttcgtcaatg

SEQ ID NO: 76539 - DNA, 17 bp, Arabidopsis thaliana
cgaattggcgactacga

SEQ ID NO: 76540 - DNA, 17 bp, Arabidopsis thaliana
cgaattggctcagaccg

SEQ ID NO: 76541 - DNA, 17 bp, Arabidopsis thaliana
cgaattgggcatggaag

SEQ ID NO: 76542 - DNA, 17 bp, Arabidopsis thaliana
cgaattgggcatggagg

SEQ ID NO: 76543 - DNA, 17 bp, Arabidopsis thaliana
cgaattgtagtctggag

SEQ ID NO: 76544 - DNA, 17 bp, Arabidopsis thaliana
cgaatttcacttttgcg

SEQ ID NO: 76545 - DNA, 17 bp, Arabidopsis thaliana
cgaatttcattggtccg

SEQ ID NO: 76546 - DNA, 17 bp, Arabidopsis thaliana
cgaatttcgacttcgac

SEQ ID NO: 76547 - DNA, 17 bp, Arabidopsis thaliana
cgaatttcggacctaag

SEQ ID NO: 76548 - DNA, 17 bp, Arabidopsis thaliana
cgaatttcggcgaattt

SEQ ID NO: 76549 - DNA, 17 bp, Arabidopsis thaliana
cgaatttgaattgattc

SEQ ID NO: 76550 - DNA, 17 bp, Arabidopsis thaliana
cgaatttgacttgatgt

SEQ ID NO: 76551 - DNA, 17 bp, Arabidopsis thaliana
cgaatttggatcactta

SEQ ID NO: 76552 - DNA, 17 bp, Arabidopsis thaliana
cgaatttggtgccacca

SEQ ID NO: 76553 - DNA, 17 bp, Arabidopsis thaliana
cgaatttgtggtcttac

SEQ ID NO: 76554 - DNA, 17 bp, Arabidopsis thaliana
cgaattttgctaaaacg

SEQ ID NO: 76555 - DNA, 17 bp, Arabidopsis thaliana
cgaattttgggggttta

SEQ ID NO: 76556 - DNA, 17 bp, Arabidopsis thaliana
cgaattttgtctagtat

SEQ ID NO: 76557 - DNA, 17 bp, Arabidopsis thaliana
cgaatttttcaacctaa

SEQ ID NO: 76558 - DNA, 17 bp, Arabidopsis thaliana
cgaattttttgtgcgaa

SEQ ID NO: 76559 - DNA, 17 bp, Arabidopsis thaliana
cgacaaaaatggttttc

SEQ ID NO: 76560 - DNA, 17 bp, Arabidopsis thaliana
cgacaaaagatctggtg

SEQ ID NO: 76561 - DNA, 17 bp, Arabidopsis thaliana
cgacaaacttttaacgg

SEQ ID NO: 76562 - DNA, 17 bp, Arabidopsis thaliana
cgacaaagagcaacaat

SEQ ID NO: 76563 - DNA, 17 bp, Arabidopsis thaliana
cgacaaagatggcgatg

SEQ ID NO: 76564 - DNA, 17 bp, Arabidopsis thaliana
cgacaaagtgattctga

SEQ ID NO: 76565 - DNA, 17 bp, Arabidopsis thaliana
cgacaaagtggccagcc

SEQ ID NO: 76566 - DNA, 17 bp, Arabidopsis thaliana
cgacaaatcggctcgtt

SEQ ID NO: 76567 - DNA, 17 bp, Arabidopsis thaliana
cgacaaatctggcgcta

SEQ ID NO: 76568 - DNA, 17 bp, Arabidopsis thaliana
cgacaaattttcggacc

SEQ ID NO: 76569 - DNA, 17 bp, Arabidopsis thaliana
cgacaacagaacacagt

SEQ ID NO: 76570 - DNA, 17 bp, Arabidopsis thaliana
cgacaaccaagatgtag

SEQ ID NO: 76571 - DNA, 17 bp, Arabidopsis thaliana
cgacaacctagcggatc

SEQ ID NO: 76572 - DNA, 17 bp, Arabidopsis thaliana
cgacaacgatcatcgac

SEQ ID NO: 76573 - DNA, 17 bp, Arabidopsis thaliana
cgacaacgatcatcgag

SEQ ID NO: 76574 - DNA, 17 bp, Arabidopsis thaliana
cgacaacggagtccctc

SEQ ID NO: 76575 - DNA, 17 bp, Arabidopsis thaliana
cgacaacggctccaacg

SEQ ID NO: 76576 - DNA, 17 bp, Arabidopsis thaliana
cgacaacttcgtccggc

SEQ ID NO: 76577 - DNA, 17 bp, Arabidopsis thaliana
cgacaacttttagaccg

SEQ ID NO: 76578 - DNA, 17 bp, Arabidopsis thaliana
cgacaagacggcggata

SEQ ID NO: 76579 - DNA, 17 bp, Arabidopsis thaliana
cgacaagacttaggttg

SEQ ID NO: 76580 - DNA, 17 bp, Arabidopsis thaliana
cgacaagatactgtgac

SEQ ID NO: 76581 - DNA, 17 bp, Arabidopsis thaliana
cgacaagatcaccattg

SEQ ID NO: 76582 - DNA, 17 bp, Arabidopsis thaliana
cgacaagattgcagcgc

SEQ ID NO: 76583 - DNA, 17 bp, Arabidopsis thaliana
cgacaagcaccggcggt

SEQ ID NO: 76584 - DNA, 17 bp, Arabidopsis thaliana
cgacaaggaaacgcaca

SEQ ID NO: 76585 - DNA, 17 bp, Arabidopsis thaliana
cgacaaggaaacgcacg

SEQ ID NO: 76586 - DNA, 17 bp, Arabidopsis thaliana
cgacaaggactttgggt

SEQ ID NO: 76587 - DNA, 17 bp, Arabidopsis thaliana
cgacaaggcattgcttc

SEQ ID NO: 76588 - DNA, 17 bp, Arabidopsis thaliana
cgacaaggggaatccga

SEQ ID NO: 76589 - DNA, 17 bp, Arabidopsis thaliana
cgacaaggtactgtgac

SEQ ID NO: 76590 - DNA, 17 bp, Arabidopsis thaliana
cgacaaggtattcaaaa

SEQ ID NO: 76591 - DNA, 17 bp, Arabidopsis thaliana
cgacaagtaagagcatg

SEQ ID NO: 76592 - DNA, 17 bp, Arabidopsis thaliana
cgacaagttgatccagg

SEQ ID NO: 76593 - DNA, 17 bp, Arabidopsis thaliana
cgacaatatcatgttct

SEQ ID NO: 76594 - DNA, 17 bp, Arabidopsis thaliana
cgacaatccatcattcg

SEQ ID NO: 76595 - DNA, 17 bp, Arabidopsis thaliana
cgacaatgaatgtgtgg

SEQ ID NO: 76596 - DNA, 17 bp, Arabidopsis thaliana
cgacaatgcaacgtcgt

SEQ ID NO: 76597 - DNA, 17 bp, Arabidopsis thaliana
cgacaatgcggctcgcc

SEQ ID NO: 76598 - DNA, 17 bp, Arabidopsis thaliana
cgacaatggctttgttc

SEQ ID NO: 76599 - DNA, 17 bp, Arabidopsis thaliana
cgacaatggctttgttg

SEQ ID NO: 76600 - DNA, 17 bp, Arabidopsis thaliana
cgacaatggtttcttta

SEQ ID NO: 76601 - DNA, 17 bp, Arabidopsis thaliana
cgacaattaacctgatg

SEQ ID NO: 76602 - DNA, 17 bp, Arabidopsis thaliana
cgacaattcctcttttc

SEQ ID NO: 76603 - DNA, 17 bp, Arabidopsis thaliana
cgacaatttcaccgaac

SEQ ID NO: 76604 - DNA, 17 bp, Arabidopsis thaliana
cgacaatttgagctccg

SEQ ID NO: 76605 - DNA, 17 bp, Arabidopsis thaliana
cgacacaagttttggat

SEQ ID NO: 76606 - DNA, 17 bp, Arabidopsis thaliana
cgacacaatcgtcaatg

SEQ ID NO: 76607 - DNA, 17 bp, Arabidopsis thaliana
cgacacaccggaatgtg

SEQ ID NO: 76608 - DNA, 17 bp, Arabidopsis thaliana
cgacacacgactactca

SEQ ID NO: 76609 - DNA, 17 bp, Arabidopsis thaliana
cgacacacgtgctacaa

SEQ ID NO: 76610 - DNA, 17 bp, Arabidopsis thaliana
cgacacaggtggtgcat

SEQ ID NO: 76611 - DNA, 17 bp, Arabidopsis thaliana
cgacacatctggacaca

SEQ ID NO: 76612 - DNA, 17 bp, Arabidopsis thaliana
cgacaccagctccacca

SEQ ID NO: 76613 - DNA, 17 bp, Arabidopsis thaliana
cgacaccagttttggcc

SEQ ID NO: 76614 - DNA, 17 bp, Arabidopsis thaliana
cgacacgaccctatgag

SEQ ID NO: 76615 - DNA, 17 bp, Arabidopsis thaliana
cgacacgatcgagatga

SEQ ID NO: 76616 - DNA, 17 bp, Arabidopsis thaliana
cgacacgattgagatga

SEQ ID NO: 76617 - DNA, 17 bp, Arabidopsis thaliana
cgacacggccgatcggt

SEQ ID NO: 76618 - DNA, 17 bp, Arabidopsis thaliana
cgacacgtctgcctggg

SEQ ID NO: 76619 - DNA, 17 bp, Arabidopsis thaliana
cgacacgtgcctttggg

SEQ ID NO: 76620 - DNA, 17 bp, Arabidopsis thaliana
cgacacgttggaaagga

SEQ ID NO: 76621 - DNA, 17 bp, Arabidopsis thaliana
cgacactaatgtagctg

SEQ ID NO: 76622 - DNA, 17 bp, Arabidopsis thaliana
cgacactaattaatgtg

SEQ ID NO: 76623 - DNA, 17 bp, Arabidopsis thaliana
cgacactgcgattgtac

SEQ ID NO: 76624 - DNA, 17 bp, Arabidopsis thaliana
cgacactggtgcttcta

SEQ ID NO: 76625 - DNA, 17 bp, Arabidopsis thaliana
cgacactgtgttcttga

SEQ ID NO: 76626 - DNA, 17 bp, Arabidopsis thaliana
cgacagaaaccggcgac

SEQ ID NO: 76627 - DNA, 17 bp, Arabidopsis thaliana
cgacagaagcacgtcgt

SEQ ID NO: 76628 - DNA, 17 bp, Arabidopsis thaliana
cgacagacccgggttcg

SEQ ID NO: 76629 - DNA, 17 bp, Arabidopsis thaliana
cgacagacctggtgaag

SEQ ID NO: 76630 - DNA, 17 bp, Arabidopsis thaliana
cgacagacttcgtcaag

SEQ ID NO: 76631 - DNA, 17 bp, Arabidopsis thaliana
cgacagacttgttcgcg

SEQ ID NO: 76632 - DNA, 17 bp, Arabidopsis thaliana
cgacagagaaacgaaca

SEQ ID NO: 76633 - DNA, 17 bp, Arabidopsis thaliana
cgacagagtgttccgga

SEQ ID NO: 76634 - DNA, 17 bp, Arabidopsis thaliana
cgacagatcaccaccac

SEQ ID NO: 76635 - DNA, 17 bp, Arabidopsis thaliana
cgacagatcaccagcac

SEQ ID NO: 76636 - DNA, 17 bp, Arabidopsis thaliana
cgacagatcagattttt

SEQ ID NO: 76637 - DNA, 17 bp, Arabidopsis thaliana
cgacagatcgcatggcc

SEQ ID NO: 76638 - DNA, 17 bp, Arabidopsis thaliana
cgacagcaaccagcgac

SEQ ID NO: 76639 - DNA, 17 bp, Arabidopsis thaliana
cgacagcacgaccgcag

SEQ ID NO: 76640 - DNA, 17 bp, Arabidopsis thaliana
cgacagcctcgagtgac

SEQ ID NO: 76641 - DNA, 17 bp, Arabidopsis thaliana
cgacagcggtggttgat

SEQ ID NO: 76642 - DNA, 17 bp, Arabidopsis thaliana
cgacagctggttcgtta

SEQ ID NO: 76643 - DNA, 17 bp, Arabidopsis thaliana
cgacaggaagtatgtcg

SEQ ID NO: 76644 - DNA, 17 bp, Arabidopsis thaliana
cgacaggcaaacgaaca

SEQ ID NO: 76645 - DNA, 17 bp, Arabidopsis thaliana
cgacaggcaaatgaaca

SEQ ID NO: 76646 - DNA, 17 bp, Arabidopsis thaliana
cgacaggcccgggtaat

SEQ ID NO: 76647 - DNA, 17 bp, Arabidopsis thaliana
cgacaggccgaaacgat

SEQ ID NO: 76648 - DNA, 17 bp, Arabidopsis thaliana
cgacaggctcgggtaat

SEQ ID NO: 76649 - DNA, 17 bp, Arabidopsis thaliana
cgacaggtcgtttcagc

SEQ ID NO: 76650 - DNA, 17 bp, Arabidopsis thaliana
cgacagtcaccagcgat

SEQ ID NO: 76651 - DNA, 17 bp, Arabidopsis thaliana
cgacagtcgctgcgatc

SEQ ID NO: 76652 - DNA, 17 bp, Arabidopsis thaliana
cgacagtgaagatcaag

SEQ ID NO: 76653 - DNA, 17 bp, Arabidopsis thaliana
cgacagtgtgctactgc

SEQ ID NO: 76654 - DNA, 17 bp, Arabidopsis thaliana
cgacagttcaacgcgcc

SEQ ID NO: 76655 - DNA, 17 bp, Arabidopsis thaliana
cgacagttttttttctt

SEQ ID NO: 76656 - DNA, 17 bp, Arabidopsis thaliana
cgacataattatggagt

SEQ ID NO: 76657 - DNA, 17 bp, Arabidopsis thaliana
cgacataggcagaagcg

SEQ ID NO: 76658 - DNA, 17 bp, Arabidopsis thaliana
cgacatcactttgttcg

SEQ ID NO: 76659 - DNA, 17 bp, Arabidopsis thaliana
cgacatcatcggagttc

SEQ ID NO: 76660 - DNA, 17 bp, Arabidopsis thaliana
cgacatctccgcaatcg

SEQ ID NO: 76661 - DNA, 17 bp, Arabidopsis thaliana
cgacatgactcaaatgg

SEQ ID NO: 76662 - DNA, 17 bp, Arabidopsis thaliana
cgacatgggtttcgttt

SEQ ID NO: 76663 - DNA, 17 bp, Arabidopsis thaliana
cgacatgtgaccgttgc

SEQ ID NO: 76664 - DNA, 17 bp, Arabidopsis thaliana
cgacatgtgtactggct

SEQ ID NO: 76665 - DNA, 17 bp, Arabidopsis thaliana
cgacattatcaactagg

SEQ ID NO: 76666 - DNA, 17 bp, Arabidopsis thaliana
cgacattcatattttgg

SEQ ID NO: 76667 - DNA, 17 bp, Arabidopsis thaliana
cgacattcgggttgttc

SEQ ID NO: 76668 - DNA, 17 bp, Arabidopsis thaliana
cgacattgcgtttttgc

SEQ ID NO: 76669 - DNA, 17 bp, Arabidopsis thaliana
cgacattgctgccaaat

SEQ ID NO: 76670 - DNA, 17 bp, Arabidopsis thaliana
cgacattgctgctatca

SEQ ID NO: 76671 - DNA, 17 bp, Arabidopsis thaliana
cgacatttcttcagatg

SEQ ID NO: 76672 - DNA, 17 bp, Arabidopsis thaliana
cgacatttgacactctg

SEQ ID NO: 76673 - DNA, 17 bp, Arabidopsis thaliana
cgacatttgacttcgtt

SEQ ID NO: 76674 - DNA, 17 bp, Arabidopsis thaliana
cgacattttagcttagc

SEQ ID NO: 76675 - DNA, 17 bp, Arabidopsis thaliana
cgaccaaaagcaccgac

SEQ ID NO: 76676 - DNA, 17 bp, Arabidopsis thaliana
cgaccaaaagttgttcg

SEQ ID NO: 76677 - DNA, 17 bp, Arabidopsis thaliana
cgaccaaaccagcaggt

SEQ ID NO: 76678 - DNA, 17 bp, Arabidopsis thaliana
cgaccaaactgcacgag

SEQ ID NO: 76679 - DNA, 17 bp, Arabidopsis thaliana
cgaccaacacagctcat

SEQ ID NO: 76680 - DNA, 17 bp, Arabidopsis thaliana
cgaccaacggactgcgc

SEQ ID NO: 76681 - DNA, 17 bp, Arabidopsis thaliana
cgaccaaggatgaattg

SEQ ID NO: 76682 - DNA, 17 bp, Arabidopsis thaliana
cgaccaaggatgacttg

SEQ ID NO: 76683 - DNA, 17 bp, Arabidopsis thaliana
cgaccaataccttggta

SEQ ID NO: 76684 - DNA, 17 bp, Arabidopsis thaliana
cgaccaatcgcaagatc

SEQ ID NO: 76685 - DNA, 17 bp, Arabidopsis thaliana
cgaccaatcggaagctg

SEQ ID NO: 76686 - DNA, 17 bp, Arabidopsis thaliana
cgaccaccaggtcgagt

SEQ ID NO: 76687 - DNA, 17 bp, Arabidopsis thaliana
cgaccacccagttgtct

SEQ ID NO: 76688 - DNA, 17 bp, Arabidopsis thaliana
cgaccaccccccccccc

SEQ ID NO: 76689 - DNA, 17 bp, Arabidopsis thaliana
cgaccaccctcttcagg

SEQ ID NO: 76690 - DNA, 17 bp, Arabidopsis thaliana
cgaccaccctgtccagc

SEQ ID NO: 76691 - DNA, 17 bp, Arabidopsis thaliana
cgaccaccgatgttgat

SEQ ID NO: 76692 - DNA, 17 bp, Arabidopsis thaliana
cgaccaccggaaccttt

SEQ ID NO: 76693 - DNA, 17 bp, Arabidopsis thaliana
cgaccacctcagtcact

SEQ ID NO: 76694 - DNA, 17 bp, Arabidopsis thaliana
cgaccacgaggccgagt

SEQ ID NO: 76695 - DNA, 17 bp, Arabidopsis thaliana
cgaccacgtctgcctgg

SEQ ID NO: 76696 - DNA, 17 bp, Arabidopsis thaliana
cgaccactggaagtttt

SEQ ID NO: 76697 - DNA, 17 bp, Arabidopsis thaliana
cgaccagaatcttgagt

SEQ ID NO: 76698 - DNA, 17 bp, Arabidopsis thaliana
cgaccagaggctgttca

SEQ ID NO: 76699 - DNA, 17 bp, Arabidopsis thaliana
cgaccagatcagctgat

SEQ ID NO: 76700 - DNA, 17 bp, Arabidopsis thaliana
cgaccagatcgggagaa

SEQ ID NO: 76701 - DNA, 17 bp, Arabidopsis thaliana
cgaccagcatattgtcc

SEQ ID NO: 76702 - DNA, 17 bp, Arabidopsis thaliana
cgaccagcgacagcaac

SEQ ID NO: 76703 - DNA, 17 bp, Arabidopsis thaliana
cgaccagcgacagcgac

SEQ ID NO: 76704 - DNA, 17 bp, Arabidopsis thaliana
cgaccagcgaccgcaat

SEQ ID NO: 76705 - DNA, 17 bp, Arabidopsis thaliana
cgaccaggacacatcgc

SEQ ID NO: 76706 - DNA, 17 bp, Arabidopsis thaliana
cgaccaggacgaggaat

SEQ ID NO: 76707 - DNA, 17 bp, Arabidopsis thaliana
cgaccaggacgcatcgc

SEQ ID NO: 76708 - DNA, 17 bp, Arabidopsis thaliana
cgaccaggacggccgga

SEQ ID NO: 76709 - DNA, 17 bp, Arabidopsis thaliana
cgaccaggagtggaaat

SEQ ID NO: 76710 - DNA, 17 bp, Arabidopsis thaliana
cgaccaggcttcattcc

SEQ ID NO: 76711 - DNA, 17 bp, Arabidopsis thaliana
cgaccagggatcagcga

SEQ ID NO: 76712 - DNA, 17 bp, Arabidopsis thaliana
cgaccagggatcagcgg

SEQ ID NO: 76713 - DNA, 17 bp, Arabidopsis thaliana
cgaccagggggtcgagt

SEQ ID NO: 76714 - DNA, 17 bp, Arabidopsis thaliana
cgaccaggggtcagcgg

SEQ ID NO: 76715 - DNA, 17 bp, Arabidopsis thaliana
cgaccagtcactcgagc

SEQ ID NO: 76716 - DNA, 17 bp, Arabidopsis thaliana
cgaccagtcaggaaatg

SEQ ID NO: 76717 - DNA, 17 bp, Arabidopsis thaliana
cgaccagtgacagcaac

SEQ ID NO: 76718 - DNA, 17 bp, Arabidopsis thaliana
cgaccagttgaatgcgg

SEQ ID NO: 76719 - DNA, 17 bp, Arabidopsis thaliana
cgaccatacgaattccg

SEQ ID NO: 76720 - DNA, 17 bp, Arabidopsis thaliana
cgaccatcgggcaagga

SEQ ID NO: 76721 - DNA, 17 bp, Arabidopsis thaliana
cgaccatggagacgcag

SEQ ID NO: 76722 - DNA, 17 bp, Arabidopsis thaliana
cgaccatttcaagagtt

SEQ ID NO: 76723 - DNA, 17 bp, Arabidopsis thaliana
cgaccatttcacgagtt

SEQ ID NO: 76724 - DNA, 17 bp, Arabidopsis thaliana
cgacccaacaaacactc

SEQ ID NO: 76725 - DNA, 17 bp, Arabidopsis thaliana
cgacccaatgatcgagt

SEQ ID NO: 76726 - DNA, 17 bp, Arabidopsis thaliana
cgacccacacagtgaac

SEQ ID NO: 76727 - DNA, 17 bp, Arabidopsis thaliana
cgacccacagaggactc

SEQ ID NO: 76728 - DNA, 17 bp, Arabidopsis thaliana
cgacccacagaggattc

SEQ ID NO: 76729 - DNA, 17 bp, Arabidopsis thaliana
cgacccacttactcacc

SEQ ID NO: 76730 - DNA, 17 bp, Arabidopsis thaliana
cgacccacttactcgac

SEQ ID NO: 76731 - DNA, 17 bp, Arabidopsis thaliana
cgacccagaaagcctcc

SEQ ID NO: 76732 - DNA, 17 bp, Arabidopsis thaliana
cgacccagaaagccttt

SEQ ID NO: 76733 - DNA, 17 bp, Arabidopsis thaliana
cgacccagtggcttcaa

SEQ ID NO: 76734 - DNA, 17 bp, Arabidopsis thaliana
cgacccataacatctat

SEQ ID NO: 76735 - DNA, 17 bp, Arabidopsis thaliana
cgacccatagaaggctc

SEQ ID NO: 76736 - DNA, 17 bp, Arabidopsis thaliana
cgacccatagaggactc

SEQ ID NO: 76737 - DNA, 17 bp, Arabidopsis thaliana
cgaccccaggccgagtg

SEQ ID NO: 76738 - DNA, 17 bp, Arabidopsis thaliana
cgaccccaggtcaggag

SEQ ID NO: 76739 - DNA, 17 bp, Arabidopsis thaliana
cgaccccaggtcaggcc

SEQ ID NO: 76740 - DNA, 17 bp, Arabidopsis thaliana
cgaccccaggtcaggcg

SEQ ID NO: 76741 - DNA, 17 bp, Arabidopsis thaliana
cgaccccagttcagccg

SEQ ID NO: 76742 - DNA, 17 bp, Arabidopsis thaliana
cgaccccctggccgagt

SEQ ID NO: 76743 - DNA, 17 bp, Arabidopsis thaliana
cgaccccctggtcgagt

SEQ ID NO: 76744 - DNA, 17 bp, Arabidopsis thaliana
cgaccccggatcttaaa

SEQ ID NO: 76745 - DNA, 17 bp, Arabidopsis thaliana
cgacccctccttctacc

SEQ ID NO: 76746 - DNA, 17 bp, Arabidopsis thaliana
cgacccctccttctatc

SEQ ID NO: 76747 - DNA, 17 bp, Arabidopsis thaliana
cgacccctctctctagc

SEQ ID NO: 76748 - DNA, 17 bp, Arabidopsis thaliana
cgacccgaaagtcagag

SEQ ID NO: 76749 - DNA, 17 bp, Arabidopsis thaliana
cgacccggattacggtg

SEQ ID NO: 76750 - DNA, 17 bp, Arabidopsis thaliana
cgacccggggcgatcgg

SEQ ID NO: 76751 - DNA, 17 bp, Arabidopsis thaliana
cgacccgtgcagtgctg

SEQ ID NO: 76752 - DNA, 17 bp, Arabidopsis thaliana
cgacccgtttcccaagc

SEQ ID NO: 76753 - DNA, 17 bp, Arabidopsis thaliana
cgaccctacaaatcacc

SEQ ID NO: 76754 - DNA, 17 bp, Arabidopsis thaliana
cgaccctcagtaggagc

SEQ ID NO: 76755 - DNA, 17 bp, Arabidopsis thaliana
cgaccctccttctttat

SEQ ID NO: 76756 - DNA, 17 bp, Arabidopsis thaliana
cgacccttcacttggtg

SEQ ID NO: 76757 - DNA, 17 bp, Arabidopsis thaliana
cgaccctttgtcgctaa

SEQ ID NO: 76758 - DNA, 17 bp, Arabidopsis thaliana
cgaccgaaaatgacttt

SEQ ID NO: 76759 - DNA, 17 bp, Arabidopsis thaliana
cgaccgaaagtgactac

SEQ ID NO: 76760 - DNA, 17 bp, Arabidopsis thaliana
cgaccgaaatgcctgga

SEQ ID NO: 76761 - DNA, 17 bp, Arabidopsis thaliana
cgaccgaaatgcgatac

SEQ ID NO: 76762 - DNA, 17 bp, Arabidopsis thaliana
cgaccgaaccaaagacc

SEQ ID NO: 76763 - DNA, 17 bp, Arabidopsis thaliana
cgaccgaaccgaaacac

SEQ ID NO: 76764 - DNA, 17 bp, Arabidopsis thaliana
cgaccgaaccggcataa

SEQ ID NO: 76765 - DNA, 17 bp, Arabidopsis thaliana
cgaccgaagatgaaaga

SEQ ID NO: 76766 - DNA, 17 bp, Arabidopsis thaliana
cgaccgaagattatcta

SEQ ID NO: 76767 - DNA, 17 bp, Arabidopsis thaliana
cgaccgaagccccggtg

SEQ ID NO: 76768 - DNA, 17 bp, Arabidopsis thaliana
cgaccgaagggacaagc

SEQ ID NO: 76769 - DNA, 17 bp, Arabidopsis thaliana
cgaccgaatcaactagc

SEQ ID NO: 76770 - DNA, 17 bp, Arabidopsis thaliana
cgaccgaatctctcagg

SEQ ID NO: 76771 - DNA, 17 bp, Arabidopsis thaliana
cgaccgaatggtgattg

SEQ ID NO: 76772 - DNA, 17 bp, Arabidopsis thaliana
cgaccgaattacagtca

SEQ ID NO: 76773 - DNA, 17 bp, Arabidopsis thaliana
cgaccgaattacagtcg

SEQ ID NO: 76774 - DNA, 17 bp, Arabidopsis thaliana
cgaccgaattcggctga

SEQ ID NO: 76775 - DNA, 17 bp, Arabidopsis thaliana
cgaccgaatttgaattg

SEQ ID NO: 76776 - DNA, 17 bp, Arabidopsis thaliana
cgaccgacaaatcattg

SEQ ID NO: 76777 - DNA, 17 bp, Arabidopsis thaliana
cgaccgacaagacttag

SEQ ID NO: 76778 - DNA, 17 bp, Arabidopsis thaliana
cgaccgacaaggaaacg

SEQ ID NO: 76779 - DNA, 17 bp, Arabidopsis thaliana
cgaccgacagacttcgt

SEQ ID NO: 76780 - DNA, 17 bp, Arabidopsis thaliana
cgaccgacaggcaaacg

SEQ ID NO: 76781 - DNA, 17 bp, Arabidopsis thaliana
cgaccgacagtcaccag

SEQ ID NO: 76782 - DNA, 17 bp, Arabidopsis thaliana
cgaccgaccagcgacag

SEQ ID NO: 76783 - DNA, 17 bp, Arabidopsis thaliana
cgaccgaccagggatca

SEQ ID NO: 76784 - DNA, 17 bp, Arabidopsis thaliana
cgaccgacccacagagg

SEQ ID NO: 76785 - DNA, 17 bp, Arabidopsis thaliana
cgaccgaccctcagtag

SEQ ID NO: 76786 - DNA, 17 bp, Arabidopsis thaliana
cgaccgacctgggttcg

SEQ ID NO: 76787 - DNA, 17 bp, Arabidopsis thaliana
cgaccgacgaagcgttt

SEQ ID NO: 76788 - DNA, 17 bp, Arabidopsis thaliana
cgaccgacgcagattac

SEQ ID NO: 76789 - DNA, 17 bp, Arabidopsis thaliana
cgaccgacgcggattac

SEQ ID NO: 76790 - DNA, 17 bp, Arabidopsis thaliana
cgaccgactacaggtgt

SEQ ID NO: 76791 - DNA, 17 bp, Arabidopsis thaliana
cgaccgactcgagagcg

SEQ ID NO: 76792 - DNA, 17 bp, Arabidopsis thaliana
cgaccgactctcggcaa

SEQ ID NO: 76793 - DNA, 17 bp, Arabidopsis thaliana
cgaccgactggtaactg

SEQ ID NO: 76794 - DNA, 17 bp, Arabidopsis thaliana
cgaccgacttatcacgt

SEQ ID NO: 76795 - DNA, 17 bp, Arabidopsis thaliana
cgaccgacttatggaag

SEQ ID NO: 76796 - DNA, 17 bp, Arabidopsis thaliana
cgaccgacttcccctgg

SEQ ID NO: 76797 - DNA, 17 bp, Arabidopsis thaliana
cgaccgacttcgaagct

SEQ ID NO: 76798 - DNA, 17 bp, Arabidopsis thaliana
cgaccgactttaatagg

SEQ ID NO: 76799 - DNA, 17 bp, Arabidopsis thaliana
cgaccgagaccgacacc

SEQ ID NO: 76800 - DNA, 17 bp, Arabidopsis thaliana
cgaccgagagacccggg

SEQ ID NO: 76801 - DNA, 17 bp, Arabidopsis thaliana
cgaccgagaggtacggg

SEQ ID NO: 76802 - DNA, 17 bp, Arabidopsis thaliana
cgaccgagatgacaagg

SEQ ID NO: 76803 - DNA, 17 bp, Arabidopsis thaliana
cgaccgagatgacaggg

SEQ ID NO: 76804 - DNA, 17 bp, Arabidopsis thaliana
cgaccgagcccgggcgg

SEQ ID NO: 76805 - DNA, 17 bp, Arabidopsis thaliana
cgaccgagcttttggtg

SEQ ID NO: 76806 - DNA, 17 bp, Arabidopsis thaliana
cgaccgaggaaggcatt

SEQ ID NO: 76807 - DNA, 17 bp, Arabidopsis thaliana
cgaccgaggataggtgc

SEQ ID NO: 76808 - DNA, 17 bp, Arabidopsis thaliana
cgaccgagggcgcgtct

SEQ ID NO: 76809 - DNA, 17 bp, Arabidopsis thaliana
cgaccgagtcccaccgg

SEQ ID NO: 76810 - DNA, 17 bp, Arabidopsis thaliana
cgaccgagtctaaggta

SEQ ID NO: 76811 - DNA, 17 bp, Arabidopsis thaliana
cgaccgagtcttcatag

SEQ ID NO: 76812 - DNA, 17 bp, Arabidopsis thaliana
cgaccgagttctatcgg

SEQ ID NO: 76813 - DNA, 17 bp, Arabidopsis thaliana
cgaccgagttgactcag

SEQ ID NO: 76814 - DNA, 17 bp, Arabidopsis thaliana
cgaccgagtttggcagg

SEQ ID NO: 76815 - DNA, 17 bp, Arabidopsis thaliana
cgaccgatagcgaagca

SEQ ID NO: 76816 - DNA, 17 bp, Arabidopsis thaliana
cgaccgatccactgaga

SEQ ID NO: 76817 - DNA, 17 bp, Arabidopsis thaliana
cgaccgatcctactcca

SEQ ID NO: 76818 - DNA, 17 bp, Arabidopsis thaliana
cgaccgatcctattgtg

SEQ ID NO: 76819 - DNA, 17 bp, Arabidopsis thaliana
cgaccgatcgcagcgac

SEQ ID NO: 76820 - DNA, 17 bp, Arabidopsis thaliana
cgaccgatctacacttc

SEQ ID NO: 76821 - DNA, 17 bp, Arabidopsis thaliana
cgaccgatctcatgttc

SEQ ID NO: 76822 - DNA, 17 bp, Arabidopsis thaliana
cgaccgatgcccgtaat

SEQ ID NO: 76823 - DNA, 17 bp, Arabidopsis thaliana
cgaccgatgtcggctct

SEQ ID NO: 76824 - DNA, 17 bp, Arabidopsis thaliana
cgaccgattcccggctg

SEQ ID NO: 76825 - DNA, 17 bp, Arabidopsis thaliana
cgaccgattcggggcgt

SEQ ID NO: 76826 - DNA, 17 bp, Arabidopsis thaliana
cgaccgattctaccttt

SEQ ID NO: 76827 - DNA, 17 bp, Arabidopsis thaliana
cgaccgattctagcgac

SEQ ID NO: 76828 - DNA, 17 bp, Arabidopsis thaliana
cgaccgattgaatgatc

SEQ ID NO: 76829 - DNA, 17 bp, Arabidopsis thaliana
cgaccgattgccgaccc

SEQ ID NO: 76830 - DNA, 17 bp, Arabidopsis thaliana
cgaccgcaaacttgggt

SEQ ID NO: 76831 - DNA, 17 bp, Arabidopsis thaliana
cgaccgcatgaatttgg

SEQ ID NO: 76832 - DNA, 17 bp, Arabidopsis thaliana
cgaccgcatgctgttat

SEQ ID NO: 76833 - DNA, 17 bp, Arabidopsis thaliana
cgaccgccgactgtcaa

SEQ ID NO: 76834 - DNA, 17 bp, Arabidopsis thaliana
cgaccgcggcagttccg

SEQ ID NO: 76835 - DNA, 17 bp, Arabidopsis thaliana
cgaccgcggtaattcca

SEQ ID NO: 76836 - DNA, 17 bp, Arabidopsis thaliana
cgaccgcggtgctggcc

SEQ ID NO: 76837 - DNA, 17 bp, Arabidopsis thaliana
cgaccggaacccatttg

SEQ ID NO: 76838 - DNA, 17 bp, Arabidopsis thaliana
cgaccggagttcatttg

SEQ ID NO: 76839 - DNA, 17 bp, Arabidopsis thaliana
cgaccggatttcatttg

SEQ ID NO: 76840 - DNA, 17 bp, Arabidopsis thaliana
cgaccggatttgagggt

SEQ ID NO: 76841 - DNA, 17 bp, Arabidopsis thaliana
cgaccgggtccgaggat

SEQ ID NO: 76842 - DNA, 17 bp, Arabidopsis thaliana
cgaccgtccggccgccg

SEQ ID NO: 76843 - DNA, 17 bp, Arabidopsis thaliana
cgaccgtcgcatcagcg

SEQ ID NO: 76844 - DNA, 17 bp, Arabidopsis thaliana
cgaccgtcggacaaggt

SEQ ID NO: 76845 - DNA, 17 bp, Arabidopsis thaliana
cgaccgtcggacagagg

SEQ ID NO: 76846 - DNA, 17 bp, Arabidopsis thaliana
cgaccgtcttttgttta

SEQ ID NO: 76847 - DNA, 17 bp, Arabidopsis thaliana
cgaccgtgaccaaaagt

SEQ ID NO: 76848 - DNA, 17 bp, Arabidopsis thaliana
cgaccgtggtactggga

SEQ ID NO: 76849 - DNA, 17 bp, Arabidopsis thaliana
cgaccgttggttttgac

SEQ ID NO: 76850 - DNA, 17 bp, Arabidopsis thaliana
cgaccgttgttcggcta

SEQ ID NO: 76851 - DNA, 17 bp, Arabidopsis thaliana
cgaccgttttcgagccg

SEQ ID NO: 76852 - DNA, 17 bp, Arabidopsis thaliana
cgacctaagttccctgg

SEQ ID NO: 76853 - DNA, 17 bp, Arabidopsis thaliana
cgacctaatctgggcaa

SEQ ID NO: 76854 - DNA, 17 bp, Arabidopsis thaliana
cgacctaatggctaaaa

SEQ ID NO: 76855 - DNA, 17 bp, Arabidopsis thaliana
cgacctagaatgggaac

SEQ ID NO: 76856 - DNA, 17 bp, Arabidopsis thaliana
cgacctaggggtgtatc

SEQ ID NO: 76857 - DNA, 17 bp, Arabidopsis thaliana
cgacctataccccgccg

SEQ ID NO: 76858 - DNA, 17 bp, Arabidopsis thaliana
cgacctatacccggccg

SEQ ID NO: 76859 - DNA, 17 bp, Arabidopsis thaliana
cgacctatctttgatcc

SEQ ID NO: 76860 - DNA, 17 bp, Arabidopsis thaliana
cgacctattatcatggg

SEQ ID NO: 76861 - DNA, 17 bp, Arabidopsis thaliana
cgacctcagcgacggac

SEQ ID NO: 76862 - DNA, 17 bp, Arabidopsis thaliana
cgacctcatcagctttg

SEQ ID NO: 76863 - DNA, 17 bp, Arabidopsis thaliana
cgacctccctcctgaag

SEQ ID NO: 76864 - DNA, 17 bp, Arabidopsis thaliana
cgacctcggggtcgagt

SEQ ID NO: 76865 - DNA, 17 bp, Arabidopsis thaliana
cgacctctaagctaccc

SEQ ID NO: 76866 - DNA, 17 bp, Arabidopsis thaliana
cgacctctaagcttcgc

SEQ ID NO: 76867 - DNA, 17 bp, Arabidopsis thaliana
cgacctctaaggttcgc

SEQ ID NO: 76868 - DNA, 17 bp, Arabidopsis thaliana
cgacctctaagtttcgc

SEQ ID NO: 76869 - DNA, 17 bp, Arabidopsis thaliana
cgacctctctccttctc

SEQ ID NO: 76870 - DNA, 17 bp, Arabidopsis thaliana
cgacctctctccttctg

SEQ ID NO: 76871 - DNA, 17 bp, Arabidopsis thaliana
cgacctctctctccgcc

SEQ ID NO: 76872 - DNA, 17 bp, Arabidopsis thaliana
cgacctctcttcttctg

SEQ ID NO: 76873 - DNA, 17 bp, Arabidopsis thaliana
cgacctcttgtgtttcc

SEQ ID NO: 76874 - DNA, 17 bp, Arabidopsis thaliana
cgacctgattacctgtc

SEQ ID NO: 76875 - DNA, 17 bp, Arabidopsis thaliana
cgacctgattgagttgg

SEQ ID NO: 76876 - DNA, 17 bp, Arabidopsis thaliana
cgacctgcatacctgaa

SEQ ID NO: 76877 - DNA, 17 bp, Arabidopsis thaliana
cgacctgccggaaacga

SEQ ID NO: 76878 - DNA, 17 bp, Arabidopsis thaliana
cgacctggactgcccgg

SEQ ID NO: 76879 - DNA, 17 bp, Arabidopsis thaliana
cgacctggggctcccgg

SEQ ID NO: 76880 - DNA, 17 bp, Arabidopsis thaliana
cgacctgggttcgactc

SEQ ID NO: 76881 - DNA, 17 bp, Arabidopsis thaliana
cgacctgggttcggccc

SEQ ID NO: 76882 - DNA, 17 bp, Arabidopsis thaliana
cgacctgggttcggctc

SEQ ID NO: 76883 - DNA, 17 bp, Arabidopsis thaliana
cgacctggttgagttgg

SEQ ID NO: 76884 - DNA, 17 bp, Arabidopsis thaliana
cgacctgtactttcggt

SEQ ID NO: 76885 - DNA, 17 bp, Arabidopsis thaliana
cgacctgtgtcccccta

SEQ ID NO: 76886 - DNA, 17 bp, Arabidopsis thaliana
cgacctgtgtccccctc

SEQ ID NO: 76887 - DNA, 17 bp, Arabidopsis thaliana
cgacctgtgtgcccctc

SEQ ID NO: 76888 - DNA, 17 bp, Arabidopsis thaliana
cgacctgtttactcgtt

SEQ ID NO: 76889 - DNA, 17 bp, Arabidopsis thaliana
cgaccttagacgaggga

SEQ ID NO: 76890 - DNA, 17 bp, Arabidopsis thaliana
cgaccttagctcagtcg

SEQ ID NO: 76891 - DNA, 17 bp, Arabidopsis thaliana
cgaccttagctcagttg

SEQ ID NO: 76892 - DNA, 17 bp, Arabidopsis thaliana
cgaccttcaatcccgtc

SEQ ID NO: 76893 - DNA, 17 bp, Arabidopsis thaliana
cgaccttcagatccacg

SEQ ID NO: 76894 - DNA, 17 bp, Arabidopsis thaliana
cgaccttctccttggaa

SEQ ID NO: 76895 - DNA, 17 bp, Arabidopsis thaliana
cgaccttctctgcgccg

SEQ ID NO: 76896 - DNA, 17 bp, Arabidopsis thaliana
cgaccttcttgccatct

SEQ ID NO: 76897 - DNA, 17 bp, Arabidopsis thaliana
cgaccttgactgacctc

SEQ ID NO: 76898 - DNA, 17 bp, Arabidopsis thaliana
cgaccttgatcttctga

SEQ ID NO: 76899 - DNA, 17 bp, Arabidopsis thaliana
cgaccttgatcttttga

SEQ ID NO: 76900 - DNA, 17 bp, Arabidopsis thaliana
cgaccttggataaccgg

SEQ ID NO: 76901 - DNA, 17 bp, Arabidopsis thaliana
cgaccttgtgttctaga

SEQ ID NO: 76902 - DNA, 17 bp, Arabidopsis thaliana
cgaccttgttgcattaa

SEQ ID NO: 76903 - DNA, 17 bp, Arabidopsis thaliana
cgacctttaggatctgg

SEQ ID NO: 76904 - DNA, 17 bp, Arabidopsis thaliana
cgacctttgacggcgag

SEQ ID NO: 76905 - DNA, 17 bp, Arabidopsis thaliana
cgacgaaaattttgatg

SEQ ID NO: 76906 - DNA, 17 bp, Arabidopsis thaliana
cgacgaaagaagctttg

SEQ ID NO: 76907 - DNA, 17 bp, Arabidopsis thaliana
cgacgaaatgcttcggg

SEQ ID NO: 76908 - DNA, 17 bp, Arabidopsis thaliana
cgacgaaatgcttcgtg

SEQ ID NO: 76909 - DNA, 17 bp, Arabidopsis thaliana
cgacgaacagatctgtc

SEQ ID NO: 76910 - DNA, 17 bp, Arabidopsis thaliana
cgacgaacccgggcgaa

SEQ ID NO: 76911 - DNA, 17 bp, Arabidopsis thaliana
cgacgaacctagggagc

SEQ ID NO: 76912 - DNA, 17 bp, Arabidopsis thaliana
cgacgaagcatgcggtt

SEQ ID NO: 76913 - DNA, 17 bp, Arabidopsis thaliana
cgacgaagcgtttgtgt

SEQ ID NO: 76914 - DNA, 17 bp, Arabidopsis thaliana
cgacgaagtattgggac

SEQ ID NO: 76915 - DNA, 17 bp, Arabidopsis thaliana
cgacgaagtgaattgat

SEQ ID NO: 76916 - DNA, 17 bp, Arabidopsis thaliana
cgacgaagtgatgggat

SEQ ID NO: 76917 - DNA, 17 bp, Arabidopsis thaliana
cgacgaatcctcggacc

SEQ ID NO: 76918 - DNA, 17 bp, Arabidopsis thaliana
cgacgaatctcgtctag

SEQ ID NO: 76919 - DNA, 17 bp, Arabidopsis thaliana
cgacgaatctgatcatc

SEQ ID NO: 76920 - DNA, 17 bp, Arabidopsis thaliana
cgacgaatgtccgacga

SEQ ID NO: 76921 - DNA, 17 bp, Arabidopsis thaliana
cgacgaattcagtttag

SEQ ID NO: 76922 - DNA, 17 bp, Arabidopsis thaliana
cgacgaattctcggacc

SEQ ID NO: 76923 - DNA, 17 bp, Arabidopsis thaliana
cgacgaattctcggtac

SEQ ID NO: 76924 - DNA, 17 bp, Arabidopsis thaliana
cgacgacaagtgtgatc

SEQ ID NO: 76925 - DNA, 17 bp, Arabidopsis thaliana
cgacgacacgatcgaga

SEQ ID NO: 76926 - DNA, 17 bp, Arabidopsis thaliana
cgacgacagcagaacac

SEQ ID NO: 76927 - DNA, 17 bp, Arabidopsis thaliana
cgacgacagcagaggca

SEQ ID NO: 76928 - DNA, 17 bp, Arabidopsis thaliana
cgacgacagcgacgact

SEQ ID NO: 76929 - DNA, 17 bp, Arabidopsis thaliana
cgacgacattcagattt

SEQ ID NO: 76930 - DNA, 17 bp, Arabidopsis thaliana
cgacgacccatttgtct

SEQ ID NO: 76931 - DNA, 17 bp, Arabidopsis thaliana
cgacgacgacgagtggg

SEQ ID NO: 76932 - DNA, 17 bp, Arabidopsis thaliana
cgacgacgacgtcagaa

SEQ ID NO: 76933 - DNA, 17 bp, Arabidopsis thaliana
cgacgacgcggattacg

SEQ ID NO: 76934 - DNA, 17 bp, Arabidopsis thaliana
cgacgacggatcgcatg

SEQ ID NO: 76935 - DNA, 17 bp, Arabidopsis thaliana
cgacgacggtactcgat

SEQ ID NO: 76936 - DNA, 17 bp, Arabidopsis thaliana
cgacgactgacgactgc

SEQ ID NO: 76937 - DNA, 17 bp, Arabidopsis thaliana
cgacgactgcgccgaag

SEQ ID NO: 76938 - DNA, 17 bp, Arabidopsis thaliana
cgacgacttctaagttt

SEQ ID NO: 76939 - DNA, 17 bp, Arabidopsis thaliana
cgacgacttctacgcgg

SEQ ID NO: 76940 - DNA, 17 bp, Arabidopsis thaliana
cgacgactttacgacta

SEQ ID NO: 76941 - DNA, 17 bp, Arabidopsis thaliana
cgacgagactcagatat

SEQ ID NO: 76942 - DNA, 17 bp, Arabidopsis thaliana
cgacgagagaggctcca

SEQ ID NO: 76943 - DNA, 17 bp, Arabidopsis thaliana
cgacgagagaggcttca

SEQ ID NO: 76944 - DNA, 17 bp, Arabidopsis thaliana
cgacgagagttttcatg

SEQ ID NO: 76945 - DNA, 17 bp, Arabidopsis thaliana
cgacgagatgatcaaaa

SEQ ID NO: 76946 - DNA, 17 bp, Arabidopsis thaliana
cgacgagattgccatca

SEQ ID NO: 76947 - DNA, 17 bp, Arabidopsis thaliana
cgacgagcaactgtagc

SEQ ID NO: 76948 - DNA, 17 bp, Arabidopsis thaliana
cgacgagccaggacgtc

SEQ ID NO: 76949 - DNA, 17 bp, Arabidopsis thaliana
cgacgagctttggtgat

SEQ ID NO: 76950 - DNA, 17 bp, Arabidopsis thaliana
cgacgaggaatcgtcga

SEQ ID NO: 76951 - DNA, 17 bp, Arabidopsis thaliana
cgacgagggcacgtctg

SEQ ID NO: 76952 - DNA, 17 bp, Arabidopsis thaliana
cgacgaggtcgagaaag

SEQ ID NO: 76953 - DNA, 17 bp, Arabidopsis thaliana
cgacgaggtggactaag

SEQ ID NO: 76954 - DNA, 17 bp, Arabidopsis thaliana
cgacgagtgagctatgc

SEQ ID NO: 76955 - DNA, 17 bp, Arabidopsis thaliana
cgacgagtggatcatta

SEQ ID NO: 76956 - DNA, 17 bp, Arabidopsis thaliana
cgacgagtggtgatacc

SEQ ID NO: 76957 - DNA, 17 bp, Arabidopsis thaliana
cgacgatcggtccgcca

SEQ ID NO: 76958 - DNA, 17 bp, Arabidopsis thaliana
cgacgatctctaagctt

SEQ ID NO: 76959 - DNA, 17 bp, Arabidopsis thaliana
cgacgatctgtcactgg

SEQ ID NO: 76960 - DNA, 17 bp, Arabidopsis thaliana
cgacgatggcggtggtg

SEQ ID NO: 76961 - DNA, 17 bp, Arabidopsis thaliana
cgacgatggtgttccgg

SEQ ID NO: 76962 - DNA, 17 bp, Arabidopsis thaliana
cgacgatggttcagact

SEQ ID NO: 76963 - DNA, 17 bp, Arabidopsis thaliana
cgacgatgtccctggtt

SEQ ID NO: 76964 - DNA, 17 bp, Arabidopsis thaliana
cgacgattcaatgtgtg

SEQ ID NO: 76965 - DNA, 17 bp, Arabidopsis thaliana
cgacgattcagcagttt

SEQ ID NO: 76966 - DNA, 17 bp, Arabidopsis thaliana
cgacgattcctcggacc

SEQ ID NO: 76967 - DNA, 17 bp, Arabidopsis thaliana
cgacgattcctcgtcct

SEQ ID NO: 76968 - DNA, 17 bp, Arabidopsis thaliana
cgacgattggctatgga

SEQ ID NO: 76969 - DNA, 17 bp, Arabidopsis thaliana
cgacgattgtgcaacgt

SEQ ID NO: 76970 - DNA, 17 bp, Arabidopsis thaliana
cgacgattgtgctaagc

SEQ ID NO: 76971 - DNA, 17 bp, Arabidopsis thaliana
cgacgatttcaactcct

SEQ ID NO: 76972 - DNA, 17 bp, Arabidopsis thaliana
cgacgatttcaagtcct

SEQ ID NO: 76973 - DNA, 17 bp, Arabidopsis thaliana
cgacgatttctaagctt

SEQ ID NO: 76974 - DNA, 17 bp, Arabidopsis thaliana
cgacgatttctctgtcg

SEQ ID NO: 76975 - DNA, 17 bp, Arabidopsis thaliana
cgacgcaagtctcacgc

SEQ ID NO: 76976 - DNA, 17 bp, Arabidopsis thaliana
cgacgcagacgattttc

SEQ ID NO: 76977 - DNA, 17 bp, Arabidopsis thaliana
cgacgcagattacggtg

SEQ ID NO: 76978 - DNA, 17 bp, Arabidopsis thaliana
cgacgcaggatcggtcc

SEQ ID NO: 76979 - DNA, 17 bp, Arabidopsis thaliana
cgacgcaggttacggtg

SEQ ID NO: 76980 - DNA, 17 bp, Arabidopsis thaliana
cgacgcatgcacccgcc

SEQ ID NO: 76981 - DNA, 17 bp, Arabidopsis thaliana
cgacgcatgcgcccgca

SEQ ID NO: 76982 - DNA, 17 bp, Arabidopsis thaliana
cgacgcatgcgcccgcc

SEQ ID NO: 76983 - DNA, 17 bp, Arabidopsis thaliana
cgacgcatgcgcccgct

SEQ ID NO: 76984 - DNA, 17 bp, Arabidopsis thaliana
cgacgcatggacgagtt

SEQ ID NO: 76985 - DNA, 17 bp, Arabidopsis thaliana
cgacgccagtctcacgc

SEQ ID NO: 76986 - DNA, 17 bp, Arabidopsis thaliana
cgacgcccggggaaagc

SEQ ID NO: 76987 - DNA, 17 bp, Arabidopsis thaliana
cgacgccctagctgctc

SEQ ID NO: 76988 - DNA, 17 bp, Arabidopsis thaliana
cgacgccgagagggtgc

SEQ ID NO: 76989 - DNA, 17 bp, Arabidopsis thaliana
cgacgccggcctcacgc

SEQ ID NO: 76990 - DNA, 17 bp, Arabidopsis thaliana
cgacgcctcgtaaattg

SEQ ID NO: 76991 - DNA, 17 bp, Arabidopsis thaliana
cgacgcctcgtgacccg

SEQ ID NO: 76992 - DNA, 17 bp, Arabidopsis thaliana
cgacgcgaattacggtg

SEQ ID NO: 76993 - DNA, 17 bp, Arabidopsis thaliana
cgacgcggattaaggtg

SEQ ID NO: 76994 - DNA, 17 bp, Arabidopsis thaliana
cgacgcggattacgatg

SEQ ID NO: 76995 - DNA, 17 bp, Arabidopsis thaliana
cgacgcggattacgccc

SEQ ID NO: 76996 - DNA, 17 bp, Arabidopsis thaliana
cgacgcggattacggcg

SEQ ID NO: 76997 - DNA, 17 bp, Arabidopsis thaliana
cgacgcggattacgggc

SEQ ID NO: 76998 - DNA, 17 bp, Arabidopsis thaliana
cgacgcggattacgggg

SEQ ID NO: 76999 - DNA, 17 bp, Arabidopsis thaliana
cgacgcggattacggta

SEQ ID NO: 77000 - DNA, 17 bp, Arabidopsis thaliana
cgacgcggattacggtc

SEQ ID NO: 77001 - DNA, 17 bp, Arabidopsis thaliana
cgacgcggattacggtg

SEQ ID NO: 77002 - DNA, 17 bp, Arabidopsis thaliana
cgacgcggattacggtt

SEQ ID NO: 77003 - DNA, 17 bp, Arabidopsis thaliana
cgacgcggattacgttg

SEQ ID NO: 77004 - DNA, 17 bp, Arabidopsis thaliana
cgacgcggattacgttt

SEQ ID NO: 77005 - DNA, 17 bp, Arabidopsis thaliana
cgacgcggattagggtg

SEQ ID NO: 77006 - DNA, 17 bp, Arabidopsis thaliana
cgacgcggattatggtg

SEQ ID NO: 77007 - DNA, 17 bp, Arabidopsis thaliana
cgacgcgggcatcagta

SEQ ID NO: 77008 - DNA, 17 bp, Arabidopsis thaliana
cgacgcgggttacggtg

SEQ ID NO: 77009 - DNA, 17 bp, Arabidopsis thaliana
cgacgcgtggacgagct

SEQ ID NO: 77010 - DNA, 17 bp, Arabidopsis thaliana
cgacgcgttttatgtgt

SEQ ID NO: 77011 - DNA, 17 bp, Arabidopsis thaliana
cgacgctctcagattgt

SEQ ID NO: 77012 - DNA, 17 bp, Arabidopsis thaliana
cgacgctctggatacat

SEQ ID NO: 77013 - DNA, 17 bp, Arabidopsis thaliana
cgacgctgattacggtg

SEQ ID NO: 77014 - DNA, 17 bp, Arabidopsis thaliana
cgacgctgccgtgatcg

SEQ ID NO: 77015 - DNA, 17 bp, Arabidopsis thaliana
cgacgctgctgatgttt

SEQ ID NO: 77016 - DNA, 17 bp, Arabidopsis thaliana
cgacgctggggtgcgaa

SEQ ID NO: 77017 - DNA, 17 bp, Arabidopsis thaliana
cgacgcttccgccgaac

SEQ ID NO: 77018 - DNA, 17 bp, Arabidopsis thaliana
cgacggaagaattcatc

SEQ ID NO: 77019 - DNA, 17 bp, Arabidopsis thaliana
cgacggaagtttgcgtt

SEQ ID NO: 77020 - DNA, 17 bp, Arabidopsis thaliana
cgacggaatacttcgat

SEQ ID NO: 77021 - DNA, 17 bp, Arabidopsis thaliana
cgacggaccgtggtcgg

SEQ ID NO: 77022 - DNA, 17 bp, Arabidopsis thaliana
cgacggacggctgacgg

SEQ ID NO: 77023 - DNA, 17 bp, Arabidopsis thaliana
cgacggacggtggttta

SEQ ID NO: 77024 - DNA, 17 bp, Arabidopsis thaliana
cgacggacgtccgacgg

SEQ ID NO: 77025 - DNA, 17 bp, Arabidopsis thaliana
cgacggactgcgcggtt

SEQ ID NO: 77026 - DNA, 17 bp, Arabidopsis thaliana
cgacggactggcaggat

SEQ ID NO: 77027 - DNA, 17 bp, Arabidopsis thaliana
cgacggactggtgggcc

SEQ ID NO: 77028 - DNA, 17 bp, Arabidopsis thaliana
cgacggagaaccggcgg

SEQ ID NO: 77029 - DNA, 17 bp, Arabidopsis thaliana
cgacggagagtgtagac

SEQ ID NO: 77030 - DNA, 17 bp, Arabidopsis thaliana
cgacggagagtgtagag

SEQ ID NO: 77031 - DNA, 17 bp, Arabidopsis thaliana
cgacggaggaaaaggcg

SEQ ID NO: 77032 - DNA, 17 bp, Arabidopsis thaliana
cgacggatatcaaggga

SEQ ID NO: 77033 - DNA, 17 bp, Arabidopsis thaliana
cgacggatcgcatgact

SEQ ID NO: 77034 - DNA, 17 bp, Arabidopsis thaliana
cgacggatcgcatggcc

SEQ ID NO: 77035 - DNA, 17 bp, Arabidopsis thaliana
cgacggatttggcgaga

SEQ ID NO: 77036 - DNA, 17 bp, Arabidopsis thaliana
cgacggcacggtttcct

SEQ ID NO: 77037 - DNA, 17 bp, Arabidopsis thaliana
cgacggcacgtctgcct

SEQ ID NO: 77038 - DNA, 17 bp, Arabidopsis thaliana
cgacggcaggcgcacga

SEQ ID NO: 77039 - DNA, 17 bp, Arabidopsis thaliana
cgacggcatgggattca

SEQ ID NO: 77040 - DNA, 17 bp, Arabidopsis thaliana
cgacggccgaagatagt

SEQ ID NO: 77041 - DNA, 17 bp, Arabidopsis thaliana
cgacggcgaagatgggt

SEQ ID NO: 77042 - DNA, 17 bp, Arabidopsis thaliana
cgacggcgacaacgcga

SEQ ID NO: 77043 - DNA, 17 bp, Arabidopsis thaliana
cgacggcgagtggcaga

SEQ ID NO: 77044 - DNA, 17 bp, Arabidopsis thaliana
cgacggcgatatgttgt

SEQ ID NO: 77045 - DNA, 17 bp, Arabidopsis thaliana
cgacggcgcacggtgac

SEQ ID NO: 77046 - DNA, 17 bp, Arabidopsis thaliana
cgacggcggcgatggtg

SEQ ID NO: 77047 - DNA, 17 bp, Arabidopsis thaliana
cgacggcgggtcaacgg

SEQ ID NO: 77048 - DNA, 17 bp, Arabidopsis thaliana
cgacggcgtttaaaggt

SEQ ID NO: 77049 - DNA, 17 bp, Arabidopsis thaliana
cgacggctagggtttac

SEQ ID NO: 77050 - DNA, 17 bp, Arabidopsis thaliana
cgacgggacaacctgct

SEQ ID NO: 77051 - DNA, 17 bp, Arabidopsis thaliana
cgacgggattgaaggtc

SEQ ID NO: 77052 - DNA, 17 bp, Arabidopsis thaliana
cgacgggccgatggacc

SEQ ID NO: 77053 - DNA, 17 bp, Arabidopsis thaliana
cgacgggccgatggact

SEQ ID NO: 77054 - DNA, 17 bp, Arabidopsis thaliana
cgacgggggtcccagtt

SEQ ID NO: 77055 - DNA, 17 bp, Arabidopsis thaliana
cgacgggtccaccagcc

SEQ ID NO: 77056 - DNA, 17 bp, Arabidopsis thaliana
cgacggtcatctttagg

SEQ ID NO: 77057 - DNA, 17 bp, Arabidopsis thaliana
cgacggtccatatacgg

SEQ ID NO: 77058 - DNA, 17 bp, Arabidopsis thaliana
cgacggtcggtatgcca

SEQ ID NO: 77059 - DNA, 17 bp, Arabidopsis thaliana
cgacggtctaacccccc

SEQ ID NO: 77060 - DNA, 17 bp, Arabidopsis thaliana
cgacggtgagacagagg

SEQ ID NO: 77061 - DNA, 17 bp, Arabidopsis thaliana
cgacggtgaggcttgct

SEQ ID NO: 77062 - DNA, 17 bp, Arabidopsis thaliana
cgacggtgaggcttgtt

SEQ ID NO: 77063 - DNA, 17 bp, Arabidopsis thaliana
cgacggtgatgtgtagg

SEQ ID NO: 77064 - DNA, 17 bp, Arabidopsis thaliana
cgacggtgccggctctc

SEQ ID NO: 77065 - DNA, 17 bp, Arabidopsis thaliana
cgacggtgtctttgatt

SEQ ID NO: 77066 - DNA, 17 bp, Arabidopsis thaliana
cgacggttctctcaaac

SEQ ID NO: 77067 - DNA, 17 bp, Arabidopsis thaliana
cgacggttctctcaaat

SEQ ID NO: 77068 - DNA, 17 bp, Arabidopsis thaliana
cgacggttctgaccgaa

SEQ ID NO: 77069 - DNA, 17 bp, Arabidopsis thaliana
cgacggttgcagtgatt

SEQ ID NO: 77070 - DNA, 17 bp, Arabidopsis thaliana
cgacgtagggaaagcgg

SEQ ID NO: 77071 - DNA, 17 bp, Arabidopsis thaliana
cgacgtagttccggcga

SEQ ID NO: 77072 - DNA, 17 bp, Arabidopsis thaliana
cgacgtcacggtgtttg

SEQ ID NO: 77073 - DNA, 17 bp, Arabidopsis thaliana
cgacgtcctggctcgtc

SEQ ID NO: 77074 - DNA, 17 bp, Arabidopsis thaliana
cgacgtcgacttctttt

SEQ ID NO: 77075 - DNA, 17 bp, Arabidopsis thaliana
cgacgtcgcgagaagtc

SEQ ID NO: 77076 - DNA, 17 bp, Arabidopsis thaliana
cgacgtcgttttgggtt

SEQ ID NO: 77077 - DNA, 17 bp, Arabidopsis thaliana
cgacgtctgcctgggtg

SEQ ID NO: 77078 - DNA, 17 bp, Arabidopsis thaliana
cgacgtgaataggctgg

SEQ ID NO: 77079 - DNA, 17 bp, Arabidopsis thaliana
cgacgtgaatgaccaag

SEQ ID NO: 77080 - DNA, 17 bp, Arabidopsis thaliana
cgacgtgcaatggggtg

SEQ ID NO: 77081 - DNA, 17 bp, Arabidopsis thaliana
cgacgtgctgtccacca

SEQ ID NO: 77082 - DNA, 17 bp, Arabidopsis thaliana
cgacgtgctgtccatca

SEQ ID NO: 77083 - DNA, 17 bp, Arabidopsis thaliana
cgacgtggattacggtg

SEQ ID NO: 77084 - DNA, 17 bp, Arabidopsis thaliana
cgacgtgggtggttcgc

SEQ ID NO: 77085 - DNA, 17 bp, Arabidopsis thaliana
cgacgtgtcttatttgg

SEQ ID NO: 77086 - DNA, 17 bp, Arabidopsis thaliana
cgacgttgctttttgat

SEQ ID NO: 77087 - DNA, 17 bp, Arabidopsis thaliana
cgacgtttctctttatc

SEQ ID NO: 77088 - DNA, 17 bp, Arabidopsis thaliana
cgacgtttgtttgatcg

SEQ ID NO: 77089 - DNA, 17 bp, Arabidopsis thaliana
cgactaaaaattatgat

SEQ ID NO: 77090 - DNA, 17 bp, Arabidopsis thaliana
cgactaaaaattgcagt

SEQ ID NO: 77091 - DNA, 17 bp, Arabidopsis thaliana
cgactaaaaattgcggt

SEQ ID NO: 77092 - DNA, 17 bp, Arabidopsis thaliana
cgactaaacagccgacg

SEQ ID NO: 77093 - DNA, 17 bp, Arabidopsis thaliana
cgactaacaaggtttaa

SEQ ID NO: 77094 - DNA, 17 bp, Arabidopsis thaliana
cgactaagacaatgatg

SEQ ID NO: 77095 - DNA, 17 bp, Arabidopsis thaliana
cgactaagaccgaggga

SEQ ID NO: 77096 - DNA, 17 bp, Arabidopsis thaliana
cgactaagaccgatgga

SEQ ID NO: 77097 - DNA, 17 bp, Arabidopsis thaliana
cgactaagtttgggtaa

SEQ ID NO: 77098 - DNA, 17 bp, Arabidopsis thaliana
cgactaagttttaatcc

SEQ ID NO: 77099 - DNA, 17 bp, Arabidopsis thaliana
cgactaataagcttgtg

SEQ ID NO: 77100 - DNA, 17 bp, Arabidopsis thaliana
cgactaatgcttgttgt

SEQ ID NO: 77101 - DNA, 17 bp, Arabidopsis thaliana
cgactaatgggaattct

SEQ ID NO: 77102 - DNA, 17 bp, Arabidopsis thaliana
cgactaattacaagccg

SEQ ID NO: 77103 - DNA, 17 bp, Arabidopsis thaliana
cgactaattacaggccg

SEQ ID NO: 77104 - DNA, 17 bp, Arabidopsis thaliana
cgactaattttagcgtc

SEQ ID NO: 77105 - DNA, 17 bp, Arabidopsis thaliana
cgactacaggatgcgac

SEQ ID NO: 77106 - DNA, 17 bp, Arabidopsis thaliana
cgactacaggtgttgct

SEQ ID NO: 77107 - DNA, 17 bp, Arabidopsis thaliana
cgactaccacctgattt

SEQ ID NO: 77108 - DNA, 17 bp, Arabidopsis thaliana
cgactaccggagattgc

SEQ ID NO: 77109 - DNA, 17 bp, Arabidopsis thaliana
cgactactaatctgact

SEQ ID NO: 77110 - DNA, 17 bp, Arabidopsis thaliana
cgactactcagatggga

SEQ ID NO: 77111 - DNA, 17 bp, Arabidopsis thaliana
cgactactcaggattct

SEQ ID NO: 77112 - DNA, 17 bp, Arabidopsis thaliana
cgactacttcacccaac

SEQ ID NO: 77113 - DNA, 17 bp, Arabidopsis thaliana
cgactagagaaagtgga

SEQ ID NO: 77114 - DNA, 17 bp, Arabidopsis thaliana
cgactagatgtctcagg

SEQ ID NO: 77115 - DNA, 17 bp, Arabidopsis thaliana
cgactagcaacactact

SEQ ID NO: 77116 - DNA, 17 bp, Arabidopsis thaliana
cgactagcagaaggtcg

SEQ ID NO: 77117 - DNA, 17 bp, Arabidopsis thaliana
cgactagccagtccgat

SEQ ID NO: 77118 - DNA, 17 bp, Arabidopsis thaliana
cgactaggctacaaacg

SEQ ID NO: 77119 - DNA, 17 bp, Arabidopsis thaliana
cgactaggggtgttatg

SEQ ID NO: 77120 - DNA, 17 bp, Arabidopsis thaliana
cgactaggttaagttga

SEQ ID NO: 77121 - DNA, 17 bp, Arabidopsis thaliana
cgactagttcctgagat

SEQ ID NO: 77122 - DNA, 17 bp, Arabidopsis thaliana
cgactataattggtgct

SEQ ID NO: 77123 - DNA, 17 bp, Arabidopsis thaliana
cgactatatcggtgcga

SEQ ID NO: 77124 - DNA, 17 bp, Arabidopsis thaliana
cgactatcctaaggctc

SEQ ID NO: 77125 - DNA, 17 bp, Arabidopsis thaliana
cgactatcgctatttct

SEQ ID NO: 77126 - DNA, 17 bp, Arabidopsis thaliana
cgactatcgctattttt

SEQ ID NO: 77127 - DNA, 17 bp, Arabidopsis thaliana
cgactatgaatggggtt

SEQ ID NO: 77128 - DNA, 17 bp, Arabidopsis thaliana
cgactatgatggcggat

SEQ ID NO: 77129 - DNA, 17 bp, Arabidopsis thaliana
cgactatgccactccac

SEQ ID NO: 77130 - DNA, 17 bp, Arabidopsis thaliana
cgactatgctgcagtca

SEQ ID NO: 77131 - DNA, 17 bp, Arabidopsis thaliana
cgactattagctcagtg

SEQ ID NO: 77132 - DNA, 17 bp, Arabidopsis thaliana
cgactatttcaagagtt

SEQ ID NO: 77133 - DNA, 17 bp, Arabidopsis thaliana
cgactatttcctgcgtc

SEQ ID NO: 77134 - DNA, 17 bp, Arabidopsis thaliana
cgactatttcctgcttc

SEQ ID NO: 77135 - DNA, 17 bp, Arabidopsis thaliana
cgactattttcatgaca

SEQ ID NO: 77136 - DNA, 17 bp, Arabidopsis thaliana
cgactcaacggctgcga

SEQ ID NO: 77137 - DNA, 17 bp, Arabidopsis thaliana
cgactcacctttagggt

SEQ ID NO: 77138 - DNA, 17 bp, Arabidopsis thaliana
cgactcaggagggatag

SEQ ID NO: 77139 - DNA, 17 bp, Arabidopsis thaliana
cgactcataggcagtga

SEQ ID NO: 77140 - DNA, 17 bp, Arabidopsis thaliana
cgactcataggcagtgg

SEQ ID NO: 77141 - DNA, 17 bp, Arabidopsis thaliana
cgactcatcagtgtgac

SEQ ID NO: 77142 - DNA, 17 bp, Arabidopsis thaliana
cgactcatcctatttgc

SEQ ID NO: 77143 - DNA, 17 bp, Arabidopsis thaliana
cgactcattgacggcgg

SEQ ID NO: 77144 - DNA, 17 bp, Arabidopsis thaliana
cgactccaggagggtgt

SEQ ID NO: 77145 - DNA, 17 bp, Arabidopsis thaliana
cgactccagggctacgc

SEQ ID NO: 77146 - DNA, 17 bp, Arabidopsis thaliana
cgactccaggtcaggcg

SEQ ID NO: 77147 - DNA, 17 bp, Arabidopsis thaliana
cgactccattttgttgc

SEQ ID NO: 77148 - DNA, 17 bp, Arabidopsis thaliana
cgactcccggcagaccc

SEQ ID NO: 77149 - DNA, 17 bp, Arabidopsis thaliana
cgactcccggcagacgc

SEQ ID NO: 77150 - DNA, 17 bp, Arabidopsis thaliana
cgactcccggtaggacc

SEQ ID NO: 77151 - DNA, 17 bp, Arabidopsis thaliana
cgactccgatgaaggct

SEQ ID NO: 77152 - DNA, 17 bp, Arabidopsis thaliana
cgactccgctcaagtgt

SEQ ID NO: 77153 - DNA, 17 bp, Arabidopsis thaliana
cgactccgtccttggcc

SEQ ID NO: 77154 - DNA, 17 bp, Arabidopsis thaliana
cgactcgaaatgtttag

SEQ ID NO: 77155 - DNA, 17 bp, Arabidopsis thaliana
cgactcgagagcgagtt

SEQ ID NO: 77156 - DNA, 17 bp, Arabidopsis thaliana
cgactcggattacggtg

SEQ ID NO: 77157 - DNA, 17 bp, Arabidopsis thaliana
cgactcgggggtcccag

SEQ ID NO: 77158 - DNA, 17 bp, Arabidopsis thaliana
cgactcggttatctgca

SEQ ID NO: 77159 - DNA, 17 bp, Arabidopsis thaliana
cgactcggttattgcag

SEQ ID NO: 77160 - DNA, 17 bp, Arabidopsis thaliana
cgactcgtgttggccgc

SEQ ID NO: 77161 - DNA, 17 bp, Arabidopsis thaliana
cgactctagccgtttta

SEQ ID NO: 77162 - DNA, 17 bp, Arabidopsis thaliana
cgactctcacagacccc

SEQ ID NO: 77163 - DNA, 17 bp, Arabidopsis thaliana
cgactctcggcaacgaa

SEQ ID NO: 77164 - DNA, 17 bp, Arabidopsis thaliana
cgactctcggcaacgga

SEQ ID NO: 77165 - DNA, 17 bp, Arabidopsis thaliana
cgactctcggcaacggg

SEQ ID NO: 77166 - DNA, 17 bp, Arabidopsis thaliana
cgactctcggtaacgga

SEQ ID NO: 77167 - DNA, 17 bp, Arabidopsis thaliana
cgactctctgcaacgga

SEQ ID NO: 77168 - DNA, 17 bp, Arabidopsis thaliana
cgactctcttttgaaca

SEQ ID NO: 77169 - DNA, 17 bp, Arabidopsis thaliana
cgactctgaactgtatg

SEQ ID NO: 77170 - DNA, 17 bp, Arabidopsis thaliana
cgactctgaatggagac

SEQ ID NO: 77171 - DNA, 17 bp, Arabidopsis thaliana
cgactctgacggtccta

SEQ ID NO: 77172 - DNA, 17 bp, Arabidopsis thaliana
cgactctgacgtcacag

SEQ ID NO: 77173 - DNA, 17 bp, Arabidopsis thaliana
cgactctggttgtccac

SEQ ID NO: 77174 - DNA, 17 bp, Arabidopsis thaliana
cgactcttccggctatt

SEQ ID NO: 77175 - DNA, 17 bp, Arabidopsis thaliana
cgactcttcgaactttc

SEQ ID NO: 77176 - DNA, 17 bp, Arabidopsis thaliana
cgactcttcgaactttg

SEQ ID NO: 77177 - DNA, 17 bp, Arabidopsis thaliana
cgactgaacaatatcac

SEQ ID NO: 77178 - DNA, 17 bp, Arabidopsis thaliana
cgactgaagatggagat

SEQ ID NO: 77179 - DNA, 17 bp, Arabidopsis thaliana
cgactgactctctcctt

SEQ ID NO: 77180 - DNA, 17 bp, Arabidopsis thaliana
cgactgactttttgtcg

SEQ ID NO: 77181 - DNA, 17 bp, Arabidopsis thaliana
cgactgagcaaaaggac

SEQ ID NO: 77182 - DNA, 17 bp, Arabidopsis thaliana
cgactgagcaggcgaat

SEQ ID NO: 77183 - DNA, 17 bp, Arabidopsis thaliana
cgactgagtaaggagtg

SEQ ID NO: 77184 - DNA, 17 bp, Arabidopsis thaliana
cgactgatattgggcgg

SEQ ID NO: 77185 - DNA, 17 bp, Arabidopsis thaliana
cgactgatcataagcca

SEQ ID NO: 77186 - DNA, 17 bp, Arabidopsis thaliana
cgactgatccggtcagc

SEQ ID NO: 77187 - DNA, 17 bp, Arabidopsis thaliana
cgactgatcgctaaata

SEQ ID NO: 77188 - DNA, 17 bp, Arabidopsis thaliana
cgactgattccgtcgat

SEQ ID NO: 77189 - DNA, 17 bp, Arabidopsis thaliana
cgactgcaaatatgtga

SEQ ID NO: 77190 - DNA, 17 bp, Arabidopsis thaliana
cgactgcacagtctgtt

SEQ ID NO: 77191 - DNA, 17 bp, Arabidopsis thaliana
cgactgcacagtttgtt

SEQ ID NO: 77192 - DNA, 17 bp, Arabidopsis thaliana
cgactgcactgtttgtt

SEQ ID NO: 77193 - DNA, 17 bp, Arabidopsis thaliana
cgactgcgtcgtataag

SEQ ID NO: 77194 - DNA, 17 bp, Arabidopsis thaliana
cgactgctaacgtcgca

SEQ ID NO: 77195 - DNA, 17 bp, Arabidopsis thaliana
cgactgctccggtctca

SEQ ID NO: 77196 - DNA, 17 bp, Arabidopsis thaliana
cgactggaacctcgtcg

SEQ ID NO: 77197 - DNA, 17 bp, Arabidopsis thaliana
cgactgggtttctttgt

SEQ ID NO: 77198 - DNA, 17 bp, Arabidopsis thaliana
cgactggtaactgtgtt

SEQ ID NO: 77199 - DNA, 17 bp, Arabidopsis thaliana
cgactggtgatcagcgg

SEQ ID NO: 77200 - DNA, 17 bp, Arabidopsis thaliana
cgactggtggcgatggg

SEQ ID NO: 77201 - DNA, 17 bp, Arabidopsis thaliana
cgactggttgatcagcg

SEQ ID NO: 77202 - DNA, 17 bp, Arabidopsis thaliana
cgactggttgatcctgc

SEQ ID NO: 77203 - DNA, 17 bp, Arabidopsis thaliana
cgactgtaaaaaaaaac

SEQ ID NO: 77204 - DNA, 17 bp, Arabidopsis thaliana
cgactgtaacgtggtgt

SEQ ID NO: 77205 - DNA, 17 bp, Arabidopsis thaliana
cgactgtaattcggtca

SEQ ID NO: 77206 - DNA, 17 bp, Arabidopsis thaliana
cgactgtcaaggcgggt

SEQ ID NO: 77207 - DNA, 17 bp, Arabidopsis thaliana
cgactgtcagttgggtc

SEQ ID NO: 77208 - DNA, 17 bp, Arabidopsis thaliana
cgactgtcgccagcgac

SEQ ID NO: 77209 - DNA, 17 bp, Arabidopsis thaliana
cgactgtcgctaatttt

SEQ ID NO: 77210 - DNA, 17 bp, Arabidopsis thaliana
cgactgtcgctactttt

SEQ ID NO: 77211 - DNA, 17 bp, Arabidopsis thaliana
cgactgtcgctagtttt

SEQ ID NO: 77212 - DNA, 17 bp, Arabidopsis thaliana
cgactgtcggtccacta

SEQ ID NO: 77213 - DNA, 17 bp, Arabidopsis thaliana
cgactgtcttaggttcc

SEQ ID NO: 77214 - DNA, 17 bp, Arabidopsis thaliana
cgactgtgaaactgcga

SEQ ID NO: 77215 - DNA, 17 bp, Arabidopsis thaliana
cgactgtgggtggatct

SEQ ID NO: 77216 - DNA, 17 bp, Arabidopsis thaliana
cgactgtgttcggttgt

SEQ ID NO: 77217 - DNA, 17 bp, Arabidopsis thaliana
cgactgttcgactttgg

SEQ ID NO: 77218 - DNA, 17 bp, Arabidopsis thaliana
cgactgttgtctggctc

SEQ ID NO: 77219 - DNA, 17 bp, Arabidopsis thaliana
cgactgttgttgcgtcc

SEQ ID NO: 77220 - DNA, 17 bp, Arabidopsis thaliana
cgactgtttaccaaaaa

SEQ ID NO: 77221 - DNA, 17 bp, Arabidopsis thaliana
cgactgtttaccaacca

SEQ ID NO: 77222 - DNA, 17 bp, Arabidopsis thaliana
cgactgtttggcaatat

SEQ ID NO: 77223 - DNA, 17 bp, Arabidopsis thaliana
cgactgtttttgtatct

SEQ ID NO: 77224 - DNA, 17 bp, Arabidopsis thaliana
cgacttaaaatcatatg

SEQ ID NO: 77225 - DNA, 17 bp, Arabidopsis thaliana
cgacttaaatacgcgac

SEQ ID NO: 77226 - DNA, 17 bp, Arabidopsis thaliana
cgacttaagaaggtaag

SEQ ID NO: 77227 - DNA, 17 bp, Arabidopsis thaliana
cgacttaatccagttca

SEQ ID NO: 77228 - DNA, 17 bp, Arabidopsis thaliana
cgacttacaaacattat

SEQ ID NO: 77229 - DNA, 17 bp, Arabidopsis thaliana
cgacttacaagatcggg

SEQ ID NO: 77230 - DNA, 17 bp, Arabidopsis thaliana
cgacttacattctggta

SEQ ID NO: 77231 - DNA, 17 bp, Arabidopsis thaliana
cgacttagacgggaagt

SEQ ID NO: 77232 - DNA, 17 bp, Arabidopsis thaliana
cgacttagttgcttggg

SEQ ID NO: 77233 - DNA, 17 bp, Arabidopsis thaliana
cgacttagtttccttgg

SEQ ID NO: 77234 - DNA, 17 bp, Arabidopsis thaliana
cgacttatcacgttgtt

SEQ ID NO: 77235 - DNA, 17 bp, Arabidopsis thaliana
cgacttatccggattgt

SEQ ID NO: 77236 - DNA, 17 bp, Arabidopsis thaliana
cgacttatcttatgctc

SEQ ID NO: 77237 - DNA, 17 bp, Arabidopsis thaliana
cgacttatggaagggac

SEQ ID NO: 77238 - DNA, 17 bp, Arabidopsis thaliana
cgacttatggaagggat

SEQ ID NO: 77239 - DNA, 17 bp, Arabidopsis thaliana
cgacttcaggtgtcctt

SEQ ID NO: 77240 - DNA, 17 bp, Arabidopsis thaliana
cgacttcagtttaactc

SEQ ID NO: 77241 - DNA, 17 bp, Arabidopsis thaliana
cgacttcccccccaccc

SEQ ID NO: 77242 - DNA, 17 bp, Arabidopsis thaliana
cgacttccccccccccc

SEQ ID NO: 77243 - DNA, 17 bp, Arabidopsis thaliana
cgacttccccggggggt

SEQ ID NO: 77244 - DNA, 17 bp, Arabidopsis thaliana
cgacttcccctcggggt

SEQ ID NO: 77245 - DNA, 17 bp, Arabidopsis thaliana
cgacttcccctggcggt

SEQ ID NO: 77246 - DNA, 17 bp, Arabidopsis thaliana
cgacttcccctggggct

SEQ ID NO: 77247 - DNA, 17 bp, Arabidopsis thaliana
cgacttcccctgggggt

SEQ ID NO: 77248 - DNA, 17 bp, Arabidopsis thaliana
cgacttccctgggggta

SEQ ID NO: 77249 - DNA, 17 bp, Arabidopsis thaliana
cgacttccgctggtgag

SEQ ID NO: 77250 - DNA, 17 bp, Arabidopsis thaliana
cgacttcctccatggca

SEQ ID NO: 77251 - DNA, 17 bp, Arabidopsis thaliana
cgacttcctgggggtac

SEQ ID NO: 77252 - DNA, 17 bp, Arabidopsis thaliana
cgacttcctttgggggt

SEQ ID NO: 77253 - DNA, 17 bp, Arabidopsis thaliana
cgacttcgaagcttcga

SEQ ID NO: 77254 - DNA, 17 bp, Arabidopsis thaliana
cgacttcgatgtgtttg

SEQ ID NO: 77255 - DNA, 17 bp, Arabidopsis thaliana
cgacttcgggcatggcc

SEQ ID NO: 77256 - DNA, 17 bp, Arabidopsis thaliana
cgacttcgtgatcggac

SEQ ID NO: 77257 - DNA, 17 bp, Arabidopsis thaliana
cgacttctaagcttcgc

SEQ ID NO: 77258 - DNA, 17 bp, Arabidopsis thaliana
cgacttctcctgggggt

SEQ ID NO: 77259 - DNA, 17 bp, Arabidopsis thaliana
cgacttcttctgggggt

SEQ ID NO: 77260 - DNA, 17 bp, Arabidopsis thaliana
cgacttgactctagtcc

SEQ ID NO: 77261 - DNA, 17 bp, Arabidopsis thaliana
cgacttgagcagtcaaa

SEQ ID NO: 77262 - DNA, 17 bp, Arabidopsis thaliana
cgacttggcatgacacg

SEQ ID NO: 77263 - DNA, 17 bp, Arabidopsis thaliana
cgacttggctggaaggc

SEQ ID NO: 77264 - DNA, 17 bp, Arabidopsis thaliana
cgacttggtgcaggtcg

SEQ ID NO: 77265 - DNA, 17 bp, Arabidopsis thaliana
cgacttgtaagttttta

SEQ ID NO: 77266 - DNA, 17 bp, Arabidopsis thaliana
cgacttgtactttcggt

SEQ ID NO: 77267 - DNA, 17 bp, Arabidopsis thaliana
cgacttgtcattgcttg

SEQ ID NO: 77268 - DNA, 17 bp, Arabidopsis thaliana
cgacttgtcccttcgct

SEQ ID NO: 77269 - DNA, 17 bp, Arabidopsis thaliana
cgacttgtcccttcggt

SEQ ID NO: 77270 - DNA, 17 bp, Arabidopsis thaliana
cgacttgtcccttcgtt

SEQ ID NO: 77271 - DNA, 17 bp, Arabidopsis thaliana
cgacttgtctacagttt

SEQ ID NO: 77272 - DNA, 17 bp, Arabidopsis thaliana
cgacttgttcgcctcac

SEQ ID NO: 77273 - DNA, 17 bp, Arabidopsis thaliana
cgacttgttgacagttg

SEQ ID NO: 77274 - DNA, 17 bp, Arabidopsis thaliana
cgacttgttgttgctat

SEQ ID NO: 77275 - DNA, 17 bp, Arabidopsis thaliana
cgacttgtttcctttgt

SEQ ID NO: 77276 - DNA, 17 bp, Arabidopsis thaliana
cgactttaataggtgga

SEQ ID NO: 77277 - DNA, 17 bp, Arabidopsis thaliana
cgactttacaagctgcg

SEQ ID NO: 77278 - DNA, 17 bp, Arabidopsis thaliana
cgactttagtcgcatat

SEQ ID NO: 77279 - DNA, 17 bp, Arabidopsis thaliana
cgactttcaagttcgtc

SEQ ID NO: 77280 - DNA, 17 bp, Arabidopsis thaliana
cgactttcggcagacgc

SEQ ID NO: 77281 - DNA, 17 bp, Arabidopsis thaliana
cgactttcggtaggacc

SEQ ID NO: 77282 - DNA, 17 bp, Arabidopsis thaliana
cgactttctgggctgta

SEQ ID NO: 77283 - DNA, 17 bp, Arabidopsis thaliana
cgactttcttattttgg

SEQ ID NO: 77284 - DNA, 17 bp, Arabidopsis thaliana
cgactttcttggacggt

SEQ ID NO: 77285 - DNA, 17 bp, Arabidopsis thaliana
cgactttcttttcaggc

SEQ ID NO: 77286 - DNA, 17 bp, Arabidopsis thaliana
cgactttgactgtaaaa

SEQ ID NO: 77287 - DNA, 17 bp, Arabidopsis thaliana
cgactttgcatatctat

SEQ ID NO: 77288 - DNA, 17 bp, Arabidopsis thaliana
cgactttgccgattgac

SEQ ID NO: 77289 - DNA, 17 bp, Arabidopsis thaliana
cgactttgtcgctaaga

SEQ ID NO: 77290 - DNA, 17 bp, Arabidopsis thaliana
cgactttgtgaaatgac

SEQ ID NO: 77291 - DNA, 17 bp, Arabidopsis thaliana
cgactttgtgaaatgcc

SEQ ID NO: 77292 - DNA, 17 bp, Arabidopsis thaliana
cgactttgtttgctcca

SEQ ID NO: 77293 - DNA, 17 bp, Arabidopsis thaliana
cgacttttactgaactt

SEQ ID NO: 77294 - DNA, 17 bp, Arabidopsis thaliana
cgacttttccggtgata

SEQ ID NO: 77295 - DNA, 17 bp, Arabidopsis thaliana
cgacttttgacaggtgg

SEQ ID NO: 77296 - DNA, 17 bp, Arabidopsis thaliana
cgacttttgatctgtgg

SEQ ID NO: 77297 - DNA, 17 bp, Arabidopsis thaliana
cgacttttttcaggttg

SEQ ID NO: 77298 - DNA, 17 bp, Arabidopsis thaliana
cgacttttttttcaggc

SEQ ID NO: 77299 - DNA, 17 bp, Arabidopsis thaliana
cgagaaaaatatctgcc

SEQ ID NO: 77300 - DNA, 17 bp, Arabidopsis thaliana
cgagaaaaatctatcgg

SEQ ID NO: 77301 - DNA, 17 bp, Arabidopsis thaliana
cgagaaaagaggaggag

SEQ ID NO: 77302 - DNA, 17 bp, Arabidopsis thaliana
cgagaaacacactgtcc

SEQ ID NO: 77303 - DNA, 17 bp, Arabidopsis thaliana
cgagaaacagttggcgt

SEQ ID NO: 77304 - DNA, 17 bp, Arabidopsis thaliana
cgagaaacgtctttgct

SEQ ID NO: 77305 - DNA, 17 bp, Arabidopsis thaliana
cgagaacaacttttgat

SEQ ID NO: 77306 - DNA, 17 bp, Arabidopsis thaliana
cgagaaccaaatccagt

SEQ ID NO: 77307 - DNA, 17 bp, Arabidopsis thaliana
cgagaaccagtagagag

SEQ ID NO: 77308 - DNA, 17 bp, Arabidopsis thaliana
cgagaaccgaagataga

SEQ ID NO: 77309 - DNA, 17 bp, Arabidopsis thaliana
cgagaactgactgtcgc

SEQ ID NO: 77310 - DNA, 17 bp, Arabidopsis thaliana
cgagaagaagattggtc

SEQ ID NO: 77311 - DNA, 17 bp, Arabidopsis thaliana
cgagaagacgttcagct

SEQ ID NO: 77312 - DNA, 17 bp, Arabidopsis thaliana
cgagaagaggggaaagg

SEQ ID NO: 77313 - DNA, 17 bp, Arabidopsis thaliana
cgagaagagtatcgatt

SEQ ID NO: 77314 - DNA, 17 bp, Arabidopsis thaliana
cgagaagagtcacgttt

SEQ ID NO: 77315 - DNA, 17 bp, Arabidopsis thaliana
cgagaagatccatttag

SEQ ID NO: 77316 - DNA, 17 bp, Arabidopsis thaliana
cgagaagatccatttcg

SEQ ID NO: 77317 - DNA, 17 bp, Arabidopsis thaliana
cgagaagattattgtct

SEQ ID NO: 77318 - DNA, 17 bp, Arabidopsis thaliana
cgagaagtgctacttgg

SEQ ID NO: 77319 - DNA, 17 bp, Arabidopsis thaliana
cgagaagttgttgtcca

SEQ ID NO: 77320 - DNA, 17 bp, Arabidopsis thaliana
cgagaatccagtggtgt

SEQ ID NO: 77321 - DNA, 17 bp, Arabidopsis thaliana
cgagaatcgctgcagat

SEQ ID NO: 77322 - DNA, 17 bp, Arabidopsis thaliana
cgagaatcgttgtttcg

SEQ ID NO: 77323 - DNA, 17 bp, Arabidopsis thaliana
cgagaatcttgtttgct

SEQ ID NO: 77324 - DNA, 17 bp, Arabidopsis thaliana
cgagaatgtcggcttga

SEQ ID NO: 77325 - DNA, 17 bp, Arabidopsis thaliana
cgagaatgtggttactg

SEQ ID NO: 77326 - DNA, 17 bp, Arabidopsis thaliana
cgagaattaggtttaac

SEQ ID NO: 77327 - DNA, 17 bp, Arabidopsis thaliana
cgagaattgatttgtcc

SEQ ID NO: 77328 - DNA, 17 bp, Arabidopsis thaliana
cgagacaaacaatgtgg

SEQ ID NO: 77329 - DNA, 17 bp, Arabidopsis thaliana
cgagacaagtctgactc

SEQ ID NO: 77330 - DNA, 17 bp, Arabidopsis thaliana
cgagacaagttatggga

SEQ ID NO: 77331 - DNA, 17 bp, Arabidopsis thaliana
cgagacacaatccgctt

SEQ ID NO: 77332 - DNA, 17 bp, Arabidopsis thaliana
cgagacacacgttacgt

SEQ ID NO: 77333 - DNA, 17 bp, Arabidopsis thaliana
cgagacaccgtgaggtt

SEQ ID NO: 77334 - DNA, 17 bp, Arabidopsis thaliana
cgagacacctcttcacc

SEQ ID NO: 77335 - DNA, 17 bp, Arabidopsis thaliana
cgagacacgttggaagg

SEQ ID NO: 77336 - DNA, 17 bp, Arabidopsis thaliana
cgagacactatcccgag

SEQ ID NO: 77337 - DNA, 17 bp, Arabidopsis thaliana
cgagacactctggaact

SEQ ID NO: 77338 - DNA, 17 bp, Arabidopsis thaliana
cgagacactctggagct

SEQ ID NO: 77339 - DNA, 17 bp, Arabidopsis thaliana
cgagacaggatacctct

SEQ ID NO: 77340 - DNA, 17 bp, Arabidopsis thaliana
cgagacagtaagttatc

SEQ ID NO: 77341 - DNA, 17 bp, Arabidopsis thaliana
cgagacagtataccacg

SEQ ID NO: 77342 - DNA, 17 bp, Arabidopsis thaliana
cgagaccaagctttgat

SEQ ID NO: 77343 - DNA, 17 bp, Arabidopsis thaliana
cgagaccatctcattgg

SEQ ID NO: 77344 - DNA, 17 bp, Arabidopsis thaliana
cgagacccatctgactg

SEQ ID NO: 77345 - DNA, 17 bp, Arabidopsis thaliana
cgagacccggcgatgat

SEQ ID NO: 77346 - DNA, 17 bp, Arabidopsis thaliana
cgagaccgacaccaggt

SEQ ID NO: 77347 - DNA, 17 bp, Arabidopsis thaliana
cgagaccggtaaaccac

SEQ ID NO: 77348 - DNA, 17 bp, Arabidopsis thaliana
cgagaccgtcatgctca

SEQ ID NO: 77349 - DNA, 17 bp, Arabidopsis thaliana
cgagacctcagcctgct

SEQ ID NO: 77350 - DNA, 17 bp, Arabidopsis thaliana
cgagaccttgtgcttct

SEQ ID NO: 77351 - DNA, 17 bp, Arabidopsis thaliana
cgagacgaccaacgcca

SEQ ID NO: 77352 - DNA, 17 bp, Arabidopsis thaliana
cgagacgagccgtttat

SEQ ID NO: 77353 - DNA, 17 bp, Arabidopsis thaliana
cgagacgaggagttcaa

SEQ ID NO: 77354 - DNA, 17 bp, Arabidopsis thaliana
cgagacgcaatctgcct

SEQ ID NO: 77355 - DNA, 17 bp, Arabidopsis thaliana
cgagacggatttggcaa

SEQ ID NO: 77356 - DNA, 17 bp, Arabidopsis thaliana
cgagacggatttggcag

SEQ ID NO: 77357 - DNA, 17 bp, Arabidopsis thaliana
cgagacgggttggcggg

SEQ ID NO: 77358 - DNA, 17 bp, Arabidopsis thaliana
cgagacgggtttggcag

SEQ ID NO: 77359 - DNA, 17 bp, Arabidopsis thaliana
cgagacgggtttggtag

SEQ ID NO: 77360 - DNA, 17 bp, Arabidopsis thaliana
cgagacggtataccatg

SEQ ID NO: 77361 - DNA, 17 bp, Arabidopsis thaliana
cgagacgtagcggttga

SEQ ID NO: 77362 - DNA, 17 bp, Arabidopsis thaliana
cgagacgtgccggagtg

SEQ ID NO: 77363 - DNA, 17 bp, Arabidopsis thaliana
cgagactaaggtcgtca

SEQ ID NO: 77364 - DNA, 17 bp, Arabidopsis thaliana
cgagactacccgtgggc

SEQ ID NO: 77365 - DNA, 17 bp, Arabidopsis thaliana
cgagactacccgtgggt

SEQ ID NO: 77366 - DNA, 17 bp, Arabidopsis thaliana
cgagactacctgtgggt

SEQ ID NO: 77367 - DNA, 17 bp, Arabidopsis thaliana
cgagactcacagagatt

SEQ ID NO: 77368 - DNA, 17 bp, Arabidopsis thaliana
cgagactccctgaggta

SEQ ID NO: 77369 - DNA, 17 bp, Arabidopsis thaliana
cgagactctcggcaacg

SEQ ID NO: 77370 - DNA, 17 bp, Arabidopsis thaliana
cgagactgagaaggtga

SEQ ID NO: 77371 - DNA, 17 bp, Arabidopsis thaliana
cgagactgagctcggct

SEQ ID NO: 77372 - DNA, 17 bp, Arabidopsis thaliana
cgagactggtttgatag

SEQ ID NO: 77373 - DNA, 17 bp, Arabidopsis thaliana
cgagacttaccatgatg

SEQ ID NO: 77374 - DNA, 17 bp, Arabidopsis thaliana
cgagacttcatcgaccg

SEQ ID NO: 77375 - DNA, 17 bp, Arabidopsis thaliana
cgagacttcatcgactg

SEQ ID NO: 77376 - DNA, 17 bp, Arabidopsis thaliana
cgagactttagccatgc

SEQ ID NO: 77377 - DNA, 17 bp, Arabidopsis thaliana
cgagactttagccatgg

SEQ ID NO: 77378 - DNA, 17 bp, Arabidopsis thaliana
cgagactttctgccgta

SEQ ID NO: 77379 - DNA, 17 bp, Arabidopsis thaliana
cgagagaaaatccgatt

SEQ ID NO: 77380 - DNA, 17 bp, Arabidopsis thaliana
cgagagaactcgtccgg

SEQ ID NO: 77381 - DNA, 17 bp, Arabidopsis thaliana
cgagagaacttattggc

SEQ ID NO: 77382 - DNA, 17 bp, Arabidopsis thaliana
cgagagaagtgcggtac

SEQ ID NO: 77383 - DNA, 17 bp, Arabidopsis thaliana
cgagagacccggggacc

SEQ ID NO: 77384 - DNA, 17 bp, Arabidopsis thaliana
cgagagacccggggtcc

SEQ ID NO: 77385 - DNA, 17 bp, Arabidopsis thaliana
cgagagacccgggtgtc

SEQ ID NO: 77386 - DNA, 17 bp, Arabidopsis thaliana
cgagagacccgggttcg

SEQ ID NO: 77387 - DNA, 17 bp, Arabidopsis thaliana
cgagagacttgacacag

SEQ ID NO: 77388 - DNA, 17 bp, Arabidopsis thaliana
cgagagagaaaagttta

SEQ ID NO: 77389 - DNA, 17 bp, Arabidopsis thaliana
cgagagagccgttccca

SEQ ID NO: 77390 - DNA, 17 bp, Arabidopsis thaliana
cgagagagtttgggcca

SEQ ID NO: 77391 - DNA, 17 bp, Arabidopsis thaliana
cgagagatactgatttt

SEQ ID NO: 77392 - DNA, 17 bp, Arabidopsis thaliana
cgagagatggctgagtg

SEQ ID NO: 77393 - DNA, 17 bp, Arabidopsis thaliana
cgagagcacgtctccct

SEQ ID NO: 77394 - DNA, 17 bp, Arabidopsis thaliana
cgagagcacgtctgcct

SEQ ID NO: 77395 - DNA, 17 bp, Arabidopsis thaliana
cgagagccaggcctcga

SEQ ID NO: 77396 - DNA, 17 bp, Arabidopsis thaliana
cgagagccgagagccgt

SEQ ID NO: 77397 - DNA, 17 bp, Arabidopsis thaliana
cgagagccgtccgaatt

SEQ ID NO: 77398 - DNA, 17 bp, Arabidopsis thaliana
cgagagccttgcgattt

SEQ ID NO: 77399 - DNA, 17 bp, Arabidopsis thaliana
cgagagcggatttggga

SEQ ID NO: 77400 - DNA, 17 bp, Arabidopsis thaliana
cgagagcgggtcgccgc

SEQ ID NO: 77401 - DNA, 17 bp, Arabidopsis thaliana
cgagagctttgtggaat

SEQ ID NO: 77402 - DNA, 17 bp, Arabidopsis thaliana
cgagaggaaccgttgat

SEQ ID NO: 77403 - DNA, 17 bp, Arabidopsis thaliana
cgagaggaccgggaagg

SEQ ID NO: 77404 - DNA, 17 bp, Arabidopsis thaliana
cgagaggagtactactc

SEQ ID NO: 77405 - DNA, 17 bp, Arabidopsis thaliana
cgagaggatgacggaat

SEQ ID NO: 77406 - DNA, 17 bp, Arabidopsis thaliana
cgagagggaaaatcgac

SEQ ID NO: 77407 - DNA, 17 bp, Arabidopsis thaliana
cgagagggaaaatcggc

SEQ ID NO: 77408 - DNA, 17 bp, Arabidopsis thaliana
cgagagggcacgtctgc

SEQ ID NO: 77409 - DNA, 17 bp, Arabidopsis thaliana
cgagaggtacggggatc

SEQ ID NO: 77410 - DNA, 17 bp, Arabidopsis thaliana
cgagaggtcccgagttc

SEQ ID NO: 77411 - DNA, 17 bp, Arabidopsis thaliana
cgagaggtccgatccct

SEQ ID NO: 77412 - DNA, 17 bp, Arabidopsis thaliana
cgagagtcagccgttga

SEQ ID NO: 77413 - DNA, 17 bp, Arabidopsis thaliana
cgagagtccagtagcca

SEQ ID NO: 77414 - DNA, 17 bp, Arabidopsis thaliana
cgagagtccagtagccg

SEQ ID NO: 77415 - DNA, 17 bp, Arabidopsis thaliana
cgagagttaagcggata

SEQ ID NO: 77416 - DNA, 17 bp, Arabidopsis thaliana
cgagagttggtacgacg

SEQ ID NO: 77417 - DNA, 17 bp, Arabidopsis thaliana
cgagagttggtggatgg

SEQ ID NO: 77418 - DNA, 17 bp, Arabidopsis thaliana
cgagataactttccacc

SEQ ID NO: 77419 - DNA, 17 bp, Arabidopsis thaliana
cgagataagatggtatg

SEQ ID NO: 77420 - DNA, 17 bp, Arabidopsis thaliana
cgagataagcagtgtag

SEQ ID NO: 77421 - DNA, 17 bp, Arabidopsis thaliana
cgagatacgttgggagg

SEQ ID NO: 77422 - DNA, 17 bp, Arabidopsis thaliana
cgagatagcctggcttg

SEQ ID NO: 77423 - DNA, 17 bp, Arabidopsis thaliana
cgagatatcaggtccgc

SEQ ID NO: 77424 - DNA, 17 bp, Arabidopsis thaliana
cgagatatcggctgctg

SEQ ID NO: 77425 - DNA, 17 bp, Arabidopsis thaliana
cgagatatgtccgagtg

SEQ ID NO: 77426 - DNA, 17 bp, Arabidopsis thaliana
cgagatattatccgcca

SEQ ID NO: 77427 - DNA, 17 bp, Arabidopsis thaliana
cgagatcactgatattc

SEQ ID NO: 77428 - DNA, 17 bp, Arabidopsis thaliana
cgagatcatactttggg

SEQ ID NO: 77429 - DNA, 17 bp, Arabidopsis thaliana
cgagatccatcattagc

SEQ ID NO: 77430 - DNA, 17 bp, Arabidopsis thaliana
cgagatccgaccatcgt

SEQ ID NO: 77431 - DNA, 17 bp, Arabidopsis thaliana
cgagatccgcggagatt

SEQ ID NO: 77432 - DNA, 17 bp, Arabidopsis thaliana
cgagatccgcggcgtga

SEQ ID NO: 77433 - DNA, 17 bp, Arabidopsis thaliana
cgagatcctgattccgc

SEQ ID NO: 77434 - DNA, 17 bp, Arabidopsis thaliana
cgagatcgaactttgga

SEQ ID NO: 77435 - DNA, 17 bp, Arabidopsis thaliana
cgagatcggatttggag

SEQ ID NO: 77436 - DNA, 17 bp, Arabidopsis thaliana
cgagatcgtgctgctgg

SEQ ID NO: 77437 - DNA, 17 bp, Arabidopsis thaliana
cgagatctgggcatagc

SEQ ID NO: 77438 - DNA, 17 bp, Arabidopsis thaliana
cgagatctgtgattatg

SEQ ID NO: 77439 - DNA, 17 bp, Arabidopsis thaliana
cgagatctgttttggca

SEQ ID NO: 77440 - DNA, 17 bp, Arabidopsis thaliana
cgagatcttgttccgga

SEQ ID NO: 77441 - DNA, 17 bp, Arabidopsis thaliana
cgagatctttacttgcc

SEQ ID NO: 77442 - DNA, 17 bp, Arabidopsis thaliana
cgagatgactatgtctc

SEQ ID NO: 77443 - DNA, 17 bp, Arabidopsis thaliana
cgagatgagctctgcga

SEQ ID NO: 77444 - DNA, 17 bp, Arabidopsis thaliana
cgagatgaggcccattt

SEQ ID NO: 77445 - DNA, 17 bp, Arabidopsis thaliana
cgagatgatgacgactt

SEQ ID NO: 77446 - DNA, 17 bp, Arabidopsis thaliana
cgagatgcaagcgctta

SEQ ID NO: 77447 - DNA, 17 bp, Arabidopsis thaliana
cgagatgcttgccgcac

SEQ ID NO: 77448 - DNA, 17 bp, Arabidopsis thaliana
cgagatggagatgtccc

SEQ ID NO: 77449 - DNA, 17 bp, Arabidopsis thaliana
cgagatgggcttcgtga

SEQ ID NO: 77450 - DNA, 17 bp, Arabidopsis thaliana
cgagatgtgagtgataa

SEQ ID NO: 77451 - DNA, 17 bp, Arabidopsis thaliana
cgagatgtgggtgggaa

SEQ ID NO: 77452 - DNA, 17 bp, Arabidopsis thaliana
cgagatgttcaggccgg

SEQ ID NO: 77453 - DNA, 17 bp, Arabidopsis thaliana
cgagatgttcaggtcgg

SEQ ID NO: 77454 - DNA, 17 bp, Arabidopsis thaliana
cgagatgttgggcttga

SEQ ID NO: 77455 - DNA, 17 bp, Arabidopsis thaliana
cgagattagatggtatg

SEQ ID NO: 77456 - DNA, 17 bp, Arabidopsis thaliana
cgagattatcgccaagt

SEQ ID NO: 77457 - DNA, 17 bp, Arabidopsis thaliana
cgagattatcgcgttag

SEQ ID NO: 77458 - DNA, 17 bp, Arabidopsis thaliana
cgagattatctctggct

SEQ ID NO: 77459 - DNA, 17 bp, Arabidopsis thaliana
cgagattatgacacgtg

SEQ ID NO: 77460 - DNA, 17 bp, Arabidopsis thaliana
cgagattatgtgtgaaa

SEQ ID NO: 77461 - DNA, 17 bp, Arabidopsis thaliana
cgagattcatagtggtt

SEQ ID NO: 77462 - DNA, 17 bp, Arabidopsis thaliana
cgagattcccactgtcc

SEQ ID NO: 77463 - DNA, 17 bp, Arabidopsis thaliana
cgagattccgaccggta

SEQ ID NO: 77464 - DNA, 17 bp, Arabidopsis thaliana
cgagattctgattccgc

SEQ ID NO: 77465 - DNA, 17 bp, Arabidopsis thaliana
cgagattcttcagtacc

SEQ ID NO: 77466 - DNA, 17 bp, Arabidopsis thaliana
cgagattgatggaatcg

SEQ ID NO: 77467 - DNA, 17 bp, Arabidopsis thaliana
cgagattgatggaatgg

SEQ ID NO: 77468 - DNA, 17 bp, Arabidopsis thaliana
cgagattggatggtttc

SEQ ID NO: 77469 - DNA, 17 bp, Arabidopsis thaliana
cgagattggtctttcta

SEQ ID NO: 77470 - DNA, 17 bp, Arabidopsis thaliana
cgagattgtgaggtacc

SEQ ID NO: 77471 - DNA, 17 bp, Arabidopsis thaliana
cgagatttacgtttttg

SEQ ID NO: 77472 - DNA, 17 bp, Arabidopsis thaliana
cgagatttggatggatt

SEQ ID NO: 77473 - DNA, 17 bp, Arabidopsis thaliana
cgagattttggcagatt

SEQ ID NO: 77474 - DNA, 17 bp, Arabidopsis thaliana
cgagcaaacgtgagcac

SEQ ID NO: 77475 - DNA, 17 bp, Arabidopsis thaliana
cgagcaacatctctgat

SEQ ID NO: 77476 - DNA, 17 bp, Arabidopsis thaliana
cgagcaacatttgcagt

SEQ ID NO: 77477 - DNA, 17 bp, Arabidopsis thaliana
cgagcaagatgacgatc

SEQ ID NO: 77478 - DNA, 17 bp, Arabidopsis thaliana
cgagcaatttcaggatg

SEQ ID NO: 77479 - DNA, 17 bp, Arabidopsis thaliana
cgagcaccaccaccact

SEQ ID NO: 77480 - DNA, 17 bp, Arabidopsis thaliana
cgagcacgcacgagcac

SEQ ID NO: 77481 - DNA, 17 bp, Arabidopsis thaliana
cgagcacggctctgcgc

SEQ ID NO: 77482 - DNA, 17 bp, Arabidopsis thaliana
cgagcacgtctgcctgg

SEQ ID NO: 77483 - DNA, 17 bp, Arabidopsis thaliana
cgagcactcgcccaaac

SEQ ID NO: 77484 - DNA, 17 bp, Arabidopsis thaliana
cgagcactgggacctta

SEQ ID NO: 77485 - DNA, 17 bp, Arabidopsis thaliana
cgagcactgggaccttc

SEQ ID NO: 77486 - DNA, 17 bp, Arabidopsis thaliana
cgagcagccactcgacc

SEQ ID NO: 77487 - DNA, 17 bp, Arabidopsis thaliana
cgagcaggcagcccccc

SEQ ID NO: 77488 - DNA, 17 bp, Arabidopsis thaliana
cgagcaggcagcccccg

SEQ ID NO: 77489 - DNA, 17 bp, Arabidopsis thaliana
cgagcaggctccagctg

SEQ ID NO: 77490 - DNA, 17 bp, Arabidopsis thaliana
cgagcagggacgaaagt

SEQ ID NO: 77491 - DNA, 17 bp, Arabidopsis thaliana
cgagcagtccgctgaca

SEQ ID NO: 77492 - DNA, 17 bp, Arabidopsis thaliana
cgagcatcgcatagagc

SEQ ID NO: 77493 - DNA, 17 bp, Arabidopsis thaliana
cgagcatgtccattgca

SEQ ID NO: 77494 - DNA, 17 bp, Arabidopsis thaliana
cgagcattctatacggc

SEQ ID NO: 77495 - DNA, 17 bp, Arabidopsis thaliana
cgagcattttcgtgatt

SEQ ID NO: 77496 - DNA, 17 bp, Arabidopsis thaliana
cgagcatttttgtgatt

SEQ ID NO: 77497 - DNA, 17 bp, Arabidopsis thaliana
cgagccaaagccgtaca

SEQ ID NO: 77498 - DNA, 17 bp, Arabidopsis thaliana
cgagccaagtcggcgca

SEQ ID NO: 77499 - DNA, 17 bp, Arabidopsis thaliana
cgagccaatgttcgagt

SEQ ID NO: 77500 - DNA, 17 bp, Arabidopsis thaliana
cgagccaccagtgccct

SEQ ID NO: 77501 - DNA, 17 bp, Arabidopsis thaliana
cgagccaccatcacgtt

SEQ ID NO: 77502 - DNA, 17 bp, Arabidopsis thaliana
cgagccactctcgtcgc

SEQ ID NO: 77503 - DNA, 17 bp, Arabidopsis thaliana
cgagccagttttgaaaa

SEQ ID NO: 77504 - DNA, 17 bp, Arabidopsis thaliana
cgagccatccgctgctg

SEQ ID NO: 77505 - DNA, 17 bp, Arabidopsis thaliana
cgagccatgaactcgac

SEQ ID NO: 77506 - DNA, 17 bp, Arabidopsis thaliana
cgagccccgccggaagc

SEQ ID NO: 77507 - DNA, 17 bp, Arabidopsis thaliana
cgagccccgtcactccc

SEQ ID NO: 77508 - DNA, 17 bp, Arabidopsis thaliana
cgagccccgtcagtccc

SEQ ID NO: 77509 - DNA, 17 bp, Arabidopsis thaliana
cgagcccgggcggagcg

SEQ ID NO: 77510 - DNA, 17 bp, Arabidopsis thaliana
cgagccctgggctctga

SEQ ID NO: 77511 - DNA, 17 bp, Arabidopsis thaliana
cgagccgatacacggat

SEQ ID NO: 77512 - DNA, 17 bp, Arabidopsis thaliana
cgagccgcttttttttt

SEQ ID NO: 77513 - DNA, 17 bp, Arabidopsis thaliana
cgagccggaggctacgg

SEQ ID NO: 77514 - DNA, 17 bp, Arabidopsis thaliana
cgagccggtccgccttt

SEQ ID NO: 77515 - DNA, 17 bp, Arabidopsis thaliana
cgagcctactgcagctg

SEQ ID NO: 77516 - DNA, 17 bp, Arabidopsis thaliana
cgagcctcaccggatga

SEQ ID NO: 77517 - DNA, 17 bp, Arabidopsis thaliana
cgagcctcagagtagtt

SEQ ID NO: 77518 - DNA, 17 bp, Arabidopsis thaliana
cgagcctctctcacccc

SEQ ID NO: 77519 - DNA, 17 bp, Arabidopsis thaliana
cgagcctctctcacctc

SEQ ID NO: 77520 - DNA, 17 bp, Arabidopsis thaliana
cgagcctcttttctttt

SEQ ID NO: 77521 - DNA, 17 bp, Arabidopsis thaliana
cgagcctgttgagaccg

SEQ ID NO: 77522 - DNA, 17 bp, Arabidopsis thaliana
cgagccttcttcattcc

SEQ ID NO: 77523 - DNA, 17 bp, Arabidopsis thaliana
cgagcgaaccgggaaga

SEQ ID NO: 77524 - DNA, 17 bp, Arabidopsis thaliana
cgagcgacatccagctg

SEQ ID NO: 77525 - DNA, 17 bp, Arabidopsis thaliana
cgagcgacctatacccg

SEQ ID NO: 77526 - DNA, 17 bp, Arabidopsis thaliana
cgagcgatccgagcagt

SEQ ID NO: 77527 - DNA, 17 bp, Arabidopsis thaliana
cgagcgatctgggatat

SEQ ID NO: 77528 - DNA, 17 bp, Arabidopsis thaliana
cgagcggcgggtagaaa

SEQ ID NO: 77529 - DNA, 17 bp, Arabidopsis thaliana
cgagcggcgggtagaat

SEQ ID NO: 77530 - DNA, 17 bp, Arabidopsis thaliana
cgagcggtatttagcga

SEQ ID NO: 77531 - DNA, 17 bp, Arabidopsis thaliana
cgagcggtatttagcgg

SEQ ID NO: 77532 - DNA, 17 bp, Arabidopsis thaliana
cgagcggtccaaagcga

SEQ ID NO: 77533 - DNA, 17 bp, Arabidopsis thaliana
cgagcggtccaaagcgg

SEQ ID NO: 77534 - DNA, 17 bp, Arabidopsis thaliana
cgagcggtctaaagcga

SEQ ID NO: 77535 - DNA, 17 bp, Arabidopsis thaliana
cgagcggtgcaggacaa

SEQ ID NO: 77536 - DNA, 17 bp, Arabidopsis thaliana
cgagcgtatcagagagt

SEQ ID NO: 77537 - DNA, 17 bp, Arabidopsis thaliana
cgagcgtcccttcgcgg

SEQ ID NO: 77538 - DNA, 17 bp, Arabidopsis thaliana
cgagctaaactactcga

SEQ ID NO: 77539 - DNA, 17 bp, Arabidopsis thaliana
cgagctaagttatcagt

SEQ ID NO: 77540 - DNA, 17 bp, Arabidopsis thaliana
cgagctaataatgtgtt

SEQ ID NO: 77541 - DNA, 17 bp, Arabidopsis thaliana
cgagctaatcgaaatca

SEQ ID NO: 77542 - DNA, 17 bp, Arabidopsis thaliana
cgagctacactcttgcg

SEQ ID NO: 77543 - DNA, 17 bp, Arabidopsis thaliana
cgagctacgccagttgc

SEQ ID NO: 77544 - DNA, 17 bp, Arabidopsis thaliana
cgagctactgagcgttg

SEQ ID NO: 77545 - DNA, 17 bp, Arabidopsis thaliana
cgagctacttgctttgt

SEQ ID NO: 77546 - DNA, 17 bp, Arabidopsis thaliana
cgagctatagcaacaaa

SEQ ID NO: 77547 - DNA, 17 bp, Arabidopsis thaliana
cgagctccatctctgcg

SEQ ID NO: 77548 - DNA, 17 bp, Arabidopsis thaliana
cgagctccttcgacctc

SEQ ID NO: 77549 - DNA, 17 bp, Arabidopsis thaliana
cgagctcgagtttcagt

SEQ ID NO: 77550 - DNA, 17 bp, Arabidopsis thaliana
cgagctctaccactgac

SEQ ID NO: 77551 - DNA, 17 bp, Arabidopsis thaliana
cgagctctttgatctat

SEQ ID NO: 77552 - DNA, 17 bp, Arabidopsis thaliana
cgagctgacttgaccag

SEQ ID NO: 77553 - DNA, 17 bp, Arabidopsis thaliana
cgagctgcttgagacgg

SEQ ID NO: 77554 - DNA, 17 bp, Arabidopsis thaliana
cgagctgcttgatgact

SEQ ID NO: 77555 - DNA, 17 bp, Arabidopsis thaliana
cgagctggcctgaagat

SEQ ID NO: 77556 - DNA, 17 bp, Arabidopsis thaliana
cgagcttcagtttgtgg

SEQ ID NO: 77557 - DNA, 17 bp, Arabidopsis thaliana
cgagcttcatacagcca

SEQ ID NO: 77558 - DNA, 17 bp, Arabidopsis thaliana
cgagcttccgtgccact

SEQ ID NO: 77559 - DNA, 17 bp, Arabidopsis thaliana
cgagcttctgatatcga

SEQ ID NO: 77560 - DNA, 17 bp, Arabidopsis thaliana
cgagcttgctcgcggtg

SEQ ID NO: 77561 - DNA, 17 bp, Arabidopsis thaliana
cgagcttgtagaacacc

SEQ ID NO: 77562 - DNA, 17 bp, Arabidopsis thaliana
cgagctttggccgagtg

SEQ ID NO: 77563 - DNA, 17 bp, Arabidopsis thaliana
cgagcttttaccctttt

SEQ ID NO: 77564 - DNA, 17 bp, Arabidopsis thaliana
cgaggaaacacttctta

SEQ ID NO: 77565 - DNA, 17 bp, Arabidopsis thaliana
cgaggaaaggcttacgg

SEQ ID NO: 77566 - DNA, 17 bp, Arabidopsis thaliana
cgaggaaatgattgtcg

SEQ ID NO: 77567 - DNA, 17 bp, Arabidopsis thaliana
cgaggaaccactcgacc

SEQ ID NO: 77568 - DNA, 17 bp, Arabidopsis thaliana
cgaggaactctaggctt

SEQ ID NO: 77569 - DNA, 17 bp, Arabidopsis thaliana
cgaggaagaagccccgg

SEQ ID NO: 77570 - DNA, 17 bp, Arabidopsis thaliana
cgaggaagatgtcatca

SEQ ID NO: 77571 - DNA, 17 bp, Arabidopsis thaliana
cgaggaagcagcatggt

SEQ ID NO: 77572 - DNA, 17 bp, Arabidopsis thaliana
cgaggaagtcttcagtg

SEQ ID NO: 77573 - DNA, 17 bp, Arabidopsis thaliana
cgaggaatcgtcgacca

SEQ ID NO: 77574 - DNA, 17 bp, Arabidopsis thaliana
cgaggaatcgtcgaccg

SEQ ID NO: 77575 - DNA, 17 bp, Arabidopsis thaliana
cgaggaatcgtcgcttg

SEQ ID NO: 77576 - DNA, 17 bp, Arabidopsis thaliana
cgaggaatgaccgaccg

SEQ ID NO: 77577 - DNA, 17 bp, Arabidopsis thaliana
cgaggacacgtctgcct

SEQ ID NO: 77578 - DNA, 17 bp, Arabidopsis thaliana
cgaggacccaggagtga

SEQ ID NO: 77579 - DNA, 17 bp, Arabidopsis thaliana
cgaggaccgagtgccgc

SEQ ID NO: 77580 - DNA, 17 bp, Arabidopsis thaliana
cgaggaccttctgaatc

SEQ ID NO: 77581 - DNA, 17 bp, Arabidopsis thaliana
cgaggacgacgaggaca

SEQ ID NO: 77582 - DNA, 17 bp, Arabidopsis thaliana
cgaggacgttgcgatct

SEQ ID NO: 77583 - DNA, 17 bp, Arabidopsis thaliana
cgaggactctggtcagc

SEQ ID NO: 77584 - DNA, 17 bp, Arabidopsis thaliana
cgaggacttcccgggag

SEQ ID NO: 77585 - DNA, 17 bp, Arabidopsis thaliana
cgaggactttcttgcat

SEQ ID NO: 77586 - DNA, 17 bp, Arabidopsis thaliana
cgaggactttcttggat

SEQ ID NO: 77587 - DNA, 17 bp, Arabidopsis thaliana
cgaggactttcttggtt

SEQ ID NO: 77588 - DNA, 17 bp, Arabidopsis thaliana
cgaggagaaaatgtcgc

SEQ ID NO: 77589 - DNA, 17 bp, Arabidopsis thaliana
cgaggagagactaactc

SEQ ID NO: 77590 - DNA, 17 bp, Arabidopsis thaliana
cgaggagcctcgataat

SEQ ID NO: 77591 - DNA, 17 bp, Arabidopsis thaliana
cgaggagctctacattg

SEQ ID NO: 77592 - DNA, 17 bp, Arabidopsis thaliana
cgaggagctgttggccc

SEQ ID NO: 77593 - DNA, 17 bp, Arabidopsis thaliana
cgaggaggacgattggg

SEQ ID NO: 77594 - DNA, 17 bp, Arabidopsis thaliana
cgaggaggccacgccgg

SEQ ID NO: 77595 - DNA, 17 bp, Arabidopsis thaliana
cgaggagtccactaaac

SEQ ID NO: 77596 - DNA, 17 bp, Arabidopsis thaliana
cgaggagtctgatgtgt

SEQ ID NO: 77597 - DNA, 17 bp, Arabidopsis thaliana
cgaggagttgttctgtg

SEQ ID NO: 77598 - DNA, 17 bp, Arabidopsis thaliana
cgaggataaccgaatca

SEQ ID NO: 77599 - DNA, 17 bp, Arabidopsis thaliana
cgaggataatggcccaa

SEQ ID NO: 77600 - DNA, 17 bp, Arabidopsis thaliana
cgaggatagactttgtc

SEQ ID NO: 77601 - DNA, 17 bp, Arabidopsis thaliana
cgaggataggtgcacgg

SEQ ID NO: 77602 - DNA, 17 bp, Arabidopsis thaliana
cgaggatatagcgggtc

SEQ ID NO: 77603 - DNA, 17 bp, Arabidopsis thaliana
cgaggatccagcgacat

SEQ ID NO: 77604 - DNA, 17 bp, Arabidopsis thaliana
cgaggatccattggagg

SEQ ID NO: 77605 - DNA, 17 bp, Arabidopsis thaliana
cgaggatcgattattct

SEQ ID NO: 77606 - DNA, 17 bp, Arabidopsis thaliana
cgaggatcgccgtgggg

SEQ ID NO: 77607 - DNA, 17 bp, Arabidopsis thaliana
cgaggatgacgcgggtg

SEQ ID NO: 77608 - DNA, 17 bp, Arabidopsis thaliana
cgaggatgcttctttcc

SEQ ID NO: 77609 - DNA, 17 bp, Arabidopsis thaliana
cgaggatgtagccaagt

SEQ ID NO: 77610 - DNA, 17 bp, Arabidopsis thaliana
cgaggatgtgtttgaga

SEQ ID NO: 77611 - DNA, 17 bp, Arabidopsis thaliana
cgaggatgttaatgggc

SEQ ID NO: 77612 - DNA, 17 bp, Arabidopsis thaliana
cgaggattcgtcgacca

SEQ ID NO: 77613 - DNA, 17 bp, Arabidopsis thaliana
cgaggattcgtcgatca

SEQ ID NO: 77614 - DNA, 17 bp, Arabidopsis thaliana
cgaggattgttgtttaa

SEQ ID NO: 77615 - DNA, 17 bp, Arabidopsis thaliana
cgaggatttcacgtatg

SEQ ID NO: 77616 - DNA, 17 bp, Arabidopsis thaliana
cgaggatttgtcgacca

SEQ ID NO: 77617 - DNA, 17 bp, Arabidopsis thaliana
cgaggattttcactctg

SEQ ID NO: 77618 - DNA, 17 bp, Arabidopsis thaliana
cgaggcaagtatccaaa

SEQ ID NO: 77619 - DNA, 17 bp, Arabidopsis thaliana
cgaggcaccagacttgc

SEQ ID NO: 77620 - DNA, 17 bp, Arabidopsis thaliana
cgaggcacgtctgcctg

SEQ ID NO: 77621 - DNA, 17 bp, Arabidopsis thaliana
cgaggcacgtcttgggt

SEQ ID NO: 77622 - DNA, 17 bp, Arabidopsis thaliana
cgaggcacgttgggagg

SEQ ID NO: 77623 - DNA, 17 bp, Arabidopsis thaliana
cgaggcactctccgggg

SEQ ID NO: 77624 - DNA, 17 bp, Arabidopsis thaliana
cgaggcagctgagaacg

SEQ ID NO: 77625 - DNA, 17 bp, Arabidopsis thaliana
cgaggcagctggacgag

SEQ ID NO: 77626 - DNA, 17 bp, Arabidopsis thaliana
cgaggcatgttagaagg

SEQ ID NO: 77627 - DNA, 17 bp, Arabidopsis thaliana
cgaggcatgttgaaaga

SEQ ID NO: 77628 - DNA, 17 bp, Arabidopsis thaliana
cgaggcctgagagtgac

SEQ ID NO: 77629 - DNA, 17 bp, Arabidopsis thaliana
cgaggcctgttcctaga

SEQ ID NO: 77630 - DNA, 17 bp, Arabidopsis thaliana
cgaggcgacctctaagc

SEQ ID NO: 77631 - DNA, 17 bp, Arabidopsis thaliana
cgaggcgacggttcttt

SEQ ID NO: 77632 - DNA, 17 bp, Arabidopsis thaliana
cgaggcgagacccacac

SEQ ID NO: 77633 - DNA, 17 bp, Arabidopsis thaliana
cgaggcgcccgtgactt

SEQ ID NO: 77634 - DNA, 17 bp, Arabidopsis thaliana
cgaggcgcgtctattgc

SEQ ID NO: 77635 - DNA, 17 bp, Arabidopsis thaliana
cgaggcgctgtctacga

SEQ ID NO: 77636 - DNA, 17 bp, Arabidopsis thaliana
cgaggcggagactgcat

SEQ ID NO: 77637 - DNA, 17 bp, Arabidopsis thaliana
cgaggcgggttggacgt

SEQ ID NO: 77638 - DNA, 17 bp, Arabidopsis thaliana
cgaggcgtcgtctgtcg

SEQ ID NO: 77639 - DNA, 17 bp, Arabidopsis thaliana
cgaggctaagtattggg

SEQ ID NO: 77640 - DNA, 17 bp, Arabidopsis thaliana
cgaggctatttgattcg

SEQ ID NO: 77641 - DNA, 17 bp, Arabidopsis thaliana
cgaggctcggaaatttg

SEQ ID NO: 77642 - DNA, 17 bp, Arabidopsis thaliana
cgaggctcgttgagaag

SEQ ID NO: 77643 - DNA, 17 bp, Arabidopsis thaliana
cgaggctgcagaatgtt

SEQ ID NO: 77644 - DNA, 17 bp, Arabidopsis thaliana
cgaggctgcctgggtgt

SEQ ID NO: 77645 - DNA, 17 bp, Arabidopsis thaliana
cgaggctggaggttttg

SEQ ID NO: 77646 - DNA, 17 bp, Arabidopsis thaliana
cgaggctggtgagtatg

SEQ ID NO: 77647 - DNA, 17 bp, Arabidopsis thaliana
cgaggctgtcaaccaga

SEQ ID NO: 77648 - DNA, 17 bp, Arabidopsis thaliana
cgagggaaatcaatctg

SEQ ID NO: 77649 - DNA, 17 bp, Arabidopsis thaliana
cgagggacggactggga

SEQ ID NO: 77650 - DNA, 17 bp, Arabidopsis thaliana
cgagggacggaggaggc

SEQ ID NO: 77651 - DNA, 17 bp, Arabidopsis thaliana
cgagggactctgttaag

SEQ ID NO: 77652 - DNA, 17 bp, Arabidopsis thaliana
cgagggacttgcgtggg

SEQ ID NO: 77653 - DNA, 17 bp, Arabidopsis thaliana
cgagggagagaaagcct

SEQ ID NO: 77654 - DNA, 17 bp, Arabidopsis thaliana
cgagggagagccacttt

SEQ ID NO: 77655 - DNA, 17 bp, Arabidopsis thaliana
cgagggagtagtcgtat

SEQ ID NO: 77656 - DNA, 17 bp, Arabidopsis thaliana
cgagggagtcgactcag

SEQ ID NO: 77657 - DNA, 17 bp, Arabidopsis thaliana
cgagggatggtatcgga

SEQ ID NO: 77658 - DNA, 17 bp, Arabidopsis thaliana
cgagggattagcgagca

SEQ ID NO: 77659 - DNA, 17 bp, Arabidopsis thaliana
cgagggcaagtctgcct

SEQ ID NO: 77660 - DNA, 17 bp, Arabidopsis thaliana
cgagggcacctctgcct

SEQ ID NO: 77661 - DNA, 17 bp, Arabidopsis thaliana
cgagggcacgactgcct

SEQ ID NO: 77662 - DNA, 17 bp, Arabidopsis thaliana
cgagggcacgcccaccc

SEQ ID NO: 77663 - DNA, 17 bp, Arabidopsis thaliana
cgagggcacgcccgccg

SEQ ID NO: 77664 - DNA, 17 bp, Arabidopsis thaliana
cgagggcacgcctgccc

SEQ ID NO: 77665 - DNA, 17 bp, Arabidopsis thaliana
cgagggcacgcctgcct

SEQ ID NO: 77666 - DNA, 17 bp, Arabidopsis thaliana
cgagggcacggctgcct

SEQ ID NO: 77667 - DNA, 17 bp, Arabidopsis thaliana
cgagggcacgtccgccc

SEQ ID NO: 77668 - DNA, 17 bp, Arabidopsis thaliana
cgagggcacgtccgcct

SEQ ID NO: 77669 - DNA, 17 bp, Arabidopsis thaliana
cgagggcacgtcctggg

SEQ ID NO: 77670 - DNA, 17 bp, Arabidopsis thaliana
cgagggcacgtcgttgg

SEQ ID NO: 77671 - DNA, 17 bp, Arabidopsis thaliana
cgagggcacgtctacct

SEQ ID NO: 77672 - DNA, 17 bp, Arabidopsis thaliana
cgagggcacgtctcctg

SEQ ID NO: 77673 - DNA, 17 bp, Arabidopsis thaliana
cgagggcacgtctctct

SEQ ID NO: 77674 - DNA, 17 bp, Arabidopsis thaliana
cgagggcacgtctctgg

SEQ ID NO: 77675 - DNA, 17 bp, Arabidopsis thaliana
cgagggcacgtctcttg

SEQ ID NO: 77676 - DNA, 17 bp, Arabidopsis thaliana
cgagggcacgtctgcac

SEQ ID NO: 77677 - DNA, 17 bp, Arabidopsis thaliana
cgagggcacgtctgcat

SEQ ID NO: 77678 - DNA, 17 bp, Arabidopsis thaliana
cgagggcacgtctgcca

SEQ ID NO: 77679 - DNA, 17 bp, Arabidopsis thaliana
cgagggcacgtctgccc

SEQ ID NO: 77680 - DNA, 17 bp, Arabidopsis thaliana
cgagggcacgtctgccg

SEQ ID NO: 77681 - DNA, 17 bp, Arabidopsis thaliana
cgagggcacgtctgcct

SEQ ID NO: 77682 - DNA, 17 bp, Arabidopsis thaliana
cgagggcacgtctgcgt

SEQ ID NO: 77683 - DNA, 17 bp, Arabidopsis thaliana
cgagggcacgtctgctc

SEQ ID NO: 77684 - DNA, 17 bp, Arabidopsis thaliana
cgagggcacgtctgctg

SEQ ID NO: 77685 - DNA, 17 bp, Arabidopsis thaliana
cgagggcacgtctgctt

SEQ ID NO: 77686 - DNA, 17 bp, Arabidopsis thaliana
cgagggcacgtctggct

SEQ ID NO: 77687 - DNA, 17 bp, Arabidopsis thaliana
cgagggcacgtctgggt

SEQ ID NO: 77688 - DNA, 17 bp, Arabidopsis thaliana
cgagggcacgtctgtct

SEQ ID NO: 77689 - DNA, 17 bp, Arabidopsis thaliana
cgagggcacgtcttcct

SEQ ID NO: 77690 - DNA, 17 bp, Arabidopsis thaliana
cgagggcacgtcttggg

SEQ ID NO: 77691 - DNA, 17 bp, Arabidopsis thaliana
cgagggcacgtttgcat

SEQ ID NO: 77692 - DNA, 17 bp, Arabidopsis thaliana
cgagggcacgtttgcct

SEQ ID NO: 77693 - DNA, 17 bp, Arabidopsis thaliana
cgagggcactcctgcct

SEQ ID NO: 77694 - DNA, 17 bp, Arabidopsis thaliana
cgagggcactgcctggg

SEQ ID NO: 77695 - DNA, 17 bp, Arabidopsis thaliana
cgagggcacttctgcct

SEQ ID NO: 77696 - DNA, 17 bp, Arabidopsis thaliana
cgagggcaggtctgcct

SEQ ID NO: 77697 - DNA, 17 bp, Arabidopsis thaliana
cgagggcatgcctgcct

SEQ ID NO: 77698 - DNA, 17 bp, Arabidopsis thaliana
cgagggcatgtctgcct

SEQ ID NO: 77699 - DNA, 17 bp, Arabidopsis thaliana
cgagggccgtctgcctg

SEQ ID NO: 77700 - DNA, 17 bp, Arabidopsis thaliana
cgagggcctcaacagat

SEQ ID NO: 77701 - DNA, 17 bp, Arabidopsis thaliana
cgagggcgcgtctgcct

SEQ ID NO: 77702 - DNA, 17 bp, Arabidopsis thaliana
cgagggcgcttctgcct

SEQ ID NO: 77703 - DNA, 17 bp, Arabidopsis thaliana
cgagggcggcaaaggcg

SEQ ID NO: 77704 - DNA, 17 bp, Arabidopsis thaliana
cgagggcgtctgcctga

SEQ ID NO: 77705 - DNA, 17 bp, Arabidopsis thaliana
cgagggcgtctgcctgg

SEQ ID NO: 77706 - DNA, 17 bp, Arabidopsis thaliana
cgagggctctgaccgcg

SEQ ID NO: 77707 - DNA, 17 bp, Arabidopsis thaliana
cgagggctctgcctggg

SEQ ID NO: 77708 - DNA, 17 bp, Arabidopsis thaliana
cgaggggacccgaaacg

SEQ ID NO: 77709 - DNA, 17 bp, Arabidopsis thaliana
cgagggggacacaggtc

SEQ ID NO: 77710 - DNA, 17 bp, Arabidopsis thaliana
cgaggggtcccgagttc

SEQ ID NO: 77711 - DNA, 17 bp, Arabidopsis thaliana
cgagggtacgtccactg

SEQ ID NO: 77712 - DNA, 17 bp, Arabidopsis thaliana
cgagggtacgtctgcct

SEQ ID NO: 77713 - DNA, 17 bp, Arabidopsis thaliana
cgagggtacttccacga

SEQ ID NO: 77714 - DNA, 17 bp, Arabidopsis thaliana
cgagggtctctgttgcg

SEQ ID NO: 77715 - DNA, 17 bp, Arabidopsis thaliana
cgaggtacataggaact

SEQ ID NO: 77716 - DNA, 17 bp, Arabidopsis thaliana
cgaggtacgttgggaga

SEQ ID NO: 77717 - DNA, 17 bp, Arabidopsis thaliana
cgaggtagatgaggtcg

SEQ ID NO: 77718 - DNA, 17 bp, Arabidopsis thaliana
cgaggtagcgaacaaag

SEQ ID NO: 77719 - DNA, 17 bp, Arabidopsis thaliana
cgaggtagcggacaaag

SEQ ID NO: 77720 - DNA, 17 bp, Arabidopsis thaliana
cgaggtagcggacaagg

SEQ ID NO: 77721 - DNA, 17 bp, Arabidopsis thaliana
cgaggtatccttgctac

SEQ ID NO: 77722 - DNA, 17 bp, Arabidopsis thaliana
cgaggtcaagtctggtg

SEQ ID NO: 77723 - DNA, 17 bp, Arabidopsis thaliana
cgaggtcacgtctgcct

SEQ ID NO: 77724 - DNA, 17 bp, Arabidopsis thaliana
cgaggtcccgagttcga

SEQ ID NO: 77725 - DNA, 17 bp, Arabidopsis thaliana
cgaggtcgagtgatgtg

SEQ ID NO: 77726 - DNA, 17 bp, Arabidopsis thaliana
cgaggtcgggtcggggg

SEQ ID NO: 77727 - DNA, 17 bp, Arabidopsis thaliana
cgaggtcgtgtgatgtt

SEQ ID NO: 77728 - DNA, 17 bp, Arabidopsis thaliana
cgaggtctgtgatgtgg

SEQ ID NO: 77729 - DNA, 17 bp, Arabidopsis thaliana
cgaggtgcagaagggcc

SEQ ID NO: 77730 - DNA, 17 bp, Arabidopsis thaliana
cgaggtgccttgttgcg

SEQ ID NO: 77731 - DNA, 17 bp, Arabidopsis thaliana
cgaggtggatgtggact

SEQ ID NO: 77732 - DNA, 17 bp, Arabidopsis thaliana
cgaggtgggttcagact

SEQ ID NO: 77733 - DNA, 17 bp, Arabidopsis thaliana
cgaggtggttcagtttc

SEQ ID NO: 77734 - DNA, 17 bp, Arabidopsis thaliana
cgaggtgtagcgaagaa

SEQ ID NO: 77735 - DNA, 17 bp, Arabidopsis thaliana
cgaggtgtagcgcagtc

SEQ ID NO: 77736 - DNA, 17 bp, Arabidopsis thaliana
cgaggtgtcgtctgtcg

SEQ ID NO: 77737 - DNA, 17 bp, Arabidopsis thaliana
cgaggtgtgcatgagtc

SEQ ID NO: 77738 - DNA, 17 bp, Arabidopsis thaliana
cgaggtgtgggaaggac

SEQ ID NO: 77739 - DNA, 17 bp, Arabidopsis thaliana
cgaggtgttgcgctttc

SEQ ID NO: 77740 - DNA, 17 bp, Arabidopsis thaliana
cgaggttaccactgcag

SEQ ID NO: 77741 - DNA, 17 bp, Arabidopsis thaliana
cgaggttccgacaggcc

SEQ ID NO: 77742 - DNA, 17 bp, Arabidopsis thaliana
cgaggttcctctttggg

SEQ ID NO: 77743 - DNA, 17 bp, Arabidopsis thaliana
cgaggttcgggccgaag

SEQ ID NO: 77744 - DNA, 17 bp, Arabidopsis thaliana
cgaggttctggccgaag

SEQ ID NO: 77745 - DNA, 17 bp, Arabidopsis thaliana
cgaggttgaccgttacc

SEQ ID NO: 77746 - DNA, 17 bp, Arabidopsis thaliana
cgaggttgatgatgatg

SEQ ID NO: 77747 - DNA, 17 bp, Arabidopsis thaliana
cgaggttgctcctgaag

SEQ ID NO: 77748 - DNA, 17 bp, Arabidopsis thaliana
cgaggttggccagcttt

SEQ ID NO: 77749 - DNA, 17 bp, Arabidopsis thaliana
cgagtaacctcagctca

SEQ ID NO: 77750 - DNA, 17 bp, Arabidopsis thaliana
cgagtaagattgtcttg

SEQ ID NO: 77751 - DNA, 17 bp, Arabidopsis thaliana
cgagtaaggagtggcgg

SEQ ID NO: 77752 - DNA, 17 bp, Arabidopsis thaliana
cgagtaagggggttccc

SEQ ID NO: 77753 - DNA, 17 bp, Arabidopsis thaliana
cgagtaagggggttcct

SEQ ID NO: 77754 - DNA, 17 bp, Arabidopsis thaliana
cgagtaagtcctctgca

SEQ ID NO: 77755 - DNA, 17 bp, Arabidopsis thaliana
cgagtaagttggtcgag

SEQ ID NO: 77756 - DNA, 17 bp, Arabidopsis thaliana
cgagtacccacctgctg

SEQ ID NO: 77757 - DNA, 17 bp, Arabidopsis thaliana
cgagtaccgccgtccac

SEQ ID NO: 77758 - DNA, 17 bp, Arabidopsis thaliana
cgagtaccgcttcgcca

SEQ ID NO: 77759 - DNA, 17 bp, Arabidopsis thaliana
cgagtagaggtaatggt

SEQ ID NO: 77760 - DNA, 17 bp, Arabidopsis thaliana
cgagtagcagttgcaga

SEQ ID NO: 77761 - DNA, 17 bp, Arabidopsis thaliana
cgagtagcgagtcttgg

SEQ ID NO: 77762 - DNA, 17 bp, Arabidopsis thaliana
cgagtaggaatgggctg

SEQ ID NO: 77763 - DNA, 17 bp, Arabidopsis thaliana
cgagtagtgcaaggcca

SEQ ID NO: 77764 - DNA, 17 bp, Arabidopsis thaliana
cgagtatatttaggccc

SEQ ID NO: 77765 - DNA, 17 bp, Arabidopsis thaliana
cgagtatccattggagg

SEQ ID NO: 77766 - DNA, 17 bp, Arabidopsis thaliana
cgagtatccattggtgg

SEQ ID NO: 77767 - DNA, 17 bp, Arabidopsis thaliana
cgagtatccttagagcg

SEQ ID NO: 77768 - DNA, 17 bp, Arabidopsis thaliana
cgagtatcgattatccc

SEQ ID NO: 77769 - DNA, 17 bp, Arabidopsis thaliana
cgagtatcttcgttgcg

SEQ ID NO: 77770 - DNA, 17 bp, Arabidopsis thaliana
cgagtatcttggtcgag

SEQ ID NO: 77771 - DNA, 17 bp, Arabidopsis thaliana
cgagtatgattggttag

SEQ ID NO: 77772 - DNA, 17 bp, Arabidopsis thaliana
cgagtatggccaggacg

SEQ ID NO: 77773 - DNA, 17 bp, Arabidopsis thaliana
cgagtatggccaggccg

SEQ ID NO: 77774 - DNA, 17 bp, Arabidopsis thaliana
cgagtatggccccggag

SEQ ID NO: 77775 - DNA, 17 bp, Arabidopsis thaliana
cgagtatgggcttcaat

SEQ ID NO: 77776 - DNA, 17 bp, Arabidopsis thaliana
cgagtatgtcttctggt

SEQ ID NO: 77777 - DNA, 17 bp, Arabidopsis thaliana
cgagtattgccaggacg

SEQ ID NO: 77778 - DNA, 17 bp, Arabidopsis thaliana
cgagtcaacgcaaactt

SEQ ID NO: 77779 - DNA, 17 bp, Arabidopsis thaliana
cgagtcaccaaggcttg

SEQ ID NO: 77780 - DNA, 17 bp, Arabidopsis thaliana
cgagtcatcagctcgcg

SEQ ID NO: 77781 - DNA, 17 bp, Arabidopsis thaliana
cgagtccagatgttatc

SEQ ID NO: 77782 - DNA, 17 bp, Arabidopsis thaliana
cgagtcccaccgggcgt

SEQ ID NO: 77783 - DNA, 17 bp, Arabidopsis thaliana
cgagtcccaccgggtgt

SEQ ID NO: 77784 - DNA, 17 bp, Arabidopsis thaliana
cgagtcccagttccgaa

SEQ ID NO: 77785 - DNA, 17 bp, Arabidopsis thaliana
cgagtcccggcgacgga

SEQ ID NO: 77786 - DNA, 17 bp, Arabidopsis thaliana
cgagtcccgggcaaccc

SEQ ID NO: 77787 - DNA, 17 bp, Arabidopsis thaliana
cgagtccctccaatgga

SEQ ID NO: 77788 - DNA, 17 bp, Arabidopsis thaliana
cgagtccgagtagcggc

SEQ ID NO: 77789 - DNA, 17 bp, Arabidopsis thaliana
cgagtccgcctagctcc

SEQ ID NO: 77790 - DNA, 17 bp, Arabidopsis thaliana
cgagtccgctcccaccc

SEQ ID NO: 77791 - DNA, 17 bp, Arabidopsis thaliana
cgagtccgcttatcacc

SEQ ID NO: 77792 - DNA, 17 bp, Arabidopsis thaliana
cgagtccgcttatctcc

SEQ ID NO: 77793 - DNA, 17 bp, Arabidopsis thaliana
cgagtccgcttatctct

SEQ ID NO: 77794 - DNA, 17 bp, Arabidopsis thaliana
cgagtccggcagatatg

SEQ ID NO: 77795 - DNA, 17 bp, Arabidopsis thaliana
cgagtccgtatagccct

SEQ ID NO: 77796 - DNA, 17 bp, Arabidopsis thaliana
cgagtcctcttcaaggc

SEQ ID NO: 77797 - DNA, 17 bp, Arabidopsis thaliana
cgagtccttctgctttg

SEQ ID NO: 77798 - DNA, 17 bp, Arabidopsis thaliana
cgagtcgactgtggcga

SEQ ID NO: 77799 - DNA, 17 bp, Arabidopsis thaliana
cgagtcgatggatgaca

SEQ ID NO: 77800 - DNA, 17 bp, Arabidopsis thaliana
cgagtcgcttccagacc

SEQ ID NO: 77801 - DNA, 17 bp, Arabidopsis thaliana
cgagtcgggaggctctt

SEQ ID NO: 77802 - DNA, 17 bp, Arabidopsis thaliana
cgagtcggggtaaccca

SEQ ID NO: 77803 - DNA, 17 bp, Arabidopsis thaliana
cgagtcgtcattttgct

SEQ ID NO: 77804 - DNA, 17 bp, Arabidopsis thaliana
cgagtctacttgtgggt

SEQ ID NO: 77805 - DNA, 17 bp, Arabidopsis thaliana
cgagtctcagctactgc

SEQ ID NO: 77806 - DNA, 17 bp, Arabidopsis thaliana
cgagtctcgtgtgtcgt

SEQ ID NO: 77807 - DNA, 17 bp, Arabidopsis thaliana
cgagtctgcctgggtgt

SEQ ID NO: 77808 - DNA, 17 bp, Arabidopsis thaliana
cgagtctgggtggcgcc

SEQ ID NO: 77809 - DNA, 17 bp, Arabidopsis thaliana
cgagtctgtttatagtc

SEQ ID NO: 77810 - DNA, 17 bp, Arabidopsis thaliana
cgagtcttagctcagtg

SEQ ID NO: 77811 - DNA, 17 bp, Arabidopsis thaliana
cgagtcttcatagggca

SEQ ID NO: 77812 - DNA, 17 bp, Arabidopsis thaliana
cgagtctttgaacgcaa

SEQ ID NO: 77813 - DNA, 17 bp, Arabidopsis thaliana
cgagtgaaggcaagatt

SEQ ID NO: 77814 - DNA, 17 bp, Arabidopsis thaliana
cgagtgacaggtcgagt

SEQ ID NO: 77815 - DNA, 17 bp, Arabidopsis thaliana
cgagtgacattggagcc

SEQ ID NO: 77816 - DNA, 17 bp, Arabidopsis thaliana
cgagtgacgcttggaac

SEQ ID NO: 77817 - DNA, 17 bp, Arabidopsis thaliana
cgagtgactttggagcc

SEQ ID NO: 77818 - DNA, 17 bp, Arabidopsis thaliana
cgagtgagcttgtgaac

SEQ ID NO: 77819 - DNA, 17 bp, Arabidopsis thaliana
cgagtgagtttcagcgg

SEQ ID NO: 77820 - DNA, 17 bp, Arabidopsis thaliana
cgagtgatgagaccgag

SEQ ID NO: 77821 - DNA, 17 bp, Arabidopsis thaliana
cgagtgatgtgatcgag

SEQ ID NO: 77822 - DNA, 17 bp, Arabidopsis thaliana
cgagtgatgtgattgag

SEQ ID NO: 77823 - DNA, 17 bp, Arabidopsis thaliana
cgagtgattgctggagt

SEQ ID NO: 77824 - DNA, 17 bp, Arabidopsis thaliana
cgagtgcaccgccgacc

SEQ ID NO: 77825 - DNA, 17 bp, Arabidopsis thaliana
cgagtgcacgtctgcct

SEQ ID NO: 77826 - DNA, 17 bp, Arabidopsis thaliana
cgagtgccgctcacgcc

SEQ ID NO: 77827 - DNA, 17 bp, Arabidopsis thaliana
cgagtgccgttcacgcc

SEQ ID NO: 77828 - DNA, 17 bp, Arabidopsis thaliana
cgagtgcgcagacagtt

SEQ ID NO: 77829 - DNA, 17 bp, Arabidopsis thaliana
cgagtggaagggccgtc

SEQ ID NO: 77830 - DNA, 17 bp, Arabidopsis thaliana
cgagtggactatgtagg

SEQ ID NO: 77831 - DNA, 17 bp, Arabidopsis thaliana
cgagtggaggtagagga

SEQ ID NO: 77832 - DNA, 17 bp, Arabidopsis thaliana
cgagtggattgacgatt

SEQ ID NO: 77833 - DNA, 17 bp, Arabidopsis thaliana
cgagtggatttggagtg

SEQ ID NO: 77834 - DNA, 17 bp, Arabidopsis thaliana
cgagtggattttcccgg

SEQ ID NO: 77835 - DNA, 17 bp, Arabidopsis thaliana
cgagtggccgctcgagt

SEQ ID NO: 77836 - DNA, 17 bp, Arabidopsis thaliana
cgagtggcctaggctaa

SEQ ID NO: 77837 - DNA, 17 bp, Arabidopsis thaliana
cgagtggcctaggctag

SEQ ID NO: 77838 - DNA, 17 bp, Arabidopsis thaliana
cgagtggctgctcgagt

SEQ ID NO: 77839 - DNA, 17 bp, Arabidopsis thaliana
cgagtgggcatggaatg

SEQ ID NO: 77840 - DNA, 17 bp, Arabidopsis thaliana
cgagtggtaaggcgggg

SEQ ID NO: 77841 - DNA, 17 bp, Arabidopsis thaliana
cgagtggtctacaagct

SEQ ID NO: 77842 - DNA, 17 bp, Arabidopsis thaliana
cgagtggtgatgtgata

SEQ ID NO: 77843 - DNA, 17 bp, Arabidopsis thaliana
cgagtggtggtggtgct

SEQ ID NO: 77844 - DNA, 17 bp, Arabidopsis thaliana
cgagtggtttggtcaag

SEQ ID NO: 77845 - DNA, 17 bp, Arabidopsis thaliana
cgagtggttttgcatga

SEQ ID NO: 77846 - DNA, 17 bp, Arabidopsis thaliana
cgagtgtcagctgaccg

SEQ ID NO: 77847 - DNA, 17 bp, Arabidopsis thaliana
cgagtgtccttgattgc

SEQ ID NO: 77848 - DNA, 17 bp, Arabidopsis thaliana
cgagtgtctggttgagt

SEQ ID NO: 77849 - DNA, 17 bp, Arabidopsis thaliana
cgagtgtcttgacggtt

SEQ ID NO: 77850 - DNA, 17 bp, Arabidopsis thaliana
cgagtgtgagcatgcct

SEQ ID NO: 77851 - DNA, 17 bp, Arabidopsis thaliana
cgagtgtgctagtgcac

SEQ ID NO: 77852 - DNA, 17 bp, Arabidopsis thaliana
cgagtgttctccagcta

SEQ ID NO: 77853 - DNA, 17 bp, Arabidopsis thaliana
cgagtgttgcgataccg

SEQ ID NO: 77854 - DNA, 17 bp, Arabidopsis thaliana
cgagttaacccagctgt

SEQ ID NO: 77855 - DNA, 17 bp, Arabidopsis thaliana
cgagttaacggtcgtaa

SEQ ID NO: 77856 - DNA, 17 bp, Arabidopsis thaliana
cgagttaccactgcttt

SEQ ID NO: 77857 - DNA, 17 bp, Arabidopsis thaliana
cgagttactgcgttcct

SEQ ID NO: 77858 - DNA, 17 bp, Arabidopsis thaliana
cgagttaggaccagcgg

SEQ ID NO: 77859 - DNA, 17 bp, Arabidopsis thaliana
cgagttcaagtctcggt

SEQ ID NO: 77860 - DNA, 17 bp, Arabidopsis thaliana
cgagttcaattctcgga

SEQ ID NO: 77861 - DNA, 17 bp, Arabidopsis thaliana
cgagttcaattctcggt

SEQ ID NO: 77862 - DNA, 17 bp, Arabidopsis thaliana
cgagttcacaccttccc

SEQ ID NO: 77863 - DNA, 17 bp, Arabidopsis thaliana
cgagttcacaccttcgc

SEQ ID NO: 77864 - DNA, 17 bp, Arabidopsis thaliana
cgagttcacaccttggc

SEQ ID NO: 77865 - DNA, 17 bp, Arabidopsis thaliana
cgagttcacacgtgcga

SEQ ID NO: 77866 - DNA, 17 bp, Arabidopsis thaliana
cgagttcacgattactt

SEQ ID NO: 77867 - DNA, 17 bp, Arabidopsis thaliana
cgagttcacggttaatt

SEQ ID NO: 77868 - DNA, 17 bp, Arabidopsis thaliana
cgagttcacggttactt

SEQ ID NO: 77869 - DNA, 17 bp, Arabidopsis thaliana
cgagttcagatctcggt

SEQ ID NO: 77870 - DNA, 17 bp, Arabidopsis thaliana
cgagttcaggagaagta

SEQ ID NO: 77871 - DNA, 17 bp, Arabidopsis thaliana
cgagttcaggtctcggt

SEQ ID NO: 77872 - DNA, 17 bp, Arabidopsis thaliana
cgagttcaggttcggtt

SEQ ID NO: 77873 - DNA, 17 bp, Arabidopsis thaliana
cgagttcagttctcgga

SEQ ID NO: 77874 - DNA, 17 bp, Arabidopsis thaliana
cgagttcatctcggtag

SEQ ID NO: 77875 - DNA, 17 bp, Arabidopsis thaliana
cgagttcatgatcgggt

SEQ ID NO: 77876 - DNA, 17 bp, Arabidopsis thaliana
cgagttcatgtctcggt

SEQ ID NO: 77877 - DNA, 17 bp, Arabidopsis thaliana
cgagttcattcgggatg

SEQ ID NO: 77878 - DNA, 17 bp, Arabidopsis thaliana
cgagttcatttctcgga

SEQ ID NO: 77879 - DNA, 17 bp, Arabidopsis thaliana
cgagttcatttgctaga

SEQ ID NO: 77880 - DNA, 17 bp, Arabidopsis thaliana
cgagttcctctctctgg

SEQ ID NO: 77881 - DNA, 17 bp, Arabidopsis thaliana
cgagttcgatcctcgcc

SEQ ID NO: 77882 - DNA, 17 bp, Arabidopsis thaliana
cgagttcgttcctcccc

SEQ ID NO: 77883 - DNA, 17 bp, Arabidopsis thaliana
cgagttcgttcctcgcc

SEQ ID NO: 77884 - DNA, 17 bp, Arabidopsis thaliana
cgagttcgtttcccggc

SEQ ID NO: 77885 - DNA, 17 bp, Arabidopsis thaliana
cgagttcgtttcccggt

SEQ ID NO: 77886 - DNA, 17 bp, Arabidopsis thaliana
cgagttcgtttctcgga

SEQ ID NO: 77887 - DNA, 17 bp, Arabidopsis thaliana
cgagttctatcgggccc

SEQ ID NO: 77888 - DNA, 17 bp, Arabidopsis thaliana
cgagttctatcgggtaa

SEQ ID NO: 77889 - DNA, 17 bp, Arabidopsis thaliana
cgagttctccaaatcta

SEQ ID NO: 77890 - DNA, 17 bp, Arabidopsis thaliana
cgagttctcctcgccgg

SEQ ID NO: 77891 - DNA, 17 bp, Arabidopsis thaliana
cgagttctcggaattgc

SEQ ID NO: 77892 - DNA, 17 bp, Arabidopsis thaliana
cgagttctgtacgaatt

SEQ ID NO: 77893 - DNA, 17 bp, Arabidopsis thaliana
cgagttctgtagtgtct

SEQ ID NO: 77894 - DNA, 17 bp, Arabidopsis thaliana
cgagttcttcatctcac

SEQ ID NO: 77895 - DNA, 17 bp, Arabidopsis thaliana
cgagttcttctcggaat

SEQ ID NO: 77896 - DNA, 17 bp, Arabidopsis thaliana
cgagttcttctgctttg

SEQ ID NO: 77897 - DNA, 17 bp, Arabidopsis thaliana
cgagttgacccttcttc

SEQ ID NO: 77898 - DNA, 17 bp, Arabidopsis thaliana
cgagttgacgggacgga

SEQ ID NO: 77899 - DNA, 17 bp, Arabidopsis thaliana
cgagttgactcagcaga

SEQ ID NO: 77900 - DNA, 17 bp, Arabidopsis thaliana
cgagttgagttgagttg

SEQ ID NO: 77901 - DNA, 17 bp, Arabidopsis thaliana
cgagttgatgacaacga

SEQ ID NO: 77902 - DNA, 17 bp, Arabidopsis thaliana
cgagttgatgacggtgc

SEQ ID NO: 77903 - DNA, 17 bp, Arabidopsis thaliana
cgagttggaatgctaca

SEQ ID NO: 77904 - DNA, 17 bp, Arabidopsis thaliana
cgagttggccagaaacg

SEQ ID NO: 77905 - DNA, 17 bp, Arabidopsis thaliana
cgagttggcgtctattc

SEQ ID NO: 77906 - DNA, 17 bp, Arabidopsis thaliana
cgagttggctaactatg

SEQ ID NO: 77907 - DNA, 17 bp, Arabidopsis thaliana
cgagttggggtgcttca

SEQ ID NO: 77908 - DNA, 17 bp, Arabidopsis thaliana
cgagttgttgggcttgg

SEQ ID NO: 77909 - DNA, 17 bp, Arabidopsis thaliana
cgagtttactgaagggt

SEQ ID NO: 77910 - DNA, 17 bp, Arabidopsis thaliana
cgagtttagcaggacgt

SEQ ID NO: 77911 - DNA, 17 bp, Arabidopsis thaliana
cgagtttatctaaggtc

SEQ ID NO: 77912 - DNA, 17 bp, Arabidopsis thaliana
cgagtttcatcacttag

SEQ ID NO: 77913 - DNA, 17 bp, Arabidopsis thaliana
cgagtttcccggctggt

SEQ ID NO: 77914 - DNA, 17 bp, Arabidopsis thaliana
cgagtttctcggaacgc

SEQ ID NO: 77915 - DNA, 17 bp, Arabidopsis thaliana
cgagtttctttccacgc

SEQ ID NO: 77916 - DNA, 17 bp, Arabidopsis thaliana
cgagtttgacaggacgt

SEQ ID NO: 77917 - DNA, 17 bp, Arabidopsis thaliana
cgagtttgattggttgt

SEQ ID NO: 77918 - DNA, 17 bp, Arabidopsis thaliana
cgagtttgctcgcggtg

SEQ ID NO: 77919 - DNA, 17 bp, Arabidopsis thaliana
cgagtttggatcggatt

SEQ ID NO: 77920 - DNA, 17 bp, Arabidopsis thaliana
cgagtttggcaggacgt

SEQ ID NO: 77921 - DNA, 17 bp, Arabidopsis thaliana
cgagtttggcgggacgt

SEQ ID NO: 77922 - DNA, 17 bp, Arabidopsis thaliana
cgagtttggtagcggtg

SEQ ID NO: 77923 - DNA, 17 bp, Arabidopsis thaliana
cgagtttgtgatcaatc

SEQ ID NO: 77924 - DNA, 17 bp, Arabidopsis thaliana
cgagttttgcgggacgg

SEQ ID NO: 77925 - DNA, 17 bp, Arabidopsis thaliana
cgagttttggcttgaac

SEQ ID NO: 77926 - DNA, 17 bp, Arabidopsis thaliana
cgagtttttcatacaga

SEQ ID NO: 77927 - DNA, 17 bp, Arabidopsis thaliana
cgagtttttcatacagg

SEQ ID NO: 77928 - DNA, 17 bp, Arabidopsis thaliana
cgagtttttcatatagg

SEQ ID NO: 77929 - DNA, 17 bp, Arabidopsis thaliana
cgataaaaagactcact

SEQ ID NO: 77930 - DNA, 17 bp, Arabidopsis thaliana
cgataaaagcagtgacg

SEQ ID NO: 77931 - DNA, 17 bp, Arabidopsis thaliana
cgataaacctccgccta

SEQ ID NO: 77932 - DNA, 17 bp, Arabidopsis thaliana
cgataaacctctgcatc

SEQ ID NO: 77933 - DNA, 17 bp, Arabidopsis thaliana
cgataacagccattaac

SEQ ID NO: 77934 - DNA, 17 bp, Arabidopsis thaliana
cgataacagccgttaac

SEQ ID NO: 77935 - DNA, 17 bp, Arabidopsis thaliana
cgataacatttgtgtga

SEQ ID NO: 77936 - DNA, 17 bp, Arabidopsis thaliana
cgataacctaaggcgac

SEQ ID NO: 77937 - DNA, 17 bp, Arabidopsis thaliana
cgataacctcgctgatc

SEQ ID NO: 77938 - DNA, 17 bp, Arabidopsis thaliana
cgataacgtcgaccgta

SEQ ID NO: 77939 - DNA, 17 bp, Arabidopsis thaliana
cgataactcaacataca

SEQ ID NO: 77940 - DNA, 17 bp, Arabidopsis thaliana
cgataactccagttctg

SEQ ID NO: 77941 - DNA, 17 bp, Arabidopsis thaliana
cgataactgctatgtct

SEQ ID NO: 77942 - DNA, 17 bp, Arabidopsis thaliana
cgataagtccgccttaa

SEQ ID NO: 77943 - DNA, 17 bp, Arabidopsis thaliana
cgataatgctattggga

SEQ ID NO: 77944 - DNA, 17 bp, Arabidopsis thaliana
cgatacaacacaaggat

SEQ ID NO: 77945 - DNA, 17 bp, Arabidopsis thaliana
cgatacaagcattccgc

SEQ ID NO: 77946 - DNA, 17 bp, Arabidopsis thaliana
cgatacaattccggaaa

SEQ ID NO: 77947 - DNA, 17 bp, Arabidopsis thaliana
cgatacacggtggatag

SEQ ID NO: 77948 - DNA, 17 bp, Arabidopsis thaliana
cgatacagactttccgt

SEQ ID NO: 77949 - DNA, 17 bp, Arabidopsis thaliana
cgatacagagaagacta

SEQ ID NO: 77950 - DNA, 17 bp, Arabidopsis thaliana
cgataccgagccctgct

SEQ ID NO: 77951 - DNA, 17 bp, Arabidopsis thaliana
cgataccgattaagttc

SEQ ID NO: 77952 - DNA, 17 bp, Arabidopsis thaliana
cgataccgggaaaaaaa

SEQ ID NO: 77953 - DNA, 17 bp, Arabidopsis thaliana
cgatacctctcattgct

SEQ ID NO: 77954 - DNA, 17 bp, Arabidopsis thaliana
cgatacgagatgcagaa

SEQ ID NO: 77955 - DNA, 17 bp, Arabidopsis thaliana
cgatacgagatggagat

SEQ ID NO: 77956 - DNA, 17 bp, Arabidopsis thaliana
cgatacgctcctggtca

SEQ ID NO: 77957 - DNA, 17 bp, Arabidopsis thaliana
cgatacgctcctggtct

SEQ ID NO: 77958 - DNA, 17 bp, Arabidopsis thaliana
cgatacgcttcttcatc

SEQ ID NO: 77959 - DNA, 17 bp, Arabidopsis thaliana
cgatacggagggaggtt

SEQ ID NO: 77960 - DNA, 17 bp, Arabidopsis thaliana
cgatacggtgcccgact

SEQ ID NO: 77961 - DNA, 17 bp, Arabidopsis thaliana
cgatacggttatgcaat

SEQ ID NO: 77962 - DNA, 17 bp, Arabidopsis thaliana
cgatactcttctcgtgc

SEQ ID NO: 77963 - DNA, 17 bp, Arabidopsis thaliana
cgatactggaaggtgcg

SEQ ID NO: 77964 - DNA, 17 bp, Arabidopsis thaliana
cgatacttcttgcgctt

SEQ ID NO: 77965 - DNA, 17 bp, Arabidopsis thaliana
cgatacttggtgtgaat

SEQ ID NO: 77966 - DNA, 17 bp, Arabidopsis thaliana
cgatacttggtgtgatt

SEQ ID NO: 77967 - DNA, 17 bp, Arabidopsis thaliana
cgatactttagccatgg

SEQ ID NO: 77968 - DNA, 17 bp, Arabidopsis thaliana
cgatagactctttttgt

SEQ ID NO: 77969 - DNA, 17 bp, Arabidopsis thaliana
cgatagactgattgggt

SEQ ID NO: 77970 - DNA, 17 bp, Arabidopsis thaliana
cgatagacttgacacgt

SEQ ID NO: 77971 - DNA, 17 bp, Arabidopsis thaliana
cgatagacttgacgcgt

SEQ ID NO: 77972 - DNA, 17 bp, Arabidopsis thaliana
cgatagacttgatacgt

SEQ ID NO: 77973 - DNA, 17 bp, Arabidopsis thaliana
cgatagcgaacaagtaa

SEQ ID NO: 77974 - DNA, 17 bp, Arabidopsis thaliana
cgatagcgaacaagtac

SEQ ID NO: 77975 - DNA, 17 bp, Arabidopsis thaliana
cgatagcgattaggtcg

SEQ ID NO: 77976 - DNA, 17 bp, Arabidopsis thaliana
cgatagcgtccttaatg

SEQ ID NO: 77977 - DNA, 17 bp, Arabidopsis thaliana
cgatagctggttggttg

SEQ ID NO: 77978 - DNA, 17 bp, Arabidopsis thaliana
cgatagctggtttggag

SEQ ID NO: 77979 - DNA, 17 bp, Arabidopsis thaliana
cgatagcttaaaagatc

SEQ ID NO: 77980 - DNA, 17 bp, Arabidopsis thaliana
cgataggtcattatgcg

SEQ ID NO: 77981 - DNA, 17 bp, Arabidopsis thaliana
cgatagtatgcgttgtc

SEQ ID NO: 77982 - DNA, 17 bp, Arabidopsis thaliana
cgatagtcggtcggaca

SEQ ID NO: 77983 - DNA, 17 bp, Arabidopsis thaliana
cgatagttggagactgc

SEQ ID NO: 77984 - DNA, 17 bp, Arabidopsis thaliana
cgatagtttttagtttc

SEQ ID NO: 77985 - DNA, 17 bp, Arabidopsis thaliana
cgatatccatcctgagt

SEQ ID NO: 77986 - DNA, 17 bp, Arabidopsis thaliana
cgatatgagattttgcc

SEQ ID NO: 77987 - DNA, 17 bp, Arabidopsis thaliana
cgatatgaggcttgctt

SEQ ID NO: 77988 - DNA, 17 bp, Arabidopsis thaliana
cgatatgcaatgtgctt

SEQ ID NO: 77989 - DNA, 17 bp, Arabidopsis thaliana
cgatatgggaagcgggg

SEQ ID NO: 77990 - DNA, 17 bp, Arabidopsis thaliana
cgatatgggtgtgtgga

SEQ ID NO: 77991 - DNA, 17 bp, Arabidopsis thaliana
cgatatggtgaagttag

SEQ ID NO: 77992 - DNA, 17 bp, Arabidopsis thaliana
cgatatgtccaaatgga

SEQ ID NO: 77993 - DNA, 17 bp, Arabidopsis thaliana
cgatatgtgagcgcctg

SEQ ID NO: 77994 - DNA, 17 bp, Arabidopsis thaliana
cgatattaccaccgcaa

SEQ ID NO: 77995 - DNA, 17 bp, Arabidopsis thaliana
cgatattgccaaacagt

SEQ ID NO: 77996 - DNA, 17 bp, Arabidopsis thaliana
cgatattgcttggtgct

SEQ ID NO: 77997 - DNA, 17 bp, Arabidopsis thaliana
cgatattgtccatgggc

SEQ ID NO: 77998 - DNA, 17 bp, Arabidopsis thaliana
cgatatttgatcaaggg

SEQ ID NO: 77999 - DNA, 17 bp, Arabidopsis thaliana
cgatattttggtcctca

SEQ ID NO: 78000 - DNA, 17 bp, Arabidopsis thaliana
cgatcaaacgaccctgg

SEQ ID NO: 78001 - DNA, 17 bp, Arabidopsis thaliana
cgatcaaatgtttacat

SEQ ID NO: 78002 - DNA, 17 bp, Arabidopsis thaliana
cgatcaacacactcttg

SEQ ID NO: 78003 - DNA, 17 bp, Arabidopsis thaliana
cgatcaacgaccagcga

SEQ ID NO: 78004 - DNA, 17 bp, Arabidopsis thaliana
cgatcaagacgctagaa

SEQ ID NO: 78005 - DNA, 17 bp, Arabidopsis thaliana
cgatcaagagcggtcct

SEQ ID NO: 78006 - DNA, 17 bp, Arabidopsis thaliana
cgatcaaggtccagcga

SEQ ID NO: 78007 - DNA, 17 bp, Arabidopsis thaliana
cgatcaatcaagaacag

SEQ ID NO: 78008 - DNA, 17 bp, Arabidopsis thaliana
cgatcaattactcgagc

SEQ ID NO: 78009 - DNA, 17 bp, Arabidopsis thaliana
cgatcacaaatgcaaat

SEQ ID NO: 78010 - DNA, 17 bp, Arabidopsis thaliana
cgatcacaaatgcaact

SEQ ID NO: 78011 - DNA, 17 bp, Arabidopsis thaliana
cgatcacaaggcccagt

SEQ ID NO: 78012 - DNA, 17 bp, Arabidopsis thaliana
cgatcacagttctagga

SEQ ID NO: 78013 - DNA, 17 bp, Arabidopsis thaliana
cgatcacggcagcgacg

SEQ ID NO: 78014 - DNA, 17 bp, Arabidopsis thaliana
cgatcagaccattttaa

SEQ ID NO: 78015 - DNA, 17 bp, Arabidopsis thaliana
cgatcagagctgtggat

SEQ ID NO: 78016 - DNA, 17 bp, Arabidopsis thaliana
cgatcagataccgtcct

SEQ ID NO: 78017 - DNA, 17 bp, Arabidopsis thaliana
cgatcagatgttgacac

SEQ ID NO: 78018 - DNA, 17 bp, Arabidopsis thaliana
cgatcagatgtttacat

SEQ ID NO: 78019 - DNA, 17 bp, Arabidopsis thaliana
cgatcagcacgccgagt

SEQ ID NO: 78020 - DNA, 17 bp, Arabidopsis thaliana
cgatcagcacgccgatc

SEQ ID NO: 78021 - DNA, 17 bp, Arabidopsis thaliana
cgatcagcccgttgtcg

SEQ ID NO: 78022 - DNA, 17 bp, Arabidopsis thaliana
cgatcagccctttgtcg

SEQ ID NO: 78023 - DNA, 17 bp, Arabidopsis thaliana
cgatcagccgctggttt

SEQ ID NO: 78024 - DNA, 17 bp, Arabidopsis thaliana
cgatcagcgaccgcaat

SEQ ID NO: 78025 - DNA, 17 bp, Arabidopsis thaliana
cgatcagcgacggaccg

SEQ ID NO: 78026 - DNA, 17 bp, Arabidopsis thaliana
cgatcagcggtccaggt

SEQ ID NO: 78027 - DNA, 17 bp, Arabidopsis thaliana
cgatcaggacaaagtgt

SEQ ID NO: 78028 - DNA, 17 bp, Arabidopsis thaliana
cgatcaggacgaggaat

SEQ ID NO: 78029 - DNA, 17 bp, Arabidopsis thaliana
cgatcaggtcgctgatg

SEQ ID NO: 78030 - DNA, 17 bp, Arabidopsis thaliana
cgatcagtcccggtaaa

SEQ ID NO: 78031 - DNA, 17 bp, Arabidopsis thaliana
cgatcagtcgctggttt

SEQ ID NO: 78032 - DNA, 17 bp, Arabidopsis thaliana
cgatcagtctatccagt

SEQ ID NO: 78033 - DNA, 17 bp, Arabidopsis thaliana
cgatcagtctatccatc

SEQ ID NO: 78034 - DNA, 17 bp, Arabidopsis thaliana
cgatcagtctatccatt

SEQ ID NO: 78035 - DNA, 17 bp, Arabidopsis thaliana
cgatcatagatgtccag

SEQ ID NO: 78036 - DNA, 17 bp, Arabidopsis thaliana
cgatcatatttccgtca

SEQ ID NO: 78037 - DNA, 17 bp, Arabidopsis thaliana
cgatcatcaagcaaggg

SEQ ID NO: 78038 - DNA, 17 bp, Arabidopsis thaliana
cgatcatcatcgtgaat

SEQ ID NO: 78039 - DNA, 17 bp, Arabidopsis thaliana
cgatcatcctgcagctt

SEQ ID NO: 78040 - DNA, 17 bp, Arabidopsis thaliana
cgatcatctcttctagc

SEQ ID NO: 78041 - DNA, 17 bp, Arabidopsis thaliana
cgatcatcttacttgag

SEQ ID NO: 78042 - DNA, 17 bp, Arabidopsis thaliana
cgatcatcttttgccat

SEQ ID NO: 78043 - DNA, 17 bp, Arabidopsis thaliana
cgatcatgacaggactc

SEQ ID NO: 78044 - DNA, 17 bp, Arabidopsis thaliana
cgatcatgattatctcc

SEQ ID NO: 78045 - DNA, 17 bp, Arabidopsis thaliana
cgatcatgctggttgtc

SEQ ID NO: 78046 - DNA, 17 bp, Arabidopsis thaliana
cgatcatgtgttcgccg

SEQ ID NO: 78047 - DNA, 17 bp, Arabidopsis thaliana
cgatcatgtgttcgcgg

SEQ ID NO: 78048 - DNA, 17 bp, Arabidopsis thaliana
cgatcatgtgttcgctg

SEQ ID NO: 78049 - DNA, 17 bp, Arabidopsis thaliana
cgatcatgtgttcgttg

SEQ ID NO: 78050 - DNA, 17 bp, Arabidopsis thaliana
cgatcatgttcgcagtt

SEQ ID NO: 78051 - DNA, 17 bp, Arabidopsis thaliana
cgatcattcggcaacgg

SEQ ID NO: 78052 - DNA, 17 bp, Arabidopsis thaliana
cgatcatttccgactat

SEQ ID NO: 78053 - DNA, 17 bp, Arabidopsis thaliana
cgatccaaacctgtcat

SEQ ID NO: 78054 - DNA, 17 bp, Arabidopsis thaliana
cgatccaagacgagtct

SEQ ID NO: 78055 - DNA, 17 bp, Arabidopsis thaliana
cgatccacatcggtccg

SEQ ID NO: 78056 - DNA, 17 bp, Arabidopsis thaliana
cgatccacctctactgt

SEQ ID NO: 78057 - DNA, 17 bp, Arabidopsis thaliana
cgatccacgctcaccgc

SEQ ID NO: 78058 - DNA, 17 bp, Arabidopsis thaliana
cgatccactgagattca

SEQ ID NO: 78059 - DNA, 17 bp, Arabidopsis thaliana
cgatccactgagattcc

SEQ ID NO: 78060 - DNA, 17 bp, Arabidopsis thaliana
cgatccagaaatcgtgc

SEQ ID NO: 78061 - DNA, 17 bp, Arabidopsis thaliana
cgatcccactaaatcgc

SEQ ID NO: 78062 - DNA, 17 bp, Arabidopsis thaliana
cgatccccacagacggc

SEQ ID NO: 78063 - DNA, 17 bp, Arabidopsis thaliana
cgatcccgcgagggtga

SEQ ID NO: 78064 - DNA, 17 bp, Arabidopsis thaliana
cgatcccggaagtccat

SEQ ID NO: 78065 - DNA, 17 bp, Arabidopsis thaliana
cgatcccgtgttgctct

SEQ ID NO: 78066 - DNA, 17 bp, Arabidopsis thaliana
cgatccggacggtgaat

SEQ ID NO: 78067 - DNA, 17 bp, Arabidopsis thaliana
cgatccgggcggacgac

SEQ ID NO: 78068 - DNA, 17 bp, Arabidopsis thaliana
cgatccgggcggaggac

SEQ ID NO: 78069 - DNA, 17 bp, Arabidopsis thaliana
cgatccggtggtatgcg

SEQ ID NO: 78070 - DNA, 17 bp, Arabidopsis thaliana
cgatccgtgcgcaatgg

SEQ ID NO: 78071 - DNA, 17 bp, Arabidopsis thaliana
cgatccgtttgtgaaag

SEQ ID NO: 78072 - DNA, 17 bp, Arabidopsis thaliana
cgatcctaagagtcggg

SEQ ID NO: 78073 - DNA, 17 bp, Arabidopsis thaliana
cgatcctatgagttagc

SEQ ID NO: 78074 - DNA, 17 bp, Arabidopsis thaliana
cgatcctatgagttagg

SEQ ID NO: 78075 - DNA, 17 bp, Arabidopsis thaliana
cgatcctattgtgttga

SEQ ID NO: 78076 - DNA, 17 bp, Arabidopsis thaliana
cgatcctattgtgttgc

SEQ ID NO: 78077 - DNA, 17 bp, Arabidopsis thaliana
cgatcctattgtgttgg

SEQ ID NO: 78078 - DNA, 17 bp, Arabidopsis thaliana
cgatcctccattgtcac

SEQ ID NO: 78079 - DNA, 17 bp, Arabidopsis thaliana
cgatcctcgccgggggc

SEQ ID NO: 78080 - DNA, 17 bp, Arabidopsis thaliana
cgatcctgcgtgtgggc

SEQ ID NO: 78081 - DNA, 17 bp, Arabidopsis thaliana
cgatcctgggcagcacc

SEQ ID NO: 78082 - DNA, 17 bp, Arabidopsis thaliana
cgatcctgtagatggat

SEQ ID NO: 78083 - DNA, 17 bp, Arabidopsis thaliana
cgatccttggttcagtg

SEQ ID NO: 78084 - DNA, 17 bp, Arabidopsis thaliana
cgatcctttagaccttc

SEQ ID NO: 78085 - DNA, 17 bp, Arabidopsis thaliana
cgatcgaaaccgccgac

SEQ ID NO: 78086 - DNA, 17 bp, Arabidopsis thaliana
cgatcgacaccagttgc

SEQ ID NO: 78087 - DNA, 17 bp, Arabidopsis thaliana
cgatcgacaccatcggc

SEQ ID NO: 78088 - DNA, 17 bp, Arabidopsis thaliana
cgatcgacactcttgat

SEQ ID NO: 78089 - DNA, 17 bp, Arabidopsis thaliana
cgatcgacattggatcc

SEQ ID NO: 78090 - DNA, 17 bp, Arabidopsis thaliana
cgatcgacggcgattat

SEQ ID NO: 78091 - DNA, 17 bp, Arabidopsis thaliana
cgatcgagatgagctct

SEQ ID NO: 78092 - DNA, 17 bp, Arabidopsis thaliana
cgatcgagatgagctgc

SEQ ID NO: 78093 - DNA, 17 bp, Arabidopsis thaliana
cgatcgagtatgcgagt

SEQ ID NO: 78094 - DNA, 17 bp, Arabidopsis thaliana
cgatcgataaacctctg

SEQ ID NO: 78095 - DNA, 17 bp, Arabidopsis thaliana
cgatcgatagacttgac

SEQ ID NO: 78096 - DNA, 17 bp, Arabidopsis thaliana
cgatcgatcctgtgcat

SEQ ID NO: 78097 - DNA, 17 bp, Arabidopsis thaliana
cgatcgatggtatcata

SEQ ID NO: 78098 - DNA, 17 bp, Arabidopsis thaliana
cgatcgattcggggcgt

SEQ ID NO: 78099 - DNA, 17 bp, Arabidopsis thaliana
cgatcgccgcttctcac

SEQ ID NO: 78100 - DNA, 17 bp, Arabidopsis thaliana
cgatcggatgttgacac

SEQ ID NO: 78101 - DNA, 17 bp, Arabidopsis thaliana
cgatcggcaacgtaaca

SEQ ID NO: 78102 - DNA, 17 bp, Arabidopsis thaliana
cgatcggcggaccggag

SEQ ID NO: 78103 - DNA, 17 bp, Arabidopsis thaliana
cgatcggcggaccggat

SEQ ID NO: 78104 - DNA, 17 bp, Arabidopsis thaliana
cgatcgggtttttcggg

SEQ ID NO: 78105 - DNA, 17 bp, Arabidopsis thaliana
cgatcggttgccaacgt

SEQ ID NO: 78106 - DNA, 17 bp, Arabidopsis thaliana
cgatcggtttgtccgtc

SEQ ID NO: 78107 - DNA, 17 bp, Arabidopsis thaliana
cgatcgtagttcacatg

SEQ ID NO: 78108 - DNA, 17 bp, Arabidopsis thaliana
cgatcgtatgctttgct

SEQ ID NO: 78109 - DNA, 17 bp, Arabidopsis thaliana
cgatcgtcggctacgag

SEQ ID NO: 78110 - DNA, 17 bp, Arabidopsis thaliana
cgatcgtcggctatgag

SEQ ID NO: 78111 - DNA, 17 bp, Arabidopsis thaliana
cgatcgtctgacggagc

SEQ ID NO: 78112 - DNA, 17 bp, Arabidopsis thaliana
cgatcgtgggacggatc

SEQ ID NO: 78113 - DNA, 17 bp, Arabidopsis thaliana
cgatcgtgtcgtcggta

SEQ ID NO: 78114 - DNA, 17 bp, Arabidopsis thaliana
cgatcgtgtttgcaaaa

SEQ ID NO: 78115 - DNA, 17 bp, Arabidopsis thaliana
cgatcgttgggtcaccc

SEQ ID NO: 78116 - DNA, 17 bp, Arabidopsis thaliana
cgatctaaacccgtcat

SEQ ID NO: 78117 - DNA, 17 bp, Arabidopsis thaliana
cgatctaaatcaagccg

SEQ ID NO: 78118 - DNA, 17 bp, Arabidopsis thaliana
cgatctaacggcgacaa

SEQ ID NO: 78119 - DNA, 17 bp, Arabidopsis thaliana
cgatctacactactcaa

SEQ ID NO: 78120 - DNA, 17 bp, Arabidopsis thaliana
cgatctacacttctatc

SEQ ID NO: 78121 - DNA, 17 bp, Arabidopsis thaliana
cgatctacgatgtcagc

SEQ ID NO: 78122 - DNA, 17 bp, Arabidopsis thaliana
cgatctacggcacgcaa

SEQ ID NO: 78123 - DNA, 17 bp, Arabidopsis thaliana
cgatctacgtccgtaat

SEQ ID NO: 78124 - DNA, 17 bp, Arabidopsis thaliana
cgatctacttgcaaact

SEQ ID NO: 78125 - DNA, 17 bp, Arabidopsis thaliana
cgatctatacccggccg

SEQ ID NO: 78126 - DNA, 17 bp, Arabidopsis thaliana
cgatctatcattgagga

SEQ ID NO: 78127 - DNA, 17 bp, Arabidopsis thaliana
cgatctcaatttgctag

SEQ ID NO: 78128 - DNA, 17 bp, Arabidopsis thaliana
cgatctcacgcgctaac

SEQ ID NO: 78129 - DNA, 17 bp, Arabidopsis thaliana
cgatctcacgcgtcaac

SEQ ID NO: 78130 - DNA, 17 bp, Arabidopsis thaliana
cgatctcagattttgac

SEQ ID NO: 78131 - DNA, 17 bp, Arabidopsis thaliana
cgatctcaggatctgga

SEQ ID NO: 78132 - DNA, 17 bp, Arabidopsis thaliana
cgatctcatgttccttc

SEQ ID NO: 78133 - DNA, 17 bp, Arabidopsis thaliana
cgatctcattgggccgg

SEQ ID NO: 78134 - DNA, 17 bp, Arabidopsis thaliana
cgatctccaagttgcga

SEQ ID NO: 78135 - DNA, 17 bp, Arabidopsis thaliana
cgatctccaagttgcgg

SEQ ID NO: 78136 - DNA, 17 bp, Arabidopsis thaliana
cgatctccatttttttg

SEQ ID NO: 78137 - DNA, 17 bp, Arabidopsis thaliana
cgatctccctctactgc

SEQ ID NO: 78138 - DNA, 17 bp, Arabidopsis thaliana
cgatctccggcgataca

SEQ ID NO: 78139 - DNA, 17 bp, Arabidopsis thaliana
cgatctcgacagttata

SEQ ID NO: 78140 - DNA, 17 bp, Arabidopsis thaliana
cgatctcggtgctccaa

SEQ ID NO: 78141 - DNA, 17 bp, Arabidopsis thaliana
cgatctcggtggctgct

SEQ ID NO: 78142 - DNA, 17 bp, Arabidopsis thaliana
cgatctcgtctttttca

SEQ ID NO: 78143 - DNA, 17 bp, Arabidopsis thaliana
cgatctctaagctttgg

SEQ ID NO: 78144 - DNA, 17 bp, Arabidopsis thaliana
cgatctcttgggtgaac

SEQ ID NO: 78145 - DNA, 17 bp, Arabidopsis thaliana
cgatctgcaaggttaac

SEQ ID NO: 78146 - DNA, 17 bp, Arabidopsis thaliana
cgatctgccaaagacgc

SEQ ID NO: 78147 - DNA, 17 bp, Arabidopsis thaliana
cgatctgccgaagctgg

SEQ ID NO: 78148 - DNA, 17 bp, Arabidopsis thaliana
cgatctgccgaagctgt

SEQ ID NO: 78149 - DNA, 17 bp, Arabidopsis thaliana
cgatctgcggtttagtc

SEQ ID NO: 78150 - DNA, 17 bp, Arabidopsis thaliana
cgatctgctgtcgatgg

SEQ ID NO: 78151 - DNA, 17 bp, Arabidopsis thaliana
cgatctgcttctccatt

SEQ ID NO: 78152 - DNA, 17 bp, Arabidopsis thaliana
cgatctgcttctccctc

SEQ ID NO: 78153 - DNA, 17 bp, Arabidopsis thaliana
cgatctgcttctgtttt

SEQ ID NO: 78154 - DNA, 17 bp, Arabidopsis thaliana
cgatctgggacccacta

SEQ ID NO: 78155 - DNA, 17 bp, Arabidopsis thaliana
cgatctgggatataggt

SEQ ID NO: 78156 - DNA, 17 bp, Arabidopsis thaliana
cgatctgtaaactactt

SEQ ID NO: 78157 - DNA, 17 bp, Arabidopsis thaliana
cgatctgttaatttcaa

SEQ ID NO: 78158 - DNA, 17 bp, Arabidopsis thaliana
cgatcttaaaagcctaa

SEQ ID NO: 78159 - DNA, 17 bp, Arabidopsis thaliana
cgatcttaaatcgggtc

SEQ ID NO: 78160 - DNA, 17 bp, Arabidopsis thaliana
cgatcttagatgttgac

SEQ ID NO: 78161 - DNA, 17 bp, Arabidopsis thaliana
cgatcttagatgttgat

SEQ ID NO: 78162 - DNA, 17 bp, Arabidopsis thaliana
cgatcttcaacacttct

SEQ ID NO: 78163 - DNA, 17 bp, Arabidopsis thaliana
cgatcttcaaggttaac

SEQ ID NO: 78164 - DNA, 17 bp, Arabidopsis thaliana
cgatcttcagatgggcg

SEQ ID NO: 78165 - DNA, 17 bp, Arabidopsis thaliana
cgatcttcccctctctg

SEQ ID NO: 78166 - DNA, 17 bp, Arabidopsis thaliana
cgatcttcgagtgcttc

SEQ ID NO: 78167 - DNA, 17 bp, Arabidopsis thaliana
cgatcttggttaacgtc

SEQ ID NO: 78168 - DNA, 17 bp, Arabidopsis thaliana
cgatctttggccaactg

SEQ ID NO: 78169 - DNA, 17 bp, Arabidopsis thaliana
cgatctttggttctcca

SEQ ID NO: 78170 - DNA, 17 bp, Arabidopsis thaliana
cgatcttttacagagca

SEQ ID NO: 78171 - DNA, 17 bp, Arabidopsis thaliana
cgatcttttcacttcgc

SEQ ID NO: 78172 - DNA, 17 bp, Arabidopsis thaliana
cgatcttttgattgcgc

SEQ ID NO: 78173 - DNA, 17 bp, Arabidopsis thaliana
cgatctttttaaatgtc

SEQ ID NO: 78174 - DNA, 17 bp, Arabidopsis thaliana
cgatgaaattagggttc

SEQ ID NO: 78175 - DNA, 17 bp, Arabidopsis thaliana
cgatgaacaagtttcta

SEQ ID NO: 78176 - DNA, 17 bp, Arabidopsis thaliana
cgatgaaccgcaccgtg

SEQ ID NO: 78177 - DNA, 17 bp, Arabidopsis thaliana
cgatgaacggtatggcg

SEQ ID NO: 78178 - DNA, 17 bp, Arabidopsis thaliana
cgatgaagctcggcttt

SEQ ID NO: 78179 - DNA, 17 bp, Arabidopsis thaliana
cgatgaagctttgctta

SEQ ID NO: 78180 - DNA, 17 bp, Arabidopsis thaliana
cgatgaagcttttgccg

SEQ ID NO: 78181 - DNA, 17 bp, Arabidopsis thaliana
cgatgaagtctcggacc

SEQ ID NO: 78182 - DNA, 17 bp, Arabidopsis thaliana
cgatgaagtttttgccg

SEQ ID NO: 78183 - DNA, 17 bp, Arabidopsis thaliana
cgatgaataatgcgatc

SEQ ID NO: 78184 - DNA, 17 bp, Arabidopsis thaliana
cgatgaatcgcatgtag

SEQ ID NO: 78185 - DNA, 17 bp, Arabidopsis thaliana
cgatgaattggattggc

SEQ ID NO: 78186 - DNA, 17 bp, Arabidopsis thaliana
cgatgaccattgttgtc

SEQ ID NO: 78187 - DNA, 17 bp, Arabidopsis thaliana
cgatgacccagtgactc

SEQ ID NO: 78188 - DNA, 17 bp, Arabidopsis thaliana
cgatgacccggtgaccc

SEQ ID NO: 78189 - DNA, 17 bp, Arabidopsis thaliana
cgatgacccggttaccc

SEQ ID NO: 78190 - DNA, 17 bp, Arabidopsis thaliana
cgatgacctttaagctt

SEQ ID NO: 78191 - DNA, 17 bp, Arabidopsis thaliana
cgatgacgttcacggga

SEQ ID NO: 78192 - DNA, 17 bp, Arabidopsis thaliana
cgatgactccgacagca

SEQ ID NO: 78193 - DNA, 17 bp, Arabidopsis thaliana
cgatgactttgagagga

SEQ ID NO: 78194 - DNA, 17 bp, Arabidopsis thaliana
cgatgactttgcgagga

SEQ ID NO: 78195 - DNA, 17 bp, Arabidopsis thaliana
cgatgagagaaccatga

SEQ ID NO: 78196 - DNA, 17 bp, Arabidopsis thaliana
cgatgagatgtcttagc

SEQ ID NO: 78197 - DNA, 17 bp, Arabidopsis thaliana
cgatgagattcgggttg

SEQ ID NO: 78198 - DNA, 17 bp, Arabidopsis thaliana
cgatgagcctcgaagct

SEQ ID NO: 78199 - DNA, 17 bp, Arabidopsis thaliana
cgatgagcttgagagaa

SEQ ID NO: 78200 - DNA, 17 bp, Arabidopsis thaliana
cgatgagctttgtgcct

SEQ ID NO: 78201 - DNA, 17 bp, Arabidopsis thaliana
cgatgagtaggagtgcg

SEQ ID NO: 78202 - DNA, 17 bp, Arabidopsis thaliana
cgatgataatggcgact

SEQ ID NO: 78203 - DNA, 17 bp, Arabidopsis thaliana
cgatgataccagttgag

SEQ ID NO: 78204 - DNA, 17 bp, Arabidopsis thaliana
cgatgataccggtccga

SEQ ID NO: 78205 - DNA, 17 bp, Arabidopsis thaliana
cgatgatatctgaaccg

SEQ ID NO: 78206 - DNA, 17 bp, Arabidopsis thaliana
cgatgatcagagataaa

SEQ ID NO: 78207 - DNA, 17 bp, Arabidopsis thaliana
cgatgatgactcagacg

SEQ ID NO: 78208 - DNA, 17 bp, Arabidopsis thaliana
cgatgatggaggctcct

SEQ ID NO: 78209 - DNA, 17 bp, Arabidopsis thaliana
cgatgatggatgtccac

SEQ ID NO: 78210 - DNA, 17 bp, Arabidopsis thaliana
cgatgatggctcctctg

SEQ ID NO: 78211 - DNA, 17 bp, Arabidopsis thaliana
cgatgatgggttgatga

SEQ ID NO: 78212 - DNA, 17 bp, Arabidopsis thaliana
cgatgatgtccgcacac

SEQ ID NO: 78213 - DNA, 17 bp, Arabidopsis thaliana
cgatgatgtgagtctaa

SEQ ID NO: 78214 - DNA, 17 bp, Arabidopsis thaliana
cgatgattatttgcccg

SEQ ID NO: 78215 - DNA, 17 bp, Arabidopsis thaliana
cgatgattcggacgcaa

SEQ ID NO: 78216 - DNA, 17 bp, Arabidopsis thaliana
cgatgattctctttcgc

SEQ ID NO: 78217 - DNA, 17 bp, Arabidopsis thaliana
cgatgatttcgcctact

SEQ ID NO: 78218 - DNA, 17 bp, Arabidopsis thaliana
cgatgcaagaactccct

SEQ ID NO: 78219 - DNA, 17 bp, Arabidopsis thaliana
cgatgcagttttggatg

SEQ ID NO: 78220 - DNA, 17 bp, Arabidopsis thaliana
cgatgccaagaagtcaa

SEQ ID NO: 78221 - DNA, 17 bp, Arabidopsis thaliana
cgatgccaatgggtctg

SEQ ID NO: 78222 - DNA, 17 bp, Arabidopsis thaliana
cgatgccagaagtagga

SEQ ID NO: 78223 - DNA, 17 bp, Arabidopsis thaliana
cgatgccagaggttcca

SEQ ID NO: 78224 - DNA, 17 bp, Arabidopsis thaliana
cgatgcccgtaatcttc

SEQ ID NO: 78225 - DNA, 17 bp, Arabidopsis thaliana
cgatgcccgttgagagg

SEQ ID NO: 78226 - DNA, 17 bp, Arabidopsis thaliana
cgatgcccttagatgtt

SEQ ID NO: 78227 - DNA, 17 bp, Arabidopsis thaliana
cgatgccgaccagggat

SEQ ID NO: 78228 - DNA, 17 bp, Arabidopsis thaliana
cgatgccgccatcgttg

SEQ ID NO: 78229 - DNA, 17 bp, Arabidopsis thaliana
cgatgccggacgttctt

SEQ ID NO: 78230 - DNA, 17 bp, Arabidopsis thaliana
cgatgccgggttatgcg

SEQ ID NO: 78231 - DNA, 17 bp, Arabidopsis thaliana
cgatgcctctaggtatc

SEQ ID NO: 78232 - DNA, 17 bp, Arabidopsis thaliana
cgatgcgaactgggtcc

SEQ ID NO: 78233 - DNA, 17 bp, Arabidopsis thaliana
cgatgcgagagccgaga

SEQ ID NO: 78234 - DNA, 17 bp, Arabidopsis thaliana
cgatgcgatcataccag

SEQ ID NO: 78235 - DNA, 17 bp, Arabidopsis thaliana
cgatgcgcgagcatgga

SEQ ID NO: 78236 - DNA, 17 bp, Arabidopsis thaliana
cgatgcgctgcagagcc

SEQ ID NO: 78237 - DNA, 17 bp, Arabidopsis thaliana
cgatgcgctggattatg

SEQ ID NO: 78238 - DNA, 17 bp, Arabidopsis thaliana
cgatgcgcttgactaaa

SEQ ID NO: 78239 - DNA, 17 bp, Arabidopsis thaliana
cgatgcggattacgggg

SEQ ID NO: 78240 - DNA, 17 bp, Arabidopsis thaliana
cgatgcggattacggtg

SEQ ID NO: 78241 - DNA, 17 bp, Arabidopsis thaliana
cgatgcgggacgttgaa

SEQ ID NO: 78242 - DNA, 17 bp, Arabidopsis thaliana
cgatgcgggatgaaccg

SEQ ID NO: 78243 - DNA, 17 bp, Arabidopsis thaliana
cgatgcggtcgatgttg

SEQ ID NO: 78244 - DNA, 17 bp, Arabidopsis thaliana
cgatgcggttacgtttt

SEQ ID NO: 78245 - DNA, 17 bp, Arabidopsis thaliana
cgatgcggttttggatg

SEQ ID NO: 78246 - DNA, 17 bp, Arabidopsis thaliana
cgatgcggttttgggtg

SEQ ID NO: 78247 - DNA, 17 bp, Arabidopsis thaliana
cgatgcgtaacgatggt

SEQ ID NO: 78248 - DNA, 17 bp, Arabidopsis thaliana
cgatgcgtccacgataa

SEQ ID NO: 78249 - DNA, 17 bp, Arabidopsis thaliana
cgatgcgtcctggtcgg

SEQ ID NO: 78250 - DNA, 17 bp, Arabidopsis thaliana
cgatgctactgggaagc

SEQ ID NO: 78251 - DNA, 17 bp, Arabidopsis thaliana
cgatgctatctgtcgac

SEQ ID NO: 78252 - DNA, 17 bp, Arabidopsis thaliana
cgatgctccaatggtca

SEQ ID NO: 78253 - DNA, 17 bp, Arabidopsis thaliana
cgatgctctgttaccgt

SEQ ID NO: 78254 - DNA, 17 bp, Arabidopsis thaliana
cgatgctcttagttctt

SEQ ID NO: 78255 - DNA, 17 bp, Arabidopsis thaliana
cgatgctgattaggcaa

SEQ ID NO: 78256 - DNA, 17 bp, Arabidopsis thaliana
cgatgctgtcctagccg

SEQ ID NO: 78257 - DNA, 17 bp, Arabidopsis thaliana
cgatgctgtcctagctg

SEQ ID NO: 78258 - DNA, 17 bp, Arabidopsis thaliana
cgatgcttgtgcgatct

SEQ ID NO: 78259 - DNA, 17 bp, Arabidopsis thaliana
cgatgctttgcggctgt

SEQ ID NO: 78260 - DNA, 17 bp, Arabidopsis thaliana
cgatggaacggcggtgt

SEQ ID NO: 78261 - DNA, 17 bp, Arabidopsis thaliana
cgatggacaaacatgat

SEQ ID NO: 78262 - DNA, 17 bp, Arabidopsis thaliana
cgatggaccgatggact

SEQ ID NO: 78263 - DNA, 17 bp, Arabidopsis thaliana
cgatggacgatttcatg

SEQ ID NO: 78264 - DNA, 17 bp, Arabidopsis thaliana
cgatggacggtggttta

SEQ ID NO: 78265 - DNA, 17 bp, Arabidopsis thaliana
cgatggactggtgggcc

SEQ ID NO: 78266 - DNA, 17 bp, Arabidopsis thaliana
cgatggacttgctctta

SEQ ID NO: 78267 - DNA, 17 bp, Arabidopsis thaliana
cgatggagaaagttcct

SEQ ID NO: 78268 - DNA, 17 bp, Arabidopsis thaliana
cgatggagatggtctaa

SEQ ID NO: 78269 - DNA, 17 bp, Arabidopsis thaliana
cgatggagcggcggtgt

SEQ ID NO: 78270 - DNA, 17 bp, Arabidopsis thaliana
cgatggatcaccgttcg

SEQ ID NO: 78271 - DNA, 17 bp, Arabidopsis thaliana
cgatggatgtagttaag

SEQ ID NO: 78272 - DNA, 17 bp, Arabidopsis thaliana
cgatggattgcctacgt

SEQ ID NO: 78273 - DNA, 17 bp, Arabidopsis thaliana
cgatggattttgcaagc

SEQ ID NO: 78274 - DNA, 17 bp, Arabidopsis thaliana
cgatggcaatcaaacca

SEQ ID NO: 78275 - DNA, 17 bp, Arabidopsis thaliana
cgatggcacgtctgcct

SEQ ID NO: 78276 - DNA, 17 bp, Arabidopsis thaliana
cgatggccttcggattc

SEQ ID NO: 78277 - DNA, 17 bp, Arabidopsis thaliana
cgatggcgatggtttac

SEQ ID NO: 78278 - DNA, 17 bp, Arabidopsis thaliana
cgatgggagtggattta

SEQ ID NO: 78279 - DNA, 17 bp, Arabidopsis thaliana
cgatgggcgttctagtg

SEQ ID NO: 78280 - DNA, 17 bp, Arabidopsis thaliana
cgatgggttctgtttac

SEQ ID NO: 78281 - DNA, 17 bp, Arabidopsis thaliana
cgatggtaggatagtgg

SEQ ID NO: 78282 - DNA, 17 bp, Arabidopsis thaliana
cgatggtcatccgagac

SEQ ID NO: 78283 - DNA, 17 bp, Arabidopsis thaliana
cgatggtccctgcggat

SEQ ID NO: 78284 - DNA, 17 bp, Arabidopsis thaliana
cgatggtcctgttcgtt

SEQ ID NO: 78285 - DNA, 17 bp, Arabidopsis thaliana
cgatggtgcatggctgt

SEQ ID NO: 78286 - DNA, 17 bp, Arabidopsis thaliana
cgatggttactggctgg

SEQ ID NO: 78287 - DNA, 17 bp, Arabidopsis thaliana
cgatgtacgagttctac

SEQ ID NO: 78288 - DNA, 17 bp, Arabidopsis thaliana
cgatgtaggactccgca

SEQ ID NO: 78289 - DNA, 17 bp, Arabidopsis thaliana
cgatgtagggccggtaa

SEQ ID NO: 78290 - DNA, 17 bp, Arabidopsis thaliana
cgatgtaggttgctgtg

SEQ ID NO: 78291 - DNA, 17 bp, Arabidopsis thaliana
cgatgtattttgacatc

SEQ ID NO: 78292 - DNA, 17 bp, Arabidopsis thaliana
cgatgtcagcgcctaca

SEQ ID NO: 78293 - DNA, 17 bp, Arabidopsis thaliana
cgatgtcagcgcttaca

SEQ ID NO: 78294 - DNA, 17 bp, Arabidopsis thaliana
cgatgtcctccagccgt

SEQ ID NO: 78295 - DNA, 17 bp, Arabidopsis thaliana
cgatgtccttaacgtct

SEQ ID NO: 78296 - DNA, 17 bp, Arabidopsis thaliana
cgatgtcggctcttcct

SEQ ID NO: 78297 - DNA, 17 bp, Arabidopsis thaliana
cgatgtcggctcttcgc

SEQ ID NO: 78298 - DNA, 17 bp, Arabidopsis thaliana
cgatgtcggctcttctc

SEQ ID NO: 78299 - DNA, 17 bp, Arabidopsis thaliana
cgatgtcgtccagcggt

SEQ ID NO: 78300 - DNA, 17 bp, Arabidopsis thaliana
cgatgtctgttggtgcc

SEQ ID NO: 78301 - DNA, 17 bp, Arabidopsis thaliana
cgatgtgaaatatgttt

SEQ ID NO: 78302 - DNA, 17 bp, Arabidopsis thaliana
cgatgtgcattggtcgg

SEQ ID NO: 78303 - DNA, 17 bp, Arabidopsis thaliana
cgatgtgcgacctttgg

SEQ ID NO: 78304 - DNA, 17 bp, Arabidopsis thaliana
cgatgtgctggcgatgt

SEQ ID NO: 78305 - DNA, 17 bp, Arabidopsis thaliana
cgatgtggatcaggttg

SEQ ID NO: 78306 - DNA, 17 bp, Arabidopsis thaliana
cgatgtggattaagctg

SEQ ID NO: 78307 - DNA, 17 bp, Arabidopsis thaliana
cgatgtggcttcgaatt

SEQ ID NO: 78308 - DNA, 17 bp, Arabidopsis thaliana
cgatgtgggacctttgg

SEQ ID NO: 78309 - DNA, 17 bp, Arabidopsis thaliana
cgatgtggtcatttggc

SEQ ID NO: 78310 - DNA, 17 bp, Arabidopsis thaliana
cgatgtggtcatttggt

SEQ ID NO: 78311 - DNA, 17 bp, Arabidopsis thaliana
cgatgtgttggcttata

SEQ ID NO: 78312 - DNA, 17 bp, Arabidopsis thaliana
cgatgttactaaaccat

SEQ ID NO: 78313 - DNA, 17 bp, Arabidopsis thaliana
cgatgttggggatttga

SEQ ID NO: 78314 - DNA, 17 bp, Arabidopsis thaliana
cgatgttgtctctcacc

SEQ ID NO: 78315 - DNA, 17 bp, Arabidopsis thaliana
cgatgttgtggctatcc

SEQ ID NO: 78316 - DNA, 17 bp, Arabidopsis thaliana
cgatgttgtgtcgtgtg

SEQ ID NO: 78317 - DNA, 17 bp, Arabidopsis thaliana
cgatgtttccatgattg

SEQ ID NO: 78318 - DNA, 17 bp, Arabidopsis thaliana
cgatgtttgtgcccacg

SEQ ID NO: 78319 - DNA, 17 bp, Arabidopsis thaliana
cgattaaacgggttgga

SEQ ID NO: 78320 - DNA, 17 bp, Arabidopsis thaliana
cgattaaaggaggtcag

SEQ ID NO: 78321 - DNA, 17 bp, Arabidopsis thaliana
cgattaagacagcagga

SEQ ID NO: 78322 - DNA, 17 bp, Arabidopsis thaliana
cgattaagagaaacaac

SEQ ID NO: 78323 - DNA, 17 bp, Arabidopsis thaliana
cgattaagtttgagtga

SEQ ID NO: 78324 - DNA, 17 bp, Arabidopsis thaliana
cgattaattttgggtgt

SEQ ID NO: 78325 - DNA, 17 bp, Arabidopsis thaliana
cgattacaagaacacac

SEQ ID NO: 78326 - DNA, 17 bp, Arabidopsis thaliana
cgattacggtggcggcc

SEQ ID NO: 78327 - DNA, 17 bp, Arabidopsis thaliana
cgattactgaggatgag

SEQ ID NO: 78328 - DNA, 17 bp, Arabidopsis thaliana
cgattagaccgctgacg

SEQ ID NO: 78329 - DNA, 17 bp, Arabidopsis thaliana
cgattagagcaccatta

SEQ ID NO: 78330 - DNA, 17 bp, Arabidopsis thaliana
cgattagataacagctt

SEQ ID NO: 78331 - DNA, 17 bp, Arabidopsis thaliana
cgattagccagccaaaa

SEQ ID NO: 78332 - DNA, 17 bp, Arabidopsis thaliana
cgattagcttccctata

SEQ ID NO: 78333 - DNA, 17 bp, Arabidopsis thaliana
cgattaggcgttctagg

SEQ ID NO: 78334 - DNA, 17 bp, Arabidopsis thaliana
cgattaggtatttcggg

SEQ ID NO: 78335 - DNA, 17 bp, Arabidopsis thaliana
cgattaggttattggcc

SEQ ID NO: 78336 - DNA, 17 bp, Arabidopsis thaliana
cgattaggttctggtgg

SEQ ID NO: 78337 - DNA, 17 bp, Arabidopsis thaliana
cgattagtcgccgcttt

SEQ ID NO: 78338 - DNA, 17 bp, Arabidopsis thaliana
cgattagtcgctgcttt

SEQ ID NO: 78339 - DNA, 17 bp, Arabidopsis thaliana
cgattagtctgatcggt

SEQ ID NO: 78340 - DNA, 17 bp, Arabidopsis thaliana
cgattagtggtaggacg

SEQ ID NO: 78341 - DNA, 17 bp, Arabidopsis thaliana
cgattagttgctgcttt

SEQ ID NO: 78342 - DNA, 17 bp, Arabidopsis thaliana
cgattataactgtgtgg

SEQ ID NO: 78343 - DNA, 17 bp, Arabidopsis thaliana
cgattatagacgtccag

SEQ ID NO: 78344 - DNA, 17 bp, Arabidopsis thaliana
cgattatcaactggtga

SEQ ID NO: 78345 - DNA, 17 bp, Arabidopsis thaliana
cgattatcattacgttt

SEQ ID NO: 78346 - DNA, 17 bp, Arabidopsis thaliana
cgattattccagtgatg

SEQ ID NO: 78347 - DNA, 17 bp, Arabidopsis thaliana
cgattcaaatctggttc

SEQ ID NO: 78348 - DNA, 17 bp, Arabidopsis thaliana
cgattcaagtagaattg

SEQ ID NO: 78349 - DNA, 17 bp, Arabidopsis thaliana
cgattcacaggaccgag

SEQ ID NO: 78350 - DNA, 17 bp, Arabidopsis thaliana
cgattcacggtctgcgc

SEQ ID NO: 78351 - DNA, 17 bp, Arabidopsis thaliana
cgattcacgtcgggttc

SEQ ID NO: 78352 - DNA, 17 bp, Arabidopsis thaliana
cgattcagatgatggct

SEQ ID NO: 78353 - DNA, 17 bp, Arabidopsis thaliana
cgattcagatttgtacc

SEQ ID NO: 78354 - DNA, 17 bp, Arabidopsis thaliana
cgattcaggcaggtcgg

SEQ ID NO: 78355 - DNA, 17 bp, Arabidopsis thaliana
cgattcagggcgtggac

SEQ ID NO: 78356 - DNA, 17 bp, Arabidopsis thaliana
cgattcagtcatttacc

SEQ ID NO: 78357 - DNA, 17 bp, Arabidopsis thaliana
cgattcagtcgccaaac

SEQ ID NO: 78358 - DNA, 17 bp, Arabidopsis thaliana
cgattcagtgacggggt

SEQ ID NO: 78359 - DNA, 17 bp, Arabidopsis thaliana
cgattcagtgtgagacg

SEQ ID NO: 78360 - DNA, 17 bp, Arabidopsis thaliana
cgattcagttatgtgag

SEQ ID NO: 78361 - DNA, 17 bp, Arabidopsis thaliana
cgattcataaactaggg

SEQ ID NO: 78362 - DNA, 17 bp, Arabidopsis thaliana
cgattcatgataactcg

SEQ ID NO: 78363 - DNA, 17 bp, Arabidopsis thaliana
cgattcatgtgggctga

SEQ ID NO: 78364 - DNA, 17 bp, Arabidopsis thaliana
cgattccagtttcggtt

SEQ ID NO: 78365 - DNA, 17 bp, Arabidopsis thaliana
cgattccatcatcttgc

SEQ ID NO: 78366 - DNA, 17 bp, Arabidopsis thaliana
cgattccccgcacctcc

SEQ ID NO: 78367 - DNA, 17 bp, Arabidopsis thaliana
cgattcccgattggctc

SEQ ID NO: 78368 - DNA, 17 bp, Arabidopsis thaliana
cgattcccgctacccac

SEQ ID NO: 78369 - DNA, 17 bp, Arabidopsis thaliana
cgattcccgctaccccc

SEQ ID NO: 78370 - DNA, 17 bp, Arabidopsis thaliana
cgattcccgctacccgc

SEQ ID NO: 78371 - DNA, 17 bp, Arabidopsis thaliana
cgattcccgctatccac

SEQ ID NO: 78372 - DNA, 17 bp, Arabidopsis thaliana
cgattcccgctatccgc

SEQ ID NO: 78373 - DNA, 17 bp, Arabidopsis thaliana
cgattcccgctatctgc

SEQ ID NO: 78374 - DNA, 17 bp, Arabidopsis thaliana
cgattcccggctggtgc

SEQ ID NO: 78375 - DNA, 17 bp, Arabidopsis thaliana
cgattcccggctggttc

SEQ ID NO: 78376 - DNA, 17 bp, Arabidopsis thaliana
cgattccgagttcgaga

SEQ ID NO: 78377 - DNA, 17 bp, Arabidopsis thaliana
cgattccgagttcgtga

SEQ ID NO: 78378 - DNA, 17 bp, Arabidopsis thaliana
cgattccgatagccggc

SEQ ID NO: 78379 - DNA, 17 bp, Arabidopsis thaliana
cgattccggagagggaa

SEQ ID NO: 78380 - DNA, 17 bp, Arabidopsis thaliana
cgattccggagagggag

SEQ ID NO: 78381 - DNA, 17 bp, Arabidopsis thaliana
cgattccggcaggtcgg

SEQ ID NO: 78382 - DNA, 17 bp, Arabidopsis thaliana
cgattccggcaggtctg

SEQ ID NO: 78383 - DNA, 17 bp, Arabidopsis thaliana
cgattcctcggacccga

SEQ ID NO: 78384 - DNA, 17 bp, Arabidopsis thaliana
cgattcctgacgcatgg

SEQ ID NO: 78385 - DNA, 17 bp, Arabidopsis thaliana
cgattcctgtgttgaga

SEQ ID NO: 78386 - DNA, 17 bp, Arabidopsis thaliana
cgattccttgcccgccg

SEQ ID NO: 78387 - DNA, 17 bp, Arabidopsis thaliana
cgattcgactaatgcca

SEQ ID NO: 78388 - DNA, 17 bp, Arabidopsis thaliana
cgattcgactatgtgac

SEQ ID NO: 78389 - DNA, 17 bp, Arabidopsis thaliana
cgattcgacttattgta

SEQ ID NO: 78390 - DNA, 17 bp, Arabidopsis thaliana
cgattcgagtgacgctt

SEQ ID NO: 78391 - DNA, 17 bp, Arabidopsis thaliana
cgattcgcaggtttcag

SEQ ID NO: 78392 - DNA, 17 bp, Arabidopsis thaliana
cgattcgccaggtttca

SEQ ID NO: 78393 - DNA, 17 bp, Arabidopsis thaliana
cgattcgcgaactcgac

SEQ ID NO: 78394 - DNA, 17 bp, Arabidopsis thaliana
cgattcggacgaccggg

SEQ ID NO: 78395 - DNA, 17 bp, Arabidopsis thaliana
cgattcggacggccggg

SEQ ID NO: 78396 - DNA, 17 bp, Arabidopsis thaliana
cgattcggatattggtt

SEQ ID NO: 78397 - DNA, 17 bp, Arabidopsis thaliana
cgattcggattctgcga

SEQ ID NO: 78398 - DNA, 17 bp, Arabidopsis thaliana
cgattcggggcgtgcac

SEQ ID NO: 78399 - DNA, 17 bp, Arabidopsis thaliana
cgattcggggcgtggac

SEQ ID NO: 78400 - DNA, 17 bp, Arabidopsis thaliana
cgattcggggcgtggcc

SEQ ID NO: 78401 - DNA, 17 bp, Arabidopsis thaliana
cgattcggggcgtgggc

SEQ ID NO: 78402 - DNA, 17 bp, Arabidopsis thaliana
cgattcgggtttcggat

SEQ ID NO: 78403 - DNA, 17 bp, Arabidopsis thaliana
cgattcggttaactggt

SEQ ID NO: 78404 - DNA, 17 bp, Arabidopsis thaliana
cgattcggttccagttc

SEQ ID NO: 78405 - DNA, 17 bp, Arabidopsis thaliana
cgattcggttgcttgac

SEQ ID NO: 78406 - DNA, 17 bp, Arabidopsis thaliana
cgattcgtcgtgtttat

SEQ ID NO: 78407 - DNA, 17 bp, Arabidopsis thaliana
cgattcgtttccggcag

SEQ ID NO: 78408 - DNA, 17 bp, Arabidopsis thaliana
cgattctacctttggtg

SEQ ID NO: 78409 - DNA, 17 bp, Arabidopsis thaliana
cgattctagatgatgga

SEQ ID NO: 78410 - DNA, 17 bp, Arabidopsis thaliana
cgattctagcgacatag

SEQ ID NO: 78411 - DNA, 17 bp, Arabidopsis thaliana
cgattctaggaaccggt

SEQ ID NO: 78412 - DNA, 17 bp, Arabidopsis thaliana
cgattctagtccgactt

SEQ ID NO: 78413 - DNA, 17 bp, Arabidopsis thaliana
cgattctatagagtgag

SEQ ID NO: 78414 - DNA, 17 bp, Arabidopsis thaliana
cgattctatggaactac

SEQ ID NO: 78415 - DNA, 17 bp, Arabidopsis thaliana
cgattctcactgtgacc

SEQ ID NO: 78416 - DNA, 17 bp, Arabidopsis thaliana
cgattctcagctttcac

SEQ ID NO: 78417 - DNA, 17 bp, Arabidopsis thaliana
cgattctcgaaatggca

SEQ ID NO: 78418 - DNA, 17 bp, Arabidopsis thaliana
cgattctcggaatgccc

SEQ ID NO: 78419 - DNA, 17 bp, Arabidopsis thaliana
cgattctctgccctctg

SEQ ID NO: 78420 - DNA, 17 bp, Arabidopsis thaliana
cgattctctgctggtgc

SEQ ID NO: 78421 - DNA, 17 bp, Arabidopsis thaliana
cgattctcttagggtta

SEQ ID NO: 78422 - DNA, 17 bp, Arabidopsis thaliana
cgattctgacgtggtat

SEQ ID NO: 78423 - DNA, 17 bp, Arabidopsis thaliana
cgattctgatcgcttgt

SEQ ID NO: 78424 - DNA, 17 bp, Arabidopsis thaliana
cgattctgcaggtaatg

SEQ ID NO: 78425 - DNA, 17 bp, Arabidopsis thaliana
cgattctgtccaactta

SEQ ID NO: 78426 - DNA, 17 bp, Arabidopsis thaliana
cgattcttccgattgtt

SEQ ID NO: 78427 - DNA, 17 bp, Arabidopsis thaliana
cgattcttctggtagga

SEQ ID NO: 78428 - DNA, 17 bp, Arabidopsis thaliana
cgattgaaatcttcaga

SEQ ID NO: 78429 - DNA, 17 bp, Arabidopsis thaliana
cgattgaatccggtgaa

SEQ ID NO: 78430 - DNA, 17 bp, Arabidopsis thaliana
cgattgaatgatccgat

SEQ ID NO: 78431 - DNA, 17 bp, Arabidopsis thaliana
cgattgaatgatccggt

SEQ ID NO: 78432 - DNA, 17 bp, Arabidopsis thaliana
cgattgaccactctaat

SEQ ID NO: 78433 - DNA, 17 bp, Arabidopsis thaliana
cgattgaccgacattcg

SEQ ID NO: 78434 - DNA, 17 bp, Arabidopsis thaliana
cgattgacttgacatgt

SEQ ID NO: 78435 - DNA, 17 bp, Arabidopsis thaliana
cgattgactttttgtcg

SEQ ID NO: 78436 - DNA, 17 bp, Arabidopsis thaliana
cgattgagaatagttca

SEQ ID NO: 78437 - DNA, 17 bp, Arabidopsis thaliana
cgattgaggctctgtgc

SEQ ID NO: 78438 - DNA, 17 bp, Arabidopsis thaliana
cgattgaggtttccatg

SEQ ID NO: 78439 - DNA, 17 bp, Arabidopsis thaliana
cgattgagtcttgtata

SEQ ID NO: 78440 - DNA, 17 bp, Arabidopsis thaliana
cgattgagtcttgtatt

SEQ ID NO: 78441 - DNA, 17 bp, Arabidopsis thaliana
cgattgatacatcaggg

SEQ ID NO: 78442 - DNA, 17 bp, Arabidopsis thaliana
cgattgatcagcgaggt

SEQ ID NO: 78443 - DNA, 17 bp, Arabidopsis thaliana
cgattgatctaaacgtt

SEQ ID NO: 78444 - DNA, 17 bp, Arabidopsis thaliana
cgattgatgaatcgtat

SEQ ID NO: 78445 - DNA, 17 bp, Arabidopsis thaliana
cgattgcatttctgact

SEQ ID NO: 78446 - DNA, 17 bp, Arabidopsis thaliana
cgattgccgaccctcac

SEQ ID NO: 78447 - DNA, 17 bp, Arabidopsis thaliana
cgattgccgaccctcag

SEQ ID NO: 78448 - DNA, 17 bp, Arabidopsis thaliana
cgattgccgaccctccc

SEQ ID NO: 78449 - DNA, 17 bp, Arabidopsis thaliana
cgattgccgaccctccg

SEQ ID NO: 78450 - DNA, 17 bp, Arabidopsis thaliana
cgattgccgaccttcag

SEQ ID NO: 78451 - DNA, 17 bp, Arabidopsis thaliana
cgattgcgataatcaca

SEQ ID NO: 78452 - DNA, 17 bp, Arabidopsis thaliana
cgattgcggatcgatct

SEQ ID NO: 78453 - DNA, 17 bp, Arabidopsis thaliana
cgattgcggcgtagtag

SEQ ID NO: 78454 - DNA, 17 bp, Arabidopsis thaliana
cgattgcggttgcagga

SEQ ID NO: 78455 - DNA, 17 bp, Arabidopsis thaliana
cgattgcggtttaagtt

SEQ ID NO: 78456 - DNA, 17 bp, Arabidopsis thaliana
cgattgctacatacgat

SEQ ID NO: 78457 - DNA, 17 bp, Arabidopsis thaliana
cgattggacatcctccg

SEQ ID NO: 78458 - DNA, 17 bp, Arabidopsis thaliana
cgattggagatgaacgg

SEQ ID NO: 78459 - DNA, 17 bp, Arabidopsis thaliana
cgattggattaattgga

SEQ ID NO: 78460 - DNA, 17 bp, Arabidopsis thaliana
cgattggcggcgaccct

SEQ ID NO: 78461 - DNA, 17 bp, Arabidopsis thaliana
cgattggcggcgatcct

SEQ ID NO: 78462 - DNA, 17 bp, Arabidopsis thaliana
cgattgggcatttgtga

SEQ ID NO: 78463 - DNA, 17 bp, Arabidopsis thaliana
cgattggtaagtcaaag

SEQ ID NO: 78464 - DNA, 17 bp, Arabidopsis thaliana
cgattggtacgtctgca

SEQ ID NO: 78465 - DNA, 17 bp, Arabidopsis thaliana
cgattggtccagaaatt

SEQ ID NO: 78466 - DNA, 17 bp, Arabidopsis thaliana
cgattggttgacttgac

SEQ ID NO: 78467 - DNA, 17 bp, Arabidopsis thaliana
cgattggttgtgactgt

SEQ ID NO: 78468 - DNA, 17 bp, Arabidopsis thaliana
cgattgtaatcaacgtg

SEQ ID NO: 78469 - DNA, 17 bp, Arabidopsis thaliana
cgattgtaattccggac

SEQ ID NO: 78470 - DNA, 17 bp, Arabidopsis thaliana
cgattgtaccaggactt

SEQ ID NO: 78471 - DNA, 17 bp, Arabidopsis thaliana
cgattgtgaaaaccgat

SEQ ID NO: 78472 - DNA, 17 bp, Arabidopsis thaliana
cgattgtgaagcgacct

SEQ ID NO: 78473 - DNA, 17 bp, Arabidopsis thaliana
cgattgtggatcgtcat

SEQ ID NO: 78474 - DNA, 17 bp, Arabidopsis thaliana
cgattgttcagagctag

SEQ ID NO: 78475 - DNA, 17 bp, Arabidopsis thaliana
cgattgttttgactccg

SEQ ID NO: 78476 - DNA, 17 bp, Arabidopsis thaliana
cgatttaactgttgtcg

SEQ ID NO: 78477 - DNA, 17 bp, Arabidopsis thaliana
cgatttaactgttgttc

SEQ ID NO: 78478 - DNA, 17 bp, Arabidopsis thaliana
cgatttaactgttgttg

SEQ ID NO: 78479 - DNA, 17 bp, Arabidopsis thaliana
cgatttactgcaggtag

SEQ ID NO: 78480 - DNA, 17 bp, Arabidopsis thaliana
cgatttagtcgattagg

SEQ ID NO: 78481 - DNA, 17 bp, Arabidopsis thaliana
cgatttagttcatcgaa

SEQ ID NO: 78482 - DNA, 17 bp, Arabidopsis thaliana
cgatttatgaacacgat

SEQ ID NO: 78483 - DNA, 17 bp, Arabidopsis thaliana
cgatttatttaccatca

SEQ ID NO: 78484 - DNA, 17 bp, Arabidopsis thaliana
cgatttatttgacatgt

SEQ ID NO: 78485 - DNA, 17 bp, Arabidopsis thaliana
cgatttcaagtcctggt

SEQ ID NO: 78486 - DNA, 17 bp, Arabidopsis thaliana
cgatttcaccatgtttc

SEQ ID NO: 78487 - DNA, 17 bp, Arabidopsis thaliana
cgatttcactaggctcc

SEQ ID NO: 78488 - DNA, 17 bp, Arabidopsis thaliana
cgatttcactaggcttc

SEQ ID NO: 78489 - DNA, 17 bp, Arabidopsis thaliana
cgatttcaggagtgcag

SEQ ID NO: 78490 - DNA, 17 bp, Arabidopsis thaliana
cgatttcagtcgtcagc

SEQ ID NO: 78491 - DNA, 17 bp, Arabidopsis thaliana
cgatttcagtctgttga

SEQ ID NO: 78492 - DNA, 17 bp, Arabidopsis thaliana
cgatttcagttcctgct

SEQ ID NO: 78493 - DNA, 17 bp, Arabidopsis thaliana
cgatttccatctccatt

SEQ ID NO: 78494 - DNA, 17 bp, Arabidopsis thaliana
cgatttccctcttggca

SEQ ID NO: 78495 - DNA, 17 bp, Arabidopsis thaliana
cgatttccgccgttttg

SEQ ID NO: 78496 - DNA, 17 bp, Arabidopsis thaliana
cgatttccgctatccgc

SEQ ID NO: 78497 - DNA, 17 bp, Arabidopsis thaliana
cgatttcctatttgaag

SEQ ID NO: 78498 - DNA, 17 bp, Arabidopsis thaliana
cgatttcgagcggtcca

SEQ ID NO: 78499 - DNA, 17 bp, Arabidopsis thaliana
cgatttcgcgatctcgg

SEQ ID NO: 78500 - DNA, 17 bp, Arabidopsis thaliana
cgatttcgtcgatttga

SEQ ID NO: 78501 - DNA, 17 bp, Arabidopsis thaliana
cgatttctgacgtggca

SEQ ID NO: 78502 - DNA, 17 bp, Arabidopsis thaliana
cgatttctttcttcctg

SEQ ID NO: 78503 - DNA, 17 bp, Arabidopsis thaliana
cgatttgacatgcctgg

SEQ ID NO: 78504 - DNA, 17 bp, Arabidopsis thaliana
cgatttgacatttattt

SEQ ID NO: 78505 - DNA, 17 bp, Arabidopsis thaliana
cgatttgcccctgtttc

SEQ ID NO: 78506 - DNA, 17 bp, Arabidopsis thaliana
cgatttgcgaggaaaaa

SEQ ID NO: 78507 - DNA, 17 bp, Arabidopsis thaliana
cgatttgcgggtcggtc

SEQ ID NO: 78508 - DNA, 17 bp, Arabidopsis thaliana
cgatttggacaaattct

SEQ ID NO: 78509 - DNA, 17 bp, Arabidopsis thaliana
cgatttggagatcgata

SEQ ID NO: 78510 - DNA, 17 bp, Arabidopsis thaliana
cgatttggataatcagt

SEQ ID NO: 78511 - DNA, 17 bp, Arabidopsis thaliana
cgatttggccgtgtcaa

SEQ ID NO: 78512 - DNA, 17 bp, Arabidopsis thaliana
cgatttggctgggtcaa

SEQ ID NO: 78513 - DNA, 17 bp, Arabidopsis thaliana
cgatttggtcgattagg

SEQ ID NO: 78514 - DNA, 17 bp, Arabidopsis thaliana
cgatttggtgtgaattg

SEQ ID NO: 78515 - DNA, 17 bp, Arabidopsis thaliana
cgatttggtttcggcaa

SEQ ID NO: 78516 - DNA, 17 bp, Arabidopsis thaliana
cgatttgtctggttaat

SEQ ID NO: 78517 - DNA, 17 bp, Arabidopsis thaliana
cgattttacggttttgg

SEQ ID NO: 78518 - DNA, 17 bp, Arabidopsis thaliana
cgattttagcctccctc

SEQ ID NO: 78519 - DNA, 17 bp, Arabidopsis thaliana
cgattttagcctcgctc

SEQ ID NO: 78520 - DNA, 17 bp, Arabidopsis thaliana
cgattttaggctacatg

SEQ ID NO: 78521 - DNA, 17 bp, Arabidopsis thaliana
cgattttagttcctgct

SEQ ID NO: 78522 - DNA, 17 bp, Arabidopsis thaliana
cgattttatgacctcct

SEQ ID NO: 78523 - DNA, 17 bp, Arabidopsis thaliana
cgattttcaagctgggc

SEQ ID NO: 78524 - DNA, 17 bp, Arabidopsis thaliana
cgattttccggttcacg

SEQ ID NO: 78525 - DNA, 17 bp, Arabidopsis thaliana
cgattttcgacattggc

SEQ ID NO: 78526 - DNA, 17 bp, Arabidopsis thaliana
cgattttctcagtttgc

SEQ ID NO: 78527 - DNA, 17 bp, Arabidopsis thaliana
cgattttctggttcatg

SEQ ID NO: 78528 - DNA, 17 bp, Arabidopsis thaliana
cgattttgaggtcaagg

SEQ ID NO: 78529 - DNA, 17 bp, Arabidopsis thaliana
cgattttgagtttgtgg

SEQ ID NO: 78530 - DNA, 17 bp, Arabidopsis thaliana
cgattttgctccagaat

SEQ ID NO: 78531 - DNA, 17 bp, Arabidopsis thaliana
cgattttggcaaaacgg

SEQ ID NO: 78532 - DNA, 17 bp, Arabidopsis thaliana
cgattttggctgataca

SEQ ID NO: 78533 - DNA, 17 bp, Arabidopsis thaliana
cgattttgggtgcgggc

SEQ ID NO: 78534 - DNA, 17 bp, Arabidopsis thaliana
cgattttgggtgcggtc

SEQ ID NO: 78535 - DNA, 17 bp, Arabidopsis thaliana
cgattttgggtgcggtt

SEQ ID NO: 78536 - DNA, 17 bp, Arabidopsis thaliana
cgattttggttgcgatt

SEQ ID NO: 78537 - DNA, 17 bp, Arabidopsis thaliana
cgattttgtgatttgta

SEQ ID NO: 78538 - DNA, 17 bp, Arabidopsis thaliana
cgatttttccggatttt

SEQ ID NO: 78539 - DNA, 17 bp, Arabidopsis thaliana
cgatttttcggtctatg

SEQ ID NO: 78540 - DNA, 17 bp, Arabidopsis thaliana
cgatttttcgtcgcatg

SEQ ID NO: 78541 - DNA, 17 bp, Arabidopsis thaliana
cgatttttctcgcagtc

SEQ ID NO: 78542 - DNA, 17 bp, Arabidopsis thaliana
cgatttttgattttcct

SEQ ID NO: 78543 - DNA, 17 bp, Arabidopsis thaliana
cgatttttgggttctgg

SEQ ID NO: 78544 - DNA, 17 bp, Arabidopsis thaliana
cgatttttgtccgtata

SEQ ID NO: 78545 - DNA, 17 bp, Arabidopsis thaliana
cgattttttagccgcgg

SEQ ID NO: 78546 - DNA, 17 bp, Arabidopsis thaliana
cgcaaaactacttgtgg

SEQ ID NO: 78547 - DNA, 17 bp, Arabidopsis thaliana
cgcaaaactctattacg

SEQ ID NO: 78548 - DNA, 17 bp, Arabidopsis thaliana
cgcaaaactgcacttgt

SEQ ID NO: 78549 - DNA, 17 bp, Arabidopsis thaliana
cgcaaaatctgccatat

SEQ ID NO: 78550 - DNA, 17 bp, Arabidopsis thaliana
cgcaaaatttgcagggg

SEQ ID NO: 78551 - DNA, 17 bp, Arabidopsis thaliana
cgcaaacagatcttaaa

SEQ ID NO: 78552 - DNA, 17 bp, Arabidopsis thaliana
cgcaaacagggcagcac

SEQ ID NO: 78553 - DNA, 17 bp, Arabidopsis thaliana
cgcaaacccacggcgct

SEQ ID NO: 78554 - DNA, 17 bp, Arabidopsis thaliana
cgcaaacgcttgcggga

SEQ ID NO: 78555 - DNA, 17 bp, Arabidopsis thaliana
cgcaaacggatcttaaa

SEQ ID NO: 78556 - DNA, 17 bp, Arabidopsis thaliana
cgcaaacggatgttaaa

SEQ ID NO: 78557 - DNA, 17 bp, Arabidopsis thaliana
cgcaaactagccccgcg

SEQ ID NO: 78558 - DNA, 17 bp, Arabidopsis thaliana
cgcaaactcccgcaacc

SEQ ID NO: 78559 - DNA, 17 bp, Arabidopsis thaliana
cgcaaacttccgcagtc

SEQ ID NO: 78560 - DNA, 17 bp, Arabidopsis thaliana
cgcaaagatttgttatt

SEQ ID NO: 78561 - DNA, 17 bp, Arabidopsis thaliana
cgcaaagcccaacggtt

SEQ ID NO: 78562 - DNA, 17 bp, Arabidopsis thaliana
cgcaaagcgacggtaac

SEQ ID NO: 78563 - DNA, 17 bp, Arabidopsis thaliana
cgcaaagttcgtccacg

SEQ ID NO: 78564 - DNA, 17 bp, Arabidopsis thaliana
cgcaaagttgtgattcc

SEQ ID NO: 78565 - DNA, 17 bp, Arabidopsis thaliana
cgcaaagttttggctga

SEQ ID NO: 78566 - DNA, 17 bp, Arabidopsis thaliana
cgcaaatatagcccgtc

SEQ ID NO: 78567 - DNA, 17 bp, Arabidopsis thaliana
cgcaaatcaaggcggag

SEQ ID NO: 78568 - DNA, 17 bp, Arabidopsis thaliana
cgcaaatcagagtgctt

SEQ ID NO: 78569 - DNA, 17 bp, Arabidopsis thaliana
cgcaaatcgttactttg

SEQ ID NO: 78570 - DNA, 17 bp, Arabidopsis thaliana
cgcaaatcgttcttttc

SEQ ID NO: 78571 - DNA, 17 bp, Arabidopsis thaliana
cgcaaatgtcatgggtc

SEQ ID NO: 78572 - DNA, 17 bp, Arabidopsis thaliana
cgcaaattacccaatcc

SEQ ID NO: 78573 - DNA, 17 bp, Arabidopsis thaliana
cgcaacaaacctaagat

SEQ ID NO: 78574 - DNA, 17 bp, Arabidopsis thaliana
cgcaacaagatctgaaa

SEQ ID NO: 78575 - DNA, 17 bp, Arabidopsis thaliana
cgcaacaagatcttaaa

SEQ ID NO: 78576 - DNA, 17 bp, Arabidopsis thaliana
cgcaacacaggccgtgc

SEQ ID NO: 78577 - DNA, 17 bp, Arabidopsis thaliana
cgcaacacgatcttaaa

SEQ ID NO: 78578 - DNA, 17 bp, Arabidopsis thaliana
cgcaacagacgtccaca

SEQ ID NO: 78579 - DNA, 17 bp, Arabidopsis thaliana
cgcaacaggatctgaaa

SEQ ID NO: 78580 - DNA, 17 bp, Arabidopsis thaliana
cgcaacaggatcttaaa

SEQ ID NO: 78581 - DNA, 17 bp, Arabidopsis thaliana
cgcaacagtgctgtaac

SEQ ID NO: 78582 - DNA, 17 bp, Arabidopsis thaliana
cgcaacagtggtgtaac

SEQ ID NO: 78583 - DNA, 17 bp, Arabidopsis thaliana
cgcaacatgaatcggat

SEQ ID NO: 78584 - DNA, 17 bp, Arabidopsis thaliana
cgcaaccaaatcttaaa

SEQ ID NO: 78585 - DNA, 17 bp, Arabidopsis thaliana
cgcaaccagatcttaaa

SEQ ID NO: 78586 - DNA, 17 bp, Arabidopsis thaliana
cgcaaccagatcttaag

SEQ ID NO: 78587 - DNA, 17 bp, Arabidopsis thaliana
cgcaaccagatcttata

SEQ ID NO: 78588 - DNA, 17 bp, Arabidopsis thaliana
cgcaaccagatcttgta

SEQ ID NO: 78589 - DNA, 17 bp, Arabidopsis thaliana
cgcaaccagattttaaa

SEQ ID NO: 78590 - DNA, 17 bp, Arabidopsis thaliana
cgcaaccattgtttggt

SEQ ID NO: 78591 - DNA, 17 bp, Arabidopsis thaliana
cgcaacccgatcttaaa

SEQ ID NO: 78592 - DNA, 17 bp, Arabidopsis thaliana
cgcaacccgatcttaga

SEQ ID NO: 78593 - DNA, 17 bp, Arabidopsis thaliana
cgcaacccgatcttgca

SEQ ID NO: 78594 - DNA, 17 bp, Arabidopsis thaliana
cgcaacccgatcttgga

SEQ ID NO: 78595 - DNA, 17 bp, Arabidopsis thaliana
cgcaacccgatcttgta

SEQ ID NO: 78596 - DNA, 17 bp, Arabidopsis thaliana
cgcaacccgatcttgtg

SEQ ID NO: 78597 - DNA, 17 bp, Arabidopsis thaliana
cgcaaccgaatcttaaa

SEQ ID NO: 78598 - DNA, 17 bp, Arabidopsis thaliana
cgcaaccgaatcttcaa

SEQ ID NO: 78599 - DNA, 17 bp, Arabidopsis thaliana
cgcaaccgcaaccgcac

SEQ ID NO: 78600 - DNA, 17 bp, Arabidopsis thaliana
cgcaaccgcaaccgcat

SEQ ID NO: 78601 - DNA, 17 bp, Arabidopsis thaliana
cgcaaccgcacccgctg

SEQ ID NO: 78602 - DNA, 17 bp, Arabidopsis thaliana
cgcaaccggaccttaaa

SEQ ID NO: 78603 - DNA, 17 bp, Arabidopsis thaliana
cgcaaccggatattaaa

SEQ ID NO: 78604 - DNA, 17 bp, Arabidopsis thaliana
cgcaaccggatattaat

SEQ ID NO: 78605 - DNA, 17 bp, Arabidopsis thaliana
cgcaaccggatcataaa

SEQ ID NO: 78606 - DNA, 17 bp, Arabidopsis thaliana
cgcaaccggatctaaaa

SEQ ID NO: 78607 - DNA, 17 bp, Arabidopsis thaliana
cgcaaccggatctgaaa

SEQ ID NO: 78608 - DNA, 17 bp, Arabidopsis thaliana
cgcaaccggatcttaaa

SEQ ID NO: 78609 - DNA, 17 bp, Arabidopsis thaliana
cgcaaccggatcttaag

SEQ ID NO: 78610 - DNA, 17 bp, Arabidopsis thaliana
cgcaaccggatcttaat

SEQ ID NO: 78611 - DNA, 17 bp, Arabidopsis thaliana
cgcaaccggatcttaca

SEQ ID NO: 78612 - DNA, 17 bp, Arabidopsis thaliana
cgcaaccggatcttaga

SEQ ID NO: 78613 - DNA, 17 bp, Arabidopsis thaliana
cgcaaccggatcttata

SEQ ID NO: 78614 - DNA, 17 bp, Arabidopsis thaliana
cgcaaccggatcttcaa

SEQ ID NO: 78615 - DNA, 17 bp, Arabidopsis thaliana
cgcaaccggatcttgaa

SEQ ID NO: 78616 - DNA, 17 bp, Arabidopsis thaliana
cgcaaccggatctttaa

SEQ ID NO: 78617 - DNA, 17 bp, Arabidopsis thaliana
cgcaaccggattttaaa

SEQ ID NO: 78618 - DNA, 17 bp, Arabidopsis thaliana
cgcaaccggattttgat

SEQ ID NO: 78619 - DNA, 17 bp, Arabidopsis thaliana
cgcaaccggttcttaaa

SEQ ID NO: 78620 - DNA, 17 bp, Arabidopsis thaliana
cgcaaccgtatcttaaa

SEQ ID NO: 78621 - DNA, 17 bp, Arabidopsis thaliana
cgcaaccgtttggaccg

SEQ ID NO: 78622 - DNA, 17 bp, Arabidopsis thaliana
cgcaacctgatcttata

SEQ ID NO: 78623 - DNA, 17 bp, Arabidopsis thaliana
cgcaacctgattttgta

SEQ ID NO: 78624 - DNA, 17 bp, Arabidopsis thaliana
cgcaacctgtagatgaa

SEQ ID NO: 78625 - DNA, 17 bp, Arabidopsis thaliana
cgcaacctgtagatgga

SEQ ID NO: 78626 - DNA, 17 bp, Arabidopsis thaliana
cgcaacctgtaggatgg

SEQ ID NO: 78627 - DNA, 17 bp, Arabidopsis thaliana
cgcaacctttgtgcgac

SEQ ID NO: 78628 - DNA, 17 bp, Arabidopsis thaliana
cgcaacgaagtggctct

SEQ ID NO: 78629 - DNA, 17 bp, Arabidopsis thaliana
cgcaacgagcgcaaccc

SEQ ID NO: 78630 - DNA, 17 bp, Arabidopsis thaliana
cgcaacgaggacgttac

SEQ ID NO: 78631 - DNA, 17 bp, Arabidopsis thaliana
cgcaacgggatcgtaaa

SEQ ID NO: 78632 - DNA, 17 bp, Arabidopsis thaliana
cgcaacggtttattatc

SEQ ID NO: 78633 - DNA, 17 bp, Arabidopsis thaliana
cgcaactacctgcggct

SEQ ID NO: 78634 - DNA, 17 bp, Arabidopsis thaliana
cgcaactagatcttaaa

SEQ ID NO: 78635 - DNA, 17 bp, Arabidopsis thaliana
cgcaactcgatcttaat

SEQ ID NO: 78636 - DNA, 17 bp, Arabidopsis thaliana
cgcaactcgatgttaaa

SEQ ID NO: 78637 - DNA, 17 bp, Arabidopsis thaliana
cgcaactgatcttagga

SEQ ID NO: 78638 - DNA, 17 bp, Arabidopsis thaliana
cgcaactggatcataaa

SEQ ID NO: 78639 - DNA, 17 bp, Arabidopsis thaliana
cgcaactggatcttaaa

SEQ ID NO: 78640 - DNA, 17 bp, Arabidopsis thaliana
cgcaactggatcttaat

SEQ ID NO: 78641 - DNA, 17 bp, Arabidopsis thaliana
cgcaactggatcttaga

SEQ ID NO: 78642 - DNA, 17 bp, Arabidopsis thaliana
cgcaactggatctttaa

SEQ ID NO: 78643 - DNA, 17 bp, Arabidopsis thaliana
cgcaactggatgttaaa

SEQ ID NO: 78644 - DNA, 17 bp, Arabidopsis thaliana
cgcaactgtttggacca

SEQ ID NO: 78645 - DNA, 17 bp, Arabidopsis thaliana
cgcaacttgatcttaaa

SEQ ID NO: 78646 - DNA, 17 bp, Arabidopsis thaliana
cgcaacttttggacact

SEQ ID NO: 78647 - DNA, 17 bp, Arabidopsis thaliana
cgcaagaatctagggat

SEQ ID NO: 78648 - DNA, 17 bp, Arabidopsis thaliana
cgcaagacaaatattgg

SEQ ID NO: 78649 - DNA, 17 bp, Arabidopsis thaliana
cgcaagagaggtgctct

SEQ ID NO: 78650 - DNA, 17 bp, Arabidopsis thaliana
cgcaagatcatgtgttt

SEQ ID NO: 78651 - DNA, 17 bp, Arabidopsis thaliana
cgcaagatttttagcgt

SEQ ID NO: 78652 - DNA, 17 bp, Arabidopsis thaliana
cgcaagctgttctgaag

SEQ ID NO: 78653 - DNA, 17 bp, Arabidopsis thaliana
cgcaagctgttctgacg

SEQ ID NO: 78654 - DNA, 17 bp, Arabidopsis thaliana
cgcaagcttgtggatgg

SEQ ID NO: 78655 - DNA, 17 bp, Arabidopsis thaliana
cgcaaggaagctgattg

SEQ ID NO: 78656 - DNA, 17 bp, Arabidopsis thaliana
cgcaaggactaccatac

SEQ ID NO: 78657 - DNA, 17 bp, Arabidopsis thaliana
cgcaaggatttgttatt

SEQ ID NO: 78658 - DNA, 17 bp, Arabidopsis thaliana
cgcaaggctcataacct

SEQ ID NO: 78659 - DNA, 17 bp, Arabidopsis thaliana
cgcaaggtgatgatgag

SEQ ID NO: 78660 - DNA, 17 bp, Arabidopsis thaliana
cgcaaggttcgtccacg

SEQ ID NO: 78661 - DNA, 17 bp, Arabidopsis thaliana
cgcaagtagcgccccaa

SEQ ID NO: 78662 - DNA, 17 bp, Arabidopsis thaliana
cgcaagtgtttctttga

SEQ ID NO: 78663 - DNA, 17 bp, Arabidopsis thaliana
cgcaagttgaccttggc

SEQ ID NO: 78664 - DNA, 17 bp, Arabidopsis thaliana
cgcaagttgcgccccaa

SEQ ID NO: 78665 - DNA, 17 bp, Arabidopsis thaliana
cgcaagttgtccttggc

SEQ ID NO: 78666 - DNA, 17 bp, Arabidopsis thaliana
cgcaataaatttgatcc

SEQ ID NO: 78667 - DNA, 17 bp, Arabidopsis thaliana
cgcaatagttgcttcga

SEQ ID NO: 78668 - DNA, 17 bp, Arabidopsis thaliana
cgcaatagtttgcagga

SEQ ID NO: 78669 - DNA, 17 bp, Arabidopsis thaliana
cgcaatatctacttccc

SEQ ID NO: 78670 - DNA, 17 bp, Arabidopsis thaliana
cgcaatatctacttgat

SEQ ID NO: 78671 - DNA, 17 bp, Arabidopsis thaliana
cgcaatcaccattcgga

SEQ ID NO: 78672 - DNA, 17 bp, Arabidopsis thaliana
cgcaatcagatcttaaa

SEQ ID NO: 78673 - DNA, 17 bp, Arabidopsis thaliana
cgcaatccaggtgttaa

SEQ ID NO: 78674 - DNA, 17 bp, Arabidopsis thaliana
cgcaatcccccgtggcg

SEQ ID NO: 78675 - DNA, 17 bp, Arabidopsis thaliana
cgcaatccgtcagccgt

SEQ ID NO: 78676 - DNA, 17 bp, Arabidopsis thaliana
cgcaatcctgtagatgg

SEQ ID NO: 78677 - DNA, 17 bp, Arabidopsis thaliana
cgcaatcggatcttaaa

SEQ ID NO: 78678 - DNA, 17 bp, Arabidopsis thaliana
cgcaatcggctagcatt

SEQ ID NO: 78679 - DNA, 17 bp, Arabidopsis thaliana
cgcaatcgtaactgcac

SEQ ID NO: 78680 - DNA, 17 bp, Arabidopsis thaliana
cgcaatcgtttggacca

SEQ ID NO: 78681 - DNA, 17 bp, Arabidopsis thaliana
cgcaatctgggaagcag

SEQ ID NO: 78682 - DNA, 17 bp, Arabidopsis thaliana
cgcaatctgtgcagtgc

SEQ ID NO: 78683 - DNA, 17 bp, Arabidopsis thaliana
cgcaatctgtgcgattg

SEQ ID NO: 78684 - DNA, 17 bp, Arabidopsis thaliana
cgcaatgaagctgattg

SEQ ID NO: 78685 - DNA, 17 bp, Arabidopsis thaliana
cgcaatgcaccggatcg

SEQ ID NO: 78686 - DNA, 17 bp, Arabidopsis thaliana
cgcaatgccatttctgc

SEQ ID NO: 78687 - DNA, 17 bp, Arabidopsis thaliana
cgcaatggactatgatg

SEQ ID NO: 78688 - DNA, 17 bp, Arabidopsis thaliana
cgcaatggccactacaa

SEQ ID NO: 78689 - DNA, 17 bp, Arabidopsis thaliana
cgcaatggctatggatc

SEQ ID NO: 78690 - DNA, 17 bp, Arabidopsis thaliana
cgcaatgggcgaaagcc

SEQ ID NO: 78691 - DNA, 17 bp, Arabidopsis thaliana
cgcaatgggtgcgtaca

SEQ ID NO: 78692 - DNA, 17 bp, Arabidopsis thaliana
cgcaatggtaaacaagg

SEQ ID NO: 78693 - DNA, 17 bp, Arabidopsis thaliana
cgcaatggtttgttgtc

SEQ ID NO: 78694 - DNA, 17 bp, Arabidopsis thaliana
cgcaatgtgatttctgc

SEQ ID NO: 78695 - DNA, 17 bp, Arabidopsis thaliana
cgcaatgtgatttcttc

SEQ ID NO: 78696 - DNA, 17 bp, Arabidopsis thaliana
cgcaatgttgcgagtga

SEQ ID NO: 78697 - DNA, 17 bp, Arabidopsis thaliana
cgcaattgatttctgcc

SEQ ID NO: 78698 - DNA, 17 bp, Arabidopsis thaliana
cgcaattggatcttaaa

SEQ ID NO: 78699 - DNA, 17 bp, Arabidopsis thaliana
cgcaattgtgtgaggtc

SEQ ID NO: 78700 - DNA, 17 bp, Arabidopsis thaliana
cgcaattgttacatgct

SEQ ID NO: 78701 - DNA, 17 bp, Arabidopsis thaliana
cgcaatttgctacggat

SEQ ID NO: 78702 - DNA, 17 bp, Arabidopsis thaliana
cgcaatttgtagatctg

SEQ ID NO: 78703 - DNA, 17 bp, Arabidopsis thaliana
cgcacaagcggtggagc

SEQ ID NO: 78704 - DNA, 17 bp, Arabidopsis thaliana
cgcacaatgatccgttg

SEQ ID NO: 78705 - DNA, 17 bp, Arabidopsis thaliana
cgcacaatgcggttcga

SEQ ID NO: 78706 - DNA, 17 bp, Arabidopsis thaliana
cgcacaattccttccga

SEQ ID NO: 78707 - DNA, 17 bp, Arabidopsis thaliana
cgcacaattggtcatcg

SEQ ID NO: 78708 - DNA, 17 bp, Arabidopsis thaliana
cgcacagaatgctgcag

SEQ ID NO: 78709 - DNA, 17 bp, Arabidopsis thaliana
cgcacagaatgctgcat

SEQ ID NO: 78710 - DNA, 17 bp, Arabidopsis thaliana
cgcacagaccggtagac

SEQ ID NO: 78711 - DNA, 17 bp, Arabidopsis thaliana
cgcacagtagccgttga

SEQ ID NO: 78712 - DNA, 17 bp, Arabidopsis thaliana
cgcacatatgcatttgg

SEQ ID NO: 78713 - DNA, 17 bp, Arabidopsis thaliana
cgcacatgggttagtcg

SEQ ID NO: 78714 - DNA, 17 bp, Arabidopsis thaliana
cgcacatggtaggtgac

SEQ ID NO: 78715 - DNA, 17 bp, Arabidopsis thaliana
cgcaccaaaatcagtca

SEQ ID NO: 78716 - DNA, 17 bp, Arabidopsis thaliana
cgcaccacgaggcgctg

SEQ ID NO: 78717 - DNA, 17 bp, Arabidopsis thaliana
cgcaccagacagagcct

SEQ ID NO: 78718 - DNA, 17 bp, Arabidopsis thaliana
cgcaccaggaatgacag

SEQ ID NO: 78719 - DNA, 17 bp, Arabidopsis thaliana
cgcaccatccatcggtc

SEQ ID NO: 78720 - DNA, 17 bp, Arabidopsis thaliana
cgcaccatcggcggtcc

SEQ ID NO: 78721 - DNA, 17 bp, Arabidopsis thaliana
cgcaccatttgcgtgga

SEQ ID NO: 78722 - DNA, 17 bp, Arabidopsis thaliana
cgcacccagctgtcgac

SEQ ID NO: 78723 - DNA, 17 bp, Arabidopsis thaliana
cgcacccatgcctaatg

SEQ ID NO: 78724 - DNA, 17 bp, Arabidopsis thaliana
cgcacccgctggtttac

SEQ ID NO: 78725 - DNA, 17 bp, Arabidopsis thaliana
cgcacccggatcttaaa

SEQ ID NO: 78726 - DNA, 17 bp, Arabidopsis thaliana
cgcaccctgctgtcgac

SEQ ID NO: 78727 - DNA, 17 bp, Arabidopsis thaliana
cgcaccctgtagatgca

SEQ ID NO: 78728 - DNA, 17 bp, Arabidopsis thaliana
cgcaccctgtagatgga

SEQ ID NO: 78729 - DNA, 17 bp, Arabidopsis thaliana
cgcaccctgtaggatgg

SEQ ID NO: 78730 - DNA, 17 bp, Arabidopsis thaliana
cgcaccctgttagatgg

SEQ ID NO: 78731 - DNA, 17 bp, Arabidopsis thaliana
cgcaccgactgtcggac

SEQ ID NO: 78732 - DNA, 17 bp, Arabidopsis thaliana
cgcaccgcacttctccc

SEQ ID NO: 78733 - DNA, 17 bp, Arabidopsis thaliana
cgcaccgcactttatct

SEQ ID NO: 78734 - DNA, 17 bp, Arabidopsis thaliana
cgcaccgcactttttcc

SEQ ID NO: 78735 - DNA, 17 bp, Arabidopsis thaliana
cgcaccgccgtattttg

SEQ ID NO: 78736 - DNA, 17 bp, Arabidopsis thaliana
cgcaccgcttgatccgc

SEQ ID NO: 78737 - DNA, 17 bp, Arabidopsis thaliana
cgcacctcgatgtcggc

SEQ ID NO: 78738 - DNA, 17 bp, Arabidopsis thaliana
cgcacctcggagcgagt

SEQ ID NO: 78739 - DNA, 17 bp, Arabidopsis thaliana
cgcacctgctggtttac

SEQ ID NO: 78740 - DNA, 17 bp, Arabidopsis thaliana
cgcacctgtagatggat

SEQ ID NO: 78741 - DNA, 17 bp, Arabidopsis thaliana
cgcacctgtagattgga

SEQ ID NO: 78742 - DNA, 17 bp, Arabidopsis thaliana
cgcacctgttcacgatg

SEQ ID NO: 78743 - DNA, 17 bp, Arabidopsis thaliana
cgcaccttagctcagtt

SEQ ID NO: 78744 - DNA, 17 bp, Arabidopsis thaliana
cgcacctttcgtttcgc

SEQ ID NO: 78745 - DNA, 17 bp, Arabidopsis thaliana
cgcaccttttcttttcc

SEQ ID NO: 78746 - DNA, 17 bp, Arabidopsis thaliana
cgcacgaaaggcgtaac

SEQ ID NO: 78747 - DNA, 17 bp, Arabidopsis thaliana
cgcacgacttaacccta

SEQ ID NO: 78748 - DNA, 17 bp, Arabidopsis thaliana
cgcacgactttagattt

SEQ ID NO: 78749 - DNA, 17 bp, Arabidopsis thaliana
cgcacgcagtgggctag

SEQ ID NO: 78750 - DNA, 17 bp, Arabidopsis thaliana
cgcacgccgagtatgtc

SEQ ID NO: 78751 - DNA, 17 bp, Arabidopsis thaliana
cgcacgcctttaagatc

SEQ ID NO: 78752 - DNA, 17 bp, Arabidopsis thaliana
cgcacgcggattacggt

SEQ ID NO: 78753 - DNA, 17 bp, Arabidopsis thaliana
cgcacggcggtctgaca

SEQ ID NO: 78754 - DNA, 17 bp, Arabidopsis thaliana
cgcacggctattgaccg

SEQ ID NO: 78755 - DNA, 17 bp, Arabidopsis thaliana
cgcacggttctcactta

SEQ ID NO: 78756 - DNA, 17 bp, Arabidopsis thaliana
cgcacgtcgcgtggtgt

SEQ ID NO: 78757 - DNA, 17 bp, Arabidopsis thaliana
cgcacgtctccattcag

SEQ ID NO: 78758 - DNA, 17 bp, Arabidopsis thaliana
cgcacgtctgcctggat

SEQ ID NO: 78759 - DNA, 17 bp, Arabidopsis thaliana
cgcacgtctgcctggct

SEQ ID NO: 78760 - DNA, 17 bp, Arabidopsis thaliana
cgcacgtctgcctgggt

SEQ ID NO: 78761 - DNA, 17 bp, Arabidopsis thaliana
cgcacgtctgccttggt

SEQ ID NO: 78762 - DNA, 17 bp, Arabidopsis thaliana
cgcacgtgtgaactcgg

SEQ ID NO: 78763 - DNA, 17 bp, Arabidopsis thaliana
cgcactaaaatacttca

SEQ ID NO: 78764 - DNA, 17 bp, Arabidopsis thaliana
cgcactaactgcactcg

SEQ ID NO: 78765 - DNA, 17 bp, Arabidopsis thaliana
cgcactacatgcgggct

SEQ ID NO: 78766 - DNA, 17 bp, Arabidopsis thaliana
cgcactacttaatccgc

SEQ ID NO: 78767 - DNA, 17 bp, Arabidopsis thaliana
cgcactagctacgtgga

SEQ ID NO: 78768 - DNA, 17 bp, Arabidopsis thaliana
cgcactagctgcactcg

SEQ ID NO: 78769 - DNA, 17 bp, Arabidopsis thaliana
cgcactatgaatgtccg

SEQ ID NO: 78770 - DNA, 17 bp, Arabidopsis thaliana
cgcactatgtacgggtt

SEQ ID NO: 78771 - DNA, 17 bp, Arabidopsis thaliana
cgcactattgcaggtaa

SEQ ID NO: 78772 - DNA, 17 bp, Arabidopsis thaliana
cgcactcactcactcac

SEQ ID NO: 78773 - DNA, 17 bp, Arabidopsis thaliana
cgcactcactgcggcct

SEQ ID NO: 78774 - DNA, 17 bp, Arabidopsis thaliana
cgcactccaacttttgc

SEQ ID NO: 78775 - DNA, 17 bp, Arabidopsis thaliana
cgcactcgatcacaggg

SEQ ID NO: 78776 - DNA, 17 bp, Arabidopsis thaliana
cgcactcgttccgcata

SEQ ID NO: 78777 - DNA, 17 bp, Arabidopsis thaliana
cgcactctcggcaacgg

SEQ ID NO: 78778 - DNA, 17 bp, Arabidopsis thaliana
cgcactctttggagttg

SEQ ID NO: 78779 - DNA, 17 bp, Arabidopsis thaliana
cgcactgctaatggatg

SEQ ID NO: 78780 - DNA, 17 bp, Arabidopsis thaliana
cgcactggatctattgt

SEQ ID NO: 78781 - DNA, 17 bp, Arabidopsis thaliana
cgcactgtacggtttgg

SEQ ID NO: 78782 - DNA, 17 bp, Arabidopsis thaliana
cgcactgtagatggatc
